United States Patent Application Publication US 2005/0244851 A1 - sequence listing, part 11

SEQ ID NO: 398970 - DNA, 25 bp, Homo sapien
gtgaatgtcacacaactcagttccc

SEQ ID NO: 398971 - DNA, 25 bp, Homo sapien
actgacaaatacttcagcagccggc

SEQ ID NO: 398972 - DNA, 25 bp, Homo sapien
gtgctaactgaaggggccacgtgaa

SEQ ID NO: 398973 - DNA, 25 bp, Homo sapien
cagttccctgctggcgcaggacagc

SEQ ID NO: 398974 - DNA, 25 bp, Homo sapien
tccgctcccgacggcccgaggcgcg

SEQ ID NO: 398975 - DNA, 25 bp, Homo sapien
tggtcccgaggaggctccgctcccg

SEQ ID NO: 398976 - DNA, 25 bp, Homo sapien
gctccgctcccgacggcccgaggcg

SEQ ID NO: 398977 - DNA, 25 bp, Homo sapien
cgctcccgacggcccgaggcgcggg

SEQ ID NO: 398978 - DNA, 25 bp, Homo sapien
gatccgttcggttgccagcagtgga

SEQ ID NO: 398979 - DNA, 25 bp, Homo sapien
ccacagagggccgatccgttcggtt

SEQ ID NO: 398980 - DNA, 25 bp, Homo sapien
ggccgatccgttcggttgccagcag

SEQ ID NO: 398981 - DNA, 25 bp, Homo sapien
tgcggctccacagagggccgatccg

SEQ ID NO: 398982 - DNA, 25 bp, Homo sapien
taacagaattgaccagccttaagct

SEQ ID NO: 398983 - DNA, 25 bp, Homo sapien
ttataagtgaaagtggcaacattgc

SEQ ID NO: 398984 - DNA, 25 bp, Homo sapien
ttcagaccacaaaggagtaaagtta

SEQ ID NO: 398985 - DNA, 25 bp, Homo sapien
taaaaacttgttcgacagtgaaagc

SEQ ID NO: 398986 - DNA, 25 bp, Homo sapien
tgcagggattggagtgccgccctct

SEQ ID NO: 398987 - DNA, 25 bp, Homo sapien
tgctgctggctccgcagagtggggc

SEQ ID NO: 398988 - DNA, 25 bp, Homo sapien
tggttcagagcgtgcagttccaggg

SEQ ID NO: 398989 - DNA, 25 bp, Homo sapien
tgggaggagtgtccaagcaccggga

SEQ ID NO: 398990 - DNA, 25 bp, Homo sapien
tggcagcacctgtggccctgaagtc

SEQ ID NO: 398991 - DNA, 25 bp, Homo sapien
ttggcagcacctgtggccctgaagt

SEQ ID NO: 398992 - DNA, 25 bp, Homo sapien
cttggcagcacctgtggccctgaag

SEQ ID NO: 398993 - DNA, 25 bp, Homo sapien
tctcggtagtgtccggcgagatgac

SEQ ID NO: 398994 - DNA, 25 bp, Homo sapien
ctctcggtagtgtccggcgagatga

SEQ ID NO: 398995 - DNA, 25 bp, Homo sapien
tgtccggcgagatgacctcctgctg

SEQ ID NO: 398996 - DNA, 25 bp, Homo sapien
gtagtgtccggcgagatgacctcct

SEQ ID NO: 398997 - DNA, 25 bp, Homo sapien
actgcatggtgacgctctccgaggt

SEQ ID NO: 398998 - DNA, 25 bp, Homo sapien
tccacctggtcagagaagtgcaggc

SEQ ID NO: 398999 - DNA, 25 bp, Homo sapien
agaactcgttctgcagctggctgat

SEQ ID NO: 399000 - DNA, 25 bp, Homo sapien
gaactgcggcacgaactgcttcatg

SEQ ID NO: 399001 - DNA, 25 bp, Homo sapien
agtcggcagcctggcgcggtcatct

SEQ ID NO: 399002 - DNA, 25 bp, Homo sapien
agcctggcgcggtcatctctgctgg

SEQ ID NO: 399003 - DNA, 25 bp, Homo sapien
gcctggaggcgccaggagtcggcag

SEQ ID NO: 399004 - DNA, 25 bp, Homo sapien
cagcctggaggcgccaggagtcggc

SEQ ID NO: 399005 - DNA, 25 bp, Homo sapien
cccagggatttccaggcagctcacc

SEQ ID NO: 399006 - DNA, 25 bp, Homo sapien
ccagagggcccagggatttccaggc

SEQ ID NO: 399007 - DNA, 25 bp, Homo sapien
gggatttccaggcagctcaccttgt

SEQ ID NO: 399008 - DNA, 25 bp, Homo sapien
cttctgtccacggtagcccttgggg

SEQ ID NO: 399009 - DNA, 25 bp, Homo sapien
ggctcacccatgttgcccttggcac

SEQ ID NO: 399010 - DNA, 25 bp, Homo sapien
tctcccggctcacccatgttgccct

SEQ ID NO: 399011 - DNA, 25 bp, Homo sapien
ccggctcacccatgttgcccttggc

SEQ ID NO: 399012 - DNA, 25 bp, Homo sapien
tcccggctcacccatgttgcccttg

SEQ ID NO: 399013 - DNA, 25 bp, Homo sapien
tgggtcctgggaatccaatggggcc

SEQ ID NO: 399014 - DNA, 25 bp, Homo sapien
tgggaatccaatggggccttcgatg

SEQ ID NO: 399015 - DNA, 25 bp, Homo sapien
tccaatggggccttcgatgcccggg

SEQ ID NO: 399016 - DNA, 25 bp, Homo sapien
caatggggccttcgatgcccgggtc

SEQ ID NO: 399017 - DNA, 25 bp, Homo sapien
ttctctcctttgaagccaggaacgc

SEQ ID NO: 399018 - DNA, 25 bp, Homo sapien
tctctcctttgaagccaggaacgcc

SEQ ID NO: 399019 - DNA, 25 bp, Homo sapien
cttctctcctttgaagccaggaacg

SEQ ID NO: 399020 - DNA, 25 bp, Homo sapien
cttgcgaccgtcggctccaaattca

SEQ ID NO: 399021 - DNA, 25 bp, Homo sapien
tgcgaccgtcggctccaaattcacc

SEQ ID NO: 399022 - DNA, 25 bp, Homo sapien
ttgcgaccgtcggctccaaattcac

SEQ ID NO: 399023 - DNA, 25 bp, Homo sapien
cttctgtccatcggtcccgttcttg

SEQ ID NO: 399024 - DNA, 25 bp, Homo sapien
tccatcggtcccgttcttgccagcc

SEQ ID NO: 399025 - DNA, 25 bp, Homo sapien
atcggtcccgttcttgccagccagg

SEQ ID NO: 399026 - DNA, 25 bp, Homo sapien
tgtccatcggtcccgttcttgccag

SEQ ID NO: 399027 - DNA, 25 bp, Homo sapien
catgaattagatgcaggctggtgaa

SEQ ID NO: 399028 - DNA, 25 bp, Homo sapien
ggagtgggtaggcttgttgctggcc

SEQ ID NO: 399029 - DNA, 25 bp, Homo sapien
gtaggcttgttgctggcctctgtgt

SEQ ID NO: 399030 - DNA, 25 bp, Homo sapien
gccgggatgtgcagccatgaattag

SEQ ID NO: 399031 - DNA, 25 bp, Homo sapien
ccaggaggtccgatgcgccccagct

SEQ ID NO: 399032 - DNA, 25 bp, Homo sapien
cttgcagccaggaggtccgatgcgc

SEQ ID NO: 399033 - DNA, 25 bp, Homo sapien
aggaggtccgatgcgccccagcttg

SEQ ID NO: 399034 - DNA, 25 bp, Homo sapien
tgcagccaggaggtccgatgcgccc

SEQ ID NO: 399035 - DNA, 25 bp, Homo sapien
cgctcccctggactccctgcttccc

SEQ ID NO: 399036 - DNA, 25 bp, Homo sapien
ctcgctcccctggactccctgcttc

SEQ ID NO: 399037 - DNA, 25 bp, Homo sapien
tcctcgctcccctggactccctgct

SEQ ID NO: 399038 - DNA, 25 bp, Homo sapien
cttgccgccttggtctcctcgctcc

SEQ ID NO: 399039 - DNA, 25 bp, Homo sapien
cgggggccctctgcgtcctgggcgg

SEQ ID NO: 399040 - DNA, 25 bp, Homo sapien
cttgcttcccttggccccgatttct

SEQ ID NO: 399041 - DNA, 25 bp, Homo sapien
cgatttctcccgggggccctctgcg

SEQ ID NO: 399042 - DNA, 25 bp, Homo sapien
tgcgtcctgggcggccagggtcccc

SEQ ID NO: 399043 - DNA, 25 bp, Homo sapien
gggctccactgttgccttgataccc

SEQ ID NO: 399044 - DNA, 25 bp, Homo sapien
tggggctccactgttgccttgatac

SEQ ID NO: 399045 - DNA, 25 bp, Homo sapien
ggggctccactgttgccttgatacc

SEQ ID NO: 399046 - DNA, 25 bp, Homo sapien
ctggggctccactgttgccttgata

SEQ ID NO: 399047 - DNA, 25 bp, Homo sapien
ccccttggggccatcgctgcctggg

SEQ ID NO: 399048 - DNA, 25 bp, Homo sapien
cccccttggggccatcgctgcctgg

SEQ ID NO: 399049 - DNA, 25 bp, Homo sapien
ctcccccttggggccatcgctgcct

SEQ ID NO: 399050 - DNA, 25 bp, Homo sapien
ccttggggccatcgctgcctgggct

SEQ ID NO: 399051 - DNA, 25 bp, Homo sapien
cacccctgaggtcacgtgggtgagc

SEQ ID NO: 399052 - DNA, 25 bp, Homo sapien
atgtcaaggggagctggtggccggg

SEQ ID NO: 399053 - DNA, 25 bp, Homo sapien
tcacgtgggtgagcaatgcctcagt

SEQ ID NO: 399054 - DNA, 25 bp, Homo sapien
ccctgaggtcacgtgggtgagcaat

SEQ ID NO: 399055 - DNA, 25 bp, Homo sapien
tcctttgttgccaacctctccagcc

SEQ ID NO: 399056 - DNA, 25 bp, Homo sapien
ggctcctttgttgccaacctctcca

SEQ ID NO: 399057 - DNA, 25 bp, Homo sapien
cttggctcctttgttgccaacctct

SEQ ID NO: 399058 - DNA, 25 bp, Homo sapien
tttgttgccaacctctccagccagg

SEQ ID NO: 399059 - DNA, 25 bp, Homo sapien
ctgctttccgggctccccaagagct

SEQ ID NO: 399060 - DNA, 25 bp, Homo sapien
tccctgggggcctctgggtccaggc

SEQ ID NO: 399061 - DNA, 25 bp, Homo sapien
cccaagagctccctgggggcctctg

SEQ ID NO: 399062 - DNA, 25 bp, Homo sapien
ctgggggcctctgggtccaggcaag

SEQ ID NO: 399063 - DNA, 25 bp, Homo sapien
tgcatcaccggggtctccccgagat

SEQ ID NO: 399064 - DNA, 25 bp, Homo sapien
ggcctggctgtcctgagtctccacg

SEQ ID NO: 399065 - DNA, 25 bp, Homo sapien
cctgagtctccacggggtcctgcat

SEQ ID NO: 399066 - DNA, 25 bp, Homo sapien
ggtcctgcatcaccggggtctcccc

SEQ ID NO: 399067 - DNA, 25 bp, Homo sapien
ctgtgctcaacagggcgcaaggtgc

SEQ ID NO: 399068 - DNA, 25 bp, Homo sapien
ctggaggaggacgttgagtcggtca

SEQ ID NO: 399069 - DNA, 25 bp, Homo sapien
gagtcggtcagcatggtcataggac

SEQ ID NO: 399070 - DNA, 25 bp, Homo sapien
tcaacagggcgcaaggtgcacactg

SEQ ID NO: 399071 - DNA, 25 bp, Homo sapien
ggtcctgggtagctgaatccaggcc

SEQ ID NO: 399072 - DNA, 25 bp, Homo sapien
tcggggtcctgggtagctgaatcca

SEQ ID NO: 399073 - DNA, 25 bp, Homo sapien
tgaatccaggcctgccggggtctcc

SEQ ID NO: 399074 - DNA, 25 bp, Homo sapien
tgggtagctgaatccaggcctgccg

SEQ ID NO: 399075 - DNA, 25 bp, Homo sapien
ctcggggccgcgtgggccgggctcg

SEQ ID NO: 399076 - DNA, 25 bp, Homo sapien
tcggggccgcgtgggccgggctcgc

SEQ ID NO: 399077 - DNA, 25 bp, Homo sapien
tcctttcaagccaaagtcgcctcgg

SEQ ID NO: 399078 - DNA, 25 bp, Homo sapien
ctcctttcaagccaaagtcgcctcg

SEQ ID NO: 399079 - DNA, 25 bp, Homo sapien
cctttcaagccaaagtcgcctcggc

SEQ ID NO: 399080 - DNA, 25 bp, Homo sapien
ctttcaagccaaagtcgcctcggcc

SEQ ID NO: 399081 - DNA, 25 bp, Homo sapien
tctcctttctctcctttcctcccag

SEQ ID NO: 399082 - DNA, 25 bp, Homo sapien
ctcctttctctcctttcctcccagg

SEQ ID NO: 399083 - DNA, 25 bp, Homo sapien
aggctctcctttctctcctttcctc

SEQ ID NO: 399084 - DNA, 25 bp, Homo sapien
gctctcctttctctcctttcctccc

SEQ ID NO: 399085 - DNA, 25 bp, Homo sapien
ctcgggtcctgggactcctcttggc

SEQ ID NO: 399086 - DNA, 25 bp, Homo sapien
tcgggtcctgggactcctcttggcc

SEQ ID NO: 399087 - DNA, 25 bp, Homo sapien
tgtctagttttggcaggagaaggac

SEQ ID NO: 399088 - DNA, 25 bp, Homo sapien
ggtgtctagttttggcaggagaagg

SEQ ID NO: 399089 - DNA, 25 bp, Homo sapien
gtgtctagttttggcaggagaagga

SEQ ID NO: 399090 - DNA, 25 bp, Homo sapien
ccgcaggtctccctcacgtaggtca

SEQ ID NO: 399091 - DNA, 25 bp, Homo sapien
gcacccgcaggtctccctcacgtag

SEQ ID NO: 399092 - DNA, 25 bp, Homo sapien
acccgcaggtctccctcacgtaggt

SEQ ID NO: 399093 - DNA, 25 bp, Homo sapien
cgcaggtctccctcacgtaggtcat

SEQ ID NO: 399094 - DNA, 25 bp, Homo sapien
agacctcagaccctagggtcacgtg

SEQ ID NO: 399095 - DNA, 25 bp, Homo sapien
cgaccctgccgtgggcagtgcctca

SEQ ID NO: 399096 - DNA, 25 bp, Homo sapien
atgcaggacccagcgatgacccagc

SEQ ID NO: 399097 - DNA, 25 bp, Homo sapien
cctagggtcacgtgcacatgcagga

SEQ ID NO: 399098 - DNA, 25 bp, Homo sapien
tcgatgacgaagaccacgtccaggg

SEQ ID NO: 399099 - DNA, 25 bp, Homo sapien
tgtcgatgacgaagaccacgtccag

SEQ ID NO: 399100 - DNA, 25 bp, Homo sapien
atgacgaagaccacgtccagggcgc

SEQ ID NO: 399101 - DNA, 25 bp, Homo sapien
ctgtcgatgacgaagaccacgtcca

SEQ ID NO: 399102 - DNA, 25 bp, Homo sapien
tccagtgtgaagttggtgtacccaa

SEQ ID NO: 399103 - DNA, 25 bp, Homo sapien
cgttgatgacgaagttcttctccag

SEQ ID NO: 399104 - DNA, 25 bp, Homo sapien
cacccagcctgttgaccacgttgat

SEQ ID NO: 399105 - DNA, 25 bp, Homo sapien
gggtccttagcgatggcacccagcc

SEQ ID NO: 399106 - DNA, 25 bp, Homo sapien
gcaagttgaggtcatcgtcccgagg

SEQ ID NO: 399107 - DNA, 25 bp, Homo sapien
gacagcctccttgaagctcgacagg

SEQ ID NO: 399108 - DNA, 25 bp, Homo sapien
aatccactcgaggttcttgacagcc

SEQ ID NO: 399109 - DNA, 25 bp, Homo sapien
gatgaacttctcagcgaccaggtcg

SEQ ID NO: 399110 - DNA, 25 bp, Homo sapien
aaggtctgggcacacgatctgaggg

SEQ ID NO: 399111 - DNA, 25 bp, Homo sapien
gggaaggtctgggcacacgatctga

SEQ ID NO: 399112 - DNA, 25 bp, Homo sapien
aggtctgggcacacgatctgagggt

SEQ ID NO: 399113 - DNA, 25 bp, Homo sapien
gaaggtctgggcacacgatctgagg

SEQ ID NO: 399114 - DNA, 25 bp, Homo sapien
tgccccatcaggaacgagggggtgg

SEQ ID NO: 399115 - DNA, 25 bp, Homo sapien
ctgccccatcaggaacgagggggtg

SEQ ID NO: 399116 - DNA, 25 bp, Homo sapien
cccatcaggaacgagggggtgggtg

SEQ ID NO: 399117 - DNA, 25 bp, Homo sapien
ccatcaggaacgagggggtgggtgg

SEQ ID NO: 399118 - DNA, 25 bp, Homo sapien
gcccatcatggggtcccgagacttc

SEQ ID NO: 399119 - DNA, 25 bp, Homo sapien
ccatcgccatgtcgcccatcatggg

SEQ ID NO: 399120 - DNA, 25 bp, Homo sapien
cccacagtgaccatcgccatgtcgc

SEQ ID NO: 399121 - DNA, 25 bp, Homo sapien
catgtcgcccatcatggggtcccga

SEQ ID NO: 399122 - DNA, 25 bp, Homo sapien
gaaattcaatgacgctcaacgggct

SEQ ID NO: 399123 - DNA, 25 bp, Homo sapien
ggctcactccatgtcaccgtctggg

SEQ ID NO: 399124 - DNA, 25 bp, Homo sapien
gaaaagtgcaggctgatgtcgccga

SEQ ID NO: 399125 - DNA, 25 bp, Homo sapien
tcagggcccacgtgcataaacaggg

SEQ ID NO: 399126 - DNA, 25 bp, Homo sapien
cagcacaaaacagctccgtccaaac

SEQ ID NO: 399127 - DNA, 25 bp, Homo sapien
tcagcacaaaacagctccgtccaaa

SEQ ID NO: 399128 - DNA, 25 bp, Homo sapien
agacccgcacggtggcacctttggg

SEQ ID NO: 399129 - DNA, 25 bp, Homo sapien
ggtgtgtggctcggccttggcagga

SEQ ID NO: 399130 - DNA, 25 bp, Homo sapien
ggagctaggagacccgcacggtggc

SEQ ID NO: 399131 - DNA, 25 bp, Homo sapien
ctggcgagtcggtagaggaaatgca

SEQ ID NO: 399132 - DNA, 25 bp, Homo sapien
cggtgggcgtcggcctagagctcct

SEQ ID NO: 399133 - DNA, 25 bp, Homo sapien
tcctgcgtgagctccgtggcgttta

SEQ ID NO: 399134 - DNA, 25 bp, Homo sapien
taaaggtgtcaatgaacagctccat

SEQ ID NO: 399135 - DNA, 25 bp, Homo sapien
aacttggcccgctcggcggtgtaga

SEQ ID NO: 399136 - DNA, 25 bp, Homo sapien
gctctaccccggtggcgaacttggc

SEQ ID NO: 399137 - DNA, 25 bp, Homo sapien
cagagggccagcgcggtctcggggt

SEQ ID NO: 399138 - DNA, 25 bp, Homo sapien
ttagcagagggccagcgcggtctcg

SEQ ID NO: 399139 - DNA, 25 bp, Homo sapien
gagggccagcgcggtctcggggtcc

SEQ ID NO: 399140 - DNA, 25 bp, Homo sapien
agcagagggccagcgcggtctcggg

SEQ ID NO: 399141 - DNA, 25 bp, Homo sapien
gcccagatacgtcatggtgccagga

SEQ ID NO: 399142 - DNA, 25 bp, Homo sapien
aggttgtgcctggtggatgctcccc

SEQ ID NO: 399143 - DNA, 25 bp, Homo sapien
tgagggtgacctgatgcagcaaaga

SEQ ID NO: 399144 - DNA, 25 bp, Homo sapien
caaagaaggactctgcagacgggag

SEQ ID NO: 399145 - DNA, 25 bp, Homo sapien
agtgtctgtggggcctggaggagac

SEQ ID NO: 399146 - DNA, 25 bp, Homo sapien
ctctgtccattcatcagtgtctgtg

SEQ ID NO: 399147 - DNA, 25 bp, Homo sapien
tgtggggcctggaggagacggggaa

SEQ ID NO: 399148 - DNA, 25 bp, Homo sapien
tctctgtccattcatcagtgtctgt

SEQ ID NO: 399149 - DNA, 25 bp, Homo sapien
tcagtgagcttatgagtgacgcagc

SEQ ID NO: 399150 - DNA, 25 bp, Homo sapien
gacgtcgtcacagctggtacatgga

SEQ ID NO: 399151 - DNA, 25 bp, Homo sapien
cacagaacgcttgagacatggacgc

SEQ ID NO: 399152 - DNA, 25 bp, Homo sapien
tctgaacacagcagggtgacctcac

SEQ ID NO: 399153 - DNA, 25 bp, Homo sapien
tatgactctgttaccaagtggggcc

SEQ ID NO: 399154 - DNA, 25 bp, Homo sapien
tgactctgttaccaagtggggcccc

SEQ ID NO: 399155 - DNA, 25 bp, Homo sapien
gggttctgccctatgactctgttac

SEQ ID NO: 399156 - DNA, 25 bp, Homo sapien
tgggttctgccctatgactctgtta

SEQ ID NO: 399157 - DNA, 25 bp, Homo sapien
aaagcatcctttcatggctcaagaa

SEQ ID NO: 399158 - DNA, 25 bp, Homo sapien
tcagaacacctagagctggctgggc

SEQ ID NO: 399159 - DNA, 25 bp, Homo sapien
cagcctgacccctcaatcgctgggt

SEQ ID NO: 399160 - DNA, 25 bp, Homo sapien
tcccggaaagaccaggagcccctga

SEQ ID NO: 399161 - DNA, 25 bp, Homo sapien
ctgctgagcaccatccctgcacagg

SEQ ID NO: 399162 - DNA, 25 bp, Homo sapien
ccttagcccaagacactttcaggcg

SEQ ID NO: 399163 - DNA, 25 bp, Homo sapien
gggtccttagcccaagacactttca

SEQ ID NO: 399164 - DNA, 25 bp, Homo sapien
aagacactttcaggcggcactgctg

SEQ ID NO: 399165 - DNA, 25 bp, Homo sapien
tgtgcccttccattcgcaccctgcc

SEQ ID NO: 399166 - DNA, 25 bp, Homo sapien
cccttccattcgcaccctgcctgca

SEQ ID NO: 399167 - DNA, 25 bp, Homo sapien
cttccattcgcaccctgcctgcaac

SEQ ID NO: 399168 - DNA, 25 bp, Homo sapien
tgcccttccattcgcaccctgcctg

SEQ ID NO: 399169 - DNA, 25 bp, Homo sapien
ctgcgtgcactgtgccacggacagc

SEQ ID NO: 399170 - DNA, 25 bp, Homo sapien
gccgctgcgtgcactgtgccacgga

SEQ ID NO: 399171 - DNA, 25 bp, Homo sapien
acgggccgctgcgtgcactgtgcca

SEQ ID NO: 399172 - DNA, 25 bp, Homo sapien
tccacgggccgctgcgtgcactgtg

SEQ ID NO: 399173 - DNA, 25 bp, Homo sapien
cagcagcgccacgcgtgcgttgaga

SEQ ID NO: 399174 - DNA, 25 bp, Homo sapien
cgttgagagggtcgtcgtccctccg

SEQ ID NO: 399175 - DNA, 25 bp, Homo sapien
ccacgcgtgcgttgagagggtcgtc

SEQ ID NO: 399176 - DNA, 25 bp, Homo sapien
cgggccagcgtcagccgccgcgcca

SEQ ID NO: 399177 - DNA, 25 bp, Homo sapien
tgacgccgtccgtgaggaacacgaa

SEQ ID NO: 399178 - DNA, 25 bp, Homo sapien
cccacgtgcgagaaggagttcaggt

SEQ ID NO: 399179 - DNA, 25 bp, Homo sapien
gggtaccacgttctgcttgcgcatg

SEQ ID NO: 399180 - DNA, 25 bp, Homo sapien
gactcgtgcagactgtcgttgcccg

SEQ ID NO: 399181 - DNA, 25 bp, Homo sapien
ggctgtcatagtccttctcgtggaa

SEQ ID NO: 399182 - DNA, 25 bp, Homo sapien
tccagcggatgaagcggtcgaagaa

SEQ ID NO: 399183 - DNA, 25 bp, Homo sapien
gccgggttgcgccaggctgtcatag

SEQ ID NO: 399184 - DNA, 25 bp, Homo sapien
gcggtcgaagaagccgggttgcgcc

SEQ ID NO: 399185 - DNA, 25 bp, Homo sapien
ctcgactgcggggcccgggcggcgg

SEQ ID NO: 399186 - DNA, 25 bp, Homo sapien
cctcgactgcggggcccgggcggcg

SEQ ID NO: 399187 - DNA, 25 bp, Homo sapien
cgactgcggggcccgggcggcggcg

SEQ ID NO: 399188 - DNA, 25 bp, Homo sapien
tcgactgcggggcccgggcggcggc

SEQ ID NO: 399189 - DNA, 25 bp, Homo sapien
ggcccagggcgtcgtccgagtgagc

SEQ ID NO: 399190 - DNA, 25 bp, Homo sapien
gggcgtcgtccgagtgagcagcggt

SEQ ID NO: 399191 - DNA, 25 bp, Homo sapien
cgggcccgcttagcaccatggacgg

SEQ ID NO: 399192 - DNA, 25 bp, Homo sapien
tgctggccgtgtgggacccgggccc

SEQ ID NO: 399193 - DNA, 25 bp, Homo sapien
cctggggagacctggggctgggcgg

SEQ ID NO: 399194 - DNA, 25 bp, Homo sapien
gagggcctggggagacctggggctg

SEQ ID NO: 399195 - DNA, 25 bp, Homo sapien
ggcctggggagacctggggctgggc

SEQ ID NO: 399196 - DNA, 25 bp, Homo sapien
ctggggagacctggggctgggcggg

SEQ ID NO: 399197 - DNA, 25 bp, Homo sapien
ctgcagggggagggaggccgggcag

SEQ ID NO: 399198 - DNA, 25 bp, Homo sapien
tgcagggggagggaggccgggcagc

SEQ ID NO: 399199 - DNA, 25 bp, Homo sapien
tgctccagagctcaggggccaggta

SEQ ID NO: 399200 - DNA, 25 bp, Homo sapien
gccaggtaggtcaggagccttggga

SEQ ID NO: 399201 - DNA, 25 bp, Homo sapien
aggtaggtcaggagccttgggatgg

SEQ ID NO: 399202 - DNA, 25 bp, Homo sapien
gctccagagctcaggggccaggtag

SEQ ID NO: 399203 - DNA, 25 bp, Homo sapien
acagctccagcaggccgactgggcg

SEQ ID NO: 399204 - DNA, 25 bp, Homo sapien
ccacgggggcgaggaagttcctcat

SEQ ID NO: 399205 - DNA, 25 bp, Homo sapien
agagcgaacttgctcacagctccag

SEQ ID NO: 399206 - DNA, 25 bp, Homo sapien
tgggcgcccgactttggtcccagct

SEQ ID NO: 399207 - DNA, 25 bp, Homo sapien
gtaggtcacagtcacgccagcgtgc

SEQ ID NO: 399208 - DNA, 25 bp, Homo sapien
tcacactggtgtgcgggttcacgag

SEQ ID NO: 399209 - DNA, 25 bp, Homo sapien
tcccgaggcagggacgtaggtcaca

SEQ ID NO: 399210 - DNA, 25 bp, Homo sapien
caaacgggacaaagtgcatacccac

SEQ ID NO: 399211 - DNA, 25 bp, Homo sapien
tctggaatctaagtcagaaggtttc

SEQ ID NO: 399212 - DNA, 25 bp, Homo sapien
tgtgaggatcaacccagaggaacac

SEQ ID NO: 399213 - DNA, 25 bp, Homo sapien
ccaacaaagttgagagtgttctgga

SEQ ID NO: 399214 - DNA, 25 bp, Homo sapien
gaattcaccgctgaaactacccgag

SEQ ID NO: 399215 - DNA, 25 bp, Homo sapien
tcagaatgttgataggtccgtggct

SEQ ID NO: 399216 - DNA, 25 bp, Homo sapien
cccgttgtcttgatctgaggtgtga

SEQ ID NO: 399217 - DNA, 25 bp, Homo sapien
tacctgacgtcaagagaaggtttcc

SEQ ID NO: 399218 - DNA, 25 bp, Homo sapien
tccgtggctggagagtacctgacgt

SEQ ID NO: 399219 - DNA, 25 bp, Homo sapien
tttctaatgttaagacacctttgta

SEQ ID NO: 399220 - DNA, 25 bp, Homo sapien
tttctgagatcgaccttagtattgg

SEQ ID NO: 399221 - DNA, 25 bp, Homo sapien
aaactcccgtctgctttgagatgat

SEQ ID NO: 399222 - DNA, 25 bp, Homo sapien
atttaagacagtattcagtttctca

SEQ ID NO: 399223 - DNA, 25 bp, Homo sapien
tgtagctctgtagtaggccttgcag

SEQ ID NO: 399224 - DNA, 25 bp, Homo sapien
tgcagtcagttaccgcccctgttct

SEQ ID NO: 399225 - DNA, 25 bp, Homo sapien
tggtaccatctgtcaagaagactct

SEQ ID NO: 399226 - DNA, 25 bp, Homo sapien
tcagttgactgcatttgcatgggtc

SEQ ID NO: 399227 - DNA, 25 bp, Homo sapien
tgtgctaacgtcagcagaccagtga

SEQ ID NO: 399228 - DNA, 25 bp, Homo sapien
gctgcgaaatgctggaagtgtaacc

SEQ ID NO: 399229 - DNA, 25 bp, Homo sapien
gaaagtgggccaaggcctgatgcca

SEQ ID NO: 399230 - DNA, 25 bp, Homo sapien
gggctagcatcacataaggcatcac

SEQ ID NO: 399231 - DNA, 25 bp, Homo sapien
tattgtcctcagttcactgtcagcc

SEQ ID NO: 399232 - DNA, 25 bp, Homo sapien
cctaccgtgccaggtggagtgtcct

SEQ ID NO: 399233 - DNA, 25 bp, Homo sapien
agtgtcctgttacgcattctcatga

SEQ ID NO: 399234 - DNA, 25 bp, Homo sapien
ttggtgtcgttgatgctgcgtcccc

SEQ ID NO: 399235 - DNA, 25 bp, Homo sapien
tcttcacaagaaaggtacggcatgt

SEQ ID NO: 399236 - DNA, 25 bp, Homo sapien
ttgggcctgacgatcctgacctggt

SEQ ID NO: 399237 - DNA, 25 bp, Homo sapien
tccaccgtgtttgggactgcgctca

SEQ ID NO: 399238 - DNA, 25 bp, Homo sapien
taaggacagataccggtttctcacc

SEQ ID NO: 399239 - DNA, 25 bp, Homo sapien
tcaaagcgcggcgcacgaggccggg

SEQ ID NO: 399240 - DNA, 25 bp, Homo sapien
ctcaaagcgcggcgcacgaggccgg

SEQ ID NO: 399241 - DNA, 25 bp, Homo sapien
acccgcggctggaccctcctcacaa

SEQ ID NO: 399242 - DNA, 25 bp, Homo sapien
tccttccttccgacccgcggctgga

SEQ ID NO: 399243 - DNA, 25 bp, Homo sapien
gcactcgctgtcgctcgctcgagcc

SEQ ID NO: 399244 - DNA, 25 bp, Homo sapien
ctcgagcctcgctccccacgtcctt

SEQ ID NO: 399245 - DNA, 25 bp, Homo sapien
tgacctgacttacggaccactggct

SEQ ID NO: 399246 - DNA, 25 bp, Homo sapien
tgggtgccgaaatgctcactaggct

SEQ ID NO: 399247 - DNA, 25 bp, Homo sapien
taacgggtgatttagtagcttgccc

SEQ ID NO: 399248 - DNA, 25 bp, Homo sapien
tatccttgattgtctaaaaccccgc

SEQ ID NO: 399249 - DNA, 25 bp, Homo sapien
tggtgggcactcaattgcatagtgc

SEQ ID NO: 399250 - DNA, 25 bp, Homo sapien
tttcagagaacagatagggtggagt

SEQ ID NO: 399251 - DNA, 25 bp, Homo sapien
gaagtagagtgactcatttgattga

SEQ ID NO: 399252 - DNA, 25 bp, Homo sapien
gcatagtgcttggtgaggcagtttc

SEQ ID NO: 399253 - DNA, 25 bp, Homo sapien
cacttatattatgacttcatattcc

SEQ ID NO: 399254 - DNA, 25 bp, Homo sapien
gatagctcttgtcagtcaccaatac

SEQ ID NO: 399255 - DNA, 25 bp, Homo sapien
tggccattcctctatactggaaaag

SEQ ID NO: 399256 - DNA, 25 bp, Homo sapien
gttaatgtttatgctcagtctgcca

SEQ ID NO: 399257 - DNA, 25 bp, Homo sapien
cattacttcatatgttgcctcccca

SEQ ID NO: 399258 - DNA, 25 bp, Homo sapien
atccttacgtttgattcatcatttg

SEQ ID NO: 399259 - DNA, 25 bp, Homo sapien
tatctatccttacgtttgattcatc

SEQ ID NO: 399260 - DNA, 25 bp, Homo sapien
aatgacattacttcatatgttgcct

SEQ ID NO: 399261 - DNA, 25 bp, Homo sapien
gacatgatgaaagcgtggaggtacc

SEQ ID NO: 399262 - DNA, 25 bp, Homo sapien
tctgcgctgctagacatggtggaca

SEQ ID NO: 399263 - DNA, 25 bp, Homo sapien
tgtcagaggcgacaggaacgtgtct

SEQ ID NO: 399264 - DNA, 25 bp, Homo sapien
taggcgaacgactaaagcacctgga

SEQ ID NO: 399265 - DNA, 25 bp, Homo sapien
tatgtgccactgaacaggtaaaaac

SEQ ID NO: 399266 - DNA, 25 bp, Homo sapien
aaaaactgtgctcctggactggctt

SEQ ID NO: 399267 - DNA, 25 bp, Homo sapien
acagagtttcaatcacagatatgtg

SEQ ID NO: 399268 - DNA, 25 bp, Homo sapien
tgctcctggactggctttaggaagt

SEQ ID NO: 399269 - DNA, 25 bp, Homo sapien
catgcaccgtaactggaagaggagc

SEQ ID NO: 399270 - DNA, 25 bp, Homo sapien
ctgaggagctcttggcgcagtgttt

SEQ ID NO: 399271 - DNA, 25 bp, Homo sapien
tggcgcagtgtttgtcgagcagtct

SEQ ID NO: 399272 - DNA, 25 bp, Homo sapien
ttcccataccattgcttcacatgca

SEQ ID NO: 399273 - DNA, 25 bp, Homo sapien
gactaacatggtttgcttggcctga

SEQ ID NO: 399274 - DNA, 25 bp, Homo sapien
caaaaacctagctgcctcttgagag

SEQ ID NO: 399275 - DNA, 25 bp, Homo sapien
tgtcagtccaagaaaagtcaagtcc

SEQ ID NO: 399276 - DNA, 25 bp, Homo sapien
gaacagaatctggaaccctagggtg

SEQ ID NO: 399277 - DNA, 25 bp, Homo sapien
gcaggcgttgaaatacgtttcttaa

SEQ ID NO: 399278 - DNA, 25 bp, Homo sapien
taagtggtaattttagcaggcgttg

SEQ ID NO: 399279 - DNA, 25 bp, Homo sapien
agtcctaacttgataaggctaccta

SEQ ID NO: 399280 - DNA, 25 bp, Homo sapien
acttgataaggctacctaacataaa

SEQ ID NO: 399281 - DNA, 25 bp, Homo sapien
tgtcgtgggaacaagccaggttgca

SEQ ID NO: 399282 - DNA, 25 bp, Homo sapien
tacctaaccaggagagtacagctga

SEQ ID NO: 399283 - DNA, 25 bp, Homo sapien
tccactgtgggcagactgtgacaaa

SEQ ID NO: 399284 - DNA, 25 bp, Homo sapien
cattcccatgcagtagaaactattc

SEQ ID NO: 399285 - DNA, 25 bp, Homo sapien
aaggcaccttggcacatagtgaagc

SEQ ID NO: 399286 - DNA, 25 bp, Homo sapien
cagttgagagcccagtactctggta

SEQ ID NO: 399287 - DNA, 25 bp, Homo sapien
gataaccatagggtgtgaaggcacc

SEQ ID NO: 399288 - DNA, 25 bp, Homo sapien
tattacctgctgtgggcaaccttgg

SEQ ID NO: 399289 - DNA, 25 bp, Homo sapien
cacggagagctttggctgcacttgc

SEQ ID NO: 399290 - DNA, 25 bp, Homo sapien
taactacaggaagtaagataactac

SEQ ID NO: 399291 - DNA, 25 bp, Homo sapien
actgctgatgcgtcccatggtgcat

SEQ ID NO: 399292 - DNA, 25 bp, Homo sapien
gcctgtctggagtacagtcagtatt

SEQ ID NO: 399293 - DNA, 25 bp, Homo sapien
gccgccaatagggtcaggctctgaa

SEQ ID NO: 399294 - DNA, 25 bp, Homo sapien
tggagggactcccaaatgtctggat

SEQ ID NO: 399295 - DNA, 25 bp, Homo sapien
gcaagccaggctttttggagggact

SEQ ID NO: 399296 - DNA, 25 bp, Homo sapien
gatggctgttccctagactgttcag

SEQ ID NO: 399297 - DNA, 25 bp, Homo sapien
tagcaggtcctttcaggctagagac

SEQ ID NO: 399298 - DNA, 25 bp, Homo sapien
tgttcatggcgtcctaaaaattcac

SEQ ID NO: 399299 - DNA, 25 bp, Homo sapien
ggcactggactagcttcactcactg

SEQ ID NO: 399300 - DNA, 25 bp, Homo sapien
tcactttgttacactggcactggac

SEQ ID NO: 399301 - DNA, 25 bp, Homo sapien
tctgagtcttttccattatgaaaat

SEQ ID NO: 399302 - DNA, 25 bp, Homo sapien
tgagtcttttccattatgaaaatga

SEQ ID NO: 399303 - DNA, 25 bp, Homo sapien
gagtcttttccattatgaaaatgat

SEQ ID NO: 399304 - DNA, 25 bp, Homo sapien
tttctgagtcttttccattatgaaa

SEQ ID NO: 399305 - DNA, 25 bp, Homo sapien
tggtctccatccaggcaacatgtgc

SEQ ID NO: 399306 - DNA, 25 bp, Homo sapien
tcagagacggtaaaataaactgccc

SEQ ID NO: 399307 - DNA, 25 bp, Homo sapien
taaactgcccaagcctctgcaggtg

SEQ ID NO: 399308 - DNA, 25 bp, Homo sapien
gccaggtgcttgctcagtgttgcca

SEQ ID NO: 399309 - DNA, 25 bp, Homo sapien
ccatactaggtacagcgtggcctct

SEQ ID NO: 399310 - DNA, 25 bp, Homo sapien
aaattgagtagtgggcaccaagccc

SEQ ID NO: 399311 - DNA, 25 bp, Homo sapien
tcttcccgggatagctacactagca

SEQ ID NO: 399312 - DNA, 25 bp, Homo sapien
tcacacgtgggcatgaacactaggt

SEQ ID NO: 399313 - DNA, 25 bp, Homo sapien
catccagcgatgctggtgggattca

SEQ ID NO: 399314 - DNA, 25 bp, Homo sapien
tttcaactcacttagcagcaaaggg

SEQ ID NO: 399315 - DNA, 25 bp, Homo sapien
gggattcagacgctttcgcttttca

SEQ ID NO: 399316 - DNA, 25 bp, Homo sapien
gctcagtggatgacacatccagcga

SEQ ID NO: 399317 - DNA, 25 bp, Homo sapien
gtgtggtacactttgttcactgcaa

SEQ ID NO: 399318 - DNA, 25 bp, Homo sapien
aacagcgagggtgagttgccacaca

SEQ ID NO: 399319 - DNA, 25 bp, Homo sapien
cgcgaggctcactttcatgagaaca

SEQ ID NO: 399320 - DNA, 25 bp, Homo sapien
gcacacttaaccaggtctcgcgagg

SEQ ID NO: 399321 - DNA, 25 bp, Homo sapien
taattggctcggctgtacaggaagc

SEQ ID NO: 399322 - DNA, 25 bp, Homo sapien
caccgcgcctgactgactcttgcac

SEQ ID NO: 399323 - DNA, 25 bp, Homo sapien
tgtgggccccaagtgcagtgtcttc

SEQ ID NO: 399324 - DNA, 25 bp, Homo sapien
tcagtgtctgtgggccccaagtgca

SEQ ID NO: 399325 - DNA, 25 bp, Homo sapien
cttttcaagcaagccctcagtgtct

SEQ ID NO: 399326 - DNA, 25 bp, Homo sapien
gcatgacatgttgtgctcaaaaagt

SEQ ID NO: 399327 - DNA, 25 bp, Homo sapien
ttagggacactcaacctgtgtgttt

SEQ ID NO: 399328 - DNA, 25 bp, Homo sapien
tcttcaaaacgcttggaaccacaag

SEQ ID NO: 399329 - DNA, 25 bp, Homo sapien
ccacaagggttttagatgacagata

SEQ ID NO: 399330 - DNA, 25 bp, Homo sapien
cactgtgcctgctcagtctgtagtt

SEQ ID NO: 399331 - DNA, 25 bp, Homo sapien
gttttcctatagtgtctttggtctg

SEQ ID NO: 399332 - DNA, 25 bp, Homo sapien
acctagacccgagtgcagaagcaca

SEQ ID NO: 399333 - DNA, 25 bp, Homo sapien
ggtattagagcaatgctagcctcat

SEQ ID NO: 399334 - DNA, 25 bp, Homo sapien
tgactgggccttcgtctgagactgc

SEQ ID NO: 399335 - DNA, 25 bp, Homo sapien
tccgtgttgccaaagcgccttctgg

SEQ ID NO: 399336 - DNA, 25 bp, Homo sapien
gagcagaccgcctatgatctctaag

SEQ ID NO: 399337 - DNA, 25 bp, Homo sapien
tcagatccgcaaggatgctctccgg

SEQ ID NO: 399338 - DNA, 25 bp, Homo sapien
tgtaggaacacttccatctaagccg

SEQ ID NO: 399339 - DNA, 25 bp, Homo sapien
taagccgccatttcgatttggtcaa

SEQ ID NO: 399340 - DNA, 25 bp, Homo sapien
aaacagtaccttatctgggaagagc

SEQ ID NO: 399341 - DNA, 25 bp, Homo sapien
gaagagctcgggattttcacaggta

SEQ ID NO: 399342 - DNA, 25 bp, Homo sapien
tgctgggtggaagattaggctcccc

SEQ ID NO: 399343 - DNA, 25 bp, Homo sapien
catcgtcgctaacggagcgttgcgg

SEQ ID NO: 399344 - DNA, 25 bp, Homo sapien
agaggcctcagcttcgtggcagcgc

SEQ ID NO: 399345 - DNA, 25 bp, Homo sapien
gacagcgttacagtgaattctccgg

SEQ ID NO: 399346 - DNA, 25 bp, Homo sapien
cggtgtctggacccagcaaaggacg

SEQ ID NO: 399347 - DNA, 25 bp, Homo sapien
tctatggaaggatgccgcggaatcc

SEQ ID NO: 399348 - DNA, 25 bp, Homo sapien
acaaggaggaagcaacaacgagggt

SEQ ID NO: 399349 - DNA, 25 bp, Homo sapien
gcccgcagacccacgcgggtgaatg

SEQ ID NO: 399350 - DNA, 25 bp, Homo sapien
cgacgctctcgcttgggagactaaa

SEQ ID NO: 399351 - DNA, 25 bp, Homo sapien
tatttggtggaactgattgaaaatc

SEQ ID NO: 399352 - DNA, 25 bp, Homo sapien
ggtggaactgattgaaaatcttaag

SEQ ID NO: 399353 - DNA, 25 bp, Homo sapien
ctttatttggtggaactgattgaaa

SEQ ID NO: 399354 - DNA, 25 bp, Homo sapien
tttggtggaactgattgaaaatctt

SEQ ID NO: 399355 - DNA, 25 bp, Homo sapien
cctgatggggatgactcgctgcaga

SEQ ID NO: 399356 - DNA, 25 bp, Homo sapien
ttactgcgaagtggcgctctcctga

SEQ ID NO: 399357 - DNA, 25 bp, Homo sapien
gggatgactcgctgcagatttctaa

SEQ ID NO: 399358 - DNA, 25 bp, Homo sapien
aatctcgatcttactgcgaagtggc

SEQ ID NO: 399359 - DNA, 25 bp, Homo sapien
gaaaagaaagcacatcggttgggac

SEQ ID NO: 399360 - DNA, 25 bp, Homo sapien
gatccccaggtcaaatttctgcact

SEQ ID NO: 399361 - DNA, 25 bp, Homo sapien
ttctgcactcctaaaatcctcctta

SEQ ID NO: 399362 - DNA, 25 bp, Homo sapien
ctgaatattcttgttgtcaacacag

SEQ ID NO: 399363 - DNA, 25 bp, Homo sapien
gtggccagcatctgtggtcccacct

SEQ ID NO: 399364 - DNA, 25 bp, Homo sapien
ctgagatcagttcaggagcagcctg

SEQ ID NO: 399365 - DNA, 25 bp, Homo sapien
tgagatcagttcaggagcagcctgg

SEQ ID NO: 399366 - DNA, 25 bp, Homo sapien
ggcgtggtggccagcatctgtggtc

SEQ ID NO: 399367 - DNA, 25 bp, Homo sapien
gcgctcggctgtcacctttcttttt

SEQ ID NO: 399368 - DNA, 25 bp, Homo sapien
taccagtgtaattgtagactctggg

SEQ ID NO: 399369 - DNA, 25 bp, Homo sapien
tatatacttataggcaccatggagc

SEQ ID NO: 399370 - DNA, 25 bp, Homo sapien
cctcgatcagtggaggctgaatata

SEQ ID NO: 399371 - DNA, 25 bp, Homo sapien
ccaggctggagtgtccgcctcctgg

SEQ ID NO: 399372 - DNA, 25 bp, Homo sapien
aggctggagtgtccgcctcctgggt

SEQ ID NO: 399373 - DNA, 25 bp, Homo sapien
cccaggctggagtgtccgcctcctg

SEQ ID NO: 399374 - DNA, 25 bp, Homo sapien
agtcaggacgtcattgtaatcttca

SEQ ID NO: 399375 - DNA, 25 bp, Homo sapien
tacactgatggaagatatactccac

SEQ ID NO: 399376 - DNA, 25 bp, Homo sapien
atctggaaaatcaggctggggaaat

SEQ ID NO: 399377 - DNA, 25 bp, Homo sapien
gtctcccaaattgtagtcatctgga

SEQ ID NO: 399378 - DNA, 25 bp, Homo sapien
gaacccataggtggattacactgag

SEQ ID NO: 399379 - DNA, 25 bp, Homo sapien
gacaaaaatcgttgacaccccatgg

SEQ ID NO: 399380 - DNA, 25 bp, Homo sapien
tcacgagatttgtgaccgccccaat

SEQ ID NO: 399381 - DNA, 25 bp, Homo sapien
taggtgtcctgaggagaaccagccc

SEQ ID NO: 399382 - DNA, 25 bp, Homo sapien
tagagtctaacttgcgtggctgtcc

SEQ ID NO: 399383 - DNA, 25 bp, Homo sapien
agagtttaacttgcgtggctgtccc

SEQ ID NO: 399384 - DNA, 25 bp, Homo sapien
agtctaacttgcgtggctgtcccca

SEQ ID NO: 399385 - DNA, 25 bp, Homo sapien
tagagtttaacttgcgtggctgtcc

SEQ ID NO: 399386 - DNA, 25 bp, Homo sapien
ctagagtttaacttgtgtggctgac

SEQ ID NO: 399387 - DNA, 25 bp, Homo sapien
agtctaacttgcgtggctgtcccca

SEQ ID NO: 399388 - DNA, 25 bp, Homo sapien
cgcgggaggaatttaatctagagtc

SEQ ID NO: 399389 - DNA, 25 bp, Homo sapien
agtttaacttgcgtggctgactcca

SEQ ID NO: 399390 - DNA, 25 bp, Homo sapien
catcaagctgctgaaaccacctgtg

SEQ ID NO: 399391 - DNA, 25 bp, Homo sapien
gcatcaagctgctgaaaccacctgt

SEQ ID NO: 399392 - DNA, 25 bp, Homo sapien
agctgctgaaaccacctgtgcaaaa

SEQ ID NO: 399393 - DNA, 25 bp, Homo sapien
caagctgctgaaaccacctgtgcaa

SEQ ID NO: 399394 - DNA, 25 bp, Homo sapien
actctgcctccgtgccgtgtgtgaa

SEQ ID NO: 399395 - DNA, 25 bp, Homo sapien
ccagcaagtgacagagtccgtgggt

SEQ ID NO: 399396 - DNA, 25 bp, Homo sapien
tgcctccgtgccgtgtgtgaatccc

SEQ ID NO: 399397 - DNA, 25 bp, Homo sapien
gtgaatcccagcaagtgacagagtc

SEQ ID NO: 399398 - DNA, 25 bp, Homo sapien
tgagctcagcgagtgcacgaaccgc

SEQ ID NO: 399399 - DNA, 25 bp, Homo sapien
ctctagctcaggccgaaggcgggac

SEQ ID NO: 399400 - DNA, 25 bp, Homo sapien
tggaaggaaggaagcgcgctggccc

SEQ ID NO: 399401 - DNA, 25 bp, Homo sapien
gccacaggccgggagaataagcggg

SEQ ID NO: 399402 - DNA, 25 bp, Homo sapien
gctgcagccgggtccccgtgcgtcg

SEQ ID NO: 399403 - DNA, 25 bp, Homo sapien
ggctgcagccgggtccccgtgcgtc

SEQ ID NO: 399404 - DNA, 25 bp, Homo sapien
ctgcagccgggtccccgtgcgtcgg

SEQ ID NO: 399405 - DNA, 25 bp, Homo sapien
gcagccgggtccccgtgcgtcggcc

SEQ ID NO: 399406 - DNA, 25 bp, Homo sapien
cgcgtcccgctttcagaaggaacgc

SEQ ID NO: 399407 - DNA, 25 bp, Homo sapien
cattcgttatttattcgtgtgcgac

SEQ ID NO: 399408 - DNA, 25 bp, Homo sapien
tatttattcgtgtgcgaccccggct

SEQ ID NO: 399409 - DNA, 25 bp, Homo sapien
cgttatttattcgtgtgcgaccccg

SEQ ID NO: 399410 - DNA, 25 bp, Homo sapien
cgttcattcgttatttattcgtgtg

SEQ ID NO: 399411 - DNA, 25 bp, Homo sapien
tacatttacaactgtgggactgagg

SEQ ID NO: 399412 - DNA, 25 bp, Homo sapien
cacttgcaaaaggttcgtcgtggag

SEQ ID NO: 399413 - DNA, 25 bp, Homo sapien
gagtcgtttctgtggacatcctaga

SEQ ID NO: 399414 - DNA, 25 bp, Homo sapien
ggaagccctggaatctcgctcagaa

SEQ ID NO: 399415 - DNA, 25 bp, Homo sapien
accagtaagcggaaagcggaggcct

SEQ ID NO: 399416 - DNA, 25 bp, Homo sapien
ccacagattggtgcgctcacgtacc

SEQ ID NO: 399417 - DNA, 25 bp, Homo sapien
cgcctcctacggcaggaccagtaag

SEQ ID NO: 399418 - DNA, 25 bp, Homo sapien
cagagcagccttcgctctatttaca

SEQ ID NO: 399419 - DNA, 25 bp, Homo sapien
tgcgccgctgctcttgctcaacttc

SEQ ID NO: 399420 - DNA, 25 bp, Homo sapien
ctttctgcgccgctgctcttgctca

SEQ ID NO: 399421 - DNA, 25 bp, Homo sapien
gccgctgctcttgctcaacttccat

SEQ ID NO: 399422 - DNA, 25 bp, Homo sapien
tttctgcgccgctgctcttgctcaa

SEQ ID NO: 399423 - DNA, 25 bp, Homo sapien
ccaagggcgcgggaagaagacggcg

SEQ ID NO: 399424 - DNA, 25 bp, Homo sapien
agaaagacgggagcgcgtcccttga

SEQ ID NO: 399425 - DNA, 25 bp, Homo sapien
cgcgggggcctttcacacagtaagg

SEQ ID NO: 399426 - DNA, 25 bp, Homo sapien
gtgggttcccggcagcgtacgccag

SEQ ID NO: 399427 - DNA, 25 bp, Homo sapien
agtggccatcaaaccgagcgctttt

SEQ ID NO: 399428 - DNA, 25 bp, Homo sapien
cgagtcatgggctctgcgcgcttta

SEQ ID NO: 399429 - DNA, 25 bp, Homo sapien
cacgaaacctaggacagtggccatc

SEQ ID NO: 399430 - DNA, 25 bp, Homo sapien
gcggttccgcctcgcgctttcggga

SEQ ID NO: 399431 - DNA, 25 bp, Homo sapien
agtagtaaaggcaaaggtaagtgag

SEQ ID NO: 399432 - DNA, 25 bp, Homo sapien
tagtaaaggcaaaggtaagtgagaa

SEQ ID NO: 399433 - DNA, 25 bp, Homo sapien
cacaaagtcaacagactggtgggga

SEQ ID NO: 399434 - DNA, 25 bp, Homo sapien
ccacaaagtcaacagactggtgggg

SEQ ID NO: 399435 - DNA, 25 bp, Homo sapien
ccgaatgcgaactgtcaccttttgt

SEQ ID NO: 399436 - DNA, 25 bp, Homo sapien
tggacagacgcatcgacagccgagc

SEQ ID NO: 399437 - DNA, 25 bp, Homo sapien
tcttcgccgtctttttctccgaatg

SEQ ID NO: 399438 - DNA, 25 bp, Homo sapien
tcctcctggacagacgcatcgacag

SEQ ID NO: 399439 - DNA, 25 bp, Homo sapien
ccccatcaggggtgtcgtcacatga

SEQ ID NO: 399440 - DNA, 25 bp, Homo sapien
gtcacatgatgtgcttttgcaaatg

SEQ ID NO: 399441 - DNA, 25 bp, Homo sapien
cctcctccacagagtgcgctgtcct

SEQ ID NO: 399442 - DNA, 25 bp, Homo sapien
agagtgcgctgtcctccttggttac

SEQ ID NO: 399443 - DNA, 25 bp, Homo sapien
gaaaaagctgactggtacctgacct

SEQ ID NO: 399444 - DNA, 25 bp, Homo sapien
tgacctttgcccaccattttagagc

SEQ ID NO: 399445 - DNA, 25 bp, Homo sapien
gctgatgtcaagctgtaactgtgca

SEQ ID NO: 399446 - DNA, 25 bp, Homo sapien
gggttaatacctgatgactgcatgt

SEQ ID NO: 399447 - DNA, 25 bp, Homo sapien
aggatggtcattgacttgcttctgc

SEQ ID NO: 399448 - DNA, 25 bp, Homo sapien
gaggatggtcattgacttgcttctg

SEQ ID NO: 399449 - DNA, 25 bp, Homo sapien
cccatgctgttctggtgggtggtca

SEQ ID NO: 399450 - DNA, 25 bp, Homo sapien
catgctgttctggtgggtggtcact

SEQ ID NO: 399451 - DNA, 25 bp, Homo sapien
ctggtgggtggtcactgactgtgaa

SEQ ID NO: 399452 - DNA, 25 bp, Homo sapien
atcccatgctgttctggtgggtggt

SEQ ID NO: 399453 - DNA, 25 bp, Homo sapien
ctgactgtgaacatcccacgctgtt

SEQ ID NO: 399454 - DNA, 25 bp, Homo sapien
tgactgtgaacatcccacgctgttc

SEQ ID NO: 399455 - DNA, 25 bp, Homo sapien
ctgattgtgaagatcccacgctgtt

SEQ ID NO: 399456 - DNA, 25 bp, Homo sapien
cactgattgtgaagatcccacgctg

SEQ ID NO: 399457 - DNA, 25 bp, Homo sapien
ctgggtggtcactgattgtgaagat

SEQ ID NO: 399458 - DNA, 25 bp, Homo sapien
gattgtgaagatcccacgctgttct

SEQ ID NO: 399459 - DNA, 25 bp, Homo sapien
tttgtgaacatcccacgctgttctg

SEQ ID NO: 399460 - DNA, 25 bp, Homo sapien
ctttgtgaacatcccacgctgttct

SEQ ID NO: 399461 - DNA, 25 bp, Homo sapien
gaaacagcggactcagaacggagac

SEQ ID NO: 399462 - DNA, 25 bp, Homo sapien
tctagtaaaaggcaccaagactcct

SEQ ID NO: 399463 - DNA, 25 bp, Homo sapien
ttttatagaacccaccagagactgt

SEQ ID NO: 399464 - DNA, 25 bp, Homo sapien
gagacagggcctacacgatgagcct

SEQ ID NO: 399465 - DNA, 25 bp, Homo sapien
acggccgctctccaggtcagtaatg

SEQ ID NO: 399466 - DNA, 25 bp, Homo sapien
gctctccaggtcagtaatggcaagt

SEQ ID NO: 399467 - DNA, 25 bp, Homo sapien
taatggcaagttcacattcttgttc

SEQ ID NO: 399468 - DNA, 25 bp, Homo sapien
ccagcctcatcttcacggccgctct

SEQ ID NO: 399469 - DNA, 25 bp, Homo sapien
ttgctcagactcaggcgcagcgcct

SEQ ID NO: 399470 - DNA, 25 bp, Homo sapien
cgccgtgtgcatgttgctcagactc

SEQ ID NO: 399471 - DNA, 25 bp, Homo sapien
agctcctgggcacgccggctgttga

SEQ ID NO: 399472 - DNA, 25 bp, Homo sapien
ccagctgcgccgtgtgcatgttgct

SEQ ID NO: 399473 - DNA, 25 bp, Homo sapien
tttactatctgggcgtttttctcca

SEQ ID NO: 399474 - DNA, 25 bp, Homo sapien
ttactatctgggcgtttttctccat

SEQ ID NO: 399475 - DNA, 25 bp, Homo sapien
accccgaaacagacgagcctctgca

SEQ ID NO: 399476 - DNA, 25 bp, Homo sapien
cacccaccccgaaacagacgagcct

SEQ ID NO: 399477 - DNA, 25 bp, Homo sapien
cgaaacagacgagcctctgcacgca

SEQ ID NO: 399478 - DNA, 25 bp, Homo sapien
agaccagcctctgcacaaggaccac

SEQ ID NO: 399479 - DNA, 25 bp, Homo sapien
cagacagttctttgcgtagattttc

SEQ ID NO: 399480 - DNA, 25 bp, Homo sapien
ctttgcgtagattttctaaacataa

SEQ ID NO: 399481 - DNA, 25 bp, Homo sapien
gttctttgcgtagattttctaaaca

SEQ ID NO: 399482 - DNA, 25 bp, Homo sapien
gctttgcagacagttctttgcgtag

SEQ ID NO: 399483 - DNA, 25 bp, Homo sapien
ttctttctcgctctctttgaacttg

SEQ ID NO: 399484 - DNA, 25 bp, Homo sapien
ggccgtgctcggactgcaggtcttc

SEQ ID NO: 399485 - DNA, 25 bp, Homo sapien
aatggctgcttgatgatgactctcc

SEQ ID NO: 399486 - DNA, 25 bp, Homo sapien
ccaagtcttctaaacaccggccgtg

SEQ ID NO: 399487 - DNA, 25 bp, Homo sapien
gaatctcaggaacttccaggtctgt

SEQ ID NO: 399488 - DNA, 25 bp, Homo sapien
gccaggcactttcagaatctcagga

SEQ ID NO: 399489 - DNA, 25 bp, Homo sapien
cacaaggccaggcactttcagaatc

SEQ ID NO: 399490 - DNA, 25 bp, Homo sapien
agaatctcaggaacttccaggtctg

SEQ ID NO: 399491 - DNA, 25 bp, Homo sapien
ttcttgtgattgtgccttcaggtct

SEQ ID NO: 399492 - DNA, 25 bp, Homo sapien
aattcctgtctactggtcctggcag

SEQ ID NO: 399493 - DNA, 25 bp, Homo sapien
cctggcagaatcaagctgggaccac

SEQ ID NO: 399494 - DNA, 25 bp, Homo sapien
caagcgcctgatctcttcttgtgat

SEQ ID NO: 399495 - DNA, 25 bp, Homo sapien
ggagcaaaagcagcactcgaagtgg

SEQ ID NO: 399496 - DNA, 25 bp, Homo sapien
tgggagcaaaagcagcactcgaagt

SEQ ID NO: 399497 - DNA, 25 bp, Homo sapien
agcaaaagcagcactcgaagtggca

SEQ ID NO: 399498 - DNA, 25 bp, Homo sapien
cactcgaagtggcagggatgtgggg

SEQ ID NO: 399499 - DNA, 25 bp, Homo sapien
ggcagaactcggaaaagggcccatc

SEQ ID NO: 399500 - DNA, 25 bp, Homo sapien
gacccctacggcttagactctcgta

SEQ ID NO: 399501 - DNA, 25 bp, Homo sapien
tagactctcgtacgcccctgaatgt

SEQ ID NO: 399502 - DNA, 25 bp, Homo sapien
gatgagggacccctacggcttagac

SEQ ID NO: 399503 - DNA, 25 bp, Homo sapien
aacaagccaggcgagaggcaagagc

SEQ ID NO: 399504 - DNA, 25 bp, Homo sapien
ccacaacaagccaggcgagaggcaa

SEQ ID NO: 399505 - DNA, 25 bp, Homo sapien
gcaacataacggagtcaggcaatcg

SEQ ID NO: 399506 - DNA, 25 bp, Homo sapien
caatcgtcttaaaatgggacaccca

SEQ ID NO: 399507 - DNA, 25 bp, Homo sapien
tcagctgttctaaatcttccacacg

SEQ ID NO: 399508 - DNA, 25 bp, Homo sapien
tctaaatcttccacacgagaggtgc

SEQ ID NO: 399509 - DNA, 25 bp, Homo sapien
gctgttctaaatcttccacacgaga

SEQ ID NO: 399510 - DNA, 25 bp, Homo sapien
aatcttccacacgagaggtgcgcgc

SEQ ID NO: 399511 - DNA, 25 bp, Homo sapien
ggtcttcttggtaagttttctcagc

SEQ ID NO: 399512 - DNA, 25 bp, Homo sapien
tcagttgctccagttcggactcatg

SEQ ID NO: 399513 - DNA, 25 bp, Homo sapien
ttttctcagcatcccttaacttctt

SEQ ID NO: 399514 - DNA, 25 bp, Homo sapien
tctgctgtaacagggttaggtcttc

SEQ ID NO: 399515 - DNA, 25 bp, Homo sapien
caggctcgagttcatcaacgtgatc

SEQ ID NO: 399516 - DNA, 25 bp, Homo sapien
tgtcgctcaggctcgagttcatcaa

SEQ ID NO: 399517 - DNA, 25 bp, Homo sapien
cttatgtcgctcaggctcgagttca

SEQ ID NO: 399518 - DNA, 25 bp, Homo sapien
gttcatcaacgtgatcttttcttcc

SEQ ID NO: 399519 - DNA, 25 bp, Homo sapien
agacgccactcgtgtcccaatgctg

SEQ ID NO: 399520 - DNA, 25 bp, Homo sapien
taactccgcctggaagcgtggcagg

SEQ ID NO: 399521 - DNA, 25 bp, Homo sapien
tgagacatgcccctcgtgctggatg

SEQ ID NO: 399522 - DNA, 25 bp, Homo sapien
gaagtctctacgcagcatctgtctg

SEQ ID NO: 399523 - DNA, 25 bp, Homo sapien
tcatgctgcaacttcccatacaaat

SEQ ID NO: 399524 - DNA, 25 bp, Homo sapien
tctttgagctcagtctgaagaagcg

SEQ ID NO: 399525 - DNA, 25 bp, Homo sapien
tccttcagacgagtttcatgctgca

SEQ ID NO: 399526 - DNA, 25 bp, Homo sapien
aagaagcgaaagttgcaccttgtgc

SEQ ID NO: 399527 - DNA, 25 bp, Homo sapien
tgcttagcattatttagttccttct

SEQ ID NO: 399528 - DNA, 25 bp, Homo sapien
tttgcttagcattatttagttcctt

SEQ ID NO: 399529 - DNA, 25 bp, Homo sapien
ttgcttagcattatttagttccttc

SEQ ID NO: 399530 - DNA, 25 bp, Homo sapien
cttttgcttagcattatttagttcc

SEQ ID NO: 399531 - DNA, 25 bp, Homo sapien
gctgcctgttggtcctgaagctgcc

SEQ ID NO: 399532 - DNA, 25 bp, Homo sapien
cgtcgtctgaagtgaggtcctgttc

SEQ ID NO: 399533 - DNA, 25 bp, Homo sapien
ggattcagccttttctctcagttca

SEQ ID NO: 399534 - DNA, 25 bp, Homo sapien
ttccttcacgtggagcgcagcaagc

SEQ ID NO: 399535 - DNA, 25 bp, Homo sapien
ccgcactgaatttctcggtgatctc

SEQ ID NO: 399536 - DNA, 25 bp, Homo sapien
ttctcggtgatctctttacgttcct

SEQ ID NO: 399537 - DNA, 25 bp, Homo sapien
ggtgatctctttacgttcctctaaa

SEQ ID NO: 399538 - DNA, 25 bp, Homo sapien
gaaggcatcttgttccgcactgaat

SEQ ID NO: 399539 - DNA, 25 bp, Homo sapien
catgctgctcctgggcctcctgcag

SEQ ID NO: 399540 - DNA, 25 bp, Homo sapien
gggcatgctgctcctgggcctcctg

SEQ ID NO: 399541 - DNA, 25 bp, Homo sapien
ctcacgggcatgctgctcctgggcc

SEQ ID NO: 399542 - DNA, 25 bp, Homo sapien
tcacgggcatgctgctcctgggcct

SEQ ID NO: 399543 - DNA, 25 bp, Homo sapien
caaaatcgtttggtgaagagagtcc

SEQ ID NO: 399544 - DNA, 25 bp, Homo sapien
tgctcgtaagagctctagggcctgc

SEQ ID NO: 399545 - DNA, 25 bp, Homo sapien
tttgtctgcagttcggccacacgtg

SEQ ID NO: 399546 - DNA, 25 bp, Homo sapien
gatgtctggtctccagagcgccgag

SEQ ID NO: 399547 - DNA, 25 bp, Homo sapien
tgcatcttggcagcgtacatctctg

SEQ ID NO: 399548 - DNA, 25 bp, Homo sapien
cagggccgcttggtgctgatgctcc

SEQ ID NO: 399549 - DNA, 25 bp, Homo sapien
gattgcacagggctgcgaccagctc

SEQ ID NO: 399550 - DNA, 25 bp, Homo sapien
ccagcaggcgtctctgattgcacag

SEQ ID NO: 399551 - DNA, 25 bp, Homo sapien
tgcctgtgcactctgaagccgaagt

SEQ ID NO: 399552 - DNA, 25 bp, Homo sapien
tgtgcactctgaagccgaagtgtct

SEQ ID NO: 399553 - DNA, 25 bp, Homo sapien
ctctgaagccgaagtgtctcctctt

SEQ ID NO: 399554 - DNA, 25 bp, Homo sapien
ctgtgcctgtgcactctgaagccga

SEQ ID NO: 399555 - DNA, 25 bp, Homo sapien
gacaggttgacgtcggccttgagca

SEQ ID NO: 399556 - DNA, 25 bp, Homo sapien
catggagaggaggtttgcgccttcc

SEQ ID NO: 399557 - DNA, 25 bp, Homo sapien
ggagcggcactcttctatctcgtga

SEQ ID NO: 399558 - DNA, 25 bp, Homo sapien
tctcgtgacttaaggataaaacctg

SEQ ID NO: 399559 - DNA, 25 bp, Homo sapien
ctggcggccacaaggcagcctcggt

SEQ ID NO: 399560 - DNA, 25 bp, Homo sapien
cgggtgctggcggccacaaggcagc

SEQ ID NO: 399561 - DNA, 25 bp, Homo sapien
ggcagcctcggtgccgaggacacac

SEQ ID NO: 399562 - DNA, 25 bp, Homo sapien
gcctcggtgccgaggacacactgac

SEQ ID NO: 399563 - DNA, 25 bp, Homo sapien
gcaaaaagtttctcaagaccccaca

SEQ ID NO: 399564 - DNA, 25 bp, Homo sapien
aaaagggcagacaagcctgctggac

SEQ ID NO: 399565 - DNA, 25 bp, Homo sapien
ctggacccatgcgttcagggaaggc

SEQ ID NO: 399566 - DNA, 25 bp, Homo sapien
tgcgtttggcaacacagtgccgagt

SEQ ID NO: 399567 - DNA, 25 bp, Homo sapien
caaaccagttcagagcttcaggaca

SEQ ID NO: 399568 - DNA, 25 bp, Homo sapien
ccagttcagagcttcaggacacagc

SEQ ID NO: 399569 - DNA, 25 bp, Homo sapien
agagccaaaccagttcagagcttca

SEQ ID NO: 399570 - DNA, 25 bp, Homo sapien
tggggacacaaagacgggagcagca

SEQ ID NO: 399571 - DNA, 25 bp, Homo sapien
agtgctacagaaggcaaggtcctca

SEQ ID NO: 399572 - DNA, 25 bp, Homo sapien
cagccaagtgctacagaaggcaagg

SEQ ID NO: 399573 - DNA, 25 bp, Homo sapien
agcaccaagctacgagacacccaca

SEQ ID NO: 399574 - DNA, 25 bp, Homo sapien
cccacagccaagtgctacagaaggc

SEQ ID NO: 399575 - DNA, 25 bp, Homo sapien
gagccccacgcgctccccgatccgg

SEQ ID NO: 399576 - DNA, 25 bp, Homo sapien
gcctgcgcccgcgtcatccaggcag

SEQ ID NO: 399577 - DNA, 25 bp, Homo sapien
cccgatccggctcctcagggtgacg

SEQ ID NO: 399578 - DNA, 25 bp, Homo sapien
ctcagcgtctctccaaacaaaccca

SEQ ID NO: 399579 - DNA, 25 bp, Homo sapien
cagacaaagttctgtccaactccgg

SEQ ID NO: 399580 - DNA, 25 bp, Homo sapien
ctgcacattcagacaaagttctgtc

SEQ ID NO: 399581 - DNA, 25 bp, Homo sapien
tccaactccgggagggccacatcag

SEQ ID NO: 399582 - DNA, 25 bp, Homo sapien
ttctgtccaactccgggagggccac

SEQ ID NO: 399583 - DNA, 25 bp, Homo sapien
gctctggaagaccctccggatgggc

SEQ ID NO: 399584 - DNA, 25 bp, Homo sapien
aagaccctccggatgggctgctcac

SEQ ID NO: 399585 - DNA, 25 bp, Homo sapien
catgagaaagctttcacgcatgtgg

SEQ ID NO: 399586 - DNA, 25 bp, Homo sapien
ctcatgagaaagctttcacgcatgt

SEQ ID NO: 399587 - DNA, 25 bp, Homo sapien
ctggaagaccctccggatgggttgc

SEQ ID NO: 399588 - DNA, 25 bp, Homo sapien
aagaccctccggatgggttgctcac

SEQ ID NO: 399589 - DNA, 25 bp, Homo sapien
gaagaccctccggatgggttgctca

SEQ ID NO: 399590 - DNA, 25 bp, Homo sapien
gctctggaagaccctccggatgggt

SEQ ID NO: 399591 - DNA, 25 bp, Homo sapien
agggccatctccatgaggccgtcca

SEQ ID NO: 399592 - DNA, 25 bp, Homo sapien
gagaatgaatttggcgtgcttcttc

SEQ ID NO: 399593 - DNA, 25 bp, Homo sapien
attctttttcaaaacgagaatgaat

SEQ ID NO: 399594 - DNA, 25 bp, Homo sapien
caaaacgagaatgaatttggcgtgc

SEQ ID NO: 399595 - DNA, 25 bp, Homo sapien
tttcaaaacgagaatgaatttggcg

SEQ ID NO: 399596 - DNA, 25 bp, Homo sapien
gcaccagacggtgctcggaatcctc

SEQ ID NO: 399597 - DNA, 25 bp, Homo sapien
tggcctcggcgtccgtggctgtggc

SEQ ID NO: 399598 - DNA, 25 bp, Homo sapien
tccaccttgaatccctcaagggtac

SEQ ID NO: 399599 - DNA, 25 bp, Homo sapien
cgactccacagacgggtgcactcct

SEQ ID NO: 399600 - DNA, 25 bp, Homo sapien
aacagcaccgccagggcaaagatgc

SEQ ID NO: 399601 - DNA, 25 bp, Homo sapien
agcgacaacggacgcccagatgcaa

SEQ ID NO: 399602 - DNA, 25 bp, Homo sapien
atgctgagagcgatgcaggacgtca

SEQ ID NO: 399603 - DNA, 25 bp, Homo sapien
gaaagcatcggagaaacagcgacaa

SEQ ID NO: 399604 - DNA, 25 bp, Homo sapien
aagtccaagggctcgaggtgatgaa

SEQ ID NO: 399605 - DNA, 25 bp, Homo sapien
cgaagtgactggctgaagtccaagg

SEQ ID NO: 399606 - DNA, 25 bp, Homo sapien
tttatctgcccggaggcctgacaaa

SEQ ID NO: 399607 - DNA, 25 bp, Homo sapien
cgttcaacagaatgcaggccacaca

SEQ ID NO: 399608 - DNA, 25 bp, Homo sapien
tttgcgtttactgaggtggaaacag

SEQ ID NO: 399609 - DNA, 25 bp, Homo sapien
ctatgaacaagagtttgcgtttact

SEQ ID NO: 399610 - DNA, 25 bp, Homo sapien
ggtggaaacagaaacgtgcagctga

SEQ ID NO: 399611 - DNA, 25 bp, Homo sapien
gaaacgtgcagctgagaatgtgaga

SEQ ID NO: 399612 - DNA, 25 bp, Homo sapien
gtccttgtgtgctgcagtgacagct

SEQ ID NO: 399613 - DNA, 25 bp, Homo sapien
ctgagtccttgtgtgctgcagtgac

SEQ ID NO: 399614 - DNA, 25 bp, Homo sapien
ttgtgtgctgcagtgacagctgtgc

SEQ ID NO: 399615 - DNA, 25 bp, Homo sapien
ccttgtgtgctgcagtgacagctgt

SEQ ID NO: 399616 - DNA, 25 bp, Homo sapien
catgaattgccgctggttgcgcaaa

SEQ ID NO: 399617 - DNA, 25 bp, Homo sapien
gctgttccagggcagtgacggcctc

SEQ ID NO: 399618 - DNA, 25 bp, Homo sapien
agcctgcttcctggtctccgactgt

SEQ ID NO: 399619 - DNA, 25 bp, Homo sapien
cgcaaatgcttgtccagagatgcca

SEQ ID NO: 399620 - DNA, 25 bp, Homo sapien
gctgtaacggcaacttttagtgatg

SEQ ID NO: 399621 - DNA, 25 bp, Homo sapien
aagaagttcatgctgtaacggcaac

SEQ ID NO: 399622 - DNA, 25 bp, Homo sapien
acggcaacttttagtgatgcaaaaa

SEQ ID NO: 399623 - DNA, 25 bp, Homo sapien
tctggaaagaagttcatgctgtaac

SEQ ID NO: 399624 - DNA, 25 bp, Homo sapien
ccagggctgcggcttggccgcctgg

SEQ ID NO: 399625 - DNA, 25 bp, Homo sapien
tgctggaactcctcgcgctcgtgct

SEQ ID NO: 399626 - DNA, 25 bp, Homo sapien
ggccgcctggcggagctgcccctcc

SEQ ID NO: 399627 - DNA, 25 bp, Homo sapien
tcgtgctcccgctcggctgcctgct

SEQ ID NO: 399628 - DNA, 25 bp, Homo sapien
cattccggctctgtggatgagacct

SEQ ID NO: 399629 - DNA, 25 bp, Homo sapien
agcgcagggagtgcccatctcgttg

SEQ ID NO: 399630 - DNA, 25 bp, Homo sapien
gagtcttacctcttacaactgtgtg

SEQ ID NO: 399631 - DNA, 25 bp, Homo sapien
tgccaggcacgagggatccgagtct

SEQ ID NO: 399632 - DNA, 25 bp, Homo sapien
acttgtctatctgccgactctttct

SEQ ID NO: 399633 - DNA, 25 bp, Homo sapien
tatctgccgactctttctgtatagc

SEQ ID NO: 399634 - DNA, 25 bp, Homo sapien
tctgtatagccaattcattaaattc

SEQ ID NO: 399635 - DNA, 25 bp, Homo sapien
tgttccagccctttcacgatgtttt

SEQ ID NO: 399636 - DNA, 25 bp, Homo sapien
ggaggctcgggacatctgcctgcat

SEQ ID NO: 399637 - DNA, 25 bp, Homo sapien
tctgtgtcacctctaactgtatttc

SEQ ID NO: 399638 - DNA, 25 bp, Homo sapien
gccgcaggagtgctctctgtgtcac

SEQ ID NO: 399639 - DNA, 25 bp, Homo sapien
tgcctgcatctagtgtagactgcaa

SEQ ID NO: 399640 - DNA, 25 bp, Homo sapien
tttctagctgttcttttaagtccaa

SEQ ID NO: 399641 - DNA, 25 bp, Homo sapien
tctagctgttcttttaagtccaaaa

SEQ ID NO: 399642 - DNA, 25 bp, Homo sapien
cttcaagctcgtgttctcttcctca

SEQ ID NO: 399643 - DNA, 25 bp, Homo sapien
caagctcgtgttctcttcctcaagt

SEQ ID NO: 399644 - DNA, 25 bp, Homo sapien
cctttgctttcagggccgcttcgaa

SEQ ID NO: 399645 - DNA, 25 bp, Homo sapien
tccctgagggctacattgcgctcca

SEQ ID NO: 399646 - DNA, 25 bp, Homo sapien
ctggatccgggaggccatgtcttcg

SEQ ID NO: 399647 - DNA, 25 bp, Homo sapien
tgactgtcgctgacttcgtgcacca

SEQ ID NO: 399648 - DNA, 25 bp, Homo sapien
gcagcatcatgggaggcctccacgt

SEQ ID NO: 399649 - DNA, 25 bp, Homo sapien
tgtgggtcagggacaaccggctcca

SEQ ID NO: 399650 - DNA, 25 bp, Homo sapien
ccccgggcacccgtgtgtgagctgt

SEQ ID NO: 399651 - DNA, 25 bp, Homo sapien
ctctgcgggcctgccgcctgtccag

SEQ ID NO: 399652 - DNA, 25 bp, Homo sapien
agagaggtgcatccttcaacgtcac

SEQ ID NO: 399653 - DNA, 25 bp, Homo sapien
tgagcactgacatcacgccttcttg

SEQ ID NO: 399654 - DNA, 25 bp, Homo sapien
tgcctctggcagacggtgagcactg

SEQ ID NO: 399655 - DNA, 25 bp, Homo sapien
cagactcaggcgcatttcatttttc

SEQ ID NO: 399656 - DNA, 25 bp, Homo sapien
gaaggtcatggaatacagcaaacgg

SEQ ID NO: 399657 - DNA, 25 bp, Homo sapien
tattggcatcacacgcgtctatggc

SEQ ID NO: 399658 - DNA, 25 bp, Homo sapien
gagatcgaccttcggcagctgacaa

SEQ ID NO: 399659 - DNA, 25 bp, Homo sapien
tgtttcacctgagctacgagatcga

SEQ ID NO: 399660 - DNA, 25 bp, Homo sapien
agacaggtccagcatcccgaccggg

SEQ ID NO: 399661 - DNA, 25 bp, Homo sapien
ggaagacaggtccagcatcccgacc

SEQ ID NO: 399662 - DNA, 25 bp, Homo sapien
tccaggaagacaggtccagcatccc

SEQ ID NO: 399663 - DNA, 25 bp, Homo sapien
caggaagacaggtccagcatcccga

SEQ ID NO: 399664 - DNA, 25 bp, Homo sapien
cagcgctgctgcagacacgcctggg

SEQ ID NO: 399665 - DNA, 25 bp, Homo sapien
ccagggatgtgtcggcactgcacag

SEQ ID NO: 399666 - DNA, 25 bp, Homo sapien
gtctgtggcagcgaggtgtccgccc

SEQ ID NO: 399667 - DNA, 25 bp, Homo sapien
acagccgtcctctgcacatggtggt

SEQ ID NO: 399668 - DNA, 25 bp, Homo sapien
ccttctaatccaggaggaggtgaac

SEQ ID NO: 399669 - DNA, 25 bp, Homo sapien
ggatgttgtgataaaatcttcgaca

SEQ ID NO: 399670 - DNA, 25 bp, Homo sapien
taatgtttcttgagaatcaaaggat

SEQ ID NO: 399671 - DNA, 25 bp, Homo sapien
tctcacttctatcagcttttccttc

SEQ ID NO: 399672 - DNA, 25 bp, Homo sapien
ttaaaaatgaaagataaccaactca

SEQ ID NO: 399673 - DNA, 25 bp, Homo sapien
taaaaatgaaagataaccaactcac

SEQ ID NO: 399674 - DNA, 25 bp, Homo sapien
ccgggctcagtcttgctccaaaacc

SEQ ID NO: 399675 - DNA, 25 bp, Homo sapien
gcagcggctgaaaccttccagagat

SEQ ID NO: 399676 - DNA, 25 bp, Homo sapien
tcacgtgcttcggacgcacttcctt

SEQ ID NO: 399677 - DNA, 25 bp, Homo sapien
agcagtttgagcctcagggcctcct

SEQ ID NO: 399678 - DNA, 25 bp, Homo sapien
ttgtttagccaagtttttgtcaatg

SEQ ID NO: 399679 - DNA, 25 bp, Homo sapien
agccaagtttttgtcaatggttttg

SEQ ID NO: 399680 - DNA, 25 bp, Homo sapien
tttttgtcaatggttttgccataaa

SEQ ID NO: 399681 - DNA, 25 bp, Homo sapien
ttttgccataaaatgatctgctaaa

SEQ ID NO: 399682 - DNA, 25 bp, Homo sapien
aagcagacggccctatggagaagct

SEQ ID NO: 399683 - DNA, 25 bp, Homo sapien
tggtgtccggacacacacttgactg

SEQ ID NO: 399684 - DNA, 25 bp, Homo sapien
ttatcccaccgattacgcagcagct

SEQ ID NO: 399685 - DNA, 25 bp, Homo sapien
tctgtgaacacgaggcggctgcttt

SEQ ID NO: 399686 - DNA, 25 bp, Homo sapien
cgtcacgcaccatctgcagtaaagc

SEQ ID NO: 399687 - DNA, 25 bp, Homo sapien
tctcgtcacgcaccatctgcagtaa

SEQ ID NO: 399688 - DNA, 25 bp, Homo sapien
gatctggtggctctcgtcacgcacc

SEQ ID NO: 399689 - DNA, 25 bp, Homo sapien
ggtggctctcgtcacgcaccatctg

SEQ ID NO: 399690 - DNA, 25 bp, Homo sapien
gggtgggtgtggctcgccgcttggg

SEQ ID NO: 399691 - DNA, 25 bp, Homo sapien
ctttcccccatggagcgagatgtcc

SEQ ID NO: 399692 - DNA, 25 bp, Homo sapien
catggagcgagatgtcctgtatctc

SEQ ID NO: 399693 - DNA, 25 bp, Homo sapien
tcctgtatctcgtcttccttccggg

SEQ ID NO: 399694 - DNA, 25 bp, Homo sapien
gcaccaatgagcctcctgaatgcca

SEQ ID NO: 399695 - DNA, 25 bp, Homo sapien
tgccgctcgcacacaaccagggcct

SEQ ID NO: 399696 - DNA, 25 bp, Homo sapien
gggcagcgtgcagcaccaatgagcc

SEQ ID NO: 399697 - DNA, 25 bp, Homo sapien
gtgcagcaccaatgagcctcctgaa

SEQ ID NO: 399698 - DNA, 25 bp, Homo sapien
tccaatcggggcacgcggtgggcac

SEQ ID NO: 399699 - DNA, 25 bp, Homo sapien
aatcggggcacgcggtgggcacttc

SEQ ID NO: 399700 - DNA, 25 bp, Homo sapien
ctccaatcggggcacgcggtgggca

SEQ ID NO: 399701 - DNA, 25 bp, Homo sapien
ccaatcggggcacgcggtgggcact

SEQ ID NO: 399702 - DNA, 25 bp, Homo sapien
cagatctgagccactgagtcggggc

SEQ ID NO: 399703 - DNA, 25 bp, Homo sapien
gctgtgaccccccagatctgagcca

SEQ ID NO: 399704 - DNA, 25 bp, Homo sapien
cttctccagcctttcgagcagggag

SEQ ID NO: 399705 - DNA, 25 bp, Homo sapien
ccagcctttcgagcagggagctgtg

SEQ ID NO: 399706 - DNA, 25 bp, Homo sapien
ttccagcggtcgagagaaacacaca

SEQ ID NO: 399707 - DNA, 25 bp, Homo sapien
tcaacacctgggtaagtgacagcca

SEQ ID NO: 399708 - DNA, 25 bp, Homo sapien
ggaaaagtgcagcatcctgcatgga

SEQ ID NO: 399709 - DNA, 25 bp, Homo sapien
tgcatggactgagcgtcaacacctg

SEQ ID NO: 399710 - DNA, 25 bp, Homo sapien
tgctccagggacttttcctgcaggt

SEQ ID NO: 399711 - DNA, 25 bp, Homo sapien
ttgtcagcgccgtgcgcaagtgctg

SEQ ID NO: 399712 - DNA, 25 bp, Homo sapien
tggttctgcaggtgcgtcatgcgca

SEQ ID NO: 399713 - DNA, 25 bp, Homo sapien
ggtccggcaagcgaagatgctccag

SEQ ID NO: 399714 - DNA, 25 bp, Homo sapien
tgcaaggccgttccccttgacggaa

SEQ ID NO: 399715 - DNA, 25 bp, Homo sapien
aactgcaaggccgttccccttgacg

SEQ ID NO: 399716 - DNA, 25 bp, Homo sapien
agcacaaagggcatgggcgccggga

SEQ ID NO: 399717 - DNA, 25 bp, Homo sapien
ctgaactgcaaggccgttccccttg

SEQ ID NO: 399718 - DNA, 25 bp, Homo sapien
cagaggtcggacttcaaatctcgca

SEQ ID NO: 399719 - DNA, 25 bp, Homo sapien
gcgtcttctgcaagtcaccagcaat

SEQ ID NO: 399720 - DNA, 25 bp, Homo sapien
ggagcttctgcacgctgtttgcctt

SEQ ID NO: 399721 - DNA, 25 bp, Homo sapien
ggaccgggacagctgttcgctcttc

SEQ ID NO: 399722 - DNA, 25 bp, Homo sapien
tcccaggaagggggatcaggcgcac

SEQ ID NO: 399723 - DNA, 25 bp, Homo sapien
acatggcacaacggggggactcccg

SEQ ID NO: 399724 - DNA, 25 bp, Homo sapien
gtcccaggaagggggatcaggcgca

SEQ ID NO: 399725 - DNA, 25 bp, Homo sapien
cacaacggggggactcccgccagtg

SEQ ID NO: 399726 - DNA, 25 bp, Homo sapien
cgttctccttactgctcagcatgga

SEQ ID NO: 399727 - DNA, 25 bp, Homo sapien
tcctgaagcgcggccttcagctcgt

SEQ ID NO: 399728 - DNA, 25 bp, Homo sapien
agctcgttctccttactgctcagca

SEQ ID NO: 399729 - DNA, 25 bp, Homo sapien
tcgttctccttactgctcagcatgg

SEQ ID NO: 399730 - DNA, 25 bp, Homo sapien
gcaaggcctcgcagcgtgagtgctc

SEQ ID NO: 399731 - DNA, 25 bp, Homo sapien
tcaagcatcgcttgcaagtccacca

SEQ ID NO: 399732 - DNA, 25 bp, Homo sapien
tgagtgctcgatacgcagctccttc

SEQ ID NO: 399733 - DNA, 25 bp, Homo sapien
tgtttcagtgccacgcagagtcgac

SEQ ID NO: 399734 - DNA, 25 bp, Homo sapien
accgtcgacttcagtgtggcactta

SEQ ID NO: 399735 - DNA, 25 bp, Homo sapien
gcagccttgcgtccttcttgctctt

SEQ ID NO: 399736 - DNA, 25 bp, Homo sapien
tcaaccgtgggtgtgactgctctaa

SEQ ID NO: 399737 - DNA, 25 bp, Homo sapien
taattctgcctgcaaccacgctggt

SEQ ID NO: 399738 - DNA, 25 bp, Homo sapien
tcgactccaggtctctcactgtctg

SEQ ID NO: 399739 - DNA, 25 bp, Homo sapien
gctgttcccggaggtggtccgcatc

SEQ ID NO: 399740 - DNA, 25 bp, Homo sapien
gaagctgcttgatcttatgcaagtc

SEQ ID NO: 399741 - DNA, 25 bp, Homo sapien
cagccctgcgggcagaacctaggtg

SEQ ID NO: 399742 - DNA, 25 bp, Homo sapien
tcactgctttctcattggatgacgt

SEQ ID NO: 399743 - DNA, 25 bp, Homo sapien
tggatgacgtccaatcattaactgt

SEQ ID NO: 399744 - DNA, 25 bp, Homo sapien
agctcctccaacgtgtgcagtaaag

SEQ ID NO: 399745 - DNA, 25 bp, Homo sapien
ttcagctcctccaacgtgtgcagta

SEQ ID NO: 399746 - DNA, 25 bp, Homo sapien
caacttctcaagcttagacacggct

SEQ ID NO: 399747 - DNA, 25 bp, Homo sapien
gctgagcgcttttgtgagggaaaca

SEQ ID NO: 399748 - DNA, 25 bp, Homo sapien
ttctcctgggtcaccgtgctgagcg

SEQ ID NO: 399749 - DNA, 25 bp, Homo sapien
gagggaaacattgtctttcagcagg

SEQ ID NO: 399750 - DNA, 25 bp, Homo sapien
gagccgtttcgtctggcttccaagc

SEQ ID NO: 399751 - DNA, 25 bp, Homo sapien
tgtgcttcctcgctggcagctggtg

SEQ ID NO: 399752 - DNA, 25 bp, Homo sapien
ggaactctgtggagccgtttcgtct

SEQ ID NO: 399753 - DNA, 25 bp, Homo sapien
gcttccaagcagacctttccgacct

SEQ ID NO: 399754 - DNA, 25 bp, Homo sapien
ccctgacggccgtgcggaacctggt

SEQ ID NO: 399755 - DNA, 25 bp, Homo sapien
taatattgcaatgaccaccctgacg

SEQ ID NO: 399756 - DNA, 25 bp, Homo sapien
gattttccgttctgctttggaagga

SEQ ID NO: 399757 - DNA, 25 bp, Homo sapien
aacctggtgaaaggacgagatgtga

SEQ ID NO: 399758 - DNA, 25 bp, Homo sapien
ttgtgccagagctcctttccgatct

SEQ ID NO: 399759 - DNA, 25 bp, Homo sapien
tcctttccgatctacttcttgccat

SEQ ID NO: 399760 - DNA, 25 bp, Homo sapien
gagctcctttccgatctacttcttg

SEQ ID NO: 399761 - DNA, 25 bp, Homo sapien
aggggctttgccttgtgccagagct

SEQ ID NO: 399762 - DNA, 25 bp, Homo sapien
gagtagaaagaaaggtttgtgagtc

SEQ ID NO: 399763 - DNA, 25 bp, Homo sapien
gtgctttattacgtccccatcaaca

SEQ ID NO: 399764 - DNA, 25 bp, Homo sapien
gtttgtgagtccagcggtcaacagc

SEQ ID NO: 399765 - DNA, 25 bp, Homo sapien
tgagtccagcggtcaacagcagctg

SEQ ID NO: 399766 - DNA, 25 bp, Homo sapien
caaactttcctgatggcttgaaggc

SEQ ID NO: 399767 - DNA, 25 bp, Homo sapien
ccaggaatgccgagtcatggtgcca

SEQ ID NO: 399768 - DNA, 25 bp, Homo sapien
tctggacgactgctctgacggaatt

SEQ ID NO: 399769 - DNA, 25 bp, Homo sapien
gaaacctgagctttgactatctgca

SEQ ID NO: 399770 - DNA, 25 bp, Homo sapien
tggccagagggtacatcccgggttg

SEQ ID NO: 399771 - DNA, 25 bp, Homo sapien
gttctgggtggagactgcggctgtc

SEQ ID NO: 399772 - DNA, 25 bp, Homo sapien
ggagactgcggctgtcgtgctcggg

SEQ ID NO: 399773 - DNA, 25 bp, Homo sapien
tgtggccagagggtacatcccgggt

SEQ ID NO: 399774 - DNA, 25 bp, Homo sapien
ccgccaaccagacccgtggggatgg

SEQ ID NO: 399775 - DNA, 25 bp, Homo sapien
aaaaaagagttgagtttgacagacg

SEQ ID NO: 399776 - DNA, 25 bp, Homo sapien
tgagtttgacagacggagccatggt

SEQ ID NO: 399777 - DNA, 25 bp, Homo sapien
aacaaattaccacaccaagagaaga

SEQ ID NO: 399778 - DNA, 25 bp, Homo sapien
tatactctgtcaaggaatgttctgg

SEQ ID NO: 399779 - DNA, 25 bp, Homo sapien
tggtagtacccctcccaatctttgc

SEQ ID NO: 399780 - DNA, 25 bp, Homo sapien
cacttctaaatggtgaatatactct

SEQ ID NO: 399781 - DNA, 25 bp, Homo sapien
gatcttgagaagcagtcagggatct

SEQ ID NO: 399782 - DNA, 25 bp, Homo sapien
tccagacggtgattaagtcaaactg

SEQ ID NO: 399783 - DNA, 25 bp, Homo sapien
caaattggttacaaggcttcacaga

SEQ ID NO: 399784 - DNA, 25 bp, Homo sapien
tggttactaagctgaataccagcca

SEQ ID NO: 399785 - DNA, 25 bp, Homo sapien
aatactcggcgaggacttgcattac

SEQ ID NO: 399786 - DNA, 25 bp, Homo sapien
cgggtggcaggatttctttgaagta

SEQ ID NO: 399787 - DNA, 25 bp, Homo sapien
tcatcgggtggcaggatttctttga

SEQ ID NO: 399788 - DNA, 25 bp, Homo sapien
catcgggtggcaggatttctttgaa

SEQ ID NO: 399789 - DNA, 25 bp, Homo sapien
gtggcaggatttctttgaagtagaa

SEQ ID NO: 399790 - DNA, 25 bp, Homo sapien
tagaattgtcgcaggaaagagccat

SEQ ID NO: 399791 - DNA, 25 bp, Homo sapien
ggtcatgggcctaaaacatacggag

SEQ ID NO: 399792 - DNA, 25 bp, Homo sapien
tacggaggctccatagaaaatgctc

SEQ ID NO: 399793 - DNA, 25 bp, Homo sapien
gaaggatggatctgccgataggcac

SEQ ID NO: 399794 - DNA, 25 bp, Homo sapien
gctcaattttttagtcagtgagaaa

SEQ ID NO: 399795 - DNA, 25 bp, Homo sapien
aattttttagtcagtgagaaaggca

SEQ ID NO: 399796 - DNA, 25 bp, Homo sapien
ctgctcaattttttagtcagtgaga

SEQ ID NO: 399797 - DNA, 25 bp, Homo sapien
tcaattttttagtcagtgagaaagg

SEQ ID NO: 399798 - DNA, 25 bp, Homo sapien
ggctacgtagctcccctcaggccaa

SEQ ID NO: 399799 - DNA, 25 bp, Homo sapien
gggcgcggccaggacagcaacgcac

SEQ ID NO: 399800 - DNA, 25 bp, Homo sapien
ggcggcagcgcaaacctcggctacg

SEQ ID NO: 399801 - DNA, 25 bp, Homo sapien
acctacatccgccaggcgaggagcg

SEQ ID NO: 399802 - DNA, 25 bp, Homo sapien
ccaggccggctagcgtccgggcaga

SEQ ID NO: 399803 - DNA, 25 bp, Homo sapien
aggccggctagcgtccgggcagagg

SEQ ID NO: 399804 - DNA, 25 bp, Homo sapien
caggccggctagcgtccgggcagag

SEQ ID NO: 399805 - DNA, 25 bp, Homo sapien
cgcctccagcgggcacccgcggtca

SEQ ID NO: 399806 - DNA, 25 bp, Homo sapien
gcctccagcgggcacccgcggtcag

SEQ ID NO: 399807 - DNA, 25 bp, Homo sapien
ccagcgggcacccgcggtcagccat

SEQ ID NO: 399808 - DNA, 25 bp, Homo sapien
ctccagcgggcacccgcggtcagcc

SEQ ID NO: 399809 - DNA, 25 bp, Homo sapien
tacattggagcagaaattaggagca

SEQ ID NO: 399810 - DNA, 25 bp, Homo sapien
cctaaagagccttaacaaatgcagt

SEQ ID NO: 399811 - DNA, 25 bp, Homo sapien
cgaggttcctctccatgttacataa

SEQ ID NO: 399812 - DNA, 25 bp, Homo sapien
aattgtcaatgcctagcaagcactc

SEQ ID NO: 399813 - DNA, 25 bp, Homo sapien
aagcattttcacacacactatgtga

SEQ ID NO: 399814 - DNA, 25 bp, Homo sapien
cagtttcgaagcattttcacacaca

SEQ ID NO: 399815 - DNA, 25 bp, Homo sapien
ttcgaagcattttcacacacactat

SEQ ID NO: 399816 - DNA, 25 bp, Homo sapien
gaagcattttcacacacactatgtg

SEQ ID NO: 399817 - DNA, 25 bp, Homo sapien
gaagacagcatctttgtcactgtta

SEQ ID NO: 399818 - DNA, 25 bp, Homo sapien
tcactgttaagcttcttcttccaac

SEQ ID NO: 399819 - DNA, 25 bp, Homo sapien
catctttgtcactgttaagcttctt

SEQ ID NO: 399820 - DNA, 25 bp, Homo sapien
ttgtcactgttaagcttcttcttcc

SEQ ID NO: 399821 - DNA, 25 bp, Homo sapien
tcttcatcttaatctgaagcagact

SEQ ID NO: 399822 - DNA, 25 bp, Homo sapien
tatgtgttcatgattggggggcagg

SEQ ID NO: 399823 - DNA, 25 bp, Homo sapien
gaagagtggggttccatgtacttct

SEQ ID NO: 399824 - DNA, 25 bp, Homo sapien
atcctgataggttttcaggaaccac

SEQ ID NO: 399825 - DNA, 25 bp, Homo sapien
ttataaaaatagtctccctctgcct

SEQ ID NO: 399826 - DNA, 25 bp, Homo sapien
ttttggaccatcagtacaagtgtca

SEQ ID NO: 399827 - DNA, 25 bp, Homo sapien
aactgcaagtggagaggtagcgaat

SEQ ID NO: 399828 - DNA, 25 bp, Homo sapien
tgcctcaatttacgttaaagtgccc

SEQ ID NO: 399829 - DNA, 25 bp, Homo sapien
tgaccaacacgtgaaacccaatctc

SEQ ID NO: 399830 - DNA, 25 bp, Homo sapien
actttaggagatcaatgcgggcgga

SEQ ID NO: 399831 - DNA, 25 bp, Homo sapien
tttaggagatcaatgcgggcggatc

SEQ ID NO: 399832 - DNA, 25 bp, Homo sapien
gcactttaggagatcaatgcgggcg

SEQ ID NO: 399833 - DNA, 25 bp, Homo sapien
gatcctacaagagtgatacaatgag

SEQ ID NO: 399834 - DNA, 25 bp, Homo sapien
gattaacctataagaactcgtgcat

SEQ ID NO: 399835 - DNA, 25 bp, Homo sapien
cttaagcggtgaaagaaagacagga

SEQ ID NO: 399836 - DNA, 25 bp, Homo sapien
ttttaaaaggatacagagcacaggc

SEQ ID NO: 399837 - DNA, 25 bp, Homo sapien
tcaataagcatccattaaaatgcct

SEQ ID NO: 399838 - DNA, 25 bp, Homo sapien
cttttattaactcaataagcatcca

SEQ ID NO: 399839 - DNA, 25 bp, Homo sapien
tattaactcaataagcatccattaa

SEQ ID NO: 399840 - DNA, 25 bp, Homo sapien
aaactgaataaacaccatgtgaagt

SEQ ID NO: 399841 - DNA, 25 bp, Homo sapien
gataagagaagcagtcacacgtggc

SEQ ID NO: 399842 - DNA, 25 bp, Homo sapien
aaagtcttagactaaaggcagcact

SEQ ID NO: 399843 - DNA, 25 bp, Homo sapien
cacacgtggctaatgctcactgagg

SEQ ID NO: 399844 - DNA, 25 bp, Homo sapien
cacactacgtgaaagggagatttat

SEQ ID NO: 399845 - DNA, 25 bp, Homo sapien
tagactagccttgcaactgaaagga

SEQ ID NO: 399846 - DNA, 25 bp, Homo sapien
caggaatacatcagcagactctgga

SEQ ID NO: 399847 - DNA, 25 bp, Homo sapien
caactggtggtaccttctacaggaa

SEQ ID NO: 399848 - DNA, 25 bp, Homo sapien
tatcacttggtgagctaaagccaca

SEQ ID NO: 399849 - DNA, 25 bp, Homo sapien
tacaaggtcactaggtggtaagaat

SEQ ID NO: 399850 - DNA, 25 bp, Homo sapien
gaaacatctactgggcatatgacca

SEQ ID NO: 399851 - DNA, 25 bp, Homo sapien
tctgtgcagtctatagagattggcc

SEQ ID NO: 399852 - DNA, 25 bp, Homo sapien
tatatatgtggtcaatcgttgcccg

SEQ ID NO: 399853 - DNA, 25 bp, Homo sapien
tgtacttttaattgacccgaatggc

SEQ ID NO: 399854 - DNA, 25 bp, Homo sapien
ccttggaagtacatcatccttgttc

SEQ ID NO: 399855 - DNA, 25 bp, Homo sapien
gcagtgacaatcctcatcaggttca

SEQ ID NO: 399856 - DNA, 25 bp, Homo sapien
tgattcactgcactgacccgggtac

SEQ ID NO: 399857 - DNA, 25 bp, Homo sapien
cttgaataagcggtatataacgtgc

SEQ ID NO: 399858 - DNA, 25 bp, Homo sapien
taagcggtatataacgtgcaagcag

SEQ ID NO: 399859 - DNA, 25 bp, Homo sapien
ggtatataacgtgcaagcagctttg

SEQ ID NO: 399860 - DNA, 25 bp, Homo sapien
gaataagcggtatataacgtgcaag

SEQ ID NO: 399861 - DNA, 25 bp, Homo sapien
atccccccacctcagcctcccaaag

SEQ ID NO: 399862 - DNA, 25 bp, Homo sapien
gatccccccacctcagcctcccaaa

SEQ ID NO: 399863 - DNA, 25 bp, Homo sapien
ttagtagagacaaggcttccctatg

SEQ ID NO: 399864 - DNA, 25 bp, Homo sapien
agagacaaggcttccctatgttggc

SEQ ID NO: 399865 - DNA, 25 bp, Homo sapien
cggtgggccgagacttctgctgctt

SEQ ID NO: 399866 - DNA, 25 bp, Homo sapien
ctcatccctcgaggcggtgggccga

SEQ ID NO: 399867 - DNA, 25 bp, Homo sapien
tgaccggaagcgctcatccctcgag

SEQ ID NO: 399868 - DNA, 25 bp, Homo sapien
tgcttgggtgcagcggccgtggttt

SEQ ID NO: 399869 - DNA, 25 bp, Homo sapien
tcttcgaaggcataggcatcttcct

SEQ ID NO: 399870 - DNA, 25 bp, Homo sapien
caaggacagaacgtctcttcgaagg

SEQ ID NO: 399871 - DNA, 25 bp, Homo sapien
gcttgcacggcttcagtgtggacat

SEQ ID NO: 399872 - DNA, 25 bp, Homo sapien
tgtaggtttccacagacgaatgcac

SEQ ID NO: 399873 - DNA, 25 bp, Homo sapien
ggttaaaataacgatgacaggcatg

SEQ ID NO: 399874 - DNA, 25 bp, Homo sapien
cctgtgtgcagcatgcttctgtaca

SEQ ID NO: 399875 - DNA, 25 bp, Homo sapien
agtcaagaggaggacggagttccca

SEQ ID NO: 399876 - DNA, 25 bp, Homo sapien
catgatatcgggatgagtcaagagg

SEQ ID NO: 399877 - DNA, 25 bp, Homo sapien
cagggctcgacgctggaatggctct

SEQ ID NO: 399878 - DNA, 25 bp, Homo sapien
ctcatcttctgaggcagacgacgtg

SEQ ID NO: 399879 - DNA, 25 bp, Homo sapien
gtggacgagccctgaatgacccggt

SEQ ID NO: 399880 - DNA, 25 bp, Homo sapien
tctccctcccgggtgagatgaggtg

SEQ ID NO: 399881 - DNA, 25 bp, Homo sapien
aaacacacccaaaatgaaagtggct

SEQ ID NO: 399882 - DNA, 25 bp, Homo sapien
aacacacccaaaatgaaagtggctg

SEQ ID NO: 399883 - DNA, 25 bp, Homo sapien
gaagccacctgtggacgctcaaagt

SEQ ID NO: 399884 - DNA, 25 bp, Homo sapien
aaagtacgaatgctccacgaggccc

SEQ ID NO: 399885 - DNA, 25 bp, Homo sapien
tctcacagaagccacctgtggacgc

SEQ ID NO: 399886 - DNA, 25 bp, Homo sapien
tgtggacgctcaaagtacgaatgct

SEQ ID NO: 399887 - DNA, 25 bp, Homo sapien
tccttcagtggagggcgctttggcc

SEQ ID NO: 399888 - DNA, 25 bp, Homo sapien
tcagtggagggcgctttggcctctt

SEQ ID NO: 399889 - DNA, 25 bp, Homo sapien
gaactccttcagtggagggcgcttt

SEQ ID NO: 399890 - DNA, 25 bp, Homo sapien
ctccttcagtggagggcgctttggc

SEQ ID NO: 399891 - DNA, 25 bp, Homo sapien
ggcaccacagcggtgaacagccagg

SEQ ID NO: 399892 - DNA, 25 bp, Homo sapien
ctttcccaacttctggacaggactg

SEQ ID NO: 399893 - DNA, 25 bp, Homo sapien
gcaccacagcggtgaacagccaggt

SEQ ID NO: 399894 - DNA, 25 bp, Homo sapien
tctggacaggactgtggcacctctg

SEQ ID NO: 399895 - DNA, 25 bp, Homo sapien
tcgcttccctcaggctttggctgat

SEQ ID NO: 399896 - DNA, 25 bp, Homo sapien
tcgggggacacctgcagtgagaggc

SEQ ID NO: 399897 - DNA, 25 bp, Homo sapien
ctgcaaggtggccaacagcgacggc

SEQ ID NO: 399898 - DNA, 25 bp, Homo sapien
ctctcagcacactcgtctcgcttcc

SEQ ID NO: 399899 - DNA, 25 bp, Homo sapien
cataggtgagagtgtagacggcttt

SEQ ID NO: 399900 - DNA, 25 bp, Homo sapien
ggtgagagtgtagacggctttccca

SEQ ID NO: 399901 - DNA, 25 bp, Homo sapien
taggtgagagtgtagacggctttcc

SEQ ID NO: 399902 - DNA, 25 bp, Homo sapien
agttgtatccaaggcagtcagacag

SEQ ID NO: 399903 - DNA, 25 bp, Homo sapien
tgcacaggtaccatgctcatcttct

SEQ ID NO: 399904 - DNA, 25 bp, Homo sapien
gaacatttcacaaaagtgtgtcatc

SEQ ID NO: 399905 - DNA, 25 bp, Homo sapien
atggaacatttcacaaaagtgtgtc

SEQ ID NO: 399906 - DNA, 25 bp, Homo sapien
atatggaacatttcacaaaagtgtg

SEQ ID NO: 399907 - DNA, 25 bp, Homo sapien
ttgtcagtttattaagtagagtata

SEQ ID NO: 399908 - DNA, 25 bp, Homo sapien
tgagaaatcccaaaagccactgtca

SEQ ID NO: 399909 - DNA, 25 bp, Homo sapien
tgcttgcgagccaaacgtttctgag

SEQ ID NO: 399910 - DNA, 25 bp, Homo sapien
gctgaggactccactgctgagggtc

SEQ ID NO: 399911 - DNA, 25 bp, Homo sapien
tctcggttctcctgatggtgggtgc

SEQ ID NO: 399912 - DNA, 25 bp, Homo sapien
gctctgccaggagacacccataaaa

SEQ ID NO: 399913 - DNA, 25 bp, Homo sapien
gagacacccataaaatgcaaccatg

SEQ ID NO: 399914 - DNA, 25 bp, Homo sapien
catcacagggtcactattcggaaac

SEQ ID NO: 399915 - DNA, 25 bp, Homo sapien
tttcttgttaatggcacttctatgg

SEQ ID NO: 399916 - DNA, 25 bp, Homo sapien
cacacgggacctgagccatgggttt

SEQ ID NO: 399917 - DNA, 25 bp, Homo sapien
cacgggacctgagccatgggtttgc

SEQ ID NO: 399918 - DNA, 25 bp, Homo sapien
acacgggacctgagccatgggtttg

SEQ ID NO: 399919 - DNA, 25 bp, Homo sapien
ctgcccagcagaaacccaacctgct

SEQ ID NO: 399920 - DNA, 25 bp, Homo sapien
tgtggtcagggccaagaagactcca

SEQ ID NO: 399921 - DNA, 25 bp, Homo sapien
ggcctttctgacaagcgtctgtggt

SEQ ID NO: 399922 - DNA, 25 bp, Homo sapien
agaaacccaacctgctggctgcctg

SEQ ID NO: 399923 - DNA, 25 bp, Homo sapien
atgcttcccatcaatcactagccag

SEQ ID NO: 399924 - DNA, 25 bp, Homo sapien
ctttgggggcttggctagatgcttc

SEQ ID NO: 399925 - DNA, 25 bp, Homo sapien
tcctttgggggcttggctagatgct

SEQ ID NO: 399926 - DNA, 25 bp, Homo sapien
actagccaggagagcgggggccaac

SEQ ID NO: 399927 - DNA, 25 bp, Homo sapien
tctctaagttaggaacagtcattac

SEQ ID NO: 399928 - DNA, 25 bp, Homo sapien
caagacttaagcctgtgggacatgt

SEQ ID NO: 399929 - DNA, 25 bp, Homo sapien
aagacttaagcctgtgggacatgtt

SEQ ID NO: 399930 - DNA, 25 bp, Homo sapien
gcaagacttaagcctgtgggacatg

SEQ ID NO: 399931 - DNA, 25 bp, Homo sapien
gacttaagcctgtgggacatgtttt

SEQ ID NO: 399932 - DNA, 25 bp, Homo sapien
cccagggagccagttaggagagaat

SEQ ID NO: 399933 - DNA, 25 bp, Homo sapien
tggaagttgtggctcctcttgggca

SEQ ID NO: 399934 - DNA, 25 bp, Homo sapien
gtaatggtgcgccatgggctccctc

SEQ ID NO: 399935 - DNA, 25 bp, Homo sapien
tgggctccctcataactgtctgcat

SEQ ID NO: 399936 - DNA, 25 bp, Homo sapien
aggaaaaaaacatgatgtggtattt

SEQ ID NO: 399937 - DNA, 25 bp, Homo sapien
aagatttcaaggaaaaaaacatgat

SEQ ID NO: 399938 - DNA, 25 bp, Homo sapien
ttcaaggaaaaaaacatgatgtggt

SEQ ID NO: 399939 - DNA, 25 bp, Homo sapien
caaggaaaaaaacatgatgtggtat

SEQ ID NO: 399940 - DNA, 25 bp, Homo sapien
gtcagagcccggcactgtgccagca

SEQ ID NO: 399941 - DNA, 25 bp, Homo sapien
tgccagcagggatgcgtgggacact

SEQ ID NO: 399942 - DNA, 25 bp, Homo sapien
cttctgagtacccgcacgcctgggt

SEQ ID NO: 399943 - DNA, 25 bp, Homo sapien
actgtgacccccaccgtactgcctt

SEQ ID NO: 399944 - DNA, 25 bp, Homo sapien
acctggttagcacagcccactacag

SEQ ID NO: 399945 - DNA, 25 bp, Homo sapien
acaatcccattactcattggcatgg

SEQ ID NO: 399946 - DNA, 25 bp, Homo sapien
caaacttcgtgcagatacctggtta

SEQ ID NO: 399947 - DNA, 25 bp, Homo sapien
tccttagcaagctggtggttcccca

SEQ ID NO: 399948 - DNA, 25 bp, Homo sapien
tgaaatccagcacgtttgttaatgt

SEQ ID NO: 399949 - DNA, 25 bp, Homo sapien
gaaatccagcacgtttgttaatgtt

SEQ ID NO: 399950 - DNA, 25 bp, Homo sapien
aatccagcacgtttgttaatgtttc

SEQ ID NO: 399951 - DNA, 25 bp, Homo sapien
tccagcacgtttgttaatgtttcag

SEQ ID NO: 399952 - DNA, 25 bp, Homo sapien
ggttcgccttcatcagcgcgtaggg

SEQ ID NO: 399953 - DNA, 25 bp, Homo sapien
gagtgggttcgccttcatcagcgcg

SEQ ID NO: 399954 - DNA, 25 bp, Homo sapien
gtgggttcgccttcatcagcgcgta

SEQ ID NO: 399955 - DNA, 25 bp, Homo sapien
tgggttcgccttcatcagcgcgtag

SEQ ID NO: 399956 - DNA, 25 bp, Homo sapien
gagaccagtgcatgtctcgcgactt

SEQ ID NO: 399957 - DNA, 25 bp, Homo sapien
atcagcatgcgcagtgagctgaggc

SEQ ID NO: 399958 - DNA, 25 bp, Homo sapien
acgggttggcaccatcggccacaat

SEQ ID NO: 399959 - DNA, 25 bp, Homo sapien
cccgctgagctaggagagaccagtg

SEQ ID NO: 399960 - DNA, 25 bp, Homo sapien
catgctcaagttagcgcagcctgcg

SEQ ID NO: 399961 - DNA, 25 bp, Homo sapien
tagtggcctaataaacatgcatggg

SEQ ID NO: 399962 - DNA, 25 bp, Homo sapien
tgtgcagccttgacaaagcagttcc

SEQ ID NO: 399963 - DNA, 25 bp, Homo sapien
gcttctgatgcagggtagtctccag

SEQ ID NO: 399964 - DNA, 25 bp, Homo sapien
gacagtcagcgcctcaggagaactt

SEQ ID NO: 399965 - DNA, 25 bp, Homo sapien
acctctggactggaagacgttgagg

SEQ ID NO: 399966 - DNA, 25 bp, Homo sapien
ctgcggatggcgacagtcagcgcct

SEQ ID NO: 399967 - DNA, 25 bp, Homo sapien
ctctggactggaagacgttgaggaa

SEQ ID NO: 399968 - DNA, 25 bp, Homo sapien
tatatgactataatacaagattaca

SEQ ID NO: 399969 - DNA, 25 bp, Homo sapien
caagattacaattgaggctaagaca

SEQ ID NO: 399970 - DNA, 25 bp, Homo sapien
tgtgagcacactgagttctacccac

SEQ ID NO: 399971 - DNA, 25 bp, Homo sapien
cttagggttagttccatatatggaa

SEQ ID NO: 399972 - DNA, 25 bp, Homo sapien
ctgaccaacgtcctgaacagtaagg

SEQ ID NO: 399973 - DNA, 25 bp, Homo sapien
taacttagaccgttcatcgacagga

SEQ ID NO: 399974 - DNA, 25 bp, Homo sapien
aacagtaaggactgacaacttttct

SEQ ID NO: 399975 - DNA, 25 bp, Homo sapien
tcagtatccactctgataacaccat

SEQ ID NO: 399976 - DNA, 25 bp, Homo sapien
ggaactgacgcatatttctcccact

SEQ ID NO: 399977 - DNA, 25 bp, Homo sapien
atagtacgctgtgccagttgcactg

SEQ ID NO: 399978 - DNA, 25 bp, Homo sapien
ggtaccttctaacttcacaacacat

SEQ ID NO: 399979 - DNA, 25 bp, Homo sapien
gattccaagcaatccatagtacgct

SEQ ID NO: 399980 - DNA, 25 bp, Homo sapien
gcaggcctgtcctggtgaatggcct

SEQ ID NO: 399981 - DNA, 25 bp, Homo sapien
gcctgtcaaagatgggtgctcctcc

SEQ ID NO: 399982 - DNA, 25 bp, Homo sapien
gtcctggtgaatggcctgtcaaaga

SEQ ID NO: 399983 - DNA, 25 bp, Homo sapien
ggtgctcctcctgtggtgaccggaa

SEQ ID NO: 399984 - DNA, 25 bp, Homo sapien
tctgactgccagtgctggtacagga

SEQ ID NO: 399985 - DNA, 25 bp, Homo sapien
ctgactgccagtgctggtacaggag

SEQ ID NO: 399986 - DNA, 25 bp, Homo sapien
ctctgactgccagtgctggtacagg

SEQ ID NO: 399987 - DNA, 25 bp, Homo sapien
tgtgcaggactgtgcaccagtctcg

SEQ ID NO: 399988 - DNA, 25 bp, Homo sapien
tgcaacgaggtgtcccttagccaca

SEQ ID NO: 399989 - DNA, 25 bp, Homo sapien
accaaggccacatgggaggtcagga

SEQ ID NO: 399990 - DNA, 25 bp, Homo sapien
atgaatactcacaaacctgccactc

SEQ ID NO: 399991 - DNA, 25 bp, Homo sapien
catctgcattgtgtctgcgaactcc

SEQ ID NO: 399992 - DNA, 25 bp, Homo sapien
cagtgaccatcagcccgtccagttt

SEQ ID NO: 399993 - DNA, 25 bp, Homo sapien
tccacggccagtgcggtggccacaa

SEQ ID NO: 399994 - DNA, 25 bp, Homo sapien
ggtggccacaacgtcatctgcattg

SEQ ID NO: 399995 - DNA, 25 bp, Homo sapien
tattaggaacttagacccatttctc

SEQ ID NO: 399996 - DNA, 25 bp, Homo sapien
aagacttcccgagctgcaaatgaag

SEQ ID NO: 399997 - DNA, 25 bp, Homo sapien
caaatgaaggaatctactcccggcg

SEQ ID NO: 399998 - DNA, 25 bp, Homo sapien
tggacagtaaggatattaactctgg

SEQ ID NO: 399999 - DNA, 25 bp, Homo sapien
aactgttttcagtacggacctctgt

SEQ ID NO: 400000 - DNA, 25 bp, Homo sapien
tgtggtccatggtgagaatacagat

SEQ ID NO: 400001 - DNA, 25 bp, Homo sapien
gaatacagataagctcaacatgcca

SEQ ID NO: 400002 - DNA, 25 bp, Homo sapien
ttgagtctgctatctggacaccagc

SEQ ID NO: 400003 - DNA, 25 bp, Homo sapien
tgtcctcctccgaggcatccggccg

SEQ ID NO: 400004 - DNA, 25 bp, Homo sapien
gacaatccggtcgtcgtgcagcacg

SEQ ID NO: 400005 - DNA, 25 bp, Homo sapien
caccaggacaatccggtcgtcgtgc

SEQ ID NO: 400006 - DNA, 25 bp, Homo sapien
agccaccaggacaatccggtcgtcg

SEQ ID NO: 400007 - DNA, 25 bp, Homo sapien
ccaaccacttggcacttggagtgga

SEQ ID NO: 400008 - DNA, 25 bp, Homo sapien
acagctgtaatttgtcaatttgcaa

SEQ ID NO: 400009 - DNA, 25 bp, Homo sapien
ccgggcgggacaagccaaccacttg

SEQ ID NO: 400010 - DNA, 25 bp, Homo sapien
catcactttgtatcccgtaaataca

SEQ ID NO: 400011 - DNA, 25 bp, Homo sapien
acattacacgggtgcagcgtccctt

SEQ ID NO: 400012 - DNA, 25 bp, Homo sapien
gaatccctccgagaggagccttggg

SEQ ID NO: 400013 - DNA, 25 bp, Homo sapien
aggaaccagggccagacagtacacg

SEQ ID NO: 400014 - DNA, 25 bp, Homo sapien
tccagaaagcgctgtttggtttcag

SEQ ID NO: 400015 - DNA, 25 bp, Homo sapien
ggaagcctgagcgattctcttccca

SEQ ID NO: 400016 - DNA, 25 bp, Homo sapien
tgggcgagctctctcccggaagcct

SEQ ID NO: 400017 - DNA, 25 bp, Homo sapien
cgtgcctggtcgctgtcctccaggt

SEQ ID NO: 400018 - DNA, 25 bp, Homo sapien
cacgatcattgaggctggtccaacc

SEQ ID NO: 400019 - DNA, 25 bp, Homo sapien
agagggcgacttgctcactggcgcc

SEQ ID NO: 400020 - DNA, 25 bp, Homo sapien
gagggcgacttgctcactggcgcct

SEQ ID NO: 400021 - DNA, 25 bp, Homo sapien
acgagagggcgacttgctcactggc

SEQ ID NO: 400022 - DNA, 25 bp, Homo sapien
ctgcacgagagggcgacttgctcac

SEQ ID NO: 400023 - DNA, 25 bp, Homo sapien
tgcagcacgtcagccaggaacagga

SEQ ID NO: 400024 - DNA, 25 bp, Homo sapien
cttggcgttcagcagcaagaacagc

SEQ ID NO: 400025 - DNA, 25 bp, Homo sapien
gtgtgggcacgccactgcagcacgt

SEQ ID NO: 400026 - DNA, 25 bp, Homo sapien
gaacagcgggtggtcaggagtggtg

SEQ ID NO: 400027 - DNA, 25 bp, Homo sapien
gatctggactgggactcaaagcccg

SEQ ID NO: 400028 - DNA, 25 bp, Homo sapien
tataaaactccagagcagaccagtg

SEQ ID NO: 400029 - DNA, 25 bp, Homo sapien
cagtccatatgagtcagggccccat

SEQ ID NO: 400030 - DNA, 25 bp, Homo sapien
tcaaagcccgcaaggtctgggatcc

SEQ ID NO: 400031 - DNA, 25 bp, Homo sapien
caggttgcagtgcttgtgacggtgc

SEQ ID NO: 400032 - DNA, 25 bp, Homo sapien
tgggtagaccagagccacatggtcc

SEQ ID NO: 400033 - DNA, 25 bp, Homo sapien
ttgtgcagctggacacaggttgcag

SEQ ID NO: 400034 - DNA, 25 bp, Homo sapien
cttctccatcagagccgcggccact

SEQ ID NO: 400035 - DNA, 25 bp, Homo sapien
tgcaggtggacagccccacagtgag

SEQ ID NO: 400036 - DNA, 25 bp, Homo sapien
agagctgcaggtggacagccccaca

SEQ ID NO: 400037 - DNA, 25 bp, Homo sapien
aaagagctgcaggtggacagcccca

SEQ ID NO: 400038 - DNA, 25 bp, Homo sapien
ggtggacagccccacagtgagccca

SEQ ID NO: 400039 - DNA, 25 bp, Homo sapien
gcagccatagaacgcggcaatgagg

SEQ ID NO: 400040 - DNA, 25 bp, Homo sapien
tgtggtgccgaggttctgagggtgc

SEQ ID NO: 400041 - DNA, 25 bp, Homo sapien
cacgatcatcttgacggtgggcagt

SEQ ID NO: 400042 - DNA, 25 bp, Homo sapien
aggcacgcagccacagtacaagcag

SEQ ID NO: 400043 - DNA, 25 bp, Homo sapien
tgagcagccgtgtgacagcctgcgt

SEQ ID NO: 400044 - DNA, 25 bp, Homo sapien
cctgagcagccgtgtgacagcctgc

SEQ ID NO: 400045 - DNA, 25 bp, Homo sapien
gcgtggtgaggacgcatgcagactt

SEQ ID NO: 400046 - DNA, 25 bp, Homo sapien
gacagcctgcgtggtgaggacgcat

SEQ ID NO: 400047 - DNA, 25 bp, Homo sapien
gtgtgtttttggacggcagccaggc

SEQ ID NO: 400048 - DNA, 25 bp, Homo sapien
tttttggacggcagccaggccacac

SEQ ID NO: 400049 - DNA, 25 bp, Homo sapien
tgtttttggacggcagccaggccac

SEQ ID NO: 400050 - DNA, 25 bp, Homo sapien
ggacggcagccaggccacaccacac

SEQ ID NO: 400051 - DNA, 25 bp, Homo sapien
gatttgccaaaagtcacagagccta

SEQ ID NO: 400052 - DNA, 25 bp, Homo sapien
tcattcttcatggaaacgctacccg

SEQ ID NO: 400053 - DNA, 25 bp, Homo sapien
gcttcatcaagttctcgtggcccca

SEQ ID NO: 400054 - DNA, 25 bp, Homo sapien
gcaagaatagctgtggacgggctct

SEQ ID NO: 400055 - DNA, 25 bp, Homo sapien
gacacatgatttgtccttgggagtc

SEQ ID NO: 400056 - DNA, 25 bp, Homo sapien
ggctttcacaggcaagaggcgacac

SEQ ID NO: 400057 - DNA, 25 bp, Homo sapien
gcaagaggcgacacatgatttgtcc

SEQ ID NO: 400058 - DNA, 25 bp, Homo sapien
ctgttaaacaggagacaccagcaac

SEQ ID NO: 400059 - DNA, 25 bp, Homo sapien
ttcactcccgctaatatcccagtgg

SEQ ID NO: 400060 - DNA, 25 bp, Homo sapien
aagtccaagtatgcgaggacatcgg

SEQ ID NO: 400061 - DNA, 25 bp, Homo sapien
ggcctgaaaacgcttgctatcttct

SEQ ID NO: 400062 - DNA, 25 bp, Homo sapien
cagtggttgacacgctgaagtccaa

SEQ ID NO: 400063 - DNA, 25 bp, Homo sapien
tcagaaaacgcattactctcaggct

SEQ ID NO: 400064 - DNA, 25 bp, Homo sapien
gacggttggctcaaatccccatata

SEQ ID NO: 400065 - DNA, 25 bp, Homo sapien
tattgactcccagcaaggtaagaga

SEQ ID NO: 400066 - DNA, 25 bp, Homo sapien
agtgtccgctgttcacatggctaga

SEQ ID NO: 400067 - DNA, 25 bp, Homo sapien
ataaggcgcttgtggccgcgtgcga

SEQ ID NO: 400068 - DNA, 25 bp, Homo sapien
cgatctgccgcgaggggtacagctc

SEQ ID NO: 400069 - DNA, 25 bp, Homo sapien
ccgcgaggggtacagctcacactgc

SEQ ID NO: 400070 - DNA, 25 bp, Homo sapien
gcagctttatggagcggcataaggc

SEQ ID NO: 400071 - DNA, 25 bp, Homo sapien
gagacggatcgccactttctagtgt

SEQ ID NO: 400072 - DNA, 25 bp, Homo sapien
cagaggcattcacttctagagacgg

SEQ ID NO: 400073 - DNA, 25 bp, Homo sapien
gatttctgttctgacgccaagtggg

SEQ ID NO: 400074 - DNA, 25 bp, Homo sapien
tccgaacacttggagaggatccggg

SEQ ID NO: 400075 - DNA, 25 bp, Homo sapien
cactgattggtgtcccgagtagaca

SEQ ID NO: 400076 - DNA, 25 bp, Homo sapien
tctgtgcgcctaggcccttggtgca

SEQ ID NO: 400077 - DNA, 25 bp, Homo sapien
agccacagggacacgttgctctcca

SEQ ID NO: 400078 - DNA, 25 bp, Homo sapien
ccttgtactggctgacggccgacag

SEQ ID NO: 400079 - DNA, 25 bp, Homo sapien
gaaggactgggtcagcgcaatcctg

SEQ ID NO: 400080 - DNA, 25 bp, Homo sapien
gttgaccctgcacccgaacgtggtg

SEQ ID NO: 400081 - DNA, 25 bp, Homo sapien
cacgtgcgcacacatgacaggttca

SEQ ID NO: 400082 - DNA, 25 bp, Homo sapien
gaggcagatggccacgttgaccctg

SEQ ID NO: 400083 - DNA, 25 bp, Homo sapien
tctccaactagaatagaacatcttt

SEQ ID NO: 400084 - DNA, 25 bp, Homo sapien
tagatcaggcggctacaaaacggca

SEQ ID NO: 400085 - DNA, 25 bp, Homo sapien
agagagtcttacagttattagtcac

SEQ ID NO: 400086 - DNA, 25 bp, Homo sapien
gcacattaacaactgggaaactggg

SEQ ID NO: 400087 - DNA, 25 bp, Homo sapien
ctgtcatggcgcagtgcccgcatgt

SEQ ID NO: 400088 - DNA, 25 bp, Homo sapien
cccgcatgtccacgtagacggttgt

SEQ ID NO: 400089 - DNA, 25 bp, Homo sapien
agtgcccgcatgtccacgtagacgg

SEQ ID NO: 400090 - DNA, 25 bp, Homo sapien
tgtcatggcgcagtgcccgcatgtc

SEQ ID NO: 400091 - DNA, 25 bp, Homo sapien
cagtgtggccatacttgagaatcca

SEQ ID NO: 400092 - DNA, 25 bp, Homo sapien
gacagcatcaggtaagaaacgttct

SEQ ID NO: 400093 - DNA, 25 bp, Homo sapien
tggcacccagtaagctaaacctagt

SEQ ID NO: 400094 - DNA, 25 bp, Homo sapien
caggactgggatctgagcttcaaag

SEQ ID NO: 400095 - DNA, 25 bp, Homo sapien
aaatttactacacaggtagtaatgt

SEQ ID NO: 400096 - DNA, 25 bp, Homo sapien
caatttcagtacaaaatttactaca

SEQ ID NO: 400097 - DNA, 25 bp, Homo sapien
agtacaaaatttactacacaggtag

SEQ ID NO: 400098 - DNA, 25 bp, Homo sapien
tttcagtacaaaatttactacacag

SEQ ID NO: 400099 - DNA, 25 bp, Homo sapien
gcaggctgtgcggagaaccccgttc

SEQ ID NO: 400100 - DNA, 25 bp, Homo sapien
ggctgtgcggagaaccccgttctac

SEQ ID NO: 400101 - DNA, 25 bp, Homo sapien
ccatcaatggcaggctgtgcggaga

SEQ ID NO: 400102 - DNA, 25 bp, Homo sapien
tccagactccatcaatggcaggctg

SEQ ID NO: 400103 - DNA, 25 bp, Homo sapien
gggtccccgactcatatcaagcctg

SEQ ID NO: 400104 - DNA, 25 bp, Homo sapien
aagcctggcttactcttcatgctgc

SEQ ID NO: 400105 - DNA, 25 bp, Homo sapien
gttgtgaaggcaccagggtccccga

SEQ ID NO: 400106 - DNA, 25 bp, Homo sapien
ctgcggttgtgaaggcaccagggtc

SEQ ID NO: 400107 - DNA, 25 bp, Homo sapien
ggccatggcagtgaacggagtcagg

SEQ ID NO: 400108 - DNA, 25 bp, Homo sapien
ggcagtgaacggagtcagggtggcc

SEQ ID NO: 400109 - DNA, 25 bp, Homo sapien
tgcaggagtctgtatcctggacatc

SEQ ID NO: 400110 - DNA, 25 bp, Homo sapien
ctgggtccctctctggacccctctc

SEQ ID NO: 400111 - DNA, 25 bp, Homo sapien
tttacaccaaggatgatgcagagct

SEQ ID NO: 400112 - DNA, 25 bp, Homo sapien
tcaggcccaagtgattgtaacagca

SEQ ID NO: 400113 - DNA, 25 bp, Homo sapien
gacacgggaagggagcttttcaagc

SEQ ID NO: 400114 - DNA, 25 bp, Homo sapien
tgagctaaacaattacagtgcggct

SEQ ID NO: 400115 - DNA, 25 bp, Homo sapien
gaagggatcccgtctctgggtgtca

SEQ ID NO: 400116 - DNA, 25 bp, Homo sapien
gagggtcactaagcctacaaagaca

SEQ ID NO: 400117 - DNA, 25 bp, Homo sapien
gaggtgtgagctacggttaccgcca

SEQ ID NO: 400118 - DNA, 25 bp, Homo sapien
gacaatcagccaggtgatgccagcg

SEQ ID NO: 400119 - DNA, 25 bp, Homo sapien
aagaaaacatgacacgagactctct

SEQ ID NO: 400120 - DNA, 25 bp, Homo sapien
agagctatgtcccttgttaaagaaa

SEQ ID NO: 400121 - DNA, 25 bp, Homo sapien
gaaggaggagagctatgtcccttgt

SEQ ID NO: 400122 - DNA, 25 bp, Homo sapien
gaaaacatgacacgagactctcttg

SEQ ID NO: 400123 - DNA, 25 bp, Homo sapien
cggtgtgtgcgatgatgaccttcac

SEQ ID NO: 400124 - DNA, 25 bp, Homo sapien
tgtgtgcgatgatgaccttcacgcc

SEQ ID NO: 400125 - DNA, 25 bp, Homo sapien
gtctcggtgtgtgcgatgatgacct

SEQ ID NO: 400126 - DNA, 25 bp, Homo sapien
gtgcgatgatgaccttcacgccggg

SEQ ID NO: 400127 - DNA, 25 bp, Homo sapien
aacggtgtagtacccggtggcattg

SEQ ID NO: 400128 - DNA, 25 bp, Homo sapien
cagtgagctctgttcgccgaaggaa

SEQ ID NO: 400129 - DNA, 25 bp, Homo sapien
tgaagtggtcggcatgaagcgcctc

SEQ ID NO: 400130 - DNA, 25 bp, Homo sapien
aactcagccgggcactgaagtggtc

SEQ ID NO: 400131 - DNA, 25 bp, Homo sapien
catccagagacccaaccacatacag

SEQ ID NO: 400132 - DNA, 25 bp, Homo sapien
tgagctccagagtttcatccagaga

SEQ ID NO: 400133 - DNA, 25 bp, Homo sapien
agagtttcatccagagacccaacca

SEQ ID NO: 400134 - DNA, 25 bp, Homo sapien
accacatacagtgcatcgtgccgcc

SEQ ID NO: 400135 - DNA, 25 bp, Homo sapien
atgctcctgtgtgctcggatgacag

SEQ ID NO: 400136 - DNA, 25 bp, Homo sapien
tgctcctgtgtgctcggatgacaga

SEQ ID NO: 400137 - DNA, 25 bp, Homo sapien
gatgctcctgtgtgctcggatgaca

SEQ ID NO: 400138 - DNA, 25 bp, Homo sapien
gagttgatagggatcacccctgggt

SEQ ID NO: 400139 - DNA, 25 bp, Homo sapien
ttctcaccccgagagttgataggga

SEQ ID NO: 400140 - DNA, 25 bp, Homo sapien
tggtcagccaggaagccgtcccgca

SEQ ID NO: 400141 - DNA, 25 bp, Homo sapien
gggatcacccctgggtccacgatga

SEQ ID NO: 400142 - DNA, 25 bp, Homo sapien
gctttgttaggcactgatccagact

SEQ ID NO: 400143 - DNA, 25 bp, Homo sapien
taagacggcatctcgtgctgtcacc

SEQ ID NO: 400144 - DNA, 25 bp, Homo sapien
tacagcagagaacaacctcggtgcc

SEQ ID NO: 400145 - DNA, 25 bp, Homo sapien
gaaacagggctactatgcacagtgc

SEQ ID NO: 400146 - DNA, 25 bp, Homo sapien
attttagtgtgatatacagaattcc

SEQ ID NO: 400147 - DNA, 25 bp, Homo sapien
agtgtgatatacagaattcccagag

SEQ ID NO: 400148 - DNA, 25 bp, Homo sapien
ttagtgtgatatacagaattcccag

SEQ ID NO: 400149 - DNA, 25 bp, Homo sapien
taaaaattttagtgtgatatacaga

SEQ ID NO: 400150 - DNA, 25 bp, Homo sapien
caaaataagatacaacctattcggg

SEQ ID NO: 400151 - DNA, 25 bp, Homo sapien
ttaaagacccttttcacacatttca

SEQ ID NO: 400152 - DNA, 25 bp, Homo sapien
agcataactgcttttatagtcagaa

SEQ ID NO: 400153 - DNA, 25 bp, Homo sapien
tttctttatactttaatgtgctttc

SEQ ID NO: 400154 - DNA, 25 bp, Homo sapien
aaataaatccctgagagggtttatg

SEQ ID NO: 400155 - DNA, 25 bp, Homo sapien
gttacatacgaatgctgctgtttac

SEQ ID NO: 400156 - DNA, 25 bp, Homo sapien
atacagccactgaaacatgtagaag

SEQ ID NO: 400157 - DNA, 25 bp, Homo sapien
tacatttactcatggcacacttgta

SEQ ID NO: 400158 - DNA, 25 bp, Homo sapien
aagctaaaacctgtcaataaactag

SEQ ID NO: 400159 - DNA, 25 bp, Homo sapien
tctgataagcaacttcggcaaagtt

SEQ ID NO: 400160 - DNA, 25 bp, Homo sapien
tccttactctgataagcaacttcgg

SEQ ID NO: 400161 - DNA, 25 bp, Homo sapien
tattattaaaagctaaaacctgtca

SEQ ID NO: 400162 - DNA, 25 bp, Homo sapien
tcttagaattatagcagctgagaag

SEQ ID NO: 400163 - DNA, 25 bp, Homo sapien
gggtcactcaaatcatagtaagtac

SEQ ID NO: 400164 - DNA, 25 bp, Homo sapien
tcccaaggtagtgcagggcatcata

SEQ ID NO: 400165 - DNA, 25 bp, Homo sapien
ggagctggtagaactcaaagttatt

SEQ ID NO: 400166 - DNA, 25 bp, Homo sapien
agattgacccttctatagttataaa

SEQ ID NO: 400167 - DNA, 25 bp, Homo sapien
gatagattgacccttctatagttat

SEQ ID NO: 400168 - DNA, 25 bp, Homo sapien
ttatagaaagtgagacattgaagtc

SEQ ID NO: 400169 - DNA, 25 bp, Homo sapien
tgtaattgttagcttttcctgatag

SEQ ID NO: 400170 - DNA, 25 bp, Homo sapien
taacagtactcctcctgtgataatg

SEQ ID NO: 400171 - DNA, 25 bp, Homo sapien
gagcacataaccctcatgacccaaa

SEQ ID NO: 400172 - DNA, 25 bp, Homo sapien
gggaggccagacctgcccttttata

SEQ ID NO: 400173 - DNA, 25 bp, Homo sapien
ggcaggacccttgtgctgcatcatc

SEQ ID NO: 400174 - DNA, 25 bp, Homo sapien
cattttgcgacctgtcatatggtct

SEQ ID NO: 400175 - DNA, 25 bp, Homo sapien
tcactatcgtcgttcagttgaagaa

SEQ ID NO: 400176 - DNA, 25 bp, Homo sapien
ggagaaagttccacgtgctgaatag

SEQ ID NO: 400177 - DNA, 25 bp, Homo sapien
ttgaggctcattttgcgacctgtca

SEQ ID NO: 400178 - DNA, 25 bp, Homo sapien
cttttgagaattgtccttagtccac

SEQ ID NO: 400179 - DNA, 25 bp, Homo sapien
cactctgtgggctgtttacgctgct

SEQ ID NO: 400180 - DNA, 25 bp, Homo sapien
tctgggtaaacgatcctatcatcaa

SEQ ID NO: 400181 - DNA, 25 bp, Homo sapien
tgtttggctttccatacctgggtta

SEQ ID NO: 400182 - DNA, 25 bp, Homo sapien
atggcagcaggcaacgacagagtga

SEQ ID NO: 400183 - DNA, 25 bp, Homo sapien
tcgtagatagagtagggctacaggc

SEQ ID NO: 400184 - DNA, 25 bp, Homo sapien
aatgctggggctacagaccccatgc

SEQ ID NO: 400185 - DNA, 25 bp, Homo sapien
gttagttacttcgtagatagagtag

SEQ ID NO: 400186 - DNA, 25 bp, Homo sapien
tggcagggcacctgacggccaacat

SEQ ID NO: 400187 - DNA, 25 bp, Homo sapien
ccaggaaccagagcacactgaacac

SEQ ID NO: 400188 - DNA, 25 bp, Homo sapien
ggaaccagagcacactgaacacgca

SEQ ID NO: 400189 - DNA, 25 bp, Homo sapien
gcacactgaacacgcagggcctggc

SEQ ID NO: 400190 - DNA, 25 bp, Homo sapien
gagggctctctttccggctcgtaga

SEQ ID NO: 400191 - DNA, 25 bp, Homo sapien
tcaaacggcctttccactgtgtgca

SEQ ID NO: 400192 - DNA, 25 bp, Homo sapien
taatgacctcctgtggagcctaaag

SEQ ID NO: 400193 - DNA, 25 bp, Homo sapien
taggtgctatcagattggcgaccca

SEQ ID NO: 400194 - DNA, 25 bp, Homo sapien
cattcacggcttgggaagcgacaac

SEQ ID NO: 400195 - DNA, 25 bp, Homo sapien
gtttctccgctgagttccgcgtcca

SEQ ID NO: 400196 - DNA, 25 bp, Homo sapien
tggacggtcctttccaggagcctga

SEQ ID NO: 400197 - DNA, 25 bp, Homo sapien
tcttgcgaggcgaggccaggttctc

SEQ ID NO: 400198 - DNA, 25 bp, Homo sapien
tgtccttccttacgtgcagtccagc

SEQ ID NO: 400199 - DNA, 25 bp, Homo sapien
ttccttacgtgcagtccagccatct

SEQ ID NO: 400200 - DNA, 25 bp, Homo sapien
tggcctgtccttccttacgtgcagt

SEQ ID NO: 400201 - DNA, 25 bp, Homo sapien
gtgcagtccagccatctgagctgcc

SEQ ID NO: 400202 - DNA, 25 bp, Homo sapien
gggcggaggcctctgtccgccagcg

SEQ ID NO: 400203 - DNA, 25 bp, Homo sapien
cgccagcgacgcacacgcagtgcga

SEQ ID NO: 400204 - DNA, 25 bp, Homo sapien
gagctcccgtttggacgccagggaa

SEQ ID NO: 400205 - DNA, 25 bp, Homo sapien
ggaaagtggctgagatcgcgaaggc

SEQ ID NO: 400206 - DNA, 25 bp, Homo sapien
gggcgtggccgcgaagggcgtgaca

SEQ ID NO: 400207 - DNA, 25 bp, Homo sapien
tcaggctgggacagcgccgcgagct

SEQ ID NO: 400208 - DNA, 25 bp, Homo sapien
gcgtggacgcaggggcacgagaggg

SEQ ID NO: 400209 - DNA, 25 bp, Homo sapien
cgtggccgcgaagggcgtgacagag

SEQ ID NO: 400210 - DNA, 25 bp, Homo sapien
ccctcgggaggaacaggatcatgga

SEQ ID NO: 400211 - DNA, 25 bp, Homo sapien
aacaggatcatggagggttggaaca

SEQ ID NO: 400212 - DNA, 25 bp, Homo sapien
taagatgccctcgggaggaacagga

SEQ ID NO: 400213 - DNA, 25 bp, Homo sapien
gatgccctcgggaggaacaggatca

SEQ ID NO: 400214 - DNA, 25 bp, Homo sapien
aaatgcatgcttcacttctaaatcc

SEQ ID NO: 400215 - DNA, 25 bp, Homo sapien
ttgtgatattcgtagttacaaatgc

SEQ ID NO: 400216 - DNA, 25 bp, Homo sapien
tattcgtagttacaaatgcttactg

SEQ ID NO: 400217 - DNA, 25 bp, Homo sapien
gcagtgcgcgcaggaccctgccctc

SEQ ID NO: 400218 - DNA, 25 bp, Homo sapien
ttccagtgatagtgtaatccacaca

SEQ ID NO: 400219 - DNA, 25 bp, Homo sapien
tttccagtgatagtgtaatccacac

SEQ ID NO: 400220 - DNA, 25 bp, Homo sapien
gaccttacagtgtttccactaacag

SEQ ID NO: 400221 - DNA, 25 bp, Homo sapien
ctgggaccttacagtgtttccacta

SEQ ID NO: 400222 - DNA, 25 bp, Homo sapien
ttacagtgtttccactaacaggaac

SEQ ID NO: 400223 - DNA, 25 bp, Homo sapien
cagtgtttccactaacaggaaccaa

SEQ ID NO: 400224 - DNA, 25 bp, Homo sapien
ttaacttctaatgtgcatgatgtcc

SEQ ID NO: 400225 - DNA, 25 bp, Homo sapien
gttttcttcactagtctgcaaggtg

SEQ ID NO: 400226 - DNA, 25 bp, Homo sapien
tagatcaggtgtcgacttaaggcaa

SEQ ID NO: 400227 - DNA, 25 bp, Homo sapien
catgatgtcctctaccaaatagaag

SEQ ID NO: 400228 - DNA, 25 bp, Homo sapien
ctcttaggctctgcctcataactgc

SEQ ID NO: 400229 - DNA, 25 bp, Homo sapien
tctcttaggctctgcctcataactg

SEQ ID NO: 400230 - DNA, 25 bp, Homo sapien
tcttaggctctgcctcataactgct

SEQ ID NO: 400231 - DNA, 25 bp, Homo sapien
cttaggctctgcctcataactgctg

SEQ ID NO: 400232 - DNA, 25 bp, Homo sapien
tgggacagtcacctgatgttgccat

SEQ ID NO: 400233 - DNA, 25 bp, Homo sapien
ctgcgattcacttctgggacagtca

SEQ ID NO: 400234 - DNA, 25 bp, Homo sapien
cgattcacttctgggacagtcacct

SEQ ID NO: 400235 - DNA, 25 bp, Homo sapien
cacttctgggacagtcacctgatgt

SEQ ID NO: 400236 - DNA, 25 bp, Homo sapien
gccaaatgaaagctcattggaatga

SEQ ID NO: 400237 - DNA, 25 bp, Homo sapien
gacataacagatacggaaatgcttg

SEQ ID NO: 400238 - DNA, 25 bp, Homo sapien
gaactacagacacacccgacagtat

SEQ ID NO: 400239 - DNA, 25 bp, Homo sapien
gaaaaataagatgtccacggaatta

SEQ ID NO: 400240 - DNA, 25 bp, Homo sapien
tgcaatgccattactggagcacaga

SEQ ID NO: 400241 - DNA, 25 bp, Homo sapien
catttctaacccatgagactgacca

SEQ ID NO: 400242 - DNA, 25 bp, Homo sapien
aagcactattgtgggctactgacag

SEQ ID NO: 400243 - DNA, 25 bp, Homo sapien
aagacatctcttctataatggaggg

SEQ ID NO: 400244 - DNA, 25 bp, Homo sapien
tatatacacccaataacagggactc

SEQ ID NO: 400245 - DNA, 25 bp, Homo sapien
gtctttgcaagtactcatggaacac

SEQ ID NO: 400246 - DNA, 25 bp, Homo sapien
gattagaacataaagcaagcctgaa

SEQ ID NO: 400247 - DNA, 25 bp, Homo sapien
agaatgctacactcaacaactgcag

SEQ ID NO: 400248 - DNA, 25 bp, Homo sapien
tagactaaatactccaattaagagg

SEQ ID NO: 400249 - DNA, 25 bp, Homo sapien
gaaattgaattaggatgcatactgc

SEQ ID NO: 400250 - DNA, 25 bp, Homo sapien
tatggacgctggtaaatgaaactaa

SEQ ID NO: 400251 - DNA, 25 bp, Homo sapien
tcatcacattcgtcataacatgaag

SEQ ID NO: 400252 - DNA, 25 bp, Homo sapien
gagtcaggtcaacagaaattttcca

SEQ ID NO: 400253 - DNA, 25 bp, Homo sapien
tatcttgtttatgatcagcgcctca

SEQ ID NO: 400254 - DNA, 25 bp, Homo sapien
gaatagagcatgagacatgtcaaac

SEQ ID NO: 400255 - DNA, 25 bp, Homo sapien
aacttatgtttacatggagacccca

SEQ ID NO: 400256 - DNA, 25 bp, Homo sapien
tcagaaacaggcaccactagtgtct

SEQ ID NO: 400257 - DNA, 25 bp, Homo sapien
ctagtgtctatttggtgaggagccc

SEQ ID NO: 400258 - DNA, 25 bp, Homo sapien
tatctggaccctaaaagagaacatc

SEQ ID NO: 400259 - DNA, 25 bp, Homo sapien
ggtgatcatcaaccccatgaagaga

SEQ ID NO: 400260 - DNA, 25 bp, Homo sapien
gagaccggcctcactgcactcagca

SEQ ID NO: 400261 - DNA, 25 bp, Homo sapien
aggagaccggcctcactgcactcag

SEQ ID NO: 400262 - DNA, 25 bp, Homo sapien
tgcaggagaccggcctcactgcact

SEQ ID NO: 400263 - DNA, 25 bp, Homo sapien
caggagaccggcctcactgcactca

SEQ ID NO: 400264 - DNA, 25 bp, Homo sapien
ggtctcatcggtggcagcgtagtcc

SEQ ID NO: 400265 - DNA, 25 bp, Homo sapien
gtagtccgcgatggccacaaactcc

SEQ ID NO: 400266 - DNA, 25 bp, Homo sapien
tcatcggtggcagcgtagtccgcga

SEQ ID NO: 400267 - DNA, 25 bp, Homo sapien
tggcagcgtagtccgcgatggccac

SEQ ID NO: 400268 - DNA, 25 bp, Homo sapien
catggtttgccggaatgtacccaca

SEQ ID NO: 400269 - DNA, 25 bp, Homo sapien
cagagttccatagctgccgaagtac

SEQ ID NO: 400270 - DNA, 25 bp, Homo sapien
gaagtactcttcatcctgccacgtg

SEQ ID NO: 400271 - DNA, 25 bp, Homo sapien
gtggtttgtctcaggataagaattt

SEQ ID NO: 400272 - DNA, 25 bp, Homo sapien
gctgagtggctacaacagaggagct

SEQ ID NO: 400273 - DNA, 25 bp, Homo sapien
tggcttccacacaaccatgtcagag

SEQ ID NO: 400274 - DNA, 25 bp, Homo sapien
gagctctggcctgtaagactatggg

SEQ ID NO: 400275 - DNA, 25 bp, Homo sapien
gactatgggcctgctctgaacgttg

SEQ ID NO: 400276 - DNA, 25 bp, Homo sapien
cactgcctgtgacctagagccatgc

SEQ ID NO: 400277 - DNA, 25 bp, Homo sapien
cctgaccccaacacccctatggaag

SEQ ID NO: 400278 - DNA, 25 bp, Homo sapien
tgcctgtgacctagagccatgctga

SEQ ID NO: 400279 - DNA, 25 bp, Homo sapien
ctgaccccaacacccctatggaaga

SEQ ID NO: 400280 - DNA, 25 bp, Homo sapien
ggtatttagttgttcgtggctggtc

SEQ ID NO: 400281 - DNA, 25 bp, Homo sapien
tttagttgttcgtggctggtctgcc

SEQ ID NO: 400282 - DNA, 25 bp, Homo sapien
gacactgtggtatttagttgttcgt

SEQ ID NO: 400283 - DNA, 25 bp, Homo sapien
actgtggtatttagttgttcgtggc

SEQ ID NO: 400284 - DNA, 25 bp, Homo sapien
gagactgatgatcccagtcccacag

SEQ ID NO: 400285 - DNA, 25 bp, Homo sapien
tccaggatgactttatccgtcaggg

SEQ ID NO: 400286 - DNA, 25 bp, Homo sapien
gccgcgcatagtgtgcacagaagag

SEQ ID NO: 400287 - DNA, 25 bp, Homo sapien
ctctaggccgcgcatagtgtgcaca

SEQ ID NO: 400288 - DNA, 25 bp, Homo sapien
gaggcaccgtcagcgtacatccggc

SEQ ID NO: 400289 - DNA, 25 bp, Homo sapien
gcagcagaggcaccgtcagcgtaca

SEQ ID NO: 400290 - DNA, 25 bp, Homo sapien
ggcacacggcccgtcatctactctc

SEQ ID NO: 400291 - DNA, 25 bp, Homo sapien
atccggccggcacacggcccgtcat

SEQ ID NO: 400292 - DNA, 25 bp, Homo sapien
gtgatgatgtcagcaaagccgttct

SEQ ID NO: 400293 - DNA, 25 bp, Homo sapien
caccttctgctggtacacggtgatg

SEQ ID NO: 400294 - DNA, 25 bp, Homo sapien
cccgtgtgctgtgccatctcactgg

SEQ ID NO: 400295 - DNA, 25 bp, Homo sapien
tcagcaaagccgttctgcaggacca

SEQ ID NO: 400296 - DNA, 25 bp, Homo sapien
tcacgcacgacccttgagatcctga

SEQ ID NO: 400297 - DNA, 25 bp, Homo sapien
gatcctgaggttggcccagccgagc

SEQ ID NO: 400298 - DNA, 25 bp, Homo sapien
tcaaaatgaatcacgcacgaccctt

SEQ ID NO: 400299 - DNA, 25 bp, Homo sapien
taattagacctcacattagggaaaa

SEQ ID NO: 400300 - DNA, 25 bp, Homo sapien
tacagatgcccaagtggcttcacag

SEQ ID NO: 400301 - DNA, 25 bp, Homo sapien
caagcagacagcgtttgtgcagggc

SEQ ID NO: 400302 - DNA, 25 bp, Homo sapien
gcagggcatattcacaggcaaccag

SEQ ID NO: 400303 - DNA, 25 bp, Homo sapien
gatttttacagatccccgaggagaa

SEQ ID NO: 400304 - DNA, 25 bp, Homo sapien
agcagccatactccacactccttca

SEQ ID NO: 400305 - DNA, 25 bp, Homo sapien
ttgggatgctccactacaatgtcct

SEQ ID NO: 400306 - DNA, 25 bp, Homo sapien
tccactacaatgtcctgtgtcccag

SEQ ID NO: 400307 - DNA, 25 bp, Homo sapien
tgggtctctacactgagacaaagtt

SEQ ID NO: 400308 - DNA, 25 bp, Homo sapien
acaggactaaaagcccaatgccatc

SEQ ID NO: 400309 - DNA, 25 bp, Homo sapien
atttcaacaggactaaaagcccaat

SEQ ID NO: 400310 - DNA, 25 bp, Homo sapien
tttcaacaggactaaaagcccaatg

SEQ ID NO: 400311 - DNA, 25 bp, Homo sapien
tcaacaggactaaaagcccaatgcc

SEQ ID NO: 400312 - DNA, 25 bp, Homo sapien
agtgaaggtgggtacaaccgcacca

SEQ ID NO: 400313 - DNA, 25 bp, Homo sapien
gtgaaggtgggtacaaccgcaccaa

SEQ ID NO: 400314 - DNA, 25 bp, Homo sapien
tgaaggtgggtacaaccgcaccaac

SEQ ID NO: 400315 - DNA, 25 bp, Homo sapien
ggccaggaggacgtgaagagggcca

SEQ ID NO: 400316 - DNA, 25 bp, Homo sapien
gcaggggagaatgcggcagctcagg

SEQ ID NO: 400317 - DNA, 25 bp, Homo sapien
caggaggacgtgaagagggccagac

SEQ ID NO: 400318 - DNA, 25 bp, Homo sapien
gccaggaggacgtgaagagggccag

SEQ ID NO: 400319 - DNA, 25 bp, Homo sapien
catgcccttgctgcactgactgaaa

SEQ ID NO: 400320 - DNA, 25 bp, Homo sapien
tatttaactcttgagcccatctgag

SEQ ID NO: 400321 - DNA, 25 bp, Homo sapien
tccaaatcagtcgttccagcaccat

SEQ ID NO: 400322 - DNA, 25 bp, Homo sapien
tgaaagctgcccctcctatgctaaa

SEQ ID NO: 400323 - DNA, 25 bp, Homo sapien
tgtgcaatggagatcctcagtgacc

SEQ ID NO: 400324 - DNA, 25 bp, Homo sapien
aattagggctcaattgtcacctgct

SEQ ID NO: 400325 - DNA, 25 bp, Homo sapien
gcttctcggaaatcgtggcgtggcc

SEQ ID NO: 400326 - DNA, 25 bp, Homo sapien
taacaacagtaagactgagtctggc

SEQ ID NO: 400327 - DNA, 25 bp, Homo sapien
caaatccttggatgctaaagtcccc

SEQ ID NO: 400328 - DNA, 25 bp, Homo sapien
tctaagtgtagccataagcggtcct

SEQ ID NO: 400329 - DNA, 25 bp, Homo sapien
tgccacaaactgaaagtgcccgtgt

SEQ ID NO: 400330 - DNA, 25 bp, Homo sapien
gaaagttcggaaatgctccacgcca

SEQ ID NO: 400331 - DNA, 25 bp, Homo sapien
gacctgaaagagctagaactcactt

SEQ ID NO: 400332 - DNA, 25 bp, Homo sapien
ttgggaaagttcaggattgggcatc

SEQ ID NO: 400333 - DNA, 25 bp, Homo sapien
acttatctacccacgaggaagggca

SEQ ID NO: 400334 - DNA, 25 bp, Homo sapien
gcaagtgggcgtgccaggctctttt

SEQ ID NO: 400335 - DNA, 25 bp, Homo sapien
gtctataagaaagcacccacctgtt

SEQ ID NO: 400336 - DNA, 25 bp, Homo sapien
tggacgcaccagtttatccttaagg

SEQ ID NO: 400337 - DNA, 25 bp, Homo sapien
ctcctgggcataaggtgagtgcaca

SEQ ID NO: 400338 - DNA, 25 bp, Homo sapien
gcatatctctgggttgaacacacag

SEQ ID NO: 400339 - DNA, 25 bp, Homo sapien
tatttggtccgtagcattctcagaa

SEQ ID NO: 400340 - DNA, 25 bp, Homo sapien
gcttaagaaaccgaaagccacgcag

SEQ ID NO: 400341 - DNA, 25 bp, Homo sapien
taggccagtgtaccatgcaagagaa

SEQ ID NO: 400342 - DNA, 25 bp, Homo sapien
tctcagtcacggaagagctcgtagc

SEQ ID NO: 400343 - DNA, 25 bp, Homo sapien
cacaaggtgcaacgcagccatggtg

SEQ ID NO: 400344 - DNA, 25 bp, Homo sapien
gagcaccttgctacgataatcctta

SEQ ID NO: 400345 - DNA, 25 bp, Homo sapien
gaactcgtacgcgttgtcccagaag

SEQ ID NO: 400346 - DNA, 25 bp, Homo sapien
ggatggactcgatcatgaactcaaa

SEQ ID NO: 400347 - DNA, 25 bp, Homo sapien
ccaaccgtcgtatgggatctcccag

SEQ ID NO: 400348 - DNA, 25 bp, Homo sapien
tggcgtgagagaacaagggctaatc

SEQ ID NO: 400349 - DNA, 25 bp, Homo sapien
catggatgtctgtcgctgacgctga

SEQ ID NO: 400350 - DNA, 25 bp, Homo sapien
gatttctgccacatagactgccaga

SEQ ID NO: 400351 - DNA, 25 bp, Homo sapien
tgtatacacggtttattctgccaag

SEQ ID NO: 400352 - DNA, 25 bp, Homo sapien
cagcagtgctccaccagatggatat

SEQ ID NO: 400353 - DNA, 25 bp, Homo sapien
tgatgccaacctctaaggccctggc

SEQ ID NO: 400354 - DNA, 25 bp, Homo sapien
tttgcttgtctggtagggaaaacag

SEQ ID NO: 400355 - DNA, 25 bp, Homo sapien
gaaaaggtcaaagcgactgttgaga

SEQ ID NO: 400356 - DNA, 25 bp, Homo sapien
gggaccgcggtgagtgctctccctt

SEQ ID NO: 400357 - DNA, 25 bp, Homo sapien
ttctgtgtcaccaggatgctaagcc

SEQ ID NO: 400358 - DNA, 25 bp, Homo sapien
aaaacacacacgtgggaccgcggtg

SEQ ID NO: 400359 - DNA, 25 bp, Homo sapien
cacggttctcatgtccaactgcaat

SEQ ID NO: 400360 - DNA, 25 bp, Homo sapien
tctagatcagaaatttgcacggttc

SEQ ID NO: 400361 - DNA, 25 bp, Homo sapien
caactgcaatatagtgcacggttca

SEQ ID NO: 400362 - DNA, 25 bp, Homo sapien
tagtgcacggttcagagagacagtc

SEQ ID NO: 400363 - DNA, 25 bp, Homo sapien
gaagatgctgagaatattaaacata

SEQ ID NO: 400364 - DNA, 25 bp, Homo sapien
cactgattatcgaatgtaaggagca

SEQ ID NO: 400365 - DNA, 25 bp, Homo sapien
ctctggtctgagtgtttcgtggtca

SEQ ID NO: 400366 - DNA, 25 bp, Homo sapien
aatggtgtacaatatgaaagaatca

SEQ ID NO: 400367 - DNA, 25 bp, Homo sapien
caaaacccgcatcgtgagttcagag

SEQ ID NO: 400368 - DNA, 25 bp, Homo sapien
tcggcgctcagctcttccagttaag

SEQ ID NO: 400369 - DNA, 25 bp, Homo sapien
cgctgaatgcgtcaggaaccgtaga

SEQ ID NO: 400370 - DNA, 25 bp, Homo sapien
tccagttaaggagttggagagctcc

SEQ ID NO: 400371 - DNA, 25 bp, Homo sapien
gctctggaagtggacgctaaaccag

SEQ ID NO: 400372 - DNA, 25 bp, Homo sapien
ttcctgatgtcgaagcgcagctcgc

SEQ ID NO: 400373 - DNA, 25 bp, Homo sapien
ggaagggcccggtgctgagcacctg

SEQ ID NO: 400374 - DNA, 25 bp, Homo sapien
ctaaaccaggccgtgaagccgtgca

SEQ ID NO: 400375 - DNA, 25 bp, Homo sapien
cactgggttgcgttggaaacatctc

SEQ ID NO: 400376 - DNA, 25 bp, Homo sapien
catgaagagctgtggtgctcctcgc

SEQ ID NO: 400377 - DNA, 25 bp, Homo sapien
gatgggtataactggcctccaagct

SEQ ID NO: 400378 - DNA, 25 bp, Homo sapien
cagctgcactaaaggtcccgtgtgg

SEQ ID NO: 400379 - DNA, 25 bp, Homo sapien
tgcaagacaggggtgcgtgtgacct

SEQ ID NO: 400380 - DNA, 25 bp, Homo sapien
tgagctagggcagtctccacatggc

SEQ ID NO: 400381 - DNA, 25 bp, Homo sapien
gctagggcagtctccacatggccct

SEQ ID NO: 400382 - DNA, 25 bp, Homo sapien
gggcagtctccacatggccctcggg

SEQ ID NO: 400383 - DNA, 25 bp, Homo sapien
tgaacccgtgaccacgtctcctgta

SEQ ID NO: 400384 - DNA, 25 bp, Homo sapien
acaactgaacccgtgaccacgtctc

SEQ ID NO: 400385 - DNA, 25 bp, Homo sapien
cgtctcctgtatggacagggactgg

SEQ ID NO: 400386 - DNA, 25 bp, Homo sapien
tgaccacgtctcctgtatggacagg

SEQ ID NO: 400387 - DNA, 25 bp, Homo sapien
cacttcccgtgctgtcagatgggaa

SEQ ID NO: 400388 - DNA, 25 bp, Homo sapien
aaatgaagccaatgacaacaggcgc

SEQ ID NO: 400389 - DNA, 25 bp, Homo sapien
tgaagccaatgacaacaggcgcttt

SEQ ID NO: 400390 - DNA, 25 bp, Homo sapien
tgtcagatgggaaatgaagccaatg

SEQ ID NO: 400391 - DNA, 25 bp, Homo sapien
gctgccagtcagaacacgcatcaca

SEQ ID NO: 400392 - DNA, 25 bp, Homo sapien
cacgcctagactaactgctgcctgg

SEQ ID NO: 400393 - DNA, 25 bp, Homo sapien
acgcatcacagacgacacgcctaga

SEQ ID NO: 400394 - DNA, 25 bp, Homo sapien
gacgacacgcctagactaactgctg

SEQ ID NO: 400395 - DNA, 25 bp, Homo sapien
cagatggggaagactttttctccaa

SEQ ID NO: 400396 - DNA, 25 bp, Homo sapien
tctccagatggggaagactttttct

SEQ ID NO: 400397 - DNA, 25 bp, Homo sapien
catctccagatggggaagacttttt

SEQ ID NO: 400398 - DNA, 25 bp, Homo sapien
tccagatggggaagactttttctcc

SEQ ID NO: 400399 - DNA, 25 bp, Homo sapien
tgtgaaggaccctgacgtcacctgc

SEQ ID NO: 400400 - DNA, 25 bp, Homo sapien
gaaacacagcctacttctagagggc

SEQ ID NO: 400401 - DNA, 25 bp, Homo sapien
gaatgttcaccgactttcgcaggag

SEQ ID NO: 400402 - DNA, 25 bp, Homo sapien
taagggcaccactaacataggaggt

SEQ ID NO: 400403 - DNA, 25 bp, Homo sapien
aatatttattgagcatgtgcgatgg

SEQ ID NO: 400404 - DNA, 25 bp, Homo sapien
aaaaatatttattgagcatgtgcga

SEQ ID NO: 400405 - DNA, 25 bp, Homo sapien
aaaatatttattgagcatgtgcgat

SEQ ID NO: 400406 - DNA, 25 bp, Homo sapien
aaatatttattgagcatgtgcgatg

SEQ ID NO: 400407 - DNA, 25 bp, Homo sapien
gaaaaacttataaagcaatgcatat

SEQ ID NO: 400408 - DNA, 25 bp, Homo sapien
tctactgatgtggaagttttttcac

SEQ ID NO: 400409 - DNA, 25 bp, Homo sapien
aaaattatggacatgtatctactga

SEQ ID NO: 400410 - DNA, 25 bp, Homo sapien
gcaatgcatatagtatgatcctgta

SEQ ID NO: 400411 - DNA, 25 bp, Homo sapien
tatgtacccatgactagcactgttt

SEQ ID NO: 400412 - DNA, 25 bp, Homo sapien
cctggatgctggttacatgtgcgtc

SEQ ID NO: 400413 - DNA, 25 bp, Homo sapien
tgtgcgtccactttataaaatgcca

SEQ ID NO: 400414 - DNA, 25 bp, Homo sapien
gacagttacaagtcaggacatcacc

SEQ ID NO: 400415 - DNA, 25 bp, Homo sapien
aatgtgtacatacatgcaccaaaac

SEQ ID NO: 400416 - DNA, 25 bp, Homo sapien
catgcagttgaatactatgccacaa

SEQ ID NO: 400417 - DNA, 25 bp, Homo sapien
gaaaaagtcaaccacaaccacactg

SEQ ID NO: 400418 - DNA, 25 bp, Homo sapien
gtaatcatcatagctaaaccatggc

SEQ ID NO: 400419 - DNA, 25 bp, Homo sapien
ctggccgccttccgcgtgagggtgg

SEQ ID NO: 400420 - DNA, 25 bp, Homo sapien
ggcgctggaaccccagcgctgggag

SEQ ID NO: 400421 - DNA, 25 bp, Homo sapien
ggagctgcgcgcaccgggatccgct

SEQ ID NO: 400422 - DNA, 25 bp, Homo sapien
gcaccttcccgggcgcacagagccc

SEQ ID NO: 400423 - DNA, 25 bp, Homo sapien
ccgtttcggaaagaagcgggcgcag

SEQ ID NO: 400424 - DNA, 25 bp, Homo sapien
acgctccctgaacccgtccctctgg

SEQ ID NO: 400425 - DNA, 25 bp, Homo sapien
gacgctccctgaacccgtccctctg

SEQ ID NO: 400426 - DNA, 25 bp, Homo sapien
tttcggaaagaagcgggcgcagacc

SEQ ID NO: 400427 - DNA, 25 bp, Homo sapien
gcccggcgttatgctgaccacttgc

SEQ ID NO: 400428 - DNA, 25 bp, Homo sapien
tttccgaattcgcccggcgttatgc

SEQ ID NO: 400429 - DNA, 25 bp, Homo sapien
aattcgcccggcgttatgctgacca

SEQ ID NO: 400430 - DNA, 25 bp, Homo sapien
ttatgctgaccacttgcgagcgccg

SEQ ID NO: 400431 - DNA, 25 bp, Homo sapien
caactccttccaagtgggtcgtcca

SEQ ID NO: 400432 - DNA, 25 bp, Homo sapien
tttttgtggctcgaaggacacacgg

SEQ ID NO: 400433 - DNA, 25 bp, Homo sapien
ccctcccaggaacggcggagttctg

SEQ ID NO: 400434 - DNA, 25 bp, Homo sapien
tctttgctcacggaggacgtgcctc

SEQ ID NO: 400435 - DNA, 25 bp, Homo sapien
gacatggcaatacttggattttgtg

SEQ ID NO: 400436 - DNA, 25 bp, Homo sapien
ctctctattttgaggtctgcaacag

SEQ ID NO: 400437 - DNA, 25 bp, Homo sapien
tatgaacactaggatgaatgaaaac

SEQ ID NO: 400438 - DNA, 25 bp, Homo sapien
gctggaacagtctggctgcaagaca

SEQ ID NO: 400439 - DNA, 25 bp, Homo sapien
aaagctcagactgtgaaatccttgc

SEQ ID NO: 400440 - DNA, 25 bp, Homo sapien
ttactgtccttggtcaaagctcaga

SEQ ID NO: 400441 - DNA, 25 bp, Homo sapien
ccttggtcaaagctcagactgtgaa

SEQ ID NO: 400442 - DNA, 25 bp, Homo sapien
tgtccttggtcaaagctcagactgt

SEQ ID NO: 400443 - DNA, 25 bp, Homo sapien
caagtggctgcaaacctaatgagat

SEQ ID NO: 400444 - DNA, 25 bp, Homo sapien
ttttgaagatagtcgaagggtcctc

SEQ ID NO: 400445 - DNA, 25 bp, Homo sapien
tcttctaggtacagaataatgcccc

SEQ ID NO: 400446 - DNA, 25 bp, Homo sapien
gagcctgtgagaagggtctgaccta

SEQ ID NO: 400447 - DNA, 25 bp, Homo sapien
acgtattgaggacagccatcaccca

SEQ ID NO: 400448 - DNA, 25 bp, Homo sapien
taacgcatagcggtcaagtcaacgt

SEQ ID NO: 400449 - DNA, 25 bp, Homo sapien
aattttggtacatgtatataacgca

SEQ ID NO: 400450 - DNA, 25 bp, Homo sapien
tgttaagtacagtccccctactcca

SEQ ID NO: 400451 - DNA, 25 bp, Homo sapien
ggccaagccggtcgtgctgctccag

SEQ ID NO: 400452 - DNA, 25 bp, Homo sapien
ggagaaggccaagccggtcgtgctg

SEQ ID NO: 400453 - DNA, 25 bp, Homo sapien
agaaggccaagccggtcgtgctgct

SEQ ID NO: 400454 - DNA, 25 bp, Homo sapien
aaggccaagccggtcgtgctgctcc

SEQ ID NO: 400455 - DNA, 25 bp, Homo sapien
ggtgcggacacttggggagtccctg

SEQ ID NO: 400456 - DNA, 25 bp, Homo sapien
accttgcgcacagggagggcagccc

SEQ ID NO: 400457 - DNA, 25 bp, Homo sapien
caggcccaggggtgcggacacttgg

SEQ ID NO: 400458 - DNA, 25 bp, Homo sapien
tcacaccttgcgcacagggagggca

SEQ ID NO: 400459 - DNA, 25 bp, Homo sapien
taggaggagcaggagcttccttcgc

SEQ ID NO: 400460 - DNA, 25 bp, Homo sapien
ctttaggaggagcaggagcttcctt

SEQ ID NO: 400461 - DNA, 25 bp, Homo sapien
ggaggagcaggagcttccttcgctt

SEQ ID NO: 400462 - DNA, 25 bp, Homo sapien
tttaggaggagcaggagcttccttc

SEQ ID NO: 400463 - DNA, 25 bp, Homo sapien
cttcttggcctttaaggccttcgct

SEQ ID NO: 400464 - DNA, 25 bp, Homo sapien
ctttaaggccttcgctttggcttcg

SEQ ID NO: 400465 - DNA, 25 bp, Homo sapien
tggcctttaaggccttcgctttggc

SEQ ID NO: 400466 - DNA, 25 bp, Homo sapien
tgccttctctttatcaggacaaatc

SEQ ID NO: 400467 - DNA, 25 bp, Homo sapien
catatgccttctctttatcaggaca

SEQ ID NO: 400468 - DNA, 25 bp, Homo sapien
gaacatatgccttctctttatcagg

SEQ ID NO: 400469 - DNA, 25 bp, Homo sapien
atgccttctctttatcaggacaaat

SEQ ID NO: 400470 - DNA, 25 bp, Homo sapien
cagctggactcagtttaggtgatcc

SEQ ID NO: 400471 - DNA, 25 bp, Homo sapien
ttagccagctggactcagtttaggt

SEQ ID NO: 400472 - DNA, 25 bp, Homo sapien
gccagctggactcagtttaggtgat

SEQ ID NO: 400473 - DNA, 25 bp, Homo sapien
tagccagctggactcagtttaggtg

SEQ ID NO: 400474 - DNA, 25 bp, Homo sapien
aagtgctctattctaacttggcttg

SEQ ID NO: 400475 - DNA, 25 bp, Homo sapien
agtgctctattctaacttggcttgg

SEQ ID NO: 400476 - DNA, 25 bp, Homo sapien
gtgctctattctaacttggcttgga

SEQ ID NO: 400477 - DNA, 25 bp, Homo sapien
agcgttccatctaagaattccaaaa

SEQ ID NO: 400478 - DNA, 25 bp, Homo sapien
cagagcgttccatctaagaattcca

SEQ ID NO: 400479 - DNA, 25 bp, Homo sapien
agagcgttccatctaagaattccaa

SEQ ID NO: 400480 - DNA, 25 bp, Homo sapien
gagcgttccatctaagaattccaaa

SEQ ID NO: 400481 - DNA, 25 bp, Homo sapien
catttaggatagatttaggatatat

SEQ ID NO: 400482 - DNA, 25 bp, Homo sapien
tttagtgctcggaatgaaagggagt

SEQ ID NO: 400483 - DNA, 25 bp, Homo sapien
ctatttagtgctcggaatgaaaggg

SEQ ID NO: 400484 - DNA, 25 bp, Homo sapien
cctatttagtgctcggaatgaaagg

SEQ ID NO: 400485 - DNA, 25 bp, Homo sapien
atggataaattctccgtgctttttg

SEQ ID NO: 400486 - DNA, 25 bp, Homo sapien
ctatgggtttctattatattcatac

SEQ ID NO: 400487 - DNA, 25 bp, Homo sapien
gtgtgcaaccagaagtaaaatgagc

SEQ ID NO: 400488 - DNA, 25 bp, Homo sapien
aaagatgtgtgcaaccagaagtaaa

SEQ ID NO: 400489 - DNA, 25 bp, Homo sapien
taaaatgagcaattgtcatagtatg

SEQ ID NO: 400490 - DNA, 25 bp, Homo sapien
gatgtgtgcaaccagaagtaaaatg

SEQ ID NO: 400491 - DNA, 25 bp, Homo sapien
cagaggctactttgtgattactcac

SEQ ID NO: 400492 - DNA, 25 bp, Homo sapien
gcagaggctactttgtgattactca

SEQ ID NO: 400493 - DNA, 25 bp, Homo sapien
ggcagaggctactttgtgattactc

SEQ ID NO: 400494 - DNA, 25 bp, Homo sapien
gaccgtcgaatacatcaattaatat

SEQ ID NO: 400495 - DNA, 25 bp, Homo sapien
ttttgtctgttgtaatgttatcaag

SEQ ID NO: 400496 - DNA, 25 bp, Homo sapien
atacagaggtagaccgtcgaataca

SEQ ID NO: 400497 - DNA, 25 bp, Homo sapien
tcatcatacagaggtagaccgtcga

SEQ ID NO: 400498 - DNA, 25 bp, Homo sapien
ttaaagctagcattgacattcaaaa

SEQ ID NO: 400499 - DNA, 25 bp, Homo sapien
tgtgttagggccttttttgagaata

SEQ ID NO: 400500 - DNA, 25 bp, Homo sapien
gagaatacattaagaaggtcaattt

SEQ ID NO: 400501 - DNA, 25 bp, Homo sapien
aaagcaatgcataacttatcacggt

SEQ ID NO: 400502 - DNA, 25 bp, Homo sapien
tttctatttggatttttagatcacg

SEQ ID NO: 400503 - DNA, 25 bp, Homo sapien
tctatttggatttttagatcacgta

SEQ ID NO: 400504 - DNA, 25 bp, Homo sapien
cgaacattttcctaatgaaatagtg

SEQ ID NO: 400505 - DNA, 25 bp, Homo sapien
aacattttcctaatgaaatagtgga

SEQ ID NO: 400506 - DNA, 25 bp, Homo sapien
ggcttgagggcacatgggtcctcct

SEQ ID NO: 400507 - DNA, 25 bp, Homo sapien
tggttctgagaaataagcaggcttg

SEQ ID NO: 400508 - DNA, 25 bp, Homo sapien
caaggcaaactctgaactagaggtg

SEQ ID NO: 400509 - DNA, 25 bp, Homo sapien
gcaaactctgaactagaggtggttc

SEQ ID NO: 400510 - DNA, 25 bp, Homo sapien
agagtatccgtcttggagggagatt

SEQ ID NO: 400511 - DNA, 25 bp, Homo sapien
aaagagtatccgtcttggagggaga

SEQ ID NO: 400512 - DNA, 25 bp, Homo sapien
ataaagagtatccgtcttggaggga

SEQ ID NO: 400513 - DNA, 25 bp, Homo sapien
taaagagtatccgtcttggagggag

SEQ ID NO: 400514 - DNA, 25 bp, Homo sapien
aagacttgtggtttggtgatgagca

SEQ ID NO: 400515 - DNA, 25 bp, Homo sapien
caaaacagttacagtatcatcagtg

SEQ ID NO: 400516 - DNA, 25 bp, Homo sapien
catcagtgtctggatagaagcttag

SEQ ID NO: 400517 - DNA, 25 bp, Homo sapien
gcttgttaatggaggtaagtaatta

SEQ ID NO: 400518 - DNA, 25 bp, Homo sapien
tttcgctgtgggttttatctgttcg

SEQ ID NO: 400519 - DNA, 25 bp, Homo sapien
ttactccctgaaatttttcgctgtg

SEQ ID NO: 400520 - DNA, 25 bp, Homo sapien
aatttttcgctgtgggttttatctg

SEQ ID NO: 400521 - DNA, 25 bp, Homo sapien
ctgagaaggagtttttactccctga

SEQ ID NO: 400522 - DNA, 25 bp, Homo sapien
ttgcagttgaacatatttcagaggc

SEQ ID NO: 400523 - DNA, 25 bp, Homo sapien
gaggcaataaggaaggcacaaacca

SEQ ID NO: 400524 - DNA, 25 bp, Homo sapien
ctttgcagttgaacatatttcagag

SEQ ID NO: 400525 - DNA, 25 bp, Homo sapien
gcagttgaacatatttcagaggcaa

SEQ ID NO: 400526 - DNA, 25 bp, Homo sapien
gaatcgctacgatgttttcaagatc

SEQ ID NO: 400527 - DNA, 25 bp, Homo sapien
atcgctacgatgttttcaagatctt

SEQ ID NO: 400528 - DNA, 25 bp, Homo sapien
gtgaatcgctacgatgttttcaaga

SEQ ID NO: 400529 - DNA, 25 bp, Homo sapien
cagtgaatcgctacgatgttttcaa

SEQ ID NO: 400530 - DNA, 25 bp, Homo sapien
atgattctaacgaccctattatgga

SEQ ID NO: 400531 - DNA, 25 bp, Homo sapien
tctaacgaccctattatggaagtgc

SEQ ID NO: 400532 - DNA, 25 bp, Homo sapien
atcaatcatgattctaacgacccta

SEQ ID NO: 400533 - DNA, 25 bp, Homo sapien
gatcatcaatcatgattctaacgac

SEQ ID NO: 400534 - DNA, 25 bp, Homo sapien
gtagcacaatatagagtaatgtaca

SEQ ID NO: 400535 - DNA, 25 bp, Homo sapien
gcacaatatagagtaatgtacatac

SEQ ID NO: 400536 - DNA, 25 bp, Homo sapien
tgttttctatctacagtagcacaat

SEQ ID NO: 400537 - DNA, 25 bp, Homo sapien
cagtagcacaatatagagtaatgta

SEQ ID NO: 400538 - DNA, 25 bp, Homo sapien
tttcttatctagaaaccgcacaact

SEQ ID NO: 400539 - DNA, 25 bp, Homo sapien
ttcttatctagaaaccgcacaactt

SEQ ID NO: 400540 - DNA, 25 bp, Homo sapien
gcttcccttttccgcggtgtggcac

SEQ ID NO: 400541 - DNA, 25 bp, Homo sapien
ctaggctcagtcttgtgcttgcttc

SEQ ID NO: 400542 - DNA, 25 bp, Homo sapien
ccatggagactaggctcagtcttgt

SEQ ID NO: 400543 - DNA, 25 bp, Homo sapien
cttgcttcccttttccgcggtgtgg

SEQ ID NO: 400544 - DNA, 25 bp, Homo sapien
atattaccagtgaaggctgagaaac

SEQ ID NO: 400545 - DNA, 25 bp, Homo sapien
gatattaccagtgaaggctgagaaa

SEQ ID NO: 400546 - DNA, 25 bp, Homo sapien
tgattggatttctatagaaagactg

SEQ ID NO: 400547 - DNA, 25 bp, Homo sapien
ttgattggatttctatagaaagact

SEQ ID NO: 400548 - DNA, 25 bp, Homo sapien
gattggatttctatagaaagactgc

SEQ ID NO: 400549 - DNA, 25 bp, Homo sapien
cttgattggatttctatagaaagac

SEQ ID NO: 400550 - DNA, 25 bp, Homo sapien
cttccagaagatggaaatgacatag

SEQ ID NO: 400551 - DNA, 25 bp, Homo sapien
ggaaatgacatagcaataatacgtt

SEQ ID NO: 400552 - DNA, 25 bp, Homo sapien
tccagaagatggaaatgacatagca

SEQ ID NO: 400553 - DNA, 25 bp, Homo sapien
gaagatggaaatgacatagcaataa

SEQ ID NO: 400554 - DNA, 25 bp, Homo sapien
tccatcccttgtgtatcgccttttg

SEQ ID NO: 400555 - DNA, 25 bp, Homo sapien
catcccttgtgtatcgccttttgtt

SEQ ID NO: 400556 - DNA, 25 bp, Homo sapien
atcccttgtgtatcgccttttgttt

SEQ ID NO: 400557 - DNA, 25 bp, Homo sapien
ccatcccttgtgtatcgccttttgt

SEQ ID NO: 400558 - DNA, 25 bp, Homo sapien
taataagtcgtagaagtcgaagtaa

SEQ ID NO: 400559 - DNA, 25 bp, Homo sapien
aattcttaacagaataataagtcgt

SEQ ID NO: 400560 - DNA, 25 bp, Homo sapien
tcttttttgatgaaacagatgaaaa

SEQ ID NO: 400561 - DNA, 25 bp, Homo sapien
caagttgtcttttttgatgaaacag

SEQ ID NO: 400562 - DNA, 25 bp, Homo sapien
caaatgggaatttgacgagaacttc

SEQ ID NO: 400563 - DNA, 25 bp, Homo sapien
tcaccggtccctaaatatcacaatc

SEQ ID NO: 400564 - DNA, 25 bp, Homo sapien
gggtactgcatcttctttattccat

SEQ ID NO: 400565 - DNA, 25 bp, Homo sapien
acttagcctgtatactcttcaccgg

SEQ ID NO: 400566 - DNA, 25 bp, Homo sapien
ggaatattcctaagcaacttaatgt

SEQ ID NO: 400567 - DNA, 25 bp, Homo sapien
gggaatattcctaagcaacttaatg

SEQ ID NO: 400568 - DNA, 25 bp, Homo sapien
gaatattcctaagcaacttaatgtc

SEQ ID NO: 400569 - DNA, 25 bp, Homo sapien
aatattcctaagcaacttaatgtca

SEQ ID NO: 400570 - DNA, 25 bp, Homo sapien
taaagaccacaaactattgactcat

SEQ ID NO: 400571 - DNA, 25 bp, Homo sapien
ttcatgggaagttttcaaacaataa

SEQ ID NO: 400572 - DNA, 25 bp, Homo sapien
caccaacatggcaattcaaacataa

SEQ ID NO: 400573 - DNA, 25 bp, Homo sapien
aaataagttcattcccccctgcaag

SEQ ID NO: 400574 - DNA, 25 bp, Homo sapien
cgtttctactaaagagtctgctgcc

SEQ ID NO: 400575 - DNA, 25 bp, Homo sapien
agtagtttatacatcatagttacag

SEQ ID NO: 400576 - DNA, 25 bp, Homo sapien
ctggatacactgttctagggtaaat

SEQ ID NO: 400577 - DNA, 25 bp, Homo sapien
ctcctggcctgaaacgtttctacta

SEQ ID NO: 400578 - DNA, 25 bp, Homo sapien
ctacaaatactcgaagaagaacatc

SEQ ID NO: 400579 - DNA, 25 bp, Homo sapien
tttctacaaatactcgaagaagaac

SEQ ID NO: 400580 - DNA, 25 bp, Homo sapien
caaatactcgaagaagaacatccat

SEQ ID NO: 400581 - DNA, 25 bp, Homo sapien
ctttctacaaatactcgaagaagaa

SEQ ID NO: 400582 - DNA, 25 bp, Homo sapien
ctagagaaatagaacgatactccaa

SEQ ID NO: 400583 - DNA, 25 bp, Homo sapien
tagagaaatagaacgatactccaaa

SEQ ID NO: 400584 - DNA, 25 bp, Homo sapien
gagaaatagaacgatactccaaagg

SEQ ID NO: 400585 - DNA, 25 bp, Homo sapien
gaaatagaacgatactccaaaggaa

SEQ ID NO: 400586 - DNA, 25 bp, Homo sapien
gtgaaaattaggtcggcaaggatga

SEQ ID NO: 400587 - DNA, 25 bp, Homo sapien
ggtcggcaaggatgagagtgacatc

SEQ ID NO: 400588 - DNA, 25 bp, Homo sapien
gagtgacatccagtaagaccaggaa

SEQ ID NO: 400589 - DNA, 25 bp, Homo sapien
tccagtaagaccaggaaaactccaa

SEQ ID NO: 400590 - DNA, 25 bp, Homo sapien
aataaatgcaaagataaaggggcat

SEQ ID NO: 400591 - DNA, 25 bp, Homo sapien
taaataaatgcaaagataaaggggc

SEQ ID NO: 400592 - DNA, 25 bp, Homo sapien
aataaataaatgcaaagataaaggg

SEQ ID NO: 400593 - DNA, 25 bp, Homo sapien
aaataaatgcaaagataaaggggca

SEQ ID NO: 400594 - DNA, 25 bp, Homo sapien
aaggatgatacaattgaatgcacaa

SEQ ID NO: 400595 - DNA, 25 bp, Homo sapien
caaatgcaaaggatgatacaattga

SEQ ID NO: 400596 - DNA, 25 bp, Homo sapien
ccaaatgcaaaggatgatacaattg

SEQ ID NO: 400597 - DNA, 25 bp, Homo sapien
gatgatacaattgaatgcacaattt

SEQ ID NO: 400598 - DNA, 25 bp, Homo sapien
acttcaaacttggaaagtcgtgcta

SEQ ID NO: 400599 - DNA, 25 bp, Homo sapien
aaacttggaaagtcgtgctaacaca

SEQ ID NO: 400600 - DNA, 25 bp, Homo sapien
caaacttggaaagtcgtgctaacac

SEQ ID NO: 400601 - DNA, 25 bp, Homo sapien
ttcaaacttggaaagtcgtgctaac

SEQ ID NO: 400602 - DNA, 25 bp, Homo sapien
ttcactgataggtgacacccgggct

SEQ ID NO: 400603 - DNA, 25 bp, Homo sapien
tgataggtgacacccgggctgctcc

SEQ ID NO: 400604 - DNA, 25 bp, Homo sapien
tgacacccgggctgctcctttaaat

SEQ ID NO: 400605 - DNA, 25 bp, Homo sapien
ctttcactgataggtgacacccggg

SEQ ID NO: 400606 - DNA, 25 bp, Homo sapien
gataaaagaatacagtcagcagcac

SEQ ID NO: 400607 - DNA, 25 bp, Homo sapien
aggatgataaaagaatacagtcagc

SEQ ID NO: 400608 - DNA, 25 bp, Homo sapien
taaaagaatacagtcagcagcactt

SEQ ID NO: 400609 - DNA, 25 bp, Homo sapien
gatgataaaagaatacagtcagcag

SEQ ID NO: 400610 - DNA, 25 bp, Homo sapien
caggtgcctcctcggttgctccttt

SEQ ID NO: 400611 - DNA, 25 bp, Homo sapien
ctcctttaaattcacttgtctgtgg

SEQ ID NO: 400612 - DNA, 25 bp, Homo sapien
tgcctcctcggttgctcctttaaat

SEQ ID NO: 400613 - DNA, 25 bp, Homo sapien
ctttctttcgcaggtgcctcctcgg

SEQ ID NO: 400614 - DNA, 25 bp, Homo sapien
ttggggccgagctcaatgatgactc

SEQ ID NO: 400615 - DNA, 25 bp, Homo sapien
ctgtcattggggccgagctcaatga

SEQ ID NO: 400616 - DNA, 25 bp, Homo sapien
cattggggccgagctcaatgatgac

SEQ ID NO: 400617 - DNA, 25 bp, Homo sapien
gtcattggggccgagctcaatgatg

SEQ ID NO: 400618 - DNA, 25 bp, Homo sapien
gtgcctctgggttcactcctgataa

SEQ ID NO: 400619 - DNA, 25 bp, Homo sapien
cgtgcctctgggttcactcctgata

SEQ ID NO: 400620 - DNA, 25 bp, Homo sapien
aaagtaactgcaggtctgagtcaag

SEQ ID NO: 400621 - DNA, 25 bp, Homo sapien
ctaaacttttgtgtggaggtagtca

SEQ ID NO: 400622 - DNA, 25 bp, Homo sapien
ctcttattccactaaatgtgctgcc

SEQ ID NO: 400623 - DNA, 25 bp, Homo sapien
ggtagtcagccctcttattccacta

SEQ ID NO: 400624 - DNA, 25 bp, Homo sapien
taagtccttctgtcacttctttact

SEQ ID NO: 400625 - DNA, 25 bp, Homo sapien
tctttctccaagtaggattctctcc

SEQ ID NO: 400626 - DNA, 25 bp, Homo sapien
tgctgcctgtccaatgctaccacct

SEQ ID NO: 400627 - DNA, 25 bp, Homo sapien
ccatttgtaggcacacattattctt

SEQ ID NO: 400628 - DNA, 25 bp, Homo sapien
ctcttggaccactcttgaagagagt

SEQ ID NO: 400629 - DNA, 25 bp, Homo sapien
tagttgtcaagagcatacagtagaa

SEQ ID NO: 400630 - DNA, 25 bp, Homo sapien
tagaatctggtagtgaatccataac

SEQ ID NO: 400631 - DNA, 25 bp, Homo sapien
tgtcaagagcatacagtagaatctg

SEQ ID NO: 400632 - DNA, 25 bp, Homo sapien
tcatagttgtcaagagcatacagta

SEQ ID NO: 400633 - DNA, 25 bp, Homo sapien
catccttgaacagagcatccaacat

SEQ ID NO: 400634 - DNA, 25 bp, Homo sapien
agagcatccaacattagggcaacca

SEQ ID NO: 400635 - DNA, 25 bp, Homo sapien
gaacagagcatccaacattagggca

SEQ ID NO: 400636 - DNA, 25 bp, Homo sapien
ccttgaacagagcatccaacattag

SEQ ID NO: 400637 - DNA, 25 bp, Homo sapien
cttccagagccactgccgggcagaa

SEQ ID NO: 400638 - DNA, 25 bp, Homo sapien
ccagagccactgccgggcagaagag

SEQ ID NO: 400639 - DNA, 25 bp, Homo sapien
agactgcttccagagccactgccgg

SEQ ID NO: 400640 - DNA, 25 bp, Homo sapien
tatacaccagactgcttccagagcc

SEQ ID NO: 400641 - DNA, 25 bp, Homo sapien
ggtcttgtgtcgtcggtccaacatt

SEQ ID NO: 400642 - DNA, 25 bp, Homo sapien
tctgaggtcttgtgtcgtcggtcca

SEQ ID NO: 400643 - DNA, 25 bp, Homo sapien
gtctgaggtcttgtgtcgtcggtcc

SEQ ID NO: 400644 - DNA, 25 bp, Homo sapien
gaggtcttgtgtcgtcggtccaaca

SEQ ID NO: 400645 - DNA, 25 bp, Homo sapien
tcttgacccaattcctggcaagtaa

SEQ ID NO: 400646 - DNA, 25 bp, Homo sapien
ttaaatcaaatcttgacccaattcc

SEQ ID NO: 400647 - DNA, 25 bp, Homo sapien
cctggcaagtaacaaggttattgct

SEQ ID NO: 400648 - DNA, 25 bp, Homo sapien
caattcctggcaagtaacaaggtta

SEQ ID NO: 400649 - DNA, 25 bp, Homo sapien
cgtgagggtaaggggactctgtaag

SEQ ID NO: 400650 - DNA, 25 bp, Homo sapien
gctcccggcggagactcagggaacc

SEQ ID NO: 400651 - DNA, 25 bp, Homo sapien
gacccccgctcccggcggagactca

SEQ ID NO: 400652 - DNA, 25 bp, Homo sapien
ggcggagactcagggaaccccgcac

SEQ ID NO: 400653 - DNA, 25 bp, Homo sapien
ccgctcccggcggagactcagggaa

SEQ ID NO: 400654 - DNA, 25 bp, Homo sapien
tgacggccaagagcggatgcagccc

SEQ ID NO: 400655 - DNA, 25 bp, Homo sapien
gcgtgagtgtgacggccaagagcgg

SEQ ID NO: 400656 - DNA, 25 bp, Homo sapien
ccaagagcggatgcagcccgggatc

SEQ ID NO: 400657 - DNA, 25 bp, Homo sapien
gagtgtgacggccaagagcggatgc

SEQ ID NO: 400658 - DNA, 25 bp, Homo sapien
cagcgagtccggcgctgggtaactg

SEQ ID NO: 400659 - DNA, 25 bp, Homo sapien
cgcggagctaagtgtaggcgccggg

SEQ ID NO: 400660 - DNA, 25 bp, Homo sapien
ggcgcagcgagtccggcgctgggta

SEQ ID NO: 400661 - DNA, 25 bp, Homo sapien
gggcgcggagctaagtgtaggcgcc

SEQ ID NO: 400662 - DNA, 25 bp, Homo sapien
tcccttgcccagttcgacttctttg

SEQ ID NO: 400663 - DNA, 25 bp, Homo sapien
cagttcgacttctttgccgcaccat

SEQ ID NO: 400664 - DNA, 25 bp, Homo sapien
agttcgacttctttgccgcaccata

SEQ ID NO: 400665 - DNA, 25 bp, Homo sapien
tgcccagttcgacttctttgccgca

SEQ ID NO: 400666 - DNA, 25 bp, Homo sapien
cacagcttcccgctcaggactagat

SEQ ID NO: 400667 - DNA, 25 bp, Homo sapien
cccgctcaggactagattctgattt

SEQ ID NO: 400668 - DNA, 25 bp, Homo sapien
tttccatcacaatccataagttctc

SEQ ID NO: 400669 - DNA, 25 bp, Homo sapien
gactagattctgattttccatcaca

SEQ ID NO: 400670 - DNA, 25 bp, Homo sapien
gccagaagatctgcaacacccttga

SEQ ID NO: 400671 - DNA, 25 bp, Homo sapien
ccagaagatctgcaacacccttgat

SEQ ID NO: 400672 - DNA, 25 bp, Homo sapien
ttcttggaactgtaactgtgaggct

SEQ ID NO: 400673 - DNA, 25 bp, Homo sapien
acacacatcatcctgggtataagtc

SEQ ID NO: 400674 - DNA, 25 bp, Homo sapien
ttcaatcaaacacacatcatcctgg

SEQ ID NO: 400675 - DNA, 25 bp, Homo sapien
caaacacacatcatcctgggtataa

SEQ ID NO: 400676 - DNA, 25 bp, Homo sapien
tgattcaatcaaacacacatcatcc

SEQ ID NO: 400677 - DNA, 25 bp, Homo sapien
ttgtgacaatttgtgctacaagtga

SEQ ID NO: 400678 - DNA, 25 bp, Homo sapien
gtgacaatttgtgctacaagtgaag

SEQ ID NO: 400679 - DNA, 25 bp, Homo sapien
tgacaatttgtgctacaagtgaaga

SEQ ID NO: 400680 - DNA, 25 bp, Homo sapien
gacaatttgtgctacaagtgaagat

SEQ ID NO: 400681 - DNA, 25 bp, Homo sapien
caaaaccaatgtctgctacattttc

SEQ ID NO: 400682 - DNA, 25 bp, Homo sapien
aaaaccaatgtctgctacattttcc

SEQ ID NO: 400683 - DNA, 25 bp, Homo sapien
tcaaaaccaatgtctgctacatttt

SEQ ID NO: 400684 - DNA, 25 bp, Homo sapien
atcaaaaccaatgtctgctacattt

SEQ ID NO: 400685 - DNA, 25 bp, Homo sapien
caaggagcgcactgtgtgtaattgt

SEQ ID NO: 400686 - DNA, 25 bp, Homo sapien
ttgcacaaggagcgcactgtgtgta

SEQ ID NO: 400687 - DNA, 25 bp, Homo sapien
agacctgcagatgttgctccacagt

SEQ ID NO: 400688 - DNA, 25 bp, Homo sapien
gccattcacatcttagacctgcaga

SEQ ID NO: 400689 - DNA, 25 bp, Homo sapien
tgtctgcaatggagggtctaggcag

SEQ ID NO: 400690 - DNA, 25 bp, Homo sapien
gacacctccaacctttgctaagaac

SEQ ID NO: 400691 - DNA, 25 bp, Homo sapien
cagttgccttcccacaggcctcaca

SEQ ID NO: 400692 - DNA, 25 bp, Homo sapien
gagggtctaggcagtaggtgtgata

SEQ ID NO: 400693 - DNA, 25 bp, Homo sapien
tgtaagctgcacaattaccagagct

SEQ ID NO: 400694 - DNA, 25 bp, Homo sapien
tgaagcacaaccagtcagagtacaa

SEQ ID NO: 400695 - DNA, 25 bp, Homo sapien
gcaaaaggctcaaagacaagtgaag

SEQ ID NO: 400696 - DNA, 25 bp, Homo sapien
agaagcccaaagacccacaaccagg

SEQ ID NO: 400697 - DNA, 25 bp, Homo sapien
gaactgggagctcatgttactacta

SEQ ID NO: 400698 - DNA, 25 bp, Homo sapien
gaatgcggtaaagaacagaataggc

SEQ ID NO: 400699 - DNA, 25 bp, Homo sapien
caagacaaaagcaggatattagtac

SEQ ID NO: 400700 - DNA, 25 bp, Homo sapien
gaatcagctaaacctaaaatctttg

SEQ ID NO: 400701 - DNA, 25 bp, Homo sapien
cacagtatggatggtaacactgacc

SEQ ID NO: 400702 - DNA, 25 bp, Homo sapien
cagtatggatggtaacactgaccac

SEQ ID NO: 400703 - DNA, 25 bp, Homo sapien
atggatggtaacactgaccacactg

SEQ ID NO: 400704 - DNA, 25 bp, Homo sapien
gtatggatggtaacactgaccacac

SEQ ID NO: 400705 - DNA, 25 bp, Homo sapien
ttgatgaaatatctgcagtagacac

SEQ ID NO: 400706 - DNA, 25 bp, Homo sapien
aatacaacagctccgattccacttt

SEQ ID NO: 400707 - DNA, 25 bp, Homo sapien
tacaacagctccgattccacttttc

SEQ ID NO: 400708 - DNA, 25 bp, Homo sapien
aacagctccgattccacttttcagc

SEQ ID NO: 400709 - DNA, 25 bp, Homo sapien
caacagctccgattccacttttcag

SEQ ID NO: 400710 - DNA, 25 bp, Homo sapien
ggtctccgctttcttggaaatccag

SEQ ID NO: 400711 - DNA, 25 bp, Homo sapien
cgctttcttggaaatccagacccat

SEQ ID NO: 400712 - DNA, 25 bp, Homo sapien
tccgctttcttggaaatccagaccc

SEQ ID NO: 400713 - DNA, 25 bp, Homo sapien
tcgaggtctccgctttcttggaaat

SEQ ID NO: 400714 - DNA, 25 bp, Homo sapien
ggtgggctcactgtattatgggtac

SEQ ID NO: 400715 - DNA, 25 bp, Homo sapien
ggctcactgtattatgggtactcca

SEQ ID NO: 400716 - DNA, 25 bp, Homo sapien
gggctcactgtattatgggtactcc

SEQ ID NO: 400717 - DNA, 25 bp, Homo sapien
tgggctcactgtattatgggtactc

SEQ ID NO: 400718 - DNA, 25 bp, Homo sapien
aaagagcattccttatagtattaat

SEQ ID NO: 400719 - DNA, 25 bp, Homo sapien
aacccaagttgcaaagcacatatac

SEQ ID NO: 400720 - DNA, 25 bp, Homo sapien
gttgcaaagcacatatacctataga

SEQ ID NO: 400721 - DNA, 25 bp, Homo sapien
caaagcacatatacctatagaaatg

SEQ ID NO: 400722 - DNA, 25 bp, Homo sapien
tggaccgaggtctaccaggagaaaa

SEQ ID NO: 400723 - DNA, 25 bp, Homo sapien
tttggaccgaggtctaccaggagaa

SEQ ID NO: 400724 - DNA, 25 bp, Homo sapien
tgtttggaccgaggtctaccaggag

SEQ ID NO: 400725 - DNA, 25 bp, Homo sapien
ctgtttggaccgaggtctaccagga

SEQ ID NO: 400726 - DNA, 25 bp, Homo sapien
tggagtgactgagatgtaagttgtt

SEQ ID NO: 400727 - DNA, 25 bp, Homo sapien
catgtcatgcgaaggcaagtctgaa

SEQ ID NO: 400728 - DNA, 25 bp, Homo sapien
cacacaaccctcaattgtaggagtc

SEQ ID NO: 400729 - DNA, 25 bp, Homo sapien
cagagtccatcaatccagtagaaag

SEQ ID NO: 400730 - DNA, 25 bp, Homo sapien
gcctccttggtatgaaacatctttc

SEQ ID NO: 400731 - DNA, 25 bp, Homo sapien
ttcttcactatcagcctcattagaa

SEQ ID NO: 400732 - DNA, 25 bp, Homo sapien
actatcagcctcattagaaatctgt

SEQ ID NO: 400733 - DNA, 25 bp, Homo sapien
ttcactatcagcctcattagaaatc

SEQ ID NO: 400734 - DNA, 25 bp, Homo sapien
atctgtttttccaattcggtattca

SEQ ID NO: 400735 - DNA, 25 bp, Homo sapien
ttgttatggtaatgtacaaacaaat

SEQ ID NO: 400736 - DNA, 25 bp, Homo sapien
tagatatataaaacatttggctaca

SEQ ID NO: 400737 - DNA, 25 bp, Homo sapien
tgggatgatattacaaaattcagaa

SEQ ID NO: 400738 - DNA, 25 bp, Homo sapien
aaaattcagaacatttgttatggta

SEQ ID NO: 400739 - DNA, 25 bp, Homo sapien
caagggctatctccactaccccact

SEQ ID NO: 400740 - DNA, 25 bp, Homo sapien
ggtacagatttcataattcgttgaa

SEQ ID NO: 400741 - DNA, 25 bp, Homo sapien
gtacagatttcataattcgttgaag

SEQ ID NO: 400742 - DNA, 25 bp, Homo sapien
acagatttcataattcgttgaagac

SEQ ID NO: 400743 - DNA, 25 bp, Homo sapien
tacagatttcataattcgttgaaga

SEQ ID NO: 400744 - DNA, 25 bp, Homo sapien
ttccatgatagtgctgaccacaagt

SEQ ID NO: 400745 - DNA, 25 bp, Homo sapien
ttgccaacctgcacgttttaatgga

SEQ ID NO: 400746 - DNA, 25 bp, Homo sapien
tttgcactcaggacattgccaacct

SEQ ID NO: 400747 - DNA, 25 bp, Homo sapien
tccaggcacattccatgatagtgct

SEQ ID NO: 400748 - DNA, 25 bp, Homo sapien
cgggctgtcgcacactgcacagttt

SEQ ID NO: 400749 - DNA, 25 bp, Homo sapien
ctcccgggctgtcgcacactgcaca

SEQ ID NO: 400750 - DNA, 25 bp, Homo sapien
gggctgtcgcacactgcacagtttg

SEQ ID NO: 400751 - DNA, 25 bp, Homo sapien
cccgggctgtcgcacactgcacagt

SEQ ID NO: 400752 - DNA, 25 bp, Homo sapien
tgattactaacatgtaactgaaggt

SEQ ID NO: 400753 - DNA, 25 bp, Homo sapien
gaaggtatacactattagaacacag

SEQ ID NO: 400754 - DNA, 25 bp, Homo sapien
tgtttactgaggtctaaagcatgac

SEQ ID NO: 400755 - DNA, 25 bp, Homo sapien
tatacaagtttgcatgttgtttact

SEQ ID NO: 400756 - DNA, 25 bp, Homo sapien
ggtaatgatcatgtaactaaccgta

SEQ ID NO: 400757 - DNA, 25 bp, Homo sapien
aagtatatttattaggccacccaga

SEQ ID NO: 400758 - DNA, 25 bp, Homo sapien
tatttgagattagtttaagcctggg

SEQ ID NO: 400759 - DNA, 25 bp, Homo sapien
tagtagccacaacagttgctgtgca

SEQ ID NO: 400760 - DNA, 25 bp, Homo sapien
gctcattgggaaaacacatagtaag

SEQ ID NO: 400761 - DNA, 25 bp, Homo sapien
tcaacattgctaaggaacaggtaaa

SEQ ID NO: 400762 - DNA, 25 bp, Homo sapien
ggtgctagcagagatttctatcaca

SEQ ID NO: 400763 - DNA, 25 bp, Homo sapien
gatgaatcatgaaaaggtgctagca

SEQ ID NO: 400764 - DNA, 25 bp, Homo sapien
gagcttggtcaatgtgttctggaca

SEQ ID NO: 400765 - DNA, 25 bp, Homo sapien
tctggacaaagcaggaagatgtgac

SEQ ID NO: 400766 - DNA, 25 bp, Homo sapien
aatgatacatctgggtacatttctc

SEQ ID NO: 400767 - DNA, 25 bp, Homo sapien
ctgcagcacaaggataatgatacat

SEQ ID NO: 400768 - DNA, 25 bp, Homo sapien
taaaggagagaaatctctttataaa

SEQ ID NO: 400769 - DNA, 25 bp, Homo sapien
ggtaaaggagagaaatctctttata

SEQ ID NO: 400770 - DNA, 25 bp, Homo sapien
gtaaaggagagaaatctctttataa

SEQ ID NO: 400771 - DNA, 25 bp, Homo sapien
ggcggatcacgaggtcaggagatcg

SEQ ID NO: 400772 - DNA, 25 bp, Homo sapien
taatcctggcactttagaaggccaa

SEQ ID NO: 400773 - DNA, 25 bp, Homo sapien
ggctgacacagtgaaactccatctc

SEQ ID NO: 400774 - DNA, 25 bp, Homo sapien
agaccatcctggctgacacagtgaa

SEQ ID NO: 400775 - DNA, 25 bp, Homo sapien
agaagggctatcagtaaaattatta

SEQ ID NO: 400776 - DNA, 25 bp, Homo sapien
cagaagggctatcagtaaaattatt

SEQ ID NO: 400777 - DNA, 25 bp, Homo sapien
gagaaataaataagatgccagggca

SEQ ID NO: 400778 - DNA, 25 bp, Homo sapien
tgagagaaataaataagatgccagg

SEQ ID NO: 400779 - DNA, 25 bp, Homo sapien
attgtgattcgtagcatgcagagca

SEQ ID NO: 400780 - DNA, 25 bp, Homo sapien
gattcgtagcatgcagagcagcaat

SEQ ID NO: 400781 - DNA, 25 bp, Homo sapien
cataggctgaaccagaaatcctagg

SEQ ID NO: 400782 - DNA, 25 bp, Homo sapien
aggctgaaccagaaatcctaggaaa

SEQ ID NO: 400783 - DNA, 25 bp, Homo sapien
tgacataggctgaaccagaaatcct

SEQ ID NO: 400784 - DNA, 25 bp, Homo sapien
tttgacataggctgaaccagaaatc

SEQ ID NO: 400785 - DNA, 25 bp, Homo sapien
gctgggcagacaatgccagaaaaac

SEQ ID NO: 400786 - DNA, 25 bp, Homo sapien
ctccaacctccagctcaccacaggg

SEQ ID NO: 400787 - DNA, 25 bp, Homo sapien
ggagcagctgggcagacaatgccag

SEQ ID NO: 400788 - DNA, 25 bp, Homo sapien
agcagctgggcagacaatgccagaa

SEQ ID NO: 400789 - DNA, 25 bp, Homo sapien
cagagaccctaaactggcgtgaggc

SEQ ID NO: 400790 - DNA, 25 bp, Homo sapien
gcagctcagcgggagataccagaga

SEQ ID NO: 400791 - DNA, 25 bp, Homo sapien
ggagataccagagaccctaaactgg

SEQ ID NO: 400792 - DNA, 25 bp, Homo sapien
cagcgggagataccagagaccctaa

SEQ ID NO: 400793 - DNA, 25 bp, Homo sapien
cacagagactggccctgacgacttc

SEQ ID NO: 400794 - DNA, 25 bp, Homo sapien
acagagactggccctgacgacttct

SEQ ID NO: 400795 - DNA, 25 bp, Homo sapien
ggatcatggcaggctctctttcgaa

SEQ ID NO: 400796 - DNA, 25 bp, Homo sapien
tcatggcaggctctctttcgaaggc

SEQ ID NO: 400797 - DNA, 25 bp, Homo sapien
catggcaggctctctttcgaaggca

SEQ ID NO: 400798 - DNA, 25 bp, Homo sapien
gatcatggcaggctctctttcgaag

SEQ ID NO: 400799 - DNA, 25 bp, Homo sapien
tacctacctgcgaggtggcttttgc

SEQ ID NO: 400800 - DNA, 25 bp, Homo sapien
tccagcctacctacctgcgaggtgg

SEQ ID NO: 400801 - DNA, 25 bp, Homo sapien
tacctgcgaggtggcttttgcagcc

SEQ ID NO: 400802 - DNA, 25 bp, Homo sapien
ttgcagcctggcaaacgctccccaa

SEQ ID NO: 400803 - DNA, 25 bp, Homo sapien
gcaaatacggcaaacagcatcagct

SEQ ID NO: 400804 - DNA, 25 bp, Homo sapien
gctttttagaagaagctggagcttc

SEQ ID NO: 400805 - DNA, 25 bp, Homo sapien
aaatacggcaaacagcatcagcttt

SEQ ID NO: 400806 - DNA, 25 bp, Homo sapien
tttttagaagaagctggagcttctg

SEQ ID NO: 400807 - DNA, 25 bp, Homo sapien
ctagtgggtggacgatgctgaatct

SEQ ID NO: 400808 - DNA, 25 bp, Homo sapien
tgggtggacgatgctgaatcttctg

SEQ ID NO: 400809 - DNA, 25 bp, Homo sapien
agtgggtggacgatgctgaatcttc

SEQ ID NO: 400810 - DNA, 25 bp, Homo sapien
gtaaatcatgctggagcttctggta

SEQ ID NO: 400811 - DNA, 25 bp, Homo sapien
gctggagcttctggtggggtaaatc

SEQ ID NO: 400812 - DNA, 25 bp, Homo sapien
tggagcttctggtggggtaaatcat

SEQ ID NO: 400813 - DNA, 25 bp, Homo sapien
ctggagcttctggtggggtaaatca

SEQ ID NO: 400814 - DNA, 25 bp, Homo sapien
ctggtggataaattatgctggcgct

SEQ ID NO: 400815 - DNA, 25 bp, Homo sapien
tctggtggataaattatgctggcgc

SEQ ID NO: 400816 - DNA, 25 bp, Homo sapien
ggtaaatcatgctggagcttctggt

SEQ ID NO: 400817 - DNA, 25 bp, Homo sapien
cttctggtgagtagaccacggtgga

SEQ ID NO: 400818 - DNA, 25 bp, Homo sapien
ctggtgggtaaatcatgctggagct

SEQ ID NO: 400819 - DNA, 25 bp, Homo sapien
gtgggtaaatcatgctggagcttct

SEQ ID NO: 400820 - DNA, 25 bp, Homo sapien
ggatcatgctcgagcttctggtgga

SEQ ID NO: 400821 - DNA, 25 bp, Homo sapien
gatcatgctcgagcttctggtggat

SEQ ID NO: 400822 - DNA, 25 bp, Homo sapien
ggttccgggattccaaactgtcaca

SEQ ID NO: 400823 - DNA, 25 bp, Homo sapien
tcctcaatgggcaccggtgaggagg

SEQ ID NO: 400824 - DNA, 25 bp, Homo sapien
cagcgataacccagggtcgatggtt

SEQ ID NO: 400825 - DNA, 25 bp, Homo sapien
tcattggagcaccttgccaccctcc

SEQ ID NO: 400826 - DNA, 25 bp, Homo sapien
tatatagatagatgatagatgattg

SEQ ID NO: 400827 - DNA, 25 bp, Homo sapien
atatatagatagatgatagatgatt

SEQ ID NO: 400828 - DNA, 25 bp, Homo sapien
atagatagatgatagatgattgata

SEQ ID NO: 400829 - DNA, 25 bp, Homo sapien
gatgaatatatagatagatgataga

SEQ ID NO: 400830 - DNA, 25 bp, Homo sapien
gatagtagatagatcaattgattga

SEQ ID NO: 400831 - DNA, 25 bp, Homo sapien
tagctagtcaaggtcccatctgtgg

SEQ ID NO: 400832 - DNA, 25 bp, Homo sapien
gataggtaatagacagataggaact

SEQ ID NO: 400833 - DNA, 25 bp, Homo sapien
taggaactctccagtcagcctagac

SEQ ID NO: 400834 - DNA, 25 bp, Homo sapien
gagctcaggcaatcttgcttcctcc

SEQ ID NO: 400835 - DNA, 25 bp, Homo sapien
cccagctcacttttgtactttttat

SEQ ID NO: 400836 - DNA, 25 bp, Homo sapien
gaagtggtatcatctcagcttacta

SEQ ID NO: 400837 - DNA, 25 bp, Homo sapien
cacaaggtctggctatatcacccag

SEQ ID NO: 400838 - DNA, 25 bp, Homo sapien
gactccatgggggacccatgcagcc

SEQ ID NO: 400839 - DNA, 25 bp, Homo sapien
atgggggacccatgcagccagcagc

SEQ ID NO: 400840 - DNA, 25 bp, Homo sapien
aagtgactccatgggggacccatgc

SEQ ID NO: 400841 - DNA, 25 bp, Homo sapien
ttaagtgactccatgggggacccat

SEQ ID NO: 400842 - DNA, 25 bp, Homo sapien
aaattgctgtgtccactttgcaaca

SEQ ID NO: 400843 - DNA, 25 bp, Homo sapien
tttgcaacaccagcatctaccaggt

SEQ ID NO: 400844 - DNA, 25 bp, Homo sapien
agggaagggatcaaattgctgtgtc

SEQ ID NO: 400845 - DNA, 25 bp, Homo sapien
cacttttacacatctgcagctgaga

SEQ ID NO: 400846 - DNA, 25 bp, Homo sapien
ccagaagcgtgttcggagagtttga

SEQ ID NO: 400847 - DNA, 25 bp, Homo sapien
cctgggtcggcctgtcatcgaatga

SEQ ID NO: 400848 - DNA, 25 bp, Homo sapien
cccaaaacaggagatctggaaaatc

SEQ ID NO: 400849 - DNA, 25 bp, Homo sapien
tttgatggcgtttgatgttaaggca

SEQ ID NO: 400850 - DNA, 25 bp, Homo sapien
tcatccttggggcactcagcgtgtg

SEQ ID NO: 400851 - DNA, 25 bp, Homo sapien
cttggggcactcagcgtgtgagtca

SEQ ID NO: 400852 - DNA, 25 bp, Homo sapien
tccttggggcactcagcgtgtgagt

SEQ ID NO: 400853 - DNA, 25 bp, Homo sapien
atccttggggcactcagcgtgtgag

SEQ ID NO: 400854 - DNA, 25 bp, Homo sapien
caaacctaaggtgtcttgagtcaga

SEQ ID NO: 400855 - DNA, 25 bp, Homo sapien
gaggcagttgcaaaactccctacac

SEQ ID NO: 400856 - DNA, 25 bp, Homo sapien
aaaagaagagacagtttctggcagc

SEQ ID NO: 400857 - DNA, 25 bp, Homo sapien
ggaaatccaaacatcagagcactta

SEQ ID NO: 400858 - DNA, 25 bp, Homo sapien
cagggccaattacccataacagcat

SEQ ID NO: 400859 - DNA, 25 bp, Homo sapien
caaacttgtggacaccataggtgac

SEQ ID NO: 400860 - DNA, 25 bp, Homo sapien
ttgtggacaccataggtgacagggc

SEQ ID NO: 400861 - DNA, 25 bp, Homo sapien
aggtgacagggccaattacccataa

SEQ ID NO: 400862 - DNA, 25 bp, Homo sapien
ctgagtacatcagcacaaaggaatt

SEQ ID NO: 400863 - DNA, 25 bp, Homo sapien
agtacatcagcacaaaggaattcac

SEQ ID NO: 400864 - DNA, 25 bp, Homo sapien
tgagtacatcagcacaaaggaattc

SEQ ID NO: 400865 - DNA, 25 bp, Homo sapien
gagtacatcagcacaaaggaattca

SEQ ID NO: 400866 - DNA, 25 bp, Homo sapien
gaatgaccatgtatacacttgagag

SEQ ID NO: 400867 - DNA, 25 bp, Homo sapien
gatgaggacattcattgggaaaaat

SEQ ID NO: 400868 - DNA, 25 bp, Homo sapien
tccttaatataaggctgctgctgtg

SEQ ID NO: 400869 - DNA, 25 bp, Homo sapien
tgagagcagcgtgattcctatgaag

SEQ ID NO: 400870 - DNA, 25 bp, Homo sapien
ccaggatatcgtattttgtaaattt

SEQ ID NO: 400871 - DNA, 25 bp, Homo sapien
agcccaggatatcgtattttgtaaa

SEQ ID NO: 400872 - DNA, 25 bp, Homo sapien
taagcccaggatatcgtattttgta

SEQ ID NO: 400873 - DNA, 25 bp, Homo sapien
aataagcccaggatatcgtattttg

SEQ ID NO: 400874 - DNA, 25 bp, Homo sapien
ggtcatgggtcttaggcctgtgatc

SEQ ID NO: 400875 - DNA, 25 bp, Homo sapien
caaaaactccattgcagtgaagagc

SEQ ID NO: 400876 - DNA, 25 bp, Homo sapien
tactaggtggacaaaggccaaatga

SEQ ID NO: 400877 - DNA, 25 bp, Homo sapien
gctgagattctaatgctagcttgac

SEQ ID NO: 400878 - DNA, 25 bp, Homo sapien
gtgtgaccctaagcatacctccatg

SEQ ID NO: 400879 - DNA, 25 bp, Homo sapien
tggacacattcccatggctaggatg

SEQ ID NO: 400880 - DNA, 25 bp, Homo sapien
ggcccacaagtatctgacatctcag

SEQ ID NO: 400881 - DNA, 25 bp, Homo sapien
catgtggtctcatgagagcagggac

SEQ ID NO: 400882 - DNA, 25 bp, Homo sapien
catttgatctgagacctgaagcacc

SEQ ID NO: 400883 - DNA, 25 bp, Homo sapien
ccttttaaacagatgatagctgccc

SEQ ID NO: 400884 - DNA, 25 bp, Homo sapien
agtgttgaccttgatacgggctgtg

SEQ ID NO: 400885 - DNA, 25 bp, Homo sapien
cgggctgtgttaggcagagatttca

SEQ ID NO: 400886 - DNA, 25 bp, Homo sapien
ttcaagaggtggccgagattccccc

SEQ ID NO: 400887 - DNA, 25 bp, Homo sapien
caagaggtggccgagattcccccac

SEQ ID NO: 400888 - DNA, 25 bp, Homo sapien
ccagatccccgggagaggtcagcac

SEQ ID NO: 400889 - DNA, 25 bp, Homo sapien
atccccgggagaggtcagcacggcc

SEQ ID NO: 400890 - DNA, 25 bp, Homo sapien
agcgctggaccccagggtccctgcc

SEQ ID NO: 400891 - DNA, 25 bp, Homo sapien
ctgaatggagttgaggtgggggcag

SEQ ID NO: 400892 - DNA, 25 bp, Homo sapien
gggcagcgctggaccccagggtccc

SEQ ID NO: 400893 - DNA, 25 bp, Homo sapien
gcagcgctggaccccagggtccctg

SEQ ID NO: 400894 - DNA, 25 bp, Homo sapien
tggggagcccggtgacccaggcagc

SEQ ID NO: 400895 - DNA, 25 bp, Homo sapien
ggggagcccggtgacccaggcagcc

SEQ ID NO: 400896 - DNA, 25 bp, Homo sapien
ctggggagcccggtgacccaggcag

SEQ ID NO: 400897 - DNA, 25 bp, Homo sapien
ccagccaggccgctttctttgagga

SEQ ID NO: 400898 - DNA, 25 bp, Homo sapien
cgggctcccacaggacgaatgtaga

SEQ ID NO: 400899 - DNA, 25 bp, Homo sapien
acggtgaggccaaggacgccctgct

SEQ ID NO: 400900 - DNA, 25 bp, Homo sapien
ccagctttccgtggctattgggccc

SEQ ID NO: 400901 - DNA, 25 bp, Homo sapien
cgggcgctcctcaggcaaagggagc

SEQ ID NO: 400902 - DNA, 25 bp, Homo sapien
cccgggcgctcctcaggcaaaggga

SEQ ID NO: 400903 - DNA, 25 bp, Homo sapien
tcccgggcgctcctcaggcaaaggg

SEQ ID NO: 400904 - DNA, 25 bp, Homo sapien
caggcaaagggagccgatttagggg

SEQ ID NO: 400905 - DNA, 25 bp, Homo sapien
ggcgtggtcagagcgagtctcggag

SEQ ID NO: 400906 - DNA, 25 bp, Homo sapien
tgccagcatgcaggccccgacggaa

SEQ ID NO: 400907 - DNA, 25 bp, Homo sapien
ccgagactgcgcttcgtgcgaggcc

SEQ ID NO: 400908 - DNA, 25 bp, Homo sapien
cctgtgcaacccgaagctgcttctg

SEQ ID NO: 400909 - DNA, 25 bp, Homo sapien
tgtgtttattattgagcgctctcat

SEQ ID NO: 400910 - DNA, 25 bp, Homo sapien
gtttctctgtgtatgccagtaacat

SEQ ID NO: 400911 - DNA, 25 bp, Homo sapien
gtaccacaagagtcctgtattattc

SEQ ID NO: 400912 - DNA, 25 bp, Homo sapien
gagtcctgtattatttagtaccaca

SEQ ID NO: 400913 - DNA, 25 bp, Homo sapien
tgtttctctaagaaattaaggattc

SEQ ID NO: 400914 - DNA, 25 bp, Homo sapien
attcgtttgttggggagggctgctg

SEQ ID NO: 400915 - DNA, 25 bp, Homo sapien
ctctaagaaattaaggattcgtttg

SEQ ID NO: 400916 - DNA, 25 bp, Homo sapien
aggattcgtttgttggggagggctg

SEQ ID NO: 400917 - DNA, 25 bp, Homo sapien
tggaccaatgtagaacaactaaggc

SEQ ID NO: 400918 - DNA, 25 bp, Homo sapien
tcaatgggctcatgaacagatgcac

SEQ ID NO: 400919 - DNA, 25 bp, Homo sapien
ttaaggatagaaggtattcacgact

SEQ ID NO: 400920 - DNA, 25 bp, Homo sapien
ccactgaagaggagtaatcgtatgc

SEQ ID NO: 400921 - DNA, 25 bp, Homo sapien
cagttgactgtctcagtgtgactca

SEQ ID NO: 400922 - DNA, 25 bp, Homo sapien
cgaagtcatcgggaactatttttgg

SEQ ID NO: 400923 - DNA, 25 bp, Homo sapien
aggtcattgatgttgctgtggagca

SEQ ID NO: 400924 - DNA, 25 bp, Homo sapien
ttggtacttggttaaccaggctcat

SEQ ID NO: 400925 - DNA, 25 bp, Homo sapien
gagcatggtctcgaagtcatcggga

SEQ ID NO: 400926 - DNA, 25 bp, Homo sapien
gtcagctgacacctttccagatagt

SEQ ID NO: 400927 - DNA, 25 bp, Homo sapien
cttcctgatggtattgtcagctgac

SEQ ID NO: 400928 - DNA, 25 bp, Homo sapien
tgacacctttccagatagtatatcc

SEQ ID NO: 400929 - DNA, 25 bp, Homo sapien
ccagatagtatatcctctgcatatt

SEQ ID NO: 400930 - DNA, 25 bp, Homo sapien
tcaggtcaactctgatgcattcagt

SEQ ID NO: 400931 - DNA, 25 bp, Homo sapien
ggtcaactctgatgcattcagtgtc

SEQ ID NO: 400932 - DNA, 25 bp, Homo sapien
gtcaactctgatgcattcagtgtca

SEQ ID NO: 400933 - DNA, 25 bp, Homo sapien
caggtcaactctgatgcattcagtg

SEQ ID NO: 400934 - DNA, 25 bp, Homo sapien
tactcatggatcagcacagagtgct

SEQ ID NO: 400935 - DNA, 25 bp, Homo sapien
acagagtgctctgtgatgtcatggc

SEQ ID NO: 400936 - DNA, 25 bp, Homo sapien
gtagtactcatggatcagcacagag

SEQ ID NO: 400937 - DNA, 25 bp, Homo sapien
ctgtagtactcatggatcagcacag

SEQ ID NO: 400938 - DNA, 25 bp, Homo sapien
tggagaaactttttaggcagttcat

SEQ ID NO: 400939 - DNA, 25 bp, Homo sapien
caccccaagatgagctcatttggag

SEQ ID NO: 400940 - DNA, 25 bp, Homo sapien
tcatttggagaaactttttaggcag

SEQ ID NO: 400941 - DNA, 25 bp, Homo sapien
gagaaactttttaggcagttcatac

SEQ ID NO: 400942 - DNA, 25 bp, Homo sapien
atgttcttagcaaattccatgtcaa

SEQ ID NO: 400943 - DNA, 25 bp, Homo sapien
gttcttagcaaattccatgtcaaca

SEQ ID NO: 400944 - DNA, 25 bp, Homo sapien
catgtcaacagccacttcatctgac

SEQ ID NO: 400945 - DNA, 25 bp, Homo sapien
cttagcaaattccatgtcaacagcc

SEQ ID NO: 400946 - DNA, 25 bp, Homo sapien
caacagggtcccgataactcgggca

SEQ ID NO: 400947 - DNA, 25 bp, Homo sapien
aacagggtcccgataactcgggcag

SEQ ID NO: 400948 - DNA, 25 bp, Homo sapien
cagggtcccgataactcgggcagca

SEQ ID NO: 400949 - DNA, 25 bp, Homo sapien
gggtcccgataactcgggcagcacc

SEQ ID NO: 400950 - DNA, 25 bp, Homo sapien
agtggaagctgaaataccatttggg

SEQ ID NO: 400951 - DNA, 25 bp, Homo sapien
agatgacaggtttcattaagtggaa

SEQ ID NO: 400952 - DNA, 25 bp, Homo sapien
agggtctggcttaagatgacaggtt

SEQ ID NO: 400953 - DNA, 25 bp, Homo sapien
tctggcttaagatgacaggtttcat

SEQ ID NO: 400954 - DNA, 25 bp, Homo sapien
cagtcattccatgtgtgatagtaca

SEQ ID NO: 400955 - DNA, 25 bp, Homo sapien
aacacaggagtatctcagtcattcc

SEQ ID NO: 400956 - DNA, 25 bp, Homo sapien
tctgtgctatttctcactggtcctg

SEQ ID NO: 400957 - DNA, 25 bp, Homo sapien
gaatcaaactcagtccacgacagat

SEQ ID NO: 400958 - DNA, 25 bp, Homo sapien
ttttatacaacaatcccatagatgc

SEQ ID NO: 400959 - DNA, 25 bp, Homo sapien
caatcccatagatgcaaaactacta

SEQ ID NO: 400960 - DNA, 25 bp, Homo sapien
tcccatagatgcaaaactactacta

SEQ ID NO: 400961 - DNA, 25 bp, Homo sapien
tacaacaatcccatagatgcaaaac

SEQ ID NO: 400962 - DNA, 25 bp, Homo sapien
tgcacccagctgctagctattattt

SEQ ID NO: 400963 - DNA, 25 bp, Homo sapien
tcaggtataatcttcccaaatccag

SEQ ID NO: 400964 - DNA, 25 bp, Homo sapien
ctaatcctttgccatgctcaggtat

SEQ ID NO: 400965 - DNA, 25 bp, Homo sapien
tgccatgctcaggtataatcttccc

SEQ ID NO: 400966 - DNA, 25 bp, Homo sapien
gctttcattccatgaaaatcttgta

SEQ ID NO: 400967 - DNA, 25 bp, Homo sapien
cccactataatcaatatggatataa

SEQ ID NO: 400968 - DNA, 25 bp, Homo sapien
tattacaataataccttcccactat

SEQ ID NO: 400969 - DNA, 25 bp, Homo sapien
tgctttcattccatgaaaatcttgt

SEQ ID NO: 400970 - DNA, 25 bp, Homo sapien
gatggtcaggtagggactgccttct

SEQ ID NO: 400971 - DNA, 25 bp, Homo sapien
tttagacagataaggtagcctggcc

SEQ ID NO: 400972 - DNA, 25 bp, Homo sapien
tcagcattaagacctcatgatctca

SEQ ID NO: 400973 - DNA, 25 bp, Homo sapien
gctgattgagcctgagcacagtcca

SEQ ID NO: 400974 - DNA, 25 bp, Homo sapien
cctcttctctgtgctccagagcaga

SEQ ID NO: 400975 - DNA, 25 bp, Homo sapien
ttctctgtgctccagagcagatcat

SEQ ID NO: 400976 - DNA, 25 bp, Homo sapien
tcttctctgtgctccagagcagatc

SEQ ID NO: 400977 - DNA, 25 bp, Homo sapien
tgttggagcctgccctcttctctgt

SEQ ID NO: 400978 - DNA, 25 bp, Homo sapien
gcaacccggattcacgacattctca

SEQ ID NO: 400979 - DNA, 25 bp, Homo sapien
ttctgcatgttaccacaactgtgga

SEQ ID NO: 400980 - DNA, 25 bp, Homo sapien
aactgtggaatcacgatagtatgcg

SEQ ID NO: 400981 - DNA, 25 bp, Homo sapien
cacgtgggcattatttggaccagtc

SEQ ID NO: 400982 - DNA, 25 bp, Homo sapien
ctcttatatcgagtaaacttgagca

SEQ ID NO: 400983 - DNA, 25 bp, Homo sapien
tatgaactctcttatatcgagtaaa

SEQ ID NO: 400984 - DNA, 25 bp, Homo sapien
tatcgagtaaacttgagcaacaaga

SEQ ID NO: 400985 - DNA, 25 bp, Homo sapien
tcataagtttagtaaggctaaagga

SEQ ID NO: 400986 - DNA, 25 bp, Homo sapien
cttgaggaacagtaaaagcctttgc

SEQ ID NO: 400987 - DNA, 25 bp, Homo sapien
gaggcctgaagactgcttaaaaagc

SEQ ID NO: 400988 - DNA, 25 bp, Homo sapien
tgaactatcatatgcttagtaaggc

SEQ ID NO: 400989 - DNA, 25 bp, Homo sapien
tgatgtatagtaagctcagaggacc

SEQ ID NO: 400990 - DNA, 25 bp, Homo sapien
tgccacattcttcatatctgtaggg

SEQ ID NO: 400991 - DNA, 25 bp, Homo sapien
ctctccactatgaattatcttatgt

SEQ ID NO: 400992 - DNA, 25 bp, Homo sapien
ctccactatgaattatcttatgtac

SEQ ID NO: 400993 - DNA, 25 bp, Homo sapien
tttgccacattcttcatatctgtag

SEQ ID NO: 400994 - DNA, 25 bp, Homo sapien
tctaaagacttcttaaaagctttgc

SEQ ID NO: 400995 - DNA, 25 bp, Homo sapien
ttcttgacatttgtagtgtttctct

SEQ ID NO: 400996 - DNA, 25 bp, Homo sapien
cacattcttgacatttgtagtgttt

SEQ ID NO: 400997 - DNA, 25 bp, Homo sapien
gacatttgtagtgtttctcttcagc

SEQ ID NO: 400998 - DNA, 25 bp, Homo sapien
aggaacagtaaaacgctttgccaca

SEQ ID NO: 400999 - DNA, 25 bp, Homo sapien
tttgaggaacagtaaaacgctttgc

SEQ ID NO: 401000 - DNA, 25 bp, Homo sapien
ttatatatagtaagatttgaagacc

SEQ ID NO: 401001 - DNA, 25 bp, Homo sapien
ttcttatatatagtaagatttgaag

SEQ ID NO: 401002 - DNA, 25 bp, Homo sapien
gatgcattcttgacaactgtagtgc

SEQ ID NO: 401003 - DNA, 25 bp, Homo sapien
aaaagctttgatgcattcttgacaa

SEQ ID NO: 401004 - DNA, 25 bp, Homo sapien
gctttgatgcattcttgacaactgt

SEQ ID NO: 401005 - DNA, 25 bp, Homo sapien
tgatgcattcttgacaactgtagtg

SEQ ID NO: 401006 - DNA, 25 bp, Homo sapien
caaagactgcttacaagctttgcca

SEQ ID NO: 401007 - DNA, 25 bp, Homo sapien
tgaactatgttatgttgagtaaggc

SEQ ID NO: 401008 - DNA, 25 bp, Homo sapien
acacttgtaggttgtatctccagta

SEQ ID NO: 401009 - DNA, 25 bp, Homo sapien
aattctctcaggtatagtaagacct

SEQ ID NO: 401010 - DNA, 25 bp, Homo sapien
cttatgtttattcagtcttgaagat

SEQ ID NO: 401011 - DNA, 25 bp, Homo sapien
caggtatagtaagacctgaagactg

SEQ ID NO: 401012 - DNA, 25 bp, Homo sapien
tccttcctgcaccttagatgcattc

SEQ ID NO: 401013 - DNA, 25 bp, Homo sapien
cctgcaccttagatgcattcaaact

SEQ ID NO: 401014 - DNA, 25 bp, Homo sapien
ctgcatttcccatatcttctcagca

SEQ ID NO: 401015 - DNA, 25 bp, Homo sapien
accttagatgcattcaaacttttac

SEQ ID NO: 401016 - DNA, 25 bp, Homo sapien
ggtgcttcatactccatggcttttt

SEQ ID NO: 401017 - DNA, 25 bp, Homo sapien
ctgggtgcttcatactccatggctt

SEQ ID NO: 401018 - DNA, 25 bp, Homo sapien
tgggtgcttcatactccatggcttt

SEQ ID NO: 401019 - DNA, 25 bp, Homo sapien
tgcttcatactccatggctttttcc

SEQ ID NO: 401020 - DNA, 25 bp, Homo sapien
cacatcctacaaaggaagaaaatga

SEQ ID NO: 401021 - DNA, 25 bp, Homo sapien
aacacatcctacaaaggaagaaaat

SEQ ID NO: 401022 - DNA, 25 bp, Homo sapien
catcctacaaaggaagaaaatgaaa

SEQ ID NO: 401023 - DNA, 25 bp, Homo sapien
caaaacacatcctacaaaggaagaa

SEQ ID NO: 401024 - DNA, 25 bp, Homo sapien
agacagagtttctgtagttctgtaa

SEQ ID NO: 401025 - DNA, 25 bp, Homo sapien
ttatcctcaaccaagaagacagagt

SEQ ID NO: 401026 - DNA, 25 bp, Homo sapien
gttctgtaacatcacatccatacac

SEQ ID NO: 401027 - DNA, 25 bp, Homo sapien
agagtttctgtagttctgtaacatc

SEQ ID NO: 401028 - DNA, 25 bp, Homo sapien
catttttctcttcatcatccttctc

SEQ ID NO: 401029 - DNA, 25 bp, Homo sapien
tttttctcttcatcatccttctcta

SEQ ID NO: 401030 - DNA, 25 bp, Homo sapien
ttctcttcatcatccttctctagca

SEQ ID NO: 401031 - DNA, 25 bp, Homo sapien
ctgagaaaaagccatttttctcttc

SEQ ID NO: 401032 - DNA, 25 bp, Homo sapien
gtagaaagatccaggcatgcagaac

SEQ ID NO: 401033 - DNA, 25 bp, Homo sapien
ctttaaaggaatcagcacaatctct

SEQ ID NO: 401034 - DNA, 25 bp, Homo sapien
caggcatgcagaacatgtccaccca

SEQ ID NO: 401035 - DNA, 25 bp, Homo sapien
tgctaccaccacaaacacaggtaga

SEQ ID NO: 401036 - DNA, 25 bp, Homo sapien
tactcctacgacagtaattttccaa

SEQ ID NO: 401037 - DNA, 25 bp, Homo sapien
caaaacaggtatcttgtcattcctc

SEQ ID NO: 401038 - DNA, 25 bp, Homo sapien
cctgttgttatcagtaaataagtga

SEQ ID NO: 401039 - DNA, 25 bp, Homo sapien
tgaaatgaagagctagattatgtaa

SEQ ID NO: 401040 - DNA, 25 bp, Homo sapien
tattggtgtattctcatagccttga

SEQ ID NO: 401041 - DNA, 25 bp, Homo sapien
ctaatgtcacgttgatgtctgcctt

SEQ ID NO: 401042 - DNA, 25 bp, Homo sapien
catagccttgaaacactaatgtcac

SEQ ID NO: 401043 - DNA, 25 bp, Homo sapien
cttgaaacactaatgtcacgttgat

SEQ ID NO: 401044 - DNA, 25 bp, Homo sapien
agggaaactttgttcaccatcatgg

SEQ ID NO: 401045 - DNA, 25 bp, Homo sapien
catgggatatggttgaggtatcaag

SEQ ID NO: 401046 - DNA, 25 bp, Homo sapien
gaaactttgttcaccatcatgggat

SEQ ID NO: 401047 - DNA, 25 bp, Homo sapien
tcaccatcatgggatatggttgagg

SEQ ID NO: 401048 - DNA, 25 bp, Homo sapien
gttgacatagatggtaataacaaag

SEQ ID NO: 401049 - DNA, 25 bp, Homo sapien
gagagttcctcgtgcattaccttta

SEQ ID NO: 401050 - DNA, 25 bp, Homo sapien
ttcctgagagttcctcgtgcattac

SEQ ID NO: 401051 - DNA, 25 bp, Homo sapien
gtgcctcattagcaggaatgggtcc

SEQ ID NO: 401052 - DNA, 25 bp, Homo sapien
agttcctcgtgcattacctttagtg

SEQ ID NO: 401053 - DNA, 25 bp, Homo sapien
gaacaatggtactgctcctgtggtt

SEQ ID NO: 401054 - DNA, 25 bp, Homo sapien
ccagaacaatggtactgctcctgtg

SEQ ID NO: 401055 - DNA, 25 bp, Homo sapien
cccagtaggccccagactaaactct

SEQ ID NO: 401056 - DNA, 25 bp, Homo sapien
taggccccagactaaactctccaga

SEQ ID NO: 401057 - DNA, 25 bp, Homo sapien
gattgagacatactcaaagaagaga

SEQ ID NO: 401058 - DNA, 25 bp, Homo sapien
gagacatactcaaagaagagactgc

SEQ ID NO: 401059 - DNA, 25 bp, Homo sapien
ccttgtatttgatgcattcctggac

SEQ ID NO: 401060 - DNA, 25 bp, Homo sapien
gacccatagatctgaaagcaacctt

SEQ ID NO: 401061 - DNA, 25 bp, Homo sapien
caggaccgctctgaaccctaacttg

SEQ ID NO: 401062 - DNA, 25 bp, Homo sapien
cccttcacgttctgaacatggcctg

SEQ ID NO: 401063 - DNA, 25 bp, Homo sapien
aaccctaacttgatggcagctgcct

SEQ ID NO: 401064 - DNA, 25 bp, Homo sapien
cttcctatgggaaagccccttcacg

SEQ ID NO: 401065 - DNA, 25 bp, Homo sapien
tcctgacatggccatgtagcttctc

SEQ ID NO: 401066 - DNA, 25 bp, Homo sapien
cctgacatggccatgtagcttctca

SEQ ID NO: 401067 - DNA, 25 bp, Homo sapien
tgacatggccatgtagcttctcagc

SEQ ID NO: 401068 - DNA, 25 bp, Homo sapien
cctcctgacatggccatgtagcttc

SEQ ID NO: 401069 - DNA, 25 bp, Homo sapien
tagccaaggccattttctttcagga

SEQ ID NO: 401070 - DNA, 25 bp, Homo sapien
gccattttctttcaggaaggttgaa

SEQ ID NO: 401071 - DNA, 25 bp, Homo sapien
tcaggaaggttgaaaagtatttata

SEQ ID NO: 401072 - DNA, 25 bp, Homo sapien
caggaaggttgaaaagtatttatat

SEQ ID NO: 401073 - DNA, 25 bp, Homo sapien
ttaagctgctctctatactgagatg

SEQ ID NO: 401074 - DNA, 25 bp, Homo sapien
taaatggttaccataattgaatacc

SEQ ID NO: 401075 - DNA, 25 bp, Homo sapien
tcttggttttttcttgatgtgacac

SEQ ID NO: 401076 - DNA, 25 bp, Homo sapien
tagaagtcagcatcgtgttctctgc

SEQ ID NO: 401077 - DNA, 25 bp, Homo sapien
aattctatatcttgtattctgagag

SEQ ID NO: 401078 - DNA, 25 bp, Homo sapien
caattctatatcttgtattctgaga

SEQ ID NO: 401079 - DNA, 25 bp, Homo sapien
tcaattctatatcttgtattctgag

SEQ ID NO: 401080 - DNA, 25 bp, Homo sapien
ttcaattctatatcttgtattctga

SEQ ID NO: 401081 - DNA, 25 bp, Homo sapien
ccaagatttttgatagggtagttga

SEQ ID NO: 401082 - DNA, 25 bp, Homo sapien
tgcttctgacagttccttttgtagt

SEQ ID NO: 401083 - DNA, 25 bp, Homo sapien
tcccatttagctttttggttctcta

SEQ ID NO: 401084 - DNA, 25 bp, Homo sapien
cacagtgatcttttttaagttccct

SEQ ID NO: 401085 - DNA, 25 bp, Homo sapien
ggagctcgttcaataatgccaatat

SEQ ID NO: 401086 - DNA, 25 bp, Homo sapien
gttcaataatgccaatatcacgttc

SEQ ID NO: 401087 - DNA, 25 bp, Homo sapien
ttgtggagctcgttcaataatgcca

SEQ ID NO: 401088 - DNA, 25 bp, Homo sapien
gctcgttcaataatgccaatatcac

SEQ ID NO: 401089 - DNA, 25 bp, Homo sapien
tctgcttccagaactggttgtttac

SEQ ID NO: 401090 - DNA, 25 bp, Homo sapien
tatgcttattaagagtctctgcttc

SEQ ID NO: 401091 - DNA, 25 bp, Homo sapien
tgtttacttggggtgaaacctgcat

SEQ ID NO: 401092 - DNA, 25 bp, Homo sapien
cagaactggttgtttacttggggtg

SEQ ID NO: 401093 - DNA, 25 bp, Homo sapien
tgtagactgtgaattttcagtagtc

SEQ ID NO: 401094 - DNA, 25 bp, Homo sapien
ttcagtagtcggtttgccaaaaaga

SEQ ID NO: 401095 - DNA, 25 bp, Homo sapien
caacttttgtagactgtgaattttc

SEQ ID NO: 401096 - DNA, 25 bp, Homo sapien
tgtgaattttcagtagtcggtttgc

SEQ ID NO: 401097 - DNA, 25 bp, Homo sapien
aatagtgaccgccaatataattggc

SEQ ID NO: 401098 - DNA, 25 bp, Homo sapien
tacttaatggctgacataacttttg

SEQ ID NO: 401099 - DNA, 25 bp, Homo sapien
tcttagttccataaaaaatagtgac

SEQ ID NO: 401100 - DNA, 25 bp, Homo sapien
catccaatgaacactcactcttagt

SEQ ID NO: 401101 - DNA, 25 bp, Homo sapien
ctgaatgtggactctacagaactca

SEQ ID NO: 401102 - DNA, 25 bp, Homo sapien
aatgtggactctacagaactcacat

SEQ ID NO: 401103 - DNA, 25 bp, Homo sapien
tgtggactctacagaactcacatcc

SEQ ID NO: 401104 - DNA, 25 bp, Homo sapien
tgaatgtggactctacagaactcac

SEQ ID NO: 401105 - DNA, 25 bp, Homo sapien
tgctttgaatgtttctctgtccttc

SEQ ID NO: 401106 - DNA, 25 bp, Homo sapien
gagaaattttcattccacaggtagg

SEQ ID NO: 401107 - DNA, 25 bp, Homo sapien
ctaaggctttatttggaagagaaat

SEQ ID NO: 401108 - DNA, 25 bp, Homo sapien
tctgtccttcaattctaaggcttta

SEQ ID NO: 401109 - DNA, 25 bp, Homo sapien
ctctatccaattactctttttccac

SEQ ID NO: 401110 - DNA, 25 bp, Homo sapien
ctgtcttgacccgttatccaattac

SEQ ID NO: 401111 - DNA, 25 bp, Homo sapien
cctctatccaattactctttttcca

SEQ ID NO: 401112 - DNA, 25 bp, Homo sapien
cttttctgtcttgacccgttatcca

SEQ ID NO: 401113 - DNA, 25 bp, Homo sapien
acatcattctgtaagagagtctcaa

SEQ ID NO: 401114 - DNA, 25 bp, Homo sapien
catcattctgtaagagagtctcaag

SEQ ID NO: 401115 - DNA, 25 bp, Homo sapien
atcattctgtaagagagtctcaagg

SEQ ID NO: 401116 - DNA, 25 bp, Homo sapien
tttctctgtcctttaattctaaggc

SEQ ID NO: 401117 - DNA, 25 bp, Homo sapien
tctaaggctttatttggaagagaaa

SEQ ID NO: 401118 - DNA, 25 bp, Homo sapien
agagaaactttccttccacaggtag

SEQ ID NO: 401119 - DNA, 25 bp, Homo sapien
tggaagagaaactttccttccacag

SEQ ID NO: 401120 - DNA, 25 bp, Homo sapien
acagctgccacttccagggaaatga

SEQ ID NO: 401121 - DNA, 25 bp, Homo sapien
tgatataatcataatcaggatcttc

SEQ ID NO: 401122 - DNA, 25 bp, Homo sapien
tcctttactgtcacagctgccactt

SEQ ID NO: 401123 - DNA, 25 bp, Homo sapien
cttgaatgtgatataatcataatca

SEQ ID NO: 401124 - DNA, 25 bp, Homo sapien
tgcgtgagtctctaccacaagaaca

SEQ ID NO: 401125 - DNA, 25 bp, Homo sapien
ggctttgcgtgagtctctaccacaa

SEQ ID NO: 401126 - DNA, 25 bp, Homo sapien
tttgcgtgagtctctaccacaagaa

SEQ ID NO: 401127 - DNA, 25 bp, Homo sapien
cgtgagtctctaccacaagaacaca

SEQ ID NO: 401128 - DNA, 25 bp, Homo sapien
tgtgagtaaaggacatgggctgagc

SEQ ID NO: 401129 - DNA, 25 bp, Homo sapien
gagtaaaggacatgggctgagcagc

SEQ ID NO: 401130 - DNA, 25 bp, Homo sapien
catgtgagtaaaggacatgggctga

SEQ ID NO: 401131 - DNA, 25 bp, Homo sapien
ccatgtgagtaaaggacatgggctg

SEQ ID NO: 401132 - DNA, 25 bp, Homo sapien
gcaagatcatagttctcagggtgtt

SEQ ID NO: 401133 - DNA, 25 bp, Homo sapien
ttccggaagcccctgtactatcaaa

SEQ ID NO: 401134 - DNA, 25 bp, Homo sapien
agggttgcaagatcatagttctcag

SEQ ID NO: 401135 - DNA, 25 bp, Homo sapien
aaagctgactggtcttgtagcatct

SEQ ID NO: 401136 - DNA, 25 bp, Homo sapien
cggcttgaaaatcccttctggtatt

SEQ ID NO: 401137 - DNA, 25 bp, Homo sapien
tatttcacaaaatcggcttgaaaat

SEQ ID NO: 401138 - DNA, 25 bp, Homo sapien
aaatcggcttgaaaatcccttctgg

SEQ ID NO: 401139 - DNA, 25 bp, Homo sapien
tcacaaaatcggcttgaaaatccct

SEQ ID NO: 401140 - DNA, 25 bp, Homo sapien
catggactcaagagctgacatgagg

SEQ ID NO: 401141 - DNA, 25 bp, Homo sapien
gagctgacatgaggaatgtcactac

SEQ ID NO: 401142 - DNA, 25 bp, Homo sapien
ctcaagagctgacatgaggaatgtc

SEQ ID NO: 401143 - DNA, 25 bp, Homo sapien
caagagctgacatgaggaatgtcac

SEQ ID NO: 401144 - DNA, 25 bp, Homo sapien
ttacattatgtagatattattaggg

SEQ ID NO: 401145 - DNA, 25 bp, Homo sapien
taacaaatttattacattatgtaga

SEQ ID NO: 401146 - DNA, 25 bp, Homo sapien
tgaaacatcaggtttataacaaatt

SEQ ID NO: 401147 - DNA, 25 bp, Homo sapien
tatgaaacatcaggtttataacaaa

SEQ ID NO: 401148 - DNA, 25 bp, Homo sapien
ttatagcacttatgagtcctctact

SEQ ID NO: 401149 - DNA, 25 bp, Homo sapien
catctatgccattgtagtgtactag

SEQ ID NO: 401150 - DNA, 25 bp, Homo sapien
tattggctggctttcactagattaa

SEQ ID NO: 401151 - DNA, 25 bp, Homo sapien
gatgggatcttggaagttttacagg

SEQ ID NO: 401152 - DNA, 25 bp, Homo sapien
tactgaactactgaatgttagaact

SEQ ID NO: 401153 - DNA, 25 bp, Homo sapien
tcaaccatatttacaaccaagtcct

SEQ ID NO: 401154 - DNA, 25 bp, Homo sapien
ctactgaatgttagaactgaaggcc

SEQ ID NO: 401155 - DNA, 25 bp, Homo sapien
agtcctactgaactactgaatgtta

SEQ ID NO: 401156 - DNA, 25 bp, Homo sapien
tggacagggtagacactaaaacttg

SEQ ID NO: 401157 - DNA, 25 bp, Homo sapien
tctgctggtactgttccatcattgc

SEQ ID NO: 401158 - DNA, 25 bp, Homo sapien
ccttctgctggtacttcaatttctg

SEQ ID NO: 401159 - DNA, 25 bp, Homo sapien
tcaatttctgctggtactgttccat

SEQ ID NO: 401160 - DNA, 25 bp, Homo sapien
atttctgctggtactgttccatcat

SEQ ID NO: 401161 - DNA, 25 bp, Homo sapien
ttctgagcctactgaagcaggagct

SEQ ID NO: 401162 - DNA, 25 bp, Homo sapien
ctgatgttgaggcagaactgaaaga

SEQ ID NO: 401163 - DNA, 25 bp, Homo sapien
aactgaaagatgcagaggcagagtc

SEQ ID NO: 401164 - DNA, 25 bp, Homo sapien
gagtccggataacactgtctgaaca

SEQ ID NO: 401165 - DNA, 25 bp, Homo sapien
acatacgtacgtatgtataacacat

SEQ ID NO: 401166 - DNA, 25 bp, Homo sapien
tacgtacgtatgtataacacatata

SEQ ID NO: 401167 - DNA, 25 bp, Homo sapien
ctgattctacccagccattagcatg

SEQ ID NO: 401168 - DNA, 25 bp, Homo sapien
tactgattctacccagccattagca

SEQ ID NO: 401169 - DNA, 25 bp, Homo sapien
tcagacgtttgtagatgtatggtct

SEQ ID NO: 401170 - DNA, 25 bp, Homo sapien
tagaagtataatcgcaaatacaagc

SEQ ID NO: 401171 - DNA, 25 bp, Homo sapien
gcatcaattacttaatagggagtcc

SEQ ID NO: 401172 - DNA, 25 bp, Homo sapien
aatacaagcaaatggatatagcaca

SEQ ID NO: 401173 - DNA, 25 bp, Homo sapien
aaggaggaggactcctccttgccat

SEQ ID NO: 401174 - DNA, 25 bp, Homo sapien
ggagggcacctccagattctgcaag

SEQ ID NO: 401175 - DNA, 25 bp, Homo sapien
caggaggagggcacctccagattct

SEQ ID NO: 401176 - DNA, 25 bp, Homo sapien
gagaaggaggaggactcctccttgc

SEQ ID NO: 401177 - DNA, 25 bp, Homo sapien
aaatacacctcgctagaatccacag

SEQ ID NO: 401178 - DNA, 25 bp, Homo sapien
gctgtgggtttcataggtaactacc

SEQ ID NO: 401179 - DNA, 25 bp, Homo sapien
gacattcttgtaactaaccctgcca

SEQ ID NO: 401180 - DNA, 25 bp, Homo sapien
aggattcaccctttcattgcagagt

SEQ ID NO: 401181 - DNA, 25 bp, Homo sapien
tgaaaaacataatattcggagacat

SEQ ID NO: 401182 - DNA, 25 bp, Homo sapien
taatattcggagacatttttgcata

SEQ ID NO: 401183 - DNA, 25 bp, Homo sapien
tatctgagtaactttgcaaggaact

SEQ ID NO: 401184 - DNA, 25 bp, Homo sapien
gagctcctgttatctgagtaacttt

SEQ ID NO: 401185 - DNA, 25 bp, Homo sapien
accaagcttctgataccgactcttc

SEQ ID NO: 401186 - DNA, 25 bp, Homo sapien
ccaagcttctgataccgactcttca

SEQ ID NO: 401187 - DNA, 25 bp, Homo sapien
ctacagaaacctgaccaagcttctg

SEQ ID NO: 401188 - DNA, 25 bp, Homo sapien
gatgaaaatacacggtccaaagaat

SEQ ID NO: 401189 - DNA, 25 bp, Homo sapien
tgatgtgagcagtcaatgtggagca

SEQ ID NO: 401190 - DNA, 25 bp, Homo sapien
cacatagatgaaaatacacggtcca

SEQ ID NO: 401191 - DNA, 25 bp, Homo sapien
tacacggtccaaagaataaagtgac

SEQ ID NO: 401192 - DNA, 25 bp, Homo sapien
agtattacagtgtaggagacaacca

SEQ ID NO: 401193 - DNA, 25 bp, Homo sapien
gtattacagtgtaggagacaaccaa

SEQ ID NO: 401194 - DNA, 25 bp, Homo sapien
cctaactgtaacaagtattacagtg

SEQ ID NO: 401195 - DNA, 25 bp, Homo sapien
attcctaactgtaacaagtattaca

SEQ ID NO: 401196 - DNA, 25 bp, Homo sapien
aggagcaccatttcactgccagtga

SEQ ID NO: 401197 - DNA, 25 bp, Homo sapien
ctataaatgacaggttggcaagcag

SEQ ID NO: 401198 - DNA, 25 bp, Homo sapien
acaggttggcaagcagaaagtacat

SEQ ID NO: 401199 - DNA, 25 bp, Homo sapien
tgacaggttggcaagcagaaagtac

SEQ ID NO: 401200 - DNA, 25 bp, Homo sapien
ataaatgacaggttggcaagcagaa

SEQ ID NO: 401201 - DNA, 25 bp, Homo sapien
gaaaggttggagctcccttgaacta

SEQ ID NO: 401202 - DNA, 25 bp, Homo sapien
aacaagaaaggttggagctcccttg

SEQ ID NO: 401203 - DNA, 25 bp, Homo sapien
gctcccttgaactagacagtcccag

SEQ ID NO: 401204 - DNA, 25 bp, Homo sapien
tggagctcccttgaactagacagtc

SEQ ID NO: 401205 - DNA, 25 bp, Homo sapien
actagaggagcatttggagcagtca

SEQ ID NO: 401206 - DNA, 25 bp, Homo sapien
ggcaactagaggagcatttggagca

SEQ ID NO: 401207 - DNA, 25 bp, Homo sapien
caactagaggagcatttggagcagt

SEQ ID NO: 401208 - DNA, 25 bp, Homo sapien
ttaggcaactagaggagcatttgga

SEQ ID NO: 401209 - DNA, 25 bp, Homo sapien
gagccattggatgagggacaaagat

SEQ ID NO: 401210 - DNA, 25 bp, Homo sapien
aggaaaacaatattcaccaggagcc

SEQ ID NO: 401211 - DNA, 25 bp, Homo sapien
gaaaacaatattcaccaggagccat

SEQ ID NO: 401212 - DNA, 25 bp, Homo sapien
tgagggacaaagatagagaacccat

SEQ ID NO: 401213 - DNA, 25 bp, Homo sapien
ttcttctctttgtacctcagactca

SEQ ID NO: 401214 - DNA, 25 bp, Homo sapien
aatttcttctctttgtacctcagac

SEQ ID NO: 401215 - DNA, 25 bp, Homo sapien
tccaatttcttctctttgtacctca

SEQ ID NO: 401216 - DNA, 25 bp, Homo sapien
caatttcttctctttgtacctcaga

SEQ ID NO: 401217 - DNA, 25 bp, Homo sapien
gttttcccaagactgaaatactgaa

SEQ ID NO: 401218 - DNA, 25 bp, Homo sapien
agcagttttcccaagactgaaatac

SEQ ID NO: 401219 - DNA, 25 bp, Homo sapien
cacggagcagttttcccaagactga

SEQ ID NO: 401220 - DNA, 25 bp, Homo sapien
aaatactgaatattcagtttcttct

SEQ ID NO: 401221 - DNA, 25 bp, Homo sapien
aattttgtctaccaggaagtttgtg

SEQ ID NO: 401222 - DNA, 25 bp, Homo sapien
tggatgaccaaaggaagatcacaga

SEQ ID NO: 401223 - DNA, 25 bp, Homo sapien
tagaaagagccttggaggatcctgt

SEQ ID NO: 401224 - DNA, 25 bp, Homo sapien
gatcctgtggaggagtagtccctga

SEQ ID NO: 401225 - DNA, 25 bp, Homo sapien
ctacaacattgggaacacagaaggg

SEQ ID NO: 401226 - DNA, 25 bp, Homo sapien
aactaattggctcattgtatgtaga

SEQ ID NO: 401227 - DNA, 25 bp, Homo sapien
tggctcattgtatgtagaaagccca

SEQ ID NO: 401228 - DNA, 25 bp, Homo sapien
atagagggaaaaactaattggctca

SEQ ID NO: 401229 - DNA, 25 bp, Homo sapien
ctctttggctcataattgttgaata

SEQ ID NO: 401230 - DNA, 25 bp, Homo sapien
cactctttggctcataattgttgaa

SEQ ID NO: 401231 - DNA, 25 bp, Homo sapien
acacactctttggctcataattgtt

SEQ ID NO: 401232 - DNA, 25 bp, Homo sapien
cacactctttggctcataattgttg

SEQ ID NO: 401233 - DNA, 25 bp, Homo sapien
atggtcttacgcagagcaaaaaagt

SEQ ID NO: 401234 - DNA, 25 bp, Homo sapien
aaaagagatggtcttacgcagagca

SEQ ID NO: 401235 - DNA, 25 bp, Homo sapien
ggtcttacgcagagcaaaaaagtcc

SEQ ID NO: 401236 - DNA, 25 bp, Homo sapien
tcttacgcagagcaaaaaagtccat

SEQ ID NO: 401237 - DNA, 25 bp, Homo sapien
gaggacaggcacatgtcaatgagac

SEQ ID NO: 401238 - DNA, 25 bp, Homo sapien
acaggcacatgtcaatgagacaggt

SEQ ID NO: 401239 - DNA, 25 bp, Homo sapien
ggacaggcacatgtcaatgagacag

SEQ ID NO: 401240 - DNA, 25 bp, Homo sapien
caaaggaggacaggcacatgtcaat

SEQ ID NO: 401241 - DNA, 25 bp, Homo sapien
cagtaagtccaagtaacatgaattc

SEQ ID NO: 401242 - DNA, 25 bp, Homo sapien
cattccccacaggtctggcaataga

SEQ ID NO: 401243 - DNA, 25 bp, Homo sapien
ttccctagctgaccacatttctagc

SEQ ID NO: 401244 - DNA, 25 bp, Homo sapien
tacattccccacaggtctggcaata

SEQ ID NO: 401245 - DNA, 25 bp, Homo sapien
tgaccacatttctagcactctttga

SEQ ID NO: 401246 - DNA, 25 bp, Homo sapien
tttgtttccttaatatagtccagga

SEQ ID NO: 401247 - DNA, 25 bp, Homo sapien
tgtttccttaatatagtccaggaaa

SEQ ID NO: 401248 - DNA, 25 bp, Homo sapien
tagtccaggaaaggtatttgtgggc

SEQ ID NO: 401249 - DNA, 25 bp, Homo sapien
ccttaatatagtccaggaaaggtat

SEQ ID NO: 401250 - DNA, 25 bp, Homo sapien
aggctaccagggaggctccgatctg

SEQ ID NO: 401251 - DNA, 25 bp, Homo sapien
agtgtactgttcccaggatctgcat

SEQ ID NO: 401252 - DNA, 25 bp, Homo sapien
ggaggctccgatctggctccctggt

SEQ ID NO: 401253 - DNA, 25 bp, Homo sapien
cctcccagccgcctctttcaggcct

SEQ ID NO: 401254 - DNA, 25 bp, Homo sapien
ccagccccgattctgtggccccgag

SEQ ID NO: 401255 - DNA, 25 bp, Homo sapien
tagcagcccagccccgattctgtgg

SEQ ID NO: 401256 - DNA, 25 bp, Homo sapien
gcccagccccgattctgtggccccg

SEQ ID NO: 401257 - DNA, 25 bp, Homo sapien
cagcccagccccgattctgtggccc

SEQ ID NO: 401258 - DNA, 25 bp, Homo sapien
tgaggccatttgcatccagcttcgc

SEQ ID NO: 401259 - DNA, 25 bp, Homo sapien
ggccatttgcatccagcttcgccaa

SEQ ID NO: 401260 - DNA, 25 bp, Homo sapien
cagcttcgccaaccagagctctaag

SEQ ID NO: 401261 - DNA, 25 bp, Homo sapien
ttgcatccagcttcgccaaccagag

SEQ ID NO: 401262 - DNA, 25 bp, Homo sapien
tgcagcggcggccacccgcaacagc

SEQ ID NO: 401263 - DNA, 25 bp, Homo sapien
ctgcagcggcggccacccgcaacag

SEQ ID NO: 401264 - DNA, 25 bp, Homo sapien
ccaccactagtgtcttgggggcttt

SEQ ID NO: 401265 - DNA, 25 bp, Homo sapien
ctagcttggcttggcgttagtcgct

SEQ ID NO: 401266 - DNA, 25 bp, Homo sapien
ggcttggcgttagtcgctttgcctg

SEQ ID NO: 401267 - DNA, 25 bp, Homo sapien
gtaatgggtgcgcttcgctttgcgt

SEQ ID NO: 401268 - DNA, 25 bp, Homo sapien
ggtgcgcttcgctttgcgttcctcg

SEQ ID NO: 401269 - DNA, 25 bp, Homo sapien
caagatgggcaagtggtgctgtcac

SEQ ID NO: 401270 - DNA, 25 bp, Homo sapien
atgggcacttctggagaccacgacg

SEQ ID NO: 401271 - DNA, 25 bp, Homo sapien
gaccacgacgactcctttatgaaga

SEQ ID NO: 401272 - DNA, 25 bp, Homo sapien
tccgtcgagaagatctggacaagct

SEQ ID NO: 401273 - DNA, 25 bp, Homo sapien
ttgccacagcaaattaagggttttg

SEQ ID NO: 401274 - DNA, 25 bp, Homo sapien
cttttttgccacagcaaattaaggg

SEQ ID NO: 401275 - DNA, 25 bp, Homo sapien
gcttttttgccacagcaaattaagg

SEQ ID NO: 401276 - DNA, 25 bp, Homo sapien
ccacagcaaattaagggttttgatt

SEQ ID NO: 401277 - DNA, 25 bp, Homo sapien
catttctgtcggagctgcaggagct

SEQ ID NO: 401278 - DNA, 25 bp, Homo sapien
atttctgtcggagctgcaggagctc

SEQ ID NO: 401279 - DNA, 25 bp, Homo sapien
tcatttctgtcggagctgcaggagc

SEQ ID NO: 401280 - DNA, 25 bp, Homo sapien
tttctgtcggagctgcaggagctcc

SEQ ID NO: 401281 - DNA, 25 bp, Homo sapien
cccacagggaaaaacggcagatctc

SEQ ID NO: 401282 - DNA, 25 bp, Homo sapien
tggtttgatactgccagtccccaca

SEQ ID NO: 401283 - DNA, 25 bp, Homo sapien
ttcttccgggtgttttcttggcaga

SEQ ID NO: 401284 - DNA, 25 bp, Homo sapien
cttcccgttgtagagctgctccgct

SEQ ID NO: 401285 - DNA, 25 bp, Homo sapien
agggaaagacgccagctccgcaagc

SEQ ID NO: 401286 - DNA, 25 bp, Homo sapien
ccacaaactcggctgttggggctcc

SEQ ID NO: 401287 - DNA, 25 bp, Homo sapien
caggggaccccacaaactcggctgt

SEQ ID NO: 401288 - DNA, 25 bp, Homo sapien
atgcaggggaccccacaaactcggc

SEQ ID NO: 401289 - DNA, 25 bp, Homo sapien
tcagccagcttgacgccgttgttcc

SEQ ID NO: 401290 - DNA, 25 bp, Homo sapien
gtcagccagcttgacgccgttgttc

SEQ ID NO: 401291 - DNA, 25 bp, Homo sapien
cagccagcttgacgccgttgttcct

SEQ ID NO: 401292 - DNA, 25 bp, Homo sapien
ccatcaggccaaagactttcctcca

SEQ ID NO: 401293 - DNA, 25 bp, Homo sapien
catcaggccaaagactttcctccaa

SEQ ID NO: 401294 - DNA, 25 bp, Homo sapien
tcaggccaaagactttcctccaaac

SEQ ID NO: 401295 - DNA, 25 bp, Homo sapien
caggccaaagactttcctccaaact

SEQ ID NO: 401296 - DNA, 25 bp, Homo sapien
ggtcccgtgcttgtgttttctcatg

SEQ ID NO: 401297 - DNA, 25 bp, Homo sapien
caggttagtgacagacttggtcccg

SEQ ID NO: 401298 - DNA, 25 bp, Homo sapien
agtgacagacttggtcccgtgcttg

SEQ ID NO: 401299 - DNA, 25 bp, Homo sapien
gacttggtcccgtgcttgtgttttc

SEQ ID NO: 401300 - DNA, 25 bp, Homo sapien
tctcctcgggctgaagcccaaagtc

SEQ ID NO: 401301 - DNA, 25 bp, Homo sapien
atctccagcctgttctcctcgggct

SEQ ID NO: 401302 - DNA, 25 bp, Homo sapien
cgggctgaagcccaaagtcccccat

SEQ ID NO: 401303 - DNA, 25 bp, Homo sapien
ccatctccagcctgttctcctcggg

SEQ ID NO: 401304 - DNA, 25 bp, Homo sapien
tcctcaaacagctcacagagccact

SEQ ID NO: 401305 - DNA, 25 bp, Homo sapien
tctcctcaaacagctcacagagcca

SEQ ID NO: 401306 - DNA, 25 bp, Homo sapien
tttctcctcaaacagctcacagagc

SEQ ID NO: 401307 - DNA, 25 bp, Homo sapien
cctcaaacagctcacagagccactt

SEQ ID NO: 401308 - DNA, 25 bp, Homo sapien
aaatgcaccagtacttatttcagaa

SEQ ID NO: 401309 - DNA, 25 bp, Homo sapien
cccaaatgcaccagtacttatttca

SEQ ID NO: 401310 - DNA, 25 bp, Homo sapien
caaatgcaccagtacttatttcaga

SEQ ID NO: 401311 - DNA, 25 bp, Homo sapien
cttcccaaatgcaccagtacttatt

SEQ ID NO: 401312 - DNA, 25 bp, Homo sapien
gcttagaggtgaaggtactgtttct

SEQ ID NO: 401313 - DNA, 25 bp, Homo sapien
ctgaaaggtgcttagaggtgaaggt

SEQ ID NO: 401314 - DNA, 25 bp, Homo sapien
actgtgacacctttctatcctcaca

SEQ ID NO: 401315 - DNA, 25 bp, Homo sapien
tgtgacacctttctatcctcacatt

SEQ ID NO: 401316 - DNA, 25 bp, Homo sapien
tctggctaggcaattacacataatg

SEQ ID NO: 401317 - DNA, 25 bp, Homo sapien
ctggctaggcaattacacataatgt

SEQ ID NO: 401318 - DNA, 25 bp, Homo sapien
caggagtacacgatgctgcggggtc

SEQ ID NO: 401319 - DNA, 25 bp, Homo sapien
agtacacgatgctgcggggtcctac

SEQ ID NO: 401320 - DNA, 25 bp, Homo sapien
ggagtacacgatgctgcggggtcct

SEQ ID NO: 401321 - DNA, 25 bp, Homo sapien
aggagtacacgatgctgcggggtcc

SEQ ID NO: 401322 - DNA, 25 bp, Homo sapien
ctctggtgccttagtcccggtcgcg

SEQ ID NO: 401323 - DNA, 25 bp, Homo sapien
tctggtgccttagtcccggtcgcgg

SEQ ID NO: 401324 - DNA, 25 bp, Homo sapien
tctggcgccatagtccaagacgcca

SEQ ID NO: 401325 - DNA, 25 bp, Homo sapien
ccatagtccagggcccgagggggct

SEQ ID NO: 401326 - DNA, 25 bp, Homo sapien
ctgcggagcagtagtccagggcgcg

SEQ ID NO: 401327 - DNA, 25 bp, Homo sapien
gccacagtccagagcgcgacagggc

SEQ ID NO: 401328 - DNA, 25 bp, Homo sapien
cagagcgcgacagggcgggattcct

SEQ ID NO: 401329 - DNA, 25 bp, Homo sapien
cttgctatatccaaggtgcagcggg

SEQ ID NO: 401330 - DNA, 25 bp, Homo sapien
ggttctcttgttcaggagtccagga

SEQ ID NO: 401331 - DNA, 25 bp, Homo sapien
tcctgccctgcgatagtccagtgct

SEQ ID NO: 401332 - DNA, 25 bp, Homo sapien
caatgctggagttcacggcgttgtg

SEQ ID NO: 401333 - DNA, 25 bp, Homo sapien
cgatagtccagtgcttgagtccgca

SEQ ID NO: 401334 - DNA, 25 bp, Homo sapien
tttggtgacttagtccagggcgtac

SEQ ID NO: 401335 - DNA, 25 bp, Homo sapien
tccacagttgccatagtgaggatct

SEQ ID NO: 401336 - DNA, 25 bp, Homo sapien
gatcttggaggaaggtggttcctgc

SEQ ID NO: 401337 - DNA, 25 bp, Homo sapien
tgccatagtgaggatcttggaggaa

SEQ ID NO: 401338 - DNA, 25 bp, Homo sapien
tcttggaggaaggtggttcctgcct

SEQ ID NO: 401339 - DNA, 25 bp, Homo sapien
ggggcaggggtcctctcttgtcaga

SEQ ID NO: 401340 - DNA, 25 bp, Homo sapien
gcagggggcaggggtcctctcttgt

SEQ ID NO: 401341 - DNA, 25 bp, Homo sapien
agggggcaggggtcctctcttgtca

SEQ ID NO: 401342 - DNA, 25 bp, Homo sapien
gcaggggtcctctcttgtcagagtc

SEQ ID NO: 401343 - DNA, 25 bp, Homo sapien
gaggtgggggttttcctatgcgata

SEQ ID NO: 401344 - DNA, 25 bp, Homo sapien
tggaggtgggggttttcctatgcga

SEQ ID NO: 401345 - DNA, 25 bp, Homo sapien
gtgggggttttcctatgcgatagcc

SEQ ID NO: 401346 - DNA, 25 bp, Homo sapien
ggggttttcctatgcgatagcccac

SEQ ID NO: 401347 - DNA, 25 bp, Homo sapien
tcggtgaagccgggtcctcccgtgc

SEQ ID NO: 401348 - DNA, 25 bp, Homo sapien
cccgtgcctttgtccagggcgcagg

SEQ ID NO: 401349 - DNA, 25 bp, Homo sapien
ggagtccgcggagcggcaggacggg

SEQ ID NO: 401350 - DNA, 25 bp, Homo sapien
cttcggtggtggagtccgcggagcg

SEQ ID NO: 401351 - DNA, 25 bp, Homo sapien
gcggtgggacggcggtcctgctgtg

SEQ ID NO: 401352 - DNA, 25 bp, Homo sapien
gcgcggtgggacggcggtcctgctg

SEQ ID NO: 401353 - DNA, 25 bp, Homo sapien
cgcggtgggacggcggtcctgctgt

SEQ ID NO: 401354 - DNA, 25 bp, Homo sapien
tcttaccgtgccgaagtcggtggca

SEQ ID NO: 401355 - DNA, 25 bp, Homo sapien
gcaggggtagtccagagagcgccgt

SEQ ID NO: 401356 - DNA, 25 bp, Homo sapien
tgcaggacgcggtggcgcaggggta

SEQ ID NO: 401357 - DNA, 25 bp, Homo sapien
gtccaggacgtagccgaggagtcct

SEQ ID NO: 401358 - DNA, 25 bp, Homo sapien
tgcctggcggatcgggggtccttct

SEQ ID NO: 401359 - DNA, 25 bp, Homo sapien
ccatggcgggcgtccctctgtgcag

SEQ ID NO: 401360 - DNA, 25 bp, Homo sapien
agcccagtgcctggcggatcggggg

SEQ ID NO: 401361 - DNA, 25 bp, Homo sapien
tggcgggcgtccctctgtgcaggag

SEQ ID NO: 401362 - DNA, 25 bp, Homo sapien
ccaagttgccgcaggaccaggtact

SEQ ID NO: 401363 - DNA, 25 bp, Homo sapien
tgtctcagtctagggcctggtagga

SEQ ID NO: 401364 - DNA, 25 bp, Homo sapien
gaggttctcccgtgtctcagtctag

SEQ ID NO: 401365 - DNA, 25 bp, Homo sapien
acgtggtagcccaagttgccgcagg

SEQ ID NO: 401366 - DNA, 25 bp, Homo sapien
ctctagttcagggcggagtgggtct

SEQ ID NO: 401367 - DNA, 25 bp, Homo sapien
ctgtgctctagttcagggcggagtg

SEQ ID NO: 401368 - DNA, 25 bp, Homo sapien
tgtgctctagttcagggcggagtgg

SEQ ID NO: 401369 - DNA, 25 bp, Homo sapien
tgctctagttcagggcggagtgggt

SEQ ID NO: 401370 - DNA, 25 bp, Homo sapien
tttgtgccagcatcaatgggttttt

SEQ ID NO: 401371 - DNA, 25 bp, Homo sapien
ctttgtgccagcatcaatgggtttt

SEQ ID NO: 401372 - DNA, 25 bp, Homo sapien
tggttgaaagagttaccagcccttc

SEQ ID NO: 401373 - DNA, 25 bp, Homo sapien
tgaaagagttaccagcccttccttg

SEQ ID NO: 401374 - DNA, 25 bp, Homo sapien
aaagagttaccagcccttccttgat

SEQ ID NO: 401375 - DNA, 25 bp, Homo sapien
ctgtggttgaaagagttaccagccc

SEQ ID NO: 401376 - DNA, 25 bp, Homo sapien
aagcccatgctaatggctctgccag

SEQ ID NO: 401377 - DNA, 25 bp, Homo sapien
accaggagcatcaaagtggccagga

SEQ ID NO: 401378 - DNA, 25 bp, Homo sapien
ggccaggattggctgaagcccatgc

SEQ ID NO: 401379 - DNA, 25 bp, Homo sapien
ccatgctaatggctctgccagctct

SEQ ID NO: 401380 - DNA, 25 bp, Homo sapien
taaggccactggacacgcagcccat

SEQ ID NO: 401381 - DNA, 25 bp, Homo sapien
cactgccccgtaaggccactggaca

SEQ ID NO: 401382 - DNA, 25 bp, Homo sapien
taacatataagcctgcataaacatc

SEQ ID NO: 401383 - DNA, 25 bp, Homo sapien
cagcccatcagttctcttcacgtgg

SEQ ID NO: 401384 - DNA, 25 bp, Homo sapien
tgcgtgcgccatgtgcaggcaaggg

SEQ ID NO: 401385 - DNA, 25 bp, Homo sapien
caggcaagggtttcccagacagcct

SEQ ID NO: 401386 - DNA, 25 bp, Homo sapien
tttcttgccggcacccatagcgggg

SEQ ID NO: 401387 - DNA, 25 bp, Homo sapien
catggagtggaccactgtcccagcc

SEQ ID NO: 401388 - DNA, 25 bp, Homo sapien
gttggctgcgggcaaggtcagcggg

SEQ ID NO: 401389 - DNA, 25 bp, Homo sapien
ggatccagcagtggaatcctcactg

SEQ ID NO: 401390 - DNA, 25 bp, Homo sapien
tcagcggggtttccatcgctgctgg

SEQ ID NO: 401391 - DNA, 25 bp, Homo sapien
ccgccctggcaagggatccagcagt

SEQ ID NO: 401392 - DNA, 25 bp, Homo sapien
ggcgaccgctgcaatccccagcgct

SEQ ID NO: 401393 - DNA, 25 bp, Homo sapien
gctgcagcgggcgaccgctgcaatc

SEQ ID NO: 401394 - DNA, 25 bp, Homo sapien
gctgcaatccccagcgctatgggac

SEQ ID NO: 401395 - DNA, 25 bp, Homo sapien
gaccgctgcaatccccagcgctatg

SEQ ID NO: 401396 - DNA, 25 bp, Homo sapien
agccaatctcataacaggcgctgca

SEQ ID NO: 401397 - DNA, 25 bp, Homo sapien
ccggctcccagattgcagggttgtg

SEQ ID NO: 401398 - DNA, 25 bp, Homo sapien
aggcatccggtcctggggtcttgct

SEQ ID NO: 401399 - DNA, 25 bp, Homo sapien
aatctcataacaggcgctgcagtga

SEQ ID NO: 401400 - DNA, 25 bp, Homo sapien
agatccgggtggctgcgctgggcac

SEQ ID NO: 401401 - DNA, 25 bp, Homo sapien
gcctcccggaatccgctgaagggca

SEQ ID NO: 401402 - DNA, 25 bp, Homo sapien
tgagggccatttgcccgcgcccaga

SEQ ID NO: 401403 - DNA, 25 bp, Homo sapien
ggtcccagacggcctgagggccatt

SEQ ID NO: 401404 - DNA, 25 bp, Homo sapien
tctgggctctgtgccggcgctgggc

SEQ ID NO: 401405 - DNA, 25 bp, Homo sapien
ggctgagcagcggatttcctccctg

SEQ ID NO: 401406 - DNA, 25 bp, Homo sapien
gattacctgcactagccgctgaggc

SEQ ID NO: 401407 - DNA, 25 bp, Homo sapien
agagcgggttgtgcgggctctgggc

SEQ ID NO: 401408 - DNA, 25 bp, Homo sapien
cgggcagggtcagggttggttgcag

SEQ ID NO: 401409 - DNA, 25 bp, Homo sapien
ggtgacgcgggcagggtcagggttg

SEQ ID NO: 401410 - DNA, 25 bp, Homo sapien
tggtgacgcgggcagggtcagggtt

SEQ ID NO: 401411 - DNA, 25 bp, Homo sapien
gggtcagggttggttgcaggtggca

SEQ ID NO: 401412 - DNA, 25 bp, Homo sapien
gtcttaggcgccgcggcgctatctg

SEQ ID NO: 401413 - DNA, 25 bp, Homo sapien
cgtggcctaaggtcttaggcgccgc

SEQ ID NO: 401414 - DNA, 25 bp, Homo sapien
agctgcgtggcctaaggtcttaggc

SEQ ID NO: 401415 - DNA, 25 bp, Homo sapien
cctaaggtcttaggcgccgcggcgc

SEQ ID NO: 401416 - DNA, 25 bp, Homo sapien
catggtcaatgtagtcttctctggg

SEQ ID NO: 401417 - DNA, 25 bp, Homo sapien
attcttcacagatatctgctggcat

SEQ ID NO: 401418 - DNA, 25 bp, Homo sapien
cgtcctctggtacaggctggtctgt

SEQ ID NO: 401419 - DNA, 25 bp, Homo sapien
gtctgtgctgtgcatggtcaatgta

SEQ ID NO: 401420 - DNA, 25 bp, Homo sapien
cggcgagcttgaggcgccaggctag

SEQ ID NO: 401421 - DNA, 25 bp, Homo sapien
ttctgtgtcgccctgcggctcgagg

SEQ ID NO: 401422 - DNA, 25 bp, Homo sapien
cctgggcgcgttctgtgtcgccctg

SEQ ID NO: 401423 - DNA, 25 bp, Homo sapien
tgcgcgaacggccactgttcacggg

SEQ ID NO: 401424 - DNA, 25 bp, Homo sapien
gcactgctcatgtgcgtggcaagca

SEQ ID NO: 401425 - DNA, 25 bp, Homo sapien
agcatgcactgctcatgtgcgtggc

SEQ ID NO: 401426 - DNA, 25 bp, Homo sapien
tgcactgctcatgtgcgtggcaagc

SEQ ID NO: 401427 - DNA, 25 bp, Homo sapien
catgcactgctcatgtgcgtggcaa

SEQ ID NO: 401428 - DNA, 25 bp, Homo sapien
gcacagcagtaggaagcccagtgtc

SEQ ID NO: 401429 - DNA, 25 bp, Homo sapien
catctatatcctgcacatctaggct

SEQ ID NO: 401430 - DNA, 25 bp, Homo sapien
ttccacatcatacccaggacctctg

SEQ ID NO: 401431 - DNA, 25 bp, Homo sapien
tggcaattggagcacagcagtagga

SEQ ID NO: 401432 - DNA, 25 bp, Homo sapien
gtgatttccaataagatgaaaagtg

SEQ ID NO: 401433 - DNA, 25 bp, Homo sapien
caaagagtgatttccaataagatga

SEQ ID NO: 401434 - DNA, 25 bp, Homo sapien
tactgagtgaagatgaggcaaaagt

SEQ ID NO: 401435 - DNA, 25 bp, Homo sapien
tgtcaaagagtgatttccaataaga

SEQ ID NO: 401436 - DNA, 25 bp, Homo sapien
cccggctcggcgtcgggagcgcgct

SEQ ID NO: 401437 - DNA, 25 bp, Homo sapien
gcccgtgcggctccgggtgtgggac

SEQ ID NO: 401438 - DNA, 25 bp, Homo sapien
tggcggggatgggcccgtgcggctc

SEQ ID NO: 401439 - DNA, 25 bp, Homo sapien
gtgcggctccgggtgtgggacgtac

SEQ ID NO: 401440 - DNA, 25 bp, Homo sapien
ggatgggcccgtgcggctccgggtg

SEQ ID NO: 401441 - DNA, 25 bp, Homo sapien
gcgaacggtgcggacatgggccttg

SEQ ID NO: 401442 - DNA, 25 bp, Homo sapien
ggcgaacggtgcggacatgggcctt

SEQ ID NO: 401443 - DNA, 25 bp, Homo sapien
gggcgaacggtgcggacatgggcct

SEQ ID NO: 401444 - DNA, 25 bp, Homo sapien
gtccaagacaatggtccaggatcca

SEQ ID NO: 401445 - DNA, 25 bp, Homo sapien
tcagagggtccaagacaatggtcca

SEQ ID NO: 401446 - DNA, 25 bp, Homo sapien
agagggtccaagacaatggtccagg

SEQ ID NO: 401447 - DNA, 25 bp, Homo sapien
ggatccaggactggggaatcccttc

SEQ ID NO: 401448 - DNA, 25 bp, Homo sapien
ccttagcatcattgcaggattcgtg

SEQ ID NO: 401449 - DNA, 25 bp, Homo sapien
cgtagtcatgtaaatctccttagca

SEQ ID NO: 401450 - DNA, 25 bp, Homo sapien
aatctccttagcatcattgcaggat

SEQ ID NO: 401451 - DNA, 25 bp, Homo sapien
acagctggcagacacgtagtcatgt

SEQ ID NO: 401452 - DNA, 25 bp, Homo sapien
ttttagtttgatgagtacttatctc

SEQ ID NO: 401453 - DNA, 25 bp, Homo sapien
aataacatctaattgcatttccttt

SEQ ID NO: 401454 - DNA, 25 bp, Homo sapien
agtttgatgagtacttatctcggta

SEQ ID NO: 401455 - DNA, 25 bp, Homo sapien
gagtacttatctcggtatcttttaa

SEQ ID NO: 401456 - DNA, 25 bp, Homo sapien
caagactgtctgtcacctgagtgtg

SEQ ID NO: 401457 - DNA, 25 bp, Homo sapien
taagtttattttgatctgatacatt

SEQ ID NO: 401458 - DNA, 25 bp, Homo sapien
atattcataatgcatgtgcctcgag

SEQ ID NO: 401459 - DNA, 25 bp, Homo sapien
tgagtgtgacttgcaaccaagcaca

SEQ ID NO: 401460 - DNA, 25 bp, Homo sapien
tagggaagttcttcacattcacctg

SEQ ID NO: 401461 - DNA, 25 bp, Homo sapien
tcacattcacctggattccaaatac

SEQ ID NO: 401462 - DNA, 25 bp, Homo sapien
gaagttcttcacattcacctggatt

SEQ ID NO: 401463 - DNA, 25 bp, Homo sapien
tcttcacattcacctggattccaaa

SEQ ID NO: 401464 - DNA, 25 bp, Homo sapien
atcaccaagcagtggcatctcacgc

SEQ ID NO: 401465 - DNA, 25 bp, Homo sapien
cattagagagtagcatgcagcccac

SEQ ID NO: 401466 - DNA, 25 bp, Homo sapien
ctccagatgtcgagctgcttcataa

SEQ ID NO: 401467 - DNA, 25 bp, Homo sapien
tcacgccatcccattagagagtagc

SEQ ID NO: 401468 - DNA, 25 bp, Homo sapien
tgcctcatattcaaggtaccaggta

SEQ ID NO: 401469 - DNA, 25 bp, Homo sapien
gcctcatattcaaggtaccaggtac

SEQ ID NO: 401470 - DNA, 25 bp, Homo sapien
ctcatattcaaggtaccaggtacca

SEQ ID NO: 401471 - DNA, 25 bp, Homo sapien
gtgtgcctcatattcaaggtaccag

SEQ ID NO: 401472 - DNA, 25 bp, Homo sapien
gctgtcctcccgcctcttgcctccc

SEQ ID NO: 401473 - DNA, 25 bp, Homo sapien
cttgcctccctgagagctgggatta

SEQ ID NO: 401474 - DNA, 25 bp, Homo sapien
cctttttctggagaacgaggtctcg

SEQ ID NO: 401475 - DNA, 25 bp, Homo sapien
aggtctcgctatattgcccaggcag

SEQ ID NO: 401476 - DNA, 25 bp, Homo sapien
acatcttttatcaggaagcccagca

SEQ ID NO: 401477 - DNA, 25 bp, Homo sapien
gatagcaggttgtgtaccacctcac

SEQ ID NO: 401478 - DNA, 25 bp, Homo sapien
caaagaagatcttaactctgaaacc

SEQ ID NO: 401479 - DNA, 25 bp, Homo sapien
cagtcatggtaaggactgtcccagg

SEQ ID NO: 401480 - DNA, 25 bp, Homo sapien
caaatacttctgatcagagggatga

SEQ ID NO: 401481 - DNA, 25 bp, Homo sapien
acaaatacttctgatcagagggatg

SEQ ID NO: 401482 - DNA, 25 bp, Homo sapien
aatacttctgatcagagggatgagc

SEQ ID NO: 401483 - DNA, 25 bp, Homo sapien
tacttctgatcagagggatgagctt

SEQ ID NO: 401484 - DNA, 25 bp, Homo sapien
taccccagtcctgaattagccagat

SEQ ID NO: 401485 - DNA, 25 bp, Homo sapien
caggtctcaggactcgagaacatgt

SEQ ID NO: 401486 - DNA, 25 bp, Homo sapien
aataccccagtcctgaattagccag

SEQ ID NO: 401487 - DNA, 25 bp, Homo sapien
caggactcgagaacatgtcatagat

SEQ ID NO: 401488 - DNA, 25 bp, Homo sapien
tccctgaagaatcaagattccttct

SEQ ID NO: 401489 - DNA, 25 bp, Homo sapien
ccctgaagaatcaagattccttctt

SEQ ID NO: 401490 - DNA, 25 bp, Homo sapien
gttccctgaagaatcaagattcctt

SEQ ID NO: 401491 - DNA, 25 bp, Homo sapien
ctgttccctgaagaatcaagattcc

SEQ ID NO: 401492 - DNA, 25 bp, Homo sapien
agtcacacagtttgtcatatcattc

SEQ ID NO: 401493 - DNA, 25 bp, Homo sapien
gtcacacagtttgtcatatcattct

SEQ ID NO: 401494 - DNA, 25 bp, Homo sapien
cataattccagggtttactccagtt

SEQ ID NO: 401495 - DNA, 25 bp, Homo sapien
agcgactataccatcttatttgagg

SEQ ID NO: 401496 - DNA, 25 bp, Homo sapien
cagtatggttgcctagcaaagcgac

SEQ ID NO: 401497 - DNA, 25 bp, Homo sapien
ttcgagtcatattcatcaacataat

SEQ ID NO: 401498 - DNA, 25 bp, Homo sapien
cacaggcaactacagctagatgcat

SEQ ID NO: 401499 - DNA, 25 bp, Homo sapien
ggaccagcgctgcccgcgcctctca

SEQ ID NO: 401500 - DNA, 25 bp, Homo sapien
gaccagcgctgcccgcgcctctcac

SEQ ID NO: 401501 - DNA, 25 bp, Homo sapien
cctcctgccagccaggaagccactg

SEQ ID NO: 401502 - DNA, 25 bp, Homo sapien
aggaagccactgaggcctgctgctt

SEQ ID NO: 401503 - DNA, 25 bp, Homo sapien
ggcaccgcatccgcctcctgccagc

SEQ ID NO: 401504 - DNA, 25 bp, Homo sapien
actgaggcctgctgcttcccgccac

SEQ ID NO: 401505 - DNA, 25 bp, Homo sapien
gagctggctgaaggcgtaaaggagc

SEQ ID NO: 401506 - DNA, 25 bp, Homo sapien
agcagaagccgcaggccagacacag

SEQ ID NO: 401507 - DNA, 25 bp, Homo sapien
tgaaggcgtaaaggagcgagcagaa

SEQ ID NO: 401508 - DNA, 25 bp, Homo sapien
cgtaaaggagcgagcagaagccgca

SEQ ID NO: 401509 - DNA, 25 bp, Homo sapien
cccatggaacgtttcactgtgatca

SEQ ID NO: 401510 - DNA, 25 bp, Homo sapien
ttctgcagtcacgtggttaggaagg

SEQ ID NO: 401511 - DNA, 25 bp, Homo sapien
ctgcagtcacgtggttaggaaggat

SEQ ID NO: 401512 - DNA, 25 bp, Homo sapien
tcccatggaacgtttcactgtgatc

SEQ ID NO: 401513 - DNA, 25 bp, Homo sapien
gcaaccccaggattgggagggcaaa

SEQ ID NO: 401514 - DNA, 25 bp, Homo sapien
ggcaatttcgtgcagggtccatgga

SEQ ID NO: 401515 - DNA, 25 bp, Homo sapien
ggagtggggataaaatctgacccaa

SEQ ID NO: 401516 - DNA, 25 bp, Homo sapien
agcccctgaagcaaccccaggattg

SEQ ID NO: 401517 - DNA, 25 bp, Homo sapien
aaccagaccatgaaggcacgtccag

SEQ ID NO: 401518 - DNA, 25 bp, Homo sapien
cgggctgccaacatcttagtagaga

SEQ ID NO: 401519 - DNA, 25 bp, Homo sapien
acatcttagtagagatcccaggaga

SEQ ID NO: 401520 - DNA, 25 bp, Homo sapien
gaccacagtgcaggtcatgaagcat

SEQ ID NO: 401521 - DNA, 25 bp, Homo sapien
ttaatgacccttcagccgcttcgag

SEQ ID NO: 401522 - DNA, 25 bp, Homo sapien
tccagatgcagtcaaagggcacagt

SEQ ID NO: 401523 - DNA, 25 bp, Homo sapien
caggatacagtgtctaagtggaccc

SEQ ID NO: 401524 - DNA, 25 bp, Homo sapien
tgcagcctctccagtctaataaggg

SEQ ID NO: 401525 - DNA, 25 bp, Homo sapien
tggttacagacaaggactgcaggta

SEQ ID NO: 401526 - DNA, 25 bp, Homo sapien
ggttacagacaaggactgcaggtac

SEQ ID NO: 401527 - DNA, 25 bp, Homo sapien
ttacagacaaggactgcaggtacag

SEQ ID NO: 401528 - DNA, 25 bp, Homo sapien
gttacagacaaggactgcaggtaca

SEQ ID NO: 401529 - DNA, 25 bp, Homo sapien
gagtctcatgggatacaaacaagca

SEQ ID NO: 401530 - DNA, 25 bp, Homo sapien
gtgcgtatcccaggaaacaccagta

SEQ ID NO: 401531 - DNA, 25 bp, Homo sapien
cattatactcttaaagaggtaagag

SEQ ID NO: 401532 - DNA, 25 bp, Homo sapien
gtgtgccttagtataattttcctgg

SEQ ID NO: 401533 - DNA, 25 bp, Homo sapien
aatgtcctgcctgatctgcaagtgt

SEQ ID NO: 401534 - DNA, 25 bp, Homo sapien
gaccctgacagtacctccagcaatg

SEQ ID NO: 401535 - DNA, 25 bp, Homo sapien
ctgatctgcaagtgtcagaccaggg

SEQ ID NO: 401536 - DNA, 25 bp, Homo sapien
tgcctgatctgcaagtgtcagacca

SEQ ID NO: 401537 - DNA, 25 bp, Homo sapien
ccagccccaacaatgtgtatatgta

SEQ ID NO: 401538 - DNA, 25 bp, Homo sapien
tgattccaactcatacacttaccca

SEQ ID NO: 401539 - DNA, 25 bp, Homo sapien
tgactccatgggatatacagtaagg

SEQ ID NO: 401540 - DNA, 25 bp, Homo sapien
tgtccacagagcctataaattcttc

SEQ ID NO: 401541 - DNA, 25 bp, Homo sapien
tctgaggttgcataggattcagtag

SEQ ID NO: 401542 - DNA, 25 bp, Homo sapien
ttctgaggttgcataggattcagta

SEQ ID NO: 401543 - DNA, 25 bp, Homo sapien
tgaggttgcataggattcagtagag

SEQ ID NO: 401544 - DNA, 25 bp, Homo sapien
ctgaggttgcataggattcagtaga

SEQ ID NO: 401545 - DNA, 25 bp, Homo sapien
gaggcagccacgcaggcttgcgtct

SEQ ID NO: 401546 - DNA, 25 bp, Homo sapien
ccacgcaggcttgcgtctcttggct

SEQ ID NO: 401547 - DNA, 25 bp, Homo sapien
agccacgcaggcttgcgtctcttgg

SEQ ID NO: 401548 - DNA, 25 bp, Homo sapien
ggcagccacgcaggcttgcgtctct

SEQ ID NO: 401549 - DNA, 25 bp, Homo sapien
gacaagacctctgaacacattagct

SEQ ID NO: 401550 - DNA, 25 bp, Homo sapien
gaccacattacacccagaaatgggt

SEQ ID NO: 401551 - DNA, 25 bp, Homo sapien
accaccgctggtactcatgaagatg

SEQ ID NO: 401552 - DNA, 25 bp, Homo sapien
tggatggagagacccacaccgggac

SEQ ID NO: 401553 - DNA, 25 bp, Homo sapien
tgtggtgcctacgttaccatctctg

SEQ ID NO: 401554 - DNA, 25 bp, Homo sapien
cctgtggtgcctacgttaccatctc

SEQ ID NO: 401555 - DNA, 25 bp, Homo sapien
agtgggactcccttgtggagcagcc

SEQ ID NO: 401556 - DNA, 25 bp, Homo sapien
tggtgcctacgttaccatctctgcc

SEQ ID NO: 401557 - DNA, 25 bp, Homo sapien
tcttgctgcttctagacttcttcta

SEQ ID NO: 401558 - DNA, 25 bp, Homo sapien
agacttcttctagtcattaagcatg

SEQ ID NO: 401559 - DNA, 25 bp, Homo sapien
agtcattaagcatgttgagccattt

SEQ ID NO: 401560 - DNA, 25 bp, Homo sapien
gaaacacgacaaagtaagctgagcc

SEQ ID NO: 401561 - DNA, 25 bp, Homo sapien
gagtcctcagacaggaaaacactgc

SEQ ID NO: 401562 - DNA, 25 bp, Homo sapien
agtcctcagacaggaaaacactgcc

SEQ ID NO: 401563 - DNA, 25 bp, Homo sapien
gactgggaagacctcttaagtcctc

SEQ ID NO: 401564 - DNA, 25 bp, Homo sapien
ctgacagactgggaagacctcttaa

SEQ ID NO: 401565 - DNA, 25 bp, Homo sapien
tcagggcactgactgatccatctca

SEQ ID NO: 401566 - DNA, 25 bp, Homo sapien
ttcagggcactgactgatccatctc

SEQ ID NO: 401567 - DNA, 25 bp, Homo sapien
agggcactgactgatccatctcact

SEQ ID NO: 401568 - DNA, 25 bp, Homo sapien
cttcagggcactgactgatccatct

SEQ ID NO: 401569 - DNA, 25 bp, Homo sapien
agatctcccaggtccatccaaacac

SEQ ID NO: 401570 - DNA, 25 bp, Homo sapien
ttttgtcctgtcagaatccctgagc

SEQ ID NO: 401571 - DNA, 25 bp, Homo sapien
atccctgagcaagatctcccaggtc

SEQ ID NO: 401572 - DNA, 25 bp, Homo sapien
cctgagcaagatctcccaggtccat

SEQ ID NO: 401573 - DNA, 25 bp, Homo sapien
tccacagggtcctcgataacatgca

SEQ ID NO: 401574 - DNA, 25 bp, Homo sapien
ccacagggtcctcgataacatgcat

SEQ ID NO: 401575 - DNA, 25 bp, Homo sapien
cagctgtccacagggtcctcgataa

SEQ ID NO: 401576 - DNA, 25 bp, Homo sapien
ctgtccacagggtcctcgataacat

SEQ ID NO: 401577 - DNA, 25 bp, Homo sapien
tgtagtaagttcaagtctcatccaa

SEQ ID NO: 401578 - DNA, 25 bp, Homo sapien
tcttctgcctatgagtccctgaatg

SEQ ID NO: 401579 - DNA, 25 bp, Homo sapien
ctgcctatgagtccctgaatgtaaa

SEQ ID NO: 401580 - DNA, 25 bp, Homo sapien
caaatgtagtaagttcaagtctcat

SEQ ID NO: 401581 - DNA, 25 bp, Homo sapien
aagcacaaaacacagatgggactca

SEQ ID NO: 401582 - DNA, 25 bp, Homo sapien
taagcattcccaggcaacagaaaaa

SEQ ID NO: 401583 - DNA, 25 bp, Homo sapien
acaaaacacagatgggactcatagg

SEQ ID NO: 401584 - DNA, 25 bp, Homo sapien
ggtaagcattcccaggcaacagaaa

SEQ ID NO: 401585 - DNA, 25 bp, Homo sapien
cactgtccatgtttctgtcaggatt

SEQ ID NO: 401586 - DNA, 25 bp, Homo sapien
actgtccatgtttctgtcaggattt

SEQ ID NO: 401587 - DNA, 25 bp, Homo sapien
ctgtccatgtttctgtcaggatttt

SEQ ID NO: 401588 - DNA, 25 bp, Homo sapien
attcccttctgccacttgttgtttg

SEQ ID NO: 401589 - DNA, 25 bp, Homo sapien
acttgttgtttgctctccgtgactt

SEQ ID NO: 401590 - DNA, 25 bp, Homo sapien
ctctgcacctttatattcccttctg

SEQ ID NO: 401591 - DNA, 25 bp, Homo sapien
tgcacctttatattcccttctgcca

SEQ ID NO: 401592 - DNA, 25 bp, Homo sapien
tactcaagtgaatggcctggtccag

SEQ ID NO: 401593 - DNA, 25 bp, Homo sapien
ctatactcaagtgaatggcctggtc

SEQ ID NO: 401594 - DNA, 25 bp, Homo sapien
acctcacagacagtgtggaaggcat

SEQ ID NO: 401595 - DNA, 25 bp, Homo sapien
gtggaaggcatctatactcaagtga

SEQ ID NO: 401596 - DNA, 25 bp, Homo sapien
cttcaccatagatgccttccacact

SEQ ID NO: 401597 - DNA, 25 bp, Homo sapien
ttcaccatagatgccttccacactg

SEQ ID NO: 401598 - DNA, 25 bp, Homo sapien
ccacttcaccatagatgccttccac

SEQ ID NO: 401599 - DNA, 25 bp, Homo sapien
atccaagaagcccacagtgctgtag

SEQ ID NO: 401600 - DNA, 25 bp, Homo sapien
caagtccttctcaagatggcctgtg

SEQ ID NO: 401601 - DNA, 25 bp, Homo sapien
aagaagcccacagtgctgtagaagc

SEQ ID NO: 401602 - DNA, 25 bp, Homo sapien
tcttggcatccaagaagcccacagt

SEQ ID NO: 401603 - DNA, 25 bp, Homo sapien
ccgagtgagtttgtcttgtcttggg

SEQ ID NO: 401604 - DNA, 25 bp, Homo sapien
tactgacaagctgctccgagtgagt

SEQ ID NO: 401605 - DNA, 25 bp, Homo sapien
tacacaggccccgggtactgacaag

SEQ ID NO: 401606 - DNA, 25 bp, Homo sapien
gcatacacaggccccgggtactgac

SEQ ID NO: 401607 - DNA, 25 bp, Homo sapien
tcagatgcaggcacgatgcaggacg

SEQ ID NO: 401608 - DNA, 25 bp, Homo sapien
atgagacgaccgtcagcacagaaca

SEQ ID NO: 401609 - DNA, 25 bp, Homo sapien
tgagacgaccgtcagcacagaacag

SEQ ID NO: 401610 - DNA, 25 bp, Homo sapien
gagccactcacgacactgctgtgtg

SEQ ID NO: 401611 - DNA, 25 bp, Homo sapien
tgcctctcatctagaaaacggtcct

SEQ ID NO: 401612 - DNA, 25 bp, Homo sapien
tctagaaaacggtccttcacacaga

SEQ ID NO: 401613 - DNA, 25 bp, Homo sapien
cgatggggactcagcaacagtgaca

SEQ ID NO: 401614 - DNA, 25 bp, Homo sapien
tgtggggtgacacaacccaccacaa

SEQ ID NO: 401615 - DNA, 25 bp, Homo sapien
tggaggtgaggctccacagacaaac

SEQ ID NO: 401616 - DNA, 25 bp, Homo sapien
aggtgaggctccacagacaaacccc

SEQ ID NO: 401617 - DNA, 25 bp, Homo sapien
cctgcagatggaggtgaggctccac

SEQ ID NO: 401618 - DNA, 25 bp, Homo sapien
cagatggaggtgaggctccacagac

SEQ ID NO: 401619 - DNA, 25 bp, Homo sapien
acacgctggggagggctcgcctgtg

SEQ ID NO: 401620 - DNA, 25 bp, Homo sapien
tctgttggggaccagtgagtacacg

SEQ ID NO: 401621 - DNA, 25 bp, Homo sapien
accagtgagtacacgctggggaggg

SEQ ID NO: 401622 - DNA, 25 bp, Homo sapien
ttggggaccagtgagtacacgctgg

SEQ ID NO: 401623 - DNA, 25 bp, Homo sapien
aaaatagatgggagcaagtgtccaa

SEQ ID NO: 401624 - DNA, 25 bp, Homo sapien
cagtggattctagagaagaaaatag

SEQ ID NO: 401625 - DNA, 25 bp, Homo sapien
gagaagaaaatagatgggagcaagt

SEQ ID NO: 401626 - DNA, 25 bp, Homo sapien
aagaaaatagatgggagcaagtgtc

SEQ ID NO: 401627 - DNA, 25 bp, Homo sapien
ccagatagagggaagaggcaaaggc

SEQ ID NO: 401628 - DNA, 25 bp, Homo sapien
gagatgaggaagagccctgcagagt

SEQ ID NO: 401629 - DNA, 25 bp, Homo sapien
agagttccactccatcaagtttggg

SEQ ID NO: 401630 - DNA, 25 bp, Homo sapien
ggaaaagcttgccagatagagggaa

SEQ ID NO: 401631 - DNA, 25 bp, Homo sapien
ttctctaattatttgttccacacag

SEQ ID NO: 401632 - DNA, 25 bp, Homo sapien
tctaattatttgttccacacagtcc

SEQ ID NO: 401633 - DNA, 25 bp, Homo sapien
ttgtttctctaattatttgttccac

SEQ ID NO: 401634 - DNA, 25 bp, Homo sapien
tgtttctctaattatttgttccaca

SEQ ID NO: 401635 - DNA, 25 bp, Homo sapien
cctaaagagaaacggtcatataacg

SEQ ID NO: 401636 - DNA, 25 bp, Homo sapien
gaacaactcagtatttcaccaaatt

SEQ ID NO: 401637 - DNA, 25 bp, Homo sapien
taaaaacaagaattacgctagagaa

SEQ ID NO: 401638 - DNA, 25 bp, Homo sapien
agaattacgctagagaaatgaaacc

SEQ ID NO: 401639 - DNA, 25 bp, Homo sapien
agtaggaattcttacgggcatttgg

SEQ ID NO: 401640 - DNA, 25 bp, Homo sapien
tatttgaggtctgagggtttgaagt

SEQ ID NO: 401641 - DNA, 25 bp, Homo sapien
tctgggcctcgccttgtaggaagag

SEQ ID NO: 401642 - DNA, 25 bp, Homo sapien
cccgctctttctccataaggagctt

SEQ ID NO: 401643 - DNA, 25 bp, Homo sapien
ttggttgtaacctcttcataagtag

SEQ ID NO: 401644 - DNA, 25 bp, Homo sapien
attgttagctttcaatgctactgca

SEQ ID NO: 401645 - DNA, 25 bp, Homo sapien
ccttgtattcttctaatttggttgt

SEQ ID NO: 401646 - DNA, 25 bp, Homo sapien
caatgctactgcaaaggcttccttg

SEQ ID NO: 401647 - DNA, 25 bp, Homo sapien
atttagtgaagccgtattacccttg

SEQ ID NO: 401648 - DNA, 25 bp, Homo sapien
ctctaattgtttttcatattgtgtt

SEQ ID NO: 401649 - DNA, 25 bp, Homo sapien
ctgctctaattgtttttcatattgt

SEQ ID NO: 401650 - DNA, 25 bp, Homo sapien
tgctctaattgtttttcatattgtg

SEQ ID NO: 401651 - DNA, 25 bp, Homo sapien
ctaattgtttttcatattgtgttta

SEQ ID NO: 401652 - DNA, 25 bp, Homo sapien
gtcattgccctttcatctagctccg

SEQ ID NO: 401653 - DNA, 25 bp, Homo sapien
tactgccgtcattgccctttcatct

SEQ ID NO: 401654 - DNA, 25 bp, Homo sapien
actaagttctaccatattgtcttcc

SEQ ID NO: 401655 - DNA, 25 bp, Homo sapien
aatttttctactgccgtcattgccc

SEQ ID NO: 401656 - DNA, 25 bp, Homo sapien
ggaggagacagcaaaatgcctaggc

SEQ ID NO: 401657 - DNA, 25 bp, Homo sapien
tggagaatctccaaccagctccaca

SEQ ID NO: 401658 - DNA, 25 bp, Homo sapien
tattaggaggagacagcaaaatgcc

SEQ ID NO: 401659 - DNA, 25 bp, Homo sapien
ctaggcagatatggaagggtccctg

SEQ ID NO: 401660 - DNA, 25 bp, Homo sapien
gtctccatggcaatcgaagtcttca

SEQ ID NO: 401661 - DNA, 25 bp, Homo sapien
tcatttccaaatacacttaacacat

SEQ ID NO: 401662 - DNA, 25 bp, Homo sapien
catttattgtcatttccaggagttt

SEQ ID NO: 401663 - DNA, 25 bp, Homo sapien
aaatacacttaacacatttattgtc

SEQ ID NO: 401664 - DNA, 25 bp, Homo sapien
atttgagaaagacaaaaaattacat

SEQ ID NO: 401665 - DNA, 25 bp, Homo sapien
attacattttgatacccattcacag

SEQ ID NO: 401666 - DNA, 25 bp, Homo sapien
caaaaaattacattttgatacccat

SEQ ID NO: 401667 - DNA, 25 bp, Homo sapien
aaaattacattttgatacccattca

SEQ ID NO: 401668 - DNA, 25 bp, Homo sapien
attatattgctgtggctgatctaaa

SEQ ID NO: 401669 - DNA, 25 bp, Homo sapien
catgaagcacttacaagagtatgtg

SEQ ID NO: 401670 - DNA, 25 bp, Homo sapien
gaagcacttacaagagtatgtggaa

SEQ ID NO: 401671 - DNA, 25 bp, Homo sapien
tacaagagtatgtggaacatagtga

SEQ ID NO: 401672 - DNA, 25 bp, Homo sapien
ctctttgaggcccgtgtctcttcca

SEQ ID NO: 401673 - DNA, 25 bp, Homo sapien
cctctttgaggcccgtgtctcttcc

SEQ ID NO: 401674 - DNA, 25 bp, Homo sapien
tcctctttgaggcccgtgtctcttc

SEQ ID NO: 401675 - DNA, 25 bp, Homo sapien
cttgttgaagttgtctcacaaccac

SEQ ID NO: 401676 - DNA, 25 bp, Homo sapien
ttttaagggaatcagccacttcttg

SEQ ID NO: 401677 - DNA, 25 bp, Homo sapien
tccagtggagactctaacatagtta

SEQ ID NO: 401678 - DNA, 25 bp, Homo sapien
cttccagtggagactctaacatagt

SEQ ID NO: 401679 - DNA, 25 bp, Homo sapien
gatgcagaatgtgttatcctcctgc

SEQ ID NO: 401680 - DNA, 25 bp, Homo sapien
ggatgcagaatgtgttatcctcctg

SEQ ID NO: 401681 - DNA, 25 bp, Homo sapien
atgcagaatgtgttatcctcctgcc

SEQ ID NO: 401682 - DNA, 25 bp, Homo sapien
attggtattctcttatacaacagat

SEQ ID NO: 401683 - DNA, 25 bp, Homo sapien
actatctaccttaaaatatgactct

SEQ ID NO: 401684 - DNA, 25 bp, Homo sapien
tatctaccttaaaatatgactctgt

SEQ ID NO: 401685 - DNA, 25 bp, Homo sapien
tctaccttaaaatatgactctgtgc

SEQ ID NO: 401686 - DNA, 25 bp, Homo sapien
ctaccttaaaatatgactctgtgcc

SEQ ID NO: 401687 - DNA, 25 bp, Homo sapien
tcaacatgtatccagaaccaaatgt

SEQ ID NO: 401688 - DNA, 25 bp, Homo sapien
atttttctcttctagtatgaggtct

SEQ ID NO: 401689 - DNA, 25 bp, Homo sapien
caataaagcctctttggatattaat

SEQ ID NO: 401690 - DNA, 25 bp, Homo sapien
gtctctcatattgaaagagactttc

SEQ ID NO: 401691 - DNA, 25 bp, Homo sapien
tctagtatgaggtctttctttctac

SEQ ID NO: 401692 - DNA, 25 bp, Homo sapien
actgactttagcttctgcactttga

SEQ ID NO: 401693 - DNA, 25 bp, Homo sapien
ttactgactttagcttctgcacttt

SEQ ID NO: 401694 - DNA, 25 bp, Homo sapien
tactgactttagcttctgcactttg

SEQ ID NO: 401695 - DNA, 25 bp, Homo sapien
ctgactttagcttctgcactttgat

SEQ ID NO: 401696 - DNA, 25 bp, Homo sapien
acttttttctgagagtatctcttgt

SEQ ID NO: 401697 - DNA, 25 bp, Homo sapien
tcgttttgtacagtttctaaagcta

SEQ ID NO: 401698 - DNA, 25 bp, Homo sapien
tctaaagctaatgacttttttctga

SEQ ID NO: 401699 - DNA, 25 bp, Homo sapien
tgtgtttggcttaggtcgttttgta

SEQ ID NO: 401700 - DNA, 25 bp, Homo sapien
agagatgctcctctcttccaagacg

SEQ ID NO: 401701 - DNA, 25 bp, Homo sapien
atgctcctctcttccaagacggggc

SEQ ID NO: 401702 - DNA, 25 bp, Homo sapien
tggctgggcagaggtgctcctcaca

SEQ ID NO: 401703 - DNA, 25 bp, Homo sapien
ggcagagatgctcctctcttccaag

SEQ ID NO: 401704 - DNA, 25 bp, Homo sapien
aatagaatgcttgttgttaacagca

SEQ ID NO: 401705 - DNA, 25 bp, Homo sapien
caatagaatgcttgttgttaacagc

SEQ ID NO: 401706 - DNA, 25 bp, Homo sapien
atcaatagaatgcttgttgttaaca

SEQ ID NO: 401707 - DNA, 25 bp, Homo sapien
agaatgcttgttgttaacagcatac

SEQ ID NO: 401708 - DNA, 25 bp, Homo sapien
cagctggaacggtgatttcttctgc

SEQ ID NO: 401709 - DNA, 25 bp, Homo sapien
caatgtgtgttggaactctctctgg

SEQ ID NO: 401710 - DNA, 25 bp, Homo sapien
atgaagttgttcattactctgttct

SEQ ID NO: 401711 - DNA, 25 bp, Homo sapien
aatatacagatgatattagcctgag

SEQ ID NO: 401712 - DNA, 25 bp, Homo sapien
tcttcactgaccagagacataatca

SEQ ID NO: 401713 - DNA, 25 bp, Homo sapien
tccgcccgcacgtatggagtggact

SEQ ID NO: 401714 - DNA, 25 bp, Homo sapien
ccgcccgcacgtatggagtggactc

SEQ ID NO: 401715 - DNA, 25 bp, Homo sapien
ctccgcccgcacgtatggagtggac

SEQ ID NO: 401716 - DNA, 25 bp, Homo sapien
ctcagttgcttccccgcaagagagc

SEQ ID NO: 401717 - DNA, 25 bp, Homo sapien
tcagttgcttccccgcaagagagcc

SEQ ID NO: 401718 - DNA, 25 bp, Homo sapien
tgcagcggcggcggccagaacttat

SEQ ID NO: 401719 - DNA, 25 bp, Homo sapien
ctgcagcggcggcggccagaactta

SEQ ID NO: 401720 - DNA, 25 bp, Homo sapien
attcttatcttctacttcggaaata

SEQ ID NO: 401721 - DNA, 25 bp, Homo sapien
tcttatcttctacttcggaaatatc

SEQ ID NO: 401722 - DNA, 25 bp, Homo sapien
ttctacttcggaaatatcagaactc

SEQ ID NO: 401723 - DNA, 25 bp, Homo sapien
tatcttctacttcggaaatatcaga

SEQ ID NO: 401724 - DNA, 25 bp, Homo sapien
gcagccagtctagactgataagatt

SEQ ID NO: 401725 - DNA, 25 bp, Homo sapien
cagcagccagtctagactgataaga

SEQ ID NO: 401726 - DNA, 25 bp, Homo sapien
cagccagtctagactgataagattc

SEQ ID NO: 401727 - DNA, 25 bp, Homo sapien
gccagtctagactgataagattcaa

SEQ ID NO: 401728 - DNA, 25 bp, Homo sapien
cttcattttcttgttttaaggtgca

SEQ ID NO: 401729 - DNA, 25 bp, Homo sapien
tcttcattttcttgttttaaggtgc

SEQ ID NO: 401730 - DNA, 25 bp, Homo sapien
ttcattttcttgttttaaggtgcat

SEQ ID NO: 401731 - DNA, 25 bp, Homo sapien
ttgttgggttaatctgtcagcagca

SEQ ID NO: 401732 - DNA, 25 bp, Homo sapien
gcagaagaagatgtactatgacata

SEQ ID NO: 401733 - DNA, 25 bp, Homo sapien
agcagcagaagaagatgtactatga

SEQ ID NO: 401734 - DNA, 25 bp, Homo sapien
gggaaattgctgaggttatgttttc

SEQ ID NO: 401735 - DNA, 25 bp, Homo sapien
tttggcaggtgcaaaaaggaaaaca

SEQ ID NO: 401736 - DNA, 25 bp, Homo sapien
gtcagagtgcatgttctaaaattag

SEQ ID NO: 401737 - DNA, 25 bp, Homo sapien
gtcttttctgtcagagtgcatgttc

SEQ ID NO: 401738 - DNA, 25 bp, Homo sapien
tttctgtcagagtgcatgttctaaa

SEQ ID NO: 401739 - DNA, 25 bp, Homo sapien
tactatgtatttatgttgaaataaa

SEQ ID NO: 401740 - DNA, 25 bp, Homo sapien
tatttactatgtatttatgttgaaa

SEQ ID NO: 401741 - DNA, 25 bp, Homo sapien
taatatttactatgtatttatgttg

SEQ ID NO: 401742 - DNA, 25 bp, Homo sapien
tgttgaaataaagttattgtttgta

SEQ ID NO: 401743 - DNA, 25 bp, Homo sapien
cataaaaggcaactgggttgacttt

SEQ ID NO: 401744 - DNA, 25 bp, Homo sapien
gtatagtccaaaaggtcatgtcatt

SEQ ID NO: 401745 - DNA, 25 bp, Homo sapien
aattcttgcctcaattccaagggta

SEQ ID NO: 401746 - DNA, 25 bp, Homo sapien
gaataaatctttaacctcggcactg

SEQ ID NO: 401747 - DNA, 25 bp, Homo sapien
tccaagggtaaagacagctatgagt

SEQ ID NO: 401748 - DNA, 25 bp, Homo sapien
cttttcacttctttcacgcctttgt

SEQ ID NO: 401749 - DNA, 25 bp, Homo sapien
cttcttttcacttctttcacgcctt

SEQ ID NO: 401750 - DNA, 25 bp, Homo sapien
tttcacgcctttgttgctcttcctc

SEQ ID NO: 401751 - DNA, 25 bp, Homo sapien
cctctgaagccactggtaaggcttt

SEQ ID NO: 401752 - DNA, 25 bp, Homo sapien
tagcctctatgcaaccatgttttta

SEQ ID NO: 401753 - DNA, 25 bp, Homo sapien
atcaccattttaaaggaccgtgtct

SEQ ID NO: 401754 - DNA, 25 bp, Homo sapien
tgttggtagcctctatgcaaccatg

SEQ ID NO: 401755 - DNA, 25 bp, Homo sapien
cattttaaaggaccgtgtctaccag

SEQ ID NO: 401756 - DNA, 25 bp, Homo sapien
cagcaggatcttccatttcagtgct

SEQ ID NO: 401757 - DNA, 25 bp, Homo sapien
tctttgtactgctcctttcacagca

SEQ ID NO: 401758 - DNA, 25 bp, Homo sapien
caggatcttccatttcagtgctagg

SEQ ID NO: 401759 - DNA, 25 bp, Homo sapien
gctctcaatgtctgtacattctttc

SEQ ID NO: 401760 - DNA, 25 bp, Homo sapien
ttcaaggaaggatgttttgcaggag

SEQ ID NO: 401761 - DNA, 25 bp, Homo sapien
aaggaaggatgttttgcaggaggtc

SEQ ID NO: 401762 - DNA, 25 bp, Homo sapien
caaggaaggatgttttgcaggaggt

SEQ ID NO: 401763 - DNA, 25 bp, Homo sapien
cttcaaggaaggatgttttgcagga

SEQ ID NO: 401764 - DNA, 25 bp, Homo sapien
cgtaaaggctctgacactttcttgg

SEQ ID NO: 401765 - DNA, 25 bp, Homo sapien
gctctgacactttcttggggacaca

SEQ ID NO: 401766 - DNA, 25 bp, Homo sapien
tccatgggaaggtccacgtaaaggc

SEQ ID NO: 401767 - DNA, 25 bp, Homo sapien
ccatgggaaggtccacgtaaaggct

SEQ ID NO: 401768 - DNA, 25 bp, Homo sapien
caatcaactagccatatatatgttt

SEQ ID NO: 401769 - DNA, 25 bp, Homo sapien
ttcaatcaactagccatatatatgt

SEQ ID NO: 401770 - DNA, 25 bp, Homo sapien
ttttcaatcaactagccatatatat

SEQ ID NO: 401771 - DNA, 25 bp, Homo sapien
tttcaatcaactagccatatatatg

SEQ ID NO: 401772 - DNA, 25 bp, Homo sapien
actttgtcatccaatgcaggcaata

SEQ ID NO: 401773 - DNA, 25 bp, Homo sapien
gcaatactcaagactttgtcatcca

SEQ ID NO: 401774 - DNA, 25 bp, Homo sapien
cttagcagcaatactcaagactttg

SEQ ID NO: 401775 - DNA, 25 bp, Homo sapien
gcagcaatactcaagactttgtcat

SEQ ID NO: 401776 - DNA, 25 bp, Homo sapien
ttatatccagcttccccctcaaaaa

SEQ ID NO: 401777 - DNA, 25 bp, Homo sapien
gtttatatccagcttccccctcaaa

SEQ ID NO: 401778 - DNA, 25 bp, Homo sapien
cagtttatatccagcttccccctca

SEQ ID NO: 401779 - DNA, 25 bp, Homo sapien
agtttatatccagcttccccctcaa

SEQ ID NO: 401780 - DNA, 25 bp, Homo sapien
caattgccatggagctttaattttc

SEQ ID NO: 401781 - DNA, 25 bp, Homo sapien
aaacatcaatggctgccacgagttg

SEQ ID NO: 401782 - DNA, 25 bp, Homo sapien
cttcaattgccatggagctttaatt

SEQ ID NO: 401783 - DNA, 25 bp, Homo sapien
tatccacagtattattccaactatg

SEQ ID NO: 401784 - DNA, 25 bp, Homo sapien
cttatcaagagtaggaccaccaaga

SEQ ID NO: 401785 - DNA, 25 bp, Homo sapien
ttcttatcaagagtaggaccaccaa

SEQ ID NO: 401786 - DNA, 25 bp, Homo sapien
tttcttatcaagagtaggaccacca

SEQ ID NO: 401787 - DNA, 25 bp, Homo sapien
tcttatcaagagtaggaccaccaag

SEQ ID NO: 401788 - DNA, 25 bp, Homo sapien
aagtatcatctttttatgttccaaa

SEQ ID NO: 401789 - DNA, 25 bp, Homo sapien
ctggtttgtcatttttaagtatcat

SEQ ID NO: 401790 - DNA, 25 bp, Homo sapien
tggtttgtcatttttaagtatcatc

SEQ ID NO: 401791 - DNA, 25 bp, Homo sapien
tttaagtatcatctttttatgttcc

SEQ ID NO: 401792 - DNA, 25 bp, Homo sapien
gctctgtattgatccaatttttaaa

SEQ ID NO: 401793 - DNA, 25 bp, Homo sapien
ctttctgaatttgtgtgccatccct

SEQ ID NO: 401794 - DNA, 25 bp, Homo sapien
cagcagccatgcttacctgctctgt

SEQ ID NO: 401795 - DNA, 25 bp, Homo sapien
tgtgtgccatccctaggcagcagcc

SEQ ID NO: 401796 - DNA, 25 bp, Homo sapien
caatacccggtgagtcatagtgcac

SEQ ID NO: 401797 - DNA, 25 bp, Homo sapien
cccggtgagtcatagtgcacagcaa

SEQ ID NO: 401798 - DNA, 25 bp, Homo sapien
catcttgtccatacatgtcttgagt

SEQ ID NO: 401799 - DNA, 25 bp, Homo sapien
tttgtcaaacggcaagaaatagcgt

SEQ ID NO: 401800 - DNA, 25 bp, Homo sapien
ctgtcagtgtagacataataacatt

SEQ ID NO: 401801 - DNA, 25 bp, Homo sapien
tgtcagtgtagacataataacattt

SEQ ID NO: 401802 - DNA, 25 bp, Homo sapien
ctttcttgcaaattatagcaaataa

SEQ ID NO: 401803 - DNA, 25 bp, Homo sapien
ttctctttcttgcaaattatagcaa

SEQ ID NO: 401804 - DNA, 25 bp, Homo sapien
ctctttcttgcaaattatagcaaat

SEQ ID NO: 401805 - DNA, 25 bp, Homo sapien
tatagcaaataaaagtggggtatta

SEQ ID NO: 401806 - DNA, 25 bp, Homo sapien
aaatgggtcactatggaaatgagct

SEQ ID NO: 401807 - DNA, 25 bp, Homo sapien
gggtcactatggaaatgagctttga

SEQ ID NO: 401808 - DNA, 25 bp, Homo sapien
tgatccaaatgggtcactatggaaa

SEQ ID NO: 401809 - DNA, 25 bp, Homo sapien
cctgatccaaatgggtcactatgga

SEQ ID NO: 401810 - DNA, 25 bp, Homo sapien
ggtttggaatggtgccatcttccag

SEQ ID NO: 401811 - DNA, 25 bp, Homo sapien
tgtcacagatatcaatctggcattt

SEQ ID NO: 401812 - DNA, 25 bp, Homo sapien
tgttaaccaggagagtgaccacttt

SEQ ID NO: 401813 - DNA, 25 bp, Homo sapien
tgaccactttcacatggccactggc

SEQ ID NO: 401814 - DNA, 25 bp, Homo sapien
ctgtatcaaaggtgttctattttct

SEQ ID NO: 401815 - DNA, 25 bp, Homo sapien
gctcactgcagcaatcacagataag

SEQ ID NO: 401816 - DNA, 25 bp, Homo sapien
cattttcgcacatcaatatacttct

SEQ ID NO: 401817 - DNA, 25 bp, Homo sapien
tcaaagaagataacaatacacacaa

SEQ ID NO: 401818 - DNA, 25 bp, Homo sapien
tgtacacaaataacttgcagatctg

SEQ ID NO: 401819 - DNA, 25 bp, Homo sapien
acaggtggtctatggtgcccaggac

SEQ ID NO: 401820 - DNA, 25 bp, Homo sapien
cgtgtacaggtggtctatggtgccc

SEQ ID NO: 401821 - DNA, 25 bp, Homo sapien
aacccgtgtacaggtggtctatggt

SEQ ID NO: 401822 - DNA, 25 bp, Homo sapien
tctatggtgcccaggaccgtctggc

SEQ ID NO: 401823 - DNA, 25 bp, Homo sapien
ctttgtaggccactggtgttgctga

SEQ ID NO: 401824 - DNA, 25 bp, Homo sapien
aagtcgctcggaggcggcacgcact

SEQ ID NO: 401825 - DNA, 25 bp, Homo sapien
ccaactgctcttgagaggaggcagc

SEQ ID NO: 401826 - DNA, 25 bp, Homo sapien
gccattctcaagattcctgcggaaa

SEQ ID NO: 401827 - DNA, 25 bp, Homo sapien
ccccagtatggagtagcagacacca

SEQ ID NO: 401828 - DNA, 25 bp, Homo sapien
cagtatggagtagcagacaccactg

SEQ ID NO: 401829 - DNA, 25 bp, Homo sapien
gcaccccccagtatggagtagcaga

SEQ ID NO: 401830 - DNA, 25 bp, Homo sapien
ctggcaccccccagtatggagtagc

SEQ ID NO: 401831 - DNA, 25 bp, Homo sapien
aagggtggctgtgagtgccttcact

SEQ ID NO: 401832 - DNA, 25 bp, Homo sapien
gtcccggtttctggccagcttgggc

SEQ ID NO: 401833 - DNA, 25 bp, Homo sapien
gtgagtgccttcactgaaactggcc

SEQ ID NO: 401834 - DNA, 25 bp, Homo sapien
ccaggtcccggtttctggccagctt

SEQ ID NO: 401835 - DNA, 25 bp, Homo sapien
tgggtgtgcgacacagctccacact

SEQ ID NO: 401836 - DNA, 25 bp, Homo sapien
cctcctactgggtggacagctgcaa

SEQ ID NO: 401837 - DNA, 25 bp, Homo sapien
tgcgtgcaggactgcatgctctggt

SEQ ID NO: 401838 - DNA, 25 bp, Homo sapien
cactggtgatgctgcgtgcaggact

SEQ ID NO: 401839 - DNA, 25 bp, Homo sapien
gcagatcgccaacgtgctggtgcag

SEQ ID NO: 401840 - DNA, 25 bp, Homo sapien
atcgccaacgtgctggtgcagaacc

SEQ ID NO: 401841 - DNA, 25 bp, Homo sapien
cagatcgccaacgtgctggtgcaga

SEQ ID NO: 401842 - DNA, 25 bp, Homo sapien
ctggtgcagaacctggagcagggct

SEQ ID NO: 401843 - DNA, 25 bp, Homo sapien
agtgaaagaccccgcagccgtctct

SEQ ID NO: 401844 - DNA, 25 bp, Homo sapien
ctgacagtgaaagaccccgcagccg

SEQ ID NO: 401845 - DNA, 25 bp, Homo sapien
tgacagtgaaagaccccgcagccgt

SEQ ID NO: 401846 - DNA, 25 bp, Homo sapien
acagtgaaagaccccgcagccgtct

SEQ ID NO: 401847 - DNA, 25 bp, Homo sapien
ggcatcagcatgtagcacaagagat

SEQ ID NO: 401848 - DNA, 25 bp, Homo sapien
ctaccaggcatcagcatgtagcaca

SEQ ID NO: 401849 - DNA, 25 bp, Homo sapien
catcagcatgtagcacaagagatag

SEQ ID NO: 401850 - DNA, 25 bp, Homo sapien
accaggcatcagcatgtagcacaag

SEQ ID NO: 401851 - DNA, 25 bp, Homo sapien
ctgcttcaggccctcagatggactg

SEQ ID NO: 401852 - DNA, 25 bp, Homo sapien
tcagatggactgaccacagtagcac

SEQ ID NO: 401853 - DNA, 25 bp, Homo sapien
cccctccggacacgcgactatgctg

SEQ ID NO: 401854 - DNA, 25 bp, Homo sapien
agatggactgaccacagtagcaccg

SEQ ID NO: 401855 - DNA, 25 bp, Homo sapien
aacactgtggacttgttgaggaggc

SEQ ID NO: 401856 - DNA, 25 bp, Homo sapien
gaggagacgctgacggagaccaact

SEQ ID NO: 401857 - DNA, 25 bp, Homo sapien
cttcgtggaggagacgctgacggag

SEQ ID NO: 401858 - DNA, 25 bp, Homo sapien
cggagaccaactgcaggaacactgt

SEQ ID NO: 401859 - DNA, 25 bp, Homo sapien
gggctccatatgcctgagaccaacc

SEQ ID NO: 401860 - DNA, 25 bp, Homo sapien
ggctccatatgcctgagaccaacct

SEQ ID NO: 401861 - DNA, 25 bp, Homo sapien
aagtcactccaccttgatgagagca

SEQ ID NO: 401862 - DNA, 25 bp, Homo sapien
gcatctcactagcaaaagggagagg

SEQ ID NO: 401863 - DNA, 25 bp, Homo sapien
gagaactccaaagtcactccacctt

SEQ ID NO: 401864 - DNA, 25 bp, Homo sapien
tccagacaagtctctgatggcatct

SEQ ID NO: 401865 - DNA, 25 bp, Homo sapien
gatccagcagatgacggccaacttt

SEQ ID NO: 401866 - DNA, 25 bp, Homo sapien
gacaggatcgcggagatcaacttca

SEQ ID NO: 401867 - DNA, 25 bp, Homo sapien
tgaggagtttgcagaccatgacaac

SEQ ID NO: 401868 - DNA, 25 bp, Homo sapien
ttgcagcgccccatttgacaggatc

SEQ ID NO: 401869 - DNA, 25 bp, Homo sapien
ggacatctcggaggacagcgacact

SEQ ID NO: 401870 - DNA, 25 bp, Homo sapien
cttggcgttttactctgcagcccag

SEQ ID NO: 401871 - DNA, 25 bp, Homo sapien
acgaggacatctcggaggacagcga

SEQ ID NO: 401872 - DNA, 25 bp, Homo sapien
gcgaccgcatccagcactttgatga

SEQ ID NO: 401873 - DNA, 25 bp, Homo sapien
aaagcctctgccgaggaggtgcagc

SEQ ID NO: 401874 - DNA, 25 bp, Homo sapien
agagcaagcacaccggtcctgcaag

SEQ ID NO: 401875 - DNA, 25 bp, Homo sapien
gttatgccggctcgcagagcaagca

SEQ ID NO: 401876 - DNA, 25 bp, Homo sapien
agaacacccgtcagatgcccagacg

SEQ ID NO: 401877 - DNA, 25 bp, Homo sapien
ctctgttaggaggtgccgagctctt

SEQ ID NO: 401878 - DNA, 25 bp, Homo sapien
ctgttaggaggtgccgagctcttag

SEQ ID NO: 401879 - DNA, 25 bp, Homo sapien
gggggcagcactgacccactcagga

SEQ ID NO: 401880 - DNA, 25 bp, Homo sapien
tgggggcagcactgacccactcagg

SEQ ID NO: 401881 - DNA, 25 bp, Homo sapien
caggaacgtcccagataggaggaag

SEQ ID NO: 401882 - DNA, 25 bp, Homo sapien
aaagagagagcaagggcaacaccct

SEQ ID NO: 401883 - DNA, 25 bp, Homo sapien
gaaggcggctcatccttgaggccag

SEQ ID NO: 401884 - DNA, 25 bp, Homo sapien
ggaagcaggaacgtcccagatagga

SEQ ID NO: 401885 - DNA, 25 bp, Homo sapien
tgggccagttcaccgaattccagcc

SEQ ID NO: 401886 - DNA, 25 bp, Homo sapien
aactcgacgcccatagccccaggag

SEQ ID NO: 401887 - DNA, 25 bp, Homo sapien
tccttgtctgtagctccgagtcagg

SEQ ID NO: 401888 - DNA, 25 bp, Homo sapien
cctcgtccttgtctgtagctccgag

SEQ ID NO: 401889 - DNA, 25 bp, Homo sapien
ttgtctgtagctccgagtcagggcc

SEQ ID NO: 401890 - DNA, 25 bp, Homo sapien
cgtccttgtctgtagctccgagtca

SEQ ID NO: 401891 - DNA, 25 bp, Homo sapien
gctgtgaacacccgtccgggctagg

SEQ ID NO: 401892 - DNA, 25 bp, Homo sapien
tgtgaacacccgtccgggctaggag

SEQ ID NO: 401893 - DNA, 25 bp, Homo sapien
ctgtgaacacccgtccgggctagga

SEQ ID NO: 401894 - DNA, 25 bp, Homo sapien
tgaacacccgtccgggctaggaggc

SEQ ID NO: 401895 - DNA, 25 bp, Homo sapien
tttccagatgcctcagaagccagga

SEQ ID NO: 401896 - DNA, 25 bp, Homo sapien
gaagccaggacagtaggatgggggg

SEQ ID NO: 401897 - DNA, 25 bp, Homo sapien
gctgctccccttccatgggaggcct

SEQ ID NO: 401898 - DNA, 25 bp, Homo sapien
tgggaggcctagatttccagatgcc

SEQ ID NO: 401899 - DNA, 25 bp, Homo sapien
ttggggcatccaaaccctgactgag

SEQ ID NO: 401900 - DNA, 25 bp, Homo sapien
tggggcatccaaaccctgactgaga

SEQ ID NO: 401901 - DNA, 25 bp, Homo sapien
ggggcatccaaaccctgactgagag

SEQ ID NO: 401902 - DNA, 25 bp, Homo sapien
tgcctttcacacctggcggtgcatc

SEQ ID NO: 401903 - DNA, 25 bp, Homo sapien
ttgggctggattcctctaggagagg

SEQ ID NO: 401904 - DNA, 25 bp, Homo sapien
ggtgcctttcacacctggcggtgca

SEQ ID NO: 401905 - DNA, 25 bp, Homo sapien
aaggtgcctttcacacctggcggtg

SEQ ID NO: 401906 - DNA, 25 bp, Homo sapien
ggccacgctgccgtcagggcatctg

SEQ ID NO: 401907 - DNA, 25 bp, Homo sapien
tgtttggccacgctgccgtcagggc

SEQ ID NO: 401908 - DNA, 25 bp, Homo sapien
ccttgtttggccacgctgccgtcag

SEQ ID NO: 401909 - DNA, 25 bp, Homo sapien
tttggccacgctgccgtcagggcat

SEQ ID NO: 401910 - DNA, 25 bp, Homo sapien
tacagagttcctgcgtgggcttcat

SEQ ID NO: 401911 - DNA, 25 bp, Homo sapien
gtcatacagagttcctgcgtgggct

SEQ ID NO: 401912 - DNA, 25 bp, Homo sapien
ggttgaaagtcatacagagttcctg

SEQ ID NO: 401913 - DNA, 25 bp, Homo sapien
aaagtcatacagagttcctgcgtgg

SEQ ID NO: 401914 - DNA, 25 bp, Homo sapien
ctctggggccctcggagaatgaggt

SEQ ID NO: 401915 - DNA, 25 bp, Homo sapien
aagttgggatcatggcacaggagcc

SEQ ID NO: 401916 - DNA, 25 bp, Homo sapien
cagtgtcaggctgaagttgggatca

SEQ ID NO: 401917 - DNA, 25 bp, Homo sapien
aggtttccccacactatgcccagtg

SEQ ID NO: 401918 - DNA, 25 bp, Homo sapien
gagggtctcttatggtgggcatcac

SEQ ID NO: 401919 - DNA, 25 bp, Homo sapien
gataacgccctcagaaatagcatgc

SEQ ID NO: 401920 - DNA, 25 bp, Homo sapien
ccatacctggactgggtcttgataa

SEQ ID NO: 401921 - DNA, 25 bp, Homo sapien
tagtcatggtgtagaatgcctccag

SEQ ID NO: 401922 - DNA, 25 bp, Homo sapien
tatttctgactcatatttgtgggtc

SEQ ID NO: 401923 - DNA, 25 bp, Homo sapien
cccagagtcccatagtctatttctg

SEQ ID NO: 401924 - DNA, 25 bp, Homo sapien
gtcccatagtctatttctgactcat

SEQ ID NO: 401925 - DNA, 25 bp, Homo sapien
gtctatttctgactcatatttgtgg

SEQ ID NO: 401926 - DNA, 25 bp, Homo sapien
tgagctttgagtgcagctctcactg

SEQ ID NO: 401927 - DNA, 25 bp, Homo sapien
ctgagctttgagtgcagctctcact

SEQ ID NO: 401928 - DNA, 25 bp, Homo sapien
agctctcactggaatggaaagagat

SEQ ID NO: 401929 - DNA, 25 bp, Homo sapien
tctcactggaatggaaagagatcat

SEQ ID NO: 401930 - DNA, 25 bp, Homo sapien
ttattgaagtcacaatgggaagggt

SEQ ID NO: 401931 - DNA, 25 bp, Homo sapien
tggaaatgtgtggtccgtgtctgac

SEQ ID NO: 401932 - DNA, 25 bp, Homo sapien
cgttaagctgatttcggagaacaaa

SEQ ID NO: 401933 - DNA, 25 bp, Homo sapien
gctatttagcagaattacctacctg

SEQ ID NO: 401934 - DNA, 25 bp, Homo sapien
gaataagtcagaacatagcgctgcc

SEQ ID NO: 401935 - DNA, 25 bp, Homo sapien
tgccgagaacatacacaggtgccta

SEQ ID NO: 401936 - DNA, 25 bp, Homo sapien
gacaatgaatctctatcgggaacct

SEQ ID NO: 401937 - DNA, 25 bp, Homo sapien
gactcctggcttatctaaactgtag

SEQ ID NO: 401938 - DNA, 25 bp, Homo sapien
ttctgcatcataagaggtcaacata

SEQ ID NO: 401939 - DNA, 25 bp, Homo sapien
tgcatcataagaggtcaacatagac

SEQ ID NO: 401940 - DNA, 25 bp, Homo sapien
catagacatcttaagcatcagtttc

SEQ ID NO: 401941 - DNA, 25 bp, Homo sapien
catcataagaggtcaacatagacat

SEQ ID NO: 401942 - DNA, 25 bp, Homo sapien
gacagggacgggatattacagctag

SEQ ID NO: 401943 - DNA, 25 bp, Homo sapien
gatattacagctagattcgggatct

SEQ ID NO: 401944 - DNA, 25 bp, Homo sapien
ctcagacttagctggacagggacgg

SEQ ID NO: 401945 - DNA, 25 bp, Homo sapien
tataatatttgcaccccacaaagcc

SEQ ID NO: 401946 - DNA, 25 bp, Homo sapien
tgactacaaggtttaattctgcccc

SEQ ID NO: 401947 - DNA, 25 bp, Homo sapien
caaattggggtctgtctgactacaa

SEQ ID NO: 401948 - DNA, 25 bp, Homo sapien
tgtcctgtgcaaattggggtctgtc

SEQ ID NO: 401949 - DNA, 25 bp, Homo sapien
gggtctgtctgactacaaggtttaa

SEQ ID NO: 401950 - DNA, 25 bp, Homo sapien
cgcggattgggagttggatctcgga

SEQ ID NO: 401951 - DNA, 25 bp, Homo sapien
tgccccctctcaagagccggtgatt

SEQ ID NO: 401952 - DNA, 25 bp, Homo sapien
gagatcatagatatcggatcgcgga

SEQ ID NO: 401953 - DNA, 25 bp, Homo sapien
cccctctcaagagccggtgattggg

SEQ ID NO: 401954 - DNA, 25 bp, Homo sapien
gcggctttccggcagcccctgggac

SEQ ID NO: 401955 - DNA, 25 bp, Homo sapien
ctggacaagcagcaaaggtagcggg

SEQ ID NO: 401956 - DNA, 25 bp, Homo sapien
ggcaccctctgagcggcggagccaa

SEQ ID NO: 401957 - DNA, 25 bp, Homo sapien
aaacggaccctgagctgttttccat

SEQ ID NO: 401958 - DNA, 25 bp, Homo sapien
tctttgcccagggtggtgtccaatg

SEQ ID NO: 401959 - DNA, 25 bp, Homo sapien
ctcacttctttgcccagggtggtgt

SEQ ID NO: 401960 - DNA, 25 bp, Homo sapien
gcccagggtggtgtccaatggcaca

SEQ ID NO: 401961 - DNA, 25 bp, Homo sapien
cccagggtggtgtccaatggcacaa

SEQ ID NO: 401962 - DNA, 25 bp, Homo sapien
tgagagaaagggctcgtagggctag

SEQ ID NO: 401963 - DNA, 25 bp, Homo sapien
cgctgttagtgacattgtgagagaa

SEQ ID NO: 401964 - DNA, 25 bp, Homo sapien
ctagggcggctgttcacccctgggc

SEQ ID NO: 401965 - DNA, 25 bp, Homo sapien
tcgggacaagcgacgctgttagtga

SEQ ID NO: 401966 - DNA, 25 bp, Homo sapien
ccttgcaggtggggcggcaagggaa

SEQ ID NO: 401967 - DNA, 25 bp, Homo sapien
tgggtgaggaaagagggggccttgc

SEQ ID NO: 401968 - DNA, 25 bp, Homo sapien
ttgcaggtggggcggcaagggaacc

SEQ ID NO: 401969 - DNA, 25 bp, Homo sapien
gcaggtggggcggcaagggaaccaa

SEQ ID NO: 401970 - DNA, 25 bp, Homo sapien
ccggctgcctgagtccccatcgcac

SEQ ID NO: 401971 - DNA, 25 bp, Homo sapien
ttttccggctgcctgagtccccatc

SEQ ID NO: 401972 - DNA, 25 bp, Homo sapien
ccttttccggctgcctgagtcccca

SEQ ID NO: 401973 - DNA, 25 bp, Homo sapien
ttccggctgcctgagtccccatcgc

SEQ ID NO: 401974 - DNA, 25 bp, Homo sapien
tgggggtccaccgctgcagtaccgc

SEQ ID NO: 401975 - DNA, 25 bp, Homo sapien
accgctgcagtaccgccaggcagca

SEQ ID NO: 401976 - DNA, 25 bp, Homo sapien
ctcgtgggggtccaccgctgcagta

SEQ ID NO: 401977 - DNA, 25 bp, Homo sapien
ggtccaccgctgcagtaccgccagg

SEQ ID NO: 401978 - DNA, 25 bp, Homo sapien
cctcgttgtgcctgaagattcgctc

SEQ ID NO: 401979 - DNA, 25 bp, Homo sapien
tgcctgaagattcgctcttgaacgc

SEQ ID NO: 401980 - DNA, 25 bp, Homo sapien
ccgttgcccctcgttgtgcctgaag

SEQ ID NO: 401981 - DNA, 25 bp, Homo sapien
gcccctcgttgtgcctgaagattcg

SEQ ID NO: 401982 - DNA, 25 bp, Homo sapien
tgccacctttcggaccacatgcgtg

SEQ ID NO: 401983 - DNA, 25 bp, Homo sapien
cacatgcgtgctcagggaccgctct

SEQ ID NO: 401984 - DNA, 25 bp, Homo sapien
tcggagtcattttcagccggtccct

SEQ ID NO: 401985 - DNA, 25 bp, Homo sapien
ggaccgctctccaactcggcatggg

SEQ ID NO: 401986 - DNA, 25 bp, Homo sapien
agctccagatggcagggcagcccat

SEQ ID NO: 401987 - DNA, 25 bp, Homo sapien
cagagctccagatggcagggcagcc

SEQ ID NO: 401988 - DNA, 25 bp, Homo sapien
aagtgacgcgccagagctccagatg

SEQ ID NO: 401989 - DNA, 25 bp, Homo sapien
agtgacgcgccagagctccagatgg

SEQ ID NO: 401990 - DNA, 25 bp, Homo sapien
ccatgagtggaagtcttttgaaggc

SEQ ID NO: 401991 - DNA, 25 bp, Homo sapien
tttgaaggcccaaaacgcagcacct

SEQ ID NO: 401992 - DNA, 25 bp, Homo sapien
cttttgaaggcccaaaacgcagcac

SEQ ID NO: 401993 - DNA, 25 bp, Homo sapien
caaaaccatgagtggaagtcttttg

SEQ ID NO: 401994 - DNA, 25 bp, Homo sapien
caaaagacaacttgggagtttgaag

SEQ ID NO: 401995 - DNA, 25 bp, Homo sapien
agacaacttgggagtttgaagatgc

SEQ ID NO: 401996 - DNA, 25 bp, Homo sapien
aagacaacttgggagtttgaagatg

SEQ ID NO: 401997 - DNA, 25 bp, Homo sapien
gacaacttgggagtttgaagatgca

SEQ ID NO: 401998 - DNA, 25 bp, Homo sapien
tcgagccacagtcattcagagcatc

SEQ ID NO: 401999 - DNA, 25 bp, Homo sapien
caaatatttccggagaggctcgagc

SEQ ID NO: 402000 - DNA, 25 bp, Homo sapien
agaggctcgagccacagtcattcag

SEQ ID NO: 402001 - DNA, 25 bp, Homo sapien
ttcagagcatccgagctcgggatgg

SEQ ID NO: 402002 - DNA, 25 bp, Homo sapien
tccactgttcgctggttgacccggg

SEQ ID NO: 402003 - DNA, 25 bp, Homo sapien
catctaactccgctgaccggcccac

SEQ ID NO: 402004 - DNA, 25 bp, Homo sapien
accgttcctccactgttcgctggtt

SEQ ID NO: 402005 - DNA, 25 bp, Homo sapien
cagtgactggctcatgtcccattcc

SEQ ID NO: 402006 - DNA, 25 bp, Homo sapien
cggcaccttggaaagaccgcgagtg

SEQ ID NO: 402007 - DNA, 25 bp, Homo sapien
aatcggtgaggtggaacgacgagca

SEQ ID NO: 402008 - DNA, 25 bp, Homo sapien
cgccgatgggctttcgcaagagaca

SEQ ID NO: 402009 - DNA, 25 bp, Homo sapien
tcccgaatgcacagcgggcgccgat

SEQ ID NO: 402010 - DNA, 25 bp, Homo sapien
cagggcgtctaccaatagtttagca

SEQ ID NO: 402011 - DNA, 25 bp, Homo sapien
tgacccagaagcagggcgtctacca

SEQ ID NO: 402012 - DNA, 25 bp, Homo sapien
gaggtctgactttcagcagatcgca

SEQ ID NO: 402013 - DNA, 25 bp, Homo sapien
gtctgactttcagcagatcgcagcg

SEQ ID NO: 402014 - DNA, 25 bp, Homo sapien
ccggttcccggtgcacagcgggaca

SEQ ID NO: 402015 - DNA, 25 bp, Homo sapien
ggggctgtctgcaccggacgccggt

SEQ ID NO: 402016 - DNA, 25 bp, Homo sapien
ctgatgggtcagggagtgaccacct

SEQ ID NO: 402017 - DNA, 25 bp, Homo sapien
cggacgccggttcccggtgcacagc

SEQ ID NO: 402018 - DNA, 25 bp, Homo sapien
cgaggccaaaaaacgctccgcggcg

SEQ ID NO: 402019 - DNA, 25 bp, Homo sapien
gctgggaccgcagaggaccgccttt

SEQ ID NO: 402020 - DNA, 25 bp, Homo sapien
ctccgcggcgctgccaaatcgttcc

SEQ ID NO: 402021 - DNA, 25 bp, Homo sapien
aatcgttcctcctcggcgggattct

SEQ ID NO: 402022 - DNA, 25 bp, Homo sapien
accatggcagcaacgcatgggcagc

SEQ ID NO: 402023 - DNA, 25 bp, Homo sapien
taacacgtctcacatgagtctaacc

SEQ ID NO: 402024 - DNA, 25 bp, Homo sapien
gtaaaactaacacgtctcacatgag

SEQ ID NO: 402025 - DNA, 25 bp, Homo sapien
gcaacgcatgggcagcaacacatgg

SEQ ID NO: 402026 - DNA, 25 bp, Homo sapien
gaagcatggcggtatcagaaacatc

SEQ ID NO: 402027 - DNA, 25 bp, Homo sapien
ggaagcatggcggtatcagaaacat

SEQ ID NO: 402028 - DNA, 25 bp, Homo sapien
gggtgtctctctcatactagagcag

SEQ ID NO: 402029 - DNA, 25 bp, Homo sapien
tctctcatactagagcagtcaatgg

SEQ ID NO: 402030 - DNA, 25 bp, Homo sapien
gccctagtagtgtgcctgttttggg

SEQ ID NO: 402031 - DNA, 25 bp, Homo sapien
cagcatgtggccctagtagtgtgcc

SEQ ID NO: 402032 - DNA, 25 bp, Homo sapien
ggggacgactctggaaacaagctga

SEQ ID NO: 402033 - DNA, 25 bp, Homo sapien
tttagtggggacgactctggaaaca

SEQ ID NO: 402034 - DNA, 25 bp, Homo sapien
ttcaagtttagtggggacgactctg

SEQ ID NO: 402035 - DNA, 25 bp, Homo sapien
gtggggacgactctggaaacaagct

SEQ ID NO: 402036 - DNA, 25 bp, Homo sapien
gtggattattatcaaagtacatcat

SEQ ID NO: 402037 - DNA, 25 bp, Homo sapien
caagtggattattatcaaagtacat

SEQ ID NO: 402038 - DNA, 25 bp, Homo sapien
caccttcaagtggattattatcaaa

SEQ ID NO: 402039 - DNA, 25 bp, Homo sapien
caccaacaatggccccaattcacct

SEQ ID NO: 402040 - DNA, 25 bp, Homo sapien
aaaagactgattgcattgtttcatt

SEQ ID NO: 402041 - DNA, 25 bp, Homo sapien
caagtccattaattcacaagcaagt

SEQ ID NO: 402042 - DNA, 25 bp, Homo sapien
caagcaagtgcatttgatggaagaa

SEQ ID NO: 402043 - DNA, 25 bp, Homo sapien
gaaatacttgaatctcaaattgaac

SEQ ID NO: 402044 - DNA, 25 bp, Homo sapien
taagtacaatattatacctgcaaag

SEQ ID NO: 402045 - DNA, 25 bp, Homo sapien
agtacaatattatacctgcaaagtg

SEQ ID NO: 402046 - DNA, 25 bp, Homo sapien
aagtacaatattatacctgcaaagt

SEQ ID NO: 402047 - DNA, 25 bp, Homo sapien
gatgaaaactataaacccactgtat

SEQ ID NO: 402048 - DNA, 25 bp, Homo sapien
tgaaaactataaacccactgtatta

SEQ ID NO: 402049 - DNA, 25 bp, Homo sapien
tggaaatttagatgaaacttgatga

SEQ ID NO: 402050 - DNA, 25 bp, Homo sapien
ggaaatttagatgaaacttgatgaa

SEQ ID NO: 402051 - DNA, 25 bp, Homo sapien
gtgattttaacatgagtctctggat

SEQ ID NO: 402052 - DNA, 25 bp, Homo sapien
gagtctctggatcttgtatgtgcat

SEQ ID NO: 402053 - DNA, 25 bp, Homo sapien
tggaaatatgtcaaaccaatgcttg

SEQ ID NO: 402054 - DNA, 25 bp, Homo sapien
tgacttcttgaagtttataaaatgg

SEQ ID NO: 402055 - DNA, 25 bp, Homo sapien
tgaaaacgagccatccatcatagtt

SEQ ID NO: 402056 - DNA, 25 bp, Homo sapien
aatcattccaagctgatttaataat

SEQ ID NO: 402057 - DNA, 25 bp, Homo sapien
aatttaaatgaaaacgagccatcca

SEQ ID NO: 402058 - DNA, 25 bp, Homo sapien
taaatgaaaacgagccatccatcat

SEQ ID NO: 402059 - DNA, 25 bp, Homo sapien
cacagtggtcctaagaggtcttcct

SEQ ID NO: 402060 - DNA, 25 bp, Homo sapien
gtaccacttgtatccaaaaacacag

SEQ ID NO: 402061 - DNA, 25 bp, Homo sapien
cacctttaaatagcttggcttgata

SEQ ID NO: 402062 - DNA, 25 bp, Homo sapien
tacagaatggatatgtaccacttgt

SEQ ID NO: 402063 - DNA, 25 bp, Homo sapien
agtccacacataagctagtcttgta

SEQ ID NO: 402064 - DNA, 25 bp, Homo sapien
tagtcttgtaatctttgtatgaacg

SEQ ID NO: 402065 - DNA, 25 bp, Homo sapien
tgtatgaacgacaaggaaatgaaat

SEQ ID NO: 402066 - DNA, 25 bp, Homo sapien
gtttctaaagatgccatgaacaagt

SEQ ID NO: 402067 - DNA, 25 bp, Homo sapien
tcatcatttcgaatattatgtagtt

SEQ ID NO: 402068 - DNA, 25 bp, Homo sapien
tctttcatcatttcgaatattatgt

SEQ ID NO: 402069 - DNA, 25 bp, Homo sapien
tttcatcatttcgaatattatgtag

SEQ ID NO: 402070 - DNA, 25 bp, Homo sapien
ttctttcatcatttcgaatattatg

SEQ ID NO: 402071 - DNA, 25 bp, Homo sapien
cagccaggttgtttatttcctccat

SEQ ID NO: 402072 - DNA, 25 bp, Homo sapien
ggacagccaggttgtttatttcctc

SEQ ID NO: 402073 - DNA, 25 bp, Homo sapien
cccaagggctcttgaatgcctaaac

SEQ ID NO: 402074 - DNA, 25 bp, Homo sapien
tcccaagggctcttgaatgcctaaa

SEQ ID NO: 402075 - DNA, 25 bp, Homo sapien
taggtaataaatcctgatttgttac

SEQ ID NO: 402076 - DNA, 25 bp, Homo sapien
ttaggtaataaatcctgatttgtta

SEQ ID NO: 402077 - DNA, 25 bp, Homo sapien
tctaatctgctatatggtggttttc

SEQ ID NO: 402078 - DNA, 25 bp, Homo sapien
caaactttgcatccgtgtaatctaa

SEQ ID NO: 402079 - DNA, 25 bp, Homo sapien
tggagtcagaatggatgacatccac

SEQ ID NO: 402080 - DNA, 25 bp, Homo sapien
gagaaccttggcccagcagggtcaa

SEQ ID NO: 402081 - DNA, 25 bp, Homo sapien
ggttaagccgcaacaaaatattgtc

SEQ ID NO: 402082 - DNA, 25 bp, Homo sapien
taagccgcaacaaaatattgtcgga

SEQ ID NO: 402083 - DNA, 25 bp, Homo sapien
tttcaggttaagccgcaacaaaata

SEQ ID NO: 402084 - DNA, 25 bp, Homo sapien
gccgcaacaaaatattgtcggaatt

SEQ ID NO: 402085 - DNA, 25 bp, Homo sapien
tgatatgagcccctaagctcacacc

SEQ ID NO: 402086 - DNA, 25 bp, Homo sapien
ccactgatatgagcccctaagctca

SEQ ID NO: 402087 - DNA, 25 bp, Homo sapien
gcccctaagctcacacctatgaaat

SEQ ID NO: 402088 - DNA, 25 bp, Homo sapien
taagctcacacctatgaaatgaaaa

SEQ ID NO: 402089 - DNA, 25 bp, Homo sapien
taaaagttgtagcaccccggctcca

SEQ ID NO: 402090 - DNA, 25 bp, Homo sapien
tccagtctactacaattacattcat

SEQ ID NO: 402091 - DNA, 25 bp, Homo sapien
ttaactgctctattataaataaaag

SEQ ID NO: 402092 - DNA, 25 bp, Homo sapien
ctggtgtttttaactgctctattat

SEQ ID NO: 402093 - DNA, 25 bp, Homo sapien
ggctcagcacagtttaggttgttcc

SEQ ID NO: 402094 - DNA, 25 bp, Homo sapien
tctgaagccataatgggatggagcc

SEQ ID NO: 402095 - DNA, 25 bp, Homo sapien
tactggtctgtatccgtgaataagc

SEQ ID NO: 402096 - DNA, 25 bp, Homo sapien
catcagaatggtctctattctcgga

SEQ ID NO: 402097 - DNA, 25 bp, Homo sapien
aagcatgagcactatatttttggca

SEQ ID NO: 402098 - DNA, 25 bp, Homo sapien
tctcaggcacacaactagaagccac

SEQ ID NO: 402099 - DNA, 25 bp, Homo sapien
tggcacaagttattatgtaaacatt

SEQ ID NO: 402100 - DNA, 25 bp, Homo sapien
gacatttctgggtgagaactgaaaa

SEQ ID NO: 402101 - DNA, 25 bp, Homo sapien
tcttcacgttcaaggcagtagtggc

SEQ ID NO: 402102 - DNA, 25 bp, Homo sapien
tagtggcctctacaacagcacacaa

SEQ ID NO: 402103 - DNA, 25 bp, Homo sapien
ctagccaggaaagtaaaatccaagc

SEQ ID NO: 402104 - DNA, 25 bp, Homo sapien
caatggaacaagaggcttccacagt

SEQ ID NO: 402105 - DNA, 25 bp, Homo sapien
caacaaaaacccaagcccattggct

SEQ ID NO: 402106 - DNA, 25 bp, Homo sapien
tccttatcattcatggtaagtcttc

SEQ ID NO: 402107 - DNA, 25 bp, Homo sapien
ctataaagttgggtgcctggaatga

SEQ ID NO: 402108 - DNA, 25 bp, Homo sapien
tcttcttccctggttgtaacctata

SEQ ID NO: 402109 - DNA, 25 bp, Homo sapien
tctcccagacccaggcaagatacta

SEQ ID NO: 402110 - DNA, 25 bp, Homo sapien
gccaggcagtctccagaaaattctc

SEQ ID NO: 402111 - DNA, 25 bp, Homo sapien
agaaaattctcccagacccaggcaa

SEQ ID NO: 402112 - DNA, 25 bp, Homo sapien
aattctcccagacccaggcaagata

SEQ ID NO: 402113 - DNA, 25 bp, Homo sapien
tttgcacagtcttatcttgcacctc

SEQ ID NO: 402114 - DNA, 25 bp, Homo sapien
catttgcacagtcttatcttgcacc

SEQ ID NO: 402115 - DNA, 25 bp, Homo sapien
tcctgctcatttgcacagtcttatc

SEQ ID NO: 402116 - DNA, 25 bp, Homo sapien
tgctcatttgcacagtcttatcttg

SEQ ID NO: 402117 - DNA, 25 bp, Homo sapien
ccgagctgagtaactgtagaaatct

SEQ ID NO: 402118 - DNA, 25 bp, Homo sapien
cagcattacctgaggggactgattc

SEQ ID NO: 402119 - DNA, 25 bp, Homo sapien
ctaccgagctgagtaactgtagaaa

SEQ ID NO: 402120 - DNA, 25 bp, Homo sapien
agctgagtaactgtagaaatctttc

SEQ ID NO: 402121 - DNA, 25 bp, Homo sapien
cgtgctggcgctgaactgactgtcc

SEQ ID NO: 402122 - DNA, 25 bp, Homo sapien
tgctggcgctgaactgactgtccgc

SEQ ID NO: 402123 - DNA, 25 bp, Homo sapien
ctggcgctgaactgactgtccgctg

SEQ ID NO: 402124 - DNA, 25 bp, Homo sapien
gtgctggcgctgaactgactgtccg

SEQ ID NO: 402125 - DNA, 25 bp, Homo sapien
tgtttaaagtacaccatggccgatt

SEQ ID NO: 402126 - DNA, 25 bp, Homo sapien
caagagaaatacagctcctgagcca

SEQ ID NO: 402127 - DNA, 25 bp, Homo sapien
gagcttgtccaagttattcattcca

SEQ ID NO: 402128 - DNA, 25 bp, Homo sapien
tagaaactcgaattggcatccaaga

SEQ ID NO: 402129 - DNA, 25 bp, Homo sapien
ctccagtgtgatctagacgcccctt

SEQ ID NO: 402130 - DNA, 25 bp, Homo sapien
gccctccagtgtgatctagacgccc

SEQ ID NO: 402131 - DNA, 25 bp, Homo sapien
gtgtgatctagacgccccttttctg

SEQ ID NO: 402132 - DNA, 25 bp, Homo sapien
cagtgtgatctagacgccccttttc

SEQ ID NO: 402133 - DNA, 25 bp, Homo sapien
gggaatctaacctattcgtggcatc

SEQ ID NO: 402134 - DNA, 25 bp, Homo sapien
tacagagttacaagtgttagagcat

SEQ ID NO: 402135 - DNA, 25 bp, Homo sapien
catagtttgtcagaagaactctcaa

SEQ ID NO: 402136 - DNA, 25 bp, Homo sapien
caaataacttaatgtgaggcaaatc

SEQ ID NO: 402137 - DNA, 25 bp, Homo sapien
tagtttctggctccatcgtggtcag

SEQ ID NO: 402138 - DNA, 25 bp, Homo sapien
ttaaccatcaaccaaaggaatcctg

SEQ ID NO: 402139 - DNA, 25 bp, Homo sapien
tcgtggtcagaagccatgaattagt

SEQ ID NO: 402140 - DNA, 25 bp, Homo sapien
tctccaaggtcaagtataccgtcat

SEQ ID NO: 402141 - DNA, 25 bp, Homo sapien
ttgtagaaaccttgccacaatggct

SEQ ID NO: 402142 - DNA, 25 bp, Homo sapien
gctatattccccagggcttactgaa

SEQ ID NO: 402143 - DNA, 25 bp, Homo sapien
gaatatgctcaactactgcctccaa

SEQ ID NO: 402144 - DNA, 25 bp, Homo sapien
cattagatttccacgttacttccag

SEQ ID NO: 402145 - DNA, 25 bp, Homo sapien
atagcaatcatggctttattatgac

SEQ ID NO: 402146 - DNA, 25 bp, Homo sapien
atggctttattatgacattaacaca

SEQ ID NO: 402147 - DNA, 25 bp, Homo sapien
tagcaatcatggctttattatgaca

SEQ ID NO: 402148 - DNA, 25 bp, Homo sapien
caatcatggctttattatgacatta

SEQ ID NO: 402149 - DNA, 25 bp, Homo sapien
tgggaatctcataactggcactact

SEQ ID NO: 402150 - DNA, 25 bp, Homo sapien
caatctggtcacgtctaatcctaag

SEQ ID NO: 402151 - DNA, 25 bp, Homo sapien
cacggtccttcaagtatagttcaaa

SEQ ID NO: 402152 - DNA, 25 bp, Homo sapien
tgtaaatacctgacatcaacacggt

SEQ ID NO: 402153 - DNA, 25 bp, Homo sapien
cattaagggtatcaaagagtttccg

SEQ ID NO: 402154 - DNA, 25 bp, Homo sapien
tcctagagggcacgaagccatatgt

SEQ ID NO: 402155 - DNA, 25 bp, Homo sapien
ttcttatcagaaaggccacgtccaa

SEQ ID NO: 402156 - DNA, 25 bp, Homo sapien
tcttgaatgacttgacggatccgag

SEQ ID NO: 402157 - DNA, 25 bp, Homo sapien
aagacgtcagccttgtggagaccat

SEQ ID NO: 402158 - DNA, 25 bp, Homo sapien
gacattgctcgggttagaaacatcc

SEQ ID NO: 402159 - DNA, 25 bp, Homo sapien
taaagacacatctagagttcctccg

SEQ ID NO: 402160 - DNA, 25 bp, Homo sapien
gtctatcaccaagacgtggaagacg

SEQ ID NO: 402161 - DNA, 25 bp, Homo sapien
ctgcaaggttagcagcttcaattgt

SEQ ID NO: 402162 - DNA, 25 bp, Homo sapien
gcaaggttagcagcttcaattgttg

SEQ ID NO: 402163 - DNA, 25 bp, Homo sapien
aaggttagcagcttcaattgttgaa

SEQ ID NO: 402164 - DNA, 25 bp, Homo sapien
ttagcagcttcaattgttgaatttc

SEQ ID NO: 402165 - DNA, 25 bp, Homo sapien
gatggtctcattacttgtcacagaa

SEQ ID NO: 402166 - DNA, 25 bp, Homo sapien
atagtcgagagccaacatattctgg

SEQ ID NO: 402167 - DNA, 25 bp, Homo sapien
tcctttaacttcaacaatagtcgag

SEQ ID NO: 402168 - DNA, 25 bp, Homo sapien
gacagcattggcaactggcattcca

SEQ ID NO: 402169 - DNA, 25 bp, Homo sapien
tgtcagtaaaagacaccatgctggg

SEQ ID NO: 402170 - DNA, 25 bp, Homo sapien
tcttctgcggtaaaaatcttgccta

SEQ ID NO: 402171 - DNA, 25 bp, Homo sapien
ttgtgccaaatagccggccaacagg

SEQ ID NO: 402172 - DNA, 25 bp, Homo sapien
ccatgctgggtatgctgatatgccc

SEQ ID NO: 402173 - DNA, 25 bp, Homo sapien
ctaagatcgtcatctctctggccat

SEQ ID NO: 402174 - DNA, 25 bp, Homo sapien
cacagtcccgccgaacaggcttgtg

SEQ ID NO: 402175 - DNA, 25 bp, Homo sapien
tgactgtaccagacgtgaggcaccg

SEQ ID NO: 402176 - DNA, 25 bp, Homo sapien
cttgtgatgactgtaccagacgtga

SEQ ID NO: 402177 - DNA, 25 bp, Homo sapien
cgccgaacaggcttgtgatgactgt

SEQ ID NO: 402178 - DNA, 25 bp, Homo sapien
aacggccggcaggaccagtgagact

SEQ ID NO: 402179 - DNA, 25 bp, Homo sapien
ccgtggcgagagactggcgtttata

SEQ ID NO: 402180 - DNA, 25 bp, Homo sapien
taatcaaacctgtggtcccgcgatc

SEQ ID NO: 402181 - DNA, 25 bp, Homo sapien
tccattcaaccgctgccagtgacga

SEQ ID NO: 402182 - DNA, 25 bp, Homo sapien
agggaaaacaggctatctctttagc

SEQ ID NO: 402183 - DNA, 25 bp, Homo sapien
gggaaaacaggctatctctttagcc

SEQ ID NO: 402184 - DNA, 25 bp, Homo sapien
gagggaaaacaggctatctctttag

SEQ ID NO: 402185 - DNA, 25 bp, Homo sapien
atgggcaagtcctgtaacgtgacag

SEQ ID NO: 402186 - DNA, 25 bp, Homo sapien
gcaagtcctgtaacgtgacagccat

SEQ ID NO: 402187 - DNA, 25 bp, Homo sapien
tatgggcaagtcctgtaacgtgaca

SEQ ID NO: 402188 - DNA, 25 bp, Homo sapien
gggcaagtcctgtaacgtgacagcc

SEQ ID NO: 402189 - DNA, 25 bp, Homo sapien
tgacacttcagcaaaagggttccag

SEQ ID NO: 402190 - DNA, 25 bp, Homo sapien
tatgccctcttggtggtataatgca

SEQ ID NO: 402191 - DNA, 25 bp, Homo sapien
caggagagtgggatattataaacct

SEQ ID NO: 402192 - DNA, 25 bp, Homo sapien
tataaacctgagctgacacttcagc

SEQ ID NO: 402193 - DNA, 25 bp, Homo sapien
ctagcttttggcagttgaggagact

SEQ ID NO: 402194 - DNA, 25 bp, Homo sapien
tggcagttgaggagactttgaagca

SEQ ID NO: 402195 - DNA, 25 bp, Homo sapien
gcttttggcagttgaggagactttg

SEQ ID NO: 402196 - DNA, 25 bp, Homo sapien
cagttgaggagactttgaagcagca

SEQ ID NO: 402197 - DNA, 25 bp, Homo sapien
ttatgtttaaaattaaagatggcca

SEQ ID NO: 402198 - DNA, 25 bp, Homo sapien
atgtttaaaattaaagatggccaat

SEQ ID NO: 402199 - DNA, 25 bp, Homo sapien
tcctttaaggctgttccaattccac

SEQ ID NO: 402200 - DNA, 25 bp, Homo sapien
agatggccaattttcctttaaggct

SEQ ID NO: 402201 - DNA, 25 bp, Homo sapien
tatcccatctacgttgtctgcctta

SEQ ID NO: 402202 - DNA, 25 bp, Homo sapien
tgggctgggaatatcccatctacgt

SEQ ID NO: 402203 - DNA, 25 bp, Homo sapien
tgggaatatcccatctacgttgtct

SEQ ID NO: 402204 - DNA, 25 bp, Homo sapien
aggatgggctgggaatatcccatct

SEQ ID NO: 402205 - DNA, 25 bp, Homo sapien
gaggcttcgcattctctcagagaca

SEQ ID NO: 402206 - DNA, 25 bp, Homo sapien
gatgaccccttgtctaagtggactt

SEQ ID NO: 402207 - DNA, 25 bp, Homo sapien
gaaagagtcattggcatgtccttgg

SEQ ID NO: 402208 - DNA, 25 bp, Homo sapien
gctcatgtacaccatttggcaagaa

SEQ ID NO: 402209 - DNA, 25 bp, Homo sapien
tgagatggttcttgcagtgacagca

SEQ ID NO: 402210 - DNA, 25 bp, Homo sapien
tagttcctatgccagccaagaagac

SEQ ID NO: 402211 - DNA, 25 bp, Homo sapien
gaagatttaaggcagagctagttcc

SEQ ID NO: 402212 - DNA, 25 bp, Homo sapien
cagcagatctaccatgcacgtttga

SEQ ID NO: 402213 - DNA, 25 bp, Homo sapien
ttgtaattatcatcaggcaatgatg

SEQ ID NO: 402214 - DNA, 25 bp, Homo sapien
gtaattatcatcaggcaatgatgag

SEQ ID NO: 402215 - DNA, 25 bp, Homo sapien
aattatcatcaggcaatgatgagtc

SEQ ID NO: 402216 - DNA, 25 bp, Homo sapien
tgtaattatcatcaggcaatgatga

SEQ ID NO: 402217 - DNA, 25 bp, Homo sapien
gcttgattaagcagatccagtaagt

SEQ ID NO: 402218 - DNA, 25 bp, Homo sapien
tagcgacgattatgcttgattaagc

SEQ ID NO: 402219 - DNA, 25 bp, Homo sapien
actgccagtcacatagcgacgatta

SEQ ID NO: 402220 - DNA, 25 bp, Homo sapien
gtacttgatcgactttttcccataa

SEQ ID NO: 402221 - DNA, 25 bp, Homo sapien
gagcactctgtgcatctcccctcgt

SEQ ID NO: 402222 - DNA, 25 bp, Homo sapien
cctcgtccctcccaataatacctgg

SEQ ID NO: 402223 - DNA, 25 bp, Homo sapien
taacacttgccattattctgagcac

SEQ ID NO: 402224 - DNA, 25 bp, Homo sapien
ccaataatacctggccctgaatttc

SEQ ID NO: 402225 - DNA, 25 bp, Homo sapien
tattaggagcaatttgttttaattg

SEQ ID NO: 402226 - DNA, 25 bp, Homo sapien
gtgcaaagtttattaggagcaattt

SEQ ID NO: 402227 - DNA, 25 bp, Homo sapien
tgtgcaaagtttattaggagcaatt

SEQ ID NO: 402228 - DNA, 25 bp, Homo sapien
aaagcagcagaaggtccaagttcct

SEQ ID NO: 402229 - DNA, 25 bp, Homo sapien
cagccaaaagcagcagaaggtccaa

SEQ ID NO: 402230 - DNA, 25 bp, Homo sapien
cagcagaaggtccaagttcctcagc

SEQ ID NO: 402231 - DNA, 25 bp, Homo sapien
gcagcagaaggtccaagttcctcag

SEQ ID NO: 402232 - DNA, 25 bp, Homo sapien
tctttccgctgctctttattcagct

SEQ ID NO: 402233 - DNA, 25 bp, Homo sapien
tggccaagagaaaaacctgtcttcc

SEQ ID NO: 402234 - DNA, 25 bp, Homo sapien
gatgagccgtttcttatctttccgc

SEQ ID NO: 402235 - DNA, 25 bp, Homo sapien
cctgccccacgttgagggagctgag

SEQ ID NO: 402236 - DNA, 25 bp, Homo sapien
tggacaacttgtttcaacagcgaat

SEQ ID NO: 402237 - DNA, 25 bp, Homo sapien
gcatctgtagatatatagttgggaa

SEQ ID NO: 402238 - DNA, 25 bp, Homo sapien
tataattactaaaactccactgtgg

SEQ ID NO: 402239 - DNA, 25 bp, Homo sapien
gacgttttagctcaagaagagttaa

SEQ ID NO: 402240 - DNA, 25 bp, Homo sapien
gtcacttggctctgtgataataatc

SEQ ID NO: 402241 - DNA, 25 bp, Homo sapien
tcagtcacttggctctgtgataata

SEQ ID NO: 402242 - DNA, 25 bp, Homo sapien
cagtcacttggctctgtgataataa

SEQ ID NO: 402243 - DNA, 25 bp, Homo sapien
cacttggctctgtgataataatctt

SEQ ID NO: 402244 - DNA, 25 bp, Homo sapien
aatttcctgatgagatatagcaacc

SEQ ID NO: 402245 - DNA, 25 bp, Homo sapien
tttcctgatgagatatagcaaccag

SEQ ID NO: 402246 - DNA, 25 bp, Homo sapien
cctgatgagatatagcaaccagagt

SEQ ID NO: 402247 - DNA, 25 bp, Homo sapien
tgaatttcctgatgagatatagcaa

SEQ ID NO: 402248 - DNA, 25 bp, Homo sapien
tgtgacttatttaaggagatgtctg

SEQ ID NO: 402249 - DNA, 25 bp, Homo sapien
cttatttaaggagatgtctgagctc

SEQ ID NO: 402250 - DNA, 25 bp, Homo sapien
caaggataggggctcaggttcattt

SEQ ID NO: 402251 - DNA, 25 bp, Homo sapien
gacttatttaaggagatgtctgagc

SEQ ID NO: 402252 - DNA, 25 bp, Homo sapien
gaagaaatagatctcaggtactgcc

SEQ ID NO: 402253 - DNA, 25 bp, Homo sapien
ttggaagaacccctaagcagcctga

SEQ ID NO: 402254 - DNA, 25 bp, Homo sapien
ggcatctgaatagctccacgttgaa

SEQ ID NO: 402255 - DNA, 25 bp, Homo sapien
gggcttcaccactgtaggcatctga

SEQ ID NO: 402256 - DNA, 25 bp, Homo sapien
gcttctaacgagatgtgtacctgga

SEQ ID NO: 402257 - DNA, 25 bp, Homo sapien
tacctgggcaatctcattagactgc

SEQ ID NO: 402258 - DNA, 25 bp, Homo sapien
catatggagggctttggtcccagga

SEQ ID NO: 402259 - DNA, 25 bp, Homo sapien
tcgctttcagctagggcaatctcca

SEQ ID NO: 402260 - DNA, 25 bp, Homo sapien
aagattcggtcttgtttggccaggg

SEQ ID NO: 402261 - DNA, 25 bp, Homo sapien
tacaggagtgctctatatatacggc

SEQ ID NO: 402262 - DNA, 25 bp, Homo sapien
tatatacggccattagagaggtcct

SEQ ID NO: 402263 - DNA, 25 bp, Homo sapien
actaatgcaaagcacaggactaggg

SEQ ID NO: 402264 - DNA, 25 bp, Homo sapien
tctgtgggcccctgaggatactgtt

SEQ ID NO: 402265 - DNA, 25 bp, Homo sapien
gagaccaggataaggcggaacatgt

SEQ ID NO: 402266 - DNA, 25 bp, Homo sapien
cacatgtggaggagttttacagcag

SEQ ID NO: 402267 - DNA, 25 bp, Homo sapien
tattgctgaaagtgctgcttgccca

SEQ ID NO: 402268 - DNA, 25 bp, Homo sapien
agctgatagtaaccttcttctgtca

SEQ ID NO: 402269 - DNA, 25 bp, Homo sapien
taaatcttctagagtctcataacca

SEQ ID NO: 402270 - DNA, 25 bp, Homo sapien
agttttcagcagctgatagtaacct

SEQ ID NO: 402271 - DNA, 25 bp, Homo sapien
tgagcaaaagtgttgaggtgtattc

SEQ ID NO: 402272 - DNA, 25 bp, Homo sapien
tgagatgacatccacataaatgaat

SEQ ID NO: 402273 - DNA, 25 bp, Homo sapien
tctaggaactcctgcagagtcttgg

SEQ ID NO: 402274 - DNA, 25 bp, Homo sapien
tttgctgttactccttcggtttgcc

SEQ ID NO: 402275 - DNA, 25 bp, Homo sapien
tgcagatgaatcctctctaggaact

SEQ ID NO: 402276 - DNA, 25 bp, Homo sapien
agcatgtatctgtagactgaggtgg

SEQ ID NO: 402277 - DNA, 25 bp, Homo sapien
catgtatctgtagactgaggtggga

SEQ ID NO: 402278 - DNA, 25 bp, Homo sapien
gcatgtatctgtagactgaggtggg

SEQ ID NO: 402279 - DNA, 25 bp, Homo sapien
ggactccagttgatatccagcaaga

SEQ ID NO: 402280 - DNA, 25 bp, Homo sapien
gaattctgtcaaaagccagtgaact

SEQ ID NO: 402281 - DNA, 25 bp, Homo sapien
gaattcaggagggaatatcaccagg

SEQ ID NO: 402282 - DNA, 25 bp, Homo sapien
aaggtctctggttactcatagcaac

SEQ ID NO: 402283 - DNA, 25 bp, Homo sapien
tcatagggacttggcgtgaaatccg

SEQ ID NO: 402284 - DNA, 25 bp, Homo sapien
tctggcacggccacagaatggtcct

SEQ ID NO: 402285 - DNA, 25 bp, Homo sapien
gggccatcgtcatccagtcgaaagc

SEQ ID NO: 402286 - DNA, 25 bp, Homo sapien
tgaaatccgtatgcactctggcacg

SEQ ID NO: 402287 - DNA, 25 bp, Homo sapien
tgtccactgtagagactatccatgg

SEQ ID NO: 402288 - DNA, 25 bp, Homo sapien
actgtagagactatccatggagtca

SEQ ID NO: 402289 - DNA, 25 bp, Homo sapien
gtagagactatccatggagtcactg

SEQ ID NO: 402290 - DNA, 25 bp, Homo sapien
ctctgtccactgtagagactatcca

SEQ ID NO: 402291 - DNA, 25 bp, Homo sapien
ttctatatgggtgggcattctctcc

SEQ ID NO: 402292 - DNA, 25 bp, Homo sapien
tatatgggtgggcattctctccatc

SEQ ID NO: 402293 - DNA, 25 bp, Homo sapien
tgtttctatatgggtgggcattctc

SEQ ID NO: 402294 - DNA, 25 bp, Homo sapien
tttctatatgggtgggcattctctc

SEQ ID NO: 402295 - DNA, 25 bp, Homo sapien
atatagcagataagtgaagaggtca

SEQ ID NO: 402296 - DNA, 25 bp, Homo sapien
gatatattaggttttggatgtctac

SEQ ID NO: 402297 - DNA, 25 bp, Homo sapien
aggttttggatgtctactggacatc

SEQ ID NO: 402298 - DNA, 25 bp, Homo sapien
gatatcaaataagcaattgattgta

SEQ ID NO: 402299 - DNA, 25 bp, Homo sapien
gatgcatgatctttctgagtgtcag

SEQ ID NO: 402300 - DNA, 25 bp, Homo sapien
tctgttaaaatgaaagtaatacttc

SEQ ID NO: 402301 - DNA, 25 bp, Homo sapien
caaatgcttaagtacttcataaagt

SEQ ID NO: 402302 - DNA, 25 bp, Homo sapien
ccaagcacttctatagtctagctga

SEQ ID NO: 402303 - DNA, 25 bp, Homo sapien
catttgtgggatctccttcatgtgc

SEQ ID NO: 402304 - DNA, 25 bp, Homo sapien
ccacttccatttgtgggatctcctt

SEQ ID NO: 402305 - DNA, 25 bp, Homo sapien
tacccaaaccgcctccattatttga

SEQ ID NO: 402306 - DNA, 25 bp, Homo sapien
acttccatttgtgggatctccttca

SEQ ID NO: 402307 - DNA, 25 bp, Homo sapien
tggttttgataaagaattattccga

SEQ ID NO: 402308 - DNA, 25 bp, Homo sapien
gttgaatcatctggttttgataaag

SEQ ID NO: 402309 - DNA, 25 bp, Homo sapien
cagttgaatcatctggttttgataa

SEQ ID NO: 402310 - DNA, 25 bp, Homo sapien
tgataaagaattattccgaaaacga

SEQ ID NO: 402311 - DNA, 25 bp, Homo sapien
ttttgctgacttgccaccccggctg

SEQ ID NO: 402312 - DNA, 25 bp, Homo sapien
aaggatgatagctgtgttagacaca

SEQ ID NO: 402313 - DNA, 25 bp, Homo sapien
tgttagacacaattaacgccttttg

SEQ ID NO: 402314 - DNA, 25 bp, Homo sapien
atacagaatattgccccaaggatga

SEQ ID NO: 402315 - DNA, 25 bp, Homo sapien
cagaatatgaatcactccaacttgc

SEQ ID NO: 402316 - DNA, 25 bp, Homo sapien
ccagaatatgaatcactccaacttg

SEQ ID NO: 402317 - DNA, 25 bp, Homo sapien
cactccaacttgcctaggaggtgtt

SEQ ID NO: 402318 - DNA, 25 bp, Homo sapien
gcaaacccctaatgcaatgttggat

SEQ ID NO: 402319 - DNA, 25 bp, Homo sapien
tttgcatgctttatgccacctgagg

SEQ ID NO: 402320 - DNA, 25 bp, Homo sapien
tttttgcatgctttatgccacctga

SEQ ID NO: 402321 - DNA, 25 bp, Homo sapien
ttttgcatgctttatgccacctgag

SEQ ID NO: 402322 - DNA, 25 bp, Homo sapien
taggctccagcaatctcctgcttca

SEQ ID NO: 402323 - DNA, 25 bp, Homo sapien
cctaggctccagcaatctcctgctt

SEQ ID NO: 402324 - DNA, 25 bp, Homo sapien
tcctaggctccagcaatctcctgct

SEQ ID NO: 402325 - DNA, 25 bp, Homo sapien
actcctaggctccagcaatctcctg

SEQ ID NO: 402326 - DNA, 25 bp, Homo sapien
gacgaatgccatatcactatgtaga

SEQ ID NO: 402327 - DNA, 25 bp, Homo sapien
gcagtagcataactgtaaccacgta

SEQ ID NO: 402328 - DNA, 25 bp, Homo sapien
ttttaaccaaatactgagacgaatg

SEQ ID NO: 402329 - DNA, 25 bp, Homo sapien
ctgtaaccacgtaaagtattcaggg

SEQ ID NO: 402330 - DNA, 25 bp, Homo sapien
tttcaagtatagctaatacatttgg

SEQ ID NO: 402331 - DNA, 25 bp, Homo sapien
aagtatagctaatacatttggcccc

SEQ ID NO: 402332 - DNA, 25 bp, Homo sapien
ctgaacacttttcaagtatagctaa

SEQ ID NO: 402333 - DNA, 25 bp, Homo sapien
gaacacttttcaagtatagctaata

SEQ ID NO: 402334 - DNA, 25 bp, Homo sapien
gggataaaacttgattacagattca

SEQ ID NO: 402335 - DNA, 25 bp, Homo sapien
tgggataaaacttgattacagattc

SEQ ID NO: 402336 - DNA, 25 bp, Homo sapien
ctgcttgggataaaacttgattaca

SEQ ID NO: 402337 - DNA, 25 bp, Homo sapien
gcttgggataaaacttgattacaga

SEQ ID NO: 402338 - DNA, 25 bp, Homo sapien
gacagtgattccctatatttcagac

SEQ ID NO: 402339 - DNA, 25 bp, Homo sapien
cacaaattctaagagtatagtatga

SEQ ID NO: 402340 - DNA, 25 bp, Homo sapien
taatatctggtatgtagttaatcag

SEQ ID NO: 402341 - DNA, 25 bp, Homo sapien
tatttcagaccaatttcttgatggt

SEQ ID NO: 402342 - DNA, 25 bp, Homo sapien
tgccatgaggcattaaaccctatgt

SEQ ID NO: 402343 - DNA, 25 bp, Homo sapien
tttctctgaaaatgggtgcctaaca

SEQ ID NO: 402344 - DNA, 25 bp, Homo sapien
tcagtagactgttcaatagacgttg

SEQ ID NO: 402345 - DNA, 25 bp, Homo sapien
gactcagctattgtttatctcagaa

SEQ ID NO: 402346 - DNA, 25 bp, Homo sapien
cttctctgaaacattggatggcttt

SEQ ID NO: 402347 - DNA, 25 bp, Homo sapien
acattggatggctttctcttgagca

SEQ ID NO: 402348 - DNA, 25 bp, Homo sapien
cattggatggctttctcttgagcat

SEQ ID NO: 402349 - DNA, 25 bp, Homo sapien
tctgaaacattggatggctttctct

SEQ ID NO: 402350 - DNA, 25 bp, Homo sapien
tctgactactcctagtgagtgcact

SEQ ID NO: 402351 - DNA, 25 bp, Homo sapien
gaattctgactactcctagtgagtg

SEQ ID NO: 402352 - DNA, 25 bp, Homo sapien
gactactcctagtgagtgcactttc

SEQ ID NO: 402353 - DNA, 25 bp, Homo sapien
tttgaattctgactactcctagtga

SEQ ID NO: 402354 - DNA, 25 bp, Homo sapien
cagaaacaactgaaaacagtcagca

SEQ ID NO: 402355 - DNA, 25 bp, Homo sapien
tacagaaacaactgaaaacagtcag

SEQ ID NO: 402356 - DNA, 25 bp, Homo sapien
aacaactgaaaacagtcagcagtgt

SEQ ID NO: 402357 - DNA, 25 bp, Homo sapien
gaaacaactgaaaacagtcagcagt

SEQ ID NO: 402358 - DNA, 25 bp, Homo sapien
gattggcatagggacatggcagaat

SEQ ID NO: 402359 - DNA, 25 bp, Homo sapien
tcagattggcatagggacatggcag

SEQ ID NO: 402360 - DNA, 25 bp, Homo sapien
gatgaagcctttccattgaagccca

SEQ ID NO: 402361 - DNA, 25 bp, Homo sapien
aagttttcagattggcatagggaca

SEQ ID NO: 402362 - DNA, 25 bp, Homo sapien
aagcttgttgatcactaaacttcct

SEQ ID NO: 402363 - DNA, 25 bp, Homo sapien
ttctaaagcttgttgatcactaaac

SEQ ID NO: 402364 - DNA, 25 bp, Homo sapien
tctaaagcttgttgatcactaaact

SEQ ID NO: 402365 - DNA, 25 bp, Homo sapien
taaagcttgttgatcactaaacttc

SEQ ID NO: 402366 - DNA, 25 bp, Homo sapien
tctcagtttggtccaacatgttata

SEQ ID NO: 402367 - DNA, 25 bp, Homo sapien
gcagaaaagatcacccctcttctct

SEQ ID NO: 402368 - DNA, 25 bp, Homo sapien
ccaacatgttatattagagctctcc

SEQ ID NO: 402369 - DNA, 25 bp, Homo sapien
agaatgcagaaaagatcacccctct

SEQ ID NO: 402370 - DNA, 25 bp, Homo sapien
ggtattgacagagggtttcatggct

SEQ ID NO: 402371 - DNA, 25 bp, Homo sapien
tatgccaggtgccttcggtcataca

SEQ ID NO: 402372 - DNA, 25 bp, Homo sapien
gccttcggtcatacagagtggtatt

SEQ ID NO: 402373 - DNA, 25 bp, Homo sapien
tattgacagagggtttcatggctcc

SEQ ID NO: 402374 - DNA, 25 bp, Homo sapien
ttttagagtgaattcaaccacttgc

SEQ ID NO: 402375 - DNA, 25 bp, Homo sapien
tagagtgaattcaaccacttgcttt

SEQ ID NO: 402376 - DNA, 25 bp, Homo sapien
ttaatagctgggaaccatgagatgc

SEQ ID NO: 402377 - DNA, 25 bp, Homo sapien
cataaagatcttacactgaatattc

SEQ ID NO: 402378 - DNA, 25 bp, Homo sapien
catcatccacacgatttgtcaccat

SEQ ID NO: 402379 - DNA, 25 bp, Homo sapien
gaatttttccatcatccacacgatt

SEQ ID NO: 402380 - DNA, 25 bp, Homo sapien
actgaaacagttgcgtaaagaattt

SEQ ID NO: 402381 - DNA, 25 bp, Homo sapien
ccaactgaaacagttgcgtaaagaa

SEQ ID NO: 402382 - DNA, 25 bp, Homo sapien
caatgtcggagctgcattaaatcca

SEQ ID NO: 402383 - DNA, 25 bp, Homo sapien
tctgccggcaatgtcggagctgcat

SEQ ID NO: 402384 - DNA, 25 bp, Homo sapien
agcacactctgccggcaatgtcgga

SEQ ID NO: 402385 - DNA, 25 bp, Homo sapien
ccggcaatgtcggagctgcattaaa

SEQ ID NO: 402386 - DNA, 25 bp, Homo sapien
tttggaaagacaactcttgctctgg

SEQ ID NO: 402387 - DNA, 25 bp, Homo sapien
aaaaccccagataagatgacacatt

SEQ ID NO: 402388 - DNA, 25 bp, Homo sapien
gacacatttccgtagtctgcaaact

SEQ ID NO: 402389 - DNA, 25 bp, Homo sapien
cacaagagtttggttgctttttgga

SEQ ID NO: 402390 - DNA, 25 bp, Homo sapien
cccagggtccaacttgtgctatttg

SEQ ID NO: 402391 - DNA, 25 bp, Homo sapien
atacaagaggagcagtggtcccagg

SEQ ID NO: 402392 - DNA, 25 bp, Homo sapien
tgagacgtgtgtggcgaatacaaga

SEQ ID NO: 402393 - DNA, 25 bp, Homo sapien
tctgagcaggaagacttgagacgtg

SEQ ID NO: 402394 - DNA, 25 bp, Homo sapien
gaaagagtatccaatctaatctcca

SEQ ID NO: 402395 - DNA, 25 bp, Homo sapien
tatcttccaagttgcagttatttaa

SEQ ID NO: 402396 - DNA, 25 bp, Homo sapien
gctggatctacccagtgatgcagaa

SEQ ID NO: 402397 - DNA, 25 bp, Homo sapien
ataccaagctaatttatcttccaag

SEQ ID NO: 402398 - DNA, 25 bp, Homo sapien
acaagaaatcaacgtgtcatcttca

SEQ ID NO: 402399 - DNA, 25 bp, Homo sapien
agaaatcaacgtgtcatcttcatct

SEQ ID NO: 402400 - DNA, 25 bp, Homo sapien
tccttcctcctcgtgctaacactat

SEQ ID NO: 402401 - DNA, 25 bp, Homo sapien
cgtgctaacactattcactttcttt

SEQ ID NO: 402402 - DNA, 25 bp, Homo sapien
gttttctatggccaaggaatggcga

SEQ ID NO: 402403 - DNA, 25 bp, Homo sapien
atacattgttttctatggccaagga

SEQ ID NO: 402404 - DNA, 25 bp, Homo sapien
attgttttctatggccaaggaatgg

SEQ ID NO: 402405 - DNA, 25 bp, Homo sapien
tctatggccaaggaatggcgacagt

SEQ ID NO: 402406 - DNA, 25 bp, Homo sapien
tctgtagtcgctttaatgtccccat

SEQ ID NO: 402407 - DNA, 25 bp, Homo sapien
gtttattaatgtcggtttcacctca

SEQ ID NO: 402408 - DNA, 25 bp, Homo sapien
tagtccaaaccagtttctgtagtcg

SEQ ID NO: 402409 - DNA, 25 bp, Homo sapien
tccagattctgcactctggctttct

SEQ ID NO: 402410 - DNA, 25 bp, Homo sapien
tgattccacagggtcactgcctgat

SEQ ID NO: 402411 - DNA, 25 bp, Homo sapien
cagggtcactgcctgattttatggc

SEQ ID NO: 402412 - DNA, 25 bp, Homo sapien
gattccacagggtcactgcctgatt

SEQ ID NO: 402413 - DNA, 25 bp, Homo sapien
tccacagggtcactgcctgatttta

SEQ ID NO: 402414 - DNA, 25 bp, Homo sapien
tgctttgtgactggccatgtgaact

SEQ ID NO: 402415 - DNA, 25 bp, Homo sapien
gtttctgggtacacctcctagctga

SEQ ID NO: 402416 - DNA, 25 bp, Homo sapien
tacacaaaccagcattgcaaatggg

SEQ ID NO: 402417 - DNA, 25 bp, Homo sapien
tagagtaagaacctgcccttgtgtg

SEQ ID NO: 402418 - DNA, 25 bp, Homo sapien
tgtctttgatagtgaaatggactcc

SEQ ID NO: 402419 - DNA, 25 bp, Homo sapien
aacatgtctttgatagtgaaatgga

SEQ ID NO: 402420 - DNA, 25 bp, Homo sapien
caacatgtctttgatagtgaaatgg

SEQ ID NO: 402421 - DNA, 25 bp, Homo sapien
acatgtctttgatagtgaaatggac

SEQ ID NO: 402422 - DNA, 25 bp, Homo sapien
tcttccatgcctgagatcttctctt

SEQ ID NO: 402423 - DNA, 25 bp, Homo sapien
tccatgcctgagatcttctcttcca

SEQ ID NO: 402424 - DNA, 25 bp, Homo sapien
ttccatgcctgagatcttctcttcc

SEQ ID NO: 402425 - DNA, 25 bp, Homo sapien
cttcttccatgcctgagatcttctc

SEQ ID NO: 402426 - DNA, 25 bp, Homo sapien
tgataggaagttccttgtagagttt

SEQ ID NO: 402427 - DNA, 25 bp, Homo sapien
cttttagctgacagggccttctgat

SEQ ID NO: 402428 - DNA, 25 bp, Homo sapien
ttagctgacagggccttctgatgtg

SEQ ID NO: 402429 - DNA, 25 bp, Homo sapien
ttttagctgacagggccttctgatg

SEQ ID NO: 402430 - DNA, 25 bp, Homo sapien
tttagctgacagggccttctgatgt

SEQ ID NO: 402431 - DNA, 25 bp, Homo sapien
taacaagtcaccttgaccacggagc

SEQ ID NO: 402432 - DNA, 25 bp, Homo sapien
ggagcagccaagctacacatggaga

SEQ ID NO: 402433 - DNA, 25 bp, Homo sapien
gagcagccaatgaactaccaaagag

SEQ ID NO: 402434 - DNA, 25 bp, Homo sapien
ttattgtctcctagattcacagatc

SEQ ID NO: 402435 - DNA, 25 bp, Homo sapien
taaaaaatgttcttctatataattc

SEQ ID NO: 402436 - DNA, 25 bp, Homo sapien
gagacagaatacatcgtttacactt

SEQ ID NO: 402437 - DNA, 25 bp, Homo sapien
tttacacttgtaaccttaggaatca

SEQ ID NO: 402438 - DNA, 25 bp, Homo sapien
agacaactcaatttgactttcatta

SEQ ID NO: 402439 - DNA, 25 bp, Homo sapien
catctatgttttggtagcctatatt

SEQ ID NO: 402440 - DNA, 25 bp, Homo sapien
tgtcatctatgttttggtagcctat

SEQ ID NO: 402441 - DNA, 25 bp, Homo sapien
gtcatctatgttttggtagcctata

SEQ ID NO: 402442 - DNA, 25 bp, Homo sapien
tcatctatgttttggtagcctatat

SEQ ID NO: 402443 - DNA, 25 bp, Homo sapien
ttctcttttttggttttgcattctc

SEQ ID NO: 402444 - DNA, 25 bp, Homo sapien
cagcaattgatgatgtaaatcccat

SEQ ID NO: 402445 - DNA, 25 bp, Homo sapien
gattggcagcaattgatgatgtaaa

SEQ ID NO: 402446 - DNA, 25 bp, Homo sapien
tggcagcaattgatgatgtaaatcc

SEQ ID NO: 402447 - DNA, 25 bp, Homo sapien
aaaactgattggcagcaattgatga

SEQ ID NO: 402448 - DNA, 25 bp, Homo sapien
tttcatcagattcaattagtagttc

SEQ ID NO: 402449 - DNA, 25 bp, Homo sapien
ctttcatcagattcaattagtagtt

SEQ ID NO: 402450 - DNA, 25 bp, Homo sapien
tgtgagcttcagacataaggagata

SEQ ID NO: 402451 - DNA, 25 bp, Homo sapien
tttgtgagcttcagacataaggaga

SEQ ID NO: 402452 - DNA, 25 bp, Homo sapien
ttgtgagcttcagacataaggagat

SEQ ID NO: 402453 - DNA, 25 bp, Homo sapien
aagagattgtttggtgtttgttcac

SEQ ID NO: 402454 - DNA, 25 bp, Homo sapien
gataggagaatcagttctactagac

SEQ ID NO: 402455 - DNA, 25 bp, Homo sapien
tcttggttagcttgttgctctggga

SEQ ID NO: 402456 - DNA, 25 bp, Homo sapien
cactctctccaaagggtgggatagg

SEQ ID NO: 402457 - DNA, 25 bp, Homo sapien
accaatgaatagacataatgccctg

SEQ ID NO: 402458 - DNA, 25 bp, Homo sapien
gggatctcccatcgacatcttgaaa

SEQ ID NO: 402459 - DNA, 25 bp, Homo sapien
tcttgaaaaaccaatgaatagacat

SEQ ID NO: 402460 - DNA, 25 bp, Homo sapien
ccaaatgagagggatctcccatcga

SEQ ID NO: 402461 - DNA, 25 bp, Homo sapien
ttgaaaaatatgattgcctcttgta

SEQ ID NO: 402462 - DNA, 25 bp, Homo sapien
aaaaatatgattgcctcttgtagct

SEQ ID NO: 402463 - DNA, 25 bp, Homo sapien
aaatatgattgcctcttgtagctct

SEQ ID NO: 402464 - DNA, 25 bp, Homo sapien
gaaaaatatgattgcctcttgtagc

SEQ ID NO: 402465 - DNA, 25 bp, Homo sapien
tgccataatccaggggattcagaga

SEQ ID NO: 402466 - DNA, 25 bp, Homo sapien
ccataatccaggggattcagagacc

SEQ ID NO: 402467 - DNA, 25 bp, Homo sapien
ctgccataatccaggggattcagag

SEQ ID NO: 402468 - DNA, 25 bp, Homo sapien
ataatccaggggattcagagaccat

SEQ ID NO: 402469 - DNA, 25 bp, Homo sapien
gagtagcaatccacacacggtgcag

SEQ ID NO: 402470 - DNA, 25 bp, Homo sapien
tgctgagtagcaatccacacacggt

SEQ ID NO: 402471 - DNA, 25 bp, Homo sapien
aatccacacacggtgcagtatttat

SEQ ID NO: 402472 - DNA, 25 bp, Homo sapien
gctgagtgctgagtagcaatccaca

SEQ ID NO: 402473 - DNA, 25 bp, Homo sapien
agtactctgactttcttcatgaata

SEQ ID NO: 402474 - DNA, 25 bp, Homo sapien
acatggctgaagacctagcattgca

SEQ ID NO: 402475 - DNA, 25 bp, Homo sapien
tgcatctgcaacaagtactctgact

SEQ ID NO: 402476 - DNA, 25 bp, Homo sapien
cttctgtttctatagcacatggctg

SEQ ID NO: 402477 - DNA, 25 bp, Homo sapien
gaaccttctagagatccaacaaagc

SEQ ID NO: 402478 - DNA, 25 bp, Homo sapien
tctagagatccaacaaagccccaag

SEQ ID NO: 402479 - DNA, 25 bp, Homo sapien
agcacttctggcctaccaagaatgg

SEQ ID NO: 402480 - DNA, 25 bp, Homo sapien
cttctagagatccaacaaagcccca

SEQ ID NO: 402481 - DNA, 25 bp, Homo sapien
tcgccttcttgcacacaccgtaggg

SEQ ID NO: 402482 - DNA, 25 bp, Homo sapien
tatctcttgtggcaccctgactcgc

SEQ ID NO: 402483 - DNA, 25 bp, Homo sapien
ggaaaaccttggatcttgcatgatg

SEQ ID NO: 402484 - DNA, 25 bp, Homo sapien
tgcacacaccgtagggaaaaccttg

SEQ ID NO: 402485 - DNA, 25 bp, Homo sapien
aatgaggtttgacatttgactacca

SEQ ID NO: 402486 - DNA, 25 bp, Homo sapien
catggcatatgtgtctttctccacc

SEQ ID NO: 402487 - DNA, 25 bp, Homo sapien
cattgagcaacctggcctgagtttg

SEQ ID NO: 402488 - DNA, 25 bp, Homo sapien
ccaggtgagttgcacattgtttcca

SEQ ID NO: 402489 - DNA, 25 bp, Homo sapien
taagccataatgtgaccgactgtct

SEQ ID NO: 402490 - DNA, 25 bp, Homo sapien
tctgagaatgcatggcaagtatgct

SEQ ID NO: 402491 - DNA, 25 bp, Homo sapien
gaaatatggagtgttgggtcccatc

SEQ ID NO: 402492 - DNA, 25 bp, Homo sapien
tgtttgcagtgtaatatccacctag

SEQ ID NO: 402493 - DNA, 25 bp, Homo sapien
gtattctcgatgagacttgacctca

SEQ ID NO: 402494 - DNA, 25 bp, Homo sapien
catactggatattcagcaaagggcc

SEQ ID NO: 402495 - DNA, 25 bp, Homo sapien
cacaggcaacttcttaccacaaatg

SEQ ID NO: 402496 - DNA, 25 bp, Homo sapien
gagcccagcaatatcttcagtgtct

SEQ ID NO: 402497 - DNA, 25 bp, Homo sapien
ctacaatggtgagaatttttagaca

SEQ ID NO: 402498 - DNA, 25 bp, Homo sapien
tacaatggtgagaatttttagacac

SEQ ID NO: 402499 - DNA, 25 bp, Homo sapien
tatagataagtctatggcggtcccc

SEQ ID NO: 402500 - DNA, 25 bp, Homo sapien
gaatatagataagtctatggcggtc

SEQ ID NO: 402501 - DNA, 25 bp, Homo sapien
atgaatatagataagtctatggcgg

SEQ ID NO: 402502 - DNA, 25 bp, Homo sapien
agataagtctatggcggtcccctgc

SEQ ID NO: 402503 - DNA, 25 bp, Homo sapien
gaactggcccaggtaaaggagcaac

SEQ ID NO: 402504 - DNA, 25 bp, Homo sapien
ggaaatccatcacttctgtagtaag

SEQ ID NO: 402505 - DNA, 25 bp, Homo sapien
tctcttgtacctaagtcccacaggg

SEQ ID NO: 402506 - DNA, 25 bp, Homo sapien
tctcagcaaggagtatgagaagccc

SEQ ID NO: 402507 - DNA, 25 bp, Homo sapien
taatatagactacaagaaattagct

SEQ ID NO: 402508 - DNA, 25 bp, Homo sapien
gactacaagaaattagcttattaaa

SEQ ID NO: 402509 - DNA, 25 bp, Homo sapien
tctggagcacgtgtgcataacgtgc

SEQ ID NO: 402510 - DNA, 25 bp, Homo sapien
tatataatactttgagttctggagc

SEQ ID NO: 402511 - DNA, 25 bp, Homo sapien
cgtggtcacactatgtgctgctctg

SEQ ID NO: 402512 - DNA, 25 bp, Homo sapien
ttatgcagtttggttgacattcagg

SEQ ID NO: 402513 - DNA, 25 bp, Homo sapien
ttggttgacattcaggtctccagta

SEQ ID NO: 402514 - DNA, 25 bp, Homo sapien
tctttggcctttcgtggtcacacta

SEQ ID NO: 402515 - DNA, 25 bp, Homo sapien
cagtatagtggttaagcattgcctt

SEQ ID NO: 402516 - DNA, 25 bp, Homo sapien
ggttaggttctaatgaggcctctcc

SEQ ID NO: 402517 - DNA, 25 bp, Homo sapien
cattcttatgacagagggcatgaca

SEQ ID NO: 402518 - DNA, 25 bp, Homo sapien
ccatgatcatggtgcagggttaggt

SEQ ID NO: 402519 - DNA, 25 bp, Homo sapien
ttagtaggtagaaacatgggcttaa

SEQ ID NO: 402520 - DNA, 25 bp, Homo sapien
gcagcggttcatgcttgctatccca

SEQ ID NO: 402521 - DNA, 25 bp, Homo sapien
taaacctcctaatacaactagctcc

SEQ ID NO: 402522 - DNA, 25 bp, Homo sapien
gaattgacagcatgattaagtgcaa

SEQ ID NO: 402523 - DNA, 25 bp, Homo sapien
taataaagacgatagaacatgcctc

SEQ ID NO: 402524 - DNA, 25 bp, Homo sapien
gatagaacatgcctctataacctag

SEQ ID NO: 402525 - DNA, 25 bp, Homo sapien
taaagacgatagaacatgcctctat

SEQ ID NO: 402526 - DNA, 25 bp, Homo sapien
gaacatgcctctataacctagcaag

SEQ ID NO: 402527 - DNA, 25 bp, Homo sapien
gctcagtgccaagacagaatgcctc

SEQ ID NO: 402528 - DNA, 25 bp, Homo sapien
cacttggagcactcatggaactagc

SEQ ID NO: 402529 - DNA, 25 bp, Homo sapien
catagtttcgatgccttggagccac

SEQ ID NO: 402530 - DNA, 25 bp, Homo sapien
tacttccttgattggtgtgcccaca

SEQ ID NO: 402531 - DNA, 25 bp, Homo sapien
gagcaaaactggaggcctcaaactt

SEQ ID NO: 402532 - DNA, 25 bp, Homo sapien
ctttgacaggatgccaagagtacac

SEQ ID NO: 402533 - DNA, 25 bp, Homo sapien
taatcaaccgagtacaaaagcaacc

SEQ ID NO: 402534 - DNA, 25 bp, Homo sapien
aagagatacaaatgaccgacaggca

SEQ ID NO: 402535 - DNA, 25 bp, Homo sapien
attagaaacaactggtcgggagcgg

SEQ ID NO: 402536 - DNA, 25 bp, Homo sapien
gaaatacgccagtacaagaaagaca

SEQ ID NO: 402537 - DNA, 25 bp, Homo sapien
caggacatggaagatatttgccctt

SEQ ID NO: 402538 - DNA, 25 bp, Homo sapien
atttgcccttccgtgttcattgcag

SEQ ID NO: 402539 - DNA, 25 bp, Homo sapien
tgaaggaatgtccaaagttgtctgg

SEQ ID NO: 402540 - DNA, 25 bp, Homo sapien
tattgtcagacaacttgaggacctc

SEQ ID NO: 402541 - DNA, 25 bp, Homo sapien
taaaactatgacttgctcacatgcc

SEQ ID NO: 402542 - DNA, 25 bp, Homo sapien
tacttttcccacatgaccgtggcaa

SEQ ID NO: 402543 - DNA, 25 bp, Homo sapien
aatagcagccatcagtcacaaaccg

SEQ ID NO: 402544 - DNA, 25 bp, Homo sapien
aaccgcacctcttgtattatctgca

SEQ ID NO: 402545 - DNA, 25 bp, Homo sapien
gcctgtcttccaaagataacacttt

SEQ ID NO: 402546 - DNA, 25 bp, Homo sapien
tgtcccaaaggatgtcttgcctgtc

SEQ ID NO: 402547 - DNA, 25 bp, Homo sapien
catgactgtaaactccctgaagccc

SEQ ID NO: 402548 - DNA, 25 bp, Homo sapien
ccatggtaacaagtgagttctcgct

SEQ ID NO: 402549 - DNA, 25 bp, Homo sapien
ttggctgttagggaaacgacaaagc

SEQ ID NO: 402550 - DNA, 25 bp, Homo sapien
tcttgtacagcccatagaaacatga

SEQ ID NO: 402551 - DNA, 25 bp, Homo sapien
ggctaatcatagatattgacacact

SEQ ID NO: 402552 - DNA, 25 bp, Homo sapien
caatggcacaatgagatccgatggt

SEQ ID NO: 402553 - DNA, 25 bp, Homo sapien
gagaataaactaatacagtactcaa

SEQ ID NO: 402554 - DNA, 25 bp, Homo sapien
taaaagtttatatggagtccattcc

SEQ ID NO: 402555 - DNA, 25 bp, Homo sapien
tatcccacgtcttttgcctgaaatg

SEQ ID NO: 402556 - DNA, 25 bp, Homo sapien
gaataataagcccttgagagaaggg

SEQ ID NO: 402557 - DNA, 25 bp, Homo sapien
taaggtccgtccacatgacctactt

SEQ ID NO: 402558 - DNA, 25 bp, Homo sapien
tcctttgaatgccaatagcccttat

SEQ ID NO: 402559 - DNA, 25 bp, Homo sapien
tatttctagagacctgaacgtggca

SEQ ID NO: 402560 - DNA, 25 bp, Homo sapien
ggctgatgattcagaccagaaacaa

SEQ ID NO: 402561 - DNA, 25 bp, Homo sapien
tccataagaatgataggtcatgtcc

SEQ ID NO: 402562 - DNA, 25 bp, Homo sapien
caagcagctgagctcatcattcaat

SEQ ID NO: 402563 - DNA, 25 bp, Homo sapien
tcctgccttctagctgggcaattag

SEQ ID NO: 402564 - DNA, 25 bp, Homo sapien
ctttctctcattggcaaatagggat

SEQ ID NO: 402565 - DNA, 25 bp, Homo sapien
cctcaaacacttacgtgttaataca

SEQ ID NO: 402566 - DNA, 25 bp, Homo sapien
cagtgccaggtacataggatgtgct

SEQ ID NO: 402567 - DNA, 25 bp, Homo sapien
tcctgatgggatgagacctatttca

SEQ ID NO: 402568 - DNA, 25 bp, Homo sapien
tcagtgaagcgttctttttaaagta

SEQ ID NO: 402569 - DNA, 25 bp, Homo sapien
tccaccggggtgaatagtcttcaac

SEQ ID NO: 402570 - DNA, 25 bp, Homo sapien
tgaaagtccccaacatgatgagtcc

SEQ ID NO: 402571 - DNA, 25 bp, Homo sapien
ctacaaaaaggctatgagtgctcca

SEQ ID NO: 402572 - DNA, 25 bp, Homo sapien
tctaatgaacaagggagttccagtc

SEQ ID NO: 402573 - DNA, 25 bp, Homo sapien
tgagcactagccgtgtcctaagaac

SEQ ID NO: 402574 - DNA, 25 bp, Homo sapien
gaagttacccactctacgaatcagc

SEQ ID NO: 402575 - DNA, 25 bp, Homo sapien
tattttggaatcctaccttgaggag

SEQ ID NO: 402576 - DNA, 25 bp, Homo sapien
gatgctacattacccatacgaggaa

SEQ ID NO: 402577 - DNA, 25 bp, Homo sapien
caggacctctctagctaaatgaaaa

SEQ ID NO: 402578 - DNA, 25 bp, Homo sapien
tatgcaaacatagatgagggcttca

SEQ ID NO: 402579 - DNA, 25 bp, Homo sapien
aagctttgttattggcactcacgta

SEQ ID NO: 402580 - DNA, 25 bp, Homo sapien
tactgaacagtcttgcttgaaaaaa

SEQ ID NO: 402581 - DNA, 25 bp, Homo sapien
catggctttaagcagaccccaaagg

SEQ ID NO: 402582 - DNA, 25 bp, Homo sapien
gattattcttcagtccagttccctg

SEQ ID NO: 402583 - DNA, 25 bp, Homo sapien
tttctaaactcaaaggcacctccag

SEQ ID NO: 402584 - DNA, 25 bp, Homo sapien
gtatcaagtcttccctgtggagcca

SEQ ID NO: 402585 - DNA, 25 bp, Homo sapien
cattgccacttagggagaatctctg

SEQ ID NO: 402586 - DNA, 25 bp, Homo sapien
cagatgacttgggtattacgggcta

SEQ ID NO: 402587 - DNA, 25 bp, Homo sapien
tcatgcgtcttcttcctcttgtaca

SEQ ID NO: 402588 - DNA, 25 bp, Homo sapien
catgcgtcttcttcctcttgtacaa

SEQ ID NO: 402589 - DNA, 25 bp, Homo sapien
tcttcctcttgtacaaactgaaaaa

SEQ ID NO: 402590 - DNA, 25 bp, Homo sapien
gtcttcttcctcttgtacaaactga

SEQ ID NO: 402591 - DNA, 25 bp, Homo sapien
gatgaagtttcagatgatacagcca

SEQ ID NO: 402592 - DNA, 25 bp, Homo sapien
tgtgtagtcatctaggaaaccacca

SEQ ID NO: 402593 - DNA, 25 bp, Homo sapien
ctgcttttccaatcagaggcaactc

SEQ ID NO: 402594 - DNA, 25 bp, Homo sapien
caactcaactgtgtagtcatctagg

SEQ ID NO: 402595 - DNA, 25 bp, Homo sapien
aggctgaagcctggtctggcctatg

SEQ ID NO: 402596 - DNA, 25 bp, Homo sapien
cctatggtccctggggttggagaat

SEQ ID NO: 402597 - DNA, 25 bp, Homo sapien
cctggtctggcctatggtccctggg

SEQ ID NO: 402598 - DNA, 25 bp, Homo sapien
gaagcctggtctggcctatggtccc

SEQ ID NO: 402599 - DNA, 25 bp, Homo sapien
cctgccactgccaaagtactgggct

SEQ ID NO: 402600 - DNA, 25 bp, Homo sapien
actcccttctctaggtcctgctgtg

SEQ ID NO: 402601 - DNA, 25 bp, Homo sapien
tgccaaagtactgggctcagaatcc

SEQ ID NO: 402602 - DNA, 25 bp, Homo sapien
tactgggctcagaatcctgactctc

SEQ ID NO: 402603 - DNA, 25 bp, Homo sapien
gggcttcagcccctatctggactct

SEQ ID NO: 402604 - DNA, 25 bp, Homo sapien
ggactctaattccaccttggtgtgt

SEQ ID NO: 402605 - DNA, 25 bp, Homo sapien
ttcagatgaactaggtgagggactc

SEQ ID NO: 402606 - DNA, 25 bp, Homo sapien
tgcttcatcactggagccttcagat

SEQ ID NO: 402607 - DNA, 25 bp, Homo sapien
ctttggacgcattcctgacttcctg

SEQ ID NO: 402608 - DNA, 25 bp, Homo sapien
gatcaactcgaatagttcttccctt

SEQ ID NO: 402609 - DNA, 25 bp, Homo sapien
tctggccctcatagcaggtaaaaca

SEQ ID NO: 402610 - DNA, 25 bp, Homo sapien
acagaatcctttggacgcattcctg

SEQ ID NO: 402611 - DNA, 25 bp, Homo sapien
atgacatagcactgactctgatgaa

SEQ ID NO: 402612 - DNA, 25 bp, Homo sapien
tagcactgactctgatgaagttcat

SEQ ID NO: 402613 - DNA, 25 bp, Homo sapien
catagcactgactctgatgaagttc

SEQ ID NO: 402614 - DNA, 25 bp, Homo sapien
gagcccaatgacatagcactgactc

SEQ ID NO: 402615 - DNA, 25 bp, Homo sapien
ttagctggaactataagcatctgcc

SEQ ID NO: 402616 - DNA, 25 bp, Homo sapien
aacctccaccacccaacctcaagtg

SEQ ID NO: 402617 - DNA, 25 bp, Homo sapien
ttcaatttactgaatcatgattttt

SEQ ID NO: 402618 - DNA, 25 bp, Homo sapien
tctatttcaatttactgaatcatga

SEQ ID NO: 402619 - DNA, 25 bp, Homo sapien
ttgttccttcactccgccaatattt

SEQ ID NO: 402620 - DNA, 25 bp, Homo sapien
tctgcagcagaatcaagcaaatccc

SEQ ID NO: 402621 - DNA, 25 bp, Homo sapien
gcagcagaatcaagcaaatcccatt

SEQ ID NO: 402622 - DNA, 25 bp, Homo sapien
ccttcactccgccaatatttattgt

SEQ ID NO: 402623 - DNA, 25 bp, Homo sapien
tggtaccatgatctgtttaatcaac

SEQ ID NO: 402624 - DNA, 25 bp, Homo sapien
aaggagcttagttgtcactttgaca

SEQ ID NO: 402625 - DNA, 25 bp, Homo sapien
ttttaatgattgacagtaacagggt

SEQ ID NO: 402626 - DNA, 25 bp, Homo sapien
ccaagagctaagtggattgttgaag

SEQ ID NO: 402627 - DNA, 25 bp, Homo sapien
tctgccagcgtgatcctcggccaag

SEQ ID NO: 402628 - DNA, 25 bp, Homo sapien
cagcgtgatcctcggccaagtgctc

SEQ ID NO: 402629 - DNA, 25 bp, Homo sapien
tgccagcatgctcccccgccagcat

SEQ ID NO: 402630 - DNA, 25 bp, Homo sapien
gccagcgtgatcctcggccaagtgc

SEQ ID NO: 402631 - DNA, 25 bp, Homo sapien
cctccaccagcgtgctcctccactg

SEQ ID NO: 402632 - DNA, 25 bp, Homo sapien
cgccagcgtgctcatgcgccaggtg

SEQ ID NO: 402633 - DNA, 25 bp, Homo sapien
gtgctcatgcgccaggtgctccttc

SEQ ID NO: 402634 - DNA, 25 bp, Homo sapien
gtgctccttcgccagcgtgctcctc

SEQ ID NO: 402635 - DNA, 25 bp, Homo sapien
atgctcatccgccaggtgctccttt

SEQ ID NO: 402636 - DNA, 25 bp, Homo sapien
catttgtctttcctaaagaaattca

SEQ ID NO: 402637 - DNA, 25 bp, Homo sapien
ctgcatacacattatcataaactgt

SEQ ID NO: 402638 - DNA, 25 bp, Homo sapien
tatgttcctccaaaatccatttgtc

SEQ ID NO: 402639 - DNA, 25 bp, Homo sapien
aactgtatttcccatatgttcctcc

SEQ ID NO: 402640 - DNA, 25 bp, Homo sapien
cacgttgcagcaaggacattatttc

SEQ ID NO: 402641 - DNA, 25 bp, Homo sapien
gggtatgtggtctgctgttctgcat

SEQ ID NO: 402642 - DNA, 25 bp, Homo sapien
tcttcataatccactattgatgggc

SEQ ID NO: 402643 - DNA, 25 bp, Homo sapien
tatgtggtctgctgttctgcattaa

SEQ ID NO: 402644 - DNA, 25 bp, Homo sapien
gagaggctgtgtttacctagctcaa

SEQ ID NO: 402645 - DNA, 25 bp, Homo sapien
tatcatgcttacatctgactaaggg

SEQ ID NO: 402646 - DNA, 25 bp, Homo sapien
aaatttaggtgtcaatctctctcca

SEQ ID NO: 402647 - DNA, 25 bp, Homo sapien
tggttacagcacaccaagtgtttga

SEQ ID NO: 402648 - DNA, 25 bp, Homo sapien
aaaagttgaggctgattatgtctac

SEQ ID NO: 402649 - DNA, 25 bp, Homo sapien
taaatagttaccttgggcatacttc

SEQ ID NO: 402650 - DNA, 25 bp, Homo sapien
tgcagtaacacatcaacccctaatt

SEQ ID NO: 402651 - DNA, 25 bp, Homo sapien
acttctatagttaatgtccagtgag

SEQ ID NO: 402652 - DNA, 25 bp, Homo sapien
gttctcactctacgagttcacgtga

SEQ ID NO: 402653 - DNA, 25 bp, Homo sapien
gatgcacgtgccatgcttgcacaac

SEQ ID NO: 402654 - DNA, 25 bp, Homo sapien
tacgagttcacgtgatgtactggct

SEQ ID NO: 402655 - DNA, 25 bp, Homo sapien
tgaggcctcaccacaagccaaacag

SEQ ID NO: 402656 - DNA, 25 bp, Homo sapien
agttcatcttgatggcatcattggg

SEQ ID NO: 402657 - DNA, 25 bp, Homo sapien
gggctcactcatgcatctgctatca

SEQ ID NO: 402658 - DNA, 25 bp, Homo sapien
gggaaactcagctctctttcactgg

SEQ ID NO: 402659 - DNA, 25 bp, Homo sapien
tatcagctggctggttaactgtagt

SEQ ID NO: 402660 - DNA, 25 bp, Homo sapien
tgtggcctccccgaacatgagtaac

SEQ ID NO: 402661 - DNA, 25 bp, Homo sapien
ctttgatggtaactgaagctttcca

SEQ ID NO: 402662 - DNA, 25 bp, Homo sapien
tgacgggggcgacattgaacctgct

SEQ ID NO: 402663 - DNA, 25 bp, Homo sapien
ccattgcagcggtgctcctgacggg

SEQ ID NO: 402664 - DNA, 25 bp, Homo sapien
ttcatatctacatcttgaacctctc

SEQ ID NO: 402665 - DNA, 25 bp, Homo sapien
gctgctccagttcatatctacatct

SEQ ID NO: 402666 - DNA, 25 bp, Homo sapien
tcctgtagtatcaactaccacaaat

SEQ ID NO: 402667 - DNA, 25 bp, Homo sapien
agccatcctgtagtatcaactacca

SEQ ID NO: 402668 - DNA, 25 bp, Homo sapien
ggcgatatcctatcagttcagaata

SEQ ID NO: 402669 - DNA, 25 bp, Homo sapien
tatcctatcagttcagaatactcca

SEQ ID NO: 402670 - DNA, 25 bp, Homo sapien
tacctggcgatatcctatcagttca

SEQ ID NO: 402671 - DNA, 25 bp, Homo sapien
gaattcattacctggcgatatccta

SEQ ID NO: 402672 - DNA, 25 bp, Homo sapien
tcaacaggcagtgaccatgaatggg

SEQ ID NO: 402673 - DNA, 25 bp, Homo sapien
cagggcagtgcaaacaggcctccag

SEQ ID NO: 402674 - DNA, 25 bp, Homo sapien
aatgggatgtcctgcctccagggca

SEQ ID NO: 402675 - DNA, 25 bp, Homo sapien
gaccatgaatgggatgtcctgcctc

SEQ ID NO: 402676 - DNA, 25 bp, Homo sapien
caataaaggtgttagcaaacagcag

SEQ ID NO: 402677 - DNA, 25 bp, Homo sapien
aataaaggtgttagcaaacagcagg

SEQ ID NO: 402678 - DNA, 25 bp, Homo sapien
ggcaataaaggtgttagcaaacagc

SEQ ID NO: 402679 - DNA, 25 bp, Homo sapien
tgggagctgcctatccaagccttgg

SEQ ID NO: 402680 - DNA, 25 bp, Homo sapien
caagccttggtattaacagcatgtg

SEQ ID NO: 402681 - DNA, 25 bp, Homo sapien
catgctgtgtgttgtaccagtgcca

SEQ ID NO: 402682 - DNA, 25 bp, Homo sapien
tgactgagtccctatccaactgagg

SEQ ID NO: 402683 - DNA, 25 bp, Homo sapien
tctaggtaaatagtgttctcagtcc

SEQ ID NO: 402684 - DNA, 25 bp, Homo sapien
acagatcctctagacccttatgcaa

SEQ ID NO: 402685 - DNA, 25 bp, Homo sapien
taatctatggttgcttccagctcca

SEQ ID NO: 402686 - DNA, 25 bp, Homo sapien
taaggaagtcactcaaccaattggt

SEQ ID NO: 402687 - DNA, 25 bp, Homo sapien
tccatgtctagggaaggctggtttc

SEQ ID NO: 402688 - DNA, 25 bp, Homo sapien
ttccatgtctagggaaggctggttt

SEQ ID NO: 402689 - DNA, 25 bp, Homo sapien
gctggtttcctgatccatggatcat

SEQ ID NO: 402690 - DNA, 25 bp, Homo sapien
aaggctggtttcctgatccatggat

SEQ ID NO: 402691 - DNA, 25 bp, Homo sapien
tgtggtcagctctagagctccaagg

SEQ ID NO: 402692 - DNA, 25 bp, Homo sapien
accctgagtaccactatcctctgtg

SEQ ID NO: 402693 - DNA, 25 bp, Homo sapien
tgagtaccactatcctctgtggtca

SEQ ID NO: 402694 - DNA, 25 bp, Homo sapien
cctctctgagaatagtccaccctga

SEQ ID NO: 402695 - DNA, 25 bp, Homo sapien
tcccaagtgttagttaagaatgtga

SEQ ID NO: 402696 - DNA, 25 bp, Homo sapien
tagccacttctgtctaaagaagcat

SEQ ID NO: 402697 - DNA, 25 bp, Homo sapien
gaaatttaaggtgtctgtgcttgta

SEQ ID NO: 402698 - DNA, 25 bp, Homo sapien
tgtctgtgcttgtagccacttctgt

SEQ ID NO: 402699 - DNA, 25 bp, Homo sapien
taaagaagcatgttgtgtgaaaggt

SEQ ID NO: 402700 - DNA, 25 bp, Homo sapien
gccatgaaaaaatcaggataggtgc

SEQ ID NO: 402701 - DNA, 25 bp, Homo sapien
tgaagccatgaaaaaatcaggatag

SEQ ID NO: 402702 - DNA, 25 bp, Homo sapien
gaaaaaatcaggataggtgcagcca

SEQ ID NO: 402703 - DNA, 25 bp, Homo sapien
ctccctcttaggaatcagttctaag

SEQ ID NO: 402704 - DNA, 25 bp, Homo sapien
gtccccagtgctacacagcaatgtg

SEQ ID NO: 402705 - DNA, 25 bp, Homo sapien
tccccagtgctacacagcaatgtgg

SEQ ID NO: 402706 - DNA, 25 bp, Homo sapien
agcatcccaagtagcgtgaaccacc

SEQ ID NO: 402707 - DNA, 25 bp, Homo sapien
gcatcccaagtagcgtgaaccacca

SEQ ID NO: 402708 - DNA, 25 bp, Homo sapien
gcctgtacttactattaacagtgag

SEQ ID NO: 402709 - DNA, 25 bp, Homo sapien
gcctggcctgtacttactattaaca

SEQ ID NO: 402710 - DNA, 25 bp, Homo sapien
cttggtgataatggccaggggctcc

SEQ ID NO: 402711 - DNA, 25 bp, Homo sapien
acttgagtttattaataacttggtg

SEQ ID NO: 402712 - DNA, 25 bp, Homo sapien
ggccaggggctccattaagttgtac

SEQ ID NO: 402713 - DNA, 25 bp, Homo sapien
tattaataacttggtgataatggcc

SEQ ID NO: 402714 - DNA, 25 bp, Homo sapien
accacactgccaccaacccacttgg

SEQ ID NO: 402715 - DNA, 25 bp, Homo sapien
tgactgtggctcttcaccacactgc

SEQ ID NO: 402716 - DNA, 25 bp, Homo sapien
ctgtgactgtggctcttcaccacac

SEQ ID NO: 402717 - DNA, 25 bp, Homo sapien
tgccaccaacccacttggccttcat

SEQ ID NO: 402718 - DNA, 25 bp, Homo sapien
ctagttacacactgaatcatgggag

SEQ ID NO: 402719 - DNA, 25 bp, Homo sapien
tgtttctagtgcactaacttgccag

SEQ ID NO: 402720 - DNA, 25 bp, Homo sapien
ggccataggctgattgtcactttga

SEQ ID NO: 402721 - DNA, 25 bp, Homo sapien
gcaatgtgttttacgtttatggaaa

SEQ ID NO: 402722 - DNA, 25 bp, Homo sapien
tactgagcagatcgcatcaaatttg

SEQ ID NO: 402723 - DNA, 25 bp, Homo sapien
tttaagacccttcgaatcaaagcac

SEQ ID NO: 402724 - DNA, 25 bp, Homo sapien
taaaccacagacgtcatgtccagaa

SEQ ID NO: 402725 - DNA, 25 bp, Homo sapien
gaatggtaatgtgcctatattccag

SEQ ID NO: 402726 - DNA, 25 bp, Homo sapien
tccaggtccacttagcagagattct

SEQ ID NO: 402727 - DNA, 25 bp, Homo sapien
aggaatcctggtcataacactcgca

SEQ ID NO: 402728 - DNA, 25 bp, Homo sapien
tcgcaactgaaaccccatgtggctt

SEQ ID NO: 402729 - DNA, 25 bp, Homo sapien
tagaatatattcaactggccagtgg

SEQ ID NO: 402730 - DNA, 25 bp, Homo sapien
taaagtcttcggacactggtaaggc

SEQ ID NO: 402731 - DNA, 25 bp, Homo sapien
tccatttgcgctgtgtgggcgagaa

SEQ ID NO: 402732 - DNA, 25 bp, Homo sapien
ttaatgggtcctttctcactgggca

SEQ ID NO: 402733 - DNA, 25 bp, Homo sapien
catcattgtgtactccctgagggct

SEQ ID NO: 402734 - DNA, 25 bp, Homo sapien
ttgatgatgttcttgcctgaccatt

SEQ ID NO: 402735 - DNA, 25 bp, Homo sapien
tagaatcctggtgcacatcagagcc

SEQ ID NO: 402736 - DNA, 25 bp, Homo sapien
caaagaggccagtaatgtgctatcc

SEQ ID NO: 402737 - DNA, 25 bp, Homo sapien
tccttttgggagctggtaactgcca

SEQ ID NO: 402738 - DNA, 25 bp, Homo sapien
gactttttgtcaacggcagtacctg

SEQ ID NO: 402739 - DNA, 25 bp, Homo sapien
tgtagcagtaagcagatagaatcct

SEQ ID NO: 402740 - DNA, 25 bp, Homo sapien
taaatgcagtctgaccacagtgctg

SEQ ID NO: 402741 - DNA, 25 bp, Homo sapien
tatcaccttccatcgcaatcagaga

SEQ ID NO: 402742 - DNA, 25 bp, Homo sapien
gatcaacttctacgcaaggaggagg

SEQ ID NO: 402743 - DNA, 25 bp, Homo sapien
gagtatatatctgaaaaggacaagg

SEQ ID NO: 402744 - DNA, 25 bp, Homo sapien
tatctgaaaaggacaaggcgctttg

SEQ ID NO: 402745 - DNA, 25 bp, Homo sapien
ttatcatctgggtccaaaagacatt

SEQ ID NO: 402746 - DNA, 25 bp, Homo sapien
tcatttatcatctgggtccaaaaga

SEQ ID NO: 402747 - DNA, 25 bp, Homo sapien
caaccaagtgtttgaagtactaatc

SEQ ID NO: 402748 - DNA, 25 bp, Homo sapien
tgttgtccaggtttagggcacgttc

SEQ ID NO: 402749 - DNA, 25 bp, Homo sapien
aggctttagaggatgactccggtgt

SEQ ID NO: 402750 - DNA, 25 bp, Homo sapien
cactcatagtcagatacagacccag

SEQ ID NO: 402751 - DNA, 25 bp, Homo sapien
cctcagtcctttttattgcctgaga

SEQ ID NO: 402752 - DNA, 25 bp, Homo sapien
tattattctatctgctacggtgatg

SEQ ID NO: 402753 - DNA, 25 bp, Homo sapien
gaactgtgcccatatcacagcatac

SEQ ID NO: 402754 - DNA, 25 bp, Homo sapien
ctcttgcaccagttaaccaaattgc

SEQ ID NO: 402755 - DNA, 25 bp, Homo sapien
tattcatttgaactaacgacttaaa

SEQ ID NO: 402756 - DNA, 25 bp, Homo sapien
taagatttagaaacctagtgttcta

SEQ ID NO: 402757 - DNA, 25 bp, Homo sapien
ccagaaaagatctcactttgctgtg

SEQ ID NO: 402758 - DNA, 25 bp, Homo sapien
gaaggctaaaaagtcatgtgggtcc

SEQ ID NO: 402759 - DNA, 25 bp, Homo sapien
aatactaggatagagttgtctttga

SEQ ID NO: 402760 - DNA, 25 bp, Homo sapien
agttgtctttgattctcctcacggg

SEQ ID NO: 402761 - DNA, 25 bp, Homo sapien
ctcctcacggggttggttaatacat

SEQ ID NO: 402762 - DNA, 25 bp, Homo sapien
ccttcctcgaatgaaatactaggat

SEQ ID NO: 402763 - DNA, 25 bp, Homo sapien
tgtccaagccctagatgatgagcct

SEQ ID NO: 402764 - DNA, 25 bp, Homo sapien
ccaagtttgggtcagactagggctg

SEQ ID NO: 402765 - DNA, 25 bp, Homo sapien
ttaagcaatgcaaatactaatgccc

SEQ ID NO: 402766 - DNA, 25 bp, Homo sapien
gtcttactcatgaacattgctggca

SEQ ID NO: 402767 - DNA, 25 bp, Homo sapien
cagcctccggaatagacggggacta

SEQ ID NO: 402768 - DNA, 25 bp, Homo sapien
gacggggactatagttgcgtgccac

SEQ ID NO: 402769 - DNA, 25 bp, Homo sapien
attctaaatattgtacacagcccaa

SEQ ID NO: 402770 - DNA, 25 bp, Homo sapien
taaatattgtacacagcccaaagga

SEQ ID NO: 402771 - DNA, 25 bp, Homo sapien
gagtcctgcataactagcaaagtgg

SEQ ID NO: 402772 - DNA, 25 bp, Homo sapien
cattatgaagtagaactggctgtcc

SEQ ID NO: 402773 - DNA, 25 bp, Homo sapien
taggaatactcctaggaagtgacac

SEQ ID NO: 402774 - DNA, 25 bp, Homo sapien
taaaagggttaagtggagtcctgca

SEQ ID NO: 402775 - DNA, 25 bp, Homo sapien
taatgcccaggtcccgaccaataca

SEQ ID NO: 402776 - DNA, 25 bp, Homo sapien
gagggcggtatgtcttctgctgaga

SEQ ID NO: 402777 - DNA, 25 bp, Homo sapien
tttgccttgactccctaatgcccag

SEQ ID NO: 402778 - DNA, 25 bp, Homo sapien
gaccgtaaggctttcatagaatact

SEQ ID NO: 402779 - DNA, 25 bp, Homo sapien
ccttgtcctctaaatgacctaaagc

SEQ ID NO: 402780 - DNA, 25 bp, Homo sapien
gtcctcatctataatccaccaccat

SEQ ID NO: 402781 - DNA, 25 bp, Homo sapien
aaggtcgaacgggtcagcgtgtcct

SEQ ID NO: 402782 - DNA, 25 bp, Homo sapien
ccctcaagtagcaggaggcccctcc

SEQ ID NO: 402783 - DNA, 25 bp, Homo sapien
gtcacagggcgggttagtgtgacct

SEQ ID NO: 402784 - DNA, 25 bp, Homo sapien
gaatgtcacagggcgggttagtgtg

SEQ ID NO: 402785 - DNA, 25 bp, Homo sapien
tgttgaatgtcacagggcgggttag

SEQ ID NO: 402786 - DNA, 25 bp, Homo sapien
tcacagggcgggttagtgtgacctt

SEQ ID NO: 402787 - DNA, 25 bp, Homo sapien
gcaaccccgactgccgacttaagtg

SEQ ID NO: 402788 - DNA, 25 bp, Homo sapien
aaccccgactgccgacttaagtgat

SEQ ID NO: 402789 - DNA, 25 bp, Homo sapien
cccgactgccgacttaagtgattct

SEQ ID NO: 402790 - DNA, 25 bp, Homo sapien
accccgactgccgacttaagtgatt

SEQ ID NO: 402791 - DNA, 25 bp, Homo sapien
gattccctgtcctccttcagtcaag

SEQ ID NO: 402792 - DNA, 25 bp, Homo sapien
tgtcctccttcagtcaagtgtgcat

SEQ ID NO: 402793 - DNA, 25 bp, Homo sapien
tgagaaggctgttgaaaagtagctc

SEQ ID NO: 402794 - DNA, 25 bp, Homo sapien
gatgtcatccggagtcttcagattc

SEQ ID NO: 402795 - DNA, 25 bp, Homo sapien
gactgggtagggtgcatagttcaca

SEQ ID NO: 402796 - DNA, 25 bp, Homo sapien
tgatctcaccagagagtctgcagag

SEQ ID NO: 402797 - DNA, 25 bp, Homo sapien
gaagaataaccgaaatacagcaggc

SEQ ID NO: 402798 - DNA, 25 bp, Homo sapien
tggtgagctatgctaaccccactgc

SEQ ID NO: 402799 - DNA, 25 bp, Homo sapien
gaaagatggtacttcagcatttgac

SEQ ID NO: 402800 - DNA, 25 bp, Homo sapien
catgaacttgactaaagcactgtct

SEQ ID NO: 402801 - DNA, 25 bp, Homo sapien
gagctgtgcgtcaaaacacacacca

SEQ ID NO: 402802 - DNA, 25 bp, Homo sapien
gatgactagtcagaattcagagagc

SEQ ID NO: 402803 - DNA, 25 bp, Homo sapien
cagttctgaaatagctcacaatcca

SEQ ID NO: 402804 - DNA, 25 bp, Homo sapien
tctgaaatagctcacaatccaaaca

SEQ ID NO: 402805 - DNA, 25 bp, Homo sapien
ctgaaatagctcacaatccaaacac

SEQ ID NO: 402806 - DNA, 25 bp, Homo sapien
gttctgaaatagctcacaatccaaa

SEQ ID NO: 402807 - DNA, 25 bp, Homo sapien
aaatccaaagcaccctagaaaatat

SEQ ID NO: 402808 - DNA, 25 bp, Homo sapien
gtttcaatttgactatacctttcag

SEQ ID NO: 402809 - DNA, 25 bp, Homo sapien
tacctttcagtgtatagggaaccac

SEQ ID NO: 402810 - DNA, 25 bp, Homo sapien
acaaaacacagatgtttcctttgca

SEQ ID NO: 402811 - DNA, 25 bp, Homo sapien
aatgtctggcacaaaacggttgccc

SEQ ID NO: 402812 - DNA, 25 bp, Homo sapien
tactgtcaacaacggcatatactgc

SEQ ID NO: 402813 - DNA, 25 bp, Homo sapien
tgaaatttgccatgtgaccacaggc

SEQ ID NO: 402814 - DNA, 25 bp, Homo sapien
caatgcaggtagcaggacatcagcg

SEQ ID NO: 402815 - DNA, 25 bp, Homo sapien
tatttgccccattatcttcaagaac

SEQ ID NO: 402816 - DNA, 25 bp, Homo sapien
caatcacctttctagccaaaactgc

SEQ ID NO: 402817 - DNA, 25 bp, Homo sapien
ccaaaactgcaacatatgctggagt

SEQ ID NO: 402818 - DNA, 25 bp, Homo sapien
gactcataatttgtttagcaggtaa

SEQ ID NO: 402819 - DNA, 25 bp, Homo sapien
gattccatgctggtacccaattttg

SEQ ID NO: 402820 - DNA, 25 bp, Homo sapien
tccctgttgatgaagacccttgtaa

SEQ ID NO: 402821 - DNA, 25 bp, Homo sapien
tttgcaaagaaaccctgataagact

SEQ ID NO: 402822 - DNA, 25 bp, Homo sapien
caaactttagcactcagaacacggt

SEQ ID NO: 402823 - DNA, 25 bp, Homo sapien
ctgtcatgggctgcgttctctctta

SEQ ID NO: 402824 - DNA, 25 bp, Homo sapien
tttctgtagttgtaatgctctcctg

SEQ ID NO: 402825 - DNA, 25 bp, Homo sapien
ctgtagttgtaatgctctcctgtat

SEQ ID NO: 402826 - DNA, 25 bp, Homo sapien
gctgcgttctctcttaacttctgaa

SEQ ID NO: 402827 - DNA, 25 bp, Homo sapien
cggcgagctcttccctccgaccagc

SEQ ID NO: 402828 - DNA, 25 bp, Homo sapien
cgaccagcggcgctcacggcgcagc

SEQ ID NO: 402829 - DNA, 25 bp, Homo sapien
gacgcgaggccacgggcggacgggc

SEQ ID NO: 402830 - DNA, 25 bp, Homo sapien
ctccgtcaggctcggtccgcgaagg

SEQ ID NO: 402831 - DNA, 25 bp, Homo sapien
cgccgagtccgccgcggcccagtcc

SEQ ID NO: 402832 - DNA, 25 bp, Homo sapien
gagtccgccgcggcccagtccctcc

SEQ ID NO: 402833 - DNA, 25 bp, Homo sapien
ccgccgagtccgccgcggcccagtc

SEQ ID NO: 402834 - DNA, 25 bp, Homo sapien
ccgagtccgccgcggcccagtccct

SEQ ID NO: 402835 - DNA, 25 bp, Homo sapien
taagttctatgggacatattagcaa

SEQ ID NO: 402836 - DNA, 25 bp, Homo sapien
tagaataacttgatggctgaagctc

SEQ ID NO: 402837 - DNA, 25 bp, Homo sapien
catgtttaatcagaatcccgggctc

SEQ ID NO: 402838 - DNA, 25 bp, Homo sapien
aatagtcagataataatcagtgccc

SEQ ID NO: 402839 - DNA, 25 bp, Homo sapien
tgtgagggcaattgttcatctgaac

SEQ ID NO: 402840 - DNA, 25 bp, Homo sapien
cagtggttctaagcgcttttcaagc

SEQ ID NO: 402841 - DNA, 25 bp, Homo sapien
gattttcaacaggtcaatcagtggt

SEQ ID NO: 402842 - DNA, 25 bp, Homo sapien
atcttgtttacttgtctgattgttc

SEQ ID NO: 402843 - DNA, 25 bp, Homo sapien
ggcatgtcatcacaagtttgtggga

SEQ ID NO: 402844 - DNA, 25 bp, Homo sapien
gcaccaggatgcttgcttgtctcca

SEQ ID NO: 402845 - DNA, 25 bp, Homo sapien
tgcttgtctccactgcgtcctggca

SEQ ID NO: 402846 - DNA, 25 bp, Homo sapien
ggcaggccattattctacagactga

SEQ ID NO: 402847 - DNA, 25 bp, Homo sapien
acattaatgttgttggaaattatcc

SEQ ID NO: 402848 - DNA, 25 bp, Homo sapien
tatttcactaaatttgacattaatg

SEQ ID NO: 402849 - DNA, 25 bp, Homo sapien
attatcctcttggttaattctggtt

SEQ ID NO: 402850 - DNA, 25 bp, Homo sapien
gaaattatcctcttggttaattctg

SEQ ID NO: 402851 - DNA, 25 bp, Homo sapien
tacaggtctcctgcatctacggccg

SEQ ID NO: 402852 - DNA, 25 bp, Homo sapien
catctacggccgaatagataggtgg

SEQ ID NO: 402853 - DNA, 25 bp, Homo sapien
gctgctaatgacgttgagtgttcca

SEQ ID NO: 402854 - DNA, 25 bp, Homo sapien
cacgaagagtgatatgtaaagatct

SEQ ID NO: 402855 - DNA, 25 bp, Homo sapien
agaaacacaatcctcctcacacttg

SEQ ID NO: 402856 - DNA, 25 bp, Homo sapien
tgctagaactagcaatcgcattttt

SEQ ID NO: 402857 - DNA, 25 bp, Homo sapien
ccaatgacaaattggttctgtgtct

SEQ ID NO: 402858 - DNA, 25 bp, Homo sapien
tgtctgtacagtctcctatagctac

SEQ ID NO: 402859 - DNA, 25 bp, Homo sapien
cttcactgccactcttgccatgact

SEQ ID NO: 402860 - DNA, 25 bp, Homo sapien
tcactgccactcttgccatgacttt

SEQ ID NO: 402861 - DNA, 25 bp, Homo sapien
ctgatgggctctgaaactgcagatt

SEQ ID NO: 402862 - DNA, 25 bp, Homo sapien
cagattctccctcgccagtccatct

SEQ ID NO: 402863 - DNA, 25 bp, Homo sapien
acagaatgtcataacagtacatgtt

SEQ ID NO: 402864 - DNA, 25 bp, Homo sapien
tgtctacctagaggtttagttaaga

SEQ ID NO: 402865 - DNA, 25 bp, Homo sapien
tagaggtttagttaagaggacttca

SEQ ID NO: 402866 - DNA, 25 bp, Homo sapien
cacagaatgtcataacagtacatgt

SEQ ID NO: 402867 - DNA, 25 bp, Homo sapien
agactctgtcatcccgctccgtttt

SEQ ID NO: 402868 - DNA, 25 bp, Homo sapien
ttcacattccctggaacgtgcagac

SEQ ID NO: 402869 - DNA, 25 bp, Homo sapien
tctttgactccaggtgttcgtcccc

SEQ ID NO: 402870 - DNA, 25 bp, Homo sapien
ccgttttccacgttctgctctttga

SEQ ID NO: 402871 - DNA, 25 bp, Homo sapien
tccccaataggtagttgctcccttc

SEQ ID NO: 402872 - DNA, 25 bp, Homo sapien
catggcacgttattgagacctgtac

SEQ ID NO: 402873 - DNA, 25 bp, Homo sapien
tctgagttccaaattccccaatagg

SEQ ID NO: 402874 - DNA, 25 bp, Homo sapien
acctgtactctgacaccgggtaggg

SEQ ID NO: 402875 - DNA, 25 bp, Homo sapien
accgggagctttgggcagcaggact

SEQ ID NO: 402876 - DNA, 25 bp, Homo sapien
tcaggcgggccctacttcttggcag

SEQ ID NO: 402877 - DNA, 25 bp, Homo sapien
aagctgaccgggagctttgggcagc

SEQ ID NO: 402878 - DNA, 25 bp, Homo sapien
agcaggactcaggcgggccctactt

SEQ ID NO: 402879 - DNA, 25 bp, Homo sapien
tcttctatacaggaaagttggtgct

SEQ ID NO: 402880 - DNA, 25 bp, Homo sapien
tatcagttgcttaacttgggcctca

SEQ ID NO: 402881 - DNA, 25 bp, Homo sapien
tggtatccagattcttgacctgaga

SEQ ID NO: 402882 - DNA, 25 bp, Homo sapien
caccggtgtttttcctggtatccag

SEQ ID NO: 402883 - DNA, 25 bp, Homo sapien
ggatcctatttaatgtagtctttga

SEQ ID NO: 402884 - DNA, 25 bp, Homo sapien
gacttgcaatgtctccaggatccta

SEQ ID NO: 402885 - DNA, 25 bp, Homo sapien
tctcagcaggagctatgctcaagag

SEQ ID NO: 402886 - DNA, 25 bp, Homo sapien
tgaaggcctcaacatcagctctgct

SEQ ID NO: 402887 - DNA, 25 bp, Homo sapien
ctccccattgtccaactgtatgtac

SEQ ID NO: 402888 - DNA, 25 bp, Homo sapien
aatgatgtaatgctacttcactaac

SEQ ID NO: 402889 - DNA, 25 bp, Homo sapien
gaatgatgtaatgctacttcactaa

SEQ ID NO: 402890 - DNA, 25 bp, Homo sapien
taatttagaatcatcatggagctga

SEQ ID NO: 402891 - DNA, 25 bp, Homo sapien
tttagaatcatcatggagctgagtg

SEQ ID NO: 402892 - DNA, 25 bp, Homo sapien
tctaagagtgaaggtcaagtgggcc

SEQ ID NO: 402893 - DNA, 25 bp, Homo sapien
tctttacactccacaagtagctcaa

SEQ ID NO: 402894 - DNA, 25 bp, Homo sapien
cagtctttgtcagatttggtccgtg

SEQ ID NO: 402895 - DNA, 25 bp, Homo sapien
ggtccacttgacaaacgatgttcta

SEQ ID NO: 402896 - DNA, 25 bp, Homo sapien
cagaagaacctatcgggtaaaggag

SEQ ID NO: 402897 - DNA, 25 bp, Homo sapien
tatcgggtaaaggaggattcccatc

SEQ ID NO: 402898 - DNA, 25 bp, Homo sapien
gaccatggagcaccaagtgtgagaa

SEQ ID NO: 402899 - DNA, 25 bp, Homo sapien
tgactgggaccatgagccattggac

SEQ ID NO: 402900 - DNA, 25 bp, Homo sapien
attggaggcattggatgatctgctg

SEQ ID NO: 402901 - DNA, 25 bp, Homo sapien
tggttgagacttggtaccaccaaga

SEQ ID NO: 402902 - DNA, 25 bp, Homo sapien
tggatactcttccatatagaaaggg

SEQ ID NO: 402903 - DNA, 25 bp, Homo sapien
tgagacttggtaccaccaagaagca

SEQ ID NO: 402904 - DNA, 25 bp, Homo sapien
cactccttatcctcttcacagaata

SEQ ID NO: 402905 - DNA, 25 bp, Homo sapien
cattctcatgaaaattggtgcgctc

SEQ ID NO: 402906 - DNA, 25 bp, Homo sapien
tggtgcgctcattctatttgctggg

SEQ ID NO: 402907 - DNA, 25 bp, Homo sapien
tcttgtgccttatctctcattctca

SEQ ID NO: 402908 - DNA, 25 bp, Homo sapien
gatatccattccgatgccaaaaagc

SEQ ID NO: 402909 - DNA, 25 bp, Homo sapien
cccaatgccaaatccccaggagagt

SEQ ID NO: 402910 - DNA, 25 bp, Homo sapien
tacatatctaattgtcccaatgcca

SEQ ID NO: 402911 - DNA, 25 bp, Homo sapien
agagtcaatccgatgggccaagggc

SEQ ID NO: 402912 - DNA, 25 bp, Homo sapien
ggcatacactcatagtttttgtcca

SEQ ID NO: 402913 - DNA, 25 bp, Homo sapien
tcaggcatacactcatagtttttgt

SEQ ID NO: 402914 - DNA, 25 bp, Homo sapien
gcatacactcatagtttttgtccat

SEQ ID NO: 402915 - DNA, 25 bp, Homo sapien
caggcatacactcatagtttttgtc

SEQ ID NO: 402916 - DNA, 25 bp, Homo sapien
atttctaaggaattgggagcccagg

SEQ ID NO: 402917 - DNA, 25 bp, Homo sapien
gatactatggcaggaaccttaaaag

SEQ ID NO: 402918 - DNA, 25 bp, Homo sapien
gagaaaaggagaacgttacaagcaa

SEQ ID NO: 402919 - DNA, 25 bp, Homo sapien
ttttttctgacatgccatctgaatt

SEQ ID NO: 402920 - DNA, 25 bp, Homo sapien
gagaatggcccaacggtgactgtgt

SEQ ID NO: 402921 - DNA, 25 bp, Homo sapien
gcagcttgtgccctggtaattccac

SEQ ID NO: 402922 - DNA, 25 bp, Homo sapien
cttacagtgtaagcagagaatggcc

SEQ ID NO: 402923 - DNA, 25 bp, Homo sapien
tatgccagctatgagcagtgcagct

SEQ ID NO: 402924 - DNA, 25 bp, Homo sapien
caggtctggatattcagtgtgtaaa

SEQ ID NO: 402925 - DNA, 25 bp, Homo sapien
ggacttcctggttgacatcccatgg

SEQ ID NO: 402926 - DNA, 25 bp, Homo sapien
gacatcccatggtcaggtctggata

SEQ ID NO: 402927 - DNA, 25 bp, Homo sapien
cccatggtcaggtctggatattcag

SEQ ID NO: 402928 - DNA, 25 bp, Homo sapien
gagtccaaaacctagcacaagccct

SEQ ID NO: 402929 - DNA, 25 bp, Homo sapien
tcttcaaaggcagatcagagtccaa

SEQ ID NO: 402930 - DNA, 25 bp, Homo sapien
tacccatattatacattgactacat

SEQ ID NO: 402931 - DNA, 25 bp, Homo sapien
aaggaacatgaagtctttgcatttg

SEQ ID NO: 402932 - DNA, 25 bp, Homo sapien
gaatggcagcgactatgaagagttt

SEQ ID NO: 402933 - DNA, 25 bp, Homo sapien
tttcagaggctagatgctcccgtga

SEQ ID NO: 402934 - DNA, 25 bp, Homo sapien
tgctcccgtgaaatttgcacctggt

SEQ ID NO: 402935 - DNA, 25 bp, Homo sapien
ggaaagaatggcagcgactatgaag

SEQ ID NO: 402936 - DNA, 25 bp, Homo sapien
tccactgggctttcaatgtccacca

SEQ ID NO: 402937 - DNA, 25 bp, Homo sapien
cttgtcctgactctgaagattgctt

SEQ ID NO: 402938 - DNA, 25 bp, Homo sapien
cccttactatcattacactttgtga

SEQ ID NO: 402939 - DNA, 25 bp, Homo sapien
ctgaagattgctttatcctctcctc

SEQ ID NO: 402940 - DNA, 25 bp, Homo sapien
ggtgccttgaggcaaagccacactt

SEQ ID NO: 402941 - DNA, 25 bp, Homo sapien
cttgttggtgccttgaggcaaagcc

SEQ ID NO: 402942 - DNA, 25 bp, Homo sapien
ttgaggcaaagccacacttttctcc

SEQ ID NO: 402943 - DNA, 25 bp, Homo sapien
tgccttgaggcaaagccacactttt

SEQ ID NO: 402944 - DNA, 25 bp, Homo sapien
gcaatggtcatccacaaagtctggt

SEQ ID NO: 402945 - DNA, 25 bp, Homo sapien
aatggtcatccacaaagtctggttg

SEQ ID NO: 402946 - DNA, 25 bp, Homo sapien
ggtcatccacaaagtctggttgaag

SEQ ID NO: 402947 - DNA, 25 bp, Homo sapien
aagtctggttgaagcattcaaacat

SEQ ID NO: 402948 - DNA, 25 bp, Homo sapien
ttcaggcacaatactgaattcctct

SEQ ID NO: 402949 - DNA, 25 bp, Homo sapien
tgttcacagctgaatagccatcaag

SEQ ID NO: 402950 - DNA, 25 bp, Homo sapien
gccatcaagggaaatagcttcacta

SEQ ID NO: 402951 - DNA, 25 bp, Homo sapien
tgaatagccatcaagggaaatagct

SEQ ID NO: 402952 - DNA, 25 bp, Homo sapien
tacaccctttgtgctttaactccca

SEQ ID NO: 402953 - DNA, 25 bp, Homo sapien
ctcccactttaacggactcaatcca

SEQ ID NO: 402954 - DNA, 25 bp, Homo sapien
ctgattcttagtgcatattctgaga

SEQ ID NO: 402955 - DNA, 25 bp, Homo sapien
tcccattatgccctctgattcatct

SEQ ID NO: 402956 - DNA, 25 bp, Homo sapien
gatctctgaacaacatgtgtctgtg

SEQ ID NO: 402957 - DNA, 25 bp, Homo sapien
tcagatctctgaacaacatgtgtct

SEQ ID NO: 402958 - DNA, 25 bp, Homo sapien
tctgaacaacatgtgtctgtgagag

SEQ ID NO: 402959 - DNA, 25 bp, Homo sapien
catgtgtctgtgagagagtgtctac

SEQ ID NO: 402960 - DNA, 25 bp, Homo sapien
gatcctgattacagaagtagaagaa

SEQ ID NO: 402961 - DNA, 25 bp, Homo sapien
ccttgatcctgattacagaagtaga

SEQ ID NO: 402962 - DNA, 25 bp, Homo sapien
agtgacgactgaactaaatggtttc

SEQ ID NO: 402963 - DNA, 25 bp, Homo sapien
cttgatcctgattacagaagtagaa

SEQ ID NO: 402964 - DNA, 25 bp, Homo sapien
aacttagggagtacttggctctatc

SEQ ID NO: 402965 - DNA, 25 bp, Homo sapien
tagggagtacttggctctatcttca

SEQ ID NO: 402966 - DNA, 25 bp, Homo sapien
gggagtacttggctctatcttcaag

SEQ ID NO: 402967 - DNA, 25 bp, Homo sapien
ttaacttagggagtacttggctcta

SEQ ID NO: 402968 - DNA, 25 bp, Homo sapien
ttttgtcgtctacccctgacatttg

SEQ ID NO: 402969 - DNA, 25 bp, Homo sapien
cgtctacccctgacatttggtgttc

SEQ ID NO: 402970 - DNA, 25 bp, Homo sapien
tacccctgacatttggtgttcctca

SEQ ID NO: 402971 - DNA, 25 bp, Homo sapien
gacatttggtgttcctcattgtcct

SEQ ID NO: 402972 - DNA, 25 bp, Homo sapien
tctcagtgtgaccttcaattatttc

SEQ ID NO: 402973 - DNA, 25 bp, Homo sapien
aactggttgggccatgtggatgtac

SEQ ID NO: 402974 - DNA, 25 bp, Homo sapien
caattatttctgttggggcaatgac

SEQ ID NO: 402975 - DNA, 25 bp, Homo sapien
tgttggggcaatgactagaaattct

SEQ ID NO: 402976 - DNA, 25 bp, Homo sapien
tgcttactctagtactagccaacca

SEQ ID NO: 402977 - DNA, 25 bp, Homo sapien
caataccctccaatccctgcttgct

SEQ ID NO: 402978 - DNA, 25 bp, Homo sapien
ggatattcacagcattgtgcaaaca

SEQ ID NO: 402979 - DNA, 25 bp, Homo sapien
gtattccttagccaataccctccaa

SEQ ID NO: 402980 - DNA, 25 bp, Homo sapien
cactatctttagagaagaggtcgga

SEQ ID NO: 402981 - DNA, 25 bp, Homo sapien
aagtctcagttccatatccagtaag

SEQ ID NO: 402982 - DNA, 25 bp, Homo sapien
tatggaaggcagaatagcgcataca

SEQ ID NO: 402983 - DNA, 25 bp, Homo sapien
gaagtactccacctgttttacatga

SEQ ID NO: 402984 - DNA, 25 bp, Homo sapien
gagaccatattccacggttgagaga

SEQ ID NO: 402985 - DNA, 25 bp, Homo sapien
gagagaccctgtgatagaataatct

SEQ ID NO: 402986 - DNA, 25 bp, Homo sapien
gccgaggtctgatgtgtagaagtca

SEQ ID NO: 402987 - DNA, 25 bp, Homo sapien
taccagttgacggttcggttgctct

SEQ ID NO: 402988 - DNA, 25 bp, Homo sapien
tgttggagatgacagacgggagagg

SEQ ID NO: 402989 - DNA, 25 bp, Homo sapien
ctgttggagatgacagacgggagag

SEQ ID NO: 402990 - DNA, 25 bp, Homo sapien
ctgtcctcttgtggaggctccgcat

SEQ ID NO: 402991 - DNA, 25 bp, Homo sapien
ctcaagataaatttcattacgctgg

SEQ ID NO: 402992 - DNA, 25 bp, Homo sapien
tgcaggctgccaggctcgcaaagca

SEQ ID NO: 402993 - DNA, 25 bp, Homo sapien
gcaaagcacctccacatctacagga

SEQ ID NO: 402994 - DNA, 25 bp, Homo sapien
cttacaccatgcaaaaaagtcaatt

SEQ ID NO: 402995 - DNA, 25 bp, Homo sapien
aaaagtcaattccagatgtatccaa

SEQ ID NO: 402996 - DNA, 25 bp, Homo sapien
aaaaagtcaattccagatgtatcca

SEQ ID NO: 402997 - DNA, 25 bp, Homo sapien
gcaaaaaagtcaattccagatgtat

SEQ ID NO: 402998 - DNA, 25 bp, Homo sapien
taacatagattcaaattagtaaagc

SEQ ID NO: 402999 - DNA, 25 bp, Homo sapien
caaataacatagattcaaattagta

SEQ ID NO: 403000 - DNA, 25 bp, Homo sapien
aataacatagattcaaattagtaaa

SEQ ID NO: 403001 - DNA, 25 bp, Homo sapien
acatagattcaaattagtaaagcaa

SEQ ID NO: 403002 - DNA, 25 bp, Homo sapien
aggattatgcagcttcataaagata

SEQ ID NO: 403003 - DNA, 25 bp, Homo sapien
taaatttagtgcaattcaaatacaa

SEQ ID NO: 403004 - DNA, 25 bp, Homo sapien
tgtccttggataggattatgcagct

SEQ ID NO: 403005 - DNA, 25 bp, Homo sapien
tcatgtataaatttagtgcaattca

SEQ ID NO: 403006 - DNA, 25 bp, Homo sapien
taatgcatcagaaagaactccaaat

SEQ ID NO: 403007 - DNA, 25 bp, Homo sapien
cacataatgcatcagaaagaactcc

SEQ ID NO: 403008 - DNA, 25 bp, Homo sapien
cataatgcatcagaaagaactccaa

SEQ ID NO: 403009 - DNA, 25 bp, Homo sapien
ctcacataatgcatcagaaagaact

SEQ ID NO: 403010 - DNA, 25 bp, Homo sapien
gatactggtcgccaccacagggagt

SEQ ID NO: 403011 - DNA, 25 bp, Homo sapien
tttgaagatactggtcgccaccaca

SEQ ID NO: 403012 - DNA, 25 bp, Homo sapien
gaagatactggtcgccaccacaggg

SEQ ID NO: 403013 - DNA, 25 bp, Homo sapien
ttgaagatactggtcgccaccacag

SEQ ID NO: 403014 - DNA, 25 bp, Homo sapien
ggtgctaccatactaaaggctcttt

SEQ ID NO: 403015 - DNA, 25 bp, Homo sapien
ggccttctagaagtaggtgctacca

SEQ ID NO: 403016 - DNA, 25 bp, Homo sapien
gaaatcttagtagctgcatctgtca

SEQ ID NO: 403017 - DNA, 25 bp, Homo sapien
tgataagattgactcccagccactc

SEQ ID NO: 403018 - DNA, 25 bp, Homo sapien
tgtgtttttcgaggcagtaagatgg

SEQ ID NO: 403019 - DNA, 25 bp, Homo sapien
ctcagcccatggcaactcagagtgc

SEQ ID NO: 403020 - DNA, 25 bp, Homo sapien
atggcaactcagagtgcaaagccat

SEQ ID NO: 403021 - DNA, 25 bp, Homo sapien
cagtaagatggcttacactgctctg

SEQ ID NO: 403022 - DNA, 25 bp, Homo sapien
cacaggccagccataggcgaaggtg

SEQ ID NO: 403023 - DNA, 25 bp, Homo sapien
tatggcccagaaagtcatgaagacc

SEQ ID NO: 403024 - DNA, 25 bp, Homo sapien
tgaaagtcttgtcccagccgtatgg

SEQ ID NO: 403025 - DNA, 25 bp, Homo sapien
tggttgtagacccagaaaactggaa

SEQ ID NO: 403026 - DNA, 25 bp, Homo sapien
aggactttcattaacaatactccct

SEQ ID NO: 403027 - DNA, 25 bp, Homo sapien
taaattgtagtcctcaccagctgag

SEQ ID NO: 403028 - DNA, 25 bp, Homo sapien
taggaacctttgatatgggctccca

SEQ ID NO: 403029 - DNA, 25 bp, Homo sapien
ggtaggcagggtgtctttcaaaaga

SEQ ID NO: 403030 - DNA, 25 bp, Homo sapien
taaagcgtaactaagccagatggat

SEQ ID NO: 403031 - DNA, 25 bp, Homo sapien
acctcagagacgagagacactttct

SEQ ID NO: 403032 - DNA, 25 bp, Homo sapien
aaatgcagcaaaatactgtggttct

SEQ ID NO: 403033 - DNA, 25 bp, Homo sapien
gacactttctttgtacatgtcccac

SEQ ID NO: 403034 - DNA, 25 bp, Homo sapien
tgcaacagacataagagataatagt

SEQ ID NO: 403035 - DNA, 25 bp, Homo sapien
tcctaatctaatcctccagtgatag

SEQ ID NO: 403036 - DNA, 25 bp, Homo sapien
agtttggtcctaatctaatcctcca

SEQ ID NO: 403037 - DNA, 25 bp, Homo sapien
taatcctccagtgatagttccccaa

SEQ ID NO: 403038 - DNA, 25 bp, Homo sapien
tcctccagtgatagttccccaaact

SEQ ID NO: 403039 - DNA, 25 bp, Homo sapien
gaagacatcaatcctggaaagggat

SEQ ID NO: 403040 - DNA, 25 bp, Homo sapien
ggtggccaaaagtagtcttgatcat

SEQ ID NO: 403041 - DNA, 25 bp, Homo sapien
aaagtccagctctaacattagtcaa

SEQ ID NO: 403042 - DNA, 25 bp, Homo sapien
tcagctctcgtaagaagcagcagtc

SEQ ID NO: 403043 - DNA, 25 bp, Homo sapien
tggaaaccctgggaagcagtaatct

SEQ ID NO: 403044 - DNA, 25 bp, Homo sapien
ccctgggaagcagtaatctgagctc

SEQ ID NO: 403045 - DNA, 25 bp, Homo sapien
agtaatctgagctccttgtcctgag

SEQ ID NO: 403046 - DNA, 25 bp, Homo sapien
tattcattgttcagctggaaaccct

SEQ ID NO: 403047 - DNA, 25 bp, Homo sapien
attgcttttcgtgcactgaaaagtg

SEQ ID NO: 403048 - DNA, 25 bp, Homo sapien
ttgaaattgcttttcgtgcactgaa

SEQ ID NO: 403049 - DNA, 25 bp, Homo sapien
cttttcgtgcactgaaaagtggttg

SEQ ID NO: 403050 - DNA, 25 bp, Homo sapien
gaaattgcttttcgtgcactgaaaa

SEQ ID NO: 403051 - DNA, 25 bp, Homo sapien
attcccttcctgctacgagctttcg

SEQ ID NO: 403052 - DNA, 25 bp, Homo sapien
ggaaggatcagaaagcatagccagc

SEQ ID NO: 403053 - DNA, 25 bp, Homo sapien
aaagcatagccagcgagtaagcaac

SEQ ID NO: 403054 - DNA, 25 bp, Homo sapien
gctttcggacataacacagaattga

SEQ ID NO: 403055 - DNA, 25 bp, Homo sapien
aagaatctcagccattacgacatca

SEQ ID NO: 403056 - DNA, 25 bp, Homo sapien
cacaattaggtactttcctgagaaa

SEQ ID NO: 403057 - DNA, 25 bp, Homo sapien
gacatcattgtctcttgggacctcc

SEQ ID NO: 403058 - DNA, 25 bp, Homo sapien
tcttgggacctccacaattaggtac

SEQ ID NO: 403059 - DNA, 25 bp, Homo sapien
ctgtaaactctggtctagctgtacc

SEQ ID NO: 403060 - DNA, 25 bp, Homo sapien
aaagggcaattcctatctattgggc

SEQ ID NO: 403061 - DNA, 25 bp, Homo sapien
tagctgtaccattagggcctactgg

SEQ ID NO: 403062 - DNA, 25 bp, Homo sapien
aattactttgggctactgtgcagca

SEQ ID NO: 403063 - DNA, 25 bp, Homo sapien
catgtcaagtgcctttgggaacaac

SEQ ID NO: 403064 - DNA, 25 bp, Homo sapien
ccaggcccaagtttgtgatgctttc

SEQ ID NO: 403065 - DNA, 25 bp, Homo sapien
tccaagttcacctcgctagtaacag

SEQ ID NO: 403066 - DNA, 25 bp, Homo sapien
cagagtcaactataagctatcatgg

SEQ ID NO: 403067 - DNA, 25 bp, Homo sapien
gaagatctacgatttgtttgacttg

SEQ ID NO: 403068 - DNA, 25 bp, Homo sapien
gtttgacttgacattccctggtatt

SEQ ID NO: 403069 - DNA, 25 bp, Homo sapien
ccgccagagaagatctacgatttgt

SEQ ID NO: 403070 - DNA, 25 bp, Homo sapien
tatttccctttgttatccctgtgtc

SEQ ID NO: 403071 - DNA, 25 bp, Homo sapien
tggttgtactaatgaattattcatg

SEQ ID NO: 403072 - DNA, 25 bp, Homo sapien
tttgatctagagatgatctcagata

SEQ ID NO: 403073 - DNA, 25 bp, Homo sapien
ttttgatctagagatgatctcagat

SEQ ID NO: 403074 - DNA, 25 bp, Homo sapien
taatgaattattcatggcataatca

SEQ ID NO: 403075 - DNA, 25 bp, Homo sapien
taagcattggtaacttaatgcagag

SEQ ID NO: 403076 - DNA, 25 bp, Homo sapien
cgaacagggctaagcattggtaact

SEQ ID NO: 403077 - DNA, 25 bp, Homo sapien
tcagtatcgacgaacagggctaagc

SEQ ID NO: 403078 - DNA, 25 bp, Homo sapien
taatgcagagataaatttgtacttt

SEQ ID NO: 403079 - DNA, 25 bp, Homo sapien
tcaagctggctgaacattatgtcca

SEQ ID NO: 403080 - DNA, 25 bp, Homo sapien
tgggagactgatttggcttagaacc

SEQ ID NO: 403081 - DNA, 25 bp, Homo sapien
gctatacagagttcatccctcacag

SEQ ID NO: 403082 - DNA, 25 bp, Homo sapien
ccagtagagggttccctgggagact

SEQ ID NO: 403083 - DNA, 25 bp, Homo sapien
cagattttgctgtagggtagcaaat

SEQ ID NO: 403084 - DNA, 25 bp, Homo sapien
tgctgtagggtagcaaatgactgca

SEQ ID NO: 403085 - DNA, 25 bp, Homo sapien
ttttgctgtagggtagcaaatgact

SEQ ID NO: 403086 - DNA, 25 bp, Homo sapien
gattttgctgtagggtagcaaatga

SEQ ID NO: 403087 - DNA, 25 bp, Homo sapien
ggcctcggtctttgcagaggtgtac

SEQ ID NO: 403088 - DNA, 25 bp, Homo sapien
ttgcagaggtgtaccaccgccctct

SEQ ID NO: 403089 - DNA, 25 bp, Homo sapien
gaccatcctcgcgtatcccagagtg

SEQ ID NO: 403090 - DNA, 25 bp, Homo sapien
cgtatcccagagtgggcctcggtct

SEQ ID NO: 403091 - DNA, 25 bp, Homo sapien
ttctcaggcactacctttgttcttg

SEQ ID NO: 403092 - DNA, 25 bp, Homo sapien
caaatattctatcagtgttctcagg

SEQ ID NO: 403093 - DNA, 25 bp, Homo sapien
gtctttttggacacatcaaatattc

SEQ ID NO: 403094 - DNA, 25 bp, Homo sapien
agtgttctcaggcactacctttgtt

SEQ ID NO: 403095 - DNA, 25 bp, Homo sapien
actcccttgcccttcggagctttat

SEQ ID NO: 403096 - DNA, 25 bp, Homo sapien
ctcccttgcccttcggagctttatt

SEQ ID NO: 403097 - DNA, 25 bp, Homo sapien
tgccacttgctatagttctgaacaa

SEQ ID NO: 403098 - DNA, 25 bp, Homo sapien
ccacttgctatagttctgaacaaaa

SEQ ID NO: 403099 - DNA, 25 bp, Homo sapien
tttgaacagacagcaacatagtttt

SEQ ID NO: 403100 - DNA, 25 bp, Homo sapien
ctgctccagacagcttcaaggcaaa

SEQ ID NO: 403101 - DNA, 25 bp, Homo sapien
tagtttttgacagcttattttcaac

SEQ ID NO: 403102 - DNA, 25 bp, Homo sapien
gcttcaaggcaaatatacttagtgt

SEQ ID NO: 403103 - DNA, 25 bp, Homo sapien
tcctggaaattctgtgattcctggc

SEQ ID NO: 403104 - DNA, 25 bp, Homo sapien
ggcagttgatccgtagatactgaag

SEQ ID NO: 403105 - DNA, 25 bp, Homo sapien
ccttggcagttgatccgtagatact

SEQ ID NO: 403106 - DNA, 25 bp, Homo sapien
tgggccttggcagttgatccgtaga

SEQ ID NO: 403107 - DNA, 25 bp, Homo sapien
cagttgatccgtagatactgaagtt

SEQ ID NO: 403108 - DNA, 25 bp, Homo sapien
acaagaaccttggaaggaacaatag

SEQ ID NO: 403109 - DNA, 25 bp, Homo sapien
caagaaccttggaaggaacaatagc

SEQ ID NO: 403110 - DNA, 25 bp, Homo sapien
ctttgaagcaatacacaagaacctt

SEQ ID NO: 403111 - DNA, 25 bp, Homo sapien
ttgaagcaatacacaagaaccttgg

SEQ ID NO: 403112 - DNA, 25 bp, Homo sapien
acagataaattacaatagagcctgg

SEQ ID NO: 403113 - DNA, 25 bp, Homo sapien
gataaattacaatagagcctggata

SEQ ID NO: 403114 - DNA, 25 bp, Homo sapien
ttattgaaaactggttagcaacaga

SEQ ID NO: 403115 - DNA, 25 bp, Homo sapien
aattacaatagagcctggatataaa

SEQ ID NO: 403116 - DNA, 25 bp, Homo sapien
tttgaaatcagattttatgatacgg

SEQ ID NO: 403117 - DNA, 25 bp, Homo sapien
gattatttcgaataataaatctgcc

SEQ ID NO: 403118 - DNA, 25 bp, Homo sapien
gccaacaggattatttcgaataata

SEQ ID NO: 403119 - DNA, 25 bp, Homo sapien
gaaatcagattttatgatacggaaa

SEQ ID NO: 403120 - DNA, 25 bp, Homo sapien
cctgcatcttggtacctgaaggaca

SEQ ID NO: 403121 - DNA, 25 bp, Homo sapien
tcagtattgtatatctcagggcctt

SEQ ID NO: 403122 - DNA, 25 bp, Homo sapien
tacatatcgactccttgagctaggg

SEQ ID NO: 403123 - DNA, 25 bp, Homo sapien
gctagtcagctacgggactttccaa

SEQ ID NO: 403124 - DNA, 25 bp, Homo sapien
tagaggaaggcatggtccctagcta

SEQ ID NO: 403125 - DNA, 25 bp, Homo sapien
ataaaagcccaagatcctagcaagg

SEQ ID NO: 403126 - DNA, 25 bp, Homo sapien
tagagagggcaaactaacagagcac

SEQ ID NO: 403127 - DNA, 25 bp, Homo sapien
ttaacacaagctgcctagagagggc

SEQ ID NO: 403128 - DNA, 25 bp, Homo sapien
tgtatcagcccaatacatcgctgct

SEQ ID NO: 403129 - DNA, 25 bp, Homo sapien
tgaacaaggcttttggttcaatcag

SEQ ID NO: 403130 - DNA, 25 bp, Homo sapien
ggttcaatcagtgtatcagcccaat

SEQ ID NO: 403131 - DNA, 25 bp, Homo sapien
caatacatcgctgcttctagcctca

SEQ ID NO: 403132 - DNA, 25 bp, Homo sapien
attatgcatttactggcatcatgca

SEQ ID NO: 403133 - DNA, 25 bp, Homo sapien
cagtgccataggaattatgcattta

SEQ ID NO: 403134 - DNA, 25 bp, Homo sapien
aattatgcatttactggcatcatgc

SEQ ID NO: 403135 - DNA, 25 bp, Homo sapien
tgccataggaattatgcatttactg

SEQ ID NO: 403136 - DNA, 25 bp, Homo sapien
tgtactgggcattagtcagggtaac

SEQ ID NO: 403137 - DNA, 25 bp, Homo sapien
catcaaattgtactgggcattagtc

SEQ ID NO: 403138 - DNA, 25 bp, Homo sapien
tgggcattagtcagggtaactgctt

SEQ ID NO: 403139 - DNA, 25 bp, Homo sapien
tagtcagggtaactgctttgcccat

SEQ ID NO: 403140 - DNA, 25 bp, Homo sapien
cagcaaatgattcttaaggagaaga

SEQ ID NO: 403141 - DNA, 25 bp, Homo sapien
tggaattcgaatgagccagaaaagc

SEQ ID NO: 403142 - DNA, 25 bp, Homo sapien
catagcacaggtgattctcaggaga

SEQ ID NO: 403143 - DNA, 25 bp, Homo sapien
aatccattctagttgcattcctcag

SEQ ID NO: 403144 - DNA, 25 bp, Homo sapien
ggtgatgttatctcaaacgcagcca

SEQ ID NO: 403145 - DNA, 25 bp, Homo sapien
gtaggaggagttcctgctgtgaact

SEQ ID NO: 403146 - DNA, 25 bp, Homo sapien
tgttatctcaaacgcagccaagctc

SEQ ID NO: 403147 - DNA, 25 bp, Homo sapien
gaagctggtgatgttatctcaaacg

SEQ ID NO: 403148 - DNA, 25 bp, Homo sapien
gttgaatactagcatctgcaagaag

SEQ ID NO: 403149 - DNA, 25 bp, Homo sapien
tggttgaatactagcatctgcaaga

SEQ ID NO: 403150 - DNA, 25 bp, Homo sapien
ggttgaatactagcatctgcaagaa

SEQ ID NO: 403151 - DNA, 25 bp, Homo sapien
ctggttgaatactagcatctgcaag

SEQ ID NO: 403152 - DNA, 25 bp, Homo sapien
tgaacttggatgaggtactgactag

SEQ ID NO: 403153 - DNA, 25 bp, Homo sapien
cttatctaaaggatagaggccagga

SEQ ID NO: 403154 - DNA, 25 bp, Homo sapien
caccagggcctctaagttgttaaag

SEQ ID NO: 403155 - DNA, 25 bp, Homo sapien
gaaaccttcatctagggtggcagag

SEQ ID NO: 403156 - DNA, 25 bp, Homo sapien
cattcactgatgtgttttttgaggg

SEQ ID NO: 403157 - DNA, 25 bp, Homo sapien
ggtccagggaacagttagtgtaata

SEQ ID NO: 403158 - DNA, 25 bp, Homo sapien
tagtgtaatacattcactgatgtgt

SEQ ID NO: 403159 - DNA, 25 bp, Homo sapien
gttagtgtaatacattcactgatgt

SEQ ID NO: 403160 - DNA, 25 bp, Homo sapien
tgtctgtttcctggggcaatgcttg

SEQ ID NO: 403161 - DNA, 25 bp, Homo sapien
gcttgaatgtggttaagcacacttt

SEQ ID NO: 403162 - DNA, 25 bp, Homo sapien
cacttttgcctcatcggctcctcca

SEQ ID NO: 403163 - DNA, 25 bp, Homo sapien
cttccaaccactcctccactagctt

SEQ ID NO: 403164 - DNA, 25 bp, Homo sapien
cgccatcgccttcgcgcctggctgg

SEQ ID NO: 403165 - DNA, 25 bp, Homo sapien
gtggccctcacagtcggcgtttcgc

SEQ ID NO: 403166 - DNA, 25 bp, Homo sapien
gccgccgtggccctcacagtcggcg

SEQ ID NO: 403167 - DNA, 25 bp, Homo sapien
gcgcacgccggccgccatcgccttc

SEQ ID NO: 403168 - DNA, 25 bp, Homo sapien
gggctgtcctctcccgctgcggccg

SEQ ID NO: 403169 - DNA, 25 bp, Homo sapien
tcccgctgcggccgggcgccccggc

SEQ ID NO: 403170 - DNA, 25 bp, Homo sapien
cctctcccgctgcggccgggcgccc

SEQ ID NO: 403171 - DNA, 25 bp, Homo sapien
tctcccgctgcggccgggcgccccg

SEQ ID NO: 403172 - DNA, 25 bp, Homo sapien
tctgataactgttatatggcagtgc

SEQ ID NO: 403173 - DNA, 25 bp, Homo sapien
taggtcgtgtttaatatctcttgta

SEQ ID NO: 403174 - DNA, 25 bp, Homo sapien
catcttttgtttcaggtagttgata

SEQ ID NO: 403175 - DNA, 25 bp, Homo sapien
gtttcaggtagttgataatttctga

SEQ ID NO: 403176 - DNA, 25 bp, Homo sapien
tgaaaatcccgatactgttttgttc

SEQ ID NO: 403177 - DNA, 25 bp, Homo sapien
aaaatcccgatactgttttgttcag

SEQ ID NO: 403178 - DNA, 25 bp, Homo sapien
actgtgaaaatcccgatactgtttt

SEQ ID NO: 403179 - DNA, 25 bp, Homo sapien
aaatcccgatactgttttgttcaga

SEQ ID NO: 403180 - DNA, 25 bp, Homo sapien
aggtcatcagggcagaattgtttgc

SEQ ID NO: 403181 - DNA, 25 bp, Homo sapien
gagaggagccaggaatgatgtacca

SEQ ID NO: 403182 - DNA, 25 bp, Homo sapien
gagctacatcctcacggaagtggga

SEQ ID NO: 403183 - DNA, 25 bp, Homo sapien
tgttgaaaccaactgtgcattcaca

SEQ ID NO: 403184 - DNA, 25 bp, Homo sapien
gacgtgaagtggatagccctctgtg

SEQ ID NO: 403185 - DNA, 25 bp, Homo sapien
ccagcaattgggagtgtgtaacagc

SEQ ID NO: 403186 - DNA, 25 bp, Homo sapien
caagaataatgaggtacgtggacac

SEQ ID NO: 403187 - DNA, 25 bp, Homo sapien
cagccaggtgcgtgttacagccgtt

SEQ ID NO: 403188 - DNA, 25 bp, Homo sapien
tatgtgagggatctttcaggattca

SEQ ID NO: 403189 - DNA, 25 bp, Homo sapien
tcaggattgtatgtgtggaccgtat

SEQ ID NO: 403190 - DNA, 25 bp, Homo sapien
gattcagctatctttcaggattgtc

SEQ ID NO: 403191 - DNA, 25 bp, Homo sapien
gattgcatttgatatgtgaggcatc

SEQ ID NO: 403192 - DNA, 25 bp, Homo sapien
tgtaaaacctttggcctgctgttgc

SEQ ID NO: 403193 - DNA, 25 bp, Homo sapien
actgcttcatcagtgtttatgaatg

SEQ ID NO: 403194 - DNA, 25 bp, Homo sapien
tcatcttcagctgtggtctgggtgg

SEQ ID NO: 403195 - DNA, 25 bp, Homo sapien
ctcactgcttcatcagtgtttatga

SEQ ID NO: 403196 - DNA, 25 bp, Homo sapien
tatatataatacagggtctggcaca

SEQ ID NO: 403197 - DNA, 25 bp, Homo sapien
taaatgacatgccttcccactgaga

SEQ ID NO: 403198 - DNA, 25 bp, Homo sapien
tgccccttgaaagagacctgtatct

SEQ ID NO: 403199 - DNA, 25 bp, Homo sapien
ccactgagatagatgaggaatttgc

SEQ ID NO: 403200 - DNA, 25 bp, Homo sapien
catattagtgtcatgaagttttgaa

SEQ ID NO: 403201 - DNA, 25 bp, Homo sapien
tgtaaacatctgtatggtattttga

SEQ ID NO: 403202 - DNA, 25 bp, Homo sapien
attttctgaattttacactgacttc

SEQ ID NO: 403203 - DNA, 25 bp, Homo sapien
acactgacttctgtattagtgtaga

SEQ ID NO: 403204 - DNA, 25 bp, Homo sapien
taaacagtaattattggcaggagcg

SEQ ID NO: 403205 - DNA, 25 bp, Homo sapien
gacctatttatcatgacaccttcag

SEQ ID NO: 403206 - DNA, 25 bp, Homo sapien
ttaacatttgggatgtggaatggat

SEQ ID NO: 403207 - DNA, 25 bp, Homo sapien
ccttcaggtgtgtaatttgatttgc

SEQ ID NO: 403208 - DNA, 25 bp, Homo sapien
catggcgctcagacattttaaccgg

SEQ ID NO: 403209 - DNA, 25 bp, Homo sapien
taaagctgaaaatcgcatggcgctc

SEQ ID NO: 403210 - DNA, 25 bp, Homo sapien
taaccggaactgatgtataatcaca

SEQ ID NO: 403211 - DNA, 25 bp, Homo sapien
tctggatccttccatgactacagcc

SEQ ID NO: 403212 - DNA, 25 bp, Homo sapien
tcacacaaattagtaagggcctcag

SEQ ID NO: 403213 - DNA, 25 bp, Homo sapien
gcaggtatgtctgctaatatttacc

SEQ ID NO: 403214 - DNA, 25 bp, Homo sapien
ggaatttggactagcaaagactgaa

SEQ ID NO: 403215 - DNA, 25 bp, Homo sapien
cagagaacttttatgttggcaggta

SEQ ID NO: 403216 - DNA, 25 bp, Homo sapien
tcccagaagcatgcatcatacagct

SEQ ID NO: 403217 - DNA, 25 bp, Homo sapien
aacactcccgttaacaagacacagg

SEQ ID NO: 403218 - DNA, 25 bp, Homo sapien
gaaacagttttcatgcattcctcag

SEQ ID NO: 403219 - DNA, 25 bp, Homo sapien
ccaaggctcgtcagagtggcttcaa

SEQ ID NO: 403220 - DNA, 25 bp, Homo sapien
cagtcagtctgataagcaagatggc

SEQ ID NO: 403221 - DNA, 25 bp, Homo sapien
caagcactgggataaaacgacagtc

SEQ ID NO: 403222 - DNA, 25 bp, Homo sapien
caagatggctgctaattgactagta

SEQ ID NO: 403223 - DNA, 25 bp, Homo sapien
ggcccagcatcactaatcttgccaa

SEQ ID NO: 403224 - DNA, 25 bp, Homo sapien
ggtgctaccacatcccaccagattg

SEQ ID NO: 403225 - DNA, 25 bp, Homo sapien
ggtgtcaccatatcctactggtgct

SEQ ID NO: 403226 - DNA, 25 bp, Homo sapien
gttccctgccacgtagtccttggtg

SEQ ID NO: 403227 - DNA, 25 bp, Homo sapien
cagtacgttcttttgtgttccctgc

SEQ ID NO: 403228 - DNA, 25 bp, Homo sapien
caacacaacgaaagacaatgaacag

SEQ ID NO: 403229 - DNA, 25 bp, Homo sapien
gtaactgctattgaagaaatgcttc

SEQ ID NO: 403230 - DNA, 25 bp, Homo sapien
aaatgcttcaggccctggtcaacac

SEQ ID NO: 403231 - DNA, 25 bp, Homo sapien
caatgaacagaaatcgccatttgat

SEQ ID NO: 403232 - DNA, 25 bp, Homo sapien
gacagtgttggtacttttcagccac

SEQ ID NO: 403233 - DNA, 25 bp, Homo sapien
tagaatttctttaccggtaagcaca

SEQ ID NO: 403234 - DNA, 25 bp, Homo sapien
actagctccttgtcacagacagtgt

SEQ ID NO: 403235 - DNA, 25 bp, Homo sapien
tctttaccggtaagcacactagctc

SEQ ID NO: 403236 - DNA, 25 bp, Homo sapien
gatagggagagattagtgacaaagc

SEQ ID NO: 403237 - DNA, 25 bp, Homo sapien
gggtgccatttatcactcccagact

SEQ ID NO: 403238 - DNA, 25 bp, Homo sapien
gacaaagctgtaattctattgaggg

SEQ ID NO: 403239 - DNA, 25 bp, Homo sapien
ccttacaggataactgatagggaga

SEQ ID NO: 403240 - DNA, 25 bp, Homo sapien
ctgatgaagtccattgagtagaagt

SEQ ID NO: 403241 - DNA, 25 bp, Homo sapien
gtccattgagtagaagtatgcattc

SEQ ID NO: 403242 - DNA, 25 bp, Homo sapien
caggggtttcaagctgatgaagtcc

SEQ ID NO: 403243 - DNA, 25 bp, Homo sapien
gaagtccattgagtagaagtatgca

SEQ ID NO: 403244 - DNA, 25 bp, Homo sapien
ttctgtgtcatccttaaaagaggac

SEQ ID NO: 403245 - DNA, 25 bp, Homo sapien
tctgtgtcatccttaaaagaggaca

SEQ ID NO: 403246 - DNA, 25 bp, Homo sapien
gacagtgtggccaatgcacctattg

SEQ ID NO: 403247 - DNA, 25 bp, Homo sapien
cagaaaggagcctgccgattggcca

SEQ ID NO: 403248 - DNA, 25 bp, Homo sapien
tagcactggctggttataaaggact

SEQ ID NO: 403249 - DNA, 25 bp, Homo sapien
tattgtgtccctgctgcagaaagga

SEQ ID NO: 403250 - DNA, 25 bp, Homo sapien
acattaatgtgtagttgaaagtctc

SEQ ID NO: 403251 - DNA, 25 bp, Homo sapien
tttagctacaatgcgaaaatgagtg

SEQ ID NO: 403252 - DNA, 25 bp, Homo sapien
ccaaccgatatttagctacaatgcg

SEQ ID NO: 403253 - DNA, 25 bp, Homo sapien
gctacaatgcgaaaatgagtgcagt

SEQ ID NO: 403254 - DNA, 25 bp, Homo sapien
agtcagatcataatcacaccattta

SEQ ID NO: 403255 - DNA, 25 bp, Homo sapien
aagtcagatcataatcacaccattt

SEQ ID NO: 403256 - DNA, 25 bp, Homo sapien
gaaagtcagatcataatcacaccat

SEQ ID NO: 403257 - DNA, 25 bp, Homo sapien
aaagtcagatcataatcacaccatt

SEQ ID NO: 403258 - DNA, 25 bp, Homo sapien
tgaggtctgtttgtaggtcaccatg

SEQ ID NO: 403259 - DNA, 25 bp, Homo sapien
atggtgaagacttgggaagagataa

SEQ ID NO: 403260 - DNA, 25 bp, Homo sapien
actgaggtctgtttgtaggtcacca

SEQ ID NO: 403261 - DNA, 25 bp, Homo sapien
tctgtttgtaggtcaccatggtgaa

SEQ ID NO: 403262 - DNA, 25 bp, Homo sapien
aggctgtttcttatttgcatagctt

SEQ ID NO: 403263 - DNA, 25 bp, Homo sapien
gaggctgtttcttatttgcatagct

SEQ ID NO: 403264 - DNA, 25 bp, Homo sapien
gctctaaagatgtgttcccacagta

SEQ ID NO: 403265 - DNA, 25 bp, Homo sapien
ttatggcaataaggcaccattcatt

SEQ ID NO: 403266 - DNA, 25 bp, Homo sapien
caccattcattttgtgaactttata

SEQ ID NO: 403267 - DNA, 25 bp, Homo sapien
taattactgattccagagatgttca

SEQ ID NO: 403268 - DNA, 25 bp, Homo sapien
gcattccatcctgaggacttaacta

SEQ ID NO: 403269 - DNA, 25 bp, Homo sapien
caacttcaagctagcccatgtctca

SEQ ID NO: 403270 - DNA, 25 bp, Homo sapien
gaggacttaactaccaacttcaagc

SEQ ID NO: 403271 - DNA, 25 bp, Homo sapien
ccatgtctcatcttgtggttcatca

SEQ ID NO: 403272 - DNA, 25 bp, Homo sapien
tccacattctgaacagtcaataaag

SEQ ID NO: 403273 - DNA, 25 bp, Homo sapien
aagtgattgcagctgaatttgtttt

SEQ ID NO: 403274 - DNA, 25 bp, Homo sapien
taaaagtgattgcagctgaatttgt

SEQ ID NO: 403275 - DNA, 25 bp, Homo sapien
tttaaaagtgattgcagctgaattt

SEQ ID NO: 403276 - DNA, 25 bp, Homo sapien
gcttacaagaatcctgcaacatttg

SEQ ID NO: 403277 - DNA, 25 bp, Homo sapien
aagaaaaagataccctccttgtcag

SEQ ID NO: 403278 - DNA, 25 bp, Homo sapien
ggaattcaagcacactaacaatgtg

SEQ ID NO: 403279 - DNA, 25 bp, Homo sapien
caatgtgctctcttgttggacaagc

SEQ ID NO: 403280 - DNA, 25 bp, Homo sapien
gcaaataagccagcttgtggaaggg

SEQ ID NO: 403281 - DNA, 25 bp, Homo sapien
gagaagccggcactcagattgacag

SEQ ID NO: 403282 - DNA, 25 bp, Homo sapien
tgggcttttgggtgttggacaacca

SEQ ID NO: 403283 - DNA, 25 bp, Homo sapien
acagctgcataatagagaagccggc

SEQ ID NO: 403284 - DNA, 25 bp, Homo sapien
gcacacttttactctacgcaactgt

SEQ ID NO: 403285 - DNA, 25 bp, Homo sapien
aaatagcacacttttactctacgca

SEQ ID NO: 403286 - DNA, 25 bp, Homo sapien
actctacgcaactgttgctttttca

SEQ ID NO: 403287 - DNA, 25 bp, Homo sapien
acttttactctacgcaactgttgct

SEQ ID NO: 403288 - DNA, 25 bp, Homo sapien
tctgaaaccgctctattattttcat

SEQ ID NO: 403289 - DNA, 25 bp, Homo sapien
gtctcttccaaaatcctagcatgct

SEQ ID NO: 403290 - DNA, 25 bp, Homo sapien
gaagttattctgaaaccgctctatt

SEQ ID NO: 403291 - DNA, 25 bp, Homo sapien
tacacattgtattgatgttatttct

SEQ ID NO: 403292 - DNA, 25 bp, Homo sapien
tagtcacataaaggcacggagttgt

SEQ ID NO: 403293 - DNA, 25 bp, Homo sapien
caagtttcggagaccacagcctgtc

SEQ ID NO: 403294 - DNA, 25 bp, Homo sapien
tcaaggtaattcaggagcccaggtt

SEQ ID NO: 403295 - DNA, 25 bp, Homo sapien
tatggaaaccctccaggaagttgag

SEQ ID NO: 403296 - DNA, 25 bp, Homo sapien
ttagtgttcttaatctttcccaagc

SEQ ID NO: 403297 - DNA, 25 bp, Homo sapien
cttagaaatatcttccagtctttga

SEQ ID NO: 403298 - DNA, 25 bp, Homo sapien
tctttcccaagccaattcccgccat

SEQ ID NO: 403299 - DNA, 25 bp, Homo sapien
cagtctttgaaggaagggtttagtg

SEQ ID NO: 403300 - DNA, 25 bp, Homo sapien
aatcttttgcttgaattctccaaag

SEQ ID NO: 403301 - DNA, 25 bp, Homo sapien
cttctaggtcccatatcctcaggat

SEQ ID NO: 403302 - DNA, 25 bp, Homo sapien
ggtcccatatcctcaggataactac

SEQ ID NO: 403303 - DNA, 25 bp, Homo sapien
gatgattgctacacttctaggtccc

SEQ ID NO: 403304 - DNA, 25 bp, Homo sapien
cttcttaggtagatgattgctacac

SEQ ID NO: 403305 - DNA, 25 bp, Homo sapien
agctgctccacttctgagtgatcct

SEQ ID NO: 403306 - DNA, 25 bp, Homo sapien
tgagtgatcctggtttttttatttc

SEQ ID NO: 403307 - DNA, 25 bp, Homo sapien
tatttcttgttgtcccacagcagac

SEQ ID NO: 403308 - DNA, 25 bp, Homo sapien
cccacagcagacagttattaaaata

SEQ ID NO: 403309 - DNA, 25 bp, Homo sapien
gattatttgcaagagtgctcccaac

SEQ ID NO: 403310 - DNA, 25 bp, Homo sapien
catatgtatttgtgctcgaaaagga

SEQ ID NO: 403311 - DNA, 25 bp, Homo sapien
tgtcacacctaaaatgggtaggtcc

SEQ ID NO: 403312 - DNA, 25 bp, Homo sapien
ggctcggttctcactttagaaggca

SEQ ID NO: 403313 - DNA, 25 bp, Homo sapien
tgaacgagaggattctctgcatgac

SEQ ID NO: 403314 - DNA, 25 bp, Homo sapien
ggagcagattctcacataaacttga

SEQ ID NO: 403315 - DNA, 25 bp, Homo sapien
aatgcagttctctgtttgccctgac

SEQ ID NO: 403316 - DNA, 25 bp, Homo sapien
tacatggcggaattcccacgaatgc

SEQ ID NO: 403317 - DNA, 25 bp, Homo sapien
tgagccatatccatgggcatctaaa

SEQ ID NO: 403318 - DNA, 25 bp, Homo sapien
agccatatccatgggcatctaaatc

SEQ ID NO: 403319 - DNA, 25 bp, Homo sapien
tatgagccatatccatgggcatcta

SEQ ID NO: 403320 - DNA, 25 bp, Homo sapien
ctatgagccatatccatgggcatct

SEQ ID NO: 403321 - DNA, 25 bp, Homo sapien
cttgagctttctggtcacggtggtg

SEQ ID NO: 403322 - DNA, 25 bp, Homo sapien
ttttacttgagctttctggtcacgg

SEQ ID NO: 403323 - DNA, 25 bp, Homo sapien
tcatatcctaacagcttgtctggca

SEQ ID NO: 403324 - DNA, 25 bp, Homo sapien
tggcagcagggttcgtgttttttac

SEQ ID NO: 403325 - DNA, 25 bp, Homo sapien
gaatgcttggtatcgttcaaaacag

SEQ ID NO: 403326 - DNA, 25 bp, Homo sapien
taaaataagtcaacggaatgcttgg

SEQ ID NO: 403327 - DNA, 25 bp, Homo sapien
tccaacatggttggcgggaaactcc

SEQ ID NO: 403328 - DNA, 25 bp, Homo sapien
cacctgaatttccagtcaagtgagg

SEQ ID NO: 403329 - DNA, 25 bp, Homo sapien
cataacactgaataacagcccttaa

SEQ ID NO: 403330 - DNA, 25 bp, Homo sapien
catataccccttttaaatgacctca

SEQ ID NO: 403331 - DNA, 25 bp, Homo sapien
ccttttaaatgacctcacattgctg

SEQ ID NO: 403332 - DNA, 25 bp, Homo sapien
taaatgacctcacattgctgatttt

SEQ ID NO: 403333 - DNA, 25 bp, Homo sapien
tctgctgcaggcaagatattcccgg

SEQ ID NO: 403334 - DNA, 25 bp, Homo sapien
ggtgcaaatgtcctgtattaactgg

SEQ ID NO: 403335 - DNA, 25 bp, Homo sapien
tttcccatagggcaatcagattgat

SEQ ID NO: 403336 - DNA, 25 bp, Homo sapien
tgttggtcatccctcttgatacggt

SEQ ID NO: 403337 - DNA, 25 bp, Homo sapien
cactgggaacattcgactgtacttc

SEQ ID NO: 403338 - DNA, 25 bp, Homo sapien
ctttccactatccagggagggtagt

SEQ ID NO: 403339 - DNA, 25 bp, Homo sapien
cttttgggtgcgtatcagaggaacc

SEQ ID NO: 403340 - DNA, 25 bp, Homo sapien
aaggacagtttctactgcacagtga

SEQ ID NO: 403341 - DNA, 25 bp, Homo sapien
ttaaagccaaagtatctaatgcact

SEQ ID NO: 403342 - DNA, 25 bp, Homo sapien
gtatctaatgcacttagaaaagtgg

SEQ ID NO: 403343 - DNA, 25 bp, Homo sapien
aattaaagccaaagtatctaatgca

SEQ ID NO: 403344 - DNA, 25 bp, Homo sapien
acttagaaaagtggaccatcgcggg

SEQ ID NO: 403345 - DNA, 25 bp, Homo sapien
ctttgacattggattcattaggcat

SEQ ID NO: 403346 - DNA, 25 bp, Homo sapien
cagaaattgggttcttgaggtggat

SEQ ID NO: 403347 - DNA, 25 bp, Homo sapien
cagatgccgtcagttttggaggcca

SEQ ID NO: 403348 - DNA, 25 bp, Homo sapien
ctgctgggcagtgacgatgtgtctg

SEQ ID NO: 403349 - DNA, 25 bp, Homo sapien
tgcaaacggtataagctttttccga

SEQ ID NO: 403350 - DNA, 25 bp, Homo sapien
tacagccctgcaaacggtataagct

SEQ ID NO: 403351 - DNA, 25 bp, Homo sapien
tcaagtacagccctgcaaacggtat

SEQ ID NO: 403352 - DNA, 25 bp, Homo sapien
ggagctgtatcaagtacagccctgc

SEQ ID NO: 403353 - DNA, 25 bp, Homo sapien
gaggatagtcataaaataacaacag

SEQ ID NO: 403354 - DNA, 25 bp, Homo sapien
aaacaaagtcttatcctcagagccg

SEQ ID NO: 403355 - DNA, 25 bp, Homo sapien
ggtatgctccacttaactatgaaca

SEQ ID NO: 403356 - DNA, 25 bp, Homo sapien
aaaagctgtcatgtaattgcaaaac

SEQ ID NO: 403357 - DNA, 25 bp, Homo sapien
ttataaaactaaacggcatctagag

SEQ ID NO: 403358 - DNA, 25 bp, Homo sapien
tatcaagtacaagtttttgcccctc

SEQ ID NO: 403359 - DNA, 25 bp, Homo sapien
actaaacggcatctagagatctcac

SEQ ID NO: 403360 - DNA, 25 bp, Homo sapien
catgtgcatgccaaagaatgtagaa

SEQ ID NO: 403361 - DNA, 25 bp, Homo sapien
gccacaaaattcagcttggaagtaa

SEQ ID NO: 403362 - DNA, 25 bp, Homo sapien
tagagctggatgaaaagagtactca

SEQ ID NO: 403363 - DNA, 25 bp, Homo sapien
taatcctctgctacttagagctgga

SEQ ID NO: 403364 - DNA, 25 bp, Homo sapien
tgatgacacatacagacagtacttg

SEQ ID NO: 403365 - DNA, 25 bp, Homo sapien
gctaacacgaaattcataaagtctg

SEQ ID NO: 403366 - DNA, 25 bp, Homo sapien
ctgaaacggtcatcgtaacagttgg

SEQ ID NO: 403367 - DNA, 25 bp, Homo sapien
catgcaacgacagaaggttcgatat

SEQ ID NO: 403368 - DNA, 25 bp, Homo sapien
caggttgggcacaaaagtgcttgct

SEQ ID NO: 403369 - DNA, 25 bp, Homo sapien
ggctattctctggaccgtgcaaaca

SEQ ID NO: 403370 - DNA, 25 bp, Homo sapien
caagggttacatcaaggctattctc

SEQ ID NO: 403371 - DNA, 25 bp, Homo sapien
aacagtctagaccaatgacctgcag

SEQ ID NO: 403372 - DNA, 25 bp, Homo sapien
cattcgatcgatgagtgaaaaggca

SEQ ID NO: 403373 - DNA, 25 bp, Homo sapien
caggccaactatgagaaccttgctt

SEQ ID NO: 403374 - DNA, 25 bp, Homo sapien
gggagcagctcgaggctgcaaagag

SEQ ID NO: 403375 - DNA, 25 bp, Homo sapien
caaagaggtaagcagggtgagaaga

SEQ ID NO: 403376 - DNA, 25 bp, Homo sapien
tgcttttcaaaggagtctgttctca

SEQ ID NO: 403377 - DNA, 25 bp, Homo sapien
tctggaagagaatatggtcattggt

SEQ ID NO: 403378 - DNA, 25 bp, Homo sapien
gaagagaatatggtcattggtactc

SEQ ID NO: 403379 - DNA, 25 bp, Homo sapien
gagaatatggtcattggtactcact

SEQ ID NO: 403380 - DNA, 25 bp, Homo sapien
acagtataagttgccgttgtttaat

SEQ ID NO: 403381 - DNA, 25 bp, Homo sapien
taagccttagggcctcgagcacgtc

SEQ ID NO: 403382 - DNA, 25 bp, Homo sapien
ttaagccttagggcctcgagcacgt

SEQ ID NO: 403383 - DNA, 25 bp, Homo sapien
tagctgacaaacactggcacttgct

SEQ ID NO: 403384 - DNA, 25 bp, Homo sapien
atagctgacaaacactggcacttgc

SEQ ID NO: 403385 - DNA, 25 bp, Homo sapien
agctgacaaacactggcacttgctt

SEQ ID NO: 403386 - DNA, 25 bp, Homo sapien
caaagtcagtccttatggagttgcc

SEQ ID NO: 403387 - DNA, 25 bp, Homo sapien
gataattctagggtaatattcaatc

SEQ ID NO: 403388 - DNA, 25 bp, Homo sapien
agatggcatcaactttaactgtcag

SEQ ID NO: 403389 - DNA, 25 bp, Homo sapien
aatgactattcagaagatgcatatt

SEQ ID NO: 403390 - DNA, 25 bp, Homo sapien
acaaaacccttgggcctgactggca

SEQ ID NO: 403391 - DNA, 25 bp, Homo sapien
caaaacccttgggcctgactggcag

SEQ ID NO: 403392 - DNA, 25 bp, Homo sapien
tgaatgtactcttccgcagagggaa

SEQ ID NO: 403393 - DNA, 25 bp, Homo sapien
cctgaatgtactcttccgcagaggg

SEQ ID NO: 403394 - DNA, 25 bp, Homo sapien
gaatgtactcttccgcagagggaag

SEQ ID NO: 403395 - DNA, 25 bp, Homo sapien
agccctgaatgtactcttccgcaga

SEQ ID NO: 403396 - DNA, 25 bp, Homo sapien
tacaaaaggtgtgatgccattaact

SEQ ID NO: 403397 - DNA, 25 bp, Homo sapien
aatacaaaaggtgtgatgccattaa

SEQ ID NO: 403398 - DNA, 25 bp, Homo sapien
gaaatacaaaaggtgtgatgccatt

SEQ ID NO: 403399 - DNA, 25 bp, Homo sapien
agagaaatacaaaaggtgtgatgcc

SEQ ID NO: 403400 - DNA, 25 bp, Homo sapien
ggtgaacatgtgcttgtcaatacat

SEQ ID NO: 403401 - DNA, 25 bp, Homo sapien
aacatgtgcttgtcaatacattgtc

SEQ ID NO: 403402 - DNA, 25 bp, Homo sapien
catgtgcttgtcaatacattgtcac

SEQ ID NO: 403403 - DNA, 25 bp, Homo sapien
tgaacatgtgcttgtcaatacattg

SEQ ID NO: 403404 - DNA, 25 bp, Homo sapien
ggatgctggaattttttcactgagt

SEQ ID NO: 403405 - DNA, 25 bp, Homo sapien
cctcccattcatgttgctggtcatt

SEQ ID NO: 403406 - DNA, 25 bp, Homo sapien
ttgctggtcattggcaatttcttct

SEQ ID NO: 403407 - DNA, 25 bp, Homo sapien
tctggatgctggaattttttcactg

SEQ ID NO: 403408 - DNA, 25 bp, Homo sapien
actgtgtgatggagaccatagagac

SEQ ID NO: 403409 - DNA, 25 bp, Homo sapien
gaacatgtataatacctctccgggg

SEQ ID NO: 403410 - DNA, 25 bp, Homo sapien
gggataacgttggttccaccagcat

SEQ ID NO: 403411 - DNA, 25 bp, Homo sapien
tattgttgaatcagaagttctcgtg

SEQ ID NO: 403412 - DNA, 25 bp, Homo sapien
ttgactgtcagactccggtggccct

SEQ ID NO: 403413 - DNA, 25 bp, Homo sapien
gatttctctctttgactgtcagact

SEQ ID NO: 403414 - DNA, 25 bp, Homo sapien
gtcagactccggtggccctgaacaa

SEQ ID NO: 403415 - DNA, 25 bp, Homo sapien
tccggtggccctgaacaatgtttag

SEQ ID NO: 403416 - DNA, 25 bp, Homo sapien
tgtgtgacagtgcatcttatctccc

SEQ ID NO: 403417 - DNA, 25 bp, Homo sapien
gggtttgtgtgacagtgcatcttat

SEQ ID NO: 403418 - DNA, 25 bp, Homo sapien
cactagatttctgctgggtttgtgt

SEQ ID NO: 403419 - DNA, 25 bp, Homo sapien
tcattgtttcaaggttttttgcttg

SEQ ID NO: 403420 - DNA, 25 bp, Homo sapien
gtgctgaggtaatcgaaatgtttcc

SEQ ID NO: 403421 - DNA, 25 bp, Homo sapien
tctctgtgtctaaacgggactttgc

SEQ ID NO: 403422 - DNA, 25 bp, Homo sapien
tgtttgtccaggctgtgctgaggta

SEQ ID NO: 403423 - DNA, 25 bp, Homo sapien
tctaaacgggactttgcttgcctct

SEQ ID NO: 403424 - DNA, 25 bp, Homo sapien
tgctttttcactaacttccttattc

SEQ ID NO: 403425 - DNA, 25 bp, Homo sapien
ctgctttttcactaacttccttatt

SEQ ID NO: 403426 - DNA, 25 bp, Homo sapien
tatctcttggttcccttgctgcttc

SEQ ID NO: 403427 - DNA, 25 bp, Homo sapien
tgctgcttctccaaacatatcttct

SEQ ID NO: 403428 - DNA, 25 bp, Homo sapien
tctgacaaacattatctcttggttc

SEQ ID NO: 403429 - DNA, 25 bp, Homo sapien
tctccaaacatatcttctattctca

SEQ ID NO: 403430 - DNA, 25 bp, Homo sapien
ctgaggaaattggagttttgattga

SEQ ID NO: 403431 - DNA, 25 bp, Homo sapien
ttgaaaagtggaactgacaggaagt

SEQ ID NO: 403432 - DNA, 25 bp, Homo sapien
tgaaaagtggaactgacaggaagtt

SEQ ID NO: 403433 - DNA, 25 bp, Homo sapien
catttttgatatgtgctctcactac

SEQ ID NO: 403434 - DNA, 25 bp, Homo sapien
cattgaaagttgtgggtttatcctt

SEQ ID NO: 403435 - DNA, 25 bp, Homo sapien
catttaatcgcagtgacagttgtga

SEQ ID NO: 403436 - DNA, 25 bp, Homo sapien
gagattagaggtaccgctttcttca

SEQ ID NO: 403437 - DNA, 25 bp, Homo sapien
tctggaggcaaggagtaccagctca

SEQ ID NO: 403438 - DNA, 25 bp, Homo sapien
tgctttgcaaatggatatcttctcc

SEQ ID NO: 403439 - DNA, 25 bp, Homo sapien
gacactaactccacctacagtcgga

SEQ ID NO: 403440 - DNA, 25 bp, Homo sapien
gagtaccagctcaaggtattggcag

SEQ ID NO: 403441 - DNA, 25 bp, Homo sapien
agtgctaactcctgcaagcatgtga

SEQ ID NO: 403442 - DNA, 25 bp, Homo sapien
tctccgactctgtgatgccaactta

SEQ ID NO: 403443 - DNA, 25 bp, Homo sapien
cctgagcattgaggagtcagtgcta

SEQ ID NO: 403444 - DNA, 25 bp, Homo sapien
catgtgagtctctccgactctgtga

SEQ ID NO: 403445 - DNA, 25 bp, Homo sapien
ttaggttggagtgaatgggtaccat

SEQ ID NO: 403446 - DNA, 25 bp, Homo sapien
tttaggttggagtgaatgggtacca

SEQ ID NO: 403447 - DNA, 25 bp, Homo sapien
cgaagagctttaggttggagtgaat

SEQ ID NO: 403448 - DNA, 25 bp, Homo sapien
ctgtagtcgaagagctttaggttgg

SEQ ID NO: 403449 - DNA, 25 bp, Homo sapien
ttcttagaggtggactctaaggacc

SEQ ID NO: 403450 - DNA, 25 bp, Homo sapien
ctttgttcttagaggtggactctaa

SEQ ID NO: 403451 - DNA, 25 bp, Homo sapien
agaggtggactctaaggaccttgtt

SEQ ID NO: 403452 - DNA, 25 bp, Homo sapien
ttagaggtggactctaaggaccttg

SEQ ID NO: 403453 - DNA, 25 bp, Homo sapien
ttccaagctgcattccatagcatct

SEQ ID NO: 403454 - DNA, 25 bp, Homo sapien
acattccaagctgcattccatagca

SEQ ID NO: 403455 - DNA, 25 bp, Homo sapien
cacattccaagctgcattccatagc

SEQ ID NO: 403456 - DNA, 25 bp, Homo sapien
cattccaagctgcattccatagcat

SEQ ID NO: 403457 - DNA, 25 bp, Homo sapien
aatgtgatgaatgatgtaaggaccc

SEQ ID NO: 403458 - DNA, 25 bp, Homo sapien
tactctaatgcccagtgaattctga

SEQ ID NO: 403459 - DNA, 25 bp, Homo sapien
gcctttgcccaagcggtggagttga

SEQ ID NO: 403460 - DNA, 25 bp, Homo sapien
ggaatggaaattgggtcagcacagc

SEQ ID NO: 403461 - DNA, 25 bp, Homo sapien
aaatagaatctatttcaaatggcaa

SEQ ID NO: 403462 - DNA, 25 bp, Homo sapien
gctaattcataaccacaaatagaat

SEQ ID NO: 403463 - DNA, 25 bp, Homo sapien
atagctaattcataaccacaaatag

SEQ ID NO: 403464 - DNA, 25 bp, Homo sapien
ttcataaccacaaatagaatctatt

SEQ ID NO: 403465 - DNA, 25 bp, Homo sapien
tgttggatgaagagttctgaatcag

SEQ ID NO: 403466 - DNA, 25 bp, Homo sapien
taaggtgttggatgaagagttctga

SEQ ID NO: 403467 - DNA, 25 bp, Homo sapien
taaaggtctttaaggtgttggatga

SEQ ID NO: 403468 - DNA, 25 bp, Homo sapien
ctttaaggtgttggatgaagagttc

SEQ ID NO: 403469 - DNA, 25 bp, Homo sapien
tcatggtctcccaaatttctaaggg

SEQ ID NO: 403470 - DNA, 25 bp, Homo sapien
tagttggttcccagtatgtctgcca

SEQ ID NO: 403471 - DNA, 25 bp, Homo sapien
tgcagtgtgatggtctttcctcatg

SEQ ID NO: 403472 - DNA, 25 bp, Homo sapien
gaatcaatgtatctctgttgcagtg

SEQ ID NO: 403473 - DNA, 25 bp, Homo sapien
aactgacgtattcagtccagtggcc

SEQ ID NO: 403474 - DNA, 25 bp, Homo sapien
ccagtggccattaatatggggataa

SEQ ID NO: 403475 - DNA, 25 bp, Homo sapien
gatgcttaaaaactgacgtattcag

SEQ ID NO: 403476 - DNA, 25 bp, Homo sapien
taaaaactgacgtattcagtccagt

SEQ ID NO: 403477 - DNA, 25 bp, Homo sapien
gtcaaaaccccactgaatctgccag

SEQ ID NO: 403478 - DNA, 25 bp, Homo sapien
caaagattgaatgaagacctgaagg

SEQ ID NO: 403479 - DNA, 25 bp, Homo sapien
gacctgaaggccaaatctctagatc

SEQ ID NO: 403480 - DNA, 25 bp, Homo sapien
caaatctctagatctgagaagacaa

SEQ ID NO: 403481 - DNA, 25 bp, Homo sapien
caatatccttattattgtcatcaac

SEQ ID NO: 403482 - DNA, 25 bp, Homo sapien
tatccttattattgtcatcaactac

SEQ ID NO: 403483 - DNA, 25 bp, Homo sapien
tctttgtgatcgacatggttttctt

SEQ ID NO: 403484 - DNA, 25 bp, Homo sapien
tttctctttgtgatcgacatggttt

SEQ ID NO: 403485 - DNA, 25 bp, Homo sapien
ttttcaactagtttgcctcatgcaa

SEQ ID NO: 403486 - DNA, 25 bp, Homo sapien
cactatgccctgcttcttatagcct

SEQ ID NO: 403487 - DNA, 25 bp, Homo sapien
cctctattgattctcaaggcatgaa

SEQ ID NO: 403488 - DNA, 25 bp, Homo sapien
caacttcttggtctaaataaatctg

SEQ ID NO: 403489 - DNA, 25 bp, Homo sapien
gttgttcagattaagttatttccat

SEQ ID NO: 403490 - DNA, 25 bp, Homo sapien
ttgttcagattaagttatttccatt

SEQ ID NO: 403491 - DNA, 25 bp, Homo sapien
cagctgtgctaggtaccgatgagga

SEQ ID NO: 403492 - DNA, 25 bp, Homo sapien
aaaggcatctttcatgccacgcggg

SEQ ID NO: 403493 - DNA, 25 bp, Homo sapien
ggattactatagacccagttgcagg

SEQ ID NO: 403494 - DNA, 25 bp, Homo sapien
gagcactttgttggagattgcagca

SEQ ID NO: 403495 - DNA, 25 bp, Homo sapien
taactacaagaagccagagttttct

SEQ ID NO: 403496 - DNA, 25 bp, Homo sapien
caggcgttgcaagaatcagattcac

SEQ ID NO: 403497 - DNA, 25 bp, Homo sapien
tcccctcttaactacaagaagccag

SEQ ID NO: 403498 - DNA, 25 bp, Homo sapien
gttttctgtgcaaacgaaacaggcg

SEQ ID NO: 403499 - DNA, 25 bp, Homo sapien
gcagcttgccaggtagacgtttcca

SEQ ID NO: 403500 - DNA, 25 bp, Homo sapien
cttggaaagcagcaaccgtcctgac

SEQ ID NO: 403501 - DNA, 25 bp, Homo sapien
caagtcatcattgcgttaggcagca

SEQ ID NO: 403502 - DNA, 25 bp, Homo sapien
gaatcatgtgaccttacgactgaga

SEQ ID NO: 403503 - DNA, 25 bp, Homo sapien
tttgccttttctgactggtgatttg

SEQ ID NO: 403504 - DNA, 25 bp, Homo sapien
ccttttctgactggtgatttgtatt

SEQ ID NO: 403505 - DNA, 25 bp, Homo sapien
ttttttgccttttctgactggtgat

SEQ ID NO: 403506 - DNA, 25 bp, Homo sapien
tgccttttctgactggtgatttgta

SEQ ID NO: 403507 - DNA, 25 bp, Homo sapien
ggagacaaacgtgtgtaatcctcat

SEQ ID NO: 403508 - DNA, 25 bp, Homo sapien
catgagatcattgcattgcagcact

SEQ ID NO: 403509 - DNA, 25 bp, Homo sapien
tgcacccctttggttcaggagacaa

SEQ ID NO: 403510 - DNA, 25 bp, Homo sapien
tgaactgggcaaacaggacgacagc

SEQ ID NO: 403511 - DNA, 25 bp, Homo sapien
cagtgacggcaaggattggtgtagc

SEQ ID NO: 403512 - DNA, 25 bp, Homo sapien
cggcaaggattggtgtagcttctgc

SEQ ID NO: 403513 - DNA, 25 bp, Homo sapien
gtagcttctgcgcagtgctttgtgc

SEQ ID NO: 403514 - DNA, 25 bp, Homo sapien
gattggtgtagcttctgcgcagtgc

SEQ ID NO: 403515 - DNA, 25 bp, Homo sapien
cattcccacgatccactcagatgct

SEQ ID NO: 403516 - DNA, 25 bp, Homo sapien
gacagcagttgtctgatatttctcc

SEQ ID NO: 403517 - DNA, 25 bp, Homo sapien
ttctcgatcgtctaccctcattccc

SEQ ID NO: 403518 - DNA, 25 bp, Homo sapien
tgcccattttgatatcgtgttttct

SEQ ID NO: 403519 - DNA, 25 bp, Homo sapien
tttcttgtggtcaattgggcagttt

SEQ ID NO: 403520 - DNA, 25 bp, Homo sapien
ggcagtttgtgtcccattgaatata

SEQ ID NO: 403521 - DNA, 25 bp, Homo sapien
tatatgtctgtgtatccatacgctt

SEQ ID NO: 403522 - DNA, 25 bp, Homo sapien
aggtgcaatacggtttactagaaag

SEQ ID NO: 403523 - DNA, 25 bp, Homo sapien
ccgatcttgtggtgaagtggaccgc

SEQ ID NO: 403524 - DNA, 25 bp, Homo sapien
gcataaacccgtagatccgatcttg

SEQ ID NO: 403525 - DNA, 25 bp, Homo sapien
tagggggcccatgcaagatgttgcc

SEQ ID NO: 403526 - DNA, 25 bp, Homo sapien
agctcgcttctatgggtctgtgtca

SEQ ID NO: 403527 - DNA, 25 bp, Homo sapien
cacttgagccgtcgaggaattcttc

SEQ ID NO: 403528 - DNA, 25 bp, Homo sapien
ggagttaactgtacaaccttctagc

SEQ ID NO: 403529 - DNA, 25 bp, Homo sapien
caacattggaagctgtgtgcatccg

SEQ ID NO: 403530 - DNA, 25 bp, Homo sapien
tatatccttgccaagcccttaggtg

SEQ ID NO: 403531 - DNA, 25 bp, Homo sapien
gcagtaaagtcatgggttacccaag

SEQ ID NO: 403532 - DNA, 25 bp, Homo sapien
cagtaaagtcatgggttacccaaga

SEQ ID NO: 403533 - DNA, 25 bp, Homo sapien
agcagtaaagtcatgggttacccaa

SEQ ID NO: 403534 - DNA, 25 bp, Homo sapien
cagcagtaaagtcatgggttaccca

SEQ ID NO: 403535 - DNA, 25 bp, Homo sapien
tcatacttgccatattctttaccca

SEQ ID NO: 403536 - DNA, 25 bp, Homo sapien
cactcatacttgccatattctttac

SEQ ID NO: 403537 - DNA, 25 bp, Homo sapien
actcatacttgccatattctttacc

SEQ ID NO: 403538 - DNA, 25 bp, Homo sapien
catacttgccatattctttacccat

SEQ ID NO: 403539 - DNA, 25 bp, Homo sapien
gctagactgtgagttaatgttaatg

SEQ ID NO: 403540 - DNA, 25 bp, Homo sapien
cagtgaaaataccagccgctgccac

SEQ ID NO: 403541 - DNA, 25 bp, Homo sapien
tagagtgacagcgtcatgcaaatgc

SEQ ID NO: 403542 - DNA, 25 bp, Homo sapien
tgggagagggtggatgctagactgt

SEQ ID NO: 403543 - DNA, 25 bp, Homo sapien
agcatcagatgctttgcctcgcctc

SEQ ID NO: 403544 - DNA, 25 bp, Homo sapien
cgcgtgctcgctcgggcatccgtgt

SEQ ID NO: 403545 - DNA, 25 bp, Homo sapien
atctgtatgcctgtgtgcgcgcgcg

SEQ ID NO: 403546 - DNA, 25 bp, Homo sapien
tcgcctctcgctgtgtatctgtatg

SEQ ID NO: 403547 - DNA, 25 bp, Homo sapien
gggacaagagggtcaatctacgcct

SEQ ID NO: 403548 - DNA, 25 bp, Homo sapien
cctgaaggcccagtagtgagtaact

SEQ ID NO: 403549 - DNA, 25 bp, Homo sapien
gaagaatgcatctccaagaaggtac

SEQ ID NO: 403550 - DNA, 25 bp, Homo sapien
ttcagaaaccgatgtgacagcactt

SEQ ID NO: 403551 - DNA, 25 bp, Homo sapien
aatcgtccctattttacacttgagg

SEQ ID NO: 403552 - DNA, 25 bp, Homo sapien
tatttactttgtacccactacgatc

SEQ ID NO: 403553 - DNA, 25 bp, Homo sapien
taagagagattaaattagtggccca

SEQ ID NO: 403554 - DNA, 25 bp, Homo sapien
tgcaggtagctactataatcgtccc

SEQ ID NO: 403555 - DNA, 25 bp, Homo sapien
taaatgtagctgatccaaaaacaaa

SEQ ID NO: 403556 - DNA, 25 bp, Homo sapien
cctaagtatcaacactggaacacaa

SEQ ID NO: 403557 - DNA, 25 bp, Homo sapien
ttccaaccctaagtatcaacactgg

SEQ ID NO: 403558 - DNA, 25 bp, Homo sapien
tacatgattctagaataagttccaa

SEQ ID NO: 403559 - DNA, 25 bp, Homo sapien
tgtatattaacaagaagaactctat

SEQ ID NO: 403560 - DNA, 25 bp, Homo sapien
cttagaggaggtataataagaagag

SEQ ID NO: 403561 - DNA, 25 bp, Homo sapien
aggcctgctgtctcttagcttagag

SEQ ID NO: 403562 - DNA, 25 bp, Homo sapien
tcttagcttagaggaggtataataa

SEQ ID NO: 403563 - DNA, 25 bp, Homo sapien
tactttgtagctagattcctgggtg

SEQ ID NO: 403564 - DNA, 25 bp, Homo sapien
gaagaaataccttgaactgagggac

SEQ ID NO: 403565 - DNA, 25 bp, Homo sapien
cctttactatgaagcatggatgcta

SEQ ID NO: 403566 - DNA, 25 bp, Homo sapien
gggacctggcttagctcaacatctg

SEQ ID NO: 403567 - DNA, 25 bp, Homo sapien
ctaggtggactcatcttccatttca

SEQ ID NO: 403568 - DNA, 25 bp, Homo sapien
tccatttcactcccacaaatgtcag

SEQ ID NO: 403569 - DNA, 25 bp, Homo sapien
aaatgtcaggaaggattctaaggtt

SEQ ID NO: 403570 - DNA, 25 bp, Homo sapien
atttcactcccacaaatgtcaggaa

SEQ ID NO: 403571 - DNA, 25 bp, Homo sapien
gtagagttggaaagagattagtgga

SEQ ID NO: 403572 - DNA, 25 bp, Homo sapien
tagaagcaatgcttttgtagagttg

SEQ ID NO: 403573 - DNA, 25 bp, Homo sapien
gaagcaatgcttttgtagagttgga

SEQ ID NO: 403574 - DNA, 25 bp, Homo sapien
tttgtagagttggaaagagattagt

SEQ ID NO: 403575 - DNA, 25 bp, Homo sapien
taggctggcttctgccagagtgacc

SEQ ID NO: 403576 - DNA, 25 bp, Homo sapien
gagtgaccagggcaactggacaact

SEQ ID NO: 403577 - DNA, 25 bp, Homo sapien
cagagggctgttgagggaggtaggc

SEQ ID NO: 403578 - DNA, 25 bp, Homo sapien
tggacaactgtaatgtgacacaggc

SEQ ID NO: 403579 - DNA, 25 bp, Homo sapien
ccaccacaccccgctgaccccaact

SEQ ID NO: 403580 - DNA, 25 bp, Homo sapien
caccacaccccgctgaccccaactt

SEQ ID NO: 403581 - DNA, 25 bp, Homo sapien
cagtctgggttaacaaatgtactcc

SEQ ID NO: 403582 - DNA, 25 bp, Homo sapien
cttaatagttcaagcaagggtctac

SEQ ID NO: 403583 - DNA, 25 bp, Homo sapien
tcatctgtgactaccaatccagagg

SEQ ID NO: 403584 - DNA, 25 bp, Homo sapien
tggactcatctttcactctggtaaa

SEQ ID NO: 403585 - DNA, 25 bp, Homo sapien
accatattctccaacttcttcatag

SEQ ID NO: 403586 - DNA, 25 bp, Homo sapien
caacttcttcatagaaatctcccat

SEQ ID NO: 403587 - DNA, 25 bp, Homo sapien
tccaacttcttcatagaaatctccc

SEQ ID NO: 403588 - DNA, 25 bp, Homo sapien
tattctccaacttcttcatagaaat

SEQ ID NO: 403589 - DNA, 25 bp, Homo sapien
ccattatgcattattttagccgagg

SEQ ID NO: 403590 - DNA, 25 bp, Homo sapien
gccaaaccgaaagtgtactggtgta

SEQ ID NO: 403591 - DNA, 25 bp, Homo sapien
ggtgtctgttattcttagaggaacc

SEQ ID NO: 403592 - DNA, 25 bp, Homo sapien
gaaccttaagtaatgtaatggagct

SEQ ID NO: 403593 - DNA, 25 bp, Homo sapien
ttattatgcataggttgtctcaggg

SEQ ID NO: 403594 - DNA, 25 bp, Homo sapien
gctttcatcaataacatagcgtaat

SEQ ID NO: 403595 - DNA, 25 bp, Homo sapien
gaatccgttcttagcagcatatttg

SEQ ID NO: 403596 - DNA, 25 bp, Homo sapien
tctacctactaacggatacccctga

SEQ ID NO: 403597 - DNA, 25 bp, Homo sapien
gagccgagatcacgctgttacactc

SEQ ID NO: 403598 - DNA, 25 bp, Homo sapien
tccagccagggcaacaagagtgaaa

SEQ ID NO: 403599 - DNA, 25 bp, Homo sapien
atcacgctgttacactccagccagg

SEQ ID NO: 403600 - DNA, 25 bp, Homo sapien
cagccagggcaacaagagtgaaact

SEQ ID NO: 403601 - DNA, 25 bp, Homo sapien
ccatttgatctgaatgtgtgaccga

SEQ ID NO: 403602 - DNA, 25 bp, Homo sapien
tgtgaccgaatgaccagtggtttga

SEQ ID NO: 403603 - DNA, 25 bp, Homo sapien
actgaattcacagccaccgtggctg

SEQ ID NO: 403604 - DNA, 25 bp, Homo sapien
ccatgcgagtccacaagggctttgt

SEQ ID NO: 403605 - DNA, 25 bp, Homo sapien
aacacacagcatatgccaggtggcc

SEQ ID NO: 403606 - DNA, 25 bp, Homo sapien
atgctcagcttgaacgtggttgcag

SEQ ID NO: 403607 - DNA, 25 bp, Homo sapien
gctcagcttgaacgtggttgcagga

SEQ ID NO: 403608 - DNA, 25 bp, Homo sapien
ctcagcttgaacgtggttgcaggag

SEQ ID NO: 403609 - DNA, 25 bp, Homo sapien
tgctcagcttgaacgtggttgcagg

SEQ ID NO: 403610 - DNA, 25 bp, Homo sapien
gaaatgagacgagcctttatcacct

SEQ ID NO: 403611 - DNA, 25 bp, Homo sapien
tttatcacctttgtgtctggtcacg

SEQ ID NO: 403612 - DNA, 25 bp, Homo sapien
ctggctgaacattgaaatgagacga

SEQ ID NO: 403613 - DNA, 25 bp, Homo sapien
gtgtctggtcacgtctgcttcctca

SEQ ID NO: 403614 - DNA, 25 bp, Homo sapien
tccagttatgcttttatcagagagt

SEQ ID NO: 403615 - DNA, 25 bp, Homo sapien
actgtgtccctctccagttatgctt

SEQ ID NO: 403616 - DNA, 25 bp, Homo sapien
ggtcctcattccagtgacccaccat

SEQ ID NO: 403617 - DNA, 25 bp, Homo sapien
tccatggtcctcattccagtgaccc

SEQ ID NO: 403618 - DNA, 25 bp, Homo sapien
tattagtatgatagcatgcagctct

SEQ ID NO: 403619 - DNA, 25 bp, Homo sapien
gatatatgcagaatttcccttgagg

SEQ ID NO: 403620 - DNA, 25 bp, Homo sapien
gggatccctctctattcagtcttga

SEQ ID NO: 403621 - DNA, 25 bp, Homo sapien
gcagctctgacatttaattctctca

SEQ ID NO: 403622 - DNA, 25 bp, Homo sapien
atagtcatcgtctgtcacactaggg

SEQ ID NO: 403623 - DNA, 25 bp, Homo sapien
caggcatgcaacacttttcagtgga

SEQ ID NO: 403624 - DNA, 25 bp, Homo sapien
cacactaggggtataattcacaggc

SEQ ID NO: 403625 - DNA, 25 bp, Homo sapien
aaacttggcatcctccaaatagtca

SEQ ID NO: 403626 - DNA, 25 bp, Homo sapien
accaaaaggtggaatgagagtggct

SEQ ID NO: 403627 - DNA, 25 bp, Homo sapien
atgaagcagtgaccgtgtgccccac

SEQ ID NO: 403628 - DNA, 25 bp, Homo sapien
caagaaccccctctaggactggtgg

SEQ ID NO: 403629 - DNA, 25 bp, Homo sapien
tgcttttctggcagcgtggagacga

SEQ ID NO: 403630 - DNA, 25 bp, Homo sapien
gtgtagcagccacatcttaagaagg

SEQ ID NO: 403631 - DNA, 25 bp, Homo sapien
tagcagccacatcttaagaaggtca

SEQ ID NO: 403632 - DNA, 25 bp, Homo sapien
tgtagcagccacatcttaagaaggt

SEQ ID NO: 403633 - DNA, 25 bp, Homo sapien
gagtgtagcagccacatcttaagaa

SEQ ID NO: 403634 - DNA, 25 bp, Homo sapien
tgtcttcaatccctacactctggct

SEQ ID NO: 403635 - DNA, 25 bp, Homo sapien
aaaaacactgcccctatgctccggg

SEQ ID NO: 403636 - DNA, 25 bp, Homo sapien
tcttccctcatcttgatctagactc

SEQ ID NO: 403637 - DNA, 25 bp, Homo sapien
tgtaggttccctcccatttgattgt

SEQ ID NO: 403638 - DNA, 25 bp, Homo sapien
tgaaattctgttcctcgcattttat

SEQ ID NO: 403639 - DNA, 25 bp, Homo sapien
ttctgttcctcgcattttatcctgg

SEQ ID NO: 403640 - DNA, 25 bp, Homo sapien
aattctgttcctcgcattttatcct

SEQ ID NO: 403641 - DNA, 25 bp, Homo sapien
tctgttcctcgcattttatcctggc

SEQ ID NO: 403642 - DNA, 25 bp, Homo sapien
tggaaaaacgatgtccagtgtcatt

SEQ ID NO: 403643 - DNA, 25 bp, Homo sapien
tctttaacattagaactaaatctgg

SEQ ID NO: 403644 - DNA, 25 bp, Homo sapien
caatgcagagttgggaagattttgt

SEQ ID NO: 403645 - DNA, 25 bp, Homo sapien
gtggaataggatgctttctttaaca

SEQ ID NO: 403646 - DNA, 25 bp, Homo sapien
ctgtggtgaggaagatagctttacg

SEQ ID NO: 403647 - DNA, 25 bp, Homo sapien
attcacaaatccatccaagacactg

SEQ ID NO: 403648 - DNA, 25 bp, Homo sapien
cattcacaaatccatccaagacact

SEQ ID NO: 403649 - DNA, 25 bp, Homo sapien
gctttacgtgagtcttcccattcac

SEQ ID NO: 403650 - DNA, 25 bp, Homo sapien
tcctttctttcacaatatgaaaaga

SEQ ID NO: 403651 - DNA, 25 bp, Homo sapien
ttctttcacaatatgaaaagaaatt

SEQ ID NO: 403652 - DNA, 25 bp, Homo sapien
ctttctttcacaatatgaaaagaaa

SEQ ID NO: 403653 - DNA, 25 bp, Homo sapien
ttcctttctttcacaatatgaaaag

SEQ ID NO: 403654 - DNA, 25 bp, Homo sapien
tgctgcgtaagttttcctgaaactg

SEQ ID NO: 403655 - DNA, 25 bp, Homo sapien
cctgaaactgatggtgttattaggc

SEQ ID NO: 403656 - DNA, 25 bp, Homo sapien
tttctcctatgtcatcagaacctgc

SEQ ID NO: 403657 - DNA, 25 bp, Homo sapien
gaacctgctgctgcgtaagttttcc

SEQ ID NO: 403658 - DNA, 25 bp, Homo sapien
catgttgtaagcacgatatcgttcc

SEQ ID NO: 403659 - DNA, 25 bp, Homo sapien
gtggccagatgaaccctgatttttc

SEQ ID NO: 403660 - DNA, 25 bp, Homo sapien
tttccaggacacatacgcaagcttg

SEQ ID NO: 403661 - DNA, 25 bp, Homo sapien
gaagagccactcatttcgccacatg

SEQ ID NO: 403662 - DNA, 25 bp, Homo sapien
caaatggtattgagaatgttttcat

SEQ ID NO: 403663 - DNA, 25 bp, Homo sapien
catatttaccaagtttcaaagtttg

SEQ ID NO: 403664 - DNA, 25 bp, Homo sapien
tgtagagttgatttcctgcttgctc

SEQ ID NO: 403665 - DNA, 25 bp, Homo sapien
tcaaagtttgtagagttgatttcct

SEQ ID NO: 403666 - DNA, 25 bp, Homo sapien
gactatcatgttacaaaatctgaag

SEQ ID NO: 403667 - DNA, 25 bp, Homo sapien
agactatcatgttacaaaatctgaa

SEQ ID NO: 403668 - DNA, 25 bp, Homo sapien
ttcagactatcatgttacaaaatct

SEQ ID NO: 403669 - DNA, 25 bp, Homo sapien
cagtgctctcacgatgtaattgcta

SEQ ID NO: 403670 - DNA, 25 bp, Homo sapien
gtaattgctatagaagtgaaatctc

SEQ ID NO: 403671 - DNA, 25 bp, Homo sapien
tccttcttggctttatagggccagt

SEQ ID NO: 403672 - DNA, 25 bp, Homo sapien
gctttatagggccagtgctctcacg

SEQ ID NO: 403673 - DNA, 25 bp, Homo sapien
tgacaagggtcttcttgtgaaagcc

SEQ ID NO: 403674 - DNA, 25 bp, Homo sapien
caagggtcttcttgtgaaagcctca

SEQ ID NO: 403675 - DNA, 25 bp, Homo sapien
ttgacaagggtcttcttgtgaaagc

SEQ ID NO: 403676 - DNA, 25 bp, Homo sapien
gacaagggtcttcttgtgaaagcct

SEQ ID NO: 403677 - DNA, 25 bp, Homo sapien
ccttgaggcaaaacaagataagtac

SEQ ID NO: 403678 - DNA, 25 bp, Homo sapien
tgagaagcactgaccaagactatat

SEQ ID NO: 403679 - DNA, 25 bp, Homo sapien
ggtgagcaaatacaacacagccttg

SEQ ID NO: 403680 - DNA, 25 bp, Homo sapien
gattagacaaccctggtataaagga

SEQ ID NO: 403681 - DNA, 25 bp, Homo sapien
caagtggagctacttatctcagcca

SEQ ID NO: 403682 - DNA, 25 bp, Homo sapien
tagttatccaggtgcaatgtgccac

SEQ ID NO: 403683 - DNA, 25 bp, Homo sapien
tctgcttccctagaacgggtggtgc

SEQ ID NO: 403684 - DNA, 25 bp, Homo sapien
gactgttcttggtgtcccgggccta

SEQ ID NO: 403685 - DNA, 25 bp, Homo sapien
taaaccttgatgcattctgaagttg

SEQ ID NO: 403686 - DNA, 25 bp, Homo sapien
ttctgaagttgaggacagtgactgg

SEQ ID NO: 403687 - DNA, 25 bp, Homo sapien
accttgatgcattctgaagttgagg

SEQ ID NO: 403688 - DNA, 25 bp, Homo sapien
ctaaaccttgatgcattctgaagtt

SEQ ID NO: 403689 - DNA, 25 bp, Homo sapien
aggcattagctaccacacccagtga

SEQ ID NO: 403690 - DNA, 25 bp, Homo sapien
tcattgaactcagaacaaagttttc

SEQ ID NO: 403691 - DNA, 25 bp, Homo sapien
catagaacttcaaattacagacatt

SEQ ID NO: 403692 - DNA, 25 bp, Homo sapien
ttcttcttctcctatgacatgtaca

SEQ ID NO: 403693 - DNA, 25 bp, Homo sapien
caagagggctgatatcaacgagaaa

SEQ ID NO: 403694 - DNA, 25 bp, Homo sapien
tagagatagaatagccagcaaagag

SEQ ID NO: 403695 - DNA, 25 bp, Homo sapien
ggctgatatcaacgagaaatgtagt

SEQ ID NO: 403696 - DNA, 25 bp, Homo sapien
tgatatcaacgagaaatgtagtaga

SEQ ID NO: 403697 - DNA, 25 bp, Homo sapien
gatgccagtcatacactgtcttcat

SEQ ID NO: 403698 - DNA, 25 bp, Homo sapien
tggtgtattgtctaccctttgatca

SEQ ID NO: 403699 - DNA, 25 bp, Homo sapien
ggcactgacctctggtgtattgtct

SEQ ID NO: 403700 - DNA, 25 bp, Homo sapien
aggttgatgccagtcatacactgtc

SEQ ID NO: 403701 - DNA, 25 bp, Homo sapien
caagagtaaggtagctaaacctaag

SEQ ID NO: 403702 - DNA, 25 bp, Homo sapien
gctaggactgaaaatcccaagagta

SEQ ID NO: 403703 - DNA, 25 bp, Homo sapien
taccaaaattgtggatagacaaacc

SEQ ID NO: 403704 - DNA, 25 bp, Homo sapien
gaacagtcagaagtacactagagga

SEQ ID NO: 403705 - DNA, 25 bp, Homo sapien
gattatcttcatcgtctatatgcac

SEQ ID NO: 403706 - DNA, 25 bp, Homo sapien
cccttttgcactaagattatcttca

SEQ ID NO: 403707 - DNA, 25 bp, Homo sapien
ctaagtcccttttgcactaagatta

SEQ ID NO: 403708 - DNA, 25 bp, Homo sapien
gcactaagattatcttcatcgtcta

SEQ ID NO: 403709 - DNA, 25 bp, Homo sapien
ttaacttaaggtagtgcacgtaatg

SEQ ID NO: 403710 - DNA, 25 bp, Homo sapien
cacgtaatgattggattgtgctctc

SEQ ID NO: 403711 - DNA, 25 bp, Homo sapien
ctctgtaagtgacttcactgagaag

SEQ ID NO: 403712 - DNA, 25 bp, Homo sapien
ttggattgtgctctctgtaagtgac

SEQ ID NO: 403713 - DNA, 25 bp, Homo sapien
tcaaaggtttaagagaatagatctc

SEQ ID NO: 403714 - DNA, 25 bp, Homo sapien
tttagacgtgacagttggacagtcc

SEQ ID NO: 403715 - DNA, 25 bp, Homo sapien
tagatctcgagcagattaggaaagt

SEQ ID NO: 403716 - DNA, 25 bp, Homo sapien
aggcagcctttagacgtgacagttg

SEQ ID NO: 403717 - DNA, 25 bp, Homo sapien
ttagcctattatgagtgcatctata

SEQ ID NO: 403718 - DNA, 25 bp, Homo sapien
tagcctattatgagtgcatctatac

SEQ ID NO: 403719 - DNA, 25 bp, Homo sapien
ttctctttccgacatgctccttttc

SEQ ID NO: 403720 - DNA, 25 bp, Homo sapien
aactcccatatacctcctccgttct

SEQ ID NO: 403721 - DNA, 25 bp, Homo sapien
ttttctctttccgacatgctccttt

SEQ ID NO: 403722 - DNA, 25 bp, Homo sapien
tcccatatacctcctccgttctcat

SEQ ID NO: 403723 - DNA, 25 bp, Homo sapien
aatttccttgaagattgctccgggt

SEQ ID NO: 403724 - DNA, 25 bp, Homo sapien
ggctgcactcagcttgtgccactgg

SEQ ID NO: 403725 - DNA, 25 bp, Homo sapien
ggcctgggcatgctgtgaccatctt

SEQ ID NO: 403726 - DNA, 25 bp, Homo sapien
ctctctcagagagtggtgcccctgc

SEQ ID NO: 403727 - DNA, 25 bp, Homo sapien
gaattagaaaagcaagagcaaacac

SEQ ID NO: 403728 - DNA, 25 bp, Homo sapien
attcaaaagctagcagaaggcaaga

SEQ ID NO: 403729 - DNA, 25 bp, Homo sapien
cacaattaaaagaattagaaaagca

SEQ ID NO: 403730 - DNA, 25 bp, Homo sapien
ttaaaagaattagaaaagcaagagc

SEQ ID NO: 403731 - DNA, 25 bp, Homo sapien
gactggttttgctccaatgaaggca

SEQ ID NO: 403732 - DNA, 25 bp, Homo sapien
gtcattgaaactcaccaaagaccaa

SEQ ID NO: 403733 - DNA, 25 bp, Homo sapien
tgaaggcaaagccacgcccatcagg

SEQ ID NO: 403734 - DNA, 25 bp, Homo sapien
aactcctatgatcagcccgtggaca

SEQ ID NO: 403735 - DNA, 25 bp, Homo sapien
tagtcaccaggattcttgacaagct

SEQ ID NO: 403736 - DNA, 25 bp, Homo sapien
ttagtcaccaggattcttgacaagc

SEQ ID NO: 403737 - DNA, 25 bp, Homo sapien
agtcaccaggattcttgacaagctc

SEQ ID NO: 403738 - DNA, 25 bp, Homo sapien
cagtttgaaactcgaggtcctgctt

SEQ ID NO: 403739 - DNA, 25 bp, Homo sapien
tcagtttgaaactcgaggtcctgct

SEQ ID NO: 403740 - DNA, 25 bp, Homo sapien
ctcagtttgaaactcgaggtcctgc

SEQ ID NO: 403741 - DNA, 25 bp, Homo sapien
gaatatgtcagaacctatctcagaa

SEQ ID NO: 403742 - DNA, 25 bp, Homo sapien
aaggccagtgcagtatagtttacca

SEQ ID NO: 403743 - DNA, 25 bp, Homo sapien
tatctcagaacaaggtcaccctgac

SEQ ID NO: 403744 - DNA, 25 bp, Homo sapien
caaatgaggtggattgcatgcatgg

SEQ ID NO: 403745 - DNA, 25 bp, Homo sapien
atgggaacaattcccagctttgcag

SEQ ID NO: 403746 - DNA, 25 bp, Homo sapien
aatgggaacaattcccagctttgca

SEQ ID NO: 403747 - DNA, 25 bp, Homo sapien
tctgcctccaggtctgtgcagtctc

SEQ ID NO: 403748 - DNA, 25 bp, Homo sapien
tgcctccaggtctgtgcagtctctc

SEQ ID NO: 403749 - DNA, 25 bp, Homo sapien
tcattctcgatattgttcctctgcc

SEQ ID NO: 403750 - DNA, 25 bp, Homo sapien
cctccaggtctgtgcagtctctcat

SEQ ID NO: 403751 - DNA, 25 bp, Homo sapien
ctggacaacggtcctgcataagcta

SEQ ID NO: 403752 - DNA, 25 bp, Homo sapien
ctggacttttccaggtaggatccca

SEQ ID NO: 403753 - DNA, 25 bp, Homo sapien
gtccagcatcctgtaggtaactttt

SEQ ID NO: 403754 - DNA, 25 bp, Homo sapien
gacttttccaggtaggatcccactg

SEQ ID NO: 403755 - DNA, 25 bp, Homo sapien
gcaggatttcttcactgttctctga

SEQ ID NO: 403756 - DNA, 25 bp, Homo sapien
ctggtgaagctaaagtgcaggattt

SEQ ID NO: 403757 - DNA, 25 bp, Homo sapien
caggatttcttcactgttctctgag

SEQ ID NO: 403758 - DNA, 25 bp, Homo sapien
tatctcctaggtcactaaaggcatc

SEQ ID NO: 403759 - DNA, 25 bp, Homo sapien
actaagccacttagttcattgagtc

SEQ ID NO: 403760 - DNA, 25 bp, Homo sapien
ttttaggtagattgctggactcagt

SEQ ID NO: 403761 - DNA, 25 bp, Homo sapien
taaaggcatctaagtgtcttggttg

SEQ ID NO: 403762 - DNA, 25 bp, Homo sapien
atcccacagcccttgaacagtgtga

SEQ ID NO: 403763 - DNA, 25 bp, Homo sapien
caggtgagcagcagtcatattcaga

SEQ ID NO: 403764 - DNA, 25 bp, Homo sapien
atagagatagagagtgccaacattt

SEQ ID NO: 403765 - DNA, 25 bp, Homo sapien
gagatagagagtgccaacatttcat

SEQ ID NO: 403766 - DNA, 25 bp, Homo sapien
gtgagcagcagtcatattcagatac

SEQ ID NO: 403767 - DNA, 25 bp, Homo sapien
tttccagtataagcgggatcggcca

SEQ ID NO: 403768 - DNA, 25 bp, Homo sapien
agtataagcgggatcggccagcatt

SEQ ID NO: 403769 - DNA, 25 bp, Homo sapien
tccagtataagcgggatcggccagc

SEQ ID NO: 403770 - DNA, 25 bp, Homo sapien
ctttccagtataagcgggatcggcc

SEQ ID NO: 403771 - DNA, 25 bp, Homo sapien
aatcaacagccacttagggcctttg

SEQ ID NO: 403772 - DNA, 25 bp, Homo sapien
gaggaaagaataggccctgatgcag

SEQ ID NO: 403773 - DNA, 25 bp, Homo sapien
gagatcagaaagatctaagaagatt

SEQ ID NO: 403774 - DNA, 25 bp, Homo sapien
gaaatcaacagccacttagggcctt

SEQ ID NO: 403775 - DNA, 25 bp, Homo sapien
caatgttaatgttagctacagtttt

SEQ ID NO: 403776 - DNA, 25 bp, Homo sapien
aaaacaatgttaatgttagctacag

SEQ ID NO: 403777 - DNA, 25 bp, Homo sapien
acaaaacaatgttaatgttagctac

SEQ ID NO: 403778 - DNA, 25 bp, Homo sapien
aacaatgttaatgttagctacagtt

SEQ ID NO: 403779 - DNA, 25 bp, Homo sapien
tgggcaggtgtaggaaggatggact

SEQ ID NO: 403780 - DNA, 25 bp, Homo sapien
gaattctgcaggtccagtcacataa

SEQ ID NO: 403781 - DNA, 25 bp, Homo sapien
ggcaggtgtaggaaggatggactgt

SEQ ID NO: 403782 - DNA, 25 bp, Homo sapien
caggaattctgcaggtccagtcaca

SEQ ID NO: 403783 - DNA, 25 bp, Homo sapien
ataaatggctttgcataatcatcca

SEQ ID NO: 403784 - DNA, 25 bp, Homo sapien
taaatggctttgcataatcatccat

SEQ ID NO: 403785 - DNA, 25 bp, Homo sapien
tggctccataactggataatgctgg

SEQ ID NO: 403786 - DNA, 25 bp, Homo sapien
gaaggtgctggactcccaaactcca

SEQ ID NO: 403787 - DNA, 25 bp, Homo sapien
tatgggtctatgaatgttctgccag

SEQ ID NO: 403788 - DNA, 25 bp, Homo sapien
agcctggttcagaattggctccata

SEQ ID NO: 403789 - DNA, 25 bp, Homo sapien
tacagcatcacctgggtcttccaag

SEQ ID NO: 403790 - DNA, 25 bp, Homo sapien
tctgtaagctgacttgctttcaggg

SEQ ID NO: 403791 - DNA, 25 bp, Homo sapien
tctggtcctgaatctctgtaagctg

SEQ ID NO: 403792 - DNA, 25 bp, Homo sapien
gacactgtgcacataatacagcatc

SEQ ID NO: 403793 - DNA, 25 bp, Homo sapien
aaaactgctgagaactatcagatta

SEQ ID NO: 403794 - DNA, 25 bp, Homo sapien
ctatcagattatgttacaggatgga

SEQ ID NO: 403795 - DNA, 25 bp, Homo sapien
aactgctgagaactatcagattatg

SEQ ID NO: 403796 - DNA, 25 bp, Homo sapien
tcagattatgttacaggatggaacc

SEQ ID NO: 403797 - DNA, 25 bp, Homo sapien
aatgaataagagctagtgtttggta

SEQ ID NO: 403798 - DNA, 25 bp, Homo sapien
atgccaagaggataaatgcctgaaa

SEQ ID NO: 403799 - DNA, 25 bp, Homo sapien
agaatgaataagagctagtgtttgg

SEQ ID NO: 403800 - DNA, 25 bp, Homo sapien
tgccaagaggataaatgcctgaaat

SEQ ID NO: 403801 - DNA, 25 bp, Homo sapien
gctctgtccacctctgggattaatg

SEQ ID NO: 403802 - DNA, 25 bp, Homo sapien
taatgagatctttgtctgagttccc

SEQ ID NO: 403803 - DNA, 25 bp, Homo sapien
gttgcatttccgacagtccctggct

SEQ ID NO: 403804 - DNA, 25 bp, Homo sapien
ccaagaggcctctgatgatgactgc

SEQ ID NO: 403805 - DNA, 25 bp, Homo sapien
tatctccaccttgcctacccactcc

SEQ ID NO: 403806 - DNA, 25 bp, Homo sapien
tactaatcagccttggagaatagat

SEQ ID NO: 403807 - DNA, 25 bp, Homo sapien
gtgaacacttggagaaatcttctta

SEQ ID NO: 403808 - DNA, 25 bp, Homo sapien
gatggctggcaatttcaaagacaag

SEQ ID NO: 403809 - DNA, 25 bp, Homo sapien
caaagacaaggtgaagtgaacactt

SEQ ID NO: 403810 - DNA, 25 bp, Homo sapien
ttccattcttcactgtatgtgcgag

SEQ ID NO: 403811 - DNA, 25 bp, Homo sapien
aattataactttcctcgatggtggt

SEQ ID NO: 403812 - DNA, 25 bp, Homo sapien
tatccataagctggtatttccattc

SEQ ID NO: 403813 - DNA, 25 bp, Homo sapien
tctctataagccaatgatttcgttc

SEQ ID NO: 403814 - DNA, 25 bp, Homo sapien
tggcaacccaacaagtcaaagtagc

SEQ ID NO: 403815 - DNA, 25 bp, Homo sapien
gatttgttgttgtgacagtctggga

SEQ ID NO: 403816 - DNA, 25 bp, Homo sapien
ttcccaagatgaggacggtccagga

SEQ ID NO: 403817 - DNA, 25 bp, Homo sapien
tcaaagtagccgtaaccgtagccac

SEQ ID NO: 403818 - DNA, 25 bp, Homo sapien
tctatatatccagtagggagagttt

SEQ ID NO: 403819 - DNA, 25 bp, Homo sapien
tgcatggtatcactgctggcaagca

SEQ ID NO: 403820 - DNA, 25 bp, Homo sapien
tgctggcaagcacaaggatgtctat

SEQ ID NO: 403821 - DNA, 25 bp, Homo sapien
ctagcagaagtgcatggtatcactg

SEQ ID NO: 403822 - DNA, 25 bp, Homo sapien
aaagagtgttgttcaagtaaggaga

SEQ ID NO: 403823 - DNA, 25 bp, Homo sapien
aagagtgttgttcaagtaaggagac

SEQ ID NO: 403824 - DNA, 25 bp, Homo sapien
agagtgttgttcaagtaaggagact

SEQ ID NO: 403825 - DNA, 25 bp, Homo sapien
tagggccacctatcactaatatatt

SEQ ID NO: 403826 - DNA, 25 bp, Homo sapien
cacttttagggccacctatcactaa

SEQ ID NO: 403827 - DNA, 25 bp, Homo sapien
gaaaagacccattgcaggtttgttg

SEQ ID NO: 403828 - DNA, 25 bp, Homo sapien
aggaaaagacccattgcaggtttgt

SEQ ID NO: 403829 - DNA, 25 bp, Homo sapien
actggttctcgtaaaaggtgaggtg

SEQ ID NO: 403830 - DNA, 25 bp, Homo sapien
aggtgaggtggagcaattccattaa

SEQ ID NO: 403831 - DNA, 25 bp, Homo sapien
ctaatgtcgtactggttctcgtaaa

SEQ ID NO: 403832 - DNA, 25 bp, Homo sapien
ggtgaggtggagcaattccattaag

SEQ ID NO: 403833 - DNA, 25 bp, Homo sapien
actgcccacatttcgctgaactcct

SEQ ID NO: 403834 - DNA, 25 bp, Homo sapien
cccacatttcgctgaactccttgca

SEQ ID NO: 403835 - DNA, 25 bp, Homo sapien
aaactgcccacatttcgctgaactc

SEQ ID NO: 403836 - DNA, 25 bp, Homo sapien
tgcccacatttcgctgaactccttg

SEQ ID NO: 403837 - DNA, 25 bp, Homo sapien
gcaacctcccgcgcacggtccaaaa

SEQ ID NO: 403838 - DNA, 25 bp, Homo sapien
tgtggctggaatacaacggtgcagt

SEQ ID NO: 403839 - DNA, 25 bp, Homo sapien
tggctggaatacaacggtgcagtct

SEQ ID NO: 403840 - DNA, 25 bp, Homo sapien
gctgtggctggaatacaacggtgca

SEQ ID NO: 403841 - DNA, 25 bp, Homo sapien
cgaacccgggcctcccgcgtggcag

SEQ ID NO: 403842 - DNA, 25 bp, Homo sapien
tcgaacccgggcctcccgcgtggca

SEQ ID NO: 403843 - DNA, 25 bp, Homo sapien
agaattctaccactgaaccacccat

SEQ ID NO: 403844 - DNA, 25 bp, Homo sapien
cgcgtggcaggcgagaattctacca

SEQ ID NO: 403845 - DNA, 25 bp, Homo sapien
ggttttatgatgctgcctttgttcc

SEQ ID NO: 403846 - DNA, 25 bp, Homo sapien
actgtatttactggttttatgatgc

SEQ ID NO: 403847 - DNA, 25 bp, Homo sapien
cagtggactgtatttactggtttta

SEQ ID NO: 403848 - DNA, 25 bp, Homo sapien
ggcaggtacagtggactgtatttac

SEQ ID NO: 403849 - DNA, 25 bp, Homo sapien
aatacgtgtgccatctcgtatgcag

SEQ ID NO: 403850 - DNA, 25 bp, Homo sapien
ggtcatgaccttgagacagcataaa

SEQ ID NO: 403851 - DNA, 25 bp, Homo sapien
caggaattaatcctgaaagcgtgag

SEQ ID NO: 403852 - DNA, 25 bp, Homo sapien
cagcgcattcacaatagattcagag

SEQ ID NO: 403853 - DNA, 25 bp, Homo sapien
tctgaaatagtaaggatgactagga

SEQ ID NO: 403854 - DNA, 25 bp, Homo sapien
ggatgactaggagatacccgcttga

SEQ ID NO: 403855 - DNA, 25 bp, Homo sapien
aatagtaaggatgactaggagatac

SEQ ID NO: 403856 - DNA, 25 bp, Homo sapien
taaggatgactaggagatacccgct

SEQ ID NO: 403857 - DNA, 25 bp, Homo sapien
atacagcttatgtacacggcatggg

SEQ ID NO: 403858 - DNA, 25 bp, Homo sapien
cctcatctaagaattggtaattata

SEQ ID NO: 403859 - DNA, 25 bp, Homo sapien
gtatattcccctatttacaaggcta

SEQ ID NO: 403860 - DNA, 25 bp, Homo sapien
ggctattgaagagagtcatgaacct

SEQ ID NO: 403861 - DNA, 25 bp, Homo sapien
tcatgcaattattgcacacataata

SEQ ID NO: 403862 - DNA, 25 bp, Homo sapien
aaatgagacacataatgatttcaga

SEQ ID NO: 403863 - DNA, 25 bp, Homo sapien
gcaattattgcacacataatatata

SEQ ID NO: 403864 - DNA, 25 bp, Homo sapien
tgagacacataatgatttcagatca

SEQ ID NO: 403865 - DNA, 25 bp, Homo sapien
accaagcagattaaaatcaaaccac

SEQ ID NO: 403866 - DNA, 25 bp, Homo sapien
ttaaccaagcagattaaaatcaaac

SEQ ID NO: 403867 - DNA, 25 bp, Homo sapien
taaccaagcagattaaaatcaaacc

SEQ ID NO: 403868 - DNA, 25 bp, Homo sapien
caagcagattaaaatcaaaccacta

SEQ ID NO: 403869 - DNA, 25 bp, Homo sapien
agggaggaggataaatagaactgtt

SEQ ID NO: 403870 - DNA, 25 bp, Homo sapien
ggaggataaatagaactgttttcca

SEQ ID NO: 403871 - DNA, 25 bp, Homo sapien
tgaactagtaacaggtgatgttctc

SEQ ID NO: 403872 - DNA, 25 bp, Homo sapien
cctcaaactgcaccaatacttcata

SEQ ID NO: 403873 - DNA, 25 bp, Homo sapien
tccaaaaaccatgccagcttcattc

SEQ ID NO: 403874 - DNA, 25 bp, Homo sapien
catcagccatggctgttttatgtac

SEQ ID NO: 403875 - DNA, 25 bp, Homo sapien
gtcatcagccatggctgttttatgt

SEQ ID NO: 403876 - DNA, 25 bp, Homo sapien
tcagccatggctgttttatgtacca

SEQ ID NO: 403877 - DNA, 25 bp, Homo sapien
agccatggctgttttatgtaccacc

SEQ ID NO: 403878 - DNA, 25 bp, Homo sapien
ttcttgattcatgctgttggtaaat

SEQ ID NO: 403879 - DNA, 25 bp, Homo sapien
ttttcttgattcatgctgttggtaa

SEQ ID NO: 403880 - DNA, 25 bp, Homo sapien
cttttcttgattcatgctgttggta

SEQ ID NO: 403881 - DNA, 25 bp, Homo sapien
tttcttgattcatgctgttggtaaa

SEQ ID NO: 403882 - DNA, 25 bp, Homo sapien
ccgatatgccccctcttaatctttt

SEQ ID NO: 403883 - DNA, 25 bp, Homo sapien
agcaagatggctgcccgatatgccc

SEQ ID NO: 403884 - DNA, 25 bp, Homo sapien
cgatatgccccctcttaatcttttc

SEQ ID NO: 403885 - DNA, 25 bp, Homo sapien
tgcccgatatgccccctcttaatct

SEQ ID NO: 403886 - DNA, 25 bp, Homo sapien
caattgattgaaataattcactact

SEQ ID NO: 403887 - DNA, 25 bp, Homo sapien
gattgaaataattcactacttttag

SEQ ID NO: 403888 - DNA, 25 bp, Homo sapien
gaaataattcactacttttagacca

SEQ ID NO: 403889 - DNA, 25 bp, Homo sapien
gaagagaagaacaaagagttggatc

SEQ ID NO: 403890 - DNA, 25 bp, Homo sapien
tgcaatgccaaggtgttaatccagg

SEQ ID NO: 403891 - DNA, 25 bp, Homo sapien
cagaaacacctggaatataacctca

SEQ ID NO: 403892 - DNA, 25 bp, Homo sapien
taaagttcagcagaagagtatgcaa

SEQ ID NO: 403893 - DNA, 25 bp, Homo sapien
caggtaatggagttagtagttgttc

SEQ ID NO: 403894 - DNA, 25 bp, Homo sapien
gaggtgatgtaaatgcagaatgcta

SEQ ID NO: 403895 - DNA, 25 bp, Homo sapien
gctagttgttccttgccacactaag

SEQ ID NO: 403896 - DNA, 25 bp, Homo sapien
gattgtcagggttatggcgcctaga

SEQ ID NO: 403897 - DNA, 25 bp, Homo sapien
cgcctagagggatgtgacttggtac

SEQ ID NO: 403898 - DNA, 25 bp, Homo sapien
catatctactaatgcagtggctgct

SEQ ID NO: 403899 - DNA, 25 bp, Homo sapien
taagccttcaggtgcgagatgttac

SEQ ID NO: 403900 - DNA, 25 bp, Homo sapien
catgaaatggacaggcaccgagcta

SEQ ID NO: 403901 - DNA, 25 bp, Homo sapien
taatgagtcagtggttgtgtacaat

SEQ ID NO: 403902 - DNA, 25 bp, Homo sapien
tgatttggactaagatctagtaggg

SEQ ID NO: 403903 - DNA, 25 bp, Homo sapien
gataatagtatttgtaccacatgcc

SEQ ID NO: 403904 - DNA, 25 bp, Homo sapien
atgccattgatttggactaagatct

SEQ ID NO: 403905 - DNA, 25 bp, Homo sapien
gctgataatagtatttgtaccacat

SEQ ID NO: 403906 - DNA, 25 bp, Homo sapien
tgcttgtatattgtagattcccaga

SEQ ID NO: 403907 - DNA, 25 bp, Homo sapien
tcaatttagtgtcatatattataaa

SEQ ID NO: 403908 - DNA, 25 bp, Homo sapien
taatcaggatttccataggaattat

SEQ ID NO: 403909 - DNA, 25 bp, Homo sapien
aatgaagagctattctatgatttca

SEQ ID NO: 403910 - DNA, 25 bp, Homo sapien
tcatgattacaacttagatggtggc

SEQ ID NO: 403911 - DNA, 25 bp, Homo sapien
ttttaattgatgagacatgttcatg

SEQ ID NO: 403912 - DNA, 25 bp, Homo sapien
agagttggctctttagtgttttgcc

SEQ ID NO: 403913 - DNA, 25 bp, Homo sapien
tgttttgcctagattgaaaatatag

SEQ ID NO: 403914 - DNA, 25 bp, Homo sapien
aaagttacaaattggccaaatctgc

SEQ ID NO: 403915 - DNA, 25 bp, Homo sapien
cactaactagaaagttacaaattgg

SEQ ID NO: 403916 - DNA, 25 bp, Homo sapien
caaattggccaaatctgctcaccta

SEQ ID NO: 403917 - DNA, 25 bp, Homo sapien
taactagaaagttacaaattggcca

SEQ ID NO: 403918 - DNA, 25 bp, Homo sapien
tccactgcatcctggtctttagtag

SEQ ID NO: 403919 - DNA, 25 bp, Homo sapien
ctgcatcctggtctttagtaggttt

SEQ ID NO: 403920 - DNA, 25 bp, Homo sapien
catcctggtctttagtaggttttct

SEQ ID NO: 403921 - DNA, 25 bp, Homo sapien
ccactgcatcctggtctttagtagg

SEQ ID NO: 403922 - DNA, 25 bp, Homo sapien
taaagctggactaattgcaggagcc

SEQ ID NO: 403923 - DNA, 25 bp, Homo sapien
tgttgcgtctaaacgttgtccctcg

SEQ ID NO: 403924 - DNA, 25 bp, Homo sapien
tgagtactctgggacatacagctgt

SEQ ID NO: 403925 - DNA, 25 bp, Homo sapien
tacagtcagaaacagagtgggctct

SEQ ID NO: 403926 - DNA, 25 bp, Homo sapien
agcatttccgttagatcagtcaagg

SEQ ID NO: 403927 - DNA, 25 bp, Homo sapien
tgtcagccaaatagtaccaatacgt

SEQ ID NO: 403928 - DNA, 25 bp, Homo sapien
tatttgctcccgaattactactggt

SEQ ID NO: 403929 - DNA, 25 bp, Homo sapien
caatacgttttcaagtagttctcac

SEQ ID NO: 403930 - DNA, 25 bp, Homo sapien
actgagagacttgataccatccatc

SEQ ID NO: 403931 - DNA, 25 bp, Homo sapien
tactgcatcttaacagcaaagccat

SEQ ID NO: 403932 - DNA, 25 bp, Homo sapien
ccagtactgcatcttaacagcaaag

SEQ ID NO: 403933 - DNA, 25 bp, Homo sapien
tctctttaggttacagaggataatt

SEQ ID NO: 403934 - DNA, 25 bp, Homo sapien
cagatgccttattccagtgtgaaca

SEQ ID NO: 403935 - DNA, 25 bp, Homo sapien
tatagcagataaccccagcctctta

SEQ ID NO: 403936 - DNA, 25 bp, Homo sapien
tagaccacaactgagcacaaattcc

SEQ ID NO: 403937 - DNA, 25 bp, Homo sapien
tggtcatcgagactaaaagctccat

SEQ ID NO: 403938 - DNA, 25 bp, Homo sapien
cagtgttctcgtatccaacagagtt

SEQ ID NO: 403939 - DNA, 25 bp, Homo sapien
gacaccaacacaatcaaaaacgaag

SEQ ID NO: 403940 - DNA, 25 bp, Homo sapien
tggtttggcccatctaacttcacta

SEQ ID NO: 403941 - DNA, 25 bp, Homo sapien
gaacaaatcgtccacttctacagtg

SEQ ID NO: 403942 - DNA, 25 bp, Homo sapien
gattccggtcacaatgcattccagg

SEQ ID NO: 403943 - DNA, 25 bp, Homo sapien
gaggtacccatgtcactggaattgg

SEQ ID NO: 403944 - DNA, 25 bp, Homo sapien
tgctaacatgtgaggattaatccag

SEQ ID NO: 403945 - DNA, 25 bp, Homo sapien
ttttttctgggcaaagggtgccaca

SEQ ID NO: 403946 - DNA, 25 bp, Homo sapien
tctcaagggcaactgacaccaaaca

SEQ ID NO: 403947 - DNA, 25 bp, Homo sapien
ttaaatggtctcctagtaatgggac

SEQ ID NO: 403948 - DNA, 25 bp, Homo sapien
tatgtatactggattgtatcctgct

SEQ ID NO: 403949 - DNA, 25 bp, Homo sapien
tctacagctagatagtatagcaatg

SEQ ID NO: 403950 - DNA, 25 bp, Homo sapien
ggtactattttacatgactagcaag

SEQ ID NO: 403951 - DNA, 25 bp, Homo sapien
tggaactgctgagtaatagaagagt

SEQ ID NO: 403952 - DNA, 25 bp, Homo sapien
gatacacaacgaacaaaacaatgct

SEQ ID NO: 403953 - DNA, 25 bp, Homo sapien
caagtttatgaatctagctgcttca

SEQ ID NO: 403954 - DNA, 25 bp, Homo sapien
tgtctaggtacacaatccatctcaa

SEQ ID NO: 403955 - DNA, 25 bp, Homo sapien
ggatctacagatctatttcaggaga

SEQ ID NO: 403956 - DNA, 25 bp, Homo sapien
gctttgaattagtgtgagccctcca

SEQ ID NO: 403957 - DNA, 25 bp, Homo sapien
ggcaatgccagattcaagatactag

SEQ ID NO: 403958 - DNA, 25 bp, Homo sapien
tgggcaatgccaagtaggactacct

SEQ ID NO: 403959 - DNA, 25 bp, Homo sapien
gaatctcaagtcagaaaccttgggc

SEQ ID NO: 403960 - DNA, 25 bp, Homo sapien
tctttaatcatggaacgggagagaa

SEQ ID NO: 403961 - DNA, 25 bp, Homo sapien
gtgcaggcacactagctatatgact

SEQ ID NO: 403962 - DNA, 25 bp, Homo sapien
atcaagggccctggtaactttcctg

SEQ ID NO: 403963 - DNA, 25 bp, Homo sapien
ctggtacacaggacttgcggctgca

SEQ ID NO: 403964 - DNA, 25 bp, Homo sapien
tctgaagaagaggatcctgaatgat

SEQ ID NO: 403965 - DNA, 25 bp, Homo sapien
tgcggctgcagtcaccgaactgggt

SEQ ID NO: 403966 - DNA, 25 bp, Homo sapien
acttgaccctacacatttaatatcc

SEQ ID NO: 403967 - DNA, 25 bp, Homo sapien
ttaatatcctaatacagctcaatgc

SEQ ID NO: 403968 - DNA, 25 bp, Homo sapien
ggcaaagattgaatcatcacagaac

SEQ ID NO: 403969 - DNA, 25 bp, Homo sapien
tctggacatgccatcaatacaaggc

SEQ ID NO: 403970 - DNA, 25 bp, Homo sapien
cagatcaactagaaatttcctataa

SEQ ID NO: 403971 - DNA, 25 bp, Homo sapien
aattcaagtcacagatcaactagaa

SEQ ID NO: 403972 - DNA, 25 bp, Homo sapien
gctgtacttataaatgtaacatata

SEQ ID NO: 403973 - DNA, 25 bp, Homo sapien
gtcacagatcaactagaaatttcct

SEQ ID NO: 403974 - DNA, 25 bp, Homo sapien
ccaacatggtgaaaccccatctcta

SEQ ID NO: 403975 - DNA, 25 bp, Homo sapien
atcaaaaaggaggaggccgggcgca

SEQ ID NO: 403976 - DNA, 25 bp, Homo sapien
gcgggcggatcacgaggtcaggagt

SEQ ID NO: 403977 - DNA, 25 bp, Homo sapien
ttgagagcagtctggccaacatggt

SEQ ID NO: 403978 - DNA, 25 bp, Homo sapien
gagagtgagctcctttggcaagccc

SEQ ID NO: 403979 - DNA, 25 bp, Homo sapien
tttcaggacatcaggatcaactctc

SEQ ID NO: 403980 - DNA, 25 bp, Homo sapien
tggcaagcccaggtcactatacaag

SEQ ID NO: 403981 - DNA, 25 bp, Homo sapien
tcacatgggtccacccagagagtga

SEQ ID NO: 403982 - DNA, 25 bp, Homo sapien
catacttgccaaggtgagtaataaa

SEQ ID NO: 403983 - DNA, 25 bp, Homo sapien
gaatttaatcataaacgccgtaata

SEQ ID NO: 403984 - DNA, 25 bp, Homo sapien
gccgtaatatctattcatacttgcc

SEQ ID NO: 403985 - DNA, 25 bp, Homo sapien
caaagtggagttacgttaatggatt

SEQ ID NO: 403986 - DNA, 25 bp, Homo sapien
caaaaggcctcatctaatgtttcag

SEQ ID NO: 403987 - DNA, 25 bp, Homo sapien
tatcaggtaagcctagttaagtcac

SEQ ID NO: 403988 - DNA, 25 bp, Homo sapien
taagaggacacccttgctttaccta

SEQ ID NO: 403989 - DNA, 25 bp, Homo sapien
cagagagagtttgagtaacttccca

SEQ ID NO: 403990 - DNA, 25 bp, Homo sapien
tgtcaatagaacacaagctcacttg

SEQ ID NO: 403991 - DNA, 25 bp, Homo sapien
gccagggcatgttttataggagtct

SEQ ID NO: 403992 - DNA, 25 bp, Homo sapien
gagcctgtgttagcgtgcacatttc

SEQ ID NO: 403993 - DNA, 25 bp, Homo sapien
tactacagtgagcatgccagggcat

SEQ ID NO: 403994 - DNA, 25 bp, Homo sapien
ggagccaggctataaccacaaaaga

SEQ ID NO: 403995 - DNA, 25 bp, Homo sapien
aacacctgtaggcatggtctgcaca

SEQ ID NO: 403996 - DNA, 25 bp, Homo sapien
cagaaatgcactgttaggagccagg

SEQ ID NO: 403997 - DNA, 25 bp, Homo sapien
tgtgtccaggcagtgggactccacc

SEQ ID NO: 403998 - DNA, 25 bp, Homo sapien
gaagtattagggtcaatttctcagc

SEQ ID NO: 403999 - DNA, 25 bp, Homo sapien
tgtaggcctgtcctttcgatggttt

SEQ ID NO: 404000 - DNA, 25 bp, Homo sapien
cgatggtttttctggataccagtga

SEQ ID NO: 404001 - DNA, 25 bp, Homo sapien
gaagacaacggcagcaatttcattc

SEQ ID NO: 404002 - DNA, 25 bp, Homo sapien
tcaagttctactttgttccacaagg

SEQ ID NO: 404003 - DNA, 25 bp, Homo sapien
cggtgacgtcatcctgggacctcgt

SEQ ID NO: 404004 - DNA, 25 bp, Homo sapien
ccattttaaatatcgcacggtgacg

SEQ ID NO: 404005 - DNA, 25 bp, Homo sapien
actcagagcaaaaggctcccatttt

SEQ ID NO: 404006 - DNA, 25 bp, Homo sapien
ggaactgagggctccgcctcaacgg

SEQ ID NO: 404007 - DNA, 25 bp, Homo sapien
agaccgtgtcctggccgggaactga

SEQ ID NO: 404008 - DNA, 25 bp, Homo sapien
cgctgggcaacagggagcgcagcga

SEQ ID NO: 404009 - DNA, 25 bp, Homo sapien
ccgctcttcggccggagattcggcg

SEQ ID NO: 404010 - DNA, 25 bp, Homo sapien
gacgagcgcgcacacgagtgagcgc

SEQ ID NO: 404011 - DNA, 25 bp, Homo sapien
gcgcgcacacgagtgagcgcagccc

SEQ ID NO: 404012 - DNA, 25 bp, Homo sapien
cgagcgcgcacacgagtgagcgcag

SEQ ID NO: 404013 - DNA, 25 bp, Homo sapien
agcgcgcacacgagtgagcgcagcc

SEQ ID NO: 404014 - DNA, 25 bp, Homo sapien
cctcgaccgcgacggcgcggtccgc

SEQ ID NO: 404015 - DNA, 25 bp, Homo sapien
gcggtccgcagaaccgcgggcttcc

SEQ ID NO: 404016 - DNA, 25 bp, Homo sapien
agcctggcgcagaccctcgaccgcg

SEQ ID NO: 404017 - DNA, 25 bp, Homo sapien
ccccggcaaaaagcggcgctgaagg

SEQ ID NO: 404018 - DNA, 25 bp, Homo sapien
gctgcacttgacaccctcagggcgg

SEQ ID NO: 404019 - DNA, 25 bp, Homo sapien
gaatggcgagttctagacccagctc

SEQ ID NO: 404020 - DNA, 25 bp, Homo sapien
cctttcggctgtctcggcctttttg

SEQ ID NO: 404021 - DNA, 25 bp, Homo sapien
ggcttggtcctttcggctgtctcgg

SEQ ID NO: 404022 - DNA, 25 bp, Homo sapien
tattttaggcggttgttggcactcc

SEQ ID NO: 404023 - DNA, 25 bp, Homo sapien
ttaatacatccaactagcgggagga

SEQ ID NO: 404024 - DNA, 25 bp, Homo sapien
tgtacagtatattggccagattcct

SEQ ID NO: 404025 - DNA, 25 bp, Homo sapien
tagtcaattacacgcacgttaaccg

SEQ ID NO: 404026 - DNA, 25 bp, Homo sapien
ttactgatctttgttatagccaatt

SEQ ID NO: 404027 - DNA, 25 bp, Homo sapien
attactgatctttgttatagccaat

SEQ ID NO: 404028 - DNA, 25 bp, Homo sapien
agtttgaagggttttatagtctgtg

SEQ ID NO: 404029 - DNA, 25 bp, Homo sapien
cagtaccacatagtgagagattcag

SEQ ID NO: 404030 - DNA, 25 bp, Homo sapien
gaccattcgcagttgacaaaattca

SEQ ID NO: 404031 - DNA, 25 bp, Homo sapien
gagagattcagagtggaccattcgc

SEQ ID NO: 404032 - DNA, 25 bp, Homo sapien
gaaagtactttgcaaactataaagc

SEQ ID NO: 404033 - DNA, 25 bp, Homo sapien
cacatagccagagtagttgggcaat

SEQ ID NO: 404034 - DNA, 25 bp, Homo sapien
tagggagagtgtacaagtaggcaca

SEQ ID NO: 404035 - DNA, 25 bp, Homo sapien
ttttcatcataagtgttctgggtgg

SEQ ID NO: 404036 - DNA, 25 bp, Homo sapien
ctccatgttcacgggattgggcata

SEQ ID NO: 404037 - DNA, 25 bp, Homo sapien
tgttcacgggattgggcataagccc

SEQ ID NO: 404038 - DNA, 25 bp, Homo sapien
cgggattgggcataagcccattata

SEQ ID NO: 404039 - DNA, 25 bp, Homo sapien
cacgggattgggcataagcccatta

SEQ ID NO: 404040 - DNA, 25 bp, Homo sapien
tcatctcttaaacgccacgggtgga

SEQ ID NO: 404041 - DNA, 25 bp, Homo sapien
ttcttgcaaaataaagatggcggct

SEQ ID NO: 404042 - DNA, 25 bp, Homo sapien
tctaactgtaaactgacttttcttg

SEQ ID NO: 404043 - DNA, 25 bp, Homo sapien
agcttgtaccttttctggaatggta

SEQ ID NO: 404044 - DNA, 25 bp, Homo sapien
caaagcccaccagtcttcgagaatg

SEQ ID NO: 404045 - DNA, 25 bp, Homo sapien
cttagaaccttcaaagcccaccagt

SEQ ID NO: 404046 - DNA, 25 bp, Homo sapien
gcttagaaccttcaaagcccaccag

SEQ ID NO: 404047 - DNA, 25 bp, Homo sapien
agcccaccagtcttcgagaatgttt

SEQ ID NO: 404048 - DNA, 25 bp, Homo sapien
ttattatgaagcaaagtcctctagg

SEQ ID NO: 404049 - DNA, 25 bp, Homo sapien
tctggtggttgatcctccctggttg

SEQ ID NO: 404050 - DNA, 25 bp, Homo sapien
taacccagggtggtatagaagctta

SEQ ID NO: 404051 - DNA, 25 bp, Homo sapien
gagaattgctggagaatgattaccc

SEQ ID NO: 404052 - DNA, 25 bp, Homo sapien
tagaatcgaaatccatctaggatgg

SEQ ID NO: 404053 - DNA, 25 bp, Homo sapien
ctagatagaatcgaaatccatctag

SEQ ID NO: 404054 - DNA, 25 bp, Homo sapien
atgctgagacatataatgttagctc

SEQ ID NO: 404055 - DNA, 25 bp, Homo sapien
gctgagacatataatgttagctctg

SEQ ID NO: 404056 - DNA, 25 bp, Homo sapien
caccttgtagatatggtagaggtga

SEQ ID NO: 404057 - DNA, 25 bp, Homo sapien
gaccagagggcctatttgtgaatat

SEQ ID NO: 404058 - DNA, 25 bp, Homo sapien
gacagcattgtaggcaaagaccaga

SEQ ID NO: 404059 - DNA, 25 bp, Homo sapien
tgtgaatattctggatgagagccct

SEQ ID NO: 404060 - DNA, 25 bp, Homo sapien
tacatcatgtaagtatacttatata

SEQ ID NO: 404061 - DNA, 25 bp, Homo sapien
acatcatgtaagtatacttatatac

SEQ ID NO: 404062 - DNA, 25 bp, Homo sapien
atacatcatgtaagtatacttatat

SEQ ID NO: 404063 - DNA, 25 bp, Homo sapien
taaaaatatcttctcagtagccttc

SEQ ID NO: 404064 - DNA, 25 bp, Homo sapien
aaaatatcttctcagtagccttctc

SEQ ID NO: 404065 - DNA, 25 bp, Homo sapien
gctctccagtaaaagggcgtccaaa

SEQ ID NO: 404066 - DNA, 25 bp, Homo sapien
gcgtccaaagatggtagccttctct

SEQ ID NO: 404067 - DNA, 25 bp, Homo sapien
ccaaattcctgttgcacttgagctg

SEQ ID NO: 404068 - DNA, 25 bp, Homo sapien
gccagaagaaaggttttccatgcgg

SEQ ID NO: 404069 - DNA, 25 bp, Homo sapien
gaggccacagaattctgaggcagag

SEQ ID NO: 404070 - DNA, 25 bp, Homo sapien
tggaaacgccaaccagcagagtggg

SEQ ID NO: 404071 - DNA, 25 bp, Homo sapien
caggtctggatttccctggaaacgc

SEQ ID NO: 404072 - DNA, 25 bp, Homo sapien
tgagggatgaacaggacaggtctgg

SEQ ID NO: 404073 - DNA, 25 bp, Homo sapien
gatacccgaaatcatctcactccag

SEQ ID NO: 404074 - DNA, 25 bp, Homo sapien
gcattggcagtcaacaaattttttg

SEQ ID NO: 404075 - DNA, 25 bp, Homo sapien
cttgggcccggctatgaaaccactt

SEQ ID NO: 404076 - DNA, 25 bp, Homo sapien
tgaagacctcttgaatgccctggaa

SEQ ID NO: 404077 - DNA, 25 bp, Homo sapien
tctgggttgcttctgatgttgttaa

SEQ ID NO: 404078 - DNA, 25 bp, Homo sapien
gatgttgttaacaacctttgcacac

SEQ ID NO: 404079 - DNA, 25 bp, Homo sapien
aacctttgcacacactctgggtttg

SEQ ID NO: 404080 - DNA, 25 bp, Homo sapien
tgggttgcttctgatgttgttaaca

SEQ ID NO: 404081 - DNA, 25 bp, Homo sapien
cccaatatgaagtgctcgttcacag

SEQ ID NO: 404082 - DNA, 25 bp, Homo sapien
tgcttgttctctcccaatatgaagt

SEQ ID NO: 404083 - DNA, 25 bp, Homo sapien
ttctgtttttgccactgcttgttct

SEQ ID NO: 404084 - DNA, 25 bp, Homo sapien
gtgctcgttcacagtttccatcact

SEQ ID NO: 404085 - DNA, 25 bp, Homo sapien
tgtcctggtacctctggagaagact

SEQ ID NO: 404086 - DNA, 25 bp, Homo sapien
ttgtcctggtacctctggagaagac

SEQ ID NO: 404087 - DNA, 25 bp, Homo sapien
gtcctggtacctctggagaagactg

SEQ ID NO: 404088 - DNA, 25 bp, Homo sapien
tgagtgtaatgaatcaggcagacat

SEQ ID NO: 404089 - DNA, 25 bp, Homo sapien
atagatggctcttgtccctggattt

SEQ ID NO: 404090 - DNA, 25 bp, Homo sapien
tgtccatatttctttgcgaaagagt

SEQ ID NO: 404091 - DNA, 25 bp, Homo sapien
cctcagggcccatcgtgttgtcata

SEQ ID NO: 404092 - DNA, 25 bp, Homo sapien
aaaggcctgaagaatcctctagtct

SEQ ID NO: 404093 - DNA, 25 bp, Homo sapien
ctccaaatgactgtaaacttgtttc

SEQ ID NO: 404094 - DNA, 25 bp, Homo sapien
ctagtctcacgaggtgggccagcaa

SEQ ID NO: 404095 - DNA, 25 bp, Homo sapien
gcaacgtggatctgtctccaaatga

SEQ ID NO: 404096 - DNA, 25 bp, Homo sapien
gcgtgttggtcagaatggaagaatc

SEQ ID NO: 404097 - DNA, 25 bp, Homo sapien
gaagaatctctaatgtcccctccag

SEQ ID NO: 404098 - DNA, 25 bp, Homo sapien
aaagcgagtgtctccagaagtggtg

SEQ ID NO: 404099 - DNA, 25 bp, Homo sapien
cttcttctgagcgtgttggtcagaa

SEQ ID NO: 404100 - DNA, 25 bp, Homo sapien
agtgaactggatgtaaaactgcagc

SEQ ID NO: 404101 - DNA, 25 bp, Homo sapien
tccttcagtttgatagttgatcagt

SEQ ID NO: 404102 - DNA, 25 bp, Homo sapien
gatgcagtgacaagctatccttcag

SEQ ID NO: 404103 - DNA, 25 bp, Homo sapien
ccaaggcaagtgagtcactgcagat

SEQ ID NO: 404104 - DNA, 25 bp, Homo sapien
tcgtagcggtagtctgttttcctgt

SEQ ID NO: 404105 - DNA, 25 bp, Homo sapien
gcgcaacaggaaaccaagcactggt

SEQ ID NO: 404106 - DNA, 25 bp, Homo sapien
tgctcagaggcatgaattctttcgt

SEQ ID NO: 404107 - DNA, 25 bp, Homo sapien
gcactggtaattggataagtcctcc

SEQ ID NO: 404108 - DNA, 25 bp, Homo sapien
gctatcacagagtactacagaatgg

SEQ ID NO: 404109 - DNA, 25 bp, Homo sapien
gattattgctacctctctatcgtta

SEQ ID NO: 404110 - DNA, 25 bp, Homo sapien
tatcgttagcctttctactggctct

SEQ ID NO: 404111 - DNA, 25 bp, Homo sapien
taaagacatcatacctcaaatccac

SEQ ID NO: 404112 - DNA, 25 bp, Homo sapien
gaagtccaagggcatggtgatagca

SEQ ID NO: 404113 - DNA, 25 bp, Homo sapien
tgctcccacaggtccattaaaactg

SEQ ID NO: 404114 - DNA, 25 bp, Homo sapien
gcaagaggatgtgagcaagcaaaca

SEQ ID NO: 404115 - DNA, 25 bp, Homo sapien
tcatccgtgagggtagagtcttcat

SEQ ID NO: 404116 - DNA, 25 bp, Homo sapien
caaatcatggtactacgttgcatcc

SEQ ID NO: 404117 - DNA, 25 bp, Homo sapien
tatgcattggctcttagcagttcac

SEQ ID NO: 404118 - DNA, 25 bp, Homo sapien
gaacacaggacatagacccagtgga

SEQ ID NO: 404119 - DNA, 25 bp, Homo sapien
tctgagttgcaagctagagaaagca

SEQ ID NO: 404120 - DNA, 25 bp, Homo sapien
ccatgtggctgagggttagtttaga

SEQ ID NO: 404121 - DNA, 25 bp, Homo sapien
ttagccattgatgccctcaacacag

SEQ ID NO: 404122 - DNA, 25 bp, Homo sapien
ccctgctgacagttagccattgatg

SEQ ID NO: 404123 - DNA, 25 bp, Homo sapien
gatatgggataatggctgttgtccc

SEQ ID NO: 404124 - DNA, 25 bp, Homo sapien
acaggccttctcctatccagtttct

SEQ ID NO: 404125 - DNA, 25 bp, Homo sapien
ggtggtgacttgtgccatccaaaca

SEQ ID NO: 404126 - DNA, 25 bp, Homo sapien
tacacaggaggttgaagtttttgct

SEQ ID NO: 404127 - DNA, 25 bp, Homo sapien
aagtttttgcttctagaggtggtga

SEQ ID NO: 404128 - DNA, 25 bp, Homo sapien
tcagggcgaggtgcctcagatacac

SEQ ID NO: 404129 - DNA, 25 bp, Homo sapien
tattcaggactgcaacttatggctc

SEQ ID NO: 404130 - DNA, 25 bp, Homo sapien
caccattgtgcatagtcaacgacac

SEQ ID NO: 404131 - DNA, 25 bp, Homo sapien
gcatcataggcaacttacgagaaca

SEQ ID NO: 404132 - DNA, 25 bp, Homo sapien
catgaagctgccacgttactgggct

SEQ ID NO: 404133 - DNA, 25 bp, Homo sapien
cactcaatttgaagatagacattat

SEQ ID NO: 404134 - DNA, 25 bp, Homo sapien
gcacactcaatttgaagatagacat

SEQ ID NO: 404135 - DNA, 25 bp, Homo sapien
tcacagcacactcaatttgaagata

SEQ ID NO: 404136 - DNA, 25 bp, Homo sapien
cagcacactcaatttgaagatagac

SEQ ID NO: 404137 - DNA, 25 bp, Homo sapien
tctaatgcatcacagtcactggtgt

SEQ ID NO: 404138 - DNA, 25 bp, Homo sapien
ctgtccaaattctaatgcatcacag

SEQ ID NO: 404139 - DNA, 25 bp, Homo sapien
caaattctaatgcatcacagtcact

SEQ ID NO: 404140 - DNA, 25 bp, Homo sapien
aatgcatcacagtcactggtgtgaa

SEQ ID NO: 404141 - DNA, 25 bp, Homo sapien
gagccaaaatgattagccctagaag

SEQ ID NO: 404142 - DNA, 25 bp, Homo sapien
caaggtaaccgttgtgaaaacattg

SEQ ID NO: 404143 - DNA, 25 bp, Homo sapien
agaggtgatatgaattccatttccc

SEQ ID NO: 404144 - DNA, 25 bp, Homo sapien
taaaatgcagtgacctgaaatatgg

SEQ ID NO: 404145 - DNA, 25 bp, Homo sapien
tttgacaaagatgttaaatactgcc

SEQ ID NO: 404146 - DNA, 25 bp, Homo sapien
gctttatttgacaaagatgttaaat

SEQ ID NO: 404147 - DNA, 25 bp, Homo sapien
ttatttgacaaagatgttaaatact

SEQ ID NO: 404148 - DNA, 25 bp, Homo sapien
tgatctgctttatttgacaaagatg

SEQ ID NO: 404149 - DNA, 25 bp, Homo sapien
tgtctgggagaccaataaagggcag

SEQ ID NO: 404150 - DNA, 25 bp, Homo sapien
gtttgcatgtctgggagaccaataa

SEQ ID NO: 404151 - DNA, 25 bp, Homo sapien
ggcatacgaagtaagtctgtttagg

SEQ ID NO: 404152 - DNA, 25 bp, Homo sapien
aaagggcagggcatacgaagtaagt

SEQ ID NO: 404153 - DNA, 25 bp, Homo sapien
tcagttgtttatgggtaggtgcgac

SEQ ID NO: 404154 - DNA, 25 bp, Homo sapien
gggtaggtgcgacttcattcctgtt

SEQ ID NO: 404155 - DNA, 25 bp, Homo sapien
ttgtttatgggtaggtgcgacttca

SEQ ID NO: 404156 - DNA, 25 bp, Homo sapien
tttatgggtaggtgcgacttcattc

SEQ ID NO: 404157 - DNA, 25 bp, Homo sapien
cagttcttcagaagctgttcgatgg

SEQ ID NO: 404158 - DNA, 25 bp, Homo sapien
cagacatggtaacttagaacagttc

SEQ ID NO: 404159 - DNA, 25 bp, Homo sapien
tgttcgatggcaacgtggcggacat

SEQ ID NO: 404160 - DNA, 25 bp, Homo sapien
gagctgtgaggccaaagaatctttt

SEQ ID NO: 404161 - DNA, 25 bp, Homo sapien
gccggtgctatgatttatatttcaa

SEQ ID NO: 404162 - DNA, 25 bp, Homo sapien
tatatttcaagaactctaactgaaa

SEQ ID NO: 404163 - DNA, 25 bp, Homo sapien
catttttagtatgcagaaagccggt

SEQ ID NO: 404164 - DNA, 25 bp, Homo sapien
caagaactctaactgaaatctatgc

SEQ ID NO: 404165 - DNA, 25 bp, Homo sapien
gatttgctgtaggagctttgcattc

SEQ ID NO: 404166 - DNA, 25 bp, Homo sapien
tggatttgctgtaggagctttgcat

SEQ ID NO: 404167 - DNA, 25 bp, Homo sapien
acctcaccaagagtcatcgaattca

SEQ ID NO: 404168 - DNA, 25 bp, Homo sapien
gctctacctcaccaagagtcatcga

SEQ ID NO: 404169 - DNA, 25 bp, Homo sapien
caaagcagtctttatggccccttaa

SEQ ID NO: 404170 - DNA, 25 bp, Homo sapien
tatgaggccacaatacactgttacg

SEQ ID NO: 404171 - DNA, 25 bp, Homo sapien
tgttacgacataaagtggcacctga

SEQ ID NO: 404172 - DNA, 25 bp, Homo sapien
tagatcgaggacaaccctggtttgc

SEQ ID NO: 404173 - DNA, 25 bp, Homo sapien
aacttgcttccgcacattttgagaa

SEQ ID NO: 404174 - DNA, 25 bp, Homo sapien
taaaaggtaactgcttatctctgcc

SEQ ID NO: 404175 - DNA, 25 bp, Homo sapien
tggtagcagatagaatattggcaac

SEQ ID NO: 404176 - DNA, 25 bp, Homo sapien
catgaagccaacatacagatgggtt

SEQ ID NO: 404177 - DNA, 25 bp, Homo sapien
caaattcctaacagatggtatgaca

SEQ ID NO: 404178 - DNA, 25 bp, Homo sapien
tgttaaaacgataaatccaaagctc

SEQ ID NO: 404179 - DNA, 25 bp, Homo sapien
gagattcagatttatgggtacacac

SEQ ID NO: 404180 - DNA, 25 bp, Homo sapien
caaagagctaccagaaataagatac

SEQ ID NO: 404181 - DNA, 25 bp, Homo sapien
gagagcagtgttagaatcactgttt

SEQ ID NO: 404182 - DNA, 25 bp, Homo sapien
aagaacagagagcagtgttagaatc

SEQ ID NO: 404183 - DNA, 25 bp, Homo sapien
aacagagagcagtgttagaatcact

SEQ ID NO: 404184 - DNA, 25 bp, Homo sapien
gatggtggaagaacagagagcagtg

SEQ ID NO: 404185 - DNA, 25 bp, Homo sapien
ggtggactagtttcttccaactaga

SEQ ID NO: 404186 - DNA, 25 bp, Homo sapien
actagagggtgacacttcacttcct

SEQ ID NO: 404187 - DNA, 25 bp, Homo sapien
tttactgagcataaggtggactagt

SEQ ID NO: 404188 - DNA, 25 bp, Homo sapien
tcttccaactagagggtgacacttc

SEQ ID NO: 404189 - DNA, 25 bp, Homo sapien
gtaatctcagcttcctgggagactg

SEQ ID NO: 404190 - DNA, 25 bp, Homo sapien
ggtgggagaattgctcaaggtcagc

SEQ ID NO: 404191 - DNA, 25 bp, Homo sapien
tgaggtgggagaattgctcaaggtc

SEQ ID NO: 404192 - DNA, 25 bp, Homo sapien
taatctcagcttcctgggagactga

SEQ ID NO: 404193 - DNA, 25 bp, Homo sapien
ctgcaaatgttgtcatcattcaaat

SEQ ID NO: 404194 - DNA, 25 bp, Homo sapien
aaatcaatgtttacaaactgctcct

SEQ ID NO: 404195 - DNA, 25 bp, Homo sapien
tcaatgtttacaaactgctcctctt

SEQ ID NO: 404196 - DNA, 25 bp, Homo sapien
gcaaatgttgtcatcattcaaatca

SEQ ID NO: 404197 - DNA, 25 bp, Homo sapien
ttgcactccaacattgcacttttcc

SEQ ID NO: 404198 - DNA, 25 bp, Homo sapien
gctagtaaaacttaaagccaggcca

SEQ ID NO: 404199 - DNA, 25 bp, Homo sapien
aaacgacctgcacgggacactgctt

SEQ ID NO: 404200 - DNA, 25 bp, Homo sapien
gacactgctttgctaacttcattgg

SEQ ID NO: 404201 - DNA, 25 bp, Homo sapien
caggaaaaacgacctgcacgggaca

SEQ ID NO: 404202 - DNA, 25 bp, Homo sapien
tgcacgggacactgctttgctaact

SEQ ID NO: 404203 - DNA, 25 bp, Homo sapien
tgcgaagcttcgcatcgaacggaga

SEQ ID NO: 404204 - DNA, 25 bp, Homo sapien
tcgaacggagatcggcggcagcaaa

SEQ ID NO: 404205 - DNA, 25 bp, Homo sapien
gcttcgcatcgaacggagatcggcg

SEQ ID NO: 404206 - DNA, 25 bp, Homo sapien
tcggagttgcgaagcttcgcatcga

SEQ ID NO: 404207 - DNA, 25 bp, Homo sapien
aactacaccgaaggccgagcggcgg

SEQ ID NO: 404208 - DNA, 25 bp, Homo sapien
tgtccggggcaactacaccgaaggc

SEQ ID NO: 404209 - DNA, 25 bp, Homo sapien
gcggcttcacggtaccggccgggca

SEQ ID NO: 404210 - DNA, 25 bp, Homo sapien
gggcccaagccggagctgggagagc

SEQ ID NO: 404211 - DNA, 25 bp, Homo sapien
ggtccgcccagcctcagcgtctcgg

SEQ ID NO: 404212 - DNA, 25 bp, Homo sapien
agcctcgtcccatcgctccgggatt

SEQ ID NO: 404213 - DNA, 25 bp, Homo sapien
gaaagcgtccgagggccacggcggc

SEQ ID NO: 404214 - DNA, 25 bp, Homo sapien
caagtccgtctttccgtcggtctgt

SEQ ID NO: 404215 - DNA, 25 bp, Homo sapien
ggcgcgcagcagcgcgaggggccac

SEQ ID NO: 404216 - DNA, 25 bp, Homo sapien
gccacggggctcggaactcgaagga

SEQ ID NO: 404217 - DNA, 25 bp, Homo sapien
tggcgcgcagcagcgcgaggggcca

SEQ ID NO: 404218 - DNA, 25 bp, Homo sapien
caccgccgttccgtgcggctcgggt

SEQ ID NO: 404219 - DNA, 25 bp, Homo sapien
ccactattgtttccggccgcagcag

SEQ ID NO: 404220 - DNA, 25 bp, Homo sapien
tccactattgtttccggccgcagca

SEQ ID NO: 404221 - DNA, 25 bp, Homo sapien
gcggctcgggttcctccactattgt

SEQ ID NO: 404222 - DNA, 25 bp, Homo sapien
atatgctttgattagcagtagttac

SEQ ID NO: 404223 - DNA, 25 bp, Homo sapien
cttttccccatattgctaggaaggc

SEQ ID NO: 404224 - DNA, 25 bp, Homo sapien
tgggccaaatttggggactgcaacc

SEQ ID NO: 404225 - DNA, 25 bp, Homo sapien
ttggctttcaatactcatgtctctc

SEQ ID NO: 404226 - DNA, 25 bp, Homo sapien
tctatgcatctagctatcatgagtt

SEQ ID NO: 404227 - DNA, 25 bp, Homo sapien
taggctaaattaactggcaacacaa

SEQ ID NO: 404228 - DNA, 25 bp, Homo sapien
gaggagaggcactacagcttaagaa

SEQ ID NO: 404229 - DNA, 25 bp, Homo sapien
ccacttacaaaggaagtatggcgtg

SEQ ID NO: 404230 - DNA, 25 bp, Homo sapien
ctgaaggtaaccagtcaaataaatc

SEQ ID NO: 404231 - DNA, 25 bp, Homo sapien
tctttccaaccatgggtcatcttgt

SEQ ID NO: 404232 - DNA, 25 bp, Homo sapien
gaaggtaaccagtcaaataaatcat

SEQ ID NO: 404233 - DNA, 25 bp, Homo sapien
tttagccttttgagtgatcttttta

SEQ ID NO: 404234 - DNA, 25 bp, Homo sapien
gaagatgcctactcacgcagggcta

SEQ ID NO: 404235 - DNA, 25 bp, Homo sapien
gatgatggaagatgcctactcacgc

SEQ ID NO: 404236 - DNA, 25 bp, Homo sapien
tctctgatgatggaagatgcctact

SEQ ID NO: 404237 - DNA, 25 bp, Homo sapien
ttcagttggagatctctgatgatgg

SEQ ID NO: 404238 - DNA, 25 bp, Homo sapien
tcctgacagctacaccagatatgtt

SEQ ID NO: 404239 - DNA, 25 bp, Homo sapien
caggagggatcactaggtggtccag

SEQ ID NO: 404240 - DNA, 25 bp, Homo sapien
tacaccagatatgttgacctaaaga

SEQ ID NO: 404241 - DNA, 25 bp, Homo sapien
cagctacaccagatatgttgaccta

SEQ ID NO: 404242 - DNA, 25 bp, Homo sapien
cttatgttcatgacattcttactat

SEQ ID NO: 404243 - DNA, 25 bp, Homo sapien
gacattcttactattgtatatctgc

SEQ ID NO: 404244 - DNA, 25 bp, Homo sapien
gctttatattgtggcattgaaggtt

SEQ ID NO: 404245 - DNA, 25 bp, Homo sapien
tatattgtggcattgaaggttcatc

SEQ ID NO: 404246 - DNA, 25 bp, Homo sapien
agatgaagggtgtaacttctttctg

SEQ ID NO: 404247 - DNA, 25 bp, Homo sapien
ctaaacttgcgtggagatgaagggt

SEQ ID NO: 404248 - DNA, 25 bp, Homo sapien
cttctttctgtaagtactcttccaa

SEQ ID NO: 404249 - DNA, 25 bp, Homo sapien
attgctgtttgaagctaaaagcaaa

SEQ ID NO: 404250 - DNA, 25 bp, Homo sapien
gcctagccacttcatgagtctttaa

SEQ ID NO: 404251 - DNA, 25 bp, Homo sapien
gtgtgcctagccacttcatgagtct

SEQ ID NO: 404252 - DNA, 25 bp, Homo sapien
gtgcctagccacttcatgagtcttt

SEQ ID NO: 404253 - DNA, 25 bp, Homo sapien
agtgtgcctagccacttcatgagtc

SEQ ID NO: 404254 - DNA, 25 bp, Homo sapien
tcaactgaatagagtttaaactgag

SEQ ID NO: 404255 - DNA, 25 bp, Homo sapien
aaatggcctgtgatggccctaaaga

SEQ ID NO: 404256 - DNA, 25 bp, Homo sapien
aaaaaggctacatggtgtcagcgtc

SEQ ID NO: 404257 - DNA, 25 bp, Homo sapien
gcacaagtgcgccatgattgtacca

SEQ ID NO: 404258 - DNA, 25 bp, Homo sapien
tttagatgggtggtagaataaaata

SEQ ID NO: 404259 - DNA, 25 bp, Homo sapien
tttgtgattaattagcctttagatg

SEQ ID NO: 404260 - DNA, 25 bp, Homo sapien
tgtgattaattagcctttagatggg

SEQ ID NO: 404261 - DNA, 25 bp, Homo sapien
gattaattagcctttagatgggtgg

SEQ ID NO: 404262 - DNA, 25 bp, Homo sapien
caaatttctcaacatcaagtctctc

SEQ ID NO: 404263 - DNA, 25 bp, Homo sapien
tctcaagttcctcatcttgggtcat

SEQ ID NO: 404264 - DNA, 25 bp, Homo sapien
catcaagtctctcaagttcctcatc

SEQ ID NO: 404265 - DNA, 25 bp, Homo sapien
tctcaacatcaagtctctcaagttc

SEQ ID NO: 404266 - DNA, 25 bp, Homo sapien
gacttgacactcgagttatacttcc

SEQ ID NO: 404267 - DNA, 25 bp, Homo sapien
cacggaatctatggctgaatctgca

SEQ ID NO: 404268 - DNA, 25 bp, Homo sapien
ggatgctgcaacagttgtctttctg

SEQ ID NO: 404269 - DNA, 25 bp, Homo sapien
ttttaggtgcctcacttcaccagtc

SEQ ID NO: 404270 - DNA, 25 bp, Homo sapien
cagcagggacacagtatgtgcatct

SEQ ID NO: 404271 - DNA, 25 bp, Homo sapien
gcagggacacagtatgtgcatctta

SEQ ID NO: 404272 - DNA, 25 bp, Homo sapien
cagggacacagtatgtgcatcttat

SEQ ID NO: 404273 - DNA, 25 bp, Homo sapien
ggacacagtatgtgcatcttattgt

SEQ ID NO: 404274 - DNA, 25 bp, Homo sapien
accattgctttcatcttgctatttg

SEQ ID NO: 404275 - DNA, 25 bp, Homo sapien
atgtgaggtaccattgctttcatct

SEQ ID NO: 404276 - DNA, 25 bp, Homo sapien
cttgctatttgttgcctttgtacct

SEQ ID NO: 404277 - DNA, 25 bp, Homo sapien
tctctggaaggcagcagatggctgg

SEQ ID NO: 404278 - DNA, 25 bp, Homo sapien
gagagtgttgttgacatgctgttct

SEQ ID NO: 404279 - DNA, 25 bp, Homo sapien
ggagagtgttgttgacatgctgttc

SEQ ID NO: 404280 - DNA, 25 bp, Homo sapien
cttggagtttgagggatagagtgtc

SEQ ID NO: 404281 - DNA, 25 bp, Homo sapien
gatagagtgtctgatatttggctca

SEQ ID NO: 404282 - DNA, 25 bp, Homo sapien
aagagaaggatgttgaggaacgtga

SEQ ID NO: 404283 - DNA, 25 bp, Homo sapien
aacgtgagggtctcttggagtttga

SEQ ID NO: 404284 - DNA, 25 bp, Homo sapien
tccacttaagagctgagatccattg

SEQ ID NO: 404285 - DNA, 25 bp, Homo sapien
taaggagctgtttctaatgtcaaca

SEQ ID NO: 404286 - DNA, 25 bp, Homo sapien
ggaagaaaagacagccaacatattc

SEQ ID NO: 404287 - DNA, 25 bp, Homo sapien
tattagtgatagattccaatccctg

SEQ ID NO: 404288 - DNA, 25 bp, Homo sapien
attaggaagggatgtgactgagaac

SEQ ID NO: 404289 - DNA, 25 bp, Homo sapien
aaatatgagttctaaggtccacaga

SEQ ID NO: 404290 - DNA, 25 bp, Homo sapien
tttaatctcggcaacgtgggaggct

SEQ ID NO: 404291 - DNA, 25 bp, Homo sapien
gatgccgtggacataagtggtaaaa

SEQ ID NO: 404292 - DNA, 25 bp, Homo sapien
ccttctatgttaaggatataattac

SEQ ID NO: 404293 - DNA, 25 bp, Homo sapien
tctatgttaaggatataattacccc

SEQ ID NO: 404294 - DNA, 25 bp, Homo sapien
agacaaaactacacaagttccttct

SEQ ID NO: 404295 - DNA, 25 bp, Homo sapien
cacaagttccttctatgttaaggat

SEQ ID NO: 404296 - DNA, 25 bp, Homo sapien
tcaagctttggcaactgtgtgtctt

SEQ ID NO: 404297 - DNA, 25 bp, Homo sapien
tgccaactatcaggaacctctccat

SEQ ID NO: 404298 - DNA, 25 bp, Homo sapien
gagagaatgatagggcctcctcctc

SEQ ID NO: 404299 - DNA, 25 bp, Homo sapien
tcctgtcagtttcctgttactaaaa

SEQ ID NO: 404300 - DNA, 25 bp, Homo sapien
catgtagtataatgcctaagagagt

SEQ ID NO: 404301 - DNA, 25 bp, Homo sapien
gaataagtgtgaaagtggcttgtcc

SEQ ID NO: 404302 - DNA, 25 bp, Homo sapien
tctgaatcctggagatacagtgtgg

SEQ ID NO: 404303 - DNA, 25 bp, Homo sapien
tataagcttcaatgtcctaaaggtg

SEQ ID NO: 404304 - DNA, 25 bp, Homo sapien
tttcatgtgagtcattggtaagcac

SEQ ID NO: 404305 - DNA, 25 bp, Homo sapien
gtcagtatcaacctgaaataacaag

SEQ ID NO: 404306 - DNA, 25 bp, Homo sapien
tcaggctgcaagtaggtcagtatca

SEQ ID NO: 404307 - DNA, 25 bp, Homo sapien
gacatcagtcctgatttctatggga

SEQ ID NO: 404308 - DNA, 25 bp, Homo sapien
tgaggcctccaaactcttgtaactg

SEQ ID NO: 404309 - DNA, 25 bp, Homo sapien
ggctcaggttaagtcttgcaaatgt

SEQ ID NO: 404310 - DNA, 25 bp, Homo sapien
tcttgtaactgatggggctcaggtt

SEQ ID NO: 404311 - DNA, 25 bp, Homo sapien
ggttaagtcttgcaaatgtcagttg

SEQ ID NO: 404312 - DNA, 25 bp, Homo sapien
ttctgcaattagtagtgaatctggt

SEQ ID NO: 404313 - DNA, 25 bp, Homo sapien
ctgcaattagtagtgaatctggtaa

SEQ ID NO: 404314 - DNA, 25 bp, Homo sapien
caattagtagtgaatctggtaatgt

SEQ ID NO: 404315 - DNA, 25 bp, Homo sapien
caatttctgcaattagtagtgaatc

SEQ ID NO: 404316 - DNA, 25 bp, Homo sapien
aaaataggtgcctggaagagtagac

SEQ ID NO: 404317 - DNA, 25 bp, Homo sapien
tggtgccgaaaataggtgcctggaa

SEQ ID NO: 404318 - DNA, 25 bp, Homo sapien
aagagtagaccatggtagatggcca

SEQ ID NO: 404319 - DNA, 25 bp, Homo sapien
ttttaatagtgggatggtgccgaaa

SEQ ID NO: 404320 - DNA, 25 bp, Homo sapien
aattgcattttcagttccccatggc

SEQ ID NO: 404321 - DNA, 25 bp, Homo sapien
ttaattgcattttcagttccccatg

SEQ ID NO: 404322 - DNA, 25 bp, Homo sapien
taaacacatacgtgaaactgtggaa

SEQ ID NO: 404323 - DNA, 25 bp, Homo sapien
cactgctaataaacacatacgtgaa

SEQ ID NO: 404324 - DNA, 25 bp, Homo sapien
ttagcatccccacactggtaataaa

SEQ ID NO: 404325 - DNA, 25 bp, Homo sapien
attattaaaggggtctcatatggac

SEQ ID NO: 404326 - DNA, 25 bp, Homo sapien
gcaggaagggcttctttagcatccc

SEQ ID NO: 404327 - DNA, 25 bp, Homo sapien
taaattattaaaggggtctcatatg

SEQ ID NO: 404328 - DNA, 25 bp, Homo sapien
caagggtcattcgtctttcaaggaa

SEQ ID NO: 404329 - DNA, 25 bp, Homo sapien
tcactgcttagcgacctgtgttagg

SEQ ID NO: 404330 - DNA, 25 bp, Homo sapien
taattctgccttgtggaagtgcaca

SEQ ID NO: 404331 - DNA, 25 bp, Homo sapien
agttctgtcagatcgttccagcaca

SEQ ID NO: 404332 - DNA, 25 bp, Homo sapien
cccgtggcttttaggaaatcgagca

SEQ ID NO: 404333 - DNA, 25 bp, Homo sapien
taaagaaagcacgtacacatcagtt

SEQ ID NO: 404334 - DNA, 25 bp, Homo sapien
catacctgaaatacgtacccgtggc

SEQ ID NO: 404335 - DNA, 25 bp, Homo sapien
tcagttacaacagaaatactcttgg

SEQ ID NO: 404336 - DNA, 25 bp, Homo sapien
agatgcagctatgtccctgccccat

SEQ ID NO: 404337 - DNA, 25 bp, Homo sapien
cagatgcagctatgtccctgcccca

SEQ ID NO: 404338 - DNA, 25 bp, Homo sapien
gtgataaaactagcaacagccagtg

SEQ ID NO: 404339 - DNA, 25 bp, Homo sapien
actgaggttcctccaagagcttgac

SEQ ID NO: 404340 - DNA, 25 bp, Homo sapien
tccaccgtgattgctgaggcttccc

SEQ ID NO: 404341 - DNA, 25 bp, Homo sapien
tagttaagagcctgaacgctgtggc

SEQ ID NO: 404342 - DNA, 25 bp, Homo sapien
catgtggacaattctttctgcatat

SEQ ID NO: 404343 - DNA, 25 bp, Homo sapien
gctcttatcccttcactctgtatta

SEQ ID NO: 404344 - DNA, 25 bp, Homo sapien
tgcatatgaactgccctttcctgca

SEQ ID NO: 404345 - DNA, 25 bp, Homo sapien
ctgcatccacagctcttatcccttc

SEQ ID NO: 404346 - DNA, 25 bp, Homo sapien
ttggggctgtatttaagaatggtca

SEQ ID NO: 404347 - DNA, 25 bp, Homo sapien
agaaaacttgattttggggctgtat

SEQ ID NO: 404348 - DNA, 25 bp, Homo sapien
tggggctgtatttaagaatggtcat

SEQ ID NO: 404349 - DNA, 25 bp, Homo sapien
tagtcactatagcttagtagtataa

SEQ ID NO: 404350 - DNA, 25 bp, Homo sapien
tctgttttagtcactatagcttagt

SEQ ID NO: 404351 - DNA, 25 bp, Homo sapien
gatttattcccctaattctgtgaaa

SEQ ID NO: 404352 - DNA, 25 bp, Homo sapien
tgatttattcccctaattctgtgaa

SEQ ID NO: 404353 - DNA, 25 bp, Homo sapien
tgcctgattactccagtgagaactt

SEQ ID NO: 404354 - DNA, 25 bp, Homo sapien
cttgcctgattactccagtgagaac

SEQ ID NO: 404355 - DNA, 25 bp, Homo sapien
ctgattactccagtgagaacttaca

SEQ ID NO: 404356 - DNA, 25 bp, Homo sapien
gcctgattactccagtgagaactta

SEQ ID NO: 404357 - DNA, 25 bp, Homo sapien
cacagcagcctattgcagggtatta

SEQ ID NO: 404358 - DNA, 25 bp, Homo sapien
ttaggagggcctgtgtgttaatcca

SEQ ID NO: 404359 - DNA, 25 bp, Homo sapien
gaatgtggcctgctcacaactcagt

SEQ ID NO: 404360 - DNA, 25 bp, Homo sapien
taagcagtgtgggaagaagttttgt

SEQ ID NO: 404361 - DNA, 25 bp, Homo sapien
tgaatactttccagatctgctgttc

SEQ ID NO: 404362 - DNA, 25 bp, Homo sapien
taagttactacagtccactgctgac

SEQ ID NO: 404363 - DNA, 25 bp, Homo sapien
tacttatgtcctttaacctgaatac

SEQ ID NO: 404364 - DNA, 25 bp, Homo sapien
ttttaattgtacaaggtgactgagc

SEQ ID NO: 404365 - DNA, 25 bp, Homo sapien
tacggcaggatttcatgaattaaac

SEQ ID NO: 404366 - DNA, 25 bp, Homo sapien
ggtattgaaggtacggcaggatttc

SEQ ID NO: 404367 - DNA, 25 bp, Homo sapien
cttggtattgaaggtacggcaggat

SEQ ID NO: 404368 - DNA, 25 bp, Homo sapien
gaaggtacggcaggatttcatgaat

SEQ ID NO: 404369 - DNA, 25 bp, Homo sapien
gaggaaccccagttgttccagtcat

SEQ ID NO: 404370 - DNA, 25 bp, Homo sapien
ctggaagaagaggaaccccagttgt

SEQ ID NO: 404371 - DNA, 25 bp, Homo sapien
agaagaggaaccccagttgttccag

SEQ ID NO: 404372 - DNA, 25 bp, Homo sapien
agaggaaccccagttgttccagtca

SEQ ID NO: 404373 - DNA, 25 bp, Homo sapien
gaaaacttgtagacagccaaacaca

SEQ ID NO: 404374 - DNA, 25 bp, Homo sapien
gccaaacacacaaagtctttcttat

SEQ ID NO: 404375 - DNA, 25 bp, Homo sapien
aatttccctgtgaattactcctttg

SEQ ID NO: 404376 - DNA, 25 bp, Homo sapien
cacacaaagtctttcttatatgtca

SEQ ID NO: 404377 - DNA, 25 bp, Homo sapien
tccattgcgcccacatttttgtaga

SEQ ID NO: 404378 - DNA, 25 bp, Homo sapien
caaggcattagctgccattgggaat

SEQ ID NO: 404379 - DNA, 25 bp, Homo sapien
cctgatcaggttatagcggtgttcc

SEQ ID NO: 404380 - DNA, 25 bp, Homo sapien
cagcaagtagtgacactgatagagc

SEQ ID NO: 404381 - DNA, 25 bp, Homo sapien
taaggctcggattgcatttgtaaag

SEQ ID NO: 404382 - DNA, 25 bp, Homo sapien
agttataaggctcggattgcatttg

SEQ ID NO: 404383 - DNA, 25 bp, Homo sapien
cggattgcatttgtaaagcattaaa

SEQ ID NO: 404384 - DNA, 25 bp, Homo sapien
ctctagttataaggctcggattgca

SEQ ID NO: 404385 - DNA, 25 bp, Homo sapien
gggaaagttagcatattgttgcgcc

SEQ ID NO: 404386 - DNA, 25 bp, Homo sapien
tggctgattaaaagctgtgacaatg

SEQ ID NO: 404387 - DNA, 25 bp, Homo sapien
taaaagctgtgacaatgtctggcac

SEQ ID NO: 404388 - DNA, 25 bp, Homo sapien
atattgttgcgccattttctggaag

SEQ ID NO: 404389 - DNA, 25 bp, Homo sapien
tggaactgcagccagcgacttatta

SEQ ID NO: 404390 - DNA, 25 bp, Homo sapien
cacggattgtaaagtgagaacacat

SEQ ID NO: 404391 - DNA, 25 bp, Homo sapien
tgcagccagcgacttattagtactg

SEQ ID NO: 404392 - DNA, 25 bp, Homo sapien
cgacttattagtactggttgcatac

SEQ ID NO: 404393 - DNA, 25 bp, Homo sapien
accatcaggtgttatactgttttct

SEQ ID NO: 404394 - DNA, 25 bp, Homo sapien
gagaaccatcaggtgttatactgtt

SEQ ID NO: 404395 - DNA, 25 bp, Homo sapien
aggagaaccatcaggtgttatactg

SEQ ID NO: 404396 - DNA, 25 bp, Homo sapien
aaacttgtattcagatctgccagga

SEQ ID NO: 404397 - DNA, 25 bp, Homo sapien
cattgtgtagtaaacaagatgttca

SEQ ID NO: 404398 - DNA, 25 bp, Homo sapien
ttattctttgtagtaacaaatctag

SEQ ID NO: 404399 - DNA, 25 bp, Homo sapien
atacattgtgtagtaaacaagatgt

SEQ ID NO: 404400 - DNA, 25 bp, Homo sapien
gtgtagtaaacaagatgttcaagtc

SEQ ID NO: 404401 - DNA, 25 bp, Homo sapien
cacaggctgcgagtatttctattgc

SEQ ID NO: 404402 - DNA, 25 bp, Homo sapien
taggactgtgttcgttcactggtaa

SEQ ID NO: 404403 - DNA, 25 bp, Homo sapien
gaaagctcctaagggtaggactgtg

SEQ ID NO: 404404 - DNA, 25 bp, Homo sapien
tctctgggctgaaagctcctaaggg

SEQ ID NO: 404405 - DNA, 25 bp, Homo sapien
cttacatacccatccagtgtctttt

SEQ ID NO: 404406 - DNA, 25 bp, Homo sapien
catacccatccagtgtctttttgtc

SEQ ID NO: 404407 - DNA, 25 bp, Homo sapien
tacatacccatccagtgtctttttg

SEQ ID NO: 404408 - DNA, 25 bp, Homo sapien
acatacccatccagtgtctttttgt

SEQ ID NO: 404409 - DNA, 25 bp, Homo sapien
cttgccctttgacccacttgaccca

SEQ ID NO: 404410 - DNA, 25 bp, Homo sapien
tgctttggaaaaaatctcggtcagg

SEQ ID NO: 404411 - DNA, 25 bp, Homo sapien
ggtcaggtttctcctttggtctcta

SEQ ID NO: 404412 - DNA, 25 bp, Homo sapien
tggtctctatttgttccacttgccc

SEQ ID NO: 404413 - DNA, 25 bp, Homo sapien
gaagagattccagtcctccttgaga

SEQ ID NO: 404414 - DNA, 25 bp, Homo sapien
taccatgtcatctaagtgcctctgc

SEQ ID NO: 404415 - DNA, 25 bp, Homo sapien
tctaataggagattgaaccagggct

SEQ ID NO: 404416 - DNA, 25 bp, Homo sapien
ggtttaagggattctagctgccatt

SEQ ID NO: 404417 - DNA, 25 bp, Homo sapien
cctaaactgtactcctccttgttca

SEQ ID NO: 404418 - DNA, 25 bp, Homo sapien
aaactgtactcctccttgttcattc

SEQ ID NO: 404419 - DNA, 25 bp, Homo sapien
catcctaaactgtactcctccttgt

SEQ ID NO: 404420 - DNA, 25 bp, Homo sapien
taaactgtactcctccttgttcatt

SEQ ID NO: 404421 - DNA, 25 bp, Homo sapien
gccctgattatcaaaatagctacct

SEQ ID NO: 404422 - DNA, 25 bp, Homo sapien
acctttgtagcatatcctgaatcct

SEQ ID NO: 404423 - DNA, 25 bp, Homo sapien
catttagtagagcaagtccaatcca

SEQ ID NO: 404424 - DNA, 25 bp, Homo sapien
aaaacacaacgatcttttgccctga

SEQ ID NO: 404425 - DNA, 25 bp, Homo sapien
tgagtctcactcaaggctgacaagt

SEQ ID NO: 404426 - DNA, 25 bp, Homo sapien
gaatgggaggacttaggactctgcc

SEQ ID NO: 404427 - DNA, 25 bp, Homo sapien
cagaaatgctatcccagagccaagg

SEQ ID NO: 404428 - DNA, 25 bp, Homo sapien
ctagaactggcaacctcaagaggct

SEQ ID NO: 404429 - DNA, 25 bp, Homo sapien
caggaatttccttatcttttgaagg

SEQ ID NO: 404430 - DNA, 25 bp, Homo sapien
gatcaatactccagaataagtaagg

SEQ ID NO: 404431 - DNA, 25 bp, Homo sapien
cagaataagtaagggtaacaggaat

SEQ ID NO: 404432 - DNA, 25 bp, Homo sapien
gatttaccaaccagaatgctaagat

SEQ ID NO: 404433 - DNA, 25 bp, Homo sapien
tcctgggtagttaccgctggagaaa

SEQ ID NO: 404434 - DNA, 25 bp, Homo sapien
cagtaaagtgcaaaagtcatccagc

SEQ ID NO: 404435 - DNA, 25 bp, Homo sapien
gtcatccagcttcagagtcttttca

SEQ ID NO: 404436 - DNA, 25 bp, Homo sapien
gagactagtcctactgtgctttgta

SEQ ID NO: 404437 - DNA, 25 bp, Homo sapien
gatatttggctgtgtgatggctgaa

SEQ ID NO: 404438 - DNA, 25 bp, Homo sapien
tatttggctgtgtgatggctgaaga

SEQ ID NO: 404439 - DNA, 25 bp, Homo sapien
tggctgtgtgatggctgaagaatta

SEQ ID NO: 404440 - DNA, 25 bp, Homo sapien
ctgtgtgatggctgaagaattaggt

SEQ ID NO: 404441 - DNA, 25 bp, Homo sapien
tactggccgtgaagcctcaaaatgg

SEQ ID NO: 404442 - DNA, 25 bp, Homo sapien
gagtgtggactattttcttgccctc

SEQ ID NO: 404443 - DNA, 25 bp, Homo sapien
cgtttaagccagaaagaaacacctg

SEQ ID NO: 404444 - DNA, 25 bp, Homo sapien
tatcaggtgacttccttaggtgtgc

SEQ ID NO: 404445 - DNA, 25 bp, Homo sapien
tttcagtcctcttcaaagctttcat

SEQ ID NO: 404446 - DNA, 25 bp, Homo sapien
ttttcagtcctcttcaaagctttca

SEQ ID NO: 404447 - DNA, 25 bp, Homo sapien
cttttcagtcctcttcaaagctttc

SEQ ID NO: 404448 - DNA, 25 bp, Homo sapien
tcagaatcccagcagtgtctgtttc

SEQ ID NO: 404449 - DNA, 25 bp, Homo sapien
tttctttctctacactggactctga

SEQ ID NO: 404450 - DNA, 25 bp, Homo sapien
tggaggacagctctcctaccatggc

SEQ ID NO: 404451 - DNA, 25 bp, Homo sapien
tgcctggaggcgtatcagttttcca

SEQ ID NO: 404452 - DNA, 25 bp, Homo sapien
caagaattcagaatgcctactttgt

SEQ ID NO: 404453 - DNA, 25 bp, Homo sapien
caaacactgagagtgaaatcagttt

SEQ ID NO: 404454 - DNA, 25 bp, Homo sapien
tctggagttgcaaacactgagagtg

SEQ ID NO: 404455 - DNA, 25 bp, Homo sapien
cccaagaattcagaatgcctacttt

SEQ ID NO: 404456 - DNA, 25 bp, Homo sapien
cgctcagataccctattgctcatga

SEQ ID NO: 404457 - DNA, 25 bp, Homo sapien
taaaagctttatctacatctggtcc

SEQ ID NO: 404458 - DNA, 25 bp, Homo sapien
tgcttgaagtcaaacaggagtggga

SEQ ID NO: 404459 - DNA, 25 bp, Homo sapien
gaagtgatgcgcagttaaatgtaga

SEQ ID NO: 404460 - DNA, 25 bp, Homo sapien
tgcctctagtgtgaacatactggag

SEQ ID NO: 404461 - DNA, 25 bp, Homo sapien
tgtagttctgcctctagtgtgaaca

SEQ ID NO: 404462 - DNA, 25 bp, Homo sapien
tcatgtagttctgcctctagtgtga

SEQ ID NO: 404463 - DNA, 25 bp, Homo sapien
agttctgcctctagtgtgaacatac

SEQ ID NO: 404464 - DNA, 25 bp, Homo sapien
aaaatcaatttagtccaggcctgtg

SEQ ID NO: 404465 - DNA, 25 bp, Homo sapien
cacataaaccaagaccaggatttgc

SEQ ID NO: 404466 - DNA, 25 bp, Homo sapien
taatttccatgctttctagagtaga

SEQ ID NO: 404467 - DNA, 25 bp, Homo sapien
ccttctcatgggtgattcagctgtg

SEQ ID NO: 404468 - DNA, 25 bp, Homo sapien
gtcacaccagcaaggaaccacctgt

SEQ ID NO: 404469 - DNA, 25 bp, Homo sapien
tatccattcggtaaaccttgagacc

SEQ ID NO: 404470 - DNA, 25 bp, Homo sapien
ttgagaccctggcatacactccggg

SEQ ID NO: 404471 - DNA, 25 bp, Homo sapien
ggcgattaggcagggcacacttgta

SEQ ID NO: 404472 - DNA, 25 bp, Homo sapien
gcctgcacatatcatattttcagta

SEQ ID NO: 404473 - DNA, 25 bp, Homo sapien
tcatagcctgcacatatcatatttt

SEQ ID NO: 404474 - DNA, 25 bp, Homo sapien
tgttggcatctctcatttgatagaa

SEQ ID NO: 404475 - DNA, 25 bp, Homo sapien
ctgacaagaatctattcctccttct

SEQ ID NO: 404476 - DNA, 25 bp, Homo sapien
atatacaaccgtcccccaaccagca

SEQ ID NO: 404477 - DNA, 25 bp, Homo sapien
tgatatacaaccgtcccccaaccag

SEQ ID NO: 404478 - DNA, 25 bp, Homo sapien
tacaaccgtcccccaaccagcaata

SEQ ID NO: 404479 - DNA, 25 bp, Homo sapien
ttgatatacaaccgtcccccaacca

SEQ ID NO: 404480 - DNA, 25 bp, Homo sapien
tgctgtccacttggatggctctaag

SEQ ID NO: 404481 - DNA, 25 bp, Homo sapien
gatttcatatgcaggcctaggattg

SEQ ID NO: 404482 - DNA, 25 bp, Homo sapien
tccagatgcatcatggcaatgtcgt

SEQ ID NO: 404483 - DNA, 25 bp, Homo sapien
catctattaatcgagggactgtttg

SEQ ID NO: 404484 - DNA, 25 bp, Homo sapien
gccaggccccttctttggcattact

SEQ ID NO: 404485 - DNA, 25 bp, Homo sapien
cagccagtcactgctgacgagagat

SEQ ID NO: 404486 - DNA, 25 bp, Homo sapien
gcagtcggccgccataatacagacc

SEQ ID NO: 404487 - DNA, 25 bp, Homo sapien
ccatacacgcagtgtgcggcggaca

SEQ ID NO: 404488 - DNA, 25 bp, Homo sapien
ctttggggtgatgtcttgagctgcc

SEQ ID NO: 404489 - DNA, 25 bp, Homo sapien
aagagcatctatttcatttttggca

SEQ ID NO: 404490 - DNA, 25 bp, Homo sapien
gaaagagcatctatttcatttttgg

SEQ ID NO: 404491 - DNA, 25 bp, Homo sapien
ttggagaaagagcatctatttcatt

SEQ ID NO: 404492 - DNA, 25 bp, Homo sapien
taaaataattggagaaagagcatct

SEQ ID NO: 404493 - DNA, 25 bp, Homo sapien
cactgtaaccgaatcaaggaatcct

SEQ ID NO: 404494 - DNA, 25 bp, Homo sapien
tacactgtaaccgaatcaaggaatc

SEQ ID NO: 404495 - DNA, 25 bp, Homo sapien
acactgtaaccgaatcaaggaatcc

SEQ ID NO: 404496 - DNA, 25 bp, Homo sapien
tgttagtattaagtggccatcaggt

SEQ ID NO: 404497 - DNA, 25 bp, Homo sapien
ccatcaggtgctgtgtttaatttga

SEQ ID NO: 404498 - DNA, 25 bp, Homo sapien
gattggctttgatgagtttccactc

SEQ ID NO: 404499 - DNA, 25 bp, Homo sapien
aatggtccaccatcggtagggaaga

SEQ ID NO: 404500 - DNA, 25 bp, Homo sapien
gggagatgatgtggttctacctttt

SEQ ID NO: 404501 - DNA, 25 bp, Homo sapien
tgtggttctaccttttggagtactg

SEQ ID NO: 404502 - DNA, 25 bp, Homo sapien
ggagtactgtgatggacccacccat

SEQ ID NO: 404503 - DNA, 25 bp, Homo sapien
ccttttggagtactgtgatggaccc

SEQ ID NO: 404504 - DNA, 25 bp, Homo sapien
tgttttaaggcctttggacacacta

SEQ ID NO: 404505 - DNA, 25 bp, Homo sapien
cctggagcaggagcttaggcgggga

SEQ ID NO: 404506 - DNA, 25 bp, Homo sapien
ggagcaggagcttaggcggggatgt

SEQ ID NO: 404507 - DNA, 25 bp, Homo sapien
agcaggagcttaggcggggatgttt

SEQ ID NO: 404508 - DNA, 25 bp, Homo sapien
gatacttctaggagattgtcaaaga

SEQ ID NO: 404509 - DNA, 25 bp, Homo sapien
tcctaccaaaaatacgtctgagaga

SEQ ID NO: 404510 - DNA, 25 bp, Homo sapien
gaagtgatacttctaggagattgtc

SEQ ID NO: 404511 - DNA, 25 bp, Homo sapien
caaaaatacgtctgagagaagtgat

SEQ ID NO: 404512 - DNA, 25 bp, Homo sapien
ttagtaattacaccgacctttcatg

SEQ ID NO: 404513 - DNA, 25 bp, Homo sapien
gtcatccctttggaactgttagcat

SEQ ID NO: 404514 - DNA, 25 bp, Homo sapien
agtgtcctttagaacttgtcatccc

SEQ ID NO: 404515 - DNA, 25 bp, Homo sapien
tccaggaatctcagacataagtgtt

SEQ ID NO: 404516 - DNA, 25 bp, Homo sapien
gcacttgggcgcatcaattgtggaa

SEQ ID NO: 404517 - DNA, 25 bp, Homo sapien
gatgaattgagacacaaatctgggc

SEQ ID NO: 404518 - DNA, 25 bp, Homo sapien
tgtggaagcaaggtcaagtccccag

SEQ ID NO: 404519 - DNA, 25 bp, Homo sapien
tgctatcagccaactaacaggtttc

SEQ ID NO: 404520 - DNA, 25 bp, Homo sapien
tctgggtggtccagttctcagcaca

SEQ ID NO: 404521 - DNA, 25 bp, Homo sapien
cagcagttgacaaacatcatttgaa

SEQ ID NO: 404522 - DNA, 25 bp, Homo sapien
caagctgtatgccatatgctctgga

SEQ ID NO: 404523 - DNA, 25 bp, Homo sapien
cctagtcccagcagttgacaaacat

SEQ ID NO: 404524 - DNA, 25 bp, Homo sapien
aaaccattgttgttcgttgtgccat

SEQ ID NO: 404525 - DNA, 25 bp, Homo sapien
cattgttgttcgttgtgccattgaa

SEQ ID NO: 404526 - DNA, 25 bp, Homo sapien
ttgttgttcgttgtgccattgaaaa

SEQ ID NO: 404527 - DNA, 25 bp, Homo sapien
ctaaaccattgttgttcgttgtgcc

SEQ ID NO: 404528 - DNA, 25 bp, Homo sapien
gatgagatgttctcgttccaaagca

SEQ ID NO: 404529 - DNA, 25 bp, Homo sapien
gacactgtagagtccaaatgcagag

SEQ ID NO: 404530 - DNA, 25 bp, Homo sapien
cagaggtgctaaaatcatctcagag

SEQ ID NO: 404531 - DNA, 25 bp, Homo sapien
acaggtcctaatagacacagttata

SEQ ID NO: 404532 - DNA, 25 bp, Homo sapien
agtgcagatgaccgtcacagagatt

SEQ ID NO: 404533 - DNA, 25 bp, Homo sapien
ccgtcacagagattcaccagtggaa

SEQ ID NO: 404534 - DNA, 25 bp, Homo sapien
cgtcacagagattcaccagtggaac

SEQ ID NO: 404535 - DNA, 25 bp, Homo sapien
cctcacagtgcagatgaccgtcaca

SEQ ID NO: 404536 - DNA, 25 bp, Homo sapien
tctcgacggaagcagacggtgctga

SEQ ID NO: 404537 - DNA, 25 bp, Homo sapien
gatgtgtgtccaatctcgctttccc

SEQ ID NO: 404538 - DNA, 25 bp, Homo sapien
taccagcttaattagcctccacagc

SEQ ID NO: 404539 - DNA, 25 bp, Homo sapien
gaaccaccaaagtaaagtgccagga

SEQ ID NO: 404540 - DNA, 25 bp, Homo sapien
agtgaaatacatcaattccataaat

SEQ ID NO: 404541 - DNA, 25 bp, Homo sapien
caagtgaaatacatcaattccataa

SEQ ID NO: 404542 - DNA, 25 bp, Homo sapien
aagtgaaatacatcaattccataaa

SEQ ID NO: 404543 - DNA, 25 bp, Homo sapien
tcaagtgaaatacatcaattccata

SEQ ID NO: 404544 - DNA, 25 bp, Homo sapien
tatactaaaacacctagtgtcggag

SEQ ID NO: 404545 - DNA, 25 bp, Homo sapien
cagtcttctttccttagagggtcaa

SEQ ID NO: 404546 - DNA, 25 bp, Homo sapien
gaaccactgagttgccgggcagttc

SEQ ID NO: 404547 - DNA, 25 bp, Homo sapien
gacatatttgcacctggaaagaacc

SEQ ID NO: 404548 - DNA, 25 bp, Homo sapien
tcgttagtgatgagaagcacagtca

SEQ ID NO: 404549 - DNA, 25 bp, Homo sapien
tcctcttgccaacacatcgttagtg

SEQ ID NO: 404550 - DNA, 25 bp, Homo sapien
ctggaatccccaagtgatagccagt

SEQ ID NO: 404551 - DNA, 25 bp, Homo sapien
ccccaagtgatagccagtagtaaag

SEQ ID NO: 404552 - DNA, 25 bp, Homo sapien
tcaactacatcgttaatattttcta

SEQ ID NO: 404553 - DNA, 25 bp, Homo sapien
cttgaaaatgaagttgtatattctt

SEQ ID NO: 404554 - DNA, 25 bp, Homo sapien
tcctttttgtgcatttaaaatccaa

SEQ ID NO: 404555 - DNA, 25 bp, Homo sapien
aaaatgaagttgtatattctttcct

SEQ ID NO: 404556 - DNA, 25 bp, Homo sapien
ttcctttttgtgcatttaaaatcca

SEQ ID NO: 404557 - DNA, 25 bp, Homo sapien
gaaagttcgtagaactgaatgttgt

SEQ ID NO: 404558 - DNA, 25 bp, Homo sapien
ctgaatgttgtatttggctcccaca

SEQ ID NO: 404559 - DNA, 25 bp, Homo sapien
tagctgtttggaaagttcgtagaac

SEQ ID NO: 404560 - DNA, 25 bp, Homo sapien
cacagctcaaaaggtcctccacagt

SEQ ID NO: 404561 - DNA, 25 bp, Homo sapien
ccatatgttaggctaatgtcatcca

SEQ ID NO: 404562 - DNA, 25 bp, Homo sapien
gactcccattgcaaatcccatatgt

SEQ ID NO: 404563 - DNA, 25 bp, Homo sapien
taatgtcatccaacgcaatatcact

SEQ ID NO: 404564 - DNA, 25 bp, Homo sapien
ggcaccaaagttggttctggataaa

SEQ ID NO: 404565 - DNA, 25 bp, Homo sapien
ttagggttacttgtccataattcca

SEQ ID NO: 404566 - DNA, 25 bp, Homo sapien
atttatggacattttcaccatacat

SEQ ID NO: 404567 - DNA, 25 bp, Homo sapien
gatattaatgcttaatttatggaca

SEQ ID NO: 404568 - DNA, 25 bp, Homo sapien
tggacattttcaccatacatatgat

SEQ ID NO: 404569 - DNA, 25 bp, Homo sapien
tatggacattttcaccatacatatg

SEQ ID NO: 404570 - DNA, 25 bp, Homo sapien
taaaagccccactcgttcttgtctc

SEQ ID NO: 404571 - DNA, 25 bp, Homo sapien
cctggtccagttggggtagaaatgt

SEQ ID NO: 404572 - DNA, 25 bp, Homo sapien
tctccctcctggtccagttggggta

SEQ ID NO: 404573 - DNA, 25 bp, Homo sapien
ctcctggtccagttggggtagaaat

SEQ ID NO: 404574 - DNA, 25 bp, Homo sapien
attgccaaaagtgtggtcaaaattg

SEQ ID NO: 404575 - DNA, 25 bp, Homo sapien
ttgccaaaagtgtggtcaaaattgg

SEQ ID NO: 404576 - DNA, 25 bp, Homo sapien
atcctggacccagaaacaaaagcca

SEQ ID NO: 404577 - DNA, 25 bp, Homo sapien
aagctcactgctgttaaatgcagta

SEQ ID NO: 404578 - DNA, 25 bp, Homo sapien
aatgcagtatatgttgcattaaagc

SEQ ID NO: 404579 - DNA, 25 bp, Homo sapien
tattaagctcactgctgttaaatgc

SEQ ID NO: 404580 - DNA, 25 bp, Homo sapien
tgcagtatatgttgcattaaagcca

SEQ ID NO: 404581 - DNA, 25 bp, Homo sapien
gccaggattagtttcccaaatagaa

SEQ ID NO: 404582 - DNA, 25 bp, Homo sapien
aagaaaggtggcagtaacttggttg

SEQ ID NO: 404583 - DNA, 25 bp, Homo sapien
tattgtgccaggattagtttcccaa

SEQ ID NO: 404584 - DNA, 25 bp, Homo sapien
ttcttattgtgccaggattagtttc

SEQ ID NO: 404585 - DNA, 25 bp, Homo sapien
cattaacctgcttcagagatacatg

SEQ ID NO: 404586 - DNA, 25 bp, Homo sapien
tccattaacctgcttcagagataca

SEQ ID NO: 404587 - DNA, 25 bp, Homo sapien
attccattaacctgcttcagagata

SEQ ID NO: 404588 - DNA, 25 bp, Homo sapien
tgaattccattaacctgcttcagag

SEQ ID NO: 404589 - DNA, 25 bp, Homo sapien
aaggatgagatcatgacttaatgct

SEQ ID NO: 404590 - DNA, 25 bp, Homo sapien
tcatgacttaatgctttctgtgcct

SEQ ID NO: 404591 - DNA, 25 bp, Homo sapien
tgagatcatgacttaatgctttctg

SEQ ID NO: 404592 - DNA, 25 bp, Homo sapien
ttgtaaaccttgaaaaggatgagat

SEQ ID NO: 404593 - DNA, 25 bp, Homo sapien
tttagtcagtcaactcaaagtgctg

SEQ ID NO: 404594 - DNA, 25 bp, Homo sapien
atgtttcaagtcagagagtttgggc

SEQ ID NO: 404595 - DNA, 25 bp, Homo sapien
tagattatgaaatggttggcccatt

SEQ ID NO: 404596 - DNA, 25 bp, Homo sapien
caaatgtgacttaccatgagttcac

SEQ ID NO: 404597 - DNA, 25 bp, Homo sapien
tttagccactttattagtaatagcc

SEQ ID NO: 404598 - DNA, 25 bp, Homo sapien
gagaccgaggagcaggatgaacata

SEQ ID NO: 404599 - DNA, 25 bp, Homo sapien
accgaggagcaggatgaacataaaa

SEQ ID NO: 404600 - DNA, 25 bp, Homo sapien
tagtaatagcctgcaggagaccgag

SEQ ID NO: 404601 - DNA, 25 bp, Homo sapien
gatcctacaccttcataaatatcta

SEQ ID NO: 404602 - DNA, 25 bp, Homo sapien
tgatcctacaccttcataaatatct

SEQ ID NO: 404603 - DNA, 25 bp, Homo sapien
gcttgatcctacaccttcataaata

SEQ ID NO: 404604 - DNA, 25 bp, Homo sapien
cttgcttgatcctacaccttcataa

SEQ ID NO: 404605 - DNA, 25 bp, Homo sapien
tatgtattaaaatcatcgaagctca

SEQ ID NO: 404606 - DNA, 25 bp, Homo sapien
tattaaaatcatcgaagctcagttt

SEQ ID NO: 404607 - DNA, 25 bp, Homo sapien
aaaatcatcgaagctcagtttaatg

SEQ ID NO: 404608 - DNA, 25 bp, Homo sapien
tgtattaaaatcatcgaagctcagt

SEQ ID NO: 404609 - DNA, 25 bp, Homo sapien
gaaagacccagatgatccagttaac

SEQ ID NO: 404610 - DNA, 25 bp, Homo sapien
taatgagtagcctggaaagacccag

SEQ ID NO: 404611 - DNA, 25 bp, Homo sapien
cagttaacaaaaatcttccatcaca

SEQ ID NO: 404612 - DNA, 25 bp, Homo sapien
ggttttggataatgagtagcctgga

SEQ ID NO: 404613 - DNA, 25 bp, Homo sapien
ctacttagatgctgctttctagtaa

SEQ ID NO: 404614 - DNA, 25 bp, Homo sapien
acttagatgctgctttctagtaaac

SEQ ID NO: 404615 - DNA, 25 bp, Homo sapien
ttagatgctgctttctagtaaactt

SEQ ID NO: 404616 - DNA, 25 bp, Homo sapien
gctgctttctagtaaacttttctaa

SEQ ID NO: 404617 - DNA, 25 bp, Homo sapien
tggacagtttacttctccatcacaa

SEQ ID NO: 404618 - DNA, 25 bp, Homo sapien
gagcatcagtacaaggacttgaacc

SEQ ID NO: 404619 - DNA, 25 bp, Homo sapien
tattgtcttcgtcagaaccatctgg

SEQ ID NO: 404620 - DNA, 25 bp, Homo sapien
aaatcagcttttatacacgttagag

SEQ ID NO: 404621 - DNA, 25 bp, Homo sapien
tggagttgccagatgactggtggtt

SEQ ID NO: 404622 - DNA, 25 bp, Homo sapien
gccagatgactggtggttgttagct

SEQ ID NO: 404623 - DNA, 25 bp, Homo sapien
gttgccagatgactggtggttgtta

SEQ ID NO: 404624 - DNA, 25 bp, Homo sapien
ctggagttgccagatgactggtggt

SEQ ID NO: 404625 - DNA, 25 bp, Homo sapien
tgcagggcttactgtagaaaaattc

SEQ ID NO: 404626 - DNA, 25 bp, Homo sapien
gcttcaaggccttgaatcagttctt

SEQ ID NO: 404627 - DNA, 25 bp, Homo sapien
ttcaaggccttgaatcagttcttct

SEQ ID NO: 404628 - DNA, 25 bp, Homo sapien
aatcaatatggaaagtgaccagttg

SEQ ID NO: 404629 - DNA, 25 bp, Homo sapien
ctaggatatcaacgctgttcaaatc

SEQ ID NO: 404630 - DNA, 25 bp, Homo sapien
agaaaaggtcaaatacgactataat

SEQ ID NO: 404631 - DNA, 25 bp, Homo sapien
gtcaaatacgactataatgctgcca

SEQ ID NO: 404632 - DNA, 25 bp, Homo sapien
aaggtcaaatacgactataatgctg

SEQ ID NO: 404633 - DNA, 25 bp, Homo sapien
caaatacgactataatgctgccatt

SEQ ID NO: 404634 - DNA, 25 bp, Homo sapien
tgagttcttatattcattcttcaga

SEQ ID NO: 404635 - DNA, 25 bp, Homo sapien
tcaaattgtaaaactcttgagttct

SEQ ID NO: 404636 - DNA, 25 bp, Homo sapien
tcattcttcagattgcttgatagaa

SEQ ID NO: 404637 - DNA, 25 bp, Homo sapien
gattgcttgatagaaagatctcatc

SEQ ID NO: 404638 - DNA, 25 bp, Homo sapien
aatccactgagagtttgtcttgcaa

SEQ ID NO: 404639 - DNA, 25 bp, Homo sapien
gttattttaaatgtcgctctggctt

SEQ ID NO: 404640 - DNA, 25 bp, Homo sapien
ttaaatgtcgctctggcttcatgac

SEQ ID NO: 404641 - DNA, 25 bp, Homo sapien
tatgtaactccggatgttattttaa

SEQ ID NO: 404642 - DNA, 25 bp, Homo sapien
gattgtcaggcaggatactgcaatt

SEQ ID NO: 404643 - DNA, 25 bp, Homo sapien
tgggattccttgattgtcaggcagg

SEQ ID NO: 404644 - DNA, 25 bp, Homo sapien
ttccttgattgtcaggcaggatact

SEQ ID NO: 404645 - DNA, 25 bp, Homo sapien
aggatactgcaattaatccagcaca

SEQ ID NO: 404646 - DNA, 25 bp, Homo sapien
aagatatgcctcttttcgaccccat

SEQ ID NO: 404647 - DNA, 25 bp, Homo sapien
aatgatgcctagaagatatgcctct

SEQ ID NO: 404648 - DNA, 25 bp, Homo sapien
tgcctagaagatatgcctcttttcg

SEQ ID NO: 404649 - DNA, 25 bp, Homo sapien
tagaagatatgcctcttttcgaccc

SEQ ID NO: 404650 - DNA, 25 bp, Homo sapien
cagtgtaagtgagttgtgtatgtct

SEQ ID NO: 404651 - DNA, 25 bp, Homo sapien
gaaggcttgctaatttaagaactga

SEQ ID NO: 404652 - DNA, 25 bp, Homo sapien
tgtgtaaagcaacaaccacctgtct

SEQ ID NO: 404653 - DNA, 25 bp, Homo sapien
ctgtctacatgcataccagtcagtg

SEQ ID NO: 404654 - DNA, 25 bp, Homo sapien
taccacactttttacagcatcctac

SEQ ID NO: 404655 - DNA, 25 bp, Homo sapien
gaaacacgaaccaggctgggaaaga

SEQ ID NO: 404656 - DNA, 25 bp, Homo sapien
tttttacagcatcctacttggttag

SEQ ID NO: 404657 - DNA, 25 bp, Homo sapien
tacttggttagtaggaagctttgaa

SEQ ID NO: 404658 - DNA, 25 bp, Homo sapien
tgtggagaaactatacagcaattcc

SEQ ID NO: 404659 - DNA, 25 bp, Homo sapien
tctcagcccagccaaacgttgtgga

SEQ ID NO: 404660 - DNA, 25 bp, Homo sapien
gaatatcttgcttaaactccagtgc

SEQ ID NO: 404661 - DNA, 25 bp, Homo sapien
gactgctcccaattgtctagtaaag

SEQ ID NO: 404662 - DNA, 25 bp, Homo sapien
ctgttttccattgaaacttcggaat

SEQ ID NO: 404663 - DNA, 25 bp, Homo sapien
tccattgaaacttcggaatttctcc

SEQ ID NO: 404664 - DNA, 25 bp, Homo sapien
tactggactgtgctctggtaaatag

SEQ ID NO: 404665 - DNA, 25 bp, Homo sapien
ttactggactgtgctctggtaaata

SEQ ID NO: 404666 - DNA, 25 bp, Homo sapien
ttgagttcctcagcaaagaaatcta

SEQ ID NO: 404667 - DNA, 25 bp, Homo sapien
agaagacccccttgagttcctcagc

SEQ ID NO: 404668 - DNA, 25 bp, Homo sapien
ggagaagacccccttgagttcctca

SEQ ID NO: 404669 - DNA, 25 bp, Homo sapien
agttcctcagcaaagaaatctagtt

SEQ ID NO: 404670 - DNA, 25 bp, Homo sapien
gcattgagacgaagcccaggaggtt

SEQ ID NO: 404671 - DNA, 25 bp, Homo sapien
tgtgcttggtgctaccatttccttc

SEQ ID NO: 404672 - DNA, 25 bp, Homo sapien
gaaagatccttattcagactgagcg

SEQ ID NO: 404673 - DNA, 25 bp, Homo sapien
tagtgtaagtgtgcttggtgctacc

SEQ ID NO: 404674 - DNA, 25 bp, Homo sapien
cagtcagtttagtcaatttactcat

SEQ ID NO: 404675 - DNA, 25 bp, Homo sapien
gactatattcagtcagtttagtcaa

SEQ ID NO: 404676 - DNA, 25 bp, Homo sapien
tattcagtcagtttagtcaatttac

SEQ ID NO: 404677 - DNA, 25 bp, Homo sapien
tttagactatattcagtcagtttag

SEQ ID NO: 404678 - DNA, 25 bp, Homo sapien
gtagaattcctctcactcatgtgag

SEQ ID NO: 404679 - DNA, 25 bp, Homo sapien
gctagcaaatgcaaactctgcaggg

SEQ ID NO: 404680 - DNA, 25 bp, Homo sapien
caaagactacctgctgtagaattcc

SEQ ID NO: 404681 - DNA, 25 bp, Homo sapien
caaaggcaaagactacctgctgtag

SEQ ID NO: 404682 - DNA, 25 bp, Homo sapien
ataacaattagaagtcatcaaaggc

SEQ ID NO: 404683 - DNA, 25 bp, Homo sapien
tgatagagtccattattataagata

SEQ ID NO: 404684 - DNA, 25 bp, Homo sapien
tgaaactggcttgaacagaaaagga

SEQ ID NO: 404685 - DNA, 25 bp, Homo sapien
tatagatagaaagttcatacaaatg

SEQ ID NO: 404686 - DNA, 25 bp, Homo sapien
gctgggcttagatcttttctcttcc

SEQ ID NO: 404687 - DNA, 25 bp, Homo sapien
actggtttctaggagctccaggatg

SEQ ID NO: 404688 - DNA, 25 bp, Homo sapien
ctggtttctaggagctccaggatgg

SEQ ID NO: 404689 - DNA, 25 bp, Homo sapien
acacagtcatagctgggcttagatc

SEQ ID NO: 404690 - DNA, 25 bp, Homo sapien
ccgtaaatgcccctgtgtatataca

SEQ ID NO: 404691 - DNA, 25 bp, Homo sapien
aatgcccctgtgtatatacaagatg

SEQ ID NO: 404692 - DNA, 25 bp, Homo sapien
gggtccgtaaatgcccctgtgtata

SEQ ID NO: 404693 - DNA, 25 bp, Homo sapien
cttgggtccgtaaatgcccctgtgt

SEQ ID NO: 404694 - DNA, 25 bp, Homo sapien
cccaaagtgacacaggtagttatta

SEQ ID NO: 404695 - DNA, 25 bp, Homo sapien
ccttgttccacagttcgtagaagaa

SEQ ID NO: 404696 - DNA, 25 bp, Homo sapien
aagaagttactacatgtcttctgag

SEQ ID NO: 404697 - DNA, 25 bp, Homo sapien
tgacacaggtagttattaaaagaag

SEQ ID NO: 404698 - DNA, 25 bp, Homo sapien
caaaattcagataggtggtgagggc

SEQ ID NO: 404699 - DNA, 25 bp, Homo sapien
tatagcatgagaaaaggctcggaga

SEQ ID NO: 404700 - DNA, 25 bp, Homo sapien
tcagataggtggtgagggcattata

SEQ ID NO: 404701 - DNA, 25 bp, Homo sapien
agaaaaggctcggagatcctgatgt

SEQ ID NO: 404702 - DNA, 25 bp, Homo sapien
gtgagagacgggctgtccctggagt

SEQ ID NO: 404703 - DNA, 25 bp, Homo sapien
ccctggagtaatcaaggtcagaaaa

SEQ ID NO: 404704 - DNA, 25 bp, Homo sapien
gccagggcagaaagattttctctag

SEQ ID NO: 404705 - DNA, 25 bp, Homo sapien
ccagggcagaaagattttctctagc

SEQ ID NO: 404706 - DNA, 25 bp, Homo sapien
tgtgtctgatagactggaaaagttc

SEQ ID NO: 404707 - DNA, 25 bp, Homo sapien
tttcacacatccacaaatgtgtctg

SEQ ID NO: 404708 - DNA, 25 bp, Homo sapien
gacaatgttccgatataaatgggat

SEQ ID NO: 404709 - DNA, 25 bp, Homo sapien
taaatgggattgaggaacttccaga

SEQ ID NO: 404710 - DNA, 25 bp, Homo sapien
tgctgctggattggccatttacaat

SEQ ID NO: 404711 - DNA, 25 bp, Homo sapien
tgctggattggccatttacaatttc

SEQ ID NO: 404712 - DNA, 25 bp, Homo sapien
tggattggccatttacaatttctac

SEQ ID NO: 404713 - DNA, 25 bp, Homo sapien
agtgctgctggattggccatttaca

SEQ ID NO: 404714 - DNA, 25 bp, Homo sapien
taattttgctgtaggaatcattaat

SEQ ID NO: 404715 - DNA, 25 bp, Homo sapien
attttgctgtaggaatcattaatca

SEQ ID NO: 404716 - DNA, 25 bp, Homo sapien
tataattttgctgtaggaatcatta

SEQ ID NO: 404717 - DNA, 25 bp, Homo sapien
ctataattttgctgtaggaatcatt

SEQ ID NO: 404718 - DNA, 25 bp, Homo sapien
acaaatttgttaattagcttataag

SEQ ID NO: 404719 - DNA, 25 bp, Homo sapien
tgtaaacaattgttaaccatgtaca

SEQ ID NO: 404720 - DNA, 25 bp, Homo sapien
aagaaagtcctggtgatgactctta

SEQ ID NO: 404721 - DNA, 25 bp, Homo sapien
ttagcttataagaaagtcctggtga

SEQ ID NO: 404722 - DNA, 25 bp, Homo sapien
cgggagcgagagaatgtaagcaagc

SEQ ID NO: 404723 - DNA, 25 bp, Homo sapien
tgcaaccgcagggaggaactgctgc

SEQ ID NO: 404724 - DNA, 25 bp, Homo sapien
cactgctatagtggaagctgcggga

SEQ ID NO: 404725 - DNA, 25 bp, Homo sapien
acctggatttagttgcaaccgcagg

SEQ ID NO: 404726 - DNA, 25 bp, Homo sapien
ctttcaatcctctcaaatgctaatg

SEQ ID NO: 404727 - DNA, 25 bp, Homo sapien
ttgttctaagtgaatcttggctctg

SEQ ID NO: 404728 - DNA, 25 bp, Homo sapien
tgttctaagtgaatcttggctctgc

SEQ ID NO: 404729 - DNA, 25 bp, Homo sapien
ttcaatcctctcaaatgctaatgtt

SEQ ID NO: 404730 - DNA, 25 bp, Homo sapien
gggggcaattcttccttctaatgtg

SEQ ID NO: 404731 - DNA, 25 bp, Homo sapien
tgtgttattggtcatgacggtgcag

SEQ ID NO: 404732 - DNA, 25 bp, Homo sapien
cagtggcaggttcaaagtatttggg

SEQ ID NO: 404733 - DNA, 25 bp, Homo sapien
ggtgacagtggcaggttcaaagtat

SEQ ID NO: 404734 - DNA, 25 bp, Homo sapien
tctataccataagctgagtgaaaag

SEQ ID NO: 404735 - DNA, 25 bp, Homo sapien
gaactagaggtttgaaggtcactgg

SEQ ID NO: 404736 - DNA, 25 bp, Homo sapien
tgagagcataggaggttaccacttt

SEQ ID NO: 404737 - DNA, 25 bp, Homo sapien
gaaaatcagcacctgttaagtgatg

SEQ ID NO: 404738 - DNA, 25 bp, Homo sapien
tagattggacctatgtcttagtcca

SEQ ID NO: 404739 - DNA, 25 bp, Homo sapien
gcatcatcctataatggaaggtgaa

SEQ ID NO: 404740 - DNA, 25 bp, Homo sapien
tgggagataggccttagattggacc

SEQ ID NO: 404741 - DNA, 25 bp, Homo sapien
tgggtaatcctcaaagaacggagat

SEQ ID NO: 404742 - DNA, 25 bp, Homo sapien
tcctggtaggtatggtagtttctgt

SEQ ID NO: 404743 - DNA, 25 bp, Homo sapien
acttttccgcggctgcctgtttggt

SEQ ID NO: 404744 - DNA, 25 bp, Homo sapien
taggctatcagatacttttccgcgg

SEQ ID NO: 404745 - DNA, 25 bp, Homo sapien
tgttgagcacacttgctttgttgag

SEQ ID NO: 404746 - DNA, 25 bp, Homo sapien
gcatccgttcagtggtattcttaaa

SEQ ID NO: 404747 - DNA, 25 bp, Homo sapien
tgtgctaagccccaagaactttcat

SEQ ID NO: 404748 - DNA, 25 bp, Homo sapien
tggattctggaaagcaacacctatc

SEQ ID NO: 404749 - DNA, 25 bp, Homo sapien
taatgtaatactggtgcatccgttc

SEQ ID NO: 404750 - DNA, 25 bp, Homo sapien
gcatgcagcgcctttatataagacc

SEQ ID NO: 404751 - DNA, 25 bp, Homo sapien
aaaagagtgcatgcagcgcctttat

SEQ ID NO: 404752 - DNA, 25 bp, Homo sapien
gcgcctttatataagaccacaagtt

SEQ ID NO: 404753 - DNA, 25 bp, Homo sapien
ttatataagaccacaagttgaagat

SEQ ID NO: 404754 - DNA, 25 bp, Homo sapien
ggcttcctggatctatggtttctta

SEQ ID NO: 404755 - DNA, 25 bp, Homo sapien
gcagtttgactttgccatgcatagg

SEQ ID NO: 404756 - DNA, 25 bp, Homo sapien
cttattcctccataggtaaggttgt

SEQ ID NO: 404757 - DNA, 25 bp, Homo sapien
aagggagggtgcttattggcttcct

SEQ ID NO: 404758 - DNA, 25 bp, Homo sapien
gatccaaagcaacgcaatactctga

SEQ ID NO: 404759 - DNA, 25 bp, Homo sapien
tgatgcatgcaagaaaactcactga

SEQ ID NO: 404760 - DNA, 25 bp, Homo sapien
tcttctaagtaacctgatctgaggt

SEQ ID NO: 404761 - DNA, 25 bp, Homo sapien
gatgggaatgataactttcaaaccc

SEQ ID NO: 404762 - DNA, 25 bp, Homo sapien
tcactttaagtggtaacttcaacag

SEQ ID NO: 404763 - DNA, 25 bp, Homo sapien
tcaacagttcatctaggctctgcct

SEQ ID NO: 404764 - DNA, 25 bp, Homo sapien
ctggcatcctcactttaagtggtaa

SEQ ID NO: 404765 - DNA, 25 bp, Homo sapien
acttcaacagttcatctaggctctg

SEQ ID NO: 404766 - DNA, 25 bp, Homo sapien
gccagtattcatgatctttgacctc

SEQ ID NO: 404767 - DNA, 25 bp, Homo sapien
tatgacacaattgaccataaagcct

SEQ ID NO: 404768 - DNA, 25 bp, Homo sapien
cataacaccaaaaccaagactctgc

SEQ ID NO: 404769 - DNA, 25 bp, Homo sapien
ggaagcaatgacgcatgaaaaacca

SEQ ID NO: 404770 - DNA, 25 bp, Homo sapien
gatatcagataatgaagacaggagt

SEQ ID NO: 404771 - DNA, 25 bp, Homo sapien
ggagttatgtgaacctgcttttggg

SEQ ID NO: 404772 - DNA, 25 bp, Homo sapien
ttgggtagagtgtgataccagctgc

SEQ ID NO: 404773 - DNA, 25 bp, Homo sapien
cggatatcagataatgaagacagga

SEQ ID NO: 404774 - DNA, 25 bp, Homo sapien
taagccctgtatccaatttagaaag

SEQ ID NO: 404775 - DNA, 25 bp, Homo sapien
gatagctaagccctgtatccaattt

SEQ ID NO: 404776 - DNA, 25 bp, Homo sapien
atctggggattctgatagctaagcc

SEQ ID NO: 404777 - DNA, 25 bp, Homo sapien
gggattctgatagctaagccctgta

SEQ ID NO: 404778 - DNA, 25 bp, Homo sapien
cttttcgtatgctagatgttgattc

SEQ ID NO: 404779 - DNA, 25 bp, Homo sapien
cttaaaattccttttcgtatgctag

SEQ ID NO: 404780 - DNA, 25 bp, Homo sapien
cgtatgctagatgttgattcatctc

SEQ ID NO: 404781 - DNA, 25 bp, Homo sapien
aaaattccttttcgtatgctagatg

SEQ ID NO: 404782 - DNA, 25 bp, Homo sapien
agggtgcgtccctgtgacacagctt

SEQ ID NO: 404783 - DNA, 25 bp, Homo sapien
tgccaaagttaagggtgcgtccctg

SEQ ID NO: 404784 - DNA, 25 bp, Homo sapien
agaaaggtcagacaacttgaagtgg

SEQ ID NO: 404785 - DNA, 25 bp, Homo sapien
cttctcacaagtgtccaaggtggct

SEQ ID NO: 404786 - DNA, 25 bp, Homo sapien
aatcaggattggcaatgggtgcctc

SEQ ID NO: 404787 - DNA, 25 bp, Homo sapien
ccaatcaggattggcaatgggtgcc

SEQ ID NO: 404788 - DNA, 25 bp, Homo sapien
agcccaatcaggattggcaatgggt

SEQ ID NO: 404789 - DNA, 25 bp, Homo sapien
gattggcaatgggtgcctcgctggt

SEQ ID NO: 404790 - DNA, 25 bp, Homo sapien
tggcaagccgcttctaagatggtgg

SEQ ID NO: 404791 - DNA, 25 bp, Homo sapien
cctggttgccaaaatggtggcgagc

SEQ ID NO: 404792 - DNA, 25 bp, Homo sapien
ggtggcaagcctcaggttctctaac

SEQ ID NO: 404793 - DNA, 25 bp, Homo sapien
agatggtggcaagccgcttctaaga

SEQ ID NO: 404794 - DNA, 25 bp, Homo sapien
tggtactatccgatagaattttgga

SEQ ID NO: 404795 - DNA, 25 bp, Homo sapien
ccttgttgtggtactatccgataga

SEQ ID NO: 404796 - DNA, 25 bp, Homo sapien
ttatgttggccttgttgtggtacta

SEQ ID NO: 404797 - DNA, 25 bp, Homo sapien
ccgatagaattttggatgatgtttc

SEQ ID NO: 404798 - DNA, 25 bp, Homo sapien
gatttctgcaccggaagtatgcaga

SEQ ID NO: 404799 - DNA, 25 bp, Homo sapien
ttctgcaccggaagtatgcagagct

SEQ ID NO: 404800 - DNA, 25 bp, Homo sapien
tagatttctgcaccggaagtatgca

SEQ ID NO: 404801 - DNA, 25 bp, Homo sapien
ttagatttctgcaccggaagtatgc

SEQ ID NO: 404802 - DNA, 25 bp, Homo sapien
tcccaaacttcatgtgtaatgccat

SEQ ID NO: 404803 - DNA, 25 bp, Homo sapien
cttggtggtcccaaacttcatgtgt

SEQ ID NO: 404804 - DNA, 25 bp, Homo sapien
tggtggtcccaaacttcatgtgtaa

SEQ ID NO: 404805 - DNA, 25 bp, Homo sapien
tggtcccaaacttcatgtgtaatgc

SEQ ID NO: 404806 - DNA, 25 bp, Homo sapien
gcttgtcaaaggcacttccacatca

SEQ ID NO: 404807 - DNA, 25 bp, Homo sapien
aaattaatacctgtcttgtgctgca

SEQ ID NO: 404808 - DNA, 25 bp, Homo sapien
gatcaagtacacgtatgtttctgga

SEQ ID NO: 404809 - DNA, 25 bp, Homo sapien
gaaatctcactgagtctacatgtca

SEQ ID NO: 404810 - DNA, 25 bp, Homo sapien
cgctgacactaagtagtaagccttt

SEQ ID NO: 404811 - DNA, 25 bp, Homo sapien
cactaagtagtaagcctttttgttg

SEQ ID NO: 404812 - DNA, 25 bp, Homo sapien
tgattttaccgctgacactaagtag

SEQ ID NO: 404813 - DNA, 25 bp, Homo sapien
tttaccgctgacactaagtagtaag

SEQ ID NO: 404814 - DNA, 25 bp, Homo sapien
aaccgtgtactattagccatggtca

SEQ ID NO: 404815 - DNA, 25 bp, Homo sapien
gaaaaccgtgtactattagccatgg

SEQ ID NO: 404816 - DNA, 25 bp, Homo sapien
aaaccgtgtactattagccatggtc

SEQ ID NO: 404817 - DNA, 25 bp, Homo sapien
ggaaaaccgtgtactattagccatg

SEQ ID NO: 404818 - DNA, 25 bp, Homo sapien
aaaatctaaagttggctgggtcaca

SEQ ID NO: 404819 - DNA, 25 bp, Homo sapien
tgcagcaatcctctagaagacagcg

SEQ ID NO: 404820 - DNA, 25 bp, Homo sapien
gacacacgtgttcgcattgcttgca

SEQ ID NO: 404821 - DNA, 25 bp, Homo sapien
cagctctagtgagggaggtccagtt

SEQ ID NO: 404822 - DNA, 25 bp, Homo sapien
gtcgtcccaggcaactgaatgcctc

SEQ ID NO: 404823 - DNA, 25 bp, Homo sapien
ctctttgtcttgttaactgctattt

SEQ ID NO: 404824 - DNA, 25 bp, Homo sapien
tcttgttaactgctatttcttctgc

SEQ ID NO: 404825 - DNA, 25 bp, Homo sapien
gtcccaggcaactgaatgcctcttt

SEQ ID NO: 404826 - DNA, 25 bp, Homo sapien
gggtttcctctcgatgacacttgca

SEQ ID NO: 404827 - DNA, 25 bp, Homo sapien
caaatttgggtggaggtgaagctac

SEQ ID NO: 404828 - DNA, 25 bp, Homo sapien
gcaggcagccattgcactggttttc

SEQ ID NO: 404829 - DNA, 25 bp, Homo sapien
cattgcactgtaatctccatgcagg

SEQ ID NO: 404830 - DNA, 25 bp, Homo sapien
attttttatgcttagccaagtttat

SEQ ID NO: 404831 - DNA, 25 bp, Homo sapien
taacagagtagcctaggcaaaatcc

SEQ ID NO: 404832 - DNA, 25 bp, Homo sapien
ttgttatcagttcttatcgatttaa

SEQ ID NO: 404833 - DNA, 25 bp, Homo sapien
tcagccacattaataacagagtagc

SEQ ID NO: 404834 - DNA, 25 bp, Homo sapien
caaagtttgtagagaatggacttca

SEQ ID NO: 404835 - DNA, 25 bp, Homo sapien
tatctcgaaagctcaggtgagataa

SEQ ID NO: 404836 - DNA, 25 bp, Homo sapien
taaaattattatctcgaaagctcag

SEQ ID NO: 404837 - DNA, 25 bp, Homo sapien
gtttgtagagaatggacttcaatct

SEQ ID NO: 404838 - DNA, 25 bp, Homo sapien
gaggacaatcttcatgcaggcaaag

SEQ ID NO: 404839 - DNA, 25 bp, Homo sapien
caaaaagcggactggagaaggagta

SEQ ID NO: 404840 - DNA, 25 bp, Homo sapien
gctggaagaaaacggctctgataac

SEQ ID NO: 404841 - DNA, 25 bp, Homo sapien
tatacaaccaaaaagcggactggag

SEQ ID NO: 404842 - DNA, 25 bp, Homo sapien
gattactaaaaacagcgctgggatg

SEQ ID NO: 404843 - DNA, 25 bp, Homo sapien
attagattactaaaaacagcgctgg

SEQ ID NO: 404844 - DNA, 25 bp, Homo sapien
ctgggatgtttgcagtcccactgct

SEQ ID NO: 404845 - DNA, 25 bp, Homo sapien
aacagcgctgggatgtttgcagtcc

SEQ ID NO: 404846 - DNA, 25 bp, Homo sapien
cccagtctgccatgaaatcttctgc

SEQ ID NO: 404847 - DNA, 25 bp, Homo sapien
gacccagtctgccatgaaatcttct

SEQ ID NO: 404848 - DNA, 25 bp, Homo sapien
ccagtctgccatgaaatcttctgca

SEQ ID NO: 404849 - DNA, 25 bp, Homo sapien
agacccagtctgccatgaaatcttc

SEQ ID NO: 404850 - DNA, 25 bp, Homo sapien
ccagggacaccagcattagtcttac

SEQ ID NO: 404851 - DNA, 25 bp, Homo sapien
tcaagacccataggtaacctcccag

SEQ ID NO: 404852 - DNA, 25 bp, Homo sapien
caaccagtaggtaagcaaagtccag

SEQ ID NO: 404853 - DNA, 25 bp, Homo sapien
gggtacaagaagaacacatccagat

SEQ ID NO: 404854 - DNA, 25 bp, Homo sapien
cttggctttactaacaatttcttct

SEQ ID NO: 404855 - DNA, 25 bp, Homo sapien
tactaacaatttcttctttatccat

SEQ ID NO: 404856 - DNA, 25 bp, Homo sapien
ttactaacaatttcttctttatcca

SEQ ID NO: 404857 - DNA, 25 bp, Homo sapien
ttgtaagcaagcatcttttgatatc

SEQ ID NO: 404858 - DNA, 25 bp, Homo sapien
tttattgtaagcaagcatcttttga

SEQ ID NO: 404859 - DNA, 25 bp, Homo sapien
taagcaagcatcttttgatatccat

SEQ ID NO: 404860 - DNA, 25 bp, Homo sapien
ttattgtaagcaagcatcttttgat

SEQ ID NO: 404861 - DNA, 25 bp, Homo sapien
tgtttctgctaaaccgaatcagatg

SEQ ID NO: 404862 - DNA, 25 bp, Homo sapien
agctaacttagcactccagggcggg

SEQ ID NO: 404863 - DNA, 25 bp, Homo sapien
ggataagcataaggtcaaatgaggt

SEQ ID NO: 404864 - DNA, 25 bp, Homo sapien
ggctgagcaggtagactccctgttc

SEQ ID NO: 404865 - DNA, 25 bp, Homo sapien
catatgtcctgaatagcctctactc

SEQ ID NO: 404866 - DNA, 25 bp, Homo sapien
gaatagcctctactctctgccaaga

SEQ ID NO: 404867 - DNA, 25 bp, Homo sapien
tagcctctactctctgccaagatgt

SEQ ID NO: 404868 - DNA, 25 bp, Homo sapien
gtcctgaatagcctctactctctgc

SEQ ID NO: 404869 - DNA, 25 bp, Homo sapien
atttactctctggtagttgtactca

SEQ ID NO: 404870 - DNA, 25 bp, Homo sapien
ttactctctggtagttgtactcatc

SEQ ID NO: 404871 - DNA, 25 bp, Homo sapien
cttttctactgactgagagactttt

SEQ ID NO: 404872 - DNA, 25 bp, Homo sapien
atcctcaatcaatttgtctctgaaa

SEQ ID NO: 404873 - DNA, 25 bp, Homo sapien
tactttgacaggctcagctctttgg

SEQ ID NO: 404874 - DNA, 25 bp, Homo sapien
cagcactgccgttttgattgatcca

SEQ ID NO: 404875 - DNA, 25 bp, Homo sapien
tggatctcagtactcaacatagagg

SEQ ID NO: 404876 - DNA, 25 bp, Homo sapien
tcccctagtcagaagttgatttccg

SEQ ID NO: 404877 - DNA, 25 bp, Homo sapien
ggtaatttacaatcctggtggaaga

SEQ ID NO: 404878 - DNA, 25 bp, Homo sapien
caggtaatttacaatcctggtggaa

SEQ ID NO: 404879 - DNA, 25 bp, Homo sapien
gtaatttacaatcctggtggaagac

SEQ ID NO: 404880 - DNA, 25 bp, Homo sapien
ctcaggtaatttacaatcctggtgg

SEQ ID NO: 404881 - DNA, 25 bp, Homo sapien
cttgggggcaatcctaaaaggacat

SEQ ID NO: 404882 - DNA, 25 bp, Homo sapien
gactgctatggccatgatatatgtg

SEQ ID NO: 404883 - DNA, 25 bp, Homo sapien
gtgatttctttaatcatgtctcccc

SEQ ID NO: 404884 - DNA, 25 bp, Homo sapien
tcccctgtgagttatattacttgct

SEQ ID NO: 404885 - DNA, 25 bp, Homo sapien
catgcttttgctcctttgaggaata

SEQ ID NO: 404886 - DNA, 25 bp, Homo sapien
tattggtaataggaaatcggccacg

SEQ ID NO: 404887 - DNA, 25 bp, Homo sapien
tcaaacatctcggaaagcttcactc

SEQ ID NO: 404888 - DNA, 25 bp, Homo sapien
taacttctgttatctgccctattgg

SEQ ID NO: 404889 - DNA, 25 bp, Homo sapien
gaaaagttggcacacgaatgccttg

SEQ ID NO: 404890 - DNA, 25 bp, Homo sapien
tgttctgggaaaagttggcacacga

SEQ ID NO: 404891 - DNA, 25 bp, Homo sapien
agttggcacacgaatgccttgaaca

SEQ ID NO: 404892 - DNA, 25 bp, Homo sapien
aggtccatctggcagtaaaggattg

SEQ ID NO: 404893 - DNA, 25 bp, Homo sapien
tcttcattttatcttccttctctaa

SEQ ID NO: 404894 - DNA, 25 bp, Homo sapien
cattttatcttccttctctaaaatg

SEQ ID NO: 404895 - DNA, 25 bp, Homo sapien
ttcattttatcttccttctctaaaa

SEQ ID NO: 404896 - DNA, 25 bp, Homo sapien
cctcttcattttatcttccttctct

SEQ ID NO: 404897 - DNA, 25 bp, Homo sapien
caccacctgctttagtgaatacttg

SEQ ID NO: 404898 - DNA, 25 bp, Homo sapien
ccacctgctttagtgaatacttgat

SEQ ID NO: 404899 - DNA, 25 bp, Homo sapien
aatcaccacctgctttagtgaatac

SEQ ID NO: 404900 - DNA, 25 bp, Homo sapien
ttgatatttatcccccacaatgacc

SEQ ID NO: 404901 - DNA, 25 bp, Homo sapien
tttatggtggtctgataagctttcc

SEQ ID NO: 404902 - DNA, 25 bp, Homo sapien
ggaataattagtgcaaacctgggta

SEQ ID NO: 404903 - DNA, 25 bp, Homo sapien
gattattcttagctccttagagagg

SEQ ID NO: 404904 - DNA, 25 bp, Homo sapien
ttggtgctatcgtaataaaaaagcc

SEQ ID NO: 404905 - DNA, 25 bp, Homo sapien
ggcctccaggcatttaatctgtggt

SEQ ID NO: 404906 - DNA, 25 bp, Homo sapien
tcgacttggtgatctccgtggctgg

SEQ ID NO: 404907 - DNA, 25 bp, Homo sapien
gaagtggtctcgtctagcaagatcg

SEQ ID NO: 404908 - DNA, 25 bp, Homo sapien
ttcgtgggcctggtcaacgtctggc

SEQ ID NO: 404909 - DNA, 25 bp, Homo sapien
tcatctccatgtgggaaagcgaaga

SEQ ID NO: 404910 - DNA, 25 bp, Homo sapien
tacatcgtcatcgtggcctgggcta

SEQ ID NO: 404911 - DNA, 25 bp, Homo sapien
tgggctacagactacctgttccagt

SEQ ID NO: 404912 - DNA, 25 bp, Homo sapien
tctggcacttgttctctggcatcgg

SEQ ID NO: 404913 - DNA, 25 bp, Homo sapien
tactttcctgtttggagcggcctgc

SEQ ID NO: 404914 - DNA, 25 bp, Homo sapien
catgcgcacgaacgagagtgtctgg

SEQ ID NO: 404915 - DNA, 25 bp, Homo sapien
ggacaccatgcgcacgaacgagagt

SEQ ID NO: 404916 - DNA, 25 bp, Homo sapien
gaacgagagtgtctggatcaccatc

SEQ ID NO: 404917 - DNA, 25 bp, Homo sapien
cgcacgaacgagagtgtctggatca

SEQ ID NO: 404918 - DNA, 25 bp, Homo sapien
gtttcttctgcatctagaaggatgt

SEQ ID NO: 404919 - DNA, 25 bp, Homo sapien
tgcatctagaaggatgtcaggtcca

SEQ ID NO: 404920 - DNA, 25 bp, Homo sapien
gcatctagaaggatgtcaggtccac

SEQ ID NO: 404921 - DNA, 25 bp, Homo sapien
tttcttctgcatctagaaggatgtc

SEQ ID NO: 404922 - DNA, 25 bp, Homo sapien
tgtgtattgacgctacgacccagat

SEQ ID NO: 404923 - DNA, 25 bp, Homo sapien
tgtatccagacatcacctgcctcga

SEQ ID NO: 404924 - DNA, 25 bp, Homo sapien
gttccagttcgccatgctcctgagg

SEQ ID NO: 404925 - DNA, 25 bp, Homo sapien
cctcgagggcgcacaggtgtgtatt

SEQ ID NO: 404926 - DNA, 25 bp, Homo sapien
ccttggttgatctttacccatcctt

SEQ ID NO: 404927 - DNA, 25 bp, Homo sapien
tctcttgcttggactggatgaccag

SEQ ID NO: 404928 - DNA, 25 bp, Homo sapien
gggagatcacgtccttggttgatct

SEQ ID NO: 404929 - DNA, 25 bp, Homo sapien
gaagtcgaaggggagatcacgtcct

SEQ ID NO: 404930 - DNA, 25 bp, Homo sapien
ccatctgcaccatcgggctgggctg

SEQ ID NO: 404931 - DNA, 25 bp, Homo sapien
tctgccagaccgagggactgtttct

SEQ ID NO: 404932 - DNA, 25 bp, Homo sapien
gggttcccttggtcatcgtcatccg

SEQ ID NO: 404933 - DNA, 25 bp, Homo sapien
taactgctgaccctcagggaaccca

SEQ ID NO: 404934 - DNA, 25 bp, Homo sapien
ctgtggggcgcgagggagccacacc

SEQ ID NO: 404935 - DNA, 25 bp, Homo sapien
catcattgggggtaggaaatgcttt

SEQ ID NO: 404936 - DNA, 25 bp, Homo sapien
tcatgaaaccgacccacatcattgg

SEQ ID NO: 404937 - DNA, 25 bp, Homo sapien
tacagctcccgctccgtcatgagcg

SEQ ID NO: 404938 - DNA, 25 bp, Homo sapien
tgagcggcgctctcatgaaaccgac

SEQ ID NO: 404939 - DNA, 25 bp, Homo sapien
tccccactgatttgctttacaaagg

SEQ ID NO: 404940 - DNA, 25 bp, Homo sapien
tggtagtaaatggatccacagatcc

SEQ ID NO: 404941 - DNA, 25 bp, Homo sapien
aatagcagtaaattaccacagattc

SEQ ID NO: 404942 - DNA, 25 bp, Homo sapien
cacagatccattcccattaatcaca

SEQ ID NO: 404943 - DNA, 25 bp, Homo sapien
ggatgttgtactggaaaaccattct

SEQ ID NO: 404944 - DNA, 25 bp, Homo sapien
ttggttttcccttagctcgagaatc

SEQ ID NO: 404945 - DNA, 25 bp, Homo sapien
gagcaactgtgtcttaagcaactga

SEQ ID NO: 404946 - DNA, 25 bp, Homo sapien
tagttccatgatttgctctaggagc

SEQ ID NO: 404947 - DNA, 25 bp, Homo sapien
tttgagatcctagatcacttttatc

SEQ ID NO: 404948 - DNA, 25 bp, Homo sapien
cttttgagatcctagatcactttta

SEQ ID NO: 404949 - DNA, 25 bp, Homo sapien
ttcttttgagatcctagatcacttt

SEQ ID NO: 404950 - DNA, 25 bp, Homo sapien
tgagatcctagatcacttttatcat

SEQ ID NO: 404951 - DNA, 25 bp, Homo sapien
ctgtttggtatctaaaggcatttcc

SEQ ID NO: 404952 - DNA, 25 bp, Homo sapien
taacttaagactacccgtgacatta

SEQ ID NO: 404953 - DNA, 25 bp, Homo sapien
taggcagaggtactctattaatctg

SEQ ID NO: 404954 - DNA, 25 bp, Homo sapien
cgtgacattagtttgtgagtaggca

SEQ ID NO: 404955 - DNA, 25 bp, Homo sapien
tagagcagcttactgaactccagga

SEQ ID NO: 404956 - DNA, 25 bp, Homo sapien
ggaccgcctctgaaatgcagctcat

SEQ ID NO: 404957 - DNA, 25 bp, Homo sapien
tctccatggtatggcacaggaccgc

SEQ ID NO: 404958 - DNA, 25 bp, Homo sapien
tatgagggaaggctcacaaagcttc

SEQ ID NO: 404959 - DNA, 25 bp, Homo sapien
atttcttgcagcttgtatccaatgc

SEQ ID NO: 404960 - DNA, 25 bp, Homo sapien
gcagcttgtatccaatgcatgttgc

SEQ ID NO: 404961 - DNA, 25 bp, Homo sapien
tatccaatgcatgttgctgacatta

SEQ ID NO: 404962 - DNA, 25 bp, Homo sapien
caatgcatgttgctgacattatgct

SEQ ID NO: 404963 - DNA, 25 bp, Homo sapien
tactccccggagataactgtcctag

SEQ ID NO: 404964 - DNA, 25 bp, Homo sapien
catacaaaagcgagaactggattcc

SEQ ID NO: 404965 - DNA, 25 bp, Homo sapien
gggacagaatatgattgcacagaca

SEQ ID NO: 404966 - DNA, 25 bp, Homo sapien
tatctgtgattttgaatccgcaggg

SEQ ID NO: 404967 - DNA, 25 bp, Homo sapien
tcatttatttggggactgagagtgg

SEQ ID NO: 404968 - DNA, 25 bp, Homo sapien
agtcatttatttggggactgagagt

SEQ ID NO: 404969 - DNA, 25 bp, Homo sapien
tcagtcatttatttggggactgaga

SEQ ID NO: 404970 - DNA, 25 bp, Homo sapien
catttatttggggactgagagtgga

SEQ ID NO: 404971 - DNA, 25 bp, Homo sapien
catcctctatgcagcgactggcaca

SEQ ID NO: 404972 - DNA, 25 bp, Homo sapien
tcaagaccatagatatttcacatcc

SEQ ID NO: 404973 - DNA, 25 bp, Homo sapien
tttcacatcctctatgcagcgactg

SEQ ID NO: 404974 - DNA, 25 bp, Homo sapien
gcagcgactggcacagtttctcatt

SEQ ID NO: 404975 - DNA, 25 bp, Homo sapien
atataacttttagcaattccaaagt

SEQ ID NO: 404976 - DNA, 25 bp, Homo sapien
tccacatgaacttgtacttttagaa

SEQ ID NO: 404977 - DNA, 25 bp, Homo sapien
tggcaagtctgtagacctcatggct

SEQ ID NO: 404978 - DNA, 25 bp, Homo sapien
tgcaattcccacttgtggtagctgg

SEQ ID NO: 404979 - DNA, 25 bp, Homo sapien
cgccaggccacttcaggaggaagaa

SEQ ID NO: 404980 - DNA, 25 bp, Homo sapien
catcaaagttggctgcataatcatt

SEQ ID NO: 404981 - DNA, 25 bp, Homo sapien
tcatgtcgtgctgccgtagacagct

SEQ ID NO: 404982 - DNA, 25 bp, Homo sapien
gccgtagacagctaaagtcagaatg

SEQ ID NO: 404983 - DNA, 25 bp, Homo sapien
tagttacattagtctgggcattgtg

SEQ ID NO: 404984 - DNA, 25 bp, Homo sapien
tatatttagttacattagtctgggc

SEQ ID NO: 404985 - DNA, 25 bp, Homo sapien
tagaatgccgttgagttctgttttg

SEQ ID NO: 404986 - DNA, 25 bp, Homo sapien
taatgtgtaaaattctctgtaaggg

SEQ ID NO: 404987 - DNA, 25 bp, Homo sapien
atgtgtaaaattctctgtaagggca

SEQ ID NO: 404988 - DNA, 25 bp, Homo sapien
ttattcctctgaaagtagaatgccg

SEQ ID NO: 404989 - DNA, 25 bp, Homo sapien
tgaagccagcaacagtctaatagaa

SEQ ID NO: 404990 - DNA, 25 bp, Homo sapien
ttagctcgactttgcttcaaaccag

SEQ ID NO: 404991 - DNA, 25 bp, Homo sapien
tcagtgcagccaagacccaagtggt

SEQ ID NO: 404992 - DNA, 25 bp, Homo sapien
tgtgcaaagttgcactgtcagtgca

SEQ ID NO: 404993 - DNA, 25 bp, Homo sapien
ttcttgcactgcatgtggaaaggca

SEQ ID NO: 404994 - DNA, 25 bp, Homo sapien
taggatccagtggctattctttttc

SEQ ID NO: 404995 - DNA, 25 bp, Homo sapien
tcttgcactgcatgtggaaaggcat

SEQ ID NO: 404996 - DNA, 25 bp, Homo sapien
ataggatccagtggctattcttttt

SEQ ID NO: 404997 - DNA, 25 bp, Homo sapien
ctccttcaatgctcatagtttaagt

SEQ ID NO: 404998 - DNA, 25 bp, Homo sapien
tcacttgaggtacgcaccagataaa

SEQ ID NO: 404999 - DNA, 25 bp, Homo sapien
ctgaagagacagagagggagataaa

SEQ ID NO: 405000 - DNA, 25 bp, Homo sapien
gacagagagggagataaagacacca

SEQ ID NO: 405001 - DNA, 25 bp, Homo sapien
gagacagagagggagataaagacac

SEQ ID NO: 405002 - DNA, 25 bp, Homo sapien
aagagacagagagggagataaagac

SEQ ID NO: 405003 - DNA, 25 bp, Homo sapien
ccgacacctaaagagtccatcattt

SEQ ID NO: 405004 - DNA, 25 bp, Homo sapien
ctggtcagacaaagtgtttataatg

SEQ ID NO: 405005 - DNA, 25 bp, Homo sapien
taaagcagaccgacacctaaagagt

SEQ ID NO: 405006 - DNA, 25 bp, Homo sapien
caaattctaaagcagaccgacacct

SEQ ID NO: 405007 - DNA, 25 bp, Homo sapien
ctgtttatattcagcactggggcca

SEQ ID NO: 405008 - DNA, 25 bp, Homo sapien
tgtttatattcagcactggggccat

SEQ ID NO: 405009 - DNA, 25 bp, Homo sapien
caggacaaaaaaagtgcttccagtt

SEQ ID NO: 405010 - DNA, 25 bp, Homo sapien
aaaaaagtgcttccagttaaatgca

SEQ ID NO: 405011 - DNA, 25 bp, Homo sapien
caaaaaaagtgcttccagttaaatg

SEQ ID NO: 405012 - DNA, 25 bp, Homo sapien
aaaaagtgcttccagttaaatgcat

SEQ ID NO: 405013 - DNA, 25 bp, Homo sapien
gttcacattgtactgtaattttttg

SEQ ID NO: 405014 - DNA, 25 bp, Homo sapien
gtagttcacattgtactgtaatttt

SEQ ID NO: 405015 - DNA, 25 bp, Homo sapien
agttcacattgtactgtaatttttt

SEQ ID NO: 405016 - DNA, 25 bp, Homo sapien
tagttcacattgtactgtaattttt

SEQ ID NO: 405017 - DNA, 25 bp, Homo sapien
tttctgaatagtttatgtctttctc

SEQ ID NO: 405018 - DNA, 25 bp, Homo sapien
tcaatttgcaatgttgttttctgaa

SEQ ID NO: 405019 - DNA, 25 bp, Homo sapien
gtctttctcacgtatttcaattctt

SEQ ID NO: 405020 - DNA, 25 bp, Homo sapien
agtttatgtctttctcacgtatttc

SEQ ID NO: 405021 - DNA, 25 bp, Homo sapien
tattgaaatagcgaagacagttata

SEQ ID NO: 405022 - DNA, 25 bp, Homo sapien
ctttttgcatctaatttcttactag

SEQ ID NO: 405023 - DNA, 25 bp, Homo sapien
ctcagagtgtgtatgatgagttcag

SEQ ID NO: 405024 - DNA, 25 bp, Homo sapien
aatagcgaagacagttataagttga

SEQ ID NO: 405025 - DNA, 25 bp, Homo sapien
ttcaacatggttttctccaatctgg

SEQ ID NO: 405026 - DNA, 25 bp, Homo sapien
agcaataacaatgcaccgattcttt

SEQ ID NO: 405027 - DNA, 25 bp, Homo sapien
caatgcaccgattcttttcttcaac

SEQ ID NO: 405028 - DNA, 25 bp, Homo sapien
aacatggttttctccaatctgggac

SEQ ID NO: 405029 - DNA, 25 bp, Homo sapien
gctttggtgattcaacaatgtcatc

SEQ ID NO: 405030 - DNA, 25 bp, Homo sapien
ctgccttctgttacccttggatatt

SEQ ID NO: 405031 - DNA, 25 bp, Homo sapien
tattgtgtagatcttacttaagatg

SEQ ID NO: 405032 - DNA, 25 bp, Homo sapien
ggatatttgtccttcatgatggtag

SEQ ID NO: 405033 - DNA, 25 bp, Homo sapien
caaggccgccaaccggttgtccttg

SEQ ID NO: 405034 - DNA, 25 bp, Homo sapien
gctgaaggcctgctttttcactctt

SEQ ID NO: 405035 - DNA, 25 bp, Homo sapien
ctgacccaaggccgccaaccggttg

SEQ ID NO: 405036 - DNA, 25 bp, Homo sapien
tcataaagctattacgcactgctgc

SEQ ID NO: 405037 - DNA, 25 bp, Homo sapien
agagatcaaaatcaggttcctttca

SEQ ID NO: 405038 - DNA, 25 bp, Homo sapien
ttgtgaatgtgaaagcgaagagatc

SEQ ID NO: 405039 - DNA, 25 bp, Homo sapien
cagcagtagcaaaagatgtaaggat

SEQ ID NO: 405040 - DNA, 25 bp, Homo sapien
caatggggagatatgacaaaactta

SEQ ID NO: 405041 - DNA, 25 bp, Homo sapien
gaattcaatggggagatatgacaaa

SEQ ID NO: 405042 - DNA, 25 bp, Homo sapien
aagaagaattcaatggggagatatg

SEQ ID NO: 405043 - DNA, 25 bp, Homo sapien
tgttttagtaatactgcataatgta

SEQ ID NO: 405044 - DNA, 25 bp, Homo sapien
tcatccacacacgttgattctacgg

SEQ ID NO: 405045 - DNA, 25 bp, Homo sapien
acataatgcgtgtgcttctcatctg

SEQ ID NO: 405046 - DNA, 25 bp, Homo sapien
gcagaagcacaagagggtcaagcag

SEQ ID NO: 405047 - DNA, 25 bp, Homo sapien
tacggattacataatgcgtgtgctt

SEQ ID NO: 405048 - DNA, 25 bp, Homo sapien
ccgaagcctttaagatacagttcat

SEQ ID NO: 405049 - DNA, 25 bp, Homo sapien
cttctgatccgaagcctttaagata

SEQ ID NO: 405050 - DNA, 25 bp, Homo sapien
gatccgaagcctttaagatacagtt

SEQ ID NO: 405051 - DNA, 25 bp, Homo sapien
ctgatccgaagcctttaagatacag

SEQ ID NO: 405052 - DNA, 25 bp, Homo sapien
tgtatcaggtcactcatggacaaat

SEQ ID NO: 405053 - DNA, 25 bp, Homo sapien
tcaacagttaaaggccaccattctg

SEQ ID NO: 405054 - DNA, 25 bp, Homo sapien
caagccctgcatattgaggacagcc

SEQ ID NO: 405055 - DNA, 25 bp, Homo sapien
tagcagcagtgcttactatcaagcc

SEQ ID NO: 405056 - DNA, 25 bp, Homo sapien
tttgaatgccgcaattttctctgag

SEQ ID NO: 405057 - DNA, 25 bp, Homo sapien
ttctctgagtagaccctaaaaggga

SEQ ID NO: 405058 - DNA, 25 bp, Homo sapien
ggatgtcagcagtacaagtagtgaa

SEQ ID NO: 405059 - DNA, 25 bp, Homo sapien
tacaagtagtgaagatagagatgaa

SEQ ID NO: 405060 - DNA, 25 bp, Homo sapien
tttataagcagttctcaagctttat

SEQ ID NO: 405061 - DNA, 25 bp, Homo sapien
tgtatgtgtatcaagcaaagagtat

SEQ ID NO: 405062 - DNA, 25 bp, Homo sapien
gatgtgcaatgtatgtgtatcaagc

SEQ ID NO: 405063 - DNA, 25 bp, Homo sapien
tgtttctctgtaatgttgatgtgca

SEQ ID NO: 405064 - DNA, 25 bp, Homo sapien
tccattcacaaggaaatccactagg

SEQ ID NO: 405065 - DNA, 25 bp, Homo sapien
ccattagcttatgggcaaaagggtt

SEQ ID NO: 405066 - DNA, 25 bp, Homo sapien
tggtcatataaggccgagtcccgga

SEQ ID NO: 405067 - DNA, 25 bp, Homo sapien
agctccattagcttatgggcaaaag

SEQ ID NO: 405068 - DNA, 25 bp, Homo sapien
agtgtcctttcattgagactcccca

SEQ ID NO: 405069 - DNA, 25 bp, Homo sapien
cattggactgaaagttacttccctg

SEQ ID NO: 405070 - DNA, 25 bp, Homo sapien
ctccccattggactgaaagttactt

SEQ ID NO: 405071 - DNA, 25 bp, Homo sapien
tgagtataaaattagtgtcctttca

SEQ ID NO: 405072 - DNA, 25 bp, Homo sapien
cctctgggtagtgacagtccagcac

SEQ ID NO: 405073 - DNA, 25 bp, Homo sapien
cctcatcctctgggtagtgacagtc

SEQ ID NO: 405074 - DNA, 25 bp, Homo sapien
tcctctgggtagtgacagtccagca

SEQ ID NO: 405075 - DNA, 25 bp, Homo sapien
catcctctgggtagtgacagtccag

SEQ ID NO: 405076 - DNA, 25 bp, Homo sapien
ccttgccatcaagtgtcggtgggat

SEQ ID NO: 405077 - DNA, 25 bp, Homo sapien
ttcttgccaccactcttcaaaactt

SEQ ID NO: 405078 - DNA, 25 bp, Homo sapien
cttcaaaacttggaccacgaaattg

SEQ ID NO: 405079 - DNA, 25 bp, Homo sapien
cctccttgccatcaagtgtcggtgg

SEQ ID NO: 405080 - DNA, 25 bp, Homo sapien
ctcaatttcaccattcaggatatca

SEQ ID NO: 405081 - DNA, 25 bp, Homo sapien
gtctccttcggtgtgcagcgcgcca

SEQ ID NO: 405082 - DNA, 25 bp, Homo sapien
caacagtctccttcggtgtgcagcg

SEQ ID NO: 405083 - DNA, 25 bp, Homo sapien
tcaggatatcaacagtctccttcgg

SEQ ID NO: 405084 - DNA, 25 bp, Homo sapien
ccggggacccggtgcgcacgctgag

SEQ ID NO: 405085 - DNA, 25 bp, Homo sapien
agcagcaccaaggacggggcgcacg

SEQ ID NO: 405086 - DNA, 25 bp, Homo sapien
cagcaccaaggacggggcgcacggc

SEQ ID NO: 405087 - DNA, 25 bp, Homo sapien
gggacccggtgcgcacgctgagcag

SEQ ID NO: 405088 - DNA, 25 bp, Homo sapien
ggatccaaatcaattagtgtggcag

SEQ ID NO: 405089 - DNA, 25 bp, Homo sapien
attagtgtggcagtttctcccttca

SEQ ID NO: 405090 - DNA, 25 bp, Homo sapien
gttcttacaggatccaaatcaatta

SEQ ID NO: 405091 - DNA, 25 bp, Homo sapien
aatcaattagtgtggcagtttctcc

SEQ ID NO: 405092 - DNA, 25 bp, Homo sapien
gaatccagatctgttaaattggcaa

SEQ ID NO: 405093 - DNA, 25 bp, Homo sapien
tactcttacagggtggtttacaaga

SEQ ID NO: 405094 - DNA, 25 bp, Homo sapien
gttaccatttgcactagtgtcgtta

SEQ ID NO: 405095 - DNA, 25 bp, Homo sapien
taaattggcaagttgtgtagagaat

SEQ ID NO: 405096 - DNA, 25 bp, Homo sapien
ggatagatggggaatgtgattccaa

SEQ ID NO: 405097 - DNA, 25 bp, Homo sapien
agatggggaatgtgattccaaattc

SEQ ID NO: 405098 - DNA, 25 bp, Homo sapien
tggggaatgtgattccaaattccat

SEQ ID NO: 405099 - DNA, 25 bp, Homo sapien
ctatgggatagatggggaatgtgat

SEQ ID NO: 405100 - DNA, 25 bp, Homo sapien
aatctgcatgagaaccagtgaaaaa

SEQ ID NO: 405101 - DNA, 25 bp, Homo sapien
gcctgaaaagtaataatctgcatga

SEQ ID NO: 405102 - DNA, 25 bp, Homo sapien
tgcctgaaaagtaataatctgcatg

SEQ ID NO: 405103 - DNA, 25 bp, Homo sapien
aataatctgcatgagaaccagtgaa

SEQ ID NO: 405104 - DNA, 25 bp, Homo sapien
gattttcctccgatcattgctattg

SEQ ID NO: 405105 - DNA, 25 bp, Homo sapien
agcaaaaccataagtctcttcagat

SEQ ID NO: 405106 - DNA, 25 bp, Homo sapien
tcttcagattttcctccgatcattg

SEQ ID NO: 405107 - DNA, 25 bp, Homo sapien
tccgatcattgctattgtcaaagac

SEQ ID NO: 405108 - DNA, 25 bp, Homo sapien
gagagacacatgttatatgcacctg

SEQ ID NO: 405109 - DNA, 25 bp, Homo sapien
tatgcacctgagtatccacttgtcc

SEQ ID NO: 405110 - DNA, 25 bp, Homo sapien
gaatccataatagcctactaagatg

SEQ ID NO: 405111 - DNA, 25 bp, Homo sapien
taaaagcttaagctctaactcacgt

SEQ ID NO: 405112 - DNA, 25 bp, Homo sapien
cactgaatatctgaatctactaata

SEQ ID NO: 405113 - DNA, 25 bp, Homo sapien
actgaatatctgaatctactaataa

SEQ ID NO: 405114 - DNA, 25 bp, Homo sapien
tcactgaatatctgaatctactaat

SEQ ID NO: 405115 - DNA, 25 bp, Homo sapien
gggcagttcacaagccgccatggca

SEQ ID NO: 405116 - DNA, 25 bp, Homo sapien
tgcctctctcccgtggcttatgttc

SEQ ID NO: 405117 - DNA, 25 bp, Homo sapien
cccgtggcttatgttcacatcctgc

SEQ ID NO: 405118 - DNA, 25 bp, Homo sapien
tggcactgctggtgccttgcattgg

SEQ ID NO: 405119 - DNA, 25 bp, Homo sapien
tagcaaacagttttacgtggactct

SEQ ID NO: 405120 - DNA, 25 bp, Homo sapien
gatcaaagaacctttggtcactggt

SEQ ID NO: 405121 - DNA, 25 bp, Homo sapien
cagacacatcctatgaagttcttaa

SEQ ID NO: 405122 - DNA, 25 bp, Homo sapien
ccaactttctgcaggtctagattga

SEQ ID NO: 405123 - DNA, 25 bp, Homo sapien
catcagttctagctgccgactcaat

SEQ ID NO: 405124 - DNA, 25 bp, Homo sapien
tccatcagttctagctgccgactca

SEQ ID NO: 405125 - DNA, 25 bp, Homo sapien
ttctagctgccgactcaattctctc

SEQ ID NO: 405126 - DNA, 25 bp, Homo sapien
tcagttctagctgccgactcaattc

SEQ ID NO: 405127 - DNA, 25 bp, Homo sapien
tattatcaagtttgtcagtctctag

SEQ ID NO: 405128 - DNA, 25 bp, Homo sapien
gagatatacatttggcccttgaaca

SEQ ID NO: 405129 - DNA, 25 bp, Homo sapien
ttacacatgaggtaagagaggtcag

SEQ ID NO: 405130 - DNA, 25 bp, Homo sapien
gaagaattggatgccagtactcttt

SEQ ID NO: 405131 - DNA, 25 bp, Homo sapien
catttactagtatccactcacagag

SEQ ID NO: 405132 - DNA, 25 bp, Homo sapien
tggtccactttggattgctaccaaa

SEQ ID NO: 405133 - DNA, 25 bp, Homo sapien
gaggtggtgacctacttcccagcag

SEQ ID NO: 405134 - DNA, 25 bp, Homo sapien
acattttggatcttgacagtggccc

SEQ ID NO: 405135 - DNA, 25 bp, Homo sapien
ctttcatgaactccattcaaacata

SEQ ID NO: 405136 - DNA, 25 bp, Homo sapien
gaactccattcaaacatatgcatgt

SEQ ID NO: 405137 - DNA, 25 bp, Homo sapien
gctgagatatagtatggtgcttaat

SEQ ID NO: 405138 - DNA, 25 bp, Homo sapien
tgcatgttgctgagatatagtatgg

SEQ ID NO: 405139 - DNA, 25 bp, Homo sapien
tatgaacactccgactgagtggaat

SEQ ID NO: 405140 - DNA, 25 bp, Homo sapien
ctttatgaacactccgactgagtgg

SEQ ID NO: 405141 - DNA, 25 bp, Homo sapien
gaacactccgactgagtggaatatg

SEQ ID NO: 405142 - DNA, 25 bp, Homo sapien
actccgactgagtggaatatgtcta

SEQ ID NO: 405143 - DNA, 25 bp, Homo sapien
ctttggcaatatccataggacattt

SEQ ID NO: 405144 - DNA, 25 bp, Homo sapien
gcaatatccataggacatttctcat

SEQ ID NO: 405145 - DNA, 25 bp, Homo sapien
tttggcaatatccataggacatttc

SEQ ID NO: 405146 - DNA, 25 bp, Homo sapien
tggcaatatccataggacatttctc

SEQ ID NO: 405147 - DNA, 25 bp, Homo sapien
tttaaggccaaatagtgtttcagag

SEQ ID NO: 405148 - DNA, 25 bp, Homo sapien
taacataacgccctccaagttcatc

SEQ ID NO: 405149 - DNA, 25 bp, Homo sapien
ccaaatagtgtttcagagtgtatat

SEQ ID NO: 405150 - DNA, 25 bp, Homo sapien
cttcgtcttttaaggccaaatagtg

SEQ ID NO: 405151 - DNA, 25 bp, Homo sapien
tcaatctaaggaggatgcagcaatt

SEQ ID NO: 405152 - DNA, 25 bp, Homo sapien
tttacatcggaaggcaaagaccgta

SEQ ID NO: 405153 - DNA, 25 bp, Homo sapien
tgagtaacctgccacatgacagaaa

SEQ ID NO: 405154 - DNA, 25 bp, Homo sapien
tgcagcaattggcatgacatgagta

SEQ ID NO: 405155 - DNA, 25 bp, Homo sapien
tcagcatccacactggacatagata

SEQ ID NO: 405156 - DNA, 25 bp, Homo sapien
cagcatccacactggacatagatat

SEQ ID NO: 405157 - DNA, 25 bp, Homo sapien
ggtggagcccaagcatcgtacagtg

SEQ ID NO: 405158 - DNA, 25 bp, Homo sapien
catcgtacagtggtctcactgagtt

SEQ ID NO: 405159 - DNA, 25 bp, Homo sapien
caagcatcgtacagtggtctcactg

SEQ ID NO: 405160 - DNA, 25 bp, Homo sapien
gcccaagcatcgtacagtggtctca

SEQ ID NO: 405161 - DNA, 25 bp, Homo sapien
tactctgtggaatttgcatggattc

SEQ ID NO: 405162 - DNA, 25 bp, Homo sapien
tgtcagtctcatcccaatcacaatt

SEQ ID NO: 405163 - DNA, 25 bp, Homo sapien
tcctaaatcatccttaagccaaggg

SEQ ID NO: 405164 - DNA, 25 bp, Homo sapien
taagccaagggagtaacagcagttg

SEQ ID NO: 405165 - DNA, 25 bp, Homo sapien
tcagctcaaatgcattctgcttgtc

SEQ ID NO: 405166 - DNA, 25 bp, Homo sapien
ggaagccttgccctacacactctca

SEQ ID NO: 405167 - DNA, 25 bp, Homo sapien
ggaggatttatctgagaacccatat

SEQ ID NO: 405168 - DNA, 25 bp, Homo sapien
tttcctagtgtggaaatgggaattc

SEQ ID NO: 405169 - DNA, 25 bp, Homo sapien
ctgccactgagtgcttgaagtatgc

SEQ ID NO: 405170 - DNA, 25 bp, Homo sapien
ttcgctctgaatatgacaaaggctt

SEQ ID NO: 405171 - DNA, 25 bp, Homo sapien
tcaagaatactgtaaaagtgtccaa

SEQ ID NO: 405172 - DNA, 25 bp, Homo sapien
caactcctatggtcgttcgctctga

SEQ ID NO: 405173 - DNA, 25 bp, Homo sapien
gttttcctattatgacccttgctgg

SEQ ID NO: 405174 - DNA, 25 bp, Homo sapien
tcttagagttgtctcaagcaaaccc

SEQ ID NO: 405175 - DNA, 25 bp, Homo sapien
aattcaaattacgtggacctctcca

SEQ ID NO: 405176 - DNA, 25 bp, Homo sapien
ttttcctggacaatcatacacgaca

SEQ ID NO: 405177 - DNA, 25 bp, Homo sapien
tttgctagattagccccatggtcag

SEQ ID NO: 405178 - DNA, 25 bp, Homo sapien
cactgccaaagttagacgtaaattt

SEQ ID NO: 405179 - DNA, 25 bp, Homo sapien
gtattgtagtctgaaaatgtaactc

SEQ ID NO: 405180 - DNA, 25 bp, Homo sapien
tagacgtaaatttgctagattagcc

SEQ ID NO: 405181 - DNA, 25 bp, Homo sapien
tcttgatcagattttatgttccact

SEQ ID NO: 405182 - DNA, 25 bp, Homo sapien
ttgatcagattttatgttccacttc

SEQ ID NO: 405183 - DNA, 25 bp, Homo sapien
tggctgcgtgtttcttgatcagatt

SEQ ID NO: 405184 - DNA, 25 bp, Homo sapien
ttcttgatcagattttatgttccac

SEQ ID NO: 405185 - DNA, 25 bp, Homo sapien
taaatgccgaaggatagggccataa

SEQ ID NO: 405186 - DNA, 25 bp, Homo sapien
tgccgaaggatagggccataagttc

SEQ ID NO: 405187 - DNA, 25 bp, Homo sapien
ttagtcataaatgccgaaggatagg

SEQ ID NO: 405188 - DNA, 25 bp, Homo sapien
aaggatagggccataagttcttgtc

SEQ ID NO: 405189 - DNA, 25 bp, Homo sapien
cctggtatgccaggtagacttttac

SEQ ID NO: 405190 - DNA, 25 bp, Homo sapien
catttgtccatgcttaaggagttcc

SEQ ID NO: 405191 - DNA, 25 bp, Homo sapien
gtacttccaggtacggtagccgtca

SEQ ID NO: 405192 - DNA, 25 bp, Homo sapien
gccgtcatgtggcagattctcctca

SEQ ID NO: 405193 - DNA, 25 bp, Homo sapien
acagtaatgacaaataagaaccaag

SEQ ID NO: 405194 - DNA, 25 bp, Homo sapien
aagattgaagaagcagattatagga

SEQ ID NO: 405195 - DNA, 25 bp, Homo sapien
gacaaataagaaccaagattgaaga

SEQ ID NO: 405196 - DNA, 25 bp, Homo sapien
taatgacaaataagaaccaagattg

SEQ ID NO: 405197 - DNA, 25 bp, Homo sapien
ccatgtggtacagaaattgaccaat

SEQ ID NO: 405198 - DNA, 25 bp, Homo sapien
aagctaaaaatgttgtggcatcatc

SEQ ID NO: 405199 - DNA, 25 bp, Homo sapien
tagcaccaaacacttgcatccatgt

SEQ ID NO: 405200 - DNA, 25 bp, Homo sapien
gtggtacagaaattgaccaatacat

SEQ ID NO: 405201 - DNA, 25 bp, Homo sapien
caattgccttcgtccctctgtgctg

SEQ ID NO: 405202 - DNA, 25 bp, Homo sapien
caacctgggaggatctacagtcaga

SEQ ID NO: 405203 - DNA, 25 bp, Homo sapien
aactctccatagtgtgtcctacatg

SEQ ID NO: 405204 - DNA, 25 bp, Homo sapien
tctcaagcagggtaggcaattgcct

SEQ ID NO: 405205 - DNA, 25 bp, Homo sapien
gggaaccagtcagctaggtgagaaa

SEQ ID NO: 405206 - DNA, 25 bp, Homo sapien
gagtccagagggtaattctccattc

SEQ ID NO: 405207 - DNA, 25 bp, Homo sapien
tttaagttcacaaacaagtgcctgg

SEQ ID NO: 405208 - DNA, 25 bp, Homo sapien
tggcagttagcagtatgcataagga

SEQ ID NO: 405209 - DNA, 25 bp, Homo sapien
gcagaatcattggaagatcctttaa

SEQ ID NO: 405210 - DNA, 25 bp, Homo sapien
gaaatataaccgaggaaatacagcc

SEQ ID NO: 405211 - DNA, 25 bp, Homo sapien
taatgaattagcctgaggaagagaa

SEQ ID NO: 405212 - DNA, 25 bp, Homo sapien
gaatatgatcttcagagaagtagca

SEQ ID NO: 405213 - DNA, 25 bp, Homo sapien
attcctcttcatataggaacgccat

SEQ ID NO: 405214 - DNA, 25 bp, Homo sapien
tgactcagtattaccctcattattc

SEQ ID NO: 405215 - DNA, 25 bp, Homo sapien
ctgttgaaagccctgcaggtgactc

SEQ ID NO: 405216 - DNA, 25 bp, Homo sapien
actcagtattaccctcattattcat

SEQ ID NO: 405217 - DNA, 25 bp, Homo sapien
gactcagtattaccctcattattca

SEQ ID NO: 405218 - DNA, 25 bp, Homo sapien
ttgagcaagtcgatgtttgtgttag

SEQ ID NO: 405219 - DNA, 25 bp, Homo sapien
aaggttgagcaagtcgatgtttgtg

SEQ ID NO: 405220 - DNA, 25 bp, Homo sapien
agaatgaaggttgagcaagtcgatg

SEQ ID NO: 405221 - DNA, 25 bp, Homo sapien
tgaaggttgagcaagtcgatgtttg

SEQ ID NO: 405222 - DNA, 25 bp, Homo sapien
aaattgtgactagttatccagatgc

SEQ ID NO: 405223 - DNA, 25 bp, Homo sapien
tgactagttatccagatgctattac

SEQ ID NO: 405224 - DNA, 25 bp, Homo sapien
aattgtgactagttatccagatgct

SEQ ID NO: 405225 - DNA, 25 bp, Homo sapien
tgtgactagttatccagatgctatt

SEQ ID NO: 405226 - DNA, 25 bp, Homo sapien
aattaactgccatacccttggggcg

SEQ ID NO: 405227 - DNA, 25 bp, Homo sapien
gggcgcttctcttcgtaccacactg

SEQ ID NO: 405228 - DNA, 25 bp, Homo sapien
cactgagtatattaaacgtctttca

SEQ ID NO: 405229 - DNA, 25 bp, Homo sapien
tcatcatattctcctagaacactag

SEQ ID NO: 405230 - DNA, 25 bp, Homo sapien
aatttacccgtagcaacaacgtcat

SEQ ID NO: 405231 - DNA, 25 bp, Homo sapien
agcaacaacgtcatcattcagggtg

SEQ ID NO: 405232 - DNA, 25 bp, Homo sapien
acgtcatcattcagggtgatatagc

SEQ ID NO: 405233 - DNA, 25 bp, Homo sapien
tacccgtagcaacaacgtcatcatt

SEQ ID NO: 405234 - DNA, 25 bp, Homo sapien
gtatatgctagccttttctgtatta

SEQ ID NO: 405235 - DNA, 25 bp, Homo sapien
tagtagatatgctatctacttgaac

SEQ ID NO: 405236 - DNA, 25 bp, Homo sapien
gtagatatgctatctacttgaacac

SEQ ID NO: 405237 - DNA, 25 bp, Homo sapien
gcatgccattttttgcaggtatatg

SEQ ID NO: 405238 - DNA, 25 bp, Homo sapien
aatggaatgatgtgtaaggtgatgt

SEQ ID NO: 405239 - DNA, 25 bp, Homo sapien
ctgagctctttattgctgtactgag

SEQ ID NO: 405240 - DNA, 25 bp, Homo sapien
gcatcttgtgttctcaggtagaaaa

SEQ ID NO: 405241 - DNA, 25 bp, Homo sapien
ctttattgctgtactgagttcttgc

SEQ ID NO: 405242 - DNA, 25 bp, Homo sapien
ttgtttcatattctcggattccacc

SEQ ID NO: 405243 - DNA, 25 bp, Homo sapien
cagtttgttacttgtttcatattct

SEQ ID NO: 405244 - DNA, 25 bp, Homo sapien
tattctcggattccaccctcattca

SEQ ID NO: 405245 - DNA, 25 bp, Homo sapien
tcatattctcggattccaccctcat

SEQ ID NO: 405246 - DNA, 25 bp, Homo sapien
gtatcactagttttatgactgtccg

SEQ ID NO: 405247 - DNA, 25 bp, Homo sapien
cttgttgtatcactagttttatgac

SEQ ID NO: 405248 - DNA, 25 bp, Homo sapien
cactagttttatgactgtccgttca

SEQ ID NO: 405249 - DNA, 25 bp, Homo sapien
tatgactgtccgttcatgttcccat

SEQ ID NO: 405250 - DNA, 25 bp, Homo sapien
tggagcaacagttaatgttacaact

SEQ ID NO: 405251 - DNA, 25 bp, Homo sapien
caataggaagcttactggagcaaca

SEQ ID NO: 405252 - DNA, 25 bp, Homo sapien
gacaggtatgcgattcccattatcc

SEQ ID NO: 405253 - DNA, 25 bp, Homo sapien
gaggcagctgatagacatccaaagt

SEQ ID NO: 405254 - DNA, 25 bp, Homo sapien
attccttgtaatatctggtgaactt

SEQ ID NO: 405255 - DNA, 25 bp, Homo sapien
ggaagatatatctttagctgtttcc

SEQ ID NO: 405256 - DNA, 25 bp, Homo sapien
gtttccagtattctctctaatttta

SEQ ID NO: 405257 - DNA, 25 bp, Homo sapien
gctgtttccagtattctctctaatt

SEQ ID NO: 405258 - DNA, 25 bp, Homo sapien
ctgatctttagcctggctcttacat

SEQ ID NO: 405259 - DNA, 25 bp, Homo sapien
ctttagcctggctcttacatattct

SEQ ID NO: 405260 - DNA, 25 bp, Homo sapien
tgatctttagcctggctcttacata

SEQ ID NO: 405261 - DNA, 25 bp, Homo sapien
gtgtcagtcaccagcaacctcaaag

SEQ ID NO: 405262 - DNA, 25 bp, Homo sapien
gcaacctcaaagcaataaacatatg

SEQ ID NO: 405263 - DNA, 25 bp, Homo sapien
taaaaagaatctatcactccagtgt

SEQ ID NO: 405264 - DNA, 25 bp, Homo sapien
tgaagtgatcagatacacctgctgc

SEQ ID NO: 405265 - DNA, 25 bp, Homo sapien
ctgggagaatcatgaaagcagccag

SEQ ID NO: 405266 - DNA, 25 bp, Homo sapien
gaatcatgaaagcagccaggtcctg

SEQ ID NO: 405267 - DNA, 25 bp, Homo sapien
atcatgaaagcagccaggtcctgac

SEQ ID NO: 405268 - DNA, 25 bp, Homo sapien
gagaatcatgaaagcagccaggtcc

SEQ ID NO: 405269 - DNA, 25 bp, Homo sapien
agagaggtagcaatcgcccagctga

SEQ ID NO: 405270 - DNA, 25 bp, Homo sapien
gcaatcgcccagctgattgatgtct

SEQ ID NO: 405271 - DNA, 25 bp, Homo sapien
agaggtagcaatcgcccagctgatt

SEQ ID NO: 405272 - DNA, 25 bp, Homo sapien
gtagcaatcgcccagctgattgatg

SEQ ID NO: 405273 - DNA, 25 bp, Homo sapien
ctgagaacttcggtgtcattggtcc

SEQ ID NO: 405274 - DNA, 25 bp, Homo sapien
gagaacttcggtgtcattggtccca

SEQ ID NO: 405275 - DNA, 25 bp, Homo sapien
tccactgtctggcaggtggcagtct

SEQ ID NO: 405276 - DNA, 25 bp, Homo sapien
cactgtctggcaggtggcagtcttt

SEQ ID NO: 405277 - DNA, 25 bp, Homo sapien
actcggactccaggtgcatcagggt

SEQ ID NO: 405278 - DNA, 25 bp, Homo sapien
aggtctgtggcaactcggactccag

SEQ ID NO: 405279 - DNA, 25 bp, Homo sapien
gactccaggtgcatcagggtcccct

SEQ ID NO: 405280 - DNA, 25 bp, Homo sapien
ctgcccaggtctgtggcaactcgga

SEQ ID NO: 405281 - DNA, 25 bp, Homo sapien
acctcgatgaactgtgtggtgacca

SEQ ID NO: 405282 - DNA, 25 bp, Homo sapien
ctgtatgtctcatccccatgagtat

SEQ ID NO: 405283 - DNA, 25 bp, Homo sapien
tgtatgtctcatccccatgagtatc

SEQ ID NO: 405284 - DNA, 25 bp, Homo sapien
cagctccaacctcgatgaactgtgt

SEQ ID NO: 405285 - DNA, 25 bp, Homo sapien
ggtgaggtcctgcaatttgagggca

SEQ ID NO: 405286 - DNA, 25 bp, Homo sapien
actcatacgtgactctaaagtcatt

SEQ ID NO: 405287 - DNA, 25 bp, Homo sapien
gcagaacgatgcaggaactatccac

SEQ ID NO: 405288 - DNA, 25 bp, Homo sapien
gcaggaactatccacagtatttgcg

SEQ ID NO: 405289 - DNA, 25 bp, Homo sapien
agaacgatgcaggaactatccacag

SEQ ID NO: 405290 - DNA, 25 bp, Homo sapien
tctccgcattctggatgcctcccat

SEQ ID NO: 405291 - DNA, 25 bp, Homo sapien
cgtctccgcattctggatgcctccc

SEQ ID NO: 405292 - DNA, 25 bp, Homo sapien
gtctccgcattctggatgcctccca

SEQ ID NO: 405293 - DNA, 25 bp, Homo sapien
ctttggggaaatcgtggcagcagcc

SEQ ID NO: 405294 - DNA, 25 bp, Homo sapien
gaaacaccccatagggtgtgttgat

SEQ ID NO: 405295 - DNA, 25 bp, Homo sapien
cagccagagttggcccactatttcc

SEQ ID NO: 405296 - DNA, 25 bp, Homo sapien
gcagaaaagttcatggggctgcccc

SEQ ID NO: 405297 - DNA, 25 bp, Homo sapien
catagtttaattccttatagatatt

SEQ ID NO: 405298 - DNA, 25 bp, Homo sapien
ggatcacatagtttaattccttata

SEQ ID NO: 405299 - DNA, 25 bp, Homo sapien
tggatcacatagtttaattccttat

SEQ ID NO: 405300 - DNA, 25 bp, Homo sapien
tcacatagtttaattccttatagat

SEQ ID NO: 405301 - DNA, 25 bp, Homo sapien
gagtatttgtaactattgtccacct

SEQ ID NO: 405302 - DNA, 25 bp, Homo sapien
tctattatcgaagagtatttgtaac

SEQ ID NO: 405303 - DNA, 25 bp, Homo sapien
cttcctctattatcgaagagtattt

SEQ ID NO: 405304 - DNA, 25 bp, Homo sapien
tatcgaagagtatttgtaactattg

SEQ ID NO: 405305 - DNA, 25 bp, Homo sapien
ccattcactgtgctcattgacttgg

SEQ ID NO: 405306 - DNA, 25 bp, Homo sapien
attgacttggtccttgccttgaagg

SEQ ID NO: 405307 - DNA, 25 bp, Homo sapien
ttgacttggtccttgccttgaagga

SEQ ID NO: 405308 - DNA, 25 bp, Homo sapien
tgacttggtccttgccttgaaggag

SEQ ID NO: 405309 - DNA, 25 bp, Homo sapien
gcacaaatctgctcaggatttcctt

SEQ ID NO: 405310 - DNA, 25 bp, Homo sapien
gaggagaattctagttgtagagtac

SEQ ID NO: 405311 - DNA, 25 bp, Homo sapien
tcacaaacagcaaagtgagaaatct

SEQ ID NO: 405312 - DNA, 25 bp, Homo sapien
tgtagagtactaaaacatttgctag

SEQ ID NO: 405313 - DNA, 25 bp, Homo sapien
gctttagggttagttcatcaaatat

SEQ ID NO: 405314 - DNA, 25 bp, Homo sapien
tttcaaccattttagccttcttctc

SEQ ID NO: 405315 - DNA, 25 bp, Homo sapien
gaatgctttagggttagttcatcaa

SEQ ID NO: 405316 - DNA, 25 bp, Homo sapien
tatttcaaccattttagccttcttc

SEQ ID NO: 405317 - DNA, 25 bp, Homo sapien
ccagagaaaatcagcgttaatattg

SEQ ID NO: 405318 - DNA, 25 bp, Homo sapien
gagaaaatcagcgttaatattgtcc

SEQ ID NO: 405319 - DNA, 25 bp, Homo sapien
agaaaatcagcgttaatattgtcca

SEQ ID NO: 405320 - DNA, 25 bp, Homo sapien
cagagaaaatcagcgttaatattgt

SEQ ID NO: 405321 - DNA, 25 bp, Homo sapien
tgtgcagttccttcaaatagagagg

SEQ ID NO: 405322 - DNA, 25 bp, Homo sapien
caagagggcactgatgtattcggtc

SEQ ID NO: 405323 - DNA, 25 bp, Homo sapien
gagaggaagtacactggccacaatc

SEQ ID NO: 405324 - DNA, 25 bp, Homo sapien
tgccatagttactacctgatgtgca

SEQ ID NO: 405325 - DNA, 25 bp, Homo sapien
cttctttagatccagagaaacacag

SEQ ID NO: 405326 - DNA, 25 bp, Homo sapien
aaatccataacctgattcctctgag

SEQ ID NO: 405327 - DNA, 25 bp, Homo sapien
aagaaaatccataacctgattcctc

SEQ ID NO: 405328 - DNA, 25 bp, Homo sapien
cctctgagtctgtgtagattctaga

SEQ ID NO: 405329 - DNA, 25 bp, Homo sapien
ttggaaggtccatcacaccagagct

SEQ ID NO: 405330 - DNA, 25 bp, Homo sapien
tacttaaagggtgtgacagcagctt

SEQ ID NO: 405331 - DNA, 25 bp, Homo sapien
tagtgcagttgacaccttcgcagcc

SEQ ID NO: 405332 - DNA, 25 bp, Homo sapien
gccataccagtacaccgggatgaat

SEQ ID NO: 405333 - DNA, 25 bp, Homo sapien
tccctttgtgccagttcccagagtt

SEQ ID NO: 405334 - DNA, 25 bp, Homo sapien
tttccctttgtgccagttcccagag

SEQ ID NO: 405335 - DNA, 25 bp, Homo sapien
gagagcaacctgtattagacattga

SEQ ID NO: 405336 - DNA, 25 bp, Homo sapien
caggagagcaacctgtattagacat

SEQ ID NO: 405337 - DNA, 25 bp, Homo sapien
attctatgttatcagccggatggca

SEQ ID NO: 405338 - DNA, 25 bp, Homo sapien
catgaagcagagacagtacacctgt

SEQ ID NO: 405339 - DNA, 25 bp, Homo sapien
gggaatgactaaggagcagctgtaa

SEQ ID NO: 405340 - DNA, 25 bp, Homo sapien
gccggatggcatgcttctccccggg

SEQ ID NO: 405341 - DNA, 25 bp, Homo sapien
ctggttgttgctctccctctactac

SEQ ID NO: 405342 - DNA, 25 bp, Homo sapien
ggttgttgctctccctctactacca

SEQ ID NO: 405343 - DNA, 25 bp, Homo sapien
tggttgttgctctccctctactacc

SEQ ID NO: 405344 - DNA, 25 bp, Homo sapien
tttcggcaaatcattgagttattct

SEQ ID NO: 405345 - DNA, 25 bp, Homo sapien
tcttcttttcggcaaatcattgagt

SEQ ID NO: 405346 - DNA, 25 bp, Homo sapien
actgaagggataatatatttctctt

SEQ ID NO: 405347 - DNA, 25 bp, Homo sapien
gcaaatcattgagttattcttcatg

SEQ ID NO: 405348 - DNA, 25 bp, Homo sapien
caaaagtggtgttatgcaatggagc

SEQ ID NO: 405349 - DNA, 25 bp, Homo sapien
caatggagcagtgaatattcgtggc

SEQ ID NO: 405350 - DNA, 25 bp, Homo sapien
cccagataatctagttaagtaggtc

SEQ ID NO: 405351 - DNA, 25 bp, Homo sapien
taagtaggtcttggtaattcttcac

SEQ ID NO: 405352 - DNA, 25 bp, Homo sapien
agatacggcaatctggccagagaag

SEQ ID NO: 405353 - DNA, 25 bp, Homo sapien
gtaagtcatcggtgaggccagcaga

SEQ ID NO: 405354 - DNA, 25 bp, Homo sapien
gatgaacaggaagtcacaccctcag

SEQ ID NO: 405355 - DNA, 25 bp, Homo sapien
cagggatgatggtctcggtctcatc

SEQ ID NO: 405356 - DNA, 25 bp, Homo sapien
tcttgattgcgaaagaagtcagact

SEQ ID NO: 405357 - DNA, 25 bp, Homo sapien
ccccagaatacgcatgctacatgat

SEQ ID NO: 405358 - DNA, 25 bp, Homo sapien
tatgtgacaggctaaaattgggcaa

SEQ ID NO: 405359 - DNA, 25 bp, Homo sapien
tctatggtgtgtatggactgactat

SEQ ID NO: 405360 - DNA, 25 bp, Homo sapien
tctcaaggagtagtggagtctgttc

SEQ ID NO: 405361 - DNA, 25 bp, Homo sapien
taaaaggtaactttgtgagaggcaa

SEQ ID NO: 405362 - DNA, 25 bp, Homo sapien
cggaaagacaggtgctttgtacaca

SEQ ID NO: 405363 - DNA, 25 bp, Homo sapien
tccaacggaagattacaaaagcgga

SEQ ID NO: 405364 - DNA, 25 bp, Homo sapien
aacaagagacttaggtgtaggccct

SEQ ID NO: 405365 - DNA, 25 bp, Homo sapien
tgtgatctttactggagaggaacca

SEQ ID NO: 405366 - DNA, 25 bp, Homo sapien
cagcaacgggcttacttaaatgaca

SEQ ID NO: 405367 - DNA, 25 bp, Homo sapien
tgacaggagtagtgatgggaacatc

SEQ ID NO: 405368 - DNA, 25 bp, Homo sapien
caaggttaatatcagagtaatgccc

SEQ ID NO: 405369 - DNA, 25 bp, Homo sapien
tacaatggtgtcatcctacccaagg

SEQ ID NO: 405370 - DNA, 25 bp, Homo sapien
cgttggcttatataccaggagacac

SEQ ID NO: 405371 - DNA, 25 bp, Homo sapien
taatttgaacagaatgatcgcatcc

SEQ ID NO: 405372 - DNA, 25 bp, Homo sapien
gacatgacttatttaaagttagcgg

SEQ ID NO: 405373 - DNA, 25 bp, Homo sapien
tatttaaagttagcgggagagcagc

SEQ ID NO: 405374 - DNA, 25 bp, Homo sapien
gggagagcagccatcgtcctttgcc

SEQ ID NO: 405375 - DNA, 25 bp, Homo sapien
cctttgccaattccagttcgcatac

SEQ ID NO: 405376 - DNA, 25 bp, Homo sapien
tttagggggatatagcaactacagt

SEQ ID NO: 405377 - DNA, 25 bp, Homo sapien
ttctttagggggatatagcaactac

SEQ ID NO: 405378 - DNA, 25 bp, Homo sapien
tcaaaattctttagggggatatagc

SEQ ID NO: 405379 - DNA, 25 bp, Homo sapien
tgtcccagtaattgaggggaacgtc

SEQ ID NO: 405380 - DNA, 25 bp, Homo sapien
taataagtgtacgatggcatatgtc

SEQ ID NO: 405381 - DNA, 25 bp, Homo sapien
ggaaagatttgtctgtggcacacaa

SEQ ID NO: 405382 - DNA, 25 bp, Homo sapien
tatgaactcattcaggcgtacctgg

SEQ ID NO: 405383 - DNA, 25 bp, Homo sapien
agtgccagaccatctcggtaaagca

SEQ ID NO: 405384 - DNA, 25 bp, Homo sapien
cacgcagttacacaggtgttacaga

SEQ ID NO: 405385 - DNA, 25 bp, Homo sapien
gaagtattctttccaggattcccaa

SEQ ID NO: 405386 - DNA, 25 bp, Homo sapien
tatactctatccagaatggctgctt

SEQ ID NO: 405387 - DNA, 25 bp, Homo sapien
tcccaaggtgagaatgtcgacaggt

SEQ ID NO: 405388 - DNA, 25 bp, Homo sapien
ggccctctgctgagtctagctccct

SEQ ID NO: 405389 - DNA, 25 bp, Homo sapien
agctccctaccccagcgttctttct

SEQ ID NO: 405390 - DNA, 25 bp, Homo sapien
gctagcatgcgggccctctgctgag

SEQ ID NO: 405391 - DNA, 25 bp, Homo sapien
gagtctagctccctaccccagcgtt

SEQ ID NO: 405392 - DNA, 25 bp, Homo sapien
agcttggtttcttaaagggaagcat

SEQ ID NO: 405393 - DNA, 25 bp, Homo sapien
gagcttggtttcttaaagggaagca

SEQ ID NO: 405394 - DNA, 25 bp, Homo sapien
ataccttgctcaattattaaatgct

SEQ ID NO: 405395 - DNA, 25 bp, Homo sapien
aattctgtagatgccaggcagacag

SEQ ID NO: 405396 - DNA, 25 bp, Homo sapien
attctgtagatgccaggcagacaga

SEQ ID NO: 405397 - DNA, 25 bp, Homo sapien
ttgagagcacgtgttaaaattctat

SEQ ID NO: 405398 - DNA, 25 bp, Homo sapien
ttaaagaggatgaaaataagacaac

SEQ ID NO: 405399 - DNA, 25 bp, Homo sapien
taaagaggatgaaaataagacaaca

SEQ ID NO: 405400 - DNA, 25 bp, Homo sapien
aaagaggatgaaaataagacaacaa

SEQ ID NO: 405401 - DNA, 25 bp, Homo sapien
ttttaaagaggatgaaaataagaca

SEQ ID NO: 405402 - DNA, 25 bp, Homo sapien
taccttgctcaattattaaatgatg

SEQ ID NO: 405403 - DNA, 25 bp, Homo sapien
ataccttgctcaattattaaatgat

SEQ ID NO: 405404 - DNA, 25 bp, Homo sapien
ccttgctcaattattaaatgatgta

SEQ ID NO: 405405 - DNA, 25 bp, Homo sapien
accttgctcaattattaaatgatgt

SEQ ID NO: 405406 - DNA, 25 bp, Homo sapien
tttgtgaacatttcagcgcttcatg

SEQ ID NO: 405407 - DNA, 25 bp, Homo sapien
cacaatctccaaagctgtcagaagc

SEQ ID NO: 405408 - DNA, 25 bp, Homo sapien
tcacaatctccaaagctgtcagaag

SEQ ID NO: 405409 - DNA, 25 bp, Homo sapien
gatatttgtgaacatttcagcgctt

SEQ ID NO: 405410 - DNA, 25 bp, Homo sapien
caatcggaattagtttaggctgtgt

SEQ ID NO: 405411 - DNA, 25 bp, Homo sapien
gctctctttgaattagccaatcgga

SEQ ID NO: 405412 - DNA, 25 bp, Homo sapien
cgctctctttgaattagccaatcgg

SEQ ID NO: 405413 - DNA, 25 bp, Homo sapien
aatcggaattagtttaggctgtgtg

SEQ ID NO: 405414 - DNA, 25 bp, Homo sapien
caggggtcacatgcatcagggataa

SEQ ID NO: 405415 - DNA, 25 bp, Homo sapien
cagcaggggtcacatgcatcaggga

SEQ ID NO: 405416 - DNA, 25 bp, Homo sapien
cagcagcaggggtcacatgcatcag

SEQ ID NO: 405417 - DNA, 25 bp, Homo sapien
tgttcaggtgtgcgcgccccattgc

SEQ ID NO: 405418 - DNA, 25 bp, Homo sapien
ctcttagagtgctcttaattgtcgc

SEQ ID NO: 405419 - DNA, 25 bp, Homo sapien
gagtgctcttaattgtcgcagatag

SEQ ID NO: 405420 - DNA, 25 bp, Homo sapien
tgctcttaattgtcgcagataggat

SEQ ID NO: 405421 - DNA, 25 bp, Homo sapien
cttagagtgctcttaattgtcgcag

SEQ ID NO: 405422 - DNA, 25 bp, Homo sapien
gactctgagttcgtgtgcttggaaa

SEQ ID NO: 405423 - DNA, 25 bp, Homo sapien
atcttttaagctttcattgactctg

SEQ ID NO: 405424 - DNA, 25 bp, Homo sapien
taagctttcattgactctgagttcg

SEQ ID NO: 405425 - DNA, 25 bp, Homo sapien
gcttggaaattggtgtcaatattga

SEQ ID NO: 405426 - DNA, 25 bp, Homo sapien
ttcttgagcaatttcagtaagcttc

SEQ ID NO: 405427 - DNA, 25 bp, Homo sapien
gttatgaactcaatctccatgtttt

SEQ ID NO: 405428 - DNA, 25 bp, Homo sapien
agggatccttaaagtcctggaagtg

SEQ ID NO: 405429 - DNA, 25 bp, Homo sapien
tttgtcaacttgtgaatacagaact

SEQ ID NO: 405430 - DNA, 25 bp, Homo sapien
tatctttattaagtttgtcaacttg

SEQ ID NO: 405431 - DNA, 25 bp, Homo sapien
ttctgtctgttttcttgtattttct

SEQ ID NO: 405432 - DNA, 25 bp, Homo sapien
tctgtctgttttcttgtattttctt

SEQ ID NO: 405433 - DNA, 25 bp, Homo sapien
cttctgtctgttttcttgtattttc

SEQ ID NO: 405434 - DNA, 25 bp, Homo sapien
ctgtctgttttcttgtattttcttt

SEQ ID NO: 405435 - DNA, 25 bp, Homo sapien
aggcagtattattcctgctatgtca

SEQ ID NO: 405436 - DNA, 25 bp, Homo sapien
tcctgctatgtcatgttatccttct

SEQ ID NO: 405437 - DNA, 25 bp, Homo sapien
tgttatccttctactaaagaacaaa

SEQ ID NO: 405438 - DNA, 25 bp, Homo sapien
aaaggcagtattattcctgctatgt

SEQ ID NO: 405439 - DNA, 25 bp, Homo sapien
aactgccggcatcatgtatacactg

SEQ ID NO: 405440 - DNA, 25 bp, Homo sapien
caaacttggacttgtcagttgccaa

SEQ ID NO: 405441 - DNA, 25 bp, Homo sapien
cactgaggaagacgggaaataaaca

SEQ ID NO: 405442 - DNA, 25 bp, Homo sapien
taagaatattgatcagcaatgtgac

SEQ ID NO: 405443 - DNA, 25 bp, Homo sapien
ctaagacttcaaagctcccactctg

SEQ ID NO: 405444 - DNA, 25 bp, Homo sapien
cattgggctgaataataagccttcc

SEQ ID NO: 405445 - DNA, 25 bp, Homo sapien
cacaaacactttcatcattgggctg

SEQ ID NO: 405446 - DNA, 25 bp, Homo sapien
tcatcattgggctgaataataagcc

SEQ ID NO: 405447 - DNA, 25 bp, Homo sapien
tgccatttgtggacccaaagcactc

SEQ ID NO: 405448 - DNA, 25 bp, Homo sapien
atttgtggacccaaagcactccatg

SEQ ID NO: 405449 - DNA, 25 bp, Homo sapien
catttgtggacccaaagcactccat

SEQ ID NO: 405450 - DNA, 25 bp, Homo sapien
actccatggcttccacaatactcac

SEQ ID NO: 405451 - DNA, 25 bp, Homo sapien
gccttccttcccttgccaaagacca

SEQ ID NO: 405452 - DNA, 25 bp, Homo sapien
tgttgggtccagcacattctccacg

SEQ ID NO: 405453 - DNA, 25 bp, Homo sapien
gtgttgggtccagcacattctccac

SEQ ID NO: 405454 - DNA, 25 bp, Homo sapien
tgggtccagcacattctccacggac

SEQ ID NO: 405455 - DNA, 25 bp, Homo sapien
ttgggtccagcacattctccacgga

SEQ ID NO: 405456 - DNA, 25 bp, Homo sapien
tgccaggacctgtataatttaggac

SEQ ID NO: 405457 - DNA, 25 bp, Homo sapien
aatttaggacgaagttctcatcatc

SEQ ID NO: 405458 - DNA, 25 bp, Homo sapien
ccatccacgatgatgtctaagaacc

SEQ ID NO: 405459 - DNA, 25 bp, Homo sapien
ccacgatgatgtctaagaacctggt

SEQ ID NO: 405460 - DNA, 25 bp, Homo sapien
aacggggctcctggcagcggtggca

SEQ ID NO: 405461 - DNA, 25 bp, Homo sapien
tagaacggggctcctggcagcggtg

SEQ ID NO: 405462 - DNA, 25 bp, Homo sapien
gatagaacggggctcctggcagcgg

SEQ ID NO: 405463 - DNA, 25 bp, Homo sapien
ctgatagaacggggctcctggcagc

SEQ ID NO: 405464 - DNA, 25 bp, Homo sapien
cttggtgcaagtgatatgagctatt

SEQ ID NO: 405465 - DNA, 25 bp, Homo sapien
ttggtgcaagtgatatgagctatta

SEQ ID NO: 405466 - DNA, 25 bp, Homo sapien
acgataacacctcttaacattttca

SEQ ID NO: 405467 - DNA, 25 bp, Homo sapien
acaaaacgataacacctcttaacat

SEQ ID NO: 405468 - DNA, 25 bp, Homo sapien
ataacacctcttaacattttcacag

SEQ ID NO: 405469 - DNA, 25 bp, Homo sapien
tcaggtggtaacaaaacgataacac

SEQ ID NO: 405470 - DNA, 25 bp, Homo sapien
taatgcattgaggtaactgaaaatg

SEQ ID NO: 405471 - DNA, 25 bp, Homo sapien
cacttatcgagtgagtataatgcat

SEQ ID NO: 405472 - DNA, 25 bp, Homo sapien
tgcattgaggtaactgaaaatggaa

SEQ ID NO: 405473 - DNA, 25 bp, Homo sapien
tataatgcattgaggtaactgaaaa

SEQ ID NO: 405474 - DNA, 25 bp, Homo sapien
tcacacaaatgattttgcatcaaat

SEQ ID NO: 405475 - DNA, 25 bp, Homo sapien
acacaaatgattttgcatcaaataa

SEQ ID NO: 405476 - DNA, 25 bp, Homo sapien
cacacaaatgattttgcatcaaata

SEQ ID NO: 405477 - DNA, 25 bp, Homo sapien
tgagcagtatcccagtgagttatag

SEQ ID NO: 405478 - DNA, 25 bp, Homo sapien
agtcaaatcaatgtcgagcttgtag

SEQ ID NO: 405479 - DNA, 25 bp, Homo sapien
tcaatgtcgagcttgtagggaggct

SEQ ID NO: 405480 - DNA, 25 bp, Homo sapien
tatcccagtgagttatagcagtcag

SEQ ID NO: 405481 - DNA, 25 bp, Homo sapien
tctagcatggcatttgcgatgtcac

SEQ ID NO: 405482 - DNA, 25 bp, Homo sapien
ctagccatagaaggctagtcgaatg

SEQ ID NO: 405483 - DNA, 25 bp, Homo sapien
gctagtcgaatgtctagcatggcat

SEQ ID NO: 405484 - DNA, 25 bp, Homo sapien
agcatggcatttgcgatgtcacagg

SEQ ID NO: 405485 - DNA, 25 bp, Homo sapien
tcttgattcatcaaagtagaaatcc

SEQ ID NO: 405486 - DNA, 25 bp, Homo sapien
agaaatcctggttggttctggagtg

SEQ ID NO: 405487 - DNA, 25 bp, Homo sapien
tcaaagtagaaatcctggttggttc

SEQ ID NO: 405488 - DNA, 25 bp, Homo sapien
catcaaagtagaaatcctggttggt

SEQ ID NO: 405489 - DNA, 25 bp, Homo sapien
tcaatagcacttttaagaagctgaa

SEQ ID NO: 405490 - DNA, 25 bp, Homo sapien
tgagggtctcatatctggagtggtt

SEQ ID NO: 405491 - DNA, 25 bp, Homo sapien
aaataaagtctagctggtaaagagg

SEQ ID NO: 405492 - DNA, 25 bp, Homo sapien
ctgaagtccaagtgaaaaagcgaat

SEQ ID NO: 405493 - DNA, 25 bp, Homo sapien
gatttgtgcagacgccaccttggtc

SEQ ID NO: 405494 - DNA, 25 bp, Homo sapien
tatacttgtattggatcagttgcca

SEQ ID NO: 405495 - DNA, 25 bp, Homo sapien
ccctccacatggaaggatttgtgca

SEQ ID NO: 405496 - DNA, 25 bp, Homo sapien
tacctggtatgtgataactcccctc

SEQ ID NO: 405497 - DNA, 25 bp, Homo sapien
gtcaacatgttctaggcttgttaag

SEQ ID NO: 405498 - DNA, 25 bp, Homo sapien
taggcttgttaagttttctgctctg

SEQ ID NO: 405499 - DNA, 25 bp, Homo sapien
ttgtcaacatgttctaggcttgtta

SEQ ID NO: 405500 - DNA, 25 bp, Homo sapien
catgttctaggcttgttaagttttc

SEQ ID NO: 405501 - DNA, 25 bp, Homo sapien
gcagcgaaaggttctctctccaggg

SEQ ID NO: 405502 - DNA, 25 bp, Homo sapien
ttgcttgtcagtagcgggcaaggta

SEQ ID NO: 405503 - DNA, 25 bp, Homo sapien
tgtcacgtcctgaacatgagcctcc

SEQ ID NO: 405504 - DNA, 25 bp, Homo sapien
gagtgtggcgctttattgcatttac

SEQ ID NO: 405505 - DNA, 25 bp, Homo sapien
tgtgtccaacagtatacttgcaggg

SEQ ID NO: 405506 - DNA, 25 bp, Homo sapien
gatccctggtcttgccttagaaata

SEQ ID NO: 405507 - DNA, 25 bp, Homo sapien
ctttggaaagtggtgtgcagttaga

SEQ ID NO: 405508 - DNA, 25 bp, Homo sapien
gcatgattgaagctattgctttgga

SEQ ID NO: 405509 - DNA, 25 bp, Homo sapien
ggtaatagtcaaactcctagaagac

SEQ ID NO: 405510 - DNA, 25 bp, Homo sapien
tagggagtggattttcaagtattac

SEQ ID NO: 405511 - DNA, 25 bp, Homo sapien
tccttctcaatactttacttccaga

SEQ ID NO: 405512 - DNA, 25 bp, Homo sapien
cactttccttctcaatactttactt

SEQ ID NO: 405513 - DNA, 25 bp, Homo sapien
tttgcacatgcagttttcccctgga

SEQ ID NO: 405514 - DNA, 25 bp, Homo sapien
ttgcacatgcagttttcccctggaa

SEQ ID NO: 405515 - DNA, 25 bp, Homo sapien
tgcacatgcagttttcccctggaac

SEQ ID NO: 405516 - DNA, 25 bp, Homo sapien
taggttttgtgttctccaagaaatc

SEQ ID NO: 405517 - DNA, 25 bp, Homo sapien
tctaaatgaacttggatcatatgtg

SEQ ID NO: 405518 - DNA, 25 bp, Homo sapien
tcaatctaaatgaacttggatcata

SEQ ID NO: 405519 - DNA, 25 bp, Homo sapien
aatctaaatgaacttggatcatatg

SEQ ID NO: 405520 - DNA, 25 bp, Homo sapien
ttggatcatatgtgaggtcactttg

SEQ ID NO: 405521 - DNA, 25 bp, Homo sapien
tactcttctgtaaaaatcagtgttt

SEQ ID NO: 405522 - DNA, 25 bp, Homo sapien
ctcttctgtaaaaatcagtgtttcc

SEQ ID NO: 405523 - DNA, 25 bp, Homo sapien
aagacacctggtcgtatttaacatt

SEQ ID NO: 405524 - DNA, 25 bp, Homo sapien
aatcaaagacacctggtcgtattta

SEQ ID NO: 405525 - DNA, 25 bp, Homo sapien
cattacgcaactgactcctcactgc

SEQ ID NO: 405526 - DNA, 25 bp, Homo sapien
agtttgagttctggtgtcctactca

SEQ ID NO: 405527 - DNA, 25 bp, Homo sapien
gtttgagttctggtgtcctactcat

SEQ ID NO: 405528 - DNA, 25 bp, Homo sapien
actgactcctcactgccagtttgag

SEQ ID NO: 405529 - DNA, 25 bp, Homo sapien
taataggctcatggcaaacagtgtt

SEQ ID NO: 405530 - DNA, 25 bp, Homo sapien
tctgatgtggtaataacagtggcac

SEQ ID NO: 405531 - DNA, 25 bp, Homo sapien
gctggtttacaacctctgttgcctg

SEQ ID NO: 405532 - DNA, 25 bp, Homo sapien
tggagtctcatacaattgtaggaac

SEQ ID NO: 405533 - DNA, 25 bp, Homo sapien
tttgcttccgcagaatctagagcca

SEQ ID NO: 405534 - DNA, 25 bp, Homo sapien
ttcattatgggagtcgggtttggca

SEQ ID NO: 405535 - DNA, 25 bp, Homo sapien
tagaccccacgtcaatgtgctggac

SEQ ID NO: 405536 - DNA, 25 bp, Homo sapien
tcttctagatggaccaggaactgga

SEQ ID NO: 405537 - DNA, 25 bp, Homo sapien
gagcttgagctactttaatgatgcc

SEQ ID NO: 405538 - DNA, 25 bp, Homo sapien
tgatgccaatggtactacaaaagtg

SEQ ID NO: 405539 - DNA, 25 bp, Homo sapien
tctgccataggaaaagcttagtaac

SEQ ID NO: 405540 - DNA, 25 bp, Homo sapien
caagggtcggtgttaatgttctgcc

SEQ ID NO: 405541 - DNA, 25 bp, Homo sapien
atggtttctttgttgtttgtctgtt

SEQ ID NO: 405542 - DNA, 25 bp, Homo sapien
tatggtttctttgttgtttgtctgt

SEQ ID NO: 405543 - DNA, 25 bp, Homo sapien
ttatggtttctttgttgtttgtctg

SEQ ID NO: 405544 - DNA, 25 bp, Homo sapien
attacttttcagaagttcaactgtc

SEQ ID NO: 405545 - DNA, 25 bp, Homo sapien
cattacttttcagaagttcaactgt

SEQ ID NO: 405546 - DNA, 25 bp, Homo sapien
aatgcaaggtgaattttggacttag

SEQ ID NO: 405547 - DNA, 25 bp, Homo sapien
cagcttctggtgatatgtaatgtta

SEQ ID NO: 405548 - DNA, 25 bp, Homo sapien
gatgaatctgtatattttcacgagg

SEQ ID NO: 405549 - DNA, 25 bp, Homo sapien
tttcacgaggatctgcttatgcagc

SEQ ID NO: 405550 - DNA, 25 bp, Homo sapien
gccctgtcccactccggaactcata

SEQ ID NO: 405551 - DNA, 25 bp, Homo sapien
gcaccagtggacttcctgaaatctc

SEQ ID NO: 405552 - DNA, 25 bp, Homo sapien
tcccactccggaactcataccgctg

SEQ ID NO: 405553 - DNA, 25 bp, Homo sapien
cagcaccagtggacttcctgaaatc

SEQ ID NO: 405554 - DNA, 25 bp, Homo sapien
taagtgttcactggtgagtttgtag

SEQ ID NO: 405555 - DNA, 25 bp, Homo sapien
ttcatctatgtggaaggttcttctt

SEQ ID NO: 405556 - DNA, 25 bp, Homo sapien
tttgtagtagtcatactgtctgctt

SEQ ID NO: 405557 - DNA, 25 bp, Homo sapien
cactggtgagtttgtagtagtcata

SEQ ID NO: 405558 - DNA, 25 bp, Homo sapien
gttgaggtacttcaaaggcagttta

SEQ ID NO: 405559 - DNA, 25 bp, Homo sapien
gagcaggttgaggtacttcaaaggc

SEQ ID NO: 405560 - DNA, 25 bp, Homo sapien
caaaggcagtttactgaaagaaggg

SEQ ID NO: 405561 - DNA, 25 bp, Homo sapien
tgtaggagagagcaggttgaggtac

SEQ ID NO: 405562 - DNA, 25 bp, Homo sapien
taaaaagcctaatcactgtaagcaa

SEQ ID NO: 405563 - DNA, 25 bp, Homo sapien
agcataacacacatgggctgtggct

SEQ ID NO: 405564 - DNA, 25 bp, Homo sapien
tgtgtagtcccctatttaatgggca

SEQ ID NO: 405565 - DNA, 25 bp, Homo sapien
ggaatgacaatatcatcagtttggt

SEQ ID NO: 405566 - DNA, 25 bp, Homo sapien
ctttatctcccttggttcttacaat

SEQ ID NO: 405567 - DNA, 25 bp, Homo sapien
tctttgatgtctactgctgctgcca

SEQ ID NO: 405568 - DNA, 25 bp, Homo sapien
acaattttagcatcttgctctttga

SEQ ID NO: 405569 - DNA, 25 bp, Homo sapien
tcccttggttcttacaattttagca

SEQ ID NO: 405570 - DNA, 25 bp, Homo sapien
tagatttttgtgagccatgcagtgc

SEQ ID NO: 405571 - DNA, 25 bp, Homo sapien
taatcgccaacatagagagtgccag

SEQ ID NO: 405572 - DNA, 25 bp, Homo sapien
ccgactagagtttgattgaagcaca

SEQ ID NO: 405573 - DNA, 25 bp, Homo sapien
cagattttgtcagtactgtggaagc

SEQ ID NO: 405574 - DNA, 25 bp, Homo sapien
tcactttagaaacagagctcttata

SEQ ID NO: 405575 - DNA, 25 bp, Homo sapien
aggacagcctgcttacaatcaaagg

SEQ ID NO: 405576 - DNA, 25 bp, Homo sapien
tctgtgattgttattcacaaaggac

SEQ ID NO: 405577 - DNA, 25 bp, Homo sapien
gattgttattcacaaaggacagcct

SEQ ID NO: 405578 - DNA, 25 bp, Homo sapien
gaatattgcttgagttgccacttga

SEQ ID NO: 405579 - DNA, 25 bp, Homo sapien
gtctttggcatcagaagggcagttt

SEQ ID NO: 405580 - DNA, 25 bp, Homo sapien
tattgcttgagttgccacttgatgg

SEQ ID NO: 405581 - DNA, 25 bp, Homo sapien
ttgaatattgcttgagttgccactt

SEQ ID NO: 405582 - DNA, 25 bp, Homo sapien
ggccagacgtgtccactcaggaaga

SEQ ID NO: 405583 - DNA, 25 bp, Homo sapien
tgattgcatatgtgttcgacccttc

SEQ ID NO: 405584 - DNA, 25 bp, Homo sapien
caggaagattgtcaggaagacccat

SEQ ID NO: 405585 - DNA, 25 bp, Homo sapien
aagtaatggcatccacctgcagtgg

SEQ ID NO: 405586 - DNA, 25 bp, Homo sapien
cattttggcagtctaatctgttatg

SEQ ID NO: 405587 - DNA, 25 bp, Homo sapien
agcaggcaagagtgcgtgagaaaga

SEQ ID NO: 405588 - DNA, 25 bp, Homo sapien
gcaagagtgcgtgagaaagagtgaa

SEQ ID NO: 405589 - DNA, 25 bp, Homo sapien
gaagacacagattttgttgaacaat

SEQ ID NO: 405590 - DNA, 25 bp, Homo sapien
ccttcagtgcgggaggaagatttca

SEQ ID NO: 405591 - DNA, 25 bp, Homo sapien
gtcagtcatagggaaactgggtcct

SEQ ID NO: 405592 - DNA, 25 bp, Homo sapien
tattaagggtgccataatcagtgga

SEQ ID NO: 405593 - DNA, 25 bp, Homo sapien
aatcagtggagtagttaaccttcag

SEQ ID NO: 405594 - DNA, 25 bp, Homo sapien
aggtgcagctgaaaagcaggtagca

SEQ ID NO: 405595 - DNA, 25 bp, Homo sapien
taatatgttgcagacagaaagacca

SEQ ID NO: 405596 - DNA, 25 bp, Homo sapien
gcataagttgtgaaaaaatccaagc

SEQ ID NO: 405597 - DNA, 25 bp, Homo sapien
gcaggtagcagtcaatcatggatga

SEQ ID NO: 405598 - DNA, 25 bp, Homo sapien
taagccaggtttattggaagacaga

SEQ ID NO: 405599 - DNA, 25 bp, Homo sapien
cacaaggagtgtagcgctaaaaata

SEQ ID NO: 405600 - DNA, 25 bp, Homo sapien
aaaatataagtttcgccaggcacag

SEQ ID NO: 405601 - DNA, 25 bp, Homo sapien
tatggttcgcggttcctactgtgga

SEQ ID NO: 405602 - DNA, 25 bp, Homo sapien
gaatatgaccatcttcgtttgaagg

SEQ ID NO: 405603 - DNA, 25 bp, Homo sapien
ttaaatgcgggaatctctccttgcg

SEQ ID NO: 405604 - DNA, 25 bp, Homo sapien
ccataagttgcagggttaaatgcgg

SEQ ID NO: 405605 - DNA, 25 bp, Homo sapien
tgaaggcaccaaatcgtcgcagtgt

SEQ ID NO: 405606 - DNA, 25 bp, Homo sapien
ctcttgtccttgaaatccatgccat

SEQ ID NO: 405607 - DNA, 25 bp, Homo sapien
tagtttacatcaacctttccaattc

SEQ ID NO: 405608 - DNA, 25 bp, Homo sapien
gtttacatcaacctttccaattcca

SEQ ID NO: 405609 - DNA, 25 bp, Homo sapien
tttacatcaacctttccaattccac

SEQ ID NO: 405610 - DNA, 25 bp, Homo sapien
tccaatttccacacttcctacttct

SEQ ID NO: 405611 - DNA, 25 bp, Homo sapien
ctccaatttccacacttcctacttc

SEQ ID NO: 405612 - DNA, 25 bp, Homo sapien
atttccacacttcctacttctctca

SEQ ID NO: 405613 - DNA, 25 bp, Homo sapien
caatttccacacttcctacttctct

SEQ ID NO: 405614 - DNA, 25 bp, Homo sapien
tcttaaatagaatagcaatgcttgc

SEQ ID NO: 405615 - DNA, 25 bp, Homo sapien
tcatttcatgggaggtggatctctt

SEQ ID NO: 405616 - DNA, 25 bp, Homo sapien
caacttggcactgtgtgccttttag

SEQ ID NO: 405617 - DNA, 25 bp, Homo sapien
actttgatcctatgcatgtcatttc

SEQ ID NO: 405618 - DNA, 25 bp, Homo sapien
aatatttactgatttgaagcagggc

SEQ ID NO: 405619 - DNA, 25 bp, Homo sapien
actgatttgaagcagggctttttga

SEQ ID NO: 405620 - DNA, 25 bp, Homo sapien
tttgatatttttctcgaagattcat

SEQ ID NO: 405621 - DNA, 25 bp, Homo sapien
atttactgatttgaagcagggcttt

SEQ ID NO: 405622 - DNA, 25 bp, Homo sapien
taagttatcacaaggaacagggaag

SEQ ID NO: 405623 - DNA, 25 bp, Homo sapien
caggaaaaggaacacagctctccag

SEQ ID NO: 405624 - DNA, 25 bp, Homo sapien
tgtcttccatgtaataactgtggcc

SEQ ID NO: 405625 - DNA, 25 bp, Homo sapien
gctctccaggtgcttccttatgatg

SEQ ID NO: 405626 - DNA, 25 bp, Homo sapien
taccatgcttacaagcagcatagat

SEQ ID NO: 405627 - DNA, 25 bp, Homo sapien
cagcatagatcaggttgaccatctg

SEQ ID NO: 405628 - DNA, 25 bp, Homo sapien
ccattaccatgcttacaagcagcat

SEQ ID NO: 405629 - DNA, 25 bp, Homo sapien
tagatcaggttgaccatctgtcttc

SEQ ID NO: 405630 - DNA, 25 bp, Homo sapien
ggtgaatgccctcccatcattgagg

SEQ ID NO: 405631 - DNA, 25 bp, Homo sapien
tactgatatgcatgatcccataggt

SEQ ID NO: 405632 - DNA, 25 bp, Homo sapien
ttatttccaagtactgatatgcatg

SEQ ID NO: 405633 - DNA, 25 bp, Homo sapien
ctgtagaggtgaatgccctcccatc

SEQ ID NO: 405634 - DNA, 25 bp, Homo sapien
tattggatacttccaaaggcattgg

SEQ ID NO: 405635 - DNA, 25 bp, Homo sapien
aaatattggatacttccaaaggcat

SEQ ID NO: 405636 - DNA, 25 bp, Homo sapien
tccaaaggcattggtagttcagtga

SEQ ID NO: 405637 - DNA, 25 bp, Homo sapien
ggtagttcagtgatagaattcttgc

SEQ ID NO: 405638 - DNA, 25 bp, Homo sapien
ttaagactaacacgactaagaaaga

SEQ ID NO: 405639 - DNA, 25 bp, Homo sapien
tttccaactgtggatgcatttttaa

SEQ ID NO: 405640 - DNA, 25 bp, Homo sapien
tcccaaaggtcactatttccaactg

SEQ ID NO: 405641 - DNA, 25 bp, Homo sapien
agcaagattgagaaagcttaggtca

SEQ ID NO: 405642 - DNA, 25 bp, Homo sapien
aatcatggcggaagatgacagacga

SEQ ID NO: 405643 - DNA, 25 bp, Homo sapien
catggcggaagatgacagacgaata

SEQ ID NO: 405644 - DNA, 25 bp, Homo sapien
tcatggcggaagatgacagacgaat

SEQ ID NO: 405645 - DNA, 25 bp, Homo sapien
atggcggaagatgacagacgaataa

SEQ ID NO: 405646 - DNA, 25 bp, Homo sapien
aaagcagggcgggatgttaggaaca

SEQ ID NO: 405647 - DNA, 25 bp, Homo sapien
aagtggagtcgtattgtgaagagcc

SEQ ID NO: 405648 - DNA, 25 bp, Homo sapien
gagcctcggatgtcagaccacattt

SEQ ID NO: 405649 - DNA, 25 bp, Homo sapien
ttggtatatcatgaaagcagggcgg

SEQ ID NO: 405650 - DNA, 25 bp, Homo sapien
ctgtagtactgagcacatgtatgtg

SEQ ID NO: 405651 - DNA, 25 bp, Homo sapien
agccttctgggtttatcaaaggcct

SEQ ID NO: 405652 - DNA, 25 bp, Homo sapien
tatgtgctcttccattacactttca

SEQ ID NO: 405653 - DNA, 25 bp, Homo sapien
gcacatgtatgtgctcttccattac

SEQ ID NO: 405654 - DNA, 25 bp, Homo sapien
tgtcctatagctattataaccagat

SEQ ID NO: 405655 - DNA, 25 bp, Homo sapien
tttctctccttgttggtgaaagaat

SEQ ID NO: 405656 - DNA, 25 bp, Homo sapien
tcatgtcctatagctattataacca

SEQ ID NO: 405657 - DNA, 25 bp, Homo sapien
cctatagctattataaccagattca

SEQ ID NO: 405658 - DNA, 25 bp, Homo sapien
caagcacaatccttccgtctgccag

SEQ ID NO: 405659 - DNA, 25 bp, Homo sapien
taccaagcacaatccttccgtctgc

SEQ ID NO: 405660 - DNA, 25 bp, Homo sapien
cctaccaagcacaatccttccgtct

SEQ ID NO: 405661 - DNA, 25 bp, Homo sapien
cccctaccaagcacaatccttccgt

SEQ ID NO: 405662 - DNA, 25 bp, Homo sapien
cattcatatcgatgagtctttgcat

SEQ ID NO: 405663 - DNA, 25 bp, Homo sapien
ttcattcatatcgatgagtctttgc

SEQ ID NO: 405664 - DNA, 25 bp, Homo sapien
tcattcatatcgatgagtctttgca

SEQ ID NO: 405665 - DNA, 25 bp, Homo sapien
tgtctgcaatggagatgtatttttg

SEQ ID NO: 405666 - DNA, 25 bp, Homo sapien
gcaatggagatgtatttttgagtca

SEQ ID NO: 405667 - DNA, 25 bp, Homo sapien
tctgtctgcaatggagatgtatttt

SEQ ID NO: 405668 - DNA, 25 bp, Homo sapien
tctgcaatggagatgtatttttgag

SEQ ID NO: 405669 - DNA, 25 bp, Homo sapien
catggttgggtccaaggaagtaaca

SEQ ID NO: 405670 - DNA, 25 bp, Homo sapien
ctccatggttgggtccaaggaagta

SEQ ID NO: 405671 - DNA, 25 bp, Homo sapien
atggttgggtccaaggaagtaacat

SEQ ID NO: 405672 - DNA, 25 bp, Homo sapien
tccatggttgggtccaaggaagtaa

SEQ ID NO: 405673 - DNA, 25 bp, Homo sapien
tgcatggccccttgtagcaatcagc

SEQ ID NO: 405674 - DNA, 25 bp, Homo sapien
ggaagcagatagacttgcactactg

SEQ ID NO: 405675 - DNA, 25 bp, Homo sapien
tcagtctgcaacaacaacatggttg

SEQ ID NO: 405676 - DNA, 25 bp, Homo sapien
aacatggttgctctcgtggttctca

SEQ ID NO: 405677 - DNA, 25 bp, Homo sapien
agccagggcactaccatgggagtca

SEQ ID NO: 405678 - DNA, 25 bp, Homo sapien
gaggttccaacaagttataattgac

SEQ ID NO: 405679 - DNA, 25 bp, Homo sapien
gagaacaacagggtcaccaataaca

SEQ ID NO: 405680 - DNA, 25 bp, Homo sapien
gtcatcagatatcattagaggttcc

SEQ ID NO: 405681 - DNA, 25 bp, Homo sapien
gccagcagtgcctattttcccgcaa

SEQ ID NO: 405682 - DNA, 25 bp, Homo sapien
tattttcccgcaaatattattatct

SEQ ID NO: 405683 - DNA, 25 bp, Homo sapien
gcagtgcctattttcccgcaaatat

SEQ ID NO: 405684 - DNA, 25 bp, Homo sapien
agatgccagcagtgcctattttccc

SEQ ID NO: 405685 - DNA, 25 bp, Homo sapien
ctgtagggatggcccagatgcaaga

SEQ ID NO: 405686 - DNA, 25 bp, Homo sapien
gtagggatggcccagatgcaagata

SEQ ID NO: 405687 - DNA, 25 bp, Homo sapien
tgtagggatggcccagatgcaagat

SEQ ID NO: 405688 - DNA, 25 bp, Homo sapien
ccaatttaatttggactcgtcagag

SEQ ID NO: 405689 - DNA, 25 bp, Homo sapien
tgtacagtatgagtttttataacct

SEQ ID NO: 405690 - DNA, 25 bp, Homo sapien
taaccttggatatgaatgactgatt

SEQ ID NO: 405691 - DNA, 25 bp, Homo sapien
caccaattgggtggtgctaaaagaa

SEQ ID NO: 405692 - DNA, 25 bp, Homo sapien
attcctttggccaatgtaggatgac

SEQ ID NO: 405693 - DNA, 25 bp, Homo sapien
ccatcattaaccctgtcattcttct

SEQ ID NO: 405694 - DNA, 25 bp, Homo sapien
tccatcattaaccctgtcattcttc

SEQ ID NO: 405695 - DNA, 25 bp, Homo sapien
tttattcctttggccaatgtaggat

SEQ ID NO: 405696 - DNA, 25 bp, Homo sapien
tgtgtgacttaggttcccaccgtta

SEQ ID NO: 405697 - DNA, 25 bp, Homo sapien
tagttgtgtgacttaggttcccacc

SEQ ID NO: 405698 - DNA, 25 bp, Homo sapien
agttgtgtgacttaggttcccaccg

SEQ ID NO: 405699 - DNA, 25 bp, Homo sapien
tgctgtcacttggtgcctaccacct

SEQ ID NO: 405700 - DNA, 25 bp, Homo sapien
tatgcccatgagattaagggtggat

SEQ ID NO: 405701 - DNA, 25 bp, Homo sapien
taggttatgcccatgagattaaggg

SEQ ID NO: 405702 - DNA, 25 bp, Homo sapien
gctgattaggttatgcccatgagat

SEQ ID NO: 405703 - DNA, 25 bp, Homo sapien
ggcagctgattaggttatgcccatg

SEQ ID NO: 405704 - DNA, 25 bp, Homo sapien
gcagacagggttgcaatgttttaca

SEQ ID NO: 405705 - DNA, 25 bp, Homo sapien
acaaagcagacagggttgcaatgtt

SEQ ID NO: 405706 - DNA, 25 bp, Homo sapien
tctaactcttgatttaacggatgag

SEQ ID NO: 405707 - DNA, 25 bp, Homo sapien
gtcaaatttgaccaatacaacaaag

SEQ ID NO: 405708 - DNA, 25 bp, Homo sapien
ggaatcacctaagatatcaaattgg

SEQ ID NO: 405709 - DNA, 25 bp, Homo sapien
tggaatgtagcaagcgtgttaacat

SEQ ID NO: 405710 - DNA, 25 bp, Homo sapien
cacatcacatacagattcacagttt

SEQ ID NO: 405711 - DNA, 25 bp, Homo sapien
ttaacattttctcctcaagcgatat

SEQ ID NO: 405712 - DNA, 25 bp, Homo sapien
cgaagtgtctgatgaccaggtcaac

SEQ ID NO: 405713 - DNA, 25 bp, Homo sapien
caagagtatgtaagcagcctgtcac

SEQ ID NO: 405714 - DNA, 25 bp, Homo sapien
gctctgctatgaagtgatggaccac

SEQ ID NO: 405715 - DNA, 25 bp, Homo sapien
cgtgaacattgaacaggtggctctg

SEQ ID NO: 405716 - DNA, 25 bp, Homo sapien
gaattccagaggtccgtggttagaa

SEQ ID NO: 405717 - DNA, 25 bp, Homo sapien
tgtccatggcagttgaggggcctcc

SEQ ID NO: 405718 - DNA, 25 bp, Homo sapien
ggtccgtggttagaacaggttgctc

SEQ ID NO: 405719 - DNA, 25 bp, Homo sapien
ggttagaacaggttgctccttgcaa

SEQ ID NO: 405720 - DNA, 25 bp, Homo sapien
catggtagcccagtgcaatgttcct

SEQ ID NO: 405721 - DNA, 25 bp, Homo sapien
ggaacaagtcccagcgcatggtagc

SEQ ID NO: 405722 - DNA, 25 bp, Homo sapien
cagtcccttgctggcggtaattcca

SEQ ID NO: 405723 - DNA, 25 bp, Homo sapien
tcggatgatttgttaggagtgcgcc

SEQ ID NO: 405724 - DNA, 25 bp, Homo sapien
gtagacacacccacgtttcttccac

SEQ ID NO: 405725 - DNA, 25 bp, Homo sapien
agacacacccacgtttcttccacag

SEQ ID NO: 405726 - DNA, 25 bp, Homo sapien
tagacacacccacgtttcttccaca

SEQ ID NO: 405727 - DNA, 25 bp, Homo sapien
ttgataatcatctatgttatttctc

SEQ ID NO: 405728 - DNA, 25 bp, Homo sapien
tctgcataagttggaataaccaggc

SEQ ID NO: 405729 - DNA, 25 bp, Homo sapien
tgctgcttgacactctgctttttag

SEQ ID NO: 405730 - DNA, 25 bp, Homo sapien
gataatagatatgcagcagggatgc

SEQ ID NO: 405731 - DNA, 25 bp, Homo sapien
ttaggaagattaccccagataatag

SEQ ID NO: 405732 - DNA, 25 bp, Homo sapien
aggagatgaacactttctcgacaac

SEQ ID NO: 405733 - DNA, 25 bp, Homo sapien
atgaacactttctcgacaactccac

SEQ ID NO: 405734 - DNA, 25 bp, Homo sapien
ggagatgaacactttctcgacaact

SEQ ID NO: 405735 - DNA, 25 bp, Homo sapien
agatgaacactttctcgacaactcc

SEQ ID NO: 405736 - DNA, 25 bp, Homo sapien
aattctctggcggataattctttca

SEQ ID NO: 405737 - DNA, 25 bp, Homo sapien
tctggcggataattctttcatgtcg

SEQ ID NO: 405738 - DNA, 25 bp, Homo sapien
tctttcatgtcgacactttcttcta

SEQ ID NO: 405739 - DNA, 25 bp, Homo sapien
tgtcgacactttcttctatatgtca

SEQ ID NO: 405740 - DNA, 25 bp, Homo sapien
cattggtatccccttgttctatcaa

SEQ ID NO: 405741 - DNA, 25 bp, Homo sapien
gattattactatccataaggacaga

SEQ ID NO: 405742 - DNA, 25 bp, Homo sapien
cttgattggaaacatctaggaaata

SEQ ID NO: 405743 - DNA, 25 bp, Homo sapien
aaagaaaacgcatgttgagtaaaca

SEQ ID NO: 405744 - DNA, 25 bp, Homo sapien
tgtaatgccgttagcacacggagcc

SEQ ID NO: 405745 - DNA, 25 bp, Homo sapien
cctgggagattggtaggcttaagcc

SEQ ID NO: 405746 - DNA, 25 bp, Homo sapien
gagctatagagatgaatgccaccct

SEQ ID NO: 405747 - DNA, 25 bp, Homo sapien
gaagttgtgagtcccagtgctgaat

SEQ ID NO: 405748 - DNA, 25 bp, Homo sapien
tctaccagcacacttgaaatatgat

SEQ ID NO: 405749 - DNA, 25 bp, Homo sapien
ctctaccagcacacttgaaatatga

SEQ ID NO: 405750 - DNA, 25 bp, Homo sapien
tcaaaggagaagctctaccagcaca

SEQ ID NO: 405751 - DNA, 25 bp, Homo sapien
cttgctgcagatatactgaaatatg

SEQ ID NO: 405752 - DNA, 25 bp, Homo sapien
tctctgggtgaccttagaccaaccc

SEQ ID NO: 405753 - DNA, 25 bp, Homo sapien
tagagttctcaagaatgattgcaga

SEQ ID NO: 405754 - DNA, 25 bp, Homo sapien
gaatgtgttgtgaatgcaatgtcct

SEQ ID NO: 405755 - DNA, 25 bp, Homo sapien
tattgtcttgtatgaccctgtcaag

SEQ ID NO: 405756 - DNA, 25 bp, Homo sapien
aattatcgtagccatctactattgt

SEQ ID NO: 405757 - DNA, 25 bp, Homo sapien
agctttttctttacatgatcctgga

SEQ ID NO: 405758 - DNA, 25 bp, Homo sapien
ggtgatgttaacatctatatcaagg

SEQ ID NO: 405759 - DNA, 25 bp, Homo sapien
tgtcctaatacaaccaaacctatgc

SEQ ID NO: 405760 - DNA, 25 bp, Homo sapien
cagacagcccagtcccaaaaaagca

SEQ ID NO: 405761 - DNA, 25 bp, Homo sapien
gatgcctgaatatctcacatgtaca

SEQ ID NO: 405762 - DNA, 25 bp, Homo sapien
taactattacatggcaaattgtgtc

SEQ ID NO: 405763 - DNA, 25 bp, Homo sapien
gagagaaattgggcctgatgctgaa

SEQ ID NO: 405764 - DNA, 25 bp, Homo sapien
agagagaaattgggcctgatgctga

SEQ ID NO: 405765 - DNA, 25 bp, Homo sapien
gtggagagcaaggttaaccatttgt

SEQ ID NO: 405766 - DNA, 25 bp, Homo sapien
gagcaaggttaaccatttgtgcttg

SEQ ID NO: 405767 - DNA, 25 bp, Homo sapien
tgaatgggattctgaaggactgtat

SEQ ID NO: 405768 - DNA, 25 bp, Homo sapien
aatgaatgggattctgaaggactgt

SEQ ID NO: 405769 - DNA, 25 bp, Homo sapien
cagaagtagcttcccactccttatc

SEQ ID NO: 405770 - DNA, 25 bp, Homo sapien
tggttccctgtcaatggcttctaat

SEQ ID NO: 405771 - DNA, 25 bp, Homo sapien
cactccttatccacgaatactctgg

SEQ ID NO: 405772 - DNA, 25 bp, Homo sapien
tttagcacagtgaagggtagggtcc

SEQ ID NO: 405773 - DNA, 25 bp, Homo sapien
tctgggctcttggaagacttaacaa

SEQ ID NO: 405774 - DNA, 25 bp, Homo sapien
cagattgacaatcagctggctcttg

SEQ ID NO: 405775 - DNA, 25 bp, Homo sapien
tattagggctgcgaagaattgctct

SEQ ID NO: 405776 - DNA, 25 bp, Homo sapien
agacttaacaaattcaccttctcct

SEQ ID NO: 405777 - DNA, 25 bp, Homo sapien
taaaacctacgctaactaacacaga

SEQ ID NO: 405778 - DNA, 25 bp, Homo sapien
tttgaagctgcctaatagccatttg

SEQ ID NO: 405779 - DNA, 25 bp, Homo sapien
ttgcttgctgtaaggcctgataaga

SEQ ID NO: 405780 - DNA, 25 bp, Homo sapien
taatagtcagtataattcaactgga

SEQ ID NO: 405781 - DNA, 25 bp, Homo sapien
tgatgggattcctgtcaattggtgc

SEQ ID NO: 405782 - DNA, 25 bp, Homo sapien
tgtttctgcattaatgtgcttaaga

SEQ ID NO: 405783 - DNA, 25 bp, Homo sapien
tttcagaaatctccataactgcttt

SEQ ID NO: 405784 - DNA, 25 bp, Homo sapien
ccattgttgatgcaaactaggctat

SEQ ID NO: 405785 - DNA, 25 bp, Homo sapien
tgcaaagttagccttccatgattat

SEQ ID NO: 405786 - DNA, 25 bp, Homo sapien
tgattatttccacgggtatcactag

SEQ ID NO: 405787 - DNA, 25 bp, Homo sapien
gccttccatgattatttccacgggt

SEQ ID NO: 405788 - DNA, 25 bp, Homo sapien
cgggtatcactagttttgtttacag

SEQ ID NO: 405789 - DNA, 25 bp, Homo sapien
ttcttgaagcgctttcaggttcaca

SEQ ID NO: 405790 - DNA, 25 bp, Homo sapien
gactatcaacatgctataccaccat

SEQ ID NO: 405791 - DNA, 25 bp, Homo sapien
caaaattgagtacagagggttccca

SEQ ID NO: 405792 - DNA, 25 bp, Homo sapien
gtttcatcacacagaacagtttctc

SEQ ID NO: 405793 - DNA, 25 bp, Homo sapien
cgcagcaccaatgttgacaacacta

SEQ ID NO: 405794 - DNA, 25 bp, Homo sapien
gatgtttatcatttgacgcagcacc

SEQ ID NO: 405795 - DNA, 25 bp, Homo sapien
gacaacactagtcactgtcacaatg

SEQ ID NO: 405796 - DNA, 25 bp, Homo sapien
caatgacactggcttgtcgaagggc

SEQ ID NO: 405797 - DNA, 25 bp, Homo sapien
tctggactgctaacatccacagtgt

SEQ ID NO: 405798 - DNA, 25 bp, Homo sapien
tcagcacgtcctctagagcacctag

SEQ ID NO: 405799 - DNA, 25 bp, Homo sapien
gaaacaatggcccttgattctggac

SEQ ID NO: 405800 - DNA, 25 bp, Homo sapien
gacataatagtgttgactttttctc

SEQ ID NO: 405801 - DNA, 25 bp, Homo sapien
tacaggattcttctcatggaagcag

SEQ ID NO: 405802 - DNA, 25 bp, Homo sapien
aggattcttctcatggaagcagtgt

SEQ ID NO: 405803 - DNA, 25 bp, Homo sapien
cttctcatggaagcagtgtcaggga

SEQ ID NO: 405804 - DNA, 25 bp, Homo sapien
ttacaggattcttctcatggaagca

SEQ ID NO: 405805 - DNA, 25 bp, Homo sapien
ccagtatgtcagtgatgtgtgccat

SEQ ID NO: 405806 - DNA, 25 bp, Homo sapien
agttcttgggaaccagtatgtcagt

SEQ ID NO: 405807 - DNA, 25 bp, Homo sapien
gtgaattgctttaacagccccttcc

SEQ ID NO: 405808 - DNA, 25 bp, Homo sapien
aattgctttaacagccccttccttg

SEQ ID NO: 405809 - DNA, 25 bp, Homo sapien
tcagccactgtagcttatcaccaac

SEQ ID NO: 405810 - DNA, 25 bp, Homo sapien
ccacatttcagccactgtagcttat

SEQ ID NO: 405811 - DNA, 25 bp, Homo sapien
tatcaccaacctgggccatgggggt

SEQ ID NO: 405812 - DNA, 25 bp, Homo sapien
cagtttttccggttgtacatgcaaa

SEQ ID NO: 405813 - DNA, 25 bp, Homo sapien
ttgccacaggggaaagtaagcatcc

SEQ ID NO: 405814 - DNA, 25 bp, Homo sapien
gcatcccagtcgtgtcaatcaccat

SEQ ID NO: 405815 - DNA, 25 bp, Homo sapien
taagcatcccagtcgtgtcaatcac

SEQ ID NO: 405816 - DNA, 25 bp, Homo sapien
gggaaagtaagcatcccagtcgtgt

SEQ ID NO: 405817 - DNA, 25 bp, Homo sapien
ttagacattcaatggctgtcctgga

SEQ ID NO: 405818 - DNA, 25 bp, Homo sapien
tagacattcaatggctgtcctggag

SEQ ID NO: 405819 - DNA, 25 bp, Homo sapien
caaaatggagtagtttgatgtgtcc

SEQ ID NO: 405820 - DNA, 25 bp, Homo sapien
tttgatgtgtccttaatctcttctc

SEQ ID NO: 405821 - DNA, 25 bp, Homo sapien
tctcaacagctagtgtagagttgct

SEQ ID NO: 405822 - DNA, 25 bp, Homo sapien
gctagtgtagagttgctgactttct

SEQ ID NO: 405823 - DNA, 25 bp, Homo sapien
tccatagtcaaaaactgtgacctta

SEQ ID NO: 405824 - DNA, 25 bp, Homo sapien
tgtcattagttctccatagtcaaaa

SEQ ID NO: 405825 - DNA, 25 bp, Homo sapien
agtcaaaaactgtgaccttatccat

SEQ ID NO: 405826 - DNA, 25 bp, Homo sapien
ttagttctccatagtcaaaaactgt

SEQ ID NO: 405827 - DNA, 25 bp, Homo sapien
cataaagggtaggagattggtcaga

SEQ ID NO: 405828 - DNA, 25 bp, Homo sapien
gagaataaactgaaggcagctcttc

SEQ ID NO: 405829 - DNA, 25 bp, Homo sapien
tgatcatccgtgtgcatgacccgtt

SEQ ID NO: 405830 - DNA, 25 bp, Homo sapien
tctgcttagcttcggtggagaataa

SEQ ID NO: 405831 - DNA, 25 bp, Homo sapien
aagtaaatgttggttccagtgtaca

SEQ ID NO: 405832 - DNA, 25 bp, Homo sapien
tgttggttccagtgtacagctccac

SEQ ID NO: 405833 - DNA, 25 bp, Homo sapien
taaatgttggttccagtgtacagct

SEQ ID NO: 405834 - DNA, 25 bp, Homo sapien
tggttccagtgtacagctccactgc

SEQ ID NO: 405835 - DNA, 25 bp, Homo sapien
tgtgatatggtctctcctcaactgg

SEQ ID NO: 405836 - DNA, 25 bp, Homo sapien
aatgtgatatggtctctcctcaact

SEQ ID NO: 405837 - DNA, 25 bp, Homo sapien
ttgttttatggggatcctgaggaag

SEQ ID NO: 405838 - DNA, 25 bp, Homo sapien
agaatgtgatatggtctctcctcaa

SEQ ID NO: 405839 - DNA, 25 bp, Homo sapien
gtgctaaaggagagtaattgaccat

SEQ ID NO: 405840 - DNA, 25 bp, Homo sapien
tgtgctaaaggagagtaattgacca

SEQ ID NO: 405841 - DNA, 25 bp, Homo sapien
tgtcaaggaactgtgctaaaggaga

SEQ ID NO: 405842 - DNA, 25 bp, Homo sapien
atttgtcaaggaactgtgctaaagg

SEQ ID NO: 405843 - DNA, 25 bp, Homo sapien
tactcttttccattgacagtatggg

SEQ ID NO: 405844 - DNA, 25 bp, Homo sapien
tgtccatttgcattccagtcaccga

SEQ ID NO: 405845 - DNA, 25 bp, Homo sapien
ttatggcagggtttactcttttcca

SEQ ID NO: 405846 - DNA, 25 bp, Homo sapien
gaatgggacttagctttgtgtccat

SEQ ID NO: 405847 - DNA, 25 bp, Homo sapien
ttctcttggaatgctgcccccaaac

SEQ ID NO: 405848 - DNA, 25 bp, Homo sapien
cccaaaccataagcaaggtcccagt

SEQ ID NO: 405849 - DNA, 25 bp, Homo sapien
ggctttttctcttggaatgctgccc

SEQ ID NO: 405850 - DNA, 25 bp, Homo sapien
tgcccccaaaccataagcaaggtcc

SEQ ID NO: 405851 - DNA, 25 bp, Homo sapien
caaaacaccttaacattgaacaatt

SEQ ID NO: 405852 - DNA, 25 bp, Homo sapien
gatcacaaaacaccttaacattgaa

SEQ ID NO: 405853 - DNA, 25 bp, Homo sapien
cacaaaacaccttaacattgaacaa

SEQ ID NO: 405854 - DNA, 25 bp, Homo sapien
tcacaaaacaccttaacattgaaca

SEQ ID NO: 405855 - DNA, 25 bp, Homo sapien
tgaatttcaccgtgaattagaccca

SEQ ID NO: 405856 - DNA, 25 bp, Homo sapien
gaatttcaccgtgaattagacccat

SEQ ID NO: 405857 - DNA, 25 bp, Homo sapien
taaatgtcgtcctcctcaactcctt

SEQ ID NO: 405858 - DNA, 25 bp, Homo sapien
taagtaactagtgtaaatgtcgtcc

SEQ ID NO: 405859 - DNA, 25 bp, Homo sapien
ggtgcttgctaaagaggaactccaa

SEQ ID NO: 405860 - DNA, 25 bp, Homo sapien
aggacgcccacggactcgaggtgct

SEQ ID NO: 405861 - DNA, 25 bp, Homo sapien
gtacaagacttctaactgagccaaa

SEQ ID NO: 405862 - DNA, 25 bp, Homo sapien
gacttctaactgagccaaatttgcc

SEQ ID NO: 405863 - DNA, 25 bp, Homo sapien
caagacttctaactgagccaaattt

SEQ ID NO: 405864 - DNA, 25 bp, Homo sapien
tggcttactgtctttgttatcaaat

SEQ ID NO: 405865 - DNA, 25 bp, Homo sapien
tcaaccagttgctgtgaggcttcct

SEQ ID NO: 405866 - DNA, 25 bp, Homo sapien
tgaactaggttgagtagtttctgca

SEQ ID NO: 405867 - DNA, 25 bp, Homo sapien
ccctttgtttttcaaccagttgctg

SEQ ID NO: 405868 - DNA, 25 bp, Homo sapien
ctaggttgagtagtttctgcaataa

SEQ ID NO: 405869 - DNA, 25 bp, Homo sapien
gttcatagtaatggttaacttcact

SEQ ID NO: 405870 - DNA, 25 bp, Homo sapien
ttcatagtaatggttaacttcactc

SEQ ID NO: 405871 - DNA, 25 bp, Homo sapien
gctcagtagagcaattggatcctcc

SEQ ID NO: 405872 - DNA, 25 bp, Homo sapien
tgactacacttcaaatccctatttg

SEQ ID NO: 405873 - DNA, 25 bp, Homo sapien
cctccagatactttatgcttttccg

SEQ ID NO: 405874 - DNA, 25 bp, Homo sapien
tactttatgcttttccgaatgtcca

SEQ ID NO: 405875 - DNA, 25 bp, Homo sapien
ttctgctgttaacccatctgtaggg

SEQ ID NO: 405876 - DNA, 25 bp, Homo sapien
acccatctgtagggataaatgtcaa

SEQ ID NO: 405877 - DNA, 25 bp, Homo sapien
cttctgctgttaacccatctgtagg

SEQ ID NO: 405878 - DNA, 25 bp, Homo sapien
tcagctaattccctgaagcagctga

SEQ ID NO: 405879 - DNA, 25 bp, Homo sapien
gaagcagctgagttaaaggtttctg

SEQ ID NO: 405880 - DNA, 25 bp, Homo sapien
ggtttctgtggttcagtcatttcat

SEQ ID NO: 405881 - DNA, 25 bp, Homo sapien
aaaggtttctgtggttcagtcattt

SEQ ID NO: 405882 - DNA, 25 bp, Homo sapien
tgtgcaagacaaaagtcccctatct

SEQ ID NO: 405883 - DNA, 25 bp, Homo sapien
taccagtccttcagagagatgatcc

SEQ ID NO: 405884 - DNA, 25 bp, Homo sapien
ggatccatgatttgtgcaagacaaa

SEQ ID NO: 405885 - DNA, 25 bp, Homo sapien
caatggctttactataactattaga

SEQ ID NO: 405886 - DNA, 25 bp, Homo sapien
taagtttggtaagagagttcacatt

SEQ ID NO: 405887 - DNA, 25 bp, Homo sapien
gtttggtaagagagttcacattgtt

SEQ ID NO: 405888 - DNA, 25 bp, Homo sapien
ttaagtttggtaagagagttcacat

SEQ ID NO: 405889 - DNA, 25 bp, Homo sapien
ggtaagagagttcacattgtttgtt

SEQ ID NO: 405890 - DNA, 25 bp, Homo sapien
atgtcacgatgtcaaatcttctaat

SEQ ID NO: 405891 - DNA, 25 bp, Homo sapien
aatgtcacgatgtcaaatcttctaa

SEQ ID NO: 405892 - DNA, 25 bp, Homo sapien
gtgggctcacgtctccagctgtact

SEQ ID NO: 405893 - DNA, 25 bp, Homo sapien
gctactgtccgtcttactctgatcc

SEQ ID NO: 405894 - DNA, 25 bp, Homo sapien
gacttccactcatcgagagggtgtg

SEQ ID NO: 405895 - DNA, 25 bp, Homo sapien
gatccaacgggacttccactcatcg

SEQ ID NO: 405896 - DNA, 25 bp, Homo sapien
gcataaaaccatcacaagtattcat

SEQ ID NO: 405897 - DNA, 25 bp, Homo sapien
tatcagcataaaaccatcacaagta

SEQ ID NO: 405898 - DNA, 25 bp, Homo sapien
tcagcataaaaccatcacaagtatt

SEQ ID NO: 405899 - DNA, 25 bp, Homo sapien
cagcataaaaccatcacaagtattc

SEQ ID NO: 405900 - DNA, 25 bp, Homo sapien
ttttccaagtgaggataaattcagc

SEQ ID NO: 405901 - DNA, 25 bp, Homo sapien
caagtgaggataaattcagccagct

SEQ ID NO: 405902 - DNA, 25 bp, Homo sapien
tccaagtgaggataaattcagccag

SEQ ID NO: 405903 - DNA, 25 bp, Homo sapien
tttccaagtgaggataaattcagcc

SEQ ID NO: 405904 - DNA, 25 bp, Homo sapien
ttagcacctgctaacatcatagctg

SEQ ID NO: 405905 - DNA, 25 bp, Homo sapien
tagcacctgctaacatcatagctga

SEQ ID NO: 405906 - DNA, 25 bp, Homo sapien
gcacctgctaacatcatagctgaca

SEQ ID NO: 405907 - DNA, 25 bp, Homo sapien
cttagcacctgctaacatcatagct

SEQ ID NO: 405908 - DNA, 25 bp, Homo sapien
tttaaagtaatttcctgctagctcc

SEQ ID NO: 405909 - DNA, 25 bp, Homo sapien
cttctggaacataagaagaaacaca

SEQ ID NO: 405910 - DNA, 25 bp, Homo sapien
taaagtaatttcctgctagctccat

SEQ ID NO: 405911 - DNA, 25 bp, Homo sapien
gaagaaacacatttataatggttat

SEQ ID NO: 405912 - DNA, 25 bp, Homo sapien
gctacccagagatgctttttgccca

SEQ ID NO: 405913 - DNA, 25 bp, Homo sapien
tcctcctaagcagacgaatagtagt

SEQ ID NO: 405914 - DNA, 25 bp, Homo sapien
tcaaccagtttgtatgcatgagaat

SEQ ID NO: 405915 - DNA, 25 bp, Homo sapien
tattactcgcccacctcatagttgg

SEQ ID NO: 405916 - DNA, 25 bp, Homo sapien
ataattgtgaagaggttgataccat

SEQ ID NO: 405917 - DNA, 25 bp, Homo sapien
tcaatgtcagatctataaataattg

SEQ ID NO: 405918 - DNA, 25 bp, Homo sapien
aatgtcagatctataaataattgtg

SEQ ID NO: 405919 - DNA, 25 bp, Homo sapien
attgtgaagaggttgataccattac

SEQ ID NO: 405920 - DNA, 25 bp, Homo sapien
acatctgcgtttaaacaacttgtca

SEQ ID NO: 405921 - DNA, 25 bp, Homo sapien
gacttattgtaacatctgcgtttaa

SEQ ID NO: 405922 - DNA, 25 bp, Homo sapien
caaatcttaaactgacttattgtaa

SEQ ID NO: 405923 - DNA, 25 bp, Homo sapien
taaacaacttgtcaactcacgggca

SEQ ID NO: 405924 - DNA, 25 bp, Homo sapien
tagcgttgtcgtgtgtttaaaacca

SEQ ID NO: 405925 - DNA, 25 bp, Homo sapien
gtgtgtttaaaaccaagtcactgaa

SEQ ID NO: 405926 - DNA, 25 bp, Homo sapien
taagccgtataatagcgttgtcgtg

SEQ ID NO: 405927 - DNA, 25 bp, Homo sapien
ctgtataacccagataagccgtata

SEQ ID NO: 405928 - DNA, 25 bp, Homo sapien
tagatttggcgtatgataaggagtc

SEQ ID NO: 405929 - DNA, 25 bp, Homo sapien
gatttggcgtatgataaggagtcca

SEQ ID NO: 405930 - DNA, 25 bp, Homo sapien
atgcaacccccctcacgacacattt

SEQ ID NO: 405931 - DNA, 25 bp, Homo sapien
tggcgtatgataaggagtccatgca

SEQ ID NO: 405932 - DNA, 25 bp, Homo sapien
tatagcagcacctggaaattaattc

SEQ ID NO: 405933 - DNA, 25 bp, Homo sapien
cccaaattacaatcactgatagata

SEQ ID NO: 405934 - DNA, 25 bp, Homo sapien
tgacacccacattgttatagcagca

SEQ ID NO: 405935 - DNA, 25 bp, Homo sapien
tttcagctttcaaggagactatgaa

SEQ ID NO: 405936 - DNA, 25 bp, Homo sapien
tcaatattctcagggttttccagat

SEQ ID NO: 405937 - DNA, 25 bp, Homo sapien
tctttccgacaaattcgggctcttc

SEQ ID NO: 405938 - DNA, 25 bp, Homo sapien
ccaaactagctattgaatatgactg

SEQ ID NO: 405939 - DNA, 25 bp, Homo sapien
gataattgcgcacatcctgggtcct

SEQ ID NO: 405940 - DNA, 25 bp, Homo sapien
tcactaattgtcttcgtttgggtta

SEQ ID NO: 405941 - DNA, 25 bp, Homo sapien
ctgctgtcactaattgtcttcgttt

SEQ ID NO: 405942 - DNA, 25 bp, Homo sapien
ccaaaacaataagggccactgctgt

SEQ ID NO: 405943 - DNA, 25 bp, Homo sapien
caccaaaacaataagggccactgct

SEQ ID NO: 405944 - DNA, 25 bp, Homo sapien
gctgaaattgatgctttgccttgga

SEQ ID NO: 405945 - DNA, 25 bp, Homo sapien
gagaggcacctatcacctttgtcaa

SEQ ID NO: 405946 - DNA, 25 bp, Homo sapien
gatacaaaagtaaagcttagggcca

SEQ ID NO: 405947 - DNA, 25 bp, Homo sapien
aaagccatggaaactcactacgaac

SEQ ID NO: 405948 - DNA, 25 bp, Homo sapien
gaacagatgtgtaagaataggaaat

SEQ ID NO: 405949 - DNA, 25 bp, Homo sapien
gagaacagatgtgtaagaataggaa

SEQ ID NO: 405950 - DNA, 25 bp, Homo sapien
agaacagatgtgtaagaataggaaa

SEQ ID NO: 405951 - DNA, 25 bp, Homo sapien
aacagatgtgtaagaataggaaatc

SEQ ID NO: 405952 - DNA, 25 bp, Homo sapien
atcttctttaatcgtccacttaatt

SEQ ID NO: 405953 - DNA, 25 bp, Homo sapien
taaatcttctttaatcgtccactta

SEQ ID NO: 405954 - DNA, 25 bp, Homo sapien
aatcttctttaatcgtccacttaat

SEQ ID NO: 405955 - DNA, 25 bp, Homo sapien
tttgcaatcagagcatacaccaagc

SEQ ID NO: 405956 - DNA, 25 bp, Homo sapien
tatttgcaatcagagcatacaccaa

SEQ ID NO: 405957 - DNA, 25 bp, Homo sapien
aatatttgcaatcagagcatacacc

SEQ ID NO: 405958 - DNA, 25 bp, Homo sapien
atttgcaatcagagcatacaccaag

SEQ ID NO: 405959 - DNA, 25 bp, Homo sapien
cccagggatcttacatatggccatt

SEQ ID NO: 405960 - DNA, 25 bp, Homo sapien
ggcagggactcgtcatgaccaagag

SEQ ID NO: 405961 - DNA, 25 bp, Homo sapien
gtgtcctggcagggactcgtcatga

SEQ ID NO: 405962 - DNA, 25 bp, Homo sapien
agccccagggatcttacatatggcc

SEQ ID NO: 405963 - DNA, 25 bp, Homo sapien
gcttgtactttgtaaatgtccaata

SEQ ID NO: 405964 - DNA, 25 bp, Homo sapien
tgtaggtgcatagagccacactttg

SEQ ID NO: 405965 - DNA, 25 bp, Homo sapien
cttctcaaagatagtgcttgtactt

SEQ ID NO: 405966 - DNA, 25 bp, Homo sapien
aatagtatgatttcctatgagatac

SEQ ID NO: 405967 - DNA, 25 bp, Homo sapien
ggctctcttagagccaggttctcct

SEQ ID NO: 405968 - DNA, 25 bp, Homo sapien
aatactcatttttcatagtggctct

SEQ ID NO: 405969 - DNA, 25 bp, Homo sapien
ctctgaagagccacagcagttttac

SEQ ID NO: 405970 - DNA, 25 bp, Homo sapien
aaagcactttcctctgttttatggc

SEQ ID NO: 405971 - DNA, 25 bp, Homo sapien
gctccttaatgcctgccttgcttgc

SEQ ID NO: 405972 - DNA, 25 bp, Homo sapien
ttgctcctgcatttgatatcagcat

SEQ ID NO: 405973 - DNA, 25 bp, Homo sapien
gtgctccttaatgcctgccttgctt

SEQ ID NO: 405974 - DNA, 25 bp, Homo sapien
tccttaatgcctgccttgcttgctc

SEQ ID NO: 405975 - DNA, 25 bp, Homo sapien
tgtgggctgcaagtcagcatgctca

SEQ ID NO: 405976 - DNA, 25 bp, Homo sapien
acaaatacataatgcagcaggtttc

SEQ ID NO: 405977 - DNA, 25 bp, Homo sapien
gaagatgttgctgtgacttttaaga

SEQ ID NO: 405978 - DNA, 25 bp, Homo sapien
tagcccacaatcctaggttgcaagt

SEQ ID NO: 405979 - DNA, 25 bp, Homo sapien
aagggaggatgtgccaccggccact

SEQ ID NO: 405980 - DNA, 25 bp, Homo sapien
ccaagggaggatgtgccaccggcca

SEQ ID NO: 405981 - DNA, 25 bp, Homo sapien
gaggatgtgccaccggccactagaa

SEQ ID NO: 405982 - DNA, 25 bp, Homo sapien
aagccaagggaggatgtgccaccgg

SEQ ID NO: 405983 - DNA, 25 bp, Homo sapien
ttttgttcccacactacactttctg

SEQ ID NO: 405984 - DNA, 25 bp, Homo sapien
ccacactacactttctgtcttaata

SEQ ID NO: 405985 - DNA, 25 bp, Homo sapien
tgttcccacactacactttctgtct

SEQ ID NO: 405986 - DNA, 25 bp, Homo sapien
atgcttctacctccaaaggccttct

SEQ ID NO: 405987 - DNA, 25 bp, Homo sapien
gatgagcagccagctatttcccacc

SEQ ID NO: 405988 - DNA, 25 bp, Homo sapien
aatgcatgcagatgtgaattcacac

SEQ ID NO: 405989 - DNA, 25 bp, Homo sapien
ccaccaaagtggacaataacaaaga

SEQ ID NO: 405990 - DNA, 25 bp, Homo sapien
taaaaggatctctgggtgctacact

SEQ ID NO: 405991 - DNA, 25 bp, Homo sapien
aagcttttgctggtttatgtgggat

SEQ ID NO: 405992 - DNA, 25 bp, Homo sapien
ttcataactactactcttggagctg

SEQ ID NO: 405993 - DNA, 25 bp, Homo sapien
gctcatgcttaacagagactggatt

SEQ ID NO: 405994 - DNA, 25 bp, Homo sapien
atccttacacatggctcctttccat

SEQ ID NO: 405995 - DNA, 25 bp, Homo sapien
caagttatctggggccccacactcc

SEQ ID NO: 405996 - DNA, 25 bp, Homo sapien
ggccccacactcccactacacttta

SEQ ID NO: 405997 - DNA, 25 bp, Homo sapien
ccccacactcccactacactttaga

SEQ ID NO: 405998 - DNA, 25 bp, Homo sapien
ccacactcccactacactttagatc

SEQ ID NO: 405999 - DNA, 25 bp, Homo sapien
aatataaatgtgaatgtcgttttcg

SEQ ID NO: 406000 - DNA, 25 bp, Homo sapien
cacatgtcacatcatcaagtgaaat

SEQ ID NO: 406001 - DNA, 25 bp, Homo sapien
ggttgaccttcctatgtgactccaa

SEQ ID NO: 406002 - DNA, 25 bp, Homo sapien
gaagagcacctgatgctccctgaaa

SEQ ID NO: 406003 - DNA, 25 bp, Homo sapien
ccttggtgaggagacttaggtcaaa

SEQ ID NO: 406004 - DNA, 25 bp, Homo sapien
tagtaactggcttaatcgaatcagc

SEQ ID NO: 406005 - DNA, 25 bp, Homo sapien
gaggttcttctgaaccttttctgaa

SEQ ID NO: 406006 - DNA, 25 bp, Homo sapien
gttcttctgaaccttttctgaagga

SEQ ID NO: 406007 - DNA, 25 bp, Homo sapien
atctgctcatttaccaacagattgt

SEQ ID NO: 406008 - DNA, 25 bp, Homo sapien
tcttctgaaccttttctgaaggaga

SEQ ID NO: 406009 - DNA, 25 bp, Homo sapien
tgtccactttctcgtcatttttaat

SEQ ID NO: 406010 - DNA, 25 bp, Homo sapien
tcaagattgcaaccatgtcttgtaa

SEQ ID NO: 406011 - DNA, 25 bp, Homo sapien
agtgtcttctgacttagtctgttta

SEQ ID NO: 406012 - DNA, 25 bp, Homo sapien
caaccatgtcttgtaaagatcagtg

SEQ ID NO: 406013 - DNA, 25 bp, Homo sapien
ttctgacttagtctgtttatccaca

SEQ ID NO: 406014 - DNA, 25 bp, Homo sapien
gacatagtctacagctttaagagct

SEQ ID NO: 406015 - DNA, 25 bp, Homo sapien
tcttgcagtatctcgacctaggcct

SEQ ID NO: 406016 - DNA, 25 bp, Homo sapien
tactagattgcttgcatgtcttgca

SEQ ID NO: 406017 - DNA, 25 bp, Homo sapien
caattcggatagcaggttttatgcc

SEQ ID NO: 406018 - DNA, 25 bp, Homo sapien
aagctcccacttacgtaaacacctg

SEQ ID NO: 406019 - DNA, 25 bp, Homo sapien
gagtttggggaggtttatatctctg

SEQ ID NO: 406020 - DNA, 25 bp, Homo sapien
cgtaaacacctgttttggctgttgt

SEQ ID NO: 406021 - DNA, 25 bp, Homo sapien
ccatataagttttaagctcccactt

SEQ ID NO: 406022 - DNA, 25 bp, Homo sapien
tttacagctatagttactgctgcca

SEQ ID NO: 406023 - DNA, 25 bp, Homo sapien
ttacagctatagttactgctgccat

SEQ ID NO: 406024 - DNA, 25 bp, Homo sapien
ctttacagctatagttactgctgcc

SEQ ID NO: 406025 - DNA, 25 bp, Homo sapien
tatgtcagtctgatttccaaggaca

SEQ ID NO: 406026 - DNA, 25 bp, Homo sapien
ggcatatctcgtttcctaaaactga

SEQ ID NO: 406027 - DNA, 25 bp, Homo sapien
gacaagctaattgaagttgcacaat

SEQ ID NO: 406028 - DNA, 25 bp, Homo sapien
aaaagaattgtagtggtagtgcatt

SEQ ID NO: 406029 - DNA, 25 bp, Homo sapien
tattctttttgacttagcttggagg

SEQ ID NO: 406030 - DNA, 25 bp, Homo sapien
cttagcttggaggaggaatgactga

SEQ ID NO: 406031 - DNA, 25 bp, Homo sapien
ctttttgacttagcttggaggagga

SEQ ID NO: 406032 - DNA, 25 bp, Homo sapien
tgacttagcttggaggaggaatgac

SEQ ID NO: 406033 - DNA, 25 bp, Homo sapien
atattaattaaccacagaagatttt

SEQ ID NO: 406034 - DNA, 25 bp, Homo sapien
catattaattaaccacagaagattt

SEQ ID NO: 406035 - DNA, 25 bp, Homo sapien
tgaagctgactggaatatccacagg

SEQ ID NO: 406036 - DNA, 25 bp, Homo sapien
gagtactttatgattctgaagctga

SEQ ID NO: 406037 - DNA, 25 bp, Homo sapien
tcctacattgccagtttctcttaag

SEQ ID NO: 406038 - DNA, 25 bp, Homo sapien
tatgccatttccgacatttataagg

SEQ ID NO: 406039 - DNA, 25 bp, Homo sapien
aatgaaggaagagatgaataccgct

SEQ ID NO: 406040 - DNA, 25 bp, Homo sapien
gatgaataccgctgaagactttgaa

SEQ ID NO: 406041 - DNA, 25 bp, Homo sapien
atgaaggaagagatgaataccgctg

SEQ ID NO: 406042 - DNA, 25 bp, Homo sapien
gactctatgtgactctggtggatcc

SEQ ID NO: 406043 - DNA, 25 bp, Homo sapien
ggagaagaatgatggcatgacaccc

SEQ ID NO: 406044 - DNA, 25 bp, Homo sapien
tctctcattcgctctttggttagaa

SEQ ID NO: 406045 - DNA, 25 bp, Homo sapien
ggaaggcctattgtctacatttggg

SEQ ID NO: 406046 - DNA, 25 bp, Homo sapien
caacttctttgttgtgacccaccat

SEQ ID NO: 406047 - DNA, 25 bp, Homo sapien
cactgtcctcgtatctatgtatatt

SEQ ID NO: 406048 - DNA, 25 bp, Homo sapien
ttggttagatctttactgaacagtc

SEQ ID NO: 406049 - DNA, 25 bp, Homo sapien
gatctttactgaacagtccactgtc

SEQ ID NO: 406050 - DNA, 25 bp, Homo sapien
agtccactgtcctcgtatctatgta

SEQ ID NO: 406051 - DNA, 25 bp, Homo sapien
ttgcattcatcgatcagccacacag

SEQ ID NO: 406052 - DNA, 25 bp, Homo sapien
cgtgaagagtcactatatttgcatt

SEQ ID NO: 406053 - DNA, 25 bp, Homo sapien
cactatatttgcattcatcgatcag

SEQ ID NO: 406054 - DNA, 25 bp, Homo sapien
aaacgtgaagagtcactatatttgc

SEQ ID NO: 406055 - DNA, 25 bp, Homo sapien
tattctcacactgaggacttctgac

SEQ ID NO: 406056 - DNA, 25 bp, Homo sapien
tctgacagctcctgtgaaactgaag

SEQ ID NO: 406057 - DNA, 25 bp, Homo sapien
ctattctcacactgaggacttctga

SEQ ID NO: 406058 - DNA, 25 bp, Homo sapien
ggacttctgacagctcctgtgaaac

SEQ ID NO: 406059 - DNA, 25 bp, Homo sapien
tccacacctatctagtgctagaata

SEQ ID NO: 406060 - DNA, 25 bp, Homo sapien
gcagtcagtatctgctctgacgtaa

SEQ ID NO: 406061 - DNA, 25 bp, Homo sapien
ctccacacctatctagtgctagaat

SEQ ID NO: 406062 - DNA, 25 bp, Homo sapien
atgcagtcagtatctgctctgacgt

SEQ ID NO: 406063 - DNA, 25 bp, Homo sapien
cagtgcatccttgcgctcattacca

SEQ ID NO: 406064 - DNA, 25 bp, Homo sapien
catccttgcgctcattaccaagcaa

SEQ ID NO: 406065 - DNA, 25 bp, Homo sapien
aacagtgcatccttgcgctcattac

SEQ ID NO: 406066 - DNA, 25 bp, Homo sapien
taccaagcaagggagaacaacacat

SEQ ID NO: 406067 - DNA, 25 bp, Homo sapien
ggcattgcatacctttttagccaag

SEQ ID NO: 406068 - DNA, 25 bp, Homo sapien
ggttatgcaacggacatccaatata

SEQ ID NO: 406069 - DNA, 25 bp, Homo sapien
ttttagccaaggttaaggttatgca

SEQ ID NO: 406070 - DNA, 25 bp, Homo sapien
acagaaggaaagtaataatggtgac

SEQ ID NO: 406071 - DNA, 25 bp, Homo sapien
tgttcgtagcagcagatgggaacgc

SEQ ID NO: 406072 - DNA, 25 bp, Homo sapien
agaattcttttgttcgtagcagcag

SEQ ID NO: 406073 - DNA, 25 bp, Homo sapien
cgtagcagcagatgggaacgcacac

SEQ ID NO: 406074 - DNA, 25 bp, Homo sapien
cttttgttcgtagcagcagatggga

SEQ ID NO: 406075 - DNA, 25 bp, Homo sapien
ggttttgaaatgtaagaccatgaga

SEQ ID NO: 406076 - DNA, 25 bp, Homo sapien
ctgtacactacaaagtcacagggct

SEQ ID NO: 406077 - DNA, 25 bp, Homo sapien
tgctctagatcctgggaacccatcc

SEQ ID NO: 406078 - DNA, 25 bp, Homo sapien
gactttcatgggacctgtatctcct

SEQ ID NO: 406079 - DNA, 25 bp, Homo sapien
ccatttagtggatcaatgagaaagt

SEQ ID NO: 406080 - DNA, 25 bp, Homo sapien
catttagtggatcaatgagaaagtt

SEQ ID NO: 406081 - DNA, 25 bp, Homo sapien
atgagaaagttcagtgccaagagat

SEQ ID NO: 406082 - DNA, 25 bp, Homo sapien
tttagtggatcaatgagaaagttca

SEQ ID NO: 406083 - DNA, 25 bp, Homo sapien
tagttctttaattctggcattcaca

SEQ ID NO: 406084 - DNA, 25 bp, Homo sapien
tctagttctttaattctggcattca

SEQ ID NO: 406085 - DNA, 25 bp, Homo sapien
aactgccagtatgagaatctccagc

SEQ ID NO: 406086 - DNA, 25 bp, Homo sapien
gtgtgtgctgtccagaaaaggcagc

SEQ ID NO: 406087 - DNA, 25 bp, Homo sapien
acatggttatggcaaggtgcagcct

SEQ ID NO: 406088 - DNA, 25 bp, Homo sapien
gcagcctttctaatttgattcctaa

SEQ ID NO: 406089 - DNA, 25 bp, Homo sapien
tcccctagcagactcccttacgaca

SEQ ID NO: 406090 - DNA, 25 bp, Homo sapien
gactctcccctagcagactccctta

SEQ ID NO: 406091 - DNA, 25 bp, Homo sapien
gactcccttacgacacctctagcca

SEQ ID NO: 406092 - DNA, 25 bp, Homo sapien
tagcagactcccttacgacacctct

SEQ ID NO: 406093 - DNA, 25 bp, Homo sapien
tagcaccccattcttggtaacaatg

SEQ ID NO: 406094 - DNA, 25 bp, Homo sapien
tagtagcaccccattcttggtaaca

SEQ ID NO: 406095 - DNA, 25 bp, Homo sapien
atctttatagtagcaccccattctt

SEQ ID NO: 406096 - DNA, 25 bp, Homo sapien
ctccaagtctctgggaatttccata

SEQ ID NO: 406097 - DNA, 25 bp, Homo sapien
gaggcactatttacctgaaatggag

SEQ ID NO: 406098 - DNA, 25 bp, Homo sapien
gaatgagtacccagtgaagcaggaa

SEQ ID NO: 406099 - DNA, 25 bp, Homo sapien
taaatcaaacagctactgaggcact

SEQ ID NO: 406100 - DNA, 25 bp, Homo sapien
gacctcagaaagtctatgggttgga

SEQ ID NO: 406101 - DNA, 25 bp, Homo sapien
ggtactactctgaacacgtggccac

SEQ ID NO: 406102 - DNA, 25 bp, Homo sapien
tgttgtgctcacttgcagagctgag

SEQ ID NO: 406103 - DNA, 25 bp, Homo sapien
gagtctctgttggtcgttataaccc

SEQ ID NO: 406104 - DNA, 25 bp, Homo sapien
tttgggagagaacaccactgagtgt

SEQ ID NO: 406105 - DNA, 25 bp, Homo sapien
tgtgagagtattcctgagccagcca

SEQ ID NO: 406106 - DNA, 25 bp, Homo sapien
atttgagtgtttgaacttccagatt

SEQ ID NO: 406107 - DNA, 25 bp, Homo sapien
ctttgaccagttgttagcccatgtg

SEQ ID NO: 406108 - DNA, 25 bp, Homo sapien
ccatcactgtgagagtattcctgag

SEQ ID NO: 406109 - DNA, 25 bp, Homo sapien
ctttgatatcttgggaagttcctta

SEQ ID NO: 406110 - DNA, 25 bp, Homo sapien
tgctagatcatggttgatgcgtcag

SEQ ID NO: 406111 - DNA, 25 bp, Homo sapien
tgggaagttccttagatcagaagat

SEQ ID NO: 406112 - DNA, 25 bp, Homo sapien
ttgaaagtcaaagtaattacacatc

SEQ ID NO: 406113 - DNA, 25 bp, Homo sapien
cacactgataacaccaccaaatgtc

SEQ ID NO: 406114 - DNA, 25 bp, Homo sapien
taatccgttcagttcattaagttag

SEQ ID NO: 406115 - DNA, 25 bp, Homo sapien
tcagttcattaagttagtcagcagc

SEQ ID NO: 406116 - DNA, 25 bp, Homo sapien
tcttgcaccattttaatccgttcag

SEQ ID NO: 406117 - DNA, 25 bp, Homo sapien
tcaaaagtaggaaaatggtcagtgc

SEQ ID NO: 406118 - DNA, 25 bp, Homo sapien
aagtaggaaaatggtcagtgcagcc

SEQ ID NO: 406119 - DNA, 25 bp, Homo sapien
aaagtaggaaaatggtcagtgcagc

SEQ ID NO: 406120 - DNA, 25 bp, Homo sapien
caaaagtaggaaaatggtcagtgca

SEQ ID NO: 406121 - DNA, 25 bp, Homo sapien
ttagaattcctctccttccttctca

SEQ ID NO: 406122 - DNA, 25 bp, Homo sapien
tagaattcctctccttccttctcac

SEQ ID NO: 406123 - DNA, 25 bp, Homo sapien
gaatccacactaaccacttcataat

SEQ ID NO: 406124 - DNA, 25 bp, Homo sapien
taatccttcttaaggacaaccatgt

SEQ ID NO: 406125 - DNA, 25 bp, Homo sapien
tcctggtgggcctcggaaaactctc

SEQ ID NO: 406126 - DNA, 25 bp, Homo sapien
aacagaatccacactaaccacttca

SEQ ID NO: 406127 - DNA, 25 bp, Homo sapien
caggtaaaacttgcggtccaggtga

SEQ ID NO: 406128 - DNA, 25 bp, Homo sapien
aaacttgcggtccaggtgagcccac

SEQ ID NO: 406129 - DNA, 25 bp, Homo sapien
atcaggtaaaacttgcggtccaggt

SEQ ID NO: 406130 - DNA, 25 bp, Homo sapien
acttgcggtccaggtgagcccacac

SEQ ID NO: 406131 - DNA, 25 bp, Homo sapien
caaccttgaagctagagggacagca

SEQ ID NO: 406132 - DNA, 25 bp, Homo sapien
tggctgggtctccaacaggtaccac

SEQ ID NO: 406133 - DNA, 25 bp, Homo sapien
tatttaccatggtgtggatcacatc

SEQ ID NO: 406134 - DNA, 25 bp, Homo sapien
cgtcaccagggtacaataggctgca

SEQ ID NO: 406135 - DNA, 25 bp, Homo sapien
aattctgtcagatcaatattcaggg

SEQ ID NO: 406136 - DNA, 25 bp, Homo sapien
ttctgtcagatcaatattcagggct

SEQ ID NO: 406137 - DNA, 25 bp, Homo sapien
ctggaattctgtcagatcaatattc

SEQ ID NO: 406138 - DNA, 25 bp, Homo sapien
ctgtcagatcaatattcagggctcc

SEQ ID NO: 406139 - DNA, 25 bp, Homo sapien
cacaatatggccaatgagatggtta

SEQ ID NO: 406140 - DNA, 25 bp, Homo sapien
gatagaggacacaatatggccaatg

SEQ ID NO: 406141 - DNA, 25 bp, Homo sapien
gttagtgtagtttggacactcaata

SEQ ID NO: 406142 - DNA, 25 bp, Homo sapien
taaggttagtgtagtttggacactc

SEQ ID NO: 406143 - DNA, 25 bp, Homo sapien
cgtagagctcaactactgctgtgga

SEQ ID NO: 406144 - DNA, 25 bp, Homo sapien
cagaaccagtctgttcaccaaaact

SEQ ID NO: 406145 - DNA, 25 bp, Homo sapien
tggacttcttgttataatcaacaga

SEQ ID NO: 406146 - DNA, 25 bp, Homo sapien
gaaagacataccatcagcagggagt

SEQ ID NO: 406147 - DNA, 25 bp, Homo sapien
gagctgccagtctggacaccaggct

SEQ ID NO: 406148 - DNA, 25 bp, Homo sapien
ggagctgccagtctggacaccaggc

SEQ ID NO: 406149 - DNA, 25 bp, Homo sapien
cagtagaagtggacaaggaacaaaa

SEQ ID NO: 406150 - DNA, 25 bp, Homo sapien
aaaaatctgtaagttggtgtggtca

SEQ ID NO: 406151 - DNA, 25 bp, Homo sapien
agttggtgtggtcaattagttgtaa

SEQ ID NO: 406152 - DNA, 25 bp, Homo sapien
gtaaataaccctgtactcagaccag

SEQ ID NO: 406153 - DNA, 25 bp, Homo sapien
aagaaattatagtgatagacaggag

SEQ ID NO: 406154 - DNA, 25 bp, Homo sapien
cagaagtgggggcttttctgtaaga

SEQ ID NO: 406155 - DNA, 25 bp, Homo sapien
gaaattatagtgatagacaggagca

SEQ ID NO: 406156 - DNA, 25 bp, Homo sapien
ttatagtgatagacaggagcaagaa

SEQ ID NO: 406157 - DNA, 25 bp, Homo sapien
taacttgtctcttgcggttcactgg

SEQ ID NO: 406158 - DNA, 25 bp, Homo sapien
tgttccacagactcgaatatgtcga

SEQ ID NO: 406159 - DNA, 25 bp, Homo sapien
tccagggtcctatcatatacagtaa

SEQ ID NO: 406160 - DNA, 25 bp, Homo sapien
tacagtaatgcctgggagctcgaca

SEQ ID NO: 406161 - DNA, 25 bp, Homo sapien
ccaactggggaagtaagccctgttg

SEQ ID NO: 406162 - DNA, 25 bp, Homo sapien
tcaaacttctacttggctgctgagt

SEQ ID NO: 406163 - DNA, 25 bp, Homo sapien
ccctgttgctgggtttatcagtgaa

SEQ ID NO: 406164 - DNA, 25 bp, Homo sapien
tctacttggctgctgagtccaactg

SEQ ID NO: 406165 - DNA, 25 bp, Homo sapien
aactttattttcatggatattcttc

SEQ ID NO: 406166 - DNA, 25 bp, Homo sapien
agggaactttattttcatggatatt

SEQ ID NO: 406167 - DNA, 25 bp, Homo sapien
ggaactttattttcatggatattct

SEQ ID NO: 406168 - DNA, 25 bp, Homo sapien
actttattttcatggatattcttca

SEQ ID NO: 406169 - DNA, 25 bp, Homo sapien
tcctgttgttcgtaaataagactca

SEQ ID NO: 406170 - DNA, 25 bp, Homo sapien
gtatattgtgctatgcttatcccca

SEQ ID NO: 406171 - DNA, 25 bp, Homo sapien
taagactcataaccctcaatgccat

SEQ ID NO: 406172 - DNA, 25 bp, Homo sapien
tggatattgtccttcagtggcagcc

SEQ ID NO: 406173 - DNA, 25 bp, Homo sapien
aatacctgttactaactgaggagcc

SEQ ID NO: 406174 - DNA, 25 bp, Homo sapien
gttcaatccgaatacctgttactaa

SEQ ID NO: 406175 - DNA, 25 bp, Homo sapien
tctttcatagtcaataacttgttca

SEQ ID NO: 406176 - DNA, 25 bp, Homo sapien
aacttgttcaatccgaatacctgtt

SEQ ID NO: 406177 - DNA, 25 bp, Homo sapien
tctagacttgtcaaaaccatctgtg

SEQ ID NO: 406178 - DNA, 25 bp, Homo sapien
agctctagacttgtcaaaaccatct

SEQ ID NO: 406179 - DNA, 25 bp, Homo sapien
gctctagacttgtcaaaaccatctg

SEQ ID NO: 406180 - DNA, 25 bp, Homo sapien
gagctctagacttgtcaaaaccatc

SEQ ID NO: 406181 - DNA, 25 bp, Homo sapien
caggccattccacatatgacttagc

SEQ ID NO: 406182 - DNA, 25 bp, Homo sapien
ctactcctgcgatgacaggccattc

SEQ ID NO: 406183 - DNA, 25 bp, Homo sapien
cttttcctactcctgcgatgacagg

SEQ ID NO: 406184 - DNA, 25 bp, Homo sapien
gacaggccattccacatatgactta

SEQ ID NO: 406185 - DNA, 25 bp, Homo sapien
acgttgtagcttagaaatttcatcc

SEQ ID NO: 406186 - DNA, 25 bp, Homo sapien
cgttgtagcttagaaatttcatccc

SEQ ID NO: 406187 - DNA, 25 bp, Homo sapien
cagaagcacgagtttcaccattcat

SEQ ID NO: 406188 - DNA, 25 bp, Homo sapien
ttcatccccagaagcacgagtttca

SEQ ID NO: 406189 - DNA, 25 bp, Homo sapien
tcaggatcctttgcccgtgtccata

SEQ ID NO: 406190 - DNA, 25 bp, Homo sapien
cactgtgtttcctctattggcatcg

SEQ ID NO: 406191 - DNA, 25 bp, Homo sapien
tacagcggttccctacatttgacct

SEQ ID NO: 406192 - DNA, 25 bp, Homo sapien
gcatcgttttgcatatgatagagct

SEQ ID NO: 406193 - DNA, 25 bp, Homo sapien
tctgctcattgaccgtgaagttttt

SEQ ID NO: 406194 - DNA, 25 bp, Homo sapien
ctacatgtggtcatatgggcatcct

SEQ ID NO: 406195 - DNA, 25 bp, Homo sapien
tcctgaatgaggagattccatctgc

SEQ ID NO: 406196 - DNA, 25 bp, Homo sapien
tcatcgccctatactctcctgaatg

SEQ ID NO: 406197 - DNA, 25 bp, Homo sapien
caagctggcgagaagttgatcttca

SEQ ID NO: 406198 - DNA, 25 bp, Homo sapien
gggccagggattgtggtatttcctg

SEQ ID NO: 406199 - DNA, 25 bp, Homo sapien
ggtatttcctgagcaacttctcgta

SEQ ID NO: 406200 - DNA, 25 bp, Homo sapien
tccccaagccaataagattcttcac

SEQ ID NO: 406201 - DNA, 25 bp, Homo sapien
taataagattccataccccatggca

SEQ ID NO: 406202 - DNA, 25 bp, Homo sapien
ccttgtaataagattccatacccca

SEQ ID NO: 406203 - DNA, 25 bp, Homo sapien
gccttccttgtaataagattccata

SEQ ID NO: 406204 - DNA, 25 bp, Homo sapien
tgtaataagattccataccccatgg

SEQ ID NO: 406205 - DNA, 25 bp, Homo sapien
aatgccttagattttgccatctgtt

SEQ ID NO: 406206 - DNA, 25 bp, Homo sapien
tcaagccggatcacagaccacctag

SEQ ID NO: 406207 - DNA, 25 bp, Homo sapien
gttgccactcaagccggatcacaga

SEQ ID NO: 406208 - DNA, 25 bp, Homo sapien
tggttgccactcaagccggatcaca

SEQ ID NO: 406209 - DNA, 25 bp, Homo sapien
tttggttgccactcaagccggatca

SEQ ID NO: 406210 - DNA, 25 bp, Homo sapien
caggtaaggagcatttggatattcg

SEQ ID NO: 406211 - DNA, 25 bp, Homo sapien
tcagttgagagtttacacaggtaag

SEQ ID NO: 406212 - DNA, 25 bp, Homo sapien
gagatgtgattattgttactctagc

SEQ ID NO: 406213 - DNA, 25 bp, Homo sapien
actctagctaaggagagtgtttctc

SEQ ID NO: 406214 - DNA, 25 bp, Homo sapien
tcttagtggtgataatgactttgca

SEQ ID NO: 406215 - DNA, 25 bp, Homo sapien
tgtttggtgcttccattcttagtgg

SEQ ID NO: 406216 - DNA, 25 bp, Homo sapien
tccattcttagtggtgataatgact

SEQ ID NO: 406217 - DNA, 25 bp, Homo sapien
ggtgcttccattcttagtggtgata

SEQ ID NO: 406218 - DNA, 25 bp, Homo sapien
gaccagcaactgtgctcatttaatc

SEQ ID NO: 406219 - DNA, 25 bp, Homo sapien
cttgatgtgcacagttattcgtgct

SEQ ID NO: 406220 - DNA, 25 bp, Homo sapien
gatgtgcacagttattcgtgctggc

SEQ ID NO: 406221 - DNA, 25 bp, Homo sapien
ggctctggatccaatagaccagcaa

SEQ ID NO: 406222 - DNA, 25 bp, Homo sapien
ggctgtgcgactgagtgagaactga

SEQ ID NO: 406223 - DNA, 25 bp, Homo sapien
tgaacccttgggtagtcgaggatag

SEQ ID NO: 406224 - DNA, 25 bp, Homo sapien
aaggataatgtgcttccacggctgt

SEQ ID NO: 406225 - DNA, 25 bp, Homo sapien
tcgaggataggagcatgagcaggta

SEQ ID NO: 406226 - DNA, 25 bp, Homo sapien
tggcagtcccacattacttgaaaac

SEQ ID NO: 406227 - DNA, 25 bp, Homo sapien
agaggctagagcatggaatttcggt

SEQ ID NO: 406228 - DNA, 25 bp, Homo sapien
ttttactcaagtagaccccactagc

SEQ ID NO: 406229 - DNA, 25 bp, Homo sapien
cacagaaatcaaggttttgcttcct

SEQ ID NO: 406230 - DNA, 25 bp, Homo sapien
tgtaattgagtaaccttcagtttga

SEQ ID NO: 406231 - DNA, 25 bp, Homo sapien
atgtccttgtaattgagtaaccttc

SEQ ID NO: 406232 - DNA, 25 bp, Homo sapien
tccttgtaattgagtaaccttcagt

SEQ ID NO: 406233 - DNA, 25 bp, Homo sapien
ttgagtaaccttcagtttgattgag

SEQ ID NO: 406234 - DNA, 25 bp, Homo sapien
ggcaaattgtctccctaaccacttc

SEQ ID NO: 406235 - DNA, 25 bp, Homo sapien
tttttctgaaacctggcaaattgtc

SEQ ID NO: 406236 - DNA, 25 bp, Homo sapien
taaccacttcttcatgacatagatc

SEQ ID NO: 406237 - DNA, 25 bp, Homo sapien
ggtaaaatgttgtatcagggtttca

SEQ ID NO: 406238 - DNA, 25 bp, Homo sapien
tccggaatgtgaaagcctacactgc

SEQ ID NO: 406239 - DNA, 25 bp, Homo sapien
tctttatgccataactgagttccgg

SEQ ID NO: 406240 - DNA, 25 bp, Homo sapien
cagggagctccaaaaaccggtgatg

SEQ ID NO: 406241 - DNA, 25 bp, Homo sapien
gtgtggacttgaccctgaccaggga

SEQ ID NO: 406242 - DNA, 25 bp, Homo sapien
cattgttggggctcatgctagttcc

SEQ ID NO: 406243 - DNA, 25 bp, Homo sapien
tctgagtggccaacacattgttggg

SEQ ID NO: 406244 - DNA, 25 bp, Homo sapien
tcagccagtctgagtggccaacaca

SEQ ID NO: 406245 - DNA, 25 bp, Homo sapien
gctagttcccacagagggagcatgt

SEQ ID NO: 406246 - DNA, 25 bp, Homo sapien
ctcaggtagagcccacgtggtcagc

SEQ ID NO: 406247 - DNA, 25 bp, Homo sapien
aggtagagcccacgtggtcagctgc

SEQ ID NO: 406248 - DNA, 25 bp, Homo sapien
tcaggtagagcccacgtggtcagct

SEQ ID NO: 406249 - DNA, 25 bp, Homo sapien
caggtagagcccacgtggtcagctg

SEQ ID NO: 406250 - DNA, 25 bp, Homo sapien
gaaagtgtatgcagatgttcactct

SEQ ID NO: 406251 - DNA, 25 bp, Homo sapien
tattttgcactgatcgggttggtgg

SEQ ID NO: 406252 - DNA, 25 bp, Homo sapien
actctcctcaatgtatgccaacggg

SEQ ID NO: 406253 - DNA, 25 bp, Homo sapien
tatgccaacgggaaacacattgaaa

SEQ ID NO: 406254 - DNA, 25 bp, Homo sapien
tgccagctccttgacttaggaccct

SEQ ID NO: 406255 - DNA, 25 bp, Homo sapien
tctatgtggaaggaggtcctctcca

SEQ ID NO: 406256 - DNA, 25 bp, Homo sapien
aatcctaatccccatagtgatggca

SEQ ID NO: 406257 - DNA, 25 bp, Homo sapien
aatgcccctatgaaagagacctcag

SEQ ID NO: 406258 - DNA, 25 bp, Homo sapien
cagaagtcaagactttacatatcac

SEQ ID NO: 406259 - DNA, 25 bp, Homo sapien
cacgggtgctatcctggagtttcaa

SEQ ID NO: 406260 - DNA, 25 bp, Homo sapien
tgctattatgtactggcccaatgtg

SEQ ID NO: 406261 - DNA, 25 bp, Homo sapien
attctaaattagatgctcagcaaag

SEQ ID NO: 406262 - DNA, 25 bp, Homo sapien
tgatgcacggccactctcatacatt

SEQ ID NO: 406263 - DNA, 25 bp, Homo sapien
tgatcagtagtggttcagcacattg

SEQ ID NO: 406264 - DNA, 25 bp, Homo sapien
ttgaatgactctcacaggacagacc

SEQ ID NO: 406265 - DNA, 25 bp, Homo sapien
ggttcagcacattgctttcaatcag

SEQ ID NO: 406266 - DNA, 25 bp, Homo sapien
tctctttccgaatccaagggatgga

SEQ ID NO: 406267 - DNA, 25 bp, Homo sapien
aactggactcctgaagagtgaaagc

SEQ ID NO: 406268 - DNA, 25 bp, Homo sapien
ctggactcctgaagagtgaaagctg

SEQ ID NO: 406269 - DNA, 25 bp, Homo sapien
aaagctgacccttggagaatagggg

SEQ ID NO: 406270 - DNA, 25 bp, Homo sapien
gagctctgagtaatatcgcgctgct

SEQ ID NO: 406271 - DNA, 25 bp, Homo sapien
gaggaaggagtaggcagatagcagg

SEQ ID NO: 406272 - DNA, 25 bp, Homo sapien
taatatcgcgctgctctggaacatc

SEQ ID NO: 406273 - DNA, 25 bp, Homo sapien
ggaagcagagctctgagtaatatcg

SEQ ID NO: 406274 - DNA, 25 bp, Homo sapien
ttgccatattttgtagctaggatct

SEQ ID NO: 406275 - DNA, 25 bp, Homo sapien
gtgtccatctgccatgtatccatca

SEQ ID NO: 406276 - DNA, 25 bp, Homo sapien
catgtatccatcaccgttgccatat

SEQ ID NO: 406277 - DNA, 25 bp, Homo sapien
gctttggatgttttggcaatgtgtc

SEQ ID NO: 406278 - DNA, 25 bp, Homo sapien
gggcatctaatgtgagtcatcagcg

SEQ ID NO: 406279 - DNA, 25 bp, Homo sapien
tcctcttggtatggcaggcacttga

SEQ ID NO: 406280 - DNA, 25 bp, Homo sapien
taaaggtaatgctggtagaatctgc

SEQ ID NO: 406281 - DNA, 25 bp, Homo sapien
tggcggagactcaaagactgacaga

SEQ ID NO: 406282 - DNA, 25 bp, Homo sapien
atttgctgcgataaatttctaattt

SEQ ID NO: 406283 - DNA, 25 bp, Homo sapien
ccttggactctggatttgttgatgg

SEQ ID NO: 406284 - DNA, 25 bp, Homo sapien
atcaaataactcctaagaatttggc

SEQ ID NO: 406285 - DNA, 25 bp, Homo sapien
tggactctggatttgttgatggcac

SEQ ID NO: 406286 - DNA, 25 bp, Homo sapien
ctgatcaaataactcctaagaattt

SEQ ID NO: 406287 - DNA, 25 bp, Homo sapien
ttctttgagtaggtcactgggctcc

SEQ ID NO: 406288 - DNA, 25 bp, Homo sapien
tgtctctgagtagggtctgatgtcc

SEQ ID NO: 406289 - DNA, 25 bp, Homo sapien
gatcattagtggagatggctgaaat

SEQ ID NO: 406290 - DNA, 25 bp, Homo sapien
gatgtcccgcgtctaagtttcttct

SEQ ID NO: 406291 - DNA, 25 bp, Homo sapien
gaaatactacattgctgtctctgag

SEQ ID NO: 406292 - DNA, 25 bp, Homo sapien
caaattaagtttaaagaacatcata

SEQ ID NO: 406293 - DNA, 25 bp, Homo sapien
taagtttaaagaacatcatatagag

SEQ ID NO: 406294 - DNA, 25 bp, Homo sapien
ttaaagaacatcatatagagaccca

SEQ ID NO: 406295 - DNA, 25 bp, Homo sapien
taaagaacatcatatagagacccat

SEQ ID NO: 406296 - DNA, 25 bp, Homo sapien
actgtttgacattattctccccaaa

SEQ ID NO: 406297 - DNA, 25 bp, Homo sapien
gtagtaccgcttaatggtatgcaaa

SEQ ID NO: 406298 - DNA, 25 bp, Homo sapien
ctataaaagtagtaccgcttaatgg

SEQ ID NO: 406299 - DNA, 25 bp, Homo sapien
aaatctctataaaagtagtaccgct

SEQ ID NO: 406300 - DNA, 25 bp, Homo sapien
gtggaaaaggccgtactgtgtttca

SEQ ID NO: 406301 - DNA, 25 bp, Homo sapien
gcctcttcttcaattgaaaacacag

SEQ ID NO: 406302 - DNA, 25 bp, Homo sapien
taagcctcttcttcaattgaaaaca

SEQ ID NO: 406303 - DNA, 25 bp, Homo sapien
cataagcctcttcttcaattgaaaa

SEQ ID NO: 406304 - DNA, 25 bp, Homo sapien
ttatccctgggagcaagcaagaaga

SEQ ID NO: 406305 - DNA, 25 bp, Homo sapien
aagaccggtgccttggaactgccat

SEQ ID NO: 406306 - DNA, 25 bp, Homo sapien
agaagaaatccggtaaaaggatgtg

SEQ ID NO: 406307 - DNA, 25 bp, Homo sapien
tgtgttattgagtttgcagttggtg

SEQ ID NO: 406308 - DNA, 25 bp, Homo sapien
tctccttcatgagggcagtaagctt

SEQ ID NO: 406309 - DNA, 25 bp, Homo sapien
taaaccagtccattacagtatctcc

SEQ ID NO: 406310 - DNA, 25 bp, Homo sapien
cttcatgagggcagtaagcttcaat

SEQ ID NO: 406311 - DNA, 25 bp, Homo sapien
gtacttaaaccagtccattacagta

SEQ ID NO: 406312 - DNA, 25 bp, Homo sapien
tatcactttgatcctccaggatgca

SEQ ID NO: 406313 - DNA, 25 bp, Homo sapien
caactgatgtatcactttgatcctc

SEQ ID NO: 406314 - DNA, 25 bp, Homo sapien
agaagctctaccaactgatgtatca

SEQ ID NO: 406315 - DNA, 25 bp, Homo sapien
gaagctctaccaactgatgtatcac

SEQ ID NO: 406316 - DNA, 25 bp, Homo sapien
gtttcacatctttgaccatattctt

SEQ ID NO: 406317 - DNA, 25 bp, Homo sapien
tcacatctttgaccatattcttcat

SEQ ID NO: 406318 - DNA, 25 bp, Homo sapien
cttagtttcacatctttgaccatat

SEQ ID NO: 406319 - DNA, 25 bp, Homo sapien
tagtttcacatctttgaccatattc

SEQ ID NO: 406320 - DNA, 25 bp, Homo sapien
tgtcagatttttcgccaagtatcag

SEQ ID NO: 406321 - DNA, 25 bp, Homo sapien
ttgatgtcagatttttcgccaagta

SEQ ID NO: 406322 - DNA, 25 bp, Homo sapien
gatttttcgccaagtatcagaacta

SEQ ID NO: 406323 - DNA, 25 bp, Homo sapien
ttcttgatgtcagatttttcgccaa

SEQ ID NO: 406324 - DNA, 25 bp, Homo sapien
caattttcgctgatcaatttactca

SEQ ID NO: 406325 - DNA, 25 bp, Homo sapien
ctgacaggtctgtagtagttttatc

SEQ ID NO: 406326 - DNA, 25 bp, Homo sapien
tcactaattcaggttctttaagcat

SEQ ID NO: 406327 - DNA, 25 bp, Homo sapien
tataccttcgctagaaccttgtccc

SEQ ID NO: 406328 - DNA, 25 bp, Homo sapien
tgatgagctccactgattccctcat

SEQ ID NO: 406329 - DNA, 25 bp, Homo sapien
gcttttgcgctgatgagctccactg

SEQ ID NO: 406330 - DNA, 25 bp, Homo sapien
tgcgctgatgagctccactgattcc

SEQ ID NO: 406331 - DNA, 25 bp, Homo sapien
gaaagctgcttttgcgctgatgagc

SEQ ID NO: 406332 - DNA, 25 bp, Homo sapien
tctaaataatatctctctcttccca

SEQ ID NO: 406333 - DNA, 25 bp, Homo sapien
tgttttggtaaggcttctctaaata

SEQ ID NO: 406334 - DNA, 25 bp, Homo sapien
ctaaataatatctctctcttcccat

SEQ ID NO: 406335 - DNA, 25 bp, Homo sapien
tggtaaggcttctctaaataatatc

SEQ ID NO: 406336 - DNA, 25 bp, Homo sapien
cattccaagatgcacgacgtggtta

SEQ ID NO: 406337 - DNA, 25 bp, Homo sapien
taaagtctttctgcacaggcttcag

SEQ ID NO: 406338 - DNA, 25 bp, Homo sapien
gtgctgtgctggcattccaagatgc

SEQ ID NO: 406339 - DNA, 25 bp, Homo sapien
tccttcaagtttattgtccacacag

SEQ ID NO: 406340 - DNA, 25 bp, Homo sapien
ctatttctgaacttgcagcaatccg

SEQ ID NO: 406341 - DNA, 25 bp, Homo sapien
caatccgaacgtgaaatctgaatga

SEQ ID NO: 406342 - DNA, 25 bp, Homo sapien
ttgcagcaatccgaacgtgaaatct

SEQ ID NO: 406343 - DNA, 25 bp, Homo sapien
tctgaacttgcagcaatccgaacgt

SEQ ID NO: 406344 - DNA, 25 bp, Homo sapien
caggatattcaaatccccacttcac

SEQ ID NO: 406345 - DNA, 25 bp, Homo sapien
cacttcacagatagaatgaacttca

SEQ ID NO: 406346 - DNA, 25 bp, Homo sapien
atgattccttagactggtgaacagg

SEQ ID NO: 406347 - DNA, 25 bp, Homo sapien
ccttagactggtgaacaggatattc

SEQ ID NO: 406348 - DNA, 25 bp, Homo sapien
aaaaggctaatgaccggccacagag

SEQ ID NO: 406349 - DNA, 25 bp, Homo sapien
taaagaggactaaaatgtcagactg

SEQ ID NO: 406350 - DNA, 25 bp, Homo sapien
tagattcttatttgacctgaaagga

SEQ ID NO: 406351 - DNA, 25 bp, Homo sapien
tctagtcagcttagtgtcacatgat

SEQ ID NO: 406352 - DNA, 25 bp, Homo sapien
tttaggcctactgtgttctgtgatc

SEQ ID NO: 406353 - DNA, 25 bp, Homo sapien
cactggttctgggaatgggtgtgac

SEQ ID NO: 406354 - DNA, 25 bp, Homo sapien
tttctattatgcatttaggcctact

SEQ ID NO: 406355 - DNA, 25 bp, Homo sapien
gttctgtgatcactggttctgggaa

SEQ ID NO: 406356 - DNA, 25 bp, Homo sapien
cattcttggtgccaaaaggagtatg

SEQ ID NO: 406357 - DNA, 25 bp, Homo sapien
ttatagcacagcattcttggtgcca

SEQ ID NO: 406358 - DNA, 25 bp, Homo sapien
gtatgagtgtagtggtatggttgct

SEQ ID NO: 406359 - DNA, 25 bp, Homo sapien
ccaaaaggagtatgagtgtagtggt

SEQ ID NO: 406360 - DNA, 25 bp, Homo sapien
tcttctagataatctctgggcagtg

SEQ ID NO: 406361 - DNA, 25 bp, Homo sapien
cacaataactcttctagataatctc

SEQ ID NO: 406362 - DNA, 25 bp, Homo sapien
tggcttgctcatcaagagccagcat

SEQ ID NO: 406363 - DNA, 25 bp, Homo sapien
gggcagtggcttgctcatcaagagc

SEQ ID NO: 406364 - DNA, 25 bp, Homo sapien
tgtttctccaatctctaccaaaggc

SEQ ID NO: 406365 - DNA, 25 bp, Homo sapien
atgtttctccaatctctaccaaagg

SEQ ID NO: 406366 - DNA, 25 bp, Homo sapien
catggggggagtgttctttcccatc

SEQ ID NO: 406367 - DNA, 25 bp, Homo sapien
tttgtcctggacattttccatgaga

SEQ ID NO: 406368 - DNA, 25 bp, Homo sapien
gagcatgtctttggcagccatcccc

SEQ ID NO: 406369 - DNA, 25 bp, Homo sapien
tgagaagagcatgtctttggcagcc

SEQ ID NO: 406370 - DNA, 25 bp, Homo sapien
cagattgagttctgattgggaagac

SEQ ID NO: 406371 - DNA, 25 bp, Homo sapien
ttgagttctgattgggaagactggt

SEQ ID NO: 406372 - DNA, 25 bp, Homo sapien
gaatcgagctgaatccagtctgcaa

SEQ ID NO: 406373 - DNA, 25 bp, Homo sapien
gaagactggtggaatcgagctgaat

SEQ ID NO: 406374 - DNA, 25 bp, Homo sapien
ggaggaaaatcattagggtcatctg

SEQ ID NO: 406375 - DNA, 25 bp, Homo sapien
attagggtcatctgcaggtatgata

SEQ ID NO: 406376 - DNA, 25 bp, Homo sapien
caacgtctaaaactatggctaagac

SEQ ID NO: 406377 - DNA, 25 bp, Homo sapien
ctgctgcagctaaagataactaatt

SEQ ID NO: 406378 - DNA, 25 bp, Homo sapien
ttcaacgtctaaaactatggctaag

SEQ ID NO: 406379 - DNA, 25 bp, Homo sapien
gctaaagataactaattcaacgtct

SEQ ID NO: 406380 - DNA, 25 bp, Homo sapien
ttcttcttcaagtctccacggtctt

SEQ ID NO: 406381 - DNA, 25 bp, Homo sapien
cttcttcaagtctccacggtcttgt

SEQ ID NO: 406382 - DNA, 25 bp, Homo sapien
tccacggtcttgtccagaaccacat

SEQ ID NO: 406383 - DNA, 25 bp, Homo sapien
ctccacggtcttgtccagaaccaca

SEQ ID NO: 406384 - DNA, 25 bp, Homo sapien
atgacatcctcatttgaaaaagggt

SEQ ID NO: 406385 - DNA, 25 bp, Homo sapien
ggtttgggtgtagaatagaatccat

SEQ ID NO: 406386 - DNA, 25 bp, Homo sapien
tatgacatcctcatttgaaaaaggg

SEQ ID NO: 406387 - DNA, 25 bp, Homo sapien
tgacatcctcatttgaaaaagggtt

SEQ ID NO: 406388 - DNA, 25 bp, Homo sapien
taaacttcgtaggttgctgtgggac

SEQ ID NO: 406389 - DNA, 25 bp, Homo sapien
tccggattcatagaaggtgtcctct

SEQ ID NO: 406390 - DNA, 25 bp, Homo sapien
tgatcaaaagcagagggctacctgg

SEQ ID NO: 406391 - DNA, 25 bp, Homo sapien
gctggatcgccagcaaaggcctgag

SEQ ID NO: 406392 - DNA, 25 bp, Homo sapien
tttcccatcttagtggaaattataa

SEQ ID NO: 406393 - DNA, 25 bp, Homo sapien
tcccatcttagtggaaattataata

SEQ ID NO: 406394 - DNA, 25 bp, Homo sapien
ccatcttagtggaaattataatatg

SEQ ID NO: 406395 - DNA, 25 bp, Homo sapien
tcttagtggaaattataatatgttg

SEQ ID NO: 406396 - DNA, 25 bp, Homo sapien
agcaaaagaagttgcattccactgg

SEQ ID NO: 406397 - DNA, 25 bp, Homo sapien
gacattgctaagagcttgtcttcta

SEQ ID NO: 406398 - DNA, 25 bp, Homo sapien
agagcttgtcttctaaagcaaaaga

SEQ ID NO: 406399 - DNA, 25 bp, Homo sapien
aagaagttgcattccactggtattc

SEQ ID NO: 406400 - DNA, 25 bp, Homo sapien
tgtactggaggccattccagtggcc

SEQ ID NO: 406401 - DNA, 25 bp, Homo sapien
tccagtggcctgagtgtatcaccat

SEQ ID NO: 406402 - DNA, 25 bp, Homo sapien
cattccagtggcctgagtgtatcac

SEQ ID NO: 406403 - DNA, 25 bp, Homo sapien
tgctgtactggaggccattccagtg

SEQ ID NO: 406404 - DNA, 25 bp, Homo sapien
tcttcatcctggaatgttggtaata

SEQ ID NO: 406405 - DNA, 25 bp, Homo sapien
catcctggaatgttggtaatagaca

SEQ ID NO: 406406 - DNA, 25 bp, Homo sapien
tgttggtaatagacaagatagccag

SEQ ID NO: 406407 - DNA, 25 bp, Homo sapien
gacaagatagccaggacaggataat

SEQ ID NO: 406408 - DNA, 25 bp, Homo sapien
aatgtccaatattcaaagtttcatc

SEQ ID NO: 406409 - DNA, 25 bp, Homo sapien
atgtccaatattcaaagtttcatct

SEQ ID NO: 406410 - DNA, 25 bp, Homo sapien
tgtccaatattcaaagtttcatctg

SEQ ID NO: 406411 - DNA, 25 bp, Homo sapien
cccagttcaggactcgttatctcat

SEQ ID NO: 406412 - DNA, 25 bp, Homo sapien
actgctgatgtctgtaataactcaa

SEQ ID NO: 406413 - DNA, 25 bp, Homo sapien
ctcatgggtgcttggtccatactgc

SEQ ID NO: 406414 - DNA, 25 bp, Homo sapien
gatgtctgtaataactcaacatgaa

SEQ ID NO: 406415 - DNA, 25 bp, Homo sapien
ctcagtcctgtttaactcatcagtg

SEQ ID NO: 406416 - DNA, 25 bp, Homo sapien
catatagttgtgtctcggactggtt

SEQ ID NO: 406417 - DNA, 25 bp, Homo sapien
caaagtattgatatgttctcattaa

SEQ ID NO: 406418 - DNA, 25 bp, Homo sapien
tctcggactggttgtcacaccacac

SEQ ID NO: 406419 - DNA, 25 bp, Homo sapien
tccaagactaaaggatccaaagtaa

SEQ ID NO: 406420 - DNA, 25 bp, Homo sapien
gcattggtatatttcaacccatgga

SEQ ID NO: 406421 - DNA, 25 bp, Homo sapien
ggtatatttcaacccatggatttca

SEQ ID NO: 406422 - DNA, 25 bp, Homo sapien
tatatttcaacccatggatttcatc

SEQ ID NO: 406423 - DNA, 25 bp, Homo sapien
ttaagcattggtatatttcaaccca

SEQ ID NO: 406424 - DNA, 25 bp, Homo sapien
gctgtaatgaagtgaggttgctccc

SEQ ID NO: 406425 - DNA, 25 bp, Homo sapien
aatttaaggatagggaaggtagcag

SEQ ID NO: 406426 - DNA, 25 bp, Homo sapien
cagagccttgtctagttcagggaag

SEQ ID NO: 406427 - DNA, 25 bp, Homo sapien
ggttgctccctggtgagtattttca

SEQ ID NO: 406428 - DNA, 25 bp, Homo sapien
tgttatgtaaatgaatggctctaga

SEQ ID NO: 406429 - DNA, 25 bp, Homo sapien
taaatgaatggctctagagatgatg

SEQ ID NO: 406430 - DNA, 25 bp, Homo sapien
tgaatggctctagagatgatgaatt

SEQ ID NO: 406431 - DNA, 25 bp, Homo sapien
tatgtaaatgaatggctctagagat

SEQ ID NO: 406432 - DNA, 25 bp, Homo sapien
taacagtaattcatcaggtactttt

SEQ ID NO: 406433 - DNA, 25 bp, Homo sapien
gaattaatcaattcaacaatggtgt

SEQ ID NO: 406434 - DNA, 25 bp, Homo sapien
tctgcattaagagaccagaggagaa

SEQ ID NO: 406435 - DNA, 25 bp, Homo sapien
aatcagttttagcataagtctgcat

SEQ ID NO: 406436 - DNA, 25 bp, Homo sapien
cattagtatacattcgaacttcttc

SEQ ID NO: 406437 - DNA, 25 bp, Homo sapien
ttggggccttaaattctgctttcca

SEQ ID NO: 406438 - DNA, 25 bp, Homo sapien
tggggccttaaattctgctttccag

SEQ ID NO: 406439 - DNA, 25 bp, Homo sapien
attagtatacattcgaacttcttca

SEQ ID NO: 406440 - DNA, 25 bp, Homo sapien
tcatctgattatagacagtatcaat

SEQ ID NO: 406441 - DNA, 25 bp, Homo sapien
tagacagtatcaattctatgaactt

SEQ ID NO: 406442 - DNA, 25 bp, Homo sapien
gattatagacagtatcaattctatg

SEQ ID NO: 406443 - DNA, 25 bp, Homo sapien
atgtctccttacaatcatctgatta

SEQ ID NO: 406444 - DNA, 25 bp, Homo sapien
ccttagccatccgagtagcgggatt

SEQ ID NO: 406445 - DNA, 25 bp, Homo sapien
cacctggctaagaaagacctatttt

SEQ ID NO: 406446 - DNA, 25 bp, Homo sapien
gacatgtcatttccaacagagccta

SEQ ID NO: 406447 - DNA, 25 bp, Homo sapien
gagcctattggagtctttattaaat

SEQ ID NO: 406448 - DNA, 25 bp, Homo sapien
tattctgaataaaggcttatggttg

SEQ ID NO: 406449 - DNA, 25 bp, Homo sapien
tattttgcaagctgctatattctga

SEQ ID NO: 406450 - DNA, 25 bp, Homo sapien
ttccatgaatatcaacttttatagc

SEQ ID NO: 406451 - DNA, 25 bp, Homo sapien
tatggttgacgacatatcagtttct

SEQ ID NO: 406452 - DNA, 25 bp, Homo sapien
gtgataataatgccatgatgacaat

SEQ ID NO: 406453 - DNA, 25 bp, Homo sapien
ccaaagtgataataatgccatgatg

SEQ ID NO: 406454 - DNA, 25 bp, Homo sapien
caaagtgataataatgccatgatga

SEQ ID NO: 406455 - DNA, 25 bp, Homo sapien
aagtgataataatgccatgatgaca

SEQ ID NO: 406456 - DNA, 25 bp, Homo sapien
gctttgaaaggtgttgatttatccg

SEQ ID NO: 406457 - DNA, 25 bp, Homo sapien
aaggtgttgatttatccgagccaac

SEQ ID NO: 406458 - DNA, 25 bp, Homo sapien
ttgaaaggtgttgatttatccgagc

SEQ ID NO: 406459 - DNA, 25 bp, Homo sapien
aggctttgaaaggtgttgatttatc

SEQ ID NO: 406460 - DNA, 25 bp, Homo sapien
aacctgacatctgtaacagtagcca

SEQ ID NO: 406461 - DNA, 25 bp, Homo sapien
acctgacatctgtaacagtagccat

SEQ ID NO: 406462 - DNA, 25 bp, Homo sapien
caacctgacatctgtaacagtagcc

SEQ ID NO: 406463 - DNA, 25 bp, Homo sapien
tcctggcacaaaagcttcaacagca

SEQ ID NO: 406464 - DNA, 25 bp, Homo sapien
cttcaacagcagagactgtggccat

SEQ ID NO: 406465 - DNA, 25 bp, Homo sapien
ggcacaaaagcttcaacagcagaga

SEQ ID NO: 406466 - DNA, 25 bp, Homo sapien
caaaagcttcaacagcagagactgt

SEQ ID NO: 406467 - DNA, 25 bp, Homo sapien
taattccattctatactcctccatg

SEQ ID NO: 406468 - DNA, 25 bp, Homo sapien
tacgtacacatactgaagtgcacaa

SEQ ID NO: 406469 - DNA, 25 bp, Homo sapien
aaatttacgtacacatactgaagtg

SEQ ID NO: 406470 - DNA, 25 bp, Homo sapien
acatactgaagtgcacaattatgat

SEQ ID NO: 406471 - DNA, 25 bp, Homo sapien
tcaacttacgaatgctctgcctcct

SEQ ID NO: 406472 - DNA, 25 bp, Homo sapien
gcagtctgtattcaacttacgaatg

SEQ ID NO: 406473 - DNA, 25 bp, Homo sapien
aactatactgatatacctgtacaca

SEQ ID NO: 406474 - DNA, 25 bp, Homo sapien
gatatgcaatgcaaagaattgtcag

SEQ ID NO: 406475 - DNA, 25 bp, Homo sapien
tctctggataactgtgccttagagc

SEQ ID NO: 406476 - DNA, 25 bp, Homo sapien
gcacaaataatgcttttggattcct

SEQ ID NO: 406477 - DNA, 25 bp, Homo sapien
tgcacaaataatgcttttggattcc

SEQ ID NO: 406478 - DNA, 25 bp, Homo sapien
acaaataatgcttttggattccttg

SEQ ID NO: 406479 - DNA, 25 bp, Homo sapien
cttgcacaaataatgcttttggatt

SEQ ID NO: 406480 - DNA, 25 bp, Homo sapien
aatggttgtgcggagcctctgtctg

SEQ ID NO: 406481 - DNA, 25 bp, Homo sapien
taaccactggcttatgaaagctttc

SEQ ID NO: 406482 - DNA, 25 bp, Homo sapien
gaactctatattctcctgtaacctt

SEQ ID NO: 406483 - DNA, 25 bp, Homo sapien
cagtgtgattcagaactctatattc

SEQ ID NO: 406484 - DNA, 25 bp, Homo sapien
gcagagcatcataacagcctatatg

SEQ ID NO: 406485 - DNA, 25 bp, Homo sapien
tcaagtaaagactaagcagagcatc

SEQ ID NO: 406486 - DNA, 25 bp, Homo sapien
gatgcatatggaacacagtcaagta

SEQ ID NO: 406487 - DNA, 25 bp, Homo sapien
gtaaaaattgataggtaggactggc

SEQ ID NO: 406488 - DNA, 25 bp, Homo sapien
gttcttcccttggtagctgggcatg

SEQ ID NO: 406489 - DNA, 25 bp, Homo sapien
tgatacaagtcaaatcatggatgct

SEQ ID NO: 406490 - DNA, 25 bp, Homo sapien
gcattcccttgcttctgtataccta

SEQ ID NO: 406491 - DNA, 25 bp, Homo sapien
ggcccatcttcatgctaggccagca

SEQ ID NO: 406492 - DNA, 25 bp, Homo sapien
catgtgaaaagtatctgctctgcta

SEQ ID NO: 406493 - DNA, 25 bp, Homo sapien
gactcatgggctaaatcaaatcctc

SEQ ID NO: 406494 - DNA, 25 bp, Homo sapien
tataatagagaataggaatatggtc

SEQ ID NO: 406495 - DNA, 25 bp, Homo sapien
ggtcactaccataatactctcattt

SEQ ID NO: 406496 - DNA, 25 bp, Homo sapien
ttatggcagttctgggtttcgctct

SEQ ID NO: 406497 - DNA, 25 bp, Homo sapien
cagttctgggtttcgctctcttgaa

SEQ ID NO: 406498 - DNA, 25 bp, Homo sapien
tctgggtttcgctctcttgaacgtt

SEQ ID NO: 406499 - DNA, 25 bp, Homo sapien
tttcgctctcttgaacgtttttctc

SEQ ID NO: 406500 - DNA, 25 bp, Homo sapien
aacttcagcaatagtagctgtgagt

SEQ ID NO: 406501 - DNA, 25 bp, Homo sapien
caatagtagctgtgagtccttgttc

SEQ ID NO: 406502 - DNA, 25 bp, Homo sapien
gtagctgtgagtccttgttcagtct

SEQ ID NO: 406503 - DNA, 25 bp, Homo sapien
cagcaatagtagctgtgagtccttg

SEQ ID NO: 406504 - DNA, 25 bp, Homo sapien
ctgctttatgatggatgccagcaag

SEQ ID NO: 406505 - DNA, 25 bp, Homo sapien
aagcccgtccagttggtgctcatgg

SEQ ID NO: 406506 - DNA, 25 bp, Homo sapien
tcgggtacgtctgaggctgcagcag

SEQ ID NO: 406507 - DNA, 25 bp, Homo sapien
tacacgggtcgggtacgtctgaggc

SEQ ID NO: 406508 - DNA, 25 bp, Homo sapien
gacaccggttgtcatcttcccagga

SEQ ID NO: 406509 - DNA, 25 bp, Homo sapien
ttttgaatccttacaagtctgaaag

SEQ ID NO: 406510 - DNA, 25 bp, Homo sapien
ggacaccggttgtcatcttcccagg

SEQ ID NO: 406511 - DNA, 25 bp, Homo sapien
ttaaactggacaccggttgtcatct

SEQ ID NO: 406512 - DNA, 25 bp, Homo sapien
gtcctaaggtcaaggttttcatcaa

SEQ ID NO: 406513 - DNA, 25 bp, Homo sapien
gatttatctaacaagttgtgccttg

SEQ ID NO: 406514 - DNA, 25 bp, Homo sapien
tgtgagaatgccaaacttggccaaa

SEQ ID NO: 406515 - DNA, 25 bp, Homo sapien
tgcgtcctagactcaatataaaaac

SEQ ID NO: 406516 - DNA, 25 bp, Homo sapien
tgtttctttgagtttggggatcata

SEQ ID NO: 406517 - DNA, 25 bp, Homo sapien
cccccaacaccaggaatgacaataa

SEQ ID NO: 406518 - DNA, 25 bp, Homo sapien
ctgtttctttgagtttggggatcat

SEQ ID NO: 406519 - DNA, 25 bp, Homo sapien
ccaacaccaggaatgacaataaggg

SEQ ID NO: 406520 - DNA, 25 bp, Homo sapien
aggtatgtgatcataaccaacagca

SEQ ID NO: 406521 - DNA, 25 bp, Homo sapien
taggcgtatagcagaactactgatt

SEQ ID NO: 406522 - DNA, 25 bp, Homo sapien
cctgagttcatttaccagctttagg

SEQ ID NO: 406523 - DNA, 25 bp, Homo sapien
ttgctcactgtaggcgtatagcaga

SEQ ID NO: 406524 - DNA, 25 bp, Homo sapien
tagcttgtgtctagtttgctttgtg

SEQ ID NO: 406525 - DNA, 25 bp, Homo sapien
ttactctgtttatgacaccttcttt

SEQ ID NO: 406526 - DNA, 25 bp, Homo sapien
tactctgtttatgacaccttctttg

SEQ ID NO: 406527 - DNA, 25 bp, Homo sapien
tgagagtaatagcttgtgtctagtt

SEQ ID NO: 406528 - DNA, 25 bp, Homo sapien
tacaatcaaggcagtgcatggcaca

SEQ ID NO: 406529 - DNA, 25 bp, Homo sapien
gaacgtagaacagccacagagatga

SEQ ID NO: 406530 - DNA, 25 bp, Homo sapien
gcacagctgcccagtactttagaaa

SEQ ID NO: 406531 - DNA, 25 bp, Homo sapien
tgcagcctggatataccctcacatg

SEQ ID NO: 406532 - DNA, 25 bp, Homo sapien
gaagttaaattaggagatctactac

SEQ ID NO: 406533 - DNA, 25 bp, Homo sapien
agcaggaagaagttaaattaggaga

SEQ ID NO: 406534 - DNA, 25 bp, Homo sapien
ttagcaggaagaagttaaattagga

SEQ ID NO: 406535 - DNA, 25 bp, Homo sapien
ggaagaagttaaattaggagatcta

SEQ ID NO: 406536 - DNA, 25 bp, Homo sapien
agccatcataaccagagcagtgtcc

SEQ ID NO: 406537 - DNA, 25 bp, Homo sapien
ggatcttcttgtcagccatcataac

SEQ ID NO: 406538 - DNA, 25 bp, Homo sapien
cagtgtccaagtgaggagtggattt

SEQ ID NO: 406539 - DNA, 25 bp, Homo sapien
cagagcagtgtccaagtgaggagtg

SEQ ID NO: 406540 - DNA, 25 bp, Homo sapien
ccgtgaaaggaattctgttgactca

SEQ ID NO: 406541 - DNA, 25 bp, Homo sapien
taacccgtgaaaggaattctgttga

SEQ ID NO: 406542 - DNA, 25 bp, Homo sapien
acccgtgaaaggaattctgttgact

SEQ ID NO: 406543 - DNA, 25 bp, Homo sapien
gtgaaaggaattctgttgactcact

SEQ ID NO: 406544 - DNA, 25 bp, Homo sapien
ttgaaaaacatataacatgaaccgc

SEQ ID NO: 406545 - DNA, 25 bp, Homo sapien
ctgattgtttgaaaaacatataaca

SEQ ID NO: 406546 - DNA, 25 bp, Homo sapien
gtttgaaaaacatataacatgaacc

SEQ ID NO: 406547 - DNA, 25 bp, Homo sapien
gaaaaacatataacatgaaccgcat

SEQ ID NO: 406548 - DNA, 25 bp, Homo sapien
gaagaatcctgctgatgatcgctgc

SEQ ID NO: 406549 - DNA, 25 bp, Homo sapien
cttggcatatgggtctgttttaccc

SEQ ID NO: 406550 - DNA, 25 bp, Homo sapien
gatgatcgctgcatcagacttggca

SEQ ID NO: 406551 - DNA, 25 bp, Homo sapien
tgcatcagacttggcatatgggtct

SEQ ID NO: 406552 - DNA, 25 bp, Homo sapien
cagtctatctaagacacactcaatc

SEQ ID NO: 406553 - DNA, 25 bp, Homo sapien
tggtccagttgtgcttttttggtcc

SEQ ID NO: 406554 - DNA, 25 bp, Homo sapien
cccgaattgttgtagtaaaggagtg

SEQ ID NO: 406555 - DNA, 25 bp, Homo sapien
attggtccagttgtgcttttttggt

SEQ ID NO: 406556 - DNA, 25 bp, Homo sapien
ataaaagtatccaacattagcattt

SEQ ID NO: 406557 - DNA, 25 bp, Homo sapien
tgctggcttccagtgtgttgctgcc

SEQ ID NO: 406558 - DNA, 25 bp, Homo sapien
tgtgttgctgccaaggctgtttcta

SEQ ID NO: 406559 - DNA, 25 bp, Homo sapien
atatgttggctcattggaaactctc

SEQ ID NO: 406560 - DNA, 25 bp, Homo sapien
attccttttattatatgttggctca

SEQ ID NO: 406561 - DNA, 25 bp, Homo sapien
gagtccgtgggagccctgaggtggt

SEQ ID NO: 406562 - DNA, 25 bp, Homo sapien
ataaggtagagtccgtgggagccct

SEQ ID NO: 406563 - DNA, 25 bp, Homo sapien
ggtagagtccgtgggagccctgagg

SEQ ID NO: 406564 - DNA, 25 bp, Homo sapien
tagagtccgtgggagccctgaggtg

SEQ ID NO: 406565 - DNA, 25 bp, Homo sapien
cactaagggtatcagaagggacacc

SEQ ID NO: 406566 - DNA, 25 bp, Homo sapien
tcaggttttgctgtaatgctcacac

SEQ ID NO: 406567 - DNA, 25 bp, Homo sapien
tgctcacactaagggtatcagaagg

SEQ ID NO: 406568 - DNA, 25 bp, Homo sapien
ggacacctttgtcaggtccctgcaa

SEQ ID NO: 406569 - DNA, 25 bp, Homo sapien
gatgcatacttgcagggagattttg

SEQ ID NO: 406570 - DNA, 25 bp, Homo sapien
gacattacaactcttctttgatgca

SEQ ID NO: 406571 - DNA, 25 bp, Homo sapien
gattttgactatccttgggagtacg

SEQ ID NO: 406572 - DNA, 25 bp, Homo sapien
ttccccttgaacttcgccgccagac

SEQ ID NO: 406573 - DNA, 25 bp, Homo sapien
aaataatgatagcatcttcatattt

SEQ ID NO: 406574 - DNA, 25 bp, Homo sapien
aataatgatagcatcttcatatttc

SEQ ID NO: 406575 - DNA, 25 bp, Homo sapien
gaaaagaagagtataacctcataac

SEQ ID NO: 406576 - DNA, 25 bp, Homo sapien
ggcgctttgagatagtgatatacaa

SEQ ID NO: 406577 - DNA, 25 bp, Homo sapien
tataacctcataacatgacaatttg

SEQ ID NO: 406578 - DNA, 25 bp, Homo sapien
ttatttctcgtaaacaatggcttgg

SEQ ID NO: 406579 - DNA, 25 bp, Homo sapien
tataagggaggagcattagaatgtc

SEQ ID NO: 406580 - DNA, 25 bp, Homo sapien
taaagcagacatgaccttaagattc

SEQ ID NO: 406581 - DNA, 25 bp, Homo sapien
gcagcccctggtgactaactggtaa

SEQ ID NO: 406582 - DNA, 25 bp, Homo sapien
aagattctggcggaagtatggcaag

SEQ ID NO: 406583 - DNA, 25 bp, Homo sapien
tctgagccttaaattggcagcttga

SEQ ID NO: 406584 - DNA, 25 bp, Homo sapien
cctgacttagatgccgataaaatat

SEQ ID NO: 406585 - DNA, 25 bp, Homo sapien
acacatgagtttgttggaggtaatg

SEQ ID NO: 406586 - DNA, 25 bp, Homo sapien
tacttagaggcactgctatcagctc

SEQ ID NO: 406587 - DNA, 25 bp, Homo sapien
cagaatttcctccagcagcagagga

SEQ ID NO: 406588 - DNA, 25 bp, Homo sapien
tcttcttcagaatttcctccagcag

SEQ ID NO: 406589 - DNA, 25 bp, Homo sapien
ttcagaatttcctccagcagcagag

SEQ ID NO: 406590 - DNA, 25 bp, Homo sapien
tttcctccagcagcagaggagacat

SEQ ID NO: 406591 - DNA, 25 bp, Homo sapien
gaacaaatgaagatcattggaaaca

SEQ ID NO: 406592 - DNA, 25 bp, Homo sapien
tcaagctgaaggataatagcaccag

SEQ ID NO: 406593 - DNA, 25 bp, Homo sapien
taataaagacaattcttcaagctga

SEQ ID NO: 406594 - DNA, 25 bp, Homo sapien
cagaacaaatgaagatcattggaaa

SEQ ID NO: 406595 - DNA, 25 bp, Homo sapien
gggacatctgccaccccatggatct

SEQ ID NO: 406596 - DNA, 25 bp, Homo sapien
tgaggccaatctggctgggacatct

SEQ ID NO: 406597 - DNA, 25 bp, Homo sapien
ccatggatctccagggttgattcgg

SEQ ID NO: 406598 - DNA, 25 bp, Homo sapien
gccaatctggctgggacatctgcca

SEQ ID NO: 406599 - DNA, 25 bp, Homo sapien
tgtttgggctctgctagttccacat

SEQ ID NO: 406600 - DNA, 25 bp, Homo sapien
agagtcagcagtgcattgtttgggc

SEQ ID NO: 406601 - DNA, 25 bp, Homo sapien
cattgtttgggctctgctagttcca

SEQ ID NO: 406602 - DNA, 25 bp, Homo sapien
cagtgcattgtttgggctctgctag

SEQ ID NO: 406603 - DNA, 25 bp, Homo sapien
gatcaccaggagaaatgtctgatga

SEQ ID NO: 406604 - DNA, 25 bp, Homo sapien
gggtgagatcaccaggagaaatgtc

SEQ ID NO: 406605 - DNA, 25 bp, Homo sapien
gaaatgtctgatgatgaagtagcca

SEQ ID NO: 406606 - DNA, 25 bp, Homo sapien
ttgtgtacagctacttctagcaggg

SEQ ID NO: 406607 - DNA, 25 bp, Homo sapien
tgaaattcttcacctgtgtgagctt

SEQ ID NO: 406608 - DNA, 25 bp, Homo sapien
aaattcttcacctgtgtgagcttct

SEQ ID NO: 406609 - DNA, 25 bp, Homo sapien
attcttcacctgtgtgagcttcttc

SEQ ID NO: 406610 - DNA, 25 bp, Homo sapien
ctggtttgccgtgaaattcttcacc

SEQ ID NO: 406611 - DNA, 25 bp, Homo sapien
gatagatgatagtcggattccgatt

SEQ ID NO: 406612 - DNA, 25 bp, Homo sapien
gatagtcggattccgatttgttact

SEQ ID NO: 406613 - DNA, 25 bp, Homo sapien
taaaggatagatgatagtcggattc

SEQ ID NO: 406614 - DNA, 25 bp, Homo sapien
cactttctaaaggatagatgatagt

SEQ ID NO: 406615 - DNA, 25 bp, Homo sapien
ctttttatatggtctcctgagaagg

SEQ ID NO: 406616 - DNA, 25 bp, Homo sapien
ttcctttttatatggtctcctgaga

SEQ ID NO: 406617 - DNA, 25 bp, Homo sapien
tgttttcttatctgaatgtgtttct

SEQ ID NO: 406618 - DNA, 25 bp, Homo sapien
tctcttttcatactcttcaccaaca

SEQ ID NO: 406619 - DNA, 25 bp, Homo sapien
gaaagcagcaagattgggacactga

SEQ ID NO: 406620 - DNA, 25 bp, Homo sapien
ggttaattgaagagtagaaagcagc

SEQ ID NO: 406621 - DNA, 25 bp, Homo sapien
aagggaatctctgggagaagaagcc

SEQ ID NO: 406622 - DNA, 25 bp, Homo sapien
cagagaatgattagtgggtgaaccc

SEQ ID NO: 406623 - DNA, 25 bp, Homo sapien
tgttgtctccttaaagcgacccagc

SEQ ID NO: 406624 - DNA, 25 bp, Homo sapien
aattttatgagccagatattcatgg

SEQ ID NO: 406625 - DNA, 25 bp, Homo sapien
tatgagccagatattcatggaaaaa

SEQ ID NO: 406626 - DNA, 25 bp, Homo sapien
cttaaagcgacccagcagatcaaga

SEQ ID NO: 406627 - DNA, 25 bp, Homo sapien
catgctgctgtagtttggccttagt

SEQ ID NO: 406628 - DNA, 25 bp, Homo sapien
cagtaggctaactcaggacttgtcc

SEQ ID NO: 406629 - DNA, 25 bp, Homo sapien
gcaggagtgcacacagctattagag

SEQ ID NO: 406630 - DNA, 25 bp, Homo sapien
caaatctacaagtttgctgggtgac

SEQ ID NO: 406631 - DNA, 25 bp, Homo sapien
atcttgtctcccggcctgacttcat

SEQ ID NO: 406632 - DNA, 25 bp, Homo sapien
cttcatctcataccaacacatctgg

SEQ ID NO: 406633 - DNA, 25 bp, Homo sapien
atctcataccaacacatctggtcca

SEQ ID NO: 406634 - DNA, 25 bp, Homo sapien
cagttctcagcctgccatcttgtct

SEQ ID NO: 406635 - DNA, 25 bp, Homo sapien
catgtagatgcaagtaagttcttgg

SEQ ID NO: 406636 - DNA, 25 bp, Homo sapien
aatctgatttacatgtagatgcaag

SEQ ID NO: 406637 - DNA, 25 bp, Homo sapien
agacggaggaaaccttttcacagtg

SEQ ID NO: 406638 - DNA, 25 bp, Homo sapien
tcagaggttgtcttccataggctgg

SEQ ID NO: 406639 - DNA, 25 bp, Homo sapien
tgaccctccagaagatcaccctggg

SEQ ID NO: 406640 - DNA, 25 bp, Homo sapien
tcatttacgtacacgctcatctctt

SEQ ID NO: 406641 - DNA, 25 bp, Homo sapien
ggcaaagggcacttgtacctgctcc

SEQ ID NO: 406642 - DNA, 25 bp, Homo sapien
gtagaggtaaggcaagtccgtgacc

SEQ ID NO: 406643 - DNA, 25 bp, Homo sapien
aacactcttgtgcatccaaggtcat

SEQ ID NO: 406644 - DNA, 25 bp, Homo sapien
gaacactcttgtgcatccaaggtca

SEQ ID NO: 406645 - DNA, 25 bp, Homo sapien
ccggacctggccagtactaaatatt

SEQ ID NO: 406646 - DNA, 25 bp, Homo sapien
ttcaatgacttatcaagaatctcct

SEQ ID NO: 406647 - DNA, 25 bp, Homo sapien
tatcatttaatgcagactccaacac

SEQ ID NO: 406648 - DNA, 25 bp, Homo sapien
gcagatgctacctcaatttgtatcg

SEQ ID NO: 406649 - DNA, 25 bp, Homo sapien
gcttctatttattccaatcacttat

SEQ ID NO: 406650 - DNA, 25 bp, Homo sapien
caatgcttctatttattccaatcac

SEQ ID NO: 406651 - DNA, 25 bp, Homo sapien
aatgcttctatttattccaatcact

SEQ ID NO: 406652 - DNA, 25 bp, Homo sapien
tgcttctatttattccaatcactta

SEQ ID NO: 406653 - DNA, 25 bp, Homo sapien
tatccatgaggtctccactatgacc

SEQ ID NO: 406654 - DNA, 25 bp, Homo sapien
ggttttgcaaaatcgctgaaattcc

SEQ ID NO: 406655 - DNA, 25 bp, Homo sapien
caaactagagaagtacccctaatag

SEQ ID NO: 406656 - DNA, 25 bp, Homo sapien
taagatgtacctctagccttctgcc

SEQ ID NO: 406657 - DNA, 25 bp, Homo sapien
aagatggcggaggtgcaggtcctgg

SEQ ID NO: 406658 - DNA, 25 bp, Homo sapien
cctggtgctcgatggtcgaggccat

SEQ ID NO: 406659 - DNA, 25 bp, Homo sapien
caggtcctggtgctcgatggtcgag

SEQ ID NO: 406660 - DNA, 25 bp, Homo sapien
gaaagtggtggtcgtacgctgcgaa

SEQ ID NO: 406661 - DNA, 25 bp, Homo sapien
gttttatttagcaaacatcaaaaca

SEQ ID NO: 406662 - DNA, 25 bp, Homo sapien
ttatttagcaaacatcaaaacaaaa

SEQ ID NO: 406663 - DNA, 25 bp, Homo sapien
aatgcttagttttatttagcaaaca

SEQ ID NO: 406664 - DNA, 25 bp, Homo sapien
tagttttatttagcaaacatcaaaa

SEQ ID NO: 406665 - DNA, 25 bp, Homo sapien
taattttggtattggcgacgaccgc

SEQ ID NO: 406666 - DNA, 25 bp, Homo sapien
tattcagggaattcttcagccagag

SEQ ID NO: 406667 - DNA, 25 bp, Homo sapien
agccagagtctctttagccaggtgt

SEQ ID NO: 406668 - DNA, 25 bp, Homo sapien
caagaatggagttcttctgccacct

SEQ ID NO: 406669 - DNA, 25 bp, Homo sapien
gatgtctcttagaaaccatgccaag

SEQ ID NO: 406670 - DNA, 25 bp, Homo sapien
taccagtgtgactagaggcctgctg

SEQ ID NO: 406671 - DNA, 25 bp, Homo sapien
gcaagtggcatctgtcctgttaaca

SEQ ID NO: 406672 - DNA, 25 bp, Homo sapien
tcacggactcaaagactgtcactgg

SEQ ID NO: 406673 - DNA, 25 bp, Homo sapien
cataaagtggagctgtcagtaggac

SEQ ID NO: 406674 - DNA, 25 bp, Homo sapien
gtccctgaccatgatgcaaacctga

SEQ ID NO: 406675 - DNA, 25 bp, Homo sapien
cttttattctggtccctgaccatga

SEQ ID NO: 406676 - DNA, 25 bp, Homo sapien
tgcaccccaaatcaggcagtctagg

SEQ ID NO: 406677 - DNA, 25 bp, Homo sapien
gtatggcatgagtttgtgcatgtgt

SEQ ID NO: 406678 - DNA, 25 bp, Homo sapien
gaaccttgtcccttagggtatggca

SEQ ID NO: 406679 - DNA, 25 bp, Homo sapien
cccttagggtatggcatgagtttgt

SEQ ID NO: 406680 - DNA, 25 bp, Homo sapien
ccaagtagatgtggggaaccttgtc

SEQ ID NO: 406681 - DNA, 25 bp, Homo sapien
aaaaacagtagaattctcctgttgt

SEQ ID NO: 406682 - DNA, 25 bp, Homo sapien
cagctcctcacatccaaataacatg

SEQ ID NO: 406683 - DNA, 25 bp, Homo sapien
taatgacagctcctcacatccaaat

SEQ ID NO: 406684 - DNA, 25 bp, Homo sapien
tgacagctcctcacatccaaataac

SEQ ID NO: 406685 - DNA, 25 bp, Homo sapien
gacagctcctcacatccaaataaca

SEQ ID NO: 406686 - DNA, 25 bp, Homo sapien
tctgttctaagtattcctcaaatct

SEQ ID NO: 406687 - DNA, 25 bp, Homo sapien
cctaatgatcactgtcttatttcag

SEQ ID NO: 406688 - DNA, 25 bp, Homo sapien
caaccagtaaattcagtaaattctg

SEQ ID NO: 406689 - DNA, 25 bp, Homo sapien
catctcctcttcacattcaattcaa

SEQ ID NO: 406690 - DNA, 25 bp, Homo sapien
gcctccagtcttggtcacttccaaa

SEQ ID NO: 406691 - DNA, 25 bp, Homo sapien
ttcttgcatggaccagtttttaaca

SEQ ID NO: 406692 - DNA, 25 bp, Homo sapien
cagtcttggtcacttccaaatctga

SEQ ID NO: 406693 - DNA, 25 bp, Homo sapien
tcttgcatggaccagtttttaacag

SEQ ID NO: 406694 - DNA, 25 bp, Homo sapien
agactcttgatgtgatctgtgctca

SEQ ID NO: 406695 - DNA, 25 bp, Homo sapien
tggatcctactgacatctgttacta

SEQ ID NO: 406696 - DNA, 25 bp, Homo sapien
gaagatatctgttctcaataaacag

SEQ ID NO: 406697 - DNA, 25 bp, Homo sapien
atggctctggatcctactgacatct

SEQ ID NO: 406698 - DNA, 25 bp, Homo sapien
tgttcatacagctacaagtttgagg

SEQ ID NO: 406699 - DNA, 25 bp, Homo sapien
actgaattttgtaatgtagccacag

SEQ ID NO: 406700 - DNA, 25 bp, Homo sapien
ttagagacctatgaaaaattgctgt

SEQ ID NO: 406701 - DNA, 25 bp, Homo sapien
gtagccacaggtccatacacagcag

SEQ ID NO: 406702 - DNA, 25 bp, Homo sapien
tgtggagctgttgacattgtagctg

SEQ ID NO: 406703 - DNA, 25 bp, Homo sapien
ctttaaaacactttggcaagacttg

SEQ ID NO: 406704 - DNA, 25 bp, Homo sapien
acttgcaagttgtggagctgttgac

SEQ ID NO: 406705 - DNA, 25 bp, Homo sapien
tggcaagacttgcaagttgtggagc

SEQ ID NO: 406706 - DNA, 25 bp, Homo sapien
taatgacattaccattttaaatttc

SEQ ID NO: 406707 - DNA, 25 bp, Homo sapien
aaaaagtgcagtagatagagaaata

SEQ ID NO: 406708 - DNA, 25 bp, Homo sapien
gcaaaaagtgcagtagatagagaaa

SEQ ID NO: 406709 - DNA, 25 bp, Homo sapien
tctatatattcaacactataaacca

SEQ ID NO: 406710 - DNA, 25 bp, Homo sapien
tgacacccccacacgcaaactggtg

SEQ ID NO: 406711 - DNA, 25 bp, Homo sapien
cccacacgcaaactggtgcttgttt

SEQ ID NO: 406712 - DNA, 25 bp, Homo sapien
agtgacacccccacacgcaaactgg

SEQ ID NO: 406713 - DNA, 25 bp, Homo sapien
acccccacacgcaaactggtgcttg

SEQ ID NO: 406714 - DNA, 25 bp, Homo sapien
ggatcagtgtcccaaaccaaagtat

SEQ ID NO: 406715 - DNA, 25 bp, Homo sapien
ggcacttttgggagcaatgtctgag

SEQ ID NO: 406716 - DNA, 25 bp, Homo sapien
caaagtattacggttctgagagatt

SEQ ID NO: 406717 - DNA, 25 bp, Homo sapien
cattgcactggtcagccaaagggca

SEQ ID NO: 406718 - DNA, 25 bp, Homo sapien
ggaaactgtagcatactcctcttcc

SEQ ID NO: 406719 - DNA, 25 bp, Homo sapien
agccgccatcacaattcttgacctc

SEQ ID NO: 406720 - DNA, 25 bp, Homo sapien
aaactgtagcatactcctcttccag

SEQ ID NO: 406721 - DNA, 25 bp, Homo sapien
actgtagcatactcctcttccagtc

SEQ ID NO: 406722 - DNA, 25 bp, Homo sapien
atccagatagaaccaatgccaactt

SEQ ID NO: 406723 - DNA, 25 bp, Homo sapien
cagatagaaccaatgccaacttttc

SEQ ID NO: 406724 - DNA, 25 bp, Homo sapien
ttctggcactggatattcccccaaa

SEQ ID NO: 406725 - DNA, 25 bp, Homo sapien
ggcactggatattcccccaaaacag

SEQ ID NO: 406726 - DNA, 25 bp, Homo sapien
cgtggatgtctgcaacgtgaagaga

SEQ ID NO: 406727 - DNA, 25 bp, Homo sapien
cacatttgctcttcaatccaaccga

SEQ ID NO: 406728 - DNA, 25 bp, Homo sapien
tacaggataggactctggctgctga

SEQ ID NO: 406729 - DNA, 25 bp, Homo sapien
tcaatccaaccgaaaacagtctcac

SEQ ID NO: 406730 - DNA, 25 bp, Homo sapien
tgtgcctcaggcaatctccagtact

SEQ ID NO: 406731 - DNA, 25 bp, Homo sapien
tgaatcggccacattctctgctaac

SEQ ID NO: 406732 - DNA, 25 bp, Homo sapien
tgtgtcacattctaagactccactg

SEQ ID NO: 406733 - DNA, 25 bp, Homo sapien
gcatcacagaaacatagattgacag

SEQ ID NO: 406734 - DNA, 25 bp, Homo sapien
cacttctgcctcctcccattgagga

SEQ ID NO: 406735 - DNA, 25 bp, Homo sapien
gtccactttccacttctgcctcctc

SEQ ID NO: 406736 - DNA, 25 bp, Homo sapien
acttctgcctcctcccattgaggag

SEQ ID NO: 406737 - DNA, 25 bp, Homo sapien
tctgcctcctcccattgaggagcat

SEQ ID NO: 406738 - DNA, 25 bp, Homo sapien
gaaagttcccattgagtccctgtac

SEQ ID NO: 406739 - DNA, 25 bp, Homo sapien
tctgactcaggaataccgcaaatgg

SEQ ID NO: 406740 - DNA, 25 bp, Homo sapien
taaccagtggtactcaaaaagggca

SEQ ID NO: 406741 - DNA, 25 bp, Homo sapien
tagggcatagacagctctcggagag

SEQ ID NO: 406742 - DNA, 25 bp, Homo sapien
ttatcaatataaattggctataaag

SEQ ID NO: 406743 - DNA, 25 bp, Homo sapien
ctcttatcaatataaattggctata

SEQ ID NO: 406744 - DNA, 25 bp, Homo sapien
atcaatataaattggctataaagac

SEQ ID NO: 406745 - DNA, 25 bp, Homo sapien
ataaattggctataaagacagagca

SEQ ID NO: 406746 - DNA, 25 bp, Homo sapien
tactgtctctgatattgaactagga

SEQ ID NO: 406747 - DNA, 25 bp, Homo sapien
tgaagagcaagtagttcaacacaga

SEQ ID NO: 406748 - DNA, 25 bp, Homo sapien
gagggcctatcaccaatgccttgtg

SEQ ID NO: 406749 - DNA, 25 bp, Homo sapien
catcaaaagccttgtatgtcagatc

SEQ ID NO: 406750 - DNA, 25 bp, Homo sapien
tatacaagcaactcttcagcatctg

SEQ ID NO: 406751 - DNA, 25 bp, Homo sapien
aattggatcatggtgctgcagacta

SEQ ID NO: 406752 - DNA, 25 bp, Homo sapien
tgcagactatacaagcaactcttca

SEQ ID NO: 406753 - DNA, 25 bp, Homo sapien
gactatacaagcaactcttcagcat

SEQ ID NO: 406754 - DNA, 25 bp, Homo sapien
ctgatgatccggcaccgtggatatt

SEQ ID NO: 406755 - DNA, 25 bp, Homo sapien
tccggcaccgtggatatttgcttgc

SEQ ID NO: 406756 - DNA, 25 bp, Homo sapien
ctagagtggaggacccatactggca

SEQ ID NO: 406757 - DNA, 25 bp, Homo sapien
gacccatactggcaacagcggtgac

SEQ ID NO: 406758 - DNA, 25 bp, Homo sapien
ggtttaaccactatgggcagttcca

SEQ ID NO: 406759 - DNA, 25 bp, Homo sapien
gtttaaccactatgggcagttccat

SEQ ID NO: 406760 - DNA, 25 bp, Homo sapien
aggttgtccagaaagcatggtgcat

SEQ ID NO: 406761 - DNA, 25 bp, Homo sapien
ctgccaccctgaaaatcaatttctg

SEQ ID NO: 406762 - DNA, 25 bp, Homo sapien
ttgtccagaaagcatggtgcatctg

SEQ ID NO: 406763 - DNA, 25 bp, Homo sapien
gccaccctgaaaatcaatttctgtt

SEQ ID NO: 406764 - DNA, 25 bp, Homo sapien
catgagggttgcaattgcccagagg

SEQ ID NO: 406765 - DNA, 25 bp, Homo sapien
cccagaggtatagaggataccattc

SEQ ID NO: 406766 - DNA, 25 bp, Homo sapien
gaaatcatagatgaggcccctacag

SEQ ID NO: 406767 - DNA, 25 bp, Homo sapien
gtctccaaagatggtcctcacccct

SEQ ID NO: 406768 - DNA, 25 bp, Homo sapien
tccagtcacctcagcctcccaaagt

SEQ ID NO: 406769 - DNA, 25 bp, Homo sapien
agtagattcagggtttcaccattct

SEQ ID NO: 406770 - DNA, 25 bp, Homo sapien
cagtctcgctcgcattccaggctgg

SEQ ID NO: 406771 - DNA, 25 bp, Homo sapien
tagattcagggtttcaccattctag

SEQ ID NO: 406772 - DNA, 25 bp, Homo sapien
gaccgaagtcccatatgctccagga

SEQ ID NO: 406773 - DNA, 25 bp, Homo sapien
cttgacatcccgagtataaatgcgg

SEQ ID NO: 406774 - DNA, 25 bp, Homo sapien
cgtttattgaactgagacccatgaa

SEQ ID NO: 406775 - DNA, 25 bp, Homo sapien
tgagttactcgactaggcttgtagg

SEQ ID NO: 406776 - DNA, 25 bp, Homo sapien
attccaaaccaaacgcgggctcttg

SEQ ID NO: 406777 - DNA, 25 bp, Homo sapien
gatgaaatccaggatcgcctgaaga

SEQ ID NO: 406778 - DNA, 25 bp, Homo sapien
caaacgcgggctcttgaagggtgat

SEQ ID NO: 406779 - DNA, 25 bp, Homo sapien
tctccagctgattcggtccaggagg

SEQ ID NO: 406780 - DNA, 25 bp, Homo sapien
taagaacaaaggttggagcccaagc

SEQ ID NO: 406781 - DNA, 25 bp, Homo sapien
cacgcaatgacccacgagaaaggga

SEQ ID NO: 406782 - DNA, 25 bp, Homo sapien
cgactgaaagttcgggcgacgtctg

SEQ ID NO: 406783 - DNA, 25 bp, Homo sapien
tgcaggaaagtacacggcgtgtgtt

SEQ ID NO: 406784 - DNA, 25 bp, Homo sapien
ggagcaaacgctcaatcagcgtctg

SEQ ID NO: 406785 - DNA, 25 bp, Homo sapien
tggaaaaagagactgccttcaaaac

SEQ ID NO: 406786 - DNA, 25 bp, Homo sapien
gacgtacctgtataatggccctgga

SEQ ID NO: 406787 - DNA, 25 bp, Homo sapien
ggtgttcgaaacctaatacttgagc

SEQ ID NO: 406788 - DNA, 25 bp, Homo sapien
ccagaaagttagaggaaaggccatc

SEQ ID NO: 406789 - DNA, 25 bp, Homo sapien
caaaggtgagcaggataggcacaac

SEQ ID NO: 406790 - DNA, 25 bp, Homo sapien
gctggacgctatgctagacactgga

SEQ ID NO: 406791 - DNA, 25 bp, Homo sapien
tgttagcaggctagagacttccttg

SEQ ID NO: 406792 - DNA, 25 bp, Homo sapien
aatgcacagaggaggcgtcatggaa

SEQ ID NO: 406793 - DNA, 25 bp, Homo sapien
gaagggtgacaaaacactccagagc

SEQ ID NO: 406794 - DNA, 25 bp, Homo sapien
gaatggccatcacttaaagcaacag

SEQ ID NO: 406795 - DNA, 25 bp, Homo sapien
cagtgttgagcataaacagtgaact

SEQ ID NO: 406796 - DNA, 25 bp, Homo sapien
ttgaggaagcgagtccctgcagtca

SEQ ID NO: 406797 - DNA, 25 bp, Homo sapien
gccagtgtgaggtcagggtgttgag

SEQ ID NO: 406798 - DNA, 25 bp, Homo sapien
agtccctgcagtcagactccagctg

SEQ ID NO: 406799 - DNA, 25 bp, Homo sapien
tcagggtgttgaggaagcgagtccc

SEQ ID NO: 406800 - DNA, 25 bp, Homo sapien
tgcatttacaactaaacggtcactg

SEQ ID NO: 406801 - DNA, 25 bp, Homo sapien
actactgggaaggttacttagcttg

SEQ ID NO: 406802 - DNA, 25 bp, Homo sapien
ttcatcagaaaagcgaaagcactaa

SEQ ID NO: 406803 - DNA, 25 bp, Homo sapien
gcaggataatcctctaaggctgaca

SEQ ID NO: 406804 - DNA, 25 bp, Homo sapien
tcattccctggtagcagagaagttg

SEQ ID NO: 406805 - DNA, 25 bp, Homo sapien
cctggtagcagagaagttgactcat

SEQ ID NO: 406806 - DNA, 25 bp, Homo sapien
ttccctggtagcagagaagttgact

SEQ ID NO: 406807 - DNA, 25 bp, Homo sapien
ctcattccctggtagcagagaagtt

SEQ ID NO: 406808 - DNA, 25 bp, Homo sapien
tggctctcccacccaatggagatgg

SEQ ID NO: 406809 - DNA, 25 bp, Homo sapien
ggctctcccacccaatggagatggc

SEQ ID NO: 406810 - DNA, 25 bp, Homo sapien
ctctcccacccaatggagatggctc

SEQ ID NO: 406811 - DNA, 25 bp, Homo sapien
gctctcccacccaatggagatggct

SEQ ID NO: 406812 - DNA, 25 bp, Homo sapien
tgtaaaccaaaactgcagcggcaga

SEQ ID NO: 406813 - DNA, 25 bp, Homo sapien
caccaagttggcagccgctttcaac

SEQ ID NO: 406814 - DNA, 25 bp, Homo sapien
tacacttgcattaatcactgcttac

SEQ ID NO: 406815 - DNA, 25 bp, Homo sapien
tagcaaactgatccaaataggaatc

SEQ ID NO: 406816 - DNA, 25 bp, Homo sapien
taacttctaggttctgttatagtaa

SEQ ID NO: 406817 - DNA, 25 bp, Homo sapien
ggttctgttatagtaacactgaaat

SEQ ID NO: 406818 - DNA, 25 bp, Homo sapien
ctaacttctaggttctgttatagta

SEQ ID NO: 406819 - DNA, 25 bp, Homo sapien
ctgttatagtaacactgaaatcaga

SEQ ID NO: 406820 - DNA, 25 bp, Homo sapien
agcctttcgtattcactgtcatcag

SEQ ID NO: 406821 - DNA, 25 bp, Homo sapien
ctgtcatcagttagatggacccagt

SEQ ID NO: 406822 - DNA, 25 bp, Homo sapien
cagaaatttacggaattcaagacca

SEQ ID NO: 406823 - DNA, 25 bp, Homo sapien
gtcatcagttagatggacccagtag

SEQ ID NO: 406824 - DNA, 25 bp, Homo sapien
taaatgactgcaatagaagaagtga

SEQ ID NO: 406825 - DNA, 25 bp, Homo sapien
agaagaagtgatatccttgagggat

SEQ ID NO: 406826 - DNA, 25 bp, Homo sapien
tgatatccttgagggatgaaacacg

SEQ ID NO: 406827 - DNA, 25 bp, Homo sapien
gggtataaatgactgcaatagaaga

SEQ ID NO: 406828 - DNA, 25 bp, Homo sapien
ccataaacgtgcttcgcattgtgcc

SEQ ID NO: 406829 - DNA, 25 bp, Homo sapien
gcattgtgccccacgtttggtttgt

SEQ ID NO: 406830 - DNA, 25 bp, Homo sapien
tacttgtgtatacattatcgtctct

SEQ ID NO: 406831 - DNA, 25 bp, Homo sapien
cattatcgtctcttctagattgagc

SEQ ID NO: 406832 - DNA, 25 bp, Homo sapien
tctaattggtgagcccatgctacct

SEQ ID NO: 406833 - DNA, 25 bp, Homo sapien
tgttcaaacagtgctagctgcccaa

SEQ ID NO: 406834 - DNA, 25 bp, Homo sapien
tagaaatcggtagccaagacaagac

SEQ ID NO: 406835 - DNA, 25 bp, Homo sapien
tctactgggtaaggcgagatccaca

SEQ ID NO: 406836 - DNA, 25 bp, Homo sapien
actgataaccaaggcttactcaagg

SEQ ID NO: 406837 - DNA, 25 bp, Homo sapien
gggaaacaggcactcttagacagtt

SEQ ID NO: 406838 - DNA, 25 bp, Homo sapien
tagacagttattgggagtaacactt

SEQ ID NO: 406839 - DNA, 25 bp, Homo sapien
tgataaccaaggcttactcaaggtg

SEQ ID NO: 406840 - DNA, 25 bp, Homo sapien
ttaggtagatgtacattcctctgtt

SEQ ID NO: 406841 - DNA, 25 bp, Homo sapien
tgggtaaccccttcatgtgctaatg

SEQ ID NO: 406842 - DNA, 25 bp, Homo sapien
tatcttggtaaagggctccacccag

SEQ ID NO: 406843 - DNA, 25 bp, Homo sapien
gaatgcaagttccacaacacgggac

SEQ ID NO: 406844 - DNA, 25 bp, Homo sapien
tatacctaggcttctcaagttggcc

SEQ ID NO: 406845 - DNA, 25 bp, Homo sapien
tccatggaggaggtacgactcaggc

SEQ ID NO: 406846 - DNA, 25 bp, Homo sapien
ggtagtgaagaatgactgcgtagta

SEQ ID NO: 406847 - DNA, 25 bp, Homo sapien
tacgactcaggcgaggtagtgaaga

SEQ ID NO: 406848 - DNA, 25 bp, Homo sapien
tgactgcgtagtaaatagaaggaga

SEQ ID NO: 406849 - DNA, 25 bp, Homo sapien
gatgcttaatgtgcctgcaagctta

SEQ ID NO: 406850 - DNA, 25 bp, Homo sapien
tttacccttaccaacacactagtga

SEQ ID NO: 406851 - DNA, 25 bp, Homo sapien
caagcttaaccagtgtttgtggcat

SEQ ID NO: 406852 - DNA, 25 bp, Homo sapien
tgaggacagattacacaggacagct

SEQ ID NO: 406853 - DNA, 25 bp, Homo sapien
cattttccgagatctttccaatagc

SEQ ID NO: 406854 - DNA, 25 bp, Homo sapien
attttccgagatctttccaatagct

SEQ ID NO: 406855 - DNA, 25 bp, Homo sapien
gcttatcccatattgtaaaatgtgc

SEQ ID NO: 406856 - DNA, 25 bp, Homo sapien
gatttgcgatgaactaaatgaagca

SEQ ID NO: 406857 - DNA, 25 bp, Homo sapien
aacgcttaaggattgaacgtgccct

SEQ ID NO: 406858 - DNA, 25 bp, Homo sapien
tgctttcttcaatcgcatgaacccg

SEQ ID NO: 406859 - DNA, 25 bp, Homo sapien
catagactgtggttcaatccttaaa

SEQ ID NO: 406860 - DNA, 25 bp, Homo sapien
taaaaaccaactgtgacatcttcac

SEQ ID NO: 406861 - DNA, 25 bp, Homo sapien
ttaaaaaccaactgtgacatcttca

SEQ ID NO: 406862 - DNA, 25 bp, Homo sapien
aaaaaccaactgtgacatcttcaca

SEQ ID NO: 406863 - DNA, 25 bp, Homo sapien
gcagaagcagaggattcatcaagtt

SEQ ID NO: 406864 - DNA, 25 bp, Homo sapien
cagaagcagaggattcatcaagtta

SEQ ID NO: 406865 - DNA, 25 bp, Homo sapien
gaagcagaggattcatcaagttacc

SEQ ID NO: 406866 - DNA, 25 bp, Homo sapien
agaagcagaggattcatcaagttac

SEQ ID NO: 406867 - DNA, 25 bp, Homo sapien
tatcgctgtccataccctggtggtg

SEQ ID NO: 406868 - DNA, 25 bp, Homo sapien
taaaaggccaacatgagggatcccc

SEQ ID NO: 406869 - DNA, 25 bp, Homo sapien
taaatgcgtgtgtctataaaaggcc

SEQ ID NO: 406870 - DNA, 25 bp, Homo sapien
gtaacaagacatatgggcaggccag

SEQ ID NO: 406871 - DNA, 25 bp, Homo sapien
caggtaaagacacgccctggaatct

SEQ ID NO: 406872 - DNA, 25 bp, Homo sapien
tcttcgtatgagacttggctgggtg

SEQ ID NO: 406873 - DNA, 25 bp, Homo sapien
cgccctggaatcttcgtatgagact

SEQ ID NO: 406874 - DNA, 25 bp, Homo sapien
tcttaagtgaacaggtaaagacacg

SEQ ID NO: 406875 - DNA, 25 bp, Homo sapien
tctcttctatgaaatctactttgta

SEQ ID NO: 406876 - DNA, 25 bp, Homo sapien
ctcttctatgaaatctactttgtac

SEQ ID NO: 406877 - DNA, 25 bp, Homo sapien
ttccagagtttcaaatggaagatct

SEQ ID NO: 406878 - DNA, 25 bp, Homo sapien
attaaagcatgagcatcttttgtga

SEQ ID NO: 406879 - DNA, 25 bp, Homo sapien
gctgtgttgaaatatttccaatgcc

SEQ ID NO: 406880 - DNA, 25 bp, Homo sapien
catcttttgtgaaggaacgtaagtt

SEQ ID NO: 406881 - DNA, 25 bp, Homo sapien
taacctttagtaacaattcactgaa

SEQ ID NO: 406882 - DNA, 25 bp, Homo sapien
gaaaagcatttctccataagccagt

SEQ ID NO: 406883 - DNA, 25 bp, Homo sapien
tctatgcttagtactgcaaatccaa

SEQ ID NO: 406884 - DNA, 25 bp, Homo sapien
aagccagttgaaacaaaactctatg

SEQ ID NO: 406885 - DNA, 25 bp, Homo sapien
ggcatccactcatcaagtttgctat

SEQ ID NO: 406886 - DNA, 25 bp, Homo sapien
ttttgttggcatccactcatcaagt

SEQ ID NO: 406887 - DNA, 25 bp, Homo sapien
cactcatcaagtttgctatccaaaa

SEQ ID NO: 406888 - DNA, 25 bp, Homo sapien
tgttggcatccactcatcaagtttg

SEQ ID NO: 406889 - DNA, 25 bp, Homo sapien
ctacgtcataacagaaggcaccaga

SEQ ID NO: 406890 - DNA, 25 bp, Homo sapien
tcataacagaaggcaccagaaatta

SEQ ID NO: 406891 - DNA, 25 bp, Homo sapien
tacgtcataacagaaggcaccagaa

SEQ ID NO: 406892 - DNA, 25 bp, Homo sapien
cgtcataacagaaggcaccagaaat

SEQ ID NO: 406893 - DNA, 25 bp, Homo sapien
ttctggagctctgaccaaattgacc

SEQ ID NO: 406894 - DNA, 25 bp, Homo sapien
tgaatgccctctctatcacacagcc

SEQ ID NO: 406895 - DNA, 25 bp, Homo sapien
ctgaccaaattgaccatatattcat

SEQ ID NO: 406896 - DNA, 25 bp, Homo sapien
ggagctctgaccaaattgaccatat

SEQ ID NO: 406897 - DNA, 25 bp, Homo sapien
tcatagcacaggaacgccaatatgc

SEQ ID NO: 406898 - DNA, 25 bp, Homo sapien
atcatagcacaggaacgccaatatg

SEQ ID NO: 406899 - DNA, 25 bp, Homo sapien
cctggatcacaatctttgaaagtaa

SEQ ID NO: 406900 - DNA, 25 bp, Homo sapien
gacttcctgcaataccactcgctta

SEQ ID NO: 406901 - DNA, 25 bp, Homo sapien
atttcacaggactttgttaaaggct

SEQ ID NO: 406902 - DNA, 25 bp, Homo sapien
aaggcttatacatgtcccaaggctg

SEQ ID NO: 406903 - DNA, 25 bp, Homo sapien
tattcatcacgaagacagtaccggg

SEQ ID NO: 406904 - DNA, 25 bp, Homo sapien
aaagagatcattccgcatttctgtc

SEQ ID NO: 406905 - DNA, 25 bp, Homo sapien
gctgagaagctgacgatgttgctat

SEQ ID NO: 406906 - DNA, 25 bp, Homo sapien
tcaattctgtcggtgacagctgaga

SEQ ID NO: 406907 - DNA, 25 bp, Homo sapien
atttgatcccgccaccgggtgcgac

SEQ ID NO: 406908 - DNA, 25 bp, Homo sapien
catttgatcccgccaccgggtgcga

SEQ ID NO: 406909 - DNA, 25 bp, Homo sapien
tccatttgatcccgccaccgggtgc

SEQ ID NO: 406910 - DNA, 25 bp, Homo sapien
ttgatcccgccaccgggtgcgacca

SEQ ID NO: 406911 - DNA, 25 bp, Homo sapien
tcggagttccgcaggacaggtctgt

SEQ ID NO: 406912 - DNA, 25 bp, Homo sapien
cagcggtgagaaccgtcgcgcgcaa

SEQ ID NO: 406913 - DNA, 25 bp, Homo sapien
ttacctgtgctcgatacctgggcgc

SEQ ID NO: 406914 - DNA, 25 bp, Homo sapien
aggtctgttccggacccagcactca

SEQ ID NO: 406915 - DNA, 25 bp, Homo sapien
cccagggcggtcggcctgccgccca

SEQ ID NO: 406916 - DNA, 25 bp, Homo sapien
gcccccagggcggtcggcctgccgc

SEQ ID NO: 406917 - DNA, 25 bp, Homo sapien
ggcggtcggcctgccgcccaccacg

SEQ ID NO: 406918 - DNA, 25 bp, Homo sapien
agggcggtcggcctgccgcccacca

SEQ ID NO: 406919 - DNA, 25 bp, Homo sapien
cgcgggttcgatcccggccacccag

SEQ ID NO: 406920 - DNA, 25 bp, Homo sapien
cagagttccacaggcgtcgttgccc

SEQ ID NO: 406921 - DNA, 25 bp, Homo sapien
acagagttccacaggcgtcgttgcc

SEQ ID NO: 406922 - DNA, 25 bp, Homo sapien
ccgccttcagccctccgcgggttcg

SEQ ID NO: 406923 - DNA, 25 bp, Homo sapien
acttctttgctatgccatgaattgg

SEQ ID NO: 406924 - DNA, 25 bp, Homo sapien
cagcaacaggcactagacttctttg

SEQ ID NO: 406925 - DNA, 25 bp, Homo sapien
tgccatgaattggcagcacagccat

SEQ ID NO: 406926 - DNA, 25 bp, Homo sapien
gcaacaggcactagacttctttgct

SEQ ID NO: 406927 - DNA, 25 bp, Homo sapien
tgcaatttgggtgaatttccctgtt

SEQ ID NO: 406928 - DNA, 25 bp, Homo sapien
gcaatttgggtgaatttccctgttg

SEQ ID NO: 406929 - DNA, 25 bp, Homo sapien
gtgcaatttgggtgaatttccctgt

SEQ ID NO: 406930 - DNA, 25 bp, Homo sapien
tctgataaccatggattttattctc

SEQ ID NO: 406931 - DNA, 25 bp, Homo sapien
taaaatattttgacaccagaaggcc

SEQ ID NO: 406932 - DNA, 25 bp, Homo sapien
catccctttcctctgcaatctaaaa

SEQ ID NO: 406933 - DNA, 25 bp, Homo sapien
taaccatggattttattctcatccc

SEQ ID NO: 406934 - DNA, 25 bp, Homo sapien
tttacagttgtcacctaatgatgcg

SEQ ID NO: 406935 - DNA, 25 bp, Homo sapien
tactgtaggcaacggtaaacagttg

SEQ ID NO: 406936 - DNA, 25 bp, Homo sapien
tacacatataaccactgacaattgc

SEQ ID NO: 406937 - DNA, 25 bp, Homo sapien
acagcacaaaagataaatggtacac

SEQ ID NO: 406938 - DNA, 25 bp, Homo sapien
taaacatgccagcatcaactgggag

SEQ ID NO: 406939 - DNA, 25 bp, Homo sapien
tgtgaagttagtgccccatctgagc

SEQ ID NO: 406940 - DNA, 25 bp, Homo sapien
catgtatgtgtgtgactacgtctcc

SEQ ID NO: 406941 - DNA, 25 bp, Homo sapien
ggagcctcaaccagtcaagttacag

SEQ ID NO: 406942 - DNA, 25 bp, Homo sapien
ttactcatctatggcaggaattctg

SEQ ID NO: 406943 - DNA, 25 bp, Homo sapien
catttctgccagaatcctcttttct

SEQ ID NO: 406944 - DNA, 25 bp, Homo sapien
actctgcacgagagtctgatttagg

SEQ ID NO: 406945 - DNA, 25 bp, Homo sapien
ggtccaacaaatactctgacagatg

SEQ ID NO: 406946 - DNA, 25 bp, Homo sapien
tgaagtcaatccacaggtcatgaaa

SEQ ID NO: 406947 - DNA, 25 bp, Homo sapien
aaaattttcaccacgagtcagggat

SEQ ID NO: 406948 - DNA, 25 bp, Homo sapien
tcaccacgagtcagggatcggcaaa

SEQ ID NO: 406949 - DNA, 25 bp, Homo sapien
cgagtcagggatcggcaaacatttt

SEQ ID NO: 406950 - DNA, 25 bp, Homo sapien
ttttcaccacgagtcagggatcggc

SEQ ID NO: 406951 - DNA, 25 bp, Homo sapien
tggcatgccaagaggatagatgact

SEQ ID NO: 406952 - DNA, 25 bp, Homo sapien
catagattcccaactcatggtggtg

SEQ ID NO: 406953 - DNA, 25 bp, Homo sapien
tatatatgtatctgtgggtcactgg

SEQ ID NO: 406954 - DNA, 25 bp, Homo sapien
cagcaggcacagacaagatttggcc

SEQ ID NO: 406955 - DNA, 25 bp, Homo sapien
cttctgtagctacaaggctagctgc

SEQ ID NO: 406956 - DNA, 25 bp, Homo sapien
gctagctgctggttagctgcttaag

SEQ ID NO: 406957 - DNA, 25 bp, Homo sapien
gcttaagattagaatgtcatcatct

SEQ ID NO: 406958 - DNA, 25 bp, Homo sapien
tctggatggctgccaacttctcaaa

SEQ ID NO: 406959 - DNA, 25 bp, Homo sapien
caaataatttatttggactcagaat

SEQ ID NO: 406960 - DNA, 25 bp, Homo sapien
atttggactcagaattaaaagaaca

SEQ ID NO: 406961 - DNA, 25 bp, Homo sapien
taatttatttggactcagaattaaa

SEQ ID NO: 406962 - DNA, 25 bp, Homo sapien
tcaccaaataatttatttggactca

SEQ ID NO: 406963 - DNA, 25 bp, Homo sapien
ttatgaaatgcatgtttattctgaa

SEQ ID NO: 406964 - DNA, 25 bp, Homo sapien
atgcatgtttattctgaaacttcta

SEQ ID NO: 406965 - DNA, 25 bp, Homo sapien
ttattctgaaacttctaactagttg

SEQ ID NO: 406966 - DNA, 25 bp, Homo sapien
tgtttattctgaaacttctaactag

SEQ ID NO: 406967 - DNA, 25 bp, Homo sapien
ctaatccgtgacaaattaccagatt

SEQ ID NO: 406968 - DNA, 25 bp, Homo sapien
tacaactaatccgtgacaaattacc

SEQ ID NO: 406969 - DNA, 25 bp, Homo sapien
aactaatccgtgacaaattaccaga

SEQ ID NO: 406970 - DNA, 25 bp, Homo sapien
caactaatccgtgacaaattaccag

SEQ ID NO: 406971 - DNA, 25 bp, Homo sapien
ttttcgatgacttcaaatttgggat

SEQ ID NO: 406972 - DNA, 25 bp, Homo sapien
ctggggtttttcgatgacttcaaat

SEQ ID NO: 406973 - DNA, 25 bp, Homo sapien
tcaggcctggggtttttcgatgact

SEQ ID NO: 406974 - DNA, 25 bp, Homo sapien
tttttcgatgacttcaaatttggga

SEQ ID NO: 406975 - DNA, 25 bp, Homo sapien
ttctcaggcacacgtcatggtccta

SEQ ID NO: 406976 - DNA, 25 bp, Homo sapien
catttagccggcagcttctcaggca

SEQ ID NO: 406977 - DNA, 25 bp, Homo sapien
gaggagacatgcaccagttaattac

SEQ ID NO: 406978 - DNA, 25 bp, Homo sapien
caagattgggcagttcgatttcaga

SEQ ID NO: 406979 - DNA, 25 bp, Homo sapien
tttgaaggtgggaaatgtattcatg

SEQ ID NO: 406980 - DNA, 25 bp, Homo sapien
caaatttgaaggtgggaaatgtatt

SEQ ID NO: 406981 - DNA, 25 bp, Homo sapien
cttcaaatttgaaggtgggaaatgt

SEQ ID NO: 406982 - DNA, 25 bp, Homo sapien
ggaaatgtattcatgtctgcattac

SEQ ID NO: 406983 - DNA, 25 bp, Homo sapien
tgatactctgaactagcatcaacag

SEQ ID NO: 406984 - DNA, 25 bp, Homo sapien
catttgcttgagcttaaaaagctcc

SEQ ID NO: 406985 - DNA, 25 bp, Homo sapien
ccagctcttgctgatactctgaact

SEQ ID NO: 406986 - DNA, 25 bp, Homo sapien
ctgaactagcatcaacaggtcctcc

SEQ ID NO: 406987 - DNA, 25 bp, Homo sapien
gactgagacggctgaccgaatgaca

SEQ ID NO: 406988 - DNA, 25 bp, Homo sapien
ccacaaagagtttctgtataggatc

SEQ ID NO: 406989 - DNA, 25 bp, Homo sapien
gctgtaacaccaatgttcctccgca

SEQ ID NO: 406990 - DNA, 25 bp, Homo sapien
ccaatgttcctccgcaaatggactg

SEQ ID NO: 406991 - DNA, 25 bp, Homo sapien
gaccacagttcccttctcctcctta

SEQ ID NO: 406992 - DNA, 25 bp, Homo sapien
cacagttcccttctcctccttattc

SEQ ID NO: 406993 - DNA, 25 bp, Homo sapien
accacagttcccttctcctccttat

SEQ ID NO: 406994 - DNA, 25 bp, Homo sapien
ctgaccacagttcccttctcctcct

SEQ ID NO: 406995 - DNA, 25 bp, Homo sapien
tagtaggttcgctgcctcttcagtg

SEQ ID NO: 406996 - DNA, 25 bp, Homo sapien
cggccaaaggttagtaggttcgctg

SEQ ID NO: 406997 - DNA, 25 bp, Homo sapien
caaaggttagtaggttcgctgcctc

SEQ ID NO: 406998 - DNA, 25 bp, Homo sapien
ggttcgctgcctcttcagtgcatat

SEQ ID NO: 406999 - DNA, 25 bp, Homo sapien
caatccataaagtcgcctaatgaag

SEQ ID NO: 407000 - DNA, 25 bp, Homo sapien
ctatgaacaatccataaagtcgcct

SEQ ID NO: 407001 - DNA, 25 bp, Homo sapien
tcgcctaatgaagtgttagcaccat

SEQ ID NO: 407002 - DNA, 25 bp, Homo sapien
taaagtcgcctaatgaagtgttagc

SEQ ID NO: 407003 - DNA, 25 bp, Homo sapien
ctccgctctacttccggccctggct

SEQ ID NO: 407004 - DNA, 25 bp, Homo sapien
acctccgctctacttccggccctgg

SEQ ID NO: 407005 - DNA, 25 bp, Homo sapien
cctccgctctacttccggccctggc

SEQ ID NO: 407006 - DNA, 25 bp, Homo sapien
cacctccgctctacttccggccctg

SEQ ID NO: 407007 - DNA, 25 bp, Homo sapien
gcaatgcattatgggccgccgtttc

SEQ ID NO: 407008 - DNA, 25 bp, Homo sapien
ccgccatcgcaatgcattatgggcc

SEQ ID NO: 407009 - DNA, 25 bp, Homo sapien
tatgggccgccgtttcagtcggtcg

SEQ ID NO: 407010 - DNA, 25 bp, Homo sapien
cgccgtttcagtcggtcgacgctca

SEQ ID NO: 407011 - DNA, 25 bp, Homo sapien
ggacaggaagcgtctcggagacagt

SEQ ID NO: 407012 - DNA, 25 bp, Homo sapien
cggacaggaagcgtctcggagacag

SEQ ID NO: 407013 - DNA, 25 bp, Homo sapien
tgaaaccttgctctgtacgcatgcg

SEQ ID NO: 407014 - DNA, 25 bp, Homo sapien
gagtcagcgtcctgttcgttagggt

SEQ ID NO: 407015 - DNA, 25 bp, Homo sapien
gacagaagccaaacaggaggaggaa

SEQ ID NO: 407016 - DNA, 25 bp, Homo sapien
tatcgaagtgtataaaggtgcaggg

SEQ ID NO: 407017 - DNA, 25 bp, Homo sapien
tgccttgggcggtcgttttgcgcac

SEQ ID NO: 407018 - DNA, 25 bp, Homo sapien
ttgccttgggcggtcgttttgcgca

SEQ ID NO: 407019 - DNA, 25 bp, Homo sapien
cgttgccttgggcggtcgttttgcg

SEQ ID NO: 407020 - DNA, 25 bp, Homo sapien
agcctccgttgccttgggcggtcgt

SEQ ID NO: 407021 - DNA, 25 bp, Homo sapien
agttgtagtcctggacccgaaggtg

SEQ ID NO: 407022 - DNA, 25 bp, Homo sapien
gttgtagtcctggacccgaaggtgc

SEQ ID NO: 407023 - DNA, 25 bp, Homo sapien
tgggacctcacacttctagtcgcgg

SEQ ID NO: 407024 - DNA, 25 bp, Homo sapien
ttctcagcgccgattccgcgggaag

SEQ ID NO: 407025 - DNA, 25 bp, Homo sapien
tcacacttctagtcgcgggagctgc

SEQ ID NO: 407026 - DNA, 25 bp, Homo sapien
tagtcgcgggagctgcaggtcttac

SEQ ID NO: 407027 - DNA, 25 bp, Homo sapien
agctgggatgtggtcctgacgcccc

SEQ ID NO: 407028 - DNA, 25 bp, Homo sapien
catttccgttcgtggagacttgagg

SEQ ID NO: 407029 - DNA, 25 bp, Homo sapien
aatgcagaccctgtctcatcgcggg

SEQ ID NO: 407030 - DNA, 25 bp, Homo sapien
tctgtgttttgtttccgctggtccc

SEQ ID NO: 407031 - DNA, 25 bp, Homo sapien
gaagcaaatcatcagaccgagtact

SEQ ID NO: 407032 - DNA, 25 bp, Homo sapien
cctgagggtcccaactgttaatctt

SEQ ID NO: 407033 - DNA, 25 bp, Homo sapien
catgagctagatgttaggttgaagc

SEQ ID NO: 407034 - DNA, 25 bp, Homo sapien
catgcagtgaacacgcagataccct

SEQ ID NO: 407035 - DNA, 25 bp, Homo sapien
aaaatacgacctttgttataggcag

SEQ ID NO: 407036 - DNA, 25 bp, Homo sapien
gactttaaatcagtcagtagtactt

SEQ ID NO: 407037 - DNA, 25 bp, Homo sapien
taattcctgcatatatgacattcct

SEQ ID NO: 407038 - DNA, 25 bp, Homo sapien
ccctgtagtgccagtttattatgca

SEQ ID NO: 407039 - DNA, 25 bp, Homo sapien
gttttctcccctgattaatggtgat

SEQ ID NO: 407040 - DNA, 25 bp, Homo sapien
tactgcctttaagaaagaactagtg

SEQ ID NO: 407041 - DNA, 25 bp, Homo sapien
taatgtcttcagatctaaagggtgt

SEQ ID NO: 407042 - DNA, 25 bp, Homo sapien
gaactagtgtatccttgaaatagca

SEQ ID NO: 407043 - DNA, 25 bp, Homo sapien
ccaaggcatccggtaaagatggctc

SEQ ID NO: 407044 - DNA, 25 bp, Homo sapien
tgaaagctgcagtatccattggcag

SEQ ID NO: 407045 - DNA, 25 bp, Homo sapien
taaagatggctcctggacgaagagc

SEQ ID NO: 407046 - DNA, 25 bp, Homo sapien
aaactgtgtattgcattgaaatgac

SEQ ID NO: 407047 - DNA, 25 bp, Homo sapien
gttattcagaactcctgctgctgac

SEQ ID NO: 407048 - DNA, 25 bp, Homo sapien
aggccagtgcggtttttctgcccct

SEQ ID NO: 407049 - DNA, 25 bp, Homo sapien
tttctgcccctgaaatgttattcag

SEQ ID NO: 407050 - DNA, 25 bp, Homo sapien
gaaatgttattcagaactcctgctg

SEQ ID NO: 407051 - DNA, 25 bp, Homo sapien
ggtttctgcgacagttgggtttctg

SEQ ID NO: 407052 - DNA, 25 bp, Homo sapien
cactcaggtttctgcgacagttggg

SEQ ID NO: 407053 - DNA, 25 bp, Homo sapien
caggtttctgcgacagttgggtttc

SEQ ID NO: 407054 - DNA, 25 bp, Homo sapien
tctgcgacagttgggtttctgtgga

SEQ ID NO: 407055 - DNA, 25 bp, Homo sapien
aagccggaacggcatgcgacgagcc

SEQ ID NO: 407056 - DNA, 25 bp, Homo sapien
ccccagaggcccataactgaactgc

SEQ ID NO: 407057 - DNA, 25 bp, Homo sapien
actgaactgcagtgtctccagccgc

SEQ ID NO: 407058 - DNA, 25 bp, Homo sapien
cagccgcgccctgtgcaatgatttg

SEQ ID NO: 407059 - DNA, 25 bp, Homo sapien
gctatcatgcccggcaaagtcagtt

SEQ ID NO: 407060 - DNA, 25 bp, Homo sapien
ctattcatatggctgcaaacctaag

SEQ ID NO: 407061 - DNA, 25 bp, Homo sapien
tggctgcaaacctaagaacttactt

SEQ ID NO: 407062 - DNA, 25 bp, Homo sapien
tgcagctatgattgaacctgggctt

SEQ ID NO: 407063 - DNA, 25 bp, Homo sapien
aaaacaccatcccaggcaccatctc

SEQ ID NO: 407064 - DNA, 25 bp, Homo sapien
aacaccatcccaggcaccatctccc

SEQ ID NO: 407065 - DNA, 25 bp, Homo sapien
tggttgagaaaacaccatcccaggc

SEQ ID NO: 407066 - DNA, 25 bp, Homo sapien
gttgagaaaacaccatcccaggcac

SEQ ID NO: 407067 - DNA, 25 bp, Homo sapien
cacacctagccttagggcaaataat

SEQ ID NO: 407068 - DNA, 25 bp, Homo sapien
gggaccaccatcacactaaggtaat

SEQ ID NO: 407069 - DNA, 25 bp, Homo sapien
aatgagcaacaagcacaaaaaagat

SEQ ID NO: 407070 - DNA, 25 bp, Homo sapien
ttacaggggaccaccatcacactaa

SEQ ID NO: 407071 - DNA, 25 bp, Homo sapien
gcttggcttacagtccacctttctg

SEQ ID NO: 407072 - DNA, 25 bp, Homo sapien
aaagcatttgattaatctctcctga

SEQ ID NO: 407073 - DNA, 25 bp, Homo sapien
tccattgaaaaatccccattgcttg

SEQ ID NO: 407074 - DNA, 25 bp, Homo sapien
caccatgatccatgtggtggttgca

SEQ ID NO: 407075 - DNA, 25 bp, Homo sapien
ctgttgcaaaccagcgcctggaggc

SEQ ID NO: 407076 - DNA, 25 bp, Homo sapien
gccctgttgcaaaccagcgcctgga

SEQ ID NO: 407077 - DNA, 25 bp, Homo sapien
agcgcctggaggcagacatattgca

SEQ ID NO: 407078 - DNA, 25 bp, Homo sapien
tggccctgttgcaaaccagcgcctg

SEQ ID NO: 407079 - DNA, 25 bp, Homo sapien
tccagggtcttgctgcaggttgtct

SEQ ID NO: 407080 - DNA, 25 bp, Homo sapien
ctccagggtcttgctgcaggttgtc

SEQ ID NO: 407081 - DNA, 25 bp, Homo sapien
ttcctccagggtcttgctgcaggtt

SEQ ID NO: 407082 - DNA, 25 bp, Homo sapien
tcctccagggtcttgctgcaggttg

SEQ ID NO: 407083 - DNA, 25 bp, Homo sapien
cagcaattacataagacagctccac

SEQ ID NO: 407084 - DNA, 25 bp, Homo sapien
gtcagcaattacataagacagctcc

SEQ ID NO: 407085 - DNA, 25 bp, Homo sapien
gcaattacataagacagctccactt

SEQ ID NO: 407086 - DNA, 25 bp, Homo sapien
cttgtcagcaattacataagacagc

SEQ ID NO: 407087 - DNA, 25 bp, Homo sapien
tctgtctgctgacactcgttctcct

SEQ ID NO: 407088 - DNA, 25 bp, Homo sapien
aactctgtctgctgacactcgttct

SEQ ID NO: 407089 - DNA, 25 bp, Homo sapien
gtctgctgacactcgttctccttca

SEQ ID NO: 407090 - DNA, 25 bp, Homo sapien
gctgacactcgttctccttcagttt

SEQ ID NO: 407091 - DNA, 25 bp, Homo sapien
gaacagagctgagtttttgggtcgt

SEQ ID NO: 407092 - DNA, 25 bp, Homo sapien
agtttttgggtcgttgctatggaga

SEQ ID NO: 407093 - DNA, 25 bp, Homo sapien
gctatggagaaagtgtgttttctca

SEQ ID NO: 407094 - DNA, 25 bp, Homo sapien
tcgttgctatggagaaagtgtgttt

SEQ ID NO: 407095 - DNA, 25 bp, Homo sapien
actctacaagttgccacaaaaatga

SEQ ID NO: 407096 - DNA, 25 bp, Homo sapien
ctacacggattttgggagcttacag

SEQ ID NO: 407097 - DNA, 25 bp, Homo sapien
aaaaatgaacagactacacggattt

SEQ ID NO: 407098 - DNA, 25 bp, Homo sapien
gctggcagagttcagatggaaaccc

SEQ ID NO: 407099 - DNA, 25 bp, Homo sapien
tttccctctcttgggcacttcccca

SEQ ID NO: 407100 - DNA, 25 bp, Homo sapien
agtgcagagtggatttcttcctgtt

SEQ ID NO: 407101 - DNA, 25 bp, Homo sapien
aacagattctgacaacctcaaagtg

SEQ ID NO: 407102 - DNA, 25 bp, Homo sapien
ttccctctcttgggcacttccccac

SEQ ID NO: 407103 - DNA, 25 bp, Homo sapien
aatcattctttaccctgcaccaaat

SEQ ID NO: 407104 - DNA, 25 bp, Homo sapien
gaccatagagctgtactggcatcca

SEQ ID NO: 407105 - DNA, 25 bp, Homo sapien
ccttatttcatgggaccatagagct

SEQ ID NO: 407106 - DNA, 25 bp, Homo sapien
catgggaccatagagctgtactggc

SEQ ID NO: 407107 - DNA, 25 bp, Homo sapien
taagacagcaggcattgcaatcccg

SEQ ID NO: 407108 - DNA, 25 bp, Homo sapien
cattaatcttttttgcgcagcagct

SEQ ID NO: 407109 - DNA, 25 bp, Homo sapien
tcggattggctcgtatagcaaaaac

SEQ ID NO: 407110 - DNA, 25 bp, Homo sapien
tgctgcacacaagatacacaccgaa

SEQ ID NO: 407111 - DNA, 25 bp, Homo sapien
gcctcacgatgggactagtgttgaa

SEQ ID NO: 407112 - DNA, 25 bp, Homo sapien
tggagactttcggacacctttgtaa

SEQ ID NO: 407113 - DNA, 25 bp, Homo sapien
taacatgtgtttcaaagctccagtg

SEQ ID NO: 407114 - DNA, 25 bp, Homo sapien
taattgtttacctctccttcacgag

SEQ ID NO: 407115 - DNA, 25 bp, Homo sapien
ttgtatcataaatgaaacttcagac

SEQ ID NO: 407116 - DNA, 25 bp, Homo sapien
acttcagactggttaaagaaaattg

SEQ ID NO: 407117 - DNA, 25 bp, Homo sapien
catcttaaaagaagggtttgtccag

SEQ ID NO: 407118 - DNA, 25 bp, Homo sapien
taatgtctgtagtcatccttcaaag

SEQ ID NO: 407119 - DNA, 25 bp, Homo sapien
caatgattctgtacaatcatcctgc

SEQ ID NO: 407120 - DNA, 25 bp, Homo sapien
atgtaatacagtgtagaaagcgatc

SEQ ID NO: 407121 - DNA, 25 bp, Homo sapien
gaaagcgatcatgtcataagcaatg

SEQ ID NO: 407122 - DNA, 25 bp, Homo sapien
tctgtacaatcatcctgcagaaaat

SEQ ID NO: 407123 - DNA, 25 bp, Homo sapien
cagctgtcaaaaggcgataatgagt

SEQ ID NO: 407124 - DNA, 25 bp, Homo sapien
cgccccgtaaaagtgcttacaatga

SEQ ID NO: 407125 - DNA, 25 bp, Homo sapien
tcaggcatctacttgtgttacagca

SEQ ID NO: 407126 - DNA, 25 bp, Homo sapien
tattctataaatggacaccgatggg

SEQ ID NO: 407127 - DNA, 25 bp, Homo sapien
ggttggattttcgtagccgttctgc

SEQ ID NO: 407128 - DNA, 25 bp, Homo sapien
cctctggggtgacagcggcgtcaac

SEQ ID NO: 407129 - DNA, 25 bp, Homo sapien
cgtagccgttctgctgcatcttgga

SEQ ID NO: 407130 - DNA, 25 bp, Homo sapien
cttgtaggttggattttcgtagccg

SEQ ID NO: 407131 - DNA, 25 bp, Homo sapien
gatgctttcctttgatcttccaatt

SEQ ID NO: 407132 - DNA, 25 bp, Homo sapien
tgctttcctttgatcttccaatttc

SEQ ID NO: 407133 - DNA, 25 bp, Homo sapien
cctggcctgtgatcatttttgatgc

SEQ ID NO: 407134 - DNA, 25 bp, Homo sapien
cctgtgatcatttttgatgctttcc

SEQ ID NO: 407135 - DNA, 25 bp, Homo sapien
tggtaataataaagggctattgctt

SEQ ID NO: 407136 - DNA, 25 bp, Homo sapien
attgcttcactgcttgaagcaccaa

SEQ ID NO: 407137 - DNA, 25 bp, Homo sapien
tgcttcactgcttgaagcaccaata

SEQ ID NO: 407138 - DNA, 25 bp, Homo sapien
taataaagggctattgcttcactgc

SEQ ID NO: 407139 - DNA, 25 bp, Homo sapien
aaaaacaacaactagcaagtgctca

SEQ ID NO: 407140 - DNA, 25 bp, Homo sapien
ttagatacgcaaatccctgccagtg

SEQ ID NO: 407141 - DNA, 25 bp, Homo sapien
gatggtggccccataataccgtatt

SEQ ID NO: 407142 - DNA, 25 bp, Homo sapien
gactctctggccttatggctaagta

SEQ ID NO: 407143 - DNA, 25 bp, Homo sapien
ctcatccacgtcagtatgaatgggg

SEQ ID NO: 407144 - DNA, 25 bp, Homo sapien
ctatgggtcagtccgttcctttcca

SEQ ID NO: 407145 - DNA, 25 bp, Homo sapien
aatgaggctccaccccaatttccat

SEQ ID NO: 407146 - DNA, 25 bp, Homo sapien
ccacgtcagtatgaatggggaaatg

SEQ ID NO: 407147 - DNA, 25 bp, Homo sapien
gattgcacctttgtttgaacccaca

SEQ ID NO: 407148 - DNA, 25 bp, Homo sapien
gatcactgtcgctatgacaacaccg

SEQ ID NO: 407149 - DNA, 25 bp, Homo sapien
tcttcagcatcaccaaggtgatgac

SEQ ID NO: 407150 - DNA, 25 bp, Homo sapien
caccacaccatgatgaatggatgtg

SEQ ID NO: 407151 - DNA, 25 bp, Homo sapien
cctgagtcatgtcggaattctgcat

SEQ ID NO: 407152 - DNA, 25 bp, Homo sapien
ccgtcttgatatttgtcaacccaga

SEQ ID NO: 407153 - DNA, 25 bp, Homo sapien
gatctcctccgtcttgatatttgtc

SEQ ID NO: 407154 - DNA, 25 bp, Homo sapien
gaacttcatatcctgagtcatgtcg

SEQ ID NO: 407155 - DNA, 25 bp, Homo sapien
tcataattaaagtatgcaggacaac

SEQ ID NO: 407156 - DNA, 25 bp, Homo sapien
ggaaacctgaaagtaaggcttctgc

SEQ ID NO: 407157 - DNA, 25 bp, Homo sapien
ctttctaggcctgaagttagaagaa

SEQ ID NO: 407158 - DNA, 25 bp, Homo sapien
ctgaaagtaaggcttctgctgcctt

SEQ ID NO: 407159 - DNA, 25 bp, Homo sapien
cgtgtcacactactgtctctgctgc

SEQ ID NO: 407160 - DNA, 25 bp, Homo sapien
cttcatcagtgaccgtgcttggagg

SEQ ID NO: 407161 - DNA, 25 bp, Homo sapien
tcaacgagaccagctgtcaagacgt

SEQ ID NO: 407162 - DNA, 25 bp, Homo sapien
tcttcatcagtgaccgtgcttggag

SEQ ID NO: 407163 - DNA, 25 bp, Homo sapien
cagcagggcgggcatcaacaggctc

SEQ ID NO: 407164 - DNA, 25 bp, Homo sapien
tggtcgagtggtcagtcctcggtcg

SEQ ID NO: 407165 - DNA, 25 bp, Homo sapien
ggcagcagggcgggcatcaacaggc

SEQ ID NO: 407166 - DNA, 25 bp, Homo sapien
agtggtcagtcctcggtcggcagca

SEQ ID NO: 407167 - DNA, 25 bp, Homo sapien
tacgctggcgtttgaagaaacaagg

SEQ ID NO: 407168 - DNA, 25 bp, Homo sapien
taaatgaagccacggaggtaggtgc

SEQ ID NO: 407169 - DNA, 25 bp, Homo sapien
taggattaataatggtcatagggta

SEQ ID NO: 407170 - DNA, 25 bp, Homo sapien
cttccttgttttacgctggcgtttg

SEQ ID NO: 407171 - DNA, 25 bp, Homo sapien
gagggcaaacgcgtaccttgaagtg

SEQ ID NO: 407172 - DNA, 25 bp, Homo sapien
ggacccaatagtgcttcaactgcag

SEQ ID NO: 407173 - DNA, 25 bp, Homo sapien
aacagaccacatgcacgagggcaaa

SEQ ID NO: 407174 - DNA, 25 bp, Homo sapien
tgcagcaacctgtaatgagtaactg

SEQ ID NO: 407175 - DNA, 25 bp, Homo sapien
taatgaggaatcagcagtacaccag

SEQ ID NO: 407176 - DNA, 25 bp, Homo sapien
tacaaagaggcagactgttggccac

SEQ ID NO: 407177 - DNA, 25 bp, Homo sapien
caaagacttgctggcagtcactgca

SEQ ID NO: 407178 - DNA, 25 bp, Homo sapien
taaacctcaactattaaccgtgctg

SEQ ID NO: 407179 - DNA, 25 bp, Homo sapien
gtaactgatccttggttcactaatc

SEQ ID NO: 407180 - DNA, 25 bp, Homo sapien
gttttcgtttcggtcaaagatggca

SEQ ID NO: 407181 - DNA, 25 bp, Homo sapien
ccaaaagaatgccacggctggagat

SEQ ID NO: 407182 - DNA, 25 bp, Homo sapien
gcatgagagcatcgtttccgtaact

SEQ ID NO: 407183 - DNA, 25 bp, Homo sapien
ttggccaagacgtcatctgaatagt

SEQ ID NO: 407184 - DNA, 25 bp, Homo sapien
gttggccaagacgtcatctgaatag

SEQ ID NO: 407185 - DNA, 25 bp, Homo sapien
tggccaagacgtcatctgaatagtt

SEQ ID NO: 407186 - DNA, 25 bp, Homo sapien
taggcattattaagcatgtctgttc

SEQ ID NO: 407187 - DNA, 25 bp, Homo sapien
taagctgacttaatcaccgttagtc

SEQ ID NO: 407188 - DNA, 25 bp, Homo sapien
gtctcttccacccttgtggatttgt

SEQ ID NO: 407189 - DNA, 25 bp, Homo sapien
gatttgtaagctgacttaatcaccg

SEQ ID NO: 407190 - DNA, 25 bp, Homo sapien
ctcttttctctgttacactgttggt

SEQ ID NO: 407191 - DNA, 25 bp, Homo sapien
ttttctctgttacactgttggtaga

SEQ ID NO: 407192 - DNA, 25 bp, Homo sapien
cttttctctgttacactgttggtag

SEQ ID NO: 407193 - DNA, 25 bp, Homo sapien
tcttttctctgttacactgttggta

SEQ ID NO: 407194 - DNA, 25 bp, Homo sapien
aaggctcgggttcgtcatccgcaaa

SEQ ID NO: 407195 - DNA, 25 bp, Homo sapien
taacaggagattcgcatatgaccaa

SEQ ID NO: 407196 - DNA, 25 bp, Homo sapien
ccgcaaaatcgtgggaggctggttc

SEQ ID NO: 407197 - DNA, 25 bp, Homo sapien
catgttaatgtgatccccaggtgac

SEQ ID NO: 407198 - DNA, 25 bp, Homo sapien
ctccaccacactgaccacagccacg

SEQ ID NO: 407199 - DNA, 25 bp, Homo sapien
tccaccacactgaccacagccacga

SEQ ID NO: 407200 - DNA, 25 bp, Homo sapien
ccaccacactgaccacagccacgag

SEQ ID NO: 407201 - DNA, 25 bp, Homo sapien
cctccaccacactgaccacagccac

SEQ ID NO: 407202 - DNA, 25 bp, Homo sapien
ccatgagatctttaaggacggtagg

SEQ ID NO: 407203 - DNA, 25 bp, Homo sapien
gacggtagggatgttctgattagca

SEQ ID NO: 407204 - DNA, 25 bp, Homo sapien
tcggtggagcagctgatttgggaga

SEQ ID NO: 407205 - DNA, 25 bp, Homo sapien
tgcgatgccaaagccatactgtgat

SEQ ID NO: 407206 - DNA, 25 bp, Homo sapien
tagggataccgacagaatgacaaag

SEQ ID NO: 407207 - DNA, 25 bp, Homo sapien
tgtcttcaggagagcattcacgatg

SEQ ID NO: 407208 - DNA, 25 bp, Homo sapien
gatacaagtgcatgtaccgaggcac

SEQ ID NO: 407209 - DNA, 25 bp, Homo sapien
gaaagagatcattgtcctagcagat

SEQ ID NO: 407210 - DNA, 25 bp, Homo sapien
tggaaacatggacccagagagctca

SEQ ID NO: 407211 - DNA, 25 bp, Homo sapien
gcagaactccacaggcgctttgaaa

SEQ ID NO: 407212 - DNA, 25 bp, Homo sapien
ggaaacgttcccaatactagcagaa

SEQ ID NO: 407213 - DNA, 25 bp, Homo sapien
gatgcacacaagagtgatacagcca

SEQ ID NO: 407214 - DNA, 25 bp, Homo sapien
tgtgaggacatgatgcgtaggtggc

SEQ ID NO: 407215 - DNA, 25 bp, Homo sapien
tgaggacatgatgcgtaggtggcca

SEQ ID NO: 407216 - DNA, 25 bp, Homo sapien
gtgaggacatgatgcgtaggtggcc

SEQ ID NO: 407217 - DNA, 25 bp, Homo sapien
aggacatgatgcgtaggtggccatt

SEQ ID NO: 407218 - DNA, 25 bp, Homo sapien
aggcaggtccatacagaacatggga

SEQ ID NO: 407219 - DNA, 25 bp, Homo sapien
tgaaggcaggtccatacagaacatg

SEQ ID NO: 407220 - DNA, 25 bp, Homo sapien
gatgaaggcaggtccatacagaaca

SEQ ID NO: 407221 - DNA, 25 bp, Homo sapien
gattttgatcaagccacttaatcac

SEQ ID NO: 407222 - DNA, 25 bp, Homo sapien
ctataatcttaagggtattgagccc

SEQ ID NO: 407223 - DNA, 25 bp, Homo sapien
actgatcgtttaggctgatggctta

SEQ ID NO: 407224 - DNA, 25 bp, Homo sapien
taaactaaacaggagtcagagaagg

SEQ ID NO: 407225 - DNA, 25 bp, Homo sapien
caggtgacaagcagaagtgcccctc

SEQ ID NO: 407226 - DNA, 25 bp, Homo sapien
gcaggggccaggttaatctctttaa

SEQ ID NO: 407227 - DNA, 25 bp, Homo sapien
ggggccaggttaatctctttaatca

SEQ ID NO: 407228 - DNA, 25 bp, Homo sapien
caggttaatctctttaatcattcta

SEQ ID NO: 407229 - DNA, 25 bp, Homo sapien
gccaggttaatctctttaatcattc

SEQ ID NO: 407230 - DNA, 25 bp, Homo sapien
taaaatcattggttgttcccaagac

SEQ ID NO: 407231 - DNA, 25 bp, Homo sapien
gttccagtctaaaatcattggttgt

SEQ ID NO: 407232 - DNA, 25 bp, Homo sapien
gcagatgcttgtgaaaaacagaata

SEQ ID NO: 407233 - DNA, 25 bp, Homo sapien
gaaggcagatgcttgtgaaaaacag

SEQ ID NO: 407234 - DNA, 25 bp, Homo sapien
tactacagtaagcacaggcacacag

SEQ ID NO: 407235 - DNA, 25 bp, Homo sapien
tacaaatagatgttatcatgcctgg

SEQ ID NO: 407236 - DNA, 25 bp, Homo sapien
tttgtgtaatagtgccaagaccatt

SEQ ID NO: 407237 - DNA, 25 bp, Homo sapien
cccatattatctatggacaattgat

SEQ ID NO: 407238 - DNA, 25 bp, Homo sapien
tcccgcatctggtttataataattc

SEQ ID NO: 407239 - DNA, 25 bp, Homo sapien
ctttcccgcatctggtttataataa

SEQ ID NO: 407240 - DNA, 25 bp, Homo sapien
agatctttcccgcatctggtttata

SEQ ID NO: 407241 - DNA, 25 bp, Homo sapien
gatctttcccgcatctggtttataa

SEQ ID NO: 407242 - DNA, 25 bp, Homo sapien
gattcagtacgctggctgtggctag

SEQ ID NO: 407243 - DNA, 25 bp, Homo sapien
ggaatatggcactgggattcagtac

SEQ ID NO: 407244 - DNA, 25 bp, Homo sapien
ccagaaggacatgagtgttatacac

SEQ ID NO: 407245 - DNA, 25 bp, Homo sapien
cattgattgcaggttcagaggcaca

SEQ ID NO: 407246 - DNA, 25 bp, Homo sapien
ttctcagcatgactccattcttcct

SEQ ID NO: 407247 - DNA, 25 bp, Homo sapien
tcagcatgactccattcttcctcat

SEQ ID NO: 407248 - DNA, 25 bp, Homo sapien
tcttctcagcatgactccattcttc

SEQ ID NO: 407249 - DNA, 25 bp, Homo sapien
cagcatgactccattcttcctcatt

SEQ ID NO: 407250 - DNA, 25 bp, Homo sapien
ctcagatagtgtacagggttcgtta

SEQ ID NO: 407251 - DNA, 25 bp, Homo sapien
cacttctgtagctttgacactagca

SEQ ID NO: 407252 - DNA, 25 bp, Homo sapien
gaacgactacaagacataacctgga

SEQ ID NO: 407253 - DNA, 25 bp, Homo sapien
tgaggaacctctaataacatttggc

SEQ ID NO: 407254 - DNA, 25 bp, Homo sapien
tattgtgctgccctattcttgggca

SEQ ID NO: 407255 - DNA, 25 bp, Homo sapien
tgagggtggaatattggtcatcaac

SEQ ID NO: 407256 - DNA, 25 bp, Homo sapien
caacaataattgctgggtgagggtg

SEQ ID NO: 407257 - DNA, 25 bp, Homo sapien
tcctccctggtactgagatttgaag

SEQ ID NO: 407258 - DNA, 25 bp, Homo sapien
cctgctcagccatcaaagagaattg

SEQ ID NO: 407259 - DNA, 25 bp, Homo sapien
caggcacttcaaagtcggacttact

SEQ ID NO: 407260 - DNA, 25 bp, Homo sapien
cagtgggcacacaaggtcagtttcc

SEQ ID NO: 407261 - DNA, 25 bp, Homo sapien
ccttgagcggtgtttcaggcacttc

SEQ ID NO: 407262 - DNA, 25 bp, Homo sapien
aaatcacacggaggtgtgtcataac

SEQ ID NO: 407263 - DNA, 25 bp, Homo sapien
agggagagagactgattcatgcgct

SEQ ID NO: 407264 - DNA, 25 bp, Homo sapien
gattcatgcgctcataaatcacacg

SEQ ID NO: 407265 - DNA, 25 bp, Homo sapien
actgcaggcacgttgtagagcaggg

SEQ ID NO: 407266 - DNA, 25 bp, Homo sapien
gcatcaaaggatgacaactccaggt

SEQ ID NO: 407267 - DNA, 25 bp, Homo sapien
catcaaaggatgacaactccaggtc

SEQ ID NO: 407268 - DNA, 25 bp, Homo sapien
ctgcatcaaaggatgacaactccag

SEQ ID NO: 407269 - DNA, 25 bp, Homo sapien
atcaaaggatgacaactccaggtca

SEQ ID NO: 407270 - DNA, 25 bp, Homo sapien
tgggatccaccatgcgcacatgctc

SEQ ID NO: 407271 - DNA, 25 bp, Homo sapien
ctgggaccggatctgagcggctttc

SEQ ID NO: 407272 - DNA, 25 bp, Homo sapien
ctgttctgcgcggacatacttcttt

SEQ ID NO: 407273 - DNA, 25 bp, Homo sapien
gctcgaaatgctttagggtgtgctg

SEQ ID NO: 407274 - DNA, 25 bp, Homo sapien
tatccggtttgctgatgcggctctg

SEQ ID NO: 407275 - DNA, 25 bp, Homo sapien
gaacatgacgcaggagcatctagga

SEQ ID NO: 407276 - DNA, 25 bp, Homo sapien
cctcttacggaggaagacatcttcc

SEQ ID NO: 407277 - DNA, 25 bp, Homo sapien
tgtttatggccaaggagttatccca

SEQ ID NO: 407278 - DNA, 25 bp, Homo sapien
ggctgacctttttacaaatctggta

SEQ ID NO: 407279 - DNA, 25 bp, Homo sapien
tggctgacctttttacaaatctggt

SEQ ID NO: 407280 - DNA, 25 bp, Homo sapien
ctgacctttttacaaatctggtagg

SEQ ID NO: 407281 - DNA, 25 bp, Homo sapien
gctgacctttttacaaatctggtag

SEQ ID NO: 407282 - DNA, 25 bp, Homo sapien
agctggaacgcttcacaagtttctg

SEQ ID NO: 407283 - DNA, 25 bp, Homo sapien
taaagattctggtctcagcacccac

SEQ ID NO: 407284 - DNA, 25 bp, Homo sapien
tttagagattggactttcagctgga

SEQ ID NO: 407285 - DNA, 25 bp, Homo sapien
ttctgctataaagattctggtctca

SEQ ID NO: 407286 - DNA, 25 bp, Homo sapien
gtatgacaacaaccgcttacagaga

SEQ ID NO: 407287 - DNA, 25 bp, Homo sapien
tcattcagtgtacatggtcttccca

SEQ ID NO: 407288 - DNA, 25 bp, Homo sapien
gagtataaggatggaaaaatgcacc

SEQ ID NO: 407289 - DNA, 25 bp, Homo sapien
ggaaaacgcaagacccaattacatg

SEQ ID NO: 407290 - DNA, 25 bp, Homo sapien
tctttttgtatggcttccagttccc

SEQ ID NO: 407291 - DNA, 25 bp, Homo sapien
ttctttttgtatggcttccagttcc

SEQ ID NO: 407292 - DNA, 25 bp, Homo sapien
tccagttcccagtgccccaccctta

SEQ ID NO: 407293 - DNA, 25 bp, Homo sapien
tcattctttttgtatggcttccagt

SEQ ID NO: 407294 - DNA, 25 bp, Homo sapien
gacctgaagtgtgaactcggctgca

SEQ ID NO: 407295 - DNA, 25 bp, Homo sapien
tgctgtgacctgaagtgtgaactcg

SEQ ID NO: 407296 - DNA, 25 bp, Homo sapien
tgaagtgtgaactcggctgcagcga

SEQ ID NO: 407297 - DNA, 25 bp, Homo sapien
tgaactcggctgcagcgagacctac

SEQ ID NO: 407298 - DNA, 25 bp, Homo sapien
ggcggcggtcattgagcatggcttc

SEQ ID NO: 407299 - DNA, 25 bp, Homo sapien
gccaggcggcggcggtcattgagca

SEQ ID NO: 407300 - DNA, 25 bp, Homo sapien
caggcggcggcggtcattgagcatg

SEQ ID NO: 407301 - DNA, 25 bp, Homo sapien
ggcggcggcggtcattgagcatggc

SEQ ID NO: 407302 - DNA, 25 bp, Homo sapien
taggcaagttctttgcttgacgttc

SEQ ID NO: 407303 - DNA, 25 bp, Homo sapien
tttaggcaagttctttgcttgacgt

SEQ ID NO: 407304 - DNA, 25 bp, Homo sapien
cttcttatcagctttaggcaagttc

SEQ ID NO: 407305 - DNA, 25 bp, Homo sapien
caagttctttgcttgacgttctgcc

SEQ ID NO: 407306 - DNA, 25 bp, Homo sapien
ctgggacattctctctcggtgcttg

SEQ ID NO: 407307 - DNA, 25 bp, Homo sapien
attctctctcggtgcttggcctcaa

SEQ ID NO: 407308 - DNA, 25 bp, Homo sapien
ccccaggtgtctcgagatacttgtc

SEQ ID NO: 407309 - DNA, 25 bp, Homo sapien
tgtctcgagatacttgtcaacggca

SEQ ID NO: 407310 - DNA, 25 bp, Homo sapien
aggggtactggctgctgttgtagga

SEQ ID NO: 407311 - DNA, 25 bp, Homo sapien
tcaggggtactggctgctgttgtag

SEQ ID NO: 407312 - DNA, 25 bp, Homo sapien
caggggtactggctgctgttgtagg

SEQ ID NO: 407313 - DNA, 25 bp, Homo sapien
ggggtactggctgctgttgtaggaa

SEQ ID NO: 407314 - DNA, 25 bp, Homo sapien
ctggggtgaagtaacacaggttagc

SEQ ID NO: 407315 - DNA, 25 bp, Homo sapien
gacaccaacgaaacattttccatac

SEQ ID NO: 407316 - DNA, 25 bp, Homo sapien
caacgttcctatcacaaaatgctcc

SEQ ID NO: 407317 - DNA, 25 bp, Homo sapien
ttattcataaatggcgatgctgcac

SEQ ID NO: 407318 - DNA, 25 bp, Homo sapien
ggtctgtttgccttttgggatgcag

SEQ ID NO: 407319 - DNA, 25 bp, Homo sapien
gctctttgagagattaaatgccatt

SEQ ID NO: 407320 - DNA, 25 bp, Homo sapien
tttggccagatcacatggtgcaatc

SEQ ID NO: 407321 - DNA, 25 bp, Homo sapien
tgactaaaaattggcatgatgctct

SEQ ID NO: 407322 - DNA, 25 bp, Homo sapien
gaaatatcatccaactggctctaga

SEQ ID NO: 407323 - DNA, 25 bp, Homo sapien
tgtaaaaccaaccacctttgtgcag

SEQ ID NO: 407324 - DNA, 25 bp, Homo sapien
tagaagcagcttagactgagcaacc

SEQ ID NO: 407325 - DNA, 25 bp, Homo sapien
tccaagttgcccagtctaacaggct

SEQ ID NO: 407326 - DNA, 25 bp, Homo sapien
ctccagatgaccatgactttttcaa

SEQ ID NO: 407327 - DNA, 25 bp, Homo sapien
tctgaattgagtctgccatctgaat

SEQ ID NO: 407328 - DNA, 25 bp, Homo sapien
gaattgagtctgccatctgaatttg

SEQ ID NO: 407329 - DNA, 25 bp, Homo sapien
ctgaattgagtctgccatctgaatt

SEQ ID NO: 407330 - DNA, 25 bp, Homo sapien
gtctgtttgtactagcactgcaaaa

SEQ ID NO: 407331 - DNA, 25 bp, Homo sapien
ctgcaaaacccttcacttgctgtga

SEQ ID NO: 407332 - DNA, 25 bp, Homo sapien
tagcactgcaaaacccttcacttgc

SEQ ID NO: 407333 - DNA, 25 bp, Homo sapien
tgtactagcactgcaaaacccttca

SEQ ID NO: 407334 - DNA, 25 bp, Homo sapien
tggagttatgtgaaccaagcagcat

SEQ ID NO: 407335 - DNA, 25 bp, Homo sapien
acaaaaccatgcaaagaaggtgatg

SEQ ID NO: 407336 - DNA, 25 bp, Homo sapien
ttccctcaggtgaatgacaacgtac

SEQ ID NO: 407337 - DNA, 25 bp, Homo sapien
acaagcaaggtaatgggaagaaaca

SEQ ID NO: 407338 - DNA, 25 bp, Homo sapien
cctgggtagtcttgagtaaactttg

SEQ ID NO: 407339 - DNA, 25 bp, Homo sapien
caagaggttcctgggtagtcttgag

SEQ ID NO: 407340 - DNA, 25 bp, Homo sapien
caggatctcgggcaagaggttcctg

SEQ ID NO: 407341 - DNA, 25 bp, Homo sapien
gtagtcttgagtaaactttgggaca

SEQ ID NO: 407342 - DNA, 25 bp, Homo sapien
taccagcgggagatcattgctcggc

SEQ ID NO: 407343 - DNA, 25 bp, Homo sapien
tcagtcacatcaaagtaccagcggg

SEQ ID NO: 407344 - DNA, 25 bp, Homo sapien
cccgtctcggcttgttcagagcaca

SEQ ID NO: 407345 - DNA, 25 bp, Homo sapien
gccacatccgccgtaaaagaatggg

SEQ ID NO: 407346 - DNA, 25 bp, Homo sapien
tgaggttgatgctttcgtagccacg

SEQ ID NO: 407347 - DNA, 25 bp, Homo sapien
cagtactgagtgagatggccttaat

SEQ ID NO: 407348 - DNA, 25 bp, Homo sapien
ccaatttgctttgggagcgtggact

SEQ ID NO: 407349 - DNA, 25 bp, Homo sapien
tctgaaaaccacgtgaagagtgtca

SEQ ID NO: 407350 - DNA, 25 bp, Homo sapien
ctggttttaccagtactttattgca

SEQ ID NO: 407351 - DNA, 25 bp, Homo sapien
gatggtagccacctctggttttacc

SEQ ID NO: 407352 - DNA, 25 bp, Homo sapien
tgatggtagccacctctggttttac

SEQ ID NO: 407353 - DNA, 25 bp, Homo sapien
cgtgatggtagccacctctggtttt

SEQ ID NO: 407354 - DNA, 25 bp, Homo sapien
gctagagtacaatggagtgaactcg

SEQ ID NO: 407355 - DNA, 25 bp, Homo sapien
tagagtacaatggagtgaactcggc

SEQ ID NO: 407356 - DNA, 25 bp, Homo sapien
caggctagagtacaatggagtgaac

SEQ ID NO: 407357 - DNA, 25 bp, Homo sapien
actcggcttactgcaacctccgtct

SEQ ID NO: 407358 - DNA, 25 bp, Homo sapien
ggccagaatgtacttccttatacca

SEQ ID NO: 407359 - DNA, 25 bp, Homo sapien
ctggccagaatgtacttccttatac

SEQ ID NO: 407360 - DNA, 25 bp, Homo sapien
tggccagaatgtacttccttatacc

SEQ ID NO: 407361 - DNA, 25 bp, Homo sapien
gtcagtgctgacactagttctcttg

SEQ ID NO: 407362 - DNA, 25 bp, Homo sapien
tagttctcttgacatcattagcaag

SEQ ID NO: 407363 - DNA, 25 bp, Homo sapien
agtgctgacactagttctcttgaca

SEQ ID NO: 407364 - DNA, 25 bp, Homo sapien
gacactagttctcttgacatcatta

SEQ ID NO: 407365 - DNA, 25 bp, Homo sapien
aacaagattgtaagcctccctgcag

SEQ ID NO: 407366 - DNA, 25 bp, Homo sapien
gaagcacattaaggactggtatcag

SEQ ID NO: 407367 - DNA, 25 bp, Homo sapien
tggcagagaagattatgactacgct

SEQ ID NO: 407368 - DNA, 25 bp, Homo sapien
tcttagaaaggatggctgtaaatca

SEQ ID NO: 407369 - DNA, 25 bp, Homo sapien
tcttcgtagggttcctcagcctctt

SEQ ID NO: 407370 - DNA, 25 bp, Homo sapien
ctcctctgctacttctactactttg

SEQ ID NO: 407371 - DNA, 25 bp, Homo sapien
cctctgctacttctactactttgtc

SEQ ID NO: 407372 - DNA, 25 bp, Homo sapien
tctctgtggcttcttcgtagggttc

SEQ ID NO: 407373 - DNA, 25 bp, Homo sapien
aaggtacaatggctggataagtcag

SEQ ID NO: 407374 - DNA, 25 bp, Homo sapien
aagtaagaaatagccagtacttctc

SEQ ID NO: 407375 - DNA, 25 bp, Homo sapien
gataagtcagtttgtccgaaaggaa

SEQ ID NO: 407376 - DNA, 25 bp, Homo sapien
agccagtacttctcccgcataaagg

SEQ ID NO: 407377 - DNA, 25 bp, Homo sapien
cacactaactgctgtatgagtaaca

SEQ ID NO: 407378 - DNA, 25 bp, Homo sapien
gcagattaaacgcttcagaaattca

SEQ ID NO: 407379 - DNA, 25 bp, Homo sapien
cagagaagtgattgttgcgaccaga

SEQ ID NO: 407380 - DNA, 25 bp, Homo sapien
tgagtaacagacatactgcagatta

SEQ ID NO: 407381 - DNA, 25 bp, Homo sapien
caataatgggctgaacaaagaatgt

SEQ ID NO: 407382 - DNA, 25 bp, Homo sapien
ggcgctatgcctagtaagttcccaa

SEQ ID NO: 407383 - DNA, 25 bp, Homo sapien
caggacactgtagaaacagggaatg

SEQ ID NO: 407384 - DNA, 25 bp, Homo sapien
ctgctgactataggctcagagccct

SEQ ID NO: 407385 - DNA, 25 bp, Homo sapien
tttatgaagggctttgtttcacagg

SEQ ID NO: 407386 - DNA, 25 bp, Homo sapien
ccaattctcagtatggtggaggagg

SEQ ID NO: 407387 - DNA, 25 bp, Homo sapien
caaagagtgctacaggaattgccaa

SEQ ID NO: 407388 - DNA, 25 bp, Homo sapien
gaagggagctgactagctgtagctc

SEQ ID NO: 407389 - DNA, 25 bp, Homo sapien
gcaaaagcgtcatgcactttacagt

SEQ ID NO: 407390 - DNA, 25 bp, Homo sapien
tggtcatagccaaagattgcagatg

SEQ ID NO: 407391 - DNA, 25 bp, Homo sapien
taatactgatgacagagcaaaagcg

SEQ ID NO: 407392 - DNA, 25 bp, Homo sapien
ttgcctgtcaactaatactgatgac

SEQ ID NO: 407393 - DNA, 25 bp, Homo sapien
catttacaccaattagtcgttttgg

SEQ ID NO: 407394 - DNA, 25 bp, Homo sapien
gatacagattattgcaattttcccc

SEQ ID NO: 407395 - DNA, 25 bp, Homo sapien
cggcttgatatgcatttacaccaat

SEQ ID NO: 407396 - DNA, 25 bp, Homo sapien
ttggaagcaaataccgtgatacaga

SEQ ID NO: 407397 - DNA, 25 bp, Homo sapien
gctcatcaggtaaggctatgaatgt

SEQ ID NO: 407398 - DNA, 25 bp, Homo sapien
caggtaaggctatgaatgtttcaac

SEQ ID NO: 407399 - DNA, 25 bp, Homo sapien
gctatgaatgtttcaacatcactag

SEQ ID NO: 407400 - DNA, 25 bp, Homo sapien
ctgagctcatcaggtaaggctatga

SEQ ID NO: 407401 - DNA, 25 bp, Homo sapien
ctctcagcacacgctcaccagtgtc

SEQ ID NO: 407402 - DNA, 25 bp, Homo sapien
cagcacacgctcaccagtgtctgca

SEQ ID NO: 407403 - DNA, 25 bp, Homo sapien
gctcaccagtgtctgcaaacctaaa

SEQ ID NO: 407404 - DNA, 25 bp, Homo sapien
tcagcacacgctcaccagtgtctgc

SEQ ID NO: 407405 - DNA, 25 bp, Homo sapien
tgcatagtctgtgtctgctccgccc

SEQ ID NO: 407406 - DNA, 25 bp, Homo sapien
agtgggcaacacacaaactctaccc

SEQ ID NO: 407407 - DNA, 25 bp, Homo sapien
cagcaacatgccgtagtcatgcaag

SEQ ID NO: 407408 - DNA, 25 bp, Homo sapien
aacttgtcaattccgcagggcagca

SEQ ID NO: 407409 - DNA, 25 bp, Homo sapien
aaatttgcacaaatctagattagca

SEQ ID NO: 407410 - DNA, 25 bp, Homo sapien
tagcataaagttctgagagcatcca

SEQ ID NO: 407411 - DNA, 25 bp, Homo sapien
tagattagcataaagttctgagagc

SEQ ID NO: 407412 - DNA, 25 bp, Homo sapien
aaatctagattagcataaagttctg

SEQ ID NO: 407413 - DNA, 25 bp, Homo sapien
ctttggcgacggtgtgccagtgaag

SEQ ID NO: 407414 - DNA, 25 bp, Homo sapien
ctctttggcgacggtgtgccagtga

SEQ ID NO: 407415 - DNA, 25 bp, Homo sapien
tctttggcgacggtgtgccagtgaa

SEQ ID NO: 407416 - DNA, 25 bp, Homo sapien
gccagtgaagatgagtttcgcaaac

SEQ ID NO: 407417 - DNA, 25 bp, Homo sapien
gtgtaagaatttgcacttgtcagga

SEQ ID NO: 407418 - DNA, 25 bp, Homo sapien
gaagggcatcacttacaaactcacc

SEQ ID NO: 407419 - DNA, 25 bp, Homo sapien
tgtcaggaacgagaagggcatcact

SEQ ID NO: 407420 - DNA, 25 bp, Homo sapien
gaatttgcacttgtcaggaacgaga

SEQ ID NO: 407421 - DNA, 25 bp, Homo sapien
ggagaccaccaagtaggtcactgtg

SEQ ID NO: 407422 - DNA, 25 bp, Homo sapien
tctgaaatgcaacataaagagggat

SEQ ID NO: 407423 - DNA, 25 bp, Homo sapien
gatagatcagcatagtgaaaccatg

SEQ ID NO: 407424 - DNA, 25 bp, Homo sapien
ggaatacagatcgtccacacagcag

SEQ ID NO: 407425 - DNA, 25 bp, Homo sapien
taaatattgcaaaaggtggcgcggg

SEQ ID NO: 407426 - DNA, 25 bp, Homo sapien
tataggccccgttgatcgatttccc

SEQ ID NO: 407427 - DNA, 25 bp, Homo sapien
tacagggtcagtaggccaagggtct

SEQ ID NO: 407428 - DNA, 25 bp, Homo sapien
tgagtccgacaaccagaatgatagc

SEQ ID NO: 407429 - DNA, 25 bp, Homo sapien
tctctccaaggatggctgattagcc

SEQ ID NO: 407430 - DNA, 25 bp, Homo sapien
catataaaggagtctgatgtctctc

SEQ ID NO: 407431 - DNA, 25 bp, Homo sapien
caaaggtcccatgggaaggccacat

SEQ ID NO: 407432 - DNA, 25 bp, Homo sapien
gatgtctctccaaggatggctgatt

SEQ ID NO: 407433 - DNA, 25 bp, Homo sapien
tatgtgacctaacaggagcatcctc

SEQ ID NO: 407434 - DNA, 25 bp, Homo sapien
cacaaggcccctgttcatgagaatc

SEQ ID NO: 407435 - DNA, 25 bp, Homo sapien
tcccggatccgctactataggcatt

SEQ ID NO: 407436 - DNA, 25 bp, Homo sapien
cctatagggtcagtgcacagaatgt

SEQ ID NO: 407437 - DNA, 25 bp, Homo sapien
ggttggcttctaccacattggtgat

SEQ ID NO: 407438 - DNA, 25 bp, Homo sapien
taagcagcggtagggaatcacaaag

SEQ ID NO: 407439 - DNA, 25 bp, Homo sapien
gatgggtcttgcactgcttgcggcc

SEQ ID NO: 407440 - DNA, 25 bp, Homo sapien
ggatggtcactggttggttggcttc

SEQ ID NO: 407441 - DNA, 25 bp, Homo sapien
atgtgcatgttcagtctgccacaga

SEQ ID NO: 407442 - DNA, 25 bp, Homo sapien
ttggtccctgatggatctgaatccc

SEQ ID NO: 407443 - DNA, 25 bp, Homo sapien
gaacatggcaatctggggttcagcc

SEQ ID NO: 407444 - DNA, 25 bp, Homo sapien
ggatgccttccttggtatcaatgca

SEQ ID NO: 407445 - DNA, 25 bp, Homo sapien
cagaggacttaggtccttacaacaa

SEQ ID NO: 407446 - DNA, 25 bp, Homo sapien
aacaggtcttagattgaaccaagtc

SEQ ID NO: 407447 - DNA, 25 bp, Homo sapien
catgagtgcaaaagctgctggcaaa

SEQ ID NO: 407448 - DNA, 25 bp, Homo sapien
ccaacagaggacttaggtccttaca

SEQ ID NO: 407449 - DNA, 25 bp, Homo sapien
actttacagctattttaatgtcatc

SEQ ID NO: 407450 - DNA, 25 bp, Homo sapien
agttcctgtcaggttttccaccaga

SEQ ID NO: 407451 - DNA, 25 bp, Homo sapien
agaaaatatatgcttcagttcctgt

SEQ ID NO: 407452 - DNA, 25 bp, Homo sapien
gattacggcgctataactgtctcat

SEQ ID NO: 407453 - DNA, 25 bp, Homo sapien
gaatttactccgtgaaagctcactg

SEQ ID NO: 407454 - DNA, 25 bp, Homo sapien
gatgtaaagatagtaagaggccacc

SEQ ID NO: 407455 - DNA, 25 bp, Homo sapien
tacttttaaggaaagggcatcagag

SEQ ID NO: 407456 - DNA, 25 bp, Homo sapien
taaaggtcattaacgcaagtcatat

SEQ ID NO: 407457 - DNA, 25 bp, Homo sapien
aataaaggctatcaggaaccacaat

SEQ ID NO: 407458 - DNA, 25 bp, Homo sapien
tgccatttctataggaataaaggct

SEQ ID NO: 407459 - DNA, 25 bp, Homo sapien
gaagctctccctttgtagagccctc

SEQ ID NO: 407460 - DNA, 25 bp, Homo sapien
gccctcagattcacagaaggaattt

SEQ ID NO: 407461 - DNA, 25 bp, Homo sapien
tacagttcaacttgtccacggactt

SEQ ID NO: 407462 - DNA, 25 bp, Homo sapien
ctacagttcaacttgtccacggact

SEQ ID NO: 407463 - DNA, 25 bp, Homo sapien
gataatccaatggtggagacacaaa

SEQ ID NO: 407464 - DNA, 25 bp, Homo sapien
gagacacaaataaggccaaattggc

SEQ ID NO: 407465 - DNA, 25 bp, Homo sapien
caagggtacaccgaagagctctcag

SEQ ID NO: 407466 - DNA, 25 bp, Homo sapien
ccaaattggctaaccaaaggtgctg

SEQ ID NO: 407467 - DNA, 25 bp, Homo sapien
cccccgacggatgtctttttgacat

SEQ ID NO: 407468 - DNA, 25 bp, Homo sapien
catgcagattatcagcttgaattgc

SEQ ID NO: 407469 - DNA, 25 bp, Homo sapien
aatgcattccttacccccgacggat

SEQ ID NO: 407470 - DNA, 25 bp, Homo sapien
tgcagattatcagcttgaattgcta

SEQ ID NO: 407471 - DNA, 25 bp, Homo sapien
gccaatctccagtcaagagctcctt

SEQ ID NO: 407472 - DNA, 25 bp, Homo sapien
agagctcctttaccctgacactagt

SEQ ID NO: 407473 - DNA, 25 bp, Homo sapien
tgttttctgtgtacggccaatctcc

SEQ ID NO: 407474 - DNA, 25 bp, Homo sapien
tgtgtacggccaatctccagtcaag

SEQ ID NO: 407475 - DNA, 25 bp, Homo sapien
actccggcccaggtaacaagagcga

SEQ ID NO: 407476 - DNA, 25 bp, Homo sapien
ctgcactccggcccaggtaacaaga

SEQ ID NO: 407477 - DNA, 25 bp, Homo sapien
cactgcactccggcccaggtaacaa

SEQ ID NO: 407478 - DNA, 25 bp, Homo sapien
gcactccggcccaggtaacaagagc

SEQ ID NO: 407479 - DNA, 25 bp, Homo sapien
gcacccattagacatttcagcaaac

SEQ ID NO: 407480 - DNA, 25 bp, Homo sapien
actttgcacccattagacatttcag

SEQ ID NO: 407481 - DNA, 25 bp, Homo sapien
tttgcacccattagacatttcagca

SEQ ID NO: 407482 - DNA, 25 bp, Homo sapien
gtactttgcacccattagacatttc

SEQ ID NO: 407483 - DNA, 25 bp, Homo sapien
catgttaaagtacagcatttggagg

SEQ ID NO: 407484 - DNA, 25 bp, Homo sapien
tgtccgtatcaaaccaatcagaacc

SEQ ID NO: 407485 - DNA, 25 bp, Homo sapien
tcctggccctaatctagaacttaac

SEQ ID NO: 407486 - DNA, 25 bp, Homo sapien
taacccattgacttcgcttatgttg

SEQ ID NO: 407487 - DNA, 25 bp, Homo sapien
aatctcaaatataagctcattatca

SEQ ID NO: 407488 - DNA, 25 bp, Homo sapien
taatctcaaatataagctcattatc

SEQ ID NO: 407489 - DNA, 25 bp, Homo sapien
atctcaaatataagctcattatcaa

SEQ ID NO: 407490 - DNA, 25 bp, Homo sapien
cttaatctcaaatataagctcatta

SEQ ID NO: 407491 - DNA, 25 bp, Homo sapien
acaagtcctctaattggtccatttg

SEQ ID NO: 407492 - DNA, 25 bp, Homo sapien
aacaagtcctctaattggtccattt

SEQ ID NO: 407493 - DNA, 25 bp, Homo sapien
aattttagatcgagggagttgctcc

SEQ ID NO: 407494 - DNA, 25 bp, Homo sapien
agatagcattaatgtcaacttgaaa

SEQ ID NO: 407495 - DNA, 25 bp, Homo sapien
gagttgctccttgatgttcaatgtg

SEQ ID NO: 407496 - DNA, 25 bp, Homo sapien
aaaatgatattacaagcaccaatgc

SEQ ID NO: 407497 - DNA, 25 bp, Homo sapien
ccaccgcaccaggccataaattagt

SEQ ID NO: 407498 - DNA, 25 bp, Homo sapien
gccaccgcaccaggccataaattag

SEQ ID NO: 407499 - DNA, 25 bp, Homo sapien
ttcattatgtttgtcctggacagct

SEQ ID NO: 407500 - DNA, 25 bp, Homo sapien
acattcattatgtttgtcctggaca

SEQ ID NO: 407501 - DNA, 25 bp, Homo sapien
attcattatgtttgtcctggacagc

SEQ ID NO: 407502 - DNA, 25 bp, Homo sapien
cattcattatgtttgtcctggacag

SEQ ID NO: 407503 - DNA, 25 bp, Homo sapien
ctggattctgtggtataagaggatt

SEQ ID NO: 407504 - DNA, 25 bp, Homo sapien
acaagcaggaataagtgattccaaa

SEQ ID NO: 407505 - DNA, 25 bp, Homo sapien
caattcaactagcagcagttctgta

SEQ ID NO: 407506 - DNA, 25 bp, Homo sapien
ctatgggttagccaagaacgcccct

SEQ ID NO: 407507 - DNA, 25 bp, Homo sapien
tgttgagaaggttgcacagctgttc

SEQ ID NO: 407508 - DNA, 25 bp, Homo sapien
gaacgtaattctttatcaccacaac

SEQ ID NO: 407509 - DNA, 25 bp, Homo sapien
gaaaagtgtgtgatcacaatcaaca

SEQ ID NO: 407510 - DNA, 25 bp, Homo sapien
aatgactgaacgtgatgtattgaca

SEQ ID NO: 407511 - DNA, 25 bp, Homo sapien
ccacagggtgacagcgtttccaagg

SEQ ID NO: 407512 - DNA, 25 bp, Homo sapien
ggtttgcaaaagacggcatttccca

SEQ ID NO: 407513 - DNA, 25 bp, Homo sapien
tctgtgtacagatgagggtgttatc

SEQ ID NO: 407514 - DNA, 25 bp, Homo sapien
tgttatctgtacactggctgtgaga

SEQ ID NO: 407515 - DNA, 25 bp, Homo sapien
gttcatctcatactctgcccatcaa

SEQ ID NO: 407516 - DNA, 25 bp, Homo sapien
tcaagatgctactgaagctctctgg

SEQ ID NO: 407517 - DNA, 25 bp, Homo sapien
tatcctcctcgttgccactgttcat

SEQ ID NO: 407518 - DNA, 25 bp, Homo sapien
tttcataatcaagcatagtcaagtg

SEQ ID NO: 407519 - DNA, 25 bp, Homo sapien
agtcgaactaaaccttacattctgg

SEQ ID NO: 407520 - DNA, 25 bp, Homo sapien
gatgctttgtaagattctcaaggta

SEQ ID NO: 407521 - DNA, 25 bp, Homo sapien
gaggtaatgaggtatgcagtcgaac

SEQ ID NO: 407522 - DNA, 25 bp, Homo sapien
tatcatgtgcatgttttatttaccc

SEQ ID NO: 407523 - DNA, 25 bp, Homo sapien
aaaatagagatcctctagcaacaag

SEQ ID NO: 407524 - DNA, 25 bp, Homo sapien
tggccacgtgaaatgcaagtaatag

SEQ ID NO: 407525 - DNA, 25 bp, Homo sapien
gaagactctagtatgcaaaaaacag

SEQ ID NO: 407526 - DNA, 25 bp, Homo sapien
gacttaacataaagacaacctctcc

SEQ ID NO: 407527 - DNA, 25 bp, Homo sapien
tattccatctagtaacttctccgca

SEQ ID NO: 407528 - DNA, 25 bp, Homo sapien
cttgcaaatgtcgttcaggagcctc

SEQ ID NO: 407529 - DNA, 25 bp, Homo sapien
cttctccgcagtactaatagccttg

SEQ ID NO: 407530 - DNA, 25 bp, Homo sapien
cctcagtcaggaccagtattattcc

SEQ ID NO: 407531 - DNA, 25 bp, Homo sapien
tggttccggtgacaagagaaaagct

SEQ ID NO: 407532 - DNA, 25 bp, Homo sapien
gttccggtgacaagagaaaagcttc

SEQ ID NO: 407533 - DNA, 25 bp, Homo sapien
ctggttccggtgacaagagaaaagc

SEQ ID NO: 407534 - DNA, 25 bp, Homo sapien
tccggtgacaagagaaaagcttctg

SEQ ID NO: 407535 - DNA, 25 bp, Homo sapien
tagcgaggtactagtcagtagcagc

SEQ ID NO: 407536 - DNA, 25 bp, Homo sapien
tgtgtcggcttctacctttagcgag

SEQ ID NO: 407537 - DNA, 25 bp, Homo sapien
tcgattagcaagaaccgtgactcct

SEQ ID NO: 407538 - DNA, 25 bp, Homo sapien
gatgattgtgactaggttaaaccct

SEQ ID NO: 407539 - DNA, 25 bp, Homo sapien
ctgcagcagacctattttctaagct

SEQ ID NO: 407540 - DNA, 25 bp, Homo sapien
tagccaaggccccattatcattgcc

SEQ ID NO: 407541 - DNA, 25 bp, Homo sapien
ataaccatgtttcccccgatagcca

SEQ ID NO: 407542 - DNA, 25 bp, Homo sapien
tcatcaacccagataataaccatgt

SEQ ID NO: 407543 - DNA, 25 bp, Homo sapien
cgaagtccgaagtgaaatacagcct

SEQ ID NO: 407544 - DNA, 25 bp, Homo sapien
gttaagatgccaaacaggaacccaa

SEQ ID NO: 407545 - DNA, 25 bp, Homo sapien
cagtcattgtgcacaggcgttagct

SEQ ID NO: 407546 - DNA, 25 bp, Homo sapien
gaattacaggaaaacatctgcccgg

SEQ ID NO: 407547 - DNA, 25 bp, Homo sapien
agacaaacgcctccttggatgcaca

SEQ ID NO: 407548 - DNA, 25 bp, Homo sapien
ccgtcttaatcttcactcaattcga

SEQ ID NO: 407549 - DNA, 25 bp, Homo sapien
tcgatccttttatctgcaccctaaa

SEQ ID NO: 407550 - DNA, 25 bp, Homo sapien
agaggccgcgccttaatcagacaaa

SEQ ID NO: 407551 - DNA, 25 bp, Homo sapien
catttctcgcaagttacacaaaagg

SEQ ID NO: 407552 - DNA, 25 bp, Homo sapien
cagagcttagggtgcgagcgaactc

SEQ ID NO: 407553 - DNA, 25 bp, Homo sapien
ggtggctatgggtctccgacccctc

SEQ ID NO: 407554 - DNA, 25 bp, Homo sapien
tcggtggcgcactgagactaacgcg

SEQ ID NO: 407555 - DNA, 25 bp, Homo sapien
gatgcgctggacgtccgcaagcggg

SEQ ID NO: 407556 - DNA, 25 bp, Homo sapien
cgattcaagagcgaaggactggctt

SEQ ID NO: 407557 - DNA, 25 bp, Homo sapien
actggctttagggacgctgcgtttt

SEQ ID NO: 407558 - DNA, 25 bp, Homo sapien
cggcttctctgcattaaagacttgg

SEQ ID NO: 407559 - DNA, 25 bp, Homo sapien
caggagcagtgccaaaccgggcagc

SEQ ID NO: 407560 - DNA, 25 bp, Homo sapien
ggagcagtgccaaaccgggcagcat

SEQ ID NO: 407561 - DNA, 25 bp, Homo sapien
aggagcagtgccaaaccgggcagca

SEQ ID NO: 407562 - DNA, 25 bp, Homo sapien
gcaggagcagtgccaaaccgggcag

SEQ ID NO: 407563 - DNA, 25 bp, Homo sapien
tgcgagtgggatccgccgcgtcctt

SEQ ID NO: 407564 - DNA, 25 bp, Homo sapien
tgctctcgcctaccgctgccgagga

SEQ ID NO: 407565 - DNA, 25 bp, Homo sapien
ccgcgtccttgctctgcccgcgccg

SEQ ID NO: 407566 - DNA, 25 bp, Homo sapien
caccgagtgcgctgctgtgcgagtg

SEQ ID NO: 407567 - DNA, 25 bp, Homo sapien
ctgacggagcccgagcgcggcggcg

SEQ ID NO: 407568 - DNA, 25 bp, Homo sapien
tgacggagcccgagcgcggcggcgg

SEQ ID NO: 407569 - DNA, 25 bp, Homo sapien
gacggagcccgagcgcggcggcggg

SEQ ID NO: 407570 - DNA, 25 bp, Homo sapien
cggagcccgagcgcggcggcggggc

SEQ ID NO: 407571 - DNA, 25 bp, Homo sapien
tagaaaagtcgagagcgctcctgct

SEQ ID NO: 407572 - DNA, 25 bp, Homo sapien
tataaaggactgctgctagggtgcg

SEQ ID NO: 407573 - DNA, 25 bp, Homo sapien
tgagtcctaggacgctgaggctcta

SEQ ID NO: 407574 - DNA, 25 bp, Homo sapien
tgctcgtccccgtgagcttgaatca

SEQ ID NO: 407575 - DNA, 25 bp, Homo sapien
gttgttcactttctgcaccacattt

SEQ ID NO: 407576 - DNA, 25 bp, Homo sapien
tgttcactttctgcaccacatttac

SEQ ID NO: 407577 - DNA, 25 bp, Homo sapien
ccagttgttcactttctgcaccaca

SEQ ID NO: 407578 - DNA, 25 bp, Homo sapien
cagttgttcactttctgcaccacat

SEQ ID NO: 407579 - DNA, 25 bp, Homo sapien
ccaccgcaattccgtatttgttccg

SEQ ID NO: 407580 - DNA, 25 bp, Homo sapien
ttccgtatttgttccgggtctgcat

SEQ ID NO: 407581 - DNA, 25 bp, Homo sapien
caccgcaattccgtatttgttccgg

SEQ ID NO: 407582 - DNA, 25 bp, Homo sapien
caattccgtatttgttccgggtctg

SEQ ID NO: 407583 - DNA, 25 bp, Homo sapien
tgctctatgcgtgcttgcttgcatg

SEQ ID NO: 407584 - DNA, 25 bp, Homo sapien
ctatgcgtgcttgcttgcatgtcat

SEQ ID NO: 407585 - DNA, 25 bp, Homo sapien
ttcttgctctatgcgtgcttgcttg

SEQ ID NO: 407586 - DNA, 25 bp, Homo sapien
ttttcttgctctatgcgtgcttgct

SEQ ID NO: 407587 - DNA, 25 bp, Homo sapien
catactgccaatacagatttaatag

SEQ ID NO: 407588 - DNA, 25 bp, Homo sapien
tgaactgtacaagagttatttattt

SEQ ID NO: 407589 - DNA, 25 bp, Homo sapien
catgatgtacaaaactttggatgaa

SEQ ID NO: 407590 - DNA, 25 bp, Homo sapien
gcaaatgccattatacatactgcca

SEQ ID NO: 407591 - DNA, 25 bp, Homo sapien
gatgactgcagttttacaaaaatgg

SEQ ID NO: 407592 - DNA, 25 bp, Homo sapien
aaaacataccacagtataaacagta

SEQ ID NO: 407593 - DNA, 25 bp, Homo sapien
cttatcacagcttggttgagtttaa

SEQ ID NO: 407594 - DNA, 25 bp, Homo sapien
ttaaaaggtccaagatgactgcagt

SEQ ID NO: 407595 - DNA, 25 bp, Homo sapien
aacgatgacgtttccaccctttgct

SEQ ID NO: 407596 - DNA, 25 bp, Homo sapien
tcagcctagagttacacaatcttca

SEQ ID NO: 407597 - DNA, 25 bp, Homo sapien
gcttgggtcattgaatgtctcagga

SEQ ID NO: 407598 - DNA, 25 bp, Homo sapien
aagaagaatgaggagctcgacccac

SEQ ID NO: 407599 - DNA, 25 bp, Homo sapien
tagtggaggacaatcaggtcactgc

SEQ ID NO: 407600 - DNA, 25 bp, Homo sapien
tcgctttcctcgagagaatgttaaa

SEQ ID NO: 407601 - DNA, 25 bp, Homo sapien
ttcacactctcgctttcctcgagag

SEQ ID NO: 407602 - DNA, 25 bp, Homo sapien
gctgtcttcctctagggtagtggag

SEQ ID NO: 407603 - DNA, 25 bp, Homo sapien
gctactactgctatatcctgaacca

SEQ ID NO: 407604 - DNA, 25 bp, Homo sapien
tccttatgacccagagaggctcata

SEQ ID NO: 407605 - DNA, 25 bp, Homo sapien
tgaaccagggctttggctaagcagg

SEQ ID NO: 407606 - DNA, 25 bp, Homo sapien
gggatgtccaagtgcattccttatg

SEQ ID NO: 407607 - DNA, 25 bp, Homo sapien
aatatgtcaactccctatagtgaat

SEQ ID NO: 407608 - DNA, 25 bp, Homo sapien
aaatatgtcaactccctatagtgaa

SEQ ID NO: 407609 - DNA, 25 bp, Homo sapien
taaaatatgtcaactccctatagtg

SEQ ID NO: 407610 - DNA, 25 bp, Homo sapien
tataaaatatgtcaactccctatag

SEQ ID NO: 407611 - DNA, 25 bp, Homo sapien
cattcatctgaataaattagcctca

SEQ ID NO: 407612 - DNA, 25 bp, Homo sapien
caaacctggagactcatcccggggg

SEQ ID NO: 407613 - DNA, 25 bp, Homo sapien
caaagagcgcacctgcaatgtagtg

SEQ ID NO: 407614 - DNA, 25 bp, Homo sapien
gcaccaggtctctgcagtagctccc

SEQ ID NO: 407615 - DNA, 25 bp, Homo sapien
caatcacaacaacgggcccctccag

SEQ ID NO: 407616 - DNA, 25 bp, Homo sapien
aggccaatcacaacaacgggcccct

SEQ ID NO: 407617 - DNA, 25 bp, Homo sapien
tcaggccaatcacaacaacgggccc

SEQ ID NO: 407618 - DNA, 25 bp, Homo sapien
ggccaatcacaacaacgggcccctc

SEQ ID NO: 407619 - DNA, 25 bp, Homo sapien
gttttcagggcaccatccccccatc

SEQ ID NO: 407620 - DNA, 25 bp, Homo sapien
ttgttttcagggcaccatcccccca

SEQ ID NO: 407621 - DNA, 25 bp, Homo sapien
tgcccttgttttcagggcaccatcc

SEQ ID NO: 407622 - DNA, 25 bp, Homo sapien
tttcagggcaccatccccccatcct

SEQ ID NO: 407623 - DNA, 25 bp, Homo sapien
gggggtctgggggactgatgttcca

SEQ ID NO: 407624 - DNA, 25 bp, Homo sapien
ggtctgggggactgatgttccacaa

SEQ ID NO: 407625 - DNA, 25 bp, Homo sapien
gggggactgatgttccacaagccat

SEQ ID NO: 407626 - DNA, 25 bp, Homo sapien
tctgggggactgatgttccacaagc

SEQ ID NO: 407627 - DNA, 25 bp, Homo sapien
tccttgtagaccacatcactagagt

SEQ ID NO: 407628 - DNA, 25 bp, Homo sapien
cttgccagttaattggcttccaata

SEQ ID NO: 407629 - DNA, 25 bp, Homo sapien
atgattcatccttgtagaccacatc

SEQ ID NO: 407630 - DNA, 25 bp, Homo sapien
tagaccacatcactagagttccctt

SEQ ID NO: 407631 - DNA, 25 bp, Homo sapien
tctatgtgagtgatgagttctgttt

SEQ ID NO: 407632 - DNA, 25 bp, Homo sapien
cctctgaaacatgtgatctgcattc

SEQ ID NO: 407633 - DNA, 25 bp, Homo sapien
gtcattggcatctatgtgagtgatg

SEQ ID NO: 407634 - DNA, 25 bp, Homo sapien
ctctgaaacatgtgatctgcattcc

SEQ ID NO: 407635 - DNA, 25 bp, Homo sapien
tgctacttctaaacaactatataaa

SEQ ID NO: 407636 - DNA, 25 bp, Homo sapien
aataagtgagtgaattagcatacac

SEQ ID NO: 407637 - DNA, 25 bp, Homo sapien
taatttgatgtgtatagagcagagg

SEQ ID NO: 407638 - DNA, 25 bp, Homo sapien
tgtgcatcaaaacgtattcacagaa

SEQ ID NO: 407639 - DNA, 25 bp, Homo sapien
atctcttatttgcgtttcggtacct

SEQ ID NO: 407640 - DNA, 25 bp, Homo sapien
ggtggtcgttgaaaattttgaagca

SEQ ID NO: 407641 - DNA, 25 bp, Homo sapien
tgcgtttcggtaccttttcacacaa

SEQ ID NO: 407642 - DNA, 25 bp, Homo sapien
ttgcgtttcggtaccttttcacaca

SEQ ID NO: 407643 - DNA, 25 bp, Homo sapien
catagattttattggatcctcttcc

SEQ ID NO: 407644 - DNA, 25 bp, Homo sapien
gtagctaggcagctgtgaaatgaag

SEQ ID NO: 407645 - DNA, 25 bp, Homo sapien
gccaccatccattgtgttagaaaca

SEQ ID NO: 407646 - DNA, 25 bp, Homo sapien
tagaaacatatatcactcactgtag

SEQ ID NO: 407647 - DNA, 25 bp, Homo sapien
taaaagtggagttgccctgcacaag

SEQ ID NO: 407648 - DNA, 25 bp, Homo sapien
tactgggtgtcatttgtggtgcccc

SEQ ID NO: 407649 - DNA, 25 bp, Homo sapien
acttactttggtgcgatctaggccc

SEQ ID NO: 407650 - DNA, 25 bp, Homo sapien
aaagagttcccagcatgttttcctg

SEQ ID NO: 407651 - DNA, 25 bp, Homo sapien
gagcatagatcaccataaaggagag

SEQ ID NO: 407652 - DNA, 25 bp, Homo sapien
gcttgcaggccttgctgaaaggctc

SEQ ID NO: 407653 - DNA, 25 bp, Homo sapien
tgaaaggctcaagacctcaaggcct

SEQ ID NO: 407654 - DNA, 25 bp, Homo sapien
caaggccttgccgaaagaaccctat

SEQ ID NO: 407655 - DNA, 25 bp, Homo sapien
tcttctccgacaccctgagagttgg

SEQ ID NO: 407656 - DNA, 25 bp, Homo sapien
taaatttcagggcaatccttggccc

SEQ ID NO: 407657 - DNA, 25 bp, Homo sapien
gactaatttgatatattacctccac

SEQ ID NO: 407658 - DNA, 25 bp, Homo sapien
cccctggagttttcttagcaagact

SEQ ID NO: 407659 - DNA, 25 bp, Homo sapien
atcctatcagccctacccggtttag

SEQ ID NO: 407660 - DNA, 25 bp, Homo sapien
tgtgataactaaggacatttgttcc

SEQ ID NO: 407661 - DNA, 25 bp, Homo sapien
gttcctttctgtgtaatcgcttcaa

SEQ ID NO: 407662 - DNA, 25 bp, Homo sapien
tcttgcttctaatctgaatccaggc

SEQ ID NO: 407663 - DNA, 25 bp, Homo sapien
taatccagttgagaatgcctgtctg

SEQ ID NO: 407664 - DNA, 25 bp, Homo sapien
gactttggccttgcatgcttattgg

SEQ ID NO: 407665 - DNA, 25 bp, Homo sapien
aggtggaggccatctgacagtgaca

SEQ ID NO: 407666 - DNA, 25 bp, Homo sapien
gacagtctctactaggccagtggga

SEQ ID NO: 407667 - DNA, 25 bp, Homo sapien
tcagcttgaacactgaggcagttgc

SEQ ID NO: 407668 - DNA, 25 bp, Homo sapien
cctgtgctttaccaaaatccctcat

SEQ ID NO: 407669 - DNA, 25 bp, Homo sapien
cactctgattcaagaggaggatgca

SEQ ID NO: 407670 - DNA, 25 bp, Homo sapien
ggcgaaagttacaaatagtccactc

SEQ ID NO: 407671 - DNA, 25 bp, Homo sapien
gaggatgcatggtgaaaagtgttaa

SEQ ID NO: 407672 - DNA, 25 bp, Homo sapien
gtgtgatctagggtcagtgtctgta

SEQ ID NO: 407673 - DNA, 25 bp, Homo sapien
ggatgtttcgaacaagtccatgaat

SEQ ID NO: 407674 - DNA, 25 bp, Homo sapien
gaagaaggatgtttcgaacaagtcc

SEQ ID NO: 407675 - DNA, 25 bp, Homo sapien
gagtcacaaatagaagaaggatgtt

SEQ ID NO: 407676 - DNA, 25 bp, Homo sapien
caagtccatgaataagatgtattca

SEQ ID NO: 407677 - DNA, 25 bp, Homo sapien
atgttttgtgaacgtgaagactttc

SEQ ID NO: 407678 - DNA, 25 bp, Homo sapien
gttttgtgaacgtgaagactttctg

SEQ ID NO: 407679 - DNA, 25 bp, Homo sapien
tgtgaacgtgaagactttctgaaag

SEQ ID NO: 407680 - DNA, 25 bp, Homo sapien
tttgtgaacgtgaagactttctgaa

SEQ ID NO: 407681 - DNA, 25 bp, Homo sapien
tactccatgactagcagcaataggg

SEQ ID NO: 407682 - DNA, 25 bp, Homo sapien
gaagctttggcagtcctaggtctaa

SEQ ID NO: 407683 - DNA, 25 bp, Homo sapien
gaagtcgatggctacccatatggag

SEQ ID NO: 407684 - DNA, 25 bp, Homo sapien
aatgaaagtgtctcagtcagggcct

SEQ ID NO: 407685 - DNA, 25 bp, Homo sapien
ggcactttgagagtcttagccacag

SEQ ID NO: 407686 - DNA, 25 bp, Homo sapien
tcagcctttggaccttactggcagg

SEQ ID NO: 407687 - DNA, 25 bp, Homo sapien
cacagtgtaattgggtctgaccaca

SEQ ID NO: 407688 - DNA, 25 bp, Homo sapien
ctttatgtaagtcagggagcccctc

SEQ ID NO: 407689 - DNA, 25 bp, Homo sapien
tcccactttatttttgcgagtctgt

SEQ ID NO: 407690 - DNA, 25 bp, Homo sapien
tggtaaaaggcaacaatttgatgtc

SEQ ID NO: 407691 - DNA, 25 bp, Homo sapien
ttttgctccctgacctaaaatcctg

SEQ ID NO: 407692 - DNA, 25 bp, Homo sapien
taaggaaatctacagaagggaatct

SEQ ID NO: 407693 - DNA, 25 bp, Homo sapien
ttctggagcgtgtctctaccaagag

SEQ ID NO: 407694 - DNA, 25 bp, Homo sapien
tctgaggcccaatgaacccatctac

SEQ ID NO: 407695 - DNA, 25 bp, Homo sapien
cctaaaatacgagcagaacttctga

SEQ ID NO: 407696 - DNA, 25 bp, Homo sapien
catcaggacctcaaacagtgctagg

SEQ ID NO: 407697 - DNA, 25 bp, Homo sapien
gctttgagcagagtagaaatcctat

SEQ ID NO: 407698 - DNA, 25 bp, Homo sapien
tgcttaggtggatcagcagatctct

SEQ ID NO: 407699 - DNA, 25 bp, Homo sapien
tatctcctagcagggatattccacc

SEQ ID NO: 407700 - DNA, 25 bp, Homo sapien
tattccaggcaagatcgcccattgg

SEQ ID NO: 407701 - DNA, 25 bp, Homo sapien
catctcgtggtcgtgaccgtagggt

SEQ ID NO: 407702 - DNA, 25 bp, Homo sapien
tttccttgcgtttccaggataagga

SEQ ID NO: 407703 - DNA, 25 bp, Homo sapien
ggaggcaagtctgcacagtattcca

SEQ ID NO: 407704 - DNA, 25 bp, Homo sapien
ccttgcgtttccaggataaggaggg

SEQ ID NO: 407705 - DNA, 25 bp, Homo sapien
agcaaccagtctgatgaactgccag

SEQ ID NO: 407706 - DNA, 25 bp, Homo sapien
gatgctgcttggaaactgacatgcc

SEQ ID NO: 407707 - DNA, 25 bp, Homo sapien
gaactgccagtagctgaatcatcat

SEQ ID NO: 407708 - DNA, 25 bp, Homo sapien
tgacatgccttaattgcctactgtg

SEQ ID NO: 407709 - DNA, 25 bp, Homo sapien
tgttttacatcttgtccactgtttg

SEQ ID NO: 407710 - DNA, 25 bp, Homo sapien
tatttcatcttgtaagggtatacaa

SEQ ID NO: 407711 - DNA, 25 bp, Homo sapien
tgataacagctaggtttgacactgt

SEQ ID NO: 407712 - DNA, 25 bp, Homo sapien
ccaggaattaattagctggcttaag

SEQ ID NO: 407713 - DNA, 25 bp, Homo sapien
tgatttcaacatccacctaaccctg

SEQ ID NO: 407714 - DNA, 25 bp, Homo sapien
tgttatcaatatctgtggtgtgtcc

SEQ ID NO: 407715 - DNA, 25 bp, Homo sapien
gaagacttaacatctggcccatggt

SEQ ID NO: 407716 - DNA, 25 bp, Homo sapien
tcagcactgatttatgggccatcac

SEQ ID NO: 407717 - DNA, 25 bp, Homo sapien
catatatatctattggatcagatgc

SEQ ID NO: 407718 - DNA, 25 bp, Homo sapien
tcactagcaggtagacacagtgggt

SEQ ID NO: 407719 - DNA, 25 bp, Homo sapien
tgtgtttaaagctgttctctcgacc

SEQ ID NO: 407720 - DNA, 25 bp, Homo sapien
tctctcgacctaatgaagatatatg

SEQ ID NO: 407721 - DNA, 25 bp, Homo sapien
ccacgcgggtcgccctgtggttctt

SEQ ID NO: 407722 - DNA, 25 bp, Homo sapien
tgttgatgtgagtcgtcctgaggat

SEQ ID NO: 407723 - DNA, 25 bp, Homo sapien
gcatatggcaatcccagcaatgacc

SEQ ID NO: 407724 - DNA, 25 bp, Homo sapien
caggataggaggagacggtgttgat

SEQ ID NO: 407725 - DNA, 25 bp, Homo sapien
aaacaatgcccgcaattgcagtgcc

SEQ ID NO: 407726 - DNA, 25 bp, Homo sapien
ccaaaaacaatgcccgcaattgcag

SEQ ID NO: 407727 - DNA, 25 bp, Homo sapien
aaaaacaatgcccgcaattgcagtg

SEQ ID NO: 407728 - DNA, 25 bp, Homo sapien
aacaatgcccgcaattgcagtgccc

SEQ ID NO: 407729 - DNA, 25 bp, Homo sapien
ggagactcacgtccttcagttgttg

SEQ ID NO: 407730 - DNA, 25 bp, Homo sapien
gatgcagtctcttaatctttgaaag

SEQ ID NO: 407731 - DNA, 25 bp, Homo sapien
gaactttctggatcgattctctaac

SEQ ID NO: 407732 - DNA, 25 bp, Homo sapien
aatttcataatgtgcctgggtttaa

SEQ ID NO: 407733 - DNA, 25 bp, Homo sapien
taaccccgggtatcagcaatctgtt

SEQ ID NO: 407734 - DNA, 25 bp, Homo sapien
cctcagcgtaatgcctttggaatcc

SEQ ID NO: 407735 - DNA, 25 bp, Homo sapien
cccgtaatggctagcaaggttgaac

SEQ ID NO: 407736 - DNA, 25 bp, Homo sapien
agagatcctctctgcgtccttgcca

SEQ ID NO: 407737 - DNA, 25 bp, Homo sapien
gtaacacttttaggcttagcactgc

SEQ ID NO: 407738 - DNA, 25 bp, Homo sapien
ggatacgacccaatttacaaatgca

SEQ ID NO: 407739 - DNA, 25 bp, Homo sapien
gataatgttgccatgttgcagtaac

SEQ ID NO: 407740 - DNA, 25 bp, Homo sapien
tattaaatgtatctatggtggctga

SEQ ID NO: 407741 - DNA, 25 bp, Homo sapien
tccagacaaggtctaactgcgtcac

SEQ ID NO: 407742 - DNA, 25 bp, Homo sapien
ttccagacaaggtctaactgcgtca

SEQ ID NO: 407743 - DNA, 25 bp, Homo sapien
ccagacaaggtctaactgcgtcacc

SEQ ID NO: 407744 - DNA, 25 bp, Homo sapien
aactctgatggcaagtagactccag

SEQ ID NO: 407745 - DNA, 25 bp, Homo sapien
agacaatgagtccacgtgcctaacc

SEQ ID NO: 407746 - DNA, 25 bp, Homo sapien
cagtcaatgacctggcagaacagca

SEQ ID NO: 407747 - DNA, 25 bp, Homo sapien
taaatatggaggctcacacagtcaa

SEQ ID NO: 407748 - DNA, 25 bp, Homo sapien
tagacctgccatttgtaaccactga

SEQ ID NO: 407749 - DNA, 25 bp, Homo sapien
tagggtctagcttcgtgcgcattaa

SEQ ID NO: 407750 - DNA, 25 bp, Homo sapien
tgtatcaattcacatggccaaggcc

SEQ ID NO: 407751 - DNA, 25 bp, Homo sapien
cgtgattggcgttgggaacctacct

SEQ ID NO: 407752 - DNA, 25 bp, Homo sapien
cccagaaaggtatcacaaagagtgc

SEQ ID NO: 407753 - DNA, 25 bp, Homo sapien
ttactgttcccagaggagtgacctc

SEQ ID NO: 407754 - DNA, 25 bp, Homo sapien
tggatttgatgggtaccagactgca

SEQ ID NO: 407755 - DNA, 25 bp, Homo sapien
cactgtggaatagcaccctgaatgt

SEQ ID NO: 407756 - DNA, 25 bp, Homo sapien
gaagatttatgccagggttgagcca

SEQ ID NO: 407757 - DNA, 25 bp, Homo sapien
agagaagatttatgccagggttgag

SEQ ID NO: 407758 - DNA, 25 bp, Homo sapien
aagatttatgccagggttgagccat

SEQ ID NO: 407759 - DNA, 25 bp, Homo sapien
gagaagatttatgccagggttgagc

SEQ ID NO: 407760 - DNA, 25 bp, Homo sapien
ctcttctaggtcctgagagtaccac

SEQ ID NO: 407761 - DNA, 25 bp, Homo sapien
gtcagcctggagctcttctaggtcc

SEQ ID NO: 407762 - DNA, 25 bp, Homo sapien
tcagatgtgggccacataggaaaga

SEQ ID NO: 407763 - DNA, 25 bp, Homo sapien
acataggaaagagggtcagcctgga

SEQ ID NO: 407764 - DNA, 25 bp, Homo sapien
ccagtggcttaggacagtacttatc

SEQ ID NO: 407765 - DNA, 25 bp, Homo sapien
caatgggccacaataggagagtctg

SEQ ID NO: 407766 - DNA, 25 bp, Homo sapien
ctgtgtctaagtactggaggctgct

SEQ ID NO: 407767 - DNA, 25 bp, Homo sapien
gcagacacttgtagcagatgccagc

SEQ ID NO: 407768 - DNA, 25 bp, Homo sapien
ctcatggagcattgatatggttcta

SEQ ID NO: 407769 - DNA, 25 bp, Homo sapien
tgcagcctcaaccactggcgttcaa

SEQ ID NO: 407770 - DNA, 25 bp, Homo sapien
gatgtctttattcagaactgctctc

SEQ ID NO: 407771 - DNA, 25 bp, Homo sapien
tagctggaaactatagtcacatacc

SEQ ID NO: 407772 - DNA, 25 bp, Homo sapien
tttcaaacttgggtgtgatcactcc

SEQ ID NO: 407773 - DNA, 25 bp, Homo sapien
gattgttaagaaaggagtgatttca

SEQ ID NO: 407774 - DNA, 25 bp, Homo sapien
tgtttctcagcactcacactgattg

SEQ ID NO: 407775 - DNA, 25 bp, Homo sapien
gattgactgaacacagccatgttga

SEQ ID NO: 407776 - DNA, 25 bp, Homo sapien
actgcacctgtataagatggtgaac

SEQ ID NO: 407777 - DNA, 25 bp, Homo sapien
acaaactgcacctgtataagatggt

SEQ ID NO: 407778 - DNA, 25 bp, Homo sapien
aaactgcacctgtataagatggtga

SEQ ID NO: 407779 - DNA, 25 bp, Homo sapien
aattactttcggccaccacaaactg

SEQ ID NO: 407780 - DNA, 25 bp, Homo sapien
ccgatgagtgctttacaatggcaaa

SEQ ID NO: 407781 - DNA, 25 bp, Homo sapien
tctttgccaaactgcgggtaataca

SEQ ID NO: 407782 - DNA, 25 bp, Homo sapien
tagcatggctctcaaatcacggttg

SEQ ID NO: 407783 - DNA, 25 bp, Homo sapien
tgaagaatccacagaccgatgagtg

SEQ ID NO: 407784 - DNA, 25 bp, Homo sapien
gaatcacagaatcagtttgacttca

SEQ ID NO: 407785 - DNA, 25 bp, Homo sapien
gagccagatgaccaaagaatcacag

SEQ ID NO: 407786 - DNA, 25 bp, Homo sapien
agagctaagctaggagccagatgac

SEQ ID NO: 407787 - DNA, 25 bp, Homo sapien
cagcacactccatgatatagttagt

SEQ ID NO: 407788 - DNA, 25 bp, Homo sapien
gatagcgatgtgttaatatctccag

SEQ ID NO: 407789 - DNA, 25 bp, Homo sapien
atatagtccattagatagcgatgtg

SEQ ID NO: 407790 - DNA, 25 bp, Homo sapien
attgccaaatctgacgaatactcac

SEQ ID NO: 407791 - DNA, 25 bp, Homo sapien
tgcccacaactatcacttagtactt

SEQ ID NO: 407792 - DNA, 25 bp, Homo sapien
atattcccaatataagcgtagtagg

SEQ ID NO: 407793 - DNA, 25 bp, Homo sapien
caacagtagggcgtggttccatcac

SEQ ID NO: 407794 - DNA, 25 bp, Homo sapien
cagtaagatttgcaatctttgccac

SEQ ID NO: 407795 - DNA, 25 bp, Homo sapien
taagcgtagtaggagcaacagtagg

SEQ ID NO: 407796 - DNA, 25 bp, Homo sapien
gcaagacccctggacgcacgggtag

SEQ ID NO: 407797 - DNA, 25 bp, Homo sapien
gcaggaccaacttcggaagcaagac

SEQ ID NO: 407798 - DNA, 25 bp, Homo sapien
gcacgggtagcctcggagcgtccat

SEQ ID NO: 407799 - DNA, 25 bp, Homo sapien
ctgcgtagacaaagagcaggaccaa

SEQ ID NO: 407800 - DNA, 25 bp, Homo sapien
gactgcgggactccgcggagctggg

SEQ ID NO: 407801 - DNA, 25 bp, Homo sapien
ccattgcctagggagccttccaagg

SEQ ID NO: 407802 - DNA, 25 bp, Homo sapien
gtggagcagagacccggccattgcc

SEQ ID NO: 407803 - DNA, 25 bp, Homo sapien
ttggagcgaagggagagcccggaac

SEQ ID NO: 407804 - DNA, 25 bp, Homo sapien
tttcatctccgcgggtggcaacgac

SEQ ID NO: 407805 - DNA, 25 bp, Homo sapien
ttcatctccgcgggtggcaacgact

SEQ ID NO: 407806 - DNA, 25 bp, Homo sapien
atttcatctccgcgggtggcaacga

SEQ ID NO: 407807 - DNA, 25 bp, Homo sapien
gatttctctggacgataaattaaaa

SEQ ID NO: 407808 - DNA, 25 bp, Homo sapien
ttctctggacgataaattaaaaatg

SEQ ID NO: 407809 - DNA, 25 bp, Homo sapien
cagggatttctctggacgataaatt

SEQ ID NO: 407810 - DNA, 25 bp, Homo sapien
ctatttgcttttaacctctgctact

SEQ ID NO: 407811 - DNA, 25 bp, Homo sapien
cataaacggttctctgctgggtgtc

SEQ ID NO: 407812 - DNA, 25 bp, Homo sapien
caaaagcataaacggttctctgctg

SEQ ID NO: 407813 - DNA, 25 bp, Homo sapien
tctcaaaagcataaacggttctctg

SEQ ID NO: 407814 - DNA, 25 bp, Homo sapien
aaagcataaacggttctctgctggg

SEQ ID NO: 407815 - DNA, 25 bp, Homo sapien
gcacagatgggtgcacagatggtca

SEQ ID NO: 407816 - DNA, 25 bp, Homo sapien
cacagatgggtgcacagatggtcat

SEQ ID NO: 407817 - DNA, 25 bp, Homo sapien
tattctacgggagctgctctcagca

SEQ ID NO: 407818 - DNA, 25 bp, Homo sapien
tctctggaggccctattctacggga

SEQ ID NO: 407819 - DNA, 25 bp, Homo sapien
gaggccctattctacgggagctgct

SEQ ID NO: 407820 - DNA, 25 bp, Homo sapien
tcctctaatacttggcatctggggc

SEQ ID NO: 407821 - DNA, 25 bp, Homo sapien
actttcctttgatgcctatctttcc

SEQ ID NO: 407822 - DNA, 25 bp, Homo sapien
gaggcacataacctgcactatcacc

SEQ ID NO: 407823 - DNA, 25 bp, Homo sapien
tctttaggaggcacataacctgcac

SEQ ID NO: 407824 - DNA, 25 bp, Homo sapien
tcctttatagccaaatgctgtcaaa

SEQ ID NO: 407825 - DNA, 25 bp, Homo sapien
gcatttcccgttgggctggtctagt

SEQ ID NO: 407826 - DNA, 25 bp, Homo sapien
tgaaactcagttttgttgggtacaa

SEQ ID NO: 407827 - DNA, 25 bp, Homo sapien
ccccagtatctattgtgaaactcag

SEQ ID NO: 407828 - DNA, 25 bp, Homo sapien
cacatcatttgctaatctgagaaag

SEQ ID NO: 407829 - DNA, 25 bp, Homo sapien
taacgctattcacgacagcagggac

SEQ ID NO: 407830 - DNA, 25 bp, Homo sapien
ctggaggccgttatttgtagcaaag

SEQ ID NO: 407831 - DNA, 25 bp, Homo sapien
tatgtgccactaaatctggagccac

SEQ ID NO: 407832 - DNA, 25 bp, Homo sapien
gcccgaagggcttgcacaaggttct

SEQ ID NO: 407833 - DNA, 25 bp, Homo sapien
ttctaggaactcgacaggagggaga

SEQ ID NO: 407834 - DNA, 25 bp, Homo sapien
attctaggaactcgacaggagggag

SEQ ID NO: 407835 - DNA, 25 bp, Homo sapien
tctaggaactcgacaggagggagag

SEQ ID NO: 407836 - DNA, 25 bp, Homo sapien
aaatacaccagtccgtatggagagt

SEQ ID NO: 407837 - DNA, 25 bp, Homo sapien
tggagagtgttgtccagaaatgcag

SEQ ID NO: 407838 - DNA, 25 bp, Homo sapien
ccgtatggagagtgttgtccagaaa

SEQ ID NO: 407839 - DNA, 25 bp, Homo sapien
ccagtccgtatggagagtgttgtcc

SEQ ID NO: 407840 - DNA, 25 bp, Homo sapien
gagaagagatatagccaaacctgtt

SEQ ID NO: 407841 - DNA, 25 bp, Homo sapien
aaacctgttgattctactcctgtta

SEQ ID NO: 407842 - DNA, 25 bp, Homo sapien
cgccagaagtcggtcagtatttgtg

SEQ ID NO: 407843 - DNA, 25 bp, Homo sapien
gccagagcaatattgtaatgccagc

SEQ ID NO: 407844 - DNA, 25 bp, Homo sapien
cagttgtgacatagatggtattgac

SEQ ID NO: 407845 - DNA, 25 bp, Homo sapien
ccagggttggcaaactgaatctgca

SEQ ID NO: 407846 - DNA, 25 bp, Homo sapien
caggatagttattgacaggattgac

SEQ ID NO: 407847 - DNA, 25 bp, Homo sapien
ttatggctagttttgtgctacaaca

SEQ ID NO: 407848 - DNA, 25 bp, Homo sapien
ttacatccatattcccaaagcaggg

SEQ ID NO: 407849 - DNA, 25 bp, Homo sapien
caagtgatctcaatgtccccaaacc

SEQ ID NO: 407850 - DNA, 25 bp, Homo sapien
ccaggatacgactgttggaccagct

SEQ ID NO: 407851 - DNA, 25 bp, Homo sapien
tatatgcacttccacaaaagcgata

SEQ ID NO: 407852 - DNA, 25 bp, Homo sapien
gaaagaggaagccatttgcgttatt

SEQ ID NO: 407853 - DNA, 25 bp, Homo sapien
taaagactgagatggtccaaaaaag

SEQ ID NO: 407854 - DNA, 25 bp, Homo sapien
aacattctctgaaaccatagcagcc

SEQ ID NO: 407855 - DNA, 25 bp, Homo sapien
aaacagtgctggtcaaagatcctat

SEQ ID NO: 407856 - DNA, 25 bp, Homo sapien
tgccctcaaagctaacaccacttaa

SEQ ID NO: 407857 - DNA, 25 bp, Homo sapien
tactggcaagatacgctggatccct

SEQ ID NO: 407858 - DNA, 25 bp, Homo sapien
caaatttgcaactggcagtttactc

SEQ ID NO: 407859 - DNA, 25 bp, Homo sapien
tattatgctatatcactgctcagag

SEQ ID NO: 407860 - DNA, 25 bp, Homo sapien
caggctgtccattaatgtctcggca

SEQ ID NO: 407861 - DNA, 25 bp, Homo sapien
ccttcccacaggtcttagaacatga

SEQ ID NO: 407862 - DNA, 25 bp, Homo sapien
gatggtctgcacaaggtctggtgct

SEQ ID NO: 407863 - DNA, 25 bp, Homo sapien
tttaaaggatcacagctctcatgag

SEQ ID NO: 407864 - DNA, 25 bp, Homo sapien
tcaatgacccatgctgaaaaagtgg

SEQ ID NO: 407865 - DNA, 25 bp, Homo sapien
taattttaggtcgaagggcattgcc

SEQ ID NO: 407866 - DNA, 25 bp, Homo sapien
ggagccgctgtacctcaagacaaca

SEQ ID NO: 407867 - DNA, 25 bp, Homo sapien
taagaacctggatggtcaagggctc

SEQ ID NO: 407868 - DNA, 25 bp, Homo sapien
tacaagtagatccatttcccccgca

SEQ ID NO: 407869 - DNA, 25 bp, Homo sapien
tttgcactagtaactgatcctgata

SEQ ID NO: 407870 - DNA, 25 bp, Homo sapien
tctttttggagtctatgatgcgatc

SEQ ID NO: 407871 - DNA, 25 bp, Homo sapien
gatcacaaccagcttttacacactg

SEQ ID NO: 407872 - DNA, 25 bp, Homo sapien
gtttgaaaaggtagcaagcccaggc

SEQ ID NO: 407873 - DNA, 25 bp, Homo sapien
cagaggagcgcttgactgtccaaaa

SEQ ID NO: 407874 - DNA, 25 bp, Homo sapien
tagcctatggtgctaatgacacacg

SEQ ID NO: 407875 - DNA, 25 bp, Homo sapien
tgtgaagcctagtcgcacagaggag

SEQ ID NO: 407876 - DNA, 25 bp, Homo sapien
caaaacgaagaagtagccaatgcct

SEQ ID NO: 407877 - DNA, 25 bp, Homo sapien
ttgggaatccattccaccgcaggcc

SEQ ID NO: 407878 - DNA, 25 bp, Homo sapien
tgtcctttggtgagacgccagcgta

SEQ ID NO: 407879 - DNA, 25 bp, Homo sapien
agatgagcttgcacctgtcctttgg

SEQ ID NO: 407880 - DNA, 25 bp, Homo sapien
tacaggatctgtagcgcactcgttt

SEQ ID NO: 407881 - DNA, 25 bp, Homo sapien
gacagtcctcaaggttacaggatct

SEQ ID NO: 407882 - DNA, 25 bp, Homo sapien
ctttgggactgggttgtcacattcc

SEQ ID NO: 407883 - DNA, 25 bp, Homo sapien
cacattccctcatcgtgtactggac

SEQ ID NO: 407884 - DNA, 25 bp, Homo sapien
ttttagggtatcaaagaaagccaca

SEQ ID NO: 407885 - DNA, 25 bp, Homo sapien
tggagacataaatcatcagcattag

SEQ ID NO: 407886 - DNA, 25 bp, Homo sapien
gccacatgggacaaagaatcagttc

SEQ ID NO: 407887 - DNA, 25 bp, Homo sapien
agctatctcgcattcctgctagagg

SEQ ID NO: 407888 - DNA, 25 bp, Homo sapien
gtgccatccgcccacgggaagtgtt

SEQ ID NO: 407889 - DNA, 25 bp, Homo sapien
gccgttgatacaccatttcccttct

SEQ ID NO: 407890 - DNA, 25 bp, Homo sapien
ttttgttcacacacttgccgttgat

SEQ ID NO: 407891 - DNA, 25 bp, Homo sapien
aatgctttctgtcggttttgttcac

SEQ ID NO: 407892 - DNA, 25 bp, Homo sapien
gggcagtgtttggagtcctccccaa

SEQ ID NO: 407893 - DNA, 25 bp, Homo sapien
tgtaaactggcactgccggttggca

SEQ ID NO: 407894 - DNA, 25 bp, Homo sapien
tgctacatgtgctggctgcatcggg

SEQ ID NO: 407895 - DNA, 25 bp, Homo sapien
cagaggtgccggtacaccacaaggt

SEQ ID NO: 407896 - DNA, 25 bp, Homo sapien
gatgtaatcatgtaggcactgcaag

SEQ ID NO: 407897 - DNA, 25 bp, Homo sapien
catgaccattatccagaaatgatgt

SEQ ID NO: 407898 - DNA, 25 bp, Homo sapien
tggttcacaccattaaggctggcac

SEQ ID NO: 407899 - DNA, 25 bp, Homo sapien
ccatcatgtgggaatcctggttcac

SEQ ID NO: 407900 - DNA, 25 bp, Homo sapien
ggctcttttgcagaccatgtctact

SEQ ID NO: 407901 - DNA, 25 bp, Homo sapien
tgtaattccagaagccgaggcgggt

SEQ ID NO: 407902 - DNA, 25 bp, Homo sapien
taaagtatggatcatggctgggtgc

SEQ ID NO: 407903 - DNA, 25 bp, Homo sapien
tttcacagggtgtaaacaaacatac

SEQ ID NO: 407904 - DNA, 25 bp, Homo sapien
ggtgaaggcagcttgtaaaccatca

SEQ ID NO: 407905 - DNA, 25 bp, Homo sapien
ggcagcttgtaaaccatcatcttct

SEQ ID NO: 407906 - DNA, 25 bp, Homo sapien
tctgctcggatcacacacagttcca

SEQ ID NO: 407907 - DNA, 25 bp, Homo sapien
ttctatgacggagcagcttctgctc

SEQ ID NO: 407908 - DNA, 25 bp, Homo sapien
tggtacaacgtagactcctaagagg

SEQ ID NO: 407909 - DNA, 25 bp, Homo sapien
gtaagataaaccatgctagccaatt

SEQ ID NO: 407910 - DNA, 25 bp, Homo sapien
ggcagggtgtgccttcacatatgct

SEQ ID NO: 407911 - DNA, 25 bp, Homo sapien
cctaagaggacagtctcacagctgg

SEQ ID NO: 407912 - DNA, 25 bp, Homo sapien
taatgctttagaccactgccgtgga

SEQ ID NO: 407913 - DNA, 25 bp, Homo sapien
catggtttccacatagcggtgactg

SEQ ID NO: 407914 - DNA, 25 bp, Homo sapien
tggctgccaccgaaaacaacgtgag

SEQ ID NO: 407915 - DNA, 25 bp, Homo sapien
gaattctgccatcgactggtctgcc

SEQ ID NO: 407916 - DNA, 25 bp, Homo sapien
aaaagaactggagaataagcactgc

SEQ ID NO: 407917 - DNA, 25 bp, Homo sapien
aaagaactggagaataagcactgca

SEQ ID NO: 407918 - DNA, 25 bp, Homo sapien
aagaactggagaataagcactgcac

SEQ ID NO: 407919 - DNA, 25 bp, Homo sapien
cttcccaggtcaccattgctcctct

SEQ ID NO: 407920 - DNA, 25 bp, Homo sapien
ttcccaggtcaccattgctcctctg

SEQ ID NO: 407921 - DNA, 25 bp, Homo sapien
gatttgcgccccacgttctggagcg

SEQ ID NO: 407922 - DNA, 25 bp, Homo sapien
aagccgggcgccaaaaagctgctgt

SEQ ID NO: 407923 - DNA, 25 bp, Homo sapien
cagcggctggatgaaatacgcctcc

SEQ ID NO: 407924 - DNA, 25 bp, Homo sapien
aactgtagtggtgccggcggcttct

SEQ ID NO: 407925 - DNA, 25 bp, Homo sapien
acccctcgggcacagctcgctgcat

SEQ ID NO: 407926 - DNA, 25 bp, Homo sapien
ttgcgccttccgaacccctcgggca

SEQ ID NO: 407927 - DNA, 25 bp, Homo sapien
ttccgaacccctcgggcacagctcg

SEQ ID NO: 407928 - DNA, 25 bp, Homo sapien
cccagcttgcgccttccgaacccct

SEQ ID NO: 407929 - DNA, 25 bp, Homo sapien
aggagacaccgctcgtagcagcgca

SEQ ID NO: 407930 - DNA, 25 bp, Homo sapien
agacaccgctcgtagcagcgcacgg

SEQ ID NO: 407931 - DNA, 25 bp, Homo sapien
ccgctcgtagcagcgcacggagcga

SEQ ID NO: 407932 - DNA, 25 bp, Homo sapien
ccccaggagacaccgctcgtagcag

SEQ ID NO: 407933 - DNA, 25 bp, Homo sapien
ggctttgcaatagcccctggctcgg

SEQ ID NO: 407934 - DNA, 25 bp, Homo sapien
tctattattcgttggaagggcgcgc

SEQ ID NO: 407935 - DNA, 25 bp, Homo sapien
taaaaggaggcgctgcagttctgcc

SEQ ID NO: 407936 - DNA, 25 bp, Homo sapien
gaagctcccggagtcactaaaagga

SEQ ID NO: 407937 - DNA, 25 bp, Homo sapien
cgtccggtctcttggttggctccaa

SEQ ID NO: 407938 - DNA, 25 bp, Homo sapien
cagccagaagcgtcccttctagttc

SEQ ID NO: 407939 - DNA, 25 bp, Homo sapien
tcttttccggatgctttccaacttc

SEQ ID NO: 407940 - DNA, 25 bp, Homo sapien
tagtgctcgaactggtctccgcctt

SEQ ID NO: 407941 - DNA, 25 bp, Homo sapien
tccttctcttcgacttcgaactacg

SEQ ID NO: 407942 - DNA, 25 bp, Homo sapien
tctgtttcccaagcgtcttttccca

SEQ ID NO: 407943 - DNA, 25 bp, Homo sapien
tcgaactacgaggattattccttcc

SEQ ID NO: 407944 - DNA, 25 bp, Homo sapien
cttcgacttcgaactacgaggatta

SEQ ID NO: 407945 - DNA, 25 bp, Homo sapien
acagtgagttaaaggcaaaaggatg

SEQ ID NO: 407946 - DNA, 25 bp, Homo sapien
gactccaatctgttgtgcacctgta

SEQ ID NO: 407947 - DNA, 25 bp, Homo sapien
tttaatcgcttcaacagagacatgg

SEQ ID NO: 407948 - DNA, 25 bp, Homo sapien
ggagttgccaactactaagctgaaa

SEQ ID NO: 407949 - DNA, 25 bp, Homo sapien
gatatttgagcactgtatcttcaga

SEQ ID NO: 407950 - DNA, 25 bp, Homo sapien
ttcagattccgaggcctgggttagg

SEQ ID NO: 407951 - DNA, 25 bp, Homo sapien
cactcgtaattggttgatggtaggc

SEQ ID NO: 407952 - DNA, 25 bp, Homo sapien
gatggtaggcttgtatattcatgaa

SEQ ID NO: 407953 - DNA, 25 bp, Homo sapien
agagggcagtagaacccgtttgctg

SEQ ID NO: 407954 - DNA, 25 bp, Homo sapien
ccccggcatgcagtgtcagtgcaat

SEQ ID NO: 407955 - DNA, 25 bp, Homo sapien
cagtgtcagtgcaatgacaaagagt

SEQ ID NO: 407956 - DNA, 25 bp, Homo sapien
tggtgaatggaatgggaccgccccc

SEQ ID NO: 407957 - DNA, 25 bp, Homo sapien
tagaatacttctgttttagtgtagt

SEQ ID NO: 407958 - DNA, 25 bp, Homo sapien
cttctgttttagtgtagttagtgat

SEQ ID NO: 407959 - DNA, 25 bp, Homo sapien
ctagaatacttctgttttagtgtag

SEQ ID NO: 407960 - DNA, 25 bp, Homo sapien
aatacttctgttttagtgtagttag

SEQ ID NO: 407961 - DNA, 25 bp, Homo sapien
atgaattctagatttgtacagcttc

SEQ ID NO: 407962 - DNA, 25 bp, Homo sapien
ttgatgaattctagatttgtacagc

SEQ ID NO: 407963 - DNA, 25 bp, Homo sapien
cattgatgaattctagatttgtaca

SEQ ID NO: 407964 - DNA, 25 bp, Homo sapien
tgatgaattctagatttgtacagct

SEQ ID NO: 407965 - DNA, 25 bp, Homo sapien
tctccattggccttagctatgaccc

SEQ ID NO: 407966 - DNA, 25 bp, Homo sapien
ccactcttgtctgatgctagctgca

SEQ ID NO: 407967 - DNA, 25 bp, Homo sapien
gacccgtgaaatcttggaaggctct

SEQ ID NO: 407968 - DNA, 25 bp, Homo sapien
tgatgctagctgcagcaaccacctc

SEQ ID NO: 407969 - DNA, 25 bp, Homo sapien
tcagtttttcttttcccaagctaga

SEQ ID NO: 407970 - DNA, 25 bp, Homo sapien
tttcttttcccaagctagacagata

SEQ ID NO: 407971 - DNA, 25 bp, Homo sapien
tttttcttttcccaagctagacaga

SEQ ID NO: 407972 - DNA, 25 bp, Homo sapien
tcttttcccaagctagacagatacc

SEQ ID NO: 407973 - DNA, 25 bp, Homo sapien
gatgggcccctagaatgcaaggatg

SEQ ID NO: 407974 - DNA, 25 bp, Homo sapien
cataggcaaagtggaaggtaaagca

SEQ ID NO: 407975 - DNA, 25 bp, Homo sapien
cctcagggtgcaggacataggcaaa

SEQ ID NO: 407976 - DNA, 25 bp, Homo sapien
gcaggaaagttaggcttgcccacac

SEQ ID NO: 407977 - DNA, 25 bp, Homo sapien
gaagtcccataaagaggcatttgct

SEQ ID NO: 407978 - DNA, 25 bp, Homo sapien
caggaatggactctctgagggataa

SEQ ID NO: 407979 - DNA, 25 bp, Homo sapien
cagacaggtcggtggtatcagatcc

SEQ ID NO: 407980 - DNA, 25 bp, Homo sapien
gaatgccaggtaccttcttaggagc

SEQ ID NO: 407981 - DNA, 25 bp, Homo sapien
aaaagaattaatgctcctaggaagc

SEQ ID NO: 407982 - DNA, 25 bp, Homo sapien
ccacagggcctaactcaatgagatg

SEQ ID NO: 407983 - DNA, 25 bp, Homo sapien
taataccagtatcacaagagccaaa

SEQ ID NO: 407984 - DNA, 25 bp, Homo sapien
taaaagcatacatcctcctaaggag

SEQ ID NO: 407985 - DNA, 25 bp, Homo sapien
ggaatgcaggctacaagacacagta

SEQ ID NO: 407986 - DNA, 25 bp, Homo sapien
tacagtttaaagtcacacataggga

SEQ ID NO: 407987 - DNA, 25 bp, Homo sapien
cagtataggtcccaaacggctcagt

SEQ ID NO: 407988 - DNA, 25 bp, Homo sapien
tctaccatcaaagcaagtttcaagg

SEQ ID NO: 407989 - DNA, 25 bp, Homo sapien
tcaggccaaatatacacgacagttt

SEQ ID NO: 407990 - DNA, 25 bp, Homo sapien
taaaagtctgctactccggcctgat

SEQ ID NO: 407991 - DNA, 25 bp, Homo sapien
gatgagccatcaaggtttacgttgt

SEQ ID NO: 407992 - DNA, 25 bp, Homo sapien
tactctcagtataggtagacgtgtt

SEQ ID NO: 407993 - DNA, 25 bp, Homo sapien
ttaggtcactctgatgtagcagtac

SEQ ID NO: 407994 - DNA, 25 bp, Homo sapien
acaaatcacagttttcctcacagtg

SEQ ID NO: 407995 - DNA, 25 bp, Homo sapien
cctcacagtgttagacttttaggtc

SEQ ID NO: 407996 - DNA, 25 bp, Homo sapien
tttcctacaaatcacagttttcctc

SEQ ID NO: 407997 - DNA, 25 bp, Homo sapien
aggatgaggggccactgctcgtttt

SEQ ID NO: 407998 - DNA, 25 bp, Homo sapien
tccatttgacctttacagtccacat

SEQ ID NO: 407999 - DNA, 25 bp, Homo sapien
cactgctcgttttttccatttgacc

SEQ ID NO: 408000 - DNA, 25 bp, Homo sapien
gaggggccactgctcgttttttcca

SEQ ID NO: 408001 - DNA, 25 bp, Homo sapien
gaatgcaattaactgggctaactaa

SEQ ID NO: 408002 - DNA, 25 bp, Homo sapien
ggtccagttagttgaagccacaaaa

SEQ ID NO: 408003 - DNA, 25 bp, Homo sapien
gaatgatatcatagccccaggcagg

SEQ ID NO: 408004 - DNA, 25 bp, Homo sapien
tttgctgatctgaacactacctgta

SEQ ID NO: 408005 - DNA, 25 bp, Homo sapien
gcttctaggctatttgtgtacccaa

SEQ ID NO: 408006 - DNA, 25 bp, Homo sapien
caatcaagtgctttccagttgggaa

SEQ ID NO: 408007 - DNA, 25 bp, Homo sapien
tatccctcagaagttgtgtgtagac

SEQ ID NO: 408008 - DNA, 25 bp, Homo sapien
gaagtagcccctagcatcctgaatt

SEQ ID NO: 408009 - DNA, 25 bp, Homo sapien
tacaaacagtaagaagaagctactg

SEQ ID NO: 408010 - DNA, 25 bp, Homo sapien
gatataaagtgacataccaagggag

SEQ ID NO: 408011 - DNA, 25 bp, Homo sapien
tgccatcttcaaatgtcccctgatt

SEQ ID NO: 408012 - DNA, 25 bp, Homo sapien
cattctatcagaggtaggtgacaag

SEQ ID NO: 408013 - DNA, 25 bp, Homo sapien
taggtagacctcctgttcaccacga

SEQ ID NO: 408014 - DNA, 25 bp, Homo sapien
gcaaggtcaccactgtcacgtgaag

SEQ ID NO: 408015 - DNA, 25 bp, Homo sapien
tcactgaagcatgactttctgtgcg

SEQ ID NO: 408016 - DNA, 25 bp, Homo sapien
tcaccacgactgcatcagtgctgaa

SEQ ID NO: 408017 - DNA, 25 bp, Homo sapien
gcattgcttaaacgcagaaggcctt

SEQ ID NO: 408018 - DNA, 25 bp, Homo sapien
catcctggcactgcaccgttctggt

SEQ ID NO: 408019 - DNA, 25 bp, Homo sapien
aggacatccttttgctaacttccgg

SEQ ID NO: 408020 - DNA, 25 bp, Homo sapien
cactgcaccgttctggtgtgccaac

SEQ ID NO: 408021 - DNA, 25 bp, Homo sapien
tgcggctgcgaagtgtgtgatccca

SEQ ID NO: 408022 - DNA, 25 bp, Homo sapien
tattgctgccatgactagtgacaga

SEQ ID NO: 408023 - DNA, 25 bp, Homo sapien
gaatttccttcgtggcagagtagcc

SEQ ID NO: 408024 - DNA, 25 bp, Homo sapien
caggaatcctcaccacgtcagtgta

SEQ ID NO: 408025 - DNA, 25 bp, Homo sapien
tagcatattttatgccggaaattgg

SEQ ID NO: 408026 - DNA, 25 bp, Homo sapien
ggaaattggtacttcataaacttga

SEQ ID NO: 408027 - DNA, 25 bp, Homo sapien
ttttatgccggaaattggtacttca

SEQ ID NO: 408028 - DNA, 25 bp, Homo sapien
ctgatagcatattttatgccggaaa

SEQ ID NO: 408029 - DNA, 25 bp, Homo sapien
cagctttgagccaatgatgccgtca

SEQ ID NO: 408030 - DNA, 25 bp, Homo sapien
ccccggacgcagacggaattactgt

SEQ ID NO: 408031 - DNA, 25 bp, Homo sapien
gcacttgtcatactgcagctttgag

SEQ ID NO: 408032 - DNA, 25 bp, Homo sapien
tgtacagctggagttgtctcctcca

SEQ ID NO: 408033 - DNA, 25 bp, Homo sapien
actgcttctggacagttggtgtgta

SEQ ID NO: 408034 - DNA, 25 bp, Homo sapien
ttctggacagttggtgtgtagttac

SEQ ID NO: 408035 - DNA, 25 bp, Homo sapien
tgcttctggacagttggtgtgtagt

SEQ ID NO: 408036 - DNA, 25 bp, Homo sapien
caccagtacgcctactgcttctgga

SEQ ID NO: 408037 - DNA, 25 bp, Homo sapien
gctctgcaggtcagcttgcacacat

SEQ ID NO: 408038 - DNA, 25 bp, Homo sapien
cactgttcatgacgaaatgatttac

SEQ ID NO: 408039 - DNA, 25 bp, Homo sapien
gactccttttgcatcagactgatag

SEQ ID NO: 408040 - DNA, 25 bp, Homo sapien
catccgctggcaggacacctgcata

SEQ ID NO: 408041 - DNA, 25 bp, Homo sapien
tatgatggttgctgacacttgggag

SEQ ID NO: 408042 - DNA, 25 bp, Homo sapien
cacataggtgtttgttattgatctg

SEQ ID NO: 408043 - DNA, 25 bp, Homo sapien
tattgctagaatacaaatgacatgt

SEQ ID NO: 408044 - DNA, 25 bp, Homo sapien
ggaactgtgcagtataagattaata

SEQ ID NO: 408045 - DNA, 25 bp, Homo sapien
ctccacatgagcgagaacactggcc

SEQ ID NO: 408046 - DNA, 25 bp, Homo sapien
tccctgtgcagtagcgtccgttgtt

SEQ ID NO: 408047 - DNA, 25 bp, Homo sapien
gacgataggcaaactgcactcctcc

SEQ ID NO: 408048 - DNA, 25 bp, Homo sapien
cagggttattacagtgacgataggc

SEQ ID NO: 408049 - DNA, 25 bp, Homo sapien
aatcacctgcatttaatgacaaagt

SEQ ID NO: 408050 - DNA, 25 bp, Homo sapien
tgaaagtgtgcatttggaaatcacc

SEQ ID NO: 408051 - DNA, 25 bp, Homo sapien
taacatgatcatgctttggaaatgc

SEQ ID NO: 408052 - DNA, 25 bp, Homo sapien
tcccaactccagcactagaagatct

SEQ ID NO: 408053 - DNA, 25 bp, Homo sapien
tgggcctccaggcattgactgatga

SEQ ID NO: 408054 - DNA, 25 bp, Homo sapien
cttgggcctccaggcattgactgat

SEQ ID NO: 408055 - DNA, 25 bp, Homo sapien
ccatcacaagaatgcacttcacttc

SEQ ID NO: 408056 - DNA, 25 bp, Homo sapien
gggcctccaggcattgactgatgag

SEQ ID NO: 408057 - DNA, 25 bp, Homo sapien
tgccgggacacacggagtactcagg

SEQ ID NO: 408058 - DNA, 25 bp, Homo sapien
gagcacagacatccatgccgggaca

SEQ ID NO: 408059 - DNA, 25 bp, Homo sapien
tactcaggcccgaatgtcaggttgc

SEQ ID NO: 408060 - DNA, 25 bp, Homo sapien
tctgctttcgtggtaggtccagcaa

SEQ ID NO: 408061 - DNA, 25 bp, Homo sapien
ttctcaggagtgatgcgctccggag

SEQ ID NO: 408062 - DNA, 25 bp, Homo sapien
tctcaggagtgatgcgctccggagt

SEQ ID NO: 408063 - DNA, 25 bp, Homo sapien
ggttctcaggagtgatgcgctccgg

SEQ ID NO: 408064 - DNA, 25 bp, Homo sapien
cagggttctcaggagtgatgcgctc

SEQ ID NO: 408065 - DNA, 25 bp, Homo sapien
tttggaccagggcttagatgcatca

SEQ ID NO: 408066 - DNA, 25 bp, Homo sapien
taagcgcttatcttctgtggaacca

SEQ ID NO: 408067 - DNA, 25 bp, Homo sapien
aatttggaatcgtcatgggagaggc

SEQ ID NO: 408068 - DNA, 25 bp, Homo sapien
taaggatggaagacattaagcgctt

SEQ ID NO: 408069 - DNA, 25 bp, Homo sapien
tgcctccactcgaggaacatggatg

SEQ ID NO: 408070 - DNA, 25 bp, Homo sapien
aagcactttttgactgcctatccag

SEQ ID NO: 408071 - DNA, 25 bp, Homo sapien
ttttaaggaccatatgtgcagcagg

SEQ ID NO: 408072 - DNA, 25 bp, Homo sapien
ctagtgtattagaagctggcccaac

SEQ ID NO: 408073 - DNA, 25 bp, Homo sapien
cagctgttacaagtgtttgatttgg

SEQ ID NO: 408074 - DNA, 25 bp, Homo sapien
taagtattttggttcctgttgcagc

SEQ ID NO: 408075 - DNA, 25 bp, Homo sapien
caagtgtttgatttggtgagggaaa

SEQ ID NO: 408076 - DNA, 25 bp, Homo sapien
cctgttgcagctgttacaagtgttt

SEQ ID NO: 408077 - DNA, 25 bp, Homo sapien
aacatatggtcccaacgtctgccat

SEQ ID NO: 408078 - DNA, 25 bp, Homo sapien
gccatcgtcttcaatcacagcacag

SEQ ID NO: 408079 - DNA, 25 bp, Homo sapien
gcgtggaggccatcgtcttcaatca

SEQ ID NO: 408080 - DNA, 25 bp, Homo sapien
aaggctgcgtggaggccatcgtctt

SEQ ID NO: 408081 - DNA, 25 bp, Homo sapien
cagggtgtcacatgaatgatgccca

SEQ ID NO: 408082 - DNA, 25 bp, Homo sapien
ccagggtgtcacatgaatgatgccc

SEQ ID NO: 408083 - DNA, 25 bp, Homo sapien
tcccagggtgtcacatgaatgatgc

SEQ ID NO: 408084 - DNA, 25 bp, Homo sapien
cccagggtgtcacatgaatgatgcc

SEQ ID NO: 408085 - DNA, 25 bp, Homo sapien
gatatgtttatggtatcacctgttc

SEQ ID NO: 408086 - DNA, 25 bp, Homo sapien
caaatggcaacagggatatgtttat

SEQ ID NO: 408087 - DNA, 25 bp, Homo sapien
tcctctctggaaacgttccaaaggc

SEQ ID NO: 408088 - DNA, 25 bp, Homo sapien
ctcaaggcagagactcttctgaact

SEQ ID NO: 408089 - DNA, 25 bp, Homo sapien
cgatgacccattttatacaatctct

SEQ ID NO: 408090 - DNA, 25 bp, Homo sapien
ctttacgatgacccattttatacaa

SEQ ID NO: 408091 - DNA, 25 bp, Homo sapien
tttacgatgacccattttatacaat

SEQ ID NO: 408092 - DNA, 25 bp, Homo sapien
gacccattttatacaatctctatcc

SEQ ID NO: 408093 - DNA, 25 bp, Homo sapien
tcttttcaatgattgccattgcact

SEQ ID NO: 408094 - DNA, 25 bp, Homo sapien
ctgatcattgctgtcttcctactaa

SEQ ID NO: 408095 - DNA, 25 bp, Homo sapien
ccattgcacttaatttacaattaaa

SEQ ID NO: 408096 - DNA, 25 bp, Homo sapien
ctctgatcattgctgtcttcctact

SEQ ID NO: 408097 - DNA, 25 bp, Homo sapien
ctccttggcgcagtatgcttacaaa

SEQ ID NO: 408098 - DNA, 25 bp, Homo sapien
gcaggaggtaggaagtaacagacct

SEQ ID NO: 408099 - DNA, 25 bp, Homo sapien
tcctcttgtgatgtagcagagcaag

SEQ ID NO: 408100 - DNA, 25 bp, Homo sapien
ttagagaacctccttccataaactc

SEQ ID NO: 408101 - DNA, 25 bp, Homo sapien
tcgatgctagcatggctgtacagcc

SEQ ID NO: 408102 - DNA, 25 bp, Homo sapien
ctgtgccccgatagaagcagtggct

SEQ ID NO: 408103 - DNA, 25 bp, Homo sapien
caggatagctgcatcgtagtgctcc

SEQ ID NO: 408104 - DNA, 25 bp, Homo sapien
tgcttgaccgcgaagaagccgtcga

SEQ ID NO: 408105 - DNA, 25 bp, Homo sapien
ctgcccgcggggaggggctgcgcga

SEQ ID NO: 408106 - DNA, 25 bp, Homo sapien
aaagtcggatagtggagattcagca

SEQ ID NO: 408107 - DNA, 25 bp, Homo sapien
cacacttgcttgcaggattgagtca

SEQ ID NO: 408108 - DNA, 25 bp, Homo sapien
tgcggtgccagcgtgcgaacttttc

SEQ ID NO: 408109 - DNA, 25 bp, Homo sapien
aggcacgatcgctgtttcaagaaaa

SEQ ID NO: 408110 - DNA, 25 bp, Homo sapien
ggctggcaactggtgcgcgcagcct

SEQ ID NO: 408111 - DNA, 25 bp, Homo sapien
gggctggcaactggtgcgcgcagcc

SEQ ID NO: 408112 - DNA, 25 bp, Homo sapien
cgggctggcaactggtgcgcgcagc

SEQ ID NO: 408113 - DNA, 25 bp, Homo sapien
ctggcaactggtgcgcgcagcctcc

SEQ ID NO: 408114 - DNA, 25 bp, Homo sapien
tgcccgccgtcatccccagtcggca

SEQ ID NO: 408115 - DNA, 25 bp, Homo sapien
cctgaggcgagctggtgaagcggcg

SEQ ID NO: 408116 - DNA, 25 bp, Homo sapien
tgtgtcccttcggctgcggtctcct

SEQ ID NO: 408117 - DNA, 25 bp, Homo sapien
tcggcagctgcgagcgccgagagca

SEQ ID NO: 408118 - DNA, 25 bp, Homo sapien
tgtgaagatgcgaggaggtggaaca

SEQ ID NO: 408119 - DNA, 25 bp, Homo sapien
ctgtgaagatgcgaggaggtggaac

SEQ ID NO: 408120 - DNA, 25 bp, Homo sapien
tcttgatgctttgacgctcgccgga

SEQ ID NO: 408121 - DNA, 25 bp, Homo sapien
tcgggctccgggtgactaacttctc

SEQ ID NO: 408122 - DNA, 25 bp, Homo sapien
tctcgccctcggtgggaagttcctg

SEQ ID NO: 408123 - DNA, 25 bp, Homo sapien
cacgcctttcgtcagggtccacaat

SEQ ID NO: 408124 - DNA, 25 bp, Homo sapien
ctggacctgtcggaaacttctcctt

SEQ ID NO: 408125 - DNA, 25 bp, Homo sapien
gatcccaaaaagattgccacctctg

SEQ ID NO: 408126 - DNA, 25 bp, Homo sapien
agctggcccaacctggacctgtcgg

SEQ ID NO: 408127 - DNA, 25 bp, Homo sapien
aggatcccaaaaagattgccacctc

SEQ ID NO: 408128 - DNA, 25 bp, Homo sapien
gccccacttgtgttctcttgacggg

SEQ ID NO: 408129 - DNA, 25 bp, Homo sapien
tgccccacttgtgttctcttgacgg

SEQ ID NO: 408130 - DNA, 25 bp, Homo sapien
cttaaagtttcatgtagcaaacctg

SEQ ID NO: 408131 - DNA, 25 bp, Homo sapien
cctctgtgcttaaagtttcatgtag

SEQ ID NO: 408132 - DNA, 25 bp, Homo sapien
aatgtcgtgctcttcccatagcagg

SEQ ID NO: 408133 - DNA, 25 bp, Homo sapien
gcaaacctgctaaatgtcgtgctct

SEQ ID NO: 408134 - DNA, 25 bp, Homo sapien
taacagaaccaagctcggaaaccat

SEQ ID NO: 408135 - DNA, 25 bp, Homo sapien
tatggtccgggtcagtaacagaacc

SEQ ID NO: 408136 - DNA, 25 bp, Homo sapien
caatgttttgtagcaagctatggtc

SEQ ID NO: 408137 - DNA, 25 bp, Homo sapien
gaaacctggtggactagtgaatact

SEQ ID NO: 408138 - DNA, 25 bp, Homo sapien
agtgttaggctgttagagctagtga

SEQ ID NO: 408139 - DNA, 25 bp, Homo sapien
tgacttataatgagtcataggctca

SEQ ID NO: 408140 - DNA, 25 bp, Homo sapien
taatgagtcataggctcagtgctct

SEQ ID NO: 408141 - DNA, 25 bp, Homo sapien
atgagtcataggctcagtgctctgc

SEQ ID NO: 408142 - DNA, 25 bp, Homo sapien
ttataatgagtcataggctcagtgc

SEQ ID NO: 408143 - DNA, 25 bp, Homo sapien
agcagctcctttagtcctggaaaac

SEQ ID NO: 408144 - DNA, 25 bp, Homo sapien
tgctgacaaccctccttgatatgca

SEQ ID NO: 408145 - DNA, 25 bp, Homo sapien
ccctccttgatatgcactttctttg

SEQ ID NO: 408146 - DNA, 25 bp, Homo sapien
tattaaatttgctgataaagtcagc

SEQ ID NO: 408147 - DNA, 25 bp, Homo sapien
ttttgataattgtctctggtgttgc

SEQ ID NO: 408148 - DNA, 25 bp, Homo sapien
tgtctctggtgttgctggttgacat

SEQ ID NO: 408149 - DNA, 25 bp, Homo sapien
tgataattgtctctggtgttgctgg

SEQ ID NO: 408150 - DNA, 25 bp, Homo sapien
taattgtctctggtgttgctggttg

SEQ ID NO: 408151 - DNA, 25 bp, Homo sapien
cttctattgcatatggacaatgatc

SEQ ID NO: 408152 - DNA, 25 bp, Homo sapien
gcatatggacaatgatcatctataa

SEQ ID NO: 408153 - DNA, 25 bp, Homo sapien
catctataatgtcaggataatcgca

SEQ ID NO: 408154 - DNA, 25 bp, Homo sapien
tataatgtcaggataatcgcaggcc

SEQ ID NO: 408155 - DNA, 25 bp, Homo sapien
tcacacaatgatagatgtctttgtg

SEQ ID NO: 408156 - DNA, 25 bp, Homo sapien
ggagatgctcttgccaaatgagatc

SEQ ID NO: 408157 - DNA, 25 bp, Homo sapien
gtctttgtgtcaatctgcatagcac

SEQ ID NO: 408158 - DNA, 25 bp, Homo sapien
atgaaaaccataggaaggagatgct

SEQ ID NO: 408159 - DNA, 25 bp, Homo sapien
tcttcacggggacagagaactcgct

SEQ ID NO: 408160 - DNA, 25 bp, Homo sapien
aggacagtcttcacggggacagaga

SEQ ID NO: 408161 - DNA, 25 bp, Homo sapien
actcgctgtcatccagcctgtctgt

SEQ ID NO: 408162 - DNA, 25 bp, Homo sapien
agaactcgctgtcatccagcctgtc

SEQ ID NO: 408163 - DNA, 25 bp, Homo sapien
tcactatcacatgagacagggcata

SEQ ID NO: 408164 - DNA, 25 bp, Homo sapien
tctgatgcccattgtaacgtacttc

SEQ ID NO: 408165 - DNA, 25 bp, Homo sapien
gacagtacatcacaatcatatccac

SEQ ID NO: 408166 - DNA, 25 bp, Homo sapien
catatccacgtgcatcagtgttctg

SEQ ID NO: 408167 - DNA, 25 bp, Homo sapien
ccttagactcccctcgcttcttccg

SEQ ID NO: 408168 - DNA, 25 bp, Homo sapien
ttagactcccctcgcttcttccgat

SEQ ID NO: 408169 - DNA, 25 bp, Homo sapien
gactcccctcgcttcttccgatgtt

SEQ ID NO: 408170 - DNA, 25 bp, Homo sapien
tcccctcgcttcttccgatgtttca

SEQ ID NO: 408171 - DNA, 25 bp, Homo sapien
gtggactctggccaatgtcaaccat

SEQ ID NO: 408172 - DNA, 25 bp, Homo sapien
cttcccttctggttgtcctgtgatt

SEQ ID NO: 408173 - DNA, 25 bp, Homo sapien
tgtgcacctccttttggtggactct

SEQ ID NO: 408174 - DNA, 25 bp, Homo sapien
tcctgtgattctgtgcacctccttt

SEQ ID NO: 408175 - DNA, 25 bp, Homo sapien
ttactacctcagttaaatcaagctg

SEQ ID NO: 408176 - DNA, 25 bp, Homo sapien
tacatttacctaatatgtcagcatc

SEQ ID NO: 408177 - DNA, 25 bp, Homo sapien
gtttactacctcagttaaatcaagc

SEQ ID NO: 408178 - DNA, 25 bp, Homo sapien
atgtttactacctcagttaaatcaa

SEQ ID NO: 408179 - DNA, 25 bp, Homo sapien
agttctgccaaggatgagatgggaa

SEQ ID NO: 408180 - DNA, 25 bp, Homo sapien
gagagcttgaaaccacgaaggaaag

SEQ ID NO: 408181 - DNA, 25 bp, Homo sapien
ttcaatgtatgagatgatgatggac

SEQ ID NO: 408182 - DNA, 25 bp, Homo sapien
gatgggaatagactgacatttgaaa

SEQ ID NO: 408183 - DNA, 25 bp, Homo sapien
catgatctgtaattgatatgctaac

SEQ ID NO: 408184 - DNA, 25 bp, Homo sapien
caaagggatcatgatctgtaattga

SEQ ID NO: 408185 - DNA, 25 bp, Homo sapien
tatgctaacttttggatggcagcaa

SEQ ID NO: 408186 - DNA, 25 bp, Homo sapien
tctccttaactgcttctactcttgc

SEQ ID NO: 408187 - DNA, 25 bp, Homo sapien
cagcagcacctgtgtaactcttata

SEQ ID NO: 408188 - DNA, 25 bp, Homo sapien
gcacctgtgtaactcttataagcct

SEQ ID NO: 408189 - DNA, 25 bp, Homo sapien
aaatcacactccttgctgtagttca

SEQ ID NO: 408190 - DNA, 25 bp, Homo sapien
ctccttgctgtagttcacttctggg

SEQ ID NO: 408191 - DNA, 25 bp, Homo sapien
gctactgaatctcctattttccttg

SEQ ID NO: 408192 - DNA, 25 bp, Homo sapien
ttttccttgtcatggatgatgattt

SEQ ID NO: 408193 - DNA, 25 bp, Homo sapien
ccatgatttctgtgtatgttgctac

SEQ ID NO: 408194 - DNA, 25 bp, Homo sapien
tcgcaccgatccttgctctgttgtt

SEQ ID NO: 408195 - DNA, 25 bp, Homo sapien
tacttgctttctttccttttgtgtc

SEQ ID NO: 408196 - DNA, 25 bp, Homo sapien
tgctttctttccttttgtgtcttgt

SEQ ID NO: 408197 - DNA, 25 bp, Homo sapien
ttgctttctttccttttgtgtcttg

SEQ ID NO: 408198 - DNA, 25 bp, Homo sapien
ttgtgtcttgttttccttcttcttc

SEQ ID NO: 408199 - DNA, 25 bp, Homo sapien
gcccagtctgcagcgcagttgcacg

SEQ ID NO: 408200 - DNA, 25 bp, Homo sapien
cgcccagtctgcagcgcagttgcac

SEQ ID NO: 408201 - DNA, 25 bp, Homo sapien
cccagtctgcagcgcagttgcacga

SEQ ID NO: 408202 - DNA, 25 bp, Homo sapien
tatgtcaatggactcagcttcagca

SEQ ID NO: 408203 - DNA, 25 bp, Homo sapien
aacaagcagaagtctcacatgctgc

SEQ ID NO: 408204 - DNA, 25 bp, Homo sapien
ttggaagtatacactaaagctggac

SEQ ID NO: 408205 - DNA, 25 bp, Homo sapien
catgaaagacctgagaaatgtgtcc

SEQ ID NO: 408206 - DNA, 25 bp, Homo sapien
ctaggcacatctgggcccttgagac

SEQ ID NO: 408207 - DNA, 25 bp, Homo sapien
gctatacctgcatacaggcacaccg

SEQ ID NO: 408208 - DNA, 25 bp, Homo sapien
ggtcatgagctcagtggcgtcgtcc

SEQ ID NO: 408209 - DNA, 25 bp, Homo sapien
tctggaagcggcagctatacctgca

SEQ ID NO: 408210 - DNA, 25 bp, Homo sapien
cctgcatacaggcacaccgtcaggg

SEQ ID NO: 408211 - DNA, 25 bp, Homo sapien
gtcccgcagaaaggcggagagaggg

SEQ ID NO: 408212 - DNA, 25 bp, Homo sapien
ggcgtcccgcagaaaggcggagaga

SEQ ID NO: 408213 - DNA, 25 bp, Homo sapien
gccggcgtcccgcagaaaggcggag

SEQ ID NO: 408214 - DNA, 25 bp, Homo sapien
ctggccggcgtcccgcagaaaggcg

SEQ ID NO: 408215 - DNA, 25 bp, Homo sapien
agcatgaagctgggctcgaacccac

SEQ ID NO: 408216 - DNA, 25 bp, Homo sapien
agagcatgaagctgggctcgaaccc

SEQ ID NO: 408217 - DNA, 25 bp, Homo sapien
cgttcacctcgcacttctccaagag

SEQ ID NO: 408218 - DNA, 25 bp, Homo sapien
tcacctcgcacttctccaagagcat

SEQ ID NO: 408219 - DNA, 25 bp, Homo sapien
ggttggacgtacttgagggaattca

SEQ ID NO: 408220 - DNA, 25 bp, Homo sapien
ttggacgtacttgagggaattcaga

SEQ ID NO: 408221 - DNA, 25 bp, Homo sapien
caccaggttggacgtacttgaggga

SEQ ID NO: 408222 - DNA, 25 bp, Homo sapien
ccaggttggacgtacttgagggaat

SEQ ID NO: 408223 - DNA, 25 bp, Homo sapien
aagccaagcaccaccaggccccggg

SEQ ID NO: 408224 - DNA, 25 bp, Homo sapien
ccgaggcgccgctgcggctcgttca

SEQ ID NO: 408225 - DNA, 25 bp, Homo sapien
gggaagccaagcaccaccaggcccc

SEQ ID NO: 408226 - DNA, 25 bp, Homo sapien
cgaggcgccgctgcggctcgttcat

SEQ ID NO: 408227 - DNA, 25 bp, Homo sapien
gggacgccacattctcgataagtag

SEQ ID NO: 408228 - DNA, 25 bp, Homo sapien
acgccacattctcgataagtagtcc

SEQ ID NO: 408229 - DNA, 25 bp, Homo sapien
tggtgcctccgagggacgccacatt

SEQ ID NO: 408230 - DNA, 25 bp, Homo sapien
tgtagtcccggaccgtggtgcctcc

SEQ ID NO: 408231 - DNA, 25 bp, Homo sapien
aaaaggcttacaccgactgggcagc

SEQ ID NO: 408232 - DNA, 25 bp, Homo sapien
cagcagcacacagggcgcaactgtc

SEQ ID NO: 408233 - DNA, 25 bp, Homo sapien
acacagggcgcaactgtccgagaag

SEQ ID NO: 408234 - DNA, 25 bp, Homo sapien
gcgcgcgcggaaaaggcttacaccg

SEQ ID NO: 408235 - DNA, 25 bp, Homo sapien
ggccttgcaggacttccacattgca

SEQ ID NO: 408236 - DNA, 25 bp, Homo sapien
attttcctgcttgtgattcactttg

SEQ ID NO: 408237 - DNA, 25 bp, Homo sapien
ttttaggccttgcaggacttccaca

SEQ ID NO: 408238 - DNA, 25 bp, Homo sapien
tatgttttaggccttgcaggacttc

SEQ ID NO: 408239 - DNA, 25 bp, Homo sapien
tgtttctcccattgtaaatctggtc

SEQ ID NO: 408240 - DNA, 25 bp, Homo sapien
gtttctcccattgtaaatctggtca

SEQ ID NO: 408241 - DNA, 25 bp, Homo sapien
tctgtgtttctcccattgtaaatct

SEQ ID NO: 408242 - DNA, 25 bp, Homo sapien
tgtgtttctcccattgtaaatctgg

SEQ ID NO: 408243 - DNA, 25 bp, Homo sapien
atgtgtcaccactcccggtggattt

SEQ ID NO: 408244 - DNA, 25 bp, Homo sapien
gcatgtgtcaccactcccggtggat

SEQ ID NO: 408245 - DNA, 25 bp, Homo sapien
catgtgtcaccactcccggtggatt

SEQ ID NO: 408246 - DNA, 25 bp, Homo sapien
tgtgtcaccactcccggtggatttt

SEQ ID NO: 408247 - DNA, 25 bp, Homo sapien
tgccaggagccaagatactaatgcc

SEQ ID NO: 408248 - DNA, 25 bp, Homo sapien
tgctgtgcaaagtttcgtgcgggaa

SEQ ID NO: 408249 - DNA, 25 bp, Homo sapien
gaagccccagggaatgcctaggcat

SEQ ID NO: 408250 - DNA, 25 bp, Homo sapien
tgggactagccagtttaacaaagag

SEQ ID NO: 408251 - DNA, 25 bp, Homo sapien
acaaatgttaatttcaattccacct

SEQ ID NO: 408252 - DNA, 25 bp, Homo sapien
caagttctttaggagaaaaacagtg

SEQ ID NO: 408253 - DNA, 25 bp, Homo sapien
aacagtgtctttcatctacaaatgt

SEQ ID NO: 408254 - DNA, 25 bp, Homo sapien
taatttcaattccacctttatatga

SEQ ID NO: 408255 - DNA, 25 bp, Homo sapien
ggaggaagacgtgggcaagtagggc

SEQ ID NO: 408256 - DNA, 25 bp, Homo sapien
tgagttcatcgcaggaggaagacgt

SEQ ID NO: 408257 - DNA, 25 bp, Homo sapien
gtgcctgagttcatcgcaggaggaa

SEQ ID NO: 408258 - DNA, 25 bp, Homo sapien
gcctgagttcatcgcaggaggaaga

SEQ ID NO: 408259 - DNA, 25 bp, Homo sapien
tgttccatgttcaaggttcttttcc

SEQ ID NO: 408260 - DNA, 25 bp, Homo sapien
gcccagaggctgaacccgtgtctcc

SEQ ID NO: 408261 - DNA, 25 bp, Homo sapien
ggctgaacccgtgtctccttgttcc

SEQ ID NO: 408262 - DNA, 25 bp, Homo sapien
ccttgttccatgttcaaggttcttt

SEQ ID NO: 408263 - DNA, 25 bp, Homo sapien
gtagtgcgggtgaggattttgcctt

SEQ ID NO: 408264 - DNA, 25 bp, Homo sapien
attttcatttgtgcttaattcaatc

SEQ ID NO: 408265 - DNA, 25 bp, Homo sapien
ctggcaggagtagtgcgggtgagga

SEQ ID NO: 408266 - DNA, 25 bp, Homo sapien
ttcatttgtgcttaattcaatctga

SEQ ID NO: 408267 - DNA, 25 bp, Homo sapien
caggagcactcaggtttctgatgct

SEQ ID NO: 408268 - DNA, 25 bp, Homo sapien
caaggtagtgatgcgacaggagcac

SEQ ID NO: 408269 - DNA, 25 bp, Homo sapien
gatgcgacaggagcactcaggtttc

SEQ ID NO: 408270 - DNA, 25 bp, Homo sapien
tgatccgagccccaaggtagtgatg

SEQ ID NO: 408271 - DNA, 25 bp, Homo sapien
tggctggaaatgatgctcatgctct

SEQ ID NO: 408272 - DNA, 25 bp, Homo sapien
gctctcataacgagtggcagggaaa

SEQ ID NO: 408273 - DNA, 25 bp, Homo sapien
tcaggctaccataaaggatggttcc

SEQ ID NO: 408274 - DNA, 25 bp, Homo sapien
aaaggatggttccacgaaatggctg

SEQ ID NO: 408275 - DNA, 25 bp, Homo sapien
cattctgatagactttgccgtgttt

SEQ ID NO: 408276 - DNA, 25 bp, Homo sapien
ctgatagactttgccgtgtttggca

SEQ ID NO: 408277 - DNA, 25 bp, Homo sapien
tcattctgatagactttgccgtgtt

SEQ ID NO: 408278 - DNA, 25 bp, Homo sapien
ttctgatagactttgccgtgtttgg

SEQ ID NO: 408279 - DNA, 25 bp, Homo sapien
gaataagccagtcccgtaagaatgt

SEQ ID NO: 408280 - DNA, 25 bp, Homo sapien
taagaatgttagaggaggcctttcc

SEQ ID NO: 408281 - DNA, 25 bp, Homo sapien
ggcctttccgtgtccagcaataaat

SEQ ID NO: 408282 - DNA, 25 bp, Homo sapien
agatcatcctgattgctgcaccaag

SEQ ID NO: 408283 - DNA, 25 bp, Homo sapien
cattcgtctatggttattgtcagac

SEQ ID NO: 408284 - DNA, 25 bp, Homo sapien
tcgtctatggttattgtcagactga

SEQ ID NO: 408285 - DNA, 25 bp, Homo sapien
tctatggttattgtcagactgactc

SEQ ID NO: 408286 - DNA, 25 bp, Homo sapien
ctcattcgtctatggttattgtcag

SEQ ID NO: 408287 - DNA, 25 bp, Homo sapien
tctgtatcctatcacaaacttcatc

SEQ ID NO: 408288 - DNA, 25 bp, Homo sapien
cttcatccaggatatctgtgtttat

SEQ ID NO: 408289 - DNA, 25 bp, Homo sapien
tcacaaacttcatccaggatatctg

SEQ ID NO: 408290 - DNA, 25 bp, Homo sapien
acctgtctctgtatcctatcacaaa

SEQ ID NO: 408291 - DNA, 25 bp, Homo sapien
gctgagattgtagaaagacaaatag

SEQ ID NO: 408292 - DNA, 25 bp, Homo sapien
ttttgtttagctgagattgtagaaa

SEQ ID NO: 408293 - DNA, 25 bp, Homo sapien
gcatataagttttcattgaatgaaa

SEQ ID NO: 408294 - DNA, 25 bp, Homo sapien
caaatagtatattagcaattctcaa

SEQ ID NO: 408295 - DNA, 25 bp, Homo sapien
catagaggatgtgtaatttggcccc

SEQ ID NO: 408296 - DNA, 25 bp, Homo sapien
taagtgtgccccatggagcattgac

SEQ ID NO: 408297 - DNA, 25 bp, Homo sapien
caatgcatcgcatgagggtgccaaa

SEQ ID NO: 408298 - DNA, 25 bp, Homo sapien
agagaagcagatacccgtgggtcca

SEQ ID NO: 408299 - DNA, 25 bp, Homo sapien
tttctaccaatatcccatcagccga

SEQ ID NO: 408300 - DNA, 25 bp, Homo sapien
aatatcccatcagccgaaactactc

SEQ ID NO: 408301 - DNA, 25 bp, Homo sapien
taccaatatcccatcagccgaaact

SEQ ID NO: 408302 - DNA, 25 bp, Homo sapien
attttttctaccaatatcccatcag

SEQ ID NO: 408303 - DNA, 25 bp, Homo sapien
acagtgaaaacccaagcatgcatct

SEQ ID NO: 408304 - DNA, 25 bp, Homo sapien
ttctgttggtccgtatctccatgca

SEQ ID NO: 408305 - DNA, 25 bp, Homo sapien
tggtccgtatctccatgcacagcag

SEQ ID NO: 408306 - DNA, 25 bp, Homo sapien
agacagtgaaaacccaagcatgcat

SEQ ID NO: 408307 - DNA, 25 bp, Homo sapien
cagaattggtggatactctccagga

SEQ ID NO: 408308 - DNA, 25 bp, Homo sapien
attgatgcagaattggtggatactc

SEQ ID NO: 408309 - DNA, 25 bp, Homo sapien
ggtggatactctccaggatcaactc

SEQ ID NO: 408310 - DNA, 25 bp, Homo sapien
gatgcagaattggtggatactctcc

SEQ ID NO: 408311 - DNA, 25 bp, Homo sapien
ccaatacaggcattacaagaggtac

SEQ ID NO: 408312 - DNA, 25 bp, Homo sapien
caagaggtactcatgtagtctccag

SEQ ID NO: 408313 - DNA, 25 bp, Homo sapien
cagttctctagtgggtgctaagacc

SEQ ID NO: 408314 - DNA, 25 bp, Homo sapien
tagatctaactcaatctgtggcaga

SEQ ID NO: 408315 - DNA, 25 bp, Homo sapien
agtctccacatctagctctatgtgc

SEQ ID NO: 408316 - DNA, 25 bp, Homo sapien
tctccacatctagctctatgtgccc

SEQ ID NO: 408317 - DNA, 25 bp, Homo sapien
ctccacatctagctctatgtgccct

SEQ ID NO: 408318 - DNA, 25 bp, Homo sapien
gtctccacatctagctctatgtgcc

SEQ ID NO: 408319 - DNA, 25 bp, Homo sapien
gggatggataccactctcgacacat

SEQ ID NO: 408320 - DNA, 25 bp, Homo sapien
gagggatggataccactctcgacac

SEQ ID NO: 408321 - DNA, 25 bp, Homo sapien
tgagggatggataccactctcgaca

SEQ ID NO: 408322 - DNA, 25 bp, Homo sapien
ctgagggatggataccactctcgac

SEQ ID NO: 408323 - DNA, 25 bp, Homo sapien
tccagaccagatatacaaagtccca

SEQ ID NO: 408324 - DNA, 25 bp, Homo sapien
accagaaacaggcttccagaccaga

SEQ ID NO: 408325 - DNA, 25 bp, Homo sapien
aagtcccatagcactcctcattccc

SEQ ID NO: 408326 - DNA, 25 bp, Homo sapien
ctagctgtacgtaccagaaacaggc

SEQ ID NO: 408327 - DNA, 25 bp, Homo sapien
cagtcaggaatgccaccagttttac

SEQ ID NO: 408328 - DNA, 25 bp, Homo sapien
tcagtcaggaatgccaccagtttta

SEQ ID NO: 408329 - DNA, 25 bp, Homo sapien
tttacaggtgccgagcaacgtatca

SEQ ID NO: 408330 - DNA, 25 bp, Homo sapien
ggtgccgagcaacgtatcagctctt

SEQ ID NO: 408331 - DNA, 25 bp, Homo sapien
gagcaacgtatcagctcttcttccc

SEQ ID NO: 408332 - DNA, 25 bp, Homo sapien
aggcacgtttacaggtgccgagcaa

SEQ ID NO: 408333 - DNA, 25 bp, Homo sapien
tatgtggattttaagtcattctggt

SEQ ID NO: 408334 - DNA, 25 bp, Homo sapien
tgtatgtggattttaagtcattctg

SEQ ID NO: 408335 - DNA, 25 bp, Homo sapien
tgtggattttaagtcattctggttg

SEQ ID NO: 408336 - DNA, 25 bp, Homo sapien
tgagtgtatgtggattttaagtcat

SEQ ID NO: 408337 - DNA, 25 bp, Homo sapien
atgactagggatgtaggcgacccca

SEQ ID NO: 408338 - DNA, 25 bp, Homo sapien
gattcattcgcattgaatttggtga

SEQ ID NO: 408339 - DNA, 25 bp, Homo sapien
gtcttcagattcattcgcattgaat

SEQ ID NO: 408340 - DNA, 25 bp, Homo sapien
ccatgactagggatgtaggcgaccc

SEQ ID NO: 408341 - DNA, 25 bp, Homo sapien
ttggccaatacaaaccccggccaca

SEQ ID NO: 408342 - DNA, 25 bp, Homo sapien
tggccaatacaaaccccggccacag

SEQ ID NO: 408343 - DNA, 25 bp, Homo sapien
atgcggatgacgtggaaggagtgga

SEQ ID NO: 408344 - DNA, 25 bp, Homo sapien
caacgtcttgttgatgcggatgacg

SEQ ID NO: 408345 - DNA, 25 bp, Homo sapien
gacaacgtcttgttgatgcggatga

SEQ ID NO: 408346 - DNA, 25 bp, Homo sapien
aggacaacgtcttgttgatgcggat

SEQ ID NO: 408347 - DNA, 25 bp, Homo sapien
ccggatatggaagccatctttgcca

SEQ ID NO: 408348 - DNA, 25 bp, Homo sapien
tcaaagatgcgaatcttgacatcaa

SEQ ID NO: 408349 - DNA, 25 bp, Homo sapien
tgacatcaaggacaccttggcagaa

SEQ ID NO: 408350 - DNA, 25 bp, Homo sapien
aaagatgcgaatcttgacatcaagg

SEQ ID NO: 408351 - DNA, 25 bp, Homo sapien
cttgacatcaaggacaccttggcag

SEQ ID NO: 408352 - DNA, 25 bp, Homo sapien
tactcattcttctcagcggctctgg

SEQ ID NO: 408353 - DNA, 25 bp, Homo sapien
aacccactaacccagaagcttgagg

SEQ ID NO: 408354 - DNA, 25 bp, Homo sapien
cagagctaatactgctggaaatcaa

SEQ ID NO: 408355 - DNA, 25 bp, Homo sapien
tctttggtgagcaataacccactaa

SEQ ID NO: 408356 - DNA, 25 bp, Homo sapien
gagattcttggcagagctgaagcaa

SEQ ID NO: 408357 - DNA, 25 bp, Homo sapien
gctaagagattcttggcagagctga

SEQ ID NO: 408358 - DNA, 25 bp, Homo sapien
tgctaagagattcttggcagagctg

SEQ ID NO: 408359 - DNA, 25 bp, Homo sapien
tcatgagagaaacttcaaggatgcg

SEQ ID NO: 408360 - DNA, 25 bp, Homo sapien
catgagagaaacttcaaggatgcgg

SEQ ID NO: 408361 - DNA, 25 bp, Homo sapien
tgagagaaacttcaaggatgcggac

SEQ ID NO: 408362 - DNA, 25 bp, Homo sapien
atgagagaaacttcaaggatgcgga

SEQ ID NO: 408363 - DNA, 25 bp, Homo sapien
ttagtgaagtaagttccagtctcct

SEQ ID NO: 408364 - DNA, 25 bp, Homo sapien
tccttctatatctccctcacctttg

SEQ ID NO: 408365 - DNA, 25 bp, Homo sapien
tgtacagccactggtactgatcatt

SEQ ID NO: 408366 - DNA, 25 bp, Homo sapien
ccactggtactgatcattgttttca

SEQ ID NO: 408367 - DNA, 25 bp, Homo sapien
gccaagaaatctctgtgatttggag

SEQ ID NO: 408368 - DNA, 25 bp, Homo sapien
tctctgtgatttggaggatagagca

SEQ ID NO: 408369 - DNA, 25 bp, Homo sapien
gaaatctctgtgatttggaggatag

SEQ ID NO: 408370 - DNA, 25 bp, Homo sapien
ctgttaatgccaagaaatctctgtg

SEQ ID NO: 408371 - DNA, 25 bp, Homo sapien
ttatgagtaacactccccttttctg

SEQ ID NO: 408372 - DNA, 25 bp, Homo sapien
ttatccttgacccaaagttttatca

SEQ ID NO: 408373 - DNA, 25 bp, Homo sapien
ttgagaggtaaacttgcaagctcca

SEQ ID NO: 408374 - DNA, 25 bp, Homo sapien
tgtgcgttgtgcgcatgtgaagttg

SEQ ID NO: 408375 - DNA, 25 bp, Homo sapien
tgagaggtaaacttgcaagctccat

SEQ ID NO: 408376 - DNA, 25 bp, Homo sapien
gcgttgtgcgcatgtgaagttgaga

SEQ ID NO: 408377 - DNA, 25 bp, Homo sapien
taagtgccaagtccccaatgtttct

SEQ ID NO: 408378 - DNA, 25 bp, Homo sapien
tgataagtgccaagtccccaatgtt

SEQ ID NO: 408379 - DNA, 25 bp, Homo sapien
gccaagtccccaatgtttctgatca

SEQ ID NO: 408380 - DNA, 25 bp, Homo sapien
tttcatgataagtgccaagtcccca

SEQ ID NO: 408381 - DNA, 25 bp, Homo sapien
cttgctttccagtctgatatatgcc

SEQ ID NO: 408382 - DNA, 25 bp, Homo sapien
tgtttaacttgctttccagtctgat

SEQ ID NO: 408383 - DNA, 25 bp, Homo sapien
tttaacttgctttccagtctgatat

SEQ ID NO: 408384 - DNA, 25 bp, Homo sapien
tgctttccagtctgatatatgccat

SEQ ID NO: 408385 - DNA, 25 bp, Homo sapien
tcagatcagcatgtcagagataggt

SEQ ID NO: 408386 - DNA, 25 bp, Homo sapien
gataggtgaagttacactggtgtgt

SEQ ID NO: 408387 - DNA, 25 bp, Homo sapien
ttacactggtgtgttgggtgtttcc

SEQ ID NO: 408388 - DNA, 25 bp, Homo sapien
tgttgggtgtttcctgatgaatatc

SEQ ID NO: 408389 - DNA, 25 bp, Homo sapien
ctggcgcaattcctccataactgtc

SEQ ID NO: 408390 - DNA, 25 bp, Homo sapien
tggcgcaattcctccataactgtca

SEQ ID NO: 408391 - DNA, 25 bp, Homo sapien
atatcttccaagatgtggatgggca

SEQ ID NO: 408392 - DNA, 25 bp, Homo sapien
aagcctttagagcaaagacaggtct

SEQ ID NO: 408393 - DNA, 25 bp, Homo sapien
gcctttagagcaaagacaggtctct

SEQ ID NO: 408394 - DNA, 25 bp, Homo sapien
attttgcctaaggactgcatttcca

SEQ ID NO: 408395 - DNA, 25 bp, Homo sapien
tatacatgtagttggaacaaatctg

SEQ ID NO: 408396 - DNA, 25 bp, Homo sapien
taaagttatattcatgtccaaaggc

SEQ ID NO: 408397 - DNA, 25 bp, Homo sapien
tttctaaggtgggataacaatatct

SEQ ID NO: 408398 - DNA, 25 bp, Homo sapien
tatgtccaagcacaatagtctatga

SEQ ID NO: 408399 - DNA, 25 bp, Homo sapien
tgtttatacactagtgaagaaggac

SEQ ID NO: 408400 - DNA, 25 bp, Homo sapien
gaaattcgacgtggagaaacagcct

SEQ ID NO: 408401 - DNA, 25 bp, Homo sapien
tcaagaagaggctaataactcatgc

SEQ ID NO: 408402 - DNA, 25 bp, Homo sapien
tcagataggagacaagtgagcatgt

SEQ ID NO: 408403 - DNA, 25 bp, Homo sapien
cacgtggctgcgctgaagtctttga

SEQ ID NO: 408404 - DNA, 25 bp, Homo sapien
caagtggagctgtggtaaacagacc

SEQ ID NO: 408405 - DNA, 25 bp, Homo sapien
ctcagaaggctgtcggattggcaaa

SEQ ID NO: 408406 - DNA, 25 bp, Homo sapien
tatgttcacccgtgcatgcaggagg

SEQ ID NO: 408407 - DNA, 25 bp, Homo sapien
taggtacaatagtatctggtatctg

SEQ ID NO: 408408 - DNA, 25 bp, Homo sapien
caattgattatgtgagcagaggtgg

SEQ ID NO: 408409 - DNA, 25 bp, Homo sapien
agatcgagcccatggccgtgaagca

SEQ ID NO: 408410 - DNA, 25 bp, Homo sapien
tgaagcagggcagttaagagccatc

SEQ ID NO: 408411 - DNA, 25 bp, Homo sapien
tcagaggcactaatgcatcgtcagt

SEQ ID NO: 408412 - DNA, 25 bp, Homo sapien
cactgacatgtggtcgattctcgga

SEQ ID NO: 408413 - DNA, 25 bp, Homo sapien
tggtcctcgaaacatggaaagtctg

SEQ ID NO: 408414 - DNA, 25 bp, Homo sapien
ggaaagtctgctgtcacgctgcacg

SEQ ID NO: 408415 - DNA, 25 bp, Homo sapien
cacaaaggtaaggaggtgagtcagc

SEQ ID NO: 408416 - DNA, 25 bp, Homo sapien
tttgatggtctctgctgagggactt

SEQ ID NO: 408417 - DNA, 25 bp, Homo sapien
tcatttggataaacttttgatggtc

SEQ ID NO: 408418 - DNA, 25 bp, Homo sapien
ctgagggacttgagtttccaacttt

SEQ ID NO: 408419 - DNA, 25 bp, Homo sapien
tcaggtatgtggtaggatgtccctc

SEQ ID NO: 408420 - DNA, 25 bp, Homo sapien
tcaacaacggtgtgagtggactagt

SEQ ID NO: 408421 - DNA, 25 bp, Homo sapien
tctttggcaggaagctactatgagc

SEQ ID NO: 408422 - DNA, 25 bp, Homo sapien
taaaagactatggaggtaacgtgcc

SEQ ID NO: 408423 - DNA, 25 bp, Homo sapien
gaaagagtcctgaaattataagtac

SEQ ID NO: 408424 - DNA, 25 bp, Homo sapien
ttatactgaaacttaacaggcttcc

SEQ ID NO: 408425 - DNA, 25 bp, Homo sapien
caatgttaggatagcaaatagcaga

SEQ ID NO: 408426 - DNA, 25 bp, Homo sapien
catagtgttagtctgcatagtttgg

SEQ ID NO: 408427 - DNA, 25 bp, Homo sapien
gctgtacttacaacatctgacttga

SEQ ID NO: 408428 - DNA, 25 bp, Homo sapien
tctgacttgagtacaactatctgat

SEQ ID NO: 408429 - DNA, 25 bp, Homo sapien
tgatgattctaataacacggtctcc

SEQ ID NO: 408430 - DNA, 25 bp, Homo sapien
tatatttcactggtgtactcacctg

SEQ ID NO: 408431 - DNA, 25 bp, Homo sapien
tgggatgtcaccagattcagactca

SEQ ID NO: 408432 - DNA, 25 bp, Homo sapien
agtttccataatgccgttgccaaca

SEQ ID NO: 408433 - DNA, 25 bp, Homo sapien
ggaaacctggtcaacaacatatggg

SEQ ID NO: 408434 - DNA, 25 bp, Homo sapien
tcaggccactgtctagaccacagga

SEQ ID NO: 408435 - DNA, 25 bp, Homo sapien
caagtattggttgagtcacatagtt

SEQ ID NO: 408436 - DNA, 25 bp, Homo sapien
gttgcaagtattggttgagtcacat

SEQ ID NO: 408437 - DNA, 25 bp, Homo sapien
ttagttgcaagtattggttgagtca

SEQ ID NO: 408438 - DNA, 25 bp, Homo sapien
gtattggttgagtcacatagttcat

SEQ ID NO: 408439 - DNA, 25 bp, Homo sapien
attcagttatcaattccaatctagg

SEQ ID NO: 408440 - DNA, 25 bp, Homo sapien
tatccatcaagcatattatatctgc

SEQ ID NO: 408441 - DNA, 25 bp, Homo sapien
gagatcaagataatcaaacaagccc

SEQ ID NO: 408442 - DNA, 25 bp, Homo sapien
caagcccctaagtctctgttcatct

SEQ ID NO: 408443 - DNA, 25 bp, Homo sapien
tcataccctgccaaggcttcggtca

SEQ ID NO: 408444 - DNA, 25 bp, Homo sapien
tgtgaccctggtctcatcataccct

SEQ ID NO: 408445 - DNA, 25 bp, Homo sapien
ctggtctcatcataccctgccaagg

SEQ ID NO: 408446 - DNA, 25 bp, Homo sapien
tcatcataccctgccaaggcttcgg

SEQ ID NO: 408447 - DNA, 25 bp, Homo sapien
tggacatgatgacataggtaccatc

SEQ ID NO: 408448 - DNA, 25 bp, Homo sapien
catcatactgcccatatcgtgctac

SEQ ID NO: 408449 - DNA, 25 bp, Homo sapien
taggttgttcctaagccccacatcc

SEQ ID NO: 408450 - DNA, 25 bp, Homo sapien
ggcagtggctcctcctaggttgttc

SEQ ID NO: 408451 - DNA, 25 bp, Homo sapien
ggattacagatcatgccttcagcca

SEQ ID NO: 408452 - DNA, 25 bp, Homo sapien
catgaagtgcaagagctgttgccaa

SEQ ID NO: 408453 - DNA, 25 bp, Homo sapien
tagaagttctaactttgggcagcag

SEQ ID NO: 408454 - DNA, 25 bp, Homo sapien
aatatacactccaagccaacagaag

SEQ ID NO: 408455 - DNA, 25 bp, Homo sapien
tatcaatggcatagcactatgttca

SEQ ID NO: 408456 - DNA, 25 bp, Homo sapien
tcaatgttgtcatagggaccacctc

SEQ ID NO: 408457 - DNA, 25 bp, Homo sapien
tcatagggaccacctcttacactct

SEQ ID NO: 408458 - DNA, 25 bp, Homo sapien
tcctctggtcttctcgtatcaatgg

SEQ ID NO: 408459 - DNA, 25 bp, Homo sapien
ctgttgcaaaagggaaccattattg

SEQ ID NO: 408460 - DNA, 25 bp, Homo sapien
tgttgcaaaagggaaccattattgt

SEQ ID NO: 408461 - DNA, 25 bp, Homo sapien
gtacgtggagacagtggaagaatga

SEQ ID NO: 408462 - DNA, 25 bp, Homo sapien
atcttcagtggcaagagtacgtgga

SEQ ID NO: 408463 - DNA, 25 bp, Homo sapien
tcagtggcaagagtacgtggagaca

SEQ ID NO: 408464 - DNA, 25 bp, Homo sapien
ttcagtggcaagagtacgtggagac

SEQ ID NO: 408465 - DNA, 25 bp, Homo sapien
gtgaatccatgctggagcttcagtt

SEQ ID NO: 408466 - DNA, 25 bp, Homo sapien
ggcgttgtctttaggcataaagtaa

SEQ ID NO: 408467 - DNA, 25 bp, Homo sapien
ccatgctggagcttcagtttgctct

SEQ ID NO: 408468 - DNA, 25 bp, Homo sapien
cctgggcgttgtctttaggcataaa

SEQ ID NO: 408469 - DNA, 25 bp, Homo sapien
tcttctggtgtaacaacgggagcca

SEQ ID NO: 408470 - DNA, 25 bp, Homo sapien
cttgtccatacagccagcagtgctg

SEQ ID NO: 408471 - DNA, 25 bp, Homo sapien
aacgggagccaacacctaggtggat

SEQ ID NO: 408472 - DNA, 25 bp, Homo sapien
atttgtccttgtccatacagccagc

SEQ ID NO: 408473 - DNA, 25 bp, Homo sapien
ttctttctcaattcggtcatctccc

SEQ ID NO: 408474 - DNA, 25 bp, Homo sapien
gcaggttttattccagggttgtgga

SEQ ID NO: 408475 - DNA, 25 bp, Homo sapien
tgacatccctcagacaacagagcag

SEQ ID NO: 408476 - DNA, 25 bp, Homo sapien
tttgaatctgacatccctcagacaa

SEQ ID NO: 408477 - DNA, 25 bp, Homo sapien
cagtcgtctaggaaagcatactgtc

SEQ ID NO: 408478 - DNA, 25 bp, Homo sapien
agtccagtcgtctaggaaagcatac

SEQ ID NO: 408479 - DNA, 25 bp, Homo sapien
tccagtcgtctaggaaagcatactg

SEQ ID NO: 408480 - DNA, 25 bp, Homo sapien
tcaagtccagtcgtctaggaaagca

SEQ ID NO: 408481 - DNA, 25 bp, Homo sapien
gttaggtgcatctattacagggaac

SEQ ID NO: 408482 - DNA, 25 bp, Homo sapien
ccaagtttggctcacgttagtggaa

SEQ ID NO: 408483 - DNA, 25 bp, Homo sapien
tccaccactaggaatgttgtacatt

SEQ ID NO: 408484 - DNA, 25 bp, Homo sapien
gagagattctttaactttagggcgc

SEQ ID NO: 408485 - DNA, 25 bp, Homo sapien
ggctcctttgtcacaaatgagttta

SEQ ID NO: 408486 - DNA, 25 bp, Homo sapien
tacgatagctctgtagcagaatttg

SEQ ID NO: 408487 - DNA, 25 bp, Homo sapien
ttgtgttccaattggtctatgtgtc

SEQ ID NO: 408488 - DNA, 25 bp, Homo sapien
tgctgctttcattacgatagctctg

SEQ ID NO: 408489 - DNA, 25 bp, Homo sapien
taacaccatgttttgggctcaagaa

SEQ ID NO: 408490 - DNA, 25 bp, Homo sapien
catggtgagttagacgatacttctc

SEQ ID NO: 408491 - DNA, 25 bp, Homo sapien
gatgtctcccgtgttctgtaaattg

SEQ ID NO: 408492 - DNA, 25 bp, Homo sapien
ggaagcttccagattaaaggtgaca

SEQ ID NO: 408493 - DNA, 25 bp, Homo sapien
tttctcttcctctgtggttctgcat

SEQ ID NO: 408494 - DNA, 25 bp, Homo sapien
attctccttctgcatctgccttctt

SEQ ID NO: 408495 - DNA, 25 bp, Homo sapien
tccttctgcatctgccttcttttct

SEQ ID NO: 408496 - DNA, 25 bp, Homo sapien
cttttctcttcctctgtggttctgc

SEQ ID NO: 408497 - DNA, 25 bp, Homo sapien
caacttttaagctcaagggaacatg

SEQ ID NO: 408498 - DNA, 25 bp, Homo sapien
caagggaacatgttcaggatataga

SEQ ID NO: 408499 - DNA, 25 bp, Homo sapien
tagagtgtgcagtttggtacatagg

SEQ ID NO: 408500 - DNA, 25 bp, Homo sapien
atatagagtgtgcagtttggtacat

SEQ ID NO: 408501 - DNA, 25 bp, Homo sapien
taatgcagctgtcaagctatggaca

SEQ ID NO: 408502 - DNA, 25 bp, Homo sapien
ttcaatgggcgctcactgtaaaggt

SEQ ID NO: 408503 - DNA, 25 bp, Homo sapien
gaagctccctcctaggtaatgcagc

SEQ ID NO: 408504 - DNA, 25 bp, Homo sapien
caagttcagcagattagaatcccag

SEQ ID NO: 408505 - DNA, 25 bp, Homo sapien
caaggtagccacttcgaagcattta

SEQ ID NO: 408506 - DNA, 25 bp, Homo sapien
tgtgtgctacaagatggcagctccc

SEQ ID NO: 408507 - DNA, 25 bp, Homo sapien
cagcatctctgggaggtaagtagga

SEQ ID NO: 408508 - DNA, 25 bp, Homo sapien
gtgctcattaaagccacttcccaag

SEQ ID NO: 408509 - DNA, 25 bp, Homo sapien
catagccttgaaacactaatgtcat

SEQ ID NO: 408510 - DNA, 25 bp, Homo sapien
cattattggtgtattctcatagcct

SEQ ID NO: 408511 - DNA, 25 bp, Homo sapien
tggtgtattctcatagccttgaaac

SEQ ID NO: 408512 - DNA, 25 bp, Homo sapien
acactaatgtcatgttgatgtctgc

SEQ ID NO: 408513 - DNA, 25 bp, Homo sapien
cctggcaacctataatcctgaaatg

SEQ ID NO: 408514 - DNA, 25 bp, Homo sapien
aaaaatgctcgtaatcactgatctc

SEQ ID NO: 408515 - DNA, 25 bp, Homo sapien
tcctgccaaggctatagaaaaaggg

SEQ ID NO: 408516 - DNA, 25 bp, Homo sapien
caagaaaagtctcatatctggaatc

SEQ ID NO: 408517 - DNA, 25 bp, Homo sapien
tgggagatgggctcaaccgtaccac

SEQ ID NO: 408518 - DNA, 25 bp, Homo sapien
ctacagttctttgccctactgtcat

SEQ ID NO: 408519 - DNA, 25 bp, Homo sapien
tgccctactgtcatagggttttcct

SEQ ID NO: 408520 - DNA, 25 bp, Homo sapien
tccattacctttaacattactgaaa

SEQ ID NO: 408521 - DNA, 25 bp, Homo sapien
catggatggattcttgtgaggaccc

SEQ ID NO: 408522 - DNA, 25 bp, Homo sapien
taatctcattcacatgggctccagt

SEQ ID NO: 408523 - DNA, 25 bp, Homo sapien
ttatgggactgtgatatgatctggc

SEQ ID NO: 408524 - DNA, 25 bp, Homo sapien
agaaatatgagattagagtgccagc

SEQ ID NO: 408525 - DNA, 25 bp, Homo sapien
taattagcacaatggaaggacctcc

SEQ ID NO: 408526 - DNA, 25 bp, Homo sapien
gaaatgcagttattccaaggacaat

SEQ ID NO: 408527 - DNA, 25 bp, Homo sapien
gaaattgcatggaactgaacaggaa

SEQ ID NO: 408528 - DNA, 25 bp, Homo sapien
ccaatggttagatgtcccgttatac

SEQ ID NO: 408529 - DNA, 25 bp, Homo sapien
cctgtacagtgagcaatcttttggg

SEQ ID NO: 408530 - DNA, 25 bp, Homo sapien
ctcactctcactggtaatttacaaa

SEQ ID NO: 408531 - DNA, 25 bp, Homo sapien
gaatttctatgtggacactaaagta

SEQ ID NO: 408532 - DNA, 25 bp, Homo sapien
gccaagagtccctgtacagtgagca

SEQ ID NO: 408533 - DNA, 25 bp, Homo sapien
cagcaatatcgacaacaacaatagc

SEQ ID NO: 408534 - DNA, 25 bp, Homo sapien
taaacagcaatatcgacaacaacaa

SEQ ID NO: 408535 - DNA, 25 bp, Homo sapien
aataaacagcaatatcgacaacaac

SEQ ID NO: 408536 - DNA, 25 bp, Homo sapien
caatatcgacaacaacaatagcagt

SEQ ID NO: 408537 - DNA, 25 bp, Homo sapien
tcctagcctctagtttgtatacatt

SEQ ID NO: 408538 - DNA, 25 bp, Homo sapien
cctagcctctagtttgtatacattt

SEQ ID NO: 408539 - DNA, 25 bp, Homo sapien
tctttgctaatcctcactgctgact

SEQ ID NO: 408540 - DNA, 25 bp, Homo sapien
catttcacaaggtaactactgtcac

SEQ ID NO: 408541 - DNA, 25 bp, Homo sapien
gaattgcgtggtcaaagccctttaa

SEQ ID NO: 408542 - DNA, 25 bp, Homo sapien
tgtcaccttggaaatgaattgcgtg

SEQ ID NO: 408543 - DNA, 25 bp, Homo sapien
tggatagttcccctcaagtttgggc

SEQ ID NO: 408544 - DNA, 25 bp, Homo sapien
taggcccaggtggtataatgcctca

SEQ ID NO: 408545 - DNA, 25 bp, Homo sapien
cattccctgggcaaagacattgtga

SEQ ID NO: 408546 - DNA, 25 bp, Homo sapien
gagtgcatcatacacgctacaggca

SEQ ID NO: 408547 - DNA, 25 bp, Homo sapien
tgtaccaaatatgtctcaagcctgg

SEQ ID NO: 408548 - DNA, 25 bp, Homo sapien
taagcatccagcactattgcaggaa

SEQ ID NO: 408549 - DNA, 25 bp, Homo sapien
ggtgaagtctcagtaactcgagcag

SEQ ID NO: 408550 - DNA, 25 bp, Homo sapien
gaagtgcatgtacggagagttacgc

SEQ ID NO: 408551 - DNA, 25 bp, Homo sapien
gagagttcgttttgacaatccaaga

SEQ ID NO: 408552 - DNA, 25 bp, Homo sapien
ccaagagaagtgtatgtttcgcata

SEQ ID NO: 408553 - DNA, 25 bp, Homo sapien
cattcctgttagaccagcttctaaa

SEQ ID NO: 408554 - DNA, 25 bp, Homo sapien
cagatgcgtcccgagtttcttctct

SEQ ID NO: 408555 - DNA, 25 bp, Homo sapien
tataagaattattacctacacaagg

SEQ ID NO: 408556 - DNA, 25 bp, Homo sapien
aatttccatcaacaatatgcaagag

SEQ ID NO: 408557 - DNA, 25 bp, Homo sapien
tggttaaaacttaatgccttctggc

SEQ ID NO: 408558 - DNA, 25 bp, Homo sapien
tattagagaaacacataactgcata

SEQ ID NO: 408559 - DNA, 25 bp, Homo sapien
tgtcagcctctgcaatgctttctgt

SEQ ID NO: 408560 - DNA, 25 bp, Homo sapien
tgctttctgttctacagggtgtagg

SEQ ID NO: 408561 - DNA, 25 bp, Homo sapien
tatctgaagtagtggtgtcagcctc

SEQ ID NO: 408562 - DNA, 25 bp, Homo sapien
tctactctgtcttagagtttccaac

SEQ ID NO: 408563 - DNA, 25 bp, Homo sapien
tctttgcatggcttgacacttcatc

SEQ ID NO: 408564 - DNA, 25 bp, Homo sapien
ggcaaccactggtatgttaagcata

SEQ ID NO: 408565 - DNA, 25 bp, Homo sapien
gaaggacactctggttgcttacagt

SEQ ID NO: 408566 - DNA, 25 bp, Homo sapien
tgtggattgcaacagactgatagtg

SEQ ID NO: 408567 - DNA, 25 bp, Homo sapien
accatactcggtcttttatccctcg

SEQ ID NO: 408568 - DNA, 25 bp, Homo sapien
tacactgcaccatactcggtctttt

SEQ ID NO: 408569 - DNA, 25 bp, Homo sapien
gctgcgtcgtatttcatagtatata

SEQ ID NO: 408570 - DNA, 25 bp, Homo sapien
tttatggctgcgtcgtatttcatag

SEQ ID NO: 408571 - DNA, 25 bp, Homo sapien
ccaattataccagcaacatttgctg

SEQ ID NO: 408572 - DNA, 25 bp, Homo sapien
agtccttaattcgtttggcgttgat

SEQ ID NO: 408573 - DNA, 25 bp, Homo sapien
tatgcctgtttttcaaccagtacca

SEQ ID NO: 408574 - DNA, 25 bp, Homo sapien
atttgctgaaagtgatgtcctttcc

SEQ ID NO: 408575 - DNA, 25 bp, Homo sapien
atatcatcagcaaatcatatcatca

SEQ ID NO: 408576 - DNA, 25 bp, Homo sapien
catatcatcagcaaatcatatcatc

SEQ ID NO: 408577 - DNA, 25 bp, Homo sapien
ttgatttcaacctccacttggtcac

SEQ ID NO: 408578 - DNA, 25 bp, Homo sapien
cacagatggtaataatagagaggcc

SEQ ID NO: 408579 - DNA, 25 bp, Homo sapien
gttgacacagatggtaataatagag

SEQ ID NO: 408580 - DNA, 25 bp, Homo sapien
acacagatggtaataatagagaggc

SEQ ID NO: 408581 - DNA, 25 bp, Homo sapien
tgacacagatggtaataatagagag

SEQ ID NO: 408582 - DNA, 25 bp, Homo sapien
agtcatccgaacactgtacacacca

SEQ ID NO: 408583 - DNA, 25 bp, Homo sapien
ttaagtcatccgaacactgtacaca

SEQ ID NO: 408584 - DNA, 25 bp, Homo sapien
atccgaacactgtacacaccatgaa

SEQ ID NO: 408585 - DNA, 25 bp, Homo sapien
tcatccgaacactgtacacaccatg

SEQ ID NO: 408586 - DNA, 25 bp, Homo sapien
tagtatggtgattagcgtcagtgtt

SEQ ID NO: 408587 - DNA, 25 bp, Homo sapien
ctagtatggtgattagcgtcagtgt

SEQ ID NO: 408588 - DNA, 25 bp, Homo sapien
agtatggtgattagcgtcagtgttt

SEQ ID NO: 408589 - DNA, 25 bp, Homo sapien
cagacgaactacagatcatcatttc

SEQ ID NO: 408590 - DNA, 25 bp, Homo sapien
gcaactctctcagacgaactacaga

SEQ ID NO: 408591 - DNA, 25 bp, Homo sapien
tctgtttagaatcttgcaactctct

SEQ ID NO: 408592 - DNA, 25 bp, Homo sapien
tcatcatttccataactacaccaac

SEQ ID NO: 408593 - DNA, 25 bp, Homo sapien
gtttattatctgtattgccattcat

SEQ ID NO: 408594 - DNA, 25 bp, Homo sapien
tgtttattatctgtattgccattca

SEQ ID NO: 408595 - DNA, 25 bp, Homo sapien
gaacttctttctggtgtttattatc

SEQ ID NO: 408596 - DNA, 25 bp, Homo sapien
agcgaacttctttctggtgtttatt

SEQ ID NO: 408597 - DNA, 25 bp, Homo sapien
tgcttccaggcaaaacgaataagtc

SEQ ID NO: 408598 - DNA, 25 bp, Homo sapien
tcctctcattaattgccgtgtgcag

SEQ ID NO: 408599 - DNA, 25 bp, Homo sapien
tcctggtttgtgctcgatgtcctaa

SEQ ID NO: 408600 - DNA, 25 bp, Homo sapien
taccagcatgctccggaagaattca

SEQ ID NO: 408601 - DNA, 25 bp, Homo sapien
gcccagccagaatttacagatattt

SEQ ID NO: 408602 - DNA, 25 bp, Homo sapien
cgcccagccagaatttacagatatt

SEQ ID NO: 408603 - DNA, 25 bp, Homo sapien
cacgcccagccagaatttacagata

SEQ ID NO: 408604 - DNA, 25 bp, Homo sapien
accacgcccagccagaatttacaga

SEQ ID NO: 408605 - DNA, 25 bp, Homo sapien
tttcataactttttaatagtcgtca

SEQ ID NO: 408606 - DNA, 25 bp, Homo sapien
tcataactttttaatagtcgtcatt

SEQ ID NO: 408607 - DNA, 25 bp, Homo sapien
tgatgttgaggggtttttttacatg

SEQ ID NO: 408608 - DNA, 25 bp, Homo sapien
ataactttttaatagtcgtcattct

SEQ ID NO: 408609 - DNA, 25 bp, Homo sapien
acaggggcccgccatcgtgcccagc

SEQ ID NO: 408610 - DNA, 25 bp, Homo sapien
ctgatctcaggtgattttttttttt

SEQ ID NO: 408611 - DNA, 25 bp, Homo sapien
ggattacaggggcccgccatcgtgc

SEQ ID NO: 408612 - DNA, 25 bp, Homo sapien
ttacaggggcccgccatcgtgccca

SEQ ID NO: 408613 - DNA, 25 bp, Homo sapien
aaatcctgggatcatattaatgcag

SEQ ID NO: 408614 - DNA, 25 bp, Homo sapien
ttctcatgaccctaaataatttgcg

SEQ ID NO: 408615 - DNA, 25 bp, Homo sapien
tactattacttggttacacttcagg

SEQ ID NO: 408616 - DNA, 25 bp, Homo sapien
caaactgccaaattgaaggtacagc

SEQ ID NO: 408617 - DNA, 25 bp, Homo sapien
gaaatcttagaggtactgtccacac

SEQ ID NO: 408618 - DNA, 25 bp, Homo sapien
tatccccaacgggtctgtcaactgg

SEQ ID NO: 408619 - DNA, 25 bp, Homo sapien
tactcagacggaaaataaggtgcaa

SEQ ID NO: 408620 - DNA, 25 bp, Homo sapien
gtgattcttggcaatcagcagccag

SEQ ID NO: 408621 - DNA, 25 bp, Homo sapien
caaataagcataagtatctagatgg

SEQ ID NO: 408622 - DNA, 25 bp, Homo sapien
gttagtcaaggtcaaacttcaaatc

SEQ ID NO: 408623 - DNA, 25 bp, Homo sapien
aaagccgcacaattttattgcatga

SEQ ID NO: 408624 - DNA, 25 bp, Homo sapien
gcaagtgatatgtatgtgtcacaac

SEQ ID NO: 408625 - DNA, 25 bp, Homo sapien
agagtacggcagcaatcaagtcacc

SEQ ID NO: 408626 - DNA, 25 bp, Homo sapien
gtccagtgagagtacggcagcaatc

SEQ ID NO: 408627 - DNA, 25 bp, Homo sapien
gtgagagtacggcagcaatcaagtc

SEQ ID NO: 408628 - DNA, 25 bp, Homo sapien
tctagccatcaagggggccatgcac

SEQ ID NO: 408629 - DNA, 25 bp, Homo sapien
catataattcagcaagcatgctcct

SEQ ID NO: 408630 - DNA, 25 bp, Homo sapien
caatcaagacgttccccaagaggag

SEQ ID NO: 408631 - DNA, 25 bp, Homo sapien
gaacagatagtctgtgatacatcca

SEQ ID NO: 408632 - DNA, 25 bp, Homo sapien
tcttatcaagctaaacatataattc

SEQ ID NO: 408633 - DNA, 25 bp, Homo sapien
ggcatgtctacccttgatgtttaac

SEQ ID NO: 408634 - DNA, 25 bp, Homo sapien
gacctgaactaaacaaagcatattc

SEQ ID NO: 408635 - DNA, 25 bp, Homo sapien
tatttggtcactttttaactccatg

SEQ ID NO: 408636 - DNA, 25 bp, Homo sapien
taactccatgtaaaccttctggtta

SEQ ID NO: 408637 - DNA, 25 bp, Homo sapien
aacacgcttttaacacatgagtaga

SEQ ID NO: 408638 - DNA, 25 bp, Homo sapien
tcagcattttgagtgtcctaactac

SEQ ID NO: 408639 - DNA, 25 bp, Homo sapien
aaaaaatctatgtattgccagtttc

SEQ ID NO: 408640 - DNA, 25 bp, Homo sapien
cacgggctacgtgctggagatgtaa

SEQ ID NO: 408641 - DNA, 25 bp, Homo sapien
cttactttctcttctgctaccttgc

SEQ ID NO: 408642 - DNA, 25 bp, Homo sapien
cgcgtatggtacaccagagatggtg

SEQ ID NO: 408643 - DNA, 25 bp, Homo sapien
acaggcttacgcgtatggtacacca

SEQ ID NO: 408644 - DNA, 25 bp, Homo sapien
ggcttacgcgtatggtacaccagag

SEQ ID NO: 408645 - DNA, 25 bp, Homo sapien
tacgcgtatggtacaccagagatgg

SEQ ID NO: 408646 - DNA, 25 bp, Homo sapien
ctggacttggtgaatgaatgttgaa

SEQ ID NO: 408647 - DNA, 25 bp, Homo sapien
gatgatagtgaaggttactcttaga

SEQ ID NO: 408648 - DNA, 25 bp, Homo sapien
tttgaagtgagccattggacttcac

SEQ ID NO: 408649 - DNA, 25 bp, Homo sapien
tagtgaaggttactcttagactctt

SEQ ID NO: 408650 - DNA, 25 bp, Homo sapien
aggttactcttagactctttctggg

SEQ ID NO: 408651 - DNA, 25 bp, Homo sapien
tctctcttgatggtagtcttgatca

SEQ ID NO: 408652 - DNA, 25 bp, Homo sapien
tcttgctgcagctgcgttttctctc

SEQ ID NO: 408653 - DNA, 25 bp, Homo sapien
ggtagtcttgatcaagatcctttta

SEQ ID NO: 408654 - DNA, 25 bp, Homo sapien
agtcttgatcaagatccttttacaa

SEQ ID NO: 408655 - DNA, 25 bp, Homo sapien
gttcttaaatctagtccttgagaaa

SEQ ID NO: 408656 - DNA, 25 bp, Homo sapien
taaatctagtccttgagaaatccat

SEQ ID NO: 408657 - DNA, 25 bp, Homo sapien
ttaaatctagtccttgagaaatcca

SEQ ID NO: 408658 - DNA, 25 bp, Homo sapien
tcttaaatctagtccttgagaaatc

SEQ ID NO: 408659 - DNA, 25 bp, Homo sapien
cacttgtgactctttctgaatccac

SEQ ID NO: 408660 - DNA, 25 bp, Homo sapien
tttctgaatccactggaagagctcc

SEQ ID NO: 408661 - DNA, 25 bp, Homo sapien
cttcttccttttcggtgacagctaa

SEQ ID NO: 408662 - DNA, 25 bp, Homo sapien
ccttttcggtgacagctaaaatcca

SEQ ID NO: 408663 - DNA, 25 bp, Homo sapien
tgtgcaggagctactagcaaaactg

SEQ ID NO: 408664 - DNA, 25 bp, Homo sapien
ctgtgcaggagctactagcaaaact

SEQ ID NO: 408665 - DNA, 25 bp, Homo sapien
catcctcctccgagctatgtgagag

SEQ ID NO: 408666 - DNA, 25 bp, Homo sapien
ttctctgaccgcatttttcatatct

SEQ ID NO: 408667 - DNA, 25 bp, Homo sapien
gaacccagtctagtaatctgaactt

SEQ ID NO: 408668 - DNA, 25 bp, Homo sapien
gaacttcgatgctgtgtcctgagct

SEQ ID NO: 408669 - DNA, 25 bp, Homo sapien
cacactactttctccaacataaaca

SEQ ID NO: 408670 - DNA, 25 bp, Homo sapien
ctactttctccaacataaacacaca

SEQ ID NO: 408671 - DNA, 25 bp, Homo sapien
tttccacactactttctccaacata

SEQ ID NO: 408672 - DNA, 25 bp, Homo sapien
cactactttctccaacataaacaca

SEQ ID NO: 408673 - DNA, 25 bp, Homo sapien
tctgggcagagaattatatgaatcg

SEQ ID NO: 408674 - DNA, 25 bp, Homo sapien
tacataggaggatgaaattccctgc

SEQ ID NO: 408675 - DNA, 25 bp, Homo sapien
agcaagttgctagacatgttgtcac

SEQ ID NO: 408676 - DNA, 25 bp, Homo sapien
aaaggacagaagtgccccaaattca

SEQ ID NO: 408677 - DNA, 25 bp, Homo sapien
tgattttgggggggtgttgaagatc

SEQ ID NO: 408678 - DNA, 25 bp, Homo sapien
gctggtgaactagtatgattttggg

SEQ ID NO: 408679 - DNA, 25 bp, Homo sapien
ccttgcattgggcttcatctttctc

SEQ ID NO: 408680 - DNA, 25 bp, Homo sapien
tgggcttcatctttctctggtccct

SEQ ID NO: 408681 - DNA, 25 bp, Homo sapien
aatgcctatctgaaaccttttggta

SEQ ID NO: 408682 - DNA, 25 bp, Homo sapien
ggctgcctaccataagtgtaaatta

SEQ ID NO: 408683 - DNA, 25 bp, Homo sapien
caggtcttttatgtgtgctgtacag

SEQ ID NO: 408684 - DNA, 25 bp, Homo sapien
tagaccttcattaactagcttaagc

SEQ ID NO: 408685 - DNA, 25 bp, Homo sapien
tctctccggagttaggtgaataacc

SEQ ID NO: 408686 - DNA, 25 bp, Homo sapien
taaacggtgtaactttggtgtcagc

SEQ ID NO: 408687 - DNA, 25 bp, Homo sapien
gcaatctacctgaaatttccccgag

SEQ ID NO: 408688 - DNA, 25 bp, Homo sapien
gaatataggatagattgttgcccag

SEQ ID NO: 408689 - DNA, 25 bp, Homo sapien
gtatcagtgcctcggttgctatggg

SEQ ID NO: 408690 - DNA, 25 bp, Homo sapien
tcacagtggtgtggccggagtatca

SEQ ID NO: 408691 - DNA, 25 bp, Homo sapien
tggccggagtatcagtgcctcggtt

SEQ ID NO: 408692 - DNA, 25 bp, Homo sapien
ggttgctatgggcagcagaagacac

SEQ ID NO: 408693 - DNA, 25 bp, Homo sapien
tgtgtgccgctctaactgtccatgg

SEQ ID NO: 408694 - DNA, 25 bp, Homo sapien
tatgtcattattgctccagaagtct

SEQ ID NO: 408695 - DNA, 25 bp, Homo sapien
tttattctatttcggagtcactcag

SEQ ID NO: 408696 - DNA, 25 bp, Homo sapien
gccaacaagataagactccacatag

SEQ ID NO: 408697 - DNA, 25 bp, Homo sapien
tgacaggactctgccccacaatctt

SEQ ID NO: 408698 - DNA, 25 bp, Homo sapien
aggtgacaggactctgccccacaat

SEQ ID NO: 408699 - DNA, 25 bp, Homo sapien
tcaggtgacaggactctgccccaca

SEQ ID NO: 408700 - DNA, 25 bp, Homo sapien
ggactctgccccacaatcttctcat

SEQ ID NO: 408701 - DNA, 25 bp, Homo sapien
tagtgtcttatattgccatggtcag

SEQ ID NO: 408702 - DNA, 25 bp, Homo sapien
gagaaactttctgccgcttgtataa

SEQ ID NO: 408703 - DNA, 25 bp, Homo sapien
cactcattgaggtggagatagaaca

SEQ ID NO: 408704 - DNA, 25 bp, Homo sapien
tatttctgctatgctgggttaccct

SEQ ID NO: 408705 - DNA, 25 bp, Homo sapien
ccgaatatgttataaccgtatttgg

SEQ ID NO: 408706 - DNA, 25 bp, Homo sapien
ttcttccgaatatgttataaccgta

SEQ ID NO: 408707 - DNA, 25 bp, Homo sapien
tccgaatatgttataaccgtatttg

SEQ ID NO: 408708 - DNA, 25 bp, Homo sapien
cttccgaatatgttataaccgtatt

SEQ ID NO: 408709 - DNA, 25 bp, Homo sapien
aaaatctagcggctttcgagtcagc

SEQ ID NO: 408710 - DNA, 25 bp, Homo sapien
aagttgaaaatctagcggctttcga

SEQ ID NO: 408711 - DNA, 25 bp, Homo sapien
cagttccaagaaaacatgagcttct

SEQ ID NO: 408712 - DNA, 25 bp, Homo sapien
tagcggctttcgagtcagctggcag

SEQ ID NO: 408713 - DNA, 25 bp, Homo sapien
aactttcaaccatgacggaaggtga

SEQ ID NO: 408714 - DNA, 25 bp, Homo sapien
cagtcagccacaagatcaccagagt

SEQ ID NO: 408715 - DNA, 25 bp, Homo sapien
tttacgtgacatctaggacaggcag

SEQ ID NO: 408716 - DNA, 25 bp, Homo sapien
aaccctcttgggatgttggacagtg

SEQ ID NO: 408717 - DNA, 25 bp, Homo sapien
tgtattaggcttaccaccactggaa

SEQ ID NO: 408718 - DNA, 25 bp, Homo sapien
ctatgtagtgagatatccccaaggg

SEQ ID NO: 408719 - DNA, 25 bp, Homo sapien
tcaggaagcaacaagtactgggcag

SEQ ID NO: 408720 - DNA, 25 bp, Homo sapien
gattgatactgtagctgggctctag

SEQ ID NO: 408721 - DNA, 25 bp, Homo sapien
tctcacaccgcataaatcatgaagg

SEQ ID NO: 408722 - DNA, 25 bp, Homo sapien
tattgactatggaataggccttggc

SEQ ID NO: 408723 - DNA, 25 bp, Homo sapien
gctgagaacaccacacaaaatgtga

SEQ ID NO: 408724 - DNA, 25 bp, Homo sapien
aatctctgcagggatattgacacct

SEQ ID NO: 408725 - DNA, 25 bp, Homo sapien
gaccctacgtcagtcagcaaacaca

SEQ ID NO: 408726 - DNA, 25 bp, Homo sapien
tactaatgtattctttgaccctacg

SEQ ID NO: 408727 - DNA, 25 bp, Homo sapien
catcatcacaaatggattcagactg

SEQ ID NO: 408728 - DNA, 25 bp, Homo sapien
taaaacacacgtaagcgattcaatg

SEQ ID NO: 408729 - DNA, 25 bp, Homo sapien
tactagtcctaattattgagaaatt

SEQ ID NO: 408730 - DNA, 25 bp, Homo sapien
ttattgagaaattaatgaccctcac

SEQ ID NO: 408731 - DNA, 25 bp, Homo sapien
ttggaaatactagtcctaattattg

SEQ ID NO: 408732 - DNA, 25 bp, Homo sapien
gaaatactagtcctaattattgaga

SEQ ID NO: 408733 - DNA, 25 bp, Homo sapien
cctgatgactgaggcaaatagaaca

SEQ ID NO: 408734 - DNA, 25 bp, Homo sapien
atctggttggctggcaccgcccctg

SEQ ID NO: 408735 - DNA, 25 bp, Homo sapien
tccctgtgtgtccacgatctcctga

SEQ ID NO: 408736 - DNA, 25 bp, Homo sapien
catcacacagcatggccacgatcat

SEQ ID NO: 408737 - DNA, 25 bp, Homo sapien
cggctgaagactgatgttgccggat

SEQ ID NO: 408738 - DNA, 25 bp, Homo sapien
ggctgaagactgatgttgccggatc

SEQ ID NO: 408739 - DNA, 25 bp, Homo sapien
ctgtcatccctttagtgtatggtac

SEQ ID NO: 408740 - DNA, 25 bp, Homo sapien
tcgttgttctgtcatccctttagtg

SEQ ID NO: 408741 - DNA, 25 bp, Homo sapien
cttttgtttcgttgttctgtcatcc

SEQ ID NO: 408742 - DNA, 25 bp, Homo sapien
gtgtatggtacttgtttacttcttc

SEQ ID NO: 408743 - DNA, 25 bp, Homo sapien
aacttatgagcatccatatctttgc

SEQ ID NO: 408744 - DNA, 25 bp, Homo sapien
ataatgcctttgcagttgttccaga

SEQ ID NO: 408745 - DNA, 25 bp, Homo sapien
tccagaagctgctattagtaacccc

SEQ ID NO: 408746 - DNA, 25 bp, Homo sapien
agaaacttatgagcatccatatctt

SEQ ID NO: 408747 - DNA, 25 bp, Homo sapien
cagctgcatgagctaatttgtctcc

SEQ ID NO: 408748 - DNA, 25 bp, Homo sapien
ccaggacatctcagctgcatgagct

SEQ ID NO: 408749 - DNA, 25 bp, Homo sapien
tttgtctcccatggacttgtctctc

SEQ ID NO: 408750 - DNA, 25 bp, Homo sapien
tgagctaatttgtctcccatggact

SEQ ID NO: 408751 - DNA, 25 bp, Homo sapien
aagttgccttgtaaggtcttgttga

SEQ ID NO: 408752 - DNA, 25 bp, Homo sapien
gcttcagagcatccatgcaagttgc

SEQ ID NO: 408753 - DNA, 25 bp, Homo sapien
gagcatccatgcaagttgccttgta

SEQ ID NO: 408754 - DNA, 25 bp, Homo sapien
cccttccgccatcagatcctcttgg

SEQ ID NO: 408755 - DNA, 25 bp, Homo sapien
aaagagagctggagcatagaaactc

SEQ ID NO: 408756 - DNA, 25 bp, Homo sapien
caaagagagctggagcatagaaact

SEQ ID NO: 408757 - DNA, 25 bp, Homo sapien
tccaagagaactatagaggcactag

SEQ ID NO: 408758 - DNA, 25 bp, Homo sapien
gaactatagaggcactagatgttgc

SEQ ID NO: 408759 - DNA, 25 bp, Homo sapien
ccatctgtgtccaagagaactatag

SEQ ID NO: 408760 - DNA, 25 bp, Homo sapien
tatagaggcactagatgttgcactg

SEQ ID NO: 408761 - DNA, 25 bp, Homo sapien
gagatgactacgaactcccctttca

SEQ ID NO: 408762 - DNA, 25 bp, Homo sapien
ggatctcctgattagaagagatgac

SEQ ID NO: 408763 - DNA, 25 bp, Homo sapien
ttaaatgttcggctttcagggatct

SEQ ID NO: 408764 - DNA, 25 bp, Homo sapien
tcaacatagcacattcctaactaaa

SEQ ID NO: 408765 - DNA, 25 bp, Homo sapien
tcattatctatgttggtcatactga

SEQ ID NO: 408766 - DNA, 25 bp, Homo sapien
ttctctcattatctatgttggtcat

SEQ ID NO: 408767 - DNA, 25 bp, Homo sapien
tggtcatactgaactgctggcctaa

SEQ ID NO: 408768 - DNA, 25 bp, Homo sapien
attatctatgttggtcatactgaac

SEQ ID NO: 408769 - DNA, 25 bp, Homo sapien
ccttgtgtgctagaatacgttccat

SEQ ID NO: 408770 - DNA, 25 bp, Homo sapien
cagtaaagtttccttgtgtgctaga

SEQ ID NO: 408771 - DNA, 25 bp, Homo sapien
aagtttccttgtgtgctagaatacg

SEQ ID NO: 408772 - DNA, 25 bp, Homo sapien
ttccttgtgtgctagaatacgttcc

SEQ ID NO: 408773 - DNA, 25 bp, Homo sapien
tactggcccaatcatacatcaaagc

SEQ ID NO: 408774 - DNA, 25 bp, Homo sapien
gatacatactgagctaagtaagcct

SEQ ID NO: 408775 - DNA, 25 bp, Homo sapien
catcaaagcctctcacatgtggcat

SEQ ID NO: 408776 - DNA, 25 bp, Homo sapien
tgcatgcagactttcactgtagcaa

SEQ ID NO: 408777 - DNA, 25 bp, Homo sapien
aactattgccaatcaaactgtgaca

SEQ ID NO: 408778 - DNA, 25 bp, Homo sapien
tcttaaagaatgagctgtttagccc

SEQ ID NO: 408779 - DNA, 25 bp, Homo sapien
tatatcgcaaatgcaattgtgctaa

SEQ ID NO: 408780 - DNA, 25 bp, Homo sapien
tcatcaaatctaagtctacgttatt

SEQ ID NO: 408781 - DNA, 25 bp, Homo sapien
tttaagtgttcttgtccaaaaagca

SEQ ID NO: 408782 - DNA, 25 bp, Homo sapien
cagatatcgggcaaaattcacccga

SEQ ID NO: 408783 - DNA, 25 bp, Homo sapien
tccataccccatttccatactatta

SEQ ID NO: 408784 - DNA, 25 bp, Homo sapien
ggatatatcaggggaaattcagcca

SEQ ID NO: 408785 - DNA, 25 bp, Homo sapien
tgtgtctacattaactgatatttta

SEQ ID NO: 408786 - DNA, 25 bp, Homo sapien
tttacccgattctatagctgcagca

SEQ ID NO: 408787 - DNA, 25 bp, Homo sapien
aatgcttcccaatgagcttccagtc

SEQ ID NO: 408788 - DNA, 25 bp, Homo sapien
tctgtgcttgtagtgacctctgatg

SEQ ID NO: 408789 - DNA, 25 bp, Homo sapien
ttctctcactgacattggctggact

SEQ ID NO: 408790 - DNA, 25 bp, Homo sapien
caaagtgttacaacgagagtaccca

SEQ ID NO: 408791 - DNA, 25 bp, Homo sapien
tctcaacgacatttctagcttcctc

SEQ ID NO: 408792 - DNA, 25 bp, Homo sapien
ttgaccggggtacattgaccaacac

SEQ ID NO: 408793 - DNA, 25 bp, Homo sapien
caaaaaatgatgaacttctcaacga

SEQ ID NO: 408794 - DNA, 25 bp, Homo sapien
tatctcaggcttgtctttcctggga

SEQ ID NO: 408795 - DNA, 25 bp, Homo sapien
tatgggtatatagtgctcaaagcag

SEQ ID NO: 408796 - DNA, 25 bp, Homo sapien
ggtatcaaagtaattctgggctcat

SEQ ID NO: 408797 - DNA, 25 bp, Homo sapien
gattgtaaatttcttcacggttcaa

SEQ ID NO: 408798 - DNA, 25 bp, Homo sapien
cataacccactagatgattttgaat

SEQ ID NO: 408799 - DNA, 25 bp, Homo sapien
tttaacttgcatatattaaaccacc

SEQ ID NO: 408800 - DNA, 25 bp, Homo sapien
cagtcacttctgcatccattgagat

SEQ ID NO: 408801 - DNA, 25 bp, Homo sapien
cccttggacataacccactagatga

SEQ ID NO: 408802 - DNA, 25 bp, Homo sapien
taaacttccctctatagactagcat

SEQ ID NO: 408803 - DNA, 25 bp, Homo sapien
ggtagtccacattgcaatgcagtag

SEQ ID NO: 408804 - DNA, 25 bp, Homo sapien
tcacagaaaccctgagtcaactggt

SEQ ID NO: 408805 - DNA, 25 bp, Homo sapien
atatatagggcctggatttttgtcc

SEQ ID NO: 408806 - DNA, 25 bp, Homo sapien
tgaagcaactatgccgtcacttggg

SEQ ID NO: 408807 - DNA, 25 bp, Homo sapien
gaacacgctggctaggattctcctg

SEQ ID NO: 408808 - DNA, 25 bp, Homo sapien
gcctgactgaagtgcgaacgctgat

SEQ ID NO: 408809 - DNA, 25 bp, Homo sapien
taaatgtccaaagatgtaaccgagg

SEQ ID NO: 408810 - DNA, 25 bp, Homo sapien
ctgagtttcaggagtacctctaaga

SEQ ID NO: 408811 - DNA, 25 bp, Homo sapien
agtttcaggagtacctctaagagac

SEQ ID NO: 408812 - DNA, 25 bp, Homo sapien
gagtttcaggagtacctctaagaga

SEQ ID NO: 408813 - DNA, 25 bp, Homo sapien
tgagtttcaggagtacctctaagag

SEQ ID NO: 408814 - DNA, 25 bp, Homo sapien
caaagagtgccgtttggaccgaaag

SEQ ID NO: 408815 - DNA, 25 bp, Homo sapien
gtttggaccgaaaggcctgtgccag

SEQ ID NO: 408816 - DNA, 25 bp, Homo sapien
gaatcaaagagtgccgtttggaccg

SEQ ID NO: 408817 - DNA, 25 bp, Homo sapien
tgcaggttctgaatcaaagagtgcc

SEQ ID NO: 408818 - DNA, 25 bp, Homo sapien
gagtgagcttgacgtaaccacagca

SEQ ID NO: 408819 - DNA, 25 bp, Homo sapien
agcagagtgagcttgacgtaaccac

SEQ ID NO: 408820 - DNA, 25 bp, Homo sapien
tgagcttgacgtaaccacagcatct

SEQ ID NO: 408821 - DNA, 25 bp, Homo sapien
aaccacagcatctgagggcccacgg

SEQ ID NO: 408822 - DNA, 25 bp, Homo sapien
tcatgctactcggttctccacctgt

SEQ ID NO: 408823 - DNA, 25 bp, Homo sapien
tgactggaattcctcagctaattta

SEQ ID NO: 408824 - DNA, 25 bp, Homo sapien
tgctactcggttctccacctgtgac

SEQ ID NO: 408825 - DNA, 25 bp, Homo sapien
acctgtgactggaattcctcagcta

SEQ ID NO: 408826 - DNA, 25 bp, Homo sapien
gctatgctgactattctcaggacca

SEQ ID NO: 408827 - DNA, 25 bp, Homo sapien
ccttgctcgtgggttggctgatcat

SEQ ID NO: 408828 - DNA, 25 bp, Homo sapien
tcatgggccttgtcgactgttggtc

SEQ ID NO: 408829 - DNA, 25 bp, Homo sapien
gccagcttggctagatgtagaagcc

SEQ ID NO: 408830 - DNA, 25 bp, Homo sapien
acagggccaactcttgctataatat

SEQ ID NO: 408831 - DNA, 25 bp, Homo sapien
agggccaactcttgctataatatgt

SEQ ID NO: 408832 - DNA, 25 bp, Homo sapien
cagggccaactcttgctataatatg

SEQ ID NO: 408833 - DNA, 25 bp, Homo sapien
gaatttagtccctttagatgatgag

SEQ ID NO: 408834 - DNA, 25 bp, Homo sapien
tgccaaatacacgttcagggactga

SEQ ID NO: 408835 - DNA, 25 bp, Homo sapien
acagaagtgcgctagaggaaatgcc

SEQ ID NO: 408836 - DNA, 25 bp, Homo sapien
tatattttctggaggccgttaatcc

SEQ ID NO: 408837 - DNA, 25 bp, Homo sapien
tgcggtcagtcccacaatgccataa

SEQ ID NO: 408838 - DNA, 25 bp, Homo sapien
ttccaaaactcagacctagtgcggt

SEQ ID NO: 408839 - DNA, 25 bp, Homo sapien
gatgttattataatttgtcaccgca

SEQ ID NO: 408840 - DNA, 25 bp, Homo sapien
taagccacctatcttctgtttgcgc

SEQ ID NO: 408841 - DNA, 25 bp, Homo sapien
ctttaaccaggctcagacagtactt

SEQ ID NO: 408842 - DNA, 25 bp, Homo sapien
tgctccatggctggctatcgtttga

SEQ ID NO: 408843 - DNA, 25 bp, Homo sapien
cagtacttgctttgaataggctcca

SEQ ID NO: 408844 - DNA, 25 bp, Homo sapien
gtctgctcacccagacttcataaac

SEQ ID NO: 408845 - DNA, 25 bp, Homo sapien
tgatggaagggagacgttccactga

SEQ ID NO: 408846 - DNA, 25 bp, Homo sapien
tggaagggagacgttccactgacat

SEQ ID NO: 408847 - DNA, 25 bp, Homo sapien
gagctgtgatggaagggagacgttc

SEQ ID NO: 408848 - DNA, 25 bp, Homo sapien
gtcactggagctgtgatggaaggga

SEQ ID NO: 408849 - DNA, 25 bp, Homo sapien
tccagggtccttcccacatccaaaa

SEQ ID NO: 408850 - DNA, 25 bp, Homo sapien
ggctccagggtccttcccacatcca

SEQ ID NO: 408851 - DNA, 25 bp, Homo sapien
cagggtccttcccacatccaaaaag

SEQ ID NO: 408852 - DNA, 25 bp, Homo sapien
ctccagggtccttcccacatccaaa

SEQ ID NO: 408853 - DNA, 25 bp, Homo sapien
agggtctctgcggtgtctgcactca

SEQ ID NO: 408854 - DNA, 25 bp, Homo sapien
tcaaggagtagcaggccacaaactg

SEQ ID NO: 408855 - DNA, 25 bp, Homo sapien
gcactcattcctcaaggagtagcag

SEQ ID NO: 408856 - DNA, 25 bp, Homo sapien
caaactggttattgagtttggaagg

SEQ ID NO: 408857 - DNA, 25 bp, Homo sapien
gcatgaattttcatatgcgccattt

SEQ ID NO: 408858 - DNA, 25 bp, Homo sapien
cttcctagttccttcatctaaaaag

SEQ ID NO: 408859 - DNA, 25 bp, Homo sapien
tccttcatctaaaaagcgtaaggct

SEQ ID NO: 408860 - DNA, 25 bp, Homo sapien
gaattttcatatgcgccattttgct

SEQ ID NO: 408861 - DNA, 25 bp, Homo sapien
tctctattgaggaaacttgtggttt

SEQ ID NO: 408862 - DNA, 25 bp, Homo sapien
taattggcaatcatactctccaaaa

SEQ ID NO: 408863 - DNA, 25 bp, Homo sapien
ctctattgaggaaacttgtggtttt

SEQ ID NO: 408864 - DNA, 25 bp, Homo sapien
aattggcaatcatactctccaaaag

SEQ ID NO: 408865 - DNA, 25 bp, Homo sapien
ctctcccaaagcttggtcattccgt

SEQ ID NO: 408866 - DNA, 25 bp, Homo sapien
ccaaagcttggtcattccgttctaa

SEQ ID NO: 408867 - DNA, 25 bp, Homo sapien
tcccaaagcttggtcattccgttct

SEQ ID NO: 408868 - DNA, 25 bp, Homo sapien
caaagcttggtcattccgttctaat

SEQ ID NO: 408869 - DNA, 25 bp, Homo sapien
tgagtagtgttagctttgaggacct

SEQ ID NO: 408870 - DNA, 25 bp, Homo sapien
accatcttcgtgagtagtgttagct

SEQ ID NO: 408871 - DNA, 25 bp, Homo sapien
gaggacctttgtgatcactgagtaa

SEQ ID NO: 408872 - DNA, 25 bp, Homo sapien
tcttcgtgagtagtgttagctttga

SEQ ID NO: 408873 - DNA, 25 bp, Homo sapien
tagtttaacaattgaacaatggctg

SEQ ID NO: 408874 - DNA, 25 bp, Homo sapien
cagtgtccactttaccagggtttct

SEQ ID NO: 408875 - DNA, 25 bp, Homo sapien
tgagaattaaaagcaggctgttgac

SEQ ID NO: 408876 - DNA, 25 bp, Homo sapien
tgttgacgcacatagtcaataaatc

SEQ ID NO: 408877 - DNA, 25 bp, Homo sapien
gagttggctgaaagagtgaccaatt

SEQ ID NO: 408878 - DNA, 25 bp, Homo sapien
agttggctgaaagagtgaccaattc

SEQ ID NO: 408879 - DNA, 25 bp, Homo sapien
caagtacacttaagatacagcaaga

SEQ ID NO: 408880 - DNA, 25 bp, Homo sapien
tacagtagtgatcttcccagtggca

SEQ ID NO: 408881 - DNA, 25 bp, Homo sapien
taactgcatgcattgcttagtggac

SEQ ID NO: 408882 - DNA, 25 bp, Homo sapien
gagtaacttgttttgggctccttca

SEQ ID NO: 408883 - DNA, 25 bp, Homo sapien
caaaagacctagaaatcatctagga

SEQ ID NO: 408884 - DNA, 25 bp, Homo sapien
tagtggcttctacagggattctggg

SEQ ID NO: 408885 - DNA, 25 bp, Homo sapien
ccttcctcttgtagctgacatcagt

SEQ ID NO: 408886 - DNA, 25 bp, Homo sapien
ccaacatgtgacagagctttgttct

SEQ ID NO: 408887 - DNA, 25 bp, Homo sapien
cagaaagccagagtgatgtagtctg

SEQ ID NO: 408888 - DNA, 25 bp, Homo sapien
cttctgattctagcgaatttatgca

SEQ ID NO: 408889 - DNA, 25 bp, Homo sapien
cacaccaaattgttctgagatcagg

SEQ ID NO: 408890 - DNA, 25 bp, Homo sapien
tgattctagcgaatttatgcaattc

SEQ ID NO: 408891 - DNA, 25 bp, Homo sapien
tccagtattaggacttcaagcctgc

SEQ ID NO: 408892 - DNA, 25 bp, Homo sapien
gaaaagctttctacagccatgtctg

SEQ ID NO: 408893 - DNA, 25 bp, Homo sapien
ggattcttccacacatggcgcatta

SEQ ID NO: 408894 - DNA, 25 bp, Homo sapien
gccatagtgagagaatgcctagtcc

SEQ ID NO: 408895 - DNA, 25 bp, Homo sapien
cattctcagcttgcacctcttttgg

SEQ ID NO: 408896 - DNA, 25 bp, Homo sapien
ggtctgaggtcttagccaccatgca

SEQ ID NO: 408897 - DNA, 25 bp, Homo sapien
caccatgcaattcttgggtcacagt

SEQ ID NO: 408898 - DNA, 25 bp, Homo sapien
taccatcctatcacaacagggaagg

SEQ ID NO: 408899 - DNA, 25 bp, Homo sapien
gcctgaccagacagcagtaatagct

SEQ ID NO: 408900 - DNA, 25 bp, Homo sapien
gaataagtacttctagatccacaaa

SEQ ID NO: 408901 - DNA, 25 bp, Homo sapien
ggtcaactaccctgccacgatgtag

SEQ ID NO: 408902 - DNA, 25 bp, Homo sapien
cctttgatataaggagcctgaccag

SEQ ID NO: 408903 - DNA, 25 bp, Homo sapien
aatttctatatgttcaacctttcat

SEQ ID NO: 408904 - DNA, 25 bp, Homo sapien
caaatttctatatgttcaacctttc

SEQ ID NO: 408905 - DNA, 25 bp, Homo sapien
tcaaatttctatatgttcaaccttt

SEQ ID NO: 408906 - DNA, 25 bp, Homo sapien
tttctatatgttcaacctttcattc

SEQ ID NO: 408907 - DNA, 25 bp, Homo sapien
gcttactctccagagtagtaaagat

SEQ ID NO: 408908 - DNA, 25 bp, Homo sapien
tagtaaagataacgtctcctgccag

SEQ ID NO: 408909 - DNA, 25 bp, Homo sapien
tccagagtagtaaagataacgtctc

SEQ ID NO: 408910 - DNA, 25 bp, Homo sapien
gcttgcttactctccagagtagtaa

SEQ ID NO: 408911 - DNA, 25 bp, Homo sapien
aaatgtttgcatcttcctgtgggaa

SEQ ID NO: 408912 - DNA, 25 bp, Homo sapien
gtatcacctgaaaatgtttgcatct

SEQ ID NO: 408913 - DNA, 25 bp, Homo sapien
ctgaaaatgtttgcatcttcctgtg

SEQ ID NO: 408914 - DNA, 25 bp, Homo sapien
gaaaatgtttgcatcttcctgtggg

SEQ ID NO: 408915 - DNA, 25 bp, Homo sapien
cctggaagcataacgttacctaact

SEQ ID NO: 408916 - DNA, 25 bp, Homo sapien
tatataacaccgctgaaagaaatta

SEQ ID NO: 408917 - DNA, 25 bp, Homo sapien
aaaacattccatgataatatactgg

SEQ ID NO: 408918 - DNA, 25 bp, Homo sapien
gaaagatgtctacaaggagagttat

SEQ ID NO: 408919 - DNA, 25 bp, Homo sapien
gcactgatgttatcctccaagacag

SEQ ID NO: 408920 - DNA, 25 bp, Homo sapien
gagaggtaccgaacagtctaacagt

SEQ ID NO: 408921 - DNA, 25 bp, Homo sapien
cagtcacactgttatggggaagaga

SEQ ID NO: 408922 - DNA, 25 bp, Homo sapien
tatagaactatttgcctgtgggttc

SEQ ID NO: 408923 - DNA, 25 bp, Homo sapien
gactcagagctacttttcaccagcc

SEQ ID NO: 408924 - DNA, 25 bp, Homo sapien
tctagtgactcagagctacttttca

SEQ ID NO: 408925 - DNA, 25 bp, Homo sapien
gggtagaggccagatctagtgactc

SEQ ID NO: 408926 - DNA, 25 bp, Homo sapien
catctgcacccgctgggaacacggt

SEQ ID NO: 408927 - DNA, 25 bp, Homo sapien
ttttcactatgtcgagatggtgcca

SEQ ID NO: 408928 - DNA, 25 bp, Homo sapien
cgtctctttgctagtgccatgtcca

SEQ ID NO: 408929 - DNA, 25 bp, Homo sapien
ggtttcttcctaacaacactcagtg

SEQ ID NO: 408930 - DNA, 25 bp, Homo sapien
ggaaaccatgtgatcccgacatttg

SEQ ID NO: 408931 - DNA, 25 bp, Homo sapien
agtccagaaatttattccagtgaca

SEQ ID NO: 408932 - DNA, 25 bp, Homo sapien
ccagaaatttattccagtgacactc

SEQ ID NO: 408933 - DNA, 25 bp, Homo sapien
tccagaaatttattccagtgacact

SEQ ID NO: 408934 - DNA, 25 bp, Homo sapien
cagaaatttattccagtgacactct

SEQ ID NO: 408935 - DNA, 25 bp, Homo sapien
gcaagtatccatgcaactatgagaa

SEQ ID NO: 408936 - DNA, 25 bp, Homo sapien
aaacgaaatttgtcatcattggaaa

SEQ ID NO: 408937 - DNA, 25 bp, Homo sapien
aaagcttgccagcacccagaatgca

SEQ ID NO: 408938 - DNA, 25 bp, Homo sapien
tatgagaaggaacatagggttggtc

SEQ ID NO: 408939 - DNA, 25 bp, Homo sapien
tagttaccctattgtgttaggaaga

SEQ ID NO: 408940 - DNA, 25 bp, Homo sapien
cacagagaacatcaccccagtctat

SEQ ID NO: 408941 - DNA, 25 bp, Homo sapien
tgctctgataaaagcatgcaatgca

SEQ ID NO: 408942 - DNA, 25 bp, Homo sapien
taagactcgttttagccagtcacca

SEQ ID NO: 408943 - DNA, 25 bp, Homo sapien
cgtagcataaatggaagggagctct

SEQ ID NO: 408944 - DNA, 25 bp, Homo sapien
aatggaagggagctctccctgtggc

SEQ ID NO: 408945 - DNA, 25 bp, Homo sapien
ctagcgtagcataaatggaagggag

SEQ ID NO: 408946 - DNA, 25 bp, Homo sapien
tagcgtagcataaatggaagggagc

SEQ ID NO: 408947 - DNA, 25 bp, Homo sapien
tagggcaatgacagagctgctgaaa

SEQ ID NO: 408948 - DNA, 25 bp, Homo sapien
tccagttggccatccccacttttac

SEQ ID NO: 408949 - DNA, 25 bp, Homo sapien
ttttactgtctctaccaccatatta

SEQ ID NO: 408950 - DNA, 25 bp, Homo sapien
accatattacaactccattccatca

SEQ ID NO: 408951 - DNA, 25 bp, Homo sapien
tgactacctcagactggacttctcc

SEQ ID NO: 408952 - DNA, 25 bp, Homo sapien
taaatgggcctagggaaattcacac

SEQ ID NO: 408953 - DNA, 25 bp, Homo sapien
ggaacaggcatctgaaatttctaaa

SEQ ID NO: 408954 - DNA, 25 bp, Homo sapien
gaagaaattcgtccgtaaattgagc

SEQ ID NO: 408955 - DNA, 25 bp, Homo sapien
tgtgaaacaatgacgttttctcact

SEQ ID NO: 408956 - DNA, 25 bp, Homo sapien
tggagctcttaaacagaagcgtttt

SEQ ID NO: 408957 - DNA, 25 bp, Homo sapien
taacatgttgtaatagactgaatgc

SEQ ID NO: 408958 - DNA, 25 bp, Homo sapien
tctgccatgataaatcttatggagc

SEQ ID NO: 408959 - DNA, 25 bp, Homo sapien
aaacgcacacatcccatcatgcagg

SEQ ID NO: 408960 - DNA, 25 bp, Homo sapien
tcatgcaggagtttaaacaccacgt

SEQ ID NO: 408961 - DNA, 25 bp, Homo sapien
tgcctaattttgtatcacacgctgt

SEQ ID NO: 408962 - DNA, 25 bp, Homo sapien
cacacgctgtagaaccaaactcctt

SEQ ID NO: 408963 - DNA, 25 bp, Homo sapien
aaacaccaatgtgttgggccctgga

SEQ ID NO: 408964 - DNA, 25 bp, Homo sapien
gaacagaatcgttgacataagcaag

SEQ ID NO: 408965 - DNA, 25 bp, Homo sapien
tttccccaggtcaattaggtgctga

SEQ ID NO: 408966 - DNA, 25 bp, Homo sapien
taggtgctgataaaacaccaatgtg

SEQ ID NO: 408967 - DNA, 25 bp, Homo sapien
acctcacttacttatgttgtttaca

SEQ ID NO: 408968 - DNA, 25 bp, Homo sapien
ctgcacccaggcgatgtatgtgtgt

SEQ ID NO: 408969 - DNA, 25 bp, Homo sapien
tgtttacatgtgctatgaacattta

SEQ ID NO: 408970 - DNA, 25 bp, Homo sapien
ccatgctgtgcaatcgattttaaaa

SEQ ID NO: 408971 - DNA, 25 bp, Homo sapien
ggagagccccatcatatcaatgcag

SEQ ID NO: 408972 - DNA, 25 bp, Homo sapien
cacacttgagaggtagaattggcac

SEQ ID NO: 408973 - DNA, 25 bp, Homo sapien
acttatgaaagggtagcgtgggcca

SEQ ID NO: 408974 - DNA, 25 bp, Homo sapien
gcgtgggccaggacataacctaaat

SEQ ID NO: 408975 - DNA, 25 bp, Homo sapien
ggatggatgcttcttactgcaggca

SEQ ID NO: 408976 - DNA, 25 bp, Homo sapien
tcaggatggatgcttcttactgcag

SEQ ID NO: 408977 - DNA, 25 bp, Homo sapien
aggatggatgcttcttactgcaggc

SEQ ID NO: 408978 - DNA, 25 bp, Homo sapien
caggatggatgcttcttactgcagg

SEQ ID NO: 408979 - DNA, 25 bp, Homo sapien
tatatcttacatacatccaaaggct

SEQ ID NO: 408980 - DNA, 25 bp, Homo sapien
cccaaatgatgttatgagatcagca

SEQ ID NO: 408981 - DNA, 25 bp, Homo sapien
ttccacaatggcacaagaaagcttc

SEQ ID NO: 408982 - DNA, 25 bp, Homo sapien
agaatataggaaataagggactact

SEQ ID NO: 408983 - DNA, 25 bp, Homo sapien
tcacaggtaagtcaattgtccccat

SEQ ID NO: 408984 - DNA, 25 bp, Homo sapien
tattgtcacaggtaagtcaattgtc

SEQ ID NO: 408985 - DNA, 25 bp, Homo sapien
gctgttattgtcacaggtaagtcaa

SEQ ID NO: 408986 - DNA, 25 bp, Homo sapien
tgctgttattgtcacaggtaagtca

SEQ ID NO: 408987 - DNA, 25 bp, Homo sapien
agcacctgctcccaccgtgatgtgt

SEQ ID NO: 408988 - DNA, 25 bp, Homo sapien
cccaccgtgatgtgttttgcagctt

SEQ ID NO: 408989 - DNA, 25 bp, Homo sapien
cctgctcccaccgtgatgtgttttg

SEQ ID NO: 408990 - DNA, 25 bp, Homo sapien
agttcagcacctgctcccaccgtga

SEQ ID NO: 408991 - DNA, 25 bp, Homo sapien
catttaggcccttgaccagttggtt

SEQ ID NO: 408992 - DNA, 25 bp, Homo sapien
aaggtattataaggtatgggctcac

SEQ ID NO: 408993 - DNA, 25 bp, Homo sapien
catgatctgcattcaacaagctgga

SEQ ID NO: 408994 - DNA, 25 bp, Homo sapien
caatggcccagttcaagcagtcagg

SEQ ID NO: 408995 - DNA, 25 bp, Homo sapien
taactaccacccaatgaagacacag

SEQ ID NO: 408996 - DNA, 25 bp, Homo sapien
tgttgttccacatataggcagcttg

SEQ ID NO: 408997 - DNA, 25 bp, Homo sapien
tcactccatactgcctcaaaggtgg

SEQ ID NO: 408998 - DNA, 25 bp, Homo sapien
gagtggtaccctttgtatgatcaca

SEQ ID NO: 408999 - DNA, 25 bp, Homo sapien
aaggccaggatcttctcaactcagg

SEQ ID NO: 409000 - DNA, 25 bp, Homo sapien
tctcaactcaggcccactcacttac

SEQ ID NO: 409001 - DNA, 25 bp, Homo sapien
aggatcttctcaactcaggcccact

SEQ ID NO: 409002 - DNA, 25 bp, Homo sapien
tccaaggccaggatcttctcaactc

SEQ ID NO: 409003 - DNA, 25 bp, Homo sapien
cctcagcatctactacttgtgctgg

SEQ ID NO: 409004 - DNA, 25 bp, Homo sapien
ctttcctcagcatctactacttgtg

SEQ ID NO: 409005 - DNA, 25 bp, Homo sapien
catctactacttgtgctgggacctt

SEQ ID NO: 409006 - DNA, 25 bp, Homo sapien
cagcatctactacttgtgctgggac

SEQ ID NO: 409007 - DNA, 25 bp, Homo sapien
ataaagaaatttcaaaatataccat

SEQ ID NO: 409008 - DNA, 25 bp, Homo sapien
ccaagtcagagaaggtttaattcag

SEQ ID NO: 409009 - DNA, 25 bp, Homo sapien
tagtaaccatagctagagtctgtaa

SEQ ID NO: 409010 - DNA, 25 bp, Homo sapien
gaaagagctcccagtaattaccaag

SEQ ID NO: 409011 - DNA, 25 bp, Homo sapien
tatcataatttgctgcaactcaagc

SEQ ID NO: 409012 - DNA, 25 bp, Homo sapien
cagcccttggacacatcctgttata

SEQ ID NO: 409013 - DNA, 25 bp, Homo sapien
tccaagaactgaagctagcagacta

SEQ ID NO: 409014 - DNA, 25 bp, Homo sapien
tcagcagactcaccattaaacccag

SEQ ID NO: 409015 - DNA, 25 bp, Homo sapien
tctagtatgtaagccccaaggagca

SEQ ID NO: 409016 - DNA, 25 bp, Homo sapien
ggtccctgaagaccacttgcctgca

SEQ ID NO: 409017 - DNA, 25 bp, Homo sapien
ccatattgaggtagccacagctgga

SEQ ID NO: 409018 - DNA, 25 bp, Homo sapien
gagtagcctgctaaagacacccagt

SEQ ID NO: 409019 - DNA, 25 bp, Homo sapien
tcgtcttaggacaactgccctcagg

SEQ ID NO: 409020 - DNA, 25 bp, Homo sapien
ttagaaagatctgtagttcatgacc

SEQ ID NO: 409021 - DNA, 25 bp, Homo sapien
ttcatgaccctgaatgaagcaggaa

SEQ ID NO: 409022 - DNA, 25 bp, Homo sapien
aaagatctgtagttcatgaccctga

SEQ ID NO: 409023 - DNA, 25 bp, Homo sapien
gaaagatctgtagttcatgaccctg

SEQ ID NO: 409024 - DNA, 25 bp, Homo sapien
gattggatctaaccatcgtggcagg

SEQ ID NO: 409025 - DNA, 25 bp, Homo sapien
tgaatattgccagttcctaccctac

SEQ ID NO: 409026 - DNA, 25 bp, Homo sapien
cattcttgctcagttacttcaccaa

SEQ ID NO: 409027 - DNA, 25 bp, Homo sapien
tcgtggcaggcaatcaaataattgt

SEQ ID NO: 409028 - DNA, 25 bp, Homo sapien
cttagacatagaagccagacagtga

SEQ ID NO: 409029 - DNA, 25 bp, Homo sapien
caacaaggcaataggtcagagagcg

SEQ ID NO: 409030 - DNA, 25 bp, Homo sapien
cagtgagctggccacagacaattag

SEQ ID NO: 409031 - DNA, 25 bp, Homo sapien
cttgctatgatagagcttaggctcc

SEQ ID NO: 409032 - DNA, 25 bp, Homo sapien
ggtgtttcacacagcctaagcaaca

SEQ ID NO: 409033 - DNA, 25 bp, Homo sapien
gaccaggtgtttcacacagcctaag

SEQ ID NO: 409034 - DNA, 25 bp, Homo sapien
tcgcttaagaccaggtgtttcacac

SEQ ID NO: 409035 - DNA, 25 bp, Homo sapien
ttaagaccaggtgtttcacacagcc

SEQ ID NO: 409036 - DNA, 25 bp, Homo sapien
ggccctgggcacgtgtagtaattga

SEQ ID NO: 409037 - DNA, 25 bp, Homo sapien
catgttctccagttaggacacgggt

SEQ ID NO: 409038 - DNA, 25 bp, Homo sapien
tgctgcccagtatgctaggccctgg

SEQ ID NO: 409039 - DNA, 25 bp, Homo sapien
taatttgccaagtgaaacctgccca

SEQ ID NO: 409040 - DNA, 25 bp, Homo sapien
catctaagagtccttcaaaagtgct

SEQ ID NO: 409041 - DNA, 25 bp, Homo sapien
cgagggcacaggatggacacgaata

SEQ ID NO: 409042 - DNA, 25 bp, Homo sapien
cttggagctcttgtgcgagggcaca

SEQ ID NO: 409043 - DNA, 25 bp, Homo sapien
taaattttctcgtatccagcaagga

SEQ ID NO: 409044 - DNA, 25 bp, Homo sapien
agaacaagagggagtgattgtaaca

SEQ ID NO: 409045 - DNA, 25 bp, Homo sapien
gcacaggcattagggcaagaacaag

SEQ ID NO: 409046 - DNA, 25 bp, Homo sapien
cactgagtagtgctcagaggatgca

SEQ ID NO: 409047 - DNA, 25 bp, Homo sapien
tccactcaggcttgggatgcactga

SEQ ID NO: 409048 - DNA, 25 bp, Homo sapien
gctgtattcagcttgtcacatcctg

SEQ ID NO: 409049 - DNA, 25 bp, Homo sapien
ccatgaagcaggagcagatctctga

SEQ ID NO: 409050 - DNA, 25 bp, Homo sapien
tgatagacttttgctctcacaggaa

SEQ ID NO: 409051 - DNA, 25 bp, Homo sapien
gagagggtcacgctgatacgtgtaa

SEQ ID NO: 409052 - DNA, 25 bp, Homo sapien
agtccgtctaacctagcactgtcag

SEQ ID NO: 409053 - DNA, 25 bp, Homo sapien
tgatgacgttaggacaaagtccgtc

SEQ ID NO: 409054 - DNA, 25 bp, Homo sapien
tattgtcattgatgacgttaggaca

SEQ ID NO: 409055 - DNA, 25 bp, Homo sapien
aggacaaagtccgtctaacctagca

SEQ ID NO: 409056 - DNA, 25 bp, Homo sapien
gcttaatgggagtgtcttgctatga

SEQ ID NO: 409057 - DNA, 25 bp, Homo sapien
cactctgggcttttgggcttaatgg

SEQ ID NO: 409058 - DNA, 25 bp, Homo sapien
gcctgtgatccatgtatttctcctg

SEQ ID NO: 409059 - DNA, 25 bp, Homo sapien
tgtggaaacttaatcacgtcttcga

SEQ ID NO: 409060 - DNA, 25 bp, Homo sapien
caagttcagtatatagtggaggccc

SEQ ID NO: 409061 - DNA, 25 bp, Homo sapien
tgagaactctttgctagacccagta

SEQ ID NO: 409062 - DNA, 25 bp, Homo sapien
tcttagactgggtaaatcataaaaa

SEQ ID NO: 409063 - DNA, 25 bp, Homo sapien
ctgtcacaaaatatcttagactggg

SEQ ID NO: 409064 - DNA, 25 bp, Homo sapien
cactgtctgggccttcggagtcaga

SEQ ID NO: 409065 - DNA, 25 bp, Homo sapien
gcattaccctgccccgtggaattta

SEQ ID NO: 409066 - DNA, 25 bp, Homo sapien
gaatttactccaacacagaatcctt

SEQ ID NO: 409067 - DNA, 25 bp, Homo sapien
gcttaaccccaattccactgtctgg

SEQ ID NO: 409068 - DNA, 25 bp, Homo sapien
ctgtcctcatcataatcaatggtat

SEQ ID NO: 409069 - DNA, 25 bp, Homo sapien
caactgtcctcatcataatcaatgg

SEQ ID NO: 409070 - DNA, 25 bp, Homo sapien
tgaagtattgttcacctcagaagaa

SEQ ID NO: 409071 - DNA, 25 bp, Homo sapien
ctctattatgacaactgtcctcatc

SEQ ID NO: 409072 - DNA, 25 bp, Homo sapien
aacaaaagtgggagcaaagaacaag

SEQ ID NO: 409073 - DNA, 25 bp, Homo sapien
tctaccatatgaaacttacatgtgg

SEQ ID NO: 409074 - DNA, 25 bp, Homo sapien
gctggatctgctgctaattgggaag

SEQ ID NO: 409075 - DNA, 25 bp, Homo sapien
ctgagatgatcggtgtgaacttggc

SEQ ID NO: 409076 - DNA, 25 bp, Homo sapien
tattagataacctgcaatgcgtagg

SEQ ID NO: 409077 - DNA, 25 bp, Homo sapien
gcaccctgcgtgctcaaaataacaa

SEQ ID NO: 409078 - DNA, 25 bp, Homo sapien
tagtaaaacctaatgcccaggcagc

SEQ ID NO: 409079 - DNA, 25 bp, Homo sapien
ttatgaaattcaaagcccaagcgtt

SEQ ID NO: 409080 - DNA, 25 bp, Homo sapien
cactgtttagtcttcctctgcgaca

SEQ ID NO: 409081 - DNA, 25 bp, Homo sapien
tcctgagagagggtattaacatcgg

SEQ ID NO: 409082 - DNA, 25 bp, Homo sapien
gccattgcagacctcctattactga

SEQ ID NO: 409083 - DNA, 25 bp, Homo sapien
gcaacggcagcgctattgctgatcc

SEQ ID NO: 409084 - DNA, 25 bp, Homo sapien
gctttgatcagctctgtgacggtgt

SEQ ID NO: 409085 - DNA, 25 bp, Homo sapien
taaaataatttaccctgagctcctg

SEQ ID NO: 409086 - DNA, 25 bp, Homo sapien
gtgtgctgcctaagtacctcattga

SEQ ID NO: 409087 - DNA, 25 bp, Homo sapien
taatcctgattgaacccatgccaga

SEQ ID NO: 409088 - DNA, 25 bp, Homo sapien
ggcagctagccagtaatatacacaa

SEQ ID NO: 409089 - DNA, 25 bp, Homo sapien
tgcttaacttcacaagccaggtctg

SEQ ID NO: 409090 - DNA, 25 bp, Homo sapien
ctctgggaggtgtccattgctgatt

SEQ ID NO: 409091 - DNA, 25 bp, Homo sapien
tcagttaagtgagctaaattcacca

SEQ ID NO: 409092 - DNA, 25 bp, Homo sapien
tctaatgctctcacgttgcctgagg

SEQ ID NO: 409093 - DNA, 25 bp, Homo sapien
catgaataatagctggctgccactt

SEQ ID NO: 409094 - DNA, 25 bp, Homo sapien
tcatgaataatagctggctgccact

SEQ ID NO: 409095 - DNA, 25 bp, Homo sapien
cgttgcctgaggtttcatgaataat

SEQ ID NO: 409096 - DNA, 25 bp, Homo sapien
aactgtataaactggcctgggaagg

SEQ ID NO: 409097 - DNA, 25 bp, Homo sapien
cacagagaaggcacgcaacaggttg

SEQ ID NO: 409098 - DNA, 25 bp, Homo sapien
cagataatttgatacccactctggg

SEQ ID NO: 409099 - DNA, 25 bp, Homo sapien
tcaacccaatgagatcactagactg

SEQ ID NO: 409100 - DNA, 25 bp, Homo sapien
acagtcatccccactgttgaatgca

SEQ ID NO: 409101 - DNA, 25 bp, Homo sapien
ccccactgttgaatgcacattgcac

SEQ ID NO: 409102 - DNA, 25 bp, Homo sapien
agtcatccccactgttgaatgcaca

SEQ ID NO: 409103 - DNA, 25 bp, Homo sapien
catccccactgttgaatgcacattg

SEQ ID NO: 409104 - DNA, 25 bp, Homo sapien
cacgtgatgctgcagtttatgtgca

SEQ ID NO: 409105 - DNA, 25 bp, Homo sapien
gcacgtgatgctgcagtttatgtgc

SEQ ID NO: 409106 - DNA, 25 bp, Homo sapien
gcagtttatgtgcaatcgtgctttc

SEQ ID NO: 409107 - DNA, 25 bp, Homo sapien
tatgtgcaatcgtgctttccaagac

SEQ ID NO: 409108 - DNA, 25 bp, Homo sapien
tggaagtttacctcagtaatacctc

SEQ ID NO: 409109 - DNA, 25 bp, Homo sapien
caccgctttggatctggatactgga

SEQ ID NO: 409110 - DNA, 25 bp, Homo sapien
gttattttcactgtccaccgctttg

SEQ ID NO: 409111 - DNA, 25 bp, Homo sapien
tctggatactggaagtttacctcag

SEQ ID NO: 409112 - DNA, 25 bp, Homo sapien
cttagaaaactcaatagatcgttgt

SEQ ID NO: 409113 - DNA, 25 bp, Homo sapien
tcatctctgagtccatgataacact

SEQ ID NO: 409114 - DNA, 25 bp, Homo sapien
agttgacaattttatatccaaaggc

SEQ ID NO: 409115 - DNA, 25 bp, Homo sapien
acagttttatatccaaggctttgct

SEQ ID NO: 409116 - DNA, 25 bp, Homo sapien
gatctttcacccaaatagccaccta

SEQ ID NO: 409117 - DNA, 25 bp, Homo sapien
ggcttgttgatctttcacccaaata

SEQ ID NO: 409118 - DNA, 25 bp, Homo sapien
ccacctaacactttacgaatatcca

SEQ ID NO: 409119 - DNA, 25 bp, Homo sapien
cacctaacactttacgaatatccat

SEQ ID NO: 409120 - DNA, 25 bp, Homo sapien
tcaggactgggaagccgtataatat

SEQ ID NO: 409121 - DNA, 25 bp, Homo sapien
tagtcttttaaagcatgtcatggtc

SEQ ID NO: 409122 - DNA, 25 bp, Homo sapien
tctgtgcagataagccagttctgtg

SEQ ID NO: 409123 - DNA, 25 bp, Homo sapien
tcctttcagcttaaagaccttcttg

SEQ ID NO: 409124 - DNA, 25 bp, Homo sapien
aatgctaaggtgatttcttaccacc

SEQ ID NO: 409125 - DNA, 25 bp, Homo sapien
ccttaagggagtgctaaatattgga

SEQ ID NO: 409126 - DNA, 25 bp, Homo sapien
caggtgtgatcagcattcttatgga

SEQ ID NO: 409127 - DNA, 25 bp, Homo sapien
caagaattttacatggagccaaact

SEQ ID NO: 409128 - DNA, 25 bp, Homo sapien
acatagactgtaagatcgtggccca

SEQ ID NO: 409129 - DNA, 25 bp, Homo sapien
ccaggactggctcgaaaatctctca

SEQ ID NO: 409130 - DNA, 25 bp, Homo sapien
tatattggaaccacctgaatgagcc

SEQ ID NO: 409131 - DNA, 25 bp, Homo sapien
tatccacgctgacttagaggttaca

SEQ ID NO: 409132 - DNA, 25 bp, Homo sapien
gaggcacgtccacatggttggagca

SEQ ID NO: 409133 - DNA, 25 bp, Homo sapien
tatcacgacaacagcaaggagcaag

SEQ ID NO: 409134 - DNA, 25 bp, Homo sapien
agagcgaagagggagtgctacacac

SEQ ID NO: 409135 - DNA, 25 bp, Homo sapien
cagcctctggcagttgctagcaacc

SEQ ID NO: 409136 - DNA, 25 bp, Homo sapien
tgttcattcaggcaagccacgtgtg

SEQ ID NO: 409137 - DNA, 25 bp, Homo sapien
cacgtgtgcacaatgacctaggcaa

SEQ ID NO: 409138 - DNA, 25 bp, Homo sapien
cacacgagctgaagaggcacggctt

SEQ ID NO: 409139 - DNA, 25 bp, Homo sapien
gctaagaggtcccatgatctgtcat

SEQ ID NO: 409140 - DNA, 25 bp, Homo sapien
gatgagatgtcacagctcaaacaat

SEQ ID NO: 409141 - DNA, 25 bp, Homo sapien
gagatgtcacagctcaaacaatgag

SEQ ID NO: 409142 - DNA, 25 bp, Homo sapien
cacagctcaaacaatgaggcaggaa

SEQ ID NO: 409143 - DNA, 25 bp, Homo sapien
cagaagatgagatgtcacagctcaa

SEQ ID NO: 409144 - DNA, 25 bp, Homo sapien
gggatggctatctcctttactgagt

SEQ ID NO: 409145 - DNA, 25 bp, Homo sapien
ttatttacgccctcaacaaactgga

SEQ ID NO: 409146 - DNA, 25 bp, Homo sapien
caccctgtggcctattcaagttgac

SEQ ID NO: 409147 - DNA, 25 bp, Homo sapien
taaacagatatttggcaccctgtgg

SEQ ID NO: 409148 - DNA, 25 bp, Homo sapien
gaaaggtctggatcattagtggtcc

SEQ ID NO: 409149 - DNA, 25 bp, Homo sapien
catggtacttacctggtggtgaccc

SEQ ID NO: 409150 - DNA, 25 bp, Homo sapien
ggtagtcaggaacaatcacccagcc

SEQ ID NO: 409151 - DNA, 25 bp, Homo sapien
gcaagcacttcatctggtcatggta

SEQ ID NO: 409152 - DNA, 25 bp, Homo sapien
catgaagccaccgatgcaggctgga

SEQ ID NO: 409153 - DNA, 25 bp, Homo sapien
gaagctcaggttgcacggtaacttg

SEQ ID NO: 409154 - DNA, 25 bp, Homo sapien
tccttcaaggtagcccagaggtgag

SEQ ID NO: 409155 - DNA, 25 bp, Homo sapien
gcgttggtggctcagataacatcca

SEQ ID NO: 409156 - DNA, 25 bp, Homo sapien
tttgccagatcaattccattgcctt

SEQ ID NO: 409157 - DNA, 25 bp, Homo sapien
ttccattgccttaccacataatgct

SEQ ID NO: 409158 - DNA, 25 bp, Homo sapien
gcaaataattctataggcctgactg

SEQ ID NO: 409159 - DNA, 25 bp, Homo sapien
taatacacatatttacttgtacttg

SEQ ID NO: 409160 - DNA, 25 bp, Homo sapien
aatgacttcagtttcaaaatatgct

SEQ ID NO: 409161 - DNA, 25 bp, Homo sapien
tgctaaatgcattcagtttccagta

SEQ ID NO: 409162 - DNA, 25 bp, Homo sapien
tttccagtagttctgggcacacact

SEQ ID NO: 409163 - DNA, 25 bp, Homo sapien
ctaatgaatgacttcagtttcaaaa

SEQ ID NO: 409164 - DNA, 25 bp, Homo sapien
ggttccttgcagaccttttgtcttc

SEQ ID NO: 409165 - DNA, 25 bp, Homo sapien
gtggttccttgcagaccttttgtct

SEQ ID NO: 409166 - DNA, 25 bp, Homo sapien
cagtggttccttgcagaccttttgt

SEQ ID NO: 409167 - DNA, 25 bp, Homo sapien
tgcagtggttccttgcagacctttt

SEQ ID NO: 409168 - DNA, 25 bp, Homo sapien
taaagagtacagcacaattgtcaag

SEQ ID NO: 409169 - DNA, 25 bp, Homo sapien
ctaacgaactaaagagtacagcaca

SEQ ID NO: 409170 - DNA, 25 bp, Homo sapien
cgaactaaagagtacagcacaattg

SEQ ID NO: 409171 - DNA, 25 bp, Homo sapien
actaaagagtacagcacaattgtca

SEQ ID NO: 409172 - DNA, 25 bp, Homo sapien
gtccatgacttcccgaccatttttg

SEQ ID NO: 409173 - DNA, 25 bp, Homo sapien
ccatgacttcccgaccatttttgcc

SEQ ID NO: 409174 - DNA, 25 bp, Homo sapien
tgtccatgacttcccgaccattttt

SEQ ID NO: 409175 - DNA, 25 bp, Homo sapien
ctgtccatgacttcccgaccatttt

SEQ ID NO: 409176 - DNA, 25 bp, Homo sapien
tcaatcttggtagcaagcctttgac

SEQ ID NO: 409177 - DNA, 25 bp, Homo sapien
caactttttcggtcaatcttggtag

SEQ ID NO: 409178 - DNA, 25 bp, Homo sapien
ttttcggtcaatcttggtagcaagc

SEQ ID NO: 409179 - DNA, 25 bp, Homo sapien
agaagatcaactttttcggtcaatc

SEQ ID NO: 409180 - DNA, 25 bp, Homo sapien
gaactgggttcactatcacttctga

SEQ ID NO: 409181 - DNA, 25 bp, Homo sapien
tgtacatggtatactgcttagtggg

SEQ ID NO: 409182 - DNA, 25 bp, Homo sapien
aggcgtgagcctttgtacccggact

SEQ ID NO: 409183 - DNA, 25 bp, Homo sapien
cacttctgactgaaagaggcctgaa

SEQ ID NO: 409184 - DNA, 25 bp, Homo sapien
gaactttgttacagcgtgctgtctc

SEQ ID NO: 409185 - DNA, 25 bp, Homo sapien
aactttgttacagcgtgctgtctct

SEQ ID NO: 409186 - DNA, 25 bp, Homo sapien
gaaactatatcctatgtccataagg

SEQ ID NO: 409187 - DNA, 25 bp, Homo sapien
taaggcaaatctgttactgagtaat

SEQ ID NO: 409188 - DNA, 25 bp, Homo sapien
tcctatgtccataaggcaaatctgt

SEQ ID NO: 409189 - DNA, 25 bp, Homo sapien
aaatggaaggaaactatatcctatg

SEQ ID NO: 409190 - DNA, 25 bp, Homo sapien
atgtacaaagcctgagggcctatca

SEQ ID NO: 409191 - DNA, 25 bp, Homo sapien
tgcagatactacaccagaccctgac

SEQ ID NO: 409192 - DNA, 25 bp, Homo sapien
gaccctacttccaggcatatttcca

SEQ ID NO: 409193 - DNA, 25 bp, Homo sapien
gggcctatcatagaggctaggaatg

SEQ ID NO: 409194 - DNA, 25 bp, Homo sapien
ttaacaggcgacaggaaaagatacg

SEQ ID NO: 409195 - DNA, 25 bp, Homo sapien
caagcgctctgtagccacatgtgag

SEQ ID NO: 409196 - DNA, 25 bp, Homo sapien
tatactatcgcttctctcagggaca

SEQ ID NO: 409197 - DNA, 25 bp, Homo sapien
aaaattctcaattacggcgtcctgg

SEQ ID NO: 409198 - DNA, 25 bp, Homo sapien
gctcgtacacgtcgctgaaggcgcc

SEQ ID NO: 409199 - DNA, 25 bp, Homo sapien
gcgtagcgaagttctcccctgccat

SEQ ID NO: 409200 - DNA, 25 bp, Homo sapien
cccacgtgcccgtggaacggcgtag

SEQ ID NO: 409201 - DNA, 25 bp, Homo sapien
gcctccagcgcgttcaaaagcagaa

SEQ ID NO: 409202 - DNA, 25 bp, Homo sapien
atgcgcatgcgcatgccctcaccct

SEQ ID NO: 409203 - DNA, 25 bp, Homo sapien
cgctgcgttccatgcgcgtgcgcag

SEQ ID NO: 409204 - DNA, 25 bp, Homo sapien
gtccttcgctgcgttccatgcgcgt

SEQ ID NO: 409205 - DNA, 25 bp, Homo sapien
cttcgctgcgttccatgcgcgtgcg

SEQ ID NO: 409206 - DNA, 25 bp, Homo sapien
tcacttcaacgtgacttgtcccact

SEQ ID NO: 409207 - DNA, 25 bp, Homo sapien
cacttcaacgtgacttgtcccacta

SEQ ID NO: 409208 - DNA, 25 bp, Homo sapien
caagttttcgcctattcaaaatgag

SEQ ID NO: 409209 - DNA, 25 bp, Homo sapien
caagatttgaggtcaactcctcttc

SEQ ID NO: 409210 - DNA, 25 bp, Homo sapien
acatcttcaagatttgaggtcaact

SEQ ID NO: 409211 - DNA, 25 bp, Homo sapien
gcaattgtcatacctttaaggtggt

SEQ ID NO: 409212 - DNA, 25 bp, Homo sapien
aattttcttggaattcacatttccg

SEQ ID NO: 409213 - DNA, 25 bp, Homo sapien
actagaaattttcttggaattcaca

SEQ ID NO: 409214 - DNA, 25 bp, Homo sapien
gaaattttcttggaattcacatttc

SEQ ID NO: 409215 - DNA, 25 bp, Homo sapien
ttttcttggaattcacatttccgac

SEQ ID NO: 409216 - DNA, 25 bp, Homo sapien
tttgatgtattaataaagtatggag

SEQ ID NO: 409217 - DNA, 25 bp, Homo sapien
ttaataaagtatggagaaatatatc

SEQ ID NO: 409218 - DNA, 25 bp, Homo sapien
tgatgtattaataaagtatggagaa

SEQ ID NO: 409219 - DNA, 25 bp, Homo sapien
cttttgatgtattaataaagtatgg

SEQ ID NO: 409220 - DNA, 25 bp, Homo sapien
aatttctaattcatcggtagcgttt

SEQ ID NO: 409221 - DNA, 25 bp, Homo sapien
catcggtagcgtttttccatcttta

SEQ ID NO: 409222 - DNA, 25 bp, Homo sapien
tctaattcatcggtagcgtttttcc

SEQ ID NO: 409223 - DNA, 25 bp, Homo sapien
aattcatcggtagcgtttttccatc

SEQ ID NO: 409224 - DNA, 25 bp, Homo sapien
cagttctgctcagtaatcactgttt

SEQ ID NO: 409225 - DNA, 25 bp, Homo sapien
tgcatcggaaattaggttgccaatt

SEQ ID NO: 409226 - DNA, 25 bp, Homo sapien
ctttttcattgcatcggaaattagg

SEQ ID NO: 409227 - DNA, 25 bp, Homo sapien
ttcattgcatcggaaattaggttgc

SEQ ID NO: 409228 - DNA, 25 bp, Homo sapien
cagcagtgagtaaaaggtctacacc

SEQ ID NO: 409229 - DNA, 25 bp, Homo sapien
tcatctgacttaagactgtgggtaa

SEQ ID NO: 409230 - DNA, 25 bp, Homo sapien
gagccaggaccctcgacactggtgt

SEQ ID NO: 409231 - DNA, 25 bp, Homo sapien
tacagcagtgagtaaaaggtctaca

SEQ ID NO: 409232 - DNA, 25 bp, Homo sapien
ttatcacctgcggattagacgttct

SEQ ID NO: 409233 - DNA, 25 bp, Homo sapien
tagacgttcttttccgccctagctc

SEQ ID NO: 409234 - DNA, 25 bp, Homo sapien
ggacccttagagctctttatcacct

SEQ ID NO: 409235 - DNA, 25 bp, Homo sapien
ctttgaattaagctgtgatggaccc

SEQ ID NO: 409236 - DNA, 25 bp, Homo sapien
tcaggcaacataatttctactatca

SEQ ID NO: 409237 - DNA, 25 bp, Homo sapien
tctttcaggacactcaggcaacata

SEQ ID NO: 409238 - DNA, 25 bp, Homo sapien
actatcaccgtgtactgtggattgc

SEQ ID NO: 409239 - DNA, 25 bp, Homo sapien
gctgagagccactttactttctgaa

SEQ ID NO: 409240 - DNA, 25 bp, Homo sapien
tgggtaacattcgtagaataacttg

SEQ ID NO: 409241 - DNA, 25 bp, Homo sapien
taacattcgtagaataacttgagtc

SEQ ID NO: 409242 - DNA, 25 bp, Homo sapien
atgggtaacattcgtagaataactt

SEQ ID NO: 409243 - DNA, 25 bp, Homo sapien
ggtaacattcgtagaataacttgag

SEQ ID NO: 409244 - DNA, 25 bp, Homo sapien
aatcctcttaggctcatctctgtag

SEQ ID NO: 409245 - DNA, 25 bp, Homo sapien
gtcatcgccatattcgttgagcagg

SEQ ID NO: 409246 - DNA, 25 bp, Homo sapien
gcagggtgtaagcctcctccacaca

SEQ ID NO: 409247 - DNA, 25 bp, Homo sapien
catattcgttgagcagggtgtaagc

SEQ ID NO: 409248 - DNA, 25 bp, Homo sapien
tgccgagctcgcttgaccagcacat

SEQ ID NO: 409249 - DNA, 25 bp, Homo sapien
cgccagattcgcagtgccgagctcg

SEQ ID NO: 409250 - DNA, 25 bp, Homo sapien
gctctggctgactgggcccgccaga

SEQ ID NO: 409251 - DNA, 25 bp, Homo sapien
gactgggcccgccagattcgcagtg

SEQ ID NO: 409252 - DNA, 25 bp, Homo sapien
cttgcctctgtgcttcccgccgcca

SEQ ID NO: 409253 - DNA, 25 bp, Homo sapien
gagccttgcctctgtgcttcccgcc

SEQ ID NO: 409254 - DNA, 25 bp, Homo sapien
gtgcttcccgccgccaggctgagga

SEQ ID NO: 409255 - DNA, 25 bp, Homo sapien
gcctctgtgcttcccgccgccaggc

SEQ ID NO: 409256 - DNA, 25 bp, Homo sapien
gaaagagaaacgtttctccactgca

SEQ ID NO: 409257 - DNA, 25 bp, Homo sapien
cgtttctccactgcagttggcgtcc

SEQ ID NO: 409258 - DNA, 25 bp, Homo sapien
gagaaacgtttctccactgcagttg

SEQ ID NO: 409259 - DNA, 25 bp, Homo sapien
aaacgtttctccactgcagttggcg

SEQ ID NO: 409260 - DNA, 25 bp, Homo sapien
agagcaactggagacctcttttagg

SEQ ID NO: 409261 - DNA, 25 bp, Homo sapien
ctgaagtgcagggtgagaattgctc

SEQ ID NO: 409262 - DNA, 25 bp, Homo sapien
tgcttgtaaaatggcacaacatttt

SEQ ID NO: 409263 - DNA, 25 bp, Homo sapien
tatatcaggccacggaactgtgtgg

SEQ ID NO: 409264 - DNA, 25 bp, Homo sapien
ccttgaattccgataagcttttctt

SEQ ID NO: 409265 - DNA, 25 bp, Homo sapien
ttgaattatcattgatggtaagctg

SEQ ID NO: 409266 - DNA, 25 bp, Homo sapien
gaattatcattgatggtaagctgga

SEQ ID NO: 409267 - DNA, 25 bp, Homo sapien
caaaccttgaattccgataagcttt

SEQ ID NO: 409268 - DNA, 25 bp, Homo sapien
cccttcctctgcttttgaagaagtc

SEQ ID NO: 409269 - DNA, 25 bp, Homo sapien
agcccttcctctgcttttgaagaag

SEQ ID NO: 409270 - DNA, 25 bp, Homo sapien
cagcccttcctctgcttttgaagaa

SEQ ID NO: 409271 - DNA, 25 bp, Homo sapien
tccagcccttcctctgcttttgaag

SEQ ID NO: 409272 - DNA, 25 bp, Homo sapien
tatattggaagtagctcaaagctgg

SEQ ID NO: 409273 - DNA, 25 bp, Homo sapien
taatccaccgtaatagagaggaggg

SEQ ID NO: 409274 - DNA, 25 bp, Homo sapien
ccatcttaatagaagtaggaaaagc

SEQ ID NO: 409275 - DNA, 25 bp, Homo sapien
tgaccaatttgggtttatcccagaa

SEQ ID NO: 409276 - DNA, 25 bp, Homo sapien
catttctagcattaggacttggttg

SEQ ID NO: 409277 - DNA, 25 bp, Homo sapien
tttctagcattaggacttggttggc

SEQ ID NO: 409278 - DNA, 25 bp, Homo sapien
ttctagcattaggacttggttggct

SEQ ID NO: 409279 - DNA, 25 bp, Homo sapien
caacatttctagcattaggacttgg

SEQ ID NO: 409280 - DNA, 25 bp, Homo sapien
ccaccttgacaatggtgaaactgag

SEQ ID NO: 409281 - DNA, 25 bp, Homo sapien
cagtgagttgcaaaaaagggttagc

SEQ ID NO: 409282 - DNA, 25 bp, Homo sapien
taatgatttaatggctgacagcctg

SEQ ID NO: 409283 - DNA, 25 bp, Homo sapien
tacctcttgaaatgtcttggtgtgc

SEQ ID NO: 409284 - DNA, 25 bp, Homo sapien
aaatcttaaacaggaaggagtcaca

SEQ ID NO: 409285 - DNA, 25 bp, Homo sapien
tcacaccaacttcagaattagtacg

SEQ ID NO: 409286 - DNA, 25 bp, Homo sapien
taaaatcttaaacaggaaggagtca

SEQ ID NO: 409287 - DNA, 25 bp, Homo sapien
tagtacgttagctctagggaaagaa

SEQ ID NO: 409288 - DNA, 25 bp, Homo sapien
tctgatgccctaatactaatgtgga

SEQ ID NO: 409289 - DNA, 25 bp, Homo sapien
gagttgtcaacgctgtacagatgtg

SEQ ID NO: 409290 - DNA, 25 bp, Homo sapien
gggccagaagccaagatgtaccaat

SEQ ID NO: 409291 - DNA, 25 bp, Homo sapien
gaccctcagaggctcaaggctagaa

SEQ ID NO: 409292 - DNA, 25 bp, Homo sapien
gccaattaaacatgtgcaacagaga

SEQ ID NO: 409293 - DNA, 25 bp, Homo sapien
gcaaacaaaactgggcaggacactg

SEQ ID NO: 409294 - DNA, 25 bp, Homo sapien
gattagctggtctctcaagtaacct

SEQ ID NO: 409295 - DNA, 25 bp, Homo sapien
taactttggctggtaagaatagctc

SEQ ID NO: 409296 - DNA, 25 bp, Homo sapien
ttctcccacaagcaaaaaggtcagc

SEQ ID NO: 409297 - DNA, 25 bp, Homo sapien
gagcatgcctccagatatcttaaga

SEQ ID NO: 409298 - DNA, 25 bp, Homo sapien
taacccttgataaatggaggcacct

SEQ ID NO: 409299 - DNA, 25 bp, Homo sapien
gataactaccactccgcttcatgaa

SEQ ID NO: 409300 - DNA, 25 bp, Homo sapien
tgtaaatcagctctctcagttcgtt

SEQ ID NO: 409301 - DNA, 25 bp, Homo sapien
aatcagctctctcagttcgttttgc

SEQ ID NO: 409302 - DNA, 25 bp, Homo sapien
gctctctcagttcgttttgcttcac

SEQ ID NO: 409303 - DNA, 25 bp, Homo sapien
agctctctcagttcgttttgcttca

SEQ ID NO: 409304 - DNA, 25 bp, Homo sapien
cacagatcaacaaacggaatgggtt

SEQ ID NO: 409305 - DNA, 25 bp, Homo sapien
aaacacagatcaacaaacggaatgg

SEQ ID NO: 409306 - DNA, 25 bp, Homo sapien
caacaaacggaatgggtttatcaat

SEQ ID NO: 409307 - DNA, 25 bp, Homo sapien
gatcaacaaacggaatgggtttatc

SEQ ID NO: 409308 - DNA, 25 bp, Homo sapien
acatccacactttcagacggatcca

SEQ ID NO: 409309 - DNA, 25 bp, Homo sapien
tgcctttgtttgatgtacttcaggg

SEQ ID NO: 409310 - DNA, 25 bp, Homo sapien
tttcagacggatccaaatccaatgc

SEQ ID NO: 409311 - DNA, 25 bp, Homo sapien
gacggatccaaatccaatgcctttg

SEQ ID NO: 409312 - DNA, 25 bp, Homo sapien
ggacaagtggatttgttgctagatg

SEQ ID NO: 409313 - DNA, 25 bp, Homo sapien
gacaagtggatttgttgctagatgt

SEQ ID NO: 409314 - DNA, 25 bp, Homo sapien
caagtggatttgttgctagatgtaa

SEQ ID NO: 409315 - DNA, 25 bp, Homo sapien
acaagtggatttgttgctagatgta

SEQ ID NO: 409316 - DNA, 25 bp, Homo sapien
tttttccataaagctaagccttcca

SEQ ID NO: 409317 - DNA, 25 bp, Homo sapien
caagcaggctgaatggaattttttc

SEQ ID NO: 409318 - DNA, 25 bp, Homo sapien
gaaacagatcatgcaatcttcaaca

SEQ ID NO: 409319 - DNA, 25 bp, Homo sapien
ttgaaaccgtgaatgactgagaaac

SEQ ID NO: 409320 - DNA, 25 bp, Homo sapien
gaagagaatctgcttggctatgttc

SEQ ID NO: 409321 - DNA, 25 bp, Homo sapien
aagtcactacacactgataaccacc

SEQ ID NO: 409322 - DNA, 25 bp, Homo sapien
ttggaaccagatgtaatttttctcc

SEQ ID NO: 409323 - DNA, 25 bp, Homo sapien
ggctatgttcatgtctcccaactta

SEQ ID NO: 409324 - DNA, 25 bp, Homo sapien
taagtagccattacctctcgagtag

SEQ ID NO: 409325 - DNA, 25 bp, Homo sapien
taagtgcttaactgcagcatccagt

SEQ ID NO: 409326 - DNA, 25 bp, Homo sapien
gaacccagtggataatttgaaggca

SEQ ID NO: 409327 - DNA, 25 bp, Homo sapien
tatgtcctcaatagtataagtagcc

SEQ ID NO: 409328 - DNA, 25 bp, Homo sapien
cgtcatgccattaaatagttgtgta

SEQ ID NO: 409329 - DNA, 25 bp, Homo sapien
tgtcatatgatagactgaacaagcc

SEQ ID NO: 409330 - DNA, 25 bp, Homo sapien
tgaaaacacgcttctcactgctatt

SEQ ID NO: 409331 - DNA, 25 bp, Homo sapien
aacactgctgacatacttgcttgta

SEQ ID NO: 409332 - DNA, 25 bp, Homo sapien
tatttgggacctcaactgctgtctc

SEQ ID NO: 409333 - DNA, 25 bp, Homo sapien
gatacatggaatacaaagcccgaag

SEQ ID NO: 409334 - DNA, 25 bp, Homo sapien
gcctgaacaggtgatagagcaattt

SEQ ID NO: 409335 - DNA, 25 bp, Homo sapien
gattttctggcataagcctgaacag

SEQ ID NO: 409336 - DNA, 25 bp, Homo sapien
gcaggtatctgtgtgagacctgtac

SEQ ID NO: 409337 - DNA, 25 bp, Homo sapien
aacagaaaaacgagccaccagtggg

SEQ ID NO: 409338 - DNA, 25 bp, Homo sapien
gacctgtacttcacaactcctgctt

SEQ ID NO: 409339 - DNA, 25 bp, Homo sapien
acgagccaccagtgggagcactgca

SEQ ID NO: 409340 - DNA, 25 bp, Homo sapien
tatgttgaccaaagtgctcttatca

SEQ ID NO: 409341 - DNA, 25 bp, Homo sapien
caaggatcaagtcataggatttgga

SEQ ID NO: 409342 - DNA, 25 bp, Homo sapien
taatctaaaacttgttgagcaccaa

SEQ ID NO: 409343 - DNA, 25 bp, Homo sapien
tgggtacacagtagatatttatggg

SEQ ID NO: 409344 - DNA, 25 bp, Homo sapien
tgagaattcaaccaatcgcagattg

SEQ ID NO: 409345 - DNA, 25 bp, Homo sapien
tatagtggttaacagttgcacaact

SEQ ID NO: 409346 - DNA, 25 bp, Homo sapien
caatgggatgttgaaaaggttctaa

SEQ ID NO: 409347 - DNA, 25 bp, Homo sapien
ggttagatgcagatactatatgcca

SEQ ID NO: 409348 - DNA, 25 bp, Homo sapien
cagaactatcgaaagttgtcacata

SEQ ID NO: 409349 - DNA, 25 bp, Homo sapien
acttagtgagaagatcggttgagcc

SEQ ID NO: 409350 - DNA, 25 bp, Homo sapien
tgaaaggaaggtatttagaacagta

SEQ ID NO: 409351 - DNA, 25 bp, Homo sapien
gaacagtatcagaagcatattagga

SEQ ID NO: 409352 - DNA, 25 bp, Homo sapien
tgtccaacaggaatacaccccaaaa

SEQ ID NO: 409353 - DNA, 25 bp, Homo sapien
aatagtaactatctgtccaacagga

SEQ ID NO: 409354 - DNA, 25 bp, Homo sapien
caagtgagaaggtatcccagaacat

SEQ ID NO: 409355 - DNA, 25 bp, Homo sapien
gtattaatttccaagtgagaaggta

SEQ ID NO: 409356 - DNA, 25 bp, Homo sapien
ctaagaagagacatcagtgctgctg

SEQ ID NO: 409357 - DNA, 25 bp, Homo sapien
agagacatcagtgctgctggtggtg

SEQ ID NO: 409358 - DNA, 25 bp, Homo sapien
aagaagagacatcagtgctgctggt

SEQ ID NO: 409359 - DNA, 25 bp, Homo sapien
gaagagacatcagtgctgctggtgg

SEQ ID NO: 409360 - DNA, 25 bp, Homo sapien
tccgtatgactttagattatcctga

SEQ ID NO: 409361 - DNA, 25 bp, Homo sapien
ttcatctccgtatgactttagatta

SEQ ID NO: 409362 - DNA, 25 bp, Homo sapien
tagattatcctgatcatactgtggt

SEQ ID NO: 409363 - DNA, 25 bp, Homo sapien
catactgtggtaattcaggcatcaa

SEQ ID NO: 409364 - DNA, 25 bp, Homo sapien
gaccactgtaacattgattcaattg

SEQ ID NO: 409365 - DNA, 25 bp, Homo sapien
tataagtgaagcagtcagatctcct

SEQ ID NO: 409366 - DNA, 25 bp, Homo sapien
gagaacaataacctaaaagatgagg

SEQ ID NO: 409367 - DNA, 25 bp, Homo sapien
ataactactatagccaggactattg

SEQ ID NO: 409368 - DNA, 25 bp, Homo sapien
tatacgttaatgtttcacacatggg

SEQ ID NO: 409369 - DNA, 25 bp, Homo sapien
cacatgggtttcagcattgcattct

SEQ ID NO: 409370 - DNA, 25 bp, Homo sapien
tgcacaggcctagctctgaagagga

SEQ ID NO: 409371 - DNA, 25 bp, Homo sapien
ggtcagcaactaatcttgcaggaag

SEQ ID NO: 409372 - DNA, 25 bp, Homo sapien
gatttacaggaagattgccaatggt

SEQ ID NO: 409373 - DNA, 25 bp, Homo sapien
cagttgcacaagtggaatagaatac

SEQ ID NO: 409374 - DNA, 25 bp, Homo sapien
gctgacacaggcaaacagttgcaca

SEQ ID NO: 409375 - DNA, 25 bp, Homo sapien
gccaatggtatccagagttgtggaa

SEQ ID NO: 409376 - DNA, 25 bp, Homo sapien
tctatatttacacccagtacctctg

SEQ ID NO: 409377 - DNA, 25 bp, Homo sapien
ccaaaggggatgagcagtatttcag

SEQ ID NO: 409378 - DNA, 25 bp, Homo sapien
gagcagtatttcagaaatagggaaa

SEQ ID NO: 409379 - DNA, 25 bp, Homo sapien
ttctatatttacacccagtacctct

SEQ ID NO: 409380 - DNA, 25 bp, Homo sapien
ttcttccaggatattatgattttta

SEQ ID NO: 409381 - DNA, 25 bp, Homo sapien
gaaaatggcaagatgtccaaaacct

SEQ ID NO: 409382 - DNA, 25 bp, Homo sapien
tgcagacaagaattgaaaatggcaa

SEQ ID NO: 409383 - DNA, 25 bp, Homo sapien
tcatctatacttttggtttgcagac

SEQ ID NO: 409384 - DNA, 25 bp, Homo sapien
tctttcttagtccagcccaaaagag

SEQ ID NO: 409385 - DNA, 25 bp, Homo sapien
ttttgacaaaaatggacatagactt

SEQ ID NO: 409386 - DNA, 25 bp, Homo sapien
ccaaaagagcaggtatacattgagc

SEQ ID NO: 409387 - DNA, 25 bp, Homo sapien
ttagtgctgcaaagatctttcttag

SEQ ID NO: 409388 - DNA, 25 bp, Homo sapien
ccacagtgtgccatgttctctggac

SEQ ID NO: 409389 - DNA, 25 bp, Homo sapien
gagaccacagtgtgccatgttctct

SEQ ID NO: 409390 - DNA, 25 bp, Homo sapien
cagatgaaatgcttcgggaaaggat

SEQ ID NO: 409391 - DNA, 25 bp, Homo sapien
cgggaaaggatcaacttagcaataa

SEQ ID NO: 409392 - DNA, 25 bp, Homo sapien
tggcatcaattcacctaagactttg

SEQ ID NO: 409393 - DNA, 25 bp, Homo sapien
aatgtttaaacactggctagctgga

SEQ ID NO: 409394 - DNA, 25 bp, Homo sapien
taaataaagcaccttgtgatggcat

SEQ ID NO: 409395 - DNA, 25 bp, Homo sapien
attatattccgttttgaaagcatac

SEQ ID NO: 409396 - DNA, 25 bp, Homo sapien
ttaaataacagctgcaaaaggcccg

SEQ ID NO: 409397 - DNA, 25 bp, Homo sapien
cgacgtattaccaagtacacgtaag

SEQ ID NO: 409398 - DNA, 25 bp, Homo sapien
tgcaaaaggcccgacgtattaccaa

SEQ ID NO: 409399 - DNA, 25 bp, Homo sapien
agtacacgtaagttatcatacgtaa

SEQ ID NO: 409400 - DNA, 25 bp, Homo sapien
ctgcagtgaataaagcagttctgca

SEQ ID NO: 409401 - DNA, 25 bp, Homo sapien
tgcagtgaataaagcagttctgcaa

SEQ ID NO: 409402 - DNA, 25 bp, Homo sapien
caatcttccctctaaaagaggtcta

SEQ ID NO: 409403 - DNA, 25 bp, Homo sapien
tctcagtgcaattaagaccattttg

SEQ ID NO: 409404 - DNA, 25 bp, Homo sapien
taatgctgaagtacacaaatggctg

SEQ ID NO: 409405 - DNA, 25 bp, Homo sapien
gaccattttgctcaataatgctgaa

SEQ ID NO: 409406 - DNA, 25 bp, Homo sapien
gtcgttcggcattacacttccaata

SEQ ID NO: 409407 - DNA, 25 bp, Homo sapien
tgcataggaagagactgcctcatct

SEQ ID NO: 409408 - DNA, 25 bp, Homo sapien
ccaatataaactcccataagataag

SEQ ID NO: 409409 - DNA, 25 bp, Homo sapien
tttcccattcactgtcgttcggcat

SEQ ID NO: 409410 - DNA, 25 bp, Homo sapien
tagaagtgtatttagcaaatcatca

SEQ ID NO: 409411 - DNA, 25 bp, Homo sapien
ctagaagtgtatttagcaaatcatc

SEQ ID NO: 409412 - DNA, 25 bp, Homo sapien
gaagtgtatttagcaaatcatcaac

SEQ ID NO: 409413 - DNA, 25 bp, Homo sapien
aagtgtatttagcaaatcatcaaca

SEQ ID NO: 409414 - DNA, 25 bp, Homo sapien
tatccaaagatgaagcctgaacttg

SEQ ID NO: 409415 - DNA, 25 bp, Homo sapien
accaataaatttacaccagagagcc

SEQ ID NO: 409416 - DNA, 25 bp, Homo sapien
gccacagagcagacaaatgtaggaa

SEQ ID NO: 409417 - DNA, 25 bp, Homo sapien
gaaggtactctctttatatgaactg

SEQ ID NO: 409418 - DNA, 25 bp, Homo sapien
ctatgaaggtcagagccggagattc

SEQ ID NO: 409419 - DNA, 25 bp, Homo sapien
tcactatgaaggtcagagccggaga

SEQ ID NO: 409420 - DNA, 25 bp, Homo sapien
actcactatgaaggtcagagccgga

SEQ ID NO: 409421 - DNA, 25 bp, Homo sapien
cactatgaaggtcagagccggagat

SEQ ID NO: 409422 - DNA, 25 bp, Homo sapien
tagcaagcatcctttcgctgagctg

SEQ ID NO: 409423 - DNA, 25 bp, Homo sapien
ttcagatgatggcattagcaagcat

SEQ ID NO: 409424 - DNA, 25 bp, Homo sapien
tgagctgaaatagttataggccaca

SEQ ID NO: 409425 - DNA, 25 bp, Homo sapien
ttgctctgagcacataactgaaaga

SEQ ID NO: 409426 - DNA, 25 bp, Homo sapien
ctttggattaataattctatgggtc

SEQ ID NO: 409427 - DNA, 25 bp, Homo sapien
tactttggattaataattctatggg

SEQ ID NO: 409428 - DNA, 25 bp, Homo sapien
cttactttggattaataattctatg

SEQ ID NO: 409429 - DNA, 25 bp, Homo sapien
tttggattaataattctatgggtct

SEQ ID NO: 409430 - DNA, 25 bp, Homo sapien
tttttaacatgttgggataatacca

SEQ ID NO: 409431 - DNA, 25 bp, Homo sapien
tctgccaagttgaccaatttctcac

SEQ ID NO: 409432 - DNA, 25 bp, Homo sapien
ctgaagataccctggattccaagtc

SEQ ID NO: 409433 - DNA, 25 bp, Homo sapien
ttacaaagacaatctgccaagttga

SEQ ID NO: 409434 - DNA, 25 bp, Homo sapien
ggatatcgcctttgagccaaggagt

SEQ ID NO: 409435 - DNA, 25 bp, Homo sapien
aaggatatcgcctttgagccaagga

SEQ ID NO: 409436 - DNA, 25 bp, Homo sapien
aggatatcgcctttgagccaaggag

SEQ ID NO: 409437 - DNA, 25 bp, Homo sapien
caaggatatcgcctttgagccaagg

SEQ ID NO: 409438 - DNA, 25 bp, Homo sapien
agattaacagcaagatcaaatactc

SEQ ID NO: 409439 - DNA, 25 bp, Homo sapien
aaagattaacagcaagatcaaatac

SEQ ID NO: 409440 - DNA, 25 bp, Homo sapien
caaagattaacagcaagatcaaata

SEQ ID NO: 409441 - DNA, 25 bp, Homo sapien
attaacagcaagatcaaatactctc

SEQ ID NO: 409442 - DNA, 25 bp, Homo sapien
tctttgaaaatcagtacaaatccca

SEQ ID NO: 409443 - DNA, 25 bp, Homo sapien
caaatcccacctactttatggagtc

SEQ ID NO: 409444 - DNA, 25 bp, Homo sapien
ctactttatggagtctccccatcca

SEQ ID NO: 409445 - DNA, 25 bp, Homo sapien
gcacttactggattgtataattatt

SEQ ID NO: 409446 - DNA, 25 bp, Homo sapien
taaatccacccctaaagcatgctga

SEQ ID NO: 409447 - DNA, 25 bp, Homo sapien
gaatttgcaacttggttcatttcaa

SEQ ID NO: 409448 - DNA, 25 bp, Homo sapien
tatagagttactagggccagatatc

SEQ ID NO: 409449 - DNA, 25 bp, Homo sapien
cagatatctgacagcaacttatttt

SEQ ID NO: 409450 - DNA, 25 bp, Homo sapien
aaattacagcacgtttatagcgtgg

SEQ ID NO: 409451 - DNA, 25 bp, Homo sapien
ataacaaggactaaattacagcacg

SEQ ID NO: 409452 - DNA, 25 bp, Homo sapien
ggtttattcaatatcttaagcccac

SEQ ID NO: 409453 - DNA, 25 bp, Homo sapien
cacgtttatagcgtggtttattcaa

SEQ ID NO: 409454 - DNA, 25 bp, Homo sapien
tggctaggaacttccaatcactgct

SEQ ID NO: 409455 - DNA, 25 bp, Homo sapien
gatgtctctgagatatgccagtatg

SEQ ID NO: 409456 - DNA, 25 bp, Homo sapien
gccagtatgaacatatctaatgaaa

SEQ ID NO: 409457 - DNA, 25 bp, Homo sapien
gaaagaagctgcctagctgtaagga

SEQ ID NO: 409458 - DNA, 25 bp, Homo sapien
ttcaataatcttaagaagagaattc

SEQ ID NO: 409459 - DNA, 25 bp, Homo sapien
caataatcttaagaagagaattcca

SEQ ID NO: 409460 - DNA, 25 bp, Homo sapien
tcaataatcttaagaagagaattcc

SEQ ID NO: 409461 - DNA, 25 bp, Homo sapien
aaatactcggcttgaagaaaaggag

SEQ ID NO: 409462 - DNA, 25 bp, Homo sapien
gaggtttggcttggacaatactctg

SEQ ID NO: 409463 - DNA, 25 bp, Homo sapien
tatctgcgagtttacagactaagtc

SEQ ID NO: 409464 - DNA, 25 bp, Homo sapien
tatcattgtcacagcaccggagagc

SEQ ID NO: 409465 - DNA, 25 bp, Homo sapien
ttcagttgttaattcccagccttca

SEQ ID NO: 409466 - DNA, 25 bp, Homo sapien
tcttcggcttctgaagcacctgtaa

SEQ ID NO: 409467 - DNA, 25 bp, Homo sapien
gttcagttgttaattcccagccttc

SEQ ID NO: 409468 - DNA, 25 bp, Homo sapien
ttttttacttgacttcaatgagctc

SEQ ID NO: 409469 - DNA, 25 bp, Homo sapien
tggctcactgattttcgcaacacag

SEQ ID NO: 409470 - DNA, 25 bp, Homo sapien
gtatcagtacgttctccaagttgtg

SEQ ID NO: 409471 - DNA, 25 bp, Homo sapien
tcctgggtctttgagaactgcatca

SEQ ID NO: 409472 - DNA, 25 bp, Homo sapien
catctttttccgtgtctgctttggc

SEQ ID NO: 409473 - DNA, 25 bp, Homo sapien
gacagtctagcaaattaagcaaacc

SEQ ID NO: 409474 - DNA, 25 bp, Homo sapien
tgagtcctaagccagtgagatctga

SEQ ID NO: 409475 - DNA, 25 bp, Homo sapien
cgtgtgcatgtcttcatttgtatcc

SEQ ID NO: 409476 - DNA, 25 bp, Homo sapien
catgggatccctgatttagatgtac

SEQ ID NO: 409477 - DNA, 25 bp, Homo sapien
ctgatcattgacgagcatctgttca

SEQ ID NO: 409478 - DNA, 25 bp, Homo sapien
tgacgagcatctgttcaatctcttc

SEQ ID NO: 409479 - DNA, 25 bp, Homo sapien
cattgacgagcatctgttcaatctc

SEQ ID NO: 409480 - DNA, 25 bp, Homo sapien
gatcattgacgagcatctgttcaat

SEQ ID NO: 409481 - DNA, 25 bp, Homo sapien
tactgccgaggactctaaagagctg

SEQ ID NO: 409482 - DNA, 25 bp, Homo sapien
taaagagctggttttagttctctct

SEQ ID NO: 409483 - DNA, 25 bp, Homo sapien
gcattataaaacgtaagcattcaaa

SEQ ID NO: 409484 - DNA, 25 bp, Homo sapien
gcagatattactgccgaggactcta

SEQ ID NO: 409485 - DNA, 25 bp, Homo sapien
ggaccaatccacctgcaaattcgag

SEQ ID NO: 409486 - DNA, 25 bp, Homo sapien
tgcaattggttagcacattctgctg

SEQ ID NO: 409487 - DNA, 25 bp, Homo sapien
tcttctaagttcaacaaatgtactg

SEQ ID NO: 409488 - DNA, 25 bp, Homo sapien
ccacgcctagccgagatattaattt

SEQ ID NO: 409489 - DNA, 25 bp, Homo sapien
gaccaccttcacgaatcacagttga

SEQ ID NO: 409490 - DNA, 25 bp, Homo sapien
tcacagttgatagcttgggaaacac

SEQ ID NO: 409491 - DNA, 25 bp, Homo sapien
tatatgacagtagctagaccccgac

SEQ ID NO: 409492 - DNA, 25 bp, Homo sapien
ccagcaactagagacgtgaggaaat

SEQ ID NO: 409493 - DNA, 25 bp, Homo sapien
tttcatcaactgtggaatgcgctgg

SEQ ID NO: 409494 - DNA, 25 bp, Homo sapien
agagctgggcagacaattgggtcac

SEQ ID NO: 409495 - DNA, 25 bp, Homo sapien
aactgatgggctcactttggatgct

SEQ ID NO: 409496 - DNA, 25 bp, Homo sapien
tgggtcactgtcatcaatgctaagt

SEQ ID NO: 409497 - DNA, 25 bp, Homo sapien
caagctcattatcaggtaaaaggca

SEQ ID NO: 409498 - DNA, 25 bp, Homo sapien
cctccagagaatcaagctcattatc

SEQ ID NO: 409499 - DNA, 25 bp, Homo sapien
tgccaataaggaacaagttacaacc

SEQ ID NO: 409500 - DNA, 25 bp, Homo sapien
caacccggtagaatttagcttctct

SEQ ID NO: 409501 - DNA, 25 bp, Homo sapien
tgcgggtcactgagtgtatcaggtg

SEQ ID NO: 409502 - DNA, 25 bp, Homo sapien
ttcttttataagatgatcctgcagc

SEQ ID NO: 409503 - DNA, 25 bp, Homo sapien
cgggtcactgagtgtatcaggtgtt

SEQ ID NO: 409504 - DNA, 25 bp, Homo sapien
tcactgagtgtatcaggtgtttctt

SEQ ID NO: 409505 - DNA, 25 bp, Homo sapien
tccttacaaaatgctatggcttcag

SEQ ID NO: 409506 - DNA, 25 bp, Homo sapien
gtggcttctcggacgcgacggtcat

SEQ ID NO: 409507 - DNA, 25 bp, Homo sapien
gagccattagccaatatcccattaa

SEQ ID NO: 409508 - DNA, 25 bp, Homo sapien
gcaaacgcagctggtgtgtaagtat

SEQ ID NO: 409509 - DNA, 25 bp, Homo sapien
tgtctctctctgtacacatggttcc

SEQ ID NO: 409510 - DNA, 25 bp, Homo sapien
tctctctgtacacatggttccaaat

SEQ ID NO: 409511 - DNA, 25 bp, Homo sapien
tctctgtacacatggttccaaattc

SEQ ID NO: 409512 - DNA, 25 bp, Homo sapien
tctctctctgtacacatggttccaa

SEQ ID NO: 409513 - DNA, 25 bp, Homo sapien
tctttctttgaaagtttccgcagca

SEQ ID NO: 409514 - DNA, 25 bp, Homo sapien
atctttctttgaaagtttccgcagc

SEQ ID NO: 409515 - DNA, 25 bp, Homo sapien
ctttctttgaaagtttccgcagcac

SEQ ID NO: 409516 - DNA, 25 bp, Homo sapien
ctccttgaatagcaggaacatagcc

SEQ ID NO: 409517 - DNA, 25 bp, Homo sapien
ttgaatagcaggaacatagcctagg

SEQ ID NO: 409518 - DNA, 25 bp, Homo sapien
atcagaatctacaagactgtcaatt

SEQ ID NO: 409519 - DNA, 25 bp, Homo sapien
gaatctacaagactgtcaatttctt

SEQ ID NO: 409520 - DNA, 25 bp, Homo sapien
tattaagaaaataggtcaggcgcgg

SEQ ID NO: 409521 - DNA, 25 bp, Homo sapien
tttattaagaaaataggtcaggcgc

SEQ ID NO: 409522 - DNA, 25 bp, Homo sapien
ctgaggagggagatcacctgagatc

SEQ ID NO: 409523 - DNA, 25 bp, Homo sapien
ttaagaaaataggtcaggcgcggtg

SEQ ID NO: 409524 - DNA, 25 bp, Homo sapien
ggctacatgagcttaggcaagctaa

SEQ ID NO: 409525 - DNA, 25 bp, Homo sapien
taatagttcaagaacagcagacatc

SEQ ID NO: 409526 - DNA, 25 bp, Homo sapien
tatctctgaatacctgacatccagt

SEQ ID NO: 409527 - DNA, 25 bp, Homo sapien
gacatccagtatcagagtcttctat

SEQ ID NO: 409528 - DNA, 25 bp, Homo sapien
cagagaggtcacactcgacagggaa

SEQ ID NO: 409529 - DNA, 25 bp, Homo sapien
tctgctcagagataacacaaaccgc

SEQ ID NO: 409530 - DNA, 25 bp, Homo sapien
acagctctggcatggtacatctttt

SEQ ID NO: 409531 - DNA, 25 bp, Homo sapien
gggacgcacacacaacagagaggtc

SEQ ID NO: 409532 - DNA, 25 bp, Homo sapien
gttccctttagttcgctgcttgttc

SEQ ID NO: 409533 - DNA, 25 bp, Homo sapien
cctcaggttccctttagttcgctgc

SEQ ID NO: 409534 - DNA, 25 bp, Homo sapien
ccctttagttcgctgcttgttcttc

SEQ ID NO: 409535 - DNA, 25 bp, Homo sapien
aggttccctttagttcgctgcttgt

SEQ ID NO: 409536 - DNA, 25 bp, Homo sapien
cggttgacacgtccgggacacaact

SEQ ID NO: 409537 - DNA, 25 bp, Homo sapien
tgagcactcagaccccggttgacac

SEQ ID NO: 409538 - DNA, 25 bp, Homo sapien
ctgagcactcagaccccggttgaca

SEQ ID NO: 409539 - DNA, 25 bp, Homo sapien
tgacacgtccgggacacaacttccg

SEQ ID NO: 409540 - DNA, 25 bp, Homo sapien
cggaagaggacaccctgtaataact

SEQ ID NO: 409541 - DNA, 25 bp, Homo sapien
gcggcggaagaggacaccctgtaat

SEQ ID NO: 409542 - DNA, 25 bp, Homo sapien
ctggcggcggaagaggacaccctgt

SEQ ID NO: 409543 - DNA, 25 bp, Homo sapien
cttttccgccacccaccctgtccat

SEQ ID NO: 409544 - DNA, 25 bp, Homo sapien
cataccagtctgatcattgtagtga

SEQ ID NO: 409545 - DNA, 25 bp, Homo sapien
tattttatacaaggacaacatcttc

SEQ ID NO: 409546 - DNA, 25 bp, Homo sapien
taaagatctgcaagaatacatacca

SEQ ID NO: 409547 - DNA, 25 bp, Homo sapien
acattagggttaagagttatagtca

SEQ ID NO: 409548 - DNA, 25 bp, Homo sapien
ttcacagattaagagttacacatca

SEQ ID NO: 409549 - DNA, 25 bp, Homo sapien
catcagaattatagccttttttccc

SEQ ID NO: 409550 - DNA, 25 bp, Homo sapien
gccttacagaagtctgatgttaaaa

SEQ ID NO: 409551 - DNA, 25 bp, Homo sapien
taatcttacccatccagacaagttt

SEQ ID NO: 409552 - DNA, 25 bp, Homo sapien
cttggtggtactttaccttcaactg

SEQ ID NO: 409553 - DNA, 25 bp, Homo sapien
tgcaatgctgcgagcattggacaca

SEQ ID NO: 409554 - DNA, 25 bp, Homo sapien
gagcattggacacaatccagggcca

SEQ ID NO: 409555 - DNA, 25 bp, Homo sapien
tgcgagcattggacacaatccaggg

SEQ ID NO: 409556 - DNA, 25 bp, Homo sapien
tgctgcgagcattggacacaatcca

SEQ ID NO: 409557 - DNA, 25 bp, Homo sapien
ttgcctttattattcactatgaccc

SEQ ID NO: 409558 - DNA, 25 bp, Homo sapien
tgcctttattattcactatgacccc

SEQ ID NO: 409559 - DNA, 25 bp, Homo sapien
ggttgtctaatgaccgctgctggat

SEQ ID NO: 409560 - DNA, 25 bp, Homo sapien
ctccggtatgactttggttgtctaa

SEQ ID NO: 409561 - DNA, 25 bp, Homo sapien
gactttggttgtctaatgaccgctg

SEQ ID NO: 409562 - DNA, 25 bp, Homo sapien
tatgactttggttgtctaatgaccg

SEQ ID NO: 409563 - DNA, 25 bp, Homo sapien
gcagaaagtctgttccgctgtccct

SEQ ID NO: 409564 - DNA, 25 bp, Homo sapien
agaaagtctgttccgctgtcccttg

SEQ ID NO: 409565 - DNA, 25 bp, Homo sapien
aaagtctgttccgctgtcccttgat

SEQ ID NO: 409566 - DNA, 25 bp, Homo sapien
agcagaaagtctgttccgctgtccc

SEQ ID NO: 409567 - DNA, 25 bp, Homo sapien
ttgtcagcagttgatcacagctcct

SEQ ID NO: 409568 - DNA, 25 bp, Homo sapien
tgtgttgtcagcagttgatcacagc

SEQ ID NO: 409569 - DNA, 25 bp, Homo sapien
gtcagcagttgatcacagctcctac

SEQ ID NO: 409570 - DNA, 25 bp, Homo sapien
tgttgtcagcagttgatcacagctc

SEQ ID NO: 409571 - DNA, 25 bp, Homo sapien
tggaagacccaaggaaatccagaat

SEQ ID NO: 409572 - DNA, 25 bp, Homo sapien
atccagaatttcacaccagaggacc

SEQ ID NO: 409573 - DNA, 25 bp, Homo sapien
cagaatttcacaccagaggacctac

SEQ ID NO: 409574 - DNA, 25 bp, Homo sapien
ggaaatccagaatttcacaccagag

SEQ ID NO: 409575 - DNA, 25 bp, Homo sapien
aaactgtgtcctttccacggtggct

SEQ ID NO: 409576 - DNA, 25 bp, Homo sapien
aactgtgtcctttccacggtggctc

SEQ ID NO: 409577 - DNA, 25 bp, Homo sapien
taaagacttagcacttggctctcca

SEQ ID NO: 409578 - DNA, 25 bp, Homo sapien
cctaattaggttcatgtggcatatc

SEQ ID NO: 409579 - DNA, 25 bp, Homo sapien
ctgtccattgcttggcctctcagtt

SEQ ID NO: 409580 - DNA, 25 bp, Homo sapien
tcttaaccttgcattggcccttata

SEQ ID NO: 409581 - DNA, 25 bp, Homo sapien
cccaggaaggcgcacgcgcgaagca

SEQ ID NO: 409582 - DNA, 25 bp, Homo sapien
ggcccaggaaggcgcacgcgcgaag

SEQ ID NO: 409583 - DNA, 25 bp, Homo sapien
cggcccaggaaggcgcacgcgcgaa

SEQ ID NO: 409584 - DNA, 25 bp, Homo sapien
ccaggaaggcgcacgcgcgaagcat

SEQ ID NO: 409585 - DNA, 25 bp, Homo sapien
aactccattccttaaccaagtctga

SEQ ID NO: 409586 - DNA, 25 bp, Homo sapien
taatgcattgtctctcaccccaact

SEQ ID NO: 409587 - DNA, 25 bp, Homo sapien
cattttgtgataagcatagtttgcc

SEQ ID NO: 409588 - DNA, 25 bp, Homo sapien
tatttaagatctatccacattgcct

SEQ ID NO: 409589 - DNA, 25 bp, Homo sapien
gaaaaactctatttgacaaactagc

SEQ ID NO: 409590 - DNA, 25 bp, Homo sapien
cagagcgtgagtatacaaaaagtgg

SEQ ID NO: 409591 - DNA, 25 bp, Homo sapien
cctatttgtgtatcaaaaggctggg

SEQ ID NO: 409592 - DNA, 25 bp, Homo sapien
caaactccacttcagaaaaacttca

SEQ ID NO: 409593 - DNA, 25 bp, Homo sapien
tctcttggcccttcgtcgtggttca

SEQ ID NO: 409594 - DNA, 25 bp, Homo sapien
cagctcaacaatgtggcaactggca

SEQ ID NO: 409595 - DNA, 25 bp, Homo sapien
ctggtgttgggtcagcagctcaaca

SEQ ID NO: 409596 - DNA, 25 bp, Homo sapien
tcgtggttcaaataactcctccagc

SEQ ID NO: 409597 - DNA, 25 bp, Homo sapien
gctggcaaattggagcaccaacatt

SEQ ID NO: 409598 - DNA, 25 bp, Homo sapien
cagtggcaagatactttcaactact

SEQ ID NO: 409599 - DNA, 25 bp, Homo sapien
ccagaattcccaaggccaaagctgt

SEQ ID NO: 409600 - DNA, 25 bp, Homo sapien
caaaatgggcagctgatatgtgaag

SEQ ID NO: 409601 - DNA, 25 bp, Homo sapien
tcattgtccttctacaccaaagaac

SEQ ID NO: 409602 - DNA, 25 bp, Homo sapien
aagaacatctggaaaacatccccac

SEQ ID NO: 409603 - DNA, 25 bp, Homo sapien
caaagaacatctggaaaacatcccc

SEQ ID NO: 409604 - DNA, 25 bp, Homo sapien
attgtccttctacaccaaagaacat

SEQ ID NO: 409605 - DNA, 25 bp, Homo sapien
gagctgaccaaagtccatgtggttt

SEQ ID NO: 409606 - DNA, 25 bp, Homo sapien
tgtttaagaactgatagagctgacc

SEQ ID NO: 409607 - DNA, 25 bp, Homo sapien
aaaaggaatgtcttctcgatggcga

SEQ ID NO: 409608 - DNA, 25 bp, Homo sapien
tgtggtttcccctggctccattaac

SEQ ID NO: 409609 - DNA, 25 bp, Homo sapien
tttccaggcatgctaaacccagaca

SEQ ID NO: 409610 - DNA, 25 bp, Homo sapien
tccagagtctcgtgaagatgaggtc

SEQ ID NO: 409611 - DNA, 25 bp, Homo sapien
tagccagaggcgtgttctctaaccc

SEQ ID NO: 409612 - DNA, 25 bp, Homo sapien
gaagtatctctgctgacatagccag

SEQ ID NO: 409613 - DNA, 25 bp, Homo sapien
gttggccagagcttctgtaacgtac

SEQ ID NO: 409614 - DNA, 25 bp, Homo sapien
agttggccagagcttctgtaacgta

SEQ ID NO: 409615 - DNA, 25 bp, Homo sapien
aacaaattcgagaattgcttttatt

SEQ ID NO: 409616 - DNA, 25 bp, Homo sapien
acagaaaacaaattcgagaattgct

SEQ ID NO: 409617 - DNA, 25 bp, Homo sapien
ctgacagtaatttcaggcagaactg

SEQ ID NO: 409618 - DNA, 25 bp, Homo sapien
caggcagaactgccgggtatttaaa

SEQ ID NO: 409619 - DNA, 25 bp, Homo sapien
aggcagaactgccgggtatttaaag

SEQ ID NO: 409620 - DNA, 25 bp, Homo sapien
ttttaagtctcaacatgtttcaatc

SEQ ID NO: 409621 - DNA, 25 bp, Homo sapien
tgcactaaccaatgttttaagtctc

SEQ ID NO: 409622 - DNA, 25 bp, Homo sapien
tgttttaagtctcaacatgtttcaa

SEQ ID NO: 409623 - DNA, 25 bp, Homo sapien
agaaaaagtgcactaaccaatgttt

SEQ ID NO: 409624 - DNA, 25 bp, Homo sapien
ttcactatgagctcattctcaccag

SEQ ID NO: 409625 - DNA, 25 bp, Homo sapien
tcaccagggaacatactggctagca

SEQ ID NO: 409626 - DNA, 25 bp, Homo sapien
ttttcgtcagatacatccaggttca

SEQ ID NO: 409627 - DNA, 25 bp, Homo sapien
tacaatctttcagttctgctacagc

SEQ ID NO: 409628 - DNA, 25 bp, Homo sapien
ctgttacgataacagactacctgag

SEQ ID NO: 409629 - DNA, 25 bp, Homo sapien
ttgtgagggccctgttctttgggaa

SEQ ID NO: 409630 - DNA, 25 bp, Homo sapien
gactgggtagtttacgatgaagaga

SEQ ID NO: 409631 - DNA, 25 bp, Homo sapien
gaatggtgcctgcattttgcaaggg

SEQ ID NO: 409632 - DNA, 25 bp, Homo sapien
aaaggcctttctcctaaggtgactg

SEQ ID NO: 409633 - DNA, 25 bp, Homo sapien
tcttggccaagagtgttcaagggaa

SEQ ID NO: 409634 - DNA, 25 bp, Homo sapien
caaggataagggaaacaatgaggca

SEQ ID NO: 409635 - DNA, 25 bp, Homo sapien
tcaagggaaagcgaacagcatattc

SEQ ID NO: 409636 - DNA, 25 bp, Homo sapien
cccaaagggttgcactgggcgctgc

SEQ ID NO: 409637 - DNA, 25 bp, Homo sapien
accgagccgaccgatgggcgcatgc

SEQ ID NO: 409638 - DNA, 25 bp, Homo sapien
gcggtcaccactggcgctagctgag

SEQ ID NO: 409639 - DNA, 25 bp, Homo sapien
gaagcaacgccgaggaccgagccga

SEQ ID NO: 409640 - DNA, 25 bp, Homo sapien
tcactgctgtaacccgggttccatg

SEQ ID NO: 409641 - DNA, 25 bp, Homo sapien
cactgctgtaacccgggttccatgg

SEQ ID NO: 409642 - DNA, 25 bp, Homo sapien
cctcactgctgtaacccgggttcca

SEQ ID NO: 409643 - DNA, 25 bp, Homo sapien
ctcactgctgtaacccgggttccat

SEQ ID NO: 409644 - DNA, 25 bp, Homo sapien
tcagctggcgacctaccggaaaaaa

SEQ ID NO: 409645 - DNA, 25 bp, Homo sapien
aaaacttacaaaccgcctcagctgg

SEQ ID NO: 409646 - DNA, 25 bp, Homo sapien
cagaagggagcctcaaaattctagc

SEQ ID NO: 409647 - DNA, 25 bp, Homo sapien
agcatactgcgacccaaaacttaca

SEQ ID NO: 409648 - DNA, 25 bp, Homo sapien
tagccacttcccataatgccgcgtt

SEQ ID NO: 409649 - DNA, 25 bp, Homo sapien
gcagatttactagcgtcagagccga

SEQ ID NO: 409650 - DNA, 25 bp, Homo sapien
gagacgagaaaacccattgacaacc

SEQ ID NO: 409651 - DNA, 25 bp, Homo sapien
tcgacaggacagaattacggaaaca

SEQ ID NO: 409652 - DNA, 25 bp, Homo sapien
ccggtactgcgatctcattggctgc

SEQ ID NO: 409653 - DNA, 25 bp, Homo sapien
cagggacttccctatgggttggagc

SEQ ID NO: 409654 - DNA, 25 bp, Homo sapien
tgggagagctcctgttttccgcccc

SEQ ID NO: 409655 - DNA, 25 bp, Homo sapien
gaagctggccaatgagatgccgctg

SEQ ID NO: 409656 - DNA, 25 bp, Homo sapien
gaagaaaaagataacgacagttaca

SEQ ID NO: 409657 - DNA, 25 bp, Homo sapien
gaaaaagataacgacagttacataa

SEQ ID NO: 409658 - DNA, 25 bp, Homo sapien
atctatattttaagagtggtaagaa

SEQ ID NO: 409659 - DNA, 25 bp, Homo sapien
ataacgacagttacataaaagagag

SEQ ID NO: 409660 - DNA, 25 bp, Homo sapien
ccagaaagatttgaatggccaagca

SEQ ID NO: 409661 - DNA, 25 bp, Homo sapien
tggccaagcaaaaatgatcgaaagt

SEQ ID NO: 409662 - DNA, 25 bp, Homo sapien
tggtgcctacctaacggaagggagc

SEQ ID NO: 409663 - DNA, 25 bp, Homo sapien
gtactattgaccatcctgaagacag

SEQ ID NO: 409664 - DNA, 25 bp, Homo sapien
ttatctagtacttcatagaaaaagt

SEQ ID NO: 409665 - DNA, 25 bp, Homo sapien
tcttactccacaaattctacaatat

SEQ ID NO: 409666 - DNA, 25 bp, Homo sapien
gatttcatcagtaagaatttatgga

SEQ ID NO: 409667 - DNA, 25 bp, Homo sapien
tctttaggtgaaaggaagcatgttt

SEQ ID NO: 409668 - DNA, 25 bp, Homo sapien
ttcactatcaagaataaggatggga

SEQ ID NO: 409669 - DNA, 25 bp, Homo sapien
catgattcagttgcgtcccaacggg

SEQ ID NO: 409670 - DNA, 25 bp, Homo sapien
gagatcctgttaggttaaagagtac

SEQ ID NO: 409671 - DNA, 25 bp, Homo sapien
gaagacttgtggactaagactaaaa

SEQ ID NO: 409672 - DNA, 25 bp, Homo sapien
tgcaagctgtgcctacaactaaagt

SEQ ID NO: 409673 - DNA, 25 bp, Homo sapien
ggcagtggtttcacatcagcgacac

SEQ ID NO: 409674 - DNA, 25 bp, Homo sapien
tatctgggtgatggatcacaacaca

SEQ ID NO: 409675 - DNA, 25 bp, Homo sapien
tactaaactcacaagcgtacctcct

SEQ ID NO: 409676 - DNA, 25 bp, Homo sapien
tttttgtactttgctaagtcgagtg

SEQ ID NO: 409677 - DNA, 25 bp, Homo sapien
aaaaacactggaaatctagtccagg

SEQ ID NO: 409678 - DNA, 25 bp, Homo sapien
gctaagtcgagtgtcttcaacaaat

SEQ ID NO: 409679 - DNA, 25 bp, Homo sapien
gaaatctagtccaggtgttggcagc

SEQ ID NO: 409680 - DNA, 25 bp, Homo sapien
acatcaggtgattcttgagtactac

SEQ ID NO: 409681 - DNA, 25 bp, Homo sapien
ggtcatcatcccagtctttcttccc

SEQ ID NO: 409682 - DNA, 25 bp, Homo sapien
ttttggtcatcatcccagtctttct

SEQ ID NO: 409683 - DNA, 25 bp, Homo sapien
tttggtcatcatcccagtctttctt

SEQ ID NO: 409684 - DNA, 25 bp, Homo sapien
tcatcatcccagtctttcttcccac

SEQ ID NO: 409685 - DNA, 25 bp, Homo sapien
ctgcataaaaaagaatcacacaaga

SEQ ID NO: 409686 - DNA, 25 bp, Homo sapien
taaaaaagaatcacacaagagtatg

SEQ ID NO: 409687 - DNA, 25 bp, Homo sapien
cataaaaaagaatcacacaagagta

SEQ ID NO: 409688 - DNA, 25 bp, Homo sapien
gcataaaaaagaatcacacaagagt

SEQ ID NO: 409689 - DNA, 25 bp, Homo sapien
cacagagattagtgaacattccaag

SEQ ID NO: 409690 - DNA, 25 bp, Homo sapien
caattgtaaactttcagcgcatgag

SEQ ID NO: 409691 - DNA, 25 bp, Homo sapien
tacagcacagagtttgctagctccc

SEQ ID NO: 409692 - DNA, 25 bp, Homo sapien
gctagctcccttgttagaaattcaa

SEQ ID NO: 409693 - DNA, 25 bp, Homo sapien
attagtagcgagtttgatagcccaa

SEQ ID NO: 409694 - DNA, 25 bp, Homo sapien
tagagattacttcattggccttaac

SEQ ID NO: 409695 - DNA, 25 bp, Homo sapien
ctgcataaagtttagagattacttc

SEQ ID NO: 409696 - DNA, 25 bp, Homo sapien
gtactgcataaagtttagagattac

SEQ ID NO: 409697 - DNA, 25 bp, Homo sapien
cattggccttaactccagagttttc

SEQ ID NO: 409698 - DNA, 25 bp, Homo sapien
tgatgtgatctgtttggctaattca

SEQ ID NO: 409699 - DNA, 25 bp, Homo sapien
tgtgatctgtttggctaattcaatt

SEQ ID NO: 409700 - DNA, 25 bp, Homo sapien
gatgtgatctgtttggctaattcaa

SEQ ID NO: 409701 - DNA, 25 bp, Homo sapien
atgtgatctgtttggctaattcaat

SEQ ID NO: 409702 - DNA, 25 bp, Homo sapien
tcatccatcagattgtctgtagagc

SEQ ID NO: 409703 - DNA, 25 bp, Homo sapien
catccatcagattgtctgtagagcc

SEQ ID NO: 409704 - DNA, 25 bp, Homo sapien
atttggtgattaaatacaagaagct

SEQ ID NO: 409705 - DNA, 25 bp, Homo sapien
taaacatgttttaccattcctacat

SEQ ID NO: 409706 - DNA, 25 bp, Homo sapien
ttaaacatgttttaccattcctaca

SEQ ID NO: 409707 - DNA, 25 bp, Homo sapien
gtgattaaatacaagaagctaaagc

SEQ ID NO: 409708 - DNA, 25 bp, Homo sapien
ttaaaaaccaccacctgagtatctc

SEQ ID NO: 409709 - DNA, 25 bp, Homo sapien
ccatcttgttcaactatcttttagt

SEQ ID NO: 409710 - DNA, 25 bp, Homo sapien
tcttgttcaactatcttttagtgtt

SEQ ID NO: 409711 - DNA, 25 bp, Homo sapien
ctgtaagaaagtgactgttgtaata

SEQ ID NO: 409712 - DNA, 25 bp, Homo sapien
tgttcaactatcttttagtgttttc

SEQ ID NO: 409713 - DNA, 25 bp, Homo sapien
ttacaaagtcttcggagatcccatt

SEQ ID NO: 409714 - DNA, 25 bp, Homo sapien
ttttacaaagtcttcggagatccca

SEQ ID NO: 409715 - DNA, 25 bp, Homo sapien
tacaaagtcttcggagatcccattt

SEQ ID NO: 409716 - DNA, 25 bp, Homo sapien
tttacaaagtcttcggagatcccat

SEQ ID NO: 409717 - DNA, 25 bp, Homo sapien
gattgcaatgaacactaaggccagg

SEQ ID NO: 409718 - DNA, 25 bp, Homo sapien
tgataggcaatgcaccaagcttgtg

SEQ ID NO: 409719 - DNA, 25 bp, Homo sapien
ggtaattggttcttcaagctctcag

SEQ ID NO: 409720 - DNA, 25 bp, Homo sapien
taaagaggaacctgtataccagccc

SEQ ID NO: 409721 - DNA, 25 bp, Homo sapien
acatttgcaccagtatcagcaatag

SEQ ID NO: 409722 - DNA, 25 bp, Homo sapien
taatgaagagccatgtctgccactt

SEQ ID NO: 409723 - DNA, 25 bp, Homo sapien
caatctgaaagtgcaaccccaatta

SEQ ID NO: 409724 - DNA, 25 bp, Homo sapien
ctgaaagtgcaaccccaattattac

SEQ ID NO: 409725 - DNA, 25 bp, Homo sapien
tctgaaagtgcaaccccaattatta

SEQ ID NO: 409726 - DNA, 25 bp, Homo sapien
tacttactggtttaagagctaactc

SEQ ID NO: 409727 - DNA, 25 bp, Homo sapien
tgttatcatgccatcaaaaggacaa

SEQ ID NO: 409728 - DNA, 25 bp, Homo sapien
aaaggacaagagtacactgctattt

SEQ ID NO: 409729 - DNA, 25 bp, Homo sapien
cttagtttctgttatcatgccatca

SEQ ID NO: 409730 - DNA, 25 bp, Homo sapien
catcaaaaggacaagagtacactgc

SEQ ID NO: 409731 - DNA, 25 bp, Homo sapien
cctagatatgtagcattaatgcatt

SEQ ID NO: 409732 - DNA, 25 bp, Homo sapien
ctgacctagatatgtagcattaatg

SEQ ID NO: 409733 - DNA, 25 bp, Homo sapien
caaaaaaactgacctagatatgtag

SEQ ID NO: 409734 - DNA, 25 bp, Homo sapien
aaactgacctagatatgtagcatta

SEQ ID NO: 409735 - DNA, 25 bp, Homo sapien
agaattttacaaactctgatgttat

SEQ ID NO: 409736 - DNA, 25 bp, Homo sapien
ttttacaaactctgatgttatcaac

SEQ ID NO: 409737 - DNA, 25 bp, Homo sapien
gaattttacaaactctgatgttatc

SEQ ID NO: 409738 - DNA, 25 bp, Homo sapien
aattttacaaactctgatgttatca

SEQ ID NO: 409739 - DNA, 25 bp, Homo sapien
tatctagtcatgttaaaggtatttt

SEQ ID NO: 409740 - DNA, 25 bp, Homo sapien
gaaagtatctagtcatgttaaaggt

SEQ ID NO: 409741 - DNA, 25 bp, Homo sapien
aaagattattttgggacaacagaga

SEQ ID NO: 409742 - DNA, 25 bp, Homo sapien
acaacagagaaagtatctagtcatg

SEQ ID NO: 409743 - DNA, 25 bp, Homo sapien
actcattatggaggtacgaagtaga

SEQ ID NO: 409744 - DNA, 25 bp, Homo sapien
tgtttactcattatggaggtacgaa

SEQ ID NO: 409745 - DNA, 25 bp, Homo sapien
ttactcattatggaggtacgaagta

SEQ ID NO: 409746 - DNA, 25 bp, Homo sapien
gtttactcattatggaggtacgaag

SEQ ID NO: 409747 - DNA, 25 bp, Homo sapien
ttcctattctgacatgacttaaagt

SEQ ID NO: 409748 - DNA, 25 bp, Homo sapien
tttcctattctgacatgacttaaag

SEQ ID NO: 409749 - DNA, 25 bp, Homo sapien
catttcctattctgacatgacttaa

SEQ ID NO: 409750 - DNA, 25 bp, Homo sapien
atttcctattctgacatgacttaaa

SEQ ID NO: 409751 - DNA, 25 bp, Homo sapien
cagaagttcttcagctaattccagg

SEQ ID NO: 409752 - DNA, 25 bp, Homo sapien
tcagaagttcttcagctaattccag

SEQ ID NO: 409753 - DNA, 25 bp, Homo sapien
ttcttgctcttgcatatgagaagcc

SEQ ID NO: 409754 - DNA, 25 bp, Homo sapien
aaagtttgtgccatctccaacttct

SEQ ID NO: 409755 - DNA, 25 bp, Homo sapien
gaacaaagtttgtgccatctccaac

SEQ ID NO: 409756 - DNA, 25 bp, Homo sapien
tgagaagccattacaatcatttttg

SEQ ID NO: 409757 - DNA, 25 bp, Homo sapien
aatagttgctgcatcgtttgtcaca

SEQ ID NO: 409758 - DNA, 25 bp, Homo sapien
tctccaagtggttgataaccatttt

SEQ ID NO: 409759 - DNA, 25 bp, Homo sapien
gttgctgcatcgtttgtcacaaaca

SEQ ID NO: 409760 - DNA, 25 bp, Homo sapien
cacaaacaacttctccaagtggttg

SEQ ID NO: 409761 - DNA, 25 bp, Homo sapien
caatattctactactgtatctttac

SEQ ID NO: 409762 - DNA, 25 bp, Homo sapien
cgtagtacacaatattctactactg

SEQ ID NO: 409763 - DNA, 25 bp, Homo sapien
tacacaatattctactactgtatct

SEQ ID NO: 409764 - DNA, 25 bp, Homo sapien
tattctactactgtatctttacaaa

SEQ ID NO: 409765 - DNA, 25 bp, Homo sapien
gtccatatgctgtacgagtggtttg

SEQ ID NO: 409766 - DNA, 25 bp, Homo sapien
tacgagtggtttgggcaagctcctt

SEQ ID NO: 409767 - DNA, 25 bp, Homo sapien
gctccttgcaagcttgtatgtttct

SEQ ID NO: 409768 - DNA, 25 bp, Homo sapien
tatgtttctatacacagcctcttct

SEQ ID NO: 409769 - DNA, 25 bp, Homo sapien
cccgctaattagacaggacagtgaa

SEQ ID NO: 409770 - DNA, 25 bp, Homo sapien
cctctaataaagagggagcatagct

SEQ ID NO: 409771 - DNA, 25 bp, Homo sapien
gcatagcttaggtatttggcacaag

SEQ ID NO: 409772 - DNA, 25 bp, Homo sapien
ggcacaagagggctggttgcaaatc

SEQ ID NO: 409773 - DNA, 25 bp, Homo sapien
cactaagcactgagctaagagttct

SEQ ID NO: 409774 - DNA, 25 bp, Homo sapien
tctttggtaagcttcagccctacaa

SEQ ID NO: 409775 - DNA, 25 bp, Homo sapien
taagtgttctgtctattcctgatcc

SEQ ID NO: 409776 - DNA, 25 bp, Homo sapien
tgtactagttagtccctgagcctgg

SEQ ID NO: 409777 - DNA, 25 bp, Homo sapien
cagctaacataagttgggaccggaa

SEQ ID NO: 409778 - DNA, 25 bp, Homo sapien
taatcgacgtcgcagttctcaagac

SEQ ID NO: 409779 - DNA, 25 bp, Homo sapien
gggaccggaactcatttggctacaa

SEQ ID NO: 409780 - DNA, 25 bp, Homo sapien
ggacataaactctacgacaaatggg

SEQ ID NO: 409781 - DNA, 25 bp, Homo sapien
tagccccatttacggatggaggcaa

SEQ ID NO: 409782 - DNA, 25 bp, Homo sapien
tttacggatggaggcaaaacgcacg

SEQ ID NO: 409783 - DNA, 25 bp, Homo sapien
ggccttagccccatttacggatgga

SEQ ID NO: 409784 - DNA, 25 bp, Homo sapien
gaggcaaaacgcacgcgcggcttca

SEQ ID NO: 409785 - DNA, 25 bp, Homo sapien
tcccggtcgcggaagaagagaagtg

SEQ ID NO: 409786 - DNA, 25 bp, Homo sapien
caaggtgtacaatgtcgatcgtgcc

SEQ ID NO: 409787 - DNA, 25 bp, Homo sapien
aatgtcgatcgtgccgccgatccct

SEQ ID NO: 409788 - DNA, 25 bp, Homo sapien
tcgcggaagaagagaagtgcccgca

SEQ ID NO: 409789 - DNA, 25 bp, Homo sapien
gccgccgcagccctatgctgacgct

SEQ ID NO: 409790 - DNA, 25 bp, Homo sapien
cagcacgctcagcccgttagtaggc

SEQ ID NO: 409791 - DNA, 25 bp, Homo sapien
cgcagccctatgctgacgctcccac

SEQ ID NO: 409792 - DNA, 25 bp, Homo sapien
tagtaggccctcctacttcgccgcg

SEQ ID NO: 409793 - DNA, 25 bp, Homo sapien
catctgggcaaagcccggagccttg

SEQ ID NO: 409794 - DNA, 25 bp, Homo sapien
tttcgctccctccttgagcatctgg

SEQ ID NO: 409795 - DNA, 25 bp, Homo sapien
ggagccttgggaacgtgaagcgcca

SEQ ID NO: 409796 - DNA, 25 bp, Homo sapien
gagccttgggaacgtgaagcgccat

SEQ ID NO: 409797 - DNA, 25 bp, Homo sapien
caggaagcagttcacgcgaccgctc

SEQ ID NO: 409798 - DNA, 25 bp, Homo sapien
cggaagaccgcggaggaagcgagga

SEQ ID NO: 409799 - DNA, 25 bp, Homo sapien
ggaagcgaggagcacgcacagcctt

SEQ ID NO: 409800 - DNA, 25 bp, Homo sapien
cagttcacgcgaccgctcggaagac

SEQ ID NO: 409801 - DNA, 25 bp, Homo sapien
caaacatcccaagagggagcatctg

SEQ ID NO: 409802 - DNA, 25 bp, Homo sapien
atacaagtttccgtggctgctttgg

SEQ ID NO: 409803 - DNA, 25 bp, Homo sapien
agaaaatacaagtttccgtggctgc

SEQ ID NO: 409804 - DNA, 25 bp, Homo sapien
catcccaagagggagcatctgattg

SEQ ID NO: 409805 - DNA, 25 bp, Homo sapien
agcttcgtaatcctggcttcctgct

SEQ ID NO: 409806 - DNA, 25 bp, Homo sapien
gctggcaacagcttcgtaatcctgg

SEQ ID NO: 409807 - DNA, 25 bp, Homo sapien
tggtggtgtgttcttgatatcggtc

SEQ ID NO: 409808 - DNA, 25 bp, Homo sapien
tggtgtgttcttgatatcggtccat

SEQ ID NO: 409809 - DNA, 25 bp, Homo sapien
tcagctaaccattactgttggcaat

SEQ ID NO: 409810 - DNA, 25 bp, Homo sapien
ggtcggcagactatttgttaaggtg

SEQ ID NO: 409811 - DNA, 25 bp, Homo sapien
caatctgtgggaggtcggcagacta

SEQ ID NO: 409812 - DNA, 25 bp, Homo sapien
tgattgaaactctgggacaccggtt

SEQ ID NO: 409813 - DNA, 25 bp, Homo sapien
gagtattccgtccactttctggaag

SEQ ID NO: 409814 - DNA, 25 bp, Homo sapien
tactggcgattggatgctcactctg

SEQ ID NO: 409815 - DNA, 25 bp, Homo sapien
ggtcagcaagttggctactggcgat

SEQ ID NO: 409816 - DNA, 25 bp, Homo sapien
attactgtgcccgtggaaatcccca

SEQ ID NO: 409817 - DNA, 25 bp, Homo sapien
taacattcaacagatctgattctgc

SEQ ID NO: 409818 - DNA, 25 bp, Homo sapien
acagatctgattctgccctgccttc

SEQ ID NO: 409819 - DNA, 25 bp, Homo sapien
attccactgagcctctcgagctctg

SEQ ID NO: 409820 - DNA, 25 bp, Homo sapien
tccgccttcccatgccatgctgatg

SEQ ID NO: 409821 - DNA, 25 bp, Homo sapien
cctttccaccagtgcggactgcagg

SEQ ID NO: 409822 - DNA, 25 bp, Homo sapien
ctaacgccctttccaccagtgcgga

SEQ ID NO: 409823 - DNA, 25 bp, Homo sapien
tccaccagtgcggactgcaggtatg

SEQ ID NO: 409824 - DNA, 25 bp, Homo sapien
cagtgcggactgcaggtatggacat

SEQ ID NO: 409825 - DNA, 25 bp, Homo sapien
tgtgatcagggactgaatggatttt

SEQ ID NO: 409826 - DNA, 25 bp, Homo sapien
ttttgaatgtcctcaggtttcacag

SEQ ID NO: 409827 - DNA, 25 bp, Homo sapien
tattcgggtaccaaatatccgatga

SEQ ID NO: 409828 - DNA, 25 bp, Homo sapien
tcaggtttcacagtgtgatcaggga

SEQ ID NO: 409829 - DNA, 25 bp, Homo sapien
tggtgaggagctgttgacagtatca

SEQ ID NO: 409830 - DNA, 25 bp, Homo sapien
gctgttgacagtatcatagaaggca

SEQ ID NO: 409831 - DNA, 25 bp, Homo sapien
tagaaggcaatatttccgttgtgtt

SEQ ID NO: 409832 - DNA, 25 bp, Homo sapien
tatctctgtatggttctttgagagc

SEQ ID NO: 409833 - DNA, 25 bp, Homo sapien
gctggttgtgattaagtagttgtaa

SEQ ID NO: 409834 - DNA, 25 bp, Homo sapien
atctgtagctggttgtgattaagta

SEQ ID NO: 409835 - DNA, 25 bp, Homo sapien
tgtaaacaccattgtactcggacca

SEQ ID NO: 409836 - DNA, 25 bp, Homo sapien
tagtcaagtgaagcactgggagaag

SEQ ID NO: 409837 - DNA, 25 bp, Homo sapien
ccatctctatagctatacttgtaat

SEQ ID NO: 409838 - DNA, 25 bp, Homo sapien
tctatctttatccatatctgtgtta

SEQ ID NO: 409839 - DNA, 25 bp, Homo sapien
catatctgtgttaatatccacatcc

SEQ ID NO: 409840 - DNA, 25 bp, Homo sapien
tctctatagctatacttgtaatctt

SEQ ID NO: 409841 - DNA, 25 bp, Homo sapien
caaaacctggtctggctttgatgaa

SEQ ID NO: 409842 - DNA, 25 bp, Homo sapien
tggttctcaaaacctggtctggctt

SEQ ID NO: 409843 - DNA, 25 bp, Homo sapien
cagttatgtctacgatggggagcac

SEQ ID NO: 409844 - DNA, 25 bp, Homo sapien
gattgattgtaaaacccagtgaaga

SEQ ID NO: 409845 - DNA, 25 bp, Homo sapien
tagggatgccagctaaaccagatgg

SEQ ID NO: 409846 - DNA, 25 bp, Homo sapien
tcaaacagtgaaatacaggcctggc

SEQ ID NO: 409847 - DNA, 25 bp, Homo sapien
gaaacttctggctggtagggatgcc

SEQ ID NO: 409848 - DNA, 25 bp, Homo sapien
ttgtaagcagcttcgcaagccctga

SEQ ID NO: 409849 - DNA, 25 bp, Homo sapien
tgactgacccagctaagaatcgtgg

SEQ ID NO: 409850 - DNA, 25 bp, Homo sapien
gatatgatcatgctgtacaacaggg

SEQ ID NO: 409851 - DNA, 25 bp, Homo sapien
tcgtgggctgagcagagttaaacca

SEQ ID NO: 409852 - DNA, 25 bp, Homo sapien
ttggacattacttgggtgagtgccc

SEQ ID NO: 409853 - DNA, 25 bp, Homo sapien
tagaaacaatccctgcaagcgtcgt

SEQ ID NO: 409854 - DNA, 25 bp, Homo sapien
agaggaagagcggaacagttctcaa

SEQ ID NO: 409855 - DNA, 25 bp, Homo sapien
gctgcaccgctgcatgtggtttctg

SEQ ID NO: 409856 - DNA, 25 bp, Homo sapien
aacttatctggtagtgagctataga

SEQ ID NO: 409857 - DNA, 25 bp, Homo sapien
tatctgtcgctgaacgtgtctgggc

SEQ ID NO: 409858 - DNA, 25 bp, Homo sapien
cagtgtgtatgaagaagaaaccaag

SEQ ID NO: 409859 - DNA, 25 bp, Homo sapien
tggattaaggtgtttaggaccagca

SEQ ID NO: 409860 - DNA, 25 bp, Homo sapien
taggaccagcattatgagcagaagg

SEQ ID NO: 409861 - DNA, 25 bp, Homo sapien
atatgcatgtggtgaacatttgtgt

SEQ ID NO: 409862 - DNA, 25 bp, Homo sapien
gatggattagtatccataagttgag

SEQ ID NO: 409863 - DNA, 25 bp, Homo sapien
ggctatttgcagctgatggattagt

SEQ ID NO: 409864 - DNA, 25 bp, Homo sapien
tccatatcgtacaaagcttcatagt

SEQ ID NO: 409865 - DNA, 25 bp, Homo sapien
gaaatcctatcaccgtgttcccgga

SEQ ID NO: 409866 - DNA, 25 bp, Homo sapien
tagggagtcaaaatggtcatcatct

SEQ ID NO: 409867 - DNA, 25 bp, Homo sapien
tcttcgcacccctggtcaaggtcat

SEQ ID NO: 409868 - DNA, 25 bp, Homo sapien
gtctgttgatgaccccatgttcgtg

SEQ ID NO: 409869 - DNA, 25 bp, Homo sapien
tgctgcatctaccaagctgaacagg

SEQ ID NO: 409870 - DNA, 25 bp, Homo sapien
ggaaacagtggtgcgacagccgcgg

SEQ ID NO: 409871 - DNA, 25 bp, Homo sapien
gcgacagccgcgggactctccagaa

SEQ ID NO: 409872 - DNA, 25 bp, Homo sapien
atctactggtgctgcatctaccaag

SEQ ID NO: 409873 - DNA, 25 bp, Homo sapien
taacagtgacatttactcttccact

SEQ ID NO: 409874 - DNA, 25 bp, Homo sapien
tcaccaccaatatgtcggtcatgga

SEQ ID NO: 409875 - DNA, 25 bp, Homo sapien
tggcatgtcctcaccaccaatatgt

SEQ ID NO: 409876 - DNA, 25 bp, Homo sapien
attggagggccccttcaagggcatc

SEQ ID NO: 409877 - DNA, 25 bp, Homo sapien
gattccgtaagacccagagggtgag

SEQ ID NO: 409878 - DNA, 25 bp, Homo sapien
cagtgagttccttttcgtccttttg

SEQ ID NO: 409879 - DNA, 25 bp, Homo sapien
ttgttcccattaagctttacttgcc

SEQ ID NO: 409880 - DNA, 25 bp, Homo sapien
ttgtagattccgtaagacccagagg

SEQ ID NO: 409881 - DNA, 25 bp, Homo sapien
aagaggggtactgctgccaaaaagc

SEQ ID NO: 409882 - DNA, 25 bp, Homo sapien
cccattgtctgtggactattttcaa

SEQ ID NO: 409883 - DNA, 25 bp, Homo sapien
tggaaaagaggggtactgctgccaa

SEQ ID NO: 409884 - DNA, 25 bp, Homo sapien
gcaagagctcatatgattcacagtc

SEQ ID NO: 409885 - DNA, 25 bp, Homo sapien
catccttgggaactccaattacatg

SEQ ID NO: 409886 - DNA, 25 bp, Homo sapien
cctttcttttgtggtacagtcacaa

SEQ ID NO: 409887 - DNA, 25 bp, Homo sapien
tcttggctatatatgtttatggttt

SEQ ID NO: 409888 - DNA, 25 bp, Homo sapien
cagttaagtgatgctctgttcattt

SEQ ID NO: 409889 - DNA, 25 bp, Homo sapien
atacagtgtctaatgtgctgttaat

SEQ ID NO: 409890 - DNA, 25 bp, Homo sapien
tatccatacagtgtctaatgtgctg

SEQ ID NO: 409891 - DNA, 25 bp, Homo sapien
ccatacagtgtctaatgtgctgtta

SEQ ID NO: 409892 - DNA, 25 bp, Homo sapien
tccatacagtgtctaatgtgctgtt

SEQ ID NO: 409893 - DNA, 25 bp, Homo sapien
tatcacatggaggtctgcaacagca

SEQ ID NO: 409894 - DNA, 25 bp, Homo sapien
gatccaaaccatatcggagggtaaa

SEQ ID NO: 409895 - DNA, 25 bp, Homo sapien
gaagaagtagtaaatgggccacacc

SEQ ID NO: 409896 - DNA, 25 bp, Homo sapien
tgttcagcatcagtggccaagagca

SEQ ID NO: 409897 - DNA, 25 bp, Homo sapien
gatcattggtgtaggttgagcgtct

SEQ ID NO: 409898 - DNA, 25 bp, Homo sapien
tgtgtgacctcattatatccaaggg

SEQ ID NO: 409899 - DNA, 25 bp, Homo sapien
gggaggtagcaatactgaagtcaat

SEQ ID NO: 409900 - DNA, 25 bp, Homo sapien
tgtcccatgtttcgaaaaagccatt

SEQ ID NO: 409901 - DNA, 25 bp, Homo sapien
ttaggtctaggagcttgacacaggt

SEQ ID NO: 409902 - DNA, 25 bp, Homo sapien
gtagcacaatgaattctaatggagg

SEQ ID NO: 409903 - DNA, 25 bp, Homo sapien
caccttgcagcattagcttatgaga

SEQ ID NO: 409904 - DNA, 25 bp, Homo sapien
ttagcttatgagagaagaatttctc

SEQ ID NO: 409905 - DNA, 25 bp, Homo sapien
ggcacttgatgctcagtactggctg

SEQ ID NO: 409906 - DNA, 25 bp, Homo sapien
gagggtgtcccaagagagctcattt

SEQ ID NO: 409907 - DNA, 25 bp, Homo sapien
cataattctatgtgttggctgggct

SEQ ID NO: 409908 - DNA, 25 bp, Homo sapien
gatgcagtcacagggccagattcaa

SEQ ID NO: 409909 - DNA, 25 bp, Homo sapien
tgctcacagcaggaaaactagccat

SEQ ID NO: 409910 - DNA, 25 bp, Homo sapien
cagaagacagtcaaacgcctaggca

SEQ ID NO: 409911 - DNA, 25 bp, Homo sapien
aaatcaaggacatagcagtaagctg

SEQ ID NO: 409912 - DNA, 25 bp, Homo sapien
gctgtgatacccaagcttcacggat

SEQ ID NO: 409913 - DNA, 25 bp, Homo sapien
tgaacctggctggaagcttcctggc

SEQ ID NO: 409914 - DNA, 25 bp, Homo sapien
ttcctggcagcgacagcgaaaaggg

SEQ ID NO: 409915 - DNA, 25 bp, Homo sapien
cagccagtgctttggttctccagag

SEQ ID NO: 409916 - DNA, 25 bp, Homo sapien
taagcaccagaagatgacagcggaa

SEQ ID NO: 409917 - DNA, 25 bp, Homo sapien
gcacttgagcgcttcacatagtcaa

SEQ ID NO: 409918 - DNA, 25 bp, Homo sapien
gaaatcccagatgtgttagtggcag

SEQ ID NO: 409919 - DNA, 25 bp, Homo sapien
tctgcctttggacatcttgaagaag

SEQ ID NO: 409920 - DNA, 25 bp, Homo sapien
ttcctggtctttgggtagtggtgca

SEQ ID NO: 409921 - DNA, 25 bp, Homo sapien
tgtcttgattatatgacaccactgc

SEQ ID NO: 409922 - DNA, 25 bp, Homo sapien
tcttgattatatgacaccactgcct

SEQ ID NO: 409923 - DNA, 25 bp, Homo sapien
cattgtcttgattatatgacaccac

SEQ ID NO: 409924 - DNA, 25 bp, Homo sapien
ttgattatatgacaccactgccttt

SEQ ID NO: 409925 - DNA, 25 bp, Homo sapien
ggagacaagcccagcggttggttta

SEQ ID NO: 409926 - DNA, 25 bp, Homo sapien
tcatgtgccatgtgccttctacacc

SEQ ID NO: 409927 - DNA, 25 bp, Homo sapien
gacgacatattcagtaaatcccttg

SEQ ID NO: 409928 - DNA, 25 bp, Homo sapien
tcagaataacagttgcaaagcccgt

SEQ ID NO: 409929 - DNA, 25 bp, Homo sapien
cttttttgtccctcaagtcgctgga

SEQ ID NO: 409930 - DNA, 25 bp, Homo sapien
tcatgactgtaggtcatatatattg

SEQ ID NO: 409931 - DNA, 25 bp, Homo sapien
gtctttgacttccagagggatgagc

SEQ ID NO: 409932 - DNA, 25 bp, Homo sapien
tatattggccatgtttatagttgcc

SEQ ID NO: 409933 - DNA, 25 bp, Homo sapien
gagtgaaatggaaactgcttagaag

SEQ ID NO: 409934 - DNA, 25 bp, Homo sapien
gaagcttagctgtgtaggagttaaa

SEQ ID NO: 409935 - DNA, 25 bp, Homo sapien
taattctggtggagttctagggctg

SEQ ID NO: 409936 - DNA, 25 bp, Homo sapien
gaagcaagccatcttgtatacttaa

SEQ ID NO: 409937 - DNA, 25 bp, Homo sapien
aagcagtaggtaccgttcttgccct

SEQ ID NO: 409938 - DNA, 25 bp, Homo sapien
taatggttcctactgtgaacaagca

SEQ ID NO: 409939 - DNA, 25 bp, Homo sapien
ctttggtagaggagtccatggctga

SEQ ID NO: 409940 - DNA, 25 bp, Homo sapien
tattgccatgagtgaagaaagattc

SEQ ID NO: 409941 - DNA, 25 bp, Homo sapien
tagagttctattcttagaagcaggg

SEQ ID NO: 409942 - DNA, 25 bp, Homo sapien
gcatatcagacagcaatttaacagc

SEQ ID NO: 409943 - DNA, 25 bp, Homo sapien
tcaggctttaagctacattgggaag

SEQ ID NO: 409944 - DNA, 25 bp, Homo sapien
tcttcggctcctaaaatcaggcttt

SEQ ID NO: 409945 - DNA, 25 bp, Homo sapien
gcatctgttccagagggcagacctc

SEQ ID NO: 409946 - DNA, 25 bp, Homo sapien
actggcttgggctgtcagtgaacat

SEQ ID NO: 409947 - DNA, 25 bp, Homo sapien
gttccagagggcagacctcctctca

SEQ ID NO: 409948 - DNA, 25 bp, Homo sapien
ctttgaggccacttcccaacaccag

SEQ ID NO: 409949 - DNA, 25 bp, Homo sapien
tacaggcgttttcaggcctgagcca

SEQ ID NO: 409950 - DNA, 25 bp, Homo sapien
tgtatacaggcgttttcaggcctga

SEQ ID NO: 409951 - DNA, 25 bp, Homo sapien
tccctgtatacaggcgttttcaggc

SEQ ID NO: 409952 - DNA, 25 bp, Homo sapien
aacatccctgtatacaggcgttttc

SEQ ID NO: 409953 - DNA, 25 bp, Homo sapien
gagagctagtccctgtggtctgatg

SEQ ID NO: 409954 - DNA, 25 bp, Homo sapien
ccttatacttccctgctggagtgac

SEQ ID NO: 409955 - DNA, 25 bp, Homo sapien
acacgccctgagagctagtccctgt

SEQ ID NO: 409956 - DNA, 25 bp, Homo sapien
ttatacttccctgctggagtgactg

SEQ ID NO: 409957 - DNA, 25 bp, Homo sapien
ggcgcaaggtaaaggagaagcaggc

SEQ ID NO: 409958 - DNA, 25 bp, Homo sapien
caatcatggcgcaaggtaaaggaga

SEQ ID NO: 409959 - DNA, 25 bp, Homo sapien
acaagggtggcaggatagagtgcaa

SEQ ID NO: 409960 - DNA, 25 bp, Homo sapien
cttcacaagggtggcaggatagagt

SEQ ID NO: 409961 - DNA, 25 bp, Homo sapien
tgacaactaaggagctactgcgatg

SEQ ID NO: 409962 - DNA, 25 bp, Homo sapien
cctgcagcttcactcggtgggcagc

SEQ ID NO: 409963 - DNA, 25 bp, Homo sapien
ggcagcctccacaggtactttaatt

SEQ ID NO: 409964 - DNA, 25 bp, Homo sapien
ttaattcctcgctcttctggccagg

SEQ ID NO: 409965 - DNA, 25 bp, Homo sapien
tgatgaggaccctcttccgggtcac

SEQ ID NO: 409966 - DNA, 25 bp, Homo sapien
gggtcacagcctgccgtcttcttgt

SEQ ID NO: 409967 - DNA, 25 bp, Homo sapien
catagttccaagattaggatgtgag

SEQ ID NO: 409968 - DNA, 25 bp, Homo sapien
gagcatggtcggatgctgatgagga

SEQ ID NO: 409969 - DNA, 25 bp, Homo sapien
tccttactcccctctctcgggacac

SEQ ID NO: 409970 - DNA, 25 bp, Homo sapien
ttagagttgggagaaggcttgatct

SEQ ID NO: 409971 - DNA, 25 bp, Homo sapien
ctccttactcccctctctcgggaca

SEQ ID NO: 409972 - DNA, 25 bp, Homo sapien
gggagaaggcttgatctgctttttc

SEQ ID NO: 409973 - DNA, 25 bp, Homo sapien
gttcgattgtacaaaggcctgtggc

SEQ ID NO: 409974 - DNA, 25 bp, Homo sapien
tggtgcgtcaagagaagcctgttcg

SEQ ID NO: 409975 - DNA, 25 bp, Homo sapien
ggccacgaacatgcctgagcacact

SEQ ID NO: 409976 - DNA, 25 bp, Homo sapien
gaagacttaagttgaaagtctctgg

SEQ ID NO: 409977 - DNA, 25 bp, Homo sapien
cacagtacagcagcatcactgtccc

SEQ ID NO: 409978 - DNA, 25 bp, Homo sapien
gcccacagtacagcagcatcactgt

SEQ ID NO: 409979 - DNA, 25 bp, Homo sapien
tggcccacagtacagcagcatcact

SEQ ID NO: 409980 - DNA, 25 bp, Homo sapien
ctggcccacagtacagcagcatcac

SEQ ID NO: 409981 - DNA, 25 bp, Homo sapien
ttgttgaagtagtcagaatcaatgc

SEQ ID NO: 409982 - DNA, 25 bp, Homo sapien
tctatcgccatgacgttttgaacgg

SEQ ID NO: 409983 - DNA, 25 bp, Homo sapien
ggatggcaggcctcttgttgaagta

SEQ ID NO: 409984 - DNA, 25 bp, Homo sapien
gggtaatgctcatattatcagtggg

SEQ ID NO: 409985 - DNA, 25 bp, Homo sapien
tcactgcgttgatgtatctctttca

SEQ ID NO: 409986 - DNA, 25 bp, Homo sapien
catccctgatgctctgatcactgcg

SEQ ID NO: 409987 - DNA, 25 bp, Homo sapien
gatgctctgatcactgcgttgatgt

SEQ ID NO: 409988 - DNA, 25 bp, Homo sapien
ccaagcatccctgatgctctgatca

SEQ ID NO: 409989 - DNA, 25 bp, Homo sapien
taaatcaacaggcacccaatgtcta

SEQ ID NO: 409990 - DNA, 25 bp, Homo sapien
gaactttccctcacatctatttggt

SEQ ID NO: 409991 - DNA, 25 bp, Homo sapien
tccagcaacagccaaaaatgattag

SEQ ID NO: 409992 - DNA, 25 bp, Homo sapien
gccaaaatccattgtctcggcaggg

SEQ ID NO: 409993 - DNA, 25 bp, Homo sapien
tattaagtggcatatttcctatttc

SEQ ID NO: 409994 - DNA, 25 bp, Homo sapien
tttgaaacttgggatttcacctcca

SEQ ID NO: 409995 - DNA, 25 bp, Homo sapien
cttaggacttactgggtcaatggtc

SEQ ID NO: 409996 - DNA, 25 bp, Homo sapien
tgtatgagaacaatagtgtctcatt

SEQ ID NO: 409997 - DNA, 25 bp, Homo sapien
catttacttctagcacttacctgtt

SEQ ID NO: 409998 - DNA, 25 bp, Homo sapien
tatcgttatattaaggcgttcatct

SEQ ID NO: 409999 - DNA, 25 bp, Homo sapien
tgttatagaaacaatgacattacga

SEQ ID NO: 410000 - DNA, 25 bp, Homo sapien
gtgctaacttcattatcatatatgg

SEQ ID NO: 410001 - DNA, 25 bp, Homo sapien
tgtgctaatgatgtaacaaggtttg

SEQ ID NO: 410002 - DNA, 25 bp, Homo sapien
gtctcactcatgagcatgcaaaccc

SEQ ID NO: 410003 - DNA, 25 bp, Homo sapien
aggcacgtctcactcatgagcatgc

SEQ ID NO: 410004 - DNA, 25 bp, Homo sapien
tcacacttacgaaccacaaaatggt

SEQ ID NO: 410005 - DNA, 25 bp, Homo sapien
gattttggttattgctttgcttgta

SEQ ID NO: 410006 - DNA, 25 bp, Homo sapien
tattgctttgcttgtaattatcttg

SEQ ID NO: 410007 - DNA, 25 bp, Homo sapien
ttaaggctttttcagctcaaataca

SEQ ID NO: 410008 - DNA, 25 bp, Homo sapien
tctttgttgatgattttggttattg

SEQ ID NO: 410009 - DNA, 25 bp, Homo sapien
aggaataggtatgtttgcctttctc

SEQ ID NO: 410010 - DNA, 25 bp, Homo sapien
gaggaataggtatgtttgcctttct

SEQ ID NO: 410011 - DNA, 25 bp, Homo sapien
agaggaataggtatgtttgcctttc

SEQ ID NO: 410012 - DNA, 25 bp, Homo sapien
ggaataggtatgtttgcctttctca

SEQ ID NO: 410013 - DNA, 25 bp, Homo sapien
ggtagtcccatctaaagtgtctagg

SEQ ID NO: 410014 - DNA, 25 bp, Homo sapien
tctaggaagctcctgtggacatggt

SEQ ID NO: 410015 - DNA, 25 bp, Homo sapien
tccagcatggtctgccactagaacc

SEQ ID NO: 410016 - DNA, 25 bp, Homo sapien
tctgaccttctgagagtgagatggt

SEQ ID NO: 410017 - DNA, 25 bp, Homo sapien
gatgcctggcatgtcctgctctaca

SEQ ID NO: 410018 - DNA, 25 bp, Homo sapien
cctctgtcaaaggtagcccaatttg

SEQ ID NO: 410019 - DNA, 25 bp, Homo sapien
tgctgcccagtgctcttcgatgcct

SEQ ID NO: 410020 - DNA, 25 bp, Homo sapien
ttgatattctgtcaagctgctgccc

SEQ ID NO: 410021 - DNA, 25 bp, Homo sapien
caggactgactttgccacagatggc

SEQ ID NO: 410022 - DNA, 25 bp, Homo sapien
ggtcattcccttctttctcgatgag

SEQ ID NO: 410023 - DNA, 25 bp, Homo sapien
tctgggataccaggctgtactgcct

SEQ ID NO: 410024 - DNA, 25 bp, Homo sapien
tacaacctcatgactttaaggacca

SEQ ID NO: 410025 - DNA, 25 bp, Homo sapien
cggtggtaccgtctagtgtgctgca

SEQ ID NO: 410026 - DNA, 25 bp, Homo sapien
tctgcacagggtgtcaagagatgca

SEQ ID NO: 410027 - DNA, 25 bp, Homo sapien
ctggtgataatatgtgtgctgggcc

SEQ ID NO: 410028 - DNA, 25 bp, Homo sapien
ggcctccaaacgctggctcatttgt

SEQ ID NO: 410029 - DNA, 25 bp, Homo sapien
tctttaatgcactagtcaggagcag

SEQ ID NO: 410030 - DNA, 25 bp, Homo sapien
taaagcccaggtattgtatcaacat

SEQ ID NO: 410031 - DNA, 25 bp, Homo sapien
gaacataagcattgggatgcacgag

SEQ ID NO: 410032 - DNA, 25 bp, Homo sapien
cttctctaggagaacaaagtgctac

SEQ ID NO: 410033 - DNA, 25 bp, Homo sapien
tacttgcttcgccaggcctgctatg

SEQ ID NO: 410034 - DNA, 25 bp, Homo sapien
atgttgcttttcttcgtggttcgag

SEQ ID NO: 410035 - DNA, 25 bp, Homo sapien
ctgggagagatgctggcaagcttac

SEQ ID NO: 410036 - DNA, 25 bp, Homo sapien
catcctgtgggatagctctcctggg

SEQ ID NO: 410037 - DNA, 25 bp, Homo sapien
tgagctttagcttgttcttcagttg

SEQ ID NO: 410038 - DNA, 25 bp, Homo sapien
tacttcaatacaggatgtaggtctg

SEQ ID NO: 410039 - DNA, 25 bp, Homo sapien
tccatttaacctgcctcaccccagg

SEQ ID NO: 410040 - DNA, 25 bp, Homo sapien
caggatgtaggtctgtagtttccat

SEQ ID NO: 410041 - DNA, 25 bp, Homo sapien
ctggtcaattgcaactatcttccaa

SEQ ID NO: 410042 - DNA, 25 bp, Homo sapien
tggtcaattgcaactatcttccaaa

SEQ ID NO: 410043 - DNA, 25 bp, Homo sapien
aaaggctggcttggaattctcttgg

SEQ ID NO: 410044 - DNA, 25 bp, Homo sapien
ggctggcttggaattctcttggggt

SEQ ID NO: 410045 - DNA, 25 bp, Homo sapien
agcaaaggctggcttggaattctct

SEQ ID NO: 410046 - DNA, 25 bp, Homo sapien
ctatgtcagcaaaggctggcttgga

SEQ ID NO: 410047 - DNA, 25 bp, Homo sapien
cgaatgctgctttcggctcgctgcc

SEQ ID NO: 410048 - DNA, 25 bp, Homo sapien
gtccacgaatgctgctttcggctcg

SEQ ID NO: 410049 - DNA, 25 bp, Homo sapien
agccgtccacgaatgctgctttcgg

SEQ ID NO: 410050 - DNA, 25 bp, Homo sapien
ttggtggcagccgtccacgaatgct

SEQ ID NO: 410051 - DNA, 25 bp, Homo sapien
ttagtgatggtatcttaagtcacaa

SEQ ID NO: 410052 - DNA, 25 bp, Homo sapien
cttttgccatactcaactctcaggt

SEQ ID NO: 410053 - DNA, 25 bp, Homo sapien
gtcacaactgggtctttgaatactg

SEQ ID NO: 410054 - DNA, 25 bp, Homo sapien
tgatttggtggatcttttggaaaaa

SEQ ID NO: 410055 - DNA, 25 bp, Homo sapien
gaagtgaagttaatttctgcaccat

SEQ ID NO: 410056 - DNA, 25 bp, Homo sapien
taaatagcatagatacttctggaag

SEQ ID NO: 410057 - DNA, 25 bp, Homo sapien
gtttttatgtcgtgcaaaaggctga

SEQ ID NO: 410058 - DNA, 25 bp, Homo sapien
ggctgtttgtactctatgcactggc

SEQ ID NO: 410059 - DNA, 25 bp, Homo sapien
gctttttgttcacttggtgtagcca

SEQ ID NO: 410060 - DNA, 25 bp, Homo sapien
cttggtgtagccatcaagtcttcct

SEQ ID NO: 410061 - DNA, 25 bp, Homo sapien
gtagccatcaagtcttccttcagtt

SEQ ID NO: 410062 - DNA, 25 bp, Homo sapien
tgttcacttggtgtagccatcaagt

SEQ ID NO: 410063 - DNA, 25 bp, Homo sapien
gcaggtccatgcacaacaaccgtat

SEQ ID NO: 410064 - DNA, 25 bp, Homo sapien
ggtccatgcacaacaaccgtatcat

SEQ ID NO: 410065 - DNA, 25 bp, Homo sapien
caggtccatgcacaacaaccgtatc

SEQ ID NO: 410066 - DNA, 25 bp, Homo sapien
ggcaggtccatgcacaacaaccgta

SEQ ID NO: 410067 - DNA, 25 bp, Homo sapien
tggactatgatttcaacctcgcctg

SEQ ID NO: 410068 - DNA, 25 bp, Homo sapien
gaggatctgaaagccatggagcaat

SEQ ID NO: 410069 - DNA, 25 bp, Homo sapien
cagatgaggttgaaatcaaagtcca

SEQ ID NO: 410070 - DNA, 25 bp, Homo sapien
gccatggagcaatatctcatcaagg

SEQ ID NO: 410071 - DNA, 25 bp, Homo sapien
gagcaatatctcatcaaggtgcctt

SEQ ID NO: 410072 - DNA, 25 bp, Homo sapien
gagagcaggccgcaggcagggcagc

SEQ ID NO: 410073 - DNA, 25 bp, Homo sapien
agagcaggccgcaggcagggcagcc

SEQ ID NO: 410074 - DNA, 25 bp, Homo sapien
gcagcagcctctaagttgctcaaaa

SEQ ID NO: 410075 - DNA, 25 bp, Homo sapien
cagcagcctctaagttgctcaaaaa

SEQ ID NO: 410076 - DNA, 25 bp, Homo sapien
atctggtgaaagggaccagcatgac

SEQ ID NO: 410077 - DNA, 25 bp, Homo sapien
ggcagcagcctctaagttgctcaaa

SEQ ID NO: 410078 - DNA, 25 bp, Homo sapien
ctttaatttcttcacaatacttcat

SEQ ID NO: 410079 - DNA, 25 bp, Homo sapien
gactcggttgctgttcgatttgtag

SEQ ID NO: 410080 - DNA, 25 bp, Homo sapien
aaaggactaagacagctggtttagc

SEQ ID NO: 410081 - DNA, 25 bp, Homo sapien
ttagctacatgtgggcttttattct

SEQ ID NO: 410082 - DNA, 25 bp, Homo sapien
tcttttatgtaggtattggagtatg

SEQ ID NO: 410083 - DNA, 25 bp, Homo sapien
caacattttagttcgggtagctgca

SEQ ID NO: 410084 - DNA, 25 bp, Homo sapien
ttcgggtagctgcaacaataagatg

SEQ ID NO: 410085 - DNA, 25 bp, Homo sapien
aacattttagttcgggtagctgcaa

SEQ ID NO: 410086 - DNA, 25 bp, Homo sapien
ttagttcgggtagctgcaacaataa

SEQ ID NO: 410087 - DNA, 25 bp, Homo sapien
gataatgtggaaggactctcatgct

SEQ ID NO: 410088 - DNA, 25 bp, Homo sapien
gttgggagtacatccttccctcctc

SEQ ID NO: 410089 - DNA, 25 bp, Homo sapien
aagccaccactctccgataggtgga

SEQ ID NO: 410090 - DNA, 25 bp, Homo sapien
cttggagctccctgaatgtgattag

SEQ ID NO: 410091 - DNA, 25 bp, Homo sapien
tgggttccagatactctacactttc

SEQ ID NO: 410092 - DNA, 25 bp, Homo sapien
ttctggactgggttccagatactct

SEQ ID NO: 410093 - DNA, 25 bp, Homo sapien
tgaactcattagcttactctcttct

SEQ ID NO: 410094 - DNA, 25 bp, Homo sapien
tcattagcttactctcttcttcacc

SEQ ID NO: 410095 - DNA, 25 bp, Homo sapien
gttcggattgtgcttcaaaattacc

SEQ ID NO: 410096 - DNA, 25 bp, Homo sapien
ttctgaatccatggctgttcggatt

SEQ ID NO: 410097 - DNA, 25 bp, Homo sapien
tccatggctgttcggattgtgcttc

SEQ ID NO: 410098 - DNA, 25 bp, Homo sapien
gctgttcggattgtgcttcaaaatt

SEQ ID NO: 410099 - DNA, 25 bp, Homo sapien
ggtctctctgcttttggtctggtgc

SEQ ID NO: 410100 - DNA, 25 bp, Homo sapien
ctctgcttttggtctggtgcagtta

SEQ ID NO: 410101 - DNA, 25 bp, Homo sapien
tggtggtctctctgcttttggtctg

SEQ ID NO: 410102 - DNA, 25 bp, Homo sapien
ctctctgcttttggtctggtgcagt

SEQ ID NO: 410103 - DNA, 25 bp, Homo sapien
tattattatttagaaagcacacaca

SEQ ID NO: 410104 - DNA, 25 bp, Homo sapien
tttattattatttagaaagcacaca

SEQ ID NO: 410105 - DNA, 25 bp, Homo sapien
agcacacacaacaatttattgggga

SEQ ID NO: 410106 - DNA, 25 bp, Homo sapien
ttattatttagaaagcacacacaac

SEQ ID NO: 410107 - DNA, 25 bp, Homo sapien
ggtgtcacttcccaagtcatatcta

SEQ ID NO: 410108 - DNA, 25 bp, Homo sapien
tctccaaaaatctgtagggaatgca

SEQ ID NO: 410109 - DNA, 25 bp, Homo sapien
tatatggaaacacatcacacactcc

SEQ ID NO: 410110 - DNA, 25 bp, Homo sapien
tcatatctatgtgagctttttaaac

SEQ ID NO: 410111 - DNA, 25 bp, Homo sapien
gatacttgtgaaggaagatttcccc

SEQ ID NO: 410112 - DNA, 25 bp, Homo sapien
ctctgagttcgtctctgatgacaag

SEQ ID NO: 410113 - DNA, 25 bp, Homo sapien
cgtctctgatgacaagtaaggatac

SEQ ID NO: 410114 - DNA, 25 bp, Homo sapien
ccatgatagcgttgaaagagagaca

SEQ ID NO: 410115 - DNA, 25 bp, Homo sapien
gataggattatcaaggcatacggac

SEQ ID NO: 410116 - DNA, 25 bp, Homo sapien
gattatcaaggcatacggacacttc

SEQ ID NO: 410117 - DNA, 25 bp, Homo sapien
caaggcatacggacacttcagtaat

SEQ ID NO: 410118 - DNA, 25 bp, Homo sapien
caaacattgataggattatcaaggc

SEQ ID NO: 410119 - DNA, 25 bp, Homo sapien
aatctaattcttgatgactttcctt

SEQ ID NO: 410120 - DNA, 25 bp, Homo sapien
tctcccatgaaaccttactttgttc

SEQ ID NO: 410121 - DNA, 25 bp, Homo sapien
cttctctacaccaaggctttgtttt

SEQ ID NO: 410122 - DNA, 25 bp, Homo sapien
taaaatctaattcttgatgactttc

SEQ ID NO: 410123 - DNA, 25 bp, Homo sapien
tttcttttttaattgctggcttcat

SEQ ID NO: 410124 - DNA, 25 bp, Homo sapien
tgtttcttttttaattgctggcttc

SEQ ID NO: 410125 - DNA, 25 bp, Homo sapien
gtttcttttttaattgctggcttca

SEQ ID NO: 410126 - DNA, 25 bp, Homo sapien
agagtcactgtcagaggccagtgtg

SEQ ID NO: 410127 - DNA, 25 bp, Homo sapien
ctttgtgccttggccctctagcttc

SEQ ID NO: 410128 - DNA, 25 bp, Homo sapien
aatccaaaccacacagtgcctttct

SEQ ID NO: 410129 - DNA, 25 bp, Homo sapien
tcagctgggataaggagaagtgtct

SEQ ID NO: 410130 - DNA, 25 bp, Homo sapien
gcccaggatcagctagtccaaggcc

SEQ ID NO: 410131 - DNA, 25 bp, Homo sapien
tttagttaatgcaagcctctctcca

SEQ ID NO: 410132 - DNA, 25 bp, Homo sapien
tctagagggcccaggatcagctagt

SEQ ID NO: 410133 - DNA, 25 bp, Homo sapien
gatgtgacatcctactaggtcatga

SEQ ID NO: 410134 - DNA, 25 bp, Homo sapien
ccacacatgcctcttgggtgagaag

SEQ ID NO: 410135 - DNA, 25 bp, Homo sapien
gtgtctttcccgctctaacctcaag

SEQ ID NO: 410136 - DNA, 25 bp, Homo sapien
tgccctctgagatgaccatggtccc

SEQ ID NO: 410137 - DNA, 25 bp, Homo sapien
ggccatgcccatcgttcagagttcg

SEQ ID NO: 410138 - DNA, 25 bp, Homo sapien
taaataagttgatccgactccagag

SEQ ID NO: 410139 - DNA, 25 bp, Homo sapien
aagtcacctgtctattgggccatgc

SEQ ID NO: 410140 - DNA, 25 bp, Homo sapien
cagccctttagcagcagtgtggaaa

SEQ ID NO: 410141 - DNA, 25 bp, Homo sapien
aaaacacccttgtattggagatcct

SEQ ID NO: 410142 - DNA, 25 bp, Homo sapien
tgtggtcttagcatccattgacatg

SEQ ID NO: 410143 - DNA, 25 bp, Homo sapien
agttcgcttgaaatgcagtggttcc

SEQ ID NO: 410144 - DNA, 25 bp, Homo sapien
ggtagagcctgtaaacagcagtttg

SEQ ID NO: 410145 - DNA, 25 bp, Homo sapien
taattatcatagtaaatgtataaag

SEQ ID NO: 410146 - DNA, 25 bp, Homo sapien
agtaaatgtataaagtccataatat

SEQ ID NO: 410147 - DNA, 25 bp, Homo sapien
atagtaaatgtataaagtccataat

SEQ ID NO: 410148 - DNA, 25 bp, Homo sapien
aattatcatagtaaatgtataaagt

SEQ ID NO: 410149 - DNA, 25 bp, Homo sapien
tgtgacgcacactgagatagcatgt

SEQ ID NO: 410150 - DNA, 25 bp, Homo sapien
aagtttggtaacttgcctgcagtca

SEQ ID NO: 410151 - DNA, 25 bp, Homo sapien
tctcaatgcgcaaaaacttgtgacg

SEQ ID NO: 410152 - DNA, 25 bp, Homo sapien
taaaggaacatttagagtgacgctc

SEQ ID NO: 410153 - DNA, 25 bp, Homo sapien
cctgaatatgctttactggagaaat

SEQ ID NO: 410154 - DNA, 25 bp, Homo sapien
caactctcttattcactagtgagga

SEQ ID NO: 410155 - DNA, 25 bp, Homo sapien
tgtgaactctgacctgggacaaata

SEQ ID NO: 410156 - DNA, 25 bp, Homo sapien
gatggcatatctctacttcaaggaa

SEQ ID NO: 410157 - DNA, 25 bp, Homo sapien
tagctagtgctcttctgtgacacca

SEQ ID NO: 410158 - DNA, 25 bp, Homo sapien
tagagactcagaacctacagaagac

SEQ ID NO: 410159 - DNA, 25 bp, Homo sapien
caagaacaacccctctatctagggt

SEQ ID NO: 410160 - DNA, 25 bp, Homo sapien
gtgacaccagaggtttcaagtttag

SEQ ID NO: 410161 - DNA, 25 bp, Homo sapien
tcctaaaggaatagagaattgtggc

SEQ ID NO: 410162 - DNA, 25 bp, Homo sapien
gaagtctttatacccctaatatgcc

SEQ ID NO: 410163 - DNA, 25 bp, Homo sapien
tacagtgcaagtatctttccagtgt

SEQ ID NO: 410164 - DNA, 25 bp, Homo sapien
gcccctgcttcaacatacagtgcaa

SEQ ID NO: 410165 - DNA, 25 bp, Homo sapien
agttggttggatgggtttgcttaca

SEQ ID NO: 410166 - DNA, 25 bp, Homo sapien
tccgtagataaagtagttccagaag

SEQ ID NO: 410167 - DNA, 25 bp, Homo sapien
ccacattctaaatccgtagataaag

SEQ ID NO: 410168 - DNA, 25 bp, Homo sapien
aactgaggactgttttcgaatccct

SEQ ID NO: 410169 - DNA, 25 bp, Homo sapien
caaatacagaaaggaccagtccggc

SEQ ID NO: 410170 - DNA, 25 bp, Homo sapien
tgaattctccaatagctacaaatac

SEQ ID NO: 410171 - DNA, 25 bp, Homo sapien
tcatcatatgcagcttcccttcttc

SEQ ID NO: 410172 - DNA, 25 bp, Homo sapien
tttgttgtcttcctcggggcagcca

SEQ ID NO: 410173 - DNA, 25 bp, Homo sapien
cagtcttggttcatgtctacccgtc

SEQ ID NO: 410174 - DNA, 25 bp, Homo sapien
tgccttctatactggtaactgacat

SEQ ID NO: 410175 - DNA, 25 bp, Homo sapien
taaagaactctgagcccattgcctt

SEQ ID NO: 410176 - DNA, 25 bp, Homo sapien
cttggttcatgtctacccgtcttac

SEQ ID NO: 410177 - DNA, 25 bp, Homo sapien
tagtctgtggtgagcactctctgga

SEQ ID NO: 410178 - DNA, 25 bp, Homo sapien
atcactgtttcttaccagggcggtc

SEQ ID NO: 410179 - DNA, 25 bp, Homo sapien
cacatactcaatgctggtggactcc

SEQ ID NO: 410180 - DNA, 25 bp, Homo sapien
tgcctgctgctcatgaaagcccaca

SEQ ID NO: 410181 - DNA, 25 bp, Homo sapien
tcactattggacagcatttgcacgg

SEQ ID NO: 410182 - DNA, 25 bp, Homo sapien
cggaggcagctattacatggagacc

SEQ ID NO: 410183 - DNA, 25 bp, Homo sapien
tctataagccattgtggcccactgg

SEQ ID NO: 410184 - DNA, 25 bp, Homo sapien
ggtattcaaagtcccaatggttcaa

SEQ ID NO: 410185 - DNA, 25 bp, Homo sapien
tttgtgagagaactgtcattcactc

SEQ ID NO: 410186 - DNA, 25 bp, Homo sapien
gccctggagtaaaccactgacttcc

SEQ ID NO: 410187 - DNA, 25 bp, Homo sapien
ctctgctttatttgtgagagaactg

SEQ ID NO: 410188 - DNA, 25 bp, Homo sapien
ggagagccctggagtaaaccactga

SEQ ID NO: 410189 - DNA, 25 bp, Homo sapien
ccccggagatatctgcaagctgcag

SEQ ID NO: 410190 - DNA, 25 bp, Homo sapien
gaacccattgtgtcatattgggccc

SEQ ID NO: 410191 - DNA, 25 bp, Homo sapien
ttgggcccctgtgagttatgccaca

SEQ ID NO: 410192 - DNA, 25 bp, Homo sapien
tagatattggtattttgtggaaccc

SEQ ID NO: 410193 - DNA, 25 bp, Homo sapien
tgagttttctatcactaggcaactg

SEQ ID NO: 410194 - DNA, 25 bp, Homo sapien
tatgtcatgcttagacgagtttcac

SEQ ID NO: 410195 - DNA, 25 bp, Homo sapien
tgcccagccggtatagtgagttttc

SEQ ID NO: 410196 - DNA, 25 bp, Homo sapien
taggcaactgcaaggagtatgtcat

SEQ ID NO: 410197 - DNA, 25 bp, Homo sapien
ggtgcagtgcccagtaacttctctg

SEQ ID NO: 410198 - DNA, 25 bp, Homo sapien
gtgcagtgcccagtaacttctctga

SEQ ID NO: 410199 - DNA, 25 bp, Homo sapien
tgcagtgcccagtaacttctctgaa

SEQ ID NO: 410200 - DNA, 25 bp, Homo sapien
gcagtgcccagtaacttctctgaaa

SEQ ID NO: 410201 - DNA, 25 bp, Homo sapien
tgagatcttgggcactgacacttct

SEQ ID NO: 410202 - DNA, 25 bp, Homo sapien
ggcctccaaggcctagggttgctgt

SEQ ID NO: 410203 - DNA, 25 bp, Homo sapien
tatgcaatgtatgtgctcaagaagg

SEQ ID NO: 410204 - DNA, 25 bp, Homo sapien
tgggcactgacacttcttctggact

SEQ ID NO: 410205 - DNA, 25 bp, Homo sapien
gatgattagggtgaaaaaccaccat

SEQ ID NO: 410206 - DNA, 25 bp, Homo sapien
cttgaagaaggtcattgttgatcca

SEQ ID NO: 410207 - DNA, 25 bp, Homo sapien
tctctactgtcaagaaggcagccag

SEQ ID NO: 410208 - DNA, 25 bp, Homo sapien
tattctggtcgatagagctttgggc

SEQ ID NO: 410209 - DNA, 25 bp, Homo sapien
cagtagctgatggtattaaaacagt

SEQ ID NO: 410210 - DNA, 25 bp, Homo sapien
tggagcaaaatcttaaggattattt

SEQ ID NO: 410211 - DNA, 25 bp, Homo sapien
aaatgcatcttatagtgtgaagtaa

SEQ ID NO: 410212 - DNA, 25 bp, Homo sapien
atattctgcgtctttgtataactat

SEQ ID NO: 410213 - DNA, 25 bp, Homo sapien
attgagtacagtgacaagcttctgc

SEQ ID NO: 410214 - DNA, 25 bp, Homo sapien
tcaacgccacgtgctagagacagat

SEQ ID NO: 410215 - DNA, 25 bp, Homo sapien
gagagcaacagaggataactacctg

SEQ ID NO: 410216 - DNA, 25 bp, Homo sapien
gatgcactaacagtcacaagtacct

SEQ ID NO: 410217 - DNA, 25 bp, Homo sapien
catcccacagtgtgctgtggatgat

SEQ ID NO: 410218 - DNA, 25 bp, Homo sapien
tcatgtacccaaggtagtggtaact

SEQ ID NO: 410219 - DNA, 25 bp, Homo sapien
taacagacactgcatcccacagtgt

SEQ ID NO: 410220 - DNA, 25 bp, Homo sapien
tagtggtaactaacagacactgcat

SEQ ID NO: 410221 - DNA, 25 bp, Homo sapien
taatctccaaaggatttagatcccg

SEQ ID NO: 410222 - DNA, 25 bp, Homo sapien
taaggttggcaattggaagaatctc

SEQ ID NO: 410223 - DNA, 25 bp, Homo sapien
tttagatcccgctcctttaaactgc

SEQ ID NO: 410224 - DNA, 25 bp, Homo sapien
aaactgctgactcgtggagttatgg

SEQ ID NO: 410225 - DNA, 25 bp, Homo sapien
ggatgcgtgtgacaaagataggcaa

SEQ ID NO: 410226 - DNA, 25 bp, Homo sapien
gggatgcgtgtgacaaagataggca

SEQ ID NO: 410227 - DNA, 25 bp, Homo sapien
tgggatgcgtgtgacaaagataggc

SEQ ID NO: 410228 - DNA, 25 bp, Homo sapien
gtgggatgcgtgtgacaaagatagg

SEQ ID NO: 410229 - DNA, 25 bp, Homo sapien
ccaccacgtctgagtcagggttgca

SEQ ID NO: 410230 - DNA, 25 bp, Homo sapien
tttccaccacgtctgagtcagggtt

SEQ ID NO: 410231 - DNA, 25 bp, Homo sapien
taaaattgttttccaccacgtctga

SEQ ID NO: 410232 - DNA, 25 bp, Homo sapien
attgttttccaccacgtctgagtca

SEQ ID NO: 410233 - DNA, 25 bp, Homo sapien
tctcgaaaagtaaaacctcaattga

SEQ ID NO: 410234 - DNA, 25 bp, Homo sapien
tacaccagggaaagagttacctggc

SEQ ID NO: 410235 - DNA, 25 bp, Homo sapien
tcttaatgatagcacaaaggtttca

SEQ ID NO: 410236 - DNA, 25 bp, Homo sapien
acatggtttatctagggacagcaaa

SEQ ID NO: 410237 - DNA, 25 bp, Homo sapien
tacagaacggcttttatatggaaac

SEQ ID NO: 410238 - DNA, 25 bp, Homo sapien
tatgttgcttgaaatagggataaag

SEQ ID NO: 410239 - DNA, 25 bp, Homo sapien
tccaagaatagaacactaggcaaaa

SEQ ID NO: 410240 - DNA, 25 bp, Homo sapien
cacatcatttgagccattacttttg

SEQ ID NO: 410241 - DNA, 25 bp, Homo sapien
agactgacctacacctcttgtgaat

SEQ ID NO: 410242 - DNA, 25 bp, Homo sapien
gagactgacctacacctcttgtgaa

SEQ ID NO: 410243 - DNA, 25 bp, Homo sapien
ttgaggaaggagaaaacgcctggat

SEQ ID NO: 410244 - DNA, 25 bp, Homo sapien
gattggtaccattgggcttccggta

SEQ ID NO: 410245 - DNA, 25 bp, Homo sapien
caaagagtacacagctgactcccaa

SEQ ID NO: 410246 - DNA, 25 bp, Homo sapien
gaagtcaatgactttctcccgcacg

SEQ ID NO: 410247 - DNA, 25 bp, Homo sapien
tttctcttatgcatattttcagata

SEQ ID NO: 410248 - DNA, 25 bp, Homo sapien
tctcttatgcatattttcagatatg

SEQ ID NO: 410249 - DNA, 25 bp, Homo sapien
cagatatgttagaaatattgttact

SEQ ID NO: 410250 - DNA, 25 bp, Homo sapien
ttcagatatgttagaaatattgtta

SEQ ID NO: 410251 - DNA, 25 bp, Homo sapien
ccatatagaggcttatcagatttcc

SEQ ID NO: 410252 - DNA, 25 bp, Homo sapien
tgggccccatatttgccatcgggaa

SEQ ID NO: 410253 - DNA, 25 bp, Homo sapien
cagatttcctgtacataacataggg

SEQ ID NO: 410254 - DNA, 25 bp, Homo sapien
tctttcaacaggtctaggcaatatc

SEQ ID NO: 410255 - DNA, 25 bp, Homo sapien
tgttctgttggccaatgaatcagtg

SEQ ID NO: 410256 - DNA, 25 bp, Homo sapien
tcagtgatattgctggacttgtctt

SEQ ID NO: 410257 - DNA, 25 bp, Homo sapien
gttctgttggccaatgaatcagtga

SEQ ID NO: 410258 - DNA, 25 bp, Homo sapien
gaatcagtgatattgctggacttgt

SEQ ID NO: 410259 - DNA, 25 bp, Homo sapien
agcccactgttggaattccaaatcc

SEQ ID NO: 410260 - DNA, 25 bp, Homo sapien
cactgttggaattccaaatcccaat

SEQ ID NO: 410261 - DNA, 25 bp, Homo sapien
gttaagcccactgttggaattccaa

SEQ ID NO: 410262 - DNA, 25 bp, Homo sapien
cccactgttggaattccaaatccca

SEQ ID NO: 410263 - DNA, 25 bp, Homo sapien
ccaggtttcctgcagttgttgtcag

SEQ ID NO: 410264 - DNA, 25 bp, Homo sapien
ctgcagttgttgtcagagtacaaac

SEQ ID NO: 410265 - DNA, 25 bp, Homo sapien
tttcctgcagttgttgtcagagtac

SEQ ID NO: 410266 - DNA, 25 bp, Homo sapien
caggtttcctgcagttgttgtcaga

SEQ ID NO: 410267 - DNA, 25 bp, Homo sapien
tacaagtgtttagacacttcgccag

SEQ ID NO: 410268 - DNA, 25 bp, Homo sapien
cttcttccacactttatacaagtgt

SEQ ID NO: 410269 - DNA, 25 bp, Homo sapien
cactttatacaagtgtttagacact

SEQ ID NO: 410270 - DNA, 25 bp, Homo sapien
agtgtttagacacttcgccagcagc

SEQ ID NO: 410271 - DNA, 25 bp, Homo sapien
taagaatctagcacatcaacttcta

SEQ ID NO: 410272 - DNA, 25 bp, Homo sapien
aagaatctagcacatcaacttctat

SEQ ID NO: 410273 - DNA, 25 bp, Homo sapien
tgagactaataatgtccagatcaaa

SEQ ID NO: 410274 - DNA, 25 bp, Homo sapien
gtgatatgcccagtcaagccatccc

SEQ ID NO: 410275 - DNA, 25 bp, Homo sapien
gttttattaaaggtgatatgcccag

SEQ ID NO: 410276 - DNA, 25 bp, Homo sapien
caaaatccttcctcaagccattggt

SEQ ID NO: 410277 - DNA, 25 bp, Homo sapien
ccagtcaaacctgtcatcgtggcta

SEQ ID NO: 410278 - DNA, 25 bp, Homo sapien
tggacagtatggaaagaattgccgt

SEQ ID NO: 410279 - DNA, 25 bp, Homo sapien
tcgtggctacctaaatggacagtat

SEQ ID NO: 410280 - DNA, 25 bp, Homo sapien
tatggaaagaattgccgtaaaacag

SEQ ID NO: 410281 - DNA, 25 bp, Homo sapien
cattaaattctataggattttcaga

SEQ ID NO: 410282 - DNA, 25 bp, Homo sapien
cttttcctttatggggttcatgttg

SEQ ID NO: 410283 - DNA, 25 bp, Homo sapien
ttcatgttgtgagtcaatttggtac

SEQ ID NO: 410284 - DNA, 25 bp, Homo sapien
tcattaaattctataggattttcag

SEQ ID NO: 410285 - DNA, 25 bp, Homo sapien
taattttctgtccttagtagctgct

SEQ ID NO: 410286 - DNA, 25 bp, Homo sapien
agcagctctgaatttgctacccata

SEQ ID NO: 410287 - DNA, 25 bp, Homo sapien
cagaggcttccatggtcaatgaaca

SEQ ID NO: 410288 - DNA, 25 bp, Homo sapien
tgctacccatatccagaggcttcca

SEQ ID NO: 410289 - DNA, 25 bp, Homo sapien
ggctcaaagcttgtcagctccatag

SEQ ID NO: 410290 - DNA, 25 bp, Homo sapien
ggaaaagggctcaaagcttgtcagc

SEQ ID NO: 410291 - DNA, 25 bp, Homo sapien
agaatcactggaaaagggctcaaag

SEQ ID NO: 410292 - DNA, 25 bp, Homo sapien
gctccatagatctttgtctgatact

SEQ ID NO: 410293 - DNA, 25 bp, Homo sapien
caaaggcagggatgggtatctcttg

SEQ ID NO: 410294 - DNA, 25 bp, Homo sapien
caactatgtagatgcttccccagac

SEQ ID NO: 410295 - DNA, 25 bp, Homo sapien
gggttacgggcatgcaacactacat

SEQ ID NO: 410296 - DNA, 25 bp, Homo sapien
ccttacttgatagaaagcgagcatc

SEQ ID NO: 410297 - DNA, 25 bp, Homo sapien
ctcagtctcccgtaactttggattt

SEQ ID NO: 410298 - DNA, 25 bp, Homo sapien
tcagtctcccgtaactttggatttc

SEQ ID NO: 410299 - DNA, 25 bp, Homo sapien
caaccagttcccaagagtggagtgt

SEQ ID NO: 410300 - DNA, 25 bp, Homo sapien
cccttgattatctggcctctgctga

SEQ ID NO: 410301 - DNA, 25 bp, Homo sapien
tagtagagcatagaaggcccttgat

SEQ ID NO: 410302 - DNA, 25 bp, Homo sapien
tcagggtgagctcatagcaggtctg

SEQ ID NO: 410303 - DNA, 25 bp, Homo sapien
cccttatggacatgtgtggagagcc

SEQ ID NO: 410304 - DNA, 25 bp, Homo sapien
gaaaattcctgctagtccttctgga

SEQ ID NO: 410305 - DNA, 25 bp, Homo sapien
gcatcatgccagcagaaccctgtgg

SEQ ID NO: 410306 - DNA, 25 bp, Homo sapien
tgggcaagcccaacagtgctcagaa

SEQ ID NO: 410307 - DNA, 25 bp, Homo sapien
atgcccggtgcgaggcaatggccac

SEQ ID NO: 410308 - DNA, 25 bp, Homo sapien
gcatcgtacatcagagccgcttcag

SEQ ID NO: 410309 - DNA, 25 bp, Homo sapien
ggttcataaatctgggtccgaggcg

SEQ ID NO: 410310 - DNA, 25 bp, Homo sapien
tccgaggcgccatggcttatgtcta

SEQ ID NO: 410311 - DNA, 25 bp, Homo sapien
cttatctgtctgatctcaaaggcca

SEQ ID NO: 410312 - DNA, 25 bp, Homo sapien
gcttccatagctcttatctgtctga

SEQ ID NO: 410313 - DNA, 25 bp, Homo sapien
taccttcctttacttgcataatcac

SEQ ID NO: 410314 - DNA, 25 bp, Homo sapien
caccgcatcttaaattccacttttg

SEQ ID NO: 410315 - DNA, 25 bp, Homo sapien
agcgacatatggctggtgttaaaca

SEQ ID NO: 410316 - DNA, 25 bp, Homo sapien
caagagcgacatatggctggtgtta

SEQ ID NO: 410317 - DNA, 25 bp, Homo sapien
gacatatggctggtgttaaacactg

SEQ ID NO: 410318 - DNA, 25 bp, Homo sapien
tcaagagcgacatatggctggtgtt

SEQ ID NO: 410319 - DNA, 25 bp, Homo sapien
agttctgcagaggtgaacctatacg

SEQ ID NO: 410320 - DNA, 25 bp, Homo sapien
cctatacgcatccaggacaggaaga

SEQ ID NO: 410321 - DNA, 25 bp, Homo sapien
tacaccgactgtttgtaaatccgac

SEQ ID NO: 410322 - DNA, 25 bp, Homo sapien
gacaggaagagctgaatacaccgac

SEQ ID NO: 410323 - DNA, 25 bp, Homo sapien
cactggtttggctgataatggtgat

SEQ ID NO: 410324 - DNA, 25 bp, Homo sapien
ttcctagaataaaatgctcttcact

SEQ ID NO: 410325 - DNA, 25 bp, Homo sapien
taatggtgattactcttgtcaagtt

SEQ ID NO: 410326 - DNA, 25 bp, Homo sapien
tccttgcactggtttggctgataat

SEQ ID NO: 410327 - DNA, 25 bp, Homo sapien
acccggtcatgtttacgccactgta

SEQ ID NO: 410328 - DNA, 25 bp, Homo sapien
tgtacctatagagttccagatccaa

SEQ ID NO: 410329 - DNA, 25 bp, Homo sapien
tgttaagcagccgaaacccggtcat

SEQ ID NO: 410330 - DNA, 25 bp, Homo sapien
caatgatggatgacacgtgagggtt

SEQ ID NO: 410331 - DNA, 25 bp, Homo sapien
ggttgtgaaaaagtagtgatagtac

SEQ ID NO: 410332 - DNA, 25 bp, Homo sapien
gaaaaagtagtgatagtactcggtc

SEQ ID NO: 410333 - DNA, 25 bp, Homo sapien
gtagtgatagtactcggtcatcatg

SEQ ID NO: 410334 - DNA, 25 bp, Homo sapien
aaagtagtgatagtactcggtcatc

SEQ ID NO: 410335 - DNA, 25 bp, Homo sapien
tttggagtcccggaaatggtgtcaa

SEQ ID NO: 410336 - DNA, 25 bp, Homo sapien
cattgaactgtgatcttacttttgg

SEQ ID NO: 410337 - DNA, 25 bp, Homo sapien
ccggacattctgtgagcgtgtatat

SEQ ID NO: 410338 - DNA, 25 bp, Homo sapien
ttgggatcgtaatagttccggacat

SEQ ID NO: 410339 - DNA, 25 bp, Homo sapien
gtctaattgtcgcatactttgtaaa

SEQ ID NO: 410340 - DNA, 25 bp, Homo sapien
gaccagtagccctgtcgtctaattg

SEQ ID NO: 410341 - DNA, 25 bp, Homo sapien
aaataaaacgattgcattcccattt

SEQ ID NO: 410342 - DNA, 25 bp, Homo sapien
tcttgtgatggtctttaagcagctg

SEQ ID NO: 410343 - DNA, 25 bp, Homo sapien
ccgaactgaccaaatggtgctgacc

SEQ ID NO: 410344 - DNA, 25 bp, Homo sapien
gctgacctaggcagtatgtatactt

SEQ ID NO: 410345 - DNA, 25 bp, Homo sapien
gatacagtacttgtctgccgaactg

SEQ ID NO: 410346 - DNA, 25 bp, Homo sapien
tattagggcggtattgctaggaacc

SEQ ID NO: 410347 - DNA, 25 bp, Homo sapien
tagtttgtcttgtgagtcctcaatg

SEQ ID NO: 410348 - DNA, 25 bp, Homo sapien
tgaagtctaggtaaagatgaccagg

SEQ ID NO: 410349 - DNA, 25 bp, Homo sapien
cagcaccaaggccatattttagttt

SEQ ID NO: 410350 - DNA, 25 bp, Homo sapien
gaagttatcatgtacggcctgagca

SEQ ID NO: 410351 - DNA, 25 bp, Homo sapien
aaaaggctgtgtcacgtggccagaa

SEQ ID NO: 410352 - DNA, 25 bp, Homo sapien
gaatttagaatgttccaggatttgg

SEQ ID NO: 410353 - DNA, 25 bp, Homo sapien
caggatttggcaaccgcaagtgcaa

SEQ ID NO: 410354 - DNA, 25 bp, Homo sapien
tgttccaggatttggcaaccgcaag

SEQ ID NO: 410355 - DNA, 25 bp, Homo sapien
agttattccaaaaagcgcaattgcc

SEQ ID NO: 410356 - DNA, 25 bp, Homo sapien
aatatcccgtttcaagcacagcagc

SEQ ID NO: 410357 - DNA, 25 bp, Homo sapien
gaggttccaatgaagccccattaag

SEQ ID NO: 410358 - DNA, 25 bp, Homo sapien
cagaaaagttctgatgtctccaata

SEQ ID NO: 410359 - DNA, 25 bp, Homo sapien
atgaagccccatgaactctctgagc

SEQ ID NO: 410360 - DNA, 25 bp, Homo sapien
atggcttcaatgaagccccatgaac

SEQ ID NO: 410361 - DNA, 25 bp, Homo sapien
ggcttcaatgaagccccatgaactc

SEQ ID NO: 410362 - DNA, 25 bp, Homo sapien
tcaatgaagccccatgaactctctg

SEQ ID NO: 410363 - DNA, 25 bp, Homo sapien
tattatatctggagggagctttgat

SEQ ID NO: 410364 - DNA, 25 bp, Homo sapien
tggcatctttattcccagagggcag

SEQ ID NO: 410365 - DNA, 25 bp, Homo sapien
gatgagctcttgtagacgaattaga

SEQ ID NO: 410366 - DNA, 25 bp, Homo sapien
ggcagctggcggattttgattttaa

SEQ ID NO: 410367 - DNA, 25 bp, Homo sapien
tcagagcagacatggtcgggtgagg

SEQ ID NO: 410368 - DNA, 25 bp, Homo sapien
gagcagacatggtcgggtgaggtct

SEQ ID NO: 410369 - DNA, 25 bp, Homo sapien
acatggtcgggtgaggtcttgtgtg

SEQ ID NO: 410370 - DNA, 25 bp, Homo sapien
cagagcagacatggtcgggtgaggt

SEQ ID NO: 410371 - DNA, 25 bp, Homo sapien
gatcgccctgctgatagctgcataa

SEQ ID NO: 410372 - DNA, 25 bp, Homo sapien
tgtgctgtcttcatacaccactgtc

SEQ ID NO: 410373 - DNA, 25 bp, Homo sapien
tctgtatgtgtggaacttcgagagc

SEQ ID NO: 410374 - DNA, 25 bp, Homo sapien
ccagttgtaatagaggaccagatcc

SEQ ID NO: 410375 - DNA, 25 bp, Homo sapien
gaagggccaaagagagcagccacac

SEQ ID NO: 410376 - DNA, 25 bp, Homo sapien
ctatgggaagggccaaagagagcag

SEQ ID NO: 410377 - DNA, 25 bp, Homo sapien
gggccaaagagagcagccacaccaa

SEQ ID NO: 410378 - DNA, 25 bp, Homo sapien
acaccaagagccagctggtcacatg

SEQ ID NO: 410379 - DNA, 25 bp, Homo sapien
gaataactgatacaactttgacagc

SEQ ID NO: 410380 - DNA, 25 bp, Homo sapien
ttcagacagaataactgatacaact

SEQ ID NO: 410381 - DNA, 25 bp, Homo sapien
gacagaataactgatacaactttga

SEQ ID NO: 410382 - DNA, 25 bp, Homo sapien
actgatacaactttgacagccatat

SEQ ID NO: 410383 - DNA, 25 bp, Homo sapien
tccgcgaggcttcaaaactatcaaa

SEQ ID NO: 410384 - DNA, 25 bp, Homo sapien
atgctggtgactgcaaacttgaaag

SEQ ID NO: 410385 - DNA, 25 bp, Homo sapien
cataggttaatgtggtgttaggcat

SEQ ID NO: 410386 - DNA, 25 bp, Homo sapien
tgttaggcatcagggttcggtttct

SEQ ID NO: 410387 - DNA, 25 bp, Homo sapien
ggagagcccgcatgtagagagactg

SEQ ID NO: 410388 - DNA, 25 bp, Homo sapien
gggagagcccgcatgtagagagact

SEQ ID NO: 410389 - DNA, 25 bp, Homo sapien
cagggagagcccgcatgtagagaga

SEQ ID NO: 410390 - DNA, 25 bp, Homo sapien
ccacagggagagcccgcatgtagag

SEQ ID NO: 410391 - DNA, 25 bp, Homo sapien
caaggcatctttaggacgttcaggc

SEQ ID NO: 410392 - DNA, 25 bp, Homo sapien
catctttaggacgttcaggctgcag

SEQ ID NO: 410393 - DNA, 25 bp, Homo sapien
gggagaccaaggcatctttaggacg

SEQ ID NO: 410394 - DNA, 25 bp, Homo sapien
gctgcaggtatttaggggaaaagtc

SEQ ID NO: 410395 - DNA, 25 bp, Homo sapien
ggatgtgagcaccattaatctgtgc

SEQ ID NO: 410396 - DNA, 25 bp, Homo sapien
caccattaatctgtgcagggtaggc

SEQ ID NO: 410397 - DNA, 25 bp, Homo sapien
ttaatctgtgcagggtaggctgctt

SEQ ID NO: 410398 - DNA, 25 bp, Homo sapien
tgtgagcaccattaatctgtgcagg

SEQ ID NO: 410399 - DNA, 25 bp, Homo sapien
ttgagcttagctgacttctactcct

SEQ ID NO: 410400 - DNA, 25 bp, Homo sapien
tctcatttgagcttagctgacttct

SEQ ID NO: 410401 - DNA, 25 bp, Homo sapien
ctgtctctcatttgagcttagctga

SEQ ID NO: 410402 - DNA, 25 bp, Homo sapien
tactcctaacaatgatgtggaccat

SEQ ID NO: 410403 - DNA, 25 bp, Homo sapien
tgagacaaggtgccacatatggtca

SEQ ID NO: 410404 - DNA, 25 bp, Homo sapien
ctgagacaaggtgccacatatggtc

SEQ ID NO: 410405 - DNA, 25 bp, Homo sapien
tggtaaatatattccaacgataacc

SEQ ID NO: 410406 - DNA, 25 bp, Homo sapien
gtaaatatattccaacgataaccat

SEQ ID NO: 410407 - DNA, 25 bp, Homo sapien
taatggtaaatatattccaacgata

SEQ ID NO: 410408 - DNA, 25 bp, Homo sapien
cttgtaatggtaaatatattccaac

SEQ ID NO: 410409 - DNA, 25 bp, Homo sapien
ggacaaggacagcttcaactggaaa

SEQ ID NO: 410410 - DNA, 25 bp, Homo sapien
ggaaactggctctaattcagtctgc

SEQ ID NO: 410411 - DNA, 25 bp, Homo sapien
tacctttcagaaagtcccagccaag

SEQ ID NO: 410412 - DNA, 25 bp, Homo sapien
tcagtctgctataagtgtcttcagg

SEQ ID NO: 410413 - DNA, 25 bp, Homo sapien
cccaatagttcatggtagaaaatcc

SEQ ID NO: 410414 - DNA, 25 bp, Homo sapien
cgaccaggtgtagccataatgtagt

SEQ ID NO: 410415 - DNA, 25 bp, Homo sapien
tccaagagactgcatacgaccaggt

SEQ ID NO: 410416 - DNA, 25 bp, Homo sapien
gaaccatagcttcattgtcggaaac

SEQ ID NO: 410417 - DNA, 25 bp, Homo sapien
tctctggccatcgagtctagaggtt

SEQ ID NO: 410418 - DNA, 25 bp, Homo sapien
gcttccttgactcataatgtgttgg

SEQ ID NO: 410419 - DNA, 25 bp, Homo sapien
ctcataatgtgttggaaataccact

SEQ ID NO: 410420 - DNA, 25 bp, Homo sapien
gccatcgagtctagaggtttcttga

SEQ ID NO: 410421 - DNA, 25 bp, Homo sapien
ttattatttcatgccggaagaagcc

SEQ ID NO: 410422 - DNA, 25 bp, Homo sapien
gaggctgggcatttcttattatttc

SEQ ID NO: 410423 - DNA, 25 bp, Homo sapien
atggttgaggctgggcatttcttat

SEQ ID NO: 410424 - DNA, 25 bp, Homo sapien
ggaagtttggtgaatggttgaggct

SEQ ID NO: 410425 - DNA, 25 bp, Homo sapien
tgtgctcacgaacactcatatgtgt

SEQ ID NO: 410426 - DNA, 25 bp, Homo sapien
gtgtatatgtgtgctcacgaacact

SEQ ID NO: 410427 - DNA, 25 bp, Homo sapien
tgtgtgctcacgaacactcatatgt

SEQ ID NO: 410428 - DNA, 25 bp, Homo sapien
tgctcacgaacactcatatgtgtat

SEQ ID NO: 410429 - DNA, 25 bp, Homo sapien
ttgagaagattccaaactacattca

SEQ ID NO: 410430 - DNA, 25 bp, Homo sapien
tgagaagattccaaactacattcag

SEQ ID NO: 410431 - DNA, 25 bp, Homo sapien
caaactacattcagaagaagcaaac

SEQ ID NO: 410432 - DNA, 25 bp, Homo sapien
gagctccgacttttccagcaacagc

SEQ ID NO: 410433 - DNA, 25 bp, Homo sapien
acttttccagcaacagcgtgtccct

SEQ ID NO: 410434 - DNA, 25 bp, Homo sapien
tccagcaacagcgtgtccctggaag

SEQ ID NO: 410435 - DNA, 25 bp, Homo sapien
ttgcatagcagagctccgacttttc

SEQ ID NO: 410436 - DNA, 25 bp, Homo sapien
tcaaagccacgaaggctctcctgca

SEQ ID NO: 410437 - DNA, 25 bp, Homo sapien
tgtgatcaaagccacgaaggctctc

SEQ ID NO: 410438 - DNA, 25 bp, Homo sapien
aaagccacgaaggctctcctgcaac

SEQ ID NO: 410439 - DNA, 25 bp, Homo sapien
cgaaggctctcctgcaacatcttag

SEQ ID NO: 410440 - DNA, 25 bp, Homo sapien
tcacaagactgccaaatcccaagct

SEQ ID NO: 410441 - DNA, 25 bp, Homo sapien
cacaagactgccaaatcccaagctg

SEQ ID NO: 410442 - DNA, 25 bp, Homo sapien
tggcaaatgcccctaggagccacag

SEQ ID NO: 410443 - DNA, 25 bp, Homo sapien
tcatgaacgcattcagcatcccttg

SEQ ID NO: 410444 - DNA, 25 bp, Homo sapien
gcacgctctgatgtggacttccagc

SEQ ID NO: 410445 - DNA, 25 bp, Homo sapien
tcattgcacttgcacttagcgcacg

SEQ ID NO: 410446 - DNA, 25 bp, Homo sapien
caggaccaccctgtattcaaattgg

SEQ ID NO: 410447 - DNA, 25 bp, Homo sapien
ttaagaattctagagctgtagcacc

SEQ ID NO: 410448 - DNA, 25 bp, Homo sapien
aaattgggagcctctacaaagtcac

SEQ ID NO: 410449 - DNA, 25 bp, Homo sapien
tgcattaagaattctagagctgtag

SEQ ID NO: 410450 - DNA, 25 bp, Homo sapien
gacagttaatcctgcttcgaatggg

SEQ ID NO: 410451 - DNA, 25 bp, Homo sapien
cctaaattggctatataagatggct

SEQ ID NO: 410452 - DNA, 25 bp, Homo sapien
caatagttactgagagggcctttag

SEQ ID NO: 410453 - DNA, 25 bp, Homo sapien
ccaccatatgccaggggacagttaa

SEQ ID NO: 410454 - DNA, 25 bp, Homo sapien
gatgggccctaatgccatacaacag

SEQ ID NO: 410455 - DNA, 25 bp, Homo sapien
tgagaaaccggtttcctggaagata

SEQ ID NO: 410456 - DNA, 25 bp, Homo sapien
agagacagacgcgtacagagagaag

SEQ ID NO: 410457 - DNA, 25 bp, Homo sapien
tgtgagtggctcatatagtgcctgg

SEQ ID NO: 410458 - DNA, 25 bp, Homo sapien
gacttgtagtactagagtacagaga

SEQ ID NO: 410459 - DNA, 25 bp, Homo sapien
cctggtattgttggacttatagact

SEQ ID NO: 410460 - DNA, 25 bp, Homo sapien
ggccttaaaccattgaagaatcaag

SEQ ID NO: 410461 - DNA, 25 bp, Homo sapien
gctaccaaggagctcagttgctcag

SEQ ID NO: 410462 - DNA, 25 bp, Homo sapien
atttccctgccagccctcacaactt

SEQ ID NO: 410463 - DNA, 25 bp, Homo sapien
cctgccagccctcacaacttgaact

SEQ ID NO: 410464 - DNA, 25 bp, Homo sapien
gccagccctcacaacttgaacttcc

SEQ ID NO: 410465 - DNA, 25 bp, Homo sapien
tccctgccagccctcacaacttgaa

SEQ ID NO: 410466 - DNA, 25 bp, Homo sapien
catatttacgatgtcattgtctgtg

SEQ ID NO: 410467 - DNA, 25 bp, Homo sapien
gctcaagcaggcgattttaagatga

SEQ ID NO: 410468 - DNA, 25 bp, Homo sapien
caaatacatatttacgatgtcattg

SEQ ID NO: 410469 - DNA, 25 bp, Homo sapien
tcattgtctgtgctcaagcaggcga

SEQ ID NO: 410470 - DNA, 25 bp, Homo sapien
cagcttttgaatttactggaataag

SEQ ID NO: 410471 - DNA, 25 bp, Homo sapien
tgaatttactggaataagaggtgct

SEQ ID NO: 410472 - DNA, 25 bp, Homo sapien
tggaataagaggtgctttccctttg

SEQ ID NO: 410473 - DNA, 25 bp, Homo sapien
aagaggtgctttccctttgttccat

SEQ ID NO: 410474 - DNA, 25 bp, Homo sapien
tcattttctccacacattagaccaa

SEQ ID NO: 410475 - DNA, 25 bp, Homo sapien
acaccagttcacaccatgtaaaatg

SEQ ID NO: 410476 - DNA, 25 bp, Homo sapien
tcttatcctattgccccatattgct

SEQ ID NO: 410477 - DNA, 25 bp, Homo sapien
gcctctctgggtaacctgtgatatc

SEQ ID NO: 410478 - DNA, 25 bp, Homo sapien
tagcggctatcaagctgccagcaag

SEQ ID NO: 410479 - DNA, 25 bp, Homo sapien
agctgccagcaagacagtgtcctta

SEQ ID NO: 410480 - DNA, 25 bp, Homo sapien
ggaaatcaggtagcggctatcaagc

SEQ ID NO: 410481 - DNA, 25 bp, Homo sapien
tatcaagctgccagcaagacagtgt

SEQ ID NO: 410482 - DNA, 25 bp, Homo sapien
tactttatgtctttgtgcatgggag

SEQ ID NO: 410483 - DNA, 25 bp, Homo sapien
cttaagcctgtgtgaaaaatgtttc

SEQ ID NO: 410484 - DNA, 25 bp, Homo sapien
tggggaaaggctgcaatcattttct

SEQ ID NO: 410485 - DNA, 25 bp, Homo sapien
ttttgtactatgtggggaaaggctg

SEQ ID NO: 410486 - DNA, 25 bp, Homo sapien
gcaaagggcggtaattgctttgatt

SEQ ID NO: 410487 - DNA, 25 bp, Homo sapien
tgaggcagctgatgggagagggcaa

SEQ ID NO: 410488 - DNA, 25 bp, Homo sapien
ggagagggcaaagggcggtaattgc

SEQ ID NO: 410489 - DNA, 25 bp, Homo sapien
gtgaggcagctgatgggagagggca

SEQ ID NO: 410490 - DNA, 25 bp, Homo sapien
caaggttgagttgtggattcctgat

SEQ ID NO: 410491 - DNA, 25 bp, Homo sapien
tcagtacaagcagcgggtgtcaagg

SEQ ID NO: 410492 - DNA, 25 bp, Homo sapien
gatatgcactggtatacctgaggtc

SEQ ID NO: 410493 - DNA, 25 bp, Homo sapien
ccttgtctgtggaagtcagctttcc

SEQ ID NO: 410494 - DNA, 25 bp, Homo sapien
gcatcatcaagactgtaacttgtca

SEQ ID NO: 410495 - DNA, 25 bp, Homo sapien
tgccaatctgatatgctatatatat

SEQ ID NO: 410496 - DNA, 25 bp, Homo sapien
caggctttgtgggagattattccat

SEQ ID NO: 410497 - DNA, 25 bp, Homo sapien
gaaccaggctttgtgggagattatt

SEQ ID NO: 410498 - DNA, 25 bp, Homo sapien
gattattccattgccaatctgatat

SEQ ID NO: 410499 - DNA, 25 bp, Homo sapien
ctaattggcagcatcgtagatcaca

SEQ ID NO: 410500 - DNA, 25 bp, Homo sapien
taattggcagcatcgtagatcacag

SEQ ID NO: 410501 - DNA, 25 bp, Homo sapien
gacccctgaagagatacatcaaatg

SEQ ID NO: 410502 - DNA, 25 bp, Homo sapien
tccgactatgtattacaggtttggg

SEQ ID NO: 410503 - DNA, 25 bp, Homo sapien
ggttgttatggtgacaggatgggaa

SEQ ID NO: 410504 - DNA, 25 bp, Homo sapien
ccttctgcctctctcgataacgatt

SEQ ID NO: 410505 - DNA, 25 bp, Homo sapien
ataagcttgaagctctcacacactg

SEQ ID NO: 410506 - DNA, 25 bp, Homo sapien
cactgcagtttatgcataaaggctg

SEQ ID NO: 410507 - DNA, 25 bp, Homo sapien
gtttatgcataaaggctggctgctt

SEQ ID NO: 410508 - DNA, 25 bp, Homo sapien
tttcaaataagcttgaagctctcac

SEQ ID NO: 410509 - DNA, 25 bp, Homo sapien
agaatgtgttatactccgtggatcc

SEQ ID NO: 410510 - DNA, 25 bp, Homo sapien
gcaaagggaatgtatctcagctaac

SEQ ID NO: 410511 - DNA, 25 bp, Homo sapien
caactttgaacaccctatgagaacc

SEQ ID NO: 410512 - DNA, 25 bp, Homo sapien
tctgtgttagcaagcagtgccactc

SEQ ID NO: 410513 - DNA, 25 bp, Homo sapien
tgttgcctgatagaatccaatgcta

SEQ ID NO: 410514 - DNA, 25 bp, Homo sapien
gaatccaatgctacatgctgtcaga

SEQ ID NO: 410515 - DNA, 25 bp, Homo sapien
ctgccatggaatgttgcctgataga

SEQ ID NO: 410516 - DNA, 25 bp, Homo sapien
caatgagctgatgcagatgaattta

SEQ ID NO: 410517 - DNA, 25 bp, Homo sapien
ctggtctttagcacaggtttggctc

SEQ ID NO: 410518 - DNA, 25 bp, Homo sapien
tctgattttcacactcagtcttcct

SEQ ID NO: 410519 - DNA, 25 bp, Homo sapien
gattttcacactcagtcttcctgtg

SEQ ID NO: 410520 - DNA, 25 bp, Homo sapien
gtctttagcacaggtttggctcttc

SEQ ID NO: 410521 - DNA, 25 bp, Homo sapien
ggtgaaaattcattactcttgtcat

SEQ ID NO: 410522 - DNA, 25 bp, Homo sapien
ttctcatgtaggacggtcaattcca

SEQ ID NO: 410523 - DNA, 25 bp, Homo sapien
ggacggtcaattccaatggtgaaaa

SEQ ID NO: 410524 - DNA, 25 bp, Homo sapien
atcttttctcatgtaggacggtcaa

SEQ ID NO: 410525 - DNA, 25 bp, Homo sapien
catttggaaaggcacaatgtctcca

SEQ ID NO: 410526 - DNA, 25 bp, Homo sapien
cactctgtgatagtcagtgctctgg

SEQ ID NO: 410527 - DNA, 25 bp, Homo sapien
tctgggagtagaactgatacaggca

SEQ ID NO: 410528 - DNA, 25 bp, Homo sapien
gcagaaagttggtgctgtcacatcc

SEQ ID NO: 410529 - DNA, 25 bp, Homo sapien
aaatctgtgcaaatcttaaaatagc

SEQ ID NO: 410530 - DNA, 25 bp, Homo sapien
tgaagtttatgtcatccctttttgg

SEQ ID NO: 410531 - DNA, 25 bp, Homo sapien
ttttttagagtgcagaaatctgtgc

SEQ ID NO: 410532 - DNA, 25 bp, Homo sapien
aaaatagcatatgcccgtgaagttt

SEQ ID NO: 410533 - DNA, 25 bp, Homo sapien
ttagaagatgaacaatagaacactt

SEQ ID NO: 410534 - DNA, 25 bp, Homo sapien
aaaatacgccatttcattgtataca

SEQ ID NO: 410535 - DNA, 25 bp, Homo sapien
ctttatgttaaaatacgccatttca

SEQ ID NO: 410536 - DNA, 25 bp, Homo sapien
gtttcacaactcagacctattgcat

SEQ ID NO: 410537 - DNA, 25 bp, Homo sapien
gtgatgtcagacatgggtagatcaa

SEQ ID NO: 410538 - DNA, 25 bp, Homo sapien
gatgtcagacatgggtagatcaaga

SEQ ID NO: 410539 - DNA, 25 bp, Homo sapien
tcagacatgggtagatcaagatatt

SEQ ID NO: 410540 - DNA, 25 bp, Homo sapien
catgggtagatcaagatattgagca

SEQ ID NO: 410541 - DNA, 25 bp, Homo sapien
ccagtggacgtcctggaggaatgac

SEQ ID NO: 410542 - DNA, 25 bp, Homo sapien
cccagtggacgtcctggaggaatga

SEQ ID NO: 410543 - DNA, 25 bp, Homo sapien
gctacaccccagtggacgtcctgga

SEQ ID NO: 410544 - DNA, 25 bp, Homo sapien
caagctacaccccagtggacgtcct

SEQ ID NO: 410545 - DNA, 25 bp, Homo sapien
cactcactagtctccgataaagggt

SEQ ID NO: 410546 - DNA, 25 bp, Homo sapien
gatttactaggaggttatgtgacat

SEQ ID NO: 410547 - DNA, 25 bp, Homo sapien
cactagtctccgataaagggttgga

SEQ ID NO: 410548 - DNA, 25 bp, Homo sapien
gttggatttactaggaggttatgtg

SEQ ID NO: 410549 - DNA, 25 bp, Homo sapien
gccaagctaagaaccaccggaagtg

SEQ ID NO: 410550 - DNA, 25 bp, Homo sapien
ccaccggaagtggaagtactctcat

SEQ ID NO: 410551 - DNA, 25 bp, Homo sapien
accaccggaagtggaagtactctca

SEQ ID NO: 410552 - DNA, 25 bp, Homo sapien
agctaagaaccaccggaagtggaag

SEQ ID NO: 410553 - DNA, 25 bp, Homo sapien
gggcgaggagtgtgccgtgctccat

SEQ ID NO: 410554 - DNA, 25 bp, Homo sapien
atcctgagtacttgcggggcggtct

SEQ ID NO: 410555 - DNA, 25 bp, Homo sapien
gatatagcagaggaaatagaggagt

SEQ ID NO: 410556 - DNA, 25 bp, Homo sapien
ggcggtctgagggaggatatagcag

SEQ ID NO: 410557 - DNA, 25 bp, Homo sapien
taattcatgccgagatacagccgct

SEQ ID NO: 410558 - DNA, 25 bp, Homo sapien
cctttggtcagatgcaaaagtcggg

SEQ ID NO: 410559 - DNA, 25 bp, Homo sapien
gagagatgcacccaacttgggccgg

SEQ ID NO: 410560 - DNA, 25 bp, Homo sapien
tgaggaaagttgctgccccgatctg

SEQ ID NO: 410561 - DNA, 25 bp, Homo sapien
tccctgctactagcggatgactttt

SEQ ID NO: 410562 - DNA, 25 bp, Homo sapien
gacttttctgttagttgaccctgca

SEQ ID NO: 410563 - DNA, 25 bp, Homo sapien
gcacgaatgccttccctgctactag

SEQ ID NO: 410564 - DNA, 25 bp, Homo sapien
ttatgttgctgcacgaatgccttcc

SEQ ID NO: 410565 - DNA, 25 bp, Homo sapien
tcagcacatattaaagtcacttcct

SEQ ID NO: 410566 - DNA, 25 bp, Homo sapien
gacaaatgctgcaattattgtatcc

SEQ ID NO: 410567 - DNA, 25 bp, Homo sapien
tgcccagcacttaaagaagagtgcc

SEQ ID NO: 410568 - DNA, 25 bp, Homo sapien
gcaattattgtatcctacaaataag

SEQ ID NO: 410569 - DNA, 25 bp, Homo sapien
gcccagcacttaaagaagagtgcca

SEQ ID NO: 410570 - DNA, 25 bp, Homo sapien
aatgctatgcctttgctcacgtcat

SEQ ID NO: 410571 - DNA, 25 bp, Homo sapien
tctctcaatgaatatgcatccccag

SEQ ID NO: 410572 - DNA, 25 bp, Homo sapien
gcatccccagtagaatgtttattga

SEQ ID NO: 410573 - DNA, 25 bp, Homo sapien
gaaatgcttccataagggattctag

SEQ ID NO: 410574 - DNA, 25 bp, Homo sapien
tcttctttagaatagttgcgtgcag

SEQ ID NO: 410575 - DNA, 25 bp, Homo sapien
tgcagttggattacagttagaaggt

SEQ ID NO: 410576 - DNA, 25 bp, Homo sapien
aatagttgcgtgcagttggattaca

SEQ ID NO: 410577 - DNA, 25 bp, Homo sapien
ggattacagttagaaggtcagcatc

SEQ ID NO: 410578 - DNA, 25 bp, Homo sapien
aagaatgtcattgttagctttgcca

SEQ ID NO: 410579 - DNA, 25 bp, Homo sapien
aaatcgatcgttgacttggataaag

SEQ ID NO: 410580 - DNA, 25 bp, Homo sapien
ttggtgacttgagaaaaatcgatcg

SEQ ID NO: 410581 - DNA, 25 bp, Homo sapien
tattagtaagagttgccttgggtgg

SEQ ID NO: 410582 - DNA, 25 bp, Homo sapien
tcccaatataccgagagaaaggctt

SEQ ID NO: 410583 - DNA, 25 bp, Homo sapien
ctttcccaatataccgagagaaagg

SEQ ID NO: 410584 - DNA, 25 bp, Homo sapien
caatataccgagagaaaggcttgaa

SEQ ID NO: 410585 - DNA, 25 bp, Homo sapien
tataccgagagaaaggcttgaattt

SEQ ID NO: 410586 - DNA, 25 bp, Homo sapien
gtcggcaaggatcatggtcatacct

SEQ ID NO: 410587 - DNA, 25 bp, Homo sapien
tgatctgtcaattagtgacttccac

SEQ ID NO: 410588 - DNA, 25 bp, Homo sapien
gtggtcggcaaggatcatggtcata

SEQ ID NO: 410589 - DNA, 25 bp, Homo sapien
accttgaagaagtgattgatctgtc

SEQ ID NO: 410590 - DNA, 25 bp, Homo sapien
caaagcagccacttttgccgaaggg

SEQ ID NO: 410591 - DNA, 25 bp, Homo sapien
gatcaaagcagccacttttgccgaa

SEQ ID NO: 410592 - DNA, 25 bp, Homo sapien
gcagccacttttgccgaaggggtgc

SEQ ID NO: 410593 - DNA, 25 bp, Homo sapien
ctggatcaaagcagccacttttgcc

SEQ ID NO: 410594 - DNA, 25 bp, Homo sapien
tatttagtggaaactagtcgctgcc

SEQ ID NO: 410595 - DNA, 25 bp, Homo sapien
tacaggaaatgccatctgcaattct

SEQ ID NO: 410596 - DNA, 25 bp, Homo sapien
tctcccaccatatagatcttagagt

SEQ ID NO: 410597 - DNA, 25 bp, Homo sapien
gccactagaggactaatatctatga

SEQ ID NO: 410598 - DNA, 25 bp, Homo sapien
gctttgctggctatgattgacagga

SEQ ID NO: 410599 - DNA, 25 bp, Homo sapien
tggcctccatcatttgtgggaagaa

SEQ ID NO: 410600 - DNA, 25 bp, Homo sapien
gggtctgccctttcaatatgtcatc

SEQ ID NO: 410601 - DNA, 25 bp, Homo sapien
catacttcttattgggtaggactgc

SEQ ID NO: 410602 - DNA, 25 bp, Homo sapien
ggctcacatatgttgttgagaccct

SEQ ID NO: 410603 - DNA, 25 bp, Homo sapien
gggtttcacagctctcaaaaggtct

SEQ ID NO: 410604 - DNA, 25 bp, Homo sapien
tcccaccagacaatttcaactgaca

SEQ ID NO: 410605 - DNA, 25 bp, Homo sapien
ctctttttcgtgagacattatgctc

SEQ ID NO: 410606 - DNA, 25 bp, Homo sapien
ggctgcttaatgaagcacgtgatcg

SEQ ID NO: 410607 - DNA, 25 bp, Homo sapien
tcacggctgcttaatgaagcacgtg

SEQ ID NO: 410608 - DNA, 25 bp, Homo sapien
cttaatgaagcacgtgatcgtggga

SEQ ID NO: 410609 - DNA, 25 bp, Homo sapien
aagcacgtgatcgtgggaagacgtt

SEQ ID NO: 410610 - DNA, 25 bp, Homo sapien
ctggtgacgccctcaagtcccagtg

SEQ ID NO: 410611 - DNA, 25 bp, Homo sapien
tggcaccgtggtgaaccaagcctgg

SEQ ID NO: 410612 - DNA, 25 bp, Homo sapien
tgcatacattgaaaaggccagaggg

SEQ ID NO: 410613 - DNA, 25 bp, Homo sapien
taatttcgttgcaggttctcaagga

SEQ ID NO: 410614 - DNA, 25 bp, Homo sapien
atcaccagagttatagtagatgttc

SEQ ID NO: 410615 - DNA, 25 bp, Homo sapien
ttgccttgctcttttagcctccaag

SEQ ID NO: 410616 - DNA, 25 bp, Homo sapien
tcttttagcctccaagatataatca

SEQ ID NO: 410617 - DNA, 25 bp, Homo sapien
tataatcaccagagttatagtagat

SEQ ID NO: 410618 - DNA, 25 bp, Homo sapien
ttgacaaaacgatggcttgctgcgt

SEQ ID NO: 410619 - DNA, 25 bp, Homo sapien
caggctccgcagtctctaatgaaga

SEQ ID NO: 410620 - DNA, 25 bp, Homo sapien
tgctgcgttcattattcatctggga

SEQ ID NO: 410621 - DNA, 25 bp, Homo sapien
agagttcagccgtgtgtgtccagcg

SEQ ID NO: 410622 - DNA, 25 bp, Homo sapien
taacacgttgttgttagatcctccg

SEQ ID NO: 410623 - DNA, 25 bp, Homo sapien
ccaggcggcgttggtgtttgttcca

SEQ ID NO: 410624 - DNA, 25 bp, Homo sapien
tagtgtgtgatgcttctgaccaggc

SEQ ID NO: 410625 - DNA, 25 bp, Homo sapien
ggccctaggattccataacacgttg

SEQ ID NO: 410626 - DNA, 25 bp, Homo sapien
tacttttactagagcttcctttgtg

SEQ ID NO: 410627 - DNA, 25 bp, Homo sapien
acttttactagagcttcctttgtgt

SEQ ID NO: 410628 - DNA, 25 bp, Homo sapien
cttacttttactagagcttcctttg

SEQ ID NO: 410629 - DNA, 25 bp, Homo sapien
aaatctctctgcctaaagaactggc

SEQ ID NO: 410630 - DNA, 25 bp, Homo sapien
tatatctgcagacatatttagtcgg

SEQ ID NO: 410631 - DNA, 25 bp, Homo sapien
gacatatttagtcgggtggccttct

SEQ ID NO: 410632 - DNA, 25 bp, Homo sapien
gagttaccaaagctgtctatatctg

SEQ ID NO: 410633 - DNA, 25 bp, Homo sapien
tgtccacatgcggaacaatgagaag

SEQ ID NO: 410634 - DNA, 25 bp, Homo sapien
aggttgcaagtgtcctccactgtca

SEQ ID NO: 410635 - DNA, 25 bp, Homo sapien
gcagggctaaagcatggcacctttc

SEQ ID NO: 410636 - DNA, 25 bp, Homo sapien
cttgtgaatgtctcaggttgcaagt

SEQ ID NO: 410637 - DNA, 25 bp, Homo sapien
cattgctcccagacctttaaccagg

SEQ ID NO: 410638 - DNA, 25 bp, Homo sapien
aaccaggtcatcaggctccagggag

SEQ ID NO: 410639 - DNA, 25 bp, Homo sapien
cccagacctttaaccaggtcatcag

SEQ ID NO: 410640 - DNA, 25 bp, Homo sapien
accaggtcatcaggctccagggagc

SEQ ID NO: 410641 - DNA, 25 bp, Homo sapien
ctagacctttttgggtctggcatgc

SEQ ID NO: 410642 - DNA, 25 bp, Homo sapien
ggcatgctctgtgcccctctcggat

SEQ ID NO: 410643 - DNA, 25 bp, Homo sapien
tgcccctctcggatgggtaggaaat

SEQ ID NO: 410644 - DNA, 25 bp, Homo sapien
tttgggtctggcatgctctgtgccc

SEQ ID NO: 410645 - DNA, 25 bp, Homo sapien
taaccaggtcagcaggtaaggttcc

SEQ ID NO: 410646 - DNA, 25 bp, Homo sapien
gcaggtaaggttcctggctatgact

SEQ ID NO: 410647 - DNA, 25 bp, Homo sapien
cactgcttgtggatagctggtaacc

SEQ ID NO: 410648 - DNA, 25 bp, Homo sapien
ggctatgactctggataatggtacc

SEQ ID NO: 410649 - DNA, 25 bp, Homo sapien
gattgggtccaacaatagtcaatgc

SEQ ID NO: 410650 - DNA, 25 bp, Homo sapien
gaagtcagaatgtccaagtaagtca

SEQ ID NO: 410651 - DNA, 25 bp, Homo sapien
gaaaattggagcagcgattgggtcc

SEQ ID NO: 410652 - DNA, 25 bp, Homo sapien
gaccatagtccatacttggagccaa

SEQ ID NO: 410653 - DNA, 25 bp, Homo sapien
ttagacataactggtggaggtctta

SEQ ID NO: 410654 - DNA, 25 bp, Homo sapien
tagacataactggtggaggtcttac

SEQ ID NO: 410655 - DNA, 25 bp, Homo sapien
tcgttagagcctgtgcactggacct

SEQ ID NO: 410656 - DNA, 25 bp, Homo sapien
tccaatgaagaggacagcagcgctt

SEQ ID NO: 410657 - DNA, 25 bp, Homo sapien
aacttgcattgcaaccggaccctgg

SEQ ID NO: 410658 - DNA, 25 bp, Homo sapien
gaatcagaacgaagatgcccgtcag

SEQ ID NO: 410659 - DNA, 25 bp, Homo sapien
gaagggttgtggcaagagtccccac

SEQ ID NO: 410660 - DNA, 25 bp, Homo sapien
tgctgccaacaaaagctgatactct

SEQ ID NO: 410661 - DNA, 25 bp, Homo sapien
cagcaatttgcaagggataaaatgc

SEQ ID NO: 410662 - DNA, 25 bp, Homo sapien
caaagacaataatgttgctgccaac

SEQ ID NO: 410663 - DNA, 25 bp, Homo sapien
gctcaagatgtagaacgtggaagcc

SEQ ID NO: 410664 - DNA, 25 bp, Homo sapien
tggtagaagatgctcaagatgtaga

SEQ ID NO: 410665 - DNA, 25 bp, Homo sapien
gactggttcaattcggagtggtaga

SEQ ID NO: 410666 - DNA, 25 bp, Homo sapien
tgtagaacgtggaagccttttgagt

SEQ ID NO: 410667 - DNA, 25 bp, Homo sapien
ctagagaagtctttgatgatgttct

SEQ ID NO: 410668 - DNA, 25 bp, Homo sapien
ctccttggctgctgcccataacgtt

SEQ ID NO: 410669 - DNA, 25 bp, Homo sapien
tttgatgatgttctccttggctgct

SEQ ID NO: 410670 - DNA, 25 bp, Homo sapien
tggctgctgcccataacgttttagt

SEQ ID NO: 410671 - DNA, 25 bp, Homo sapien
gccacatttgctaaacattagccat

SEQ ID NO: 410672 - DNA, 25 bp, Homo sapien
gggacctttgaaacaatagcaatgc

SEQ ID NO: 410673 - DNA, 25 bp, Homo sapien
gccacatttgccctggtgttcctta

SEQ ID NO: 410674 - DNA, 25 bp, Homo sapien
tactggagcgcaaagaatgtggtcc

SEQ ID NO: 410675 - DNA, 25 bp, Homo sapien
gaataaacattgagagccttaagag

SEQ ID NO: 410676 - DNA, 25 bp, Homo sapien
aagggatgaggttggaataaacatt

SEQ ID NO: 410677 - DNA, 25 bp, Homo sapien
aataaacattgagagccttaagagc

SEQ ID NO: 410678 - DNA, 25 bp, Homo sapien
tggaataaacattgagagccttaag

SEQ ID NO: 410679 - DNA, 25 bp, Homo sapien
agccagctttggaaatctgtgtgct

SEQ ID NO: 410680 - DNA, 25 bp, Homo sapien
gctttggaaatctgtgtgctttcca

SEQ ID NO: 410681 - DNA, 25 bp, Homo sapien
gagaaatgagacttgagccagcttt

SEQ ID NO: 410682 - DNA, 25 bp, Homo sapien
gtgctttccaggcaaacaagctcac

SEQ ID NO: 410683 - DNA, 25 bp, Homo sapien
tgtgtctcttgtagcaaaggagccc

SEQ ID NO: 410684 - DNA, 25 bp, Homo sapien
gcacatcgggcatcatcagactcag

SEQ ID NO: 410685 - DNA, 25 bp, Homo sapien
aggtctaaatgaggtgttccctcca

SEQ ID NO: 410686 - DNA, 25 bp, Homo sapien
agtaacctctcccaacttgacatgc

SEQ ID NO: 410687 - DNA, 25 bp, Homo sapien
ctggcatcttcagggaaccaagcat

SEQ ID NO: 410688 - DNA, 25 bp, Homo sapien
tgaaggcggtgttagccaggccaca

SEQ ID NO: 410689 - DNA, 25 bp, Homo sapien
gaatggacatgtggcattgtttgca

SEQ ID NO: 410690 - DNA, 25 bp, Homo sapien
cacagaggtgtgaacccactggcat

SEQ ID NO: 410691 - DNA, 25 bp, Homo sapien
tggtgttcccttacataatttcagg

SEQ ID NO: 410692 - DNA, 25 bp, Homo sapien
tcccatgcttaagatgttgaacttg

SEQ ID NO: 410693 - DNA, 25 bp, Homo sapien
cttgctgggtcctatttggtgttcc

SEQ ID NO: 410694 - DNA, 25 bp, Homo sapien
tctgaatttgaggatcaactttgcc

SEQ ID NO: 410695 - DNA, 25 bp, Homo sapien
tcagcagttggatcacagttgagag

SEQ ID NO: 410696 - DNA, 25 bp, Homo sapien
gaagtccttctcaggacaaggaagg

SEQ ID NO: 410697 - DNA, 25 bp, Homo sapien
tgggcctcggcagcaatttggcttt

SEQ ID NO: 410698 - DNA, 25 bp, Homo sapien
tgcagggatactgacagggaagtcc

SEQ ID NO: 410699 - DNA, 25 bp, Homo sapien
taataactgtttcacgatgcatgag

SEQ ID NO: 410700 - DNA, 25 bp, Homo sapien
taactgtttcacgatgcatgagact

SEQ ID NO: 410701 - DNA, 25 bp, Homo sapien
agtactgtagcttaataactgtttc

SEQ ID NO: 410702 - DNA, 25 bp, Homo sapien
tgtttcacgatgcatgagactgcca

SEQ ID NO: 410703 - DNA, 25 bp, Homo sapien
ttccttaattcagttgaagatccat

SEQ ID NO: 410704 - DNA, 25 bp, Homo sapien
tagaggtcctagcatgtaatacatg

SEQ ID NO: 410705 - DNA, 25 bp, Homo sapien
taacaattcatataagcagtagagg

SEQ ID NO: 410706 - DNA, 25 bp, Homo sapien
gcattgaatattggtatagggatcc

SEQ ID NO: 410707 - DNA, 25 bp, Homo sapien
aaacctggctgttatatacataata

SEQ ID NO: 410708 - DNA, 25 bp, Homo sapien
aaaattaatgcactgtttgtcttta

SEQ ID NO: 410709 - DNA, 25 bp, Homo sapien
tttcaaaaattaatgcactgtttgt

SEQ ID NO: 410710 - DNA, 25 bp, Homo sapien
tcaaaaattaatgcactgtttgtct

SEQ ID NO: 410711 - DNA, 25 bp, Homo sapien
caaaaattaatgcactgtttgtctt

SEQ ID NO: 410712 - DNA, 25 bp, Homo sapien
acaaaaggagacttgtgaaagaatg

SEQ ID NO: 410713 - DNA, 25 bp, Homo sapien
caggcttttcaacattcttctacaa

SEQ ID NO: 410714 - DNA, 25 bp, Homo sapien
taaaaaattatcaggcttttcaaca

SEQ ID NO: 410715 - DNA, 25 bp, Homo sapien
tcttctacaagttaataaaacagaa

SEQ ID NO: 410716 - DNA, 25 bp, Homo sapien
acagaaatggtacaagaaggaaatt

SEQ ID NO: 410717 - DNA, 25 bp, Homo sapien
gacagacgtcgacacaaactttcaa

SEQ ID NO: 410718 - DNA, 25 bp, Homo sapien
tttgactcaggtacccacataggag

SEQ ID NO: 410719 - DNA, 25 bp, Homo sapien
cattcatttaagctagacagacgtc

SEQ ID NO: 410720 - DNA, 25 bp, Homo sapien
tttatattgatgaaacctcaaagtc

SEQ ID NO: 410721 - DNA, 25 bp, Homo sapien
tcttttatttatattgatgaaacct

SEQ ID NO: 410722 - DNA, 25 bp, Homo sapien
aagtctgtactcaaatacttattaa

SEQ ID NO: 410723 - DNA, 25 bp, Homo sapien
tatttatattgatgaaacctcaaag

SEQ ID NO: 410724 - DNA, 25 bp, Homo sapien
taggatttctaactcctaggctaaa

SEQ ID NO: 410725 - DNA, 25 bp, Homo sapien
aaacagcatatcagaaagccattca

SEQ ID NO: 410726 - DNA, 25 bp, Homo sapien
tacaatgctgattaaagccttcatt

SEQ ID NO: 410727 - DNA, 25 bp, Homo sapien
tggaggacattaatccctaagctgt

SEQ ID NO: 410728 - DNA, 25 bp, Homo sapien
ttcagtgtaatggactggcatttca

SEQ ID NO: 410729 - DNA, 25 bp, Homo sapien
tccctgaaaagcaatagttgagttc

SEQ ID NO: 410730 - DNA, 25 bp, Homo sapien
gctatgtcgtggagaaattacagta

SEQ ID NO: 410731 - DNA, 25 bp, Homo sapien
ttcaaccctatccatgatttccctg

SEQ ID NO: 410732 - DNA, 25 bp, Homo sapien
taatatctcattctgctgaaatagc

SEQ ID NO: 410733 - DNA, 25 bp, Homo sapien
gagtagatgcttgaaccaccttaga

SEQ ID NO: 410734 - DNA, 25 bp, Homo sapien
tgatgcacagttcctgtaattaaga

SEQ ID NO: 410735 - DNA, 25 bp, Homo sapien
taagattaggcagttaagaacagta

SEQ ID NO: 410736 - DNA, 25 bp, Homo sapien
tagacgctcggtgacttctttccgg

SEQ ID NO: 410737 - DNA, 25 bp, Homo sapien
tgccgtggtccatcctaagtagaga

SEQ ID NO: 410738 - DNA, 25 bp, Homo sapien
gaaggtatcgagtatctgtagctac

SEQ ID NO: 410739 - DNA, 25 bp, Homo sapien
caacaatcagcaccagtgccgtggt

SEQ ID NO: 410740 - DNA, 25 bp, Homo sapien
tctggctgcctgtaggtccggagaa

SEQ ID NO: 410741 - DNA, 25 bp, Homo sapien
gaagatgattccagccgtcagcaga

SEQ ID NO: 410742 - DNA, 25 bp, Homo sapien
tgaaagccaagaaggacatcacgga

SEQ ID NO: 410743 - DNA, 25 bp, Homo sapien
tgttttcaatgaaggccgacactct

SEQ ID NO: 410744 - DNA, 25 bp, Homo sapien
agcgatttctaaggcatgggttgcc

SEQ ID NO: 410745 - DNA, 25 bp, Homo sapien
tccaacaccaccaagaaacagccca

SEQ ID NO: 410746 - DNA, 25 bp, Homo sapien
aaacagcccagcgatttctaaggca

SEQ ID NO: 410747 - DNA, 25 bp, Homo sapien
ccaccaagaaacagcccagcgattt

SEQ ID NO: 410748 - DNA, 25 bp, Homo sapien
tatcctctgggatgagttttagcca

SEQ ID NO: 410749 - DNA, 25 bp, Homo sapien
tagtaatgaactcggaacccagtgg

SEQ ID NO: 410750 - DNA, 25 bp, Homo sapien
ttgaagcagggttctctgtgccaca

SEQ ID NO: 410751 - DNA, 25 bp, Homo sapien
tcctgtagtaatgaactcggaaccc

SEQ ID NO: 410752 - DNA, 25 bp, Homo sapien
gagccatctgtttataggtcctcat

SEQ ID NO: 410753 - DNA, 25 bp, Homo sapien
tcagtattcagaaggtggcaaaaag

SEQ ID NO: 410754 - DNA, 25 bp, Homo sapien
tattcagaaggtggcaaaaagcact

SEQ ID NO: 410755 - DNA, 25 bp, Homo sapien
aatacaaaaatgctgccctttctca

SEQ ID NO: 410756 - DNA, 25 bp, Homo sapien
gaaggtggcaaaaagcactctcctt

SEQ ID NO: 410757 - DNA, 25 bp, Homo sapien
cagggctgcccaacttacactcaga

SEQ ID NO: 410758 - DNA, 25 bp, Homo sapien
tttaggaacgtgaaagcttggctgc

SEQ ID NO: 410759 - DNA, 25 bp, Homo sapien
cactcagagggctaattaattcctg

SEQ ID NO: 410760 - DNA, 25 bp, Homo sapien
gctaattaattcctgccccctggtg

SEQ ID NO: 410761 - DNA, 25 bp, Homo sapien
caagcttgctatctttaggtactca

SEQ ID NO: 410762 - DNA, 25 bp, Homo sapien
ttctccactgacactataaacgttg

SEQ ID NO: 410763 - DNA, 25 bp, Homo sapien
ggcacaattgttggcttttggtaac

SEQ ID NO: 410764 - DNA, 25 bp, Homo sapien
taccatcctgcagtagaagtgaaat

SEQ ID NO: 410765 - DNA, 25 bp, Homo sapien
tatcccgtctggcgggcagcaatga

SEQ ID NO: 410766 - DNA, 25 bp, Homo sapien
ctatcccgtctggcgggcagcaatg

SEQ ID NO: 410767 - DNA, 25 bp, Homo sapien
tctggcgggcagcaatgagacccac

SEQ ID NO: 410768 - DNA, 25 bp, Homo sapien
ccgtctggcgggcagcaatgagacc

SEQ ID NO: 410769 - DNA, 25 bp, Homo sapien
ctgccacctccctccgaaatgatgc

SEQ ID NO: 410770 - DNA, 25 bp, Homo sapien
acctccctccgaaatgatgctccac

SEQ ID NO: 410771 - DNA, 25 bp, Homo sapien
ccacctccctccgaaatgatgctcc

SEQ ID NO: 410772 - DNA, 25 bp, Homo sapien
tgccacctccctccgaaatgatgct

SEQ ID NO: 410773 - DNA, 25 bp, Homo sapien
ggccagcagttcctctttgccttat

SEQ ID NO: 410774 - DNA, 25 bp, Homo sapien
ccagcagttcctctttgccttatat

SEQ ID NO: 410775 - DNA, 25 bp, Homo sapien
gtggccagcagttcctctttgcctt

SEQ ID NO: 410776 - DNA, 25 bp, Homo sapien
ttgtggccagcagttcctctttgcc

SEQ ID NO: 410777 - DNA, 25 bp, Homo sapien
ccttcaggatgggtttgtcaatttg

SEQ ID NO: 410778 - DNA, 25 bp, Homo sapien
ctgtggtatgcccagccagccttca

SEQ ID NO: 410779 - DNA, 25 bp, Homo sapien
aggatgggtttgtcaatttggccac

SEQ ID NO: 410780 - DNA, 25 bp, Homo sapien
ccagccttcaggatgggtttgtcaa

SEQ ID NO: 410781 - DNA, 25 bp, Homo sapien
ggtagctttacacggctcttcttgg

SEQ ID NO: 410782 - DNA, 25 bp, Homo sapien
gccagagggtagctttacacggctc

SEQ ID NO: 410783 - DNA, 25 bp, Homo sapien
gagggtagctttacacggctcttct

SEQ ID NO: 410784 - DNA, 25 bp, Homo sapien
gagccagagggtagctttacacggc

SEQ ID NO: 410785 - DNA, 25 bp, Homo sapien
tatccacagagagaacattgccaat

SEQ ID NO: 410786 - DNA, 25 bp, Homo sapien
gaacattgccaatgttgagctgggc

SEQ ID NO: 410787 - DNA, 25 bp, Homo sapien
ctctcaggcatggtatccacagaga

SEQ ID NO: 410788 - DNA, 25 bp, Homo sapien
gcatggtatccacagagagaacatt

SEQ ID NO: 410789 - DNA, 25 bp, Homo sapien
tgttactaactgggttctgaacact

SEQ ID NO: 410790 - DNA, 25 bp, Homo sapien
cactctttgttactaactgggttct

SEQ ID NO: 410791 - DNA, 25 bp, Homo sapien
ttgttactaactgggttctgaacac

SEQ ID NO: 410792 - DNA, 25 bp, Homo sapien
agaaaccactctttgttactaactg

SEQ ID NO: 410793 - DNA, 25 bp, Homo sapien
agggtcagggatgaaaggcacattc

SEQ ID NO: 410794 - DNA, 25 bp, Homo sapien
ggcacattcttctcggatatatcaa

SEQ ID NO: 410795 - DNA, 25 bp, Homo sapien
gcaatttgtacatgaataaagaagg

SEQ ID NO: 410796 - DNA, 25 bp, Homo sapien
tggacagcccgtgggcaatttgtac

SEQ ID NO: 410797 - DNA, 25 bp, Homo sapien
tgttcttcaggttaggagcaatctt

SEQ ID NO: 410798 - DNA, 25 bp, Homo sapien
cttttgttcttcaggttaggagcaa

SEQ ID NO: 410799 - DNA, 25 bp, Homo sapien
ttcttcaggttaggagcaatcttct

SEQ ID NO: 410800 - DNA, 25 bp, Homo sapien
tttgttcttcaggttaggagcaatc

SEQ ID NO: 410801 - DNA, 25 bp, Homo sapien
gccatccgaatgaatttgcatgctg

SEQ ID NO: 410802 - DNA, 25 bp, Homo sapien
ctatcggcttattagcaaggtgcta

SEQ ID NO: 410803 - DNA, 25 bp, Homo sapien
cttaggcatggagaacaaaagctga

SEQ ID NO: 410804 - DNA, 25 bp, Homo sapien
caggaaaggtaggtgataatcacac

SEQ ID NO: 410805 - DNA, 25 bp, Homo sapien
cagccaaagtaagaaagccggtgat

SEQ ID NO: 410806 - DNA, 25 bp, Homo sapien
aataatgatgttaccttcagggtca

SEQ ID NO: 410807 - DNA, 25 bp, Homo sapien
caaatggagtctcttcggtaagtcc

SEQ ID NO: 410808 - DNA, 25 bp, Homo sapien
cagacaagtgacagtgacagccaaa

SEQ ID NO: 410809 - DNA, 25 bp, Homo sapien
gtacaaagagcaataacagaacaac

SEQ ID NO: 410810 - DNA, 25 bp, Homo sapien
tacaaagagcaataacagaacaaca

SEQ ID NO: 410811 - DNA, 25 bp, Homo sapien
caaagcagttggaaccgttgcggag

SEQ ID NO: 410812 - DNA, 25 bp, Homo sapien
tagtagaatcttccccattgggcaa

SEQ ID NO: 410813 - DNA, 25 bp, Homo sapien
taacataatggtgagacgtagctgg

SEQ ID NO: 410814 - DNA, 25 bp, Homo sapien
taaatagctcagtggtcggcagctc

SEQ ID NO: 410815 - DNA, 25 bp, Homo sapien
ctggggctgacgttggtagtttcac

SEQ ID NO: 410816 - DNA, 25 bp, Homo sapien
ggctggggctgacgttggtagtttc

SEQ ID NO: 410817 - DNA, 25 bp, Homo sapien
tggtctgggtgcttgggctgcagct

SEQ ID NO: 410818 - DNA, 25 bp, Homo sapien
ctggggctggggctgacgttggtag

SEQ ID NO: 410819 - DNA, 25 bp, Homo sapien
tgacgggtcacaaccagtggtactg

SEQ ID NO: 410820 - DNA, 25 bp, Homo sapien
acaaccagtggtactgcaggtcttg

SEQ ID NO: 410821 - DNA, 25 bp, Homo sapien
acagaggagtttgacgggtcacaac

SEQ ID NO: 410822 - DNA, 25 bp, Homo sapien
ggagtttgacgggtcacaaccagtg

SEQ ID NO: 410823 - DNA, 25 bp, Homo sapien
gattcttggcagtaatccaggagcc

SEQ ID NO: 410824 - DNA, 25 bp, Homo sapien
tactgcagacaccaggatagcctgt

SEQ ID NO: 410825 - DNA, 25 bp, Homo sapien
tccttggtagctactgggtaagcag

SEQ ID NO: 410826 - DNA, 25 bp, Homo sapien
gcctgtagtagacatggagcctgca

SEQ ID NO: 410827 - DNA, 25 bp, Homo sapien
ccctggtgattgtcaaaagcctctc

SEQ ID NO: 410828 - DNA, 25 bp, Homo sapien
tctgtggcctaaggacgttttatac

SEQ ID NO: 410829 - DNA, 25 bp, Homo sapien
tggtgattgtcaaaagcctctccag

SEQ ID NO: 410830 - DNA, 25 bp, Homo sapien
accttccctggtgattgtcaaaagc

SEQ ID NO: 410831 - DNA, 25 bp, Homo sapien
ggggcaataacacagcaacatctca

SEQ ID NO: 410832 - DNA, 25 bp, Homo sapien
gggcaataacacagcaacatctcat

SEQ ID NO: 410833 - DNA, 25 bp, Homo sapien
agggccatatactggtaacggcttc

SEQ ID NO: 410834 - DNA, 25 bp, Homo sapien
ccatatactggtaacggcttctcat

SEQ ID NO: 410835 - DNA, 25 bp, Homo sapien
gggccatatactggtaacggcttct

SEQ ID NO: 410836 - DNA, 25 bp, Homo sapien
gccatatactggtaacggcttctca

SEQ ID NO: 410837 - DNA, 25 bp, Homo sapien
cacaattgtgtcctactctaatctc

SEQ ID NO: 410838 - DNA, 25 bp, Homo sapien
ttctgtacatgattcctctgcacaa

SEQ ID NO: 410839 - DNA, 25 bp, Homo sapien
ttttctgtacatgattcctctgcac

SEQ ID NO: 410840 - DNA, 25 bp, Homo sapien
tgcacaattgtgtcctactctaatc

SEQ ID NO: 410841 - DNA, 25 bp, Homo sapien
atggcaggcttgagtagaaaataaa

SEQ ID NO: 410842 - DNA, 25 bp, Homo sapien
aaagaccattgtcgtttgagtggca

SEQ ID NO: 410843 - DNA, 25 bp, Homo sapien
tatcaggttcatagcgatggcaggc

SEQ ID NO: 410844 - DNA, 25 bp, Homo sapien
gaaatatagcaaatatcaggttcat

SEQ ID NO: 410845 - DNA, 25 bp, Homo sapien
gaaggctttggagagtcatatgcat

SEQ ID NO: 410846 - DNA, 25 bp, Homo sapien
cgtggtctgaaggctttggagagtc

SEQ ID NO: 410847 - DNA, 25 bp, Homo sapien
tggtctgaaggctttggagagtcat

SEQ ID NO: 410848 - DNA, 25 bp, Homo sapien
ctgaaggctttggagagtcatatgc

SEQ ID NO: 410849 - DNA, 25 bp, Homo sapien
gaactatgggatgagataggaagac

SEQ ID NO: 410850 - DNA, 25 bp, Homo sapien
tgggatatggactcatcggaaacaa

SEQ ID NO: 410851 - DNA, 25 bp, Homo sapien
agacagctagttccttgatgggata

SEQ ID NO: 410852 - DNA, 25 bp, Homo sapien
gacagctatcagattggtaacttgg

SEQ ID NO: 410853 - DNA, 25 bp, Homo sapien
gagcacaagctttagaaatcaccag

SEQ ID NO: 410854 - DNA, 25 bp, Homo sapien
cacaagctttagaaatcaccagaag

SEQ ID NO: 410855 - DNA, 25 bp, Homo sapien
acaagctttagaaatcaccagaagc

SEQ ID NO: 410856 - DNA, 25 bp, Homo sapien
gagagcacaagctttagaaatcacc

SEQ ID NO: 410857 - DNA, 25 bp, Homo sapien
gcaacattgaatagcattgtaaact

SEQ ID NO: 410858 - DNA, 25 bp, Homo sapien
gcaaagaagcaaaagtccatggagt

SEQ ID NO: 410859 - DNA, 25 bp, Homo sapien
gaatttttgttgtggatgctcagag

SEQ ID NO: 410860 - DNA, 25 bp, Homo sapien
gcagcttgcattagatcaggcacag

SEQ ID NO: 410861 - DNA, 25 bp, Homo sapien
caagatggacgacacgtgctgaaca

SEQ ID NO: 410862 - DNA, 25 bp, Homo sapien
ttgggcacacagtctcctatgggct

SEQ ID NO: 410863 - DNA, 25 bp, Homo sapien
tttgaggacgataggccaagcaact

SEQ ID NO: 410864 - DNA, 25 bp, Homo sapien
tagtgggtaagtagaggacatctcc

SEQ ID NO: 410865 - DNA, 25 bp, Homo sapien
aaggtggtgcttctgcgtgcagact

SEQ ID NO: 410866 - DNA, 25 bp, Homo sapien
taaaactggatgctccttgcaatgc

SEQ ID NO: 410867 - DNA, 25 bp, Homo sapien
tatctataaaccaatgcgactgagt

SEQ ID NO: 410868 - DNA, 25 bp, Homo sapien
tgagtgtctgaagtttgttctgccc

SEQ ID NO: 410869 - DNA, 25 bp, Homo sapien
gaatttcctactgccacctttgact

SEQ ID NO: 410870 - DNA, 25 bp, Homo sapien
gaaaatgacaacatagagcttccca

SEQ ID NO: 410871 - DNA, 25 bp, Homo sapien
tggaaagtgggaaaacctgttatgc

SEQ ID NO: 410872 - DNA, 25 bp, Homo sapien
taggctatggaagaagatgtcaagg

SEQ ID NO: 410873 - DNA, 25 bp, Homo sapien
tgtggctcaggtgcaacattgacca

SEQ ID NO: 410874 - DNA, 25 bp, Homo sapien
gctgtcctttcgcagggcctggaat

SEQ ID NO: 410875 - DNA, 25 bp, Homo sapien
gaactttctgattggcacgctgtcc

SEQ ID NO: 410876 - DNA, 25 bp, Homo sapien
cccttgaggcttgcaggttggcagc

SEQ ID NO: 410877 - DNA, 25 bp, Homo sapien
atcggtagaagccagatccacaagt

SEQ ID NO: 410878 - DNA, 25 bp, Homo sapien
tcagagtaagtcgactggcagggac

SEQ ID NO: 410879 - DNA, 25 bp, Homo sapien
aagagaacatatgttgggtggcaga

SEQ ID NO: 410880 - DNA, 25 bp, Homo sapien
ttagcaagttgatcggtagaagcca

SEQ ID NO: 410881 - DNA, 25 bp, Homo sapien
taggggtttcccagcaagtctcctg

SEQ ID NO: 410882 - DNA, 25 bp, Homo sapien
gggtttcccagcaagtctcctgaaa

SEQ ID NO: 410883 - DNA, 25 bp, Homo sapien
tttcccagcaagtctcctgaaagcc

SEQ ID NO: 410884 - DNA, 25 bp, Homo sapien
ctaggggtttcccagcaagtctcct

SEQ ID NO: 410885 - DNA, 25 bp, Homo sapien
cacaggtagccctcacaggaatggg

SEQ ID NO: 410886 - DNA, 25 bp, Homo sapien
gcacaggtagccctcacaggaatgg

SEQ ID NO: 410887 - DNA, 25 bp, Homo sapien
agcacaggtagccctcacaggaatg

SEQ ID NO: 410888 - DNA, 25 bp, Homo sapien
acaggtagccctcacaggaatggga

SEQ ID NO: 410889 - DNA, 25 bp, Homo sapien
taacgaatcacttgtttcaaaatta

SEQ ID NO: 410890 - DNA, 25 bp, Homo sapien
tctgaaagaactagcctgtccagcc

SEQ ID NO: 410891 - DNA, 25 bp, Homo sapien
aaaggatgaagagctagtagtaaga

SEQ ID NO: 410892 - DNA, 25 bp, Homo sapien
taaatgaatttattacgtgaaacaa

SEQ ID NO: 410893 - DNA, 25 bp, Homo sapien
cagctctacgtagagactgagacac

SEQ ID NO: 410894 - DNA, 25 bp, Homo sapien
taacagctctacgtagagactgaga

SEQ ID NO: 410895 - DNA, 25 bp, Homo sapien
tagagactgagacactttgcttaaa

SEQ ID NO: 410896 - DNA, 25 bp, Homo sapien
tacgtagagactgagacactttgct

SEQ ID NO: 410897 - DNA, 25 bp, Homo sapien
tcagcaagttgatctgcagaaggtt

SEQ ID NO: 410898 - DNA, 25 bp, Homo sapien
cataggctggtctgtaacaaggaga

SEQ ID NO: 410899 - DNA, 25 bp, Homo sapien
ctgcagaaggttgatccataggctg

SEQ ID NO: 410900 - DNA, 25 bp, Homo sapien
ggttgatccataggctggtctgtaa

SEQ ID NO: 410901 - DNA, 25 bp, Homo sapien
ccagagtaagtcgtcttgcaaggac

SEQ ID NO: 410902 - DNA, 25 bp, Homo sapien
taagtcgtcttgcaaggactgcaga

SEQ ID NO: 410903 - DNA, 25 bp, Homo sapien
tcgtcttgcaaggactgcagagcaa

SEQ ID NO: 410904 - DNA, 25 bp, Homo sapien
agacccagagtaagtcgtcttgcaa

SEQ ID NO: 410905 - DNA, 25 bp, Homo sapien
gaaaagccacgtgaggatgctgggt

SEQ ID NO: 410906 - DNA, 25 bp, Homo sapien
ggaaaagccacgtgaggatgctggg

SEQ ID NO: 410907 - DNA, 25 bp, Homo sapien
agttcagctgagttatagtggaaag

SEQ ID NO: 410908 - DNA, 25 bp, Homo sapien
ctcctctaacttcactacagctctt

SEQ ID NO: 410909 - DNA, 25 bp, Homo sapien
ccttggcttcccagttcaatgagtt

SEQ ID NO: 410910 - DNA, 25 bp, Homo sapien
gttactgtggataaaactgctataa

SEQ ID NO: 410911 - DNA, 25 bp, Homo sapien
tgctcctttggatcaatctgcttcc

SEQ ID NO: 410912 - DNA, 25 bp, Homo sapien
gaattacacattacgttgccttctg

SEQ ID NO: 410913 - DNA, 25 bp, Homo sapien
ccccttgcatcagcgtgtcctggat

SEQ ID NO: 410914 - DNA, 25 bp, Homo sapien
gaagctgcccaaggcattaggagcc

SEQ ID NO: 410915 - DNA, 25 bp, Homo sapien
gaggactataacctgcagagccaca

SEQ ID NO: 410916 - DNA, 25 bp, Homo sapien
cctgtatcctttttgttctggccaa

SEQ ID NO: 410917 - DNA, 25 bp, Homo sapien
cataagagggcacaggatggctgct

SEQ ID NO: 410918 - DNA, 25 bp, Homo sapien
gctggccaggagaaacatggtagac

SEQ ID NO: 410919 - DNA, 25 bp, Homo sapien
aacatggtagacattgggtgaagga

SEQ ID NO: 410920 - DNA, 25 bp, Homo sapien
tggctgctaggttctttgctggcca

SEQ ID NO: 410921 - DNA, 25 bp, Homo sapien
tctgtgagtttctgccatcttagag

SEQ ID NO: 410922 - DNA, 25 bp, Homo sapien
tcatctgtgagtttctgccatctta

SEQ ID NO: 410923 - DNA, 25 bp, Homo sapien
tgtgagtttctgccatcttagagat

SEQ ID NO: 410924 - DNA, 25 bp, Homo sapien
catctgtgagtttctgccatcttag

SEQ ID NO: 410925 - DNA, 25 bp, Homo sapien
taccagtggtgtgggtttccactgc

SEQ ID NO: 410926 - DNA, 25 bp, Homo sapien
gctgccttccctgtttgatctgtta

SEQ ID NO: 410927 - DNA, 25 bp, Homo sapien
agatctccacttccctacgaaggca

SEQ ID NO: 410928 - DNA, 25 bp, Homo sapien
ttctattagatctctcatgggcttt

SEQ ID NO: 410929 - DNA, 25 bp, Homo sapien
gagcctgggtagtgcaagtaacccc

SEQ ID NO: 410930 - DNA, 25 bp, Homo sapien
caatgtctgacagctgttgggcctc

SEQ ID NO: 410931 - DNA, 25 bp, Homo sapien
gataacaagatgaatggaaccacct

SEQ ID NO: 410932 - DNA, 25 bp, Homo sapien
gagacccaacatgcatagtcaggca

SEQ ID NO: 410933 - DNA, 25 bp, Homo sapien
gaatattttctagttactggaattc

SEQ ID NO: 410934 - DNA, 25 bp, Homo sapien
tattttctagttactggaattcaga

SEQ ID NO: 410935 - DNA, 25 bp, Homo sapien
gcaactactctaggggaaataacta

SEQ ID NO: 410936 - DNA, 25 bp, Homo sapien
ggagatacagtaagagaagtgtgct

SEQ ID NO: 410937 - DNA, 25 bp, Homo sapien
gaatacactggatacaaagcccagg

SEQ ID NO: 410938 - DNA, 25 bp, Homo sapien
tacacaggatgtctggcacctgcgg

SEQ ID NO: 410939 - DNA, 25 bp, Homo sapien
gagtaagtcatctggcagggcctgc

SEQ ID NO: 410940 - DNA, 25 bp, Homo sapien
caatagcaggagatctggcaggtgc

SEQ ID NO: 410941 - DNA, 25 bp, Homo sapien
gctcagaactcctgttaacatgtct

SEQ ID NO: 410942 - DNA, 25 bp, Homo sapien
tgagctcagaactcctgttaacatg

SEQ ID NO: 410943 - DNA, 25 bp, Homo sapien
tcagaactcctgttaacatgtctta

SEQ ID NO: 410944 - DNA, 25 bp, Homo sapien
agaactcctgttaacatgtcttaca

SEQ ID NO: 410945 - DNA, 25 bp, Homo sapien
gctgtcaggagacctactgtgagcc

SEQ ID NO: 410946 - DNA, 25 bp, Homo sapien
gactaactacataagatcccttgga

SEQ ID NO: 410947 - DNA, 25 bp, Homo sapien
tgcactttggccagatcctatcaga

SEQ ID NO: 410948 - DNA, 25 bp, Homo sapien
aaacactggccttggatctcttggt

SEQ ID NO: 410949 - DNA, 25 bp, Homo sapien
agctcagcccagaatctcatttcta

SEQ ID NO: 410950 - DNA, 25 bp, Homo sapien
cagctcagcccagaatctcatttct

SEQ ID NO: 410951 - DNA, 25 bp, Homo sapien
cattatctcttagtctatgatgatc

SEQ ID NO: 410952 - DNA, 25 bp, Homo sapien
ctatgatgatcatgagtgggtgtga

SEQ ID NO: 410953 - DNA, 25 bp, Homo sapien
catgagtgggtgtgatctcaagaga

SEQ ID NO: 410954 - DNA, 25 bp, Homo sapien
tgatctcaagagacaacgtaagcat

SEQ ID NO: 410955 - DNA, 25 bp, Homo sapien
tttttgcacctattaaccagcccca

SEQ ID NO: 410956 - DNA, 25 bp, Homo sapien
tattgacaatagtcccctagttgtg

SEQ ID NO: 410957 - DNA, 25 bp, Homo sapien
agtaactgtccttctattctctacc

SEQ ID NO: 410958 - DNA, 25 bp, Homo sapien
gaggctttcaaagtgtaataatcac

SEQ ID NO: 410959 - DNA, 25 bp, Homo sapien
gcaaccaacgttgcacagcagaata

SEQ ID NO: 410960 - DNA, 25 bp, Homo sapien
ccaagaagacgttcagctaacagca

SEQ ID NO: 410961 - DNA, 25 bp, Homo sapien
cttgccgcaacctcaactgaagggt

SEQ ID NO: 410962 - DNA, 25 bp, Homo sapien
tccaggaacacttgagggacacttg

SEQ ID NO: 410963 - DNA, 25 bp, Homo sapien
tatgatttcaggtgacggactccga

SEQ ID NO: 410964 - DNA, 25 bp, Homo sapien
cacgggacaggaccaaacacatttg

SEQ ID NO: 410965 - DNA, 25 bp, Homo sapien
tagataacatcaaggtaatggtggt

SEQ ID NO: 410966 - DNA, 25 bp, Homo sapien
aatatctctccattgatgctgaagg

SEQ ID NO: 410967 - DNA, 25 bp, Homo sapien
gagaatccgtatcctccattgtacg

SEQ ID NO: 410968 - DNA, 25 bp, Homo sapien
gccagagaatccgtatcctccattg

SEQ ID NO: 410969 - DNA, 25 bp, Homo sapien
tatcctccattgtacgatgggcggc

SEQ ID NO: 410970 - DNA, 25 bp, Homo sapien
tccgtatcctccattgtacgatggg

SEQ ID NO: 410971 - DNA, 25 bp, Homo sapien
ttctctgacctgctgagtgtcaaaa

SEQ ID NO: 410972 - DNA, 25 bp, Homo sapien
ttgacatcaatgcaagggccatgaa

SEQ ID NO: 410973 - DNA, 25 bp, Homo sapien
gaatgaagcatatgactttgacatc

SEQ ID NO: 410974 - DNA, 25 bp, Homo sapien
gtctcatatttagttggcattcaaa

SEQ ID NO: 410975 - DNA, 25 bp, Homo sapien
gattcctgctgtcagagtagcattt

SEQ ID NO: 410976 - DNA, 25 bp, Homo sapien
gttactgtaacccaatttcattcca

SEQ ID NO: 410977 - DNA, 25 bp, Homo sapien
gagtagcatttaacccaacaatagc

SEQ ID NO: 410978 - DNA, 25 bp, Homo sapien
tgttgtaaggctgaacgcaagttcc

SEQ ID NO: 410979 - DNA, 25 bp, Homo sapien
tgtgtagctctgtcagagcatgtga

SEQ ID NO: 410980 - DNA, 25 bp, Homo sapien
tcttgtgtagctctgtcagagcatg

SEQ ID NO: 410981 - DNA, 25 bp, Homo sapien
tttcttgtgtagctctgtcagagca

SEQ ID NO: 410982 - DNA, 25 bp, Homo sapien
gaataaattacatagcattaagaat

SEQ ID NO: 410983 - DNA, 25 bp, Homo sapien
tatcttctgtagcatgatgggcagc

SEQ ID NO: 410984 - DNA, 25 bp, Homo sapien
tctgtggccacaaccatatctgcat

SEQ ID NO: 410985 - DNA, 25 bp, Homo sapien
atccacagccgtagccatagcacat

SEQ ID NO: 410986 - DNA, 25 bp, Homo sapien
agtagaagccagtgaatctatatct

SEQ ID NO: 410987 - DNA, 25 bp, Homo sapien
gctccagcatgatctttgttgtcca

SEQ ID NO: 410988 - DNA, 25 bp, Homo sapien
cagctctgggaaagtcctcttataa

SEQ ID NO: 410989 - DNA, 25 bp, Homo sapien
tctgagatgttaaattcttttgtgc

SEQ ID NO: 410990 - DNA, 25 bp, Homo sapien
tagagatgtgggtatacagagaaaa

SEQ ID NO: 410991 - DNA, 25 bp, Homo sapien
cctccatagtatgatgggcggtagc

SEQ ID NO: 410992 - DNA, 25 bp, Homo sapien
ccatagtatgatgggcggtagcagc

SEQ ID NO: 410993 - DNA, 25 bp, Homo sapien
tagtatgatgggcggtagcagccat

SEQ ID NO: 410994 - DNA, 25 bp, Homo sapien
agtatgatgggcggtagcagccata

SEQ ID NO: 410995 - DNA, 25 bp, Homo sapien
atttggttaaattgaatgatcttct

SEQ ID NO: 410996 - DNA, 25 bp, Homo sapien
tttggttaaattgaatgatcttctt

SEQ ID NO: 410997 - DNA, 25 bp, Homo sapien
ttggttaaattgaatgatcttctta

SEQ ID NO: 410998 - DNA, 25 bp, Homo sapien
tggttaaattgaatgatcttcttat

SEQ ID NO: 410999 - DNA, 25 bp, Homo sapien
gatttcagtagaattgagaatccat

SEQ ID NO: 411000 - DNA, 25 bp, Homo sapien
aggatttcagtagaattgagaatcc

SEQ ID NO: 411001 - DNA, 25 bp, Homo sapien
gcagtagccatatccgttgcctcca

SEQ ID NO: 411002 - DNA, 25 bp, Homo sapien
tgggcggcagtagccatatccgttg

SEQ ID NO: 411003 - DNA, 25 bp, Homo sapien
gcctctgtaatagctgccatagtag

SEQ ID NO: 411004 - DNA, 25 bp, Homo sapien
tgtaatagctgccatagtagctcat

SEQ ID NO: 411005 - DNA, 25 bp, Homo sapien
tagccatagcctaggccaccaaagc

SEQ ID NO: 411006 - DNA, 25 bp, Homo sapien
gcccaggcctctgtaatagctgcca

SEQ ID NO: 411007 - DNA, 25 bp, Homo sapien
ctcatgttaggttgtcagggaagga

SEQ ID NO: 411008 - DNA, 25 bp, Homo sapien
ggaacagagaaaccccacagttata

SEQ ID NO: 411009 - DNA, 25 bp, Homo sapien
ggtgatcttcttatgtcccctcatg

SEQ ID NO: 411010 - DNA, 25 bp, Homo sapien
taaacctcttagatgctaactgctc

SEQ ID NO: 411011 - DNA, 25 bp, Homo sapien
tcatcgaagcctccgtagccgtagc

SEQ ID NO: 411012 - DNA, 25 bp, Homo sapien
tccatagcatgatggacggcagctg

SEQ ID NO: 411013 - DNA, 25 bp, Homo sapien
gcggtatccatagcctccgaagcca

SEQ ID NO: 411014 - DNA, 25 bp, Homo sapien
gcagctgcggtatccatagcctccg

SEQ ID NO: 411015 - DNA, 25 bp, Homo sapien
tctcgttaatctttttgacgtctaa

SEQ ID NO: 411016 - DNA, 25 bp, Homo sapien
catgacctcaatgacataaaagaca

SEQ ID NO: 411017 - DNA, 25 bp, Homo sapien
tgacaacaatgattatggtatcttc

SEQ ID NO: 411018 - DNA, 25 bp, Homo sapien
tgacgtctaattgagggccatttgt

SEQ ID NO: 411019 - DNA, 25 bp, Homo sapien
gaaaccctgattcaatgtaatgatt

SEQ ID NO: 411020 - DNA, 25 bp, Homo sapien
tgctattcaagttaaacgtgtttat

SEQ ID NO: 411021 - DNA, 25 bp, Homo sapien
cctgattcaatgtaatgattccaga

SEQ ID NO: 411022 - DNA, 25 bp, Homo sapien
aaatacatgtcacaacagatgtcag

SEQ ID NO: 411023 - DNA, 25 bp, Homo sapien
tgttcgccttgctgaagcatacggg

SEQ ID NO: 411024 - DNA, 25 bp, Homo sapien
caagatcttggagttagagtatgag

SEQ ID NO: 411025 - DNA, 25 bp, Homo sapien
tacattgagaaaagtgttcgccttg

SEQ ID NO: 411026 - DNA, 25 bp, Homo sapien
gaagcatacgggcaagatcttggag

SEQ ID NO: 411027 - DNA, 25 bp, Homo sapien
tatccttcacggcatgatgggcggc

SEQ ID NO: 411028 - DNA, 25 bp, Homo sapien
atccttcacggcatgatgggcggca

SEQ ID NO: 411029 - DNA, 25 bp, Homo sapien
gagaatccatatccttcacggcatg

SEQ ID NO: 411030 - DNA, 25 bp, Homo sapien
tccatatccttcacggcatgatggg

SEQ ID NO: 411031 - DNA, 25 bp, Homo sapien
atcccaggcctctgtagtagctgcc

SEQ ID NO: 411032 - DNA, 25 bp, Homo sapien
cctctgtagtagctgccatagtatc

SEQ ID NO: 411033 - DNA, 25 bp, Homo sapien
tctgtagtagctgccatagtatctc

SEQ ID NO: 411034 - DNA, 25 bp, Homo sapien
tgtagtagctgccatagtatctcat

SEQ ID NO: 411035 - DNA, 25 bp, Homo sapien
gaatcctccacagccgtagcctagg

SEQ ID NO: 411036 - DNA, 25 bp, Homo sapien
cagtatcccccatagcatgatgggt

SEQ ID NO: 411037 - DNA, 25 bp, Homo sapien
atccagaagaccagtatcccccata

SEQ ID NO: 411038 - DNA, 25 bp, Homo sapien
cccatagcatgatgggtggcagcag

SEQ ID NO: 411039 - DNA, 25 bp, Homo sapien
tagaggatgagtctcccacggtgtc

SEQ ID NO: 411040 - DNA, 25 bp, Homo sapien
gagggtcagtcttcagataaatcac

SEQ ID NO: 411041 - DNA, 25 bp, Homo sapien
gaaaatactagatccagagggtact

SEQ ID NO: 411042 - DNA, 25 bp, Homo sapien
tcatcttgatgagagaccacaggag

SEQ ID NO: 411043 - DNA, 25 bp, Homo sapien
agccacagaagaagcgggagccgta

SEQ ID NO: 411044 - DNA, 25 bp, Homo sapien
agcgggagccgtagccatgaccata

SEQ ID NO: 411045 - DNA, 25 bp, Homo sapien
agccgtagccatgaccatagccaca

SEQ ID NO: 411046 - DNA, 25 bp, Homo sapien
agccatgaccatagccacagcagga

SEQ ID NO: 411047 - DNA, 25 bp, Homo sapien
catggtcgccgtagtagtttccgta

SEQ ID NO: 411048 - DNA, 25 bp, Homo sapien
agcctaggccttcgtatccacagca

SEQ ID NO: 411049 - DNA, 25 bp, Homo sapien
cacccatagccatggtcgccgtagt

SEQ ID NO: 411050 - DNA, 25 bp, Homo sapien
gcgcaggcttccatagccatagcct

SEQ ID NO: 411051 - DNA, 25 bp, Homo sapien
cgtgatggttgtggaggttgtcctt

SEQ ID NO: 411052 - DNA, 25 bp, Homo sapien
cttgggtaggaaggagtgtaggtga

SEQ ID NO: 411053 - DNA, 25 bp, Homo sapien
tgtccttgggtaggaaggagtgtag

SEQ ID NO: 411054 - DNA, 25 bp, Homo sapien
tgtggaggttgtccttgggtaggaa

SEQ ID NO: 411055 - DNA, 25 bp, Homo sapien
cttcagtatggatacttcctgtaga

SEQ ID NO: 411056 - DNA, 25 bp, Homo sapien
cttttatatgcctcaggatgggaat

SEQ ID NO: 411057 - DNA, 25 bp, Homo sapien
tcagtatggatacttcctgtagaag

SEQ ID NO: 411058 - DNA, 25 bp, Homo sapien
tatgcctcaggatgggaatgatcca

SEQ ID NO: 411059 - DNA, 25 bp, Homo sapien
gaaaccatgagctttgataacaact

SEQ ID NO: 411060 - DNA, 25 bp, Homo sapien
cttgaaaccatgagctttgataaca

SEQ ID NO: 411061 - DNA, 25 bp, Homo sapien
accatgagctttgataacaactacc

SEQ ID NO: 411062 - DNA, 25 bp, Homo sapien
ttcttgaaaccatgagctttgataa

SEQ ID NO: 411063 - DNA, 25 bp, Homo sapien
aaatctcagaacatgtgggcttcag

SEQ ID NO: 411064 - DNA, 25 bp, Homo sapien
tcaaggcagatgatgtgacaccatc

SEQ ID NO: 411065 - DNA, 25 bp, Homo sapien
gctccatcataaaagtcatcaaggc

SEQ ID NO: 411066 - DNA, 25 bp, Homo sapien
gaatctcagtatcacaggatagagg

SEQ ID NO: 411067 - DNA, 25 bp, Homo sapien
agagggagcgggagccatagccata

SEQ ID NO: 411068 - DNA, 25 bp, Homo sapien
agggagcgggagccatagccatagc

SEQ ID NO: 411069 - DNA, 25 bp, Homo sapien
gagggagcgggagccatagccatag

SEQ ID NO: 411070 - DNA, 25 bp, Homo sapien
atagccacagaacccatagccaggg

SEQ ID NO: 411071 - DNA, 25 bp, Homo sapien
catagccacagaacccatagccagg

SEQ ID NO: 411072 - DNA, 25 bp, Homo sapien
catagccaggggtgccatagtagtt

SEQ ID NO: 411073 - DNA, 25 bp, Homo sapien
gaacccatagccaggggtgccatag

SEQ ID NO: 411074 - DNA, 25 bp, Homo sapien
cttgggtaggaggaagtgtaggtga

SEQ ID NO: 411075 - DNA, 25 bp, Homo sapien
ttgggtaggaggaagtgtaggtgac

SEQ ID NO: 411076 - DNA, 25 bp, Homo sapien
tctacacctgaaccatccatttctg

SEQ ID NO: 411077 - DNA, 25 bp, Homo sapien
caagaacatcctcttctacacctga

SEQ ID NO: 411078 - DNA, 25 bp, Homo sapien
ctcttctacacctgaaccatccatt

SEQ ID NO: 411079 - DNA, 25 bp, Homo sapien
tcaagaacatcctcttctacacctg

SEQ ID NO: 411080 - DNA, 25 bp, Homo sapien
gggaaaggatctgttgttcaccagc

SEQ ID NO: 411081 - DNA, 25 bp, Homo sapien
ccagctcaccaggacagtgtcgaat

SEQ ID NO: 411082 - DNA, 25 bp, Homo sapien
tagaatcccctgtcgagtggctgct

SEQ ID NO: 411083 - DNA, 25 bp, Homo sapien
catggagagtatagatagaatcccc

SEQ ID NO: 411084 - DNA, 25 bp, Homo sapien
ttgaaatccccaaacagcaaatgtg

SEQ ID NO: 411085 - DNA, 25 bp, Homo sapien
tgaaatccccaaacagcaaatgtgt

SEQ ID NO: 411086 - DNA, 25 bp, Homo sapien
tacttgaatattctccacccagagg

SEQ ID NO: 411087 - DNA, 25 bp, Homo sapien
cctatcactcaatttttcccgtaag

SEQ ID NO: 411088 - DNA, 25 bp, Homo sapien
tactttccttgtcacgtacttgaat

SEQ ID NO: 411089 - DNA, 25 bp, Homo sapien
caacagccaccagtcttgttattac

SEQ ID NO: 411090 - DNA, 25 bp, Homo sapien
gagatggtattaagaagcagtgtga

SEQ ID NO: 411091 - DNA, 25 bp, Homo sapien
tatcatgagatggtattaagaagca

SEQ ID NO: 411092 - DNA, 25 bp, Homo sapien
ttagcttgatatcatgagatggtat

SEQ ID NO: 411093 - DNA, 25 bp, Homo sapien
aaatttatcctcatcttttgactga

SEQ ID NO: 411094 - DNA, 25 bp, Homo sapien
gctttgaatataaacgagtcagcag

SEQ ID NO: 411095 - DNA, 25 bp, Homo sapien
taaacgagtcagcaggcataattcc

SEQ ID NO: 411096 - DNA, 25 bp, Homo sapien
ctgtggttagctgagttacccatcc

SEQ ID NO: 411097 - DNA, 25 bp, Homo sapien
agcaggcataattcctgtggttagc

SEQ ID NO: 411098 - DNA, 25 bp, Homo sapien
gaaaagggcagatctcccctcgtat

SEQ ID NO: 411099 - DNA, 25 bp, Homo sapien
tctgtgagaattagggaccacttgt

SEQ ID NO: 411100 - DNA, 25 bp, Homo sapien
tcagaatgagcgaaaagggcagatc

SEQ ID NO: 411101 - DNA, 25 bp, Homo sapien
tcccctcgtatatttgcttctgtga

SEQ ID NO: 411102 - DNA, 25 bp, Homo sapien
caagaaatatggatgccactgtaac

SEQ ID NO: 411103 - DNA, 25 bp, Homo sapien
ccactgtaactacagttggaggcat

SEQ ID NO: 411104 - DNA, 25 bp, Homo sapien
tccatggtcatttaatacccaggtg

SEQ ID NO: 411105 - DNA, 25 bp, Homo sapien
tggaggcataaccacaaccaggtca

SEQ ID NO: 411106 - DNA, 25 bp, Homo sapien
gagccacatgcacattccccataga

SEQ ID NO: 411107 - DNA, 25 bp, Homo sapien
acagagccacatgcacattccccat

SEQ ID NO: 411108 - DNA, 25 bp, Homo sapien
ccacatgcacattccccatagacat

SEQ ID NO: 411109 - DNA, 25 bp, Homo sapien
cacatgcacattccccatagacatt

SEQ ID NO: 411110 - DNA, 25 bp, Homo sapien
ctgttagggattgcaacggattcaa

SEQ ID NO: 411111 - DNA, 25 bp, Homo sapien
tagggattgcaacggattcaaaagc

SEQ ID NO: 411112 - DNA, 25 bp, Homo sapien
tgcaacggattcaaaagcttccctt

SEQ ID NO: 411113 - DNA, 25 bp, Homo sapien
gattgcaacggattcaaaagcttcc

SEQ ID NO: 411114 - DNA, 25 bp, Homo sapien
tcagatcccgtagtagtaaccagcc

SEQ ID NO: 411115 - DNA, 25 bp, Homo sapien
caaccatagcttttgtcagatcccg

SEQ ID NO: 411116 - DNA, 25 bp, Homo sapien
tcttatggtctcctaaaccttcacc

SEQ ID NO: 411117 - DNA, 25 bp, Homo sapien
cagaactacagccaatcttatggtc

SEQ ID NO: 411118 - DNA, 25 bp, Homo sapien
ttcttttgtgattgtaaaagtgttc

SEQ ID NO: 411119 - DNA, 25 bp, Homo sapien
gtctctctaccacaaaccaactgtt

SEQ ID NO: 411120 - DNA, 25 bp, Homo sapien
gtaacttttcctcgtctctctacca

SEQ ID NO: 411121 - DNA, 25 bp, Homo sapien
ctgtttgtaacttttcctcgtctct

SEQ ID NO: 411122 - DNA, 25 bp, Homo sapien
tctctaccacaaaccaactgttcag

SEQ ID NO: 411123 - DNA, 25 bp, Homo sapien
tttcttgaatcaatggtgttatttc

SEQ ID NO: 411124 - DNA, 25 bp, Homo sapien
tcttgaatcaatggtgttatttctc

SEQ ID NO: 411125 - DNA, 25 bp, Homo sapien
ttcttgaatcaatggtgttatttct

SEQ ID NO: 411126 - DNA, 25 bp, Homo sapien
aagtggcttaactcctatgttctcc

SEQ ID NO: 411127 - DNA, 25 bp, Homo sapien
gtggcttaactcctatgttctccat

SEQ ID NO: 411128 - DNA, 25 bp, Homo sapien
ctgaaagtggcttaactcctatgtt

SEQ ID NO: 411129 - DNA, 25 bp, Homo sapien
gaaagtggcttaactcctatgttct

SEQ ID NO: 411130 - DNA, 25 bp, Homo sapien
ccagagccatattgacagccggagc

SEQ ID NO: 411131 - DNA, 25 bp, Homo sapien
gagctgtatttacagccgtagggag

SEQ ID NO: 411132 - DNA, 25 bp, Homo sapien
gtagcaaaatggtcgacagccccag

SEQ ID NO: 411133 - DNA, 25 bp, Homo sapien
tagggagagccgaatccatatccag

SEQ ID NO: 411134 - DNA, 25 bp, Homo sapien
tgtagcaaagtggtcggtagccaca

SEQ ID NO: 411135 - DNA, 25 bp, Homo sapien
caaagtggtcggtagccacagcagc

SEQ ID NO: 411136 - DNA, 25 bp, Homo sapien
aagtggtcggtagccacagcagcta

SEQ ID NO: 411137 - DNA, 25 bp, Homo sapien
cacagcagctagagctgtatccaca

SEQ ID NO: 411138 - DNA, 25 bp, Homo sapien
cacaaccatatccacagccggaact

SEQ ID NO: 411139 - DNA, 25 bp, Homo sapien
atagccacaaccatatccacagccg

SEQ ID NO: 411140 - DNA, 25 bp, Homo sapien
ccatagccacaaccatatccacagc

SEQ ID NO: 411141 - DNA, 25 bp, Homo sapien
aaccatatccacagccggaactcca

SEQ ID NO: 411142 - DNA, 25 bp, Homo sapien
tttagaagcaaatggtcctccgaca

SEQ ID NO: 411143 - DNA, 25 bp, Homo sapien
gcaaatggtcctccgacagtgatgt

SEQ ID NO: 411144 - DNA, 25 bp, Homo sapien
gaagcaaatggtcctccgacagtga

SEQ ID NO: 411145 - DNA, 25 bp, Homo sapien
ttttagaagcaaatggtcctccgac

SEQ ID NO: 411146 - DNA, 25 bp, Homo sapien
ccacagccataatgggagccaaacc

SEQ ID NO: 411147 - DNA, 25 bp, Homo sapien
cacagccataatgggagccaaaccc

SEQ ID NO: 411148 - DNA, 25 bp, Homo sapien
atagccacaggagttgccgtagtag

SEQ ID NO: 411149 - DNA, 25 bp, Homo sapien
tagccacaggagttgccgtagtagt

SEQ ID NO: 411150 - DNA, 25 bp, Homo sapien
ccatagccacaggagttgccgtagt

SEQ ID NO: 411151 - DNA, 25 bp, Homo sapien
catagccacaggagttgccgtagta

SEQ ID NO: 411152 - DNA, 25 bp, Homo sapien
tagggcagatgctactcgaactagt

SEQ ID NO: 411153 - DNA, 25 bp, Homo sapien
tactgattcactgaggactgacccc

SEQ ID NO: 411154 - DNA, 25 bp, Homo sapien
tgagtgtcatccatcaagtgcccct

SEQ ID NO: 411155 - DNA, 25 bp, Homo sapien
gaccccatttggatagacagttgat

SEQ ID NO: 411156 - DNA, 25 bp, Homo sapien
tgcagatggccaatatcttcctcag

SEQ ID NO: 411157 - DNA, 25 bp, Homo sapien
ggaaacatctacattcgcacccata

SEQ ID NO: 411158 - DNA, 25 bp, Homo sapien
tcaaggtgtagaagtccccaggtaa

SEQ ID NO: 411159 - DNA, 25 bp, Homo sapien
gcaagctgggcttctacattatcag

SEQ ID NO: 411160 - DNA, 25 bp, Homo sapien
caccctgctggcaattgcagtgttt

SEQ ID NO: 411161 - DNA, 25 bp, Homo sapien
tcttctcaccctgctggcaattgca

SEQ ID NO: 411162 - DNA, 25 bp, Homo sapien
tcagttgagctgtgatatgggtcat

SEQ ID NO: 411163 - DNA, 25 bp, Homo sapien
tttccttcagttgagctgtgatatg

SEQ ID NO: 411164 - DNA, 25 bp, Homo sapien
tgttcgcaaaacacatatcgctgac

SEQ ID NO: 411165 - DNA, 25 bp, Homo sapien
atcacataccgaatctcctagaagg

SEQ ID NO: 411166 - DNA, 25 bp, Homo sapien
cggttaatgctgatctcaatgctga

SEQ ID NO: 411167 - DNA, 25 bp, Homo sapien
gctgacttcacaggtctcgatgggt

SEQ ID NO: 411168 - DNA, 25 bp, Homo sapien
ggcagcttgaggaagcgtctgcttt

SEQ ID NO: 411169 - DNA, 25 bp, Homo sapien
tcaaaagtagctcatgacaagtggg

SEQ ID NO: 411170 - DNA, 25 bp, Homo sapien
tcatcacaagtcatgagtgtcatgg

SEQ ID NO: 411171 - DNA, 25 bp, Homo sapien
tcgaggtaagttggaaagcagtgtc

SEQ ID NO: 411172 - DNA, 25 bp, Homo sapien
gcccactggagagtaggtgctgcca

SEQ ID NO: 411173 - DNA, 25 bp, Homo sapien
atagccgaagccatagcccactgga

SEQ ID NO: 411174 - DNA, 25 bp, Homo sapien
acagccgttgtagccatagccgaag

SEQ ID NO: 411175 - DNA, 25 bp, Homo sapien
gagtatctcctgtagccgaaagccc

SEQ ID NO: 411176 - DNA, 25 bp, Homo sapien
agacagccccggggaagttgtcgca

SEQ ID NO: 411177 - DNA, 25 bp, Homo sapien
agccccggggaagttgtcgcagagc

SEQ ID NO: 411178 - DNA, 25 bp, Homo sapien
acagccccggggaagttgtcgcaga

SEQ ID NO: 411179 - DNA, 25 bp, Homo sapien
ccccggggaagttgtcgcagagcat

SEQ ID NO: 411180 - DNA, 25 bp, Homo sapien
tgtagtcactggagccattggtcca

SEQ ID NO: 411181 - DNA, 25 bp, Homo sapien
gagcaaccatgggaggcaaactact

SEQ ID NO: 411182 - DNA, 25 bp, Homo sapien
ctaataatacatgagcagagcaacc

SEQ ID NO: 411183 - DNA, 25 bp, Homo sapien
cctgggtgacttgtccaacagcatc

SEQ ID NO: 411184 - DNA, 25 bp, Homo sapien
ccatggcctatagaagctaccacca

SEQ ID NO: 411185 - DNA, 25 bp, Homo sapien
gagccccatggcctatagaagctac

SEQ ID NO: 411186 - DNA, 25 bp, Homo sapien
tagaagctaccaccatagcagccgc

SEQ ID NO: 411187 - DNA, 25 bp, Homo sapien
tggcctatagaagctaccaccatag

SEQ ID NO: 411188 - DNA, 25 bp, Homo sapien
cacaacacagttcaagggggtggct

SEQ ID NO: 411189 - DNA, 25 bp, Homo sapien
aggcacaacacagttcaagggggtg

SEQ ID NO: 411190 - DNA, 25 bp, Homo sapien
agaggcacaacacagttcaaggggg

SEQ ID NO: 411191 - DNA, 25 bp, Homo sapien
gcacaacacagttcaagggggtggc

SEQ ID NO: 411192 - DNA, 25 bp, Homo sapien
ttccacagcagaagtaacgagtcat

SEQ ID NO: 411193 - DNA, 25 bp, Homo sapien
atagggtatcctgggaagtagcttc

SEQ ID NO: 411194 - DNA, 25 bp, Homo sapien
aggtcccatggaagttggtcccata

SEQ ID NO: 411195 - DNA, 25 bp, Homo sapien
gcttccacagcagaagtaacgagtc

SEQ ID NO: 411196 - DNA, 25 bp, Homo sapien
agaaggatttagatggattgtgaag

SEQ ID NO: 411197 - DNA, 25 bp, Homo sapien
gatggattgtgaagggtaagttacc

SEQ ID NO: 411198 - DNA, 25 bp, Homo sapien
ggcagcaattgagaaggatttagat

SEQ ID NO: 411199 - DNA, 25 bp, Homo sapien
ggtggcagcaattgagaaggattta

SEQ ID NO: 411200 - DNA, 25 bp, Homo sapien
gttgccacactggcgctgagtggga

SEQ ID NO: 411201 - DNA, 25 bp, Homo sapien
agttgccacactggcgctgagtggg

SEQ ID NO: 411202 - DNA, 25 bp, Homo sapien
tataccacacttgcttcttactgac

SEQ ID NO: 411203 - DNA, 25 bp, Homo sapien
tgttataccacacttgcttcttact

SEQ ID NO: 411204 - DNA, 25 bp, Homo sapien
tgcgcatgcccaatcctgtgtgctt

SEQ ID NO: 411205 - DNA, 25 bp, Homo sapien
gctttctgtccttacggaatttcat

SEQ ID NO: 411206 - DNA, 25 bp, Homo sapien
agcagatctgcgcatgcccaatcct

SEQ ID NO: 411207 - DNA, 25 bp, Homo sapien
ctgtgtgctttctgtccttacggaa

SEQ ID NO: 411208 - DNA, 25 bp, Homo sapien
tgatggcacatctggaaaccaactt

SEQ ID NO: 411209 - DNA, 25 bp, Homo sapien
catagcgctgagcttccgggaagac

SEQ ID NO: 411210 - DNA, 25 bp, Homo sapien
catatgctgtagtagatgatggcac

SEQ ID NO: 411211 - DNA, 25 bp, Homo sapien
cgggaagactctttgtaactggact

SEQ ID NO: 411212 - DNA, 25 bp, Homo sapien
ccatccagtgccaaatccccttgac

SEQ ID NO: 411213 - DNA, 25 bp, Homo sapien
tccccttgacttagcactgctatca

SEQ ID NO: 411214 - DNA, 25 bp, Homo sapien
ttcagtagctgctacatccccatcc

SEQ ID NO: 411215 - DNA, 25 bp, Homo sapien
acatccccatccagtgccaaatccc

SEQ ID NO: 411216 - DNA, 25 bp, Homo sapien
ttcccagaagatgaagtttgactca

SEQ ID NO: 411217 - DNA, 25 bp, Homo sapien
catagaagcagtaatagaagttccc

SEQ ID NO: 411218 - DNA, 25 bp, Homo sapien
aagcagtaatagaagttcccagaag

SEQ ID NO: 411219 - DNA, 25 bp, Homo sapien
tagaagcagtaatagaagttcccag

SEQ ID NO: 411220 - DNA, 25 bp, Homo sapien
ttagagtgctaaagacagcgtgtgc

SEQ ID NO: 411221 - DNA, 25 bp, Homo sapien
gaaatacatggtgagacaagctctg

SEQ ID NO: 411222 - DNA, 25 bp, Homo sapien
acaagcttagggctggccagaaaaa

SEQ ID NO: 411223 - DNA, 25 bp, Homo sapien
agtcaggcggtcacaagaagggtca

SEQ ID NO: 411224 - DNA, 25 bp, Homo sapien
ctggcaggtcgtggagtcttgattc

SEQ ID NO: 411225 - DNA, 25 bp, Homo sapien
gacaagcagcatgctggaagatcct

SEQ ID NO: 411226 - DNA, 25 bp, Homo sapien
ggagtcttgattcgctcactggctc

SEQ ID NO: 411227 - DNA, 25 bp, Homo sapien
gggacaagcagcatgctggaagatc

SEQ ID NO: 411228 - DNA, 25 bp, Homo sapien
tggacacgcaggactgctgatacgt

SEQ ID NO: 411229 - DNA, 25 bp, Homo sapien
tcggcagctggacacgcaggactgc

SEQ ID NO: 411230 - DNA, 25 bp, Homo sapien
tggcagacagtagagactcctccca

SEQ ID NO: 411231 - DNA, 25 bp, Homo sapien
ggactgctgatacgtcctggagacc

SEQ ID NO: 411232 - DNA, 25 bp, Homo sapien
ttggcagacagtagagatgccgccc

SEQ ID NO: 411233 - DNA, 25 bp, Homo sapien
gttggcagacagtagagatgccgcc

SEQ ID NO: 411234 - DNA, 25 bp, Homo sapien
tggttggcagacagtagagatgccg

SEQ ID NO: 411235 - DNA, 25 bp, Homo sapien
ggcagacagtagagatgccgcccac

SEQ ID NO: 411236 - DNA, 25 bp, Homo sapien
ttggcagacactggagatgcctccc

SEQ ID NO: 411237 - DNA, 25 bp, Homo sapien
tggttggcagacactggagatgcct

SEQ ID NO: 411238 - DNA, 25 bp, Homo sapien
gagatgcctcccaggggctgacatc

SEQ ID NO: 411239 - DNA, 25 bp, Homo sapien
cagacactggagatgcctcccaggg

SEQ ID NO: 411240 - DNA, 25 bp, Homo sapien
aaatacaggtagtttgtcgagagca

SEQ ID NO: 411241 - DNA, 25 bp, Homo sapien
gttggaaatacaggtagtttgtcga

SEQ ID NO: 411242 - DNA, 25 bp, Homo sapien
tacaggtagtttgtcgagagcaagt

SEQ ID NO: 411243 - DNA, 25 bp, Homo sapien
caggtagtttgtcgagagcaagtca

SEQ ID NO: 411244 - DNA, 25 bp, Homo sapien
aagttcgccggtaacaggttggctg

SEQ ID NO: 411245 - DNA, 25 bp, Homo sapien
ggagacacatgaagttcgccggtaa

SEQ ID NO: 411246 - DNA, 25 bp, Homo sapien
tgaagttcgccggtaacaggttggc

SEQ ID NO: 411247 - DNA, 25 bp, Homo sapien
acacatgaagttcgccggtaacagg

SEQ ID NO: 411248 - DNA, 25 bp, Homo sapien
tcttgacagtggtccaggagccaag

SEQ ID NO: 411249 - DNA, 25 bp, Homo sapien
ggccactggaacaatgcagcgtcct

SEQ ID NO: 411250 - DNA, 25 bp, Homo sapien
cgcccaggcagtcagcatcagtggt

SEQ ID NO: 411251 - DNA, 25 bp, Homo sapien
gaagtcgtggtaacttgggccactg

SEQ ID NO: 411252 - DNA, 25 bp, Homo sapien
tcagacagagggctgcaggtagctt

SEQ ID NO: 411253 - DNA, 25 bp, Homo sapien
agacagagggctgcaggtagcttgc

SEQ ID NO: 411254 - DNA, 25 bp, Homo sapien
atgtcagacagagggctgcaggtag

SEQ ID NO: 411255 - DNA, 25 bp, Homo sapien
gatgtcagacagagggctgcaggta

SEQ ID NO: 411256 - DNA, 25 bp, Homo sapien
ggcccagggtagtgctgcccttgca

SEQ ID NO: 411257 - DNA, 25 bp, Homo sapien
gcccagaacatggagtggtggccac

SEQ ID NO: 411258 - DNA, 25 bp, Homo sapien
tgctgacgctgaggcaaacggtgtc

SEQ ID NO: 411259 - DNA, 25 bp, Homo sapien
gcaagggaatggcatagtcaggcat

SEQ ID NO: 411260 - DNA, 25 bp, Homo sapien
gcaggagcccatgagcacccggcca

SEQ ID NO: 411261 - DNA, 25 bp, Homo sapien
cactccttgtcgtgtcgcaggagcc

SEQ ID NO: 411262 - DNA, 25 bp, Homo sapien
ctcactccttgtcgtgtcgcaggag

SEQ ID NO: 411263 - DNA, 25 bp, Homo sapien
tccttgtcgtgtcgcaggagcccat

SEQ ID NO: 411264 - DNA, 25 bp, Homo sapien
tcaacttttatctctagaatccgaa

SEQ ID NO: 411265 - DNA, 25 bp, Homo sapien
ttcgacttccccttaatgctcctag

SEQ ID NO: 411266 - DNA, 25 bp, Homo sapien
aattctgttcgacttccccttaatg

SEQ ID NO: 411267 - DNA, 25 bp, Homo sapien
gaatgaacaactgagtccaaaatag

SEQ ID NO: 411268 - DNA, 25 bp, Homo sapien
actttttccaacacagagattgttt

SEQ ID NO: 411269 - DNA, 25 bp, Homo sapien
gcccagtcagctaaatccaaccttg

SEQ ID NO: 411270 - DNA, 25 bp, Homo sapien
caaccttgacccttccaatggagca

SEQ ID NO: 411271 - DNA, 25 bp, Homo sapien
cccttccaatggagcagggccaaga

SEQ ID NO: 411272 - DNA, 25 bp, Homo sapien
tgcccagtcagctaaatccaacctt

SEQ ID NO: 411273 - DNA, 25 bp, Homo sapien
tcaggcctccttaatgggaaccagg

SEQ ID NO: 411274 - DNA, 25 bp, Homo sapien
aaatagggatggtcttcagagtctc

SEQ ID NO: 411275 - DNA, 25 bp, Homo sapien
tcttgagctttcccaaaatagggat

SEQ ID NO: 411276 - DNA, 25 bp, Homo sapien
tcagagtctcaactaatgtcctttt

SEQ ID NO: 411277 - DNA, 25 bp, Homo sapien
caggagttggtgacctgatactgaa

SEQ ID NO: 411278 - DNA, 25 bp, Homo sapien
taagaggctggtatgctggaccgaa

SEQ ID NO: 411279 - DNA, 25 bp, Homo sapien
tcctgtcctcgggttgcagacacat

SEQ ID NO: 411280 - DNA, 25 bp, Homo sapien
cctgatactgaagggctgaatccag

SEQ ID NO: 411281 - DNA, 25 bp, Homo sapien
caaatgacagtcttggatcaaattt

SEQ ID NO: 411282 - DNA, 25 bp, Homo sapien
gagtctgggaatgctaaatgaaacc

SEQ ID NO: 411283 - DNA, 25 bp, Homo sapien
gaacctgaaatgctcaagggcatga

SEQ ID NO: 411284 - DNA, 25 bp, Homo sapien
ggaagctgtttcgagggaacctgaa

SEQ ID NO: 411285 - DNA, 25 bp, Homo sapien
gaattggccaacatctcaacagagt

SEQ ID NO: 411286 - DNA, 25 bp, Homo sapien
tatcctccgtagtataatggtcggc

SEQ ID NO: 411287 - DNA, 25 bp, Homo sapien
tataatggtcggcaacagctgaatc

SEQ ID NO: 411288 - DNA, 25 bp, Homo sapien
cggaagctgccatagccgcagccat

SEQ ID NO: 411289 - DNA, 25 bp, Homo sapien
cagctgaatccatagcctccgtagc

SEQ ID NO: 411290 - DNA, 25 bp, Homo sapien
agcaaacagaacctccatcacatca

SEQ ID NO: 411291 - DNA, 25 bp, Homo sapien
cagaacctccatcacatcagaaaaa

SEQ ID NO: 411292 - DNA, 25 bp, Homo sapien
gggaatccaaacacctctcctactg

SEQ ID NO: 411293 - DNA, 25 bp, Homo sapien
tcaagggaatccaaacacctctcct

SEQ ID NO: 411294 - DNA, 25 bp, Homo sapien
tttcagagagcacggttaccatatt

SEQ ID NO: 411295 - DNA, 25 bp, Homo sapien
gcaaaatgagttactgtgatttcag

SEQ ID NO: 411296 - DNA, 25 bp, Homo sapien
gaggctgcaaaatgagttactgtga

SEQ ID NO: 411297 - DNA, 25 bp, Homo sapien
gcacggttaccatattagggaagaa

SEQ ID NO: 411298 - DNA, 25 bp, Homo sapien
cttcttctgcagagactgtgataat

SEQ ID NO: 411299 - DNA, 25 bp, Homo sapien
ttcttctgcagagactgtgataatg

SEQ ID NO: 411300 - DNA, 25 bp, Homo sapien
cctctggcactggtgatcccaatgg

SEQ ID NO: 411301 - DNA, 25 bp, Homo sapien
ggcactggtgatcccaatggattca

SEQ ID NO: 411302 - DNA, 25 bp, Homo sapien
cacactaccaacagacactaagggt

SEQ ID NO: 411303 - DNA, 25 bp, Homo sapien
gccagggttatctacttcagcagta

SEQ ID NO: 411304 - DNA, 25 bp, Homo sapien
gacaaagcaaaggtactcgaaagag

SEQ ID NO: 411305 - DNA, 25 bp, Homo sapien
cactaagggttgtacttgtaagagc

SEQ ID NO: 411306 - DNA, 25 bp, Homo sapien
ggcaactggagttggcatccacaac

SEQ ID NO: 411307 - DNA, 25 bp, Homo sapien
ggttcactagctctgtcccagaatg

SEQ ID NO: 411308 - DNA, 25 bp, Homo sapien
ccaatcgagtttgccttaggttcac

SEQ ID NO: 411309 - DNA, 25 bp, Homo sapien
taaactcagtcgattcaagcctctg

SEQ ID NO: 411310 - DNA, 25 bp, Homo sapien
ctttctgtgtctgggccatttttgg

SEQ ID NO: 411311 - DNA, 25 bp, Homo sapien
ttttcctggtcctcccacaggtgct

SEQ ID NO: 411312 - DNA, 25 bp, Homo sapien
ctaattttcctggtcctcccacagg

SEQ ID NO: 411313 - DNA, 25 bp, Homo sapien
cccacaggtgctctgtctgtgccca

SEQ ID NO: 411314 - DNA, 25 bp, Homo sapien
ctcccacaggtgctctgtctgtgcc

SEQ ID NO: 411315 - DNA, 25 bp, Homo sapien
gaactccctcatcagaacggagtcc

SEQ ID NO: 411316 - DNA, 25 bp, Homo sapien
ccctcatcagaacggagtccctggt

SEQ ID NO: 411317 - DNA, 25 bp, Homo sapien
aactccctcatcagaacggagtccc

SEQ ID NO: 411318 - DNA, 25 bp, Homo sapien
ctccctcatcagaacggagtccctg

SEQ ID NO: 411319 - DNA, 25 bp, Homo sapien
gtttcttctagtgcttggaaatcta

SEQ ID NO: 411320 - DNA, 25 bp, Homo sapien
gcttccacatataagcaattcaatt

SEQ ID NO: 411321 - DNA, 25 bp, Homo sapien
gtagtttcttctagtgcttggaaat

SEQ ID NO: 411322 - DNA, 25 bp, Homo sapien
ggcttccacatataagcaattcaat

SEQ ID NO: 411323 - DNA, 25 bp, Homo sapien
attcattggacaccgtatgaaaact

SEQ ID NO: 411324 - DNA, 25 bp, Homo sapien
cattggacaccgtatgaaaacttct

SEQ ID NO: 411325 - DNA, 25 bp, Homo sapien
tggacaccgtatgaaaacttctccg

SEQ ID NO: 411326 - DNA, 25 bp, Homo sapien
gacaccgtatgaaaacttctccgaa

SEQ ID NO: 411327 - DNA, 25 bp, Homo sapien
gattgagaatgtagtcagaataaag

SEQ ID NO: 411328 - DNA, 25 bp, Homo sapien
tttatcaccattttcctttagagca

SEQ ID NO: 411329 - DNA, 25 bp, Homo sapien
gaataaagattgacaaatttcttcc

SEQ ID NO: 411330 - DNA, 25 bp, Homo sapien
catttgtaattggaattttatcacc

SEQ ID NO: 411331 - DNA, 25 bp, Homo sapien
aactctgatataaaactgggtgaca

SEQ ID NO: 411332 - DNA, 25 bp, Homo sapien
ggtgacagtctcccaagtgataaaa

SEQ ID NO: 411333 - DNA, 25 bp, Homo sapien
aaactctgatataaaactgggtgac

SEQ ID NO: 411334 - DNA, 25 bp, Homo sapien
tgggtgacagtctcccaagtgataa

SEQ ID NO: 411335 - DNA, 25 bp, Homo sapien
atgccaatcagagtaaaccaaccct

SEQ ID NO: 411336 - DNA, 25 bp, Homo sapien
ctatgccaatcagagtaaaccaacc

SEQ ID NO: 411337 - DNA, 25 bp, Homo sapien
caatcagagtaaaccaaccctcagt

SEQ ID NO: 411338 - DNA, 25 bp, Homo sapien
cagagtaaaccaaccctcagtttga

SEQ ID NO: 411339 - DNA, 25 bp, Homo sapien
gttcatcgtacgtgaacataccaat

SEQ ID NO: 411340 - DNA, 25 bp, Homo sapien
tgtaagttcatcgtacgtgaacata

SEQ ID NO: 411341 - DNA, 25 bp, Homo sapien
ttttgtaagttcatcgtacgtgaac

SEQ ID NO: 411342 - DNA, 25 bp, Homo sapien
taagttcatcgtacgtgaacatacc

SEQ ID NO: 411343 - DNA, 25 bp, Homo sapien
ggtcacatctaacaatgagtctcaa

SEQ ID NO: 411344 - DNA, 25 bp, Homo sapien
catctaacaatgagtctcaaatatg

SEQ ID NO: 411345 - DNA, 25 bp, Homo sapien
atggtcacatctaacaatgagtctc

SEQ ID NO: 411346 - DNA, 25 bp, Homo sapien
cacatctaacaatgagtctcaaata

SEQ ID NO: 411347 - DNA, 25 bp, Homo sapien
gataagggatttttgacaatccagg

SEQ ID NO: 411348 - DNA, 25 bp, Homo sapien
ggataagggatttttgacaatccag

SEQ ID NO: 411349 - DNA, 25 bp, Homo sapien
gggataagggatttttgacaatcca

SEQ ID NO: 411350 - DNA, 25 bp, Homo sapien
catcttcctcactgtgatttgtgtc

SEQ ID NO: 411351 - DNA, 25 bp, Homo sapien
ggactcagggatgggctcttcatca

SEQ ID NO: 411352 - DNA, 25 bp, Homo sapien
ctgtgatttgtgtccacttcccctc

SEQ ID NO: 411353 - DNA, 25 bp, Homo sapien
aaagctcctgaagtgtcagctcact

SEQ ID NO: 411354 - DNA, 25 bp, Homo sapien
catttgcatagtaaatcattttcaa

SEQ ID NO: 411355 - DNA, 25 bp, Homo sapien
tttgcatagtaaatcattttcaagc

SEQ ID NO: 411356 - DNA, 25 bp, Homo sapien
tgcatagtaaatcattttcaagcac

SEQ ID NO: 411357 - DNA, 25 bp, Homo sapien
ttgcatagtaaatcattttcaagca

SEQ ID NO: 411358 - DNA, 25 bp, Homo sapien
tgagagtataccttgtgatacatca

SEQ ID NO: 411359 - DNA, 25 bp, Homo sapien
tcttgagagtataccttgtgataca

SEQ ID NO: 411360 - DNA, 25 bp, Homo sapien
cagattttgactgttaaattcgttg

SEQ ID NO: 411361 - DNA, 25 bp, Homo sapien
caccagattttgactgttaaattcg

SEQ ID NO: 411362 - DNA, 25 bp, Homo sapien
tccaagattatttgctgccttctcc

SEQ ID NO: 411363 - DNA, 25 bp, Homo sapien
atatcttccaagattatttgctgcc

SEQ ID NO: 411364 - DNA, 25 bp, Homo sapien
tcctatatcttccaagattatttgc

SEQ ID NO: 411365 - DNA, 25 bp, Homo sapien
tcttccaagattatttgctgccttc

SEQ ID NO: 411366 - DNA, 25 bp, Homo sapien
tggagatgacatctattgttatgag

SEQ ID NO: 411367 - DNA, 25 bp, Homo sapien
catctattgttatgaggagcccaaa

SEQ ID NO: 411368 - DNA, 25 bp, Homo sapien
gatgacatctattgttatgaggagc

SEQ ID NO: 411369 - DNA, 25 bp, Homo sapien
gacatctattgttatgaggagccca

SEQ ID NO: 411370 - DNA, 25 bp, Homo sapien
gagtaaactactgcaatgcatacca

SEQ ID NO: 411371 - DNA, 25 bp, Homo sapien
tgtacacactcacagcgtaatcaga

SEQ ID NO: 411372 - DNA, 25 bp, Homo sapien
cagcgtaatcagagtaaactactgc

SEQ ID NO: 411373 - DNA, 25 bp, Homo sapien
cacactcacagcgtaatcagagtaa

SEQ ID NO: 411374 - DNA, 25 bp, Homo sapien
actgcggctgcaactacaaagttca

SEQ ID NO: 411375 - DNA, 25 bp, Homo sapien
ctgatccaccgcgagagggcaccag

SEQ ID NO: 411376 - DNA, 25 bp, Homo sapien
ctagaagcttccaaagcgaacttgg

SEQ ID NO: 411377 - DNA, 25 bp, Homo sapien
gaagcttccaaagcgaacttggcac

SEQ ID NO: 411378 - DNA, 25 bp, Homo sapien
catctcatcatctcagaacactgag

SEQ ID NO: 411379 - DNA, 25 bp, Homo sapien
gaggccctgcagctttgtcgatgtg

SEQ ID NO: 411380 - DNA, 25 bp, Homo sapien
ctcagaacactgagaacattgaggc

SEQ ID NO: 411381 - DNA, 25 bp, Homo sapien
cactgagaacattgaggccctgcag

SEQ ID NO: 411382 - DNA, 25 bp, Homo sapien
tccggcccaaataatcgaaatacaa

SEQ ID NO: 411383 - DNA, 25 bp, Homo sapien
caaataatcgaaatacaaactcagg

SEQ ID NO: 411384 - DNA, 25 bp, Homo sapien
caagcatatccggcccaaataatcg

SEQ ID NO: 411385 - DNA, 25 bp, Homo sapien
tcgaaatacaaactcaggtggaaaa

SEQ ID NO: 411386 - DNA, 25 bp, Homo sapien
acttcaagcgctacaacagcgttct

SEQ ID NO: 411387 - DNA, 25 bp, Homo sapien
tgttgttgttaaaacttcaagcgct

SEQ ID NO: 411388 - DNA, 25 bp, Homo sapien
caacagcgttctcctgatgatcacg

SEQ ID NO: 411389 - DNA, 25 bp, Homo sapien
gatcacgagttatttcaataaatgg

SEQ ID NO: 411390 - DNA, 25 bp, Homo sapien
gacaagcatttacaacgttccattc

SEQ ID NO: 411391 - DNA, 25 bp, Homo sapien
gacatagacacgtcatgaccttatg

SEQ ID NO: 411392 - DNA, 25 bp, Homo sapien
agaccttctttcagcttataaaaga

SEQ ID NO: 411393 - DNA, 25 bp, Homo sapien
cgttccattcatagacctaaaaaca

SEQ ID NO: 411394 - DNA, 25 bp, Homo sapien
tgtgttgcactggagccagtaaatg

SEQ ID NO: 411395 - DNA, 25 bp, Homo sapien
taaatgcgacgattagaagcctctg

SEQ ID NO: 411396 - DNA, 25 bp, Homo sapien
aagagacaatggcaccctctccaag

SEQ ID NO: 411397 - DNA, 25 bp, Homo sapien
agcaccagacttccgagtgttttca

SEQ ID NO: 411398 - DNA, 25 bp, Homo sapien
gaagggtacagtcagaacacggcaa

SEQ ID NO: 411399 - DNA, 25 bp, Homo sapien
tcaaaagatcaagctcgaagccctg

SEQ ID NO: 411400 - DNA, 25 bp, Homo sapien
tagagcttccgaacatggacacaga

SEQ ID NO: 411401 - DNA, 25 bp, Homo sapien
tggacgcgatcgaaccggagatgat

SEQ ID NO: 411402 - DNA, 25 bp, Homo sapien
tatacagaagataggactcaagctt

SEQ ID NO: 411403 - DNA, 25 bp, Homo sapien
aaagttgggtggctacatggcttca

SEQ ID NO: 411404 - DNA, 25 bp, Homo sapien
cattcttgtcgacggtacaggaggg

SEQ ID NO: 411405 - DNA, 25 bp, Homo sapien
aaaaccgtgtgtgcaagagcgcgac

SEQ ID NO: 411406 - DNA, 25 bp, Homo sapien
gagggggcaaagtcttcacgcctaa

SEQ ID NO: 411407 - DNA, 25 bp, Homo sapien
ggagggggcaaagtcttcacgccta

SEQ ID NO: 411408 - DNA, 25 bp, Homo sapien
tgccatgcgggacgcgtgactatcc

SEQ ID NO: 411409 - DNA, 25 bp, Homo sapien
ggtaaacctgtttcgagccagccgc

SEQ ID NO: 411410 - DNA, 25 bp, Homo sapien
gctgcttgcggagacggcatcagaa

SEQ ID NO: 411411 - DNA, 25 bp, Homo sapien
tgactatccagggttttccggcctc

SEQ ID NO: 411412 - DNA, 25 bp, Homo sapien
tgtgggctaccaaacctagaatcct

SEQ ID NO: 411413 - DNA, 25 bp, Homo sapien
tgtaatatcccatgtcaagccaggt

SEQ ID NO: 411414 - DNA, 25 bp, Homo sapien
gatgtgtctgcaacccgacttggca

SEQ ID NO: 411415 - DNA, 25 bp, Homo sapien
caagaatagctcgaggcttccccaa

SEQ ID NO: 411416 - DNA, 25 bp, Homo sapien
ttgaacgtccgaatccccacagtac

SEQ ID NO: 411417 - DNA, 25 bp, Homo sapien
gacgggaatcttgaacgtccgaatc

SEQ ID NO: 411418 - DNA, 25 bp, Homo sapien
ggaatcttgaacgtccgaatcccca

SEQ ID NO: 411419 - DNA, 25 bp, Homo sapien
ggtgacgggaatcttgaacgtccga

SEQ ID NO: 411420 - DNA, 25 bp, Homo sapien
tctcggttttgaggagctgtcttct

SEQ ID NO: 411421 - DNA, 25 bp, Homo sapien
tctgtgcttatcacgcaggattgaa

SEQ ID NO: 411422 - DNA, 25 bp, Homo sapien
cctccaaaagggacatattgctggg

SEQ ID NO: 411423 - DNA, 25 bp, Homo sapien
gattgaatgcacagcctttaggaaa

SEQ ID NO: 411424 - DNA, 25 bp, Homo sapien
ggcctcccttcagactcggatttta

SEQ ID NO: 411425 - DNA, 25 bp, Homo sapien
ctgcagcacaagtgaaagaccctct

SEQ ID NO: 411426 - DNA, 25 bp, Homo sapien
cttcagactcggattttacatggac

SEQ ID NO: 411427 - DNA, 25 bp, Homo sapien
gacaatttcacacacggcatttgcc

SEQ ID NO: 411428 - DNA, 25 bp, Homo sapien
cagagatgctcattccaggatgtgc

SEQ ID NO: 411429 - DNA, 25 bp, Homo sapien
cagggaacagatgtggctaaagagt

SEQ ID NO: 411430 - DNA, 25 bp, Homo sapien
ttcctcctcttgagaacttggcttc

SEQ ID NO: 411431 - DNA, 25 bp, Homo sapien
ggcttcaaattaggcccaggatggg

SEQ ID NO: 411432 - DNA, 25 bp, Homo sapien
ggatcatgtgtcgaaatctgaaggg

SEQ ID NO: 411433 - DNA, 25 bp, Homo sapien
ctgcactcgccaaagctcgaacctg

SEQ ID NO: 411434 - DNA, 25 bp, Homo sapien
cataaatggaaagcctgtgagatcc

SEQ ID NO: 411435 - DNA, 25 bp, Homo sapien
ctcgaacctgcagcgcttccgtggg

SEQ ID NO: 411436 - DNA, 25 bp, Homo sapien
tacacaaggaccacagcagttttga

SEQ ID NO: 411437 - DNA, 25 bp, Homo sapien
tctgtttggaaccatctttatacac

SEQ ID NO: 411438 - DNA, 25 bp, Homo sapien
tggaaccatctttatacacaaggac

SEQ ID NO: 411439 - DNA, 25 bp, Homo sapien
tctttatacacaaggaccacagcag

SEQ ID NO: 411440 - DNA, 25 bp, Homo sapien
caggtctcccatgctcagatctgca

SEQ ID NO: 411441 - DNA, 25 bp, Homo sapien
acttgcccagcgaggccggcgggtt

SEQ ID NO: 411442 - DNA, 25 bp, Homo sapien
aggccggcgggttcagccagatcac

SEQ ID NO: 411443 - DNA, 25 bp, Homo sapien
cagatcacggtagtgtgcaaaagca

SEQ ID NO: 411444 - DNA, 25 bp, Homo sapien
aaggacttgcccaagacagccattg

SEQ ID NO: 411445 - DNA, 25 bp, Homo sapien
aggacttgcccaagacagccattgc

SEQ ID NO: 411446 - DNA, 25 bp, Homo sapien
tctcattgatgtgactggcaacctt

SEQ ID NO: 411447 - DNA, 25 bp, Homo sapien
catctcattgatgtgactggcaacc

SEQ ID NO: 411448 - DNA, 25 bp, Homo sapien
cattgatgtgactggcaaccttgtt

SEQ ID NO: 411449 - DNA, 25 bp, Homo sapien
tcattgatgtgactggcaaccttgt

SEQ ID NO: 411450 - DNA, 25 bp, Homo sapien
ctccagcgtggatgagtgctgctgc

SEQ ID NO: 411451 - DNA, 25 bp, Homo sapien
gatgggcttgatgaggtacgactcc

SEQ ID NO: 411452 - DNA, 25 bp, Homo sapien
tcgctctccgcatcggtcagggcga

SEQ ID NO: 411453 - DNA, 25 bp, Homo sapien
gtcagggcgaacagctccctgagca

SEQ ID NO: 411454 - DNA, 25 bp, Homo sapien
gaagcggtcagcataatacaggaat

SEQ ID NO: 411455 - DNA, 25 bp, Homo sapien
ccttgggaacttttgtgtggctggc

SEQ ID NO: 411456 - DNA, 25 bp, Homo sapien
atacaggaatgatccccccagagag

SEQ ID NO: 411457 - DNA, 25 bp, Homo sapien
tggcgcagaaggcactgtagagctt

SEQ ID NO: 411458 - DNA, 25 bp, Homo sapien
tggatttgacgagaaaaggcacagt

SEQ ID NO: 411459 - DNA, 25 bp, Homo sapien
ctggatttgacgagaaaaggcacag

SEQ ID NO: 411460 - DNA, 25 bp, Homo sapien
tcctttactttccaagccctccgca

SEQ ID NO: 411461 - DNA, 25 bp, Homo sapien
tccgcaaatctccaccctggcttgg

SEQ ID NO: 411462 - DNA, 25 bp, Homo sapien
ttggagggtgtcagcaggagtaccc

SEQ ID NO: 411463 - DNA, 25 bp, Homo sapien
gagggtgtcagcaggagtaccctgg

SEQ ID NO: 411464 - DNA, 25 bp, Homo sapien
gtttatctaactaccaggccacatt

SEQ ID NO: 411465 - DNA, 25 bp, Homo sapien
tgaagagcataaccaccaacaagca

SEQ ID NO: 411466 - DNA, 25 bp, Homo sapien
gaaaacaggtatcactacaatgaac

SEQ ID NO: 411467 - DNA, 25 bp, Homo sapien
taattcttagtagctcctgttgcag

SEQ ID NO: 411468 - DNA, 25 bp, Homo sapien
caaccttctcaagcttttccaaatc

SEQ ID NO: 411469 - DNA, 25 bp, Homo sapien
tagagttttaaggaattctacttga

SEQ ID NO: 411470 - DNA, 25 bp, Homo sapien
ttccaaatcaggtaccagtctcact

SEQ ID NO: 411471 - DNA, 25 bp, Homo sapien
tctacttgaaactctaccatttccg

SEQ ID NO: 411472 - DNA, 25 bp, Homo sapien
tatctctccataagacagtttaaat

SEQ ID NO: 411473 - DNA, 25 bp, Homo sapien
ttaggtatctctccataagacagtt

SEQ ID NO: 411474 - DNA, 25 bp, Homo sapien
ttttgaagaggctttaggtatctct

SEQ ID NO: 411475 - DNA, 25 bp, Homo sapien
gaggctttaggtatctctccataag

SEQ ID NO: 411476 - DNA, 25 bp, Homo sapien
aggagctcgcagatcaccttgcgca

SEQ ID NO: 411477 - DNA, 25 bp, Homo sapien
gcaaaatgcggccacctgttctgta

SEQ ID NO: 411478 - DNA, 25 bp, Homo sapien
gagagttgtctcatggtcgccagct

SEQ ID NO: 411479 - DNA, 25 bp, Homo sapien
ggttcatctcatgcaaactgcggca

SEQ ID NO: 411480 - DNA, 25 bp, Homo sapien
tcaccggacttgtcattgttttcaa

SEQ ID NO: 411481 - DNA, 25 bp, Homo sapien
tgttcgatacatagagtcaccggac

SEQ ID NO: 411482 - DNA, 25 bp, Homo sapien
cagatgaagtgttcgatacatagag

SEQ ID NO: 411483 - DNA, 25 bp, Homo sapien
gttttcaatcctgggcttgcgcttt

SEQ ID NO: 411484 - DNA, 25 bp, Homo sapien
gcggcctggaatgcatgacacatga

SEQ ID NO: 411485 - DNA, 25 bp, Homo sapien
tcaggaatattaaacctgcccggct

SEQ ID NO: 411486 - DNA, 25 bp, Homo sapien
ggctttttgaggttgtcacccacag

SEQ ID NO: 411487 - DNA, 25 bp, Homo sapien
gaccgcactgccctgaagctaatta

SEQ ID NO: 411488 - DNA, 25 bp, Homo sapien
tagttatattatttgacccacccaa

SEQ ID NO: 411489 - DNA, 25 bp, Homo sapien
ctacagaatatacacatacaggggg

SEQ ID NO: 411490 - DNA, 25 bp, Homo sapien
tgctttctcatagttatattatttg

SEQ ID NO: 411491 - DNA, 25 bp, Homo sapien
gaatatacacatacagggggaatca

SEQ ID NO: 411492 - DNA, 25 bp, Homo sapien
cagtgtcttgcaccaaaaagtcagg

SEQ ID NO: 411493 - DNA, 25 bp, Homo sapien
tttcttactatgttcaactaaggga

SEQ ID NO: 411494 - DNA, 25 bp, Homo sapien
taacataaaagttgctcacttttaa

SEQ ID NO: 411495 - DNA, 25 bp, Homo sapien
tactatgttcaactaagggaaagtg

SEQ ID NO: 411496 - DNA, 25 bp, Homo sapien
gctgctgtgatcagtctcatctgag

SEQ ID NO: 411497 - DNA, 25 bp, Homo sapien
tgccctgctcgctgcaaaggctgtg

SEQ ID NO: 411498 - DNA, 25 bp, Homo sapien
tcggtctcctctggagcggtctcag

SEQ ID NO: 411499 - DNA, 25 bp, Homo sapien
cctctggagcggtctcagcactgct

SEQ ID NO: 411500 - DNA, 25 bp, Homo sapien
cacagcaggccgacagtttacgagg

SEQ ID NO: 411501 - DNA, 25 bp, Homo sapien
acacttcacgggtactgcacagagg

SEQ ID NO: 411502 - DNA, 25 bp, Homo sapien
gaggcgcgcgtgtctccaaatgtta

SEQ ID NO: 411503 - DNA, 25 bp, Homo sapien
cggttttcagaatcgagctccaggc

SEQ ID NO: 411504 - DNA, 25 bp, Homo sapien
gaccacttgagtttgtgagactgtg

SEQ ID NO: 411505 - DNA, 25 bp, Homo sapien
tgagtttgtgagactgtggagctct

SEQ ID NO: 411506 - DNA, 25 bp, Homo sapien
caggtagcagccagcactcacgtgg

SEQ ID NO: 411507 - DNA, 25 bp, Homo sapien
gtctgaccacttgagtttgtgagac

SEQ ID NO: 411508 - DNA, 25 bp, Homo sapien
cgcatgataaactccccgggtcgtg

SEQ ID NO: 411509 - DNA, 25 bp, Homo sapien
tgaaacacacaagccgcatgataaa

SEQ ID NO: 411510 - DNA, 25 bp, Homo sapien
ccgggtcgtggcacaacggagttca

SEQ ID NO: 411511 - DNA, 25 bp, Homo sapien
ggcacaacggagttcagactcgccc

SEQ ID NO: 411512 - DNA, 25 bp, Homo sapien
gattattgatctcaagaatctcatc

SEQ ID NO: 411513 - DNA, 25 bp, Homo sapien
gggtaggtcctcaccaggaggccca

SEQ ID NO: 411514 - DNA, 25 bp, Homo sapien
ctgtgagaggaaatctttgagcata

SEQ ID NO: 411515 - DNA, 25 bp, Homo sapien
gggcgtcagcagcacgattattgat

SEQ ID NO: 411516 - DNA, 25 bp, Homo sapien
ttcacgtacagccttcgaataccat

SEQ ID NO: 411517 - DNA, 25 bp, Homo sapien
acactattcacgtacagccttcgaa

SEQ ID NO: 411518 - DNA, 25 bp, Homo sapien
tacagccttcgaataccatcttctt

SEQ ID NO: 411519 - DNA, 25 bp, Homo sapien
cttcacactattcacgtacagcctt

SEQ ID NO: 411520 - DNA, 25 bp, Homo sapien
tgtcagccatgcgtacagtaagaag

SEQ ID NO: 411521 - DNA, 25 bp, Homo sapien
tatacaaatccagtgcattccgccg

SEQ ID NO: 411522 - DNA, 25 bp, Homo sapien
taataaagattaggatagggcagcc

SEQ ID NO: 411523 - DNA, 25 bp, Homo sapien
aagcttacaccggtgagtgccggca

SEQ ID NO: 411524 - DNA, 25 bp, Homo sapien
gctctgagtgacttttggacagatt

SEQ ID NO: 411525 - DNA, 25 bp, Homo sapien
tctgacttctcaatgtggatgctct

SEQ ID NO: 411526 - DNA, 25 bp, Homo sapien
agtatcagcagctgtatctgacttc

SEQ ID NO: 411527 - DNA, 25 bp, Homo sapien
cgtaagtatcagcagctgtatctga

SEQ ID NO: 411528 - DNA, 25 bp, Homo sapien
tcctatggcacttaggctctacatg

SEQ ID NO: 411529 - DNA, 25 bp, Homo sapien
tcaaagccgacaatgccctttctct

SEQ ID NO: 411530 - DNA, 25 bp, Homo sapien
gccatagtgagcctttcaaagccga

SEQ ID NO: 411531 - DNA, 25 bp, Homo sapien
gctcatcttctcatgccctatgggc

SEQ ID NO: 411532 - DNA, 25 bp, Homo sapien
atatgtaaatgtccccgagaagcta

SEQ ID NO: 411533 - DNA, 25 bp, Homo sapien
tcaacatggctacggatgtcacaca

SEQ ID NO: 411534 - DNA, 25 bp, Homo sapien
tccaaaagactaggacatagatggc

SEQ ID NO: 411535 - DNA, 25 bp, Homo sapien
gattcagaaccccagtcccataagt

SEQ ID NO: 411536 - DNA, 25 bp, Homo sapien
tctattagaaatttcaggcgcaggt

SEQ ID NO: 411537 - DNA, 25 bp, Homo sapien
gagcagaatgatccagttgatgtgt

SEQ ID NO: 411538 - DNA, 25 bp, Homo sapien
tcaggcgcaggtaatgagcagaatg

SEQ ID NO: 411539 - DNA, 25 bp, Homo sapien
tcctcgggctgtggaacatagagct

SEQ ID NO: 411540 - DNA, 25 bp, Homo sapien
cagggtgtcccgtgcagtgtcgcct

SEQ ID NO: 411541 - DNA, 25 bp, Homo sapien
ctggccggacgaccgtcagggcagg

SEQ ID NO: 411542 - DNA, 25 bp, Homo sapien
tgcagtgtcgcctggccggacgacc

SEQ ID NO: 411543 - DNA, 25 bp, Homo sapien
agctccagggtgtcccgtgcagtgt

SEQ ID NO: 411544 - DNA, 25 bp, Homo sapien
gcagacagaaccaggatggagtgaa

SEQ ID NO: 411545 - DNA, 25 bp, Homo sapien
caaatgtcgcagtcagggttgtgct

SEQ ID NO: 411546 - DNA, 25 bp, Homo sapien
gatggagtgaaatactcgtggaccc

SEQ ID NO: 411547 - DNA, 25 bp, Homo sapien
tgtgctggtgaacgttaggtaagac

SEQ ID NO: 411548 - DNA, 25 bp, Homo sapien
gaacttgacggataacatcatggca

SEQ ID NO: 411549 - DNA, 25 bp, Homo sapien
gaggatgttccttagcttgatataa

SEQ ID NO: 411550 - DNA, 25 bp, Homo sapien
tgctctccttggaccttcagcacga

SEQ ID NO: 411551 - DNA, 25 bp, Homo sapien
tgggttaaacctaagcaagctaagc

SEQ ID NO: 411552 - DNA, 25 bp, Homo sapien
ggtagtaagaacacacctcttggga

SEQ ID NO: 411553 - DNA, 25 bp, Homo sapien
cttgacttgggaggcaaatgcgttt

SEQ ID NO: 411554 - DNA, 25 bp, Homo sapien
cacacccggccgaatctttaattga

SEQ ID NO: 411555 - DNA, 25 bp, Homo sapien
tagctcaagacaacactgcaccatg

SEQ ID NO: 411556 - DNA, 25 bp, Homo sapien
ctttacagcttcggttccctctcca

SEQ ID NO: 411557 - DNA, 25 bp, Homo sapien
tacagcttcggttccctctccaaac

SEQ ID NO: 411558 - DNA, 25 bp, Homo sapien
ttctttacagcttcggttccctctc

SEQ ID NO: 411559 - DNA, 25 bp, Homo sapien
acagcttcggttccctctccaaaca

SEQ ID NO: 411560 - DNA, 25 bp, Homo sapien
gagctctctcggattcctgtctcct

SEQ ID NO: 411561 - DNA, 25 bp, Homo sapien
cgcttgctcgcggatctggacatgg

SEQ ID NO: 411562 - DNA, 25 bp, Homo sapien
tggaggtagtatccagaccccacag

SEQ ID NO: 411563 - DNA, 25 bp, Homo sapien
tggacatggcctgagtacgtcttct

SEQ ID NO: 411564 - DNA, 25 bp, Homo sapien
tgattgatgcttggccgtccctgct

SEQ ID NO: 411565 - DNA, 25 bp, Homo sapien
ccagtggagcgattccagagaagca

SEQ ID NO: 411566 - DNA, 25 bp, Homo sapien
gaagcatttcacaagggaacaccct

SEQ ID NO: 411567 - DNA, 25 bp, Homo sapien
tcaaaacggcttctctacaagggta

SEQ ID NO: 411568 - DNA, 25 bp, Homo sapien
tatcctaccaggtggcaagcaaagt

SEQ ID NO: 411569 - DNA, 25 bp, Homo sapien
taacagcggaaacgaaacaggtcca

SEQ ID NO: 411570 - DNA, 25 bp, Homo sapien
tcgacttgcaaaagcgagaagcctt

SEQ ID NO: 411571 - DNA, 25 bp, Homo sapien
ggaactgctcgagattttgctccca

SEQ ID NO: 411572 - DNA, 25 bp, Homo sapien
ccgaaaagattccaaggcggcccat

SEQ ID NO: 411573 - DNA, 25 bp, Homo sapien
tggatggcggtgatccagttttcaa

SEQ ID NO: 411574 - DNA, 25 bp, Homo sapien
tcaggagtcggagcgtgtcttcctt

SEQ ID NO: 411575 - DNA, 25 bp, Homo sapien
tttgatctctgatttcaggagtcgg

SEQ ID NO: 411576 - DNA, 25 bp, Homo sapien
tcttccttgtggtggtgcctcgcga

SEQ ID NO: 411577 - DNA, 25 bp, Homo sapien
tgttctccacccagacggcgtgttt

SEQ ID NO: 411578 - DNA, 25 bp, Homo sapien
aaggcatcacccagggaattgctga

SEQ ID NO: 411579 - DNA, 25 bp, Homo sapien
tcaggcaccgcctgcacaatgctgt

SEQ ID NO: 411580 - DNA, 25 bp, Homo sapien
tcgctctcgtagaaaaatagcgtgc

SEQ ID NO: 411581 - DNA, 25 bp, Homo sapien
taccaggatgtatgcagtacgtgca

SEQ ID NO: 411582 - DNA, 25 bp, Homo sapien
tgtgcccttccatcaatcctgttga

SEQ ID NO: 411583 - DNA, 25 bp, Homo sapien
tgaaatccagtatcgaacggtctag

SEQ ID NO: 411584 - DNA, 25 bp, Homo sapien
tgttgacctatctaacctagcctgc

SEQ ID NO: 411585 - DNA, 25 bp, Homo sapien
gggacacccagtagtgcttccactt

SEQ ID NO: 411586 - DNA, 25 bp, Homo sapien
tcctccgggtggctgactccacctt

SEQ ID NO: 411587 - DNA, 25 bp, Homo sapien
ggtggctgactccaccttcttgttc

SEQ ID NO: 411588 - DNA, 25 bp, Homo sapien
ttcagggacacccagtagtgcttcc

SEQ ID NO: 411589 - DNA, 25 bp, Homo sapien
accgtgccctgtgcggcggtcagca

SEQ ID NO: 411590 - DNA, 25 bp, Homo sapien
ctgacgagccgcatccccggtggag

SEQ ID NO: 411591 - DNA, 25 bp, Homo sapien
gcattagatcgcctggacaggaggt

SEQ ID NO: 411592 - DNA, 25 bp, Homo sapien
tgctctgctcatcgctgtgcgccga

SEQ ID NO: 411593 - DNA, 25 bp, Homo sapien
ttcaatcccactgtctgcaaactca

SEQ ID NO: 411594 - DNA, 25 bp, Homo sapien
aaactcactgccctcgcctgcatta

SEQ ID NO: 411595 - DNA, 25 bp, Homo sapien
cactgccctcgcctgcattaacatc

SEQ ID NO: 411596 - DNA, 25 bp, Homo sapien
cttcaatcccactgtctgcaaactc

SEQ ID NO: 411597 - DNA, 25 bp, Homo sapien
cgttgaagagatttccgatcatgaa

SEQ ID NO: 411598 - DNA, 25 bp, Homo sapien
cacagggccgagaggctcttcaatc

SEQ ID NO: 411599 - DNA, 25 bp, Homo sapien
ccatgttagaaccactccgttgaag

SEQ ID NO: 411600 - DNA, 25 bp, Homo sapien
cgatcatgaacaacattcacagggc

SEQ ID NO: 411601 - DNA, 25 bp, Homo sapien
ggcagcttccccaaaaaatgaatgt

SEQ ID NO: 411602 - DNA, 25 bp, Homo sapien
gtatgcacaagtggccagctgtagc

SEQ ID NO: 411603 - DNA, 25 bp, Homo sapien
gaatgtatgcacaagtggccagctg

SEQ ID NO: 411604 - DNA, 25 bp, Homo sapien
atgaatgtatgcacaagtggccagc

SEQ ID NO: 411605 - DNA, 25 bp, Homo sapien
ttctctgtgcttcctccaactacca

SEQ ID NO: 411606 - DNA, 25 bp, Homo sapien
cttttactacaaccagaaggcttct

SEQ ID NO: 411607 - DNA, 25 bp, Homo sapien
ttactacaaccagaaggcttctctg

SEQ ID NO: 411608 - DNA, 25 bp, Homo sapien
tctctgtgcttcctccaactaccat

SEQ ID NO: 411609 - DNA, 25 bp, Homo sapien
tgaaatcatcaacgcgactacttgc

SEQ ID NO: 411610 - DNA, 25 bp, Homo sapien
catcaacgcgactacttgcttatca

SEQ ID NO: 411611 - DNA, 25 bp, Homo sapien
taatgaaatcatcaacgcgactact

SEQ ID NO: 411612 - DNA, 25 bp, Homo sapien
acgcgactacttgcttatcaaagaa

SEQ ID NO: 411613 - DNA, 25 bp, Homo sapien
atcacatcgccactccccccacaca

SEQ ID NO: 411614 - DNA, 25 bp, Homo sapien
ttcccactcctatcacatcgccact

SEQ ID NO: 411615 - DNA, 25 bp, Homo sapien
cccactcctatcacatcgccactcc

SEQ ID NO: 411616 - DNA, 25 bp, Homo sapien
cactcctatcacatcgccactcccc

SEQ ID NO: 411617 - DNA, 25 bp, Homo sapien
gtcatgcaccattcccaaaatattg

SEQ ID NO: 411618 - DNA, 25 bp, Homo sapien
catgcacttaaagagtcatgcacca

SEQ ID NO: 411619 - DNA, 25 bp, Homo sapien
aagtcatgcacttaaagagtcatgc

SEQ ID NO: 411620 - DNA, 25 bp, Homo sapien
cttaaagagtcatgcaccattccca

SEQ ID NO: 411621 - DNA, 25 bp, Homo sapien
gccaaatatgtagcgtcatccccgt

SEQ ID NO: 411622 - DNA, 25 bp, Homo sapien
tataattactgtacggaggagtctc

SEQ ID NO: 411623 - DNA, 25 bp, Homo sapien
aagctcgccgtctccatgaaagtgg

SEQ ID NO: 411624 - DNA, 25 bp, Homo sapien
ttggtggcaccttcagagagacagt

SEQ ID NO: 411625 - DNA, 25 bp, Homo sapien
gcaggtgaacagtaacatcatctac

SEQ ID NO: 411626 - DNA, 25 bp, Homo sapien
ctgggagcaggtgaacagtaacatc

SEQ ID NO: 411627 - DNA, 25 bp, Homo sapien
gtgaacagtaacatcatctactgag

SEQ ID NO: 411628 - DNA, 25 bp, Homo sapien
gagcaggtgaacagtaacatcatct

SEQ ID NO: 411629 - DNA, 25 bp, Homo sapien
ctgggttgaaggtcatcctgatcca

SEQ ID NO: 411630 - DNA, 25 bp, Homo sapien
gggtgagggtgttcagcttgtgctc

SEQ ID NO: 411631 - DNA, 25 bp, Homo sapien
atccatgaacttaggggtgagggtg

SEQ ID NO: 411632 - DNA, 25 bp, Homo sapien
actgggttgaaggtcatcctgatcc

SEQ ID NO: 411633 - DNA, 25 bp, Homo sapien
tcgaattgtcagataggtgtaaccc

SEQ ID NO: 411634 - DNA, 25 bp, Homo sapien
gagaaaggatttcataggcacctac

SEQ ID NO: 411635 - DNA, 25 bp, Homo sapien
gatcctgagggcaattcacagcgga

SEQ ID NO: 411636 - DNA, 25 bp, Homo sapien
tgaagcccagggataaatttacgag

SEQ ID NO: 411637 - DNA, 25 bp, Homo sapien
ccaacttgctccaagagcactgtgg

SEQ ID NO: 411638 - DNA, 25 bp, Homo sapien
aatgatgtccggatgaacagccaca

SEQ ID NO: 411639 - DNA, 25 bp, Homo sapien
tattgaggttggaaatgatgtccgg

SEQ ID NO: 411640 - DNA, 25 bp, Homo sapien
cactgtggcatttagatattgaggt

SEQ ID NO: 411641 - DNA, 25 bp, Homo sapien
aagtctgtgagaatgcgccaaaaac

SEQ ID NO: 411642 - DNA, 25 bp, Homo sapien
ctaagtctgtgagaatgcgccaaaa

SEQ ID NO: 411643 - DNA, 25 bp, Homo sapien
tctaagtctgtgagaatgcgccaaa

SEQ ID NO: 411644 - DNA, 25 bp, Homo sapien
catctaagtctgtgagaatgcgcca

SEQ ID NO: 411645 - DNA, 25 bp, Homo sapien
ctgggcatcctccttaaacggctct

SEQ ID NO: 411646 - DNA, 25 bp, Homo sapien
tccgaatttccaaagcagttcctga

SEQ ID NO: 411647 - DNA, 25 bp, Homo sapien
taaacggctctctgcgaatttccga

SEQ ID NO: 411648 - DNA, 25 bp, Homo sapien
cattgctacccggttggctcccttt

SEQ ID NO: 411649 - DNA, 25 bp, Homo sapien
tgtctcatggccttgtgaatggatg

SEQ ID NO: 411650 - DNA, 25 bp, Homo sapien
taattgtctcatggccttgtgaatg

SEQ ID NO: 411651 - DNA, 25 bp, Homo sapien
gcaggttaattgtctcatggccttg

SEQ ID NO: 411652 - DNA, 25 bp, Homo sapien
catggccttgtgaatggatgccacc

SEQ ID NO: 411653 - DNA, 25 bp, Homo sapien
ctttacattgagcttaaacagtggg

SEQ ID NO: 411654 - DNA, 25 bp, Homo sapien
tagtttaatgacaatcaggaggttt

SEQ ID NO: 411655 - DNA, 25 bp, Homo sapien
tgtttactacgatttagtgtcccca

SEQ ID NO: 411656 - DNA, 25 bp, Homo sapien
taaccagtagtttaatgacaatcag

SEQ ID NO: 411657 - DNA, 25 bp, Homo sapien
gaatcatgtgctttctccaaaatcc

SEQ ID NO: 411658 - DNA, 25 bp, Homo sapien
tgagaatcatgtgctttctccaaaa

SEQ ID NO: 411659 - DNA, 25 bp, Homo sapien
aatccaagcagcatctcttttccca

SEQ ID NO: 411660 - DNA, 25 bp, Homo sapien
catgagaatcatgtgctttctccaa

SEQ ID NO: 411661 - DNA, 25 bp, Homo sapien
tgttcccttaccatgcagccaagag

SEQ ID NO: 411662 - DNA, 25 bp, Homo sapien
caagggagtctccattccaagggac

SEQ ID NO: 411663 - DNA, 25 bp, Homo sapien
tccaagggacatggcccaacatggg

SEQ ID NO: 411664 - DNA, 25 bp, Homo sapien
gtgcaacctgcaatttccctgatgg

SEQ ID NO: 411665 - DNA, 25 bp, Homo sapien
gaagggaaagacttattgcaagcca

SEQ ID NO: 411666 - DNA, 25 bp, Homo sapien
tgccttggagtagtgagaatgacag

SEQ ID NO: 411667 - DNA, 25 bp, Homo sapien
gaatgacaggtaggatcaccaggac

SEQ ID NO: 411668 - DNA, 25 bp, Homo sapien
caataagttgggatggcccaacggg

SEQ ID NO: 411669 - DNA, 25 bp, Homo sapien
acctgaaatgatctgccctgacctc

SEQ ID NO: 411670 - DNA, 25 bp, Homo sapien
tgacctgaaatgatctgccctgacc

SEQ ID NO: 411671 - DNA, 25 bp, Homo sapien
ctgacctgaaatgatctgccctgac

SEQ ID NO: 411672 - DNA, 25 bp, Homo sapien
ctgaaatgatctgccctgacctcag

SEQ ID NO: 411673 - DNA, 25 bp, Homo sapien
ggacttcagtttgggaacaattcat

SEQ ID NO: 411674 - DNA, 25 bp, Homo sapien
gattgggctgccagtttcctaaaaa

SEQ ID NO: 411675 - DNA, 25 bp, Homo sapien
cccaaacagaatggaaggtgattta

SEQ ID NO: 411676 - DNA, 25 bp, Homo sapien
tctaagacattacccaatgaaagac

SEQ ID NO: 411677 - DNA, 25 bp, Homo sapien
gaggggactagactggctaagtctt

SEQ ID NO: 411678 - DNA, 25 bp, Homo sapien
tgcttttgaggcttggggactcgaa

SEQ ID NO: 411679 - DNA, 25 bp, Homo sapien
cagaaagcctgttgagggacttcac

SEQ ID NO: 411680 - DNA, 25 bp, Homo sapien
gaaagcctgttgagggacttcacct

SEQ ID NO: 411681 - DNA, 25 bp, Homo sapien
gagttcaatagagcacactttattt

SEQ ID NO: 411682 - DNA, 25 bp, Homo sapien
aattcaggagttcaatagagcacac

SEQ ID NO: 411683 - DNA, 25 bp, Homo sapien
ggagttcaatagagcacactttatt

SEQ ID NO: 411684 - DNA, 25 bp, Homo sapien
ttcaatagagcacactttatttttt

SEQ ID NO: 411685 - DNA, 25 bp, Homo sapien
atggagaatccccagtgaccagctt

SEQ ID NO: 411686 - DNA, 25 bp, Homo sapien
gaacttcctgcctatctgtatccca

SEQ ID NO: 411687 - DNA, 25 bp, Homo sapien
gaaggggagtactatggcattcatg

SEQ ID NO: 411688 - DNA, 25 bp, Homo sapien
gaatccccagtgaccagcttggaag

SEQ ID NO: 411689 - DNA, 25 bp, Homo sapien
agaccctgccctgacgaccctcctc

SEQ ID NO: 411690 - DNA, 25 bp, Homo sapien
cagaccctgccctgacgaccctcct

SEQ ID NO: 411691 - DNA, 25 bp, Homo sapien
taccttggcttgttgagacttctgc

SEQ ID NO: 411692 - DNA, 25 bp, Homo sapien
gcatagtaactagatgtcactctcc

SEQ ID NO: 411693 - DNA, 25 bp, Homo sapien
gatattcatagctacccaacaaatg

SEQ ID NO: 411694 - DNA, 25 bp, Homo sapien
taagctacgctgtaccccaaagatg

SEQ ID NO: 411695 - DNA, 25 bp, Homo sapien
tgcagggactgctcacatactaggt

SEQ ID NO: 411696 - DNA, 25 bp, Homo sapien
gaagaggctttgtcaagatctccaa

SEQ ID NO: 411697 - DNA, 25 bp, Homo sapien
gcattatgcccatggtaccaaccag

SEQ ID NO: 411698 - DNA, 25 bp, Homo sapien
gaaaggtgggtctcagtccacagtg

SEQ ID NO: 411699 - DNA, 25 bp, Homo sapien
atctcagtcgctgccaagtttcggg

SEQ ID NO: 411700 - DNA, 25 bp, Homo sapien
gctgccaagtttcgggctttgtact

SEQ ID NO: 411701 - DNA, 25 bp, Homo sapien
tcgctgccaagtttcgggctttgta

SEQ ID NO: 411702 - DNA, 25 bp, Homo sapien
cagtcgctgccaagtttcgggcttt

SEQ ID NO: 411703 - DNA, 25 bp, Homo sapien
gttcatcctcaacccccacctgccc

SEQ ID NO: 411704 - DNA, 25 bp, Homo sapien
cccagcagtctttcagttgcaagcc

SEQ ID NO: 411705 - DNA, 25 bp, Homo sapien
tgccccagcagtctttcagttgcaa

SEQ ID NO: 411706 - DNA, 25 bp, Homo sapien
ctggttcatcctcaacccccacctg

SEQ ID NO: 411707 - DNA, 25 bp, Homo sapien
caccactgttaagctgaaaaggttt

SEQ ID NO: 411708 - DNA, 25 bp, Homo sapien
aaggtttgaactgagtgcccagtag

SEQ ID NO: 411709 - DNA, 25 bp, Homo sapien
cactgttaagctgaaaaggtttgaa

SEQ ID NO: 411710 - DNA, 25 bp, Homo sapien
gccttaggggggcatctgtgaccaa

SEQ ID NO: 411711 - DNA, 25 bp, Homo sapien
aaagctgccatcacctacaacagct

SEQ ID NO: 411712 - DNA, 25 bp, Homo sapien
ccccactcctcccatatcctcaaag

SEQ ID NO: 411713 - DNA, 25 bp, Homo sapien
ctcaaagctgccatcacctacaaca

SEQ ID NO: 411714 - DNA, 25 bp, Homo sapien
tcccatatcctcaaagctgccatca

SEQ ID NO: 411715 - DNA, 25 bp, Homo sapien
tgtagggacggttgggtcaaggcaa

SEQ ID NO: 411716 - DNA, 25 bp, Homo sapien
tcacccagtgtctgtagggacggtt

SEQ ID NO: 411717 - DNA, 25 bp, Homo sapien
aataagctaggatctgtacaagtga

SEQ ID NO: 411718 - DNA, 25 bp, Homo sapien
caataagctaggatctgtacaagtg

SEQ ID NO: 411719 - DNA, 25 bp, Homo sapien
gccgctaagacacccatattgcatg

SEQ ID NO: 411720 - DNA, 25 bp, Homo sapien
gatgctgggagcttatttgcctgcg

SEQ ID NO: 411721 - DNA, 25 bp, Homo sapien
gcaagtgtccaacatgtgccacagg

SEQ ID NO: 411722 - DNA, 25 bp, Homo sapien
acatacatcttagggagggcacggg

SEQ ID NO: 411723 - DNA, 25 bp, Homo sapien
tcatcagtgcggtgggtcctaagaa

SEQ ID NO: 411724 - DNA, 25 bp, Homo sapien
tactgttctcacacgaagacaatgg

SEQ ID NO: 411725 - DNA, 25 bp, Homo sapien
acattttcgggcctgacctgagacc

SEQ ID NO: 411726 - DNA, 25 bp, Homo sapien
agtatggtccccacaagagcgtcag

SEQ ID NO: 411727 - DNA, 25 bp, Homo sapien
cattggtactccataacagcagtcc

SEQ ID NO: 411728 - DNA, 25 bp, Homo sapien
caacgaagacttgaaaggatggcgg

SEQ ID NO: 411729 - DNA, 25 bp, Homo sapien
agtgctcacttctaagtcggagcta

SEQ ID NO: 411730 - DNA, 25 bp, Homo sapien
catggctgtagagtgtggaacgata

SEQ ID NO: 411731 - DNA, 25 bp, Homo sapien
aatcaaaaaagcatcccaggtcagc

SEQ ID NO: 411732 - DNA, 25 bp, Homo sapien
gtcagctgaggaccctccaccattt

SEQ ID NO: 411733 - DNA, 25 bp, Homo sapien
ggcccctttctatgtgtccagtgaa

SEQ ID NO: 411734 - DNA, 25 bp, Homo sapien
ccagtgaacaatcaaaaaagcatcc

SEQ ID NO: 411735 - DNA, 25 bp, Homo sapien
ctcttctggttttaccattctcagc

SEQ ID NO: 411736 - DNA, 25 bp, Homo sapien
tcctttacttctccactatatgaag

SEQ ID NO: 411737 - DNA, 25 bp, Homo sapien
gaaatggtaggattgttgtggcctc

SEQ ID NO: 411738 - DNA, 25 bp, Homo sapien
tgcttttctctgtcgccacaatttt

SEQ ID NO: 411739 - DNA, 25 bp, Homo sapien
tgccaccagcaatgtcctgtgcctc

SEQ ID NO: 411740 - DNA, 25 bp, Homo sapien
accatccacgactgccaccagcaat

SEQ ID NO: 411741 - DNA, 25 bp, Homo sapien
acgactgccaccagcaatgtcctgt

SEQ ID NO: 411742 - DNA, 25 bp, Homo sapien
atccacgactgccaccagcaatgtc

SEQ ID NO: 411743 - DNA, 25 bp, Homo sapien
gactggaaagatgcggcaacatgca

SEQ ID NO: 411744 - DNA, 25 bp, Homo sapien
tctataatgatgacaggctggcagt

SEQ ID NO: 411745 - DNA, 25 bp, Homo sapien
acactctccggccagtttgtgaaaa

SEQ ID NO: 411746 - DNA, 25 bp, Homo sapien
gctggcagtaccaaagcgaggagcc

SEQ ID NO: 411747 - DNA, 25 bp, Homo sapien
cctgtcatgatgtaacccttttccc

SEQ ID NO: 411748 - DNA, 25 bp, Homo sapien
gctgtgtttgtcaaatagggcactg

SEQ ID NO: 411749 - DNA, 25 bp, Homo sapien
accctccaaaggtcaaaagtctctg

SEQ ID NO: 411750 - DNA, 25 bp, Homo sapien
tgtgcacaaacgtaccatcagctca

SEQ ID NO: 411751 - DNA, 25 bp, Homo sapien
gtttacatctggaatgcgaccatca

SEQ ID NO: 411752 - DNA, 25 bp, Homo sapien
tttacatctggaatgcgaccatcaa

SEQ ID NO: 411753 - DNA, 25 bp, Homo sapien
ttacatctggaatgcgaccatcaac

SEQ ID NO: 411754 - DNA, 25 bp, Homo sapien
cattttcacgatttacaccattgat

SEQ ID NO: 411755 - DNA, 25 bp, Homo sapien
ccattgatatttgtgctgacagaaa

SEQ ID NO: 411756 - DNA, 25 bp, Homo sapien
aagattaaggactggctgatgcaaa

SEQ ID NO: 411757 - DNA, 25 bp, Homo sapien
aatgattctcaacaatgaaatgtgc

SEQ ID NO: 411758 - DNA, 25 bp, Homo sapien
aaaatgaaaacgctcgccctctgac

SEQ ID NO: 411759 - DNA, 25 bp, Homo sapien
tgaaaccagcgtccctttaggagga

SEQ ID NO: 411760 - DNA, 25 bp, Homo sapien
gaacgcaggacactttccactctgg

SEQ ID NO: 411761 - DNA, 25 bp, Homo sapien
gcagcagaaatgagcgtcccgctgt

SEQ ID NO: 411762 - DNA, 25 bp, Homo sapien
cactttgtgcaaagctgcctcgtcc

SEQ ID NO: 411763 - DNA, 25 bp, Homo sapien
caatcacccatgtcacgggcttggc

SEQ ID NO: 411764 - DNA, 25 bp, Homo sapien
gacaaatattatgtgccctgaggtg

SEQ ID NO: 411765 - DNA, 25 bp, Homo sapien
tcaggtggaagcttcctgcatccgt

SEQ ID NO: 411766 - DNA, 25 bp, Homo sapien
ggagcactgagacctttctgctgtg

SEQ ID NO: 411767 - DNA, 25 bp, Homo sapien
tgtgtggccgctttgcccaactcct

SEQ ID NO: 411768 - DNA, 25 bp, Homo sapien
cactgagacctttctgctgtgtggc

SEQ ID NO: 411769 - DNA, 25 bp, Homo sapien
tcacacgagggagcactgagacctt

SEQ ID NO: 411770 - DNA, 25 bp, Homo sapien
ctagctaagacttggtgacacagcc

SEQ ID NO: 411771 - DNA, 25 bp, Homo sapien
ggtgctagctaagacttggtgacac

SEQ ID NO: 411772 - DNA, 25 bp, Homo sapien
tgctagctaagacttggtgacacag

SEQ ID NO: 411773 - DNA, 25 bp, Homo sapien
agtggtgctagctaagacttggtga

SEQ ID NO: 411774 - DNA, 25 bp, Homo sapien
taaggatccggtcctgaagataaac

SEQ ID NO: 411775 - DNA, 25 bp, Homo sapien
tgtaaggatccggtcctgaagataa

SEQ ID NO: 411776 - DNA, 25 bp, Homo sapien
ctgtaaggatccggtcctgaagata

SEQ ID NO: 411777 - DNA, 25 bp, Homo sapien
aaggatccggtcctgaagataaaca

SEQ ID NO: 411778 - DNA, 25 bp, Homo sapien
cagaaaaacaaggtttccggatcat

SEQ ID NO: 411779 - DNA, 25 bp, Homo sapien
gctgttcatgcccatgctcaaagca

SEQ ID NO: 411780 - DNA, 25 bp, Homo sapien
gaactaaccttggaaccaccatgtg

SEQ ID NO: 411781 - DNA, 25 bp, Homo sapien
tcagattgtctggagctgatcccca

SEQ ID NO: 411782 - DNA, 25 bp, Homo sapien
ggcgaccaggaccttcacgatgact

SEQ ID NO: 411783 - DNA, 25 bp, Homo sapien
ggagcccaaggatcaagcaaagaac

SEQ ID NO: 411784 - DNA, 25 bp, Homo sapien
tctgtaatatgaatgatcgcaaagc

SEQ ID NO: 411785 - DNA, 25 bp, Homo sapien
tgggattcctgtggcaatgaccttc

SEQ ID NO: 411786 - DNA, 25 bp, Homo sapien
cagcttcagggattaatgggattcc

SEQ ID NO: 411787 - DNA, 25 bp, Homo sapien
ccagccgtgcgattggagatttata

SEQ ID NO: 411788 - DNA, 25 bp, Homo sapien
cagatgagtaagcaaacaggatgag

SEQ ID NO: 411789 - DNA, 25 bp, Homo sapien
cctggggcagatgagtaagcaaaca

SEQ ID NO: 411790 - DNA, 25 bp, Homo sapien
ccctggggcagatgagtaagcaaac

SEQ ID NO: 411791 - DNA, 25 bp, Homo sapien
gggcagatgagtaagcaaacaggat

SEQ ID NO: 411792 - DNA, 25 bp, Homo sapien
cattgagtcccctgatcaagcccat

SEQ ID NO: 411793 - DNA, 25 bp, Homo sapien
gccacttgtggtcaacagtctctca

SEQ ID NO: 411794 - DNA, 25 bp, Homo sapien
cagtctctcaatgttgatcacattg

SEQ ID NO: 411795 - DNA, 25 bp, Homo sapien
gggccacttgtggtcaacagtctct

SEQ ID NO: 411796 - DNA, 25 bp, Homo sapien
ggctcaccttggaatcaaaggcata

SEQ ID NO: 411797 - DNA, 25 bp, Homo sapien
ggttccaaactgcttgcctaccctg

SEQ ID NO: 411798 - DNA, 25 bp, Homo sapien
gaatcaaaggcatatcggtgcgatg

SEQ ID NO: 411799 - DNA, 25 bp, Homo sapien
catatcggtgcgatgtttttcttgg

SEQ ID NO: 411800 - DNA, 25 bp, Homo sapien
tgatctctcctgagtaaaatcccct

SEQ ID NO: 411801 - DNA, 25 bp, Homo sapien
ccaatgggcccatagggaagttgcc

SEQ ID NO: 411802 - DNA, 25 bp, Homo sapien
gtttatccaaacacaggccaagctc

SEQ ID NO: 411803 - DNA, 25 bp, Homo sapien
catgcgtgcgtacagactgctgagt

SEQ ID NO: 411804 - DNA, 25 bp, Homo sapien
cacaggtggcgtatcagagctaagc

SEQ ID NO: 411805 - DNA, 25 bp, Homo sapien
tagccatagccaccgaaagtttaaa

SEQ ID NO: 411806 - DNA, 25 bp, Homo sapien
tctggaccagtagggctagccatag

SEQ ID NO: 411807 - DNA, 25 bp, Homo sapien
gacgacttcaagtcacggaggaagc

SEQ ID NO: 411808 - DNA, 25 bp, Homo sapien
atgctatatggaatttttactctgc

SEQ ID NO: 411809 - DNA, 25 bp, Homo sapien
tttttacaatcaaatcgaactttgc

SEQ ID NO: 411810 - DNA, 25 bp, Homo sapien
cttttcaagagaagcgcatctgttc

SEQ ID NO: 411811 - DNA, 25 bp, Homo sapien
tgttctgagtctcttaatgctatat

SEQ ID NO: 411812 - DNA, 25 bp, Homo sapien
tctttcccaacagacaatggaggcc

SEQ ID NO: 411813 - DNA, 25 bp, Homo sapien
cctcctgagcaagcaatgggtagca

SEQ ID NO: 411814 - DNA, 25 bp, Homo sapien
tatcatttgcctggaatgcggccac

SEQ ID NO: 411815 - DNA, 25 bp, Homo sapien
tcatggcaagaataaaccccgtggt

SEQ ID NO: 411816 - DNA, 25 bp, Homo sapien
tttcttaaccacgagcctgagtccg

SEQ ID NO: 411817 - DNA, 25 bp, Homo sapien
taggcaaggctttgatgtggttccc

SEQ ID NO: 411818 - DNA, 25 bp, Homo sapien
tcatgagaatctgtaacctggccca

SEQ ID NO: 411819 - DNA, 25 bp, Homo sapien
gaaacgtttactagagccctgctaa

SEQ ID NO: 411820 - DNA, 25 bp, Homo sapien
tcggtgtttaccacgcaaaggcatc

SEQ ID NO: 411821 - DNA, 25 bp, Homo sapien
agtgcagagctagtggaggaaaaac

SEQ ID NO: 411822 - DNA, 25 bp, Homo sapien
ggcatagcttaaatttcatctctcc

SEQ ID NO: 411823 - DNA, 25 bp, Homo sapien
caaagataattacttagcaacgtcg

SEQ ID NO: 411824 - DNA, 25 bp, Homo sapien
ggcaactgctttccacctggaaggg

SEQ ID NO: 411825 - DNA, 25 bp, Homo sapien
caactgctttccacctggaagggtt

SEQ ID NO: 411826 - DNA, 25 bp, Homo sapien
actggcaactgctttccacctggaa

SEQ ID NO: 411827 - DNA, 25 bp, Homo sapien
tggcaactgctttccacctggaagg

SEQ ID NO: 411828 - DNA, 25 bp, Homo sapien
tccggacggctctgactcgggatgc

SEQ ID NO: 411829 - DNA, 25 bp, Homo sapien
aagggctcgcgcacgtccttcaaga

SEQ ID NO: 411830 - DNA, 25 bp, Homo sapien
aagtcagcgtgcatgggtaacccga

SEQ ID NO: 411831 - DNA, 25 bp, Homo sapien
accaggagacgcgacgactggaacc

SEQ ID NO: 411832 - DNA, 25 bp, Homo sapien
cagcgcgcaacaacttctccaggtt

SEQ ID NO: 411833 - DNA, 25 bp, Homo sapien
tgacagcgcgcaacaacttctccag

SEQ ID NO: 411834 - DNA, 25 bp, Homo sapien
ttctccaggtttcgagggggcaagc

SEQ ID NO: 411835 - DNA, 25 bp, Homo sapien
ctggggggcgcacggcgcgctgctc

SEQ ID NO: 411836 - DNA, 25 bp, Homo sapien
gcgtcgccgaaaagccaggcccgga

SEQ ID NO: 411837 - DNA, 25 bp, Homo sapien
ccgagggcggcacggatcgccaagg

SEQ ID NO: 411838 - DNA, 25 bp, Homo sapien
tgagcgcccaggacgcgtcgccgaa

SEQ ID NO: 411839 - DNA, 25 bp, Homo sapien
acggatcgccaaggtgagcgcccag

SEQ ID NO: 411840 - DNA, 25 bp, Homo sapien
gaatgccgacgtccggacgctgtca

SEQ ID NO: 411841 - DNA, 25 bp, Homo sapien
tttccatccagcgaaggcacctggg

SEQ ID NO: 411842 - DNA, 25 bp, Homo sapien
ctcctgctgccgagaggaccgaatg

SEQ ID NO: 411843 - DNA, 25 bp, Homo sapien
tgtgtgaacacgaaaacaatacgtg

SEQ ID NO: 411844 - DNA, 25 bp, Homo sapien
tctgccaatcggagctgtcagggcc

SEQ ID NO: 411845 - DNA, 25 bp, Homo sapien
tgggaaaccgagctccgattgggcc

SEQ ID NO: 411846 - DNA, 25 bp, Homo sapien
gattgggccgcctgacaatcgctcc

SEQ ID NO: 411847 - DNA, 25 bp, Homo sapien
cagccaatccgaggcggtggatgca

SEQ ID NO: 411848 - DNA, 25 bp, Homo sapien
cagagtaagtgactcgggcagggtt

SEQ ID NO: 411849 - DNA, 25 bp, Homo sapien
aagtgactcgggcagggttcacgca

SEQ ID NO: 411850 - DNA, 25 bp, Homo sapien
gggcagggttcacgcagacctcctg

SEQ ID NO: 411851 - DNA, 25 bp, Homo sapien
ctgctgggcagagtaagtgactcgg

SEQ ID NO: 411852 - DNA, 25 bp, Homo sapien
tcctcctctcctgaagagctctaga

SEQ ID NO: 411853 - DNA, 25 bp, Homo sapien
caaggttgtggagaacgcggaaacg

SEQ ID NO: 411854 - DNA, 25 bp, Homo sapien
aaacggagacgctggcggtacagcc

SEQ ID NO: 411855 - DNA, 25 bp, Homo sapien
ggtacagcctcgagcgaaacctttc

SEQ ID NO: 411856 - DNA, 25 bp, Homo sapien
cctcagcacccccaaagtgctagga

SEQ ID NO: 411857 - DNA, 25 bp, Homo sapien
gagaaggactctgtctgtgtcaccc

SEQ ID NO: 411858 - DNA, 25 bp, Homo sapien
ttgagaaggactctgtctgtgtcac

SEQ ID NO: 411859 - DNA, 25 bp, Homo sapien
ggctcagtgcaacctgcaacctctg

SEQ ID NO: 411860 - DNA, 25 bp, Homo sapien
tagattaggcaactgggctggcaag

SEQ ID NO: 411861 - DNA, 25 bp, Homo sapien
tgctgcagctcaagggatgaaaagc

SEQ ID NO: 411862 - DNA, 25 bp, Homo sapien
ttcagctaagccttcttcagctctg

SEQ ID NO: 411863 - DNA, 25 bp, Homo sapien
ggcaggcattgccaaaacttcagct

SEQ ID NO: 411864 - DNA, 25 bp, Homo sapien
tgacaaactcatccaatccaggagc

SEQ ID NO: 411865 - DNA, 25 bp, Homo sapien
caggagcaatggtggaatcaatctt

SEQ ID NO: 411866 - DNA, 25 bp, Homo sapien
cactactggaatgcttgtgatccac

SEQ ID NO: 411867 - DNA, 25 bp, Homo sapien
gagagttcctgactcggtgccacca

SEQ ID NO: 411868 - DNA, 25 bp, Homo sapien
tgtcatgaataatatctgtacaatt

SEQ ID NO: 411869 - DNA, 25 bp, Homo sapien
gaagttgtaggacgaaaagaggtca

SEQ ID NO: 411870 - DNA, 25 bp, Homo sapien
caaaggacaaatcggagcccaagga

SEQ ID NO: 411871 - DNA, 25 bp, Homo sapien
taaaatgctattgatggccgggcac

SEQ ID NO: 411872 - DNA, 25 bp, Homo sapien
tagtagagcatgcttccacaggaag

SEQ ID NO: 411873 - DNA, 25 bp, Homo sapien
tgtcagggtgatagtgccagatgcc

SEQ ID NO: 411874 - DNA, 25 bp, Homo sapien
cactgtcagggtgatagtgccagat

SEQ ID NO: 411875 - DNA, 25 bp, Homo sapien
tcagggtgatagtgccagatgccaa

SEQ ID NO: 411876 - DNA, 25 bp, Homo sapien
gcactgtcagggtgatagtgccaga

SEQ ID NO: 411877 - DNA, 25 bp, Homo sapien
agggctaacccccatggcacgtgta

SEQ ID NO: 411878 - DNA, 25 bp, Homo sapien
atggttgcggttcagagaacagtta

SEQ ID NO: 411879 - DNA, 25 bp, Homo sapien
gctatgttgggagataataactgac

SEQ ID NO: 411880 - DNA, 25 bp, Homo sapien
taaaagagctatgttgggagataat

SEQ ID NO: 411881 - DNA, 25 bp, Homo sapien
tccaagagcctaatggtatgatctg

SEQ ID NO: 411882 - DNA, 25 bp, Homo sapien
ttcaagtcagtgaagctaaggtctc

SEQ ID NO: 411883 - DNA, 25 bp, Homo sapien
caaactgtaggcaaaacacatgtcc

SEQ ID NO: 411884 - DNA, 25 bp, Homo sapien
ggagccacattcaatatccaagagc

SEQ ID NO: 411885 - DNA, 25 bp, Homo sapien
ccaggacaccacgtaaagtgatatc

SEQ ID NO: 411886 - DNA, 25 bp, Homo sapien
tcagtggacaaccaggacaccacgt

SEQ ID NO: 411887 - DNA, 25 bp, Homo sapien
cacgtaaagtgatatcggtcgcaga

SEQ ID NO: 411888 - DNA, 25 bp, Homo sapien
tggacaaccaggacaccacgtaaag

SEQ ID NO: 411889 - DNA, 25 bp, Homo sapien
gtgttaagaacttcacccgtgttca

SEQ ID NO: 411890 - DNA, 25 bp, Homo sapien
tgtgttaagaacttcacccgtgttc

SEQ ID NO: 411891 - DNA, 25 bp, Homo sapien
aatgtgttaagaacttcacccgtgt

SEQ ID NO: 411892 - DNA, 25 bp, Homo sapien
tgttaagaacttcacccgtgttcac

SEQ ID NO: 411893 - DNA, 25 bp, Homo sapien
ccttgctcgggtaaagcagtaataa

SEQ ID NO: 411894 - DNA, 25 bp, Homo sapien
cagagacctggtaaccaggtacaaa

SEQ ID NO: 411895 - DNA, 25 bp, Homo sapien
ttcagacccctggttaaaatattga

SEQ ID NO: 411896 - DNA, 25 bp, Homo sapien
aagagttgatacgtccatggtgata

SEQ ID NO: 411897 - DNA, 25 bp, Homo sapien
ggagatgatcacaaatgatgttcca

SEQ ID NO: 411898 - DNA, 25 bp, Homo sapien
tcacaaatgatgttccattacttat

SEQ ID NO: 411899 - DNA, 25 bp, Homo sapien
agatgatcacaaatgatgttccatt

SEQ ID NO: 411900 - DNA, 25 bp, Homo sapien
ctggagatgatcacaaatgatgttc

SEQ ID NO: 411901 - DNA, 25 bp, Homo sapien
tttctttggggacttatcttcatct

SEQ ID NO: 411902 - DNA, 25 bp, Homo sapien
cttatcttcatcttgatcttccaga

SEQ ID NO: 411903 - DNA, 25 bp, Homo sapien
gggacttatcttcatcttgatcttc

SEQ ID NO: 411904 - DNA, 25 bp, Homo sapien
ctttggggacttatcttcatcttga

SEQ ID NO: 411905 - DNA, 25 bp, Homo sapien
gcaggtcacatcttacgtgcaatgg

SEQ ID NO: 411906 - DNA, 25 bp, Homo sapien
caggtcacatcttacgtgcaatggc

SEQ ID NO: 411907 - DNA, 25 bp, Homo sapien
aggtcacatcttacgtgcaatggca

SEQ ID NO: 411908 - DNA, 25 bp, Homo sapien
tcctaaatattgaacggggtcttgc

SEQ ID NO: 411909 - DNA, 25 bp, Homo sapien
tctatattgtcgatttctcctctaa

SEQ ID NO: 411910 - DNA, 25 bp, Homo sapien
gtcttttttggcctcacatgaattt

SEQ ID NO: 411911 - DNA, 25 bp, Homo sapien
caggttcacgccacttcttctagtt

SEQ ID NO: 411912 - DNA, 25 bp, Homo sapien
tatattaccctattcccttctggcc

SEQ ID NO: 411913 - DNA, 25 bp, Homo sapien
tttggaaggagtattttgccaggca

SEQ ID NO: 411914 - DNA, 25 bp, Homo sapien
ccaggcatagtattcttagttgaca

SEQ ID NO: 411915 - DNA, 25 bp, Homo sapien
tgatttacccacaaccataacagta

SEQ ID NO: 411916 - DNA, 25 bp, Homo sapien
tcaataccagaattgggtgggggtc

SEQ ID NO: 411917 - DNA, 25 bp, Homo sapien
gtgggggtcttcagctcacccctaa

SEQ ID NO: 411918 - DNA, 25 bp, Homo sapien
ctcatcattgataagcagaatgaat

SEQ ID NO: 411919 - DNA, 25 bp, Homo sapien
aatgaccatggctggtttagacaac

SEQ ID NO: 411920 - DNA, 25 bp, Homo sapien
ggtagcacccttggcatggaattgg

SEQ ID NO: 411921 - DNA, 25 bp, Homo sapien
ccttggcatggaattgggtgtcctc

SEQ ID NO: 411922 - DNA, 25 bp, Homo sapien
tccagtaccagagaaatagggggta

SEQ ID NO: 411923 - DNA, 25 bp, Homo sapien
ggtatctggaggtagcacccttggc

SEQ ID NO: 411924 - DNA, 25 bp, Homo sapien
gcttgataacatgctgaacgttggg

SEQ ID NO: 411925 - DNA, 25 bp, Homo sapien
ctgaagcgttctttcctaggactgc

SEQ ID NO: 411926 - DNA, 25 bp, Homo sapien
gaagcgtatttccagctacagccat

SEQ ID NO: 411927 - DNA, 25 bp, Homo sapien
gcaccccgggtctaatgaatcagaa

SEQ ID NO: 411928 - DNA, 25 bp, Homo sapien
catgatcctctcaataatagatgca

SEQ ID NO: 411929 - DNA, 25 bp, Homo sapien
tcaacctggataaagtgcatctatg

SEQ ID NO: 411930 - DNA, 25 bp, Homo sapien
gcatctatgaaacacccacagttaa

SEQ ID NO: 411931 - DNA, 25 bp, Homo sapien
gttaacgtctgaaacttgaccagtg

SEQ ID NO: 411932 - DNA, 25 bp, Homo sapien
gacttaggggttcatcctactccag

SEQ ID NO: 411933 - DNA, 25 bp, Homo sapien
tgacaatatctggtgttctttggct

SEQ ID NO: 411934 - DNA, 25 bp, Homo sapien
tgtagaagcaccacacctatctctg

SEQ ID NO: 411935 - DNA, 25 bp, Homo sapien
catggtcaccttccaagttattggg

SEQ ID NO: 411936 - DNA, 25 bp, Homo sapien
cacatatgaggcctataaaccaagc

SEQ ID NO: 411937 - DNA, 25 bp, Homo sapien
tgcaactcaattaactcttcacaag

SEQ ID NO: 411938 - DNA, 25 bp, Homo sapien
agttgtgaagcagaatcatcctgtc

SEQ ID NO: 411939 - DNA, 25 bp, Homo sapien
tcttcacaagtgtaatgatctcaaa

SEQ ID NO: 411940 - DNA, 25 bp, Homo sapien
ccacctagtagggtagaggttcatt

SEQ ID NO: 411941 - DNA, 25 bp, Homo sapien
caagacaattcttcaaatatagcca

SEQ ID NO: 411942 - DNA, 25 bp, Homo sapien
ccgcacaaactttaggcattatcat

SEQ ID NO: 411943 - DNA, 25 bp, Homo sapien
tcaagtttaagtctcacccaactcc

SEQ ID NO: 411944 - DNA, 25 bp, Homo sapien
acctgaatccaggaagtcgagggtg

SEQ ID NO: 411945 - DNA, 25 bp, Homo sapien
cctgaatccaggaagtcgagggtgc

SEQ ID NO: 411946 - DNA, 25 bp, Homo sapien
ctgaatccaggaagtcgagggtgca

SEQ ID NO: 411947 - DNA, 25 bp, Homo sapien
agaagagggacagaacaggacgacc

SEQ ID NO: 411948 - DNA, 25 bp, Homo sapien
tctcgtgtctgtgggcggatccctt

SEQ ID NO: 411949 - DNA, 25 bp, Homo sapien
ccaggcatcattagaccgtctcaaa

SEQ ID NO: 411950 - DNA, 25 bp, Homo sapien
gtaattcactgtcccaaagcagctc

SEQ ID NO: 411951 - DNA, 25 bp, Homo sapien
atttcgcgtactgcaaccggcgggc

SEQ ID NO: 411952 - DNA, 25 bp, Homo sapien
tgccaatttcgcgtactgcaaccgg

SEQ ID NO: 411953 - DNA, 25 bp, Homo sapien
tcattttgccaatttcgcgtactgc

SEQ ID NO: 411954 - DNA, 25 bp, Homo sapien
ttttgccaatttcgcgtactgcaac

SEQ ID NO: 411955 - DNA, 25 bp, Homo sapien
tatcagaggccttgggacatagctt

SEQ ID NO: 411956 - DNA, 25 bp, Homo sapien
tcccagagcattagtgtgtagacgt

SEQ ID NO: 411957 - DNA, 25 bp, Homo sapien
gacttgggcaatgtgactgctgaca

SEQ ID NO: 411958 - DNA, 25 bp, Homo sapien
tattaggcatgttggagacttgggc

SEQ ID NO: 411959 - DNA, 25 bp, Homo sapien
agaacactgttctgctaagatgcag

SEQ ID NO: 411960 - DNA, 25 bp, Homo sapien
tgttcattcaggactgcaggttatc

SEQ ID NO: 411961 - DNA, 25 bp, Homo sapien
tccccttgagggcattaacattcag

SEQ ID NO: 411962 - DNA, 25 bp, Homo sapien
cttgagccatagttgtaaagcagaa

SEQ ID NO: 411963 - DNA, 25 bp, Homo sapien
gcaagttacagcctcagctagctag

SEQ ID NO: 411964 - DNA, 25 bp, Homo sapien
tctgtagcattagaagatggaacca

SEQ ID NO: 411965 - DNA, 25 bp, Homo sapien
gacgctggcacaacctacttacaga

SEQ ID NO: 411966 - DNA, 25 bp, Homo sapien
ctacattcaagggtagacgctggca

SEQ ID NO: 411967 - DNA, 25 bp, Homo sapien
tagtacaacgtgtaacactgggatc

SEQ ID NO: 411968 - DNA, 25 bp, Homo sapien
gggatccaacttttcacccagcaaa

SEQ ID NO: 411969 - DNA, 25 bp, Homo sapien
cccaggcagtccgataatttatagt

SEQ ID NO: 411970 - DNA, 25 bp, Homo sapien
ccttctaacgtaatacccaggcagt

SEQ ID NO: 411971 - DNA, 25 bp, Homo sapien
aaatagagagcacttctaattacga

SEQ ID NO: 411972 - DNA, 25 bp, Homo sapien
ttgaggagctttcaccgttaccttg

SEQ ID NO: 411973 - DNA, 25 bp, Homo sapien
gagagcacttctaattacgatttgt

SEQ ID NO: 411974 - DNA, 25 bp, Homo sapien
gagctttcaccgttaccttgtctta

SEQ ID NO: 411975 - DNA, 25 bp, Homo sapien
cagcgggagcggatataatacagca

SEQ ID NO: 411976 - DNA, 25 bp, Homo sapien
gaagtgtcactgtcacattttcaca

SEQ ID NO: 411977 - DNA, 25 bp, Homo sapien
cctcaagctctacactccaggaagt

SEQ ID NO: 411978 - DNA, 25 bp, Homo sapien
ttgcttacagttccccaccagctgg

SEQ ID NO: 411979 - DNA, 25 bp, Homo sapien
cacttggctaatgggaggttcaacg

SEQ ID NO: 411980 - DNA, 25 bp, Homo sapien
tgtctcgatgcccactagagcgtct

SEQ ID NO: 411981 - DNA, 25 bp, Homo sapien
tcgggttcaacggatgaggtagcct

SEQ ID NO: 411982 - DNA, 25 bp, Homo sapien
tcagcaggtaactcttcagaaggct

SEQ ID NO: 411983 - DNA, 25 bp, Homo sapien
actgctgcctgttatcatttctaaa

SEQ ID NO: 411984 - DNA, 25 bp, Homo sapien
ctgctgcctgttatcatttctaaac

SEQ ID NO: 411985 - DNA, 25 bp, Homo sapien
tgctgcctgttatcatttctaaact

SEQ ID NO: 411986 - DNA, 25 bp, Homo sapien
tgctgtggttgctggggcgcctgcg

SEQ ID NO: 411987 - DNA, 25 bp, Homo sapien
gctgtggttgctggggcgcctgcgg

SEQ ID NO: 411988 - DNA, 25 bp, Homo sapien
gcggcggctgttgccttccgtctct

SEQ ID NO: 411989 - DNA, 25 bp, Homo sapien
gctgcggcggctgttgccttccgtc

SEQ ID NO: 411990 - DNA, 25 bp, Homo sapien
ccatgaggtggaggcatcgcaaagc

SEQ ID NO: 411991 - DNA, 25 bp, Homo sapien
ccagtagatggtgcctgaagtccaa

SEQ ID NO: 411992 - DNA, 25 bp, Homo sapien
caaagggaaccgctgtaagtgaggt

SEQ ID NO: 411993 - DNA, 25 bp, Homo sapien
cgggcgccaagaagaccagtagatg

SEQ ID NO: 411994 - DNA, 25 bp, Homo sapien
tctcctaagtgaccaacaactgtag

SEQ ID NO: 411995 - DNA, 25 bp, Homo sapien
tttggagacccactgaacaactgtt

SEQ ID NO: 411996 - DNA, 25 bp, Homo sapien
cagcaggccccaaagcaagtgtttt

SEQ ID NO: 411997 - DNA, 25 bp, Homo sapien
cattagagcaccaagaggaaatacc

SEQ ID NO: 411998 - DNA, 25 bp, Homo sapien
tcaggtgatgataaacgctacgact

SEQ ID NO: 411999 - DNA, 25 bp, Homo sapien
gtaacaaatgttcccctctcatggg

SEQ ID NO: 412000 - DNA, 25 bp, Homo sapien
gaacagtcctgcattgaaaaccacc

SEQ ID NO: 412001 - DNA, 25 bp, Homo sapien
tcatgggtccatctagtgggaggaa

SEQ ID NO: 412002 - DNA, 25 bp, Homo sapien
gaaagtggtacctcaggctgcgcaa

SEQ ID NO: 412003 - DNA, 25 bp, Homo sapien
taaaagatctaagtcacatcgccct

SEQ ID NO: 412004 - DNA, 25 bp, Homo sapien
tatgggctcacaggactagaacact

SEQ ID NO: 412005 - DNA, 25 bp, Homo sapien
ccaacagtactgaatagcataggtg

SEQ ID NO: 412006 - DNA, 25 bp, Homo sapien
taaagatcaagtacacatatttgac

SEQ ID NO: 412007 - DNA, 25 bp, Homo sapien
atttgactttaagaggaagatcttc

SEQ ID NO: 412008 - DNA, 25 bp, Homo sapien
taaggatgtgaagatccaaactttt

SEQ ID NO: 412009 - DNA, 25 bp, Homo sapien
ctcttggtaaagatcaagtacacat

SEQ ID NO: 412010 - DNA, 25 bp, Homo sapien
caagaagtgaaacaggctgggttac

SEQ ID NO: 412011 - DNA, 25 bp, Homo sapien
tgtcaccagactcggcgtttcctct

SEQ ID NO: 412012 - DNA, 25 bp, Homo sapien
gcagagccatacattttcacgctgt

SEQ ID NO: 412013 - DNA, 25 bp, Homo sapien
ggtggcacggcagagccatacattt

SEQ ID NO: 412014 - DNA, 25 bp, Homo sapien
ggtgggcagattcgtgggtgcagca

SEQ ID NO: 412015 - DNA, 25 bp, Homo sapien
gaatgggatttccaatagataagtc

SEQ ID NO: 412016 - DNA, 25 bp, Homo sapien
tcttcatttataccagcgatagtag

SEQ ID NO: 412017 - DNA, 25 bp, Homo sapien
tgggatttccaatagataagtcttt

SEQ ID NO: 412018 - DNA, 25 bp, Homo sapien
tgtagtgtcttcatttataccagcg

SEQ ID NO: 412019 - DNA, 25 bp, Homo sapien
cccagctccaagaggataagcaaac

SEQ ID NO: 412020 - DNA, 25 bp, Homo sapien
gcttcactctccctcctacacccag

SEQ ID NO: 412021 - DNA, 25 bp, Homo sapien
cctacacccagctccaagaggataa

SEQ ID NO: 412022 - DNA, 25 bp, Homo sapien
ctccaagaggataagcaaacacaaa

SEQ ID NO: 412023 - DNA, 25 bp, Homo sapien
agtttgggatgcttattggtggagt

SEQ ID NO: 412024 - DNA, 25 bp, Homo sapien
gtttgggatgcttattggtggagtg

SEQ ID NO: 412025 - DNA, 25 bp, Homo sapien
aggaatggatactggtggagttata

SEQ ID NO: 412026 - DNA, 25 bp, Homo sapien
ggaatggatactggtggagttatag

SEQ ID NO: 412027 - DNA, 25 bp, Homo sapien
gaatcctgggcgcaaaaatggtgga

SEQ ID NO: 412028 - DNA, 25 bp, Homo sapien
ctggtggtaaatgcattgggttgaa

SEQ ID NO: 412029 - DNA, 25 bp, Homo sapien
ccaaagcctggaggcggtattccca

SEQ ID NO: 412030 - DNA, 25 bp, Homo sapien
aggcggctggagagcaccaactaca

SEQ ID NO: 412031 - DNA, 25 bp, Homo sapien
ttcatgatagctcagatttatctga

SEQ ID NO: 412032 - DNA, 25 bp, Homo sapien
catgatagctcagatttatctgatt

SEQ ID NO: 412033 - DNA, 25 bp, Homo sapien
tttcatgatagctcagatttatctg

SEQ ID NO: 412034 - DNA, 25 bp, Homo sapien
gatttatctgattcagatttaatgt

SEQ ID NO: 412035 - DNA, 25 bp, Homo sapien
gacaggcacaggtaatggtttaggt

SEQ ID NO: 412036 - DNA, 25 bp, Homo sapien
aacaggaataggagggacaggcaca

SEQ ID NO: 412037 - DNA, 25 bp, Homo sapien
tatgggtgatactggttctgtgtgt

SEQ ID NO: 412038 - DNA, 25 bp, Homo sapien
cactgttataggtgcaggaacagga

SEQ ID NO: 412039 - DNA, 25 bp, Homo sapien
ctgtaagagaaattaaatactgctt

SEQ ID NO: 412040 - DNA, 25 bp, Homo sapien
taagagaaattaaatactgctttac

SEQ ID NO: 412041 - DNA, 25 bp, Homo sapien
aagcaaataagtgaactgtaagaga

SEQ ID NO: 412042 - DNA, 25 bp, Homo sapien
caagcaaataagtgaactgtaagag

SEQ ID NO: 412043 - DNA, 25 bp, Homo sapien
actgtccaacattcctccttcacaa

SEQ ID NO: 412044 - DNA, 25 bp, Homo sapien
tgtcactgtccaacattcctccttc

SEQ ID NO: 412045 - DNA, 25 bp, Homo sapien
aatactgcttataatctgcctttat

SEQ ID NO: 412046 - DNA, 25 bp, Homo sapien
aacaccaagttctacatcccaatac

SEQ ID NO: 412047 - DNA, 25 bp, Homo sapien
tcattctatccattccgactcgggc

SEQ ID NO: 412048 - DNA, 25 bp, Homo sapien
caatctggaccagctaggcttggat

SEQ ID NO: 412049 - DNA, 25 bp, Homo sapien
actcgggcaccaagggagcaatctg

SEQ ID NO: 412050 - DNA, 25 bp, Homo sapien
gaagttccctgaatagcctagtagt

SEQ ID NO: 412051 - DNA, 25 bp, Homo sapien
gaaccataacaatataggcacaacc

SEQ ID NO: 412052 - DNA, 25 bp, Homo sapien
ggcatcttgcctatgaaccataaca

SEQ ID NO: 412053 - DNA, 25 bp, Homo sapien
tggatttctggttcactttatagtt

SEQ ID NO: 412054 - DNA, 25 bp, Homo sapien
tcagtttctgcagggcacgataggc

SEQ ID NO: 412055 - DNA, 25 bp, Homo sapien
gatacaacaccaagtaagcagttcc

SEQ ID NO: 412056 - DNA, 25 bp, Homo sapien
ttgtaactttggtctcaggtcctcc

SEQ ID NO: 412057 - DNA, 25 bp, Homo sapien
aattctaaacgtggactctgaacac

SEQ ID NO: 412058 - DNA, 25 bp, Homo sapien
cctgtccatcgtacttaaaaaactg

SEQ ID NO: 412059 - DNA, 25 bp, Homo sapien
aaactcttccaagagactggcaaca

SEQ ID NO: 412060 - DNA, 25 bp, Homo sapien
actggcaacatcctgctgagtagtt

SEQ ID NO: 412061 - DNA, 25 bp, Homo sapien
caacatcctgctgagtagttctttt

SEQ ID NO: 412062 - DNA, 25 bp, Homo sapien
taattgattcaattggaccaaactc

SEQ ID NO: 412063 - DNA, 25 bp, Homo sapien
tacaacaccacaagtttaaatagta

SEQ ID NO: 412064 - DNA, 25 bp, Homo sapien
aattacaatcataaagagattcaca

SEQ ID NO: 412065 - DNA, 25 bp, Homo sapien
tttgataatgagcagcactgtagct

SEQ ID NO: 412066 - DNA, 25 bp, Homo sapien
gaactgggatagtgaaagatataca

SEQ ID NO: 412067 - DNA, 25 bp, Homo sapien
gaggcctttttgtcgacgttctctc

SEQ ID NO: 412068 - DNA, 25 bp, Homo sapien
gcagtttccggtttcacttgaggga

SEQ ID NO: 412069 - DNA, 25 bp, Homo sapien
cgtctttcttgagatcgagatcggg

SEQ ID NO: 412070 - DNA, 25 bp, Homo sapien
tctctttttctcgatcccgtctttc

SEQ ID NO: 412071 - DNA, 25 bp, Homo sapien
ccgagatcgagaacgtcgatgccga

SEQ ID NO: 412072 - DNA, 25 bp, Homo sapien
tagaaccagatctagatcgcctcct

SEQ ID NO: 412073 - DNA, 25 bp, Homo sapien
tctagatcgcctcctttttggtgac

SEQ ID NO: 412074 - DNA, 25 bp, Homo sapien
gagaccttcgagatctagaaccaga

SEQ ID NO: 412075 - DNA, 25 bp, Homo sapien
ttgaatacaaggttgttctacttcc

SEQ ID NO: 412076 - DNA, 25 bp, Homo sapien
ctggatgctgacctagatcttgact

SEQ ID NO: 412077 - DNA, 25 bp, Homo sapien
ttctgttatcagacatatgtcgctt

SEQ ID NO: 412078 - DNA, 25 bp, Homo sapien
gacatatgtcgcttaacctcttgaa

SEQ ID NO: 412079 - DNA, 25 bp, Homo sapien
ctgaaaagaagcttggaaaggctgc

SEQ ID NO: 412080 - DNA, 25 bp, Homo sapien
tgcctgaaaagaagcttggaaaggc

SEQ ID NO: 412081 - DNA, 25 bp, Homo sapien
tttgtgcctgaaaagaagcttggaa

SEQ ID NO: 412082 - DNA, 25 bp, Homo sapien
tgtgcctgaaaagaagcttggaaag

SEQ ID NO: 412083 - DNA, 25 bp, Homo sapien
gcatttgtccattaggaggaagtgg

SEQ ID NO: 412084 - DNA, 25 bp, Homo sapien
tttgtccattaggaggaagtggaac

SEQ ID NO: 412085 - DNA, 25 bp, Homo sapien
ctgagccatgggaggaaatggaggt

SEQ ID NO: 412086 - DNA, 25 bp, Homo sapien
catttgtccattaggaggaagtgga

SEQ ID NO: 412087 - DNA, 25 bp, Homo sapien
cattcgtggctgaaactgatccata

SEQ ID NO: 412088 - DNA, 25 bp, Homo sapien
gtattcccatcattcgtggctgaaa

SEQ ID NO: 412089 - DNA, 25 bp, Homo sapien
tggatcctgttgtattcccatcatt

SEQ ID NO: 412090 - DNA, 25 bp, Homo sapien
ctgatggtgcattggatcctgttgt

SEQ ID NO: 412091 - DNA, 25 bp, Homo sapien
cagcaggtgctgtcgtggtgacggc

SEQ ID NO: 412092 - DNA, 25 bp, Homo sapien
gtgacggcagtggtatcctctttct

SEQ ID NO: 412093 - DNA, 25 bp, Homo sapien
tcgtggtgacggcagtggtatcctc

SEQ ID NO: 412094 - DNA, 25 bp, Homo sapien
agcaggcacggtggcggtgggtgca

SEQ ID NO: 412095 - DNA, 25 bp, Homo sapien
aatgagaagctctaagctgttcagc

SEQ ID NO: 412096 - DNA, 25 bp, Homo sapien
catatccttagtggcagcttcttaa

SEQ ID NO: 412097 - DNA, 25 bp, Homo sapien
tataggcccgatagagcagctgaga

SEQ ID NO: 412098 - DNA, 25 bp, Homo sapien
gatgaaaccaaaggcatcagttctg

SEQ ID NO: 412099 - DNA, 25 bp, Homo sapien
taatttccataactcaagttgagtg

SEQ ID NO: 412100 - DNA, 25 bp, Homo sapien
aaacgacataatgaacaatccacag

SEQ ID NO: 412101 - DNA, 25 bp, Homo sapien
ttttacactagtaaattcagcttca

SEQ ID NO: 412102 - DNA, 25 bp, Homo sapien
ccagggaaaataatcgatgttttct

SEQ ID NO: 412103 - DNA, 25 bp, Homo sapien
gttgtgtaggagttgtctttaactg

SEQ ID NO: 412104 - DNA, 25 bp, Homo sapien
gatagcctgaacctgagccatcaca

SEQ ID NO: 412105 - DNA, 25 bp, Homo sapien
agctgtgatagcctgaacctgagcc

SEQ ID NO: 412106 - DNA, 25 bp, Homo sapien
gtaggagttgtctttaactgagctg

SEQ ID NO: 412107 - DNA, 25 bp, Homo sapien
caactgtggtacagctgggacggag

SEQ ID NO: 412108 - DNA, 25 bp, Homo sapien
tgtgtgggaggttcagaagaaactt

SEQ ID NO: 412109 - DNA, 25 bp, Homo sapien
aaagcatcagagctgggcaactgtg

SEQ ID NO: 412110 - DNA, 25 bp, Homo sapien
ggccttgagttgtctgaaacagctg

SEQ ID NO: 412111 - DNA, 25 bp, Homo sapien
taaaatatagagattgtggcactag

SEQ ID NO: 412112 - DNA, 25 bp, Homo sapien
taacaactaccagaagagcagacct

SEQ ID NO: 412113 - DNA, 25 bp, Homo sapien
ttccaagatgtaaactcaagtttcc

SEQ ID NO: 412114 - DNA, 25 bp, Homo sapien
gaaagaaaatcataccttccaagat

SEQ ID NO: 412115 - DNA, 25 bp, Homo sapien
gctgccatgtccaaaagaggttgaa

SEQ ID NO: 412116 - DNA, 25 bp, Homo sapien
ggttcagcacacgaactattttact

SEQ ID NO: 412117 - DNA, 25 bp, Homo sapien
gctactggggctgcattactggttc

SEQ ID NO: 412118 - DNA, 25 bp, Homo sapien
ttttttgccaaaggttcagcacacg

SEQ ID NO: 412119 - DNA, 25 bp, Homo sapien
ataatcccggaaccttgtattctgg

SEQ ID NO: 412120 - DNA, 25 bp, Homo sapien
gaatgtggcagttatgtttttagag

SEQ ID NO: 412121 - DNA, 25 bp, Homo sapien
tatcagttccaaactgatgacgaga

SEQ ID NO: 412122 - DNA, 25 bp, Homo sapien
cgagactgtcgcacaattgagtcaa

SEQ ID NO: 412123 - DNA, 25 bp, Homo sapien
ctttttgatgaacttttctactatt

SEQ ID NO: 412124 - DNA, 25 bp, Homo sapien
ctatttgaactacatgcttataaag

SEQ ID NO: 412125 - DNA, 25 bp, Homo sapien
gatgaacttttctactatttgaact

SEQ ID NO: 412126 - DNA, 25 bp, Homo sapien
actatttgaactacatgcttataaa

SEQ ID NO: 412127 - DNA, 25 bp, Homo sapien
ttaatagcagctttagtgatgagaa

SEQ ID NO: 412128 - DNA, 25 bp, Homo sapien
cttaatagctttaatagcagcttta

SEQ ID NO: 412129 - DNA, 25 bp, Homo sapien
tagcagctttagtgatgagaatcat

SEQ ID NO: 412130 - DNA, 25 bp, Homo sapien
gctttaatagcagctttagtgatga

SEQ ID NO: 412131 - DNA, 25 bp, Homo sapien
gaggtttcatatccataagcgaaaa

SEQ ID NO: 412132 - DNA, 25 bp, Homo sapien
gatgggaggtttcatatccataagc

SEQ ID NO: 412133 - DNA, 25 bp, Homo sapien
gtttcatatccataagcgaaaagag

SEQ ID NO: 412134 - DNA, 25 bp, Homo sapien
gggaggtttcatatccataagcgaa

SEQ ID NO: 412135 - DNA, 25 bp, Homo sapien
cgtgatacccaagaagaaggttagc

SEQ ID NO: 412136 - DNA, 25 bp, Homo sapien
gaagaaggttagctctgccaaaggg

SEQ ID NO: 412137 - DNA, 25 bp, Homo sapien
tacccaagaagaaggttagctctgc

SEQ ID NO: 412138 - DNA, 25 bp, Homo sapien
cccactgccgtgatacccaagaaga

SEQ ID NO: 412139 - DNA, 25 bp, Homo sapien
aaagagttaattgtcatggtcacca

SEQ ID NO: 412140 - DNA, 25 bp, Homo sapien
taataactgcccgagaaatcttggc

SEQ ID NO: 412141 - DNA, 25 bp, Homo sapien
gaataacggtaagtgcacaggctca

SEQ ID NO: 412142 - DNA, 25 bp, Homo sapien
gagtccttacttgtgtctaaagcaa

SEQ ID NO: 412143 - DNA, 25 bp, Homo sapien
gccatgcagatgactctgggcaaat

SEQ ID NO: 412144 - DNA, 25 bp, Homo sapien
gatatactgatatctgcttgatagg

SEQ ID NO: 412145 - DNA, 25 bp, Homo sapien
cagaaattgtggtcttctatagaga

SEQ ID NO: 412146 - DNA, 25 bp, Homo sapien
gataggtatcagtttcagttagaac

SEQ ID NO: 412147 - DNA, 25 bp, Homo sapien
tcactcaaactttccacttttagaa

SEQ ID NO: 412148 - DNA, 25 bp, Homo sapien
gctgtatacctcaccagggttttta

SEQ ID NO: 412149 - DNA, 25 bp, Homo sapien
ttaaccctattggttccagcttatc

SEQ ID NO: 412150 - DNA, 25 bp, Homo sapien
ctttccacttttagaatcaaggctg

SEQ ID NO: 412151 - DNA, 25 bp, Homo sapien
caacttttgcaagggaaatctccaa

SEQ ID NO: 412152 - DNA, 25 bp, Homo sapien
gaagacaatcatccctagtaatcaa

SEQ ID NO: 412153 - DNA, 25 bp, Homo sapien
taaggcatccccatcagatgaacta

SEQ ID NO: 412154 - DNA, 25 bp, Homo sapien
ttttactgccaataatcgacctggt

SEQ ID NO: 412155 - DNA, 25 bp, Homo sapien
tactgcccttcgatcactgcttcct

SEQ ID NO: 412156 - DNA, 25 bp, Homo sapien
cctaaaactgatacctgctcctctt

SEQ ID NO: 412157 - DNA, 25 bp, Homo sapien
taaaactgatacctgctcctcttcc

SEQ ID NO: 412158 - DNA, 25 bp, Homo sapien
acttttcagcactactgcccttcga

SEQ ID NO: 412159 - DNA, 25 bp, Homo sapien
ctggttgaaggcgttgacggcgtcc

SEQ ID NO: 412160 - DNA, 25 bp, Homo sapien
ctcctggttgaaggcgttgacggcg

SEQ ID NO: 412161 - DNA, 25 bp, Homo sapien
cctggttgaaggcgttgacggcgtc

SEQ ID NO: 412162 - DNA, 25 bp, Homo sapien
tcctggttgaaggcgttgacggcgt

SEQ ID NO: 412163 - DNA, 25 bp, Homo sapien
tagacctcgcgccgcggcggagcgg

SEQ ID NO: 412164 - DNA, 25 bp, Homo sapien
gggcccgccggtcacatagacctcg

SEQ ID NO: 412165 - DNA, 25 bp, Homo sapien
ccggtcacatagacctcgcgccgcg

SEQ ID NO: 412166 - DNA, 25 bp, Homo sapien
gcccgccggtcacatagacctcgcg

SEQ ID NO: 412167 - DNA, 25 bp, Homo sapien
gcaggaagaggctgcgcccgaagcg

SEQ ID NO: 412168 - DNA, 25 bp, Homo sapien
cagtcccgttcgcaggatgaggaaa

SEQ ID NO: 412169 - DNA, 25 bp, Homo sapien
tgcgctctgcgtctcgctgacacgg

SEQ ID NO: 412170 - DNA, 25 bp, Homo sapien
cggcagcgctggtcttcaacatgtc

SEQ ID NO: 412171 - DNA, 25 bp, Homo sapien
ctggctcacactggcccggccggcg

SEQ ID NO: 412172 - DNA, 25 bp, Homo sapien
tctctccagcgggatggcggcagcg

SEQ ID NO: 412173 - DNA, 25 bp, Homo sapien
cactggctcacactggcccggccgg

SEQ ID NO: 412174 - DNA, 25 bp, Homo sapien
ctccctctctccagcgggatggcgg

SEQ ID NO: 412175 - DNA, 25 bp, Homo sapien
caggccctgggaaacgagaaagatg

SEQ ID NO: 412176 - DNA, 25 bp, Homo sapien
atgcgcctccgacaggaagtccagg

SEQ ID NO: 412177 - DNA, 25 bp, Homo sapien
gaaacgagaaagatgcgcctccgac

SEQ ID NO: 412178 - DNA, 25 bp, Homo sapien
aaagatgcgcctccgacaggaagtc

SEQ ID NO: 412179 - DNA, 25 bp, Homo sapien
cctgcagagcctgatgaggactgcc

SEQ ID NO: 412180 - DNA, 25 bp, Homo sapien
agagcctgatgaggactgccaccat

SEQ ID NO: 412181 - DNA, 25 bp, Homo sapien
gcctgcagagcctgatgaggactgc

SEQ ID NO: 412182 - DNA, 25 bp, Homo sapien
tgcagagcctgatgaggactgccac

SEQ ID NO: 412183 - DNA, 25 bp, Homo sapien
ctcccccgaaggaggaccagctgga

SEQ ID NO: 412184 - DNA, 25 bp, Homo sapien
acctcccccgaaggaggaccagctg

SEQ ID NO: 412185 - DNA, 25 bp, Homo sapien
cacctcccccgaaggaggaccagct

SEQ ID NO: 412186 - DNA, 25 bp, Homo sapien
tcccccgaaggaggaccagctggag

SEQ ID NO: 412187 - DNA, 25 bp, Homo sapien
accataaagaggctttgctcttcca

SEQ ID NO: 412188 - DNA, 25 bp, Homo sapien
agagtttggattttgcccccataag

SEQ ID NO: 412189 - DNA, 25 bp, Homo sapien
tgaggagcaaggtggactgagagag

SEQ ID NO: 412190 - DNA, 25 bp, Homo sapien
ggagagtgagaccataaagaggctt

SEQ ID NO: 412191 - DNA, 25 bp, Homo sapien
ctgactccttttgtgcatcttctgt

SEQ ID NO: 412192 - DNA, 25 bp, Homo sapien
tgactccttttgtgcatcttctgtc

SEQ ID NO: 412193 - DNA, 25 bp, Homo sapien
ccttttgtgcatcttctgtcttcat

SEQ ID NO: 412194 - DNA, 25 bp, Homo sapien
actccttttgtgcatcttctgtctt

SEQ ID NO: 412195 - DNA, 25 bp, Homo sapien
ccttgtgcatggtgggagaggcacc

SEQ ID NO: 412196 - DNA, 25 bp, Homo sapien
aggactggatcagggccttgtgcat

SEQ ID NO: 412197 - DNA, 25 bp, Homo sapien
tgtgcatggtgggagaggcacctag

SEQ ID NO: 412198 - DNA, 25 bp, Homo sapien
ctaggactggatcagggccttgtgc

SEQ ID NO: 412199 - DNA, 25 bp, Homo sapien
gatgctaaggaagggcctgtatttg

SEQ ID NO: 412200 - DNA, 25 bp, Homo sapien
gggctggccagaatgctaaaggata

SEQ ID NO: 412201 - DNA, 25 bp, Homo sapien
tagggcagggtagtctgtggtcaat

SEQ ID NO: 412202 - DNA, 25 bp, Homo sapien
gattggcgtatctgatgggcgtgaa

SEQ ID NO: 412203 - DNA, 25 bp, Homo sapien
gacccagatgtgtctgccttctggt

SEQ ID NO: 412204 - DNA, 25 bp, Homo sapien
cccccgaaactatccttcttcagag

SEQ ID NO: 412205 - DNA, 25 bp, Homo sapien
tgccttctggtaagcccctccaact

SEQ ID NO: 412206 - DNA, 25 bp, Homo sapien
cctgacccagatgtgtctgccttct

SEQ ID NO: 412207 - DNA, 25 bp, Homo sapien
ttccttcggtaaattcagtcttgtg

SEQ ID NO: 412208 - DNA, 25 bp, Homo sapien
cggtaaattcagtcttgtgtgtctg

SEQ ID NO: 412209 - DNA, 25 bp, Homo sapien
ccttcggtaaattcagtcttgtgtg

SEQ ID NO: 412210 - DNA, 25 bp, Homo sapien
ttcggtaaattcagtcttgtgtgtc

SEQ ID NO: 412211 - DNA, 25 bp, Homo sapien
tcgtcacaggactgagactggcgca

SEQ ID NO: 412212 - DNA, 25 bp, Homo sapien
cggcgtagagtgatacagaaagcca

SEQ ID NO: 412213 - DNA, 25 bp, Homo sapien
gcagaagtttggatgtcacagcccc

SEQ ID NO: 412214 - DNA, 25 bp, Homo sapien
ggagttcctctcaaaccaactgagg

SEQ ID NO: 412215 - DNA, 25 bp, Homo sapien
cccggctattgtcactgagcagtga

SEQ ID NO: 412216 - DNA, 25 bp, Homo sapien
cagtgacacacagatcggatgggat

SEQ ID NO: 412217 - DNA, 25 bp, Homo sapien
tcctgaataagaaagtgcacgccca

SEQ ID NO: 412218 - DNA, 25 bp, Homo sapien
tgccaatctgcggagctgctgtaag

SEQ ID NO: 412219 - DNA, 25 bp, Homo sapien
cactgcagaatcaaagtctcccact

SEQ ID NO: 412220 - DNA, 25 bp, Homo sapien
cttctaacgtgaaccctctaaagct

SEQ ID NO: 412221 - DNA, 25 bp, Homo sapien
tcccctttgagtcatcactgcagaa

SEQ ID NO: 412222 - DNA, 25 bp, Homo sapien
tcatagctcccaagcctgattaact

SEQ ID NO: 412223 - DNA, 25 bp, Homo sapien
acaaggcagaatcccaagaggtagg

SEQ ID NO: 412224 - DNA, 25 bp, Homo sapien
tgggaggagcaagtgtacagctgcc

SEQ ID NO: 412225 - DNA, 25 bp, Homo sapien
cagaatcccaagaggtaggaaaagg

SEQ ID NO: 412226 - DNA, 25 bp, Homo sapien
agcaacaaggcagaatcccaagagg

SEQ ID NO: 412227 - DNA, 25 bp, Homo sapien
attcgtctcatagttctcgtgcgat

SEQ ID NO: 412228 - DNA, 25 bp, Homo sapien
cgtctcatagttctcgtgcgatggt

SEQ ID NO: 412229 - DNA, 25 bp, Homo sapien
gaagcttgtgcattcgtctcatagt

SEQ ID NO: 412230 - DNA, 25 bp, Homo sapien
gtgcattcgtctcatagttctcgtg

SEQ ID NO: 412231 - DNA, 25 bp, Homo sapien
tagcatgaccgacattttattctgg

SEQ ID NO: 412232 - DNA, 25 bp, Homo sapien
gagaccacaggacatagcatgaccg

SEQ ID NO: 412233 - DNA, 25 bp, Homo sapien
gatcagagcctaagggctcaccatc

SEQ ID NO: 412234 - DNA, 25 bp, Homo sapien
tgggatcagagcctaagggctcacc

SEQ ID NO: 412235 - DNA, 25 bp, Homo sapien
cgcagaacaggagcacgcagcgggt

SEQ ID NO: 412236 - DNA, 25 bp, Homo sapien
agcacgcagcgggtgataagagtga

SEQ ID NO: 412237 - DNA, 25 bp, Homo sapien
tctgggggtgtctcacccaaagctt

SEQ ID NO: 412238 - DNA, 25 bp, Homo sapien
agatttctgtctgggggtgtctcac

SEQ ID NO: 412239 - DNA, 25 bp, Homo sapien
taaaaggggagcaacttattacaca

SEQ ID NO: 412240 - DNA, 25 bp, Homo sapien
aaaaggggagcaacttattacacag

SEQ ID NO: 412241 - DNA, 25 bp, Homo sapien
cagtctgattccctagttcacagca

SEQ ID NO: 412242 - DNA, 25 bp, Homo sapien
agcagtctgattccctagttcacag

SEQ ID NO: 412243 - DNA, 25 bp, Homo sapien
gtctgattccctagttcacagcaga

SEQ ID NO: 412244 - DNA, 25 bp, Homo sapien
cgagcagtctgattccctagttcac

SEQ ID NO: 412245 - DNA, 25 bp, Homo sapien
cccaatgacacctttgagtaatcaa

SEQ ID NO: 412246 - DNA, 25 bp, Homo sapien
gatggtgtttcagacccaatgacac

SEQ ID NO: 412247 - DNA, 25 bp, Homo sapien
atgacacctttgagtaatcaagaag

SEQ ID NO: 412248 - DNA, 25 bp, Homo sapien
cactgagggcacgatggtgtttcag

SEQ ID NO: 412249 - DNA, 25 bp, Homo sapien
cagacactggattgatgacagctgt

SEQ ID NO: 412250 - DNA, 25 bp, Homo sapien
tcaaatgcgggcacctcaacaggta

SEQ ID NO: 412251 - DNA, 25 bp, Homo sapien
cagaaaacgcagtatgttccgtcat

SEQ ID NO: 412252 - DNA, 25 bp, Homo sapien
ccgtcataataactgaggctggtga

SEQ ID NO: 412253 - DNA, 25 bp, Homo sapien
cagtggatgttgtaaccgccttcgg

SEQ ID NO: 412254 - DNA, 25 bp, Homo sapien
cagacgctcttgtatgtgacgctcc

SEQ ID NO: 412255 - DNA, 25 bp, Homo sapien
tgggtgacccgtgaacacagagcgt

SEQ ID NO: 412256 - DNA, 25 bp, Homo sapien
gagcctcgccagctctgtttaggga

SEQ ID NO: 412257 - DNA, 25 bp, Homo sapien
tggttccttgggcgcatcctgccat

SEQ ID NO: 412258 - DNA, 25 bp, Homo sapien
tgtggttccttgggcgcatcctgcc

SEQ ID NO: 412259 - DNA, 25 bp, Homo sapien
gtggttccttgggcgcatcctgcca

SEQ ID NO: 412260 - DNA, 25 bp, Homo sapien
ctgtggttccttgggcgcatcctgc

SEQ ID NO: 412261 - DNA, 25 bp, Homo sapien
tcgaaggcctctttagcttccggga

SEQ ID NO: 412262 - DNA, 25 bp, Homo sapien
catttccaatgtgcatcgaaggcct

SEQ ID NO: 412263 - DNA, 25 bp, Homo sapien
gattcttattgccaaaatctctggg

SEQ ID NO: 412264 - DNA, 25 bp, Homo sapien
ccccgaggctgcgttattcttgtac

SEQ ID NO: 412265 - DNA, 25 bp, Homo sapien
gaatagagtattgattgcttcctgt

SEQ ID NO: 412266 - DNA, 25 bp, Homo sapien
gagaatagagtattgattgcttcct

SEQ ID NO: 412267 - DNA, 25 bp, Homo sapien
gtgagaatagagtattgattgcttc

SEQ ID NO: 412268 - DNA, 25 bp, Homo sapien
gtgtgagaatagagtattgattgct

SEQ ID NO: 412269 - DNA, 25 bp, Homo sapien
cacggaactcatgttattacagtgg

SEQ ID NO: 412270 - DNA, 25 bp, Homo sapien
taaaaatctgcagaatcagtcctgg

SEQ ID NO: 412271 - DNA, 25 bp, Homo sapien
gctgtgaatcacaaacacggaactc

SEQ ID NO: 412272 - DNA, 25 bp, Homo sapien
caacagtgactgattaagtgtccca

SEQ ID NO: 412273 - DNA, 25 bp, Homo sapien
ttttcttctcgaccctggaggactc

SEQ ID NO: 412274 - DNA, 25 bp, Homo sapien
ttttggtcacccctatggagaggcc

SEQ ID NO: 412275 - DNA, 25 bp, Homo sapien
gaggactctcccgtcttttggtcac

SEQ ID NO: 412276 - DNA, 25 bp, Homo sapien
gagaggccctgcattgagctttgtt

SEQ ID NO: 412277 - DNA, 25 bp, Homo sapien
tctagatggcaaggggctacttagc

SEQ ID NO: 412278 - DNA, 25 bp, Homo sapien
ggctacttagctgtcggttgagagt

SEQ ID NO: 412279 - DNA, 25 bp, Homo sapien
cacccctctagatggcaaggggcta

SEQ ID NO: 412280 - DNA, 25 bp, Homo sapien
gctgtcggttgagagtcacatccat

SEQ ID NO: 412281 - DNA, 25 bp, Homo sapien
ccctgttatctgcttatggattcct

SEQ ID NO: 412282 - DNA, 25 bp, Homo sapien
ttatctgctgtcagtggaagcagag

SEQ ID NO: 412283 - DNA, 25 bp, Homo sapien
agccattatctgctgtcagtggaag

SEQ ID NO: 412284 - DNA, 25 bp, Homo sapien
tatctgcttatggattcctggccct

SEQ ID NO: 412285 - DNA, 25 bp, Homo sapien
gcctgggtgtgttttcatggtcctc

SEQ ID NO: 412286 - DNA, 25 bp, Homo sapien
tcacttttgggtagccttcctgtcc

SEQ ID NO: 412287 - DNA, 25 bp, Homo sapien
catgacgtggattctttcctttggg

SEQ ID NO: 412288 - DNA, 25 bp, Homo sapien
atgggagtggcgcaggcatcctcat

SEQ ID NO: 412289 - DNA, 25 bp, Homo sapien
ggattggggttggccgtggccatgc

SEQ ID NO: 412290 - DNA, 25 bp, Homo sapien
gattggggttggccgtggccatgca

SEQ ID NO: 412291 - DNA, 25 bp, Homo sapien
catgctggccctgttgttatccagg

SEQ ID NO: 412292 - DNA, 25 bp, Homo sapien
tgctggccctgttgttatccagggc

SEQ ID NO: 412293 - DNA, 25 bp, Homo sapien
gtccatgctggccctgttgttatcc

SEQ ID NO: 412294 - DNA, 25 bp, Homo sapien
tccatgctggccctgttgttatcca

SEQ ID NO: 412295 - DNA, 25 bp, Homo sapien
tcctctgaaccaaacacgcagagcc

SEQ ID NO: 412296 - DNA, 25 bp, Homo sapien
ggactctgatgaatgctctcagagc

SEQ ID NO: 412297 - DNA, 25 bp, Homo sapien
gagcctactgaccaccacttattga

SEQ ID NO: 412298 - DNA, 25 bp, Homo sapien
ccactcctctgaaccaaacacgcag

SEQ ID NO: 412299 - DNA, 25 bp, Homo sapien
agcaccatagatcacctcattgcct

SEQ ID NO: 412300 - DNA, 25 bp, Homo sapien
ttccccagcaccatagatcacctca

SEQ ID NO: 412301 - DNA, 25 bp, Homo sapien
caccatagatcacctcattgccttg

SEQ ID NO: 412302 - DNA, 25 bp, Homo sapien
ccatagatcacctcattgccttgtc

SEQ ID NO: 412303 - DNA, 25 bp, Homo sapien
caattgtggagcttcatagggtcct

SEQ ID NO: 412304 - DNA, 25 bp, Homo sapien
aattgtggagcttcatagggtccta

SEQ ID NO: 412305 - DNA, 25 bp, Homo sapien
tggagcttcatagggtcctattttg

SEQ ID NO: 412306 - DNA, 25 bp, Homo sapien
ttgtggagcttcatagggtcctatt

SEQ ID NO: 412307 - DNA, 25 bp, Homo sapien
tgttctttgctggagcgctttctca

SEQ ID NO: 412308 - DNA, 25 bp, Homo sapien
taacggaatgtcttgactttcaaag

SEQ ID NO: 412309 - DNA, 25 bp, Homo sapien
gactctataccactaattttgggtg

SEQ ID NO: 412310 - DNA, 25 bp, Homo sapien
tttgggtgttcgtatttcagctgac

SEQ ID NO: 412311 - DNA, 25 bp, Homo sapien
aaagccctcgggaatccactgtggc

SEQ ID NO: 412312 - DNA, 25 bp, Homo sapien
agtggcccgcaaagccctcgggaat

SEQ ID NO: 412313 - DNA, 25 bp, Homo sapien
tggccctgctgggtaacccttctca

SEQ ID NO: 412314 - DNA, 25 bp, Homo sapien
tcacctcgtaaatggagtggcccgc

SEQ ID NO: 412315 - DNA, 25 bp, Homo sapien
tgaaatatttgcctggccgctcagg

SEQ ID NO: 412316 - DNA, 25 bp, Homo sapien
gagaatttgctactagatgaagaca

SEQ ID NO: 412317 - DNA, 25 bp, Homo sapien
tttatgggttggttagaagtggctc

SEQ ID NO: 412318 - DNA, 25 bp, Homo sapien
tccaggttccagtttaggtcttgct

SEQ ID NO: 412319 - DNA, 25 bp, Homo sapien
ccaaagtcactcgatgcagtgggct

SEQ ID NO: 412320 - DNA, 25 bp, Homo sapien
gggcatcttaatcatccaggaacaa

SEQ ID NO: 412321 - DNA, 25 bp, Homo sapien
ggcgcagaaggcataatagacccaa

SEQ ID NO: 412322 - DNA, 25 bp, Homo sapien
cagtgccatgaggtcgcttagtcta

SEQ ID NO: 412323 - DNA, 25 bp, Homo sapien
tctagtattctggaacattgtacca

SEQ ID NO: 412324 - DNA, 25 bp, Homo sapien
gaggtcgcaggcaatacaggacaga

SEQ ID NO: 412325 - DNA, 25 bp, Homo sapien
gacttttgtacagagccaagcttgc

SEQ ID NO: 412326 - DNA, 25 bp, Homo sapien
gaattagaccaaattagatccatgg

SEQ ID NO: 412327 - DNA, 25 bp, Homo sapien
catgatctggctagttcctgaatac

SEQ ID NO: 412328 - DNA, 25 bp, Homo sapien
tccaccccaaaatccagagtcagag

SEQ ID NO: 412329 - DNA, 25 bp, Homo sapien
gaaggtgcacactcaagggttaagg

SEQ ID NO: 412330 - DNA, 25 bp, Homo sapien
cataaagtgattgtactattccctc

SEQ ID NO: 412331 - DNA, 25 bp, Homo sapien
taattctcaaccagagctgcagggc

SEQ ID NO: 412332 - DNA, 25 bp, Homo sapien
gaattccatgccgtgcaggtaagaa

SEQ ID NO: 412333 - DNA, 25 bp, Homo sapien
cacacgagttaggacatctgctgtc

SEQ ID NO: 412334 - DNA, 25 bp, Homo sapien
ggacacctggacacgagatcttgaa

SEQ ID NO: 412335 - DNA, 25 bp, Homo sapien
ttcttcttatgtgatgggtgacaag

SEQ ID NO: 412336 - DNA, 25 bp, Homo sapien
aaaccaaccagccaacgacatctgg

SEQ ID NO: 412337 - DNA, 25 bp, Homo sapien
tgatgggtgacaaggaaccaaaacc

SEQ ID NO: 412338 - DNA, 25 bp, Homo sapien
aaccaaccagccaacgacatctggg

SEQ ID NO: 412339 - DNA, 25 bp, Homo sapien
gctaagtgaattacgccagtcccta

SEQ ID NO: 412340 - DNA, 25 bp, Homo sapien
cagatcaaaagtcacgagggagcct

SEQ ID NO: 412341 - DNA, 25 bp, Homo sapien
cccgttcagaattggatgaggttcc

SEQ ID NO: 412342 - DNA, 25 bp, Homo sapien
gattctagtctatgccaaccagaga

SEQ ID NO: 412343 - DNA, 25 bp, Homo sapien
gcatagaacacggttacagctggtt

SEQ ID NO: 412344 - DNA, 25 bp, Homo sapien
cctgttgtttaaggcatagccctga

SEQ ID NO: 412345 - DNA, 25 bp, Homo sapien
ggcaagtctcggtggccctgtgttc

SEQ ID NO: 412346 - DNA, 25 bp, Homo sapien
gagaagcaattccaccaaactcatg

SEQ ID NO: 412347 - DNA, 25 bp, Homo sapien
cccatggtggaatacaggcttgcag

SEQ ID NO: 412348 - DNA, 25 bp, Homo sapien
cattttgtgtgtgcatcccgcagct

SEQ ID NO: 412349 - DNA, 25 bp, Homo sapien
tgtccaataggagggtaagagcacc

SEQ ID NO: 412350 - DNA, 25 bp, Homo sapien
caaaggacatagagttggaagtgcc

SEQ ID NO: 412351 - DNA, 25 bp, Homo sapien
tcctggaggaattaactttggcacc

SEQ ID NO: 412352 - DNA, 25 bp, Homo sapien
ctttggcaccattcagggaagctgt

SEQ ID NO: 412353 - DNA, 25 bp, Homo sapien
gctgcaacagataagaccggcactg

SEQ ID NO: 412354 - DNA, 25 bp, Homo sapien
caagcccgcaccaggagtgagaatg

SEQ ID NO: 412355 - DNA, 25 bp, Homo sapien
tcagtctcctttcgggtctgtgagg

SEQ ID NO: 412356 - DNA, 25 bp, Homo sapien
tctgtgagggagcaaatgctactgc

SEQ ID NO: 412357 - DNA, 25 bp, Homo sapien
ttccttaaaggtcacgatagctggg

SEQ ID NO: 412358 - DNA, 25 bp, Homo sapien
catcccgtagttggatgtcaagttt

SEQ ID NO: 412359 - DNA, 25 bp, Homo sapien
gtgaagagaactggatgagactccc

SEQ ID NO: 412360 - DNA, 25 bp, Homo sapien
ggtggtatctgatctaaataagata

SEQ ID NO: 412361 - DNA, 25 bp, Homo sapien
aaataagataaataggctgaggaat

SEQ ID NO: 412362 - DNA, 25 bp, Homo sapien
taggctgaggaattgagtatgtcca

SEQ ID NO: 412363 - DNA, 25 bp, Homo sapien
tttgcacatacatcctgttaagcct

SEQ ID NO: 412364 - DNA, 25 bp, Homo sapien
gcattttgcacatacatcctgttaa

SEQ ID NO: 412365 - DNA, 25 bp, Homo sapien
gcacatacatcctgttaagcctttc

SEQ ID NO: 412366 - DNA, 25 bp, Homo sapien
ttttgcacatacatcctgttaagcc

SEQ ID NO: 412367 - DNA, 25 bp, Homo sapien
gttttcctgtctgctcgggcagggt

SEQ ID NO: 412368 - DNA, 25 bp, Homo sapien
tttcctgtctgctcgggcagggtga

SEQ ID NO: 412369 - DNA, 25 bp, Homo sapien
gggcttctctagaggaagtgtgagt

SEQ ID NO: 412370 - DNA, 25 bp, Homo sapien
gcttctctagaggaagtgtgagttt

SEQ ID NO: 412371 - DNA, 25 bp, Homo sapien
gagacaatctttgttggctaaagtg

SEQ ID NO: 412372 - DNA, 25 bp, Homo sapien
acaatctttgttggctaaagtgctc

SEQ ID NO: 412373 - DNA, 25 bp, Homo sapien
cagagacaatctttgttggctaaag

SEQ ID NO: 412374 - DNA, 25 bp, Homo sapien
ctaggaaaatggtaatccagagaca

SEQ ID NO: 412375 - DNA, 25 bp, Homo sapien
taatcacccaagactgtgaaatcag

SEQ ID NO: 412376 - DNA, 25 bp, Homo sapien
aaaacaagctgccatacaagctggg

SEQ ID NO: 412377 - DNA, 25 bp, Homo sapien
aaacaagctgccatacaagctgggt

SEQ ID NO: 412378 - DNA, 25 bp, Homo sapien
caagactgtgaaatcaggcagaaga

SEQ ID NO: 412379 - DNA, 25 bp, Homo sapien
tttgtgagcttgcaatgtgggactg

SEQ ID NO: 412380 - DNA, 25 bp, Homo sapien
gttctttgtgagcttgcaatgtggg

SEQ ID NO: 412381 - DNA, 25 bp, Homo sapien
gaggggtaaaagtgtgactaagaca

SEQ ID NO: 412382 - DNA, 25 bp, Homo sapien
tctttgtgagcttgcaatgtgggac

SEQ ID NO: 412383 - DNA, 25 bp, Homo sapien
atcaaccttggagggcggaggacca

SEQ ID NO: 412384 - DNA, 25 bp, Homo sapien
cagttcattatggttgccgagtcga

SEQ ID NO: 412385 - DNA, 25 bp, Homo sapien
gcttgtgatcaaccactgtgggcgc

SEQ ID NO: 412386 - DNA, 25 bp, Homo sapien
tatagagctgttgagtgacggtgcc

SEQ ID NO: 412387 - DNA, 25 bp, Homo sapien
tgtccagagactgcggacagccatc

SEQ ID NO: 412388 - DNA, 25 bp, Homo sapien
gatgcaggcagcaccatcaaccttc

SEQ ID NO: 412389 - DNA, 25 bp, Homo sapien
acacgcagctggagcacgcagcatc

SEQ ID NO: 412390 - DNA, 25 bp, Homo sapien
acattgacccttgccctgatgcagg

SEQ ID NO: 412391 - DNA, 25 bp, Homo sapien
aggaggaggacggtgctatgaggct

SEQ ID NO: 412392 - DNA, 25 bp, Homo sapien
tgctatgaggctcaaggatctgggt

SEQ ID NO: 412393 - DNA, 25 bp, Homo sapien
cagggggtcccctgaatcatcacgt

SEQ ID NO: 412394 - DNA, 25 bp, Homo sapien
gggtcccctgaatcatcacgttctc

SEQ ID NO: 412395 - DNA, 25 bp, Homo sapien
cacgacagaacttcgctgggaagca

SEQ ID NO: 412396 - DNA, 25 bp, Homo sapien
tttggctgtggtctcggcagggcct

SEQ ID NO: 412397 - DNA, 25 bp, Homo sapien
gacagaacttcgctgggaagcagct

SEQ ID NO: 412398 - DNA, 25 bp, Homo sapien
ctgacccacgacagaacttcgctgg

SEQ ID NO: 412399 - DNA, 25 bp, Homo sapien
aagtcggctgatcctatcttctagg

SEQ ID NO: 412400 - DNA, 25 bp, Homo sapien
cggctgatcctatcttctaggctct

SEQ ID NO: 412401 - DNA, 25 bp, Homo sapien
ggaagtcggctgatcctatcttcta

SEQ ID NO: 412402 - DNA, 25 bp, Homo sapien
caggaagtcggctgatcctatcttc

SEQ ID NO: 412403 - DNA, 25 bp, Homo sapien
tgatggtggtttgcatgtgtgggag

SEQ ID NO: 412404 - DNA, 25 bp, Homo sapien
gaatgaggtccagatggctgaacac

SEQ ID NO: 412405 - DNA, 25 bp, Homo sapien
tccagatggctgaacactcaggcac

SEQ ID NO: 412406 - DNA, 25 bp, Homo sapien
tgccacgtccaaaccaagggcttgg

SEQ ID NO: 412407 - DNA, 25 bp, Homo sapien
gtaagagcaaagttttcagacacca

SEQ ID NO: 412408 - DNA, 25 bp, Homo sapien
ttgtaagagcaaagttttcagacac

SEQ ID NO: 412409 - DNA, 25 bp, Homo sapien
taagagcaaagttttcagacaccaa

SEQ ID NO: 412410 - DNA, 25 bp, Homo sapien
aagagcaaagttttcagacaccaaa

SEQ ID NO: 412411 - DNA, 25 bp, Homo sapien
ctgaatgtctgtgggctactctggt

SEQ ID NO: 412412 - DNA, 25 bp, Homo sapien
ttcagctgaatgtctgtgggctact

SEQ ID NO: 412413 - DNA, 25 bp, Homo sapien
cagctgaatgtctgtgggctactct

SEQ ID NO: 412414 - DNA, 25 bp, Homo sapien
aatgtctgtgggctactctggtcat

SEQ ID NO: 412415 - DNA, 25 bp, Homo sapien
ggtttttgaacttgcatccaaaaca

SEQ ID NO: 412416 - DNA, 25 bp, Homo sapien
tgccaatttgggatagacactgatc

SEQ ID NO: 412417 - DNA, 25 bp, Homo sapien
tgaatctcaccagagaagtctggct

SEQ ID NO: 412418 - DNA, 25 bp, Homo sapien
tggctccaaagcaatatttgaactc

SEQ ID NO: 412419 - DNA, 25 bp, Homo sapien
tcttctgacgtgacatatggtgggc

SEQ ID NO: 412420 - DNA, 25 bp, Homo sapien
gatttgattttacctcttcccacaa

SEQ ID NO: 412421 - DNA, 25 bp, Homo sapien
tatggtgggcttgctccacttgcca

SEQ ID NO: 412422 - DNA, 25 bp, Homo sapien
ttggtctgaataccctggtggcttc

SEQ ID NO: 412423 - DNA, 25 bp, Homo sapien
gatctttatcgaagtctttaccagg

SEQ ID NO: 412424 - DNA, 25 bp, Homo sapien
catgtgactggatctttatcgaagt

SEQ ID NO: 412425 - DNA, 25 bp, Homo sapien
cttacatgtgactggatctttatcg

SEQ ID NO: 412426 - DNA, 25 bp, Homo sapien
tcgaagtctttaccaggaagacagc

SEQ ID NO: 412427 - DNA, 25 bp, Homo sapien
ctcacagagtctatttagttttcga

SEQ ID NO: 412428 - DNA, 25 bp, Homo sapien
gctgttaacagaggactcacagagt

SEQ ID NO: 412429 - DNA, 25 bp, Homo sapien
tcaagagtaggttgataatcaagag

SEQ ID NO: 412430 - DNA, 25 bp, Homo sapien
gttttcgagttctgattttatcttg

SEQ ID NO: 412431 - DNA, 25 bp, Homo sapien
gctttgccgattccattgctcacag

SEQ ID NO: 412432 - DNA, 25 bp, Homo sapien
tttaaactcagagctgaactccagg

SEQ ID NO: 412433 - DNA, 25 bp, Homo sapien
ctccaggattgaggttgttattaac

SEQ ID NO: 412434 - DNA, 25 bp, Homo sapien
tcatcaacggaagagaagttggctg

SEQ ID NO: 412435 - DNA, 25 bp, Homo sapien
acctccctgacagccgcctcaatac

SEQ ID NO: 412436 - DNA, 25 bp, Homo sapien
tgagacctccctgacagccgcctca

SEQ ID NO: 412437 - DNA, 25 bp, Homo sapien
tccattgagacctccctgacagccg

SEQ ID NO: 412438 - DNA, 25 bp, Homo sapien
catccattgagacctccctgacagc

SEQ ID NO: 412439 - DNA, 25 bp, Homo sapien
tgtgcaccttcgagcaacaaggcag

SEQ ID NO: 412440 - DNA, 25 bp, Homo sapien
gggccgttcctagctctctgggctg

SEQ ID NO: 412441 - DNA, 25 bp, Homo sapien
taaaggcacgttcagcctccacact

SEQ ID NO: 412442 - DNA, 25 bp, Homo sapien
cctttggcgccggattcctgtgcac

SEQ ID NO: 412443 - DNA, 25 bp, Homo sapien
gagaggctttcacgcttttggttca

SEQ ID NO: 412444 - DNA, 25 bp, Homo sapien
gactgtggtctcagtggcaactgcc

SEQ ID NO: 412445 - DNA, 25 bp, Homo sapien
aactgccattgattgagagcctccc

SEQ ID NO: 412446 - DNA, 25 bp, Homo sapien
ttcttccatggaaggcaagccgttt

SEQ ID NO: 412447 - DNA, 25 bp, Homo sapien
gattctgcgggcttcggtgccttct

SEQ ID NO: 412448 - DNA, 25 bp, Homo sapien
gaatgtttaaggcatcctcgcttcc

SEQ ID NO: 412449 - DNA, 25 bp, Homo sapien
gtccctcgcaaagggtcacatccag

SEQ ID NO: 412450 - DNA, 25 bp, Homo sapien
taagacagcattatgacccgtttgt

SEQ ID NO: 412451 - DNA, 25 bp, Homo sapien
gacacaactgggttttgggagccat

SEQ ID NO: 412452 - DNA, 25 bp, Homo sapien
gagagccgaagaaccagccttgatg

SEQ ID NO: 412453 - DNA, 25 bp, Homo sapien
tgggcttacacacccagagacacaa

SEQ ID NO: 412454 - DNA, 25 bp, Homo sapien
tgacacagcgatgacacactgcctg

SEQ ID NO: 412455 - DNA, 25 bp, Homo sapien
aagagcttggttctggattggactc

SEQ ID NO: 412456 - DNA, 25 bp, Homo sapien
ggaagagcttggttctggattggac

SEQ ID NO: 412457 - DNA, 25 bp, Homo sapien
gagcttggttctggattggactctt

SEQ ID NO: 412458 - DNA, 25 bp, Homo sapien
gcttggttctggattggactcttct

SEQ ID NO: 412459 - DNA, 25 bp, Homo sapien
catgaaaagcgattagcaatcttca

SEQ ID NO: 412460 - DNA, 25 bp, Homo sapien
tcttcatcctagaacctggggacat

SEQ ID NO: 412461 - DNA, 25 bp, Homo sapien
ctcccatgaaaagcgattagcaatc

SEQ ID NO: 412462 - DNA, 25 bp, Homo sapien
ccagaactcccatgaaaagcgatta

SEQ ID NO: 412463 - DNA, 25 bp, Homo sapien
catcttctgagctggcatttccata

SEQ ID NO: 412464 - DNA, 25 bp, Homo sapien
gctggcatttccatatgatatcagt

SEQ ID NO: 412465 - DNA, 25 bp, Homo sapien
atcaaagctcaccacatcttctgag

SEQ ID NO: 412466 - DNA, 25 bp, Homo sapien
aagctcaccacatcttctgagctgg

SEQ ID NO: 412467 - DNA, 25 bp, Homo sapien
ccagctgactgcttgcaagtggctc

SEQ ID NO: 412468 - DNA, 25 bp, Homo sapien
gctgactgcttgcaagtggctccat

SEQ ID NO: 412469 - DNA, 25 bp, Homo sapien
tgactgcttgcaagtggctccatgg

SEQ ID NO: 412470 - DNA, 25 bp, Homo sapien
actgcttgcaagtggctccatgggc

SEQ ID NO: 412471 - DNA, 25 bp, Homo sapien
cattttagatttggccatcccaggg

SEQ ID NO: 412472 - DNA, 25 bp, Homo sapien
cccagatgatgcagtagtggaggaa

SEQ ID NO: 412473 - DNA, 25 bp, Homo sapien
tctccgtggaagactttgggaccag

SEQ ID NO: 412474 - DNA, 25 bp, Homo sapien
cctattggcagattcacaaagggca

SEQ ID NO: 412475 - DNA, 25 bp, Homo sapien
tgtcttctccgcatgaccagagata

SEQ ID NO: 412476 - DNA, 25 bp, Homo sapien
ctgtcttctccgcatgaccagagat

SEQ ID NO: 412477 - DNA, 25 bp, Homo sapien
aattccagccaactgagaccaagca

SEQ ID NO: 412478 - DNA, 25 bp, Homo sapien
catcagtgggcttaagtgcgggcac

SEQ ID NO: 412479 - DNA, 25 bp, Homo sapien
tgcgggcacaatccagacctggagt

SEQ ID NO: 412480 - DNA, 25 bp, Homo sapien
gaaactctggttcaagccttccagg

SEQ ID NO: 412481 - DNA, 25 bp, Homo sapien
attccagattccctatccgctctga

SEQ ID NO: 412482 - DNA, 25 bp, Homo sapien
ctgacaaccagtttcctagctggct

SEQ ID NO: 412483 - DNA, 25 bp, Homo sapien
cagtttcctagctggcttggtgtgg

SEQ ID NO: 412484 - DNA, 25 bp, Homo sapien
tatattccagattccctatccgctc

SEQ ID NO: 412485 - DNA, 25 bp, Homo sapien
ctactctgagctctggactctaagt

SEQ ID NO: 412486 - DNA, 25 bp, Homo sapien
agacttgcatttcccgttcagattc

SEQ ID NO: 412487 - DNA, 25 bp, Homo sapien
tctggactctaagttgacagagttc

SEQ ID NO: 412488 - DNA, 25 bp, Homo sapien
tgcatttcccgttcagattctgtaa

SEQ ID NO: 412489 - DNA, 25 bp, Homo sapien
aaggctatgcagtggaggatttaca

SEQ ID NO: 412490 - DNA, 25 bp, Homo sapien
ggataaatgctccacacaaaaggct

SEQ ID NO: 412491 - DNA, 25 bp, Homo sapien
tttgccatcagtccggataaatgct

SEQ ID NO: 412492 - DNA, 25 bp, Homo sapien
cagtggaggatttacatgagcagat

SEQ ID NO: 412493 - DNA, 25 bp, Homo sapien
cctcttctgtcatttcgcaaagaaa

SEQ ID NO: 412494 - DNA, 25 bp, Homo sapien
gtcatttcgcaaagaaaacacagga

SEQ ID NO: 412495 - DNA, 25 bp, Homo sapien
agtcccatcataaactaccttaagg

SEQ ID NO: 412496 - DNA, 25 bp, Homo sapien
aaggccaagtatctgttccacaaag

SEQ ID NO: 412497 - DNA, 25 bp, Homo sapien
cagcatccgcaaaatgactgctctg

SEQ ID NO: 412498 - DNA, 25 bp, Homo sapien
ttcttagaaggagactggtgtccac

SEQ ID NO: 412499 - DNA, 25 bp, Homo sapien
gccaaggttatgaccttgcctttgc

SEQ ID NO: 412500 - DNA, 25 bp, Homo sapien
ggcaggtcaacccaggccaaggtta

SEQ ID NO: 412501 - DNA, 25 bp, Homo sapien
taccagagattccacaatagagcgg

SEQ ID NO: 412502 - DNA, 25 bp, Homo sapien
tccaaggttagtccttagcctaggc

SEQ ID NO: 412503 - DNA, 25 bp, Homo sapien
caatagagcggacacagccaatagc

SEQ ID NO: 412504 - DNA, 25 bp, Homo sapien
caggaacacaggtagaataccgtac

SEQ ID NO: 412505 - DNA, 25 bp, Homo sapien
gcactcatctgacctgatatccgtg

SEQ ID NO: 412506 - DNA, 25 bp, Homo sapien
gatatccgtgatatgtgacacctcc

SEQ ID NO: 412507 - DNA, 25 bp, Homo sapien
ggaaaggtcatctgagacatcccaa

SEQ ID NO: 412508 - DNA, 25 bp, Homo sapien
tatcacccttaatggtttccagtct

SEQ ID NO: 412509 - DNA, 25 bp, Homo sapien
aatgtcactgaggtctccttcctgg

SEQ ID NO: 412510 - DNA, 25 bp, Homo sapien
caggccctccaacccgactgcagaa

SEQ ID NO: 412511 - DNA, 25 bp, Homo sapien
gggtctcctcgcgtggctgcgtctc

SEQ ID NO: 412512 - DNA, 25 bp, Homo sapien
tggcctccatatgggtactcctttg

SEQ ID NO: 412513 - DNA, 25 bp, Homo sapien
ttcagttccgatccctcgggatagc

SEQ ID NO: 412514 - DNA, 25 bp, Homo sapien
gttctgaagttcagttccgatccct

SEQ ID NO: 412515 - DNA, 25 bp, Homo sapien
aagttcagttccgatccctcgggat

SEQ ID NO: 412516 - DNA, 25 bp, Homo sapien
tgaagttcagttccgatccctcggg

SEQ ID NO: 412517 - DNA, 25 bp, Homo sapien
ggacctgttagtgcagagaaggcag

SEQ ID NO: 412518 - DNA, 25 bp, Homo sapien
gggacctgttagtgcagagaaggca

SEQ ID NO: 412519 - DNA, 25 bp, Homo sapien
tgggacctgttagtgcagagaaggc

SEQ ID NO: 412520 - DNA, 25 bp, Homo sapien
ttgatactggccaatgcctttccct

SEQ ID NO: 412521 - DNA, 25 bp, Homo sapien
ctcttgatactggccaatgcctttc

SEQ ID NO: 412522 - DNA, 25 bp, Homo sapien
cttgatactggccaatgcctttccc

SEQ ID NO: 412523 - DNA, 25 bp, Homo sapien
tgatactggccaatgcctttccctg

SEQ ID NO: 412524 - DNA, 25 bp, Homo sapien
gaattcagatgacccctctcatgtg

SEQ ID NO: 412525 - DNA, 25 bp, Homo sapien
gatgacccctctcatgtggtcccat

SEQ ID NO: 412526 - DNA, 25 bp, Homo sapien
cagaattcagatgacccctctcatg

SEQ ID NO: 412527 - DNA, 25 bp, Homo sapien
tcagatgacccctctcatgtggtcc

SEQ ID NO: 412528 - DNA, 25 bp, Homo sapien
tcattgttcacttggaacagtgtcg

SEQ ID NO: 412529 - DNA, 25 bp, Homo sapien
caactcggggcgttaacagtttcat

SEQ ID NO: 412530 - DNA, 25 bp, Homo sapien
attgttcacttggaacagtgtcggg

SEQ ID NO: 412531 - DNA, 25 bp, Homo sapien
gtttgtgctgacaactcggggcgtt

SEQ ID NO: 412532 - DNA, 25 bp, Homo sapien
tgagccaaattgtttttccaccaaa

SEQ ID NO: 412533 - DNA, 25 bp, Homo sapien
cttgtctgagccaaattgtttttcc

SEQ ID NO: 412534 - DNA, 25 bp, Homo sapien
tccaccaaaatttacaggggtagca

SEQ ID NO: 412535 - DNA, 25 bp, Homo sapien
gtctgagccaaattgtttttccacc

SEQ ID NO: 412536 - DNA, 25 bp, Homo sapien
cataaccgaaagaaggctttgcact

SEQ ID NO: 412537 - DNA, 25 bp, Homo sapien
aaagcctgttgtaattacccgctgc

SEQ ID NO: 412538 - DNA, 25 bp, Homo sapien
tcttggatttttgcgagagcatggt

SEQ ID NO: 412539 - DNA, 25 bp, Homo sapien
tggtttttaataagcgcataaccga

SEQ ID NO: 412540 - DNA, 25 bp, Homo sapien
actgtgtctttcaacaaagtacaga

SEQ ID NO: 412541 - DNA, 25 bp, Homo sapien
tactgtgtctttcaacaaagtacag

SEQ ID NO: 412542 - DNA, 25 bp, Homo sapien
ctgtgtctttcaacaaagtacagag

SEQ ID NO: 412543 - DNA, 25 bp, Homo sapien
taaaatccgagcaacattccagtgg

SEQ ID NO: 412544 - DNA, 25 bp, Homo sapien
taaaatgtggccctattcctcaagt

SEQ ID NO: 412545 - DNA, 25 bp, Homo sapien
gctgaaaccgaagcctgtcaagctg

SEQ ID NO: 412546 - DNA, 25 bp, Homo sapien
gctttcagcgtttctagagagaccg

SEQ ID NO: 412547 - DNA, 25 bp, Homo sapien
caaacggactcgctctggtgaggac

SEQ ID NO: 412548 - DNA, 25 bp, Homo sapien
tgtgatcgtgtgtgaagctgagccc

SEQ ID NO: 412549 - DNA, 25 bp, Homo sapien
catcagtgtcaagcagtgtgagccc

SEQ ID NO: 412550 - DNA, 25 bp, Homo sapien
gaaggctctagcaacaccagaggaa

SEQ ID NO: 412551 - DNA, 25 bp, Homo sapien
tatggctgacatccaaagctgactc

SEQ ID NO: 412552 - DNA, 25 bp, Homo sapien
tggcatcacgggacttggctcgcct

SEQ ID NO: 412553 - DNA, 25 bp, Homo sapien
gctgactcacttaagtttcgactgg

SEQ ID NO: 412554 - DNA, 25 bp, Homo sapien
gttgccttggaaactctgtccaggg

SEQ ID NO: 412555 - DNA, 25 bp, Homo sapien
tccgcattcatgaaagccacaggtt

SEQ ID NO: 412556 - DNA, 25 bp, Homo sapien
ttccaggacggcatctgactgtgtc

SEQ ID NO: 412557 - DNA, 25 bp, Homo sapien
ctacttcaggaagcaaccattccag

SEQ ID NO: 412558 - DNA, 25 bp, Homo sapien
ggttttcaatgccattgcctccaag

SEQ ID NO: 412559 - DNA, 25 bp, Homo sapien
tttccagtgtcagagtggcattcac

SEQ ID NO: 412560 - DNA, 25 bp, Homo sapien
ctgaaggtggcgttaatgtgtatct

SEQ ID NO: 412561 - DNA, 25 bp, Homo sapien
taatgtgtatctgccgggcttctcc

SEQ ID NO: 412562 - DNA, 25 bp, Homo sapien
ttgcacccagacagcgcgcactgag

SEQ ID NO: 412563 - DNA, 25 bp, Homo sapien
gacagagagtacacagggcatatcc

SEQ ID NO: 412564 - DNA, 25 bp, Homo sapien
cattagaaactcaggaccagggacc

SEQ ID NO: 412565 - DNA, 25 bp, Homo sapien
tgatcactgaaatcctggcagggcg

SEQ ID NO: 412566 - DNA, 25 bp, Homo sapien
actttgtaggaactcactggcggcc

SEQ ID NO: 412567 - DNA, 25 bp, Homo sapien
ggttgaagagcccttgaagggtcac

SEQ ID NO: 412568 - DNA, 25 bp, Homo sapien
aggttgaagagcccttgaagggtca

SEQ ID NO: 412569 - DNA, 25 bp, Homo sapien
cagcaccatagtctgttagtgggag

SEQ ID NO: 412570 - DNA, 25 bp, Homo sapien
ggtgttgacgtttgcttccacagca

SEQ ID NO: 412571 - DNA, 25 bp, Homo sapien
gcttccacagcaccatagtctgtta

SEQ ID NO: 412572 - DNA, 25 bp, Homo sapien
tgctgccttgttgccagcgggtgtt

SEQ ID NO: 412573 - DNA, 25 bp, Homo sapien
cacagtagtggcatgaccaaggctc

SEQ ID NO: 412574 - DNA, 25 bp, Homo sapien
gatcattctgaccaatttctccagg

SEQ ID NO: 412575 - DNA, 25 bp, Homo sapien
tgacactgtgggtagacaaacctct

SEQ ID NO: 412576 - DNA, 25 bp, Homo sapien
tcagcgtttcgcatgcctggctaat

SEQ ID NO: 412577 - DNA, 25 bp, Homo sapien
atttggattcggcctcccacagctt

SEQ ID NO: 412578 - DNA, 25 bp, Homo sapien
aggacaatttggattcggcctccca

SEQ ID NO: 412579 - DNA, 25 bp, Homo sapien
acaatttggattcggcctcccacag

SEQ ID NO: 412580 - DNA, 25 bp, Homo sapien
gtaatgctttcaagacatcttccat

SEQ ID NO: 412581 - DNA, 25 bp, Homo sapien
ttttggatatgtcatacattacaag

SEQ ID NO: 412582 - DNA, 25 bp, Homo sapien
tcagtgtttaacaaaactatttaga

SEQ ID NO: 412583 - DNA, 25 bp, Homo sapien
taacaaaactatttagaggcataaa

SEQ ID NO: 412584 - DNA, 25 bp, Homo sapien
tttggatatgtcatacattacaagg

SEQ ID NO: 412585 - DNA, 25 bp, Homo sapien
tttgtgggggagcacttcttcactg

SEQ ID NO: 412586 - DNA, 25 bp, Homo sapien
tgtgggggagcacttcttcactgac

SEQ ID NO: 412587 - DNA, 25 bp, Homo sapien
ttgtgggggagcacttcttcactga

SEQ ID NO: 412588 - DNA, 25 bp, Homo sapien
cgtttgtgggggagcacttcttcac

SEQ ID NO: 412589 - DNA, 25 bp, Homo sapien
ttaaaaagctctttatcttctgaca

SEQ ID NO: 412590 - DNA, 25 bp, Homo sapien
taaaaagctctttatcttctgacac

SEQ ID NO: 412591 - DNA, 25 bp, Homo sapien
ttctatttcaactctgctttcaaga

SEQ ID NO: 412592 - DNA, 25 bp, Homo sapien
gtaatcaagattcttgggcgtgcat

SEQ ID NO: 412593 - DNA, 25 bp, Homo sapien
cgtagccaagattgagtgagcaccc

SEQ ID NO: 412594 - DNA, 25 bp, Homo sapien
tgtacacgtagccaagattgagtga

SEQ ID NO: 412595 - DNA, 25 bp, Homo sapien
aagattgagtgagcaccccgcgcag

SEQ ID NO: 412596 - DNA, 25 bp, Homo sapien
cccgcgcagcacaaagtctcaagga

SEQ ID NO: 412597 - DNA, 25 bp, Homo sapien
aataaagaaatgtcttgctttagga

SEQ ID NO: 412598 - DNA, 25 bp, Homo sapien
ctgcaataaagaaatgtcttgcttt

SEQ ID NO: 412599 - DNA, 25 bp, Homo sapien
gcaataaagaaatgtcttgctttag

SEQ ID NO: 412600 - DNA, 25 bp, Homo sapien
caataaagaaatgtcttgctttagg

SEQ ID NO: 412601 - DNA, 25 bp, Homo sapien
caacaattatatagggcagcgcttc

SEQ ID NO: 412602 - DNA, 25 bp, Homo sapien
tcactatggcacatgggtggcaggt

SEQ ID NO: 412603 - DNA, 25 bp, Homo sapien
tcagtttgctcaggcgtcactatgg

SEQ ID NO: 412604 - DNA, 25 bp, Homo sapien
gtctgtttaccccaataggctgtgt

SEQ ID NO: 412605 - DNA, 25 bp, Homo sapien
ttccttttcacgtttggatagcttc

SEQ ID NO: 412606 - DNA, 25 bp, Homo sapien
ccttttcacgtttggatagcttctg

SEQ ID NO: 412607 - DNA, 25 bp, Homo sapien
ggatagcttctgttccttatccaca

SEQ ID NO: 412608 - DNA, 25 bp, Homo sapien
ttttcacgtttggatagcttctgtt

SEQ ID NO: 412609 - DNA, 25 bp, Homo sapien
gcggcacccctggaagaaggcgacc

SEQ ID NO: 412610 - DNA, 25 bp, Homo sapien
tgctcttaaagtccctgggcagccc

SEQ ID NO: 412611 - DNA, 25 bp, Homo sapien
cgcccgagagccaaagtggaggggt

SEQ ID NO: 412612 - DNA, 25 bp, Homo sapien
tcagactttttgctcttaaagtccc

SEQ ID NO: 412613 - DNA, 25 bp, Homo sapien
ccccctgcccggctcgacccaactg

SEQ ID NO: 412614 - DNA, 25 bp, Homo sapien
ccctgcccggctcgacccaactgac

SEQ ID NO: 412615 - DNA, 25 bp, Homo sapien
cccctgcccggctcgacccaactga

SEQ ID NO: 412616 - DNA, 25 bp, Homo sapien
tctcttgcccaacagcgaggagtcg

SEQ ID NO: 412617 - DNA, 25 bp, Homo sapien
cacatgctcgcccacttctgcaaca

SEQ ID NO: 412618 - DNA, 25 bp, Homo sapien
aacagctggtggcggctcgagtctt

SEQ ID NO: 412619 - DNA, 25 bp, Homo sapien
tccatgtcggccaccgacgcgtctt

SEQ ID NO: 412620 - DNA, 25 bp, Homo sapien
agccgccagcgcatcctctgctaca

SEQ ID NO: 412621 - DNA, 25 bp, Homo sapien
ttgtcgccgcactcacagccgccag

SEQ ID NO: 412622 - DNA, 25 bp, Homo sapien
tctgctacacctcagtgaccgaacg

SEQ ID NO: 412623 - DNA, 25 bp, Homo sapien
gcatttgcccttgtcgccgcactca

SEQ ID NO: 412624 - DNA, 25 bp, Homo sapien
tacctacaaatcgcccgcgccccag

SEQ ID NO: 412625 - DNA, 25 bp, Homo sapien
gcgccccagagcgccatgggaaaaa

SEQ ID NO: 412626 - DNA, 25 bp, Homo sapien
ccgcgccccagagcgccatgggaaa

SEQ ID NO: 412627 - DNA, 25 bp, Homo sapien
tcgcccgcgccccagagcgccatgg

SEQ ID NO: 412628 - DNA, 25 bp, Homo sapien
caaggaagaagcatcccttgttgat

SEQ ID NO: 412629 - DNA, 25 bp, Homo sapien
ggaacaattcgtccttgcaaggaag

SEQ ID NO: 412630 - DNA, 25 bp, Homo sapien
agtgcccctggaaagcctggaagtg

SEQ ID NO: 412631 - DNA, 25 bp, Homo sapien
cccttgttgatgataaggacagatt

SEQ ID NO: 412632 - DNA, 25 bp, Homo sapien
gataaggttgagtccatctccacca

SEQ ID NO: 412633 - DNA, 25 bp, Homo sapien
aattctatgataggatgccccagga

SEQ ID NO: 412634 - DNA, 25 bp, Homo sapien
ctacttttgtagagccaagcctgac

SEQ ID NO: 412635 - DNA, 25 bp, Homo sapien
gaaggaatacaaggccgagctgcgt

SEQ ID NO: 412636 - DNA, 25 bp, Homo sapien
caccagttccgggaatgagtcccta

SEQ ID NO: 412637 - DNA, 25 bp, Homo sapien
cctagaggtttaacccgatcaatca

SEQ ID NO: 412638 - DNA, 25 bp, Homo sapien
taacccgatcaatcaggatgaccat

SEQ ID NO: 412639 - DNA, 25 bp, Homo sapien
agttccgggaatgagtccctagagg

SEQ ID NO: 412640 - DNA, 25 bp, Homo sapien
gagttgcgaagagcagaccaccttg

SEQ ID NO: 412641 - DNA, 25 bp, Homo sapien
gctaacctggaagcacgaagactcc

SEQ ID NO: 412642 - DNA, 25 bp, Homo sapien
gaactttgctggcaggatgtcacct

SEQ ID NO: 412643 - DNA, 25 bp, Homo sapien
caaacaaggtaggttgtcagccaga

SEQ ID NO: 412644 - DNA, 25 bp, Homo sapien
ggtagcacagaactcataaaacttg

SEQ ID NO: 412645 - DNA, 25 bp, Homo sapien
ctggaagttgccctgcatgaggcag

SEQ ID NO: 412646 - DNA, 25 bp, Homo sapien
tgtgaccactgttctatatggagct

SEQ ID NO: 412647 - DNA, 25 bp, Homo sapien
ttaccatgaatgaagcctccaggcc

SEQ ID NO: 412648 - DNA, 25 bp, Homo sapien
gaactgatgttgttgggtggccaca

SEQ ID NO: 412649 - DNA, 25 bp, Homo sapien
gggcaggtgcaacacttgaatgact

SEQ ID NO: 412650 - DNA, 25 bp, Homo sapien
cattcagagcaatcatattcagggc

SEQ ID NO: 412651 - DNA, 25 bp, Homo sapien
gaatgactctactgttgctcaacaa

SEQ ID NO: 412652 - DNA, 25 bp, Homo sapien
agtaacagtgcaggttgagtatccc

SEQ ID NO: 412653 - DNA, 25 bp, Homo sapien
tcgtgatcgcattctgggtgagcct

SEQ ID NO: 412654 - DNA, 25 bp, Homo sapien
tggaggacaaccgaaactcagggcc

SEQ ID NO: 412655 - DNA, 25 bp, Homo sapien
tatgttgacataacccagcgctgag

SEQ ID NO: 412656 - DNA, 25 bp, Homo sapien
gacacatccaatgttcccttctagg

SEQ ID NO: 412657 - DNA, 25 bp, Homo sapien
gaaacgtgtgccctggcaaaagagc

SEQ ID NO: 412658 - DNA, 25 bp, Homo sapien
ttttgccatcgctcacccgaagagg

SEQ ID NO: 412659 - DNA, 25 bp, Homo sapien
tggcccatgcccttggaaacgtgtg

SEQ ID NO: 412660 - DNA, 25 bp, Homo sapien
tagaatggccacctttgtgagctgg

SEQ ID NO: 412661 - DNA, 25 bp, Homo sapien
tatgtattgacttgctgggccctaa

SEQ ID NO: 412662 - DNA, 25 bp, Homo sapien
aaatcgtggccatagctgagtgaac

SEQ ID NO: 412663 - DNA, 25 bp, Homo sapien
tttgacaaagattgcagtggcccct

SEQ ID NO: 412664 - DNA, 25 bp, Homo sapien
ccaaggcattgtcagcacgatgtac

SEQ ID NO: 412665 - DNA, 25 bp, Homo sapien
taaatgcaggcctatgtggagcaaa

SEQ ID NO: 412666 - DNA, 25 bp, Homo sapien
tgaagggactgtatgccaacaaacg

SEQ ID NO: 412667 - DNA, 25 bp, Homo sapien
gatccttgctttgtagacagtgcaa

SEQ ID NO: 412668 - DNA, 25 bp, Homo sapien
tcaaatcacttttattctttaagga

SEQ ID NO: 412669 - DNA, 25 bp, Homo sapien
tactgggcagttcaataaagtcctc

SEQ ID NO: 412670 - DNA, 25 bp, Homo sapien
tatttcctgtgatgagctccaagcc

SEQ ID NO: 412671 - DNA, 25 bp, Homo sapien
gaagtgctgcctcaaactcgagcta

SEQ ID NO: 412672 - DNA, 25 bp, Homo sapien
tcgaggctctggtcatcagggtgca

SEQ ID NO: 412673 - DNA, 25 bp, Homo sapien
ctggcggcgtccttgcagagcacca

SEQ ID NO: 412674 - DNA, 25 bp, Homo sapien
gctggcggcgtccttgcagagcacc

SEQ ID NO: 412675 - DNA, 25 bp, Homo sapien
ggcggcgtccttgcagagcaccacg

SEQ ID NO: 412676 - DNA, 25 bp, Homo sapien
cgctggcggcgtccttgcagagcac

SEQ ID NO: 412677 - DNA, 25 bp, Homo sapien
ttaagagggtgtccggccgctgagc

SEQ ID NO: 412678 - DNA, 25 bp, Homo sapien
ggttaagagggtgtccggccgctga

SEQ ID NO: 412679 - DNA, 25 bp, Homo sapien
tttatgtagagagacactaggaatg

SEQ ID NO: 412680 - DNA, 25 bp, Homo sapien
cctttatgtagagagacactaggaa

SEQ ID NO: 412681 - DNA, 25 bp, Homo sapien
catgaccgtattgaacaggcaggcc

SEQ ID NO: 412682 - DNA, 25 bp, Homo sapien
cacggcactgtccttaaggaggtca

SEQ ID NO: 412683 - DNA, 25 bp, Homo sapien
aagtcaagatggacctcaggaggcc

SEQ ID NO: 412684 - DNA, 25 bp, Homo sapien
tgtctccaaggtagatgccatcagc

SEQ ID NO: 412685 - DNA, 25 bp, Homo sapien
taaaggcctgtatgacagtggcccg

SEQ ID NO: 412686 - DNA, 25 bp, Homo sapien
tcagcacggagtcaagtgtcccgaa

SEQ ID NO: 412687 - DNA, 25 bp, Homo sapien
gaatctgttcatgtccctaaaggcc

SEQ ID NO: 412688 - DNA, 25 bp, Homo sapien
tcaatgaggctccacttgtgcaaga

SEQ ID NO: 412689 - DNA, 25 bp, Homo sapien
gcttcatgagcacgatgagaacata

SEQ ID NO: 412690 - DNA, 25 bp, Homo sapien
ctaggctggcaaaggcgctggctct

SEQ ID NO: 412691 - DNA, 25 bp, Homo sapien
tgaccaggtgcagggcaagccgctt

SEQ ID NO: 412692 - DNA, 25 bp, Homo sapien
aaggagatcacattagacagcagcg

SEQ ID NO: 412693 - DNA, 25 bp, Homo sapien
cggccttcctgcaagagggctgcag

SEQ ID NO: 412694 - DNA, 25 bp, Homo sapien
gccttcctgcaagagggctgcagct

SEQ ID NO: 412695 - DNA, 25 bp, Homo sapien
cgtcagaccggccttcctgcaagag

SEQ ID NO: 412696 - DNA, 25 bp, Homo sapien
agaccggccttcctgcaagagggct

SEQ ID NO: 412697 - DNA, 25 bp, Homo sapien
tagagaacaggacattcacttcaga

SEQ ID NO: 412698 - DNA, 25 bp, Homo sapien
caggacattcacttcagagcacaga

SEQ ID NO: 412699 - DNA, 25 bp, Homo sapien
gagaacaggacattcacttcagagc

SEQ ID NO: 412700 - DNA, 25 bp, Homo sapien
gaacaggacattcacttcagagcac

SEQ ID NO: 412701 - DNA, 25 bp, Homo sapien
ctgggacaccggggaggagtctgac

SEQ ID NO: 412702 - DNA, 25 bp, Homo sapien
ctgtgcagaacagagccagacaggc

SEQ ID NO: 412703 - DNA, 25 bp, Homo sapien
agccagacaggctggcggagactct

SEQ ID NO: 412704 - DNA, 25 bp, Homo sapien
tggcggagactctgccagatgtgaa

SEQ ID NO: 412705 - DNA, 25 bp, Homo sapien
tctgccagatgtgaacagcagctgg

SEQ ID NO: 412706 - DNA, 25 bp, Homo sapien
taaaaggctatagtctcgtatgatt

SEQ ID NO: 412707 - DNA, 25 bp, Homo sapien
acgcagatctggcaacctgggcagc

SEQ ID NO: 412708 - DNA, 25 bp, Homo sapien
tatgatttcatacgcagatctggca

SEQ ID NO: 412709 - DNA, 25 bp, Homo sapien
aaggctatagtctcgtatgatttca

SEQ ID NO: 412710 - DNA, 25 bp, Homo sapien
tggccgccagccacgagccatgcgg

SEQ ID NO: 412711 - DNA, 25 bp, Homo sapien
cgagccatgcggccctgtgtttacc

SEQ ID NO: 412712 - DNA, 25 bp, Homo sapien
aatggcccagatgcgcagccaccgg

SEQ ID NO: 412713 - DNA, 25 bp, Homo sapien
aaatggcccagatgcgcagccaccg

SEQ ID NO: 412714 - DNA, 25 bp, Homo sapien
tatttagaggacaaatgacactggg

SEQ ID NO: 412715 - DNA, 25 bp, Homo sapien
gaagagtatttagaggacaaatgac

SEQ ID NO: 412716 - DNA, 25 bp, Homo sapien
ccgtatacacagtaggagggttgca

SEQ ID NO: 412717 - DNA, 25 bp, Homo sapien
cccactgatggccttcgtatatgcc

SEQ ID NO: 412718 - DNA, 25 bp, Homo sapien
ggctgtggaagaaggacaggatgat

SEQ ID NO: 412719 - DNA, 25 bp, Homo sapien
tgcctcgtcacacagcgggctgtgg

SEQ ID NO: 412720 - DNA, 25 bp, Homo sapien
gtagcactgcttgtcacggatcccc

SEQ ID NO: 412721 - DNA, 25 bp, Homo sapien
tgtggaagatgccacgccgggcaca

SEQ ID NO: 412722 - DNA, 25 bp, Homo sapien
tgagccaacagcacggagacattcc

SEQ ID NO: 412723 - DNA, 25 bp, Homo sapien
tttgaggcgccatgtagaagtgagc

SEQ ID NO: 412724 - DNA, 25 bp, Homo sapien
tgacaacggtggctgcatcatcaat

SEQ ID NO: 412725 - DNA, 25 bp, Homo sapien
agacattccgaagtgcaggcctgcg

SEQ ID NO: 412726 - DNA, 25 bp, Homo sapien
tcaagtactcatgcgacagcaggaa

SEQ ID NO: 412727 - DNA, 25 bp, Homo sapien
tggcactttgtccatgttcaagtac

SEQ ID NO: 412728 - DNA, 25 bp, Homo sapien
ttgtccatgttcaagtactcatgcg

SEQ ID NO: 412729 - DNA, 25 bp, Homo sapien
ccatgttcaagtactcatgcgacag

SEQ ID NO: 412730 - DNA, 25 bp, Homo sapien
tctccaaggcaagtaaatccatgga

SEQ ID NO: 412731 - DNA, 25 bp, Homo sapien
aagctatctacccttgggagcctca

SEQ ID NO: 412732 - DNA, 25 bp, Homo sapien
tagcaacttgactgtgaactaactg

SEQ ID NO: 412733 - DNA, 25 bp, Homo sapien
aaaccatcatggtctctgccaatta

SEQ ID NO: 412734 - DNA, 25 bp, Homo sapien
agagagccaaggtaaaagtaagtct

SEQ ID NO: 412735 - DNA, 25 bp, Homo sapien
tctgcagggctgctttggcaatgaa

SEQ ID NO: 412736 - DNA, 25 bp, Homo sapien
cctgagttcgaatcccattccggac

SEQ ID NO: 412737 - DNA, 25 bp, Homo sapien
cattccggactacatccaacaggta

SEQ ID NO: 412738 - DNA, 25 bp, Homo sapien
gacatggtaggctatggctcgcatc

SEQ ID NO: 412739 - DNA, 25 bp, Homo sapien
gttaggcccagagcatttgaatcca

SEQ ID NO: 412740 - DNA, 25 bp, Homo sapien
tccaagtgcgagtagtaggccgcca

SEQ ID NO: 412741 - DNA, 25 bp, Homo sapien
tcttggaaccgtgcgccctccaagt

SEQ ID NO: 412742 - DNA, 25 bp, Homo sapien
gaagtcatgcatagcaagccctgac

SEQ ID NO: 412743 - DNA, 25 bp, Homo sapien
cctctgagaagtcatgcatagcaag

SEQ ID NO: 412744 - DNA, 25 bp, Homo sapien
taccataatcaacctgacctctgag

SEQ ID NO: 412745 - DNA, 25 bp, Homo sapien
gaggatggctgaagatcctttaaga

SEQ ID NO: 412746 - DNA, 25 bp, Homo sapien
gagctgaaggagaaagcaggggtca

SEQ ID NO: 412747 - DNA, 25 bp, Homo sapien
aggccatcaagatccaccctgcttt

SEQ ID NO: 412748 - DNA, 25 bp, Homo sapien
gcttttgtctttgaatatcagctcc

SEQ ID NO: 412749 - DNA, 25 bp, Homo sapien
gccatcaagatccaccctgcttttg

SEQ ID NO: 412750 - DNA, 25 bp, Homo sapien
cccggtccagcaggcgaaggatgtc

SEQ ID NO: 412751 - DNA, 25 bp, Homo sapien
ttgtgatgctccacggccgctgggc

SEQ ID NO: 412752 - DNA, 25 bp, Homo sapien
aggatgtccccgacactcggctgct

SEQ ID NO: 412753 - DNA, 25 bp, Homo sapien
cccaggctccggcacgtcttgtgat

SEQ ID NO: 412754 - DNA, 25 bp, Homo sapien
cagatgttccagtgctagtcccaaa

SEQ ID NO: 412755 - DNA, 25 bp, Homo sapien
cacacacgtacatactgagcagatg

SEQ ID NO: 412756 - DNA, 25 bp, Homo sapien
tcaagctcctgcttaggtgcggcac

SEQ ID NO: 412757 - DNA, 25 bp, Homo sapien
gaaaagaagactctagggcagcaaa

SEQ ID NO: 412758 - DNA, 25 bp, Homo sapien
tcatacgctcgaagcagaagtaaaa

SEQ ID NO: 412759 - DNA, 25 bp, Homo sapien
tctgctcatacgctcgaagcagaag

SEQ ID NO: 412760 - DNA, 25 bp, Homo sapien
gctcatacgctcgaagcagaagtaa

SEQ ID NO: 412761 - DNA, 25 bp, Homo sapien
gttctgctcatacgctcgaagcaga

SEQ ID NO: 412762 - DNA, 25 bp, Homo sapien
aggccccgagaagcactgcaaagtg

SEQ ID NO: 412763 - DNA, 25 bp, Homo sapien
ggacgctgagagtggcgccataggc

SEQ ID NO: 412764 - DNA, 25 bp, Homo sapien
tctcacagacagaggggcacatctc

SEQ ID NO: 412765 - DNA, 25 bp, Homo sapien
tgagagtggcgccataggccccgag

SEQ ID NO: 412766 - DNA, 25 bp, Homo sapien
tttccccatgactgtgctaccaaag

SEQ ID NO: 412767 - DNA, 25 bp, Homo sapien
gtttttctactacccataccagtga

SEQ ID NO: 412768 - DNA, 25 bp, Homo sapien
tcttcctaggcctttgacaaggctg

SEQ ID NO: 412769 - DNA, 25 bp, Homo sapien
gtggctaatggctgtcttcgactta

SEQ ID NO: 412770 - DNA, 25 bp, Homo sapien
aaacattctgacactgtcttggcaa

SEQ ID NO: 412771 - DNA, 25 bp, Homo sapien
catttcttcaccctggatttgacag

SEQ ID NO: 412772 - DNA, 25 bp, Homo sapien
aatctggatacggaatggaagggct

SEQ ID NO: 412773 - DNA, 25 bp, Homo sapien
tggcaatgcttccttagctccgaga

SEQ ID NO: 412774 - DNA, 25 bp, Homo sapien
ttcgtgcgcacggagctttctgggc

SEQ ID NO: 412775 - DNA, 25 bp, Homo sapien
tagagtcggcagaaacagcgagtgc

SEQ ID NO: 412776 - DNA, 25 bp, Homo sapien
tgcatgagcatcacgtagaccaccg

SEQ ID NO: 412777 - DNA, 25 bp, Homo sapien
tctccgtcagacgtcagtagagtcg

SEQ ID NO: 412778 - DNA, 25 bp, Homo sapien
gcgcccggccattttctcagtattt

SEQ ID NO: 412779 - DNA, 25 bp, Homo sapien
gccattttctcagtattttattaag

SEQ ID NO: 412780 - DNA, 25 bp, Homo sapien
ccattttctcagtattttattaaga

SEQ ID NO: 412781 - DNA, 25 bp, Homo sapien
actgcgcccggccattttctcagta

SEQ ID NO: 412782 - DNA, 25 bp, Homo sapien
agtgcaaattcgctggccgggcaca

SEQ ID NO: 412783 - DNA, 25 bp, Homo sapien
gactatctgattgccccaaactgaa

SEQ ID NO: 412784 - DNA, 25 bp, Homo sapien
taagggaaaatgaacgctgacacac

SEQ ID NO: 412785 - DNA, 25 bp, Homo sapien
tctgtttcaagttcatgggatggtc

SEQ ID NO: 412786 - DNA, 25 bp, Homo sapien
gtcaccaggatcaacttcattaagt

SEQ ID NO: 412787 - DNA, 25 bp, Homo sapien
accaggatcaacttcattaagtgca

SEQ ID NO: 412788 - DNA, 25 bp, Homo sapien
gccagtcaccaggatcaacttcatt

SEQ ID NO: 412789 - DNA, 25 bp, Homo sapien
caggatcaacttcattaagtgcatg

SEQ ID NO: 412790 - DNA, 25 bp, Homo sapien
aaagccggaaccctggtcaggatct

SEQ ID NO: 412791 - DNA, 25 bp, Homo sapien
ccaggaagcactagtgccaacttgt

SEQ ID NO: 412792 - DNA, 25 bp, Homo sapien
gtcaggatctcctctcgctccagag

SEQ ID NO: 412793 - DNA, 25 bp, Homo sapien
agcactagtgccaacttgtgaacca

SEQ ID NO: 412794 - DNA, 25 bp, Homo sapien
acagctccagtatcatacaactgcg

SEQ ID NO: 412795 - DNA, 25 bp, Homo sapien
caactgcgtgatacatgatggtaca

SEQ ID NO: 412796 - DNA, 25 bp, Homo sapien
actggacataaatggccaagtgtgc

SEQ ID NO: 412797 - DNA, 25 bp, Homo sapien
taaatggccaagtgtgcaaaaatgg

SEQ ID NO: 412798 - DNA, 25 bp, Homo sapien
gctgtccaccactgaaagacacgat

SEQ ID NO: 412799 - DNA, 25 bp, Homo sapien
caacaacgcatttaatctaagcagc

SEQ ID NO: 412800 - DNA, 25 bp, Homo sapien
gaaagacacgatcagccacttcaca

SEQ ID NO: 412801 - DNA, 25 bp, Homo sapien
ctcctgattctgagtattatcatca

SEQ ID NO: 412802 - DNA, 25 bp, Homo sapien
tgagatccttggctcgtgcaaacgg

SEQ ID NO: 412803 - DNA, 25 bp, Homo sapien
ctcttgtgactgcttggggtgtgaa

SEQ ID NO: 412804 - DNA, 25 bp, Homo sapien
ggcaggcggtccatgagtacactga

SEQ ID NO: 412805 - DNA, 25 bp, Homo sapien
ccttggctcgtgcaaacgggaccag

SEQ ID NO: 412806 - DNA, 25 bp, Homo sapien
gactgtcagtgctaagaagcctgct

SEQ ID NO: 412807 - DNA, 25 bp, Homo sapien
aggatctcctggtacagcccagatg

SEQ ID NO: 412808 - DNA, 25 bp, Homo sapien
tgctaagaagcctgctctgtagctg

SEQ ID NO: 412809 - DNA, 25 bp, Homo sapien
ggtcttcctcaagacaggaatgaca

SEQ ID NO: 412810 - DNA, 25 bp, Homo sapien
gatttcgtgggttgctgggtcacca

SEQ ID NO: 412811 - DNA, 25 bp, Homo sapien
ccaggagcttcacgaggacagggct

SEQ ID NO: 412812 - DNA, 25 bp, Homo sapien
cgtgtgaagtggctccgtgtcctgc

SEQ ID NO: 412813 - DNA, 25 bp, Homo sapien
gccaggcagtagtcaagcagatcag

SEQ ID NO: 412814 - DNA, 25 bp, Homo sapien
ggcggcctcgcatctctgctggttc

SEQ ID NO: 412815 - DNA, 25 bp, Homo sapien
gccacggactccatgtccaggaaga

SEQ ID NO: 412816 - DNA, 25 bp, Homo sapien
tgctcacagtggacaaccaggcgcc

SEQ ID NO: 412817 - DNA, 25 bp, Homo sapien
tggccaactccagcgaggccacgga

SEQ ID NO: 412818 - DNA, 25 bp, Homo sapien
aggaggggcgggcccacacttctgc

SEQ ID NO: 412819 - DNA, 25 bp, Homo sapien
gcaggaggggcgggcccacacttct

SEQ ID NO: 412820 - DNA, 25 bp, Homo sapien
gaggggcgggcccacacttctgccc

SEQ ID NO: 412821 - DNA, 25 bp, Homo sapien
ctgcaggaggggcgggcccacactt

SEQ ID NO: 412822 - DNA, 25 bp, Homo sapien
tggccgaagttctccacagtgctcc

SEQ ID NO: 412823 - DNA, 25 bp, Homo sapien
tgctccgcaggtagagcaacacctg

SEQ ID NO: 412824 - DNA, 25 bp, Homo sapien
tgcacctggatgtgctcgtcccgaa

SEQ ID NO: 412825 - DNA, 25 bp, Homo sapien
caacacctgcttggccgcgagcagg

SEQ ID NO: 412826 - DNA, 25 bp, Homo sapien
gcagggctgtgaaggacgaggccaa

SEQ ID NO: 412827 - DNA, 25 bp, Homo sapien
cagggctgtgaaggacgaggccaag

SEQ ID NO: 412828 - DNA, 25 bp, Homo sapien
ggctgtgaaggacgaggccaaggga

SEQ ID NO: 412829 - DNA, 25 bp, Homo sapien
tgtgaaggacgaggccaagggaagg

SEQ ID NO: 412830 - DNA, 25 bp, Homo sapien
tgccttcggaagaccttccccagga

SEQ ID NO: 412831 - DNA, 25 bp, Homo sapien
agagaagcccgctctgcgagtggcc

SEQ ID NO: 412832 - DNA, 25 bp, Homo sapien
tctgcgagtggcctgccttcggaag

SEQ ID NO: 412833 - DNA, 25 bp, Homo sapien
gtggcctgccttcggaagaccttcc

SEQ ID NO: 412834 - DNA, 25 bp, Homo sapien
ctgttaaaccgtgagagctgctggc

SEQ ID NO: 412835 - DNA, 25 bp, Homo sapien
caagcttatcatatgcctggagcag

SEQ ID NO: 412836 - DNA, 25 bp, Homo sapien
cactgccgtcagatatgtcacaacg

SEQ ID NO: 412837 - DNA, 25 bp, Homo sapien
gctccgggatccagaggctgtagta

SEQ ID NO: 412838 - DNA, 25 bp, Homo sapien
caggacatccaccatgtcgagaaca

SEQ ID NO: 412839 - DNA, 25 bp, Homo sapien
tgtcccaaggagcaacttattcctg

SEQ ID NO: 412840 - DNA, 25 bp, Homo sapien
tgggaacgtgagcaggatcatgtct

SEQ ID NO: 412841 - DNA, 25 bp, Homo sapien
cagggactaccgcactgaatgggaa

SEQ ID NO: 412842 - DNA, 25 bp, Homo sapien
gcttcttggacaaagtcagatgctt

SEQ ID NO: 412843 - DNA, 25 bp, Homo sapien
tgggaatgctcatgtcatcggcttc

SEQ ID NO: 412844 - DNA, 25 bp, Homo sapien
atagggattcgccaccaatgtcaat

SEQ ID NO: 412845 - DNA, 25 bp, Homo sapien
ttcttgcttcgtcatagtggcctgc

SEQ ID NO: 412846 - DNA, 25 bp, Homo sapien
cgttccagaaactgaatcacagtct

SEQ ID NO: 412847 - DNA, 25 bp, Homo sapien
catggtgttctctaaatgctccagc

SEQ ID NO: 412848 - DNA, 25 bp, Homo sapien
aggtgtgctcaaacacccccgtgtc

SEQ ID NO: 412849 - DNA, 25 bp, Homo sapien
tcctcttccatggtgttctctaaat

SEQ ID NO: 412850 - DNA, 25 bp, Homo sapien
actaaacacttaccataaggaagat

SEQ ID NO: 412851 - DNA, 25 bp, Homo sapien
taaggaagatctatacaaaatgctt

SEQ ID NO: 412852 - DNA, 25 bp, Homo sapien
ggaagatctatacaaaatgcttttc

SEQ ID NO: 412853 - DNA, 25 bp, Homo sapien
gaattcaataactgttaactaaaca

SEQ ID NO: 412854 - DNA, 25 bp, Homo sapien
catgatcagaagtttggtcaatgac

SEQ ID NO: 412855 - DNA, 25 bp, Homo sapien
taagtaaaatactgatcgttcacct

SEQ ID NO: 412856 - DNA, 25 bp, Homo sapien
gacttcagttgtaaatggctactgg

SEQ ID NO: 412857 - DNA, 25 bp, Homo sapien
tgatcgttcacctccaataatttct

SEQ ID NO: 412858 - DNA, 25 bp, Homo sapien
tttaaccacagaaacttgctggccg

SEQ ID NO: 412859 - DNA, 25 bp, Homo sapien
aatgggaggcacctcctctcgaagg

SEQ ID NO: 412860 - DNA, 25 bp, Homo sapien
cagaatgggaggcacctcctctcga

SEQ ID NO: 412861 - DNA, 25 bp, Homo sapien
tgggaggcacctcctctcgaaggcc

SEQ ID NO: 412862 - DNA, 25 bp, Homo sapien
tgctgaagtcaaagttgtactgcat

SEQ ID NO: 412863 - DNA, 25 bp, Homo sapien
gaagtcaaagttgtactgcatgacc

SEQ ID NO: 412864 - DNA, 25 bp, Homo sapien
gcatgaccacgtgggggaccacctt

SEQ ID NO: 412865 - DNA, 25 bp, Homo sapien
aagttgtactgcatgaccacgtggg

SEQ ID NO: 412866 - DNA, 25 bp, Homo sapien
ctggagcaaaacagctttcaaaaga

SEQ ID NO: 412867 - DNA, 25 bp, Homo sapien
tttcaaaagaatggtttctgcatca

SEQ ID NO: 412868 - DNA, 25 bp, Homo sapien
gcaaaacagctttcaaaagaatggt

SEQ ID NO: 412869 - DNA, 25 bp, Homo sapien
cagctttcaaaagaatggtttctgc

SEQ ID NO: 412870 - DNA, 25 bp, Homo sapien
gcagacagactgctcagtacctaga

SEQ ID NO: 412871 - DNA, 25 bp, Homo sapien
gctgtacaccgaggctgcagacaga

SEQ ID NO: 412872 - DNA, 25 bp, Homo sapien
cagctgaaccaagtgtggcaccaca

SEQ ID NO: 412873 - DNA, 25 bp, Homo sapien
cacactgcagccaactgcatgctgt

SEQ ID NO: 412874 - DNA, 25 bp, Homo sapien
cgcactggtgagcatcgcaggcagc

SEQ ID NO: 412875 - DNA, 25 bp, Homo sapien
cagacccacacgacagtgttcaggt

SEQ ID NO: 412876 - DNA, 25 bp, Homo sapien
gtgactgccagacccacacgacagt

SEQ ID NO: 412877 - DNA, 25 bp, Homo sapien
cgacagtgttcaggtctggcaaaat

SEQ ID NO: 412878 - DNA, 25 bp, Homo sapien
gaaataagggataaggctgtgtgcc

SEQ ID NO: 412879 - DNA, 25 bp, Homo sapien
tctctgaagagctgcacgaattctt

SEQ ID NO: 412880 - DNA, 25 bp, Homo sapien
ttttaatgccctcttcaaaatgaca

SEQ ID NO: 412881 - DNA, 25 bp, Homo sapien
ctgtgtacacgcctgattcctgcca

SEQ ID NO: 412882 - DNA, 25 bp, Homo sapien
aaaagcattagcatcaggtggagga

SEQ ID NO: 412883 - DNA, 25 bp, Homo sapien
aagctcaatgagcaagcaacccaca

SEQ ID NO: 412884 - DNA, 25 bp, Homo sapien
gacatccagagctcttgacttccag

SEQ ID NO: 412885 - DNA, 25 bp, Homo sapien
tgcccaggattctaccactattaaa

SEQ ID NO: 412886 - DNA, 25 bp, Homo sapien
cagctcaataaccacgacaccccag

SEQ ID NO: 412887 - DNA, 25 bp, Homo sapien
ctgtgtacactgcacactaaatcag

SEQ ID NO: 412888 - DNA, 25 bp, Homo sapien
gtgtacactgcacactaaatcagga

SEQ ID NO: 412889 - DNA, 25 bp, Homo sapien
gctcaataaccacgacaccccagag

SEQ ID NO: 412890 - DNA, 25 bp, Homo sapien
cagtcttggctctcggaaagggcac

SEQ ID NO: 412891 - DNA, 25 bp, Homo sapien
acagtcttggctctcggaaagggca

SEQ ID NO: 412892 - DNA, 25 bp, Homo sapien
taatgcttgggtgaacatgctctta

SEQ ID NO: 412893 - DNA, 25 bp, Homo sapien
tgaaatgcccgggaaatctccggct

SEQ ID NO: 412894 - DNA, 25 bp, Homo sapien
tcaccattgccaggagccgaggcaa

SEQ ID NO: 412895 - DNA, 25 bp, Homo sapien
aacatgctcttattgcacaccaggg

SEQ ID NO: 412896 - DNA, 25 bp, Homo sapien
ggatgtttaccacaaggtcagccac

SEQ ID NO: 412897 - DNA, 25 bp, Homo sapien
tatttaaccaagtagacttcgctcg

SEQ ID NO: 412898 - DNA, 25 bp, Homo sapien
tatttgttcagtaagtccgggcaca

SEQ ID NO: 412899 - DNA, 25 bp, Homo sapien
gacttcgctcgtgggataaaggaaa

SEQ ID NO: 412900 - DNA, 25 bp, Homo sapien
ggaagttatgaacaagctcccgcac

SEQ ID NO: 412901 - DNA, 25 bp, Homo sapien
gtacccaaagatgcatcgtaaaaat

SEQ ID NO: 412902 - DNA, 25 bp, Homo sapien
aacaagctcccgcaccatggttttc

SEQ ID NO: 412903 - DNA, 25 bp, Homo sapien
ttttccctgcttcttcggcagaaac

SEQ ID NO: 412904 - DNA, 25 bp, Homo sapien
aacgcaccttctgggtttttgtgat

SEQ ID NO: 412905 - DNA, 25 bp, Homo sapien
ccattccagttgtacagcgatgcta

SEQ ID NO: 412906 - DNA, 25 bp, Homo sapien
tggttcaataactgccccgtaaaga

SEQ ID NO: 412907 - DNA, 25 bp, Homo sapien
ttttctgggttcacatcggtaatcc

SEQ ID NO: 412908 - DNA, 25 bp, Homo sapien
atggtagagatcctatcttccttta

SEQ ID NO: 412909 - DNA, 25 bp, Homo sapien
ggtagagatcctatcttcctttatc

SEQ ID NO: 412910 - DNA, 25 bp, Homo sapien
tttcagtgtggataataaaatattg

SEQ ID NO: 412911 - DNA, 25 bp, Homo sapien
ttcagtgtggataataaaatattga

SEQ ID NO: 412912 - DNA, 25 bp, Homo sapien
gtggatagttagaagacccatttcc

SEQ ID NO: 412913 - DNA, 25 bp, Homo sapien
tgcattccatcttatgaccagtccc

SEQ ID NO: 412914 - DNA, 25 bp, Homo sapien
gagtatttttaatcgctgcattcca

SEQ ID NO: 412915 - DNA, 25 bp, Homo sapien
gaccagtccccaatttgctcagcca

SEQ ID NO: 412916 - DNA, 25 bp, Homo sapien
ccaggcaatggttcagggctacagt

SEQ ID NO: 412917 - DNA, 25 bp, Homo sapien
tattgtgcaacccacttcagtgcca

SEQ ID NO: 412918 - DNA, 25 bp, Homo sapien
ccagggggacgggcccatcataaat

SEQ ID NO: 412919 - DNA, 25 bp, Homo sapien
gccagcagcctacgggaacagaggc

SEQ ID NO: 412920 - DNA, 25 bp, Homo sapien
agggtgaccgccacctgcactctcc

SEQ ID NO: 412921 - DNA, 25 bp, Homo sapien
tcgtcccggcagtcacgttccaggg

SEQ ID NO: 412922 - DNA, 25 bp, Homo sapien
tgcactctcctcctaaatcgtcccg

SEQ ID NO: 412923 - DNA, 25 bp, Homo sapien
tcctaaatcgtcccggcagtcacgt

SEQ ID NO: 412924 - DNA, 25 bp, Homo sapien
cttcaatctggtgtacacagcaact

SEQ ID NO: 412925 - DNA, 25 bp, Homo sapien
aatctggtgtacacagcaactgcaa

SEQ ID NO: 412926 - DNA, 25 bp, Homo sapien
caaaggctgcagactttttttgaac

SEQ ID NO: 412927 - DNA, 25 bp, Homo sapien
tcaatctggtgtacacagcaactgc

SEQ ID NO: 412928 - DNA, 25 bp, Homo sapien
gtaggcctgccgaacgtcgtacact

SEQ ID NO: 412929 - DNA, 25 bp, Homo sapien
tgcactatagtgctgtcatcacccg

SEQ ID NO: 412930 - DNA, 25 bp, Homo sapien
gtcatcacccgcaattaaaaaggag

SEQ ID NO: 412931 - DNA, 25 bp, Homo sapien
gagagagcaaactgaacgtaggcct

SEQ ID NO: 412932 - DNA, 25 bp, Homo sapien
aggccctacgacagacaacctggag

SEQ ID NO: 412933 - DNA, 25 bp, Homo sapien
cacgcgatgggaggatgccctctct

SEQ ID NO: 412934 - DNA, 25 bp, Homo sapien
aggagtcctccaagtgtgcctgctc

SEQ ID NO: 412935 - DNA, 25 bp, Homo sapien
gagctgatatggcaaccagaagagg

SEQ ID NO: 412936 - DNA, 25 bp, Homo sapien
tggtcaccagggtgtacagggtctt

SEQ ID NO: 412937 - DNA, 25 bp, Homo sapien
atcaaaatggctgcagacgtccctg

SEQ ID NO: 412938 - DNA, 25 bp, Homo sapien
caggctcaggcaggcgcgagccaac

SEQ ID NO: 412939 - DNA, 25 bp, Homo sapien
tggcagcttccggaccctgggtcac

SEQ ID NO: 412940 - DNA, 25 bp, Homo sapien
ggactcacagatgagcttcatgtgg

SEQ ID NO: 412941 - DNA, 25 bp, Homo sapien
acttgctgtccgcaataatatggcc

SEQ ID NO: 412942 - DNA, 25 bp, Homo sapien
atggcctcgaaaacttgaaatatta

SEQ ID NO: 412943 - DNA, 25 bp, Homo sapien
acaatgttggttcccacaacatgga

SEQ ID NO: 412944 - DNA, 25 bp, Homo sapien
ggagctggaaaatttcgacacactc

SEQ ID NO: 412945 - DNA, 25 bp, Homo sapien
ttctcgtggtagcttcttggcagca

SEQ ID NO: 412946 - DNA, 25 bp, Homo sapien
gaaaatttcgacacactcaacagaa

SEQ ID NO: 412947 - DNA, 25 bp, Homo sapien
cagaaatctttatatacccttccac

SEQ ID NO: 412948 - DNA, 25 bp, Homo sapien
tactgcaggtgagctccactagctg

SEQ ID NO: 412949 - DNA, 25 bp, Homo sapien
tgctttagggagtgtctgggcatcc

SEQ ID NO: 412950 - DNA, 25 bp, Homo sapien
ggtcactctctatgttcccttgaag

SEQ ID NO: 412951 - DNA, 25 bp, Homo sapien
gattcaagtcctgacgctgctaagc

SEQ ID NO: 412952 - DNA, 25 bp, Homo sapien
gttttctgcaaaccagaggcttgcc

SEQ ID NO: 412953 - DNA, 25 bp, Homo sapien
gtcgccgacagtccagagcaaggaa

SEQ ID NO: 412954 - DNA, 25 bp, Homo sapien
tgtgttgtaacatgaaacggtccca

SEQ ID NO: 412955 - DNA, 25 bp, Homo sapien
ccactgagcctatgtgacccgaaag

SEQ ID NO: 412956 - DNA, 25 bp, Homo sapien
cttggctgcacccgcggaggaagcc

SEQ ID NO: 412957 - DNA, 25 bp, Homo sapien
ttctttgcgggcgcgcttggctgca

SEQ ID NO: 412958 - DNA, 25 bp, Homo sapien
aaccgcacgcccgtgagctcttctt

SEQ ID NO: 412959 - DNA, 25 bp, Homo sapien
tccttcagctgagccttgaaccgca

SEQ ID NO: 412960 - DNA, 25 bp, Homo sapien
gggcggaagcgcgacggaaacgaca

SEQ ID NO: 412961 - DNA, 25 bp, Homo sapien
gagagggcggaagcgcgacggaaac

SEQ ID NO: 412962 - DNA, 25 bp, Homo sapien
gcggaagcgcgacggaaacgacaca

SEQ ID NO: 412963 - DNA, 25 bp, Homo sapien
gccgagagggcggaagcgcgacgga

SEQ ID NO: 412964 - DNA, 25 bp, Homo sapien
ggcaggagcactggcacagacagca

SEQ ID NO: 412965 - DNA, 25 bp, Homo sapien
tgaggggacccggcaggagcactgg

SEQ ID NO: 412966 - DNA, 25 bp, Homo sapien
acccggcaggagcactggcacagac

SEQ ID NO: 412967 - DNA, 25 bp, Homo sapien
ctgaggggacccggcaggagcactg

SEQ ID NO: 412968 - DNA, 25 bp, Homo sapien
atatccgtgactacccctctctttt

SEQ ID NO: 412969 - DNA, 25 bp, Homo sapien
aaactgctgccgatcaaggggaaac

SEQ ID NO: 412970 - DNA, 25 bp, Homo sapien
aaacagactgggcatatccgtgact

SEQ ID NO: 412971 - DNA, 25 bp, Homo sapien
tgggcatatccgtgactacccctct

SEQ ID NO: 412972 - DNA, 25 bp, Homo sapien
taaagcgtgaccaggcaagcttggt

SEQ ID NO: 412973 - DNA, 25 bp, Homo sapien
acactttccttaatgatggcagagc

SEQ ID NO: 412974 - DNA, 25 bp, Homo sapien
tggtttagcagaaccagagctgctg

SEQ ID NO: 412975 - DNA, 25 bp, Homo sapien
cactttccttaatgatggcagagca

SEQ ID NO: 412976 - DNA, 25 bp, Homo sapien
atctgccttctaaacatccttccat

SEQ ID NO: 412977 - DNA, 25 bp, Homo sapien
tctgggtgtacagcgagcacatcag

SEQ ID NO: 412978 - DNA, 25 bp, Homo sapien
acatcagcccaagcacagccataaa

SEQ ID NO: 412979 - DNA, 25 bp, Homo sapien
ccggtcgcattgtgctgtccatctg

SEQ ID NO: 412980 - DNA, 25 bp, Homo sapien
taaaaatcattatgccagacaggct

SEQ ID NO: 412981 - DNA, 25 bp, Homo sapien
aattcggtgacccagcccttgctgg

SEQ ID NO: 412982 - DNA, 25 bp, Homo sapien
tgggcctcactcgataaacactgat

SEQ ID NO: 412983 - DNA, 25 bp, Homo sapien
gactggaagaagaggccgagatccc

SEQ ID NO: 412984 - DNA, 25 bp, Homo sapien
ggctatcgagaaaaaacaggtgtat

SEQ ID NO: 412985 - DNA, 25 bp, Homo sapien
agattcagagttaagcattccaagg

SEQ ID NO: 412986 - DNA, 25 bp, Homo sapien
cactcaaagtgatggtgtcctagga

SEQ ID NO: 412987 - DNA, 25 bp, Homo sapien
ttcattgacatgaaaagcctgatgg

SEQ ID NO: 412988 - DNA, 25 bp, Homo sapien
caggccacggagtctgaaatgtatg

SEQ ID NO: 412989 - DNA, 25 bp, Homo sapien
gtctgcctctgatgccctgtgaata

SEQ ID NO: 412990 - DNA, 25 bp, Homo sapien
gaacagtctgatttcatgtctgcct

SEQ ID NO: 412991 - DNA, 25 bp, Homo sapien
gtgaatacaaatcacctcatctggg

SEQ ID NO: 412992 - DNA, 25 bp, Homo sapien
tacagacagcttgggtgttactttg

SEQ ID NO: 412993 - DNA, 25 bp, Homo sapien
ctgtgctgctgttatacacttatca

SEQ ID NO: 412994 - DNA, 25 bp, Homo sapien
tactttgtgaacagtgcattcagca

SEQ ID NO: 412995 - DNA, 25 bp, Homo sapien
tatcaagatacgctggagtttgtgt

SEQ ID NO: 412996 - DNA, 25 bp, Homo sapien
accaccaaagttgctcctggcatta

SEQ ID NO: 412997 - DNA, 25 bp, Homo sapien
gggaacgcaccaccaaagttgctcc

SEQ ID NO: 412998 - DNA, 25 bp, Homo sapien
caaagttgctcctggcattaggatg

SEQ ID NO: 412999 - DNA, 25 bp, Homo sapien
gttgctcctggcattaggatgaaga

SEQ ID NO: 413000 - DNA, 25 bp, Homo sapien
gtgcactaacgccagtcagcttgaa

SEQ ID NO: 413001 - DNA, 25 bp, Homo sapien
tgcactaacgccagtcagcttgaag

SEQ ID NO: 413002 - DNA, 25 bp, Homo sapien
tcaaagtgcactaacgccagtcagc

SEQ ID NO: 413003 - DNA, 25 bp, Homo sapien
ccacttcaaagtgcactaacgccag

SEQ ID NO: 413004 - DNA, 25 bp, Homo sapien
gcctcctggtgttccctgaacaaaa

SEQ ID NO: 413005 - DNA, 25 bp, Homo sapien
tgcctcgctgccatcagtatttcta

SEQ ID NO: 413006 - DNA, 25 bp, Homo sapien
tggtgttccctgaacaaaagtgagg

SEQ ID NO: 413007 - DNA, 25 bp, Homo sapien
gcctcgctgccatcagtatttctac

SEQ ID NO: 413008 - DNA, 25 bp, Homo sapien
ctctggcgcgttatcaggatgtgtc

SEQ ID NO: 413009 - DNA, 25 bp, Homo sapien
gtggttgtctctggcgcgttatcag

SEQ ID NO: 413010 - DNA, 25 bp, Homo sapien
gtctctggcgcgttatcaggatgtg

SEQ ID NO: 413011 - DNA, 25 bp, Homo sapien
ctgtggttgtctctggcgcgttatc

SEQ ID NO: 413012 - DNA, 25 bp, Homo sapien
ttgaaaggctgtctaagcgggtggg

SEQ ID NO: 413013 - DNA, 25 bp, Homo sapien
tcaaagtgggcagagttgaaaggct

SEQ ID NO: 413014 - DNA, 25 bp, Homo sapien
gtttgtcgagctctgttggtccttc

SEQ ID NO: 413015 - DNA, 25 bp, Homo sapien
tctgtttgtcgagctctgttggtcc

SEQ ID NO: 413016 - DNA, 25 bp, Homo sapien
tttgatcttgatgcccctgggtgtg

SEQ ID NO: 413017 - DNA, 25 bp, Homo sapien
tcttgatgcccctgggtgtgtagtg

SEQ ID NO: 413018 - DNA, 25 bp, Homo sapien
tgggtgtgtagtgccagtcctgagc

SEQ ID NO: 413019 - DNA, 25 bp, Homo sapien
cttttgatcttgatgcccctgggtg

SEQ ID NO: 413020 - DNA, 25 bp, Homo sapien
tcttaacagagtgtgcacaactgcc

SEQ ID NO: 413021 - DNA, 25 bp, Homo sapien
acttagccacatgtgttttaagaag

SEQ ID NO: 413022 - DNA, 25 bp, Homo sapien
tcccaggcttactagtctaacttag

SEQ ID NO: 413023 - DNA, 25 bp, Homo sapien
gaagcagcagtaagtaacatccctg

SEQ ID NO: 413024 - DNA, 25 bp, Homo sapien
agaagcagcagtaagtaacatccct

SEQ ID NO: 413025 - DNA, 25 bp, Homo sapien
tagccaaaatgccagagcccttctt

SEQ ID NO: 413026 - DNA, 25 bp, Homo sapien
gtgtacgtgcaagggtgaggaccag

SEQ ID NO: 413027 - DNA, 25 bp, Homo sapien
ttgcccttggtgtacgtgcaagggt

SEQ ID NO: 413028 - DNA, 25 bp, Homo sapien
aagcacttgcgtccattgcccttgg

SEQ ID NO: 413029 - DNA, 25 bp, Homo sapien
gaacacacgcggtgaaacccagtgt

SEQ ID NO: 413030 - DNA, 25 bp, Homo sapien
tgcagacctctgtaagggagctttg

SEQ ID NO: 413031 - DNA, 25 bp, Homo sapien
tatccttaaccttagaagctggcag

SEQ ID NO: 413032 - DNA, 25 bp, Homo sapien
caaacaaaacatgcctccagggcgc

SEQ ID NO: 413033 - DNA, 25 bp, Homo sapien
aaaaaatcctaacaatgccgagcac

SEQ ID NO: 413034 - DNA, 25 bp, Homo sapien
catgtgtgtttttccacgtggccaa

SEQ ID NO: 413035 - DNA, 25 bp, Homo sapien
tacgtaactgttccctggtggccag

SEQ ID NO: 413036 - DNA, 25 bp, Homo sapien
ttacgtaatggcagttctaagcaga

SEQ ID NO: 413037 - DNA, 25 bp, Homo sapien
agcagccctgttcacggaacttcac

SEQ ID NO: 413038 - DNA, 25 bp, Homo sapien
cctggggttctgcaccatcctttgg

SEQ ID NO: 413039 - DNA, 25 bp, Homo sapien
acccacatgcctcgaaccccagcag

SEQ ID NO: 413040 - DNA, 25 bp, Homo sapien
ggaacttcaccctcttgtgttctgg

SEQ ID NO: 413041 - DNA, 25 bp, Homo sapien
gccgagcagccacgccactggagga

SEQ ID NO: 413042 - DNA, 25 bp, Homo sapien
tgtccgccgagcagccacgccactg

SEQ ID NO: 413043 - DNA, 25 bp, Homo sapien
catctccatagccattacgtcccca

SEQ ID NO: 413044 - DNA, 25 bp, Homo sapien
actggaggaagttccggcctctgcc

SEQ ID NO: 413045 - DNA, 25 bp, Homo sapien
caagagggccacgtctttcagatgc

SEQ ID NO: 413046 - DNA, 25 bp, Homo sapien
tcccttggcccattctagaagcgtc

SEQ ID NO: 413047 - DNA, 25 bp, Homo sapien
tgtagttgacattctcctcccctga

SEQ ID NO: 413048 - DNA, 25 bp, Homo sapien
gtcaaacatattagacgcatgcgtc

SEQ ID NO: 413049 - DNA, 25 bp, Homo sapien
tttgagttcctgattctcgcaatac

SEQ ID NO: 413050 - DNA, 25 bp, Homo sapien
gattctcgcaataccttttcccact

SEQ ID NO: 413051 - DNA, 25 bp, Homo sapien
gagttcctgattctcgcaatacctt

SEQ ID NO: 413052 - DNA, 25 bp, Homo sapien
tcctgattctcgcaataccttttcc

SEQ ID NO: 413053 - DNA, 25 bp, Homo sapien
tccaccataggtgttcaactgatat

SEQ ID NO: 413054 - DNA, 25 bp, Homo sapien
cagggcaccgaaaaacaaatcttca

SEQ ID NO: 413055 - DNA, 25 bp, Homo sapien
tatatcagaattttgaccgggtgcg

SEQ ID NO: 413056 - DNA, 25 bp, Homo sapien
tacttgccttctacagtgggcgagg

SEQ ID NO: 413057 - DNA, 25 bp, Homo sapien
tttggtcatcccagatacccgagag

SEQ ID NO: 413058 - DNA, 25 bp, Homo sapien
tgcccagaacaagccaaacactgct

SEQ ID NO: 413059 - DNA, 25 bp, Homo sapien
tcctgaagctgtttggtcatcccag

SEQ ID NO: 413060 - DNA, 25 bp, Homo sapien
gtgaccatgtgaacggcaggagttt

SEQ ID NO: 413061 - DNA, 25 bp, Homo sapien
aaatgtgcaggttggagatctcatc

SEQ ID NO: 413062 - DNA, 25 bp, Homo sapien
tggatgagccaatggaaggaatgtc

SEQ ID NO: 413063 - DNA, 25 bp, Homo sapien
ctgtattgacagctatggatgagcc

SEQ ID NO: 413064 - DNA, 25 bp, Homo sapien
gaaagctgttagctccagatcatga

SEQ ID NO: 413065 - DNA, 25 bp, Homo sapien
gggtccctaatagaaactgcagaga

SEQ ID NO: 413066 - DNA, 25 bp, Homo sapien
gagaccccgtagagcatctaagatg

SEQ ID NO: 413067 - DNA, 25 bp, Homo sapien
taggctgtggtgagagttttgtctt

SEQ ID NO: 413068 - DNA, 25 bp, Homo sapien
tcttatcaaatctagaatggaattc

SEQ ID NO: 413069 - DNA, 25 bp, Homo sapien
tcatttcgacccaaacaggcagtgg

SEQ ID NO: 413070 - DNA, 25 bp, Homo sapien
aaaccacccaaataggcggcaaatg

SEQ ID NO: 413071 - DNA, 25 bp, Homo sapien
ccaaaatcgagaggtttgtcccctg

SEQ ID NO: 413072 - DNA, 25 bp, Homo sapien
ggaggatgtccaagggtccctggtg

SEQ ID NO: 413073 - DNA, 25 bp, Homo sapien
tttgtcccctgatattaaagcacag

SEQ ID NO: 413074 - DNA, 25 bp, Homo sapien
ggcctctgggtgtcttatctggaca

SEQ ID NO: 413075 - DNA, 25 bp, Homo sapien
gagcccctggtggtaatagccatca

SEQ ID NO: 413076 - DNA, 25 bp, Homo sapien
ttcagaaaacagaccccagtgggag

SEQ ID NO: 413077 - DNA, 25 bp, Homo sapien
tattattggttcctgcagacggctc

SEQ ID NO: 413078 - DNA, 25 bp, Homo sapien
taacagtgctgtgggccaggatcaa

SEQ ID NO: 413079 - DNA, 25 bp, Homo sapien
tatgcctattaccaaagagctctct

SEQ ID NO: 413080 - DNA, 25 bp, Homo sapien
tatcttacttcgtcatcactaaccc

SEQ ID NO: 413081 - DNA, 25 bp, Homo sapien
tgaaggccgccagggtaagtatcgt

SEQ ID NO: 413082 - DNA, 25 bp, Homo sapien
tcactaaccctataaacatatgtag

SEQ ID NO: 413083 - DNA, 25 bp, Homo sapien
tgaagggcctatctgcaggatgcag

SEQ ID NO: 413084 - DNA, 25 bp, Homo sapien
tagtaagttgaaatccacataatgt

SEQ ID NO: 413085 - DNA, 25 bp, Homo sapien
cagaccataagggtgaagggcctat

SEQ ID NO: 413086 - DNA, 25 bp, Homo sapien
tctcaatgacgtttagtccatttgc

SEQ ID NO: 413087 - DNA, 25 bp, Homo sapien
cctgtccccatgaacacaaatgctg

SEQ ID NO: 413088 - DNA, 25 bp, Homo sapien
cataacgattttgttctaatcaaag

SEQ ID NO: 413089 - DNA, 25 bp, Homo sapien
ttcacgttaccagttgaagaaagag

SEQ ID NO: 413090 - DNA, 25 bp, Homo sapien
gctgcagatgttcacgttaccagtt

SEQ ID NO: 413091 - DNA, 25 bp, Homo sapien
tcctgtccccctggggctgcagcct

SEQ ID NO: 413092 - DNA, 25 bp, Homo sapien
ctcctgtccccctggggctgcagcc

SEQ ID NO: 413093 - DNA, 25 bp, Homo sapien
tcagtgcacaggctcctgtccccct

SEQ ID NO: 413094 - DNA, 25 bp, Homo sapien
tgtccccctggggctgcagcctcac

SEQ ID NO: 413095 - DNA, 25 bp, Homo sapien
tctgcaccccaggaacattcgagag

SEQ ID NO: 413096 - DNA, 25 bp, Homo sapien
gggtgtgaccaccttggagagccta

SEQ ID NO: 413097 - DNA, 25 bp, Homo sapien
tgagcccatgagcagattcagcagg

SEQ ID NO: 413098 - DNA, 25 bp, Homo sapien
aaagagccacgaccgcaggagttgt

SEQ ID NO: 413099 - DNA, 25 bp, Homo sapien
cagaagtggctcctcgggttggccc

SEQ ID NO: 413100 - DNA, 25 bp, Homo sapien
ggcccgcctcttagggtcagcttgc

SEQ ID NO: 413101 - DNA, 25 bp, Homo sapien
tggctcctcgggttggcccttgctg

SEQ ID NO: 413102 - DNA, 25 bp, Homo sapien
cctgtgcacagacacctaaggcccg

SEQ ID NO: 413103 - DNA, 25 bp, Homo sapien
ggtgcatgtcggggaaagcggaggg

SEQ ID NO: 413104 - DNA, 25 bp, Homo sapien
ttgggtgcatgtcggggaaagcgga

SEQ ID NO: 413105 - DNA, 25 bp, Homo sapien
tgggtgcatgtcggggaaagcggag

SEQ ID NO: 413106 - DNA, 25 bp, Homo sapien
gtgcatgtcggggaaagcggagggg

SEQ ID NO: 413107 - DNA, 25 bp, Homo sapien
tcctgaatccagcacgaggaggtgt

SEQ ID NO: 413108 - DNA, 25 bp, Homo sapien
cacacaggatgcattcacaggggct

SEQ ID NO: 413109 - DNA, 25 bp, Homo sapien
cgttctcgcgctcacaaagacgatc

SEQ ID NO: 413110 - DNA, 25 bp, Homo sapien
gctgccaagacagggcaccacgttc

SEQ ID NO: 413111 - DNA, 25 bp, Homo sapien
ctagtcagcgccagtgtctgcccat

SEQ ID NO: 413112 - DNA, 25 bp, Homo sapien
tagtcagcgccagtgtctgcccatc

SEQ ID NO: 413113 - DNA, 25 bp, Homo sapien
tcctagtcagcgccagtgtctgccc

SEQ ID NO: 413114 - DNA, 25 bp, Homo sapien
gtcagcgccagtgtctgcccatcac

SEQ ID NO: 413115 - DNA, 25 bp, Homo sapien
cagggagctcacaggacgtactatc

SEQ ID NO: 413116 - DNA, 25 bp, Homo sapien
agcggctccccaaatcagtcctctg

SEQ ID NO: 413117 - DNA, 25 bp, Homo sapien
tcaaaagcctcggaaagtcccacac

SEQ ID NO: 413118 - DNA, 25 bp, Homo sapien
cctctggacccctgccagggagctc

SEQ ID NO: 413119 - DNA, 25 bp, Homo sapien
gaacaaacgctgcaccttgcacaca

SEQ ID NO: 413120 - DNA, 25 bp, Homo sapien
cctacaggcattgcgccccagtgag

SEQ ID NO: 413121 - DNA, 25 bp, Homo sapien
ggtcctccccatggaacaaacgctg

SEQ ID NO: 413122 - DNA, 25 bp, Homo sapien
agctttttgccctacaggcattgcg

SEQ ID NO: 413123 - DNA, 25 bp, Homo sapien
ccaccctgagatgttcatcgcctac

SEQ ID NO: 413124 - DNA, 25 bp, Homo sapien
agtgaggagagcacacctggtgatc

SEQ ID NO: 413125 - DNA, 25 bp, Homo sapien
gagagcacacctggtgatcaggatg

SEQ ID NO: 413126 - DNA, 25 bp, Homo sapien
cctgctatgtccagccccaacctgt

SEQ ID NO: 413127 - DNA, 25 bp, Homo sapien
tacctctacatggtaaggacagcac

SEQ ID NO: 413128 - DNA, 25 bp, Homo sapien
aggacagcacaaagtcacctctgaa

SEQ ID NO: 413129 - DNA, 25 bp, Homo sapien
catgatgagggcagcacacctggtt

SEQ ID NO: 413130 - DNA, 25 bp, Homo sapien
tgcccagtgcttgtacattgtgagg

SEQ ID NO: 413131 - DNA, 25 bp, Homo sapien
gtttgagctgcactgtcagtgtaga

SEQ ID NO: 413132 - DNA, 25 bp, Homo sapien
ttgagctgcactgtcagtgtagaaa

SEQ ID NO: 413133 - DNA, 25 bp, Homo sapien
catcgttactaaattgtctctgaaa

SEQ ID NO: 413134 - DNA, 25 bp, Homo sapien
cgttactaaattgtctctgaaagaa

SEQ ID NO: 413135 - DNA, 25 bp, Homo sapien
ataacgtgggccttttcatcaatgg

SEQ ID NO: 413136 - DNA, 25 bp, Homo sapien
catcttcaggatggtagtctacgac

SEQ ID NO: 413137 - DNA, 25 bp, Homo sapien
tccttaaggagatgtacacgacccc

SEQ ID NO: 413138 - DNA, 25 bp, Homo sapien
tacgaccccttataccagttgagac

SEQ ID NO: 413139 - DNA, 25 bp, Homo sapien
tggaggtttggacacacacattcac

SEQ ID NO: 413140 - DNA, 25 bp, Homo sapien
gaggcaattcccaaacccaggtctg

SEQ ID NO: 413141 - DNA, 25 bp, Homo sapien
tcactgcatacgtacaccatggcca

SEQ ID NO: 413142 - DNA, 25 bp, Homo sapien
tggaaagctggtgtcgtggtcatca

SEQ ID NO: 413143 - DNA, 25 bp, Homo sapien
tcacaaccacccttatatgtactca

SEQ ID NO: 413144 - DNA, 25 bp, Homo sapien
gttttctggagtcccgtggtctgtc

SEQ ID NO: 413145 - DNA, 25 bp, Homo sapien
cccagacgtcatttgagtgttttcc

SEQ ID NO: 413146 - DNA, 25 bp, Homo sapien
ggagtcccgtggtctgtctcacaac

SEQ ID NO: 413147 - DNA, 25 bp, Homo sapien
caaaaaatacttggatctcgggtca

SEQ ID NO: 413148 - DNA, 25 bp, Homo sapien
tctctcttggacatacgaaggtgcc

SEQ ID NO: 413149 - DNA, 25 bp, Homo sapien
cgggtcattgttccctgaccatagg

SEQ ID NO: 413150 - DNA, 25 bp, Homo sapien
gaatgcctgcattaaccaagtatat

SEQ ID NO: 413151 - DNA, 25 bp, Homo sapien
cagccaggagcaagacttgaaatcc

SEQ ID NO: 413152 - DNA, 25 bp, Homo sapien
tggaccagccaggagcaagacttga

SEQ ID NO: 413153 - DNA, 25 bp, Homo sapien
gaccagccaggagcaagacttgaaa

SEQ ID NO: 413154 - DNA, 25 bp, Homo sapien
caggagcaagacttgaaatcctctt

SEQ ID NO: 413155 - DNA, 25 bp, Homo sapien
taacaagaggtagattattcttgcc

SEQ ID NO: 413156 - DNA, 25 bp, Homo sapien
cacctctgacagtagtttttaactc

SEQ ID NO: 413157 - DNA, 25 bp, Homo sapien
tatggttgttaatgatgatatgcta

SEQ ID NO: 413158 - DNA, 25 bp, Homo sapien
gaattgtttcgtatcagttatttgt

SEQ ID NO: 413159 - DNA, 25 bp, Homo sapien
tctccatttggtgtatcaatctttc

SEQ ID NO: 413160 - DNA, 25 bp, Homo sapien
cagaagcggatcctatagcttttgc

SEQ ID NO: 413161 - DNA, 25 bp, Homo sapien
ggtgtatcaatctttctattacctg

SEQ ID NO: 413162 - DNA, 25 bp, Homo sapien
gacatacaaacgaacagaagcggat

SEQ ID NO: 413163 - DNA, 25 bp, Homo sapien
tgccctaaagcctggtaacatgatt

SEQ ID NO: 413164 - DNA, 25 bp, Homo sapien
tattatagtgactgttcacccagcc

SEQ ID NO: 413165 - DNA, 25 bp, Homo sapien
cccagtaggacagacacatattttg

SEQ ID NO: 413166 - DNA, 25 bp, Homo sapien
ttggtaaaacattagctctccccgc

SEQ ID NO: 413167 - DNA, 25 bp, Homo sapien
tgtcagtaggatgttcaagcctccc

SEQ ID NO: 413168 - DNA, 25 bp, Homo sapien
caagcctcccactagtattttgtgt

SEQ ID NO: 413169 - DNA, 25 bp, Homo sapien
gaatacattctgtgtgcagacaaga

SEQ ID NO: 413170 - DNA, 25 bp, Homo sapien
agctgtctgagatccagttggtcaa

SEQ ID NO: 413171 - DNA, 25 bp, Homo sapien
tagtcagttggctttgtatccggaa

SEQ ID NO: 413172 - DNA, 25 bp, Homo sapien
tatccggaagttttcagagggctaa

SEQ ID NO: 413173 - DNA, 25 bp, Homo sapien
gaagacgggctcttacttggcagca

SEQ ID NO: 413174 - DNA, 25 bp, Homo sapien
cattgctgggaacctagtgggcctg

SEQ ID NO: 413175 - DNA, 25 bp, Homo sapien
caggaagcagccttagcattcagtt

SEQ ID NO: 413176 - DNA, 25 bp, Homo sapien
tcagttacccgcacggagtttccag

SEQ ID NO: 413177 - DNA, 25 bp, Homo sapien
tttcctcagacaccgctggaggcca

SEQ ID NO: 413178 - DNA, 25 bp, Homo sapien
ttagcattcagttacccgcacggag

SEQ ID NO: 413179 - DNA, 25 bp, Homo sapien
gaccgtctgcctggatgatgtgtgc

SEQ ID NO: 413180 - DNA, 25 bp, Homo sapien
ctgcctggatgatgtgtgcacattt

SEQ ID NO: 413181 - DNA, 25 bp, Homo sapien
ccgtctgcctggatgatgtgtgcac

SEQ ID NO: 413182 - DNA, 25 bp, Homo sapien
cgtctgcctggatgatgtgtgcaca

SEQ ID NO: 413183 - DNA, 25 bp, Homo sapien
cacgattcctctgcacaccaggtcc

SEQ ID NO: 413184 - DNA, 25 bp, Homo sapien
tctgcacaccaggtccagggactgc

SEQ ID NO: 413185 - DNA, 25 bp, Homo sapien
tgcacaccaggtccagggactgccg

SEQ ID NO: 413186 - DNA, 25 bp, Homo sapien
cacaccaggtccagggactgccgcg

SEQ ID NO: 413187 - DNA, 25 bp, Homo sapien
cagtttgtggcacggcacaggttga

SEQ ID NO: 413188 - DNA, 25 bp, Homo sapien
gtggcacggcacaggttgaaaagtt

SEQ ID NO: 413189 - DNA, 25 bp, Homo sapien
cccagtttgtggcacggcacaggtt

SEQ ID NO: 413190 - DNA, 25 bp, Homo sapien
tttgtggcacggcacaggttgaaaa

SEQ ID NO: 413191 - DNA, 25 bp, Homo sapien
tactgtgagcggctttgtgcagcga

SEQ ID NO: 413192 - DNA, 25 bp, Homo sapien
gagcgcgttaacttcagagatgtac

SEQ ID NO: 413193 - DNA, 25 bp, Homo sapien
ccagtgctcagaacgggccttttca

SEQ ID NO: 413194 - DNA, 25 bp, Homo sapien
aatgacctgtttaccgaacagcgcc

SEQ ID NO: 413195 - DNA, 25 bp, Homo sapien
cactgcactcgaccgccctgagctt

SEQ ID NO: 413196 - DNA, 25 bp, Homo sapien
tgcactcgaccgccctgagcttttt

SEQ ID NO: 413197 - DNA, 25 bp, Homo sapien
tagaaagcctcacactgtaacccgg

SEQ ID NO: 413198 - DNA, 25 bp, Homo sapien
aaagcctcacactgtaacccgggct

SEQ ID NO: 413199 - DNA, 25 bp, Homo sapien
cggagctcaggcctaacggagcgat

SEQ ID NO: 413200 - DNA, 25 bp, Homo sapien
gcctaacggagcgatggggtgtggc

SEQ ID NO: 413201 - DNA, 25 bp, Homo sapien
ggcggagctcaggcctaacggagcg

SEQ ID NO: 413202 - DNA, 25 bp, Homo sapien
ctaacggagcgatggggtgtggctg

SEQ ID NO: 413203 - DNA, 25 bp, Homo sapien
accatcagggtaggtcgtgtgtgtc

SEQ ID NO: 413204 - DNA, 25 bp, Homo sapien
caaaccatcagggtaggtcgtgtgt

SEQ ID NO: 413205 - DNA, 25 bp, Homo sapien
cgtgtgtgtcgtctgagcatttgca

SEQ ID NO: 413206 - DNA, 25 bp, Homo sapien
taggtcgtgtgtgtcgtctgagcat

SEQ ID NO: 413207 - DNA, 25 bp, Homo sapien
cctctaagtcggtgggcacggctga

SEQ ID NO: 413208 - DNA, 25 bp, Homo sapien
tgggagaaatgcaccttgcgctggc

SEQ ID NO: 413209 - DNA, 25 bp, Homo sapien
tcagcaccaggaatttggaccatgt

SEQ ID NO: 413210 - DNA, 25 bp, Homo sapien
tgagccccggacagtcagcaccagg

SEQ ID NO: 413211 - DNA, 25 bp, Homo sapien
ggtcagggtggccacagtgacaacc

SEQ ID NO: 413212 - DNA, 25 bp, Homo sapien
ggccacagtgacaaccgccacattc

SEQ ID NO: 413213 - DNA, 25 bp, Homo sapien
agggtggccacagtgacaaccgcca

SEQ ID NO: 413214 - DNA, 25 bp, Homo sapien
ggtggccacagtgacaaccgccaca

SEQ ID NO: 413215 - DNA, 25 bp, Homo sapien
atcacacgtaagttcacagcccaaa

SEQ ID NO: 413216 - DNA, 25 bp, Homo sapien
cacacgtaagttcacagcccaaatt

SEQ ID NO: 413217 - DNA, 25 bp, Homo sapien
tcacacgtaagttcacagcccaaat

SEQ ID NO: 413218 - DNA, 25 bp, Homo sapien
tgaactcatcaggttgaacgtggct

SEQ ID NO: 413219 - DNA, 25 bp, Homo sapien
gaagcagtgaactcatcaggttgaa

SEQ ID NO: 413220 - DNA, 25 bp, Homo sapien
tgtttggggaagaagcagtgaactc

SEQ ID NO: 413221 - DNA, 25 bp, Homo sapien
gttgaacgtggctgagaaatccacc

SEQ ID NO: 413222 - DNA, 25 bp, Homo sapien
taagcaaacgtgtgaacacattctt

SEQ ID NO: 413223 - DNA, 25 bp, Homo sapien
tgcgattgctaaattcaatttaagc

SEQ ID NO: 413224 - DNA, 25 bp, Homo sapien
attcaatttaagcaaacgtgtgaac

SEQ ID NO: 413225 - DNA, 25 bp, Homo sapien
gtatcctaatgcgattgctaaattc

SEQ ID NO: 413226 - DNA, 25 bp, Homo sapien
aacattaattctttaatgaatacac

SEQ ID NO: 413227 - DNA, 25 bp, Homo sapien
tcctgtaaggaacattaattcttta

SEQ ID NO: 413228 - DNA, 25 bp, Homo sapien
tgtaaggaacattaattctttaatg

SEQ ID NO: 413229 - DNA, 25 bp, Homo sapien
ggaacattaattctttaatgaatac

SEQ ID NO: 413230 - DNA, 25 bp, Homo sapien
gtatttctctttcgagtattctgat

SEQ ID NO: 413231 - DNA, 25 bp, Homo sapien
tatttctctttcgagtattctgatg

SEQ ID NO: 413232 - DNA, 25 bp, Homo sapien
tccctgtgacactggcttacgggac

SEQ ID NO: 413233 - DNA, 25 bp, Homo sapien
gaaaagccgaatccctgtgacactg

SEQ ID NO: 413234 - DNA, 25 bp, Homo sapien
acagaagagaaaagccgaatccctg

SEQ ID NO: 413235 - DNA, 25 bp, Homo sapien
gccgaatccctgtgacactggctta

SEQ ID NO: 413236 - DNA, 25 bp, Homo sapien
ggccattgtgaaggagcaccacagg

SEQ ID NO: 413237 - DNA, 25 bp, Homo sapien
ctatgaagggccacgggccattgtg

SEQ ID NO: 413238 - DNA, 25 bp, Homo sapien
tatgaagggccacgggccattgtga

SEQ ID NO: 413239 - DNA, 25 bp, Homo sapien
attgtgaaggagcaccacaggcttc

SEQ ID NO: 413240 - DNA, 25 bp, Homo sapien
caggtgtgtgtgagaggcaaggtcc

SEQ ID NO: 413241 - DNA, 25 bp, Homo sapien
tgcccggcaccagcaagtacactga

SEQ ID NO: 413242 - DNA, 25 bp, Homo sapien
caagtacactgaagtcttgtccggg

SEQ ID NO: 413243 - DNA, 25 bp, Homo sapien
gttgcggagatactagcaggtgtgt

SEQ ID NO: 413244 - DNA, 25 bp, Homo sapien
ttccctgccccacagagaagtgcag

SEQ ID NO: 413245 - DNA, 25 bp, Homo sapien
tgtgagggcacgcagagcctgaggt

SEQ ID NO: 413246 - DNA, 25 bp, Homo sapien
agcctgaggtggtctgaagcagaca

SEQ ID NO: 413247 - DNA, 25 bp, Homo sapien
agcctcacctctacgaagctccctg

SEQ ID NO: 413248 - DNA, 25 bp, Homo sapien
caggaagcccggggggcagactcag

SEQ ID NO: 413249 - DNA, 25 bp, Homo sapien
aggaagcccggggggcagactcagg

SEQ ID NO: 413250 - DNA, 25 bp, Homo sapien
ggaagcccggggggcagactcagga

SEQ ID NO: 413251 - DNA, 25 bp, Homo sapien
ttcggccctgaagggccacgcagac

SEQ ID NO: 413252 - DNA, 25 bp, Homo sapien
aagggccacgcagacctcggccaag

SEQ ID NO: 413253 - DNA, 25 bp, Homo sapien
tcagattcggccctgaagggccacg

SEQ ID NO: 413254 - DNA, 25 bp, Homo sapien
tgaagggccacgcagacctcggcca

SEQ ID NO: 413255 - DNA, 25 bp, Homo sapien
tcatttgctggcagcgacgtgaaga

SEQ ID NO: 413256 - DNA, 25 bp, Homo sapien
taggttcctgcagaggtcgtgaagc

SEQ ID NO: 413257 - DNA, 25 bp, Homo sapien
gaattctttcctgactcaaccaggg

SEQ ID NO: 413258 - DNA, 25 bp, Homo sapien
cgtgagacccgcaatgcaggaagca

SEQ ID NO: 413259 - DNA, 25 bp, Homo sapien
ggtgccagatgagagggcgctccat

SEQ ID NO: 413260 - DNA, 25 bp, Homo sapien
tgggaaagaggccaggaaggtgcca

SEQ ID NO: 413261 - DNA, 25 bp, Homo sapien
ccaggaaggtgccagatgagagggc

SEQ ID NO: 413262 - DNA, 25 bp, Homo sapien
aggaaggtgccagatgagagggcgc

SEQ ID NO: 413263 - DNA, 25 bp, Homo sapien
tgttggcaagtctcacaggtgagga

SEQ ID NO: 413264 - DNA, 25 bp, Homo sapien
tatccacgagaaagccccgcatttc

SEQ ID NO: 413265 - DNA, 25 bp, Homo sapien
tgtgctcagagggaagtgaccgcta

SEQ ID NO: 413266 - DNA, 25 bp, Homo sapien
cccaacgagggaatcagacaaaaag

SEQ ID NO: 413267 - DNA, 25 bp, Homo sapien
ctcctgcagcatggcggcctgggaa

SEQ ID NO: 413268 - DNA, 25 bp, Homo sapien
ttttctgccactcaagttttgcaga

SEQ ID NO: 413269 - DNA, 25 bp, Homo sapien
actcaagttttgcagacttcgggaa

SEQ ID NO: 413270 - DNA, 25 bp, Homo sapien
gacttcgggaagatggatgcatagc

SEQ ID NO: 413271 - DNA, 25 bp, Homo sapien
agcattagagacatgtctgaagaac

SEQ ID NO: 413272 - DNA, 25 bp, Homo sapien
gcattagagacatgtctgaagaact

SEQ ID NO: 413273 - DNA, 25 bp, Homo sapien
tgacacaggtgtccgaggccacctt

SEQ ID NO: 413274 - DNA, 25 bp, Homo sapien
aatctgaattttccaaggggccagt

SEQ ID NO: 413275 - DNA, 25 bp, Homo sapien
tgaattttccaaggggccagtgtag

SEQ ID NO: 413276 - DNA, 25 bp, Homo sapien
ggtgtccgaggccacctttccatct

SEQ ID NO: 413277 - DNA, 25 bp, Homo sapien
tgtcttgacgtctcctggaaagatt

SEQ ID NO: 413278 - DNA, 25 bp, Homo sapien
gttttccacgagctaattctttcta

SEQ ID NO: 413279 - DNA, 25 bp, Homo sapien
gccttccagtaggtgttgctcttct

SEQ ID NO: 413280 - DNA, 25 bp, Homo sapien
gcacagggagttggccttccagtag

SEQ ID NO: 413281 - DNA, 25 bp, Homo sapien
cagcccacgctcttgtgaaatttgg

SEQ ID NO: 413282 - DNA, 25 bp, Homo sapien
cattgccccgcatgcctgtgattaa

SEQ ID NO: 413283 - DNA, 25 bp, Homo sapien
ggacacatgaggtatccacacttag

SEQ ID NO: 413284 - DNA, 25 bp, Homo sapien
caatgatggagcatgagagaagtcc

SEQ ID NO: 413285 - DNA, 25 bp, Homo sapien
gcttcctgagtatgagggtgacaca

SEQ ID NO: 413286 - DNA, 25 bp, Homo sapien
ttgcttcctgagtatgagggtgaca

SEQ ID NO: 413287 - DNA, 25 bp, Homo sapien
tgcttcctgagtatgagggtgacac

SEQ ID NO: 413288 - DNA, 25 bp, Homo sapien
tttgcttcctgagtatgagggtgac

SEQ ID NO: 413289 - DNA, 25 bp, Homo sapien
cgcacggaagtatagcatgtggagt

SEQ ID NO: 413290 - DNA, 25 bp, Homo sapien
gaaaaatgtgatagagactgccgag

SEQ ID NO: 413291 - DNA, 25 bp, Homo sapien
tgtgatagagactgccgagaccagc

SEQ ID NO: 413292 - DNA, 25 bp, Homo sapien
gaggaattaaagacatacgcacgga

SEQ ID NO: 413293 - DNA, 25 bp, Homo sapien
ttacagatgataagcacaaagggtc

SEQ ID NO: 413294 - DNA, 25 bp, Homo sapien
acagatgataagcacaaagggtcac

SEQ ID NO: 413295 - DNA, 25 bp, Homo sapien
tacagatgataagcacaaagggtca

SEQ ID NO: 413296 - DNA, 25 bp, Homo sapien
gagctgaattgttagatgacgatct

SEQ ID NO: 413297 - DNA, 25 bp, Homo sapien
gaggagctgaattgttagatgacga

SEQ ID NO: 413298 - DNA, 25 bp, Homo sapien
attgttagatgacgatctttgtccc

SEQ ID NO: 413299 - DNA, 25 bp, Homo sapien
ttggaggagctgaattgttagatga

SEQ ID NO: 413300 - DNA, 25 bp, Homo sapien
tgtggagccgatgtttgctttgtgt

SEQ ID NO: 413301 - DNA, 25 bp, Homo sapien
ttgtggagccgatgtttgctttgtg

SEQ ID NO: 413302 - DNA, 25 bp, Homo sapien
tttgtggagccgatgtttgctttgt

SEQ ID NO: 413303 - DNA, 25 bp, Homo sapien
ctttgtggagccgatgtttgctttg

SEQ ID NO: 413304 - DNA, 25 bp, Homo sapien
tctccatggaaacaaagctctcgca

SEQ ID NO: 413305 - DNA, 25 bp, Homo sapien
gaagagtgggaataacttccaagat

SEQ ID NO: 413306 - DNA, 25 bp, Homo sapien
tggaaacaaagctctcgcagagctc

SEQ ID NO: 413307 - DNA, 25 bp, Homo sapien
cgcagagctcccgaagagtgggaat

SEQ ID NO: 413308 - DNA, 25 bp, Homo sapien
cataacgcaaacggtacaaaaacat

SEQ ID NO: 413309 - DNA, 25 bp, Homo sapien
ccaagctcttggtggagtctgatga

SEQ ID NO: 413310 - DNA, 25 bp, Homo sapien
tcaaagcatctatatgactccggag

SEQ ID NO: 413311 - DNA, 25 bp, Homo sapien
ggggacgctgcagatttcttcctgg

SEQ ID NO: 413312 - DNA, 25 bp, Homo sapien
gcttttctcggagctccatgttctg

SEQ ID NO: 413313 - DNA, 25 bp, Homo sapien
tccgtgagaacctcggctgccacag

SEQ ID NO: 413314 - DNA, 25 bp, Homo sapien
tggcctcgagttgacctgccagcat

SEQ ID NO: 413315 - DNA, 25 bp, Homo sapien
gggtccctggcctcgagttgacctg

SEQ ID NO: 413316 - DNA, 25 bp, Homo sapien
tccccagtgttgcagtcctccgtga

SEQ ID NO: 413317 - DNA, 25 bp, Homo sapien
aaactaagggtgagcaggacccgca

SEQ ID NO: 413318 - DNA, 25 bp, Homo sapien
tcccaggcccgaagctgaccaggtg

SEQ ID NO: 413319 - DNA, 25 bp, Homo sapien
ccctcctaccccgtcagtgtgggct

SEQ ID NO: 413320 - DNA, 25 bp, Homo sapien
gggacacttgaatgcagccctccta

SEQ ID NO: 413321 - DNA, 25 bp, Homo sapien
cccgcggagactgggaatgtttctg

SEQ ID NO: 413322 - DNA, 25 bp, Homo sapien
agactgggaatgtttctgcggaagt

SEQ ID NO: 413323 - DNA, 25 bp, Homo sapien
cttccccgcggagactgggaatgtt

SEQ ID NO: 413324 - DNA, 25 bp, Homo sapien
aatgtttctgcggaagtgggctggg

SEQ ID NO: 413325 - DNA, 25 bp, Homo sapien
cactactgccaggatcagatcatct

SEQ ID NO: 413326 - DNA, 25 bp, Homo sapien
agtcactactgccaggatcagatca

SEQ ID NO: 413327 - DNA, 25 bp, Homo sapien
ctggtccccaacagtcactactgcc

SEQ ID NO: 413328 - DNA, 25 bp, Homo sapien
tactgccaggatcagatcatctggg

SEQ ID NO: 413329 - DNA, 25 bp, Homo sapien
gagcctgcttgggacgtgtgtcact

SEQ ID NO: 413330 - DNA, 25 bp, Homo sapien
cgtgtgtcacttggatagttctgca

SEQ ID NO: 413331 - DNA, 25 bp, Homo sapien
taggcagtaaatgccgacgtcatga

SEQ ID NO: 413332 - DNA, 25 bp, Homo sapien
gcgattcgcatgcaataggcagtaa

SEQ ID NO: 413333 - DNA, 25 bp, Homo sapien
tcttctagagccttgcacacaatgc

SEQ ID NO: 413334 - DNA, 25 bp, Homo sapien
caaagacgtggctgaaaggatatgc

SEQ ID NO: 413335 - DNA, 25 bp, Homo sapien
tactgtgcttatggagccacattgc

SEQ ID NO: 413336 - DNA, 25 bp, Homo sapien
gaggacaaagaacgaccacctggaa

SEQ ID NO: 413337 - DNA, 25 bp, Homo sapien
cagagcagttgccaaggaacgaggt

SEQ ID NO: 413338 - DNA, 25 bp, Homo sapien
gaagggaatttagtgagctcagacc

SEQ ID NO: 413339 - DNA, 25 bp, Homo sapien
gctactgtgctccaagtatgtggca

SEQ ID NO: 413340 - DNA, 25 bp, Homo sapien
ttgatggcacactctttgcagagca

SEQ ID NO: 413341 - DNA, 25 bp, Homo sapien
ccttttgatattgactcaaacaggg

SEQ ID NO: 413342 - DNA, 25 bp, Homo sapien
caccgtgcatacagcagacacttgg

SEQ ID NO: 413343 - DNA, 25 bp, Homo sapien
catacagcagacacttggtttcctt

SEQ ID NO: 413344 - DNA, 25 bp, Homo sapien
tagatgggcaccgtgcatacagcag

SEQ ID NO: 413345 - DNA, 25 bp, Homo sapien
aagagtattcctactgcaggctcag

SEQ ID NO: 413346 - DNA, 25 bp, Homo sapien
tatacactgacaaagacaggatgct

SEQ ID NO: 413347 - DNA, 25 bp, Homo sapien
cacaagatgcagtcagctacaaagc

SEQ ID NO: 413348 - DNA, 25 bp, Homo sapien
cgccgtcacagatggcttgcaaata

SEQ ID NO: 413349 - DNA, 25 bp, Homo sapien
aagatgccccgcgtccttcactttc

SEQ ID NO: 413350 - DNA, 25 bp, Homo sapien
gtggggagcgcaggcaccaaggcag

SEQ ID NO: 413351 - DNA, 25 bp, Homo sapien
tcagtgtgagcacaccaagttccct

SEQ ID NO: 413352 - DNA, 25 bp, Homo sapien
ggatggtggggagcgcaggcaccaa

SEQ ID NO: 413353 - DNA, 25 bp, Homo sapien
aatcagaccccgcatccatagggag

SEQ ID NO: 413354 - DNA, 25 bp, Homo sapien
taaccaggagaacaggaccctaggc

SEQ ID NO: 413355 - DNA, 25 bp, Homo sapien
gagaaatcatcaccctctaccggga

SEQ ID NO: 413356 - DNA, 25 bp, Homo sapien
tgcgtacgaagctggcctagaatca

SEQ ID NO: 413357 - DNA, 25 bp, Homo sapien
ccgcagcagggttaaagaaggctac

SEQ ID NO: 413358 - DNA, 25 bp, Homo sapien
caggcaacgcctggctacagttaga

SEQ ID NO: 413359 - DNA, 25 bp, Homo sapien
tcccagaatacaaggccagagaggc

SEQ ID NO: 413360 - DNA, 25 bp, Homo sapien
ggttgtagctttcgctcccagaata

SEQ ID NO: 413361 - DNA, 25 bp, Homo sapien
tttatcaaagaaaaccatgacatac

SEQ ID NO: 413362 - DNA, 25 bp, Homo sapien
tagtattttatcaaagaaaaccatg

SEQ ID NO: 413363 - DNA, 25 bp, Homo sapien
tcctgaaacaaaaacgatttacaca

SEQ ID NO: 413364 - DNA, 25 bp, Homo sapien
catgacatactaaatagtcctgaaa

SEQ ID NO: 413365 - DNA, 25 bp, Homo sapien
ttaaattataattgcctaggagaaa

SEQ ID NO: 413366 - DNA, 25 bp, Homo sapien
aggagaaaggtgagctaatctcttt

SEQ ID NO: 413367 - DNA, 25 bp, Homo sapien
gttctaaaaccttgaataactgcta

SEQ ID NO: 413368 - DNA, 25 bp, Homo sapien
aggtgagctaatctctttggaagtg

SEQ ID NO: 413369 - DNA, 25 bp, Homo sapien
tttcaaagcagtgttatccgcccat

SEQ ID NO: 413370 - DNA, 25 bp, Homo sapien
gttatccgcccatggtgagtttaaa

SEQ ID NO: 413371 - DNA, 25 bp, Homo sapien
atggtgagtttaaataggcatcatc

SEQ ID NO: 413372 - DNA, 25 bp, Homo sapien
aagcagtgttatccgcccatggtga

SEQ ID NO: 413373 - DNA, 25 bp, Homo sapien
acagaagctctagaaagacccctcc

SEQ ID NO: 413374 - DNA, 25 bp, Homo sapien
tgccctctaggagcaggatactgcc

SEQ ID NO: 413375 - DNA, 25 bp, Homo sapien
ggacacctggcaggaccccgacaga

SEQ ID NO: 413376 - DNA, 25 bp, Homo sapien
taagtatgttttattcaggcaggca

SEQ ID NO: 413377 - DNA, 25 bp, Homo sapien
actgctaataataggctctcgggct

SEQ ID NO: 413378 - DNA, 25 bp, Homo sapien
tctgctcctcactgctaataatagg

SEQ ID NO: 413379 - DNA, 25 bp, Homo sapien
cctcactgctaataataggctctcg

SEQ ID NO: 413380 - DNA, 25 bp, Homo sapien
tcttctgtgatagtacagcatcagc

SEQ ID NO: 413381 - DNA, 25 bp, Homo sapien
gagccctggactctcactgtgtgga

SEQ ID NO: 413382 - DNA, 25 bp, Homo sapien
ggtgttcttagagtgacaatcctga

SEQ ID NO: 413383 - DNA, 25 bp, Homo sapien
gatcacccgaagtgaagcatcaagg

SEQ ID NO: 413384 - DNA, 25 bp, Homo sapien
aatgttttacgattgcctttgccgg

SEQ ID NO: 413385 - DNA, 25 bp, Homo sapien
gatgctcagagccacggactctgga

SEQ ID NO: 413386 - DNA, 25 bp, Homo sapien
tacataaggtggagggccccatttc

SEQ ID NO: 413387 - DNA, 25 bp, Homo sapien
tctggatctacataaggtggagggc

SEQ ID NO: 413388 - DNA, 25 bp, Homo sapien
agagccacggactctggatctacat

SEQ ID NO: 413389 - DNA, 25 bp, Homo sapien
gaacatatctgtttacttgcagccc

SEQ ID NO: 413390 - DNA, 25 bp, Homo sapien
tacacgatgtccttcaaaggtctcg

SEQ ID NO: 413391 - DNA, 25 bp, Homo sapien
aaaaagcctgaaatcagtgacgggc

SEQ ID NO: 413392 - DNA, 25 bp, Homo sapien
cctcaggttacagcgctacacgatg

SEQ ID NO: 413393 - DNA, 25 bp, Homo sapien
cctctttaatgacgttgagccctgc

SEQ ID NO: 413394 - DNA, 25 bp, Homo sapien
ttccccacgtagtctgaaagcttct

SEQ ID NO: 413395 - DNA, 25 bp, Homo sapien
tcattcttccccacgtagtctgaaa

SEQ ID NO: 413396 - DNA, 25 bp, Homo sapien
ttgctgaatcttggcgataattttg

SEQ ID NO: 413397 - DNA, 25 bp, Homo sapien
tggggccagtcgtaagaatggcttg

SEQ ID NO: 413398 - DNA, 25 bp, Homo sapien
ggggccagtcgtaagaatggcttga

SEQ ID NO: 413399 - DNA, 25 bp, Homo sapien
ctggggccagtcgtaagaatggctt

SEQ ID NO: 413400 - DNA, 25 bp, Homo sapien
ctgtgttcccgacaagtcttcctta

SEQ ID NO: 413401 - DNA, 25 bp, Homo sapien
cccatggggtaaacaatcatcaccg

SEQ ID NO: 413402 - DNA, 25 bp, Homo sapien
accgcgcctcgaagctggtccaagg

SEQ ID NO: 413403 - DNA, 25 bp, Homo sapien
ccatggtaacacagacaccggcttc

SEQ ID NO: 413404 - DNA, 25 bp, Homo sapien
ctccatggtaacacagacaccggct

SEQ ID NO: 413405 - DNA, 25 bp, Homo sapien
tattataaagcagacggtgagcagc

SEQ ID NO: 413406 - DNA, 25 bp, Homo sapien
agagtgactaccatctatttcaggg

SEQ ID NO: 413407 - DNA, 25 bp, Homo sapien
gcacaccgtggcctgtattataaag

SEQ ID NO: 413408 - DNA, 25 bp, Homo sapien
gaaagccatcgttatctacagtgtg

SEQ ID NO: 413409 - DNA, 25 bp, Homo sapien
tattattgctttggcttcttctata

SEQ ID NO: 413410 - DNA, 25 bp, Homo sapien
ttgcccattccttcgtccaatatca

SEQ ID NO: 413411 - DNA, 25 bp, Homo sapien
cacctccgctgggtacgcatttttc

SEQ ID NO: 413412 - DNA, 25 bp, Homo sapien
tgcccattccttcgtccaatatcat

SEQ ID NO: 413413 - DNA, 25 bp, Homo sapien
cgctgggtacgcatttttcacccca

SEQ ID NO: 413414 - DNA, 25 bp, Homo sapien
ggagaaatatgccatgttcggctaa

SEQ ID NO: 413415 - DNA, 25 bp, Homo sapien
taggagggagaaatatgccatgttc

SEQ ID NO: 413416 - DNA, 25 bp, Homo sapien
cttgcatattaggagggagaaatat

SEQ ID NO: 413417 - DNA, 25 bp, Homo sapien
gagggagaaatatgccatgttcggc

SEQ ID NO: 413418 - DNA, 25 bp, Homo sapien
ccttgagccgcccattatagacccg

SEQ ID NO: 413419 - DNA, 25 bp, Homo sapien
tgagccgcccattatagacccgggc

SEQ ID NO: 413420 - DNA, 25 bp, Homo sapien
tcgtcgccccgcttcacgtgcagca

SEQ ID NO: 413421 - DNA, 25 bp, Homo sapien
cagctcggtactcccaggcgcctgc

SEQ ID NO: 413422 - DNA, 25 bp, Homo sapien
gtactgaggcgttgagaaggccccg

SEQ ID NO: 413423 - DNA, 25 bp, Homo sapien
ctgaggcgttgagaaggccccggct

SEQ ID NO: 413424 - DNA, 25 bp, Homo sapien
actgaggcgttgagaaggccccggc

SEQ ID NO: 413425 - DNA, 25 bp, Homo sapien
tactgaggcgttgagaaggccccgg

SEQ ID NO: 413426 - DNA, 25 bp, Homo sapien
cgctcccggaagtggatgttgccaa

SEQ ID NO: 413427 - DNA, 25 bp, Homo sapien
gaaatacggcgggaaccacaatcgc

SEQ ID NO: 413428 - DNA, 25 bp, Homo sapien
agctgattctgagcggaccgacgga

SEQ ID NO: 413429 - DNA, 25 bp, Homo sapien
gaagcagagttaaagagccgccagc

SEQ ID NO: 413430 - DNA, 25 bp, Homo sapien
tcttcgttcaggttgatttggatgg

SEQ ID NO: 413431 - DNA, 25 bp, Homo sapien
ggggtagctccagcggcccctgcca

SEQ ID NO: 413432 - DNA, 25 bp, Homo sapien
atttggatggcgttgctggggtagc

SEQ ID NO: 413433 - DNA, 25 bp, Homo sapien
agcggcccctgccagagcgaccctc

SEQ ID NO: 413434 - DNA, 25 bp, Homo sapien
ctccatcatgcaccacgcagggagg

SEQ ID NO: 413435 - DNA, 25 bp, Homo sapien
gtggacctgttctccgtggtcacgg

SEQ ID NO: 413436 - DNA, 25 bp, Homo sapien
tggacctgttctccgtggtcacggc

SEQ ID NO: 413437 - DNA, 25 bp, Homo sapien
tgagcctccatcatgcaccacgcag

SEQ ID NO: 413438 - DNA, 25 bp, Homo sapien
aggagtcatcagttcggagattggc

SEQ ID NO: 413439 - DNA, 25 bp, Homo sapien
gagtcatcagttcggagattggctt

SEQ ID NO: 413440 - DNA, 25 bp, Homo sapien
tcaaaggagtcatcagttcggagat

SEQ ID NO: 413441 - DNA, 25 bp, Homo sapien
caaaggagtcatcagttcggagatt

SEQ ID NO: 413442 - DNA, 25 bp, Homo sapien
cactgcagctggtcgtcactgggct

SEQ ID NO: 413443 - DNA, 25 bp, Homo sapien
gcactgcagctggtcgtcactgggc

SEQ ID NO: 413444 - DNA, 25 bp, Homo sapien
ctgctcagcatcctggccgtcagcc

SEQ ID NO: 413445 - DNA, 25 bp, Homo sapien
gctcagcatcctggccgtcagccct

SEQ ID NO: 413446 - DNA, 25 bp, Homo sapien
tcagcatcctggccgtcagccctga

SEQ ID NO: 413447 - DNA, 25 bp, Homo sapien
gcatcctggccgtcagccctgactc

SEQ ID NO: 413448 - DNA, 25 bp, Homo sapien
aagatgatcgtggacatccaatctc

SEQ ID NO: 413449 - DNA, 25 bp, Homo sapien
cccaagatgatcgtggacatccaat

SEQ ID NO: 413450 - DNA, 25 bp, Homo sapien
caccacggtccccaagatgatcgtg

SEQ ID NO: 413451 - DNA, 25 bp, Homo sapien
atgatcgtggacatccaatctcaca

SEQ ID NO: 413452 - DNA, 25 bp, Homo sapien
gtcttccctgagaaagcgtgcagtg

SEQ ID NO: 413453 - DNA, 25 bp, Homo sapien
gtgtcgtcttccctgagaaagcgtg

SEQ ID NO: 413454 - DNA, 25 bp, Homo sapien
tcgtcttccctgagaaagcgtgcag

SEQ ID NO: 413455 - DNA, 25 bp, Homo sapien
gatgtgtcgtcttccctgagaaagc

SEQ ID NO: 413456 - DNA, 25 bp, Homo sapien
tgctgtttaagacgctactgctgaa

SEQ ID NO: 413457 - DNA, 25 bp, Homo sapien
gacaaaatccgcagctactttgagg

SEQ ID NO: 413458 - DNA, 25 bp, Homo sapien
taattttcctgataaaggctgggct

SEQ ID NO: 413459 - DNA, 25 bp, Homo sapien
catatgacagcacgtttcacaggat

SEQ ID NO: 413460 - DNA, 25 bp, Homo sapien
gagcgctagaatatccatccacttg

SEQ ID NO: 413461 - DNA, 25 bp, Homo sapien
tcgaacgtacgcagagaagagagta

SEQ ID NO: 413462 - DNA, 25 bp, Homo sapien
tatgggcaacgtatactcgaacgta

SEQ ID NO: 413463 - DNA, 25 bp, Homo sapien
tattcccaattcaaagcactcaggg

SEQ ID NO: 413464 - DNA, 25 bp, Homo sapien
tctttctgtaaagtccagtgtgggt

SEQ ID NO: 413465 - DNA, 25 bp, Homo sapien
tcgtgaaaggatctactggagggct

SEQ ID NO: 413466 - DNA, 25 bp, Homo sapien
aggtcttcttgacggcaacacacag

SEQ ID NO: 413467 - DNA, 25 bp, Homo sapien
tgaagccttagaggccaaggtcgtg

SEQ ID NO: 413468 - DNA, 25 bp, Homo sapien
gactggccctgtagatcaaaactgt

SEQ ID NO: 413469 - DNA, 25 bp, Homo sapien
tgaacttggctgattacccagtaag

SEQ ID NO: 413470 - DNA, 25 bp, Homo sapien
ccttaaagccatcaagtgaagatga

SEQ ID NO: 413471 - DNA, 25 bp, Homo sapien
gaagccctgcttttgttatgaccaa

SEQ ID NO: 413472 - DNA, 25 bp, Homo sapien
gaaaggactgatagtaacgggctct

SEQ ID NO: 413473 - DNA, 25 bp, Homo sapien
cagacttggctctaaatgggtttcc

SEQ ID NO: 413474 - DNA, 25 bp, Homo sapien
tggagaaccatgaagttgcctctga

SEQ ID NO: 413475 - DNA, 25 bp, Homo sapien
ggatttgtcctggtcaagccagtaa

SEQ ID NO: 413476 - DNA, 25 bp, Homo sapien
ggaggcattgttggcatgcaactta

SEQ ID NO: 413477 - DNA, 25 bp, Homo sapien
attgactccgagctggaattggagg

SEQ ID NO: 413478 - DNA, 25 bp, Homo sapien
ttggaggcattgttggcatgcaact

SEQ ID NO: 413479 - DNA, 25 bp, Homo sapien
ggattgactccgagctggaattgga

SEQ ID NO: 413480 - DNA, 25 bp, Homo sapien
aacaggtgacgtttgaacagatagc

SEQ ID NO: 413481 - DNA, 25 bp, Homo sapien
tgagcctttgatacagcaagcagat

SEQ ID NO: 413482 - DNA, 25 bp, Homo sapien
aaacattactttgcgttgcagaagg

SEQ ID NO: 413483 - DNA, 25 bp, Homo sapien
tgcagaaggcaactgaatcaacctc

SEQ ID NO: 413484 - DNA, 25 bp, Homo sapien
gacctcaggcgatcgacccgccatg

SEQ ID NO: 413485 - DNA, 25 bp, Homo sapien
ctcaggcgatcgacccgccatggcc

SEQ ID NO: 413486 - DNA, 25 bp, Homo sapien
tgacctcaggcgatcgacccgccat

SEQ ID NO: 413487 - DNA, 25 bp, Homo sapien
acctcaggcgatcgacccgccatgg

SEQ ID NO: 413488 - DNA, 25 bp, Homo sapien
gcaaagaagactgcggaggaaaagc

SEQ ID NO: 413489 - DNA, 25 bp, Homo sapien
ctcttgcaacctttgagcaggcggg

SEQ ID NO: 413490 - DNA, 25 bp, Homo sapien
gcttcagtggttcaggaaggaaagt

SEQ ID NO: 413491 - DNA, 25 bp, Homo sapien
agctatgggatgacctgcttcgagg

SEQ ID NO: 413492 - DNA, 25 bp, Homo sapien
ccagcagatgcccgcgcgtggctct

SEQ ID NO: 413493 - DNA, 25 bp, Homo sapien
taactccagcacgaggaggaatcgt

SEQ ID NO: 413494 - DNA, 25 bp, Homo sapien
tgataactccagcacgaggaggaat

SEQ ID NO: 413495 - DNA, 25 bp, Homo sapien
gataactccagcacgaggaggaatc

SEQ ID NO: 413496 - DNA, 25 bp, Homo sapien
caagtcctgcttgaggtgaaggctg

SEQ ID NO: 413497 - DNA, 25 bp, Homo sapien
agtcctgcttgaggtgaaggctgac

SEQ ID NO: 413498 - DNA, 25 bp, Homo sapien
cctgcttgaggtgaaggctgactgc

SEQ ID NO: 413499 - DNA, 25 bp, Homo sapien
tcctgcttgaggtgaaggctgactg

SEQ ID NO: 413500 - DNA, 25 bp, Homo sapien
attatctttccttgttgttccaggg

SEQ ID NO: 413501 - DNA, 25 bp, Homo sapien
ctatattatctttccttgttgttcc

SEQ ID NO: 413502 - DNA, 25 bp, Homo sapien
cttgttgttccagggcttttgggtg

SEQ ID NO: 413503 - DNA, 25 bp, Homo sapien
atctttccttgttgttccagggctt

SEQ ID NO: 413504 - DNA, 25 bp, Homo sapien
cacaagaggctcctagtagcaatac

SEQ ID NO: 413505 - DNA, 25 bp, Homo sapien
gggcttcacgctgtagatgtcactg

SEQ ID NO: 413506 - DNA, 25 bp, Homo sapien
tagaactctctcgtgaaccttgaaa

SEQ ID NO: 413507 - DNA, 25 bp, Homo sapien
tgaatggtcacaagatgcggcactg

SEQ ID NO: 413508 - DNA, 25 bp, Homo sapien
tctcctagctaccccaggactggga

SEQ ID NO: 413509 - DNA, 25 bp, Homo sapien
ctctcctagctaccccaggactggg

SEQ ID NO: 413510 - DNA, 25 bp, Homo sapien
tctctcctagctaccccaggactgg

SEQ ID NO: 413511 - DNA, 25 bp, Homo sapien
ctctctcctagctaccccaggactg

SEQ ID NO: 413512 - DNA, 25 bp, Homo sapien
gctattcttatcacacgcagtcatt

SEQ ID NO: 413513 - DNA, 25 bp, Homo sapien
gcagtcattaagatctacacacagg

SEQ ID NO: 413514 - DNA, 25 bp, Homo sapien
ggcttgcctaacttttgacagattc

SEQ ID NO: 413515 - DNA, 25 bp, Homo sapien
aatgatcacttagctgtattcggca

SEQ ID NO: 413516 - DNA, 25 bp, Homo sapien
caaattcctttctagtgggtgcagg

SEQ ID NO: 413517 - DNA, 25 bp, Homo sapien
attcctttctagtgggtgcaggact

SEQ ID NO: 413518 - DNA, 25 bp, Homo sapien
ccaaattcctttctagtgggtgcag

SEQ ID NO: 413519 - DNA, 25 bp, Homo sapien
aattcctttctagtgggtgcaggac

SEQ ID NO: 413520 - DNA, 25 bp, Homo sapien
tgtgggggagccgggcgtgtgggag

SEQ ID NO: 413521 - DNA, 25 bp, Homo sapien
ggctgggcggggtctttctgcggca

SEQ ID NO: 413522 - DNA, 25 bp, Homo sapien
caagggctgggcggggtctttctgc

SEQ ID NO: 413523 - DNA, 25 bp, Homo sapien
cggcggccgcttgggctccaagggc

SEQ ID NO: 413524 - DNA, 25 bp, Homo sapien
cggccgcttgggctccaagggctgg

SEQ ID NO: 413525 - DNA, 25 bp, Homo sapien
gctggctgcgcgtcaataggagaac

SEQ ID NO: 413526 - DNA, 25 bp, Homo sapien
ggcgttgctggctgcgcgtcaatag

SEQ ID NO: 413527 - DNA, 25 bp, Homo sapien
ttgctggctgcgcgtcaataggaga

SEQ ID NO: 413528 - DNA, 25 bp, Homo sapien
cgttgctggctgcgcgtcaatagga

SEQ ID NO: 413529 - DNA, 25 bp, Homo sapien
ctaggtatgaaacttaaacgatgac

SEQ ID NO: 413530 - DNA, 25 bp, Homo sapien
cacaggaagccatacaaaactttca

SEQ ID NO: 413531 - DNA, 25 bp, Homo sapien
tgactctccaacatcaagcacattg

SEQ ID NO: 413532 - DNA, 25 bp, Homo sapien
catcaagcacattggccacaggaag

SEQ ID NO: 413533 - DNA, 25 bp, Homo sapien
agttcttgacggtgctcggcttggt

SEQ ID NO: 413534 - DNA, 25 bp, Homo sapien
cccaggagttcttgacggtgctcgg

SEQ ID NO: 413535 - DNA, 25 bp, Homo sapien
ccaggagttcttgacggtgctcggc

SEQ ID NO: 413536 - DNA, 25 bp, Homo sapien
aggagttcttgacggtgctcggctt

SEQ ID NO: 413537 - DNA, 25 bp, Homo sapien
ggaccctctgatattgtaggtgact

SEQ ID NO: 413538 - DNA, 25 bp, Homo sapien
tattgtaggtgactggcagggacta

SEQ ID NO: 413539 - DNA, 25 bp, Homo sapien
gtacaggaccctctgatattgtagg

SEQ ID NO: 413540 - DNA, 25 bp, Homo sapien
caggaccctctgatattgtaggtga

SEQ ID NO: 413541 - DNA, 25 bp, Homo sapien
ctggagatgctgaggaagaagttcc

SEQ ID NO: 413542 - DNA, 25 bp, Homo sapien
tcagcactatagtcatcaacatcac

SEQ ID NO: 413543 - DNA, 25 bp, Homo sapien
caaggccggaacttgaagatggctg

SEQ ID NO: 413544 - DNA, 25 bp, Homo sapien
tccacttcagcactatagtcatcaa

SEQ ID NO: 413545 - DNA, 25 bp, Homo sapien
tgtctcgtcataatcctattggcca

SEQ ID NO: 413546 - DNA, 25 bp, Homo sapien
tgtttccacatactcaatcccaggt

SEQ ID NO: 413547 - DNA, 25 bp, Homo sapien
tgttacaagacaccactgactactc

SEQ ID NO: 413548 - DNA, 25 bp, Homo sapien
tatccccacttagactgtgcacatg

SEQ ID NO: 413549 - DNA, 25 bp, Homo sapien
tttaaagcaatagttatagtccgat

SEQ ID NO: 413550 - DNA, 25 bp, Homo sapien
gatgatggcaatgcaatgctaattt

SEQ ID NO: 413551 - DNA, 25 bp, Homo sapien
gcaatagttatagtccgattcaata

SEQ ID NO: 413552 - DNA, 25 bp, Homo sapien
ttgatgatggcaatgcaatgctaat

SEQ ID NO: 413553 - DNA, 25 bp, Homo sapien
caaaaatgtaacccacattttatct

SEQ ID NO: 413554 - DNA, 25 bp, Homo sapien
tctttaccatttaggctcagaacat

SEQ ID NO: 413555 - DNA, 25 bp, Homo sapien
ctctttaccatttaggctcagaaca

SEQ ID NO: 413556 - DNA, 25 bp, Homo sapien
taccatagacataacaagctcagtg

SEQ ID NO: 413557 - DNA, 25 bp, Homo sapien
caagaaatgagtctgtgcacctcca

SEQ ID NO: 413558 - DNA, 25 bp, Homo sapien
gatcattaacaagggccacaagagg

SEQ ID NO: 413559 - DNA, 25 bp, Homo sapien
tggtgacctggagagggcactcttc

SEQ ID NO: 413560 - DNA, 25 bp, Homo sapien
catgcacatcattcagtctctcaaa

SEQ ID NO: 413561 - DNA, 25 bp, Homo sapien
aactgctgtatagttggaagagaac

SEQ ID NO: 413562 - DNA, 25 bp, Homo sapien
tctttccctatgaaatccaaacaca

SEQ ID NO: 413563 - DNA, 25 bp, Homo sapien
gctgtatagttggaagagaacattt

SEQ ID NO: 413564 - DNA, 25 bp, Homo sapien
gctcatcaatcaaggcatcatcaaa

SEQ ID NO: 413565 - DNA, 25 bp, Homo sapien
ggtggaccctgaactgcaattactt

SEQ ID NO: 413566 - DNA, 25 bp, Homo sapien
ttgagaccaatactgtaccatctgg

SEQ ID NO: 413567 - DNA, 25 bp, Homo sapien
tctatatcaatcagggcaacgacag

SEQ ID NO: 413568 - DNA, 25 bp, Homo sapien
tgtatttcaaacaaatttcaaacac

SEQ ID NO: 413569 - DNA, 25 bp, Homo sapien
gtgtatttcaaacaaatttcaaaca

SEQ ID NO: 413570 - DNA, 25 bp, Homo sapien
tatttcaaacaaatttcaaacacta

SEQ ID NO: 413571 - DNA, 25 bp, Homo sapien
ttagaaaaactgagactgcttaaac

SEQ ID NO: 413572 - DNA, 25 bp, Homo sapien
ggagtccacgtgtacagaattttgc

SEQ ID NO: 413573 - DNA, 25 bp, Homo sapien
ttcatcttgaaaactagcatttaga

SEQ ID NO: 413574 - DNA, 25 bp, Homo sapien
cttccatagtgcagcaaagtgcctg

SEQ ID NO: 413575 - DNA, 25 bp, Homo sapien
ctagcatttagaagatctagatctt

SEQ ID NO: 413576 - DNA, 25 bp, Homo sapien
cctttcatgagcttcagtggtttga

SEQ ID NO: 413577 - DNA, 25 bp, Homo sapien
cgtgtagagcaaagaggcattctcc

SEQ ID NO: 413578 - DNA, 25 bp, Homo sapien
ctgtataagcaggacagatcgtgta

SEQ ID NO: 413579 - DNA, 25 bp, Homo sapien
gacagatcgtgtagagcaaagaggc

SEQ ID NO: 413580 - DNA, 25 bp, Homo sapien
gaaacacttggtaataggcaggcag

SEQ ID NO: 413581 - DNA, 25 bp, Homo sapien
tgccagaaacacttggtaataggca

SEQ ID NO: 413582 - DNA, 25 bp, Homo sapien
ccagaaacacttggtaataggcagg

SEQ ID NO: 413583 - DNA, 25 bp, Homo sapien
cagaaacacttggtaataggcaggc

SEQ ID NO: 413584 - DNA, 25 bp, Homo sapien
tccttctccaaaggacacggtctgt

SEQ ID NO: 413585 - DNA, 25 bp, Homo sapien
ctgatctatcaaaaggccatttcct

SEQ ID NO: 413586 - DNA, 25 bp, Homo sapien
aaaggacacggtctgtccaggcagg

SEQ ID NO: 413587 - DNA, 25 bp, Homo sapien
tctccaaaggacacggtctgtccag

SEQ ID NO: 413588 - DNA, 25 bp, Homo sapien
tagtcgtcagaaaacaagtcatact

SEQ ID NO: 413589 - DNA, 25 bp, Homo sapien
tcatagtcgtcagaaaacaagtcat

SEQ ID NO: 413590 - DNA, 25 bp, Homo sapien
acttatatgtcggagcaaaggttac

SEQ ID NO: 413591 - DNA, 25 bp, Homo sapien
aagtcatacttatatgtcggagcaa

SEQ ID NO: 413592 - DNA, 25 bp, Homo sapien
gattcgatagttgaaatcaccacac

SEQ ID NO: 413593 - DNA, 25 bp, Homo sapien
gatctcctgctataagagaatccca

SEQ ID NO: 413594 - DNA, 25 bp, Homo sapien
tctgattgataagttgatctcctgc

SEQ ID NO: 413595 - DNA, 25 bp, Homo sapien
taacttcttcgttagggagatcgat

SEQ ID NO: 413596 - DNA, 25 bp, Homo sapien
tatcttcaagaacaagcagcaagag

SEQ ID NO: 413597 - DNA, 25 bp, Homo sapien
tcaagaacaagcagcaagagcttac

SEQ ID NO: 413598 - DNA, 25 bp, Homo sapien
gctttatcttcaagaacaagcagca

SEQ ID NO: 413599 - DNA, 25 bp, Homo sapien
tcttcaagaacaagcagcaagagct

SEQ ID NO: 413600 - DNA, 25 bp, Homo sapien
cataggaaaactcaattttcgtgct

SEQ ID NO: 413601 - DNA, 25 bp, Homo sapien
caaaggctggttgtatggaagagca

SEQ ID NO: 413602 - DNA, 25 bp, Homo sapien
cattcggattgcaactgctccctta

SEQ ID NO: 413603 - DNA, 25 bp, Homo sapien
cagcaaagtggctacagacgaagca

SEQ ID NO: 413604 - DNA, 25 bp, Homo sapien
aaacaaagaattctaaatcgcagat

SEQ ID NO: 413605 - DNA, 25 bp, Homo sapien
ccatgtgcataggaaatgaggaata

SEQ ID NO: 413606 - DNA, 25 bp, Homo sapien
agagttccatgtgcataggaaatga

SEQ ID NO: 413607 - DNA, 25 bp, Homo sapien
taaatcgcagatttgaaatttcaag

SEQ ID NO: 413608 - DNA, 25 bp, Homo sapien
agcagcacatacttgttgtctctgg

SEQ ID NO: 413609 - DNA, 25 bp, Homo sapien
gataaaaggagcatgctgtggtctg

SEQ ID NO: 413610 - DNA, 25 bp, Homo sapien
ctgttcagaagccagcagcacatac

SEQ ID NO: 413611 - DNA, 25 bp, Homo sapien
ctgataaaaggagcatgctgtggtc

SEQ ID NO: 413612 - DNA, 25 bp, Homo sapien
atatatcagttggcttacttctttt

SEQ ID NO: 413613 - DNA, 25 bp, Homo sapien
aaatatatcagttggcttacttctt

SEQ ID NO: 413614 - DNA, 25 bp, Homo sapien
gcaaatatatcagttggcttacttc

SEQ ID NO: 413615 - DNA, 25 bp, Homo sapien
caaatatatcagttggcttacttct

SEQ ID NO: 413616 - DNA, 25 bp, Homo sapien
taacttgggtgcatcaagaagccag

SEQ ID NO: 413617 - DNA, 25 bp, Homo sapien
cattcacattccaggttccgacaca

SEQ ID NO: 413618 - DNA, 25 bp, Homo sapien
tatgctgcgaaattgcttcccacca

SEQ ID NO: 413619 - DNA, 25 bp, Homo sapien
gacacatactcgaattttcttaggc

SEQ ID NO: 413620 - DNA, 25 bp, Homo sapien
cattggtagctaaccggtaacagga

SEQ ID NO: 413621 - DNA, 25 bp, Homo sapien
gaaagcagattacttgtctggcctg

SEQ ID NO: 413622 - DNA, 25 bp, Homo sapien
gatatgcagatttctcaccacctag

SEQ ID NO: 413623 - DNA, 25 bp, Homo sapien
taattcaaagctgactgtacctaga

SEQ ID NO: 413624 - DNA, 25 bp, Homo sapien
tgtttacaatatcgacttcagaaaa

SEQ ID NO: 413625 - DNA, 25 bp, Homo sapien
gaaagtttccaattatatggcttta

SEQ ID NO: 413626 - DNA, 25 bp, Homo sapien
aatgagaaagtttccaattatatgg

SEQ ID NO: 413627 - DNA, 25 bp, Homo sapien
tatttgtttacaatatcgacttcag

SEQ ID NO: 413628 - DNA, 25 bp, Homo sapien
gaatcattagtaaaaacaagttaca

SEQ ID NO: 413629 - DNA, 25 bp, Homo sapien
ttgagtatagtgacaaaacattttg

SEQ ID NO: 413630 - DNA, 25 bp, Homo sapien
ctatggatgcaacaagaagaaaaca

SEQ ID NO: 413631 - DNA, 25 bp, Homo sapien
aacaagttacaattaaaatgttgag

SEQ ID NO: 413632 - DNA, 25 bp, Homo sapien
gaattgttcgggtaacagagcgagc

SEQ ID NO: 413633 - DNA, 25 bp, Homo sapien
tccagtagttaaaagtgctcgagct

SEQ ID NO: 413634 - DNA, 25 bp, Homo sapien
cttggagctgtcaaagaagttattc

SEQ ID NO: 413635 - DNA, 25 bp, Homo sapien
cagtagcaaaacatcaatggcctct

SEQ ID NO: 413636 - DNA, 25 bp, Homo sapien
gaatcaccattcacggaccacattg

SEQ ID NO: 413637 - DNA, 25 bp, Homo sapien
ccagttcctgcatatatcttactga

SEQ ID NO: 413638 - DNA, 25 bp, Homo sapien
ccacattgaccgaaaaacttcttga

SEQ ID NO: 413639 - DNA, 25 bp, Homo sapien
ttcgctttcccttcaagagctccag

SEQ ID NO: 413640 - DNA, 25 bp, Homo sapien
caagaaatgcctgcacactatttgt

SEQ ID NO: 413641 - DNA, 25 bp, Homo sapien
ccaagcagtttgttcgaactgtacc

SEQ ID NO: 413642 - DNA, 25 bp, Homo sapien
gttctatcaagacaatccaagcagt

SEQ ID NO: 413643 - DNA, 25 bp, Homo sapien
tgttcgaactgtaccactctggcat

SEQ ID NO: 413644 - DNA, 25 bp, Homo sapien
caataaagttaaatatccagtttgg

SEQ ID NO: 413645 - DNA, 25 bp, Homo sapien
ccaataaagttaaatatccagtttg

SEQ ID NO: 413646 - DNA, 25 bp, Homo sapien
tgtaaccaataaagttaaatatcca

SEQ ID NO: 413647 - DNA, 25 bp, Homo sapien
acatccatatacccaccatttaaat

SEQ ID NO: 413648 - DNA, 25 bp, Homo sapien
tgaacatccatatacccaccattta

SEQ ID NO: 413649 - DNA, 25 bp, Homo sapien
gaacatccatatacccaccatttaa

SEQ ID NO: 413650 - DNA, 25 bp, Homo sapien
tgtgaacatccatatacccaccatt

SEQ ID NO: 413651 - DNA, 25 bp, Homo sapien
tctggacttgaggtttaagaacact

SEQ ID NO: 413652 - DNA, 25 bp, Homo sapien
tgcctttcctcccttaaccatttga

SEQ ID NO: 413653 - DNA, 25 bp, Homo sapien
taagaacactatgtaatttttctgc

SEQ ID NO: 413654 - DNA, 25 bp, Homo sapien
gatgatagtcaaaattcaccatctg

SEQ ID NO: 413655 - DNA, 25 bp, Homo sapien
taagtttataatcttatgtaacaac

SEQ ID NO: 413656 - DNA, 25 bp, Homo sapien
tttaagtttataatcttatgtaaca

SEQ ID NO: 413657 - DNA, 25 bp, Homo sapien
tataatcttatgtaacaacataatt

SEQ ID NO: 413658 - DNA, 25 bp, Homo sapien
agtttataatcttatgtaacaacat

SEQ ID NO: 413659 - DNA, 25 bp, Homo sapien
tttacttagcatatgttcaccttcc

SEQ ID NO: 413660 - DNA, 25 bp, Homo sapien
agcatatgttcaccttccttagatc

SEQ ID NO: 413661 - DNA, 25 bp, Homo sapien
aagctttacttagcatatgttcacc

SEQ ID NO: 413662 - DNA, 25 bp, Homo sapien
cttagcatatgttcaccttccttag

SEQ ID NO: 413663 - DNA, 25 bp, Homo sapien
caaatccccttgacatacggacacg

SEQ ID NO: 413664 - DNA, 25 bp, Homo sapien
tccccttgacatacggacacgatga

SEQ ID NO: 413665 - DNA, 25 bp, Homo sapien
ccttgacatacggacacgatgagat

SEQ ID NO: 413666 - DNA, 25 bp, Homo sapien
acatacggacacgatgagatcccac

SEQ ID NO: 413667 - DNA, 25 bp, Homo sapien
aagaaactgagtcatctaagtacac

SEQ ID NO: 413668 - DNA, 25 bp, Homo sapien
gaaactgagtcatctaagtacacaa

SEQ ID NO: 413669 - DNA, 25 bp, Homo sapien
ggaacagatcctcggatttgtatga

SEQ ID NO: 413670 - DNA, 25 bp, Homo sapien
ctggttgctcccagaacaatggaac

SEQ ID NO: 413671 - DNA, 25 bp, Homo sapien
cacgccatagtgtttgagatgcaaa

SEQ ID NO: 413672 - DNA, 25 bp, Homo sapien
gcaagccttcgcctgtttatgagca

SEQ ID NO: 413673 - DNA, 25 bp, Homo sapien
ggacattaaacctggtcccagctcg

SEQ ID NO: 413674 - DNA, 25 bp, Homo sapien
taatcttgaaatgaggcaagccttc

SEQ ID NO: 413675 - DNA, 25 bp, Homo sapien
cattctctgtagctacttgctgctg

SEQ ID NO: 413676 - DNA, 25 bp, Homo sapien
gatgaggtagaggtcattctctgta

SEQ ID NO: 413677 - DNA, 25 bp, Homo sapien
attgctccctcaaggcgttgggacc

SEQ ID NO: 413678 - DNA, 25 bp, Homo sapien
tccctcaaggcgttgggacccagaa

SEQ ID NO: 413679 - DNA, 25 bp, Homo sapien
taaactgatgccagatgcagaccat

SEQ ID NO: 413680 - DNA, 25 bp, Homo sapien
gaatcgattcgcagtgatataaact

SEQ ID NO: 413681 - DNA, 25 bp, Homo sapien
tctgaaatgcgatcctcatctgaag

SEQ ID NO: 413682 - DNA, 25 bp, Homo sapien
gctacgatgcgcattaagactcaaa

SEQ ID NO: 413683 - DNA, 25 bp, Homo sapien
accagataatgtaacatagtatcac

SEQ ID NO: 413684 - DNA, 25 bp, Homo sapien
ggaccagataatgtaacatagtatc

SEQ ID NO: 413685 - DNA, 25 bp, Homo sapien
ctaggaccagataatgtaacatagt

SEQ ID NO: 413686 - DNA, 25 bp, Homo sapien
taggaccagataatgtaacatagta

SEQ ID NO: 413687 - DNA, 25 bp, Homo sapien
taaccgcagaacacctaagagtcca

SEQ ID NO: 413688 - DNA, 25 bp, Homo sapien
aagatttaaccgcagaacacctaag

SEQ ID NO: 413689 - DNA, 25 bp, Homo sapien
gtatgtacccttgattgcctctttt

SEQ ID NO: 413690 - DNA, 25 bp, Homo sapien
tccatatgcatccagtactttggag

SEQ ID NO: 413691 - DNA, 25 bp, Homo sapien
atttgataccagctctttattagaa

SEQ ID NO: 413692 - DNA, 25 bp, Homo sapien
ttcagtagctatgaaatgcaaccca

SEQ ID NO: 413693 - DNA, 25 bp, Homo sapien
gcaacccaatgtgaatgcatgtgct

SEQ ID NO: 413694 - DNA, 25 bp, Homo sapien
tgtgctcacatacgtaacactactg

SEQ ID NO: 413695 - DNA, 25 bp, Homo sapien
agttggcccagaattatccaggaat

SEQ ID NO: 413696 - DNA, 25 bp, Homo sapien
gacagccccagactcgaacatgaga

SEQ ID NO: 413697 - DNA, 25 bp, Homo sapien
ccaatttgtgatagatccggaatcc

SEQ ID NO: 413698 - DNA, 25 bp, Homo sapien
tttccactatgaggctgaaaggtgg

SEQ ID NO: 413699 - DNA, 25 bp, Homo sapien
gatccggaatcctttactgaacgcc

SEQ ID NO: 413700 - DNA, 25 bp, Homo sapien
cgctcccgctgacgctgcggaggca

SEQ ID NO: 413701 - DNA, 25 bp, Homo sapien
ccgcccggctgcccgtgggtctggc

SEQ ID NO: 413702 - DNA, 25 bp, Homo sapien
tggtcttggaggcgtccgcccgccc

SEQ ID NO: 413703 - DNA, 25 bp, Homo sapien
tatacgatggagagtgggacgtcac

SEQ ID NO: 413704 - DNA, 25 bp, Homo sapien
aaacggcaccgagttcctagtctga

SEQ ID NO: 413705 - DNA, 25 bp, Homo sapien
gctcacagggttctatcgaagagtg

SEQ ID NO: 413706 - DNA, 25 bp, Homo sapien
gaagaaaaactaatgcctgctctgg

SEQ ID NO: 413707 - DNA, 25 bp, Homo sapien
tgaaaccaaacttgcttactccaaa

SEQ ID NO: 413708 - DNA, 25 bp, Homo sapien
gtgtctgtaaggctacactagaaat

SEQ ID NO: 413709 - DNA, 25 bp, Homo sapien
tgtaaggctacactagaaatgcttc

SEQ ID NO: 413710 - DNA, 25 bp, Homo sapien
tgcttactccaaagcccaaaatcct

SEQ ID NO: 413711 - DNA, 25 bp, Homo sapien
tagaagaccatggatattaaattgc

SEQ ID NO: 413712 - DNA, 25 bp, Homo sapien
catgaatgagacaggacggtcagcc

SEQ ID NO: 413713 - DNA, 25 bp, Homo sapien
tgtggctaatcagcaaggcgtattc

SEQ ID NO: 413714 - DNA, 25 bp, Homo sapien
aattcaaatgcatgtatctgcaagc

SEQ ID NO: 413715 - DNA, 25 bp, Homo sapien
gactctaacgctgattcaaggaaga

SEQ ID NO: 413716 - DNA, 25 bp, Homo sapien
caatgttaaggcagcacagctacag

SEQ ID NO: 413717 - DNA, 25 bp, Homo sapien
tacactgcacacatcgtttacaggg

SEQ ID NO: 413718 - DNA, 25 bp, Homo sapien
gaacatttagtcacttgccagccct

SEQ ID NO: 413719 - DNA, 25 bp, Homo sapien
gcaacagacatagcatgatccaaag

SEQ ID NO: 413720 - DNA, 25 bp, Homo sapien
ttcacattgtggtcacttgcaacag

SEQ ID NO: 413721 - DNA, 25 bp, Homo sapien
gatccaaagctcgaacacttgcaag

SEQ ID NO: 413722 - DNA, 25 bp, Homo sapien
tcgaacacttgcaaggagttttact

SEQ ID NO: 413723 - DNA, 25 bp, Homo sapien
tgcaatcaatttttccaagcacaca

SEQ ID NO: 413724 - DNA, 25 bp, Homo sapien
tggctattttagagcttctgcaatc

SEQ ID NO: 413725 - DNA, 25 bp, Homo sapien
ctgcaatcaatttttccaagcacac

SEQ ID NO: 413726 - DNA, 25 bp, Homo sapien
tttcatggctattttagagcttctg

SEQ ID NO: 413727 - DNA, 25 bp, Homo sapien
ggctgttttagcgtatacctggaac

SEQ ID NO: 413728 - DNA, 25 bp, Homo sapien
gtctcttcatcaccaatctgtcaag

SEQ ID NO: 413729 - DNA, 25 bp, Homo sapien
tacctggaacacaaatcgttatttg

SEQ ID NO: 413730 - DNA, 25 bp, Homo sapien
tttaaatgactagcccagagacagg

SEQ ID NO: 413731 - DNA, 25 bp, Homo sapien
ttctataaattgtatccgctaagtg

SEQ ID NO: 413732 - DNA, 25 bp, Homo sapien
gaacacccgatactatttctataaa

SEQ ID NO: 413733 - DNA, 25 bp, Homo sapien
ttttccacatcagaacacccgatac

SEQ ID NO: 413734 - DNA, 25 bp, Homo sapien
agtgtacaaggtatcggcaaaagtt

SEQ ID NO: 413735 - DNA, 25 bp, Homo sapien
ttttgatgctgtcatctccatattc

SEQ ID NO: 413736 - DNA, 25 bp, Homo sapien
catctattgataactcttgcagagt

SEQ ID NO: 413737 - DNA, 25 bp, Homo sapien
aatgccataccactgaagaaaattg

SEQ ID NO: 413738 - DNA, 25 bp, Homo sapien
tgagaaaatgccataccactgaaga

SEQ ID NO: 413739 - DNA, 25 bp, Homo sapien
tacagcagaccatgtcttgccaaag

SEQ ID NO: 413740 - DNA, 25 bp, Homo sapien
tcattgcagacagtactatcaggga

SEQ ID NO: 413741 - DNA, 25 bp, Homo sapien
agctagtggctacagcactggtcag

SEQ ID NO: 413742 - DNA, 25 bp, Homo sapien
taattagtcaaaatcgaaacagcca

SEQ ID NO: 413743 - DNA, 25 bp, Homo sapien
tatagacaatggaggccttagggca

SEQ ID NO: 413744 - DNA, 25 bp, Homo sapien
aaacagcgtgtacctcattgagcca

SEQ ID NO: 413745 - DNA, 25 bp, Homo sapien
ttatgagcaagagcactgagtagcc

SEQ ID NO: 413746 - DNA, 25 bp, Homo sapien
ggcattaggtattaagtctcccaca

SEQ ID NO: 413747 - DNA, 25 bp, Homo sapien
taggtttaacgaaatatgtacaggc

SEQ ID NO: 413748 - DNA, 25 bp, Homo sapien
gagaaattgtctactatgtttaggt

SEQ ID NO: 413749 - DNA, 25 bp, Homo sapien
aggagaaattgtctactatgtttag

SEQ ID NO: 413750 - DNA, 25 bp, Homo sapien
gaaatatgtacaggcatgcagaaac

SEQ ID NO: 413751 - DNA, 25 bp, Homo sapien
aagacaacacaaggcctgtccgtcc

SEQ ID NO: 413752 - DNA, 25 bp, Homo sapien
gagaagacaacacaaggcctgtccg

SEQ ID NO: 413753 - DNA, 25 bp, Homo sapien
caagagaagacaacacaaggcctgt

SEQ ID NO: 413754 - DNA, 25 bp, Homo sapien
tcaagagaagacaacacaaggcctg

SEQ ID NO: 413755 - DNA, 25 bp, Homo sapien
cctctatcatctggactatggactt

SEQ ID NO: 413756 - DNA, 25 bp, Homo sapien
tgacttcctacaacttttgggataa

SEQ ID NO: 413757 - DNA, 25 bp, Homo sapien
gtatttcaaatgacctacaagatcc

SEQ ID NO: 413758 - DNA, 25 bp, Homo sapien
cctgtgacttcctacaacttttggg

SEQ ID NO: 413759 - DNA, 25 bp, Homo sapien
attttttctccaggtcgaatgatct

SEQ ID NO: 413760 - DNA, 25 bp, Homo sapien
ttcttcagcgcctccagtgtagcct

SEQ ID NO: 413761 - DNA, 25 bp, Homo sapien
ctccaggtcgaatgatctaaatatc

SEQ ID NO: 413762 - DNA, 25 bp, Homo sapien
tcactccagctgtcctatgctttct

SEQ ID NO: 413763 - DNA, 25 bp, Homo sapien
taattgtggcttagtcaggcatttc

SEQ ID NO: 413764 - DNA, 25 bp, Homo sapien
gactactgtagtctacttgctgaaa

SEQ ID NO: 413765 - DNA, 25 bp, Homo sapien
tagtcaggcatttcgttgagtacga

SEQ ID NO: 413766 - DNA, 25 bp, Homo sapien
gagtacgatggaccttactttggaa

SEQ ID NO: 413767 - DNA, 25 bp, Homo sapien
taactgaagaccaaaactgtcgttg

SEQ ID NO: 413768 - DNA, 25 bp, Homo sapien
cttaactgaagaccaaaactgtcgt

SEQ ID NO: 413769 - DNA, 25 bp, Homo sapien
actgaagaccaaaactgtcgttgaa

SEQ ID NO: 413770 - DNA, 25 bp, Homo sapien
tgaagaccaaaactgtcgttgaaaa

SEQ ID NO: 413771 - DNA, 25 bp, Homo sapien
ggatataagggcataaatacatcat

SEQ ID NO: 413772 - DNA, 25 bp, Homo sapien
ttttgggatataagggcataaatac

SEQ ID NO: 413773 - DNA, 25 bp, Homo sapien
ctcaataaaagtgcctttaggtata

SEQ ID NO: 413774 - DNA, 25 bp, Homo sapien
tcatctaaagttcttctcattctca

SEQ ID NO: 413775 - DNA, 25 bp, Homo sapien
tcattcctcaacaactgccaagcaa

SEQ ID NO: 413776 - DNA, 25 bp, Homo sapien
ggcccctgaagagcattaactttaa

SEQ ID NO: 413777 - DNA, 25 bp, Homo sapien
acagcttctatgaatggcccctgaa

SEQ ID NO: 413778 - DNA, 25 bp, Homo sapien
cataaagatttaagaccagacacat

SEQ ID NO: 413779 - DNA, 25 bp, Homo sapien
tactgaaggatatccattgattaat

SEQ ID NO: 413780 - DNA, 25 bp, Homo sapien
cactactgaaggatatccattgatt

SEQ ID NO: 413781 - DNA, 25 bp, Homo sapien
ttcactactgaaggatatccattga

SEQ ID NO: 413782 - DNA, 25 bp, Homo sapien
ttattttctgcattcactactgaag

SEQ ID NO: 413783 - DNA, 25 bp, Homo sapien
attcccaccattcttgaagtctgtg

SEQ ID NO: 413784 - DNA, 25 bp, Homo sapien
aattcccaccattcttgaagtctgt

SEQ ID NO: 413785 - DNA, 25 bp, Homo sapien
taattcccaccattcttgaagtctg

SEQ ID NO: 413786 - DNA, 25 bp, Homo sapien
tgtaattcccaccattcttgaagtc

SEQ ID NO: 413787 - DNA, 25 bp, Homo sapien
ccctaaagtggtcttcaagtcccag

SEQ ID NO: 413788 - DNA, 25 bp, Homo sapien
ccagtgtgtctgaatgctcaattca

SEQ ID NO: 413789 - DNA, 25 bp, Homo sapien
tgggccaggtggtaactattatttc

SEQ ID NO: 413790 - DNA, 25 bp, Homo sapien
aagtcccaggataagaacccctctg

SEQ ID NO: 413791 - DNA, 25 bp, Homo sapien
cacaatggtaggtagtagggcaaca

SEQ ID NO: 413792 - DNA, 25 bp, Homo sapien
acagcatattctcaaagtcacgaca

SEQ ID NO: 413793 - DNA, 25 bp, Homo sapien
taggaagaatcaccttttccacaat

SEQ ID NO: 413794 - DNA, 25 bp, Homo sapien
tagggcaacatctacatcatctttt

SEQ ID NO: 413795 - DNA, 25 bp, Homo sapien
tgagttcctctaggatcaaaggacc

SEQ ID NO: 413796 - DNA, 25 bp, Homo sapien
gacaactgacttgggtcatgtcctc

SEQ ID NO: 413797 - DNA, 25 bp, Homo sapien
tagctttgagattaaaattacccag

SEQ ID NO: 413798 - DNA, 25 bp, Homo sapien
ctgctgggaagacatgaaacttaaa

SEQ ID NO: 413799 - DNA, 25 bp, Homo sapien
tgtgtagtattttgaacgccatgct

SEQ ID NO: 413800 - DNA, 25 bp, Homo sapien
tacagtcaattgaatagaaactttc

SEQ ID NO: 413801 - DNA, 25 bp, Homo sapien
tgcttcaaactgtgatttaatacag

SEQ ID NO: 413802 - DNA, 25 bp, Homo sapien
caaacaaaggccaatgtaagcatct

SEQ ID NO: 413803 - DNA, 25 bp, Homo sapien
gaaactaaactgatgatgagtctta

SEQ ID NO: 413804 - DNA, 25 bp, Homo sapien
actaaactgatgatgagtcttattt

SEQ ID NO: 413805 - DNA, 25 bp, Homo sapien
caagtagaaactaaactgatgatga

SEQ ID NO: 413806 - DNA, 25 bp, Homo sapien
taaactgatgatgagtcttatttcc

SEQ ID NO: 413807 - DNA, 25 bp, Homo sapien
ctttttccagattgaaattagtaat

SEQ ID NO: 413808 - DNA, 25 bp, Homo sapien
catcactggaaaggccttcaaggtg

SEQ ID NO: 413809 - DNA, 25 bp, Homo sapien
catcatcactggaaaggccttcaag

SEQ ID NO: 413810 - DNA, 25 bp, Homo sapien
ttcatcatcactggaaaggccttca

SEQ ID NO: 413811 - DNA, 25 bp, Homo sapien
gttctctggcttgtctacgacgagt

SEQ ID NO: 413812 - DNA, 25 bp, Homo sapien
ttctctggcttgtctacgacgagtc

SEQ ID NO: 413813 - DNA, 25 bp, Homo sapien
gacgttttgcatgctcttgatacag

SEQ ID NO: 413814 - DNA, 25 bp, Homo sapien
ccaaaggagtcaagatttggtgcca

SEQ ID NO: 413815 - DNA, 25 bp, Homo sapien
ctctgcaatgcgacgttttgcatgc

SEQ ID NO: 413816 - DNA, 25 bp, Homo sapien
tcttgatacagtgcccgatcgcgtc

SEQ ID NO: 413817 - DNA, 25 bp, Homo sapien
gagctgtctaacagaggtgtctccg

SEQ ID NO: 413818 - DNA, 25 bp, Homo sapien
gatgtgtcaccaaaatcagcaacag

SEQ ID NO: 413819 - DNA, 25 bp, Homo sapien
tccgtcggatcactaggtactgagc

SEQ ID NO: 413820 - DNA, 25 bp, Homo sapien
ggcatctgaaaaccgcatctgagca

SEQ ID NO: 413821 - DNA, 25 bp, Homo sapien
cacagtaattgcagataagtgctta

SEQ ID NO: 413822 - DNA, 25 bp, Homo sapien
taacatgactcaagtgatagcctcc

SEQ ID NO: 413823 - DNA, 25 bp, Homo sapien
tctttggcaattaatgtatactccc

SEQ ID NO: 413824 - DNA, 25 bp, Homo sapien
aaatatcattatacggctgggcacg

SEQ ID NO: 413825 - DNA, 25 bp, Homo sapien
catccagttaaaggacctccgctga

SEQ ID NO: 413826 - DNA, 25 bp, Homo sapien
gctatgagggccgtattaccatctg

SEQ ID NO: 413827 - DNA, 25 bp, Homo sapien
tattagcgcactcaagaatatggag

SEQ ID NO: 413828 - DNA, 25 bp, Homo sapien
gctatttgcatttgatcacctggag

SEQ ID NO: 413829 - DNA, 25 bp, Homo sapien
tagatctacctgacacaacagcaag

SEQ ID NO: 413830 - DNA, 25 bp, Homo sapien
cacaattcaagtacatgctgttacc

SEQ ID NO: 413831 - DNA, 25 bp, Homo sapien
caattagggccaaacagataatggt

SEQ ID NO: 413832 - DNA, 25 bp, Homo sapien
gaatcttagcacgtttttgagctcc

SEQ ID NO: 413833 - DNA, 25 bp, Homo sapien
cgtctttggacaaggcgggaagctc

SEQ ID NO: 413834 - DNA, 25 bp, Homo sapien
gctgatgtattgctgattcaagttc

SEQ ID NO: 413835 - DNA, 25 bp, Homo sapien
gggaagctcgctgtttgtacagctg

SEQ ID NO: 413836 - DNA, 25 bp, Homo sapien
taatatcatcttgtcgtctttggac

SEQ ID NO: 413837 - DNA, 25 bp, Homo sapien
tttagagtttgggaacactggcacc

SEQ ID NO: 413838 - DNA, 25 bp, Homo sapien
tagagctataatgtccagtgcctag

SEQ ID NO: 413839 - DNA, 25 bp, Homo sapien
tgctctgccactcatatgtaccaag

SEQ ID NO: 413840 - DNA, 25 bp, Homo sapien
taatgaccactacacatacctgagg

SEQ ID NO: 413841 - DNA, 25 bp, Homo sapien
ttatagcagcttcctgaactgaaca

SEQ ID NO: 413842 - DNA, 25 bp, Homo sapien
tatagcagcttcctgaactgaacag

SEQ ID NO: 413843 - DNA, 25 bp, Homo sapien
atagcagcttcctgaactgaacaga

SEQ ID NO: 413844 - DNA, 25 bp, Homo sapien
tatctcaagagtctgcaccgtgaca

SEQ ID NO: 413845 - DNA, 25 bp, Homo sapien
gaatgccttttaccggaggtccaga

SEQ ID NO: 413846 - DNA, 25 bp, Homo sapien
caaaggttatgagaccagctcccac

SEQ ID NO: 413847 - DNA, 25 bp, Homo sapien
caagaaagttccgaagcaagcgcca

SEQ ID NO: 413848 - DNA, 25 bp, Homo sapien
caagcaagtcttggacataccctcg

SEQ ID NO: 413849 - DNA, 25 bp, Homo sapien
gtccactcggctttgcagatgtttc

SEQ ID NO: 413850 - DNA, 25 bp, Homo sapien
taatctttcaatagccctggtagag

SEQ ID NO: 413851 - DNA, 25 bp, Homo sapien
tgcaaaaatttataccgttcaccaa

SEQ ID NO: 413852 - DNA, 25 bp, Homo sapien
cagactacatgttgcctgagggaac

SEQ ID NO: 413853 - DNA, 25 bp, Homo sapien
ggaacagaaagctagcggacaggtc

SEQ ID NO: 413854 - DNA, 25 bp, Homo sapien
tataatttttcgaggcttccacaga

SEQ ID NO: 413855 - DNA, 25 bp, Homo sapien
tccaagaaggtagcagaacaaagta

SEQ ID NO: 413856 - DNA, 25 bp, Homo sapien
taccaaatcaatagtaacgggagtc

SEQ ID NO: 413857 - DNA, 25 bp, Homo sapien
gagccgtaaggcattgtctggtaag

SEQ ID NO: 413858 - DNA, 25 bp, Homo sapien
acgggagtcatctcattactgggag

SEQ ID NO: 413859 - DNA, 25 bp, Homo sapien
catctgatgatccataggccgtata

SEQ ID NO: 413860 - DNA, 25 bp, Homo sapien
tcatcctgttctccagttactaaag

SEQ ID NO: 413861 - DNA, 25 bp, Homo sapien
tcctgttcccatcggctgagctctt

SEQ ID NO: 413862 - DNA, 25 bp, Homo sapien
tgctcctgttcccatcggctgagct

SEQ ID NO: 413863 - DNA, 25 bp, Homo sapien
gttcccatcggctgagctcttcatc

SEQ ID NO: 413864 - DNA, 25 bp, Homo sapien
tttggcgctttttccttgcagcatg

SEQ ID NO: 413865 - DNA, 25 bp, Homo sapien
tgaaatctcccaattctcgggccat

SEQ ID NO: 413866 - DNA, 25 bp, Homo sapien
aactatccggcgtttctcatcgtca

SEQ ID NO: 413867 - DNA, 25 bp, Homo sapien
tcatcttctctaacaaggcggcctt

SEQ ID NO: 413868 - DNA, 25 bp, Homo sapien
aaagctccaccagtctttggctttt

SEQ ID NO: 413869 - DNA, 25 bp, Homo sapien
tcactttccatatccatttcatctt

SEQ ID NO: 413870 - DNA, 25 bp, Homo sapien
tcttgatttgtatccttaacatgtc

SEQ ID NO: 413871 - DNA, 25 bp, Homo sapien
tggacgaagaacattcaatgaagat

SEQ ID NO: 413872 - DNA, 25 bp, Homo sapien
aggaggcaccactacatcttaatga

SEQ ID NO: 413873 - DNA, 25 bp, Homo sapien
gatgagatcccagcagtcacattta

SEQ ID NO: 413874 - DNA, 25 bp, Homo sapien
tatgggctcaatccagtaaagcttg

SEQ ID NO: 413875 - DNA, 25 bp, Homo sapien
cattaaaccctaagcccatgcgagg

SEQ ID NO: 413876 - DNA, 25 bp, Homo sapien
taattcatatatgatagcatcatca

SEQ ID NO: 413877 - DNA, 25 bp, Homo sapien
tggctggtgggccactcccatccat

SEQ ID NO: 413878 - DNA, 25 bp, Homo sapien
gctgcagccacggctaattcatata

SEQ ID NO: 413879 - DNA, 25 bp, Homo sapien
tcatatatgatagcatcatcaagca

SEQ ID NO: 413880 - DNA, 25 bp, Homo sapien
tactagttcacacaagcgaccatca

SEQ ID NO: 413881 - DNA, 25 bp, Homo sapien
gacttttcttgtactagttcacaca

SEQ ID NO: 413882 - DNA, 25 bp, Homo sapien
tagttcacacaagcgaccatcatct

SEQ ID NO: 413883 - DNA, 25 bp, Homo sapien
tcttgtactagttcacacaagcgac

SEQ ID NO: 413884 - DNA, 25 bp, Homo sapien
tattaatggatcaaagctggccctt

SEQ ID NO: 413885 - DNA, 25 bp, Homo sapien
gccactgtagcaaatgtaaaccctt

SEQ ID NO: 413886 - DNA, 25 bp, Homo sapien
ctcatgctgcatgttaataccaggc

SEQ ID NO: 413887 - DNA, 25 bp, Homo sapien
gtagatgcctgtgccatgctcttgg

SEQ ID NO: 413888 - DNA, 25 bp, Homo sapien
tcagctgatgagttgagttctgtct

SEQ ID NO: 413889 - DNA, 25 bp, Homo sapien
tcttcactttgaaaacttcttcatt

SEQ ID NO: 413890 - DNA, 25 bp, Homo sapien
gttgagttctgtcttaatcttcgat

SEQ ID NO: 413891 - DNA, 25 bp, Homo sapien
tttgttctcgcgaggcctcttgcgc

SEQ ID NO: 413892 - DNA, 25 bp, Homo sapien
gcgaggcctcttgcgcggcttcagc

SEQ ID NO: 413893 - DNA, 25 bp, Homo sapien
acctctttgttctcgcgaggcctct

SEQ ID NO: 413894 - DNA, 25 bp, Homo sapien
ttgcgcggcttcagcccgttgccgg

SEQ ID NO: 413895 - DNA, 25 bp, Homo sapien
gaggcccggggtcagcgcggaaggc

SEQ ID NO: 413896 - DNA, 25 bp, Homo sapien
agcgactccccgccaggggccctgt

SEQ ID NO: 413897 - DNA, 25 bp, Homo sapien
agcagcgactccccgccaggggccc

SEQ ID NO: 413898 - DNA, 25 bp, Homo sapien
tcgcccgtgcccggcggcggcaaca

SEQ ID NO: 413899 - DNA, 25 bp, Homo sapien
gagtcgttccgcttgcgcacgttca

SEQ ID NO: 413900 - DNA, 25 bp, Homo sapien
ttcggagtcgttccgcttgcgcacg

SEQ ID NO: 413901 - DNA, 25 bp, Homo sapien
ttgcgcacgttcacccgccgggcct

SEQ ID NO: 413902 - DNA, 25 bp, Homo sapien
ctcttcggagtcgttccgcttgcgc

SEQ ID NO: 413903 - DNA, 25 bp, Homo sapien
gcggcccgcacggcggtcgaatact

SEQ ID NO: 413904 - DNA, 25 bp, Homo sapien
ggcccgcacggcggtcgaatactcg

SEQ ID NO: 413905 - DNA, 25 bp, Homo sapien
ccgcggcccgcacggcggtcgaata

SEQ ID NO: 413906 - DNA, 25 bp, Homo sapien
cggcccgcacggcggtcgaatactc

SEQ ID NO: 413907 - DNA, 25 bp, Homo sapien
agctccagccgggtcgagtcctctg

SEQ ID NO: 413908 - DNA, 25 bp, Homo sapien
cggcagcgccgagctcgtgacggcg

SEQ ID NO: 413909 - DNA, 25 bp, Homo sapien
ggtcgagtcctctgttgctaccgcg

SEQ ID NO: 413910 - DNA, 25 bp, Homo sapien
ccacgcgctctcaatacttggagaa

SEQ ID NO: 413911 - DNA, 25 bp, Homo sapien
atttggccagtagaactgtctgcga

SEQ ID NO: 413912 - DNA, 25 bp, Homo sapien
gatgggttctgcattctcttgctac

SEQ ID NO: 413913 - DNA, 25 bp, Homo sapien
tcagaggataaagctaagacatatg

SEQ ID NO: 413914 - DNA, 25 bp, Homo sapien
cacaatttaggtgtcaggtgtgttc

SEQ ID NO: 413915 - DNA, 25 bp, Homo sapien
tttgttagcacaccactggccagag

SEQ ID NO: 413916 - DNA, 25 bp, Homo sapien
gaggcaataagctactagccccagg

SEQ ID NO: 413917 - DNA, 25 bp, Homo sapien
tagccccaggccagatggctaccat

SEQ ID NO: 413918 - DNA, 25 bp, Homo sapien
caaaaaagctgaatggcaagccgac

SEQ ID NO: 413919 - DNA, 25 bp, Homo sapien
tcctcattctctgaaggatcagatc

SEQ ID NO: 413920 - DNA, 25 bp, Homo sapien
cattctctgaaggatcagatctggc

SEQ ID NO: 413921 - DNA, 25 bp, Homo sapien
tctctgaaggatcagatctggcccc

SEQ ID NO: 413922 - DNA, 25 bp, Homo sapien
tctgaaggatcagatctggccccat

SEQ ID NO: 413923 - DNA, 25 bp, Homo sapien
ggagctgagccactgtagagcttca

SEQ ID NO: 413924 - DNA, 25 bp, Homo sapien
ccaaaccctgcagctaagtgccaaa

SEQ ID NO: 413925 - DNA, 25 bp, Homo sapien
caaatgccattaatccccatgcctg

SEQ ID NO: 413926 - DNA, 25 bp, Homo sapien
tatttttagtccagaaatctgaaac

SEQ ID NO: 413927 - DNA, 25 bp, Homo sapien
catttctgacgggacatttccctgc

SEQ ID NO: 413928 - DNA, 25 bp, Homo sapien
caggcttctagttgcagagaccaag

SEQ ID NO: 413929 - DNA, 25 bp, Homo sapien
aaaactcatagtccccaaacctctg

SEQ ID NO: 413930 - DNA, 25 bp, Homo sapien
ccactaagcagtctctagggtgtat

SEQ ID NO: 413931 - DNA, 25 bp, Homo sapien
tcccaagacatgtccctggacggaa

SEQ ID NO: 413932 - DNA, 25 bp, Homo sapien
caagacatgtccctggacggaatca

SEQ ID NO: 413933 - DNA, 25 bp, Homo sapien
tgtccctggacggaatcaagttggt

SEQ ID NO: 413934 - DNA, 25 bp, Homo sapien
gacatgtccctggacggaatcaagt

SEQ ID NO: 413935 - DNA, 25 bp, Homo sapien
gagctggttattggtatgtgtggct

SEQ ID NO: 413936 - DNA, 25 bp, Homo sapien
aaaagtgttctcgcagttgggcaca

SEQ ID NO: 413937 - DNA, 25 bp, Homo sapien
gagcagaacagagagctggttattg

SEQ ID NO: 413938 - DNA, 25 bp, Homo sapien
aagtgttctcgcagttgggcacaga

SEQ ID NO: 413939 - DNA, 25 bp, Homo sapien
tgcggagagaggcacagttgtgggt

SEQ ID NO: 413940 - DNA, 25 bp, Homo sapien
agagaggcacagttgtgggtaggga

SEQ ID NO: 413941 - DNA, 25 bp, Homo sapien
gaggcacagttgtgggtagggatac

SEQ ID NO: 413942 - DNA, 25 bp, Homo sapien
ctgcggagagaggcacagttgtggg

SEQ ID NO: 413943 - DNA, 25 bp, Homo sapien
ggacacagttattatgctagtaaat

SEQ ID NO: 413944 - DNA, 25 bp, Homo sapien
aggcagctggacacagttattatgc

SEQ ID NO: 413945 - DNA, 25 bp, Homo sapien
gctggacacagttattatgctagta

SEQ ID NO: 413946 - DNA, 25 bp, Homo sapien
cagctggacacagttattatgctag

SEQ ID NO: 413947 - DNA, 25 bp, Homo sapien
tgctggtaacgttttcaatactata

SEQ ID NO: 413948 - DNA, 25 bp, Homo sapien
tatatgatttaaggctgagtccctg

SEQ ID NO: 413949 - DNA, 25 bp, Homo sapien
aaggctgagtccctgttgaaaagag

SEQ ID NO: 413950 - DNA, 25 bp, Homo sapien
gagtccctgttgaaaagagccatat

SEQ ID NO: 413951 - DNA, 25 bp, Homo sapien
atggctgccagcctttgtgtaacca

SEQ ID NO: 413952 - DNA, 25 bp, Homo sapien
tggctgccagcctttgtgtaaccac

SEQ ID NO: 413953 - DNA, 25 bp, Homo sapien
gtccccaccgctatggatgagtaag

SEQ ID NO: 413954 - DNA, 25 bp, Homo sapien
gaaagcttcaggtcttggaccagcg

SEQ ID NO: 413955 - DNA, 25 bp, Homo sapien
ccagcgcagatgtgtccgtgaacca

SEQ ID NO: 413956 - DNA, 25 bp, Homo sapien
tgttgatgcgcagcctcttcagacc

SEQ ID NO: 413957 - DNA, 25 bp, Homo sapien
tttcccttgtgaagatgagcgtgct

SEQ ID NO: 413958 - DNA, 25 bp, Homo sapien
ggatgtccgcagaacagctgcagtt

SEQ ID NO: 413959 - DNA, 25 bp, Homo sapien
tgcagttccgaatggtgttttccct

SEQ ID NO: 413960 - DNA, 25 bp, Homo sapien
ggccaaactgtagtcacaatcccgg

SEQ ID NO: 413961 - DNA, 25 bp, Homo sapien
gcagttaagtgcaaagacacccaga

SEQ ID NO: 413962 - DNA, 25 bp, Homo sapien
tgaagcagttaagtgcaaagacacc

SEQ ID NO: 413963 - DNA, 25 bp, Homo sapien
tggtgaagcagttaagtgcaaagac

SEQ ID NO: 413964 - DNA, 25 bp, Homo sapien
ctttggtgaagcagttaagtgcaaa

SEQ ID NO: 413965 - DNA, 25 bp, Homo sapien
gatcagaagaagacagtgcctggaa

SEQ ID NO: 413966 - DNA, 25 bp, Homo sapien
gaagacagtgcctggaaggtggtgc

SEQ ID NO: 413967 - DNA, 25 bp, Homo sapien
ctgatcagaagaagacagtgcctgg

SEQ ID NO: 413968 - DNA, 25 bp, Homo sapien
tcagaagaagacagtgcctggaagg

SEQ ID NO: 413969 - DNA, 25 bp, Homo sapien
ttttgaaccaatttgttggaactca

SEQ ID NO: 413970 - DNA, 25 bp, Homo sapien
cccagcatgggccagcgtgtttatc

SEQ ID NO: 413971 - DNA, 25 bp, Homo sapien
atgggccagcgtgtttatcccccct

SEQ ID NO: 413972 - DNA, 25 bp, Homo sapien
tttgaaccaatttgttggaactcac

SEQ ID NO: 413973 - DNA, 25 bp, Homo sapien
aaaagaggcagctttatcacaacct

SEQ ID NO: 413974 - DNA, 25 bp, Homo sapien
aagttgtaaacatttctttcttgca

SEQ ID NO: 413975 - DNA, 25 bp, Homo sapien
tatcacaacctttcatttgaaatac

SEQ ID NO: 413976 - DNA, 25 bp, Homo sapien
cacagcttatggaaaaggaacccca

SEQ ID NO: 413977 - DNA, 25 bp, Homo sapien
ctgacagtgagaccaacatgccaac

SEQ ID NO: 413978 - DNA, 25 bp, Homo sapien
cagagcgatgccagagcggatgcca

SEQ ID NO: 413979 - DNA, 25 bp, Homo sapien
aacaacacagccagagcgatgccag

SEQ ID NO: 413980 - DNA, 25 bp, Homo sapien
cagtgagaccaacatgccaacaaca

SEQ ID NO: 413981 - DNA, 25 bp, Homo sapien
tagttcaaggttctctttcactggg

SEQ ID NO: 413982 - DNA, 25 bp, Homo sapien
ggttccaacgattgtcttgtctcag

SEQ ID NO: 413983 - DNA, 25 bp, Homo sapien
cactgcactcggctgtaccgtgatt

SEQ ID NO: 413984 - DNA, 25 bp, Homo sapien
atattctcaatttcccgcacagtgc

SEQ ID NO: 413985 - DNA, 25 bp, Homo sapien
cttcatctctgatactgtcttcaaa

SEQ ID NO: 413986 - DNA, 25 bp, Homo sapien
ttcatctctgatactgtcttcaaat

SEQ ID NO: 413987 - DNA, 25 bp, Homo sapien
tgtcttcaaatctctcctctttcat

SEQ ID NO: 413988 - DNA, 25 bp, Homo sapien
tactgtcttcaaatctctcctcttt

SEQ ID NO: 413989 - DNA, 25 bp, Homo sapien
gctgtcttctgtatgtgcgtccact

SEQ ID NO: 413990 - DNA, 25 bp, Homo sapien
gtcttctgtatgtgcgtccactctc

SEQ ID NO: 413991 - DNA, 25 bp, Homo sapien
ggctgtcttctgtatgtgcgtccac

SEQ ID NO: 413992 - DNA, 25 bp, Homo sapien
ctgtcttctgtatgtgcgtccactc

SEQ ID NO: 413993 - DNA, 25 bp, Homo sapien
tgacctattagctcccacagacaca

SEQ ID NO: 413994 - DNA, 25 bp, Homo sapien
actggggcctattgacctattagct

SEQ ID NO: 413995 - DNA, 25 bp, Homo sapien
tcagttaattgcatcactggggttc

SEQ ID NO: 413996 - DNA, 25 bp, Homo sapien
aattgcatcactggggttcacatcc

SEQ ID NO: 413997 - DNA, 25 bp, Homo sapien
caaactctataaagcctggtgtgta

SEQ ID NO: 413998 - DNA, 25 bp, Homo sapien
gaaggtgaccctgacaatggttctt

SEQ ID NO: 413999 - DNA, 25 bp, Homo sapien
cagccggtgttttgggagttctcac

SEQ ID NO: 414000 - DNA, 25 bp, Homo sapien
gtcacagttcctgccatgcagcaga

SEQ ID NO: 414001 - DNA, 25 bp, Homo sapien
atctgagagttccaccgtgaggcct

SEQ ID NO: 414002 - DNA, 25 bp, Homo sapien
agagttccaccgtgaggcctcgcct

SEQ ID NO: 414003 - DNA, 25 bp, Homo sapien
tggccacggatccttcaccctggct

SEQ ID NO: 414004 - DNA, 25 bp, Homo sapien
tgcctggccacggatccttcaccct

SEQ ID NO: 414005 - DNA, 25 bp, Homo sapien
tgtggcctcttaattcagcaacttc

SEQ ID NO: 414006 - DNA, 25 bp, Homo sapien
ctgttggagaatgtggcctcttaat

SEQ ID NO: 414007 - DNA, 25 bp, Homo sapien
ttgtggatgaggtagtagctcccca

SEQ ID NO: 414008 - DNA, 25 bp, Homo sapien
agcaacttcctggttgtggatgagg

SEQ ID NO: 414009 - DNA, 25 bp, Homo sapien
ctcatggccttgctgggccccagag

SEQ ID NO: 414010 - DNA, 25 bp, Homo sapien
tgtgcagggctctatgtgtgttcct

SEQ ID NO: 414011 - DNA, 25 bp, Homo sapien
cttgtgcagggctctatgtgtgttc

SEQ ID NO: 414012 - DNA, 25 bp, Homo sapien
gcagggctctatgtgtgttccttct

SEQ ID NO: 414013 - DNA, 25 bp, Homo sapien
tgagcttctgttcttcgcctatgga

SEQ ID NO: 414014 - DNA, 25 bp, Homo sapien
tgaagcgttggacaaaggagtcatc

SEQ ID NO: 414015 - DNA, 25 bp, Homo sapien
caaggaagctttgctaacatgagct

SEQ ID NO: 414016 - DNA, 25 bp, Homo sapien
tatggaatctgactgagtccatggt

SEQ ID NO: 414017 - DNA, 25 bp, Homo sapien
cactccaggcgacatgttttctcca

SEQ ID NO: 414018 - DNA, 25 bp, Homo sapien
caccaggttttcaagtatgttctgt

SEQ ID NO: 414019 - DNA, 25 bp, Homo sapien
tctgtgttctacgatggtttcctgt

SEQ ID NO: 414020 - DNA, 25 bp, Homo sapien
tgctagggggcatcatcaccaggtt

SEQ ID NO: 414021 - DNA, 25 bp, Homo sapien
cacgactagggatgtacttgatccc

SEQ ID NO: 414022 - DNA, 25 bp, Homo sapien
ggccacgactagggatgtacttgat

SEQ ID NO: 414023 - DNA, 25 bp, Homo sapien
gccacgactagggatgtacttgatc

SEQ ID NO: 414024 - DNA, 25 bp, Homo sapien
gactagggatgtacttgatcccaca

SEQ ID NO: 414025 - DNA, 25 bp, Homo sapien
ttctttgagatgtggatctttgggg

SEQ ID NO: 414026 - DNA, 25 bp, Homo sapien
ttgagatgtggatctttggggtggc

SEQ ID NO: 414027 - DNA, 25 bp, Homo sapien
tgagatgtggatctttggggtggcc

SEQ ID NO: 414028 - DNA, 25 bp, Homo sapien
ctttgagatgtggatctttggggtg

SEQ ID NO: 414029 - DNA, 25 bp, Homo sapien
tgcgcagggcctcaatcacatgctc

SEQ ID NO: 414030 - DNA, 25 bp, Homo sapien
tctgcagcttggtgcagatggacat

SEQ ID NO: 414031 - DNA, 25 bp, Homo sapien
gccctgcgcagggcctcaatcacat

SEQ ID NO: 414032 - DNA, 25 bp, Homo sapien
cctgcgcagggcctcaatcacatgc

SEQ ID NO: 414033 - DNA, 25 bp, Homo sapien
gtggtacaatgtgaaccccggccac

SEQ ID NO: 414034 - DNA, 25 bp, Homo sapien
cgtggtacaatgtgaaccccggcca

SEQ ID NO: 414035 - DNA, 25 bp, Homo sapien
tggtacaatgtgaaccccggccaca

SEQ ID NO: 414036 - DNA, 25 bp, Homo sapien
gataaccgtggtacaatgtgaaccc

SEQ ID NO: 414037 - DNA, 25 bp, Homo sapien
cagccattgcacacctggcccccgg

SEQ ID NO: 414038 - DNA, 25 bp, Homo sapien
aattcagtcagcttaattggttgca

SEQ ID NO: 414039 - DNA, 25 bp, Homo sapien
ccattgcacacctggcccccgggag

SEQ ID NO: 414040 - DNA, 25 bp, Homo sapien
cccgggaggaaaggaattcagtcag

SEQ ID NO: 414041 - DNA, 25 bp, Homo sapien
gtctgtcctctgtctctcctgagga

SEQ ID NO: 414042 - DNA, 25 bp, Homo sapien
accagaggctgacacagctgccctt

SEQ ID NO: 414043 - DNA, 25 bp, Homo sapien
accagcccctctgcgaagtctgtcc

SEQ ID NO: 414044 - DNA, 25 bp, Homo sapien
cctccagcaggtcttttagccacat

SEQ ID NO: 414045 - DNA, 25 bp, Homo sapien
gagcctctgtatcccctggaaagtc

SEQ ID NO: 414046 - DNA, 25 bp, Homo sapien
tctgtatcccctggaaagtcaattt

SEQ ID NO: 414047 - DNA, 25 bp, Homo sapien
atgagcctctgtatcccctggaaag

SEQ ID NO: 414048 - DNA, 25 bp, Homo sapien
ggcatgagcctctgtatcccctgga

SEQ ID NO: 414049 - DNA, 25 bp, Homo sapien
tgcttccgacgacaacgttatcaag

SEQ ID NO: 414050 - DNA, 25 bp, Homo sapien
tttctgtcctttcatcatgagtcca

SEQ ID NO: 414051 - DNA, 25 bp, Homo sapien
tctgtcctttcatcatgagtccatc

SEQ ID NO: 414052 - DNA, 25 bp, Homo sapien
acatcctggacttgcttccgacgac

SEQ ID NO: 414053 - DNA, 25 bp, Homo sapien
gactgactcacgtggtctgactctg

SEQ ID NO: 414054 - DNA, 25 bp, Homo sapien
tgaggccacttgtgcaatgccaggc

SEQ ID NO: 414055 - DNA, 25 bp, Homo sapien
gacagcagccgtgattgatggagac

SEQ ID NO: 414056 - DNA, 25 bp, Homo sapien
aatcccattattcgcttgagttggc

SEQ ID NO: 414057 - DNA, 25 bp, Homo sapien
tgtaagcctgatttgacaggagaga

SEQ ID NO: 414058 - DNA, 25 bp, Homo sapien
aaatcctcatgcatgcaagcagtaa

SEQ ID NO: 414059 - DNA, 25 bp, Homo sapien
cagtaactgtttgtatgccaagctg

SEQ ID NO: 414060 - DNA, 25 bp, Homo sapien
ggcattagcagacggggaccctaaa

SEQ ID NO: 414061 - DNA, 25 bp, Homo sapien
ttctgccgaccctccagcaattcca

SEQ ID NO: 414062 - DNA, 25 bp, Homo sapien
tttctgccgaccctccagcaattcc

SEQ ID NO: 414063 - DNA, 25 bp, Homo sapien
ccataaaactgcttgggctctgtct

SEQ ID NO: 414064 - DNA, 25 bp, Homo sapien
cctttctgccgaccctccagcaatt

SEQ ID NO: 414065 - DNA, 25 bp, Homo sapien
agcccagggcttgcctccggcatgt

SEQ ID NO: 414066 - DNA, 25 bp, Homo sapien
tcagcaggtctggtcggaggatctg

SEQ ID NO: 414067 - DNA, 25 bp, Homo sapien
tctggtcggaggatctgaagtccgg

SEQ ID NO: 414068 - DNA, 25 bp, Homo sapien
agtccgggtgttgagcagccatcag

SEQ ID NO: 414069 - DNA, 25 bp, Homo sapien
tccaaaaaaggctttcacgaggtca

SEQ ID NO: 414070 - DNA, 25 bp, Homo sapien
ggctttcacgaggtcaatgccggtg

SEQ ID NO: 414071 - DNA, 25 bp, Homo sapien
aggtcaatgccggtggcataagtac

SEQ ID NO: 414072 - DNA, 25 bp, Homo sapien
tcacgaggtcaatgccggtggcata

SEQ ID NO: 414073 - DNA, 25 bp, Homo sapien
gtccttgggcttcactctcatgcat

SEQ ID NO: 414074 - DNA, 25 bp, Homo sapien
gcgtccttgggcttcactctcatgc

SEQ ID NO: 414075 - DNA, 25 bp, Homo sapien
cagcagctgacagcacaggcttggc

SEQ ID NO: 414076 - DNA, 25 bp, Homo sapien
gcttggcaggtaggaggcgtccttg

SEQ ID NO: 414077 - DNA, 25 bp, Homo sapien
tatcatagtgacctctgggctctga

SEQ ID NO: 414078 - DNA, 25 bp, Homo sapien
ccatcctccctgtggtgatatctca

SEQ ID NO: 414079 - DNA, 25 bp, Homo sapien
gatatctcagaacgagacctttggg

SEQ ID NO: 414080 - DNA, 25 bp, Homo sapien
tgggctctgactgtgttgagaagct

SEQ ID NO: 414081 - DNA, 25 bp, Homo sapien
tagatagtcggctcataagtctcaa

SEQ ID NO: 414082 - DNA, 25 bp, Homo sapien
gacatagatagtcggctcataagtc

SEQ ID NO: 414083 - DNA, 25 bp, Homo sapien
ctgggacatagatagtcggctcata

SEQ ID NO: 414084 - DNA, 25 bp, Homo sapien
tcggctcataagtctcaacggccat

SEQ ID NO: 414085 - DNA, 25 bp, Homo sapien
tggactatgcagctctggatgcccc

SEQ ID NO: 414086 - DNA, 25 bp, Homo sapien
tctgaccactcatgagaagcccaca

SEQ ID NO: 414087 - DNA, 25 bp, Homo sapien
gggagggttctaccccaatagctga

SEQ ID NO: 414088 - DNA, 25 bp, Homo sapien
tgccgttcctctgaccactcatgag

SEQ ID NO: 414089 - DNA, 25 bp, Homo sapien
tctggtgggaactgcgcaagtagaa

SEQ ID NO: 414090 - DNA, 25 bp, Homo sapien
tttctgtctcttgacaaggtaatat

SEQ ID NO: 414091 - DNA, 25 bp, Homo sapien
cctccagatcaggaaccttttctgt

SEQ ID NO: 414092 - DNA, 25 bp, Homo sapien
tcattgaagaacagtggaaagctct

SEQ ID NO: 414093 - DNA, 25 bp, Homo sapien
cctacagatatgactgagaatgcaa

SEQ ID NO: 414094 - DNA, 25 bp, Homo sapien
taatgaacttacaactccacgttgc

SEQ ID NO: 414095 - DNA, 25 bp, Homo sapien
gggtgtgatttgcttatctgggata

SEQ ID NO: 414096 - DNA, 25 bp, Homo sapien
aaactcttatctgctaattgtcata

SEQ ID NO: 414097 - DNA, 25 bp, Homo sapien
cattggtcagacatagccaggagcc

SEQ ID NO: 414098 - DNA, 25 bp, Homo sapien
gaacctgttgctataacccatgcag

SEQ ID NO: 414099 - DNA, 25 bp, Homo sapien
tcaagtgagtgcgacttttcgtccc

SEQ ID NO: 414100 - DNA, 25 bp, Homo sapien
aatatgatctcggtggtccaagacc

SEQ ID NO: 414101 - DNA, 25 bp, Homo sapien
taataagtccggagggcgacaggtg

SEQ ID NO: 414102 - DNA, 25 bp, Homo sapien
aattaagctgctcattaaacacacg

SEQ ID NO: 414103 - DNA, 25 bp, Homo sapien
aacacacgctaacgaacagccgagg

SEQ ID NO: 414104 - DNA, 25 bp, Homo sapien
gcgacaggtggcctactagacagct

SEQ ID NO: 414105 - DNA, 25 bp, Homo sapien
tggccattaggagatcacgacctcg

SEQ ID NO: 414106 - DNA, 25 bp, Homo sapien
tgctgctcctctagctaagctggtg

SEQ ID NO: 414107 - DNA, 25 bp, Homo sapien
aaactaataggctggctggccatta

SEQ ID NO: 414108 - DNA, 25 bp, Homo sapien
taggcctaaggtagatgctgctcct

SEQ ID NO: 414109 - DNA, 25 bp, Homo sapien
ctttctccttcttgcatatccctaa

SEQ ID NO: 414110 - DNA, 25 bp, Homo sapien
tgcatatccctaagtttaagcccca

SEQ ID NO: 414111 - DNA, 25 bp, Homo sapien
agtttaagccccaggttatgccgca

SEQ ID NO: 414112 - DNA, 25 bp, Homo sapien
ttaagccccaggttatgccgcatct

SEQ ID NO: 414113 - DNA, 25 bp, Homo sapien
caacaaagtgcttgagccctcagcg

SEQ ID NO: 414114 - DNA, 25 bp, Homo sapien
aatccagtccatgtagagtgcatcc

SEQ ID NO: 414115 - DNA, 25 bp, Homo sapien
cagatagtcccatgtgtgggtcgct

SEQ ID NO: 414116 - DNA, 25 bp, Homo sapien
ggagaccaggccaagtgtgaaaatc

SEQ ID NO: 414117 - DNA, 25 bp, Homo sapien
cagtatttctgtcccccaggtaact

SEQ ID NO: 414118 - DNA, 25 bp, Homo sapien
cctcagtatttctgtcccccaggta

SEQ ID NO: 414119 - DNA, 25 bp, Homo sapien
aaaagaaattcacaggcagctcctc

SEQ ID NO: 414120 - DNA, 25 bp, Homo sapien
tctgtcccccaggtaactggcatga

SEQ ID NO: 414121 - DNA, 25 bp, Homo sapien
tccttaaagggtctcatgctgcagt

SEQ ID NO: 414122 - DNA, 25 bp, Homo sapien
ggcaacctctgctgatctttaacag

SEQ ID NO: 414123 - DNA, 25 bp, Homo sapien
gggacatcaagaacccaaggcaacc

SEQ ID NO: 414124 - DNA, 25 bp, Homo sapien
ttccatagatggatccaccacagcc

SEQ ID NO: 414125 - DNA, 25 bp, Homo sapien
tcgccgaaagggctgaatcttgggt

SEQ ID NO: 414126 - DNA, 25 bp, Homo sapien
cctgacactggagctaaataaacct

SEQ ID NO: 414127 - DNA, 25 bp, Homo sapien
gagcctcggcaaaacttcctgacac

SEQ ID NO: 414128 - DNA, 25 bp, Homo sapien
tggagctaaataaaccttcgccacg

SEQ ID NO: 414129 - DNA, 25 bp, Homo sapien
gtgacaattctttccgagaggcggt

SEQ ID NO: 414130 - DNA, 25 bp, Homo sapien
cagagaaaactgattccagcctggg

SEQ ID NO: 414131 - DNA, 25 bp, Homo sapien
gaggcggttatcactgcttattgcc

SEQ ID NO: 414132 - DNA, 25 bp, Homo sapien
gaaggttcaagttgattggtgacaa

SEQ ID NO: 414133 - DNA, 25 bp, Homo sapien
ggtgattagagcttcctagtgttcc

SEQ ID NO: 414134 - DNA, 25 bp, Homo sapien
tagagcttcctagtgttccctggaa

SEQ ID NO: 414135 - DNA, 25 bp, Homo sapien
taaaaaggacgaagtgagcatttcc

SEQ ID NO: 414136 - DNA, 25 bp, Homo sapien
ttccaagtgtcaggtgattagagct

SEQ ID NO: 414137 - DNA, 25 bp, Homo sapien
tcatttaatcgtgctttgggttctg

SEQ ID NO: 414138 - DNA, 25 bp, Homo sapien
cttcatttaatcgtgctttgggttc

SEQ ID NO: 414139 - DNA, 25 bp, Homo sapien
acctgcttcatttaatcgtgctttg

SEQ ID NO: 414140 - DNA, 25 bp, Homo sapien
tgcttcatttaatcgtgctttgggt

SEQ ID NO: 414141 - DNA, 25 bp, Homo sapien
ttgctttcttgctgctgcgagactg

SEQ ID NO: 414142 - DNA, 25 bp, Homo sapien
cccctttcatctctatgggaggact

SEQ ID NO: 414143 - DNA, 25 bp, Homo sapien
tctatgggaggactcggaactttaa

SEQ ID NO: 414144 - DNA, 25 bp, Homo sapien
tttcttgctgctgcgagactgaagg

SEQ ID NO: 414145 - DNA, 25 bp, Homo sapien
catacaatgctgaatgccggctgaa

SEQ ID NO: 414146 - DNA, 25 bp, Homo sapien
cggatgaaccatatgtgaagcgaca

SEQ ID NO: 414147 - DNA, 25 bp, Homo sapien
tgcacacatttggagcggatgaacc

SEQ ID NO: 414148 - DNA, 25 bp, Homo sapien
gcttcgccgcgaaaacatgggtata

SEQ ID NO: 414149 - DNA, 25 bp, Homo sapien
aggcacagctgacagttctgaccag

SEQ ID NO: 414150 - DNA, 25 bp, Homo sapien
cagttctgaccagtggccacctgaa

SEQ ID NO: 414151 - DNA, 25 bp, Homo sapien
ccacctgaaaatcagggccagggcc

SEQ ID NO: 414152 - DNA, 25 bp, Homo sapien
ccctttatgccgagggaccaggagg

SEQ ID NO: 414153 - DNA, 25 bp, Homo sapien
caggggggcggtgatcaacagcctc

SEQ ID NO: 414154 - DNA, 25 bp, Homo sapien
ggggggcggtgatcaacagcctcct

SEQ ID NO: 414155 - DNA, 25 bp, Homo sapien
gcaggggggcggtgatcaacagcct

SEQ ID NO: 414156 - DNA, 25 bp, Homo sapien
aggggggcggtgatcaacagcctcc

SEQ ID NO: 414157 - DNA, 25 bp, Homo sapien
gctgcatatattggccgggactaga

SEQ ID NO: 414158 - DNA, 25 bp, Homo sapien
cactaggaagacagtcgtggctgca

SEQ ID NO: 414159 - DNA, 25 bp, Homo sapien
tagtaccgatgatcacagctgcgga

SEQ ID NO: 414160 - DNA, 25 bp, Homo sapien
catgggccattaaccccgtggaagg

SEQ ID NO: 414161 - DNA, 25 bp, Homo sapien
cactgtggttgtgacttgggatttc

SEQ ID NO: 414162 - DNA, 25 bp, Homo sapien
ggagcaggaccccactcctgatcat

SEQ ID NO: 414163 - DNA, 25 bp, Homo sapien
ggcacaggagcctcaaagccattca

SEQ ID NO: 414164 - DNA, 25 bp, Homo sapien
ctcctgatcatagcatgacttagct

SEQ ID NO: 414165 - DNA, 25 bp, Homo sapien
tgtttgagtcaaatgtggcacgttc

SEQ ID NO: 414166 - DNA, 25 bp, Homo sapien
tcagccccaccatatcaggaagagt

SEQ ID NO: 414167 - DNA, 25 bp, Homo sapien
tgggaagtaaatccactccaactga

SEQ ID NO: 414168 - DNA, 25 bp, Homo sapien
tggcacgttcatagaccacttggag

SEQ ID NO: 414169 - DNA, 25 bp, Homo sapien
agttcctgtgactgaaccagttcat

SEQ ID NO: 414170 - DNA, 25 bp, Homo sapien
gaaccagttcattgctgacttgttt

SEQ ID NO: 414171 - DNA, 25 bp, Homo sapien
tttgtggctgtgagtcgcctcagtc

SEQ ID NO: 414172 - DNA, 25 bp, Homo sapien
ccggaagcaggtatcctttgagttc

SEQ ID NO: 414173 - DNA, 25 bp, Homo sapien
gacgaccaagactggaatttcaagt

SEQ ID NO: 414174 - DNA, 25 bp, Homo sapien
tagtcacagagacgaccaagactgg

SEQ ID NO: 414175 - DNA, 25 bp, Homo sapien
agtggaatttctccaaaccatgttg

SEQ ID NO: 414176 - DNA, 25 bp, Homo sapien
caatggccgattgagaacagggcac

SEQ ID NO: 414177 - DNA, 25 bp, Homo sapien
tctgacttgcacatcaggctgggaa

SEQ ID NO: 414178 - DNA, 25 bp, Homo sapien
tgacttgcacatcaggctgggaagt

SEQ ID NO: 414179 - DNA, 25 bp, Homo sapien
aatctgacttgcacatcaggctggg

SEQ ID NO: 414180 - DNA, 25 bp, Homo sapien
gaatctgacttgcacatcaggctgg

SEQ ID NO: 414181 - DNA, 25 bp, Homo sapien
tctccgagatgaagtacaataggcc

SEQ ID NO: 414182 - DNA, 25 bp, Homo sapien
agatctcttgtgatgctctcgggtc

SEQ ID NO: 414183 - DNA, 25 bp, Homo sapien
gccttctttgtctccgagatgaagt

SEQ ID NO: 414184 - DNA, 25 bp, Homo sapien
tacaataggccacagggcggagatc

SEQ ID NO: 414185 - DNA, 25 bp, Homo sapien
gtgggaccaggccaccgggactctg

SEQ ID NO: 414186 - DNA, 25 bp, Homo sapien
gggaccaggccaccgggactctgca

SEQ ID NO: 414187 - DNA, 25 bp, Homo sapien
aggccaccgggactctgcagggcca

SEQ ID NO: 414188 - DNA, 25 bp, Homo sapien
accaggccaccgggactctgcaggg

SEQ ID NO: 414189 - DNA, 25 bp, Homo sapien
tgaactgtcctggaccagtcccggg

SEQ ID NO: 414190 - DNA, 25 bp, Homo sapien
tccgcatgcacatctgcacgtgtgt

SEQ ID NO: 414191 - DNA, 25 bp, Homo sapien
cattcggcagtatttaccaagcacc

SEQ ID NO: 414192 - DNA, 25 bp, Homo sapien
tattttacggaccatgtttcacatc

SEQ ID NO: 414193 - DNA, 25 bp, Homo sapien
cacgcacccggtcttttgtgggaga

SEQ ID NO: 414194 - DNA, 25 bp, Homo sapien
tgtcattcacgaccaggagcgatgg

SEQ ID NO: 414195 - DNA, 25 bp, Homo sapien
tcagctctgcgcaagaacgtcgttc

SEQ ID NO: 414196 - DNA, 25 bp, Homo sapien
ccgagacgcagcctgaatgtgagca

SEQ ID NO: 414197 - DNA, 25 bp, Homo sapien
tgcacgacctcaacatcgccatgga

SEQ ID NO: 414198 - DNA, 25 bp, Homo sapien
ccatggatggcctccgcgaggtcat

SEQ ID NO: 414199 - DNA, 25 bp, Homo sapien
gtctcaagatcaacagccgcgagcg

SEQ ID NO: 414200 - DNA, 25 bp, Homo sapien
cctgcgaaagctgcgacgactatct

SEQ ID NO: 414201 - DNA, 25 bp, Homo sapien
gttctctccgggacctgatcgagcg

SEQ ID NO: 414202 - DNA, 25 bp, Homo sapien
cgttttatgaaaaggtaccgctgtg

SEQ ID NO: 414203 - DNA, 25 bp, Homo sapien
gatcgagcgctgtctggctttaacc

SEQ ID NO: 414204 - DNA, 25 bp, Homo sapien
agcatctgcgaacccaagcaatggg

SEQ ID NO: 414205 - DNA, 25 bp, Homo sapien
ccctgtctctcgttgatttgggaga

SEQ ID NO: 414206 - DNA, 25 bp, Homo sapien
gaagccggcgttcggtatcagaagc

SEQ ID NO: 414207 - DNA, 25 bp, Homo sapien
gaactgtggccgttcctccctgtct

SEQ ID NO: 414208 - DNA, 25 bp, Homo sapien
tgggtcaatccacaccctcttagaa

SEQ ID NO: 414209 - DNA, 25 bp, Homo sapien
gctttgtagcgtctgccgtgtaaca

SEQ ID NO: 414210 - DNA, 25 bp, Homo sapien
cgctgcctgcgttgcaaactgggct

SEQ ID NO: 414211 - DNA, 25 bp, Homo sapien
taagctgtttgctcacgtgactgcc

SEQ ID NO: 414212 - DNA, 25 bp, Homo sapien
gcccctcgcagagagtgtatcatct

SEQ ID NO: 414213 - DNA, 25 bp, Homo sapien
cacacctcgggcagtcactaggaaa

SEQ ID NO: 414214 - DNA, 25 bp, Homo sapien
ccaggatgatacctgcgtcagtccc

SEQ ID NO: 414215 - DNA, 25 bp, Homo sapien
ccgcagccggaatcccgggccacat

SEQ ID NO: 414216 - DNA, 25 bp, Homo sapien
tcactaggaaaagggtcgccaactg

SEQ ID NO: 414217 - DNA, 25 bp, Homo sapien
agaccctcctttacagcacaccgag

SEQ ID NO: 414218 - DNA, 25 bp, Homo sapien
cctcctttacagcacaccgagggcc

SEQ ID NO: 414219 - DNA, 25 bp, Homo sapien
ctcagaccctcctttacagcacacc

SEQ ID NO: 414220 - DNA, 25 bp, Homo sapien
gaccctcctttacagcacaccgagg

SEQ ID NO: 414221 - DNA, 25 bp, Homo sapien
cagttttcctttggcgacattgcag

SEQ ID NO: 414222 - DNA, 25 bp, Homo sapien
catccgccaggattgaagcagctgg

SEQ ID NO: 414223 - DNA, 25 bp, Homo sapien
ccaagaaggagacacgcagagctct

SEQ ID NO: 414224 - DNA, 25 bp, Homo sapien
caatccgtccactggttgtgggaac

SEQ ID NO: 414225 - DNA, 25 bp, Homo sapien
cgctacgggcttttgcacatcagct

SEQ ID NO: 414226 - DNA, 25 bp, Homo sapien
tccttggaccgcaagcatcctggtt

SEQ ID NO: 414227 - DNA, 25 bp, Homo sapien
caagggcctagaactgcaaagcagc

SEQ ID NO: 414228 - DNA, 25 bp, Homo sapien
aaacacctgagtccacgtgcacagg

SEQ ID NO: 414229 - DNA, 25 bp, Homo sapien
tgatgcacggttagttctctgggaa

SEQ ID NO: 414230 - DNA, 25 bp, Homo sapien
ctttgcattgcattgtggacgagga

SEQ ID NO: 414231 - DNA, 25 bp, Homo sapien
ggtgcctggtactgagcatgatgca

SEQ ID NO: 414232 - DNA, 25 bp, Homo sapien
gggaatatcctttgcattgcattgt

SEQ ID NO: 414233 - DNA, 25 bp, Homo sapien
tgtagaatggtgtccagtctatagt

SEQ ID NO: 414234 - DNA, 25 bp, Homo sapien
tggtgttcatataggagcactggga

SEQ ID NO: 414235 - DNA, 25 bp, Homo sapien
gcatgtggattactgatgtagaatg

SEQ ID NO: 414236 - DNA, 25 bp, Homo sapien
tctatagtaagctggaagctcccca

SEQ ID NO: 414237 - DNA, 25 bp, Homo sapien
ataagcatagtgtctccagggagcc

SEQ ID NO: 414238 - DNA, 25 bp, Homo sapien
gggagccctgtcaaaacgcccattg

SEQ ID NO: 414239 - DNA, 25 bp, Homo sapien
caagtcactggcactggttagtcta

SEQ ID NO: 414240 - DNA, 25 bp, Homo sapien
taacatgaagtagggcactgacagc

SEQ ID NO: 414241 - DNA, 25 bp, Homo sapien
agagcagtccaatttaagtcagtca

SEQ ID NO: 414242 - DNA, 25 bp, Homo sapien
atctgagagcagtccaatttaagtc

SEQ ID NO: 414243 - DNA, 25 bp, Homo sapien
tggcaagcaccatctgagagcagtc

SEQ ID NO: 414244 - DNA, 25 bp, Homo sapien
gcagtccaatttaagtcagtcacca

SEQ ID NO: 414245 - DNA, 25 bp, Homo sapien
ccaccccggaattgcaacatttgtc

SEQ ID NO: 414246 - DNA, 25 bp, Homo sapien
agggtcaccctacacctctctttgg

SEQ ID NO: 414247 - DNA, 25 bp, Homo sapien
tgttaataatccactcatctggaag

SEQ ID NO: 414248 - DNA, 25 bp, Homo sapien
tgtctcctcgactgggttcggaagg

SEQ ID NO: 414249 - DNA, 25 bp, Homo sapien
gtttgaaccattcggaacatccagc

SEQ ID NO: 414250 - DNA, 25 bp, Homo sapien
tcattcctttgagcgcacttggccc

SEQ ID NO: 414251 - DNA, 25 bp, Homo sapien
gaacatccagcaagccagagatgct

SEQ ID NO: 414252 - DNA, 25 bp, Homo sapien
cttggccctgcgtctctatgaaagg

SEQ ID NO: 414253 - DNA, 25 bp, Homo sapien
cctgaactgcttctaagtgtgactg

SEQ ID NO: 414254 - DNA, 25 bp, Homo sapien
tagaacaaagctaagggctactcgc

SEQ ID NO: 414255 - DNA, 25 bp, Homo sapien
ctgtccaagaacaactaccgaaggg

SEQ ID NO: 414256 - DNA, 25 bp, Homo sapien
cccagatgagatgggatcaagcatc

SEQ ID NO: 414257 - DNA, 25 bp, Homo sapien
ggacacaagttgctccccaagcatg

SEQ ID NO: 414258 - DNA, 25 bp, Homo sapien
aaagagcggttgttatggtggacac

SEQ ID NO: 414259 - DNA, 25 bp, Homo sapien
catgtcctcaatgtgggaggccgca

SEQ ID NO: 414260 - DNA, 25 bp, Homo sapien
tgccagcggccacagtaactggctg

SEQ ID NO: 414261 - DNA, 25 bp, Homo sapien
gacgagccgccgtgcggccagttcg

SEQ ID NO: 414262 - DNA, 25 bp, Homo sapien
tgcacctgcgccgtgtgcaagttcc

SEQ ID NO: 414263 - DNA, 25 bp, Homo sapien
gccgtgcaggcgcaattctccaagt

SEQ ID NO: 414264 - DNA, 25 bp, Homo sapien
ctgtcgctggcgctggacgagccgc

SEQ ID NO: 414265 - DNA, 25 bp, Homo sapien
cgtatccagtgttttgtcgcagaga

SEQ ID NO: 414266 - DNA, 25 bp, Homo sapien
aaagaccagttaggcggtgcagacg

SEQ ID NO: 414267 - DNA, 25 bp, Homo sapien
gctgtatttaagactcgcgtatcca

SEQ ID NO: 414268 - DNA, 25 bp, Homo sapien
tcctatcaaaggaggctgccggaac

SEQ ID NO: 414269 - DNA, 25 bp, Homo sapien
gccgtcctgtcaagagcgctaatga

SEQ ID NO: 414270 - DNA, 25 bp, Homo sapien
taaaataggtaaccaggcgtctcac

SEQ ID NO: 414271 - DNA, 25 bp, Homo sapien
aggtcttccttctcgccgtcttgca

SEQ ID NO: 414272 - DNA, 25 bp, Homo sapien
tcattaacacgcaggagtaccggga

SEQ ID NO: 414273 - DNA, 25 bp, Homo sapien
caacgtgggaagtctctcggaggaa

SEQ ID NO: 414274 - DNA, 25 bp, Homo sapien
tcaagcttgggcttgttaggaaacc

SEQ ID NO: 414275 - DNA, 25 bp, Homo sapien
ggaaacctcccagtcgctaatcgag

SEQ ID NO: 414276 - DNA, 25 bp, Homo sapien
gctaatcgagggttaggcagctcca

SEQ ID NO: 414277 - DNA, 25 bp, Homo sapien
agcagtagagaggagactcgaaccc

SEQ ID NO: 414278 - DNA, 25 bp, Homo sapien
ccctgaggttggatactattagccc

SEQ ID NO: 414279 - DNA, 25 bp, Homo sapien
taagatcatactacagggaagcagt

SEQ ID NO: 414280 - DNA, 25 bp, Homo sapien
taataattgttactatgcaccaggc

SEQ ID NO: 414281 - DNA, 25 bp, Homo sapien
tgcttgcatcgaaaagggctcagaa

SEQ ID NO: 414282 - DNA, 25 bp, Homo sapien
gaggaccgacccactttctgtgcag

SEQ ID NO: 414283 - DNA, 25 bp, Homo sapien
tgtccatcgaacatttccgtaccgg

SEQ ID NO: 414284 - DNA, 25 bp, Homo sapien
acagtagcctgtagccttcggtgca

SEQ ID NO: 414285 - DNA, 25 bp, Homo sapien
ctgtgtctcccgatccagaatgtgg

SEQ ID NO: 414286 - DNA, 25 bp, Homo sapien
gctgatccaattcttcccgaaatga

SEQ ID NO: 414287 - DNA, 25 bp, Homo sapien
aattccttctggctgccgctgaaag

SEQ ID NO: 414288 - DNA, 25 bp, Homo sapien
gcataatgctacacgatgacttcct

SEQ ID NO: 414289 - DNA, 25 bp, Homo sapien
ggtggggcacggagtactgggcgct

SEQ ID NO: 414290 - DNA, 25 bp, Homo sapien
agtactgggcgctaagctctctcct

SEQ ID NO: 414291 - DNA, 25 bp, Homo sapien
gagtactgggcgctaagctctctcc

SEQ ID NO: 414292 - DNA, 25 bp, Homo sapien
gcacggagtactgggcgctaagctc

SEQ ID NO: 414293 - DNA, 25 bp, Homo sapien
gaaggctggtcaaacagttgcatct

SEQ ID NO: 414294 - DNA, 25 bp, Homo sapien
tgagtgaccacaaccctgtgcgcag

SEQ ID NO: 414295 - DNA, 25 bp, Homo sapien
taattaagttgttcagtagaaggct

SEQ ID NO: 414296 - DNA, 25 bp, Homo sapien
caggaatgtgggttaattcgccgac

SEQ ID NO: 414297 - DNA, 25 bp, Homo sapien
cgcagcacctggcaccgtcactgtg

SEQ ID NO: 414298 - DNA, 25 bp, Homo sapien
gcacctggcaccgtcactgtgctga

SEQ ID NO: 414299 - DNA, 25 bp, Homo sapien
cctggcaccgtcactgtgctgataa

SEQ ID NO: 414300 - DNA, 25 bp, Homo sapien
tggcaccgtcactgtgctgataatc

SEQ ID NO: 414301 - DNA, 25 bp, Homo sapien
gagccattatgcctgtttggaagcc

SEQ ID NO: 414302 - DNA, 25 bp, Homo sapien
tcagcagttatgaagcccgggtgcc

SEQ ID NO: 414303 - DNA, 25 bp, Homo sapien
tcccagaactgcagcttttggaaag

SEQ ID NO: 414304 - DNA, 25 bp, Homo sapien
tgtacatacttggtcttgcagagag

SEQ ID NO: 414305 - DNA, 25 bp, Homo sapien
tacatctttacacccagggaaacag

SEQ ID NO: 414306 - DNA, 25 bp, Homo sapien
gcaagcccacaagagttcggatgct

SEQ ID NO: 414307 - DNA, 25 bp, Homo sapien
caagagttcggatgctgccgctcgg

SEQ ID NO: 414308 - DNA, 25 bp, Homo sapien
cctccatgcgggcaagcccacaaga

SEQ ID NO: 414309 - DNA, 25 bp, Homo sapien
tggcataggggacatgaactttaca

SEQ ID NO: 414310 - DNA, 25 bp, Homo sapien
gctgatattccttggcataggggac

SEQ ID NO: 414311 - DNA, 25 bp, Homo sapien
ctgtgagaaggtgttgacgccaaag

SEQ ID NO: 414312 - DNA, 25 bp, Homo sapien
gcccactgtgagaaggtgttgacgc

SEQ ID NO: 414313 - DNA, 25 bp, Homo sapien
ggaacaaaggcaggttcgcttgtaa

SEQ ID NO: 414314 - DNA, 25 bp, Homo sapien
tgcattttcaacacggcagactggg

SEQ ID NO: 414315 - DNA, 25 bp, Homo sapien
acaaaggcaggttcgcttgtaaatg

SEQ ID NO: 414316 - DNA, 25 bp, Homo sapien
cagactggggtaggatctatggcca

SEQ ID NO: 414317 - DNA, 25 bp, Homo sapien
cctctgagaagagatgagtgaccca

SEQ ID NO: 414318 - DNA, 25 bp, Homo sapien
cctctgtgcaatgcagacggctgtg

SEQ ID NO: 414319 - DNA, 25 bp, Homo sapien
tcctcctctggggtatcagaactag

SEQ ID NO: 414320 - DNA, 25 bp, Homo sapien
gagtgacccaaaaggataagctggc

SEQ ID NO: 414321 - DNA, 25 bp, Homo sapien
cttgaatgtggtggctctggggaca

SEQ ID NO: 414322 - DNA, 25 bp, Homo sapien
tggctctggggacactctgggccca

SEQ ID NO: 414323 - DNA, 25 bp, Homo sapien
aatgtggtggctctggggacactct

SEQ ID NO: 414324 - DNA, 25 bp, Homo sapien
ctctggggacactctgggcccacat

SEQ ID NO: 414325 - DNA, 25 bp, Homo sapien
tgcagcctgtgtactccggtctggt

SEQ ID NO: 414326 - DNA, 25 bp, Homo sapien
gcacaggtcaggccccgggtgtcct

SEQ ID NO: 414327 - DNA, 25 bp, Homo sapien
tactccggtctggtgggatagcaag

SEQ ID NO: 414328 - DNA, 25 bp, Homo sapien
gggatagcaaggtcctgctgtgcac

SEQ ID NO: 414329 - DNA, 25 bp, Homo sapien
cattctgacacctttcaatgatttg

SEQ ID NO: 414330 - DNA, 25 bp, Homo sapien
ccccattctgacacctttcaatgat

SEQ ID NO: 414331 - DNA, 25 bp, Homo sapien
tcaaagtagctctccacggctggaa

SEQ ID NO: 414332 - DNA, 25 bp, Homo sapien
tctccacggctggaataattatctt

SEQ ID NO: 414333 - DNA, 25 bp, Homo sapien
tactccctgggagtatcacactgcc

SEQ ID NO: 414334 - DNA, 25 bp, Homo sapien
caccacggattgcacgaccagatgt

SEQ ID NO: 414335 - DNA, 25 bp, Homo sapien
ggcatcgctcgaattcactactggg

SEQ ID NO: 414336 - DNA, 25 bp, Homo sapien
gaccagatgtcccagctgttatcag

SEQ ID NO: 414337 - DNA, 25 bp, Homo sapien
aaataggcttgtcttgccacgtatc

SEQ ID NO: 414338 - DNA, 25 bp, Homo sapien
tatccctgtcaacgctattgttctt

SEQ ID NO: 414339 - DNA, 25 bp, Homo sapien
cagcaggaaagtccaggtgaaatag

SEQ ID NO: 414340 - DNA, 25 bp, Homo sapien
ccctctcagtttagtagctggacca

SEQ ID NO: 414341 - DNA, 25 bp, Homo sapien
agcctggtctggtcccacgatcctt

SEQ ID NO: 414342 - DNA, 25 bp, Homo sapien
ttccacaaagcctggtctggtccca

SEQ ID NO: 414343 - DNA, 25 bp, Homo sapien
tgcacccttggggcacagttcagcc

SEQ ID NO: 414344 - DNA, 25 bp, Homo sapien
cttttgttccctgccatcgtcctct

SEQ ID NO: 414345 - DNA, 25 bp, Homo sapien
ctgggctgaagcacgcagcgtgtcc

SEQ ID NO: 414346 - DNA, 25 bp, Homo sapien
agcgtgtccgttgctgctccactga

SEQ ID NO: 414347 - DNA, 25 bp, Homo sapien
aatgggagactggttaaaatcagga

SEQ ID NO: 414348 - DNA, 25 bp, Homo sapien
gatggttcgtttccaagaagctgag

SEQ ID NO: 414349 - DNA, 25 bp, Homo sapien
tgtttcgtgcaaacaattgctggtt

SEQ ID NO: 414350 - DNA, 25 bp, Homo sapien
gaggcccgtggtgtctgtatcgaac

SEQ ID NO: 414351 - DNA, 25 bp, Homo sapien
tgagaaatctccaaccgggaaagag

SEQ ID NO: 414352 - DNA, 25 bp, Homo sapien
tttctagcataacaaggaggcccgt

SEQ ID NO: 414353 - DNA, 25 bp, Homo sapien
aagatggtgttactgttgccgaaca

SEQ ID NO: 414354 - DNA, 25 bp, Homo sapien
caagatggtgttactgttgccgaac

SEQ ID NO: 414355 - DNA, 25 bp, Homo sapien
agatggtgttactgttgccgaacat

SEQ ID NO: 414356 - DNA, 25 bp, Homo sapien
gaagccatcattcctgattaaagca

SEQ ID NO: 414357 - DNA, 25 bp, Homo sapien
cactgtcaatttggccgcggcccgg

SEQ ID NO: 414358 - DNA, 25 bp, Homo sapien
agtcgttgctctgtgacaaagttca

SEQ ID NO: 414359 - DNA, 25 bp, Homo sapien
ctccagctcattccaacagaattgg

SEQ ID NO: 414360 - DNA, 25 bp, Homo sapien
gaacccagaatgtgaagtgccactt

SEQ ID NO: 414361 - DNA, 25 bp, Homo sapien
cactgctctgatgctaaccgtggca

SEQ ID NO: 414362 - DNA, 25 bp, Homo sapien
cattagcctactttgggtggaccct

SEQ ID NO: 414363 - DNA, 25 bp, Homo sapien
gagattgtccgtccttccagcagaa

SEQ ID NO: 414364 - DNA, 25 bp, Homo sapien
ttggctattttgatcctgactccac

SEQ ID NO: 414365 - DNA, 25 bp, Homo sapien
ctgtatacggattcttactttttct

SEQ ID NO: 414366 - DNA, 25 bp, Homo sapien
tgagctgctccggtcatcatcacat

SEQ ID NO: 414367 - DNA, 25 bp, Homo sapien
ttgtttcctgtatacggattcttac

SEQ ID NO: 414368 - DNA, 25 bp, Homo sapien
agggtgtccgcgcttgagctcccca

SEQ ID NO: 414369 - DNA, 25 bp, Homo sapien
gtgttccaagggtgtccgcgcttga

SEQ ID NO: 414370 - DNA, 25 bp, Homo sapien
tgttccaagggtgtccgcgcttgag

SEQ ID NO: 414371 - DNA, 25 bp, Homo sapien
ccaagggtgtccgcgcttgagctcc

SEQ ID NO: 414372 - DNA, 25 bp, Homo sapien
ccaggaagggtgattgcagggcgag

SEQ ID NO: 414373 - DNA, 25 bp, Homo sapien
gcagtagggagaggtcttgagatca

SEQ ID NO: 414374 - DNA, 25 bp, Homo sapien
aatggactgcgaccctcaagggaag

SEQ ID NO: 414375 - DNA, 25 bp, Homo sapien
aagatgttccataagctcggcgcga

SEQ ID NO: 414376 - DNA, 25 bp, Homo sapien
tgccctcctctgctcccttggccaa

SEQ ID NO: 414377 - DNA, 25 bp, Homo sapien
ctgccctcctctgctcccttggcca

SEQ ID NO: 414378 - DNA, 25 bp, Homo sapien
gccctcctctgctcccttggccaac

SEQ ID NO: 414379 - DNA, 25 bp, Homo sapien
cctcctctgctcccttggccaacat

SEQ ID NO: 414380 - DNA, 25 bp, Homo sapien
tgggatttacctcgtgacagctgcc

SEQ ID NO: 414381 - DNA, 25 bp, Homo sapien
gacagctgccttacagccccatgaa

SEQ ID NO: 414382 - DNA, 25 bp, Homo sapien
catctccagggattgcagggtagga

SEQ ID NO: 414383 - DNA, 25 bp, Homo sapien
catgaaaaggcactttgggctgcgg

SEQ ID NO: 414384 - DNA, 25 bp, Homo sapien
atctcgtggttctgcaaatacacgc

SEQ ID NO: 414385 - DNA, 25 bp, Homo sapien
tctttgccgttatctcgtggttctg

SEQ ID NO: 414386 - DNA, 25 bp, Homo sapien
cagcgcccacgggtccagttggaga

SEQ ID NO: 414387 - DNA, 25 bp, Homo sapien
tggttctgcaaatacacgctcaagg

SEQ ID NO: 414388 - DNA, 25 bp, Homo sapien
caggagtgataattccggtgtgtga

SEQ ID NO: 414389 - DNA, 25 bp, Homo sapien
gaaccataatttggtgtgtgaccct

SEQ ID NO: 414390 - DNA, 25 bp, Homo sapien
ccaggaaccataatttggtgtgtga

SEQ ID NO: 414391 - DNA, 25 bp, Homo sapien
gggtaggattgagcgggaccaggag

SEQ ID NO: 414392 - DNA, 25 bp, Homo sapien
gctgctgctctagctgttgtcccat

SEQ ID NO: 414393 - DNA, 25 bp, Homo sapien
aggagtgggtggctgctgctctagc

SEQ ID NO: 414394 - DNA, 25 bp, Homo sapien
gtggctgctgctctagctgttgtcc

SEQ ID NO: 414395 - DNA, 25 bp, Homo sapien
caggagtgggtggctgctgctctag

SEQ ID NO: 414396 - DNA, 25 bp, Homo sapien
ctgggcctgactcttcccgtgctgg

SEQ ID NO: 414397 - DNA, 25 bp, Homo sapien
tgctgggtgagctgagaatgatcca

SEQ ID NO: 414398 - DNA, 25 bp, Homo sapien
ccaggcttatggctgaaaggatccc

SEQ ID NO: 414399 - DNA, 25 bp, Homo sapien
aggcttatggctgaaaggatcccag

SEQ ID NO: 414400 - DNA, 25 bp, Homo sapien
acaaggccacagatggccgccttca

SEQ ID NO: 414401 - DNA, 25 bp, Homo sapien
ctgtggagttaacacaaggccacag

SEQ ID NO: 414402 - DNA, 25 bp, Homo sapien
cagttttccttgagaaacagcgcca

SEQ ID NO: 414403 - DNA, 25 bp, Homo sapien
gccagttttccttgagaaacagcgc

SEQ ID NO: 414404 - DNA, 25 bp, Homo sapien
ccagttttccttgagaaacagcgcc

SEQ ID NO: 414405 - DNA, 25 bp, Homo sapien
agttttccttgagaaacagcgccac

SEQ ID NO: 414406 - DNA, 25 bp, Homo sapien
caggtcataataaccataagagagc

SEQ ID NO: 414407 - DNA, 25 bp, Homo sapien
tcaggtcataataaccataagagag

SEQ ID NO: 414408 - DNA, 25 bp, Homo sapien
ttcaggtcataataaccataagaga

SEQ ID NO: 414409 - DNA, 25 bp, Homo sapien
aggtcataataaccataagagagct

SEQ ID NO: 414410 - DNA, 25 bp, Homo sapien
tgcgtatggacatggagccaagctg

SEQ ID NO: 414411 - DNA, 25 bp, Homo sapien
ttctccggcaggagcgatttgccct

SEQ ID NO: 414412 - DNA, 25 bp, Homo sapien
cacttgtgagtctgccgctgggtta

SEQ ID NO: 414413 - DNA, 25 bp, Homo sapien
tctgggatgcggtcacacacttgtg

SEQ ID NO: 414414 - DNA, 25 bp, Homo sapien
gaaccctttgtcttcgcagctgtga

SEQ ID NO: 414415 - DNA, 25 bp, Homo sapien
gatccattctcgcagtctaaatcgt

SEQ ID NO: 414416 - DNA, 25 bp, Homo sapien
ctgtgatggcgctctggtggctttt

SEQ ID NO: 414417 - DNA, 25 bp, Homo sapien
tctgtctcgtctgctcgctgttgcc

SEQ ID NO: 414418 - DNA, 25 bp, Homo sapien
aggaaacctctgcaatgcccttagc

SEQ ID NO: 414419 - DNA, 25 bp, Homo sapien
tgcaatgcccttagcaattccacct

SEQ ID NO: 414420 - DNA, 25 bp, Homo sapien
ctggacatatggaagcagccgcctc

SEQ ID NO: 414421 - DNA, 25 bp, Homo sapien
gcagccgcctccaggaaacctctgc

SEQ ID NO: 414422 - DNA, 25 bp, Homo sapien
aatcccgccggcgagccgaacagtt

SEQ ID NO: 414423 - DNA, 25 bp, Homo sapien
cgccgcttctgtccgagaggccgcc

SEQ ID NO: 414424 - DNA, 25 bp, Homo sapien
ccgcactaaagacgcttcttcccgg

SEQ ID NO: 414425 - DNA, 25 bp, Homo sapien
gcgcagcccgcggaccaccacccgg

SEQ ID NO: 414426 - DNA, 25 bp, Homo sapien
ccctgtctggtaaggatacaactcc

SEQ ID NO: 414427 - DNA, 25 bp, Homo sapien
tgagaaggagatgcaaatcgctctt

SEQ ID NO: 414428 - DNA, 25 bp, Homo sapien
ttgccaaaggcacgaacagttaatg

SEQ ID NO: 414429 - DNA, 25 bp, Homo sapien
cactgtttagttggcccaggaccct

SEQ ID NO: 414430 - DNA, 25 bp, Homo sapien
aaggaaaatttgcagcgggctgagc

SEQ ID NO: 414431 - DNA, 25 bp, Homo sapien
acagtccaagggcatcggagaagcc

SEQ ID NO: 414432 - DNA, 25 bp, Homo sapien
tccagtgaaccatggagggacagtc

SEQ ID NO: 414433 - DNA, 25 bp, Homo sapien
caaaggcctgagtcctaaccacagg

SEQ ID NO: 414434 - DNA, 25 bp, Homo sapien
gattccgagtcgagtgtgtcagctg

SEQ ID NO: 414435 - DNA, 25 bp, Homo sapien
tttcagtcggtgagccttgggcacc

SEQ ID NO: 414436 - DNA, 25 bp, Homo sapien
gagtgctctctatgctgattccgag

SEQ ID NO: 414437 - DNA, 25 bp, Homo sapien
gaagagccatcgaagtttcagtcgg

SEQ ID NO: 414438 - DNA, 25 bp, Homo sapien
gactgggactcagggatccaactcc

SEQ ID NO: 414439 - DNA, 25 bp, Homo sapien
tgtacaagaatgaacactcaggtgg

SEQ ID NO: 414440 - DNA, 25 bp, Homo sapien
tctccaagatcctaggaacccagga

SEQ ID NO: 414441 - DNA, 25 bp, Homo sapien
tgtgaccctaggcatttgacttagc

SEQ ID NO: 414442 - DNA, 25 bp, Homo sapien
cggcatctctaggattgcaccaact

SEQ ID NO: 414443 - DNA, 25 bp, Homo sapien
tgcacctgccggcatctctaggatt

SEQ ID NO: 414444 - DNA, 25 bp, Homo sapien
tgtgccacagattggtgcacctgcc

SEQ ID NO: 414445 - DNA, 25 bp, Homo sapien
cttccattggagagcgtacgtgtgc

SEQ ID NO: 414446 - DNA, 25 bp, Homo sapien
ttcacttccctctgcttgactttac

SEQ ID NO: 414447 - DNA, 25 bp, Homo sapien
ggcgcattcacttccctctgcttga

SEQ ID NO: 414448 - DNA, 25 bp, Homo sapien
tagggcgcattcacttccctctgct

SEQ ID NO: 414449 - DNA, 25 bp, Homo sapien
ctagggcgcattcacttccctctgc

SEQ ID NO: 414450 - DNA, 25 bp, Homo sapien
ggcgatgccgtgcattacccaagac

SEQ ID NO: 414451 - DNA, 25 bp, Homo sapien
gacagctccggatcttcccgtctaa

SEQ ID NO: 414452 - DNA, 25 bp, Homo sapien
tagcgtcagacatcaggcgatgccg

SEQ ID NO: 414453 - DNA, 25 bp, Homo sapien
gtgcattacccaagacactggacag

SEQ ID NO: 414454 - DNA, 25 bp, Homo sapien
gtgcggagagcggacttcaagagag

SEQ ID NO: 414455 - DNA, 25 bp, Homo sapien
tcaagagagggcgtgccggtgctcc

SEQ ID NO: 414456 - DNA, 25 bp, Homo sapien
agcggacttcaagagagggcgtgcc

SEQ ID NO: 414457 - DNA, 25 bp, Homo sapien
cgtgccggtgctccggacaaaacct

SEQ ID NO: 414458 - DNA, 25 bp, Homo sapien
gacggcgcctttcaaagcttgcgag

SEQ ID NO: 414459 - DNA, 25 bp, Homo sapien
tctcagtcctgggttggtgttgtag

SEQ ID NO: 414460 - DNA, 25 bp, Homo sapien
tcaaagcttgcgaggatcccttcct

SEQ ID NO: 414461 - DNA, 25 bp, Homo sapien
tatttatttgacttgacggcgcctt

SEQ ID NO: 414462 - DNA, 25 bp, Homo sapien
gaacagaattcaacacctaacagga

SEQ ID NO: 414463 - DNA, 25 bp, Homo sapien
acaggatcctctaccaggagagaaa

SEQ ID NO: 414464 - DNA, 25 bp, Homo sapien
acagaattcaacacctaacaggatc

SEQ ID NO: 414465 - DNA, 25 bp, Homo sapien
gtaggaacagaattcaacacctaac

SEQ ID NO: 414466 - DNA, 25 bp, Homo sapien
cggacttttggattctttgcagtac

SEQ ID NO: 414467 - DNA, 25 bp, Homo sapien
tcaatgctacacagagcacggactt

SEQ ID NO: 414468 - DNA, 25 bp, Homo sapien
ctcaagggtggtcagctcaatgcta

SEQ ID NO: 414469 - DNA, 25 bp, Homo sapien
cagagcacggacttttggattcttt

SEQ ID NO: 414470 - DNA, 25 bp, Homo sapien
tataacaacgaagtatttgattcct

SEQ ID NO: 414471 - DNA, 25 bp, Homo sapien
ttataacaacgaagtatttgattcc

SEQ ID NO: 414472 - DNA, 25 bp, Homo sapien
gttataacaacgaagtatttgattc

SEQ ID NO: 414473 - DNA, 25 bp, Homo sapien
tgttataacaacgaagtatttgatt

SEQ ID NO: 414474 - DNA, 25 bp, Homo sapien
tccaaagtcgctgggtctgcgcagg

SEQ ID NO: 414475 - DNA, 25 bp, Homo sapien
aagactctagggtcagcaagcgccc

SEQ ID NO: 414476 - DNA, 25 bp, Homo sapien
tgtttactgataaagcccgacgacc

SEQ ID NO: 414477 - DNA, 25 bp, Homo sapien
aataatcattcgaaccatgggctcg

SEQ ID NO: 414478 - DNA, 25 bp, Homo sapien
cctcacttcgcatcatggcctgaag

SEQ ID NO: 414479 - DNA, 25 bp, Homo sapien
ttcttgtgaaacttaacgtctgtgt

SEQ ID NO: 414480 - DNA, 25 bp, Homo sapien
tgtgttgttgttaatggtggttagc

SEQ ID NO: 414481 - DNA, 25 bp, Homo sapien
tgaggcatatccaaacctcacttcg

SEQ ID NO: 414482 - DNA, 25 bp, Homo sapien
aatgttaataggacattagctcaag

SEQ ID NO: 414483 - DNA, 25 bp, Homo sapien
taactcttataccagtaaatagaaa

SEQ ID NO: 414484 - DNA, 25 bp, Homo sapien
tagaaagtatttgacacttacattt

SEQ ID NO: 414485 - DNA, 25 bp, Homo sapien
ggaagggtgtatgctaaaatgttaa

SEQ ID NO: 414486 - DNA, 25 bp, Homo sapien
tattctggcgatagctgactgatac

SEQ ID NO: 414487 - DNA, 25 bp, Homo sapien
cagatagcagcaataactgtcccga

SEQ ID NO: 414488 - DNA, 25 bp, Homo sapien
tgacccaccggcttgttagacatta

SEQ ID NO: 414489 - DNA, 25 bp, Homo sapien
ggcaattaccccagacttggcatgt

SEQ ID NO: 414490 - DNA, 25 bp, Homo sapien
tgagaacccactctctgccggagaa

SEQ ID NO: 414491 - DNA, 25 bp, Homo sapien
tgtgatgctcggcacatcctgcctg

SEQ ID NO: 414492 - DNA, 25 bp, Homo sapien
tcattgaggagacccaggaatctca

SEQ ID NO: 414493 - DNA, 25 bp, Homo sapien
ccgcctggcttctggagtgcttcaa

SEQ ID NO: 414494 - DNA, 25 bp, Homo sapien
caactcaatcatgctgtccaggact

SEQ ID NO: 414495 - DNA, 25 bp, Homo sapien
ggccctgtgttcaccactgggaaaa

SEQ ID NO: 414496 - DNA, 25 bp, Homo sapien
gcgatgggagcatatcatgactgcc

SEQ ID NO: 414497 - DNA, 25 bp, Homo sapien
actgggaaaacgtacttcagactgg

SEQ ID NO: 414498 - DNA, 25 bp, Homo sapien
gagcctgtggagatagagcctgttt

SEQ ID NO: 414499 - DNA, 25 bp, Homo sapien
cagggttgagcatcctgaaggagcc

SEQ ID NO: 414500 - DNA, 25 bp, Homo sapien
cctgtgcttggtgttccagagccca

SEQ ID NO: 414501 - DNA, 25 bp, Homo sapien
gcaatgggcccaaaagtctaggagt

SEQ ID NO: 414502 - DNA, 25 bp, Homo sapien
gaaagtcaagctacaggtcacatcc

SEQ ID NO: 414503 - DNA, 25 bp, Homo sapien
cccagccaagcttatctgttttcaa

SEQ ID NO: 414504 - DNA, 25 bp, Homo sapien
cacggactggattgagaacctgtct

SEQ ID NO: 414505 - DNA, 25 bp, Homo sapien
taggcagataacagcgggtccctgg

SEQ ID NO: 414506 - DNA, 25 bp, Homo sapien
agttaaggaatgcagccgggcgcag

SEQ ID NO: 414507 - DNA, 25 bp, Homo sapien
ggcttgaagatggaagcagggagca

SEQ ID NO: 414508 - DNA, 25 bp, Homo sapien
tagggtggtttgaagatggcttgaa

SEQ ID NO: 414509 - DNA, 25 bp, Homo sapien
gaagcagagattagggtggtttgaa

SEQ ID NO: 414510 - DNA, 25 bp, Homo sapien
cctttgctgcgctagctttatgacg

SEQ ID NO: 414511 - DNA, 25 bp, Homo sapien
tcaaacgacatggtgcaggctcggg

SEQ ID NO: 414512 - DNA, 25 bp, Homo sapien
tatgacgcatcttggaagaacaggg

SEQ ID NO: 414513 - DNA, 25 bp, Homo sapien
taaaggacttcctactcgtgcaccg

SEQ ID NO: 414514 - DNA, 25 bp, Homo sapien
tttgctgttccacgcgtcgcttggg

SEQ ID NO: 414515 - DNA, 25 bp, Homo sapien
gccccttggtgcttcctttctgaac

SEQ ID NO: 414516 - DNA, 25 bp, Homo sapien
tcctttctgaactgaatgcttagac

SEQ ID NO: 414517 - DNA, 25 bp, Homo sapien
cttttgctgttccacgcgtcgcttg

SEQ ID NO: 414518 - DNA, 25 bp, Homo sapien
ggtcaaaagccttatcttgattatg

SEQ ID NO: 414519 - DNA, 25 bp, Homo sapien
ttggtcaaaagccttatcttgatta

SEQ ID NO: 414520 - DNA, 25 bp, Homo sapien
aaagccttatcttgattatgttttc

SEQ ID NO: 414521 - DNA, 25 bp, Homo sapien
caaaagccttatcttgattatgttt

SEQ ID NO: 414522 - DNA, 25 bp, Homo sapien
aggagttgtggcagtttcttctagg

SEQ ID NO: 414523 - DNA, 25 bp, Homo sapien
taggtccccgaaggctccctgtgaa

SEQ ID NO: 414524 - DNA, 25 bp, Homo sapien
cttctaggtccccgaaggctccctg

SEQ ID NO: 414525 - DNA, 25 bp, Homo sapien
ggagttgtggcagtttcttctaggt

SEQ ID NO: 414526 - DNA, 25 bp, Homo sapien
cccaggcgcctcttttctttttgtg

SEQ ID NO: 414527 - DNA, 25 bp, Homo sapien
caggtggaaaggctgccccaggcgc

SEQ ID NO: 414528 - DNA, 25 bp, Homo sapien
ctgcaggtggaaaggctgccccagg

SEQ ID NO: 414529 - DNA, 25 bp, Homo sapien
aaggctgccccaggcgcctcttttc

SEQ ID NO: 414530 - DNA, 25 bp, Homo sapien
agtagggccatctttgtagccaaaa

SEQ ID NO: 414531 - DNA, 25 bp, Homo sapien
cagtagggccatctttgtagccaaa

SEQ ID NO: 414532 - DNA, 25 bp, Homo sapien
tggccacatacgcaccctctgtgta

SEQ ID NO: 414533 - DNA, 25 bp, Homo sapien
gtatgccaaaattccgactcccaga

SEQ ID NO: 414534 - DNA, 25 bp, Homo sapien
ttatgagagacccagcgcccagggc

SEQ ID NO: 414535 - DNA, 25 bp, Homo sapien
ggcttatgagagacccagcgcccag

SEQ ID NO: 414536 - DNA, 25 bp, Homo sapien
catttcggtcaaactagaagcaggt

SEQ ID NO: 414537 - DNA, 25 bp, Homo sapien
tagagtctagggtccagttgtctcc

SEQ ID NO: 414538 - DNA, 25 bp, Homo sapien
gctgaaactataggaggctcaagca

SEQ ID NO: 414539 - DNA, 25 bp, Homo sapien
actttggtatgggacaatgacagcc

SEQ ID NO: 414540 - DNA, 25 bp, Homo sapien
agatttgcagtagtggaggctacca

SEQ ID NO: 414541 - DNA, 25 bp, Homo sapien
gagatttgcagtagtggaggctacc

SEQ ID NO: 414542 - DNA, 25 bp, Homo sapien
caagtcatcctgatctccgtgggaa

SEQ ID NO: 414543 - DNA, 25 bp, Homo sapien
gagggacttgcccattttactagga

SEQ ID NO: 414544 - DNA, 25 bp, Homo sapien
cattttcgttgctgtcggtgctggc

SEQ ID NO: 414545 - DNA, 25 bp, Homo sapien
taatgtaagcataccaggtgagggt

SEQ ID NO: 414546 - DNA, 25 bp, Homo sapien
cattgggccttctgaggacacggtc

SEQ ID NO: 414547 - DNA, 25 bp, Homo sapien
gaacatccgccaaaggtctctgagt

SEQ ID NO: 414548 - DNA, 25 bp, Homo sapien
tatggctaagcctaaagcctgcggg

SEQ ID NO: 414549 - DNA, 25 bp, Homo sapien
ggcagagtcaacacccagagctgtg

SEQ ID NO: 414550 - DNA, 25 bp, Homo sapien
gatgacgtctgggactctgtgtcca

SEQ ID NO: 414551 - DNA, 25 bp, Homo sapien
aaaggagcaagaagatgttctccaa

SEQ ID NO: 414552 - DNA, 25 bp, Homo sapien
tttgaaccaaagcatgggcctagcc

SEQ ID NO: 414553 - DNA, 25 bp, Homo sapien
tgtgtccattatctcgtttccggaa

SEQ ID NO: 414554 - DNA, 25 bp, Homo sapien
agatcaagccatcggagctgctaga

SEQ ID NO: 414555 - DNA, 25 bp, Homo sapien
ctggaagagatcaagccatcggagc

SEQ ID NO: 414556 - DNA, 25 bp, Homo sapien
aagagatcaagccatcggagctgct

SEQ ID NO: 414557 - DNA, 25 bp, Homo sapien
caagccatcggagctgctagagttc

SEQ ID NO: 414558 - DNA, 25 bp, Homo sapien
gacctggtcgtcgtcttgactttgg

SEQ ID NO: 414559 - DNA, 25 bp, Homo sapien
aatgattttacggagatatcccagg

SEQ ID NO: 414560 - DNA, 25 bp, Homo sapien
tcattattggttgggctgagcagtc

SEQ ID NO: 414561 - DNA, 25 bp, Homo sapien
tatcccaggaaaattaaggcttctc

SEQ ID NO: 414562 - DNA, 25 bp, Homo sapien
cttagaccgttcaggaaatcggaga

SEQ ID NO: 414563 - DNA, 25 bp, Homo sapien
tagaccgttcaggaaatcggagaca

SEQ ID NO: 414564 - DNA, 25 bp, Homo sapien
ccgttcaggaaatcggagacagaag

SEQ ID NO: 414565 - DNA, 25 bp, Homo sapien
tcaggaaatcggagacagaagagct

SEQ ID NO: 414566 - DNA, 25 bp, Homo sapien
acgagaaccatttgaacctgggaga

SEQ ID NO: 414567 - DNA, 25 bp, Homo sapien
caccactacactccagcctgggtga

SEQ ID NO: 414568 - DNA, 25 bp, Homo sapien
cagaggttgcagtgagctgagattg

SEQ ID NO: 414569 - DNA, 25 bp, Homo sapien
ctgggtgacaagagcaaaactccat

SEQ ID NO: 414570 - DNA, 25 bp, Homo sapien
tgtagatgattaccaaagattctgc

SEQ ID NO: 414571 - DNA, 25 bp, Homo sapien
tctaagagtggatactaacattatc

SEQ ID NO: 414572 - DNA, 25 bp, Homo sapien
ccttagtaagggaatcacatgcatt

SEQ ID NO: 414573 - DNA, 25 bp, Homo sapien
aaagattctgccctaactcataata

SEQ ID NO: 414574 - DNA, 25 bp, Homo sapien
gtgatttgctcacaactaaaaaaca

SEQ ID NO: 414575 - DNA, 25 bp, Homo sapien
taagtgatttgctcacaactaaaaa

SEQ ID NO: 414576 - DNA, 25 bp, Homo sapien
agtgatttgctcacaactaaaaaac

SEQ ID NO: 414577 - DNA, 25 bp, Homo sapien
gatttgctcacaactaaaaaacaaa

SEQ ID NO: 414578 - DNA, 25 bp, Homo sapien
ctgagctccagcatttgaaggtgca

SEQ ID NO: 414579 - DNA, 25 bp, Homo sapien
gctccagcatttgaaggtgcagtga

SEQ ID NO: 414580 - DNA, 25 bp, Homo sapien
cccagctgcttggaaagcggaggta

SEQ ID NO: 414581 - DNA, 25 bp, Homo sapien
gctgcttggaaagcggaggtaagag

SEQ ID NO: 414582 - DNA, 25 bp, Homo sapien
tccagtcagtcttcagggaaacctt

SEQ ID NO: 414583 - DNA, 25 bp, Homo sapien
actgcatctttaattgggtatactt

SEQ ID NO: 414584 - DNA, 25 bp, Homo sapien
gcatctttaattgggtatacttgaa

SEQ ID NO: 414585 - DNA, 25 bp, Homo sapien
ccagtcagtcttcagggaaaccttc

SEQ ID NO: 414586 - DNA, 25 bp, Homo sapien
tgaggtggaaacaaataattagtct

SEQ ID NO: 414587 - DNA, 25 bp, Homo sapien
tagaagcatgacagagcttactaac

SEQ ID NO: 414588 - DNA, 25 bp, Homo sapien
ttgctagaagcatgacagagcttac

SEQ ID NO: 414589 - DNA, 25 bp, Homo sapien
taattagtcttacaatttgctagaa

SEQ ID NO: 414590 - DNA, 25 bp, Homo sapien
tatcttgacaaaggcacagcgctcc

SEQ ID NO: 414591 - DNA, 25 bp, Homo sapien
tgtcaaaagataaccccagtggata

SEQ ID NO: 414592 - DNA, 25 bp, Homo sapien
gcaaaagtagcaataagggcccaga

SEQ ID NO: 414593 - DNA, 25 bp, Homo sapien
tacattagagccgtggacactacca

SEQ ID NO: 414594 - DNA, 25 bp, Homo sapien
taatgtacaatctactccatttggc

SEQ ID NO: 414595 - DNA, 25 bp, Homo sapien
cctatctacaaacagaatataacaa

SEQ ID NO: 414596 - DNA, 25 bp, Homo sapien
ggcaatgtgtactgagagataaaaa

SEQ ID NO: 414597 - DNA, 25 bp, Homo sapien
gataaaaaacctatctacaaacaga

SEQ ID NO: 414598 - DNA, 25 bp, Homo sapien
ggtccatagctcttcggttcttcca

SEQ ID NO: 414599 - DNA, 25 bp, Homo sapien
tccatagctcttcggttcttccaaa

SEQ ID NO: 414600 - DNA, 25 bp, Homo sapien
tcaggtccatagctcttcggttctt

SEQ ID NO: 414601 - DNA, 25 bp, Homo sapien
caggtccatagctcttcggttcttc

SEQ ID NO: 414602 - DNA, 25 bp, Homo sapien
gagaccattctcatagtgacaggca

SEQ ID NO: 414603 - DNA, 25 bp, Homo sapien
tataaatgagaggtgcacagtatcc

SEQ ID NO: 414604 - DNA, 25 bp, Homo sapien
gaaaagtggctacgtaccaagcacc

SEQ ID NO: 414605 - DNA, 25 bp, Homo sapien
gatgggacactccagggccatgagt

SEQ ID NO: 414606 - DNA, 25 bp, Homo sapien
caaggaccctgagatagctataaat

SEQ ID NO: 414607 - DNA, 25 bp, Homo sapien
taaagacccaatcaagcttctagag

SEQ ID NO: 414608 - DNA, 25 bp, Homo sapien
gatccagtcccaacaaattgtatgc

SEQ ID NO: 414609 - DNA, 25 bp, Homo sapien
catttaaaggactagcaaagatcca

SEQ ID NO: 414610 - DNA, 25 bp, Homo sapien
acagctagtcccggataaacatcag

SEQ ID NO: 414611 - DNA, 25 bp, Homo sapien
gctagtcccggataaacatcagtat

SEQ ID NO: 414612 - DNA, 25 bp, Homo sapien
aaacacagctagtcccggataaaca

SEQ ID NO: 414613 - DNA, 25 bp, Homo sapien
aacacagctagtcccggataaacat

SEQ ID NO: 414614 - DNA, 25 bp, Homo sapien
gaagcagtaacttgctcctttgcct

SEQ ID NO: 414615 - DNA, 25 bp, Homo sapien
gctgaggaagcagtaacttgctcct

SEQ ID NO: 414616 - DNA, 25 bp, Homo sapien
tcttttagtcaaagtaattgctggt

SEQ ID NO: 414617 - DNA, 25 bp, Homo sapien
ttgctggttctagctacatcaaaac

SEQ ID NO: 414618 - DNA, 25 bp, Homo sapien
tcaatccaggagttttatcatgcaa

SEQ ID NO: 414619 - DNA, 25 bp, Homo sapien
cctcacctgtaaaacgggcattgta

SEQ ID NO: 414620 - DNA, 25 bp, Homo sapien
gcagcatggttaagagctccaagtt

SEQ ID NO: 414621 - DNA, 25 bp, Homo sapien
gcagctactgacaggcacaatcata

SEQ ID NO: 414622 - DNA, 25 bp, Homo sapien
agtaaatgggcctctagcataaaat

SEQ ID NO: 414623 - DNA, 25 bp, Homo sapien
cagtaaatgggcctctagcataaaa

SEQ ID NO: 414624 - DNA, 25 bp, Homo sapien
ccagtaaatgggcctctagcataaa

SEQ ID NO: 414625 - DNA, 25 bp, Homo sapien
gtaaatgggcctctagcataaaatc

SEQ ID NO: 414626 - DNA, 25 bp, Homo sapien
gacccaaacatcaacatgaaaccaa

SEQ ID NO: 414627 - DNA, 25 bp, Homo sapien
cacatggaagcaataagtgacccaa

SEQ ID NO: 414628 - DNA, 25 bp, Homo sapien
tggaagcaataagtgacccaaacat

SEQ ID NO: 414629 - DNA, 25 bp, Homo sapien
tccacatggaagcaataagtgaccc

SEQ ID NO: 414630 - DNA, 25 bp, Homo sapien
tgtgtagagaagaggctttatgatt

SEQ ID NO: 414631 - DNA, 25 bp, Homo sapien
taaacagccgctttcatagctatca

SEQ ID NO: 414632 - DNA, 25 bp, Homo sapien
tcttcctaaacagccgctttcatag

SEQ ID NO: 414633 - DNA, 25 bp, Homo sapien
tgttcttcctaaacagccgctttca

SEQ ID NO: 414634 - DNA, 25 bp, Homo sapien
cctaaacagccgctttcatagctat

SEQ ID NO: 414635 - DNA, 25 bp, Homo sapien
tggcttaggatacaccacagctgca

SEQ ID NO: 414636 - DNA, 25 bp, Homo sapien
tctggcttaggatacaccacagctg

SEQ ID NO: 414637 - DNA, 25 bp, Homo sapien
tgttctggcttaggatacaccacag

SEQ ID NO: 414638 - DNA, 25 bp, Homo sapien
gcttaggatacaccacagctgcatc

SEQ ID NO: 414639 - DNA, 25 bp, Homo sapien
tctcagttcaaaggaaccggcatta

SEQ ID NO: 414640 - DNA, 25 bp, Homo sapien
aatccagggcctaccatattctgct

SEQ ID NO: 414641 - DNA, 25 bp, Homo sapien
ttgggttacatcaaattctgagcct

SEQ ID NO: 414642 - DNA, 25 bp, Homo sapien
gggatacatgtcaccaaccagtctt

SEQ ID NO: 414643 - DNA, 25 bp, Homo sapien
ggccaacgaaaattatctaggaagc

SEQ ID NO: 414644 - DNA, 25 bp, Homo sapien
atacattcacattctggccaacgaa

SEQ ID NO: 414645 - DNA, 25 bp, Homo sapien
cacattctggccaacgaaaattatc

SEQ ID NO: 414646 - DNA, 25 bp, Homo sapien
tctcactccagtcaatacattcaca

SEQ ID NO: 414647 - DNA, 25 bp, Homo sapien
ttacttcttaagcataaatttttca

SEQ ID NO: 414648 - DNA, 25 bp, Homo sapien
tacttcttaagcataaatttttcat

SEQ ID NO: 414649 - DNA, 25 bp, Homo sapien
acttcttaagcataaatttttcatt

SEQ ID NO: 414650 - DNA, 25 bp, Homo sapien
cttcttaagcataaatttttcatta

SEQ ID NO: 414651 - DNA, 25 bp, Homo sapien
cgcaggaaggagactgctgcgccac

SEQ ID NO: 414652 - DNA, 25 bp, Homo sapien
ctcaaacgcccacgccgacttcagg

SEQ ID NO: 414653 - DNA, 25 bp, Homo sapien
acgccgacttcaggcgcgcgcgcag

SEQ ID NO: 414654 - DNA, 25 bp, Homo sapien
aaggagactgctgcgccacaaccct

SEQ ID NO: 414655 - DNA, 25 bp, Homo sapien
ccagctcatccttcttgttgatggc

SEQ ID NO: 414656 - DNA, 25 bp, Homo sapien
ccttcttgttgatggcataggagct

SEQ ID NO: 414657 - DNA, 25 bp, Homo sapien
ggcattgatgagctcatccgccagg

SEQ ID NO: 414658 - DNA, 25 bp, Homo sapien
cagcggttggacttgtccccacact

SEQ ID NO: 414659 - DNA, 25 bp, Homo sapien
agccagacgacctgattcacacagt

SEQ ID NO: 414660 - DNA, 25 bp, Homo sapien
gtccctgctcgcccaatgcatgtgg

SEQ ID NO: 414661 - DNA, 25 bp, Homo sapien
acagtccctgctcgcccaatgcatg

SEQ ID NO: 414662 - DNA, 25 bp, Homo sapien
gacgacctgattcacacagtgcagt

SEQ ID NO: 414663 - DNA, 25 bp, Homo sapien
ggtggatgaaatcgaaggcatgctt

SEQ ID NO: 414664 - DNA, 25 bp, Homo sapien
ctgtgagcaggtggatgaaatcgaa

SEQ ID NO: 414665 - DNA, 25 bp, Homo sapien
gctgttgttgcagccgtgcatcatc

SEQ ID NO: 414666 - DNA, 25 bp, Homo sapien
gcatgcttgatgatgcacatgatca

SEQ ID NO: 414667 - DNA, 25 bp, Homo sapien
gcatttggctgcataccacccagca

SEQ ID NO: 414668 - DNA, 25 bp, Homo sapien
tgcggaagcatttggctgcatacca

SEQ ID NO: 414669 - DNA, 25 bp, Homo sapien
gccattgatctgcatatcatcagtg

SEQ ID NO: 414670 - DNA, 25 bp, Homo sapien
tgcataccacccagcactgtgaggc

SEQ ID NO: 414671 - DNA, 25 bp, Homo sapien
gtctcccactcggtcatcctgaggg

SEQ ID NO: 414672 - DNA, 25 bp, Homo sapien
cttgatgtcaaggggtctctgccac

SEQ ID NO: 414673 - DNA, 25 bp, Homo sapien
tgctgtctcccactcggtcatcctg

SEQ ID NO: 414674 - DNA, 25 bp, Homo sapien
tgatgtcaaggggtctctgccactg

SEQ ID NO: 414675 - DNA, 25 bp, Homo sapien
atggtgctggcatcttgtaaggatt

SEQ ID NO: 414676 - DNA, 25 bp, Homo sapien
gaagccgggaactccaagagcatgg

SEQ ID NO: 414677 - DNA, 25 bp, Homo sapien
gctggcatcttgtaaggattttcat

SEQ ID NO: 414678 - DNA, 25 bp, Homo sapien
tctggaagccgggaactccaagagc

SEQ ID NO: 414679 - DNA, 25 bp, Homo sapien
gtcaacatggtaaaattccgtctca

SEQ ID NO: 414680 - DNA, 25 bp, Homo sapien
tcaacatggtaaaattccgtctcaa

SEQ ID NO: 414681 - DNA, 25 bp, Homo sapien
gagaggcactcctagattctggaga

SEQ ID NO: 414682 - DNA, 25 bp, Homo sapien
tacttcctgtgggtctgaaatggac

SEQ ID NO: 414683 - DNA, 25 bp, Homo sapien
tctgatagagtggtattcacgtcca

SEQ ID NO: 414684 - DNA, 25 bp, Homo sapien
tcaggtttgggccaggacaggttct

SEQ ID NO: 414685 - DNA, 25 bp, Homo sapien
tacaaacataaagtgcactgtgctg

SEQ ID NO: 414686 - DNA, 25 bp, Homo sapien
taccttctcattgaccaatatggaa

SEQ ID NO: 414687 - DNA, 25 bp, Homo sapien
taagcctcttacgtctaattcccac

SEQ ID NO: 414688 - DNA, 25 bp, Homo sapien
tggtaaccttaccttctcattgacc

SEQ ID NO: 414689 - DNA, 25 bp, Homo sapien
cctgttgtttaagtacctatgtttg

SEQ ID NO: 414690 - DNA, 25 bp, Homo sapien
ggaattcatgtatgattcctaagtc

SEQ ID NO: 414691 - DNA, 25 bp, Homo sapien
agttattacagctcaaaactgcacc

SEQ ID NO: 414692 - DNA, 25 bp, Homo sapien
tgaaaatggcaacagtcactgcttt

SEQ ID NO: 414693 - DNA, 25 bp, Homo sapien
tatatcctcaggacaaacctgatag

SEQ ID NO: 414694 - DNA, 25 bp, Homo sapien
aacctgataggtttctcactcacac

SEQ ID NO: 414695 - DNA, 25 bp, Homo sapien
gttttgtgataagtacaatggcaca

SEQ ID NO: 414696 - DNA, 25 bp, Homo sapien
tcttaaattcttgtattatagcaat

SEQ ID NO: 414697 - DNA, 25 bp, Homo sapien
agggtctcgtatattttctgggctc

SEQ ID NO: 414698 - DNA, 25 bp, Homo sapien
ccttctccttgatcaaggttatttg

SEQ ID NO: 414699 - DNA, 25 bp, Homo sapien
cttgatcaaggttatttgggtttct

SEQ ID NO: 414700 - DNA, 25 bp, Homo sapien
tataagggtctcgtatattttctgg

SEQ ID NO: 414701 - DNA, 25 bp, Homo sapien
tgcctggtcaggatgggaacaatta

SEQ ID NO: 414702 - DNA, 25 bp, Homo sapien
gaaactgctcacaaacatggttcca

SEQ ID NO: 414703 - DNA, 25 bp, Homo sapien
ggattcttgaatgaggtcctccact

SEQ ID NO: 414704 - DNA, 25 bp, Homo sapien
tgttctatcacatgggagagcacct

SEQ ID NO: 414705 - DNA, 25 bp, Homo sapien
tctctcgttgagttggagtcccaaa

SEQ ID NO: 414706 - DNA, 25 bp, Homo sapien
tctttttggatttatgggttgacat

SEQ ID NO: 414707 - DNA, 25 bp, Homo sapien
tatggaagcattttcactcgattag

SEQ ID NO: 414708 - DNA, 25 bp, Homo sapien
tagcctttatcaggtgagatcttaa

SEQ ID NO: 414709 - DNA, 25 bp, Homo sapien
tgggttgacatcattctatttctaa

SEQ ID NO: 414710 - DNA, 25 bp, Homo sapien
tgtacccagagttcttcctagcaat

SEQ ID NO: 414711 - DNA, 25 bp, Homo sapien
tattgtacccagagttcttcctagc

SEQ ID NO: 414712 - DNA, 25 bp, Homo sapien
tacccagagttcttcctagcaatga

SEQ ID NO: 414713 - DNA, 25 bp, Homo sapien
attgtacccagagttcttcctagca

SEQ ID NO: 414714 - DNA, 25 bp, Homo sapien
tgcatcatctcaagaagtcttctca

SEQ ID NO: 414715 - DNA, 25 bp, Homo sapien
taagacgacttatggacaaggtacg

SEQ ID NO: 414716 - DNA, 25 bp, Homo sapien
tccagccgattataaactgcacgag

SEQ ID NO: 414717 - DNA, 25 bp, Homo sapien
agtcttctcataagacgacttatgg

SEQ ID NO: 414718 - DNA, 25 bp, Homo sapien
tataaacgctaaaacggagctcctg

SEQ ID NO: 414719 - DNA, 25 bp, Homo sapien
tgtgaggcctcccaacacgtttgct

SEQ ID NO: 414720 - DNA, 25 bp, Homo sapien
taggcaatcggtgccaacggtctgg

SEQ ID NO: 414721 - DNA, 25 bp, Homo sapien
ttatcatggcaagggaggtcggtcc

SEQ ID NO: 414722 - DNA, 25 bp, Homo sapien
accatttgccactttacactgaggg

SEQ ID NO: 414723 - DNA, 25 bp, Homo sapien
tccgcccttcactgcgggtgtccct

SEQ ID NO: 414724 - DNA, 25 bp, Homo sapien
ctctgcgcatgcgtgcgcggtccgc

SEQ ID NO: 414725 - DNA, 25 bp, Homo sapien
cagctggtgcctccgccgggctaga

SEQ ID NO: 414726 - DNA, 25 bp, Homo sapien
atgatgtaaagaccgagttggcggc

SEQ ID NO: 414727 - DNA, 25 bp, Homo sapien
gcctgcgcctctcgggagggactta

SEQ ID NO: 414728 - DNA, 25 bp, Homo sapien
caggaaaacggacaatcttccgcca

SEQ ID NO: 414729 - DNA, 25 bp, Homo sapien
ccggccgattgggattgtgggagat

SEQ ID NO: 414730 - DNA, 25 bp, Homo sapien
ccctgccctgcaggaccagctgtgg

SEQ ID NO: 414731 - DNA, 25 bp, Homo sapien
gcctcctgctttcctctttcgaagt

SEQ ID NO: 414732 - DNA, 25 bp, Homo sapien
tcctgctttcctctttcgaagtcat

SEQ ID NO: 414733 - DNA, 25 bp, Homo sapien
tgcctcctgctttcctctttcgaag

SEQ ID NO: 414734 - DNA, 25 bp, Homo sapien
ttctgttacaaagcctggaagttgg

SEQ ID NO: 414735 - DNA, 25 bp, Homo sapien
cacatgaggattatcaggttaacag

SEQ ID NO: 414736 - DNA, 25 bp, Homo sapien
gggatttgaggattaggcttgctac

SEQ ID NO: 414737 - DNA, 25 bp, Homo sapien
acaggtggctcaggagttagcttct

SEQ ID NO: 414738 - DNA, 25 bp, Homo sapien
cttataaacatggaggtgattcatc

SEQ ID NO: 414739 - DNA, 25 bp, Homo sapien
gggtgacggttagaaaaagagcata

SEQ ID NO: 414740 - DNA, 25 bp, Homo sapien
actgtatgtctcagatatgctgcac

SEQ ID NO: 414741 - DNA, 25 bp, Homo sapien
catgttgtcaggcaataccaaaaaa

SEQ ID NO: 414742 - DNA, 25 bp, Homo sapien
aaaaatagatgaagtaagggtgagg

SEQ ID NO: 414743 - DNA, 25 bp, Homo sapien
cttttgggccaagtccatgataaaa

SEQ ID NO: 414744 - DNA, 25 bp, Homo sapien
aaaatagatgaagtaagggtgaggt

SEQ ID NO: 414745 - DNA, 25 bp, Homo sapien
gaagggctgcaggaaatattttatg

SEQ ID NO: 414746 - DNA, 25 bp, Homo sapien
tttcagaaagagttgcgacagtatc

SEQ ID NO: 414747 - DNA, 25 bp, Homo sapien
acagtatcacccctcttcacgggaa

SEQ ID NO: 414748 - DNA, 25 bp, Homo sapien
tcttcacgggaacagcttcttgcaa

SEQ ID NO: 414749 - DNA, 25 bp, Homo sapien
tacaaagtgtacagtgcacccagta

SEQ ID NO: 414750 - DNA, 25 bp, Homo sapien
caaggatgggtggatattgagcatt

SEQ ID NO: 414751 - DNA, 25 bp, Homo sapien
tacagtgcacccagtaactgtgact

SEQ ID NO: 414752 - DNA, 25 bp, Homo sapien
ctgtgactccggtttccagggcttg

SEQ ID NO: 414753 - DNA, 25 bp, Homo sapien
gactatgtctatggagaactcttca

SEQ ID NO: 414754 - DNA, 25 bp, Homo sapien
gacaaaggggccagaaagaattctc

SEQ ID NO: 414755 - DNA, 25 bp, Homo sapien
gaatcctgcaagacagactatgtct

SEQ ID NO: 414756 - DNA, 25 bp, Homo sapien
actcttcaaggactaggtcaattgc

SEQ ID NO: 414757 - DNA, 25 bp, Homo sapien
ctactgcggctttgttggagataac

SEQ ID NO: 414758 - DNA, 25 bp, Homo sapien
ggttcccgagtactgtctataagtg

SEQ ID NO: 414759 - DNA, 25 bp, Homo sapien
tgtgcagagctatttggttcccgag

SEQ ID NO: 414760 - DNA, 25 bp, Homo sapien
ctttatctaacccagctactgcggc

SEQ ID NO: 414761 - DNA, 25 bp, Homo sapien
atgtccacatgtacccactgtttag

SEQ ID NO: 414762 - DNA, 25 bp, Homo sapien
ctttatgtccacatgtacccactgt

SEQ ID NO: 414763 - DNA, 25 bp, Homo sapien
cagcacccggccctattgtttccat

SEQ ID NO: 414764 - DNA, 25 bp, Homo sapien
gcacccggccctattgtttccatct

SEQ ID NO: 414765 - DNA, 25 bp, Homo sapien
tcaatcagattcttgactttcacac

SEQ ID NO: 414766 - DNA, 25 bp, Homo sapien
ttgtcagggagccattcttcaacac

SEQ ID NO: 414767 - DNA, 25 bp, Homo sapien
tgtcagggagccattcttcaacact

SEQ ID NO: 414768 - DNA, 25 bp, Homo sapien
cagattcttgactttcacacgtggg

SEQ ID NO: 414769 - DNA, 25 bp, Homo sapien
tacttgtcagggtgcttgctcgcta

SEQ ID NO: 414770 - DNA, 25 bp, Homo sapien
gattactttgggaagcgatcctgtg

SEQ ID NO: 414771 - DNA, 25 bp, Homo sapien
ttccttgaatcgagctgagtgacag

SEQ ID NO: 414772 - DNA, 25 bp, Homo sapien
cgatggctgcactaaaaggtgggca

SEQ ID NO: 414773 - DNA, 25 bp, Homo sapien
ttgataccacaaggacagcgccaac

SEQ ID NO: 414774 - DNA, 25 bp, Homo sapien
caaccacactgccaatcacccaggc

SEQ ID NO: 414775 - DNA, 25 bp, Homo sapien
gctgcaaccatgagaagaccctggg

SEQ ID NO: 414776 - DNA, 25 bp, Homo sapien
ttccttgtgctgctggatatccctc

SEQ ID NO: 414777 - DNA, 25 bp, Homo sapien
ctccaccagtaatatgggcaaaggc

SEQ ID NO: 414778 - DNA, 25 bp, Homo sapien
ggatgttctctagtaatcctccacc

SEQ ID NO: 414779 - DNA, 25 bp, Homo sapien
gggatgttctctagtaatcctccac

SEQ ID NO: 414780 - DNA, 25 bp, Homo sapien
gtaatcctccaccagtaatatgggc

SEQ ID NO: 414781 - DNA, 25 bp, Homo sapien
ggtaacagtgaatggctgtagattc

SEQ ID NO: 414782 - DNA, 25 bp, Homo sapien
ctgaacgtaggacaggtaacagtga

SEQ ID NO: 414783 - DNA, 25 bp, Homo sapien
ctggtaggcgtgagaagtaagtccc

SEQ ID NO: 414784 - DNA, 25 bp, Homo sapien
ctgtagattctggtaggcgtgagaa

SEQ ID NO: 414785 - DNA, 25 bp, Homo sapien
tggtcaccacaaccatcaggtgctg

SEQ ID NO: 414786 - DNA, 25 bp, Homo sapien
gaagattttgccacgattttcctca

SEQ ID NO: 414787 - DNA, 25 bp, Homo sapien
gagtttctgatctcgctccatggca

SEQ ID NO: 414788 - DNA, 25 bp, Homo sapien
caacggcaaacccagctaggtcata

SEQ ID NO: 414789 - DNA, 25 bp, Homo sapien
cctgcctgacagtttgggagtacgg

SEQ ID NO: 414790 - DNA, 25 bp, Homo sapien
aggaacccatctgcctgtaccgtgg

SEQ ID NO: 414791 - DNA, 25 bp, Homo sapien
taactcctagacctgtttgttgagg

SEQ ID NO: 414792 - DNA, 25 bp, Homo sapien
tttagttaagatccggaatgccagg

SEQ ID NO: 414793 - DNA, 25 bp, Homo sapien
cagttacactgaggtcaagttttcc

SEQ ID NO: 414794 - DNA, 25 bp, Homo sapien
cacaagctttagcaattccagcaac

SEQ ID NO: 414795 - DNA, 25 bp, Homo sapien
ttgctaccaaatcttgaccaatggt

SEQ ID NO: 414796 - DNA, 25 bp, Homo sapien
tatcatgtttattgcatagctgggc

SEQ ID NO: 414797 - DNA, 25 bp, Homo sapien
atcttatccatttgattagctgctc

SEQ ID NO: 414798 - DNA, 25 bp, Homo sapien
tatcttatccatttgattagctgct

SEQ ID NO: 414799 - DNA, 25 bp, Homo sapien
atccacattagggaataagttcaaa

SEQ ID NO: 414800 - DNA, 25 bp, Homo sapien
tagggaataagttcaaaattgtatc

SEQ ID NO: 414801 - DNA, 25 bp, Homo sapien
tagtttagttccaacgccatctgtt

SEQ ID NO: 414802 - DNA, 25 bp, Homo sapien
cagctgcttttaaatcaaaaagacc

SEQ ID NO: 414803 - DNA, 25 bp, Homo sapien
ctttagtttagttccaacgccatct

SEQ ID NO: 414804 - DNA, 25 bp, Homo sapien
gtttagttccaacgccatctgttcc

SEQ ID NO: 414805 - DNA, 25 bp, Homo sapien
gatatctactccagattccttgtaa

SEQ ID NO: 414806 - DNA, 25 bp, Homo sapien
ggctgaattttcttgaccagcatat

SEQ ID NO: 414807 - DNA, 25 bp, Homo sapien
tccagattccttgtaagtcaaactc

SEQ ID NO: 414808 - DNA, 25 bp, Homo sapien
ccagcatatttccagctgcgatatc

SEQ ID NO: 414809 - DNA, 25 bp, Homo sapien
aagactgtatcactcccacagagag

SEQ ID NO: 414810 - DNA, 25 bp, Homo sapien
tacaacactatgtgataacgcaagg

SEQ ID NO: 414811 - DNA, 25 bp, Homo sapien
gaaatggcactacagctaacttgct

SEQ ID NO: 414812 - DNA, 25 bp, Homo sapien
tcagtatcaggccaagtgcagcggc

SEQ ID NO: 414813 - DNA, 25 bp, Homo sapien
gctgatatgagattttcccggatgg

SEQ ID NO: 414814 - DNA, 25 bp, Homo sapien
ctccagtcctagagcttgagcctca

SEQ ID NO: 414815 - DNA, 25 bp, Homo sapien
ttggcttcctcaagggctgatatga

SEQ ID NO: 414816 - DNA, 25 bp, Homo sapien
gaaagctatggcacgaaagccgacg

SEQ ID NO: 414817 - DNA, 25 bp, Homo sapien
tagaagagagcatatttgacatatg

SEQ ID NO: 414818 - DNA, 25 bp, Homo sapien
ctagaagagagcatatttgacatat

SEQ ID NO: 414819 - DNA, 25 bp, Homo sapien
taaaagaaccttccctatcagacag

SEQ ID NO: 414820 - DNA, 25 bp, Homo sapien
ggcctcccagataggttttaatgca

SEQ ID NO: 414821 - DNA, 25 bp, Homo sapien
ctctgttgccaagctagtagtggtg

SEQ ID NO: 414822 - DNA, 25 bp, Homo sapien
gacctttctcctaagaactgtctgc

SEQ ID NO: 414823 - DNA, 25 bp, Homo sapien
tggacttacggcactggaacttaga

SEQ ID NO: 414824 - DNA, 25 bp, Homo sapien
gtactaatgttcctctgactctcag

SEQ ID NO: 414825 - DNA, 25 bp, Homo sapien
gaattttgccatccaagtgactatg

SEQ ID NO: 414826 - DNA, 25 bp, Homo sapien
gagtggccaaactataggctgctag

SEQ ID NO: 414827 - DNA, 25 bp, Homo sapien
ccatgacaacagttagggcggtgtg

SEQ ID NO: 414828 - DNA, 25 bp, Homo sapien
ccaggataacctttacttgccatga

SEQ ID NO: 414829 - DNA, 25 bp, Homo sapien
tgtagtctccaggataacctttact

SEQ ID NO: 414830 - DNA, 25 bp, Homo sapien
tacttgccatgacaacagttagggc

SEQ ID NO: 414831 - DNA, 25 bp, Homo sapien
tagccaaacaggcagagatgtgcag

SEQ ID NO: 414832 - DNA, 25 bp, Homo sapien
ggcagagatgtgcagagcagtccat

SEQ ID NO: 414833 - DNA, 25 bp, Homo sapien
acaggcagagatgtgcagagcagtc

SEQ ID NO: 414834 - DNA, 25 bp, Homo sapien
ctagccaaacaggcagagatgtgca

SEQ ID NO: 414835 - DNA, 25 bp, Homo sapien
aagatcacttttaagaagtgggagg

SEQ ID NO: 414836 - DNA, 25 bp, Homo sapien
tcacttttaagaagtgggaggatta

SEQ ID NO: 414837 - DNA, 25 bp, Homo sapien
aacttttgggccattcttggtcagc

SEQ ID NO: 414838 - DNA, 25 bp, Homo sapien
ggtcagcattattccagcatagaga

SEQ ID NO: 414839 - DNA, 25 bp, Homo sapien
tggatcaccaaaacggcaattaaac

SEQ ID NO: 414840 - DNA, 25 bp, Homo sapien
aactctagaacttttgggccattct

SEQ ID NO: 414841 - DNA, 25 bp, Homo sapien
gtatatggagtaccctcttgctgca

SEQ ID NO: 414842 - DNA, 25 bp, Homo sapien
ctgtatatggagtaccctcttgctg

SEQ ID NO: 414843 - DNA, 25 bp, Homo sapien
atggagtaccctcttgctgcatgcc

SEQ ID NO: 414844 - DNA, 25 bp, Homo sapien
atatggagtaccctcttgctgcatg

SEQ ID NO: 414845 - DNA, 25 bp, Homo sapien
tttttagtaatagatcattagaaac

SEQ ID NO: 414846 - DNA, 25 bp, Homo sapien
atttttagtaatagatcattagaaa

SEQ ID NO: 414847 - DNA, 25 bp, Homo sapien
aatttttagtaatagatcattagaa

SEQ ID NO: 414848 - DNA, 25 bp, Homo sapien
tgtgccatcgcgcccagctaatttt

SEQ ID NO: 414849 - DNA, 25 bp, Homo sapien
agccactgcgcctggcctattttta

SEQ ID NO: 414850 - DNA, 25 bp, Homo sapien
catgtgccatcgcgcccagctaatt

SEQ ID NO: 414851 - DNA, 25 bp, Homo sapien
aagtagctgggactgggactacagg

SEQ ID NO: 414852 - DNA, 25 bp, Homo sapien
tagaaagtatcatctaagagttctc

SEQ ID NO: 414853 - DNA, 25 bp, Homo sapien
tctctgagaaaaccaaactactaca

SEQ ID NO: 414854 - DNA, 25 bp, Homo sapien
tactacaagacttcagcagagtctt

SEQ ID NO: 414855 - DNA, 25 bp, Homo sapien
caaactactacaagacttcagcaga

SEQ ID NO: 414856 - DNA, 25 bp, Homo sapien
taatcgcttatggtcctgtgctggg

SEQ ID NO: 414857 - DNA, 25 bp, Homo sapien
gggctggacaataggctcccattcc

SEQ ID NO: 414858 - DNA, 25 bp, Homo sapien
attccccctgtgttagggccaccat

SEQ ID NO: 414859 - DNA, 25 bp, Homo sapien
tcttgccatcagtgaaacacagaca

SEQ ID NO: 414860 - DNA, 25 bp, Homo sapien
cataatgtactcaacttctgaagga

SEQ ID NO: 414861 - DNA, 25 bp, Homo sapien
gaattaatccagaacctcaatagtg

SEQ ID NO: 414862 - DNA, 25 bp, Homo sapien
ctcaatagtgtgtaagtccaagtgc

SEQ ID NO: 414863 - DNA, 25 bp, Homo sapien
cactaacacactagggatgactaac

SEQ ID NO: 414864 - DNA, 25 bp, Homo sapien
tcaatgacaattgtttctccagctg

SEQ ID NO: 414865 - DNA, 25 bp, Homo sapien
aatgacaattgtttctccagctgcc

SEQ ID NO: 414866 - DNA, 25 bp, Homo sapien
caatgacaattgtttctccagctgc

SEQ ID NO: 414867 - DNA, 25 bp, Homo sapien
atgacaattgtttctccagctgccc

SEQ ID NO: 414868 - DNA, 25 bp, Homo sapien
tggtacagacggaataaacacacct

SEQ ID NO: 414869 - DNA, 25 bp, Homo sapien
gatcgatcacgaaagacaaggcata

SEQ ID NO: 414870 - DNA, 25 bp, Homo sapien
tcttagacccgggacatgtgggaca

SEQ ID NO: 414871 - DNA, 25 bp, Homo sapien
gcatgcttgtgaaagtagacttcta

SEQ ID NO: 414872 - DNA, 25 bp, Homo sapien
gctgcaagaccactggccttcacaa

SEQ ID NO: 414873 - DNA, 25 bp, Homo sapien
ttccagctgcaagaccactggcctt

SEQ ID NO: 414874 - DNA, 25 bp, Homo sapien
tttgcaacaatcaccccttttccag

SEQ ID NO: 414875 - DNA, 25 bp, Homo sapien
gctctttgcaacaatcacccctttt

SEQ ID NO: 414876 - DNA, 25 bp, Homo sapien
caaaccttttgctggactctaactg

SEQ ID NO: 414877 - DNA, 25 bp, Homo sapien
aagccttccattgtgcggttgggat

SEQ ID NO: 414878 - DNA, 25 bp, Homo sapien
gggattccatgtctgtccataaact

SEQ ID NO: 414879 - DNA, 25 bp, Homo sapien
tgcagacctcaggttcccaacaatc

SEQ ID NO: 414880 - DNA, 25 bp, Homo sapien
gcagtgtggtcactgattgagatgg

SEQ ID NO: 414881 - DNA, 25 bp, Homo sapien
cagaattgagcaagggcagtgtggt

SEQ ID NO: 414882 - DNA, 25 bp, Homo sapien
cagaggtgcttctggtccaacaact

SEQ ID NO: 414883 - DNA, 25 bp, Homo sapien
tgcttctggtccaacaactacaaat

SEQ ID NO: 414884 - DNA, 25 bp, Homo sapien
tccactgccaattataagtactcgg

SEQ ID NO: 414885 - DNA, 25 bp, Homo sapien
caacacttgtttgacatgatgagac

SEQ ID NO: 414886 - DNA, 25 bp, Homo sapien
agtttccaggccagcgtatgttccc

SEQ ID NO: 414887 - DNA, 25 bp, Homo sapien
caattataagtactcgggctgccat

SEQ ID NO: 414888 - DNA, 25 bp, Homo sapien
aaagcagaaattccaaaggaaaatg

SEQ ID NO: 414889 - DNA, 25 bp, Homo sapien
tgtaaagcagaaattccaaaggaaa

SEQ ID NO: 414890 - DNA, 25 bp, Homo sapien
gcagaaattccaaaggaaaatgaaa

SEQ ID NO: 414891 - DNA, 25 bp, Homo sapien
ctgtaaagcagaaattccaaaggaa

SEQ ID NO: 414892 - DNA, 25 bp, Homo sapien
cgggtggccacctggttcccgcttg

SEQ ID NO: 414893 - DNA, 25 bp, Homo sapien
tggttcccgcttgcccgctcgccgg

SEQ ID NO: 414894 - DNA, 25 bp, Homo sapien
gggtggccacctggttcccgcttgc

SEQ ID NO: 414895 - DNA, 25 bp, Homo sapien
cgcttgcccgctcgccggaagtcgg

SEQ ID NO: 414896 - DNA, 25 bp, Homo sapien
tcccggatgcatatccctgtcgaaa

SEQ ID NO: 414897 - DNA, 25 bp, Homo sapien
gggctgaaaaattctctcccggatg

SEQ ID NO: 414898 - DNA, 25 bp, Homo sapien
cctgtcgaaactgaacttggcgcca

SEQ ID NO: 414899 - DNA, 25 bp, Homo sapien
gctgaaaaattctctcccggatgca

SEQ ID NO: 414900 - DNA, 25 bp, Homo sapien
tgagagcgcctgaaagccgtgtgtt

SEQ ID NO: 414901 - DNA, 25 bp, Homo sapien
gagagacggctcctgtaatggcgcc

SEQ ID NO: 414902 - DNA, 25 bp, Homo sapien
ggcgcctgcgtcagacactaacatg

SEQ ID NO: 414903 - DNA, 25 bp, Homo sapien
gactgacaacttatgcggacacggt

SEQ ID NO: 414904 - DNA, 25 bp, Homo sapien
gaagaaatagtgcagaagatagagg

SEQ ID NO: 414905 - DNA, 25 bp, Homo sapien
tgcagaagatagaggaagtactttc

SEQ ID NO: 414906 - DNA, 25 bp, Homo sapien
gtgcagaagatagaggaagtacttt

SEQ ID NO: 414907 - DNA, 25 bp, Homo sapien
aaatagtgcagaagatagaggaagt

SEQ ID NO: 414908 - DNA, 25 bp, Homo sapien
aaagtagatgcgtatctgtacaaac

SEQ ID NO: 414909 - DNA, 25 bp, Homo sapien
gaaagagggctccagaaaaagtaga

SEQ ID NO: 414910 - DNA, 25 bp, Homo sapien
acagatcctactgatgaaattccca

SEQ ID NO: 414911 - DNA, 25 bp, Homo sapien
caaacagatcctactgatgaaattc

SEQ ID NO: 414912 - DNA, 25 bp, Homo sapien
tgtcgcaggaattgccagggcttcc

SEQ ID NO: 414913 - DNA, 25 bp, Homo sapien
tctgctaccccggtgccagagttgc

SEQ ID NO: 414914 - DNA, 25 bp, Homo sapien
accagtgccacagttgtcgcaggaa

SEQ ID NO: 414915 - DNA, 25 bp, Homo sapien
cctgcgacagcagtgcctgagttgc

SEQ ID NO: 414916 - DNA, 25 bp, Homo sapien
caacggtggaacatcctgggcatcc

SEQ ID NO: 414917 - DNA, 25 bp, Homo sapien
ggcatcctgaggtgacaacggcaac

SEQ ID NO: 414918 - DNA, 25 bp, Homo sapien
cactagagttgcctgggccgctcat

SEQ ID NO: 414919 - DNA, 25 bp, Homo sapien
cagggctgccttcggcaactagggc

SEQ ID NO: 414920 - DNA, 25 bp, Homo sapien
tcccagatgttagcgtctagcacca

SEQ ID NO: 414921 - DNA, 25 bp, Homo sapien
cagatgttagcgtctagcaccatgg

SEQ ID NO: 414922 - DNA, 25 bp, Homo sapien
gatgttagcgtctagcaccatggac

SEQ ID NO: 414923 - DNA, 25 bp, Homo sapien
ctcccagatgttagcgtctagcacc

SEQ ID NO: 414924 - DNA, 25 bp, Homo sapien
tgctctggaacctgatgcaacagga

SEQ ID NO: 414925 - DNA, 25 bp, Homo sapien
tgaagctgacattgaagggcctttg

SEQ ID NO: 414926 - DNA, 25 bp, Homo sapien
taaacagcgcacagtattggatacc

SEQ ID NO: 414927 - DNA, 25 bp, Homo sapien
cctaccctggtgttagtgaagctga

SEQ ID NO: 414928 - DNA, 25 bp, Homo sapien
gaggccactgctgaaaaactttgag

SEQ ID NO: 414929 - DNA, 25 bp, Homo sapien
cttaattccctgaatgaggccactg

SEQ ID NO: 414930 - DNA, 25 bp, Homo sapien
gatcatagctgtaacttagagcaga

SEQ ID NO: 414931 - DNA, 25 bp, Homo sapien
agctcaatatgtggacttaattccc

SEQ ID NO: 414932 - DNA, 25 bp, Homo sapien
aagaattccctgtatcatctggatc

SEQ ID NO: 414933 - DNA, 25 bp, Homo sapien
aattccctgtatcatctggatctca

SEQ ID NO: 414934 - DNA, 25 bp, Homo sapien
caaaagaattccctgtatcatctgg

SEQ ID NO: 414935 - DNA, 25 bp, Homo sapien
taacaaaagaattccctgtatcatc

SEQ ID NO: 414936 - DNA, 25 bp, Homo sapien
tgtttaacctaatgctcagccttgg

SEQ ID NO: 414937 - DNA, 25 bp, Homo sapien
caattcactttgtggaaccaagcca

SEQ ID NO: 414938 - DNA, 25 bp, Homo sapien
gccgggttagacgacagatgaaaca

SEQ ID NO: 414939 - DNA, 25 bp, Homo sapien
attgggccctccctgcacttgtggg

SEQ ID NO: 414940 - DNA, 25 bp, Homo sapien
taaatatagtgcacatgaaaacagc

SEQ ID NO: 414941 - DNA, 25 bp, Homo sapien
cttgttgtgcaaaatcacgcttggg

SEQ ID NO: 414942 - DNA, 25 bp, Homo sapien
tctgtatctgtacctttgctgtatc

SEQ ID NO: 414943 - DNA, 25 bp, Homo sapien
taaaatgccgcctgattaaataatg

SEQ ID NO: 414944 - DNA, 25 bp, Homo sapien
gactaggtatctgatgcccatctgg

SEQ ID NO: 414945 - DNA, 25 bp, Homo sapien
cttggatatgtagatcagagacacc

SEQ ID NO: 414946 - DNA, 25 bp, Homo sapien
tcactgtaggttcccttccttggct

SEQ ID NO: 414947 - DNA, 25 bp, Homo sapien
tggcttggccatatcatcatcttcc

SEQ ID NO: 414948 - DNA, 25 bp, Homo sapien
aaccctatgaaatgtgtaggtatta

SEQ ID NO: 414949 - DNA, 25 bp, Homo sapien
ccctgtcctcacagagtttacaatc

SEQ ID NO: 414950 - DNA, 25 bp, Homo sapien
actatgtggcaggaactgtttcttg

SEQ ID NO: 414951 - DNA, 25 bp, Homo sapien
acaactaagtgcctacaaccctatg

SEQ ID NO: 414952 - DNA, 25 bp, Homo sapien
tatgtgtatatgctccagggcggac

SEQ ID NO: 414953 - DNA, 25 bp, Homo sapien
aatgtataaatgtggctcaagagcc

SEQ ID NO: 414954 - DNA, 25 bp, Homo sapien
gaagacggactggattcatgagaaa

SEQ ID NO: 414955 - DNA, 25 bp, Homo sapien
cagtgactctaaccaaagttccaag

SEQ ID NO: 414956 - DNA, 25 bp, Homo sapien
ttctttggataggatcagttcttaa

SEQ ID NO: 414957 - DNA, 25 bp, Homo sapien
ctttctttggataggatcagttctt

SEQ ID NO: 414958 - DNA, 25 bp, Homo sapien
ttctttctttggataggatcagttc

SEQ ID NO: 414959 - DNA, 25 bp, Homo sapien
tctttctttggataggatcagttct

SEQ ID NO: 414960 - DNA, 25 bp, Homo sapien
tgaacccagtgatactgaactgaag

SEQ ID NO: 414961 - DNA, 25 bp, Homo sapien
gggttcacagagcagcttattttta

SEQ ID NO: 414962 - DNA, 25 bp, Homo sapien
tatggatagagacaccagtttgaac

SEQ ID NO: 414963 - DNA, 25 bp, Homo sapien
gaaggcacttcttgtatatatacag

SEQ ID NO: 414964 - DNA, 25 bp, Homo sapien
ctgtcaggtgagagcacgtttttga

SEQ ID NO: 414965 - DNA, 25 bp, Homo sapien
gtctgggaacttctctgctgcaatg

SEQ ID NO: 414966 - DNA, 25 bp, Homo sapien
tttgaaggcatacattttgaggttc

SEQ ID NO: 414967 - DNA, 25 bp, Homo sapien
aatcgagtgtactaggaatctgctg

SEQ ID NO: 414968 - DNA, 25 bp, Homo sapien
gccacttgggtcataagaagggagt

SEQ ID NO: 414969 - DNA, 25 bp, Homo sapien
tgtgatgatcagcactaagtcctgc

SEQ ID NO: 414970 - DNA, 25 bp, Homo sapien
tgcattcctgttaaagccacttggg

SEQ ID NO: 414971 - DNA, 25 bp, Homo sapien
tttcacaatgggttctgctggacag

SEQ ID NO: 414972 - DNA, 25 bp, Homo sapien
acactattctatgtggaatacaaaa

SEQ ID NO: 414973 - DNA, 25 bp, Homo sapien
cacacacccctataagcacattaaa

SEQ ID NO: 414974 - DNA, 25 bp, Homo sapien
gccgtgacagctcagtgtacttcac

SEQ ID NO: 414975 - DNA, 25 bp, Homo sapien
gatattaaggtagaagcatcaccaa

SEQ ID NO: 414976 - DNA, 25 bp, Homo sapien
cctgctaacaggtaaatcgtaaagt

SEQ ID NO: 414977 - DNA, 25 bp, Homo sapien
gggtaactgctatgtgatttcccat

SEQ ID NO: 414978 - DNA, 25 bp, Homo sapien
tttaaaaccttagatgctactgtag

SEQ ID NO: 414979 - DNA, 25 bp, Homo sapien
gtaacatatttttgccctgatgcca

SEQ ID NO: 414980 - DNA, 25 bp, Homo sapien
cggtatttgactaagttgctccaga

SEQ ID NO: 414981 - DNA, 25 bp, Homo sapien
tcagcaccacattccgtaaagatga

SEQ ID NO: 414982 - DNA, 25 bp, Homo sapien
tataaatgtagtctctcagcaccac

SEQ ID NO: 414983 - DNA, 25 bp, Homo sapien
tgatttcccaagtaacggtatttga

SEQ ID NO: 414984 - DNA, 25 bp, Homo sapien
cagcagttggctcgtgtggatacag

SEQ ID NO: 414985 - DNA, 25 bp, Homo sapien
gtggatacagtactgcagagaaaga

SEQ ID NO: 414986 - DNA, 25 bp, Homo sapien
tgttaaatacagcagttggctcgtg

SEQ ID NO: 414987 - DNA, 25 bp, Homo sapien
ggctcgtgtggatacagtactgcag

SEQ ID NO: 414988 - DNA, 25 bp, Homo sapien
gcatggtcagtgaatgcagagaatg

SEQ ID NO: 414989 - DNA, 25 bp, Homo sapien
ttcatgaaaatgtaaagaaaaggaa

SEQ ID NO: 414990 - DNA, 25 bp, Homo sapien
tcatgaaaatgtaaagaaaaggaaa

SEQ ID NO: 414991 - DNA, 25 bp, Homo sapien
cttcatgaaaatgtaaagaaaagga

SEQ ID NO: 414992 - DNA, 25 bp, Homo sapien
tacttcttaaaagctaggttatgca

SEQ ID NO: 414993 - DNA, 25 bp, Homo sapien
agctaggttatgcagacttttatta

SEQ ID NO: 414994 - DNA, 25 bp, Homo sapien
cttaaaagctaggttatgcagactt

SEQ ID NO: 414995 - DNA, 25 bp, Homo sapien
gaatttatcctatcaaagtaaagta

SEQ ID NO: 414996 - DNA, 25 bp, Homo sapien
ctgtggacctgaggtagcaactaaa

SEQ ID NO: 414997 - DNA, 25 bp, Homo sapien
cctgaggtagcaactaaactcttag

SEQ ID NO: 414998 - DNA, 25 bp, Homo sapien
gaggtagcaactaaactcttagagt

SEQ ID NO: 414999 - DNA, 25 bp, Homo sapien
tggacctgaggtagcaactaaactc

SEQ ID NO: 415000 - DNA, 25 bp, Homo sapien
gcttgatagaaagtatgtctggctt

SEQ ID NO: 415001 - DNA, 25 bp, Homo sapien
cttgatagaaagtatgtctggcttt

SEQ ID NO: 415002 - DNA, 25 bp, Homo sapien
agcttgatagaaagtatgtctggct

SEQ ID NO: 415003 - DNA, 25 bp, Homo sapien
ccataagtcagtggatgatataaag

SEQ ID NO: 415004 - DNA, 25 bp, Homo sapien
catgagtccataagtcagtggatga

SEQ ID NO: 415005 - DNA, 25 bp, Homo sapien
ctaggaaattgctacagttagagtc

SEQ ID NO: 415006 - DNA, 25 bp, Homo sapien
gaaattgctacagttagagtcccta

SEQ ID NO: 415007 - DNA, 25 bp, Homo sapien
tccccatatcccaagcttgttccag

SEQ ID NO: 415008 - DNA, 25 bp, Homo sapien
tatcccaagcttgttccagatgctg

SEQ ID NO: 415009 - DNA, 25 bp, Homo sapien
catatcccaagcttgttccagatgc

SEQ ID NO: 415010 - DNA, 25 bp, Homo sapien
cccatatcccaagcttgttccagat

SEQ ID NO: 415011 - DNA, 25 bp, Homo sapien
tcgagttgttggagatatgagagct

SEQ ID NO: 415012 - DNA, 25 bp, Homo sapien
tcatagcttctcttaaacctcgagt

SEQ ID NO: 415013 - DNA, 25 bp, Homo sapien
aagtcacttccagctaatcctgctg

SEQ ID NO: 415014 - DNA, 25 bp, Homo sapien
acttccagctaatcctgctgctcgg

SEQ ID NO: 415015 - DNA, 25 bp, Homo sapien
tgataggtacaaacgtagaaatagg

SEQ ID NO: 415016 - DNA, 25 bp, Homo sapien
gctccaatacgagggaacagtggta

SEQ ID NO: 415017 - DNA, 25 bp, Homo sapien
acagtggtagccaagacaaagcagg

SEQ ID NO: 415018 - DNA, 25 bp, Homo sapien
cagggttgcatcatttgaccaagga

SEQ ID NO: 415019 - DNA, 25 bp, Homo sapien
cattaaaacatgctgcagggttgca

SEQ ID NO: 415020 - DNA, 25 bp, Homo sapien
ctggaaggtacaacggagctcagag

SEQ ID NO: 415021 - DNA, 25 bp, Homo sapien
tggaaggtacaacggagctcagagg

SEQ ID NO: 415022 - DNA, 25 bp, Homo sapien
gaaggtacaacggagctcagaggag

SEQ ID NO: 415023 - DNA, 25 bp, Homo sapien
ggaaggtacaacggagctcagagga

SEQ ID NO: 415024 - DNA, 25 bp, Homo sapien
tctagaactcacaaactccacaaaa

SEQ ID NO: 415025 - DNA, 25 bp, Homo sapien
cttgcaatcccacccaattgctttt

SEQ ID NO: 415026 - DNA, 25 bp, Homo sapien
gcccagcctcctagttttgagttga

SEQ ID NO: 415027 - DNA, 25 bp, Homo sapien
accattctagaactcacaaactcca

SEQ ID NO: 415028 - DNA, 25 bp, Homo sapien
tgccctacaatgctggacaagacct

SEQ ID NO: 415029 - DNA, 25 bp, Homo sapien
atacttttaggcaaagtaacttctg

SEQ ID NO: 415030 - DNA, 25 bp, Homo sapien
tttaggcaaagtaacttctgttgcc

SEQ ID NO: 415031 - DNA, 25 bp, Homo sapien
acttctgttgccctacaatgctgga

SEQ ID NO: 415032 - DNA, 25 bp, Homo sapien
ccaggtaaagggttgagaagaggtg

SEQ ID NO: 415033 - DNA, 25 bp, Homo sapien
caggtaaagggttgagaagaggtga

SEQ ID NO: 415034 - DNA, 25 bp, Homo sapien
tgcccaggtaaagggttgagaagag

SEQ ID NO: 415035 - DNA, 25 bp, Homo sapien
ttttgaggacggaatatcaggctcg

SEQ ID NO: 415036 - DNA, 25 bp, Homo sapien
ctcagtactttttgaggacggaata

SEQ ID NO: 415037 - DNA, 25 bp, Homo sapien
tatcaggctcggagaatgatacatg

SEQ ID NO: 415038 - DNA, 25 bp, Homo sapien
ggacggaatatcaggctcggagaat

SEQ ID NO: 415039 - DNA, 25 bp, Homo sapien
catgaaaaatacattacacactgta

SEQ ID NO: 415040 - DNA, 25 bp, Homo sapien
tgaaaggagtcacactaaactttta

SEQ ID NO: 415041 - DNA, 25 bp, Homo sapien
catggttacctatgggaagcgggaa

SEQ ID NO: 415042 - DNA, 25 bp, Homo sapien
tacagttctttatggtagtatagat

SEQ ID NO: 415043 - DNA, 25 bp, Homo sapien
tttatcaaactacacagcacaatgg

SEQ ID NO: 415044 - DNA, 25 bp, Homo sapien
caacgaggttcagtgctatgccaca

SEQ ID NO: 415045 - DNA, 25 bp, Homo sapien
tctatcaggcctattttagcgctgg

SEQ ID NO: 415046 - DNA, 25 bp, Homo sapien
gagaagtcaactgcccaaagaagag

SEQ ID NO: 415047 - DNA, 25 bp, Homo sapien
tgcggtattttcatccctggttgag

SEQ ID NO: 415048 - DNA, 25 bp, Homo sapien
gatgcggtattttcatccctggttg

SEQ ID NO: 415049 - DNA, 25 bp, Homo sapien
catccctggttgagatgatcaagcc

SEQ ID NO: 415050 - DNA, 25 bp, Homo sapien
gttgagatgatcaagcctctctgta

SEQ ID NO: 415051 - DNA, 25 bp, Homo sapien
taaaaataggctcaaatcctatgaa

SEQ ID NO: 415052 - DNA, 25 bp, Homo sapien
aaataggctcaaatcctatgaaaaa

SEQ ID NO: 415053 - DNA, 25 bp, Homo sapien
caaatacacattctaatgatattta

SEQ ID NO: 415054 - DNA, 25 bp, Homo sapien
tttaaaaataggctcaaatcctatg

SEQ ID NO: 415055 - DNA, 25 bp, Homo sapien
attcagtaacagttgttctttcagg

SEQ ID NO: 415056 - DNA, 25 bp, Homo sapien
tcagtaacagttgttctttcaggaa

SEQ ID NO: 415057 - DNA, 25 bp, Homo sapien
gtaattcagtaacagttgttctttc

SEQ ID NO: 415058 - DNA, 25 bp, Homo sapien
cagtaacagttgttctttcaggaaa

SEQ ID NO: 415059 - DNA, 25 bp, Homo sapien
gcaagtacacctaaattcagaggca

SEQ ID NO: 415060 - DNA, 25 bp, Homo sapien
agtttgcgttaaatatgtacagagc

SEQ ID NO: 415061 - DNA, 25 bp, Homo sapien
gcctcacctggcatacatgtttctc

SEQ ID NO: 415062 - DNA, 25 bp, Homo sapien
tttctcaataaacgcaagtacacct

SEQ ID NO: 415063 - DNA, 25 bp, Homo sapien
ccaatctatgagtttcaacacttca

SEQ ID NO: 415064 - DNA, 25 bp, Homo sapien
caatctatgagtttcaacacttcag

SEQ ID NO: 415065 - DNA, 25 bp, Homo sapien
tctatgagtttcaacacttcagttt

SEQ ID NO: 415066 - DNA, 25 bp, Homo sapien
aatctatgagtttcaacacttcagt

SEQ ID NO: 415067 - DNA, 25 bp, Homo sapien
tgccccatcgaacagcgtccttgca

SEQ ID NO: 415068 - DNA, 25 bp, Homo sapien
gcgtccttgcaagatgggggctctc

SEQ ID NO: 415069 - DNA, 25 bp, Homo sapien
cgggaacgcgtcccgtgagcacagc

SEQ ID NO: 415070 - DNA, 25 bp, Homo sapien
tcagggtttttcgagctcttttcca

SEQ ID NO: 415071 - DNA, 25 bp, Homo sapien
aaacccggccttgccagaatcgcgg

SEQ ID NO: 415072 - DNA, 25 bp, Homo sapien
ttcccacaaacccggccttgccaga

SEQ ID NO: 415073 - DNA, 25 bp, Homo sapien
gccttgccagaatcgcggctcccag

SEQ ID NO: 415074 - DNA, 25 bp, Homo sapien
cttgccagaatcgcggctcccaggg

SEQ ID NO: 415075 - DNA, 25 bp, Homo sapien
ccgcggtcggttgtccaggcgggcg

SEQ ID NO: 415076 - DNA, 25 bp, Homo sapien
gggcgaaggggttcctccgagcagc

SEQ ID NO: 415077 - DNA, 25 bp, Homo sapien
cggcgacccgcggtcggttgtccag

SEQ ID NO: 415078 - DNA, 25 bp, Homo sapien
cggtcggttgtccaggcgggcgaag

SEQ ID NO: 415079 - DNA, 25 bp, Homo sapien
agtagccgggcaccgaaagggccat

SEQ ID NO: 415080 - DNA, 25 bp, Homo sapien
gcccttttccgtcggagccgcacta

SEQ ID NO: 415081 - DNA, 25 bp, Homo sapien
gagccgcactacctcgggcggcttt

SEQ ID NO: 415082 - DNA, 25 bp, Homo sapien
ctttcggaagcccggtgagtagccg

SEQ ID NO: 415083 - DNA, 25 bp, Homo sapien
cgcggcggctgagggtagccggccg

SEQ ID NO: 415084 - DNA, 25 bp, Homo sapien
cgcgcggcggctgagggtagccggc

SEQ ID NO: 415085 - DNA, 25 bp, Homo sapien
cggcggctgagggtagccggccgcc

SEQ ID NO: 415086 - DNA, 25 bp, Homo sapien
gacgcgcggcggctgagggtagccg

SEQ ID NO: 415087 - DNA, 25 bp, Homo sapien
ctacagagacttcccgcgcgcgccg

SEQ ID NO: 415088 - DNA, 25 bp, Homo sapien
tacagagacttcccgcgcgcgccgg

SEQ ID NO: 415089 - DNA, 25 bp, Homo sapien
tctggaaagtatgcgatccagggcg

SEQ ID NO: 415090 - DNA, 25 bp, Homo sapien
tcagcgacgcttctggaaagtatgc

SEQ ID NO: 415091 - DNA, 25 bp, Homo sapien
gagtccagtcgccaggttcagcgac

SEQ ID NO: 415092 - DNA, 25 bp, Homo sapien
ttctgccaggtcctcggccagagtc

SEQ ID NO: 415093 - DNA, 25 bp, Homo sapien
caagttaatgggatcttctttgatc

SEQ ID NO: 415094 - DNA, 25 bp, Homo sapien
tgccactggcaagttaatgggatct

SEQ ID NO: 415095 - DNA, 25 bp, Homo sapien
aggcagctgccactggcaagttaat

SEQ ID NO: 415096 - DNA, 25 bp, Homo sapien
tggtcatctcagacttccaggcagc

SEQ ID NO: 415097 - DNA, 25 bp, Homo sapien
tactttgatagcttagcaaaggcct

SEQ ID NO: 415098 - DNA, 25 bp, Homo sapien
acaaaatttaagtgcctatgggcta

SEQ ID NO: 415099 - DNA, 25 bp, Homo sapien
gcctgcaacagcttttatcaagagt

SEQ ID NO: 415100 - DNA, 25 bp, Homo sapien
caagagtagtgtgacttttgctgaa

SEQ ID NO: 415101 - DNA, 25 bp, Homo sapien
gtggaatgggttcatccaactgagg

SEQ ID NO: 415102 - DNA, 25 bp, Homo sapien
tggaatgggttcatccaactgaggt

SEQ ID NO: 415103 - DNA, 25 bp, Homo sapien
aacaccagttgataacttctccatc

SEQ ID NO: 415104 - DNA, 25 bp, Homo sapien
gcactctcagagactcaacatgtta

SEQ ID NO: 415105 - DNA, 25 bp, Homo sapien
aaaccattcaataagcagaggatgc

SEQ ID NO: 415106 - DNA, 25 bp, Homo sapien
tagagaaattctgtaggacgtcaag

SEQ ID NO: 415107 - DNA, 25 bp, Homo sapien
aggatgccaggcaggccactttctc

SEQ ID NO: 415108 - DNA, 25 bp, Homo sapien
caagattctatgtaattgcccgtac

SEQ ID NO: 415109 - DNA, 25 bp, Homo sapien
gatgtacattcgttgaccaggctgg

SEQ ID NO: 415110 - DNA, 25 bp, Homo sapien
cccttatagaaaatagtgcagcagc

SEQ ID NO: 415111 - DNA, 25 bp, Homo sapien
ccaaggacaagtgacaagagcagca

SEQ ID NO: 415112 - DNA, 25 bp, Homo sapien
tgcccggcctacataactaccttaa

SEQ ID NO: 415113 - DNA, 25 bp, Homo sapien
tgctcctggagggaactggccttta

SEQ ID NO: 415114 - DNA, 25 bp, Homo sapien
gacacacacatatgctctatcaagt

SEQ ID NO: 415115 - DNA, 25 bp, Homo sapien
taaagctccgaataaagactgtcat

SEQ ID NO: 415116 - DNA, 25 bp, Homo sapien
accatcataggagtaagtgtgcaac

SEQ ID NO: 415117 - DNA, 25 bp, Homo sapien
tcacaccagacttatctctgaatga

SEQ ID NO: 415118 - DNA, 25 bp, Homo sapien
atttcctagcattgatatttataaa

SEQ ID NO: 415119 - DNA, 25 bp, Homo sapien
ttcaaaaagtcaaacctatcttcat

SEQ ID NO: 415120 - DNA, 25 bp, Homo sapien
gccacttgctgcgtccttgagtctg

SEQ ID NO: 415121 - DNA, 25 bp, Homo sapien
ctgagtgtgattcttgctccgccac

SEQ ID NO: 415122 - DNA, 25 bp, Homo sapien
tgatgtgtgctttccttaatgtgag

SEQ ID NO: 415123 - DNA, 25 bp, Homo sapien
cttccaggtatcttagggctcatct

SEQ ID NO: 415124 - DNA, 25 bp, Homo sapien
tgtgaaatggggatgataacagtac

SEQ ID NO: 415125 - DNA, 25 bp, Homo sapien
ctgtgaaatggggatgataacagta

SEQ ID NO: 415126 - DNA, 25 bp, Homo sapien
aatgaatacttgcaaggcacttgga

SEQ ID NO: 415127 - DNA, 25 bp, Homo sapien
aaatgaatacttgcaaggcacttgg

SEQ ID NO: 415128 - DNA, 25 bp, Homo sapien
gctattattatttcctattatcgta

SEQ ID NO: 415129 - DNA, 25 bp, Homo sapien
ctgctattattatttcctattatcg

SEQ ID NO: 415130 - DNA, 25 bp, Homo sapien
taaggaaacttaactgctattatta

SEQ ID NO: 415131 - DNA, 25 bp, Homo sapien
atacttaaggaaacttaactgctat

SEQ ID NO: 415132 - DNA, 25 bp, Homo sapien
ttgaggaaaaggcagtggctatctg

SEQ ID NO: 415133 - DNA, 25 bp, Homo sapien
tcaggaaagctaacgttgctccctt

SEQ ID NO: 415134 - DNA, 25 bp, Homo sapien
gctaacgttgctcccttgaggaaaa

SEQ ID NO: 415135 - DNA, 25 bp, Homo sapien
tcatcattcaggaaagctaacgttg

SEQ ID NO: 415136 - DNA, 25 bp, Homo sapien
aacagcgaggtgataagtacatggc

SEQ ID NO: 415137 - DNA, 25 bp, Homo sapien
agaattacggtatttgcatatcagc

SEQ ID NO: 415138 - DNA, 25 bp, Homo sapien
gatgcaaggccaatctagaatcctg

SEQ ID NO: 415139 - DNA, 25 bp, Homo sapien
tcttttctggccatcttcatgaggg

SEQ ID NO: 415140 - DNA, 25 bp, Homo sapien
gatgtctctactaggcagtatttca

SEQ ID NO: 415141 - DNA, 25 bp, Homo sapien
caatgtcaccgagaaaaaatgctat

SEQ ID NO: 415142 - DNA, 25 bp, Homo sapien
tgctaagtatatgtcaacaatgtca

SEQ ID NO: 415143 - DNA, 25 bp, Homo sapien
cgtaagtcacatgtctaaatcacta

SEQ ID NO: 415144 - DNA, 25 bp, Homo sapien
tatactaatttagtcataccttgcc

SEQ ID NO: 415145 - DNA, 25 bp, Homo sapien
gtcataccttgcctcaaataactta

SEQ ID NO: 415146 - DNA, 25 bp, Homo sapien
gattttatactaatttagtcatacc

SEQ ID NO: 415147 - DNA, 25 bp, Homo sapien
ctaatttagtcataccttgcctcaa

SEQ ID NO: 415148 - DNA, 25 bp, Homo sapien
ctttggtgtaatggtaacgctttat

SEQ ID NO: 415149 - DNA, 25 bp, Homo sapien
taatggtaacgctttatggtttctg

SEQ ID NO: 415150 - DNA, 25 bp, Homo sapien
taacgctttatggtttctgatagta

SEQ ID NO: 415151 - DNA, 25 bp, Homo sapien
tggtgtaatggtaacgctttatggt

SEQ ID NO: 415152 - DNA, 25 bp, Homo sapien
gtggtagtagttgtagttttacagc

SEQ ID NO: 415153 - DNA, 25 bp, Homo sapien
tatattttataataatctgacaaaa

SEQ ID NO: 415154 - DNA, 25 bp, Homo sapien
tctgacaaaaatttattcttcaaac

SEQ ID NO: 415155 - DNA, 25 bp, Homo sapien
tattcttcaaacaagttcttattta

SEQ ID NO: 415156 - DNA, 25 bp, Homo sapien
ggctggcctggactccagcaatcct

SEQ ID NO: 415157 - DNA, 25 bp, Homo sapien
aaatagaagcactttgcaggctcgt

SEQ ID NO: 415158 - DNA, 25 bp, Homo sapien
aactatccaatcgaaggcagccaca

SEQ ID NO: 415159 - DNA, 25 bp, Homo sapien
gatattttccaaatagagactgcag

SEQ ID NO: 415160 - DNA, 25 bp, Homo sapien
gagactgcagaagtcaactatccaa

SEQ ID NO: 415161 - DNA, 25 bp, Homo sapien
caggctactaatttcataaggtacc

SEQ ID NO: 415162 - DNA, 25 bp, Homo sapien
gaacatctggtttaataagtgcatt

SEQ ID NO: 415163 - DNA, 25 bp, Homo sapien
gattggacacccctagtctacgctg

SEQ ID NO: 415164 - DNA, 25 bp, Homo sapien
tacatacagcgcttacaatgagaat

SEQ ID NO: 415165 - DNA, 25 bp, Homo sapien
aatatctactcccaggccacctgtt

SEQ ID NO: 415166 - DNA, 25 bp, Homo sapien
agcatctaggacaatatctactccc

SEQ ID NO: 415167 - DNA, 25 bp, Homo sapien
tctaggacaatatctactcccaggc

SEQ ID NO: 415168 - DNA, 25 bp, Homo sapien
taggacaatatctactcccaggcca

SEQ ID NO: 415169 - DNA, 25 bp, Homo sapien
cacccccagctagattaagtagttt

SEQ ID NO: 415170 - DNA, 25 bp, Homo sapien
gtttctcaagtatgttcatatttaa

SEQ ID NO: 415171 - DNA, 25 bp, Homo sapien
ccacccccagctagattaagtagtt

SEQ ID NO: 415172 - DNA, 25 bp, Homo sapien
ccccagctagattaagtagtttctc

SEQ ID NO: 415173 - DNA, 25 bp, Homo sapien
agtctgtgctcataatattacccac

SEQ ID NO: 415174 - DNA, 25 bp, Homo sapien
gctcctctatgatgtgctaactgaa

SEQ ID NO: 415175 - DNA, 25 bp, Homo sapien
actgaatagctattgtaccaaatgc

SEQ ID NO: 415176 - DNA, 25 bp, Homo sapien
tgttgaaatcactttggctcctcta

SEQ ID NO: 415177 - DNA, 25 bp, Homo sapien
gggaggtctgaatctttcaaggcac

SEQ ID NO: 415178 - DNA, 25 bp, Homo sapien
acagtgggtgtatggttatagaaca

SEQ ID NO: 415179 - DNA, 25 bp, Homo sapien
tacagtgggtgtatggttatagaac

SEQ ID NO: 415180 - DNA, 25 bp, Homo sapien
agtgggtgtatggttatagaacaga

SEQ ID NO: 415181 - DNA, 25 bp, Homo sapien
atatacagtgggtgtatggttatag

SEQ ID NO: 415182 - DNA, 25 bp, Homo sapien
aaatggatggctcattgctaaattt

SEQ ID NO: 415183 - DNA, 25 bp, Homo sapien
ctaatcacactaaatctaactttga

SEQ ID NO: 415184 - DNA, 25 bp, Homo sapien
aaagtcaatcaataagctattggca

SEQ ID NO: 415185 - DNA, 25 bp, Homo sapien
tataacaaaataggacactggaaaa

SEQ ID NO: 415186 - DNA, 25 bp, Homo sapien
gataatgcagagctgtataggcacg

SEQ ID NO: 415187 - DNA, 25 bp, Homo sapien
gagctgtataggcacgcactccatc

SEQ ID NO: 415188 - DNA, 25 bp, Homo sapien
ccatcccgaatgcttcctgctgctt

SEQ ID NO: 415189 - DNA, 25 bp, Homo sapien
ataggcacgcactccatcccgaatg

SEQ ID NO: 415190 - DNA, 25 bp, Homo sapien
ctgcatttagcaacaaactagtgcc

SEQ ID NO: 415191 - DNA, 25 bp, Homo sapien
gaaatgcttcctctagtagcaatga

SEQ ID NO: 415192 - DNA, 25 bp, Homo sapien
gactagccagagtagtcagcactgc

SEQ ID NO: 415193 - DNA, 25 bp, Homo sapien
gcaatgattcatgtggactagccag

SEQ ID NO: 415194 - DNA, 25 bp, Homo sapien
ctcatgtactctaacaacttcacaa

SEQ ID NO: 415195 - DNA, 25 bp, Homo sapien
gctcatgtactctaacaacttcaca

SEQ ID NO: 415196 - DNA, 25 bp, Homo sapien
ccacagcacccagccgggaaagtac

SEQ ID NO: 415197 - DNA, 25 bp, Homo sapien
acagcacccagccgggaaagtactt

SEQ ID NO: 415198 - DNA, 25 bp, Homo sapien
cacagcacccagccgggaaagtact

SEQ ID NO: 415199 - DNA, 25 bp, Homo sapien
ggttgaaagaatgataccttgcttc

SEQ ID NO: 415200 - DNA, 25 bp, Homo sapien
ctggttgaaagaatgataccttgct

SEQ ID NO: 415201 - DNA, 25 bp, Homo sapien
gttgaaagaatgataccttgcttcc

SEQ ID NO: 415202 - DNA, 25 bp, Homo sapien
ttgaaagaatgataccttgcttcca

SEQ ID NO: 415203 - DNA, 25 bp, Homo sapien
agactacaggatatacagcacttca

SEQ ID NO: 415204 - DNA, 25 bp, Homo sapien
ttctctagatatttgggccatgcga

SEQ ID NO: 415205 - DNA, 25 bp, Homo sapien
tttgatggtctgtaaagactacagg

SEQ ID NO: 415206 - DNA, 25 bp, Homo sapien
ggccatgcgattattgtgaccagga

SEQ ID NO: 415207 - DNA, 25 bp, Homo sapien
catgcttgccccttatgatttggac

SEQ ID NO: 415208 - DNA, 25 bp, Homo sapien
aaatgtttctctgctaccaagtacc

SEQ ID NO: 415209 - DNA, 25 bp, Homo sapien
tccctgctaggtgtgattctcaaca

SEQ ID NO: 415210 - DNA, 25 bp, Homo sapien
tctcccctagagagtgaaccgttta

SEQ ID NO: 415211 - DNA, 25 bp, Homo sapien
ttctctcccaacaggaaataaatcc

SEQ ID NO: 415212 - DNA, 25 bp, Homo sapien
caatttctctcccaacaggaaataa

SEQ ID NO: 415213 - DNA, 25 bp, Homo sapien
tccagcaatttctctcccaacagga

SEQ ID NO: 415214 - DNA, 25 bp, Homo sapien
agcaatttctctcccaacaggaaat

SEQ ID NO: 415215 - DNA, 25 bp, Homo sapien
ttcacaaagttatcctctgtaacag

SEQ ID NO: 415216 - DNA, 25 bp, Homo sapien
tcacaaagttatcctctgtaacagg

SEQ ID NO: 415217 - DNA, 25 bp, Homo sapien
agagcacaagctttaacttgaagtt

SEQ ID NO: 415218 - DNA, 25 bp, Homo sapien
gtcgctacagagaactactactcgg

SEQ ID NO: 415219 - DNA, 25 bp, Homo sapien
gtttgctgtcgctacagagaactac

SEQ ID NO: 415220 - DNA, 25 bp, Homo sapien
agagaactactactcggccaggcgc

SEQ ID NO: 415221 - DNA, 25 bp, Homo sapien
tagatagtttgctgtcgctacagag

SEQ ID NO: 415222 - DNA, 25 bp, Homo sapien
tcttctttccaattcgaatgctctt

SEQ ID NO: 415223 - DNA, 25 bp, Homo sapien
tctttccaattcgaatgctctttct

SEQ ID NO: 415224 - DNA, 25 bp, Homo sapien
cttctttccaattcgaatgctcttt

SEQ ID NO: 415225 - DNA, 25 bp, Homo sapien
ttctttccaattcgaatgctctttc

SEQ ID NO: 415226 - DNA, 25 bp, Homo sapien
cttttcttgaaatacaaatgttatt

SEQ ID NO: 415227 - DNA, 25 bp, Homo sapien
gaaatacaaatgttatttcttcatc

SEQ ID NO: 415228 - DNA, 25 bp, Homo sapien
aatacaaatgttatttcttcatctg

SEQ ID NO: 415229 - DNA, 25 bp, Homo sapien
cttgaaatacaaatgttatttcttc

SEQ ID NO: 415230 - DNA, 25 bp, Homo sapien
cctgagctcaatgtagttcattggg

SEQ ID NO: 415231 - DNA, 25 bp, Homo sapien
ccacgctcggccaatatgtgtattt

SEQ ID NO: 415232 - DNA, 25 bp, Homo sapien
cttctgctcataaaactctcctgag

SEQ ID NO: 415233 - DNA, 25 bp, Homo sapien
ctctcctgagctcaatgtagttcat

SEQ ID NO: 415234 - DNA, 25 bp, Homo sapien
caaaaagagcatagttaatcttaga

SEQ ID NO: 415235 - DNA, 25 bp, Homo sapien
tatttcattgcacaaggctggcagc

SEQ ID NO: 415236 - DNA, 25 bp, Homo sapien
atttcattgcacaaggctggcagct

SEQ ID NO: 415237 - DNA, 25 bp, Homo sapien
catagttaatcttagaaatatttca

SEQ ID NO: 415238 - DNA, 25 bp, Homo sapien
taaacgtcttatcccctgctgtaag

SEQ ID NO: 415239 - DNA, 25 bp, Homo sapien
tcttgtatggcgaactacctcactt

SEQ ID NO: 415240 - DNA, 25 bp, Homo sapien
tcaaatctaaacgtcttatcccctg

SEQ ID NO: 415241 - DNA, 25 bp, Homo sapien
tacctcactttcaaatctaaacgtc

SEQ ID NO: 415242 - DNA, 25 bp, Homo sapien
tgtagcagccactagcacaggtggc

SEQ ID NO: 415243 - DNA, 25 bp, Homo sapien
tctactcataacgtggacagcagca

SEQ ID NO: 415244 - DNA, 25 bp, Homo sapien
tatacactgcaatggctgcgggatc

SEQ ID NO: 415245 - DNA, 25 bp, Homo sapien
tactggacagagttcaggtaaaacc

SEQ ID NO: 415246 - DNA, 25 bp, Homo sapien
aagagggccgatctggctcaaaagc

SEQ ID NO: 415247 - DNA, 25 bp, Homo sapien
taactgctttccgaaaacagcaaag

SEQ ID NO: 415248 - DNA, 25 bp, Homo sapien
tcaaaagccacatacagcgaataac

SEQ ID NO: 415249 - DNA, 25 bp, Homo sapien
gattccgccgtttagcataatgaag

SEQ ID NO: 415250 - DNA, 25 bp, Homo sapien
agagaaagaaaaagacactcaaatt

SEQ ID NO: 415251 - DNA, 25 bp, Homo sapien
ctgagaagaagtaacagagaaagaa

SEQ ID NO: 415252 - DNA, 25 bp, Homo sapien
taacagagaaagaaaaagacactca

SEQ ID NO: 415253 - DNA, 25 bp, Homo sapien
cagagaaagaaaaagacactcaaat

SEQ ID NO: 415254 - DNA, 25 bp, Homo sapien
caatcaaaacccgtcaaggtccagg

SEQ ID NO: 415255 - DNA, 25 bp, Homo sapien
tacaatcaaaacccgtcaaggtcca

SEQ ID NO: 415256 - DNA, 25 bp, Homo sapien
ctctgcctccataaaagtagaggga

SEQ ID NO: 415257 - DNA, 25 bp, Homo sapien
gcctccataaaagtagagggagatg

SEQ ID NO: 415258 - DNA, 25 bp, Homo sapien
agggttcgacgcgaaccaccatcct

SEQ ID NO: 415259 - DNA, 25 bp, Homo sapien
gcctcagctaagctaggcctgggcc

SEQ ID NO: 415260 - DNA, 25 bp, Homo sapien
caagacacaggacgcgtttcccggg

SEQ ID NO: 415261 - DNA, 25 bp, Homo sapien
ccgtttcccaagacacaggacgcgt

SEQ ID NO: 415262 - DNA, 25 bp, Homo sapien
gaggctgtccagaacgccatggcaa

SEQ ID NO: 415263 - DNA, 25 bp, Homo sapien
caccttccagtccttcgtcagagag

SEQ ID NO: 415264 - DNA, 25 bp, Homo sapien
tcaggccgctcgtcactcctgaagg

SEQ ID NO: 415265 - DNA, 25 bp, Homo sapien
catggcaaccggtctcggaactaca

SEQ ID NO: 415266 - DNA, 25 bp, Homo sapien
tagtgtctctcacggcaacgagcag

SEQ ID NO: 415267 - DNA, 25 bp, Homo sapien
taaatctcctgttacgcctacatgg

SEQ ID NO: 415268 - DNA, 25 bp, Homo sapien
gctgattggctcattcggcttgtca

SEQ ID NO: 415269 - DNA, 25 bp, Homo sapien
cataaaccacgataggcaacctcag

SEQ ID NO: 415270 - DNA, 25 bp, Homo sapien
tctgcgcgatggctgcccggggcat

SEQ ID NO: 415271 - DNA, 25 bp, Homo sapien
gggggtctgcgcgatggctgcccgg

SEQ ID NO: 415272 - DNA, 25 bp, Homo sapien
ggcggcctggaccacgggcggctgc

SEQ ID NO: 415273 - DNA, 25 bp, Homo sapien
ggctgcaaggcggcggcctggacca

SEQ ID NO: 415274 - DNA, 25 bp, Homo sapien
aaatttagatacatgcaggctccgg

SEQ ID NO: 415275 - DNA, 25 bp, Homo sapien
caggctccggccagatgcgtttctt

SEQ ID NO: 415276 - DNA, 25 bp, Homo sapien
gattcagactcaagaaggctttgct

SEQ ID NO: 415277 - DNA, 25 bp, Homo sapien
ggtgtggacccaagacacaattgca

SEQ ID NO: 415278 - DNA, 25 bp, Homo sapien
gactctggctcggacctgttttaaa

SEQ ID NO: 415279 - DNA, 25 bp, Homo sapien
tgttttaaaccggtgtagatctcta

SEQ ID NO: 415280 - DNA, 25 bp, Homo sapien
ttacaaatgcggactctggctcgga

SEQ ID NO: 415281 - DNA, 25 bp, Homo sapien
gccattttacaaatgcggactctgg

SEQ ID NO: 415282 - DNA, 25 bp, Homo sapien
gaccaacctcttcctctgtctgtat

SEQ ID NO: 415283 - DNA, 25 bp, Homo sapien
tcttctgaccaacctcttcctctgt

SEQ ID NO: 415284 - DNA, 25 bp, Homo sapien
ctcttcctctgtctgtatatcccat

SEQ ID NO: 415285 - DNA, 25 bp, Homo sapien
ccacctttcttctgaccaacctctt

SEQ ID NO: 415286 - DNA, 25 bp, Homo sapien
tgaacttctctgagggtttttacta

SEQ ID NO: 415287 - DNA, 25 bp, Homo sapien
tgcctttgaacttctctgagggttt

SEQ ID NO: 415288 - DNA, 25 bp, Homo sapien
gccatatctgtaactgtccttaact

SEQ ID NO: 415289 - DNA, 25 bp, Homo sapien
cagtaggtggctcctccgtcctgct

SEQ ID NO: 415290 - DNA, 25 bp, Homo sapien
tgtccttaactctctgtgcatggca

SEQ ID NO: 415291 - DNA, 25 bp, Homo sapien
gagccttgcaggtcagtgaccccac

SEQ ID NO: 415292 - DNA, 25 bp, Homo sapien
tcctgtagcaagttcaggtttagtc

SEQ ID NO: 415293 - DNA, 25 bp, Homo sapien
gtttagtcattctgtactgctttgg

SEQ ID NO: 415294 - DNA, 25 bp, Homo sapien
tttgcaagttcttatctgtttggaa

SEQ ID NO: 415295 - DNA, 25 bp, Homo sapien
caagttcaggtttagtcattctgta

SEQ ID NO: 415296 - DNA, 25 bp, Homo sapien
aaatgcggcatctgtgtagccccag

SEQ ID NO: 415297 - DNA, 25 bp, Homo sapien
accttcccaaatgcggcatctgtgt

SEQ ID NO: 415298 - DNA, 25 bp, Homo sapien
tcccaaatgcggcatctgtgtagcc

SEQ ID NO: 415299 - DNA, 25 bp, Homo sapien
atgcggcatctgtgtagccccagag

SEQ ID NO: 415300 - DNA, 25 bp, Homo sapien
ttatctcctgattgggcaaatactt

SEQ ID NO: 415301 - DNA, 25 bp, Homo sapien
aactctaactggcaaaaggactcag

SEQ ID NO: 415302 - DNA, 25 bp, Homo sapien
aatacttaacagtccttagcagtct

SEQ ID NO: 415303 - DNA, 25 bp, Homo sapien
agtccttagcagtctctccattgag

SEQ ID NO: 415304 - DNA, 25 bp, Homo sapien
tattactttgaagcccagtttacta

SEQ ID NO: 415305 - DNA, 25 bp, Homo sapien
ctcactgagctgtcttattcttaaa

SEQ ID NO: 415306 - DNA, 25 bp, Homo sapien
tatgtgttgcaagtaagtgttttct

SEQ ID NO: 415307 - DNA, 25 bp, Homo sapien
actttttctaatgtatgtgttgcaa

SEQ ID NO: 415308 - DNA, 25 bp, Homo sapien
ccaaaaggattttatgaggactaag

SEQ ID NO: 415309 - DNA, 25 bp, Homo sapien
tgagaagtagtctgattcacaaacc

SEQ ID NO: 415310 - DNA, 25 bp, Homo sapien
caaacctctggttaaatatggtgtc

SEQ ID NO: 415311 - DNA, 25 bp, Homo sapien
tctgcaataatctcaaaggaagctt

SEQ ID NO: 415312 - DNA, 25 bp, Homo sapien
gagtacagtgacaccgtcttagctc

SEQ ID NO: 415313 - DNA, 25 bp, Homo sapien
ccgagctcaggttattctgccacct

SEQ ID NO: 415314 - DNA, 25 bp, Homo sapien
ctgtgcccagtcaatactcattttt

SEQ ID NO: 415315 - DNA, 25 bp, Homo sapien
acctcccgagctcaggttattctgc

SEQ ID NO: 415316 - DNA, 25 bp, Homo sapien
gaaattgcagacagagcattagctg

SEQ ID NO: 415317 - DNA, 25 bp, Homo sapien
tcactaaggaagtgtagacgcagcc

SEQ ID NO: 415318 - DNA, 25 bp, Homo sapien
tcagatgtcgaagcttaacaagcca

SEQ ID NO: 415319 - DNA, 25 bp, Homo sapien
cattagctgtaatctgtcctggaag

SEQ ID NO: 415320 - DNA, 25 bp, Homo sapien
aaggccagagttaacttaggtgatc

SEQ ID NO: 415321 - DNA, 25 bp, Homo sapien
gaagaatgattctgttatctacgtc

SEQ ID NO: 415322 - DNA, 25 bp, Homo sapien
tacgtcagaaggatagacaggaatt

SEQ ID NO: 415323 - DNA, 25 bp, Homo sapien
gttaacttaggtgatctcaatggat

SEQ ID NO: 415324 - DNA, 25 bp, Homo sapien
tttacaaagccctgcggtagtagca

SEQ ID NO: 415325 - DNA, 25 bp, Homo sapien
tagcagcggcaaaagatgttaaact

SEQ ID NO: 415326 - DNA, 25 bp, Homo sapien
gtgaaacagtttcccggagatctct

SEQ ID NO: 415327 - DNA, 25 bp, Homo sapien
gtagtccacatacgcagaaccctgg

SEQ ID NO: 415328 - DNA, 25 bp, Homo sapien
cagccaagccggtcgtttcgggaga

SEQ ID NO: 415329 - DNA, 25 bp, Homo sapien
tagtctaaagcgagtagcctctcca

SEQ ID NO: 415330 - DNA, 25 bp, Homo sapien
gagtcatgcctctgtagtaccttat

SEQ ID NO: 415331 - DNA, 25 bp, Homo sapien
aagaatgcgagcttagagtcatgcc

SEQ ID NO: 415332 - DNA, 25 bp, Homo sapien
tggttttgcaaaaagacccactatc

SEQ ID NO: 415333 - DNA, 25 bp, Homo sapien
ttttgcaaaaagacccactatcaag

SEQ ID NO: 415334 - DNA, 25 bp, Homo sapien
ggttttgcaaaaagacccactatca

SEQ ID NO: 415335 - DNA, 25 bp, Homo sapien
tttgcaaaaagacccactatcaagg

SEQ ID NO: 415336 - DNA, 25 bp, Homo sapien
tgtagccacatgagaaagcactctg

SEQ ID NO: 415337 - DNA, 25 bp, Homo sapien
tcagtagacaacaccactgaggtcg

SEQ ID NO: 415338 - DNA, 25 bp, Homo sapien
tgagcccaattaaagcgaaggtgtt

SEQ ID NO: 415339 - DNA, 25 bp, Homo sapien
taaagacgtatagaatgagcccaat

SEQ ID NO: 415340 - DNA, 25 bp, Homo sapien
tgcagagagcgaggacctctcctcc

SEQ ID NO: 415341 - DNA, 25 bp, Homo sapien
tcacggatatgaatgtaaaatatat

SEQ ID NO: 415342 - DNA, 25 bp, Homo sapien
cagttgcacttcagtattttcacgg

SEQ ID NO: 415343 - DNA, 25 bp, Homo sapien
cctgcggctttaacaactgtaatac

SEQ ID NO: 415344 - DNA, 25 bp, Homo sapien
gaaggtcaccgtacatcgctgggat

SEQ ID NO: 415345 - DNA, 25 bp, Homo sapien
aggaaccggtcagccaagggtcatt

SEQ ID NO: 415346 - DNA, 25 bp, Homo sapien
gcgttgagcagagagagtagccttt

SEQ ID NO: 415347 - DNA, 25 bp, Homo sapien
caggcctgccctttgaaaagccggt

SEQ ID NO: 415348 - DNA, 25 bp, Homo sapien
ttgagaatccttctgtcacaccaag

SEQ ID NO: 415349 - DNA, 25 bp, Homo sapien
tctgtcacaccaagatgttcatgga

SEQ ID NO: 415350 - DNA, 25 bp, Homo sapien
tgtcacaccaagatgttcatggaaa

SEQ ID NO: 415351 - DNA, 25 bp, Homo sapien
gtcacaccaagatgttcatggaaaa

SEQ ID NO: 415352 - DNA, 25 bp, Homo sapien
ccataggtccttctttccgattcct

SEQ ID NO: 415353 - DNA, 25 bp, Homo sapien
caaatttaccctgaaccttctgctg

SEQ ID NO: 415354 - DNA, 25 bp, Homo sapien
acctgcaccgtgtaaaacttgaaga

SEQ ID NO: 415355 - DNA, 25 bp, Homo sapien
aagcaagccaggacttttccccata

SEQ ID NO: 415356 - DNA, 25 bp, Homo sapien
agccagtggccactacgggcctgat

SEQ ID NO: 415357 - DNA, 25 bp, Homo sapien
tcaaggcaactgtggggcatcctta

SEQ ID NO: 415358 - DNA, 25 bp, Homo sapien
caactgtggggcatccttaaaggga

SEQ ID NO: 415359 - DNA, 25 bp, Homo sapien
cactacgggcctgatgtttctgtag

SEQ ID NO: 415360 - DNA, 25 bp, Homo sapien
cttgcagccctggagaattctgctt

SEQ ID NO: 415361 - DNA, 25 bp, Homo sapien
gggtgttgatataatgatgactcat

SEQ ID NO: 415362 - DNA, 25 bp, Homo sapien
gactctgagtgaggtcgagggtgtt

SEQ ID NO: 415363 - DNA, 25 bp, Homo sapien
cctggagaattctgcttgacctcag

SEQ ID NO: 415364 - DNA, 25 bp, Homo sapien
ccaactgaaagaaagcgacaaggat

SEQ ID NO: 415365 - DNA, 25 bp, Homo sapien
ggatacatccacgagctcattgtca

SEQ ID NO: 415366 - DNA, 25 bp, Homo sapien
accgaggagaactatgtgaatgacc

SEQ ID NO: 415367 - DNA, 25 bp, Homo sapien
tgcagctggtcacagaggtaaggga

SEQ ID NO: 415368 - DNA, 25 bp, Homo sapien
gagtgctgtggtagtctggcaacca

SEQ ID NO: 415369 - DNA, 25 bp, Homo sapien
ccaaacgggtgtgaaaccatcttgt

SEQ ID NO: 415370 - DNA, 25 bp, Homo sapien
taacatccaggaaagacgcagcagg

SEQ ID NO: 415371 - DNA, 25 bp, Homo sapien
ccttttgtccacgtccatgggaaga

SEQ ID NO: 415372 - DNA, 25 bp, Homo sapien
cagcgatggagtcagtcaccgaggt

SEQ ID NO: 415373 - DNA, 25 bp, Homo sapien
tggccactggcttattagaggagct

SEQ ID NO: 415374 - DNA, 25 bp, Homo sapien
cagtcaccgaggtggccactggctt

SEQ ID NO: 415375 - DNA, 25 bp, Homo sapien
cacagcgatggagtcagtcaccgag

SEQ ID NO: 415376 - DNA, 25 bp, Homo sapien
gggtctgtgtgtccttcttgcatgc

SEQ ID NO: 415377 - DNA, 25 bp, Homo sapien
ctgtgtgtccttcttgcatgctgcc

SEQ ID NO: 415378 - DNA, 25 bp, Homo sapien
gctgccctgtgcttctttctggctt

SEQ ID NO: 415379 - DNA, 25 bp, Homo sapien
catgctgccctgtgcttctttctgg

SEQ ID NO: 415380 - DNA, 25 bp, Homo sapien
gagcctgctgttgggtgaattactg

SEQ ID NO: 415381 - DNA, 25 bp, Homo sapien
aatttccagggctagggcgacgctg

SEQ ID NO: 415382 - DNA, 25 bp, Homo sapien
tctcattgcaagagtaggtttcctg

SEQ ID NO: 415383 - DNA, 25 bp, Homo sapien
cgtgctttctggaaacgcactccga

SEQ ID NO: 415384 - DNA, 25 bp, Homo sapien
ggtaatgcggatactgctggaagac

SEQ ID NO: 415385 - DNA, 25 bp, Homo sapien
tgggagtcagtgtgggatgccagga

SEQ ID NO: 415386 - DNA, 25 bp, Homo sapien
tcattcctttcgcagttggttctgc

SEQ ID NO: 415387 - DNA, 25 bp, Homo sapien
ttctgcttgatgtgctcccgcctta

SEQ ID NO: 415388 - DNA, 25 bp, Homo sapien
tgtggcacgtcgttgccagctgcga

SEQ ID NO: 415389 - DNA, 25 bp, Homo sapien
gggctccagtcaatgcagctgcccg

SEQ ID NO: 415390 - DNA, 25 bp, Homo sapien
ggagacagttatcaggtctcagggc

SEQ ID NO: 415391 - DNA, 25 bp, Homo sapien
gtcccggtccctggagacagttatc

SEQ ID NO: 415392 - DNA, 25 bp, Homo sapien
ggggtcatggacaagattcccagtg

SEQ ID NO: 415393 - DNA, 25 bp, Homo sapien
gtcatggacaagattcccagtgaac

SEQ ID NO: 415394 - DNA, 25 bp, Homo sapien
gggtcatggacaagattcccagtga

SEQ ID NO: 415395 - DNA, 25 bp, Homo sapien
ggtcatggacaagattcccagtgaa

SEQ ID NO: 415396 - DNA, 25 bp, Homo sapien
gagcctgaagatgtggctcattcgg

SEQ ID NO: 415397 - DNA, 25 bp, Homo sapien
aaccaggtttgctgtgaccatgaga

SEQ ID NO: 415398 - DNA, 25 bp, Homo sapien
gatgtggctcattcggatccaggcc

SEQ ID NO: 415399 - DNA, 25 bp, Homo sapien
cctggaaccaggtttgctgtgacca

SEQ ID NO: 415400 - DNA, 25 bp, Homo sapien
aggctttagaggagcctgatgagag

SEQ ID NO: 415401 - DNA, 25 bp, Homo sapien
tgatgagagctatcctgggggccaa

SEQ ID NO: 415402 - DNA, 25 bp, Homo sapien
gaagcagtcttaggcccgtttgcat

SEQ ID NO: 415403 - DNA, 25 bp, Homo sapien
acaggtcagcccattccaggagaag

SEQ ID NO: 415404 - DNA, 25 bp, Homo sapien
catgcgtcatgcaatcttccggact

SEQ ID NO: 415405 - DNA, 25 bp, Homo sapien
cttgaatgacataacaaattatggc

SEQ ID NO: 415406 - DNA, 25 bp, Homo sapien
ttgattgagtcaccttgaatgacat

SEQ ID NO: 415407 - DNA, 25 bp, Homo sapien
tccggactacgggaagttctgcaag

SEQ ID NO: 415408 - DNA, 25 bp, Homo sapien
gaaaagccaatctgttatagtggat

SEQ ID NO: 415409 - DNA, 25 bp, Homo sapien
tcactcttttctgagagcacaggaa

SEQ ID NO: 415410 - DNA, 25 bp, Homo sapien
tgagacctttctttaaaccagtagc

SEQ ID NO: 415411 - DNA, 25 bp, Homo sapien
gctcttcctgtgtatcttgaaccta

SEQ ID NO: 415412 - DNA, 25 bp, Homo sapien
gacggtttgtccattggcagtcaca

SEQ ID NO: 415413 - DNA, 25 bp, Homo sapien
taaggcgacatatgaagggcctcat

SEQ ID NO: 415414 - DNA, 25 bp, Homo sapien
tctctggtgacctcgtaaggcgaca

SEQ ID NO: 415415 - DNA, 25 bp, Homo sapien
tgaggctcccgcaaagacggtttgt

SEQ ID NO: 415416 - DNA, 25 bp, Homo sapien
aatgtggtcatggttaggttgcaga

SEQ ID NO: 415417 - DNA, 25 bp, Homo sapien
ggtcatggttaggttgcagactcag

SEQ ID NO: 415418 - DNA, 25 bp, Homo sapien
ggaacctggaatgtggtcatggtta

SEQ ID NO: 415419 - DNA, 25 bp, Homo sapien
cctggaatgtggtcatggttaggtt

SEQ ID NO: 415420 - DNA, 25 bp, Homo sapien
ttttcactgatggcagaaaaccaac

SEQ ID NO: 415421 - DNA, 25 bp, Homo sapien
tatttctcgccaatgcgcacaatca

SEQ ID NO: 415422 - DNA, 25 bp, Homo sapien
ttccacccaagattgacggatcagt

SEQ ID NO: 415423 - DNA, 25 bp, Homo sapien
gacagacatgtcaacatatttctcg

SEQ ID NO: 415424 - DNA, 25 bp, Homo sapien
gaatcttggtcttgacagacatgtc

SEQ ID NO: 415425 - DNA, 25 bp, Homo sapien
actgcacagtcagataatcatttaa

SEQ ID NO: 415426 - DNA, 25 bp, Homo sapien
gtaagaggttataattacacctaga

SEQ ID NO: 415427 - DNA, 25 bp, Homo sapien
ctggaaatgtgaaaacgcgctaatc

SEQ ID NO: 415428 - DNA, 25 bp, Homo sapien
ttttgaaaggctaaatgtgttgcac

SEQ ID NO: 415429 - DNA, 25 bp, Homo sapien
tagatctaatatttcactagtactt

SEQ ID NO: 415430 - DNA, 25 bp, Homo sapien
gttagatctaatatttcactagtac

SEQ ID NO: 415431 - DNA, 25 bp, Homo sapien
gatctaatatttcactagtactttc

SEQ ID NO: 415432 - DNA, 25 bp, Homo sapien
atctaatatttcactagtactttct

SEQ ID NO: 415433 - DNA, 25 bp, Homo sapien
caatacttggccttgacttaggaag

SEQ ID NO: 415434 - DNA, 25 bp, Homo sapien
agtttttaattcagagagtgtggct

SEQ ID NO: 415435 - DNA, 25 bp, Homo sapien
gaagctcttgaggacagtttttaat

SEQ ID NO: 415436 - DNA, 25 bp, Homo sapien
cagagagtgtggcttcttctaaagg

SEQ ID NO: 415437 - DNA, 25 bp, Homo sapien
ttcaaggacggcctgtaaatgccac

SEQ ID NO: 415438 - DNA, 25 bp, Homo sapien
catgtccttggctgaaaagttgcca

SEQ ID NO: 415439 - DNA, 25 bp, Homo sapien
taatgcctgaagatgcagccccatc

SEQ ID NO: 415440 - DNA, 25 bp, Homo sapien
gcattcactccttgttcacgctgga

SEQ ID NO: 415441 - DNA, 25 bp, Homo sapien
gaaaggccaccggtcattatgccca

SEQ ID NO: 415442 - DNA, 25 bp, Homo sapien
tgaagaaggctgttaaaccaaaggc

SEQ ID NO: 415443 - DNA, 25 bp, Homo sapien
gaaatatacataccctccactgaga

SEQ ID NO: 415444 - DNA, 25 bp, Homo sapien
tgagacatgtaccaactgccaggta

SEQ ID NO: 415445 - DNA, 25 bp, Homo sapien
gatacaaaggcccaacggctctact

SEQ ID NO: 415446 - DNA, 25 bp, Homo sapien
gatacacgctggcttttccaaagca

SEQ ID NO: 415447 - DNA, 25 bp, Homo sapien
taaacggtagccaattatagcccac

SEQ ID NO: 415448 - DNA, 25 bp, Homo sapien
gggcaagcgacttcatctccctgca

SEQ ID NO: 415449 - DNA, 25 bp, Homo sapien
agatgcagaggtcactgtgcaaggt

SEQ ID NO: 415450 - DNA, 25 bp, Homo sapien
gatgcagaggtcactgtgcaaggta

SEQ ID NO: 415451 - DNA, 25 bp, Homo sapien
atgcagaggtcactgtgcaaggtac

SEQ ID NO: 415452 - DNA, 25 bp, Homo sapien
ttgggtattgcttaatcgaccattt

SEQ ID NO: 415453 - DNA, 25 bp, Homo sapien
cgcgatggacactcatcatggtaga

SEQ ID NO: 415454 - DNA, 25 bp, Homo sapien
tctccgcgatggacactcatcatgg

SEQ ID NO: 415455 - DNA, 25 bp, Homo sapien
taatcgaccattttcagcaagcaaa

SEQ ID NO: 415456 - DNA, 25 bp, Homo sapien
gatctgaaaagcaatccaggctgca

SEQ ID NO: 415457 - DNA, 25 bp, Homo sapien
aaaagcagtccaaatgtacccaaga

SEQ ID NO: 415458 - DNA, 25 bp, Homo sapien
tgagctggctatgaggatctgaaaa

SEQ ID NO: 415459 - DNA, 25 bp, Homo sapien
aggatcaaggtatagccacaggcca

SEQ ID NO: 415460 - DNA, 25 bp, Homo sapien
caaacgattcacttagggagctggt

SEQ ID NO: 415461 - DNA, 25 bp, Homo sapien
gagctggttaagatacagactctga

SEQ ID NO: 415462 - DNA, 25 bp, Homo sapien
tatcctttagacgatgctcctcaca

SEQ ID NO: 415463 - DNA, 25 bp, Homo sapien
ttgctgtgaggcctgagattcttca

SEQ ID NO: 415464 - DNA, 25 bp, Homo sapien
tgtgatgtcatttaggcttttcact

SEQ ID NO: 415465 - DNA, 25 bp, Homo sapien
gctgtgatgtcatttaggcttttca

SEQ ID NO: 415466 - DNA, 25 bp, Homo sapien
ctgtgatgtcatttaggcttttcac

SEQ ID NO: 415467 - DNA, 25 bp, Homo sapien
ggggccctgcctcttacagagtcca

SEQ ID NO: 415468 - DNA, 25 bp, Homo sapien
gagtccagggaacccagcagattct

SEQ ID NO: 415469 - DNA, 25 bp, Homo sapien
agagtccagggaacccagcagattc

SEQ ID NO: 415470 - DNA, 25 bp, Homo sapien
gcctcttacagagtccagggaaccc

SEQ ID NO: 415471 - DNA, 25 bp, Homo sapien
gcatagcgaccttcaataccgtata

SEQ ID NO: 415472 - DNA, 25 bp, Homo sapien
ggcatagcgaccttcaataccgtat

SEQ ID NO: 415473 - DNA, 25 bp, Homo sapien
catagcgaccttcaataccgtatac

SEQ ID NO: 415474 - DNA, 25 bp, Homo sapien
cttgattttaatatcgtctcctgta

SEQ ID NO: 415475 - DNA, 25 bp, Homo sapien
cctgtaataacttcctgtgataact

SEQ ID NO: 415476 - DNA, 25 bp, Homo sapien
tatcgtctcctgtaataacttcctg

SEQ ID NO: 415477 - DNA, 25 bp, Homo sapien
aataacttcctgtgataacttgggc

SEQ ID NO: 415478 - DNA, 25 bp, Homo sapien
ccacagaggtactgaagcatcgcac

SEQ ID NO: 415479 - DNA, 25 bp, Homo sapien
tcacaagcttggcaaatggtctgac

SEQ ID NO: 415480 - DNA, 25 bp, Homo sapien
aatggtctgaccacagaggtactga

SEQ ID NO: 415481 - DNA, 25 bp, Homo sapien
aagcttggcaaatggtctgaccaca

SEQ ID NO: 415482 - DNA, 25 bp, Homo sapien
gttctgagagacactatcctgccca

SEQ ID NO: 415483 - DNA, 25 bp, Homo sapien
gaggctagcatacccgtaagacaga

SEQ ID NO: 415484 - DNA, 25 bp, Homo sapien
gacgtaccctcctcggaatgcaaat

SEQ ID NO: 415485 - DNA, 25 bp, Homo sapien
tagtttgctaggaatggaccgaggc

SEQ ID NO: 415486 - DNA, 25 bp, Homo sapien
cattttttcaaactcgatcttctgg

SEQ ID NO: 415487 - DNA, 25 bp, Homo sapien
ctgggtgattccgtgggttcaaatc

SEQ ID NO: 415488 - DNA, 25 bp, Homo sapien
accatggtgagatgcagcacaaaca

SEQ ID NO: 415489 - DNA, 25 bp, Homo sapien
gggtcatgatatgtaaagcaccatg

SEQ ID NO: 415490 - DNA, 25 bp, Homo sapien
tattccttagcattactagtaagtg

SEQ ID NO: 415491 - DNA, 25 bp, Homo sapien
ttccccggaattcagcgaagggcag

SEQ ID NO: 415492 - DNA, 25 bp, Homo sapien
cttagcattactagtaagtgatctc

SEQ ID NO: 415493 - DNA, 25 bp, Homo sapien
aagtgatctctgacaggttttacca

SEQ ID NO: 415494 - DNA, 25 bp, Homo sapien
tcggaagacgccaaggttacggcac

SEQ ID NO: 415495 - DNA, 25 bp, Homo sapien
tgccccgtaggcatcccgggggaca

SEQ ID NO: 415496 - DNA, 25 bp, Homo sapien
acgccaaggttacggcacgcgcagc

SEQ ID NO: 415497 - DNA, 25 bp, Homo sapien
gctgtgctcggaagacgccaaggtt

SEQ ID NO: 415498 - DNA, 25 bp, Homo sapien
accttgaagactgccagacttcccc

SEQ ID NO: 415499 - DNA, 25 bp, Homo sapien
ttggtaccggtcatcccaggaggga

SEQ ID NO: 415500 - DNA, 25 bp, Homo sapien
gctgggtcgtcctgagtcgctccca

SEQ ID NO: 415501 - DNA, 25 bp, Homo sapien
cgaagcatcgcaccctggtgctcga

SEQ ID NO: 415502 - DNA, 25 bp, Homo sapien
gggagagcccggacactgctggggc

SEQ ID NO: 415503 - DNA, 25 bp, Homo sapien
ctgccgggagagcccggacactgct

SEQ ID NO: 415504 - DNA, 25 bp, Homo sapien
ccgggagagcccggacactgctggg

SEQ ID NO: 415505 - DNA, 25 bp, Homo sapien
tgccgggagagcccggacactgctg

SEQ ID NO: 415506 - DNA, 25 bp, Homo sapien
gtcaaacccgagtgggaagagagaa

SEQ ID NO: 415507 - DNA, 25 bp, Homo sapien
cgcgcgttggcgtaaccgctaggtt

SEQ ID NO: 415508 - DNA, 25 bp, Homo sapien
ctgtaggtcaaacccgagtgggaag

SEQ ID NO: 415509 - DNA, 25 bp, Homo sapien
aagagagaaacgcgcaagggcgcac

SEQ ID NO: 415510 - DNA, 25 bp, Homo sapien
aagtgtaggcgtagggcgtcaggcc

SEQ ID NO: 415511 - DNA, 25 bp, Homo sapien
cagagacctccctcgggctgggagt

SEQ ID NO: 415512 - DNA, 25 bp, Homo sapien
gtagttcttagcagtggtaagggct

SEQ ID NO: 415513 - DNA, 25 bp, Homo sapien
tagcagtggtaagggctggaccctc

SEQ ID NO: 415514 - DNA, 25 bp, Homo sapien
caatggctttttctcacgttgcata

SEQ ID NO: 415515 - DNA, 25 bp, Homo sapien
gcgtcactggcttctttacacttcc

SEQ ID NO: 415516 - DNA, 25 bp, Homo sapien
ggagcggacaccacgtctctcttac

SEQ ID NO: 415517 - DNA, 25 bp, Homo sapien
tcacagttattaccagcgtcactgg

SEQ ID NO: 415518 - DNA, 25 bp, Homo sapien
caggcatgattcccactaatgatca

SEQ ID NO: 415519 - DNA, 25 bp, Homo sapien
cacaggcatgattcccactaatgat

SEQ ID NO: 415520 - DNA, 25 bp, Homo sapien
acaggcatgattcccactaatgatc

SEQ ID NO: 415521 - DNA, 25 bp, Homo sapien
aatggtagtttggacctactctgtt

SEQ ID NO: 415522 - DNA, 25 bp, Homo sapien
gcatgaatcctttctagcagaccag

SEQ ID NO: 415523 - DNA, 25 bp, Homo sapien
tctagcagaccagagccacttgttg

SEQ ID NO: 415524 - DNA, 25 bp, Homo sapien
agtgcccttgacagctttcagcaag

SEQ ID NO: 415525 - DNA, 25 bp, Homo sapien
ttcagcaaggatctctagcacttac

SEQ ID NO: 415526 - DNA, 25 bp, Homo sapien
gctggaaccgatcaggctttcaaca

SEQ ID NO: 415527 - DNA, 25 bp, Homo sapien
ggagtcatgccaatctatggaggtc

SEQ ID NO: 415528 - DNA, 25 bp, Homo sapien
caatctatggaggtcactgggctgg

SEQ ID NO: 415529 - DNA, 25 bp, Homo sapien
aaagtgttgatagaaatggacaatg

SEQ ID NO: 415530 - DNA, 25 bp, Homo sapien
ggagggtctgcagtatagacctcct

SEQ ID NO: 415531 - DNA, 25 bp, Homo sapien
ctgtatctgcaaggtgacagacgga

SEQ ID NO: 415532 - DNA, 25 bp, Homo sapien
gtttatctttaggacttggcgcatc

SEQ ID NO: 415533 - DNA, 25 bp, Homo sapien
ctgcaaggtgacagacggaggaccc

SEQ ID NO: 415534 - DNA, 25 bp, Homo sapien
tgcttagtgctcaaggtcaccgctc

SEQ ID NO: 415535 - DNA, 25 bp, Homo sapien
gctgaaggatcatctcgacacgagg

SEQ ID NO: 415536 - DNA, 25 bp, Homo sapien
tttgcgggcccagatagctacagtt

SEQ ID NO: 415537 - DNA, 25 bp, Homo sapien
caaacctcggtgttgttctcgctca

SEQ ID NO: 415538 - DNA, 25 bp, Homo sapien
tgggatatagtctcgtggtgcgccg

SEQ ID NO: 415539 - DNA, 25 bp, Homo sapien
caggtgcgtccgtcacccctttctt

SEQ ID NO: 415540 - DNA, 25 bp, Homo sapien
tcggctcgcgcacggtgcgcgcacc

SEQ ID NO: 415541 - DNA, 25 bp, Homo sapien
cgattttccaggtgcgtccgtcacc

SEQ ID NO: 415542 - DNA, 25 bp, Homo sapien
ggcactccctagagagatgaacccg

SEQ ID NO: 415543 - DNA, 25 bp, Homo sapien
tggcactccctagagagatgaaccc

SEQ ID NO: 415544 - DNA, 25 bp, Homo sapien
ctacatatgataaaaggaacagttc

SEQ ID NO: 415545 - DNA, 25 bp, Homo sapien
aatagtcactacatatgataaaagg

SEQ ID NO: 415546 - DNA, 25 bp, Homo sapien
cattgacctagcaagatcaccttaa

SEQ ID NO: 415547 - DNA, 25 bp, Homo sapien
atccatacttgtagtgagagatttt

SEQ ID NO: 415548 - DNA, 25 bp, Homo sapien
tccgttttgatgtccccagtgtcag

SEQ ID NO: 415549 - DNA, 25 bp, Homo sapien
caggcggcaggttccttgagatcca

SEQ ID NO: 415550 - DNA, 25 bp, Homo sapien
cagggccatgtgttatccgttttga

SEQ ID NO: 415551 - DNA, 25 bp, Homo sapien
gcagtgatactggatgcattccctt

SEQ ID NO: 415552 - DNA, 25 bp, Homo sapien
ggtcgatgatactaccaattttttg

SEQ ID NO: 415553 - DNA, 25 bp, Homo sapien
ttacctcgtcacatgaccatggcta

SEQ ID NO: 415554 - DNA, 25 bp, Homo sapien
ccttaatacgtgctttccatttctg

SEQ ID NO: 415555 - DNA, 25 bp, Homo sapien
gctggggtagctccacatccttaat

SEQ ID NO: 415556 - DNA, 25 bp, Homo sapien
gattattacactctcaattgctgca

SEQ ID NO: 415557 - DNA, 25 bp, Homo sapien
gaagcagcatggtgtaacagaaaga

SEQ ID NO: 415558 - DNA, 25 bp, Homo sapien
agccagagtgtgaattccagctcca

SEQ ID NO: 415559 - DNA, 25 bp, Homo sapien
ccagctccactgacttgctgcgtga

SEQ ID NO: 415560 - DNA, 25 bp, Homo sapien
tgtctttgaatatgtccaactccag

SEQ ID NO: 415561 - DNA, 25 bp, Homo sapien
agttgaatatctgaaacctctgtga

SEQ ID NO: 415562 - DNA, 25 bp, Homo sapien
tgctagccctactcatggcgtcatg

SEQ ID NO: 415563 - DNA, 25 bp, Homo sapien
aagagtagctagaattgttttagtc

SEQ ID NO: 415564 - DNA, 25 bp, Homo sapien
tagccacgcactgaaagtccctgct

SEQ ID NO: 415565 - DNA, 25 bp, Homo sapien
gaactcttcggagtctcctgttcca

SEQ ID NO: 415566 - DNA, 25 bp, Homo sapien
cttcttcggaaaagcacatgaactc

SEQ ID NO: 415567 - DNA, 25 bp, Homo sapien
ctttggacacttcttcggaaaagca

SEQ ID NO: 415568 - DNA, 25 bp, Homo sapien
cgttgctgtgcgtcaaggatgccaa

SEQ ID NO: 415569 - DNA, 25 bp, Homo sapien
taggtattgttacggctgcttccac

SEQ ID NO: 415570 - DNA, 25 bp, Homo sapien
tgtcaagagccagtaaccgttgctg

SEQ ID NO: 415571 - DNA, 25 bp, Homo sapien
tcttggctagcagagtgagtcatga

SEQ ID NO: 415572 - DNA, 25 bp, Homo sapien
agtatttgggttcttgcgataaaag

SEQ ID NO: 415573 - DNA, 25 bp, Homo sapien
cgataaaaggatatggcccggtgac

SEQ ID NO: 415574 - DNA, 25 bp, Homo sapien
cagatttcacgtggttgaatctaag

SEQ ID NO: 415575 - DNA, 25 bp, Homo sapien
tcacgtggttgaatctaagagtatt

SEQ ID NO: 415576 - DNA, 25 bp, Homo sapien
taatgcgcctagtggtactgccgat

SEQ ID NO: 415577 - DNA, 25 bp, Homo sapien
attctaatgcgcctagtggtactgc

SEQ ID NO: 415578 - DNA, 25 bp, Homo sapien
cctagtggtactgccgattttctct

SEQ ID NO: 415579 - DNA, 25 bp, Homo sapien
tctattctaatgcgcctagtggtac

SEQ ID NO: 415580 - DNA, 25 bp, Homo sapien
gctctttgatcctcatggaacattc

SEQ ID NO: 415581 - DNA, 25 bp, Homo sapien
ggctctttgatcctcatggaacatt

SEQ ID NO: 415582 - DNA, 25 bp, Homo sapien
ctttgatcctcatggaacattctat

SEQ ID NO: 415583 - DNA, 25 bp, Homo sapien
tctttgatcctcatggaacattcta

SEQ ID NO: 415584 - DNA, 25 bp, Homo sapien
tgaatgaatggtctcagtaaatgtg

SEQ ID NO: 415585 - DNA, 25 bp, Homo sapien
gaatgaatggtctcagtaaatgtgt

SEQ ID NO: 415586 - DNA, 25 bp, Homo sapien
gcctggcctgaaccactttggggac

SEQ ID NO: 415587 - DNA, 25 bp, Homo sapien
ccctcttgcccttcatggggggatg

SEQ ID NO: 415588 - DNA, 25 bp, Homo sapien
catggggggatgtcctttgaagaac

SEQ ID NO: 415589 - DNA, 25 bp, Homo sapien
ctggcctgaaccactttggggacgg

SEQ ID NO: 415590 - DNA, 25 bp, Homo sapien
tatttgtgctgcacggcccagaagg

SEQ ID NO: 415591 - DNA, 25 bp, Homo sapien
gatgctcccggttgacatttggcac

SEQ ID NO: 415592 - DNA, 25 bp, Homo sapien
cgtggagaagaacctaggaaggatt

SEQ ID NO: 415593 - DNA, 25 bp, Homo sapien
aaaatgtcaggtcaacttgatgctc

SEQ ID NO: 415594 - DNA, 25 bp, Homo sapien
ctcttccagtctgctccaggctgac

SEQ ID NO: 415595 - DNA, 25 bp, Homo sapien
tgacgggaagggaaaggcaagtagc

SEQ ID NO: 415596 - DNA, 25 bp, Homo sapien
ggaaaggcaagtagctgggtttgat

SEQ ID NO: 415597 - DNA, 25 bp, Homo sapien
ccagtctgctccaggctgacgggaa

SEQ ID NO: 415598 - DNA, 25 bp, Homo sapien
cagttcatgcaaataaacccagagg

SEQ ID NO: 415599 - DNA, 25 bp, Homo sapien
aaactctcctctctcaacaaaaatt

SEQ ID NO: 415600 - DNA, 25 bp, Homo sapien
gatgatgccaagctggactcttctt

SEQ ID NO: 415601 - DNA, 25 bp, Homo sapien
ggccaacagaacctcctcgtctaaa

SEQ ID NO: 415602 - DNA, 25 bp, Homo sapien
tgctgatggctttgaagggcattag

SEQ ID NO: 415603 - DNA, 25 bp, Homo sapien
tttccaaactgagaacctggattcc

SEQ ID NO: 415604 - DNA, 25 bp, Homo sapien
tagacatttactgccagtctctggg

SEQ ID NO: 415605 - DNA, 25 bp, Homo sapien
gaagggcattagctgtgcctcttcc

SEQ ID NO: 415606 - DNA, 25 bp, Homo sapien
tgccctgattttactcttgtgtcag

SEQ ID NO: 415607 - DNA, 25 bp, Homo sapien
tcactgaagttctataaggtttcac

SEQ ID NO: 415608 - DNA, 25 bp, Homo sapien
gtttcactggaatgggacttctggg

SEQ ID NO: 415609 - DNA, 25 bp, Homo sapien
tactcttgtgtcagcagtctgggcc

SEQ ID NO: 415610 - DNA, 25 bp, Homo sapien
gactctgggcaagacgtataatggt

SEQ ID NO: 415611 - DNA, 25 bp, Homo sapien
tgactctgggcaagacgtataatgg

SEQ ID NO: 415612 - DNA, 25 bp, Homo sapien
gttgactctgggcaagacgtataat

SEQ ID NO: 415613 - DNA, 25 bp, Homo sapien
tctgggcaagacgtataatggttta

SEQ ID NO: 415614 - DNA, 25 bp, Homo sapien
ggaccgactcctggctgacaaaggt

SEQ ID NO: 415615 - DNA, 25 bp, Homo sapien
aatacggcaggaccgactcctggct

SEQ ID NO: 415616 - DNA, 25 bp, Homo sapien
tctgactggctcagtggtccgtaag

SEQ ID NO: 415617 - DNA, 25 bp, Homo sapien
cagtggtccgtaaggaatacggcag

SEQ ID NO: 415618 - DNA, 25 bp, Homo sapien
caaagagggaaccctaatgtaggct

SEQ ID NO: 415619 - DNA, 25 bp, Homo sapien
gacattctcaaaccccaccgcatgt

SEQ ID NO: 415620 - DNA, 25 bp, Homo sapien
gatgtaccacataagtgcaaagtat

SEQ ID NO: 415621 - DNA, 25 bp, Homo sapien
tatcgatattgtgtcatcaatggaa

SEQ ID NO: 415622 - DNA, 25 bp, Homo sapien
tcgtagaccactagccacactgaga

SEQ ID NO: 415623 - DNA, 25 bp, Homo sapien
tgagagtgttggaaactaaagaccc

SEQ ID NO: 415624 - DNA, 25 bp, Homo sapien
gacccatccatttgtgagtcctgaa

SEQ ID NO: 415625 - DNA, 25 bp, Homo sapien
tttgcagtgactgaacgggctccca

SEQ ID NO: 415626 - DNA, 25 bp, Homo sapien
cagagtacagggactgatccaaggc

SEQ ID NO: 415627 - DNA, 25 bp, Homo sapien
ggcatagactgctagtttaccgtac

SEQ ID NO: 415628 - DNA, 25 bp, Homo sapien
tgttttcgagagagctacttagttg

SEQ ID NO: 415629 - DNA, 25 bp, Homo sapien
cttatagggtgatatccaaattgca

SEQ ID NO: 415630 - DNA, 25 bp, Homo sapien
tgatctatggaataacaaacttgag

SEQ ID NO: 415631 - DNA, 25 bp, Homo sapien
cagtcatttggttaggtggcattca

SEQ ID NO: 415632 - DNA, 25 bp, Homo sapien
gaatgggccattgtaaatgtaccct

SEQ ID NO: 415633 - DNA, 25 bp, Homo sapien
cgggaggcataccactttgttaagc

SEQ ID NO: 415634 - DNA, 25 bp, Homo sapien
tgttcgtattgatctgtcagctgca

SEQ ID NO: 415635 - DNA, 25 bp, Homo sapien
taatactgtggtctgttttgaacgg

SEQ ID NO: 415636 - DNA, 25 bp, Homo sapien
ggattgagacatttctatccaggca

SEQ ID NO: 415637 - DNA, 25 bp, Homo sapien
gctttaaaaaggcacgcagatggga

SEQ ID NO: 415638 - DNA, 25 bp, Homo sapien
gctccccaaaagaggaaccatacca

SEQ ID NO: 415639 - DNA, 25 bp, Homo sapien
cagattcgaaccaccaccttttggt

SEQ ID NO: 415640 - DNA, 25 bp, Homo sapien
tcccacaaaggaacagattcgaacc

SEQ ID NO: 415641 - DNA, 25 bp, Homo sapien
tactgtaattgtgagccttctcaca

SEQ ID NO: 415642 - DNA, 25 bp, Homo sapien
taaagtaagcagctgaagagcgagc

SEQ ID NO: 415643 - DNA, 25 bp, Homo sapien
ggcagtaccatacatagtctgaggc

SEQ ID NO: 415644 - DNA, 25 bp, Homo sapien
tattacagtgaattcgacaaccgca

SEQ ID NO: 415645 - DNA, 25 bp, Homo sapien
cgcacaagttggcagtaggtatccc

SEQ ID NO: 415646 - DNA, 25 bp, Homo sapien
tatttgctagaggagctactttgct

SEQ ID NO: 415647 - DNA, 25 bp, Homo sapien
taatttgatctgagtgttctgagca

SEQ ID NO: 415648 - DNA, 25 bp, Homo sapien
tgtgtgtagaagaaaacgtatgttc

SEQ ID NO: 415649 - DNA, 25 bp, Homo sapien
tatgttcttctactcagcattgccc

SEQ ID NO: 415650 - DNA, 25 bp, Homo sapien
tgctgtgcaaaagttagtagtcttc

SEQ ID NO: 415651 - DNA, 25 bp, Homo sapien
ttgtaagagaccagttagtacactg

SEQ ID NO: 415652 - DNA, 25 bp, Homo sapien
tacagtgttttagttgcaagcagaa

SEQ ID NO: 415653 - DNA, 25 bp, Homo sapien
gccagctgctgcattagccttcaaa

SEQ ID NO: 415654 - DNA, 25 bp, Homo sapien
ctaatgtttcttctcgtattcttgt

SEQ ID NO: 415655 - DNA, 25 bp, Homo sapien
ttctcgtattcttgtaaggttgtac

SEQ ID NO: 415656 - DNA, 25 bp, Homo sapien
aatgtttcttctcgtattcttgtaa

SEQ ID NO: 415657 - DNA, 25 bp, Homo sapien
ttcttctcgtattcttgtaaggttg

SEQ ID NO: 415658 - DNA, 25 bp, Homo sapien
ctccttttgactagtgggatgtgca

SEQ ID NO: 415659 - DNA, 25 bp, Homo sapien
gcttcaggagttgaacatccatttg

SEQ ID NO: 415660 - DNA, 25 bp, Homo sapien
tattgttccccatatgcttcaggag

SEQ ID NO: 415661 - DNA, 25 bp, Homo sapien
taatttgggatctcactggcatacc

SEQ ID NO: 415662 - DNA, 25 bp, Homo sapien
tagtaaccaggactcctgccagtct

SEQ ID NO: 415663 - DNA, 25 bp, Homo sapien
atagtaaccaggactcctgccagtc

SEQ ID NO: 415664 - DNA, 25 bp, Homo sapien
agtaaccaggactcctgccagtctt

SEQ ID NO: 415665 - DNA, 25 bp, Homo sapien
gtaaccaggactcctgccagtcttc

SEQ ID NO: 415666 - DNA, 25 bp, Homo sapien
tgtcctatcacgtctttttggtgca

SEQ ID NO: 415667 - DNA, 25 bp, Homo sapien
tgcactctgattctgggaccagtac

SEQ ID NO: 415668 - DNA, 25 bp, Homo sapien
tggccatagaatgggcaggctcctg

SEQ ID NO: 415669 - DNA, 25 bp, Homo sapien
caagagtcttattcctggctgcatg

SEQ ID NO: 415670 - DNA, 25 bp, Homo sapien
gaaatcgtttattgaaccagtctcc

SEQ ID NO: 415671 - DNA, 25 bp, Homo sapien
cagaccctggctacggatgaaatga

SEQ ID NO: 415672 - DNA, 25 bp, Homo sapien
tcagagaacctcatgcgagaggatg

SEQ ID NO: 415673 - DNA, 25 bp, Homo sapien
catagctaagtctggtacatgggta

SEQ ID NO: 415674 - DNA, 25 bp, Homo sapien
cctatttgatgatacgttttatatt

SEQ ID NO: 415675 - DNA, 25 bp, Homo sapien
gacaaggcagtctcccgattttcct

SEQ ID NO: 415676 - DNA, 25 bp, Homo sapien
aggcagtctcccgattttccttgtc

SEQ ID NO: 415677 - DNA, 25 bp, Homo sapien
ttctggacaaggcagtctcccgatt

SEQ ID NO: 415678 - DNA, 25 bp, Homo sapien
cttccacggtgtaatagggagccat

SEQ ID NO: 415679 - DNA, 25 bp, Homo sapien
cttcgctgttttggtagcgttttct

SEQ ID NO: 415680 - DNA, 25 bp, Homo sapien
tctgtggaaacttccacggtgtaat

SEQ ID NO: 415681 - DNA, 25 bp, Homo sapien
tgtggaaacttccacggtgtaatag

SEQ ID NO: 415682 - DNA, 25 bp, Homo sapien
gggagtggaagcagtctttgcccac

SEQ ID NO: 415683 - DNA, 25 bp, Homo sapien
gagtggaagcagtctttgcccacat

SEQ ID NO: 415684 - DNA, 25 bp, Homo sapien
ggagtggaagcagtctttgcccaca

SEQ ID NO: 415685 - DNA, 25 bp, Homo sapien
tcccggagggcaccctcaagagtgc

SEQ ID NO: 415686 - DNA, 25 bp, Homo sapien
atctcccggagggcaccctcaagag

SEQ ID NO: 415687 - DNA, 25 bp, Homo sapien
tctcccggagggcaccctcaagagt

SEQ ID NO: 415688 - DNA, 25 bp, Homo sapien
ctcccggagggcaccctcaagagtg

SEQ ID NO: 415689 - DNA, 25 bp, Homo sapien
aatggaaggcatacttgatgatgcg

SEQ ID NO: 415690 - DNA, 25 bp, Homo sapien
ctgtgagcaggtggatgaaatggaa

SEQ ID NO: 415691 - DNA, 25 bp, Homo sapien
tgaaatggaaggcatacttgatgat

SEQ ID NO: 415692 - DNA, 25 bp, Homo sapien
ggaaggcatacttgatgatgcgcac

SEQ ID NO: 415693 - DNA, 25 bp, Homo sapien
cataaggccctgcattgtgaggcag

SEQ ID NO: 415694 - DNA, 25 bp, Homo sapien
cagcataaggccctgcattgtgagg

SEQ ID NO: 415695 - DNA, 25 bp, Homo sapien
cagaagcgtttggcagcataaggcc

SEQ ID NO: 415696 - DNA, 25 bp, Homo sapien
ggcagcataaggccctgcattgtga

SEQ ID NO: 415697 - DNA, 25 bp, Homo sapien
gaatcctgcagggaaatgtcactga

SEQ ID NO: 415698 - DNA, 25 bp, Homo sapien
atggaatcctgcagggaaatgtcac

SEQ ID NO: 415699 - DNA, 25 bp, Homo sapien
tgcaatggaatcctgcagggaaatg

SEQ ID NO: 415700 - DNA, 25 bp, Homo sapien
ctgcaatggaatcctgcagggaaat

SEQ ID NO: 415701 - DNA, 25 bp, Homo sapien
ttcccaaagagcttggtgtcagggg

SEQ ID NO: 415702 - DNA, 25 bp, Homo sapien
tctctaccactgctggtgctgtctc

SEQ ID NO: 415703 - DNA, 25 bp, Homo sapien
aagagcttggtgtcaggggtctcta

SEQ ID NO: 415704 - DNA, 25 bp, Homo sapien
ttggtgtcaggggtctctaccactg

SEQ ID NO: 415705 - DNA, 25 bp, Homo sapien
agcaaaacttataatacctcctggg

SEQ ID NO: 415706 - DNA, 25 bp, Homo sapien
ccttgatcccctttgcttgcgagag

SEQ ID NO: 415707 - DNA, 25 bp, Homo sapien
gattgtgagctagtcattcagcctg

SEQ ID NO: 415708 - DNA, 25 bp, Homo sapien
tgtaacctgcagtaccagtggatcg

SEQ ID NO: 415709 - DNA, 25 bp, Homo sapien
caggtcatgcaatcctgtggcacaa

SEQ ID NO: 415710 - DNA, 25 bp, Homo sapien
gcatggcccgagtgtagcactggca

SEQ ID NO: 415711 - DNA, 25 bp, Homo sapien
ggtccctgacaagacgccattgggt

SEQ ID NO: 415712 - DNA, 25 bp, Homo sapien
gctggaatcttgaactagggaccct

SEQ ID NO: 415713 - DNA, 25 bp, Homo sapien
ggtgcatagctggatcctcagcaac

SEQ ID NO: 415714 - DNA, 25 bp, Homo sapien
ttggaagctccaaaacgaagccact

SEQ ID NO: 415715 - DNA, 25 bp, Homo sapien
tagggcagccgtgcagtatgccagt

SEQ ID NO: 415716 - DNA, 25 bp, Homo sapien
cccctgtgagtggttggtgcatagc

SEQ ID NO: 415717 - DNA, 25 bp, Homo sapien
tttccaggccacttatttgtcagag

SEQ ID NO: 415718 - DNA, 25 bp, Homo sapien
ggcagtagagccatagacaaagaca

SEQ ID NO: 415719 - DNA, 25 bp, Homo sapien
tgtcagagtagagcatccggtctcc

SEQ ID NO: 415720 - DNA, 25 bp, Homo sapien
aaagtatgtacagtgtaggagctgc

SEQ ID NO: 415721 - DNA, 25 bp, Homo sapien
gggcctctttggacaggctcagtct

SEQ ID NO: 415722 - DNA, 25 bp, Homo sapien
gcctctttggacaggctcagtcttc

SEQ ID NO: 415723 - DNA, 25 bp, Homo sapien
ggcctctttggacaggctcagtctt

SEQ ID NO: 415724 - DNA, 25 bp, Homo sapien
caatactcggcttgactggctgcat

SEQ ID NO: 415725 - DNA, 25 bp, Homo sapien
gatatggtgctcaggattgatgaca

SEQ ID NO: 415726 - DNA, 25 bp, Homo sapien
ttaggatacgaaacttggacttctg

SEQ ID NO: 415727 - DNA, 25 bp, Homo sapien
tatttatcctcatgatcctgtcagc

SEQ ID NO: 415728 - DNA, 25 bp, Homo sapien
gcccttccgacgctgcacctagagc

SEQ ID NO: 415729 - DNA, 25 bp, Homo sapien
tgcagtcctgattatgccacgaggg

SEQ ID NO: 415730 - DNA, 25 bp, Homo sapien
aatccctgcagtcctgattatgcca

SEQ ID NO: 415731 - DNA, 25 bp, Homo sapien
gaggtagatgttgccaatccctgca

SEQ ID NO: 415732 - DNA, 25 bp, Homo sapien
cagagaaggggagcgctgggagctg

SEQ ID NO: 415733 - DNA, 25 bp, Homo sapien
gagaaggggagcgctgggagctggg

SEQ ID NO: 415734 - DNA, 25 bp, Homo sapien
ctgccagagaaggggagcgctggga

SEQ ID NO: 415735 - DNA, 25 bp, Homo sapien
gccagagaaggggagcgctgggagc

SEQ ID NO: 415736 - DNA, 25 bp, Homo sapien
ctgccagtccctggcctgttttctg

SEQ ID NO: 415737 - DNA, 25 bp, Homo sapien
tgccagtccctggcctgttttctgc

SEQ ID NO: 415738 - DNA, 25 bp, Homo sapien
gccagtccctggcctgttttctgca

SEQ ID NO: 415739 - DNA, 25 bp, Homo sapien
ccagtccctggcctgttttctgcac

SEQ ID NO: 415740 - DNA, 25 bp, Homo sapien
cacattctgttagtcgcaggaggaa

SEQ ID NO: 415741 - DNA, 25 bp, Homo sapien
tagttttttgagagctacaccacaa

SEQ ID NO: 415742 - DNA, 25 bp, Homo sapien
aaagtattcaggtccgctgggctgc

SEQ ID NO: 415743 - DNA, 25 bp, Homo sapien
gcaggaggaaaaccatgtcgaaacg

SEQ ID NO: 415744 - DNA, 25 bp, Homo sapien
gagaaagcaatttgccttgagacag

SEQ ID NO: 415745 - DNA, 25 bp, Homo sapien
aaagcaatttgccttgagacagttc

SEQ ID NO: 415746 - DNA, 25 bp, Homo sapien
ctcagagaaagcaatttgccttgag

SEQ ID NO: 415747 - DNA, 25 bp, Homo sapien
gcaatttgccttgagacagttccat

SEQ ID NO: 415748 - DNA, 25 bp, Homo sapien
cccacagtgggttgaccaagctgcc

SEQ ID NO: 415749 - DNA, 25 bp, Homo sapien
ggttgaccaagctgcctatggcagg

SEQ ID NO: 415750 - DNA, 25 bp, Homo sapien
agaagccaagctttgtcccgaaagt

SEQ ID NO: 415751 - DNA, 25 bp, Homo sapien
tgcctcgcgctttgccccgcaaagg

SEQ ID NO: 415752 - DNA, 25 bp, Homo sapien
tcctaggcctatctgaactgctgcg

SEQ ID NO: 415753 - DNA, 25 bp, Homo sapien
cactgttgcgtgcttgtggctgtgt

SEQ ID NO: 415754 - DNA, 25 bp, Homo sapien
ccaagccttcctgtctgagcactgt

SEQ ID NO: 415755 - DNA, 25 bp, Homo sapien
taaatgaatcagtgtgggtagatcc

SEQ ID NO: 415756 - DNA, 25 bp, Homo sapien
gctgccaatctgtccaaaactcagc

SEQ ID NO: 415757 - DNA, 25 bp, Homo sapien
atggtttaactccactcctgtctcc

SEQ ID NO: 415758 - DNA, 25 bp, Homo sapien
tgccaatctgtccaaaactcagctg

SEQ ID NO: 415759 - DNA, 25 bp, Homo sapien
gctggtggtcgacgatctgcagatg

SEQ ID NO: 415760 - DNA, 25 bp, Homo sapien
aacgccgtgtgctgcgcgctttgtg

SEQ ID NO: 415761 - DNA, 25 bp, Homo sapien
acaaaacgccgtgtgctgcgcgctt

SEQ ID NO: 415762 - DNA, 25 bp, Homo sapien
aaacaaaacgccgtgtgctgcgcgc

SEQ ID NO: 415763 - DNA, 25 bp, Homo sapien
tgaataaaacaaaacgccgtgtgct

SEQ ID NO: 415764 - DNA, 25 bp, Homo sapien
caaggccgcaatgtgccgcagagca

SEQ ID NO: 415765 - DNA, 25 bp, Homo sapien
gcacggtcgcttgggcttccgaaaa

SEQ ID NO: 415766 - DNA, 25 bp, Homo sapien
tgggcttccgaaaagaagctgagta

SEQ ID NO: 415767 - DNA, 25 bp, Homo sapien
aatgtgccgcagagcacggtcgctt

SEQ ID NO: 415768 - DNA, 25 bp, Homo sapien
tcagctgcagtgtggtttcgatgtt

SEQ ID NO: 415769 - DNA, 25 bp, Homo sapien
cagaatgcacttgacgtcgggtagc

SEQ ID NO: 415770 - DNA, 25 bp, Homo sapien
taatggtgacaagaatcagctgcag

SEQ ID NO: 415771 - DNA, 25 bp, Homo sapien
gtgccacagtggcattttcagaggg

SEQ ID NO: 415772 - DNA, 25 bp, Homo sapien
taaccataattgcctttttagagac

SEQ ID NO: 415773 - DNA, 25 bp, Homo sapien
gcccaccataacgacctcatttaac

SEQ ID NO: 415774 - DNA, 25 bp, Homo sapien
catttaaccataattgcctttttag

SEQ ID NO: 415775 - DNA, 25 bp, Homo sapien
taggtaccagggataagggcttcaa

SEQ ID NO: 415776 - DNA, 25 bp, Homo sapien
gccttaagctctgacaaatttgaat

SEQ ID NO: 415777 - DNA, 25 bp, Homo sapien
tgctctgccttaagctctgacaaat

SEQ ID NO: 415778 - DNA, 25 bp, Homo sapien
tgccttaagctctgacaaatttgaa

SEQ ID NO: 415779 - DNA, 25 bp, Homo sapien
tctgccttaagctctgacaaatttg

SEQ ID NO: 415780 - DNA, 25 bp, Homo sapien
gggcccttagagtactgtcaccaga

SEQ ID NO: 415781 - DNA, 25 bp, Homo sapien
aagttgtagagaccgaatgagttgc

SEQ ID NO: 415782 - DNA, 25 bp, Homo sapien
ccgaatgagttgctacactactgac

SEQ ID NO: 415783 - DNA, 25 bp, Homo sapien
gttctgggaaagttgtagagaccga

SEQ ID NO: 415784 - DNA, 25 bp, Homo sapien
tgccagcaatctccttgatggtctc

SEQ ID NO: 415785 - DNA, 25 bp, Homo sapien
ccagcaatctccttgatggtctctg

SEQ ID NO: 415786 - DNA, 25 bp, Homo sapien
catgtgccagcaatctccttgatgg

SEQ ID NO: 415787 - DNA, 25 bp, Homo sapien
tgtgccagcaatctccttgatggtc

SEQ ID NO: 415788 - DNA, 25 bp, Homo sapien
tcggagatactgtgttgaggagcct

SEQ ID NO: 415789 - DNA, 25 bp, Homo sapien
gtggctttgtagcacagtcggagat

SEQ ID NO: 415790 - DNA, 25 bp, Homo sapien
ttttcatccacacgctgggtggctt

SEQ ID NO: 415791 - DNA, 25 bp, Homo sapien
tgaggagcctttgctcatggcaatg

SEQ ID NO: 415792 - DNA, 25 bp, Homo sapien
gcatgagaaatagccagagaatggg

SEQ ID NO: 415793 - DNA, 25 bp, Homo sapien
aatttggtgcgagcatgagaaatag

SEQ ID NO: 415794 - DNA, 25 bp, Homo sapien
ttaatttggtgcgagcatgagaaat

SEQ ID NO: 415795 - DNA, 25 bp, Homo sapien
gagaatgggagaagcatagcattcc

SEQ ID NO: 415796 - DNA, 25 bp, Homo sapien
ttctgacccatcttccacaccagcc

SEQ ID NO: 415797 - DNA, 25 bp, Homo sapien
cttctgacccatcttccacaccagc

SEQ ID NO: 415798 - DNA, 25 bp, Homo sapien
ctgacccatcttccacaccagccat

SEQ ID NO: 415799 - DNA, 25 bp, Homo sapien
tctgacccatcttccacaccagcca

SEQ ID NO: 415800 - DNA, 25 bp, Homo sapien
gccagctttgcgcaggtgtaaccag

SEQ ID NO: 415801 - DNA, 25 bp, Homo sapien
agccagctttgcgcaggtgtaacca

SEQ ID NO: 415802 - DNA, 25 bp, Homo sapien
ctgacacagtgtcctggtattgagg

SEQ ID NO: 415803 - DNA, 25 bp, Homo sapien
ctctgacacagtgtcctggtattga

SEQ ID NO: 415804 - DNA, 25 bp, Homo sapien
tctgacacagtgtcctggtattgag

SEQ ID NO: 415805 - DNA, 25 bp, Homo sapien
gagcagagctgattagaggaccagt

SEQ ID NO: 415806 - DNA, 25 bp, Homo sapien
aaggctggtcgcagggttagggagc

SEQ ID NO: 415807 - DNA, 25 bp, Homo sapien
ttcacagaactgagccgtcttgatg

SEQ ID NO: 415808 - DNA, 25 bp, Homo sapien
actgagccgtcttgatggcgaaggc

SEQ ID NO: 415809 - DNA, 25 bp, Homo sapien
cttgtacttcattagctaaacacga

SEQ ID NO: 415810 - DNA, 25 bp, Homo sapien
taaacacgagtatgtatctatgtac

SEQ ID NO: 415811 - DNA, 25 bp, Homo sapien
cattagctaaacacgagtatgtatc

SEQ ID NO: 415812 - DNA, 25 bp, Homo sapien
gcctgtgcaggtgaccttgtacttc

SEQ ID NO: 415813 - DNA, 25 bp, Homo sapien
tttgcttttgaatgccagcgttggc

SEQ ID NO: 415814 - DNA, 25 bp, Homo sapien
tagacccaatccatacagtgctttt

SEQ ID NO: 415815 - DNA, 25 bp, Homo sapien
gccccttggcccagagtctaaggaa

SEQ ID NO: 415816 - DNA, 25 bp, Homo sapien
cagcgttggcgtttcttgggtgcta

SEQ ID NO: 415817 - DNA, 25 bp, Homo sapien
ggatgctaacaccgcccacgtgctg

SEQ ID NO: 415818 - DNA, 25 bp, Homo sapien
cagctgccagagggatgctaacacc

SEQ ID NO: 415819 - DNA, 25 bp, Homo sapien
agctgccagagggatgctaacaccg

SEQ ID NO: 415820 - DNA, 25 bp, Homo sapien
gctaacaccgcccacgtgctgcagc

SEQ ID NO: 415821 - DNA, 25 bp, Homo sapien
tccaggatcacgatagcaagtcccc

SEQ ID NO: 415822 - DNA, 25 bp, Homo sapien
cttaatgtccaggatcacgatagca

SEQ ID NO: 415823 - DNA, 25 bp, Homo sapien
acgatagcaagtcccccttcatgca

SEQ ID NO: 415824 - DNA, 25 bp, Homo sapien
tgtccaggatcacgatagcaagtcc

SEQ ID NO: 415825 - DNA, 25 bp, Homo sapien
caaacgattgcatgttgagtgggac

SEQ ID NO: 415826 - DNA, 25 bp, Homo sapien
ggatcctcgaggataaaattatccc

SEQ ID NO: 415827 - DNA, 25 bp, Homo sapien
gacagcgaatccagagagtggatcc

SEQ ID NO: 415828 - DNA, 25 bp, Homo sapien
gacaaggatatctggccagtagaat

SEQ ID NO: 415829 - DNA, 25 bp, Homo sapien
acgatatccactctggcaggccagg

SEQ ID NO: 415830 - DNA, 25 bp, Homo sapien
gccagggccatagtcgagctgttaa

SEQ ID NO: 415831 - DNA, 25 bp, Homo sapien
tgtcgtcctgattgtatttaagtag

SEQ ID NO: 415832 - DNA, 25 bp, Homo sapien
taaatattgaagatgtgtcgtcctg

SEQ ID NO: 415833 - DNA, 25 bp, Homo sapien
tgaactcgtgccagaagaggaaagg

SEQ ID NO: 415834 - DNA, 25 bp, Homo sapien
tggttctacaggagcctgtgaactc

SEQ ID NO: 415835 - DNA, 25 bp, Homo sapien
gatgtggcagcagatgggaacttgt

SEQ ID NO: 415836 - DNA, 25 bp, Homo sapien
gagcctgtgaactcgtgccagaaga

SEQ ID NO: 415837 - DNA, 25 bp, Homo sapien
tttccaccggcatctctgtaaccgg

SEQ ID NO: 415838 - DNA, 25 bp, Homo sapien
gcttccgatttccaccggcatctct

SEQ ID NO: 415839 - DNA, 25 bp, Homo sapien
gatttccaccggcatctctgtaacc

SEQ ID NO: 415840 - DNA, 25 bp, Homo sapien
cggcatctctgtaaccggcatctct

SEQ ID NO: 415841 - DNA, 25 bp, Homo sapien
taatgggtagttttcatacttcgaa

SEQ ID NO: 415842 - DNA, 25 bp, Homo sapien
ctaatgggataatgggtagttttca

SEQ ID NO: 415843 - DNA, 25 bp, Homo sapien
ggataatgggtagttttcatacttc

SEQ ID NO: 415844 - DNA, 25 bp, Homo sapien
atgggataatgggtagttttcatac

SEQ ID NO: 415845 - DNA, 25 bp, Homo sapien
ctttgatgcgtgctgacattgtctg

SEQ ID NO: 415846 - DNA, 25 bp, Homo sapien
tttgatgcgtgctgacattgtctgg

SEQ ID NO: 415847 - DNA, 25 bp, Homo sapien
tccatgagttgtcctcagcagccag

SEQ ID NO: 415848 - DNA, 25 bp, Homo sapien
gtcacattccactccatgagttgtc

SEQ ID NO: 415849 - DNA, 25 bp, Homo sapien
aacatagacctgactgtttgaaaca

SEQ ID NO: 415850 - DNA, 25 bp, Homo sapien
gccacagtataacatagacctgact

SEQ ID NO: 415851 - DNA, 25 bp, Homo sapien
tacttgggtcccctctgggatattc

SEQ ID NO: 415852 - DNA, 25 bp, Homo sapien
ttctcagcatgcaaaaggggtttgt

SEQ ID NO: 415853 - DNA, 25 bp, Homo sapien
tgtggttgggcacgcagggtatcca

SEQ ID NO: 415854 - DNA, 25 bp, Homo sapien
gtggttgggcacgcagggtatccag

SEQ ID NO: 415855 - DNA, 25 bp, Homo sapien
tggttgggcacgcagggtatccagg

SEQ ID NO: 415856 - DNA, 25 bp, Homo sapien
ctgtggttgggcacgcagggtatcc

SEQ ID NO: 415857 - DNA, 25 bp, Homo sapien
cagaaatcttgtgttgaatggtgca

SEQ ID NO: 415858 - DNA, 25 bp, Homo sapien
tctaggtcatcgctttggaggtact

SEQ ID NO: 415859 - DNA, 25 bp, Homo sapien
ggtttaccctgaatccactctgacg

SEQ ID NO: 415860 - DNA, 25 bp, Homo sapien
taaggcagccgtcactttttgcagg

SEQ ID NO: 415861 - DNA, 25 bp, Homo sapien
cctggcttcatggttcctatggcct

SEQ ID NO: 415862 - DNA, 25 bp, Homo sapien
tggcttcatggttcctatggcctac

SEQ ID NO: 415863 - DNA, 25 bp, Homo sapien
tccctggcttcatggttcctatggc

SEQ ID NO: 415864 - DNA, 25 bp, Homo sapien
ctttccctggcttcatggttcctat

SEQ ID NO: 415865 - DNA, 25 bp, Homo sapien
aaggggacaccatccggccagcatt

SEQ ID NO: 415866 - DNA, 25 bp, Homo sapien
tgaggacaatccagtccctgctggt

SEQ ID NO: 415867 - DNA, 25 bp, Homo sapien
tgtctgaggacaatccagtccctgc

SEQ ID NO: 415868 - DNA, 25 bp, Homo sapien
tgaggtgtctgaggacaatccagtc

SEQ ID NO: 415869 - DNA, 25 bp, Homo sapien
tcccgcatatgcctcggtcctgcaa

SEQ ID NO: 415870 - DNA, 25 bp, Homo sapien
ctgtcccgcatatgcctcggtcctg

SEQ ID NO: 415871 - DNA, 25 bp, Homo sapien
tgcaaggggtcaggccatgccactt

SEQ ID NO: 415872 - DNA, 25 bp, Homo sapien
tcggtcctgcaaggggtcaggccat

SEQ ID NO: 415873 - DNA, 25 bp, Homo sapien
aaggctcttcctgtgtccggtgaga

SEQ ID NO: 415874 - DNA, 25 bp, Homo sapien
tctctgtggagtttacggcattcgt

SEQ ID NO: 415875 - DNA, 25 bp, Homo sapien
ggactttccaagtgctcccatggca

SEQ ID NO: 415876 - DNA, 25 bp, Homo sapien
gagctgcttgtgtggtgaattctgc

SEQ ID NO: 415877 - DNA, 25 bp, Homo sapien
gctgagccaggcgtcttgtcttgct

SEQ ID NO: 415878 - DNA, 25 bp, Homo sapien
ttgaacacgctgctgagccaggcgt

SEQ ID NO: 415879 - DNA, 25 bp, Homo sapien
tcagcctgcacaataaggtccactc

SEQ ID NO: 415880 - DNA, 25 bp, Homo sapien
cgctgctgagccaggcgtcttgtct

SEQ ID NO: 415881 - DNA, 25 bp, Homo sapien
gggagtactgacttggtcctgaatc

SEQ ID NO: 415882 - DNA, 25 bp, Homo sapien
cactgtcgcgattgggatctgtgaa

SEQ ID NO: 415883 - DNA, 25 bp, Homo sapien
ggttaaatgtcagggacaggagaga

SEQ ID NO: 415884 - DNA, 25 bp, Homo sapien
tcactgcagaaagataatttaaggg

SEQ ID NO: 415885 - DNA, 25 bp, Homo sapien
agaatgcgacctggtgcacagcgct

SEQ ID NO: 415886 - DNA, 25 bp, Homo sapien
cagcgctcagctcgaggagacttac

SEQ ID NO: 415887 - DNA, 25 bp, Homo sapien
ttagaatgcgacctggtgcacagcg

SEQ ID NO: 415888 - DNA, 25 bp, Homo sapien
tggtgcacagcgctcagctcgagga

SEQ ID NO: 415889 - DNA, 25 bp, Homo sapien
tgccatctgcatcgggcaggggtgg

SEQ ID NO: 415890 - DNA, 25 bp, Homo sapien
ttcttctgccatctgcatcgggcag

SEQ ID NO: 415891 - DNA, 25 bp, Homo sapien
cttctgccatctgcatcgggcaggg

SEQ ID NO: 415892 - DNA, 25 bp, Homo sapien
tctgccatctgcatcgggcaggggt

SEQ ID NO: 415893 - DNA, 25 bp, Homo sapien
ggcaactccatttttagcttggatc

SEQ ID NO: 415894 - DNA, 25 bp, Homo sapien
gctgtgtgttctcggctgcgctggg

SEQ ID NO: 415895 - DNA, 25 bp, Homo sapien
gtgaatatccggagatataacaggg

SEQ ID NO: 415896 - DNA, 25 bp, Homo sapien
tggatcctggcaggcaaccaacaag

SEQ ID NO: 415897 - DNA, 25 bp, Homo sapien
ccctggcagccgcgcacatgctgct

SEQ ID NO: 415898 - DNA, 25 bp, Homo sapien
tgctcagtgttgccagcgcacagca

SEQ ID NO: 415899 - DNA, 25 bp, Homo sapien
tggcagccgcgcacatgctgctcag

SEQ ID NO: 415900 - DNA, 25 bp, Homo sapien
gctcagtgttgccagcgcacagcag

SEQ ID NO: 415901 - DNA, 25 bp, Homo sapien
tgagcaagtcgtgtaaccttcaggg

SEQ ID NO: 415902 - DNA, 25 bp, Homo sapien
gagcaagtcgtgtaaccttcaggga

SEQ ID NO: 415903 - DNA, 25 bp, Homo sapien
ctgagcaagtcgtgtaaccttcagg

SEQ ID NO: 415904 - DNA, 25 bp, Homo sapien
tgagtcctcccttgattgatacggc

SEQ ID NO: 415905 - DNA, 25 bp, Homo sapien
tctggaatagtcttgggaggcagca

SEQ ID NO: 415906 - DNA, 25 bp, Homo sapien
gatgtcacgtaaaggcccaaagtgg

SEQ ID NO: 415907 - DNA, 25 bp, Homo sapien
aatgctagtgacaaaggtgtgaccc

SEQ ID NO: 415908 - DNA, 25 bp, Homo sapien
gttccctttcactgcaacaggtagg

SEQ ID NO: 415909 - DNA, 25 bp, Homo sapien
tagaaatcttcgtgcccttgcaaag

SEQ ID NO: 415910 - DNA, 25 bp, Homo sapien
agggtccacactgctgtgtcgcgca

SEQ ID NO: 415911 - DNA, 25 bp, Homo sapien
cttcgcttgttcatttccaacatct

SEQ ID NO: 415912 - DNA, 25 bp, Homo sapien
tgcttcaggtgcatggtcttgaaca

SEQ ID NO: 415913 - DNA, 25 bp, Homo sapien
ttctgttgaacacaacttggggagg

SEQ ID NO: 415914 - DNA, 25 bp, Homo sapien
tgaatctgcttcaggtgcatggtct

SEQ ID NO: 415915 - DNA, 25 bp, Homo sapien
gatggggatcgaaagggctgatggc

SEQ ID NO: 415916 - DNA, 25 bp, Homo sapien
ggtgagtcctgtgtgcagagtacat

SEQ ID NO: 415917 - DNA, 25 bp, Homo sapien
tgagtcctgtgtgcagagtacatgc

SEQ ID NO: 415918 - DNA, 25 bp, Homo sapien
tgcatcctctcactcccatagccag

SEQ ID NO: 415919 - DNA, 25 bp, Homo sapien
gtgagtcctgtgtgcagagtacatg

SEQ ID NO: 415920 - DNA, 25 bp, Homo sapien
gtgttgaggctccagctcagacaag

SEQ ID NO: 415921 - DNA, 25 bp, Homo sapien
tgggggtgggtgttgaggctccagc

SEQ ID NO: 415922 - DNA, 25 bp, Homo sapien
aatgagctgggggtgggtgttgagg

SEQ ID NO: 415923 - DNA, 25 bp, Homo sapien
agtgaaatgagctgggggtgggtgt

SEQ ID NO: 415924 - DNA, 25 bp, Homo sapien
gtggtcagcagaggtgttgacttgg

SEQ ID NO: 415925 - DNA, 25 bp, Homo sapien
tcagcagaggtgttgacttgggcca

SEQ ID NO: 415926 - DNA, 25 bp, Homo sapien
ggtcagcagaggtgttgacttgggc

SEQ ID NO: 415927 - DNA, 25 bp, Homo sapien
agcagaggtgttgacttgggccatg

SEQ ID NO: 415928 - DNA, 25 bp, Homo sapien
tccttaccaatgaccgaatccagag

SEQ ID NO: 415929 - DNA, 25 bp, Homo sapien
caatgaccgaatccagaggttaaga

SEQ ID NO: 415930 - DNA, 25 bp, Homo sapien
caaggctgacctcgtccttaccaat

SEQ ID NO: 415931 - DNA, 25 bp, Homo sapien
ctcagctttggggaatcccaaggct

SEQ ID NO: 415932 - DNA, 25 bp, Homo sapien
cagctctgtttggaacttgaggaag

SEQ ID NO: 415933 - DNA, 25 bp, Homo sapien
agctctgtttggaacttgaggaagt

SEQ ID NO: 415934 - DNA, 25 bp, Homo sapien
gctctgtttggaacttgaggaagtc

SEQ ID NO: 415935 - DNA, 25 bp, Homo sapien
ctccggggatgaggggccactcatc

SEQ ID NO: 415936 - DNA, 25 bp, Homo sapien
tccggggatgaggggccactcatct

SEQ ID NO: 415937 - DNA, 25 bp, Homo sapien
ggtgacctactgcatttgggtggcc

SEQ ID NO: 415938 - DNA, 25 bp, Homo sapien
gtgacctactgcatttgggtggcct

SEQ ID NO: 415939 - DNA, 25 bp, Homo sapien
aatcactgcgggtaaggcccatggc

SEQ ID NO: 415940 - DNA, 25 bp, Homo sapien
ttaatcactgcgggtaaggcccatg

SEQ ID NO: 415941 - DNA, 25 bp, Homo sapien
taatcactgcgggtaaggcccatgg

SEQ ID NO: 415942 - DNA, 25 bp, Homo sapien
tgggtcctttctagtgaaactcagc

SEQ ID NO: 415943 - DNA, 25 bp, Homo sapien
gctttttggcccttgtcatgacgca

SEQ ID NO: 415944 - DNA, 25 bp, Homo sapien
ttctagtgaaactcagctgtgcggg

SEQ ID NO: 415945 - DNA, 25 bp, Homo sapien
ctttctagtgaaactcagctgtgcg

SEQ ID NO: 415946 - DNA, 25 bp, Homo sapien
tgctcggatggactaagccttggcc

SEQ ID NO: 415947 - DNA, 25 bp, Homo sapien
aggtgctcggatggactaagccttg

SEQ ID NO: 415948 - DNA, 25 bp, Homo sapien
tcggatggactaagccttggccaat

SEQ ID NO: 415949 - DNA, 25 bp, Homo sapien
atggactaagccttggccaatctgc

SEQ ID NO: 415950 - DNA, 25 bp, Homo sapien
gtctatgcattcgtggttccaggca

SEQ ID NO: 415951 - DNA, 25 bp, Homo sapien
tttcctgtcctctccagatttctgg

SEQ ID NO: 415952 - DNA, 25 bp, Homo sapien
cctcttgttaatccattaaggtcta

SEQ ID NO: 415953 - DNA, 25 bp, Homo sapien
cacaccctccaaggagatgcgggtc

SEQ ID NO: 415954 - DNA, 25 bp, Homo sapien
tactacatgatgcttgtgctgttga

SEQ ID NO: 415955 - DNA, 25 bp, Homo sapien
tgtccctgtgtgtaaatactacatg

SEQ ID NO: 415956 - DNA, 25 bp, Homo sapien
taaaccacggcaattggcaaaggct

SEQ ID NO: 415957 - DNA, 25 bp, Homo sapien
tgattacgcacctcttctcctctgt

SEQ ID NO: 415958 - DNA, 25 bp, Homo sapien
tgctcttctaatatacagaccaagg

SEQ ID NO: 415959 - DNA, 25 bp, Homo sapien
ttcagtctttgtatccaggtggtgc

SEQ ID NO: 415960 - DNA, 25 bp, Homo sapien
cgaatagccgcatccttcaccatat

SEQ ID NO: 415961 - DNA, 25 bp, Homo sapien
tggtcaggtcacactagtcctcagc

SEQ ID NO: 415962 - DNA, 25 bp, Homo sapien
cataaatacagcacccacagctgct

SEQ ID NO: 415963 - DNA, 25 bp, Homo sapien
aattcctccataaatacagcaccca

SEQ ID NO: 415964 - DNA, 25 bp, Homo sapien
ctctgaaggttgattgtgtccaaaa

SEQ ID NO: 415965 - DNA, 25 bp, Homo sapien
gaaggttgattgtgtccaaaaattc

SEQ ID NO: 415966 - DNA, 25 bp, Homo sapien
gatttcgtgaactcttttggctctt

SEQ ID NO: 415967 - DNA, 25 bp, Homo sapien
gcagtgctttctcacaaatagcagt

SEQ ID NO: 415968 - DNA, 25 bp, Homo sapien
cacagatgtaggtatctttgccctt

SEQ ID NO: 415969 - DNA, 25 bp, Homo sapien
tggctcttccgttgtgaggatcaaa

SEQ ID NO: 415970 - DNA, 25 bp, Homo sapien
gagaggtcccaggagcataaccagc

SEQ ID NO: 415971 - DNA, 25 bp, Homo sapien
cagcagatagctccctgagttgagg

SEQ ID NO: 415972 - DNA, 25 bp, Homo sapien
agaggtcccaggagcataaccagct

SEQ ID NO: 415973 - DNA, 25 bp, Homo sapien
ggaacatgatcagctgagaggtccc

SEQ ID NO: 415974 - DNA, 25 bp, Homo sapien
gcaactcggtctcttgattcatatc

SEQ ID NO: 415975 - DNA, 25 bp, Homo sapien
tgtgcaactcggtctcttgattcat

SEQ ID NO: 415976 - DNA, 25 bp, Homo sapien
tcaggtgtgcaactcggtctcttga

SEQ ID NO: 415977 - DNA, 25 bp, Homo sapien
cggtctcttgattcatatctaggat

SEQ ID NO: 415978 - DNA, 25 bp, Homo sapien
ttaactctgtcttctgaatgtaaac

SEQ ID NO: 415979 - DNA, 25 bp, Homo sapien
tctgtcttctgaatgtaaactctac

SEQ ID NO: 415980 - DNA, 25 bp, Homo sapien
aactctgtcttctgaatgtaaactc

SEQ ID NO: 415981 - DNA, 25 bp, Homo sapien
ctctgtcttctgaatgtaaactcta

SEQ ID NO: 415982 - DNA, 25 bp, Homo sapien
cagtaggctcctgattccgtagaca

SEQ ID NO: 415983 - DNA, 25 bp, Homo sapien
gtagacagcccctagatgcatcttc

SEQ ID NO: 415984 - DNA, 25 bp, Homo sapien
catatcctgggggttcaggtctggc

SEQ ID NO: 415985 - DNA, 25 bp, Homo sapien
gaagccgatcctcttgggagtcaca

SEQ ID NO: 415986 - DNA, 25 bp, Homo sapien
atagagatatgggtacaacatggtg

SEQ ID NO: 415987 - DNA, 25 bp, Homo sapien
ctatagagatatgggtacaacatgg

SEQ ID NO: 415988 - DNA, 25 bp, Homo sapien
gagatatgggtacaacatggtgtac

SEQ ID NO: 415989 - DNA, 25 bp, Homo sapien
tagagatatgggtacaacatggtgt

SEQ ID NO: 415990 - DNA, 25 bp, Homo sapien
cccagctgtgttcaccatcagggag

SEQ ID NO: 415991 - DNA, 25 bp, Homo sapien
caacctcctaacaaggaactctgga

SEQ ID NO: 415992 - DNA, 25 bp, Homo sapien
tccaacctcctaacaaggaactctg

SEQ ID NO: 415993 - DNA, 25 bp, Homo sapien
ccaacctcctaacaaggaactctgg

SEQ ID NO: 415994 - DNA, 25 bp, Homo sapien
aacctcctaacaaggaactctggat

SEQ ID NO: 415995 - DNA, 25 bp, Homo sapien
tgacaagttgcagacagaggcagct

SEQ ID NO: 415996 - DNA, 25 bp, Homo sapien
tttatggcctctgtcccttgaaagc

SEQ ID NO: 415997 - DNA, 25 bp, Homo sapien
ttctcacgacatagacactgtggct

SEQ ID NO: 415998 - DNA, 25 bp, Homo sapien
gaccgccacccatgcttcaggagtt

SEQ ID NO: 415999 - DNA, 25 bp, Homo sapien
cagaaggcttgcctcaggaacaggc

SEQ ID NO: 416000 - DNA, 25 bp, Homo sapien
ggaacaagacaatcctcaaggtgag

SEQ ID NO: 416001 - DNA, 25 bp, Homo sapien
caaggtgagaattacaacttccagc

SEQ ID NO: 416002 - DNA, 25 bp, Homo sapien
taaacatcaagcagttgcggcagcc

SEQ ID NO: 416003 - DNA, 25 bp, Homo sapien
tcagtgtctccaatggcacactcag

SEQ ID NO: 416004 - DNA, 25 bp, Homo sapien
tctccaatggcacactcagacaaaa

SEQ ID NO: 416005 - DNA, 25 bp, Homo sapien
gaagagcttgtttttcagtgtctcc

SEQ ID NO: 416006 - DNA, 25 bp, Homo sapien
tgtctccaatggcacactcagacaa

SEQ ID NO: 416007 - DNA, 25 bp, Homo sapien
tgttttctggatgatggcctcgctt

SEQ ID NO: 416008 - DNA, 25 bp, Homo sapien
gcctcgcttctttggctgtgtgact

SEQ ID NO: 416009 - DNA, 25 bp, Homo sapien
ctgtgtgactttcgccccagtggaa

SEQ ID NO: 416010 - DNA, 25 bp, Homo sapien
ctggatgatggcctcgcttctttgg

SEQ ID NO: 416011 - DNA, 25 bp, Homo sapien
cctgggaaggaaccaatgactggca

SEQ ID NO: 416012 - DNA, 25 bp, Homo sapien
gaaagctgaaacttctcggatccca

SEQ ID NO: 416013 - DNA, 25 bp, Homo sapien
cacacagctcgtttcttgacatgga

SEQ ID NO: 416014 - DNA, 25 bp, Homo sapien
gaatcatgcctggatagtctctgga

SEQ ID NO: 416015 - DNA, 25 bp, Homo sapien
ttgactcaggaaccgagacagagcg

SEQ ID NO: 416016 - DNA, 25 bp, Homo sapien
attattgcagttaattctgtgcagg

SEQ ID NO: 416017 - DNA, 25 bp, Homo sapien
aggcccacctgccaattattgcagt

SEQ ID NO: 416018 - DNA, 25 bp, Homo sapien
caggcttgactcaggaaccgagaca

SEQ ID NO: 416019 - DNA, 25 bp, Homo sapien
ctagagacgggtgaccacaatgccc

SEQ ID NO: 416020 - DNA, 25 bp, Homo sapien
ttggacaggaaacgccatttgagct

SEQ ID NO: 416021 - DNA, 25 bp, Homo sapien
ttggagaacatttggacaggaaacg

SEQ ID NO: 416022 - DNA, 25 bp, Homo sapien
gggttggagaacatttggacaggaa

SEQ ID NO: 416023 - DNA, 25 bp, Homo sapien
gcaacaagatgttctgacgtacata

SEQ ID NO: 416024 - DNA, 25 bp, Homo sapien
ggagtgattaccacagacaagcaaa

SEQ ID NO: 416025 - DNA, 25 bp, Homo sapien
tccagtatgcaatgtgtacaatgct

SEQ ID NO: 416026 - DNA, 25 bp, Homo sapien
aaaaccgccacatatatggaaagag

SEQ ID NO: 416027 - DNA, 25 bp, Homo sapien
tctgctcccatctgtgctgatctgc

SEQ ID NO: 416028 - DNA, 25 bp, Homo sapien
ctggaaagccggcaaaatttgctgt

SEQ ID NO: 416029 - DNA, 25 bp, Homo sapien
aagccggcaaaatttgctgtgagag

SEQ ID NO: 416030 - DNA, 25 bp, Homo sapien
tttcctacaagagcccattggcctt

SEQ ID NO: 416031 - DNA, 25 bp, Homo sapien
cctgcacgctgggggttcttttctg

SEQ ID NO: 416032 - DNA, 25 bp, Homo sapien
tggcctgcacgctgggggttctttt

SEQ ID NO: 416033 - DNA, 25 bp, Homo sapien
gtggcctgcacgctgggggttcttt

SEQ ID NO: 416034 - DNA, 25 bp, Homo sapien
tgcacgctgggggttcttttctgtt

SEQ ID NO: 416035 - DNA, 25 bp, Homo sapien
caaacctaatacggcaccatttccg

SEQ ID NO: 416036 - DNA, 25 bp, Homo sapien
aatacggcaccatttccgtccagat

SEQ ID NO: 416037 - DNA, 25 bp, Homo sapien
acggcaccatttccgtccagattca

SEQ ID NO: 416038 - DNA, 25 bp, Homo sapien
ctaatacggcaccatttccgtccag

SEQ ID NO: 416039 - DNA, 25 bp, Homo sapien
tctcctcggcgccagaattcaagag

SEQ ID NO: 416040 - DNA, 25 bp, Homo sapien
gcttttgcggagttacagagatcct

SEQ ID NO: 416041 - DNA, 25 bp, Homo sapien
caagggctgagttagaagattggcc

SEQ ID NO: 416042 - DNA, 25 bp, Homo sapien
ggtggcaccgtctcctagcggaatt

SEQ ID NO: 416043 - DNA, 25 bp, Homo sapien
gagggaagcatgtctactttatcca

SEQ ID NO: 416044 - DNA, 25 bp, Homo sapien
tattctagctcttgtaaggttacca

SEQ ID NO: 416045 - DNA, 25 bp, Homo sapien
caccagccaggttaagaagaaatac

SEQ ID NO: 416046 - DNA, 25 bp, Homo sapien
ttatccaatttcacacagacgctgg

SEQ ID NO: 416047 - DNA, 25 bp, Homo sapien
gaatctagaagaatcgaaggccacc

SEQ ID NO: 416048 - DNA, 25 bp, Homo sapien
tacttatatggacaattggcgccag

SEQ ID NO: 416049 - DNA, 25 bp, Homo sapien
tggtgcggctgggttcaaaatgtcc

SEQ ID NO: 416050 - DNA, 25 bp, Homo sapien
gacatgaagagatgccagtgccacg

SEQ ID NO: 416051 - DNA, 25 bp, Homo sapien
acacccagggaattcgagacagcgg

SEQ ID NO: 416052 - DNA, 25 bp, Homo sapien
gaaaatgcatgcacgctgtcagaga

SEQ ID NO: 416053 - DNA, 25 bp, Homo sapien
tcacatggcgctagcactgagtggg

SEQ ID NO: 416054 - DNA, 25 bp, Homo sapien
tgagtgggctcaaactctgtacgcg

SEQ ID NO: 416055 - DNA, 25 bp, Homo sapien
ctctttgggatgctgcgatgtcgcg

SEQ ID NO: 416056 - DNA, 25 bp, Homo sapien
tagaagggagtgacccaaattccaa

SEQ ID NO: 416057 - DNA, 25 bp, Homo sapien
cacgtagcggtgcatttcgggacct

SEQ ID NO: 416058 - DNA, 25 bp, Homo sapien
gagtagtgcactctcgtcggcggca

SEQ ID NO: 416059 - DNA, 25 bp, Homo sapien
gggtccattggctgatgcgtttcca

SEQ ID NO: 416060 - DNA, 25 bp, Homo sapien
tgaagcctcccactagggtccattg

SEQ ID NO: 416061 - DNA, 25 bp, Homo sapien
gagagagtacattcctgcaattgct

SEQ ID NO: 416062 - DNA, 25 bp, Homo sapien
ggagctcttcgctttaccctgtgaa

SEQ ID NO: 416063 - DNA, 25 bp, Homo sapien
gtccccagtgaactgtaggcttttg

SEQ ID NO: 416064 - DNA, 25 bp, Homo sapien
cactcgctggtccccagtgaactgt

SEQ ID NO: 416065 - DNA, 25 bp, Homo sapien
gctgcccactcgctggtccccagtg

SEQ ID NO: 416066 - DNA, 25 bp, Homo sapien
cgctggtccccagtgaactgtaggc

SEQ ID NO: 416067 - DNA, 25 bp, Homo sapien
tatgctgagcagtaaacatcgggta

SEQ ID NO: 416068 - DNA, 25 bp, Homo sapien
ggtattcccttctagattctgccat

SEQ ID NO: 416069 - DNA, 25 bp, Homo sapien
tcaaacatttcctactcatcccttt

SEQ ID NO: 416070 - DNA, 25 bp, Homo sapien
catcgggtatactcttatcaaacat

SEQ ID NO: 416071 - DNA, 25 bp, Homo sapien
tgctgatgagaaatgaagggtaggg

SEQ ID NO: 416072 - DNA, 25 bp, Homo sapien
gctgatgagaaatgaagggtagggc

SEQ ID NO: 416073 - DNA, 25 bp, Homo sapien
gaagggtagggcaccctagtagcca

SEQ ID NO: 416074 - DNA, 25 bp, Homo sapien
aagcagtgcggagtgtttggtctgg

SEQ ID NO: 416075 - DNA, 25 bp, Homo sapien
cacttcttcgcaagaccccagagtg

SEQ ID NO: 416076 - DNA, 25 bp, Homo sapien
gctctcccacttcttcgcaagaccc

SEQ ID NO: 416077 - DNA, 25 bp, Homo sapien
ttcgcaagaccccagagtggatggg

SEQ ID NO: 416078 - DNA, 25 bp, Homo sapien
tctgcctaatcctgctgcggcctgg

SEQ ID NO: 416079 - DNA, 25 bp, Homo sapien
ctctctgaaggaggccgctccagcc

SEQ ID NO: 416080 - DNA, 25 bp, Homo sapien
gactttcacgtaagcccagacctca

SEQ ID NO: 416081 - DNA, 25 bp, Homo sapien
caaagtggactttcacgtaagccca

SEQ ID NO: 416082 - DNA, 25 bp, Homo sapien
gccgcgcaggagatggcgttcttat

SEQ ID NO: 416083 - DNA, 25 bp, Homo sapien
gagtttaattgcagtaaggcaggcc

SEQ ID NO: 416084 - DNA, 25 bp, Homo sapien
caccgctggttgtagagactggtaa

SEQ ID NO: 416085 - DNA, 25 bp, Homo sapien
tattcaaatcggtctctctgaaggc

SEQ ID NO: 416086 - DNA, 25 bp, Homo sapien
aacccgctggaccatgaccgagaac

SEQ ID NO: 416087 - DNA, 25 bp, Homo sapien
ggccagaagccgacatccacattct

SEQ ID NO: 416088 - DNA, 25 bp, Homo sapien
gaccatgaccgagaacaaacacaaa

SEQ ID NO: 416089 - DNA, 25 bp, Homo sapien
caaaggacctgaaatgcgttgtgaa

SEQ ID NO: 416090 - DNA, 25 bp, Homo sapien
ttcacacattcgcaacacatttgtt

SEQ ID NO: 416091 - DNA, 25 bp, Homo sapien
cattcgcaacacatttgtttggttt

SEQ ID NO: 416092 - DNA, 25 bp, Homo sapien
cacattcacacattcgcaacacatt

SEQ ID NO: 416093 - DNA, 25 bp, Homo sapien
cacattcgcaacacatttgtttggt

SEQ ID NO: 416094 - DNA, 25 bp, Homo sapien
gccacacgtgatgatgttatgttca

SEQ ID NO: 416095 - DNA, 25 bp, Homo sapien
acagcgtcccacatgggatgccaca

SEQ ID NO: 416096 - DNA, 25 bp, Homo sapien
gtgatgacctcaggcgtgaagaaga

SEQ ID NO: 416097 - DNA, 25 bp, Homo sapien
cttcatgcgccagacactgcggcag

SEQ ID NO: 416098 - DNA, 25 bp, Homo sapien
actgccggaaacacacgcaccatca

SEQ ID NO: 416099 - DNA, 25 bp, Homo sapien
gccggaaacacacgcaccatcacac

SEQ ID NO: 416100 - DNA, 25 bp, Homo sapien
tgccggaaacacacgcaccatcaca

SEQ ID NO: 416101 - DNA, 25 bp, Homo sapien
ccactgccggaaacacacgcaccat

SEQ ID NO: 416102 - DNA, 25 bp, Homo sapien
agccagaggatggacggtggagagt

SEQ ID NO: 416103 - DNA, 25 bp, Homo sapien
tgagggagctcccccatgcagatct

SEQ ID NO: 416104 - DNA, 25 bp, Homo sapien
gggagctcccccatgcagatctcat

SEQ ID NO: 416105 - DNA, 25 bp, Homo sapien
catgagggagctcccccatgcagat

SEQ ID NO: 416106 - DNA, 25 bp, Homo sapien
gcagtggtgtggaattcatctcaac

SEQ ID NO: 416107 - DNA, 25 bp, Homo sapien
catgtgaggtcgctgttgaagtatc

SEQ ID NO: 416108 - DNA, 25 bp, Homo sapien
taggagcaacccagttctcgcagca

SEQ ID NO: 416109 - DNA, 25 bp, Homo sapien
caacagagttgacggtaaagaccag

SEQ ID NO: 416110 - DNA, 25 bp, Homo sapien
tctccacttgcttgcgtttatcctt

SEQ ID NO: 416111 - DNA, 25 bp, Homo sapien
caattcctttgctaattaaattgct

SEQ ID NO: 416112 - DNA, 25 bp, Homo sapien
atagtagttttcccatctccgtact

SEQ ID NO: 416113 - DNA, 25 bp, Homo sapien
tcccatctccgtactttgctagtta

SEQ ID NO: 416114 - DNA, 25 bp, Homo sapien
tcaatggactgcaaacaaaactcgt

SEQ ID NO: 416115 - DNA, 25 bp, Homo sapien
tgactgtagggatatagaactggcc

SEQ ID NO: 416116 - DNA, 25 bp, Homo sapien
agcatgcacaatacaccaagttggg

SEQ ID NO: 416117 - DNA, 25 bp, Homo sapien
gatacacagctcgtctcttaggaac

SEQ ID NO: 416118 - DNA, 25 bp, Homo sapien
ttttaaaagcttgcacatctgcatc

SEQ ID NO: 416119 - DNA, 25 bp, Homo sapien
gtttttaaaagcttgcacatctgca

SEQ ID NO: 416120 - DNA, 25 bp, Homo sapien
gtgtttttaaaagcttgcacatctg

SEQ ID NO: 416121 - DNA, 25 bp, Homo sapien
tttaaaagcttgcacatctgcatct

SEQ ID NO: 416122 - DNA, 25 bp, Homo sapien
aaatatgtggtctccaaacagcctc

SEQ ID NO: 416123 - DNA, 25 bp, Homo sapien
caatggtagtcctagagtctccctg

SEQ ID NO: 416124 - DNA, 25 bp, Homo sapien
gcctggaaccgcagtgtgaaatgct

SEQ ID NO: 416125 - DNA, 25 bp, Homo sapien
tggatgaccccagacagtaagataa

SEQ ID NO: 416126 - DNA, 25 bp, Homo sapien
cagctcctggtttgttaaggcaaac

SEQ ID NO: 416127 - DNA, 25 bp, Homo sapien
gataatcaccgaattctcttcgacc

SEQ ID NO: 416128 - DNA, 25 bp, Homo sapien
tcatgagtcgggataatcaccgaat

SEQ ID NO: 416129 - DNA, 25 bp, Homo sapien
cctcagctcctggtttgttaaggca

SEQ ID NO: 416130 - DNA, 25 bp, Homo sapien
caaagagttcatagcccgtggaaga

SEQ ID NO: 416131 - DNA, 25 bp, Homo sapien
aggcggtgaccccttctagaagtga

SEQ ID NO: 416132 - DNA, 25 bp, Homo sapien
gactgtacatatgctgtggaccatg

SEQ ID NO: 416133 - DNA, 25 bp, Homo sapien
tggaggctcaacaacataatcctgc

SEQ ID NO: 416134 - DNA, 25 bp, Homo sapien
ctggacagcaggaaacgacccttcg

SEQ ID NO: 416135 - DNA, 25 bp, Homo sapien
tggacagcaggaaacgacccttcgg

SEQ ID NO: 416136 - DNA, 25 bp, Homo sapien
ggccagggctggtctacagtcactg

SEQ ID NO: 416137 - DNA, 25 bp, Homo sapien
ggctggtctacagtcactggacagc

SEQ ID NO: 416138 - DNA, 25 bp, Homo sapien
cttggtcggtactggaatctctttc

SEQ ID NO: 416139 - DNA, 25 bp, Homo sapien
gttgagcttggtcggtactggaatc

SEQ ID NO: 416140 - DNA, 25 bp, Homo sapien
ctcagtcaccgttttctgagttggg

SEQ ID NO: 416141 - DNA, 25 bp, Homo sapien
ctttgaagacctcagtcaccgtttt

SEQ ID NO: 416142 - DNA, 25 bp, Homo sapien
gcaggagtctgaaggaatcagtctt

SEQ ID NO: 416143 - DNA, 25 bp, Homo sapien
tctctaaagacgtctgaagcccagc

SEQ ID NO: 416144 - DNA, 25 bp, Homo sapien
tgtgcactagaggaccagctgcctg

SEQ ID NO: 416145 - DNA, 25 bp, Homo sapien
cggccagtggctgcaatcacatctt

SEQ ID NO: 416146 - DNA, 25 bp, Homo sapien
cagtcttggtgctcctgtgcactag

SEQ ID NO: 416147 - DNA, 25 bp, Homo sapien
ttggtccttccctgggtactgagcc

SEQ ID NO: 416148 - DNA, 25 bp, Homo sapien
caatcacctggggaggctctagtta

SEQ ID NO: 416149 - DNA, 25 bp, Homo sapien
gagtcgatgcaagttttatttagga

SEQ ID NO: 416150 - DNA, 25 bp, Homo sapien
ttaggagatgggttacaatcacctg

SEQ ID NO: 416151 - DNA, 25 bp, Homo sapien
tgcaaccgagtcgatgcaagtttta

SEQ ID NO: 416152 - DNA, 25 bp, Homo sapien
tccacagatccccagaggaagtcat

SEQ ID NO: 416153 - DNA, 25 bp, Homo sapien
tggtacaaaccctagcaccatcatc

SEQ ID NO: 416154 - DNA, 25 bp, Homo sapien
ggtctggtacaaaccctagcaccat

SEQ ID NO: 416155 - DNA, 25 bp, Homo sapien
cttgatttggtctggtacaaaccct

SEQ ID NO: 416156 - DNA, 25 bp, Homo sapien
cagttgaacactaacgccatggtgc

SEQ ID NO: 416157 - DNA, 25 bp, Homo sapien
cactgtctctatcagggctggtggc

SEQ ID NO: 416158 - DNA, 25 bp, Homo sapien
caatggagcctacaaacccctagtt

SEQ ID NO: 416159 - DNA, 25 bp, Homo sapien
tatctttggagccagtctctgacca

SEQ ID NO: 416160 - DNA, 25 bp, Homo sapien
gaactgagggttctgagaaatccct

SEQ ID NO: 416161 - DNA, 25 bp, Homo sapien
taaaaggagaacctatatagtctaa

SEQ ID NO: 416162 - DNA, 25 bp, Homo sapien
gaaataaccatagtgtactcagtca

SEQ ID NO: 416163 - DNA, 25 bp, Homo sapien
tgtactcagtcaagcagtccctgct

SEQ ID NO: 416164 - DNA, 25 bp, Homo sapien
tttgtcgtacctaattctttcaatg

SEQ ID NO: 416165 - DNA, 25 bp, Homo sapien
caatgctttttttgtcgtacctaat

SEQ ID NO: 416166 - DNA, 25 bp, Homo sapien
ctccaatgctttttttgtcgtacct

SEQ ID NO: 416167 - DNA, 25 bp, Homo sapien
ttgtcgtacctaattctttcaatga

SEQ ID NO: 416168 - DNA, 25 bp, Homo sapien
tgtgactccccagaagttgaatttt

SEQ ID NO: 416169 - DNA, 25 bp, Homo sapien
aactttggtcctatattcaagctag

SEQ ID NO: 416170 - DNA, 25 bp, Homo sapien
gctgctcagtttatgtgactcccca

SEQ ID NO: 416171 - DNA, 25 bp, Homo sapien
tcaggtgagcaactaagctgctcag

SEQ ID NO: 416172 - DNA, 25 bp, Homo sapien
ttcttctttccacgacaaggagtca

SEQ ID NO: 416173 - DNA, 25 bp, Homo sapien
tcttctttccacgacaaggagtcac

SEQ ID NO: 416174 - DNA, 25 bp, Homo sapien
ttctcgaagcacctggaagtctgag

SEQ ID NO: 416175 - DNA, 25 bp, Homo sapien
tgaatttggctagaaaccgctgccc

SEQ ID NO: 416176 - DNA, 25 bp, Homo sapien
aacagtggaatagtgctcctcccca

SEQ ID NO: 416177 - DNA, 25 bp, Homo sapien
ggtcacaaactagcagccagaagca

SEQ ID NO: 416178 - DNA, 25 bp, Homo sapien
tgatagacagggtggagcacttggc

SEQ ID NO: 416179 - DNA, 25 bp, Homo sapien
ctgatagacagggtggagcacttgg

SEQ ID NO: 416180 - DNA, 25 bp, Homo sapien
tagacagggtggagcacttggcgac

SEQ ID NO: 416181 - DNA, 25 bp, Homo sapien
gatagacagggtggagcacttggcg

SEQ ID NO: 416182 - DNA, 25 bp, Homo sapien
ctgtcattttgagttcagaggtcag

SEQ ID NO: 416183 - DNA, 25 bp, Homo sapien
agaggtcagatttgagtaataaaca

SEQ ID NO: 416184 - DNA, 25 bp, Homo sapien
ccctgtcattttgagttcagaggtc

SEQ ID NO: 416185 - DNA, 25 bp, Homo sapien
ggtcagatttgagtaataaacatct

SEQ ID NO: 416186 - DNA, 25 bp, Homo sapien
gcgctggttccgtctggcaccttca

SEQ ID NO: 416187 - DNA, 25 bp, Homo sapien
tgagtatataccaggcagcgctggt

SEQ ID NO: 416188 - DNA, 25 bp, Homo sapien
tggtggagttggtgtcattcctccc

SEQ ID NO: 416189 - DNA, 25 bp, Homo sapien
gaaaatcaccgcgtagatgccgatg

SEQ ID NO: 416190 - DNA, 25 bp, Homo sapien
gttcaagcggctaccatgcacagaa

SEQ ID NO: 416191 - DNA, 25 bp, Homo sapien
gggcaagttcaagcggctaccatgc

SEQ ID NO: 416192 - DNA, 25 bp, Homo sapien
tccttgactcttggaggggcaagtt

SEQ ID NO: 416193 - DNA, 25 bp, Homo sapien
gaggggcaagttcaagcggctacca

SEQ ID NO: 416194 - DNA, 25 bp, Homo sapien
tcatcatagggccaggaaactccat

SEQ ID NO: 416195 - DNA, 25 bp, Homo sapien
tctgtcatcatagggccaggaaact

SEQ ID NO: 416196 - DNA, 25 bp, Homo sapien
agatctgtcatcatagggccaggaa

SEQ ID NO: 416197 - DNA, 25 bp, Homo sapien
gtcatcatagggccaggaaactcca

SEQ ID NO: 416198 - DNA, 25 bp, Homo sapien
cctctgatcagtctggacaaatatt

SEQ ID NO: 416199 - DNA, 25 bp, Homo sapien
tattgccctgaacgcaaccaagcaa

SEQ ID NO: 416200 - DNA, 25 bp, Homo sapien
tctggacaaatattgccctgaacgc

SEQ ID NO: 416201 - DNA, 25 bp, Homo sapien
ctgaacgcaaccaagcaaagccact

SEQ ID NO: 416202 - DNA, 25 bp, Homo sapien
tatttgtatgagctacagttctgga

SEQ ID NO: 416203 - DNA, 25 bp, Homo sapien
gaacaaattccaatatcctgcagtc

SEQ ID NO: 416204 - DNA, 25 bp, Homo sapien
gccagtcagcttcgaagaaaggtgt

SEQ ID NO: 416205 - DNA, 25 bp, Homo sapien
agtccccttgacatcaaagacccaa

SEQ ID NO: 416206 - DNA, 25 bp, Homo sapien
tacatggtcccagtgtgagcgagtg

SEQ ID NO: 416207 - DNA, 25 bp, Homo sapien
tgtgccctatgatggaagaggaccc

SEQ ID NO: 416208 - DNA, 25 bp, Homo sapien
ccaaagctatgcacggtaggtgaac

SEQ ID NO: 416209 - DNA, 25 bp, Homo sapien
catagaggactttaagggcagcgaa

SEQ ID NO: 416210 - DNA, 25 bp, Homo sapien
tggaagtggacctgcccatctcctt

SEQ ID NO: 416211 - DNA, 25 bp, Homo sapien
cttgtgtctgaggattgtctggcgt

SEQ ID NO: 416212 - DNA, 25 bp, Homo sapien
atctccttgctgtgaaactgcatga

SEQ ID NO: 416213 - DNA, 25 bp, Homo sapien
gacaccacgtggggacagaggagtg

SEQ ID NO: 416214 - DNA, 25 bp, Homo sapien
gccatcggaaggtgtggaatttctc

SEQ ID NO: 416215 - DNA, 25 bp, Homo sapien
ttcgtgatgtgcgaggccatcggaa

SEQ ID NO: 416216 - DNA, 25 bp, Homo sapien
aggccatcggaaggtgtggaatttc

SEQ ID NO: 416217 - DNA, 25 bp, Homo sapien
cccctttcgtgatgtgcgaggccat

SEQ ID NO: 416218 - DNA, 25 bp, Homo sapien
cctgtgcattgagcaatatcctcaa

SEQ ID NO: 416219 - DNA, 25 bp, Homo sapien
ctgtgcattgagcaatatcctcaaa

SEQ ID NO: 416220 - DNA, 25 bp, Homo sapien
ccctgtgcattgagcaatatcctca

SEQ ID NO: 416221 - DNA, 25 bp, Homo sapien
tccctgtgcattgagcaatatcctc

SEQ ID NO: 416222 - DNA, 25 bp, Homo sapien
ctgtctagatggtgcccacattccc

SEQ ID NO: 416223 - DNA, 25 bp, Homo sapien
ctagatggtgcccacattccctgct

SEQ ID NO: 416224 - DNA, 25 bp, Homo sapien
cctgctctgtctagatggtgcccac

SEQ ID NO: 416225 - DNA, 25 bp, Homo sapien
tccctgctctgtctagatggtgccc

SEQ ID NO: 416226 - DNA, 25 bp, Homo sapien
cctgatctgtccagacagtgcctac

SEQ ID NO: 416227 - DNA, 25 bp, Homo sapien
tgctccgtctagactgtgcccatat

SEQ ID NO: 416228 - DNA, 25 bp, Homo sapien
agcctcccctttacaaggcaggagg

SEQ ID NO: 416229 - DNA, 25 bp, Homo sapien
ctgcaaatgcgaggagttgacagca

SEQ ID NO: 416230 - DNA, 25 bp, Homo sapien
gtgcccatattcgctgctggctgca

SEQ ID NO: 416231 - DNA, 25 bp, Homo sapien
caaagactctgtgtatgtgaagcca

SEQ ID NO: 416232 - DNA, 25 bp, Homo sapien
tatcaaagtcagtgcgtgccaggga

SEQ ID NO: 416233 - DNA, 25 bp, Homo sapien
gataaatagccagtccgtgtgcctg

SEQ ID NO: 416234 - DNA, 25 bp, Homo sapien
catatggcagctggagaccctttca

SEQ ID NO: 416235 - DNA, 25 bp, Homo sapien
gggttgttctatggccagatggttt

SEQ ID NO: 416236 - DNA, 25 bp, Homo sapien
catggggaaggcttcgtctcaggaa

SEQ ID NO: 416237 - DNA, 25 bp, Homo sapien
tgtgtgttgggttgttctatggcca

SEQ ID NO: 416238 - DNA, 25 bp, Homo sapien
gaaggtgtgtgttgggttgttctat

SEQ ID NO: 416239 - DNA, 25 bp, Homo sapien
gaatgggtcgttcgagtgctccagc

SEQ ID NO: 416240 - DNA, 25 bp, Homo sapien
cagcttggtcagaaagggcgtcacc

SEQ ID NO: 416241 - DNA, 25 bp, Homo sapien
tgaagaagccgaagaatcccagtac

SEQ ID NO: 416242 - DNA, 25 bp, Homo sapien
taccatgaggacgtagagggcctcc

SEQ ID NO: 416243 - DNA, 25 bp, Homo sapien
ctgggcattaaggttccactgctgc

SEQ ID NO: 416244 - DNA, 25 bp, Homo sapien
tgggcattaaggttccactgctgca

SEQ ID NO: 416245 - DNA, 25 bp, Homo sapien
cggctcacctgatgattgtgtgaaa

SEQ ID NO: 416246 - DNA, 25 bp, Homo sapien
tatttcctctggatacagataatgc

SEQ ID NO: 416247 - DNA, 25 bp, Homo sapien
ccaatggatcctcggctcacctgat

SEQ ID NO: 416248 - DNA, 25 bp, Homo sapien
ttggctatttcctctggatacagat

SEQ ID NO: 416249 - DNA, 25 bp, Homo sapien
ctggccagagaaagcagagggattt

SEQ ID NO: 416250 - DNA, 25 bp, Homo sapien
gccagagaaagcagagggatttttc

SEQ ID NO: 416251 - DNA, 25 bp, Homo sapien
ggccagagaaagcagagggattttt

SEQ ID NO: 416252 - DNA, 25 bp, Homo sapien
tggccagagaaagcagagggatttt

SEQ ID NO: 416253 - DNA, 25 bp, Homo sapien
ctgagatgccgagagagccgggtgt

SEQ ID NO: 416254 - DNA, 25 bp, Homo sapien
agagccgggtgtggagctgagtgcg

SEQ ID NO: 416255 - DNA, 25 bp, Homo sapien
ctgagtgcgcgcctgccgagcgctg

SEQ ID NO: 416256 - DNA, 25 bp, Homo sapien
gagtgcgcgcctgccgagcgctgag

SEQ ID NO: 416257 - DNA, 25 bp, Homo sapien
gcgagcacaccctaacgtccttggg

SEQ ID NO: 416258 - DNA, 25 bp, Homo sapien
cttggggcctttcagcccgagccgt

SEQ ID NO: 416259 - DNA, 25 bp, Homo sapien
tcgctggaggcacccgagccttggc

SEQ ID NO: 416260 - DNA, 25 bp, Homo sapien
cggagcggcagacagtcgctggagg

SEQ ID NO: 416261 - DNA, 25 bp, Homo sapien
taaatagaataagcacacaaaagac

SEQ ID NO: 416262 - DNA, 25 bp, Homo sapien
tatatgcaggtacatcaataatcat

SEQ ID NO: 416263 - DNA, 25 bp, Homo sapien
taagcaaaggctaacacacagaaat

SEQ ID NO: 416264 - DNA, 25 bp, Homo sapien
aaatctaaggtagcaatattaacac

SEQ ID NO: 416265 - DNA, 25 bp, Homo sapien
cattcaaaagtcttgccttcgagct

SEQ ID NO: 416266 - DNA, 25 bp, Homo sapien
tatctgattgggttcattcaaaagt

SEQ ID NO: 416267 - DNA, 25 bp, Homo sapien
taatctattgttgacactttccagt

SEQ ID NO: 416268 - DNA, 25 bp, Homo sapien
tcagctttgagctcaccaaagagaa

SEQ ID NO: 416269 - DNA, 25 bp, Homo sapien
caataaatccagtaagggcaaagct

SEQ ID NO: 416270 - DNA, 25 bp, Homo sapien
tattccatagtggttaatggcaggc

SEQ ID NO: 416271 - DNA, 25 bp, Homo sapien
gagtatccaactaaggctgtgcagc

SEQ ID NO: 416272 - DNA, 25 bp, Homo sapien
ccaagtgccacgtttgacagtttct

SEQ ID NO: 416273 - DNA, 25 bp, Homo sapien
attgatcatacacattaaatgggcg

SEQ ID NO: 416274 - DNA, 25 bp, Homo sapien
catgcaagttatatctcagttaagg

SEQ ID NO: 416275 - DNA, 25 bp, Homo sapien
taaaactgaccgaagtgatggttgc

SEQ ID NO: 416276 - DNA, 25 bp, Homo sapien
gattagtgggaacttagggctcagc

SEQ ID NO: 416277 - DNA, 25 bp, Homo sapien
catgtggatgtgtcctgagtggccc

SEQ ID NO: 416278 - DNA, 25 bp, Homo sapien
ggcccacgcagatttctacacttga

SEQ ID NO: 416279 - DNA, 25 bp, Homo sapien
tcaccgcaatccctacaagctgctc

SEQ ID NO: 416280 - DNA, 25 bp, Homo sapien
tgtgtcctgagtggcccacgcagat

SEQ ID NO: 416281 - DNA, 25 bp, Homo sapien
actgcactggctgggttttatattt

SEQ ID NO: 416282 - DNA, 25 bp, Homo sapien
agccactgcactggctgggttttat

SEQ ID NO: 416283 - DNA, 25 bp, Homo sapien
gagccactgcactggctgggtttta

SEQ ID NO: 416284 - DNA, 25 bp, Homo sapien
ccactgcactggctgggttttatat

SEQ ID NO: 416285 - DNA, 25 bp, Homo sapien
aattcatcatctcggtttccatggg

SEQ ID NO: 416286 - DNA, 25 bp, Homo sapien
gagacgacacagtcattggacagta

SEQ ID NO: 416287 - DNA, 25 bp, Homo sapien
caaaatgcaatacagctagagtccc

SEQ ID NO: 416288 - DNA, 25 bp, Homo sapien
ccatgggtcagaactgcaggtacgg

SEQ ID NO: 416289 - DNA, 25 bp, Homo sapien
tgggtgcacacttgtctgacagcct

SEQ ID NO: 416290 - DNA, 25 bp, Homo sapien
ccacagtagtacgagtgctgagccg

SEQ ID NO: 416291 - DNA, 25 bp, Homo sapien
taaaggaacgtaatcacagaagcac

SEQ ID NO: 416292 - DNA, 25 bp, Homo sapien
tccaaaagctccttccgggtgaagc

SEQ ID NO: 416293 - DNA, 25 bp, Homo sapien
caggatcaccttccttgattccagc

SEQ ID NO: 416294 - DNA, 25 bp, Homo sapien
ccaggatcaccttccttgattccag

SEQ ID NO: 416295 - DNA, 25 bp, Homo sapien
cagaggctgaagctcactgacgtct

SEQ ID NO: 416296 - DNA, 25 bp, Homo sapien
tgaagctcactgacgtctgtctggg

SEQ ID NO: 416297 - DNA, 25 bp, Homo sapien
gtgggtgtacaaggccagggtttgc

SEQ ID NO: 416298 - DNA, 25 bp, Homo sapien
gcctctcccttagcctgatgtcagg

SEQ ID NO: 416299 - DNA, 25 bp, Homo sapien
ctggcacctgtcaatggatgagcgc

SEQ ID NO: 416300 - DNA, 25 bp, Homo sapien
tgtcaatggatgagcgcctctccct

SEQ ID NO: 416301 - DNA, 25 bp, Homo sapien
gaagtctcctcaagcacactgcggt

SEQ ID NO: 416302 - DNA, 25 bp, Homo sapien
ttctcttcaggtggtcttaggaact

SEQ ID NO: 416303 - DNA, 25 bp, Homo sapien
taggaacttctcagaactttttgag

SEQ ID NO: 416304 - DNA, 25 bp, Homo sapien
actttttgagttatccttctggtct

SEQ ID NO: 416305 - DNA, 25 bp, Homo sapien
tcaacgccctccaggacaggccgaa

SEQ ID NO: 416306 - DNA, 25 bp, Homo sapien
tccaggacaggccgaagggcttgtc

SEQ ID NO: 416307 - DNA, 25 bp, Homo sapien
acgccctccaggacaggccgaaggg

SEQ ID NO: 416308 - DNA, 25 bp, Homo sapien
ccctccaggacaggccgaagggctt

SEQ ID NO: 416309 - DNA, 25 bp, Homo sapien
tgaaaaaagccagctggaaacttaa

SEQ ID NO: 416310 - DNA, 25 bp, Homo sapien
taatccccaaagcaacagtgttggg

SEQ ID NO: 416311 - DNA, 25 bp, Homo sapien
ctaaggtttgaaaaaagccagctgg

SEQ ID NO: 416312 - DNA, 25 bp, Homo sapien
taatgggaggtgtttagtcatgagg

SEQ ID NO: 416313 - DNA, 25 bp, Homo sapien
catcctagcacggtcgagaggagta

SEQ ID NO: 416314 - DNA, 25 bp, Homo sapien
ggtagtgtatcccagtcaagtgtca

SEQ ID NO: 416315 - DNA, 25 bp, Homo sapien
ctttaaggaggtctattggtcacca

SEQ ID NO: 416316 - DNA, 25 bp, Homo sapien
gtcaaatgcgttgttccctggagag

SEQ ID NO: 416317 - DNA, 25 bp, Homo sapien
catttgggatactgctttgccttgc

SEQ ID NO: 416318 - DNA, 25 bp, Homo sapien
tgtcatcagagcatcacacacttga

SEQ ID NO: 416319 - DNA, 25 bp, Homo sapien
agaagccttagacacagagggccga

SEQ ID NO: 416320 - DNA, 25 bp, Homo sapien
gagggccgaccacacctatgtatgc

SEQ ID NO: 416321 - DNA, 25 bp, Homo sapien
catgactgtgtctttacccaggttc

SEQ ID NO: 416322 - DNA, 25 bp, Homo sapien
tattgaggcatactttacatgaagc

SEQ ID NO: 416323 - DNA, 25 bp, Homo sapien
gacaagttcctttgtgccgcaccct

SEQ ID NO: 416324 - DNA, 25 bp, Homo sapien
gtatacagctgttaccatgactgtg

SEQ ID NO: 416325 - DNA, 25 bp, Homo sapien
ttcgctgtgtagaagggtcaccgag

SEQ ID NO: 416326 - DNA, 25 bp, Homo sapien
tgtagaagggtcaccgagtccctca

SEQ ID NO: 416327 - DNA, 25 bp, Homo sapien
cactcgttcgctgtgtagaagggtc

SEQ ID NO: 416328 - DNA, 25 bp, Homo sapien
tacttggcactcgttcgctgtgtag

SEQ ID NO: 416329 - DNA, 25 bp, Homo sapien
tttagaaggttcacagatttattct

SEQ ID NO: 416330 - DNA, 25 bp, Homo sapien
tagaaggttcacagatttattctag

SEQ ID NO: 416331 - DNA, 25 bp, Homo sapien
ttagaaggttcacagatttattcta

SEQ ID NO: 416332 - DNA, 25 bp, Homo sapien
agcacttaacaagaaacacttggac

SEQ ID NO: 416333 - DNA, 25 bp, Homo sapien
gaaacacttggacagcgatgcaatg

SEQ ID NO: 416334 - DNA, 25 bp, Homo sapien
cagcgatgcaatggtctctcccaaa

SEQ ID NO: 416335 - DNA, 25 bp, Homo sapien
aatattttgaggttagcctctccag

SEQ ID NO: 416336 - DNA, 25 bp, Homo sapien
gctgttgcaaagagtcgagaatccg

SEQ ID NO: 416337 - DNA, 25 bp, Homo sapien
tcctaccagtagagagtggcccctg

SEQ ID NO: 416338 - DNA, 25 bp, Homo sapien
aaagcacaagttacacgttgcacgg

SEQ ID NO: 416339 - DNA, 25 bp, Homo sapien
tcccgggtgccatgaacagtaactg

SEQ ID NO: 416340 - DNA, 25 bp, Homo sapien
tcagctgaggtggatcggcgtgtac

SEQ ID NO: 416341 - DNA, 25 bp, Homo sapien
ttttggcttaggtctcctcattctt

SEQ ID NO: 416342 - DNA, 25 bp, Homo sapien
tctggataatttttggcttaggtct

SEQ ID NO: 416343 - DNA, 25 bp, Homo sapien
tcggcgtgtactccggcctcctggt

SEQ ID NO: 416344 - DNA, 25 bp, Homo sapien
cctcttcttcctccttctcttgatc

SEQ ID NO: 416345 - DNA, 25 bp, Homo sapien
tcttcttcctccttctcttgatcac

SEQ ID NO: 416346 - DNA, 25 bp, Homo sapien
ctcttcttcctccttctcttgatca

SEQ ID NO: 416347 - DNA, 25 bp, Homo sapien
ttcctcttcttcctccttctcttga

SEQ ID NO: 416348 - DNA, 25 bp, Homo sapien
ctgggagtggtgtcagtcgctgcgt

SEQ ID NO: 416349 - DNA, 25 bp, Homo sapien
agtggtgtcagtcgctgcgtgcaat

SEQ ID NO: 416350 - DNA, 25 bp, Homo sapien
gctgcgtgcaattcatacttttccc

SEQ ID NO: 416351 - DNA, 25 bp, Homo sapien
tcagtcgctgcgtgcaattcatact

SEQ ID NO: 416352 - DNA, 25 bp, Homo sapien
gcgcccggcctgtgcttgggatttc

SEQ ID NO: 416353 - DNA, 25 bp, Homo sapien
tgatttccgcccgacaagagcggcc

SEQ ID NO: 416354 - DNA, 25 bp, Homo sapien
ggcaccgcaccaaccactgtgtgat

SEQ ID NO: 416355 - DNA, 25 bp, Homo sapien
ttctttgcagttcgggtaagcgagg

SEQ ID NO: 416356 - DNA, 25 bp, Homo sapien
ttctctatcacatgtgggactggaa

SEQ ID NO: 416357 - DNA, 25 bp, Homo sapien
cactggttactcctctaaacctgga

SEQ ID NO: 416358 - DNA, 25 bp, Homo sapien
ggaaggtggtgatcttttctctatc

SEQ ID NO: 416359 - DNA, 25 bp, Homo sapien
gggactggaatgttattataactgc

SEQ ID NO: 416360 - DNA, 25 bp, Homo sapien
gaaaaaggcaaaggagctcagctct

SEQ ID NO: 416361 - DNA, 25 bp, Homo sapien
ctgaaaaaggcaaaggagctcagct

SEQ ID NO: 416362 - DNA, 25 bp, Homo sapien
tgaaaaaggcaaaggagctcagctc

SEQ ID NO: 416363 - DNA, 25 bp, Homo sapien
gctgaaaatgctggttaagagcctc

SEQ ID NO: 416364 - DNA, 25 bp, Homo sapien
agagagaattcaggcatgggaggtc

SEQ ID NO: 416365 - DNA, 25 bp, Homo sapien
ggtcagatggattgctgaaaatgct

SEQ ID NO: 416366 - DNA, 25 bp, Homo sapien
taagagcctcttacaaatctacctc

SEQ ID NO: 416367 - DNA, 25 bp, Homo sapien
caggtgctgatggaagtgcctttca

SEQ ID NO: 416368 - DNA, 25 bp, Homo sapien
tcaacccaagggaacatcagattgc

SEQ ID NO: 416369 - DNA, 25 bp, Homo sapien
cctctttgcaagtggagaccctgtt

SEQ ID NO: 416370 - DNA, 25 bp, Homo sapien
tgaccttcacgccacaattagcagt

SEQ ID NO: 416371 - DNA, 25 bp, Homo sapien
tccccgcagtgctcacacttttgtc

SEQ ID NO: 416372 - DNA, 25 bp, Homo sapien
cccgcagtgctcacacttttgtccc

SEQ ID NO: 416373 - DNA, 25 bp, Homo sapien
cctccccgcagtgctcacacttttg

SEQ ID NO: 416374 - DNA, 25 bp, Homo sapien
cgcagtgctcacacttttgtccctc

SEQ ID NO: 416375 - DNA, 25 bp, Homo sapien
cagagaagctcacaaaacatgccgg

SEQ ID NO: 416376 - DNA, 25 bp, Homo sapien
gcatgctcccagcacaagggacggt

SEQ ID NO: 416377 - DNA, 25 bp, Homo sapien
aacatgccggcatgggctcaggaga

SEQ ID NO: 416378 - DNA, 25 bp, Homo sapien
tctctctaacactgcaggtggtgcc

SEQ ID NO: 416379 - DNA, 25 bp, Homo sapien
ttgtctggatttggcggagccaggt

SEQ ID NO: 416380 - DNA, 25 bp, Homo sapien
ttggagatggcatataagagatcat

SEQ ID NO: 416381 - DNA, 25 bp, Homo sapien
gagccaggtgtgagcttcctatgtg

SEQ ID NO: 416382 - DNA, 25 bp, Homo sapien
catagtttatgactggggtcgcatc

SEQ ID NO: 416383 - DNA, 25 bp, Homo sapien
taattacgcttgacctagatggaca

SEQ ID NO: 416384 - DNA, 25 bp, Homo sapien
gcaggtcaatgtccaggcgtcagga

SEQ ID NO: 416385 - DNA, 25 bp, Homo sapien
gaactgcagtgaggcaacagcacct

SEQ ID NO: 416386 - DNA, 25 bp, Homo sapien
tcttatcccgtgcagaaaggagtgt

SEQ ID NO: 416387 - DNA, 25 bp, Homo sapien
tcctaaagagggactcaaatttggc

SEQ ID NO: 416388 - DNA, 25 bp, Homo sapien
gaaaggtgatgtccttgtcatacgt

SEQ ID NO: 416389 - DNA, 25 bp, Homo sapien
tcttatgcagctggagcctggcatc

SEQ ID NO: 416390 - DNA, 25 bp, Homo sapien
tctgactcgtttgaagctcttaaaa

SEQ ID NO: 416391 - DNA, 25 bp, Homo sapien
tatggcctttagtcccaatgcaggt

SEQ ID NO: 416392 - DNA, 25 bp, Homo sapien
tgtctgtgcacacctcgctctggtg

SEQ ID NO: 416393 - DNA, 25 bp, Homo sapien
gattacaagcttaggttgctcaggg

SEQ ID NO: 416394 - DNA, 25 bp, Homo sapien
cgctctggtgccatagggctagtga

SEQ ID NO: 416395 - DNA, 25 bp, Homo sapien
cagcgcggacagagctcactgagga

SEQ ID NO: 416396 - DNA, 25 bp, Homo sapien
tctagtcgccgggttttgtgaatct

SEQ ID NO: 416397 - DNA, 25 bp, Homo sapien
gcatgggcttctagtcgccgggttt

SEQ ID NO: 416398 - DNA, 25 bp, Homo sapien
aacacttaggacagtttgtgggagc

SEQ ID NO: 416399 - DNA, 25 bp, Homo sapien
gaacctatggaaggcgcagtgtctc

SEQ ID NO: 416400 - DNA, 25 bp, Homo sapien
aatgttcactgctagcaagcgcggg

SEQ ID NO: 416401 - DNA, 25 bp, Homo sapien
caggtcgttaaggagcagtcggaac

SEQ ID NO: 416402 - DNA, 25 bp, Homo sapien
tcggaacaacctacgaccttgctct

SEQ ID NO: 416403 - DNA, 25 bp, Homo sapien
tctggcaaaagtgtgtcttcgtaca

SEQ ID NO: 416404 - DNA, 25 bp, Homo sapien
gagcacgggcaagtttctggcaaaa

SEQ ID NO: 416405 - DNA, 25 bp, Homo sapien
tgtatgacctcatcaataggcactg

SEQ ID NO: 416406 - DNA, 25 bp, Homo sapien
aagtgtgtcttcgtacatttggaat

SEQ ID NO: 416407 - DNA, 25 bp, Homo sapien
tagtccaaacactatggtgcgagcc

SEQ ID NO: 416408 - DNA, 25 bp, Homo sapien
gaaattattcacaacgctggctaca

SEQ ID NO: 416409 - DNA, 25 bp, Homo sapien
taatcaccatcaaagagagctgctg

SEQ ID NO: 416410 - DNA, 25 bp, Homo sapien
gaaaccttcgcatgtcccaatatgg

SEQ ID NO: 416411 - DNA, 25 bp, Homo sapien
ccaagtattcagttaatagtcccag

SEQ ID NO: 416412 - DNA, 25 bp, Homo sapien
aagagagccacattctcccaagtat

SEQ ID NO: 416413 - DNA, 25 bp, Homo sapien
gaaaatcacgttatattagaagcct

SEQ ID NO: 416414 - DNA, 25 bp, Homo sapien
taatagtcccagttagcataatgct

SEQ ID NO: 416415 - DNA, 25 bp, Homo sapien
gaagatatcactgtttgccacacag

SEQ ID NO: 416416 - DNA, 25 bp, Homo sapien
cacacaggcaatcagggagctaaaa

SEQ ID NO: 416417 - DNA, 25 bp, Homo sapien
tggtttcactttcgctgaagatatc

SEQ ID NO: 416418 - DNA, 25 bp, Homo sapien
cagggagctaaaactgtagttaaag

SEQ ID NO: 416419 - DNA, 25 bp, Homo sapien
tggaaaccaaagtccgggtgacata

SEQ ID NO: 416420 - DNA, 25 bp, Homo sapien
gcagcatagtttccactggtagtaa

SEQ ID NO: 416421 - DNA, 25 bp, Homo sapien
tttccaagaggctgtaggttccttc

SEQ ID NO: 416422 - DNA, 25 bp, Homo sapien
tcttacagtgaaagcgctacagacc

SEQ ID NO: 416423 - DNA, 25 bp, Homo sapien
caatgccctgtggtactgtagctca

SEQ ID NO: 416424 - DNA, 25 bp, Homo sapien
aggtaggcagccctcagcaactgta

SEQ ID NO: 416425 - DNA, 25 bp, Homo sapien
gcagattccacgcttgttccaagga

SEQ ID NO: 416426 - DNA, 25 bp, Homo sapien
aatccctgatgctgaccaagctcgg

SEQ ID NO: 416427 - DNA, 25 bp, Homo sapien
tgtctgcagttgagaagtcccaaca

SEQ ID NO: 416428 - DNA, 25 bp, Homo sapien
cagggcactgcaaacgctttctttc

SEQ ID NO: 416429 - DNA, 25 bp, Homo sapien
gataacaagtcacacgaggaagcat

SEQ ID NO: 416430 - DNA, 25 bp, Homo sapien
gttgagaagtcccaacagggcactg

SEQ ID NO: 416431 - DNA, 25 bp, Homo sapien
cattttggtaatcatctggaatggg

SEQ ID NO: 416432 - DNA, 25 bp, Homo sapien
ccacattttggtaatcatctggaat

SEQ ID NO: 416433 - DNA, 25 bp, Homo sapien
tctggaatggggctcttgtttttaa

SEQ ID NO: 416434 - DNA, 25 bp, Homo sapien
aatgccacattttggtaatcatctg

SEQ ID NO: 416435 - DNA, 25 bp, Homo sapien
tccgtcaatattggcccgacgttca

SEQ ID NO: 416436 - DNA, 25 bp, Homo sapien
gacgttcagggccacggtggtccca

SEQ ID NO: 416437 - DNA, 25 bp, Homo sapien
tattggcccgacgttcagggccacg

SEQ ID NO: 416438 - DNA, 25 bp, Homo sapien
caagaatattccgtcaatattggcc

SEQ ID NO: 416439 - DNA, 25 bp, Homo sapien
tctgaggaatcatactcatgaattg

SEQ ID NO: 416440 - DNA, 25 bp, Homo sapien
actcatgaattgctggggcagaacc

SEQ ID NO: 416441 - DNA, 25 bp, Homo sapien
tgaggaatcatactcatgaattgct

SEQ ID NO: 416442 - DNA, 25 bp, Homo sapien
tgcttctctgaggaatcatactcat

SEQ ID NO: 416443 - DNA, 25 bp, Homo sapien
ggctcagcttcggacacagtgtgaa

SEQ ID NO: 416444 - DNA, 25 bp, Homo sapien
tccagaggacaaccagcatgaaggc

SEQ ID NO: 416445 - DNA, 25 bp, Homo sapien
tgccggagaggaatcagaataccag

SEQ ID NO: 416446 - DNA, 25 bp, Homo sapien
ttcaggaacagatcaaggctcagct

SEQ ID NO: 416447 - DNA, 25 bp, Homo sapien
cactctatagatgaaggaatccttc

SEQ ID NO: 416448 - DNA, 25 bp, Homo sapien
gctgtaaatcaaggcaaagcacagg

SEQ ID NO: 416449 - DNA, 25 bp, Homo sapien
tgcttgcacgaagaagggacccaaa

SEQ ID NO: 416450 - DNA, 25 bp, Homo sapien
tggctgtctcgtgcacctacgtatg

SEQ ID NO: 416451 - DNA, 25 bp, Homo sapien
cctgtacccataattctgctttctg

SEQ ID NO: 416452 - DNA, 25 bp, Homo sapien
tgctttctgactttcaccagaggat

SEQ ID NO: 416453 - DNA, 25 bp, Homo sapien
tcaccagaggattcataagagcatc

SEQ ID NO: 416454 - DNA, 25 bp, Homo sapien
ttgaaaatcaacctgtacccataat

SEQ ID NO: 416455 - DNA, 25 bp, Homo sapien
tggtctgcgtgcaatgccatgctgg

SEQ ID NO: 416456 - DNA, 25 bp, Homo sapien
tcttctgactgactgggctaaaaaa

SEQ ID NO: 416457 - DNA, 25 bp, Homo sapien
tgagtccctgataatggcgtccgcc

SEQ ID NO: 416458 - DNA, 25 bp, Homo sapien
atgctgggctcagacacactcctgg

SEQ ID NO: 416459 - DNA, 25 bp, Homo sapien
ttacttgcatttgacagtcgtaatg

SEQ ID NO: 416460 - DNA, 25 bp, Homo sapien
tgaggagcactgaataaggcacagt

SEQ ID NO: 416461 - DNA, 25 bp, Homo sapien
cagacctgcaggtgttgcatcggaa

SEQ ID NO: 416462 - DNA, 25 bp, Homo sapien
gatcagtgttaggagtcagacctgc

SEQ ID NO: 416463 - DNA, 25 bp, Homo sapien
gcagcagattcaggcatgcacactg

SEQ ID NO: 416464 - DNA, 25 bp, Homo sapien
ggagctgacttctcaactggcagca

SEQ ID NO: 416465 - DNA, 25 bp, Homo sapien
ctggcagcagattcaggcatgcaca

SEQ ID NO: 416466 - DNA, 25 bp, Homo sapien
ggcaggccggacaggctgcctcaag

SEQ ID NO: 416467 - DNA, 25 bp, Homo sapien
ttccacctcgacaaagggccgagga

SEQ ID NO: 416468 - DNA, 25 bp, Homo sapien
tccctgcctttatcttgcgagaacc

SEQ ID NO: 416469 - DNA, 25 bp, Homo sapien
cctttatcttgcgagaacctttgca

SEQ ID NO: 416470 - DNA, 25 bp, Homo sapien
cacctcgacaaagggccgaggactt

SEQ ID NO: 416471 - DNA, 25 bp, Homo sapien
tgagtcatgctcttcatgcatttct

SEQ ID NO: 416472 - DNA, 25 bp, Homo sapien
agtgccattaaatagcctcatgggc

SEQ ID NO: 416473 - DNA, 25 bp, Homo sapien
tatgagtcatgctcttcatgcattt

SEQ ID NO: 416474 - DNA, 25 bp, Homo sapien
ccagtgccattaaatagcctcatgg

SEQ ID NO: 416475 - DNA, 25 bp, Homo sapien
caatattaccgggttccagctggct

SEQ ID NO: 416476 - DNA, 25 bp, Homo sapien
tccctggcaatattaccgggttcca

SEQ ID NO: 416477 - DNA, 25 bp, Homo sapien
tattaccgggttccagctggcttgg

SEQ ID NO: 416478 - DNA, 25 bp, Homo sapien
ggacagccttccctggcaatattac

SEQ ID NO: 416479 - DNA, 25 bp, Homo sapien
catcaaattgctttcgaatgatgtc

SEQ ID NO: 416480 - DNA, 25 bp, Homo sapien
tcatcaaattgctttcgaatgatgt

SEQ ID NO: 416481 - DNA, 25 bp, Homo sapien
gatccaacagactggctaaggaggg

SEQ ID NO: 416482 - DNA, 25 bp, Homo sapien
caggttgcccactgcatagagctat

SEQ ID NO: 416483 - DNA, 25 bp, Homo sapien
taagactgccacattgaaaccgcag

SEQ ID NO: 416484 - DNA, 25 bp, Homo sapien
ccaaggacccgctgtgactttagct

SEQ ID NO: 416485 - DNA, 25 bp, Homo sapien
tgtttcacagtggtgttgtattggc

SEQ ID NO: 416486 - DNA, 25 bp, Homo sapien
ctgtttcacagtggtgttgtattgg

SEQ ID NO: 416487 - DNA, 25 bp, Homo sapien
tggtgttgtattggcagcagccttc

SEQ ID NO: 416488 - DNA, 25 bp, Homo sapien
cagtggtgttgtattggcagcagcc

SEQ ID NO: 416489 - DNA, 25 bp, Homo sapien
ttatgaacactgagtcacgtcgccg

SEQ ID NO: 416490 - DNA, 25 bp, Homo sapien
tcctccctaggaatgaggtgacccc

SEQ ID NO: 416491 - DNA, 25 bp, Homo sapien
cacgtcgccgctcaatgtctgtttc

SEQ ID NO: 416492 - DNA, 25 bp, Homo sapien
gggacgtcgtcctatttatgaacac

SEQ ID NO: 416493 - DNA, 25 bp, Homo sapien
tgacaggcgatggtggcgctgggca

SEQ ID NO: 416494 - DNA, 25 bp, Homo sapien
ccacgaacacgcgcgggtccaggtg

SEQ ID NO: 416495 - DNA, 25 bp, Homo sapien
ggtccaggtgacaggcgatggtggc

SEQ ID NO: 416496 - DNA, 25 bp, Homo sapien
ccggcacaggccgtccacgaacacg

SEQ ID NO: 416497 - DNA, 25 bp, Homo sapien
gtcaatgaagctccagtcgccgccg

SEQ ID NO: 416498 - DNA, 25 bp, Homo sapien
cgcagtcaatgaagctccagtcgcc

SEQ ID NO: 416499 - DNA, 25 bp, Homo sapien
gcagtcaatgaagctccagtcgccg

SEQ ID NO: 416500 - DNA, 25 bp, Homo sapien
ctcgcagtcaatgaagctccagtcg

SEQ ID NO: 416501 - DNA, 25 bp, Homo sapien
gcggccccgagctggggaccggcca

SEQ ID NO: 416502 - DNA, 25 bp, Homo sapien
agctggggaccggccacgccgtcct

SEQ ID NO: 416503 - DNA, 25 bp, Homo sapien
tccgccgcggccccgagctggggac

SEQ ID NO: 416504 - DNA, 25 bp, Homo sapien
cccgagctggggaccggccacgccg

SEQ ID NO: 416505 - DNA, 25 bp, Homo sapien
cgcccgcgcgaccctgtgcgcccca

SEQ ID NO: 416506 - DNA, 25 bp, Homo sapien
cgggcttgcgcgccggagcctcacg

SEQ ID NO: 416507 - DNA, 25 bp, Homo sapien
cgcgcccgcgcgaccctgtgcgccc

SEQ ID NO: 416508 - DNA, 25 bp, Homo sapien
ggcttgcgcgccggagcctcacgcg

SEQ ID NO: 416509 - DNA, 25 bp, Homo sapien
gtccccagttccgcttttctgacag

SEQ ID NO: 416510 - DNA, 25 bp, Homo sapien
ctggtgccagctgaaggacgccggg

SEQ ID NO: 416511 - DNA, 25 bp, Homo sapien
gcccgaagcccgaagcctcagggcg

SEQ ID NO: 416512 - DNA, 25 bp, Homo sapien
ccatgttggttaggggcaaagtcct

SEQ ID NO: 416513 - DNA, 25 bp, Homo sapien
tgatgctgcctagaagcgggctgtc

SEQ ID NO: 416514 - DNA, 25 bp, Homo sapien
tctagaagatggaccctgatgctgc

SEQ ID NO: 416515 - DNA, 25 bp, Homo sapien
tgagaatatcgcctcgggaagggtc

SEQ ID NO: 416516 - DNA, 25 bp, Homo sapien
gcaactctggaagcctaaggtgaga

SEQ ID NO: 416517 - DNA, 25 bp, Homo sapien
agccagtcgccaagtcctgtccact

SEQ ID NO: 416518 - DNA, 25 bp, Homo sapien
ctgtccactttccctgctgaatcat

SEQ ID NO: 416519 - DNA, 25 bp, Homo sapien
cagtcgccaagtcctgtccactttc

SEQ ID NO: 416520 - DNA, 25 bp, Homo sapien
tccacacagccagtcgccaagtcct

SEQ ID NO: 416521 - DNA, 25 bp, Homo sapien
tatctcagttgcaagacctgtgagg

SEQ ID NO: 416522 - DNA, 25 bp, Homo sapien
gctggctgacagtgcgtgcaacttc

SEQ ID NO: 416523 - DNA, 25 bp, Homo sapien
caaagacctacagagctgagcttgg

SEQ ID NO: 416524 - DNA, 25 bp, Homo sapien
gtcactagagccacagcacgctagt

SEQ ID NO: 416525 - DNA, 25 bp, Homo sapien
gaaggtatagatgtttggtccgtag

SEQ ID NO: 416526 - DNA, 25 bp, Homo sapien
tatagatgtttggtccgtagagcag

SEQ ID NO: 416527 - DNA, 25 bp, Homo sapien
tgtttggtccgtagagcagtattcc

SEQ ID NO: 416528 - DNA, 25 bp, Homo sapien
tcacttgaaggtatagatgtttggt

SEQ ID NO: 416529 - DNA, 25 bp, Homo sapien
ttctggatatatgggaaccagacac

SEQ ID NO: 416530 - DNA, 25 bp, Homo sapien
tgagggatgttttctggatatatgg

SEQ ID NO: 416531 - DNA, 25 bp, Homo sapien
gatgttttctggatatatgggaacc

SEQ ID NO: 416532 - DNA, 25 bp, Homo sapien
ttttctggatatatgggaaccagac

SEQ ID NO: 416533 - DNA, 25 bp, Homo sapien
tcttgtaatccgagtttacctgctt

SEQ ID NO: 416534 - DNA, 25 bp, Homo sapien
ttgtaatccgagtttacctgcttca

SEQ ID NO: 416535 - DNA, 25 bp, Homo sapien
tttcttgtaatccgagtttacctgc

SEQ ID NO: 416536 - DNA, 25 bp, Homo sapien
tgtaatccgagtttacctgcttcat

SEQ ID NO: 416537 - DNA, 25 bp, Homo sapien
agtcttaagagacccgggagatgaa

SEQ ID NO: 416538 - DNA, 25 bp, Homo sapien
actggctccttgtgcgtctatatga

SEQ ID NO: 416539 - DNA, 25 bp, Homo sapien
tgtaacctttttccagcgcagggct

SEQ ID NO: 416540 - DNA, 25 bp, Homo sapien
tctggtcagagaaactcgactggct

SEQ ID NO: 416541 - DNA, 25 bp, Homo sapien
gacgaagagagacgagagcggagcc

SEQ ID NO: 416542 - DNA, 25 bp, Homo sapien
ccaggccgaggcaattgaggtcgca

SEQ ID NO: 416543 - DNA, 25 bp, Homo sapien
gggacagcgtagaagccgaaggccc

SEQ ID NO: 416544 - DNA, 25 bp, Homo sapien
ggtctcgggtgagccgcagcaatcg

SEQ ID NO: 416545 - DNA, 25 bp, Homo sapien
tattcggctcggagccttatttctg

SEQ ID NO: 416546 - DNA, 25 bp, Homo sapien
ttattcggctcggagccttatttct

SEQ ID NO: 416547 - DNA, 25 bp, Homo sapien
attcggctcggagccttatttctgc

SEQ ID NO: 416548 - DNA, 25 bp, Homo sapien
tcattgtacgatggcttgacgcctg

SEQ ID NO: 416549 - DNA, 25 bp, Homo sapien
tcaggtagctccatcttgcgcctaa

SEQ ID NO: 416550 - DNA, 25 bp, Homo sapien
ccagcgagggtctctagtttgctaa

SEQ ID NO: 416551 - DNA, 25 bp, Homo sapien
agatagtctgcatagacgccctgta

SEQ ID NO: 416552 - DNA, 25 bp, Homo sapien
gaactgcagttccagatgcagggag

SEQ ID NO: 416553 - DNA, 25 bp, Homo sapien
tgaactgcagttccagatgcaggga

SEQ ID NO: 416554 - DNA, 25 bp, Homo sapien
aaggagatggatttctgggcaatgc

SEQ ID NO: 416555 - DNA, 25 bp, Homo sapien
gaaggagatggatttctgggcaatg

SEQ ID NO: 416556 - DNA, 25 bp, Homo sapien
cccacaggtgcgtgttgacattgga

SEQ ID NO: 416557 - DNA, 25 bp, Homo sapien
ttccacacctccagcagtcgtggtg

SEQ ID NO: 416558 - DNA, 25 bp, Homo sapien
tggtgagacccactcttaggaagac

SEQ ID NO: 416559 - DNA, 25 bp, Homo sapien
gaactggtgttcgaaggtacttgga

SEQ ID NO: 416560 - DNA, 25 bp, Homo sapien
tctgtgtttcaaaccacgtgccttg

SEQ ID NO: 416561 - DNA, 25 bp, Homo sapien
tgtttcaaaccacgtgccttgtatc

SEQ ID NO: 416562 - DNA, 25 bp, Homo sapien
attgggaggtgcgtgcagaacaaca

SEQ ID NO: 416563 - DNA, 25 bp, Homo sapien
agaacaacaccagagatggcttcca

SEQ ID NO: 416564 - DNA, 25 bp, Homo sapien
gccagtgctgtcaccccacagcaca

SEQ ID NO: 416565 - DNA, 25 bp, Homo sapien
tatccagcggtgcaggatcagcctc

SEQ ID NO: 416566 - DNA, 25 bp, Homo sapien
cggtgcaggatcagcctcgaggcca

SEQ ID NO: 416567 - DNA, 25 bp, Homo sapien
gcctggatatccagcggtgcaggat

SEQ ID NO: 416568 - DNA, 25 bp, Homo sapien
gctgtgttcgccatatgattcgcag

SEQ ID NO: 416569 - DNA, 25 bp, Homo sapien
atgattcgcagccagttagggacat

SEQ ID NO: 416570 - DNA, 25 bp, Homo sapien
tgggttgctgtgttcgccatatgat

SEQ ID NO: 416571 - DNA, 25 bp, Homo sapien
cgccatatgattcgcagccagttag

SEQ ID NO: 416572 - DNA, 25 bp, Homo sapien
gtcactgagcacaactgcccccttt

SEQ ID NO: 416573 - DNA, 25 bp, Homo sapien
cactgagcacaactgccccctttga

SEQ ID NO: 416574 - DNA, 25 bp, Homo sapien
acaggagcctttgaatatctgctcc

SEQ ID NO: 416575 - DNA, 25 bp, Homo sapien
ggagcctttgaatatctgctcctca

SEQ ID NO: 416576 - DNA, 25 bp, Homo sapien
ttttctccatggcatccatggccat

SEQ ID NO: 416577 - DNA, 25 bp, Homo sapien
tttttctccatggcatccatggcca

SEQ ID NO: 416578 - DNA, 25 bp, Homo sapien
tactgcacgagtaaatgccccagag

SEQ ID NO: 416579 - DNA, 25 bp, Homo sapien
gattgccctattgaccctaaccagt

SEQ ID NO: 416580 - DNA, 25 bp, Homo sapien
gctgtgaactagtacatggacatct

SEQ ID NO: 416581 - DNA, 25 bp, Homo sapien
gaaagctattcatagccaaggcaga

SEQ ID NO: 416582 - DNA, 25 bp, Homo sapien
ttccaaggagatccatggccctgcc

SEQ ID NO: 416583 - DNA, 25 bp, Homo sapien
gcctggattaaagcagattcgatga

SEQ ID NO: 416584 - DNA, 25 bp, Homo sapien
gaattgtttgcccagatgcaggctt

SEQ ID NO: 416585 - DNA, 25 bp, Homo sapien
ggatgtctgccccactaggttgtct

SEQ ID NO: 416586 - DNA, 25 bp, Homo sapien
gtcatctggagttgtagcaagggtt

SEQ ID NO: 416587 - DNA, 25 bp, Homo sapien
caacatcaaacccattgtcatctgg

SEQ ID NO: 416588 - DNA, 25 bp, Homo sapien
ttttgcactctaggtgttggtgtgg

SEQ ID NO: 416589 - DNA, 25 bp, Homo sapien
ggtgtgggggaatgcaacatcaaac

SEQ ID NO: 416590 - DNA, 25 bp, Homo sapien
ctttaatccagggacagtatagagg

SEQ ID NO: 416591 - DNA, 25 bp, Homo sapien
tccagggacagtatagaggatcaaa

SEQ ID NO: 416592 - DNA, 25 bp, Homo sapien
taatccagggacagtatagaggatc

SEQ ID NO: 416593 - DNA, 25 bp, Homo sapien
gggacagtatagaggatcaaagaga

SEQ ID NO: 416594 - DNA, 25 bp, Homo sapien
aagaaaattcacatgggccacgcca

SEQ ID NO: 416595 - DNA, 25 bp, Homo sapien
gaggcattagcacttgttctgtagg

SEQ ID NO: 416596 - DNA, 25 bp, Homo sapien
catagacctgtgaggacagtggtca

SEQ ID NO: 416597 - DNA, 25 bp, Homo sapien
taatgaggagtctcatagacctgtg

SEQ ID NO: 416598 - DNA, 25 bp, Homo sapien
tagggctgaaacctgcccgtgtccc

SEQ ID NO: 416599 - DNA, 25 bp, Homo sapien
caaatatcaggcctccatgcagagg

SEQ ID NO: 416600 - DNA, 25 bp, Homo sapien
tggaagacccaatagggctgaaacc

SEQ ID NO: 416601 - DNA, 25 bp, Homo sapien
ctctgggtcctgtcttgatccaaat

SEQ ID NO: 416602 - DNA, 25 bp, Homo sapien
cacatcctgcgatggcaaatcagct

SEQ ID NO: 416603 - DNA, 25 bp, Homo sapien
catcctgcgatggcaaatcagctgc

SEQ ID NO: 416604 - DNA, 25 bp, Homo sapien
tccacatcctgcgatggcaaatcag

SEQ ID NO: 416605 - DNA, 25 bp, Homo sapien
acatcctgcgatggcaaatcagctg

SEQ ID NO: 416606 - DNA, 25 bp, Homo sapien
cctggttttctgcagggactggcat

SEQ ID NO: 416607 - DNA, 25 bp, Homo sapien
tcctggttttctgcagggactggca

SEQ ID NO: 416608 - DNA, 25 bp, Homo sapien
ttctcctggttttctgcagggactg

SEQ ID NO: 416609 - DNA, 25 bp, Homo sapien
gtctttctcctggttttctgcaggg

SEQ ID NO: 416610 - DNA, 25 bp, Homo sapien
tggatgatcatacacagaggactta

SEQ ID NO: 416611 - DNA, 25 bp, Homo sapien
gagggtgcttatccgtgtctctggt

SEQ ID NO: 416612 - DNA, 25 bp, Homo sapien
tccctgccctgaaatgtgaaccaag

SEQ ID NO: 416613 - DNA, 25 bp, Homo sapien
gactcttaatatctgctgcaacttg

SEQ ID NO: 416614 - DNA, 25 bp, Homo sapien
ggattgacacggtcattgttcccat

SEQ ID NO: 416615 - DNA, 25 bp, Homo sapien
tgttcccattgcagagggttctggt

SEQ ID NO: 416616 - DNA, 25 bp, Homo sapien
ttgcagctggtggattgacacggtc

SEQ ID NO: 416617 - DNA, 25 bp, Homo sapien
caggagtggcacctgccattgcagc

SEQ ID NO: 416618 - DNA, 25 bp, Homo sapien
cccctggctctgtaagcttgtccta

SEQ ID NO: 416619 - DNA, 25 bp, Homo sapien
cctggctctgtaagcttgtcctaac

SEQ ID NO: 416620 - DNA, 25 bp, Homo sapien
cctcgatccccttctgtagtggatt

SEQ ID NO: 416621 - DNA, 25 bp, Homo sapien
tggctctgtaagcttgtcctaacaa

SEQ ID NO: 416622 - DNA, 25 bp, Homo sapien
gcacctgctaggacattctgaggct

SEQ ID NO: 416623 - DNA, 25 bp, Homo sapien
tagaatgcttcttggttttgttaaa

SEQ ID NO: 416624 - DNA, 25 bp, Homo sapien
cttttggatctacccaggttccagg

SEQ ID NO: 416625 - DNA, 25 bp, Homo sapien
cagaaccgtccttgcttagaatgct

SEQ ID NO: 416626 - DNA, 25 bp, Homo sapien
ttcctctatggctcctcgcctgacc

SEQ ID NO: 416627 - DNA, 25 bp, Homo sapien
gagaaggcagtctccccgctgcacc

SEQ ID NO: 416628 - DNA, 25 bp, Homo sapien
tgtattgaaaacagtccggggtctg

SEQ ID NO: 416629 - DNA, 25 bp, Homo sapien
tgatttcattgtataactgtattga

SEQ ID NO: 416630 - DNA, 25 bp, Homo sapien
ggccaggtcttggtccttggactac

SEQ ID NO: 416631 - DNA, 25 bp, Homo sapien
taccatctagtctgtgcctcagctg

SEQ ID NO: 416632 - DNA, 25 bp, Homo sapien
ggcagcttccatacagcctcacaga

SEQ ID NO: 416633 - DNA, 25 bp, Homo sapien
gatcctggagggctgacttaagcaa

SEQ ID NO: 416634 - DNA, 25 bp, Homo sapien
tgacttaagcaaatccttagtaaag

SEQ ID NO: 416635 - DNA, 25 bp, Homo sapien
ggcccaggagtgactttatccacat

SEQ ID NO: 416636 - DNA, 25 bp, Homo sapien
tcttttgatggtagttcaggcgctg

SEQ ID NO: 416637 - DNA, 25 bp, Homo sapien
gacctttctgctgcatactttggca

SEQ ID NO: 416638 - DNA, 25 bp, Homo sapien
aaagaatttgttgtttcgagtacag

SEQ ID NO: 416639 - DNA, 25 bp, Homo sapien
cccaaaagacagtattgttcacaag

SEQ ID NO: 416640 - DNA, 25 bp, Homo sapien
gcaaaatttgaaacgctaccctcag

SEQ ID NO: 416641 - DNA, 25 bp, Homo sapien
ggcaaaatttgaaacgctaccctca

SEQ ID NO: 416642 - DNA, 25 bp, Homo sapien
caaaatttgaaacgctaccctcagg

SEQ ID NO: 416643 - DNA, 25 bp, Homo sapien
tgaggttgggtctcagtggatggca

SEQ ID NO: 416644 - DNA, 25 bp, Homo sapien
aaggatgctgctttgcttaggaaga

SEQ ID NO: 416645 - DNA, 25 bp, Homo sapien
catgggctgatgtgccaagaatggc

SEQ ID NO: 416646 - DNA, 25 bp, Homo sapien
tgaaggatgctgctttgcttaggaa

SEQ ID NO: 416647 - DNA, 25 bp, Homo sapien
agggaaggcagcagacaaaaccctg

SEQ ID NO: 416648 - DNA, 25 bp, Homo sapien
ttgcagggaaggcagcagacaaaac

SEQ ID NO: 416649 - DNA, 25 bp, Homo sapien
ggaaggcagcagacaaaaccctgga

SEQ ID NO: 416650 - DNA, 25 bp, Homo sapien
aggcagcagacaaaaccctggaaat

SEQ ID NO: 416651 - DNA, 25 bp, Homo sapien
tgacaacaatccatgcgtggttggg

SEQ ID NO: 416652 - DNA, 25 bp, Homo sapien
gattcatagttgacaacaatccatg

SEQ ID NO: 416653 - DNA, 25 bp, Homo sapien
gggttctcgaaatgtagtccttgga

SEQ ID NO: 416654 - DNA, 25 bp, Homo sapien
tctcgaaatgtagtccttggaccag

SEQ ID NO: 416655 - DNA, 25 bp, Homo sapien
tggttggctgtagatccaccattcg

SEQ ID NO: 416656 - DNA, 25 bp, Homo sapien
tggctgtagatccaccattcggtga

SEQ ID NO: 416657 - DNA, 25 bp, Homo sapien
ccaccattcggtgattgattctgga

SEQ ID NO: 416658 - DNA, 25 bp, Homo sapien
agaatgggtggttggctgtagatcc

SEQ ID NO: 416659 - DNA, 25 bp, Homo sapien
tcagccaccttacaaaatgtcctgg

SEQ ID NO: 416660 - DNA, 25 bp, Homo sapien
ttttcagccaccttacaaaatgtcc

SEQ ID NO: 416661 - DNA, 25 bp, Homo sapien
gccaccttacaaaatgtcctggaac

SEQ ID NO: 416662 - DNA, 25 bp, Homo sapien
cttacaaaatgtcctggaacttctg

SEQ ID NO: 416663 - DNA, 25 bp, Homo sapien
gagaacagcgttagcatctctgcag

SEQ ID NO: 416664 - DNA, 25 bp, Homo sapien
tgtgctgccccaaaccagcatcttt

SEQ ID NO: 416665 - DNA, 25 bp, Homo sapien
tttccttgttgactgggactggcat

SEQ ID NO: 416666 - DNA, 25 bp, Homo sapien
taatgctgataaaagtgtcaggatc

SEQ ID NO: 416667 - DNA, 25 bp, Homo sapien
agggctcaattcaatcttgtctctg

SEQ ID NO: 416668 - DNA, 25 bp, Homo sapien
aaagggctcaattcaatcttgtctc

SEQ ID NO: 416669 - DNA, 25 bp, Homo sapien
ttaaagggctcaattcaatcttgtc

SEQ ID NO: 416670 - DNA, 25 bp, Homo sapien
tgctttaaagggctcaattcaatct

SEQ ID NO: 416671 - DNA, 25 bp, Homo sapien
ctggcagaggacctgacgattccca

SEQ ID NO: 416672 - DNA, 25 bp, Homo sapien
tgtcatccgggcacaatctccaaat

SEQ ID NO: 416673 - DNA, 25 bp, Homo sapien
acgattcccagcaagaccaagcact

SEQ ID NO: 416674 - DNA, 25 bp, Homo sapien
gtccagggtcagccacggtcacttc

SEQ ID NO: 416675 - DNA, 25 bp, Homo sapien
aagggctgctcttggagcaagctca

SEQ ID NO: 416676 - DNA, 25 bp, Homo sapien
gctgtatcgtcttagaaccggactt

SEQ ID NO: 416677 - DNA, 25 bp, Homo sapien
gcaggttgctccatgacgggcagct

SEQ ID NO: 416678 - DNA, 25 bp, Homo sapien
tggtcaccgggatttggttattgga

SEQ ID NO: 416679 - DNA, 25 bp, Homo sapien
ccttcttgaactgtcaccctgaagc

SEQ ID NO: 416680 - DNA, 25 bp, Homo sapien
cttcttgaactgtcaccctgaagcc

SEQ ID NO: 416681 - DNA, 25 bp, Homo sapien
tgtttgttaggccttgaccattcct

SEQ ID NO: 416682 - DNA, 25 bp, Homo sapien
ctgggcaacgccagctccagtgact

SEQ ID NO: 416683 - DNA, 25 bp, Homo sapien
ctaggcaatttgcatcgctgtttct

SEQ ID NO: 416684 - DNA, 25 bp, Homo sapien
tttgttgtcatcctgcgcttccctg

SEQ ID NO: 416685 - DNA, 25 bp, Homo sapien
tctgagagctgtagtaagttgttgg

SEQ ID NO: 416686 - DNA, 25 bp, Homo sapien
ctctgagagctgtagtaagttgttg

SEQ ID NO: 416687 - DNA, 25 bp, Homo sapien
tgcagagggccgtgagtcctgccaa

SEQ ID NO: 416688 - DNA, 25 bp, Homo sapien
ctgatgcatcacctgtaggcagcat

SEQ ID NO: 416689 - DNA, 25 bp, Homo sapien
tgtaggcagcatccaagtgcccaga

SEQ ID NO: 416690 - DNA, 25 bp, Homo sapien
tctggagccctgatgcatcacctgt

SEQ ID NO: 416691 - DNA, 25 bp, Homo sapien
gtgtctttctccttggtgtatgagc

SEQ ID NO: 416692 - DNA, 25 bp, Homo sapien
atgagctttccacggagttgttatg

SEQ ID NO: 416693 - DNA, 25 bp, Homo sapien
tgggcatcatcgtagcaggtgtctt

SEQ ID NO: 416694 - DNA, 25 bp, Homo sapien
ggcatcatcgtagcaggtgtctttc

SEQ ID NO: 416695 - DNA, 25 bp, Homo sapien
ttgtccggtgccaggtggaggatgg

SEQ ID NO: 416696 - DNA, 25 bp, Homo sapien
ccaggttgtccggtgccaggtggag

SEQ ID NO: 416697 - DNA, 25 bp, Homo sapien
tgacccaggttgtccggtgccaggt

SEQ ID NO: 416698 - DNA, 25 bp, Homo sapien
ctgacccaggttgtccggtgccagg

SEQ ID NO: 416699 - DNA, 25 bp, Homo sapien
caccaagagtgagcggcttgggcat

SEQ ID NO: 416700 - DNA, 25 bp, Homo sapien
gagcggcttgggcatttaatcaggt

SEQ ID NO: 416701 - DNA, 25 bp, Homo sapien
tcctggctggcaccaagagtgagcg

SEQ ID NO: 416702 - DNA, 25 bp, Homo sapien
aagagtgagcggcttgggcatttaa

SEQ ID NO: 416703 - DNA, 25 bp, Homo sapien
ccagccataggtccccagtggatgc

SEQ ID NO: 416704 - DNA, 25 bp, Homo sapien
cagccataggtccccagtggatgca

SEQ ID NO: 416705 - DNA, 25 bp, Homo sapien
ttttgtttcgattgtccctgacctg

SEQ ID NO: 416706 - DNA, 25 bp, Homo sapien
agaggacaagttctggtgctctctg

SEQ ID NO: 416707 - DNA, 25 bp, Homo sapien
tctcagggagagaggacaagttctg

SEQ ID NO: 416708 - DNA, 25 bp, Homo sapien
ggctctctggtactatcttggccat

SEQ ID NO: 416709 - DNA, 25 bp, Homo sapien
ggtgctctctgaggctctctggtac

SEQ ID NO: 416710 - DNA, 25 bp, Homo sapien
tgtggggagattatgatgaagacct

SEQ ID NO: 416711 - DNA, 25 bp, Homo sapien
atgtggggagattatgatgaagacc

SEQ ID NO: 416712 - DNA, 25 bp, Homo sapien
tatgtggggagattatgatgaagac

SEQ ID NO: 416713 - DNA, 25 bp, Homo sapien
tgctttcctgttaagtccatgtata

SEQ ID NO: 416714 - DNA, 25 bp, Homo sapien
gtcttctggctttgcaaagggtcag

SEQ ID NO: 416715 - DNA, 25 bp, Homo sapien
gaggacagttcaagggtcttctggc

SEQ ID NO: 416716 - DNA, 25 bp, Homo sapien
tctggatcaccgaatacatgttgga

SEQ ID NO: 416717 - DNA, 25 bp, Homo sapien
ccttctgccccactatcagactggg

SEQ ID NO: 416718 - DNA, 25 bp, Homo sapien
attgagttcagggttcccttctgcc

SEQ ID NO: 416719 - DNA, 25 bp, Homo sapien
ttcatagttgtactggaagaaatct

SEQ ID NO: 416720 - DNA, 25 bp, Homo sapien
gctaccacagtttccacctgagtgg

SEQ ID NO: 416721 - DNA, 25 bp, Homo sapien
agttcttcccaccagagatgtggtt

SEQ ID NO: 416722 - DNA, 25 bp, Homo sapien
cgatcttatgcagttcttcccacca

SEQ ID NO: 416723 - DNA, 25 bp, Homo sapien
cttcccaccagagatgtggttcttt

SEQ ID NO: 416724 - DNA, 25 bp, Homo sapien
tcttcccaccagagatgtggttctt

SEQ ID NO: 416725 - DNA, 25 bp, Homo sapien
cagcgagcccgtgttggagttacaa

SEQ ID NO: 416726 - DNA, 25 bp, Homo sapien
tgtactgagcaggacaattaagccc

SEQ ID NO: 416727 - DNA, 25 bp, Homo sapien
ggagttacaactgtgcctcagggag

SEQ ID NO: 416728 - DNA, 25 bp, Homo sapien
ggtttcattcaaggacttacaacag

SEQ ID NO: 416729 - DNA, 25 bp, Homo sapien
ctggtgcaggggagtaatgcagagg

SEQ ID NO: 416730 - DNA, 25 bp, Homo sapien
ggatgcaggatgcaccacagcccat

SEQ ID NO: 416731 - DNA, 25 bp, Homo sapien
catctggtgcaggggagtaatgcag

SEQ ID NO: 416732 - DNA, 25 bp, Homo sapien
gggatgcaggatgcaccacagccca

SEQ ID NO: 416733 - DNA, 25 bp, Homo sapien
tccatacgtttgtaccagggagaaa

SEQ ID NO: 416734 - DNA, 25 bp, Homo sapien
tgaagacaccagcttgacagttccc

SEQ ID NO: 416735 - DNA, 25 bp, Homo sapien
gactgtgtaccgtggactgtggaca

SEQ ID NO: 416736 - DNA, 25 bp, Homo sapien
gaagcccacgcacgaattttcagga

SEQ ID NO: 416737 - DNA, 25 bp, Homo sapien
tctaaatgaccaatccagtgagcct

SEQ ID NO: 416738 - DNA, 25 bp, Homo sapien
gagacccttgttgagcctggcagaa

SEQ ID NO: 416739 - DNA, 25 bp, Homo sapien
taaaaatgacccaaagctgtagctg

SEQ ID NO: 416740 - DNA, 25 bp, Homo sapien
gaacgacctgacaacataagctgct

SEQ ID NO: 416741 - DNA, 25 bp, Homo sapien
cctcggacacctccgcgagggccgg

SEQ ID NO: 416742 - DNA, 25 bp, Homo sapien
gggccggcggacaccctcgaggtgc

SEQ ID NO: 416743 - DNA, 25 bp, Homo sapien
cctgtttgctttccagcgcgtcccc

SEQ ID NO: 416744 - DNA, 25 bp, Homo sapien
ccctcgaggtgcgtcgcctcggaca

SEQ ID NO: 416745 - DNA, 25 bp, Homo sapien
gctgcgcgggcctgacctacagcga

SEQ ID NO: 416746 - DNA, 25 bp, Homo sapien
cttgtcgcgaacaggaggcccgcgc

SEQ ID NO: 416747 - DNA, 25 bp, Homo sapien
cggcgggcttgtcgcgaacaggagg

SEQ ID NO: 416748 - DNA, 25 bp, Homo sapien
tacagcgagatcctggccgtcgggc

SEQ ID NO: 416749 - DNA, 25 bp, Homo sapien
ggcctcctccaggcgcgcggagggc

SEQ ID NO: 416750 - DNA, 25 bp, Homo sapien
acggcctcctccaggcgcgcggagg

SEQ ID NO: 416751 - DNA, 25 bp, Homo sapien
cggcctcctccaggcgcgcggaggg

SEQ ID NO: 416752 - DNA, 25 bp, Homo sapien
gcctcctccaggcgcgcggagggcg

SEQ ID NO: 416753 - DNA, 25 bp, Homo sapien
gggcggcaggatgcgcggcggcgag

SEQ ID NO: 416754 - DNA, 25 bp, Homo sapien
ggtgcagggcggcaggatgcgcggc

SEQ ID NO: 416755 - DNA, 25 bp, Homo sapien
ccacgtcgctctggttcgggaggct

SEQ ID NO: 416756 - DNA, 25 bp, Homo sapien
cgcggagccggtggaggcgttggtg

SEQ ID NO: 416757 - DNA, 25 bp, Homo sapien
ccgaggcgccgtagtacaggtggta

SEQ ID NO: 416758 - DNA, 25 bp, Homo sapien
gagctggcttggaacgggcctccct

SEQ ID NO: 416759 - DNA, 25 bp, Homo sapien
atgccgatgccgatgcccgaggtga

SEQ ID NO: 416760 - DNA, 25 bp, Homo sapien
tgaaggcgcctggatagtgcatgcg

SEQ ID NO: 416761 - DNA, 25 bp, Homo sapien
gacacccaggatgctactgtccagg

SEQ ID NO: 416762 - DNA, 25 bp, Homo sapien
tcccaagaggacgaggattacccag

SEQ ID NO: 416763 - DNA, 25 bp, Homo sapien
tacccatgatgctatgcccaggagg

SEQ ID NO: 416764 - DNA, 25 bp, Homo sapien
gattacccaggatgctatacccagg

SEQ ID NO: 416765 - DNA, 25 bp, Homo sapien
ccgtgcccagccctaaaatatttat

SEQ ID NO: 416766 - DNA, 25 bp, Homo sapien
cgttggctaggcaggtctcgaattc

SEQ ID NO: 416767 - DNA, 25 bp, Homo sapien
ccacgttggctaggcaggtctcgaa

SEQ ID NO: 416768 - DNA, 25 bp, Homo sapien
cgtgcccagccctaaaatatttatt

SEQ ID NO: 416769 - DNA, 25 bp, Homo sapien
ggaaggcagcggcagttgatcaact

SEQ ID NO: 416770 - DNA, 25 bp, Homo sapien
aaagtcgacagagccaaaagcttgc

SEQ ID NO: 416771 - DNA, 25 bp, Homo sapien
tcttaagctcagatggcatgtggcc

SEQ ID NO: 416772 - DNA, 25 bp, Homo sapien
tgaagttctcagatcaacacacaaa

SEQ ID NO: 416773 - DNA, 25 bp, Homo sapien
gacaggaggaaaagcattaggcaaa

SEQ ID NO: 416774 - DNA, 25 bp, Homo sapien
tccagagtgagtccgtgatttgtca

SEQ ID NO: 416775 - DNA, 25 bp, Homo sapien
catctgatgcaatactctggacaca

SEQ ID NO: 416776 - DNA, 25 bp, Homo sapien
gaaagagctgcaatgctgcctgtga

SEQ ID NO: 416777 - DNA, 25 bp, Homo sapien
aatagtactgccgttgtgaagctct

SEQ ID NO: 416778 - DNA, 25 bp, Homo sapien
taccacccaagaacactggaaggca

SEQ ID NO: 416779 - DNA, 25 bp, Homo sapien
tctgtgaagctctgaacagcagcta

SEQ ID NO: 416780 - DNA, 25 bp, Homo sapien
tattctccgatgctcaggacagacc

SEQ ID NO: 416781 - DNA, 25 bp, Homo sapien
gagaggcaatggatcccaggtattg

SEQ ID NO: 416782 - DNA, 25 bp, Homo sapien
cacgtccaggtgaaatgggcgttgc

SEQ ID NO: 416783 - DNA, 25 bp, Homo sapien
tctgcagagagggttgtcatgccgc

SEQ ID NO: 416784 - DNA, 25 bp, Homo sapien
gagagtcgactggaaagttctgcag

SEQ ID NO: 416785 - DNA, 25 bp, Homo sapien
tgtctgtgttcggtaagaacgtaga

SEQ ID NO: 416786 - DNA, 25 bp, Homo sapien
gttttatagtaaggcgaattctctc

SEQ ID NO: 416787 - DNA, 25 bp, Homo sapien
aaaagtattccatgggctggtaaat

SEQ ID NO: 416788 - DNA, 25 bp, Homo sapien
tacctttggcaaaaagtattccatg

SEQ ID NO: 416789 - DNA, 25 bp, Homo sapien
tagccagagcttcatgatcctgcag

SEQ ID NO: 416790 - DNA, 25 bp, Homo sapien
gtagaactggccctatcaacccaag

SEQ ID NO: 416791 - DNA, 25 bp, Homo sapien
cagtgaactaccgtaactcccaagg

SEQ ID NO: 416792 - DNA, 25 bp, Homo sapien
tagattgccattataagaggcctgg

SEQ ID NO: 416793 - DNA, 25 bp, Homo sapien
tgtgtaatcttacagctaacagtgt

SEQ ID NO: 416794 - DNA, 25 bp, Homo sapien
aatgttcaaccttggctgaagctcc

SEQ ID NO: 416795 - DNA, 25 bp, Homo sapien
caaggaacaaaaggagctggtccat

SEQ ID NO: 416796 - DNA, 25 bp, Homo sapien
cctggtagttcccaggcaaatagtt

SEQ ID NO: 416797 - DNA, 25 bp, Homo sapien
taagcataaagtactatgccatgat

SEQ ID NO: 416798 - DNA, 25 bp, Homo sapien
gcataaagtactatgccatgattca

SEQ ID NO: 416799 - DNA, 25 bp, Homo sapien
ataaagtactatgccatgattcatg

SEQ ID NO: 416800 - DNA, 25 bp, Homo sapien
agcataaagtactatgccatgattc

SEQ ID NO: 416801 - DNA, 25 bp, Homo sapien
aacagcaccccttgagcggtggcac

SEQ ID NO: 416802 - DNA, 25 bp, Homo sapien
agcaccccttgagcggtggcaccct

SEQ ID NO: 416803 - DNA, 25 bp, Homo sapien
ccccttgagcggtggcacccttcat

SEQ ID NO: 416804 - DNA, 25 bp, Homo sapien
caacagcaccccttgagcggtggca

SEQ ID NO: 416805 - DNA, 25 bp, Homo sapien
ggcttggagaaggttatagttagaa

SEQ ID NO: 416806 - DNA, 25 bp, Homo sapien
tatagttagaaagccccttccttga

SEQ ID NO: 416807 - DNA, 25 bp, Homo sapien
catctttaaaacgccaggtctttca

SEQ ID NO: 416808 - DNA, 25 bp, Homo sapien
gaaagccccttccttgattgtgtgg

SEQ ID NO: 416809 - DNA, 25 bp, Homo sapien
tctggccggctgcagacatcttggt

SEQ ID NO: 416810 - DNA, 25 bp, Homo sapien
aaacagctccaggatttgccaaccg

SEQ ID NO: 416811 - DNA, 25 bp, Homo sapien
ctctggatcctggaaaaaagggagg

SEQ ID NO: 416812 - DNA, 25 bp, Homo sapien
catcttggttagtcatgtgtagctc

SEQ ID NO: 416813 - DNA, 25 bp, Homo sapien
gggtagcatgcaccgctaggatgca

SEQ ID NO: 416814 - DNA, 25 bp, Homo sapien
ttccaaggtgcactattccagcggg

SEQ ID NO: 416815 - DNA, 25 bp, Homo sapien
gctaggatgcaacataagcccttcc

SEQ ID NO: 416816 - DNA, 25 bp, Homo sapien
ccagagttccaaggtgcactattcc

SEQ ID NO: 416817 - DNA, 25 bp, Homo sapien
tcaggccaaggcttctagaattcct

SEQ ID NO: 416818 - DNA, 25 bp, Homo sapien
cttctagaattccttgcagcaagag

SEQ ID NO: 416819 - DNA, 25 bp, Homo sapien
tgttttcctttcccacacatcaggc

SEQ ID NO: 416820 - DNA, 25 bp, Homo sapien
cacacatcaggccaaggcttctaga

SEQ ID NO: 416821 - DNA, 25 bp, Homo sapien
caagtggctgcaactgcagcgtgct

SEQ ID NO: 416822 - DNA, 25 bp, Homo sapien
tatggaaagcaccatccccttttcg

SEQ ID NO: 416823 - DNA, 25 bp, Homo sapien
taatggccttaaactgccaagtggc

SEQ ID NO: 416824 - DNA, 25 bp, Homo sapien
tttaaatgcttttatggaaagcacc

SEQ ID NO: 416825 - DNA, 25 bp, Homo sapien
caggctgtttacgaaagactaaaag

SEQ ID NO: 416826 - DNA, 25 bp, Homo sapien
ggaccagttgcctccgtcttttcca

SEQ ID NO: 416827 - DNA, 25 bp, Homo sapien
gcaccgtttgtgctgagcaggacca

SEQ ID NO: 416828 - DNA, 25 bp, Homo sapien
tttctgggggcctgataacatcagg

SEQ ID NO: 416829 - DNA, 25 bp, Homo sapien
ttgttgatctcagaaccctgatgtg

SEQ ID NO: 416830 - DNA, 25 bp, Homo sapien
acttgttgatctcagaaccctgatg

SEQ ID NO: 416831 - DNA, 25 bp, Homo sapien
ccaacttgttgatctcagaaccctg

SEQ ID NO: 416832 - DNA, 25 bp, Homo sapien
gttgatctcagaaccctgatgtgct

SEQ ID NO: 416833 - DNA, 25 bp, Homo sapien
actttttggtcatttcagagcaaga

SEQ ID NO: 416834 - DNA, 25 bp, Homo sapien
cttcggaagaatggagcaccttgtg

SEQ ID NO: 416835 - DNA, 25 bp, Homo sapien
gcctccctcctgttcgttggcttga

SEQ ID NO: 416836 - DNA, 25 bp, Homo sapien
agaatggagcaccttgtggcccaga

SEQ ID NO: 416837 - DNA, 25 bp, Homo sapien
ttggctctcgcagtaaagagtggtt

SEQ ID NO: 416838 - DNA, 25 bp, Homo sapien
actatgggcctccacgtcgtgtggt

SEQ ID NO: 416839 - DNA, 25 bp, Homo sapien
tcttttcctgactcctacactatgg

SEQ ID NO: 416840 - DNA, 25 bp, Homo sapien
tgttggctctcgcagtaaagagtgg

SEQ ID NO: 416841 - DNA, 25 bp, Homo sapien
tctgctctgatcacaggggacagga

SEQ ID NO: 416842 - DNA, 25 bp, Homo sapien
gggcctcttgagaactggatttgca

SEQ ID NO: 416843 - DNA, 25 bp, Homo sapien
tttgcaaagtgtctgcagacgtaag

SEQ ID NO: 416844 - DNA, 25 bp, Homo sapien
tgcagacgtaagtcctggtggcctg

SEQ ID NO: 416845 - DNA, 25 bp, Homo sapien
tgtttctgagtggatccatgtcttt

SEQ ID NO: 416846 - DNA, 25 bp, Homo sapien
tgctgtttctgagtggatccatgtc

SEQ ID NO: 416847 - DNA, 25 bp, Homo sapien
gctgtttctgagtggatccatgtct

SEQ ID NO: 416848 - DNA, 25 bp, Homo sapien
atgctgtttctgagtggatccatgt

SEQ ID NO: 416849 - DNA, 25 bp, Homo sapien
ctcagactgctgaggcaagcccaga

SEQ ID NO: 416850 - DNA, 25 bp, Homo sapien
ccagagctcgagcccccgggagtgt

SEQ ID NO: 416851 - DNA, 25 bp, Homo sapien
tagaaacttgtggttctcagactgc

SEQ ID NO: 416852 - DNA, 25 bp, Homo sapien
tcgagcccccgggagtgtggtcatg

SEQ ID NO: 416853 - DNA, 25 bp, Homo sapien
ggtctgcactgctagttactgccat

SEQ ID NO: 416854 - DNA, 25 bp, Homo sapien
tgacaggtctgcactgctagttact

SEQ ID NO: 416855 - DNA, 25 bp, Homo sapien
caggtctgcactgctagttactgcc

SEQ ID NO: 416856 - DNA, 25 bp, Homo sapien
gacaggtctgcactgctagttactg

SEQ ID NO: 416857 - DNA, 25 bp, Homo sapien
tcccatgtgctgtgcatcaagtgat

SEQ ID NO: 416858 - DNA, 25 bp, Homo sapien
gacacggaggaattacagacccaca

SEQ ID NO: 416859 - DNA, 25 bp, Homo sapien
taagtattgaaagtgtaccgggatc

SEQ ID NO: 416860 - DNA, 25 bp, Homo sapien
caattgtcccatgtgttaggaacta

SEQ ID NO: 416861 - DNA, 25 bp, Homo sapien
catctccagggtgctgtgtcttcct

SEQ ID NO: 416862 - DNA, 25 bp, Homo sapien
aacatctccagggtgctgtgtcttc

SEQ ID NO: 416863 - DNA, 25 bp, Homo sapien
ttaacatctccagggtgctgtgtct

SEQ ID NO: 416864 - DNA, 25 bp, Homo sapien
acatctccagggtgctgtgtcttcc

SEQ ID NO: 416865 - DNA, 25 bp, Homo sapien
ccataggtgttaggtgacatgagac

SEQ ID NO: 416866 - DNA, 25 bp, Homo sapien
tcccataacaggatctacggagatc

SEQ ID NO: 416867 - DNA, 25 bp, Homo sapien
caagtttcatgccaccccataggtg

SEQ ID NO: 416868 - DNA, 25 bp, Homo sapien
gacacacaggtcagaatcgccatct

SEQ ID NO: 416869 - DNA, 25 bp, Homo sapien
ttttctgttcctaccatctaagctg

SEQ ID NO: 416870 - DNA, 25 bp, Homo sapien
gggaggtcaaattcttgagtccatc

SEQ ID NO: 416871 - DNA, 25 bp, Homo sapien
taaatcaccatcctttagaaatggg

SEQ ID NO: 416872 - DNA, 25 bp, Homo sapien
acaacagtgacatgcctggctttgg

SEQ ID NO: 416873 - DNA, 25 bp, Homo sapien
actgtcaggacctctgattccatcg

SEQ ID NO: 416874 - DNA, 25 bp, Homo sapien
ctctgattccatcggtataggtgct

SEQ ID NO: 416875 - DNA, 25 bp, Homo sapien
ttggaggctaggacaagaggcacct

SEQ ID NO: 416876 - DNA, 25 bp, Homo sapien
atctggcactgctcccgggacacag

SEQ ID NO: 416877 - DNA, 25 bp, Homo sapien
cgttcaaacaaatgatggactgagg

SEQ ID NO: 416878 - DNA, 25 bp, Homo sapien
taaaaatactatgatgttgcgttca

SEQ ID NO: 416879 - DNA, 25 bp, Homo sapien
caaatgatggactgaggttatagta

SEQ ID NO: 416880 - DNA, 25 bp, Homo sapien
gatgttgcgttcaaacaaatgatgg

SEQ ID NO: 416881 - DNA, 25 bp, Homo sapien
agtttgaacggtggctccagaacca

SEQ ID NO: 416882 - DNA, 25 bp, Homo sapien
ctgctgtgcctggtcaatggtctga

SEQ ID NO: 416883 - DNA, 25 bp, Homo sapien
tgtacaaagatacagcagtttgaac

SEQ ID NO: 416884 - DNA, 25 bp, Homo sapien
gcctggtcaatggtctgatgtcccc

SEQ ID NO: 416885 - DNA, 25 bp, Homo sapien
gattgtagcctccactttcaaggta

SEQ ID NO: 416886 - DNA, 25 bp, Homo sapien
tataatgctatagacctggaaaggc

SEQ ID NO: 416887 - DNA, 25 bp, Homo sapien
tattcctgtgaacacctgattcagg

SEQ ID NO: 416888 - DNA, 25 bp, Homo sapien
ggaaaggctctcataccctactaca

SEQ ID NO: 416889 - DNA, 25 bp, Homo sapien
tcagacggacttaaataactctata

SEQ ID NO: 416890 - DNA, 25 bp, Homo sapien
gacagaagttacttggaatactaaa

SEQ ID NO: 416891 - DNA, 25 bp, Homo sapien
cagaatatagtccttcctaagtaac

SEQ ID NO: 416892 - DNA, 25 bp, Homo sapien
tatctcagagttttgcagacagcag

SEQ ID NO: 416893 - DNA, 25 bp, Homo sapien
gcccaagggtctactcaaaacatga

SEQ ID NO: 416894 - DNA, 25 bp, Homo sapien
caaactgaaggtcttggctgaacaa

SEQ ID NO: 416895 - DNA, 25 bp, Homo sapien
tcctactgtcaagaacaaactgaag

SEQ ID NO: 416896 - DNA, 25 bp, Homo sapien
gctgagcctggaaaataagcatttt

SEQ ID NO: 416897 - DNA, 25 bp, Homo sapien
caacctagtagtataaatggccagt

SEQ ID NO: 416898 - DNA, 25 bp, Homo sapien
aatggccagttaggcaacgagagac

SEQ ID NO: 416899 - DNA, 25 bp, Homo sapien
ggcaaatcccttaatcaacctagta

SEQ ID NO: 416900 - DNA, 25 bp, Homo sapien
tcttcaccaagaaacagagcaactc

SEQ ID NO: 416901 - DNA, 25 bp, Homo sapien
tagtaattgccagctagccccatgg

SEQ ID NO: 416902 - DNA, 25 bp, Homo sapien
caaaatagagagctactggcctgga

SEQ ID NO: 416903 - DNA, 25 bp, Homo sapien
taatggcatgggctgtcaagctcca

SEQ ID NO: 416904 - DNA, 25 bp, Homo sapien
gaagctaattcctgctgtccgagag

SEQ ID NO: 416905 - DNA, 25 bp, Homo sapien
ctgcatctgactctgaggctgaggg

SEQ ID NO: 416906 - DNA, 25 bp, Homo sapien
cctgcatctgactctgaggctgagg

SEQ ID NO: 416907 - DNA, 25 bp, Homo sapien
tgtgggctgaccctcatggctgtgc

SEQ ID NO: 416908 - DNA, 25 bp, Homo sapien
tgctccagttcactgagccgctcgg

SEQ ID NO: 416909 - DNA, 25 bp, Homo sapien
gcagtggagtggttcagggaggcac

SEQ ID NO: 416910 - DNA, 25 bp, Homo sapien
cgctcggaaaaggacaagctcccgg

SEQ ID NO: 416911 - DNA, 25 bp, Homo sapien
caacagtcaatggacaggaaaggct

SEQ ID NO: 416912 - DNA, 25 bp, Homo sapien
cacgagcagtggagtttttcgccca

SEQ ID NO: 416913 - DNA, 25 bp, Homo sapien
gacatgggccaagacaagtgtagca

SEQ ID NO: 416914 - DNA, 25 bp, Homo sapien
tctgtgatcgccctcaggacatggg

SEQ ID NO: 416915 - DNA, 25 bp, Homo sapien
gaagatttcccctacttagagcatg

SEQ ID NO: 416916 - DNA, 25 bp, Homo sapien
ttttgagactggctgaatcacccga

SEQ ID NO: 416917 - DNA, 25 bp, Homo sapien
tcagcaaatgaacaggacagcgagc

SEQ ID NO: 416918 - DNA, 25 bp, Homo sapien
gattgactgagctagcagggccaga

SEQ ID NO: 416919 - DNA, 25 bp, Homo sapien
aaatggaataacagagttttagaag

SEQ ID NO: 416920 - DNA, 25 bp, Homo sapien
aaaactgtatttggtcttgcaagag

SEQ ID NO: 416921 - DNA, 25 bp, Homo sapien
tctagttgtaggtagagaaaacatt

SEQ ID NO: 416922 - DNA, 25 bp, Homo sapien
gaaaacattaagatatgtgaatgga

SEQ ID NO: 416923 - DNA, 25 bp, Homo sapien
tgaggataccgaggccaggtcaaag

SEQ ID NO: 416924 - DNA, 25 bp, Homo sapien
tcgagatgagccaaatatgccagcc

SEQ ID NO: 416925 - DNA, 25 bp, Homo sapien
gctccacacctgcaatgaggcacta

SEQ ID NO: 416926 - DNA, 25 bp, Homo sapien
ccatttgcccttctataatagacag

SEQ ID NO: 416927 - DNA, 25 bp, Homo sapien
ggttgaacccaaggaatctgagaca

SEQ ID NO: 416928 - DNA, 25 bp, Homo sapien
tgtaccagccccaagtggatgcact

SEQ ID NO: 416929 - DNA, 25 bp, Homo sapien
gagacatggtccctgagtataccag

SEQ ID NO: 416930 - DNA, 25 bp, Homo sapien
agcctggagggtgtaccagcctgga

SEQ ID NO: 416931 - DNA, 25 bp, Homo sapien
gatggctctgtggtaggtggcgact

SEQ ID NO: 416932 - DNA, 25 bp, Homo sapien
gacttgcggtgggtttgtgaagaca

SEQ ID NO: 416933 - DNA, 25 bp, Homo sapien
taggtggcgacttgcggtgggtttg

SEQ ID NO: 416934 - DNA, 25 bp, Homo sapien
ttcgaggttctcggggcccatccac

SEQ ID NO: 416935 - DNA, 25 bp, Homo sapien
gggatttgccagttttaggacatcg

SEQ ID NO: 416936 - DNA, 25 bp, Homo sapien
tctggatgctttcctaccgtggcat

SEQ ID NO: 416937 - DNA, 25 bp, Homo sapien
tgttatcaggcgacactctggatgc

SEQ ID NO: 416938 - DNA, 25 bp, Homo sapien
catcgttcagatgttatcaggcgac

SEQ ID NO: 416939 - DNA, 25 bp, Homo sapien
tcccagtgtgcaccctccgagttct

SEQ ID NO: 416940 - DNA, 25 bp, Homo sapien
cacttcgccaatccaaggctccttg

SEQ ID NO: 416941 - DNA, 25 bp, Homo sapien
cccatgagccatggcattgagatgc

SEQ ID NO: 416942 - DNA, 25 bp, Homo sapien
ttgctgcacccttcacccgagtctt

SEQ ID NO: 416943 - DNA, 25 bp, Homo sapien
ggcgttttggccagtcatgtggttc

SEQ ID NO: 416944 - DNA, 25 bp, Homo sapien
gtttacagctttgggtacaaggaca

SEQ ID NO: 416945 - DNA, 25 bp, Homo sapien
tcatgtggttctccctcacaaaggg

SEQ ID NO: 416946 - DNA, 25 bp, Homo sapien
cagtcacaagacatttccaccgagc

SEQ ID NO: 416947 - DNA, 25 bp, Homo sapien
gccttacacgtcctttgtattcttc

SEQ ID NO: 416948 - DNA, 25 bp, Homo sapien
catttttccacagcacgaaaactgc

SEQ ID NO: 416949 - DNA, 25 bp, Homo sapien
tattcttccaatgagacccagcaga

SEQ ID NO: 416950 - DNA, 25 bp, Homo sapien
tccacagcacgaaaactgccttaca

SEQ ID NO: 416951 - DNA, 25 bp, Homo sapien
ggttggctaaatagcaacggcccca

SEQ ID NO: 416952 - DNA, 25 bp, Homo sapien
tgcagccggaatagtgagaaatcac

SEQ ID NO: 416953 - DNA, 25 bp, Homo sapien
aagtgtttctcccagcgagctgcag

SEQ ID NO: 416954 - DNA, 25 bp, Homo sapien
catgggtgtggagcacaaaagactc

SEQ ID NO: 416955 - DNA, 25 bp, Homo sapien
ttggtcagtgcacagatggccccag

SEQ ID NO: 416956 - DNA, 25 bp, Homo sapien
cagaggctttggtcagtgcacagat

SEQ ID NO: 416957 - DNA, 25 bp, Homo sapien
ctgatcctgtgtgtgctgctggaag

SEQ ID NO: 416958 - DNA, 25 bp, Homo sapien
gaagtcggcagctcttggttccaga

SEQ ID NO: 416959 - DNA, 25 bp, Homo sapien
ctgcatggaaggaagccaaggaaag

SEQ ID NO: 416960 - DNA, 25 bp, Homo sapien
tgcatggaaggaagccaaggaaagg

SEQ ID NO: 416961 - DNA, 25 bp, Homo sapien
gcatggaaggaagccaaggaaaggg

SEQ ID NO: 416962 - DNA, 25 bp, Homo sapien
catggaaggaagccaaggaaagggg

SEQ ID NO: 416963 - DNA, 25 bp, Homo sapien
tcaggattgcttcaaatgtgcacac

SEQ ID NO: 416964 - DNA, 25 bp, Homo sapien
tgtggtcaaataaagccacggctgg

SEQ ID NO: 416965 - DNA, 25 bp, Homo sapien
attagtcttgacgttggcggccctg

SEQ ID NO: 416966 - DNA, 25 bp, Homo sapien
tgaactctgacagccaattgtggtc

SEQ ID NO: 416967 - DNA, 25 bp, Homo sapien
gggatgtgaaacttgccctttgtca

SEQ ID NO: 416968 - DNA, 25 bp, Homo sapien
cctgtcactctccttagtgtaggtc

SEQ ID NO: 416969 - DNA, 25 bp, Homo sapien
ttgccctttgtcacgcaaaggaagg

SEQ ID NO: 416970 - DNA, 25 bp, Homo sapien
aggtctgtaagcatgagtcatcttc

SEQ ID NO: 416971 - DNA, 25 bp, Homo sapien
ggctcagagtccttaggaaacacaa

SEQ ID NO: 416972 - DNA, 25 bp, Homo sapien
gctcagagtccttaggaaacacaat

SEQ ID NO: 416973 - DNA, 25 bp, Homo sapien
gggctcagagtccttaggaaacaca

SEQ ID NO: 416974 - DNA, 25 bp, Homo sapien
ctcggattccaggagtagtctgcat

SEQ ID NO: 416975 - DNA, 25 bp, Homo sapien
cctcggattccaggagtagtctgca

SEQ ID NO: 416976 - DNA, 25 bp, Homo sapien
aaggcacaggtatgctgggctcaac

SEQ ID NO: 416977 - DNA, 25 bp, Homo sapien
gataccacagttccctaggatctca

SEQ ID NO: 416978 - DNA, 25 bp, Homo sapien
gttctcatgcaatcttgcatttcct

SEQ ID NO: 416979 - DNA, 25 bp, Homo sapien
gggcgggcctctttatttggcagaa

SEQ ID NO: 416980 - DNA, 25 bp, Homo sapien
tgtgaatacttatggaatgcctgct

SEQ ID NO: 416981 - DNA, 25 bp, Homo sapien
tttctcatgctagcccagttcctgg

SEQ ID NO: 416982 - DNA, 25 bp, Homo sapien
gttatctactcacaacagggatggc

SEQ ID NO: 416983 - DNA, 25 bp, Homo sapien
atttccatcacagggtcaatgccca

SEQ ID NO: 416984 - DNA, 25 bp, Homo sapien
tggacacagtacgagggaagcgact

SEQ ID NO: 416985 - DNA, 25 bp, Homo sapien
gaacattacccgtgaaacaactctg

SEQ ID NO: 416986 - DNA, 25 bp, Homo sapien
gatatgtgggcatacctgatggcca

SEQ ID NO: 416987 - DNA, 25 bp, Homo sapien
tgggatcctacgataatactgcgag

SEQ ID NO: 416988 - DNA, 25 bp, Homo sapien
ggccctccatgatcaatgcaaagtt

SEQ ID NO: 416989 - DNA, 25 bp, Homo sapien
aatttttggcctagggtctgtggat

SEQ ID NO: 416990 - DNA, 25 bp, Homo sapien
cctagggtctgtggatccccagaag

SEQ ID NO: 416991 - DNA, 25 bp, Homo sapien
tccccagaaggtccataaatgagtt

SEQ ID NO: 416992 - DNA, 25 bp, Homo sapien
gaaagaaatgtgcagtagaccatct

SEQ ID NO: 416993 - DNA, 25 bp, Homo sapien
tcctcctgcagcaacaatgcagctg

SEQ ID NO: 416994 - DNA, 25 bp, Homo sapien
tatgatgttccccaaagattaaaaa

SEQ ID NO: 416995 - DNA, 25 bp, Homo sapien
aattctgtgtgtaagtgaacacgtg

SEQ ID NO: 416996 - DNA, 25 bp, Homo sapien
tcttgtcattctaaaggtggcaggt

SEQ ID NO: 416997 - DNA, 25 bp, Homo sapien
ttcttgtcattctaaaggtggcagg

SEQ ID NO: 416998 - DNA, 25 bp, Homo sapien
tttcttgtcattctaaaggtggcag

SEQ ID NO: 416999 - DNA, 25 bp, Homo sapien
tcagctgaagccatgatacactttc

SEQ ID NO: 417000 - DNA, 25 bp, Homo sapien
gaaggttcaggcttctacagggcca

SEQ ID NO: 417001 - DNA, 25 bp, Homo sapien
tcaaagccggacaggcaggttttcc

SEQ ID NO: 417002 - DNA, 25 bp, Homo sapien
catgacctctggagttcagcccggt

SEQ ID NO: 417003 - DNA, 25 bp, Homo sapien
gcagccagcgcccagatagattcgt

SEQ ID NO: 417004 - DNA, 25 bp, Homo sapien
tttcattttgcaccacttactaggc

SEQ ID NO: 417005 - DNA, 25 bp, Homo sapien
gtttctatgaggtttacaatcccca

SEQ ID NO: 417006 - DNA, 25 bp, Homo sapien
taggccccttggagaatccatcaga

SEQ ID NO: 417007 - DNA, 25 bp, Homo sapien
caatccccatggactggcagctggt

SEQ ID NO: 417008 - DNA, 25 bp, Homo sapien
caaactcaagggcatactggcacga

SEQ ID NO: 417009 - DNA, 25 bp, Homo sapien
tcattccagagtatgggaagacagc

SEQ ID NO: 417010 - DNA, 25 bp, Homo sapien
tatgacagagtcaaatcgggccttc

SEQ ID NO: 417011 - DNA, 25 bp, Homo sapien
tcgggccttcagacagctcatttac

SEQ ID NO: 417012 - DNA, 25 bp, Homo sapien
tcctaacagcagaaatccacaagaa

SEQ ID NO: 417013 - DNA, 25 bp, Homo sapien
ttgaagacccacacagatgcatagt

SEQ ID NO: 417014 - DNA, 25 bp, Homo sapien
tagctaggccgatgggcatggacca

SEQ ID NO: 417015 - DNA, 25 bp, Homo sapien
tgccagctactcatccgaagccttt

SEQ ID NO: 417016 - DNA, 25 bp, Homo sapien
tcattaaatcttgcaacctggttct

SEQ ID NO: 417017 - DNA, 25 bp, Homo sapien
tccacttcgaccgacaaacctgagg

SEQ ID NO: 417018 - DNA, 25 bp, Homo sapien
ttcttcatggctgcggtagcatttc

SEQ ID NO: 417019 - DNA, 25 bp, Homo sapien
cagctcagccgagtagttttcatca

SEQ ID NO: 417020 - DNA, 25 bp, Homo sapien
cacagtgaccagagtgccatctgga

SEQ ID NO: 417021 - DNA, 25 bp, Homo sapien
agtgaccagagtgccatctggaaca

SEQ ID NO: 417022 - DNA, 25 bp, Homo sapien
accagagtgccatctggaacatccc

SEQ ID NO: 417023 - DNA, 25 bp, Homo sapien
tgaccagagtgccatctggaacatc

SEQ ID NO: 417024 - DNA, 25 bp, Homo sapien
taaggcatagctagggactgtgatc

SEQ ID NO: 417025 - DNA, 25 bp, Homo sapien
ggacacacactaaatgagcccggga

SEQ ID NO: 417026 - DNA, 25 bp, Homo sapien
caacattcagcaggtatacagagac

SEQ ID NO: 417027 - DNA, 25 bp, Homo sapien
aattcaggagaccttcgccaagtcg

SEQ ID NO: 417028 - DNA, 25 bp, Homo sapien
gcttgaacttttttcaagagctctg

SEQ ID NO: 417029 - DNA, 25 bp, Homo sapien
tttatctgatagtgaccccatggcc

SEQ ID NO: 417030 - DNA, 25 bp, Homo sapien
gaaacaggattcgatacttgcggct

SEQ ID NO: 417031 - DNA, 25 bp, Homo sapien
taactacgcccgctgtggactttgg

SEQ ID NO: 417032 - DNA, 25 bp, Homo sapien
taataagatcaagacccagctgagg

SEQ ID NO: 417033 - DNA, 25 bp, Homo sapien
tggtttgggtgttaatccagcggta

SEQ ID NO: 417034 - DNA, 25 bp, Homo sapien
taatccagcggtaggggcagcagta

SEQ ID NO: 417035 - DNA, 25 bp, Homo sapien
ttatttcctgatcctttcatctgag

SEQ ID NO: 417036 - DNA, 25 bp, Homo sapien
cagtaagttagcagacgggctgtct

SEQ ID NO: 417037 - DNA, 25 bp, Homo sapien
cgagggtcgccacggcaacacagca

SEQ ID NO: 417038 - DNA, 25 bp, Homo sapien
cagtggatatctttggggacaccct

SEQ ID NO: 417039 - DNA, 25 bp, Homo sapien
cacatcccaagctaggaagaccgac

SEQ ID NO: 417040 - DNA, 25 bp, Homo sapien
cccagaaagctgagacgagtgcctc

SEQ ID NO: 417041 - DNA, 25 bp, Homo sapien
ttgcctgggctcagcgcggtggaag

SEQ ID NO: 417042 - DNA, 25 bp, Homo sapien
agcggcaacgcctcgctcatcttgc

SEQ ID NO: 417043 - DNA, 25 bp, Homo sapien
gtgaagcggcggctcgtgctggcat

SEQ ID NO: 417044 - DNA, 25 bp, Homo sapien
agcttgccggccagggcagcgccgg

SEQ ID NO: 417045 - DNA, 25 bp, Homo sapien
acaggggcgcggatcttcagcaagc

SEQ ID NO: 417046 - DNA, 25 bp, Homo sapien
gggcgcggatcttcagcaagcagct

SEQ ID NO: 417047 - DNA, 25 bp, Homo sapien
caacaagccgattgagttaggaccc

SEQ ID NO: 417048 - DNA, 25 bp, Homo sapien
gccgattgagttaggaccctgcaaa

SEQ ID NO: 417049 - DNA, 25 bp, Homo sapien
tgaattctgtcaaaacgctcagtgc

SEQ ID NO: 417050 - DNA, 25 bp, Homo sapien
gaaaacgttctggttctgcggatcg

SEQ ID NO: 417051 - DNA, 25 bp, Homo sapien
ctaagttactaacagtccaggaggg

SEQ ID NO: 417052 - DNA, 25 bp, Homo sapien
tgcaaacacgcactcttcggaaggc

SEQ ID NO: 417053 - DNA, 25 bp, Homo sapien
cggcgcagatcgaaacagatcgggc

SEQ ID NO: 417054 - DNA, 25 bp, Homo sapien
agatcgaaacagatcgggcggctcg

SEQ ID NO: 417055 - DNA, 25 bp, Homo sapien
tccgcggcgcagatcgaaacagatc

SEQ ID NO: 417056 - DNA, 25 bp, Homo sapien
ggctccgcggcgcagatcgaaacag

SEQ ID NO: 417057 - DNA, 25 bp, Homo sapien
acacgcacgcacatcctgccacgca

SEQ ID NO: 417058 - DNA, 25 bp, Homo sapien
gcacatcctgccacgcacactgcca

SEQ ID NO: 417059 - DNA, 25 bp, Homo sapien
acactgccacgcacacgcaacttca

SEQ ID NO: 417060 - DNA, 25 bp, Homo sapien
acgcacacgcaacttcacggctcgc

SEQ ID NO: 417061 - DNA, 25 bp, Homo sapien
gaaaagttcgcagccaggaaagaag

SEQ ID NO: 417062 - DNA, 25 bp, Homo sapien
aattggggaaaagttcgcagccagg

SEQ ID NO: 417063 - DNA, 25 bp, Homo sapien
tggggaaaagttcgcagccaggaaa

SEQ ID NO: 417064 - DNA, 25 bp, Homo sapien
agaagccagttaattcaaaaggaag

SEQ ID NO: 417065 - DNA, 25 bp, Homo sapien
ttctggcgtccctaggagccccgga

SEQ ID NO: 417066 - DNA, 25 bp, Homo sapien
taggagccccggaaagaagtgcctg

SEQ ID NO: 417067 - DNA, 25 bp, Homo sapien
cagcagaggttgacttccttctggc

SEQ ID NO: 417068 - DNA, 25 bp, Homo sapien
gaaagaagtgcctggcggcgcaggg

SEQ ID NO: 417069 - DNA, 25 bp, Homo sapien
cgcgccccgcatccaagcctgcatg

SEQ ID NO: 417070 - DNA, 25 bp, Homo sapien
cccgcgccccgcatccaagcctgca

SEQ ID NO: 417071 - DNA, 25 bp, Homo sapien
ccgcgccccgcatccaagcctgcat

SEQ ID NO: 417072 - DNA, 25 bp, Homo sapien
ccccgcgccccgcatccaagcctgc

SEQ ID NO: 417073 - DNA, 25 bp, Homo sapien
cacgcaggcttgtgcggctccgcga

SEQ ID NO: 417074 - DNA, 25 bp, Homo sapien
cagccacacgcaggcttgtgcggct

SEQ ID NO: 417075 - DNA, 25 bp, Homo sapien
gtgcggctccgcgagtggccacggt

SEQ ID NO: 417076 - DNA, 25 bp, Homo sapien
tccgcgagtggccacggtccggaga

SEQ ID NO: 417077 - DNA, 25 bp, Homo sapien
ccagcgaagagtttcctagtcagga

SEQ ID NO: 417078 - DNA, 25 bp, Homo sapien
gaagcggcgctgattccttgcatga

SEQ ID NO: 417079 - DNA, 25 bp, Homo sapien
gcgtctcacttgctgcgtgcgtcag

SEQ ID NO: 417080 - DNA, 25 bp, Homo sapien
ggcgtccgcgcgtgccgtttgctct

SEQ ID NO: 417081 - DNA, 25 bp, Homo sapien
ggcttcgcgtgcgggcggccgcttc

SEQ ID NO: 417082 - DNA, 25 bp, Homo sapien
ccggtccccgcggtgctgcgggcat

SEQ ID NO: 417083 - DNA, 25 bp, Homo sapien
gcgccggtccccgcggtgctgcggg

SEQ ID NO: 417084 - DNA, 25 bp, Homo sapien
cccggcttcgcgtgcgggcggccgc

SEQ ID NO: 417085 - DNA, 25 bp, Homo sapien
tgcgcggagctgtcgggacgcgccg

SEQ ID NO: 417086 - DNA, 25 bp, Homo sapien
cccgcggagcccctcaattaagctc

SEQ ID NO: 417087 - DNA, 25 bp, Homo sapien
gaggctgctcccgtcaccatgagtc

SEQ ID NO: 417088 - DNA, 25 bp, Homo sapien
ttccaccgcgggctgctttgtggtc

SEQ ID NO: 417089 - DNA, 25 bp, Homo sapien
ttcaaatctaattactatgagaggg

SEQ ID NO: 417090 - DNA, 25 bp, Homo sapien
cttctgaagtggctttgagattact

SEQ ID NO: 417091 - DNA, 25 bp, Homo sapien
caagtagcaagctgaggacatttta

SEQ ID NO: 417092 - DNA, 25 bp, Homo sapien
ggaggagagcccttagttcttccat

SEQ ID NO: 417093 - DNA, 25 bp, Homo sapien
gtggacgtctctagaaggattcatt

SEQ ID NO: 417094 - DNA, 25 bp, Homo sapien
cgtggacgtctctagaaggattcat

SEQ ID NO: 417095 - DNA, 25 bp, Homo sapien
taagaaaacaagtaccctgggcatg

SEQ ID NO: 417096 - DNA, 25 bp, Homo sapien
gaaacgagggccactatgctacagc

SEQ ID NO: 417097 - DNA, 25 bp, Homo sapien
gagggtgacccctgattgacagcca

SEQ ID NO: 417098 - DNA, 25 bp, Homo sapien
caagtaagggctcaggttatccaac

SEQ ID NO: 417099 - DNA, 25 bp, Homo sapien
caatactcatttgtggctagtggct

SEQ ID NO: 417100 - DNA, 25 bp, Homo sapien
tacttgactcgtgttttccctctga

SEQ ID NO: 417101 - DNA, 25 bp, Homo sapien
gtacagttctacaggaaccactcaa

SEQ ID NO: 417102 - DNA, 25 bp, Homo sapien
aaaacacaattcaccctggatagca

SEQ ID NO: 417103 - DNA, 25 bp, Homo sapien
aaagaggacccagaatcaactagag

SEQ ID NO: 417104 - DNA, 25 bp, Homo sapien
tacccatgtcagcatatggctagag

SEQ ID NO: 417105 - DNA, 25 bp, Homo sapien
cacttggaattgtgggaaatcggcc

SEQ ID NO: 417106 - DNA, 25 bp, Homo sapien
cactatctcataaggtagaggaacc

SEQ ID NO: 417107 - DNA, 25 bp, Homo sapien
caggcccactctggattgcagtaca

SEQ ID NO: 417108 - DNA, 25 bp, Homo sapien
gaatttgacccagtcagtgcacaga

SEQ ID NO: 417109 - DNA, 25 bp, Homo sapien
tctttatttagagagtcacgtgccc

SEQ ID NO: 417110 - DNA, 25 bp, Homo sapien
tagtacttaagaagcagagcccatc

SEQ ID NO: 417111 - DNA, 25 bp, Homo sapien
tcacatgggctgatgaaggagcatg

SEQ ID NO: 417112 - DNA, 25 bp, Homo sapien
ggtaggatagcaccagtgacacctg

SEQ ID NO: 417113 - DNA, 25 bp, Homo sapien
aagtagggtcaccacaattgcctgc

SEQ ID NO: 417114 - DNA, 25 bp, Homo sapien
tcacatacctagtaagaagcacatc

SEQ ID NO: 417115 - DNA, 25 bp, Homo sapien
gccatcttccacgctgctgctgagc

SEQ ID NO: 417116 - DNA, 25 bp, Homo sapien
ttgccatcttccacgctgctgctga

SEQ ID NO: 417117 - DNA, 25 bp, Homo sapien
cttgccatcttccacgctgctgctg

SEQ ID NO: 417118 - DNA, 25 bp, Homo sapien
atcttccacgctgctgctgagccat

SEQ ID NO: 417119 - DNA, 25 bp, Homo sapien
gaaccactgggatacagcatgtcca

SEQ ID NO: 417120 - DNA, 25 bp, Homo sapien
tattagatgccattagcctccccta

SEQ ID NO: 417121 - DNA, 25 bp, Homo sapien
gatgttttggctcatccctaacccc

SEQ ID NO: 417122 - DNA, 25 bp, Homo sapien
cattgctgtggagagctatgctgtg

SEQ ID NO: 417123 - DNA, 25 bp, Homo sapien
ctttcatgtgggttcggatttttgc

SEQ ID NO: 417124 - DNA, 25 bp, Homo sapien
ctgagcagggcatctaacttcacta

SEQ ID NO: 417125 - DNA, 25 bp, Homo sapien
tttgcccaattcaacacatcctgag

SEQ ID NO: 417126 - DNA, 25 bp, Homo sapien
tgaatacaatccacctgctgttttg

SEQ ID NO: 417127 - DNA, 25 bp, Homo sapien
tcttaacataatctaccaatcggtc

SEQ ID NO: 417128 - DNA, 25 bp, Homo sapien
taaagaactcacttaaatgtcagcc

SEQ ID NO: 417129 - DNA, 25 bp, Homo sapien
catactttgctttgtgggtcttaac

SEQ ID NO: 417130 - DNA, 25 bp, Homo sapien
caaacatgggaccaaagaaacatac

SEQ ID NO: 417131 - DNA, 25 bp, Homo sapien
aaactttatgaatgtctcggccacc

SEQ ID NO: 417132 - DNA, 25 bp, Homo sapien
tctgagctcaggtacaagtgtccat

SEQ ID NO: 417133 - DNA, 25 bp, Homo sapien
tttggagggcactctgaactatgca

SEQ ID NO: 417134 - DNA, 25 bp, Homo sapien
gatatttagaaatcattccccgagg

SEQ ID NO: 417135 - DNA, 25 bp, Homo sapien
ttcagtgcacaatgaagtctgcatt

SEQ ID NO: 417136 - DNA, 25 bp, Homo sapien
gctggcattcagtgcacaatgaagt

SEQ ID NO: 417137 - DNA, 25 bp, Homo sapien
tgacaccagatgcccctctcttgct

SEQ ID NO: 417138 - DNA, 25 bp, Homo sapien
ggcattcagtgcacaatgaagtctg

SEQ ID NO: 417139 - DNA, 25 bp, Homo sapien
ggaccagatgcacatatcaactgtg

SEQ ID NO: 417140 - DNA, 25 bp, Homo sapien
cacaactttgtgttatgagaggaaa

SEQ ID NO: 417141 - DNA, 25 bp, Homo sapien
tccactcagcatggcacaactttgt

SEQ ID NO: 417142 - DNA, 25 bp, Homo sapien
gcttagagccttgggtcaggttgaa

SEQ ID NO: 417143 - DNA, 25 bp, Homo sapien
gtcaagctcctaggactgcctccct

SEQ ID NO: 417144 - DNA, 25 bp, Homo sapien
tcaagtcaagctcctaggactgcct

SEQ ID NO: 417145 - DNA, 25 bp, Homo sapien
tcaagctcctaggactgcctccctg

SEQ ID NO: 417146 - DNA, 25 bp, Homo sapien
aagtcaagctcctaggactgcctcc

SEQ ID NO: 417147 - DNA, 25 bp, Homo sapien
ccttctgcctgcattggcacgcggt

SEQ ID NO: 417148 - DNA, 25 bp, Homo sapien
cataaaggggaaggatccacaggga

SEQ ID NO: 417149 - DNA, 25 bp, Homo sapien
cgcggtcaatctctgagcagttggg

SEQ ID NO: 417150 - DNA, 25 bp, Homo sapien
tcaatcatgtcatcaagatcagctt

SEQ ID NO: 417151 - DNA, 25 bp, Homo sapien
caaagcacagtttatgaggcctggc

SEQ ID NO: 417152 - DNA, 25 bp, Homo sapien
tatttgtgtgggtacgaatgccagc

SEQ ID NO: 417153 - DNA, 25 bp, Homo sapien
tcactttatgctcgcctgacagaga

SEQ ID NO: 417154 - DNA, 25 bp, Homo sapien
taaccatcagaatcatgttgtggcc

SEQ ID NO: 417155 - DNA, 25 bp, Homo sapien
tgtaggcatcacatgtcgctgagct

SEQ ID NO: 417156 - DNA, 25 bp, Homo sapien
tcagggctgtctggtgacctacaga

SEQ ID NO: 417157 - DNA, 25 bp, Homo sapien
gagaaaaggcaagctcgtccacctt

SEQ ID NO: 417158 - DNA, 25 bp, Homo sapien
tagagggtctcatagcaatacagca

SEQ ID NO: 417159 - DNA, 25 bp, Homo sapien
tctgaggtccttatagaagcgcttc

SEQ ID NO: 417160 - DNA, 25 bp, Homo sapien
gctaacatttggaaagtgactgtca

SEQ ID NO: 417161 - DNA, 25 bp, Homo sapien
cgccaaagtgtttcctctgaggtcc

SEQ ID NO: 417162 - DNA, 25 bp, Homo sapien
gacaacgtgggatgttgctaacatt

SEQ ID NO: 417163 - DNA, 25 bp, Homo sapien
aggaagtatttgcaggcctctgagt

SEQ ID NO: 417164 - DNA, 25 bp, Homo sapien
cgaggaagtatttgcaggcctctga

SEQ ID NO: 417165 - DNA, 25 bp, Homo sapien
ctgcgaggaagtatttgcaggcctc

SEQ ID NO: 417166 - DNA, 25 bp, Homo sapien
gaagtatttgcaggcctctgagttc

SEQ ID NO: 417167 - DNA, 25 bp, Homo sapien
ggttttccgggctgctgtttcatct

SEQ ID NO: 417168 - DNA, 25 bp, Homo sapien
agccttagaccccagcacccagtca

SEQ ID NO: 417169 - DNA, 25 bp, Homo sapien
ctttgctctcgtccaagccttagac

SEQ ID NO: 417170 - DNA, 25 bp, Homo sapien
cttctttgctctcgtccaagcctta

SEQ ID NO: 417171 - DNA, 25 bp, Homo sapien
cactcccaccccgacataaattcaa

SEQ ID NO: 417172 - DNA, 25 bp, Homo sapien
tttcccaccataagacccacaggtg

SEQ ID NO: 417173 - DNA, 25 bp, Homo sapien
caccataagacccacaggtgtccat

SEQ ID NO: 417174 - DNA, 25 bp, Homo sapien
ccaagatttcccaccataagaccca

SEQ ID NO: 417175 - DNA, 25 bp, Homo sapien
tgtggatggccccccaagatttccc

SEQ ID NO: 417176 - DNA, 25 bp, Homo sapien
gcaacaagcgttgacaagtgcctgt

SEQ ID NO: 417177 - DNA, 25 bp, Homo sapien
tatgtctgatcaagctggcatctaa

SEQ ID NO: 417178 - DNA, 25 bp, Homo sapien
cacaaagacttaagggatggctaca

SEQ ID NO: 417179 - DNA, 25 bp, Homo sapien
tcacaccaggaggtatgtaggtctt

SEQ ID NO: 417180 - DNA, 25 bp, Homo sapien
cttatggagttacaggaaagctgga

SEQ ID NO: 417181 - DNA, 25 bp, Homo sapien
gaaaagcttgttgtaccttggatgg

SEQ ID NO: 417182 - DNA, 25 bp, Homo sapien
tgtggacccagatctaaaccaaact

SEQ ID NO: 417183 - DNA, 25 bp, Homo sapien
tgggctacttacaactggaattacc

SEQ ID NO: 417184 - DNA, 25 bp, Homo sapien
gtcttcgaaaggccacttttatgtc

SEQ ID NO: 417185 - DNA, 25 bp, Homo sapien
gctccttgggtcttcgaaaggccac

SEQ ID NO: 417186 - DNA, 25 bp, Homo sapien
ctccttgggtcttcgaaaggccact

SEQ ID NO: 417187 - DNA, 25 bp, Homo sapien
tgacacaagaaagaagctggccacg

SEQ ID NO: 417188 - DNA, 25 bp, Homo sapien
tgcagggcataccactacatcatag

SEQ ID NO: 417189 - DNA, 25 bp, Homo sapien
ggccacgggttacagagcacagcct

SEQ ID NO: 417190 - DNA, 25 bp, Homo sapien
gtcttgaatttacccaccaggcttg

SEQ ID NO: 417191 - DNA, 25 bp, Homo sapien
atctggaatcccgaggctgatgtca

SEQ ID NO: 417192 - DNA, 25 bp, Homo sapien
cctctggccatttgattgtgtttat

SEQ ID NO: 417193 - DNA, 25 bp, Homo sapien
gccatttgattgtgtttataaactg

SEQ ID NO: 417194 - DNA, 25 bp, Homo sapien
tcagggtcatctggaatcccgaggc

SEQ ID NO: 417195 - DNA, 25 bp, Homo sapien
caggatgttctgtttgaccaaaaga

SEQ ID NO: 417196 - DNA, 25 bp, Homo sapien
taagattgctcaaccattgatgtga

SEQ ID NO: 417197 - DNA, 25 bp, Homo sapien
gaggctgtgtttcgcctgaggcaaa

SEQ ID NO: 417198 - DNA, 25 bp, Homo sapien
ggactgagaactccacaactaagag

SEQ ID NO: 417199 - DNA, 25 bp, Homo sapien
ggaggaaacacccttgcccaacatc

SEQ ID NO: 417200 - DNA, 25 bp, Homo sapien
aggcctgccctattatcatctaaga

SEQ ID NO: 417201 - DNA, 25 bp, Homo sapien
gtattcttgaactttgccaccacat

SEQ ID NO: 417202 - DNA, 25 bp, Homo sapien
ttgcccaacatcagcactttgttct

SEQ ID NO: 417203 - DNA, 25 bp, Homo sapien
tgtggcaagggcgtgaatgtcccca

SEQ ID NO: 417204 - DNA, 25 bp, Homo sapien
tgaggcaactagagaaacagtggac

SEQ ID NO: 417205 - DNA, 25 bp, Homo sapien
cagcttccatcgaagggagtggcaa

SEQ ID NO: 417206 - DNA, 25 bp, Homo sapien
cagagttgtttagatccaggactgc

SEQ ID NO: 417207 - DNA, 25 bp, Homo sapien
gcaatgtgtctcttcgcagagtctc

SEQ ID NO: 417208 - DNA, 25 bp, Homo sapien
tggtgttgcttgttgctttggcctg

SEQ ID NO: 417209 - DNA, 25 bp, Homo sapien
agctctccgcaggactctggtgttg

SEQ ID NO: 417210 - DNA, 25 bp, Homo sapien
ctatgtctgagtgggcgagttgctt

SEQ ID NO: 417211 - DNA, 25 bp, Homo sapien
agaccctccgaaagcggtggcctgg

SEQ ID NO: 417212 - DNA, 25 bp, Homo sapien
gtccaaatgtgggacaagaccctcc

SEQ ID NO: 417213 - DNA, 25 bp, Homo sapien
gggtcctttggcgtggcctctgaag

SEQ ID NO: 417214 - DNA, 25 bp, Homo sapien
gatgctaggaagcttcagaaatgga

SEQ ID NO: 417215 - DNA, 25 bp, Homo sapien
actgaagcatgttttcctaagccac

SEQ ID NO: 417216 - DNA, 25 bp, Homo sapien
gatactgaagcatgttttcctaagc

SEQ ID NO: 417217 - DNA, 25 bp, Homo sapien
ttaaacctctgtctgctggaaggct

SEQ ID NO: 417218 - DNA, 25 bp, Homo sapien
ttttctgatactgaagcatgttttc

SEQ ID NO: 417219 - DNA, 25 bp, Homo sapien
tttccatctcgcctgcaactctgag

SEQ ID NO: 417220 - DNA, 25 bp, Homo sapien
agccctgaaggctccagtcaagcac

SEQ ID NO: 417221 - DNA, 25 bp, Homo sapien
cattatcccttgagtttgagagagt

SEQ ID NO: 417222 - DNA, 25 bp, Homo sapien
acagctgactgggaactgtcaagtc

SEQ ID NO: 417223 - DNA, 25 bp, Homo sapien
ttatgtccctagatactgtccactg

SEQ ID NO: 417224 - DNA, 25 bp, Homo sapien
ggtcctatgtcaaaggctggcactg

SEQ ID NO: 417225 - DNA, 25 bp, Homo sapien
gcccagactgttttggctgatcatt

SEQ ID NO: 417226 - DNA, 25 bp, Homo sapien
gattcaacatcatgcaccaagagtt

SEQ ID NO: 417227 - DNA, 25 bp, Homo sapien
taatctagtaatgtaggcgttctgc

SEQ ID NO: 417228 - DNA, 25 bp, Homo sapien
tattagctagcttgaagaggaatgc

SEQ ID NO: 417229 - DNA, 25 bp, Homo sapien
gaaagtgttgccgtaagtaatctag

SEQ ID NO: 417230 - DNA, 25 bp, Homo sapien
tatcactttacactgtgaggccaag

SEQ ID NO: 417231 - DNA, 25 bp, Homo sapien
aggactgggctctcacttgggctga

SEQ ID NO: 417232 - DNA, 25 bp, Homo sapien
gctgagcgtatggtcacctggcaca

SEQ ID NO: 417233 - DNA, 25 bp, Homo sapien
cacttgggctgagcgtatggtcacc

SEQ ID NO: 417234 - DNA, 25 bp, Homo sapien
caatctgggcgcttcattttggcct

SEQ ID NO: 417235 - DNA, 25 bp, Homo sapien
ctcaaatgtatgacttgggtaagca

SEQ ID NO: 417236 - DNA, 25 bp, Homo sapien
gagaccatcaggaaagggttgagcc

SEQ ID NO: 417237 - DNA, 25 bp, Homo sapien
ccttgccctggtgacattatctaga

SEQ ID NO: 417238 - DNA, 25 bp, Homo sapien
aatattaatatctttgctgccctcg

SEQ ID NO: 417239 - DNA, 25 bp, Homo sapien
cctgggagacctgcgcttcctgatt

SEQ ID NO: 417240 - DNA, 25 bp, Homo sapien
gaaaatgagtggaagacctggctcc

SEQ ID NO: 417241 - DNA, 25 bp, Homo sapien
cacaatctagtgttcgacatgtggg

SEQ ID NO: 417242 - DNA, 25 bp, Homo sapien
tggttaggccttcagcccacggaaa

SEQ ID NO: 417243 - DNA, 25 bp, Homo sapien
cagcatctaaaacatgtcaggcaca

SEQ ID NO: 417244 - DNA, 25 bp, Homo sapien
caagcatgagtgtaaaatgtatgag

SEQ ID NO: 417245 - DNA, 25 bp, Homo sapien
atagcaggcattcaagataaatatt

SEQ ID NO: 417246 - DNA, 25 bp, Homo sapien
taaatacaaatttcacgaggtcagg

SEQ ID NO: 417247 - DNA, 25 bp, Homo sapien
caaaccaggcctacaagaacatgga

SEQ ID NO: 417248 - DNA, 25 bp, Homo sapien
cagagacattcaactttcgggctca

SEQ ID NO: 417249 - DNA, 25 bp, Homo sapien
tgtgatcccagcttacaattggccc

SEQ ID NO: 417250 - DNA, 25 bp, Homo sapien
tgtgccacagttttaagactaacca

SEQ ID NO: 417251 - DNA, 25 bp, Homo sapien
tcatctctggctataaggcatacaa

SEQ ID NO: 417252 - DNA, 25 bp, Homo sapien
cacacgctggtataactaggctgga

SEQ ID NO: 417253 - DNA, 25 bp, Homo sapien
gaaagcacgacgtctgtgacagctg

SEQ ID NO: 417254 - DNA, 25 bp, Homo sapien
gaaagtctatcctgagtgttcacac

SEQ ID NO: 417255 - DNA, 25 bp, Homo sapien
gccgtttactcttgtgtgccatgga

SEQ ID NO: 417256 - DNA, 25 bp, Homo sapien
tctctgttcgtctcccttggcagca

SEQ ID NO: 417257 - DNA, 25 bp, Homo sapien
cagagcatatgctgcacagcccaca

SEQ ID NO: 417258 - DNA, 25 bp, Homo sapien
ggtttcccacaaggtctggatagca

SEQ ID NO: 417259 - DNA, 25 bp, Homo sapien
gaactctatggagtaagcgttgtcc

SEQ ID NO: 417260 - DNA, 25 bp, Homo sapien
tacttagtgatcacataggaaggag

SEQ ID NO: 417261 - DNA, 25 bp, Homo sapien
gaacttgacttgcatcatctcccac

SEQ ID NO: 417262 - DNA, 25 bp, Homo sapien
aagcaaaggagcatctgttgagtgc

SEQ ID NO: 417263 - DNA, 25 bp, Homo sapien
gaatgaggtccccacaaagaatctg

SEQ ID NO: 417264 - DNA, 25 bp, Homo sapien
gaggtccccacaaagaatctggggc

SEQ ID NO: 417265 - DNA, 25 bp, Homo sapien
gggaatgaggtccccacaaagaatc

SEQ ID NO: 417266 - DNA, 25 bp, Homo sapien
atgaggtccccacaaagaatctggg

SEQ ID NO: 417267 - DNA, 25 bp, Homo sapien
ctggctggctgaggcacttgggtaa

SEQ ID NO: 417268 - DNA, 25 bp, Homo sapien
aggctggctggctgaggcacttggg

SEQ ID NO: 417269 - DNA, 25 bp, Homo sapien
gctggctggctgaggcacttgggta

SEQ ID NO: 417270 - DNA, 25 bp, Homo sapien
gctggctgaggcacttgggtaatga

SEQ ID NO: 417271 - DNA, 25 bp, Homo sapien
tgcttgtagagttgagttggagaaa

SEQ ID NO: 417272 - DNA, 25 bp, Homo sapien
cagcattttgcttgtagagttgagt

SEQ ID NO: 417273 - DNA, 25 bp, Homo sapien
catgagaagtacctgcagggaccta

SEQ ID NO: 417274 - DNA, 25 bp, Homo sapien
cttccagagcatgagaagtacctgc

SEQ ID NO: 417275 - DNA, 25 bp, Homo sapien
cacaggggcctgcgctgacctcatc

SEQ ID NO: 417276 - DNA, 25 bp, Homo sapien
aggggcctgcgctgacctcatctct

SEQ ID NO: 417277 - DNA, 25 bp, Homo sapien
tattgtgaaacagtcaactccagct

SEQ ID NO: 417278 - DNA, 25 bp, Homo sapien
tgattggcggttccgtggtttacca

SEQ ID NO: 417279 - DNA, 25 bp, Homo sapien
ctgagagcgggtgtagacaatagtc

SEQ ID NO: 417280 - DNA, 25 bp, Homo sapien
tccagactgaacacgggctaacatg

SEQ ID NO: 417281 - DNA, 25 bp, Homo sapien
aagagggtggaagcgtctgcaccag

SEQ ID NO: 417282 - DNA, 25 bp, Homo sapien
gggtggaagcgtctgcaccaggtgt

SEQ ID NO: 417283 - DNA, 25 bp, Homo sapien
gagggtggaagcgtctgcaccaggt

SEQ ID NO: 417284 - DNA, 25 bp, Homo sapien
agggtggaagcgtctgcaccaggtg

SEQ ID NO: 417285 - DNA, 25 bp, Homo sapien
ccttctcggtcttactcttgatgga

SEQ ID NO: 417286 - DNA, 25 bp, Homo sapien
tgatggagtccgctggttttctagc

SEQ ID NO: 417287 - DNA, 25 bp, Homo sapien
tcttactcttgatggagtccgctgg

SEQ ID NO: 417288 - DNA, 25 bp, Homo sapien
agagaggttccttctcggtcttact

SEQ ID NO: 417289 - DNA, 25 bp, Homo sapien
tgaggctgcagctcatggcaggggg

SEQ ID NO: 417290 - DNA, 25 bp, Homo sapien
tgggtggatcagactgaggctgcag

SEQ ID NO: 417291 - DNA, 25 bp, Homo sapien
ggctggactgtggatgactgtctcc

SEQ ID NO: 417292 - DNA, 25 bp, Homo sapien
tccctgtcccaggtgggtgggtgga

SEQ ID NO: 417293 - DNA, 25 bp, Homo sapien
ggcactcaggtggttcaagttgacc

SEQ ID NO: 417294 - DNA, 25 bp, Homo sapien
gacggctcacaagtgggtacacaat

SEQ ID NO: 417295 - DNA, 25 bp, Homo sapien
cctgatttacaggagtgacggctca

SEQ ID NO: 417296 - DNA, 25 bp, Homo sapien
gggcacaggaatccagtcaacattg

SEQ ID NO: 417297 - DNA, 25 bp, Homo sapien
ggatccatccctcatggcggagcag

SEQ ID NO: 417298 - DNA, 25 bp, Homo sapien
aattttggcctcctatgggtccagg

SEQ ID NO: 417299 - DNA, 25 bp, Homo sapien
tcatgacagctcgtaaattttggcc

SEQ ID NO: 417300 - DNA, 25 bp, Homo sapien
gacggaacttctgcaaaagctgcct

SEQ ID NO: 417301 - DNA, 25 bp, Homo sapien
tttttcgacaaacaggatgcctcca

SEQ ID NO: 417302 - DNA, 25 bp, Homo sapien
ttatttttcgacaaacaggatgcct

SEQ ID NO: 417303 - DNA, 25 bp, Homo sapien
gacaaacaggatgcctccatctgag

SEQ ID NO: 417304 - DNA, 25 bp, Homo sapien
tttcgacaaacaggatgcctccatc

SEQ ID NO: 417305 - DNA, 25 bp, Homo sapien
tcagaagttgaatggttttgtgtaa

SEQ ID NO: 417306 - DNA, 25 bp, Homo sapien
gaagttgaatggttttgtgtaatgg

SEQ ID NO: 417307 - DNA, 25 bp, Homo sapien
gaatggttttgtgtaatggtacaga

SEQ ID NO: 417308 - DNA, 25 bp, Homo sapien
gttgaatggttttgtgtaatggtac

SEQ ID NO: 417309 - DNA, 25 bp, Homo sapien
ccttaagtttgtcacaggaagtgcc

SEQ ID NO: 417310 - DNA, 25 bp, Homo sapien
caaaattcaaggtggtgcgctctca

SEQ ID NO: 417311 - DNA, 25 bp, Homo sapien
gaagtgcctcatttatgtcaccctg

SEQ ID NO: 417312 - DNA, 25 bp, Homo sapien
cagccttgtacaacaatgggagcaa

SEQ ID NO: 417313 - DNA, 25 bp, Homo sapien
tcttgacaaccatacaaagtagggc

SEQ ID NO: 417314 - DNA, 25 bp, Homo sapien
gcaactcgtagaagaagcccctggt

SEQ ID NO: 417315 - DNA, 25 bp, Homo sapien
gctccgtgaggttcgataaatggct

SEQ ID NO: 417316 - DNA, 25 bp, Homo sapien
tcaacatggactgaagcctccaggg

SEQ ID NO: 417317 - DNA, 25 bp, Homo sapien
tagaccctcatcaaaaccaacctgg

SEQ ID NO: 417318 - DNA, 25 bp, Homo sapien
gacgttcttaaggactcagggattc

SEQ ID NO: 417319 - DNA, 25 bp, Homo sapien
taacattgcctaaggagccaggtgg

SEQ ID NO: 417320 - DNA, 25 bp, Homo sapien
gcatttctaacacagcctaaggacg

SEQ ID NO: 417321 - DNA, 25 bp, Homo sapien
tgctgaggaaatagacagggccagt

SEQ ID NO: 417322 - DNA, 25 bp, Homo sapien
ggctctgatgcaagcaacattccca

SEQ ID NO: 417323 - DNA, 25 bp, Homo sapien
ttccagctgcgagaaaccgatcaac

SEQ ID NO: 417324 - DNA, 25 bp, Homo sapien
gatcaacctcacagcaaggtgtggt

SEQ ID NO: 417325 - DNA, 25 bp, Homo sapien
cacggtcagcaaagatctcaaagga

SEQ ID NO: 417326 - DNA, 25 bp, Homo sapien
tgtggcctaagcaatatgtcagcga

SEQ ID NO: 417327 - DNA, 25 bp, Homo sapien
gagagccaagagagtataacacgtg

SEQ ID NO: 417328 - DNA, 25 bp, Homo sapien
ccccaacaaagagtgaagcctgcgc

SEQ ID NO: 417329 - DNA, 25 bp, Homo sapien
cttgtctagaatattattagcccat

SEQ ID NO: 417330 - DNA, 25 bp, Homo sapien
aatgagacacaaagacatctattga

SEQ ID NO: 417331 - DNA, 25 bp, Homo sapien
tattgactcatctaggtcactagga

SEQ ID NO: 417332 - DNA, 25 bp, Homo sapien
caggaacttggtaatttagatgcaa

SEQ ID NO: 417333 - DNA, 25 bp, Homo sapien
ctgtgggtacgaaggaaatgactca

SEQ ID NO: 417334 - DNA, 25 bp, Homo sapien
tcatgaagcactgtgggtacgaagg

SEQ ID NO: 417335 - DNA, 25 bp, Homo sapien
gaagcactgtgggtacgaaggaaat

SEQ ID NO: 417336 - DNA, 25 bp, Homo sapien
ctctcatgaagcactgtgggtacga

SEQ ID NO: 417337 - DNA, 25 bp, Homo sapien
aggcgggggactcaatgatttcttt

SEQ ID NO: 417338 - DNA, 25 bp, Homo sapien
aaatgcaccctcttctgaaggcggg

SEQ ID NO: 417339 - DNA, 25 bp, Homo sapien
ttctgaaggcgggggactcaatgat

SEQ ID NO: 417340 - DNA, 25 bp, Homo sapien
ctgaaggcgggggactcaatgattt

SEQ ID NO: 417341 - DNA, 25 bp, Homo sapien
gcgaaaaccaagacaggtcactgtt

SEQ ID NO: 417342 - DNA, 25 bp, Homo sapien
tccccaagccctattaaaaaatgca

SEQ ID NO: 417343 - DNA, 25 bp, Homo sapien
gacaggtcactgtttcagcctcacc

SEQ ID NO: 417344 - DNA, 25 bp, Homo sapien
cttcggagcgaaaaccaagacaggt

SEQ ID NO: 417345 - DNA, 25 bp, Homo sapien
cgccgccttggctgtgggttggtga

SEQ ID NO: 417346 - DNA, 25 bp, Homo sapien
ccagcgccgccttggctgtgggttg

SEQ ID NO: 417347 - DNA, 25 bp, Homo sapien
ccttggctgtgggttggtgatgctc

SEQ ID NO: 417348 - DNA, 25 bp, Homo sapien
aaaaaagccagcgccgccttggctg

SEQ ID NO: 417349 - DNA, 25 bp, Homo sapien
ttcagtgtgattcgtcctgcctgct

SEQ ID NO: 417350 - DNA, 25 bp, Homo sapien
gacactgccaggctacccaacttgt

SEQ ID NO: 417351 - DNA, 25 bp, Homo sapien
cacgctgcgaaaccctgtggtttgc

SEQ ID NO: 417352 - DNA, 25 bp, Homo sapien
aggctacccaacttgtggttctgtg

SEQ ID NO: 417353 - DNA, 25 bp, Homo sapien
aaaatgctaggcatcagctccggga

SEQ ID NO: 417354 - DNA, 25 bp, Homo sapien
gtaattcaacgctggcatcaagccg

SEQ ID NO: 417355 - DNA, 25 bp, Homo sapien
gccgctgctccgacaggatgtggat

SEQ ID NO: 417356 - DNA, 25 bp, Homo sapien
tgtggatcccatcatttaaaatgct

SEQ ID NO: 417357 - DNA, 25 bp, Homo sapien
tgaacttcaatcactgcaggctgct

SEQ ID NO: 417358 - DNA, 25 bp, Homo sapien
gataatagagtacgccattgaactt

SEQ ID NO: 417359 - DNA, 25 bp, Homo sapien
caggagaagataatagagtacgcca

SEQ ID NO: 417360 - DNA, 25 bp, Homo sapien
tagagtacgccattgaacttcaatc

SEQ ID NO: 417361 - DNA, 25 bp, Homo sapien
cttgttttctccatgcgggactcac

SEQ ID NO: 417362 - DNA, 25 bp, Homo sapien
ctttcgggtccaggcgaactcgctg

SEQ ID NO: 417363 - DNA, 25 bp, Homo sapien
aaggagagcccaggcgcgttaattg

SEQ ID NO: 417364 - DNA, 25 bp, Homo sapien
tctgcaagagaaggtttgggtttcc

SEQ ID NO: 417365 - DNA, 25 bp, Homo sapien
tctgctcggtttccaaaggagagcc

SEQ ID NO: 417366 - DNA, 25 bp, Homo sapien
actgttgttttaggtctcaagtaat

SEQ ID NO: 417367 - DNA, 25 bp, Homo sapien
ttaggtctcaagtaattggctggag

SEQ ID NO: 417368 - DNA, 25 bp, Homo sapien
ttccatctgcactaactgttgtttt

SEQ ID NO: 417369 - DNA, 25 bp, Homo sapien
ttgttttaggtctcaagtaattggc

SEQ ID NO: 417370 - DNA, 25 bp, Homo sapien
tactgtaggcacgagaagtggcgtt

SEQ ID NO: 417371 - DNA, 25 bp, Homo sapien
tagagttcccagtgttttcacggct

SEQ ID NO: 417372 - DNA, 25 bp, Homo sapien
tcatttccttactgtaggcacgaga

SEQ ID NO: 417373 - DNA, 25 bp, Homo sapien
gtggccttagattatccctcatttc

SEQ ID NO: 417374 - DNA, 25 bp, Homo sapien
tgcacactgtctcatcttgcttagg

SEQ ID NO: 417375 - DNA, 25 bp, Homo sapien
cttgaccgacttgggcgccatcagg

SEQ ID NO: 417376 - DNA, 25 bp, Homo sapien
ccatcaggctatcagcagaatggct

SEQ ID NO: 417377 - DNA, 25 bp, Homo sapien
gggctagagattagaaggtggcctt

SEQ ID NO: 417378 - DNA, 25 bp, Homo sapien
aactggctaaatggcactttgcatt

SEQ ID NO: 417379 - DNA, 25 bp, Homo sapien
aaagagtacaaaatgttgtggaatc

SEQ ID NO: 417380 - DNA, 25 bp, Homo sapien
ctggctaaatggcactttgcatttt

SEQ ID NO: 417381 - DNA, 25 bp, Homo sapien
tcttaaagagtacaaaatgttgtgg

SEQ ID NO: 417382 - DNA, 25 bp, Homo sapien
taagaaggataattggttgatacat

SEQ ID NO: 417383 - DNA, 25 bp, Homo sapien
catgataagaaggataattggttga

SEQ ID NO: 417384 - DNA, 25 bp, Homo sapien
cttcatgataagaaggataattggt

SEQ ID NO: 417385 - DNA, 25 bp, Homo sapien
gataagaaggataattggttgatac

SEQ ID NO: 417386 - DNA, 25 bp, Homo sapien
ggtagacaggtctctgagtgcttct

SEQ ID NO: 417387 - DNA, 25 bp, Homo sapien
tgggttacaaaggtagacaggtctc

SEQ ID NO: 417388 - DNA, 25 bp, Homo sapien
caaaggtagacaggtctctgagtgc

SEQ ID NO: 417389 - DNA, 25 bp, Homo sapien
tccagaggggcatcaaggtagttga

SEQ ID NO: 417390 - DNA, 25 bp, Homo sapien
agcatctacaccagccgtgtgggcc

SEQ ID NO: 417391 - DNA, 25 bp, Homo sapien
gcatctacaccagccgtgtgggcct

SEQ ID NO: 417392 - DNA, 25 bp, Homo sapien
aagcatctacaccagccgtgtgggc

SEQ ID NO: 417393 - DNA, 25 bp, Homo sapien
catctacaccagccgtgtgggcctg

SEQ ID NO: 417394 - DNA, 25 bp, Homo sapien
gatggcaggagtcatctgcaactcc

SEQ ID NO: 417395 - DNA, 25 bp, Homo sapien
tccagatagcagttccatacatcta

SEQ ID NO: 417396 - DNA, 25 bp, Homo sapien
tgcataacccacataaacttgctct

SEQ ID NO: 417397 - DNA, 25 bp, Homo sapien
tttagttccacgatggcaggagtca

SEQ ID NO: 417398 - DNA, 25 bp, Homo sapien
gatgaatccacattggctcccatga

SEQ ID NO: 417399 - DNA, 25 bp, Homo sapien
ttgcaacagtcgtctacacagcagg

SEQ ID NO: 417400 - DNA, 25 bp, Homo sapien
gacacagtttgctagcctagtggca

SEQ ID NO: 417401 - DNA, 25 bp, Homo sapien
caactcttagaggatacagaacagg

SEQ ID NO: 417402 - DNA, 25 bp, Homo sapien
tggaagctcagctatatcccactct

SEQ ID NO: 417403 - DNA, 25 bp, Homo sapien
tgccctatgcagctatagcctccag

SEQ ID NO: 417404 - DNA, 25 bp, Homo sapien
ggtgaagctcacataccatgagggt

SEQ ID NO: 417405 - DNA, 25 bp, Homo sapien
tacacctggactactggtgaagctc

SEQ ID NO: 417406 - DNA, 25 bp, Homo sapien
ggtagatcaccgatgtagaaaatcc

SEQ ID NO: 417407 - DNA, 25 bp, Homo sapien
tcttataatcttgccaactctggaa

SEQ ID NO: 417408 - DNA, 25 bp, Homo sapien
actggagtgtgaggctgtggtcacc

SEQ ID NO: 417409 - DNA, 25 bp, Homo sapien
tctgggtttccaacctgaaggtaga

SEQ ID NO: 417410 - DNA, 25 bp, Homo sapien
ggtctgggagcagatcagcaccctg

SEQ ID NO: 417411 - DNA, 25 bp, Homo sapien
aggcaaatatggaagggcaggaagg

SEQ ID NO: 417412 - DNA, 25 bp, Homo sapien
ctgatttgcaagaatgagcaccaag

SEQ ID NO: 417413 - DNA, 25 bp, Homo sapien
aaatggggtcatgatcatgggctga

SEQ ID NO: 417414 - DNA, 25 bp, Homo sapien
caaccaaggtagtgtgaaccgccat

SEQ ID NO: 417415 - DNA, 25 bp, Homo sapien
gagcagggatttacaaccaaggtag

SEQ ID NO: 417416 - DNA, 25 bp, Homo sapien
tgcgcaggttagagcagggatttac

SEQ ID NO: 417417 - DNA, 25 bp, Homo sapien
aaaacattccaaaatgcgcaggtta

SEQ ID NO: 417418 - DNA, 25 bp, Homo sapien
ggcctctcccttggaggaccgagtc

SEQ ID NO: 417419 - DNA, 25 bp, Homo sapien
gaccgagtcccgttcatcttctttg

SEQ ID NO: 417420 - DNA, 25 bp, Homo sapien
ttctttgttttccttagcacacctg

SEQ ID NO: 417421 - DNA, 25 bp, Homo sapien
gcacacctgtagctgtgtattttcc

SEQ ID NO: 417422 - DNA, 25 bp, Homo sapien
gctgggggagggtaggtcagactct

SEQ ID NO: 417423 - DNA, 25 bp, Homo sapien
ctggtttggggtctgagagagacag

SEQ ID NO: 417424 - DNA, 25 bp, Homo sapien
tctggtttggggtctgagagagaca

SEQ ID NO: 417425 - DNA, 25 bp, Homo sapien
gagggtaggtcagactctggtttgg

SEQ ID NO: 417426 - DNA, 25 bp, Homo sapien
cctctctggagcatacactggcagc

SEQ ID NO: 417427 - DNA, 25 bp, Homo sapien
gacctctctggagcatacactggca

SEQ ID NO: 417428 - DNA, 25 bp, Homo sapien
agacctctctggagcatacactggc

SEQ ID NO: 417429 - DNA, 25 bp, Homo sapien
tctctggagcatacactggcagccc

SEQ ID NO: 417430 - DNA, 25 bp, Homo sapien
gctttggcctatgtccaccagggct

SEQ ID NO: 417431 - DNA, 25 bp, Homo sapien
gcattggcctcagacgtagaggaca

SEQ ID NO: 417432 - DNA, 25 bp, Homo sapien
cacaggagcattgggtaacttcaac

SEQ ID NO: 417433 - DNA, 25 bp, Homo sapien
tctactataccatgggtcccttggt

SEQ ID NO: 417434 - DNA, 25 bp, Homo sapien
ctgagcctcttattgttcctagaca

SEQ ID NO: 417435 - DNA, 25 bp, Homo sapien
tgctgaccaaagcaaaactaggttt

SEQ ID NO: 417436 - DNA, 25 bp, Homo sapien
tcatctctactgtcccatatccatc

SEQ ID NO: 417437 - DNA, 25 bp, Homo sapien
gggctgagcctcttattgttcctag

SEQ ID NO: 417438 - DNA, 25 bp, Homo sapien
gtgctttctcgtccttctgccacca

SEQ ID NO: 417439 - DNA, 25 bp, Homo sapien
tgtgctttctcgtccttctgccacc

SEQ ID NO: 417440 - DNA, 25 bp, Homo sapien
tgtttcctccagagcctcattcatc

SEQ ID NO: 417441 - DNA, 25 bp, Homo sapien
gcctcattcatcaactcgctctgaa

SEQ ID NO: 417442 - DNA, 25 bp, Homo sapien
gaacagttagcacgctcagacagtc

SEQ ID NO: 417443 - DNA, 25 bp, Homo sapien
tcatcaactcgctctgaacagttag

SEQ ID NO: 417444 - DNA, 25 bp, Homo sapien
tagtactagtgacttcttgacagca

SEQ ID NO: 417445 - DNA, 25 bp, Homo sapien
tagttgaaccaggtgtcccgcttgg

SEQ ID NO: 417446 - DNA, 25 bp, Homo sapien
ttaacatgcccaagtgacagtatca

SEQ ID NO: 417447 - DNA, 25 bp, Homo sapien
gaacattggaagtcagagaaatgcc

SEQ ID NO: 417448 - DNA, 25 bp, Homo sapien
tggctaagtaccaaacagggtacta

SEQ ID NO: 417449 - DNA, 25 bp, Homo sapien
caagaatcagtcttcctttatctca

SEQ ID NO: 417450 - DNA, 25 bp, Homo sapien
caagaggtgcccacgttggctaagt

SEQ ID NO: 417451 - DNA, 25 bp, Homo sapien
caatagctgtgggtcttgcttctca

SEQ ID NO: 417452 - DNA, 25 bp, Homo sapien
ataggatctgccaaattgctgactt

SEQ ID NO: 417453 - DNA, 25 bp, Homo sapien
cataggatctgccaaattgctgact

SEQ ID NO: 417454 - DNA, 25 bp, Homo sapien
cacataggatctgccaaattgctga

SEQ ID NO: 417455 - DNA, 25 bp, Homo sapien
tcacataggatctgccaaattgctg

SEQ ID NO: 417456 - DNA, 25 bp, Homo sapien
ttttgctccaaacaacaggctctga

SEQ ID NO: 417457 - DNA, 25 bp, Homo sapien
tgagaaggctcatccaccgataatg

SEQ ID NO: 417458 - DNA, 25 bp, Homo sapien
taatgccacatgcaaggctcgtccc

SEQ ID NO: 417459 - DNA, 25 bp, Homo sapien
aaggctcgtcccatcagcatttgcc

SEQ ID NO: 417460 - DNA, 25 bp, Homo sapien
gtagcacagaggctttcaccaccag

SEQ ID NO: 417461 - DNA, 25 bp, Homo sapien
caggagatttaaccctggcctaggg

SEQ ID NO: 417462 - DNA, 25 bp, Homo sapien
tagccacgtgggcatccgtgttcat

SEQ ID NO: 417463 - DNA, 25 bp, Homo sapien
cgtgggcatccgtgttcatccgaca

SEQ ID NO: 417464 - DNA, 25 bp, Homo sapien
caatacagacaaaacagagctggtt

SEQ ID NO: 417465 - DNA, 25 bp, Homo sapien
caaggttgggtggtaagttacagct

SEQ ID NO: 417466 - DNA, 25 bp, Homo sapien
cctggtaatggctaagctcacggca

SEQ ID NO: 417467 - DNA, 25 bp, Homo sapien
taagctcacggcacagtagccagtg

SEQ ID NO: 417468 - DNA, 25 bp, Homo sapien
tctcaccagctttatctagcaacat

SEQ ID NO: 417469 - DNA, 25 bp, Homo sapien
ctctcaccagctttatctagcaaca

SEQ ID NO: 417470 - DNA, 25 bp, Homo sapien
taatatcaacggagcagccagtctc

SEQ ID NO: 417471 - DNA, 25 bp, Homo sapien
tggatgccatccaatcagaacagat

SEQ ID NO: 417472 - DNA, 25 bp, Homo sapien
cagcctagggataccaatagtagca

SEQ ID NO: 417473 - DNA, 25 bp, Homo sapien
tagtatatccatcctggctcatggc

SEQ ID NO: 417474 - DNA, 25 bp, Homo sapien
gcattcaattctcataggatcgcga

SEQ ID NO: 417475 - DNA, 25 bp, Homo sapien
agtgatgatttaggtcaagggtccc

SEQ ID NO: 417476 - DNA, 25 bp, Homo sapien
gatactgcttggagcaatcagccca

SEQ ID NO: 417477 - DNA, 25 bp, Homo sapien
gcccattttaatggtgagcagcaga

SEQ ID NO: 417478 - DNA, 25 bp, Homo sapien
caatagcttaatattccgattgtgg

SEQ ID NO: 417479 - DNA, 25 bp, Homo sapien
tgacatcaaacgcaggacaatcttg

SEQ ID NO: 417480 - DNA, 25 bp, Homo sapien
tgtggactttacacaagatgtgaca

SEQ ID NO: 417481 - DNA, 25 bp, Homo sapien
atctcacaaatcacttcatcacaat

SEQ ID NO: 417482 - DNA, 25 bp, Homo sapien
tcatcaaagcttgcaggacaacttg

SEQ ID NO: 417483 - DNA, 25 bp, Homo sapien
ccaataattttctatgcgaacgtca

SEQ ID NO: 417484 - DNA, 25 bp, Homo sapien
tgcgaacgtcatcatcaaagcttgc

SEQ ID NO: 417485 - DNA, 25 bp, Homo sapien
tccacttcctggttctgaccaataa

SEQ ID NO: 417486 - DNA, 25 bp, Homo sapien
gagccatcatgcccggcctatttat

SEQ ID NO: 417487 - DNA, 25 bp, Homo sapien
catcatgcccggcctatttattctt

SEQ ID NO: 417488 - DNA, 25 bp, Homo sapien
atgcccggcctatttattcttaagt

SEQ ID NO: 417489 - DNA, 25 bp, Homo sapien
gccatcatgcccggcctatttattc

SEQ ID NO: 417490 - DNA, 25 bp, Homo sapien
gttaatagtgcttgtccattggaaa

SEQ ID NO: 417491 - DNA, 25 bp, Homo sapien
gaaaataagtagtggaacctctgta

SEQ ID NO: 417492 - DNA, 25 bp, Homo sapien
gaaatacagtcccatgttaatagtg

SEQ ID NO: 417493 - DNA, 25 bp, Homo sapien
taaaaatgatgggttcctagtcact

SEQ ID NO: 417494 - DNA, 25 bp, Homo sapien
gtcatggttctcaactcctccaggg

SEQ ID NO: 417495 - DNA, 25 bp, Homo sapien
catggttctcaactcctccagggag

SEQ ID NO: 417496 - DNA, 25 bp, Homo sapien
gggtcatggttctcaactcctccag

SEQ ID NO: 417497 - DNA, 25 bp, Homo sapien
tcatggttctcaactcctccaggga

SEQ ID NO: 417498 - DNA, 25 bp, Homo sapien
gatacagtcacaggattcagggttt

SEQ ID NO: 417499 - DNA, 25 bp, Homo sapien
ataggatacagtcacaggattcagg

SEQ ID NO: 417500 - DNA, 25 bp, Homo sapien
tcacaggattcagggttttgaagga

SEQ ID NO: 417501 - DNA, 25 bp, Homo sapien
cagtcacaggattcagggttttgaa

SEQ ID NO: 417502 - DNA, 25 bp, Homo sapien
ttccctcatccgatcaggccagaag

SEQ ID NO: 417503 - DNA, 25 bp, Homo sapien
caggccagaagacagcgtgagttgc

SEQ ID NO: 417504 - DNA, 25 bp, Homo sapien
atccgatcaggccagaagacagcgt

SEQ ID NO: 417505 - DNA, 25 bp, Homo sapien
aagacagcgtgagttgctcttttcc

SEQ ID NO: 417506 - DNA, 25 bp, Homo sapien
gaattttccgagcatctcttttgct

SEQ ID NO: 417507 - DNA, 25 bp, Homo sapien
ctcttttgctctctggtgtctccac

SEQ ID NO: 417508 - DNA, 25 bp, Homo sapien
gccgagctctcggaattttccgagc

SEQ ID NO: 417509 - DNA, 25 bp, Homo sapien
gagctctcggaattttccgagcatc

SEQ ID NO: 417510 - DNA, 25 bp, Homo sapien
tcatttttcccattgatcagatgcc

SEQ ID NO: 417511 - DNA, 25 bp, Homo sapien
tacttctcatttttcccattgatca

SEQ ID NO: 417512 - DNA, 25 bp, Homo sapien
ttctcatttttcccattgatcagat

SEQ ID NO: 417513 - DNA, 25 bp, Homo sapien
ctcatttttcccattgatcagatgc

SEQ ID NO: 417514 - DNA, 25 bp, Homo sapien
catcagcactgagaaagttataggg

SEQ ID NO: 417515 - DNA, 25 bp, Homo sapien
aacgtgaccatacacgccccaggta

SEQ ID NO: 417516 - DNA, 25 bp, Homo sapien
aatatagtatgatgtgaacgtgacc

SEQ ID NO: 417517 - DNA, 25 bp, Homo sapien
cagggttaataagtggcccatcagc

SEQ ID NO: 417518 - DNA, 25 bp, Homo sapien
cagagacgagcccataatggaggca

SEQ ID NO: 417519 - DNA, 25 bp, Homo sapien
caaggcaccctttctgatcatctca

SEQ ID NO: 417520 - DNA, 25 bp, Homo sapien
gggagagattttccacagagacgag

SEQ ID NO: 417521 - DNA, 25 bp, Homo sapien
cataatggaggcaataaccctctcc

SEQ ID NO: 417522 - DNA, 25 bp, Homo sapien
gttgcccttccactgggctacgatt

SEQ ID NO: 417523 - DNA, 25 bp, Homo sapien
actgggctacgattctaagtctagg

SEQ ID NO: 417524 - DNA, 25 bp, Homo sapien
gctacgattctaagtctaggctggc

SEQ ID NO: 417525 - DNA, 25 bp, Homo sapien
ccttccactgggctacgattctaag

SEQ ID NO: 417526 - DNA, 25 bp, Homo sapien
gcagaagagcaagtcatagaccaca

SEQ ID NO: 417527 - DNA, 25 bp, Homo sapien
aatattttctggaccgttctcgcag

SEQ ID NO: 417528 - DNA, 25 bp, Homo sapien
taagttgcatataagccctccagaa

SEQ ID NO: 417529 - DNA, 25 bp, Homo sapien
tctggaccgttctcgcagaagagca

SEQ ID NO: 417530 - DNA, 25 bp, Homo sapien
ccttgaccaaacatgctatagatca

SEQ ID NO: 417531 - DNA, 25 bp, Homo sapien
cggagtcaacaaatccccttgacca

SEQ ID NO: 417532 - DNA, 25 bp, Homo sapien
atccccttgaccaaacatgctatag

SEQ ID NO: 417533 - DNA, 25 bp, Homo sapien
caacaaatccccttgaccaaacatg

SEQ ID NO: 417534 - DNA, 25 bp, Homo sapien
tatggaggttgcatcccaaatcctg

SEQ ID NO: 417535 - DNA, 25 bp, Homo sapien
tgaaatgactccgtaggtggccgca

SEQ ID NO: 417536 - DNA, 25 bp, Homo sapien
gctcacggcaactctgtaaggcaag

SEQ ID NO: 417537 - DNA, 25 bp, Homo sapien
caaatcctgtatggagcggcagtcc

SEQ ID NO: 417538 - DNA, 25 bp, Homo sapien
tgtaccagagtttacgaagtcctcc

SEQ ID NO: 417539 - DNA, 25 bp, Homo sapien
tatcaactgaagaactctgtcctgg

SEQ ID NO: 417540 - DNA, 25 bp, Homo sapien
tcctccgcccgtgatgcttttctgg

SEQ ID NO: 417541 - DNA, 25 bp, Homo sapien
tgtggttccttcaaacgtcttgccg

SEQ ID NO: 417542 - DNA, 25 bp, Homo sapien
agcatggttgttagcaacagctgct

SEQ ID NO: 417543 - DNA, 25 bp, Homo sapien
gcatggttgttagcaacagctgctg

SEQ ID NO: 417544 - DNA, 25 bp, Homo sapien
gagcatggttgttagcaacagctgc

SEQ ID NO: 417545 - DNA, 25 bp, Homo sapien
catggttgttagcaacagctgctgt

SEQ ID NO: 417546 - DNA, 25 bp, Homo sapien
tttagaaggcttccactgaatggca

SEQ ID NO: 417547 - DNA, 25 bp, Homo sapien
ggacttcaagatccctcccagtgtt

SEQ ID NO: 417548 - DNA, 25 bp, Homo sapien
cccagtgttccgcagtgtgcatcca

SEQ ID NO: 417549 - DNA, 25 bp, Homo sapien
catagctggagagttggtggacttc

SEQ ID NO: 417550 - DNA, 25 bp, Homo sapien
tatcgtggtttgtctggaactgagg

SEQ ID NO: 417551 - DNA, 25 bp, Homo sapien
tgatcagactcacactagaccagga

SEQ ID NO: 417552 - DNA, 25 bp, Homo sapien
aatagagactttggccaagatggtc

SEQ ID NO: 417553 - DNA, 25 bp, Homo sapien
tagatggcctttctagggtgacaaa

SEQ ID NO: 417554 - DNA, 25 bp, Homo sapien
cacagtaggcctatcaagatgatca

SEQ ID NO: 417555 - DNA, 25 bp, Homo sapien
gatcaaccgcagtttcaataacaat

SEQ ID NO: 417556 - DNA, 25 bp, Homo sapien
tatgattctctgtactaatgtagca

SEQ ID NO: 417557 - DNA, 25 bp, Homo sapien
catcaaaggatggtttgtcaatatc

SEQ ID NO: 417558 - DNA, 25 bp, Homo sapien
catcagtggaccgaaaaagatctgt

SEQ ID NO: 417559 - DNA, 25 bp, Homo sapien
ggaagaatctaaatcaacatcgtgt

SEQ ID NO: 417560 - DNA, 25 bp, Homo sapien
ggcttgaagtatccccttggaggaa

SEQ ID NO: 417561 - DNA, 25 bp, Homo sapien
cttgtgcttccagtccgattctttc

SEQ ID NO: 417562 - DNA, 25 bp, Homo sapien
gagacgttcagggtttatacagtcc

SEQ ID NO: 417563 - DNA, 25 bp, Homo sapien
gacgttcagggtttatacagtccat

SEQ ID NO: 417564 - DNA, 25 bp, Homo sapien
agacgttcagggtttatacagtcca

SEQ ID NO: 417565 - DNA, 25 bp, Homo sapien
gctgtaagaagctcctatctggctc

SEQ ID NO: 417566 - DNA, 25 bp, Homo sapien
tatctggctctaggcccttcataac

SEQ ID NO: 417567 - DNA, 25 bp, Homo sapien
aaaggtgtagccctgagctcatcct

SEQ ID NO: 417568 - DNA, 25 bp, Homo sapien
gaccacaccatgagagcctggaagg

SEQ ID NO: 417569 - DNA, 25 bp, Homo sapien
caggagttgggatccaccatgcaca

SEQ ID NO: 417570 - DNA, 25 bp, Homo sapien
tttttaacagaagtctcatcttctc

SEQ ID NO: 417571 - DNA, 25 bp, Homo sapien
gctggagtggtctctctcagtttct

SEQ ID NO: 417572 - DNA, 25 bp, Homo sapien
tgcacacatgtttggccactctgag

SEQ ID NO: 417573 - DNA, 25 bp, Homo sapien
tcttgaaagagtagttgacacctcc

SEQ ID NO: 417574 - DNA, 25 bp, Homo sapien
tgttatccagccctacactagagat

SEQ ID NO: 417575 - DNA, 25 bp, Homo sapien
gctggatcccctattctctcaaggg

SEQ ID NO: 417576 - DNA, 25 bp, Homo sapien
ccatcccggctgtatttcttgaaag

SEQ ID NO: 417577 - DNA, 25 bp, Homo sapien
tctgtggacccactctgagaggcag

SEQ ID NO: 417578 - DNA, 25 bp, Homo sapien
ggcttttggtcaagactgggtccac

SEQ ID NO: 417579 - DNA, 25 bp, Homo sapien
gggtccaccaaggaaaatagcagga

SEQ ID NO: 417580 - DNA, 25 bp, Homo sapien
tgagaggcagcggattactcccctc

SEQ ID NO: 417581 - DNA, 25 bp, Homo sapien
gcttcaatgacttctccatcgagcc

SEQ ID NO: 417582 - DNA, 25 bp, Homo sapien
acttctccatcgagcctctctggtt

SEQ ID NO: 417583 - DNA, 25 bp, Homo sapien
tcaatgacttctccatcgagcctct

SEQ ID NO: 417584 - DNA, 25 bp, Homo sapien
acagcttcaatgacttctccatcga

SEQ ID NO: 417585 - DNA, 25 bp, Homo sapien
ttcaatggcgttggctcacatgctg

SEQ ID NO: 417586 - DNA, 25 bp, Homo sapien
caatggcgttggctcacatgctggg

SEQ ID NO: 417587 - DNA, 25 bp, Homo sapien
ctgctccttcaatggcgttggctca

SEQ ID NO: 417588 - DNA, 25 bp, Homo sapien
tccttcaatggcgttggctcacatg

SEQ ID NO: 417589 - DNA, 25 bp, Homo sapien
tgaggtcggccggcaatttcttccc

SEQ ID NO: 417590 - DNA, 25 bp, Homo sapien
ccctggtgaggtcggccggcaattt

SEQ ID NO: 417591 - DNA, 25 bp, Homo sapien
gaggtcggccggcaatttcttccca

SEQ ID NO: 417592 - DNA, 25 bp, Homo sapien
cgtcccctggtgaggtcggccggca

SEQ ID NO: 417593 - DNA, 25 bp, Homo sapien
acacacatacgccacaacagccggc

SEQ ID NO: 417594 - DNA, 25 bp, Homo sapien
gattacacacatacgccacaacagc

SEQ ID NO: 417595 - DNA, 25 bp, Homo sapien
acacatacgccacaacagccggcta

SEQ ID NO: 417596 - DNA, 25 bp, Homo sapien
acatacgccacaacagccggctaat

SEQ ID NO: 417597 - DNA, 25 bp, Homo sapien
tccacacttaagaaggcaccttggg

SEQ ID NO: 417598 - DNA, 25 bp, Homo sapien
gataaggctggcttgaccaagtgcc

SEQ ID NO: 417599 - DNA, 25 bp, Homo sapien
tgatgatcctctcatggcacacagt

SEQ ID NO: 417600 - DNA, 25 bp, Homo sapien
taagacatctgtgcgtaggtcctgc

SEQ ID NO: 417601 - DNA, 25 bp, Homo sapien
aaggaaccagggcacgagtgctggt

SEQ ID NO: 417602 - DNA, 25 bp, Homo sapien
aggaaccagggcacgagtgctggtg

SEQ ID NO: 417603 - DNA, 25 bp, Homo sapien
cagttccctctgatgcataagcagg

SEQ ID NO: 417604 - DNA, 25 bp, Homo sapien
aaggctcctatgttgcacctgggaa

SEQ ID NO: 417605 - DNA, 25 bp, Homo sapien
ggttatcccaaggtacagcgctttc

SEQ ID NO: 417606 - DNA, 25 bp, Homo sapien
tgtaatctacacgaaattgcctgcc

SEQ ID NO: 417607 - DNA, 25 bp, Homo sapien
agacagagctcccttgattgtgcag

SEQ ID NO: 417608 - DNA, 25 bp, Homo sapien
tgattgtgcagtctgaggcagcatc

SEQ ID NO: 417609 - DNA, 25 bp, Homo sapien
gaggcagcatcaatgcaactcacag

SEQ ID NO: 417610 - DNA, 25 bp, Homo sapien
gagctcccttgattgtgcagtctga

SEQ ID NO: 417611 - DNA, 25 bp, Homo sapien
aaccaagacaaaattggaatctggt

SEQ ID NO: 417612 - DNA, 25 bp, Homo sapien
aaaattggaatctggtgtcctgtga

SEQ ID NO: 417613 - DNA, 25 bp, Homo sapien
ggctctttgactcacatggcattta

SEQ ID NO: 417614 - DNA, 25 bp, Homo sapien
ttcacctggggctctttgactcaca

SEQ ID NO: 417615 - DNA, 25 bp, Homo sapien
tcactattcaccaggggatgggcca

SEQ ID NO: 417616 - DNA, 25 bp, Homo sapien
tttgggtttttgctgcggattgcgc

SEQ ID NO: 417617 - DNA, 25 bp, Homo sapien
ggattgcgctcacccatttagatac

SEQ ID NO: 417618 - DNA, 25 bp, Homo sapien
gataccccttgttcactattcacca

SEQ ID NO: 417619 - DNA, 25 bp, Homo sapien
ctttgccgtgtgctcttggaattca

SEQ ID NO: 417620 - DNA, 25 bp, Homo sapien
attcagaagccaggttaagctttct

SEQ ID NO: 417621 - DNA, 25 bp, Homo sapien
tcttggaattcagaagccaggttaa

SEQ ID NO: 417622 - DNA, 25 bp, Homo sapien
cactttgccgtgtgctcttggaatt

SEQ ID NO: 417623 - DNA, 25 bp, Homo sapien
ttgttttctgattacccctctgatg

SEQ ID NO: 417624 - DNA, 25 bp, Homo sapien
tagtccggcctacatatccatactc

SEQ ID NO: 417625 - DNA, 25 bp, Homo sapien
aatctcatgaagatactgtcactag

SEQ ID NO: 417626 - DNA, 25 bp, Homo sapien
caagctattgtctgattgcacttcc

SEQ ID NO: 417627 - DNA, 25 bp, Homo sapien
ccttcacaggcacatttagcacaca

SEQ ID NO: 417628 - DNA, 25 bp, Homo sapien
caataaggacagcatgcttgatccc

SEQ ID NO: 417629 - DNA, 25 bp, Homo sapien
aaggacagcatgcttgatcccttca

SEQ ID NO: 417630 - DNA, 25 bp, Homo sapien
gttccttcaacacttttgacaacaa

SEQ ID NO: 417631 - DNA, 25 bp, Homo sapien
cgcttgaacacgctgaatacagatt

SEQ ID NO: 417632 - DNA, 25 bp, Homo sapien
tcacagcatgaaacgcttgaacacg

SEQ ID NO: 417633 - DNA, 25 bp, Homo sapien
gaacacgctgaatacagattttggt

SEQ ID NO: 417634 - DNA, 25 bp, Homo sapien
gcatgaaacgcttgaacacgctgaa

SEQ ID NO: 417635 - DNA, 25 bp, Homo sapien
gtgaacaagctagtactgaggtctg

SEQ ID NO: 417636 - DNA, 25 bp, Homo sapien
gagaagtgaacaagctagtactgag

SEQ ID NO: 417637 - DNA, 25 bp, Homo sapien
cccagagaagtgaacaagctagtac

SEQ ID NO: 417638 - DNA, 25 bp, Homo sapien
ggccttcacggagaatgctggtgtt

SEQ ID NO: 417639 - DNA, 25 bp, Homo sapien
caagttcactgtccccgtcaggacc

SEQ ID NO: 417640 - DNA, 25 bp, Homo sapien
aagttcactgtccccgtcaggacca

SEQ ID NO: 417641 - DNA, 25 bp, Homo sapien
agttcactgtccccgtcaggaccat

SEQ ID NO: 417642 - DNA, 25 bp, Homo sapien
tggccttgagcaaataatataagct

SEQ ID NO: 417643 - DNA, 25 bp, Homo sapien
gatacaaatgaaagcaacagcctaa

SEQ ID NO: 417644 - DNA, 25 bp, Homo sapien
tagcaatgcataactgacacactat

SEQ ID NO: 417645 - DNA, 25 bp, Homo sapien
gctacagtcatggttaagagggcag

SEQ ID NO: 417646 - DNA, 25 bp, Homo sapien
atttctactgctaagtttccattat

SEQ ID NO: 417647 - DNA, 25 bp, Homo sapien
catttctactgctaagtttccatta

SEQ ID NO: 417648 - DNA, 25 bp, Homo sapien
aatgcatgtaacgaattgttcctac

SEQ ID NO: 417649 - DNA, 25 bp, Homo sapien
aaaatgcatgtaacgaattgttcct

SEQ ID NO: 417650 - DNA, 25 bp, Homo sapien
gcatgtaacgaattgttcctacatt

SEQ ID NO: 417651 - DNA, 25 bp, Homo sapien
agaaaatgcatgtaacgaattgttc

SEQ ID NO: 417652 - DNA, 25 bp, Homo sapien
tgatggatcttggcactcctgcctt

SEQ ID NO: 417653 - DNA, 25 bp, Homo sapien
cctccacatttacgggctgctctgt

SEQ ID NO: 417654 - DNA, 25 bp, Homo sapien
atctcctccacatttacgggctgct

SEQ ID NO: 417655 - DNA, 25 bp, Homo sapien
tcctccacatttacgggctgctctg

SEQ ID NO: 417656 - DNA, 25 bp, Homo sapien
tgcgtctattaggtgcaatagccat

SEQ ID NO: 417657 - DNA, 25 bp, Homo sapien
ccagtcctgcgtctattaggtgcaa

SEQ ID NO: 417658 - DNA, 25 bp, Homo sapien
gacaccagtcctgcgtctattaggt

SEQ ID NO: 417659 - DNA, 25 bp, Homo sapien
aatgtagacaccagtcctgcgtcta

SEQ ID NO: 417660 - DNA, 25 bp, Homo sapien
gaatgtgtgagctgttcagctcttg

SEQ ID NO: 417661 - DNA, 25 bp, Homo sapien
tttgacaaattcgactcctccaggg

SEQ ID NO: 417662 - DNA, 25 bp, Homo sapien
cataaaccagcaacaagcgtcttct

SEQ ID NO: 417663 - DNA, 25 bp, Homo sapien
agcttctcagttgcagagacacctt

SEQ ID NO: 417664 - DNA, 25 bp, Homo sapien
tcattctactcctctctcagcaccc

SEQ ID NO: 417665 - DNA, 25 bp, Homo sapien
attctactcctctctcagcaccctg

SEQ ID NO: 417666 - DNA, 25 bp, Homo sapien
tctactcctctctcagcaccctggc

SEQ ID NO: 417667 - DNA, 25 bp, Homo sapien
ttctactcctctctcagcaccctgg

SEQ ID NO: 417668 - DNA, 25 bp, Homo sapien
ggatttcagaactatgagactgtca

SEQ ID NO: 417669 - DNA, 25 bp, Homo sapien
tcagggagggcttagaactggttct

SEQ ID NO: 417670 - DNA, 25 bp, Homo sapien
tgtgctcagatagtaccatccaagg

SEQ ID NO: 417671 - DNA, 25 bp, Homo sapien
tctagtttccttgcaaatccgctgc

SEQ ID NO: 417672 - DNA, 25 bp, Homo sapien
tacttggttggtgctcattattgac

SEQ ID NO: 417673 - DNA, 25 bp, Homo sapien
ggttggtgctcattattgaccgtca

SEQ ID NO: 417674 - DNA, 25 bp, Homo sapien
ctggtgttttacttggttggtgctc

SEQ ID NO: 417675 - DNA, 25 bp, Homo sapien
ggtgttttacttggttggtgctcat

SEQ ID NO: 417676 - DNA, 25 bp, Homo sapien
gactcagagggccagtaggattctt

SEQ ID NO: 417677 - DNA, 25 bp, Homo sapien
gaatcaacagtctggcggtgtttaa

SEQ ID NO: 417678 - DNA, 25 bp, Homo sapien
taaaatattgacatgtcgacagaca

SEQ ID NO: 417679 - DNA, 25 bp, Homo sapien
tcttccagcgcagtctgaatcaaca

SEQ ID NO: 417680 - DNA, 25 bp, Homo sapien
acagtgaagtggaaacacacccaaa

SEQ ID NO: 417681 - DNA, 25 bp, Homo sapien
cagaaagagagccatacagtgaagt

SEQ ID NO: 417682 - DNA, 25 bp, Homo sapien
tgcaatattcctagaagttctcgaa

SEQ ID NO: 417683 - DNA, 25 bp, Homo sapien
tttggtgcatcctcgcagaaagaga

SEQ ID NO: 417684 - DNA, 25 bp, Homo sapien
gtgaatactgctcttggccccgact

SEQ ID NO: 417685 - DNA, 25 bp, Homo sapien
cccactgtgtgctggagaaattctc

SEQ ID NO: 417686 - DNA, 25 bp, Homo sapien
cagacagggtgtgaatactgctctt

SEQ ID NO: 417687 - DNA, 25 bp, Homo sapien
gatgtggagctcaagattgctgtat

SEQ ID NO: 417688 - DNA, 25 bp, Homo sapien
tgtgactatctatgggtattactcg

SEQ ID NO: 417689 - DNA, 25 bp, Homo sapien
ggtctagtgtctaaccttgtcccaa

SEQ ID NO: 417690 - DNA, 25 bp, Homo sapien
tctccttaggtatgtcccacatgga

SEQ ID NO: 417691 - DNA, 25 bp, Homo sapien
tatagcaagacctattcagaaaggt

SEQ ID NO: 417692 - DNA, 25 bp, Homo sapien
ctcatttaggaccacagactaggtg

SEQ ID NO: 417693 - DNA, 25 bp, Homo sapien
tctggagcgacagtatcctgggcta

SEQ ID NO: 417694 - DNA, 25 bp, Homo sapien
cttccatggtggaaccaagcttgcc

SEQ ID NO: 417695 - DNA, 25 bp, Homo sapien
tactccagccttaccatagaatgtg

SEQ ID NO: 417696 - DNA, 25 bp, Homo sapien
ctcagaatcagacggtgggttggca

SEQ ID NO: 417697 - DNA, 25 bp, Homo sapien
ccactgagtaaagcatggctcgtgc

SEQ ID NO: 417698 - DNA, 25 bp, Homo sapien
cgattggttaataccaacactgaca

SEQ ID NO: 417699 - DNA, 25 bp, Homo sapien
tccaaatacttcgtggcagtgccac

SEQ ID NO: 417700 - DNA, 25 bp, Homo sapien
cctgctgtctgggatcaagtactgt

SEQ ID NO: 417701 - DNA, 25 bp, Homo sapien
ggatcaagtactgtaccatccgtga

SEQ ID NO: 417702 - DNA, 25 bp, Homo sapien
gtaccatccgtgacgccactaaaag

SEQ ID NO: 417703 - DNA, 25 bp, Homo sapien
tccgtgacgccactaaaagccaggg

SEQ ID NO: 417704 - DNA, 25 bp, Homo sapien
acccatttgaacctagctgcactcg

SEQ ID NO: 417705 - DNA, 25 bp, Homo sapien
tgcactcgcagctgacaatcttaaa

SEQ ID NO: 417706 - DNA, 25 bp, Homo sapien
cctggagtgcttctgaacgggtaac

SEQ ID NO: 417707 - DNA, 25 bp, Homo sapien
gacaatcttaaatctgcatatgcaa

SEQ ID NO: 417708 - DNA, 25 bp, Homo sapien
cttgcctctgctcaacagccaatgt

SEQ ID NO: 417709 - DNA, 25 bp, Homo sapien
tccaacccaggtttgcaactcccca

SEQ ID NO: 417710 - DNA, 25 bp, Homo sapien
caggtttgcaactccccagagcaac

SEQ ID NO: 417711 - DNA, 25 bp, Homo sapien
tgcctctgctcaacagccaatgtct

SEQ ID NO: 417712 - DNA, 25 bp, Homo sapien
tccaaccaatggacgcataggcagg

SEQ ID NO: 417713 - DNA, 25 bp, Homo sapien
aaccaatggacgcataggcaggtct

SEQ ID NO: 417714 - DNA, 25 bp, Homo sapien
ccaatggacgcataggcaggtcttc

SEQ ID NO: 417715 - DNA, 25 bp, Homo sapien
gctccaaccaatggacgcataggca

SEQ ID NO: 417716 - DNA, 25 bp, Homo sapien
gccaattgctgcacactcttgagca

SEQ ID NO: 417717 - DNA, 25 bp, Homo sapien
gagtcagctgctagttctttgacca

SEQ ID NO: 417718 - DNA, 25 bp, Homo sapien
tggccaattgctgcacactcttgag

SEQ ID NO: 417719 - DNA, 25 bp, Homo sapien
ttccttgctcttttggccaattgct

SEQ ID NO: 417720 - DNA, 25 bp, Homo sapien
tgtggttgctgaatgattattgttc

SEQ ID NO: 417721 - DNA, 25 bp, Homo sapien
cagtttgctgcttttgacaaacgca

SEQ ID NO: 417722 - DNA, 25 bp, Homo sapien
gacaaacgcaaagcaacataggctt

SEQ ID NO: 417723 - DNA, 25 bp, Homo sapien
acagcaccaattccctggatacatt

SEQ ID NO: 417724 - DNA, 25 bp, Homo sapien
gagccaccagtgactcggatatatt

SEQ ID NO: 417725 - DNA, 25 bp, Homo sapien
tacacaagcacattgcacgagctag

SEQ ID NO: 417726 - DNA, 25 bp, Homo sapien
aactaaagtgtgattgagccaccag

SEQ ID NO: 417727 - DNA, 25 bp, Homo sapien
tattgccacctgaccatacagcaag

SEQ ID NO: 417728 - DNA, 25 bp, Homo sapien
ggcgaacctccctcctgaagaagtg

SEQ ID NO: 417729 - DNA, 25 bp, Homo sapien
tccacggcatcgatcccagcagaaa

SEQ ID NO: 417730 - DNA, 25 bp, Homo sapien
caatgtattcagtctccacggcatc

SEQ ID NO: 417731 - DNA, 25 bp, Homo sapien
gcgaacctccctcctgaagaagtga

SEQ ID NO: 417732 - DNA, 25 bp, Homo sapien
gatgtgtagggtcttggttgtcaca

SEQ ID NO: 417733 - DNA, 25 bp, Homo sapien
tccagcagtaagataatgatgttgt

SEQ ID NO: 417734 - DNA, 25 bp, Homo sapien
cttgcccactagaatttacttggat

SEQ ID NO: 417735 - DNA, 25 bp, Homo sapien
cacagtgcatttgacacatcacagt

SEQ ID NO: 417736 - DNA, 25 bp, Homo sapien
cagggcacacagtgtaaagtgagag

SEQ ID NO: 417737 - DNA, 25 bp, Homo sapien
tacagctgtgtagacgacaaggtgc

SEQ ID NO: 417738 - DNA, 25 bp, Homo sapien
gccatgtttcaggaccaaccaatgg

SEQ ID NO: 417739 - DNA, 25 bp, Homo sapien
aaggtgcataccagtgccacataag

SEQ ID NO: 417740 - DNA, 25 bp, Homo sapien
attgcatccccacaaagtaactcat

SEQ ID NO: 417741 - DNA, 25 bp, Homo sapien
caaagtaactcatgaagttcatcat

SEQ ID NO: 417742 - DNA, 25 bp, Homo sapien
tcattgcatccccacaaagtaactc

SEQ ID NO: 417743 - DNA, 25 bp, Homo sapien
acaaagtaactcatgaagttcatca

SEQ ID NO: 417744 - DNA, 25 bp, Homo sapien
caggagggcatccgacttgtctagg

SEQ ID NO: 417745 - DNA, 25 bp, Homo sapien
atgatgcatcttaaacctggactgc

SEQ ID NO: 417746 - DNA, 25 bp, Homo sapien
ttaaacctggactgccgtgcagcca

SEQ ID NO: 417747 - DNA, 25 bp, Homo sapien
ccgacttgtctagggcattttctct

SEQ ID NO: 417748 - DNA, 25 bp, Homo sapien
taaatgccttcttgaaatcaagacc

SEQ ID NO: 417749 - DNA, 25 bp, Homo sapien
ctttttgagcaaacactacctgtgg

SEQ ID NO: 417750 - DNA, 25 bp, Homo sapien
catttaggtactccaaagtgttggg

SEQ ID NO: 417751 - DNA, 25 bp, Homo sapien
aatcaagaccaaattcctttctgag

SEQ ID NO: 417752 - DNA, 25 bp, Homo sapien
tccttgtctgttaatgatgagtctg

SEQ ID NO: 417753 - DNA, 25 bp, Homo sapien
ctgtgtggttcgattgtaaatacct

SEQ ID NO: 417754 - DNA, 25 bp, Homo sapien
gattgtaaatacctgacctccagga

SEQ ID NO: 417755 - DNA, 25 bp, Homo sapien
tgttcttacttgggtaacggcttca

SEQ ID NO: 417756 - DNA, 25 bp, Homo sapien
ctgacaaaaacacctatcctgtgat

SEQ ID NO: 417757 - DNA, 25 bp, Homo sapien
ggatggctctcctgacaaaaacacc

SEQ ID NO: 417758 - DNA, 25 bp, Homo sapien
ttttgcatagcagtttggatttacc

SEQ ID NO: 417759 - DNA, 25 bp, Homo sapien
gcatagcagtttggatttaccgaat

SEQ ID NO: 417760 - DNA, 25 bp, Homo sapien
taccgaatgatttgcaaaacgaatt

SEQ ID NO: 417761 - DNA, 25 bp, Homo sapien
agtttggatttaccgaatgatttgc

SEQ ID NO: 417762 - DNA, 25 bp, Homo sapien
tttccctcttccgtcagcttagctt

SEQ ID NO: 417763 - DNA, 25 bp, Homo sapien
ctcttccgtcagcttagcttcagga

SEQ ID NO: 417764 - DNA, 25 bp, Homo sapien
ccctcttccgtcagcttagcttcag

SEQ ID NO: 417765 - DNA, 25 bp, Homo sapien
cttccgtcagcttagcttcaggaac

SEQ ID NO: 417766 - DNA, 25 bp, Homo sapien
tgcaaagtgttttgtaccagtgaat

SEQ ID NO: 417767 - DNA, 25 bp, Homo sapien
caaagtgttttgtaccagtgaattt

SEQ ID NO: 417768 - DNA, 25 bp, Homo sapien
agctgcaaagtgttttgtaccagtg

SEQ ID NO: 417769 - DNA, 25 bp, Homo sapien
gctgcaaagtgttttgtaccagtga

SEQ ID NO: 417770 - DNA, 25 bp, Homo sapien
tgtccaaacgcacttgctccatcat

SEQ ID NO: 417771 - DNA, 25 bp, Homo sapien
aaatctgctcttgagaaccccgggc

SEQ ID NO: 417772 - DNA, 25 bp, Homo sapien
tcagttccatgtccaaacgcacttg

SEQ ID NO: 417773 - DNA, 25 bp, Homo sapien
aaacacatactcctccttgccaaga

SEQ ID NO: 417774 - DNA, 25 bp, Homo sapien
ttgtgctaagagcttccatctgcat

SEQ ID NO: 417775 - DNA, 25 bp, Homo sapien
tcttgtgctaagagcttccatctgc

SEQ ID NO: 417776 - DNA, 25 bp, Homo sapien
gcagaggtgcccccaaacttgaagg

SEQ ID NO: 417777 - DNA, 25 bp, Homo sapien
tttctcttgtgctaagagcttccat

SEQ ID NO: 417778 - DNA, 25 bp, Homo sapien
caaaagagcagctattacctctagg

SEQ ID NO: 417779 - DNA, 25 bp, Homo sapien
gggaatgaataagacagatcaccat

SEQ ID NO: 417780 - DNA, 25 bp, Homo sapien
agatcaccattcctgtcccttatta

SEQ ID NO: 417781 - DNA, 25 bp, Homo sapien
tattcttgttcatgccaagcctgcc

SEQ ID NO: 417782 - DNA, 25 bp, Homo sapien
ggagaagctttctggaaagcaaagg

SEQ ID NO: 417783 - DNA, 25 bp, Homo sapien
tgctgccacaggaactcacaaatgg

SEQ ID NO: 417784 - DNA, 25 bp, Homo sapien
ctggtggagaagctttctggaaagc

SEQ ID NO: 417785 - DNA, 25 bp, Homo sapien
gaagcaggccatctcttgttgtagg

SEQ ID NO: 417786 - DNA, 25 bp, Homo sapien
tttccgggcaggtcaaagaacatca

SEQ ID NO: 417787 - DNA, 25 bp, Homo sapien
taggtaaacccttcgcaccagtgag

SEQ ID NO: 417788 - DNA, 25 bp, Homo sapien
taaattgacacctgccatagatggg

SEQ ID NO: 417789 - DNA, 25 bp, Homo sapien
cagtactcaagggtatttccgggca

SEQ ID NO: 417790 - DNA, 25 bp, Homo sapien
cagggattgttgtcatagctccatc

SEQ ID NO: 417791 - DNA, 25 bp, Homo sapien
gaagagtccacacatccacaagacc

SEQ ID NO: 417792 - DNA, 25 bp, Homo sapien
gattgttgtcatagctccatcatcc

SEQ ID NO: 417793 - DNA, 25 bp, Homo sapien
atcatccacaacacccctgaagagt

SEQ ID NO: 417794 - DNA, 25 bp, Homo sapien
cttgctgatacccaaatcaagcttt

SEQ ID NO: 417795 - DNA, 25 bp, Homo sapien
taacttgctgatacccaaatcaagc

SEQ ID NO: 417796 - DNA, 25 bp, Homo sapien
aacttgctgatacccaaatcaagct

SEQ ID NO: 417797 - DNA, 25 bp, Homo sapien
ttaacttgctgatacccaaatcaag

SEQ ID NO: 417798 - DNA, 25 bp, Homo sapien
tctctcttatgggaacaagtttgaa

SEQ ID NO: 417799 - DNA, 25 bp, Homo sapien
agatgattgctgcagctgtactggc

SEQ ID NO: 417800 - DNA, 25 bp, Homo sapien
gggcagcatctaagcactgtctctc

SEQ ID NO: 417801 - DNA, 25 bp, Homo sapien
tggttgacttgcaacttctctgagg

SEQ ID NO: 417802 - DNA, 25 bp, Homo sapien
cataatagctgtgcgaatttacatt

SEQ ID NO: 417803 - DNA, 25 bp, Homo sapien
tctttgtactcgttaaccatctcca

SEQ ID NO: 417804 - DNA, 25 bp, Homo sapien
gcaatgcacaattaacacatcatgg

SEQ ID NO: 417805 - DNA, 25 bp, Homo sapien
gcacttccctggtgttgagcacttt

SEQ ID NO: 417806 - DNA, 25 bp, Homo sapien
gcatcattgcaacgtcatttccatg

SEQ ID NO: 417807 - DNA, 25 bp, Homo sapien
caacacagtgtgagaactgagcacc

SEQ ID NO: 417808 - DNA, 25 bp, Homo sapien
cctggcctcacaagagtgaccctgg

SEQ ID NO: 417809 - DNA, 25 bp, Homo sapien
tgagcaccagatatgcaccaagttg

SEQ ID NO: 417810 - DNA, 25 bp, Homo sapien
caaagtagtcatggcaaatatgcat

SEQ ID NO: 417811 - DNA, 25 bp, Homo sapien
gagaagcaggtcagggccagtgcac

SEQ ID NO: 417812 - DNA, 25 bp, Homo sapien
agggccagtgcacagtccaaagtag

SEQ ID NO: 417813 - DNA, 25 bp, Homo sapien
ctggaaacctgagagaagcaggtca

SEQ ID NO: 417814 - DNA, 25 bp, Homo sapien
aatgtaaaaccattgaagtcctggg

SEQ ID NO: 417815 - DNA, 25 bp, Homo sapien
caatgtcctctgcaaatcacgatgt

SEQ ID NO: 417816 - DNA, 25 bp, Homo sapien
tcagtgccactaatcccagaaatct

SEQ ID NO: 417817 - DNA, 25 bp, Homo sapien
cctagctttagtccctcagggagat

SEQ ID NO: 417818 - DNA, 25 bp, Homo sapien
gagccgaagacccagattctctcat

SEQ ID NO: 417819 - DNA, 25 bp, Homo sapien
caataatcatccacacgagccgaag

SEQ ID NO: 417820 - DNA, 25 bp, Homo sapien
tatcctaatagatggaacactcctc

SEQ ID NO: 417821 - DNA, 25 bp, Homo sapien
gcagaggacctctttaccacgtgca

SEQ ID NO: 417822 - DNA, 25 bp, Homo sapien
gaattctctatagagttccaggaca

SEQ ID NO: 417823 - DNA, 25 bp, Homo sapien
tcatagggccaaaccttagccacgt

SEQ ID NO: 417824 - DNA, 25 bp, Homo sapien
ttagccacgtgatgatgactccaac

SEQ ID NO: 417825 - DNA, 25 bp, Homo sapien
ttcttgacagcttttccaggcgaaa

SEQ ID NO: 417826 - DNA, 25 bp, Homo sapien
tgagtcagggccattccattttggg

SEQ ID NO: 417827 - DNA, 25 bp, Homo sapien
tgcagctgacaagggggagttccac

SEQ ID NO: 417828 - DNA, 25 bp, Homo sapien
attttggggattaaacacatcagca

SEQ ID NO: 417829 - DNA, 25 bp, Homo sapien
gaatcttccggggagtgaggaaaca

SEQ ID NO: 417830 - DNA, 25 bp, Homo sapien
atctacaaactcatcgtcagtggat

SEQ ID NO: 417831 - DNA, 25 bp, Homo sapien
tctacaaactcatcgtcagtggatt

SEQ ID NO: 417832 - DNA, 25 bp, Homo sapien
acaaactcatcgtcagtggatttac

SEQ ID NO: 417833 - DNA, 25 bp, Homo sapien
tacaaactcatcgtcagtggattta

SEQ ID NO: 417834 - DNA, 25 bp, Homo sapien
agaggaccgtctccccaagtttgca

SEQ ID NO: 417835 - DNA, 25 bp, Homo sapien
ctgtgcttttcctgtccgtctcttg

SEQ ID NO: 417836 - DNA, 25 bp, Homo sapien
gaccgtctccccaagtttgcagcag

SEQ ID NO: 417837 - DNA, 25 bp, Homo sapien
tcctgtccgtctcttgtgtgtgatt

SEQ ID NO: 417838 - DNA, 25 bp, Homo sapien
aacgttttgcttggctaagttctga

SEQ ID NO: 417839 - DNA, 25 bp, Homo sapien
taagttctgatgtgacgtccccgac

SEQ ID NO: 417840 - DNA, 25 bp, Homo sapien
tagaggtgagtcgttctgataagac

SEQ ID NO: 417841 - DNA, 25 bp, Homo sapien
gactgagggctctttgggtacatag

SEQ ID NO: 417842 - DNA, 25 bp, Homo sapien
tctaaaggctacctgcattcctcgg

SEQ ID NO: 417843 - DNA, 25 bp, Homo sapien
tcttccacttatgagggcccctatg

SEQ ID NO: 417844 - DNA, 25 bp, Homo sapien
tagtatagtttcagcacccagaagt

SEQ ID NO: 417845 - DNA, 25 bp, Homo sapien
aaaatcatattgtcatcagggctgc

SEQ ID NO: 417846 - DNA, 25 bp, Homo sapien
cacaagtggcctagctgttctgggt

SEQ ID NO: 417847 - DNA, 25 bp, Homo sapien
taattcctgattgcaggccgcagaa

SEQ ID NO: 417848 - DNA, 25 bp, Homo sapien
gcaaggttcatgtcaagttacaggc

SEQ ID NO: 417849 - DNA, 25 bp, Homo sapien
cattcatactgggtgacagccatag

SEQ ID NO: 417850 - DNA, 25 bp, Homo sapien
catttgccatcctaggtccataatc

SEQ ID NO: 417851 - DNA, 25 bp, Homo sapien
caaacacgtactgctgcatttgcca

SEQ ID NO: 417852 - DNA, 25 bp, Homo sapien
cactggctaggagtgtccagcctca

SEQ ID NO: 417853 - DNA, 25 bp, Homo sapien
tgcaatccgtgcatttcagagttcc

SEQ ID NO: 417854 - DNA, 25 bp, Homo sapien
aatactgatggaagtcatccgctca

SEQ ID NO: 417855 - DNA, 25 bp, Homo sapien
gatggaagtcatccgctcaacaatc

SEQ ID NO: 417856 - DNA, 25 bp, Homo sapien
gaagtcatccgctcaacaatctcag

SEQ ID NO: 417857 - DNA, 25 bp, Homo sapien
tactgatggaagtcatccgctcaac

SEQ ID NO: 417858 - DNA, 25 bp, Homo sapien
ctccagctccatgggtgtttttctg

SEQ ID NO: 417859 - DNA, 25 bp, Homo sapien
gctccatgggtgtttttctgggatc

SEQ ID NO: 417860 - DNA, 25 bp, Homo sapien
ctccatgggtgtttttctgggatct

SEQ ID NO: 417861 - DNA, 25 bp, Homo sapien
catgggtgtttttctgggatcttta

SEQ ID NO: 417862 - DNA, 25 bp, Homo sapien
ctgtggtggaaaaaagtgcatacaa

SEQ ID NO: 417863 - DNA, 25 bp, Homo sapien
catttcaggccaactacaacagctc

SEQ ID NO: 417864 - DNA, 25 bp, Homo sapien
tggccaagcgttcacatggaacgtc

SEQ ID NO: 417865 - DNA, 25 bp, Homo sapien
ggaagtggactcctcccattgtgtc

SEQ ID NO: 417866 - DNA, 25 bp, Homo sapien
ccttgataattgataaaagagtgtc

SEQ ID NO: 417867 - DNA, 25 bp, Homo sapien
ttttccctgtcctggcaatatcttg

SEQ ID NO: 417868 - DNA, 25 bp, Homo sapien
ggctttgtgaaatcaatggttccct

SEQ ID NO: 417869 - DNA, 25 bp, Homo sapien
tactttaattggctttgtgaaatca

SEQ ID NO: 417870 - DNA, 25 bp, Homo sapien
cactcccaggcttgtaatgatgctt

SEQ ID NO: 417871 - DNA, 25 bp, Homo sapien
tcctgaaatgaccaacagctctaca

SEQ ID NO: 417872 - DNA, 25 bp, Homo sapien
ttggcggctaccttcctgaaatgac

SEQ ID NO: 417873 - DNA, 25 bp, Homo sapien
tctacatgcacaatctggaaacccc

SEQ ID NO: 417874 - DNA, 25 bp, Homo sapien
cttgtacaatgttccaagacacggg

SEQ ID NO: 417875 - DNA, 25 bp, Homo sapien
tacgatatgacatcctgggttgaca

SEQ ID NO: 417876 - DNA, 25 bp, Homo sapien
tgccctgctctgtcttgtgtatgtc

SEQ ID NO: 417877 - DNA, 25 bp, Homo sapien
caaggaagatggcatagcttgtaca

SEQ ID NO: 417878 - DNA, 25 bp, Homo sapien
tatcatgtggactcagtgtgcagct

SEQ ID NO: 417879 - DNA, 25 bp, Homo sapien
tcaggaagcatgtgactatccaaca

SEQ ID NO: 417880 - DNA, 25 bp, Homo sapien
caaggcagctgagtcaatggagcag

SEQ ID NO: 417881 - DNA, 25 bp, Homo sapien
gcctgcaggcattaggtattcgtcc

SEQ ID NO: 417882 - DNA, 25 bp, Homo sapien
ctggtttatagtctggttgctggag

SEQ ID NO: 417883 - DNA, 25 bp, Homo sapien
cacgtgcataatcaccctgactttc

SEQ ID NO: 417884 - DNA, 25 bp, Homo sapien
cttgatgaactgaatctccacgtgc

SEQ ID NO: 417885 - DNA, 25 bp, Homo sapien
tgactttcaggtgaaaactgccctg

SEQ ID NO: 417886 - DNA, 25 bp, Homo sapien
cttcctgtggagtaaggattcccat

SEQ ID NO: 417887 - DNA, 25 bp, Homo sapien
caatcctattaccgagtatataccc

SEQ ID NO: 417888 - DNA, 25 bp, Homo sapien
aatcctattaccgagtatataccca

SEQ ID NO: 417889 - DNA, 25 bp, Homo sapien
ttctttggttgtgccttctttatcc

SEQ ID NO: 417890 - DNA, 25 bp, Homo sapien
attgttcacagtttccagccctttc

SEQ ID NO: 417891 - DNA, 25 bp, Homo sapien
tttcaatcaacagcttgacaggatc

SEQ ID NO: 417892 - DNA, 25 bp, Homo sapien
cctgtcatagctggtaaaaaattca

SEQ ID NO: 417893 - DNA, 25 bp, Homo sapien
agttcttggtgtcataatctttacc

SEQ ID NO: 417894 - DNA, 25 bp, Homo sapien
gcaatcccctgccagttcttggtgt

SEQ ID NO: 417895 - DNA, 25 bp, Homo sapien
cacctgaaatctgcaatcccctgcc

SEQ ID NO: 417896 - DNA, 25 bp, Homo sapien
tcttggtgtcataatctttacccat

SEQ ID NO: 417897 - DNA, 25 bp, Homo sapien
gaatactgaacagtatagggactga

SEQ ID NO: 417898 - DNA, 25 bp, Homo sapien
aactctagagataggtaagtttaca

SEQ ID NO: 417899 - DNA, 25 bp, Homo sapien
aagtggaatttcaggtagaatactg

SEQ ID NO: 417900 - DNA, 25 bp, Homo sapien
aatacacatgcctaaataacctttg

SEQ ID NO: 417901 - DNA, 25 bp, Homo sapien
ctttaatttgtactgacaacctaat

SEQ ID NO: 417902 - DNA, 25 bp, Homo sapien
tgtactgacaacctaatgtcggaca

SEQ ID NO: 417903 - DNA, 25 bp, Homo sapien
taatttgtactgacaacctaatgtc

SEQ ID NO: 417904 - DNA, 25 bp, Homo sapien
tttgtactgacaacctaatgtcgga

SEQ ID NO: 417905 - DNA, 25 bp, Homo sapien
caaatagcacttcatgggtctgacc

SEQ ID NO: 417906 - DNA, 25 bp, Homo sapien
gttgtgtctatgtcggcagttcccc

SEQ ID NO: 417907 - DNA, 25 bp, Homo sapien
cgtggtaattgattccgtggctggt

SEQ ID NO: 417908 - DNA, 25 bp, Homo sapien
caggtttcgggctgacacgtggtaa

SEQ ID NO: 417909 - DNA, 25 bp, Homo sapien
tctgaatactctgcacctaaggagg

SEQ ID NO: 417910 - DNA, 25 bp, Homo sapien
cagagtcctcgggtttgtggccaaa

SEQ ID NO: 417911 - DNA, 25 bp, Homo sapien
gcttggtgccaaagggtttcctcca

SEQ ID NO: 417912 - DNA, 25 bp, Homo sapien
tgtggccaaagacgcccaaatgttg

SEQ ID NO: 417913 - DNA, 25 bp, Homo sapien
tctttggtgatacgaagatgaagga

SEQ ID NO: 417914 - DNA, 25 bp, Homo sapien
agtgccactcacttccaggactgtg

SEQ ID NO: 417915 - DNA, 25 bp, Homo sapien
agatccatagtgttctatggagagc

SEQ ID NO: 417916 - DNA, 25 bp, Homo sapien
tcattgaatttgtcctgaggaaaac

SEQ ID NO: 417917 - DNA, 25 bp, Homo sapien
tctttctcaccatggaagggttcgg

SEQ ID NO: 417918 - DNA, 25 bp, Homo sapien
catggaagggttcggattccacata

SEQ ID NO: 417919 - DNA, 25 bp, Homo sapien
tctcaccatggaagggttcggattc

SEQ ID NO: 417920 - DNA, 25 bp, Homo sapien
tctctttctcaccatggaagggttc

SEQ ID NO: 417921 - DNA, 25 bp, Homo sapien
gatttgggacaacatcttcccttga

SEQ ID NO: 417922 - DNA, 25 bp, Homo sapien
actgggcttgctaggagaattttga

SEQ ID NO: 417923 - DNA, 25 bp, Homo sapien
gagaattttgaacgtccaactgcat

SEQ ID NO: 417924 - DNA, 25 bp, Homo sapien
tgaatacaactaatcaaactgggct

SEQ ID NO: 417925 - DNA, 25 bp, Homo sapien
caggatgatgcttgggaatactcca

SEQ ID NO: 417926 - DNA, 25 bp, Homo sapien
tgcaggacccatcccatttggaaat

SEQ ID NO: 417927 - DNA, 25 bp, Homo sapien
ggagacactggatgctgtgctgcct

SEQ ID NO: 417928 - DNA, 25 bp, Homo sapien
taggcggtcctattacttgtttcag

SEQ ID NO: 417929 - DNA, 25 bp, Homo sapien
aaaatattgcttagggctttgaagg

SEQ ID NO: 417930 - DNA, 25 bp, Homo sapien
aaatattgcttagggctttgaaggc

SEQ ID NO: 417931 - DNA, 25 bp, Homo sapien
taaaatattgcttagggctttgaag

SEQ ID NO: 417932 - DNA, 25 bp, Homo sapien
gggctccaagtatcatcagcacaag

SEQ ID NO: 417933 - DNA, 25 bp, Homo sapien
tccaagtatcatcagcacaagcaga

SEQ ID NO: 417934 - DNA, 25 bp, Homo sapien
gtatcatcagcacaagcagaggaga

SEQ ID NO: 417935 - DNA, 25 bp, Homo sapien
ctaagggctccaagtatcatcagca

SEQ ID NO: 417936 - DNA, 25 bp, Homo sapien
tcccaggcatcaaggaaataaaatg

SEQ ID NO: 417937 - DNA, 25 bp, Homo sapien
tggcagatggtctcaggtagacctg

SEQ ID NO: 417938 - DNA, 25 bp, Homo sapien
cctggatgacaacggaggagtctct

SEQ ID NO: 417939 - DNA, 25 bp, Homo sapien
tggcagctgccacacggtaactaag

SEQ ID NO: 417940 - DNA, 25 bp, Homo sapien
gacttaaaggtgctgaaaaatgaag

SEQ ID NO: 417941 - DNA, 25 bp, Homo sapien
agcttgtgggttcctccaacgggca

SEQ ID NO: 417942 - DNA, 25 bp, Homo sapien
tcctccaacgggcagctcagagatt

SEQ ID NO: 417943 - DNA, 25 bp, Homo sapien
aatcaggtttcaccagcttaacctg

SEQ ID NO: 417944 - DNA, 25 bp, Homo sapien
gcagaacagagattggcagctatca

SEQ ID NO: 417945 - DNA, 25 bp, Homo sapien
ctgcagaacagagattggcagctat

SEQ ID NO: 417946 - DNA, 25 bp, Homo sapien
cagaacagagattggcagctatcat

SEQ ID NO: 417947 - DNA, 25 bp, Homo sapien
tgcagaacagagattggcagctatc

SEQ ID NO: 417948 - DNA, 25 bp, Homo sapien
atggcggttttgtggaatcgaaaga

SEQ ID NO: 417949 - DNA, 25 bp, Homo sapien
cccctctgcctggccagccgcccag

SEQ ID NO: 417950 - DNA, 25 bp, Homo sapien
tggcggttttgtggaatcgaaagag

SEQ ID NO: 417951 - DNA, 25 bp, Homo sapien
tctgcctggccagccgcccagtccg

SEQ ID NO: 417952 - DNA, 25 bp, Homo sapien
tgcggagccattcagagggatcttg

SEQ ID NO: 417953 - DNA, 25 bp, Homo sapien
cattcagagggatcttggcatgtag

SEQ ID NO: 417954 - DNA, 25 bp, Homo sapien
tcagagggatcttggcatgtagcat

SEQ ID NO: 417955 - DNA, 25 bp, Homo sapien
tgctacttcagctggggagtccagg

SEQ ID NO: 417956 - DNA, 25 bp, Homo sapien
gcctttcgccaaggttctgggctct

SEQ ID NO: 417957 - DNA, 25 bp, Homo sapien
tcttattatcttggcagcctccggg

SEQ ID NO: 417958 - DNA, 25 bp, Homo sapien
ccagtggcattaacacccgtgagct

SEQ ID NO: 417959 - DNA, 25 bp, Homo sapien
ttcacccatacataactcagctcag

SEQ ID NO: 417960 - DNA, 25 bp, Homo sapien
tatccattcgaaggatgtgaaagcg

SEQ ID NO: 417961 - DNA, 25 bp, Homo sapien
gatatctggctgtgttgtacagatc

SEQ ID NO: 417962 - DNA, 25 bp, Homo sapien
gccaggcacacgatgcagcagtatt

SEQ ID NO: 417963 - DNA, 25 bp, Homo sapien
cgctgtaactcttgcttaaaaggga

SEQ ID NO: 417964 - DNA, 25 bp, Homo sapien
cctgagcggttgtgtctgcgtgcat

SEQ ID NO: 417965 - DNA, 25 bp, Homo sapien
tagagtacttgtaactgatgcccag

SEQ ID NO: 417966 - DNA, 25 bp, Homo sapien
gatttagcgtggatacagagggaca

SEQ ID NO: 417967 - DNA, 25 bp, Homo sapien
catcgccagctttgtcttaggtgta

SEQ ID NO: 417968 - DNA, 25 bp, Homo sapien
taactgttcagttgcagcgtcagtg

SEQ ID NO: 417969 - DNA, 25 bp, Homo sapien
gtcagtgtaagcacgggacgcagat

SEQ ID NO: 417970 - DNA, 25 bp, Homo sapien
tgttcagttgcagcgtcagtgtaag

SEQ ID NO: 417971 - DNA, 25 bp, Homo sapien
ttgcagcgtcagtgtaagcacggga

SEQ ID NO: 417972 - DNA, 25 bp, Homo sapien
agccagtaccagaaggactgctttt

SEQ ID NO: 417973 - DNA, 25 bp, Homo sapien
ccagtaccagaaggactgcttttct

SEQ ID NO: 417974 - DNA, 25 bp, Homo sapien
gccagtaccagaaggactgcttttc

SEQ ID NO: 417975 - DNA, 25 bp, Homo sapien
cagtaccagaaggactgcttttctc

SEQ ID NO: 417976 - DNA, 25 bp, Homo sapien
cggcagatgcgccagattttatagt

SEQ ID NO: 417977 - DNA, 25 bp, Homo sapien
ttccgagaggaaaaggcccgctggc

SEQ ID NO: 417978 - DNA, 25 bp, Homo sapien
cacagattggttcaaggtggtgcct

SEQ ID NO: 417979 - DNA, 25 bp, Homo sapien
cacagattggttcaaggtggtgtct

SEQ ID NO: 417980 - DNA, 25 bp, Homo sapien
tcctgcagcagggattgtacttcct

SEQ ID NO: 417981 - DNA, 25 bp, Homo sapien
cactgggaagacgaggctgttctct

SEQ ID NO: 417982 - DNA, 25 bp, Homo sapien
tggtggtccactctcctgtcaggtc

SEQ ID NO: 417983 - DNA, 25 bp, Homo sapien
tgtttgctaattcgtgcctgccagc

SEQ ID NO: 417984 - DNA, 25 bp, Homo sapien
ctgggcaaaggtggtgacagggggt

SEQ ID NO: 417985 - DNA, 25 bp, Homo sapien
ctgctgggcaaaggtggtgacaggg

SEQ ID NO: 417986 - DNA, 25 bp, Homo sapien
tcctgctgggcaaaggtggtgacag

SEQ ID NO: 417987 - DNA, 25 bp, Homo sapien
ctcctgctgggcaaaggtggtgaca

SEQ ID NO: 417988 - DNA, 25 bp, Homo sapien
gttcaagaccagcctgggcaacatg

SEQ ID NO: 417989 - DNA, 25 bp, Homo sapien
caaggcgagtggatcacttgagtct

SEQ ID NO: 417990 - DNA, 25 bp, Homo sapien
tgggcaacatggtgaaaccccatct

SEQ ID NO: 417991 - DNA, 25 bp, Homo sapien
gcgagtggatcacttgagtctagga

SEQ ID NO: 417992 - DNA, 25 bp, Homo sapien
tcccatagatgaaccggtggatcct

SEQ ID NO: 417993 - DNA, 25 bp, Homo sapien
ggcgtacaggctaccacgagttgaa

SEQ ID NO: 417994 - DNA, 25 bp, Homo sapien
gttcataggagtccgctcaggctcg

SEQ ID NO: 417995 - DNA, 25 bp, Homo sapien
cagtctgtcacccttggcgtacagg

SEQ ID NO: 417996 - DNA, 25 bp, Homo sapien
cgttccatgtttcgtgtcactgagc

SEQ ID NO: 417997 - DNA, 25 bp, Homo sapien
cagagagctctagaattgcaattac

SEQ ID NO: 417998 - DNA, 25 bp, Homo sapien
aattctagggcactcatagaccaca

SEQ ID NO: 417999 - DNA, 25 bp, Homo sapien
gagggcagatacagctctctatatt

SEQ ID NO: 418000 - DNA, 25 bp, Homo sapien
tgccccaccaagagcagaccatctg

SEQ ID NO: 418001 - DNA, 25 bp, Homo sapien
gacggcatgcttcactctgtcaaca

SEQ ID NO: 418002 - DNA, 25 bp, Homo sapien
cggcatgcttcactctgtcaacatg

SEQ ID NO: 418003 - DNA, 25 bp, Homo sapien
tctctgacggcatgcttcactctgt

SEQ ID NO: 418004 - DNA, 25 bp, Homo sapien
ggcaggagcgtccaccgttcatcca

SEQ ID NO: 418005 - DNA, 25 bp, Homo sapien
gtaaaacacaatcgtcgtgagcacc

SEQ ID NO: 418006 - DNA, 25 bp, Homo sapien
tgcctattcactcaaggatcacaca

SEQ ID NO: 418007 - DNA, 25 bp, Homo sapien
taagtcatgacatattgcagccaac

SEQ ID NO: 418008 - DNA, 25 bp, Homo sapien
atctgtgggtacagtcatcgctgca

SEQ ID NO: 418009 - DNA, 25 bp, Homo sapien
tgggtacagtcatcgctgcatagtt

SEQ ID NO: 418010 - DNA, 25 bp, Homo sapien
tgtgggtacagtcatcgctgcatag

SEQ ID NO: 418011 - DNA, 25 bp, Homo sapien
tacagtcatcgctgcatagttggct

SEQ ID NO: 418012 - DNA, 25 bp, Homo sapien
gagtccagtggctgtttgctcctgg

SEQ ID NO: 418013 - DNA, 25 bp, Homo sapien
gggacttcacgaagacagcctccag

SEQ ID NO: 418014 - DNA, 25 bp, Homo sapien
caactcaacccggagtcgagtccag

SEQ ID NO: 418015 - DNA, 25 bp, Homo sapien
catatctgagccccaccaatcagaa

SEQ ID NO: 418016 - DNA, 25 bp, Homo sapien
agaaaagtcctgtggatagcatcca

SEQ ID NO: 418017 - DNA, 25 bp, Homo sapien
caggcatcggatggccaaagtgcag

SEQ ID NO: 418018 - DNA, 25 bp, Homo sapien
aatctcccttcaacctcaggcagtt

SEQ ID NO: 418019 - DNA, 25 bp, Homo sapien
gcatccacggattgactggctttgc

SEQ ID NO: 418020 - DNA, 25 bp, Homo sapien
ttctcaactatctcaatcaaatgtg

SEQ ID NO: 418021 - DNA, 25 bp, Homo sapien
ctatctcaatcaaatgtgtcgtcat

SEQ ID NO: 418022 - DNA, 25 bp, Homo sapien
tcaactatctcaatcaaatgtgtcg

SEQ ID NO: 418023 - DNA, 25 bp, Homo sapien
aactatctcaatcaaatgtgtcgtc

SEQ ID NO: 418024 - DNA, 25 bp, Homo sapien
ctgaaatttgaccttgaaataatct

SEQ ID NO: 418025 - DNA, 25 bp, Homo sapien
cagcagagatttacatgcattacga

SEQ ID NO: 418026 - DNA, 25 bp, Homo sapien
ggagaataattgcaaatacaacatt

SEQ ID NO: 418027 - DNA, 25 bp, Homo sapien
gcattacgatgattaacatctgaaa

SEQ ID NO: 418028 - DNA, 25 bp, Homo sapien
ggttcaactgggaaaagtgccatct

SEQ ID NO: 418029 - DNA, 25 bp, Homo sapien
tccattggccaaggttgtcccaggg

SEQ ID NO: 418030 - DNA, 25 bp, Homo sapien
ggccagggccgattgtgacttccat

SEQ ID NO: 418031 - DNA, 25 bp, Homo sapien
cccagaatgtgtacaggccagggcc

SEQ ID NO: 418032 - DNA, 25 bp, Homo sapien
ggcaccttacaaagggcatacacaa

SEQ ID NO: 418033 - DNA, 25 bp, Homo sapien
gaataaagtagaaatagaagggcac

SEQ ID NO: 418034 - DNA, 25 bp, Homo sapien
ttatgaagtacaaagatttatgata

SEQ ID NO: 418035 - DNA, 25 bp, Homo sapien
gtagaaatagaagggcaccttacaa

SEQ ID NO: 418036 - DNA, 25 bp, Homo sapien
gttgaccttggccatgtcaatatca

SEQ ID NO: 418037 - DNA, 25 bp, Homo sapien
ccttggccatgtcaatatcatagag

SEQ ID NO: 418038 - DNA, 25 bp, Homo sapien
gccatgtcaatatcatagagcttct

SEQ ID NO: 418039 - DNA, 25 bp, Homo sapien
tggccatgtcaatatcatagagctt

SEQ ID NO: 418040 - DNA, 25 bp, Homo sapien
ggaaggtgggtgacgtgtggatcat

SEQ ID NO: 418041 - DNA, 25 bp, Homo sapien
ctggaaggtgggtgacgtgtggatc

SEQ ID NO: 418042 - DNA, 25 bp, Homo sapien
tggaaggtgggtgacgtgtggatca

SEQ ID NO: 418043 - DNA, 25 bp, Homo sapien
cggtgccatcttgtgaaaagcccat

SEQ ID NO: 418044 - DNA, 25 bp, Homo sapien
catcttgtgaaaagcccatcttaat

SEQ ID NO: 418045 - DNA, 25 bp, Homo sapien
gccatcttgtgaaaagcccatctta

SEQ ID NO: 418046 - DNA, 25 bp, Homo sapien
tctttgctttcggtgccatcttgtg

SEQ ID NO: 418047 - DNA, 25 bp, Homo sapien
ctttaagattccagtgaaactcaac

SEQ ID NO: 418048 - DNA, 25 bp, Homo sapien
caggacccagagctggtctgtctat

SEQ ID NO: 418049 - DNA, 25 bp, Homo sapien
aggacccagagctggtctgtctata

SEQ ID NO: 418050 - DNA, 25 bp, Homo sapien
ggacccagagctggtctgtctatac

SEQ ID NO: 418051 - DNA, 25 bp, Homo sapien
gaaatgctaagtcaatgccacggtc

SEQ ID NO: 418052 - DNA, 25 bp, Homo sapien
taaagggattgccaatggacagccc

SEQ ID NO: 418053 - DNA, 25 bp, Homo sapien
gactattgtagccactgaggatgaa

SEQ ID NO: 418054 - DNA, 25 bp, Homo sapien
tgcacctgtggagctcggcgatttt

SEQ ID NO: 418055 - DNA, 25 bp, Homo sapien
tcaagtgaggccatcagcgtcaagt

SEQ ID NO: 418056 - DNA, 25 bp, Homo sapien
aaattgaaacctgctacccggtgtg

SEQ ID NO: 418057 - DNA, 25 bp, Homo sapien
gcagcttcccggttcacaagttgaa

SEQ ID NO: 418058 - DNA, 25 bp, Homo sapien
cccctcggtcagcagaaatggattc

SEQ ID NO: 418059 - DNA, 25 bp, Homo sapien
cctcctctcgccattacatctgagc

SEQ ID NO: 418060 - DNA, 25 bp, Homo sapien
tcctctcgccattacatctgagcca

SEQ ID NO: 418061 - DNA, 25 bp, Homo sapien
tcctcctctcgccattacatctgag

SEQ ID NO: 418062 - DNA, 25 bp, Homo sapien
cctctcgccattacatctgagccac

SEQ ID NO: 418063 - DNA, 25 bp, Homo sapien
gtttatccgcccaaaggagaatgtg

SEQ ID NO: 418064 - DNA, 25 bp, Homo sapien
tgcctgacttgaccgagccgcagta

SEQ ID NO: 418065 - DNA, 25 bp, Homo sapien
gaaacacggagagttgcttctgcct

SEQ ID NO: 418066 - DNA, 25 bp, Homo sapien
tcccgagcagctatcaccttgaagt

SEQ ID NO: 418067 - DNA, 25 bp, Homo sapien
aatcacttctcgtggactgggcggg

SEQ ID NO: 418068 - DNA, 25 bp, Homo sapien
gaaaaggtaaggcagcttgctccca

SEQ ID NO: 418069 - DNA, 25 bp, Homo sapien
ggcaaagacgtccagtgacacaggt

SEQ ID NO: 418070 - DNA, 25 bp, Homo sapien
aaagctccgcatgtgattccagtga

SEQ ID NO: 418071 - DNA, 25 bp, Homo sapien
gggatgagcacgggagagaaatgtc

SEQ ID NO: 418072 - DNA, 25 bp, Homo sapien
ggatgagcacgggagagaaatgtct

SEQ ID NO: 418073 - DNA, 25 bp, Homo sapien
gagggatgagcacgggagagaaatg

SEQ ID NO: 418074 - DNA, 25 bp, Homo sapien
atgagcacgggagagaaatgtctgc

SEQ ID NO: 418075 - DNA, 25 bp, Homo sapien
tgatacgtgtggtgagtcgctgtcc

SEQ ID NO: 418076 - DNA, 25 bp, Homo sapien
gcactgatacgtgtggtgagtcgct

SEQ ID NO: 418077 - DNA, 25 bp, Homo sapien
ctgatacgtgtggtgagtcgctgtc

SEQ ID NO: 418078 - DNA, 25 bp, Homo sapien
atacgtgtggtgagtcgctgtccta

SEQ ID NO: 418079 - DNA, 25 bp, Homo sapien
gtggggggaatctgatgtgtgtggg

SEQ ID NO: 418080 - DNA, 25 bp, Homo sapien
ctattgtgggggctgctgatgtgtg

SEQ ID NO: 418081 - DNA, 25 bp, Homo sapien
atgtgtgggggggttgctgtcctac

SEQ ID NO: 418082 - DNA, 25 bp, Homo sapien
tgctgatgtgtgggggggttgctgt

SEQ ID NO: 418083 - DNA, 25 bp, Homo sapien
gctgctgatgtgtgggggggttgct

SEQ ID NO: 418084 - DNA, 25 bp, Homo sapien
ggaccactgtcctactgtgggggct

SEQ ID NO: 418085 - DNA, 25 bp, Homo sapien
ggcgctaatatgtgggggtcgctgt

SEQ ID NO: 418086 - DNA, 25 bp, Homo sapien
ggcactgatatgtgtggggaccact

SEQ ID NO: 418087 - DNA, 25 bp, Homo sapien
ttgctgtcctgttgtgagggccgct

SEQ ID NO: 418088 - DNA, 25 bp, Homo sapien
tgtgggggtcgctgatctattgtgg

SEQ ID NO: 418089 - DNA, 25 bp, Homo sapien
atgtgtgtgggggtcgctgatctat

SEQ ID NO: 418090 - DNA, 25 bp, Homo sapien
tgttgtggggcgctgatgtgtgtgg

SEQ ID NO: 418091 - DNA, 25 bp, Homo sapien
tcgctgatctattgtgggggctgat

SEQ ID NO: 418092 - DNA, 25 bp, Homo sapien
tggagaaagatgcactgtccctgcg

SEQ ID NO: 418093 - DNA, 25 bp, Homo sapien
tgatgcatggatacattggccgggc

SEQ ID NO: 418094 - DNA, 25 bp, Homo sapien
aaagatgcactgtccctgcgccttc

SEQ ID NO: 418095 - DNA, 25 bp, Homo sapien
gatgcatggatacattggccgggct

SEQ ID NO: 418096 - DNA, 25 bp, Homo sapien
tatagtacggaaggcagcagctgac

SEQ ID NO: 418097 - DNA, 25 bp, Homo sapien
ctatagtacggaaggcagcagctga

SEQ ID NO: 418098 - DNA, 25 bp, Homo sapien
ccaggagtttcggtgagaaagtcat

SEQ ID NO: 418099 - DNA, 25 bp, Homo sapien
cacggccaggagtttcggtgagaaa

SEQ ID NO: 418100 - DNA, 25 bp, Homo sapien
caccgaggaggagccagaatcgcct

SEQ ID NO: 418101 - DNA, 25 bp, Homo sapien
aggagccagaatcgcctctgctgga

SEQ ID NO: 418102 - DNA, 25 bp, Homo sapien
tcaaatggttactatcgggccctcc

SEQ ID NO: 418103 - DNA, 25 bp, Homo sapien
gaccacaggtccagaaagcttcaaa

SEQ ID NO: 418104 - DNA, 25 bp, Homo sapien
cagaatcgctgggactaagaccaca

SEQ ID NO: 418105 - DNA, 25 bp, Homo sapien
catatttaggtccactcatagggaa

SEQ ID NO: 418106 - DNA, 25 bp, Homo sapien
ttcactaggctccaatgagaaagga

SEQ ID NO: 418107 - DNA, 25 bp, Homo sapien
ggcaacattgtctaagcggcgtccc

SEQ ID NO: 418108 - DNA, 25 bp, Homo sapien
agcacgggcctgaacaggaccagca

SEQ ID NO: 418109 - DNA, 25 bp, Homo sapien
cagcaggtcccgttcatttggtttc

SEQ ID NO: 418110 - DNA, 25 bp, Homo sapien
ccacccaaggtctgcgtggtatcaa

SEQ ID NO: 418111 - DNA, 25 bp, Homo sapien
aaaactcaagaataagaacagaagc

SEQ ID NO: 418112 - DNA, 25 bp, Homo sapien
ggtctgcgtggtatcaaaactcaag

SEQ ID NO: 418113 - DNA, 25 bp, Homo sapien
caaggtctgcgtggtatcaaaactc

SEQ ID NO: 418114 - DNA, 25 bp, Homo sapien
tgcccaggaaagtcgccagaacaaa

SEQ ID NO: 418115 - DNA, 25 bp, Homo sapien
tagacaagcgccaccttgagaggcc

SEQ ID NO: 418116 - DNA, 25 bp, Homo sapien
tagacctgccatccagacagcttgt

SEQ ID NO: 418117 - DNA, 25 bp, Homo sapien
tattcggaagagcattagacctgcc

SEQ ID NO: 418118 - DNA, 25 bp, Homo sapien
aatttagtccatcaaaccttagtct

SEQ ID NO: 418119 - DNA, 25 bp, Homo sapien
cctaattgttgagtagacacaactc

SEQ ID NO: 418120 - DNA, 25 bp, Homo sapien
cacaactcatcgactctaaactata

SEQ ID NO: 418121 - DNA, 25 bp, Homo sapien
tctaaaatgtgtgactaacacccac

SEQ ID NO: 418122 - DNA, 25 bp, Homo sapien
aggtgaccaaatgcgcttcggtgaa

SEQ ID NO: 418123 - DNA, 25 bp, Homo sapien
ggtgaccaaatgcgcttcggtgaaa

SEQ ID NO: 418124 - DNA, 25 bp, Homo sapien
gaggtgaccaaatgcgcttcggtga

SEQ ID NO: 418125 - DNA, 25 bp, Homo sapien
tctttagctcttccgtccacaagga

SEQ ID NO: 418126 - DNA, 25 bp, Homo sapien
caccaaagttagttggtttatcagg

SEQ ID NO: 418127 - DNA, 25 bp, Homo sapien
gtaaaagctgtttgcaaactgtgca

SEQ ID NO: 418128 - DNA, 25 bp, Homo sapien
tgtgcagggtctcggcagatgccct

SEQ ID NO: 418129 - DNA, 25 bp, Homo sapien
cttttgaagcacagcattagtctct

SEQ ID NO: 418130 - DNA, 25 bp, Homo sapien
acttgtcttctcattcgtatctgaa

SEQ ID NO: 418131 - DNA, 25 bp, Homo sapien
agcatattttctgggctatgtccaa

SEQ ID NO: 418132 - DNA, 25 bp, Homo sapien
tctgaaattacctccccaagaagta

SEQ ID NO: 418133 - DNA, 25 bp, Homo sapien
tctcagttttccagtgaacaaggaa

SEQ ID NO: 418134 - DNA, 25 bp, Homo sapien
gacaagacactgcaggaatgggcca

SEQ ID NO: 418135 - DNA, 25 bp, Homo sapien
gaaaccgcatgtcccaacactaggt

SEQ ID NO: 418136 - DNA, 25 bp, Homo sapien
aacactaggtacgtttgcatgcacc

SEQ ID NO: 418137 - DNA, 25 bp, Homo sapien
caacttaagggctgtgagtagcctc

SEQ ID NO: 418138 - DNA, 25 bp, Homo sapien
ttccagacataacaacttaagggct

SEQ ID NO: 418139 - DNA, 25 bp, Homo sapien
taagggctgtgagtagcctccaaga

SEQ ID NO: 418140 - DNA, 25 bp, Homo sapien
cataacaacttaagggctgtgagta

SEQ ID NO: 418141 - DNA, 25 bp, Homo sapien
ctgttgatggaagatatttaacaag

SEQ ID NO: 418142 - DNA, 25 bp, Homo sapien
tctgttgatggaagatatttaacaa

SEQ ID NO: 418143 - DNA, 25 bp, Homo sapien
gttgatggaagatatttaacaagta

SEQ ID NO: 418144 - DNA, 25 bp, Homo sapien
tgatggaagatatttaacaagtatt

SEQ ID NO: 418145 - DNA, 25 bp, Homo sapien
gaagctggttttctagcagcaagac

SEQ ID NO: 418146 - DNA, 25 bp, Homo sapien
catgaagccaatctcgaagctggtt

SEQ ID NO: 418147 - DNA, 25 bp, Homo sapien
ggagtagtaacagcttggccaagtt

SEQ ID NO: 418148 - DNA, 25 bp, Homo sapien
caagcaggtcattaggacatcagca

SEQ ID NO: 418149 - DNA, 25 bp, Homo sapien
tttattaaaactgaaaatacacatc

SEQ ID NO: 418150 - DNA, 25 bp, Homo sapien
attaaaactgaaaatacacatctcc

SEQ ID NO: 418151 - DNA, 25 bp, Homo sapien
atacacatctccaaatggggaaaaa

SEQ ID NO: 418152 - DNA, 25 bp, Homo sapien
actgaaaatacacatctccaaatgg

SEQ ID NO: 418153 - DNA, 25 bp, Homo sapien
ccgttgattatcgtgagggccgtaa

SEQ ID NO: 418154 - DNA, 25 bp, Homo sapien
cacaagcatgaggattatggacaga

SEQ ID NO: 418155 - DNA, 25 bp, Homo sapien
cgtgaagtcgttctaatttcgtaag

SEQ ID NO: 418156 - DNA, 25 bp, Homo sapien
cgtattccaggaacagccgttgatt

SEQ ID NO: 418157 - DNA, 25 bp, Homo sapien
cattgatgacggagggagtcctgcc

SEQ ID NO: 418158 - DNA, 25 bp, Homo sapien
gagtaaatacgttcagctttgccag

SEQ ID NO: 418159 - DNA, 25 bp, Homo sapien
tcagcagtttattggtcacgtccac

SEQ ID NO: 418160 - DNA, 25 bp, Homo sapien
taactacgcatagggaaaatgccac

SEQ ID NO: 418161 - DNA, 25 bp, Homo sapien
aaagaccggacagaggatgcagcac

SEQ ID NO: 418162 - DNA, 25 bp, Homo sapien
cacgaggctctgtaggcctgaagag

SEQ ID NO: 418163 - DNA, 25 bp, Homo sapien
caagctaagcttcagtcccggaagg

SEQ ID NO: 418164 - DNA, 25 bp, Homo sapien
gcaagtcagtcagcgatcagagcga

SEQ ID NO: 418165 - DNA, 25 bp, Homo sapien
tacacggctctggtgttgacggtgc

SEQ ID NO: 418166 - DNA, 25 bp, Homo sapien
tggtgttgacggtgcaccaagccca

SEQ ID NO: 418167 - DNA, 25 bp, Homo sapien
acaggtgtccggctctgcagaaagg

SEQ ID NO: 418168 - DNA, 25 bp, Homo sapien
tgtgggctatgattcagcaggtcca

SEQ ID NO: 418169 - DNA, 25 bp, Homo sapien
agaaaaagtctctggaggaagcaaa

SEQ ID NO: 418170 - DNA, 25 bp, Homo sapien
tggaggaagcaaagaactcctgcac

SEQ ID NO: 418171 - DNA, 25 bp, Homo sapien
gtctctggaggaagcaaagaactcc

SEQ ID NO: 418172 - DNA, 25 bp, Homo sapien
gagaagagaaaaagtctctggagga

SEQ ID NO: 418173 - DNA, 25 bp, Homo sapien
ttccaaagagatcggtgcccagcat

SEQ ID NO: 418174 - DNA, 25 bp, Homo sapien
gtaaaatctccaggtaaggcttcca

SEQ ID NO: 418175 - DNA, 25 bp, Homo sapien
taaaaaggtgcacagcgccagcaga

SEQ ID NO: 418176 - DNA, 25 bp, Homo sapien
caaacagggcaggtatacgccttgg

SEQ ID NO: 418177 - DNA, 25 bp, Homo sapien
ggcaacgaaataatcatctgtccct

SEQ ID NO: 418178 - DNA, 25 bp, Homo sapien
taatgtatgcccctaagtagcttcg

SEQ ID NO: 418179 - DNA, 25 bp, Homo sapien
tccgtggtgagcaggcaactctcag

SEQ ID NO: 418180 - DNA, 25 bp, Homo sapien
gtagcttcgaatcactgtgtccgtg

SEQ ID NO: 418181 - DNA, 25 bp, Homo sapien
gctgcttaagcacctcaattttggg

SEQ ID NO: 418182 - DNA, 25 bp, Homo sapien
taacggaatcctacttagagggcac

SEQ ID NO: 418183 - DNA, 25 bp, Homo sapien
taacatgtgctgtggcagagattgc

SEQ ID NO: 418184 - DNA, 25 bp, Homo sapien
tagggctgtgtacctgatcactggc

SEQ ID NO: 418185 - DNA, 25 bp, Homo sapien
taattcacttcgtttgaaccgcaaa

SEQ ID NO: 418186 - DNA, 25 bp, Homo sapien
tttaattcacttcgtttgaaccgca

SEQ ID NO: 418187 - DNA, 25 bp, Homo sapien
cgtttgaaccgcaaaaacaaagcag

SEQ ID NO: 418188 - DNA, 25 bp, Homo sapien
tcacttcgtttgaaccgcaaaaaca

SEQ ID NO: 418189 - DNA, 25 bp, Homo sapien
gcagggatgtttgactcatcagccc

SEQ ID NO: 418190 - DNA, 25 bp, Homo sapien
ctgcagggatgtttgactcatcagc

SEQ ID NO: 418191 - DNA, 25 bp, Homo sapien
gggatgtttgactcatcagccctct

SEQ ID NO: 418192 - DNA, 25 bp, Homo sapien
tgtttgactcatcagccctcttcct

SEQ ID NO: 418193 - DNA, 25 bp, Homo sapien
caaaattacacaaggctgaagctgg

SEQ ID NO: 418194 - DNA, 25 bp, Homo sapien
cagtgagttataatccttgaagggc

SEQ ID NO: 418195 - DNA, 25 bp, Homo sapien
aacagggagtcagaaagctattcca

SEQ ID NO: 418196 - DNA, 25 bp, Homo sapien
tgagacctaaagagcaccgtggact

SEQ ID NO: 418197 - DNA, 25 bp, Homo sapien
ggtaacccatgagatgggctctcca

SEQ ID NO: 418198 - DNA, 25 bp, Homo sapien
gatcaggtaacccatgagatgggct

SEQ ID NO: 418199 - DNA, 25 bp, Homo sapien
tctctgatcaggtaacccatgagat

SEQ ID NO: 418200 - DNA, 25 bp, Homo sapien
aacccatgagatgggctctccatga

SEQ ID NO: 418201 - DNA, 25 bp, Homo sapien
acttccagaagtttctcccttcatg

SEQ ID NO: 418202 - DNA, 25 bp, Homo sapien
cttccagaagtttctcccttcatgc

SEQ ID NO: 418203 - DNA, 25 bp, Homo sapien
caacttccagaagtttctcccttca

SEQ ID NO: 418204 - DNA, 25 bp, Homo sapien
taataccaacttccagaagtttctc

SEQ ID NO: 418205 - DNA, 25 bp, Homo sapien
tgctcctggaacagtcagacaaaca

SEQ ID NO: 418206 - DNA, 25 bp, Homo sapien
cctggaacagtcagacaaacattga

SEQ ID NO: 418207 - DNA, 25 bp, Homo sapien
acagtcagacaaacattgaaaggat

SEQ ID NO: 418208 - DNA, 25 bp, Homo sapien
gaacagtcagacaaacattgaaagg

SEQ ID NO: 418209 - DNA, 25 bp, Homo sapien
gcaggcataggtattacatggtcat

SEQ ID NO: 418210 - DNA, 25 bp, Homo sapien
caggcataggtattacatggtcata

SEQ ID NO: 418211 - DNA, 25 bp, Homo sapien
cataggtattacatggtcataagag

SEQ ID NO: 418212 - DNA, 25 bp, Homo sapien
ggcataggtattacatggtcataag

SEQ ID NO: 418213 - DNA, 25 bp, Homo sapien
cattaacgtctccaattcatcgttc

SEQ ID NO: 418214 - DNA, 25 bp, Homo sapien
gcattaacgtctccaattcatcgtt

SEQ ID NO: 418215 - DNA, 25 bp, Homo sapien
ttaacgtctccaattcatcgttctt

SEQ ID NO: 418216 - DNA, 25 bp, Homo sapien
taacgtctccaattcatcgttcttc

SEQ ID NO: 418217 - DNA, 25 bp, Homo sapien
cagctcacggtggctcactgcctca

SEQ ID NO: 418218 - DNA, 25 bp, Homo sapien
cagtttcccgcaacttggatttgat

SEQ ID NO: 418219 - DNA, 25 bp, Homo sapien
aagtcagtgcaggactactgggagc

SEQ ID NO: 418220 - DNA, 25 bp, Homo sapien
atcagtttcccgcaacttggatttg

SEQ ID NO: 418221 - DNA, 25 bp, Homo sapien
tggaaaacaagcaggcgctaagttt

SEQ ID NO: 418222 - DNA, 25 bp, Homo sapien
gcaggcgctaagtttgaatcttgaa

SEQ ID NO: 418223 - DNA, 25 bp, Homo sapien
gaatcttgaaacttcctagctttca

SEQ ID NO: 418224 - DNA, 25 bp, Homo sapien
gtttgaatcttgaaacttcctagct

SEQ ID NO: 418225 - DNA, 25 bp, Homo sapien
taaattcagacttgtggctctcatt

SEQ ID NO: 418226 - DNA, 25 bp, Homo sapien
ctataaattcagacttgtggctctc

SEQ ID NO: 418227 - DNA, 25 bp, Homo sapien
tataaattcagacttgtggctctca

SEQ ID NO: 418228 - DNA, 25 bp, Homo sapien
aattcagacttgtggctctcattca

SEQ ID NO: 418229 - DNA, 25 bp, Homo sapien
ttgagcccagcctgcccaacacaga

SEQ ID NO: 418230 - DNA, 25 bp, Homo sapien
gagcccagcctgcccaacacagaaa

SEQ ID NO: 418231 - DNA, 25 bp, Homo sapien
tttgagcccagcctgcccaacacag

SEQ ID NO: 418232 - DNA, 25 bp, Homo sapien
agtttgagcccagcctgcccaacac

SEQ ID NO: 418233 - DNA, 25 bp, Homo sapien
cagagttttcgtcttctgatccggc

SEQ ID NO: 418234 - DNA, 25 bp, Homo sapien
ctgatccggcttgttctcccttttc

SEQ ID NO: 418235 - DNA, 25 bp, Homo sapien
gaacttccgcagagttttcgtcttc

SEQ ID NO: 418236 - DNA, 25 bp, Homo sapien
tcctcttgattcagaacttccgcag

SEQ ID NO: 418237 - DNA, 25 bp, Homo sapien
tgtagtttcttttttctgaaataca

SEQ ID NO: 418238 - DNA, 25 bp, Homo sapien
aactgtaatttctgtggaaatgctc

SEQ ID NO: 418239 - DNA, 25 bp, Homo sapien
actgtaatttctgtggaaatgctca

SEQ ID NO: 418240 - DNA, 25 bp, Homo sapien
ctgtaatttctgtggaaatgctcaa

SEQ ID NO: 418241 - DNA, 25 bp, Homo sapien
tgtaatttctgtggaaatgctcaat

SEQ ID NO: 418242 - DNA, 25 bp, Homo sapien
tgagctaaatcatgatccctacagt

SEQ ID NO: 418243 - DNA, 25 bp, Homo sapien
aagctgcagctagacgagatcacgc

SEQ ID NO: 418244 - DNA, 25 bp, Homo sapien
tctacttctaaaacatacgagggca

SEQ ID NO: 418245 - DNA, 25 bp, Homo sapien
cagttttatcttgcagacctagtga

SEQ ID NO: 418246 - DNA, 25 bp, Homo sapien
gcacttccgcagtataaggttcatt

SEQ ID NO: 418247 - DNA, 25 bp, Homo sapien
cgcacttccgcagtataaggttcat

SEQ ID NO: 418248 - DNA, 25 bp, Homo sapien
cacttccgcagtataaggttcatta

SEQ ID NO: 418249 - DNA, 25 bp, Homo sapien
acttccgcagtataaggttcattat

SEQ ID NO: 418250 - DNA, 25 bp, Homo sapien
tcagtccacagaccgcgccgggaag

SEQ ID NO: 418251 - DNA, 25 bp, Homo sapien
ttcggtgcgggtcccagcgctcagt

SEQ ID NO: 418252 - DNA, 25 bp, Homo sapien
tccagctccagaggcgaacggcggc

SEQ ID NO: 418253 - DNA, 25 bp, Homo sapien
aacgaaagtcggcatgtccagctcc

SEQ ID NO: 418254 - DNA, 25 bp, Homo sapien
tgaggccgtcctacggtccgacaca

SEQ ID NO: 418255 - DNA, 25 bp, Homo sapien
catagtcctcaaactctagccgtga

SEQ ID NO: 418256 - DNA, 25 bp, Homo sapien
agccataggccagccaggcgagcat

SEQ ID NO: 418257 - DNA, 25 bp, Homo sapien
tgctgaggaccacgtgaagcccggt

SEQ ID NO: 418258 - DNA, 25 bp, Homo sapien
caacatgcgctaagtgtaggactcc

SEQ ID NO: 418259 - DNA, 25 bp, Homo sapien
agcgcgccggagcaacatgcgctaa

SEQ ID NO: 418260 - DNA, 25 bp, Homo sapien
caagatgagaggttactgcagcgca

SEQ ID NO: 418261 - DNA, 25 bp, Homo sapien
gcacacgataatgcctgccctggag

SEQ ID NO: 418262 - DNA, 25 bp, Homo sapien
tgctcccgttacccgggcaactgga

SEQ ID NO: 418263 - DNA, 25 bp, Homo sapien
gactctgctcccgttacccgggcaa

SEQ ID NO: 418264 - DNA, 25 bp, Homo sapien
tctgctcccgttacccgggcaactg

SEQ ID NO: 418265 - DNA, 25 bp, Homo sapien
ccgccgactctgctcccgttacccg

SEQ ID NO: 418266 - DNA, 25 bp, Homo sapien
gcgcctgcctggtgtccttaagcaa

SEQ ID NO: 418267 - DNA, 25 bp, Homo sapien
aaaggaaccggccaaaactgcagag

SEQ ID NO: 418268 - DNA, 25 bp, Homo sapien
ccttcttccaatagcgggagctcga

SEQ ID NO: 418269 - DNA, 25 bp, Homo sapien
agcaagctgcgcactgaaaagccgg

SEQ ID NO: 418270 - DNA, 25 bp, Homo sapien
tctcagggaactagccatcagtcct

SEQ ID NO: 418271 - DNA, 25 bp, Homo sapien
gaaacttatcggatcaccacatctg

SEQ ID NO: 418272 - DNA, 25 bp, Homo sapien
cagtcctcccagatagcaccaagga

SEQ ID NO: 418273 - DNA, 25 bp, Homo sapien
acaattgcctgatgcctgttgaccc

SEQ ID NO: 418274 - DNA, 25 bp, Homo sapien
caccagctggacatcgacgatctgc

SEQ ID NO: 418275 - DNA, 25 bp, Homo sapien
ggcctggacgtgctggtcaacaacg

SEQ ID NO: 418276 - DNA, 25 bp, Homo sapien
acgtggtgctcacggcgcgggacgt

SEQ ID NO: 418277 - DNA, 25 bp, Homo sapien
aacaacgcgggcatcgccttcaagg

SEQ ID NO: 418278 - DNA, 25 bp, Homo sapien
gacatacgtggttccgtctttattg

SEQ ID NO: 418279 - DNA, 25 bp, Homo sapien
tccgtctttattgctaaggatttct

SEQ ID NO: 418280 - DNA, 25 bp, Homo sapien
tcttataccaggtgataggtacatg

SEQ ID NO: 418281 - DNA, 25 bp, Homo sapien
gctaaggatttctttcttataccag

SEQ ID NO: 418282 - DNA, 25 bp, Homo sapien
ctttccgcatatctcccagactgat

SEQ ID NO: 418283 - DNA, 25 bp, Homo sapien
atctcccagactgatcgtgctggag

SEQ ID NO: 418284 - DNA, 25 bp, Homo sapien
ctttttcttgatccggcagcagact

SEQ ID NO: 418285 - DNA, 25 bp, Homo sapien
ttcttgatccggcagcagactcatc

SEQ ID NO: 418286 - DNA, 25 bp, Homo sapien
cggcagcagactcatccaccttgtc

SEQ ID NO: 418287 - DNA, 25 bp, Homo sapien
ttgatccggcagcagactcatccac

SEQ ID NO: 418288 - DNA, 25 bp, Homo sapien
tgaaacacgcttgctgaccagcagt

SEQ ID NO: 418289 - DNA, 25 bp, Homo sapien
aaatgggtcgtcatctcaggaatcc

SEQ ID NO: 418290 - DNA, 25 bp, Homo sapien
agaacatgcctcacctgcaacttga

SEQ ID NO: 418291 - DNA, 25 bp, Homo sapien
cacttgtggtacaggttcatttgcc

SEQ ID NO: 418292 - DNA, 25 bp, Homo sapien
caaagtctacacctttattgtatca

SEQ ID NO: 418293 - DNA, 25 bp, Homo sapien
aaacatactaagagaggctggttgt

SEQ ID NO: 418294 - DNA, 25 bp, Homo sapien
tataaatcctatcaagaatcaaact

SEQ ID NO: 418295 - DNA, 25 bp, Homo sapien
gccagtaagatctacaacacagatg

SEQ ID NO: 418296 - DNA, 25 bp, Homo sapien
cacttttaaagaacatcctggtccg

SEQ ID NO: 418297 - DNA, 25 bp, Homo sapien
tggtccggctatcattacacacacg

SEQ ID NO: 418298 - DNA, 25 bp, Homo sapien
gaggaggtacattacactcgccaga

SEQ ID NO: 418299 - DNA, 25 bp, Homo sapien
cctttccaggaagagacgcatattt

SEQ ID NO: 418300 - DNA, 25 bp, Homo sapien
catagacgggcaagtggagccaaca

SEQ ID NO: 418301 - DNA, 25 bp, Homo sapien
tcatatccgtgtccgtgagcaggtg

SEQ ID NO: 418302 - DNA, 25 bp, Homo sapien
tggtcaagatccataaggccgcccg

SEQ ID NO: 418303 - DNA, 25 bp, Homo sapien
gccaaacttatgtgaccctgcagag

SEQ ID NO: 418304 - DNA, 25 bp, Homo sapien
ggagactgacgctacagtgagccac

SEQ ID NO: 418305 - DNA, 25 bp, Homo sapien
aacaacgcggccgtcgccttcaaga

SEQ ID NO: 418306 - DNA, 25 bp, Homo sapien
caactggacatcgacgacttgcaga

SEQ ID NO: 418307 - DNA, 25 bp, Homo sapien
cgtcgccttcaagagtaggtgcagg

SEQ ID NO: 418308 - DNA, 25 bp, Homo sapien
gctcaacgtactggtcaacaacgcg

SEQ ID NO: 418309 - DNA, 25 bp, Homo sapien
aagccaagtgttctcaaggtgtggc

SEQ ID NO: 418310 - DNA, 25 bp, Homo sapien
aagaagtggtagtcaaagccaagtg

SEQ ID NO: 418311 - DNA, 25 bp, Homo sapien
gccaagtgttctcaaggtgtggctg

SEQ ID NO: 418312 - DNA, 25 bp, Homo sapien
gtttaagaagtggtagtcaaagcca

SEQ ID NO: 418313 - DNA, 25 bp, Homo sapien
tgatgacgcatctggctgacgaggc

SEQ ID NO: 418314 - DNA, 25 bp, Homo sapien
ttgtagccgccaagtttctgagaac

SEQ ID NO: 418315 - DNA, 25 bp, Homo sapien
gaggtgtgccctcagatcaaagagg

SEQ ID NO: 418316 - DNA, 25 bp, Homo sapien
tccatcagtgaagtcagtaagtcct

SEQ ID NO: 418317 - DNA, 25 bp, Homo sapien
tcctggccaggcgtctggatgagaa

SEQ ID NO: 418318 - DNA, 25 bp, Homo sapien
agaggaaagctgacaggattctggt

SEQ ID NO: 418319 - DNA, 25 bp, Homo sapien
ctgacaggattctggtgaatgcgtg

SEQ ID NO: 418320 - DNA, 25 bp, Homo sapien
cggtcttatcgaggatcctggccag

SEQ ID NO: 418321 - DNA, 25 bp, Homo sapien
gactgcacttagaaccactggtgta

SEQ ID NO: 418322 - DNA, 25 bp, Homo sapien
caagtggtttcagaactatggagcc

SEQ ID NO: 418323 - DNA, 25 bp, Homo sapien
aactggtaaacgtctgcttcggagc

SEQ ID NO: 418324 - DNA, 25 bp, Homo sapien
gcccaggaccagtgaagacagacat

SEQ ID NO: 418325 - DNA, 25 bp, Homo sapien
tagaagaaatgtactcgcaaaggct

SEQ ID NO: 418326 - DNA, 25 bp, Homo sapien
aagggcctgcttgtgtgttctacca

SEQ ID NO: 418327 - DNA, 25 bp, Homo sapien
ggaatttacattccggctggccaca

SEQ ID NO: 418328 - DNA, 25 bp, Homo sapien
gaatgtttacgaggttgcccagcca

SEQ ID NO: 418329 - DNA, 25 bp, Homo sapien
caaattgaccatgagaggatttaca

SEQ ID NO: 418330 - DNA, 25 bp, Homo sapien
tgctaactatggctcaatcttttcg

SEQ ID NO: 418331 - DNA, 25 bp, Homo sapien
gtgatagatccactttggaagctga

SEQ ID NO: 418332 - DNA, 25 bp, Homo sapien
gctgataatatacccctcccctaga

SEQ ID NO: 418333 - DNA, 25 bp, Homo sapien
gagaagctaaggaagactcccgctc

SEQ ID NO: 418334 - DNA, 25 bp, Homo sapien
ccatggcggagaagctaaggaagac

SEQ ID NO: 418335 - DNA, 25 bp, Homo sapien
ggagcagcccggctacgaagcgaca

SEQ ID NO: 418336 - DNA, 25 bp, Homo sapien
cgaagcgacacccatggcggagaag

SEQ ID NO: 418337 - DNA, 25 bp, Homo sapien
gacctgtaaatgtcacggctccgtg

SEQ ID NO: 418338 - DNA, 25 bp, Homo sapien
tggttttacagctctatctcaggaa

SEQ ID NO: 418339 - DNA, 25 bp, Homo sapien
gattgcattcgcagacttgctctga

SEQ ID NO: 418340 - DNA, 25 bp, Homo sapien
cagtagaaccgcattgagtcccaca

SEQ ID NO: 418341 - DNA, 25 bp, Homo sapien
gctccttcttcctttgcaattcggt

SEQ ID NO: 418342 - DNA, 25 bp, Homo sapien
aagctccttcttcctttgcaattcg

SEQ ID NO: 418343 - DNA, 25 bp, Homo sapien
tccttcttcctttgcaattcggtct

SEQ ID NO: 418344 - DNA, 25 bp, Homo sapien
cttcttcctttgcaattcggtcttt

SEQ ID NO: 418345 - DNA, 25 bp, Homo sapien
gagcccatcgtctggtctgcaccag

SEQ ID NO: 418346 - DNA, 25 bp, Homo sapien
tgtgcagagaatgagcactcgcttc

SEQ ID NO: 418347 - DNA, 25 bp, Homo sapien
tgcaccagcaaagatgtgcagagaa

SEQ ID NO: 418348 - DNA, 25 bp, Homo sapien
taacagagttattggtcacttcacc

SEQ ID NO: 418349 - DNA, 25 bp, Homo sapien
tcggtttgctgtcctcagtaaggta

SEQ ID NO: 418350 - DNA, 25 bp, Homo sapien
cggtttgctgtcctcagtaaggtag

SEQ ID NO: 418351 - DNA, 25 bp, Homo sapien
cgtccagcccaaacgcttggttcac

SEQ ID NO: 418352 - DNA, 25 bp, Homo sapien
tcgtccagcccaaacgcttggttca

SEQ ID NO: 418353 - DNA, 25 bp, Homo sapien
ctcgtccagcccaaacgcttggttc

SEQ ID NO: 418354 - DNA, 25 bp, Homo sapien
ttctcagccatggtgcctccgttca

SEQ ID NO: 418355 - DNA, 25 bp, Homo sapien
gcttctcagccatggtgcctccgtt

SEQ ID NO: 418356 - DNA, 25 bp, Homo sapien
agcttctcagccatggtgcctccgt

SEQ ID NO: 418357 - DNA, 25 bp, Homo sapien
ccagcttctcagccatggtgcctcc

SEQ ID NO: 418358 - DNA, 25 bp, Homo sapien
ttggatctccatcagctgggccttc

SEQ ID NO: 418359 - DNA, 25 bp, Homo sapien
tggatctccatcagctgggccttct

SEQ ID NO: 418360 - DNA, 25 bp, Homo sapien
ggatctccatcagctgggccttctt

SEQ ID NO: 418361 - DNA, 25 bp, Homo sapien
agcgaggcgggtgacttggcagtgc

SEQ ID NO: 418362 - DNA, 25 bp, Homo sapien
gcgaggcgggtgacttggcagtgct

SEQ ID NO: 418363 - DNA, 25 bp, Homo sapien
gcagcgaggcgggtgacttggcagt

SEQ ID NO: 418364 - DNA, 25 bp, Homo sapien
cagcgaggcgggtgacttggcagtg

SEQ ID NO: 418365 - DNA, 25 bp, Homo sapien
gagaaacaccttttgcactcatcgt

SEQ ID NO: 418366 - DNA, 25 bp, Homo sapien
accttttgcactcatcgttgatgtg

SEQ ID NO: 418367 - DNA, 25 bp, Homo sapien
ttatgccggttgttagagaaacacc

SEQ ID NO: 418368 - DNA, 25 bp, Homo sapien
tatgccggttgttagagaaacacct

SEQ ID NO: 418369 - DNA, 25 bp, Homo sapien
tcaaggggtttccacgtagcccgca

SEQ ID NO: 418370 - DNA, 25 bp, Homo sapien
ggtttccacgtagcccgcaatgccc

SEQ ID NO: 418371 - DNA, 25 bp, Homo sapien
ggggtttccacgtagcccgcaatgc

SEQ ID NO: 418372 - DNA, 25 bp, Homo sapien
tttccacgtagcccgcaatgcccac

SEQ ID NO: 418373 - DNA, 25 bp, Homo sapien
cataggtggtgtctccacagtagtc

SEQ ID NO: 418374 - DNA, 25 bp, Homo sapien
ggtgtctccacagtagtcatggcct

SEQ ID NO: 418375 - DNA, 25 bp, Homo sapien
accaccataggtggtgtctccacag

SEQ ID NO: 418376 - DNA, 25 bp, Homo sapien
tccacagtagtcatggcctctacca

SEQ ID NO: 418377 - DNA, 25 bp, Homo sapien
cttcaccttcccacgttgcctattt

SEQ ID NO: 418378 - DNA, 25 bp, Homo sapien
tgcgtgctaaggagttgacgtgcat

SEQ ID NO: 418379 - DNA, 25 bp, Homo sapien
tcactgcgtgctaaggagttgacgt

SEQ ID NO: 418380 - DNA, 25 bp, Homo sapien
cactgcgtgctaaggagttgacgtg

SEQ ID NO: 418381 - DNA, 25 bp, Homo sapien
actgcgtgctaaggagttgacgtgc

SEQ ID NO: 418382 - DNA, 25 bp, Homo sapien
cctgccttggtctcccagagtgctg

SEQ ID NO: 418383 - DNA, 25 bp, Homo sapien
gagacagagtcatactctgtcgtcc

SEQ ID NO: 418384 - DNA, 25 bp, Homo sapien
cacctgccttggtctcccagagtgc

SEQ ID NO: 418385 - DNA, 25 bp, Homo sapien
tgccttggtctcccagagtgctgcg

SEQ ID NO: 418386 - DNA, 25 bp, Homo sapien
tcagaacaggctatcgtggagagct

SEQ ID NO: 418387 - DNA, 25 bp, Homo sapien
cagctgccgagagatggttctttca

SEQ ID NO: 418388 - DNA, 25 bp, Homo sapien
gcaggtagcttattccagggacagg

SEQ ID NO: 418389 - DNA, 25 bp, Homo sapien
gaaaaagcactaggaggaagaccgc

SEQ ID NO: 418390 - DNA, 25 bp, Homo sapien
ccttggagttttcctagccgtggct

SEQ ID NO: 418391 - DNA, 25 bp, Homo sapien
aagtcaccaagaccgaccatgaggg

SEQ ID NO: 418392 - DNA, 25 bp, Homo sapien
cagagaataagacataccccactag

SEQ ID NO: 418393 - DNA, 25 bp, Homo sapien
aatgtcagcgacattgccaaatggg

SEQ ID NO: 418394 - DNA, 25 bp, Homo sapien
tgaagggcatcacggaaaagtctcg

SEQ ID NO: 418395 - DNA, 25 bp, Homo sapien
tggtggcctttaccactgatccaag

SEQ ID NO: 418396 - DNA, 25 bp, Homo sapien
aaaagtctcgtaaggtggaattgcg

SEQ ID NO: 418397 - DNA, 25 bp, Homo sapien
aaaaatgtgctgtccctcttgtgtc

SEQ ID NO: 418398 - DNA, 25 bp, Homo sapien
tggacgttcagaaaccctggcttaa

SEQ ID NO: 418399 - DNA, 25 bp, Homo sapien
acaggtgccccgacaacaaagactt

SEQ ID NO: 418400 - DNA, 25 bp, Homo sapien
gcctctcagggtacatttgacaata

SEQ ID NO: 418401 - DNA, 25 bp, Homo sapien
tttgtaagaaggcaacaactagctc

SEQ ID NO: 418402 - DNA, 25 bp, Homo sapien
tagtagtaattgcaggcggcatggc

SEQ ID NO: 418403 - DNA, 25 bp, Homo sapien
ggcatggcccaagcattaggtctgt

SEQ ID NO: 418404 - DNA, 25 bp, Homo sapien
ttttcgagtgccaacctggagtcac

SEQ ID NO: 418405 - DNA, 25 bp, Homo sapien
tgacagcaaacagagtggacctagt

SEQ ID NO: 418406 - DNA, 25 bp, Homo sapien
actccgcctcccggcttcaagcaat

SEQ ID NO: 418407 - DNA, 25 bp, Homo sapien
aactccgcctcccggcttcaagcaa

SEQ ID NO: 418408 - DNA, 25 bp, Homo sapien
tggagtgcagtgacggcctctcggc

SEQ ID NO: 418409 - DNA, 25 bp, Homo sapien
gtgcagtgacggcctctcggctcac

SEQ ID NO: 418410 - DNA, 25 bp, Homo sapien
ttgaacctgggaggcgggggttgca

SEQ ID NO: 418411 - DNA, 25 bp, Homo sapien
caggaggctgagacaaaggaatcgc

SEQ ID NO: 418412 - DNA, 25 bp, Homo sapien
gggtgtcaaagcgagactctgtctg

SEQ ID NO: 418413 - DNA, 25 bp, Homo sapien
gtgagctaagattgcaccactgcac

SEQ ID NO: 418414 - DNA, 25 bp, Homo sapien
ggtgaccctggactctaatactgag

SEQ ID NO: 418415 - DNA, 25 bp, Homo sapien
gcctgacacttgcaaggaagccatg

SEQ ID NO: 418416 - DNA, 25 bp, Homo sapien
tattgagaatttatcgtcctgggtc

SEQ ID NO: 418417 - DNA, 25 bp, Homo sapien
gaatgtgccgctgtgttaaagtgaa

SEQ ID NO: 418418 - DNA, 25 bp, Homo sapien
tcagacaatgtgccgaccattgtaa

SEQ ID NO: 418419 - DNA, 25 bp, Homo sapien
atcacactaatgaactgcagatgaa

SEQ ID NO: 418420 - DNA, 25 bp, Homo sapien
caatgtgccgaccattgtaacaaag

SEQ ID NO: 418421 - DNA, 25 bp, Homo sapien
tcacactaatgaactgcagatgaat

SEQ ID NO: 418422 - DNA, 25 bp, Homo sapien
ccaggttggagttcacccaggttgg

SEQ ID NO: 418423 - DNA, 25 bp, Homo sapien
tgtggctaaatgcaaggtcagagct

SEQ ID NO: 418424 - DNA, 25 bp, Homo sapien
taactgtgataggaggatgatttaa

SEQ ID NO: 418425 - DNA, 25 bp, Homo sapien
tcagacggtaaccaggagcaccagt

SEQ ID NO: 418426 - DNA, 25 bp, Homo sapien
cagtaaaggtaatgtcagctctcca

SEQ ID NO: 418427 - DNA, 25 bp, Homo sapien
ttctttctaccccatctcacactcc

SEQ ID NO: 418428 - DNA, 25 bp, Homo sapien
tttctaccccatctcacactcctct

SEQ ID NO: 418429 - DNA, 25 bp, Homo sapien
cgcccagccctgttccttctttcta

SEQ ID NO: 418430 - DNA, 25 bp, Homo sapien
ttccttctttctaccccatctcaca

SEQ ID NO: 418431 - DNA, 25 bp, Homo sapien
aaccagatagagaccttgaatagcc

SEQ ID NO: 418432 - DNA, 25 bp, Homo sapien
gagtcatggccccttgaaccagata

SEQ ID NO: 418433 - DNA, 25 bp, Homo sapien
tctgatgtaggaagtatcaccctca

SEQ ID NO: 418434 - DNA, 25 bp, Homo sapien
ttggtcatccagttgacgcagggca

SEQ ID NO: 418435 - DNA, 25 bp, Homo sapien
cacaaggccgtaccggctcttgagc

SEQ ID NO: 418436 - DNA, 25 bp, Homo sapien
gtgtaacaggcatccccagcttctc

SEQ ID NO: 418437 - DNA, 25 bp, Homo sapien
tccttctgcacatccgtgtaacagg

SEQ ID NO: 418438 - DNA, 25 bp, Homo sapien
cgaagggcacaaggccgtaccggct

SEQ ID NO: 418439 - DNA, 25 bp, Homo sapien
ccttctcgcgcacgtgggtcggaag

SEQ ID NO: 418440 - DNA, 25 bp, Homo sapien
cgctgctggccagccgcagcccgca

SEQ ID NO: 418441 - DNA, 25 bp, Homo sapien
tcgtgtccgcccagccggacaaccg

SEQ ID NO: 418442 - DNA, 25 bp, Homo sapien
tagatgcacccgtcgccctcccagc

SEQ ID NO: 418443 - DNA, 25 bp, Homo sapien
tcctggaaaggcacgctggttggtt

SEQ ID NO: 418444 - DNA, 25 bp, Homo sapien
tcttcccagtactttcatcccatgt

SEQ ID NO: 418445 - DNA, 25 bp, Homo sapien
cctgagtcctagctacagtctggtg

SEQ ID NO: 418446 - DNA, 25 bp, Homo sapien
ctgagtgggccagactgctcctgct

SEQ ID NO: 418447 - DNA, 25 bp, Homo sapien
ttttttctgcgcaattcacatccga

SEQ ID NO: 418448 - DNA, 25 bp, Homo sapien
gactggagttcaccggtctcgggta

SEQ ID NO: 418449 - DNA, 25 bp, Homo sapien
ttcgttaaggtttcacatggacact

SEQ ID NO: 418450 - DNA, 25 bp, Homo sapien
catccgaccaggtcaagtgactgga

SEQ ID NO: 418451 - DNA, 25 bp, Homo sapien
tccagctgggtgtcgagacgggtac

SEQ ID NO: 418452 - DNA, 25 bp, Homo sapien
tcaaactctagatccccgagtctcg

SEQ ID NO: 418453 - DNA, 25 bp, Homo sapien
tagatccccgagtctcgagctccag

SEQ ID NO: 418454 - DNA, 25 bp, Homo sapien
taaccagtcaggcaattcatcttcc

SEQ ID NO: 418455 - DNA, 25 bp, Homo sapien
gcgttccgtcgcctctgcattgtgt

SEQ ID NO: 418456 - DNA, 25 bp, Homo sapien
tcccgtcggcggaacagctcggctg

SEQ ID NO: 418457 - DNA, 25 bp, Homo sapien
ggccatctcgctcccgtcggcggaa

SEQ ID NO: 418458 - DNA, 25 bp, Homo sapien
ttctgttttgcttcggggcgggcca

SEQ ID NO: 418459 - DNA, 25 bp, Homo sapien
ctcccagcagctgtcgtccgcgggc

SEQ ID NO: 418460 - DNA, 25 bp, Homo sapien
ctcggcgggagatcggtctgctctc

SEQ ID NO: 418461 - DNA, 25 bp, Homo sapien
aggcctcggcgggagatcggtctgc

SEQ ID NO: 418462 - DNA, 25 bp, Homo sapien
agcagctgtcgtccgcgggcgaggc

SEQ ID NO: 418463 - DNA, 25 bp, Homo sapien
ttccgcgtccagaaacgccggcggc

SEQ ID NO: 418464 - DNA, 25 bp, Homo sapien
tccagaaacgccggcggcctcgacg

SEQ ID NO: 418465 - DNA, 25 bp, Homo sapien
cagaaacgccggcggcctcgacgtc

SEQ ID NO: 418466 - DNA, 25 bp, Homo sapien
cgcgtccagaaacgccggcggcctc

SEQ ID NO: 418467 - DNA, 25 bp, Homo sapien
tggagtcaggatgagtgtgcctgat

SEQ ID NO: 418468 - DNA, 25 bp, Homo sapien
ctgcgggcgagtggagtcaggatga

SEQ ID NO: 418469 - DNA, 25 bp, Homo sapien
tgtgcctgatgcctgtcagtgcctg

SEQ ID NO: 418470 - DNA, 25 bp, Homo sapien
gtcaggatgagtgtgcctgatgcct

SEQ ID NO: 418471 - DNA, 25 bp, Homo sapien
ctctcctctttatcccgcgttgcgt

SEQ ID NO: 418472 - DNA, 25 bp, Homo sapien
cctagatcgctgagctcgagctctc

SEQ ID NO: 418473 - DNA, 25 bp, Homo sapien
ttatcccgcgttgcgtctgttttgg

SEQ ID NO: 418474 - DNA, 25 bp, Homo sapien
ttcgagttcttggaaaccctgtgaa

SEQ ID NO: 418475 - DNA, 25 bp, Homo sapien
catactattaggttgtagttcctta

SEQ ID NO: 418476 - DNA, 25 bp, Homo sapien
catcctcaggccaagtttagtttag

SEQ ID NO: 418477 - DNA, 25 bp, Homo sapien
gttccttatgtactgactcgagtat

SEQ ID NO: 418478 - DNA, 25 bp, Homo sapien
gactcgagtatggaggcatcctcag

SEQ ID NO: 418479 - DNA, 25 bp, Homo sapien
gataaaaattgcatagcataacagc

SEQ ID NO: 418480 - DNA, 25 bp, Homo sapien
gattagtcactgttcagctttctct

SEQ ID NO: 418481 - DNA, 25 bp, Homo sapien
tcacatggatgtcagattagtcact

SEQ ID NO: 418482 - DNA, 25 bp, Homo sapien
gcatagcataacagctattcacatg

SEQ ID NO: 418483 - DNA, 25 bp, Homo sapien
gtgggagagttaaggataccagcca

SEQ ID NO: 418484 - DNA, 25 bp, Homo sapien
cacacacggcaagctacattactaa

SEQ ID NO: 418485 - DNA, 25 bp, Homo sapien
accaagtgggttgtgttctaagaca

SEQ ID NO: 418486 - DNA, 25 bp, Homo sapien
gagaaagcccttatggtcatataca

SEQ ID NO: 418487 - DNA, 25 bp, Homo sapien
gatgttcagcttgtaccagtagttg

SEQ ID NO: 418488 - DNA, 25 bp, Homo sapien
gctactcaggatgctcgaggcagaa

SEQ ID NO: 418489 - DNA, 25 bp, Homo sapien
gcctactggttgagcattgcaaatc

SEQ ID NO: 418490 - DNA, 25 bp, Homo sapien
aaagatccacgtataactcctcaga

SEQ ID NO: 418491 - DNA, 25 bp, Homo sapien
aattcctgcaacatccatatcttga

SEQ ID NO: 418492 - DNA, 25 bp, Homo sapien
cttcagttgatttcctcaggtgtgg

SEQ ID NO: 418493 - DNA, 25 bp, Homo sapien
agtttgttgtctgggcactgcttct

SEQ ID NO: 418494 - DNA, 25 bp, Homo sapien
caggtgtggtgtctgttcgctcttg

SEQ ID NO: 418495 - DNA, 25 bp, Homo sapien
cgatgagaatgtacagggaataaac

SEQ ID NO: 418496 - DNA, 25 bp, Homo sapien
cttgaaggatgggtacgatgagaat

SEQ ID NO: 418497 - DNA, 25 bp, Homo sapien
taaacatttactcagtgtagctaga

SEQ ID NO: 418498 - DNA, 25 bp, Homo sapien
catttttgtaataggccttgaagga

SEQ ID NO: 418499 - DNA, 25 bp, Homo sapien
gactgagttatctggtcttagtgga

SEQ ID NO: 418500 - DNA, 25 bp, Homo sapien
cagtttataccggtgaggatggaaa

SEQ ID NO: 418501 - DNA, 25 bp, Homo sapien
tctggactgagttatctggtcttag

SEQ ID NO: 418502 - DNA, 25 bp, Homo sapien
aagatctgcagtttataccggtgag

SEQ ID NO: 418503 - DNA, 25 bp, Homo sapien
tgacagtgaaccttgtggccagact

SEQ ID NO: 418504 - DNA, 25 bp, Homo sapien
ttttcagcttgaaacggagactttc

SEQ ID NO: 418505 - DNA, 25 bp, Homo sapien
tcatcatcccgatgcgaccagggaa

SEQ ID NO: 418506 - DNA, 25 bp, Homo sapien
gaaatactgcagctacccagactga

SEQ ID NO: 418507 - DNA, 25 bp, Homo sapien
caagagcttttcaggttgcccctaa

SEQ ID NO: 418508 - DNA, 25 bp, Homo sapien
gtaacactcctgatacaactctggt

SEQ ID NO: 418509 - DNA, 25 bp, Homo sapien
ttttctctaagtcgagggctatgcc

SEQ ID NO: 418510 - DNA, 25 bp, Homo sapien
tgttgtgctgagattgccaatcacg

SEQ ID NO: 418511 - DNA, 25 bp, Homo sapien
aagagatggctttctattaagtata

SEQ ID NO: 418512 - DNA, 25 bp, Homo sapien
tatgtatgcttaatacgtgtcggtc

SEQ ID NO: 418513 - DNA, 25 bp, Homo sapien
cgtgtcggtcatatacagtattgaa

SEQ ID NO: 418514 - DNA, 25 bp, Homo sapien
tatttgcctgataaagtaattgaaa

SEQ ID NO: 418515 - DNA, 25 bp, Homo sapien
gaacaacctgatgtctccttccgtc

SEQ ID NO: 418516 - DNA, 25 bp, Homo sapien
gtctccttccgtcatcaaatattat

SEQ ID NO: 418517 - DNA, 25 bp, Homo sapien
tttcttaatacccagaacaacctga

SEQ ID NO: 418518 - DNA, 25 bp, Homo sapien
ttaatacccagaacaacctgatgtc

SEQ ID NO: 418519 - DNA, 25 bp, Homo sapien
attctttctttgaaatcactctggt

SEQ ID NO: 418520 - DNA, 25 bp, Homo sapien
tctttctttgaaatcactctggtct

SEQ ID NO: 418521 - DNA, 25 bp, Homo sapien
tttctttgaaatcactctggtctct

SEQ ID NO: 418522 - DNA, 25 bp, Homo sapien
tcaagtgtcatcacagattctttct

SEQ ID NO: 418523 - DNA, 25 bp, Homo sapien
tcagagcccttggtgagtctgtata

SEQ ID NO: 418524 - DNA, 25 bp, Homo sapien
tgagtctgtatagtctgggatgaag

SEQ ID NO: 418525 - DNA, 25 bp, Homo sapien
tccctcgagttcctccttgtctcct

SEQ ID NO: 418526 - DNA, 25 bp, Homo sapien
tgaagtgagggctggtgtcagcccc

SEQ ID NO: 418527 - DNA, 25 bp, Homo sapien
ggtattgctaatccttctctcctac

SEQ ID NO: 418528 - DNA, 25 bp, Homo sapien
gggcggtattgctaatccttctctc

SEQ ID NO: 418529 - DNA, 25 bp, Homo sapien
tagggggcggtattgctaatccttc

SEQ ID NO: 418530 - DNA, 25 bp, Homo sapien
cactagggggcggtattgctaatcc

SEQ ID NO: 418531 - DNA, 25 bp, Homo sapien
tggttgtcgttgacaccagaggcat

SEQ ID NO: 418532 - DNA, 25 bp, Homo sapien
cctggcggccccttatcagataggc

SEQ ID NO: 418533 - DNA, 25 bp, Homo sapien
gaatcctcgatattcaaggccgcct

SEQ ID NO: 418534 - DNA, 25 bp, Homo sapien
tcagataggcagctgttcccgtgac

SEQ ID NO: 418535 - DNA, 25 bp, Homo sapien
tgcctggctggccaggtggcctgcc

SEQ ID NO: 418536 - DNA, 25 bp, Homo sapien
cccaccccctagcagcagctctctc

SEQ ID NO: 418537 - DNA, 25 bp, Homo sapien
ctgcccaccccctagcagcagctct

SEQ ID NO: 418538 - DNA, 25 bp, Homo sapien
gtggcctgcccaccccctagcagca

SEQ ID NO: 418539 - DNA, 25 bp, Homo sapien
gaaacgtccagtgatgtaaggcgga

SEQ ID NO: 418540 - DNA, 25 bp, Homo sapien
tgtgtggcacggcttctacagctga

SEQ ID NO: 418541 - DNA, 25 bp, Homo sapien
tacagctgacaatgctgagtgaggc

SEQ ID NO: 418542 - DNA, 25 bp, Homo sapien
aggctgctatgtgtggcacggcttc

SEQ ID NO: 418543 - DNA, 25 bp, Homo sapien
ctggctaggcatggcccctctgaag

SEQ ID NO: 418544 - DNA, 25 bp, Homo sapien
gaaggttcctttgccttggctggtg

SEQ ID NO: 418545 - DNA, 25 bp, Homo sapien
acggcaccagcattagctcccagat

SEQ ID NO: 418546 - DNA, 25 bp, Homo sapien
gctgctgaagttagccgcacggcac

SEQ ID NO: 418547 - DNA, 25 bp, Homo sapien
ccctcctcgaggatggatttttctt

SEQ ID NO: 418548 - DNA, 25 bp, Homo sapien
ccaggagctcaagtgaagctggacc

SEQ ID NO: 418549 - DNA, 25 bp, Homo sapien
gaagctggaccaaactcactccatc

SEQ ID NO: 418550 - DNA, 25 bp, Homo sapien
gaacgtgggaacatagcgagccaga

SEQ ID NO: 418551 - DNA, 25 bp, Homo sapien
caacccacaggggaccatggagaca

SEQ ID NO: 418552 - DNA, 25 bp, Homo sapien
tctggcttatcttttctgagctcag

SEQ ID NO: 418553 - DNA, 25 bp, Homo sapien
tggactgggtcactccaacccacag

SEQ ID NO: 418554 - DNA, 25 bp, Homo sapien
tgagctcagctctaccatgagaggt

SEQ ID NO: 418555 - DNA, 25 bp, Homo sapien
aaccgcttcggcagcagaggaaaca

SEQ ID NO: 418556 - DNA, 25 bp, Homo sapien
tggctacaccgggtctgtctggtct

SEQ ID NO: 418557 - DNA, 25 bp, Homo sapien
aggccagggcttcagattagtcagg

SEQ ID NO: 418558 - DNA, 25 bp, Homo sapien
tggcctctgagtcattagcgttgtt

SEQ ID NO: 418559 - DNA, 25 bp, Homo sapien
caatctggccgcctagaggctgcgt

SEQ ID NO: 418560 - DNA, 25 bp, Homo sapien
tagaggctgcgtgaagctcgtgacc

SEQ ID NO: 418561 - DNA, 25 bp, Homo sapien
gaagaaacacaatctggccgcctag

SEQ ID NO: 418562 - DNA, 25 bp, Homo sapien
ggtggaagaaacacaatctggccgc

SEQ ID NO: 418563 - DNA, 25 bp, Homo sapien
attcagtgtagccggttcattagga

SEQ ID NO: 418564 - DNA, 25 bp, Homo sapien
ttcattcagtgtagccggttcatta

SEQ ID NO: 418565 - DNA, 25 bp, Homo sapien
tcattcagtgtagccggttcattag

SEQ ID NO: 418566 - DNA, 25 bp, Homo sapien
tcagtgtagccggttcattaggaac

SEQ ID NO: 418567 - DNA, 25 bp, Homo sapien
cctgaattcctgacacagtcgtcat

SEQ ID NO: 418568 - DNA, 25 bp, Homo sapien
gcttagaataaacctgaattcctga

SEQ ID NO: 418569 - DNA, 25 bp, Homo sapien
aacctgaattcctgacacagtcgtc

SEQ ID NO: 418570 - DNA, 25 bp, Homo sapien
cttctcagtgggcttagaataaacc

SEQ ID NO: 418571 - DNA, 25 bp, Homo sapien
tcagttatccatcgtccctttgtcc

SEQ ID NO: 418572 - DNA, 25 bp, Homo sapien
ccaaaggcattcgtggtttcacaaa

SEQ ID NO: 418573 - DNA, 25 bp, Homo sapien
tgcagtttccctccgaacatttcca

SEQ ID NO: 418574 - DNA, 25 bp, Homo sapien
tatggagacggcagagagttgcatc

SEQ ID NO: 418575 - DNA, 25 bp, Homo sapien
ctttttgaggattcctgtccatcat

SEQ ID NO: 418576 - DNA, 25 bp, Homo sapien
tgtgttggtgacatcattgtctgtg

SEQ ID NO: 418577 - DNA, 25 bp, Homo sapien
acatcattgtctgtggctttttgag

SEQ ID NO: 418578 - DNA, 25 bp, Homo sapien
ggtgacatcattgtctgtggctttt

SEQ ID NO: 418579 - DNA, 25 bp, Homo sapien
cactcatggactccaaggtgcctgt

SEQ ID NO: 418580 - DNA, 25 bp, Homo sapien
catagaaccactcatggactccaag

SEQ ID NO: 418581 - DNA, 25 bp, Homo sapien
tgaaggccttgacccctctcacatg

SEQ ID NO: 418582 - DNA, 25 bp, Homo sapien
tccaaggtgcctgttgtgaaggcct

SEQ ID NO: 418583 - DNA, 25 bp, Homo sapien
gaacagtgctttgccgttgtcgggg

SEQ ID NO: 418584 - DNA, 25 bp, Homo sapien
aggaacagtgctttgccgttgtcgg

SEQ ID NO: 418585 - DNA, 25 bp, Homo sapien
agaggaacagtgctttgccgttgtc

SEQ ID NO: 418586 - DNA, 25 bp, Homo sapien
ctaaataagaggaacagtgctttgc

SEQ ID NO: 418587 - DNA, 25 bp, Homo sapien
gcagaggagtctgatgagagtgtcc

SEQ ID NO: 418588 - DNA, 25 bp, Homo sapien
gaaggaaggtctgtgctaccacctg

SEQ ID NO: 418589 - DNA, 25 bp, Homo sapien
aggtctgtgctaccacctgtggctc

SEQ ID NO: 418590 - DNA, 25 bp, Homo sapien
gagagtgtcctctgctaatcagagt

SEQ ID NO: 418591 - DNA, 25 bp, Homo sapien
cttctggctatgtcttatgctggtt

SEQ ID NO: 418592 - DNA, 25 bp, Homo sapien
ctggctatgtcttatgctggttggg

SEQ ID NO: 418593 - DNA, 25 bp, Homo sapien
ttctggctatgtcttatgctggttg

SEQ ID NO: 418594 - DNA, 25 bp, Homo sapien
tctggctatgtcttatgctggttgg

SEQ ID NO: 418595 - DNA, 25 bp, Homo sapien
aatgctttacttttctcagccccag

SEQ ID NO: 418596 - DNA, 25 bp, Homo sapien
aaagttttctcatggtgaagggact

SEQ ID NO: 418597 - DNA, 25 bp, Homo sapien
tcatggtgaagggactttacgggca

SEQ ID NO: 418598 - DNA, 25 bp, Homo sapien
tttacgggcatcttcaagtcacgtg

SEQ ID NO: 418599 - DNA, 25 bp, Homo sapien
tcctgagtgtgggaaccaaggtctt

SEQ ID NO: 418600 - DNA, 25 bp, Homo sapien
ggagccacgcgtgtcccttcctgtg

SEQ ID NO: 418601 - DNA, 25 bp, Homo sapien
gagtgtgggaaccaaggtcttacga

SEQ ID NO: 418602 - DNA, 25 bp, Homo sapien
ttttggatgacggagccacgcgtgt

SEQ ID NO: 418603 - DNA, 25 bp, Homo sapien
cgcaaggtttattcctggatcacaa

SEQ ID NO: 418604 - DNA, 25 bp, Homo sapien
taaacttgttatcaaatcacccaca

SEQ ID NO: 418605 - DNA, 25 bp, Homo sapien
ttttcagtctttggtatagagagct

SEQ ID NO: 418606 - DNA, 25 bp, Homo sapien
aaagacatttcctcgcattcacatt

SEQ ID NO: 418607 - DNA, 25 bp, Homo sapien
tgccaccaatgagcgagagggacga

SEQ ID NO: 418608 - DNA, 25 bp, Homo sapien
aatctcaaacttcatgccgctgggc

SEQ ID NO: 418609 - DNA, 25 bp, Homo sapien
cctttcaggtaggacacggccgtga

SEQ ID NO: 418610 - DNA, 25 bp, Homo sapien
tagaagttctgcaccacgtcgttgg

SEQ ID NO: 418611 - DNA, 25 bp, Homo sapien
tcggggtcacgccgctcctcaggtg

SEQ ID NO: 418612 - DNA, 25 bp, Homo sapien
ggtcacgccgctcctcaggtgccag

SEQ ID NO: 418613 - DNA, 25 bp, Homo sapien
ccctcggggtcacgccgctcctcag

SEQ ID NO: 418614 - DNA, 25 bp, Homo sapien
ggggtcacgccgctcctcaggtgcc

SEQ ID NO: 418615 - DNA, 25 bp, Homo sapien
gacccagcatcaacatagggccagg

SEQ ID NO: 418616 - DNA, 25 bp, Homo sapien
ttattataaaacagaggctgctacc

SEQ ID NO: 418617 - DNA, 25 bp, Homo sapien
ctggctttcagggatatgggaatgc

SEQ ID NO: 418618 - DNA, 25 bp, Homo sapien
gctgtccgagggtgactttattata

SEQ ID NO: 418619 - DNA, 25 bp, Homo sapien
gagagctgagcctcagttaagcagt

SEQ ID NO: 418620 - DNA, 25 bp, Homo sapien
tcagtaggcaaaacctgcttcttct

SEQ ID NO: 418621 - DNA, 25 bp, Homo sapien
gctgagcctcagttaagcagtgcag

SEQ ID NO: 418622 - DNA, 25 bp, Homo sapien
tctgcagagagctgagcctcagtta

SEQ ID NO: 418623 - DNA, 25 bp, Homo sapien
tttggcattgtaggaggtaattggt

SEQ ID NO: 418624 - DNA, 25 bp, Homo sapien
aaggtggccaccctgataggcacag

SEQ ID NO: 418625 - DNA, 25 bp, Homo sapien
ggaggtgctggcaacaaggccaagg

SEQ ID NO: 418626 - DNA, 25 bp, Homo sapien
ggctagggacgccatcacagtccct

SEQ ID NO: 418627 - DNA, 25 bp, Homo sapien
ggggccggctgtcctatgctcactg

SEQ ID NO: 418628 - DNA, 25 bp, Homo sapien
ttaactgaacgcatctccctggaag

SEQ ID NO: 418629 - DNA, 25 bp, Homo sapien
gctgctactggcattaggtaataat

SEQ ID NO: 418630 - DNA, 25 bp, Homo sapien
taaaattcctccgtgatgctccgga

SEQ ID NO: 418631 - DNA, 25 bp, Homo sapien
tccctggaagccacataaaattcct

SEQ ID NO: 418632 - DNA, 25 bp, Homo sapien
tgttcacctgtgggctaccattttc

SEQ ID NO: 418633 - DNA, 25 bp, Homo sapien
agggctgaactggtgttcacctgtg

SEQ ID NO: 418634 - DNA, 25 bp, Homo sapien
gcagggctgaactggtgttcacctg

SEQ ID NO: 418635 - DNA, 25 bp, Homo sapien
ggtgttcacctgtgggctaccattt

SEQ ID NO: 418636 - DNA, 25 bp, Homo sapien
tacaatcctggcagaaggtgaagca

SEQ ID NO: 418637 - DNA, 25 bp, Homo sapien
aatcctggcagaaggtgaagcaaac

SEQ ID NO: 418638 - DNA, 25 bp, Homo sapien
tcctggcagaaggtgaagcaaacac

SEQ ID NO: 418639 - DNA, 25 bp, Homo sapien
agttccgcaggactggggaggcctc

SEQ ID NO: 418640 - DNA, 25 bp, Homo sapien
atgaaagctttcctatggacacaca

SEQ ID NO: 418641 - DNA, 25 bp, Homo sapien
gtcacctcatcccttgcaaaatcag

SEQ ID NO: 418642 - DNA, 25 bp, Homo sapien
atcccttgcaaaatcagcccctgtg

SEQ ID NO: 418643 - DNA, 25 bp, Homo sapien
tcagcccctgtgatgaaagctttcc

SEQ ID NO: 418644 - DNA, 25 bp, Homo sapien
cccaagagtggccgccagtggaaac

SEQ ID NO: 418645 - DNA, 25 bp, Homo sapien
acagacctggtgttctaaatctcag

SEQ ID NO: 418646 - DNA, 25 bp, Homo sapien
tttaagtgtagccctgatgcctctg

SEQ ID NO: 418647 - DNA, 25 bp, Homo sapien
ctgcgaatatctgccatggaagagc

SEQ ID NO: 418648 - DNA, 25 bp, Homo sapien
tgttccttagaatggcctgcgtggg

SEQ ID NO: 418649 - DNA, 25 bp, Homo sapien
ttgcagggcgtccatagtccagcct

SEQ ID NO: 418650 - DNA, 25 bp, Homo sapien
gccacttggttagctagcatgagag

SEQ ID NO: 418651 - DNA, 25 bp, Homo sapien
gagcagacattcaagaccaaccaga

SEQ ID NO: 418652 - DNA, 25 bp, Homo sapien
ttgggcttctgcgtgtcttccacag

SEQ ID NO: 418653 - DNA, 25 bp, Homo sapien
gcttctgcgtgtcttccacagtgtg

SEQ ID NO: 418654 - DNA, 25 bp, Homo sapien
tgggcttctgcgtgtcttccacagt

SEQ ID NO: 418655 - DNA, 25 bp, Homo sapien
ttctgcgtgtcttccacagtgtgca

SEQ ID NO: 418656 - DNA, 25 bp, Homo sapien
ttcccatcagatatgaatgaaagat

SEQ ID NO: 418657 - DNA, 25 bp, Homo sapien
tatgaatgaaagatcagatataaac

SEQ ID NO: 418658 - DNA, 25 bp, Homo sapien
tctcatttcccatcagatatgaatg

SEQ ID NO: 418659 - DNA, 25 bp, Homo sapien
catttcccatcagatatgaatgaaa

SEQ ID NO: 418660 - DNA, 25 bp, Homo sapien
tctaaccctatattctctgcgtccc

SEQ ID NO: 418661 - DNA, 25 bp, Homo sapien
cctatattctctgcgtcccatgcag

SEQ ID NO: 418662 - DNA, 25 bp, Homo sapien
aaccctatattctctgcgtcccatg

SEQ ID NO: 418663 - DNA, 25 bp, Homo sapien
atattctctgcgtcccatgcagtcc

SEQ ID NO: 418664 - DNA, 25 bp, Homo sapien
aggttctccaggacactctgaagga

SEQ ID NO: 418665 - DNA, 25 bp, Homo sapien
tggctggctggcaagtgtccatggc

SEQ ID NO: 418666 - DNA, 25 bp, Homo sapien
gacactctgaaggaactcaggatcc

SEQ ID NO: 418667 - DNA, 25 bp, Homo sapien
tcaggatcctgcatcacgtcgtaat

SEQ ID NO: 418668 - DNA, 25 bp, Homo sapien
actgattccgcctggccaaactctg

SEQ ID NO: 418669 - DNA, 25 bp, Homo sapien
catcaatgtctactgattccgcctg

SEQ ID NO: 418670 - DNA, 25 bp, Homo sapien
tctactgattccgcctggccaaact

SEQ ID NO: 418671 - DNA, 25 bp, Homo sapien
aatgtctactgattccgcctggcca

SEQ ID NO: 418672 - DNA, 25 bp, Homo sapien
ctgctcctccatagaaacccgaggg

SEQ ID NO: 418673 - DNA, 25 bp, Homo sapien
ctcctccatagaaacccgagggcca

SEQ ID NO: 418674 - DNA, 25 bp, Homo sapien
tcagcaggacctcgtctgagccttc

SEQ ID NO: 418675 - DNA, 25 bp, Homo sapien
agctgctcgtctgggctcctcatcc

SEQ ID NO: 418676 - DNA, 25 bp, Homo sapien
ggatctactccaaattcaaagtcac

SEQ ID NO: 418677 - DNA, 25 bp, Homo sapien
tgggatctactccaaattcaaagtc

SEQ ID NO: 418678 - DNA, 25 bp, Homo sapien
gggatctactccaaattcaaagtca

SEQ ID NO: 418679 - DNA, 25 bp, Homo sapien
atctttgccattcaacgtgtttaca

SEQ ID NO: 418680 - DNA, 25 bp, Homo sapien
tctttgccattcaacgtgtttacaa

SEQ ID NO: 418681 - DNA, 25 bp, Homo sapien
ctttgccattcaacgtgtttacaaa

SEQ ID NO: 418682 - DNA, 25 bp, Homo sapien
ttcccccaaatttatcatgtcaaca

SEQ ID NO: 418683 - DNA, 25 bp, Homo sapien
ccagatccttctcattgcctttggg

SEQ ID NO: 418684 - DNA, 25 bp, Homo sapien
tccttcttgaggaatttagccagtt

SEQ ID NO: 418685 - DNA, 25 bp, Homo sapien
tttagccagtttcaccagatccttc

SEQ ID NO: 418686 - DNA, 25 bp, Homo sapien
cttgtgattcttgccccgtcagcgc

SEQ ID NO: 418687 - DNA, 25 bp, Homo sapien
ccatgtggatgccagtgtagaaggt

SEQ ID NO: 418688 - DNA, 25 bp, Homo sapien
atgatatgcgtcttgtgattcttgc

SEQ ID NO: 418689 - DNA, 25 bp, Homo sapien
ttcccacgaaggcaatgatatgcgt

SEQ ID NO: 418690 - DNA, 25 bp, Homo sapien
tgtagcttggacaggatgcggccgg

SEQ ID NO: 418691 - DNA, 25 bp, Homo sapien
ggtgtgtagcttggacaggatgcgg

SEQ ID NO: 418692 - DNA, 25 bp, Homo sapien
agcttggacaggatgcggccggtgt

SEQ ID NO: 418693 - DNA, 25 bp, Homo sapien
tgtgtagcttggacaggatgcggcc

SEQ ID NO: 418694 - DNA, 25 bp, Homo sapien
tagccagtgtgatgagggccatgtt

SEQ ID NO: 418695 - DNA, 25 bp, Homo sapien
cagtcattagccagtgtgatgaggg

SEQ ID NO: 418696 - DNA, 25 bp, Homo sapien
cacttcacagtcattagccagtgtg

SEQ ID NO: 418697 - DNA, 25 bp, Homo sapien
tcattagccagtgtgatgagggcca

SEQ ID NO: 418698 - DNA, 25 bp, Homo sapien
tatgttgacagcgtcttgctgggcc

SEQ ID NO: 418699 - DNA, 25 bp, Homo sapien
atgttgacagcgtcttgctgggcct

SEQ ID NO: 418700 - DNA, 25 bp, Homo sapien
gggcctgcagctgggtggggaagaa

SEQ ID NO: 418701 - DNA, 25 bp, Homo sapien
agctgggtggggaagaagtcctcat

SEQ ID NO: 418702 - DNA, 25 bp, Homo sapien
acacacaccatagcgctttccaaca

SEQ ID NO: 418703 - DNA, 25 bp, Homo sapien
ccacacacaccatagcgctttccaa

SEQ ID NO: 418704 - DNA, 25 bp, Homo sapien
cacacacaccatagcgctttccaac

SEQ ID NO: 418705 - DNA, 25 bp, Homo sapien
tggcaaatcttgatccatgcccacc

SEQ ID NO: 418706 - DNA, 25 bp, Homo sapien
gctgagacaccaatggcaaatcttg

SEQ ID NO: 418707 - DNA, 25 bp, Homo sapien
ccccaggaggatgagcgacagtcag

SEQ ID NO: 418708 - DNA, 25 bp, Homo sapien
gattttgggccacaacacatgcagc

SEQ ID NO: 418709 - DNA, 25 bp, Homo sapien
gctcagctctcacgggacgaggcag

SEQ ID NO: 418710 - DNA, 25 bp, Homo sapien
agctctcacgggacgaggcagctga

SEQ ID NO: 418711 - DNA, 25 bp, Homo sapien
aggggctcagctctcacgggacgag

SEQ ID NO: 418712 - DNA, 25 bp, Homo sapien
cagctctcacgggacgaggcagctg

SEQ ID NO: 418713 - DNA, 25 bp, Homo sapien
gaatgtagtgcgtgtcagcgagtca

SEQ ID NO: 418714 - DNA, 25 bp, Homo sapien
tgtcagcgagtcaacgaaaataaga

SEQ ID NO: 418715 - DNA, 25 bp, Homo sapien
aagggacctgatgtcaagcttgaca

SEQ ID NO: 418716 - DNA, 25 bp, Homo sapien
tcaaaagcgaaacggcgaggaatgt

SEQ ID NO: 418717 - DNA, 25 bp, Homo sapien
cagcagacttgttgtgagtataagc

SEQ ID NO: 418718 - DNA, 25 bp, Homo sapien
tggtaggaccgatggctaagctctc

SEQ ID NO: 418719 - DNA, 25 bp, Homo sapien
actgagcactgttgcaggcgatggg

SEQ ID NO: 418720 - DNA, 25 bp, Homo sapien
tcagattggatacatgcacttaata

SEQ ID NO: 418721 - DNA, 25 bp, Homo sapien
cctgcacgaaggtggccgctgaggg

SEQ ID NO: 418722 - DNA, 25 bp, Homo sapien
ggctgcgtctgcctggacaccatca

SEQ ID NO: 418723 - DNA, 25 bp, Homo sapien
cagccctgcacgaaggtggccgctg

SEQ ID NO: 418724 - DNA, 25 bp, Homo sapien
tggacaccatcagccctgcacgaag

SEQ ID NO: 418725 - DNA, 25 bp, Homo sapien
caaagttagcaagaggtagggtcca

SEQ ID NO: 418726 - DNA, 25 bp, Homo sapien
catgaaaaggatattccgaggaact

SEQ ID NO: 418727 - DNA, 25 bp, Homo sapien
tagggtccagaaatgaacagcgtcc

SEQ ID NO: 418728 - DNA, 25 bp, Homo sapien
cattatactactggaccagctaggg

SEQ ID NO: 418729 - DNA, 25 bp, Homo sapien
gcaattccaggacgatgaagccatc

SEQ ID NO: 418730 - DNA, 25 bp, Homo sapien
gaggcaattccaggacgatgaagcc

SEQ ID NO: 418731 - DNA, 25 bp, Homo sapien
aggaggcaattccaggacgatgaag

SEQ ID NO: 418732 - DNA, 25 bp, Homo sapien
ttccaggacgatgaagccatcatac

SEQ ID NO: 418733 - DNA, 25 bp, Homo sapien
gctgtgaaggcacttccggtgtccg

SEQ ID NO: 418734 - DNA, 25 bp, Homo sapien
tgtgaaggcacttccggtgtccgcc

SEQ ID NO: 418735 - DNA, 25 bp, Homo sapien
tgaaggcacttccggtgtccgccat

SEQ ID NO: 418736 - DNA, 25 bp, Homo sapien
gtgaaggcacttccggtgtccgcca

SEQ ID NO: 418737 - DNA, 25 bp, Homo sapien
aaaacaagaggccatatggtttggc

SEQ ID NO: 418738 - DNA, 25 bp, Homo sapien
gtaggagagtggagactgcggcttc

SEQ ID NO: 418739 - DNA, 25 bp, Homo sapien
ggtctctggtgtcagtaggagagtg

SEQ ID NO: 418740 - DNA, 25 bp, Homo sapien
cttggcttgtgtccagatctctggg

SEQ ID NO: 418741 - DNA, 25 bp, Homo sapien
tgacacatgagaaaccgaagtggac

SEQ ID NO: 418742 - DNA, 25 bp, Homo sapien
acatgagaaaccgaagtggaccaga

SEQ ID NO: 418743 - DNA, 25 bp, Homo sapien
atgagaaaccgaagtggaccagacc

SEQ ID NO: 418744 - DNA, 25 bp, Homo sapien
acacatgagaaaccgaagtggacca

SEQ ID NO: 418745 - DNA, 25 bp, Homo sapien
ggagccatccaaacctctacttctg

SEQ ID NO: 418746 - DNA, 25 bp, Homo sapien
gaatgttcccatggcaaaaacacag

SEQ ID NO: 418747 - DNA, 25 bp, Homo sapien
atcctgaaattgagtcctgtagagg

SEQ ID NO: 418748 - DNA, 25 bp, Homo sapien
tagagggcttgggattgttttgcca

SEQ ID NO: 418749 - DNA, 25 bp, Homo sapien
gaccagaactcagaacatctgctcc

SEQ ID NO: 418750 - DNA, 25 bp, Homo sapien
tagatctagcgctcaacactcccat

SEQ ID NO: 418751 - DNA, 25 bp, Homo sapien
gaagatggaactgacttgaccaagg

SEQ ID NO: 418752 - DNA, 25 bp, Homo sapien
ctcccatcctacagatgctgaagtg

SEQ ID NO: 418753 - DNA, 25 bp, Homo sapien
actgaagttccctggagaagcaaaa

SEQ ID NO: 418754 - DNA, 25 bp, Homo sapien
taatatttccatgtagatcagctgc

SEQ ID NO: 418755 - DNA, 25 bp, Homo sapien
ttttcatatgccttgtgtagctgcg

SEQ ID NO: 418756 - DNA, 25 bp, Homo sapien
tagctgcgtccagaataattggact

SEQ ID NO: 418757 - DNA, 25 bp, Homo sapien
ggtccctgagtcttcggtccatgca

SEQ ID NO: 418758 - DNA, 25 bp, Homo sapien
caggaaggcagcaataaggaactgg

SEQ ID NO: 418759 - DNA, 25 bp, Homo sapien
tctgctgtagtgtgagccgcaaccc

SEQ ID NO: 418760 - DNA, 25 bp, Homo sapien
caggctggctgctcgcaagttgctt

SEQ ID NO: 418761 - DNA, 25 bp, Homo sapien
aggacgcgagctcggctgcggctga

SEQ ID NO: 418762 - DNA, 25 bp, Homo sapien
cgcgagctcggctgcggctgacagc

SEQ ID NO: 418763 - DNA, 25 bp, Homo sapien
ctgaggaggacgcgagctcggctgc

SEQ ID NO: 418764 - DNA, 25 bp, Homo sapien
tgaggaggacgcgagctcggctgcg

SEQ ID NO: 418765 - DNA, 25 bp, Homo sapien
catagattaatatgtgtcctttgaa

SEQ ID NO: 418766 - DNA, 25 bp, Homo sapien
cccatagattaatatgtgtcctttg

SEQ ID NO: 418767 - DNA, 25 bp, Homo sapien
tcaggatccaaggagtgaaccacta

SEQ ID NO: 418768 - DNA, 25 bp, Homo sapien
gcttcaggatccaaggagtgaacca

SEQ ID NO: 418769 - DNA, 25 bp, Homo sapien
tgttttatgcagaacaacgtagtgc

SEQ ID NO: 418770 - DNA, 25 bp, Homo sapien
taatatcggagctagcactcctgcc

SEQ ID NO: 418771 - DNA, 25 bp, Homo sapien
gacacatgaagtatgagctatggac

SEQ ID NO: 418772 - DNA, 25 bp, Homo sapien
gagctatggacgttgtctcataatc

SEQ ID NO: 418773 - DNA, 25 bp, Homo sapien
aagtcaagcggattctggagaagcc

SEQ ID NO: 418774 - DNA, 25 bp, Homo sapien
tacttttcactataacgtagggcac

SEQ ID NO: 418775 - DNA, 25 bp, Homo sapien
tactgacccagaaagtctagattcg

SEQ ID NO: 418776 - DNA, 25 bp, Homo sapien
ttgataggtgcaggaagatgtacgt

SEQ ID NO: 418777 - DNA, 25 bp, Homo sapien
ctgacatctgcctgtacctgaggac

SEQ ID NO: 418778 - DNA, 25 bp, Homo sapien
tcatctggggtccagctgacatctg

SEQ ID NO: 418779 - DNA, 25 bp, Homo sapien
tcctcatctggggtccagctgacat

SEQ ID NO: 418780 - DNA, 25 bp, Homo sapien
cagctgacatctgcctgtacctgag

SEQ ID NO: 418781 - DNA, 25 bp, Homo sapien
ggtttgaggagtgtctctttgagaa

SEQ ID NO: 418782 - DNA, 25 bp, Homo sapien
tggccttaacctctcctactgatat

SEQ ID NO: 418783 - DNA, 25 bp, Homo sapien
gatattgaacgctgggcagcatggc

SEQ ID NO: 418784 - DNA, 25 bp, Homo sapien
ttgagaaagtggctgtaggtcaagt

SEQ ID NO: 418785 - DNA, 25 bp, Homo sapien
tgatcagctgatcccctgtgactga

SEQ ID NO: 418786 - DNA, 25 bp, Homo sapien
gagcccctatggcaccagtctgtag

SEQ ID NO: 418787 - DNA, 25 bp, Homo sapien
cagtctgtaggctacagcctgagcc

SEQ ID NO: 418788 - DNA, 25 bp, Homo sapien
gcagacgttgcagaccttgtttagg

SEQ ID NO: 418789 - DNA, 25 bp, Homo sapien
gcacaccagctcatggccgctctgg

SEQ ID NO: 418790 - DNA, 25 bp, Homo sapien
ctgcacaccagctcatggccgctct

SEQ ID NO: 418791 - DNA, 25 bp, Homo sapien
tgcacaccagctcatggccgctctg

SEQ ID NO: 418792 - DNA, 25 bp, Homo sapien
aattgaggcgcagagtggaattacc

SEQ ID NO: 418793 - DNA, 25 bp, Homo sapien
tgcagcgcgcaggtgaccacgcaga

SEQ ID NO: 418794 - DNA, 25 bp, Homo sapien
ccccagcgcgatgaataattgaggc

SEQ ID NO: 418795 - DNA, 25 bp, Homo sapien
cagggagccgcgtgactctccttga

SEQ ID NO: 418796 - DNA, 25 bp, Homo sapien
gaatcttcgtaagtctcccaaattc

SEQ ID NO: 418797 - DNA, 25 bp, Homo sapien
tggaatcttcgtaagtctcccaaat

SEQ ID NO: 418798 - DNA, 25 bp, Homo sapien
ttggaatcttcgtaagtctcccaaa

SEQ ID NO: 418799 - DNA, 25 bp, Homo sapien
tggctcccgggctttttgtcagtcc

SEQ ID NO: 418800 - DNA, 25 bp, Homo sapien
taaaaccccagtggcttttggctga

SEQ ID NO: 418801 - DNA, 25 bp, Homo sapien
tcatgacaggccatccaaaacctgg

SEQ ID NO: 418802 - DNA, 25 bp, Homo sapien
gcagatgccgttccttccaccaggc

SEQ ID NO: 418803 - DNA, 25 bp, Homo sapien
ataaatgccaatctcccggctgggc

SEQ ID NO: 418804 - DNA, 25 bp, Homo sapien
tgtgataaatgccaatctcccggct

SEQ ID NO: 418805 - DNA, 25 bp, Homo sapien
caatctcccggctgggccatgagct

SEQ ID NO: 418806 - DNA, 25 bp, Homo sapien
tgataaatgccaatctcccggctgg

SEQ ID NO: 418807 - DNA, 25 bp, Homo sapien
aaggcatcgatgaccccctgggatt

SEQ ID NO: 418808 - DNA, 25 bp, Homo sapien
cccctgggattggtcagttgatgtg

SEQ ID NO: 418809 - DNA, 25 bp, Homo sapien
ctgacttccttggtgccaaaggcat

SEQ ID NO: 418810 - DNA, 25 bp, Homo sapien
tctcccgcatggtccccaatggagt

SEQ ID NO: 418811 - DNA, 25 bp, Homo sapien
agccgcagacaagccatccttcttg

SEQ ID NO: 418812 - DNA, 25 bp, Homo sapien
ctcctgtcctgtcggtcgagaggag

SEQ ID NO: 418813 - DNA, 25 bp, Homo sapien
gaggagagtgcagcatgacccaaca

SEQ ID NO: 418814 - DNA, 25 bp, Homo sapien
gcagacagcaactcattgcaactgc

SEQ ID NO: 418815 - DNA, 25 bp, Homo sapien
ttccggtgactgtccctttgatgcc

SEQ ID NO: 418816 - DNA, 25 bp, Homo sapien
ctggtggtctctggtccagactctg

SEQ ID NO: 418817 - DNA, 25 bp, Homo sapien
ggtggtctctggtccagactctgct

SEQ ID NO: 418818 - DNA, 25 bp, Homo sapien
aagctcttgcagtatacgccttccg

SEQ ID NO: 418819 - DNA, 25 bp, Homo sapien
caaagggttctacttgacctgtgtg

SEQ ID NO: 418820 - DNA, 25 bp, Homo sapien
agggttctacttgacctgtgtgacc

SEQ ID NO: 418821 - DNA, 25 bp, Homo sapien
tggacaaagggttctacttgacctg

SEQ ID NO: 418822 - DNA, 25 bp, Homo sapien
gacaaagggttctacttgacctgtg

SEQ ID NO: 418823 - DNA, 25 bp, Homo sapien
cctgctcagaacttccttcaagaaa

SEQ ID NO: 418824 - DNA, 25 bp, Homo sapien
actttagggtccacctgagcttttg

SEQ ID NO: 418825 - DNA, 25 bp, Homo sapien
gccctgctcagaacttccttcaaga

SEQ ID NO: 418826 - DNA, 25 bp, Homo sapien
ttgccccactttagggtccacctga

SEQ ID NO: 418827 - DNA, 25 bp, Homo sapien
cattctctcggctggaaattccagg

SEQ ID NO: 418828 - DNA, 25 bp, Homo sapien
tccaggatagtgctggtaccggtaa

SEQ ID NO: 418829 - DNA, 25 bp, Homo sapien
tgctggtaccggtaagtgacatttt

SEQ ID NO: 418830 - DNA, 25 bp, Homo sapien
ccaagtgcccggattgatggagaca

SEQ ID NO: 418831 - DNA, 25 bp, Homo sapien
caggtgcctggctcgtgacttctgc

SEQ ID NO: 418832 - DNA, 25 bp, Homo sapien
ggcctgtggcacacctagtttcagc

SEQ ID NO: 418833 - DNA, 25 bp, Homo sapien
tctgaaagttcttccggagctcctc

SEQ ID NO: 418834 - DNA, 25 bp, Homo sapien
tgcatcagatatctctcaggccttc

SEQ ID NO: 418835 - DNA, 25 bp, Homo sapien
aatgaccggttttcttaggcctcat

SEQ ID NO: 418836 - DNA, 25 bp, Homo sapien
gactgagagtggcattaggagacag

SEQ ID NO: 418837 - DNA, 25 bp, Homo sapien
ctcattgttgctggcgactgctggt

SEQ ID NO: 418838 - DNA, 25 bp, Homo sapien
aattcagaagaaagcccggactgag

SEQ ID NO: 418839 - DNA, 25 bp, Homo sapien
caatccagcaacatccccagtgcca

SEQ ID NO: 418840 - DNA, 25 bp, Homo sapien
acaatccagcaacatccccagtgcc

SEQ ID NO: 418841 - DNA, 25 bp, Homo sapien
cacacaatccagcaacatccccagt

SEQ ID NO: 418842 - DNA, 25 bp, Homo sapien
acacaatccagcaacatccccagtg

SEQ ID NO: 418843 - DNA, 25 bp, Homo sapien
ggcttctccattggtcctcacggtc

SEQ ID NO: 418844 - DNA, 25 bp, Homo sapien
ggtcctcacggtcgggctcattatc

SEQ ID NO: 418845 - DNA, 25 bp, Homo sapien
catcttctgatgatgtctttgcctt

SEQ ID NO: 418846 - DNA, 25 bp, Homo sapien
ggtcgggctcattatcacagcatct

SEQ ID NO: 418847 - DNA, 25 bp, Homo sapien
tgctgggcttatctggaggcatctg

SEQ ID NO: 418848 - DNA, 25 bp, Homo sapien
ggaaggcaagtgtgcaggactgtgg

SEQ ID NO: 418849 - DNA, 25 bp, Homo sapien
aagggccgggaaggcaagtgtgcag

SEQ ID NO: 418850 - DNA, 25 bp, Homo sapien
actgtgggtgctgggcttatctgga

SEQ ID NO: 418851 - DNA, 25 bp, Homo sapien
ccttacacatctgagctgcgaggaa

SEQ ID NO: 418852 - DNA, 25 bp, Homo sapien
tgccctgaaggattcaaggtcagac

SEQ ID NO: 418853 - DNA, 25 bp, Homo sapien
tcagacagtagaactggggggccac

SEQ ID NO: 418854 - DNA, 25 bp, Homo sapien
caggcaccaaacagacacataattc

SEQ ID NO: 418855 - DNA, 25 bp, Homo sapien
gtgacttcccgtcgctggaaggtgg

SEQ ID NO: 418856 - DNA, 25 bp, Homo sapien
cagtgacttcccgtcgctggaaggt

SEQ ID NO: 418857 - DNA, 25 bp, Homo sapien
tgaggtccgcagcattctgctctag

SEQ ID NO: 418858 - DNA, 25 bp, Homo sapien
gggtgagtcaccatcaatagcaagg

SEQ ID NO: 418859 - DNA, 25 bp, Homo sapien
ggaagctagccttgaccgtgctcat

SEQ ID NO: 418860 - DNA, 25 bp, Homo sapien
cacatcgcttgcagatccagccggg

SEQ ID NO: 418861 - DNA, 25 bp, Homo sapien
gtatttgtgttttccgtcttgtgtc

SEQ ID NO: 418862 - DNA, 25 bp, Homo sapien
cttcatccagaaggatcaggtgatc

SEQ ID NO: 418863 - DNA, 25 bp, Homo sapien
gatcaggtgatccttgtcctttagt

SEQ ID NO: 418864 - DNA, 25 bp, Homo sapien
gatcaaccttggtaagagagtcttc

SEQ ID NO: 418865 - DNA, 25 bp, Homo sapien
gaagctgctatagtctaagaagtag

SEQ ID NO: 418866 - DNA, 25 bp, Homo sapien
taagaagtaggatgaatattccagt

SEQ ID NO: 418867 - DNA, 25 bp, Homo sapien
tcaggtagccccaactttcaggcag

SEQ ID NO: 418868 - DNA, 25 bp, Homo sapien
tctgagtatagtctaagaagctgct

SEQ ID NO: 418869 - DNA, 25 bp, Homo sapien
tcttcctggggtcggccttaatgac

SEQ ID NO: 418870 - DNA, 25 bp, Homo sapien
attcttcctggggtcggccttaatg

SEQ ID NO: 418871 - DNA, 25 bp, Homo sapien
ggtcggccttaatgacagtagcttt

SEQ ID NO: 418872 - DNA, 25 bp, Homo sapien
cctggggtcggccttaatgacagta

SEQ ID NO: 418873 - DNA, 25 bp, Homo sapien
tgaggtgtcccaccaaagtgaccat

SEQ ID NO: 418874 - DNA, 25 bp, Homo sapien
ccacgtgcgtcaggtgcctgagttt

SEQ ID NO: 418875 - DNA, 25 bp, Homo sapien
gctgccacgtgcgtcaggtgcctga

SEQ ID NO: 418876 - DNA, 25 bp, Homo sapien
ttctttgtgatggtgaggtgtccca

SEQ ID NO: 418877 - DNA, 25 bp, Homo sapien
ttcaccaaaacattgaactgattgg

SEQ ID NO: 418878 - DNA, 25 bp, Homo sapien
attcaccaaaacattgaactgattg

SEQ ID NO: 418879 - DNA, 25 bp, Homo sapien
aatccagagaggtgcaatcagggtc

SEQ ID NO: 418880 - DNA, 25 bp, Homo sapien
cacctgtgaggtgttcgatgaacaa

SEQ ID NO: 418881 - DNA, 25 bp, Homo sapien
tgtcgtctgatctgagtggaatcca

SEQ ID NO: 418882 - DNA, 25 bp, Homo sapien
gaatgaattcgaccgatctggcccg

SEQ ID NO: 418883 - DNA, 25 bp, Homo sapien
tccagtgggaagtagctcatgtcag

SEQ ID NO: 418884 - DNA, 25 bp, Homo sapien
tcacatggagcagcagggcgttctc

SEQ ID NO: 418885 - DNA, 25 bp, Homo sapien
gtttcaatcatttccattccgggca

SEQ ID NO: 418886 - DNA, 25 bp, Homo sapien
cagcagggcgttctctccagtggga

SEQ ID NO: 418887 - DNA, 25 bp, Homo sapien
aggagcccaaaatgcatgatcctgg

SEQ ID NO: 418888 - DNA, 25 bp, Homo sapien
gagcccaaaatgcatgatcctggtg

SEQ ID NO: 418889 - DNA, 25 bp, Homo sapien
cccaaaatgcatgatcctggtgcct

SEQ ID NO: 418890 - DNA, 25 bp, Homo sapien
gcccaaaatgcatgatcctggtgcc

SEQ ID NO: 418891 - DNA, 25 bp, Homo sapien
atcttctgacccgaatgtggggaag

SEQ ID NO: 418892 - DNA, 25 bp, Homo sapien
tgacccgaatgtggggaagcacaat

SEQ ID NO: 418893 - DNA, 25 bp, Homo sapien
ttctgacccgaatgtggggaagcac

SEQ ID NO: 418894 - DNA, 25 bp, Homo sapien
aatcttctgacccgaatgtggggaa

SEQ ID NO: 418895 - DNA, 25 bp, Homo sapien
ggtgcacccaagttcaaccgcatgt

SEQ ID NO: 418896 - DNA, 25 bp, Homo sapien
tgtgcactcactgcggagatgcatg

SEQ ID NO: 418897 - DNA, 25 bp, Homo sapien
tttgacaggacatactgcacgccag

SEQ ID NO: 418898 - DNA, 25 bp, Homo sapien
aatgttggaggatcatgctgtgcac

SEQ ID NO: 418899 - DNA, 25 bp, Homo sapien
gaataataactgctccgggactgtg

SEQ ID NO: 418900 - DNA, 25 bp, Homo sapien
aattcatgagggtgttctggttgga

SEQ ID NO: 418901 - DNA, 25 bp, Homo sapien
tgctgcatgaactggacagaattca

SEQ ID NO: 418902 - DNA, 25 bp, Homo sapien
tctggttggaactatctgaataata

SEQ ID NO: 418903 - DNA, 25 bp, Homo sapien
acccaatgtcttggtcccaaaagat

SEQ ID NO: 418904 - DNA, 25 bp, Homo sapien
cccaatgtcttggtcccaaaagata

SEQ ID NO: 418905 - DNA, 25 bp, Homo sapien
gacccaatgtcttggtcccaaaaga

SEQ ID NO: 418906 - DNA, 25 bp, Homo sapien
ttctggaataatggggccgctcttt

SEQ ID NO: 418907 - DNA, 25 bp, Homo sapien
ggtgtctgagcctgtgtggataaaa

SEQ ID NO: 418908 - DNA, 25 bp, Homo sapien
gaagaatgacatccttatctcaggc

SEQ ID NO: 418909 - DNA, 25 bp, Homo sapien
tcaggctgttcttggactcttcatc

SEQ ID NO: 418910 - DNA, 25 bp, Homo sapien
tcatctcagaagtgccacagaaggg

SEQ ID NO: 418911 - DNA, 25 bp, Homo sapien
atctcagaagtgccacagaaggggg

SEQ ID NO: 418912 - DNA, 25 bp, Homo sapien
catctcagaagtgccacagaagggg

SEQ ID NO: 418913 - DNA, 25 bp, Homo sapien
ccaagtcctggctgaagattccagg

SEQ ID NO: 418914 - DNA, 25 bp, Homo sapien
cacactgacagctgtgagcgatggg

SEQ ID NO: 418915 - DNA, 25 bp, Homo sapien
agtcctggctgaagattccaggtgg

SEQ ID NO: 418916 - DNA, 25 bp, Homo sapien
tgagcatgtgcacactgacagctgt

SEQ ID NO: 418917 - DNA, 25 bp, Homo sapien
tgttaatgagcagcgtgtcggtgtt

SEQ ID NO: 418918 - DNA, 25 bp, Homo sapien
aatgagcagcgtgtcggtgtttaac

SEQ ID NO: 418919 - DNA, 25 bp, Homo sapien
tatccggatgctgagtgttaatgag

SEQ ID NO: 418920 - DNA, 25 bp, Homo sapien
caaaatctgagctgaaattaggata

SEQ ID NO: 418921 - DNA, 25 bp, Homo sapien
accgcggccaggatgcgggatccca

SEQ ID NO: 418922 - DNA, 25 bp, Homo sapien
gaacaatgtgtggtccaccctttat

SEQ ID NO: 418923 - DNA, 25 bp, Homo sapien
tgctctgctgaacaatgtgtggtcc

SEQ ID NO: 418924 - DNA, 25 bp, Homo sapien
catgtcggcagaccgcggccaggat

SEQ ID NO: 418925 - DNA, 25 bp, Homo sapien
ctgcagatgatttgaggacccgtgt

SEQ ID NO: 418926 - DNA, 25 bp, Homo sapien
atttgaggacccgtgtctttagcag

SEQ ID NO: 418927 - DNA, 25 bp, Homo sapien
cagatgatttgaggacccgtgtctt

SEQ ID NO: 418928 - DNA, 25 bp, Homo sapien
gatgatttgaggacccgtgtcttta

SEQ ID NO: 418929 - DNA, 25 bp, Homo sapien
ttgcacttgaagacaggatcccaac

SEQ ID NO: 418930 - DNA, 25 bp, Homo sapien
ccagagcacaatctaagaggacaca

SEQ ID NO: 418931 - DNA, 25 bp, Homo sapien
aggcggcattcgagctggcgtctat

SEQ ID NO: 418932 - DNA, 25 bp, Homo sapien
tggcttggctgttgcacttgaagac

SEQ ID NO: 418933 - DNA, 25 bp, Homo sapien
tgccccgcctgaaacacactttggt

SEQ ID NO: 418934 - DNA, 25 bp, Homo sapien
ccaacttcgattgtctgaccgaact

SEQ ID NO: 418935 - DNA, 25 bp, Homo sapien
acatgatatttatgtctgagtgccc

SEQ ID NO: 418936 - DNA, 25 bp, Homo sapien
tgaccgaactcaggctcacatgata

SEQ ID NO: 418937 - DNA, 25 bp, Homo sapien
tctcagacatgacatattcctggag

SEQ ID NO: 418938 - DNA, 25 bp, Homo sapien
ctcagacatgacatattcctggagg

SEQ ID NO: 418939 - DNA, 25 bp, Homo sapien
gcgcgtggattcagatcaggactct

SEQ ID NO: 418940 - DNA, 25 bp, Homo sapien
gagggcgttggaccttcttccgcaa

SEQ ID NO: 418941 - DNA, 25 bp, Homo sapien
gctttggcgaagctaagaaagcact

SEQ ID NO: 418942 - DNA, 25 bp, Homo sapien
caggactctgtctaagtaggcgaga

SEQ ID NO: 418943 - DNA, 25 bp, Homo sapien
gaggcggctgatcggagagtgggag

SEQ ID NO: 418944 - DNA, 25 bp, Homo sapien
cggagaggcggctgatcggagagtg

SEQ ID NO: 418945 - DNA, 25 bp, Homo sapien
gcggagaggcggctgatcggagagt

SEQ ID NO: 418946 - DNA, 25 bp, Homo sapien
gagaggcggctgatcggagagtggg

SEQ ID NO: 418947 - DNA, 25 bp, Homo sapien
agcctgcccctgtgaccgctccagc

SEQ ID NO: 418948 - DNA, 25 bp, Homo sapien
tgccgcgtgcgtgcccgagtgtggc

SEQ ID NO: 418949 - DNA, 25 bp, Homo sapien
cctgccgcgtgcgtgcccgagtgtg

SEQ ID NO: 418950 - DNA, 25 bp, Homo sapien
agcccctgccgcgtgcgtgcccgag

SEQ ID NO: 418951 - DNA, 25 bp, Homo sapien
gattttgaggccatgtttccgttaa

SEQ ID NO: 418952 - DNA, 25 bp, Homo sapien
ttccgttaatctggaccgagagccc

SEQ ID NO: 418953 - DNA, 25 bp, Homo sapien
agactaagactcttccagcgcaggg

SEQ ID NO: 418954 - DNA, 25 bp, Homo sapien
gatgtttccagaccgaaaggagggc

SEQ ID NO: 418955 - DNA, 25 bp, Homo sapien
ccacttcagaggttggaaattcttc

SEQ ID NO: 418956 - DNA, 25 bp, Homo sapien
ggcttgaatcaacgcagtcctggat

SEQ ID NO: 418957 - DNA, 25 bp, Homo sapien
gagcgtataaaccaaataggcttga

SEQ ID NO: 418958 - DNA, 25 bp, Homo sapien
gattgcggatgtagacaagagcgta

SEQ ID NO: 418959 - DNA, 25 bp, Homo sapien
gagtacacaacgtctgcttgggcag

SEQ ID NO: 418960 - DNA, 25 bp, Homo sapien
cacgtgaacagaggctgtccctggg

SEQ ID NO: 418961 - DNA, 25 bp, Homo sapien
ggaggtatctcacacccacgtatct

SEQ ID NO: 418962 - DNA, 25 bp, Homo sapien
tatcttccagtcttcaaacacggca

SEQ ID NO: 418963 - DNA, 25 bp, Homo sapien
ccataattgagggtcggaagccgtg

SEQ ID NO: 418964 - DNA, 25 bp, Homo sapien
tgtttctgcgatctgggtaatccct

SEQ ID NO: 418965 - DNA, 25 bp, Homo sapien
gaattctcccgggtccataattgag

SEQ ID NO: 418966 - DNA, 25 bp, Homo sapien
gggtgagaaacgcattaaatcctcc

SEQ ID NO: 418967 - DNA, 25 bp, Homo sapien
gatactcagtcgctgtccgacggcg

SEQ ID NO: 418968 - DNA, 25 bp, Homo sapien
ccgacggcgagttttcggagcagca

SEQ ID NO: 418969 - DNA, 25 bp, Homo sapien
cacatgatctcgacgccaaggtaag

SEQ ID NO: 418970 - DNA, 25 bp, Homo sapien
caaggtaaggaattgccctgcgtcc

SEQ ID NO: 418971 - DNA, 25 bp, Homo sapien
tgcagataatcatgttgtctctcct

SEQ ID NO: 418972 - DNA, 25 bp, Homo sapien
agctggctgggttgtcctgttgcgt

SEQ ID NO: 418973 - DNA, 25 bp, Homo sapien
tcctgttgcgtgaggtggcaccgtc

SEQ ID NO: 418974 - DNA, 25 bp, Homo sapien
caggatggccactttgcagataatc

SEQ ID NO: 418975 - DNA, 25 bp, Homo sapien
gagctctgttgagaaaagaaaactg

SEQ ID NO: 418976 - DNA, 25 bp, Homo sapien
tgagctctgttgagaaaagaaaact

SEQ ID NO: 418977 - DNA, 25 bp, Homo sapien
agctcacgggcaacagtatttatga

SEQ ID NO: 418978 - DNA, 25 bp, Homo sapien
tacatccatccttctgaccacgatg

SEQ ID NO: 418979 - DNA, 25 bp, Homo sapien
cacgatgagatgaccgctgtcctca

SEQ ID NO: 418980 - DNA, 25 bp, Homo sapien
ggagctcacgggcaacagtatttat

SEQ ID NO: 418981 - DNA, 25 bp, Homo sapien
tccaaggtattccatccagagggaa

SEQ ID NO: 418982 - DNA, 25 bp, Homo sapien
ccaaggtattccatccagagggaaa

SEQ ID NO: 418983 - DNA, 25 bp, Homo sapien
gctccaaggtattccatccagaggg

SEQ ID NO: 418984 - DNA, 25 bp, Homo sapien
ctgctccaaggtattccatccagag

SEQ ID NO: 418985 - DNA, 25 bp, Homo sapien
ggaaaaacatgagttgcattcttat

SEQ ID NO: 418986 - DNA, 25 bp, Homo sapien
aaaacatgagttgcattcttattgc

SEQ ID NO: 418987 - DNA, 25 bp, Homo sapien
catgagttgcattcttattgctgtc

SEQ ID NO: 418988 - DNA, 25 bp, Homo sapien
gggtagctggctgcaggaaaaacat

SEQ ID NO: 418989 - DNA, 25 bp, Homo sapien
tgtttctgtagcctttgagtctgaa

SEQ ID NO: 418990 - DNA, 25 bp, Homo sapien
gtttctgtagcctttgagtctgaag

SEQ ID NO: 418991 - DNA, 25 bp, Homo sapien
ctttgagtctgaagcaacaagggct

SEQ ID NO: 418992 - DNA, 25 bp, Homo sapien
tctgaagcaacaagggctggaagca

SEQ ID NO: 418993 - DNA, 25 bp, Homo sapien
cagctgctcccttgctgactttccg

SEQ ID NO: 418994 - DNA, 25 bp, Homo sapien
ccacagccggccgaggggtgcaggg

SEQ ID NO: 418995 - DNA, 25 bp, Homo sapien
ctgctcccttgctgactttccgtgt

SEQ ID NO: 418996 - DNA, 25 bp, Homo sapien
tttccacagccggccgaggggtgca

SEQ ID NO: 418997 - DNA, 25 bp, Homo sapien
cagccatgttagagggaagcttttt

SEQ ID NO: 418998 - DNA, 25 bp, Homo sapien
tgcttgtctggaaatggctggggca

SEQ ID NO: 418999 - DNA, 25 bp, Homo sapien
gcaggcagccatgttagagggaagc

SEQ ID NO: 419000 - DNA, 25 bp, Homo sapien
cgtgcttgtctggaaatggctgggg

SEQ ID NO: 419001 - DNA, 25 bp, Homo sapien
caggactgggctggtgtctccactg

SEQ ID NO: 419002 - DNA, 25 bp, Homo sapien
ggactgggctggtgtctccactgcc

SEQ ID NO: 419003 - DNA, 25 bp, Homo sapien
actgggctggtgtctccactgcccc

SEQ ID NO: 419004 - DNA, 25 bp, Homo sapien
tgggctggtgtctccactgccccac

SEQ ID NO: 419005 - DNA, 25 bp, Homo sapien
gatctcagccaaggccgaagatctc

SEQ ID NO: 419006 - DNA, 25 bp, Homo sapien
ttgcagagtatgagatagagaggtc

SEQ ID NO: 419007 - DNA, 25 bp, Homo sapien
ggtcgttctttcttcgaatgaaatg

SEQ ID NO: 419008 - DNA, 25 bp, Homo sapien
tgtcttggcgaaaaggaacgcgggc

SEQ ID NO: 419009 - DNA, 25 bp, Homo sapien
tgcccttccccttgggatgctccac

SEQ ID NO: 419010 - DNA, 25 bp, Homo sapien
actgcccttccccttgggatgctcc

SEQ ID NO: 419011 - DNA, 25 bp, Homo sapien
ctgcccttccccttgggatgctcca

SEQ ID NO: 419012 - DNA, 25 bp, Homo sapien
cacaataatgctagcgccctttcca

SEQ ID NO: 419013 - DNA, 25 bp, Homo sapien
ggcagagctttcatctgcggcacca

SEQ ID NO: 419014 - DNA, 25 bp, Homo sapien
cgccgatgacggtgtgcaccacaat

SEQ ID NO: 419015 - DNA, 25 bp, Homo sapien
ttccctgccgccgatgacggtgtgc

SEQ ID NO: 419016 - DNA, 25 bp, Homo sapien
caggcagtatatgctggacatgtcc

SEQ ID NO: 419017 - DNA, 25 bp, Homo sapien
cagtaacatgttcatgttcagggcc

SEQ ID NO: 419018 - DNA, 25 bp, Homo sapien
tacgactcctgctaccagattgtgg

SEQ ID NO: 419019 - DNA, 25 bp, Homo sapien
catcaccgagatcaagctgtacagt

SEQ ID NO: 419020 - DNA, 25 bp, Homo sapien
ggctccttgtcgacacccttcagga

SEQ ID NO: 419021 - DNA, 25 bp, Homo sapien
gccaagagcgacaaatgccattttc

SEQ ID NO: 419022 - DNA, 25 bp, Homo sapien
agcacctctggggacggccaagagc

SEQ ID NO: 419023 - DNA, 25 bp, Homo sapien
aggaaacagcgctctttggggaaag

SEQ ID NO: 419024 - DNA, 25 bp, Homo sapien
agcctcgcctgccttggaatccctt

SEQ ID NO: 419025 - DNA, 25 bp, Homo sapien
tgaggaccacctccttcgaggacat

SEQ ID NO: 419026 - DNA, 25 bp, Homo sapien
aaatctatcaccaagatggtgagga

SEQ ID NO: 419027 - DNA, 25 bp, Homo sapien
gactgactgcaccatagcctcgcct

SEQ ID NO: 419028 - DNA, 25 bp, Homo sapien
actctgaaagggcaagcaggcacag

SEQ ID NO: 419029 - DNA, 25 bp, Homo sapien
tgaagccactttatctcacaggaag

SEQ ID NO: 419030 - DNA, 25 bp, Homo sapien
acttatagactctgacctgcgggca

SEQ ID NO: 419031 - DNA, 25 bp, Homo sapien
caggcacaggctcaaaaaggtaggc

SEQ ID NO: 419032 - DNA, 25 bp, Homo sapien
gccagacagtttatgagaatgaccc

SEQ ID NO: 419033 - DNA, 25 bp, Homo sapien
tcactaggctcgtgtttgctacaaa

SEQ ID NO: 419034 - DNA, 25 bp, Homo sapien
gaacataggtgtgcttcccaaatac

SEQ ID NO: 419035 - DNA, 25 bp, Homo sapien
caagcttcattattacgtggcaaaa

SEQ ID NO: 419036 - DNA, 25 bp, Homo sapien
gtttgattactaggagataccaccg

SEQ ID NO: 419037 - DNA, 25 bp, Homo sapien
tcagtgggcctcatggtaagagtca

SEQ ID NO: 419038 - DNA, 25 bp, Homo sapien
aaatcctgtcatggctctgaactgc

SEQ ID NO: 419039 - DNA, 25 bp, Homo sapien
caatttgcaaatttaggaccgtggg

SEQ ID NO: 419040 - DNA, 25 bp, Homo sapien
ttttaaaagtcctatcagccctgcc

SEQ ID NO: 419041 - DNA, 25 bp, Homo sapien
ggaggtttaatacggccaatggatc

SEQ ID NO: 419042 - DNA, 25 bp, Homo sapien
ctgcaagagcctgtattttccgcct

SEQ ID NO: 419043 - DNA, 25 bp, Homo sapien
cttccgccctaagccctaagagtgg

SEQ ID NO: 419044 - DNA, 25 bp, Homo sapien
tctcttgtgtatggcgctgaataca

SEQ ID NO: 419045 - DNA, 25 bp, Homo sapien
aacacttggcttcttaatacttgga

SEQ ID NO: 419046 - DNA, 25 bp, Homo sapien
aaagtcaagtcaagaagtttccaca

SEQ ID NO: 419047 - DNA, 25 bp, Homo sapien
tactgtaacccaaagtagttgccta

SEQ ID NO: 419048 - DNA, 25 bp, Homo sapien
catagaaagtcttagtttattttgg

SEQ ID NO: 419049 - DNA, 25 bp, Homo sapien
cacatagaaagtcttagtttatttt

SEQ ID NO: 419050 - DNA, 25 bp, Homo sapien
acatagaaagtcttagtttattttg

SEQ ID NO: 419051 - DNA, 25 bp, Homo sapien
aaacagatctggagaacggaagccc

SEQ ID NO: 419052 - DNA, 25 bp, Homo sapien
ccaaatcggagagtgtgctatagca

SEQ ID NO: 419053 - DNA, 25 bp, Homo sapien
gctatagcaggtagacaggtttcgc

SEQ ID NO: 419054 - DNA, 25 bp, Homo sapien
tacggtcgatactcaatgcacagcc

SEQ ID NO: 419055 - DNA, 25 bp, Homo sapien
taaaatgcctttattcagctaattc

SEQ ID NO: 419056 - DNA, 25 bp, Homo sapien
tatagaagcggagttttgagagtct

SEQ ID NO: 419057 - DNA, 25 bp, Homo sapien
gagagtctttggttcatgtgaggca

SEQ ID NO: 419058 - DNA, 25 bp, Homo sapien
tctttggttcatgtgaggcaaaatc

SEQ ID NO: 419059 - DNA, 25 bp, Homo sapien
gcttcatctctctcaggacaactga

SEQ ID NO: 419060 - DNA, 25 bp, Homo sapien
tcatctctctcaggacaactgagtc

SEQ ID NO: 419061 - DNA, 25 bp, Homo sapien
ttatggaaaacgcagcatctgcttc

SEQ ID NO: 419062 - DNA, 25 bp, Homo sapien
gcagcatctgcttcaaggctgcttc

SEQ ID NO: 419063 - DNA, 25 bp, Homo sapien
gaaacctacatcgttagcctcgaga

SEQ ID NO: 419064 - DNA, 25 bp, Homo sapien
catggcgtacatctgggaatagcga

SEQ ID NO: 419065 - DNA, 25 bp, Homo sapien
caccgggtggacagtaactcttgga

SEQ ID NO: 419066 - DNA, 25 bp, Homo sapien
gaattagcctgactgggtaagacct

SEQ ID NO: 419067 - DNA, 25 bp, Homo sapien
ttgccgtccgggtgcacagtcacaa

SEQ ID NO: 419068 - DNA, 25 bp, Homo sapien
aagccagaatcgtccaggccaacga

SEQ ID NO: 419069 - DNA, 25 bp, Homo sapien
cagcatgtcgaaggagttgccgtcc

SEQ ID NO: 419070 - DNA, 25 bp, Homo sapien
gctgcccagatggacttgctgacca

SEQ ID NO: 419071 - DNA, 25 bp, Homo sapien
cagcgtgcggtcactgggaggtgtc

SEQ ID NO: 419072 - DNA, 25 bp, Homo sapien
tgcggtcactgggaggtgtcacagg

SEQ ID NO: 419073 - DNA, 25 bp, Homo sapien
ctgaaaaggaagaacagcgtgcggt

SEQ ID NO: 419074 - DNA, 25 bp, Homo sapien
gaacagcgtgcggtcactgggaggt

SEQ ID NO: 419075 - DNA, 25 bp, Homo sapien
tgtggacccagtatcggtaataaag

SEQ ID NO: 419076 - DNA, 25 bp, Homo sapien
cgctgttgggccctttgtcctgaaa

SEQ ID NO: 419077 - DNA, 25 bp, Homo sapien
cacagtcacgactctggcgatgaga

SEQ ID NO: 419078 - DNA, 25 bp, Homo sapien
tgagataatcggctcttaagggctt

SEQ ID NO: 419079 - DNA, 25 bp, Homo sapien
taaaatgtttctcccatgagtgttg

SEQ ID NO: 419080 - DNA, 25 bp, Homo sapien
gttaaccagaactccgccgatcttc

SEQ ID NO: 419081 - DNA, 25 bp, Homo sapien
gccgatcttcatgaggtcactgtaa

SEQ ID NO: 419082 - DNA, 25 bp, Homo sapien
actgtaataaatatcgttgggccac

SEQ ID NO: 419083 - DNA, 25 bp, Homo sapien
caccaccaccatggagtagctaact

SEQ ID NO: 419084 - DNA, 25 bp, Homo sapien
aatgaagttcattatgtcagtatcc

SEQ ID NO: 419085 - DNA, 25 bp, Homo sapien
agttcattatgtcagtatccaccac

SEQ ID NO: 419086 - DNA, 25 bp, Homo sapien
caccatggagtagctaactaacgtg

SEQ ID NO: 419087 - DNA, 25 bp, Homo sapien
ttagcgaaagcctcgcagaactgct

SEQ ID NO: 419088 - DNA, 25 bp, Homo sapien
gcagaactgctaatggtcatcttgg

SEQ ID NO: 419089 - DNA, 25 bp, Homo sapien
tgtcatgtggcctattgcctctgcg

SEQ ID NO: 419090 - DNA, 25 bp, Homo sapien
cttgggtaatggaactggacttgtc

SEQ ID NO: 419091 - DNA, 25 bp, Homo sapien
acatggccaggggaatgagcccctg

SEQ ID NO: 419092 - DNA, 25 bp, Homo sapien
ccctgcctcgccggcgggaggacac

SEQ ID NO: 419093 - DNA, 25 bp, Homo sapien
tggccaggggaatgagcccctgcct

SEQ ID NO: 419094 - DNA, 25 bp, Homo sapien
gccaggggaatgagcccctgcctcg

SEQ ID NO: 419095 - DNA, 25 bp, Homo sapien
cagctggtgcctgggcgggccctgc

SEQ ID NO: 419096 - DNA, 25 bp, Homo sapien
cacttgggctccagctcgccttcat

SEQ ID NO: 419097 - DNA, 25 bp, Homo sapien
ccacgtgcgtggcagctggtgcctg

SEQ ID NO: 419098 - DNA, 25 bp, Homo sapien
tgcagagttcccagagctgtcaagc

SEQ ID NO: 419099 - DNA, 25 bp, Homo sapien
ctctgggttctcacgcaggtaaaca

SEQ ID NO: 419100 - DNA, 25 bp, Homo sapien
gctcatgaagcagctcatgaaactc

SEQ ID NO: 419101 - DNA, 25 bp, Homo sapien
ggcttcagatctcctcggctcatga

SEQ ID NO: 419102 - DNA, 25 bp, Homo sapien
actctgggttctcacgcaggtaaac

SEQ ID NO: 419103 - DNA, 25 bp, Homo sapien
acgacagccacggacatcagatgct

SEQ ID NO: 419104 - DNA, 25 bp, Homo sapien
tactcgggaatggacctcactgctt

SEQ ID NO: 419105 - DNA, 25 bp, Homo sapien
catcagatgctggacaaacgggatc

SEQ ID NO: 419106 - DNA, 25 bp, Homo sapien
cctctgtcccagctgggatctcagt

SEQ ID NO: 419107 - DNA, 25 bp, Homo sapien
atgggtcttgctaagttgtcccagc

SEQ ID NO: 419108 - DNA, 25 bp, Homo sapien
gagatgggtcttgctaagttgtccc

SEQ ID NO: 419109 - DNA, 25 bp, Homo sapien
gattacagctcactgggctcaagtg

SEQ ID NO: 419110 - DNA, 25 bp, Homo sapien
attacagctcactgggctcaagtga

SEQ ID NO: 419111 - DNA, 25 bp, Homo sapien
gatgtgggctctcgtctccgggatc

SEQ ID NO: 419112 - DNA, 25 bp, Homo sapien
gggctctcgtctccgggatctgcag

SEQ ID NO: 419113 - DNA, 25 bp, Homo sapien
cactgtgtgaatgggcactgatgca

SEQ ID NO: 419114 - DNA, 25 bp, Homo sapien
cagagcccaccatgtacatgcaagc

SEQ ID NO: 419115 - DNA, 25 bp, Homo sapien
gaagtaacagcaatgatcacaaaag

SEQ ID NO: 419116 - DNA, 25 bp, Homo sapien
aaaacagaagtaacagcaatgatca

SEQ ID NO: 419117 - DNA, 25 bp, Homo sapien
gcaatgatcacaaaagatgactgac

SEQ ID NO: 419118 - DNA, 25 bp, Homo sapien
agcaatgatcacaaaagatgactga

SEQ ID NO: 419119 - DNA, 25 bp, Homo sapien
gccgcgatcactattaagcccattt

SEQ ID NO: 419120 - DNA, 25 bp, Homo sapien
ttcctgcggtgtctgaaacatcagc

SEQ ID NO: 419121 - DNA, 25 bp, Homo sapien
ccatttcctgcggtgtctgaaacat

SEQ ID NO: 419122 - DNA, 25 bp, Homo sapien
tttgccctcggtctgccgggccgcg

SEQ ID NO: 419123 - DNA, 25 bp, Homo sapien
attgccgatcaggtgctgcgcaggc

SEQ ID NO: 419124 - DNA, 25 bp, Homo sapien
ggttcgaggtaggattcatcaacag

SEQ ID NO: 419125 - DNA, 25 bp, Homo sapien
caggtttggccactttgtcagtgca

SEQ ID NO: 419126 - DNA, 25 bp, Homo sapien
tgcgcaggcgcggttcgaggtagga

SEQ ID NO: 419127 - DNA, 25 bp, Homo sapien
gggatggcattttgtaataacataa

SEQ ID NO: 419128 - DNA, 25 bp, Homo sapien
tctcttggacgccatgaataactca

SEQ ID NO: 419129 - DNA, 25 bp, Homo sapien
gaataactcattgagatcgagtgtg

SEQ ID NO: 419130 - DNA, 25 bp, Homo sapien
gagatcgagtgtgctgtatgccact

SEQ ID NO: 419131 - DNA, 25 bp, Homo sapien
cttttcttgtgttggaccagcagaa

SEQ ID NO: 419132 - DNA, 25 bp, Homo sapien
tctgtgagtggcagccgagtgcatt

SEQ ID NO: 419133 - DNA, 25 bp, Homo sapien
ctgtgagtggcagccgagtgcattc

SEQ ID NO: 419134 - DNA, 25 bp, Homo sapien
tgtgagtggcagccgagtgcattca

SEQ ID NO: 419135 - DNA, 25 bp, Homo sapien
ttctgtgagtggcagccgagtgcat

SEQ ID NO: 419136 - DNA, 25 bp, Homo sapien
ctgtggaaccaaagcggcactcagg

SEQ ID NO: 419137 - DNA, 25 bp, Homo sapien
cactcaggaaaagcgctctgttttg

SEQ ID NO: 419138 - DNA, 25 bp, Homo sapien
tttgtactcttgtgttgagtctgaa

SEQ ID NO: 419139 - DNA, 25 bp, Homo sapien
gttgagtctgaaacatttggagcct

SEQ ID NO: 419140 - DNA, 25 bp, Homo sapien
tataatattgtaattgactattcat

SEQ ID NO: 419141 - DNA, 25 bp, Homo sapien
ggaccactatgggttcataccacca

SEQ ID NO: 419142 - DNA, 25 bp, Homo sapien
agcccaggctgggtaaccttttgat

SEQ ID NO: 419143 - DNA, 25 bp, Homo sapien
aatattgtaattgactattcataaa

SEQ ID NO: 419144 - DNA, 25 bp, Homo sapien
taatgtgggcagatgaccaccggac

SEQ ID NO: 419145 - DNA, 25 bp, Homo sapien
taggtgatttaatcaggatgcaaaa

SEQ ID NO: 419146 - DNA, 25 bp, Homo sapien
gaaagcccatcatgtggtcatcagt

SEQ ID NO: 419147 - DNA, 25 bp, Homo sapien
gatgcaaaatcctacagacagcgtg

SEQ ID NO: 419148 - DNA, 25 bp, Homo sapien
taccataccgccaaaggtgtcagga

SEQ ID NO: 419149 - DNA, 25 bp, Homo sapien
gactgctttgccaacaaaatgccag

SEQ ID NO: 419150 - DNA, 25 bp, Homo sapien
ttcagacacactgggaacgttccaa

SEQ ID NO: 419151 - DNA, 25 bp, Homo sapien
tgtcaggaaacacgctcaaataagg

SEQ ID NO: 419152 - DNA, 25 bp, Homo sapien
cagggcgaagaagcactgaacacgt

SEQ ID NO: 419153 - DNA, 25 bp, Homo sapien
caacattggaactttccagggcgaa

SEQ ID NO: 419154 - DNA, 25 bp, Homo sapien
cacaatgggctgctggttcaaggac

SEQ ID NO: 419155 - DNA, 25 bp, Homo sapien
tgaacacgtcgcaagagcatggact

SEQ ID NO: 419156 - DNA, 25 bp, Homo sapien
tctccttgtagataaaactggaccc

SEQ ID NO: 419157 - DNA, 25 bp, Homo sapien
cctaggcttagcctcaatctccttg

SEQ ID NO: 419158 - DNA, 25 bp, Homo sapien
cacttggctggttaagacccgcagg

SEQ ID NO: 419159 - DNA, 25 bp, Homo sapien
acctgcctaggcttagcctcaatct

SEQ ID NO: 419160 - DNA, 25 bp, Homo sapien
gacctgtgaagatgcctgatcagct

SEQ ID NO: 419161 - DNA, 25 bp, Homo sapien
cagagccgctcgaccatgaggatat

SEQ ID NO: 419162 - DNA, 25 bp, Homo sapien
tcagggttacgtagacactggctgc

SEQ ID NO: 419163 - DNA, 25 bp, Homo sapien
aatgtgccatgctgcgtgggatgcc

SEQ ID NO: 419164 - DNA, 25 bp, Homo sapien
ggagacgctgcagcttggttcttat

SEQ ID NO: 419165 - DNA, 25 bp, Homo sapien
ctttctggggagacgctgcagcttg

SEQ ID NO: 419166 - DNA, 25 bp, Homo sapien
cgctgcagcttggttcttatttcct

SEQ ID NO: 419167 - DNA, 25 bp, Homo sapien
gacgctgcagcttggttcttatttc

SEQ ID NO: 419168 - DNA, 25 bp, Homo sapien
tttccattttgctagattccctcca

SEQ ID NO: 419169 - DNA, 25 bp, Homo sapien
gccaaatgctcggtgaagcgtcttc

SEQ ID NO: 419170 - DNA, 25 bp, Homo sapien
accaagatgtttcctagaggtggca

SEQ ID NO: 419171 - DNA, 25 bp, Homo sapien
ccctcaagcttctacaaaactgtgg

SEQ ID NO: 419172 - DNA, 25 bp, Homo sapien
acaggaaacaaccacatagacatat

SEQ ID NO: 419173 - DNA, 25 bp, Homo sapien
ggaaacaaccacatagacatattct

SEQ ID NO: 419174 - DNA, 25 bp, Homo sapien
tattctgtatctggctgcctttccc

SEQ ID NO: 419175 - DNA, 25 bp, Homo sapien
atattctgtatctggctgcctttcc

SEQ ID NO: 419176 - DNA, 25 bp, Homo sapien
gatcttatgcttttgatcatccatg

SEQ ID NO: 419177 - DNA, 25 bp, Homo sapien
tccatggagaaaaacgcaaacggac

SEQ ID NO: 419178 - DNA, 25 bp, Homo sapien
aacggacgcaggaatgctccaatct

SEQ ID NO: 419179 - DNA, 25 bp, Homo sapien
tgcctttcccacgatcttatgcttt

SEQ ID NO: 419180 - DNA, 25 bp, Homo sapien
agcatttgcgagaagctgctcacca

SEQ ID NO: 419181 - DNA, 25 bp, Homo sapien
gctttcagcatttgcgagaagctgc

SEQ ID NO: 419182 - DNA, 25 bp, Homo sapien
gagaccgctttcagcatttgcgaga

SEQ ID NO: 419183 - DNA, 25 bp, Homo sapien
ctgttcagtgagaccgctttcagca

SEQ ID NO: 419184 - DNA, 25 bp, Homo sapien
aaacctagaaggtgagtgcgctacc

SEQ ID NO: 419185 - DNA, 25 bp, Homo sapien
cctcatggcagttaggtgtgggcca

SEQ ID NO: 419186 - DNA, 25 bp, Homo sapien
gtaaaagaccatctcagcaccgggt

SEQ ID NO: 419187 - DNA, 25 bp, Homo sapien
agccacacagacaggaacaagcgag

SEQ ID NO: 419188 - DNA, 25 bp, Homo sapien
agcgctacgctctggggaccgtcag

SEQ ID NO: 419189 - DNA, 25 bp, Homo sapien
gctctggggaccgtcagccttttct

SEQ ID NO: 419190 - DNA, 25 bp, Homo sapien
gaatgagctcactttggcatctgtg

SEQ ID NO: 419191 - DNA, 25 bp, Homo sapien
atctgtgtgaccagggacggctgcc

SEQ ID NO: 419192 - DNA, 25 bp, Homo sapien
tgagtaagctggtaggatcaactgt

SEQ ID NO: 419193 - DNA, 25 bp, Homo sapien
tcagaagctacataaatggtcaggc

SEQ ID NO: 419194 - DNA, 25 bp, Homo sapien
caagcatgttagagataaatcagac

SEQ ID NO: 419195 - DNA, 25 bp, Homo sapien
ccagccaggatgcaatcttattggt

SEQ ID NO: 419196 - DNA, 25 bp, Homo sapien
tagtgagagcataccatgaagacat

SEQ ID NO: 419197 - DNA, 25 bp, Homo sapien
aaaggtgaccgacgtggctgaagca

SEQ ID NO: 419198 - DNA, 25 bp, Homo sapien
caaaggccctcagtgggattggaga

SEQ ID NO: 419199 - DNA, 25 bp, Homo sapien
gacatgtgacagaggactattccag

SEQ ID NO: 419200 - DNA, 25 bp, Homo sapien
caaatactgagggttctggaccaag

SEQ ID NO: 419201 - DNA, 25 bp, Homo sapien
ttagcaaacacgaagcatggtgacc

SEQ ID NO: 419202 - DNA, 25 bp, Homo sapien
cacattgacggtgctcagctagcca

SEQ ID NO: 419203 - DNA, 25 bp, Homo sapien
gatgtgccgtttcccaaaagcagga

SEQ ID NO: 419204 - DNA, 25 bp, Homo sapien
gaaacccatgtggaatactcattgt

SEQ ID NO: 419205 - DNA, 25 bp, Homo sapien
caggtcagaacacactactaggtcc

SEQ ID NO: 419206 - DNA, 25 bp, Homo sapien
aaagcccaaggcgtcactgagctgg

SEQ ID NO: 419207 - DNA, 25 bp, Homo sapien
gctgtctggcacatcttcttccatt

SEQ ID NO: 419208 - DNA, 25 bp, Homo sapien
tggtccctgggttcaatgcaacgct

SEQ ID NO: 419209 - DNA, 25 bp, Homo sapien
gaatgtgcagtccaccaatccgctt

SEQ ID NO: 419210 - DNA, 25 bp, Homo sapien
tcttcccgtagctgaggctcaaatg

SEQ ID NO: 419211 - DNA, 25 bp, Homo sapien
cagcaggtacggtaactgccactca

SEQ ID NO: 419212 - DNA, 25 bp, Homo sapien
aattgcggccgtcattgtccaggcc

SEQ ID NO: 419213 - DNA, 25 bp, Homo sapien
gaaattgcggccgtcattgtccagg

SEQ ID NO: 419214 - DNA, 25 bp, Homo sapien
gagggaaattgcggccgtcattgtc

SEQ ID NO: 419215 - DNA, 25 bp, Homo sapien
gggaaattgcggccgtcattgtcca

SEQ ID NO: 419216 - DNA, 25 bp, Homo sapien
aacttggtagacagacatgttctgg

SEQ ID NO: 419217 - DNA, 25 bp, Homo sapien
ttggtagacagacatgttctgggtc

SEQ ID NO: 419218 - DNA, 25 bp, Homo sapien
tagacagacatgttctgggtcacat

SEQ ID NO: 419219 - DNA, 25 bp, Homo sapien
acagacatgttctgggtcacatggc

SEQ ID NO: 419220 - DNA, 25 bp, Homo sapien
gtccagaggtatcgccattgagttc

SEQ ID NO: 419221 - DNA, 25 bp, Homo sapien
gtatcgccattgagttcagcacagt

SEQ ID NO: 419222 - DNA, 25 bp, Homo sapien
gaggtatcgccattgagttcagcac

SEQ ID NO: 419223 - DNA, 25 bp, Homo sapien
tcgagtccagaggtatcgccattga

SEQ ID NO: 419224 - DNA, 25 bp, Homo sapien
catctcaggaagccaacacacacag

SEQ ID NO: 419225 - DNA, 25 bp, Homo sapien
tcatctcaggaagccaacacacaca

SEQ ID NO: 419226 - DNA, 25 bp, Homo sapien
atctcaggaagccaacacacacagc

SEQ ID NO: 419227 - DNA, 25 bp, Homo sapien
taaggagcctcagatgcacagctgc

SEQ ID NO: 419228 - DNA, 25 bp, Homo sapien
aagggttgtaaggagcctcagatgc

SEQ ID NO: 419229 - DNA, 25 bp, Homo sapien
gacaactaaggagaatgaagagctt

SEQ ID NO: 419230 - DNA, 25 bp, Homo sapien
gccttctctagcaccacacttttgg

SEQ ID NO: 419231 - DNA, 25 bp, Homo sapien
tccaaatgtggaagtgaacttcctt

SEQ ID NO: 419232 - DNA, 25 bp, Homo sapien
tctgtgggagtgtgcatgaggggag

SEQ ID NO: 419233 - DNA, 25 bp, Homo sapien
caaatgtggaagtgaacttccttct

SEQ ID NO: 419234 - DNA, 25 bp, Homo sapien
gaggtaatgaggttccagattccaa

SEQ ID NO: 419235 - DNA, 25 bp, Homo sapien
aagcattgaaagtagccaggtgggc

SEQ ID NO: 419236 - DNA, 25 bp, Homo sapien
gtccaagtgtgaccaagatgggcca

SEQ ID NO: 419237 - DNA, 25 bp, Homo sapien
gtggccaagcgccagagaggccaat

SEQ ID NO: 419238 - DNA, 25 bp, Homo sapien
ccaggtgggcgagtggccaagcgcc

SEQ ID NO: 419239 - DNA, 25 bp, Homo sapien
agtcactgtgacaaaactattctgg

SEQ ID NO: 419240 - DNA, 25 bp, Homo sapien
ccacttacacagctccatactggta

SEQ ID NO: 419241 - DNA, 25 bp, Homo sapien
tcgtagcagagtcccacaaaagtcc

SEQ ID NO: 419242 - DNA, 25 bp, Homo sapien
taagggccgatgtccttccacagtc

SEQ ID NO: 419243 - DNA, 25 bp, Homo sapien
gcaagaataagggtcgactttaata

SEQ ID NO: 419244 - DNA, 25 bp, Homo sapien
agcaagaataagggtcgactttaat

SEQ ID NO: 419245 - DNA, 25 bp, Homo sapien
tcggtgctccctaattacaactgct

SEQ ID NO: 419246 - DNA, 25 bp, Homo sapien
aatccgatcgattgggtccataagg

SEQ ID NO: 419247 - DNA, 25 bp, Homo sapien
taaggaaagatgtatgcattcggtg

SEQ ID NO: 419248 - DNA, 25 bp, Homo sapien
ctaattacaactgctttggtgggca

SEQ ID NO: 419249 - DNA, 25 bp, Homo sapien
aaagaagtcactgcacaccttttgc

SEQ ID NO: 419250 - DNA, 25 bp, Homo sapien
tacagcagagaaggtcaattgggcc

SEQ ID NO: 419251 - DNA, 25 bp, Homo sapien
tcttttcaagcttacatggacttga

SEQ ID NO: 419252 - DNA, 25 bp, Homo sapien
taaggccgatgtgcaaatccaccac

SEQ ID NO: 419253 - DNA, 25 bp, Homo sapien
cttcagaaacttccgtgccgcggca

SEQ ID NO: 419254 - DNA, 25 bp, Homo sapien
gaatactgggcttcctttctaagcc

SEQ ID NO: 419255 - DNA, 25 bp, Homo sapien
taagccataatgaacatgggcaagt

SEQ ID NO: 419256 - DNA, 25 bp, Homo sapien
cagggaggtgaggaatcccgaatac

SEQ ID NO: 419257 - DNA, 25 bp, Homo sapien
tatttaaagttgcatatgataaact

SEQ ID NO: 419258 - DNA, 25 bp, Homo sapien
ttaaagttgcatatgataaactgta

SEQ ID NO: 419259 - DNA, 25 bp, Homo sapien
taaagttgcatatgataaactgtaa

SEQ ID NO: 419260 - DNA, 25 bp, Homo sapien
aaagttgcatatgataaactgtaaa

SEQ ID NO: 419261 - DNA, 25 bp, Homo sapien
gacttgcttgcctggatgccagcca

SEQ ID NO: 419262 - DNA, 25 bp, Homo sapien
tctgcgggtagaaaaggagcccctg

SEQ ID NO: 419263 - DNA, 25 bp, Homo sapien
caaagatgtccagggcagcctagag

SEQ ID NO: 419264 - DNA, 25 bp, Homo sapien
aaggctcggaggctggagacttgct

SEQ ID NO: 419265 - DNA, 25 bp, Homo sapien
tcccttccttgtggaatggcgaagg

SEQ ID NO: 419266 - DNA, 25 bp, Homo sapien
ttgagtccggagacccctgttcctc

SEQ ID NO: 419267 - DNA, 25 bp, Homo sapien
tttggaccgtagccacctcttaaga

SEQ ID NO: 419268 - DNA, 25 bp, Homo sapien
atgcctgtccttagcgccttgagtc

SEQ ID NO: 419269 - DNA, 25 bp, Homo sapien
gcgtctctctaagtttaatctgtga

SEQ ID NO: 419270 - DNA, 25 bp, Homo sapien
tgagataagctggattacctgaaca

SEQ ID NO: 419271 - DNA, 25 bp, Homo sapien
ggttatctaacacgggaagaccaga

SEQ ID NO: 419272 - DNA, 25 bp, Homo sapien
taaagacaaattcctaactgatgag

SEQ ID NO: 419273 - DNA, 25 bp, Homo sapien
tgctgcttggtgccaggccagctgc

SEQ ID NO: 419274 - DNA, 25 bp, Homo sapien
caggggccctcaagtccatgcacag

SEQ ID NO: 419275 - DNA, 25 bp, Homo sapien
tcccaggggccctcaagtccatgca

SEQ ID NO: 419276 - DNA, 25 bp, Homo sapien
cccaggggccctcaagtccatgcac

SEQ ID NO: 419277 - DNA, 25 bp, Homo sapien
catattctaagaccttgaggacccc

SEQ ID NO: 419278 - DNA, 25 bp, Homo sapien
tctgcctctaaagcctgatcgttaa

SEQ ID NO: 419279 - DNA, 25 bp, Homo sapien
gcctgatcgttaagccatattctaa

SEQ ID NO: 419280 - DNA, 25 bp, Homo sapien
accagaaggatcagaggaccagatc

SEQ ID NO: 419281 - DNA, 25 bp, Homo sapien
gaattatctgtatagatcgtttata

SEQ ID NO: 419282 - DNA, 25 bp, Homo sapien
acttcaagaagttggccacgcatgg

SEQ ID NO: 419283 - DNA, 25 bp, Homo sapien
tgagcacatattccgatgcatatta

SEQ ID NO: 419284 - DNA, 25 bp, Homo sapien
tcatcacatcttcttaacagtcaga

SEQ ID NO: 419285 - DNA, 25 bp, Homo sapien
tccagttccaggtcagttgcttcag

SEQ ID NO: 419286 - DNA, 25 bp, Homo sapien
caggtcagttgcttcagcgatattc

SEQ ID NO: 419287 - DNA, 25 bp, Homo sapien
tgaacaaaccctcaagatcctttct

SEQ ID NO: 419288 - DNA, 25 bp, Homo sapien
ctgtttgttcgatccgattccaaag

SEQ ID NO: 419289 - DNA, 25 bp, Homo sapien
ctggccagcttggagttttttgtct

SEQ ID NO: 419290 - DNA, 25 bp, Homo sapien
gcagaggtaggaagatggaagattt

SEQ ID NO: 419291 - DNA, 25 bp, Homo sapien
acagggtccacaagaggagagggga

SEQ ID NO: 419292 - DNA, 25 bp, Homo sapien
cttttgcgtaagtggactgagtttt

SEQ ID NO: 419293 - DNA, 25 bp, Homo sapien
aagtggactgagttttgcagaggta

SEQ ID NO: 419294 - DNA, 25 bp, Homo sapien
gaagtcaggctaattccccaaacta

SEQ ID NO: 419295 - DNA, 25 bp, Homo sapien
tcaacatgcagagaaagctgctgat

SEQ ID NO: 419296 - DNA, 25 bp, Homo sapien
ccaggactggtcagatcaacatgca

SEQ ID NO: 419297 - DNA, 25 bp, Homo sapien
tgaggaaactaagcagagacagatc

SEQ ID NO: 419298 - DNA, 25 bp, Homo sapien
ctcaacggtcttgatactttcacaa

SEQ ID NO: 419299 - DNA, 25 bp, Homo sapien
tttcaaagtataagactcaacggtc

SEQ ID NO: 419300 - DNA, 25 bp, Homo sapien
catcacttctgacgtaagctttaga

SEQ ID NO: 419301 - DNA, 25 bp, Homo sapien
tataggcaaactcgtgtcagaggtt

SEQ ID NO: 419302 - DNA, 25 bp, Homo sapien
tttaaccttgcaaggcgctgcctgt

SEQ ID NO: 419303 - DNA, 25 bp, Homo sapien
gaagcgtgatgccatgaatatccac

SEQ ID NO: 419304 - DNA, 25 bp, Homo sapien
tccatggtacagcatgcatcagtac

SEQ ID NO: 419305 - DNA, 25 bp, Homo sapien
catccttgcgaatacttgttactgc

SEQ ID NO: 419306 - DNA, 25 bp, Homo sapien
tcgctgctctcgcatggctgatgag

SEQ ID NO: 419307 - DNA, 25 bp, Homo sapien
ggctgatgagccttatagagcctac

SEQ ID NO: 419308 - DNA, 25 bp, Homo sapien
tggtgtggtcgcctgtctttcagct

SEQ ID NO: 419309 - DNA, 25 bp, Homo sapien
agagcctacatcacatctcttggac

SEQ ID NO: 419310 - DNA, 25 bp, Homo sapien
caaggcttgcagaggagagagaact

SEQ ID NO: 419311 - DNA, 25 bp, Homo sapien
gcttgcagaggagagagaactgacc

SEQ ID NO: 419312 - DNA, 25 bp, Homo sapien
ctggagacatcagcaaggcttgcag

SEQ ID NO: 419313 - DNA, 25 bp, Homo sapien
ttgcagaggagagagaactgaccat

SEQ ID NO: 419314 - DNA, 25 bp, Homo sapien
caaagaacttttatgctagtgctca

SEQ ID NO: 419315 - DNA, 25 bp, Homo sapien
cccaaaggcccaagtgtaaactgat

SEQ ID NO: 419316 - DNA, 25 bp, Homo sapien
caaaaatcagcccacagatggttgc

SEQ ID NO: 419317 - DNA, 25 bp, Homo sapien
gggcagttaccctcccttgttatca

SEQ ID NO: 419318 - DNA, 25 bp, Homo sapien
taaacgaaactactactactgagca

SEQ ID NO: 419319 - DNA, 25 bp, Homo sapien
tctgatattatccataggtccctga

SEQ ID NO: 419320 - DNA, 25 bp, Homo sapien
taaaggtcagaaattgtactggcac

SEQ ID NO: 419321 - DNA, 25 bp, Homo sapien
taggactcccgttatagctttacca

SEQ ID NO: 419322 - DNA, 25 bp, Homo sapien
tgcccggcccagtctgaggtttttg

SEQ ID NO: 419323 - DNA, 25 bp, Homo sapien
tcatttttaggtaaattctgtatgc

SEQ ID NO: 419324 - DNA, 25 bp, Homo sapien
taaattctgtatgcacatattaccc

SEQ ID NO: 419325 - DNA, 25 bp, Homo sapien
cgtgcccggcccagtctgaggtttt

SEQ ID NO: 419326 - DNA, 25 bp, Homo sapien
tcagagactatgcaatgggctttcc

SEQ ID NO: 419327 - DNA, 25 bp, Homo sapien
tgcttaagggcgaggttccaaggcc

SEQ ID NO: 419328 - DNA, 25 bp, Homo sapien
gaatccagtgaaagagcaggctagg

SEQ ID NO: 419329 - DNA, 25 bp, Homo sapien
tctaacgtaagctttcaggcaccag

SEQ ID NO: 419330 - DNA, 25 bp, Homo sapien
agatgaagactgccaccattgagaa

SEQ ID NO: 419331 - DNA, 25 bp, Homo sapien
cattcaaaagataggtgctgttggc

SEQ ID NO: 419332 - DNA, 25 bp, Homo sapien
agaacattcaaaagataggtgctgt

SEQ ID NO: 419333 - DNA, 25 bp, Homo sapien
tcaaaagataggtgctgttggccag

SEQ ID NO: 419334 - DNA, 25 bp, Homo sapien
caacatcaacgctgagaggacactg

SEQ ID NO: 419335 - DNA, 25 bp, Homo sapien
actttgttactgcaccccggaatga

SEQ ID NO: 419336 - DNA, 25 bp, Homo sapien
tgaagacatcaacatcaacgctgag

SEQ ID NO: 419337 - DNA, 25 bp, Homo sapien
tgtttataggccattcagtggatgc

SEQ ID NO: 419338 - DNA, 25 bp, Homo sapien
taagcaagtttatgcccatctgctc

SEQ ID NO: 419339 - DNA, 25 bp, Homo sapien
tatacgaaggaaattggcgtaagca

SEQ ID NO: 419340 - DNA, 25 bp, Homo sapien
cacactgcggtttcacgtcatttca

SEQ ID NO: 419341 - DNA, 25 bp, Homo sapien
cttattcaggatgcacaagtatacg

SEQ ID NO: 419342 - DNA, 25 bp, Homo sapien
tatgtatgccccagaaacaaggcct

SEQ ID NO: 419343 - DNA, 25 bp, Homo sapien
caggtctcacaggttctcgactgct

SEQ ID NO: 419344 - DNA, 25 bp, Homo sapien
ccttctatatgttgggaggtagacc

SEQ ID NO: 419345 - DNA, 25 bp, Homo sapien
caaaacctttgatcgagtcctgacc

SEQ ID NO: 419346 - DNA, 25 bp, Homo sapien
tccaagaatattaaggcaatatatt

SEQ ID NO: 419347 - DNA, 25 bp, Homo sapien
agcccagccctctgcggatgtgcgg

SEQ ID NO: 419348 - DNA, 25 bp, Homo sapien
cctctgcggatgtgcgggagcctca

SEQ ID NO: 419349 - DNA, 25 bp, Homo sapien
gctggacagcgtgtggtgaagccca

SEQ ID NO: 419350 - DNA, 25 bp, Homo sapien
gaagtacccgtatttttctatctga

SEQ ID NO: 419351 - DNA, 25 bp, Homo sapien
ttcacctccccaaatcttttgttca

SEQ ID NO: 419352 - DNA, 25 bp, Homo sapien
caggtggcaatgacacgaaatattc

SEQ ID NO: 419353 - DNA, 25 bp, Homo sapien
tcttttgttcaataacttgtctcat

SEQ ID NO: 419354 - DNA, 25 bp, Homo sapien
taactatcgcgagttaccccttcga

SEQ ID NO: 419355 - DNA, 25 bp, Homo sapien
cgatataatgaagtcttcgcttgag

SEQ ID NO: 419356 - DNA, 25 bp, Homo sapien
tcttcgcttgagtaacaaaggatta

SEQ ID NO: 419357 - DNA, 25 bp, Homo sapien
tattcagaaaatgtaactatcgcga

SEQ ID NO: 419358 - DNA, 25 bp, Homo sapien
tcaatggaacaggactcctctgagc

SEQ ID NO: 419359 - DNA, 25 bp, Homo sapien
ggtctggtcaaacgtattcctctac

SEQ ID NO: 419360 - DNA, 25 bp, Homo sapien
tcttctaggacaagagtacttccac

SEQ ID NO: 419361 - DNA, 25 bp, Homo sapien
tccccgtctattggtaagagaggat

SEQ ID NO: 419362 - DNA, 25 bp, Homo sapien
caagccactgcataagaggatccct

SEQ ID NO: 419363 - DNA, 25 bp, Homo sapien
ccatccaggagacgcatcgttgtgg

SEQ ID NO: 419364 - DNA, 25 bp, Homo sapien
gaaacaaatctaagagagagctggc

SEQ ID NO: 419365 - DNA, 25 bp, Homo sapien
tggtcaccacaggtatacaagatgg

SEQ ID NO: 419366 - DNA, 25 bp, Homo sapien
tagggtacagaaatagggccaaaca

SEQ ID NO: 419367 - DNA, 25 bp, Homo sapien
taggtatagattactggcacagaat

SEQ ID NO: 419368 - DNA, 25 bp, Homo sapien
caagacggtgtggtattggcacaca

SEQ ID NO: 419369 - DNA, 25 bp, Homo sapien
gaaaccttgatctctatctcacatg

SEQ ID NO: 419370 - DNA, 25 bp, Homo sapien
tgggctacccacacatgcaataagg

SEQ ID NO: 419371 - DNA, 25 bp, Homo sapien
gatgagcgcatgagaactgattaag

SEQ ID NO: 419372 - DNA, 25 bp, Homo sapien
tatatcagtgatctcctgaggctcc

SEQ ID NO: 419373 - DNA, 25 bp, Homo sapien
gaagggtatccagtacactatatga

SEQ ID NO: 419374 - DNA, 25 bp, Homo sapien
aagtagccaccctcatcccgtggag

SEQ ID NO: 419375 - DNA, 25 bp, Homo sapien
taatgggctacagccaagtagccac

SEQ ID NO: 419376 - DNA, 25 bp, Homo sapien
tcccgtggagaacgcgctccagctg

SEQ ID NO: 419377 - DNA, 25 bp, Homo sapien
aactctttccacacagcagtaatgg

SEQ ID NO: 419378 - DNA, 25 bp, Homo sapien
acccctatctggtttctgcaggaaa

SEQ ID NO: 419379 - DNA, 25 bp, Homo sapien
tcacccctatctggtttctgcagga

SEQ ID NO: 419380 - DNA, 25 bp, Homo sapien
ctcacccctatctggtttctgcagg

SEQ ID NO: 419381 - DNA, 25 bp, Homo sapien
cacccctatctggtttctgcaggaa

SEQ ID NO: 419382 - DNA, 25 bp, Homo sapien
aataaggctggttttataggcatca

SEQ ID NO: 419383 - DNA, 25 bp, Homo sapien
gcagggagtgaataagtcatttcta

SEQ ID NO: 419384 - DNA, 25 bp, Homo sapien
gctcactgtagaagcggaatctatt

SEQ ID NO: 419385 - DNA, 25 bp, Homo sapien
tgccaactagcgaagaccacaaaag

SEQ ID NO: 419386 - DNA, 25 bp, Homo sapien
tgtgaggccgcaagaggcactccct

SEQ ID NO: 419387 - DNA, 25 bp, Homo sapien
gctgtgaggccgcaagaggcactcc

SEQ ID NO: 419388 - DNA, 25 bp, Homo sapien
ctgtgaggccgcaagaggcactccc

SEQ ID NO: 419389 - DNA, 25 bp, Homo sapien
agctgtgaggccgcaagaggcactc

SEQ ID NO: 419390 - DNA, 25 bp, Homo sapien
ctcggaccttcccttcttaatgaag

SEQ ID NO: 419391 - DNA, 25 bp, Homo sapien
gctgaaagctcggaccttcccttct

SEQ ID NO: 419392 - DNA, 25 bp, Homo sapien
agcctctggtggccagtttagtaaa

SEQ ID NO: 419393 - DNA, 25 bp, Homo sapien
agtaaaaagtgttggctctcatgct

SEQ ID NO: 419394 - DNA, 25 bp, Homo sapien
aaaaggggtccactggcaggcaact

SEQ ID NO: 419395 - DNA, 25 bp, Homo sapien
gggtccactggcaggcaactctgca

SEQ ID NO: 419396 - DNA, 25 bp, Homo sapien
ctggactcactggggggaccaaaag

SEQ ID NO: 419397 - DNA, 25 bp, Homo sapien
gaccaaaaggggtccactggcaggc

SEQ ID NO: 419398 - DNA, 25 bp, Homo sapien
tattctttccagttatatcacagta

SEQ ID NO: 419399 - DNA, 25 bp, Homo sapien
aaatgccaagggctgaccgtcgctg

SEQ ID NO: 419400 - DNA, 25 bp, Homo sapien
tctttgggtcttgctactattcttt

SEQ ID NO: 419401 - DNA, 25 bp, Homo sapien
gtcgctgaggcgagtgttttttctc

SEQ ID NO: 419402 - DNA, 25 bp, Homo sapien
agggtcctgtatgcgaggcagccta

SEQ ID NO: 419403 - DNA, 25 bp, Homo sapien
tcctgtatgcgaggcagcctagctc

SEQ ID NO: 419404 - DNA, 25 bp, Homo sapien
cgaggcagcctagctcagcagcgac

SEQ ID NO: 419405 - DNA, 25 bp, Homo sapien
tgtatgcgaggcagcctagctcagc

SEQ ID NO: 419406 - DNA, 25 bp, Homo sapien
gatttagcagatgactgggtgccaa

SEQ ID NO: 419407 - DNA, 25 bp, Homo sapien
aatccctaaggcaggcgatgagcca

SEQ ID NO: 419408 - DNA, 25 bp, Homo sapien
tgggtgccaagatcctctccatgga

SEQ ID NO: 419409 - DNA, 25 bp, Homo sapien
aacagagtgtcttgcagggcacagg

SEQ ID NO: 419410 - DNA, 25 bp, Homo sapien
caggaacttgtttcatgtcacagct

SEQ ID NO: 419411 - DNA, 25 bp, Homo sapien
agctgggaggtagttctaagtgcac

SEQ ID NO: 419412 - DNA, 25 bp, Homo sapien
tctggagtttgcactatgttggagc

SEQ ID NO: 419413 - DNA, 25 bp, Homo sapien
gccaagggttgtcagaatctctcta

SEQ ID NO: 419414 - DNA, 25 bp, Homo sapien
ggtggtagatttgtactcctcgtcc

SEQ ID NO: 419415 - DNA, 25 bp, Homo sapien
cattctctgagtgtaaccctgttac

SEQ ID NO: 419416 - DNA, 25 bp, Homo sapien
tactggactagaatctcattctctg

SEQ ID NO: 419417 - DNA, 25 bp, Homo sapien
tactcctcgtccacagaggtactgg

SEQ ID NO: 419418 - DNA, 25 bp, Homo sapien
tggtcactgacgtctagaatcacta

SEQ ID NO: 419419 - DNA, 25 bp, Homo sapien
tcactaccctgatggtttcaacttc

SEQ ID NO: 419420 - DNA, 25 bp, Homo sapien
gcagtatttcatcgcagtggtcact

SEQ ID NO: 419421 - DNA, 25 bp, Homo sapien
cacttggaagagtgacaaaacataa

SEQ ID NO: 419422 - DNA, 25 bp, Homo sapien
caccaaatccatgctgccctgagta

SEQ ID NO: 419423 - DNA, 25 bp, Homo sapien
accaaatccatgctgccctgagtac

SEQ ID NO: 419424 - DNA, 25 bp, Homo sapien
tcaccaaatccatgctgccctgagt

SEQ ID NO: 419425 - DNA, 25 bp, Homo sapien
cttgtgcagtgcacccttgcttgtc

SEQ ID NO: 419426 - DNA, 25 bp, Homo sapien
gctcaagacgctgagcttcacctcg

SEQ ID NO: 419427 - DNA, 25 bp, Homo sapien
gacgctgagcttcacctcgctctgg

SEQ ID NO: 419428 - DNA, 25 bp, Homo sapien
ccaagttctggactgtcttgtgcag

SEQ ID NO: 419429 - DNA, 25 bp, Homo sapien
gaatggactccctggtagcaatgac

SEQ ID NO: 419430 - DNA, 25 bp, Homo sapien
tctggtacaggtcttcgggaatgga

SEQ ID NO: 419431 - DNA, 25 bp, Homo sapien
tgttctcggcagacgcaaacttgac

SEQ ID NO: 419432 - DNA, 25 bp, Homo sapien
gctataatcgtagggaaggtctgga

SEQ ID NO: 419433 - DNA, 25 bp, Homo sapien
tttgggtcatctctgccaacatgct

SEQ ID NO: 419434 - DNA, 25 bp, Homo sapien
gaaggttcaggcttcggctctagga

SEQ ID NO: 419435 - DNA, 25 bp, Homo sapien
tgatccttaacttccttcagagtgg

SEQ ID NO: 419436 - DNA, 25 bp, Homo sapien
ggcttgcttgtttgagacctgatcc

SEQ ID NO: 419437 - DNA, 25 bp, Homo sapien
ttccaggacagcctctggcacggct

SEQ ID NO: 419438 - DNA, 25 bp, Homo sapien
aggacagcctctggcacggctccca

SEQ ID NO: 419439 - DNA, 25 bp, Homo sapien
cctctggcacggctcccacctgcat

SEQ ID NO: 419440 - DNA, 25 bp, Homo sapien
gacagcctctggcacggctcccacc

SEQ ID NO: 419441 - DNA, 25 bp, Homo sapien
tccattatccatgtggagtctatct

SEQ ID NO: 419442 - DNA, 25 bp, Homo sapien
agtccattatccatgtggagtctat

SEQ ID NO: 419443 - DNA, 25 bp, Homo sapien
cattatccatgtggagtctatcttc

SEQ ID NO: 419444 - DNA, 25 bp, Homo sapien
tatccatgtggagtctatcttccat

SEQ ID NO: 419445 - DNA, 25 bp, Homo sapien
ttgcttcagcaattagccgataagg

SEQ ID NO: 419446 - DNA, 25 bp, Homo sapien
caattagccgataaggatccccagg

SEQ ID NO: 419447 - DNA, 25 bp, Homo sapien
caaacaacagtctgaccacttgaca

SEQ ID NO: 419448 - DNA, 25 bp, Homo sapien
ccaggtctgcaagctaatggcaaac

SEQ ID NO: 419449 - DNA, 25 bp, Homo sapien
cttggaaggttactgggagcactaa

SEQ ID NO: 419450 - DNA, 25 bp, Homo sapien
aagtcctttagagcaagtaacctca

SEQ ID NO: 419451 - DNA, 25 bp, Homo sapien
gatcatccataaagtgcctgggcca

SEQ ID NO: 419452 - DNA, 25 bp, Homo sapien
caagggtgctcttatggttccaaaa

SEQ ID NO: 419453 - DNA, 25 bp, Homo sapien
gaattttcatttagctctacttgta

SEQ ID NO: 419454 - DNA, 25 bp, Homo sapien
agaattttcatttagctctacttgt

SEQ ID NO: 419455 - DNA, 25 bp, Homo sapien
acctgtgtagaatatttggacaaag

SEQ ID NO: 419456 - DNA, 25 bp, Homo sapien
taacctgtgtagaatatttggacaa

SEQ ID NO: 419457 - DNA, 25 bp, Homo sapien
gcccacccaatgtttcagcagagtt

SEQ ID NO: 419458 - DNA, 25 bp, Homo sapien
tcaggcccacccaatgtttcagcag

SEQ ID NO: 419459 - DNA, 25 bp, Homo sapien
ctagagggtcaggcccacccaatgt

SEQ ID NO: 419460 - DNA, 25 bp, Homo sapien
gggtcaggcccacccaatgtttcag

SEQ ID NO: 419461 - DNA, 25 bp, Homo sapien
taaaggcaccattgtcctcagagca

SEQ ID NO: 419462 - DNA, 25 bp, Homo sapien
ctcccgcgggaagctaaaggcacca

SEQ ID NO: 419463 - DNA, 25 bp, Homo sapien
gccaatggagactcaacccggaatt

SEQ ID NO: 419464 - DNA, 25 bp, Homo sapien
aggaggaggagaaccgctcagccaa

SEQ ID NO: 419465 - DNA, 25 bp, Homo sapien
agaatacatccacacatcccggatc

SEQ ID NO: 419466 - DNA, 25 bp, Homo sapien
gaatacatccacacatcccggatca

SEQ ID NO: 419467 - DNA, 25 bp, Homo sapien
acatccacacatcccggatcaagtt

SEQ ID NO: 419468 - DNA, 25 bp, Homo sapien
atacatccacacatcccggatcaag

SEQ ID NO: 419469 - DNA, 25 bp, Homo sapien
caggttaaactagcacaggtggccc

SEQ ID NO: 419470 - DNA, 25 bp, Homo sapien
tctaggagcgtggtccatgagccat

SEQ ID NO: 419471 - DNA, 25 bp, Homo sapien
tgatacgtcgtccagggtgtttgcc

SEQ ID NO: 419472 - DNA, 25 bp, Homo sapien
gaaccgcgctgtcactgatacgtcg

SEQ ID NO: 419473 - DNA, 25 bp, Homo sapien
cctggacgacagaacgacactccgt

SEQ ID NO: 419474 - DNA, 25 bp, Homo sapien
agcctggacgacagaacgacactcc

SEQ ID NO: 419475 - DNA, 25 bp, Homo sapien
gcctggacgacagaacgacactccg

SEQ ID NO: 419476 - DNA, 25 bp, Homo sapien
acctcatccccccattccactgatg

SEQ ID NO: 419477 - DNA, 25 bp, Homo sapien
catccccccattccactgatgtaag

SEQ ID NO: 419478 - DNA, 25 bp, Homo sapien
cacctcatccccccattccactgat

SEQ ID NO: 419479 - DNA, 25 bp, Homo sapien
ctcatccccccattccactgatgta

SEQ ID NO: 419480 - DNA, 25 bp, Homo sapien
tgatctctgtaaattctcactttgt

SEQ ID NO: 419481 - DNA, 25 bp, Homo sapien
gaggatgatctctgtaaattctcac

SEQ ID NO: 419482 - DNA, 25 bp, Homo sapien
tgaagaggatgatctctgtaaattc

SEQ ID NO: 419483 - DNA, 25 bp, Homo sapien
ggatgatctctgtaaattctcactt

SEQ ID NO: 419484 - DNA, 25 bp, Homo sapien
gacacaagaaatagggcccacttgt

SEQ ID NO: 419485 - DNA, 25 bp, Homo sapien
gctctccgtcacaaatgctatgtgt

SEQ ID NO: 419486 - DNA, 25 bp, Homo sapien
tgctatgtgttctgcttcaagtata

SEQ ID NO: 419487 - DNA, 25 bp, Homo sapien
agggcccacttgttcaagtcttcaa

SEQ ID NO: 419488 - DNA, 25 bp, Homo sapien
cacagtagctaaccgggaagtacat

SEQ ID NO: 419489 - DNA, 25 bp, Homo sapien
gaggaggcctagaagtacgtaccca

SEQ ID NO: 419490 - DNA, 25 bp, Homo sapien
ccattcctcactgcttagcacacag

SEQ ID NO: 419491 - DNA, 25 bp, Homo sapien
tagcacacagtagctaaccgggaag

SEQ ID NO: 419492 - DNA, 25 bp, Homo sapien
agggctgttccttcattccctacag

SEQ ID NO: 419493 - DNA, 25 bp, Homo sapien
gaagggctgttccttcattccctac

SEQ ID NO: 419494 - DNA, 25 bp, Homo sapien
ctgttccttcattccctacagccat

SEQ ID NO: 419495 - DNA, 25 bp, Homo sapien
gggctgttccttcattccctacagc

SEQ ID NO: 419496 - DNA, 25 bp, Homo sapien
gctcacacagcagttaaatccagag

SEQ ID NO: 419497 - DNA, 25 bp, Homo sapien
tccttatagtgaaatcaaccctgct

SEQ ID NO: 419498 - DNA, 25 bp, Homo sapien
taccatatgcagacgcaatcagaca

SEQ ID NO: 419499 - DNA, 25 bp, Homo sapien
gatctgggaagtgtgcaagtctctg

SEQ ID NO: 419500 - DNA, 25 bp, Homo sapien
ccgcgccgcagaaggtgaaggaaca

SEQ ID NO: 419501 - DNA, 25 bp, Homo sapien
acggctcaggcacacgcgggcgccc

SEQ ID NO: 419502 - DNA, 25 bp, Homo sapien
aaggaacagcgcgaggcacgcagcc

SEQ ID NO: 419503 - DNA, 25 bp, Homo sapien
ctggctgtcgctgacgcagaagacg

SEQ ID NO: 419504 - DNA, 25 bp, Homo sapien
cccacaggtacaggtagcacagcgt

SEQ ID NO: 419505 - DNA, 25 bp, Homo sapien
gcgcccacaggtacaggtagcacag

SEQ ID NO: 419506 - DNA, 25 bp, Homo sapien
ccagcgcgcccacaggtacaggtag

SEQ ID NO: 419507 - DNA, 25 bp, Homo sapien
cacaggtacaggtagcacagcgtga

SEQ ID NO: 419508 - DNA, 25 bp, Homo sapien
ggccgcgccgccggcagggcgagcc

SEQ ID NO: 419509 - DNA, 25 bp, Homo sapien
ccgcgccgccggcagggcgagcccg

SEQ ID NO: 419510 - DNA, 25 bp, Homo sapien
gccgcgccgccggcagggcgagccc

SEQ ID NO: 419511 - DNA, 25 bp, Homo sapien
cgcgccgccggcagggcgagcccgc

SEQ ID NO: 419512 - DNA, 25 bp, Homo sapien
ctgagttacatatagaaaggcttga

SEQ ID NO: 419513 - DNA, 25 bp, Homo sapien
tacagtatccatctcctaatccagt

SEQ ID NO: 419514 - DNA, 25 bp, Homo sapien
aaatgggtacttctatattgaaatc

SEQ ID NO: 419515 - DNA, 25 bp, Homo sapien
cttgaagtgtgttagagtatgtggc

SEQ ID NO: 419516 - DNA, 25 bp, Homo sapien
tgagaattggtatacacccatcggt

SEQ ID NO: 419517 - DNA, 25 bp, Homo sapien
tgcagtctcaaagtaggtccaaatt

SEQ ID NO: 419518 - DNA, 25 bp, Homo sapien
catcggtttggcagaaatccccttc

SEQ ID NO: 419519 - DNA, 25 bp, Homo sapien
ttcaaaaacagactgtacccagctg

SEQ ID NO: 419520 - DNA, 25 bp, Homo sapien
tgcggcaaaaccagcacagatgcat

SEQ ID NO: 419521 - DNA, 25 bp, Homo sapien
tgagacttccgtactcagggaaaac

SEQ ID NO: 419522 - DNA, 25 bp, Homo sapien
gggaactccagacactgcggcaaaa

SEQ ID NO: 419523 - DNA, 25 bp, Homo sapien
tctcctgtggctaaaagctccatga

SEQ ID NO: 419524 - DNA, 25 bp, Homo sapien
cttcatccgtttacattctccagcc

SEQ ID NO: 419525 - DNA, 25 bp, Homo sapien
tcatccgtttacattctccagccat

SEQ ID NO: 419526 - DNA, 25 bp, Homo sapien
ttcatccgtttacattctccagcca

SEQ ID NO: 419527 - DNA, 25 bp, Homo sapien
gaaacccgagccgtggaatctggta

SEQ ID NO: 419528 - DNA, 25 bp, Homo sapien
gcacctcgaacaagaaaaacgccga

SEQ ID NO: 419529 - DNA, 25 bp, Homo sapien
gagccaggccttgaacacacgattc

SEQ ID NO: 419530 - DNA, 25 bp, Homo sapien
gaataaaaagcaggatccaaggcag

SEQ ID NO: 419531 - DNA, 25 bp, Homo sapien
caggctccgggaccgctgaaacgca

SEQ ID NO: 419532 - DNA, 25 bp, Homo sapien
cgtggaagcggcgacttcggcacct

SEQ ID NO: 419533 - DNA, 25 bp, Homo sapien
tgaaggcgtagtcgccaaggacagc

SEQ ID NO: 419534 - DNA, 25 bp, Homo sapien
ctgcaggcctgataccggccgcgga

SEQ ID NO: 419535 - DNA, 25 bp, Homo sapien
tatgattagtcaaatgcagtagtga

SEQ ID NO: 419536 - DNA, 25 bp, Homo sapien
gataacttgctaccttcagactagc

SEQ ID NO: 419537 - DNA, 25 bp, Homo sapien
cagtagtgagaagggggaaaagaat

SEQ ID NO: 419538 - DNA, 25 bp, Homo sapien
agaataaaacaaagagttcaatctg

SEQ ID NO: 419539 - DNA, 25 bp, Homo sapien
ccagcagcacgaccgactaattttt

SEQ ID NO: 419540 - DNA, 25 bp, Homo sapien
tttttagcggcgagtaggccctgcg

SEQ ID NO: 419541 - DNA, 25 bp, Homo sapien
tttccgggcacttaggcgctgggtc

SEQ ID NO: 419542 - DNA, 25 bp, Homo sapien
gcgctgggtcattaggaagcctttc

SEQ ID NO: 419543 - DNA, 25 bp, Homo sapien
gcccgcgaatccctgccgcgccgcg

SEQ ID NO: 419544 - DNA, 25 bp, Homo sapien
ttctgaggccgaaacgcggccgctc

SEQ ID NO: 419545 - DNA, 25 bp, Homo sapien
gcggccgctcctgcgccgggtggtc

SEQ ID NO: 419546 - DNA, 25 bp, Homo sapien
ctgcgccgggtggtcgcccgcgaat

SEQ ID NO: 419547 - DNA, 25 bp, Homo sapien
aagcttgaaggactgataaatacct

SEQ ID NO: 419548 - DNA, 25 bp, Homo sapien
tttttccagaatggtacagtaccgc

SEQ ID NO: 419549 - DNA, 25 bp, Homo sapien
tccagaatggtacagtaccgctgag

SEQ ID NO: 419550 - DNA, 25 bp, Homo sapien
agaatggtacagtaccgctgaggac

SEQ ID NO: 419551 - DNA, 25 bp, Homo sapien
tggccaataggaggcgacaggaaga

SEQ ID NO: 419552 - DNA, 25 bp, Homo sapien
tcttgctcggttccattcctggcct

SEQ ID NO: 419553 - DNA, 25 bp, Homo sapien
tctgtctcctggaagggtcgccgcg

SEQ ID NO: 419554 - DNA, 25 bp, Homo sapien
aaaattcgcattctttccaaggccg

SEQ ID NO: 419555 - DNA, 25 bp, Homo sapien
gcccgccgctccaggctttattaaa

SEQ ID NO: 419556 - DNA, 25 bp, Homo sapien
gacccgctgccgctctaaggcggtg

SEQ ID NO: 419557 - DNA, 25 bp, Homo sapien
aaacccagggaatccgatgctcgca

SEQ ID NO: 419558 - DNA, 25 bp, Homo sapien
gaagcgagattctccggaaacccag

SEQ ID NO: 419559 - DNA, 25 bp, Homo sapien
gacccgaggattcggtagatgtccc

SEQ ID NO: 419560 - DNA, 25 bp, Homo sapien
tccccgagggagtgcgcccgacgga

SEQ ID NO: 419561 - DNA, 25 bp, Homo sapien
tggccccaatccctggtacctccat

SEQ ID NO: 419562 - DNA, 25 bp, Homo sapien
agctcgtggccccaatccctggtac

SEQ ID NO: 419563 - DNA, 25 bp, Homo sapien
tagcccgcgggcctcgctttcctct

SEQ ID NO: 419564 - DNA, 25 bp, Homo sapien
ctggtactgtgcaccgccctgggtt

SEQ ID NO: 419565 - DNA, 25 bp, Homo sapien
ggagcccgctctttgcagagcccag

SEQ ID NO: 419566 - DNA, 25 bp, Homo sapien
tgaagtagttctgtccacggatgtg

SEQ ID NO: 419567 - DNA, 25 bp, Homo sapien
gcaggtagcctgtcacgctgaagta

SEQ ID NO: 419568 - DNA, 25 bp, Homo sapien
tcaacagcgccctcgcccgacaaag

SEQ ID NO: 419569 - DNA, 25 bp, Homo sapien
gggaaggaacgcttcttgctcaaca

SEQ ID NO: 419570 - DNA, 25 bp, Homo sapien
ttcttgctcaacagcgccctcgccc

SEQ ID NO: 419571 - DNA, 25 bp, Homo sapien
ctcgcccgacaaagcaggacaattc

SEQ ID NO: 419572 - DNA, 25 bp, Homo sapien
tgttgcgtttccctcctggccactt

SEQ ID NO: 419573 - DNA, 25 bp, Homo sapien
ggcctgccctatctgccaggctccc

SEQ ID NO: 419574 - DNA, 25 bp, Homo sapien
tcttgatctctgttgcgtttccctc

SEQ ID NO: 419575 - DNA, 25 bp, Homo sapien
acttgcgggcactgtcagggaggca

SEQ ID NO: 419576 - DNA, 25 bp, Homo sapien
tgccactgccgagttaggccctgtc

SEQ ID NO: 419577 - DNA, 25 bp, Homo sapien
tgtctgatcgcagggcgccaaatag

SEQ ID NO: 419578 - DNA, 25 bp, Homo sapien
ttagcagggcaagattgcttgtggc

SEQ ID NO: 419579 - DNA, 25 bp, Homo sapien
cagggcgccaaatagccgttagcag

SEQ ID NO: 419580 - DNA, 25 bp, Homo sapien
atatatatcatgtgcacattccctc

SEQ ID NO: 419581 - DNA, 25 bp, Homo sapien
atttgctcatatatatcatgtgcac

SEQ ID NO: 419582 - DNA, 25 bp, Homo sapien
gaatttgctcatatatatcatgtgc

SEQ ID NO: 419583 - DNA, 25 bp, Homo sapien
aggcgaatttgctcatatatatcat

SEQ ID NO: 419584 - DNA, 25 bp, Homo sapien
gattcacggtgtcaaagtccttcct

SEQ ID NO: 419585 - DNA, 25 bp, Homo sapien
ggttccaattgaactttggaatctg

SEQ ID NO: 419586 - DNA, 25 bp, Homo sapien
ccccagcgtccgtgcaggatggaat

SEQ ID NO: 419587 - DNA, 25 bp, Homo sapien
ccttccttgtcaggccatagtaagt

SEQ ID NO: 419588 - DNA, 25 bp, Homo sapien
gaggcccttcatgaacccgttcctg

SEQ ID NO: 419589 - DNA, 25 bp, Homo sapien
gatgtctctgcgaggcccttcatga

SEQ ID NO: 419590 - DNA, 25 bp, Homo sapien
atgccacagatgtctctgcgaggcc

SEQ ID NO: 419591 - DNA, 25 bp, Homo sapien
tctgcgaggcccttcatgaacccgt

SEQ ID NO: 419592 - DNA, 25 bp, Homo sapien
aaagggagcctttgggtttcagcat

SEQ ID NO: 419593 - DNA, 25 bp, Homo sapien
tcaaagggagcctttgggtttcagc

SEQ ID NO: 419594 - DNA, 25 bp, Homo sapien
aagggagcctttgggtttcagcatc

SEQ ID NO: 419595 - DNA, 25 bp, Homo sapien
gatcaaagggagcctttgggtttca

SEQ ID NO: 419596 - DNA, 25 bp, Homo sapien
tctacgacgatgagtctactgagtc

SEQ ID NO: 419597 - DNA, 25 bp, Homo sapien
tctgcttccgaagctgaagagccag

SEQ ID NO: 419598 - DNA, 25 bp, Homo sapien
ccagtttcccagtgcaagccacgat

SEQ ID NO: 419599 - DNA, 25 bp, Homo sapien
tgcaagccacgattgacttctacga

SEQ ID NO: 419600 - DNA, 25 bp, Homo sapien
gtcatcagtaggctagaccttcctg

SEQ ID NO: 419601 - DNA, 25 bp, Homo sapien
tagggcttcagatgtcaacaatacc

SEQ ID NO: 419602 - DNA, 25 bp, Homo sapien
ctgtcctgcgttcaaagtgagtatc

SEQ ID NO: 419603 - DNA, 25 bp, Homo sapien
tatcaacagtacacctggaaagtcc

SEQ ID NO: 419604 - DNA, 25 bp, Homo sapien
cttcggaagccatcgcctccgtggg

SEQ ID NO: 419605 - DNA, 25 bp, Homo sapien
catcgcctccgtggggttcgggcct

SEQ ID NO: 419606 - DNA, 25 bp, Homo sapien
cacttcggaagccatcgcctccgtg

SEQ ID NO: 419607 - DNA, 25 bp, Homo sapien
caacatcacttcggaagccatcgcc

SEQ ID NO: 419608 - DNA, 25 bp, Homo sapien
cagagctgagtgtggttgattccac

SEQ ID NO: 419609 - DNA, 25 bp, Homo sapien
caggtgtcagttgctgcaggcggct

SEQ ID NO: 419610 - DNA, 25 bp, Homo sapien
aacagtattgggcattccttcttcc

SEQ ID NO: 419611 - DNA, 25 bp, Homo sapien
gtcagttgctgcaggcggctctggg

SEQ ID NO: 419612 - DNA, 25 bp, Homo sapien
gatatttagtgttgagctgcccagg

SEQ ID NO: 419613 - DNA, 25 bp, Homo sapien
ttggatatttagtgttgagctgccc

SEQ ID NO: 419614 - DNA, 25 bp, Homo sapien
tggttggatatttagtgttgagctg

SEQ ID NO: 419615 - DNA, 25 bp, Homo sapien
tatttagtgttgagctgcccaggga

SEQ ID NO: 419616 - DNA, 25 bp, Homo sapien
gtgcagcagccgtccttctctcttc

SEQ ID NO: 419617 - DNA, 25 bp, Homo sapien
agtcaatttccctgtgaccgtccct

SEQ ID NO: 419618 - DNA, 25 bp, Homo sapien
gcagcagccgtccttctctcttcac

SEQ ID NO: 419619 - DNA, 25 bp, Homo sapien
cctgtgaccgtcccttttccctctg

SEQ ID NO: 419620 - DNA, 25 bp, Homo sapien
cagcctctggtatcttggggaccgc

SEQ ID NO: 419621 - DNA, 25 bp, Homo sapien
agagctgtctgaggaagagctttgt

SEQ ID NO: 419622 - DNA, 25 bp, Homo sapien
tctgaggaagagctttgtggccctt

SEQ ID NO: 419623 - DNA, 25 bp, Homo sapien
gtatcttggggaccgctctgctccg

SEQ ID NO: 419624 - DNA, 25 bp, Homo sapien
ttgcggtcacttcctccctgtgtcc

SEQ ID NO: 419625 - DNA, 25 bp, Homo sapien
cttgcggtcacttcctccctgtgtc

SEQ ID NO: 419626 - DNA, 25 bp, Homo sapien
tgtcctgagtgttttgcccacaaca

SEQ ID NO: 419627 - DNA, 25 bp, Homo sapien
gtcctgagtgttttgcccacaacat

SEQ ID NO: 419628 - DNA, 25 bp, Homo sapien
tatcgattcgtagagagtgtagccg

SEQ ID NO: 419629 - DNA, 25 bp, Homo sapien
cacttatctattgggttgctgacag

SEQ ID NO: 419630 - DNA, 25 bp, Homo sapien
tcttattggtgacaagaagctcctg

SEQ ID NO: 419631 - DNA, 25 bp, Homo sapien
tgaaagtagagtgtcacccagtgag

SEQ ID NO: 419632 - DNA, 25 bp, Homo sapien
gtcctcctcacatcagtccccaagt

SEQ ID NO: 419633 - DNA, 25 bp, Homo sapien
aggcccagtcctcctcacatcagtc

SEQ ID NO: 419634 - DNA, 25 bp, Homo sapien
ctcctgagcatgcagctggtcaggc

SEQ ID NO: 419635 - DNA, 25 bp, Homo sapien
aggccatgtctccaggtctgcaggc

SEQ ID NO: 419636 - DNA, 25 bp, Homo sapien
tatgcagcacttgaaaatcgggctc

SEQ ID NO: 419637 - DNA, 25 bp, Homo sapien
gagtgagtgactgaactttccccag

SEQ ID NO: 419638 - DNA, 25 bp, Homo sapien
cacaagtgggctgactacagtgcaa

SEQ ID NO: 419639 - DNA, 25 bp, Homo sapien
taattcttgccaggtgcgtaagtcc

SEQ ID NO: 419640 - DNA, 25 bp, Homo sapien
ttgtgttaaactgagtgactgagac

SEQ ID NO: 419641 - DNA, 25 bp, Homo sapien
ggtgggataagtacatttcctccca

SEQ ID NO: 419642 - DNA, 25 bp, Homo sapien
gccaccatgaacctaattgtgttaa

SEQ ID NO: 419643 - DNA, 25 bp, Homo sapien
aactctcctgactagaaaaggtggg

SEQ ID NO: 419644 - DNA, 25 bp, Homo sapien
ccagcacgatgaatcaagaagaatc

SEQ ID NO: 419645 - DNA, 25 bp, Homo sapien
gaatcaagaagaatctctctttcct

SEQ ID NO: 419646 - DNA, 25 bp, Homo sapien
ctgcaccccagcacgatgaatcaag

SEQ ID NO: 419647 - DNA, 25 bp, Homo sapien
cacgatgaatcaagaagaatctctc

SEQ ID NO: 419648 - DNA, 25 bp, Homo sapien
tatacaatgtactgggttccatcac

SEQ ID NO: 419649 - DNA, 25 bp, Homo sapien
tcaatgtgcttaaggaatgactccc

SEQ ID NO: 419650 - DNA, 25 bp, Homo sapien
ccatgggcatgggactgttaatatg

SEQ ID NO: 419651 - DNA, 25 bp, Homo sapien
actggctggtgggtctgtactatac

SEQ ID NO: 419652 - DNA, 25 bp, Homo sapien
gagaccttctgaggagctcatggaa

SEQ ID NO: 419653 - DNA, 25 bp, Homo sapien
acatcagacagacaagcacgtgggc

SEQ ID NO: 419654 - DNA, 25 bp, Homo sapien
tccagagtgtactataagaggcacc

SEQ ID NO: 419655 - DNA, 25 bp, Homo sapien
ggcaaccgcagttcaatcccatgag

SEQ ID NO: 419656 - DNA, 25 bp, Homo sapien
tgatcatgaccctcaaaaacactgc

SEQ ID NO: 419657 - DNA, 25 bp, Homo sapien
cactgctgcccatagtttgcaaaac

SEQ ID NO: 419658 - DNA, 25 bp, Homo sapien
tatttcaaacccgtctcaggcccat

SEQ ID NO: 419659 - DNA, 25 bp, Homo sapien
gagtccatgaaggttctatcctgac

SEQ ID NO: 419660 - DNA, 25 bp, Homo sapien
cctgcttgaccaaaactcagttaag

SEQ ID NO: 419661 - DNA, 25 bp, Homo sapien
tcttccaaagcttacagctactgcc

SEQ ID NO: 419662 - DNA, 25 bp, Homo sapien
gaagacaagggaatactgctgacat

SEQ ID NO: 419663 - DNA, 25 bp, Homo sapien
gaaccgctcggataactgctggctt

SEQ ID NO: 419664 - DNA, 25 bp, Homo sapien
tcaaataaagggaaccacgcagtag

SEQ ID NO: 419665 - DNA, 25 bp, Homo sapien
caacattttctggaggtaggcatag

SEQ ID NO: 419666 - DNA, 25 bp, Homo sapien
catgtaagggagtcattctcgaccc

SEQ ID NO: 419667 - DNA, 25 bp, Homo sapien
tgtgctctactccagaccaatgaat

SEQ ID NO: 419668 - DNA, 25 bp, Homo sapien
taagtgtggtgacatgctctcacca

SEQ ID NO: 419669 - DNA, 25 bp, Homo sapien
ggttgccaaggtaaccgtctcgctc

SEQ ID NO: 419670 - DNA, 25 bp, Homo sapien
ggatatggttattgtccccttccca

SEQ ID NO: 419671 - DNA, 25 bp, Homo sapien
tcaccataaaataacaggaactggg

SEQ ID NO: 419672 - DNA, 25 bp, Homo sapien
gcaatattgtatttattctattcat

SEQ ID NO: 419673 - DNA, 25 bp, Homo sapien
gaatgcaatattgtatttattctat

SEQ ID NO: 419674 - DNA, 25 bp, Homo sapien
tgcaatattgtatttattctattca

SEQ ID NO: 419675 - DNA, 25 bp, Homo sapien
tgggaatgcaatattgtatttattc

SEQ ID NO: 419676 - DNA, 25 bp, Homo sapien
tacgtgcttggtgttactatggtta

SEQ ID NO: 419677 - DNA, 25 bp, Homo sapien
tggtcaaattaatttatggtcaaaa

SEQ ID NO: 419678 - DNA, 25 bp, Homo sapien
cataatctaagagaaggtcaactta

SEQ ID NO: 419679 - DNA, 25 bp, Homo sapien
cttataaataaatacgtgcttggtg

SEQ ID NO: 419680 - DNA, 25 bp, Homo sapien
cactaatagaaatatctcttaaggc

SEQ ID NO: 419681 - DNA, 25 bp, Homo sapien
tacttcactaatagaaatatctctt

SEQ ID NO: 419682 - DNA, 25 bp, Homo sapien
agttctttggctgcaagaaagaaca

SEQ ID NO: 419683 - DNA, 25 bp, Homo sapien
ttctttggctgcaagaaagaacatt

SEQ ID NO: 419684 - DNA, 25 bp, Homo sapien
gtttactaggctgacgtttggatag

SEQ ID NO: 419685 - DNA, 25 bp, Homo sapien
gattacttaaatcctctctttagaa

SEQ ID NO: 419686 - DNA, 25 bp, Homo sapien
ttacctaagcaatttcttctacagt

SEQ ID NO: 419687 - DNA, 25 bp, Homo sapien
ctgatggagacccaccacatagttt

SEQ ID NO: 419688 - DNA, 25 bp, Homo sapien
gattgtatggatggagtcgagtgga

SEQ ID NO: 419689 - DNA, 25 bp, Homo sapien
agtggagaggtactcatcatgttaa

SEQ ID NO: 419690 - DNA, 25 bp, Homo sapien
tcgagtggagaggtactcatcatgt

SEQ ID NO: 419691 - DNA, 25 bp, Homo sapien
gagtcgagtggagaggtactcatca

SEQ ID NO: 419692 - DNA, 25 bp, Homo sapien
tcctgtttgcatagcattctgttct

SEQ ID NO: 419693 - DNA, 25 bp, Homo sapien
tctggaacttctaatagtttgaatt

SEQ ID NO: 419694 - DNA, 25 bp, Homo sapien
gattcaggaataaaggcccacacga

SEQ ID NO: 419695 - DNA, 25 bp, Homo sapien
caagattcaggaataaaggcccaca

SEQ ID NO: 419696 - DNA, 25 bp, Homo sapien
agccaagattcaggaataaaggccc

SEQ ID NO: 419697 - DNA, 25 bp, Homo sapien
ttcaggaataaaggcccacacgagg

SEQ ID NO: 419698 - DNA, 25 bp, Homo sapien
tagggttcagaagtactaccactcc

SEQ ID NO: 419699 - DNA, 25 bp, Homo sapien
ctggtgacatcacaagctcctcggg

SEQ ID NO: 419700 - DNA, 25 bp, Homo sapien
agttgcagaacgttggatcacgggc

SEQ ID NO: 419701 - DNA, 25 bp, Homo sapien
taagggagatccaggacgcaaacga

SEQ ID NO: 419702 - DNA, 25 bp, Homo sapien
ctgtctcctccacaagaccacgacc

SEQ ID NO: 419703 - DNA, 25 bp, Homo sapien
tgtctcctccacaagaccacgacct

SEQ ID NO: 419704 - DNA, 25 bp, Homo sapien
tccacaagaccacgacctccttaag

SEQ ID NO: 419705 - DNA, 25 bp, Homo sapien
agaccacgacctccttaagggcagg

SEQ ID NO: 419706 - DNA, 25 bp, Homo sapien
ctttgccatcgcgtctggtgctgta

SEQ ID NO: 419707 - DNA, 25 bp, Homo sapien
tagtgctggcacacggaacactcag

SEQ ID NO: 419708 - DNA, 25 bp, Homo sapien
taaaacctcctaggctagtgctggc

SEQ ID NO: 419709 - DNA, 25 bp, Homo sapien
cagcaaacacgagatcccttcagat

SEQ ID NO: 419710 - DNA, 25 bp, Homo sapien
acaaagccataaatcgctctttctg

SEQ ID NO: 419711 - DNA, 25 bp, Homo sapien
caaagccataaatcgctctttctgg

SEQ ID NO: 419712 - DNA, 25 bp, Homo sapien
atcagcgccagcgatgtgctccgtg

SEQ ID NO: 419713 - DNA, 25 bp, Homo sapien
ccagcgatgtgctccgtggcaccat

SEQ ID NO: 419714 - DNA, 25 bp, Homo sapien
ggaacacaatcagcgccagcgatgt

SEQ ID NO: 419715 - DNA, 25 bp, Homo sapien
tggaaaaggaacacaatcagcgcca

SEQ ID NO: 419716 - DNA, 25 bp, Homo sapien
ttctggggcgatagacgcgcgctcc

SEQ ID NO: 419717 - DNA, 25 bp, Homo sapien
tcgagcgcatacagacacccaggct

SEQ ID NO: 419718 - DNA, 25 bp, Homo sapien
agggcagggaacaaggctcgcgcgg

SEQ ID NO: 419719 - DNA, 25 bp, Homo sapien
ctccagctctgcaagcgtggcctcc

SEQ ID NO: 419720 - DNA, 25 bp, Homo sapien
cagcatgcgggcctactaggtcgcg

SEQ ID NO: 419721 - DNA, 25 bp, Homo sapien
ggccctcgacctcgggtccttcata

SEQ ID NO: 419722 - DNA, 25 bp, Homo sapien
tctatttctcattcgaggcggggta

SEQ ID NO: 419723 - DNA, 25 bp, Homo sapien
gcccattcgtggagacttctatttc

SEQ ID NO: 419724 - DNA, 25 bp, Homo sapien
aacctgagggaaaggcctaggcgcg

SEQ ID NO: 419725 - DNA, 25 bp, Homo sapien
ctggcgcaggcgcacaacgaccctc

SEQ ID NO: 419726 - DNA, 25 bp, Homo sapien
tcagcgctgagttctccgcgcaagc

SEQ ID NO: 419727 - DNA, 25 bp, Homo sapien
ggcgggcgtgatcccgcggctcgcg

SEQ ID NO: 419728 - DNA, 25 bp, Homo sapien
tgccagcccacgtgacgcacctcgc

SEQ ID NO: 419729 - DNA, 25 bp, Homo sapien
cgtgacgcacctcgcttcaacgccg

SEQ ID NO: 419730 - DNA, 25 bp, Homo sapien
gcccacgtgacgcacctcgcttcaa

SEQ ID NO: 419731 - DNA, 25 bp, Homo sapien
ttcaacgccgccacccgctccctcc

SEQ ID NO: 419732 - DNA, 25 bp, Homo sapien
ctgctgcccgcgtccgaggctcgcg

SEQ ID NO: 419733 - DNA, 25 bp, Homo sapien
gcccgcgtccgaggctcgcgggcgg

SEQ ID NO: 419734 - DNA, 25 bp, Homo sapien
gctgctgcccgcgtccgaggctcgc

SEQ ID NO: 419735 - DNA, 25 bp, Homo sapien
gcgtccgaggctcgcgggcggcggg

SEQ ID NO: 419736 - DNA, 25 bp, Homo sapien
gtctcctcgcgtccctcgctgaggt

SEQ ID NO: 419737 - DNA, 25 bp, Homo sapien
accttgtcccgctgcagccgagatg

SEQ ID NO: 419738 - DNA, 25 bp, Homo sapien
cgctgaggtgcctactgtgtctgca

SEQ ID NO: 419739 - DNA, 25 bp, Homo sapien
actgtgtctgcatgggttgggtccc

SEQ ID NO: 419740 - DNA, 25 bp, Homo sapien
ctagcgcgcgtggccgcgccttctg

SEQ ID NO: 419741 - DNA, 25 bp, Homo sapien
cgtggccgcgccttctgcaattgcg

SEQ ID NO: 419742 - DNA, 25 bp, Homo sapien
tggccgcgccttctgcaattgcgac

SEQ ID NO: 419743 - DNA, 25 bp, Homo sapien
gcgcgtggccgcgccttctgcaatt

SEQ ID NO: 419744 - DNA, 25 bp, Homo sapien
catgggtcctgttgagtgcgtgatc

SEQ ID NO: 419745 - DNA, 25 bp, Homo sapien
agtgtgcgtccttgcgtgtctccga

SEQ ID NO: 419746 - DNA, 25 bp, Homo sapien
cagtgttgacgctgccagtgtggcc

SEQ ID NO: 419747 - DNA, 25 bp, Homo sapien
tgtctccgagtgacgcagagtgtct

SEQ ID NO: 419748 - DNA, 25 bp, Homo sapien
aatgaccagtattgaatgtgcttac

SEQ ID NO: 419749 - DNA, 25 bp, Homo sapien
cccagaggagtaatgaagatttgct

SEQ ID NO: 419750 - DNA, 25 bp, Homo sapien
catattgggtatagtttcctgggac

SEQ ID NO: 419751 - DNA, 25 bp, Homo sapien
tgtgcttacttccagaggtgactac

SEQ ID NO: 419752 - DNA, 25 bp, Homo sapien
caactgtgcctaatatcctctgtaa

SEQ ID NO: 419753 - DNA, 25 bp, Homo sapien
ctctttaccagaatttacagtgctg

SEQ ID NO: 419754 - DNA, 25 bp, Homo sapien
gatgcatgtgtttcatgattctgca

SEQ ID NO: 419755 - DNA, 25 bp, Homo sapien
ctagaagtttctgagccctgtattc

SEQ ID NO: 419756 - DNA, 25 bp, Homo sapien
cagccagacgaataggaggaaaacc

SEQ ID NO: 419757 - DNA, 25 bp, Homo sapien
gaagaagaacccatgaaggaaactg

SEQ ID NO: 419758 - DNA, 25 bp, Homo sapien
gaagtggtccacagcgtcaagtaag

SEQ ID NO: 419759 - DNA, 25 bp, Homo sapien
tggataaattcacccaaggagagag

SEQ ID NO: 419760 - DNA, 25 bp, Homo sapien
tctgtttgagggtgaccagtttgtt

SEQ ID NO: 419761 - DNA, 25 bp, Homo sapien
cttgaacctggtgtttgacaggtgc

SEQ ID NO: 419762 - DNA, 25 bp, Homo sapien
aaactttttgaagacctggcgctca

SEQ ID NO: 419763 - DNA, 25 bp, Homo sapien
tagagtgatttttgcaaggtgtcat

SEQ ID NO: 419764 - DNA, 25 bp, Homo sapien
taatcacgaaatggccaacggtggt

SEQ ID NO: 419765 - DNA, 25 bp, Homo sapien
gaagctaagggtctgtaaacactca

SEQ ID NO: 419766 - DNA, 25 bp, Homo sapien
taatcagaatctaaaggtaagctcc

SEQ ID NO: 419767 - DNA, 25 bp, Homo sapien
tataaagccccatctcacaggtagg

SEQ ID NO: 419768 - DNA, 25 bp, Homo sapien
tttatcagcctagagaaactaagac

SEQ ID NO: 419769 - DNA, 25 bp, Homo sapien
cttagacatcacctaatcattgagg

SEQ ID NO: 419770 - DNA, 25 bp, Homo sapien
tgtaggccgggctctgattaaaaaa

SEQ ID NO: 419771 - DNA, 25 bp, Homo sapien
ggaagatggtttctacgatagtcaa

SEQ ID NO: 419772 - DNA, 25 bp, Homo sapien
tgacaactgtattgcactgaagaag

SEQ ID NO: 419773 - DNA, 25 bp, Homo sapien
cccaaaccggttcttgaggatgtga

SEQ ID NO: 419774 - DNA, 25 bp, Homo sapien
gacaccgccagcatacataaacgtg

SEQ ID NO: 419775 - DNA, 25 bp, Homo sapien
gaagaaggttgcatcacggctcaag

SEQ ID NO: 419776 - DNA, 25 bp, Homo sapien
tgctggtcaccagattgcctctgaa

SEQ ID NO: 419777 - DNA, 25 bp, Homo sapien
gcagcacaggtgatgctcatacagt

SEQ ID NO: 419778 - DNA, 25 bp, Homo sapien
gtaattccagaaagcaccagtgcag

SEQ ID NO: 419779 - DNA, 25 bp, Homo sapien
catacagtcctgagtgagtctaaca

SEQ ID NO: 419780 - DNA, 25 bp, Homo sapien
tttgggtcctacaccagcatccgta

SEQ ID NO: 419781 - DNA, 25 bp, Homo sapien
ttaagggttattctgctgcaggacc

SEQ ID NO: 419782 - DNA, 25 bp, Homo sapien
tttgatgcccttgccgagaacagct

SEQ ID NO: 419783 - DNA, 25 bp, Homo sapien
ggaccataggtaatgcacactcgtg

SEQ ID NO: 419784 - DNA, 25 bp, Homo sapien
ttgtggcaggacagtgaaatcttct

SEQ ID NO: 419785 - DNA, 25 bp, Homo sapien
ttgaaatgaattaggcccagaggag

SEQ ID NO: 419786 - DNA, 25 bp, Homo sapien
gaggagatcagaccataggaattta

SEQ ID NO: 419787 - DNA, 25 bp, Homo sapien
aatcttctggttcctaaagacggag

SEQ ID NO: 419788 - DNA, 25 bp, Homo sapien
gaaagcagaagatgtccctgtgagg

SEQ ID NO: 419789 - DNA, 25 bp, Homo sapien
tgttattttcgcagccaaacccagg

SEQ ID NO: 419790 - DNA, 25 bp, Homo sapien
gttgcaccatcacccaaaaccaagg

SEQ ID NO: 419791 - DNA, 25 bp, Homo sapien
tcaccctcggtggttgttgcaccat

SEQ ID NO: 419792 - DNA, 25 bp, Homo sapien
ttagttagaaatatactgtgcccat

SEQ ID NO: 419793 - DNA, 25 bp, Homo sapien
gcccatcttttctaggaaatagaaa

SEQ ID NO: 419794 - DNA, 25 bp, Homo sapien
gtgcccatcttttctaggaaataga

SEQ ID NO: 419795 - DNA, 25 bp, Homo sapien
gttagaaatatactgtgcccatctt

SEQ ID NO: 419796 - DNA, 25 bp, Homo sapien
ttcaatggctcttccccggtctggc

SEQ ID NO: 419797 - DNA, 25 bp, Homo sapien
cctgaccctcgagtcatgggcagca

SEQ ID NO: 419798 - DNA, 25 bp, Homo sapien
tcttccctgaccctcgagtcatggg

SEQ ID NO: 419799 - DNA, 25 bp, Homo sapien
acctggctccgagctttgcactggg

SEQ ID NO: 419800 - DNA, 25 bp, Homo sapien
agttcaaggtcttctcagccttggg

SEQ ID NO: 419801 - DNA, 25 bp, Homo sapien
tccagtgccactccctgaacttgat

SEQ ID NO: 419802 - DNA, 25 bp, Homo sapien
cagcaaaaccctgaacagcagttca

SEQ ID NO: 419803 - DNA, 25 bp, Homo sapien
tgaacttgatcccactgccagggct

SEQ ID NO: 419804 - DNA, 25 bp, Homo sapien
attcatctctgcgtccagcacccga

SEQ ID NO: 419805 - DNA, 25 bp, Homo sapien
actgtgagccgctgaggccagagcc

SEQ ID NO: 419806 - DNA, 25 bp, Homo sapien
ccatggatgtttgccggatgagcca

SEQ ID NO: 419807 - DNA, 25 bp, Homo sapien
accaaccctgcccatggatgtttgc

SEQ ID NO: 419808 - DNA, 25 bp, Homo sapien
gttttgatttgcacaagtaatccat

SEQ ID NO: 419809 - DNA, 25 bp, Homo sapien
tccctgagtattgggcagctccagg

SEQ ID NO: 419810 - DNA, 25 bp, Homo sapien
actctggcctgagcgggtgttggtg

SEQ ID NO: 419811 - DNA, 25 bp, Homo sapien
gcacaggggagctaagcttcctcat

SEQ ID NO: 419812 - DNA, 25 bp, Homo sapien
agagaccaagggcaagtgagccacg

SEQ ID NO: 419813 - DNA, 25 bp, Homo sapien
agtcagtcagcgagtgcttgggatc

SEQ ID NO: 419814 - DNA, 25 bp, Homo sapien
agtgcttgggatccgcatccagccg

SEQ ID NO: 419815 - DNA, 25 bp, Homo sapien
tttgaactccgctgccttccttagc

SEQ ID NO: 419816 - DNA, 25 bp, Homo sapien
agcccccggttggagcctgctcttt

SEQ ID NO: 419817 - DNA, 25 bp, Homo sapien
tagttcttagaagctcacgccttag

SEQ ID NO: 419818 - DNA, 25 bp, Homo sapien
tgagcgctatgggtgttaacgtgca

SEQ ID NO: 419819 - DNA, 25 bp, Homo sapien
tgcatatccataagaattgagcgct

SEQ ID NO: 419820 - DNA, 25 bp, Homo sapien
ttaacgtgcatgaggatcagtttgc

SEQ ID NO: 419821 - DNA, 25 bp, Homo sapien
gttaggaagtccacttcctcagtgt

SEQ ID NO: 419822 - DNA, 25 bp, Homo sapien
tgtcactaagattaagggcctggaa

SEQ ID NO: 419823 - DNA, 25 bp, Homo sapien
taggatagtacagtaggaaagccgc

SEQ ID NO: 419824 - DNA, 25 bp, Homo sapien
gaaattgcacaagaaagagtaggat

SEQ ID NO: 419825 - DNA, 25 bp, Homo sapien
caacgagcagctggtatggttacag

SEQ ID NO: 419826 - DNA, 25 bp, Homo sapien
aggacagcctccacaacgagcagct

SEQ ID NO: 419827 - DNA, 25 bp, Homo sapien
agcctccacaacgagcagctggtat

SEQ ID NO: 419828 - DNA, 25 bp, Homo sapien
agcagctggtatggttacagggctc

SEQ ID NO: 419829 - DNA, 25 bp, Homo sapien
tgtggcaggcactttcaaagagaca

SEQ ID NO: 419830 - DNA, 25 bp, Homo sapien
ggcactttcaaagagacaagcttgc

SEQ ID NO: 419831 - DNA, 25 bp, Homo sapien
ctgtggcaggcactttcaaagagac

SEQ ID NO: 419832 - DNA, 25 bp, Homo sapien
actttcaaagagacaagcttgctct

SEQ ID NO: 419833 - DNA, 25 bp, Homo sapien
ccattgaacagatcacactgtgcct

SEQ ID NO: 419834 - DNA, 25 bp, Homo sapien
attcccgcggggtgagccagcagcc

SEQ ID NO: 419835 - DNA, 25 bp, Homo sapien
aagcctcatgtcctgaagtgccacc

SEQ ID NO: 419836 - DNA, 25 bp, Homo sapien
aaaagaggaagccattgaacagatc

SEQ ID NO: 419837 - DNA, 25 bp, Homo sapien
ccagacctttgaaagctgaggcaca

SEQ ID NO: 419838 - DNA, 25 bp, Homo sapien
tccaaactgccaccacctcgaaact

SEQ ID NO: 419839 - DNA, 25 bp, Homo sapien
gaaactgccagacctttgaaagctg

SEQ ID NO: 419840 - DNA, 25 bp, Homo sapien
cacctcgaaactgccagacctttga

SEQ ID NO: 419841 - DNA, 25 bp, Homo sapien
cttcgcttctacccgggggctccag

SEQ ID NO: 419842 - DNA, 25 bp, Homo sapien
cttctacccgggggctccagtgcat

SEQ ID NO: 419843 - DNA, 25 bp, Homo sapien
gcttctacccgggggctccagtgca

SEQ ID NO: 419844 - DNA, 25 bp, Homo sapien
tcgcttctacccgggggctccagtg

SEQ ID NO: 419845 - DNA, 25 bp, Homo sapien
cacgagtgaatgtgtcttatggacg

SEQ ID NO: 419846 - DNA, 25 bp, Homo sapien
cttatggacggttgcttctttttag

SEQ ID NO: 419847 - DNA, 25 bp, Homo sapien
ttctagacacaagtcatttgtcgga

SEQ ID NO: 419848 - DNA, 25 bp, Homo sapien
agtaatgtccgggtgttgccaaggc

SEQ ID NO: 419849 - DNA, 25 bp, Homo sapien
tatagctttataacttcgcttcagc

SEQ ID NO: 419850 - DNA, 25 bp, Homo sapien
tccacgtggcagataaactctaagt

SEQ ID NO: 419851 - DNA, 25 bp, Homo sapien
ggctgttcacaggtcaagacttcat

SEQ ID NO: 419852 - DNA, 25 bp, Homo sapien
gaaaattgtgtcaccgggcccttca

SEQ ID NO: 419853 - DNA, 25 bp, Homo sapien
gatattcggggacccgcaccggaca

SEQ ID NO: 419854 - DNA, 25 bp, Homo sapien
cacttcccggaagagcccaggatat

SEQ ID NO: 419855 - DNA, 25 bp, Homo sapien
cccggaagagcccaggatattcggg

SEQ ID NO: 419856 - DNA, 25 bp, Homo sapien
cggcacttcccggaagagcccagga

SEQ ID NO: 419857 - DNA, 25 bp, Homo sapien
tctgaacctctgactgtggataacc

SEQ ID NO: 419858 - DNA, 25 bp, Homo sapien
caagagtgggacagttgcagcccaa

SEQ ID NO: 419859 - DNA, 25 bp, Homo sapien
tgcagcccaaggtagccaaacatct

SEQ ID NO: 419860 - DNA, 25 bp, Homo sapien
gccacgttgtctggatgcgcttcag

SEQ ID NO: 419861 - DNA, 25 bp, Homo sapien
tccttcgaaccacaaagggagactg

SEQ ID NO: 419862 - DNA, 25 bp, Homo sapien
tccattagcaagtcagaggtttcct

SEQ ID NO: 419863 - DNA, 25 bp, Homo sapien
aaaaacaagtatatgccgctggctg

SEQ ID NO: 419864 - DNA, 25 bp, Homo sapien
taaatcaggcttgtttacccttggc

SEQ ID NO: 419865 - DNA, 25 bp, Homo sapien
aagttctccgtgatgaggtggtcag

SEQ ID NO: 419866 - DNA, 25 bp, Homo sapien
gcagcaccacgatgttaacctcaaa

SEQ ID NO: 419867 - DNA, 25 bp, Homo sapien
aggtggtcagggtgaagcagcacca

SEQ ID NO: 419868 - DNA, 25 bp, Homo sapien
tcctgcagagcttcagcgggaagtt

SEQ ID NO: 419869 - DNA, 25 bp, Homo sapien
tgcagtcgcaggaagctctaacggc

SEQ ID NO: 419870 - DNA, 25 bp, Homo sapien
tgtgaaccagcgcatagctgtctgg

SEQ ID NO: 419871 - DNA, 25 bp, Homo sapien
catcttggaacatgagtgatcaggc

SEQ ID NO: 419872 - DNA, 25 bp, Homo sapien
ttgtgctcactgttaccaagcagcg

SEQ ID NO: 419873 - DNA, 25 bp, Homo sapien
ctgatatgggtgagccttgttgatc

SEQ ID NO: 419874 - DNA, 25 bp, Homo sapien
cttctccaccgactcttcagctgat

SEQ ID NO: 419875 - DNA, 25 bp, Homo sapien
agctgatatgggtgagccttgttga

SEQ ID NO: 419876 - DNA, 25 bp, Homo sapien
aggattccttctccaccgactcttc

SEQ ID NO: 419877 - DNA, 25 bp, Homo sapien
aaaagggatgtgtgtgaagaggaag

SEQ ID NO: 419878 - DNA, 25 bp, Homo sapien
agggatgtgtgtgaagaggaagcac

SEQ ID NO: 419879 - DNA, 25 bp, Homo sapien
ctaacaaaagggatgtgtgtgaaga

SEQ ID NO: 419880 - DNA, 25 bp, Homo sapien
taacaaaagggatgtgtgtgaagag

SEQ ID NO: 419881 - DNA, 25 bp, Homo sapien
gacgacaaacaagcaccatctcctt

SEQ ID NO: 419882 - DNA, 25 bp, Homo sapien
acgacaaacaagcaccatctccttc

SEQ ID NO: 419883 - DNA, 25 bp, Homo sapien
tgacgacaaacaagcaccatctcct

SEQ ID NO: 419884 - DNA, 25 bp, Homo sapien
ctgacgacaaacaagcaccatctcc

SEQ ID NO: 419885 - DNA, 25 bp, Homo sapien
tccgcccaaacatcagccacaagaa

SEQ ID NO: 419886 - DNA, 25 bp, Homo sapien
gtgggagtgtccacctccgcccaaa

SEQ ID NO: 419887 - DNA, 25 bp, Homo sapien
agccacaagaagagtcggccaccag

SEQ ID NO: 419888 - DNA, 25 bp, Homo sapien
gacaacatccccgtgtgggagtgtc

SEQ ID NO: 419889 - DNA, 25 bp, Homo sapien
actacattagagtcctctgggcact

SEQ ID NO: 419890 - DNA, 25 bp, Homo sapien
accactcccttcaatgggttctcca

SEQ ID NO: 419891 - DNA, 25 bp, Homo sapien
tgggcacttcctgccaccactccct

SEQ ID NO: 419892 - DNA, 25 bp, Homo sapien
gggttctccacccctcttgttgtgc

SEQ ID NO: 419893 - DNA, 25 bp, Homo sapien
tcttcgtagtgtggagtgatctccc

SEQ ID NO: 419894 - DNA, 25 bp, Homo sapien
tcacgggagttttcttcacggagct

SEQ ID NO: 419895 - DNA, 25 bp, Homo sapien
tgcttagagtccgagtgagttccag

SEQ ID NO: 419896 - DNA, 25 bp, Homo sapien
tgcatttgaggtcactcgcacggaa

SEQ ID NO: 419897 - DNA, 25 bp, Homo sapien
cgaagggcggcaggttctgagctct

SEQ ID NO: 419898 - DNA, 25 bp, Homo sapien
gctctgagctgtatggcctgtggca

SEQ ID NO: 419899 - DNA, 25 bp, Homo sapien
caaggttttgttgagcagccgaagg

SEQ ID NO: 419900 - DNA, 25 bp, Homo sapien
gggctgggaggcgagtgccacttac

SEQ ID NO: 419901 - DNA, 25 bp, Homo sapien
tggcgtcgcgggcatagccttctgc

SEQ ID NO: 419902 - DNA, 25 bp, Homo sapien
ttctgaatctccgtggcgtcgcggg

SEQ ID NO: 419903 - DNA, 25 bp, Homo sapien
ctgaatgttctgaatctccgtggcg

SEQ ID NO: 419904 - DNA, 25 bp, Homo sapien
acacatccccgtcggcgatctgaat

SEQ ID NO: 419905 - DNA, 25 bp, Homo sapien
gctctcccgttagtggctgcgtgat

SEQ ID NO: 419906 - DNA, 25 bp, Homo sapien
gagatgtcctcgaaggagaaatttg

SEQ ID NO: 419907 - DNA, 25 bp, Homo sapien
ttctgatggcggcttccgagctctc

SEQ ID NO: 419908 - DNA, 25 bp, Homo sapien
cacagtttgttgagttgagatgtcc

SEQ ID NO: 419909 - DNA, 25 bp, Homo sapien
tactgacgtcttggacattagccgg

SEQ ID NO: 419910 - DNA, 25 bp, Homo sapien
tagtggttacacagtccaccgggac

SEQ ID NO: 419911 - DNA, 25 bp, Homo sapien
aagaaaggagcgaagtactgacgtc

SEQ ID NO: 419912 - DNA, 25 bp, Homo sapien
cattagccggctgaattattcaacg

SEQ ID NO: 419913 - DNA, 25 bp, Homo sapien
acatgaaaaagtctgagggagtcgc

SEQ ID NO: 419914 - DNA, 25 bp, Homo sapien
catgaaaaagtctgagggagtcgcc

SEQ ID NO: 419915 - DNA, 25 bp, Homo sapien
tgaaaaagtctgagggagtcgccat

SEQ ID NO: 419916 - DNA, 25 bp, Homo sapien
agacatgaaaaagtctgagggagtc

SEQ ID NO: 419917 - DNA, 25 bp, Homo sapien
agaaaactagtttctttgacgcttg

SEQ ID NO: 419918 - DNA, 25 bp, Homo sapien
aaactagtttctttgacgcttgatg

SEQ ID NO: 419919 - DNA, 25 bp, Homo sapien
gaaaactagtttctttgacgcttga

SEQ ID NO: 419920 - DNA, 25 bp, Homo sapien
ctagtttctttgacgcttgatgaga

SEQ ID NO: 419921 - DNA, 25 bp, Homo sapien
tctgcacacctgacgctggccagga

SEQ ID NO: 419922 - DNA, 25 bp, Homo sapien
cacacctgacgctggccaggaagga

SEQ ID NO: 419923 - DNA, 25 bp, Homo sapien
ctttactctgcacacctgacgctgg

SEQ ID NO: 419924 - DNA, 25 bp, Homo sapien
tttactctgcacacctgacgctggc

SEQ ID NO: 419925 - DNA, 25 bp, Homo sapien
cttggtctagacagagacaattttt

SEQ ID NO: 419926 - DNA, 25 bp, Homo sapien
aaagccatcctggccggtgggctgt

SEQ ID NO: 419927 - DNA, 25 bp, Homo sapien
gagacaatttttctaggaatcttta

SEQ ID NO: 419928 - DNA, 25 bp, Homo sapien
tggctggatcccagttactgaaagg

SEQ ID NO: 419929 - DNA, 25 bp, Homo sapien
gaaagtggacagacaatccggctcc

SEQ ID NO: 419930 - DNA, 25 bp, Homo sapien
cacaatgcagacagcgagcctctgg

SEQ ID NO: 419931 - DNA, 25 bp, Homo sapien
gacaagtgtcccacgtcattcacag

SEQ ID NO: 419932 - DNA, 25 bp, Homo sapien
gaacaggttctcacctgggctaagg

SEQ ID NO: 419933 - DNA, 25 bp, Homo sapien
caggcagagttttggacgggcccaa

SEQ ID NO: 419934 - DNA, 25 bp, Homo sapien
gatgaggccaatgacatcccagggc

SEQ ID NO: 419935 - DNA, 25 bp, Homo sapien
tacatccaggaagaactacaggact

SEQ ID NO: 419936 - DNA, 25 bp, Homo sapien
cactgtttaggagaaatgcatggca

SEQ ID NO: 419937 - DNA, 25 bp, Homo sapien
tcaccgtgcagctcgagggaccagc

SEQ ID NO: 419938 - DNA, 25 bp, Homo sapien
gtgcagctcgagggaccagctgagg

SEQ ID NO: 419939 - DNA, 25 bp, Homo sapien
accgtgcagctcgagggaccagctg

SEQ ID NO: 419940 - DNA, 25 bp, Homo sapien
ccgtgcagctcgagggaccagctga

SEQ ID NO: 419941 - DNA, 25 bp, Homo sapien
cactgcccaggcgtctgtgtcctca

SEQ ID NO: 419942 - DNA, 25 bp, Homo sapien
ggcactgcccaggcgtctgtgtcct

SEQ ID NO: 419943 - DNA, 25 bp, Homo sapien
ctgcccaggcgtctgtgtcctcact

SEQ ID NO: 419944 - DNA, 25 bp, Homo sapien
actgcccaggcgtctgtgtcctcac

SEQ ID NO: 419945 - DNA, 25 bp, Homo sapien
gcggaatctttgaaaagcacgttgc

SEQ ID NO: 419946 - DNA, 25 bp, Homo sapien
cactgcggaatctttgaaaagcacg

SEQ ID NO: 419947 - DNA, 25 bp, Homo sapien
tggccgtgaggcgtccaccacggag

SEQ ID NO: 419948 - DNA, 25 bp, Homo sapien
ttgaaaagcacgttgctgcccggcc

SEQ ID NO: 419949 - DNA, 25 bp, Homo sapien
aatagctagtccgtggggtctggct

SEQ ID NO: 419950 - DNA, 25 bp, Homo sapien
cattcgcctgtgcaggacgtcttac

SEQ ID NO: 419951 - DNA, 25 bp, Homo sapien
ctgctgggaagatacccacggcatt

SEQ ID NO: 419952 - DNA, 25 bp, Homo sapien
agatacccacggcattcgcctgtgc

SEQ ID NO: 419953 - DNA, 25 bp, Homo sapien
ctgggagtaaacttccccttctgag

SEQ ID NO: 419954 - DNA, 25 bp, Homo sapien
gacgttctgtaaggtttcaggtgta

SEQ ID NO: 419955 - DNA, 25 bp, Homo sapien
tctttgacgttctgtaaggtttcag

SEQ ID NO: 419956 - DNA, 25 bp, Homo sapien
ttcaggtgtaatcgtgaagtccacg

SEQ ID NO: 419957 - DNA, 25 bp, Homo sapien
actaagaggcgcaagcctgggtcct

SEQ ID NO: 419958 - DNA, 25 bp, Homo sapien
acggggaactaagaggcgcaagcct

SEQ ID NO: 419959 - DNA, 25 bp, Homo sapien
ggccaagagttctgcaggtcaaata

SEQ ID NO: 419960 - DNA, 25 bp, Homo sapien
ccaagagttctgcaggtcaaatagc

SEQ ID NO: 419961 - DNA, 25 bp, Homo sapien
ttaagcaccagagtccccgagtgaa

SEQ ID NO: 419962 - DNA, 25 bp, Homo sapien
attaagcaccagagtccccgagtga

SEQ ID NO: 419963 - DNA, 25 bp, Homo sapien
cggagtgaacgataaattcacaggt

SEQ ID NO: 419964 - DNA, 25 bp, Homo sapien
cgcttcatgtcacagcgcagtgtat

SEQ ID NO: 419965 - DNA, 25 bp, Homo sapien
agcggagtgaacgataaattcacag

SEQ ID NO: 419966 - DNA, 25 bp, Homo sapien
aagtccttggccaacagagaccgct

SEQ ID NO: 419967 - DNA, 25 bp, Homo sapien
gcacccagcacgtctatcttttaaa

SEQ ID NO: 419968 - DNA, 25 bp, Homo sapien
caggaagtcactgccgtctctgggc

SEQ ID NO: 419969 - DNA, 25 bp, Homo sapien
gtctctgggcggcacttgctctact

SEQ ID NO: 419970 - DNA, 25 bp, Homo sapien
tatgttaacctttagagtaagtgcg

SEQ ID NO: 419971 - DNA, 25 bp, Homo sapien
taaagcaagtcgatactgattctgg

SEQ ID NO: 419972 - DNA, 25 bp, Homo sapien
taaagaactgccgtgtggataaagc

SEQ ID NO: 419973 - DNA, 25 bp, Homo sapien
taagtagcctccaatgtacacacag

SEQ ID NO: 419974 - DNA, 25 bp, Homo sapien
gaacatctgtcttggcaacatgtgg

SEQ ID NO: 419975 - DNA, 25 bp, Homo sapien
aaacttgtgaagtcagtcgcgtagg

SEQ ID NO: 419976 - DNA, 25 bp, Homo sapien
cagtattaaattcttgggcccgtct

SEQ ID NO: 419977 - DNA, 25 bp, Homo sapien
tgaggctcccatcagaaataacggc

SEQ ID NO: 419978 - DNA, 25 bp, Homo sapien
tcgcgtaggactaggaagctctcac

SEQ ID NO: 419979 - DNA, 25 bp, Homo sapien
aaagggatttctgttttgccgctgg

SEQ ID NO: 419980 - DNA, 25 bp, Homo sapien
ttgttacccttcaagtgcagaggaa

SEQ ID NO: 419981 - DNA, 25 bp, Homo sapien
ctgaatgttgacaaacacgccatga

SEQ ID NO: 419982 - DNA, 25 bp, Homo sapien
gccatgatacgtctcatacagaact

SEQ ID NO: 419983 - DNA, 25 bp, Homo sapien
ccccgtgctcttctgggcagcgctg

SEQ ID NO: 419984 - DNA, 25 bp, Homo sapien
cccgtgctcttctgggcagcgctgc

SEQ ID NO: 419985 - DNA, 25 bp, Homo sapien
tttcaatattgaactaaaaacttgc

SEQ ID NO: 419986 - DNA, 25 bp, Homo sapien
ccagcccaacatttcaatattgaac

SEQ ID NO: 419987 - DNA, 25 bp, Homo sapien
tcaatattgaactaaaaacttgcaa

SEQ ID NO: 419988 - DNA, 25 bp, Homo sapien
gcccaacatttcaatattgaactaa

SEQ ID NO: 419989 - DNA, 25 bp, Homo sapien
cactccctggtgttggactgaatcc

SEQ ID NO: 419990 - DNA, 25 bp, Homo sapien
taaaaagcttcaaacacacccacac

SEQ ID NO: 419991 - DNA, 25 bp, Homo sapien
ttccatggtcaaagacactccctgg

SEQ ID NO: 419992 - DNA, 25 bp, Homo sapien
gagctggaggtttacagttccttcc

SEQ ID NO: 419993 - DNA, 25 bp, Homo sapien
ttgtttattagcaaacgtaggtctc

SEQ ID NO: 419994 - DNA, 25 bp, Homo sapien
gacacctggataccagggtggagaa

SEQ ID NO: 419995 - DNA, 25 bp, Homo sapien
ctgagacacctggataccagggtgg

SEQ ID NO: 419996 - DNA, 25 bp, Homo sapien
tattagcaaacgtaggtctccttca

SEQ ID NO: 419997 - DNA, 25 bp, Homo sapien
cactgataatgacgtggcagcctgg

SEQ ID NO: 419998 - DNA, 25 bp, Homo sapien
tgataatgacgtggcagcctggaca

SEQ ID NO: 419999 - DNA, 25 bp, Homo sapien
tgcccactgataatgacgtggcagc

SEQ ID NO: 420000 - DNA, 25 bp, Homo sapien
gatgcccactgataatgacgtggca

SEQ ID NO: 420001 - DNA, 25 bp, Homo sapien
atgagaaacctcgtcccgtcactgc

SEQ ID NO: 420002 - DNA, 25 bp, Homo sapien
gggatgagaaacctcgtcccgtcac

SEQ ID NO: 420003 - DNA, 25 bp, Homo sapien
gtgtggggatgagaaacctcgtccc

SEQ ID NO: 420004 - DNA, 25 bp, Homo sapien
ctgacggggagcacccgggtgtggg

SEQ ID NO: 420005 - DNA, 25 bp, Homo sapien
gaggcagcagcatgccactttccag

SEQ ID NO: 420006 - DNA, 25 bp, Homo sapien
cctgtggttcctgctcacaccagga

SEQ ID NO: 420007 - DNA, 25 bp, Homo sapien
ggttcctgctcacaccaggaggcat

SEQ ID NO: 420008 - DNA, 25 bp, Homo sapien
tccagaaggactgccctgtccctgt

SEQ ID NO: 420009 - DNA, 25 bp, Homo sapien
taactgcattcgctattggagagca

SEQ ID NO: 420010 - DNA, 25 bp, Homo sapien
ttcctgtcaccatagaactggatgg

SEQ ID NO: 420011 - DNA, 25 bp, Homo sapien
gagagacttcacaacagatcatctg

SEQ ID NO: 420012 - DNA, 25 bp, Homo sapien
ggttcacacatcatcgagagacttc

SEQ ID NO: 420013 - DNA, 25 bp, Homo sapien
gcctgtgctgcatagtgggactcct

SEQ ID NO: 420014 - DNA, 25 bp, Homo sapien
taattaaaacaaacacgatcatctc

SEQ ID NO: 420015 - DNA, 25 bp, Homo sapien
ctccattttaagcaatcttaagaat

SEQ ID NO: 420016 - DNA, 25 bp, Homo sapien
ccttgaattctgcttaaaatggaga

SEQ ID NO: 420017 - DNA, 25 bp, Homo sapien
ctaattttccattgacaggactgct

SEQ ID NO: 420018 - DNA, 25 bp, Homo sapien
tttccattgacaggactgcttgctg

SEQ ID NO: 420019 - DNA, 25 bp, Homo sapien
ttttccattgacaggactgcttgct

SEQ ID NO: 420020 - DNA, 25 bp, Homo sapien
aattttccattgacaggactgcttg

SEQ ID NO: 420021 - DNA, 25 bp, Homo sapien
gacgtgtggaccacgctcttccgaa

SEQ ID NO: 420022 - DNA, 25 bp, Homo sapien
ggcaaacaggcaaggttccctctga

SEQ ID NO: 420023 - DNA, 25 bp, Homo sapien
tctcgtgggcgagtccctgttcgca

SEQ ID NO: 420024 - DNA, 25 bp, Homo sapien
tctgaggccgtagcggcttctcgtg

SEQ ID NO: 420025 - DNA, 25 bp, Homo sapien
cggggaggggacgcaggtcagccca

SEQ ID NO: 420026 - DNA, 25 bp, Homo sapien
ggggaggggacgcaggtcagcccac

SEQ ID NO: 420027 - DNA, 25 bp, Homo sapien
ctcggggaggggacgcaggtcagcc

SEQ ID NO: 420028 - DNA, 25 bp, Homo sapien
tcggggaggggacgcaggtcagccc

SEQ ID NO: 420029 - DNA, 25 bp, Homo sapien
gcccaccagcctgcgctgcgctgca

SEQ ID NO: 420030 - DNA, 25 bp, Homo sapien
cagcgcccaccagcctgcgctgcgc

SEQ ID NO: 420031 - DNA, 25 bp, Homo sapien
ccggcagcgcccaccagcctgcgct

SEQ ID NO: 420032 - DNA, 25 bp, Homo sapien
agccggcagcgcccaccagcctgcg

SEQ ID NO: 420033 - DNA, 25 bp, Homo sapien
caaaatcacacttggctctcacggc

SEQ ID NO: 420034 - DNA, 25 bp, Homo sapien
cctacagcgttccaagacacaaagt

SEQ ID NO: 420035 - DNA, 25 bp, Homo sapien
taaccaataagctcccctacagcgt

SEQ ID NO: 420036 - DNA, 25 bp, Homo sapien
aggtaacagtactcagtccacagtg

SEQ ID NO: 420037 - DNA, 25 bp, Homo sapien
gcattgtggcatacaaagggcaatt

SEQ ID NO: 420038 - DNA, 25 bp, Homo sapien
gccatttggagggtgtactaacgta

SEQ ID NO: 420039 - DNA, 25 bp, Homo sapien
gcagacatagacagtgggcacatat

SEQ ID NO: 420040 - DNA, 25 bp, Homo sapien
caatctgtgaagcatctgacaagca

SEQ ID NO: 420041 - DNA, 25 bp, Homo sapien
gtgaacagacttcggagcgtggaaa

SEQ ID NO: 420042 - DNA, 25 bp, Homo sapien
gaaaagaacatgacaatgccaccac

SEQ ID NO: 420043 - DNA, 25 bp, Homo sapien
cccacgaggtgttggaagctaggat

SEQ ID NO: 420044 - DNA, 25 bp, Homo sapien
caacctttgagtaggtatcatctcc

SEQ ID NO: 420045 - DNA, 25 bp, Homo sapien
gtgcctacaataccatagtttcccc

SEQ ID NO: 420046 - DNA, 25 bp, Homo sapien
atttataattacgaagcaaaatcca

SEQ ID NO: 420047 - DNA, 25 bp, Homo sapien
ttataattacgaagcaaaatccata

SEQ ID NO: 420048 - DNA, 25 bp, Homo sapien
taagtggtgagtactgccaggccca

SEQ ID NO: 420049 - DNA, 25 bp, Homo sapien
ccacagtgcatgaggttaccaaacc

SEQ ID NO: 420050 - DNA, 25 bp, Homo sapien
gcagggtcttctcccagaatctaga

SEQ ID NO: 420051 - DNA, 25 bp, Homo sapien
catcaaggtcctttggagcagggtc

SEQ ID NO: 420052 - DNA, 25 bp, Homo sapien
gacttggcagtgaagcattatctcg

SEQ ID NO: 420053 - DNA, 25 bp, Homo sapien
aagtataacttaggtttctctggtg

SEQ ID NO: 420054 - DNA, 25 bp, Homo sapien
tccacaactaagatactgaaaagca

SEQ ID NO: 420055 - DNA, 25 bp, Homo sapien
aacttaggtttctctggtgtccaca

SEQ ID NO: 420056 - DNA, 25 bp, Homo sapien
ccacaactaagatactgaaaagcac

SEQ ID NO: 420057 - DNA, 25 bp, Homo sapien
cactgtctgcagtcaatgaggcctc

SEQ ID NO: 420058 - DNA, 25 bp, Homo sapien
cataagaattgtaggcatggtgctc

SEQ ID NO: 420059 - DNA, 25 bp, Homo sapien
gacctcaagcctgggatagtactgc

SEQ ID NO: 420060 - DNA, 25 bp, Homo sapien
tcaggctaaagtaggtggcagtcac

SEQ ID NO: 420061 - DNA, 25 bp, Homo sapien
catgtagcttttaacttcattcagc

SEQ ID NO: 420062 - DNA, 25 bp, Homo sapien
cccatgtagcttttaacttcattca

SEQ ID NO: 420063 - DNA, 25 bp, Homo sapien
attcagcaattgttagtattttgcc

SEQ ID NO: 420064 - DNA, 25 bp, Homo sapien
agcttttaacttcattcagcaattg

SEQ ID NO: 420065 - DNA, 25 bp, Homo sapien
gggtaccgaatgtcagtcgtctcat

SEQ ID NO: 420066 - DNA, 25 bp, Homo sapien
tgcttggctagaggagtgtgactac

SEQ ID NO: 420067 - DNA, 25 bp, Homo sapien
tgtaaataagagcaggcttccctag

SEQ ID NO: 420068 - DNA, 25 bp, Homo sapien
aatactacataggtgagttgtggcc

SEQ ID NO: 420069 - DNA, 25 bp, Homo sapien
tagctttcgttcattagacctttgc

SEQ ID NO: 420070 - DNA, 25 bp, Homo sapien
tcgttcattagacctttgcggtcac

SEQ ID NO: 420071 - DNA, 25 bp, Homo sapien
tgttttagctttcgttcattagacc

SEQ ID NO: 420072 - DNA, 25 bp, Homo sapien
tttgttttagctttcgttcattaga

SEQ ID NO: 420073 - DNA, 25 bp, Homo sapien
ggagtttggtcgtcaactcctccgc

SEQ ID NO: 420074 - DNA, 25 bp, Homo sapien
gagtttggtcgtcaactcctccgcc

SEQ ID NO: 420075 - DNA, 25 bp, Homo sapien
gggccagatgggaagagcgcagccc

SEQ ID NO: 420076 - DNA, 25 bp, Homo sapien
agcctgagaacccaacaccgccggg

SEQ ID NO: 420077 - DNA, 25 bp, Homo sapien
tgggaagagcgcagccccggagctg

SEQ ID NO: 420078 - DNA, 25 bp, Homo sapien
gctcaagcctgagaacccaacaccg

SEQ ID NO: 420079 - DNA, 25 bp, Homo sapien
agggcagccagcctcgcgcgggaag

SEQ ID NO: 420080 - DNA, 25 bp, Homo sapien
cagcctcgcgcgggaagcacctggc

SEQ ID NO: 420081 - DNA, 25 bp, Homo sapien
ggcagccagcctcgcgcgggaagca

SEQ ID NO: 420082 - DNA, 25 bp, Homo sapien
gccagcctcgcgcgggaagcacctg

SEQ ID NO: 420083 - DNA, 25 bp, Homo sapien
caccttggcggagacgcacctggcg

SEQ ID NO: 420084 - DNA, 25 bp, Homo sapien
agacgcacctggcgggacagccctg

SEQ ID NO: 420085 - DNA, 25 bp, Homo sapien
cgggaacgcacccaccttggcggag

SEQ ID NO: 420086 - DNA, 25 bp, Homo sapien
gcgggaacgcacccaccttggcgga

SEQ ID NO: 420087 - DNA, 25 bp, Homo sapien
cccggcgtgataaactttattcgct

SEQ ID NO: 420088 - DNA, 25 bp, Homo sapien
cggcgtgataaactttattcgctct

SEQ ID NO: 420089 - DNA, 25 bp, Homo sapien
ggcgtgataaactttattcgctctt

SEQ ID NO: 420090 - DNA, 25 bp, Homo sapien
ccggcgtgataaactttattcgctc

SEQ ID NO: 420091 - DNA, 25 bp, Homo sapien
tagggacagtcttacgccggaaatg

SEQ ID NO: 420092 - DNA, 25 bp, Homo sapien
tttaacttggtaatgcctgccctcc

SEQ ID NO: 420093 - DNA, 25 bp, Homo sapien
gaaatgctcctttgctgtccgggtt

SEQ ID NO: 420094 - DNA, 25 bp, Homo sapien
cagcctgcgcaggaaggatgacgct

SEQ ID NO: 420095 - DNA, 25 bp, Homo sapien
ggcccctgcgtgctagtcctgcaaa

SEQ ID NO: 420096 - DNA, 25 bp, Homo sapien
attggccggcggctcggttgcctcg

SEQ ID NO: 420097 - DNA, 25 bp, Homo sapien
gcgggagcggttccggtcaccctca

SEQ ID NO: 420098 - DNA, 25 bp, Homo sapien
ctagtcctgcaaagcgctgattggc

SEQ ID NO: 420099 - DNA, 25 bp, Homo sapien
tggttgtaggactccagtcacgtgc

SEQ ID NO: 420100 - DNA, 25 bp, Homo sapien
tgtggttgtaggactccagtcacgt

SEQ ID NO: 420101 - DNA, 25 bp, Homo sapien
tggtgcatcaaatccttcttgtgct

SEQ ID NO: 420102 - DNA, 25 bp, Homo sapien
tgcatcaaatccttcttgtgctttg

SEQ ID NO: 420103 - DNA, 25 bp, Homo sapien
gccgcagtgcatagcgtgtgcgctg

SEQ ID NO: 420104 - DNA, 25 bp, Homo sapien
gcagtgcatagcgtgtgcgctggcc

SEQ ID NO: 420105 - DNA, 25 bp, Homo sapien
cgtggttgaaccatgacagtggcca

SEQ ID NO: 420106 - DNA, 25 bp, Homo sapien
aggtccccactctggcgcccgtatc

SEQ ID NO: 420107 - DNA, 25 bp, Homo sapien
accatggtgagtgggcaatgcccat

SEQ ID NO: 420108 - DNA, 25 bp, Homo sapien
ggcttttgctgaactacgcagctgt

SEQ ID NO: 420109 - DNA, 25 bp, Homo sapien
caagtgtgggacactttgtcctgag

SEQ ID NO: 420110 - DNA, 25 bp, Homo sapien
gaaataccttcactaacaactgtgg

SEQ ID NO: 420111 - DNA, 25 bp, Homo sapien
ccaaacccggcttggtgatctttca

SEQ ID NO: 420112 - DNA, 25 bp, Homo sapien
ctgcagaaatgtggggaaattattt

SEQ ID NO: 420113 - DNA, 25 bp, Homo sapien
gcagaaatgtggggaaattatttta

SEQ ID NO: 420114 - DNA, 25 bp, Homo sapien
cagaaatgtggggaaattattttag

SEQ ID NO: 420115 - DNA, 25 bp, Homo sapien
tgcagaaatgtggggaaattatttt

SEQ ID NO: 420116 - DNA, 25 bp, Homo sapien
ccttgtaggacggtcttggtatgac

SEQ ID NO: 420117 - DNA, 25 bp, Homo sapien
gaatggcagttgtgtctccataaac

SEQ ID NO: 420118 - DNA, 25 bp, Homo sapien
ggtatgacgtatcattcctcgcatg

SEQ ID NO: 420119 - DNA, 25 bp, Homo sapien
catgcactgcttagggatccttgta

SEQ ID NO: 420120 - DNA, 25 bp, Homo sapien
tggtcatctgattgacgcgcattga

SEQ ID NO: 420121 - DNA, 25 bp, Homo sapien
tctgcccaagctgtaatggctctga

SEQ ID NO: 420122 - DNA, 25 bp, Homo sapien
gaaaagatgctgtacttcgttgagt

SEQ ID NO: 420123 - DNA, 25 bp, Homo sapien
gcgcattgaactctctgcctgaaaa

SEQ ID NO: 420124 - DNA, 25 bp, Homo sapien
ggaaacaaggcttccatgattgata

SEQ ID NO: 420125 - DNA, 25 bp, Homo sapien
gcttccatgattgatatcagctctg

SEQ ID NO: 420126 - DNA, 25 bp, Homo sapien
catggtatggatccgggagttagaa

SEQ ID NO: 420127 - DNA, 25 bp, Homo sapien
aaccaaggcatggtatggatccggg

SEQ ID NO: 420128 - DNA, 25 bp, Homo sapien
gaagcagatggatcatttgaagcct

SEQ ID NO: 420129 - DNA, 25 bp, Homo sapien
cattccagccgggggggacaaagct

SEQ ID NO: 420130 - DNA, 25 bp, Homo sapien
ggggacaaagctaaatcctgtctca

SEQ ID NO: 420131 - DNA, 25 bp, Homo sapien
taactggatgtggtgatgagcacct

SEQ ID NO: 420132 - DNA, 25 bp, Homo sapien
tgcagctgcaaagttcgtagtccac

SEQ ID NO: 420133 - DNA, 25 bp, Homo sapien
gatgccttccattctgtcaactcag

SEQ ID NO: 420134 - DNA, 25 bp, Homo sapien
ccagcatctaccctgaaccctgggc

SEQ ID NO: 420135 - DNA, 25 bp, Homo sapien
agttcgtagtccacgaatgtgttcc

SEQ ID NO: 420136 - DNA, 25 bp, Homo sapien
ggttccctctgatggccgtaagaca

SEQ ID NO: 420137 - DNA, 25 bp, Homo sapien
tacaaagtacaaacaactaggtggc

SEQ ID NO: 420138 - DNA, 25 bp, Homo sapien
ggttcaatctagagacccaactcga

SEQ ID NO: 420139 - DNA, 25 bp, Homo sapien
tagaatagtgcctcaccaggagtgg

SEQ ID NO: 420140 - DNA, 25 bp, Homo sapien
tataatctcaagattctgccccact

SEQ ID NO: 420141 - DNA, 25 bp, Homo sapien
tgccccactccgatatcttctaggt

SEQ ID NO: 420142 - DNA, 25 bp, Homo sapien
ctatacccgcatgtttataatctca

SEQ ID NO: 420143 - DNA, 25 bp, Homo sapien
ccgatatcttctaggttgatttgaa

SEQ ID NO: 420144 - DNA, 25 bp, Homo sapien
aatttcccaacgctggtctcgggcg

SEQ ID NO: 420145 - DNA, 25 bp, Homo sapien
tctaaagggcattccgatggagcag

SEQ ID NO: 420146 - DNA, 25 bp, Homo sapien
tggtggctctctaccgattacaacg

SEQ ID NO: 420147 - DNA, 25 bp, Homo sapien
ggcattttccggctaggaggcccgc

SEQ ID NO: 420148 - DNA, 25 bp, Homo sapien
tcacgtgacctgagggggttgggtg

SEQ ID NO: 420149 - DNA, 25 bp, Homo sapien
cacgtgacctgagggggttgggtgg

SEQ ID NO: 420150 - DNA, 25 bp, Homo sapien
gtcagcacgtcagccggggttttgc

SEQ ID NO: 420151 - DNA, 25 bp, Homo sapien
tatagcgaccgggtcggtccgtcgc

SEQ ID NO: 420152 - DNA, 25 bp, Homo sapien
gttttgcgttttgattgacagttgc

SEQ ID NO: 420153 - DNA, 25 bp, Homo sapien
gcgggaggaggacgtcagcacgtca

SEQ ID NO: 420154 - DNA, 25 bp, Homo sapien
ggaggaagcggcgcgagcgccccgc

SEQ ID NO: 420155 - DNA, 25 bp, Homo sapien
aggaagcggcgcgagcgccccgcca

SEQ ID NO: 420156 - DNA, 25 bp, Homo sapien
ggaagcggcgcgagcgccccgccat

SEQ ID NO: 420157 - DNA, 25 bp, Homo sapien
cggaggaagcggcgcgagcgccccg

SEQ ID NO: 420158 - DNA, 25 bp, Homo sapien
gtgattaggcgtgtgccagtttgtc

SEQ ID NO: 420159 - DNA, 25 bp, Homo sapien
cctcatatttgagaaggctttcacg

SEQ ID NO: 420160 - DNA, 25 bp, Homo sapien
tgtctttgctttggcattagctttc

SEQ ID NO: 420161 - DNA, 25 bp, Homo sapien
tcttggtatttgtgattaggcgtgt

SEQ ID NO: 420162 - DNA, 25 bp, Homo sapien
ttaatcaggatctaagcaaggacca

SEQ ID NO: 420163 - DNA, 25 bp, Homo sapien
gccttgtttgacaaatcttttgagt

SEQ ID NO: 420164 - DNA, 25 bp, Homo sapien
aaaagataaggatgctgtagcacca

SEQ ID NO: 420165 - DNA, 25 bp, Homo sapien
gtgagtcttccagtatccagtaaga

SEQ ID NO: 420166 - DNA, 25 bp, Homo sapien
tcagtcctgtgcctcaaacctattt

SEQ ID NO: 420167 - DNA, 25 bp, Homo sapien
agttctaggcttgcagttgtgagcc

SEQ ID NO: 420168 - DNA, 25 bp, Homo sapien
ttcagtcctgtgcctcaaacctatt

SEQ ID NO: 420169 - DNA, 25 bp, Homo sapien
tctttggagctaggatagttgccat

SEQ ID NO: 420170 - DNA, 25 bp, Homo sapien
gatgtctttggagctaggatagttg

SEQ ID NO: 420171 - DNA, 25 bp, Homo sapien
agtctccatattcactggtccccag

SEQ ID NO: 420172 - DNA, 25 bp, Homo sapien
tgtctttggagctaggatagttgcc

SEQ ID NO: 420173 - DNA, 25 bp, Homo sapien
aacttgcaggtatggtacaaatagc

SEQ ID NO: 420174 - DNA, 25 bp, Homo sapien
gcaatacagccatcaaagtagcagt

SEQ ID NO: 420175 - DNA, 25 bp, Homo sapien
tatgactccattccgtttttggcag

SEQ ID NO: 420176 - DNA, 25 bp, Homo sapien
tttaaacgttgttggcatgaagtcc

SEQ ID NO: 420177 - DNA, 25 bp, Homo sapien
gcctgttaggaattggactgcaccc

SEQ ID NO: 420178 - DNA, 25 bp, Homo sapien
gggcaagcgatcatttctgcctgag

SEQ ID NO: 420179 - DNA, 25 bp, Homo sapien
tatgggatactcagctccacgttgc

SEQ ID NO: 420180 - DNA, 25 bp, Homo sapien
tcctgggttacgtgttacagttcac

SEQ ID NO: 420181 - DNA, 25 bp, Homo sapien
acatgttcttaagtcattgctgtct

SEQ ID NO: 420182 - DNA, 25 bp, Homo sapien
tgggtggaccacaggtccctgtgcc

SEQ ID NO: 420183 - DNA, 25 bp, Homo sapien
ggagtgattcctggccccatgtatc

SEQ ID NO: 420184 - DNA, 25 bp, Homo sapien
gccagtaggtgaagtgggtggacca

SEQ ID NO: 420185 - DNA, 25 bp, Homo sapien
tagatgaaggatgtgtcccattccc

SEQ ID NO: 420186 - DNA, 25 bp, Homo sapien
cccaacagtcttgtgagtagagaga

SEQ ID NO: 420187 - DNA, 25 bp, Homo sapien
tatgcagaccatgggctaggcactc

SEQ ID NO: 420188 - DNA, 25 bp, Homo sapien
gagagcagagccctttagtggaaag

SEQ ID NO: 420189 - DNA, 25 bp, Homo sapien
catttataggtttcacagtgtagga

SEQ ID NO: 420190 - DNA, 25 bp, Homo sapien
ggaccattttccagcttatcacact

SEQ ID NO: 420191 - DNA, 25 bp, Homo sapien
gatgtagatatcttttggtggacca

SEQ ID NO: 420192 - DNA, 25 bp, Homo sapien
cttgatgatgaaggataatcccctc

SEQ ID NO: 420193 - DNA, 25 bp, Homo sapien
cacattaaagaccatgtgttccttt

SEQ ID NO: 420194 - DNA, 25 bp, Homo sapien
catctgttctaacatggggttggtg

SEQ ID NO: 420195 - DNA, 25 bp, Homo sapien
tttctgctgagatcccctatctgtt

SEQ ID NO: 420196 - DNA, 25 bp, Homo sapien
gatcccctatctgttcacacattaa

SEQ ID NO: 420197 - DNA, 25 bp, Homo sapien
tctggcataccgtactttttaaagc

SEQ ID NO: 420198 - DNA, 25 bp, Homo sapien
tcccagtgttagccacttcttgtcc

SEQ ID NO: 420199 - DNA, 25 bp, Homo sapien
tcaggtgtttgaaatgcctcaaatg

SEQ ID NO: 420200 - DNA, 25 bp, Homo sapien
ggctacatccagttgtaattgttca

SEQ ID NO: 420201 - DNA, 25 bp, Homo sapien
ggagtacaactgtttcggattttga

SEQ ID NO: 420202 - DNA, 25 bp, Homo sapien
ctaattcgaagtgtttgggagtaca

SEQ ID NO: 420203 - DNA, 25 bp, Homo sapien
ggctgtaacccatcatatgagttca

SEQ ID NO: 420204 - DNA, 25 bp, Homo sapien
ggcccattgccctgactagtaaagg

SEQ ID NO: 420205 - DNA, 25 bp, Homo sapien
tgtgtcgatcactcaaaactagctg

SEQ ID NO: 420206 - DNA, 25 bp, Homo sapien
cagctgatcagactggtggtggaat

SEQ ID NO: 420207 - DNA, 25 bp, Homo sapien
ttttcccctaagagcggcgagagaa

SEQ ID NO: 420208 - DNA, 25 bp, Homo sapien
cagcttggcactatgaagtttgacc

SEQ ID NO: 420209 - DNA, 25 bp, Homo sapien
ttaaaggacttgtcttcatggctct

SEQ ID NO: 420210 - DNA, 25 bp, Homo sapien
tcagttaaaggacttgtcttcatgg

SEQ ID NO: 420211 - DNA, 25 bp, Homo sapien
tttcttcataccactttgctcttag

SEQ ID NO: 420212 - DNA, 25 bp, Homo sapien
ttcatggctcttggtgttttcttca

SEQ ID NO: 420213 - DNA, 25 bp, Homo sapien
tagctcctgggttagtctgaacttg

SEQ ID NO: 420214 - DNA, 25 bp, Homo sapien
tccagcttaagaaatgaggtagtac

SEQ ID NO: 420215 - DNA, 25 bp, Homo sapien
gatgcattcatttcagtcccagtct

SEQ ID NO: 420216 - DNA, 25 bp, Homo sapien
cattagagaacatattgcacctgcc

SEQ ID NO: 420217 - DNA, 25 bp, Homo sapien
cctggattgttcgtagaccttcaca

SEQ ID NO: 420218 - DNA, 25 bp, Homo sapien
taagctcggttcctggattgttcgt

SEQ ID NO: 420219 - DNA, 25 bp, Homo sapien
tcaaaaaaccatgtaagctcggttc

SEQ ID NO: 420220 - DNA, 25 bp, Homo sapien
ttgttcgtagaccttcacattgcct

SEQ ID NO: 420221 - DNA, 25 bp, Homo sapien
ggctgatgggcctttcagaagtgaa

SEQ ID NO: 420222 - DNA, 25 bp, Homo sapien
ccttggctgatgggcctttcagaag

SEQ ID NO: 420223 - DNA, 25 bp, Homo sapien
tgaggcacaggttcagggatgctgg

SEQ ID NO: 420224 - DNA, 25 bp, Homo sapien
actgaagtaggccttggctgatggg

SEQ ID NO: 420225 - DNA, 25 bp, Homo sapien
cagtgagagacttgcggaaattatg

SEQ ID NO: 420226 - DNA, 25 bp, Homo sapien
agtgagagacttgcggaaattatgt

SEQ ID NO: 420227 - DNA, 25 bp, Homo sapien
cagctggaactggagatagttttga

SEQ ID NO: 420228 - DNA, 25 bp, Homo sapien
aactggagatagttttgagttccct

SEQ ID NO: 420229 - DNA, 25 bp, Homo sapien
gggttagagtcatgtggtccccatg

SEQ ID NO: 420230 - DNA, 25 bp, Homo sapien
gagtcatgtggtccccatgaactct

SEQ ID NO: 420231 - DNA, 25 bp, Homo sapien
catgtggtccccatgaactctcaaa

SEQ ID NO: 420232 - DNA, 25 bp, Homo sapien
tagagtcatgtggtccccatgaact

SEQ ID NO: 420233 - DNA, 25 bp, Homo sapien
ttaaaattcttctcttggttgcctc

SEQ ID NO: 420234 - DNA, 25 bp, Homo sapien
aaaattcttctcttggttgcctcca

SEQ ID NO: 420235 - DNA, 25 bp, Homo sapien
aaattcttctcttggttgcctccat

SEQ ID NO: 420236 - DNA, 25 bp, Homo sapien
taaaattcttctcttggttgcctcc

SEQ ID NO: 420237 - DNA, 25 bp, Homo sapien
gtgtcagtgccccagcttccaggca

SEQ ID NO: 420238 - DNA, 25 bp, Homo sapien
ggttaaagcataggactcttttgcc

SEQ ID NO: 420239 - DNA, 25 bp, Homo sapien
aagacctggtgtcttactgttccag

SEQ ID NO: 420240 - DNA, 25 bp, Homo sapien
ctttttgtgtctgatggttaaagca

SEQ ID NO: 420241 - DNA, 25 bp, Homo sapien
gcctctcaacgctctcattttgcat

SEQ ID NO: 420242 - DNA, 25 bp, Homo sapien
agcattgggcctctcaacgctctca

SEQ ID NO: 420243 - DNA, 25 bp, Homo sapien
ttttcctgagcattgggcctctcaa

SEQ ID NO: 420244 - DNA, 25 bp, Homo sapien
ttcctgagcattgggcctctcaacg

SEQ ID NO: 420245 - DNA, 25 bp, Homo sapien
aggagttctgctccttttgtgctcc

SEQ ID NO: 420246 - DNA, 25 bp, Homo sapien
tgatttgggagcatgcagttcttca

SEQ ID NO: 420247 - DNA, 25 bp, Homo sapien
gttcttcataagaatccccactctc

SEQ ID NO: 420248 - DNA, 25 bp, Homo sapien
tctcctgattgttactagtcttgcc

SEQ ID NO: 420249 - DNA, 25 bp, Homo sapien
ggcctgagatttggcccataatttt

SEQ ID NO: 420250 - DNA, 25 bp, Homo sapien
tgcctttaatgttaagagcgttgtc

SEQ ID NO: 420251 - DNA, 25 bp, Homo sapien
agcgttgtctggaacagcactgcca

SEQ ID NO: 420252 - DNA, 25 bp, Homo sapien
tacattttatgttgctaagtcctta

SEQ ID NO: 420253 - DNA, 25 bp, Homo sapien
aacaggctcccaggacaattcttgg

SEQ ID NO: 420254 - DNA, 25 bp, Homo sapien
agttaaccttagagctgggaccaga

SEQ ID NO: 420255 - DNA, 25 bp, Homo sapien
gattctacccctgtgtgtgagggcc

SEQ ID NO: 420256 - DNA, 25 bp, Homo sapien
tgaagaggtcttaactacacagtga

SEQ ID NO: 420257 - DNA, 25 bp, Homo sapien
tcgagcagggtgctgtttcctaacc

SEQ ID NO: 420258 - DNA, 25 bp, Homo sapien
cctttgccagtttacacgggtgatg

SEQ ID NO: 420259 - DNA, 25 bp, Homo sapien
tttggaaagaacgtcctcgagcagg

SEQ ID NO: 420260 - DNA, 25 bp, Homo sapien
caggacatttttgggagctattcac

SEQ ID NO: 420261 - DNA, 25 bp, Homo sapien
gggacgcctaagtcctagcctaatg

SEQ ID NO: 420262 - DNA, 25 bp, Homo sapien
gaccgggttatttgttgccatgccc

SEQ ID NO: 420263 - DNA, 25 bp, Homo sapien
tcatgtgtaagaagaccgggttatt

SEQ ID NO: 420264 - DNA, 25 bp, Homo sapien
caaggcaagcaaaaggggacgccta

SEQ ID NO: 420265 - DNA, 25 bp, Homo sapien
gttattctaataccctgctaggaag

SEQ ID NO: 420266 - DNA, 25 bp, Homo sapien
gagacatgatactgcctgacagggc

SEQ ID NO: 420267 - DNA, 25 bp, Homo sapien
gagtaatcatcactgtcctgtgtag

SEQ ID NO: 420268 - DNA, 25 bp, Homo sapien
tggattctgctagcctaaaaggcat

SEQ ID NO: 420269 - DNA, 25 bp, Homo sapien
cactagcctccagtcaaagttagag

SEQ ID NO: 420270 - DNA, 25 bp, Homo sapien
gagtcttgcggcgttcacatctcag

SEQ ID NO: 420271 - DNA, 25 bp, Homo sapien
tgtattattaagtcaggcagcagat

SEQ ID NO: 420272 - DNA, 25 bp, Homo sapien
tactgcgctatgagggagactttgg

SEQ ID NO: 420273 - DNA, 25 bp, Homo sapien
agtgttgaatgtcgtcctggcaggc

SEQ ID NO: 420274 - DNA, 25 bp, Homo sapien
ggattagccctagccctaaatgtgg

SEQ ID NO: 420275 - DNA, 25 bp, Homo sapien
aatgctggcccgtgagtgtttggat

SEQ ID NO: 420276 - DNA, 25 bp, Homo sapien
tcttgctgtgcctagtgaattgggc

SEQ ID NO: 420277 - DNA, 25 bp, Homo sapien
tagtctagtcataggacctggcttc

SEQ ID NO: 420278 - DNA, 25 bp, Homo sapien
tcctgtaactaaagtgtaggctgcg

SEQ ID NO: 420279 - DNA, 25 bp, Homo sapien
tcttggccggctcatgatctggttg

SEQ ID NO: 420280 - DNA, 25 bp, Homo sapien
tgtcaaattggcacctccgactaga

SEQ ID NO: 420281 - DNA, 25 bp, Homo sapien
tcaagttctttaacgttggagactc

SEQ ID NO: 420282 - DNA, 25 bp, Homo sapien
gagactctggtttcgcgtgtgtaaa

SEQ ID NO: 420283 - DNA, 25 bp, Homo sapien
ctgttctttaactggctctgggacc

SEQ ID NO: 420284 - DNA, 25 bp, Homo sapien
gaccacccggatggtgattttcctg

SEQ ID NO: 420285 - DNA, 25 bp, Homo sapien
ggcggatgccccaaaccttccgtga

SEQ ID NO: 420286 - DNA, 25 bp, Homo sapien
ttttatgataagatgtccagaagct

SEQ ID NO: 420287 - DNA, 25 bp, Homo sapien
gcaactgctcccctgagaaaacttt

SEQ ID NO: 420288 - DNA, 25 bp, Homo sapien
taatacctagttacaggcatttggc

SEQ ID NO: 420289 - DNA, 25 bp, Homo sapien
tgtgaggcccagtccttaactaagg

SEQ ID NO: 420290 - DNA, 25 bp, Homo sapien
tcaaaggagctcaaacccaattgtg

SEQ ID NO: 420291 - DNA, 25 bp, Homo sapien
gaggcagaacagtttgatccccaaa

SEQ ID NO: 420292 - DNA, 25 bp, Homo sapien
cctgggagtccctcttgattaaggt

SEQ ID NO: 420293 - DNA, 25 bp, Homo sapien
caggcttctgaaggtaaagggacac

SEQ ID NO: 420294 - DNA, 25 bp, Homo sapien
caggtccagagtatgagtgcaagca

SEQ ID NO: 420295 - DNA, 25 bp, Homo sapien
gatccagaagctatggaaccagcag

SEQ ID NO: 420296 - DNA, 25 bp, Homo sapien
ccttgattgcaccaacaggtccaga

SEQ ID NO: 420297 - DNA, 25 bp, Homo sapien
gaaaagaagcagtaatctacctctg

SEQ ID NO: 420298 - DNA, 25 bp, Homo sapien
cacttttgagcggttgaattgggag

SEQ ID NO: 420299 - DNA, 25 bp, Homo sapien
tacctctgccgataacctgtttaag

SEQ ID NO: 420300 - DNA, 25 bp, Homo sapien
gatgactcagcagaacaccgcgttt

SEQ ID NO: 420301 - DNA, 25 bp, Homo sapien
gattgtaagatctagtccggacttg

SEQ ID NO: 420302 - DNA, 25 bp, Homo sapien
tactacacagtttggttacaggact

SEQ ID NO: 420303 - DNA, 25 bp, Homo sapien
taattaactgtcaagcctgtggatg

SEQ ID NO: 420304 - DNA, 25 bp, Homo sapien
gctggttgccacatcttagcaagca

SEQ ID NO: 420305 - DNA, 25 bp, Homo sapien
gactgtcatgggtggccgtgtgtgc

SEQ ID NO: 420306 - DNA, 25 bp, Homo sapien
gcccatggccaagggcaagggccca

SEQ ID NO: 420307 - DNA, 25 bp, Homo sapien
caccccagattggtcagggttgagg

SEQ ID NO: 420308 - DNA, 25 bp, Homo sapien
caccctttggggcagatacttttag

SEQ ID NO: 420309 - DNA, 25 bp, Homo sapien
caggaagagacaactggattggagg

SEQ ID NO: 420310 - DNA, 25 bp, Homo sapien
tcagtacggtgtaggtgcaggaaga

SEQ ID NO: 420311 - DNA, 25 bp, Homo sapien
agtacggtgtaggtgcaggaagaga

SEQ ID NO: 420312 - DNA, 25 bp, Homo sapien
acaactggattggaggaaggacaga

SEQ ID NO: 420313 - DNA, 25 bp, Homo sapien
tctgggagccgtaagaaagagccac

SEQ ID NO: 420314 - DNA, 25 bp, Homo sapien
ggaccccttggcacagcatctgtga

SEQ ID NO: 420315 - DNA, 25 bp, Homo sapien
tagaagagctacaagtggcatctgg

SEQ ID NO: 420316 - DNA, 25 bp, Homo sapien
tatagtctggcttgacttggtgccc

SEQ ID NO: 420317 - DNA, 25 bp, Homo sapien
tgtactgttactccctgaacaagca

SEQ ID NO: 420318 - DNA, 25 bp, Homo sapien
caagcatttggcagtactggtagtg

SEQ ID NO: 420319 - DNA, 25 bp, Homo sapien
cctttggccgatatgcttcattttc

SEQ ID NO: 420320 - DNA, 25 bp, Homo sapien
gattctaatcagatatctatgtact

SEQ ID NO: 420321 - DNA, 25 bp, Homo sapien
tctgtgcttaagtggccccatcgca

SEQ ID NO: 420322 - DNA, 25 bp, Homo sapien
tcctgaagacacgaggttgggttcg

SEQ ID NO: 420323 - DNA, 25 bp, Homo sapien
gccagagtagcctcattacagctga

SEQ ID NO: 420324 - DNA, 25 bp, Homo sapien
gagaccatttttcacgcctggccgg

SEQ ID NO: 420325 - DNA, 25 bp, Homo sapien
cggcgtcgattgactgggagctccc

SEQ ID NO: 420326 - DNA, 25 bp, Homo sapien
cgaaagaacgcagcccgcttgtcgg

SEQ ID NO: 420327 - DNA, 25 bp, Homo sapien
ccacgtgactgtgcgtccgcggcgt

SEQ ID NO: 420328 - DNA, 25 bp, Homo sapien
gcgtccgcagcgaccacgtgactgt

SEQ ID NO: 420329 - DNA, 25 bp, Homo sapien
ggcggtgctgctgcggttgccatgg

SEQ ID NO: 420330 - DNA, 25 bp, Homo sapien
ccgggcttcggggggcggtgctgct

SEQ ID NO: 420331 - DNA, 25 bp, Homo sapien
ggggggcggtgctgctgcggttgcc

SEQ ID NO: 420332 - DNA, 25 bp, Homo sapien
ctaagcgccagccccgggcttcggg

SEQ ID NO: 420333 - DNA, 25 bp, Homo sapien
gaatgccctaaagctccgaagttgc

SEQ ID NO: 420334 - DNA, 25 bp, Homo sapien
tctgggaagatccttgcagaggcca

SEQ ID NO: 420335 - DNA, 25 bp, Homo sapien
ctttggtccccagcaacttgcaggg

SEQ ID NO: 420336 - DNA, 25 bp, Homo sapien
aaaacaggcttgctccgagggtgca

SEQ ID NO: 420337 - DNA, 25 bp, Homo sapien
aggctgatgctgtcgtcgttcctgt

SEQ ID NO: 420338 - DNA, 25 bp, Homo sapien
cagttgctagcattggttatcttct

SEQ ID NO: 420339 - DNA, 25 bp, Homo sapien
aggtggatctgcagcgaaacctctg

SEQ ID NO: 420340 - DNA, 25 bp, Homo sapien
gatctgcagcgaaacctctgtggtg

SEQ ID NO: 420341 - DNA, 25 bp, Homo sapien
gactccgtgggcgtctgtttgacag

SEQ ID NO: 420342 - DNA, 25 bp, Homo sapien
cagctcccgaatgatctgatacagg

SEQ ID NO: 420343 - DNA, 25 bp, Homo sapien
gacagagttgcaaacacactgacag

SEQ ID NO: 420344 - DNA, 25 bp, Homo sapien
taataggcatggaagtgttcgccag

SEQ ID NO: 420345 - DNA, 25 bp, Homo sapien
ctagagcatgcccttgggctcgttc

SEQ ID NO: 420346 - DNA, 25 bp, Homo sapien
catgtctagagcatgcccttgggct

SEQ ID NO: 420347 - DNA, 25 bp, Homo sapien
tcacagaccctgcatgtctagagca

SEQ ID NO: 420348 - DNA, 25 bp, Homo sapien
gaccctgcatgtctagagcatgccc

SEQ ID NO: 420349 - DNA, 25 bp, Homo sapien
ccttttggtgtcttggtcacgtagc

SEQ ID NO: 420350 - DNA, 25 bp, Homo sapien
tagctgctttcatcagcccctgagg

SEQ ID NO: 420351 - DNA, 25 bp, Homo sapien
acatggaagatgtctgtagatgcca

SEQ ID NO: 420352 - DNA, 25 bp, Homo sapien
tcatcagcccctgaggaaatgtggg

SEQ ID NO: 420353 - DNA, 25 bp, Homo sapien
aggcctgggcacgtacagcacaagc

SEQ ID NO: 420354 - DNA, 25 bp, Homo sapien
tacagcacaagcgtgaggcatgaca

SEQ ID NO: 420355 - DNA, 25 bp, Homo sapien
agcgtgcaacgtcctctggcaatga

SEQ ID NO: 420356 - DNA, 25 bp, Homo sapien
aggcatgacaggtgcagcgtgcaac

SEQ ID NO: 420357 - DNA, 25 bp, Homo sapien
tctgtgcacagacacgcgagttgca

SEQ ID NO: 420358 - DNA, 25 bp, Homo sapien
tgagtgtctaatttggcgtggccca

SEQ ID NO: 420359 - DNA, 25 bp, Homo sapien
tctcctggatctttggccctggcag

SEQ ID NO: 420360 - DNA, 25 bp, Homo sapien
cagcatttcgaggtacggataaacc

SEQ ID NO: 420361 - DNA, 25 bp, Homo sapien
tgtctgagtgccggctaagtagctg

SEQ ID NO: 420362 - DNA, 25 bp, Homo sapien
tgccggctaagtagctgtccgcctg

SEQ ID NO: 420363 - DNA, 25 bp, Homo sapien
tgagtgccggctaagtagctgtccg

SEQ ID NO: 420364 - DNA, 25 bp, Homo sapien
cggctaagtagctgtccgcctgcat

SEQ ID NO: 420365 - DNA, 25 bp, Homo sapien
ctttggcttctagccccttggaagc

SEQ ID NO: 420366 - DNA, 25 bp, Homo sapien
cacctggagacttcccgactgggaa

SEQ ID NO: 420367 - DNA, 25 bp, Homo sapien
acattaactgaggtgctttggcttc

SEQ ID NO: 420368 - DNA, 25 bp, Homo sapien
ttggaagctgccgtcctgtaaggag

SEQ ID NO: 420369 - DNA, 25 bp, Homo sapien
caactgacggtgtagtggcacgtcc

SEQ ID NO: 420370 - DNA, 25 bp, Homo sapien
tggcacgtcccaagaaatccctgca

SEQ ID NO: 420371 - DNA, 25 bp, Homo sapien
cgattacgtgtccacaggcctgctg

SEQ ID NO: 420372 - DNA, 25 bp, Homo sapien
ttagcaaatgcatcccgattacgtg

SEQ ID NO: 420373 - DNA, 25 bp, Homo sapien
ctgattgagatttgattctgtctga

SEQ ID NO: 420374 - DNA, 25 bp, Homo sapien
gcccgttcctcgtattcattcatgg

SEQ ID NO: 420375 - DNA, 25 bp, Homo sapien
gagctgggaagttcatcatcatttc

SEQ ID NO: 420376 - DNA, 25 bp, Homo sapien
caaacagtgtgtggtcggcccgttc

SEQ ID NO: 420377 - DNA, 25 bp, Homo sapien
gacaggagccaaaccagtacttgag

SEQ ID NO: 420378 - DNA, 25 bp, Homo sapien
tgtggttcgatgcacttagcgcagt

SEQ ID NO: 420379 - DNA, 25 bp, Homo sapien
ttagttgcctgttgggatccctgag

SEQ ID NO: 420380 - DNA, 25 bp, Homo sapien
gagttggcacactgacatgcaccct

SEQ ID NO: 420381 - DNA, 25 bp, Homo sapien
tatcaatgatgctgaccttccttgg

SEQ ID NO: 420382 - DNA, 25 bp, Homo sapien
gaagaccacagtgcatgtccagtag

SEQ ID NO: 420383 - DNA, 25 bp, Homo sapien
tatctagaaggcacctacctcacag

SEQ ID NO: 420384 - DNA, 25 bp, Homo sapien
cagtagcctgctggagctgaaggaa

SEQ ID NO: 420385 - DNA, 25 bp, Homo sapien
tagtaacctccccaaccagaaagca

SEQ ID NO: 420386 - DNA, 25 bp, Homo sapien
agcacttggcccagatgggttcact

SEQ ID NO: 420387 - DNA, 25 bp, Homo sapien
aagcacttggcccagatgggttcac

SEQ ID NO: 420388 - DNA, 25 bp, Homo sapien
tccccaaccagaaagcacttggccc

SEQ ID NO: 420389 - DNA, 25 bp, Homo sapien
tctccagggtttgtgttcagtacgg

SEQ ID NO: 420390 - DNA, 25 bp, Homo sapien
gagtctattctcaagttcaaagcca

SEQ ID NO: 420391 - DNA, 25 bp, Homo sapien
gagtttattcttgcctggtccatgg

SEQ ID NO: 420392 - DNA, 25 bp, Homo sapien
tcccgagtacccagcattcttaagc

SEQ ID NO: 420393 - DNA, 25 bp, Homo sapien
ggagagtggtccacactgagaggct

SEQ ID NO: 420394 - DNA, 25 bp, Homo sapien
gccaagcacatcctcggtaaccagg

SEQ ID NO: 420395 - DNA, 25 bp, Homo sapien
agcagccctagggagcctccgcccc

SEQ ID NO: 420396 - DNA, 25 bp, Homo sapien
caggtctcctcgagcctgcgggaga

SEQ ID NO: 420397 - DNA, 25 bp, Homo sapien
tcttggttaagacgaggaagcactg

SEQ ID NO: 420398 - DNA, 25 bp, Homo sapien
gctggtcccctaatggcatgctgca

SEQ ID NO: 420399 - DNA, 25 bp, Homo sapien
taccgggctgagaccatgtatacgc

SEQ ID NO: 420400 - DNA, 25 bp, Homo sapien
tatgctgctctcgtcagttaccggg

SEQ ID NO: 420401 - DNA, 25 bp, Homo sapien
ccattggcccgatgactgagtctgt

SEQ ID NO: 420402 - DNA, 25 bp, Homo sapien
tcgtgataccaaaacgtgagacttc

SEQ ID NO: 420403 - DNA, 25 bp, Homo sapien
tcaaaaagagggaccaggtcagact

SEQ ID NO: 420404 - DNA, 25 bp, Homo sapien
tggagagagttctgccattggcccg

SEQ ID NO: 420405 - DNA, 25 bp, Homo sapien
gagttgaccgctagatcctggctgg

SEQ ID NO: 420406 - DNA, 25 bp, Homo sapien
tatgtacatcatccaacgcctgagg

SEQ ID NO: 420407 - DNA, 25 bp, Homo sapien
tttgagaccctaactgaatgactgg

SEQ ID NO: 420408 - DNA, 25 bp, Homo sapien
tccaagagagcctaagagagaagcc

SEQ ID NO: 420409 - DNA, 25 bp, Homo sapien
aatatcccaaagacactggcttaaa

SEQ ID NO: 420410 - DNA, 25 bp, Homo sapien
ctttgtaagcagtttctaaatatcc

SEQ ID NO: 420411 - DNA, 25 bp, Homo sapien
gtttctaaatatcccaaagacactg

SEQ ID NO: 420412 - DNA, 25 bp, Homo sapien
taagcagtttctaaatatcccaaag

SEQ ID NO: 420413 - DNA, 25 bp, Homo sapien
tgtcaaggctcttcgttcagttgtg

SEQ ID NO: 420414 - DNA, 25 bp, Homo sapien
cgtggccaacgtgttgtcaaggctc

SEQ ID NO: 420415 - DNA, 25 bp, Homo sapien
ggtgcacgtggccaacgtgttgtca

SEQ ID NO: 420416 - DNA, 25 bp, Homo sapien
agacacagaactgacaggtgcacgt

SEQ ID NO: 420417 - DNA, 25 bp, Homo sapien
tcttccaaccagacacgggggtgtg

SEQ ID NO: 420418 - DNA, 25 bp, Homo sapien
acacgggggtgtgcgctgtccttta

SEQ ID NO: 420419 - DNA, 25 bp, Homo sapien
cagacacgggggtgtgcgctgtcct

SEQ ID NO: 420420 - DNA, 25 bp, Homo sapien
tccaaccagacacgggggtgtgcgc

SEQ ID NO: 420421 - DNA, 25 bp, Homo sapien
ccagatagagtcaaagtgagaggtc

SEQ ID NO: 420422 - DNA, 25 bp, Homo sapien
tgaatttcacggctttagacccaaa

SEQ ID NO: 420423 - DNA, 25 bp, Homo sapien
catacctttggtgacaggctagaga

SEQ ID NO: 420424 - DNA, 25 bp, Homo sapien
tactacaaagggcaagagctcatgt

SEQ ID NO: 420425 - DNA, 25 bp, Homo sapien
tgccagtctgagacacaaacaaagg

SEQ ID NO: 420426 - DNA, 25 bp, Homo sapien
gcactgaagggccagccgtcaactg

SEQ ID NO: 420427 - DNA, 25 bp, Homo sapien
aacaaaggccatgcactgaagggcc

SEQ ID NO: 420428 - DNA, 25 bp, Homo sapien
cagccgtcaactggatcaaaataac

SEQ ID NO: 420429 - DNA, 25 bp, Homo sapien
tatggtacttttgtacatgctgggt

SEQ ID NO: 420430 - DNA, 25 bp, Homo sapien
tacatctatgtacagtatttagcag

SEQ ID NO: 420431 - DNA, 25 bp, Homo sapien
tgtacagtggtttgtcttcagctca

SEQ ID NO: 420432 - DNA, 25 bp, Homo sapien
aaatgcctactgcatgttaggaatc

SEQ ID NO: 420433 - DNA, 25 bp, Homo sapien
aatgaattgggatccataaaactga

SEQ ID NO: 420434 - DNA, 25 bp, Homo sapien
tagtagatgaaatgaattgggatcc

SEQ ID NO: 420435 - DNA, 25 bp, Homo sapien
cctcaccctgtagtagatgaaatga

SEQ ID NO: 420436 - DNA, 25 bp, Homo sapien
caccctgtagtagatgaaatgaatt

SEQ ID NO: 420437 - DNA, 25 bp, Homo sapien
cttgcttgtcatatcccaggtaaaa

SEQ ID NO: 420438 - DNA, 25 bp, Homo sapien
tcatatcccaggtaaaatctttgac

SEQ ID NO: 420439 - DNA, 25 bp, Homo sapien
gaaaccttgcttgtcatatcccagg

SEQ ID NO: 420440 - DNA, 25 bp, Homo sapien
ggcaccagaaaccttgcttgtcata

SEQ ID NO: 420441 - DNA, 25 bp, Homo sapien
gagagggcaggtagatattttacac

SEQ ID NO: 420442 - DNA, 25 bp, Homo sapien
ggtattgtacaacacatgcaggtaa

SEQ ID NO: 420443 - DNA, 25 bp, Homo sapien
caaatgagggcactttgcactttca

SEQ ID NO: 420444 - DNA, 25 bp, Homo sapien
atgtgtagtattttgggaggagacc

SEQ ID NO: 420445 - DNA, 25 bp, Homo sapien
caaggaaagattgtgttggggggag

SEQ ID NO: 420446 - DNA, 25 bp, Homo sapien
agagacaaggaaagattgtgttggg

SEQ ID NO: 420447 - DNA, 25 bp, Homo sapien
tgagagacaaggaaagattgtgttg

SEQ ID NO: 420448 - DNA, 25 bp, Homo sapien
aatgagagacaaggaaagattgtgt

SEQ ID NO: 420449 - DNA, 25 bp, Homo sapien
ctggatacagaccaactcaggggca

SEQ ID NO: 420450 - DNA, 25 bp, Homo sapien
tggttgagtttgctggatacagacc

SEQ ID NO: 420451 - DNA, 25 bp, Homo sapien
catgttggttgagtttgctggatac

SEQ ID NO: 420452 - DNA, 25 bp, Homo sapien
tgcatgttggttgagtttgctggat

SEQ ID NO: 420453 - DNA, 25 bp, Homo sapien
tctcatggaagctgttgtagtcaac

SEQ ID NO: 420454 - DNA, 25 bp, Homo sapien
tcaggacaggtgtgaaccggtaacc

SEQ ID NO: 420455 - DNA, 25 bp, Homo sapien
cactggtgatgtaggagcttcgagc

SEQ ID NO: 420456 - DNA, 25 bp, Homo sapien
tgtagtcaacttcgtagaacccgtc

SEQ ID NO: 420457 - DNA, 25 bp, Homo sapien
gagcctgtctttttggaccgagtat

SEQ ID NO: 420458 - DNA, 25 bp, Homo sapien
gcctgtctttttggaccgagtattg

SEQ ID NO: 420459 - DNA, 25 bp, Homo sapien
agagcctgtctttttggaccgagta

SEQ ID NO: 420460 - DNA, 25 bp, Homo sapien
tgtctttttggaccgagtattggga

SEQ ID NO: 420461 - DNA, 25 bp, Homo sapien
catccaatcattgggggttcttcct

SEQ ID NO: 420462 - DNA, 25 bp, Homo sapien
tgctgtgccctctccaaatgataca

SEQ ID NO: 420463 - DNA, 25 bp, Homo sapien
ctggcatcagctggccacacccctt

SEQ ID NO: 420464 - DNA, 25 bp, Homo sapien
aagacacaggcctggtctgtgcatg

SEQ ID NO: 420465 - DNA, 25 bp, Homo sapien
taatagtggcatcatgtgccccagg

SEQ ID NO: 420466 - DNA, 25 bp, Homo sapien
cgtttggccttaattgacaccgcta

SEQ ID NO: 420467 - DNA, 25 bp, Homo sapien
gaaatatcagtgctgttggacaccc

SEQ ID NO: 420468 - DNA, 25 bp, Homo sapien
gacttgccttgacccaatgcctgga

SEQ ID NO: 420469 - DNA, 25 bp, Homo sapien
tttttgtagccgagcgttgctgctg

SEQ ID NO: 420470 - DNA, 25 bp, Homo sapien
tgtctgctcgctgacatcattcatc

SEQ ID NO: 420471 - DNA, 25 bp, Homo sapien
tccctcaagtatcacagacaatttt

SEQ ID NO: 420472 - DNA, 25 bp, Homo sapien
aatacagttttaggtcgaccaagtg

SEQ ID NO: 420473 - DNA, 25 bp, Homo sapien
cagaggtttgcttgtttagttactc

SEQ ID NO: 420474 - DNA, 25 bp, Homo sapien
gttactccaagcagggagttgtcat

SEQ ID NO: 420475 - DNA, 25 bp, Homo sapien
agcagctgagggtgatgtgtgagct

SEQ ID NO: 420476 - DNA, 25 bp, Homo sapien
gcttgtttagttactccaagcaggg

SEQ ID NO: 420477 - DNA, 25 bp, Homo sapien
cgggcgccggggtagcaggctccag

SEQ ID NO: 420478 - DNA, 25 bp, Homo sapien
agctggggtagaggacgctggggta

SEQ ID NO: 420479 - DNA, 25 bp, Homo sapien
gtaggcgccggggtagcgggagctg

SEQ ID NO: 420480 - DNA, 25 bp, Homo sapien
gaggacgctggggtagtgggcgccg

SEQ ID NO: 420481 - DNA, 25 bp, Homo sapien
tctccaaaacccatagaggccttca

SEQ ID NO: 420482 - DNA, 25 bp, Homo sapien
agagccctctccaaaacccatagag

SEQ ID NO: 420483 - DNA, 25 bp, Homo sapien
cccctccagtgcttgatgggggctt

SEQ ID NO: 420484 - DNA, 25 bp, Homo sapien
ccaaaacccatagaggccttcagac

SEQ ID NO: 420485 - DNA, 25 bp, Homo sapien
ccgcgagtggctgcattggctttaa

SEQ ID NO: 420486 - DNA, 25 bp, Homo sapien
gctttaagaaactgcgccgggctgg

SEQ ID NO: 420487 - DNA, 25 bp, Homo sapien
tcagagaggaaggaatcaagttggc

SEQ ID NO: 420488 - DNA, 25 bp, Homo sapien
taatatgatggctgcgtctcagaga

SEQ ID NO: 420489 - DNA, 25 bp, Homo sapien
tgtggccataaaagggctgacctcc

SEQ ID NO: 420490 - DNA, 25 bp, Homo sapien
tcggactccgcaggtagtcactagg

SEQ ID NO: 420491 - DNA, 25 bp, Homo sapien
cgctcgctgcgtctttcagggctgc

SEQ ID NO: 420492 - DNA, 25 bp, Homo sapien
aggagctgctgcgatgacacccagt

SEQ ID NO: 420493 - DNA, 25 bp, Homo sapien
agcggtggagaggaagggtacaggg

SEQ ID NO: 420494 - DNA, 25 bp, Homo sapien
acaggggtcctttctccaggaggtg

SEQ ID NO: 420495 - DNA, 25 bp, Homo sapien
tttgggtcagcggtggagaggaagg

SEQ ID NO: 420496 - DNA, 25 bp, Homo sapien
ggtcagcggtggagaggaagggtac

SEQ ID NO: 420497 - DNA, 25 bp, Homo sapien
taagctccatctattagtgcaggag

SEQ ID NO: 420498 - DNA, 25 bp, Homo sapien
caggtaggccctaagctccatctat

SEQ ID NO: 420499 - DNA, 25 bp, Homo sapien
caggccaggtaggccctaagctcca

SEQ ID NO: 420500 - DNA, 25 bp, Homo sapien
ccatctattagtgcaggagggaggc

SEQ ID NO: 420501 - DNA, 25 bp, Homo sapien
gatggatctatgttgggtgaagcaa

SEQ ID NO: 420502 - DNA, 25 bp, Homo sapien
gccaacaccaggcacctgatggatc

SEQ ID NO: 420503 - DNA, 25 bp, Homo sapien
gcaatgaagtggacagcccagtgcc

SEQ ID NO: 420504 - DNA, 25 bp, Homo sapien
caggcacctgatggatctatgttgg

SEQ ID NO: 420505 - DNA, 25 bp, Homo sapien
ggcagaaatcgataattggttccag

SEQ ID NO: 420506 - DNA, 25 bp, Homo sapien
gcagaaatcgataattggttccagt

SEQ ID NO: 420507 - DNA, 25 bp, Homo sapien
ggactggtccctcctgtggcttgag

SEQ ID NO: 420508 - DNA, 25 bp, Homo sapien
gagacaagctccagctagtctgctg

SEQ ID NO: 420509 - DNA, 25 bp, Homo sapien
ccttggactgcaggactggtccctc

SEQ ID NO: 420510 - DNA, 25 bp, Homo sapien
tggcttgagacaagctccagctagt

SEQ ID NO: 420511 - DNA, 25 bp, Homo sapien
gagaggactccggtacacagcctgg

SEQ ID NO: 420512 - DNA, 25 bp, Homo sapien
agggagaggactccggtacacagcc

SEQ ID NO: 420513 - DNA, 25 bp, Homo sapien
agaggactccggtacacagcctggg

SEQ ID NO: 420514 - DNA, 25 bp, Homo sapien
gggagggagaggactccggtacaca

SEQ ID NO: 420515 - DNA, 25 bp, Homo sapien
cagaggttcccatcaaggacactgg

SEQ ID NO: 420516 - DNA, 25 bp, Homo sapien
cagtatctagctgctcgccaggaca

SEQ ID NO: 420517 - DNA, 25 bp, Homo sapien
caggacagtccattctcccaaggga

SEQ ID NO: 420518 - DNA, 25 bp, Homo sapien
tttaacccatgaacccagtatctag

SEQ ID NO: 420519 - DNA, 25 bp, Homo sapien
ctgaagaggcatagaacgtttccag

SEQ ID NO: 420520 - DNA, 25 bp, Homo sapien
agaggcatagaacgtttccagaaag

SEQ ID NO: 420521 - DNA, 25 bp, Homo sapien
gtgagcacggcttctatccaagcag

SEQ ID NO: 420522 - DNA, 25 bp, Homo sapien
agtgacagtgagcacggcttctatc

SEQ ID NO: 420523 - DNA, 25 bp, Homo sapien
gctgtggaggtgacgattggaccca

SEQ ID NO: 420524 - DNA, 25 bp, Homo sapien
tgctgtggaggtgacgattggaccc

SEQ ID NO: 420525 - DNA, 25 bp, Homo sapien
ctgtggaggtgacgattggacccat

SEQ ID NO: 420526 - DNA, 25 bp, Homo sapien
gctgctgtggaggtgacgattggac

SEQ ID NO: 420527 - DNA, 25 bp, Homo sapien
tgtggtagtggaggacaccttgcct

SEQ ID NO: 420528 - DNA, 25 bp, Homo sapien
aatgtcggggatgagaaatccagcc

SEQ ID NO: 420529 - DNA, 25 bp, Homo sapien
gaggcttttgctaattcatccacca

SEQ ID NO: 420530 - DNA, 25 bp, Homo sapien
aatccagccacaggtgaggcttttg

SEQ ID NO: 420531 - DNA, 25 bp, Homo sapien
gacaatgaagatgctcgctgggact

SEQ ID NO: 420532 - DNA, 25 bp, Homo sapien
ggtgctcacaggttaacactcgctg

SEQ ID NO: 420533 - DNA, 25 bp, Homo sapien
gacagacagaggttacgtaaggcag

SEQ ID NO: 420534 - DNA, 25 bp, Homo sapien
cagaagacctgggagtaatctacat

SEQ ID NO: 420535 - DNA, 25 bp, Homo sapien
catttgccgaggagtgggcaagtgc

SEQ ID NO: 420536 - DNA, 25 bp, Homo sapien
gctgcctgtcgcagttgtataatcg

SEQ ID NO: 420537 - DNA, 25 bp, Homo sapien
ccttgccagcacatttgccgaggag

SEQ ID NO: 420538 - DNA, 25 bp, Homo sapien
aggcttaacggggactcatccttgc

SEQ ID NO: 420539 - DNA, 25 bp, Homo sapien
gcgtggctgtcatcttgcctcgagg

SEQ ID NO: 420540 - DNA, 25 bp, Homo sapien
ctgcgtggctgtcatcttgcctcga

SEQ ID NO: 420541 - DNA, 25 bp, Homo sapien
ggctgtcatcttgcctcgaggccca

SEQ ID NO: 420542 - DNA, 25 bp, Homo sapien
cagcaaggccgtagtgggggctgac

SEQ ID NO: 420543 - DNA, 25 bp, Homo sapien
tcaaggagcccactttcgttttcta

SEQ ID NO: 420544 - DNA, 25 bp, Homo sapien
tgtgggacaactccggtctccggaa

SEQ ID NO: 420545 - DNA, 25 bp, Homo sapien
cattggaaggcagtgcatccacaga

SEQ ID NO: 420546 - DNA, 25 bp, Homo sapien
cacgctgggatcatcctgtgcccag

SEQ ID NO: 420547 - DNA, 25 bp, Homo sapien
cagacggaaggacccaggtggcctc

SEQ ID NO: 420548 - DNA, 25 bp, Homo sapien
actgagcacagcaggttaaggtcaa

SEQ ID NO: 420549 - DNA, 25 bp, Homo sapien
gaggcctgctcgtggagaccactga

SEQ ID NO: 420550 - DNA, 25 bp, Homo sapien
aaggtggccatgtgggccttccctc

SEQ ID NO: 420551 - DNA, 25 bp, Homo sapien
cgcgtgaaggtggccatgtgggcct

SEQ ID NO: 420552 - DNA, 25 bp, Homo sapien
cagtatcctgctgaagcgtaagaga

SEQ ID NO: 420553 - DNA, 25 bp, Homo sapien
agaaacagtatcctgctgaagcgta

SEQ ID NO: 420554 - DNA, 25 bp, Homo sapien
cctgctgaagcgtaagagagcagct

SEQ ID NO: 420555 - DNA, 25 bp, Homo sapien
tgggggtactgagttgtatgattcc

SEQ ID NO: 420556 - DNA, 25 bp, Homo sapien
ctcattaccagctgtcatcagaaag

SEQ ID NO: 420557 - DNA, 25 bp, Homo sapien
tcactcattaccagctgtcatcaga

SEQ ID NO: 420558 - DNA, 25 bp, Homo sapien
actcattaccagctgtcatcagaaa

SEQ ID NO: 420559 - DNA, 25 bp, Homo sapien
cactcattaccagctgtcatcagaa

SEQ ID NO: 420560 - DNA, 25 bp, Homo sapien
gctactttccgattaggttcctgtg

SEQ ID NO: 420561 - DNA, 25 bp, Homo sapien
tttactcacgttttcactgtttgct

SEQ ID NO: 420562 - DNA, 25 bp, Homo sapien
ggttcctgtgccttttgttctatgg

SEQ ID NO: 420563 - DNA, 25 bp, Homo sapien
tgttctatggaaaggagaccgctcc

SEQ ID NO: 420564 - DNA, 25 bp, Homo sapien
gcaaaagtttcacaccaccaccgta

SEQ ID NO: 420565 - DNA, 25 bp, Homo sapien
aggttgtgaccttgcctgttgggta

SEQ ID NO: 420566 - DNA, 25 bp, Homo sapien
atagcaaaagtttcacaccaccacc

SEQ ID NO: 420567 - DNA, 25 bp, Homo sapien
tgtgaccttgcctgttgggtacagg

SEQ ID NO: 420568 - DNA, 25 bp, Homo sapien
catggctaatgatcagcggtgacac

SEQ ID NO: 420569 - DNA, 25 bp, Homo sapien
gataggtctccctcacgttgccgtg

SEQ ID NO: 420570 - DNA, 25 bp, Homo sapien
gccactgggctttcgacgtcctgat

SEQ ID NO: 420571 - DNA, 25 bp, Homo sapien
cgtatgtatgcgatcaaccaccaga

SEQ ID NO: 420572 - DNA, 25 bp, Homo sapien
agaaacactgaatgaaaggctggct

SEQ ID NO: 420573 - DNA, 25 bp, Homo sapien
aaagaaacactgaatgaaaggctgg

SEQ ID NO: 420574 - DNA, 25 bp, Homo sapien
agaaaagaaacactgaatgaaaggc

SEQ ID NO: 420575 - DNA, 25 bp, Homo sapien
gaaaagaaacactgaatgaaaggct

SEQ ID NO: 420576 - DNA, 25 bp, Homo sapien
ctttgaggacaatggaacggcacac

SEQ ID NO: 420577 - DNA, 25 bp, Homo sapien
tatgggctggtgaaaccaaatacca

SEQ ID NO: 420578 - DNA, 25 bp, Homo sapien
cacactttgtatgggctggtgaaac

SEQ ID NO: 420579 - DNA, 25 bp, Homo sapien
tataaacaaagtagacaaagccatt

SEQ ID NO: 420580 - DNA, 25 bp, Homo sapien
tgtgctcttcgatctagtttgtgta

SEQ ID NO: 420581 - DNA, 25 bp, Homo sapien
ggcctctagttgacttggacttctg

SEQ ID NO: 420582 - DNA, 25 bp, Homo sapien
gctcttcgatctagtttgtgtaagt

SEQ ID NO: 420583 - DNA, 25 bp, Homo sapien
ctggataggcctctagttgacttgg

SEQ ID NO: 420584 - DNA, 25 bp, Homo sapien
gagctgctccgtagggcaagttgca

SEQ ID NO: 420585 - DNA, 25 bp, Homo sapien
gcagatgttgcagggtaaatataga

SEQ ID NO: 420586 - DNA, 25 bp, Homo sapien
tcggaatcccaggtgtgaatttgag

SEQ ID NO: 420587 - DNA, 25 bp, Homo sapien
gatctgaatcgcatctccaggagca

SEQ ID NO: 420588 - DNA, 25 bp, Homo sapien
tattactaggttttagctcatgggt

SEQ ID NO: 420589 - DNA, 25 bp, Homo sapien
agtcactgggcagtcggttgttgaa

SEQ ID NO: 420590 - DNA, 25 bp, Homo sapien
ctgcagtctggctttgagtcactgg

SEQ ID NO: 420591 - DNA, 25 bp, Homo sapien
gggtaacacaggaagcgtctgcagt

SEQ ID NO: 420592 - DNA, 25 bp, Homo sapien
tcttctcaaaatgacttcactagcg

SEQ ID NO: 420593 - DNA, 25 bp, Homo sapien
ttgtgtcaggttctaggaatatcat

SEQ ID NO: 420594 - DNA, 25 bp, Homo sapien
aagatgctcccacgggggaggaatt

SEQ ID NO: 420595 - DNA, 25 bp, Homo sapien
ttcactagcggggagaaaccagctg

SEQ ID NO: 420596 - DNA, 25 bp, Homo sapien
actctggtttgggacagttgctgca

SEQ ID NO: 420597 - DNA, 25 bp, Homo sapien
ggtagacagcatgaaaactctgggc

SEQ ID NO: 420598 - DNA, 25 bp, Homo sapien
tagctcatagattacaaacggcctg

SEQ ID NO: 420599 - DNA, 25 bp, Homo sapien
tttgagtctcggctcacacagacag

SEQ ID NO: 420600 - DNA, 25 bp, Homo sapien
tcagtaatttgttacggcagcaaag

SEQ ID NO: 420601 - DNA, 25 bp, Homo sapien
agtaggcagattcccgttcaattca

SEQ ID NO: 420602 - DNA, 25 bp, Homo sapien
gacctctaggatcttaagtcaatgc

SEQ ID NO: 420603 - DNA, 25 bp, Homo sapien
ggtaaacaaaacaggagtaggcaga

SEQ ID NO: 420604 - DNA, 25 bp, Homo sapien
gagaaatgcagtagcctttgcccct

SEQ ID NO: 420605 - DNA, 25 bp, Homo sapien
gcccctaatctcatgagaatctgct

SEQ ID NO: 420606 - DNA, 25 bp, Homo sapien
tcacgatgtggctgtagcatgcact

SEQ ID NO: 420607 - DNA, 25 bp, Homo sapien
catggagagtgttacctgctgacct

SEQ ID NO: 420608 - DNA, 25 bp, Homo sapien
tcttcctgggaaacacagatctctg

SEQ ID NO: 420609 - DNA, 25 bp, Homo sapien
tgtgagaaacttcaaccaggcgtaa

SEQ ID NO: 420610 - DNA, 25 bp, Homo sapien
acaacccgagtgagtggacagggcc

SEQ ID NO: 420611 - DNA, 25 bp, Homo sapien
cctgggatcagcacatttgaaggca

SEQ ID NO: 420612 - DNA, 25 bp, Homo sapien
ctgtggctctagctgatccgggaca

SEQ ID NO: 420613 - DNA, 25 bp, Homo sapien
tggctctagctgatccgggacaatg

SEQ ID NO: 420614 - DNA, 25 bp, Homo sapien
gatccgggacaatggactgaatgcc

SEQ ID NO: 420615 - DNA, 25 bp, Homo sapien
ggactgaatgccatcatgagcctca

SEQ ID NO: 420616 - DNA, 25 bp, Homo sapien
cgtgagattccaacgctaatgagcg

SEQ ID NO: 420617 - DNA, 25 bp, Homo sapien
gaagggtcacgtgagattccaacgc

SEQ ID NO: 420618 - DNA, 25 bp, Homo sapien
ctgtaagaagggtcacgtgagattc

SEQ ID NO: 420619 - DNA, 25 bp, Homo sapien
gctaatgagcgtgaaaggtttttgc

SEQ ID NO: 420620 - DNA, 25 bp, Homo sapien
tgagtgctaaatgcggaatgcaggc

SEQ ID NO: 420621 - DNA, 25 bp, Homo sapien
tcaacaccaaatgggttagcttcct

SEQ ID NO: 420622 - DNA, 25 bp, Homo sapien
ctttgtgaagtctttattcggtggc

SEQ ID NO: 420623 - DNA, 25 bp, Homo sapien
gaaatgctcagagcttgagaagaaa

SEQ ID NO: 420624 - DNA, 25 bp, Homo sapien
acacagcaccctcgtttgtaaagca

SEQ ID NO: 420625 - DNA, 25 bp, Homo sapien
acagcaccctcgtttgtaaagcagg

SEQ ID NO: 420626 - DNA, 25 bp, Homo sapien
ctgtggatggatggacgctgacaca

SEQ ID NO: 420627 - DNA, 25 bp, Homo sapien
gatggatggacgctgacacagcacc

SEQ ID NO: 420628 - DNA, 25 bp, Homo sapien
aatggcgggactgcactgaacggca

SEQ ID NO: 420629 - DNA, 25 bp, Homo sapien
acacaccactgtgaaatgaatggcg

SEQ ID NO: 420630 - DNA, 25 bp, Homo sapien
cagaatgtttgagggcttggtcata

SEQ ID NO: 420631 - DNA, 25 bp, Homo sapien
aatgtttgagggcttggtcatacag

SEQ ID NO: 420632 - DNA, 25 bp, Homo sapien
gttctcccttctcttcaacatacat

SEQ ID NO: 420633 - DNA, 25 bp, Homo sapien
ctgggctgggaatgaaggactgttc

SEQ ID NO: 420634 - DNA, 25 bp, Homo sapien
ggctgggaatgaaggactgttctcc

SEQ ID NO: 420635 - DNA, 25 bp, Homo sapien
actgttctcccttctcttcaacata

SEQ ID NO: 420636 - DNA, 25 bp, Homo sapien
ctcgtggtaaggaggtgattccctg

SEQ ID NO: 420637 - DNA, 25 bp, Homo sapien
agctgggacaacaccatcacctcgt

SEQ ID NO: 420638 - DNA, 25 bp, Homo sapien
ttgtcccacgctggatggcagcctg

SEQ ID NO: 420639 - DNA, 25 bp, Homo sapien
gatgcgatgatctgtcttctcgtgg

SEQ ID NO: 420640 - DNA, 25 bp, Homo sapien
tgttgggcacactgtacatgggatt

SEQ ID NO: 420641 - DNA, 25 bp, Homo sapien
gtcccattatctgacagcttcaagg

SEQ ID NO: 420642 - DNA, 25 bp, Homo sapien
cacactgtacatgggattggaattg

SEQ ID NO: 420643 - DNA, 25 bp, Homo sapien
gcttcaaggattggcgagcacacat

SEQ ID NO: 420644 - DNA, 25 bp, Homo sapien
tgatatggtggtcagagacctctgg

SEQ ID NO: 420645 - DNA, 25 bp, Homo sapien
tgataacataagagaatgacatcca

SEQ ID NO: 420646 - DNA, 25 bp, Homo sapien
ccaagctgccgggttaacagagttg

SEQ ID NO: 420647 - DNA, 25 bp, Homo sapien
ttccctgaggccactccatacgggt

SEQ ID NO: 420648 - DNA, 25 bp, Homo sapien
gctcggaatgcacgtgaacgggcat

SEQ ID NO: 420649 - DNA, 25 bp, Homo sapien
gatctgccataatcacatgctcgga

SEQ ID NO: 420650 - DNA, 25 bp, Homo sapien
tactgcccttatgatctgccataat

SEQ ID NO: 420651 - DNA, 25 bp, Homo sapien
gaattgttactgcccttatgatctg

SEQ ID NO: 420652 - DNA, 25 bp, Homo sapien
tgagctgcctcgattgtgtgacaaa

SEQ ID NO: 420653 - DNA, 25 bp, Homo sapien
gacggaagcttcttgacatggtgaa

SEQ ID NO: 420654 - DNA, 25 bp, Homo sapien
tgtgccagcataatccgaactttgg

SEQ ID NO: 420655 - DNA, 25 bp, Homo sapien
tcctttgcagagcatatgagctgcc

SEQ ID NO: 420656 - DNA, 25 bp, Homo sapien
ttgctcccttagggccacgcttgct

SEQ ID NO: 420657 - DNA, 25 bp, Homo sapien
gggccacgcttgctgactgcaacct

SEQ ID NO: 420658 - DNA, 25 bp, Homo sapien
gttcttgtggtccatgcaggggtga

SEQ ID NO: 420659 - DNA, 25 bp, Homo sapien
actttcatcatctgactatcccccg

SEQ ID NO: 420660 - DNA, 25 bp, Homo sapien
tgcacattgagctggggccaggttt

SEQ ID NO: 420661 - DNA, 25 bp, Homo sapien
caggggtgacctgcacattgagctg

SEQ ID NO: 420662 - DNA, 25 bp, Homo sapien
cagtgacgcgactgcaacaagcgct

SEQ ID NO: 420663 - DNA, 25 bp, Homo sapien
gaagggaaccaagctctgatgcagg

SEQ ID NO: 420664 - DNA, 25 bp, Homo sapien
gagaccagagcagtgtcagcggcat

SEQ ID NO: 420665 - DNA, 25 bp, Homo sapien
gttcaccgaggccagatgtacgtcc

SEQ ID NO: 420666 - DNA, 25 bp, Homo sapien
cactttattgacctttggctgtgtg

SEQ ID NO: 420667 - DNA, 25 bp, Homo sapien
tggagcactttattgacctttggct

SEQ ID NO: 420668 - DNA, 25 bp, Homo sapien
cccaggactggggagtccaatgcct

SEQ ID NO: 420669 - DNA, 25 bp, Homo sapien
gggagtccaatgcctgccgcctttt

SEQ ID NO: 420670 - DNA, 25 bp, Homo sapien
cctacaagctgtcccctttctggga

SEQ ID NO: 420671 - DNA, 25 bp, Homo sapien
cacatttgctcctacaagctgtccc

SEQ ID NO: 420672 - DNA, 25 bp, Homo sapien
tcctacaagctgtcccctttctggg

SEQ ID NO: 420673 - DNA, 25 bp, Homo sapien
tttgctcctacaagctgtccccttt

SEQ ID NO: 420674 - DNA, 25 bp, Homo sapien
tggagtctcttttccggatggctac

SEQ ID NO: 420675 - DNA, 25 bp, Homo sapien
tacacggttgtaactcacagaaaat

SEQ ID NO: 420676 - DNA, 25 bp, Homo sapien
ttgaagcgctgacccatttatgtgg

SEQ ID NO: 420677 - DNA, 25 bp, Homo sapien
ggctactcccagctttttgcttgaa

SEQ ID NO: 420678 - DNA, 25 bp, Homo sapien
ccactgttgcatggttttgtgaagg

SEQ ID NO: 420679 - DNA, 25 bp, Homo sapien
gttctgaccccagtataatagcaca

SEQ ID NO: 420680 - DNA, 25 bp, Homo sapien
taaacgttacctacattgttgcaca

SEQ ID NO: 420681 - DNA, 25 bp, Homo sapien
ttctatcttaggagagtgtgacaga

SEQ ID NO: 420682 - DNA, 25 bp, Homo sapien
tcatggattctgtcagcttggccat

SEQ ID NO: 420683 - DNA, 25 bp, Homo sapien
ttgcagtttcttctttgtgcttttc

SEQ ID NO: 420684 - DNA, 25 bp, Homo sapien
gttgcagtttcttctttgtgctttt

SEQ ID NO: 420685 - DNA, 25 bp, Homo sapien
tgttgcagtttcttctttgtgcttt

SEQ ID NO: 420686 - DNA, 25 bp, Homo sapien
tgctgtgtcagtccgtctagctgta

SEQ ID NO: 420687 - DNA, 25 bp, Homo sapien
gctgtactagctctccttgtgtcct

SEQ ID NO: 420688 - DNA, 25 bp, Homo sapien
tgttctgtctctgcgtgtcctgtca

SEQ ID NO: 420689 - DNA, 25 bp, Homo sapien
gactcagtgaagttggtcccagagc

SEQ ID NO: 420690 - DNA, 25 bp, Homo sapien
aaagttgatgtttgcagttacacga

SEQ ID NO: 420691 - DNA, 25 bp, Homo sapien
taaactccttatgtccttccctcat

SEQ ID NO: 420692 - DNA, 25 bp, Homo sapien
gcagttacacgacatgtatatccaa

SEQ ID NO: 420693 - DNA, 25 bp, Homo sapien
ttccctcattatcagaaagttgatg

SEQ ID NO: 420694 - DNA, 25 bp, Homo sapien
taaggtgtcagaatcgccagtggtt

SEQ ID NO: 420695 - DNA, 25 bp, Homo sapien
tcagaatcgccagtggttggaattc

SEQ ID NO: 420696 - DNA, 25 bp, Homo sapien
gaagacagcccttcttggaaccagt

SEQ ID NO: 420697 - DNA, 25 bp, Homo sapien
agcccatgtctatctcgttccttgg

SEQ ID NO: 420698 - DNA, 25 bp, Homo sapien
gaggaaattggtccttgggtgggca

SEQ ID NO: 420699 - DNA, 25 bp, Homo sapien
gaaattggtccttgggtgggcacag

SEQ ID NO: 420700 - DNA, 25 bp, Homo sapien
aggagcccgacctttcacatacttt

SEQ ID NO: 420701 - DNA, 25 bp, Homo sapien
tgaaccaggagcccgacctttcaca

SEQ ID NO: 420702 - DNA, 25 bp, Homo sapien
tctagggtactacagggagcaacat

SEQ ID NO: 420703 - DNA, 25 bp, Homo sapien
catcagaggcagcatcgcactcaga

SEQ ID NO: 420704 - DNA, 25 bp, Homo sapien
ctgaggtgtctagggtactacaggg

SEQ ID NO: 420705 - DNA, 25 bp, Homo sapien
cagcatcgcactcagagtcagggac

SEQ ID NO: 420706 - DNA, 25 bp, Homo sapien
gatagttggattgggcacaccttgc

SEQ ID NO: 420707 - DNA, 25 bp, Homo sapien
tgttgtgtccactcctctgatcctg

SEQ ID NO: 420708 - DNA, 25 bp, Homo sapien
gatgttgagggctccactgactgcc

SEQ ID NO: 420709 - DNA, 25 bp, Homo sapien
actgactgccattgacacaagagct

SEQ ID NO: 420710 - DNA, 25 bp, Homo sapien
cagtgtgctcttgcagacagatgag

SEQ ID NO: 420711 - DNA, 25 bp, Homo sapien
ggtattcttcctacatgactcatgg

SEQ ID NO: 420712 - DNA, 25 bp, Homo sapien
ctgggctctgagactttttcctgaa

SEQ ID NO: 420713 - DNA, 25 bp, Homo sapien
tcttcaaatctggaagaagttgcct

SEQ ID NO: 420714 - DNA, 25 bp, Homo sapien
ggcaccttggccaccaacaggaagt

SEQ ID NO: 420715 - DNA, 25 bp, Homo sapien
ctgtgtcaccggcattagttaggga

SEQ ID NO: 420716 - DNA, 25 bp, Homo sapien
acaggaagttttcagtgcacccagg

SEQ ID NO: 420717 - DNA, 25 bp, Homo sapien
tcaccggcattagttagggaatggg

SEQ ID NO: 420718 - DNA, 25 bp, Homo sapien
cagcacaacatcaccatcccagcca

SEQ ID NO: 420719 - DNA, 25 bp, Homo sapien
agcacaacatcaccatcccagccat

SEQ ID NO: 420720 - DNA, 25 bp, Homo sapien
ccagcacaacatcaccatcccagcc

SEQ ID NO: 420721 - DNA, 25 bp, Homo sapien
gcgctgcagtcgtttcttattaata

SEQ ID NO: 420722 - DNA, 25 bp, Homo sapien
tgagactgccgacgatggctgtcat

SEQ ID NO: 420723 - DNA, 25 bp, Homo sapien
gcatgcgctgcagtcgtttcttatt

SEQ ID NO: 420724 - DNA, 25 bp, Homo sapien
taatatcataacactgagactgccg

SEQ ID NO: 420725 - DNA, 25 bp, Homo sapien
ggtctctcctgataactctgaaagt

SEQ ID NO: 420726 - DNA, 25 bp, Homo sapien
tgaaagtctaaaacagcagtaccat

SEQ ID NO: 420727 - DNA, 25 bp, Homo sapien
tctcctgataactctgaaagtctaa

SEQ ID NO: 420728 - DNA, 25 bp, Homo sapien
taactctgaaagtctaaaacagcag

SEQ ID NO: 420729 - DNA, 25 bp, Homo sapien
agaccaaggcttgttgctgccatag

SEQ ID NO: 420730 - DNA, 25 bp, Homo sapien
tgtgtgggcctgaggcagtcagcca

SEQ ID NO: 420731 - DNA, 25 bp, Homo sapien
tggccagaccaaggcttgttgctgc

SEQ ID NO: 420732 - DNA, 25 bp, Homo sapien
gcttgttgggcaggtggcctctgaa

SEQ ID NO: 420733 - DNA, 25 bp, Homo sapien
gatactttcacaggtgggcctctca

SEQ ID NO: 420734 - DNA, 25 bp, Homo sapien
cataggggacgggctttcctccttg

SEQ ID NO: 420735 - DNA, 25 bp, Homo sapien
cagggaaggcataggggacgggctt

SEQ ID NO: 420736 - DNA, 25 bp, Homo sapien
tgaccaggctgatgtggggctgact

SEQ ID NO: 420737 - DNA, 25 bp, Homo sapien
ttacgggcacggaacatgcattttc

SEQ ID NO: 420738 - DNA, 25 bp, Homo sapien
cagaggccacttttcttgggtctcc

SEQ ID NO: 420739 - DNA, 25 bp, Homo sapien
tggtgcctggaacattacgggcacg

SEQ ID NO: 420740 - DNA, 25 bp, Homo sapien
gactgtgttaccactaggagggcag

SEQ ID NO: 420741 - DNA, 25 bp, Homo sapien
gagctcacggtttgcttcagaaaag

SEQ ID NO: 420742 - DNA, 25 bp, Homo sapien
tggagctcacggtttgcttcagaaa

SEQ ID NO: 420743 - DNA, 25 bp, Homo sapien
cctggagctcacggtttgcttcaga

SEQ ID NO: 420744 - DNA, 25 bp, Homo sapien
agctcacggtttgcttcagaaaagg

SEQ ID NO: 420745 - DNA, 25 bp, Homo sapien
gaaaagaagaaatgagtgcccacag

SEQ ID NO: 420746 - DNA, 25 bp, Homo sapien
gctgctgggaattcatccaggagct

SEQ ID NO: 420747 - DNA, 25 bp, Homo sapien
agaagaaatgagtgcccacagccag

SEQ ID NO: 420748 - DNA, 25 bp, Homo sapien
agaaatgagtgcccacagccaggct

SEQ ID NO: 420749 - DNA, 25 bp, Homo sapien
gctcaaccaggggtccgtgcagact

SEQ ID NO: 420750 - DNA, 25 bp, Homo sapien
ctcggatttcctgcatccatcaggg

SEQ ID NO: 420751 - DNA, 25 bp, Homo sapien
tgcagactggacaatcgcatgtgtc

SEQ ID NO: 420752 - DNA, 25 bp, Homo sapien
tctgcctttgaagtcctggctcaac

SEQ ID NO: 420753 - DNA, 25 bp, Homo sapien
ctcagggacaggcttatcatcacag

SEQ ID NO: 420754 - DNA, 25 bp, Homo sapien
catcacagccattgtattctgtacc

SEQ ID NO: 420755 - DNA, 25 bp, Homo sapien
agggacaggcttatcatcacagcca

SEQ ID NO: 420756 - DNA, 25 bp, Homo sapien
tcacagccattgtattctgtaccac

SEQ ID NO: 420757 - DNA, 25 bp, Homo sapien
gggacacactatgggaaccactgac

SEQ ID NO: 420758 - DNA, 25 bp, Homo sapien
aaaagagggccacctaatgcggcct

SEQ ID NO: 420759 - DNA, 25 bp, Homo sapien
gcttgggcccaacactccttgagtg

SEQ ID NO: 420760 - DNA, 25 bp, Homo sapien
tatatgctttactactgtgggccca

SEQ ID NO: 420761 - DNA, 25 bp, Homo sapien
tattaagagaagtgactcctctcgg

SEQ ID NO: 420762 - DNA, 25 bp, Homo sapien
cctgtatgaatgttgaaatggaact

SEQ ID NO: 420763 - DNA, 25 bp, Homo sapien
tcctctcggtttcctacgactgcaa

SEQ ID NO: 420764 - DNA, 25 bp, Homo sapien
gaacttgaatggtaataaatcctcc

SEQ ID NO: 420765 - DNA, 25 bp, Homo sapien
tttccctgtcccagtgttcttgatt

SEQ ID NO: 420766 - DNA, 25 bp, Homo sapien
tggatgatttgcaagcttctttgcc

SEQ ID NO: 420767 - DNA, 25 bp, Homo sapien
aattccgtgggtaatttgatatcca

SEQ ID NO: 420768 - DNA, 25 bp, Homo sapien
tgaataggtcctctgatgcaccgcc

SEQ ID NO: 420769 - DNA, 25 bp, Homo sapien
tataactggagctgcggtctcccct

SEQ ID NO: 420770 - DNA, 25 bp, Homo sapien
gccttggtgctgaatccggaacccg

SEQ ID NO: 420771 - DNA, 25 bp, Homo sapien
ccaggcaactttcgggaggtttcag

SEQ ID NO: 420772 - DNA, 25 bp, Homo sapien
tattcctttgcctggagccgggaaa

SEQ ID NO: 420773 - DNA, 25 bp, Homo sapien
ttaatcagtgcatttaagtctttgc

SEQ ID NO: 420774 - DNA, 25 bp, Homo sapien
ctttgccagcggatgttgaaatgat

SEQ ID NO: 420775 - DNA, 25 bp, Homo sapien
taatcagtgcatttaagtctttgcc

SEQ ID NO: 420776 - DNA, 25 bp, Homo sapien
ttaagtctttgccagcggatgttga

SEQ ID NO: 420777 - DNA, 25 bp, Homo sapien
tgggtttctgcgagcccagggatgc

SEQ ID NO: 420778 - DNA, 25 bp, Homo sapien
gtttctgcgagcccagggatgcaga

SEQ ID NO: 420779 - DNA, 25 bp, Homo sapien
tttctgcgagcccagggatgcagac

SEQ ID NO: 420780 - DNA, 25 bp, Homo sapien
gggtttctgcgagcccagggatgca

SEQ ID NO: 420781 - DNA, 25 bp, Homo sapien
cagtcgctaatgaaaaccgtatgaa

SEQ ID NO: 420782 - DNA, 25 bp, Homo sapien
tctgttatgtaaccggcttctccct

SEQ ID NO: 420783 - DNA, 25 bp, Homo sapien
tccctcgcctttcggctgacttggg

SEQ ID NO: 420784 - DNA, 25 bp, Homo sapien
ttctcatgagagtggagatgcctgc

SEQ ID NO: 420785 - DNA, 25 bp, Homo sapien
tgaaacggagcaagactgaacaatt

SEQ ID NO: 420786 - DNA, 25 bp, Homo sapien
taggagactccattctgctcgcggc

SEQ ID NO: 420787 - DNA, 25 bp, Homo sapien
caattcactacacgacggatggcga

SEQ ID NO: 420788 - DNA, 25 bp, Homo sapien
gagagacgtcatgaaatccgcagat

SEQ ID NO: 420789 - DNA, 25 bp, Homo sapien
atgccagctagcgtgtcagcgcgtc

SEQ ID NO: 420790 - DNA, 25 bp, Homo sapien
aacctttctcccagtgccactaagt

SEQ ID NO: 420791 - DNA, 25 bp, Homo sapien
tcagcgcgtcgaggaccgggcttgg

SEQ ID NO: 420792 - DNA, 25 bp, Homo sapien
tgccactaagtaagttattcccgga

SEQ ID NO: 420793 - DNA, 25 bp, Homo sapien
ttctggtgccctgactcaggaatac

SEQ ID NO: 420794 - DNA, 25 bp, Homo sapien
aagaacccaagactttggcatcaat

SEQ ID NO: 420795 - DNA, 25 bp, Homo sapien
agactttggcatcaattgcttctcc

SEQ ID NO: 420796 - DNA, 25 bp, Homo sapien
tctggtgccctgactcaggaataca

SEQ ID NO: 420797 - DNA, 25 bp, Homo sapien
cataccctgcttgcaagttgctgcc

SEQ ID NO: 420798 - DNA, 25 bp, Homo sapien
gggctgtctgctgtcgccatgcctg

SEQ ID NO: 420799 - DNA, 25 bp, Homo sapien
atgcttcacggcaccggcatcgtgg

SEQ ID NO: 420800 - DNA, 25 bp, Homo sapien
ctggaaccagcctgtccccattcat

SEQ ID NO: 420801 - DNA, 25 bp, Homo sapien
tcatgccctttcctcgtaatccata

SEQ ID NO: 420802 - DNA, 25 bp, Homo sapien
catagtcttgtttgtatttggtctc

SEQ ID NO: 420803 - DNA, 25 bp, Homo sapien
tcctcgtaatccatagtcttgtttg

SEQ ID NO: 420804 - DNA, 25 bp, Homo sapien
tcttgtttgtatttggtctccttca

SEQ ID NO: 420805 - DNA, 25 bp, Homo sapien
tctttgacagctctcatgcaaattc

SEQ ID NO: 420806 - DNA, 25 bp, Homo sapien
tccctggggatctttgacagctctc

SEQ ID NO: 420807 - DNA, 25 bp, Homo sapien
gggatctttgacagctctcatgcaa

SEQ ID NO: 420808 - DNA, 25 bp, Homo sapien
ggtccctggggatctttgacagctc

SEQ ID NO: 420809 - DNA, 25 bp, Homo sapien
aaatgagaacatccttgtgttggaa

SEQ ID NO: 420810 - DNA, 25 bp, Homo sapien
catccttgtgttggaatccagtatc

SEQ ID NO: 420811 - DNA, 25 bp, Homo sapien
gaacatccttgtgttggaatccagt

SEQ ID NO: 420812 - DNA, 25 bp, Homo sapien
tgagaacatccttgtgttggaatcc

SEQ ID NO: 420813 - DNA, 25 bp, Homo sapien
atagacacgcactgcctcctcagat

SEQ ID NO: 420814 - DNA, 25 bp, Homo sapien
aaagcgggaccacttctcttagcat

SEQ ID NO: 420815 - DNA, 25 bp, Homo sapien
gaaatggaatggctcatagacacgc

SEQ ID NO: 420816 - DNA, 25 bp, Homo sapien
agaaagcgggaccacttctcttagc

SEQ ID NO: 420817 - DNA, 25 bp, Homo sapien
ggtggccaggaaagttcatctgtaa

SEQ ID NO: 420818 - DNA, 25 bp, Homo sapien
tgtgatcatgatttactttattcag

SEQ ID NO: 420819 - DNA, 25 bp, Homo sapien
gttctgcttatccagggtggccagg

SEQ ID NO: 420820 - DNA, 25 bp, Homo sapien
aaggacaccttgtgtgcttctctga

SEQ ID NO: 420821 - DNA, 25 bp, Homo sapien
cgcagaatggctcgtacgaggccgt

SEQ ID NO: 420822 - DNA, 25 bp, Homo sapien
tgctcctgtgcaccgcagaatggct

SEQ ID NO: 420823 - DNA, 25 bp, Homo sapien
aagttgtgctcctgtgcaccgcaga

SEQ ID NO: 420824 - DNA, 25 bp, Homo sapien
ccttgtctgcattctgtaattggca

SEQ ID NO: 420825 - DNA, 25 bp, Homo sapien
gagcaggtattctctgcaggtagaa

SEQ ID NO: 420826 - DNA, 25 bp, Homo sapien
gttggggctgcgcactgcacctgcc

SEQ ID NO: 420827 - DNA, 25 bp, Homo sapien
aaactgtgcgctccaggctctaggc

SEQ ID NO: 420828 - DNA, 25 bp, Homo sapien
gcagctgtggtcacccagagcaggt

SEQ ID NO: 420829 - DNA, 25 bp, Homo sapien
tctgctagtatccattctccatctc

SEQ ID NO: 420830 - DNA, 25 bp, Homo sapien
ttcagacctccgccctgtgtccaca

SEQ ID NO: 420831 - DNA, 25 bp, Homo sapien
gtcaaaagaagtccggatgggacga

SEQ ID NO: 420832 - DNA, 25 bp, Homo sapien
ccctgtgtccacactctggtcatca

SEQ ID NO: 420833 - DNA, 25 bp, Homo sapien
gtggcatgaggaagtattggtaaaa

SEQ ID NO: 420834 - DNA, 25 bp, Homo sapien
gatttggactatgcagactccactg

SEQ ID NO: 420835 - DNA, 25 bp, Homo sapien
tgctgtgatttggactatgcagact

SEQ ID NO: 420836 - DNA, 25 bp, Homo sapien
tattggtaaaatctggctgttcttg

SEQ ID NO: 420837 - DNA, 25 bp, Homo sapien
tgggctgagttggagattgccctcc

SEQ ID NO: 420838 - DNA, 25 bp, Homo sapien
gatctgggactgctgttggaattct

SEQ ID NO: 420839 - DNA, 25 bp, Homo sapien
ttgttagctggtcagcacgctgctg

SEQ ID NO: 420840 - DNA, 25 bp, Homo sapien
ctgcaggtgccttgttagctggtca

SEQ ID NO: 420841 - DNA, 25 bp, Homo sapien
gggactgctgttggaattctcccag

SEQ ID NO: 420842 - DNA, 25 bp, Homo sapien
gcaccattcccttctatagcatgag

SEQ ID NO: 420843 - DNA, 25 bp, Homo sapien
gtatccttggatggctcaattgcag

SEQ ID NO: 420844 - DNA, 25 bp, Homo sapien
gtttggcttccaaatcatggagagc

SEQ ID NO: 420845 - DNA, 25 bp, Homo sapien
ggtgcttctaaaccatgaggcagaa

SEQ ID NO: 420846 - DNA, 25 bp, Homo sapien
tcttgttgatggagcaccagttttt

SEQ ID NO: 420847 - DNA, 25 bp, Homo sapien
gtttttctagaatgaggggctgctt

SEQ ID NO: 420848 - DNA, 25 bp, Homo sapien
ttacaaatgtccttgcacctcttgt

SEQ ID NO: 420849 - DNA, 25 bp, Homo sapien
caaatgtccttgcacctcttgttga

SEQ ID NO: 420850 - DNA, 25 bp, Homo sapien
tgcatcacagatgctgcagaccgag

SEQ ID NO: 420851 - DNA, 25 bp, Homo sapien
ctgatgcatcacagatgctgcagac

SEQ ID NO: 420852 - DNA, 25 bp, Homo sapien
catcacagatgctgcagaccgaggc

SEQ ID NO: 420853 - DNA, 25 bp, Homo sapien
gatgcatcacagatgctgcagaccg

SEQ ID NO: 420854 - DNA, 25 bp, Homo sapien
ctttggatcactgcaattatctccc

SEQ ID NO: 420855 - DNA, 25 bp, Homo sapien
ttggatcactgcaattatctccctc

SEQ ID NO: 420856 - DNA, 25 bp, Homo sapien
ggatcactgcaattatctccctcct

SEQ ID NO: 420857 - DNA, 25 bp, Homo sapien
tgcaattatctccctcctcacccat

SEQ ID NO: 420858 - DNA, 25 bp, Homo sapien
ccagcacagttggattttggtcctt

SEQ ID NO: 420859 - DNA, 25 bp, Homo sapien
gattgtttgttaggaggctgccaag

SEQ ID NO: 420860 - DNA, 25 bp, Homo sapien
ctttttgcagttcggagaaggagac

SEQ ID NO: 420861 - DNA, 25 bp, Homo sapien
gaccacttctaacagcagaactttt

SEQ ID NO: 420862 - DNA, 25 bp, Homo sapien
taattgaagtcctctttcacaggag

SEQ ID NO: 420863 - DNA, 25 bp, Homo sapien
cgatcccactacttccctgatggaa

SEQ ID NO: 420864 - DNA, 25 bp, Homo sapien
tcacaggagcttcaccatatcccag

SEQ ID NO: 420865 - DNA, 25 bp, Homo sapien
tacttccctgatggaaacccttcag

SEQ ID NO: 420866 - DNA, 25 bp, Homo sapien
gcataatgtaccatggcttccccag

SEQ ID NO: 420867 - DNA, 25 bp, Homo sapien
tgacaccaagtctattctccttggc

SEQ ID NO: 420868 - DNA, 25 bp, Homo sapien
ggaatgaagccctacatcagtgctt

SEQ ID NO: 420869 - DNA, 25 bp, Homo sapien
tgccacgcgatttcatgacaccaag

SEQ ID NO: 420870 - DNA, 25 bp, Homo sapien
gtggccagggtgtcctcagagccat

SEQ ID NO: 420871 - DNA, 25 bp, Homo sapien
tgagtggccagggtgtcctcagagc

SEQ ID NO: 420872 - DNA, 25 bp, Homo sapien
cattgagtggccagggtgtcctcag

SEQ ID NO: 420873 - DNA, 25 bp, Homo sapien
agtggccagggtgtcctcagagcca

SEQ ID NO: 420874 - DNA, 25 bp, Homo sapien
gaagtgggtacacttgacatagcca

SEQ ID NO: 420875 - DNA, 25 bp, Homo sapien
gcccagtattaggaaactatcccag

SEQ ID NO: 420876 - DNA, 25 bp, Homo sapien
cactacgtagggacagaagtacaca

SEQ ID NO: 420877 - DNA, 25 bp, Homo sapien
tgaagagcccctatatggttgagaa

SEQ ID NO: 420878 - DNA, 25 bp, Homo sapien
ttatttgtggacctactcagccttg

SEQ ID NO: 420879 - DNA, 25 bp, Homo sapien
gaaacttgcatgaccgcaaggcctg

SEQ ID NO: 420880 - DNA, 25 bp, Homo sapien
tgagtggctggtcccaacaggatcc

SEQ ID NO: 420881 - DNA, 25 bp, Homo sapien
cacagtgggtgcgagtttcttgcct

SEQ ID NO: 420882 - DNA, 25 bp, Homo sapien
aggttgatgggcttgcgcttatctg

SEQ ID NO: 420883 - DNA, 25 bp, Homo sapien
ccatctgatttcttgtggagcccat

SEQ ID NO: 420884 - DNA, 25 bp, Homo sapien
ttttgcccaaaattgctgcccctct

SEQ ID NO: 420885 - DNA, 25 bp, Homo sapien
gcttgcgcttatctgcttgtccctt

SEQ ID NO: 420886 - DNA, 25 bp, Homo sapien
gaatctgttcatgcacacttggcct

SEQ ID NO: 420887 - DNA, 25 bp, Homo sapien
ttctcaaagctgctccacagacacg

SEQ ID NO: 420888 - DNA, 25 bp, Homo sapien
tgcatgtccttaagcggccgggttt

SEQ ID NO: 420889 - DNA, 25 bp, Homo sapien
gtctcctctccgtggatgtccctgg

SEQ ID NO: 420890 - DNA, 25 bp, Homo sapien
gtaagatttttcactagctcaagca

SEQ ID NO: 420891 - DNA, 25 bp, Homo sapien
cagtatttgtagtcctctctcaggt

SEQ ID NO: 420892 - DNA, 25 bp, Homo sapien
aaacagtatttgtagtcctctctca

SEQ ID NO: 420893 - DNA, 25 bp, Homo sapien
tatttgtagtcctctctcaggtaga

SEQ ID NO: 420894 - DNA, 25 bp, Homo sapien
tttctacactcagctgattgatcat

SEQ ID NO: 420895 - DNA, 25 bp, Homo sapien
gtaaaatggaaggtgcatgtgtata

SEQ ID NO: 420896 - DNA, 25 bp, Homo sapien
gagcttctggaggtcttgaatttcc

SEQ ID NO: 420897 - DNA, 25 bp, Homo sapien
ctcagagagtgatgactgagcttct

SEQ ID NO: 420898 - DNA, 25 bp, Homo sapien
aaaatggaaggtgcatgtgtataca

SEQ ID NO: 420899 - DNA, 25 bp, Homo sapien
gggtgacaaggatgcaattcgttaa

SEQ ID NO: 420900 - DNA, 25 bp, Homo sapien
gatctgctcccatctaagccaaaaa

SEQ ID NO: 420901 - DNA, 25 bp, Homo sapien
gagaaagcttatctcaatgtgcttg

SEQ ID NO: 420902 - DNA, 25 bp, Homo sapien
ccattaggtaatgccttgtgattca

SEQ ID NO: 420903 - DNA, 25 bp, Homo sapien
taagaattaatggtcgtctggcaga

SEQ ID NO: 420904 - DNA, 25 bp, Homo sapien
caatgtatcgagtactaggaagtga

SEQ ID NO: 420905 - DNA, 25 bp, Homo sapien
ggctgtgtctaatccactaatgagc

SEQ ID NO: 420906 - DNA, 25 bp, Homo sapien
taaatatagccagaggtttcagatt

SEQ ID NO: 420907 - DNA, 25 bp, Homo sapien
ctttacctgagagccttcaccagct

SEQ ID NO: 420908 - DNA, 25 bp, Homo sapien
gagccagatgtcccaagtcatttcc

SEQ ID NO: 420909 - DNA, 25 bp, Homo sapien
tgtcccaagtcatttcctttacctg

SEQ ID NO: 420910 - DNA, 25 bp, Homo sapien
tgtcagaacaggagccagatgtccc

SEQ ID NO: 420911 - DNA, 25 bp, Homo sapien
cagcagaaggctcagtctgactgtg

SEQ ID NO: 420912 - DNA, 25 bp, Homo sapien
catgatgcaggagtctagcaatctg

SEQ ID NO: 420913 - DNA, 25 bp, Homo sapien
cagaaggctcagtctgactgtggcc

SEQ ID NO: 420914 - DNA, 25 bp, Homo sapien
gagtctagcaatctgtccagcagaa

SEQ ID NO: 420915 - DNA, 25 bp, Homo sapien
ctgcaaaatcgaaatcaaatccaca

SEQ ID NO: 420916 - DNA, 25 bp, Homo sapien
gattgcttgacatcatcagccatct

SEQ ID NO: 420917 - DNA, 25 bp, Homo sapien
caaggattgcttgacatcatcagcc

SEQ ID NO: 420918 - DNA, 25 bp, Homo sapien
gcacatcaaggattgcttgacatca

SEQ ID NO: 420919 - DNA, 25 bp, Homo sapien
actccaatctggagaactttctcta

SEQ ID NO: 420920 - DNA, 25 bp, Homo sapien
cattgtgcattgatacattaagtca

SEQ ID NO: 420921 - DNA, 25 bp, Homo sapien
gagacttaagataccatagttctac

SEQ ID NO: 420922 - DNA, 25 bp, Homo sapien
tcttggaatgagacttaagatacca

SEQ ID NO: 420923 - DNA, 25 bp, Homo sapien
cagaatccgtaggagaagctggcag

SEQ ID NO: 420924 - DNA, 25 bp, Homo sapien
aactcaggcaggaaacgatgttgca

SEQ ID NO: 420925 - DNA, 25 bp, Homo sapien
acgatgttgcagactttaggcagaa

SEQ ID NO: 420926 - DNA, 25 bp, Homo sapien
gcaagtccagaatccgtaggagaag

SEQ ID NO: 420927 - DNA, 25 bp, Homo sapien
aatgctggtgaagcggcatcactgt

SEQ ID NO: 420928 - DNA, 25 bp, Homo sapien
aatatccggggttcatcatctctcg

SEQ ID NO: 420929 - DNA, 25 bp, Homo sapien
tctctcgtcaagatgattaacgaca

SEQ ID NO: 420930 - DNA, 25 bp, Homo sapien
ggaagtagagtgcaatgctggtgaa

SEQ ID NO: 420931 - DNA, 25 bp, Homo sapien
agaaaagagtgaggagaccagctct

SEQ ID NO: 420932 - DNA, 25 bp, Homo sapien
gagaccagctctcagacatccttaa

SEQ ID NO: 420933 - DNA, 25 bp, Homo sapien
agaccagctctcagacatccttaag

SEQ ID NO: 420934 - DNA, 25 bp, Homo sapien
cagacatccttaagggaaaggctgg

SEQ ID NO: 420935 - DNA, 25 bp, Homo sapien
catcagatggttggactgtaggcat

SEQ ID NO: 420936 - DNA, 25 bp, Homo sapien
tcagattcatcagatggttggactg

SEQ ID NO: 420937 - DNA, 25 bp, Homo sapien
gattcatcagatggttggactgtag

SEQ ID NO: 420938 - DNA, 25 bp, Homo sapien
tgtcagattcatcagatggttggac

SEQ ID NO: 420939 - DNA, 25 bp, Homo sapien
aacattgactcattcccagggcatc

SEQ ID NO: 420940 - DNA, 25 bp, Homo sapien
tagagccgaagtcaaagtcactttg

SEQ ID NO: 420941 - DNA, 25 bp, Homo sapien
tacataccccaacatctgctacttg

SEQ ID NO: 420942 - DNA, 25 bp, Homo sapien
aagatgacattccagtgtccacctg

SEQ ID NO: 420943 - DNA, 25 bp, Homo sapien
ctgtgggggactggcgtggtgtttg

SEQ ID NO: 420944 - DNA, 25 bp, Homo sapien
ggggactggcgtggtgtttggtcat

SEQ ID NO: 420945 - DNA, 25 bp, Homo sapien
tgggggactggcgtggtgtttggtc

SEQ ID NO: 420946 - DNA, 25 bp, Homo sapien
ctctgtgggggactggcgtggtgtt

SEQ ID NO: 420947 - DNA, 25 bp, Homo sapien
gatccctcgattgttgacaacctga

SEQ ID NO: 420948 - DNA, 25 bp, Homo sapien
gttgacaacctgagaacatttcttg

SEQ ID NO: 420949 - DNA, 25 bp, Homo sapien
tccaaaatgaagaacctatgatccc

SEQ ID NO: 420950 - DNA, 25 bp, Homo sapien
tatctgatccttgccaatcgtgctc

SEQ ID NO: 420951 - DNA, 25 bp, Homo sapien
gctgctctactacagcctacatggc

SEQ ID NO: 420952 - DNA, 25 bp, Homo sapien
gacaggtgaagcgatgtcagtgctt

SEQ ID NO: 420953 - DNA, 25 bp, Homo sapien
gagccattcctcaatgctgatcagt

SEQ ID NO: 420954 - DNA, 25 bp, Homo sapien
gtcagtgcttgacaactcacacggc

SEQ ID NO: 420955 - DNA, 25 bp, Homo sapien
cccaaaccagaacaagagcattgat

SEQ ID NO: 420956 - DNA, 25 bp, Homo sapien
aatgtctactccattgagtgtactc

SEQ ID NO: 420957 - DNA, 25 bp, Homo sapien
tgtctactccattgagtgtactctt

SEQ ID NO: 420958 - DNA, 25 bp, Homo sapien
ctaatgtctactccattgagtgtac

SEQ ID NO: 420959 - DNA, 25 bp, Homo sapien
tctactccattgagtgtactcttgg

SEQ ID NO: 420960 - DNA, 25 bp, Homo sapien
aagccattgagcacactattcaggg

SEQ ID NO: 420961 - DNA, 25 bp, Homo sapien
cagctgttgctcagggtattgctgc

SEQ ID NO: 420962 - DNA, 25 bp, Homo sapien
ccaactcctttaatgggagaagctt

SEQ ID NO: 420963 - DNA, 25 bp, Homo sapien
gctgctcatatgcactaaagccatt

SEQ ID NO: 420964 - DNA, 25 bp, Homo sapien
cacaaacctgtcacaaagaaatcag

SEQ ID NO: 420965 - DNA, 25 bp, Homo sapien
gatagctccatgtataattccaaat

SEQ ID NO: 420966 - DNA, 25 bp, Homo sapien
tgttgtgtcctctgatagcagaagc

SEQ ID NO: 420967 - DNA, 25 bp, Homo sapien
agagatggagtgttgtgtcctctga

SEQ ID NO: 420968 - DNA, 25 bp, Homo sapien
gagaggtcatgggaaatcccgagaa

SEQ ID NO: 420969 - DNA, 25 bp, Homo sapien
gaaatcccgagaaccacatagcact

SEQ ID NO: 420970 - DNA, 25 bp, Homo sapien
gaaaacctcaccctgagaggtcatg

SEQ ID NO: 420971 - DNA, 25 bp, Homo sapien
tgggcatttatgtgatgtagcagca

SEQ ID NO: 420972 - DNA, 25 bp, Homo sapien
tgaatatgtctacattccaccagca

SEQ ID NO: 420973 - DNA, 25 bp, Homo sapien
gctggagcctctcccacagtttgcg

SEQ ID NO: 420974 - DNA, 25 bp, Homo sapien
tctttgatctctcctgccattgtct

SEQ ID NO: 420975 - DNA, 25 bp, Homo sapien
ccagtggttcttcagacatgcctga

SEQ ID NO: 420976 - DNA, 25 bp, Homo sapien
cacatgtgaacacccaagcatcacg

SEQ ID NO: 420977 - DNA, 25 bp, Homo sapien
tgcacatgtgaacacccaagcatca

SEQ ID NO: 420978 - DNA, 25 bp, Homo sapien
ggacgggtaatgtgcccacattgta

SEQ ID NO: 420979 - DNA, 25 bp, Homo sapien
catgcacatgtgaacacccaagcat

SEQ ID NO: 420980 - DNA, 25 bp, Homo sapien
ggaggaagcaccctccaaaggctgg

SEQ ID NO: 420981 - DNA, 25 bp, Homo sapien
cagcgagggacggacaggaggaagc

SEQ ID NO: 420982 - DNA, 25 bp, Homo sapien
tgtctgggtggcaatcgagagcctt

SEQ ID NO: 420983 - DNA, 25 bp, Homo sapien
ccctgtgcttgactcctgtgtctgg

SEQ ID NO: 420984 - DNA, 25 bp, Homo sapien
gatgggctggtatacaaatgccttt

SEQ ID NO: 420985 - DNA, 25 bp, Homo sapien
gtggatgggctggtatacaaatgcc

SEQ ID NO: 420986 - DNA, 25 bp, Homo sapien
aacatggtggatgggctggtataca

SEQ ID NO: 420987 - DNA, 25 bp, Homo sapien
taatgaacatggtggatgggctggt

SEQ ID NO: 420988 - DNA, 25 bp, Homo sapien
ttatgttaattgtgggtttgtcaga

SEQ ID NO: 420989 - DNA, 25 bp, Homo sapien
gcttttgtcagttctaggagcattc

SEQ ID NO: 420990 - DNA, 25 bp, Homo sapien
ctttcagtattatgttaattgtggg

SEQ ID NO: 420991 - DNA, 25 bp, Homo sapien
tattctcaccttggttactgttggt

SEQ ID NO: 420992 - DNA, 25 bp, Homo sapien
actttaaagagatagcccaggctgc

SEQ ID NO: 420993 - DNA, 25 bp, Homo sapien
catgtcagccaggatctgcctactg

SEQ ID NO: 420994 - DNA, 25 bp, Homo sapien
tcaggtaggatttgaagcttcagct

SEQ ID NO: 420995 - DNA, 25 bp, Homo sapien
gagctgagtgaaacctgctggccct

SEQ ID NO: 420996 - DNA, 25 bp, Homo sapien
gtggtccctagagaaatctcccaac

SEQ ID NO: 420997 - DNA, 25 bp, Homo sapien
agatggccttctgactgatagttgg

SEQ ID NO: 420998 - DNA, 25 bp, Homo sapien
tttaagtcaccatcacccaggacgc

SEQ ID NO: 420999 - DNA, 25 bp, Homo sapien
tagctgtactttcgagtcctcgtca

SEQ ID NO: 421000 - DNA, 25 bp, Homo sapien
tgtctttagcccagtgttctgcctg

SEQ ID NO: 421001 - DNA, 25 bp, Homo sapien
tacatggacctcctgaagagaacac

SEQ ID NO: 421002 - DNA, 25 bp, Homo sapien
gggtttatctcatgatctcagcctt

SEQ ID NO: 421003 - DNA, 25 bp, Homo sapien
tttttccagaaagccgcctgtgtcc

SEQ ID NO: 421004 - DNA, 25 bp, Homo sapien
cttgtgtggccctgctatctttggt

SEQ ID NO: 421005 - DNA, 25 bp, Homo sapien
gctatctttggtacatgcctcccaa

SEQ ID NO: 421006 - DNA, 25 bp, Homo sapien
gtggccctgctatctttggtacatg

SEQ ID NO: 421007 - DNA, 25 bp, Homo sapien
cagcctggattccactaaacctctt

SEQ ID NO: 421008 - DNA, 25 bp, Homo sapien
gagcaattagtctcagaatctcgat

SEQ ID NO: 421009 - DNA, 25 bp, Homo sapien
gggagcaattagtctcagaatctcg

SEQ ID NO: 421010 - DNA, 25 bp, Homo sapien
ctgccgggagcaattagtctcagaa

SEQ ID NO: 421011 - DNA, 25 bp, Homo sapien
ccgggagcaattagtctcagaatct

SEQ ID NO: 421012 - DNA, 25 bp, Homo sapien
gacccgaggaagatccaggatattt

SEQ ID NO: 421013 - DNA, 25 bp, Homo sapien
acccgaggaagatccaggatatttt

SEQ ID NO: 421014 - DNA, 25 bp, Homo sapien
acagagttacaaccagggacccgag

SEQ ID NO: 421015 - DNA, 25 bp, Homo sapien
cccgaggaagatccaggatattttg

SEQ ID NO: 421016 - DNA, 25 bp, Homo sapien
tgctgagtctggttatgggatccct

SEQ ID NO: 421017 - DNA, 25 bp, Homo sapien
agccatgctcccgtgtcactgtgtg

SEQ ID NO: 421018 - DNA, 25 bp, Homo sapien
actgtgtgtcaccttcaagctgtcc

SEQ ID NO: 421019 - DNA, 25 bp, Homo sapien
cttcaagctgtccccgtgtgtatgc

SEQ ID NO: 421020 - DNA, 25 bp, Homo sapien
gtaaagcactgctgagaacaatcat

SEQ ID NO: 421021 - DNA, 25 bp, Homo sapien
gtgcttgaattcatgctctctgaac

SEQ ID NO: 421022 - DNA, 25 bp, Homo sapien
atctctctcatcctgtaaagcactg

SEQ ID NO: 421023 - DNA, 25 bp, Homo sapien
ccccgttttgtgcttgaattcatgc

SEQ ID NO: 421024 - DNA, 25 bp, Homo sapien
gcttactaatctctggggcgaattc

SEQ ID NO: 421025 - DNA, 25 bp, Homo sapien
aatctctggggcgaattcagtgacc

SEQ ID NO: 421026 - DNA, 25 bp, Homo sapien
ttactaatctctggggcgaattcag

SEQ ID NO: 421027 - DNA, 25 bp, Homo sapien
tctctggggcgaattcagtgaccat

SEQ ID NO: 421028 - DNA, 25 bp, Homo sapien
tcacccggatggaaagcaggaactt

SEQ ID NO: 421029 - DNA, 25 bp, Homo sapien
acttcccaggatacaatagcacacg

SEQ ID NO: 421030 - DNA, 25 bp, Homo sapien
tgtgactcctgctatgcggcccagg

SEQ ID NO: 421031 - DNA, 25 bp, Homo sapien
tacagtggtgcaaaacgcagtggcg

SEQ ID NO: 421032 - DNA, 25 bp, Homo sapien
cttttgcacaggggtagaggcttgt

SEQ ID NO: 421033 - DNA, 25 bp, Homo sapien
ttacataatgatccaaaaatagctt

SEQ ID NO: 421034 - DNA, 25 bp, Homo sapien
actggcttggcgtttattgtgggta

SEQ ID NO: 421035 - DNA, 25 bp, Homo sapien
aatagctttagaatccagagaagag

SEQ ID NO: 421036 - DNA, 25 bp, Homo sapien
gaagaagagagctaccctttgggac

SEQ ID NO: 421037 - DNA, 25 bp, Homo sapien
gatttgaatgcagccagacatcaga

SEQ ID NO: 421038 - DNA, 25 bp, Homo sapien
ttttagtggccacaatggagggctg

SEQ ID NO: 421039 - DNA, 25 bp, Homo sapien
gcccagtgagtgtgttcagctataa

SEQ ID NO: 421040 - DNA, 25 bp, Homo sapien
atggccacaagttctacacggccct

SEQ ID NO: 421041 - DNA, 25 bp, Homo sapien
acggccctgcaggacctgagtcttt

SEQ ID NO: 421042 - DNA, 25 bp, Homo sapien
cggccctgcaggacctgagtcttta

SEQ ID NO: 421043 - DNA, 25 bp, Homo sapien
acaagttctacacggccctgcagga

SEQ ID NO: 421044 - DNA, 25 bp, Homo sapien
cttcctgccttcggagggtactcag

SEQ ID NO: 421045 - DNA, 25 bp, Homo sapien
agggatccatgatgagcattgagca

SEQ ID NO: 421046 - DNA, 25 bp, Homo sapien
ggatccatgatgagcattgagcagg

SEQ ID NO: 421047 - DNA, 25 bp, Homo sapien
gtcttcctgccttcggagggtactc

SEQ ID NO: 421048 - DNA, 25 bp, Homo sapien
aggggtccccatcagccagaatcag

SEQ ID NO: 421049 - DNA, 25 bp, Homo sapien
tcgaggggtccccatcagccagaat

SEQ ID NO: 421050 - DNA, 25 bp, Homo sapien
gaggggtccccatcagccagaatca

SEQ ID NO: 421051 - DNA, 25 bp, Homo sapien
gggtccccatcagccagaatcagca

SEQ ID NO: 421052 - DNA, 25 bp, Homo sapien
gcctggcggtctccacagatggtga

SEQ ID NO: 421053 - DNA, 25 bp, Homo sapien
cagatggtgatctgcctgagggtct

SEQ ID NO: 421054 - DNA, 25 bp, Homo sapien
acagggtggacgcactgcaccagaa

SEQ ID NO: 421055 - DNA, 25 bp, Homo sapien
aatgtagacagggtggacgcactgc

SEQ ID NO: 421056 - DNA, 25 bp, Homo sapien
ggcaatgccaccgggacatggtgca

SEQ ID NO: 421057 - DNA, 25 bp, Homo sapien
gcaatgccaccgggacatggtgcat

SEQ ID NO: 421058 - DNA, 25 bp, Homo sapien
ctccggcaatgccaccgggacatgg

SEQ ID NO: 421059 - DNA, 25 bp, Homo sapien
ccggcaatgccaccgggacatggtg

SEQ ID NO: 421060 - DNA, 25 bp, Homo sapien
agaaggcagtcactaggcacacaca

SEQ ID NO: 421061 - DNA, 25 bp, Homo sapien
ggagaaggcagtcactaggcacaca

SEQ ID NO: 421062 - DNA, 25 bp, Homo sapien
gctgggagaaggcagtcactaggca

SEQ ID NO: 421063 - DNA, 25 bp, Homo sapien
tgggagaaggcagtcactaggcaca

SEQ ID NO: 421064 - DNA, 25 bp, Homo sapien
tgactcgtgaagctgtgcaaccaga

SEQ ID NO: 421065 - DNA, 25 bp, Homo sapien
cagtccttgtgactcgtgaagctgt

SEQ ID NO: 421066 - DNA, 25 bp, Homo sapien
ccttgtgactcgtgaagctgtgcaa

SEQ ID NO: 421067 - DNA, 25 bp, Homo sapien
tgtgactcgtgaagctgtgcaacca

SEQ ID NO: 421068 - DNA, 25 bp, Homo sapien
gctctggagactgtaatgttttaaa

SEQ ID NO: 421069 - DNA, 25 bp, Homo sapien
gggctctggagactgtaatgtttta

SEQ ID NO: 421070 - DNA, 25 bp, Homo sapien
ctgggctctggagactgtaatgttt

SEQ ID NO: 421071 - DNA, 25 bp, Homo sapien
tctggagactgtaatgttttaaact

SEQ ID NO: 421072 - DNA, 25 bp, Homo sapien
ctctaaggattcaaccagaaatctc

SEQ ID NO: 421073 - DNA, 25 bp, Homo sapien
acaactttgatgtttgtgaccactg

SEQ ID NO: 421074 - DNA, 25 bp, Homo sapien
ttttacaactttgatgtttgtgacc

SEQ ID NO: 421075 - DNA, 25 bp, Homo sapien
gatgtttgtgaccactgctcagttc

SEQ ID NO: 421076 - DNA, 25 bp, Homo sapien
ggtagttatgcacttcccaaatcaa

SEQ ID NO: 421077 - DNA, 25 bp, Homo sapien
caacttgaagttgatcctaaatgca

SEQ ID NO: 421078 - DNA, 25 bp, Homo sapien
gatcctaaatgcacgctgtttccac

SEQ ID NO: 421079 - DNA, 25 bp, Homo sapien
ggaaccagcaatatggtagttatgc

SEQ ID NO: 421080 - DNA, 25 bp, Homo sapien
gagcaagtcctaaccatgccaaaaa

SEQ ID NO: 421081 - DNA, 25 bp, Homo sapien
tccggcagaactgagcaagtcctaa

SEQ ID NO: 421082 - DNA, 25 bp, Homo sapien
caaaaacatcattatctctggttcc

SEQ ID NO: 421083 - DNA, 25 bp, Homo sapien
tgcctcctccggcagaactgagcaa

SEQ ID NO: 421084 - DNA, 25 bp, Homo sapien
tctacaggcgccgtcatcacagggt

SEQ ID NO: 421085 - DNA, 25 bp, Homo sapien
agaaggtttctacaggcgccgtcat

SEQ ID NO: 421086 - DNA, 25 bp, Homo sapien
aaggtttctacaggcgccgtcatca

SEQ ID NO: 421087 - DNA, 25 bp, Homo sapien
cacagaaggtttctacaggcgccgt

SEQ ID NO: 421088 - DNA, 25 bp, Homo sapien
gctggtatatactcagatcctttaa

SEQ ID NO: 421089 - DNA, 25 bp, Homo sapien
ctggtatatactcagatcctttaat

SEQ ID NO: 421090 - DNA, 25 bp, Homo sapien
cagatcctttaattctcagttttcc

SEQ ID NO: 421091 - DNA, 25 bp, Homo sapien
tggtatatactcagatcctttaatt

SEQ ID NO: 421092 - DNA, 25 bp, Homo sapien
tgctctatgtcaaaccagatgccgt

SEQ ID NO: 421093 - DNA, 25 bp, Homo sapien
gtctgctctatgtcaaaccagatgc

SEQ ID NO: 421094 - DNA, 25 bp, Homo sapien
tctatgtcaaaccagatgccgtggt

SEQ ID NO: 421095 - DNA, 25 bp, Homo sapien
tgtcaaaccagatgccgtggtctgg

SEQ ID NO: 421096 - DNA, 25 bp, Homo sapien
ccagccttcgggattgcgaagtggc

SEQ ID NO: 421097 - DNA, 25 bp, Homo sapien
tctgcatgtgactggccagccttcg

SEQ ID NO: 421098 - DNA, 25 bp, Homo sapien
tgcgaagtggctgcttacagtcagc

SEQ ID NO: 421099 - DNA, 25 bp, Homo sapien
tgcttacagtcagccccaaagaatt

SEQ ID NO: 421100 - DNA, 25 bp, Homo sapien
gaggtcggcagtgtgcacaggggct

SEQ ID NO: 421101 - DNA, 25 bp, Homo sapien
cactgatctggtgaagctgagtcca

SEQ ID NO: 421102 - DNA, 25 bp, Homo sapien
tatacgttgcatgcatcatcaggaa

SEQ ID NO: 421103 - DNA, 25 bp, Homo sapien
ggcatttctgagtggcaacaacact

SEQ ID NO: 421104 - DNA, 25 bp, Homo sapien
gataggcatacagcctggtttctcc

SEQ ID NO: 421105 - DNA, 25 bp, Homo sapien
aaaagatgctcttgtaaagttggtg

SEQ ID NO: 421106 - DNA, 25 bp, Homo sapien
gacaaaacctggttgggcatcttca

SEQ ID NO: 421107 - DNA, 25 bp, Homo sapien
ggtttctgctaagtggacctttcca

SEQ ID NO: 421108 - DNA, 25 bp, Homo sapien
tgctaagtggacctttccaaatcct

SEQ ID NO: 421109 - DNA, 25 bp, Homo sapien
gccagcacaggagcacgtagcctgc

SEQ ID NO: 421110 - DNA, 25 bp, Homo sapien
acaggagcacgtagcctgcaggtgt

SEQ ID NO: 421111 - DNA, 25 bp, Homo sapien
cagcacaggagcacgtagcctgcag

SEQ ID NO: 421112 - DNA, 25 bp, Homo sapien
gcacaggagcacgtagcctgcaggt

SEQ ID NO: 421113 - DNA, 25 bp, Homo sapien
aaggtaaggccccttaggatgcttg

SEQ ID NO: 421114 - DNA, 25 bp, Homo sapien
gtaaggccccttaggatgcttgtag

SEQ ID NO: 421115 - DNA, 25 bp, Homo sapien
cagcacctggactcaaggtaaggcc

SEQ ID NO: 421116 - DNA, 25 bp, Homo sapien
ccccagcacctggactcaaggtaag

SEQ ID NO: 421117 - DNA, 25 bp, Homo sapien
tgaacttccacgtgctcttggagga

SEQ ID NO: 421118 - DNA, 25 bp, Homo sapien
aaagctgtatctgaacttccacgtg

SEQ ID NO: 421119 - DNA, 25 bp, Homo sapien
ggcataagagtcatctaccaagtca

SEQ ID NO: 421120 - DNA, 25 bp, Homo sapien
gatacgggtgattcacggcataaga

SEQ ID NO: 421121 - DNA, 25 bp, Homo sapien
gcaagagcgagtgcagcttccaaga

SEQ ID NO: 421122 - DNA, 25 bp, Homo sapien
tgcaagagcgagtgcagcttccaag

SEQ ID NO: 421123 - DNA, 25 bp, Homo sapien
ttaggaagctaaggaaggagaatcg

SEQ ID NO: 421124 - DNA, 25 bp, Homo sapien
gctacttaggaagctaaggaaggag

SEQ ID NO: 421125 - DNA, 25 bp, Homo sapien
cttgaatctgggaggcaggggttgc

SEQ ID NO: 421126 - DNA, 25 bp, Homo sapien
tacttaggaagctaaggaaggagaa

SEQ ID NO: 421127 - DNA, 25 bp, Homo sapien
cacaacaatgcatgtccaagccacg

SEQ ID NO: 421128 - DNA, 25 bp, Homo sapien
tgttttgccagtcatctcacaacaa

SEQ ID NO: 421129 - DNA, 25 bp, Homo sapien
cagacatcagtgttcctgttttgcc

SEQ ID NO: 421130 - DNA, 25 bp, Homo sapien
agtcatctcacaacaatgcatgtcc

SEQ ID NO: 421131 - DNA, 25 bp, Homo sapien
tttaaacttgtctttgtcgagtaca

SEQ ID NO: 421132 - DNA, 25 bp, Homo sapien
aaatggcaaatgagtcccctgttgg

SEQ ID NO: 421133 - DNA, 25 bp, Homo sapien
caaatgagtcccctgttgggcccgg

SEQ ID NO: 421134 - DNA, 25 bp, Homo sapien
gctcagattctttgccatggaaaat

SEQ ID NO: 421135 - DNA, 25 bp, Homo sapien
ctttgtacagtcagaccagccttta

SEQ ID NO: 421136 - DNA, 25 bp, Homo sapien
gaaggattgccctctggaatctgct

SEQ ID NO: 421137 - DNA, 25 bp, Homo sapien
cacttggcaaagctatctgtgccct

SEQ ID NO: 421138 - DNA, 25 bp, Homo sapien
ccagcctttaaagcggatccttcac

SEQ ID NO: 421139 - DNA, 25 bp, Homo sapien
gccaaggccaaaggtcatggtgcat

SEQ ID NO: 421140 - DNA, 25 bp, Homo sapien
tagggaggaaaatggcccaaggcca

SEQ ID NO: 421141 - DNA, 25 bp, Homo sapien
ctgcgtagtgtagggaggaaaatgg

SEQ ID NO: 421142 - DNA, 25 bp, Homo sapien
ggccaaggccaaaggtcatggtgca

SEQ ID NO: 421143 - DNA, 25 bp, Homo sapien
taagtgagtactggtggcaagctgc

SEQ ID NO: 421144 - DNA, 25 bp, Homo sapien
cacagcattcctacacatggtgtta

SEQ ID NO: 421145 - DNA, 25 bp, Homo sapien
gaatccaatttttccgaaatagaca

SEQ ID NO: 421146 - DNA, 25 bp, Homo sapien
tgttaacattggtctccaacagttg

SEQ ID NO: 421147 - DNA, 25 bp, Homo sapien
tatacacaggactgcagcaaaagcg

SEQ ID NO: 421148 - DNA, 25 bp, Homo sapien
tctgagggcatcacacacttgaggg

SEQ ID NO: 421149 - DNA, 25 bp, Homo sapien
gcaaaagcgctctcagcagaaagag

SEQ ID NO: 421150 - DNA, 25 bp, Homo sapien
ggccatggcaccctttgactgctga

SEQ ID NO: 421151 - DNA, 25 bp, Homo sapien
gtcatcacgaccttgattgagatct

SEQ ID NO: 421152 - DNA, 25 bp, Homo sapien
tcatcacgaccttgattgagatctt

SEQ ID NO: 421153 - DNA, 25 bp, Homo sapien
catcacgaccttgattgagatcttc

SEQ ID NO: 421154 - DNA, 25 bp, Homo sapien
gaggtagagagactctatgttcaca

SEQ ID NO: 421155 - DNA, 25 bp, Homo sapien
gtaatgtgtagattctcatgtccca

SEQ ID NO: 421156 - DNA, 25 bp, Homo sapien
gcaccatccgagagcttattagtaa

SEQ ID NO: 421157 - DNA, 25 bp, Homo sapien
caaaatgtggttcacagacccgcca

SEQ ID NO: 421158 - DNA, 25 bp, Homo sapien
gctctggacagtgttctcaaagcaa

SEQ ID NO: 421159 - DNA, 25 bp, Homo sapien
tgtgtgggtcccgtatccctgtggc

SEQ ID NO: 421160 - DNA, 25 bp, Homo sapien
tctgaagccgtgtggaaaactgact

SEQ ID NO: 421161 - DNA, 25 bp, Homo sapien
gtggcatccagacctggcctctctt

SEQ ID NO: 421162 - DNA, 25 bp, Homo sapien
cagtgcagctggctggaatccgata

SEQ ID NO: 421163 - DNA, 25 bp, Homo sapien
gggagcaggtgagtggtcccagcac

SEQ ID NO: 421164 - DNA, 25 bp, Homo sapien
ccgatactgagcttacagggcctaa

SEQ ID NO: 421165 - DNA, 25 bp, Homo sapien
gggaaggaaggctcaagacccagac

SEQ ID NO: 421166 - DNA, 25 bp, Homo sapien
caaggtacacttgttaaggagtcaa

SEQ ID NO: 421167 - DNA, 25 bp, Homo sapien
gagtcaatggctcgtaacatcttca

SEQ ID NO: 421168 - DNA, 25 bp, Homo sapien
gttaaggagtcaatggctcgtaaca

SEQ ID NO: 421169 - DNA, 25 bp, Homo sapien
ctggacaaggtacacttgttaagga

SEQ ID NO: 421170 - DNA, 25 bp, Homo sapien
gatcgaaaagagaagggctacactc

SEQ ID NO: 421171 - DNA, 25 bp, Homo sapien
agagatcgaaaagagaagggctaca

SEQ ID NO: 421172 - DNA, 25 bp, Homo sapien
tcgaaaagagaagggctacactctt

SEQ ID NO: 421173 - DNA, 25 bp, Homo sapien
gagatcgaaaagagaagggctacac

SEQ ID NO: 421174 - DNA, 25 bp, Homo sapien
tgtaaaaccactgtgatttggcggg

SEQ ID NO: 421175 - DNA, 25 bp, Homo sapien
cttccaggtagttaggttggtggca

SEQ ID NO: 421176 - DNA, 25 bp, Homo sapien
gagatcttggtctacaatttgccca

SEQ ID NO: 421177 - DNA, 25 bp, Homo sapien
ccaacagggtgtgggcatgaatgat

SEQ ID NO: 421178 - DNA, 25 bp, Homo sapien
ggtggctctgactcaaagtgtttca

SEQ ID NO: 421179 - DNA, 25 bp, Homo sapien
catgaagtgcagtcaaaatgctggc

SEQ ID NO: 421180 - DNA, 25 bp, Homo sapien
tgtaacgattctcaggcaagggaag

SEQ ID NO: 421181 - DNA, 25 bp, Homo sapien
gaatgcattgctcatataggagccc

SEQ ID NO: 421182 - DNA, 25 bp, Homo sapien
tagactccccggatttggacagcaa

SEQ ID NO: 421183 - DNA, 25 bp, Homo sapien
gagccgccagtgtccagaatgtgaa

SEQ ID NO: 421184 - DNA, 25 bp, Homo sapien
gtggtacaacagagctcccctgagc

SEQ ID NO: 421185 - DNA, 25 bp, Homo sapien
ggccacagtggtggtacaacagagc

SEQ ID NO: 421186 - DNA, 25 bp, Homo sapien
ggctctgctcaagtcagttgaccca

SEQ ID NO: 421187 - DNA, 25 bp, Homo sapien
tgtgcctcctctcgtggcccttgtt

SEQ ID NO: 421188 - DNA, 25 bp, Homo sapien
gactgattttcagtgttggtctcaa

SEQ ID NO: 421189 - DNA, 25 bp, Homo sapien
catactccgacgctgaatttgctgg

SEQ ID NO: 421190 - DNA, 25 bp, Homo sapien
gaaactgatacccactactcaggga

SEQ ID NO: 421191 - DNA, 25 bp, Homo sapien
ctcagggataagtaggagctgtgcc

SEQ ID NO: 421192 - DNA, 25 bp, Homo sapien
catacactcgcagcttgggagaggt

SEQ ID NO: 421193 - DNA, 25 bp, Homo sapien
gatgggctttgaacaattccgaggt

SEQ ID NO: 421194 - DNA, 25 bp, Homo sapien
tgccccccagtcctgtgctttgctc

SEQ ID NO: 421195 - DNA, 25 bp, Homo sapien
actcttgccccccagtcctgtgctt

SEQ ID NO: 421196 - DNA, 25 bp, Homo sapien
ctccactgggtctccccacactctt

SEQ ID NO: 421197 - DNA, 25 bp, Homo sapien
ccttcttctccctgtactctctcca

SEQ ID NO: 421198 - DNA, 25 bp, Homo sapien
agtccaatatcaagatgctggcatc

SEQ ID NO: 421199 - DNA, 25 bp, Homo sapien
ccaatatcaagatgctggcatctgg

SEQ ID NO: 421200 - DNA, 25 bp, Homo sapien
aatatcaagatgctggcatctggta

SEQ ID NO: 421201 - DNA, 25 bp, Homo sapien
tatcaagatgctggcatctggtaag

SEQ ID NO: 421202 - DNA, 25 bp, Homo sapien
ttctgatcaaggtagccagaagctg

SEQ ID NO: 421203 - DNA, 25 bp, Homo sapien
caaccttctgatcaaggtagccaga

SEQ ID NO: 421204 - DNA, 25 bp, Homo sapien
ttcatcaaccttctgatcaaggtag

SEQ ID NO: 421205 - DNA, 25 bp, Homo sapien
ccttctgatcaaggtagccagaagc

SEQ ID NO: 421206 - DNA, 25 bp, Homo sapien
tggcttctccttttcaccggtggac

SEQ ID NO: 421207 - DNA, 25 bp, Homo sapien
cttttcaccggtggacaaactggtg

SEQ ID NO: 421208 - DNA, 25 bp, Homo sapien
tcaccggtggacaaactggtggaaa

SEQ ID NO: 421209 - DNA, 25 bp, Homo sapien
gcttctccttttcaccggtggacaa

SEQ ID NO: 421210 - DNA, 25 bp, Homo sapien
aaattccaatactctgatctgccat

SEQ ID NO: 421211 - DNA, 25 bp, Homo sapien
tcaaattccaatactctgatctgcc

SEQ ID NO: 421212 - DNA, 25 bp, Homo sapien
attccaatactctgatctgccatcc

SEQ ID NO: 421213 - DNA, 25 bp, Homo sapien
caaattccaatactctgatctgcca

SEQ ID NO: 421214 - DNA, 25 bp, Homo sapien
cacgtaggactgtcagataccttgt

SEQ ID NO: 421215 - DNA, 25 bp, Homo sapien
cgtaggactgtcagataccttgttc

SEQ ID NO: 421216 - DNA, 25 bp, Homo sapien
gtaggactgtcagataccttgttct

SEQ ID NO: 421217 - DNA, 25 bp, Homo sapien
tcacgtaggactgtcagataccttg

SEQ ID NO: 421218 - DNA, 25 bp, Homo sapien
gcctacaatggcttcagagcacaga

SEQ ID NO: 421219 - DNA, 25 bp, Homo sapien
ccagcctacaatggcttcagagcac

SEQ ID NO: 421220 - DNA, 25 bp, Homo sapien
ctacaatggcttcagagcacagagg

SEQ ID NO: 421221 - DNA, 25 bp, Homo sapien
acaatggcttcagagcacagaggct

SEQ ID NO: 421222 - DNA, 25 bp, Homo sapien
ctttgagtcacagccggcatccttg

SEQ ID NO: 421223 - DNA, 25 bp, Homo sapien
gacctggttcctggtagtgacgcct

SEQ ID NO: 421224 - DNA, 25 bp, Homo sapien
tgctagctgaccaacaatcctgttt

SEQ ID NO: 421225 - DNA, 25 bp, Homo sapien
ttttgtccagagtcgccaattcccc

SEQ ID NO: 421226 - DNA, 25 bp, Homo sapien
tgcattgccccatgagtgaccaagt

SEQ ID NO: 421227 - DNA, 25 bp, Homo sapien
gatatagcaaaattaagaaccttag

SEQ ID NO: 421228 - DNA, 25 bp, Homo sapien
ggatatagcaaaattaagaacctta

SEQ ID NO: 421229 - DNA, 25 bp, Homo sapien
catgagtgaccaagtggtcccattc

SEQ ID NO: 421230 - DNA, 25 bp, Homo sapien
tgtacgctctccaccaaaaggtttg

SEQ ID NO: 421231 - DNA, 25 bp, Homo sapien
aggtcaggaggcttaaagggacatt

SEQ ID NO: 421232 - DNA, 25 bp, Homo sapien
ttgaagttatccaagtagttgagca

SEQ ID NO: 421233 - DNA, 25 bp, Homo sapien
tagttgagcattagacgtcttcctc

SEQ ID NO: 421234 - DNA, 25 bp, Homo sapien
cctctcttgccagaacagcggtcat

SEQ ID NO: 421235 - DNA, 25 bp, Homo sapien
cggatgccgggggcctctcttgcca

SEQ ID NO: 421236 - DNA, 25 bp, Homo sapien
gcctctcttgccagaacagcggtca

SEQ ID NO: 421237 - DNA, 25 bp, Homo sapien
agtaacgagtggggcttttctctgt

SEQ ID NO: 421238 - DNA, 25 bp, Homo sapien
gtaacgagtggggcttttctctgta

SEQ ID NO: 421239 - DNA, 25 bp, Homo sapien
aagtaacgagtggggcttttctctg

SEQ ID NO: 421240 - DNA, 25 bp, Homo sapien
ggacttcatgggagcctgttgagct

SEQ ID NO: 421241 - DNA, 25 bp, Homo sapien
accattcacagggacgcccaacacg

SEQ ID NO: 421242 - DNA, 25 bp, Homo sapien
tggacttcatgggagcctgttgagc

SEQ ID NO: 421243 - DNA, 25 bp, Homo sapien
aacacgatgccctccgtgtcttcat

SEQ ID NO: 421244 - DNA, 25 bp, Homo sapien
tttccttgggctgaagaagcatcca

SEQ ID NO: 421245 - DNA, 25 bp, Homo sapien
tgtagtttcagactggaaccccagg

SEQ ID NO: 421246 - DNA, 25 bp, Homo sapien
tggtttcagaaacgccagcgccatc

SEQ ID NO: 421247 - DNA, 25 bp, Homo sapien
aaataggagcccaaagacttctgcg

SEQ ID NO: 421248 - DNA, 25 bp, Homo sapien
gcatcaatgaccaaacatgtataat

SEQ ID NO: 421249 - DNA, 25 bp, Homo sapien
caatgatgtcttcggtggttgcatc

SEQ ID NO: 421250 - DNA, 25 bp, Homo sapien
tcttcggtggttgcatcaatgacca

SEQ ID NO: 421251 - DNA, 25 bp, Homo sapien
actgcttctttgaacttgaggacat

SEQ ID NO: 421252 - DNA, 25 bp, Homo sapien
aggccctgtccaggttcgtggtgga

SEQ ID NO: 421253 - DNA, 25 bp, Homo sapien
acatttagtcccaagatctctttcc

SEQ ID NO: 421254 - DNA, 25 bp, Homo sapien
cctgtccaggttcgtggtggaagcc

SEQ ID NO: 421255 - DNA, 25 bp, Homo sapien
tccaggccctgtccaggttcgtggt

SEQ ID NO: 421256 - DNA, 25 bp, Homo sapien
caagacacgtctttgtcccagaggt

SEQ ID NO: 421257 - DNA, 25 bp, Homo sapien
gatgctgaccctttcatgggcatgg

SEQ ID NO: 421258 - DNA, 25 bp, Homo sapien
cctagaggtccttgaacagtctgag

SEQ ID NO: 421259 - DNA, 25 bp, Homo sapien
tctgagtgacaacacctgggctgcc

SEQ ID NO: 421260 - DNA, 25 bp, Homo sapien
gccgtgggattcgtgcccatctcct

SEQ ID NO: 421261 - DNA, 25 bp, Homo sapien
tgggccgtgggattcgtgcccatct

SEQ ID NO: 421262 - DNA, 25 bp, Homo sapien
gaaaagcttctgacgttggttcttc

SEQ ID NO: 421263 - DNA, 25 bp, Homo sapien
tgggcgggagttcctctggagccag

SEQ ID NO: 421264 - DNA, 25 bp, Homo sapien
ttcgagctgttctctgccctggctt

SEQ ID NO: 421265 - DNA, 25 bp, Homo sapien
gctttgctaccctgaggtctccagt

SEQ ID NO: 421266 - DNA, 25 bp, Homo sapien
tcgagctgttctctgccctggcttt

SEQ ID NO: 421267 - DNA, 25 bp, Homo sapien
tctgccctggctttgctaccctgag

SEQ ID NO: 421268 - DNA, 25 bp, Homo sapien
ccaacagccacaggtgatggatggg

SEQ ID NO: 421269 - DNA, 25 bp, Homo sapien
actgccaacagccacaggtgatgga

SEQ ID NO: 421270 - DNA, 25 bp, Homo sapien
tggggaccataatgtgagaggagaa

SEQ ID NO: 421271 - DNA, 25 bp, Homo sapien
ccataatgtgagaggagaattgtgt

SEQ ID NO: 421272 - DNA, 25 bp, Homo sapien
aatcagcatgaagggatatccaaag

SEQ ID NO: 421273 - DNA, 25 bp, Homo sapien
atcagcatgaagggatatccaaaga

SEQ ID NO: 421274 - DNA, 25 bp, Homo sapien
tcagcatgaagggatatccaaagac

SEQ ID NO: 421275 - DNA, 25 bp, Homo sapien
aaatcagcatgaagggatatccaaa

SEQ ID NO: 421276 - DNA, 25 bp, Homo sapien
gggatgggagagtgaagacccaagg

SEQ ID NO: 421277 - DNA, 25 bp, Homo sapien
gaaacccaaatcacatggggatggg

SEQ ID NO: 421278 - DNA, 25 bp, Homo sapien
tgtgcggcaagacctgctctgagct

SEQ ID NO: 421279 - DNA, 25 bp, Homo sapien
acccaagggagggatgtgcggcaag

SEQ ID NO: 421280 - DNA, 25 bp, Homo sapien
cctgtagacgaactctccttctggt

SEQ ID NO: 421281 - DNA, 25 bp, Homo sapien
cagacctgtagacgaactctccttc

SEQ ID NO: 421282 - DNA, 25 bp, Homo sapien
gacctgtagacgaactctccttctg

SEQ ID NO: 421283 - DNA, 25 bp, Homo sapien
ctctccttctggtgaggcagtgaac

SEQ ID NO: 421284 - DNA, 25 bp, Homo sapien
agcacgggaaggtggtggtgggttg

SEQ ID NO: 421285 - DNA, 25 bp, Homo sapien
gaaggtggtggtgggttgggtgcca

SEQ ID NO: 421286 - DNA, 25 bp, Homo sapien
ctgcaagcacgggaaggtggtggtg

SEQ ID NO: 421287 - DNA, 25 bp, Homo sapien
aaggtggtggtgggttgggtgccat

SEQ ID NO: 421288 - DNA, 25 bp, Homo sapien
ggcataggcaggtgcatgtcaggga

SEQ ID NO: 421289 - DNA, 25 bp, Homo sapien
cataggcaggtgcatgtcagggaga

SEQ ID NO: 421290 - DNA, 25 bp, Homo sapien
ctggtggtggcataggcaggtgcat

SEQ ID NO: 421291 - DNA, 25 bp, Homo sapien
ggtggcataggcaggtgcatgtcag

SEQ ID NO: 421292 - DNA, 25 bp, Homo sapien
ttctatgacccagtcccagaagtca

SEQ ID NO: 421293 - DNA, 25 bp, Homo sapien
gactgaggttacacgaaggcttgac

SEQ ID NO: 421294 - DNA, 25 bp, Homo sapien
taagatgttgaccaagactgaggtt

SEQ ID NO: 421295 - DNA, 25 bp, Homo sapien
ggtggatcaggcattcagaagcagc

SEQ ID NO: 421296 - DNA, 25 bp, Homo sapien
gttctccatcaaagcggcctggagt

SEQ ID NO: 421297 - DNA, 25 bp, Homo sapien
gcagcacgtatcctgtgttctccat

SEQ ID NO: 421298 - DNA, 25 bp, Homo sapien
ctgcagcacgtatcctgtgttctcc

SEQ ID NO: 421299 - DNA, 25 bp, Homo sapien
atcaaagcggcctggagtccgcctg

SEQ ID NO: 421300 - DNA, 25 bp, Homo sapien
caatgggtcactttggggcgctgca

SEQ ID NO: 421301 - DNA, 25 bp, Homo sapien
taattagtcacctcacgactttatt

SEQ ID NO: 421302 - DNA, 25 bp, Homo sapien
tattctctaattagtcacctcacga

SEQ ID NO: 421303 - DNA, 25 bp, Homo sapien
aatgagaagctaaataaactagctt

SEQ ID NO: 421304 - DNA, 25 bp, Homo sapien
agctgtagccatctctgctgcacct

SEQ ID NO: 421305 - DNA, 25 bp, Homo sapien
gctgtagccatctctgctgcacctg

SEQ ID NO: 421306 - DNA, 25 bp, Homo sapien
ggcccgaaagccaattgaagacaag

SEQ ID NO: 421307 - DNA, 25 bp, Homo sapien
gagtatacatcagggcaagccaaga

SEQ ID NO: 421308 - DNA, 25 bp, Homo sapien
cttgccagcaggagtaagattgtac

SEQ ID NO: 421309 - DNA, 25 bp, Homo sapien
gattttaccacatacaaggcccgaa

SEQ ID NO: 421310 - DNA, 25 bp, Homo sapien
catgagacagtcttgaagagagaac

SEQ ID NO: 421311 - DNA, 25 bp, Homo sapien
aagacttgctaataacctggactgg

SEQ ID NO: 421312 - DNA, 25 bp, Homo sapien
gaaggaactcagtattatcatgtta

SEQ ID NO: 421313 - DNA, 25 bp, Homo sapien
gagagaactgagtgattatccaagt

SEQ ID NO: 421314 - DNA, 25 bp, Homo sapien
taatcgtgtcctgccgacttcaaag

SEQ ID NO: 421315 - DNA, 25 bp, Homo sapien
tattttccctaaggagatacgggca

SEQ ID NO: 421316 - DNA, 25 bp, Homo sapien
caaaatgatggatggttgggctccg

SEQ ID NO: 421317 - DNA, 25 bp, Homo sapien
cagcacagaggtttggcaacttcac

SEQ ID NO: 421318 - DNA, 25 bp, Homo sapien
tcaagggatagccagcaacatcagg

SEQ ID NO: 421319 - DNA, 25 bp, Homo sapien
agatgtttcggctagcgccttcgca

SEQ ID NO: 421320 - DNA, 25 bp, Homo sapien
gatgcccagggaaactgactctaga

SEQ ID NO: 421321 - DNA, 25 bp, Homo sapien
gctgtctacctagtgagagctcctg

SEQ ID NO: 421322 - DNA, 25 bp, Homo sapien
gctatccatgacgctttatttgcca

SEQ ID NO: 421323 - DNA, 25 bp, Homo sapien
agctatccatgacgctttatttgcc

SEQ ID NO: 421324 - DNA, 25 bp, Homo sapien
tgatttgtgaccaggtgctgaacta

SEQ ID NO: 421325 - DNA, 25 bp, Homo sapien
cattccaggcataaatatggaggct

SEQ ID NO: 421326 - DNA, 25 bp, Homo sapien
ccaggtgctgaactagaatttctca

SEQ ID NO: 421327 - DNA, 25 bp, Homo sapien
gaatttctcaatgacaaccccagct

SEQ ID NO: 421328 - DNA, 25 bp, Homo sapien
gcctacccaaaatgcctgcgtgatt

SEQ ID NO: 421329 - DNA, 25 bp, Homo sapien
cacagcgttcgcgactcaaaggaaa

SEQ ID NO: 421330 - DNA, 25 bp, Homo sapien
tttggctggccgagatcaactcgta

SEQ ID NO: 421331 - DNA, 25 bp, Homo sapien
tctgatttgccatgctaggccaagc

SEQ ID NO: 421332 - DNA, 25 bp, Homo sapien
gatgggccacagtctctctcgtgtc

SEQ ID NO: 421333 - DNA, 25 bp, Homo sapien
catagtcccggtaatactgtaaagg

SEQ ID NO: 421334 - DNA, 25 bp, Homo sapien
tcttcacagtttgagaaagctgaca

SEQ ID NO: 421335 - DNA, 25 bp, Homo sapien
gctgacagctgtccatcaaacggaa

SEQ ID NO: 421336 - DNA, 25 bp, Homo sapien
aatgcacgctgatgggaaaagcctc

SEQ ID NO: 421337 - DNA, 25 bp, Homo sapien
ggtcagtccacagatgatatgtcca

SEQ ID NO: 421338 - DNA, 25 bp, Homo sapien
tctccgatagagtttgtggcgatgg

SEQ ID NO: 421339 - DNA, 25 bp, Homo sapien
tgtagtaagacttcagtaactccct

SEQ ID NO: 421340 - DNA, 25 bp, Homo sapien
agtagtaagtgcccagatgagaagg

SEQ ID NO: 421341 - DNA, 25 bp, Homo sapien
tagtagtaagtgcccagatgagaag

SEQ ID NO: 421342 - DNA, 25 bp, Homo sapien
attccagtatgggtttggggcagca

SEQ ID NO: 421343 - DNA, 25 bp, Homo sapien
tggtgaattccagtatgggtttggg

SEQ ID NO: 421344 - DNA, 25 bp, Homo sapien
ccagtatgggtttggggcagcaaaa

SEQ ID NO: 421345 - DNA, 25 bp, Homo sapien
tgaattccagtatgggtttggggca

SEQ ID NO: 421346 - DNA, 25 bp, Homo sapien
tcttctgtgggtgggcgtgatagga

SEQ ID NO: 421347 - DNA, 25 bp, Homo sapien
agggtggggcgccacaaagttcatc

SEQ ID NO: 421348 - DNA, 25 bp, Homo sapien
gggcgccacaaagttcatcttctgt

SEQ ID NO: 421349 - DNA, 25 bp, Homo sapien
ataggagcccatgtacgggaggtct

SEQ ID NO: 421350 - DNA, 25 bp, Homo sapien
tggaagtcgaacttgtaggcgtagc

SEQ ID NO: 421351 - DNA, 25 bp, Homo sapien
gatcccgtggaagtcgaacttgtag

SEQ ID NO: 421352 - DNA, 25 bp, Homo sapien
cttgtaggcgtagcgcttcccatgg

SEQ ID NO: 421353 - DNA, 25 bp, Homo sapien
ctgggcgatcccgtggaagtcgaac

SEQ ID NO: 421354 - DNA, 25 bp, Homo sapien
cgccgggccacctcgtcgggatccg

SEQ ID NO: 421355 - DNA, 25 bp, Homo sapien
cttgtcatagtagtaacggagggcg

SEQ ID NO: 421356 - DNA, 25 bp, Homo sapien
gggccacctcgtcgggatccgtcat

SEQ ID NO: 421357 - DNA, 25 bp, Homo sapien
cgggccacctcgtcgggatccgtca

SEQ ID NO: 421358 - DNA, 25 bp, Homo sapien
cagctggagttggagctgtccgaca

SEQ ID NO: 421359 - DNA, 25 bp, Homo sapien
gagttggagctgtccgacaggagct

SEQ ID NO: 421360 - DNA, 25 bp, Homo sapien
tggagctgtccgacaggagctccag

SEQ ID NO: 421361 - DNA, 25 bp, Homo sapien
gcagctggagttggagctgtccgac

SEQ ID NO: 421362 - DNA, 25 bp, Homo sapien
gaaaactccagtgagcacaggttcc

SEQ ID NO: 421363 - DNA, 25 bp, Homo sapien
aaaactccagtgagcacaggttcca

SEQ ID NO: 421364 - DNA, 25 bp, Homo sapien
ggaaaactccagtgagcacaggttc

SEQ ID NO: 421365 - DNA, 25 bp, Homo sapien
ggaacccgacctaggacgatgatct

SEQ ID NO: 421366 - DNA, 25 bp, Homo sapien
tcccgtgggattgggctgaaacagc

SEQ ID NO: 421367 - DNA, 25 bp, Homo sapien
cataacattttgctggcgctcagaa

SEQ ID NO: 421368 - DNA, 25 bp, Homo sapien
gaacatgccgttaatcagtcacctg

SEQ ID NO: 421369 - DNA, 25 bp, Homo sapien
taacggaaaccagtgccttgcctgt

SEQ ID NO: 421370 - DNA, 25 bp, Homo sapien
ccagtatttgggcaagcgcatcgta

SEQ ID NO: 421371 - DNA, 25 bp, Homo sapien
gcaacgccaattgtgttaagcagca

SEQ ID NO: 421372 - DNA, 25 bp, Homo sapien
gcctgtgtgctgcaacgccaattgt

SEQ ID NO: 421373 - DNA, 25 bp, Homo sapien
tattgacagcagtatccgtaccaag

SEQ ID NO: 421374 - DNA, 25 bp, Homo sapien
tcagaagcttaagaacagatgggag

SEQ ID NO: 421375 - DNA, 25 bp, Homo sapien
caatagcactgtgagaaaggtcagc

SEQ ID NO: 421376 - DNA, 25 bp, Homo sapien
ctccctagaagacagcagcatgtaa

SEQ ID NO: 421377 - DNA, 25 bp, Homo sapien
gacctgccgaaatcacacttggaat

SEQ ID NO: 421378 - DNA, 25 bp, Homo sapien
cccaaaggatggatgagctaatttc

SEQ ID NO: 421379 - DNA, 25 bp, Homo sapien
tgaaaaaattccgtatatgacctgg

SEQ ID NO: 421380 - DNA, 25 bp, Homo sapien
tctcttataaacgtgtgtaggacag

SEQ ID NO: 421381 - DNA, 25 bp, Homo sapien
ttaagaagacagaggcactccttta

SEQ ID NO: 421382 - DNA, 25 bp, Homo sapien
ggcaagcagcattgtccacctacag

SEQ ID NO: 421383 - DNA, 25 bp, Homo sapien
cggtttacaaaccacagagcaaagc

SEQ ID NO: 421384 - DNA, 25 bp, Homo sapien
tacagagaaccctgtgggtgaaagg

SEQ ID NO: 421385 - DNA, 25 bp, Homo sapien
agggcagtaaatacagccgtgaggg

SEQ ID NO: 421386 - DNA, 25 bp, Homo sapien
taaatacagccgtgaggggccccac

SEQ ID NO: 421387 - DNA, 25 bp, Homo sapien
agccctgcagccgtcagctgatgaa

SEQ ID NO: 421388 - DNA, 25 bp, Homo sapien
tgcaaagccctgcagccgtcagctg

SEQ ID NO: 421389 - DNA, 25 bp, Homo sapien
agaagatcccgtgtgcatggcctgg

SEQ ID NO: 421390 - DNA, 25 bp, Homo sapien
cagaagatcccgtgtgcatggcctg

SEQ ID NO: 421391 - DNA, 25 bp, Homo sapien
tggtctgtcgttctgcaagaggcag

SEQ ID NO: 421392 - DNA, 25 bp, Homo sapien
catgatatcagaatgcagggacaca

SEQ ID NO: 421393 - DNA, 25 bp, Homo sapien
gggaaaacatccctagcctggtctg

SEQ ID NO: 421394 - DNA, 25 bp, Homo sapien
gaagagtatccagttagcatcaagg

SEQ ID NO: 421395 - DNA, 25 bp, Homo sapien
tacttttcaaaataaccactgccaa

SEQ ID NO: 421396 - DNA, 25 bp, Homo sapien
cactgccaaaaagtaattttgtaag

SEQ ID NO: 421397 - DNA, 25 bp, Homo sapien
gtaagaagaaaatcatcagcagttt

SEQ ID NO: 421398 - DNA, 25 bp, Homo sapien
aagaaaatcatcagcagtttctcac

SEQ ID NO: 421399 - DNA, 25 bp, Homo sapien
ggcggctacttgttggtccaagaat

SEQ ID NO: 421400 - DNA, 25 bp, Homo sapien
cttgttggtccaagaatctgataag

SEQ ID NO: 421401 - DNA, 25 bp, Homo sapien
ctggatttgcaaggcggctacttgt

SEQ ID NO: 421402 - DNA, 25 bp, Homo sapien
tttgcaaggcggctacttgttggtc

SEQ ID NO: 421403 - DNA, 25 bp, Homo sapien
aggacgctggtcttcagttttgggc

SEQ ID NO: 421404 - DNA, 25 bp, Homo sapien
tgaggacgctggtcttcagttttgg

SEQ ID NO: 421405 - DNA, 25 bp, Homo sapien
ggacgctggtcttcagttttgggca

SEQ ID NO: 421406 - DNA, 25 bp, Homo sapien
ctgaggacgctggtcttcagttttg

SEQ ID NO: 421407 - DNA, 25 bp, Homo sapien
atccagaaatacaaaaggcaattag

SEQ ID NO: 421408 - DNA, 25 bp, Homo sapien
gaaaatccagaaatacaaaaggcaa

SEQ ID NO: 421409 - DNA, 25 bp, Homo sapien
aaatccagaaatacaaaaggcaatt

SEQ ID NO: 421410 - DNA, 25 bp, Homo sapien
ctgaaaatccagaaatacaaaaggc

SEQ ID NO: 421411 - DNA, 25 bp, Homo sapien
gtggccgtgaccggtccaggctgat

SEQ ID NO: 421412 - DNA, 25 bp, Homo sapien
gccgtgaccggtccaggctgatctc

SEQ ID NO: 421413 - DNA, 25 bp, Homo sapien
tctcctggggggctcatatggtaaa

SEQ ID NO: 421414 - DNA, 25 bp, Homo sapien
tcgactggggcgtggggtggccgtg

SEQ ID NO: 421415 - DNA, 25 bp, Homo sapien
ttcacttggagggtaggacaatgca

SEQ ID NO: 421416 - DNA, 25 bp, Homo sapien
tgatgcgcaacgtgaaagtcaacac

SEQ ID NO: 421417 - DNA, 25 bp, Homo sapien
tctctgggaacactctgcacatggg

SEQ ID NO: 421418 - DNA, 25 bp, Homo sapien
aggccatggccaaatatctcagcag

SEQ ID NO: 421419 - DNA, 25 bp, Homo sapien
catattgccgcggaagataagtggg

SEQ ID NO: 421420 - DNA, 25 bp, Homo sapien
ccaatgcttccttatcggctaccga

SEQ ID NO: 421421 - DNA, 25 bp, Homo sapien
catgctgtgggcactaagtatcccc

SEQ ID NO: 421422 - DNA, 25 bp, Homo sapien
tgggaaacattcaactcaggctcac

SEQ ID NO: 421423 - DNA, 25 bp, Homo sapien
tgtggatcgtggaagagctcatcct

SEQ ID NO: 421424 - DNA, 25 bp, Homo sapien
ttaaagggcaagaatgtggatcgtg

SEQ ID NO: 421425 - DNA, 25 bp, Homo sapien
tttaaagggcaagaatgtggatcgt

SEQ ID NO: 421426 - DNA, 25 bp, Homo sapien
caagaatgtggatcgtggaagagct

SEQ ID NO: 421427 - DNA, 25 bp, Homo sapien
tcccctgtgaggtcagtgaacggcc

SEQ ID NO: 421428 - DNA, 25 bp, Homo sapien
aaatactaggtacgggcatgcaagg

SEQ ID NO: 421429 - DNA, 25 bp, Homo sapien
ggattctggtcgtagtaactgcaac

SEQ ID NO: 421430 - DNA, 25 bp, Homo sapien
tcggccaattgtgcagggagactga

SEQ ID NO: 421431 - DNA, 25 bp, Homo sapien
tacacgtggtggatgtctttaggac

SEQ ID NO: 421432 - DNA, 25 bp, Homo sapien
gagaagagaaaattgccagcctgaa

SEQ ID NO: 421433 - DNA, 25 bp, Homo sapien
aatcttgcagactctaggcactggg

SEQ ID NO: 421434 - DNA, 25 bp, Homo sapien
ccagggcagtgtcagtatttgaaca

SEQ ID NO: 421435 - DNA, 25 bp, Homo sapien
tactgataatcggtcactgtgaatc

SEQ ID NO: 421436 - DNA, 25 bp, Homo sapien
taacaccacgcttggcactaatggg

SEQ ID NO: 421437 - DNA, 25 bp, Homo sapien
agtcggcctattcctaactgccagg

SEQ ID NO: 421438 - DNA, 25 bp, Homo sapien
gaggacaggcagtaagattcagatg

SEQ ID NO: 421439 - DNA, 25 bp, Homo sapien
ttagggcacggatctcagcaggaca

SEQ ID NO: 421440 - DNA, 25 bp, Homo sapien
ttagtctccaaatcaacagaggcag

SEQ ID NO: 421441 - DNA, 25 bp, Homo sapien
aataagactgtctgggactggcttc

SEQ ID NO: 421442 - DNA, 25 bp, Homo sapien
tctttgtatcacgtgacttagggca

SEQ ID NO: 421443 - DNA, 25 bp, Homo sapien
ctggcctagttgtaattctttgcgt

SEQ ID NO: 421444 - DNA, 25 bp, Homo sapien
ggatatactgaagtatttgggaaaa

SEQ ID NO: 421445 - DNA, 25 bp, Homo sapien
gtaattctttgcgtagcttcaggat

SEQ ID NO: 421446 - DNA, 25 bp, Homo sapien
gttgtaattctttgcgtagcttcag

SEQ ID NO: 421447 - DNA, 25 bp, Homo sapien
tccggagaaacagacaggtgcacct

SEQ ID NO: 421448 - DNA, 25 bp, Homo sapien
tcaaacctgccttaacagagctccg

SEQ ID NO: 421449 - DNA, 25 bp, Homo sapien
gcgccaaatctacttttccctatga

SEQ ID NO: 421450 - DNA, 25 bp, Homo sapien
tgtcgatctcaacatcagcgccaaa

SEQ ID NO: 421451 - DNA, 25 bp, Homo sapien
ctgtgtttctagcatgcattaaccg

SEQ ID NO: 421452 - DNA, 25 bp, Homo sapien
gttttgtaaggctttatcaacatca

SEQ ID NO: 421453 - DNA, 25 bp, Homo sapien
gcattaaccgtggagagttttgtaa

SEQ ID NO: 421454 - DNA, 25 bp, Homo sapien
tcatctgaagtcaaatgtggaagag

SEQ ID NO: 421455 - DNA, 25 bp, Homo sapien
ggcaggaggatgctgtcgacacacc

SEQ ID NO: 421456 - DNA, 25 bp, Homo sapien
gacacacctggttgaaccctctgaa

SEQ ID NO: 421457 - DNA, 25 bp, Homo sapien
tgggaactgggcgagggcaggagga

SEQ ID NO: 421458 - DNA, 25 bp, Homo sapien
tcggatccccagtgggaactgggcg

SEQ ID NO: 421459 - DNA, 25 bp, Homo sapien
caagatgttgacgtctggaaggcca

SEQ ID NO: 421460 - DNA, 25 bp, Homo sapien
gaagtcgtccttggtcatcttgcac

SEQ ID NO: 421461 - DNA, 25 bp, Homo sapien
gccactgccgcacatggtctgtact

SEQ ID NO: 421462 - DNA, 25 bp, Homo sapien
ccttcccatcgatgttctggaataa

SEQ ID NO: 421463 - DNA, 25 bp, Homo sapien
ggttggtgagtggtttttgcattcc

SEQ ID NO: 421464 - DNA, 25 bp, Homo sapien
gggttggtgagtggtttttgcattc

SEQ ID NO: 421465 - DNA, 25 bp, Homo sapien
tggtgagtggtttttgcattccaca

SEQ ID NO: 421466 - DNA, 25 bp, Homo sapien
gtggggttggtgagtggtttttgca

SEQ ID NO: 421467 - DNA, 25 bp, Homo sapien
ccacgtcgtcacactccagtgctac

SEQ ID NO: 421468 - DNA, 25 bp, Homo sapien
acaaacaccccacaggatgcaggcc

SEQ ID NO: 421469 - DNA, 25 bp, Homo sapien
ggcgagcacaaacaccccacaggat

SEQ ID NO: 421470 - DNA, 25 bp, Homo sapien
ggatgcaggccacgtcgtcacactc

SEQ ID NO: 421471 - DNA, 25 bp, Homo sapien
gttctgtgcagaggatagtttgttc

SEQ ID NO: 421472 - DNA, 25 bp, Homo sapien
gtttgttcagccctcacagagagaa

SEQ ID NO: 421473 - DNA, 25 bp, Homo sapien
cagaggatagtttgttcagccctca

SEQ ID NO: 421474 - DNA, 25 bp, Homo sapien
ctttggttctgtgcagaggatagtt

SEQ ID NO: 421475 - DNA, 25 bp, Homo sapien
tattgtctgaaagccactaggttcg

SEQ ID NO: 421476 - DNA, 25 bp, Homo sapien
tattatcccttggtgtgccccttaa

SEQ ID NO: 421477 - DNA, 25 bp, Homo sapien
ttaagggaatcaggtgcaagacccc

SEQ ID NO: 421478 - DNA, 25 bp, Homo sapien
gacaagggttatcctggcccattca

SEQ ID NO: 421479 - DNA, 25 bp, Homo sapien
tcccagacccactccggaggtgttg

SEQ ID NO: 421480 - DNA, 25 bp, Homo sapien
agtcctttgttccatgggtgtcatt

SEQ ID NO: 421481 - DNA, 25 bp, Homo sapien
caaaacatggccactcggtagaaga

SEQ ID NO: 421482 - DNA, 25 bp, Homo sapien
ggtgttgcaatagaggacagtttgc

SEQ ID NO: 421483 - DNA, 25 bp, Homo sapien
acctacatcatagggtggtcgcatg

SEQ ID NO: 421484 - DNA, 25 bp, Homo sapien
gtccaagtgcctgacaacagtgcat

SEQ ID NO: 421485 - DNA, 25 bp, Homo sapien
cagcacagcttaggaagaagaaccc

SEQ ID NO: 421486 - DNA, 25 bp, Homo sapien
ccagttgtgcaagtgttcccgggaa

SEQ ID NO: 421487 - DNA, 25 bp, Homo sapien
gggaagttgcgatctgccgagggca

SEQ ID NO: 421488 - DNA, 25 bp, Homo sapien
tctggacaaaggagatgtgatcaat

SEQ ID NO: 421489 - DNA, 25 bp, Homo sapien
agatgtgatcaatgccacaggtggg

SEQ ID NO: 421490 - DNA, 25 bp, Homo sapien
gctcccatttacaagccctgctctg

SEQ ID NO: 421491 - DNA, 25 bp, Homo sapien
atcccaacggtgtctgggctgccca

SEQ ID NO: 421492 - DNA, 25 bp, Homo sapien
tgctggcacgataactctgcgctcg

SEQ ID NO: 421493 - DNA, 25 bp, Homo sapien
ctccatgtagctgccgtagttcatc

SEQ ID NO: 421494 - DNA, 25 bp, Homo sapien
tgcgctcgttcgtggtcatgtttgg

SEQ ID NO: 421495 - DNA, 25 bp, Homo sapien
ccacactgcattcatcaggagagtt

SEQ ID NO: 421496 - DNA, 25 bp, Homo sapien
cttcccgcctttggccacactgcat

SEQ ID NO: 421497 - DNA, 25 bp, Homo sapien
cctttggccacactgcattcatcag

SEQ ID NO: 421498 - DNA, 25 bp, Homo sapien
ttggccacactgcattcatcaggag

SEQ ID NO: 421499 - DNA, 25 bp, Homo sapien
ttcttccattataacagcaatcaaa

SEQ ID NO: 421500 - DNA, 25 bp, Homo sapien
tctccatcgacttctcacaatacac

SEQ ID NO: 421501 - DNA, 25 bp, Homo sapien
tattcttccattataacagcaatca

SEQ ID NO: 421502 - DNA, 25 bp, Homo sapien
aatattcttccattataacagcaat

SEQ ID NO: 421503 - DNA, 25 bp, Homo sapien
cattagtcttgacagtcctatgcaa

SEQ ID NO: 421504 - DNA, 25 bp, Homo sapien
tgcaatatgtggcatcaacaagagt

SEQ ID NO: 421505 - DNA, 25 bp, Homo sapien
taaaaagccagccataacacctcac

SEQ ID NO: 421506 - DNA, 25 bp, Homo sapien
gaacaatagcccaatggctgggata

SEQ ID NO: 421507 - DNA, 25 bp, Homo sapien
gacgtgcccaatgaaactggcttgt

SEQ ID NO: 421508 - DNA, 25 bp, Homo sapien
gacacgttgctaagcccagttgggt

SEQ ID NO: 421509 - DNA, 25 bp, Homo sapien
tcttctagtaactggagacgtgccc

SEQ ID NO: 421510 - DNA, 25 bp, Homo sapien
gactgtctggaaaccacttggatga

SEQ ID NO: 421511 - DNA, 25 bp, Homo sapien
gcttgacaagcatggagcctcagcc

SEQ ID NO: 421512 - DNA, 25 bp, Homo sapien
tgtgaatgggcctcatttatccaag

SEQ ID NO: 421513 - DNA, 25 bp, Homo sapien
cccgcaatgaaatggcacagccgtg

SEQ ID NO: 421514 - DNA, 25 bp, Homo sapien
tccgtcatggaaagaacccgcaatg

SEQ ID NO: 421515 - DNA, 25 bp, Homo sapien
ccaaacagaaatgcaagctgcccat

SEQ ID NO: 421516 - DNA, 25 bp, Homo sapien
gctggtgaaatgtccccgaactctt

SEQ ID NO: 421517 - DNA, 25 bp, Homo sapien
ctggacacgactttccaaccccttg

SEQ ID NO: 421518 - DNA, 25 bp, Homo sapien
tgcaagctgcccatgtccaacctaa

SEQ ID NO: 421519 - DNA, 25 bp, Homo sapien
ctaggttctctacaagcctttcctg

SEQ ID NO: 421520 - DNA, 25 bp, Homo sapien
gggccgccagagaggaatgtctccc

SEQ ID NO: 421521 - DNA, 25 bp, Homo sapien
ttcctgggccgccagagaggaatgt

SEQ ID NO: 421522 - DNA, 25 bp, Homo sapien
ggttctctacaagcctttcctgggc

SEQ ID NO: 421523 - DNA, 25 bp, Homo sapien
ccctctcaatgcaggaaagacgttc

SEQ ID NO: 421524 - DNA, 25 bp, Homo sapien
gcagttggcacttggatttggtgca

SEQ ID NO: 421525 - DNA, 25 bp, Homo sapien
ctgacacgtggagagaaccttgcta

SEQ ID NO: 421526 - DNA, 25 bp, Homo sapien
ggtgcatcttgtcactgcttgtctg

SEQ ID NO: 421527 - DNA, 25 bp, Homo sapien
catttgtcaacttcgacactagtgc

SEQ ID NO: 421528 - DNA, 25 bp, Homo sapien
gtccatgatgcagattaaacactaa

SEQ ID NO: 421529 - DNA, 25 bp, Homo sapien
acactaaatacacgttggtttcctg

SEQ ID NO: 421530 - DNA, 25 bp, Homo sapien
taatccatctccatcgaagctaaca

SEQ ID NO: 421531 - DNA, 25 bp, Homo sapien
ggtgtttattagagagaagttcctg

SEQ ID NO: 421532 - DNA, 25 bp, Homo sapien
ttagagagaagttcctgtccccagt

SEQ ID NO: 421533 - DNA, 25 bp, Homo sapien
ctggtgtttattagagagaagttcc

SEQ ID NO: 421534 - DNA, 25 bp, Homo sapien
tattagagagaagttcctgtcccca

SEQ ID NO: 421535 - DNA, 25 bp, Homo sapien
aaacatggcaatggctccaggtggc

SEQ ID NO: 421536 - DNA, 25 bp, Homo sapien
cagaatcaaacatggcaatggctcc

SEQ ID NO: 421537 - DNA, 25 bp, Homo sapien
aatcaaacatggcaatggctccagg

SEQ ID NO: 421538 - DNA, 25 bp, Homo sapien
aacagaatcaaacatggcaatggct

SEQ ID NO: 421539 - DNA, 25 bp, Homo sapien
aggtgggcttcacgaaatcgccatc

SEQ ID NO: 421540 - DNA, 25 bp, Homo sapien
gtgggcttcacgaaatcgccatcgc

SEQ ID NO: 421541 - DNA, 25 bp, Homo sapien
agcatggcacataaattgactgagt

SEQ ID NO: 421542 - DNA, 25 bp, Homo sapien
gcacataaattgactgagttccacc

SEQ ID NO: 421543 - DNA, 25 bp, Homo sapien
tttagtttggccacacactgacagt

SEQ ID NO: 421544 - DNA, 25 bp, Homo sapien
ttttagtttggccacacactgacag

SEQ ID NO: 421545 - DNA, 25 bp, Homo sapien
gtttggccacacactgacagttctc

SEQ ID NO: 421546 - DNA, 25 bp, Homo sapien
tagtttggccacacactgacagttc

SEQ ID NO: 421547 - DNA, 25 bp, Homo sapien
gacttcaagtggcatgtgcactaca

SEQ ID NO: 421548 - DNA, 25 bp, Homo sapien
tgtgcactacaggaaagcccattat

SEQ ID NO: 421549 - DNA, 25 bp, Homo sapien
gtggcatgtgcactacaggaaagcc

SEQ ID NO: 421550 - DNA, 25 bp, Homo sapien
cactacaggaaagcccattatgcat

SEQ ID NO: 421551 - DNA, 25 bp, Homo sapien
tttcagatcactgagcttgagcagc

SEQ ID NO: 421552 - DNA, 25 bp, Homo sapien
acccgctgtccagtcaggctgagct

SEQ ID NO: 421553 - DNA, 25 bp, Homo sapien
agtgaacctctgacctgacacgcca

SEQ ID NO: 421554 - DNA, 25 bp, Homo sapien
ttgagcagccccctagtgaacctct

SEQ ID NO: 421555 - DNA, 25 bp, Homo sapien
aagtctgtccatagtcgctggagga

SEQ ID NO: 421556 - DNA, 25 bp, Homo sapien
acgcgtgggctcatcttggaagtct

SEQ ID NO: 421557 - DNA, 25 bp, Homo sapien
ggttgagacagccaatcctgctgag

SEQ ID NO: 421558 - DNA, 25 bp, Homo sapien
ttcacctggctagggttacattcca

SEQ ID NO: 421559 - DNA, 25 bp, Homo sapien
tggcgttccgtaggcacactcaaac

SEQ ID NO: 421560 - DNA, 25 bp, Homo sapien
aacaacgactggtcctcactcacaa

SEQ ID NO: 421561 - DNA, 25 bp, Homo sapien
gcgttccgtaggcacactcaaacaa

SEQ ID NO: 421562 - DNA, 25 bp, Homo sapien
actcaaacaacgactggtcctcact

SEQ ID NO: 421563 - DNA, 25 bp, Homo sapien
ctgcctacctgccggccaaggtagg

SEQ ID NO: 421564 - DNA, 25 bp, Homo sapien
ccttagttagcatgtatagattgtt

SEQ ID NO: 421565 - DNA, 25 bp, Homo sapien
gcagctgccttagttagcatgtata

SEQ ID NO: 421566 - DNA, 25 bp, Homo sapien
gtaggcagctgccttagttagcatg

SEQ ID NO: 421567 - DNA, 25 bp, Homo sapien
cagtctggctaagaggttcacacca

SEQ ID NO: 421568 - DNA, 25 bp, Homo sapien
gaaggagctccgtgaaaaatcggca

SEQ ID NO: 421569 - DNA, 25 bp, Homo sapien
gaaactcaggtgattcaaggcttga

SEQ ID NO: 421570 - DNA, 25 bp, Homo sapien
tttgaaacttacaagcccaggttga

SEQ ID NO: 421571 - DNA, 25 bp, Homo sapien
tcatgaagaataggccttccagcct

SEQ ID NO: 421572 - DNA, 25 bp, Homo sapien
gctgcacgaggaacaatgggaccaa

SEQ ID NO: 421573 - DNA, 25 bp, Homo sapien
ggtggtcctgagaaaacgcgaagga

SEQ ID NO: 421574 - DNA, 25 bp, Homo sapien
gccttggcaacagctagaacaaggc

SEQ ID NO: 421575 - DNA, 25 bp, Homo sapien
catgcagaaactctgggaactgaga

SEQ ID NO: 421576 - DNA, 25 bp, Homo sapien
gaaactctgggaactgagaatctgt

SEQ ID NO: 421577 - DNA, 25 bp, Homo sapien
cgggaacttccattcatcatcacat

SEQ ID NO: 421578 - DNA, 25 bp, Homo sapien
ttgtcccacatgcaacgggaacttc

SEQ ID NO: 421579 - DNA, 25 bp, Homo sapien
agggcagcctttagggaaactgact

SEQ ID NO: 421580 - DNA, 25 bp, Homo sapien
ctgaaaggaataacggcaccaaagt

SEQ ID NO: 421581 - DNA, 25 bp, Homo sapien
taacggcaccaaagtattcccctgc

SEQ ID NO: 421582 - DNA, 25 bp, Homo sapien
cttgtggcaactgaaaggaataacg

SEQ ID NO: 421583 - DNA, 25 bp, Homo sapien
tggaccggtgatgggtgtgaggctg

SEQ ID NO: 421584 - DNA, 25 bp, Homo sapien
ctgtggaccggtgatgggtgtgagg

SEQ ID NO: 421585 - DNA, 25 bp, Homo sapien
gtgaggctgtaggttttaacgagct

SEQ ID NO: 421586 - DNA, 25 bp, Homo sapien
ggtgtgaggctgtaggttttaacga

SEQ ID NO: 421587 - DNA, 25 bp, Homo sapien
aatggcaaatggcagacaatggtgt

SEQ ID NO: 421588 - DNA, 25 bp, Homo sapien
tgaatggcaaatggcagacaatggt

SEQ ID NO: 421589 - DNA, 25 bp, Homo sapien
ctgaatggcaaatggcagacaatgg

SEQ ID NO: 421590 - DNA, 25 bp, Homo sapien
atggcaaatggcagacaatggtgtc

SEQ ID NO: 421591 - DNA, 25 bp, Homo sapien
gatcagaggcagcttgagacactgg

SEQ ID NO: 421592 - DNA, 25 bp, Homo sapien
taaagcggaccaggaaatgagcagc

SEQ ID NO: 421593 - DNA, 25 bp, Homo sapien
caacctgttgccaagctaactgtgc

SEQ ID NO: 421594 - DNA, 25 bp, Homo sapien
tgaaccttcttgcaagtggcctgtc

SEQ ID NO: 421595 - DNA, 25 bp, Homo sapien
taagaagtcctgtcgtctaagcagc

SEQ ID NO: 421596 - DNA, 25 bp, Homo sapien
cagcaagggtgcatcaaagcaggat

SEQ ID NO: 421597 - DNA, 25 bp, Homo sapien
tgggatgccccgtccagagtttgac

SEQ ID NO: 421598 - DNA, 25 bp, Homo sapien
tccgaacactaggatgagcactggg

SEQ ID NO: 421599 - DNA, 25 bp, Homo sapien
gaacatgagtcaaagtcacatctat

SEQ ID NO: 421600 - DNA, 25 bp, Homo sapien
tgaccattaagatcaaaagtctgag

SEQ ID NO: 421601 - DNA, 25 bp, Homo sapien
gcacttgaccattaagatcaaaagt

SEQ ID NO: 421602 - DNA, 25 bp, Homo sapien
cttgaccattaagatcaaaagtctg

SEQ ID NO: 421603 - DNA, 25 bp, Homo sapien
ggggcaattcttgtcaactgtgcat

SEQ ID NO: 421604 - DNA, 25 bp, Homo sapien
tcttggaggggcaattcttgtcaac

SEQ ID NO: 421605 - DNA, 25 bp, Homo sapien
caatgagatcttggaggggcaattc

SEQ ID NO: 421606 - DNA, 25 bp, Homo sapien
cagcaatgagatcttggaggggcaa

SEQ ID NO: 421607 - DNA, 25 bp, Homo sapien
gaaatatttgcactgggctagactc

SEQ ID NO: 421608 - DNA, 25 bp, Homo sapien
cttccgacatttgcatgagtgatgc

SEQ ID NO: 421609 - DNA, 25 bp, Homo sapien
caagttgggccatgtgaaataccga

SEQ ID NO: 421610 - DNA, 25 bp, Homo sapien
gcatttgccgtaaccagtcgagtta

SEQ ID NO: 421611 - DNA, 25 bp, Homo sapien
tgtaaactcctttgcctgaccatgc

SEQ ID NO: 421612 - DNA, 25 bp, Homo sapien
gagtttatgccaagaattaagtgac

SEQ ID NO: 421613 - DNA, 25 bp, Homo sapien
aagtgtctagttcatattctaatgg

SEQ ID NO: 421614 - DNA, 25 bp, Homo sapien
taagtgactccctggttgcagtggc

SEQ ID NO: 421615 - DNA, 25 bp, Homo sapien
tataagtctacagtagtagatagtg

SEQ ID NO: 421616 - DNA, 25 bp, Homo sapien
gcctggccaatatacagtgtttata

SEQ ID NO: 421617 - DNA, 25 bp, Homo sapien
gtagatagtgatgtcctaggctttc

SEQ ID NO: 421618 - DNA, 25 bp, Homo sapien
cgcgcctggccaatatacagtgttt

SEQ ID NO: 421619 - DNA, 25 bp, Homo sapien
cacttatagcctgtagcctacgtgt

SEQ ID NO: 421620 - DNA, 25 bp, Homo sapien
cattgtgttaagtgtcacaattgcc

SEQ ID NO: 421621 - DNA, 25 bp, Homo sapien
ggcctctactgcattattactatac

SEQ ID NO: 421622 - DNA, 25 bp, Homo sapien
taggagcacaggctacacttatagc

SEQ ID NO: 421623 - DNA, 25 bp, Homo sapien
tacatcttttgtacactacagcacg

SEQ ID NO: 421624 - DNA, 25 bp, Homo sapien
gataagtaaccaataacagcccata

SEQ ID NO: 421625 - DNA, 25 bp, Homo sapien
taaatcgtaacaagttcagccctca

SEQ ID NO: 421626 - DNA, 25 bp, Homo sapien
ggacctgcggtctggatctgcttca

SEQ ID NO: 421627 - DNA, 25 bp, Homo sapien
gtcctgtagcatcacccaaatgtgg

SEQ ID NO: 421628 - DNA, 25 bp, Homo sapien
cctgtagcatcacccaaatgtggtt

SEQ ID NO: 421629 - DNA, 25 bp, Homo sapien
tagcatcacccaaatgtggttcagg

SEQ ID NO: 421630 - DNA, 25 bp, Homo sapien
tgtctgctgtctggtcctgtagcat

SEQ ID NO: 421631 - DNA, 25 bp, Homo sapien
gatcagggaagtcattttgcaaaga

SEQ ID NO: 421632 - DNA, 25 bp, Homo sapien
ggcagtcatcggcacttatggaata

SEQ ID NO: 421633 - DNA, 25 bp, Homo sapien
tgccttcttcccttcgcaatgcact

SEQ ID NO: 421634 - DNA, 25 bp, Homo sapien
ggctctgttagatactgccttcttc

SEQ ID NO: 421635 - DNA, 25 bp, Homo sapien
ttcgcaatgcactgtcccagacttc

SEQ ID NO: 421636 - DNA, 25 bp, Homo sapien
catcagtgcgtctctggttgggctg

SEQ ID NO: 421637 - DNA, 25 bp, Homo sapien
cacgcattcggagagaggaagtttc

SEQ ID NO: 421638 - DNA, 25 bp, Homo sapien
gagcaacaagcttattccccttgga

SEQ ID NO: 421639 - DNA, 25 bp, Homo sapien
gagataacgaataatggaccacgca

SEQ ID NO: 421640 - DNA, 25 bp, Homo sapien
ccgttgcacggaagataaggccaat

SEQ ID NO: 421641 - DNA, 25 bp, Homo sapien
ttttaaggatgccacgaagaaatac

SEQ ID NO: 421642 - DNA, 25 bp, Homo sapien
gaaatacagagtaccaagtgcctcc

SEQ ID NO: 421643 - DNA, 25 bp, Homo sapien
caaagataaaagtgggctgtgctct

SEQ ID NO: 421644 - DNA, 25 bp, Homo sapien
gaagttgatacttgggatgaggaaa

SEQ ID NO: 421645 - DNA, 25 bp, Homo sapien
tgcgtgttcattattgacgcccaag

SEQ ID NO: 421646 - DNA, 25 bp, Homo sapien
cagcagctgatctggaatctggaag

SEQ ID NO: 421647 - DNA, 25 bp, Homo sapien
ccaagacgagtgcaaggaagttgat

SEQ ID NO: 421648 - DNA, 25 bp, Homo sapien
ctgtgtgtggtacctgccctgctac

SEQ ID NO: 421649 - DNA, 25 bp, Homo sapien
tgtgtgtggtacctgccctgctaca

SEQ ID NO: 421650 - DNA, 25 bp, Homo sapien
gtgtgtggtacctgccctgctacac

SEQ ID NO: 421651 - DNA, 25 bp, Homo sapien
ctttaacaagcacccctgcaagctc

SEQ ID NO: 421652 - DNA, 25 bp, Homo sapien
gcacccctgcaagctccctcctcct

SEQ ID NO: 421653 - DNA, 25 bp, Homo sapien
ctgtggctgcccagacccagatgta

SEQ ID NO: 421654 - DNA, 25 bp, Homo sapien
taacaagcacccctgcaagctccct

SEQ ID NO: 421655 - DNA, 25 bp, Homo sapien
aaatgttgagacgagtgagtgcaga

SEQ ID NO: 421656 - DNA, 25 bp, Homo sapien
tgtgggaggccgcacatcagagcag

SEQ ID NO: 421657 - DNA, 25 bp, Homo sapien
tgaagctgggccgtgggaaatgttg

SEQ ID NO: 421658 - DNA, 25 bp, Homo sapien
tgggaggccgcacatcagagcagtc

SEQ ID NO: 421659 - DNA, 25 bp, Homo sapien
tccagggtcactgagtcagggtgcc

SEQ ID NO: 421660 - DNA, 25 bp, Homo sapien
ttctcaatcctgctttccagggtca

SEQ ID NO: 421661 - DNA, 25 bp, Homo sapien
gtcactgagtcagggtgcctggcat

SEQ ID NO: 421662 - DNA, 25 bp, Homo sapien
agatggagccattctcaatcctgct

SEQ ID NO: 421663 - DNA, 25 bp, Homo sapien
aactgtagtcaacagactcaggacc

SEQ ID NO: 421664 - DNA, 25 bp, Homo sapien
tcagagcatctgatacctaatcgac

SEQ ID NO: 421665 - DNA, 25 bp, Homo sapien
tcatagtgtctcatagggtcttaca

SEQ ID NO: 421666 - DNA, 25 bp, Homo sapien
taacttgggctttgcgctaacgtaa

SEQ ID NO: 421667 - DNA, 25 bp, Homo sapien
tgaaaatggcttggcccaattctgg

SEQ ID NO: 421668 - DNA, 25 bp, Homo sapien
tgagcactcagttctcagcgtggat

SEQ ID NO: 421669 - DNA, 25 bp, Homo sapien
cagcgtggatgtcccacaaatcaag

SEQ ID NO: 421670 - DNA, 25 bp, Homo sapien
caaatgtcacgaaggcatggtggcc

SEQ ID NO: 421671 - DNA, 25 bp, Homo sapien
cgagtatctcttcgcttccactggg

SEQ ID NO: 421672 - DNA, 25 bp, Homo sapien
tgtctgacattcacaaacgcatctt

SEQ ID NO: 421673 - DNA, 25 bp, Homo sapien
tcttttgctttgacccgacccttca

SEQ ID NO: 421674 - DNA, 25 bp, Homo sapien
cctgatgctaaggagccactgaaga

SEQ ID NO: 421675 - DNA, 25 bp, Homo sapien
cacacatccaggcaccgttagggat

SEQ ID NO: 421676 - DNA, 25 bp, Homo sapien
tccaaaagtaatccacagcactcaa

SEQ ID NO: 421677 - DNA, 25 bp, Homo sapien
gaaaattcagaagcgctccgaaaag

SEQ ID NO: 421678 - DNA, 25 bp, Homo sapien
tgaagtttttaagccttgcggatgg

SEQ ID NO: 421679 - DNA, 25 bp, Homo sapien
tgaggttgtttagagcggatgagat

SEQ ID NO: 421680 - DNA, 25 bp, Homo sapien
tgcgatcaagtttattgatcgttaa

SEQ ID NO: 421681 - DNA, 25 bp, Homo sapien
attgcttctctctgaccagaaagta

SEQ ID NO: 421682 - DNA, 25 bp, Homo sapien
ttctctctgaccagaaagtagtttt

SEQ ID NO: 421683 - DNA, 25 bp, Homo sapien
actccgcatggcttcacacgggctg

SEQ ID NO: 421684 - DNA, 25 bp, Homo sapien
cttcgcagcccaattcttcgcagaa

SEQ ID NO: 421685 - DNA, 25 bp, Homo sapien
cacgggctgcaagcaccttggagcc

SEQ ID NO: 421686 - DNA, 25 bp, Homo sapien
tactaggacagaggacttgagctcc

SEQ ID NO: 421687 - DNA, 25 bp, Homo sapien
caagttgcaatttccttaatactga

SEQ ID NO: 421688 - DNA, 25 bp, Homo sapien
taatactgaagcacacgtcagttca

SEQ ID NO: 421689 - DNA, 25 bp, Homo sapien
cacgtcagttcagttctataagctc

SEQ ID NO: 421690 - DNA, 25 bp, Homo sapien
tcaacttctcaacaccaagttgcaa

SEQ ID NO: 421691 - DNA, 25 bp, Homo sapien
tttgcaaggaggcagatgaaacggg

SEQ ID NO: 421692 - DNA, 25 bp, Homo sapien
tgccttgcagtcatctatcaattca

SEQ ID NO: 421693 - DNA, 25 bp, Homo sapien
gaagggataaccttgccttgcagtc

SEQ ID NO: 421694 - DNA, 25 bp, Homo sapien
tcacgtgtgaaatacttttgcaagg

SEQ ID NO: 421695 - DNA, 25 bp, Homo sapien
tcaggggcatccgaggaacagacac

SEQ ID NO: 421696 - DNA, 25 bp, Homo sapien
gcatccgaggaacagacacaagcca

SEQ ID NO: 421697 - DNA, 25 bp, Homo sapien
gggcatccgaggaacagacacaagc

SEQ ID NO: 421698 - DNA, 25 bp, Homo sapien
aagttcaggggcatccgaggaacag

SEQ ID NO: 421699 - DNA, 25 bp, Homo sapien
agccagagttttgaccgcagctgat

SEQ ID NO: 421700 - DNA, 25 bp, Homo sapien
ccctgaatgattcctgagcggatca

SEQ ID NO: 421701 - DNA, 25 bp, Homo sapien
gagcggatcaatttctcagccagag

SEQ ID NO: 421702 - DNA, 25 bp, Homo sapien
tgaacgctgaggaatgacgggttaa

SEQ ID NO: 421703 - DNA, 25 bp, Homo sapien
gaggaggcgttgattgcagttttct

SEQ ID NO: 421704 - DNA, 25 bp, Homo sapien
gaagaggaggcgttgattgcagttt

SEQ ID NO: 421705 - DNA, 25 bp, Homo sapien
ggaggcgttgattgcagttttctgc

SEQ ID NO: 421706 - DNA, 25 bp, Homo sapien
gaggcgttgattgcagttttctgcc

SEQ ID NO: 421707 - DNA, 25 bp, Homo sapien
tggaaagggcactgtggtacgtcta

SEQ ID NO: 421708 - DNA, 25 bp, Homo sapien
ttagctctgcctttgagcgcttggg

SEQ ID NO: 421709 - DNA, 25 bp, Homo sapien
caggaattcgtgtgctgcaaatttc

SEQ ID NO: 421710 - DNA, 25 bp, Homo sapien
tacacttgaccacaacttggagtgg

SEQ ID NO: 421711 - DNA, 25 bp, Homo sapien
tttagagtaacgaagccataaaatg

SEQ ID NO: 421712 - DNA, 25 bp, Homo sapien
ttagagtaacgaagccataaaatgt

SEQ ID NO: 421713 - DNA, 25 bp, Homo sapien
cccactcttgggatttctcaatagc

SEQ ID NO: 421714 - DNA, 25 bp, Homo sapien
actcttgggatttctcaatagcttc

SEQ ID NO: 421715 - DNA, 25 bp, Homo sapien
ccactcttgggatttctcaatagct

SEQ ID NO: 421716 - DNA, 25 bp, Homo sapien
ctcccactcttgggatttctcaata

SEQ ID NO: 421717 - DNA, 25 bp, Homo sapien
tcttgactcagaggtaaacgctccc

SEQ ID NO: 421718 - DNA, 25 bp, Homo sapien
aaatttaatccctgcatctgcgccc

SEQ ID NO: 421719 - DNA, 25 bp, Homo sapien
aatcctttagcaacgtagggttgat

SEQ ID NO: 421720 - DNA, 25 bp, Homo sapien
caacgtagggttgataattgctcct

SEQ ID NO: 421721 - DNA, 25 bp, Homo sapien
gcccctctcgctactgagggtgcgg

SEQ ID NO: 421722 - DNA, 25 bp, Homo sapien
ccgcaccctcagtagcgagaggggc

SEQ ID NO: 421723 - DNA, 25 bp, Homo sapien
ctttctctgtgacggatattttccc

SEQ ID NO: 421724 - DNA, 25 bp, Homo sapien
ccctttctctgtgacggatattttc

SEQ ID NO: 421725 - DNA, 25 bp, Homo sapien
cctttctctgtgacggatattttcc

SEQ ID NO: 421726 - DNA, 25 bp, Homo sapien
caagataggtgcaaagaaaaattca

SEQ ID NO: 421727 - DNA, 25 bp, Homo sapien
aactgcttcaagaggttgcagggac

SEQ ID NO: 421728 - DNA, 25 bp, Homo sapien
gagctcaaggagcaacacagtttct

SEQ ID NO: 421729 - DNA, 25 bp, Homo sapien
gcaacacagtttctagcaagatagg

SEQ ID NO: 421730 - DNA, 25 bp, Homo sapien
tgctcccaattgtaatcttttctga

SEQ ID NO: 421731 - DNA, 25 bp, Homo sapien
ctgttgctcccaattgtaatctttt

SEQ ID NO: 421732 - DNA, 25 bp, Homo sapien
gcccctttccaattactgtgtccat

SEQ ID NO: 421733 - DNA, 25 bp, Homo sapien
tctgattggtttatgcccctttcca

SEQ ID NO: 421734 - DNA, 25 bp, Homo sapien
tcgacatccctagagttaccacaat

SEQ ID NO: 421735 - DNA, 25 bp, Homo sapien
cttgggcaaaatttagaatcctcga

SEQ ID NO: 421736 - DNA, 25 bp, Homo sapien
tcaaattatagtgtccccataagca

SEQ ID NO: 421737 - DNA, 25 bp, Homo sapien
tagtgtccccataagcatctgctcc

SEQ ID NO: 421738 - DNA, 25 bp, Homo sapien
tgatggagcgctgagtgtcggcgag

SEQ ID NO: 421739 - DNA, 25 bp, Homo sapien
tgtcggcgagcccagataaaacaac

SEQ ID NO: 421740 - DNA, 25 bp, Homo sapien
gttccaacatcggaaatccaatcat

SEQ ID NO: 421741 - DNA, 25 bp, Homo sapien
acaacgttccaacatcggaaatcca

SEQ ID NO: 421742 - DNA, 25 bp, Homo sapien
tgagctgctgggtccgggacagtct

SEQ ID NO: 421743 - DNA, 25 bp, Homo sapien
ttgatatgagctgctgggtccggga

SEQ ID NO: 421744 - DNA, 25 bp, Homo sapien
atatgagctgctgggtccgggacag

SEQ ID NO: 421745 - DNA, 25 bp, Homo sapien
tgatatgagctgctgggtccgggac

SEQ ID NO: 421746 - DNA, 25 bp, Homo sapien
cacggctttcctcgggtctccaaag

SEQ ID NO: 421747 - DNA, 25 bp, Homo sapien
gctttcctcgggtctccaaagatcc

SEQ ID NO: 421748 - DNA, 25 bp, Homo sapien
tgcttttggtcaacacggctttcct

SEQ ID NO: 421749 - DNA, 25 bp, Homo sapien
tggtcaacacggctttcctcgggtc

SEQ ID NO: 421750 - DNA, 25 bp, Homo sapien
ccttttatccaggagagcttggctg

SEQ ID NO: 421751 - DNA, 25 bp, Homo sapien
tgtgtaggtaatctgagcagacacc

SEQ ID NO: 421752 - DNA, 25 bp, Homo sapien
cactgagactcttgtgtaggtaatc

SEQ ID NO: 421753 - DNA, 25 bp, Homo sapien
aagcactgagactcttgtgtaggta

SEQ ID NO: 421754 - DNA, 25 bp, Homo sapien
ctttctctatcctgcattttatctg

SEQ ID NO: 421755 - DNA, 25 bp, Homo sapien
ctgcattttatctgaagcattgtaa

SEQ ID NO: 421756 - DNA, 25 bp, Homo sapien
gcattttatctgaagcattgtaagt

SEQ ID NO: 421757 - DNA, 25 bp, Homo sapien
ctctatcctgcattttatctgaagc

SEQ ID NO: 421758 - DNA, 25 bp, Homo sapien
gaaatcatgacgttcttttcctttg

SEQ ID NO: 421759 - DNA, 25 bp, Homo sapien
caggtaacgcctgcagactggtgct

SEQ ID NO: 421760 - DNA, 25 bp, Homo sapien
aaagcagtccttatagaaatcatga

SEQ ID NO: 421761 - DNA, 25 bp, Homo sapien
tcctttgtttgcagtaggttgttca

SEQ ID NO: 421762 - DNA, 25 bp, Homo sapien
ttacacccactgatcttccaagttc

SEQ ID NO: 421763 - DNA, 25 bp, Homo sapien
acgcccctctcgctactgagggtgc

SEQ ID NO: 421764 - DNA, 25 bp, Homo sapien
gcaccctcagtagcgagaggggcgt

SEQ ID NO: 421765 - DNA, 25 bp, Homo sapien
atcattggtcaaaggtattgggtca

SEQ ID NO: 421766 - DNA, 25 bp, Homo sapien
gcatcattggtcaaaggtattgggt

SEQ ID NO: 421767 - DNA, 25 bp, Homo sapien
accagcaccactcctgatcccccag

SEQ ID NO: 421768 - DNA, 25 bp, Homo sapien
tccagcccaggtaaaccattcagca

SEQ ID NO: 421769 - DNA, 25 bp, Homo sapien
aagctgcaaagaggattccgcccca

SEQ ID NO: 421770 - DNA, 25 bp, Homo sapien
ctgcacctgtctgttgccattttca

SEQ ID NO: 421771 - DNA, 25 bp, Homo sapien
gcagggccactggaaaatttcctca

SEQ ID NO: 421772 - DNA, 25 bp, Homo sapien
gccccaccgggaatgcatcggtctg

SEQ ID NO: 421773 - DNA, 25 bp, Homo sapien
tataaagattgcaccgtgctcatcg

SEQ ID NO: 421774 - DNA, 25 bp, Homo sapien
ttataaagattgcaccgtgctcatc

SEQ ID NO: 421775 - DNA, 25 bp, Homo sapien
taacgacgacacttcagaactgtga

SEQ ID NO: 421776 - DNA, 25 bp, Homo sapien
tgcagcctgatttcattggactcgc

SEQ ID NO: 421777 - DNA, 25 bp, Homo sapien
tttagtccctgggtgtgttgactgc

SEQ ID NO: 421778 - DNA, 25 bp, Homo sapien
tgcaggagaaacctcactaacgacg

SEQ ID NO: 421779 - DNA, 25 bp, Homo sapien
tgttttggcatcaccgagggctgcg

SEQ ID NO: 421780 - DNA, 25 bp, Homo sapien
gagccacacccatgagctgatgacg

SEQ ID NO: 421781 - DNA, 25 bp, Homo sapien
aaaggtctcccttgatgatgtggca

SEQ ID NO: 421782 - DNA, 25 bp, Homo sapien
gacgtagcgtttctctcaaaggtct

SEQ ID NO: 421783 - DNA, 25 bp, Homo sapien
tggacaccaacccttccctgcgagc

SEQ ID NO: 421784 - DNA, 25 bp, Homo sapien
agcacagaggcacctggacaccaac

SEQ ID NO: 421785 - DNA, 25 bp, Homo sapien
ccaagcacagaggcacctggacacc

SEQ ID NO: 421786 - DNA, 25 bp, Homo sapien
accaacccttccctgcgagccacat

SEQ ID NO: 421787 - DNA, 25 bp, Homo sapien
gtgatgagaaaccactgcccctgca

SEQ ID NO: 421788 - DNA, 25 bp, Homo sapien
tgcagaggccccagcagcaggcaag

SEQ ID NO: 421789 - DNA, 25 bp, Homo sapien
tgcccctgcagaggccccagcagca

SEQ ID NO: 421790 - DNA, 25 bp, Homo sapien
cccctgcagaggccccagcagcagg

SEQ ID NO: 421791 - DNA, 25 bp, Homo sapien
aagtgaaaacggttgcgacactaag

SEQ ID NO: 421792 - DNA, 25 bp, Homo sapien
acgtcgcgcagagcgtccggaggga

SEQ ID NO: 421793 - DNA, 25 bp, Homo sapien
aaaatgaccgcggactgccctcgat

SEQ ID NO: 421794 - DNA, 25 bp, Homo sapien
ctgatgagaactgggacgacgtcgc

SEQ ID NO: 421795 - DNA, 25 bp, Homo sapien
gaggagccggatacagccgccggga

SEQ ID NO: 421796 - DNA, 25 bp, Homo sapien
tccagaagttttcgtttctacgcga

SEQ ID NO: 421797 - DNA, 25 bp, Homo sapien
acagccgcccttgggagacgacggc

SEQ ID NO: 421798 - DNA, 25 bp, Homo sapien
agacgacggcgtctgcaaccagcag

SEQ ID NO: 421799 - DNA, 25 bp, Homo sapien
cgcgaattccgaccgcaaaatccag

SEQ ID NO: 421800 - DNA, 25 bp, Homo sapien
ctgagcgccgctcctcttctctcat

SEQ ID NO: 421801 - DNA, 25 bp, Homo sapien
atctctaggaacctgtcccgcagcg

SEQ ID NO: 421802 - DNA, 25 bp, Homo sapien
acgaccgtcccggagcgatctctag

SEQ ID NO: 421803 - DNA, 25 bp, Homo sapien
cgatctcttgcacactctccccatt

SEQ ID NO: 421804 - DNA, 25 bp, Homo sapien
gaacctgtcccgcagcgatctcttg

SEQ ID NO: 421805 - DNA, 25 bp, Homo sapien
tgaagcaaagcccttagctcccaga

SEQ ID NO: 421806 - DNA, 25 bp, Homo sapien
tctgctccatgaagcaaagccctta

SEQ ID NO: 421807 - DNA, 25 bp, Homo sapien
ccttagctcccagacattccaaaaa

SEQ ID NO: 421808 - DNA, 25 bp, Homo sapien
tcttgcttcagaattctgctccatg

SEQ ID NO: 421809 - DNA, 25 bp, Homo sapien
gggacaagctttgatgtccgcctac

SEQ ID NO: 421810 - DNA, 25 bp, Homo sapien
caccagggacaagctttgatgtccg

SEQ ID NO: 421811 - DNA, 25 bp, Homo sapien
ccagggacaagctttgatgtccgcc

SEQ ID NO: 421812 - DNA, 25 bp, Homo sapien
caagctttgatgtccgcctacctgc

SEQ ID NO: 421813 - DNA, 25 bp, Homo sapien
ggaggaagctcagattgactaaaac

SEQ ID NO: 421814 - DNA, 25 bp, Homo sapien
caggtctggtaataaagctaacatt

SEQ ID NO: 421815 - DNA, 25 bp, Homo sapien
tttttcctgctaaccagcaggtggg

SEQ ID NO: 421816 - DNA, 25 bp, Homo sapien
gattgactaaaacaatgactctttc

SEQ ID NO: 421817 - DNA, 25 bp, Homo sapien
ctagatcccactggtccacctctct

SEQ ID NO: 421818 - DNA, 25 bp, Homo sapien
tgcagtggaccattcactcacatac

SEQ ID NO: 421819 - DNA, 25 bp, Homo sapien
cactcacatactgacaggttcttgg

SEQ ID NO: 421820 - DNA, 25 bp, Homo sapien
acctctctgagttcacccacagttg

SEQ ID NO: 421821 - DNA, 25 bp, Homo sapien
gcaggcgtggttggcgcggagcgcg

SEQ ID NO: 421822 - DNA, 25 bp, Homo sapien
cgcgctccgcgccaaccacgcctgc

SEQ ID NO: 421823 - DNA, 25 bp, Homo sapien
ctttaatgtcagcttcagacgacac

SEQ ID NO: 421824 - DNA, 25 bp, Homo sapien
gaaacgcctggacaatctttaatgt

SEQ ID NO: 421825 - DNA, 25 bp, Homo sapien
gacacgtgtcttatgaaagtctggg

SEQ ID NO: 421826 - DNA, 25 bp, Homo sapien
ccgccgaaacgcctggacaatcttt

SEQ ID NO: 421827 - DNA, 25 bp, Homo sapien
gacagggtggcagctatccttgcac

SEQ ID NO: 421828 - DNA, 25 bp, Homo sapien
gaataacttgctccatggtaccagg

SEQ ID NO: 421829 - DNA, 25 bp, Homo sapien
aaccttggcattgcttgtgggcagc

SEQ ID NO: 421830 - DNA, 25 bp, Homo sapien
gcagagtcctcagcaaaccttggca

SEQ ID NO: 421831 - DNA, 25 bp, Homo sapien
tttaatgtaagatgttcttgaaggc

SEQ ID NO: 421832 - DNA, 25 bp, Homo sapien
cgtaactcagtgtgactggctttaa

SEQ ID NO: 421833 - DNA, 25 bp, Homo sapien
ggctttaatgtaagatgttcttgaa

SEQ ID NO: 421834 - DNA, 25 bp, Homo sapien
ctcagtgtgactggctttaatgtaa

SEQ ID NO: 421835 - DNA, 25 bp, Homo sapien
cacaggtcgttccagttttggccag

SEQ ID NO: 421836 - DNA, 25 bp, Homo sapien
tcatgaaacggtcactggatgcact

SEQ ID NO: 421837 - DNA, 25 bp, Homo sapien
cctgctaggcgaatgggtactgctg

SEQ ID NO: 421838 - DNA, 25 bp, Homo sapien
tggcgctcgaggcaaacggtgtcat

SEQ ID NO: 421839 - DNA, 25 bp, Homo sapien
tactaatctattctaatccactggg

SEQ ID NO: 421840 - DNA, 25 bp, Homo sapien
aattcccgtgtgtcaagggcaggtg

SEQ ID NO: 421841 - DNA, 25 bp, Homo sapien
ctggaacgtccaagacggaggtgct

SEQ ID NO: 421842 - DNA, 25 bp, Homo sapien
tttggtgtccagtaagggctcctct

SEQ ID NO: 421843 - DNA, 25 bp, Homo sapien
gaacaagtaaactccccacagctct

SEQ ID NO: 421844 - DNA, 25 bp, Homo sapien
ttagtcttcatgcagcccaatatag

SEQ ID NO: 421845 - DNA, 25 bp, Homo sapien
tggtaagtgaggtagccaagattct

SEQ ID NO: 421846 - DNA, 25 bp, Homo sapien
tcgcagaggccattttacttaggtg

SEQ ID NO: 421847 - DNA, 25 bp, Homo sapien
gaaactgtaggtatattgtaaacta

SEQ ID NO: 421848 - DNA, 25 bp, Homo sapien
tgcacacgatgatctgcccaggaaa

SEQ ID NO: 421849 - DNA, 25 bp, Homo sapien
ggtctgcacacgatgatctgcccag

SEQ ID NO: 421850 - DNA, 25 bp, Homo sapien
tgcagccggtctgcacacgatgatc

SEQ ID NO: 421851 - DNA, 25 bp, Homo sapien
caacatgtctaagaacaagttctta

SEQ ID NO: 421852 - DNA, 25 bp, Homo sapien
caagtttgagcacaacatgtctaag

SEQ ID NO: 421853 - DNA, 25 bp, Homo sapien
tgatgccacaagtttgagcacaaca

SEQ ID NO: 421854 - DNA, 25 bp, Homo sapien
gttcttaggagatgcgcctgggccc

SEQ ID NO: 421855 - DNA, 25 bp, Homo sapien
ctccactccatcaggcctctaattc

SEQ ID NO: 421856 - DNA, 25 bp, Homo sapien
caaggagctccatggtcctgaccca

SEQ ID NO: 421857 - DNA, 25 bp, Homo sapien
gaggaaagctctccactccatcagg

SEQ ID NO: 421858 - DNA, 25 bp, Homo sapien
aggagctccatggtcctgacccagg

SEQ ID NO: 421859 - DNA, 25 bp, Homo sapien
gctgggttgtactcagaagcatctc

SEQ ID NO: 421860 - DNA, 25 bp, Homo sapien
aagctgccttcctccaacaaatgtg

SEQ ID NO: 421861 - DNA, 25 bp, Homo sapien
tccctgaaggatggtggtatgagtc

SEQ ID NO: 421862 - DNA, 25 bp, Homo sapien
tagaataatggaatgtcgggagccc

SEQ ID NO: 421863 - DNA, 25 bp, Homo sapien
ttgggttcttcagcagcttcttaaa

SEQ ID NO: 421864 - DNA, 25 bp, Homo sapien
cttcctcttgggttcttcagcagct

SEQ ID NO: 421865 - DNA, 25 bp, Homo sapien
gttcttcagcagcttcttaaagtcc

SEQ ID NO: 421866 - DNA, 25 bp, Homo sapien
gggttcttcagcagcttcttaaagt

SEQ ID NO: 421867 - DNA, 25 bp, Homo sapien
tgcaaacttcgcaaagacctgaaca

SEQ ID NO: 421868 - DNA, 25 bp, Homo sapien
caactgaggcagctaagtgttcggg

SEQ ID NO: 421869 - DNA, 25 bp, Homo sapien
caaagacctgaacaactgaggcagc

SEQ ID NO: 421870 - DNA, 25 bp, Homo sapien
ctgaggcagctaagtgttcgggcat

SEQ ID NO: 421871 - DNA, 25 bp, Homo sapien
tagctcctatgtagatggtcccaga

SEQ ID NO: 421872 - DNA, 25 bp, Homo sapien
tacaatccaaagagcgcaggtagac

SEQ ID NO: 421873 - DNA, 25 bp, Homo sapien
actgcacggagtatctatgaggccc

SEQ ID NO: 421874 - DNA, 25 bp, Homo sapien
tggaccctgggatacagctgcaaac

SEQ ID NO: 421875 - DNA, 25 bp, Homo sapien
tcctgacagccagggttaatatttt

SEQ ID NO: 421876 - DNA, 25 bp, Homo sapien
agggaggcatccacccgagaatctc

SEQ ID NO: 421877 - DNA, 25 bp, Homo sapien
ttgcctcatgtaaacagggaggcat

SEQ ID NO: 421878 - DNA, 25 bp, Homo sapien
atgtaaacagggaggcatccacccg

SEQ ID NO: 421879 - DNA, 25 bp, Homo sapien
agggctgtgttgctccagttcccac

SEQ ID NO: 421880 - DNA, 25 bp, Homo sapien
tcagcccacataagctctgcagaga

SEQ ID NO: 421881 - DNA, 25 bp, Homo sapien
cagcccacataagctctgcagagag

SEQ ID NO: 421882 - DNA, 25 bp, Homo sapien
agagagggctgtgttgctccagttc

SEQ ID NO: 421883 - DNA, 25 bp, Homo sapien
gccacgacgttggatatgaacaacc

SEQ ID NO: 421884 - DNA, 25 bp, Homo sapien
ggaatagcgcctctccatccagttc

SEQ ID NO: 421885 - DNA, 25 bp, Homo sapien
gattcttgggatgaaagccacgacg

SEQ ID NO: 421886 - DNA, 25 bp, Homo sapien
ttcctccaccttagcggaatagcgc

SEQ ID NO: 421887 - DNA, 25 bp, Homo sapien
tatctctcaggtatagtctccgcag

SEQ ID NO: 421888 - DNA, 25 bp, Homo sapien
tagaaatcagccctggactagaacc

SEQ ID NO: 421889 - DNA, 25 bp, Homo sapien
gagaagcgctctacacgtggcgaca

SEQ ID NO: 421890 - DNA, 25 bp, Homo sapien
gacggtcccatgagagaagcagaca

SEQ ID NO: 421891 - DNA, 25 bp, Homo sapien
cgccaggggtgggtacgctttctcg

SEQ ID NO: 421892 - DNA, 25 bp, Homo sapien
caggggtgggtacgctttctcggag

SEQ ID NO: 421893 - DNA, 25 bp, Homo sapien
tctggaaatagggactgcatgacca

SEQ ID NO: 421894 - DNA, 25 bp, Homo sapien
tgcatgaccaatctgtgcctgtgcc

SEQ ID NO: 421895 - DNA, 25 bp, Homo sapien
tacagtgggccactaattcccaagg

SEQ ID NO: 421896 - DNA, 25 bp, Homo sapien
ggcacacaatggacaatttcggaaa

SEQ ID NO: 421897 - DNA, 25 bp, Homo sapien
taagactctgctaacgtggcttttg

SEQ ID NO: 421898 - DNA, 25 bp, Homo sapien
aacaatgcatcaaatggaggtctga

SEQ ID NO: 421899 - DNA, 25 bp, Homo sapien
tggttctgggaacttacagctttaa

SEQ ID NO: 421900 - DNA, 25 bp, Homo sapien
tacagctttaataagatcaaacaat

SEQ ID NO: 421901 - DNA, 25 bp, Homo sapien
ctatttcgatgaaagttcttcggat

SEQ ID NO: 421902 - DNA, 25 bp, Homo sapien
atttcgatgaaagttcttcggattc

SEQ ID NO: 421903 - DNA, 25 bp, Homo sapien
tttcgatgaaagttcttcggattct

SEQ ID NO: 421904 - DNA, 25 bp, Homo sapien
tatttcgatgaaagttcttcggatt

SEQ ID NO: 421905 - DNA, 25 bp, Homo sapien
tttcacatttgttacctccagcagg

SEQ ID NO: 421906 - DNA, 25 bp, Homo sapien
ccagcaggtccttagtggtcagcca

SEQ ID NO: 421907 - DNA, 25 bp, Homo sapien
ctccagcaggtccttagtggtcagc

SEQ ID NO: 421908 - DNA, 25 bp, Homo sapien
tggtcagccagtccttggctgcttt

SEQ ID NO: 421909 - DNA, 25 bp, Homo sapien
ccttataagggaaaatgactgtgtc

SEQ ID NO: 421910 - DNA, 25 bp, Homo sapien
gacttgcctaaagcacgtcactgtg

SEQ ID NO: 421911 - DNA, 25 bp, Homo sapien
gaaataggcatttgaccctgggcaa

SEQ ID NO: 421912 - DNA, 25 bp, Homo sapien
ttttacagaatacaacgggtcgcta

SEQ ID NO: 421913 - DNA, 25 bp, Homo sapien
ccttattctgtagaggaggcccaag

SEQ ID NO: 421914 - DNA, 25 bp, Homo sapien
catttgccatagtcttaaggacgta

SEQ ID NO: 421915 - DNA, 25 bp, Homo sapien
cagccctgcaaagaggaaatatggc

SEQ ID NO: 421916 - DNA, 25 bp, Homo sapien
cactgtcgggaaccggtggtcttca

SEQ ID NO: 421917 - DNA, 25 bp, Homo sapien
tgtaaagtgggagccgcaagtcctc

SEQ ID NO: 421918 - DNA, 25 bp, Homo sapien
gactgtgactcatgccacggtgata

SEQ ID NO: 421919 - DNA, 25 bp, Homo sapien
taatctgggcctgaatatacactga

SEQ ID NO: 421920 - DNA, 25 bp, Homo sapien
aatattgagcatgtgacctgagtcc

SEQ ID NO: 421921 - DNA, 25 bp, Homo sapien
ttctccccatcctgcctacctccct

SEQ ID NO: 421922 - DNA, 25 bp, Homo sapien
tcctcccgcttctccccatcctgcc

SEQ ID NO: 421923 - DNA, 25 bp, Homo sapien
ccgcttctccccatcctgcctacct

SEQ ID NO: 421924 - DNA, 25 bp, Homo sapien
gcttctccccatcctgcctacctcc

SEQ ID NO: 421925 - DNA, 25 bp, Homo sapien
caataagggtactgttgtcaggcaa

SEQ ID NO: 421926 - DNA, 25 bp, Homo sapien
ggtttaaaagcagcgatccatcagc

SEQ ID NO: 421927 - DNA, 25 bp, Homo sapien
tgtgtgtctgcctgaaaccatttag

SEQ ID NO: 421928 - DNA, 25 bp, Homo sapien
caagcagtctgcaagcctaaggaag

SEQ ID NO: 421929 - DNA, 25 bp, Homo sapien
ggttaagctgattgtgtccagagca

SEQ ID NO: 421930 - DNA, 25 bp, Homo sapien
tgggtgtgtgctttcttacagcctg

SEQ ID NO: 421931 - DNA, 25 bp, Homo sapien
ctcacctaagctggccatggaaatg

SEQ ID NO: 421932 - DNA, 25 bp, Homo sapien
tgtacccacccaagcactcacctaa

SEQ ID NO: 421933 - DNA, 25 bp, Homo sapien
gccagccagcaagtgactttttctg

SEQ ID NO: 421934 - DNA, 25 bp, Homo sapien
gaattcagtgaggaatcagcattat

SEQ ID NO: 421935 - DNA, 25 bp, Homo sapien
tctgtgacatctaagtggaattcag

SEQ ID NO: 421936 - DNA, 25 bp, Homo sapien
ctgaaacagcatatcccattgtgat

SEQ ID NO: 421937 - DNA, 25 bp, Homo sapien
cagaaaactggttgtagccctagct

SEQ ID NO: 421938 - DNA, 25 bp, Homo sapien
cagcgcccgtggaattgtaggtagc

SEQ ID NO: 421939 - DNA, 25 bp, Homo sapien
tccacgatatgaaaccaaaggcctt

SEQ ID NO: 421940 - DNA, 25 bp, Homo sapien
tactggctcagagaacaagcaggcc

SEQ ID NO: 421941 - DNA, 25 bp, Homo sapien
tcagtgtccacagcaagatgacgtg

SEQ ID NO: 421942 - DNA, 25 bp, Homo sapien
tcttgctgccaaaagaatcctaggc

SEQ ID NO: 421943 - DNA, 25 bp, Homo sapien
gatttaatctgccaagggccgacta

SEQ ID NO: 421944 - DNA, 25 bp, Homo sapien
tgaaaatggtcgagaaagaggcacc

SEQ ID NO: 421945 - DNA, 25 bp, Homo sapien
tgtacacaagtggttctcccgcctt

SEQ ID NO: 421946 - DNA, 25 bp, Homo sapien
taacatgctcatagggctagatcct

SEQ ID NO: 421947 - DNA, 25 bp, Homo sapien
tacgaccaccagtgcacttagtgat

SEQ ID NO: 421948 - DNA, 25 bp, Homo sapien
tcatagccatgagattacgaccacc

SEQ ID NO: 421949 - DNA, 25 bp, Homo sapien
taatgacgcaacagctgcagcacct

SEQ ID NO: 421950 - DNA, 25 bp, Homo sapien
gaggtctaatgacgcaacagctgca

SEQ ID NO: 421951 - DNA, 25 bp, Homo sapien
ggtctaatgacgcaacagctgcagc

SEQ ID NO: 421952 - DNA, 25 bp, Homo sapien
tcagaggtctaatgacgcaacagct

SEQ ID NO: 421953 - DNA, 25 bp, Homo sapien
tgagtctcggtctgccagagggatt

SEQ ID NO: 421954 - DNA, 25 bp, Homo sapien
taaagggaccatgagcgagttgctc

SEQ ID NO: 421955 - DNA, 25 bp, Homo sapien
tcccagaggatgaacaagaggctgt

SEQ ID NO: 421956 - DNA, 25 bp, Homo sapien
ggccttggcggacagttctctaatt

SEQ ID NO: 421957 - DNA, 25 bp, Homo sapien
tgtctctccagccgctctgaagctg

SEQ ID NO: 421958 - DNA, 25 bp, Homo sapien
agggtcccgagtaggcagttgtggt

SEQ ID NO: 421959 - DNA, 25 bp, Homo sapien
ggctgctcgtccccaaatgtctctc

SEQ ID NO: 421960 - DNA, 25 bp, Homo sapien
atgtctctccagccgctctgaagct

SEQ ID NO: 421961 - DNA, 25 bp, Homo sapien
ctgagatcatgagatgagccccggg

SEQ ID NO: 421962 - DNA, 25 bp, Homo sapien
tgagatcatgagatgagccccgggg

SEQ ID NO: 421963 - DNA, 25 bp, Homo sapien
ctggaggactttgagataagacttc

SEQ ID NO: 421964 - DNA, 25 bp, Homo sapien
caatgaatggagacactaggacacc

SEQ ID NO: 421965 - DNA, 25 bp, Homo sapien
agagtgttccagtgcactaggagcc

SEQ ID NO: 421966 - DNA, 25 bp, Homo sapien
cggcatctgaccctgcttgtatctt

SEQ ID NO: 421967 - DNA, 25 bp, Homo sapien
tgaacttgcagggtgcaaccgggct

SEQ ID NO: 421968 - DNA, 25 bp, Homo sapien
agcaacgcaaaccagtgccacaaag

SEQ ID NO: 421969 - DNA, 25 bp, Homo sapien
caaaggccctctgttgaacttgcag

SEQ ID NO: 421970 - DNA, 25 bp, Homo sapien
gttcctgtgcattttgcactcctcc

SEQ ID NO: 421971 - DNA, 25 bp, Homo sapien
tgctgtccagttattgctggaaccc

SEQ ID NO: 421972 - DNA, 25 bp, Homo sapien
tttcagcatccaccctgagggtgtc

SEQ ID NO: 421973 - DNA, 25 bp, Homo sapien
gatttcagcatccaccctgagggtg

SEQ ID NO: 421974 - DNA, 25 bp, Homo sapien
tccttggccatccagggcctagctg

SEQ ID NO: 421975 - DNA, 25 bp, Homo sapien
tgttctgccccaggcactggtctgg

SEQ ID NO: 421976 - DNA, 25 bp, Homo sapien
ggttgagtcacaaggaaaagatgtt

SEQ ID NO: 421977 - DNA, 25 bp, Homo sapien
gccccaggcactggtctggggacca

SEQ ID NO: 421978 - DNA, 25 bp, Homo sapien
ctggttgagtcacaaggaaaagatg

SEQ ID NO: 421979 - DNA, 25 bp, Homo sapien
taccgttgcgctggtctctgttgct

SEQ ID NO: 421980 - DNA, 25 bp, Homo sapien
tctaagcccaagtgagtagcggctc

SEQ ID NO: 421981 - DNA, 25 bp, Homo sapien
agataagacacggaggagagctcca

SEQ ID NO: 421982 - DNA, 25 bp, Homo sapien
ttcagcagaagcacttgtgactgag

SEQ ID NO: 421983 - DNA, 25 bp, Homo sapien
tctacttagtctagcaccattgtat

SEQ ID NO: 421984 - DNA, 25 bp, Homo sapien
ctgatgctaaagaacagtcctgttc

SEQ ID NO: 421985 - DNA, 25 bp, Homo sapien
tgccgcctaaacatgtaatttcaga

SEQ ID NO: 421986 - DNA, 25 bp, Homo sapien
tctctgtatgggatgaaggcagctc

SEQ ID NO: 421987 - DNA, 25 bp, Homo sapien
ggaccagaccatccatgcactgtgt

SEQ ID NO: 421988 - DNA, 25 bp, Homo sapien
ggaaaaggcattcgtggaccagacc

SEQ ID NO: 421989 - DNA, 25 bp, Homo sapien
gatggctgtaagtcaaacacgcccg

SEQ ID NO: 421990 - DNA, 25 bp, Homo sapien
accacttagggcgagcagcgttaca

SEQ ID NO: 421991 - DNA, 25 bp, Homo sapien
ccatgggacaggccggccctttgga

SEQ ID NO: 421992 - DNA, 25 bp, Homo sapien
gagaaacaacctcgcctttgtgttg

SEQ ID NO: 421993 - DNA, 25 bp, Homo sapien
cgagaaacaacctcgcctttgtgtt

SEQ ID NO: 421994 - DNA, 25 bp, Homo sapien
aatccatgggacaggccggcccttt

SEQ ID NO: 421995 - DNA, 25 bp, Homo sapien
gggcaacgttgaccatccagtgatc

SEQ ID NO: 421996 - DNA, 25 bp, Homo sapien
ttcctgctgttacccaagagagctg

SEQ ID NO: 421997 - DNA, 25 bp, Homo sapien
gctatattgtaatgtgcctgcccaa

SEQ ID NO: 421998 - DNA, 25 bp, Homo sapien
tagtgtccaattaagccaaggtttc

SEQ ID NO: 421999 - DNA, 25 bp, Homo sapien
tgaaccgtttgaaagtgagctgcac

SEQ ID NO: 422000 - DNA, 25 bp, Homo sapien
tcatcgacatttggctgaaccgttt

SEQ ID NO: 422001 - DNA, 25 bp, Homo sapien
tcactttcattcctgatgcgggaat

SEQ ID NO: 422002 - DNA, 25 bp, Homo sapien
tctctctaatacgaagtaacactgt

SEQ ID NO: 422003 - DNA, 25 bp, Homo sapien
cagcacatggcctatcttggcaaat

SEQ ID NO: 422004 - DNA, 25 bp, Homo sapien
atttgttgaggcttggtctttggct

SEQ ID NO: 422005 - DNA, 25 bp, Homo sapien
tatttacatcaattagtcaagttgg

SEQ ID NO: 422006 - DNA, 25 bp, Homo sapien
tctgtttgtagccatatcttaccta

SEQ ID NO: 422007 - DNA, 25 bp, Homo sapien
tacaatgtcttataggttcagcctc

SEQ ID NO: 422008 - DNA, 25 bp, Homo sapien
gatgtagaataatgttgctccacca

SEQ ID NO: 422009 - DNA, 25 bp, Homo sapien
tatcagtactgcgtgactgccctgg

SEQ ID NO: 422010 - DNA, 25 bp, Homo sapien
ggttgctgcttctgcgaccatggtc

SEQ ID NO: 422011 - DNA, 25 bp, Homo sapien
agagccaggattttgtacgtggatg

SEQ ID NO: 422012 - DNA, 25 bp, Homo sapien
tccaagcagatgtccacatacgaga

SEQ ID NO: 422013 - DNA, 25 bp, Homo sapien
aggattttgtacgtggatgagattc

SEQ ID NO: 422014 - DNA, 25 bp, Homo sapien
gccaggattttgtacgtggatgaga

SEQ ID NO: 422015 - DNA, 25 bp, Homo sapien
catgtgaaaaatggagacgagctca

SEQ ID NO: 422016 - DNA, 25 bp, Homo sapien
atgtgaaaaatggagacgagctcac

SEQ ID NO: 422017 - DNA, 25 bp, Homo sapien
tctgatgtaggcgatgctggcccag

SEQ ID NO: 422018 - DNA, 25 bp, Homo sapien
aaggccatgtctgatctccagttcc

SEQ ID NO: 422019 - DNA, 25 bp, Homo sapien
tccacaggtctgatgtaggcgatgc

SEQ ID NO: 422020 - DNA, 25 bp, Homo sapien
atggtggcacccctgtgacacccat

SEQ ID NO: 422021 - DNA, 25 bp, Homo sapien
agtaagtgggaatggatcatcataa

SEQ ID NO: 422022 - DNA, 25 bp, Homo sapien
tattcagtaagtgggaatggatcat

SEQ ID NO: 422023 - DNA, 25 bp, Homo sapien
tcagtaagtgggaatggatcatcat

SEQ ID NO: 422024 - DNA, 25 bp, Homo sapien
ttcagtaagtgggaatggatcatca

SEQ ID NO: 422025 - DNA, 25 bp, Homo sapien
gaggagaaacgatttgcccaggcca

SEQ ID NO: 422026 - DNA, 25 bp, Homo sapien
cgtgcctaacatggtgccgtgctgc

SEQ ID NO: 422027 - DNA, 25 bp, Homo sapien
agacaaaggactaggcccagaagcc

SEQ ID NO: 422028 - DNA, 25 bp, Homo sapien
tactcctagatcaaggtcccttggc

SEQ ID NO: 422029 - DNA, 25 bp, Homo sapien
caagttctcccgtgacagatgaggg

SEQ ID NO: 422030 - DNA, 25 bp, Homo sapien
tgagatcacccaggtcgctgctaca

SEQ ID NO: 422031 - DNA, 25 bp, Homo sapien
tctgagcgagatatctggagtgtgc

SEQ ID NO: 422032 - DNA, 25 bp, Homo sapien
gctacagctccagtctggcaactgg

SEQ ID NO: 422033 - DNA, 25 bp, Homo sapien
cttgtggaagaaagcccgaggctac

SEQ ID NO: 422034 - DNA, 25 bp, Homo sapien
gaagcgaccactgacattgagaatg

SEQ ID NO: 422035 - DNA, 25 bp, Homo sapien
tatcgggatctgtaagaagcgacca

SEQ ID NO: 422036 - DNA, 25 bp, Homo sapien
cagaaggagcaggtcatctgactca

SEQ ID NO: 422037 - DNA, 25 bp, Homo sapien
aaaggttttagcgatctcctgccag

SEQ ID NO: 422038 - DNA, 25 bp, Homo sapien
tccttcctggcgcatcctgagtgtc

SEQ ID NO: 422039 - DNA, 25 bp, Homo sapien
tctgccgcgatggaaactgggcctc

SEQ ID NO: 422040 - DNA, 25 bp, Homo sapien
gcagctgagggttgcttttccacct

SEQ ID NO: 422041 - DNA, 25 bp, Homo sapien
agcgtcagggtccagtgacagcagc

SEQ ID NO: 422042 - DNA, 25 bp, Homo sapien
gaggaattcgggtgcggcacagcgt

SEQ ID NO: 422043 - DNA, 25 bp, Homo sapien
gcggcacagcgtcagggtccagtga

SEQ ID NO: 422044 - DNA, 25 bp, Homo sapien
tacacggcacgccttgctctggcca

SEQ ID NO: 422045 - DNA, 25 bp, Homo sapien
agagcacgggcaggaagaggagcca

SEQ ID NO: 422046 - DNA, 25 bp, Homo sapien
agcacgggcaggaagaggagccaga

SEQ ID NO: 422047 - DNA, 25 bp, Homo sapien
cacgggcaggaagaggagccagaaa

SEQ ID NO: 422048 - DNA, 25 bp, Homo sapien
tcagagcacgggcaggaagaggagc

SEQ ID NO: 422049 - DNA, 25 bp, Homo sapien
tgcagaaatcaccgtggagaagaga

SEQ ID NO: 422050 - DNA, 25 bp, Homo sapien
ctgcctgtcatccagagagccaagc

SEQ ID NO: 422051 - DNA, 25 bp, Homo sapien
tgaacaggcatcagggtgcctgtga

SEQ ID NO: 422052 - DNA, 25 bp, Homo sapien
cctgtcatccagagagccaagctga

SEQ ID NO: 422053 - DNA, 25 bp, Homo sapien
gtcatccagagagccaagctgaaca

SEQ ID NO: 422054 - DNA, 25 bp, Homo sapien
gacagagaagggagaagaggtctca

SEQ ID NO: 422055 - DNA, 25 bp, Homo sapien
tgacagagaagggagaagaggtctc

SEQ ID NO: 422056 - DNA, 25 bp, Homo sapien
cagagaagggagaagaggtctcaga

SEQ ID NO: 422057 - DNA, 25 bp, Homo sapien
ctgacagagaagggagaagaggtct

SEQ ID NO: 422058 - DNA, 25 bp, Homo sapien
gcattcctcccatcgtgaaagggct

SEQ ID NO: 422059 - DNA, 25 bp, Homo sapien
gcaggcattcctcccatcgtgaaag

SEQ ID NO: 422060 - DNA, 25 bp, Homo sapien
cctcccatcgtgaaagggctcacat

SEQ ID NO: 422061 - DNA, 25 bp, Homo sapien
aagcaggcattcctcccatcgtgaa

SEQ ID NO: 422062 - DNA, 25 bp, Homo sapien
agaacctgactcttagaggcagctt

SEQ ID NO: 422063 - DNA, 25 bp, Homo sapien
atttgtttcagtcattgtctggatg

SEQ ID NO: 422064 - DNA, 25 bp, Homo sapien
ctttggagctagaaagatttgtttc

SEQ ID NO: 422065 - DNA, 25 bp, Homo sapien
tttgtttcagtcattgtctggatgt

SEQ ID NO: 422066 - DNA, 25 bp, Homo sapien
tgaagatccataatccagtatgtga

SEQ ID NO: 422067 - DNA, 25 bp, Homo sapien
tggcttctttaggtgaggggagaga

SEQ ID NO: 422068 - DNA, 25 bp, Homo sapien
caggcctttccaaatgccaaagacc

SEQ ID NO: 422069 - DNA, 25 bp, Homo sapien
agatccataatccagtatgtgactg

SEQ ID NO: 422070 - DNA, 25 bp, Homo sapien
ggagagttgacccggagccccagcc

SEQ ID NO: 422071 - DNA, 25 bp, Homo sapien
agggagagttgacccggagccccag

SEQ ID NO: 422072 - DNA, 25 bp, Homo sapien
gagagttgacccggagccccagcca

SEQ ID NO: 422073 - DNA, 25 bp, Homo sapien
agagttgacccggagccccagccag

SEQ ID NO: 422074 - DNA, 25 bp, Homo sapien
tcaagttgagtggagacctcctgga

SEQ ID NO: 422075 - DNA, 25 bp, Homo sapien
cctggatgccacgtgtcagctttac

SEQ ID NO: 422076 - DNA, 25 bp, Homo sapien
ttgagtggagacctcctggatgcca

SEQ ID NO: 422077 - DNA, 25 bp, Homo sapien
agacctcctggatgccacgtgtcag

SEQ ID NO: 422078 - DNA, 25 bp, Homo sapien
ctgctagaaacacacgctcacctcg

SEQ ID NO: 422079 - DNA, 25 bp, Homo sapien
cacacgctcacctcgctgtccaaga

SEQ ID NO: 422080 - DNA, 25 bp, Homo sapien
acacgctcacctcgctgtccaagac

SEQ ID NO: 422081 - DNA, 25 bp, Homo sapien
tagaaacacacgctcacctcgctgt

SEQ ID NO: 422082 - DNA, 25 bp, Homo sapien
caaacaaattctgccacgttctccc

SEQ ID NO: 422083 - DNA, 25 bp, Homo sapien
ccatggaaaatcccaccagtttctt

SEQ ID NO: 422084 - DNA, 25 bp, Homo sapien
aattctgccacgttctcccgggaca

SEQ ID NO: 422085 - DNA, 25 bp, Homo sapien
aacaaattctgccacgttctcccgg

SEQ ID NO: 422086 - DNA, 25 bp, Homo sapien
ccatgggcgtgatgattcttgacta

SEQ ID NO: 422087 - DNA, 25 bp, Homo sapien
ttggcccacgtagatcttcaagatg

SEQ ID NO: 422088 - DNA, 25 bp, Homo sapien
taatgtcagcatcactcttggccca

SEQ ID NO: 422089 - DNA, 25 bp, Homo sapien
tgggtgttcacctgatttactggag

SEQ ID NO: 422090 - DNA, 25 bp, Homo sapien
tgcagtctttgtaccccgaatattt

SEQ ID NO: 422091 - DNA, 25 bp, Homo sapien
catagaagctgttttggcatttatg

SEQ ID NO: 422092 - DNA, 25 bp, Homo sapien
ttgaaatgcagtctttgtaccccga

SEQ ID NO: 422093 - DNA, 25 bp, Homo sapien
ccctgttaagatgattaggctcata

SEQ ID NO: 422094 - DNA, 25 bp, Homo sapien
ttctgggccactcccagttgatgtc

SEQ ID NO: 422095 - DNA, 25 bp, Homo sapien
tttgtcctctcagcttcgggcttct

SEQ ID NO: 422096 - DNA, 25 bp, Homo sapien
cccagtgagctttgtcctctcagct

SEQ ID NO: 422097 - DNA, 25 bp, Homo sapien
cttctgggccactcccagttgatgt

SEQ ID NO: 422098 - DNA, 25 bp, Homo sapien
gaacacagttcccatcagtttccag

SEQ ID NO: 422099 - DNA, 25 bp, Homo sapien
tccaggatgcctcattaggaagctc

SEQ ID NO: 422100 - DNA, 25 bp, Homo sapien
gatgggggagatggataagaacaca

SEQ ID NO: 422101 - DNA, 25 bp, Homo sapien
ttaggaagctctctttttggccaga

SEQ ID NO: 422102 - DNA, 25 bp, Homo sapien
acaaagcccccatttgtggtcatgg

SEQ ID NO: 422103 - DNA, 25 bp, Homo sapien
aagagatttcttccagaggtcgtaa

SEQ ID NO: 422104 - DNA, 25 bp, Homo sapien
caggcgaaggttggtgcccttggat

SEQ ID NO: 422105 - DNA, 25 bp, Homo sapien
tccctctatagtctgggcagaaaga

SEQ ID NO: 422106 - DNA, 25 bp, Homo sapien
gcatttccctcacctttggaaactc

SEQ ID NO: 422107 - DNA, 25 bp, Homo sapien
tgtctgatggatggaacctttccca

SEQ ID NO: 422108 - DNA, 25 bp, Homo sapien
gggatgtctgatggatggaaccttt

SEQ ID NO: 422109 - DNA, 25 bp, Homo sapien
ttgggcctaagtgtttgactgggat

SEQ ID NO: 422110 - DNA, 25 bp, Homo sapien
cctaagtgtttgactgggatgtctg

SEQ ID NO: 422111 - DNA, 25 bp, Homo sapien
cagggaaatgaggtgtgtcctcccc

SEQ ID NO: 422112 - DNA, 25 bp, Homo sapien
aatgccatacccattgcctacaagg

SEQ ID NO: 422113 - DNA, 25 bp, Homo sapien
agtaagaaccattaaggccctctgg

SEQ ID NO: 422114 - DNA, 25 bp, Homo sapien
ggtggcccatgtcgaaggatgcaaa

SEQ ID NO: 422115 - DNA, 25 bp, Homo sapien
tccctgagcttgtgttcacatgagc

SEQ ID NO: 422116 - DNA, 25 bp, Homo sapien
tccctctgttcacggttaattcacg

SEQ ID NO: 422117 - DNA, 25 bp, Homo sapien
aattcacgtggagggaacgtccctg

SEQ ID NO: 422118 - DNA, 25 bp, Homo sapien
gagggaacgtccctgagcttgtgtt

SEQ ID NO: 422119 - DNA, 25 bp, Homo sapien
cacgtgtggcatcagaggtcctgcc

SEQ ID NO: 422120 - DNA, 25 bp, Homo sapien
tcctgccagtcaaagcgtcggatct

SEQ ID NO: 422121 - DNA, 25 bp, Homo sapien
ctggacacgagttcccaaggcacgt

SEQ ID NO: 422122 - DNA, 25 bp, Homo sapien
cccatcaggctggtgccacaggagg

SEQ ID NO: 422123 - DNA, 25 bp, Homo sapien
ggttttgccaaatctggtgccaggc

SEQ ID NO: 422124 - DNA, 25 bp, Homo sapien
tcagggatacttcaaggagcacagg

SEQ ID NO: 422125 - DNA, 25 bp, Homo sapien
tctctccacgtagacacaggtgttc

SEQ ID NO: 422126 - DNA, 25 bp, Homo sapien
tgtgcaactgtacatagcagccctg

SEQ ID NO: 422127 - DNA, 25 bp, Homo sapien
ccgggctcccgcattcagcatcacc

SEQ ID NO: 422128 - DNA, 25 bp, Homo sapien
ctcccgcattcagcatcaccttcat

SEQ ID NO: 422129 - DNA, 25 bp, Homo sapien
gggctcccgcattcagcatcacctt

SEQ ID NO: 422130 - DNA, 25 bp, Homo sapien
gctcccgcattcagcatcaccttca

SEQ ID NO: 422131 - DNA, 25 bp, Homo sapien
gagccactaaatatgtggacagagt

SEQ ID NO: 422132 - DNA, 25 bp, Homo sapien
gatgttcacagcagcgaagtcacca

SEQ ID NO: 422133 - DNA, 25 bp, Homo sapien
gtcaccaggaatatgcaaagacaca

SEQ ID NO: 422134 - DNA, 25 bp, Homo sapien
acagctggagccactaaatatgtgg

SEQ ID NO: 422135 - DNA, 25 bp, Homo sapien
ccccttcgcctggagagccagacat

SEQ ID NO: 422136 - DNA, 25 bp, Homo sapien
ccttcgcctggagagccagacatgg

SEQ ID NO: 422137 - DNA, 25 bp, Homo sapien
ttcgcctggagagccagacatggat

SEQ ID NO: 422138 - DNA, 25 bp, Homo sapien
cacccccttcgcctggagagccaga

SEQ ID NO: 422139 - DNA, 25 bp, Homo sapien
cagctgaaactgagaccatccataa

SEQ ID NO: 422140 - DNA, 25 bp, Homo sapien
aggttgaaccacatgcagttggtgt

SEQ ID NO: 422141 - DNA, 25 bp, Homo sapien
gtcaatttcatcaggcagcgtgtga

SEQ ID NO: 422142 - DNA, 25 bp, Homo sapien
ggtgtttggccgaatattgtcaatt

SEQ ID NO: 422143 - DNA, 25 bp, Homo sapien
ctggaaggctatggtgtcagcacca

SEQ ID NO: 422144 - DNA, 25 bp, Homo sapien
cagtaaaataccactcccggcttgg

SEQ ID NO: 422145 - DNA, 25 bp, Homo sapien
gcagattgctttgtatatcagccac

SEQ ID NO: 422146 - DNA, 25 bp, Homo sapien
cttggtggaaatctactgctttctt

SEQ ID NO: 422147 - DNA, 25 bp, Homo sapien
gagacactcggtggaggattcaagc

SEQ ID NO: 422148 - DNA, 25 bp, Homo sapien
ttcaagctgatacaggagccgtgga

SEQ ID NO: 422149 - DNA, 25 bp, Homo sapien
attaggctgttatctctgtttacca

SEQ ID NO: 422150 - DNA, 25 bp, Homo sapien
ggcagtggtcgccatctgtccttgg

SEQ ID NO: 422151 - DNA, 25 bp, Homo sapien
cttcttggtagaaatcgcctctctg

SEQ ID NO: 422152 - DNA, 25 bp, Homo sapien
tcttggtagaaatcgcctctctggg

SEQ ID NO: 422153 - DNA, 25 bp, Homo sapien
cttggtagaaatcgcctctctggga

SEQ ID NO: 422154 - DNA, 25 bp, Homo sapien
tggtagaaatcgcctctctgggact

SEQ ID NO: 422155 - DNA, 25 bp, Homo sapien
tgtgtcatctattctgccaatttct

SEQ ID NO: 422156 - DNA, 25 bp, Homo sapien
tgccaccgtcttttcccggatcagg

SEQ ID NO: 422157 - DNA, 25 bp, Homo sapien
tcatccagagggtgatagcatcgga

SEQ ID NO: 422158 - DNA, 25 bp, Homo sapien
tagcatcggagctttgatcttggat

SEQ ID NO: 422159 - DNA, 25 bp, Homo sapien
tagtcctgggtacatcgagggttcc

SEQ ID NO: 422160 - DNA, 25 bp, Homo sapien
gaatgatgactgtcccagggaaacc

SEQ ID NO: 422161 - DNA, 25 bp, Homo sapien
tccagacgtcttagcaaatccaggg

SEQ ID NO: 422162 - DNA, 25 bp, Homo sapien
taaagaaccagattccagagggcac

SEQ ID NO: 422163 - DNA, 25 bp, Homo sapien
gaacgcattgccttgccatccgaag

SEQ ID NO: 422164 - DNA, 25 bp, Homo sapien
cattcaagaccatgaactgtgagtc

SEQ ID NO: 422165 - DNA, 25 bp, Homo sapien
gagctaggtgctttgcttaggcacg

SEQ ID NO: 422166 - DNA, 25 bp, Homo sapien
ttgccatccgaagccatgcattcaa

SEQ ID NO: 422167 - DNA, 25 bp, Homo sapien
attggaagtgctccataaacagtgg

SEQ ID NO: 422168 - DNA, 25 bp, Homo sapien
tgtgtctggtaattggaagtgctcc

SEQ ID NO: 422169 - DNA, 25 bp, Homo sapien
tggtaattggaagtgctccataaac

SEQ ID NO: 422170 - DNA, 25 bp, Homo sapien
gtcacctgtgtctggtaattggaag

SEQ ID NO: 422171 - DNA, 25 bp, Homo sapien
tctggaccttgatcacaggcttcct

SEQ ID NO: 422172 - DNA, 25 bp, Homo sapien
tggacttcggcgcactgtcatcctg

SEQ ID NO: 422173 - DNA, 25 bp, Homo sapien
tttcccatgggtgcgttctggacct

SEQ ID NO: 422174 - DNA, 25 bp, Homo sapien
tgtcatcctgtgactcccacgcttt

SEQ ID NO: 422175 - DNA, 25 bp, Homo sapien
tatggcctccgagatttgcctacag

SEQ ID NO: 422176 - DNA, 25 bp, Homo sapien
gaagtcaccctgtgtacctgccaag

SEQ ID NO: 422177 - DNA, 25 bp, Homo sapien
ttgaacctgcctcgcctaaaagggc

SEQ ID NO: 422178 - DNA, 25 bp, Homo sapien
aaagtgctaagcaaccctgggacaa

SEQ ID NO: 422179 - DNA, 25 bp, Homo sapien
gaactgttcaagaggcccaagcctg

SEQ ID NO: 422180 - DNA, 25 bp, Homo sapien
ggaattcatcccctgcttgtctaag

SEQ ID NO: 422181 - DNA, 25 bp, Homo sapien
gaggcactggccgatcatggaagat

SEQ ID NO: 422182 - DNA, 25 bp, Homo sapien
ggatcaagcatctcgcccaggaatt

SEQ ID NO: 422183 - DNA, 25 bp, Homo sapien
gtaaacatcacccagagtggccaag

SEQ ID NO: 422184 - DNA, 25 bp, Homo sapien
tctaggatttgcacatagcaggcga

SEQ ID NO: 422185 - DNA, 25 bp, Homo sapien
caaagataacggctgatgggtgcaa

SEQ ID NO: 422186 - DNA, 25 bp, Homo sapien
tatcgagggatagaggatgtccaac

SEQ ID NO: 422187 - DNA, 25 bp, Homo sapien
tgggtgtgcaagatagcgccgtcct

SEQ ID NO: 422188 - DNA, 25 bp, Homo sapien
ggattctgggttggctcatcccctg

SEQ ID NO: 422189 - DNA, 25 bp, Homo sapien
cagtgcagttctagtgtccccaagc

SEQ ID NO: 422190 - DNA, 25 bp, Homo sapien
tccccaagcctgtgatgggtgtgca

SEQ ID NO: 422191 - DNA, 25 bp, Homo sapien
ccaaacatacatattcaggttccag

SEQ ID NO: 422192 - DNA, 25 bp, Homo sapien
ttctaaaggattacagcctgcaggg

SEQ ID NO: 422193 - DNA, 25 bp, Homo sapien
cttctaaaggattacagcctgcagg

SEQ ID NO: 422194 - DNA, 25 bp, Homo sapien
cctcatgctgaattgagctggccaa

SEQ ID NO: 422195 - DNA, 25 bp, Homo sapien
tattcacaaagagagtcctgagccg

SEQ ID NO: 422196 - DNA, 25 bp, Homo sapien
tgaggcagggactcgaaggcataca

SEQ ID NO: 422197 - DNA, 25 bp, Homo sapien
cctacacgtcaaaaggtgaggcagg

SEQ ID NO: 422198 - DNA, 25 bp, Homo sapien
gcattacaatgagtccctacacgtc

SEQ ID NO: 422199 - DNA, 25 bp, Homo sapien
tgtccaatcaaagctatagtcacag

SEQ ID NO: 422200 - DNA, 25 bp, Homo sapien
gagctgcagtcgtttgaatctcggg

SEQ ID NO: 422201 - DNA, 25 bp, Homo sapien
tctcggggccggtgcgtgtttagct

SEQ ID NO: 422202 - DNA, 25 bp, Homo sapien
tcacagctgtggaacggggtcagcc

SEQ ID NO: 422203 - DNA, 25 bp, Homo sapien
tggcctgaggtgctgcttataattt

SEQ ID NO: 422204 - DNA, 25 bp, Homo sapien
cctgaggtgctgcttataatttggt

SEQ ID NO: 422205 - DNA, 25 bp, Homo sapien
gaggtgctgcttataatttggtgtc

SEQ ID NO: 422206 - DNA, 25 bp, Homo sapien
gcgtggcctgaggtgctgcttataa

SEQ ID NO: 422207 - DNA, 25 bp, Homo sapien
tggtgacctggcagcgacagaatct

SEQ ID NO: 422208 - DNA, 25 bp, Homo sapien
caaagtcctagtttcacaaactgga

SEQ ID NO: 422209 - DNA, 25 bp, Homo sapien
cagcgcaacccagctgtggtccaga

SEQ ID NO: 422210 - DNA, 25 bp, Homo sapien
caaaatgacaccaattcacaggatg

SEQ ID NO: 422211 - DNA, 25 bp, Homo sapien
gtgtgctgacttcccggctcccaga

SEQ ID NO: 422212 - DNA, 25 bp, Homo sapien
gagcagggttctcatatttaacagc

SEQ ID NO: 422213 - DNA, 25 bp, Homo sapien
agccctaggagatccttgttctggg

SEQ ID NO: 422214 - DNA, 25 bp, Homo sapien
cgtttctgcctttccttatccctat

SEQ ID NO: 422215 - DNA, 25 bp, Homo sapien
agggcaatggtccacccattcccaa

SEQ ID NO: 422216 - DNA, 25 bp, Homo sapien
taagcctccctcacgatcagtatgc

SEQ ID NO: 422217 - DNA, 25 bp, Homo sapien
tgttctcaaagccaagacttaggcc

SEQ ID NO: 422218 - DNA, 25 bp, Homo sapien
tgaatacgtgcctactggccgggag

SEQ ID NO: 422219 - DNA, 25 bp, Homo sapien
gacttaggcctacagcaaacatcca

SEQ ID NO: 422220 - DNA, 25 bp, Homo sapien
ggcctccccgtaggtttctgctgca

SEQ ID NO: 422221 - DNA, 25 bp, Homo sapien
catttataaggagaccctcattctc

SEQ ID NO: 422222 - DNA, 25 bp, Homo sapien
gcctgagtgaggtttacatttataa

SEQ ID NO: 422223 - DNA, 25 bp, Homo sapien
gctgcacgaagccacctgtccattt

SEQ ID NO: 422224 - DNA, 25 bp, Homo sapien
tcggacagtcctgggtatttccgtg

SEQ ID NO: 422225 - DNA, 25 bp, Homo sapien
tcctgggtatttccgtgtcctgctc

SEQ ID NO: 422226 - DNA, 25 bp, Homo sapien
acagtcctgggtatttccgtgtcct

SEQ ID NO: 422227 - DNA, 25 bp, Homo sapien
tgtgctctgctcctcggacagtcct

SEQ ID NO: 422228 - DNA, 25 bp, Homo sapien
gtaggcagaataatatcctccccgc

SEQ ID NO: 422229 - DNA, 25 bp, Homo sapien
gatcctttccccgatgtgggcacgg

SEQ ID NO: 422230 - DNA, 25 bp, Homo sapien
tagggccatctcctaatccctggaa

SEQ ID NO: 422231 - DNA, 25 bp, Homo sapien
ctaatcacacgagcctttaaagtgg

SEQ ID NO: 422232 - DNA, 25 bp, Homo sapien
gctttctgggagacgtcatggccca

SEQ ID NO: 422233 - DNA, 25 bp, Homo sapien
tgctgccagtagaaccctagagcca

SEQ ID NO: 422234 - DNA, 25 bp, Homo sapien
aggccacaaggaactgcgtctccgg

SEQ ID NO: 422235 - DNA, 25 bp, Homo sapien
ttcctttgacaatgatgcgctagac

SEQ ID NO: 422236 - DNA, 25 bp, Homo sapien
tcagggtgactggaacatttgggat

SEQ ID NO: 422237 - DNA, 25 bp, Homo sapien
tctcctagctttacgtcagggaaac

SEQ ID NO: 422238 - DNA, 25 bp, Homo sapien
taccacagtgtgattcggtaccaca

SEQ ID NO: 422239 - DNA, 25 bp, Homo sapien
ttcagggctgcgtgtgacatcaacc

SEQ ID NO: 422240 - DNA, 25 bp, Homo sapien
ctctctggcaaacaagcaggagtct

SEQ ID NO: 422241 - DNA, 25 bp, Homo sapien
tctctggcaaacaagcaggagtcta

SEQ ID NO: 422242 - DNA, 25 bp, Homo sapien
ctctggcaaacaagcaggagtctac

SEQ ID NO: 422243 - DNA, 25 bp, Homo sapien
cctctctggcaaacaagcaggagtc

SEQ ID NO: 422244 - DNA, 25 bp, Homo sapien
ctgtcaccttccaactcaggaaggt

SEQ ID NO: 422245 - DNA, 25 bp, Homo sapien
tcaccttccaactcaggaaggtggg

SEQ ID NO: 422246 - DNA, 25 bp, Homo sapien
tggggcttgggtcccagcttcccgc

SEQ ID NO: 422247 - DNA, 25 bp, Homo sapien
ttccaactcaggaaggtggggcttg

SEQ ID NO: 422248 - DNA, 25 bp, Homo sapien
ttcagtcttgcacagaatgtcaggc

SEQ ID NO: 422249 - DNA, 25 bp, Homo sapien
tgtaggctggaaaagacatggtccc

SEQ ID NO: 422250 - DNA, 25 bp, Homo sapien
tgttgataccgacgcaaatagccaa

SEQ ID NO: 422251 - DNA, 25 bp, Homo sapien
ggtgtatttacatgaggcccggcac

SEQ ID NO: 422252 - DNA, 25 bp, Homo sapien
gatgacttgggagagacactgttcc

SEQ ID NO: 422253 - DNA, 25 bp, Homo sapien
tgggtgagagcagatcacagccctc

SEQ ID NO: 422254 - DNA, 25 bp, Homo sapien
ggtagaaacgtagctcactgtggca

SEQ ID NO: 422255 - DNA, 25 bp, Homo sapien
ggtcctcagtcagagattccacggt

SEQ ID NO: 422256 - DNA, 25 bp, Homo sapien
tggtcgaaagacatcatcggtcatg

SEQ ID NO: 422257 - DNA, 25 bp, Homo sapien
gacatcatcggtcatgtactttctg

SEQ ID NO: 422258 - DNA, 25 bp, Homo sapien
gccctttctgtggtcgaaagacatc

SEQ ID NO: 422259 - DNA, 25 bp, Homo sapien
ttctgtggtcgaaagacatcatcgg

SEQ ID NO: 422260 - DNA, 25 bp, Homo sapien
aaaaagaatatcgagtcagttcaag

SEQ ID NO: 422261 - DNA, 25 bp, Homo sapien
aagaatatcgagtcagttcaagctg

SEQ ID NO: 422262 - DNA, 25 bp, Homo sapien
gaatatcgagtcagttcaagctgtg

SEQ ID NO: 422263 - DNA, 25 bp, Homo sapien
aaaagaatatcgagtcagttcaagc

SEQ ID NO: 422264 - DNA, 25 bp, Homo sapien
aagaaccctgacagcctgaccctgc

SEQ ID NO: 422265 - DNA, 25 bp, Homo sapien
gcagaaggtcctgtatttcccagca

SEQ ID NO: 422266 - DNA, 25 bp, Homo sapien
gatggcgaagattcagagcctcaca

SEQ ID NO: 422267 - DNA, 25 bp, Homo sapien
cgaagattcagagcctcacactgga

SEQ ID NO: 422268 - DNA, 25 bp, Homo sapien
ggatttctgctctaagctgtttgag

SEQ ID NO: 422269 - DNA, 25 bp, Homo sapien
tgcttttacaaagggcgagtttcca

SEQ ID NO: 422270 - DNA, 25 bp, Homo sapien
taagctgtttgagcctgttcctggt

SEQ ID NO: 422271 - DNA, 25 bp, Homo sapien
tggtttctatgaggcagagaagcca

SEQ ID NO: 422272 - DNA, 25 bp, Homo sapien
tataacacctatttgacaatagtta

SEQ ID NO: 422273 - DNA, 25 bp, Homo sapien
tatcccatgagtcttcaagatgtgt

SEQ ID NO: 422274 - DNA, 25 bp, Homo sapien
gtgggcagggcccacattccccaaa

SEQ ID NO: 422275 - DNA, 25 bp, Homo sapien
gatgtgttgacattacaaaggaccc

SEQ ID NO: 422276 - DNA, 25 bp, Homo sapien
tgcttgagtgggtaacgagctgaac

SEQ ID NO: 422277 - DNA, 25 bp, Homo sapien
agtgggtaacgagctgaacctctct

SEQ ID NO: 422278 - DNA, 25 bp, Homo sapien
cttgagtgggtaacgagctgaacct

SEQ ID NO: 422279 - DNA, 25 bp, Homo sapien
tgagtgggtaacgagctgaacctct

SEQ ID NO: 422280 - DNA, 25 bp, Homo sapien
gggcatgtcacacgttcttcaagct

SEQ ID NO: 422281 - DNA, 25 bp, Homo sapien
tttagtgacaactggtatcagcgct

SEQ ID NO: 422282 - DNA, 25 bp, Homo sapien
tatcagcgctacctcggaaaagaag

SEQ ID NO: 422283 - DNA, 25 bp, Homo sapien
tgccagccactggagaatggacgta

SEQ ID NO: 422284 - DNA, 25 bp, Homo sapien
gataaccagggttcctggaatctaa

SEQ ID NO: 422285 - DNA, 25 bp, Homo sapien
aactttgagataaccagggttcctg

SEQ ID NO: 422286 - DNA, 25 bp, Homo sapien
ctttgagataaccagggttcctgga

SEQ ID NO: 422287 - DNA, 25 bp, Homo sapien
ctgatggcagaagcctgttgtgctc

SEQ ID NO: 422288 - DNA, 25 bp, Homo sapien
tgagaggactcaagtctcacttcct

SEQ ID NO: 422289 - DNA, 25 bp, Homo sapien
ctgccagtttccttgcgatgataaa

SEQ ID NO: 422290 - DNA, 25 bp, Homo sapien
ttgctagccaggactctctacagag

SEQ ID NO: 422291 - DNA, 25 bp, Homo sapien
tcttgctacaaagccgccagtttcc

SEQ ID NO: 422292 - DNA, 25 bp, Homo sapien
tcataaagtcctgggaatgcacgct

SEQ ID NO: 422293 - DNA, 25 bp, Homo sapien
cacatgaaaagaggcggcaggctag

SEQ ID NO: 422294 - DNA, 25 bp, Homo sapien
tcagtaacaaaaacgtgcattcgcc

SEQ ID NO: 422295 - DNA, 25 bp, Homo sapien
tactatgactagcttgtgagccaca

SEQ ID NO: 422296 - DNA, 25 bp, Homo sapien
tggaattcactcagagcggttggga

SEQ ID NO: 422297 - DNA, 25 bp, Homo sapien
ttgggaatatccagcaaagtctggg

SEQ ID NO: 422298 - DNA, 25 bp, Homo sapien
gtgtggccaaatcccaggtctccat

SEQ ID NO: 422299 - DNA, 25 bp, Homo sapien
tgcatgcaggacattcgctcggcag

SEQ ID NO: 422300 - DNA, 25 bp, Homo sapien
actgaagtgctgagcgaacgctgcc

SEQ ID NO: 422301 - DNA, 25 bp, Homo sapien
gaccttcactcagctcaaaatgtgg

SEQ ID NO: 422302 - DNA, 25 bp, Homo sapien
aggtcaaggcttcctcgattcggag

SEQ ID NO: 422303 - DNA, 25 bp, Homo sapien
catagagaacgtgaagtagccggga

SEQ ID NO: 422304 - DNA, 25 bp, Homo sapien
atcgtcacactccatgtgtgtctat

SEQ ID NO: 422305 - DNA, 25 bp, Homo sapien
cgtcacactccatgtgtgtctatgt

SEQ ID NO: 422306 - DNA, 25 bp, Homo sapien
tcgtcacactccatgtgtgtctatg

SEQ ID NO: 422307 - DNA, 25 bp, Homo sapien
ttccatccctaaagtcaaaacaggc

SEQ ID NO: 422308 - DNA, 25 bp, Homo sapien
caggcacttgcagaatggctggatt

SEQ ID NO: 422309 - DNA, 25 bp, Homo sapien
ggtcaccccatcaggaacagacaga

SEQ ID NO: 422310 - DNA, 25 bp, Homo sapien
aacagacagatgcaggattgcaacc

SEQ ID NO: 422311 - DNA, 25 bp, Homo sapien
aatccacgggtgttccaagagctct

SEQ ID NO: 422312 - DNA, 25 bp, Homo sapien
cttgggaatccacgggtgttccaag

SEQ ID NO: 422313 - DNA, 25 bp, Homo sapien
tctttagtgcagtgcttcagagctt

SEQ ID NO: 422314 - DNA, 25 bp, Homo sapien
gactttagggcaagatttggccact

SEQ ID NO: 422315 - DNA, 25 bp, Homo sapien
atattagaaaaagtatcgagcaggc

SEQ ID NO: 422316 - DNA, 25 bp, Homo sapien
tggcagaacagctgaaggcggttct

SEQ ID NO: 422317 - DNA, 25 bp, Homo sapien
aaaaagtatcgagcaggcagtcagc

SEQ ID NO: 422318 - DNA, 25 bp, Homo sapien
tatcgagcaggcagtcagctaaaag

SEQ ID NO: 422319 - DNA, 25 bp, Homo sapien
tgctgtctgtccagcgttgacggtg

SEQ ID NO: 422320 - DNA, 25 bp, Homo sapien
tgtgcgacgtggctcttcaaagctg

SEQ ID NO: 422321 - DNA, 25 bp, Homo sapien
tcctggttgggaaatcttcacacac

SEQ ID NO: 422322 - DNA, 25 bp, Homo sapien
acacacacaaaggtcgagtctgctg

SEQ ID NO: 422323 - DNA, 25 bp, Homo sapien
ctctcctgtccccgcctccgggcct

SEQ ID NO: 422324 - DNA, 25 bp, Homo sapien
tcacgtctgcaccctctcctgtccc

SEQ ID NO: 422325 - DNA, 25 bp, Homo sapien
acgtctgcaccctctcctgtccccg

SEQ ID NO: 422326 - DNA, 25 bp, Homo sapien
tgcaccctctcctgtccccgcctcc

SEQ ID NO: 422327 - DNA, 25 bp, Homo sapien
gctgcctcccgatcaggcagtgcac

SEQ ID NO: 422328 - DNA, 25 bp, Homo sapien
ggctgctgcctcccgatcaggcagt

SEQ ID NO: 422329 - DNA, 25 bp, Homo sapien
tgctgcctcccgatcaggcagtgca

SEQ ID NO: 422330 - DNA, 25 bp, Homo sapien
ctctctttcccatctgtaagccaaa

SEQ ID NO: 422331 - DNA, 25 bp, Homo sapien
atctgtaagccaaaaaccccaacat

SEQ ID NO: 422332 - DNA, 25 bp, Homo sapien
tcccatctgtaagccaaaaacccca

SEQ ID NO: 422333 - DNA, 25 bp, Homo sapien
tctttcccatctgtaagccaaaaac

SEQ ID NO: 422334 - DNA, 25 bp, Homo sapien
tcgatccccatagccccatgtcttc

SEQ ID NO: 422335 - DNA, 25 bp, Homo sapien
tgccacttctttgtcctcgtgcagt

SEQ ID NO: 422336 - DNA, 25 bp, Homo sapien
tttgtcctcgtgcagttaccactgc

SEQ ID NO: 422337 - DNA, 25 bp, Homo sapien
taccactgctggcacgtgctgtcat

SEQ ID NO: 422338 - DNA, 25 bp, Homo sapien
tcctctctgctttatggagaatctg

SEQ ID NO: 422339 - DNA, 25 bp, Homo sapien
aaatgacacgtccttctctgcagaa

SEQ ID NO: 422340 - DNA, 25 bp, Homo sapien
aagcccctgggcttcacgttcttct

SEQ ID NO: 422341 - DNA, 25 bp, Homo sapien
gttcttctagagaagtgcctgccat

SEQ ID NO: 422342 - DNA, 25 bp, Homo sapien
tggagcggctgcgtgttccgcacat

SEQ ID NO: 422343 - DNA, 25 bp, Homo sapien
cagcttcacgggaacgagatcctct

SEQ ID NO: 422344 - DNA, 25 bp, Homo sapien
gggacgcttgtaggcagctaacaca

SEQ ID NO: 422345 - DNA, 25 bp, Homo sapien
tccatgagacctggtcacctttctc

SEQ ID NO: 422346 - DNA, 25 bp, Homo sapien
taaatcagtatactataaaagacac

SEQ ID NO: 422347 - DNA, 25 bp, Homo sapien
tactaggcaaccataaaaaacaata

SEQ ID NO: 422348 - DNA, 25 bp, Homo sapien
tataaatcagtatactataaaagac

SEQ ID NO: 422349 - DNA, 25 bp, Homo sapien
aatcagtatactataaaagacacat

SEQ ID NO: 422350 - DNA, 25 bp, Homo sapien
gatggtgtggttttccttcagaatc

SEQ ID NO: 422351 - DNA, 25 bp, Homo sapien
aaggacatctggttacacagcggct

SEQ ID NO: 422352 - DNA, 25 bp, Homo sapien
tgggtggtgaagaaacgaagaggat

SEQ ID NO: 422353 - DNA, 25 bp, Homo sapien
acagcggctttgacggaggcagcaa

SEQ ID NO: 422354 - DNA, 25 bp, Homo sapien
ggacttgcaagctgtaccagaaagc

SEQ ID NO: 422355 - DNA, 25 bp, Homo sapien
gggaagaaacagtaacgctgattca

SEQ ID NO: 422356 - DNA, 25 bp, Homo sapien
tcttgggcctctcttgatttgctgc

SEQ ID NO: 422357 - DNA, 25 bp, Homo sapien
ttgctgcccaaacaatacatgctgg

SEQ ID NO: 422358 - DNA, 25 bp, Homo sapien
tagatataaattgccctctgcagac

SEQ ID NO: 422359 - DNA, 25 bp, Homo sapien
gacgctgggcttggacattgaatgc

SEQ ID NO: 422360 - DNA, 25 bp, Homo sapien
gcacataacccaggacacagtgaga

SEQ ID NO: 422361 - DNA, 25 bp, Homo sapien
tcattaagggtcattgcagattcaa

SEQ ID NO: 422362 - DNA, 25 bp, Homo sapien
tgttttctgtgcacacgtcgtgtga

SEQ ID NO: 422363 - DNA, 25 bp, Homo sapien
tctggagatgatccctctggtgcct

SEQ ID NO: 422364 - DNA, 25 bp, Homo sapien
cataccacactttgccccggaatga

SEQ ID NO: 422365 - DNA, 25 bp, Homo sapien
gaatggcctccaaataacacggcag

SEQ ID NO: 422366 - DNA, 25 bp, Homo sapien
tcattggtctacatgcaatgaccct

SEQ ID NO: 422367 - DNA, 25 bp, Homo sapien
gtctacatgcaatgaccctgccggc

SEQ ID NO: 422368 - DNA, 25 bp, Homo sapien
ttggtctacatgcaatgaccctgcc

SEQ ID NO: 422369 - DNA, 25 bp, Homo sapien
ggtctacatgcaatgaccctgccgg

SEQ ID NO: 422370 - DNA, 25 bp, Homo sapien
cactgttatgctgaaaggctggtgc

SEQ ID NO: 422371 - DNA, 25 bp, Homo sapien
tggttggcaccacggaaaaatcttg

SEQ ID NO: 422372 - DNA, 25 bp, Homo sapien
tcattttggaccgtcaagcgcagcc

SEQ ID NO: 422373 - DNA, 25 bp, Homo sapien
agaaggaatccctccgagcatcgtg

SEQ ID NO: 422374 - DNA, 25 bp, Homo sapien
cttgtttgtcaatacacagcccctg

SEQ ID NO: 422375 - DNA, 25 bp, Homo sapien
aggtccttgtttgtcaatacacagc

SEQ ID NO: 422376 - DNA, 25 bp, Homo sapien
atgcaaagctcgccccaccagatag

SEQ ID NO: 422377 - DNA, 25 bp, Homo sapien
accagatagtccctgaaggtccttg

SEQ ID NO: 422378 - DNA, 25 bp, Homo sapien
agctttggtttttcttgaatcctca

SEQ ID NO: 422379 - DNA, 25 bp, Homo sapien
cctcatggcctgtgcagcatgtcaa

SEQ ID NO: 422380 - DNA, 25 bp, Homo sapien
gctgttaggacagaaccgccaagtc

SEQ ID NO: 422381 - DNA, 25 bp, Homo sapien
ccgccaagtcaggagcaacagataa

SEQ ID NO: 422382 - DNA, 25 bp, Homo sapien
cgctacagtgtaggctgagccagcc

SEQ ID NO: 422383 - DNA, 25 bp, Homo sapien
aggcccagaagaggagtccaaatgc

SEQ ID NO: 422384 - DNA, 25 bp, Homo sapien
tcttttagttctacagattctacat

SEQ ID NO: 422385 - DNA, 25 bp, Homo sapien
gattctacatttgtgataatattcc

SEQ ID NO: 422386 - DNA, 25 bp, Homo sapien
tgccaccaggaaaggcgactcatct

SEQ ID NO: 422387 - DNA, 25 bp, Homo sapien
tccaatagtcttcagatgaccaagt

SEQ ID NO: 422388 - DNA, 25 bp, Homo sapien
ggaaaggcagcccttatgttgccga

SEQ ID NO: 422389 - DNA, 25 bp, Homo sapien
gaaaggcagcccttatgttgccgaa

SEQ ID NO: 422390 - DNA, 25 bp, Homo sapien
cttatgttgccgaaaactgtggctg

SEQ ID NO: 422391 - DNA, 25 bp, Homo sapien
atgttgccgaaaactgtggctgctt

SEQ ID NO: 422392 - DNA, 25 bp, Homo sapien
ggctttcagcggtaggtcccaggaa

SEQ ID NO: 422393 - DNA, 25 bp, Homo sapien
cgtcagttggtaggagagagttcca

SEQ ID NO: 422394 - DNA, 25 bp, Homo sapien
cagcttgggcgagatattcatgaca

SEQ ID NO: 422395 - DNA, 25 bp, Homo sapien
tgccactggatctgtctcacggtac

SEQ ID NO: 422396 - DNA, 25 bp, Homo sapien
gatattagtctcttatctgatgaag

SEQ ID NO: 422397 - DNA, 25 bp, Homo sapien
ttgttgagtttagtgcatatcctgg

SEQ ID NO: 422398 - DNA, 25 bp, Homo sapien
agtagtctatgcatttaaggtctca

SEQ ID NO: 422399 - DNA, 25 bp, Homo sapien
aaggtctcagccacaaaatctttgc

SEQ ID NO: 422400 - DNA, 25 bp, Homo sapien
tgtacctggtttgttgacagctttt

SEQ ID NO: 422401 - DNA, 25 bp, Homo sapien
tggtttgttgacagctttttatcat

SEQ ID NO: 422402 - DNA, 25 bp, Homo sapien
tggctctacctccagtactatactg

SEQ ID NO: 422403 - DNA, 25 bp, Homo sapien
ttttggcatcctgtcgaattgtttg

SEQ ID NO: 422404 - DNA, 25 bp, Homo sapien
taccggcacttcgaaaggctgaggt

SEQ ID NO: 422405 - DNA, 25 bp, Homo sapien
ctgtaataccggcacttcgaaaggc

SEQ ID NO: 422406 - DNA, 25 bp, Homo sapien
taataccggcacttcgaaaggctga

SEQ ID NO: 422407 - DNA, 25 bp, Homo sapien
accggcacttcgaaaggctgaggta

SEQ ID NO: 422408 - DNA, 25 bp, Homo sapien
gacaagtaatatacactacaaaaca

SEQ ID NO: 422409 - DNA, 25 bp, Homo sapien
ccttaaaggaatggacaagtaatat

SEQ ID NO: 422410 - DNA, 25 bp, Homo sapien
tatatcccccaaaagtaatctacaa

SEQ ID NO: 422411 - DNA, 25 bp, Homo sapien
ccaaaagtaatctacaaaagagtgc

SEQ ID NO: 422412 - DNA, 25 bp, Homo sapien
catcaatttctttagtatctcagtg

SEQ ID NO: 422413 - DNA, 25 bp, Homo sapien
gtcatcaatttctttagtatctcag

SEQ ID NO: 422414 - DNA, 25 bp, Homo sapien
tcaatttctttagtatctcagtgct

SEQ ID NO: 422415 - DNA, 25 bp, Homo sapien
caatttctttagtatctcagtgctt

SEQ ID NO: 422416 - DNA, 25 bp, Homo sapien
tgggacaggcgtggcctttactctc

SEQ ID NO: 422417 - DNA, 25 bp, Homo sapien
ttctcaacgaaaaggcaagtgggaa

SEQ ID NO: 422418 - DNA, 25 bp, Homo sapien
tgagaccccagggattcaggcagag

SEQ ID NO: 422419 - DNA, 25 bp, Homo sapien
cacactcgagacttaaaaacagcca

SEQ ID NO: 422420 - DNA, 25 bp, Homo sapien
aacccttcaagcttctggtagaaag

SEQ ID NO: 422421 - DNA, 25 bp, Homo sapien
tttccatacttgacagtagcttaga

SEQ ID NO: 422422 - DNA, 25 bp, Homo sapien
taacacaagtacagaattgctggga

SEQ ID NO: 422423 - DNA, 25 bp, Homo sapien
gcttccactgtgattaggtctaatt

SEQ ID NO: 422424 - DNA, 25 bp, Homo sapien
ttctagcaatggacaacacgccgag

SEQ ID NO: 422425 - DNA, 25 bp, Homo sapien
gctgcaggaaggtcgtgtactatat

SEQ ID NO: 422426 - DNA, 25 bp, Homo sapien
tataatcggtaacatgtcgacatgt

SEQ ID NO: 422427 - DNA, 25 bp, Homo sapien
aaattctgtgtttttagggctctca

SEQ ID NO: 422428 - DNA, 25 bp, Homo sapien
gagtgtgccttggagaaacagaaca

SEQ ID NO: 422429 - DNA, 25 bp, Homo sapien
gttacagaatggaaacattcctcta

SEQ ID NO: 422430 - DNA, 25 bp, Homo sapien
ggtattcacctaacaccacagacaa

SEQ ID NO: 422431 - DNA, 25 bp, Homo sapien
cagacaataatagcatgcctagcag

SEQ ID NO: 422432 - DNA, 25 bp, Homo sapien
actgttgatcttctgcaacatagca

SEQ ID NO: 422433 - DNA, 25 bp, Homo sapien
tttccagccactgatactgttgatc

SEQ ID NO: 422434 - DNA, 25 bp, Homo sapien
ttccagccactgatactgttgatct

SEQ ID NO: 422435 - DNA, 25 bp, Homo sapien
gatactgttgatcttctgcaacata

SEQ ID NO: 422436 - DNA, 25 bp, Homo sapien
acaccattcattccagagtttagca

SEQ ID NO: 422437 - DNA, 25 bp, Homo sapien
ccattcattccagagtttagcacaa

SEQ ID NO: 422438 - DNA, 25 bp, Homo sapien
ttcattccagagtttagcacaacca

SEQ ID NO: 422439 - DNA, 25 bp, Homo sapien
cattccagagtttagcacaaccaac

SEQ ID NO: 422440 - DNA, 25 bp, Homo sapien
ttttgtttgtcttcgaaggagccgc

SEQ ID NO: 422441 - DNA, 25 bp, Homo sapien
ggagcacggatatttttctagcaaa

SEQ ID NO: 422442 - DNA, 25 bp, Homo sapien
cctatagcaattataaacttggagc

SEQ ID NO: 422443 - DNA, 25 bp, Homo sapien
tttgtcttcgaaggagccgcacttc

SEQ ID NO: 422444 - DNA, 25 bp, Homo sapien
agccccggccttaggcgccgtcgcg

SEQ ID NO: 422445 - DNA, 25 bp, Homo sapien
agagccaaggagcggcggcaaccgc

SEQ ID NO: 422446 - DNA, 25 bp, Homo sapien
tggacgccgcggcttcacggagacc

SEQ ID NO: 422447 - DNA, 25 bp, Homo sapien
gagcgcgctgcccttatcccggtgc

SEQ ID NO: 422448 - DNA, 25 bp, Homo sapien
gccagctgcagacgcacctccctgt

SEQ ID NO: 422449 - DNA, 25 bp, Homo sapien
ctcttccgcgccagctgcagacgca

SEQ ID NO: 422450 - DNA, 25 bp, Homo sapien
ttccgcgccagctgcagacgcacct

SEQ ID NO: 422451 - DNA, 25 bp, Homo sapien
gcgccagctgcagacgcacctccct

SEQ ID NO: 422452 - DNA, 25 bp, Homo sapien
ctcttcgtcctcagtcccagctcgg

SEQ ID NO: 422453 - DNA, 25 bp, Homo sapien
tcttcgtcctcagtcccagctcggc

SEQ ID NO: 422454 - DNA, 25 bp, Homo sapien
cctcttcgtcctcagtcccagctcg

SEQ ID NO: 422455 - DNA, 25 bp, Homo sapien
ttcgtcctcagtcccagctcggcac

SEQ ID NO: 422456 - DNA, 25 bp, Homo sapien
cgccttcaccacctctccgaagaac

SEQ ID NO: 422457 - DNA, 25 bp, Homo sapien
gcgccttcaccacctctccgaagaa

SEQ ID NO: 422458 - DNA, 25 bp, Homo sapien
ggcgccttcaccacctctccgaaga

SEQ ID NO: 422459 - DNA, 25 bp, Homo sapien
ccgtgaccggctggacacaactgca

SEQ ID NO: 422460 - DNA, 25 bp, Homo sapien
accgcacgccggcttgcgcgagacc

SEQ ID NO: 422461 - DNA, 25 bp, Homo sapien
tcaccgcgcgggcaataagtcccgc

SEQ ID NO: 422462 - DNA, 25 bp, Homo sapien
cggcttgcgcgagaccacgctccct

SEQ ID NO: 422463 - DNA, 25 bp, Homo sapien
gacgaaattgctagccagtaagagc

SEQ ID NO: 422464 - DNA, 25 bp, Homo sapien
cgaggagcactgtttcaagcaagag

SEQ ID NO: 422465 - DNA, 25 bp, Homo sapien
taccgaaatacatgacatcgcctgc

SEQ ID NO: 422466 - DNA, 25 bp, Homo sapien
tgtcagtagtcacgaaggtaagtac

SEQ ID NO: 422467 - DNA, 25 bp, Homo sapien
tactacaaaaggagcaaaggacaca

SEQ ID NO: 422468 - DNA, 25 bp, Homo sapien
acttagtaggttagaatattctggc

SEQ ID NO: 422469 - DNA, 25 bp, Homo sapien
cacgttactatgttaaaaagatgcg

SEQ ID NO: 422470 - DNA, 25 bp, Homo sapien
ctcacctgtgtatcaacatattggg

SEQ ID NO: 422471 - DNA, 25 bp, Homo sapien
tctgtacaagagctgactgggagga

SEQ ID NO: 422472 - DNA, 25 bp, Homo sapien
tttacactgtaatggagaaccctga

SEQ ID NO: 422473 - DNA, 25 bp, Homo sapien
tcagaagtcaaataggcccattagc

SEQ ID NO: 422474 - DNA, 25 bp, Homo sapien
ggaatagtagtcttatagcaggcca

SEQ ID NO: 422475 - DNA, 25 bp, Homo sapien
tctcacttttgtattgggttctctg

SEQ ID NO: 422476 - DNA, 25 bp, Homo sapien
tttcttagccgcagcagaagcattt

SEQ ID NO: 422477 - DNA, 25 bp, Homo sapien
tgcagcaacagtagcacatctgcgg

SEQ ID NO: 422478 - DNA, 25 bp, Homo sapien
ggcagttttctgctactcttcctaa

SEQ ID NO: 422479 - DNA, 25 bp, Homo sapien
gaaaagttccttcagcatcggcatc

SEQ ID NO: 422480 - DNA, 25 bp, Homo sapien
taaggaagcttttagacgagaggtg

SEQ ID NO: 422481 - DNA, 25 bp, Homo sapien
cacagactggaaacctaacctagcc

SEQ ID NO: 422482 - DNA, 25 bp, Homo sapien
tctgacctaggtatgtgacacacga

SEQ ID NO: 422483 - DNA, 25 bp, Homo sapien
ccagtgaaattctaagggcactatg

SEQ ID NO: 422484 - DNA, 25 bp, Homo sapien
gcttaaagtgcactgtgtttaccac

SEQ ID NO: 422485 - DNA, 25 bp, Homo sapien
cagagtaagacactcatcacggcat

SEQ ID NO: 422486 - DNA, 25 bp, Homo sapien
cagtctccaggcattgtaaatggca

SEQ ID NO: 422487 - DNA, 25 bp, Homo sapien
gattccctacttgggtatggcaaga

SEQ ID NO: 422488 - DNA, 25 bp, Homo sapien
gaagtcagtagaatcccaccagtcc

SEQ ID NO: 422489 - DNA, 25 bp, Homo sapien
tggtgccatgtgatactaagaagtc

SEQ ID NO: 422490 - DNA, 25 bp, Homo sapien
tgttagggtacaagcttaagaactc

SEQ ID NO: 422491 - DNA, 25 bp, Homo sapien
tatgtaaaactcacagcgctcgcac

SEQ ID NO: 422492 - DNA, 25 bp, Homo sapien
caatatattaggaaccagcttggca

SEQ ID NO: 422493 - DNA, 25 bp, Homo sapien
ataaactgaagtaccccaatggctg

SEQ ID NO: 422494 - DNA, 25 bp, Homo sapien
tgttgccaaagatagagcctgcaga

SEQ ID NO: 422495 - DNA, 25 bp, Homo sapien
tagtgtgcaccccttattctaagtg

SEQ ID NO: 422496 - DNA, 25 bp, Homo sapien
taattggatggccagtcaatgacca

SEQ ID NO: 422497 - DNA, 25 bp, Homo sapien
taacttgagaagctaccattgtcgg

SEQ ID NO: 422498 - DNA, 25 bp, Homo sapien
cctgggcattttgcataacgtagaa

SEQ ID NO: 422499 - DNA, 25 bp, Homo sapien
tgaaatggtgatagctctctaagcc

SEQ ID NO: 422500 - DNA, 25 bp, Homo sapien
aagatacatttagttgccccagcaa

SEQ ID NO: 422501 - DNA, 25 bp, Homo sapien
aataccagtctgatgcttcgccttg

SEQ ID NO: 422502 - DNA, 25 bp, Homo sapien
gaatggccatctacactggagtagc

SEQ ID NO: 422503 - DNA, 25 bp, Homo sapien
ggtgcaaccattgaaatctaacaca

SEQ ID NO: 422504 - DNA, 25 bp, Homo sapien
tgtctttgacgtctcacagttttag

SEQ ID NO: 422505 - DNA, 25 bp, Homo sapien
tatcatccacacttaacctagggcg

SEQ ID NO: 422506 - DNA, 25 bp, Homo sapien
ttttgcatagtccaaatcctcccag

SEQ ID NO: 422507 - DNA, 25 bp, Homo sapien
ttggaactagtatcaggtctaaact

SEQ ID NO: 422508 - DNA, 25 bp, Homo sapien
cattttccaattcaggatgcgatct

SEQ ID NO: 422509 - DNA, 25 bp, Homo sapien
caggatgcgatctcttcctttttac

SEQ ID NO: 422510 - DNA, 25 bp, Homo sapien
tctgattcagttacagatcccaaat

SEQ ID NO: 422511 - DNA, 25 bp, Homo sapien
ccacctgcgcagcccataattcagt

SEQ ID NO: 422512 - DNA, 25 bp, Homo sapien
aaaggagcctttccataggtcctga

SEQ ID NO: 422513 - DNA, 25 bp, Homo sapien
aaaaggagcctttccataggtcctg

SEQ ID NO: 422514 - DNA, 25 bp, Homo sapien
ctgcgcagcccataattcagttcca

SEQ ID NO: 422515 - DNA, 25 bp, Homo sapien
gcttgatcttattggcagccgtagc

SEQ ID NO: 422516 - DNA, 25 bp, Homo sapien
tgagtcactggaacagacccttttc

SEQ ID NO: 422517 - DNA, 25 bp, Homo sapien
gccgtagctgcacatcttcgagtaa

SEQ ID NO: 422518 - DNA, 25 bp, Homo sapien
tactaccttcggagtcaggatcagg

SEQ ID NO: 422519 - DNA, 25 bp, Homo sapien
cagtgaacaaagataaatgttttga

SEQ ID NO: 422520 - DNA, 25 bp, Homo sapien
gtgaacaaagataaatgttttgaat

SEQ ID NO: 422521 - DNA, 25 bp, Homo sapien
gaacaaagataaatgttttgaatta

SEQ ID NO: 422522 - DNA, 25 bp, Homo sapien
tcagtgaacaaagataaatgttttg

SEQ ID NO: 422523 - DNA, 25 bp, Homo sapien
aagaaactcgcattcttgtgaaatg

SEQ ID NO: 422524 - DNA, 25 bp, Homo sapien
cagagtcttctgagtcactcagaat

SEQ ID NO: 422525 - DNA, 25 bp, Homo sapien
gaggaacactgggacatagcaatag

SEQ ID NO: 422526 - DNA, 25 bp, Homo sapien
cacagttcagatttcctgaaattgg

SEQ ID NO: 422527 - DNA, 25 bp, Homo sapien
gcacagacgttgatgggccagcagt

SEQ ID NO: 422528 - DNA, 25 bp, Homo sapien
gatcttcctggttcagaatctgctt

SEQ ID NO: 422529 - DNA, 25 bp, Homo sapien
ctgccttaagtttctgcacagacgt

SEQ ID NO: 422530 - DNA, 25 bp, Homo sapien
caccagatcttcctggttcagaatc

SEQ ID NO: 422531 - DNA, 25 bp, Homo sapien
taaatagactctctttcgagtggct

SEQ ID NO: 422532 - DNA, 25 bp, Homo sapien
gggctacccgcaaatcactttctga

SEQ ID NO: 422533 - DNA, 25 bp, Homo sapien
gggacttgtaaccattagcatgcca

SEQ ID NO: 422534 - DNA, 25 bp, Homo sapien
catgccaatttttccgggctacccg

SEQ ID NO: 422535 - DNA, 25 bp, Homo sapien
tagcccactgcgtgaggaggattca

SEQ ID NO: 422536 - DNA, 25 bp, Homo sapien
gaactactggaagctgacgatgaca

SEQ ID NO: 422537 - DNA, 25 bp, Homo sapien
gagattgctgcttctggatagccca

SEQ ID NO: 422538 - DNA, 25 bp, Homo sapien
tgagcagctctagttctggttaccc

SEQ ID NO: 422539 - DNA, 25 bp, Homo sapien
gcagttcataacattactctgaaca

SEQ ID NO: 422540 - DNA, 25 bp, Homo sapien
tttacacacataagcaagcagttca

SEQ ID NO: 422541 - DNA, 25 bp, Homo sapien
tcataacattactctgaacattaca

SEQ ID NO: 422542 - DNA, 25 bp, Homo sapien
aagcaagcagttcataacattactc

SEQ ID NO: 422543 - DNA, 25 bp, Homo sapien
agtaatccaaactcttctgcaaggc

SEQ ID NO: 422544 - DNA, 25 bp, Homo sapien
gactctgtcactcaataaggaaccc

SEQ ID NO: 422545 - DNA, 25 bp, Homo sapien
tctgcaaggctcgaaagttgctaaa

SEQ ID NO: 422546 - DNA, 25 bp, Homo sapien
taaggaacccagttcagtaatccaa

SEQ ID NO: 422547 - DNA, 25 bp, Homo sapien
tgaagagtcaccagaagtaacacct

SEQ ID NO: 422548 - DNA, 25 bp, Homo sapien
taacacctgaagagataccagcact

SEQ ID NO: 422549 - DNA, 25 bp, Homo sapien
taggagaacctaccaactcaggaat

SEQ ID NO: 422550 - DNA, 25 bp, Homo sapien
tgtgggttccaagataagctgtcct

SEQ ID NO: 422551 - DNA, 25 bp, Homo sapien
ataaagcaagcttgccataaccagt

SEQ ID NO: 422552 - DNA, 25 bp, Homo sapien
taaagcaagcttgccataaccagtt

SEQ ID NO: 422553 - DNA, 25 bp, Homo sapien
atacttttgttaggctgactgtcac

SEQ ID NO: 422554 - DNA, 25 bp, Homo sapien
gatacttttgttaggctgactgtca

SEQ ID NO: 422555 - DNA, 25 bp, Homo sapien
tgatacttttgttaggctgactgtc

SEQ ID NO: 422556 - DNA, 25 bp, Homo sapien
ctgatacttttgttaggctgactgt

SEQ ID NO: 422557 - DNA, 25 bp, Homo sapien
cctctggcttcttcgaagtttttca

SEQ ID NO: 422558 - DNA, 25 bp, Homo sapien
ctttacaattttgccgttgcttgaa

SEQ ID NO: 422559 - DNA, 25 bp, Homo sapien
tttgccgttgcttgaacctctggct

SEQ ID NO: 422560 - DNA, 25 bp, Homo sapien
gcagataatctcaaggtcatactat

SEQ ID NO: 422561 - DNA, 25 bp, Homo sapien
gcttataggtaatggctgtcaccca

SEQ ID NO: 422562 - DNA, 25 bp, Homo sapien
tatatcactgcttataggtaatggc

SEQ ID NO: 422563 - DNA, 25 bp, Homo sapien
taattgtaatcattgagatcccttg

SEQ ID NO: 422564 - DNA, 25 bp, Homo sapien
tcccttgcaatgtattatatcactg

SEQ ID NO: 422565 - DNA, 25 bp, Homo sapien
taatgttctaacctctattacacag

SEQ ID NO: 422566 - DNA, 25 bp, Homo sapien
cattggaaaattatctacacagatc

SEQ ID NO: 422567 - DNA, 25 bp, Homo sapien
ctaacctctattacacagtggaaaa

SEQ ID NO: 422568 - DNA, 25 bp, Homo sapien
cacagatcaggcagtttttttcaat

SEQ ID NO: 422569 - DNA, 25 bp, Homo sapien
tccaaagggctgtcataatttcccg

SEQ ID NO: 422570 - DNA, 25 bp, Homo sapien
ttgcattgctaaatatcagccggat

SEQ ID NO: 422571 - DNA, 25 bp, Homo sapien
ttgtttggtgtatacgcttttgcat

SEQ ID NO: 422572 - DNA, 25 bp, Homo sapien
cataatttcccgcatctagagtttc

SEQ ID NO: 422573 - DNA, 25 bp, Homo sapien
aatcaacaggttgtctaaatggttc

SEQ ID NO: 422574 - DNA, 25 bp, Homo sapien
atcaacaggttgtctaaatggttca

SEQ ID NO: 422575 - DNA, 25 bp, Homo sapien
tcaacatagttcgtagctctgatgc

SEQ ID NO: 422576 - DNA, 25 bp, Homo sapien
catagttcgtagctctgatgctttt

SEQ ID NO: 422577 - DNA, 25 bp, Homo sapien
gctttcaacatagttcgtagctctg

SEQ ID NO: 422578 - DNA, 25 bp, Homo sapien
tccagttgctttcaacatagttcgt

SEQ ID NO: 422579 - DNA, 25 bp, Homo sapien
ctccttccagaagatgttttaggaa

SEQ ID NO: 422580 - DNA, 25 bp, Homo sapien
agatgttttaggaagatcactatca

SEQ ID NO: 422581 - DNA, 25 bp, Homo sapien
tccagaagatgttttaggaagatca

SEQ ID NO: 422582 - DNA, 25 bp, Homo sapien
gatgttttaggaagatcactatcat

SEQ ID NO: 422583 - DNA, 25 bp, Homo sapien
gatattagctaaaacaaattacctc

SEQ ID NO: 422584 - DNA, 25 bp, Homo sapien
acacctttcactagctaaaatatag

SEQ ID NO: 422585 - DNA, 25 bp, Homo sapien
ggactactacaagagttggtactac

SEQ ID NO: 422586 - DNA, 25 bp, Homo sapien
tccaaggtactttatataatacacc

SEQ ID NO: 422587 - DNA, 25 bp, Homo sapien
cattataaaatcaacaaacttcata

SEQ ID NO: 422588 - DNA, 25 bp, Homo sapien
accattataaaatcaacaaacttca

SEQ ID NO: 422589 - DNA, 25 bp, Homo sapien
ccattataaaatcaacaaacttcat

SEQ ID NO: 422590 - DNA, 25 bp, Homo sapien
attataaaatcaacaaacttcatac

SEQ ID NO: 422591 - DNA, 25 bp, Homo sapien
atcctcagcattttgctcatcattt

SEQ ID NO: 422592 - DNA, 25 bp, Homo sapien
cagatgtgttagaaagttctgagat

SEQ ID NO: 422593 - DNA, 25 bp, Homo sapien
cattttcagatgtgttagaaagttc

SEQ ID NO: 422594 - DNA, 25 bp, Homo sapien
aaagttctgagatatttgtacagtg

SEQ ID NO: 422595 - DNA, 25 bp, Homo sapien
tccaagacttaggacagaatcaaac

SEQ ID NO: 422596 - DNA, 25 bp, Homo sapien
caaaccaagaaagctgacaagaatc

SEQ ID NO: 422597 - DNA, 25 bp, Homo sapien
aagctgacaagaatcagttactccc

SEQ ID NO: 422598 - DNA, 25 bp, Homo sapien
cagaatcaaaccaagaaagctgaca

SEQ ID NO: 422599 - DNA, 25 bp, Homo sapien
cactctcaggttcgttaaatgttct

SEQ ID NO: 422600 - DNA, 25 bp, Homo sapien
gacttcccaaactaacgcagacagc

SEQ ID NO: 422601 - DNA, 25 bp, Homo sapien
ctttttagctgatcttgcaattaca

SEQ ID NO: 422602 - DNA, 25 bp, Homo sapien
gttctggcattatgttctatatatc

SEQ ID NO: 422603 - DNA, 25 bp, Homo sapien
gggtctcactccaccacccaggatg

SEQ ID NO: 422604 - DNA, 25 bp, Homo sapien
gagtgtagtggcgtgatctcagctc

SEQ ID NO: 422605 - DNA, 25 bp, Homo sapien
tagtggcgtgatctcagctcactgc

SEQ ID NO: 422606 - DNA, 25 bp, Homo sapien
agggtctcactccaccacccaggat

SEQ ID NO: 422607 - DNA, 25 bp, Homo sapien
atgaaagactgccaacagctgctgc

SEQ ID NO: 422608 - DNA, 25 bp, Homo sapien
gatggacttttgatgaaagactgcc

SEQ ID NO: 422609 - DNA, 25 bp, Homo sapien
aatcacaataggtaactccagatgg

SEQ ID NO: 422610 - DNA, 25 bp, Homo sapien
tgacagttccctgggagcagtagcc

SEQ ID NO: 422611 - DNA, 25 bp, Homo sapien
ctgtaaaatcgattaacaagtctca

SEQ ID NO: 422612 - DNA, 25 bp, Homo sapien
ggttggataagctactacagtacag

SEQ ID NO: 422613 - DNA, 25 bp, Homo sapien
tacagtacagtacttcgggtatgta

SEQ ID NO: 422614 - DNA, 25 bp, Homo sapien
caagtctcattcgaattgtgtaaag

SEQ ID NO: 422615 - DNA, 25 bp, Homo sapien
tgaccccattcaccagcttgtggtt

SEQ ID NO: 422616 - DNA, 25 bp, Homo sapien
ccccattcaccagcttgtggtttat

SEQ ID NO: 422617 - DNA, 25 bp, Homo sapien
tgtggtttatagagcaatttctcta

SEQ ID NO: 422618 - DNA, 25 bp, Homo sapien
gcttgtggtttatagagcaatttct

SEQ ID NO: 422619 - DNA, 25 bp, Homo sapien
tgtgtactgtgtactggctaccagg

SEQ ID NO: 422620 - DNA, 25 bp, Homo sapien
tgggaatgctcttaacttcagtaga

SEQ ID NO: 422621 - DNA, 25 bp, Homo sapien
gctaccaggttaactcagagcacgt

SEQ ID NO: 422622 - DNA, 25 bp, Homo sapien
cagagcacgtttacaatgagggaac

SEQ ID NO: 422623 - DNA, 25 bp, Homo sapien
gccaacagcagtgggatgctagcac

SEQ ID NO: 422624 - DNA, 25 bp, Homo sapien
cagtgaaaaacggagggatcctgga

SEQ ID NO: 422625 - DNA, 25 bp, Homo sapien
tgagctaagtgtaggtaccaggccc

SEQ ID NO: 422626 - DNA, 25 bp, Homo sapien
cactgcaatgtgctagctgtataag

SEQ ID NO: 422627 - DNA, 25 bp, Homo sapien
tcaggaattggttccatgtcccatg

SEQ ID NO: 422628 - DNA, 25 bp, Homo sapien
aggaattggttccatgtcccatggg

SEQ ID NO: 422629 - DNA, 25 bp, Homo sapien
tgtcccatgggctaagtttttcaat

SEQ ID NO: 422630 - DNA, 25 bp, Homo sapien
tttttcaatttcagtattatcccac

SEQ ID NO: 422631 - DNA, 25 bp, Homo sapien
caggatactgtggttgatatggctc

SEQ ID NO: 422632 - DNA, 25 bp, Homo sapien
cttaacactgttccaaaccaccaag

SEQ ID NO: 422633 - DNA, 25 bp, Homo sapien
catcaataatagagcggaatctgtc

SEQ ID NO: 422634 - DNA, 25 bp, Homo sapien
gatatggctcttgacttaacactgt

SEQ ID NO: 422635 - DNA, 25 bp, Homo sapien
ctacaaaataccatatgatacagat

SEQ ID NO: 422636 - DNA, 25 bp, Homo sapien
accatatgatacagataaaaaagcc

SEQ ID NO: 422637 - DNA, 25 bp, Homo sapien
tgaggcatttctctgctaacattca

SEQ ID NO: 422638 - DNA, 25 bp, Homo sapien
aatgatcaagtctgaggcatttctc

SEQ ID NO: 422639 - DNA, 25 bp, Homo sapien
caagaaagtcaataacatctggcat

SEQ ID NO: 422640 - DNA, 25 bp, Homo sapien
taaaattgacgcaatacaagaaagt

SEQ ID NO: 422641 - DNA, 25 bp, Homo sapien
ttcatcataaaattgacgcaataca

SEQ ID NO: 422642 - DNA, 25 bp, Homo sapien
acaagaaagtcaataacatctggca

SEQ ID NO: 422643 - DNA, 25 bp, Homo sapien
taaatgctagttttaggcaacagag

SEQ ID NO: 422644 - DNA, 25 bp, Homo sapien
ccagttgctggatctataaatgcta

SEQ ID NO: 422645 - DNA, 25 bp, Homo sapien
gaaagatttgtccataagttttcca

SEQ ID NO: 422646 - DNA, 25 bp, Homo sapien
gggcccaacttcatatcgtattcca

SEQ ID NO: 422647 - DNA, 25 bp, Homo sapien
atggatttgccatagtcaaccttcc

SEQ ID NO: 422648 - DNA, 25 bp, Homo sapien
tttgccatagtcaaccttcccccca

SEQ ID NO: 422649 - DNA, 25 bp, Homo sapien
tggatttgccatagtcaaccttccc

SEQ ID NO: 422650 - DNA, 25 bp, Homo sapien
gatttgccatagtcaaccttccccc

SEQ ID NO: 422651 - DNA, 25 bp, Homo sapien
taaagcctaacttatacaagcagag

SEQ ID NO: 422652 - DNA, 25 bp, Homo sapien
caaataaagcaagtacgcagttcac

SEQ ID NO: 422653 - DNA, 25 bp, Homo sapien
cacttgtttgcagtgcgagagctta

SEQ ID NO: 422654 - DNA, 25 bp, Homo sapien
tcaactagaaacatgctcgtcaggc

SEQ ID NO: 422655 - DNA, 25 bp, Homo sapien
cattcccacaggatcttaaggtttg

SEQ ID NO: 422656 - DNA, 25 bp, Homo sapien
tcaacagtgagtgaactacaatact

SEQ ID NO: 422657 - DNA, 25 bp, Homo sapien
ttgcccactgacaaacaagccattc

SEQ ID NO: 422658 - DNA, 25 bp, Homo sapien
acaaaatatcccctagaaagcctgg

SEQ ID NO: 422659 - DNA, 25 bp, Homo sapien
atttcttcttacagcctcaatataa

SEQ ID NO: 422660 - DNA, 25 bp, Homo sapien
tataagcttcatgaccctgtcgaaa

SEQ ID NO: 422661 - DNA, 25 bp, Homo sapien
ccatggctccttattagggttcagt

SEQ ID NO: 422662 - DNA, 25 bp, Homo sapien
catgaccctgtcgaaaatatattac

SEQ ID NO: 422663 - DNA, 25 bp, Homo sapien
tgtcagtaatccaaactggagggtg

SEQ ID NO: 422664 - DNA, 25 bp, Homo sapien
tggtgtcagtaatccaaactggagg

SEQ ID NO: 422665 - DNA, 25 bp, Homo sapien
ctaagtgtggtgtcagtaatccaaa

SEQ ID NO: 422666 - DNA, 25 bp, Homo sapien
tgtggtgtcagtaatccaaactgga

SEQ ID NO: 422667 - DNA, 25 bp, Homo sapien
tggccacaggctaatcatcacaagg

SEQ ID NO: 422668 - DNA, 25 bp, Homo sapien
caagcagccagctaaggagagacct

SEQ ID NO: 422669 - DNA, 25 bp, Homo sapien
taaagccgatgagactatgtgcaac

SEQ ID NO: 422670 - DNA, 25 bp, Homo sapien
ttacccatagcctgttctgccaaga

SEQ ID NO: 422671 - DNA, 25 bp, Homo sapien
ttctcagtatcatagtgaaccctac

SEQ ID NO: 422672 - DNA, 25 bp, Homo sapien
gcttctcttctgtgtaagtatgtac

SEQ ID NO: 422673 - DNA, 25 bp, Homo sapien
aagtatgtacgtctttctcagtatc

SEQ ID NO: 422674 - DNA, 25 bp, Homo sapien
atagtgaaccctacagtaaactgcc

SEQ ID NO: 422675 - DNA, 25 bp, Homo sapien
caaggtaaaagaatcatggagtgat

SEQ ID NO: 422676 - DNA, 25 bp, Homo sapien
atagtgaattaagcaaggtaaaaga

SEQ ID NO: 422677 - DNA, 25 bp, Homo sapien
agcaaggtaaaagaatcatggagtg

SEQ ID NO: 422678 - DNA, 25 bp, Homo sapien
taagcaaggtaaaagaatcatggag

SEQ ID NO: 422679 - DNA, 25 bp, Homo sapien
ggtccagtgtttggagaagatctgt

SEQ ID NO: 422680 - DNA, 25 bp, Homo sapien
gtcggctccttaacaaaagctctgg

SEQ ID NO: 422681 - DNA, 25 bp, Homo sapien
ctctgggttggatacaaggaggtaa

SEQ ID NO: 422682 - DNA, 25 bp, Homo sapien
caaggaggtaaattgccttgaacat

SEQ ID NO: 422683 - DNA, 25 bp, Homo sapien
ccactatgcccatcagccctatgcc

SEQ ID NO: 422684 - DNA, 25 bp, Homo sapien
aattcccagttgtctccggtcctgc

SEQ ID NO: 422685 - DNA, 25 bp, Homo sapien
gatgtgtggagagaaccatggccac

SEQ ID NO: 422686 - DNA, 25 bp, Homo sapien
tatgccagcacccagtttcactgcg

SEQ ID NO: 422687 - DNA, 25 bp, Homo sapien
gtgtcatgtggttcacaaaggtggc

SEQ ID NO: 422688 - DNA, 25 bp, Homo sapien
tgtgtcatgtggttcacaaaggtgg

SEQ ID NO: 422689 - DNA, 25 bp, Homo sapien
ctgtgtcatgtggttcacaaaggtg

SEQ ID NO: 422690 - DNA, 25 bp, Homo sapien
ccaatcccacggtctcctcataggg

SEQ ID NO: 422691 - DNA, 25 bp, Homo sapien
agacctgcacttagactggatgtta

SEQ ID NO: 422692 - DNA, 25 bp, Homo sapien
tagactggatgttaacggtttgaga

SEQ ID NO: 422693 - DNA, 25 bp, Homo sapien
tcatagggcaacagggccaatctgc

SEQ ID NO: 422694 - DNA, 25 bp, Homo sapien
aatcgagtaattcgtcgacgacatg

SEQ ID NO: 422695 - DNA, 25 bp, Homo sapien
gacgacatgatgttcttaaaggagg

SEQ ID NO: 422696 - DNA, 25 bp, Homo sapien
taaaggaggctgcaaattgatgccc

SEQ ID NO: 422697 - DNA, 25 bp, Homo sapien
ttgatgcccgcatcagctgtccaat

SEQ ID NO: 422698 - DNA, 25 bp, Homo sapien
gaaggtgacgtgcaccaagaaccag

SEQ ID NO: 422699 - DNA, 25 bp, Homo sapien
ctagccatgttacggataggtggac

SEQ ID NO: 422700 - DNA, 25 bp, Homo sapien
ggaaatctggatctcaaaactaaca

SEQ ID NO: 422701 - DNA, 25 bp, Homo sapien
ggagactggctgcacaactatgtca

SEQ ID NO: 422702 - DNA, 25 bp, Homo sapien
gaactttcgctgtaactctcacttt

SEQ ID NO: 422703 - DNA, 25 bp, Homo sapien
tgaactttcgctgtaactctcactt

SEQ ID NO: 422704 - DNA, 25 bp, Homo sapien
actttcgctgtaactctcacttttt

SEQ ID NO: 422705 - DNA, 25 bp, Homo sapien
cttgaactttcgctgtaactctcac

SEQ ID NO: 422706 - DNA, 25 bp, Homo sapien
tgaagactcatttccagaagataac

SEQ ID NO: 422707 - DNA, 25 bp, Homo sapien
agagcttgaagactcatttccagaa

SEQ ID NO: 422708 - DNA, 25 bp, Homo sapien
gaagactcatttccagaagataact

SEQ ID NO: 422709 - DNA, 25 bp, Homo sapien
gcttgaagactcatttccagaagat

SEQ ID NO: 422710 - DNA, 25 bp, Homo sapien
cgatttcttctaccataatttggat

SEQ ID NO: 422711 - DNA, 25 bp, Homo sapien
taatttggatatttacgcctacatg

SEQ ID NO: 422712 - DNA, 25 bp, Homo sapien
gccagctacgatttcttctaccata

SEQ ID NO: 422713 - DNA, 25 bp, Homo sapien
tgtctagactgtgataccaaaacca

SEQ ID NO: 422714 - DNA, 25 bp, Homo sapien
tctaacagctatataaccttaagtc

SEQ ID NO: 422715 - DNA, 25 bp, Homo sapien
gaaatactccacttcagatgaaagt

SEQ ID NO: 422716 - DNA, 25 bp, Homo sapien
tcaataccattgttaggcactaggc

SEQ ID NO: 422717 - DNA, 25 bp, Homo sapien
taaaatagctatggctgctttccaa

SEQ ID NO: 422718 - DNA, 25 bp, Homo sapien
tcacctttctctaatcggaagtctt

SEQ ID NO: 422719 - DNA, 25 bp, Homo sapien
ttcacctttctctaatcggaagtct

SEQ ID NO: 422720 - DNA, 25 bp, Homo sapien
cacctttctctaatcggaagtcttc

SEQ ID NO: 422721 - DNA, 25 bp, Homo sapien
cacgttctgtagcaatctgactgcg

SEQ ID NO: 422722 - DNA, 25 bp, Homo sapien
cactcttcgtttccaagcctgcagg

SEQ ID NO: 422723 - DNA, 25 bp, Homo sapien
gatgcatctgacgaacaccttcaac

SEQ ID NO: 422724 - DNA, 25 bp, Homo sapien
ttcaacttgtccactacgacgcaga

SEQ ID NO: 422725 - DNA, 25 bp, Homo sapien
cattatcattggtttgcaggcttat

SEQ ID NO: 422726 - DNA, 25 bp, Homo sapien
gcaggcttataatttgttcaatcac

SEQ ID NO: 422727 - DNA, 25 bp, Homo sapien
tctgggctgcgttcatcattatcat

SEQ ID NO: 422728 - DNA, 25 bp, Homo sapien
tgctcccattctctgatcttgctgc

SEQ ID NO: 422729 - DNA, 25 bp, Homo sapien
gatttccatctacatctaccaagaa

SEQ ID NO: 422730 - DNA, 25 bp, Homo sapien
gatacttggttggatgaggatttcc

SEQ ID NO: 422731 - DNA, 25 bp, Homo sapien
tggtcgatagtcagtatggaagaac

SEQ ID NO: 422732 - DNA, 25 bp, Homo sapien
gcagaattttctcggcctggtacta

SEQ ID NO: 422733 - DNA, 25 bp, Homo sapien
aaggtgcccatgagaatctgtacag

SEQ ID NO: 422734 - DNA, 25 bp, Homo sapien
atcctgtgaaaacttacagtcaaac

SEQ ID NO: 422735 - DNA, 25 bp, Homo sapien
aggtgcccatgagaatctgtacagg

SEQ ID NO: 422736 - DNA, 25 bp, Homo sapien
gtgcccatgagaatctgtacaggca

SEQ ID NO: 422737 - DNA, 25 bp, Homo sapien
ttctggaatcaaagggatgtgtctc

SEQ ID NO: 422738 - DNA, 25 bp, Homo sapien
taatatcccatataaatatgctgcc

SEQ ID NO: 422739 - DNA, 25 bp, Homo sapien
gggatgtgtctccagaacaaatact

SEQ ID NO: 422740 - DNA, 25 bp, Homo sapien
ggtaccttttgtaatatcccatata

SEQ ID NO: 422741 - DNA, 25 bp, Homo sapien
cattaagttatgaagcagttgtcca

SEQ ID NO: 422742 - DNA, 25 bp, Homo sapien
cacagctgtgacaacaatgctatca

SEQ ID NO: 422743 - DNA, 25 bp, Homo sapien
tttgattccaagctatcattgttac

SEQ ID NO: 422744 - DNA, 25 bp, Homo sapien
gaggacatgatcattcacagctgtg

SEQ ID NO: 422745 - DNA, 25 bp, Homo sapien
tctagaaacaggtgagggcaaaacc

SEQ ID NO: 422746 - DNA, 25 bp, Homo sapien
tcttatcaaccctacagtgagttca

SEQ ID NO: 422747 - DNA, 25 bp, Homo sapien
taaagaaatccaacccatgtgccta

SEQ ID NO: 422748 - DNA, 25 bp, Homo sapien
cagctgacccagaacagactgtcta

SEQ ID NO: 422749 - DNA, 25 bp, Homo sapien
aatgctcctccattctaactgctca

SEQ ID NO: 422750 - DNA, 25 bp, Homo sapien
aaatctccaaatccgtgctgttcca

SEQ ID NO: 422751 - DNA, 25 bp, Homo sapien
gttccatctctgctaccacttagga

SEQ ID NO: 422752 - DNA, 25 bp, Homo sapien
tccatctctgctaccacttaggaac

SEQ ID NO: 422753 - DNA, 25 bp, Homo sapien
ttacaaaattggatactatctactt

SEQ ID NO: 422754 - DNA, 25 bp, Homo sapien
acaaaattggatactatctacttta

SEQ ID NO: 422755 - DNA, 25 bp, Homo sapien
tacaaaattggatactatctacttt

SEQ ID NO: 422756 - DNA, 25 bp, Homo sapien
cattctgattacatgatcagtacta

SEQ ID NO: 422757 - DNA, 25 bp, Homo sapien
ttctgcgattttttcgggtgcttca

SEQ ID NO: 422758 - DNA, 25 bp, Homo sapien
ctgcgattttttcgggtgcttcaaa

SEQ ID NO: 422759 - DNA, 25 bp, Homo sapien
cagtactacctgtggctaaaaacat

SEQ ID NO: 422760 - DNA, 25 bp, Homo sapien
catctgtattattaagggtggcaat

SEQ ID NO: 422761 - DNA, 25 bp, Homo sapien
catacctaaccctagcttgttcaag

SEQ ID NO: 422762 - DNA, 25 bp, Homo sapien
gaaaggttaccacacaagttcactg

SEQ ID NO: 422763 - DNA, 25 bp, Homo sapien
tataatgccaattaagcaccagcgc

SEQ ID NO: 422764 - DNA, 25 bp, Homo sapien
aaagttcttagcaaccaagtggtca

SEQ ID NO: 422765 - DNA, 25 bp, Homo sapien
taaacaccagaagtcatttaccatg

SEQ ID NO: 422766 - DNA, 25 bp, Homo sapien
ttaccatgtagctaataaaagttct

SEQ ID NO: 422767 - DNA, 25 bp, Homo sapien
taccagccatctcttatatcactga

SEQ ID NO: 422768 - DNA, 25 bp, Homo sapien
aaagaagaacaaagcatttgaacgc

SEQ ID NO: 422769 - DNA, 25 bp, Homo sapien
gaacgcctggcctaggcttttcagt

SEQ ID NO: 422770 - DNA, 25 bp, Homo sapien
ctaggcttttcagtgaacttcaggg

SEQ ID NO: 422771 - DNA, 25 bp, Homo sapien
gaacaaagcatttgaacgcctggcc

SEQ ID NO: 422772 - DNA, 25 bp, Homo sapien
ggaaaccatgtatctttgagagcct

SEQ ID NO: 422773 - DNA, 25 bp, Homo sapien
aaagcaaactgtcccatcagcacca

SEQ ID NO: 422774 - DNA, 25 bp, Homo sapien
taaggattctaaatcccattgccaa

SEQ ID NO: 422775 - DNA, 25 bp, Homo sapien
cagcaccagtggaaaccatgtatct

SEQ ID NO: 422776 - DNA, 25 bp, Homo sapien
ggattccgtgctacaatctcatgtg

SEQ ID NO: 422777 - DNA, 25 bp, Homo sapien
ctcaaggccagtcgccaatgactat

SEQ ID NO: 422778 - DNA, 25 bp, Homo sapien
gactacctagtatttaccacaggct

SEQ ID NO: 422779 - DNA, 25 bp, Homo sapien
ggctcatgagcttaagaacgtctac

SEQ ID NO: 422780 - DNA, 25 bp, Homo sapien
tgttgatcctcactaccgttatgca

SEQ ID NO: 422781 - DNA, 25 bp, Homo sapien
ttttagctgcactggacaacaataa

SEQ ID NO: 422782 - DNA, 25 bp, Homo sapien
tcttgagaaatacacttgtgatcac

SEQ ID NO: 422783 - DNA, 25 bp, Homo sapien
gtctctatggtccaagaattcaaca

SEQ ID NO: 422784 - DNA, 25 bp, Homo sapien
ttgataaagcctcaccaattgcatg

SEQ ID NO: 422785 - DNA, 25 bp, Homo sapien
gattatctgttattaattctggctg

SEQ ID NO: 422786 - DNA, 25 bp, Homo sapien
atttacaaaaagtgaggattatctg

SEQ ID NO: 422787 - DNA, 25 bp, Homo sapien
tatataagtcgacccatgcaattca

SEQ ID NO: 422788 - DNA, 25 bp, Homo sapien
atttctcaattccaaagaaactgtt

SEQ ID NO: 422789 - DNA, 25 bp, Homo sapien
ataggaatgtgcccactaagctaca

SEQ ID NO: 422790 - DNA, 25 bp, Homo sapien
gaatgtgcccactaagctacaagtt

SEQ ID NO: 422791 - DNA, 25 bp, Homo sapien
taggaatgtgcccactaagctacaa

SEQ ID NO: 422792 - DNA, 25 bp, Homo sapien
ctcaagcaccacactctaataattt

SEQ ID NO: 422793 - DNA, 25 bp, Homo sapien
gcaactggggcacaagttctcaagc

SEQ ID NO: 422794 - DNA, 25 bp, Homo sapien
cagctccccgcagcaatcattgtat

SEQ ID NO: 422795 - DNA, 25 bp, Homo sapien
aagatgtaattgatcctgtgtgtcc

SEQ ID NO: 422796 - DNA, 25 bp, Homo sapien
cggccattatgtgttgaccaaatct

SEQ ID NO: 422797 - DNA, 25 bp, Homo sapien
tgtagataacaagcggccattatgt

SEQ ID NO: 422798 - DNA, 25 bp, Homo sapien
taacaagcggccattatgtgttgac

SEQ ID NO: 422799 - DNA, 25 bp, Homo sapien
gacctcttaatgtagataacaagcg

SEQ ID NO: 422800 - DNA, 25 bp, Homo sapien
agattctatgtcctgtcctatcaaa

SEQ ID NO: 422801 - DNA, 25 bp, Homo sapien
tagatgtccgagaatccttctgtgc

SEQ ID NO: 422802 - DNA, 25 bp, Homo sapien
aagtggaacaccctgtgagttgttt

SEQ ID NO: 422803 - DNA, 25 bp, Homo sapien
agttgttttcctcgatgtatctcca

SEQ ID NO: 422804 - DNA, 25 bp, Homo sapien
tacagcatttataaaggttgttgag

SEQ ID NO: 422805 - DNA, 25 bp, Homo sapien
agcatttataaaggttgttgagaaa

SEQ ID NO: 422806 - DNA, 25 bp, Homo sapien
taacaataatttgacatttgatact

SEQ ID NO: 422807 - DNA, 25 bp, Homo sapien
ttaacaataatttgacatttgatac

SEQ ID NO: 422808 - DNA, 25 bp, Homo sapien
tggtggggaaccataattcactggc

SEQ ID NO: 422809 - DNA, 25 bp, Homo sapien
caagatttggtggggaaccataatt

SEQ ID NO: 422810 - DNA, 25 bp, Homo sapien
tttggtggggaaccataattcactg

SEQ ID NO: 422811 - DNA, 25 bp, Homo sapien
gatttggtggggaaccataattcac

SEQ ID NO: 422812 - DNA, 25 bp, Homo sapien
tcctctatgaagagcagcaaaggca

SEQ ID NO: 422813 - DNA, 25 bp, Homo sapien
ggcagagcccttccaaactgtgtgc

SEQ ID NO: 422814 - DNA, 25 bp, Homo sapien
aggcagagcccttccaaactgtgtg

SEQ ID NO: 422815 - DNA, 25 bp, Homo sapien
ctgtttattcaacattttaccaact

SEQ ID NO: 422816 - DNA, 25 bp, Homo sapien
ttattcaacattttaccaactagta

SEQ ID NO: 422817 - DNA, 25 bp, Homo sapien
tgtttattcaacattttaccaacta

SEQ ID NO: 422818 - DNA, 25 bp, Homo sapien
gtagcactttacaattcacaaagtg

SEQ ID NO: 422819 - DNA, 25 bp, Homo sapien
tagcactttacaattcacaaagtgc

SEQ ID NO: 422820 - DNA, 25 bp, Homo sapien
taaagagatccacagcaaatgattg

SEQ ID NO: 422821 - DNA, 25 bp, Homo sapien
cagaaaagccctggaggtttattag

SEQ ID NO: 422822 - DNA, 25 bp, Homo sapien
cagtctggcacggaactaagaggga

SEQ ID NO: 422823 - DNA, 25 bp, Homo sapien
gggtgccccaaactaacagacatat

SEQ ID NO: 422824 - DNA, 25 bp, Homo sapien
tactaaacctctactgagcctcggg

SEQ ID NO: 422825 - DNA, 25 bp, Homo sapien
catgaccaaagagcagttacaaggc

SEQ ID NO: 422826 - DNA, 25 bp, Homo sapien
gtttattagacacatacaattacat

SEQ ID NO: 422827 - DNA, 25 bp, Homo sapien
acattcaatgaagttatgagtgagc

SEQ ID NO: 422828 - DNA, 25 bp, Homo sapien
agtttattagacacatacaattaca

SEQ ID NO: 422829 - DNA, 25 bp, Homo sapien
ttcaatgaagttatgagtgagctac

SEQ ID NO: 422830 - DNA, 25 bp, Homo sapien
taatgcagaaggacccattaaacac

SEQ ID NO: 422831 - DNA, 25 bp, Homo sapien
tgttctatgctaaatgcagagaatt

SEQ ID NO: 422832 - DNA, 25 bp, Homo sapien
gagaattttatagtccacagcatga

SEQ ID NO: 422833 - DNA, 25 bp, Homo sapien
ggctattaatacaaagcagaacact

SEQ ID NO: 422834 - DNA, 25 bp, Homo sapien
tttctttatccaacataggaccgat

SEQ ID NO: 422835 - DNA, 25 bp, Homo sapien
ttctttatccaacataggaccgatg

SEQ ID NO: 422836 - DNA, 25 bp, Homo sapien
aatttctttatccaacataggaccg

SEQ ID NO: 422837 - DNA, 25 bp, Homo sapien
atttctttatccaacataggaccga

SEQ ID NO: 422838 - DNA, 25 bp, Homo sapien
tgtagtggccctcctaaggctagag

SEQ ID NO: 422839 - DNA, 25 bp, Homo sapien
acttaatggctacttgtggccggca

SEQ ID NO: 422840 - DNA, 25 bp, Homo sapien
caccctcaaagcatggaaagccagt

SEQ ID NO: 422841 - DNA, 25 bp, Homo sapien
taggccttcaccaactgcatagggc

SEQ ID NO: 422842 - DNA, 25 bp, Homo sapien
ggtaggtaagcaagtgattattgac

SEQ ID NO: 422843 - DNA, 25 bp, Homo sapien
tataatatgtggtaaggccgggctg

SEQ ID NO: 422844 - DNA, 25 bp, Homo sapien
aaaataccagaaaagatgtataggt

SEQ ID NO: 422845 - DNA, 25 bp, Homo sapien
gaaataacaaaataagttctgcaga

SEQ ID NO: 422846 - DNA, 25 bp, Homo sapien
atgtaaggcaaagcagatgggaaga

SEQ ID NO: 422847 - DNA, 25 bp, Homo sapien
ccaaaagaagttggtgtggctatat

SEQ ID NO: 422848 - DNA, 25 bp, Homo sapien
tatttaaggtcaattcaataggaaa

SEQ ID NO: 422849 - DNA, 25 bp, Homo sapien
aatgtaaggcaaagcagatgggaag

SEQ ID NO: 422850 - DNA, 25 bp, Homo sapien
gacgggtttcacaaggttgatcagg

SEQ ID NO: 422851 - DNA, 25 bp, Homo sapien
acgggtttcacaaggttgatcaggc

SEQ ID NO: 422852 - DNA, 25 bp, Homo sapien
agagacgggtttcacaaggttgatc

SEQ ID NO: 422853 - DNA, 25 bp, Homo sapien
gagacgggtttcacaaggttgatca

SEQ ID NO: 422854 - DNA, 25 bp, Homo sapien
tcaggtagcacgacaacagcgtcat

SEQ ID NO: 422855 - DNA, 25 bp, Homo sapien
taaggctatattatccgtgaagaaa

SEQ ID NO: 422856 - DNA, 25 bp, Homo sapien
ccgcttcaccgataaggctatatta

SEQ ID NO: 422857 - DNA, 25 bp, Homo sapien
taaccagtaatgcttttccgcttca

SEQ ID NO: 422858 - DNA, 25 bp, Homo sapien
tgtaatgcaagattaaccgagctca

SEQ ID NO: 422859 - DNA, 25 bp, Homo sapien
tgtggtaaaagatcactcagaagct

SEQ ID NO: 422860 - DNA, 25 bp, Homo sapien
caagatttttatgacgctgctgaca

SEQ ID NO: 422861 - DNA, 25 bp, Homo sapien
tacaagatgctgaatatggcctggc

SEQ ID NO: 422862 - DNA, 25 bp, Homo sapien
agccgggaacgcagctatccccggg

SEQ ID NO: 422863 - DNA, 25 bp, Homo sapien
agtgcgggtcacactttgcacccca

SEQ ID NO: 422864 - DNA, 25 bp, Homo sapien
tgccaaaacaaacctggccgcctca

SEQ ID NO: 422865 - DNA, 25 bp, Homo sapien
ctgccgcaggacctccgcgagtcgc

SEQ ID NO: 422866 - DNA, 25 bp, Homo sapien
cctcgtagctcctgttgtgctcgtt

SEQ ID NO: 422867 - DNA, 25 bp, Homo sapien
tcgtagctcctgttgtgctcgttgc

SEQ ID NO: 422868 - DNA, 25 bp, Homo sapien
ctcgtagctcctgttgtgctcgttg

SEQ ID NO: 422869 - DNA, 25 bp, Homo sapien
ctggtactgctccagctcctgcacc

SEQ ID NO: 422870 - DNA, 25 bp, Homo sapien
gtactgctccagctcctgcaccagc

SEQ ID NO: 422871 - DNA, 25 bp, Homo sapien
tggtactgctccagctcctgcacca

SEQ ID NO: 422872 - DNA, 25 bp, Homo sapien
actgctccagctcctgcaccagcac

SEQ ID NO: 422873 - DNA, 25 bp, Homo sapien
gggacgccaagtccgcagccgcccg

SEQ ID NO: 422874 - DNA, 25 bp, Homo sapien
ggacgccaagtccgcagccgcccgc

SEQ ID NO: 422875 - DNA, 25 bp, Homo sapien
acactggggacgccaagtccgcagc

SEQ ID NO: 422876 - DNA, 25 bp, Homo sapien
actggggacgccaagtccgcagccg

SEQ ID NO: 422877 - DNA, 25 bp, Homo sapien
ccgccgataggtaccgggcgataag

SEQ ID NO: 422878 - DNA, 25 bp, Homo sapien
ctgggccgctctccgacacgggccc

SEQ ID NO: 422879 - DNA, 25 bp, Homo sapien
taccgggcgataaggaagtacagct

SEQ ID NO: 422880 - DNA, 25 bp, Homo sapien
tccgacacgggcccgccgataggta

SEQ ID NO: 422881 - DNA, 25 bp, Homo sapien
agaggcaccgggcgtcgggcggacg

SEQ ID NO: 422882 - DNA, 25 bp, Homo sapien
gaggcaccgggcgtcgggcggacga

SEQ ID NO: 422883 - DNA, 25 bp, Homo sapien
gagaggcaccgggcgtcgggcggac

SEQ ID NO: 422884 - DNA, 25 bp, Homo sapien
gaagtagttcctccgcgggagacga

SEQ ID NO: 422885 - DNA, 25 bp, Homo sapien
gccgaggcctgaccgggctggcgtc

SEQ ID NO: 422886 - DNA, 25 bp, Homo sapien
cgagcgagcggagcgtgtaggccgc

SEQ ID NO: 422887 - DNA, 25 bp, Homo sapien
gcgtcccctcttctcaggcgcgcgc

SEQ ID NO: 422888 - DNA, 25 bp, Homo sapien
tacataaaatgcagcgcttcgccga

SEQ ID NO: 422889 - DNA, 25 bp, Homo sapien
tcatttcacggaccggtcgtctggg

SEQ ID NO: 422890 - DNA, 25 bp, Homo sapien
tttaaagtgaggattggctcgccgc

SEQ ID NO: 422891 - DNA, 25 bp, Homo sapien
gcagcccggcagaaaattacataaa

SEQ ID NO: 422892 - DNA, 25 bp, Homo sapien
gaagccggaaactagggagtcatgt

SEQ ID NO: 422893 - DNA, 25 bp, Homo sapien
ttaaatgtggttcgggtcagactct

SEQ ID NO: 422894 - DNA, 25 bp, Homo sapien
ccttcctggaatgcgcgttaacaat

SEQ ID NO: 422895 - DNA, 25 bp, Homo sapien
taactatgagtttcctccgcgcatc

SEQ ID NO: 422896 - DNA, 25 bp, Homo sapien
ttctgtgtattctcaggcagctgga

SEQ ID NO: 422897 - DNA, 25 bp, Homo sapien
tccggaagagcaccacaacctctta

SEQ ID NO: 422898 - DNA, 25 bp, Homo sapien
caacctcttatgtcttactgcttct

SEQ ID NO: 422899 - DNA, 25 bp, Homo sapien
tgtatccagaatctaagcacttctc

SEQ ID NO: 422900 - DNA, 25 bp, Homo sapien
cactttcaggaggagcaatggaggc

SEQ ID NO: 422901 - DNA, 25 bp, Homo sapien
tagtcaaagtctctggagcggaagg

SEQ ID NO: 422902 - DNA, 25 bp, Homo sapien
tggagatacggcctccttggctcaa

SEQ ID NO: 422903 - DNA, 25 bp, Homo sapien
ggctgctttaggagaggatccccat

SEQ ID NO: 422904 - DNA, 25 bp, Homo sapien
atgtaatgtagatgtaaggtattac

SEQ ID NO: 422905 - DNA, 25 bp, Homo sapien
acatcattgaagctgcccttctgcc

SEQ ID NO: 422906 - DNA, 25 bp, Homo sapien
catcaacatcattgaagctgccctt

SEQ ID NO: 422907 - DNA, 25 bp, Homo sapien
atcatcaacatcattgaagctgccc

SEQ ID NO: 422908 - DNA, 25 bp, Homo sapien
aggttcaagcaattctccagcctca

SEQ ID NO: 422909 - DNA, 25 bp, Homo sapien
gctggagtgcaatggtacgatctct

SEQ ID NO: 422910 - DNA, 25 bp, Homo sapien
tggagttttgctcttctctgcccag

SEQ ID NO: 422911 - DNA, 25 bp, Homo sapien
gctcactgcaatctccacctcccag

SEQ ID NO: 422912 - DNA, 25 bp, Homo sapien
tcaagtaccagtatcttcacgttgg

SEQ ID NO: 422913 - DNA, 25 bp, Homo sapien
caggactaccacaaagatgttacag

SEQ ID NO: 422914 - DNA, 25 bp, Homo sapien
tgcacacaattctggcagagagagc

SEQ ID NO: 422915 - DNA, 25 bp, Homo sapien
ttcacgttggtcagctgttacatac

SEQ ID NO: 422916 - DNA, 25 bp, Homo sapien
aaactaaccccccatctgtggaatg

SEQ ID NO: 422917 - DNA, 25 bp, Homo sapien
gtggaatgttaagctgacacccgag

SEQ ID NO: 422918 - DNA, 25 bp, Homo sapien
gtcagagcctcccataattcaatat

SEQ ID NO: 422919 - DNA, 25 bp, Homo sapien
ctgacacccgagacagtcagagcct

SEQ ID NO: 422920 - DNA, 25 bp, Homo sapien
aatcagacttggcttctttctctcc

SEQ ID NO: 422921 - DNA, 25 bp, Homo sapien
ctttctctcctgcttcatcagaggc

SEQ ID NO: 422922 - DNA, 25 bp, Homo sapien
ttaatcagacttggcttctttctct

SEQ ID NO: 422923 - DNA, 25 bp, Homo sapien
tctctcctgcttcatcagaggctgg

SEQ ID NO: 422924 - DNA, 25 bp, Homo sapien
agctctaatgccgtaaacaactgtt

SEQ ID NO: 422925 - DNA, 25 bp, Homo sapien
tcacatgtacactccaagctgaggt

SEQ ID NO: 422926 - DNA, 25 bp, Homo sapien
cccacgcatcttgttcaagtgctat

SEQ ID NO: 422927 - DNA, 25 bp, Homo sapien
tgtgcatgcatctacagagcaggaa

SEQ ID NO: 422928 - DNA, 25 bp, Homo sapien
ttaagtagtacaggccaggagcggt

SEQ ID NO: 422929 - DNA, 25 bp, Homo sapien
tagaattaagtagtacaggccagga

SEQ ID NO: 422930 - DNA, 25 bp, Homo sapien
cacacagtatttgatgtatggttag

SEQ ID NO: 422931 - DNA, 25 bp, Homo sapien
tatggttagaattaagtagtacagg

SEQ ID NO: 422932 - DNA, 25 bp, Homo sapien
tccaatcactttgggataccgtaca

SEQ ID NO: 422933 - DNA, 25 bp, Homo sapien
caatcactttgggataccgtacaaa

SEQ ID NO: 422934 - DNA, 25 bp, Homo sapien
ccatttgtccaatcactttgggata

SEQ ID NO: 422935 - DNA, 25 bp, Homo sapien
tttgtccaatcactttgggataccg

SEQ ID NO: 422936 - DNA, 25 bp, Homo sapien
caggtaagtcttctttagtttcttg

SEQ ID NO: 422937 - DNA, 25 bp, Homo sapien
cgcaggtaagtcttctttagtttct

SEQ ID NO: 422938 - DNA, 25 bp, Homo sapien
tagtttcttggttagccacttcggc

SEQ ID NO: 422939 - DNA, 25 bp, Homo sapien
tggttagccacttcggcctgttttc

SEQ ID NO: 422940 - DNA, 25 bp, Homo sapien
gacaaatcctaaagcccgagctata

SEQ ID NO: 422941 - DNA, 25 bp, Homo sapien
catgaagttgaataccggaggagtc

SEQ ID NO: 422942 - DNA, 25 bp, Homo sapien
gaggagtctcgtcgaccgtattccc

SEQ ID NO: 422943 - DNA, 25 bp, Homo sapien
ttacatgagacaacttaaggtcccc

SEQ ID NO: 422944 - DNA, 25 bp, Homo sapien
gctacagttaatcccttcatatcat

SEQ ID NO: 422945 - DNA, 25 bp, Homo sapien
tacggtcaggttgactatcctgcta

SEQ ID NO: 422946 - DNA, 25 bp, Homo sapien
caggttgactatcctgctacagtta

SEQ ID NO: 422947 - DNA, 25 bp, Homo sapien
cctgctacagttaatcccttcatat

SEQ ID NO: 422948 - DNA, 25 bp, Homo sapien
caacttcaatgctaacacgggcgga

SEQ ID NO: 422949 - DNA, 25 bp, Homo sapien
gaagacttacctgttggcctctcaa

SEQ ID NO: 422950 - DNA, 25 bp, Homo sapien
cacgggcggaaaaatcactgcaggg

SEQ ID NO: 422951 - DNA, 25 bp, Homo sapien
taaaagacccatacggatactgacc

SEQ ID NO: 422952 - DNA, 25 bp, Homo sapien
tgaagctttatttttaaaaggatca

SEQ ID NO: 422953 - DNA, 25 bp, Homo sapien
aacatttttacactcagctctgtaa

SEQ ID NO: 422954 - DNA, 25 bp, Homo sapien
ctgttaaagaaaacatagttaacat

SEQ ID NO: 422955 - DNA, 25 bp, Homo sapien
tagttaacatttttacactcagctc

SEQ ID NO: 422956 - DNA, 25 bp, Homo sapien
gttaacatttttacactcagctctg

SEQ ID NO: 422957 - DNA, 25 bp, Homo sapien
tttagtaattatccaacaactcctc

SEQ ID NO: 422958 - DNA, 25 bp, Homo sapien
cctcttctgatgactgcagtgctaa

SEQ ID NO: 422959 - DNA, 25 bp, Homo sapien
caactcctcaatgtcaaggaaatta

SEQ ID NO: 422960 - DNA, 25 bp, Homo sapien
gatgactgcagtgctaaacttctac

SEQ ID NO: 422961 - DNA, 25 bp, Homo sapien
gatgaacacttccagagtagtggcg

SEQ ID NO: 422962 - DNA, 25 bp, Homo sapien
taaggcttcccgaagttggcttgga

SEQ ID NO: 422963 - DNA, 25 bp, Homo sapien
tcacgaatttgttagggagcagcca

SEQ ID NO: 422964 - DNA, 25 bp, Homo sapien
tgcaagttatcaaacacacgtacac

SEQ ID NO: 422965 - DNA, 25 bp, Homo sapien
tcccaatgcgcgtttcgaggcttac

SEQ ID NO: 422966 - DNA, 25 bp, Homo sapien
gtcctaagtctcctaacatctgcag

SEQ ID NO: 422967 - DNA, 25 bp, Homo sapien
taagaagcagtgtagcctaaggccc

SEQ ID NO: 422968 - DNA, 25 bp, Homo sapien
tacatttttgcctcgaccactagaa

SEQ ID NO: 422969 - DNA, 25 bp, Homo sapien
ttcgctgctgcctttttcggcttcg

SEQ ID NO: 422970 - DNA, 25 bp, Homo sapien
tgctgcctttttcggcttcgcttcc

SEQ ID NO: 422971 - DNA, 25 bp, Homo sapien
ttcggcttcgcttccacttttgcag

SEQ ID NO: 422972 - DNA, 25 bp, Homo sapien
tgcctttttcggcttcgcttccact

SEQ ID NO: 422973 - DNA, 25 bp, Homo sapien
actgagcgtcctcacccgggacgac

SEQ ID NO: 422974 - DNA, 25 bp, Homo sapien
gcagcactgagcgtcctcacccggg

SEQ ID NO: 422975 - DNA, 25 bp, Homo sapien
agcactgagcgtcctcacccgggac

SEQ ID NO: 422976 - DNA, 25 bp, Homo sapien
tgagcgtcctcacccgggacgaccc

SEQ ID NO: 422977 - DNA, 25 bp, Homo sapien
acaaccgcgccgatctcctcttggg

SEQ ID NO: 422978 - DNA, 25 bp, Homo sapien
gacaaccgcgccgatctcctcttgg

SEQ ID NO: 422979 - DNA, 25 bp, Homo sapien
ctgacaaccgcgccgatctcctctt

SEQ ID NO: 422980 - DNA, 25 bp, Homo sapien
agctgacaaccgcgccgatctcctc

SEQ ID NO: 422981 - DNA, 25 bp, Homo sapien
aggccagcggctcacgggaaaccca

SEQ ID NO: 422982 - DNA, 25 bp, Homo sapien
aaagaaaaaggagagtcagcgagaa

SEQ ID NO: 422983 - DNA, 25 bp, Homo sapien
aaggcaggccagcggctcacgggaa

SEQ ID NO: 422984 - DNA, 25 bp, Homo sapien
agaaaaaggagagtcagcgagaaga

SEQ ID NO: 422985 - DNA, 25 bp, Homo sapien
cacgaatagaggcgggccgcagtcc

SEQ ID NO: 422986 - DNA, 25 bp, Homo sapien
ctgcggagacggagacgcacgaata

SEQ ID NO: 422987 - DNA, 25 bp, Homo sapien
aatgcccggccgcgtgacgtcacgg

SEQ ID NO: 422988 - DNA, 25 bp, Homo sapien
cccgttcgaatagccccctcagctc

SEQ ID NO: 422989 - DNA, 25 bp, Homo sapien
ggcggggaaggcgcgtgccgggtgc

SEQ ID NO: 422990 - DNA, 25 bp, Homo sapien
tggcggcggggaaggcgcgtgccgg

SEQ ID NO: 422991 - DNA, 25 bp, Homo sapien
cgtggcggcggggaaggcgcgtgcc

SEQ ID NO: 422992 - DNA, 25 bp, Homo sapien
cggcggggaaggcgcgtgccgggtg

SEQ ID NO: 422993 - DNA, 25 bp, Homo sapien
ctgcggggaaggcgcgtgccgggtg

SEQ ID NO: 422994 - DNA, 25 bp, Homo sapien
tgcggggaaggcgcgtgccgggtgc

SEQ ID NO: 422995 - DNA, 25 bp, Homo sapien
gcgccgacagccttcgcgaaactgg

SEQ ID NO: 422996 - DNA, 25 bp, Homo sapien
cgccgacagccttcgcgaaactggg

SEQ ID NO: 422997 - DNA, 25 bp, Homo sapien
atggaaccggattgggagcccgcct

SEQ ID NO: 422998 - DNA, 25 bp, Homo sapien
cggatggaaccggattgggagcccg

SEQ ID NO: 422999 - DNA, 25 bp, Homo sapien
tgctgagacccacagcgggggcggt

SEQ ID NO: 423000 - DNA, 25 bp, Homo sapien
cacagcgggggcggtgggagaaccg

SEQ ID NO: 423001 - DNA, 25 bp, Homo sapien
tccgccgtctcgcggggccccagac

SEQ ID NO: 423002 - DNA, 25 bp, Homo sapien
ttccgccgtctcgcggggccccaga

SEQ ID NO: 423003 - DNA, 25 bp, Homo sapien
aaggataaggtatacaggaagtagc

SEQ ID NO: 423004 - DNA, 25 bp, Homo sapien
gcgccttcaggccactggtatctgg

SEQ ID NO: 423005 - DNA, 25 bp, Homo sapien
tagttcgtatcttagactgggaagg

SEQ ID NO: 423006 - DNA, 25 bp, Homo sapien
ggaagtagcaaatttctcccgcctc

SEQ ID NO: 423007 - DNA, 25 bp, Homo sapien
tgctccgtggaaagtcaccataatg

SEQ ID NO: 423008 - DNA, 25 bp, Homo sapien
caccataatgatgctaacgacctga

SEQ ID NO: 423009 - DNA, 25 bp, Homo sapien
gctaacgacctgatcagcataacac

SEQ ID NO: 423010 - DNA, 25 bp, Homo sapien
gaccccttcataggcaaacctgtgg

SEQ ID NO: 423011 - DNA, 25 bp, Homo sapien
atgaagggcttgttagcctggctct

SEQ ID NO: 423012 - DNA, 25 bp, Homo sapien
ttcagctctccaaactcagtcatga

SEQ ID NO: 423013 - DNA, 25 bp, Homo sapien
tgatataaaagccaccgatgaaggg

SEQ ID NO: 423014 - DNA, 25 bp, Homo sapien
tagtctccctgaagagacttcagct

SEQ ID NO: 423015 - DNA, 25 bp, Homo sapien
tttttgttaggagttctcgactgtc

SEQ ID NO: 423016 - DNA, 25 bp, Homo sapien
tcagactgggttgcctgtgaagccc

SEQ ID NO: 423017 - DNA, 25 bp, Homo sapien
agactgggttgcctgtgaagcccgg

SEQ ID NO: 423018 - DNA, 25 bp, Homo sapien
tttgttaggagttctcgactgtcca

SEQ ID NO: 423019 - DNA, 25 bp, Homo sapien
aactgcttggaacacgacagttacc

SEQ ID NO: 423020 - DNA, 25 bp, Homo sapien
gaaaacgtaaggcattttccatgta

SEQ ID NO: 423021 - DNA, 25 bp, Homo sapien
cagttacctgctactataaaaacgg

SEQ ID NO: 423022 - DNA, 25 bp, Homo sapien
tacagtgtttagatctggaacgaaa

SEQ ID NO: 423023 - DNA, 25 bp, Homo sapien
gagagatggatcctcgcgtccagga

SEQ ID NO: 423024 - DNA, 25 bp, Homo sapien
gttcctagaggcattcgagcagccc

SEQ ID NO: 423025 - DNA, 25 bp, Homo sapien
ggcggcgaacctcacactgggagtt

SEQ ID NO: 423026 - DNA, 25 bp, Homo sapien
gggcaaccctggactcttctggctg

SEQ ID NO: 423027 - DNA, 25 bp, Homo sapien
cgtttcagcgttgtcttggaaaaca

SEQ ID NO: 423028 - DNA, 25 bp, Homo sapien
aagattgggcgcattcgtttcagcg

SEQ ID NO: 423029 - DNA, 25 bp, Homo sapien
cttgggaactgtccccgagaatgag

SEQ ID NO: 423030 - DNA, 25 bp, Homo sapien
ctgttgggcaaaggcggagtcctca

SEQ ID NO: 423031 - DNA, 25 bp, Homo sapien
taatcggtaagagagatgtttggcc

SEQ ID NO: 423032 - DNA, 25 bp, Homo sapien
ctgtgaaaagctgtaaggaacgcgc

SEQ ID NO: 423033 - DNA, 25 bp, Homo sapien
tcaccatcgtcagaggctacttcat

SEQ ID NO: 423034 - DNA, 25 bp, Homo sapien
aacgcgctggtcttcagtagggtca

SEQ ID NO: 423035 - DNA, 25 bp, Homo sapien
ccgagtgccctttgagattcaactt

SEQ ID NO: 423036 - DNA, 25 bp, Homo sapien
gggccgagtgccctttgagattcaa

SEQ ID NO: 423037 - DNA, 25 bp, Homo sapien
ggccgagtgccctttgagattcaac

SEQ ID NO: 423038 - DNA, 25 bp, Homo sapien
gagtgccctttgagattcaactttt

SEQ ID NO: 423039 - DNA, 25 bp, Homo sapien
gactgaagcgagaggaggatattgc

SEQ ID NO: 423040 - DNA, 25 bp, Homo sapien
gaggatattgcagggtttgcctctg

SEQ ID NO: 423041 - DNA, 25 bp, Homo sapien
ctcagagccgttgcttagtgagtcc

SEQ ID NO: 423042 - DNA, 25 bp, Homo sapien
tttctgctgtaaagagtggccacct

SEQ ID NO: 423043 - DNA, 25 bp, Homo sapien
cgcttctccgcccttgccggtaggg

SEQ ID NO: 423044 - DNA, 25 bp, Homo sapien
tcctgtgactcagaagcgcgcttgt

SEQ ID NO: 423045 - DNA, 25 bp, Homo sapien
gaagtgcgcatgtgcgggcagggcc

SEQ ID NO: 423046 - DNA, 25 bp, Homo sapien
gcctggagagctgcccgcttctccg

SEQ ID NO: 423047 - DNA, 25 bp, Homo sapien
tggagcttcctgagttggaagaccc

SEQ ID NO: 423048 - DNA, 25 bp, Homo sapien
ttcctgagttggaagaccctgtcct

SEQ ID NO: 423049 - DNA, 25 bp, Homo sapien
ctggccgagagtggcatctggggct

SEQ ID NO: 423050 - DNA, 25 bp, Homo sapien
tctggggctgttcagggtctggagc

SEQ ID NO: 423051 - DNA, 25 bp, Homo sapien
gttgcgctccagtcacctctcccat

SEQ ID NO: 423052 - DNA, 25 bp, Homo sapien
ctgcgcaggcgggcctccaggtcat

SEQ ID NO: 423053 - DNA, 25 bp, Homo sapien
tcccatcccggtgccgtggccgggc

SEQ ID NO: 423054 - DNA, 25 bp, Homo sapien
gcggtcactgccgactcctccgttg

SEQ ID NO: 423055 - DNA, 25 bp, Homo sapien
aaggtgtaccggttctgtctggcca

SEQ ID NO: 423056 - DNA, 25 bp, Homo sapien
tgggaacgttcacggccgcagtttg

SEQ ID NO: 423057 - DNA, 25 bp, Homo sapien
ttatagggagccgaaaaaggcagca

SEQ ID NO: 423058 - DNA, 25 bp, Homo sapien
tgacgggaacttacaagagctgcgg

SEQ ID NO: 423059 - DNA, 25 bp, Homo sapien
taaatgtatccacgagaccatgatg

SEQ ID NO: 423060 - DNA, 25 bp, Homo sapien
gaacaccgtcctcgatctgtacgaa

SEQ ID NO: 423061 - DNA, 25 bp, Homo sapien
caacactaattgacattgcgtgggc

SEQ ID NO: 423062 - DNA, 25 bp, Homo sapien
gacacgtatgtactagtgaacaccg

SEQ ID NO: 423063 - DNA, 25 bp, Homo sapien
agcttccagtgtccgtcaccacacg

SEQ ID NO: 423064 - DNA, 25 bp, Homo sapien
acagagcagggaacgcagccacagc

SEQ ID NO: 423065 - DNA, 25 bp, Homo sapien
ttgcccacaaaggatgagaagccaa

SEQ ID NO: 423066 - DNA, 25 bp, Homo sapien
acgggatacattttgcccacaaagg

SEQ ID NO: 423067 - DNA, 25 bp, Homo sapien
cagagttgtatcacatacttgaatc

SEQ ID NO: 423068 - DNA, 25 bp, Homo sapien
tatcatttcctattcgtcagagttg

SEQ ID NO: 423069 - DNA, 25 bp, Homo sapien
tttagaagaacctttgcgatcccca

SEQ ID NO: 423070 - DNA, 25 bp, Homo sapien
gagtaaaggtaacaccactgctctg

SEQ ID NO: 423071 - DNA, 25 bp, Homo sapien
aagagtcttttgatcatattgttcc

SEQ ID NO: 423072 - DNA, 25 bp, Homo sapien
ctgaagcctcgacctgggcacaagt

SEQ ID NO: 423073 - DNA, 25 bp, Homo sapien
acacggtctcactccgattgcccaa

SEQ ID NO: 423074 - DNA, 25 bp, Homo sapien
tcaaagctgctgccacattttgttt

SEQ ID NO: 423075 - DNA, 25 bp, Homo sapien
agatgcaaggcacataagcagcatt

SEQ ID NO: 423076 - DNA, 25 bp, Homo sapien
taattatcgaaagtcaattaagtac

SEQ ID NO: 423077 - DNA, 25 bp, Homo sapien
gtcaattaagtactaaaacacacac

SEQ ID NO: 423078 - DNA, 25 bp, Homo sapien
aaccagaatgcattaggatattgat

SEQ ID NO: 423079 - DNA, 25 bp, Homo sapien
ctgtaggtgacgatggcttaataga

SEQ ID NO: 423080 - DNA, 25 bp, Homo sapien
agaatttaccacagttactttagag

SEQ ID NO: 423081 - DNA, 25 bp, Homo sapien
tactttagagtctccgaaagcatgg

SEQ ID NO: 423082 - DNA, 25 bp, Homo sapien
tagagtctccgaaagcatggctggt

SEQ ID NO: 423083 - DNA, 25 bp, Homo sapien
caggaagcccatgatgcaggttttc

SEQ ID NO: 423084 - DNA, 25 bp, Homo sapien
gccttttgcaacaccaggacttgat

SEQ ID NO: 423085 - DNA, 25 bp, Homo sapien
tgagggctcatacccactgtcagaa

SEQ ID NO: 423086 - DNA, 25 bp, Homo sapien
tcatgttgccggcattggctggccc

SEQ ID NO: 423087 - DNA, 25 bp, Homo sapien
aactgcaactgacgatcagtttcca

SEQ ID NO: 423088 - DNA, 25 bp, Homo sapien
gtgaccacagtgcaactgcaactga

SEQ ID NO: 423089 - DNA, 25 bp, Homo sapien
cagtgcaactgcaactgacgatcag

SEQ ID NO: 423090 - DNA, 25 bp, Homo sapien
caactgacgatcagtttccaccaaa

SEQ ID NO: 423091 - DNA, 25 bp, Homo sapien
tatgatcgatgtttcctgttgcctt

SEQ ID NO: 423092 - DNA, 25 bp, Homo sapien
ctttatgatcgatgtttcctgttgc

SEQ ID NO: 423093 - DNA, 25 bp, Homo sapien
tgatcgatgtttcctgttgcctttt

SEQ ID NO: 423094 - DNA, 25 bp, Homo sapien
tttatgatcgatgtttcctgttgcc

SEQ ID NO: 423095 - DNA, 25 bp, Homo sapien
cttagttgtcaaaggtggaacatct

SEQ ID NO: 423096 - DNA, 25 bp, Homo sapien
ggtgtctcatacttgtgaatggcaa

SEQ ID NO: 423097 - DNA, 25 bp, Homo sapien
aacatctgatttttgggttccctgg

SEQ ID NO: 423098 - DNA, 25 bp, Homo sapien
tgtctcatacttgtgaatggcaaaa

SEQ ID NO: 423099 - DNA, 25 bp, Homo sapien
caatgagaggtatacactaatgata

SEQ ID NO: 423100 - DNA, 25 bp, Homo sapien
cactatgctgaacaaaagcagccag

SEQ ID NO: 423101 - DNA, 25 bp, Homo sapien
aatgatagtggcatcaatatagatg

SEQ ID NO: 423102 - DNA, 25 bp, Homo sapien
tggcatcaatatagatgaatctcaa

SEQ ID NO: 423103 - DNA, 25 bp, Homo sapien
ctgaagaaaggacataaaggggtgt

SEQ ID NO: 423104 - DNA, 25 bp, Homo sapien
tgaagaaaggacataaaggggtgtg

SEQ ID NO: 423105 - DNA, 25 bp, Homo sapien
taagtattcgatgactatagatgtt

SEQ ID NO: 423106 - DNA, 25 bp, Homo sapien
gatagtcctctgtgtcatgtaaatt

SEQ ID NO: 423107 - DNA, 25 bp, Homo sapien
tttttaatttcaagctcacgatcct

SEQ ID NO: 423108 - DNA, 25 bp, Homo sapien
cttttggatagtcctctgtgtcatg

SEQ ID NO: 423109 - DNA, 25 bp, Homo sapien
ggagtccttaaggttacagatccag

SEQ ID NO: 423110 - DNA, 25 bp, Homo sapien
cctggagtccttaaggttacagatc

SEQ ID NO: 423111 - DNA, 25 bp, Homo sapien
tagcacaggctttgcaacagagaat

SEQ ID NO: 423112 - DNA, 25 bp, Homo sapien
agtccttaaggttacagatccaggt

SEQ ID NO: 423113 - DNA, 25 bp, Homo sapien
tttacttccacctgcagagtcttgg

SEQ ID NO: 423114 - DNA, 25 bp, Homo sapien
ccggctaaaggctctgcagttcaac

SEQ ID NO: 423115 - DNA, 25 bp, Homo sapien
gtctgagctgctaaagtcttccgag

SEQ ID NO: 423116 - DNA, 25 bp, Homo sapien
tcaatagccagctgccggctaaagg

SEQ ID NO: 423117 - DNA, 25 bp, Homo sapien
tgaaaacagtatatattataactat

SEQ ID NO: 423118 - DNA, 25 bp, Homo sapien
ctgaaaacagtatatattataacta

SEQ ID NO: 423119 - DNA, 25 bp, Homo sapien
gaaaacagtatatattataactatt

SEQ ID NO: 423120 - DNA, 25 bp, Homo sapien
gagaactgttagatctggacttgac

SEQ ID NO: 423121 - DNA, 25 bp, Homo sapien
aatccccaggcttttgacaaccaag

SEQ ID NO: 423122 - DNA, 25 bp, Homo sapien
tacatgacagacatacgctaagatg

SEQ ID NO: 423123 - DNA, 25 bp, Homo sapien
ggacctcctccattataacagcagt

SEQ ID NO: 423124 - DNA, 25 bp, Homo sapien
aatgtctgtgtggtaattcctggcc

SEQ ID NO: 423125 - DNA, 25 bp, Homo sapien
aaaggccctgaacggatgcactgag

SEQ ID NO: 423126 - DNA, 25 bp, Homo sapien
ggaacattatctgggaaaagctgct

SEQ ID NO: 423127 - DNA, 25 bp, Homo sapien
tttagtgcagcacgccaagtgaagc

SEQ ID NO: 423128 - DNA, 25 bp, Homo sapien
atttgcgtccatttttgttgtgata

SEQ ID NO: 423129 - DNA, 25 bp, Homo sapien
aagccttgctgagagtattcgatga

SEQ ID NO: 423130 - DNA, 25 bp, Homo sapien
tcctgggatttcctaagtagttgcc

SEQ ID NO: 423131 - DNA, 25 bp, Homo sapien
caaatgcctaagctgaagttgtttc

SEQ ID NO: 423132 - DNA, 25 bp, Homo sapien
tattcgatgagccatagcatctctt

SEQ ID NO: 423133 - DNA, 25 bp, Homo sapien
atgaatacccatgctttaggctagg

SEQ ID NO: 423134 - DNA, 25 bp, Homo sapien
atagccacgaagtgacacagaatgg

SEQ ID NO: 423135 - DNA, 25 bp, Homo sapien
cacaagcgtaagtgtaactagaagg

SEQ ID NO: 423136 - DNA, 25 bp, Homo sapien
gaaaaccaggtcttctttgactcta

SEQ ID NO: 423137 - DNA, 25 bp, Homo sapien
gacattattaacagccttttgaacc

SEQ ID NO: 423138 - DNA, 25 bp, Homo sapien
tacaaagaaatgacattattaacag

SEQ ID NO: 423139 - DNA, 25 bp, Homo sapien
ctgtttcaaaagatggtgtttgcca

SEQ ID NO: 423140 - DNA, 25 bp, Homo sapien
agccttttgaaccatctctgtttca

SEQ ID NO: 423141 - DNA, 25 bp, Homo sapien
gagaccatcctcttggggtgctgag

SEQ ID NO: 423142 - DNA, 25 bp, Homo sapien
cttggggtgctgagataggtattta

SEQ ID NO: 423143 - DNA, 25 bp, Homo sapien
gaaatccaaatattgtggtactctg

SEQ ID NO: 423144 - DNA, 25 bp, Homo sapien
ccagtgaaatccaaatattgtggta

SEQ ID NO: 423145 - DNA, 25 bp, Homo sapien
ccaaatattgtggtactctgtaaca

SEQ ID NO: 423146 - DNA, 25 bp, Homo sapien
atattgtggtactctgtaacaaggc

SEQ ID NO: 423147 - DNA, 25 bp, Homo sapien
ctccagtagggtaagccatgcaggg

SEQ ID NO: 423148 - DNA, 25 bp, Homo sapien
gaactaacctcactagtaggctcca

SEQ ID NO: 423149 - DNA, 25 bp, Homo sapien
gaaccacttcaaacactagtgcagt

SEQ ID NO: 423150 - DNA, 25 bp, Homo sapien
cagaaatttggtcttgcttgggaaa

SEQ ID NO: 423151 - DNA, 25 bp, Homo sapien
taatgccacgccgaagaaatgctca

SEQ ID NO: 423152 - DNA, 25 bp, Homo sapien
gcatgctgcagacctcctattgttt

SEQ ID NO: 423153 - DNA, 25 bp, Homo sapien
tgtttttgttagatcagccaaagac

SEQ ID NO: 423154 - DNA, 25 bp, Homo sapien
tgaaaaatcgcctgtgcctgggctt

SEQ ID NO: 423155 - DNA, 25 bp, Homo sapien
gaaacaaacagatccatcttctgag

SEQ ID NO: 423156 - DNA, 25 bp, Homo sapien
ttgaaacaaacagatccatcttctg

SEQ ID NO: 423157 - DNA, 25 bp, Homo sapien
caaacagatccatcttctgaggtct

SEQ ID NO: 423158 - DNA, 25 bp, Homo sapien
ctcaaaagcagattgaaacaaacag

SEQ ID NO: 423159 - DNA, 25 bp, Homo sapien
gatcctttgcaataggaatctaata

SEQ ID NO: 423160 - DNA, 25 bp, Homo sapien
gatgaaatatattaggcagtccaca

SEQ ID NO: 423161 - DNA, 25 bp, Homo sapien
tttgcaataggaatctaatatcact

SEQ ID NO: 423162 - DNA, 25 bp, Homo sapien
tggcattagatcctttgcaatagga

SEQ ID NO: 423163 - DNA, 25 bp, Homo sapien
acactgtagtatttatgagctttcc

SEQ ID NO: 423164 - DNA, 25 bp, Homo sapien
gatgataaactgaagataagcacag

SEQ ID NO: 423165 - DNA, 25 bp, Homo sapien
cacactgtagtatttatgagctttc

SEQ ID NO: 423166 - DNA, 25 bp, Homo sapien
tcacactgtagtatttatgagcttt

SEQ ID NO: 423167 - DNA, 25 bp, Homo sapien
agtttttggattatgtgtttcttgc

SEQ ID NO: 423168 - DNA, 25 bp, Homo sapien
aagtttttggattatgtgtttcttg

SEQ ID NO: 423169 - DNA, 25 bp, Homo sapien
tgcaaattagattccgcttttcatc

SEQ ID NO: 423170 - DNA, 25 bp, Homo sapien
aattagattccgcttttcatctacc

SEQ ID NO: 423171 - DNA, 25 bp, Homo sapien
tatgtaaagttctctaagatacgtt

SEQ ID NO: 423172 - DNA, 25 bp, Homo sapien
ttttccaatcaatgtctacatgtaa

SEQ ID NO: 423173 - DNA, 25 bp, Homo sapien
agaaaacagccgaccctctcataag

SEQ ID NO: 423174 - DNA, 25 bp, Homo sapien
tgagatagctggtgggattgtttgc

SEQ ID NO: 423175 - DNA, 25 bp, Homo sapien
aaatgagctggagaaaacagccgac

SEQ ID NO: 423176 - DNA, 25 bp, Homo sapien
gctggagaaaacagccgaccctctc

SEQ ID NO: 423177 - DNA, 25 bp, Homo sapien
tgaaatgcaatctcctacagaccct

SEQ ID NO: 423178 - DNA, 25 bp, Homo sapien
tctctatgaagtgacagcacaaggg

SEQ ID NO: 423179 - DNA, 25 bp, Homo sapien
taaggcttgcagttttgggagctga

SEQ ID NO: 423180 - DNA, 25 bp, Homo sapien
tggtgggagatcaaatctgaggaaa

SEQ ID NO: 423181 - DNA, 25 bp, Homo sapien
caatcctactctgttactttggtta

SEQ ID NO: 423182 - DNA, 25 bp, Homo sapien
ctactctgttactttggttaattgg

SEQ ID NO: 423183 - DNA, 25 bp, Homo sapien
gtggcaatcctactctgttactttg

SEQ ID NO: 423184 - DNA, 25 bp, Homo sapien
cgtggcaatcctactctgttacttt

SEQ ID NO: 423185 - DNA, 25 bp, Homo sapien
taggggccttagctccttgagggca

SEQ ID NO: 423186 - DNA, 25 bp, Homo sapien
tgatcgcggtatcagcacccaggta

SEQ ID NO: 423187 - DNA, 25 bp, Homo sapien
gacctgtcacattgatcgcggtatc

SEQ ID NO: 423188 - DNA, 25 bp, Homo sapien
gctaggagtttaagagagtggcaag

SEQ ID NO: 423189 - DNA, 25 bp, Homo sapien
cagcatacggatgatcatttgtctg

SEQ ID NO: 423190 - DNA, 25 bp, Homo sapien
aaaatgatcagcatacggatgatca

SEQ ID NO: 423191 - DNA, 25 bp, Homo sapien
gatcagcatacggatgatcatttgt

SEQ ID NO: 423192 - DNA, 25 bp, Homo sapien
caaaatgatcagcatacggatgatc

SEQ ID NO: 423193 - DNA, 25 bp, Homo sapien
ctcagtttgcctcttttggtgcttc

SEQ ID NO: 423194 - DNA, 25 bp, Homo sapien
tcagtttgcctcttttggtgcttct

SEQ ID NO: 423195 - DNA, 25 bp, Homo sapien
ctcttgccatagttctgttccaggg

SEQ ID NO: 423196 - DNA, 25 bp, Homo sapien
gattcctgtctttgcgctgggaaga

SEQ ID NO: 423197 - DNA, 25 bp, Homo sapien
ttcttcaggacagtcccttgtaaag

SEQ ID NO: 423198 - DNA, 25 bp, Homo sapien
ttgtaaagctcttgccatagttctg

SEQ ID NO: 423199 - DNA, 25 bp, Homo sapien
aatggtagaattgtgaatctattct

SEQ ID NO: 423200 - DNA, 25 bp, Homo sapien
tgacagtggcggttgagagaaatgg

SEQ ID NO: 423201 - DNA, 25 bp, Homo sapien
tgggggcctggaccaaggtggtgac

SEQ ID NO: 423202 - DNA, 25 bp, Homo sapien
gaattgtgaatctattctgggtgca

SEQ ID NO: 423203 - DNA, 25 bp, Homo sapien
ccttggcaaactgtgccgcgaggag

SEQ ID NO: 423204 - DNA, 25 bp, Homo sapien
gctgtaacagggtaaccggctgagg

SEQ ID NO: 423205 - DNA, 25 bp, Homo sapien
cgaggactgagtgaccggcgatact

SEQ ID NO: 423206 - DNA, 25 bp, Homo sapien
gaagcccagaaagagcgtagcagga

SEQ ID NO: 423207 - DNA, 25 bp, Homo sapien
cgactgcgccaacgccgcagcgccg

SEQ ID NO: 423208 - DNA, 25 bp, Homo sapien
ctgctccgcgctgttcccacgactg

SEQ ID NO: 423209 - DNA, 25 bp, Homo sapien
tgttcccacgactgcgccaacgccg

SEQ ID NO: 423210 - DNA, 25 bp, Homo sapien
gcgctgttcccacgactgcgccaac

SEQ ID NO: 423211 - DNA, 25 bp, Homo sapien
gggagtcctctttccaactgtcgaa

SEQ ID NO: 423212 - DNA, 25 bp, Homo sapien
aaatggttatcaaagtgtttgttgc

SEQ ID NO: 423213 - DNA, 25 bp, Homo sapien
ctgtcgaaatggttatcaaagtgtt

SEQ ID NO: 423214 - DNA, 25 bp, Homo sapien
tttccaactgtcgaaatggttatca

SEQ ID NO: 423215 - DNA, 25 bp, Homo sapien
aatacccccagatcctgtagagcca

SEQ ID NO: 423216 - DNA, 25 bp, Homo sapien
acaccccaaatacccccagatcctg

SEQ ID NO: 423217 - DNA, 25 bp, Homo sapien
caaatacccccagatcctgtagagc

SEQ ID NO: 423218 - DNA, 25 bp, Homo sapien
cccaaatacccccagatcctgtaga

SEQ ID NO: 423219 - DNA, 25 bp, Homo sapien
ctccctctgggccataaagagatgg

SEQ ID NO: 423220 - DNA, 25 bp, Homo sapien
gctcagcaggcgctgtgaggagctg

SEQ ID NO: 423221 - DNA, 25 bp, Homo sapien
aagagatggactcttccaagagctg

SEQ ID NO: 423222 - DNA, 25 bp, Homo sapien
ctgcactttgcaggcccacaggagc

SEQ ID NO: 423223 - DNA, 25 bp, Homo sapien
ccatgtggggtagcagtttccgtgt

SEQ ID NO: 423224 - DNA, 25 bp, Homo sapien
tttccatgcggggtagcagattcca

SEQ ID NO: 423225 - DNA, 25 bp, Homo sapien
ggaatttggagcagtttccatgtgg

SEQ ID NO: 423226 - DNA, 25 bp, Homo sapien
gaaaattcagccgtgaaactgtgga

SEQ ID NO: 423227 - DNA, 25 bp, Homo sapien
tcattgagaaccagaccgcagagtt

SEQ ID NO: 423228 - DNA, 25 bp, Homo sapien
tcacggaaggtgatgcattctggcc

SEQ ID NO: 423229 - DNA, 25 bp, Homo sapien
tcatgggcgctgaaatccggcaagt

SEQ ID NO: 423230 - DNA, 25 bp, Homo sapien
gacactgtgtatctagccccgaagg

SEQ ID NO: 423231 - DNA, 25 bp, Homo sapien
ccgcaggtctaagtaggggtggagg

SEQ ID NO: 423232 - DNA, 25 bp, Homo sapien
gtccttgcaagcttcacgagattga

SEQ ID NO: 423233 - DNA, 25 bp, Homo sapien
cccgcaggtctaagtaggggtggag

SEQ ID NO: 423234 - DNA, 25 bp, Homo sapien
cttgcaagcttcacgagattgattc

SEQ ID NO: 423235 - DNA, 25 bp, Homo sapien
ctgctgtggaaggttctaagacttc

SEQ ID NO: 423236 - DNA, 25 bp, Homo sapien
tggccacgcaccacctctgcagtct

SEQ ID NO: 423237 - DNA, 25 bp, Homo sapien
tctgcagtctgcttttctggccaag

SEQ ID NO: 423238 - DNA, 25 bp, Homo sapien
ccacggacacctgtccttagttctg

SEQ ID NO: 423239 - DNA, 25 bp, Homo sapien
gagaagatacagcaagtgtcctttt

SEQ ID NO: 423240 - DNA, 25 bp, Homo sapien
tcctcttcctctatataaactttgt

SEQ ID NO: 423241 - DNA, 25 bp, Homo sapien
gctatggttgatgggatttctagga

SEQ ID NO: 423242 - DNA, 25 bp, Homo sapien
aaagtgcacctttgatgcagggaag

SEQ ID NO: 423243 - DNA, 25 bp, Homo sapien
gttgtgcgtatcatctttgaagcct

SEQ ID NO: 423244 - DNA, 25 bp, Homo sapien
acccagtgcccttcacacgtttctg

SEQ ID NO: 423245 - DNA, 25 bp, Homo sapien
cctgctgttgattgatttgtagcca

SEQ ID NO: 423246 - DNA, 25 bp, Homo sapien
agggatgatggtaaggacagaaatc

SEQ ID NO: 423247 - DNA, 25 bp, Homo sapien
ttaaatctgagtgggtctgatgaga

SEQ ID NO: 423248 - DNA, 25 bp, Homo sapien
tctgagtgggtctgatgagagcaca

SEQ ID NO: 423249 - DNA, 25 bp, Homo sapien
agctctgcaaccacagagtctgctg

SEQ ID NO: 423250 - DNA, 25 bp, Homo sapien
gcatgggtgggagaatggagctcca

SEQ ID NO: 423251 - DNA, 25 bp, Homo sapien
ggtggagacgacagccatgcatcct

SEQ ID NO: 423252 - DNA, 25 bp, Homo sapien
cagcagatgaaagcttgagagcaga

SEQ ID NO: 423253 - DNA, 25 bp, Homo sapien
cctctcaggtggagacgacagccat

SEQ ID NO: 423254 - DNA, 25 bp, Homo sapien
catgcatcctccgggcagcagatga

SEQ ID NO: 423255 - DNA, 25 bp, Homo sapien
cccttggaaggttgatagtggtgga

SEQ ID NO: 423256 - DNA, 25 bp, Homo sapien
taaccagaaccgagggctcttggca

SEQ ID NO: 423257 - DNA, 25 bp, Homo sapien
tgtgaaactgagtgaagtggcccct

SEQ ID NO: 423258 - DNA, 25 bp, Homo sapien
gctgtccctgactaaccagaaccga

SEQ ID NO: 423259 - DNA, 25 bp, Homo sapien
gaaattctgaacctcaacgcagcct

SEQ ID NO: 423260 - DNA, 25 bp, Homo sapien
cttctgagctatgctctggagaatg

SEQ ID NO: 423261 - DNA, 25 bp, Homo sapien
tctgaacctcaacgcagcctcggag

SEQ ID NO: 423262 - DNA, 25 bp, Homo sapien
ctcttctgagctatgctctggagaa

SEQ ID NO: 423263 - DNA, 25 bp, Homo sapien
taactgcacactggcacagcttcta

SEQ ID NO: 423264 - DNA, 25 bp, Homo sapien
ttgattgtcagattgtggaacattc

SEQ ID NO: 423265 - DNA, 25 bp, Homo sapien
tcttgcaagacaaggaacccgtggc

SEQ ID NO: 423266 - DNA, 25 bp, Homo sapien
tgtaggtggcactgctcttgcaaga

SEQ ID NO: 423267 - DNA, 25 bp, Homo sapien
tgtggaaaataccatactctgcggc

SEQ ID NO: 423268 - DNA, 25 bp, Homo sapien
actctgcggcagttttaggtatggc

SEQ ID NO: 423269 - DNA, 25 bp, Homo sapien
tgctgggctactgtctggtgaataa

SEQ ID NO: 423270 - DNA, 25 bp, Homo sapien
atcccgagacagatcgccctgagct

SEQ ID NO: 423271 - DNA, 25 bp, Homo sapien
cacttgcaagtgttgagatggattc

SEQ ID NO: 423272 - DNA, 25 bp, Homo sapien
cccacttgcaagtgttgagatggat

SEQ ID NO: 423273 - DNA, 25 bp, Homo sapien
ctccccacttgcaagtgttgagatg

SEQ ID NO: 423274 - DNA, 25 bp, Homo sapien
ttgcaagtgttgagatggattccac

SEQ ID NO: 423275 - DNA, 25 bp, Homo sapien
gcaggaccatagctgtggggacatt

SEQ ID NO: 423276 - DNA, 25 bp, Homo sapien
cagctgagtgtagcctgaaggcctg

SEQ ID NO: 423277 - DNA, 25 bp, Homo sapien
tctggaactgactcttgggggatct

SEQ ID NO: 423278 - DNA, 25 bp, Homo sapien
caactcagctgagtgtagcctgaag

SEQ ID NO: 423279 - DNA, 25 bp, Homo sapien
gcagctagaactctgatagatttat

SEQ ID NO: 423280 - DNA, 25 bp, Homo sapien
aagaatagataaggggcctcttggg

SEQ ID NO: 423281 - DNA, 25 bp, Homo sapien
aaatagagccccatttgcatagaac

SEQ ID NO: 423282 - DNA, 25 bp, Homo sapien
ttcaggacagaagaatagataaggg

SEQ ID NO: 423283 - DNA, 25 bp, Homo sapien
tagcctggctgattcaggtaggtcc

SEQ ID NO: 423284 - DNA, 25 bp, Homo sapien
gagccagaccatataaggccctgtg

SEQ ID NO: 423285 - DNA, 25 bp, Homo sapien
ggtaggtccaatatactcacatgca

SEQ ID NO: 423286 - DNA, 25 bp, Homo sapien
aaaagctccttgcaaaaccttcaga

SEQ ID NO: 423287 - DNA, 25 bp, Homo sapien
ttgagagacgaagcacagaagccag

SEQ ID NO: 423288 - DNA, 25 bp, Homo sapien
agtgcaagagggacttcccgcgggt

SEQ ID NO: 423289 - DNA, 25 bp, Homo sapien
ccagcagagcccgtgagatttctga

SEQ ID NO: 423290 - DNA, 25 bp, Homo sapien
tgagatgggccatgaaccagggagg

SEQ ID NO: 423291 - DNA, 25 bp, Homo sapien
tcctggaaggcccagcttccacggc

SEQ ID NO: 423292 - DNA, 25 bp, Homo sapien
ctggaaggcccagcttccacggcca

SEQ ID NO: 423293 - DNA, 25 bp, Homo sapien
tggaaggcccagcttccacggccat

SEQ ID NO: 423294 - DNA, 25 bp, Homo sapien
tgtcctggaaggcccagcttccacg

SEQ ID NO: 423295 - DNA, 25 bp, Homo sapien
tctctgtgcttagagaattttgctt

SEQ ID NO: 423296 - DNA, 25 bp, Homo sapien
cacttccctgcccttaatgacagag

SEQ ID NO: 423297 - DNA, 25 bp, Homo sapien
caacaaagtgcatgcggtgagtggt

SEQ ID NO: 423298 - DNA, 25 bp, Homo sapien
tgcttctatctcaacaaagtgcatg

SEQ ID NO: 423299 - DNA, 25 bp, Homo sapien
tctccacggtgcaagttgggggcca

SEQ ID NO: 423300 - DNA, 25 bp, Homo sapien
gggctcaacgccagagaagaggcag

SEQ ID NO: 423301 - DNA, 25 bp, Homo sapien
tgaagattcaccagtgataaacaca

SEQ ID NO: 423302 - DNA, 25 bp, Homo sapien
gggtagccccaatgctgaagattca

SEQ ID NO: 423303 - DNA, 25 bp, Homo sapien
tagctcttctgtattttaacccgaa

SEQ ID NO: 423304 - DNA, 25 bp, Homo sapien
tgtattcagcgatgggagagagcac

SEQ ID NO: 423305 - DNA, 25 bp, Homo sapien
cccgaatggctgatgctggttgtat

SEQ ID NO: 423306 - DNA, 25 bp, Homo sapien
tgatgctggttgtattcagcgatgg

SEQ ID NO: 423307 - DNA, 25 bp, Homo sapien
ccatgtgaagttcgcggacgtaaaa

SEQ ID NO: 423308 - DNA, 25 bp, Homo sapien
tgcagaccaaaggacagcggtcccc

SEQ ID NO: 423309 - DNA, 25 bp, Homo sapien
acaccatgtgaagttcgcggacgta

SEQ ID NO: 423310 - DNA, 25 bp, Homo sapien
atgcagaccaaaggacagcggtccc

SEQ ID NO: 423311 - DNA, 25 bp, Homo sapien
cagccagggtacagacttccgtgaa

SEQ ID NO: 423312 - DNA, 25 bp, Homo sapien
caagttgtcacacgtgagatcccgg

SEQ ID NO: 423313 - DNA, 25 bp, Homo sapien
tagaacaccatgacccaaagcagag

SEQ ID NO: 423314 - DNA, 25 bp, Homo sapien
tgaagaccaccctagaatgcacaaa

SEQ ID NO: 423315 - DNA, 25 bp, Homo sapien
aaatagggccttaacatcacagtgt

SEQ ID NO: 423316 - DNA, 25 bp, Homo sapien
taaatgagtctttcgaaattgacac

SEQ ID NO: 423317 - DNA, 25 bp, Homo sapien
ctttcgaaattgacacctaagtctt

SEQ ID NO: 423318 - DNA, 25 bp, Homo sapien
gctttactcaataaaaccaatcatg

SEQ ID NO: 423319 - DNA, 25 bp, Homo sapien
aaagcttctggttgacgcgtgattt

SEQ ID NO: 423320 - DNA, 25 bp, Homo sapien
gtgcatccacgcgtgggcccagcca

SEQ ID NO: 423321 - DNA, 25 bp, Homo sapien
aagcacgttgctgagtgatcctggg

SEQ ID NO: 423322 - DNA, 25 bp, Homo sapien
cgcgtgatttctcccctttgcagga

SEQ ID NO: 423323 - DNA, 25 bp, Homo sapien
tcctcccatctggaggtgttgaagc

SEQ ID NO: 423324 - DNA, 25 bp, Homo sapien
tacagggttcccttgactgatgtgg

SEQ ID NO: 423325 - DNA, 25 bp, Homo sapien
cagggttcccttgactgatgtgggg

SEQ ID NO: 423326 - DNA, 25 bp, Homo sapien
gtacagggttcccttgactgatgtg

SEQ ID NO: 423327 - DNA, 25 bp, Homo sapien
tcatagatacgaggtcttgttgtgt

SEQ ID NO: 423328 - DNA, 25 bp, Homo sapien
ccaaataggtgtgcagctaatttta

SEQ ID NO: 423329 - DNA, 25 bp, Homo sapien
gtgtgtgccaccaaataggtgtgca

SEQ ID NO: 423330 - DNA, 25 bp, Homo sapien
tctgcaccttggtctaatcctatga

SEQ ID NO: 423331 - DNA, 25 bp, Homo sapien
caccaagttggtctctcttatgcca

SEQ ID NO: 423332 - DNA, 25 bp, Homo sapien
agttggtctctcttatgccactgta

SEQ ID NO: 423333 - DNA, 25 bp, Homo sapien
tcagttatcaccaagttggtctctc

SEQ ID NO: 423334 - DNA, 25 bp, Homo sapien
ggtctctcttatgccactgtatgtt

SEQ ID NO: 423335 - DNA, 25 bp, Homo sapien
catttagcactaggaagatagcctc

SEQ ID NO: 423336 - DNA, 25 bp, Homo sapien
gatagcctctctgacaggaacggtg

SEQ ID NO: 423337 - DNA, 25 bp, Homo sapien
tataggcttccaatcaatgcgctgt

SEQ ID NO: 423338 - DNA, 25 bp, Homo sapien
gcgctgtcttgcaaatggtcccaga

SEQ ID NO: 423339 - DNA, 25 bp, Homo sapien
cttccaaacacgaaaagctgccatg

SEQ ID NO: 423340 - DNA, 25 bp, Homo sapien
ttccttgagagggtaggaaatgatt

SEQ ID NO: 423341 - DNA, 25 bp, Homo sapien
aaggcttccaaacacgaaaagctgc

SEQ ID NO: 423342 - DNA, 25 bp, Homo sapien
tccttgagagggtaggaaatgattc

SEQ ID NO: 423343 - DNA, 25 bp, Homo sapien
agcctccttccgcacttctcttaac

SEQ ID NO: 423344 - DNA, 25 bp, Homo sapien
cttctcttaaccagcgtagactctt

SEQ ID NO: 423345 - DNA, 25 bp, Homo sapien
ttccgcacttctcttaaccagcgta

SEQ ID NO: 423346 - DNA, 25 bp, Homo sapien
ggctgtgttttttcagaggtgacca

SEQ ID NO: 423347 - DNA, 25 bp, Homo sapien
tatttaagtattgctccagcattcc

SEQ ID NO: 423348 - DNA, 25 bp, Homo sapien
gtgtgccaggcggaggtctctgctg

SEQ ID NO: 423349 - DNA, 25 bp, Homo sapien
cagtggtgcaccctgaagtcccgtt

SEQ ID NO: 423350 - DNA, 25 bp, Homo sapien
tgcagtggtgcaccctgaagtcccg

SEQ ID NO: 423351 - DNA, 25 bp, Homo sapien
aatccttctcccatgggagagaagt

SEQ ID NO: 423352 - DNA, 25 bp, Homo sapien
gatggaaggtatatggggaagaggt

SEQ ID NO: 423353 - DNA, 25 bp, Homo sapien
tgggagagaagtttgcatggctcac

SEQ ID NO: 423354 - DNA, 25 bp, Homo sapien
ggtgatggaaggtatatggggaaga

SEQ ID NO: 423355 - DNA, 25 bp, Homo sapien
cggcctctcgtacagtttagcaaag

SEQ ID NO: 423356 - DNA, 25 bp, Homo sapien
tgcctcggcctctcgtacagtttag

SEQ ID NO: 423357 - DNA, 25 bp, Homo sapien
ggatggatgctttcactttcttgac

SEQ ID NO: 423358 - DNA, 25 bp, Homo sapien
acaggtatctccaagacccaaggcc

SEQ ID NO: 423359 - DNA, 25 bp, Homo sapien
tccgtagctggacagaggtctgatg

SEQ ID NO: 423360 - DNA, 25 bp, Homo sapien
atagcccctcaggtgccggctcaat

SEQ ID NO: 423361 - DNA, 25 bp, Homo sapien
tgccggctcaattgaggtgtccgta

SEQ ID NO: 423362 - DNA, 25 bp, Homo sapien
caattgaggtgtccgtagctggaca

SEQ ID NO: 423363 - DNA, 25 bp, Homo sapien
tgggaagggagtggggggaacagca

SEQ ID NO: 423364 - DNA, 25 bp, Homo sapien
tgtgccaggcccgtatggttacccc

SEQ ID NO: 423365 - DNA, 25 bp, Homo sapien
tgcctgaggcggcatcctgtctggc

SEQ ID NO: 423366 - DNA, 25 bp, Homo sapien
cctgctcagctgtgagtgtgccagg

SEQ ID NO: 423367 - DNA, 25 bp, Homo sapien
tgggctggtacccaccccacttgat

SEQ ID NO: 423368 - DNA, 25 bp, Homo sapien
gacttctctgtgccggagtcgtctc

SEQ ID NO: 423369 - DNA, 25 bp, Homo sapien
acttctctgtgccggagtcgtctca

SEQ ID NO: 423370 - DNA, 25 bp, Homo sapien
tgacttctctgtgccggagtcgtct

SEQ ID NO: 423371 - DNA, 25 bp, Homo sapien
cttctctgtgccggagtcgtctcat

SEQ ID NO: 423372 - DNA, 25 bp, Homo sapien
cctggtgctccgtgaaagatgctct

SEQ ID NO: 423373 - DNA, 25 bp, Homo sapien
gagccggagcatttgtagacagttc

SEQ ID NO: 423374 - DNA, 25 bp, Homo sapien
gacagaaactcaaagaaccggcctc

SEQ ID NO: 423375 - DNA, 25 bp, Homo sapien
acttcactgggtcgtcactgcgcag

SEQ ID NO: 423376 - DNA, 25 bp, Homo sapien
catcctcggcctggacccagcgcct

SEQ ID NO: 423377 - DNA, 25 bp, Homo sapien
tcccacctcctaaatgcggagcgga

SEQ ID NO: 423378 - DNA, 25 bp, Homo sapien
ctatcagatttcctgtgcgcatcgc

SEQ ID NO: 423379 - DNA, 25 bp, Homo sapien
cagatttcctgtgcgcatcgccgcg

SEQ ID NO: 423380 - DNA, 25 bp, Homo sapien
gatggtaaccttcatccatgcagca

SEQ ID NO: 423381 - DNA, 25 bp, Homo sapien
cagaggacacgaaggtgtagccctc

SEQ ID NO: 423382 - DNA, 25 bp, Homo sapien
agcagaggacacgaaggtgtagccc

SEQ ID NO: 423383 - DNA, 25 bp, Homo sapien
tggccaaacttctccacacggatgg

SEQ ID NO: 423384 - DNA, 25 bp, Homo sapien
aagctgcctgggctttatcagcctc

SEQ ID NO: 423385 - DNA, 25 bp, Homo sapien
gaatcctggttacagtgactttgaa

SEQ ID NO: 423386 - DNA, 25 bp, Homo sapien
gatactgatgaggatggagtccctc

SEQ ID NO: 423387 - DNA, 25 bp, Homo sapien
ggagtccctccttgtacctgacaga

SEQ ID NO: 423388 - DNA, 25 bp, Homo sapien
gacaacacttctttgcccgtggaag

SEQ ID NO: 423389 - DNA, 25 bp, Homo sapien
tgaggatagggttccatcaagcttt

SEQ ID NO: 423390 - DNA, 25 bp, Homo sapien
ttcctgctcccaggtaagtccttgg

SEQ ID NO: 423391 - DNA, 25 bp, Homo sapien
tgagggctcccgtattccttgttaa

SEQ ID NO: 423392 - DNA, 25 bp, Homo sapien
aggggcgcacacagggactcctgat

SEQ ID NO: 423393 - DNA, 25 bp, Homo sapien
caggggcgcacacagggactcctga

SEQ ID NO: 423394 - DNA, 25 bp, Homo sapien
ggggcgcacacagggactcctgatg

SEQ ID NO: 423395 - DNA, 25 bp, Homo sapien
cgcaggggcgcacacagggactcct

SEQ ID NO: 423396 - DNA, 25 bp, Homo sapien
gggtgagtgcaatatctctttcaca

SEQ ID NO: 423397 - DNA, 25 bp, Homo sapien
ctgcttgggaatcagtgacttgggt

SEQ ID NO: 423398 - DNA, 25 bp, Homo sapien
acatattgccggcttcctccatcaa

SEQ ID NO: 423399 - DNA, 25 bp, Homo sapien
tctctttcacatattgccggcttcc

SEQ ID NO: 423400 - DNA, 25 bp, Homo sapien
aaacagctcaaagcacattccctat

SEQ ID NO: 423401 - DNA, 25 bp, Homo sapien
tcccagagacaacgcgtaatggcag

SEQ ID NO: 423402 - DNA, 25 bp, Homo sapien
ccattttcccagagacaacgcgtaa

SEQ ID NO: 423403 - DNA, 25 bp, Homo sapien
agacaacgcgtaatggcaggccaga

SEQ ID NO: 423404 - DNA, 25 bp, Homo sapien
tcatgtcggggcagtagaatcttcc

SEQ ID NO: 423405 - DNA, 25 bp, Homo sapien
ggaaagctgtgacgttttccgagtc

SEQ ID NO: 423406 - DNA, 25 bp, Homo sapien
tggaaagctgtgacgttttccgagt

SEQ ID NO: 423407 - DNA, 25 bp, Homo sapien
ctggaaagctgtgacgttttccgag

SEQ ID NO: 423408 - DNA, 25 bp, Homo sapien
gagcactgttggttcctcccttttc

SEQ ID NO: 423409 - DNA, 25 bp, Homo sapien
ttctaggggcattgtggcagatgtc

SEQ ID NO: 423410 - DNA, 25 bp, Homo sapien
cagaggagcactgttggttcctccc

SEQ ID NO: 423411 - DNA, 25 bp, Homo sapien
gatgtctgttcctgcacttgcagct

SEQ ID NO: 423412 - DNA, 25 bp, Homo sapien
agtgtccttgatggctaccccgccc

SEQ ID NO: 423413 - DNA, 25 bp, Homo sapien
tcaactgaaaaatctttgctgcttc

SEQ ID NO: 423414 - DNA, 25 bp, Homo sapien
ctgggaacacctagcaggactgctc

SEQ ID NO: 423415 - DNA, 25 bp, Homo sapien
tgttgtatgcggaaacagctgcctg

SEQ ID NO: 423416 - DNA, 25 bp, Homo sapien
tttcttgcagcaggattcagaggtg

SEQ ID NO: 423417 - DNA, 25 bp, Homo sapien
ggcttttcttgcagcaggattcaga

SEQ ID NO: 423418 - DNA, 25 bp, Homo sapien
cttttcttgcagcaggattcagagg

SEQ ID NO: 423419 - DNA, 25 bp, Homo sapien
ctgccgtggcttttcttgcagcagg

SEQ ID NO: 423420 - DNA, 25 bp, Homo sapien
aaatcttgcgttcttgtggaagtga

SEQ ID NO: 423421 - DNA, 25 bp, Homo sapien
tcttgcgttcttgtggaagtgattg

SEQ ID NO: 423422 - DNA, 25 bp, Homo sapien
tagtaaaatcttgcgttcttgtgga

SEQ ID NO: 423423 - DNA, 25 bp, Homo sapien
tttgtagtaaaatcttgcgttcttg

SEQ ID NO: 423424 - DNA, 25 bp, Homo sapien
aacgtgctccctaagtcatggctgg

SEQ ID NO: 423425 - DNA, 25 bp, Homo sapien
catgacctggttagcaacgtgctcc

SEQ ID NO: 423426 - DNA, 25 bp, Homo sapien
gattggcccaaattatgatgcagtc

SEQ ID NO: 423427 - DNA, 25 bp, Homo sapien
tcatggctggaagacaccacgtatt

SEQ ID NO: 423428 - DNA, 25 bp, Homo sapien
cttggtaaccacaggcagcgggcat

SEQ ID NO: 423429 - DNA, 25 bp, Homo sapien
tcacactttcctgaccgttcccgga

SEQ ID NO: 423430 - DNA, 25 bp, Homo sapien
tgctgacatccctattgtgtccaaa

SEQ ID NO: 423431 - DNA, 25 bp, Homo sapien
gcgggcatataaaggcacagttgcc

SEQ ID NO: 423432 - DNA, 25 bp, Homo sapien
aggtctcgccctgagtgtgcaagct

SEQ ID NO: 423433 - DNA, 25 bp, Homo sapien
gccctgagtgtgcaagcttttcttt

SEQ ID NO: 423434 - DNA, 25 bp, Homo sapien
atgaggtttggtccaggatcagaga

SEQ ID NO: 423435 - DNA, 25 bp, Homo sapien
gaggtttggtccaggatcagagaca

SEQ ID NO: 423436 - DNA, 25 bp, Homo sapien
cgggtgaaactcttgatgttacttc

SEQ ID NO: 423437 - DNA, 25 bp, Homo sapien
ctccattgaataagccagattctct

SEQ ID NO: 423438 - DNA, 25 bp, Homo sapien
cctcctctgtatgaacagcacgggt

SEQ ID NO: 423439 - DNA, 25 bp, Homo sapien
cttcctccattgaataagccagatt

SEQ ID NO: 423440 - DNA, 25 bp, Homo sapien
gatggcttcgtgtagcacaattaaa

SEQ ID NO: 423441 - DNA, 25 bp, Homo sapien
tcaagccttgtagagttaagatggc

SEQ ID NO: 423442 - DNA, 25 bp, Homo sapien
cacaattaaatctgagcgctggaaa

SEQ ID NO: 423443 - DNA, 25 bp, Homo sapien
cttgaggacggccaaacttgtttgt

SEQ ID NO: 423444 - DNA, 25 bp, Homo sapien
agcagcatctgtgagcttgaaaggg

SEQ ID NO: 423445 - DNA, 25 bp, Homo sapien
tggttgagctgccacaagcagatgg

SEQ ID NO: 423446 - DNA, 25 bp, Homo sapien
acagttcttggttgagctgccacaa

SEQ ID NO: 423447 - DNA, 25 bp, Homo sapien
tgatgagtgagacttttgtccacag

SEQ ID NO: 423448 - DNA, 25 bp, Homo sapien
ttcaaccaaggggacgccacaagca

SEQ ID NO: 423449 - DNA, 25 bp, Homo sapien
ctttcaaccaaggggacgccacaag

SEQ ID NO: 423450 - DNA, 25 bp, Homo sapien
gacgccacaagcaccccgttcatac

SEQ ID NO: 423451 - DNA, 25 bp, Homo sapien
tgagaaagaaaccattcctccctgg

SEQ ID NO: 423452 - DNA, 25 bp, Homo sapien
gctcgttggtgaccagcaagggtcc

SEQ ID NO: 423453 - DNA, 25 bp, Homo sapien
gctctggtggaacgtccacaggata

SEQ ID NO: 423454 - DNA, 25 bp, Homo sapien
gcgtgcagatgccagcgcctggctc

SEQ ID NO: 423455 - DNA, 25 bp, Homo sapien
tggctcgttggtgaccagcaagggt

SEQ ID NO: 423456 - DNA, 25 bp, Homo sapien
ccccgtcatgctcttttccaccttc

SEQ ID NO: 423457 - DNA, 25 bp, Homo sapien
ggagaagcatcgttctcgtccaccc

SEQ ID NO: 423458 - DNA, 25 bp, Homo sapien
cagtggagaagcatcgttctcgtcc

SEQ ID NO: 423459 - DNA, 25 bp, Homo sapien
acccccgtcatgctcttttccacct

SEQ ID NO: 423460 - DNA, 25 bp, Homo sapien
gtgggcacagtggtctggggtcttc

SEQ ID NO: 423461 - DNA, 25 bp, Homo sapien
tctggggtcttcgaccttgtttata

SEQ ID NO: 423462 - DNA, 25 bp, Homo sapien
cagtggtctggggtcttcgaccttg

SEQ ID NO: 423463 - DNA, 25 bp, Homo sapien
ctgaaatgttaaggtgggcacagtg

SEQ ID NO: 423464 - DNA, 25 bp, Homo sapien
gttactggtcgggtctgtacaggca

SEQ ID NO: 423465 - DNA, 25 bp, Homo sapien
tcgggtctgtacaggcagtttccac

SEQ ID NO: 423466 - DNA, 25 bp, Homo sapien
cactggcgttttttaccaggccagc

SEQ ID NO: 423467 - DNA, 25 bp, Homo sapien
gtgcctgttactggtcgggtctgta

SEQ ID NO: 423468 - DNA, 25 bp, Homo sapien
gtccttgcatactctttctggcctc

SEQ ID NO: 423469 - DNA, 25 bp, Homo sapien
gctttgtccttgcatactctttctg

SEQ ID NO: 423470 - DNA, 25 bp, Homo sapien
catactctttctggcctcatagtgg

SEQ ID NO: 423471 - DNA, 25 bp, Homo sapien
tgtcccttcactccagatctctcct

SEQ ID NO: 423472 - DNA, 25 bp, Homo sapien
tcagattgagtctgtagggctttgt

SEQ ID NO: 423473 - DNA, 25 bp, Homo sapien
gttcgtgacattcttcacaatcaga

SEQ ID NO: 423474 - DNA, 25 bp, Homo sapien
tcatttgaatctttcctggaactct

SEQ ID NO: 423475 - DNA, 25 bp, Homo sapien
ggagaagttcttctgttcgtgacat

SEQ ID NO: 423476 - DNA, 25 bp, Homo sapien
tcgaggccgtgggttttgcatacag

SEQ ID NO: 423477 - DNA, 25 bp, Homo sapien
cgtgggttttgcatacagagctttc

SEQ ID NO: 423478 - DNA, 25 bp, Homo sapien
catcctgaatgagggtcaagctgag

SEQ ID NO: 423479 - DNA, 25 bp, Homo sapien
gttgagtgctcagtgctttgaccgg

SEQ ID NO: 423480 - DNA, 25 bp, Homo sapien
cagtggaagagcaaggggcggttta

SEQ ID NO: 423481 - DNA, 25 bp, Homo sapien
ccccacccgtgtccatgaagggcag

SEQ ID NO: 423482 - DNA, 25 bp, Homo sapien
gaagggcagtggaagagcaaggggc

SEQ ID NO: 423483 - DNA, 25 bp, Homo sapien
aacaatgttaactgccccacccgtg

SEQ ID NO: 423484 - DNA, 25 bp, Homo sapien
ctgggatgtaaaacagcaggcaccc

SEQ ID NO: 423485 - DNA, 25 bp, Homo sapien
acagcaggcacccccactgccctcc

SEQ ID NO: 423486 - DNA, 25 bp, Homo sapien
agcaggcacccccactgccctcctc

SEQ ID NO: 423487 - DNA, 25 bp, Homo sapien
caggcacccccactgccctcctcag

SEQ ID NO: 423488 - DNA, 25 bp, Homo sapien
tgggccctccgtgccaagagtctat

SEQ ID NO: 423489 - DNA, 25 bp, Homo sapien
tagaaattaatctggctcatggttc

SEQ ID NO: 423490 - DNA, 25 bp, Homo sapien
aaccagcctattgagtatctacgtg

SEQ ID NO: 423491 - DNA, 25 bp, Homo sapien
taaagtgaaacagatcaaccagcct

SEQ ID NO: 423492 - DNA, 25 bp, Homo sapien
gaaatctgagtgctaggaacggacc

SEQ ID NO: 423493 - DNA, 25 bp, Homo sapien
gaacggacctcttgctctcagattg

SEQ ID NO: 423494 - DNA, 25 bp, Homo sapien
aagctgaagggaacctgtccaccct

SEQ ID NO: 423495 - DNA, 25 bp, Homo sapien
gaaggatttgcagtgtgtggcccct

SEQ ID NO: 423496 - DNA, 25 bp, Homo sapien
agggcaagagccacgccaacaggag

SEQ ID NO: 423497 - DNA, 25 bp, Homo sapien
caagagccacgccaacaggaggaag

SEQ ID NO: 423498 - DNA, 25 bp, Homo sapien
agccacgccaacaggaggaagttgg

SEQ ID NO: 423499 - DNA, 25 bp, Homo sapien
agagccacgccaacaggaggaagtt

SEQ ID NO: 423500 - DNA, 25 bp, Homo sapien
atccaggacccgctcagaaacgaat

SEQ ID NO: 423501 - DNA, 25 bp, Homo sapien
ccgttcctgcagtactgcaggcctg

SEQ ID NO: 423502 - DNA, 25 bp, Homo sapien
tcaccgttcctgcagtactgcaggc

SEQ ID NO: 423503 - DNA, 25 bp, Homo sapien
tgcatccaggacccgctcagaaacg

SEQ ID NO: 423504 - DNA, 25 bp, Homo sapien
cttgccatccccctgtggcaaggtg

SEQ ID NO: 423505 - DNA, 25 bp, Homo sapien
ggaaggctggtcctttctcgctggc

SEQ ID NO: 423506 - DNA, 25 bp, Homo sapien
gctgctccctcctccgggactccat

SEQ ID NO: 423507 - DNA, 25 bp, Homo sapien
cctggaccctggaaggctggtcctt

SEQ ID NO: 423508 - DNA, 25 bp, Homo sapien
cttgcaccctcgccttgttccttca

SEQ ID NO: 423509 - DNA, 25 bp, Homo sapien
ctcttgcaccctcgccttgttcctt

SEQ ID NO: 423510 - DNA, 25 bp, Homo sapien
ttgcaccctcgccttgttccttcag

SEQ ID NO: 423511 - DNA, 25 bp, Homo sapien
tcttgcaccctcgccttgttccttc

SEQ ID NO: 423512 - DNA, 25 bp, Homo sapien
tcagaaacaaagccttcctactcat

SEQ ID NO: 423513 - DNA, 25 bp, Homo sapien
gtccacaggaaacggtgtcagaaac

SEQ ID NO: 423514 - DNA, 25 bp, Homo sapien
cacaggaaacggtgtcagaaacaaa

SEQ ID NO: 423515 - DNA, 25 bp, Homo sapien
ccacaggaaacggtgtcagaaacaa

SEQ ID NO: 423516 - DNA, 25 bp, Homo sapien
accaagcttcgaactgtacttcatg

SEQ ID NO: 423517 - DNA, 25 bp, Homo sapien
gacatgtcccgcagcaagagtgtct

SEQ ID NO: 423518 - DNA, 25 bp, Homo sapien
ttgtctcatgtgtttgttccactct

SEQ ID NO: 423519 - DNA, 25 bp, Homo sapien
tgggagatgaaaacagcttgaggac

SEQ ID NO: 423520 - DNA, 25 bp, Homo sapien
aggaggccctacatgcgtctctcgg

SEQ ID NO: 423521 - DNA, 25 bp, Homo sapien
acatgcgtctctcggggagccacaa

SEQ ID NO: 423522 - DNA, 25 bp, Homo sapien
gagccacaagagtgggggccagctg

SEQ ID NO: 423523 - DNA, 25 bp, Homo sapien
gaatctcaggaggccctacatgcgt

SEQ ID NO: 423524 - DNA, 25 bp, Homo sapien
tcagtccctctgtctgcaagtgaaa

SEQ ID NO: 423525 - DNA, 25 bp, Homo sapien
acacttggcctagttgttgttttca

SEQ ID NO: 423526 - DNA, 25 bp, Homo sapien
ttttcatttgcccaagacatactgt

SEQ ID NO: 423527 - DNA, 25 bp, Homo sapien
gcccaagacatactgttctgttcct

SEQ ID NO: 423528 - DNA, 25 bp, Homo sapien
gcagcattccgccacgttccagaag

SEQ ID NO: 423529 - DNA, 25 bp, Homo sapien
cagaagctcgcttgatgtgggcaga

SEQ ID NO: 423530 - DNA, 25 bp, Homo sapien
tgtgggcagagctcgtctgggactt

SEQ ID NO: 423531 - DNA, 25 bp, Homo sapien
ctcgtctgggacttggttggtctct

SEQ ID NO: 423532 - DNA, 25 bp, Homo sapien
tgtctcagtgcttagttgcaccact

SEQ ID NO: 423533 - DNA, 25 bp, Homo sapien
tgcttagttgcaccactgcggagga

SEQ ID NO: 423534 - DNA, 25 bp, Homo sapien
tcagtgcttagttgcaccactgcgg

SEQ ID NO: 423535 - DNA, 25 bp, Homo sapien
agtgcttagttgcaccactgcggag

SEQ ID NO: 423536 - DNA, 25 bp, Homo sapien
ctgcgggtgactgatggaagtttca

SEQ ID NO: 423537 - DNA, 25 bp, Homo sapien
gcaagatgttacacagcatggcctc

SEQ ID NO: 423538 - DNA, 25 bp, Homo sapien
gggcaagatgttacacagcatggcc

SEQ ID NO: 423539 - DNA, 25 bp, Homo sapien
agaataatccttggtaaatcttggc

SEQ ID NO: 423540 - DNA, 25 bp, Homo sapien
catcaggggacagataattccagct

SEQ ID NO: 423541 - DNA, 25 bp, Homo sapien
ccagctctcaatggggctatggttg

SEQ ID NO: 423542 - DNA, 25 bp, Homo sapien
caggggacagataattccagctctc

SEQ ID NO: 423543 - DNA, 25 bp, Homo sapien
gggacagataattccagctctcaat

SEQ ID NO: 423544 - DNA, 25 bp, Homo sapien
atgatgactgggcagccatcagagc

SEQ ID NO: 423545 - DNA, 25 bp, Homo sapien
gagattgtcggtggcttcttctggt

SEQ ID NO: 423546 - DNA, 25 bp, Homo sapien
gggataatgatgactgggcagccat

SEQ ID NO: 423547 - DNA, 25 bp, Homo sapien
acagctgagactgaggagattgtcg

SEQ ID NO: 423548 - DNA, 25 bp, Homo sapien
agaccctgagcggtgaaaaggccag

SEQ ID NO: 423549 - DNA, 25 bp, Homo sapien
ggagatgacacgtcccaaccatggt

SEQ ID NO: 423550 - DNA, 25 bp, Homo sapien
taagcgctgatagaaatctaggacg

SEQ ID NO: 423551 - DNA, 25 bp, Homo sapien
ggccacgatcttgcaggcttagtga

SEQ ID NO: 423552 - DNA, 25 bp, Homo sapien
ttaagtcgctgcatgctcacagagg

SEQ ID NO: 423553 - DNA, 25 bp, Homo sapien
aagtcgctgcatgctcacagaggct

SEQ ID NO: 423554 - DNA, 25 bp, Homo sapien
gtcgctgcatgctcacagaggctta

SEQ ID NO: 423555 - DNA, 25 bp, Homo sapien
tcgctgcatgctcacagaggcttac

SEQ ID NO: 423556 - DNA, 25 bp, Homo sapien
ggattcctctcatgccacgaatggg

SEQ ID NO: 423557 - DNA, 25 bp, Homo sapien
cacgaatggggaaagttcacagttg

SEQ ID NO: 423558 - DNA, 25 bp, Homo sapien
tcaggattcctctcatgccacgaat

SEQ ID NO: 423559 - DNA, 25 bp, Homo sapien
tcatcaggattcctctcatgccacg

SEQ ID NO: 423560 - DNA, 25 bp, Homo sapien
tggggggactgttctagagccttct

SEQ ID NO: 423561 - DNA, 25 bp, Homo sapien
gggactgttctagagccttctgtgc

SEQ ID NO: 423562 - DNA, 25 bp, Homo sapien
ttggggggactgttctagagccttc

SEQ ID NO: 423563 - DNA, 25 bp, Homo sapien
gggggactgttctagagccttctgt

SEQ ID NO: 423564 - DNA, 25 bp, Homo sapien
ggagcgcccattgttcacagcagtt

SEQ ID NO: 423565 - DNA, 25 bp, Homo sapien
aagcagaatggagcgcccattgttc

SEQ ID NO: 423566 - DNA, 25 bp, Homo sapien
ctaagcagaatggagcgcccattgt

SEQ ID NO: 423567 - DNA, 25 bp, Homo sapien
gaatggagcgcccattgttcacagc

SEQ ID NO: 423568 - DNA, 25 bp, Homo sapien
tgacagtggatcaggcattatgcag

SEQ ID NO: 423569 - DNA, 25 bp, Homo sapien
gtctctgacttcagaagaagcagac

SEQ ID NO: 423570 - DNA, 25 bp, Homo sapien
tcaggcattatgcagagcacgaaga

SEQ ID NO: 423571 - DNA, 25 bp, Homo sapien
tggatcaggcattatgcagagcacg

SEQ ID NO: 423572 - DNA, 25 bp, Homo sapien
ttcttgtggatgtcaaggtgcctgg

SEQ ID NO: 423573 - DNA, 25 bp, Homo sapien
tgagcagtgccttgactccgaagga

SEQ ID NO: 423574 - DNA, 25 bp, Homo sapien
tcttgtggatgtcaaggtgcctggc

SEQ ID NO: 423575 - DNA, 25 bp, Homo sapien
tggaggcaaggtcagtcagccaggc

SEQ ID NO: 423576 - DNA, 25 bp, Homo sapien
agcttcttgccgttgccccaaacat

SEQ ID NO: 423577 - DNA, 25 bp, Homo sapien
tgccgttgccccaaacatgacattt

SEQ ID NO: 423578 - DNA, 25 bp, Homo sapien
cttcttgccgttgccccaaacatga

SEQ ID NO: 423579 - DNA, 25 bp, Homo sapien
tgagcaggcacttgccccctgttgt

SEQ ID NO: 423580 - DNA, 25 bp, Homo sapien
tgatgggacctgtcacctcatattc

SEQ ID NO: 423581 - DNA, 25 bp, Homo sapien
gttgtcagcacattataaagtctct

SEQ ID NO: 423582 - DNA, 25 bp, Homo sapien
atattctggagggacgggtggacga

SEQ ID NO: 423583 - DNA, 25 bp, Homo sapien
gagccctggatgtgcgttgtcagca

SEQ ID NO: 423584 - DNA, 25 bp, Homo sapien
ctgtggaatgtgtgtagatgccaaa

SEQ ID NO: 423585 - DNA, 25 bp, Homo sapien
tgtggaatgtgtgtagatgccaaag

SEQ ID NO: 423586 - DNA, 25 bp, Homo sapien
gatccaatgtgtccacgggcacaca

SEQ ID NO: 423587 - DNA, 25 bp, Homo sapien
gatgcgctgatccaatgtgtccacg

SEQ ID NO: 423588 - DNA, 25 bp, Homo sapien
tgagatgcgctgatccaatgtgtcc

SEQ ID NO: 423589 - DNA, 25 bp, Homo sapien
gctgatccaatgtgtccacgggcac

SEQ ID NO: 423590 - DNA, 25 bp, Homo sapien
cagaagacttctgaacggtagatgc

SEQ ID NO: 423591 - DNA, 25 bp, Homo sapien
gccaggaagaacatatggaggtgca

SEQ ID NO: 423592 - DNA, 25 bp, Homo sapien
tcctggcacgtagggatcgcctgag

SEQ ID NO: 423593 - DNA, 25 bp, Homo sapien
cctgactgtgctggtcgtcctggca

SEQ ID NO: 423594 - DNA, 25 bp, Homo sapien
ttcacctcggagatgatcatccaca

SEQ ID NO: 423595 - DNA, 25 bp, Homo sapien
acctctcagaggtacgaccagggcg

SEQ ID NO: 423596 - DNA, 25 bp, Homo sapien
gatcatccacaatgtggagcccagt

SEQ ID NO: 423597 - DNA, 25 bp, Homo sapien
tcggggaacatcagatgcagcctcc

SEQ ID NO: 423598 - DNA, 25 bp, Homo sapien
tgccaggcctatgtcaccaggttcg

SEQ ID NO: 423599 - DNA, 25 bp, Homo sapien
tgtgaaaacaatgcagtcgtgcctt

SEQ ID NO: 423600 - DNA, 25 bp, Homo sapien
taccatgggccgtgtttcctgggaa

SEQ ID NO: 423601 - DNA, 25 bp, Homo sapien
tgaggacctctgaattccgaatgcc

SEQ ID NO: 423602 - DNA, 25 bp, Homo sapien
tccctcaggcgtccatgccctgtct

SEQ ID NO: 423603 - DNA, 25 bp, Homo sapien
ctctccccagaaatcacactcttgt

SEQ ID NO: 423604 - DNA, 25 bp, Homo sapien
agaaagtccctcaggcgtccatgcc

SEQ ID NO: 423605 - DNA, 25 bp, Homo sapien
tcacactcttgtccctctagggcag

SEQ ID NO: 423606 - DNA, 25 bp, Homo sapien
ttgggtacatctctacagcaatctt

SEQ ID NO: 423607 - DNA, 25 bp, Homo sapien
tccttttgggtacatctctacagca

SEQ ID NO: 423608 - DNA, 25 bp, Homo sapien
ttttgggtacatctctacagcaatc

SEQ ID NO: 423609 - DNA, 25 bp, Homo sapien
ggtgttccttttgggtacatctcta

SEQ ID NO: 423610 - DNA, 25 bp, Homo sapien
cactgggcgagtcatagggagtcct

SEQ ID NO: 423611 - DNA, 25 bp, Homo sapien
cagaggctctgagttcgtgcaatgc

SEQ ID NO: 423612 - DNA, 25 bp, Homo sapien
cgtgcaatgcagtgctcctctctgt

SEQ ID NO: 423613 - DNA, 25 bp, Homo sapien
tctgtgagcacgtggtctgttaccc

SEQ ID NO: 423614 - DNA, 25 bp, Homo sapien
tgtgcagtctccgttccaaggagga

SEQ ID NO: 423615 - DNA, 25 bp, Homo sapien
gtagaagaagggagcctcgccatga

SEQ ID NO: 423616 - DNA, 25 bp, Homo sapien
tgggttcacccatcgggccagggat

SEQ ID NO: 423617 - DNA, 25 bp, Homo sapien
cagagtgtatagttggcatcgggct

SEQ ID NO: 423618 - DNA, 25 bp, Homo sapien
ccacaggaaaaggttgaaagattgc

SEQ ID NO: 423619 - DNA, 25 bp, Homo sapien
tagtactgtcccacgaggatgaatg

SEQ ID NO: 423620 - DNA, 25 bp, Homo sapien
ggcgttcttgatctggtaactggtc

SEQ ID NO: 423621 - DNA, 25 bp, Homo sapien
ccctggatatgctatgaagaggtcc

SEQ ID NO: 423622 - DNA, 25 bp, Homo sapien
gacctggtgggttgcacactcagac

SEQ ID NO: 423623 - DNA, 25 bp, Homo sapien
gctggggtgcctcttgacagctagc

SEQ ID NO: 423624 - DNA, 25 bp, Homo sapien
ttgacagctagcatgcttgcatttg

SEQ ID NO: 423625 - DNA, 25 bp, Homo sapien
agaggatgcaatgtgtgttcaggct

SEQ ID NO: 423626 - DNA, 25 bp, Homo sapien
tgtcttgtgtcactggcgagcaccg

SEQ ID NO: 423627 - DNA, 25 bp, Homo sapien
tgaccctccctttgtagcaatactg

SEQ ID NO: 423628 - DNA, 25 bp, Homo sapien
gagcaccgatttcccagggcagctt

SEQ ID NO: 423629 - DNA, 25 bp, Homo sapien
gcaatactgaacgttcattttgtgt

SEQ ID NO: 423630 - DNA, 25 bp, Homo sapien
catttgggggcgcatggccttctgc

SEQ ID NO: 423631 - DNA, 25 bp, Homo sapien
ggcatgtaaggagggcagtccaggt

SEQ ID NO: 423632 - DNA, 25 bp, Homo sapien
ctgcttgctgtccaaggtggacctg

SEQ ID NO: 423633 - DNA, 25 bp, Homo sapien
tcgcatcggtgacctgggcatgtaa

SEQ ID NO: 423634 - DNA, 25 bp, Homo sapien
gggttgatgggctggagtctggtgg

SEQ ID NO: 423635 - DNA, 25 bp, Homo sapien
gatgggctggagtctggtggcctgc

SEQ ID NO: 423636 - DNA, 25 bp, Homo sapien
atgggctggagtctggtggcctgct

SEQ ID NO: 423637 - DNA, 25 bp, Homo sapien
ttgatgggctggagtctggtggcct

SEQ ID NO: 423638 - DNA, 25 bp, Homo sapien
cagtctgcacaacgcttttttggga

SEQ ID NO: 423639 - DNA, 25 bp, Homo sapien
cactctgatgccttgaagactcttc

SEQ ID NO: 423640 - DNA, 25 bp, Homo sapien
ttttgggacagttgagggcccactc

SEQ ID NO: 423641 - DNA, 25 bp, Homo sapien
ttcagagcctcacgatgttgggact

SEQ ID NO: 423642 - DNA, 25 bp, Homo sapien
aacaagaagggatggctgcgtggag

SEQ ID NO: 423643 - DNA, 25 bp, Homo sapien
ggatggctgcgtggagtggtttttc

SEQ ID NO: 423644 - DNA, 25 bp, Homo sapien
tatatacaacttatccaataagagt

SEQ ID NO: 423645 - DNA, 25 bp, Homo sapien
ttatatacaacttatccaataagag

SEQ ID NO: 423646 - DNA, 25 bp, Homo sapien
gaagttttcctgtgccgtagccgtg

SEQ ID NO: 423647 - DNA, 25 bp, Homo sapien
tgtcccctgtggatctggcagcatg

SEQ ID NO: 423648 - DNA, 25 bp, Homo sapien
tagtgttgccaaagccagattcatg

SEQ ID NO: 423649 - DNA, 25 bp, Homo sapien
ctcttacgaatatttggtggccaca

SEQ ID NO: 423650 - DNA, 25 bp, Homo sapien
tgatgtagatagacacagagctggc

SEQ ID NO: 423651 - DNA, 25 bp, Homo sapien
tctctgatgatgtagatagacacag

SEQ ID NO: 423652 - DNA, 25 bp, Homo sapien
gcttgagcaccagggacgctgattt

SEQ ID NO: 423653 - DNA, 25 bp, Homo sapien
tctagactctttggtgagcatccag

SEQ ID NO: 423654 - DNA, 25 bp, Homo sapien
tggtgtagactctctccagtataaa

SEQ ID NO: 423655 - DNA, 25 bp, Homo sapien
ccagcctggtgtagactctctccag

SEQ ID NO: 423656 - DNA, 25 bp, Homo sapien
aactgcaactgcctggtattgtaaa

SEQ ID NO: 423657 - DNA, 25 bp, Homo sapien
cctggtattgtaaagaccagaccct

SEQ ID NO: 423658 - DNA, 25 bp, Homo sapien
tgaaaatgtcaaaaggtcccaaaga

SEQ ID NO: 423659 - DNA, 25 bp, Homo sapien
cattttttgatgtgagacaccttca

SEQ ID NO: 423660 - DNA, 25 bp, Homo sapien
gagacaccttcacctacgacataaa

SEQ ID NO: 423661 - DNA, 25 bp, Homo sapien
tcaatactttcaataacgagttctt

SEQ ID NO: 423662 - DNA, 25 bp, Homo sapien
tttcctgtctcctgtgtgtgagttg

SEQ ID NO: 423663 - DNA, 25 bp, Homo sapien
ggaaacaaggttttccatgaggcca

SEQ ID NO: 423664 - DNA, 25 bp, Homo sapien
ggttttccatgaggccaatggctct

SEQ ID NO: 423665 - DNA, 25 bp, Homo sapien
caaggttttccatgaggccaatggc

SEQ ID NO: 423666 - DNA, 25 bp, Homo sapien
tctttgagtgtgagtagccttgcac

SEQ ID NO: 423667 - DNA, 25 bp, Homo sapien
tgtgtttctttgagtgtgagtagcc

SEQ ID NO: 423668 - DNA, 25 bp, Homo sapien
tgtgagtagccttgcacaagctcgg

SEQ ID NO: 423669 - DNA, 25 bp, Homo sapien
tagccttgcacaagctcgggctcca

SEQ ID NO: 423670 - DNA, 25 bp, Homo sapien
tctgtaatttgatcagactgaacag

SEQ ID NO: 423671 - DNA, 25 bp, Homo sapien
tttatgctcattgcctgccactctt

SEQ ID NO: 423672 - DNA, 25 bp, Homo sapien
gtagattggactttgtttactgccc

SEQ ID NO: 423673 - DNA, 25 bp, Homo sapien
gcccatcgatttactgcacaacgtg

SEQ ID NO: 423674 - DNA, 25 bp, Homo sapien
tgtgccctccatgggagttaggagt

SEQ ID NO: 423675 - DNA, 25 bp, Homo sapien
tatgtgccctccatgggagttagga

SEQ ID NO: 423676 - DNA, 25 bp, Homo sapien
atgtgccctccatgggagttaggag

SEQ ID NO: 423677 - DNA, 25 bp, Homo sapien
ttatgtgccctccatgggagttagg

SEQ ID NO: 423678 - DNA, 25 bp, Homo sapien
tgttcctgatggcacttattacaac

SEQ ID NO: 423679 - DNA, 25 bp, Homo sapien
tacaactgtaattcacaggcatcac

SEQ ID NO: 423680 - DNA, 25 bp, Homo sapien
gattgtccagtcaatactcgtctcc

SEQ ID NO: 423681 - DNA, 25 bp, Homo sapien
gtcaatactcgtctcctccatgctg

SEQ ID NO: 423682 - DNA, 25 bp, Homo sapien
tgcagctgaaccctcagcaaggctg

SEQ ID NO: 423683 - DNA, 25 bp, Homo sapien
cctgatgcagctgaaccctcagcaa

SEQ ID NO: 423684 - DNA, 25 bp, Homo sapien
catctgcaactctccaccagagatg

SEQ ID NO: 423685 - DNA, 25 bp, Homo sapien
agatgggaggctgtgttttgtccat

SEQ ID NO: 423686 - DNA, 25 bp, Homo sapien
tcagggtgcagcgagacctggtgga

SEQ ID NO: 423687 - DNA, 25 bp, Homo sapien
cctttccgtgttctgtgaaggcgct

SEQ ID NO: 423688 - DNA, 25 bp, Homo sapien
tgaaggcgctggcaactccacagag

SEQ ID NO: 423689 - DNA, 25 bp, Homo sapien
tggcaatgttagagcccagtgtgga

SEQ ID NO: 423690 - DNA, 25 bp, Homo sapien
cctccaggacctgtggctaaaatga

SEQ ID NO: 423691 - DNA, 25 bp, Homo sapien
gaagtgtcagattggcctcgtacag

SEQ ID NO: 423692 - DNA, 25 bp, Homo sapien
gccagaaactcatggaaagctctag

SEQ ID NO: 423693 - DNA, 25 bp, Homo sapien
gattggcctcgtacagcccttgggc

SEQ ID NO: 423694 - DNA, 25 bp, Homo sapien
tgctgacgtcccactgtgtgaacag

SEQ ID NO: 423695 - DNA, 25 bp, Homo sapien
tagtgtccagcgtatgctgtgatgt

SEQ ID NO: 423696 - DNA, 25 bp, Homo sapien
tcaggttgcccgtacttagtgtcca

SEQ ID NO: 423697 - DNA, 25 bp, Homo sapien
tattgtacttaaagaaagctcctcc

SEQ ID NO: 423698 - DNA, 25 bp, Homo sapien
gaaatcactttttcaggaagatgcg

SEQ ID NO: 423699 - DNA, 25 bp, Homo sapien
cagggaaagaaatcactttttcagg

SEQ ID NO: 423700 - DNA, 25 bp, Homo sapien
tcactttttcaggaagatgcgccat

SEQ ID NO: 423701 - DNA, 25 bp, Homo sapien
aatcactttttcaggaagatgcgcc

SEQ ID NO: 423702 - DNA, 25 bp, Homo sapien
cagtgaggaagggacactcttctat

SEQ ID NO: 423703 - DNA, 25 bp, Homo sapien
aagggacactcttctatgctttggg

SEQ ID NO: 423704 - DNA, 25 bp, Homo sapien
tcttctatgctttggggaactgtgg

SEQ ID NO: 423705 - DNA, 25 bp, Homo sapien
cctgctgagcagttctcagtgagga

SEQ ID NO: 423706 - DNA, 25 bp, Homo sapien
tgcatcaaaacaccagggtgggtgg

SEQ ID NO: 423707 - DNA, 25 bp, Homo sapien
ccactgacccctaactgtcagactt

SEQ ID NO: 423708 - DNA, 25 bp, Homo sapien
ccctaactgtcagacttcctttctt

SEQ ID NO: 423709 - DNA, 25 bp, Homo sapien
aactgtcagacttcctttcttgtac

SEQ ID NO: 423710 - DNA, 25 bp, Homo sapien
tgacccctaactgtcagacttcctt

SEQ ID NO: 423711 - DNA, 25 bp, Homo sapien
cacgtgaccccaagagatctggcca

SEQ ID NO: 423712 - DNA, 25 bp, Homo sapien
ccttggattgatgagagtggctgct

SEQ ID NO: 423713 - DNA, 25 bp, Homo sapien
tcaaagttcacgtgaccccaagaga

SEQ ID NO: 423714 - DNA, 25 bp, Homo sapien
cactggccttggattgatgagagtg

SEQ ID NO: 423715 - DNA, 25 bp, Homo sapien
gacgtggagactcgggagagtgtga

SEQ ID NO: 423716 - DNA, 25 bp, Homo sapien
tggagggacgtggagactcgggaga

SEQ ID NO: 423717 - DNA, 25 bp, Homo sapien
agggctgctgcaatggagggacgtg

SEQ ID NO: 423718 - DNA, 25 bp, Homo sapien
acagagacagtatggagggctgctg

SEQ ID NO: 423719 - DNA, 25 bp, Homo sapien
tgttagacgtgcactcacatgggtg

SEQ ID NO: 423720 - DNA, 25 bp, Homo sapien
gattccacccggttcatgtgttaga

SEQ ID NO: 423721 - DNA, 25 bp, Homo sapien
catgtagtcagcaggtcgggctctc

SEQ ID NO: 423722 - DNA, 25 bp, Homo sapien
tgtgggacaggcatagtcacgtgac

SEQ ID NO: 423723 - DNA, 25 bp, Homo sapien
tgtggtactcgtttctatcactaag

SEQ ID NO: 423724 - DNA, 25 bp, Homo sapien
ggtactcgtttctatcactaagtga

SEQ ID NO: 423725 - DNA, 25 bp, Homo sapien
tactcgtttctatcactaagtgatg

SEQ ID NO: 423726 - DNA, 25 bp, Homo sapien
tggactgtggtactcgtttctatca

SEQ ID NO: 423727 - DNA, 25 bp, Homo sapien
tggaaactccctacattccccacaa

SEQ ID NO: 423728 - DNA, 25 bp, Homo sapien
acggtggcatggctttggaaactcc

SEQ ID NO: 423729 - DNA, 25 bp, Homo sapien
cagacggtggcatggctttggaaac

SEQ ID NO: 423730 - DNA, 25 bp, Homo sapien
gaagcagacggtggcatggctttgg

SEQ ID NO: 423731 - DNA, 25 bp, Homo sapien
aaactctgccgttggccgaccagat

SEQ ID NO: 423732 - DNA, 25 bp, Homo sapien
gcaaactctgccgttggccgaccag

SEQ ID NO: 423733 - DNA, 25 bp, Homo sapien
aactctgccgttggccgaccagatg

SEQ ID NO: 423734 - DNA, 25 bp, Homo sapien
ttggcaaactctgccgttggccgac

SEQ ID NO: 423735 - DNA, 25 bp, Homo sapien
ggatccaggtgtgtgatgggctcca

SEQ ID NO: 423736 - DNA, 25 bp, Homo sapien
caggatccaggtgtgtgatgggctc

SEQ ID NO: 423737 - DNA, 25 bp, Homo sapien
aggatccaggtgtgtgatgggctcc

SEQ ID NO: 423738 - DNA, 25 bp, Homo sapien
gatccaggtgtgtgatgggctccat

SEQ ID NO: 423739 - DNA, 25 bp, Homo sapien
ccagatgagtcctgttgcagcctcg

SEQ ID NO: 423740 - DNA, 25 bp, Homo sapien
cagatgagtcctgttgcagcctcga

SEQ ID NO: 423741 - DNA, 25 bp, Homo sapien
agatgagtcctgttgcagcctcgag

SEQ ID NO: 423742 - DNA, 25 bp, Homo sapien
taggggaaatagcttttattgtcac

SEQ ID NO: 423743 - DNA, 25 bp, Homo sapien
gaaatagcttttattgtcactttgg

SEQ ID NO: 423744 - DNA, 25 bp, Homo sapien
gtctgggaattttctgtcaactgaa

SEQ ID NO: 423745 - DNA, 25 bp, Homo sapien
tttctgtcaactgaaattgaggttg

SEQ ID NO: 423746 - DNA, 25 bp, Homo sapien
ccacttttcctctactccgaggaga

SEQ ID NO: 423747 - DNA, 25 bp, Homo sapien
cacttttcctctactccgaggagag

SEQ ID NO: 423748 - DNA, 25 bp, Homo sapien
gctgctttaccccacttttcctcta

SEQ ID NO: 423749 - DNA, 25 bp, Homo sapien
gaggaggagtgctgctttaccccac

SEQ ID NO: 423750 - DNA, 25 bp, Homo sapien
ccacctattctgagatccagaacct

SEQ ID NO: 423751 - DNA, 25 bp, Homo sapien
cagaaccttaacaccggatggtggg

SEQ ID NO: 423752 - DNA, 25 bp, Homo sapien
gaggagacatcccagttccacctat

SEQ ID NO: 423753 - DNA, 25 bp, Homo sapien
tggtgggtgacctctcctgttcagc

SEQ ID NO: 423754 - DNA, 25 bp, Homo sapien
cttgggcccatgaatagcctcttct

SEQ ID NO: 423755 - DNA, 25 bp, Homo sapien
ccatgaatagcctcttctgcaagga

SEQ ID NO: 423756 - DNA, 25 bp, Homo sapien
tcttctgcaaggagcaactggtcac

SEQ ID NO: 423757 - DNA, 25 bp, Homo sapien
ctggtcaccccaagaagcaataaac

SEQ ID NO: 423758 - DNA, 25 bp, Homo sapien
gcacttattggttccactggccagt

SEQ ID NO: 423759 - DNA, 25 bp, Homo sapien
cttggcctcggtaggcattggcctc

SEQ ID NO: 423760 - DNA, 25 bp, Homo sapien
gtgttgtcccattggcacttattgg

SEQ ID NO: 423761 - DNA, 25 bp, Homo sapien
tcctctctactctattatgggtcag

SEQ ID NO: 423762 - DNA, 25 bp, Homo sapien
taactgcaagagctgtaggcagccc

SEQ ID NO: 423763 - DNA, 25 bp, Homo sapien
caatgactgtcaaccaagaattctc

SEQ ID NO: 423764 - DNA, 25 bp, Homo sapien
caagaattctcaaagaccatgaggg

SEQ ID NO: 423765 - DNA, 25 bp, Homo sapien
taaactgcgtgtaagttctctcccc

SEQ ID NO: 423766 - DNA, 25 bp, Homo sapien
tgagagacctttcaaagagtatcaa

SEQ ID NO: 423767 - DNA, 25 bp, Homo sapien
agaatgccatctgctaactcgaaga

SEQ ID NO: 423768 - DNA, 25 bp, Homo sapien
ttttgctacagaagtggacagaatg

SEQ ID NO: 423769 - DNA, 25 bp, Homo sapien
gctacagaagtggacagaatgccat

SEQ ID NO: 423770 - DNA, 25 bp, Homo sapien
tgaggaatgttctgtcatcacatga

SEQ ID NO: 423771 - DNA, 25 bp, Homo sapien
aagtttcaatgaggaatgttctgtc

SEQ ID NO: 423772 - DNA, 25 bp, Homo sapien
ggagaagagaagtagaagtttcaat

SEQ ID NO: 423773 - DNA, 25 bp, Homo sapien
gagaagtagaagtttcaatgaggaa

SEQ ID NO: 423774 - DNA, 25 bp, Homo sapien
tcttggagcaaggacccttgcccct

SEQ ID NO: 423775 - DNA, 25 bp, Homo sapien
ctaggttgcggtctggtccaggact

SEQ ID NO: 423776 - DNA, 25 bp, Homo sapien
atccccaaggatcttggagcaagga

SEQ ID NO: 423777 - DNA, 25 bp, Homo sapien
cccaaggatcttggagcaaggaccc

SEQ ID NO: 423778 - DNA, 25 bp, Homo sapien
ccttcttctcttcaagggtagacat

SEQ ID NO: 423779 - DNA, 25 bp, Homo sapien
gcttcatgtcatggcactggtccat

SEQ ID NO: 423780 - DNA, 25 bp, Homo sapien
cctgtagagaatcttcagcctggga

SEQ ID NO: 423781 - DNA, 25 bp, Homo sapien
ccattttatggaagtgagcctggaa

SEQ ID NO: 423782 - DNA, 25 bp, Homo sapien
gaatctaagcagacaaatgggcctg

SEQ ID NO: 423783 - DNA, 25 bp, Homo sapien
tgcaaacagtacacgtcaacacgga

SEQ ID NO: 423784 - DNA, 25 bp, Homo sapien
gaagacgagagaagcagacatggaa

SEQ ID NO: 423785 - DNA, 25 bp, Homo sapien
ttgtcctctccagcttgagagcagg

SEQ ID NO: 423786 - DNA, 25 bp, Homo sapien
ctttgtgcttcctggagattcctga

SEQ ID NO: 423787 - DNA, 25 bp, Homo sapien
gcagagctttgcgacgggcttcgaa

SEQ ID NO: 423788 - DNA, 25 bp, Homo sapien
gaaaggtgtgcaaacgtgactgaag

SEQ ID NO: 423789 - DNA, 25 bp, Homo sapien
gtgactgaagttttcccctgcccgc

SEQ ID NO: 423790 - DNA, 25 bp, Homo sapien
aaagcaggagagtctttgcactgtc

SEQ ID NO: 423791 - DNA, 25 bp, Homo sapien
gacggcactcatcctaattaacaac

SEQ ID NO: 423792 - DNA, 25 bp, Homo sapien
taattataaatattggaattccgta

SEQ ID NO: 423793 - DNA, 25 bp, Homo sapien
aattgtatttacaaccgctgtccag

SEQ ID NO: 423794 - DNA, 25 bp, Homo sapien
ggtagctttgattgaattgtttgaa

SEQ ID NO: 423795 - DNA, 25 bp, Homo sapien
tacaaccgctgtccagtcatgctgt

SEQ ID NO: 423796 - DNA, 25 bp, Homo sapien
ccccgggagtcgagcagtgattctt

SEQ ID NO: 423797 - DNA, 25 bp, Homo sapien
tccctcccgctgaggtaatgtggcc

SEQ ID NO: 423798 - DNA, 25 bp, Homo sapien
caagcatgcttgtcctaagctcagg

SEQ ID NO: 423799 - DNA, 25 bp, Homo sapien
acgactgtccttctctcgtggagga

SEQ ID NO: 423800 - DNA, 25 bp, Homo sapien
ctaaggtatggaggcaaatgtatga

SEQ ID NO: 423801 - DNA, 25 bp, Homo sapien
ggtatggaggcaaatgtatgaggtc

SEQ ID NO: 423802 - DNA, 25 bp, Homo sapien
gtatggaggcaaatgtatgaggtca

SEQ ID NO: 423803 - DNA, 25 bp, Homo sapien
aaggtatggaggcaaatgtatgagg

SEQ ID NO: 423804 - DNA, 25 bp, Homo sapien
tgtgcagtacactgggatgaaccca

SEQ ID NO: 423805 - DNA, 25 bp, Homo sapien
caccttgaggtctgaaggactcacc

SEQ ID NO: 423806 - DNA, 25 bp, Homo sapien
caacactgcctgacttgagctggac

SEQ ID NO: 423807 - DNA, 25 bp, Homo sapien
tacagacagtgtgccttatccagcc

SEQ ID NO: 423808 - DNA, 25 bp, Homo sapien
ggttcaggaatctcttgccatatag

SEQ ID NO: 423809 - DNA, 25 bp, Homo sapien
taggaaggaattacataatttggca

SEQ ID NO: 423810 - DNA, 25 bp, Homo sapien
gaggcctacccattatagacactaa

SEQ ID NO: 423811 - DNA, 25 bp, Homo sapien
ctggcccataacattcttataggaa

SEQ ID NO: 423812 - DNA, 25 bp, Homo sapien
ggctggccaccgtattctcagttgt

SEQ ID NO: 423813 - DNA, 25 bp, Homo sapien
tctgcacaggtcagcactattctga

SEQ ID NO: 423814 - DNA, 25 bp, Homo sapien
ggtcagcactattctgaccaaggct

SEQ ID NO: 423815 - DNA, 25 bp, Homo sapien
tgtcattttgaccatgctgttttcc

SEQ ID NO: 423816 - DNA, 25 bp, Homo sapien
aggaagaaggctaccccaaactgct

SEQ ID NO: 423817 - DNA, 25 bp, Homo sapien
gattgaagccccaaaaactgtgatt

SEQ ID NO: 423818 - DNA, 25 bp, Homo sapien
cacaaatttgggaaagcatcggcat

SEQ ID NO: 423819 - DNA, 25 bp, Homo sapien
cctttttatgtgtccgcagaggaga

SEQ ID NO: 423820 - DNA, 25 bp, Homo sapien
caaagtctggggatcataactattt

SEQ ID NO: 423821 - DNA, 25 bp, Homo sapien
tcaaagtctggggatcataactatt

SEQ ID NO: 423822 - DNA, 25 bp, Homo sapien
ttaactgggtgacacacaattgagg

SEQ ID NO: 423823 - DNA, 25 bp, Homo sapien
taactgggtgacacacaattgaggt

SEQ ID NO: 423824 - DNA, 25 bp, Homo sapien
aactgggtgacacacaattgaggtg

SEQ ID NO: 423825 - DNA, 25 bp, Homo sapien
actgggtgacacacaattgaggtgg

SEQ ID NO: 423826 - DNA, 25 bp, Homo sapien
tcttggcgtgttcgtaggccctggc

SEQ ID NO: 423827 - DNA, 25 bp, Homo sapien
caactgctccgatgacgtgtctgat

SEQ ID NO: 423828 - DNA, 25 bp, Homo sapien
tgtctgatatgaagcactccgtgat

SEQ ID NO: 423829 - DNA, 25 bp, Homo sapien
tgaacctgcagattcccgattcgga

SEQ ID NO: 423830 - DNA, 25 bp, Homo sapien
gcatagcggtttctcgctgtgggcc

SEQ ID NO: 423831 - DNA, 25 bp, Homo sapien
gggctgacgctgtaactgtcgctct

SEQ ID NO: 423832 - DNA, 25 bp, Homo sapien
tctctttgtctactgatcctgcagc

SEQ ID NO: 423833 - DNA, 25 bp, Homo sapien
ttgagggtccactggctggcatagc

SEQ ID NO: 423834 - DNA, 25 bp, Homo sapien
ctgtgaagagccaagaatcatgtct

SEQ ID NO: 423835 - DNA, 25 bp, Homo sapien
gagccaagaatcatgtctgcctttg

SEQ ID NO: 423836 - DNA, 25 bp, Homo sapien
tgaagagccaagaatcatgtctgcc

SEQ ID NO: 423837 - DNA, 25 bp, Homo sapien
agaatcatgtctgcctttgtctgca

SEQ ID NO: 423838 - DNA, 25 bp, Homo sapien
ctgtcaggtaccagaatgggctaca

SEQ ID NO: 423839 - DNA, 25 bp, Homo sapien
taccagaatgggctacaacatcgcc

SEQ ID NO: 423840 - DNA, 25 bp, Homo sapien
atgggctacaacatcgcctcttctg

SEQ ID NO: 423841 - DNA, 25 bp, Homo sapien
gactgtcaggtaccagaatgggcta

SEQ ID NO: 423842 - DNA, 25 bp, Homo sapien
cctagggtcaaaattgcctcagtat

SEQ ID NO: 423843 - DNA, 25 bp, Homo sapien
ttgcctcagtatgtagaatactggg

SEQ ID NO: 423844 - DNA, 25 bp, Homo sapien
tactggtggcctgataatgttgaaa

SEQ ID NO: 423845 - DNA, 25 bp, Homo sapien
tctgtactgcgctaggcaggcatcc

SEQ ID NO: 423846 - DNA, 25 bp, Homo sapien
catcctcatcatgcggggaaccttg

SEQ ID NO: 423847 - DNA, 25 bp, Homo sapien
ttgtttcatgtcttcccctcactgg

SEQ ID NO: 423848 - DNA, 25 bp, Homo sapien
tcctgaatgacttggacccaagaga

SEQ ID NO: 423849 - DNA, 25 bp, Homo sapien
tttcactgtgctccagtgccacttc

SEQ ID NO: 423850 - DNA, 25 bp, Homo sapien
gcttcattctctttctgtctaggac

SEQ ID NO: 423851 - DNA, 25 bp, Homo sapien
ggcttcattctctttctgtctagga

SEQ ID NO: 423852 - DNA, 25 bp, Homo sapien
cttcattctctttctgtctaggact

SEQ ID NO: 423853 - DNA, 25 bp, Homo sapien
tcattctctttctgtctaggactta

SEQ ID NO: 423854 - DNA, 25 bp, Homo sapien
ccacacattttaagcattgttgacc

SEQ ID NO: 423855 - DNA, 25 bp, Homo sapien
ttaacacccacacattttaagcatt

SEQ ID NO: 423856 - DNA, 25 bp, Homo sapien
attttaagcattgttgaccactcac

SEQ ID NO: 423857 - DNA, 25 bp, Homo sapien
taacacccacacattttaagcattg

SEQ ID NO: 423858 - DNA, 25 bp, Homo sapien
gtcaacagaaccgtggagcgatcat

SEQ ID NO: 423859 - DNA, 25 bp, Homo sapien
tccaaagtcagcatccgtcaacaga

SEQ ID NO: 423860 - DNA, 25 bp, Homo sapien
taatggaccgtgtgagtgaccgtca

SEQ ID NO: 423861 - DNA, 25 bp, Homo sapien
tgagacaccgattggtaatggaccg

SEQ ID NO: 423862 - DNA, 25 bp, Homo sapien
taacgtatctgaagtccgggtattc

SEQ ID NO: 423863 - DNA, 25 bp, Homo sapien
tcgatgtgcattcgcagggtctgct

SEQ ID NO: 423864 - DNA, 25 bp, Homo sapien
gctgttgcttgcttaacgtatctga

SEQ ID NO: 423865 - DNA, 25 bp, Homo sapien
tgagccctgggtatgtcgatgtgca

SEQ ID NO: 423866 - DNA, 25 bp, Homo sapien
cctgtggacgtgtgaaaggaaagct

SEQ ID NO: 423867 - DNA, 25 bp, Homo sapien
tcttccacagttgtgaacattctcg

SEQ ID NO: 423868 - DNA, 25 bp, Homo sapien
tcatcccctccacggttatgaatgg

SEQ ID NO: 423869 - DNA, 25 bp, Homo sapien
tttgccaatcacaagcctgtggacg

SEQ ID NO: 423870 - DNA, 25 bp, Homo sapien
gtccaagctgtcatccggctccgct

SEQ ID NO: 423871 - DNA, 25 bp, Homo sapien
tccaagctgtcatccggctccgctg

SEQ ID NO: 423872 - DNA, 25 bp, Homo sapien
ccaagctgtcatccggctccgctgc

SEQ ID NO: 423873 - DNA, 25 bp, Homo sapien
gggcacagtcctgtccctgatccat

SEQ ID NO: 423874 - DNA, 25 bp, Homo sapien
tttctcttggcccttttgggcacag

SEQ ID NO: 423875 - DNA, 25 bp, Homo sapien
tggcccttttgggcacagtcctgtc

SEQ ID NO: 423876 - DNA, 25 bp, Homo sapien
ctgttttcgggttgtctttctcttg

SEQ ID NO: 423877 - DNA, 25 bp, Homo sapien
aatcaaaactatttccggagaatga

SEQ ID NO: 423878 - DNA, 25 bp, Homo sapien
aaatcaaaactatttccggagaatg

SEQ ID NO: 423879 - DNA, 25 bp, Homo sapien
ctgtctttaccaaaaccaactgcaa

SEQ ID NO: 423880 - DNA, 25 bp, Homo sapien
gaaagccacaattggtggctttgct

SEQ ID NO: 423881 - DNA, 25 bp, Homo sapien
agaaagccacaattggtggctttgc

SEQ ID NO: 423882 - DNA, 25 bp, Homo sapien
aggggacacgcgtaggtggacagct

SEQ ID NO: 423883 - DNA, 25 bp, Homo sapien
gcagcaggggacacgcgtaggtgga

SEQ ID NO: 423884 - DNA, 25 bp, Homo sapien
ctcccttttgaggtttgttctccag

SEQ ID NO: 423885 - DNA, 25 bp, Homo sapien
tcactcccttttgaggtttgttctc

SEQ ID NO: 423886 - DNA, 25 bp, Homo sapien
ccaccaggatacaggagatggtcac

SEQ ID NO: 423887 - DNA, 25 bp, Homo sapien
ccaggatacaggagatggtcaccag

SEQ ID NO: 423888 - DNA, 25 bp, Homo sapien
aggatacaggagatggtcaccagca

SEQ ID NO: 423889 - DNA, 25 bp, Homo sapien
caaccagcaggagcacaaacagcag

SEQ ID NO: 423890 - DNA, 25 bp, Homo sapien
cttgagcccctcgttggtcgtcagc

SEQ ID NO: 423891 - DNA, 25 bp, Homo sapien
gacttaatgagtggaggaattgtac

SEQ ID NO: 423892 - DNA, 25 bp, Homo sapien
gtcagcccttcttcgttttggacaa

SEQ ID NO: 423893 - DNA, 25 bp, Homo sapien
tttggacaactgacttaatgagtgg

SEQ ID NO: 423894 - DNA, 25 bp, Homo sapien
agggcccacgtgcacatcccccaag

SEQ ID NO: 423895 - DNA, 25 bp, Homo sapien
caaagatgatgttcgatgggaaagg

SEQ ID NO: 423896 - DNA, 25 bp, Homo sapien
ggcaaagatgatgttcgatgggaaa

SEQ ID NO: 423897 - DNA, 25 bp, Homo sapien
atggcaaagatgatgttcgatggga

SEQ ID NO: 423898 - DNA, 25 bp, Homo sapien
gccatcgtagttcagcgtagcgaag

SEQ ID NO: 423899 - DNA, 25 bp, Homo sapien
cgtagttcagcgtagcgaagttggc

SEQ ID NO: 423900 - DNA, 25 bp, Homo sapien
catcgtagttcagcgtagcgaagtt

SEQ ID NO: 423901 - DNA, 25 bp, Homo sapien
tgccatcgtagttcagcgtagcgaa

SEQ ID NO: 423902 - DNA, 25 bp, Homo sapien
tgaggttcagcctcacgcgtgtggt

SEQ ID NO: 423903 - DNA, 25 bp, Homo sapien
gctgtggtccaaactgtggtcccaa

SEQ ID NO: 423904 - DNA, 25 bp, Homo sapien
catacaggatgtaggacttggagag

SEQ ID NO: 423905 - DNA, 25 bp, Homo sapien
gctcataccaggtggcttcctgcag

SEQ ID NO: 423906 - DNA, 25 bp, Homo sapien
ccttgattttcaaactgacattctt

SEQ ID NO: 423907 - DNA, 25 bp, Homo sapien
cgcccttgattttcaaactgacatt

SEQ ID NO: 423908 - DNA, 25 bp, Homo sapien
ttgattttcaaactgacattcttct

SEQ ID NO: 423909 - DNA, 25 bp, Homo sapien
caacgcccttgattttcaaactgac

SEQ ID NO: 423910 - DNA, 25 bp, Homo sapien
tgaaacaataaaagagaggaccaga

SEQ ID NO: 423911 - DNA, 25 bp, Homo sapien
tgctgaagccatgtgaggaatgaca

SEQ ID NO: 423912 - DNA, 25 bp, Homo sapien
gaggaccagaacactctggaaggtc

SEQ ID NO: 423913 - DNA, 25 bp, Homo sapien
agctgtccctctcattatgccgtgg

SEQ ID NO: 423914 - DNA, 25 bp, Homo sapien
cagtgtgaacttataccaagtccca

SEQ ID NO: 423915 - DNA, 25 bp, Homo sapien
tgagattttccaagcgataggaacg

SEQ ID NO: 423916 - DNA, 25 bp, Homo sapien
ccactgctcactattgtcctcggag

SEQ ID NO: 423917 - DNA, 25 bp, Homo sapien
tatgatttcacttatgcgccctggg

SEQ ID NO: 423918 - DNA, 25 bp, Homo sapien
gtcttggagactgtaagccgaggct

SEQ ID NO: 423919 - DNA, 25 bp, Homo sapien
tggagactgtaagccgaggctgatc

SEQ ID NO: 423920 - DNA, 25 bp, Homo sapien
actgtaagccgaggctgatctggtg

SEQ ID NO: 423921 - DNA, 25 bp, Homo sapien
cgtggtcttggagactgtaagccga

SEQ ID NO: 423922 - DNA, 25 bp, Homo sapien
gatccccagttgttattggcaatgc

SEQ ID NO: 423923 - DNA, 25 bp, Homo sapien
ttccgttgctaaagatgctcctccg

SEQ ID NO: 423924 - DNA, 25 bp, Homo sapien
caatgcagctgtaatagccggagtc

SEQ ID NO: 423925 - DNA, 25 bp, Homo sapien
ttcaccgtgcgaataatgaagcttc

SEQ ID NO: 423926 - DNA, 25 bp, Homo sapien
agccttacaaggcaagacaatgtct

SEQ ID NO: 423927 - DNA, 25 bp, Homo sapien
gccttacaaggcaagacaatgtctt

SEQ ID NO: 423928 - DNA, 25 bp, Homo sapien
cagccttgaactgattcagagccca

SEQ ID NO: 423929 - DNA, 25 bp, Homo sapien
ttgagggtttgcattggcaaaggaa

SEQ ID NO: 423930 - DNA, 25 bp, Homo sapien
atgggacaaatgtgagacccctgca

SEQ ID NO: 423931 - DNA, 25 bp, Homo sapien
atgaggagaaggctcccccagggaa

SEQ ID NO: 423932 - DNA, 25 bp, Homo sapien
gctctctgtgccttcgtgtcctgga

SEQ ID NO: 423933 - DNA, 25 bp, Homo sapien
gggtcccgtttgttctcagccatgg

SEQ ID NO: 423934 - DNA, 25 bp, Homo sapien
gaattttggaccctgctacctgtcg

SEQ ID NO: 423935 - DNA, 25 bp, Homo sapien
tgtcgctagactgctgctggtctgc

SEQ ID NO: 423936 - DNA, 25 bp, Homo sapien
ctgttgcctcttccggctgaagtaa

SEQ ID NO: 423937 - DNA, 25 bp, Homo sapien
cacccagacgctgtactgacgattc

SEQ ID NO: 423938 - DNA, 25 bp, Homo sapien
tttgctagtggctcgactgtgatga

SEQ ID NO: 423939 - DNA, 25 bp, Homo sapien
tgacgattcctactcaggttgggaa

SEQ ID NO: 423940 - DNA, 25 bp, Homo sapien
gccagggctagctatgtgttccaag

SEQ ID NO: 423941 - DNA, 25 bp, Homo sapien
agtccgcgctcctgcactgtgctgt

SEQ ID NO: 423942 - DNA, 25 bp, Homo sapien
cacacagaagggtgacattgtctag

SEQ ID NO: 423943 - DNA, 25 bp, Homo sapien
tatgtttgagtgacacccagtccgc

SEQ ID NO: 423944 - DNA, 25 bp, Homo sapien
aagatcctgggcaggtcaaatccca

SEQ ID NO: 423945 - DNA, 25 bp, Homo sapien
gagcaaccgtgaatcccatagcaaa

SEQ ID NO: 423946 - DNA, 25 bp, Homo sapien
cctgttagagtcaaaagagcaaccg

SEQ ID NO: 423947 - DNA, 25 bp, Homo sapien
caggaggacagagccaaatacagcc

SEQ ID NO: 423948 - DNA, 25 bp, Homo sapien
ggacacaaagaccatggaggctgag

SEQ ID NO: 423949 - DNA, 25 bp, Homo sapien
cggatgatgccgttcagcttgagag

SEQ ID NO: 423950 - DNA, 25 bp, Homo sapien
agccaggacacaaagaccatggagg

SEQ ID NO: 423951 - DNA, 25 bp, Homo sapien
ggtgggagcagaatacagtgtactt

SEQ ID NO: 423952 - DNA, 25 bp, Homo sapien
gcagggttttcgatagtcaatccca

SEQ ID NO: 423953 - DNA, 25 bp, Homo sapien
caaggcagggttttcgatagtcaat

SEQ ID NO: 423954 - DNA, 25 bp, Homo sapien
ggttttcgatagtcaatcccagctc

SEQ ID NO: 423955 - DNA, 25 bp, Homo sapien
gatagtcaatcccagctccatacac

SEQ ID NO: 423956 - DNA, 25 bp, Homo sapien
gaagatctgctcactcctgaccccg

SEQ ID NO: 423957 - DNA, 25 bp, Homo sapien
gaccccgtctcctgcgcgggtgaag

SEQ ID NO: 423958 - DNA, 25 bp, Homo sapien
atcctctttggtccgggtgaagatc

SEQ ID NO: 423959 - DNA, 25 bp, Homo sapien
catcctctttggtccgggtgaagat

SEQ ID NO: 423960 - DNA, 25 bp, Homo sapien
gctaagtacttccttggtgtttggc

SEQ ID NO: 423961 - DNA, 25 bp, Homo sapien
cagagcatgagaagggcctgagaac

SEQ ID NO: 423962 - DNA, 25 bp, Homo sapien
gttgtgctaagtacttccttggtgt

SEQ ID NO: 423963 - DNA, 25 bp, Homo sapien
gttttgaaatgagtcgccttcagag

SEQ ID NO: 423964 - DNA, 25 bp, Homo sapien
ccttctaggagttgcaagaagaggg

SEQ ID NO: 423965 - DNA, 25 bp, Homo sapien
gcgaggatggcccaaagacaggcct

SEQ ID NO: 423966 - DNA, 25 bp, Homo sapien
ggagcagggcgaggatggcccaaag

SEQ ID NO: 423967 - DNA, 25 bp, Homo sapien
gccttctaggagttgcaagaagagg

SEQ ID NO: 423968 - DNA, 25 bp, Homo sapien
tcagtgtcgagtgggtgtttggcaa

SEQ ID NO: 423969 - DNA, 25 bp, Homo sapien
catgtggcaacaaaggcatgaggtc

SEQ ID NO: 423970 - DNA, 25 bp, Homo sapien
tcccatggctggtagtgctccaggt

SEQ ID NO: 423971 - DNA, 25 bp, Homo sapien
ggtccttctagattgcctcccatgg

SEQ ID NO: 423972 - DNA, 25 bp, Homo sapien
gcttccttggaaagtgtggaccagg

SEQ ID NO: 423973 - DNA, 25 bp, Homo sapien
ttgctatggcttggacattttcggg

SEQ ID NO: 423974 - DNA, 25 bp, Homo sapien
gagaattccattcaaggcttccttg

SEQ ID NO: 423975 - DNA, 25 bp, Homo sapien
taaatgactctgaacccctggagaa

SEQ ID NO: 423976 - DNA, 25 bp, Homo sapien
tatttggtagccacggataatccca

SEQ ID NO: 423977 - DNA, 25 bp, Homo sapien
caccaggccgtactgagtgaactta

SEQ ID NO: 423978 - DNA, 25 bp, Homo sapien
tttcctgagaagaaggccccgtgcc

SEQ ID NO: 423979 - DNA, 25 bp, Homo sapien
tccccgctggtgtcgacactgataa

SEQ ID NO: 423980 - DNA, 25 bp, Homo sapien
cggtggtccggtagcagccgcaaac

SEQ ID NO: 423981 - DNA, 25 bp, Homo sapien
aagtggagtcatcgccacgatgctg

SEQ ID NO: 423982 - DNA, 25 bp, Homo sapien
cagtgcaacttggtctgtgccaggc

SEQ ID NO: 423983 - DNA, 25 bp, Homo sapien
agccgcaaacccacgtacagtgcaa

SEQ ID NO: 423984 - DNA, 25 bp, Homo sapien
gtgaatgcatccggccctcccagcc

SEQ ID NO: 423985 - DNA, 25 bp, Homo sapien
ctgtgaatgcatccggccctcccag

SEQ ID NO: 423986 - DNA, 25 bp, Homo sapien
tgtgaatgcatccggccctcccagc

SEQ ID NO: 423987 - DNA, 25 bp, Homo sapien
agtatgcatggcaggagcggaatct

SEQ ID NO: 423988 - DNA, 25 bp, Homo sapien
ggaatctgaacatgggtgttgggcc

SEQ ID NO: 423989 - DNA, 25 bp, Homo sapien
gagcctgcgctctcattctgtcctt

SEQ ID NO: 423990 - DNA, 25 bp, Homo sapien
cattctgtccttcatgatgtactgg

SEQ ID NO: 423991 - DNA, 25 bp, Homo sapien
actaccatctttaccaccatcatca

SEQ ID NO: 423992 - DNA, 25 bp, Homo sapien
tatcacaaacttcaccaacaaacca

SEQ ID NO: 423993 - DNA, 25 bp, Homo sapien
atcatcatccttgatgttaccacca

SEQ ID NO: 423994 - DNA, 25 bp, Homo sapien
tccactacttccatcatcatccttg

SEQ ID NO: 423995 - DNA, 25 bp, Homo sapien
catatttatcacaaacttcaccaac

SEQ ID NO: 423996 - DNA, 25 bp, Homo sapien
tctacacaaggcatggcacaaccag

SEQ ID NO: 423997 - DNA, 25 bp, Homo sapien
gacacctttgagtgaatcagtgctc

SEQ ID NO: 423998 - DNA, 25 bp, Homo sapien
taactgggcatctgttctacacaag

SEQ ID NO: 423999 - DNA, 25 bp, Homo sapien
tacttgcagtgctgaaggtttgccc

SEQ ID NO: 424000 - DNA, 25 bp, Homo sapien
gggtgaggtatccatggtgatcaca

SEQ ID NO: 424001 - DNA, 25 bp, Homo sapien
aagcaattggcatacacagctgcac

SEQ ID NO: 424002 - DNA, 25 bp, Homo sapien
gagggtacaatgctgtcgccaaagc

SEQ ID NO: 424003 - DNA, 25 bp, Homo sapien
ctgagctaaagggtgactggacatt

SEQ ID NO: 424004 - DNA, 25 bp, Homo sapien
cctggatgtcttgatgagaaaaggc

SEQ ID NO: 424005 - DNA, 25 bp, Homo sapien
agaatcttccttggaacgaaacagg

SEQ ID NO: 424006 - DNA, 25 bp, Homo sapien
cccaacaaaccactgggtctgcatg

SEQ ID NO: 424007 - DNA, 25 bp, Homo sapien
acaaaccactgggtctgcatgctct

SEQ ID NO: 424008 - DNA, 25 bp, Homo sapien
gggagcaacacaggcactccctgaa

SEQ ID NO: 424009 - DNA, 25 bp, Homo sapien
atcacactctccttcagtgggaagt

SEQ ID NO: 424010 - DNA, 25 bp, Homo sapien
tactccacaagtccagatgcaacac

SEQ ID NO: 424011 - DNA, 25 bp, Homo sapien
gatgcaacacgtgccacagattcca

SEQ ID NO: 424012 - DNA, 25 bp, Homo sapien
gagtgggcccacatccgttatcctc

SEQ ID NO: 424013 - DNA, 25 bp, Homo sapien
ggattccagagtgggcccacatccg

SEQ ID NO: 424014 - DNA, 25 bp, Homo sapien
tatcctctatggctatcaagtcagc

SEQ ID NO: 424015 - DNA, 25 bp, Homo sapien
ggcccacatccgttatcctctatgg

SEQ ID NO: 424016 - DNA, 25 bp, Homo sapien
tgagccatcgccaagagcaatgggt

SEQ ID NO: 424017 - DNA, 25 bp, Homo sapien
caggagagacgatgacacttgtgga

SEQ ID NO: 424018 - DNA, 25 bp, Homo sapien
caaactgcctgaacactgacaggag

SEQ ID NO: 424019 - DNA, 25 bp, Homo sapien
ggtgaaactctaattgcactctggg

SEQ ID NO: 424020 - DNA, 25 bp, Homo sapien
catgtgaccctgatgctctgagatg

SEQ ID NO: 424021 - DNA, 25 bp, Homo sapien
agatgatataggctccaggtgaact

SEQ ID NO: 424022 - DNA, 25 bp, Homo sapien
ttccatgtgaccctgatgctctgag

SEQ ID NO: 424023 - DNA, 25 bp, Homo sapien
tgagatgatataggctccaggtgaa

SEQ ID NO: 424024 - DNA, 25 bp, Homo sapien
tgggtagagccgagccttttccctg

SEQ ID NO: 424025 - DNA, 25 bp, Homo sapien
cacgggacccctgggtagagccgag

SEQ ID NO: 424026 - DNA, 25 bp, Homo sapien
cacacgggacccctgggtagagccg

SEQ ID NO: 424027 - DNA, 25 bp, Homo sapien
ctgggtagagccgagccttttccct

SEQ ID NO: 424028 - DNA, 25 bp, Homo sapien
tgtatttattgttctgcctgttccc

SEQ ID NO: 424029 - DNA, 25 bp, Homo sapien
caatgctgccatgatttgtcagtaa

SEQ ID NO: 424030 - DNA, 25 bp, Homo sapien
gcctgttccctgaagtgaaagcatt

SEQ ID NO: 424031 - DNA, 25 bp, Homo sapien
agtgaaagcatttggatccctcctc

SEQ ID NO: 424032 - DNA, 25 bp, Homo sapien
tggtatatcatcatggacagcaggg

SEQ ID NO: 424033 - DNA, 25 bp, Homo sapien
gacagcagggtccatgaagacatga

SEQ ID NO: 424034 - DNA, 25 bp, Homo sapien
gacagaattgtaagcacatatgccc

SEQ ID NO: 424035 - DNA, 25 bp, Homo sapien
acacctcaaaggctactgtcagcaa

SEQ ID NO: 424036 - DNA, 25 bp, Homo sapien
gaaacagggacttgagactaagctg

SEQ ID NO: 424037 - DNA, 25 bp, Homo sapien
tcttccctgcagtagggagtggctg

SEQ ID NO: 424038 - DNA, 25 bp, Homo sapien
ccatctgggtgtggcaatcacctta

SEQ ID NO: 424039 - DNA, 25 bp, Homo sapien
caaacctccggtcttctgttagcca

SEQ ID NO: 424040 - DNA, 25 bp, Homo sapien
tcgtccgccgtgatggtgagctcgt

SEQ ID NO: 424041 - DNA, 25 bp, Homo sapien
tggatatcaatgatggtggccgagt

SEQ ID NO: 424042 - DNA, 25 bp, Homo sapien
tgggctcgctcttgccaatccggtt

SEQ ID NO: 424043 - DNA, 25 bp, Homo sapien
caatccggttcttggcgtacatgcg

SEQ ID NO: 424044 - DNA, 25 bp, Homo sapien
aaaaagaagagatagagacgtgagt

SEQ ID NO: 424045 - DNA, 25 bp, Homo sapien
agatagagacgtgagtttttttcct

SEQ ID NO: 424046 - DNA, 25 bp, Homo sapien
aaaagaagagatagagacgtgagtt

SEQ ID NO: 424047 - DNA, 25 bp, Homo sapien
gtcacacttgccacttttcagatct

SEQ ID NO: 424048 - DNA, 25 bp, Homo sapien
tcacacttgccacttttcagatctt

SEQ ID NO: 424049 - DNA, 25 bp, Homo sapien
tatttgtcagtaatcatagagatac

SEQ ID NO: 424050 - DNA, 25 bp, Homo sapien
atacatatatagtgacccataatgc

SEQ ID NO: 424051 - DNA, 25 bp, Homo sapien
catatatagtgacccataatgccac

SEQ ID NO: 424052 - DNA, 25 bp, Homo sapien
tgtcagtaatcatagagatacatat

SEQ ID NO: 424053 - DNA, 25 bp, Homo sapien
gccagtcctttgaggtggatgcagc

SEQ ID NO: 424054 - DNA, 25 bp, Homo sapien
gcagctggtggcctttgtggtctcc

SEQ ID NO: 424055 - DNA, 25 bp, Homo sapien
ccagtgcgcagccagtgagataaag

SEQ ID NO: 424056 - DNA, 25 bp, Homo sapien
ttcacaggtgagatgcgcaagcgag

SEQ ID NO: 424057 - DNA, 25 bp, Homo sapien
cagcagccagtgtcgccgatggtcc

SEQ ID NO: 424058 - DNA, 25 bp, Homo sapien
gtgtcgccgatggtccctgagcatt

SEQ ID NO: 424059 - DNA, 25 bp, Homo sapien
cagtgtcgccgatggtccctgagca

SEQ ID NO: 424060 - DNA, 25 bp, Homo sapien
ggctctgggccgagtggtcctgggt

SEQ ID NO: 424061 - DNA, 25 bp, Homo sapien
tgatctcaatttcgggagggtctgg

SEQ ID NO: 424062 - DNA, 25 bp, Homo sapien
tatcgtagcctgtgatgggactgtt

SEQ ID NO: 424063 - DNA, 25 bp, Homo sapien
cgtaattgtgcgtgctttgacatct

SEQ ID NO: 424064 - DNA, 25 bp, Homo sapien
aaccccatggtccacctgagcgtaa

SEQ ID NO: 424065 - DNA, 25 bp, Homo sapien
gttagttcaaacagagctctgacat

SEQ ID NO: 424066 - DNA, 25 bp, Homo sapien
gagttagttcaaacagagctctgac

SEQ ID NO: 424067 - DNA, 25 bp, Homo sapien
cgagttagttcaaacagagctctga

SEQ ID NO: 424068 - DNA, 25 bp, Homo sapien
ctacgagttagttcaaacagagctc

SEQ ID NO: 424069 - DNA, 25 bp, Homo sapien
tgagcgtgactcacaaacgatttgt

SEQ ID NO: 424070 - DNA, 25 bp, Homo sapien
aagaattaatagcatggcaggaaaa

SEQ ID NO: 424071 - DNA, 25 bp, Homo sapien
cactgtgagctgaattattccacgg

SEQ ID NO: 424072 - DNA, 25 bp, Homo sapien
gaattaatagcatggcaggaaaaga

SEQ ID NO: 424073 - DNA, 25 bp, Homo sapien
tattccacggtcctccccataagaa

SEQ ID NO: 424074 - DNA, 25 bp, Homo sapien
tggacacaagataacgggccatctc

SEQ ID NO: 424075 - DNA, 25 bp, Homo sapien
catctcagggttaatgattcggtcc

SEQ ID NO: 424076 - DNA, 25 bp, Homo sapien
ttctcccagcggactataatgggct

SEQ ID NO: 424077 - DNA, 25 bp, Homo sapien
taatgggcttctcaccatgcgccgt

SEQ ID NO: 424078 - DNA, 25 bp, Homo sapien
tggcttcttctaagactggcacata

SEQ ID NO: 424079 - DNA, 25 bp, Homo sapien
tcttctaagactggcacatactggg

SEQ ID NO: 424080 - DNA, 25 bp, Homo sapien
gtaagacttccaaggtacttgacca

SEQ ID NO: 424081 - DNA, 25 bp, Homo sapien
ttgattgcttgcctcgtaagacttc

SEQ ID NO: 424082 - DNA, 25 bp, Homo sapien
tctctatcttcaaaacggctaaaat

SEQ ID NO: 424083 - DNA, 25 bp, Homo sapien
ctctatcttcaaaacggctaaaatc

SEQ ID NO: 424084 - DNA, 25 bp, Homo sapien
gggtccacacgatctttgttgggac

SEQ ID NO: 424085 - DNA, 25 bp, Homo sapien
ggagagaacacaaaggtaacaatac

SEQ ID NO: 424086 - DNA, 25 bp, Homo sapien
acgatctttgttgggaccatggaga

SEQ ID NO: 424087 - DNA, 25 bp, Homo sapien
cacacgatctttgttgggaccatgg

SEQ ID NO: 424088 - DNA, 25 bp, Homo sapien
catggttgactctggcccattctga

SEQ ID NO: 424089 - DNA, 25 bp, Homo sapien
aagccacattcctgagaattcagca

SEQ ID NO: 424090 - DNA, 25 bp, Homo sapien
agaattcagcactaaagcatttgga

SEQ ID NO: 424091 - DNA, 25 bp, Homo sapien
catttggaaggcttcgagcttttcc

SEQ ID NO: 424092 - DNA, 25 bp, Homo sapien
ccggatacttaaagatgaatcgggc

SEQ ID NO: 424093 - DNA, 25 bp, Homo sapien
cggatacttaaagatgaatcgggcc

SEQ ID NO: 424094 - DNA, 25 bp, Homo sapien
tccagccttcacgtttttgttcagg

SEQ ID NO: 424095 - DNA, 25 bp, Homo sapien
ttttactacatagctccaatgcccc

SEQ ID NO: 424096 - DNA, 25 bp, Homo sapien
ttttgttcaggctgttcccaatgtc

SEQ ID NO: 424097 - DNA, 25 bp, Homo sapien
cccctcctttgtgcagtatccattg

SEQ ID NO: 424098 - DNA, 25 bp, Homo sapien
tcctagagagctgagcgaggcactg

SEQ ID NO: 424099 - DNA, 25 bp, Homo sapien
gactgccaagggcttgacttcctag

SEQ ID NO: 424100 - DNA, 25 bp, Homo sapien
acttcctagagagctgagcgaggca

SEQ ID NO: 424101 - DNA, 25 bp, Homo sapien
tcatttccgccgactgccaagggct

SEQ ID NO: 424102 - DNA, 25 bp, Homo sapien
tggaggcctttttgcagacttctgg

SEQ ID NO: 424103 - DNA, 25 bp, Homo sapien
ctatcacctgatatcctgaaaaggg

SEQ ID NO: 424104 - DNA, 25 bp, Homo sapien
tgggcactgataacaccacagagca

SEQ ID NO: 424105 - DNA, 25 bp, Homo sapien
gcttatcagaccagttctgggcact

SEQ ID NO: 424106 - DNA, 25 bp, Homo sapien
tccatggacactacagaaactatct

SEQ ID NO: 424107 - DNA, 25 bp, Homo sapien
ggtgaagtgtgagcacaggacgatg

SEQ ID NO: 424108 - DNA, 25 bp, Homo sapien
catggacactacagaaactatctgg

SEQ ID NO: 424109 - DNA, 25 bp, Homo sapien
ctgggcttaggatggttggtccaca

SEQ ID NO: 424110 - DNA, 25 bp, Homo sapien
cctggcttcaatacatggccaaggt

SEQ ID NO: 424111 - DNA, 25 bp, Homo sapien
tcctggcttcaatacatggccaagg

SEQ ID NO: 424112 - DNA, 25 bp, Homo sapien
gcttcaatacatggccaaggtagca

SEQ ID NO: 424113 - DNA, 25 bp, Homo sapien
tggcttcaatacatggccaaggtag

SEQ ID NO: 424114 - DNA, 25 bp, Homo sapien
aaaagcatgtcttccaaaacttctt

SEQ ID NO: 424115 - DNA, 25 bp, Homo sapien
cagcattcagcagtaccatatacaa

SEQ ID NO: 424116 - DNA, 25 bp, Homo sapien
ccatatacaaaaaggagaagcgatg

SEQ ID NO: 424117 - DNA, 25 bp, Homo sapien
ggagaagcgatgaaaacctaaaagc

SEQ ID NO: 424118 - DNA, 25 bp, Homo sapien
actggttgagaacctactacttcca

SEQ ID NO: 424119 - DNA, 25 bp, Homo sapien
tggttgagaacctactacttccaag

SEQ ID NO: 424120 - DNA, 25 bp, Homo sapien
gttgagaacctactacttccaaggc

SEQ ID NO: 424121 - DNA, 25 bp, Homo sapien
cactggttgagaacctactacttcc

SEQ ID NO: 424122 - DNA, 25 bp, Homo sapien
gggaaggggcacataagtggcatag

SEQ ID NO: 424123 - DNA, 25 bp, Homo sapien
taagtggcatagcttctgtagcccc

SEQ ID NO: 424124 - DNA, 25 bp, Homo sapien
cataagtggcatagcttctgtagcc

SEQ ID NO: 424125 - DNA, 25 bp, Homo sapien
atagcttctgtagcccccgatcggc

SEQ ID NO: 424126 - DNA, 25 bp, Homo sapien
gatttgcatgcagtaaccttccatc

SEQ ID NO: 424127 - DNA, 25 bp, Homo sapien
gctttccatgacaattccatacatg

SEQ ID NO: 424128 - DNA, 25 bp, Homo sapien
tccttatgcttgattcaataacaac

SEQ ID NO: 424129 - DNA, 25 bp, Homo sapien
ggaaccccaacagagctggaaagat

SEQ ID NO: 424130 - DNA, 25 bp, Homo sapien
tacatggacttgctgacgtctgcgc

SEQ ID NO: 424131 - DNA, 25 bp, Homo sapien
catcgttgctgaccttgcagaggta

SEQ ID NO: 424132 - DNA, 25 bp, Homo sapien
caacgacccattgctgagaacttgg

SEQ ID NO: 424133 - DNA, 25 bp, Homo sapien
gagaacttggattcggccatttagg

SEQ ID NO: 424134 - DNA, 25 bp, Homo sapien
cagggatgtcccctggacattggga

SEQ ID NO: 424135 - DNA, 25 bp, Homo sapien
gcttgagggacttaggcttgtcctt

SEQ ID NO: 424136 - DNA, 25 bp, Homo sapien
gcagaaaatctgctctagaattaac

SEQ ID NO: 424137 - DNA, 25 bp, Homo sapien
ctgaaactggtgttggcagaaaatc

SEQ ID NO: 424138 - DNA, 25 bp, Homo sapien
tacagggtaaccctcagcagaacaa

SEQ ID NO: 424139 - DNA, 25 bp, Homo sapien
tgctttgccataaatcccgtcctgg

SEQ ID NO: 424140 - DNA, 25 bp, Homo sapien
gaacaattgaggatgactgctttgc

SEQ ID NO: 424141 - DNA, 25 bp, Homo sapien
tagagaatttccacacgatggtagg

SEQ ID NO: 424142 - DNA, 25 bp, Homo sapien
aattctggtgagaacacatagtccg

SEQ ID NO: 424143 - DNA, 25 bp, Homo sapien
acatagtccgttatgccagatgtca

SEQ ID NO: 424144 - DNA, 25 bp, Homo sapien
tcgagaatacaatgtgggactgaac

SEQ ID NO: 424145 - DNA, 25 bp, Homo sapien
tagttgcagtgaagtaccataaagg

SEQ ID NO: 424146 - DNA, 25 bp, Homo sapien
cttctatgattttcatttttcctgt

SEQ ID NO: 424147 - DNA, 25 bp, Homo sapien
tatgattttcatttttcctgtcaac

SEQ ID NO: 424148 - DNA, 25 bp, Homo sapien
tgattttcatttttcctgtcaactg

SEQ ID NO: 424149 - DNA, 25 bp, Homo sapien
attttcatttttcctgtcaactgac

SEQ ID NO: 424150 - DNA, 25 bp, Homo sapien
aaacggccctcctttggaatcacag

SEQ ID NO: 424151 - DNA, 25 bp, Homo sapien
aagccagaaaccattgacccatcag

SEQ ID NO: 424152 - DNA, 25 bp, Homo sapien
taggaactgttgtgttggtgctttc

SEQ ID NO: 424153 - DNA, 25 bp, Homo sapien
cttgtttctctatgtggcagttcac

SEQ ID NO: 424154 - DNA, 25 bp, Homo sapien
taattcccattgtgcatgagcgaga

SEQ ID NO: 424155 - DNA, 25 bp, Homo sapien
tattgtcaatggtcaccccaaggct

SEQ ID NO: 424156 - DNA, 25 bp, Homo sapien
ctcattccgggctatgcaggtgtaa

SEQ ID NO: 424157 - DNA, 25 bp, Homo sapien
tcctcaaggagctcgtgaagtcaat

SEQ ID NO: 424158 - DNA, 25 bp, Homo sapien
gacccgctgcccaatggagaatctt

SEQ ID NO: 424159 - DNA, 25 bp, Homo sapien
aacacaggggatgaagacccgctgc

SEQ ID NO: 424160 - DNA, 25 bp, Homo sapien
ctcaaagggttgtatgaaaggcgga

SEQ ID NO: 424161 - DNA, 25 bp, Homo sapien
tgagaccacaacacaggggatgaag

SEQ ID NO: 424162 - DNA, 25 bp, Homo sapien
taaggatattgctggagccggtggg

SEQ ID NO: 424163 - DNA, 25 bp, Homo sapien
gccaagatgcagagacatatgatga

SEQ ID NO: 424164 - DNA, 25 bp, Homo sapien
catatgatgagggagtgataaggat

SEQ ID NO: 424165 - DNA, 25 bp, Homo sapien
gataaggatattgctggagccggtg

SEQ ID NO: 424166 - DNA, 25 bp, Homo sapien
gatggtattgtgttgatgtctgcat

SEQ ID NO: 424167 - DNA, 25 bp, Homo sapien
tgcatatttctctgatggtattgtg

SEQ ID NO: 424168 - DNA, 25 bp, Homo sapien
tgctgttctcctgcgccaggtgtca

SEQ ID NO: 424169 - DNA, 25 bp, Homo sapien
tatttctctgatggtattgtgttga

SEQ ID NO: 424170 - DNA, 25 bp, Homo sapien
gaagttattggccacctcggagatt

SEQ ID NO: 424171 - DNA, 25 bp, Homo sapien
catttgacatctacgtaagtgggag

SEQ ID NO: 424172 - DNA, 25 bp, Homo sapien
gactgattgaggagcaattctgccc

SEQ ID NO: 424173 - DNA, 25 bp, Homo sapien
gccagtgggcgcaaatgaatgaaaa

SEQ ID NO: 424174 - DNA, 25 bp, Homo sapien
taagcaccgttcaagttcaatgtgg

SEQ ID NO: 424175 - DNA, 25 bp, Homo sapien
ttaagcaccgttcaagttcaatgtg

SEQ ID NO: 424176 - DNA, 25 bp, Homo sapien
acaagggcaactaaaagccacttat

SEQ ID NO: 424177 - DNA, 25 bp, Homo sapien
gcaactaaaagccacttattggttc

SEQ ID NO: 424178 - DNA, 25 bp, Homo sapien
agggcaactaaaagccacttattgg

SEQ ID NO: 424179 - DNA, 25 bp, Homo sapien
ttgtaacaagggcaactaaaagcca

SEQ ID NO: 424180 - DNA, 25 bp, Homo sapien
tatgttgttgctttgacctgctcat

SEQ ID NO: 424181 - DNA, 25 bp, Homo sapien
ctatgttgttgctttgacctgctca

SEQ ID NO: 424182 - DNA, 25 bp, Homo sapien
gataatgaagctaatgatgtgctcc

SEQ ID NO: 424183 - DNA, 25 bp, Homo sapien
taatgaagctaatgatgtgctcctt

SEQ ID NO: 424184 - DNA, 25 bp, Homo sapien
ataatgaagctaatgatgtgctcct

SEQ ID NO: 424185 - DNA, 25 bp, Homo sapien
tatgtgtcccgtcctgctattgctg

SEQ ID NO: 424186 - DNA, 25 bp, Homo sapien
tgtggttgaaccaacacgttgcacg

SEQ ID NO: 424187 - DNA, 25 bp, Homo sapien
tacggatagccaatcacacgacagt

SEQ ID NO: 424188 - DNA, 25 bp, Homo sapien
ttcattggtcgaatgcttgcaggcc

SEQ ID NO: 424189 - DNA, 25 bp, Homo sapien
gcatgcagagcataaaccaggaaag

SEQ ID NO: 424190 - DNA, 25 bp, Homo sapien
agggaaagggcatgcagagcataaa

SEQ ID NO: 424191 - DNA, 25 bp, Homo sapien
aagggcatgcagagcataaaccagg

SEQ ID NO: 424192 - DNA, 25 bp, Homo sapien
tgtggaagaaccgaagagaaggaga

SEQ ID NO: 424193 - DNA, 25 bp, Homo sapien
tacaggacgactcccgccgagttgt

SEQ ID NO: 424194 - DNA, 25 bp, Homo sapien
tttattcgagcctggtacaggacga

SEQ ID NO: 424195 - DNA, 25 bp, Homo sapien
cccgccgagttgttggcagtgcagc

SEQ ID NO: 424196 - DNA, 25 bp, Homo sapien
tggagatgttcaggtagctgaccac

SEQ ID NO: 424197 - DNA, 25 bp, Homo sapien
tcatctggctgatgcggtgactgcc

SEQ ID NO: 424198 - DNA, 25 bp, Homo sapien
ccacgtgatcgtgggcaaaggtgtt

SEQ ID NO: 424199 - DNA, 25 bp, Homo sapien
aaaggtgttcccttcacgttgcaca

SEQ ID NO: 424200 - DNA, 25 bp, Homo sapien
cttgagaatcgggtcatcgtccagg

SEQ ID NO: 424201 - DNA, 25 bp, Homo sapien
tgcacatagtcttgagcggacagct

SEQ ID NO: 424202 - DNA, 25 bp, Homo sapien
tagtcttgagcggacagcttgtcct

SEQ ID NO: 424203 - DNA, 25 bp, Homo sapien
ggacagcttgtccttgcgcacaaag

SEQ ID NO: 424204 - DNA, 25 bp, Homo sapien
ggaccacctgcacatagtcttgagc

SEQ ID NO: 424205 - DNA, 25 bp, Homo sapien
gatttcaccattgcggtaccaggag

SEQ ID NO: 424206 - DNA, 25 bp, Homo sapien
ataaggttttcgtggttgatccctg

SEQ ID NO: 424207 - DNA, 25 bp, Homo sapien
gagagttcctggtcctcagttcctg

SEQ ID NO: 424208 - DNA, 25 bp, Homo sapien
tcacgctgcaggacaaggaaacttg

SEQ ID NO: 424209 - DNA, 25 bp, Homo sapien
tgcccgagcgctttgcaaggcagct

SEQ ID NO: 424210 - DNA, 25 bp, Homo sapien
tacaggcggcctatcaccttagcag

SEQ ID NO: 424211 - DNA, 25 bp, Homo sapien
gacacttcacaaacatagctgcctg

SEQ ID NO: 424212 - DNA, 25 bp, Homo sapien
cagccatggctttgcgatggtcaaa

SEQ ID NO: 424213 - DNA, 25 bp, Homo sapien
gatgcagcggtagttatacaatcca

SEQ ID NO: 424214 - DNA, 25 bp, Homo sapien
tacaaaaagtctggcgctgttgctc

SEQ ID NO: 424215 - DNA, 25 bp, Homo sapien
tcgtctctccggtgtatcgatgccg

SEQ ID NO: 424216 - DNA, 25 bp, Homo sapien
taatatacaaggctcccgtggatgt

SEQ ID NO: 424217 - DNA, 25 bp, Homo sapien
taaataaggctttagggcgtatcat

SEQ ID NO: 424218 - DNA, 25 bp, Homo sapien
tttagggcgtatcatttcagaagaa

SEQ ID NO: 424219 - DNA, 25 bp, Homo sapien
ggcgtatcatttcagaagaacttga

SEQ ID NO: 424220 - DNA, 25 bp, Homo sapien
aggctttagggcgtatcatttcaga

SEQ ID NO: 424221 - DNA, 25 bp, Homo sapien
gtcagatgcggtccctcgtgtcact

SEQ ID NO: 424222 - DNA, 25 bp, Homo sapien
aagaacacgcaagggtagaaaccat

SEQ ID NO: 424223 - DNA, 25 bp, Homo sapien
tagaaaccatgtcagatgcggtccc

SEQ ID NO: 424224 - DNA, 25 bp, Homo sapien
acacgcaagggtagaaaccatgtca

SEQ ID NO: 424225 - DNA, 25 bp, Homo sapien
aaatcttcatgtacactggccgact

SEQ ID NO: 424226 - DNA, 25 bp, Homo sapien
tgaaaagagtgataaaccacaccct

SEQ ID NO: 424227 - DNA, 25 bp, Homo sapien
gcagaatggacaagtactctcgaga

SEQ ID NO: 424228 - DNA, 25 bp, Homo sapien
gatatagcctgttaccatcgcagaa

SEQ ID NO: 424229 - DNA, 25 bp, Homo sapien
cgttttaaccgcttccagagccctg

SEQ ID NO: 424230 - DNA, 25 bp, Homo sapien
cctggcagctatgtctgggaatgca

SEQ ID NO: 424231 - DNA, 25 bp, Homo sapien
caacaggctgtcagagtctctcaag

SEQ ID NO: 424232 - DNA, 25 bp, Homo sapien
ctgagtcttcaaccaaggcaggtaa

SEQ ID NO: 424233 - DNA, 25 bp, Homo sapien
ttggagatttgggtgtagattccat

SEQ ID NO: 424234 - DNA, 25 bp, Homo sapien
tagttacaattgacttatgaatata

SEQ ID NO: 424235 - DNA, 25 bp, Homo sapien
tggagactgtaacattttcctatat

SEQ ID NO: 424236 - DNA, 25 bp, Homo sapien
ttttaggctaaaagggttgagagca

SEQ ID NO: 424237 - DNA, 25 bp, Homo sapien
aattttacccatatgtggaatggat

SEQ ID NO: 424238 - DNA, 25 bp, Homo sapien
tacccatatgtggaatggattcttc

SEQ ID NO: 424239 - DNA, 25 bp, Homo sapien
cttcaacaggatttttaacagaatc

SEQ ID NO: 424240 - DNA, 25 bp, Homo sapien
tggaatggattcttcaacaggattt

SEQ ID NO: 424241 - DNA, 25 bp, Homo sapien
cagggtcaagagaacagcacaaagc

SEQ ID NO: 424242 - DNA, 25 bp, Homo sapien
gtcaagagaacagcacaaagcccag

SEQ ID NO: 424243 - DNA, 25 bp, Homo sapien
agaacagcacaaagcccagcccaag

SEQ ID NO: 424244 - DNA, 25 bp, Homo sapien
gagaacagcacaaagcccagcccaa

SEQ ID NO: 424245 - DNA, 25 bp, Homo sapien
tacaggcacacaggattacttcaaa

SEQ ID NO: 424246 - DNA, 25 bp, Homo sapien
tagaaatacccttggttgcactctg

SEQ ID NO: 424247 - DNA, 25 bp, Homo sapien
catgatgtgaaaagtcctgccttgg

SEQ ID NO: 424248 - DNA, 25 bp, Homo sapien
tgtactgatcgcttgacccactgtg

SEQ ID NO: 424249 - DNA, 25 bp, Homo sapien
cccgggacctgatgctgtcagccgt

SEQ ID NO: 424250 - DNA, 25 bp, Homo sapien
tgtcagccgtctgagataccagaag

SEQ ID NO: 424251 - DNA, 25 bp, Homo sapien
gtctgagataccagaagcttgagtg

SEQ ID NO: 424252 - DNA, 25 bp, Homo sapien
gacctgatgctgtcagccgtctgag

SEQ ID NO: 424253 - DNA, 25 bp, Homo sapien
tctttaccggcattcttcttctcta

SEQ ID NO: 424254 - DNA, 25 bp, Homo sapien
tcacacatctttaccggcattcttc

SEQ ID NO: 424255 - DNA, 25 bp, Homo sapien
tttaccggcattcttcttctctagc

SEQ ID NO: 424256 - DNA, 25 bp, Homo sapien
cacatctttaccggcattcttcttc

SEQ ID NO: 424257 - DNA, 25 bp, Homo sapien
gctgcacgggaccaacacagaaagc

SEQ ID NO: 424258 - DNA, 25 bp, Homo sapien
aagcataacatctgcctgttcatat

SEQ ID NO: 424259 - DNA, 25 bp, Homo sapien
atctccaacccctgcacgggactgc

SEQ ID NO: 424260 - DNA, 25 bp, Homo sapien
gcctgttcatatgggctccttctgc

SEQ ID NO: 424261 - DNA, 25 bp, Homo sapien
gctggcatctagtggtgtgtgcaca

SEQ ID NO: 424262 - DNA, 25 bp, Homo sapien
attacacttgaacagtattttcggg

SEQ ID NO: 424263 - DNA, 25 bp, Homo sapien
cattctgagtgtttgaggtaggcta

SEQ ID NO: 424264 - DNA, 25 bp, Homo sapien
taagttgccccatcatagtcctctg

SEQ ID NO: 424265 - DNA, 25 bp, Homo sapien
gagacttgctgtgggaattgccact

SEQ ID NO: 424266 - DNA, 25 bp, Homo sapien
ggggtgtagacaggctctgtgacat

SEQ ID NO: 424267 - DNA, 25 bp, Homo sapien
aaggggtgtagacaggctctgtgac

SEQ ID NO: 424268 - DNA, 25 bp, Homo sapien
ggggagacttgctgtgggaattgcc

SEQ ID NO: 424269 - DNA, 25 bp, Homo sapien
agtgtctctgagtaaaagctaccat

SEQ ID NO: 424270 - DNA, 25 bp, Homo sapien
ttgctggtaataggcacacagtgtc

SEQ ID NO: 424271 - DNA, 25 bp, Homo sapien
cacagtgtctctgagtaaaagctac

SEQ ID NO: 424272 - DNA, 25 bp, Homo sapien
cagtgtctctgagtaaaagctacca

SEQ ID NO: 424273 - DNA, 25 bp, Homo sapien
tcctgtatcatggagctgttgtgag

SEQ ID NO: 424274 - DNA, 25 bp, Homo sapien
gaacctctctgggtcctagcttact

SEQ ID NO: 424275 - DNA, 25 bp, Homo sapien
tccctgtttaccacccattagctgt

SEQ ID NO: 424276 - DNA, 25 bp, Homo sapien
cataggtgcaagcaacatccctgtt

SEQ ID NO: 424277 - DNA, 25 bp, Homo sapien
gcaggaaggccaaagatttccgaga

SEQ ID NO: 424278 - DNA, 25 bp, Homo sapien
tacaaataagcatgcacgtcagtgg

SEQ ID NO: 424279 - DNA, 25 bp, Homo sapien
tgttctgttggtgggcattctggcc

SEQ ID NO: 424280 - DNA, 25 bp, Homo sapien
tggccagttggctggaccattccag

SEQ ID NO: 424281 - DNA, 25 bp, Homo sapien
gttcaggggactgttcaggtttcat

SEQ ID NO: 424282 - DNA, 25 bp, Homo sapien
catgttcaggggactgttcaggttt

SEQ ID NO: 424283 - DNA, 25 bp, Homo sapien
atgttcaggggactgttcaggtttc

SEQ ID NO: 424284 - DNA, 25 bp, Homo sapien
tgttcaggggactgttcaggtttca

SEQ ID NO: 424285 - DNA, 25 bp, Homo sapien
gattctttaatggtgataaatcaat

SEQ ID NO: 424286 - DNA, 25 bp, Homo sapien
gataagggatagagggatgcctata

SEQ ID NO: 424287 - DNA, 25 bp, Homo sapien
tggggagtggcatacttagaatact

SEQ ID NO: 424288 - DNA, 25 bp, Homo sapien
caaaagtccataggacaaagaagat

SEQ ID NO: 424289 - DNA, 25 bp, Homo sapien
taacatgtcagcgaattacctcagg

SEQ ID NO: 424290 - DNA, 25 bp, Homo sapien
tctggtgcctcacaaagatctaaca

SEQ ID NO: 424291 - DNA, 25 bp, Homo sapien
gaagggcagtccgtgtccattagag

SEQ ID NO: 424292 - DNA, 25 bp, Homo sapien
tttctgcaggcgagtgcgtgcgttc

SEQ ID NO: 424293 - DNA, 25 bp, Homo sapien
tctttgtgtgaccttcgtcctggcc

SEQ ID NO: 424294 - DNA, 25 bp, Homo sapien
gaggcttctcctagaactggactgg

SEQ ID NO: 424295 - DNA, 25 bp, Homo sapien
agtgctgactttcccatacaaaatg

SEQ ID NO: 424296 - DNA, 25 bp, Homo sapien
atacaaaatggtcagcctggccggg

SEQ ID NO: 424297 - DNA, 25 bp, Homo sapien
ggagataccatgcttaacacacaaa

SEQ ID NO: 424298 - DNA, 25 bp, Homo sapien
ccaaaggacgtgtaaatttccactg

SEQ ID NO: 424299 - DNA, 25 bp, Homo sapien
cactgatggccgtgagtcatctata

SEQ ID NO: 424300 - DNA, 25 bp, Homo sapien
tcagatgctcagtattgaagttcca

SEQ ID NO: 424301 - DNA, 25 bp, Homo sapien
tattaaacagcgatgtgccacatgg

SEQ ID NO: 424302 - DNA, 25 bp, Homo sapien
gaaatttgacgctgttgctactgaa

SEQ ID NO: 424303 - DNA, 25 bp, Homo sapien
taaggcctcgtgctggactgtcata

SEQ ID NO: 424304 - DNA, 25 bp, Homo sapien
cattaggaaggccattatcactgac

SEQ ID NO: 424305 - DNA, 25 bp, Homo sapien
tgctgacataagtctgctgtggtta

SEQ ID NO: 424306 - DNA, 25 bp, Homo sapien
gctgacataagtctgctgtggttac

SEQ ID NO: 424307 - DNA, 25 bp, Homo sapien
ctgctgacataagtctgctgtggtt

SEQ ID NO: 424308 - DNA, 25 bp, Homo sapien
gctgctgacataagtctgctgtggt

SEQ ID NO: 424309 - DNA, 25 bp, Homo sapien
gagtgtgtcgccctctctgtactcc

SEQ ID NO: 424310 - DNA, 25 bp, Homo sapien
caactctatgagtgtgtcgccctct

SEQ ID NO: 424311 - DNA, 25 bp, Homo sapien
tggagacggacacctttgttgagcc

SEQ ID NO: 424312 - DNA, 25 bp, Homo sapien
tggaagtctctgtggagatcacggc

SEQ ID NO: 424313 - DNA, 25 bp, Homo sapien
tcactgtgcaacttggaaccgtatt

SEQ ID NO: 424314 - DNA, 25 bp, Homo sapien
tatttgacctggtaattcaggtctg

SEQ ID NO: 424315 - DNA, 25 bp, Homo sapien
tgcaacttggaaccgtatttgacct

SEQ ID NO: 424316 - DNA, 25 bp, Homo sapien
gtctgaattggcactgatttacagc

SEQ ID NO: 424317 - DNA, 25 bp, Homo sapien
cagggatgttggccgactcctcagc

SEQ ID NO: 424318 - DNA, 25 bp, Homo sapien
gggatgttggccgactcctcagcca

SEQ ID NO: 424319 - DNA, 25 bp, Homo sapien
gatgttggccgactcctcagccagg

SEQ ID NO: 424320 - DNA, 25 bp, Homo sapien
tgttggccgactcctcagccaggag

SEQ ID NO: 424321 - DNA, 25 bp, Homo sapien
tagagcaccaatccctggacctttg

SEQ ID NO: 424322 - DNA, 25 bp, Homo sapien
ttttcctgaactgctctcctagagc

SEQ ID NO: 424323 - DNA, 25 bp, Homo sapien
tcacagagcagctttctctgtaccc

SEQ ID NO: 424324 - DNA, 25 bp, Homo sapien
tccactcctgcatacagaccctttt

SEQ ID NO: 424325 - DNA, 25 bp, Homo sapien
ggaagcctgccagatctgacccata

SEQ ID NO: 424326 - DNA, 25 bp, Homo sapien
gaatcacaagacttctgccagatgg

SEQ ID NO: 424327 - DNA, 25 bp, Homo sapien
ttgccacagccctcaagttaacagg

SEQ ID NO: 424328 - DNA, 25 bp, Homo sapien
tagtaaacagtatgccaacaattgg

SEQ ID NO: 424329 - DNA, 25 bp, Homo sapien
caactcttcccggttctgtcaaaat

SEQ ID NO: 424330 - DNA, 25 bp, Homo sapien
tcttcccggttctgtcaaaatgcat

SEQ ID NO: 424331 - DNA, 25 bp, Homo sapien
agaatgtgaattgacgttgccatgg

SEQ ID NO: 424332 - DNA, 25 bp, Homo sapien
tgccatggaaatagaacaactcttc

SEQ ID NO: 424333 - DNA, 25 bp, Homo sapien
gacagtgcatgtcataagaacacat

SEQ ID NO: 424334 - DNA, 25 bp, Homo sapien
gatcccctctttggaatgtagttct

SEQ ID NO: 424335 - DNA, 25 bp, Homo sapien
aaaacaggacagtgcatgtcataag

SEQ ID NO: 424336 - DNA, 25 bp, Homo sapien
gaacacataaataggagctgtgtaa

SEQ ID NO: 424337 - DNA, 25 bp, Homo sapien
ggaccaaggagggcacatagaacct

SEQ ID NO: 424338 - DNA, 25 bp, Homo sapien
gaccaaggagggcacatagaacctc

SEQ ID NO: 424339 - DNA, 25 bp, Homo sapien
gggaccaaggagggcacatagaacc

SEQ ID NO: 424340 - DNA, 25 bp, Homo sapien
ctttataatagactcagggaaaact

SEQ ID NO: 424341 - DNA, 25 bp, Homo sapien
tgactttataatagactcagggaaa

SEQ ID NO: 424342 - DNA, 25 bp, Homo sapien
gactttataatagactcagggaaaa

SEQ ID NO: 424343 - DNA, 25 bp, Homo sapien
tggacagtggtatagtcagaaccag

SEQ ID NO: 424344 - DNA, 25 bp, Homo sapien
tgatgccattcctccagtttttgga

SEQ ID NO: 424345 - DNA, 25 bp, Homo sapien
tcagaaccaggttaaaacagatgtg

SEQ ID NO: 424346 - DNA, 25 bp, Homo sapien
catactgttgagtcccaaaagtgga

SEQ ID NO: 424347 - DNA, 25 bp, Homo sapien
tcacaagccttgagggatggcttta

SEQ ID NO: 424348 - DNA, 25 bp, Homo sapien
gtttttgctcagttggcctcagtaa

SEQ ID NO: 424349 - DNA, 25 bp, Homo sapien
ctcacctgctaagtcattgtctctg

SEQ ID NO: 424350 - DNA, 25 bp, Homo sapien
gatggctttatacgtccctactcct

SEQ ID NO: 424351 - DNA, 25 bp, Homo sapien
gcacatggacctccttcatagttgg

SEQ ID NO: 424352 - DNA, 25 bp, Homo sapien
tcccatcctcagagactcacagtcc

SEQ ID NO: 424353 - DNA, 25 bp, Homo sapien
cagtcccttctgcttgtcaaaggat

SEQ ID NO: 424354 - DNA, 25 bp, Homo sapien
tggagcagatcaaaggtctgcatcc

SEQ ID NO: 424355 - DNA, 25 bp, Homo sapien
cagtttattatctaggagagccacc

SEQ ID NO: 424356 - DNA, 25 bp, Homo sapien
aatcgcccggatttgctgaagcagg

SEQ ID NO: 424357 - DNA, 25 bp, Homo sapien
agatagtttgtctcccagcttgaag

SEQ ID NO: 424358 - DNA, 25 bp, Homo sapien
tttggctgatagagacaatcgcccg

SEQ ID NO: 424359 - DNA, 25 bp, Homo sapien
tagggaaattagagacactgtagct

SEQ ID NO: 424360 - DNA, 25 bp, Homo sapien
cagttgagcagccatttagggaaat

SEQ ID NO: 424361 - DNA, 25 bp, Homo sapien
cactgtagctcgaagaagaccatga

SEQ ID NO: 424362 - DNA, 25 bp, Homo sapien
agggcttacatctcttgacagttga

SEQ ID NO: 424363 - DNA, 25 bp, Homo sapien
gccagcagcccagagtgtcttatct

SEQ ID NO: 424364 - DNA, 25 bp, Homo sapien
acatgttcacactcagtgcctcggg

SEQ ID NO: 424365 - DNA, 25 bp, Homo sapien
attatcatcagcacccacatgttca

SEQ ID NO: 424366 - DNA, 25 bp, Homo sapien
aagatgtcccagaaccgcagccagc

SEQ ID NO: 424367 - DNA, 25 bp, Homo sapien
tctgcgtttccgcatctcctctcca

SEQ ID NO: 424368 - DNA, 25 bp, Homo sapien
agctctgcgtttccgcatctcctct

SEQ ID NO: 424369 - DNA, 25 bp, Homo sapien
tcctctccacaccaaataataacaa

SEQ ID NO: 424370 - DNA, 25 bp, Homo sapien
ccagagctctgcgtttccgcatctc

SEQ ID NO: 424371 - DNA, 25 bp, Homo sapien
cctactgggattggctatatagtcc

SEQ ID NO: 424372 - DNA, 25 bp, Homo sapien
taattcccagatcccatatgctagg

SEQ ID NO: 424373 - DNA, 25 bp, Homo sapien
ggtacctgattaagccctactggga

SEQ ID NO: 424374 - DNA, 25 bp, Homo sapien
tccagtggttgatttcaggcctaaa

SEQ ID NO: 424375 - DNA, 25 bp, Homo sapien
agataactaacagtcccagccgaaa

SEQ ID NO: 424376 - DNA, 25 bp, Homo sapien
aagataactaacagtcccagccgaa

SEQ ID NO: 424377 - DNA, 25 bp, Homo sapien
tcatccctgttggtaatgggatcca

SEQ ID NO: 424378 - DNA, 25 bp, Homo sapien
cacaggcggcaaactgtggcctctg

SEQ ID NO: 424379 - DNA, 25 bp, Homo sapien
cctgttggtaatgggatccacaggc

SEQ ID NO: 424380 - DNA, 25 bp, Homo sapien
ggtaatgggatccacaggcggcaaa

SEQ ID NO: 424381 - DNA, 25 bp, Homo sapien
acaaggcagagcactaggaccagcc

SEQ ID NO: 424382 - DNA, 25 bp, Homo sapien
gcacaaggcagagcactaggaccag

SEQ ID NO: 424383 - DNA, 25 bp, Homo sapien
caaggcagagcactaggaccagcct

SEQ ID NO: 424384 - DNA, 25 bp, Homo sapien
agagcactaggaccagcctgttttc

SEQ ID NO: 424385 - DNA, 25 bp, Homo sapien
ccgcgactggcccaaactgtctttt

SEQ ID NO: 424386 - DNA, 25 bp, Homo sapien
ttaaagtgactctgccgtctctgtt

SEQ ID NO: 424387 - DNA, 25 bp, Homo sapien
gtctctgttactccacatctcatca

SEQ ID NO: 424388 - DNA, 25 bp, Homo sapien
cgcgactggcccaaactgtctttta

SEQ ID NO: 424389 - DNA, 25 bp, Homo sapien
gatttcactagtgcaaacactggtg

SEQ ID NO: 424390 - DNA, 25 bp, Homo sapien
cagttttctaaggtggaagcttcga

SEQ ID NO: 424391 - DNA, 25 bp, Homo sapien
tagtcatgagacataacgtcagctc

SEQ ID NO: 424392 - DNA, 25 bp, Homo sapien
gatagccaggttagaggtttaccaa

SEQ ID NO: 424393 - DNA, 25 bp, Homo sapien
tatctagtctattaatgagctcatc

SEQ ID NO: 424394 - DNA, 25 bp, Homo sapien
taatgagctcatcaaaggcactttt

SEQ ID NO: 424395 - DNA, 25 bp, Homo sapien
gtttctcctgacgtatcttcaagct

SEQ ID NO: 424396 - DNA, 25 bp, Homo sapien
ttgcttttgagttctagcacctcct

SEQ ID NO: 424397 - DNA, 25 bp, Homo sapien
taatcacttccaagctctctgggtg

SEQ ID NO: 424398 - DNA, 25 bp, Homo sapien
ataagtgaacatggctgcgtcccaa

SEQ ID NO: 424399 - DNA, 25 bp, Homo sapien
ggctacagaatgaaaggccatcagg

SEQ ID NO: 424400 - DNA, 25 bp, Homo sapien
tctctccagattgcagaccagtggt

SEQ ID NO: 424401 - DNA, 25 bp, Homo sapien
aggtaatggaaacatgggcgggtgg

SEQ ID NO: 424402 - DNA, 25 bp, Homo sapien
tgggaggtaatggaaacatgggcgg

SEQ ID NO: 424403 - DNA, 25 bp, Homo sapien
gaggtaatggaaacatgggcgggtg

SEQ ID NO: 424404 - DNA, 25 bp, Homo sapien
cataatcctcatgaattctgctgaa

SEQ ID NO: 424405 - DNA, 25 bp, Homo sapien
ccataaatggtaggaggagactgat

SEQ ID NO: 424406 - DNA, 25 bp, Homo sapien
tctagtggcagtgagaaattatcct

SEQ ID NO: 424407 - DNA, 25 bp, Homo sapien
ttatcctaaaaacgtgatgacatca

SEQ ID NO: 424408 - DNA, 25 bp, Homo sapien
gcttgggacatagtccacacgaaca

SEQ ID NO: 424409 - DNA, 25 bp, Homo sapien
gggcttgggacatagtccacacgaa

SEQ ID NO: 424410 - DNA, 25 bp, Homo sapien
tgggacatagtccacacgaacatct

SEQ ID NO: 424411 - DNA, 25 bp, Homo sapien
taaaacaagcacggggcttgggaca

SEQ ID NO: 424412 - DNA, 25 bp, Homo sapien
agagcactttaagagtgatctcttc

SEQ ID NO: 424413 - DNA, 25 bp, Homo sapien
gttctgctttactattaaaatctga

SEQ ID NO: 424414 - DNA, 25 bp, Homo sapien
gcactttaagagtgatctcttcatt

SEQ ID NO: 424415 - DNA, 25 bp, Homo sapien
ctttaagagtgatctcttcattatc

SEQ ID NO: 424416 - DNA, 25 bp, Homo sapien
aaatccactgatgagctctccgtgg

SEQ ID NO: 424417 - DNA, 25 bp, Homo sapien
tccactgatgagctctccgtggtct

SEQ ID NO: 424418 - DNA, 25 bp, Homo sapien
ggtctttgcctttatggaacttcca

SEQ ID NO: 424419 - DNA, 25 bp, Homo sapien
ttatggaacttccacatgacatcct

SEQ ID NO: 424420 - DNA, 25 bp, Homo sapien
gcgctgcatggcagcgctgtcctca

SEQ ID NO: 424421 - DNA, 25 bp, Homo sapien
gaatggtctctagcgctgcatggca

SEQ ID NO: 424422 - DNA, 25 bp, Homo sapien
caggtgcggtgtggggaatggtctc

SEQ ID NO: 424423 - DNA, 25 bp, Homo sapien
ctgccaccctgctttcaccctgatg

SEQ ID NO: 424424 - DNA, 25 bp, Homo sapien
acatttgtgctttgtcaaataatat

SEQ ID NO: 424425 - DNA, 25 bp, Homo sapien
gaacatctgggtttattaggcctag

SEQ ID NO: 424426 - DNA, 25 bp, Homo sapien
tttattaggcctaggatttttctgc

SEQ ID NO: 424427 - DNA, 25 bp, Homo sapien
taggcctaggatttttctgcacatt

SEQ ID NO: 424428 - DNA, 25 bp, Homo sapien
ctaaaagtcagagggtagatataaa

SEQ ID NO: 424429 - DNA, 25 bp, Homo sapien
tgtgagctagcgcagagacaatgat

SEQ ID NO: 424430 - DNA, 25 bp, Homo sapien
ccttcttatagcaatcacagggcac

SEQ ID NO: 424431 - DNA, 25 bp, Homo sapien
agtcagagggtagatataaattaat

SEQ ID NO: 424432 - DNA, 25 bp, Homo sapien
taccaggcattctcgtgaactcctc

SEQ ID NO: 424433 - DNA, 25 bp, Homo sapien
ctttgggtttcatgactactatcac

SEQ ID NO: 424434 - DNA, 25 bp, Homo sapien
tactatcacatgaggtgagatttca

SEQ ID NO: 424435 - DNA, 25 bp, Homo sapien
gcccgagatttgagatgagctcata

SEQ ID NO: 424436 - DNA, 25 bp, Homo sapien
gctctgtcttcccagtcgtgctttc

SEQ ID NO: 424437 - DNA, 25 bp, Homo sapien
agcccacacttgaccacagtcagca

SEQ ID NO: 424438 - DNA, 25 bp, Homo sapien
gtcagcacttttggcctgagaccaa

SEQ ID NO: 424439 - DNA, 25 bp, Homo sapien
tcttcccagtcgtgctttccactga

SEQ ID NO: 424440 - DNA, 25 bp, Homo sapien
aagaaaggcctctacaaattcaaag

SEQ ID NO: 424441 - DNA, 25 bp, Homo sapien
acaaattcaaagagggagcttttca

SEQ ID NO: 424442 - DNA, 25 bp, Homo sapien
gaaagaaaggcctctacaaattcaa

SEQ ID NO: 424443 - DNA, 25 bp, Homo sapien
tacaaattcaaagagggagcttttc

SEQ ID NO: 424444 - DNA, 25 bp, Homo sapien
tgttcactgagcattcggccttcac

SEQ ID NO: 424445 - DNA, 25 bp, Homo sapien
ggcagaaagttactgttcactgagc

SEQ ID NO: 424446 - DNA, 25 bp, Homo sapien
gggatataggaaaagtgcatgtaga

SEQ ID NO: 424447 - DNA, 25 bp, Homo sapien
tataggaaaagtgcatgtagacccc

SEQ ID NO: 424448 - DNA, 25 bp, Homo sapien
tctgagtttgcaagggtagtgccct

SEQ ID NO: 424449 - DNA, 25 bp, Homo sapien
gagggcatccttttacagctctgag

SEQ ID NO: 424450 - DNA, 25 bp, Homo sapien
tgcatttgaacagcacgcgtccacg

SEQ ID NO: 424451 - DNA, 25 bp, Homo sapien
cgcgtccacgcagttgaagagggca

SEQ ID NO: 424452 - DNA, 25 bp, Homo sapien
gcagggacccacagctcagataaaa

SEQ ID NO: 424453 - DNA, 25 bp, Homo sapien
gggatgcatggagtcaaaacgcaaa

SEQ ID NO: 424454 - DNA, 25 bp, Homo sapien
ttgggacatcccacattaaagaatg

SEQ ID NO: 424455 - DNA, 25 bp, Homo sapien
agatgggcctccgtcaggactgtag

SEQ ID NO: 424456 - DNA, 25 bp, Homo sapien
gaggatgcagccatctgtgtcttca

SEQ ID NO: 424457 - DNA, 25 bp, Homo sapien
gaaggcggtttagctaatggataac

SEQ ID NO: 424458 - DNA, 25 bp, Homo sapien
gagcagaggttgtcacagacacatg

SEQ ID NO: 424459 - DNA, 25 bp, Homo sapien
tgcatagggctcaatctgccgttag

SEQ ID NO: 424460 - DNA, 25 bp, Homo sapien
catagggtgtgactaactggaggcc

SEQ ID NO: 424461 - DNA, 25 bp, Homo sapien
gaatgtgggtgacttcagaactccg

SEQ ID NO: 424462 - DNA, 25 bp, Homo sapien
gaaaacagcaggttcggccagttct

SEQ ID NO: 424463 - DNA, 25 bp, Homo sapien
tctaggaaagattagcacacaggcc

SEQ ID NO: 424464 - DNA, 25 bp, Homo sapien
ggccaggtagttgtctctctggatt

SEQ ID NO: 424465 - DNA, 25 bp, Homo sapien
ccaggtagttgtctctctggattgg

SEQ ID NO: 424466 - DNA, 25 bp, Homo sapien
caggccaggtagttgtctctctgga

SEQ ID NO: 424467 - DNA, 25 bp, Homo sapien
gccaggtagttgtctctctggattg

SEQ ID NO: 424468 - DNA, 25 bp, Homo sapien
tattctgtcagcagtgccttctgca

SEQ ID NO: 424469 - DNA, 25 bp, Homo sapien
gtcagcagtgccttctgcaaggaaa

SEQ ID NO: 424470 - DNA, 25 bp, Homo sapien
tctgtcagcagtgccttctgcaagg

SEQ ID NO: 424471 - DNA, 25 bp, Homo sapien
ctattctgtcagcagtgccttctgc

SEQ ID NO: 424472 - DNA, 25 bp, Homo sapien
ctggagattgcagaaggctggtggc

SEQ ID NO: 424473 - DNA, 25 bp, Homo sapien
ggccttgagtctcacttccagggtg

SEQ ID NO: 424474 - DNA, 25 bp, Homo sapien
ggctggtggccttgagtctcacttc

SEQ ID NO: 424475 - DNA, 25 bp, Homo sapien
ttgcagaaggctggtggccttgagt

SEQ ID NO: 424476 - DNA, 25 bp, Homo sapien
agactccatcataaacaaataaaga

SEQ ID NO: 424477 - DNA, 25 bp, Homo sapien
gggaaaggtggagcctggagagtgg

SEQ ID NO: 424478 - DNA, 25 bp, Homo sapien
aggggaaaggtggagcctggagagt

SEQ ID NO: 424479 - DNA, 25 bp, Homo sapien
agaggggaaaggtggagcctggaga

SEQ ID NO: 424480 - DNA, 25 bp, Homo sapien
aatctggagtataacccatgatccg

SEQ ID NO: 424481 - DNA, 25 bp, Homo sapien
catgatccgaggaaaagttgaggtc

SEQ ID NO: 424482 - DNA, 25 bp, Homo sapien
ggttgtccagctgtccagttcaaaa

SEQ ID NO: 424483 - DNA, 25 bp, Homo sapien
gaggtctggcctgaaacactatggc

SEQ ID NO: 424484 - DNA, 25 bp, Homo sapien
gcatctaacacatggacggccttgg

SEQ ID NO: 424485 - DNA, 25 bp, Homo sapien
tactgagcacaactatgaaggcagc

SEQ ID NO: 424486 - DNA, 25 bp, Homo sapien
caatgtttaacaccgcaaggcttga

SEQ ID NO: 424487 - DNA, 25 bp, Homo sapien
caaggcttgagggtcttcaggcaaa

SEQ ID NO: 424488 - DNA, 25 bp, Homo sapien
ttgcaaaccgtatatattctgaata

SEQ ID NO: 424489 - DNA, 25 bp, Homo sapien
aaggattgggaagtcttcattctca

SEQ ID NO: 424490 - DNA, 25 bp, Homo sapien
ctccaaggattgggaagtcttcatt

SEQ ID NO: 424491 - DNA, 25 bp, Homo sapien
ccaaggattgggaagtcttcattct

SEQ ID NO: 424492 - DNA, 25 bp, Homo sapien
cctaaagcaatgtgaccactatttt

SEQ ID NO: 424493 - DNA, 25 bp, Homo sapien
gcggtaatcaacttgagctcttaag

SEQ ID NO: 424494 - DNA, 25 bp, Homo sapien
tcatctgttctgataatcgggcaaa

SEQ ID NO: 424495 - DNA, 25 bp, Homo sapien
aaatgaggcttcgtcttcaagcccc

SEQ ID NO: 424496 - DNA, 25 bp, Homo sapien
aagcccctgcggtaatcaacttgag

SEQ ID NO: 424497 - DNA, 25 bp, Homo sapien
atctaaaggacaacttgtcactttc

SEQ ID NO: 424498 - DNA, 25 bp, Homo sapien
caatctaaaggacaacttgtcactt

SEQ ID NO: 424499 - DNA, 25 bp, Homo sapien
taaccaatctaaaggacaacttgtc

SEQ ID NO: 424500 - DNA, 25 bp, Homo sapien
accaatctaaaggacaacttgtcac

SEQ ID NO: 424501 - DNA, 25 bp, Homo sapien
gcaccccatctgtgccgggtctggt

SEQ ID NO: 424502 - DNA, 25 bp, Homo sapien
gcaggtcattatttacatgattact

SEQ ID NO: 424503 - DNA, 25 bp, Homo sapien
ttccccaagaccataggcccatgag

SEQ ID NO: 424504 - DNA, 25 bp, Homo sapien
tccagcaggtctcacaattgtaagc

SEQ ID NO: 424505 - DNA, 25 bp, Homo sapien
gactaactggaaatcagccaacaaa

SEQ ID NO: 424506 - DNA, 25 bp, Homo sapien
tgcagtgaagtcagtgataagtctg

SEQ ID NO: 424507 - DNA, 25 bp, Homo sapien
tgactaactggaaatcagccaacaa

SEQ ID NO: 424508 - DNA, 25 bp, Homo sapien
ccacatctaatctatcagccaacat

SEQ ID NO: 424509 - DNA, 25 bp, Homo sapien
tcacccccacatctaatctatcagc

SEQ ID NO: 424510 - DNA, 25 bp, Homo sapien
gaatcatccttgatgactgtctttc

SEQ ID NO: 424511 - DNA, 25 bp, Homo sapien
atcatccttgatgactgtctttctc

SEQ ID NO: 424512 - DNA, 25 bp, Homo sapien
acatctctcacatctgtcctttttt

SEQ ID NO: 424513 - DNA, 25 bp, Homo sapien
aagcttccccaaacatctctcacat

SEQ ID NO: 424514 - DNA, 25 bp, Homo sapien
cttccccaaacatctctcacatctg

SEQ ID NO: 424515 - DNA, 25 bp, Homo sapien
caaagcttccccaaacatctctcac

SEQ ID NO: 424516 - DNA, 25 bp, Homo sapien
tttgaaaatgacttgatgaaggctt

SEQ ID NO: 424517 - DNA, 25 bp, Homo sapien
tcagtatggcctttctttcctagta

SEQ ID NO: 424518 - DNA, 25 bp, Homo sapien
gaaaatgacttgatgaaggcttttt

SEQ ID NO: 424519 - DNA, 25 bp, Homo sapien
ctttcctagtatcatctgcagtttg

SEQ ID NO: 424520 - DNA, 25 bp, Homo sapien
cagagagaagatcaaccaggcagtg

SEQ ID NO: 424521 - DNA, 25 bp, Homo sapien
gagcaactgctatgaactgccttgt

SEQ ID NO: 424522 - DNA, 25 bp, Homo sapien
ggtcacacaggtgcaagtcatggat

SEQ ID NO: 424523 - DNA, 25 bp, Homo sapien
gccttgtgtcccctaaagttgtaga

SEQ ID NO: 424524 - DNA, 25 bp, Homo sapien
tgacagccatggtagctccgcctga

SEQ ID NO: 424525 - DNA, 25 bp, Homo sapien
gattccacaggtgacgcggttgctg

SEQ ID NO: 424526 - DNA, 25 bp, Homo sapien
ggtggctcctagactgaggattcca

SEQ ID NO: 424527 - DNA, 25 bp, Homo sapien
tcaatgtgcccagtctgcaggaacg

SEQ ID NO: 424528 - DNA, 25 bp, Homo sapien
catttacacttaggtggagcaaggg

SEQ ID NO: 424529 - DNA, 25 bp, Homo sapien
gaaagcagaagatccttaatggcag

SEQ ID NO: 424530 - DNA, 25 bp, Homo sapien
tgaacaacagaccagagaatatgct

SEQ ID NO: 424531 - DNA, 25 bp, Homo sapien
tacatctgattgacttagctggcca

SEQ ID NO: 424532 - DNA, 25 bp, Homo sapien
ctattgtggctgctttggagccttg

SEQ ID NO: 424533 - DNA, 25 bp, Homo sapien
tgctggcagctgtttggagactcag

SEQ ID NO: 424534 - DNA, 25 bp, Homo sapien
tgtgcccctcgccttacacgacccc

SEQ ID NO: 424535 - DNA, 25 bp, Homo sapien
ggccctgcagactagctgctattgt

SEQ ID NO: 424536 - DNA, 25 bp, Homo sapien
caccaggatttccaaaggtcccctg

SEQ ID NO: 424537 - DNA, 25 bp, Homo sapien
aacattgcctctcatggttttctgg

SEQ ID NO: 424538 - DNA, 25 bp, Homo sapien
gggataatgcacttgaagaccgcaa

SEQ ID NO: 424539 - DNA, 25 bp, Homo sapien
tgagacaagtgaaacagtgtctttc

SEQ ID NO: 424540 - DNA, 25 bp, Homo sapien
cacggactgtatagggctcccgtaa

SEQ ID NO: 424541 - DNA, 25 bp, Homo sapien
catacacagttaaagacagggatct

SEQ ID NO: 424542 - DNA, 25 bp, Homo sapien
cgcatggacttatatttggattctc

SEQ ID NO: 424543 - DNA, 25 bp, Homo sapien
tgatttgggtataagcgcatggact

SEQ ID NO: 424544 - DNA, 25 bp, Homo sapien
gaaattagactgtgtgatacctaca

SEQ ID NO: 424545 - DNA, 25 bp, Homo sapien
ggctaggtaccatctgagagtcaca

SEQ ID NO: 424546 - DNA, 25 bp, Homo sapien
tacctcttgcagagatgcattgaca

SEQ ID NO: 424547 - DNA, 25 bp, Homo sapien
gtccccgtggtgctggcaaacacta

SEQ ID NO: 424548 - DNA, 25 bp, Homo sapien
gggacatcgtagatctcctcgcccg

SEQ ID NO: 424549 - DNA, 25 bp, Homo sapien
gaaagatcctatgttgagtcctaca

SEQ ID NO: 424550 - DNA, 25 bp, Homo sapien
aaagcagctggaaagatcctatgtt

SEQ ID NO: 424551 - DNA, 25 bp, Homo sapien
gatttcctctttagcgccaatgcac

SEQ ID NO: 424552 - DNA, 25 bp, Homo sapien
tgctgccacttggtggacactgtgg

SEQ ID NO: 424553 - DNA, 25 bp, Homo sapien
ttacagggaactgccttgtctgagg

SEQ ID NO: 424554 - DNA, 25 bp, Homo sapien
aagttacagggaactgccttgtctg

SEQ ID NO: 424555 - DNA, 25 bp, Homo sapien
gcccaagttacagggaactgccttg

SEQ ID NO: 424556 - DNA, 25 bp, Homo sapien
cagcccaagttacagggaactgcct

SEQ ID NO: 424557 - DNA, 25 bp, Homo sapien
gatgtgaattctgctcccctgtgag

SEQ ID NO: 424558 - DNA, 25 bp, Homo sapien
tgatgtgaattctgctcccctgtga

SEQ ID NO: 424559 - DNA, 25 bp, Homo sapien
aattctgctcccctgtgagggacac

SEQ ID NO: 424560 - DNA, 25 bp, Homo sapien
gtgaattctgctcccctgtgaggga

SEQ ID NO: 424561 - DNA, 25 bp, Homo sapien
tctcaagaagtgtcttgttcaacaa

SEQ ID NO: 424562 - DNA, 25 bp, Homo sapien
tgatcaggggaagcatcaaaagcta

SEQ ID NO: 424563 - DNA, 25 bp, Homo sapien
tcaaaagctattgtcaatctgtgcg

SEQ ID NO: 424564 - DNA, 25 bp, Homo sapien
agatgggcccccgataagaccctct

SEQ ID NO: 424565 - DNA, 25 bp, Homo sapien
gaaacatccatcgtttttctcttgg

SEQ ID NO: 424566 - DNA, 25 bp, Homo sapien
ttgaaacatccatcgtttttctctt

SEQ ID NO: 424567 - DNA, 25 bp, Homo sapien
tgaaacatccatcgtttttctcttg

SEQ ID NO: 424568 - DNA, 25 bp, Homo sapien
tatttccttcatgatgacttctcaa

SEQ ID NO: 424569 - DNA, 25 bp, Homo sapien
taaattaaaccgacccaggatcgca

SEQ ID NO: 424570 - DNA, 25 bp, Homo sapien
cacagcattttccaccgtttgataa

SEQ ID NO: 424571 - DNA, 25 bp, Homo sapien
ccaagagagagtgtgaagaccgtgc

SEQ ID NO: 424572 - DNA, 25 bp, Homo sapien
acttcaactcgccatccctcagcag

SEQ ID NO: 424573 - DNA, 25 bp, Homo sapien
gcaggggcgagtcacacggacaatc

SEQ ID NO: 424574 - DNA, 25 bp, Homo sapien
aatccccaacaaggagagggatgga

SEQ ID NO: 424575 - DNA, 25 bp, Homo sapien
acggacaatccccaacaaggagagg

SEQ ID NO: 424576 - DNA, 25 bp, Homo sapien
aagagctacagcaaacccttgctaa

SEQ ID NO: 424577 - DNA, 25 bp, Homo sapien
agagctacagcaaacccttgctaac

SEQ ID NO: 424578 - DNA, 25 bp, Homo sapien
agctacagcaaacccttgctaactc

SEQ ID NO: 424579 - DNA, 25 bp, Homo sapien
gagctacagcaaacccttgctaact

SEQ ID NO: 424580 - DNA, 25 bp, Homo sapien
tagctttgagccgtgccaatccaag

SEQ ID NO: 424581 - DNA, 25 bp, Homo sapien
ttaaagcaactgctagaaagcgcct

SEQ ID NO: 424582 - DNA, 25 bp, Homo sapien
ggaaatgcctggagctgacaaccct

SEQ ID NO: 424583 - DNA, 25 bp, Homo sapien
gaaagcgcctaagacagtgctctgt

SEQ ID NO: 424584 - DNA, 25 bp, Homo sapien
gctgttggacagaagggatacaatt

SEQ ID NO: 424585 - DNA, 25 bp, Homo sapien
cctgaagtcagtgcagaaaaagtga

SEQ ID NO: 424586 - DNA, 25 bp, Homo sapien
tgctgaaaagatcaagtctagcttg

SEQ ID NO: 424587 - DNA, 25 bp, Homo sapien
caaaatagtgagagtggtctctggt

SEQ ID NO: 424588 - DNA, 25 bp, Homo sapien
gaagacttctgcattgagatataac

SEQ ID NO: 424589 - DNA, 25 bp, Homo sapien
tttactgaagaagacttctgcattg

SEQ ID NO: 424590 - DNA, 25 bp, Homo sapien
gaagaagacttctgcattgagatat

SEQ ID NO: 424591 - DNA, 25 bp, Homo sapien
actgaagaagacttctgcattgaga

SEQ ID NO: 424592 - DNA, 25 bp, Homo sapien
agagcctcttttcttgctcagactc

SEQ ID NO: 424593 - DNA, 25 bp, Homo sapien
catgacagtgacagcaatggcaaga

SEQ ID NO: 424594 - DNA, 25 bp, Homo sapien
atggcaagaaacagccgtgaggtct

SEQ ID NO: 424595 - DNA, 25 bp, Homo sapien
tcttcttgccatcaggccagagcct

SEQ ID NO: 424596 - DNA, 25 bp, Homo sapien
tagaggtagtattgcaagccagacg

SEQ ID NO: 424597 - DNA, 25 bp, Homo sapien
gatataactcccaagtctgtgcgat

SEQ ID NO: 424598 - DNA, 25 bp, Homo sapien
gaaagattgcccaacaaatggtcgt

SEQ ID NO: 424599 - DNA, 25 bp, Homo sapien
caactcacagccataggagggaggt

SEQ ID NO: 424600 - DNA, 25 bp, Homo sapien
tgtgctgccctcagttgggttgatt

SEQ ID NO: 424601 - DNA, 25 bp, Homo sapien
gagtgggctgtccagactcttctgt

SEQ ID NO: 424602 - DNA, 25 bp, Homo sapien
gctgtccagactcttctgtgctgcc

SEQ ID NO: 424603 - DNA, 25 bp, Homo sapien
taattatgcacatcaatacggcggg

SEQ ID NO: 424604 - DNA, 25 bp, Homo sapien
ttggagtttggctctttgccttcct

SEQ ID NO: 424605 - DNA, 25 bp, Homo sapien
tataatcacaacattcccaaagcac

SEQ ID NO: 424606 - DNA, 25 bp, Homo sapien
ttataatcacaacattcccaaagca

SEQ ID NO: 424607 - DNA, 25 bp, Homo sapien
aataagggtcgtagaattggtgacg

SEQ ID NO: 424608 - DNA, 25 bp, Homo sapien
tcgtagaattggtgacgtgagaatt

SEQ ID NO: 424609 - DNA, 25 bp, Homo sapien
ttggtgacgtgagaattgggcaaaa

SEQ ID NO: 424610 - DNA, 25 bp, Homo sapien
tctgaaataagggtcgtagaattgg

SEQ ID NO: 424611 - DNA, 25 bp, Homo sapien
cacagacaagcacgaagcaggtaca

SEQ ID NO: 424612 - DNA, 25 bp, Homo sapien
aggtacaggacaaccaccagctgct

SEQ ID NO: 424613 - DNA, 25 bp, Homo sapien
tagcgtgagaaagttgacctttagg

SEQ ID NO: 424614 - DNA, 25 bp, Homo sapien
tggcagtaacttcgggcccacatca

SEQ ID NO: 424615 - DNA, 25 bp, Homo sapien
caactgtttggaaagtccagatccc

SEQ ID NO: 424616 - DNA, 25 bp, Homo sapien
aagctgggttcagatgcatcccccc

SEQ ID NO: 424617 - DNA, 25 bp, Homo sapien
ctgtttggaaagtccagatccccag

SEQ ID NO: 424618 - DNA, 25 bp, Homo sapien
agcaactgtttggaaagtccagatc

SEQ ID NO: 424619 - DNA, 25 bp, Homo sapien
cttacttctatctcggtgagtctga

SEQ ID NO: 424620 - DNA, 25 bp, Homo sapien
tctatctcggtgagtctgagattca

SEQ ID NO: 424621 - DNA, 25 bp, Homo sapien
catcatcacttacttctatctcggt

SEQ ID NO: 424622 - DNA, 25 bp, Homo sapien
tctcggtgagtctgagattcagctt

SEQ ID NO: 424623 - DNA, 25 bp, Homo sapien
cattgcatgcgtatcaaattcaggc

SEQ ID NO: 424624 - DNA, 25 bp, Homo sapien
gaaggacccttagccaggacttgag

SEQ ID NO: 424625 - DNA, 25 bp, Homo sapien
cctgaagtggaattacctgggtatc

SEQ ID NO: 424626 - DNA, 25 bp, Homo sapien
gaatacatagtaagtgaaggaccct

SEQ ID NO: 424627 - DNA, 25 bp, Homo sapien
tcaggggagcacagagtccatgcac

SEQ ID NO: 424628 - DNA, 25 bp, Homo sapien
aattcaaaatgcacgctctgcagga

SEQ ID NO: 424629 - DNA, 25 bp, Homo sapien
gcacagaaggttgtttttccagagg

SEQ ID NO: 424630 - DNA, 25 bp, Homo sapien
ctgatgattatcctgttcctcctgg

SEQ ID NO: 424631 - DNA, 25 bp, Homo sapien
caggatgctttggttgccttccgca

SEQ ID NO: 424632 - DNA, 25 bp, Homo sapien
ccacaagaggcaagtaggtaatcca

SEQ ID NO: 424633 - DNA, 25 bp, Homo sapien
gacagactgccacgagataaggcta

SEQ ID NO: 424634 - DNA, 25 bp, Homo sapien
gacgttgacctgcagatgtgattga

SEQ ID NO: 424635 - DNA, 25 bp, Homo sapien
tgattgacttggaaccacaccctga

SEQ ID NO: 424636 - DNA, 25 bp, Homo sapien
tatggagggagcaacttacgtgtca

SEQ ID NO: 424637 - DNA, 25 bp, Homo sapien
tagtgcatataggtgttcagtgaac

SEQ ID NO: 424638 - DNA, 25 bp, Homo sapien
taagaactgaagatactacaatggg

SEQ ID NO: 424639 - DNA, 25 bp, Homo sapien
tacaatgggcaacacaaaatccctg

SEQ ID NO: 424640 - DNA, 25 bp, Homo sapien
cccttggctactgggtggaaattca

SEQ ID NO: 424641 - DNA, 25 bp, Homo sapien
cgagcgatgctcagtttgaatgacc

SEQ ID NO: 424642 - DNA, 25 bp, Homo sapien
caaaaaggagaacgcagcttgaagg

SEQ ID NO: 424643 - DNA, 25 bp, Homo sapien
catcactaggacatgctggtggttt

SEQ ID NO: 424644 - DNA, 25 bp, Homo sapien
tcagctgtcaagagatagatccgtg

SEQ ID NO: 424645 - DNA, 25 bp, Homo sapien
gcttagttgcatgggagaggccaca

SEQ ID NO: 424646 - DNA, 25 bp, Homo sapien
caagttggcgttggagtcagctgtc

SEQ ID NO: 424647 - DNA, 25 bp, Homo sapien
ggtatcgagatcactacagacaggt

SEQ ID NO: 424648 - DNA, 25 bp, Homo sapien
tgtagtcagactctccatgggatcc

SEQ ID NO: 424649 - DNA, 25 bp, Homo sapien
tcaggctgcttaggccacagacaag

SEQ ID NO: 424650 - DNA, 25 bp, Homo sapien
gaatatcaccatagcgtggcacagg

SEQ ID NO: 424651 - DNA, 25 bp, Homo sapien
gatgaaggcaattgtcacgacaggg

SEQ ID NO: 424652 - DNA, 25 bp, Homo sapien
ggtcttacaaacaggcatagttcca

SEQ ID NO: 424653 - DNA, 25 bp, Homo sapien
tgatcctttccccagtatgtaatga

SEQ ID NO: 424654 - DNA, 25 bp, Homo sapien
tcagataggtagaaaccatttactc

SEQ ID NO: 424655 - DNA, 25 bp, Homo sapien
tgcttgaggcctagcaataatcagt

SEQ ID NO: 424656 - DNA, 25 bp, Homo sapien
tggaacaaggagagagccagtatcc

SEQ ID NO: 424657 - DNA, 25 bp, Homo sapien
ttcgcgaagctctggaacaaggaga

SEQ ID NO: 424658 - DNA, 25 bp, Homo sapien
cattcgcgaagctctggaacaagga

SEQ ID NO: 424659 - DNA, 25 bp, Homo sapien
aacaaggagagagccagtatccaca

SEQ ID NO: 424660 - DNA, 25 bp, Homo sapien
cgctccccggcctcccgcgagcgac

SEQ ID NO: 424661 - DNA, 25 bp, Homo sapien
ccgctccccggcctcccgcgagcga

SEQ ID NO: 424662 - DNA, 25 bp, Homo sapien
ccctgccgctccccggcctcccgcg

SEQ ID NO: 424663 - DNA, 25 bp, Homo sapien
ctgccgctccccggcctcccgcgag

SEQ ID NO: 424664 - DNA, 25 bp, Homo sapien
cccggctccgctcgccgctcggcac

SEQ ID NO: 424665 - DNA, 25 bp, Homo sapien
gccggcctcgccccccgcgctccgc

SEQ ID NO: 424666 - DNA, 25 bp, Homo sapien
cggcccggctccgctcgccgctcgg

SEQ ID NO: 424667 - DNA, 25 bp, Homo sapien
gcgccggcctcgccccccgcgctcc

SEQ ID NO: 424668 - DNA, 25 bp, Homo sapien
gcgccccacgctgcggccggagccc

SEQ ID NO: 424669 - DNA, 25 bp, Homo sapien
gccggagcccaggtgcgccgtcagc

SEQ ID NO: 424670 - DNA, 25 bp, Homo sapien
gccccacgctgcggccggagcccag

SEQ ID NO: 424671 - DNA, 25 bp, Homo sapien
ccgccgctgcctagccgcccgggca

SEQ ID NO: 424672 - DNA, 25 bp, Homo sapien
gcgtgagctcatcccgggcactcgg

SEQ ID NO: 424673 - DNA, 25 bp, Homo sapien
tcggcaggtggagagagccgcagac

SEQ ID NO: 424674 - DNA, 25 bp, Homo sapien
cagacgcgggcgtgagctcatcccg

SEQ ID NO: 424675 - DNA, 25 bp, Homo sapien
gggcactcggcgcccagaatgcgca

SEQ ID NO: 424676 - DNA, 25 bp, Homo sapien
cgtgctccggcctcagtcacatgga

SEQ ID NO: 424677 - DNA, 25 bp, Homo sapien
aggctcatctttgccgtgctccggc

SEQ ID NO: 424678 - DNA, 25 bp, Homo sapien
tcagtcacatggatccctctgccaa

SEQ ID NO: 424679 - DNA, 25 bp, Homo sapien
gcgggcaggctcatctttgccgtgc

SEQ ID NO: 424680 - DNA, 25 bp, Homo sapien
ggccattcctgagtcatgtcatcct

SEQ ID NO: 424681 - DNA, 25 bp, Homo sapien
tcctgccatccgtttccagctggga

SEQ ID NO: 424682 - DNA, 25 bp, Homo sapien
catgtcatcctctcgtactcggtgc

SEQ ID NO: 424683 - DNA, 25 bp, Homo sapien
acacctcagttcacagttgctcact

SEQ ID NO: 424684 - DNA, 25 bp, Homo sapien
cttgcagacccacgtctgcaccaaa

SEQ ID NO: 424685 - DNA, 25 bp, Homo sapien
gacccacgtctgcaccaaacgacat

SEQ ID NO: 424686 - DNA, 25 bp, Homo sapien
gcagacccacgtctgcaccaaacga

SEQ ID NO: 424687 - DNA, 25 bp, Homo sapien
tggccttgcagacccacgtctgcac

SEQ ID NO: 424688 - DNA, 25 bp, Homo sapien
aagagatgactccagggtgtttgca

SEQ ID NO: 424689 - DNA, 25 bp, Homo sapien
tgctaagtggttcagctgcctcagc

SEQ ID NO: 424690 - DNA, 25 bp, Homo sapien
taaacatcaactccgtgctaagtgg

SEQ ID NO: 424691 - DNA, 25 bp, Homo sapien
ctctcacgggacaaacacacaaagg

SEQ ID NO: 424692 - DNA, 25 bp, Homo sapien
gctgcaggcttgtcgttagaatgtg

SEQ ID NO: 424693 - DNA, 25 bp, Homo sapien
gcttgtcgttagaatgtgcatgtca

SEQ ID NO: 424694 - DNA, 25 bp, Homo sapien
caggcttgtcgttagaatgtgcatg

SEQ ID NO: 424695 - DNA, 25 bp, Homo sapien
ggctgcaggcttgtcgttagaatgt

SEQ ID NO: 424696 - DNA, 25 bp, Homo sapien
caccttgacagtgtttggtctccca

SEQ ID NO: 424697 - DNA, 25 bp, Homo sapien
tgttggcaaaatgccaccttgacag

SEQ ID NO: 424698 - DNA, 25 bp, Homo sapien
aactgctcactctctggcgtctctc

SEQ ID NO: 424699 - DNA, 25 bp, Homo sapien
cttgacagtgtttggtctcccagct

SEQ ID NO: 424700 - DNA, 25 bp, Homo sapien
tgacagccttgtcattcccatctaa

SEQ ID NO: 424701 - DNA, 25 bp, Homo sapien
acagccttgtcattcccatctaatc

SEQ ID NO: 424702 - DNA, 25 bp, Homo sapien
ttgtcattcccatctaatccctggc

SEQ ID NO: 424703 - DNA, 25 bp, Homo sapien
ccttgtcattcccatctaatccctg

SEQ ID NO: 424704 - DNA, 25 bp, Homo sapien
gagaggaattcctgtgcacagccag

SEQ ID NO: 424705 - DNA, 25 bp, Homo sapien
tctgctctagcttccatgtcaaagg

SEQ ID NO: 424706 - DNA, 25 bp, Homo sapien
ggtccctcagtgttgcagctatagc

SEQ ID NO: 424707 - DNA, 25 bp, Homo sapien
gtcaaaggtctcaccctcactcggt

SEQ ID NO: 424708 - DNA, 25 bp, Homo sapien
tgagagctggggaggatcatcctga

SEQ ID NO: 424709 - DNA, 25 bp, Homo sapien
aggtgcaatcttaagaccccagcag

SEQ ID NO: 424710 - DNA, 25 bp, Homo sapien
gagagaaaccactaagagcaggtgc

SEQ ID NO: 424711 - DNA, 25 bp, Homo sapien
gaatatgcagggaaggttgagagct

SEQ ID NO: 424712 - DNA, 25 bp, Homo sapien
aaggcaggttcactttgcagaatca

SEQ ID NO: 424713 - DNA, 25 bp, Homo sapien
aatcagatgccgggggcttgcctca

SEQ ID NO: 424714 - DNA, 25 bp, Homo sapien
aggcaaaaggcaggttcactttgca

SEQ ID NO: 424715 - DNA, 25 bp, Homo sapien
caggttcactttgcagaatcagatg

SEQ ID NO: 424716 - DNA, 25 bp, Homo sapien
ggcctgatcataggccagatccctg

SEQ ID NO: 424717 - DNA, 25 bp, Homo sapien
tcattcattccggacattaacaagc

SEQ ID NO: 424718 - DNA, 25 bp, Homo sapien
caccttcattcattccggacattaa

SEQ ID NO: 424719 - DNA, 25 bp, Homo sapien
tcataggccagatccctggggatgc

SEQ ID NO: 424720 - DNA, 25 bp, Homo sapien
tgttgtccaacgtaatggcttctgt

SEQ ID NO: 424721 - DNA, 25 bp, Homo sapien
gaagctgaatgttagcattatttcc

SEQ ID NO: 424722 - DNA, 25 bp, Homo sapien
tcaaaaatggctaatgttgtccaac

SEQ ID NO: 424723 - DNA, 25 bp, Homo sapien
cttgcagattagtgatactggcgtg

SEQ ID NO: 424724 - DNA, 25 bp, Homo sapien
cagggtgagagttcctacccctgga

SEQ ID NO: 424725 - DNA, 25 bp, Homo sapien
gggtgagagttcctacccctggagc

SEQ ID NO: 424726 - DNA, 25 bp, Homo sapien
tgagagttcctacccctggagcctg

SEQ ID NO: 424727 - DNA, 25 bp, Homo sapien
gtgagagttcctacccctggagcct

SEQ ID NO: 424728 - DNA, 25 bp, Homo sapien
tgttcacaggtagggccgactcttt

SEQ ID NO: 424729 - DNA, 25 bp, Homo sapien
tcacaggtagggccgactctttctt

SEQ ID NO: 424730 - DNA, 25 bp, Homo sapien
tgtgttcacaggtagggccgactct

SEQ ID NO: 424731 - DNA, 25 bp, Homo sapien
ctgtgttcacaggtagggccgactc

SEQ ID NO: 424732 - DNA, 25 bp, Homo sapien
agaatggtgatacacgcctgaccaa

SEQ ID NO: 424733 - DNA, 25 bp, Homo sapien
aatggtgatacacgcctgaccaatt

SEQ ID NO: 424734 - DNA, 25 bp, Homo sapien
ggaagaatggtgatacacgcctgac

SEQ ID NO: 424735 - DNA, 25 bp, Homo sapien
gaagaatggtgatacacgcctgacc

SEQ ID NO: 424736 - DNA, 25 bp, Homo sapien
atacttctcattccaatcttttaaa

SEQ ID NO: 424737 - DNA, 25 bp, Homo sapien
catacttctcattccaatcttttaa

SEQ ID NO: 424738 - DNA, 25 bp, Homo sapien
gagctgaactgaataatgcagaata

SEQ ID NO: 424739 - DNA, 25 bp, Homo sapien
tctgtccaacagcacagttttgctg

SEQ ID NO: 424740 - DNA, 25 bp, Homo sapien
ggtcacctcgggcaactgctcctct

SEQ ID NO: 424741 - DNA, 25 bp, Homo sapien
tgctcctctgtccaacagcacagtt

SEQ ID NO: 424742 - DNA, 25 bp, Homo sapien
agcacagttttgctgcctctaggct

SEQ ID NO: 424743 - DNA, 25 bp, Homo sapien
gaaagtacctgaattcagaaccaca

SEQ ID NO: 424744 - DNA, 25 bp, Homo sapien
gggcaggaaagtacctgaattcaga

SEQ ID NO: 424745 - DNA, 25 bp, Homo sapien
caggaaagtacctgaattcagaacc

SEQ ID NO: 424746 - DNA, 25 bp, Homo sapien
aatggggcaggaaagtacctgaatt

SEQ ID NO: 424747 - DNA, 25 bp, Homo sapien
aggatcctggtcaaaggcccttctc

SEQ ID NO: 424748 - DNA, 25 bp, Homo sapien
tgcaggatcctggtcaaaggccctt

SEQ ID NO: 424749 - DNA, 25 bp, Homo sapien
tatctgaaggattggtatgacaaca

SEQ ID NO: 424750 - DNA, 25 bp, Homo sapien
aagctctcagatgccagtttcaccc

SEQ ID NO: 424751 - DNA, 25 bp, Homo sapien
cagaaagaggttcctgttgccccac

SEQ ID NO: 424752 - DNA, 25 bp, Homo sapien
tcagaaagaggttcctgttgcccca

SEQ ID NO: 424753 - DNA, 25 bp, Homo sapien
catcagcttgctcagtggaattggc

SEQ ID NO: 424754 - DNA, 25 bp, Homo sapien
tctccatttgccagtccccaaactg

SEQ ID NO: 424755 - DNA, 25 bp, Homo sapien
gaattggctgtctgcattggtcctt

SEQ ID NO: 424756 - DNA, 25 bp, Homo sapien
ggtccttttctgattagagcattgc

SEQ ID NO: 424757 - DNA, 25 bp, Homo sapien
gccaagagtgtgctacaactgtcct

SEQ ID NO: 424758 - DNA, 25 bp, Homo sapien
caggctgccaagataaggacacaga

SEQ ID NO: 424759 - DNA, 25 bp, Homo sapien
tgggctatacatggcagtggcagaa

SEQ ID NO: 424760 - DNA, 25 bp, Homo sapien
ttaataatacccaatgccaagagtg

SEQ ID NO: 424761 - DNA, 25 bp, Homo sapien
tctgaagttgaggctttctgaatat

SEQ ID NO: 424762 - DNA, 25 bp, Homo sapien
taagtcatccttaaggaccctggac

SEQ ID NO: 424763 - DNA, 25 bp, Homo sapien
ccctggacccttggaaactgtcaga

SEQ ID NO: 424764 - DNA, 25 bp, Homo sapien
ggaaactgtcagatataggaacata

SEQ ID NO: 424765 - DNA, 25 bp, Homo sapien
caagagagtgtcaaagtagatgatc

SEQ ID NO: 424766 - DNA, 25 bp, Homo sapien
tcatacagatccacttgcaagagag

SEQ ID NO: 424767 - DNA, 25 bp, Homo sapien
tatcatagtcatacagatccacttg

SEQ ID NO: 424768 - DNA, 25 bp, Homo sapien
aatacctggaaagggtatcatagtc

SEQ ID NO: 424769 - DNA, 25 bp, Homo sapien
gaagatggccctaacacaggctgag

SEQ ID NO: 424770 - DNA, 25 bp, Homo sapien
cctcaagcgtctttatttccctgtt

SEQ ID NO: 424771 - DNA, 25 bp, Homo sapien
tggtgcttcccctcaagcgtcttta

SEQ ID NO: 424772 - DNA, 25 bp, Homo sapien
aaggtcatcagtcctgcagcaatcc

SEQ ID NO: 424773 - DNA, 25 bp, Homo sapien
gaccaatacagtggaagagacaagc

SEQ ID NO: 424774 - DNA, 25 bp, Homo sapien
tgtttgcccagttgaccaatacagt

SEQ ID NO: 424775 - DNA, 25 bp, Homo sapien
gcccagttgaccaatacagtggaag

SEQ ID NO: 424776 - DNA, 25 bp, Homo sapien
gaagagacaagcttgaaaagatccc

SEQ ID NO: 424777 - DNA, 25 bp, Homo sapien
tgtggcctgtaggatataaatccat

SEQ ID NO: 424778 - DNA, 25 bp, Homo sapien
tatcagagaccacaccaagaatgag

SEQ ID NO: 424779 - DNA, 25 bp, Homo sapien
gagttggagccactttccagcaacg

SEQ ID NO: 424780 - DNA, 25 bp, Homo sapien
cagccaacaggaacgaagctacgga

SEQ ID NO: 424781 - DNA, 25 bp, Homo sapien
tttatacagccgactcaaaacaggg

SEQ ID NO: 424782 - DNA, 25 bp, Homo sapien
gggatctggtaaagaatggtcccag

SEQ ID NO: 424783 - DNA, 25 bp, Homo sapien
tcaaagccaaggttcacaggggatc

SEQ ID NO: 424784 - DNA, 25 bp, Homo sapien
tgagaagcagctttatacagccgac

SEQ ID NO: 424785 - DNA, 25 bp, Homo sapien
ttcatgatgtcgctggaacccagca

SEQ ID NO: 424786 - DNA, 25 bp, Homo sapien
cagcgggtattgactgcactcttca

SEQ ID NO: 424787 - DNA, 25 bp, Homo sapien
tttccgcagcgggtattgactgcac

SEQ ID NO: 424788 - DNA, 25 bp, Homo sapien
tcatgatgtcgctggaacccagcac

SEQ ID NO: 424789 - DNA, 25 bp, Homo sapien
gaggtagagaaggtcgttgcttcca

SEQ ID NO: 424790 - DNA, 25 bp, Homo sapien
gagaaggtcgttgcttccatgacat

SEQ ID NO: 424791 - DNA, 25 bp, Homo sapien
tagagaaggtcgttgcttccatgac

SEQ ID NO: 424792 - DNA, 25 bp, Homo sapien
aaggtcgttgcttccatgacatggg

SEQ ID NO: 424793 - DNA, 25 bp, Homo sapien
tggggagcgggtagagccggtgcag

SEQ ID NO: 424794 - DNA, 25 bp, Homo sapien
ccgagttccagtggggagcgggtag

SEQ ID NO: 424795 - DNA, 25 bp, Homo sapien
agaggcacggagcacctcggaagcc

SEQ ID NO: 424796 - DNA, 25 bp, Homo sapien
tcccatagatgactcaggagagagg

SEQ ID NO: 424797 - DNA, 25 bp, Homo sapien
caggctccagatcccatagatgact

SEQ ID NO: 424798 - DNA, 25 bp, Homo sapien
ccagatcccatagatgactcaggag

SEQ ID NO: 424799 - DNA, 25 bp, Homo sapien
aaaggttctcagaatgaatagcatt

SEQ ID NO: 424800 - DNA, 25 bp, Homo sapien
caggccccattatgagaggagcttg

SEQ ID NO: 424801 - DNA, 25 bp, Homo sapien
ttctcagaatgaatagcatttccca

SEQ ID NO: 424802 - DNA, 25 bp, Homo sapien
tgagtgacttcatcaggccccatta

SEQ ID NO: 424803 - DNA, 25 bp, Homo sapien
tggccccgatacaatgatgatcaca

SEQ ID NO: 424804 - DNA, 25 bp, Homo sapien
taggccatagtacccatggccccga

SEQ ID NO: 424805 - DNA, 25 bp, Homo sapien
ccttgagggtataggccatagtacc

SEQ ID NO: 424806 - DNA, 25 bp, Homo sapien
gcactaacatccttgagggtatagg

SEQ ID NO: 424807 - DNA, 25 bp, Homo sapien
gacgagaatacaagcagcagagcct

SEQ ID NO: 424808 - DNA, 25 bp, Homo sapien
gaaacgacgagaatacaagcagcag

SEQ ID NO: 424809 - DNA, 25 bp, Homo sapien
gaaagagaaacgacgagaatacaag

SEQ ID NO: 424810 - DNA, 25 bp, Homo sapien
tgtggaaagagaaacgacgagaata

SEQ ID NO: 424811 - DNA, 25 bp, Homo sapien
gaatactcatgagataggagggctg

SEQ ID NO: 424812 - DNA, 25 bp, Homo sapien
gaggatgtggaaaggagacaagaac

SEQ ID NO: 424813 - DNA, 25 bp, Homo sapien
gctgtgccttctagaatactcatga

SEQ ID NO: 424814 - DNA, 25 bp, Homo sapien
tggaaaggagacaagaacgggccac

SEQ ID NO: 424815 - DNA, 25 bp, Homo sapien
tcttctaagggggatgaatgccact

SEQ ID NO: 424816 - DNA, 25 bp, Homo sapien
agccaacaactccttcaatctagag

SEQ ID NO: 424817 - DNA, 25 bp, Homo sapien
gaatgccactgaggtgccagacagg

SEQ ID NO: 424818 - DNA, 25 bp, Homo sapien
cttgagtaatacgtagagggaatta

SEQ ID NO: 424819 - DNA, 25 bp, Homo sapien
tcccatggggacgtgctggataaac

SEQ ID NO: 424820 - DNA, 25 bp, Homo sapien
gcagagacatttggatatgtttcct

SEQ ID NO: 424821 - DNA, 25 bp, Homo sapien
cagcaggcacaggacgagtcccatg

SEQ ID NO: 424822 - DNA, 25 bp, Homo sapien
agcattgatggaatcggaggcgata

SEQ ID NO: 424823 - DNA, 25 bp, Homo sapien
agcccagacctgacttagcttatga

SEQ ID NO: 424824 - DNA, 25 bp, Homo sapien
cccagacctgacttagcttatgagc

SEQ ID NO: 424825 - DNA, 25 bp, Homo sapien
gcagcccagacctgacttagcttat

SEQ ID NO: 424826 - DNA, 25 bp, Homo sapien
agcagcccagacctgacttagctta

SEQ ID NO: 424827 - DNA, 25 bp, Homo sapien
cttgtgaagttttaaccggtgtgag

SEQ ID NO: 424828 - DNA, 25 bp, Homo sapien
tgtgagtaggtttccaagaacctgg

SEQ ID NO: 424829 - DNA, 25 bp, Homo sapien
gtttccaagaacctggtcatcccca

SEQ ID NO: 424830 - DNA, 25 bp, Homo sapien
catccccacaggatctgatgaaaat

SEQ ID NO: 424831 - DNA, 25 bp, Homo sapien
cctgttcgccgactacttgatgtga

SEQ ID NO: 424832 - DNA, 25 bp, Homo sapien
tagaaatggtccctagcacaatatt

SEQ ID NO: 424833 - DNA, 25 bp, Homo sapien
gatgcccgcttctggagataatgac

SEQ ID NO: 424834 - DNA, 25 bp, Homo sapien
tgtgaacagagcacggccagtgact

SEQ ID NO: 424835 - DNA, 25 bp, Homo sapien
cccaggatccagatgacatcaggac

SEQ ID NO: 424836 - DNA, 25 bp, Homo sapien
tagattccgaatcagctgccaaggc

SEQ ID NO: 424837 - DNA, 25 bp, Homo sapien
gagacggggctcaacaggcctgtct

SEQ ID NO: 424838 - DNA, 25 bp, Homo sapien
ggcctgtctacaaacggccttgccg

SEQ ID NO: 424839 - DNA, 25 bp, Homo sapien
caaacacaaagtgtcgttgtgtcta

SEQ ID NO: 424840 - DNA, 25 bp, Homo sapien
tcctcgctgtctgttacacacaaac

SEQ ID NO: 424841 - DNA, 25 bp, Homo sapien
caaagtgtcgttgtgtctagagggc

SEQ ID NO: 424842 - DNA, 25 bp, Homo sapien
acacaaacacaaagtgtcgttgtgt

SEQ ID NO: 424843 - DNA, 25 bp, Homo sapien
ccgtggggaagtgctagcagttcac

SEQ ID NO: 424844 - DNA, 25 bp, Homo sapien
tcacaaagcaactcagggccctgct

SEQ ID NO: 424845 - DNA, 25 bp, Homo sapien
cctgctcagaagtgagttttttcct

SEQ ID NO: 424846 - DNA, 25 bp, Homo sapien
gggaagtgctagcagttcacaaagc

SEQ ID NO: 424847 - DNA, 25 bp, Homo sapien
tcttcaaatgggcactgcatacaat

SEQ ID NO: 424848 - DNA, 25 bp, Homo sapien
aaggactgagtgatcttgatggtga

SEQ ID NO: 424849 - DNA, 25 bp, Homo sapien
ggaccaaggactgagtgatcttgat

SEQ ID NO: 424850 - DNA, 25 bp, Homo sapien
tacaatcaggtccacagggatgcag

SEQ ID NO: 424851 - DNA, 25 bp, Homo sapien
ctgaaagcatcaaccttgatggcag

SEQ ID NO: 424852 - DNA, 25 bp, Homo sapien
acagagatgcagtcccggtttgggc

SEQ ID NO: 424853 - DNA, 25 bp, Homo sapien
catctttcccgtgtctgcccagaaa

SEQ ID NO: 424854 - DNA, 25 bp, Homo sapien
gaaagcatcaaccttgatggcagga

SEQ ID NO: 424855 - DNA, 25 bp, Homo sapien
gccttgagtggtattggatacccca

SEQ ID NO: 424856 - DNA, 25 bp, Homo sapien
tgagtggtattggataccccagaac

SEQ ID NO: 424857 - DNA, 25 bp, Homo sapien
tattggataccccagaaccgcccat

SEQ ID NO: 424858 - DNA, 25 bp, Homo sapien
gcctgccttgagtggtattggatac

SEQ ID NO: 424859 - DNA, 25 bp, Homo sapien
gccacttggacctgagttgctcggt

SEQ ID NO: 424860 - DNA, 25 bp, Homo sapien
agtcacgacctggtcgaaccggcca

SEQ ID NO: 424861 - DNA, 25 bp, Homo sapien
ctcttgcttggtgcgtgctggctga

SEQ ID NO: 424862 - DNA, 25 bp, Homo sapien
agttgctcggtgttgccctcagggc

SEQ ID NO: 424863 - DNA, 25 bp, Homo sapien
ctggcagcagtcgctgtatccaggg

SEQ ID NO: 424864 - DNA, 25 bp, Homo sapien
gaaagattctcctgactgcagggca

SEQ ID NO: 424865 - DNA, 25 bp, Homo sapien
gaaatgcggccacttttaataggca

SEQ ID NO: 424866 - DNA, 25 bp, Homo sapien
tcacagctgcactacggaaagattc

SEQ ID NO: 424867 - DNA, 25 bp, Homo sapien
gagcgcctgagaatgtctgaccaag

SEQ ID NO: 424868 - DNA, 25 bp, Homo sapien
taacaggcaacagatgtcacttgct

SEQ ID NO: 424869 - DNA, 25 bp, Homo sapien
tccaactgagcgaggcgttgctcca

SEQ ID NO: 424870 - DNA, 25 bp, Homo sapien
caggggacccggctgcttggacctc

SEQ ID NO: 424871 - DNA, 25 bp, Homo sapien
gatgtcacttgcttgacaatgaaag

SEQ ID NO: 424872 - DNA, 25 bp, Homo sapien
caaatcgaggaacgagagaatgggt

SEQ ID NO: 424873 - DNA, 25 bp, Homo sapien
ctcttgcaaatcgaggaacgagaga

SEQ ID NO: 424874 - DNA, 25 bp, Homo sapien
aatgggttgctagtgagaacaggca

SEQ ID NO: 424875 - DNA, 25 bp, Homo sapien
agagaatgggttgctagtgagaaca

SEQ ID NO: 424876 - DNA, 25 bp, Homo sapien
tgtggtaaccagctgcacacaggag

SEQ ID NO: 424877 - DNA, 25 bp, Homo sapien
caggaggggctgattccacctgcag

SEQ ID NO: 424878 - DNA, 25 bp, Homo sapien
tggtaaccagctgcacacaggaggg

SEQ ID NO: 424879 - DNA, 25 bp, Homo sapien
ggccacgcacacctctcggttctcc

SEQ ID NO: 424880 - DNA, 25 bp, Homo sapien
agtcacagggggagccatcgtacac

SEQ ID NO: 424881 - DNA, 25 bp, Homo sapien
cagtcacagggggagccatcgtaca

SEQ ID NO: 424882 - DNA, 25 bp, Homo sapien
tcagtcacagggggagccatcgtac

SEQ ID NO: 424883 - DNA, 25 bp, Homo sapien
tattctgttgctatcgttcctgtag

SEQ ID NO: 424884 - DNA, 25 bp, Homo sapien
atcgttcctgtagttgtcagcactg

SEQ ID NO: 424885 - DNA, 25 bp, Homo sapien
tccacgcccagcagtgtcgctgctg

SEQ ID NO: 424886 - DNA, 25 bp, Homo sapien
cgctgctgccgccatgtattctgtt

SEQ ID NO: 424887 - DNA, 25 bp, Homo sapien
catttaaactggagggcaagggctc

SEQ ID NO: 424888 - DNA, 25 bp, Homo sapien
cagtgtctggctagcgcatgttgaa

SEQ ID NO: 424889 - DNA, 25 bp, Homo sapien
gagcattgctcagtcagggttacat

SEQ ID NO: 424890 - DNA, 25 bp, Homo sapien
ccacacggctgggagatgtcagagc

SEQ ID NO: 424891 - DNA, 25 bp, Homo sapien
tcagcatgctggaaaaccttggaca

SEQ ID NO: 424892 - DNA, 25 bp, Homo sapien
ccatggtaagtgttctcagcatgct

SEQ ID NO: 424893 - DNA, 25 bp, Homo sapien
tccctgtctcttgcttcagtccgag

SEQ ID NO: 424894 - DNA, 25 bp, Homo sapien
tccgaggaccgttgaaagactaagc

SEQ ID NO: 424895 - DNA, 25 bp, Homo sapien
ctggaaagcccgaaggtcggcccag

SEQ ID NO: 424896 - DNA, 25 bp, Homo sapien
atgtacccagttttaccgctgttgg

SEQ ID NO: 424897 - DNA, 25 bp, Homo sapien
atattcaagaaggttcagggtccca

SEQ ID NO: 424898 - DNA, 25 bp, Homo sapien
tcagggtcccatgtacccagtttta

SEQ ID NO: 424899 - DNA, 25 bp, Homo sapien
gcccacataagtagctctcggcccc

SEQ ID NO: 424900 - DNA, 25 bp, Homo sapien
atgcccacataagtagctctcggcc

SEQ ID NO: 424901 - DNA, 25 bp, Homo sapien
aatgcccacataagtagctctcggc

SEQ ID NO: 424902 - DNA, 25 bp, Homo sapien
ccacataagtagctctcggccccag

SEQ ID NO: 424903 - DNA, 25 bp, Homo sapien
cagtgacgtcttcatgtggagaaaa

SEQ ID NO: 424904 - DNA, 25 bp, Homo sapien
gagagctccacgtcttgaatataat

SEQ ID NO: 424905 - DNA, 25 bp, Homo sapien
gcaggacgggaaaaagagagctcca

SEQ ID NO: 424906 - DNA, 25 bp, Homo sapien
tgaatataatcagggactcgggact

SEQ ID NO: 424907 - DNA, 25 bp, Homo sapien
cttctccatccaaagaaatcttact

SEQ ID NO: 424908 - DNA, 25 bp, Homo sapien
aggacgtggcttgaatcagttgttt

SEQ ID NO: 424909 - DNA, 25 bp, Homo sapien
aaagaaatcttactcagaagactgt

SEQ ID NO: 424910 - DNA, 25 bp, Homo sapien
tgaatcagttgtttgcaaccctgtc

SEQ ID NO: 424911 - DNA, 25 bp, Homo sapien
ctgtgcccagacacccatagggtga

SEQ ID NO: 424912 - DNA, 25 bp, Homo sapien
cagactcctggcatgacaacaagtg

SEQ ID NO: 424913 - DNA, 25 bp, Homo sapien
gaggcagtgcgtgttcttgcatcat

SEQ ID NO: 424914 - DNA, 25 bp, Homo sapien
gacaacaagtgtcgtggccgagaca

SEQ ID NO: 424915 - DNA, 25 bp, Homo sapien
tccaggagctaactgcacacagtgc

SEQ ID NO: 424916 - DNA, 25 bp, Homo sapien
ttagcgcctacctgagtggatctcg

SEQ ID NO: 424917 - DNA, 25 bp, Homo sapien
ctcgctgggcctgtgaacccctcag

SEQ ID NO: 424918 - DNA, 25 bp, Homo sapien
gctcctcatgccctaagcctactga

SEQ ID NO: 424919 - DNA, 25 bp, Homo sapien
tgccacgccaggcccactggagctg

SEQ ID NO: 424920 - DNA, 25 bp, Homo sapien
agcctctctgctcccatggaagcaa

SEQ ID NO: 424921 - DNA, 25 bp, Homo sapien
cagacccactcagctctgtgcgcag

SEQ ID NO: 424922 - DNA, 25 bp, Homo sapien
tgcccaagactgtggtcagcctctc

SEQ ID NO: 424923 - DNA, 25 bp, Homo sapien
cttcctggtctttaagattgcagct

SEQ ID NO: 424924 - DNA, 25 bp, Homo sapien
acttcctggtctttaagattgcagc

SEQ ID NO: 424925 - DNA, 25 bp, Homo sapien
cacttcctggtctttaagattgcag

SEQ ID NO: 424926 - DNA, 25 bp, Homo sapien
ctcacttcctggtctttaagattgc

SEQ ID NO: 424927 - DNA, 25 bp, Homo sapien
gcgggaggtcagtgtttagggagga

SEQ ID NO: 424928 - DNA, 25 bp, Homo sapien
gccagttgcttccgggaatttattc

SEQ ID NO: 424929 - DNA, 25 bp, Homo sapien
ggaaatgtggaatacgcgtttcttc

SEQ ID NO: 424930 - DNA, 25 bp, Homo sapien
tgctagtgaagactgcgggaggtca

SEQ ID NO: 424931 - DNA, 25 bp, Homo sapien
aatacgcacaagcaggcgaaccaac

SEQ ID NO: 424932 - DNA, 25 bp, Homo sapien
tgaccccactgaaagaaatacgcac

SEQ ID NO: 424933 - DNA, 25 bp, Homo sapien
tacagggctacccatggacacaatg

SEQ ID NO: 424934 - DNA, 25 bp, Homo sapien
caatgaggggcctgtaggagcaaac

SEQ ID NO: 424935 - DNA, 25 bp, Homo sapien
gctttgtccattaaacaatcgggaa

SEQ ID NO: 424936 - DNA, 25 bp, Homo sapien
tggcagatgagaccctggccagtct

SEQ ID NO: 424937 - DNA, 25 bp, Homo sapien
gcagccgtggagacaaaaactacag

SEQ ID NO: 424938 - DNA, 25 bp, Homo sapien
tcaagaacaaggactggtgctcagt

SEQ ID NO: 424939 - DNA, 25 bp, Homo sapien
catgggaccaccaaccaaaagcagc

SEQ ID NO: 424940 - DNA, 25 bp, Homo sapien
gatgcaggtgaggtgaggaccggga

SEQ ID NO: 424941 - DNA, 25 bp, Homo sapien
ctgccagggttgatgagccctccct

SEQ ID NO: 424942 - DNA, 25 bp, Homo sapien
gagataattccagatgcgggcacca

SEQ ID NO: 424943 - DNA, 25 bp, Homo sapien
ggaagccccatccaatggtactgga

SEQ ID NO: 424944 - DNA, 25 bp, Homo sapien
tccaatggtactggagagtcaccag

SEQ ID NO: 424945 - DNA, 25 bp, Homo sapien
ggagagtcaccagtcctccagagca

SEQ ID NO: 424946 - DNA, 25 bp, Homo sapien
agagtcaccagtcctccagagcaca

SEQ ID NO: 424947 - DNA, 25 bp, Homo sapien
tttggcgtcctcagcttgctcttct

SEQ ID NO: 424948 - DNA, 25 bp, Homo sapien
tctgcagatcccaaacaagattctt

SEQ ID NO: 424949 - DNA, 25 bp, Homo sapien
aacaagattctttggcgtcctcagc

SEQ ID NO: 424950 - DNA, 25 bp, Homo sapien
ttgttgctatctgcagatcccaaac

SEQ ID NO: 424951 - DNA, 25 bp, Homo sapien
tttgcgtacaaaataccccagctga

SEQ ID NO: 424952 - DNA, 25 bp, Homo sapien
ttgcgtacaaaataccccagctgaa

SEQ ID NO: 424953 - DNA, 25 bp, Homo sapien
actttgcgtacaaaataccccagct

SEQ ID NO: 424954 - DNA, 25 bp, Homo sapien
tgaactttgcgtacaaaatacccca

SEQ ID NO: 424955 - DNA, 25 bp, Homo sapien
tctccaccgtccagggtcatgttta

SEQ ID NO: 424956 - DNA, 25 bp, Homo sapien
agagaaggcccatctaattgcaggg

SEQ ID NO: 424957 - DNA, 25 bp, Homo sapien
ccatggctgaaaacgagggtgctga

SEQ ID NO: 424958 - DNA, 25 bp, Homo sapien
ctaattgcagggcttttgttttcct

SEQ ID NO: 424959 - DNA, 25 bp, Homo sapien
tttctctgccctgcatcggtcacca

SEQ ID NO: 424960 - DNA, 25 bp, Homo sapien
ctttctctgccctgcatcggtcacc

SEQ ID NO: 424961 - DNA, 25 bp, Homo sapien
ttctctgccctgcatcggtcaccat

SEQ ID NO: 424962 - DNA, 25 bp, Homo sapien
gcagagaatcttttggaacaggcct

SEQ ID NO: 424963 - DNA, 25 bp, Homo sapien
gaacaggccttgaatgaatccccat

SEQ ID NO: 424964 - DNA, 25 bp, Homo sapien
gaacatgtgcctggtgctgagaacc

SEQ ID NO: 424965 - DNA, 25 bp, Homo sapien
ttcgtctaagtcatgggaagccacg

SEQ ID NO: 424966 - DNA, 25 bp, Homo sapien
tgaacctggagtgagctttcctgct

SEQ ID NO: 424967 - DNA, 25 bp, Homo sapien
tacctgcctgtgttgccctgaaatg

SEQ ID NO: 424968 - DNA, 25 bp, Homo sapien
tgtctttaccgtagccaaggcagta

SEQ ID NO: 424969 - DNA, 25 bp, Homo sapien
agggagcgctgcttctacagagaca

SEQ ID NO: 424970 - DNA, 25 bp, Homo sapien
caatcccagcaagaagaaatctgat

SEQ ID NO: 424971 - DNA, 25 bp, Homo sapien
gctgactgtaggtgaggctgaaaac

SEQ ID NO: 424972 - DNA, 25 bp, Homo sapien
tctgatggagccacttgaaatggta

SEQ ID NO: 424973 - DNA, 25 bp, Homo sapien
gaacacttgaatgtaaagggccacc

SEQ ID NO: 424974 - DNA, 25 bp, Homo sapien
agcccagctcagtctttgcacgtca

SEQ ID NO: 424975 - DNA, 25 bp, Homo sapien
ccttgcaacgtcctggaaaatgtgc

SEQ ID NO: 424976 - DNA, 25 bp, Homo sapien
cacactagtgaaggcaaagcagggt

SEQ ID NO: 424977 - DNA, 25 bp, Homo sapien
tgccgttcctccttaggtgcagtgt

SEQ ID NO: 424978 - DNA, 25 bp, Homo sapien
aggtgtgtgccacgacaaccagcta

SEQ ID NO: 424979 - DNA, 25 bp, Homo sapien
gtgtgtgccacgacaaccagctaat

SEQ ID NO: 424980 - DNA, 25 bp, Homo sapien
accagctaatttttgtgcttttagt

SEQ ID NO: 424981 - DNA, 25 bp, Homo sapien
tacaggtgtgtgccacgacaaccag

SEQ ID NO: 424982 - DNA, 25 bp, Homo sapien
agaaatatacaacctcggcgctgcc

SEQ ID NO: 424983 - DNA, 25 bp, Homo sapien
tagagagtaacgtggcgatgccctg

SEQ ID NO: 424984 - DNA, 25 bp, Homo sapien
ttccaggtaccagcaatgccagggt

SEQ ID NO: 424985 - DNA, 25 bp, Homo sapien
caaaaactcctcgtgttgggcaagt

SEQ ID NO: 424986 - DNA, 25 bp, Homo sapien
ccttggtggcaaacagacctggctc

SEQ ID NO: 424987 - DNA, 25 bp, Homo sapien
tactcgacacagcaggtcggctggc

SEQ ID NO: 424988 - DNA, 25 bp, Homo sapien
tgtattagaaccttagcctcgcgca

SEQ ID NO: 424989 - DNA, 25 bp, Homo sapien
gaatggagctttaccccttggtggc

SEQ ID NO: 424990 - DNA, 25 bp, Homo sapien
taagcacctactgcatgtcagggcc

SEQ ID NO: 424991 - DNA, 25 bp, Homo sapien
taagccctggtatgcaacagtcaac

SEQ ID NO: 424992 - DNA, 25 bp, Homo sapien
taagggcggttatggaagacctctc

SEQ ID NO: 424993 - DNA, 25 bp, Homo sapien
tcaactagacagagagagtcttggc

SEQ ID NO: 424994 - DNA, 25 bp, Homo sapien
ggtgtcagggtgaggagtgagggtg

SEQ ID NO: 424995 - DNA, 25 bp, Homo sapien
tgtcagggtgaggagtgagggtgtc

SEQ ID NO: 424996 - DNA, 25 bp, Homo sapien
agggtgtcagggtgaggagtgaggg

SEQ ID NO: 424997 - DNA, 25 bp, Homo sapien
gtcagggtgaggagtgagggtgtcc

SEQ ID NO: 424998 - DNA, 25 bp, Homo sapien
tgcagtgcttcaggcgcagcaactc

SEQ ID NO: 424999 - DNA, 25 bp, Homo sapien
gtgcttcaggcgcagcaactctttc

SEQ ID NO: 425000 - DNA, 25 bp, Homo sapien
gcttcaggcgcagcaactctttcat

SEQ ID NO: 425001 - DNA, 25 bp, Homo sapien
tgtttgcagtgcttcaggcgcagca

SEQ ID NO: 425002 - DNA, 25 bp, Homo sapien
tttattcaacagtgtcctgggctgc

SEQ ID NO: 425003 - DNA, 25 bp, Homo sapien
gagatgatcccagtgatgcaggaca

SEQ ID NO: 425004 - DNA, 25 bp, Homo sapien
aacattgtgcttccctgcttacagg

SEQ ID NO: 425005 - DNA, 25 bp, Homo sapien
taagattgaagcatagcccgggagg

SEQ ID NO: 425006 - DNA, 25 bp, Homo sapien
tttattgaagcggccggctgtgcac

SEQ ID NO: 425007 - DNA, 25 bp, Homo sapien
tacaggctgtgcgcccacagtagca

SEQ ID NO: 425008 - DNA, 25 bp, Homo sapien
tgaagcggccggctgtgcacagcag

SEQ ID NO: 425009 - DNA, 25 bp, Homo sapien
caggctgtgcgcccacagtagcagc

SEQ ID NO: 425010 - DNA, 25 bp, Homo sapien
cacaggtcggtgtgtcctatggaaa

SEQ ID NO: 425011 - DNA, 25 bp, Homo sapien
tgccctggacctattttagctagtg

SEQ ID NO: 425012 - DNA, 25 bp, Homo sapien
ggtgaactgacttgacacaggtcgg

SEQ ID NO: 425013 - DNA, 25 bp, Homo sapien
tatggaaactagcatctgccctgga

SEQ ID NO: 425014 - DNA, 25 bp, Homo sapien
gaagggcggagatctgttttccgta

SEQ ID NO: 425015 - DNA, 25 bp, Homo sapien
atctgttttccgtaactacttcctg

SEQ ID NO: 425016 - DNA, 25 bp, Homo sapien
tctgttttccgtaactacttcctgc

SEQ ID NO: 425017 - DNA, 25 bp, Homo sapien
tgcagaagggcggagatctgttttc

SEQ ID NO: 425018 - DNA, 25 bp, Homo sapien
tccgtgtcagtggacaggatgggct

SEQ ID NO: 425019 - DNA, 25 bp, Homo sapien
tctccgtgtcagtggacaggatggg

SEQ ID NO: 425020 - DNA, 25 bp, Homo sapien
gacgatttcattctccgtgtcagtg

SEQ ID NO: 425021 - DNA, 25 bp, Homo sapien
attctccgtgtcagtggacaggatg

SEQ ID NO: 425022 - DNA, 25 bp, Homo sapien
cgttaactcatggtaggcaaagcca

SEQ ID NO: 425023 - DNA, 25 bp, Homo sapien
gagtggccaacgttcattcatgtca

SEQ ID NO: 425024 - DNA, 25 bp, Homo sapien
cctaggcgttatagattgtgacccc

SEQ ID NO: 425025 - DNA, 25 bp, Homo sapien
tcccatccgggagaaggtaccatat

SEQ ID NO: 425026 - DNA, 25 bp, Homo sapien
ttattttaaataggtagcagaggtc

SEQ ID NO: 425027 - DNA, 25 bp, Homo sapien
tggttgtagtgcccttcctttgtgc

SEQ ID NO: 425028 - DNA, 25 bp, Homo sapien
aaataggtagcagaggtcttccaaa

SEQ ID NO: 425029 - DNA, 25 bp, Homo sapien
aagctttactgatattggttgtggt

SEQ ID NO: 425030 - DNA, 25 bp, Homo sapien
tattggagggccttttgaacctgtc

SEQ ID NO: 425031 - DNA, 25 bp, Homo sapien
tactgctcaaaaggagttcaagggc

SEQ ID NO: 425032 - DNA, 25 bp, Homo sapien
catgcactgtgcagatgacttacac

SEQ ID NO: 425033 - DNA, 25 bp, Homo sapien
ctgtgtgcccaagtaggtgttccct

SEQ ID NO: 425034 - DNA, 25 bp, Homo sapien
gaaccaaggtaccatgcaaagctgg

SEQ ID NO: 425035 - DNA, 25 bp, Homo sapien
ttatctagatcaccgagaaccaagg

SEQ ID NO: 425036 - DNA, 25 bp, Homo sapien
tctataagccagtttgacagcacgc

SEQ ID NO: 425037 - DNA, 25 bp, Homo sapien
tatagtaggcgcagtgattctggcc

SEQ ID NO: 425038 - DNA, 25 bp, Homo sapien
tcaactaaaagaccctgaaacagag

SEQ ID NO: 425039 - DNA, 25 bp, Homo sapien
tcattagggaattggcgagaacccc

SEQ ID NO: 425040 - DNA, 25 bp, Homo sapien
gagaaaatgtatacccaggagagct

SEQ ID NO: 425041 - DNA, 25 bp, Homo sapien
tcgtggcaatttgaagaacatagtc

SEQ ID NO: 425042 - DNA, 25 bp, Homo sapien
tctaatgcctggaagtaacgtgatc

SEQ ID NO: 425043 - DNA, 25 bp, Homo sapien
taacgtgatccagtatagagccata

SEQ ID NO: 425044 - DNA, 25 bp, Homo sapien
cctagcggcgagtcccttgggatac

SEQ ID NO: 425045 - DNA, 25 bp, Homo sapien
gtatatagaaccatgtttaggccag

SEQ ID NO: 425046 - DNA, 25 bp, Homo sapien
cacaggaaggagcttgcaattggct

SEQ ID NO: 425047 - DNA, 25 bp, Homo sapien
tcctttgaccaagagcagcttaggc

SEQ ID NO: 425048 - DNA, 25 bp, Homo sapien
tatgagctacgaatgggcagtcgaa

SEQ ID NO: 425049 - DNA, 25 bp, Homo sapien
tattgggctggccacttgtctacca

SEQ ID NO: 425050 - DNA, 25 bp, Homo sapien
tgcttcaaggcacctaaaccgtggg

SEQ ID NO: 425051 - DNA, 25 bp, Homo sapien
gggaactgaccgcttagccaaaggc

SEQ ID NO: 425052 - DNA, 25 bp, Homo sapien
agaatgtgcttcaaggcacctaaac

SEQ ID NO: 425053 - DNA, 25 bp, Homo sapien
ccgtggggaactgaccgcttagcca

SEQ ID NO: 425054 - DNA, 25 bp, Homo sapien
cgtgggacccgggtgcaggtctctc

SEQ ID NO: 425055 - DNA, 25 bp, Homo sapien
tgcaaaggggactctcacccatcca

SEQ ID NO: 425056 - DNA, 25 bp, Homo sapien
gctcgttagagcagtgggtcccaca

SEQ ID NO: 425057 - DNA, 25 bp, Homo sapien
gaggcagctgtactatggacacttg

SEQ ID NO: 425058 - DNA, 25 bp, Homo sapien
aaagaggcactggttagggttagag

SEQ ID NO: 425059 - DNA, 25 bp, Homo sapien
aggcactggttagggttagagctcg

SEQ ID NO: 425060 - DNA, 25 bp, Homo sapien
aagaggcactggttagggttagagc

SEQ ID NO: 425061 - DNA, 25 bp, Homo sapien
gcactggttagggttagagctcggt

SEQ ID NO: 425062 - DNA, 25 bp, Homo sapien
cagctctttattggtacttcctcag

SEQ ID NO: 425063 - DNA, 25 bp, Homo sapien
tattggtacttcctcagtgttacag

SEQ ID NO: 425064 - DNA, 25 bp, Homo sapien
tacttcctcagtgttacagatctta

SEQ ID NO: 425065 - DNA, 25 bp, Homo sapien
agtgttagcagctctttattggtac

SEQ ID NO: 425066 - DNA, 25 bp, Homo sapien
tttgcccaaagattcaagggtgagc

SEQ ID NO: 425067 - DNA, 25 bp, Homo sapien
tgctggttgccagatgatgcaggac

SEQ ID NO: 425068 - DNA, 25 bp, Homo sapien
tgcttcaccgtctcttgctgtcttg

SEQ ID NO: 425069 - DNA, 25 bp, Homo sapien
gatgccgctccttgcagatcagggc

SEQ ID NO: 425070 - DNA, 25 bp, Homo sapien
ctatagaccgccaagcctaaagcag

SEQ ID NO: 425071 - DNA, 25 bp, Homo sapien
aagcctaaagcaggcccgtcacgtt

SEQ ID NO: 425072 - DNA, 25 bp, Homo sapien
agcagtaaatccaaccacaacacct

SEQ ID NO: 425073 - DNA, 25 bp, Homo sapien
cgtcacgttggatgccagatagaaa

SEQ ID NO: 425074 - DNA, 25 bp, Homo sapien
tcttcgttgacggtgacacactgca

SEQ ID NO: 425075 - DNA, 25 bp, Homo sapien
gggtctagggatcgctgattctgca

SEQ ID NO: 425076 - DNA, 25 bp, Homo sapien
tgccgggtgtcctggtcttcgttga

SEQ ID NO: 425077 - DNA, 25 bp, Homo sapien
caactggtgcttcctcgaatgttct

SEQ ID NO: 425078 - DNA, 25 bp, Homo sapien
caggcaaaagtcgtctcccatacac

SEQ ID NO: 425079 - DNA, 25 bp, Homo sapien
atgcaggcaaaagtcgtctcccata

SEQ ID NO: 425080 - DNA, 25 bp, Homo sapien
aagggagaggaatgcaggcaaaagt

SEQ ID NO: 425081 - DNA, 25 bp, Homo sapien
gcaaaagtcgtctcccatacacagc

SEQ ID NO: 425082 - DNA, 25 bp, Homo sapien
cagtgcacgcaggaccgcacggtgt

SEQ ID NO: 425083 - DNA, 25 bp, Homo sapien
cttctgcaggggtgaaaacagtatt

SEQ ID NO: 425084 - DNA, 25 bp, Homo sapien
aaacagtatttgaagcccctgtgac

SEQ ID NO: 425085 - DNA, 25 bp, Homo sapien
aggaccgcacggtgtcttctgcagg

SEQ ID NO: 425086 - DNA, 25 bp, Homo sapien
gattctgattaaagcccctgtgact

SEQ ID NO: 425087 - DNA, 25 bp, Homo sapien
ccagactagcagcaataaggattct

SEQ ID NO: 425088 - DNA, 25 bp, Homo sapien
attctgattctgattaaagcccctg

SEQ ID NO: 425089 - DNA, 25 bp, Homo sapien
cactgccggtctgtgtccagactag

SEQ ID NO: 425090 - DNA, 25 bp, Homo sapien
tgggagagggcgtgaaatcctatca

SEQ ID NO: 425091 - DNA, 25 bp, Homo sapien
cttccctccactcgcccgagccggg

SEQ ID NO: 425092 - DNA, 25 bp, Homo sapien
gaaagtccatccttgctgcttccct

SEQ ID NO: 425093 - DNA, 25 bp, Homo sapien
gagggcgtgaaatcctatcagcagg

SEQ ID NO: 425094 - DNA, 25 bp, Homo sapien
tatcaccccaggaacgaggtttcag

SEQ ID NO: 425095 - DNA, 25 bp, Homo sapien
catccaggtggcagattggtggcta

SEQ ID NO: 425096 - DNA, 25 bp, Homo sapien
tagaccatggcttctagccgaggag

SEQ ID NO: 425097 - DNA, 25 bp, Homo sapien
tattgcccagtgcatcaaccagaga

SEQ ID NO: 425098 - DNA, 25 bp, Homo sapien
gaactgaagcgctgaaagagcctga

SEQ ID NO: 425099 - DNA, 25 bp, Homo sapien
ttcaaggtagaagactccatccagc

SEQ ID NO: 425100 - DNA, 25 bp, Homo sapien
ctgcaaaggccctcgaggccgctga

SEQ ID NO: 425101 - DNA, 25 bp, Homo sapien
gattttcaaggtagaagactccatc

SEQ ID NO: 425102 - DNA, 25 bp, Homo sapien
gccgctgatgttggcggcagggttg

SEQ ID NO: 425103 - DNA, 25 bp, Homo sapien
ctctgaagtcacaaagtagcttttc

SEQ ID NO: 425104 - DNA, 25 bp, Homo sapien
gatgcccaggactgtcgttcattcc

SEQ ID NO: 425105 - DNA, 25 bp, Homo sapien
cattggtcgggagggaattctctga

SEQ ID NO: 425106 - DNA, 25 bp, Homo sapien
tgtgaccacaggttacagcactgcc

SEQ ID NO: 425107 - DNA, 25 bp, Homo sapien
taaacaactgggcatgtgtctggac

SEQ ID NO: 425108 - DNA, 25 bp, Homo sapien
tgaaacagtgggatacagggcaaca

SEQ ID NO: 425109 - DNA, 25 bp, Homo sapien
aaccttttgggctatatctacgtgg

SEQ ID NO: 425110 - DNA, 25 bp, Homo sapien
taagtaacatacacacctgccctga

SEQ ID NO: 425111 - DNA, 25 bp, Homo sapien
ggcaaatcatggtgtgtccctgcat

SEQ ID NO: 425112 - DNA, 25 bp, Homo sapien
gctgatgcaacatgaggacgtctca

SEQ ID NO: 425113 - DNA, 25 bp, Homo sapien
gtccctgcatcgtgaagagaaacaa

SEQ ID NO: 425114 - DNA, 25 bp, Homo sapien
gaaaccagtccgtggtcacaaaagc

SEQ ID NO: 425115 - DNA, 25 bp, Homo sapien
cgctttccttatcctcagtgttttg

SEQ ID NO: 425116 - DNA, 25 bp, Homo sapien
tgacttccctttctcgctttcctta

SEQ ID NO: 425117 - DNA, 25 bp, Homo sapien
ctttctcgctttccttatcctcagt

SEQ ID NO: 425118 - DNA, 25 bp, Homo sapien
tctcgctttccttatcctcagtgtt

SEQ ID NO: 425119 - DNA, 25 bp, Homo sapien
ggagcttgcatttcctcgtttagca

SEQ ID NO: 425120 - DNA, 25 bp, Homo sapien
cacacgtggagcttgcatttcctcg

SEQ ID NO: 425121 - DNA, 25 bp, Homo sapien
catttcctcgtttagcaattctttc

SEQ ID NO: 425122 - DNA, 25 bp, Homo sapien
gtttagcaattctttcccacttaga

SEQ ID NO: 425123 - DNA, 25 bp, Homo sapien
tgcgagtactgcagagactgactta

SEQ ID NO: 425124 - DNA, 25 bp, Homo sapien
ctgcagagactgacttattacatat

SEQ ID NO: 425125 - DNA, 25 bp, Homo sapien
ttccttatttgcgagtactgcagag

SEQ ID NO: 425126 - DNA, 25 bp, Homo sapien
gagactgacttattacatataacac

SEQ ID NO: 425127 - DNA, 25 bp, Homo sapien
tgaggcgagttctattccttcagct

SEQ ID NO: 425128 - DNA, 25 bp, Homo sapien
tggctgaatcagatgtgacgcatcc

SEQ ID NO: 425129 - DNA, 25 bp, Homo sapien
tttcaagagaccattcttcaacaga

SEQ ID NO: 425130 - DNA, 25 bp, Homo sapien
cacttctgcgtttgaggcgagttct

SEQ ID NO: 425131 - DNA, 25 bp, Homo sapien
cccagctggccactgttaatatttg

SEQ ID NO: 425132 - DNA, 25 bp, Homo sapien
tacataaaacatcacgaccatcctg

SEQ ID NO: 425133 - DNA, 25 bp, Homo sapien
ccttggcacataatagcgcatcata

SEQ ID NO: 425134 - DNA, 25 bp, Homo sapien
tcctggcacatgaacctctgtctgc

SEQ ID NO: 425135 - DNA, 25 bp, Homo sapien
cagggccacgtgagtgtcaggctct

SEQ ID NO: 425136 - DNA, 25 bp, Homo sapien
gccattagcgtcactgcccatattt

SEQ ID NO: 425137 - DNA, 25 bp, Homo sapien
tggtgagagtataatcacctttggg

SEQ ID NO: 425138 - DNA, 25 bp, Homo sapien
cagtgattcatgttctggcatgcca

SEQ ID NO: 425139 - DNA, 25 bp, Homo sapien
ctggtggagcctccctctgggatgc

SEQ ID NO: 425140 - DNA, 25 bp, Homo sapien
tgaacctgaactccagctgctgcgg

SEQ ID NO: 425141 - DNA, 25 bp, Homo sapien
cattatttgtcacatgagttgtatg

SEQ ID NO: 425142 - DNA, 25 bp, Homo sapien
gcaggtagggcttggtcattatttg

SEQ ID NO: 425143 - DNA, 25 bp, Homo sapien
gctggagcaataggcccccactgtc

SEQ ID NO: 425144 - DNA, 25 bp, Homo sapien
aagtgattgctggagcaataggccc

SEQ ID NO: 425145 - DNA, 25 bp, Homo sapien
tgattgctggagcaataggccccca

SEQ ID NO: 425146 - DNA, 25 bp, Homo sapien
gaaccagagctatgtgtggaaggga

SEQ ID NO: 425147 - DNA, 25 bp, Homo sapien
ccacctctcatttgcatggtggaca

SEQ ID NO: 425148 - DNA, 25 bp, Homo sapien
aacaaagatgtctgcggccatggca

SEQ ID NO: 425149 - DNA, 25 bp, Homo sapien
cctctcatttgcatggtggacagct

SEQ ID NO: 425150 - DNA, 25 bp, Homo sapien
acaaagatgtctgcggccatggcag

SEQ ID NO: 425151 - DNA, 25 bp, Homo sapien
gcggcacgtggatgaaacggacaca

SEQ ID NO: 425152 - DNA, 25 bp, Homo sapien
tagcagaaacgtgacaagcgggaga

SEQ ID NO: 425153 - DNA, 25 bp, Homo sapien
gacgcgggctcttttcgaagcagca

SEQ ID NO: 425154 - DNA, 25 bp, Homo sapien
caaacacctgtaactgctgcgggaa

SEQ ID NO: 425155 - DNA, 25 bp, Homo sapien
tatctaccagttccagtaagccaaa

SEQ ID NO: 425156 - DNA, 25 bp, Homo sapien
tcttatctaccagttccagtaagcc

SEQ ID NO: 425157 - DNA, 25 bp, Homo sapien
cagttccagtaagccaaacctcttg

SEQ ID NO: 425158 - DNA, 25 bp, Homo sapien
taccagttccagtaagccaaacctc

SEQ ID NO: 425159 - DNA, 25 bp, Homo sapien
gttcagatgggattctagaaattaa

SEQ ID NO: 425160 - DNA, 25 bp, Homo sapien
caataaaaacgtggagctctgtccc

SEQ ID NO: 425161 - DNA, 25 bp, Homo sapien
cccctggcatggattgttcagatgg

SEQ ID NO: 425162 - DNA, 25 bp, Homo sapien
cttcagagagtgaaagacaataaaa

SEQ ID NO: 425163 - DNA, 25 bp, Homo sapien
aactcttccccgaatccagcaaaat

SEQ ID NO: 425164 - DNA, 25 bp, Homo sapien
gaatccagcaaaatgaccatcccac

SEQ ID NO: 425165 - DNA, 25 bp, Homo sapien
tgagaaggggctctccctgtgatgc

SEQ ID NO: 425166 - DNA, 25 bp, Homo sapien
aaggggctctccctgtgatgcacat

SEQ ID NO: 425167 - DNA, 25 bp, Homo sapien
cacccctgatattcagtgcgtggac

SEQ ID NO: 425168 - DNA, 25 bp, Homo sapien
tggacatcggcagatgcatacaggg

SEQ ID NO: 425169 - DNA, 25 bp, Homo sapien
cagatgcatacaggggcacccgcat

SEQ ID NO: 425170 - DNA, 25 bp, Homo sapien
cagtgcgtggacatcggcagatgca

SEQ ID NO: 425171 - DNA, 25 bp, Homo sapien
gctggacgaattcggaaacaccttg

SEQ ID NO: 425172 - DNA, 25 bp, Homo sapien
ctggcgtgctggacgaattcggaaa

SEQ ID NO: 425173 - DNA, 25 bp, Homo sapien
cgtgctggacgaattcggaaacacc

SEQ ID NO: 425174 - DNA, 25 bp, Homo sapien
ggcgtgctggacgaattcggaaaca

SEQ ID NO: 425175 - DNA, 25 bp, Homo sapien
tcttactcattttgcactcttgctt

SEQ ID NO: 425176 - DNA, 25 bp, Homo sapien
ggttcgttttcttactcattttgca

SEQ ID NO: 425177 - DNA, 25 bp, Homo sapien
tcgttttcttactcattttgcactc

SEQ ID NO: 425178 - DNA, 25 bp, Homo sapien
tcttgcttttctccaaacaggggca

SEQ ID NO: 425179 - DNA, 25 bp, Homo sapien
cctgaacatgtgatccgagagagca

SEQ ID NO: 425180 - DNA, 25 bp, Homo sapien
tccattgtaggagctggttccaagc

SEQ ID NO: 425181 - DNA, 25 bp, Homo sapien
tgatgaggcacttagccgggtgtct

SEQ ID NO: 425182 - DNA, 25 bp, Homo sapien
catcttgtggagtttcttagggcca

SEQ ID NO: 425183 - DNA, 25 bp, Homo sapien
ctttaaacacagctatggtataatc

SEQ ID NO: 425184 - DNA, 25 bp, Homo sapien
tccatcaccgatggggagttcatct

SEQ ID NO: 425185 - DNA, 25 bp, Homo sapien
cttgtgcacgttgttctatttttcc

SEQ ID NO: 425186 - DNA, 25 bp, Homo sapien
acagctatggtataatcttgtgcac

SEQ ID NO: 425187 - DNA, 25 bp, Homo sapien
ttttgtgggccgctttgcacaggag

SEQ ID NO: 425188 - DNA, 25 bp, Homo sapien
aacacccctagattgtgccttcacc

SEQ ID NO: 425189 - DNA, 25 bp, Homo sapien
tctcatcccattggctttttccgtg

SEQ ID NO: 425190 - DNA, 25 bp, Homo sapien
agtccaattctcatcccattggctt

SEQ ID NO: 425191 - DNA, 25 bp, Homo sapien
gaaaattctggaagacggtccttgc

SEQ ID NO: 425192 - DNA, 25 bp, Homo sapien
gtaatacactgtggaaaattctgga

SEQ ID NO: 425193 - DNA, 25 bp, Homo sapien
tgtggaaaattctggaagacggtcc

SEQ ID NO: 425194 - DNA, 25 bp, Homo sapien
cttgtaatacactgtggaaaattct

SEQ ID NO: 425195 - DNA, 25 bp, Homo sapien
tagcattaggttgttatcagaaacc

SEQ ID NO: 425196 - DNA, 25 bp, Homo sapien
caacttagcattaggttgttatcag

SEQ ID NO: 425197 - DNA, 25 bp, Homo sapien
gttgttatcagaaaccttgtcaagt

SEQ ID NO: 425198 - DNA, 25 bp, Homo sapien
ctgaaaaggtgcaacttagcattag

SEQ ID NO: 425199 - DNA, 25 bp, Homo sapien
tccgaacatccgacagcttctttct

SEQ ID NO: 425200 - DNA, 25 bp, Homo sapien
accgtttccgccagctctgctgagc

SEQ ID NO: 425201 - DNA, 25 bp, Homo sapien
cagcccatgcattccgaacatccga

SEQ ID NO: 425202 - DNA, 25 bp, Homo sapien
gctgggccctcaccgtttccgccag

SEQ ID NO: 425203 - DNA, 25 bp, Homo sapien
cctgtctcactgctgtcagcgtggg

SEQ ID NO: 425204 - DNA, 25 bp, Homo sapien
gagacttccaggaaaggagctccct

SEQ ID NO: 425205 - DNA, 25 bp, Homo sapien
tcactgctgtcagcgtgggagccct

SEQ ID NO: 425206 - DNA, 25 bp, Homo sapien
ctgtcagagacttccaggaaaggag

SEQ ID NO: 425207 - DNA, 25 bp, Homo sapien
tgggccaagagacatcacaaagctt

SEQ ID NO: 425208 - DNA, 25 bp, Homo sapien
cacggcaagagcgacgtgcgggtac

SEQ ID NO: 425209 - DNA, 25 bp, Homo sapien
tggacactattgtgagagcagccat

SEQ ID NO: 425210 - DNA, 25 bp, Homo sapien
cccgttgagcctcgggtacttcttg

SEQ ID NO: 425211 - DNA, 25 bp, Homo sapien
gaacgctgtgatggtaaaatatctg

SEQ ID NO: 425212 - DNA, 25 bp, Homo sapien
catcttggggaacgctgtgatggta

SEQ ID NO: 425213 - DNA, 25 bp, Homo sapien
tgtctctcctctgggaatcagggca

SEQ ID NO: 425214 - DNA, 25 bp, Homo sapien
ggtaaaatatctgtctctcctctgg

SEQ ID NO: 425215 - DNA, 25 bp, Homo sapien
tgtcgtgcccttcaaaactggagtt

SEQ ID NO: 425216 - DNA, 25 bp, Homo sapien
caggagagctgcaaactgtgtatcc

SEQ ID NO: 425217 - DNA, 25 bp, Homo sapien
cagttactcagcacatatgagaggg

SEQ ID NO: 425218 - DNA, 25 bp, Homo sapien
taaaagtggcttcatagctactgac

SEQ ID NO: 425219 - DNA, 25 bp, Homo sapien
ctattcacaggaggctccacaagcg

SEQ ID NO: 425220 - DNA, 25 bp, Homo sapien
ggtgtgggcggccttccagtttcca

SEQ ID NO: 425221 - DNA, 25 bp, Homo sapien
gctccacaagcgcagagggtgtggg

SEQ ID NO: 425222 - DNA, 25 bp, Homo sapien
ttcacaggaggctccacaagcgcag

SEQ ID NO: 425223 - DNA, 25 bp, Homo sapien
ggcgtgtcttccaatagtccccgtg

SEQ ID NO: 425224 - DNA, 25 bp, Homo sapien
cagtctgtcttctgggaaccggagc

SEQ ID NO: 425225 - DNA, 25 bp, Homo sapien
gatacggctttgacgtttcgtgctg

SEQ ID NO: 425226 - DNA, 25 bp, Homo sapien
catgtgcgtgtacggttgcagagcc

SEQ ID NO: 425227 - DNA, 25 bp, Homo sapien
gttgctaacttatatgtgatgttta

SEQ ID NO: 425228 - DNA, 25 bp, Homo sapien
ggagcagttgctaacttatatgtga

SEQ ID NO: 425229 - DNA, 25 bp, Homo sapien
agcagttgctaacttatatgtgatg

SEQ ID NO: 425230 - DNA, 25 bp, Homo sapien
agggagcagttgctaacttatatgt

SEQ ID NO: 425231 - DNA, 25 bp, Homo sapien
tgtgccagtaccagcctaaacactt

SEQ ID NO: 425232 - DNA, 25 bp, Homo sapien
gattgtgccagtaccagcctaaaca

SEQ ID NO: 425233 - DNA, 25 bp, Homo sapien
ctccatggattgtgccagtaccagc

SEQ ID NO: 425234 - DNA, 25 bp, Homo sapien
catggattgtgccagtaccagccta

SEQ ID NO: 425235 - DNA, 25 bp, Homo sapien
ttgtgcactgtcgcttcatttcctt

SEQ ID NO: 425236 - DNA, 25 bp, Homo sapien
cttgtgcactgtcgcttcatttcct

SEQ ID NO: 425237 - DNA, 25 bp, Homo sapien
tgtgcactgtcgcttcatttccttg

SEQ ID NO: 425238 - DNA, 25 bp, Homo sapien
cactaaactctctccctggttactg

SEQ ID NO: 425239 - DNA, 25 bp, Homo sapien
gctgagtggtctgctcagtcaggac

SEQ ID NO: 425240 - DNA, 25 bp, Homo sapien
tcagtcaggacctggggaatctgag

SEQ ID NO: 425241 - DNA, 25 bp, Homo sapien
tgctcagtcaggacctggggaatct

SEQ ID NO: 425242 - DNA, 25 bp, Homo sapien
cagctgagtggtctgctcagtcagg

SEQ ID NO: 425243 - DNA, 25 bp, Homo sapien
tggtgccagtaggaacgttccctgg

SEQ ID NO: 425244 - DNA, 25 bp, Homo sapien
tcatctggtgccagtaggaacgttc

SEQ ID NO: 425245 - DNA, 25 bp, Homo sapien
agggtgacgcctggggatgggatcc

SEQ ID NO: 425246 - DNA, 25 bp, Homo sapien
tctggtgccagtaggaacgttccct

SEQ ID NO: 425247 - DNA, 25 bp, Homo sapien
ctcttccttgctaggcttgagttct

SEQ ID NO: 425248 - DNA, 25 bp, Homo sapien
ttgctaggcttgagttctgcttccg

SEQ ID NO: 425249 - DNA, 25 bp, Homo sapien
ttccttgctaggcttgagttctgct

SEQ ID NO: 425250 - DNA, 25 bp, Homo sapien
taggcttgagttctgcttccgcttc

SEQ ID NO: 425251 - DNA, 25 bp, Homo sapien
tcaggagacattattggagtgggcc

SEQ ID NO: 425252 - DNA, 25 bp, Homo sapien
tgtttcaggcagacgttcccaggag

SEQ ID NO: 425253 - DNA, 25 bp, Homo sapien
tggcctctcaagtacaaaaggtgtg

SEQ ID NO: 425254 - DNA, 25 bp, Homo sapien
taataccttgaagtgggcgttggcc

SEQ ID NO: 425255 - DNA, 25 bp, Homo sapien
tagtttactccgtgcagcatcctga

SEQ ID NO: 425256 - DNA, 25 bp, Homo sapien
taaacgaaccatggagctgtcttgc

SEQ ID NO: 425257 - DNA, 25 bp, Homo sapien
tgtcagcatgcacagtgggtccgta

SEQ ID NO: 425258 - DNA, 25 bp, Homo sapien
ggcatgccatccacctctgtgagta

SEQ ID NO: 425259 - DNA, 25 bp, Homo sapien
gatgtcgcagcacttctgtgtgccc

SEQ ID NO: 425260 - DNA, 25 bp, Homo sapien
ccctggcagcttgctctgatgtcgc

SEQ ID NO: 425261 - DNA, 25 bp, Homo sapien
cagcaccagtgctgttcaccctggt

SEQ ID NO: 425262 - DNA, 25 bp, Homo sapien
caccagtgctgttcaccctggtcat

SEQ ID NO: 425263 - DNA, 25 bp, Homo sapien
cattatcaccaagcacctcctagtt

SEQ ID NO: 425264 - DNA, 25 bp, Homo sapien
tccaggtggagctatgttatgatca

SEQ ID NO: 425265 - DNA, 25 bp, Homo sapien
tgtgattcaagctggaaagagggtt

SEQ ID NO: 425266 - DNA, 25 bp, Homo sapien
tatgatcagatcgaagtgtgacccc

SEQ ID NO: 425267 - DNA, 25 bp, Homo sapien
acactgtaacgctccctgatgtgga

SEQ ID NO: 425268 - DNA, 25 bp, Homo sapien
accctcagggctttagtgctcagaa

SEQ ID NO: 425269 - DNA, 25 bp, Homo sapien
ccttgaagtttgcatgcgcaggcac

SEQ ID NO: 425270 - DNA, 25 bp, Homo sapien
tttccatagagtcagcgtgccaggg

SEQ ID NO: 425271 - DNA, 25 bp, Homo sapien
gtcctcggctgtaacaggagtgcat

SEQ ID NO: 425272 - DNA, 25 bp, Homo sapien
ctgagagcatgtcctcggctgtaac

SEQ ID NO: 425273 - DNA, 25 bp, Homo sapien
gcatgtcctcggctgtaacaggagt

SEQ ID NO: 425274 - DNA, 25 bp, Homo sapien
agagcatgtcctcggctgtaacagg

SEQ ID NO: 425275 - DNA, 25 bp, Homo sapien
ccagtgactgagccactctgagctg

SEQ ID NO: 425276 - DNA, 25 bp, Homo sapien
accttccagtgactgagccactctg

SEQ ID NO: 425277 - DNA, 25 bp, Homo sapien
ccttccagtgactgagccactctga

SEQ ID NO: 425278 - DNA, 25 bp, Homo sapien
cttccagtgactgagccactctgag

SEQ ID NO: 425279 - DNA, 25 bp, Homo sapien
tgtgtgcttgtcctccaatctcaac

SEQ ID NO: 425280 - DNA, 25 bp, Homo sapien
gtgtgcttgtcctccaatctcaaca

SEQ ID NO: 425281 - DNA, 25 bp, Homo sapien
tggcagtctcagtcaaacttccaaa

SEQ ID NO: 425282 - DNA, 25 bp, Homo sapien
aaactcagcagggaatgtgtgtgct

SEQ ID NO: 425283 - DNA, 25 bp, Homo sapien
agccgacaggctcccgagacagtcc

SEQ ID NO: 425284 - DNA, 25 bp, Homo sapien
ctgtccatgtgtcacccggctcttc

SEQ ID NO: 425285 - DNA, 25 bp, Homo sapien
tccgtgtcgtctccgtgagcctgca

SEQ ID NO: 425286 - DNA, 25 bp, Homo sapien
ccgagacagtccactcacacagaca

SEQ ID NO: 425287 - DNA, 25 bp, Homo sapien
actcgacgagggtagcaaagcaaca

SEQ ID NO: 425288 - DNA, 25 bp, Homo sapien
ctgagattgtatcgctaggagcccc

SEQ ID NO: 425289 - DNA, 25 bp, Homo sapien
taagcctgtgatagccgtaaatccg

SEQ ID NO: 425290 - DNA, 25 bp, Homo sapien
caaagtacgatgacggtcctcgggc

SEQ ID NO: 425291 - DNA, 25 bp, Homo sapien
gaaatgggtggcagatccagcaaga

SEQ ID NO: 425292 - DNA, 25 bp, Homo sapien
agagagagcaaggaacccaaccagg

SEQ ID NO: 425293 - DNA, 25 bp, Homo sapien
gaactgcagctcagagagagcaagg

SEQ ID NO: 425294 - DNA, 25 bp, Homo sapien
gagagagcaaggaacccaaccaggg

SEQ ID NO: 425295 - DNA, 25 bp, Homo sapien
ggatgggaggttgccccaggggcta

SEQ ID NO: 425296 - DNA, 25 bp, Homo sapien
gaggttgccccaggggctagcttcc

SEQ ID NO: 425297 - DNA, 25 bp, Homo sapien
tcaggatgggaggttgccccagggg

SEQ ID NO: 425298 - DNA, 25 bp, Homo sapien
ggttgccccaggggctagcttccca

SEQ ID NO: 425299 - DNA, 25 bp, Homo sapien
gcaggttgctcgagggagaaactct

SEQ ID NO: 425300 - DNA, 25 bp, Homo sapien
tctggacgcatgagattcagttgta

SEQ ID NO: 425301 - DNA, 25 bp, Homo sapien
gcaggtgtcgcaggtagcagatgtg

SEQ ID NO: 425302 - DNA, 25 bp, Homo sapien
gagattcagttgtacagagcctgag

SEQ ID NO: 425303 - DNA, 25 bp, Homo sapien
ctcttcttcatgcccttcctggtcc

SEQ ID NO: 425304 - DNA, 25 bp, Homo sapien
tcttcttcatgcccttcctggtcca

SEQ ID NO: 425305 - DNA, 25 bp, Homo sapien
cttcttcatgcccttcctggtccat

SEQ ID NO: 425306 - DNA, 25 bp, Homo sapien
tgattttgttcgtgaacaagggccc

SEQ ID NO: 425307 - DNA, 25 bp, Homo sapien
cctctatctggttatcagttgcctg

SEQ ID NO: 425308 - DNA, 25 bp, Homo sapien
gaggttgtgcctctatctggttatc

SEQ ID NO: 425309 - DNA, 25 bp, Homo sapien
tctgattttgttcgtgaacaagggc

SEQ ID NO: 425310 - DNA, 25 bp, Homo sapien
tccagcactgcgcagggaccggtga

SEQ ID NO: 425311 - DNA, 25 bp, Homo sapien
ctagcgctccggagcacgggcacga

SEQ ID NO: 425312 - DNA, 25 bp, Homo sapien
ccagtaaccgcgctaggagcgcgga

SEQ ID NO: 425313 - DNA, 25 bp, Homo sapien
cgttcgtggcggagactagcgctcc

SEQ ID NO: 425314 - DNA, 25 bp, Homo sapien
cgaaaacgcttcagacattgctagt

SEQ ID NO: 425315 - DNA, 25 bp, Homo sapien
tgccaagattccgaaaacgcttcag

SEQ ID NO: 425316 - DNA, 25 bp, Homo sapien
gctagtcccttgtcgcttttgcgat

SEQ ID NO: 425317 - DNA, 25 bp, Homo sapien
aggtgtgcgtgccactgggtcctta

SEQ ID NO: 425318 - DNA, 25 bp, Homo sapien
cacatgctgttctgggaggcatccc

SEQ ID NO: 425319 - DNA, 25 bp, Homo sapien
aaacgtggcgtgttctacagtggac

SEQ ID NO: 425320 - DNA, 25 bp, Homo sapien
gacgaagcctgatctggtggacaaa

SEQ ID NO: 425321 - DNA, 25 bp, Homo sapien
catctggctcgcaggaatcttgacg

SEQ ID NO: 425322 - DNA, 25 bp, Homo sapien
gatgagatgattcagtgtccattga

SEQ ID NO: 425323 - DNA, 25 bp, Homo sapien
agatgagatgattcagtgtccattg

SEQ ID NO: 425324 - DNA, 25 bp, Homo sapien
gagaatctggatcccctcatgtgca

SEQ ID NO: 425325 - DNA, 25 bp, Homo sapien
catttaatggtcaggaaaagctgct

SEQ ID NO: 425326 - DNA, 25 bp, Homo sapien
ctcatgtgcacatggtgaggtcaga

SEQ ID NO: 425327 - DNA, 25 bp, Homo sapien
tgcactgtgcatagttcctctctgc

SEQ ID NO: 425328 - DNA, 25 bp, Homo sapien
gattttcagccctcagaatcgctcc

SEQ ID NO: 425329 - DNA, 25 bp, Homo sapien
cagtgttttaggagcatgagtgccg

SEQ ID NO: 425330 - DNA, 25 bp, Homo sapien
tgtgtgtgcgtcctgtcggagccct

SEQ ID NO: 425331 - DNA, 25 bp, Homo sapien
aaggatgctgtcttcgtactgggaa

SEQ ID NO: 425332 - DNA, 25 bp, Homo sapien
ggaggctggtcctactcaccaggca

SEQ ID NO: 425333 - DNA, 25 bp, Homo sapien
tttgagggacctctccaacaggaca

SEQ ID NO: 425334 - DNA, 25 bp, Homo sapien
caggagcaccaagtctggccttgcc

SEQ ID NO: 425335 - DNA, 25 bp, Homo sapien
ggagcatggaaacagactaatagaa

SEQ ID NO: 425336 - DNA, 25 bp, Homo sapien
catggttatggcacttggcaatgca

SEQ ID NO: 425337 - DNA, 25 bp, Homo sapien
tatagaacgttaagtcaggagccag

SEQ ID NO: 425338 - DNA, 25 bp, Homo sapien
caggagccagtcattttgtcaaagc

SEQ ID NO: 425339 - DNA, 25 bp, Homo sapien
cagaaccatggtagagtagtgctca

SEQ ID NO: 425340 - DNA, 25 bp, Homo sapien
atcatgcacggggaagcaaaaccag

SEQ ID NO: 425341 - DNA, 25 bp, Homo sapien
gagtaaatcatgcacggggaagcaa

SEQ ID NO: 425342 - DNA, 25 bp, Homo sapien
ctctgaatcatctctaagagtaaat

SEQ ID NO: 425343 - DNA, 25 bp, Homo sapien
gccagacaagttcactgtttaataa

SEQ ID NO: 425344 - DNA, 25 bp, Homo sapien
gtggaggccggcacaacaggcatct

SEQ ID NO: 425345 - DNA, 25 bp, Homo sapien
ctgagtcccgcgtgtcatttgaagg

SEQ ID NO: 425346 - DNA, 25 bp, Homo sapien
caagcttaatagcacaaagggatca

SEQ ID NO: 425347 - DNA, 25 bp, Homo sapien
tttcctctaggttcgcatgaagcac

SEQ ID NO: 425348 - DNA, 25 bp, Homo sapien
ttcttccactagtagcccagcccca

SEQ ID NO: 425349 - DNA, 25 bp, Homo sapien
tttcttccactagtagcccagcccc

SEQ ID NO: 425350 - DNA, 25 bp, Homo sapien
agaagacagaatagactgctttctt

SEQ ID NO: 425351 - DNA, 25 bp, Homo sapien
tgctttcttccactagtagcccagc

SEQ ID NO: 425352 - DNA, 25 bp, Homo sapien
tattgttcttcgaagtgaccagagg

SEQ ID NO: 425353 - DNA, 25 bp, Homo sapien
ggtctgtaagctttggcacagccag

SEQ ID NO: 425354 - DNA, 25 bp, Homo sapien
catttgtcgataaatccagtccgtg

SEQ ID NO: 425355 - DNA, 25 bp, Homo sapien
ttgtatcccctatcagccaccagat

SEQ ID NO: 425356 - DNA, 25 bp, Homo sapien
ctgtgggacacagcaaggtacagag

SEQ ID NO: 425357 - DNA, 25 bp, Homo sapien
actgtgtgggcttcgaatctccacc

SEQ ID NO: 425358 - DNA, 25 bp, Homo sapien
gtcgcagtgtgagttacgagtgact

SEQ ID NO: 425359 - DNA, 25 bp, Homo sapien
gaaaatcaagtcacaatctgccgca

SEQ ID NO: 425360 - DNA, 25 bp, Homo sapien
ccggcacagatcatggctggtgtga

SEQ ID NO: 425361 - DNA, 25 bp, Homo sapien
ccttggcagcgttcagcacttctga

SEQ ID NO: 425362 - DNA, 25 bp, Homo sapien
gtgtctcaatgagaagcaccttggc

SEQ ID NO: 425363 - DNA, 25 bp, Homo sapien
ggcaagaatcgacgttcccctgcag

SEQ ID NO: 425364 - DNA, 25 bp, Homo sapien
ccagctctgaaactatagggctcta

SEQ ID NO: 425365 - DNA, 25 bp, Homo sapien
aactggcggtgcctgtgctgaatgc

SEQ ID NO: 425366 - DNA, 25 bp, Homo sapien
cacacgcactacacagatggtcaca

SEQ ID NO: 425367 - DNA, 25 bp, Homo sapien
tgttgagctcccagtgttgcctgca

SEQ ID NO: 425368 - DNA, 25 bp, Homo sapien
tcagtaagtctggtggctctagccc

SEQ ID NO: 425369 - DNA, 25 bp, Homo sapien
gagctggcttcctgtctcaaggaac

SEQ ID NO: 425370 - DNA, 25 bp, Homo sapien
tgcacacactcttctggagcacacg

SEQ ID NO: 425371 - DNA, 25 bp, Homo sapien
ttctcggctcccctgcacattagag

SEQ ID NO: 425372 - DNA, 25 bp, Homo sapien
tctgtggttatcagggcagaggaca

SEQ ID NO: 425373 - DNA, 25 bp, Homo sapien
tctgtatggcctagacgcttttgag

SEQ ID NO: 425374 - DNA, 25 bp, Homo sapien
tgtaaaatgaacctttgtgcctgcc

SEQ ID NO: 425375 - DNA, 25 bp, Homo sapien
cctgtactaggtgcaggtgcgcaca

SEQ ID NO: 425376 - DNA, 25 bp, Homo sapien
ggatctccagggcagctctaaactc

SEQ ID NO: 425377 - DNA, 25 bp, Homo sapien
cacaatgagtgcaacacaggagatc

SEQ ID NO: 425378 - DNA, 25 bp, Homo sapien
tctaaactcgtatggcccagatact

SEQ ID NO: 425379 - DNA, 25 bp, Homo sapien
acaggagatcctgcacctctaaact

SEQ ID NO: 425380 - DNA, 25 bp, Homo sapien
catcatgcctgggttgggcagacac

SEQ ID NO: 425381 - DNA, 25 bp, Homo sapien
ctgggttgggcagacacactggttt

SEQ ID NO: 425382 - DNA, 25 bp, Homo sapien
cccggaaatccagcagagctgttct

SEQ ID NO: 425383 - DNA, 25 bp, Homo sapien
gccccccacccggaaatccagcaga

SEQ ID NO: 425384 - DNA, 25 bp, Homo sapien
ggtatccggctccatagaacatgaa

SEQ ID NO: 425385 - DNA, 25 bp, Homo sapien
tcactttttctacttggtatccggc

SEQ ID NO: 425386 - DNA, 25 bp, Homo sapien
ttgtctcaaaatccccgcaaatgcc

SEQ ID NO: 425387 - DNA, 25 bp, Homo sapien
caaatgccgtccaatgccatggatt

SEQ ID NO: 425388 - DNA, 25 bp, Homo sapien
ggactagcgtcccggagacaggata

SEQ ID NO: 425389 - DNA, 25 bp, Homo sapien
cctgggactagcgtcccggagacag

SEQ ID NO: 425390 - DNA, 25 bp, Homo sapien
ctctcctgggactagcgtcccggag

SEQ ID NO: 425391 - DNA, 25 bp, Homo sapien
gactagcgtcccggagacaggatac

SEQ ID NO: 425392 - DNA, 25 bp, Homo sapien
ctggtcacggcgacatcgtggagaa

SEQ ID NO: 425393 - DNA, 25 bp, Homo sapien
gaaggaacgctggtcacggcgacat

SEQ ID NO: 425394 - DNA, 25 bp, Homo sapien
ggagaatgttccacctgcaccctgt

SEQ ID NO: 425395 - DNA, 25 bp, Homo sapien
cggcgacatcgtggagaatgttcca

SEQ ID NO: 425396 - DNA, 25 bp, Homo sapien
ggtgatgatggagcctccgcacacg

SEQ ID NO: 425397 - DNA, 25 bp, Homo sapien
gtgggcggctgtcacgatccactcg

SEQ ID NO: 425398 - DNA, 25 bp, Homo sapien
tctggacgtgcaggctgacctgcca

SEQ ID NO: 425399 - DNA, 25 bp, Homo sapien
cacacgtggacgttctggacgtgca

SEQ ID NO: 425400 - DNA, 25 bp, Homo sapien
ggcttgagttcaagttgaccccgca

SEQ ID NO: 425401 - DNA, 25 bp, Homo sapien
cttgagttcaagttgaccccgcagg

SEQ ID NO: 425402 - DNA, 25 bp, Homo sapien
ctggcggcttgagttcaagttgacc

SEQ ID NO: 425403 - DNA, 25 bp, Homo sapien
gcggcttgagttcaagttgaccccg

SEQ ID NO: 425404 - DNA, 25 bp, Homo sapien
aggatgacaaacaggaggccagtgg

SEQ ID NO: 425405 - DNA, 25 bp, Homo sapien
ggatgacaaacaggaggccagtggg

SEQ ID NO: 425406 - DNA, 25 bp, Homo sapien
tgccgggatgggacggtgtcagctc

SEQ ID NO: 425407 - DNA, 25 bp, Homo sapien
ggccccacgacagcactgggccatc

SEQ ID NO: 425408 - DNA, 25 bp, Homo sapien
cagccctgccgggatgggacggtgt

SEQ ID NO: 425409 - DNA, 25 bp, Homo sapien
tgagctcaggaccacggccccacga

SEQ ID NO: 425410 - DNA, 25 bp, Homo sapien
atacagcgtaaagaaaccactgctt

SEQ ID NO: 425411 - DNA, 25 bp, Homo sapien
tatacagcgtaaagaaaccactgct

SEQ ID NO: 425412 - DNA, 25 bp, Homo sapien
ctatacagcgtaaagaaaccactgc

SEQ ID NO: 425413 - DNA, 25 bp, Homo sapien
tacagcgtaaagaaaccactgcttt

SEQ ID NO: 425414 - DNA, 25 bp, Homo sapien
gtggtacagttttttatagatatcg

SEQ ID NO: 425415 - DNA, 25 bp, Homo sapien
tccgctgtcatccactattccttgg

SEQ ID NO: 425416 - DNA, 25 bp, Homo sapien
tggtggatccgctgtcatccactat

SEQ ID NO: 425417 - DNA, 25 bp, Homo sapien
gatatcgacattgccggcacttgtg

SEQ ID NO: 425418 - DNA, 25 bp, Homo sapien
ttatagcccatgtccctgcaggccg

SEQ ID NO: 425419 - DNA, 25 bp, Homo sapien
cagtcgtcttggcacacagggtgcc

SEQ ID NO: 425420 - DNA, 25 bp, Homo sapien
gcccgtagttctcgttccagtcgtc

SEQ ID NO: 425421 - DNA, 25 bp, Homo sapien
gacttcctctgagatgagtacacct

SEQ ID NO: 425422 - DNA, 25 bp, Homo sapien
caaagggaggccacaaatctattct

SEQ ID NO: 425423 - DNA, 25 bp, Homo sapien
tgtatcgtcctagctgctacccaag

SEQ ID NO: 425424 - DNA, 25 bp, Homo sapien
ctctccacggctccggaggtggcag

SEQ ID NO: 425425 - DNA, 25 bp, Homo sapien
gaggtggcagcacagttcactcttc

SEQ ID NO: 425426 - DNA, 25 bp, Homo sapien
gaggtaaccaccatccagagttttg

SEQ ID NO: 425427 - DNA, 25 bp, Homo sapien
tttgctgggcaggataatacatggg

SEQ ID NO: 425428 - DNA, 25 bp, Homo sapien
taagcagagcatcatgaacaggaag

SEQ ID NO: 425429 - DNA, 25 bp, Homo sapien
tacaaacaccgttgaagtcgctccc

SEQ ID NO: 425430 - DNA, 25 bp, Homo sapien
tcttacttcctacgagtggccctga

SEQ ID NO: 425431 - DNA, 25 bp, Homo sapien
tgtgctacatctggacaacggaata

SEQ ID NO: 425432 - DNA, 25 bp, Homo sapien
tgttaatgaacgcacagcactgatg

SEQ ID NO: 425433 - DNA, 25 bp, Homo sapien
taaagtgaggacctggctatgctct

SEQ ID NO: 425434 - DNA, 25 bp, Homo sapien
aatacacttctatgattaaaaacaa

SEQ ID NO: 425435 - DNA, 25 bp, Homo sapien
ggctcaaaatacacttctatgatta

SEQ ID NO: 425436 - DNA, 25 bp, Homo sapien
acacccggctcaaaatacacttcta

SEQ ID NO: 425437 - DNA, 25 bp, Homo sapien
acccggctcaaaatacacttctatg

SEQ ID NO: 425438 - DNA, 25 bp, Homo sapien
tacagcgtgatgactggatatccgc

SEQ ID NO: 425439 - DNA, 25 bp, Homo sapien
aaactgaagccggtctaggtctgtc

SEQ ID NO: 425440 - DNA, 25 bp, Homo sapien
gaatgttttccatgggacgggtcat

SEQ ID NO: 425441 - DNA, 25 bp, Homo sapien
aaagctagttaacatgtccaccacg

SEQ ID NO: 425442 - DNA, 25 bp, Homo sapien
ttctgggaagcaagactgtgctgga

SEQ ID NO: 425443 - DNA, 25 bp, Homo sapien
ttgggcctgctcaaggccggcacga

SEQ ID NO: 425444 - DNA, 25 bp, Homo sapien
gactgacagcgagggcttaacagga

SEQ ID NO: 425445 - DNA, 25 bp, Homo sapien
tcaagaacacggaacacttgggcct

SEQ ID NO: 425446 - DNA, 25 bp, Homo sapien
ggattactttggcatggaaaaatct

SEQ ID NO: 425447 - DNA, 25 bp, Homo sapien
tttggctagaattctcggccagctc

SEQ ID NO: 425448 - DNA, 25 bp, Homo sapien
attactttggcatggaaaaatcttt

SEQ ID NO: 425449 - DNA, 25 bp, Homo sapien
ggctagaattctcggccagctctga

SEQ ID NO: 425450 - DNA, 25 bp, Homo sapien
gacacgtatatgaggtaaggcccat

SEQ ID NO: 425451 - DNA, 25 bp, Homo sapien
gagaaatggagactttgcaccgtgg

SEQ ID NO: 425452 - DNA, 25 bp, Homo sapien
cattccgtacgcagctggcaggagg

SEQ ID NO: 425453 - DNA, 25 bp, Homo sapien
tgttcgagtcactaactacccttga

SEQ ID NO: 425454 - DNA, 25 bp, Homo sapien
gggcagtgtgacacgccatcacacc

SEQ ID NO: 425455 - DNA, 25 bp, Homo sapien
gtgtgacacgccatcacaccagtta

SEQ ID NO: 425456 - DNA, 25 bp, Homo sapien
cacaccagttagaggggttgatgca

SEQ ID NO: 425457 - DNA, 25 bp, Homo sapien
tcacaccagttagaggggttgatgc

SEQ ID NO: 425458 - DNA, 25 bp, Homo sapien
gagtcgcactctatcccagagttgg

SEQ ID NO: 425459 - DNA, 25 bp, Homo sapien
gtcgcactctatcccagagttggag

SEQ ID NO: 425460 - DNA, 25 bp, Homo sapien
agtcgcactctatcccagagttgga

SEQ ID NO: 425461 - DNA, 25 bp, Homo sapien
tttgggtttggacggcactcacacg

SEQ ID NO: 425462 - DNA, 25 bp, Homo sapien
cacaggtaacttgaaggatccacaa

SEQ ID NO: 425463 - DNA, 25 bp, Homo sapien
gaccctctcagtgtttgggtttgga

SEQ ID NO: 425464 - DNA, 25 bp, Homo sapien
gatccacaatggcacatgggtctgc

SEQ ID NO: 425465 - DNA, 25 bp, Homo sapien
cagagtaggccagcggccagcgcag

SEQ ID NO: 425466 - DNA, 25 bp, Homo sapien
tccagagtaggccagcggccagcgc

SEQ ID NO: 425467 - DNA, 25 bp, Homo sapien
cttccagagtaggccagcggccagc

SEQ ID NO: 425468 - DNA, 25 bp, Homo sapien
tgaacttccagagtaggccagcggc

SEQ ID NO: 425469 - DNA, 25 bp, Homo sapien
catctttccacttcaacctctcaag

SEQ ID NO: 425470 - DNA, 25 bp, Homo sapien
gccatctttccacttcaacctctca

SEQ ID NO: 425471 - DNA, 25 bp, Homo sapien
tcaagccatctttccacttcaacct

SEQ ID NO: 425472 - DNA, 25 bp, Homo sapien
aagccatctttccacttcaacctct

SEQ ID NO: 425473 - DNA, 25 bp, Homo sapien
tcgattctccaaagcctaaggttta

SEQ ID NO: 425474 - DNA, 25 bp, Homo sapien
taaggttgtcaactcagcctcatgg

SEQ ID NO: 425475 - DNA, 25 bp, Homo sapien
ccttctacggctgttgctaaagcaa

SEQ ID NO: 425476 - DNA, 25 bp, Homo sapien
cacgcacatttggaggactatggac

SEQ ID NO: 425477 - DNA, 25 bp, Homo sapien
ccatggttttcatagtaaggtccaa

SEQ ID NO: 425478 - DNA, 25 bp, Homo sapien
ttggaagcctgcgtcaggaccctcg

SEQ ID NO: 425479 - DNA, 25 bp, Homo sapien
ttgaggtgcacactgtcccggatgg

SEQ ID NO: 425480 - DNA, 25 bp, Homo sapien
cgggtagtactgagccggatgcacc

SEQ ID NO: 425481 - DNA, 25 bp, Homo sapien
ccctgttatcgccatcctgcctcat

SEQ ID NO: 425482 - DNA, 25 bp, Homo sapien
cgtgtacccaacagccatggctctt

SEQ ID NO: 425483 - DNA, 25 bp, Homo sapien
gagaatgcatatcacccacgtgtac

SEQ ID NO: 425484 - DNA, 25 bp, Homo sapien
cttgaacagcatcagcgtggcccgg

SEQ ID NO: 425485 - DNA, 25 bp, Homo sapien
cactctttctagagggtgccttgaa

SEQ ID NO: 425486 - DNA, 25 bp, Homo sapien
cagcatcgagtaatgataggtatct

SEQ ID NO: 425487 - DNA, 25 bp, Homo sapien
cgagtaatgataggtatctggaatg

SEQ ID NO: 425488 - DNA, 25 bp, Homo sapien
atcaacagcatcgagtaatgatagg

SEQ ID NO: 425489 - DNA, 25 bp, Homo sapien
catcgagtaatgataggtatctgga

SEQ ID NO: 425490 - DNA, 25 bp, Homo sapien
acaaagaccagtgttgcctgctgac

SEQ ID NO: 425491 - DNA, 25 bp, Homo sapien
aacaaagaccagtgttgcctgctga

SEQ ID NO: 425492 - DNA, 25 bp, Homo sapien
aattgtaagtgcagcggccaggaca

SEQ ID NO: 425493 - DNA, 25 bp, Homo sapien
tcctctgggatcagagtgggtagga

SEQ ID NO: 425494 - DNA, 25 bp, Homo sapien
cttgtgccttagaggttacagcaga

SEQ ID NO: 425495 - DNA, 25 bp, Homo sapien
taaggactttgggacccacttgtgc

SEQ ID NO: 425496 - DNA, 25 bp, Homo sapien
aaaatattccgtgtgcccaagtcag

SEQ ID NO: 425497 - DNA, 25 bp, Homo sapien
gggagccaccaccattaattgtcaa

SEQ ID NO: 425498 - DNA, 25 bp, Homo sapien
agtgaaaattcgatcccattggcag

SEQ ID NO: 425499 - DNA, 25 bp, Homo sapien
tcacgatccctaacaaggaagccag

SEQ ID NO: 425500 - DNA, 25 bp, Homo sapien
tttaagtgtgaaagagcaacagtgg

SEQ ID NO: 425501 - DNA, 25 bp, Homo sapien
ttaaaggaccgggatgatggctctc

SEQ ID NO: 425502 - DNA, 25 bp, Homo sapien
cagccaccatgagcacttggggaaa

SEQ ID NO: 425503 - DNA, 25 bp, Homo sapien
tcttccttcaatacagacagtgtca

SEQ ID NO: 425504 - DNA, 25 bp, Homo sapien
tgaatctcacaatggcacacagctg

SEQ ID NO: 425505 - DNA, 25 bp, Homo sapien
cccatgacatgatgaagttactgcc

SEQ ID NO: 425506 - DNA, 25 bp, Homo sapien
tgtggcatcgtatccgcatcccatg

SEQ ID NO: 425507 - DNA, 25 bp, Homo sapien
gctgagtcagcccatgagtcacctg

SEQ ID NO: 425508 - DNA, 25 bp, Homo sapien
aacaaccaagccaacgcgaatgaag

SEQ ID NO: 425509 - DNA, 25 bp, Homo sapien
tgaagttaggcttgtagacactgac

SEQ ID NO: 425510 - DNA, 25 bp, Homo sapien
cctgtgactggtacggttcgagttg

SEQ ID NO: 425511 - DNA, 25 bp, Homo sapien
tgacctcaccgtgcaccattgtgca

SEQ ID NO: 425512 - DNA, 25 bp, Homo sapien
cctgtcacagatcccccttttgctc

SEQ ID NO: 425513 - DNA, 25 bp, Homo sapien
tccttgggtgtccacaggctcggtg

SEQ ID NO: 425514 - DNA, 25 bp, Homo sapien
tcctccttgggtgtccacaggctcg

SEQ ID NO: 425515 - DNA, 25 bp, Homo sapien
tcacagatcccccttttgctcctcc

SEQ ID NO: 425516 - DNA, 25 bp, Homo sapien
ggggacatcataagcccccttcttc

SEQ ID NO: 425517 - DNA, 25 bp, Homo sapien
gacatcataagcccccttcttcaca

SEQ ID NO: 425518 - DNA, 25 bp, Homo sapien
gggacatcataagcccccttcttca

SEQ ID NO: 425519 - DNA, 25 bp, Homo sapien
acatcataagcccccttcttcacac

SEQ ID NO: 425520 - DNA, 25 bp, Homo sapien
ggcctcagctctcaggtacataatg

SEQ ID NO: 425521 - DNA, 25 bp, Homo sapien
tcccatattggaggatcccctggca

SEQ ID NO: 425522 - DNA, 25 bp, Homo sapien
tcccaaatcacccttagggccagga

SEQ ID NO: 425523 - DNA, 25 bp, Homo sapien
caatcctgaggccacgcagtgcatc

SEQ ID NO: 425524 - DNA, 25 bp, Homo sapien
aagcccttttcaatcaggattccgg

SEQ ID NO: 425525 - DNA, 25 bp, Homo sapien
gattccgggcgccttgtttccagct

SEQ ID NO: 425526 - DNA, 25 bp, Homo sapien
tttcaggtcggggagaaccagagcc

SEQ ID NO: 425527 - DNA, 25 bp, Homo sapien
tcatactgctagagggagcagcacg

SEQ ID NO: 425528 - DNA, 25 bp, Homo sapien
tccaaatgccttgtaactgggctgc

SEQ ID NO: 425529 - DNA, 25 bp, Homo sapien
catgattcgggaggttctcgcggct

SEQ ID NO: 425530 - DNA, 25 bp, Homo sapien
tcaggcattgccttgggcgcgatgc

SEQ ID NO: 425531 - DNA, 25 bp, Homo sapien
actgcacaggttcgcacggagggaa

SEQ ID NO: 425532 - DNA, 25 bp, Homo sapien
ttcctcgtgattagggctgccacca

SEQ ID NO: 425533 - DNA, 25 bp, Homo sapien
gggccgccgtgctatcctttccttc

SEQ ID NO: 425534 - DNA, 25 bp, Homo sapien
tcagggctctcggcgcacaaacttt

SEQ ID NO: 425535 - DNA, 25 bp, Homo sapien
caccagggcgttctgaacaggattc

SEQ ID NO: 425536 - DNA, 25 bp, Homo sapien
gcgagcagtccctccccgagactga

SEQ ID NO: 425537 - DNA, 25 bp, Homo sapien
gggtcgccgcaacggggcctgagtc

SEQ ID NO: 425538 - DNA, 25 bp, Homo sapien
tgatcgccgccagcgggtcgccgca

SEQ ID NO: 425539 - DNA, 25 bp, Homo sapien
ggttcctgccggtgccgggtgtcca

SEQ ID NO: 425540 - DNA, 25 bp, Homo sapien
cgccgcgccggccgtatcgttcccg

SEQ ID NO: 425541 - DNA, 25 bp, Homo sapien
gcgccggccgtatcgttcccggcat

SEQ ID NO: 425542 - DNA, 25 bp, Homo sapien
cgcgccggccgtatcgttcccggca

SEQ ID NO: 425543 - DNA, 25 bp, Homo sapien
cacacccgctttcacctccgggcgg

SEQ ID NO: 425544 - DNA, 25 bp, Homo sapien
tcacacccgctttcacctccgggcg

SEQ ID NO: 425545 - DNA, 25 bp, Homo sapien
cccgccctggctctcgctttaatct

SEQ ID NO: 425546 - DNA, 25 bp, Homo sapien
agcgggtcgcgggtcaccctgggcg

SEQ ID NO: 425547 - DNA, 25 bp, Homo sapien
ttaatctcaggaggcggtgtcccag

SEQ ID NO: 425548 - DNA, 25 bp, Homo sapien
tcctgcttagctcgcgcctactcgg

SEQ ID NO: 425549 - DNA, 25 bp, Homo sapien
tttaatgtagtcgagagcaggcacc

SEQ ID NO: 425550 - DNA, 25 bp, Homo sapien
aaagctggaaagatgcacgggtcac

SEQ ID NO: 425551 - DNA, 25 bp, Homo sapien
gcctttggtcctacagctcagcaga

SEQ ID NO: 425552 - DNA, 25 bp, Homo sapien
tctcaaagctctgaaagcagcgctc

SEQ ID NO: 425553 - DNA, 25 bp, Homo sapien
aaaatccacagccagctccagtctg

SEQ ID NO: 425554 - DNA, 25 bp, Homo sapien
aataaaatccacagccagctccagt

SEQ ID NO: 425555 - DNA, 25 bp, Homo sapien
aaatccacagccagctccagtctgc

SEQ ID NO: 425556 - DNA, 25 bp, Homo sapien
ctccttctcctgagaaataaaatcc

SEQ ID NO: 425557 - DNA, 25 bp, Homo sapien
tgaagctaaggtcggtggtccagac

SEQ ID NO: 425558 - DNA, 25 bp, Homo sapien
ctccaacggggcaggtgttcttggg

SEQ ID NO: 425559 - DNA, 25 bp, Homo sapien
aggtcggtggtccagaccccacttg

SEQ ID NO: 425560 - DNA, 25 bp, Homo sapien
ggttgaggtgaagctaaggtcggtg

SEQ ID NO: 425561 - DNA, 25 bp, Homo sapien
gtccctttccgatgctgcatgggag

SEQ ID NO: 425562 - DNA, 25 bp, Homo sapien
tgctgcatgggagcaatgagaagca

SEQ ID NO: 425563 - DNA, 25 bp, Homo sapien
tcacaagtcagtgaaagccaatggg

SEQ ID NO: 425564 - DNA, 25 bp, Homo sapien
tcagtgaaagccaatgggatgtccc

SEQ ID NO: 425565 - DNA, 25 bp, Homo sapien
gctggcataggggggtggctgtggc

SEQ ID NO: 425566 - DNA, 25 bp, Homo sapien
tggctggcataggggggtggctgtg

SEQ ID NO: 425567 - DNA, 25 bp, Homo sapien
ctggcataggggggtggctgtggcc

SEQ ID NO: 425568 - DNA, 25 bp, Homo sapien
gctggctggcataggggggtggctg

SEQ ID NO: 425569 - DNA, 25 bp, Homo sapien
ttggtgatctgcccaaccagtggcc

SEQ ID NO: 425570 - DNA, 25 bp, Homo sapien
tcagcctcacctctgtaacgtgggg

SEQ ID NO: 425571 - DNA, 25 bp, Homo sapien
caggcccccagtttccagcgagatg

SEQ ID NO: 425572 - DNA, 25 bp, Homo sapien
cctcgccgggcgttatatggactca

SEQ ID NO: 425573 - DNA, 25 bp, Homo sapien
acctggacccctgcaaacccgtctg

SEQ ID NO: 425574 - DNA, 25 bp, Homo sapien
ttctccaacctggacccctgcaaac

SEQ ID NO: 425575 - DNA, 25 bp, Homo sapien
cctgcaaacccgtctgtctctgctt

SEQ ID NO: 425576 - DNA, 25 bp, Homo sapien
gacccctgcaaacccgtctgtctct

SEQ ID NO: 425577 - DNA, 25 bp, Homo sapien
gcagcagcgagggacattgcagcca

SEQ ID NO: 425578 - DNA, 25 bp, Homo sapien
gcagaaatggaacagaaacgcttag

SEQ ID NO: 425579 - DNA, 25 bp, Homo sapien
agaaacgcttagcagcagcagcgag

SEQ ID NO: 425580 - DNA, 25 bp, Homo sapien
gcgagggacattgcagccaccagct

SEQ ID NO: 425581 - DNA, 25 bp, Homo sapien
aaatcacattgatcgttactgacca

SEQ ID NO: 425582 - DNA, 25 bp, Homo sapien
tactgaccataggacccacgaatcc

SEQ ID NO: 425583 - DNA, 25 bp, Homo sapien
cccctgagagaccattaaaatcaca

SEQ ID NO: 425584 - DNA, 25 bp, Homo sapien
gatgaaagccctacattcgttgccc

SEQ ID NO: 425585 - DNA, 25 bp, Homo sapien
ccaatctaccgttaatggacattta

SEQ ID NO: 425586 - DNA, 25 bp, Homo sapien
tggacatttagcttgattaacagac

SEQ ID NO: 425587 - DNA, 25 bp, Homo sapien
ctgtgttagttctcgtaggattatg

SEQ ID NO: 425588 - DNA, 25 bp, Homo sapien
catttagcttgattaacagacactg

SEQ ID NO: 425589 - DNA, 25 bp, Homo sapien
gagtttaccagacagacttttgatg

SEQ ID NO: 425590 - DNA, 25 bp, Homo sapien
caaacctagatgcaggaggtgttgc

SEQ ID NO: 425591 - DNA, 25 bp, Homo sapien
attccaatatccagaccaaacctag

SEQ ID NO: 425592 - DNA, 25 bp, Homo sapien
tcaaccttgcgtgcccattaaaacc

SEQ ID NO: 425593 - DNA, 25 bp, Homo sapien
aggatgagtaagacaccatccctgc

SEQ ID NO: 425594 - DNA, 25 bp, Homo sapien
ggaacaggagttgccaatgtgaatg

SEQ ID NO: 425595 - DNA, 25 bp, Homo sapien
catccctgccccgaaaattgaaatc

SEQ ID NO: 425596 - DNA, 25 bp, Homo sapien
gagcgtctgttacacagatgtcctg

SEQ ID NO: 425597 - DNA, 25 bp, Homo sapien
atgtaggcagttttaacttttgcct

SEQ ID NO: 425598 - DNA, 25 bp, Homo sapien
ctacagaataggagaagcgccacac

SEQ ID NO: 425599 - DNA, 25 bp, Homo sapien
tgttctgccattgagtggccgtgta

SEQ ID NO: 425600 - DNA, 25 bp, Homo sapien
tgagtggccgtgtaatgctccccag

SEQ ID NO: 425601 - DNA, 25 bp, Homo sapien
cctaaaggagtcatctgttctgcca

SEQ ID NO: 425602 - DNA, 25 bp, Homo sapien
gctccacaaatgtggcctggcccgg

SEQ ID NO: 425603 - DNA, 25 bp, Homo sapien
caatggggtgaatggcctggaacct

SEQ ID NO: 425604 - DNA, 25 bp, Homo sapien
tggaacctgaatgtccgagggcctc

SEQ ID NO: 425605 - DNA, 25 bp, Homo sapien
cccttcggcctggaagtttgtccag

SEQ ID NO: 425606 - DNA, 25 bp, Homo sapien
gaaatcccctagcagggagctgcgg

SEQ ID NO: 425607 - DNA, 25 bp, Homo sapien
ttgggatacgacacctgcaggcggt

SEQ ID NO: 425608 - DNA, 25 bp, Homo sapien
gctggcttggtcaagctgcctcgga

SEQ ID NO: 425609 - DNA, 25 bp, Homo sapien
aattatgaagtcatcctcactgcgg

SEQ ID NO: 425610 - DNA, 25 bp, Homo sapien
ctcggagggtcaccagccttgggat

SEQ ID NO: 425611 - DNA, 25 bp, Homo sapien
ctttggcactctgcgtgctgctgtc

SEQ ID NO: 425612 - DNA, 25 bp, Homo sapien
ccttctgaggtgtccagatgagcga

SEQ ID NO: 425613 - DNA, 25 bp, Homo sapien
tccagttctttgctccgcatctctt

SEQ ID NO: 425614 - DNA, 25 bp, Homo sapien
gatgagcgatgctccatctaccctc

SEQ ID NO: 425615 - DNA, 25 bp, Homo sapien
ctgggtcatttgcagagttgctggg

SEQ ID NO: 425616 - DNA, 25 bp, Homo sapien
tgctgggtcatttgcagagttgctg

SEQ ID NO: 425617 - DNA, 25 bp, Homo sapien
cctgctgggtcatttgcagagttgc

SEQ ID NO: 425618 - DNA, 25 bp, Homo sapien
gggtcatttgcagagttgctggggc

SEQ ID NO: 425619 - DNA, 25 bp, Homo sapien
tcttcatcctcccctttgcttcttg

SEQ ID NO: 425620 - DNA, 25 bp, Homo sapien
cctgttcttcatcctcccctttgct

SEQ ID NO: 425621 - DNA, 25 bp, Homo sapien
ttcatcctcccctttgcttcttgac

SEQ ID NO: 425622 - DNA, 25 bp, Homo sapien
ctcctgttcttcatcctcccctttg

SEQ ID NO: 425623 - DNA, 25 bp, Homo sapien
cctgaagaagacccctgggtctgga

SEQ ID NO: 425624 - DNA, 25 bp, Homo sapien
agaagacccctgggtctggacagct

SEQ ID NO: 425625 - DNA, 25 bp, Homo sapien
gaagaagacccctgggtctggacag

SEQ ID NO: 425626 - DNA, 25 bp, Homo sapien
tgaagaagacccctgggtctggaca

SEQ ID NO: 425627 - DNA, 25 bp, Homo sapien
cctccccagcaatttctactgagtt

SEQ ID NO: 425628 - DNA, 25 bp, Homo sapien
gaactggctcttgaaagaagatgtc

SEQ ID NO: 425629 - DNA, 25 bp, Homo sapien
gaaagaagatgtccttcccatctct

SEQ ID NO: 425630 - DNA, 25 bp, Homo sapien
ctgggtgtgtccagatggtggagga

SEQ ID NO: 425631 - DNA, 25 bp, Homo sapien
ctgcaggtagcggatgtgatttcga

SEQ ID NO: 425632 - DNA, 25 bp, Homo sapien
cgagaagtttgacggaaatgtagga

SEQ ID NO: 425633 - DNA, 25 bp, Homo sapien
cggatgtgatttcgagaagtttgac

SEQ ID NO: 425634 - DNA, 25 bp, Homo sapien
tggagggacccatgagtatgagaag

SEQ ID NO: 425635 - DNA, 25 bp, Homo sapien
cacagaattgtttggagccatgtgc

SEQ ID NO: 425636 - DNA, 25 bp, Homo sapien
cagcggctcagggttgtgtttaaaa

SEQ ID NO: 425637 - DNA, 25 bp, Homo sapien
tgcaaatggctcaacacgcaggacg

SEQ ID NO: 425638 - DNA, 25 bp, Homo sapien
tcactgctgggcattgggatgtcct

SEQ ID NO: 425639 - DNA, 25 bp, Homo sapien
gagttggagaacagcaatcaggtcc

SEQ ID NO: 425640 - DNA, 25 bp, Homo sapien
agagggaaagcatggtctgcgtcct

SEQ ID NO: 425641 - DNA, 25 bp, Homo sapien
gagttatccagacaattgtcccaga

SEQ ID NO: 425642 - DNA, 25 bp, Homo sapien
gatctggcttcgactgagttatcca

SEQ ID NO: 425643 - DNA, 25 bp, Homo sapien
aggtctcttcctggagggagaataa

SEQ ID NO: 425644 - DNA, 25 bp, Homo sapien
tcttcctggagggagaataacacac

SEQ ID NO: 425645 - DNA, 25 bp, Homo sapien
tggaggggcttcgtgagtgtctggg

SEQ ID NO: 425646 - DNA, 25 bp, Homo sapien
cttcgtgagtgtctgggatctgccc

SEQ ID NO: 425647 - DNA, 25 bp, Homo sapien
acccaaggccagtccgcttccgtca

SEQ ID NO: 425648 - DNA, 25 bp, Homo sapien
ttgcccccaagtcccgcttcctcat

SEQ ID NO: 425649 - DNA, 25 bp, Homo sapien
gtcacccaaggccagtccgcttccg

SEQ ID NO: 425650 - DNA, 25 bp, Homo sapien
ggccagtccgcttccgtcacccttg

SEQ ID NO: 425651 - DNA, 25 bp, Homo sapien
gggaccacaagccagttgtaaatgc

SEQ ID NO: 425652 - DNA, 25 bp, Homo sapien
aacaccctgggaccacaagccagtt

SEQ ID NO: 425653 - DNA, 25 bp, Homo sapien
ggatatgaactctttggttttgaac

SEQ ID NO: 425654 - DNA, 25 bp, Homo sapien
tggtctggatttgggatatgaactc

SEQ ID NO: 425655 - DNA, 25 bp, Homo sapien
atctgaaccaggtccccggcagtca

SEQ ID NO: 425656 - DNA, 25 bp, Homo sapien
agcatctgaaccaggtccccggcag

SEQ ID NO: 425657 - DNA, 25 bp, Homo sapien
tcactcagcatctgaaccaggtccc

SEQ ID NO: 425658 - DNA, 25 bp, Homo sapien
agggattgcacttggtaacacacac

SEQ ID NO: 425659 - DNA, 25 bp, Homo sapien
tgtcgattccatcgaatccaggact

SEQ ID NO: 425660 - DNA, 25 bp, Homo sapien
tcactgtcgattccatcgaatccag

SEQ ID NO: 425661 - DNA, 25 bp, Homo sapien
gggcttcactgtcgattccatcgaa

SEQ ID NO: 425662 - DNA, 25 bp, Homo sapien
cacacccaggggcttcactgtcgat

SEQ ID NO: 425663 - DNA, 25 bp, Homo sapien
tccttccagaaaaacgagttctgta

SEQ ID NO: 425664 - DNA, 25 bp, Homo sapien
cctccttccagaaaaacgagttctg

SEQ ID NO: 425665 - DNA, 25 bp, Homo sapien
ctccttccagaaaaacgagttctgt

SEQ ID NO: 425666 - DNA, 25 bp, Homo sapien
gtctctctggagctatcaacaaaca

SEQ ID NO: 425667 - DNA, 25 bp, Homo sapien
taggtccaatgaccccaacactggg

SEQ ID NO: 425668 - DNA, 25 bp, Homo sapien
ctcttgattaatagctgtggccaca

SEQ ID NO: 425669 - DNA, 25 bp, Homo sapien
cgggattccctgaagcggcttgtct

SEQ ID NO: 425670 - DNA, 25 bp, Homo sapien
acaaggacagagctgccggctccac

SEQ ID NO: 425671 - DNA, 25 bp, Homo sapien
cttatttccacagagacaaggacag

SEQ ID NO: 425672 - DNA, 25 bp, Homo sapien
agacaaggacagagctgccggctcc

SEQ ID NO: 425673 - DNA, 25 bp, Homo sapien
aaggacagagctgccggctccacac

SEQ ID NO: 425674 - DNA, 25 bp, Homo sapien
aacttctctccactcatcagagcaa

SEQ ID NO: 425675 - DNA, 25 bp, Homo sapien
acttctctccactcatcagagcaag

SEQ ID NO: 425676 - DNA, 25 bp, Homo sapien
ttcaacaacttctctccactcatca

SEQ ID NO: 425677 - DNA, 25 bp, Homo sapien
aacaacttctctccactcatcagag

SEQ ID NO: 425678 - DNA, 25 bp, Homo sapien
tgccctccatgggtgtcagtgggca

SEQ ID NO: 425679 - DNA, 25 bp, Homo sapien
gccctccatgggtgtcagtgggcac

SEQ ID NO: 425680 - DNA, 25 bp, Homo sapien
tagatgtgagcaggaagaccaacag

SEQ ID NO: 425681 - DNA, 25 bp, Homo sapien
agaccaacaggatgcacgtcctgga

SEQ ID NO: 425682 - DNA, 25 bp, Homo sapien
cttctctgtgctactagatgtgagc

SEQ ID NO: 425683 - DNA, 25 bp, Homo sapien
ggagtcagatgtaattcacagaagg

SEQ ID NO: 425684 - DNA, 25 bp, Homo sapien
tcgaagacgtcgtgttatctctgaa

SEQ ID NO: 425685 - DNA, 25 bp, Homo sapien
tgaaactgtcttcgaagacgtcgtg

SEQ ID NO: 425686 - DNA, 25 bp, Homo sapien
agtcatcctgttccataaactgtcc

SEQ ID NO: 425687 - DNA, 25 bp, Homo sapien
ctgagttgtctcctcggaattgaaa

SEQ ID NO: 425688 - DNA, 25 bp, Homo sapien
aacactgcgtgcagcgtgggggcac

SEQ ID NO: 425689 - DNA, 25 bp, Homo sapien
tgcgtgcagcgtgggggcacgtcgg

SEQ ID NO: 425690 - DNA, 25 bp, Homo sapien
ctcgaacactgcgtgcagcgtgggg

SEQ ID NO: 425691 - DNA, 25 bp, Homo sapien
gaacactgcgtgcagcgtgggggca

SEQ ID NO: 425692 - DNA, 25 bp, Homo sapien
cagcgctgacaccgccatggcagct

SEQ ID NO: 425693 - DNA, 25 bp, Homo sapien
catggcagctgggacgccgtaacgg

SEQ ID NO: 425694 - DNA, 25 bp, Homo sapien
ccacagcgctgacaccgccatggca

SEQ ID NO: 425695 - DNA, 25 bp, Homo sapien
atggcagctgggacgccgtaacggg

SEQ ID NO: 425696 - DNA, 25 bp, Homo sapien
gcaggagacccaggtccttcctcat

SEQ ID NO: 425697 - DNA, 25 bp, Homo sapien
caggcctgcaggagacccaggtcct

SEQ ID NO: 425698 - DNA, 25 bp, Homo sapien
gcctgcaggagacccaggtccttcc

SEQ ID NO: 425699 - DNA, 25 bp, Homo sapien
tgcaggagacccaggtccttcctca

SEQ ID NO: 425700 - DNA, 25 bp, Homo sapien
cctgtctggcctcgtgcagcatgga

SEQ ID NO: 425701 - DNA, 25 bp, Homo sapien
tcgagccattgaaggagaaggactg

SEQ ID NO: 425702 - DNA, 25 bp, Homo sapien
aggacacgacagcattcatggccca

SEQ ID NO: 425703 - DNA, 25 bp, Homo sapien
gataagagtttcacgcaggacacga

SEQ ID NO: 425704 - DNA, 25 bp, Homo sapien
cttttagatgccattctctcagata

SEQ ID NO: 425705 - DNA, 25 bp, Homo sapien
gatgccattctctcagatacagcag

SEQ ID NO: 425706 - DNA, 25 bp, Homo sapien
tttagatgccattctctcagataca

SEQ ID NO: 425707 - DNA, 25 bp, Homo sapien
tagatgccattctctcagatacagc

SEQ ID NO: 425708 - DNA, 25 bp, Homo sapien
tgaccgctcacatcaaccggaaggt

SEQ ID NO: 425709 - DNA, 25 bp, Homo sapien
gattcctgtttgctagaaaccagca

SEQ ID NO: 425710 - DNA, 25 bp, Homo sapien
gggctctgccaccacatattatgcg

SEQ ID NO: 425711 - DNA, 25 bp, Homo sapien
gaagatgcaccgacatgcactcatg

SEQ ID NO: 425712 - DNA, 25 bp, Homo sapien
ttctccttccctttagtcttggtga

SEQ ID NO: 425713 - DNA, 25 bp, Homo sapien
tgccaagggttagagtctttctcct

SEQ ID NO: 425714 - DNA, 25 bp, Homo sapien
cactggctttgccaagggttagagt

SEQ ID NO: 425715 - DNA, 25 bp, Homo sapien
ttccctttagtcttggtgatgtctg

SEQ ID NO: 425716 - DNA, 25 bp, Homo sapien
ttcagaatggtattggaaatccaca

SEQ ID NO: 425717 - DNA, 25 bp, Homo sapien
cagatgtacaccaacacccgcctct

SEQ ID NO: 425718 - DNA, 25 bp, Homo sapien
gtattggaaatccacaacccagacc

SEQ ID NO: 425719 - DNA, 25 bp, Homo sapien
ctgcctgaacgcagcttgttcagaa

SEQ ID NO: 425720 - DNA, 25 bp, Homo sapien
cctgccagcgtgagctcacccacga

SEQ ID NO: 425721 - DNA, 25 bp, Homo sapien
agcgtgagctcacccacgaagctca

SEQ ID NO: 425722 - DNA, 25 bp, Homo sapien
agcctcccctgccagcgtgagctca

SEQ ID NO: 425723 - DNA, 25 bp, Homo sapien
tgccagcgtgagctcacccacgaag

SEQ ID NO: 425724 - DNA, 25 bp, Homo sapien
tggcagtcctggaccttggaaatca

SEQ ID NO: 425725 - DNA, 25 bp, Homo sapien
ctatggcagtcctggaccttggaaa

SEQ ID NO: 425726 - DNA, 25 bp, Homo sapien
ggcagtcctggaccttggaaatcat

SEQ ID NO: 425727 - DNA, 25 bp, Homo sapien
tatggcagtcctggaccttggaaat

SEQ ID NO: 425728 - DNA, 25 bp, Homo sapien
gctgtttccttgtccacgtgagtca

SEQ ID NO: 425729 - DNA, 25 bp, Homo sapien
ctggcaagcgcagccgtgacttctc

SEQ ID NO: 425730 - DNA, 25 bp, Homo sapien
gtgacttctcgctaatcttcctgag

SEQ ID NO: 425731 - DNA, 25 bp, Homo sapien
cattcatccttaagaaccccgggtg

SEQ ID NO: 425732 - DNA, 25 bp, Homo sapien
gggtggattatgtcctttcctgaga

SEQ ID NO: 425733 - DNA, 25 bp, Homo sapien
cttgcccccacacagcaggagtgtg

SEQ ID NO: 425734 - DNA, 25 bp, Homo sapien
tgagagtgggtaagcgtggaggtgg

SEQ ID NO: 425735 - DNA, 25 bp, Homo sapien
taggatcctggcagtccatgagctc

SEQ ID NO: 425736 - DNA, 25 bp, Homo sapien
gaagatgtgtgggaaagggttgctt

SEQ ID NO: 425737 - DNA, 25 bp, Homo sapien
ggaaagggttgctttgccgctgtgc

SEQ ID NO: 425738 - DNA, 25 bp, Homo sapien
ggaagatgtgtgggaaagggttgct

SEQ ID NO: 425739 - DNA, 25 bp, Homo sapien
ggagtggggggcagtggatgttcct

SEQ ID NO: 425740 - DNA, 25 bp, Homo sapien
gggaggcatcaaaatagcgtttctg

SEQ ID NO: 425741 - DNA, 25 bp, Homo sapien
gccagcccgcatggaggcaacgtgt

SEQ ID NO: 425742 - DNA, 25 bp, Homo sapien
catcaaaatagcgtttctgagctgc

SEQ ID NO: 425743 - DNA, 25 bp, Homo sapien
tgctctctggaggattgaggcagag

SEQ ID NO: 425744 - DNA, 25 bp, Homo sapien
agctcattcgcttccaggtacagcc

SEQ ID NO: 425745 - DNA, 25 bp, Homo sapien
tccctgggttggagtagattgggcc

SEQ ID NO: 425746 - DNA, 25 bp, Homo sapien
tggaacttcagctcattcgcttcca

SEQ ID NO: 425747 - DNA, 25 bp, Homo sapien
ttggagtagattgggcccctggaac

SEQ ID NO: 425748 - DNA, 25 bp, Homo sapien
ctgcgcttgtccctgaagctacaga

SEQ ID NO: 425749 - DNA, 25 bp, Homo sapien
agctgcgcttgtccctgaagctaca

SEQ ID NO: 425750 - DNA, 25 bp, Homo sapien
tgcgcttgtccctgaagctacagag

SEQ ID NO: 425751 - DNA, 25 bp, Homo sapien
gagctgcgcttgtccctgaagctac

SEQ ID NO: 425752 - DNA, 25 bp, Homo sapien
actaccttgctattgccctcctttc

SEQ ID NO: 425753 - DNA, 25 bp, Homo sapien
ctccccccactaccttgctattgcc

SEQ ID NO: 425754 - DNA, 25 bp, Homo sapien
tgtctcacccgcaagttgctctcac

SEQ ID NO: 425755 - DNA, 25 bp, Homo sapien
ctgtctcacccgcaagttgctctca

SEQ ID NO: 425756 - DNA, 25 bp, Homo sapien
ctgagataaggaggtgaccatcgtt

SEQ ID NO: 425757 - DNA, 25 bp, Homo sapien
ttcaaaacagttgagaactaactcc

SEQ ID NO: 425758 - DNA, 25 bp, Homo sapien
gaccatcgtttcaaaacagttgaga

SEQ ID NO: 425759 - DNA, 25 bp, Homo sapien
ggaggtgaccatcgtttcaaaacag

SEQ ID NO: 425760 - DNA, 25 bp, Homo sapien
ggtgcgggcaaaacacaaacacgct

SEQ ID NO: 425761 - DNA, 25 bp, Homo sapien
acaacacacatcaccatggtgcggg

SEQ ID NO: 425762 - DNA, 25 bp, Homo sapien
tgtttagttaaacaacacacatcac

SEQ ID NO: 425763 - DNA, 25 bp, Homo sapien
caaacacgctattcctctattctat

SEQ ID NO: 425764 - DNA, 25 bp, Homo sapien
cagtggactacctgaaaaatggctc

SEQ ID NO: 425765 - DNA, 25 bp, Homo sapien
gcgctttgaatctctagatgtcaga

SEQ ID NO: 425766 - DNA, 25 bp, Homo sapien
tagcaaggagccgtgaaggcgcttt

SEQ ID NO: 425767 - DNA, 25 bp, Homo sapien
ccccaaaagatctggacatgctcct

SEQ ID NO: 425768 - DNA, 25 bp, Homo sapien
ctgagaaatggtagccttgggagac

SEQ ID NO: 425769 - DNA, 25 bp, Homo sapien
agaaatggtagccttgggagacacc

SEQ ID NO: 425770 - DNA, 25 bp, Homo sapien
tgagaaatggtagccttgggagaca

SEQ ID NO: 425771 - DNA, 25 bp, Homo sapien
gaaatggtagccttgggagacaccc

SEQ ID NO: 425772 - DNA, 25 bp, Homo sapien
ttctctaaacctgcatccttctctg

SEQ ID NO: 425773 - DNA, 25 bp, Homo sapien
aggtgtgagccccaaggtgcccaat

SEQ ID NO: 425774 - DNA, 25 bp, Homo sapien
aaggtgcccaatgtcacactgctgg

SEQ ID NO: 425775 - DNA, 25 bp, Homo sapien
cactgctgggaactgagcctccaca

SEQ ID NO: 425776 - DNA, 25 bp, Homo sapien
taaatcgtgacgaccacctctccag

SEQ ID NO: 425777 - DNA, 25 bp, Homo sapien
tccagcaagcgtgtgagtacgggct

SEQ ID NO: 425778 - DNA, 25 bp, Homo sapien
tgtgagtacgggcttaaatcgtgac

SEQ ID NO: 425779 - DNA, 25 bp, Homo sapien
tcttgtttatccagcaagcgtgtga

SEQ ID NO: 425780 - DNA, 25 bp, Homo sapien
tatcagcatcttcgcagcttcctct

SEQ ID NO: 425781 - DNA, 25 bp, Homo sapien
agcatcttcgcagcttcctctaaag

SEQ ID NO: 425782 - DNA, 25 bp, Homo sapien
ttcggtctatcagcatcttcgcagc

SEQ ID NO: 425783 - DNA, 25 bp, Homo sapien
gggccgccttcggtctatcagcatc

SEQ ID NO: 425784 - DNA, 25 bp, Homo sapien
catggaccaccttgctcccaagcca

SEQ ID NO: 425785 - DNA, 25 bp, Homo sapien
tggaccaccttgctcccaagccaac

SEQ ID NO: 425786 - DNA, 25 bp, Homo sapien
atggaccaccttgctcccaagccaa

SEQ ID NO: 425787 - DNA, 25 bp, Homo sapien
ccccaaggcgctaaggatgcccaga

SEQ ID NO: 425788 - DNA, 25 bp, Homo sapien
aggacagccagacgtggagcagcca

SEQ ID NO: 425789 - DNA, 25 bp, Homo sapien
cccaggacagccagacgtggagcag

SEQ ID NO: 425790 - DNA, 25 bp, Homo sapien
tccaagccaaggcacctcccgccaa

SEQ ID NO: 425791 - DNA, 25 bp, Homo sapien
gggtcgcgtcctacagttctcagaa

SEQ ID NO: 425792 - DNA, 25 bp, Homo sapien
gcaccaagaagaggtgagtccagca

SEQ ID NO: 425793 - DNA, 25 bp, Homo sapien
tgctggaccacagcggtgaaggacc

SEQ ID NO: 425794 - DNA, 25 bp, Homo sapien
tctgccaggttactgcagcaacagg

SEQ ID NO: 425795 - DNA, 25 bp, Homo sapien
atctatatggctacaagtcatttat

SEQ ID NO: 425796 - DNA, 25 bp, Homo sapien
tatctatatggctacaagtcattta

SEQ ID NO: 425797 - DNA, 25 bp, Homo sapien
ccgatcagacgacgggcctgctgtt

SEQ ID NO: 425798 - DNA, 25 bp, Homo sapien
ttctgagaccgaggcagcatctctg

SEQ ID NO: 425799 - DNA, 25 bp, Homo sapien
ggctgagcgcagaccttcctgatac

SEQ ID NO: 425800 - DNA, 25 bp, Homo sapien
tctggaccctccgatcagacgacgg

SEQ ID NO: 425801 - DNA, 25 bp, Homo sapien
tcagtcttagtcagtgctccttcct

SEQ ID NO: 425802 - DNA, 25 bp, Homo sapien
gtgaccattcctcttgctgaaccgg

SEQ ID NO: 425803 - DNA, 25 bp, Homo sapien
gagtgtgcaaatgctccaagggtgc

SEQ ID NO: 425804 - DNA, 25 bp, Homo sapien
catgctctgggcactcaagtcagtc

SEQ ID NO: 425805 - DNA, 25 bp, Homo sapien
tcccaggccgctgtctgaagggctt

SEQ ID NO: 425806 - DNA, 25 bp, Homo sapien
cccaggccgctgtctgaagggcttt

SEQ ID NO: 425807 - DNA, 25 bp, Homo sapien
ctgcttctccacccacctccttcca

SEQ ID NO: 425808 - DNA, 25 bp, Homo sapien
tctccacccacctccttccagccat

SEQ ID NO: 425809 - DNA, 25 bp, Homo sapien
ttctccacccacctccttccagcca

SEQ ID NO: 425810 - DNA, 25 bp, Homo sapien
gcttctccacccacctccttccagc

SEQ ID NO: 425811 - DNA, 25 bp, Homo sapien
gccagacagacatgatccgggcacc

SEQ ID NO: 425812 - DNA, 25 bp, Homo sapien
aagagcggtggcatggtttccaacc

SEQ ID NO: 425813 - DNA, 25 bp, Homo sapien
gaacacaagcgtctgatttcaaagc

SEQ ID NO: 425814 - DNA, 25 bp, Homo sapien
gagaaaaccattcctggctctccag

SEQ ID NO: 425815 - DNA, 25 bp, Homo sapien
gcaacatttatgggaggaataattc

SEQ ID NO: 425816 - DNA, 25 bp, Homo sapien
ctgagcgaatgtccatccgtgtgtc

SEQ ID NO: 425817 - DNA, 25 bp, Homo sapien
tgtgtcatcaacttgtccagggtga

SEQ ID NO: 425818 - DNA, 25 bp, Homo sapien
gaatgtccatccgtgtgtcatcaac

SEQ ID NO: 425819 - DNA, 25 bp, Homo sapien
catccgtgtgtcatcaacttgtcca

SEQ ID NO: 425820 - DNA, 25 bp, Homo sapien
gtctcaacaccagcatttggattcc

SEQ ID NO: 425821 - DNA, 25 bp, Homo sapien
cgtctcaacaccagcatttggattc

SEQ ID NO: 425822 - DNA, 25 bp, Homo sapien
tctcaacaccagcatttggattcca

SEQ ID NO: 425823 - DNA, 25 bp, Homo sapien
gtttctttgcggagagccgcctcct

SEQ ID NO: 425824 - DNA, 25 bp, Homo sapien
tctcctcgttcacgtgctgactcag

SEQ ID NO: 425825 - DNA, 25 bp, Homo sapien
tgtttaggtttctttgcggagagcc

SEQ ID NO: 425826 - DNA, 25 bp, Homo sapien
cacgtgctgactcaggtcttctcca

SEQ ID NO: 425827 - DNA, 25 bp, Homo sapien
cagccagcgtgtgggtgccttctcc

SEQ ID NO: 425828 - DNA, 25 bp, Homo sapien
aggaactccagcaggaaaggagggc

SEQ ID NO: 425829 - DNA, 25 bp, Homo sapien
tccagcaggaaaggagggcggccag

SEQ ID NO: 425830 - DNA, 25 bp, Homo sapien
ggccagccagcgtgtgggtgccttc

SEQ ID NO: 425831 - DNA, 25 bp, Homo sapien
ctgcattcagaatccagcacatcat

SEQ ID NO: 425832 - DNA, 25 bp, Homo sapien
tgcattcagaatccagcacatcata

SEQ ID NO: 425833 - DNA, 25 bp, Homo sapien
gcattcagaatccagcacatcatac

SEQ ID NO: 425834 - DNA, 25 bp, Homo sapien
cagagggagcttgcaaaaccagagg

SEQ ID NO: 425835 - DNA, 25 bp, Homo sapien
tctgcaccgttgacagtggaggcca

SEQ ID NO: 425836 - DNA, 25 bp, Homo sapien
gcagagggagcttgcaaaaccagag

SEQ ID NO: 425837 - DNA, 25 bp, Homo sapien
gcaggcatctgcaccgttgacagtg

SEQ ID NO: 425838 - DNA, 25 bp, Homo sapien
caaacgctttccagaggtaggccag

SEQ ID NO: 425839 - DNA, 25 bp, Homo sapien
tccaaacgctttccagaggtaggcc

SEQ ID NO: 425840 - DNA, 25 bp, Homo sapien
cctctccaaacgctttccagaggta

SEQ ID NO: 425841 - DNA, 25 bp, Homo sapien
tctccaaacgctttccagaggtagg

SEQ ID NO: 425842 - DNA, 25 bp, Homo sapien
tcatgctgcactagggtccctgcta

SEQ ID NO: 425843 - DNA, 25 bp, Homo sapien
cataaactggagcacatgatcgggt

SEQ ID NO: 425844 - DNA, 25 bp, Homo sapien
tcctagggcggcagtcacaagatac

SEQ ID NO: 425845 - DNA, 25 bp, Homo sapien
tcaaaattccgagtgacgtgcaact

SEQ ID NO: 425846 - DNA, 25 bp, Homo sapien
gcgggcggaacagggtgctggcatc

SEQ ID NO: 425847 - DNA, 25 bp, Homo sapien
gttctgcatgctgggcgggcggaac

SEQ ID NO: 425848 - DNA, 25 bp, Homo sapien
ctgtgcgttgtgcttttgttctgca

SEQ ID NO: 425849 - DNA, 25 bp, Homo sapien
ctgtgtttctgtgcgttgtgctttt

SEQ ID NO: 425850 - DNA, 25 bp, Homo sapien
gggaatccgcacagcattttcagac

SEQ ID NO: 425851 - DNA, 25 bp, Homo sapien
tgtgtggtaaccgactgccaccgga

SEQ ID NO: 425852 - DNA, 25 bp, Homo sapien
catctaaggttgctagaaattcggc

SEQ ID NO: 425853 - DNA, 25 bp, Homo sapien
tacgtgtcacttacctagcatttgc

SEQ ID NO: 425854 - DNA, 25 bp, Homo sapien
aacactgcaaatattgccggtggat

SEQ ID NO: 425855 - DNA, 25 bp, Homo sapien
tgccggtggatcctgacttcctcgt

SEQ ID NO: 425856 - DNA, 25 bp, Homo sapien
ctcacgcagccagttgccacattca

SEQ ID NO: 425857 - DNA, 25 bp, Homo sapien
tcgtggaccctactgtgtcgggaaa

SEQ ID NO: 425858 - DNA, 25 bp, Homo sapien
gagccttggaggtctgatgaggcca

SEQ ID NO: 425859 - DNA, 25 bp, Homo sapien
aattaaccctgtctagggagccttg

SEQ ID NO: 425860 - DNA, 25 bp, Homo sapien
tcccaggccacgtgaataattaacc

SEQ ID NO: 425861 - DNA, 25 bp, Homo sapien
ccaggatccaggcttgtgggtagca

SEQ ID NO: 425862 - DNA, 25 bp, Homo sapien
cctccctccagcgtggaatgagcag

SEQ ID NO: 425863 - DNA, 25 bp, Homo sapien
cagcgtggaatgagcagccggtcct

SEQ ID NO: 425864 - DNA, 25 bp, Homo sapien
tccaggtcaggtgactgcatccagc

SEQ ID NO: 425865 - DNA, 25 bp, Homo sapien
gtgttaggcactttgaactctccag

SEQ ID NO: 425866 - DNA, 25 bp, Homo sapien
tgggctggctcggaggctgcctccg

SEQ ID NO: 425867 - DNA, 25 bp, Homo sapien
ctcctccgtccatggctgctgggct

SEQ ID NO: 425868 - DNA, 25 bp, Homo sapien
tgctgggctggctcggaggctgcct

SEQ ID NO: 425869 - DNA, 25 bp, Homo sapien
tggctcggaggctgcctccgtccat

SEQ ID NO: 425870 - DNA, 25 bp, Homo sapien
ggacagtctgtgtcacgcctccatc

SEQ ID NO: 425871 - DNA, 25 bp, Homo sapien
ctgcagtggacagtctgtgtcacgc

SEQ ID NO: 425872 - DNA, 25 bp, Homo sapien
agtggacagtctgtgtcacgcctcc

SEQ ID NO: 425873 - DNA, 25 bp, Homo sapien
cagtggacagtctgtgtcacgcctc

SEQ ID NO: 425874 - DNA, 25 bp, Homo sapien
ggtgaactgtgaatccctgggagat

SEQ ID NO: 425875 - DNA, 25 bp, Homo sapien
ttctcaggaacggacacaagactga

SEQ ID NO: 425876 - DNA, 25 bp, Homo sapien
cctcgggccccacggattgatttag

SEQ ID NO: 425877 - DNA, 25 bp, Homo sapien
actcagatactttgcccctcgggcc

SEQ ID NO: 425878 - DNA, 25 bp, Homo sapien
gttcccagggatccacaatcttcta

SEQ ID NO: 425879 - DNA, 25 bp, Homo sapien
tccacttctgtcatgggctggagag

SEQ ID NO: 425880 - DNA, 25 bp, Homo sapien
tggagagaaaagagcgacatggacc

SEQ ID NO: 425881 - DNA, 25 bp, Homo sapien
ctgcagggccgccatgaagaaaggt

SEQ ID NO: 425882 - DNA, 25 bp, Homo sapien
tgggaagagcctgatgatgccgcct

SEQ ID NO: 425883 - DNA, 25 bp, Homo sapien
tcccccagtgtttcctccaccttca

SEQ ID NO: 425884 - DNA, 25 bp, Homo sapien
cctccaccttcatgaggatccccat

SEQ ID NO: 425885 - DNA, 25 bp, Homo sapien
ttcctccaccttcatgaggatcccc

SEQ ID NO: 425886 - DNA, 25 bp, Homo sapien
ccccagtgtttcctccaccttcatg

SEQ ID NO: 425887 - DNA, 25 bp, Homo sapien
cttgaggtccctcccggcaacggtg

SEQ ID NO: 425888 - DNA, 25 bp, Homo sapien
ccctgcagcgggggaatcacagccg

SEQ ID NO: 425889 - DNA, 25 bp, Homo sapien
ctgcagcgggggaatcacagccgac

SEQ ID NO: 425890 - DNA, 25 bp, Homo sapien
ccctcccggcaacggtgcccactgc

SEQ ID NO: 425891 - DNA, 25 bp, Homo sapien
gacttggtggtcctgacccttgtaa

SEQ ID NO: 425892 - DNA, 25 bp, Homo sapien
cacagaaggcgggtagagggaagaa

SEQ ID NO: 425893 - DNA, 25 bp, Homo sapien
gaagaaggcagtggacttggtggtc

SEQ ID NO: 425894 - DNA, 25 bp, Homo sapien
tcacacagaaggcgggtagagggaa

SEQ ID NO: 425895 - DNA, 25 bp, Homo sapien
ttagggcttcagagaggggtcaagg

SEQ ID NO: 425896 - DNA, 25 bp, Homo sapien
cagagaggggtcaaggttgaagcca

SEQ ID NO: 425897 - DNA, 25 bp, Homo sapien
cttcagagaggggtcaaggttgaag

SEQ ID NO: 425898 - DNA, 25 bp, Homo sapien
tagggcttcagagaggggtcaaggt

SEQ ID NO: 425899 - DNA, 25 bp, Homo sapien
ctctgttcgtttttcagatgtcagt

SEQ ID NO: 425900 - DNA, 25 bp, Homo sapien
ctttgttctagtgggatctctgttc

SEQ ID NO: 425901 - DNA, 25 bp, Homo sapien
tggttaggatggtcgtgtctttgtc

SEQ ID NO: 425902 - DNA, 25 bp, Homo sapien
tcagttagcaacagatatttggaag

SEQ ID NO: 425903 - DNA, 25 bp, Homo sapien
ggcgctcaggtagtcctcttctgtc

SEQ ID NO: 425904 - DNA, 25 bp, Homo sapien
tgctcctggtgagggcgctcaggta

SEQ ID NO: 425905 - DNA, 25 bp, Homo sapien
gtgagggcgctcaggtagtcctctt

SEQ ID NO: 425906 - DNA, 25 bp, Homo sapien
agggcgctcaggtagtcctcttctg

SEQ ID NO: 425907 - DNA, 25 bp, Homo sapien
tggctgatcggcaaatgaagggaaa

SEQ ID NO: 425908 - DNA, 25 bp, Homo sapien
tgggcttgtcaggtcgcacaccttg

SEQ ID NO: 425909 - DNA, 25 bp, Homo sapien
cagtggctggcctataagtgacaac

SEQ ID NO: 425910 - DNA, 25 bp, Homo sapien
tataagtgacaacatccagccacag

SEQ ID NO: 425911 - DNA, 25 bp, Homo sapien
tctctatcatataccaggccacggt

SEQ ID NO: 425912 - DNA, 25 bp, Homo sapien
cgcagtccacacaacagtaaaggca

SEQ ID NO: 425913 - DNA, 25 bp, Homo sapien
tcagaaggcaccctatgggacacag

SEQ ID NO: 425914 - DNA, 25 bp, Homo sapien
cacggtacatgtttgcacgcagggt

SEQ ID NO: 425915 - DNA, 25 bp, Homo sapien
gaagttacgaggctagatggccaca

SEQ ID NO: 425916 - DNA, 25 bp, Homo sapien
tcagcgacccattaggagcacaacg

SEQ ID NO: 425917 - DNA, 25 bp, Homo sapien
aacggcagctagtaccatgtgggca

SEQ ID NO: 425918 - DNA, 25 bp, Homo sapien
tcttaggcaacgagaaacgaacggc

SEQ ID NO: 425919 - DNA, 25 bp, Homo sapien
ttaggtaagccacaacagggcccca

SEQ ID NO: 425920 - DNA, 25 bp, Homo sapien
tcctgatggcaccatgtcacctctg

SEQ ID NO: 425921 - DNA, 25 bp, Homo sapien
aggatcgttccatccccacgaggaa

SEQ ID NO: 425922 - DNA, 25 bp, Homo sapien
cacctctgcttggttaacatttagg

SEQ ID NO: 425923 - DNA, 25 bp, Homo sapien
ctaggtcttgcttcgccgcaggagc

SEQ ID NO: 425924 - DNA, 25 bp, Homo sapien
catggccgccctggaacttgaggct

SEQ ID NO: 425925 - DNA, 25 bp, Homo sapien
gctgagcccctgctcgtcgaacagg

SEQ ID NO: 425926 - DNA, 25 bp, Homo sapien
agtctccaccgtctgtgcgtgccgg

SEQ ID NO: 425927 - DNA, 25 bp, Homo sapien
tctcctcgacaagcagcttgacagt

SEQ ID NO: 425928 - DNA, 25 bp, Homo sapien
ggccttctcctcgacaagcagcttg

SEQ ID NO: 425929 - DNA, 25 bp, Homo sapien
tcgacaagcagcttgacagtggcca

SEQ ID NO: 425930 - DNA, 25 bp, Homo sapien
cgacaagcagcttgacagtggccag

SEQ ID NO: 425931 - DNA, 25 bp, Homo sapien
tgaccgaggcgttcttctccaacag

SEQ ID NO: 425932 - DNA, 25 bp, Homo sapien
tgtgctagactcgtccccgttctgg

SEQ ID NO: 425933 - DNA, 25 bp, Homo sapien
acgatattctcctgcccgtgctggc

SEQ ID NO: 425934 - DNA, 25 bp, Homo sapien
atcagtttgctggtgtccccggaca

SEQ ID NO: 425935 - DNA, 25 bp, Homo sapien
ctgcagggagaggagaggcaaaggt

SEQ ID NO: 425936 - DNA, 25 bp, Homo sapien
tgcagggagaggagaggcaaaggtc

SEQ ID NO: 425937 - DNA, 25 bp, Homo sapien
agaaggcggagtccaccgaggacac

SEQ ID NO: 425938 - DNA, 25 bp, Homo sapien
ctcggagaggctgtagtcgttatcg

SEQ ID NO: 425939 - DNA, 25 bp, Homo sapien
cgctggttgaaggttcccgctcaaa

SEQ ID NO: 425940 - DNA, 25 bp, Homo sapien
cactgccggacgatggcagcttgga

SEQ ID NO: 425941 - DNA, 25 bp, Homo sapien
cacaggtcctcggtttcagaagtaa

SEQ ID NO: 425942 - DNA, 25 bp, Homo sapien
gtttctttcacttcgtcatcaggct

SEQ ID NO: 425943 - DNA, 25 bp, Homo sapien
gcttttcacgtccagatcatgagca

SEQ ID NO: 425944 - DNA, 25 bp, Homo sapien
tccagatcatgagcagtttctttca

SEQ ID NO: 425945 - DNA, 25 bp, Homo sapien
ggacatgtcactcggatgatgactt

SEQ ID NO: 425946 - DNA, 25 bp, Homo sapien
aggggacatgtcactcggatgatga

SEQ ID NO: 425947 - DNA, 25 bp, Homo sapien
agaaaggggacatgtcactcggatg

SEQ ID NO: 425948 - DNA, 25 bp, Homo sapien
aaaggggacatgtcactcggatgat

SEQ ID NO: 425949 - DNA, 25 bp, Homo sapien
gggggagcgccacctgccagtcaca

SEQ ID NO: 425950 - DNA, 25 bp, Homo sapien
cagactcaaggcggaagccttcccc

SEQ ID NO: 425951 - DNA, 25 bp, Homo sapien
agactcaaggcggaagccttccccg

SEQ ID NO: 425952 - DNA, 25 bp, Homo sapien
cgggggagcgccacctgccagtcac

SEQ ID NO: 425953 - DNA, 25 bp, Homo sapien
agtttccatctcatcagggtgactt

SEQ ID NO: 425954 - DNA, 25 bp, Homo sapien
gtttccatctcatcagggtgacttt

SEQ ID NO: 425955 - DNA, 25 bp, Homo sapien
tttccatctcatcagggtgactttc

SEQ ID NO: 425956 - DNA, 25 bp, Homo sapien
agcagggggcggatggttggaggca

SEQ ID NO: 425957 - DNA, 25 bp, Homo sapien
cagggggcggatggttggaggcaac

SEQ ID NO: 425958 - DNA, 25 bp, Homo sapien
cagactcctctgggtggcaagccca

SEQ ID NO: 425959 - DNA, 25 bp, Homo sapien
gactcctctgggtggcaagcccaac

SEQ ID NO: 425960 - DNA, 25 bp, Homo sapien
ccatgatgtgcaggatgttcttctc

SEQ ID NO: 425961 - DNA, 25 bp, Homo sapien
gaaggtgggcctaactcgcggatcc

SEQ ID NO: 425962 - DNA, 25 bp, Homo sapien
agctcggggcggtggcccttcacca

SEQ ID NO: 425963 - DNA, 25 bp, Homo sapien
gcaccgctgcatgaggcgtatcagg

SEQ ID NO: 425964 - DNA, 25 bp, Homo sapien
gtgagcacgccccagatgacgatcg

SEQ ID NO: 425965 - DNA, 25 bp, Homo sapien
ttctgtgtgagcacgccccagatga

SEQ ID NO: 425966 - DNA, 25 bp, Homo sapien
cacgccccagatgacgatcgcaaag

SEQ ID NO: 425967 - DNA, 25 bp, Homo sapien
gcttcttctgtgtgagcacgcccca

SEQ ID NO: 425968 - DNA, 25 bp, Homo sapien
ggccatccatgctgaggtcatgcga

SEQ ID NO: 425969 - DNA, 25 bp, Homo sapien
agagccggctcttctccctgatgcg

SEQ ID NO: 425970 - DNA, 25 bp, Homo sapien
tgtatacatcgtgcttggtgtcgaa

SEQ ID NO: 425971 - DNA, 25 bp, Homo sapien
gcgattgtgccaaacaggccatcca

SEQ ID NO: 425972 - DNA, 25 bp, Homo sapien
agccatcagagcggggctcattagc

SEQ ID NO: 425973 - DNA, 25 bp, Homo sapien
cagccatcagagcggggctcattag

SEQ ID NO: 425974 - DNA, 25 bp, Homo sapien
caggagcaccaggacaaggcctcga

SEQ ID NO: 425975 - DNA, 25 bp, Homo sapien
ctctgcactccagggaaagcgccag

SEQ ID NO: 425976 - DNA, 25 bp, Homo sapien
ggacaaggcctcgactccagcggct

SEQ ID NO: 425977 - DNA, 25 bp, Homo sapien
ggaaggcctgcgagcagggaccggc

SEQ ID NO: 425978 - DNA, 25 bp, Homo sapien
ccgaccctgcaaaccccggcggctg

SEQ ID NO: 425979 - DNA, 25 bp, Homo sapien
agcgagaaccagaggccaccgtcca

SEQ ID NO: 425980 - DNA, 25 bp, Homo sapien
agaaccagaggccaccgtccactct

SEQ ID NO: 425981 - DNA, 25 bp, Homo sapien
gcgagaaccagaggccaccgtccac

SEQ ID NO: 425982 - DNA, 25 bp, Homo sapien
tcagcgagaaccagaggccaccgtc

SEQ ID NO: 425983 - DNA, 25 bp, Homo sapien
cagagcttactagtcattagggccc

SEQ ID NO: 425984 - DNA, 25 bp, Homo sapien
tctagcatgtcctttccggtattca

SEQ ID NO: 425985 - DNA, 25 bp, Homo sapien
tccggtattcagtgcacgttggacg

SEQ ID NO: 425986 - DNA, 25 bp, Homo sapien
tcccgcaggtgaagcctctagcatg

SEQ ID NO: 425987 - DNA, 25 bp, Homo sapien
ctagaaacaagcccgtaaatgttgg

SEQ ID NO: 425988 - DNA, 25 bp, Homo sapien
aagcccgtaaatgttggcgggaatg

SEQ ID NO: 425989 - DNA, 25 bp, Homo sapien
agaaacaagcccgtaaatgttggcg

SEQ ID NO: 425990 - DNA, 25 bp, Homo sapien
tggggggtccgcatgtgaggcccag

SEQ ID NO: 425991 - DNA, 25 bp, Homo sapien
agctctctcgggcaccgtgcggccc

SEQ ID NO: 425992 - DNA, 25 bp, Homo sapien
ccagctctctcgggcaccgtgcggc

SEQ ID NO: 425993 - DNA, 25 bp, Homo sapien
gggcttgaccccttgataccctgct

SEQ ID NO: 425994 - DNA, 25 bp, Homo sapien
tcagggcttgaccccttgataccct

SEQ ID NO: 425995 - DNA, 25 bp, Homo sapien
cgtctcgtggatgattcggaaccgg

SEQ ID NO: 425996 - DNA, 25 bp, Homo sapien
tcggaaccggagatcccatggcaat

SEQ ID NO: 425997 - DNA, 25 bp, Homo sapien
atgtactccatgaccaggccgacag

SEQ ID NO: 425998 - DNA, 25 bp, Homo sapien
tacacaggcaggatgtagcgaaact

SEQ ID NO: 425999 - DNA, 25 bp, Homo sapien
ccgtttaagcccaatacctgagttg

SEQ ID NO: 426000 - DNA, 25 bp, Homo sapien
cttctccgtttaagcccaatacctg

SEQ ID NO: 426001 - DNA, 25 bp, Homo sapien
ttctccgtttaagcccaatacctga

SEQ ID NO: 426002 - DNA, 25 bp, Homo sapien
ttaagcccaatacctgagttggccc

SEQ ID NO: 426003 - DNA, 25 bp, Homo sapien
gcaggaacccctggatcctactgtt

SEQ ID NO: 426004 - DNA, 25 bp, Homo sapien
ggatcctactgtttagctcttgctg

SEQ ID NO: 426005 - DNA, 25 bp, Homo sapien
tggaaattcccatacatcggacagg

SEQ ID NO: 426006 - DNA, 25 bp, Homo sapien
gtaccaaaggctcggagatctcagc

SEQ ID NO: 426007 - DNA, 25 bp, Homo sapien
tagggctagccaaagtgtatttcgc

SEQ ID NO: 426008 - DNA, 25 bp, Homo sapien
cgagaaatacgagaaatatcatcac

SEQ ID NO: 426009 - DNA, 25 bp, Homo sapien
cccagggaggccaatggagtagcga

SEQ ID NO: 426010 - DNA, 25 bp, Homo sapien
caaagtgtatttcgccctcccaggg

SEQ ID NO: 426011 - DNA, 25 bp, Homo sapien
cagaaattccaaagacctgtggacc

SEQ ID NO: 426012 - DNA, 25 bp, Homo sapien
aaagacctgtggaccaggccagctg

SEQ ID NO: 426013 - DNA, 25 bp, Homo sapien
aagaagtcccaaggttcttctccag

SEQ ID NO: 426014 - DNA, 25 bp, Homo sapien
gaaattccaaagacctgtggaccag

SEQ ID NO: 426015 - DNA, 25 bp, Homo sapien
aatgtggcaggagcgtctcccagcc

SEQ ID NO: 426016 - DNA, 25 bp, Homo sapien
gctcgccccgaccagccagggctga

SEQ ID NO: 426017 - DNA, 25 bp, Homo sapien
tgaatgtggcaggagcgtctcccag

SEQ ID NO: 426018 - DNA, 25 bp, Homo sapien
gctgaatgtggcaggagcgtctccc

SEQ ID NO: 426019 - DNA, 25 bp, Homo sapien
gtgctgtggccaagggccggctgaa

SEQ ID NO: 426020 - DNA, 25 bp, Homo sapien
gctgtggccaagggccggctgaagg

SEQ ID NO: 426021 - DNA, 25 bp, Homo sapien
catcaaacaagccccgagcaggtgc

SEQ ID NO: 426022 - DNA, 25 bp, Homo sapien
tgctgtggccaagggccggctgaag

SEQ ID NO: 426023 - DNA, 25 bp, Homo sapien
attaagtcagctaaaacgagagtgt

SEQ ID NO: 426024 - DNA, 25 bp, Homo sapien
cagctaaaacgagagtgtgcggcga

SEQ ID NO: 426025 - DNA, 25 bp, Homo sapien
agagtgtgcggcgaggaagcgctgg

SEQ ID NO: 426026 - DNA, 25 bp, Homo sapien
agtcagctaaaacgagagtgtgcgg

SEQ ID NO: 426027 - DNA, 25 bp, Homo sapien
tttctaagccctgcgcagaccgcag

SEQ ID NO: 426028 - DNA, 25 bp, Homo sapien
tactaagtaagtcgaacggaggcta

SEQ ID NO: 426029 - DNA, 25 bp, Homo sapien
ccaagccgaagcttccgaccgaaat

SEQ ID NO: 426030 - DNA, 25 bp, Homo sapien
ggaggctaactccactcacaaagcc

SEQ ID NO: 426031 - DNA, 25 bp, Homo sapien
cgcggcctcgccggcaattggtttc

SEQ ID NO: 426032 - DNA, 25 bp, Homo sapien
gacaggccgagtggacattgtcgga

SEQ ID NO: 426033 - DNA, 25 bp, Homo sapien
gccgagtggacattgtcggagcccc

SEQ ID NO: 426034 - DNA, 25 bp, Homo sapien
cgagtggacattgtcggagccccgc

SEQ ID NO: 426035 - DNA, 25 bp, Homo sapien
ctgggcgagcacttgatggccagcc

SEQ ID NO: 426036 - DNA, 25 bp, Homo sapien
gaactcgcccgcgtcgaaggtgcgc

SEQ ID NO: 426037 - DNA, 25 bp, Homo sapien
gacatggcgcaccttgtacacctgc

SEQ ID NO: 426038 - DNA, 25 bp, Homo sapien
tccagtggacatggcgcaccttgta

SEQ ID NO: 426039 - DNA, 25 bp, Homo sapien
cgcgcacgtctagccagcgccgcgg

SEQ ID NO: 426040 - DNA, 25 bp, Homo sapien
cgcacgtctagccagcgccgcggcg

SEQ ID NO: 426041 - DNA, 25 bp, Homo sapien
cgccgcggcggctgcccaggtgccc

SEQ ID NO: 426042 - DNA, 25 bp, Homo sapien
gcccaggtgcccaggtgcgcgctcc

SEQ ID NO: 426043 - DNA, 25 bp, Homo sapien
ggatgggactcagcctgtctggaca

SEQ ID NO: 426044 - DNA, 25 bp, Homo sapien
cagtgaagcctgacgctaccgttca

SEQ ID NO: 426045 - DNA, 25 bp, Homo sapien
tgtgacaaggatctcagcgctggcg

SEQ ID NO: 426046 - DNA, 25 bp, Homo sapien
tgaaatgagcattcgaggatgggac

SEQ ID NO: 426047 - DNA, 25 bp, Homo sapien
caccttccctaacaggcagcgggag

SEQ ID NO: 426048 - DNA, 25 bp, Homo sapien
gcaccaccttccctaacaggcagcg

SEQ ID NO: 426049 - DNA, 25 bp, Homo sapien
ccttccctaacaggcagcgggagca

SEQ ID NO: 426050 - DNA, 25 bp, Homo sapien
accaccttccctaacaggcagcggg

SEQ ID NO: 426051 - DNA, 25 bp, Homo sapien
tcatcatacaacctgatgtgacagg

SEQ ID NO: 426052 - DNA, 25 bp, Homo sapien
ggaaatacagccaacatctccaaac

SEQ ID NO: 426053 - DNA, 25 bp, Homo sapien
gacaggaaatacagccaacatctcc

SEQ ID NO: 426054 - DNA, 25 bp, Homo sapien
ggtcacagcaccttttattcgtcat

SEQ ID NO: 426055 - DNA, 25 bp, Homo sapien
ggcggcacttggcacagaacgtttt

SEQ ID NO: 426056 - DNA, 25 bp, Homo sapien
cacaaatgggaacgatagaggtaca

SEQ ID NO: 426057 - DNA, 25 bp, Homo sapien
atgccggacacagcgaggcggcact

SEQ ID NO: 426058 - DNA, 25 bp, Homo sapien
aagccatgagccttccgcctttgga

SEQ ID NO: 426059 - DNA, 25 bp, Homo sapien
gaacacgtcacacgctagagcattc

SEQ ID NO: 426060 - DNA, 25 bp, Homo sapien
ctgagaacacgtcacacgctagagc

SEQ ID NO: 426061 - DNA, 25 bp, Homo sapien
gtcacacgctagagcattccagagg

SEQ ID NO: 426062 - DNA, 25 bp, Homo sapien
agccccttctcaacccacagaccag

SEQ ID NO: 426063 - DNA, 25 bp, Homo sapien
ctggtggccacaatggctggatcta

SEQ ID NO: 426064 - DNA, 25 bp, Homo sapien
acaatggctggatctaatgtcttcc

SEQ ID NO: 426065 - DNA, 25 bp, Homo sapien
tcgagtccacagctgcacggagcca

SEQ ID NO: 426066 - DNA, 25 bp, Homo sapien
ccgcaagactcacaccagtggatgg

SEQ ID NO: 426067 - DNA, 25 bp, Homo sapien
cagaactgcgtataggtgaggactc

SEQ ID NO: 426068 - DNA, 25 bp, Homo sapien
tgaccctattaagaccacgtatgtt

SEQ ID NO: 426069 - DNA, 25 bp, Homo sapien
gatgcggtcttactctaggcactaa

SEQ ID NO: 426070 - DNA, 25 bp, Homo sapien
cattttgcctcagacagtgacccta

SEQ ID NO: 426071 - DNA, 25 bp, Homo sapien
gatcaattactcagccatgccagtg

SEQ ID NO: 426072 - DNA, 25 bp, Homo sapien
ggtgtttcgtcatgagcccaaagcc

SEQ ID NO: 426073 - DNA, 25 bp, Homo sapien
tctgctggcaacatcaggactgctc

SEQ ID NO: 426074 - DNA, 25 bp, Homo sapien
aaagcccgttgggagtctctgcgag

SEQ ID NO: 426075 - DNA, 25 bp, Homo sapien
tcctcacacacagccgcgcgaccct

SEQ ID NO: 426076 - DNA, 25 bp, Homo sapien
gaatcctgagacaacccggaggagc

SEQ ID NO: 426077 - DNA, 25 bp, Homo sapien
cactcgggattctggctgggcttca

SEQ ID NO: 426078 - DNA, 25 bp, Homo sapien
gggaggctcactcctcacacacagc

SEQ ID NO: 426079 - DNA, 25 bp, Homo sapien
cacatgatgaccgtgatgacctcga

SEQ ID NO: 426080 - DNA, 25 bp, Homo sapien
cctcgaaggttgcaggatcaggtgc

SEQ ID NO: 426081 - DNA, 25 bp, Homo sapien
tcagcccatagttgtataagaaccg

SEQ ID NO: 426082 - DNA, 25 bp, Homo sapien
gacagatggtcctacagtgcacatg

SEQ ID NO: 426083 - DNA, 25 bp, Homo sapien
aacttctatgtgctcgcttgcaaaa

SEQ ID NO: 426084 - DNA, 25 bp, Homo sapien
tgtcgggcgaacactggttctgtaa

SEQ ID NO: 426085 - DNA, 25 bp, Homo sapien
tgtctgtgttctcataggaaccgag

SEQ ID NO: 426086 - DNA, 25 bp, Homo sapien
tgctgccacctgtgaatactgtctg

SEQ ID NO: 426087 - DNA, 25 bp, Homo sapien
ggtgtggagccccatccagtttaaa

SEQ ID NO: 426088 - DNA, 25 bp, Homo sapien
ggtatccagcaaacacatctaaaca

SEQ ID NO: 426089 - DNA, 25 bp, Homo sapien
tggagatactctgcaaagctaagtc

SEQ ID NO: 426090 - DNA, 25 bp, Homo sapien
cccttctagagttaagctgacagac

SEQ ID NO: 426091 - DNA, 25 bp, Homo sapien
tcagtagctgtacatctgctgctgc

SEQ ID NO: 426092 - DNA, 25 bp, Homo sapien
gctgctgctgctgctccgcctgcac

SEQ ID NO: 426093 - DNA, 25 bp, Homo sapien
agctgtacatctgctgctgctgctg

SEQ ID NO: 426094 - DNA, 25 bp, Homo sapien
cacagactgtgggttcgaggcttcc

SEQ ID NO: 426095 - DNA, 25 bp, Homo sapien
cggccaccggctggagattggtaaa

SEQ ID NO: 426096 - DNA, 25 bp, Homo sapien
gattggtaaactgagtcgcggccgc

SEQ ID NO: 426097 - DNA, 25 bp, Homo sapien
cggtatcaaaggtcacggtcaggat

SEQ ID NO: 426098 - DNA, 25 bp, Homo sapien
ccaggatgcgctctgtgttaccaca

SEQ ID NO: 426099 - DNA, 25 bp, Homo sapien
gaagcacgacattctttggtgaaag

SEQ ID NO: 426100 - DNA, 25 bp, Homo sapien
tctgaagtgccctgctgttggtaaa

SEQ ID NO: 426101 - DNA, 25 bp, Homo sapien
tgttaccacaccaaagaagcacgac

SEQ ID NO: 426102 - DNA, 25 bp, Homo sapien
tattcgctgaaggtggcgtcctcgg

SEQ ID NO: 426103 - DNA, 25 bp, Homo sapien
tctcttgtgacttcgcttggcagct

SEQ ID NO: 426104 - DNA, 25 bp, Homo sapien
ctgctgaatgctctgtactgcggaa

SEQ ID NO: 426105 - DNA, 25 bp, Homo sapien
gaattggtctcgtcgcctacactgc

SEQ ID NO: 426106 - DNA, 25 bp, Homo sapien
gtgggccaccgagctgccacaagaa

SEQ ID NO: 426107 - DNA, 25 bp, Homo sapien
gcagaaaaatcggtttcagccgaga

SEQ ID NO: 426108 - DNA, 25 bp, Homo sapien
ctggacacactctccaatcagtggg

SEQ ID NO: 426109 - DNA, 25 bp, Homo sapien
caggttagtcggtcacgtcaggcag

SEQ ID NO: 426110 - DNA, 25 bp, Homo sapien
agtttctgagcccctggggccccat

SEQ ID NO: 426111 - DNA, 25 bp, Homo sapien
tttctgagcccctggggccccatgc

SEQ ID NO: 426112 - DNA, 25 bp, Homo sapien
tgagcccctggggccccatgctgct

SEQ ID NO: 426113 - DNA, 25 bp, Homo sapien
tctgagcccctggggccccatgctg

SEQ ID NO: 426114 - DNA, 25 bp, Homo sapien
aggcgtcgatggtggtggtctccgg

SEQ ID NO: 426115 - DNA, 25 bp, Homo sapien
cgatgccaatggaggaggcgtcgat

SEQ ID NO: 426116 - DNA, 25 bp, Homo sapien
ggaggtggtccaggtcatcgatcct

SEQ ID NO: 426117 - DNA, 25 bp, Homo sapien
aggtcatcgatcctcaccgcgagca

SEQ ID NO: 426118 - DNA, 25 bp, Homo sapien
agaagccacacacgccttgggacca

SEQ ID NO: 426119 - DNA, 25 bp, Homo sapien
gatgcaggtgggaacccagaagcca

SEQ ID NO: 426120 - DNA, 25 bp, Homo sapien
tgctgctgatgcaggtgggaaccca

SEQ ID NO: 426121 - DNA, 25 bp, Homo sapien
ctatgaggagcacagggcatgagct

SEQ ID NO: 426122 - DNA, 25 bp, Homo sapien
tggtcctggcgcttcgggttcctac

SEQ ID NO: 426123 - DNA, 25 bp, Homo sapien
ctactcccccgactctgttttctag

SEQ ID NO: 426124 - DNA, 25 bp, Homo sapien
tcctggcgcttcgggttcctactcc

SEQ ID NO: 426125 - DNA, 25 bp, Homo sapien
gtggtcctggcgcttcgggttccta

SEQ ID NO: 426126 - DNA, 25 bp, Homo sapien
cagcatgggggtgtccggtgcgcgg

SEQ ID NO: 426127 - DNA, 25 bp, Homo sapien
tgggggtgtccggtgcgcggcccgc

SEQ ID NO: 426128 - DNA, 25 bp, Homo sapien
tgtccggtgcgcggcccgctggcgg

SEQ ID NO: 426129 - DNA, 25 bp, Homo sapien
ctcagggcctgcctccagtactggg

SEQ ID NO: 426130 - DNA, 25 bp, Homo sapien
cgtacttcttgtcgcacacggagca

SEQ ID NO: 426131 - DNA, 25 bp, Homo sapien
gcatgtgtcggctcatggaggccct

SEQ ID NO: 426132 - DNA, 25 bp, Homo sapien
gctgaacgtgcttctgcagcatgta

SEQ ID NO: 426133 - DNA, 25 bp, Homo sapien
tccaccttgtcgtgtgtgagctgaa

SEQ ID NO: 426134 - DNA, 25 bp, Homo sapien
cacatgcgcgtggaaaggaagagac

SEQ ID NO: 426135 - DNA, 25 bp, Homo sapien
cctgctggacgaggcaagaagcctg

SEQ ID NO: 426136 - DNA, 25 bp, Homo sapien
gtcactagtgcagccatcccaatga

SEQ ID NO: 426137 - DNA, 25 bp, Homo sapien
gaagagacacgcaggtcactagtgc

SEQ ID NO: 426138 - DNA, 25 bp, Homo sapien
catggtgttcctctcgctgaatgtc

SEQ ID NO: 426139 - DNA, 25 bp, Homo sapien
gtggatgagcttgtgggtctccatg

SEQ ID NO: 426140 - DNA, 25 bp, Homo sapien
tgtgtggatgagcttgtgggtctcc

SEQ ID NO: 426141 - DNA, 25 bp, Homo sapien
ccatggtgttcctctcgctgaatgt

SEQ ID NO: 426142 - DNA, 25 bp, Homo sapien
gcagacaatgaacgctcatctccag

SEQ ID NO: 426143 - DNA, 25 bp, Homo sapien
tgacacgttccaggcactgtagggc

SEQ ID NO: 426144 - DNA, 25 bp, Homo sapien
ggtgaattgcaagaagacagcagac

SEQ ID NO: 426145 - DNA, 25 bp, Homo sapien
gaaaggcgcacataacttcctacgt

SEQ ID NO: 426146 - DNA, 25 bp, Homo sapien
tgtggggtgttctgagaacccagat

SEQ ID NO: 426147 - DNA, 25 bp, Homo sapien
gcagagtgtggggtgttctgagaac

SEQ ID NO: 426148 - DNA, 25 bp, Homo sapien
cagagtgtggggtgttctgagaacc

SEQ ID NO: 426149 - DNA, 25 bp, Homo sapien
gagtgtggggtgttctgagaaccca

SEQ ID NO: 426150 - DNA, 25 bp, Homo sapien
tatactggacagagattccccagga

SEQ ID NO: 426151 - DNA, 25 bp, Homo sapien
gggagcaagagtatcccaaaaatgg

SEQ ID NO: 426152 - DNA, 25 bp, Homo sapien
aacccaaagcagacccgtgtggcaa

SEQ ID NO: 426153 - DNA, 25 bp, Homo sapien
gaaagagatggacagtacacttctg

SEQ ID NO: 426154 - DNA, 25 bp, Homo sapien
tgttagtgattgcgcaggatgctct

SEQ ID NO: 426155 - DNA, 25 bp, Homo sapien
gttagtgattgcgcaggatgctcta

SEQ ID NO: 426156 - DNA, 25 bp, Homo sapien
gtgttagtgattgcgcaggatgctc

SEQ ID NO: 426157 - DNA, 25 bp, Homo sapien
gtgctctagtgttttataagatctt

SEQ ID NO: 426158 - DNA, 25 bp, Homo sapien
tagtgattgcgcagggtgctctagt

SEQ ID NO: 426159 - DNA, 25 bp, Homo sapien
gtgttagtgattgcgcagggtgctc

SEQ ID NO: 426160 - DNA, 25 bp, Homo sapien
tgattgcgcagggtgctctagtgtt

SEQ ID NO: 426161 - DNA, 25 bp, Homo sapien
ttagtgattgcgcagggtgctctag

SEQ ID NO: 426162 - DNA, 25 bp, Homo sapien
cgtgtgccgcttgcagtgcttgagc

SEQ ID NO: 426163 - DNA, 25 bp, Homo sapien
tgtgccgcttgcagtgcttgagcat

SEQ ID NO: 426164 - DNA, 25 bp, Homo sapien
gtgtgccgcttgcagtgcttgagca

SEQ ID NO: 426165 - DNA, 25 bp, Homo sapien
ccgtgtgccgcttgcagtgcttgag

SEQ ID NO: 426166 - DNA, 25 bp, Homo sapien
tggcgcagcgcgtgcttggtcttca

SEQ ID NO: 426167 - DNA, 25 bp, Homo sapien
tgcagcttcatgtggtggcgcagcg

SEQ ID NO: 426168 - DNA, 25 bp, Homo sapien
gaccttctgcgcgaacctgcggtgg

SEQ ID NO: 426169 - DNA, 25 bp, Homo sapien
ctccttgcactcgtactccttgatg

SEQ ID NO: 426170 - DNA, 25 bp, Homo sapien
aggacacagcgagtcagaggcggcc

SEQ ID NO: 426171 - DNA, 25 bp, Homo sapien
ttcaaggacacagcgagtcagaggc

SEQ ID NO: 426172 - DNA, 25 bp, Homo sapien
cttcaaggacacagcgagtcagagg

SEQ ID NO: 426173 - DNA, 25 bp, Homo sapien
cacagcgagtcagaggcggccacac

SEQ ID NO: 426174 - DNA, 25 bp, Homo sapien
gggactgactgcaacatcaggtgca

SEQ ID NO: 426175 - DNA, 25 bp, Homo sapien
gaggatcccggtcagtccaccagcg

SEQ ID NO: 426176 - DNA, 25 bp, Homo sapien
tccaccagcggtgagacctgggaag

SEQ ID NO: 426177 - DNA, 25 bp, Homo sapien
gcagcggcccgtgcggtactggtga

SEQ ID NO: 426178 - DNA, 25 bp, Homo sapien
tgaccacgcgagcaacgccggggcg

SEQ ID NO: 426179 - DNA, 25 bp, Homo sapien
ccacgcgagcaacgccggggcggtg

SEQ ID NO: 426180 - DNA, 25 bp, Homo sapien
ctggccgagccctgaccacgcgagc

SEQ ID NO: 426181 - DNA, 25 bp, Homo sapien
cgagccctgaccacgcgagcaacgc

SEQ ID NO: 426182 - DNA, 25 bp, Homo sapien
ccttgacaatatgagtggtgattgg

SEQ ID NO: 426183 - DNA, 25 bp, Homo sapien
gaattcggtgagagatagattaata

SEQ ID NO: 426184 - DNA, 25 bp, Homo sapien
cggacgcgagatggtttcaatctac

SEQ ID NO: 426185 - DNA, 25 bp, Homo sapien
gcatgactaaaggttcccttcaacc

SEQ ID NO: 426186 - DNA, 25 bp, Homo sapien
cgaagaggcgccttcactgtgcctg

SEQ ID NO: 426187 - DNA, 25 bp, Homo sapien
gcggcttggtacacctgaccgtgag

SEQ ID NO: 426188 - DNA, 25 bp, Homo sapien
cagggacagcactgtacaaggccct

SEQ ID NO: 426189 - DNA, 25 bp, Homo sapien
gagcctgaacacagctctgtagtaa

SEQ ID NO: 426190 - DNA, 25 bp, Homo sapien
taccaatgaccgaagagtgattcca

SEQ ID NO: 426191 - DNA, 25 bp, Homo sapien
gcacctgcaggcctattaccaatga

SEQ ID NO: 426192 - DNA, 25 bp, Homo sapien
tcctgccagaattctaaaggccggg

SEQ ID NO: 426193 - DNA, 25 bp, Homo sapien
tccctggctacgagaaaactgcgcg

SEQ ID NO: 426194 - DNA, 25 bp, Homo sapien
caactgctttgaagcaaaatggaca

SEQ ID NO: 426195 - DNA, 25 bp, Homo sapien
ggacagagggaaatgttaaaagtga

SEQ ID NO: 426196 - DNA, 25 bp, Homo sapien
gcagctcggctgacaaatgcaggaa

SEQ ID NO: 426197 - DNA, 25 bp, Homo sapien
tgtgtatctttagggtaacaactgc

SEQ ID NO: 426198 - DNA, 25 bp, Homo sapien
ctaaagttccacggtctccgcggcg

SEQ ID NO: 426199 - DNA, 25 bp, Homo sapien
atctagaatccgtaccgcacagcgg

SEQ ID NO: 426200 - DNA, 25 bp, Homo sapien
atccgtaccgcacagcggccgaggg

SEQ ID NO: 426201 - DNA, 25 bp, Homo sapien
tctccgcggcgtatctagaatccgt

SEQ ID NO: 426202 - DNA, 25 bp, Homo sapien
tcttctcacaagtgccgcagcggta

SEQ ID NO: 426203 - DNA, 25 bp, Homo sapien
agcggtacctgtactcgccgtccac

SEQ ID NO: 426204 - DNA, 25 bp, Homo sapien
gctctcgatgcggaaggtcttctca

SEQ ID NO: 426205 - DNA, 25 bp, Homo sapien
ttgtggaactccagcgcgctctcga

SEQ ID NO: 426206 - DNA, 25 bp, Homo sapien
tcccgctctatttaggaacacaaag

SEQ ID NO: 426207 - DNA, 25 bp, Homo sapien
agcgcagagtccacagatgccgagc

SEQ ID NO: 426208 - DNA, 25 bp, Homo sapien
tgctgttcacctgccctagaaaggg

SEQ ID NO: 426209 - DNA, 25 bp, Homo sapien
gactccacgcctgtgtctgttatga

SEQ ID NO: 426210 - DNA, 25 bp, Homo sapien
gaacaattttgcacactcttcgcac

SEQ ID NO: 426211 - DNA, 25 bp, Homo sapien
ctctctttgcggctgaacaattttg

SEQ ID NO: 426212 - DNA, 25 bp, Homo sapien
aggaaacgtgctgctttaggctctc

SEQ ID NO: 426213 - DNA, 25 bp, Homo sapien
gcacactcttcgcacttaaacagct

SEQ ID NO: 426214 - DNA, 25 bp, Homo sapien
agctgtttgatgagcttgcgccgga

SEQ ID NO: 426215 - DNA, 25 bp, Homo sapien
tgcactggtaaacccgcttgtgctc

SEQ ID NO: 426216 - DNA, 25 bp, Homo sapien
taagctcctcttgagcgtgatggtg

SEQ ID NO: 426217 - DNA, 25 bp, Homo sapien
cgccggatgccgtgtctgcttgaga

SEQ ID NO: 426218 - DNA, 25 bp, Homo sapien
ctgcccagggacgtcaataagttgg

SEQ ID NO: 426219 - DNA, 25 bp, Homo sapien
gcagctttagctgcaacagccacac

SEQ ID NO: 426220 - DNA, 25 bp, Homo sapien
gcagcatgaaaacggcctccttcca

SEQ ID NO: 426221 - DNA, 25 bp, Homo sapien
aatcccgagcctgtatgcgagaaag

SEQ ID NO: 426222 - DNA, 25 bp, Homo sapien
ctgactctgttctaactctggccac

SEQ ID NO: 426223 - DNA, 25 bp, Homo sapien
tctgttctaactctggccaccagaa

SEQ ID NO: 426224 - DNA, 25 bp, Homo sapien
gactctgttctaactctggccacca

SEQ ID NO: 426225 - DNA, 25 bp, Homo sapien
tgttctaactctggccaccagaaag

SEQ ID NO: 426226 - DNA, 25 bp, Homo sapien
tttggaaccgagctggtgtcagtgg

SEQ ID NO: 426227 - DNA, 25 bp, Homo sapien
tcatctggcgttgcactcacaggct

SEQ ID NO: 426228 - DNA, 25 bp, Homo sapien
gggacctcggtaatgatctctgcca

SEQ ID NO: 426229 - DNA, 25 bp, Homo sapien
ggctcatccggagggacctcggtaa

SEQ ID NO: 426230 - DNA, 25 bp, Homo sapien
ttcttctgttctttggtggcaacat

SEQ ID NO: 426231 - DNA, 25 bp, Homo sapien
tttggcttgttctaagtggcccaac

SEQ ID NO: 426232 - DNA, 25 bp, Homo sapien
gcaacattctcgctctcgggcactg

SEQ ID NO: 426233 - DNA, 25 bp, Homo sapien
gcttgttctaagtggcccaacagat

SEQ ID NO: 426234 - DNA, 25 bp, Homo sapien
gactccacgggggcgctgttttctg

SEQ ID NO: 426235 - DNA, 25 bp, Homo sapien
acactttacacgcccactggctggg

SEQ ID NO: 426236 - DNA, 25 bp, Homo sapien
cgactccacgggggcgctgttttct

SEQ ID NO: 426237 - DNA, 25 bp, Homo sapien
gtggcagaacacactttacacgccc

SEQ ID NO: 426238 - DNA, 25 bp, Homo sapien
gaaaaacttgtcatgacgactgccc

SEQ ID NO: 426239 - DNA, 25 bp, Homo sapien
aatttcttcgaatccacgtgggcca

SEQ ID NO: 426240 - DNA, 25 bp, Homo sapien
ttggcgctctgctgctaggtaaaga

SEQ ID NO: 426241 - DNA, 25 bp, Homo sapien
gactgcccgctcatcaagagaagca

SEQ ID NO: 426242 - DNA, 25 bp, Homo sapien
tcttgtgggattcttcaagcagcgg

SEQ ID NO: 426243 - DNA, 25 bp, Homo sapien
aaattttctcgttggaacccatgtg

SEQ ID NO: 426244 - DNA, 25 bp, Homo sapien
caagcagcggattctcagagcgaga

SEQ ID NO: 426245 - DNA, 25 bp, Homo sapien
tccattcgtccacgatcttgtggga

SEQ ID NO: 426246 - DNA, 25 bp, Homo sapien
actcggccaccacaataagtaattt

SEQ ID NO: 426247 - DNA, 25 bp, Homo sapien
ctgggttcgtcggctgccaatacgg

SEQ ID NO: 426248 - DNA, 25 bp, Homo sapien
cggccaccacaataagtaatttaca

SEQ ID NO: 426249 - DNA, 25 bp, Homo sapien
tgggttcgtcggctgccaatacggt

SEQ ID NO: 426250 - DNA, 25 bp, Homo sapien
cgaaggtcttgttatctatcgagat

SEQ ID NO: 426251 - DNA, 25 bp, Homo sapien
cacgtatccagtctgaacagtgaga

SEQ ID NO: 426252 - DNA, 25 bp, Homo sapien
aacagtgagaactgggcaagcggcc

SEQ ID NO: 426253 - DNA, 25 bp, Homo sapien
gatgtttctagcctctcttcgaagg

SEQ ID NO: 426254 - DNA, 25 bp, Homo sapien
aggtggtgaagtacacgtcgctgcc

SEQ ID NO: 426255 - DNA, 25 bp, Homo sapien
tcgctgccgtgctggtaggccgtca

SEQ ID NO: 426256 - DNA, 25 bp, Homo sapien
cagttgcagtcatcctcgttggagg

SEQ ID NO: 426257 - DNA, 25 bp, Homo sapien
atagaaggccgcataccacacgcgc

SEQ ID NO: 426258 - DNA, 25 bp, Homo sapien
gacgagctgagtgatggcgaacacc

SEQ ID NO: 426259 - DNA, 25 bp, Homo sapien
tggactcaaagggaccgaactgtgt

SEQ ID NO: 426260 - DNA, 25 bp, Homo sapien
atttggcgaccctcctggactcaaa

SEQ ID NO: 426261 - DNA, 25 bp, Homo sapien
cagtcgtctgatctccaagttggga

SEQ ID NO: 426262 - DNA, 25 bp, Homo sapien
cagaacagggtcagactggtatggg

SEQ ID NO: 426263 - DNA, 25 bp, Homo sapien
tggtggggctgctacgggacagaac

SEQ ID NO: 426264 - DNA, 25 bp, Homo sapien
tgggaaagacagtgccaacaggtgc

SEQ ID NO: 426265 - DNA, 25 bp, Homo sapien
aaagacagtgccaacaggtgcatcc

SEQ ID NO: 426266 - DNA, 25 bp, Homo sapien
aggtgagggtggaacggcagggcag

SEQ ID NO: 426267 - DNA, 25 bp, Homo sapien
ccccaggtgagggtggaacggcagg

SEQ ID NO: 426268 - DNA, 25 bp, Homo sapien
agctgctgcccactgagccgcctca

SEQ ID NO: 426269 - DNA, 25 bp, Homo sapien
tcccccaggtgagggtggaacggca

SEQ ID NO: 426270 - DNA, 25 bp, Homo sapien
cacgtgtccgctggcaggccaagac

SEQ ID NO: 426271 - DNA, 25 bp, Homo sapien
tgccccgcctgggtgtgcacgtgtc

SEQ ID NO: 426272 - DNA, 25 bp, Homo sapien
tgtccctgtcctcataaccccgcat

SEQ ID NO: 426273 - DNA, 25 bp, Homo sapien
ccgcctgggtgtgcacgtgtccgct

SEQ ID NO: 426274 - DNA, 25 bp, Homo sapien
tgttttggtgtgtcccggcagcaac

SEQ ID NO: 426275 - DNA, 25 bp, Homo sapien
ggcagcaacgctgctcagttcacag

SEQ ID NO: 426276 - DNA, 25 bp, Homo sapien
tggctctcactcagagtgcctctgt

SEQ ID NO: 426277 - DNA, 25 bp, Homo sapien
tgggagcggaatcgctggctctcac

SEQ ID NO: 426278 - DNA, 25 bp, Homo sapien
gccctgcttaacacaaaggagtctt

SEQ ID NO: 426279 - DNA, 25 bp, Homo sapien
cttgccctgcttaacacaaaggagt

SEQ ID NO: 426280 - DNA, 25 bp, Homo sapien
ggcccagctcgggacattcggagtc

SEQ ID NO: 426281 - DNA, 25 bp, Homo sapien
gacattcggagtcgtggtactggct

SEQ ID NO: 426282 - DNA, 25 bp, Homo sapien
agatgaacatgatctcttcgctccc

SEQ ID NO: 426283 - DNA, 25 bp, Homo sapien
atgaacatgatctcttcgctcccat

SEQ ID NO: 426284 - DNA, 25 bp, Homo sapien
atgatctcttcgctcccatcttcag

SEQ ID NO: 426285 - DNA, 25 bp, Homo sapien
aacatgatctcttcgctcccatctt

SEQ ID NO: 426286 - DNA, 25 bp, Homo sapien
gcttgaagggtgaaaagcagaccgt

SEQ ID NO: 426287 - DNA, 25 bp, Homo sapien
gcagaccgtgcaaaactcatatgga

SEQ ID NO: 426288 - DNA, 25 bp, Homo sapien
gcccgttgctgagtggtttaggaaa

SEQ ID NO: 426289 - DNA, 25 bp, Homo sapien
gaaactcacagtcactgaacttgtg

SEQ ID NO: 426290 - DNA, 25 bp, Homo sapien
cagtgccgggttgaaaacttcaagt

SEQ ID NO: 426291 - DNA, 25 bp, Homo sapien
ctgagagcagtgccgggttgaaaac

SEQ ID NO: 426292 - DNA, 25 bp, Homo sapien
ttgaaaacttcaagttaggagagtg

SEQ ID NO: 426293 - DNA, 25 bp, Homo sapien
gagcagtgccgggttgaaaacttca

SEQ ID NO: 426294 - DNA, 25 bp, Homo sapien
actcagtttcatagccgcattcggc

SEQ ID NO: 426295 - DNA, 25 bp, Homo sapien
gctctagcaagtgtgactcagtttc

SEQ ID NO: 426296 - DNA, 25 bp, Homo sapien
tcacgttcaaaggtatctcgtgcgg

SEQ ID NO: 426297 - DNA, 25 bp, Homo sapien
tcatagccgcattcggccttgcctg

SEQ ID NO: 426298 - DNA, 25 bp, Homo sapien
gccccctgcaggaacccacgtgact

SEQ ID NO: 426299 - DNA, 25 bp, Homo sapien
cccctgcaggaacccacgtgactca

SEQ ID NO: 426300 - DNA, 25 bp, Homo sapien
ccctgcaggaacccacgtgactcac

SEQ ID NO: 426301 - DNA, 25 bp, Homo sapien
tttcatgagttgctgctgtgctact

SEQ ID NO: 426302 - DNA, 25 bp, Homo sapien
ggagcttgggcgatgggaacgatag

SEQ ID NO: 426303 - DNA, 25 bp, Homo sapien
agcttgggcgatgggaacgataggc

SEQ ID NO: 426304 - DNA, 25 bp, Homo sapien
gagcttgggcgatgggaacgatagg

SEQ ID NO: 426305 - DNA, 25 bp, Homo sapien
cagcactgcttgggaacatttcaga

SEQ ID NO: 426306 - DNA, 25 bp, Homo sapien
gccagcactgcttgggaacatttca

SEQ ID NO: 426307 - DNA, 25 bp, Homo sapien
ccagcactgcttgggaacatttcag

SEQ ID NO: 426308 - DNA, 25 bp, Homo sapien
agcactgcttgggaacatttcagaa

SEQ ID NO: 426309 - DNA, 25 bp, Homo sapien
tatcagaaatgtcaattaagctcag

SEQ ID NO: 426310 - DNA, 25 bp, Homo sapien
tgtcaattaagctcagaccaggacc

SEQ ID NO: 426311 - DNA, 25 bp, Homo sapien
gaaatgtcaattaagctcagaccag

SEQ ID NO: 426312 - DNA, 25 bp, Homo sapien
caattaagctcagaccaggaccatc

SEQ ID NO: 426313 - DNA, 25 bp, Homo sapien
ctcctccgttcgcaatcttccccag

SEQ ID NO: 426314 - DNA, 25 bp, Homo sapien
gcccaccaccatgcccagctaattt

SEQ ID NO: 426315 - DNA, 25 bp, Homo sapien
agcctccaagtaactgggagtacag

SEQ ID NO: 426316 - DNA, 25 bp, Homo sapien
ccaccaccatgcccagctaattttt

SEQ ID NO: 426317 - DNA, 25 bp, Homo sapien
cctccaagtaactgggagtacaggt

SEQ ID NO: 426318 - DNA, 25 bp, Homo sapien
aatatgcgccgcagaaccatcctga

SEQ ID NO: 426319 - DNA, 25 bp, Homo sapien
tactaagccttagcaatccagtgtg

SEQ ID NO: 426320 - DNA, 25 bp, Homo sapien
cacggcctcgtgacaatattaaaag

SEQ ID NO: 426321 - DNA, 25 bp, Homo sapien
aggagcatctttcccgctgggcaca

SEQ ID NO: 426322 - DNA, 25 bp, Homo sapien
tgcgtcgcaggcctgcactcgcagg

SEQ ID NO: 426323 - DNA, 25 bp, Homo sapien
gtcggacacctcattccctagagat

SEQ ID NO: 426324 - DNA, 25 bp, Homo sapien
ggaggtagggcaggattgcgtcgca

SEQ ID NO: 426325 - DNA, 25 bp, Homo sapien
agtggctcagtgtcggacacctcat

SEQ ID NO: 426326 - DNA, 25 bp, Homo sapien
tctgaccggccctgccgagtacagt

SEQ ID NO: 426327 - DNA, 25 bp, Homo sapien
ctgccgagtacagtctctcctgtag

SEQ ID NO: 426328 - DNA, 25 bp, Homo sapien
gcacccaggctcaggacgtgcagac

SEQ ID NO: 426329 - DNA, 25 bp, Homo sapien
cacccaggctcaggacgtgcagaca

SEQ ID NO: 426330 - DNA, 25 bp, Homo sapien
cactggattcggctggaagaaagca

SEQ ID NO: 426331 - DNA, 25 bp, Homo sapien
gggaataagcgtatccatcatctca

SEQ ID NO: 426332 - DNA, 25 bp, Homo sapien
tttgctaccattgtgcgggccagag

SEQ ID NO: 426333 - DNA, 25 bp, Homo sapien
tagaactgtgctaggtggcttcacg

SEQ ID NO: 426334 - DNA, 25 bp, Homo sapien
acaaggagatcggtcaaacggagcc

SEQ ID NO: 426335 - DNA, 25 bp, Homo sapien
tcctctctgagaaagccgagctcca

SEQ ID NO: 426336 - DNA, 25 bp, Homo sapien
cctggaccacgatgaacaaggagat

SEQ ID NO: 426337 - DNA, 25 bp, Homo sapien
ggactccaggacaggctgacacctg

SEQ ID NO: 426338 - DNA, 25 bp, Homo sapien
tgccacccccaactcccaagccggc

SEQ ID NO: 426339 - DNA, 25 bp, Homo sapien
ctgccacccccaactcccaagccgg

SEQ ID NO: 426340 - DNA, 25 bp, Homo sapien
gccacccccaactcccaagccggca

SEQ ID NO: 426341 - DNA, 25 bp, Homo sapien
ccacccccaactcccaagccggcat

SEQ ID NO: 426342 - DNA, 25 bp, Homo sapien
gaatcatcaccgcagtacactcgtg

SEQ ID NO: 426343 - DNA, 25 bp, Homo sapien
tacactcgtgtgtagcttcctgaca

SEQ ID NO: 426344 - DNA, 25 bp, Homo sapien
taacgtaaaaaatgcggtcctatca

SEQ ID NO: 426345 - DNA, 25 bp, Homo sapien
cagtgtgactacaattggaacacca

SEQ ID NO: 426346 - DNA, 25 bp, Homo sapien
cccagaacattaggtccaccaggtg

SEQ ID NO: 426347 - DNA, 25 bp, Homo sapien
gattttctgtctacaccacctccac

SEQ ID NO: 426348 - DNA, 25 bp, Homo sapien
tcccctgcccagaacattaggtcca

SEQ ID NO: 426349 - DNA, 25 bp, Homo sapien
ctgcccagaacattaggtccaccag

SEQ ID NO: 426350 - DNA, 25 bp, Homo sapien
ctcttgagcgcacgggtggaagaca

SEQ ID NO: 426351 - DNA, 25 bp, Homo sapien
atcccaacctcttgagcgcacgggt

SEQ ID NO: 426352 - DNA, 25 bp, Homo sapien
ggtggaagacacagttgccttaaat

SEQ ID NO: 426353 - DNA, 25 bp, Homo sapien
cacagttgccttaaatctcccttca

SEQ ID NO: 426354 - DNA, 25 bp, Homo sapien
tgcgacccgcatgggctgtacccga

SEQ ID NO: 426355 - DNA, 25 bp, Homo sapien
ggataacgacatcccctggggcctc

SEQ ID NO: 426356 - DNA, 25 bp, Homo sapien
acccgcatgggctgtacccgagggc

SEQ ID NO: 426357 - DNA, 25 bp, Homo sapien
ggcctcggcgacgacgccgcccggc

SEQ ID NO: 426358 - DNA, 25 bp, Homo sapien
acaaagaacagtcggcatggcggct

SEQ ID NO: 426359 - DNA, 25 bp, Homo sapien
cccggagcggctccgggaaatccag

SEQ ID NO: 426360 - DNA, 25 bp, Homo sapien
ttttgactccgatcgccaacggtgc

SEQ ID NO: 426361 - DNA, 25 bp, Homo sapien
cgcagccggcgaatgtaacaaagaa

SEQ ID NO: 426362 - DNA, 25 bp, Homo sapien
gttgcgatccgctccggaaactgcg

SEQ ID NO: 426363 - DNA, 25 bp, Homo sapien
atcggatccggactccgggttgcga

SEQ ID NO: 426364 - DNA, 25 bp, Homo sapien
ctttggaatgtgcagagcgggatcg

SEQ ID NO: 426365 - DNA, 25 bp, Homo sapien
ccggaaactgcgcagcaccggaagc

SEQ ID NO: 426366 - DNA, 25 bp, Homo sapien
gggcgcaggcgagaccctggcgcgg

SEQ ID NO: 426367 - DNA, 25 bp, Homo sapien
ggggcgcaggcgagaccctggcgcg

SEQ ID NO: 426368 - DNA, 25 bp, Homo sapien
gtctgtgctcacgtaagggtcatca

SEQ ID NO: 426369 - DNA, 25 bp, Homo sapien
gcagtggagacgcattggcaaacag

SEQ ID NO: 426370 - DNA, 25 bp, Homo sapien
tgaactgctgggcacgaggatgcac

SEQ ID NO: 426371 - DNA, 25 bp, Homo sapien
gatgcacactccagaatgaccgagg

SEQ ID NO: 426372 - DNA, 25 bp, Homo sapien
taccctgaagctagccgacgtgttg

SEQ ID NO: 426373 - DNA, 25 bp, Homo sapien
gagccgtgagattactacccaggaa

SEQ ID NO: 426374 - DNA, 25 bp, Homo sapien
ttaacatgggtgcacgtcttctggc

SEQ ID NO: 426375 - DNA, 25 bp, Homo sapien
taaatgatgaatggtgcgctgctgc

SEQ ID NO: 426376 - DNA, 25 bp, Homo sapien
ctttctgttgatgccgccggcggaa

SEQ ID NO: 426377 - DNA, 25 bp, Homo sapien
tgatgcctttcctccgggaaccctc

SEQ ID NO: 426378 - DNA, 25 bp, Homo sapien
cacaaggtcattgtgtgactgactc

SEQ ID NO: 426379 - DNA, 25 bp, Homo sapien
gtcattgtgtgactgactcatgcct

SEQ ID NO: 426380 - DNA, 25 bp, Homo sapien
tcattaggaagggtgtagctggcaa

SEQ ID NO: 426381 - DNA, 25 bp, Homo sapien
tattgcctcggttgggatacctggg

SEQ ID NO: 426382 - DNA, 25 bp, Homo sapien
tttctatcagaccaaatggaggcag

SEQ ID NO: 426383 - DNA, 25 bp, Homo sapien
gtactatgtcccagaaaggatggtc

SEQ ID NO: 426384 - DNA, 25 bp, Homo sapien
gcaaggtcgagggagtaagcatttc

SEQ ID NO: 426385 - DNA, 25 bp, Homo sapien
ctaatgtagtgggtgcaagagccca

SEQ ID NO: 426386 - DNA, 25 bp, Homo sapien
taacatcctattaaccaaggctggc

SEQ ID NO: 426387 - DNA, 25 bp, Homo sapien
tgtgaaattcattaccgctggcatg

SEQ ID NO: 426388 - DNA, 25 bp, Homo sapien
ccttgaagctctgctttaggctgat

SEQ ID NO: 426389 - DNA, 25 bp, Homo sapien
cttgaagctctgctttaggctgatc

SEQ ID NO: 426390 - DNA, 25 bp, Homo sapien
tgccttgaagctctgctttaggctg

SEQ ID NO: 426391 - DNA, 25 bp, Homo sapien
tgaagctctgctttaggctgatctt

SEQ ID NO: 426392 - DNA, 25 bp, Homo sapien
ctggactgctccaacgtcaccccct

SEQ ID NO: 426393 - DNA, 25 bp, Homo sapien
ccttcacttctaggggaaatggagg

SEQ ID NO: 426394 - DNA, 25 bp, Homo sapien
tggactgctccaacgtcaccccctt

SEQ ID NO: 426395 - DNA, 25 bp, Homo sapien
ggactgctccaacgtcacccccttc

SEQ ID NO: 426396 - DNA, 25 bp, Homo sapien
gcacttcactctgggggccggcaga

SEQ ID NO: 426397 - DNA, 25 bp, Homo sapien
ttcgcacttcactctgggggccggc

SEQ ID NO: 426398 - DNA, 25 bp, Homo sapien
cactctgggggccggcagaccacag

SEQ ID NO: 426399 - DNA, 25 bp, Homo sapien
tcactctgggggccggcagaccaca

SEQ ID NO: 426400 - DNA, 25 bp, Homo sapien
gtgcacatcaccatgcctcgataat

SEQ ID NO: 426401 - DNA, 25 bp, Homo sapien
acatcaccatgcctcgataattttg

SEQ ID NO: 426402 - DNA, 25 bp, Homo sapien
atcaccatgcctcgataattttgta

SEQ ID NO: 426403 - DNA, 25 bp, Homo sapien
gcacatcaccatgcctcgataattt

SEQ ID NO: 426404 - DNA, 25 bp, Homo sapien
gagtgtggatacatcaaagcccgtg

SEQ ID NO: 426405 - DNA, 25 bp, Homo sapien
ccatatggaatgtaccggtctgccc

SEQ ID NO: 426406 - DNA, 25 bp, Homo sapien
gaaagcctgtttcgacttggaagca

SEQ ID NO: 426407 - DNA, 25 bp, Homo sapien
tgcagcacccggagattcaacagaa

SEQ ID NO: 426408 - DNA, 25 bp, Homo sapien
tgaaggccctaagagcaaacactgg

SEQ ID NO: 426409 - DNA, 25 bp, Homo sapien
aggccctaagagcaaacactggttt

SEQ ID NO: 426410 - DNA, 25 bp, Homo sapien
ctgaaggccctaagagcaaacactg

SEQ ID NO: 426411 - DNA, 25 bp, Homo sapien
gaaggccctaagagcaaacactggt

SEQ ID NO: 426412 - DNA, 25 bp, Homo sapien
cacactacggtcaacaatagccggg

SEQ ID NO: 426413 - DNA, 25 bp, Homo sapien
tgaagcctgactacttgactccagg

SEQ ID NO: 426414 - DNA, 25 bp, Homo sapien
tgccctgcggatttcagacctgtca

SEQ ID NO: 426415 - DNA, 25 bp, Homo sapien
ctttgagcccgcagaatgtgttgcc

SEQ ID NO: 426416 - DNA, 25 bp, Homo sapien
aggcctcttaacaggagcacaggag

SEQ ID NO: 426417 - DNA, 25 bp, Homo sapien
caagccaaggcctcttaacaggagc

SEQ ID NO: 426418 - DNA, 25 bp, Homo sapien
ggtgaccaggtcacctttgacataa

SEQ ID NO: 426419 - DNA, 25 bp, Homo sapien
cctttgacataacccaagccaaggc

SEQ ID NO: 426420 - DNA, 25 bp, Homo sapien
atgtccttttgtcccccgaatggtg

SEQ ID NO: 426421 - DNA, 25 bp, Homo sapien
tgtcccccgaatggtggagtcaggt

SEQ ID NO: 426422 - DNA, 25 bp, Homo sapien
ttttgtcccccgaatggtggagtca

SEQ ID NO: 426423 - DNA, 25 bp, Homo sapien
caagatgtccttttgtcccccgaat

SEQ ID NO: 426424 - DNA, 25 bp, Homo sapien
agaaggaccggcagatgccccacca

SEQ ID NO: 426425 - DNA, 25 bp, Homo sapien
cctcccacagaaggaccggcagatg

SEQ ID NO: 426426 - DNA, 25 bp, Homo sapien
aaatgcagagatgacgccaaccctc

SEQ ID NO: 426427 - DNA, 25 bp, Homo sapien
gatgccccaccacgggttcaaacat

SEQ ID NO: 426428 - DNA, 25 bp, Homo sapien
tttatgctttttggcagtgcccggc

SEQ ID NO: 426429 - DNA, 25 bp, Homo sapien
agacactcatggagctctctgacag

SEQ ID NO: 426430 - DNA, 25 bp, Homo sapien
cctgcatcagggcagcgtcgtggtc

SEQ ID NO: 426431 - DNA, 25 bp, Homo sapien
tctctgacagctcatcaccgtcggg

SEQ ID NO: 426432 - DNA, 25 bp, Homo sapien
taaagcgtccctgattagaaagtct

SEQ ID NO: 426433 - DNA, 25 bp, Homo sapien
tctggacgttaaccaagtgcttggg

SEQ ID NO: 426434 - DNA, 25 bp, Homo sapien
tgtaacatggcccttcacctgaggg

SEQ ID NO: 426435 - DNA, 25 bp, Homo sapien
aaaggctttggaaacgtgtcacgtg

SEQ ID NO: 426436 - DNA, 25 bp, Homo sapien
aggtcactgacagatgaccagatga

SEQ ID NO: 426437 - DNA, 25 bp, Homo sapien
gcaggtcactgacagatgaccagat

SEQ ID NO: 426438 - DNA, 25 bp, Homo sapien
caggtcactgacagatgaccagatg

SEQ ID NO: 426439 - DNA, 25 bp, Homo sapien
tccgtggcgacttgagtttcagctt

SEQ ID NO: 426440 - DNA, 25 bp, Homo sapien
taatagtgcttttcttccgtggcga

SEQ ID NO: 426441 - DNA, 25 bp, Homo sapien
tcactgagctgtcgaatggccactt

SEQ ID NO: 426442 - DNA, 25 bp, Homo sapien
ttcagccactggatccgaaccattc

SEQ ID NO: 426443 - DNA, 25 bp, Homo sapien
ctgtgtctgaagaagagagtgtttt

SEQ ID NO: 426444 - DNA, 25 bp, Homo sapien
cttcaccttgatgggagtcttcacc

SEQ ID NO: 426445 - DNA, 25 bp, Homo sapien
gtgtctgaagaagagagtgttttgc

SEQ ID NO: 426446 - DNA, 25 bp, Homo sapien
ttctcgatcaccttcaccttgatgg

SEQ ID NO: 426447 - DNA, 25 bp, Homo sapien
aggaagatcctgattacaaaagcgg

SEQ ID NO: 426448 - DNA, 25 bp, Homo sapien
agaggaagatcctgattacaaaagc

SEQ ID NO: 426449 - DNA, 25 bp, Homo sapien
gccagaggaagatcctgattacaaa

SEQ ID NO: 426450 - DNA, 25 bp, Homo sapien
ctgccagaggaagatcctgattaca

SEQ ID NO: 426451 - DNA, 25 bp, Homo sapien
gaatttcctaacactcggcgctgca

SEQ ID NO: 426452 - DNA, 25 bp, Homo sapien
gaaagttcctcgactgcgttcctgt

SEQ ID NO: 426453 - DNA, 25 bp, Homo sapien
tacaggcaggcgtcatgcagaaagt

SEQ ID NO: 426454 - DNA, 25 bp, Homo sapien
aagaaaaaagcgtgtgctgtcccca

SEQ ID NO: 426455 - DNA, 25 bp, Homo sapien
gggcatcaccgtgcggtccttttct

SEQ ID NO: 426456 - DNA, 25 bp, Homo sapien
tccccacgtcgacgcgaggcttggt

SEQ ID NO: 426457 - DNA, 25 bp, Homo sapien
cgacgcgaggcttggtcttcacagc

SEQ ID NO: 426458 - DNA, 25 bp, Homo sapien
cagggcatcaccgtgcggtcctttt

SEQ ID NO: 426459 - DNA, 25 bp, Homo sapien
ggaactgtcgccgtcgccagcagac

SEQ ID NO: 426460 - DNA, 25 bp, Homo sapien
gcttcttaaataagtccagaggaac

SEQ ID NO: 426461 - DNA, 25 bp, Homo sapien
caggcagacccgctggtcagcgtga

SEQ ID NO: 426462 - DNA, 25 bp, Homo sapien
cgtgaagctctgtggcccagaaggc

SEQ ID NO: 426463 - DNA, 25 bp, Homo sapien
tcacgggcatcccagttttctcggg

SEQ ID NO: 426464 - DNA, 25 bp, Homo sapien
tctcgggactccaaaatcaaggaag

SEQ ID NO: 426465 - DNA, 25 bp, Homo sapien
gagagagagaccaagcatgagcaca

SEQ ID NO: 426466 - DNA, 25 bp, Homo sapien
cacaaatagtagaggaaactgggca

SEQ ID NO: 426467 - DNA, 25 bp, Homo sapien
tgaaatctgcaggtgtaactccttc

SEQ ID NO: 426468 - DNA, 25 bp, Homo sapien
taactccttcgacttggcattcaac

SEQ ID NO: 426469 - DNA, 25 bp, Homo sapien
tgcaggtgtaactccttcgacttgg

SEQ ID NO: 426470 - DNA, 25 bp, Homo sapien
ctgaggatcgcccagcctctgaaat

SEQ ID NO: 426471 - DNA, 25 bp, Homo sapien
gaatgatttcaggatttggcgctcc

SEQ ID NO: 426472 - DNA, 25 bp, Homo sapien
tgttttagcctaaacggtgctgcag

SEQ ID NO: 426473 - DNA, 25 bp, Homo sapien
gctaggagtactacaggcaaggcaa

SEQ ID NO: 426474 - DNA, 25 bp, Homo sapien
tgtctgtaagagaccccacgatggc

SEQ ID NO: 426475 - DNA, 25 bp, Homo sapien
caggatcgttcagctgcacgacgca

SEQ ID NO: 426476 - DNA, 25 bp, Homo sapien
catgaggtccggagtgtttttcgtc

SEQ ID NO: 426477 - DNA, 25 bp, Homo sapien
tggagaacctctgaacaggatcgtt

SEQ ID NO: 426478 - DNA, 25 bp, Homo sapien
ggtgaattcctcttcccacatgagg

SEQ ID NO: 426479 - DNA, 25 bp, Homo sapien
ctgatactagccagggtatttgatc

SEQ ID NO: 426480 - DNA, 25 bp, Homo sapien
tttgatccaggtagtaggacatgtc

SEQ ID NO: 426481 - DNA, 25 bp, Homo sapien
gtaggacatgtcactagtgaacagc

SEQ ID NO: 426482 - DNA, 25 bp, Homo sapien
gccagggtatttgatccaggtagta

SEQ ID NO: 426483 - DNA, 25 bp, Homo sapien
ctcgtgagcccttggaggtttagga

SEQ ID NO: 426484 - DNA, 25 bp, Homo sapien
gattcctgagcagtagatgcagcac

SEQ ID NO: 426485 - DNA, 25 bp, Homo sapien
accagtagcttcagctcgtgagccc

SEQ ID NO: 426486 - DNA, 25 bp, Homo sapien
agcaagacgtggatgttcctcacca

SEQ ID NO: 426487 - DNA, 25 bp, Homo sapien
tgcgggcactcatggcctgctagta

SEQ ID NO: 426488 - DNA, 25 bp, Homo sapien
ctagtacagagcaggacaccagaca

SEQ ID NO: 426489 - DNA, 25 bp, Homo sapien
cacacagagtccaacgtccacatga

SEQ ID NO: 426490 - DNA, 25 bp, Homo sapien
aggaaagtctatgcataccctagca

SEQ ID NO: 426491 - DNA, 25 bp, Homo sapien
cacaacgtgcgggttaaagaggctc

SEQ ID NO: 426492 - DNA, 25 bp, Homo sapien
tcccaaacgtgagctgagggtgctg

SEQ ID NO: 426493 - DNA, 25 bp, Homo sapien
tgttcgttgcaagcattcagggacc

SEQ ID NO: 426494 - DNA, 25 bp, Homo sapien
gagcaatctacttgtctgggacaga

SEQ ID NO: 426495 - DNA, 25 bp, Homo sapien
acaaaggattactgatgtgttattt

SEQ ID NO: 426496 - DNA, 25 bp, Homo sapien
tcctggaaagatgaggtctagggct

SEQ ID NO: 426497 - DNA, 25 bp, Homo sapien
tctgcttgcttctggggcaatgttc

SEQ ID NO: 426498 - DNA, 25 bp, Homo sapien
ccaggtaccttggtcctggaaagat

SEQ ID NO: 426499 - DNA, 25 bp, Homo sapien
gcttctggggcaatgttctcaacac

SEQ ID NO: 426500 - DNA, 25 bp, Homo sapien
ctgagcttcctttacagtcgtgggc

SEQ ID NO: 426501 - DNA, 25 bp, Homo sapien
caagatgtccttgagaacgtcagac

SEQ ID NO: 426502 - DNA, 25 bp, Homo sapien
tcagacatcgcacttgtctcagcca

SEQ ID NO: 426503 - DNA, 25 bp, Homo sapien
cgtgggcttggtaatcagaaccact

SEQ ID NO: 426504 - DNA, 25 bp, Homo sapien
taacggccatttccggcacactgat

SEQ ID NO: 426505 - DNA, 25 bp, Homo sapien
gatattaacggccatttccggcaca

SEQ ID NO: 426506 - DNA, 25 bp, Homo sapien
tgggctggatattaacggccatttc

SEQ ID NO: 426507 - DNA, 25 bp, Homo sapien
tgctttgggctggatattaacggcc

SEQ ID NO: 426508 - DNA, 25 bp, Homo sapien
agagggccactctttccaccaaagc

SEQ ID NO: 426509 - DNA, 25 bp, Homo sapien
caagttattagagggccactctttc

SEQ ID NO: 426510 - DNA, 25 bp, Homo sapien
aaacaagttattagagggccactct

SEQ ID NO: 426511 - DNA, 25 bp, Homo sapien
ttattagagggccactctttccacc

SEQ ID NO: 426512 - DNA, 25 bp, Homo sapien
cagaaaactgcttagctttccactt

SEQ ID NO: 426513 - DNA, 25 bp, Homo sapien
cttggcatacaatgtgctttcaaaa

SEQ ID NO: 426514 - DNA, 25 bp, Homo sapien
tttccacttggcatacaatgtgctt

SEQ ID NO: 426515 - DNA, 25 bp, Homo sapien
catgtgtatttgagcgtgtgcggaa

SEQ ID NO: 426516 - DNA, 25 bp, Homo sapien
ctgtaaatggaaaggggagagccgc

SEQ ID NO: 426517 - DNA, 25 bp, Homo sapien
gtaaatggaaaggggagagccgcat

SEQ ID NO: 426518 - DNA, 25 bp, Homo sapien
tgtaaatggaaaggggagagccgca

SEQ ID NO: 426519 - DNA, 25 bp, Homo sapien
tcgctgaccaagaactgaatagcct

SEQ ID NO: 426520 - DNA, 25 bp, Homo sapien
tggcccaccacgtgacagaccacca

SEQ ID NO: 426521 - DNA, 25 bp, Homo sapien
aagaactgaatagcctggcccacca

SEQ ID NO: 426522 - DNA, 25 bp, Homo sapien
gcaggcgtctcgctgaccaagaact

SEQ ID NO: 426523 - DNA, 25 bp, Homo sapien
tcctcattcccaaaagaaccactga

SEQ ID NO: 426524 - DNA, 25 bp, Homo sapien
attcccaaaagaaccactgactcca

SEQ ID NO: 426525 - DNA, 25 bp, Homo sapien
ctcctcattcccaaaagaaccactg

SEQ ID NO: 426526 - DNA, 25 bp, Homo sapien
tcattcccaaaagaaccactgactc

SEQ ID NO: 426527 - DNA, 25 bp, Homo sapien
tgggtccagctcttcccaccagtgg

SEQ ID NO: 426528 - DNA, 25 bp, Homo sapien
cttcccaccagtggcccatcccact

SEQ ID NO: 426529 - DNA, 25 bp, Homo sapien
gctcctggccgcagccaagccctgg

SEQ ID NO: 426530 - DNA, 25 bp, Homo sapien
cagctcttcccaccagtggcccatc

SEQ ID NO: 426531 - DNA, 25 bp, Homo sapien
gggaaaacaagactgaaggctgaag

SEQ ID NO: 426532 - DNA, 25 bp, Homo sapien
ctgggcagcagatggaagcaccacg

SEQ ID NO: 426533 - DNA, 25 bp, Homo sapien
aaggctgaagagcaggctgagcggg

SEQ ID NO: 426534 - DNA, 25 bp, Homo sapien
cagatggaagcaccacggggagggg

SEQ ID NO: 426535 - DNA, 25 bp, Homo sapien
cagcgcttatctggaaactattcct

SEQ ID NO: 426536 - DNA, 25 bp, Homo sapien
gattttgctactgttcaccaacaag

SEQ ID NO: 426537 - DNA, 25 bp, Homo sapien
ggcacagttactccagattttgcta

SEQ ID NO: 426538 - DNA, 25 bp, Homo sapien
tgcaaacagcgcttatctggaaact

SEQ ID NO: 426539 - DNA, 25 bp, Homo sapien
ctgggaatacgagtgtgcagcacca

SEQ ID NO: 426540 - DNA, 25 bp, Homo sapien
tgggaatacgagtgtgcagcaccat

SEQ ID NO: 426541 - DNA, 25 bp, Homo sapien
gctgggaatacgagtgtgcagcacc

SEQ ID NO: 426542 - DNA, 25 bp, Homo sapien
tggctcggcccagaattccatacac

SEQ ID NO: 426543 - DNA, 25 bp, Homo sapien
catacaccatcatccagacgaacag

SEQ ID NO: 426544 - DNA, 25 bp, Homo sapien
catccagacgaacaggtggcctcgt

SEQ ID NO: 426545 - DNA, 25 bp, Homo sapien
ctgcaggctggctcggcccagaatt

SEQ ID NO: 426546 - DNA, 25 bp, Homo sapien
gcgagttatgggtttcccctagaga

SEQ ID NO: 426547 - DNA, 25 bp, Homo sapien
gggaaattccacacgatcgtccagt

SEQ ID NO: 426548 - DNA, 25 bp, Homo sapien
ggtttcccctagagaggatatggaa

SEQ ID NO: 426549 - DNA, 25 bp, Homo sapien
cacgatcgtccagttccgtctgtag

SEQ ID NO: 426550 - DNA, 25 bp, Homo sapien
gggcaggagcgtgcttccacacccg

SEQ ID NO: 426551 - DNA, 25 bp, Homo sapien
tccacacccggtctgagcagatacc

SEQ ID NO: 426552 - DNA, 25 bp, Homo sapien
gccgtgggcaggagcgtgcttccac

SEQ ID NO: 426553 - DNA, 25 bp, Homo sapien
agcagccgtgggcaggagcgtgctt

SEQ ID NO: 426554 - DNA, 25 bp, Homo sapien
tcatgcctgcccttggggtcctccg

SEQ ID NO: 426555 - DNA, 25 bp, Homo sapien
catgcctgcccttggggtcctccgg

SEQ ID NO: 426556 - DNA, 25 bp, Homo sapien
tgcccttggggtcctccggtgcttg

SEQ ID NO: 426557 - DNA, 25 bp, Homo sapien
gcctgcccttggggtcctccggtgc

SEQ ID NO: 426558 - DNA, 25 bp, Homo sapien
catatgggaaatgtacatgtgagtt

SEQ ID NO: 426559 - DNA, 25 bp, Homo sapien
catcatgtctaactgcaactctaga

SEQ ID NO: 426560 - DNA, 25 bp, Homo sapien
taagttacaaatcagtgcattcagc

SEQ ID NO: 426561 - DNA, 25 bp, Homo sapien
taaagtgagaccataccatcatgtc

SEQ ID NO: 426562 - DNA, 25 bp, Homo sapien
ttcagggttcatccgcaccggagcg

SEQ ID NO: 426563 - DNA, 25 bp, Homo sapien
ccagtctagtaagtggagcacataa

SEQ ID NO: 426564 - DNA, 25 bp, Homo sapien
ggccttggcaacacgaatctccttt

SEQ ID NO: 426565 - DNA, 25 bp, Homo sapien
tgagcaacagatatcagatgtcctg

SEQ ID NO: 426566 - DNA, 25 bp, Homo sapien
ttctcctccgccgacctgagcacgc

SEQ ID NO: 426567 - DNA, 25 bp, Homo sapien
ctgctgccgcgggtcctcctcaaag

SEQ ID NO: 426568 - DNA, 25 bp, Homo sapien
cctccgccgacctgagcacgctgga

SEQ ID NO: 426569 - DNA, 25 bp, Homo sapien
tgctgccgcgggtcctcctcaaagg

SEQ ID NO: 426570 - DNA, 25 bp, Homo sapien
cccgtggctctgcatgttcccccag

SEQ ID NO: 426571 - DNA, 25 bp, Homo sapien
gtggctctgcatgttcccccagcat

SEQ ID NO: 426572 - DNA, 25 bp, Homo sapien
ctgtgcccgtggctctgcatgttcc

SEQ ID NO: 426573 - DNA, 25 bp, Homo sapien
tgtgcccgtggctctgcatgttccc

SEQ ID NO: 426574 - DNA, 25 bp, Homo sapien
aaaggaagactttgtgtccacatag

SEQ ID NO: 426575 - DNA, 25 bp, Homo sapien
caagggtgactagctccaccagata

SEQ ID NO: 426576 - DNA, 25 bp, Homo sapien
tgtgtggctctggtgcaccaacaaa

SEQ ID NO: 426577 - DNA, 25 bp, Homo sapien
tgtcaatgctgacagaaccctcatt

SEQ ID NO: 426578 - DNA, 25 bp, Homo sapien
aacaattgcttttacgtggtgctgg

SEQ ID NO: 426579 - DNA, 25 bp, Homo sapien
cagcatcagccttgggaggagttct

SEQ ID NO: 426580 - DNA, 25 bp, Homo sapien
tggatcccagagtcgaggagactgt

SEQ ID NO: 426581 - DNA, 25 bp, Homo sapien
tagttctcagtctaaggagcctgac

SEQ ID NO: 426582 - DNA, 25 bp, Homo sapien
tgaaaactatcactctaagcaaagt

SEQ ID NO: 426583 - DNA, 25 bp, Homo sapien
tatcactctaagcaaagtatcacaa

SEQ ID NO: 426584 - DNA, 25 bp, Homo sapien
gcctgtcagggactgggcggctggg

SEQ ID NO: 426585 - DNA, 25 bp, Homo sapien
gatgaagctgaaaactatcactcta

SEQ ID NO: 426586 - DNA, 25 bp, Homo sapien
gagtgtcagccctaatccgggatta

SEQ ID NO: 426587 - DNA, 25 bp, Homo sapien
caagttgatactgcatcccaccagg

SEQ ID NO: 426588 - DNA, 25 bp, Homo sapien
gcaaattcctccagttcacgggcct

SEQ ID NO: 426589 - DNA, 25 bp, Homo sapien
tccctaagcgacaggccaagaactg

SEQ ID NO: 426590 - DNA, 25 bp, Homo sapien
gatgagactggtgcccaatcaagcc

SEQ ID NO: 426591 - DNA, 25 bp, Homo sapien
cagggcccgccatggaatattttga

SEQ ID NO: 426592 - DNA, 25 bp, Homo sapien
tatacaggaggtagggtcactgcct

SEQ ID NO: 426593 - DNA, 25 bp, Homo sapien
gaatgaccactgagctgcacaggca

SEQ ID NO: 426594 - DNA, 25 bp, Homo sapien
ggcggaagcacattggggtcacagc

SEQ ID NO: 426595 - DNA, 25 bp, Homo sapien
ggaagcacattggggtcacagctat

SEQ ID NO: 426596 - DNA, 25 bp, Homo sapien
cggaagcacattggggtcacagcta

SEQ ID NO: 426597 - DNA, 25 bp, Homo sapien
gaggcggaagcacattggggtcaca

SEQ ID NO: 426598 - DNA, 25 bp, Homo sapien
cgggactccaggcaaggcaggtact

SEQ ID NO: 426599 - DNA, 25 bp, Homo sapien
gctcagtaagtgtccgatcgggcac

SEQ ID NO: 426600 - DNA, 25 bp, Homo sapien
catgtatcatgtgcaagctcagtaa

SEQ ID NO: 426601 - DNA, 25 bp, Homo sapien
gatgagcacttctgacggtccctcc

SEQ ID NO: 426602 - DNA, 25 bp, Homo sapien
ccggaccgcccgccccggcatctgc

SEQ ID NO: 426603 - DNA, 25 bp, Homo sapien
actctcgaggatggtctgcgctggg

SEQ ID NO: 426604 - DNA, 25 bp, Homo sapien
taactctcgaggatggtctgcgctg

SEQ ID NO: 426605 - DNA, 25 bp, Homo sapien
ctaactctcgaggatggtctgcgct

SEQ ID NO: 426606 - DNA, 25 bp, Homo sapien
tgcgccaggtacaggcctaccgtgg

SEQ ID NO: 426607 - DNA, 25 bp, Homo sapien
ctgcccagcgtcaggatccaggaga

SEQ ID NO: 426608 - DNA, 25 bp, Homo sapien
tcggcctcctcgttcagggcggtca

SEQ ID NO: 426609 - DNA, 25 bp, Homo sapien
atccaggagagcagcgcgtcggacc

SEQ ID NO: 426610 - DNA, 25 bp, Homo sapien
cgactcggcgtctgggaagttcctg

SEQ ID NO: 426611 - DNA, 25 bp, Homo sapien
aagccccgcacacctgcggaacagg

SEQ ID NO: 426612 - DNA, 25 bp, Homo sapien
aacggcggactcaggacacgcgctg

SEQ ID NO: 426613 - DNA, 25 bp, Homo sapien
tcggagcccggcgaggagcgtggcc

SEQ ID NO: 426614 - DNA, 25 bp, Homo sapien
taggccttgcccacgagatacttga

SEQ ID NO: 426615 - DNA, 25 bp, Homo sapien
ggaagctgcatccacaaagaacagg

SEQ ID NO: 426616 - DNA, 25 bp, Homo sapien
ctttgtcaagaaacagacgctggcg

SEQ ID NO: 426617 - DNA, 25 bp, Homo sapien
tgcaaagcgacgatcatttcctggg

SEQ ID NO: 426618 - DNA, 25 bp, Homo sapien
ttgtgtctcgacagctcccctaggg

SEQ ID NO: 426619 - DNA, 25 bp, Homo sapien
tagggactttatgtagagccaggtt

SEQ ID NO: 426620 - DNA, 25 bp, Homo sapien
ctattatgaatacggcaacttgtgt

SEQ ID NO: 426621 - DNA, 25 bp, Homo sapien
agccaggtttgccacgggatgccac

SEQ ID NO: 426622 - DNA, 25 bp, Homo sapien
cagaggccaccgagttactgtggca

SEQ ID NO: 426623 - DNA, 25 bp, Homo sapien
cctgccacccaaggatgacaaatgg

SEQ ID NO: 426624 - DNA, 25 bp, Homo sapien
gaggccaccgagttactgtggcagc

SEQ ID NO: 426625 - DNA, 25 bp, Homo sapien
gtcctgccacccaaggatgacaaat

SEQ ID NO: 426626 - DNA, 25 bp, Homo sapien
caggcatcctgcatacttacatgga

SEQ ID NO: 426627 - DNA, 25 bp, Homo sapien
caagctggagtacccgctgagatac

SEQ ID NO: 426628 - DNA, 25 bp, Homo sapien
tcacatgggaatgccacaagctgga

SEQ ID NO: 426629 - DNA, 25 bp, Homo sapien
tacatatggattcaaacggtcactc

SEQ ID NO: 426630 - DNA, 25 bp, Homo sapien
ttgaaaagcccaaaacccatggagc

SEQ ID NO: 426631 - DNA, 25 bp, Homo sapien
taagcaatgatgtagagaatggcct

SEQ ID NO: 426632 - DNA, 25 bp, Homo sapien
tactgaagcccttataaactgactg

SEQ ID NO: 426633 - DNA, 25 bp, Homo sapien
gaggaaccatgcacacaatcaagac

SEQ ID NO: 426634 - DNA, 25 bp, Homo sapien
tggggactgcctcccataggtaaaa

SEQ ID NO: 426635 - DNA, 25 bp, Homo sapien
cacaattcaggttgaaatctgggga

SEQ ID NO: 426636 - DNA, 25 bp, Homo sapien
caagcgtaacaatctccaaccttta

SEQ ID NO: 426637 - DNA, 25 bp, Homo sapien
agcgtaacaatctccaacctttatt

SEQ ID NO: 426638 - DNA, 25 bp, Homo sapien
gagcttagcattacagaggcggcac

SEQ ID NO: 426639 - DNA, 25 bp, Homo sapien
gaaaagctttgttgcacacgtgaca

SEQ ID NO: 426640 - DNA, 25 bp, Homo sapien
gattatggacttcaacctggtgccg

SEQ ID NO: 426641 - DNA, 25 bp, Homo sapien
gacatgtgcgattggaagtgactcc

SEQ ID NO: 426642 - DNA, 25 bp, Homo sapien
gacttgcaagaggagcatgctcttt

SEQ ID NO: 426643 - DNA, 25 bp, Homo sapien
tggacttgcaagaggagcatgctct

SEQ ID NO: 426644 - DNA, 25 bp, Homo sapien
ggacttgcaagaggagcatgctctt

SEQ ID NO: 426645 - DNA, 25 bp, Homo sapien
ctggacttgcaagaggagcatgctc

SEQ ID NO: 426646 - DNA, 25 bp, Homo sapien
catgttaacatgacggtgaagacct

SEQ ID NO: 426647 - DNA, 25 bp, Homo sapien
taaattgagagagaaagcggtacgc

SEQ ID NO: 426648 - DNA, 25 bp, Homo sapien
gcttgccgcgccttaacttaatgat

SEQ ID NO: 426649 - DNA, 25 bp, Homo sapien
cactatgccgtgttgggtctgacag

SEQ ID NO: 426650 - DNA, 25 bp, Homo sapien
tgtgaccgacgaagatgaggcagct

SEQ ID NO: 426651 - DNA, 25 bp, Homo sapien
tgaccgacgaagatgaggcagctgc

SEQ ID NO: 426652 - DNA, 25 bp, Homo sapien
cttgtgaccgacgaagatgaggcag

SEQ ID NO: 426653 - DNA, 25 bp, Homo sapien
gaccgacgaagatgaggcagctgct

SEQ ID NO: 426654 - DNA, 25 bp, Homo sapien
cactggatgggatcactaagcctaa

SEQ ID NO: 426655 - DNA, 25 bp, Homo sapien
ttgactgagaagcactaaaggacct

SEQ ID NO: 426656 - DNA, 25 bp, Homo sapien
gacaccgaagatgatccctgggaag

SEQ ID NO: 426657 - DNA, 25 bp, Homo sapien
gacaaaacaggtggccgtggtctct

SEQ ID NO: 426658 - DNA, 25 bp, Homo sapien
tggcgtgtgcagggttgatgtaatg

SEQ ID NO: 426659 - DNA, 25 bp, Homo sapien
gcgtgtgcagggttgatgtaatgca

SEQ ID NO: 426660 - DNA, 25 bp, Homo sapien
cgtgtgcagggttgatgtaatgcag

SEQ ID NO: 426661 - DNA, 25 bp, Homo sapien
tgtgcagggttgatgtaatgcagta

SEQ ID NO: 426662 - DNA, 25 bp, Homo sapien
taaaatgctccatccatcaagaatg

SEQ ID NO: 426663 - DNA, 25 bp, Homo sapien
tatatttgagtttaacaattaccta

SEQ ID NO: 426664 - DNA, 25 bp, Homo sapien
ttaatgacagtcagtatatttgagt

SEQ ID NO: 426665 - DNA, 25 bp, Homo sapien
ccatccatcaagaatgtaagtaaaa

SEQ ID NO: 426666 - DNA, 25 bp, Homo sapien
tctagaccgataagtttgctggcac

SEQ ID NO: 426667 - DNA, 25 bp, Homo sapien
tgttgccgggtgtactttctcctca

SEQ ID NO: 426668 - DNA, 25 bp, Homo sapien
gtggctgtgtacaccgaatcctcaa

SEQ ID NO: 426669 - DNA, 25 bp, Homo sapien
tcttctgctgtcagataaggcgagc

SEQ ID NO: 426670 - DNA, 25 bp, Homo sapien
tcattatgagtaatcagggcctccg

SEQ ID NO: 426671 - DNA, 25 bp, Homo sapien
agggcctccgacttacagaagcagt

SEQ ID NO: 426672 - DNA, 25 bp, Homo sapien
gaaaaggtctatttacgagcaacag

SEQ ID NO: 426673 - DNA, 25 bp, Homo sapien
tagggccggcttgcttaccactttg

SEQ ID NO: 426674 - DNA, 25 bp, Homo sapien
ccaccacacatcacaagaggtgctg

SEQ ID NO: 426675 - DNA, 25 bp, Homo sapien
cagatgcttgcgtgggcctgctacc

SEQ ID NO: 426676 - DNA, 25 bp, Homo sapien
cacacatcacaagaggtgctggtga

SEQ ID NO: 426677 - DNA, 25 bp, Homo sapien
agatgcttgcgtgggcctgctaccc

SEQ ID NO: 426678 - DNA, 25 bp, Homo sapien
tatttctccagcatccgttacagag

SEQ ID NO: 426679 - DNA, 25 bp, Homo sapien
gactttaatcactactggacgatga

SEQ ID NO: 426680 - DNA, 25 bp, Homo sapien
gttacagagccccaaaacgtggcag

SEQ ID NO: 426681 - DNA, 25 bp, Homo sapien
cagtatatcctcaggtccagcatgg

SEQ ID NO: 426682 - DNA, 25 bp, Homo sapien
aaaagccgggaagagatgtggcggg

SEQ ID NO: 426683 - DNA, 25 bp, Homo sapien
tatgctctgcgggaccgccgggaag

SEQ ID NO: 426684 - DNA, 25 bp, Homo sapien
gcacgggtggcgtcttgactccctg

SEQ ID NO: 426685 - DNA, 25 bp, Homo sapien
ctggccggcggagggtgctatgctc

SEQ ID NO: 426686 - DNA, 25 bp, Homo sapien
gagcatgcgcattcgcgagggcgag

SEQ ID NO: 426687 - DNA, 25 bp, Homo sapien
gccagggtgaagagtgaagcccgtg

SEQ ID NO: 426688 - DNA, 25 bp, Homo sapien
aacccgggacatgctcggtgagcgc

SEQ ID NO: 426689 - DNA, 25 bp, Homo sapien
tgaaggtacaatcggctacgtggga

SEQ ID NO: 426690 - DNA, 25 bp, Homo sapien
ctcagagttacgtcaggaaaggccg

SEQ ID NO: 426691 - DNA, 25 bp, Homo sapien
gagctaggggcgtgacagttactca

SEQ ID NO: 426692 - DNA, 25 bp, Homo sapien
tacgtcaggaaaggccgcgttttgc

SEQ ID NO: 426693 - DNA, 25 bp, Homo sapien
agagttacgtcaggaaaggccgcgt

SEQ ID NO: 426694 - DNA, 25 bp, Homo sapien
gtcttcagtctcgaggcagacgccg

SEQ ID NO: 426695 - DNA, 25 bp, Homo sapien
cttcagtctcgaggcagacgccggg

SEQ ID NO: 426696 - DNA, 25 bp, Homo sapien
tcagtctcgaggcagacgccgggcc

SEQ ID NO: 426697 - DNA, 25 bp, Homo sapien
cggtcttcagtctcgaggcagacgc

SEQ ID NO: 426698 - DNA, 25 bp, Homo sapien
gcagacactcaaactccgggatgta

SEQ ID NO: 426699 - DNA, 25 bp, Homo sapien
tgtcaacaccgaccgggaggaaagc

SEQ ID NO: 426700 - DNA, 25 bp, Homo sapien
ggagacttcgcatagtgcccggctc

SEQ ID NO: 426701 - DNA, 25 bp, Homo sapien
ccggctcatcggagggctgtgatct

SEQ ID NO: 426702 - DNA, 25 bp, Homo sapien
cagaaggcattcgtctacgtggcct

SEQ ID NO: 426703 - DNA, 25 bp, Homo sapien
tttccaaacggaagcacggatggtg

SEQ ID NO: 426704 - DNA, 25 bp, Homo sapien
tgtttctttcccacgatgttctgag

SEQ ID NO: 426705 - DNA, 25 bp, Homo sapien
gcagccaaggccgtttgttcagttt

SEQ ID NO: 426706 - DNA, 25 bp, Homo sapien
gcaaggcagttaccactaggcaata

SEQ ID NO: 426707 - DNA, 25 bp, Homo sapien
tctctgatcctccagttgggcaagg

SEQ ID NO: 426708 - DNA, 25 bp, Homo sapien
ccagttgggcaaggcagttaccact

SEQ ID NO: 426709 - DNA, 25 bp, Homo sapien
cgttgcccttctctgatcctccagt

SEQ ID NO: 426710 - DNA, 25 bp, Homo sapien
ctggaatgttggcttatgagctgtc

SEQ ID NO: 426711 - DNA, 25 bp, Homo sapien
aggtgtgcacctggccccgggtgag

SEQ ID NO: 426712 - DNA, 25 bp, Homo sapien
gaccatgagctcctacgcaggtgtg

SEQ ID NO: 426713 - DNA, 25 bp, Homo sapien
gagctgtctctacttgtagaccatg

SEQ ID NO: 426714 - DNA, 25 bp, Homo sapien
tgcaggaagcgcctgctccgggggc

SEQ ID NO: 426715 - DNA, 25 bp, Homo sapien
gcaggaagcgcctgctccgggggca

SEQ ID NO: 426716 - DNA, 25 bp, Homo sapien
caggaagcgcctgctccgggggcac

SEQ ID NO: 426717 - DNA, 25 bp, Homo sapien
cgatggaacgtagagcccggacttt

SEQ ID NO: 426718 - DNA, 25 bp, Homo sapien
gaatacgcgaagtcacaagtgtccc

SEQ ID NO: 426719 - DNA, 25 bp, Homo sapien
ccatagtcgcgatgctgcggtggac

SEQ ID NO: 426720 - DNA, 25 bp, Homo sapien
tgaggacaagagagccaagccaagt

SEQ ID NO: 426721 - DNA, 25 bp, Homo sapien
ctcaggctgatgacagtggcagtgc

SEQ ID NO: 426722 - DNA, 25 bp, Homo sapien
caggctgatgacagtggcagtgcgc

SEQ ID NO: 426723 - DNA, 25 bp, Homo sapien
atgacagtggcagtgcgcaggggcg

SEQ ID NO: 426724 - DNA, 25 bp, Homo sapien
ggctgatgacagtggcagtgcgcag

SEQ ID NO: 426725 - DNA, 25 bp, Homo sapien
caccgtcgtcttctagccccaccat

SEQ ID NO: 426726 - DNA, 25 bp, Homo sapien
gtcccaccgtcgtcttctagcccca

SEQ ID NO: 426727 - DNA, 25 bp, Homo sapien
cagtcccaccgtcgtcttctagccc

SEQ ID NO: 426728 - DNA, 25 bp, Homo sapien
tccagtcccaccgtcgtcttctagc

SEQ ID NO: 426729 - DNA, 25 bp, Homo sapien
ttctgaataagaagggcaccgccac

SEQ ID NO: 426730 - DNA, 25 bp, Homo sapien
tgtgaccgtggccttcgatcgagca

SEQ ID NO: 426731 - DNA, 25 bp, Homo sapien
gccttcgatcgagcacagtgggtga

SEQ ID NO: 426732 - DNA, 25 bp, Homo sapien
ctagagcccttgcatcttggctgtg

SEQ ID NO: 426733 - DNA, 25 bp, Homo sapien
cattagaaacaggtaagagggctgc

SEQ ID NO: 426734 - DNA, 25 bp, Homo sapien
aagacaatgcgtagctttttccttt

SEQ ID NO: 426735 - DNA, 25 bp, Homo sapien
tagcttgatcttaatccatgttagc

SEQ ID NO: 426736 - DNA, 25 bp, Homo sapien
cagctggcaaagacaatgcgtagct

SEQ ID NO: 426737 - DNA, 25 bp, Homo sapien
actgatgcccagcacgatcgggggc

SEQ ID NO: 426738 - DNA, 25 bp, Homo sapien
cccactcttgtgcacgtccttagat

SEQ ID NO: 426739 - DNA, 25 bp, Homo sapien
ttagatagtatgtgaagcaaggcgc

SEQ ID NO: 426740 - DNA, 25 bp, Homo sapien
tgaagcaaggcgctagccacaggct

SEQ ID NO: 426741 - DNA, 25 bp, Homo sapien
ctaggaaggcagagaaggcactcat

SEQ ID NO: 426742 - DNA, 25 bp, Homo sapien
ttctttttgccgccatttcggagtc

SEQ ID NO: 426743 - DNA, 25 bp, Homo sapien
ctttttgccgccatttcggagtctg

SEQ ID NO: 426744 - DNA, 25 bp, Homo sapien
tctttttgccgccatttcggagtct

SEQ ID NO: 426745 - DNA, 25 bp, Homo sapien
taactggtccatacttgtcgggcct

SEQ ID NO: 426746 - DNA, 25 bp, Homo sapien
aacagtgactaactggtccatactt

SEQ ID NO: 426747 - DNA, 25 bp, Homo sapien
ctctggtggacggtaggtcagtctc

SEQ ID NO: 426748 - DNA, 25 bp, Homo sapien
acttgtcgggcctgctctggtggac

SEQ ID NO: 426749 - DNA, 25 bp, Homo sapien
ccgtgtagtggatgccttcccggca

SEQ ID NO: 426750 - DNA, 25 bp, Homo sapien
ccagctcccgcacgatgctttttag

SEQ ID NO: 426751 - DNA, 25 bp, Homo sapien
gctttttagcctacaaggtgctggg

SEQ ID NO: 426752 - DNA, 25 bp, Homo sapien
ttatgaccgtgtagtggatgccttc

SEQ ID NO: 426753 - DNA, 25 bp, Homo sapien
tttctcatcgcagaggagcctgcac

SEQ ID NO: 426754 - DNA, 25 bp, Homo sapien
ccactggacactgggtatttctcat

SEQ ID NO: 426755 - DNA, 25 bp, Homo sapien
tgggtatttctcatcgcagaggagc

SEQ ID NO: 426756 - DNA, 25 bp, Homo sapien
tggacactgggtatttctcatcgca

SEQ ID NO: 426757 - DNA, 25 bp, Homo sapien
acagagcacgaccagactgagagct

SEQ ID NO: 426758 - DNA, 25 bp, Homo sapien
ctacagagcacgaccagactgagag

SEQ ID NO: 426759 - DNA, 25 bp, Homo sapien
tacagagcacgaccagactgagagc

SEQ ID NO: 426760 - DNA, 25 bp, Homo sapien
tcactcacagatatggatgcgtccc

SEQ ID NO: 426761 - DNA, 25 bp, Homo sapien
tgcgagtgctcttgaaacccgtgta

SEQ ID NO: 426762 - DNA, 25 bp, Homo sapien
ggagcattttctccggaacccagca

SEQ ID NO: 426763 - DNA, 25 bp, Homo sapien
cattctgtgggtcaccgatgtctcc

SEQ ID NO: 426764 - DNA, 25 bp, Homo sapien
gtctgtctgaccgagaaggcagccc

SEQ ID NO: 426765 - DNA, 25 bp, Homo sapien
aacctatctgctgggtggatctccg

SEQ ID NO: 426766 - DNA, 25 bp, Homo sapien
caggtttgcagtgtatgaggcgaca

SEQ ID NO: 426767 - DNA, 25 bp, Homo sapien
tggatctccgcatgtggctgacctc

SEQ ID NO: 426768 - DNA, 25 bp, Homo sapien
gacttcacaggtagacatggaggtc

SEQ ID NO: 426769 - DNA, 25 bp, Homo sapien
gggtatctctggtcctattccctcc

SEQ ID NO: 426770 - DNA, 25 bp, Homo sapien
gatggccaagcagaactttgccggg

SEQ ID NO: 426771 - DNA, 25 bp, Homo sapien
ttgcctcttacatcactgggtttgg

SEQ ID NO: 426772 - DNA, 25 bp, Homo sapien
taccactgagtgtgagagccagcac

SEQ ID NO: 426773 - DNA, 25 bp, Homo sapien
catggagcagaacaaagggacgtga

SEQ ID NO: 426774 - DNA, 25 bp, Homo sapien
cacttgctattgcagagggacgcct

SEQ ID NO: 426775 - DNA, 25 bp, Homo sapien
gcacgagattctacggcctgtggaa

SEQ ID NO: 426776 - DNA, 25 bp, Homo sapien
ccaccaggctcctggcgttgccctc

SEQ ID NO: 426777 - DNA, 25 bp, Homo sapien
ctgcacccaacgttcatttttcatg

SEQ ID NO: 426778 - DNA, 25 bp, Homo sapien
tggcgttgccctcctcgagctgcac

SEQ ID NO: 426779 - DNA, 25 bp, Homo sapien
tcatgcacggccatcggtagagctg

SEQ ID NO: 426780 - DNA, 25 bp, Homo sapien
acgcaggaaagagagtgcggctgag

SEQ ID NO: 426781 - DNA, 25 bp, Homo sapien
atgaagagtgagtcagggacaacgc

SEQ ID NO: 426782 - DNA, 25 bp, Homo sapien
tgcggctgagaggaatgcccacagc

SEQ ID NO: 426783 - DNA, 25 bp, Homo sapien
tgaagagtgagtcagggacaacgca

SEQ ID NO: 426784 - DNA, 25 bp, Homo sapien
tgtgtctagagctgcatcggagctg

SEQ ID NO: 426785 - DNA, 25 bp, Homo sapien
gaggctggccgcgtttctgtgtcta

SEQ ID NO: 426786 - DNA, 25 bp, Homo sapien
gagctgcatcggagctgcactcaca

SEQ ID NO: 426787 - DNA, 25 bp, Homo sapien
tggccgcgtttctgtgtctagagct

SEQ ID NO: 426788 - DNA, 25 bp, Homo sapien
tctagacaactgcttcacgaggtaa

SEQ ID NO: 426789 - DNA, 25 bp, Homo sapien
tgtaaaccacaacctgacggagaag

SEQ ID NO: 426790 - DNA, 25 bp, Homo sapien
tgaggacatcaaacacaagccgtta

SEQ ID NO: 426791 - DNA, 25 bp, Homo sapien
ggccaaacccaaatcgcacagtgat

SEQ ID NO: 426792 - DNA, 25 bp, Homo sapien
cctgggccagagacggaagactgta

SEQ ID NO: 426793 - DNA, 25 bp, Homo sapien
tgagctgaggaaccccaactctagg

SEQ ID NO: 426794 - DNA, 25 bp, Homo sapien
taaagggagacatcagcagacagcc

SEQ ID NO: 426795 - DNA, 25 bp, Homo sapien
gaagcacacaaagtgggtctgcacc

SEQ ID NO: 426796 - DNA, 25 bp, Homo sapien
agaatgcagatcgtgtctctccagg

SEQ ID NO: 426797 - DNA, 25 bp, Homo sapien
tcttcttggctaggtcgagagctcc

SEQ ID NO: 426798 - DNA, 25 bp, Homo sapien
gaaccctgcttaatggtcgtgaaga

SEQ ID NO: 426799 - DNA, 25 bp, Homo sapien
tgaggctcaagctcaccgtgcagga

SEQ ID NO: 426800 - DNA, 25 bp, Homo sapien
ttcctctgagctcgcttgggagctg

SEQ ID NO: 426801 - DNA, 25 bp, Homo sapien
cttcctctgaactggagggccggca

SEQ ID NO: 426802 - DNA, 25 bp, Homo sapien
caagactaaatacagctgtcagcgc

SEQ ID NO: 426803 - DNA, 25 bp, Homo sapien
gcctcaaggcttaatgcaagactaa

SEQ ID NO: 426804 - DNA, 25 bp, Homo sapien
gtaggctggaggttgagtagcaccc

SEQ ID NO: 426805 - DNA, 25 bp, Homo sapien
aggctggaggttgagtagcacccca

SEQ ID NO: 426806 - DNA, 25 bp, Homo sapien
ctgtaggctggaggttgagtagcac

SEQ ID NO: 426807 - DNA, 25 bp, Homo sapien
gaagaggtgtgggttggcaccagca

SEQ ID NO: 426808 - DNA, 25 bp, Homo sapien
ctagggtggtggcatagctgttgtg

SEQ ID NO: 426809 - DNA, 25 bp, Homo sapien
agctgacgagcttgctgttctccag

SEQ ID NO: 426810 - DNA, 25 bp, Homo sapien
ctgttgtggcagctgacgagcttgc

SEQ ID NO: 426811 - DNA, 25 bp, Homo sapien
gcatagctgttgtggcagctgacga

SEQ ID NO: 426812 - DNA, 25 bp, Homo sapien
agggaggtctcggccatgaagctgg

SEQ ID NO: 426813 - DNA, 25 bp, Homo sapien
gagggaggtctcggccatgaagctg

SEQ ID NO: 426814 - DNA, 25 bp, Homo sapien
gggaggtctcggccatgaagctggg

SEQ ID NO: 426815 - DNA, 25 bp, Homo sapien
tgagcatccaacgagggccggtgct

SEQ ID NO: 426816 - DNA, 25 bp, Homo sapien
ggccagaaacgcatctctggttctt

SEQ ID NO: 426817 - DNA, 25 bp, Homo sapien
gctggatgctccatttgggatggtc

SEQ ID NO: 426818 - DNA, 25 bp, Homo sapien
tgggatggtccatcacaggctcgct

SEQ ID NO: 426819 - DNA, 25 bp, Homo sapien
aatcttcctggcccaggatcccaag

SEQ ID NO: 426820 - DNA, 25 bp, Homo sapien
ctggcccaggatcccaagctgtgaa

SEQ ID NO: 426821 - DNA, 25 bp, Homo sapien
tcaatcttcctggcccaggatccca

SEQ ID NO: 426822 - DNA, 25 bp, Homo sapien
gcccaggatcccaagctgtgaatca

SEQ ID NO: 426823 - DNA, 25 bp, Homo sapien
tgggggccacagcacggatgtccac

SEQ ID NO: 426824 - DNA, 25 bp, Homo sapien
atttcccaagaatgggagacatctt

SEQ ID NO: 426825 - DNA, 25 bp, Homo sapien
ggatttcccaagaatgggagacatc

SEQ ID NO: 426826 - DNA, 25 bp, Homo sapien
ggccacagcacggatgtccaccctc

SEQ ID NO: 426827 - DNA, 25 bp, Homo sapien
ggagaaggacactacgcatctgcgg

SEQ ID NO: 426828 - DNA, 25 bp, Homo sapien
cacagtgtcgggtgctgagtgcctc

SEQ ID NO: 426829 - DNA, 25 bp, Homo sapien
ttgcccaggtttcacgggaagctcg

SEQ ID NO: 426830 - DNA, 25 bp, Homo sapien
gctcctaaggtgacgaagcacacat

SEQ ID NO: 426831 - DNA, 25 bp, Homo sapien
gacttctttgtccaagtaacaagag

SEQ ID NO: 426832 - DNA, 25 bp, Homo sapien
gagcccccatgcagctgttggctga

SEQ ID NO: 426833 - DNA, 25 bp, Homo sapien
caagagagggccgtcagctggcaga

SEQ ID NO: 426834 - DNA, 25 bp, Homo sapien
ttctttgtccaagtaacaagagagg

SEQ ID NO: 426835 - DNA, 25 bp, Homo sapien
tcactcctgaccctccagcacctgc

SEQ ID NO: 426836 - DNA, 25 bp, Homo sapien
ctcactcctgaccctccagcacctg

SEQ ID NO: 426837 - DNA, 25 bp, Homo sapien
cagcacctgcctccagccccagagc

SEQ ID NO: 426838 - DNA, 25 bp, Homo sapien
ccagccccagagcccagccagccat

SEQ ID NO: 426839 - DNA, 25 bp, Homo sapien
gaacaggatggatcatcagcccgct

SEQ ID NO: 426840 - DNA, 25 bp, Homo sapien
gcccgcttaatagctgaggtcacag

SEQ ID NO: 426841 - DNA, 25 bp, Homo sapien
tataagatgcacactatgtgccggc

SEQ ID NO: 426842 - DNA, 25 bp, Homo sapien
gagagtagaggatcccgtaacaaag

SEQ ID NO: 426843 - DNA, 25 bp, Homo sapien
gaaggtgaatcaatcccgcataaat

SEQ ID NO: 426844 - DNA, 25 bp, Homo sapien
cgcataaatcttcgggcagagaact

SEQ ID NO: 426845 - DNA, 25 bp, Homo sapien
ctattctcgagctgaaggtgaatca

SEQ ID NO: 426846 - DNA, 25 bp, Homo sapien
gaatgtctagaaggaaattctgggc

SEQ ID NO: 426847 - DNA, 25 bp, Homo sapien
ccgtgcctcctctcgtgctccaggg

SEQ ID NO: 426848 - DNA, 25 bp, Homo sapien
tgtctgttcctggagcgagatgggt

SEQ ID NO: 426849 - DNA, 25 bp, Homo sapien
ggccacatggacagttcctccccgg

SEQ ID NO: 426850 - DNA, 25 bp, Homo sapien
cccggctgtgttccgtgcctcctct

SEQ ID NO: 426851 - DNA, 25 bp, Homo sapien
atcaaagtgagctctaaacacctgg

SEQ ID NO: 426852 - DNA, 25 bp, Homo sapien
gattgggtagaacccagcgcgttct

SEQ ID NO: 426853 - DNA, 25 bp, Homo sapien
tagagcgcattgtcttgtcccacag

SEQ ID NO: 426854 - DNA, 25 bp, Homo sapien
ggatggaaatggacacagggaacca

SEQ ID NO: 426855 - DNA, 25 bp, Homo sapien
gcttctcttcccaacgccgtcactg

SEQ ID NO: 426856 - DNA, 25 bp, Homo sapien
gaaggaggcaacaggttgtttgggc

SEQ ID NO: 426857 - DNA, 25 bp, Homo sapien
cactgctgtggtcaatttattctat

SEQ ID NO: 426858 - DNA, 25 bp, Homo sapien
gctttgtgtatcaagctgggaggag

SEQ ID NO: 426859 - DNA, 25 bp, Homo sapien
cccagaaagggagcatggtgtcatt

SEQ ID NO: 426860 - DNA, 25 bp, Homo sapien
cagaaagggagcatggtgtcatttc

SEQ ID NO: 426861 - DNA, 25 bp, Homo sapien
ctgcagggcactggagaacgctgtg

SEQ ID NO: 426862 - DNA, 25 bp, Homo sapien
cactggagaacgctgtgtgtgctca

SEQ ID NO: 426863 - DNA, 25 bp, Homo sapien
gccaggcatggggcatgcctgtggc

SEQ ID NO: 426864 - DNA, 25 bp, Homo sapien
aggcatggggcatgcctgtggcccc

SEQ ID NO: 426865 - DNA, 25 bp, Homo sapien
aaaaaagccaggcatggggcatgcc

SEQ ID NO: 426866 - DNA, 25 bp, Homo sapien
atggggcatgcctgtggccccagtt

SEQ ID NO: 426867 - DNA, 25 bp, Homo sapien
cctttagagccgaccatgaaccggg

SEQ ID NO: 426868 - DNA, 25 bp, Homo sapien
tctgttccggctcttgtgttatttc

SEQ ID NO: 426869 - DNA, 25 bp, Homo sapien
ttagggcacattcattctgttccgg

SEQ ID NO: 426870 - DNA, 25 bp, Homo sapien
gggcagtgaaccatatcgttgtttg

SEQ ID NO: 426871 - DNA, 25 bp, Homo sapien
ccaggtggtgtctcacgagtcgcac

SEQ ID NO: 426872 - DNA, 25 bp, Homo sapien
tcacgagtcgcactatgaatgtggg

SEQ ID NO: 426873 - DNA, 25 bp, Homo sapien
tgtctcacgagtcgcactatgaatg

SEQ ID NO: 426874 - DNA, 25 bp, Homo sapien
tggtgtctcacgagtcgcactatga

SEQ ID NO: 426875 - DNA, 25 bp, Homo sapien
ctgcacgccagggaacagggcagaa

SEQ ID NO: 426876 - DNA, 25 bp, Homo sapien
gctgcagtaagattgtcatgatctc

SEQ ID NO: 426877 - DNA, 25 bp, Homo sapien
atcatcatctgatttatcccccagc

SEQ ID NO: 426878 - DNA, 25 bp, Homo sapien
atcatctgatttatcccccagccag

SEQ ID NO: 426879 - DNA, 25 bp, Homo sapien
agtaagattgtcatgatctccatca

SEQ ID NO: 426880 - DNA, 25 bp, Homo sapien
ccatccgtggaaggggtgcattgaa

SEQ ID NO: 426881 - DNA, 25 bp, Homo sapien
cttcagagagggctgttgacttggc

SEQ ID NO: 426882 - DNA, 25 bp, Homo sapien
atgtgggaatccaccaccctctgag

SEQ ID NO: 426883 - DNA, 25 bp, Homo sapien
caggtgagaactccatgtgggaatc

SEQ ID NO: 426884 - DNA, 25 bp, Homo sapien
gaaacggaaccgctgattctgaagc

SEQ ID NO: 426885 - DNA, 25 bp, Homo sapien
gaccatgccattgggttgctggaaa

SEQ ID NO: 426886 - DNA, 25 bp, Homo sapien
ttgcccggacaagaaggagctgttg

SEQ ID NO: 426887 - DNA, 25 bp, Homo sapien
gcatgtggcatcatctccgtgtccg

SEQ ID NO: 426888 - DNA, 25 bp, Homo sapien
tcactgggaccgcagctcaatggct

SEQ ID NO: 426889 - DNA, 25 bp, Homo sapien
gatgcgactagggactcctgctgtc

SEQ ID NO: 426890 - DNA, 25 bp, Homo sapien
cattctccacagatgcgactaggga

SEQ ID NO: 426891 - DNA, 25 bp, Homo sapien
tcgccaccgaacctgctgtgaaatg

SEQ ID NO: 426892 - DNA, 25 bp, Homo sapien
taaatggcccacatctgacttctct

SEQ ID NO: 426893 - DNA, 25 bp, Homo sapien
ctaaatggcccacatctgacttctc

SEQ ID NO: 426894 - DNA, 25 bp, Homo sapien
aaatggcccacatctgacttctctc

SEQ ID NO: 426895 - DNA, 25 bp, Homo sapien
tagcggcattgtggctagctgcact

SEQ ID NO: 426896 - DNA, 25 bp, Homo sapien
catgatgatcagctagctgcacggt

SEQ ID NO: 426897 - DNA, 25 bp, Homo sapien
gaactccttgggttttccatgatga

SEQ ID NO: 426898 - DNA, 25 bp, Homo sapien
gccttatgcctagctgcactgtgga

SEQ ID NO: 426899 - DNA, 25 bp, Homo sapien
aggcagatctggtgcacacgctcat

SEQ ID NO: 426900 - DNA, 25 bp, Homo sapien
gccttgccttccgtgtgtgggacag

SEQ ID NO: 426901 - DNA, 25 bp, Homo sapien
tgtgggacaggcaacatttcaggga

SEQ ID NO: 426902 - DNA, 25 bp, Homo sapien
gcatgtggaaggtgtgcctgccggg

SEQ ID NO: 426903 - DNA, 25 bp, Homo sapien
cagattcaggagtcggaatgtaatg

SEQ ID NO: 426904 - DNA, 25 bp, Homo sapien
gagtcggaatgtaatgtgagggaca

SEQ ID NO: 426905 - DNA, 25 bp, Homo sapien
ttcaggagtcggaatgtaatgtgag

SEQ ID NO: 426906 - DNA, 25 bp, Homo sapien
ctcagattcaggagtcggaatgtaa

SEQ ID NO: 426907 - DNA, 25 bp, Homo sapien
tgtctaggctgaaaggcgagagccc

SEQ ID NO: 426908 - DNA, 25 bp, Homo sapien
tgatatgttaaagcctacaccccag

SEQ ID NO: 426909 - DNA, 25 bp, Homo sapien
gatgagtgttatggcctgaattccc

SEQ ID NO: 426910 - DNA, 25 bp, Homo sapien
gggcagaagacccagccttgtgagt

SEQ ID NO: 426911 - DNA, 25 bp, Homo sapien
cctccagatgctggcctgcaagctg

SEQ ID NO: 426912 - DNA, 25 bp, Homo sapien
tccaatctctttgtctcggatagcc

SEQ ID NO: 426913 - DNA, 25 bp, Homo sapien
gggtgtcggaagcacaatccaatct

SEQ ID NO: 426914 - DNA, 25 bp, Homo sapien
tagccctccatcgaggtcccaaaga

SEQ ID NO: 426915 - DNA, 25 bp, Homo sapien
ggtagctggtgaaagtcgctctccc

SEQ ID NO: 426916 - DNA, 25 bp, Homo sapien
gcaggctccgtgctgaagtcacagc

SEQ ID NO: 426917 - DNA, 25 bp, Homo sapien
tctgagctcgatggagcccatgtga

SEQ ID NO: 426918 - DNA, 25 bp, Homo sapien
ggctgtgggattgcttccctgcagc

SEQ ID NO: 426919 - DNA, 25 bp, Homo sapien
gcagacccagctgttcctcagccat

SEQ ID NO: 426920 - DNA, 25 bp, Homo sapien
cagcagacccagctgttcctcagcc

SEQ ID NO: 426921 - DNA, 25 bp, Homo sapien
agcagacccagctgttcctcagcca

SEQ ID NO: 426922 - DNA, 25 bp, Homo sapien
aagtccccccgcccagatgagtggg

SEQ ID NO: 426923 - DNA, 25 bp, Homo sapien
ctgtcccgcctggacagttgcaaag

SEQ ID NO: 426924 - DNA, 25 bp, Homo sapien
tcccgcctggacagttgcaaagtcc

SEQ ID NO: 426925 - DNA, 25 bp, Homo sapien
gcccagatgagtggggaccccccca

SEQ ID NO: 426926 - DNA, 25 bp, Homo sapien
gcctggatagttgtgaagtccctcc

SEQ ID NO: 426927 - DNA, 25 bp, Homo sapien
agcaaggctcgctggggtccctccg

SEQ ID NO: 426928 - DNA, 25 bp, Homo sapien
ccgcctggatagttgtgaagtccct

SEQ ID NO: 426929 - DNA, 25 bp, Homo sapien
cctggactctggcagcaaggctcgc

SEQ ID NO: 426930 - DNA, 25 bp, Homo sapien
tctagaatcgaggaggcaagcctgt

SEQ ID NO: 426931 - DNA, 25 bp, Homo sapien
gaaattcaggcacgacctttgaggg

SEQ ID NO: 426932 - DNA, 25 bp, Homo sapien
tgggttttgcgacctcacagctgca

SEQ ID NO: 426933 - DNA, 25 bp, Homo sapien
tgcaagccaaaagtcgatcaatcgc

SEQ ID NO: 426934 - DNA, 25 bp, Homo sapien
aatgactctcgtaggaacttgatgg

SEQ ID NO: 426935 - DNA, 25 bp, Homo sapien
gatggaatgactctcgtaggaactt

SEQ ID NO: 426936 - DNA, 25 bp, Homo sapien
ccctctgatggaatgactctcgtag

SEQ ID NO: 426937 - DNA, 25 bp, Homo sapien
ctgatggaatgactctcgtaggaac

SEQ ID NO: 426938 - DNA, 25 bp, Homo sapien
ttcacatgttggacgttaaacccag

SEQ ID NO: 426939 - DNA, 25 bp, Homo sapien
ggttaagacacacacggcaatgtgc

SEQ ID NO: 426940 - DNA, 25 bp, Homo sapien
tgcatctgtcctaggtgcagccggc

SEQ ID NO: 426941 - DNA, 25 bp, Homo sapien
gcattttcctcgtaacctttggcag

SEQ ID NO: 426942 - DNA, 25 bp, Homo sapien
cgtgacaggtacctctccgtggaga

SEQ ID NO: 426943 - DNA, 25 bp, Homo sapien
tagtggctgttcgttcagtgattcc

SEQ ID NO: 426944 - DNA, 25 bp, Homo sapien
tcctcctattgcaacagtcctgtgg

SEQ ID NO: 426945 - DNA, 25 bp, Homo sapien
gtggccttgcatcagagtactcgtg

SEQ ID NO: 426946 - DNA, 25 bp, Homo sapien
tgttctggtccaagacgtggctgta

SEQ ID NO: 426947 - DNA, 25 bp, Homo sapien
ggctttgcattctcctaagtcgatg

SEQ ID NO: 426948 - DNA, 25 bp, Homo sapien
tgttcagcgtcagatgcttcaagtg

SEQ ID NO: 426949 - DNA, 25 bp, Homo sapien
gaatgcgtttgttgtccctctggga

SEQ ID NO: 426950 - DNA, 25 bp, Homo sapien
ggagaaaacggtccatgccactggc

SEQ ID NO: 426951 - DNA, 25 bp, Homo sapien
tactgtttatagaggcaccgtttgg

SEQ ID NO: 426952 - DNA, 25 bp, Homo sapien
gcttttccatgtagaatggccgttg

SEQ ID NO: 426953 - DNA, 25 bp, Homo sapien
agaaatactctcctggcatcaaaag

SEQ ID NO: 426954 - DNA, 25 bp, Homo sapien
ctctgacccatgtggtccattacca

SEQ ID NO: 426955 - DNA, 25 bp, Homo sapien
ctggaaatgtgtaagccacctgctg

SEQ ID NO: 426956 - DNA, 25 bp, Homo sapien
cccatgtggtccattaccatgaggg

SEQ ID NO: 426957 - DNA, 25 bp, Homo sapien
gaggttacgagatcagatctctgga

SEQ ID NO: 426958 - DNA, 25 bp, Homo sapien
cgttctagaatccatgcagcgagca

SEQ ID NO: 426959 - DNA, 25 bp, Homo sapien
ggcatctcctcgtcatagcgttcta

SEQ ID NO: 426960 - DNA, 25 bp, Homo sapien
taatcggagcgctctagaacccgtg

SEQ ID NO: 426961 - DNA, 25 bp, Homo sapien
cctgagattgtttctgcaaaaggcc

SEQ ID NO: 426962 - DNA, 25 bp, Homo sapien
cagcaggagtcaatggtgaagcttc

SEQ ID NO: 426963 - DNA, 25 bp, Homo sapien
tgatggaagcaacctcgatccagcc

SEQ ID NO: 426964 - DNA, 25 bp, Homo sapien
gaatgtgcacgaagcattgtcctgt

SEQ ID NO: 426965 - DNA, 25 bp, Homo sapien
aagcttctagaatgtgcacgaagca

SEQ ID NO: 426966 - DNA, 25 bp, Homo sapien
cacttacagtgttcctaggctttcc

SEQ ID NO: 426967 - DNA, 25 bp, Homo sapien
tcagaaagtctcaggcacgaagaac

SEQ ID NO: 426968 - DNA, 25 bp, Homo sapien
gctttcctgtgacgtgggtgccagt

SEQ ID NO: 426969 - DNA, 25 bp, Homo sapien
tttcccgaggaagcggcacttacag

SEQ ID NO: 426970 - DNA, 25 bp, Homo sapien
gacctttattcgttaagacatcagg

SEQ ID NO: 426971 - DNA, 25 bp, Homo sapien
tttattcgttaagacatcaggctcc

SEQ ID NO: 426972 - DNA, 25 bp, Homo sapien
gagcatgggacctttattcgttaag

SEQ ID NO: 426973 - DNA, 25 bp, Homo sapien
agacatcaggctccagatatgaact

SEQ ID NO: 426974 - DNA, 25 bp, Homo sapien
ggcaagggtgctccgagcctcgcat

SEQ ID NO: 426975 - DNA, 25 bp, Homo sapien
gcagaagcgcttgccgggagcaaag

SEQ ID NO: 426976 - DNA, 25 bp, Homo sapien
acagccgggcaagggtgctccgagc

SEQ ID NO: 426977 - DNA, 25 bp, Homo sapien
cagaaaagctgagatgaacagtgcc

SEQ ID NO: 426978 - DNA, 25 bp, Homo sapien
ttgctaagcaagatagtgggaccca

SEQ ID NO: 426979 - DNA, 25 bp, Homo sapien
cagggatcaggcagataacaagcga

SEQ ID NO: 426980 - DNA, 25 bp, Homo sapien
caagattcccacctcgggttgctaa

SEQ ID NO: 426981 - DNA, 25 bp, Homo sapien
taacaagcgagatgggccttggcag

SEQ ID NO: 426982 - DNA, 25 bp, Homo sapien
cgcacagcacgcaggctctccgccc

SEQ ID NO: 426983 - DNA, 25 bp, Homo sapien
ccgcacagcacgcaggctctccgcc

SEQ ID NO: 426984 - DNA, 25 bp, Homo sapien
caaggcactccagggatcctggagt

SEQ ID NO: 426985 - DNA, 25 bp, Homo sapien
tgcaggggcttgaaacaccaaggca

SEQ ID NO: 426986 - DNA, 25 bp, Homo sapien
ttcctgcaggggcttgaaacaccaa

SEQ ID NO: 426987 - DNA, 25 bp, Homo sapien
gcactccagggatcctggagtcaaa

SEQ ID NO: 426988 - DNA, 25 bp, Homo sapien
tccttggctggcacggcacactggt

SEQ ID NO: 426989 - DNA, 25 bp, Homo sapien
ggggtagccgcagtccaccctgtcc

SEQ ID NO: 426990 - DNA, 25 bp, Homo sapien
gtccttggctggcacggcacactgg

SEQ ID NO: 426991 - DNA, 25 bp, Homo sapien
tgggggtgacatgggggtagccgca

SEQ ID NO: 426992 - DNA, 25 bp, Homo sapien
cagacaaagccctgtcagctgccag

SEQ ID NO: 426993 - DNA, 25 bp, Homo sapien
acaaagccctgtcagctgccagagc

SEQ ID NO: 426994 - DNA, 25 bp, Homo sapien
tgtcccagacaaagccctgtcagct

SEQ ID NO: 426995 - DNA, 25 bp, Homo sapien
ctgtcccagacaaagccctgtcagc

SEQ ID NO: 426996 - DNA, 25 bp, Homo sapien
acaggcccacgtactcctcagcaga

SEQ ID NO: 426997 - DNA, 25 bp, Homo sapien
cgggacgcagctcaggactcgcttc

SEQ ID NO: 426998 - DNA, 25 bp, Homo sapien
cagctgctctggattgtttgcttgg

SEQ ID NO: 426999 - DNA, 25 bp, Homo sapien
ttatgcaccgttgtttgcacagctg

SEQ ID NO: 427000 - DNA, 25 bp, Homo sapien
ccaggaggcctcatttatgcaccgt

SEQ ID NO: 427001 - DNA, 25 bp, Homo sapien
ctgttttggcagcaagcggtaaggg

SEQ ID NO: 427002 - DNA, 25 bp, Homo sapien
agttcagcccccactgttttggcag

SEQ ID NO: 427003 - DNA, 25 bp, Homo sapien
taagggcggattccagttctggttc

SEQ ID NO: 427004 - DNA, 25 bp, Homo sapien
tccagttctggttccgggtcctcta

SEQ ID NO: 427005 - DNA, 25 bp, Homo sapien
gatttggcttttccgccagtgtggc

SEQ ID NO: 427006 - DNA, 25 bp, Homo sapien
atgcccctggagagcatgccaacca

SEQ ID NO: 427007 - DNA, 25 bp, Homo sapien
ctgatttggcttttccgccagtgtg

SEQ ID NO: 427008 - DNA, 25 bp, Homo sapien
ggcctgatttggcttttccgccagt

SEQ ID NO: 427009 - DNA, 25 bp, Homo sapien
gaaaacccaggatttcatgaagtat

SEQ ID NO: 427010 - DNA, 25 bp, Homo sapien
ggtgagccagatgcatcctctggaa

SEQ ID NO: 427011 - DNA, 25 bp, Homo sapien
catgaagtatgaagctgataaggcg

SEQ ID NO: 427012 - DNA, 25 bp, Homo sapien
tggtttcggaacacccggtgagcca

SEQ ID NO: 427013 - DNA, 25 bp, Homo sapien
gtagcctccaaatgcagatgggctt

SEQ ID NO: 427014 - DNA, 25 bp, Homo sapien
aatgcagatgggcttgcaataaaac

SEQ ID NO: 427015 - DNA, 25 bp, Homo sapien
ataaaacaggcaacgcctctgaacg

SEQ ID NO: 427016 - DNA, 25 bp, Homo sapien
gcaacgcctctgaacgttgcaacac

SEQ ID NO: 427017 - DNA, 25 bp, Homo sapien
gcacttccgagaggcgcattcctcg

SEQ ID NO: 427018 - DNA, 25 bp, Homo sapien
gctgatgcccgggtagccacagttt

SEQ ID NO: 427019 - DNA, 25 bp, Homo sapien
cacagacttcgggaagaagcaccag

SEQ ID NO: 427020 - DNA, 25 bp, Homo sapien
gtctgagacctccatgacgcactga

SEQ ID NO: 427021 - DNA, 25 bp, Homo sapien
ccccagtgacactggagtcgaaaca

SEQ ID NO: 427022 - DNA, 25 bp, Homo sapien
cagcatccattgtcaaaacactggt

SEQ ID NO: 427023 - DNA, 25 bp, Homo sapien
gacactggagtcgaaacagcatcca

SEQ ID NO: 427024 - DNA, 25 bp, Homo sapien
gaagccgcagttcgtcctgttatgg

SEQ ID NO: 427025 - DNA, 25 bp, Homo sapien
aagtcttatcttgcccatatttaag

SEQ ID NO: 427026 - DNA, 25 bp, Homo sapien
ggatgcctctactgtcttgttgcca

SEQ ID NO: 427027 - DNA, 25 bp, Homo sapien
taagcaatgcggtttcctcctgaga

SEQ ID NO: 427028 - DNA, 25 bp, Homo sapien
gagaagccgatagggctttgctgaa

SEQ ID NO: 427029 - DNA, 25 bp, Homo sapien
gttcaagaccatcctgggcaacatg

SEQ ID NO: 427030 - DNA, 25 bp, Homo sapien
aagaccatcctgggcaacatgtcga

SEQ ID NO: 427031 - DNA, 25 bp, Homo sapien
ccatcctgggcaacatgtcgaaacc

SEQ ID NO: 427032 - DNA, 25 bp, Homo sapien
tcaagaccatcctgggcaacatgtc

SEQ ID NO: 427033 - DNA, 25 bp, Homo sapien
atagccccaggacgaggagcgctgc

SEQ ID NO: 427034 - DNA, 25 bp, Homo sapien
ggcacatagccccaggacgaggagc

SEQ ID NO: 427035 - DNA, 25 bp, Homo sapien
gccagggcacatagccccaggacga

SEQ ID NO: 427036 - DNA, 25 bp, Homo sapien
ggagctgggcgtctcgccgtcccat

SEQ ID NO: 427037 - DNA, 25 bp, Homo sapien
cactgccgggtatgttttataatct

SEQ ID NO: 427038 - DNA, 25 bp, Homo sapien
tccaacaagcagagataacctttct

SEQ ID NO: 427039 - DNA, 25 bp, Homo sapien
tcccctctgtttgtccaacaagcag

SEQ ID NO: 427040 - DNA, 25 bp, Homo sapien
catggtgtccactgccgggtatgtt

SEQ ID NO: 427041 - DNA, 25 bp, Homo sapien
cgtgtctgaggtgtccggtggaggt

SEQ ID NO: 427042 - DNA, 25 bp, Homo sapien
ctctgggactaatcaccgtgctggg

SEQ ID NO: 427043 - DNA, 25 bp, Homo sapien
acggcaccgcgtcaggatgcaggca

SEQ ID NO: 427044 - DNA, 25 bp, Homo sapien
caatctgtgttgtgagccgaggcac

SEQ ID NO: 427045 - DNA, 25 bp, Homo sapien
agaacccatcgtataaaaaggccat

SEQ ID NO: 427046 - DNA, 25 bp, Homo sapien
cagaacccatcgtataaaaaggcca

SEQ ID NO: 427047 - DNA, 25 bp, Homo sapien
tcagaacccatcgtataaaaaggcc

SEQ ID NO: 427048 - DNA, 25 bp, Homo sapien
gaacccatcgtataaaaaggccata

SEQ ID NO: 427049 - DNA, 25 bp, Homo sapien
ttctggagggacgtcgatggtatta

SEQ ID NO: 427050 - DNA, 25 bp, Homo sapien
ggacgtcgatggtattaggatagaa

SEQ ID NO: 427051 - DNA, 25 bp, Homo sapien
cgtcgatggtattaggatagaagca

SEQ ID NO: 427052 - DNA, 25 bp, Homo sapien
cttctggagggacgtcgatggtatt

SEQ ID NO: 427053 - DNA, 25 bp, Homo sapien
tttgcacactgggagggcgtgacac

SEQ ID NO: 427054 - DNA, 25 bp, Homo sapien
caattctgtctttcacggggggcca

SEQ ID NO: 427055 - DNA, 25 bp, Homo sapien
gaacggtgtcgtcgaaacagcagcc

SEQ ID NO: 427056 - DNA, 25 bp, Homo sapien
gacaccaggaaaaccacaattctgt

SEQ ID NO: 427057 - DNA, 25 bp, Homo sapien
tggacaccaggaccagggcgcagat

SEQ ID NO: 427058 - DNA, 25 bp, Homo sapien
gaccagggcgcagatcaccttgttc

SEQ ID NO: 427059 - DNA, 25 bp, Homo sapien
ctcggccagggtgccgagggccagc

SEQ ID NO: 427060 - DNA, 25 bp, Homo sapien
ggccagcatggacaccaggaccagg

SEQ ID NO: 427061 - DNA, 25 bp, Homo sapien
tcagggatgagaggccgcccgagcc

SEQ ID NO: 427062 - DNA, 25 bp, Homo sapien
tgctccaaaggcgaccccgagtcag

SEQ ID NO: 427063 - DNA, 25 bp, Homo sapien
ccgagccccggattttatagggcag

SEQ ID NO: 427064 - DNA, 25 bp, Homo sapien
aaaggcgaccccgagtcagggatga

SEQ ID NO: 427065 - DNA, 25 bp, Homo sapien
agtgtagacaggaacgagacactga

SEQ ID NO: 427066 - DNA, 25 bp, Homo sapien
ctgttggaactgcatccagatgaac

SEQ ID NO: 427067 - DNA, 25 bp, Homo sapien
tagacaggaacgagacactgacttc

SEQ ID NO: 427068 - DNA, 25 bp, Homo sapien
cactgacttcagcatgatgggtctg

SEQ ID NO: 427069 - DNA, 25 bp, Homo sapien
cgatgtctccgtaatgttttctttt

SEQ ID NO: 427070 - DNA, 25 bp, Homo sapien
ccttcgatgtctccgtaatgttttc

SEQ ID NO: 427071 - DNA, 25 bp, Homo sapien
ttcgatgtctccgtaatgttttctt

SEQ ID NO: 427072 - DNA, 25 bp, Homo sapien
ggccttcgatgtctccgtaatgttt

SEQ ID NO: 427073 - DNA, 25 bp, Homo sapien
gaattttgcaagacccctggagaga

SEQ ID NO: 427074 - DNA, 25 bp, Homo sapien
gaaaggccgcccttgcaagttgctg

SEQ ID NO: 427075 - DNA, 25 bp, Homo sapien
gcagacacgccagacaatgagggaa

SEQ ID NO: 427076 - DNA, 25 bp, Homo sapien
ggtccctagagatgaaaacgtgcag

SEQ ID NO: 427077 - DNA, 25 bp, Homo sapien
gcgttattgtttttagcacttccag

SEQ ID NO: 427078 - DNA, 25 bp, Homo sapien
catccgtccaacatgatgacggagc

SEQ ID NO: 427079 - DNA, 25 bp, Homo sapien
cagccatccgtccaacatgatgacg

SEQ ID NO: 427080 - DNA, 25 bp, Homo sapien
gtccaacatgatgacggagcgggca

SEQ ID NO: 427081 - DNA, 25 bp, Homo sapien
tgcattttgccctgtgggaattgtg

SEQ ID NO: 427082 - DNA, 25 bp, Homo sapien
ccacgatgaagacaaggttggcctc

SEQ ID NO: 427083 - DNA, 25 bp, Homo sapien
tggggctgttctccacgatgaagac

SEQ ID NO: 427084 - DNA, 25 bp, Homo sapien
cgatgaagacaaggttggcctcccc

SEQ ID NO: 427085 - DNA, 25 bp, Homo sapien
ccgtgtggaggaccggcttctcctt

SEQ ID NO: 427086 - DNA, 25 bp, Homo sapien
atctgtgtcccgtgaaggcctccat

SEQ ID NO: 427087 - DNA, 25 bp, Homo sapien
ccatgtactgcagacccgtgtggag

SEQ ID NO: 427088 - DNA, 25 bp, Homo sapien
tttaggatcaccagctcagtgctca

SEQ ID NO: 427089 - DNA, 25 bp, Homo sapien
ccacatgagaaaggcgccgtgttca

SEQ ID NO: 427090 - DNA, 25 bp, Homo sapien
agggtcccagcgaagccctaagcct

SEQ ID NO: 427091 - DNA, 25 bp, Homo sapien
aaatgtttccccggcgcccacatga

SEQ ID NO: 427092 - DNA, 25 bp, Homo sapien
gtgttcacctgccagcacgcagctg

SEQ ID NO: 427093 - DNA, 25 bp, Homo sapien
aaaagccagggacaacgtgagctgg

SEQ ID NO: 427094 - DNA, 25 bp, Homo sapien
ccagggacaacgtgagctggggagg

SEQ ID NO: 427095 - DNA, 25 bp, Homo sapien
agccagggacaacgtgagctgggga

SEQ ID NO: 427096 - DNA, 25 bp, Homo sapien
aaagccagggacaacgtgagctggg

SEQ ID NO: 427097 - DNA, 25 bp, Homo sapien
gatgccaaagctggtcgctcccact

SEQ ID NO: 427098 - DNA, 25 bp, Homo sapien
aaagctggtcgctcccactaacttc

SEQ ID NO: 427099 - DNA, 25 bp, Homo sapien
ttcacctctgcgcagccgatgccaa

SEQ ID NO: 427100 - DNA, 25 bp, Homo sapien
tctgctcgtggatccagtccaggaa

SEQ ID NO: 427101 - DNA, 25 bp, Homo sapien
tgccaccgtacacgtccctgtggtt

SEQ ID NO: 427102 - DNA, 25 bp, Homo sapien
gggacggccgcgtggttcaggacag

SEQ ID NO: 427103 - DNA, 25 bp, Homo sapien
ggtagcccgcgcagagcatggaggg

SEQ ID NO: 427104 - DNA, 25 bp, Homo sapien
cctgtggttgcagatcttgttggaa

SEQ ID NO: 427105 - DNA, 25 bp, Homo sapien
ccagcacacttttccatcggggaag

SEQ ID NO: 427106 - DNA, 25 bp, Homo sapien
ccatcctgacgtccagcacactttt

SEQ ID NO: 427107 - DNA, 25 bp, Homo sapien
cacacttttccatcggggaagttct

SEQ ID NO: 427108 - DNA, 25 bp, Homo sapien
tggccccccatcctgacgtccagca

SEQ ID NO: 427109 - DNA, 25 bp, Homo sapien
accaacatgaatcaggagttggaat

SEQ ID NO: 427110 - DNA, 25 bp, Homo sapien
ttcaatgagcaattgcaaatcctct

SEQ ID NO: 427111 - DNA, 25 bp, Homo sapien
caatgagcaattgcaaatcctcttg

SEQ ID NO: 427112 - DNA, 25 bp, Homo sapien
gcttcaatgagcaattgcaaatcct

SEQ ID NO: 427113 - DNA, 25 bp, Homo sapien
tgcttcaatgagcaattgcaaatcc

SEQ ID NO: 427114 - DNA, 25 bp, Homo sapien
gagtggcccggccagcttcataagg

SEQ ID NO: 427115 - DNA, 25 bp, Homo sapien
gtacttgctgtggtagacaatcttc

SEQ ID NO: 427116 - DNA, 25 bp, Homo sapien
ggaaactagacccacctggatggtc

SEQ ID NO: 427117 - DNA, 25 bp, Homo sapien
gcctctttggcttgtacttgctgtg

SEQ ID NO: 427118 - DNA, 25 bp, Homo sapien
gccactgcgagagcaaggacatgtt

SEQ ID NO: 427119 - DNA, 25 bp, Homo sapien
tgatgatccacaggggcgtgatgac

SEQ ID NO: 427120 - DNA, 25 bp, Homo sapien
catgtttccacccacgatgcgtgag

SEQ ID NO: 427121 - DNA, 25 bp, Homo sapien
tccacaggggcgtgatgacagagcc

SEQ ID NO: 427122 - DNA, 25 bp, Homo sapien
acaaaggcttgtgggtccaccctgc

SEQ ID NO: 427123 - DNA, 25 bp, Homo sapien
aacaaaggcttgtgggtccaccctg

SEQ ID NO: 427124 - DNA, 25 bp, Homo sapien
aaggcttgtgggtccaccctgcaga

SEQ ID NO: 427125 - DNA, 25 bp, Homo sapien
aaaggcttgtgggtccaccctgcag

SEQ ID NO: 427126 - DNA, 25 bp, Homo sapien
caggtaggggtacacagagttcccg

SEQ ID NO: 427127 - DNA, 25 bp, Homo sapien
cctccagcaggtaggggtacacaga

SEQ ID NO: 427128 - DNA, 25 bp, Homo sapien
acaggtgaggccgacaggtgaggat

SEQ ID NO: 427129 - DNA, 25 bp, Homo sapien
gacaggtgaggatgacactgctccc

SEQ ID NO: 427130 - DNA, 25 bp, Homo sapien
tgcaaggtaaccacgtggccagagg

SEQ ID NO: 427131 - DNA, 25 bp, Homo sapien
ctgtgcactgcaaggtaaccacgtg

SEQ ID NO: 427132 - DNA, 25 bp, Homo sapien
aaggtaaccacgtggccagaggcac

SEQ ID NO: 427133 - DNA, 25 bp, Homo sapien
gcactgcaaggtaaccacgtggcca

SEQ ID NO: 427134 - DNA, 25 bp, Homo sapien
tcacatatactgagtggtgtaatgc

SEQ ID NO: 427135 - DNA, 25 bp, Homo sapien
ctcacatatactgagtggtgtaatg

SEQ ID NO: 427136 - DNA, 25 bp, Homo sapien
cacatatactgagtggtgtaatgca

SEQ ID NO: 427137 - DNA, 25 bp, Homo sapien
acatatactgagtggtgtaatgcag

SEQ ID NO: 427138 - DNA, 25 bp, Homo sapien
tctgaggttatctgaactcacatag

SEQ ID NO: 427139 - DNA, 25 bp, Homo sapien
tctggcaagaggtgatcgatggaca

SEQ ID NO: 427140 - DNA, 25 bp, Homo sapien
ctccagcgagctcactctgaggtta

SEQ ID NO: 427141 - DNA, 25 bp, Homo sapien
gatcgatggacacaaactcctcccg

SEQ ID NO: 427142 - DNA, 25 bp, Homo sapien
caagaaagcgattccacgaacacca

SEQ ID NO: 427143 - DNA, 25 bp, Homo sapien
cacaaacaagaaagcgattccacga

SEQ ID NO: 427144 - DNA, 25 bp, Homo sapien
aaacaagaaagcgattccacgaaca

SEQ ID NO: 427145 - DNA, 25 bp, Homo sapien
acacaaacaagaaagcgattccacg

SEQ ID NO: 427146 - DNA, 25 bp, Homo sapien
ctgatgcctgggacagctggggctc

SEQ ID NO: 427147 - DNA, 25 bp, Homo sapien
tgggacagctggggctcctgacttg

SEQ ID NO: 427148 - DNA, 25 bp, Homo sapien
cagctggggctcctgacttgggtct

SEQ ID NO: 427149 - DNA, 25 bp, Homo sapien
ggacagctggggctcctgacttggg

SEQ ID NO: 427150 - DNA, 25 bp, Homo sapien
tgttctacatgttgctaaacaagtg

SEQ ID NO: 427151 - DNA, 25 bp, Homo sapien
aagtgtccaggaagctactctagga

SEQ ID NO: 427152 - DNA, 25 bp, Homo sapien
caaaactgtgtcactccaatgcaaa

SEQ ID NO: 427153 - DNA, 25 bp, Homo sapien
gaccgccaggaccaagcaggaaagt

SEQ ID NO: 427154 - DNA, 25 bp, Homo sapien
ttcgtatctccgatcctggcctggc

SEQ ID NO: 427155 - DNA, 25 bp, Homo sapien
aagtcacttagcctgtctggccttg

SEQ ID NO: 427156 - DNA, 25 bp, Homo sapien
cttcccatgtgccttgagcaagtca

SEQ ID NO: 427157 - DNA, 25 bp, Homo sapien
agcctgtctggccttggtttgcttg

SEQ ID NO: 427158 - DNA, 25 bp, Homo sapien
caacatttgcgtagtgacccttcca

SEQ ID NO: 427159 - DNA, 25 bp, Homo sapien
gggaaacccagttgggcacaggcaa

SEQ ID NO: 427160 - DNA, 25 bp, Homo sapien
gacccttccagtcatcggagcacat

SEQ ID NO: 427161 - DNA, 25 bp, Homo sapien
acaggcaacatttgcgtagtgaccc

SEQ ID NO: 427162 - DNA, 25 bp, Homo sapien
cctggagcacggcattctgaccacc

SEQ ID NO: 427163 - DNA, 25 bp, Homo sapien
ctggagcacggcattctgaccaccc

SEQ ID NO: 427164 - DNA, 25 bp, Homo sapien
acctggagcacggcattctgaccac

SEQ ID NO: 427165 - DNA, 25 bp, Homo sapien
tggagcacggcattctgaccaccca

SEQ ID NO: 427166 - DNA, 25 bp, Homo sapien
gagactccgtcacatcgagctatca

SEQ ID NO: 427167 - DNA, 25 bp, Homo sapien
gctatcagctcgatacacttaaagg

SEQ ID NO: 427168 - DNA, 25 bp, Homo sapien
cttaaaggatgagcgacatctgtac

SEQ ID NO: 427169 - DNA, 25 bp, Homo sapien
ccgtctttgcaatccgagactccgt

SEQ ID NO: 427170 - DNA, 25 bp, Homo sapien
ggcaggaattaaccaacagctcttt

SEQ ID NO: 427171 - DNA, 25 bp, Homo sapien
aggcaggaattaaccaacagctctt

SEQ ID NO: 427172 - DNA, 25 bp, Homo sapien
accaacagctctttcagagtgcaac

SEQ ID NO: 427173 - DNA, 25 bp, Homo sapien
ccaacagctctttcagagtgcaaca

SEQ ID NO: 427174 - DNA, 25 bp, Homo sapien
tgcaatgatcccaatgacgatgatt

SEQ ID NO: 427175 - DNA, 25 bp, Homo sapien
tgcccagaccaatggccagtgctaa

SEQ ID NO: 427176 - DNA, 25 bp, Homo sapien
tgacgatgattggaaaaaacttcaa

SEQ ID NO: 427177 - DNA, 25 bp, Homo sapien
gctaatatcaatgcaatgatcccaa

SEQ ID NO: 427178 - DNA, 25 bp, Homo sapien
gagatggcctggagagtctttacag

SEQ ID NO: 427179 - DNA, 25 bp, Homo sapien
gaaagccacagaacctgacttggag

SEQ ID NO: 427180 - DNA, 25 bp, Homo sapien
agagaagtctcagcccaaagaaagg

SEQ ID NO: 427181 - DNA, 25 bp, Homo sapien
gacttggagtgccatgaaacttaca

SEQ ID NO: 427182 - DNA, 25 bp, Homo sapien
gggaacaatgcatctacacaccaag

SEQ ID NO: 427183 - DNA, 25 bp, Homo sapien
gcagccctatgacactaagatggag

SEQ ID NO: 427184 - DNA, 25 bp, Homo sapien
gagtatggccttgatgacaccttgg

SEQ ID NO: 427185 - DNA, 25 bp, Homo sapien
cccagaggagatgcaaggacaagat

SEQ ID NO: 427186 - DNA, 25 bp, Homo sapien
tctctgagtaatgatgccgtcgtgg

SEQ ID NO: 427187 - DNA, 25 bp, Homo sapien
tattaggaacaactataggtcaaac

SEQ ID NO: 427188 - DNA, 25 bp, Homo sapien
atttaatgccatagaaaggtgaagg

SEQ ID NO: 427189 - DNA, 25 bp, Homo sapien
ggtcaaactatgatcaaatggctgt

SEQ ID NO: 427190 - DNA, 25 bp, Homo sapien
gggcttcaacagcaggcggatcatt

SEQ ID NO: 427191 - DNA, 25 bp, Homo sapien
ccaaaaagcgatcggaatgagaagg

SEQ ID NO: 427192 - DNA, 25 bp, Homo sapien
ctggtgcaacaggacttattttcaa

SEQ ID NO: 427193 - DNA, 25 bp, Homo sapien
aatcatcaaggccaaaaagcgatcg

SEQ ID NO: 427194 - DNA, 25 bp, Homo sapien
tatttcaggacctctgacatccggc

SEQ ID NO: 427195 - DNA, 25 bp, Homo sapien
ggtgactatttcaggacctctgaca

SEQ ID NO: 427196 - DNA, 25 bp, Homo sapien
ttcaggacctctgacatccggctcc

SEQ ID NO: 427197 - DNA, 25 bp, Homo sapien
ggacctctgacatccggctccgcct

SEQ ID NO: 427198 - DNA, 25 bp, Homo sapien
tctttgaaattcgacagtccacaca

SEQ ID NO: 427199 - DNA, 25 bp, Homo sapien
tatttatacttgtagcatcaggtgc

SEQ ID NO: 427200 - DNA, 25 bp, Homo sapien
caggtgcatcttggtcatacggtaa

SEQ ID NO: 427201 - DNA, 25 bp, Homo sapien
cagaaagcatttgttcccctattta

SEQ ID NO: 427202 - DNA, 25 bp, Homo sapien
ccatattgctattgttcagaagata

SEQ ID NO: 427203 - DNA, 25 bp, Homo sapien
tgctattgttcagaagataaattac

SEQ ID NO: 427204 - DNA, 25 bp, Homo sapien
taaattactctcaaagccctttcca

SEQ ID NO: 427205 - DNA, 25 bp, Homo sapien
tgttcagaagataaattactctcaa

SEQ ID NO: 427206 - DNA, 25 bp, Homo sapien
tgtagatggcaccacggaagagata

SEQ ID NO: 427207 - DNA, 25 bp, Homo sapien
ttcccgagtcccaaaaatgtagatg

SEQ ID NO: 427208 - DNA, 25 bp, Homo sapien
gatagtaggccacagtgttactggc

SEQ ID NO: 427209 - DNA, 25 bp, Homo sapien
tcacacgggcatgacctaattaaga

SEQ ID NO: 427210 - DNA, 25 bp, Homo sapien
tgtgtaagccgtaacaagtgcctgc

SEQ ID NO: 427211 - DNA, 25 bp, Homo sapien
ttttcccaagaatgggcgacgtgac

SEQ ID NO: 427212 - DNA, 25 bp, Homo sapien
gggacaggcgctagaacttccagct

SEQ ID NO: 427213 - DNA, 25 bp, Homo sapien
cattgtccaaaaccacgatggcagc

SEQ ID NO: 427214 - DNA, 25 bp, Homo sapien
tctctgcagcattccaattttagtt

SEQ ID NO: 427215 - DNA, 25 bp, Homo sapien
ctgcagcattccaattttagttata

SEQ ID NO: 427216 - DNA, 25 bp, Homo sapien
gcagcattccaattttagttatatg

SEQ ID NO: 427217 - DNA, 25 bp, Homo sapien
ctctgcagcattccaattttagtta

SEQ ID NO: 427218 - DNA, 25 bp, Homo sapien
gatctgcgcccacttcaaccttcgc

SEQ ID NO: 427219 - DNA, 25 bp, Homo sapien
gtggagtgatctgcgcccacttcaa

SEQ ID NO: 427220 - DNA, 25 bp, Homo sapien
agtggagtgatctgcgcccacttca

SEQ ID NO: 427221 - DNA, 25 bp, Homo sapien
atgagctcttcacaggcttggggga

SEQ ID NO: 427222 - DNA, 25 bp, Homo sapien
ggaaatgagctcttcacaggcttgg

SEQ ID NO: 427223 - DNA, 25 bp, Homo sapien
cctggtttatcagggaggacttggg

SEQ ID NO: 427224 - DNA, 25 bp, Homo sapien
gagatttcgggggcctggtttatca

SEQ ID NO: 427225 - DNA, 25 bp, Homo sapien
gctcctggaagactctggcccttcc

SEQ ID NO: 427226 - DNA, 25 bp, Homo sapien
cagctcctggaagactctggccctt

SEQ ID NO: 427227 - DNA, 25 bp, Homo sapien
agctcctggaagactctggcccttc

SEQ ID NO: 427228 - DNA, 25 bp, Homo sapien
caggcaactgagagccacggtgatg

SEQ ID NO: 427229 - DNA, 25 bp, Homo sapien
tcaggcaactgagagccacggtgat

SEQ ID NO: 427230 - DNA, 25 bp, Homo sapien
aactgagagccacggtgatgttgtc

SEQ ID NO: 427231 - DNA, 25 bp, Homo sapien
tgagagccacggtgatgttgtcata

SEQ ID NO: 427232 - DNA, 25 bp, Homo sapien
aactcccatctgtggacccatcgtc

SEQ ID NO: 427233 - DNA, 25 bp, Homo sapien
ccaatgtgatttgtagaagcacgag

SEQ ID NO: 427234 - DNA, 25 bp, Homo sapien
gagacgcacttttatatcccggaat

SEQ ID NO: 427235 - DNA, 25 bp, Homo sapien
tgtagaagcacgagacgcactttta

SEQ ID NO: 427236 - DNA, 25 bp, Homo sapien
cacacacgaaggatctaaccacttc

SEQ ID NO: 427237 - DNA, 25 bp, Homo sapien
acacacgaaggatctaaccacttca

SEQ ID NO: 427238 - DNA, 25 bp, Homo sapien
tgttctagacgcatcccagcagata

SEQ ID NO: 427239 - DNA, 25 bp, Homo sapien
tgcttcgagtccaggccataccgaa

SEQ ID NO: 427240 - DNA, 25 bp, Homo sapien
gacgtcttcagggagattgttctag

SEQ ID NO: 427241 - DNA, 25 bp, Homo sapien
ccataccgaaatgacgtcttcaggg

SEQ ID NO: 427242 - DNA, 25 bp, Homo sapien
gaagagatggattcactgggatgta

SEQ ID NO: 427243 - DNA, 25 bp, Homo sapien
aagagatggattcactgggatgtag

SEQ ID NO: 427244 - DNA, 25 bp, Homo sapien
gagaagagatggattcactgggatg

SEQ ID NO: 427245 - DNA, 25 bp, Homo sapien
gagatggattcactgggatgtaggt

SEQ ID NO: 427246 - DNA, 25 bp, Homo sapien
caaagccagacacaggtaattcccc

SEQ ID NO: 427247 - DNA, 25 bp, Homo sapien
cagggcattgcctcacagtcagggt

SEQ ID NO: 427248 - DNA, 25 bp, Homo sapien
tggaccgaggaccaggattacaggc

SEQ ID NO: 427249 - DNA, 25 bp, Homo sapien
gtggtgcaaaagtcccgcctggcat

SEQ ID NO: 427250 - DNA, 25 bp, Homo sapien
ttcgactccagacaagaacttgcag

SEQ ID NO: 427251 - DNA, 25 bp, Homo sapien
gaagcattcttatgatacgatctcc

SEQ ID NO: 427252 - DNA, 25 bp, Homo sapien
tgcacccggctaacgacagaagcat

SEQ ID NO: 427253 - DNA, 25 bp, Homo sapien
tatttgcatttgtcaatcaacttaa

SEQ ID NO: 427254 - DNA, 25 bp, Homo sapien
cctctaataaagattgttaactgac

SEQ ID NO: 427255 - DNA, 25 bp, Homo sapien
ctggaggtctgactgtctagtttct

SEQ ID NO: 427256 - DNA, 25 bp, Homo sapien
tcctggaggtctgactgtctagttt

SEQ ID NO: 427257 - DNA, 25 bp, Homo sapien
cctggaggtctgactgtctagtttc

SEQ ID NO: 427258 - DNA, 25 bp, Homo sapien
catccatgtcatagcggaactcctc

SEQ ID NO: 427259 - DNA, 25 bp, Homo sapien
tcctggtcatactcccggctctctt

SEQ ID NO: 427260 - DNA, 25 bp, Homo sapien
ccggaggacgtctgcatcttcatct

SEQ ID NO: 427261 - DNA, 25 bp, Homo sapien
ctcatgtccatctcaccctcgaagc

SEQ ID NO: 427262 - DNA, 25 bp, Homo sapien
gacttccagaaagaccactgggttg

SEQ ID NO: 427263 - DNA, 25 bp, Homo sapien
ttcaactttccccagcacattaagg

SEQ ID NO: 427264 - DNA, 25 bp, Homo sapien
aactttccccagcacattaaggact

SEQ ID NO: 427265 - DNA, 25 bp, Homo sapien
tccagaaagaccactgggttggaca

SEQ ID NO: 427266 - DNA, 25 bp, Homo sapien
cctggagcgtcttggccaggtccat

SEQ ID NO: 427267 - DNA, 25 bp, Homo sapien
gtccacagggccaattcagtgattt

SEQ ID NO: 427268 - DNA, 25 bp, Homo sapien
tccacagggccaattcagtgatttg

SEQ ID NO: 427269 - DNA, 25 bp, Homo sapien
ttggaacaacagttactaattcttc

SEQ ID NO: 427270 - DNA, 25 bp, Homo sapien
gtgtccacagggccaattcagtgat

SEQ ID NO: 427271 - DNA, 25 bp, Homo sapien
ggtagggcctcttacttagcaacaa

SEQ ID NO: 427272 - DNA, 25 bp, Homo sapien
tagatgcaggtgacttacaggaagc

SEQ ID NO: 427273 - DNA, 25 bp, Homo sapien
gagcaccctgcggtccatgaagaat

SEQ ID NO: 427274 - DNA, 25 bp, Homo sapien
cagtatgtcaaattcctctacgttt

SEQ ID NO: 427275 - DNA, 25 bp, Homo sapien
agaaggtggaccatgagcaaccatg

SEQ ID NO: 427276 - DNA, 25 bp, Homo sapien
aggcaaggaagacagatcactgtga

SEQ ID NO: 427277 - DNA, 25 bp, Homo sapien
aaggaagacagatcactgtgaggcc

SEQ ID NO: 427278 - DNA, 25 bp, Homo sapien
tgtgaggccacacaggattctggtc

SEQ ID NO: 427279 - DNA, 25 bp, Homo sapien
catgttgttcacacccaacatcaaa

SEQ ID NO: 427280 - DNA, 25 bp, Homo sapien
gttcacacccaacatcaaatacata

SEQ ID NO: 427281 - DNA, 25 bp, Homo sapien
gttgttcacacccaacatcaaatac

SEQ ID NO: 427282 - DNA, 25 bp, Homo sapien
accatgttgttcacacccaacatca

SEQ ID NO: 427283 - DNA, 25 bp, Homo sapien
gaacgctccagcaaacgtactctga

SEQ ID NO: 427284 - DNA, 25 bp, Homo sapien
gaggctctaatcgtttcattcccat

SEQ ID NO: 427285 - DNA, 25 bp, Homo sapien
catgtgctttgattagatgaggctc

SEQ ID NO: 427286 - DNA, 25 bp, Homo sapien
catttcagttgttagtaagcctgca

SEQ ID NO: 427287 - DNA, 25 bp, Homo sapien
gtatcctgacacagtatgatcctaa

SEQ ID NO: 427288 - DNA, 25 bp, Homo sapien
cagactcatattctattggcaagag

SEQ ID NO: 427289 - DNA, 25 bp, Homo sapien
cattaaagactgagaatatccaaca

SEQ ID NO: 427290 - DNA, 25 bp, Homo sapien
ggaaaatgggcactaccgattgtga

SEQ ID NO: 427291 - DNA, 25 bp, Homo sapien
ccacatttgaataggccggactcag

SEQ ID NO: 427292 - DNA, 25 bp, Homo sapien
tgatcaaagctaccacgatggcctg

SEQ ID NO: 427293 - DNA, 25 bp, Homo sapien
gaaacggcccaccatgggtgctaga

SEQ ID NO: 427294 - DNA, 25 bp, Homo sapien
tacacacaagaggttcagatgccct

SEQ ID NO: 427295 - DNA, 25 bp, Homo sapien
ggtgccaacatacttactgcccgtc

SEQ ID NO: 427296 - DNA, 25 bp, Homo sapien
gcccgtctccgcgtataaataggtg

SEQ ID NO: 427297 - DNA, 25 bp, Homo sapien
ttcaggtgaatgagctcggccgtgc

SEQ ID NO: 427298 - DNA, 25 bp, Homo sapien
caagaacttgccctggtacctgtgg

SEQ ID NO: 427299 - DNA, 25 bp, Homo sapien
cacagacattgacattgagggaggc

SEQ ID NO: 427300 - DNA, 25 bp, Homo sapien
catagaaagattggacctgcctggc

SEQ ID NO: 427301 - DNA, 25 bp, Homo sapien
tgttgcaggctcacaagcgatgtag

SEQ ID NO: 427302 - DNA, 25 bp, Homo sapien
tatctgtgtccagtcagaaggtgcc

SEQ ID NO: 427303 - DNA, 25 bp, Homo sapien
tgatgagcaaaccactctccagtgt

SEQ ID NO: 427304 - DNA, 25 bp, Homo sapien
ctttgatgagcaaaccactctccag

SEQ ID NO: 427305 - DNA, 25 bp, Homo sapien
gtagtatacgccatggccgtgccgc

SEQ ID NO: 427306 - DNA, 25 bp, Homo sapien
tattgatgtagtagtatacgccatg

SEQ ID NO: 427307 - DNA, 25 bp, Homo sapien
agaagggatcgatgccctgtaccat

SEQ ID NO: 427308 - DNA, 25 bp, Homo sapien
tgagaagaagggatcgatgccctgt

SEQ ID NO: 427309 - DNA, 25 bp, Homo sapien
gagaagaagggatcgatgccctgta

SEQ ID NO: 427310 - DNA, 25 bp, Homo sapien
gaagaagggatcgatgccctgtacc

SEQ ID NO: 427311 - DNA, 25 bp, Homo sapien
gcacgaaaagctgcatggcacaatt

SEQ ID NO: 427312 - DNA, 25 bp, Homo sapien
tgaagataaagaatacccaataggc

SEQ ID NO: 427313 - DNA, 25 bp, Homo sapien
cctgggcactttgtgagatgaacga

SEQ ID NO: 427314 - DNA, 25 bp, Homo sapien
agcaccagcctgaggatggaaggtt

SEQ ID NO: 427315 - DNA, 25 bp, Homo sapien
ctccacaatgtcattcttaaacttc

SEQ ID NO: 427316 - DNA, 25 bp, Homo sapien
tttctccacaatgtcattcttaaac

SEQ ID NO: 427317 - DNA, 25 bp, Homo sapien
tctttctccacaatgtcattcttaa

SEQ ID NO: 427318 - DNA, 25 bp, Homo sapien
tctccacaatgtcattcttaaactt

SEQ ID NO: 427319 - DNA, 25 bp, Homo sapien
gccttgaccgtgctttttatttcta

SEQ ID NO: 427320 - DNA, 25 bp, Homo sapien
ttctaacatattctccgatatatcg

SEQ ID NO: 427321 - DNA, 25 bp, Homo sapien
cgatatatcgagcaccatttttaaa

SEQ ID NO: 427322 - DNA, 25 bp, Homo sapien
gatccatctggatatataaaagtgc

SEQ ID NO: 427323 - DNA, 25 bp, Homo sapien
cacattgattatatcattcatatca

SEQ ID NO: 427324 - DNA, 25 bp, Homo sapien
attgattatatcattcatatcattg

SEQ ID NO: 427325 - DNA, 25 bp, Homo sapien
gaaacacattgattatatcattcat

SEQ ID NO: 427326 - DNA, 25 bp, Homo sapien
acacattgattatatcattcatatc

SEQ ID NO: 427327 - DNA, 25 bp, Homo sapien
catccagtcaagtcaacggttctga

SEQ ID NO: 427328 - DNA, 25 bp, Homo sapien
gaaaaccatccagtcaagtcaacgg

SEQ ID NO: 427329 - DNA, 25 bp, Homo sapien
agagaaaaccatccagtcaagtcaa

SEQ ID NO: 427330 - DNA, 25 bp, Homo sapien
aaccatccagtcaagtcaacggttc

SEQ ID NO: 427331 - DNA, 25 bp, Homo sapien
tgtcttttaccgaattcgtagctcc

SEQ ID NO: 427332 - DNA, 25 bp, Homo sapien
taccgaattcgtagctcccttcgta

SEQ ID NO: 427333 - DNA, 25 bp, Homo sapien
ttgggtagccgtgccctcccacgtc

SEQ ID NO: 427334 - DNA, 25 bp, Homo sapien
tcgtagctcccttcgtaggtgtccc

SEQ ID NO: 427335 - DNA, 25 bp, Homo sapien
tcaagggcagtatggcagcgtggga

SEQ ID NO: 427336 - DNA, 25 bp, Homo sapien
ttccaaagccttccgctgggaaatc

SEQ ID NO: 427337 - DNA, 25 bp, Homo sapien
aactgcctcgatgggaattaacaca

SEQ ID NO: 427338 - DNA, 25 bp, Homo sapien
tgatctgctcatccgagaaaactgc

SEQ ID NO: 427339 - DNA, 25 bp, Homo sapien
cccaatatcattctctccctcctcc

SEQ ID NO: 427340 - DNA, 25 bp, Homo sapien
cctccaactcctccgagcccaggtc

SEQ ID NO: 427341 - DNA, 25 bp, Homo sapien
tccaactcctccgagcccaggtccg

SEQ ID NO: 427342 - DNA, 25 bp, Homo sapien
ctcctccaactcctccgagcccagg

SEQ ID NO: 427343 - DNA, 25 bp, Homo sapien
aggtgggtagcaaccgcctccaccg

SEQ ID NO: 427344 - DNA, 25 bp, Homo sapien
aggcgacgcggacgaagcgggagga

SEQ ID NO: 427345 - DNA, 25 bp, Homo sapien
ccgcagcgcctctagcaggtgggta

SEQ ID NO: 427346 - DNA, 25 bp, Homo sapien
gcctctagcaggtgggtagcaaccg

SEQ ID NO: 427347 - DNA, 25 bp, Homo sapien
caaaatgcttgttcagcccaccttc

SEQ ID NO: 427348 - DNA, 25 bp, Homo sapien
gaagcagcgctttccaattctgaag

SEQ ID NO: 427349 - DNA, 25 bp, Homo sapien
cccacagtgacctggaaatgcctgg

SEQ ID NO: 427350 - DNA, 25 bp, Homo sapien
tgatgccagaagcagcgctttccaa

SEQ ID NO: 427351 - DNA, 25 bp, Homo sapien
ggccctgcagcttggcagttgccat

SEQ ID NO: 427352 - DNA, 25 bp, Homo sapien
gaggccctgcagcttggcagttgcc

SEQ ID NO: 427353 - DNA, 25 bp, Homo sapien
ctcccagctggaggccctgcagctt

SEQ ID NO: 427354 - DNA, 25 bp, Homo sapien
tggaggccctgcagcttggcagttg

SEQ ID NO: 427355 - DNA, 25 bp, Homo sapien
caaggtctaagggtggatcagattt

SEQ ID NO: 427356 - DNA, 25 bp, Homo sapien
aaggtctaagggtggatcagatttt

SEQ ID NO: 427357 - DNA, 25 bp, Homo sapien
ttcaaggtctaagggtggatcagat

SEQ ID NO: 427358 - DNA, 25 bp, Homo sapien
tcaaggtctaagggtggatcagatt

SEQ ID NO: 427359 - DNA, 25 bp, Homo sapien
cgctgcccgttcttcacgatcaagg

SEQ ID NO: 427360 - DNA, 25 bp, Homo sapien
ccgctgcccgttcttcacgatcaag

SEQ ID NO: 427361 - DNA, 25 bp, Homo sapien
tggccgctgcccgttcttcacgatc

SEQ ID NO: 427362 - DNA, 25 bp, Homo sapien
tcatggccgctgcccgttcttcacg

SEQ ID NO: 427363 - DNA, 25 bp, Homo sapien
ttgctcttccccgaggagtgggctg

SEQ ID NO: 427364 - DNA, 25 bp, Homo sapien
ctctgaagccatcctgggggtccac

SEQ ID NO: 427365 - DNA, 25 bp, Homo sapien
ttcggcagtagcttctaggggactg

SEQ ID NO: 427366 - DNA, 25 bp, Homo sapien
ggtccactgtgggtgttcggcagta

SEQ ID NO: 427367 - DNA, 25 bp, Homo sapien
cagccggcgctcaggcgccgcagcc

SEQ ID NO: 427368 - DNA, 25 bp, Homo sapien
agccggcgctcaggcgccgcagccg

SEQ ID NO: 427369 - DNA, 25 bp, Homo sapien
ctcggagctcggctcctctccttcc

SEQ ID NO: 427370 - DNA, 25 bp, Homo sapien
ggccctgcgcactcggagctcggct

SEQ ID NO: 427371 - DNA, 25 bp, Homo sapien
cggggccctgcgcactcggagctcg

SEQ ID NO: 427372 - DNA, 25 bp, Homo sapien
cgcggggccctgcgcactcggagct

SEQ ID NO: 427373 - DNA, 25 bp, Homo sapien
gggacggtctcaagctattttcgcg

SEQ ID NO: 427374 - DNA, 25 bp, Homo sapien
cggtctcaagctattttcgcggagg

SEQ ID NO: 427375 - DNA, 25 bp, Homo sapien
gacggtctcaagctattttcgcgga

SEQ ID NO: 427376 - DNA, 25 bp, Homo sapien
gagccggggacggtctcaagctatt

SEQ ID NO: 427377 - DNA, 25 bp, Homo sapien
atctagaagagtggccctcggcgac

SEQ ID NO: 427378 - DNA, 25 bp, Homo sapien
gccctcggcgacaatgccgggcgtt

SEQ ID NO: 427379 - DNA, 25 bp, Homo sapien
tacgacatctagaagagtggccctc

SEQ ID NO: 427380 - DNA, 25 bp, Homo sapien
ctttgaaatacgacatctagaagag

SEQ ID NO: 427381 - DNA, 25 bp, Homo sapien
ccgctccacggagtccccggcaggg

SEQ ID NO: 427382 - DNA, 25 bp, Homo sapien
gagcttagctgtccagccgggtccc

SEQ ID NO: 427383 - DNA, 25 bp, Homo sapien
ccggcaggggcgagcttagctgtcc

SEQ ID NO: 427384 - DNA, 25 bp, Homo sapien
cggcagccgctccacggagtccccg

SEQ ID NO: 427385 - DNA, 25 bp, Homo sapien
cccgggccgcggtgacagctgaggg

SEQ ID NO: 427386 - DNA, 25 bp, Homo sapien
cgcgatggggacgtgggcgtgcccg

SEQ ID NO: 427387 - DNA, 25 bp, Homo sapien
gggaccctgcgcattgtctgccgcg

SEQ ID NO: 427388 - DNA, 25 bp, Homo sapien
cctgcgcattgtctgccgcgatggg

SEQ ID NO: 427389 - DNA, 25 bp, Homo sapien
cctttgcgttgtttgtcggctgagc

SEQ ID NO: 427390 - DNA, 25 bp, Homo sapien
cacgccgtaatcctggtgaccgaga

SEQ ID NO: 427391 - DNA, 25 bp, Homo sapien
tataataaagggcttgacgcgccgg

SEQ ID NO: 427392 - DNA, 25 bp, Homo sapien
ggcctcctggccaatgcgagtgaca

SEQ ID NO: 427393 - DNA, 25 bp, Homo sapien
gctgaaggtgtgaatgtcacgacac

SEQ ID NO: 427394 - DNA, 25 bp, Homo sapien
gtgtgaatgtcacgacactggactc

SEQ ID NO: 427395 - DNA, 25 bp, Homo sapien
taacgctgaaggtgtgaatgtcacg

SEQ ID NO: 427396 - DNA, 25 bp, Homo sapien
tgccagtaacgctgaaggtgtgaat

SEQ ID NO: 427397 - DNA, 25 bp, Homo sapien
ggacaagacccagcaggacaccttc

SEQ ID NO: 427398 - DNA, 25 bp, Homo sapien
gacaccttctttccacgctttccag

SEQ ID NO: 427399 - DNA, 25 bp, Homo sapien
cagaaggaaggggacaagacccagc

SEQ ID NO: 427400 - DNA, 25 bp, Homo sapien
caggacaccttctttccacgctttc

SEQ ID NO: 427401 - DNA, 25 bp, Homo sapien
ttttggtggtggaagccgtgaccca

SEQ ID NO: 427402 - DNA, 25 bp, Homo sapien
tcagatagtgtttgggctcccgcgt

SEQ ID NO: 427403 - DNA, 25 bp, Homo sapien
ctttgtccttggtactggcattgtc

SEQ ID NO: 427404 - DNA, 25 bp, Homo sapien
gtggaagccgtgacccagaacagtg

SEQ ID NO: 427405 - DNA, 25 bp, Homo sapien
cctgtctctgagtctttgcgtggcc

SEQ ID NO: 427406 - DNA, 25 bp, Homo sapien
gaaaggattatattagcctcctggg

SEQ ID NO: 427407 - DNA, 25 bp, Homo sapien
catggtaccacaagctgggtgtctt

SEQ ID NO: 427408 - DNA, 25 bp, Homo sapien
gaatttaccctctcacatccctgga

SEQ ID NO: 427409 - DNA, 25 bp, Homo sapien
taaaaatgtagatgcgcagctggga

SEQ ID NO: 427410 - DNA, 25 bp, Homo sapien
tatcccagggactctcggaaacgct

SEQ ID NO: 427411 - DNA, 25 bp, Homo sapien
ggacgccgccttaggtaattattga

SEQ ID NO: 427412 - DNA, 25 bp, Homo sapien
aagcaggacaggttctccagggtag

SEQ ID NO: 427413 - DNA, 25 bp, Homo sapien
tgttttgtgtttcaggtacagagcc

SEQ ID NO: 427414 - DNA, 25 bp, Homo sapien
gcataagaacgtttcagaacacagt

SEQ ID NO: 427415 - DNA, 25 bp, Homo sapien
gcctatcagcatagttaaggtaaga

SEQ ID NO: 427416 - DNA, 25 bp, Homo sapien
caagttttcacttatctcgaaagcc

SEQ ID NO: 427417 - DNA, 25 bp, Homo sapien
agttttattagttgacatttccaga

SEQ ID NO: 427418 - DNA, 25 bp, Homo sapien
gttttattagttgacatttccagaa

SEQ ID NO: 427419 - DNA, 25 bp, Homo sapien
tagttttattagttgacatttccag

SEQ ID NO: 427420 - DNA, 25 bp, Homo sapien
ttagttttattagttgacatttcca

SEQ ID NO: 427421 - DNA, 25 bp, Homo sapien
caaattccagctcttcgtgcgatcc

SEQ ID NO: 427422 - DNA, 25 bp, Homo sapien
tatcttgtgtgactgttccttccaa

SEQ ID NO: 427423 - DNA, 25 bp, Homo sapien
tatccagtcttaagtggttccccaa

SEQ ID NO: 427424 - DNA, 25 bp, Homo sapien
gatccaaccctaggtctggctgcgg

SEQ ID NO: 427425 - DNA, 25 bp, Homo sapien
tgggccttaaacactcatccgcttg

SEQ ID NO: 427426 - DNA, 25 bp, Homo sapien
cactctccgggagttggcagggacc

SEQ ID NO: 427427 - DNA, 25 bp, Homo sapien
tgggattacgtcacccggcctgtag

SEQ ID NO: 427428 - DNA, 25 bp, Homo sapien
gagacagtgcattcacagcccagtg

SEQ ID NO: 427429 - DNA, 25 bp, Homo sapien
gcagatgtagcgtgtaaggtgggct

SEQ ID NO: 427430 - DNA, 25 bp, Homo sapien
tggcctttgggggaatctttgtcag

SEQ ID NO: 427431 - DNA, 25 bp, Homo sapien
tccatgaaggcaccacctgttgggc

SEQ ID NO: 427432 - DNA, 25 bp, Homo sapien
tggggtccacctgatgactatgagg

SEQ ID NO: 427433 - DNA, 25 bp, Homo sapien
tgtccaggccactcaagacttaggg

SEQ ID NO: 427434 - DNA, 25 bp, Homo sapien
cactcgagaattccctgtgggtcag

SEQ ID NO: 427435 - DNA, 25 bp, Homo sapien
taattacctgagtacagtcccagca

SEQ ID NO: 427436 - DNA, 25 bp, Homo sapien
tctcgtgtgtagtggtgtccaggcc

SEQ ID NO: 427437 - DNA, 25 bp, Homo sapien
ctagcagctgcgatgtgcctgggca

SEQ ID NO: 427438 - DNA, 25 bp, Homo sapien
tggcttgacgctgaatcctgtgggt

SEQ ID NO: 427439 - DNA, 25 bp, Homo sapien
gatagatcagaacatcacaccacat

SEQ ID NO: 427440 - DNA, 25 bp, Homo sapien
caagatagatcagaacatcacacca

SEQ ID NO: 427441 - DNA, 25 bp, Homo sapien
ctttcaagatagatcagaacatcac

SEQ ID NO: 427442 - DNA, 25 bp, Homo sapien
tttcaagatagatcagaacatcaca

SEQ ID NO: 427443 - DNA, 25 bp, Homo sapien
tgcgagctcttttcacctggactgg

SEQ ID NO: 427444 - DNA, 25 bp, Homo sapien
tctgcccaagctggtagacaggtga

SEQ ID NO: 427445 - DNA, 25 bp, Homo sapien
tgttgacccacaaaacagttgagtg

SEQ ID NO: 427446 - DNA, 25 bp, Homo sapien
ttatagaatgacacggcacaccagg

SEQ ID NO: 427447 - DNA, 25 bp, Homo sapien
gaactaaaactgctcccgaggctcg

SEQ ID NO: 427448 - DNA, 25 bp, Homo sapien
gtgtgaatctaggaaaatgtacccc

SEQ ID NO: 427449 - DNA, 25 bp, Homo sapien
tcaaggatgacaggcagtcggcttt

SEQ ID NO: 427450 - DNA, 25 bp, Homo sapien
tctagccgcatggattcgttgccca

SEQ ID NO: 427451 - DNA, 25 bp, Homo sapien
tacactagcagtcaacaatccaaag

SEQ ID NO: 427452 - DNA, 25 bp, Homo sapien
attaaggccgtttcatttacaatag

SEQ ID NO: 427453 - DNA, 25 bp, Homo sapien
caaaaaacattacgcgaagcagaag

SEQ ID NO: 427454 - DNA, 25 bp, Homo sapien
tatcatacagctactcaatggtcag

SEQ ID NO: 427455 - DNA, 25 bp, Homo sapien
tctgccctgtgctattgaagagcca

SEQ ID NO: 427456 - DNA, 25 bp, Homo sapien
ttaccatttgccttgagtctgaggg

SEQ ID NO: 427457 - DNA, 25 bp, Homo sapien
tgaaagagagtattcaattctttac

SEQ ID NO: 427458 - DNA, 25 bp, Homo sapien
gtttcacgtgttcctctatcccctg

SEQ ID NO: 427459 - DNA, 25 bp, Homo sapien
agaagcattcggctgacctagggag

SEQ ID NO: 427460 - DNA, 25 bp, Homo sapien
caggtgttcctcacatgttaaaggg

SEQ ID NO: 427461 - DNA, 25 bp, Homo sapien
gaaacaatctcacggccattcagaa

SEQ ID NO: 427462 - DNA, 25 bp, Homo sapien
ttaaagggaaagattggtctgtgcc

SEQ ID NO: 427463 - DNA, 25 bp, Homo sapien
gaagaatgatgtctcgtgcatctgg

SEQ ID NO: 427464 - DNA, 25 bp, Homo sapien
cagtaggcagtgactaattcaacca

SEQ ID NO: 427465 - DNA, 25 bp, Homo sapien
aaatcatgtcccagtgtccaaaagg

SEQ ID NO: 427466 - DNA, 25 bp, Homo sapien
aactgacccatagaactagccttgg

SEQ ID NO: 427467 - DNA, 25 bp, Homo sapien
gaggagattccagtgcttagccaca

SEQ ID NO: 427468 - DNA, 25 bp, Homo sapien
taagccctaagcgtggagtgcactg

SEQ ID NO: 427469 - DNA, 25 bp, Homo sapien
tgcggtcacttctctgcgggtcaga

SEQ ID NO: 427470 - DNA, 25 bp, Homo sapien
ttacaaatcctgcaagggccgtggg

SEQ ID NO: 427471 - DNA, 25 bp, Homo sapien
caaagctagacgctgcacagtgcta

SEQ ID NO: 427472 - DNA, 25 bp, Homo sapien
gatctgtgtacctagccgttcatga

SEQ ID NO: 427473 - DNA, 25 bp, Homo sapien
cagtaagtaaacgtgcccaggagga

SEQ ID NO: 427474 - DNA, 25 bp, Homo sapien
gattcgaatccatagccaaagctag

SEQ ID NO: 427475 - DNA, 25 bp, Homo sapien
cagacacagctctcgcttgttgaca

SEQ ID NO: 427476 - DNA, 25 bp, Homo sapien
agcagacacagctctcgcttgttga

SEQ ID NO: 427477 - DNA, 25 bp, Homo sapien
cacagctctcgcttgttgacacaac

SEQ ID NO: 427478 - DNA, 25 bp, Homo sapien
gggagcagacacagctctcgcttgt

SEQ ID NO: 427479 - DNA, 25 bp, Homo sapien
tcagaaacgccgtagataaacaggg

SEQ ID NO: 427480 - DNA, 25 bp, Homo sapien
tgcacccggctatacgagaactctt

SEQ ID NO: 427481 - DNA, 25 bp, Homo sapien
gaaggagccattcgatactcagtcc

SEQ ID NO: 427482 - DNA, 25 bp, Homo sapien
agtagaaaatctggccacgctgggc

SEQ ID NO: 427483 - DNA, 25 bp, Homo sapien
cacgatgagttgttttgcagagcag

SEQ ID NO: 427484 - DNA, 25 bp, Homo sapien
taaaagtctgaaaggcaacgcgcac

SEQ ID NO: 427485 - DNA, 25 bp, Homo sapien
aaggccctggctgtcgaggaatcca

SEQ ID NO: 427486 - DNA, 25 bp, Homo sapien
catgctgtggcgataactgcacgtc

SEQ ID NO: 427487 - DNA, 25 bp, Homo sapien
ttatgttgtacagcggcgttccgtc

SEQ ID NO: 427488 - DNA, 25 bp, Homo sapien
tattatgttgtacagcggcgttccg

SEQ ID NO: 427489 - DNA, 25 bp, Homo sapien
atgtaccttagaagctagacagtcc

SEQ ID NO: 427490 - DNA, 25 bp, Homo sapien
tagacagtcctacaagcttattatg

SEQ ID NO: 427491 - DNA, 25 bp, Homo sapien
tcatctgaacgtcatcagctgtgct

SEQ ID NO: 427492 - DNA, 25 bp, Homo sapien
gctgtgctcctcttacggaagaggg

SEQ ID NO: 427493 - DNA, 25 bp, Homo sapien
tgcaccctcaatagatacatcttgt

SEQ ID NO: 427494 - DNA, 25 bp, Homo sapien
tcagttataccagccatgcttctgc

SEQ ID NO: 427495 - DNA, 25 bp, Homo sapien
tatcgaccattttacttttcctgcc

SEQ ID NO: 427496 - DNA, 25 bp, Homo sapien
tacactttctcagggagattcttga

SEQ ID NO: 427497 - DNA, 25 bp, Homo sapien
gaattgggcccctgttcgtttgata

SEQ ID NO: 427498 - DNA, 25 bp, Homo sapien
tgttctttcttacactttctcaggg

SEQ ID NO: 427499 - DNA, 25 bp, Homo sapien
tgtacccgctcccaatctgataggc

SEQ ID NO: 427500 - DNA, 25 bp, Homo sapien
cattgtgagtgaggtgttgagcccc

SEQ ID NO: 427501 - DNA, 25 bp, Homo sapien
caattctgaaatgccccagtgagca

SEQ ID NO: 427502 - DNA, 25 bp, Homo sapien
tggaaggctcaacctatactaggcc

SEQ ID NO: 427503 - DNA, 25 bp, Homo sapien
cagggtcagctacgggggaccaagt

SEQ ID NO: 427504 - DNA, 25 bp, Homo sapien
ccagggtcagctacgggggaccaag

SEQ ID NO: 427505 - DNA, 25 bp, Homo sapien
aaatgcacgcgtgacaacaaggccg

SEQ ID NO: 427506 - DNA, 25 bp, Homo sapien
tttgcacacgcacctggaaaagaca

SEQ ID NO: 427507 - DNA, 25 bp, Homo sapien
gaggcttttccagcacccatgatgt

SEQ ID NO: 427508 - DNA, 25 bp, Homo sapien
caaggacagttcagacaaagggccc

SEQ ID NO: 427509 - DNA, 25 bp, Homo sapien
ggtgctgaccttgggaactacatgg

SEQ ID NO: 427510 - DNA, 25 bp, Homo sapien
tcaaacgtcctcagaatgctgaccg

SEQ ID NO: 427511 - DNA, 25 bp, Homo sapien
tgctgaccgtccagatgtgcatggt

SEQ ID NO: 427512 - DNA, 25 bp, Homo sapien
tctcgggtttggacacatactggga

SEQ ID NO: 427513 - DNA, 25 bp, Homo sapien
cacactgtgtgtcccgcagttctca

SEQ ID NO: 427514 - DNA, 25 bp, Homo sapien
agaaacaacacactgtgtgtcccgc

SEQ ID NO: 427515 - DNA, 25 bp, Homo sapien
aacacactgtgtgtcccgcagttct

SEQ ID NO: 427516 - DNA, 25 bp, Homo sapien
aacaacacactgtgtgtcccgcagt

SEQ ID NO: 427517 - DNA, 25 bp, Homo sapien
caaaagagctcaaggtgggactcca

SEQ ID NO: 427518 - DNA, 25 bp, Homo sapien
tatactgtgcgtctcagagcagagc

SEQ ID NO: 427519 - DNA, 25 bp, Homo sapien
tggtgacagggccaacaaaagagct

SEQ ID NO: 427520 - DNA, 25 bp, Homo sapien
ggtgtgcagcactcgtatccatggg

SEQ ID NO: 427521 - DNA, 25 bp, Homo sapien
gaaagtccacggagggcaagggcag

SEQ ID NO: 427522 - DNA, 25 bp, Homo sapien
agcagggcacgtcccaggcggctga

SEQ ID NO: 427523 - DNA, 25 bp, Homo sapien
tgaagcatcgccctgggcagcaagt

SEQ ID NO: 427524 - DNA, 25 bp, Homo sapien
gcgtgcgccatcgtcggagacagtc

SEQ ID NO: 427525 - DNA, 25 bp, Homo sapien
taacaatggtcaggtctggtaactg

SEQ ID NO: 427526 - DNA, 25 bp, Homo sapien
tcctctgggacacgcttaacaatgg

SEQ ID NO: 427527 - DNA, 25 bp, Homo sapien
gagacttcagttagcacccagtaaa

SEQ ID NO: 427528 - DNA, 25 bp, Homo sapien
tcaaccgaggtttattctgccagcg

SEQ ID NO: 427529 - DNA, 25 bp, Homo sapien
gggctgtcacgtccagaagccacca

SEQ ID NO: 427530 - DNA, 25 bp, Homo sapien
catggctgggctgtcacgtccagaa

SEQ ID NO: 427531 - DNA, 25 bp, Homo sapien
aggccaccgtcggaagccggcaggc

SEQ ID NO: 427532 - DNA, 25 bp, Homo sapien
aggcaggccaccgtcggaagccggc

SEQ ID NO: 427533 - DNA, 25 bp, Homo sapien
actggagtatggcagccaggcgatt

SEQ ID NO: 427534 - DNA, 25 bp, Homo sapien
aggtctcaccctcatcacctgggga

SEQ ID NO: 427535 - DNA, 25 bp, Homo sapien
agacacctccatgaactgaggccgg

SEQ ID NO: 427536 - DNA, 25 bp, Homo sapien
taaagggcagcttgctgagactgga

SEQ ID NO: 427537 - DNA, 25 bp, Homo sapien
tactgggcagctgccgctgcttggc

SEQ ID NO: 427538 - DNA, 25 bp, Homo sapien
tcagttcaccagaaggttcctccac

SEQ ID NO: 427539 - DNA, 25 bp, Homo sapien
agaaggttcctccactggggctgtg

SEQ ID NO: 427540 - DNA, 25 bp, Homo sapien
tgctgctgccacacgcacactccca

SEQ ID NO: 427541 - DNA, 25 bp, Homo sapien
tcatgtgtgtggaacgtgctgcctc

SEQ ID NO: 427542 - DNA, 25 bp, Homo sapien
tagctgcttcttggttagcacccgg

SEQ ID NO: 427543 - DNA, 25 bp, Homo sapien
gtaatcaatgtggtgggccagtgcc

SEQ ID NO: 427544 - DNA, 25 bp, Homo sapien
cccggccagcgcaatgtaatcaatg

SEQ ID NO: 427545 - DNA, 25 bp, Homo sapien
cagttgtaattcctaccaaagccat

SEQ ID NO: 427546 - DNA, 25 bp, Homo sapien
cttttgactgccaagctcttttaaa

SEQ ID NO: 427547 - DNA, 25 bp, Homo sapien
tcccagttgtaattcctaccaaagc

SEQ ID NO: 427548 - DNA, 25 bp, Homo sapien
tgactgccaagctcttttaaaaacc

SEQ ID NO: 427549 - DNA, 25 bp, Homo sapien
actttgcctctgctgctggctgggc

SEQ ID NO: 427550 - DNA, 25 bp, Homo sapien
ctttgcctctgctgctggctgggct

SEQ ID NO: 427551 - DNA, 25 bp, Homo sapien
tactttgcctctgctgctggctggg

SEQ ID NO: 427552 - DNA, 25 bp, Homo sapien
tttactttgcctctgctgctggctg

SEQ ID NO: 427553 - DNA, 25 bp, Homo sapien
aatggtcctgtgtaggcagagacgc

SEQ ID NO: 427554 - DNA, 25 bp, Homo sapien
tctagccctgctggcagacctgtga

SEQ ID NO: 427555 - DNA, 25 bp, Homo sapien
tcctgaattgggttcagatgtcccc

SEQ ID NO: 427556 - DNA, 25 bp, Homo sapien
tgttgccctggatctcaccccgggt

SEQ ID NO: 427557 - DNA, 25 bp, Homo sapien
agagatagaggccagtgacagcagc

SEQ ID NO: 427558 - DNA, 25 bp, Homo sapien
gaatttccagtgaggtccacgctcg

SEQ ID NO: 427559 - DNA, 25 bp, Homo sapien
tgatagagaaagacggtgttgcacc

SEQ ID NO: 427560 - DNA, 25 bp, Homo sapien
tgcacatagtgcgactgttccgaag

SEQ ID NO: 427561 - DNA, 25 bp, Homo sapien
gggatgggcgtcccggtcacacgga

SEQ ID NO: 427562 - DNA, 25 bp, Homo sapien
gggcacgggccctctggcagggatg

SEQ ID NO: 427563 - DNA, 25 bp, Homo sapien
acacgggcacgggccctctggcagg

SEQ ID NO: 427564 - DNA, 25 bp, Homo sapien
atgggcgtcccggtcacacggagat

SEQ ID NO: 427565 - DNA, 25 bp, Homo sapien
tgtaaacagacaagtgcacaagcgc

SEQ ID NO: 427566 - DNA, 25 bp, Homo sapien
caaggccctgcagcacacggcagag

SEQ ID NO: 427567 - DNA, 25 bp, Homo sapien
cacggccggctctgcttgtaaacag

SEQ ID NO: 427568 - DNA, 25 bp, Homo sapien
cgagccgcccatacacgtggagatg

SEQ ID NO: 427569 - DNA, 25 bp, Homo sapien
ggcagttctgaagcacacacagatc

SEQ ID NO: 427570 - DNA, 25 bp, Homo sapien
ctgttcctgaaaggctggcaaagcc

SEQ ID NO: 427571 - DNA, 25 bp, Homo sapien
ttatccaaagcaagccgtgatgccg

SEQ ID NO: 427572 - DNA, 25 bp, Homo sapien
gatcgtagtcatggcggcagttctg

SEQ ID NO: 427573 - DNA, 25 bp, Homo sapien
cagaggcaggtgctgttgaaggctg

SEQ ID NO: 427574 - DNA, 25 bp, Homo sapien
caggtgctgttgaaggctgtgaaac

SEQ ID NO: 427575 - DNA, 25 bp, Homo sapien
ctgcggaagtcacagtgcagaggca

SEQ ID NO: 427576 - DNA, 25 bp, Homo sapien
aggcaggtgctgttgaaggctgtga

SEQ ID NO: 427577 - DNA, 25 bp, Homo sapien
acagcaacttgggtgcttctcagtg

SEQ ID NO: 427578 - DNA, 25 bp, Homo sapien
tggccccaccggctaacgcttttgc

SEQ ID NO: 427579 - DNA, 25 bp, Homo sapien
taacgcttttgccattgcccgtgag

SEQ ID NO: 427580 - DNA, 25 bp, Homo sapien
ctgccagtgctggcgagtgccactg

SEQ ID NO: 427581 - DNA, 25 bp, Homo sapien
ttctcacttgtgtagcctacagcca

SEQ ID NO: 427582 - DNA, 25 bp, Homo sapien
ccacttctcacttgtgtagcctaca

SEQ ID NO: 427583 - DNA, 25 bp, Homo sapien
ctcacttgtgtagcctacagccaga

SEQ ID NO: 427584 - DNA, 25 bp, Homo sapien
acttctcacttgtgtagcctacagc

SEQ ID NO: 427585 - DNA, 25 bp, Homo sapien
ctgcaggtgacacgggctccttcag

SEQ ID NO: 427586 - DNA, 25 bp, Homo sapien
ggactgcaggtgacacgggctcctt

SEQ ID NO: 427587 - DNA, 25 bp, Homo sapien
tgggactgcaggtgacacgggctcc

SEQ ID NO: 427588 - DNA, 25 bp, Homo sapien
aggtgacacgggctccttcagagct

SEQ ID NO: 427589 - DNA, 25 bp, Homo sapien
tgaccatgaggcgacgtagcgtctg

SEQ ID NO: 427590 - DNA, 25 bp, Homo sapien
ctcgggtgtcaacagacaactggtg

SEQ ID NO: 427591 - DNA, 25 bp, Homo sapien
gcaatcggcaaaggacagctcgggt

SEQ ID NO: 427592 - DNA, 25 bp, Homo sapien
tttcttcacccttcagcaatcggca

SEQ ID NO: 427593 - DNA, 25 bp, Homo sapien
tcatgaagttttcgggaagttactc

SEQ ID NO: 427594 - DNA, 25 bp, Homo sapien
ctttctaccaaggttatgaggctgg

SEQ ID NO: 427595 - DNA, 25 bp, Homo sapien
aaccctgatactggccatacgggag

SEQ ID NO: 427596 - DNA, 25 bp, Homo sapien
tactctctttctaccaaggttatga

SEQ ID NO: 427597 - DNA, 25 bp, Homo sapien
tcttcagcaattcgtaaacctacgc

SEQ ID NO: 427598 - DNA, 25 bp, Homo sapien
gggcctcttcagcaattcgtaaacc

SEQ ID NO: 427599 - DNA, 25 bp, Homo sapien
aattcgtaaacctacgctcctgagg

SEQ ID NO: 427600 - DNA, 25 bp, Homo sapien
tcagcaattcgtaaacctacgctcc

SEQ ID NO: 427601 - DNA, 25 bp, Homo sapien
ctttgccacctccagtggcttctgt

SEQ ID NO: 427602 - DNA, 25 bp, Homo sapien
tgcctttgccacctccagtggcttc

SEQ ID NO: 427603 - DNA, 25 bp, Homo sapien
tccatgcctttgccacctccagtgg

SEQ ID NO: 427604 - DNA, 25 bp, Homo sapien
tgccacctccagtggcttctgtcat

SEQ ID NO: 427605 - DNA, 25 bp, Homo sapien
caatctcgtgggaaggtgatcactc

SEQ ID NO: 427606 - DNA, 25 bp, Homo sapien
gatcactcttcaaggataggccaga

SEQ ID NO: 427607 - DNA, 25 bp, Homo sapien
gaatgccagcctcttcaggtcaaag

SEQ ID NO: 427608 - DNA, 25 bp, Homo sapien
tggttatcctgaagagctcgtcgtg

SEQ ID NO: 427609 - DNA, 25 bp, Homo sapien
ggatcctgtgaaaacccacgtcaga

SEQ ID NO: 427610 - DNA, 25 bp, Homo sapien
tggactgtggcgagcagatgcctcc

SEQ ID NO: 427611 - DNA, 25 bp, Homo sapien
tcaagtcactcgtgtgaccacgcgg

SEQ ID NO: 427612 - DNA, 25 bp, Homo sapien
gggatcatgcaaccccttgaagggc

SEQ ID NO: 427613 - DNA, 25 bp, Homo sapien
ctaggagctgaagcgcttcgtcttt

SEQ ID NO: 427614 - DNA, 25 bp, Homo sapien
gctgaagcgcttcgtctttccccag

SEQ ID NO: 427615 - DNA, 25 bp, Homo sapien
aagcgcttcgtctttccccagagga

SEQ ID NO: 427616 - DNA, 25 bp, Homo sapien
gcgcttcgtctttccccagaggatt

SEQ ID NO: 427617 - DNA, 25 bp, Homo sapien
gcccacgacatggtcaaatgcaaac

SEQ ID NO: 427618 - DNA, 25 bp, Homo sapien
tctcctgcccacgacatggtcaaat

SEQ ID NO: 427619 - DNA, 25 bp, Homo sapien
tgcccacgacatggtcaaatgcaaa

SEQ ID NO: 427620 - DNA, 25 bp, Homo sapien
tcctgcccacgacatggtcaaatgc

SEQ ID NO: 427621 - DNA, 25 bp, Homo sapien
tccttcccaggtggacggcggctct

SEQ ID NO: 427622 - DNA, 25 bp, Homo sapien
agcaccactgtctgcgccctccttc

SEQ ID NO: 427623 - DNA, 25 bp, Homo sapien
catctctgctcaattgtgcagggct

SEQ ID NO: 427624 - DNA, 25 bp, Homo sapien
ctcaattgtgcagggctgcgtcccc

SEQ ID NO: 427625 - DNA, 25 bp, Homo sapien
tgctgctttgcgaagctgtgtgcat

SEQ ID NO: 427626 - DNA, 25 bp, Homo sapien
gctttgcgaagctgtgtgcatgtct

SEQ ID NO: 427627 - DNA, 25 bp, Homo sapien
actttgtgagttcccgaaggcctct

SEQ ID NO: 427628 - DNA, 25 bp, Homo sapien
ctctccacgtcttgagtcatggctg

SEQ ID NO: 427629 - DNA, 25 bp, Homo sapien
ctgtgatgcgtcgcagcggaagggt

SEQ ID NO: 427630 - DNA, 25 bp, Homo sapien
tgatgcgtcgcagcggaagggtagg

SEQ ID NO: 427631 - DNA, 25 bp, Homo sapien
tgcgtcgcagcggaagggtaggggg

SEQ ID NO: 427632 - DNA, 25 bp, Homo sapien
tgtgatgcgtcgcagcggaagggta

SEQ ID NO: 427633 - DNA, 25 bp, Homo sapien
caggttagctcccatccaccctccc

SEQ ID NO: 427634 - DNA, 25 bp, Homo sapien
cccaggttagctcccatccaccctc

SEQ ID NO: 427635 - DNA, 25 bp, Homo sapien
tttcctcaccgaaggaaggggcaga

SEQ ID NO: 427636 - DNA, 25 bp, Homo sapien
ttcccaggttagctcccatccaccc

SEQ ID NO: 427637 - DNA, 25 bp, Homo sapien
cgagtgtctcatagaggctcctggt

SEQ ID NO: 427638 - DNA, 25 bp, Homo sapien
taggagatgaaccttgggaggccat

SEQ ID NO: 427639 - DNA, 25 bp, Homo sapien
cggagcctcggcgtcaaaatgacaa

SEQ ID NO: 427640 - DNA, 25 bp, Homo sapien
tctgcccagcggagttaagtcaccg

SEQ ID NO: 427641 - DNA, 25 bp, Homo sapien
cagtgtgaccgtgccttctagagag

SEQ ID NO: 427642 - DNA, 25 bp, Homo sapien
ggtgtgctttaaggatccaagataa

SEQ ID NO: 427643 - DNA, 25 bp, Homo sapien
atcaccttcaaggtgtgctttaagg

SEQ ID NO: 427644 - DNA, 25 bp, Homo sapien
tgggtgcttcaacagatgcatggca

SEQ ID NO: 427645 - DNA, 25 bp, Homo sapien
gttctgggtaaccatcttcccatgg

SEQ ID NO: 427646 - DNA, 25 bp, Homo sapien
ttcccatggctccttggacaaccac

SEQ ID NO: 427647 - DNA, 25 bp, Homo sapien
cttcccatggctccttggacaacca

SEQ ID NO: 427648 - DNA, 25 bp, Homo sapien
aaggatcctccactagaaggatctc

SEQ ID NO: 427649 - DNA, 25 bp, Homo sapien
tcccctccaaactggaacatgcagg

SEQ ID NO: 427650 - DNA, 25 bp, Homo sapien
gaaggatctcactggacgagtcccc

SEQ ID NO: 427651 - DNA, 25 bp, Homo sapien
agtggactcccgctgatcagaagga

SEQ ID NO: 427652 - DNA, 25 bp, Homo sapien
caagagggtacaaccgaccagagcc

SEQ ID NO: 427653 - DNA, 25 bp, Homo sapien
agcaagagggtacaaccgaccagag

SEQ ID NO: 427654 - DNA, 25 bp, Homo sapien
tggcaaagcaagagggtacaaccga

SEQ ID NO: 427655 - DNA, 25 bp, Homo sapien
caaagcaagagggtacaaccgacca

SEQ ID NO: 427656 - DNA, 25 bp, Homo sapien
gggagccggcatcctttgctgactt

SEQ ID NO: 427657 - DNA, 25 bp, Homo sapien
agggagccggcatcctttgctgact

SEQ ID NO: 427658 - DNA, 25 bp, Homo sapien
ggctgggcaggtggctgctcagagc

SEQ ID NO: 427659 - DNA, 25 bp, Homo sapien
aaggggccgtgggaaggctgggcag

SEQ ID NO: 427660 - DNA, 25 bp, Homo sapien
tgggcaggtggctgctcagagcccc

SEQ ID NO: 427661 - DNA, 25 bp, Homo sapien
ggcaggtggctgctcagagccccac

SEQ ID NO: 427662 - DNA, 25 bp, Homo sapien
acccacggggcctggaaattcactg

SEQ ID NO: 427663 - DNA, 25 bp, Homo sapien
tgccccgatttccacacaggtgcct

SEQ ID NO: 427664 - DNA, 25 bp, Homo sapien
gaaattcactgccccgatttccaca

SEQ ID NO: 427665 - DNA, 25 bp, Homo sapien
cccacggggcctggaaattcactgc

SEQ ID NO: 427666 - DNA, 25 bp, Homo sapien
tccaaattccaagggctcttgacag

SEQ ID NO: 427667 - DNA, 25 bp, Homo sapien
cagattcacagccatagggtgggcg

SEQ ID NO: 427668 - DNA, 25 bp, Homo sapien
gtctttggaggaggctctcctgctg

SEQ ID NO: 427669 - DNA, 25 bp, Homo sapien
cctgcaggtggctggttgcacctag

SEQ ID NO: 427670 - DNA, 25 bp, Homo sapien
tattccgcagtgaggagtcgctggc

SEQ ID NO: 427671 - DNA, 25 bp, Homo sapien
gctggtacgagacaggtgcttcagg

SEQ ID NO: 427672 - DNA, 25 bp, Homo sapien
ctcttcagagaggatgagcggccac

SEQ ID NO: 427673 - DNA, 25 bp, Homo sapien
ggcagcacgaggctggtacgagaca

SEQ ID NO: 427674 - DNA, 25 bp, Homo sapien
gctctccaaataggccagtgttcca

SEQ ID NO: 427675 - DNA, 25 bp, Homo sapien
tttcctagcagcgacaacccctccc

SEQ ID NO: 427676 - DNA, 25 bp, Homo sapien
cacatcctggctgggctaacaccac

SEQ ID NO: 427677 - DNA, 25 bp, Homo sapien
tggctgggctaacaccacctttccc

SEQ ID NO: 427678 - DNA, 25 bp, Homo sapien
ccaagtgatgacagcctcttcaact

SEQ ID NO: 427679 - DNA, 25 bp, Homo sapien
agcagcagttgaaccgtgctgtcac

SEQ ID NO: 427680 - DNA, 25 bp, Homo sapien
tcttcaactaggacagtgctgtagg

SEQ ID NO: 427681 - DNA, 25 bp, Homo sapien
cgtgctgtcacacttaacccaagtg

SEQ ID NO: 427682 - DNA, 25 bp, Homo sapien
ccctggccagagaccgagggtgact

SEQ ID NO: 427683 - DNA, 25 bp, Homo sapien
gttcccagcagctttattggcgttg

SEQ ID NO: 427684 - DNA, 25 bp, Homo sapien
accgagggtgactcggaggcttcca

SEQ ID NO: 427685 - DNA, 25 bp, Homo sapien
ataaggaggcgcatccgcagagtgc

SEQ ID NO: 427686 - DNA, 25 bp, Homo sapien
aggctggctggctgtgccccacaac

SEQ ID NO: 427687 - DNA, 25 bp, Homo sapien
gctggctggctgtgccccacaacat

SEQ ID NO: 427688 - DNA, 25 bp, Homo sapien
ctgcaagccagaggaggccggcggc

SEQ ID NO: 427689 - DNA, 25 bp, Homo sapien
cagaggaggccggcggccggcaggg

SEQ ID NO: 427690 - DNA, 25 bp, Homo sapien
catgattggaggcttctcgaggcct

SEQ ID NO: 427691 - DNA, 25 bp, Homo sapien
taccattaagagttgcagcatcacc

SEQ ID NO: 427692 - DNA, 25 bp, Homo sapien
aagacattctctgcacactgatcgg

SEQ ID NO: 427693 - DNA, 25 bp, Homo sapien
agccaaggagtgtcgattcaagtcc

SEQ ID NO: 427694 - DNA, 25 bp, Homo sapien
catgggtgggatcctgcagtctaga

SEQ ID NO: 427695 - DNA, 25 bp, Homo sapien
tagtggttggacaaagacgtcccga

SEQ ID NO: 427696 - DNA, 25 bp, Homo sapien
tccacgtgtgaaccagactgagctc

SEQ ID NO: 427697 - DNA, 25 bp, Homo sapien
tgtagcacagaaacacatcagcagg

SEQ ID NO: 427698 - DNA, 25 bp, Homo sapien
gcattaaatgtcagcacggtgccct

SEQ ID NO: 427699 - DNA, 25 bp, Homo sapien
cgtcagtgccgtgtgtgggacatct

SEQ ID NO: 427700 - DNA, 25 bp, Homo sapien
tctcatggagacgaaggacactgtg

SEQ ID NO: 427701 - DNA, 25 bp, Homo sapien
caattgaccagtgtgatgcggtgcg

SEQ ID NO: 427702 - DNA, 25 bp, Homo sapien
gaatccagccgaatacagataaggg

SEQ ID NO: 427703 - DNA, 25 bp, Homo sapien
gaagcaaaacgtaggcgtgcggata

SEQ ID NO: 427704 - DNA, 25 bp, Homo sapien
tgcggatattgatgccctccacctt

SEQ ID NO: 427705 - DNA, 25 bp, Homo sapien
tggaatgcacatctcactaaacggt

SEQ ID NO: 427706 - DNA, 25 bp, Homo sapien
tatacaatcttccatccgctgcaaa

SEQ ID NO: 427707 - DNA, 25 bp, Homo sapien
tcttccatccgctgcaaagagatgt

SEQ ID NO: 427708 - DNA, 25 bp, Homo sapien
aagagatgttcgttttttctcagcg

SEQ ID NO: 427709 - DNA, 25 bp, Homo sapien
gaatttgggacagcaagactataca

SEQ ID NO: 427710 - DNA, 25 bp, Homo sapien
tccttcgatacatcccgtgggagcg

SEQ ID NO: 427711 - DNA, 25 bp, Homo sapien
tgttgcctcagaagctcacgatgag

SEQ ID NO: 427712 - DNA, 25 bp, Homo sapien
tgttggcaatggaacagcgcatccc

SEQ ID NO: 427713 - DNA, 25 bp, Homo sapien
agacactgttttccgcgagccggag

SEQ ID NO: 427714 - DNA, 25 bp, Homo sapien
agctgcactgggtcaggagtttctg

SEQ ID NO: 427715 - DNA, 25 bp, Homo sapien
gcagctgcactgggtcaggagtttc

SEQ ID NO: 427716 - DNA, 25 bp, Homo sapien
cagctgcactgggtcaggagtttct

SEQ ID NO: 427717 - DNA, 25 bp, Homo sapien
agcagctgcactgggtcaggagttt

SEQ ID NO: 427718 - DNA, 25 bp, Homo sapien
gttctggttgccaggtctgttttgc

SEQ ID NO: 427719 - DNA, 25 bp, Homo sapien
ttctgattctgtaggcctgttctgg

SEQ ID NO: 427720 - DNA, 25 bp, Homo sapien
ctgtggacactgagacacgccccag

SEQ ID NO: 427721 - DNA, 25 bp, Homo sapien
ggtgcaaggcgtagggtgcgcgctc

SEQ ID NO: 427722 - DNA, 25 bp, Homo sapien
gaagtgtcccagcttggaagtggat

SEQ ID NO: 427723 - DNA, 25 bp, Homo sapien
ctgatgcccgtgaggagacataatg

SEQ ID NO: 427724 - DNA, 25 bp, Homo sapien
gagacataatggaagcaagagtgtg

SEQ ID NO: 427725 - DNA, 25 bp, Homo sapien
gccctaattgtttcagggaagtgtc

SEQ ID NO: 427726 - DNA, 25 bp, Homo sapien
tggtggagaaagtggagaaggcagc

SEQ ID NO: 427727 - DNA, 25 bp, Homo sapien
ctggtggagaaagtggagaaggcag

SEQ ID NO: 427728 - DNA, 25 bp, Homo sapien
ggctcacagttaagcccctttcaac

SEQ ID NO: 427729 - DNA, 25 bp, Homo sapien
cctttcaaccttcgcactgtcgtgg

SEQ ID NO: 427730 - DNA, 25 bp, Homo sapien
ttcgcactgtcgtggttgtcaggac

SEQ ID NO: 427731 - DNA, 25 bp, Homo sapien
tggttgtcaggactgccaagccgcc

SEQ ID NO: 427732 - DNA, 25 bp, Homo sapien
ggctgcccatagacccctgtaaaca

SEQ ID NO: 427733 - DNA, 25 bp, Homo sapien
gcccatagacccctgtaaacagctg

SEQ ID NO: 427734 - DNA, 25 bp, Homo sapien
catagacccctgtaaacagctgatg

SEQ ID NO: 427735 - DNA, 25 bp, Homo sapien
gctgcccatagacccctgtaaacag

SEQ ID NO: 427736 - DNA, 25 bp, Homo sapien
actcgcagagttccccgtgcgtggc

SEQ ID NO: 427737 - DNA, 25 bp, Homo sapien
aggaagcggctgtagcaggactcgc

SEQ ID NO: 427738 - DNA, 25 bp, Homo sapien
agagttccccgtgcgtggccaccgg

SEQ ID NO: 427739 - DNA, 25 bp, Homo sapien
aggactcgcagagttccccgtgcgt

SEQ ID NO: 427740 - DNA, 25 bp, Homo sapien
tccaagcaagcacgggtggagctgt

SEQ ID NO: 427741 - DNA, 25 bp, Homo sapien
ctattccaagcaagcacgggtggag

SEQ ID NO: 427742 - DNA, 25 bp, Homo sapien
gcacgggtggagctgttagttggga

SEQ ID NO: 427743 - DNA, 25 bp, Homo sapien
tattccaagcaagcacgggtggagc

SEQ ID NO: 427744 - DNA, 25 bp, Homo sapien
cgaaattgtcacatttggccttcca

SEQ ID NO: 427745 - DNA, 25 bp, Homo sapien
aaattgtcacatttggccttccaca

SEQ ID NO: 427746 - DNA, 25 bp, Homo sapien
gaaattgtcacatttggccttccac

SEQ ID NO: 427747 - DNA, 25 bp, Homo sapien
aattgtcacatttggccttccacat

SEQ ID NO: 427748 - DNA, 25 bp, Homo sapien
tccgggctccatgtcactgagtgct

SEQ ID NO: 427749 - DNA, 25 bp, Homo sapien
ttatctaagagcaaatccgggctcc

SEQ ID NO: 427750 - DNA, 25 bp, Homo sapien
gcagaagaaacgcttccacagtcct

SEQ ID NO: 427751 - DNA, 25 bp, Homo sapien
gagtgcttactcatccccaggaaga

SEQ ID NO: 427752 - DNA, 25 bp, Homo sapien
ttctctcattccgtgggatttcttt

SEQ ID NO: 427753 - DNA, 25 bp, Homo sapien
tatattccggttattaatccctgtc

SEQ ID NO: 427754 - DNA, 25 bp, Homo sapien
tctctcattccgtgggatttctttt

SEQ ID NO: 427755 - DNA, 25 bp, Homo sapien
ctctcattccgtgggatttcttttc

SEQ ID NO: 427756 - DNA, 25 bp, Homo sapien
tacacagataccttggagccaaccc

SEQ ID NO: 427757 - DNA, 25 bp, Homo sapien
tgtccgatgcagattagatttacct

SEQ ID NO: 427758 - DNA, 25 bp, Homo sapien
tggtcaatcctcgtgtgtacataca

SEQ ID NO: 427759 - DNA, 25 bp, Homo sapien
gacaagcttgatctccagtattctg

SEQ ID NO: 427760 - DNA, 25 bp, Homo sapien
aaaatgtaattccaggtcccgctgc

SEQ ID NO: 427761 - DNA, 25 bp, Homo sapien
cccaatgtgtccaggacgtttctga

SEQ ID NO: 427762 - DNA, 25 bp, Homo sapien
actgtccacctcagtgacctcctct

SEQ ID NO: 427763 - DNA, 25 bp, Homo sapien
gtgtccaggacgtttctgaaactcc

SEQ ID NO: 427764 - DNA, 25 bp, Homo sapien
gtggtccacggatcgcacataagtg

SEQ ID NO: 427765 - DNA, 25 bp, Homo sapien
taagtggtccacagtcgacagaaac

SEQ ID NO: 427766 - DNA, 25 bp, Homo sapien
cgacagatcgcacgcaagtggtcca

SEQ ID NO: 427767 - DNA, 25 bp, Homo sapien
tttactacacagactcagtagcgga

SEQ ID NO: 427768 - DNA, 25 bp, Homo sapien
gaacctgggtgttgctaaactcctg

SEQ ID NO: 427769 - DNA, 25 bp, Homo sapien
catgtaaagagacttccgagaacgg

SEQ ID NO: 427770 - DNA, 25 bp, Homo sapien
gaaaatggccatagcttaacagcag

SEQ ID NO: 427771 - DNA, 25 bp, Homo sapien
ccccagggtaagtgatctaagacgg

SEQ ID NO: 427772 - DNA, 25 bp, Homo sapien
caacaaggtggatgagcctcacaga

SEQ ID NO: 427773 - DNA, 25 bp, Homo sapien
cacttctcggatgtacagtacgcac

SEQ ID NO: 427774 - DNA, 25 bp, Homo sapien
taagtgtcctgcttctcgtgggtag

SEQ ID NO: 427775 - DNA, 25 bp, Homo sapien
tgaacgtgctgtgggattttcacac

SEQ ID NO: 427776 - DNA, 25 bp, Homo sapien
caaagtccaaggaatgtcctaaaag

SEQ ID NO: 427777 - DNA, 25 bp, Homo sapien
taaattgaaggagtgagatcctccc

SEQ ID NO: 427778 - DNA, 25 bp, Homo sapien
tcaattaaagaggtagaacaaagtc

SEQ ID NO: 427779 - DNA, 25 bp, Homo sapien
aaacagggtggcgacatctcacaga

SEQ ID NO: 427780 - DNA, 25 bp, Homo sapien
agtgatgtacccagaagcctgccca

SEQ ID NO: 427781 - DNA, 25 bp, Homo sapien
cttgtacaggacagtggcccagcat

SEQ ID NO: 427782 - DNA, 25 bp, Homo sapien
gagccggcctgaacgaattaagtga

SEQ ID NO: 427783 - DNA, 25 bp, Homo sapien
catgaacctgttcctgtgtggagac

SEQ ID NO: 427784 - DNA, 25 bp, Homo sapien
tcttgaagggacatgccaggatgca

SEQ ID NO: 427785 - DNA, 25 bp, Homo sapien
cacgcagcctccgacatgaaaagaa

SEQ ID NO: 427786 - DNA, 25 bp, Homo sapien
gaaattcagcaacatccctgtggct

SEQ ID NO: 427787 - DNA, 25 bp, Homo sapien
gcccacagatgctcctagaggaaga

SEQ ID NO: 427788 - DNA, 25 bp, Homo sapien
actgctgaagctggcgtctgcgccg

SEQ ID NO: 427789 - DNA, 25 bp, Homo sapien
gttgtcgaacgtggccttgtagaga

SEQ ID NO: 427790 - DNA, 25 bp, Homo sapien
tcaggtaggaggtcacgttgtcgaa

SEQ ID NO: 427791 - DNA, 25 bp, Homo sapien
atcttcttggcatgcccgtcgggcc

SEQ ID NO: 427792 - DNA, 25 bp, Homo sapien
gttcccacgaagaacaccagagact

SEQ ID NO: 427793 - DNA, 25 bp, Homo sapien
agactttctttaacacggtgctctc

SEQ ID NO: 427794 - DNA, 25 bp, Homo sapien
tctttaacacggtgctctcaggaac

SEQ ID NO: 427795 - DNA, 25 bp, Homo sapien
cacgaagaacaccagagactttctt

SEQ ID NO: 427796 - DNA, 25 bp, Homo sapien
tgctgtctgcgggcgtccagctgga

SEQ ID NO: 427797 - DNA, 25 bp, Homo sapien
gctggaagatgtagaccacaggagt

SEQ ID NO: 427798 - DNA, 25 bp, Homo sapien
agccacgtcccacacttggtgctgg

SEQ ID NO: 427799 - DNA, 25 bp, Homo sapien
agcccctgggtctcctcgaaagcca

SEQ ID NO: 427800 - DNA, 25 bp, Homo sapien
agagcatgattactaggactgcagg

SEQ ID NO: 427801 - DNA, 25 bp, Homo sapien
ccacgaagaaagagagcatgattac

SEQ ID NO: 427802 - DNA, 25 bp, Homo sapien
cttgccacgaagaaagagagcatga

SEQ ID NO: 427803 - DNA, 25 bp, Homo sapien
gaaagagagcatgattactaggact

SEQ ID NO: 427804 - DNA, 25 bp, Homo sapien
aggtctgcagaaccggaggccatag

SEQ ID NO: 427805 - DNA, 25 bp, Homo sapien
ctcttcattgaggacgtgggccagt

SEQ ID NO: 427806 - DNA, 25 bp, Homo sapien
tctcagagggaggtgctagaccaat

SEQ ID NO: 427807 - DNA, 25 bp, Homo sapien
gcagcagcagtcatcaaaagtgaca

SEQ ID NO: 427808 - DNA, 25 bp, Homo sapien
cgtcgcacaggagcgccacgcagtt

SEQ ID NO: 427809 - DNA, 25 bp, Homo sapien
ggagcgccacgcagttctcctggca

SEQ ID NO: 427810 - DNA, 25 bp, Homo sapien
aatgcaatcctggacgcggcaaact

SEQ ID NO: 427811 - DNA, 25 bp, Homo sapien
ttctcctggcaccagaatgcaatcc

SEQ ID NO: 427812 - DNA, 25 bp, Homo sapien
tgcagactggccaggtgacagcagt

SEQ ID NO: 427813 - DNA, 25 bp, Homo sapien
ctcctgcagactggccaggtgacag

SEQ ID NO: 427814 - DNA, 25 bp, Homo sapien
tgacagcagtgcagctggcggccgc

SEQ ID NO: 427815 - DNA, 25 bp, Homo sapien
ctggcggccgctcctgtactcccag

SEQ ID NO: 427816 - DNA, 25 bp, Homo sapien
aaacacacaggttagcacatggttg

SEQ ID NO: 427817 - DNA, 25 bp, Homo sapien
cttccgtcaggtagggtgacagaga

SEQ ID NO: 427818 - DNA, 25 bp, Homo sapien
gcacatggttgtggggcttccgtca

SEQ ID NO: 427819 - DNA, 25 bp, Homo sapien
gacagctgcgtgtggtcggggttcc

SEQ ID NO: 427820 - DNA, 25 bp, Homo sapien
taagagtggatgtatgaatgcacac

SEQ ID NO: 427821 - DNA, 25 bp, Homo sapien
ggcagataaacatggagaccaacac

SEQ ID NO: 427822 - DNA, 25 bp, Homo sapien
tctaatgagagagtgtctgtgcact

SEQ ID NO: 427823 - DNA, 25 bp, Homo sapien
taccccaaacagctaacagtagatg

SEQ ID NO: 427824 - DNA, 25 bp, Homo sapien
ggagattatggccacacttttcttc

SEQ ID NO: 427825 - DNA, 25 bp, Homo sapien
tctggagattatggccacacttttc

SEQ ID NO: 427826 - DNA, 25 bp, Homo sapien
ctggagattatggccacacttttct

SEQ ID NO: 427827 - DNA, 25 bp, Homo sapien
cctctggagattatggccacacttt

SEQ ID NO: 427828 - DNA, 25 bp, Homo sapien
tcaggtcgcgtggctgtgtgttaat

SEQ ID NO: 427829 - DNA, 25 bp, Homo sapien
ggctgtgtgttaatttgaagagcag

SEQ ID NO: 427830 - DNA, 25 bp, Homo sapien
caatcagagaagaaacatagaagcg

SEQ ID NO: 427831 - DNA, 25 bp, Homo sapien
catagaagcggccagaaggtccatc

SEQ ID NO: 427832 - DNA, 25 bp, Homo sapien
gaagaaacatagaagcggccagaag

SEQ ID NO: 427833 - DNA, 25 bp, Homo sapien
tagaagcggccagaaggtccatcag

SEQ ID NO: 427834 - DNA, 25 bp, Homo sapien
atcctgatccccgataccatcgtag

SEQ ID NO: 427835 - DNA, 25 bp, Homo sapien
gctagttcatcccacaggcgaacac

SEQ ID NO: 427836 - DNA, 25 bp, Homo sapien
gataccatcgtagatgcagcagccg

SEQ ID NO: 427837 - DNA, 25 bp, Homo sapien
gcagccgccctcagaagggagcctt

SEQ ID NO: 427838 - DNA, 25 bp, Homo sapien
caccacggagatacggctcacaaac

SEQ ID NO: 427839 - DNA, 25 bp, Homo sapien
gagttggcaccacggagatacggct

SEQ ID NO: 427840 - DNA, 25 bp, Homo sapien
cagcccgggctgagttggcaccacg

SEQ ID NO: 427841 - DNA, 25 bp, Homo sapien
ggctgagttggcaccacggagatac

SEQ ID NO: 427842 - DNA, 25 bp, Homo sapien
tgtgccccaagcagaaggactcgat

SEQ ID NO: 427843 - DNA, 25 bp, Homo sapien
gcccagctgactcggatcttctcgt

SEQ ID NO: 427844 - DNA, 25 bp, Homo sapien
caagcagaaggactcgatgctatgg

SEQ ID NO: 427845 - DNA, 25 bp, Homo sapien
tgaagcggtcatcaggactcacagc

SEQ ID NO: 427846 - DNA, 25 bp, Homo sapien
gctcacctgagtcttcccgaatcaa

SEQ ID NO: 427847 - DNA, 25 bp, Homo sapien
tgagtcttcccgaatcaagtccctc

SEQ ID NO: 427848 - DNA, 25 bp, Homo sapien
agaaaaagccgctcacctgagtctt

SEQ ID NO: 427849 - DNA, 25 bp, Homo sapien
cccgaatcaagtccctcatggaaga

SEQ ID NO: 427850 - DNA, 25 bp, Homo sapien
tagacgtctccagacttgtcggcca

SEQ ID NO: 427851 - DNA, 25 bp, Homo sapien
tctcctccgaggctatgaaagtcag

SEQ ID NO: 427852 - DNA, 25 bp, Homo sapien
cagcaccgaaaaggagtagacgtct

SEQ ID NO: 427853 - DNA, 25 bp, Homo sapien
gaaagtcagggctgtacacctcctt

SEQ ID NO: 427854 - DNA, 25 bp, Homo sapien
gtcgaaccaggagcctcagacagag

SEQ ID NO: 427855 - DNA, 25 bp, Homo sapien
cctgctgctcgttctgctgcgtcga

SEQ ID NO: 427856 - DNA, 25 bp, Homo sapien
cctcagacagagagccgtgccccat

SEQ ID NO: 427857 - DNA, 25 bp, Homo sapien
ttctgctgcgtcgaaccaggagcct

SEQ ID NO: 427858 - DNA, 25 bp, Homo sapien
cacactccactgttgtctaagtaac

SEQ ID NO: 427859 - DNA, 25 bp, Homo sapien
tctaagtaactggatcacgtctgag

SEQ ID NO: 427860 - DNA, 25 bp, Homo sapien
tgtacacatcggcacgtggatctca

SEQ ID NO: 427861 - DNA, 25 bp, Homo sapien
atagctgaacgggaacccacacact

SEQ ID NO: 427862 - DNA, 25 bp, Homo sapien
gttcctgctaatcacaaggacagag

SEQ ID NO: 427863 - DNA, 25 bp, Homo sapien
tgttcctgctaatcacaaggacaga

SEQ ID NO: 427864 - DNA, 25 bp, Homo sapien
ttaagaatccagcgttagcatctca

SEQ ID NO: 427865 - DNA, 25 bp, Homo sapien
aagaatccagcgttagcatctcata

SEQ ID NO: 427866 - DNA, 25 bp, Homo sapien
taagaatccagcgttagcatctcat

SEQ ID NO: 427867 - DNA, 25 bp, Homo sapien
agaatccagcgttagcatctcatac

SEQ ID NO: 427868 - DNA, 25 bp, Homo sapien
cattgccatggttttgtacggaaaa

SEQ ID NO: 427869 - DNA, 25 bp, Homo sapien
ttttgtacggaaaagaatcagacgc

SEQ ID NO: 427870 - DNA, 25 bp, Homo sapien
catggttttgtacggaaaagaatca

SEQ ID NO: 427871 - DNA, 25 bp, Homo sapien
tgccatggttttgtacggaaaagaa

SEQ ID NO: 427872 - DNA, 25 bp, Homo sapien
aggtggacgccagaatcgcaccgct

SEQ ID NO: 427873 - DNA, 25 bp, Homo sapien
ggagaaggtggacgccagaatcgca

SEQ ID NO: 427874 - DNA, 25 bp, Homo sapien
tcccctggtccaagggcgcgtcctc

SEQ ID NO: 427875 - DNA, 25 bp, Homo sapien
aatcgcaccgctcccctggtccaag

SEQ ID NO: 427876 - DNA, 25 bp, Homo sapien
gcactgcagtcatagatgaagaggc

SEQ ID NO: 427877 - DNA, 25 bp, Homo sapien
tgcagtcatagatgaagaggctgtc

SEQ ID NO: 427878 - DNA, 25 bp, Homo sapien
cactgcagtcatagatgaagaggct

SEQ ID NO: 427879 - DNA, 25 bp, Homo sapien
cagtcatagatgaagaggctgtcat

SEQ ID NO: 427880 - DNA, 25 bp, Homo sapien
taagtgtcggagatgacttggagcc

SEQ ID NO: 427881 - DNA, 25 bp, Homo sapien
ccaggtgagtggatgcaggccggga

SEQ ID NO: 427882 - DNA, 25 bp, Homo sapien
agatgacttggagccctaaggagca

SEQ ID NO: 427883 - DNA, 25 bp, Homo sapien
taaggagcaattaaggccaggtgag

SEQ ID NO: 427884 - DNA, 25 bp, Homo sapien
tgactggtcagcgtcgccccacgtg

SEQ ID NO: 427885 - DNA, 25 bp, Homo sapien
cagggagacccgagacccgcttctt

SEQ ID NO: 427886 - DNA, 25 bp, Homo sapien
gttctgcagagcgtgttcggccggg

SEQ ID NO: 427887 - DNA, 25 bp, Homo sapien
ccgggccttgctgactggtcagcgt

SEQ ID NO: 427888 - DNA, 25 bp, Homo sapien
actcgtgggctggagcggagttccc

SEQ ID NO: 427889 - DNA, 25 bp, Homo sapien
cggcggcgctaaccgggcaagaaca

SEQ ID NO: 427890 - DNA, 25 bp, Homo sapien
cagaccagccatctagtgcaaggag

SEQ ID NO: 427891 - DNA, 25 bp, Homo sapien
gcggacggcgaaagcggaccctcca

SEQ ID NO: 427892 - DNA, 25 bp, Homo sapien
cgcacaacgccagtcccacagagcc

SEQ ID NO: 427893 - DNA, 25 bp, Homo sapien
caggaatcggctgccgccccgcacc

SEQ ID NO: 427894 - DNA, 25 bp, Homo sapien
ccgcacaacgccagtcccacagagc

SEQ ID NO: 427895 - DNA, 25 bp, Homo sapien
ctatggaggtggccaggaatcggct

SEQ ID NO: 427896 - DNA, 25 bp, Homo sapien
gcgcagacgccgagagatgacgtat

SEQ ID NO: 427897 - DNA, 25 bp, Homo sapien
acgtaccgcgcatgctcaaggacga

SEQ ID NO: 427898 - DNA, 25 bp, Homo sapien
tgcgtgaaaggtgctgtgaccgccc

SEQ ID NO: 427899 - DNA, 25 bp, Homo sapien
tgtttcgggtttggcagttcactca

SEQ ID NO: 427900 - DNA, 25 bp, Homo sapien
aactggcaagacgacataagcattg

SEQ ID NO: 427901 - DNA, 25 bp, Homo sapien
tatgtggccataattcaaggattgc

SEQ ID NO: 427902 - DNA, 25 bp, Homo sapien
ggtggaccctaaatcgaatgttatg

SEQ ID NO: 427903 - DNA, 25 bp, Homo sapien
ctaaaatgtatgtccacccctggaa

SEQ ID NO: 427904 - DNA, 25 bp, Homo sapien
tgctaatctatgtttcacaccctaa

SEQ ID NO: 427905 - DNA, 25 bp, Homo sapien
tgagttctattttgaggtgacaggg

SEQ ID NO: 427906 - DNA, 25 bp, Homo sapien
taaaaacttgaaggccatgccctca

SEQ ID NO: 427907 - DNA, 25 bp, Homo sapien
tgacagggaagcaacaaggcgaatt

SEQ ID NO: 427908 - DNA, 25 bp, Homo sapien
catcctcagttggttgcttggtggg

SEQ ID NO: 427909 - DNA, 25 bp, Homo sapien
tacacagctagtcttaggtcggtag

SEQ ID NO: 427910 - DNA, 25 bp, Homo sapien
tcaggctgtgagataggcctacaca

SEQ ID NO: 427911 - DNA, 25 bp, Homo sapien
catatcatctaagtacatcctcctg

SEQ ID NO: 427912 - DNA, 25 bp, Homo sapien
ggacgcagggaatagaaggccacct

SEQ ID NO: 427913 - DNA, 25 bp, Homo sapien
caggcaatcgtggaagatcagatac

SEQ ID NO: 427914 - DNA, 25 bp, Homo sapien
tttccatgaaaagacagcagcgctg

SEQ ID NO: 427915 - DNA, 25 bp, Homo sapien
gatcagataccaccaagcaatttgg

SEQ ID NO: 427916 - DNA, 25 bp, Homo sapien
tgtgaagatgaaccttccaccgtct

SEQ ID NO: 427917 - DNA, 25 bp, Homo sapien
gagtcacctcgacactgagggccct

SEQ ID NO: 427918 - DNA, 25 bp, Homo sapien
tcaggccgggagtcacctcgacact

SEQ ID NO: 427919 - DNA, 25 bp, Homo sapien
cactgagggccctcggtgtgaagat

SEQ ID NO: 427920 - DNA, 25 bp, Homo sapien
acagcctcactcttgcccggaggag

SEQ ID NO: 427921 - DNA, 25 bp, Homo sapien
tctcaagctgggatccgtggaacta

SEQ ID NO: 427922 - DNA, 25 bp, Homo sapien
tagagacagggttcaagagatctgc

SEQ ID NO: 427923 - DNA, 25 bp, Homo sapien
ttcccagccattaacatcttacagg

SEQ ID NO: 427924 - DNA, 25 bp, Homo sapien
tcaatgatccgttgcagaggccact

SEQ ID NO: 427925 - DNA, 25 bp, Homo sapien
tgctatgtagtaccagggcgacctc

SEQ ID NO: 427926 - DNA, 25 bp, Homo sapien
tgacgggttttcacctacggcgcga

SEQ ID NO: 427927 - DNA, 25 bp, Homo sapien
tacacttaggcggaggtatgcggca

SEQ ID NO: 427928 - DNA, 25 bp, Homo sapien
caccgtccctcatactgggttggta

SEQ ID NO: 427929 - DNA, 25 bp, Homo sapien
gtccacttgcgggatatgcacaccg

SEQ ID NO: 427930 - DNA, 25 bp, Homo sapien
gcgggatatgcacaccgtccctcat

SEQ ID NO: 427931 - DNA, 25 bp, Homo sapien
ctcatactgggttggtaagtgtcca

SEQ ID NO: 427932 - DNA, 25 bp, Homo sapien
ttcatggtaagcacaatggttctcc

SEQ ID NO: 427933 - DNA, 25 bp, Homo sapien
gggaatgtctatcccgtcccacagc

SEQ ID NO: 427934 - DNA, 25 bp, Homo sapien
tacgactgccacatactcctagatt

SEQ ID NO: 427935 - DNA, 25 bp, Homo sapien
cccctctgtagtgcaaagactgata

SEQ ID NO: 427936 - DNA, 25 bp, Homo sapien
caggacagctactgacagtattagg

SEQ ID NO: 427937 - DNA, 25 bp, Homo sapien
gacttttggttggaagagaggtata

SEQ ID NO: 427938 - DNA, 25 bp, Homo sapien
tatagaaagtggttgggtagataca

SEQ ID NO: 427939 - DNA, 25 bp, Homo sapien
actgacagtattaggatcgtggtga

SEQ ID NO: 427940 - DNA, 25 bp, Homo sapien
cagtttggccgataaacacgtctgt

SEQ ID NO: 427941 - DNA, 25 bp, Homo sapien
tcctggaagcacgtggttagtcttc

SEQ ID NO: 427942 - DNA, 25 bp, Homo sapien
gagaaattggcccagacaaacactt

SEQ ID NO: 427943 - DNA, 25 bp, Homo sapien
ttggcccagacaaacacttagctgt

SEQ ID NO: 427944 - DNA, 25 bp, Homo sapien
cccaaggctcttgcattggttggaa

SEQ ID NO: 427945 - DNA, 25 bp, Homo sapien
aagcccctcgcaggtttcagggcca

SEQ ID NO: 427946 - DNA, 25 bp, Homo sapien
aggaattgtcccagcctgacgtgac

SEQ ID NO: 427947 - DNA, 25 bp, Homo sapien
actgctatgtagtacgcggacggcc

SEQ ID NO: 427948 - DNA, 25 bp, Homo sapien
gctggtctagaactcaggttatcca

SEQ ID NO: 427949 - DNA, 25 bp, Homo sapien
aggctggtctagaactcaggttatc

SEQ ID NO: 427950 - DNA, 25 bp, Homo sapien
taggctggtctagaactcaggttat

SEQ ID NO: 427951 - DNA, 25 bp, Homo sapien
tggtctagaactcaggttatccacc

SEQ ID NO: 427952 - DNA, 25 bp, Homo sapien
tgtagacaagggtttcactttgttg

SEQ ID NO: 427953 - DNA, 25 bp, Homo sapien
gccaccacaccactccctggctaat

SEQ ID NO: 427954 - DNA, 25 bp, Homo sapien
agccaccacaccactccctggctaa

SEQ ID NO: 427955 - DNA, 25 bp, Homo sapien
tgagccaccacaccactccctggct

SEQ ID NO: 427956 - DNA, 25 bp, Homo sapien
gcaccactgggtcgtctgttcccat

SEQ ID NO: 427957 - DNA, 25 bp, Homo sapien
gatccgcatggcaggatccttctgg

SEQ ID NO: 427958 - DNA, 25 bp, Homo sapien
cttcctgcaccactgggtcgtctgt

SEQ ID NO: 427959 - DNA, 25 bp, Homo sapien
agatccgcatggcaggatccttctg

SEQ ID NO: 427960 - DNA, 25 bp, Homo sapien
gactggtcattttctaggcgacgca

SEQ ID NO: 427961 - DNA, 25 bp, Homo sapien
taaatgtgccagtaccagagactcc

SEQ ID NO: 427962 - DNA, 25 bp, Homo sapien
gacagaagaaagatgggtccccaag

SEQ ID NO: 427963 - DNA, 25 bp, Homo sapien
cagccccgcctgtatgagtggaagc

SEQ ID NO: 427964 - DNA, 25 bp, Homo sapien
gccggagtaagggagaaattctaga

SEQ ID NO: 427965 - DNA, 25 bp, Homo sapien
ggacatatggaaagtcgctgctgcc

SEQ ID NO: 427966 - DNA, 25 bp, Homo sapien
ctgctgccggagtaagggagaaatt

SEQ ID NO: 427967 - DNA, 25 bp, Homo sapien
acatatggaaagtcgctgctgccgg

SEQ ID NO: 427968 - DNA, 25 bp, Homo sapien
tccaaaggcggaataggaatacgac

SEQ ID NO: 427969 - DNA, 25 bp, Homo sapien
gactcacagatgtgtggcccttgca

SEQ ID NO: 427970 - DNA, 25 bp, Homo sapien
gaatacgactaggaaacggcatgca

SEQ ID NO: 427971 - DNA, 25 bp, Homo sapien
aacagcgttaggctctgactcagag

SEQ ID NO: 427972 - DNA, 25 bp, Homo sapien
ggaagttcgcacaagacactggtca

SEQ ID NO: 427973 - DNA, 25 bp, Homo sapien
cctgctcgtgtgagtgtctgaatgc

SEQ ID NO: 427974 - DNA, 25 bp, Homo sapien
tcagagtggcctatgcacaaaaggt

SEQ ID NO: 427975 - DNA, 25 bp, Homo sapien
tcacaagatgagataggaagttcgc

SEQ ID NO: 427976 - DNA, 25 bp, Homo sapien
atgggaactgtccttagtctgagga

SEQ ID NO: 427977 - DNA, 25 bp, Homo sapien
cacttcactcgtatcatttatgagt

SEQ ID NO: 427978 - DNA, 25 bp, Homo sapien
catatagccttttctaatgaagaga

SEQ ID NO: 427979 - DNA, 25 bp, Homo sapien
caatgggaactgtccttagtctgag

SEQ ID NO: 427980 - DNA, 25 bp, Homo sapien
agggctggagctgacgtgagttttc

SEQ ID NO: 427981 - DNA, 25 bp, Homo sapien
aatagaccactagccttgaccaggg

SEQ ID NO: 427982 - DNA, 25 bp, Homo sapien
ggctggagctgacgtgagttttctt

SEQ ID NO: 427983 - DNA, 25 bp, Homo sapien
gtctttatattcagattttgcttaa

SEQ ID NO: 427984 - DNA, 25 bp, Homo sapien
ggggaccttggcagtggactttata

SEQ ID NO: 427985 - DNA, 25 bp, Homo sapien
ccaggcgggctcaagtttttcttct

SEQ ID NO: 427986 - DNA, 25 bp, Homo sapien
ccagataagctaaatgttatgttta

SEQ ID NO: 427987 - DNA, 25 bp, Homo sapien
caaataccattttacatttaacaat

SEQ ID NO: 427988 - DNA, 25 bp, Homo sapien
tcggactgttatagggttacggaga

SEQ ID NO: 427989 - DNA, 25 bp, Homo sapien
tatcggactgttatagggttacgga

SEQ ID NO: 427990 - DNA, 25 bp, Homo sapien
atcggactgttatagggttacggag

SEQ ID NO: 427991 - DNA, 25 bp, Homo sapien
taagaatcgagactggcaagtctga

SEQ ID NO: 427992 - DNA, 25 bp, Homo sapien
atttattttaagaatcgagactggc

SEQ ID NO: 427993 - DNA, 25 bp, Homo sapien
gcggtgcggcgtgagtcccaattca

SEQ ID NO: 427994 - DNA, 25 bp, Homo sapien
ttttaagaatcgagactggcaagtc

SEQ ID NO: 427995 - DNA, 25 bp, Homo sapien
ggctcaggtgcagccgttgtccatc

SEQ ID NO: 427996 - DNA, 25 bp, Homo sapien
ctggctcaggtgcagccgttgtcca

SEQ ID NO: 427997 - DNA, 25 bp, Homo sapien
ctcaggtgcagccgttgtccatcag

SEQ ID NO: 427998 - DNA, 25 bp, Homo sapien
tggctcaggtgcagccgttgtccat

SEQ ID NO: 427999 - DNA, 25 bp, Homo sapien
ccctgttgagctggggctcatcata

SEQ ID NO: 428000 - DNA, 25 bp, Homo sapien
cctgttgagctggggctcatcatat

SEQ ID NO: 428001 - DNA, 25 bp, Homo sapien
gccctgttgagctggggctcatcat

SEQ ID NO: 428002 - DNA, 25 bp, Homo sapien
tgttgagctggggctcatcatattt

SEQ ID NO: 428003 - DNA, 25 bp, Homo sapien
tgtggtcaagcgaggccaagtagcc

SEQ ID NO: 428004 - DNA, 25 bp, Homo sapien
aaggcaggtgccctttacctggagg

SEQ ID NO: 428005 - DNA, 25 bp, Homo sapien
aaatgcagacacttgtgggcgtccc

SEQ ID NO: 428006 - DNA, 25 bp, Homo sapien
tggaggccgcattggtcacctagac

SEQ ID NO: 428007 - DNA, 25 bp, Homo sapien
tatgtcatcctcgtggctctcgaaa

SEQ ID NO: 428008 - DNA, 25 bp, Homo sapien
tatttggacagtggctctgcgacgg

SEQ ID NO: 428009 - DNA, 25 bp, Homo sapien
gaagagccgcttctgtcacacgggt

SEQ ID NO: 428010 - DNA, 25 bp, Homo sapien
tctgcgacgggaccagttagggcct

SEQ ID NO: 428011 - DNA, 25 bp, Homo sapien
ctttgtagaatctccctcatccctt

SEQ ID NO: 428012 - DNA, 25 bp, Homo sapien
tctttgtagaatctccctcatccct

SEQ ID NO: 428013 - DNA, 25 bp, Homo sapien
ttctttgtagaatctccctcatccc

SEQ ID NO: 428014 - DNA, 25 bp, Homo sapien
tgcaggcaccagagttgtacagatt

SEQ ID NO: 428015 - DNA, 25 bp, Homo sapien
tgtttcccattttgaataatgccgt

SEQ ID NO: 428016 - DNA, 25 bp, Homo sapien
tcacagctgagcgtctttcgtggtg

SEQ ID NO: 428017 - DNA, 25 bp, Homo sapien
tggtgcttgcctcatgggccagctg

SEQ ID NO: 428018 - DNA, 25 bp, Homo sapien
tcgggggctccctaatagcattggg

SEQ ID NO: 428019 - DNA, 25 bp, Homo sapien
tcctcacagcactggggggcttcct

SEQ ID NO: 428020 - DNA, 25 bp, Homo sapien
ttctttgatatcattgcgagcttcc

SEQ ID NO: 428021 - DNA, 25 bp, Homo sapien
gatatcattgcgagcttcctcacag

SEQ ID NO: 428022 - DNA, 25 bp, Homo sapien
ttttctgttaccagtggctcccatg

SEQ ID NO: 428023 - DNA, 25 bp, Homo sapien
ctcccatgccgtgttgcaagggtgt

SEQ ID NO: 428024 - DNA, 25 bp, Homo sapien
gttatccgttataccaggctgctgt

SEQ ID NO: 428025 - DNA, 25 bp, Homo sapien
catgggtggccgttatccgttatac

SEQ ID NO: 428026 - DNA, 25 bp, Homo sapien
aaggccatgccggccgtggtccagc

SEQ ID NO: 428027 - DNA, 25 bp, Homo sapien
caggtgctggttgcgttcctgctcc

SEQ ID NO: 428028 - DNA, 25 bp, Homo sapien
cagcaaggccatgccggccgtggtc

SEQ ID NO: 428029 - DNA, 25 bp, Homo sapien
gtgtttttccacacccatgctgcag

SEQ ID NO: 428030 - DNA, 25 bp, Homo sapien
cctggtgtcagtgttctcttgtacg

SEQ ID NO: 428031 - DNA, 25 bp, Homo sapien
ctacgtttgcgtttgtggctggtct

SEQ ID NO: 428032 - DNA, 25 bp, Homo sapien
ttgctttcgacttttcagagccctc

SEQ ID NO: 428033 - DNA, 25 bp, Homo sapien
tcacttgaccacgtgagatttggaa

SEQ ID NO: 428034 - DNA, 25 bp, Homo sapien
caccattgcgttcctcatttgtgaa

SEQ ID NO: 428035 - DNA, 25 bp, Homo sapien
agccaccattgcgttcctcatttgt

SEQ ID NO: 428036 - DNA, 25 bp, Homo sapien
ggactccttaaaataagcacccatg

SEQ ID NO: 428037 - DNA, 25 bp, Homo sapien
cccggccgagaatgacatcttaaag

SEQ ID NO: 428038 - DNA, 25 bp, Homo sapien
ttaaatgatcagattcggttccagt

SEQ ID NO: 428039 - DNA, 25 bp, Homo sapien
tgttgctgttattcctgccctgcac

SEQ ID NO: 428040 - DNA, 25 bp, Homo sapien
ttgagacccaaattgagcatgttgc

SEQ ID NO: 428041 - DNA, 25 bp, Homo sapien
tgttgagtttttccctatgaaggct

SEQ ID NO: 428042 - DNA, 25 bp, Homo sapien
cctcacggctaagggctctgggagt

SEQ ID NO: 428043 - DNA, 25 bp, Homo sapien
tgtgacctgagagtgatccatctcc

SEQ ID NO: 428044 - DNA, 25 bp, Homo sapien
tggaagtgtttatcgagcatgcaaa

SEQ ID NO: 428045 - DNA, 25 bp, Homo sapien
cccattcctggcacttagagacaga

SEQ ID NO: 428046 - DNA, 25 bp, Homo sapien
gccagggaatggcatgtacccattg

SEQ ID NO: 428047 - DNA, 25 bp, Homo sapien
atggcatgtacccattggcttctgt

SEQ ID NO: 428048 - DNA, 25 bp, Homo sapien
accaggggatgctgttgctcccagc

SEQ ID NO: 428049 - DNA, 25 bp, Homo sapien
atgcccacccagactagtgactggc

SEQ ID NO: 428050 - DNA, 25 bp, Homo sapien
tagggcctggtagctttgaaggacc

SEQ ID NO: 428051 - DNA, 25 bp, Homo sapien
ggagtggcgctcacctataaactta

SEQ ID NO: 428052 - DNA, 25 bp, Homo sapien
catatgtccagaaacttgcttgtgc

SEQ ID NO: 428053 - DNA, 25 bp, Homo sapien
agggtctccgtctgccagtcaggct

SEQ ID NO: 428054 - DNA, 25 bp, Homo sapien
ttattcctagcctagtcatgttatg

SEQ ID NO: 428055 - DNA, 25 bp, Homo sapien
cacgattatgatgaagcaactatta

SEQ ID NO: 428056 - DNA, 25 bp, Homo sapien
ttgagaatagattaatatccagtgt

SEQ ID NO: 428057 - DNA, 25 bp, Homo sapien
tcttacagagctccaatattttctc

SEQ ID NO: 428058 - DNA, 25 bp, Homo sapien
tgtgttcatcctacctggccgactt

SEQ ID NO: 428059 - DNA, 25 bp, Homo sapien
gacacaaagtcgatcagcagttgcc

SEQ ID NO: 428060 - DNA, 25 bp, Homo sapien
cagaggtggtgcctacacaactttc

SEQ ID NO: 428061 - DNA, 25 bp, Homo sapien
tgttccagaacgtgacagaggtggt

SEQ ID NO: 428062 - DNA, 25 bp, Homo sapien
taaacagggccatttaggaagccat

SEQ ID NO: 428063 - DNA, 25 bp, Homo sapien
agaggaagttacattagagaaaatc

SEQ ID NO: 428064 - DNA, 25 bp, Homo sapien
caatcacgcgtgtgtttagggctca

SEQ ID NO: 428065 - DNA, 25 bp, Homo sapien
tttcatctcataggccgtaaacagg

SEQ ID NO: 428066 - DNA, 25 bp, Homo sapien
ttcagcaagtcaatggcggtgacca

SEQ ID NO: 428067 - DNA, 25 bp, Homo sapien
gctgactggacttcccggtgctgtg

SEQ ID NO: 428068 - DNA, 25 bp, Homo sapien
cgaacaccatctgccgctgactgga

SEQ ID NO: 428069 - DNA, 25 bp, Homo sapien
tgggcggccacgaagttcagcaagt

SEQ ID NO: 428070 - DNA, 25 bp, Homo sapien
ttaagcccggaagtctgggaccagc

SEQ ID NO: 428071 - DNA, 25 bp, Homo sapien
cattggtcacacgtcgttctgggca

SEQ ID NO: 428072 - DNA, 25 bp, Homo sapien
ggattccggattagcacaagagtca

SEQ ID NO: 428073 - DNA, 25 bp, Homo sapien
cgtagacccggtgttaatgctggcc

SEQ ID NO: 428074 - DNA, 25 bp, Homo sapien
tctctgttatgagcacgcagccctg

SEQ ID NO: 428075 - DNA, 25 bp, Homo sapien
actttccgacaagggccagctggtg

SEQ ID NO: 428076 - DNA, 25 bp, Homo sapien
gcagccctgacgtgcttgaaagcag

SEQ ID NO: 428077 - DNA, 25 bp, Homo sapien
cagagtcaatggactagggccagcc

SEQ ID NO: 428078 - DNA, 25 bp, Homo sapien
cattctgaggggtgggtgataccta

SEQ ID NO: 428079 - DNA, 25 bp, Homo sapien
acaagtaaatgtgagattaagaggg

SEQ ID NO: 428080 - DNA, 25 bp, Homo sapien
ctggaaggcctccatttgccatggg

SEQ ID NO: 428081 - DNA, 25 bp, Homo sapien
tgaatctgagcctgagagccattct

SEQ ID NO: 428082 - DNA, 25 bp, Homo sapien
gcaggcccccccaccacgcctgccc

SEQ ID NO: 428083 - DNA, 25 bp, Homo sapien
caccacgcctgcccaggcctggtcc

SEQ ID NO: 428084 - DNA, 25 bp, Homo sapien
cccccaccacgcctgcccaggcctg

SEQ ID NO: 428085 - DNA, 25 bp, Homo sapien
cacgcctgcccaggcctggtcctgc

SEQ ID NO: 428086 - DNA, 25 bp, Homo sapien
ctgcgagcgactctcctggcctgtg

SEQ ID NO: 428087 - DNA, 25 bp, Homo sapien
caaaacctgcgagcgactctcctgg

SEQ ID NO: 428088 - DNA, 25 bp, Homo sapien
ggctgccatctatgacccaaaacct

SEQ ID NO: 428089 - DNA, 25 bp, Homo sapien
tctatgacccaaaacctgcgagcga

SEQ ID NO: 428090 - DNA, 25 bp, Homo sapien
gagagcctgcccagcgtgtccgtga

SEQ ID NO: 428091 - DNA, 25 bp, Homo sapien
tggatctgctcgtgcaccaccaggg

SEQ ID NO: 428092 - DNA, 25 bp, Homo sapien
caccaccagggcgaagtggtccatc

SEQ ID NO: 428093 - DNA, 25 bp, Homo sapien
agagcctgcccagcgtgtccgtgag

SEQ ID NO: 428094 - DNA, 25 bp, Homo sapien
tggcagggggaacatggccccacga

SEQ ID NO: 428095 - DNA, 25 bp, Homo sapien
gcagggggaacatggccccacgagt

SEQ ID NO: 428096 - DNA, 25 bp, Homo sapien
cagggggaacatggccccacgagtt

SEQ ID NO: 428097 - DNA, 25 bp, Homo sapien
ggcagggggaacatggccccacgag

SEQ ID NO: 428098 - DNA, 25 bp, Homo sapien
gagccgcgtgtaggtgactgcgcac

SEQ ID NO: 428099 - DNA, 25 bp, Homo sapien
taggtgaccgcgcacctgtttgagc

SEQ ID NO: 428100 - DNA, 25 bp, Homo sapien
gtaggtgaccgcgcacctgtttgag

SEQ ID NO: 428101 - DNA, 25 bp, Homo sapien
aggtgaccgcgcacctgtttgagct

SEQ ID NO: 428102 - DNA, 25 bp, Homo sapien
tgtaggtgaccgcgcacctgtttga

SEQ ID NO: 428103 - DNA, 25 bp, Homo sapien
taggtgactgggcacccgtttgagc

SEQ ID NO: 428104 - DNA, 25 bp, Homo sapien
tgtaggtgactgggcacccgtttga

SEQ ID NO: 428105 - DNA, 25 bp, Homo sapien
cctgtaggtgactgggcacccgttt

SEQ ID NO: 428106 - DNA, 25 bp, Homo sapien
aggtgactgggcacccgtttgagct

SEQ ID NO: 428107 - DNA, 25 bp, Homo sapien
gaccgggcacccgtttgagctgcct

SEQ ID NO: 428108 - DNA, 25 bp, Homo sapien
taggtgactgggcacccgtttgagc

SEQ ID NO: 428109 - DNA, 25 bp, Homo sapien
gcacccgtttgagctgcctgtaggt

SEQ ID NO: 428110 - DNA, 25 bp, Homo sapien
ggcacccgtttgagctgcctgtagg

SEQ ID NO: 428111 - DNA, 25 bp, Homo sapien
gtttgagctgcctgtaggtgaccgc

SEQ ID NO: 428112 - DNA, 25 bp, Homo sapien
tttgagctgcctgtaggtgaccggg

SEQ ID NO: 428113 - DNA, 25 bp, Homo sapien
gtttgagctgcctgtaggtgaccgg

SEQ ID NO: 428114 - DNA, 25 bp, Homo sapien
tttgagctgcctgtaggtgactgcg

SEQ ID NO: 428115 - DNA, 25 bp, Homo sapien
taggtgaccgggcacctgtttgagc

SEQ ID NO: 428116 - DNA, 25 bp, Homo sapien
tctgtttgagctgcctgtaggtgac

SEQ ID NO: 428117 - DNA, 25 bp, Homo sapien
tgtttgagctgcgtgtaggtgaccg

SEQ ID NO: 428118 - DNA, 25 bp, Homo sapien
accttcccggcaagcagggacgaga

SEQ ID NO: 428119 - DNA, 25 bp, Homo sapien
gagcatgttcccaagcgtcaccatt

SEQ ID NO: 428120 - DNA, 25 bp, Homo sapien
gccaacttggtctgacggctgcacc

SEQ ID NO: 428121 - DNA, 25 bp, Homo sapien
caagcgtcaccattcccaggattac

SEQ ID NO: 428122 - DNA, 25 bp, Homo sapien
cccacaggtgatggtcgggagcacg

SEQ ID NO: 428123 - DNA, 25 bp, Homo sapien
gcccttctcccggaggatctcgatg

SEQ ID NO: 428124 - DNA, 25 bp, Homo sapien
ccagctcctgaacacggaggtgcca

SEQ ID NO: 428125 - DNA, 25 bp, Homo sapien
acgggcgcctggtcgaagcccttct

SEQ ID NO: 428126 - DNA, 25 bp, Homo sapien
gcatccacctgtcgctcaggaactt

SEQ ID NO: 428127 - DNA, 25 bp, Homo sapien
gcagcatccacctgtcgctcaggaa

SEQ ID NO: 428128 - DNA, 25 bp, Homo sapien
tgcagcatccacctgtcgctcagga

SEQ ID NO: 428129 - DNA, 25 bp, Homo sapien
ccacctgtcgctcaggaacttggtc

SEQ ID NO: 428130 - DNA, 25 bp, Homo sapien
tctcgggagctgtgtagccgctgca

SEQ ID NO: 428131 - DNA, 25 bp, Homo sapien
agctctcgggagctgtgtagccgct

SEQ ID NO: 428132 - DNA, 25 bp, Homo sapien
ctctcgggagctgtgtagccgctgc

SEQ ID NO: 428133 - DNA, 25 bp, Homo sapien
ctgagctctcgggagctgtgtagcc

SEQ ID NO: 428134 - DNA, 25 bp, Homo sapien
cagagagggagccaccgtctttcat

SEQ ID NO: 428135 - DNA, 25 bp, Homo sapien
tcagggctgtcactgcgagtgtgca

SEQ ID NO: 428136 - DNA, 25 bp, Homo sapien
gcagcactcggtcccaatctggagt

SEQ ID NO: 428137 - DNA, 25 bp, Homo sapien
gggcctctgggcaaaacagtcacag

SEQ ID NO: 428138 - DNA, 25 bp, Homo sapien
atgtagttccgcactgagtcgggca

SEQ ID NO: 428139 - DNA, 25 bp, Homo sapien
ggcagaatgaccacgcagcgctggc

SEQ ID NO: 428140 - DNA, 25 bp, Homo sapien
tccgcactgagtcgggcagaatgac

SEQ ID NO: 428141 - DNA, 25 bp, Homo sapien
ctgagtcgggcagaatgaccacgca

SEQ ID NO: 428142 - DNA, 25 bp, Homo sapien
tgtagaaacctcacatgtccctgcc

SEQ ID NO: 428143 - DNA, 25 bp, Homo sapien
tagatcaactgtggtccctacaggg

SEQ ID NO: 428144 - DNA, 25 bp, Homo sapien
tagaagctggtgtgtgctctccgag

SEQ ID NO: 428145 - DNA, 25 bp, Homo sapien
gagtccccagaggtctagatcaact

SEQ ID NO: 428146 - DNA, 25 bp, Homo sapien
cagtgacactcctcagaactgctgt

SEQ ID NO: 428147 - DNA, 25 bp, Homo sapien
tacacatgcaggtcggtggctgact

SEQ ID NO: 428148 - DNA, 25 bp, Homo sapien
gccatgggccccgtcaatgcagagc

SEQ ID NO: 428149 - DNA, 25 bp, Homo sapien
aataagtgccatgagagcttcagcc

SEQ ID NO: 428150 - DNA, 25 bp, Homo sapien
tcagcatgcgggcaaaggtgaacgc

SEQ ID NO: 428151 - DNA, 25 bp, Homo sapien
ggtgaacgcctcctcatcgttgctc

SEQ ID NO: 428152 - DNA, 25 bp, Homo sapien
catcgttgctcttgaaccacttgtc

SEQ ID NO: 428153 - DNA, 25 bp, Homo sapien
ccctcttgcgcgatcagcatgcggg

SEQ ID NO: 428154 - DNA, 25 bp, Homo sapien
tttcacacgttttccctgctccctg

SEQ ID NO: 428155 - DNA, 25 bp, Homo sapien
ccacaccggcccttcggtctctgct

SEQ ID NO: 428156 - DNA, 25 bp, Homo sapien
ttccaacacgttttgcagacagcaa

SEQ ID NO: 428157 - DNA, 25 bp, Homo sapien
tgcagactttccagttccaacacgt

SEQ ID NO: 428158 - DNA, 25 bp, Homo sapien
gaggatggacccttcgggatccacc

SEQ ID NO: 428159 - DNA, 25 bp, Homo sapien
taggttgtctgctccgtctggttca

SEQ ID NO: 428160 - DNA, 25 bp, Homo sapien
tcctgtccagcaccgtggggatgaa

SEQ ID NO: 428161 - DNA, 25 bp, Homo sapien
ggatgaagtcgtagccgatcccttc

SEQ ID NO: 428162 - DNA, 25 bp, Homo sapien
cccaggacagtccagacagaccacc

SEQ ID NO: 428163 - DNA, 25 bp, Homo sapien
ctccccggggtgcttctcggagcgg

SEQ ID NO: 428164 - DNA, 25 bp, Homo sapien
gggcccccaggacagtccagacaga

SEQ ID NO: 428165 - DNA, 25 bp, Homo sapien
ggtgcttctcggagcggggccccca

SEQ ID NO: 428166 - DNA, 25 bp, Homo sapien
gcaatgcccgtgatggtgccgcccg

SEQ ID NO: 428167 - DNA, 25 bp, Homo sapien
cttcctggcaatgcccgtgatggtg

SEQ ID NO: 428168 - DNA, 25 bp, Homo sapien
ctggcaatgcccgtgatggtgccgc

SEQ ID NO: 428169 - DNA, 25 bp, Homo sapien
atgcccgtgatggtgccgcccgtgc

SEQ ID NO: 428170 - DNA, 25 bp, Homo sapien
ctggtggacggataacattcttggg

SEQ ID NO: 428171 - DNA, 25 bp, Homo sapien
aaacttcttctccagttggagcagc

SEQ ID NO: 428172 - DNA, 25 bp, Homo sapien
tggccagcccatcactcatagtaat

SEQ ID NO: 428173 - DNA, 25 bp, Homo sapien
cactcagcccaaaccacggtgggta

SEQ ID NO: 428174 - DNA, 25 bp, Homo sapien
tgcaggatctcatcagcggtggtgt

SEQ ID NO: 428175 - DNA, 25 bp, Homo sapien
caggatctcatcagcggtggtgtcg

SEQ ID NO: 428176 - DNA, 25 bp, Homo sapien
atctcatcagcggtggtgtcgtagt

SEQ ID NO: 428177 - DNA, 25 bp, Homo sapien
ctcatcagcggtggtgtcgtagtga

SEQ ID NO: 428178 - DNA, 25 bp, Homo sapien
gactccggggagtcgaacctggcat

SEQ ID NO: 428179 - DNA, 25 bp, Homo sapien
gaattggggatttcgttcttcagcc

SEQ ID NO: 428180 - DNA, 25 bp, Homo sapien
aacctggcattggtgggcgtcctca

SEQ ID NO: 428181 - DNA, 25 bp, Homo sapien
atttcgttcttcagccgccaggcca

SEQ ID NO: 428182 - DNA, 25 bp, Homo sapien
agcccccagtgcccgcagcacgtcc

SEQ ID NO: 428183 - DNA, 25 bp, Homo sapien
tcagcccccagtgcccgcagcacgt

SEQ ID NO: 428184 - DNA, 25 bp, Homo sapien
ctcagcccccagtgcccgcagcacg

SEQ ID NO: 428185 - DNA, 25 bp, Homo sapien
cccccagtgcccgcagcacgtccac

SEQ ID NO: 428186 - DNA, 25 bp, Homo sapien
gatgatgcagcgatagcccctcact

SEQ ID NO: 428187 - DNA, 25 bp, Homo sapien
ggcatcacgatgatgcagcgatagc

SEQ ID NO: 428188 - DNA, 25 bp, Homo sapien
atgatgcagcgatagcccctcactg

SEQ ID NO: 428189 - DNA, 25 bp, Homo sapien
tcacgatgatgcagcgatagcccct

SEQ ID NO: 428190 - DNA, 25 bp, Homo sapien
cgcgttgaagaactcacacttggcc

SEQ ID NO: 428191 - DNA, 25 bp, Homo sapien
cggtgttcccggatgtcggctcgat

SEQ ID NO: 428192 - DNA, 25 bp, Homo sapien
tcaatcatccgcaggctgatgcggt

SEQ ID NO: 428193 - DNA, 25 bp, Homo sapien
cgataatcgtgtccccgggcttcag

SEQ ID NO: 428194 - DNA, 25 bp, Homo sapien
cagggctctgcgctcttggtgaaga

SEQ ID NO: 428195 - DNA, 25 bp, Homo sapien
gagcctggaaactgcgtcctgcaaa

SEQ ID NO: 428196 - DNA, 25 bp, Homo sapien
tgaagagcgacccttaggaattccc

SEQ ID NO: 428197 - DNA, 25 bp, Homo sapien
tgacgatgctgaggtctaccagggc

SEQ ID NO: 428198 - DNA, 25 bp, Homo sapien
tggccactcattaaccagcgagttt

SEQ ID NO: 428199 - DNA, 25 bp, Homo sapien
caaaggtcacctgttcgttccctgg

SEQ ID NO: 428200 - DNA, 25 bp, Homo sapien
cagcgagttttctgatcccagggcc

SEQ ID NO: 428201 - DNA, 25 bp, Homo sapien
taagctgatatgttcttggccactc

SEQ ID NO: 428202 - DNA, 25 bp, Homo sapien
ggtgtccccgattttcttcagaata

SEQ ID NO: 428203 - DNA, 25 bp, Homo sapien
ttgattctgaccataggggtgtccc

SEQ ID NO: 428204 - DNA, 25 bp, Homo sapien
ttgttgattctgaccataggggtgt

SEQ ID NO: 428205 - DNA, 25 bp, Homo sapien
gattctgaccataggggtgtccccg

SEQ ID NO: 428206 - DNA, 25 bp, Homo sapien
caggtgcacctgctcggagcatcgg

SEQ ID NO: 428207 - DNA, 25 bp, Homo sapien
cagtgtggtgatgtggggactcgga

SEQ ID NO: 428208 - DNA, 25 bp, Homo sapien
tgctcggagcatcgggccggatcca

SEQ ID NO: 428209 - DNA, 25 bp, Homo sapien
aggctccccttcgccgagtgtggcc

SEQ ID NO: 428210 - DNA, 25 bp, Homo sapien
agagaggcgtcggttcaggctcgga

SEQ ID NO: 428211 - DNA, 25 bp, Homo sapien
gaggcgtcggttcaggctcggatgc

SEQ ID NO: 428212 - DNA, 25 bp, Homo sapien
aggagagaggcgtcggttcaggctc

SEQ ID NO: 428213 - DNA, 25 bp, Homo sapien
tcggttcaggctcggatgctgtggg

SEQ ID NO: 428214 - DNA, 25 bp, Homo sapien
ccaggaagaactgcacaaaaacaca

SEQ ID NO: 428215 - DNA, 25 bp, Homo sapien
cagcgaaccctgctgacccggcccc

SEQ ID NO: 428216 - DNA, 25 bp, Homo sapien
ctgggaggcgtgctctgctccctca

SEQ ID NO: 428217 - DNA, 25 bp, Homo sapien
cccctctgggaggcgtgctctgctc

SEQ ID NO: 428218 - DNA, 25 bp, Homo sapien
ctgacagttcagcaccgctcaaact

SEQ ID NO: 428219 - DNA, 25 bp, Homo sapien
taaggagacgtgacaacagaatctg

SEQ ID NO: 428220 - DNA, 25 bp, Homo sapien
ctgtaaggagacgtgacaacagaat

SEQ ID NO: 428221 - DNA, 25 bp, Homo sapien
ggagacgtgacaacagaatctgtca

SEQ ID NO: 428222 - DNA, 25 bp, Homo sapien
gacgtgacaacagaatctgtcatgg

SEQ ID NO: 428223 - DNA, 25 bp, Homo sapien
cttgtaagaagccgccgccgtgagc

SEQ ID NO: 428224 - DNA, 25 bp, Homo sapien
tggagccctctctcgcaaggtaagg

SEQ ID NO: 428225 - DNA, 25 bp, Homo sapien
aagggactctccgtctggcacaggc

SEQ ID NO: 428226 - DNA, 25 bp, Homo sapien
tgctccgccgccgaatcttccagaa

SEQ ID NO: 428227 - DNA, 25 bp, Homo sapien
ggcggcccagcgccttgcttttggc

SEQ ID NO: 428228 - DNA, 25 bp, Homo sapien
ctcccgcttgcatcctacagctcag

SEQ ID NO: 428229 - DNA, 25 bp, Homo sapien
atcctacagctcagctgcggtctcg

SEQ ID NO: 428230 - DNA, 25 bp, Homo sapien
ctcgggaagccgagaatttcgcgct

SEQ ID NO: 428231 - DNA, 25 bp, Homo sapien
gaagccgagaatttcgcgctccgct

SEQ ID NO: 428232 - DNA, 25 bp, Homo sapien
tgctgggcaccgaaacgtgcatctc

SEQ ID NO: 428233 - DNA, 25 bp, Homo sapien
caaaaagggcgatttgcaaacagcc

SEQ ID NO: 428234 - DNA, 25 bp, Homo sapien
catccacaatgcagcgaactcaatg

SEQ ID NO: 428235 - DNA, 25 bp, Homo sapien
cacacggtccgccaaaaagggcgat

SEQ ID NO: 428236 - DNA, 25 bp, Homo sapien
agtggggtccactccgccggcgcgg

SEQ ID NO: 428237 - DNA, 25 bp, Homo sapien
ggactcgccgccagtggggtccact

SEQ ID NO: 428238 - DNA, 25 bp, Homo sapien
ctccacgctccaggactcgccgcca

SEQ ID NO: 428239 - DNA, 25 bp, Homo sapien
ccgccagtggggtccactccgccgg

SEQ ID NO: 428240 - DNA, 25 bp, Homo sapien
gagcccggggccacgtgcacggcca

SEQ ID NO: 428241 - DNA, 25 bp, Homo sapien
agcccggggccacgtgcacggccag

SEQ ID NO: 428242 - DNA, 25 bp, Homo sapien
cccggggccacgtgcacggccagcc

SEQ ID NO: 428243 - DNA, 25 bp, Homo sapien
gccgcctttcggtgcagatgatgca

SEQ ID NO: 428244 - DNA, 25 bp, Homo sapien
ccagttgagatcctctgtccagaga

SEQ ID NO: 428245 - DNA, 25 bp, Homo sapien
cggtcaagaccgcaggcgtgggcgc

SEQ ID NO: 428246 - DNA, 25 bp, Homo sapien
gatgatgcaactctgggcggaggcg

SEQ ID NO: 428247 - DNA, 25 bp, Homo sapien
tgccccgactgcggcgaggcggaga

SEQ ID NO: 428248 - DNA, 25 bp, Homo sapien
ctggacggatacatggaaaagaggg

SEQ ID NO: 428249 - DNA, 25 bp, Homo sapien
caggcgggcggtgattggcggagag

SEQ ID NO: 428250 - DNA, 25 bp, Homo sapien
ccgactgcggcgaggcggagacggc

SEQ ID NO: 428251 - DNA, 25 bp, Homo sapien
tgagcttgaaacgtgcgtcctggtg

SEQ ID NO: 428252 - DNA, 25 bp, Homo sapien
tttaaggaacctttactgatgagct

SEQ ID NO: 428253 - DNA, 25 bp, Homo sapien
tccgatgctgttttacttggttaac

SEQ ID NO: 428254 - DNA, 25 bp, Homo sapien
tggtgttccgatgctgttttacttg

SEQ ID NO: 428255 - DNA, 25 bp, Homo sapien
gccgcgctctgtggccgccggacgc

SEQ ID NO: 428256 - DNA, 25 bp, Homo sapien
gcgctctgtggccgccggacgccgt

SEQ ID NO: 428257 - DNA, 25 bp, Homo sapien
tggccgcgctctgtggccgccggac

SEQ ID NO: 428258 - DNA, 25 bp, Homo sapien
gctctgtggccgccggacgccgtgc

SEQ ID NO: 428259 - DNA, 25 bp, Homo sapien
ggcgcagaacagtcgccttgcgcgg

SEQ ID NO: 428260 - DNA, 25 bp, Homo sapien
gccgactccgcgcagggtggtagca

SEQ ID NO: 428261 - DNA, 25 bp, Homo sapien
gcagggtggtagcaggggcgccccg

SEQ ID NO: 428262 - DNA, 25 bp, Homo sapien
ggctccttcgccaggtcccggaggc

SEQ ID NO: 428263 - DNA, 25 bp, Homo sapien
cctatggctaaatgggggatcccag

SEQ ID NO: 428264 - DNA, 25 bp, Homo sapien
gatccccccgccctatggctaaatg

SEQ ID NO: 428265 - DNA, 25 bp, Homo sapien
ttcagaggctgaacctgatcccccc

SEQ ID NO: 428266 - DNA, 25 bp, Homo sapien
cccgccctatggctaaatgggggat

SEQ ID NO: 428267 - DNA, 25 bp, Homo sapien
agaggaacgtgctgcgcctccgcag

SEQ ID NO: 428268 - DNA, 25 bp, Homo sapien
ggctcaggtcagagcgatgctccgc

SEQ ID NO: 428269 - DNA, 25 bp, Homo sapien
gggagtgagacgtgaattagaatta

SEQ ID NO: 428270 - DNA, 25 bp, Homo sapien
ctgcagcgaaagacacggacggtgc

SEQ ID NO: 428271 - DNA, 25 bp, Homo sapien
tccaaatcgagtttggctgcgtggg

SEQ ID NO: 428272 - DNA, 25 bp, Homo sapien
gaatgtaggctccaaggatgccccg

SEQ ID NO: 428273 - DNA, 25 bp, Homo sapien
tggaggtaggcgttttccaaatcga

SEQ ID NO: 428274 - DNA, 25 bp, Homo sapien
cccgctgtgtgaacaggccagctgc

SEQ ID NO: 428275 - DNA, 25 bp, Homo sapien
ggagcacgggcatgggaagacagcc

SEQ ID NO: 428276 - DNA, 25 bp, Homo sapien
tgctgcccccggagcacgggcatgg

SEQ ID NO: 428277 - DNA, 25 bp, Homo sapien
ccccggagcacgggcatgggaagac

SEQ ID NO: 428278 - DNA, 25 bp, Homo sapien
tgcccccggagcacgggcatgggaa

SEQ ID NO: 428279 - DNA, 25 bp, Homo sapien
ggcggtctcgggactgtttggttga

SEQ ID NO: 428280 - DNA, 25 bp, Homo sapien
ctcgggactgtttggttgagaaggt

SEQ ID NO: 428281 - DNA, 25 bp, Homo sapien
tgagaaggttctgtcacatatgacg

SEQ ID NO: 428282 - DNA, 25 bp, Homo sapien
agaaggttctgtcacatatgacgtg

SEQ ID NO: 428283 - DNA, 25 bp, Homo sapien
catggacagggatggccttacaagt

SEQ ID NO: 428284 - DNA, 25 bp, Homo sapien
tgtgggcccaagctgacccgcaggt

SEQ ID NO: 428285 - DNA, 25 bp, Homo sapien
tctctgggccttaaaatctagattc

SEQ ID NO: 428286 - DNA, 25 bp, Homo sapien
cagggccagcgtccctgcatgctgt

SEQ ID NO: 428287 - DNA, 25 bp, Homo sapien
aggtgcctgacaaccaggcccggtt

SEQ ID NO: 428288 - DNA, 25 bp, Homo sapien
tgcctgacaaccaggcccggttaat

SEQ ID NO: 428289 - DNA, 25 bp, Homo sapien
acaggtgcctgacaaccaggcccgg

SEQ ID NO: 428290 - DNA, 25 bp, Homo sapien
ggtgcctgacaaccaggcccggtta

SEQ ID NO: 428291 - DNA, 25 bp, Homo sapien
ttgtgttgcttcttgaccacgatga

SEQ ID NO: 428292 - DNA, 25 bp, Homo sapien
gttgcttcttgaccacgatgatcac

SEQ ID NO: 428293 - DNA, 25 bp, Homo sapien
tcttgaccacgatgatcaccttgca

SEQ ID NO: 428294 - DNA, 25 bp, Homo sapien
tgcttcttgaccacgatgatcacct

SEQ ID NO: 428295 - DNA, 25 bp, Homo sapien
tggaaaaataagtgatgccaacttg

SEQ ID NO: 428296 - DNA, 25 bp, Homo sapien
gaaaaataagtgatgccaacttggg

SEQ ID NO: 428297 - DNA, 25 bp, Homo sapien
ggaaaaataagtgatgccaacttgg

SEQ ID NO: 428298 - DNA, 25 bp, Homo sapien
aaaaataagtgatgccaacttgggc

SEQ ID NO: 428299 - DNA, 25 bp, Homo sapien
atgtcccagcgtcctggcggtgctg

SEQ ID NO: 428300 - DNA, 25 bp, Homo sapien
atgcatgtcccagcgtcctggcggt

SEQ ID NO: 428301 - DNA, 25 bp, Homo sapien
ggtgtgcatgcatgtcccagcgtcc

SEQ ID NO: 428302 - DNA, 25 bp, Homo sapien
ctgggtggctgcgaacccctggagc

SEQ ID NO: 428303 - DNA, 25 bp, Homo sapien
acagattttctccaattagcagggc

SEQ ID NO: 428304 - DNA, 25 bp, Homo sapien
ttctccaattagcagggcaatgacc

SEQ ID NO: 428305 - DNA, 25 bp, Homo sapien
gattttctccaattagcagggcaat

SEQ ID NO: 428306 - DNA, 25 bp, Homo sapien
cagttcatttgaaggcaacagattt

SEQ ID NO: 428307 - DNA, 25 bp, Homo sapien
gtgcctcatgggcactcagggtcat

SEQ ID NO: 428308 - DNA, 25 bp, Homo sapien
gcagcagtgcctcatgggcactcag

SEQ ID NO: 428309 - DNA, 25 bp, Homo sapien
cagcagtgcctcatgggcactcagg

SEQ ID NO: 428310 - DNA, 25 bp, Homo sapien
gcagtgcctcatgggcactcagggt

SEQ ID NO: 428311 - DNA, 25 bp, Homo sapien
tcaactacaacactttctagcagac

SEQ ID NO: 428312 - DNA, 25 bp, Homo sapien
ttggtcaatcaactacaacactttc

SEQ ID NO: 428313 - DNA, 25 bp, Homo sapien
actggtttggtcaatcaactacaac

SEQ ID NO: 428314 - DNA, 25 bp, Homo sapien
aatcaactacaacactttctagcag

SEQ ID NO: 428315 - DNA, 25 bp, Homo sapien
gaatcgcccagatctttcacgatct

SEQ ID NO: 428316 - DNA, 25 bp, Homo sapien
cagaatcgcccagatctttcacgat

SEQ ID NO: 428317 - DNA, 25 bp, Homo sapien
tcagaatcgcccagatctttcacga

SEQ ID NO: 428318 - DNA, 25 bp, Homo sapien
atcgcccagatctttcacgatctct

SEQ ID NO: 428319 - DNA, 25 bp, Homo sapien
gaagccatccctgatctaaaggagg

SEQ ID NO: 428320 - DNA, 25 bp, Homo sapien
tcagagagatgtgaccgctgggcct

SEQ ID NO: 428321 - DNA, 25 bp, Homo sapien
tgccagcgatcccaagacataatga

SEQ ID NO: 428322 - DNA, 25 bp, Homo sapien
tgattctgccagtgtcccgaaggga

SEQ ID NO: 428323 - DNA, 25 bp, Homo sapien
cttgcgacggcggccatacagctcc

SEQ ID NO: 428324 - DNA, 25 bp, Homo sapien
tgcgacggcggccatacagctcccg

SEQ ID NO: 428325 - DNA, 25 bp, Homo sapien
tcttgcgacggcggccatacagctc

SEQ ID NO: 428326 - DNA, 25 bp, Homo sapien
ttcttgcgacggcggccatacagct

SEQ ID NO: 428327 - DNA, 25 bp, Homo sapien
ttctctgaagtccgtcacgggtgac

SEQ ID NO: 428328 - DNA, 25 bp, Homo sapien
tctctgaagtccgtcacgggtgaca

SEQ ID NO: 428329 - DNA, 25 bp, Homo sapien
catatgacgcagctggtaggcgccg

SEQ ID NO: 428330 - DNA, 25 bp, Homo sapien
tgtacggtccgtccttcagttctgc

SEQ ID NO: 428331 - DNA, 25 bp, Homo sapien
gatctcaaggtgcatggcgacaggc

SEQ ID NO: 428332 - DNA, 25 bp, Homo sapien
aaaacagaagtgcttgccatccacg

SEQ ID NO: 428333 - DNA, 25 bp, Homo sapien
tgacgtacacgttccccaccaggtg

SEQ ID NO: 428334 - DNA, 25 bp, Homo sapien
caggttgtcacagacgttcatctcc

SEQ ID NO: 428335 - DNA, 25 bp, Homo sapien
aggtggtctcccaggttgtcacaga

SEQ ID NO: 428336 - DNA, 25 bp, Homo sapien
ttgtcacagacgttcatctcctcta

SEQ ID NO: 428337 - DNA, 25 bp, Homo sapien
tcaacaggtctatcagtcacagagt

SEQ ID NO: 428338 - DNA, 25 bp, Homo sapien
gagaccacagtggtttaagactcgt

SEQ ID NO: 428339 - DNA, 25 bp, Homo sapien
tacaaagtgtcattagatataactc

SEQ ID NO: 428340 - DNA, 25 bp, Homo sapien
cagatacagaagatcaacaggtcta

SEQ ID NO: 428341 - DNA, 25 bp, Homo sapien
caaaaaactcatcatagtgttcctg

SEQ ID NO: 428342 - DNA, 25 bp, Homo sapien
aaaaactcatcatagtgttcctgca

SEQ ID NO: 428343 - DNA, 25 bp, Homo sapien
aaaactcatcatagtgttcctgcat

SEQ ID NO: 428344 - DNA, 25 bp, Homo sapien
ctcaaaaaactcatcatagtgttcc

SEQ ID NO: 428345 - DNA, 25 bp, Homo sapien
caacgtgggcatctgactgctggca

SEQ ID NO: 428346 - DNA, 25 bp, Homo sapien
tgtcggtcaccccattaactgaggg

SEQ ID NO: 428347 - DNA, 25 bp, Homo sapien
ccttacggtattgtggacgccctca

SEQ ID NO: 428348 - DNA, 25 bp, Homo sapien
taagtgtaactactcggacagcctg

SEQ ID NO: 428349 - DNA, 25 bp, Homo sapien
tgagggttacggtaaatgttcaaga

SEQ ID NO: 428350 - DNA, 25 bp, Homo sapien
gcaaaccgtcagcagactgggaaga

SEQ ID NO: 428351 - DNA, 25 bp, Homo sapien
agcgcaaaccgtcagcagactggga

SEQ ID NO: 428352 - DNA, 25 bp, Homo sapien
ttacggtaaatgttcaagagggcaa

SEQ ID NO: 428353 - DNA, 25 bp, Homo sapien
aacgcaacaactttatattatggaa

SEQ ID NO: 428354 - DNA, 25 bp, Homo sapien
tgaaatacaaaacgcaacaacttta

SEQ ID NO: 428355 - DNA, 25 bp, Homo sapien
tacaaaacgcaacaactttatatta

SEQ ID NO: 428356 - DNA, 25 bp, Homo sapien
ctgaaatacaaaacgcaacaacttt

SEQ ID NO: 428357 - DNA, 25 bp, Homo sapien
ggcaagtgcttcagttgagattcag

SEQ ID NO: 428358 - DNA, 25 bp, Homo sapien
caagtgcttcagttgagattcagtg

SEQ ID NO: 428359 - DNA, 25 bp, Homo sapien
gcaagtgcttcagttgagattcagt

SEQ ID NO: 428360 - DNA, 25 bp, Homo sapien
ctggcaagtgcttcagttgagattc

SEQ ID NO: 428361 - DNA, 25 bp, Homo sapien
gataagcctcctgaacgtggccaag

SEQ ID NO: 428362 - DNA, 25 bp, Homo sapien
tggacggacctgctctcatgacaaa

SEQ ID NO: 428363 - DNA, 25 bp, Homo sapien
caaatgtcaatcaatggaggtggcc

SEQ ID NO: 428364 - DNA, 25 bp, Homo sapien
cactgcggtgtaacggaggtctcat

SEQ ID NO: 428365 - DNA, 25 bp, Homo sapien
attacgatagatgttttgaatcaag

SEQ ID NO: 428366 - DNA, 25 bp, Homo sapien
gggattacgatagatgttttgaatc

SEQ ID NO: 428367 - DNA, 25 bp, Homo sapien
tcagccgtctgtgcactgttttggg

SEQ ID NO: 428368 - DNA, 25 bp, Homo sapien
gtgtgagccgtcagccgtctgtgca

SEQ ID NO: 428369 - DNA, 25 bp, Homo sapien
gaaatgaccgtaccatgacaaccct

SEQ ID NO: 428370 - DNA, 25 bp, Homo sapien
ttcaagctagcagacaccaagatgt

SEQ ID NO: 428371 - DNA, 25 bp, Homo sapien
gccaagggtggctaggattgcctaa

SEQ ID NO: 428372 - DNA, 25 bp, Homo sapien
tctggtctcctagcaaaacaggcac

SEQ ID NO: 428373 - DNA, 25 bp, Homo sapien
ttctaaaaacactgtgtgctgtggg

SEQ ID NO: 428374 - DNA, 25 bp, Homo sapien
ggtaattagcataatggagggaaaa

SEQ ID NO: 428375 - DNA, 25 bp, Homo sapien
gtgctgtggggtcgtccatgggctt

SEQ ID NO: 428376 - DNA, 25 bp, Homo sapien
ttggtaattagcataatggagggaa

SEQ ID NO: 428377 - DNA, 25 bp, Homo sapien
gatggcagggcagcaaatatcaggc

SEQ ID NO: 428378 - DNA, 25 bp, Homo sapien
tccatgacgtgatgcgactcgctgt

SEQ ID NO: 428379 - DNA, 25 bp, Homo sapien
caaatgttctcatcaacgtgggcac

SEQ ID NO: 428380 - DNA, 25 bp, Homo sapien
aaacaaggagtggtggtctcagacc

SEQ ID NO: 428381 - DNA, 25 bp, Homo sapien
ccatgacgacatgctccaattttga

SEQ ID NO: 428382 - DNA, 25 bp, Homo sapien
caaccgagagcacctgtctccatga

SEQ ID NO: 428383 - DNA, 25 bp, Homo sapien
tgacgacatgctccaattttgaaat

SEQ ID NO: 428384 - DNA, 25 bp, Homo sapien
ctggctaaacgtcggtttattgtgc

SEQ ID NO: 428385 - DNA, 25 bp, Homo sapien
catgacaccagaccaacagggagtt

SEQ ID NO: 428386 - DNA, 25 bp, Homo sapien
cagacagaacgtatgtgtgcttcac

SEQ ID NO: 428387 - DNA, 25 bp, Homo sapien
ggcaagtcaccctagctctcagatg

SEQ ID NO: 428388 - DNA, 25 bp, Homo sapien
tctctcttgaaaacaccggtgtggt

SEQ ID NO: 428389 - DNA, 25 bp, Homo sapien
ctacctcagaatgggcaagccctgg

SEQ ID NO: 428390 - DNA, 25 bp, Homo sapien
tccagagttaagattgaagggcctc

SEQ ID NO: 428391 - DNA, 25 bp, Homo sapien
gaagggcctcaacctcagtgaaatc

SEQ ID NO: 428392 - DNA, 25 bp, Homo sapien
ggaccatgaagactgactagccact

SEQ ID NO: 428393 - DNA, 25 bp, Homo sapien
gaaattagtacgtgccaaggtggca

SEQ ID NO: 428394 - DNA, 25 bp, Homo sapien
gtctaaactacagccaactcactgg

SEQ ID NO: 428395 - DNA, 25 bp, Homo sapien
taacgattgattagggaaggcatgc

SEQ ID NO: 428396 - DNA, 25 bp, Homo sapien
gattctaccatgtgtgaagaggaca

SEQ ID NO: 428397 - DNA, 25 bp, Homo sapien
gataagcgactgaatactggcgagg

SEQ ID NO: 428398 - DNA, 25 bp, Homo sapien
ccagcggtcgcttaaacaggcaaga

SEQ ID NO: 428399 - DNA, 25 bp, Homo sapien
gaacgcaatcccatggtaaatccag

SEQ ID NO: 428400 - DNA, 25 bp, Homo sapien
ggagcacctgtatgttaagagcgga

SEQ ID NO: 428401 - DNA, 25 bp, Homo sapien
atgctccaggcaactttcagcgcgg

SEQ ID NO: 428402 - DNA, 25 bp, Homo sapien
tgtccacgtccaaaaggcccggatg

SEQ ID NO: 428403 - DNA, 25 bp, Homo sapien
cagagcttgctcgacaggacattca

SEQ ID NO: 428404 - DNA, 25 bp, Homo sapien
tcacagccgaaagttggaacaaacg

SEQ ID NO: 428405 - DNA, 25 bp, Homo sapien
ttgtctttctcggtgccgaagatgg

SEQ ID NO: 428406 - DNA, 25 bp, Homo sapien
gtctttctcggtgccgaagatggag

SEQ ID NO: 428407 - DNA, 25 bp, Homo sapien
agatggaggccagatactccgccat

SEQ ID NO: 428408 - DNA, 25 bp, Homo sapien
ttctcggtgccgaagatggaggcca

SEQ ID NO: 428409 - DNA, 25 bp, Homo sapien
gccgacgccgccgaccctgccgacg

SEQ ID NO: 428410 - DNA, 25 bp, Homo sapien
ctgccgacgccgccgaccctgccga

SEQ ID NO: 428411 - DNA, 25 bp, Homo sapien
ccgacgccgccgaccctgccgacgc

SEQ ID NO: 428412 - DNA, 25 bp, Homo sapien
cgacgccgccgaccctgccgacgcc

SEQ ID NO: 428413 - DNA, 25 bp, Homo sapien
acattctgtttccaaccattttctt

SEQ ID NO: 428414 - DNA, 25 bp, Homo sapien
gtagagacagctgatgcgtttattg

SEQ ID NO: 428415 - DNA, 25 bp, Homo sapien
gagacagctgatgcgtttattgagg

SEQ ID NO: 428416 - DNA, 25 bp, Homo sapien
cagctgatgcgtttattgaggttgt

SEQ ID NO: 428417 - DNA, 25 bp, Homo sapien
ctatcattgattgacatttagacac

SEQ ID NO: 428418 - DNA, 25 bp, Homo sapien
ttgacatttagacacaagtctttgc

SEQ ID NO: 428419 - DNA, 25 bp, Homo sapien
cattgttcaattccccccatgagtg

SEQ ID NO: 428420 - DNA, 25 bp, Homo sapien
cattgattgacatttagacacaagt

SEQ ID NO: 428421 - DNA, 25 bp, Homo sapien
cttgagcagccgatgtgacagccat

SEQ ID NO: 428422 - DNA, 25 bp, Homo sapien
cgcagaagtggatcaggagcaaaac

SEQ ID NO: 428423 - DNA, 25 bp, Homo sapien
tgtggtgaacgttctccccagtgcc

SEQ ID NO: 428424 - DNA, 25 bp, Homo sapien
acttggcccctgactgcttgagcag

SEQ ID NO: 428425 - DNA, 25 bp, Homo sapien
ttatgtaataagttggagatatttc

SEQ ID NO: 428426 - DNA, 25 bp, Homo sapien
tatgtaataagttggagatatttcc

SEQ ID NO: 428427 - DNA, 25 bp, Homo sapien
aataagttggagatatttccatatc

SEQ ID NO: 428428 - DNA, 25 bp, Homo sapien
tgtaataagttggagatatttccat

SEQ ID NO: 428429 - DNA, 25 bp, Homo sapien
tagagggcggagttccccatctttc

SEQ ID NO: 428430 - DNA, 25 bp, Homo sapien
tccacttctgcaactacagaggtga

SEQ ID NO: 428431 - DNA, 25 bp, Homo sapien
gcaatgtgaaggctcagtccacttc

SEQ ID NO: 428432 - DNA, 25 bp, Homo sapien
tggaaatggaagtgtcccacttgct

SEQ ID NO: 428433 - DNA, 25 bp, Homo sapien
tcactcggactaggcccatgtagac

SEQ ID NO: 428434 - DNA, 25 bp, Homo sapien
ggcacccgccctggataggacaggc

SEQ ID NO: 428435 - DNA, 25 bp, Homo sapien
ccatgtagacatgccgtgaggctga

SEQ ID NO: 428436 - DNA, 25 bp, Homo sapien
tttctccagttcagagtggcaggtg

SEQ ID NO: 428437 - DNA, 25 bp, Homo sapien
gctccaggtctggagatgagcccca

SEQ ID NO: 428438 - DNA, 25 bp, Homo sapien
agctgctccaggtctggagatgagc

SEQ ID NO: 428439 - DNA, 25 bp, Homo sapien
ctgctccaggtctggagatgagccc

SEQ ID NO: 428440 - DNA, 25 bp, Homo sapien
ctagctgcgggcagtggcttctgcc

SEQ ID NO: 428441 - DNA, 25 bp, Homo sapien
ctgcgggccacaaccttgctgggag

SEQ ID NO: 428442 - DNA, 25 bp, Homo sapien
tccgctgcgggccacaaccttgctg

SEQ ID NO: 428443 - DNA, 25 bp, Homo sapien
gggagcgtccgctgcgggccacaac

SEQ ID NO: 428444 - DNA, 25 bp, Homo sapien
tgtggaaacggggctctacctcgtg

SEQ ID NO: 428445 - DNA, 25 bp, Homo sapien
ggggcaagaacttggctggccaggg

SEQ ID NO: 428446 - DNA, 25 bp, Homo sapien
tggggcaagaacttggctggccagg

SEQ ID NO: 428447 - DNA, 25 bp, Homo sapien
tcctctgggcacacacatccctggt

SEQ ID NO: 428448 - DNA, 25 bp, Homo sapien
ctgggcacacacatccctggtgtct

SEQ ID NO: 428449 - DNA, 25 bp, Homo sapien
aagtctgagatgaaagtgtcagaag

SEQ ID NO: 428450 - DNA, 25 bp, Homo sapien
tgggcacacacatccctggtgtctc

SEQ ID NO: 428451 - DNA, 25 bp, Homo sapien
tcggtatccagttaccctgggcaga

SEQ ID NO: 428452 - DNA, 25 bp, Homo sapien
tcaaccggctggtccaagtgtggac

SEQ ID NO: 428453 - DNA, 25 bp, Homo sapien
catcgttcaccgtgtgtgaccaggg

SEQ ID NO: 428454 - DNA, 25 bp, Homo sapien
gacggaagtagaggatgcaagcacc

SEQ ID NO: 428455 - DNA, 25 bp, Homo sapien
taacctgctgacctcgaggagaagc

SEQ ID NO: 428456 - DNA, 25 bp, Homo sapien
cggcaaatcgctgaggacaggctta

SEQ ID NO: 428457 - DNA, 25 bp, Homo sapien
gagtggaaaattgcagcgccagcct

SEQ ID NO: 428458 - DNA, 25 bp, Homo sapien
cagactgctggcgttacgggaatcc

SEQ ID NO: 428459 - DNA, 25 bp, Homo sapien
cactcggctgcagttcccgtcgagg

SEQ ID NO: 428460 - DNA, 25 bp, Homo sapien
tcccgtcgaggcagccaatggcctt

SEQ ID NO: 428461 - DNA, 25 bp, Homo sapien
gctgcagttcccgtcgaggcagcca

SEQ ID NO: 428462 - DNA, 25 bp, Homo sapien
agttcccgtcgaggcagccaatggc

SEQ ID NO: 428463 - DNA, 25 bp, Homo sapien
ggcccgtgtggaagctgcgtccatc

SEQ ID NO: 428464 - DNA, 25 bp, Homo sapien
cgtgtggaagctgcgtccatctgac

SEQ ID NO: 428465 - DNA, 25 bp, Homo sapien
gggtcgggcctgtggtggcactgcg

SEQ ID NO: 428466 - DNA, 25 bp, Homo sapien
tgactctgccgcctgtgcggtctct

SEQ ID NO: 428467 - DNA, 25 bp, Homo sapien
tgtttcctatatcatttcaaccttg

SEQ ID NO: 428468 - DNA, 25 bp, Homo sapien
ggcagcgccaaagggctccaggcct

SEQ ID NO: 428469 - DNA, 25 bp, Homo sapien
cttcagacatcctggggggtaccct

SEQ ID NO: 428470 - DNA, 25 bp, Homo sapien
tcccagcattgctggcgacgaggcc

SEQ ID NO: 428471 - DNA, 25 bp, Homo sapien
tgagctaacatctcagcttcagcac

SEQ ID NO: 428472 - DNA, 25 bp, Homo sapien
taaaaacaccaagaggtcatgcaga

SEQ ID NO: 428473 - DNA, 25 bp, Homo sapien
gagtggccccatgactggaagttca

SEQ ID NO: 428474 - DNA, 25 bp, Homo sapien
gaaatatgttgaaccacgggctgga

SEQ ID NO: 428475 - DNA, 25 bp, Homo sapien
gccagtggcggaagtgaccgcacct

SEQ ID NO: 428476 - DNA, 25 bp, Homo sapien
ggtgcaggcgcctcaactctgctga

SEQ ID NO: 428477 - DNA, 25 bp, Homo sapien
tcgtcctaagcaggcattgcctcgg

SEQ ID NO: 428478 - DNA, 25 bp, Homo sapien
cacactcctttagatagcagcctgg

SEQ ID NO: 428479 - DNA, 25 bp, Homo sapien
aggcccgtgggtggttcaccagatc

SEQ ID NO: 428480 - DNA, 25 bp, Homo sapien
tggctggtgggctgtctgatctcct

SEQ ID NO: 428481 - DNA, 25 bp, Homo sapien
ctaggccttggcagggtctgcaagg

SEQ ID NO: 428482 - DNA, 25 bp, Homo sapien
gatcctcgatcaggctccttggaga

SEQ ID NO: 428483 - DNA, 25 bp, Homo sapien
cttggccgcaggagacttgccgaac

SEQ ID NO: 428484 - DNA, 25 bp, Homo sapien
agaggacttgcctggccgccgagac

SEQ ID NO: 428485 - DNA, 25 bp, Homo sapien
acctcagccttaaaggtcaccttca

SEQ ID NO: 428486 - DNA, 25 bp, Homo sapien
gcagcagaggacttgcctggccgcc

SEQ ID NO: 428487 - DNA, 25 bp, Homo sapien
aaaaggaggcgtcactgtctggaag

SEQ ID NO: 428488 - DNA, 25 bp, Homo sapien
gtttcctccgcgcagaatgacgtca

SEQ ID NO: 428489 - DNA, 25 bp, Homo sapien
gaagcctcttgtgaagagcagcccc

SEQ ID NO: 428490 - DNA, 25 bp, Homo sapien
cggcttccggcccaggtcagctctt

SEQ ID NO: 428491 - DNA, 25 bp, Homo sapien
cagcctctttgacatctagctgcct

SEQ ID NO: 428492 - DNA, 25 bp, Homo sapien
ttgaccgtgagagacccctttccac

SEQ ID NO: 428493 - DNA, 25 bp, Homo sapien
tctgtgtctgatttgtacttgaccg

SEQ ID NO: 428494 - DNA, 25 bp, Homo sapien
ttcattgcgcggctgccctctgtgt

SEQ ID NO: 428495 - DNA, 25 bp, Homo sapien
tgagaaacccaattaagtaagtggc

SEQ ID NO: 428496 - DNA, 25 bp, Homo sapien
gatgagaaacccaattaagtaagtg

SEQ ID NO: 428497 - DNA, 25 bp, Homo sapien
aacccaattaagtaagtggcctgca

SEQ ID NO: 428498 - DNA, 25 bp, Homo sapien
atgagaaacccaattaagtaagtgg

SEQ ID NO: 428499 - DNA, 25 bp, Homo sapien
ccagggcaggccgtggttggaactg

SEQ ID NO: 428500 - DNA, 25 bp, Homo sapien
ccgtggttggaactggataggagac

SEQ ID NO: 428501 - DNA, 25 bp, Homo sapien
gttggaactggataggagactttgt

SEQ ID NO: 428502 - DNA, 25 bp, Homo sapien
tgtcagccagggcaggccgtggttg

SEQ ID NO: 428503 - DNA, 25 bp, Homo sapien
ctccttgggccctgctaggcgcggg

SEQ ID NO: 428504 - DNA, 25 bp, Homo sapien
ggtgaaagtcagacagctttttcgt

SEQ ID NO: 428505 - DNA, 25 bp, Homo sapien
gaaagtcagacagctttttcgtgct

SEQ ID NO: 428506 - DNA, 25 bp, Homo sapien
cagacagctttttcgtgctgagtcc

SEQ ID NO: 428507 - DNA, 25 bp, Homo sapien
tttttcgtgctgagtccacagacgc

SEQ ID NO: 428508 - DNA, 25 bp, Homo sapien
agcatgggttaatgagaaggaagca

SEQ ID NO: 428509 - DNA, 25 bp, Homo sapien
gaagctgccgttggtctcgaagctg

SEQ ID NO: 428510 - DNA, 25 bp, Homo sapien
acatggagggaagctgccgttggtc

SEQ ID NO: 428511 - DNA, 25 bp, Homo sapien
agaggtacccgttctttccaagcat

SEQ ID NO: 428512 - DNA, 25 bp, Homo sapien
gacgttcttgcggaccttgacctcc

SEQ ID NO: 428513 - DNA, 25 bp, Homo sapien
gaggacgttcttgcggaccttgacc

SEQ ID NO: 428514 - DNA, 25 bp, Homo sapien
cgttcttgcggaccttgacctccat

SEQ ID NO: 428515 - DNA, 25 bp, Homo sapien
aaagaggacgttcttgcggaccttg

SEQ ID NO: 428516 - DNA, 25 bp, Homo sapien
aactgtcactcatgcccacggcttt

SEQ ID NO: 428517 - DNA, 25 bp, Homo sapien
tatccttgacctccaacgatgagca

SEQ ID NO: 428518 - DNA, 25 bp, Homo sapien
gattcccatcgaagctgagctgctc

SEQ ID NO: 428519 - DNA, 25 bp, Homo sapien
ccacggctttggatgttgaccagtc

SEQ ID NO: 428520 - DNA, 25 bp, Homo sapien
tggctctttgatcgcagccctgcgc

SEQ ID NO: 428521 - DNA, 25 bp, Homo sapien
gcggacacagcgttcctcagtggct

SEQ ID NO: 428522 - DNA, 25 bp, Homo sapien
tgtgaccaggtgcaagaggttcccg

SEQ ID NO: 428523 - DNA, 25 bp, Homo sapien
tgtgtagcgttgagaggccacttcc

SEQ ID NO: 428524 - DNA, 25 bp, Homo sapien
caaagcagaagacatccgaatgttc

SEQ ID NO: 428525 - DNA, 25 bp, Homo sapien
gacatccgaatgttcagggtttaga

SEQ ID NO: 428526 - DNA, 25 bp, Homo sapien
cgaatgttcagggtttagatgtagg

SEQ ID NO: 428527 - DNA, 25 bp, Homo sapien
cagggtttagatgtaggttctgtcc

SEQ ID NO: 428528 - DNA, 25 bp, Homo sapien
catctgggccggtgatgacagcaga

SEQ ID NO: 428529 - DNA, 25 bp, Homo sapien
tgcggctccacactgcaagcagagc

SEQ ID NO: 428530 - DNA, 25 bp, Homo sapien
ttcttggagagtgtggccggcttcc

SEQ ID NO: 428531 - DNA, 25 bp, Homo sapien
catgcagtgcggaggctgaatgttc

SEQ ID NO: 428532 - DNA, 25 bp, Homo sapien
ctgtaagctctagataggattccga

SEQ ID NO: 428533 - DNA, 25 bp, Homo sapien
tgtcgaggagaagtgctattagcca

SEQ ID NO: 428534 - DNA, 25 bp, Homo sapien
taggattccgagaacagcaccggtg

SEQ ID NO: 428535 - DNA, 25 bp, Homo sapien
tagccatgcagtcatacaggaaagt

SEQ ID NO: 428536 - DNA, 25 bp, Homo sapien
ctaaattcctgttggcaggaaaaca

SEQ ID NO: 428537 - DNA, 25 bp, Homo sapien
caagcctttagatctaaattcctgt

SEQ ID NO: 428538 - DNA, 25 bp, Homo sapien
gaacctcgccaagcctttagatcta

SEQ ID NO: 428539 - DNA, 25 bp, Homo sapien
agcagtgaagctgaacctcgccaag

SEQ ID NO: 428540 - DNA, 25 bp, Homo sapien
cagttgagactggattcctcggcca

SEQ ID NO: 428541 - DNA, 25 bp, Homo sapien
tgagtgctcagtatggtccgggctc

SEQ ID NO: 428542 - DNA, 25 bp, Homo sapien
gaaatggcgtcttatcaatccctgg

SEQ ID NO: 428543 - DNA, 25 bp, Homo sapien
aaagatgtgtcactacgtactgccg

SEQ ID NO: 428544 - DNA, 25 bp, Homo sapien
cagggactcggcttggacagaattt

SEQ ID NO: 428545 - DNA, 25 bp, Homo sapien
ccctttctggtgtagcacgagctga

SEQ ID NO: 428546 - DNA, 25 bp, Homo sapien
gtttacagtcgccactcctgctggg

SEQ ID NO: 428547 - DNA, 25 bp, Homo sapien
gtgaagtctcgcaaacccagggact

SEQ ID NO: 428548 - DNA, 25 bp, Homo sapien
cacggcggttttggagaacagccca

SEQ ID NO: 428549 - DNA, 25 bp, Homo sapien
ggcacagtcacagcggcagagaaat

SEQ ID NO: 428550 - DNA, 25 bp, Homo sapien
tgagctcgaggtctaggcacagtca

SEQ ID NO: 428551 - DNA, 25 bp, Homo sapien
caagccaatcctcggagtgggtgga

SEQ ID NO: 428552 - DNA, 25 bp, Homo sapien
gactctaggctcaatcctgcctgtg

SEQ ID NO: 428553 - DNA, 25 bp, Homo sapien
ctaggcaccatctaattcagactct

SEQ ID NO: 428554 - DNA, 25 bp, Homo sapien
gacggcccaggagctctaagttcag

SEQ ID NO: 428555 - DNA, 25 bp, Homo sapien
gtccaggagttcagaggcggtcact

SEQ ID NO: 428556 - DNA, 25 bp, Homo sapien
agctggccctgcacggttcatgtca

SEQ ID NO: 428557 - DNA, 25 bp, Homo sapien
tcctcagggatgcatcctggatagg

SEQ ID NO: 428558 - DNA, 25 bp, Homo sapien
tggataggagtccaggactgcagct

SEQ ID NO: 428559 - DNA, 25 bp, Homo sapien
tgtgacacccgctgcaggtgccagg

SEQ ID NO: 428560 - DNA, 25 bp, Homo sapien
tctgccgcaggaggaggggcaatgc

SEQ ID NO: 428561 - DNA, 25 bp, Homo sapien
tccagaactcccgtgcctacgggcg

SEQ ID NO: 428562 - DNA, 25 bp, Homo sapien
cccctccggtcagggcaggtgtcct

SEQ ID NO: 428563 - DNA, 25 bp, Homo sapien
tcttgcttccagttggcatcggcgg

SEQ ID NO: 428564 - DNA, 25 bp, Homo sapien
tgtgcctaataacagtccagcaaga

SEQ ID NO: 428565 - DNA, 25 bp, Homo sapien
tggccataatgaatgggcactccct

SEQ ID NO: 428566 - DNA, 25 bp, Homo sapien
gggacacactttaaagccacactgg

SEQ ID NO: 428567 - DNA, 25 bp, Homo sapien
tggccacaagggacgctggtgatcc

SEQ ID NO: 428568 - DNA, 25 bp, Homo sapien
gggagcccctcgatgactaatgtca

SEQ ID NO: 428569 - DNA, 25 bp, Homo sapien
ccataccaacgatggccgtcagcag

SEQ ID NO: 428570 - DNA, 25 bp, Homo sapien
ctcgatgactaatgtcacagctgcc

SEQ ID NO: 428571 - DNA, 25 bp, Homo sapien
cagcctggaggcctgatgtgtccat

SEQ ID NO: 428572 - DNA, 25 bp, Homo sapien
tgacagcgggttgtctactggaacc

SEQ ID NO: 428573 - DNA, 25 bp, Homo sapien
cttgggaagacaagagaccggctgc

SEQ ID NO: 428574 - DNA, 25 bp, Homo sapien
cactggccaccgtgttgtacaggaa

SEQ ID NO: 428575 - DNA, 25 bp, Homo sapien
gacttacggacagagaaacgcgcat

SEQ ID NO: 428576 - DNA, 25 bp, Homo sapien
tatttcagtttagtggctcaagcca

SEQ ID NO: 428577 - DNA, 25 bp, Homo sapien
gcctatgaacggagacggtgcctga

SEQ ID NO: 428578 - DNA, 25 bp, Homo sapien
tctggatgttggcaccacagggacc

SEQ ID NO: 428579 - DNA, 25 bp, Homo sapien
cactcagaagaatgaggtccggccc

SEQ ID NO: 428580 - DNA, 25 bp, Homo sapien
ccctgtagggtgttttcggtcgcag

SEQ ID NO: 428581 - DNA, 25 bp, Homo sapien
ggccgcctccgtctcatggatagag

SEQ ID NO: 428582 - DNA, 25 bp, Homo sapien
tatgacgtggcttctttaggaggca

SEQ ID NO: 428583 - DNA, 25 bp, Homo sapien
tcaaccgcggcaaaggtggttccca

SEQ ID NO: 428584 - DNA, 25 bp, Homo sapien
gaccccttagaggtgcaaatccaag

SEQ ID NO: 428585 - DNA, 25 bp, Homo sapien
tgcgtattttctcacgacccttcct

SEQ ID NO: 428586 - DNA, 25 bp, Homo sapien
taattcaggcggaatcacggctcag

SEQ ID NO: 428587 - DNA, 25 bp, Homo sapien
caaggccacgtctctcgacacgttg

SEQ ID NO: 428588 - DNA, 25 bp, Homo sapien
tccacgcactgcatgtgcgcctgag

SEQ ID NO: 428589 - DNA, 25 bp, Homo sapien
acgtctgtgtctccccgcacgtcag

SEQ ID NO: 428590 - DNA, 25 bp, Homo sapien
cgctgtctcgattttacaaaacgga

SEQ ID NO: 428591 - DNA, 25 bp, Homo sapien
tctctggaagcttccggagtaccca

SEQ ID NO: 428592 - DNA, 25 bp, Homo sapien
agatgatcctcaagggcacagcacg

SEQ ID NO: 428593 - DNA, 25 bp, Homo sapien
cgcgcgtcctgtccggagggcaggg

SEQ ID NO: 428594 - DNA, 25 bp, Homo sapien
ggttacagatgatcctcaagggcac

SEQ ID NO: 428595 - DNA, 25 bp, Homo sapien
tggtgctggttacagatgatcctca

SEQ ID NO: 428596 - DNA, 25 bp, Homo sapien
ctccaggtcgggaacactccctgga

SEQ ID NO: 428597 - DNA, 25 bp, Homo sapien
gtgtggagcgtccacccgggcttcg

SEQ ID NO: 428598 - DNA, 25 bp, Homo sapien
acccgggcttcgtcctccagctcag

SEQ ID NO: 428599 - DNA, 25 bp, Homo sapien
cctccaggtcgggaacactccctgg

SEQ ID NO: 428600 - DNA, 25 bp, Homo sapien
tcctcgctgggaaatgggcacagca

SEQ ID NO: 428601 - DNA, 25 bp, Homo sapien
ggcacagcagggcagcgaaggtgct

SEQ ID NO: 428602 - DNA, 25 bp, Homo sapien
ctgcgcgccttgagtgtcctcgctg

SEQ ID NO: 428603 - DNA, 25 bp, Homo sapien
ccttgagtgtcctcgctgggaaatg

SEQ ID NO: 428604 - DNA, 25 bp, Homo sapien
cttccttgccaaattgggagcctgc

SEQ ID NO: 428605 - DNA, 25 bp, Homo sapien
cttgccaaattgggagcctgcgggt

SEQ ID NO: 428606 - DNA, 25 bp, Homo sapien
tccttgccaaattgggagcctgcgg

SEQ ID NO: 428607 - DNA, 25 bp, Homo sapien
ccttgccaaattgggagcctgcggg

SEQ ID NO: 428608 - DNA, 25 bp, Homo sapien
gtctccctccttctgtgccgatttc

SEQ ID NO: 428609 - DNA, 25 bp, Homo sapien
cgatttctgcctttcgaggccctgt

SEQ ID NO: 428610 - DNA, 25 bp, Homo sapien
tccttctgtgccgatttctgccttt

SEQ ID NO: 428611 - DNA, 25 bp, Homo sapien
tgtgccgatttctgcctttcgaggc

SEQ ID NO: 428612 - DNA, 25 bp, Homo sapien
ttcactggctcctccataacccact

SEQ ID NO: 428613 - DNA, 25 bp, Homo sapien
aggaagcccacgggccttgcctgga

SEQ ID NO: 428614 - DNA, 25 bp, Homo sapien
gaggaggggccctccgcatcaacag

SEQ ID NO: 428615 - DNA, 25 bp, Homo sapien
cccagccccacaagcttcactggct

SEQ ID NO: 428616 - DNA, 25 bp, Homo sapien
gacctggccgcaggattctggcagc

SEQ ID NO: 428617 - DNA, 25 bp, Homo sapien
aagggccgtcccagtcaccagcagt

SEQ ID NO: 428618 - DNA, 25 bp, Homo sapien
agcagacgagccaagggccgtccca

SEQ ID NO: 428619 - DNA, 25 bp, Homo sapien
gcctctcctcagtgaaaccagcaga

SEQ ID NO: 428620 - DNA, 25 bp, Homo sapien
ctgagcaccttccatgcacggccct

SEQ ID NO: 428621 - DNA, 25 bp, Homo sapien
ccatgcacggccctcgggggaaaag

SEQ ID NO: 428622 - DNA, 25 bp, Homo sapien
tgagcaccttccatgcacggccctc

SEQ ID NO: 428623 - DNA, 25 bp, Homo sapien
gcaccttccatgcacggccctcggg

SEQ ID NO: 428624 - DNA, 25 bp, Homo sapien
tgcacggctggcacggacacacaga

SEQ ID NO: 428625 - DNA, 25 bp, Homo sapien
ggccagagggagaggtgcacggctg

SEQ ID NO: 428626 - DNA, 25 bp, Homo sapien
agggagaggtgcacggctggcacgg

SEQ ID NO: 428627 - DNA, 25 bp, Homo sapien
agagggagaggtgcacggctggcac

SEQ ID NO: 428628 - DNA, 25 bp, Homo sapien
cctagacggatatatgtttagagat

SEQ ID NO: 428629 - DNA, 25 bp, Homo sapien
taaggcattggatcccgcaatcatg

SEQ ID NO: 428630 - DNA, 25 bp, Homo sapien
aggagacacgcagtagggcacgtca

SEQ ID NO: 428631 - DNA, 25 bp, Homo sapien
gacaataggcggtttacatacacat

SEQ ID NO: 428632 - DNA, 25 bp, Homo sapien
gtgtgtagacagcacggcccaggca

SEQ ID NO: 428633 - DNA, 25 bp, Homo sapien
gcaggtgacggtgtgtagacagcac

SEQ ID NO: 428634 - DNA, 25 bp, Homo sapien
acggtgtgtagacagcacggcccag

SEQ ID NO: 428635 - DNA, 25 bp, Homo sapien
tgacggtgtgtagacagcacggccc

SEQ ID NO: 428636 - DNA, 25 bp, Homo sapien
ctgggaatttaggtcgggcactgcc

SEQ ID NO: 428637 - DNA, 25 bp, Homo sapien
ttctgtgcgggaactcccgagctca

SEQ ID NO: 428638 - DNA, 25 bp, Homo sapien
gatatgtcgccttccacaaggcggg

SEQ ID NO: 428639 - DNA, 25 bp, Homo sapien
cgtagtaacccggacgtctctctct

SEQ ID NO: 428640 - DNA, 25 bp, Homo sapien
acggcagggaccctggaatacagat

SEQ ID NO: 428641 - DNA, 25 bp, Homo sapien
cagatggatcccacatgcagagcgc

SEQ ID NO: 428642 - DNA, 25 bp, Homo sapien
gtagaaacgagaccagaagccccta

SEQ ID NO: 428643 - DNA, 25 bp, Homo sapien
atgcagagcgcgtccccgggagacc

SEQ ID NO: 428644 - DNA, 25 bp, Homo sapien
agtaagccgaccgttgcccacatgg

SEQ ID NO: 428645 - DNA, 25 bp, Homo sapien
taagccgaccgttgcccacatggga

SEQ ID NO: 428646 - DNA, 25 bp, Homo sapien
ccttctcctacttgctctatggggc

SEQ ID NO: 428647 - DNA, 25 bp, Homo sapien
gccctgctggcaagcccgtttcctt

SEQ ID NO: 428648 - DNA, 25 bp, Homo sapien
tggaggaagccacgtttaattatgc

SEQ ID NO: 428649 - DNA, 25 bp, Homo sapien
ggaaaatgcaaacgcatgcccagtg

SEQ ID NO: 428650 - DNA, 25 bp, Homo sapien
ggagcacacgctgtctgattccatt

SEQ ID NO: 428651 - DNA, 25 bp, Homo sapien
cggaacacgactcagcaggaaacag

SEQ ID NO: 428652 - DNA, 25 bp, Homo sapien
tcaaagaaaagcccctaaaatctgc

SEQ ID NO: 428653 - DNA, 25 bp, Homo sapien
aaagaaaagcccctaaaatctgctg

SEQ ID NO: 428654 - DNA, 25 bp, Homo sapien
aagaaaagcccctaaaatctgctgg

SEQ ID NO: 428655 - DNA, 25 bp, Homo sapien
agaaaagcccctaaaatctgctggg

SEQ ID NO: 428656 - DNA, 25 bp, Homo sapien
aaaacatacatcaactaatcatttg

SEQ ID NO: 428657 - DNA, 25 bp, Homo sapien
aaacatacatcaactaatcatttgg

SEQ ID NO: 428658 - DNA, 25 bp, Homo sapien
aaaaaacatacatcaactaatcatt

SEQ ID NO: 428659 - DNA, 25 bp, Homo sapien
taaaaaacatacatcaactaatcat

SEQ ID NO: 428660 - DNA, 25 bp, Homo sapien
ggatagtaatcaatgcacgcgcaca

SEQ ID NO: 428661 - DNA, 25 bp, Homo sapien
taacactgcagggtttaagaagccg

SEQ ID NO: 428662 - DNA, 25 bp, Homo sapien
tgacagggacgcttcttaacaacag

SEQ ID NO: 428663 - DNA, 25 bp, Homo sapien
ttttctctgcggcaaggcacctggt

SEQ ID NO: 428664 - DNA, 25 bp, Homo sapien
tgcaccaggacaaacgtgcctaggg

SEQ ID NO: 428665 - DNA, 25 bp, Homo sapien
caccaggacaaacgtgcctagggag

SEQ ID NO: 428666 - DNA, 25 bp, Homo sapien
acaaacgtgcctagggagcagggca

SEQ ID NO: 428667 - DNA, 25 bp, Homo sapien
caggacaaacgtgcctagggagcag

SEQ ID NO: 428668 - DNA, 25 bp, Homo sapien
cagggccatcacagggggcgatcac

SEQ ID NO: 428669 - DNA, 25 bp, Homo sapien
gagccccgacgtgaggagggtgctg

SEQ ID NO: 428670 - DNA, 25 bp, Homo sapien
gggccggtgccaatgtgcaggtgtg

SEQ ID NO: 428671 - DNA, 25 bp, Homo sapien
ggacgcgccggtctgcaggagtggg

SEQ ID NO: 428672 - DNA, 25 bp, Homo sapien
ttcctcagctgctgccgaaaggcct

SEQ ID NO: 428673 - DNA, 25 bp, Homo sapien
ttggtccgcgtggtcttcctcagct

SEQ ID NO: 428674 - DNA, 25 bp, Homo sapien
gcgagccagccccttgattttgttc

SEQ ID NO: 428675 - DNA, 25 bp, Homo sapien
tgattttgttcagtcccagaaaccc

SEQ ID NO: 428676 - DNA, 25 bp, Homo sapien
tgacacaagcacgtctggacaggag

SEQ ID NO: 428677 - DNA, 25 bp, Homo sapien
aggagtctggcacctaagccccagg

SEQ ID NO: 428678 - DNA, 25 bp, Homo sapien
gcatccacggcccttggcttaaggg

SEQ ID NO: 428679 - DNA, 25 bp, Homo sapien
aggaaaggacgggtgacacaagcac

SEQ ID NO: 428680 - DNA, 25 bp, Homo sapien
cagacaactgtcagagctggttccc

SEQ ID NO: 428681 - DNA, 25 bp, Homo sapien
tctgcaggacttgccgtggtggagg

SEQ ID NO: 428682 - DNA, 25 bp, Homo sapien
agtcagtgaggtgtccgacgcccgc

SEQ ID NO: 428683 - DNA, 25 bp, Homo sapien
tgctcgcagagaaggtcagacaact

SEQ ID NO: 428684 - DNA, 25 bp, Homo sapien
aggctgcttggggacacgggccggg

SEQ ID NO: 428685 - DNA, 25 bp, Homo sapien
ggggccggaacactccgctgcagct

SEQ ID NO: 428686 - DNA, 25 bp, Homo sapien
cgggtggagacctcggccagggtgt

SEQ ID NO: 428687 - DNA, 25 bp, Homo sapien
gagacctcggccagggtgtgcctcc

SEQ ID NO: 428688 - DNA, 25 bp, Homo sapien
tctgcacacccgctgtgggcactca

SEQ ID NO: 428689 - DNA, 25 bp, Homo sapien
ctgaggcgagccctctgcacacccg

SEQ ID NO: 428690 - DNA, 25 bp, Homo sapien
gcgagccctctgcacacccgctgtg

SEQ ID NO: 428691 - DNA, 25 bp, Homo sapien
agccctctgcacacccgctgtgggc

SEQ ID NO: 428692 - DNA, 25 bp, Homo sapien
ccactgcagcgagctctggagctca

SEQ ID NO: 428693 - DNA, 25 bp, Homo sapien
cactgcagcgagctctggagctcac

SEQ ID NO: 428694 - DNA, 25 bp, Homo sapien
ctggaggacggactgcaccaaggtc

SEQ ID NO: 428695 - DNA, 25 bp, Homo sapien
cctggaggacggactgcaccaaggt

SEQ ID NO: 428696 - DNA, 25 bp, Homo sapien
agcaaggcaggtcggaaagggtcgg

SEQ ID NO: 428697 - DNA, 25 bp, Homo sapien
caaggcaggtcggaaagggtcggtg

SEQ ID NO: 428698 - DNA, 25 bp, Homo sapien
gaccaccagcgccatcaagagaaga

SEQ ID NO: 428699 - DNA, 25 bp, Homo sapien
ctggggccggcagacgggaaagacg

SEQ ID NO: 428700 - DNA, 25 bp, Homo sapien
aagacgctgtcaggggagcgactcc

SEQ ID NO: 428701 - DNA, 25 bp, Homo sapien
tgtcaggggagcgactccggaccac

SEQ ID NO: 428702 - DNA, 25 bp, Homo sapien
aaggaggaggtaataaatggcagca

SEQ ID NO: 428703 - DNA, 25 bp, Homo sapien
gggcgcactgggcattccgatactc

SEQ ID NO: 428704 - DNA, 25 bp, Homo sapien
aaaccactgaggtccgagctccgag

SEQ ID NO: 428705 - DNA, 25 bp, Homo sapien
tccgatactccttgagccgctcaag

SEQ ID NO: 428706 - DNA, 25 bp, Homo sapien
gggtctgcatgatacccagcgcctg

SEQ ID NO: 428707 - DNA, 25 bp, Homo sapien
atgcggcggatcaggctctcacagt

SEQ ID NO: 428708 - DNA, 25 bp, Homo sapien
tctgggcgatggtgatgcgcctggc

SEQ ID NO: 428709 - DNA, 25 bp, Homo sapien
gctcatcgtagtcgcccaggttgga

SEQ ID NO: 428710 - DNA, 25 bp, Homo sapien
ctcagcgtcggcaggttaggcccat

SEQ ID NO: 428711 - DNA, 25 bp, Homo sapien
agagaaccgcagaccaggacgtaca

SEQ ID NO: 428712 - DNA, 25 bp, Homo sapien
tccagcacccgctgtctcagcgtcg

SEQ ID NO: 428713 - DNA, 25 bp, Homo sapien
aggacgtacagcaccacgcccaggc

SEQ ID NO: 428714 - DNA, 25 bp, Homo sapien
cctcaaagacttccggggcggcata

SEQ ID NO: 428715 - DNA, 25 bp, Homo sapien
gggctcccacaccacgtggacagag

SEQ ID NO: 428716 - DNA, 25 bp, Homo sapien
agaggctctcctgacttgtagaaat

SEQ ID NO: 428717 - DNA, 25 bp, Homo sapien
ccctcaaagacttccggggcggcat

SEQ ID NO: 428718 - DNA, 25 bp, Homo sapien
gatgaggttaaacggcaaatggcaa

SEQ ID NO: 428719 - DNA, 25 bp, Homo sapien
ctgagcggcaaagaaacagatggat

SEQ ID NO: 428720 - DNA, 25 bp, Homo sapien
cacaggggctgtggtttcggcacat

SEQ ID NO: 428721 - DNA, 25 bp, Homo sapien
tggtttcggcacatgccgggaagct

SEQ ID NO: 428722 - DNA, 25 bp, Homo sapien
ccgtgcctgccagcttgatgtccct

SEQ ID NO: 428723 - DNA, 25 bp, Homo sapien
gccagcttgatgtccctgctcccac

SEQ ID NO: 428724 - DNA, 25 bp, Homo sapien
cccggaccctccgtgcctgccagct

SEQ ID NO: 428725 - DNA, 25 bp, Homo sapien
cggaccctccgtgcctgccagcttg

SEQ ID NO: 428726 - DNA, 25 bp, Homo sapien
gacgatgtgatggtcgtgacagtac

SEQ ID NO: 428727 - DNA, 25 bp, Homo sapien
tactccacggccgacaggatttgcc

SEQ ID NO: 428728 - DNA, 25 bp, Homo sapien
caggtgcccgttggaagtcaaataa

SEQ ID NO: 428729 - DNA, 25 bp, Homo sapien
ttgccagaacttcttccgcgcctcg

SEQ ID NO: 428730 - DNA, 25 bp, Homo sapien
gatactgaaaacgagtgtggcttac

SEQ ID NO: 428731 - DNA, 25 bp, Homo sapien
tttcaacagatactgaaaacgagtg

SEQ ID NO: 428732 - DNA, 25 bp, Homo sapien
agacgcgttcgtgccattggttttc

SEQ ID NO: 428733 - DNA, 25 bp, Homo sapien
actggccgcgcaaatccagacgcgt

SEQ ID NO: 428734 - DNA, 25 bp, Homo sapien
ttcagtgacgatgtaaagcatgtcc

SEQ ID NO: 428735 - DNA, 25 bp, Homo sapien
gacgatgtaaagcatgtcctttgtt

SEQ ID NO: 428736 - DNA, 25 bp, Homo sapien
ttagcaaattcagtgacgatgtaaa

SEQ ID NO: 428737 - DNA, 25 bp, Homo sapien
caaattcagtgacgatgtaaagcat

SEQ ID NO: 428738 - DNA, 25 bp, Homo sapien
taacacatttgccaggattagcaga

SEQ ID NO: 428739 - DNA, 25 bp, Homo sapien
gcagacttatgctgttggaaataaa

SEQ ID NO: 428740 - DNA, 25 bp, Homo sapien
accaaatgcccaacttccacacact

SEQ ID NO: 428741 - DNA, 25 bp, Homo sapien
aagccaccttcagaaattgcagact

SEQ ID NO: 428742 - DNA, 25 bp, Homo sapien
gcttgaatctaatcgtgttttatca

SEQ ID NO: 428743 - DNA, 25 bp, Homo sapien
gaacctcacgatagattttctccaa

SEQ ID NO: 428744 - DNA, 25 bp, Homo sapien
gatgtgtggatggttcagaagcttc

SEQ ID NO: 428745 - DNA, 25 bp, Homo sapien
tctccaaattgcttgaatctaatcg

SEQ ID NO: 428746 - DNA, 25 bp, Homo sapien
tatttgcaggctcactttacagggt

SEQ ID NO: 428747 - DNA, 25 bp, Homo sapien
caatatatgtccaaattatgcagca

SEQ ID NO: 428748 - DNA, 25 bp, Homo sapien
tagctctgagtccatgaaccactgc

SEQ ID NO: 428749 - DNA, 25 bp, Homo sapien
gaaccactgcaatcttaggttggtc

SEQ ID NO: 428750 - DNA, 25 bp, Homo sapien
aagcctggagcagtgaatctgcatg

SEQ ID NO: 428751 - DNA, 25 bp, Homo sapien
cacgacaatcaagcctggagcagtg

SEQ ID NO: 428752 - DNA, 25 bp, Homo sapien
agcagtgaatctgcatggggtccac

SEQ ID NO: 428753 - DNA, 25 bp, Homo sapien
gcatggggtccacccgccaaaggtc

SEQ ID NO: 428754 - DNA, 25 bp, Homo sapien
cctttgcccagggtccgctcgatgt

SEQ ID NO: 428755 - DNA, 25 bp, Homo sapien
gcgctgaactccgacatgataacca

SEQ ID NO: 428756 - DNA, 25 bp, Homo sapien
gttttggtgactcgatgccgcgcca

SEQ ID NO: 428757 - DNA, 25 bp, Homo sapien
tccgctcgatgtcgtaaaaacccac

SEQ ID NO: 428758 - DNA, 25 bp, Homo sapien
gctcgggtgcctactgctccggctg

SEQ ID NO: 428759 - DNA, 25 bp, Homo sapien
ggcgctgctcgggtgcctactgctc

SEQ ID NO: 428760 - DNA, 25 bp, Homo sapien
ctggcgctgctcgggtgcctactgc

SEQ ID NO: 428761 - DNA, 25 bp, Homo sapien
ctgctcgggtgcctactgctccggc

SEQ ID NO: 428762 - DNA, 25 bp, Homo sapien
taagatgatgagtaagaaaagaatg

SEQ ID NO: 428763 - DNA, 25 bp, Homo sapien
gatttgccaggcgtggactgagcga

SEQ ID NO: 428764 - DNA, 25 bp, Homo sapien
gcggagacagtaacagcataagatg

SEQ ID NO: 428765 - DNA, 25 bp, Homo sapien
gagcgaggaccttccctgagaacac

SEQ ID NO: 428766 - DNA, 25 bp, Homo sapien
cacgattgggaagacagacccagtg

SEQ ID NO: 428767 - DNA, 25 bp, Homo sapien
gggggtccttggcgccgtccacatc

SEQ ID NO: 428768 - DNA, 25 bp, Homo sapien
gtgggggtccttggcgccgtccaca

SEQ ID NO: 428769 - DNA, 25 bp, Homo sapien
ccacgattgggaagacagacccagt

SEQ ID NO: 428770 - DNA, 25 bp, Homo sapien
gaaaacgatgaaatgctccctccac

SEQ ID NO: 428771 - DNA, 25 bp, Homo sapien
tcagctgcatctatgggaaaacgat

SEQ ID NO: 428772 - DNA, 25 bp, Homo sapien
ggccttggagattgaagcgtttcac

SEQ ID NO: 428773 - DNA, 25 bp, Homo sapien
cactgccgggccttctcttataaag

SEQ ID NO: 428774 - DNA, 25 bp, Homo sapien
gcacaccaccgtctcgctggcattt

SEQ ID NO: 428775 - DNA, 25 bp, Homo sapien
accaccgtctcgctggcatttccac

SEQ ID NO: 428776 - DNA, 25 bp, Homo sapien
gtctcgctggcatttccaccgtggt

SEQ ID NO: 428777 - DNA, 25 bp, Homo sapien
cagcacaccaccgtctcgctggcat

SEQ ID NO: 428778 - DNA, 25 bp, Homo sapien
tgacttgttcggagtgtttcttcac

SEQ ID NO: 428779 - DNA, 25 bp, Homo sapien
ctccttgacttgttcggagtgtttc

SEQ ID NO: 428780 - DNA, 25 bp, Homo sapien
tcctggagtaaccagagggctgagc

SEQ ID NO: 428781 - DNA, 25 bp, Homo sapien
ttgttcggagtgtttcttcactgac

SEQ ID NO: 428782 - DNA, 25 bp, Homo sapien
gtatttaggacccagcctactccag

SEQ ID NO: 428783 - DNA, 25 bp, Homo sapien
cagcctcctggcgagattcctttca

SEQ ID NO: 428784 - DNA, 25 bp, Homo sapien
gggacacctgtcagtcgttggctta

SEQ ID NO: 428785 - DNA, 25 bp, Homo sapien
gtatggtctcactctaactagttaa

SEQ ID NO: 428786 - DNA, 25 bp, Homo sapien
tcatgtgtcagaagcttgatcccca

SEQ ID NO: 428787 - DNA, 25 bp, Homo sapien
ggtacgaccctcacaagtggattaa

SEQ ID NO: 428788 - DNA, 25 bp, Homo sapien
caggcttcaggttgagctcgaccca

SEQ ID NO: 428789 - DNA, 25 bp, Homo sapien
gggcccaggatactacaggcttcag

SEQ ID NO: 428790 - DNA, 25 bp, Homo sapien
ctcggcccgcggcaaatgccgaatg

SEQ ID NO: 428791 - DNA, 25 bp, Homo sapien
caaatgccgaatgccggtgctggga

SEQ ID NO: 428792 - DNA, 25 bp, Homo sapien
cctgactgggactgtacggggacgc

SEQ ID NO: 428793 - DNA, 25 bp, Homo sapien
cccgcggcaaatgccgaatgccggt

SEQ ID NO: 428794 - DNA, 25 bp, Homo sapien
gcagcgggcagcaggtcatgggtat

SEQ ID NO: 428795 - DNA, 25 bp, Homo sapien
aatctgaggcccaccagcagcgggc

SEQ ID NO: 428796 - DNA, 25 bp, Homo sapien
tatggtcgcggacttggaggcccag

SEQ ID NO: 428797 - DNA, 25 bp, Homo sapien
tccctctttccgggaaatctgaggc

SEQ ID NO: 428798 - DNA, 25 bp, Homo sapien
aacctgagagctcatgtccacgaca

SEQ ID NO: 428799 - DNA, 25 bp, Homo sapien
gcactgctcgttcccgcggccgctc

SEQ ID NO: 428800 - DNA, 25 bp, Homo sapien
agagctcatgtccacgacagggcca

SEQ ID NO: 428801 - DNA, 25 bp, Homo sapien
atgtccacgacagggccagccagtg

SEQ ID NO: 428802 - DNA, 25 bp, Homo sapien
caagtcacgtcggtttgtggcggca

SEQ ID NO: 428803 - DNA, 25 bp, Homo sapien
tcaccaagtcacgtcggtttgtggc

SEQ ID NO: 428804 - DNA, 25 bp, Homo sapien
gttcaccaagtcacgtcggtttgtg

SEQ ID NO: 428805 - DNA, 25 bp, Homo sapien
accaagtcacgtcggtttgtggcgg

SEQ ID NO: 428806 - DNA, 25 bp, Homo sapien
atcctgcggaggaattcagccggcc

SEQ ID NO: 428807 - DNA, 25 bp, Homo sapien
tggtattgattttctccacggagga

SEQ ID NO: 428808 - DNA, 25 bp, Homo sapien
tgcggaggaattcagccggcccctc

SEQ ID NO: 428809 - DNA, 25 bp, Homo sapien
aggacccagcagtcacggcccgtgt

SEQ ID NO: 428810 - DNA, 25 bp, Homo sapien
ccgagggagccggtgacttggctct

SEQ ID NO: 428811 - DNA, 25 bp, Homo sapien
ggctctgatggtgccgggacccagc

SEQ ID NO: 428812 - DNA, 25 bp, Homo sapien
taacctgcgtccacatgtagtcgcc

SEQ ID NO: 428813 - DNA, 25 bp, Homo sapien
acccagccccggcatgttcagaatc

SEQ ID NO: 428814 - DNA, 25 bp, Homo sapien
tatacagaccgaagcatgtggcatg

SEQ ID NO: 428815 - DNA, 25 bp, Homo sapien
tgatggcagttgtctcttgcacgct

SEQ ID NO: 428816 - DNA, 25 bp, Homo sapien
tgccatgtgcagtgaacccctggac

SEQ ID NO: 428817 - DNA, 25 bp, Homo sapien
tgcgtgccactttgccggatttgga

SEQ ID NO: 428818 - DNA, 25 bp, Homo sapien
agagaagaccctgcgtccaagtcct

SEQ ID NO: 428819 - DNA, 25 bp, Homo sapien
tgccgtagctgcttgcagcccttct

SEQ ID NO: 428820 - DNA, 25 bp, Homo sapien
aatgagagttcccatcgggtgtgcc

SEQ ID NO: 428821 - DNA, 25 bp, Homo sapien
tgtgccaccctctgtgtgacgggga

SEQ ID NO: 428822 - DNA, 25 bp, Homo sapien
gacgtcctcctgagtccatgaactt

SEQ ID NO: 428823 - DNA, 25 bp, Homo sapien
acgtcctcctgagtccatgaacttc

SEQ ID NO: 428824 - DNA, 25 bp, Homo sapien
cgtcctcctgagtccatgaacttct

SEQ ID NO: 428825 - DNA, 25 bp, Homo sapien
ccatgaacttcttgacggttctcat

SEQ ID NO: 428826 - DNA, 25 bp, Homo sapien
gggcaatcgccgctgttggtttcat

SEQ ID NO: 428827 - DNA, 25 bp, Homo sapien
gtcaggggcctctttcgggccgcca

SEQ ID NO: 428828 - DNA, 25 bp, Homo sapien
tttcgggccgccattgccttagcag

SEQ ID NO: 428829 - DNA, 25 bp, Homo sapien
ttagcagcgccaagttctttctggg

SEQ ID NO: 428830 - DNA, 25 bp, Homo sapien
tcgtccttggagtgcctggacttaa

SEQ ID NO: 428831 - DNA, 25 bp, Homo sapien
taatcgtccttggagtgcctggact

SEQ ID NO: 428832 - DNA, 25 bp, Homo sapien
ccttggagtgcctggacttaatcat

SEQ ID NO: 428833 - DNA, 25 bp, Homo sapien
ggagtgcctggacttaatcattaag

SEQ ID NO: 428834 - DNA, 25 bp, Homo sapien
cgatgtatcggtaaaatgaaaactg

SEQ ID NO: 428835 - DNA, 25 bp, Homo sapien
cagcttgtaaaggatggcgcctggc

SEQ ID NO: 428836 - DNA, 25 bp, Homo sapien
cagggacattttgctgaaacagctt

SEQ ID NO: 428837 - DNA, 25 bp, Homo sapien
gaagctccgtactctctgatcgatg

SEQ ID NO: 428838 - DNA, 25 bp, Homo sapien
agagcagccccgcactctagtccat

SEQ ID NO: 428839 - DNA, 25 bp, Homo sapien
gctgcagcgggctgcgttcaaccca

SEQ ID NO: 428840 - DNA, 25 bp, Homo sapien
agcaggacaacccttgccacaggca

SEQ ID NO: 428841 - DNA, 25 bp, Homo sapien
cactctagtccattgaaaagcctgg

SEQ ID NO: 428842 - DNA, 25 bp, Homo sapien
gaggaagcaactgacaaaacgtgtc

SEQ ID NO: 428843 - DNA, 25 bp, Homo sapien
aggaagcaactgacaaaacgtgtct

SEQ ID NO: 428844 - DNA, 25 bp, Homo sapien
ggaagcaactgacaaaacgtgtctc

SEQ ID NO: 428845 - DNA, 25 bp, Homo sapien
agaggaagcaactgacaaaacgtgt

SEQ ID NO: 428846 - DNA, 25 bp, Homo sapien
tcaggctggcagattggagcacacc

SEQ ID NO: 428847 - DNA, 25 bp, Homo sapien
ggcagcacgccatcagtctttgaaa

SEQ ID NO: 428848 - DNA, 25 bp, Homo sapien
cttgtttcacgggtgtgtggcctcc

SEQ ID NO: 428849 - DNA, 25 bp, Homo sapien
aagaatgttccgctgcagatccggc

SEQ ID NO: 428850 - DNA, 25 bp, Homo sapien
tccagtgtggctcagacaaacacaa

SEQ ID NO: 428851 - DNA, 25 bp, Homo sapien
cagaatgtgcttgctggtcagagaa

SEQ ID NO: 428852 - DNA, 25 bp, Homo sapien
tgcaccaagcatggcaaccctctag

SEQ ID NO: 428853 - DNA, 25 bp, Homo sapien
tcacacctcaaaggttctcacggag

SEQ ID NO: 428854 - DNA, 25 bp, Homo sapien
cccccagctccgcatgtcaggtttg

SEQ ID NO: 428855 - DNA, 25 bp, Homo sapien
tgcccccagctccgcatgtcaggtt

SEQ ID NO: 428856 - DNA, 25 bp, Homo sapien
ctgcccccagctccgcatgtcaggt

SEQ ID NO: 428857 - DNA, 25 bp, Homo sapien
gcccccagctccgcatgtcaggttt

SEQ ID NO: 428858 - DNA, 25 bp, Homo sapien
gatgggcccatagtgctgctctgct

SEQ ID NO: 428859 - DNA, 25 bp, Homo sapien
gaataacgactgttggcggctctgt

SEQ ID NO: 428860 - DNA, 25 bp, Homo sapien
tgagtgggcataggcaggtacaccc

SEQ ID NO: 428861 - DNA, 25 bp, Homo sapien
gtccgcaatgacaagaacaccctgg

SEQ ID NO: 428862 - DNA, 25 bp, Homo sapien
cagaggttcagagtgagcgcactgt

SEQ ID NO: 428863 - DNA, 25 bp, Homo sapien
gagatgcaggcccatcgtgtgcaca

SEQ ID NO: 428864 - DNA, 25 bp, Homo sapien
cctcgtgtttcctagcagatagtgg

SEQ ID NO: 428865 - DNA, 25 bp, Homo sapien
cctagcagatagtgggaagagatgc

SEQ ID NO: 428866 - DNA, 25 bp, Homo sapien
tcacgcaagcctcgggcatgacgtc

SEQ ID NO: 428867 - DNA, 25 bp, Homo sapien
ttcccatcgggcttctcgatccggg

SEQ ID NO: 428868 - DNA, 25 bp, Homo sapien
cgatccggggtgttggtgcctccca

SEQ ID NO: 428869 - DNA, 25 bp, Homo sapien
gcatgacgtccttcccagacattct

SEQ ID NO: 428870 - DNA, 25 bp, Homo sapien
gcagacatgatacatgacaactcac

SEQ ID NO: 428871 - DNA, 25 bp, Homo sapien
tccacacttcactcgaagtcacaaa

SEQ ID NO: 428872 - DNA, 25 bp, Homo sapien
aggcagggtctaagtgcttccagcg

SEQ ID NO: 428873 - DNA, 25 bp, Homo sapien
tcgaagtcacaaagcaggatctgca

SEQ ID NO: 428874 - DNA, 25 bp, Homo sapien
taagtgcttccagcgcttccacact

SEQ ID NO: 428875 - DNA, 25 bp, Homo sapien
catatgcatcataaccatcccagga

SEQ ID NO: 428876 - DNA, 25 bp, Homo sapien
caaccgtaaggccagacctcaatgt

SEQ ID NO: 428877 - DNA, 25 bp, Homo sapien
cagaagggacaatcaaaaccaaccg

SEQ ID NO: 428878 - DNA, 25 bp, Homo sapien
tatcaagagcggcaggacataagcc

SEQ ID NO: 428879 - DNA, 25 bp, Homo sapien
aagacacggcgctggaaggctctgg

SEQ ID NO: 428880 - DNA, 25 bp, Homo sapien
gtgggttccctctcactcccggtca

SEQ ID NO: 428881 - DNA, 25 bp, Homo sapien
ctccagatgctccaaggggaagaca

SEQ ID NO: 428882 - DNA, 25 bp, Homo sapien
ctctgctgaacgtcaggcgggtgct

SEQ ID NO: 428883 - DNA, 25 bp, Homo sapien
gccctctaaggacaagcgcatgaga

SEQ ID NO: 428884 - DNA, 25 bp, Homo sapien
cacagtcacgtgagacggaggcaga

SEQ ID NO: 428885 - DNA, 25 bp, Homo sapien
gatccaaggacacgttctgagaagg

SEQ ID NO: 428886 - DNA, 25 bp, Homo sapien
aagtctggccccaggactcagagag

SEQ ID NO: 428887 - DNA, 25 bp, Homo sapien
tgtttgttcatcgaggtttcccgct

SEQ ID NO: 428888 - DNA, 25 bp, Homo sapien
cgaggtttcccgctgctgacggttg

SEQ ID NO: 428889 - DNA, 25 bp, Homo sapien
gacggttgttttgacttgctcagag

SEQ ID NO: 428890 - DNA, 25 bp, Homo sapien
cactctcccggtgtttgttcatcga

SEQ ID NO: 428891 - DNA, 25 bp, Homo sapien
ggcccaggaggtgcgccagctctct

SEQ ID NO: 428892 - DNA, 25 bp, Homo sapien
gaaggagcctttatgcaatccagga

SEQ ID NO: 428893 - DNA, 25 bp, Homo sapien
ctatgtaaggagaaggagcctttat

SEQ ID NO: 428894 - DNA, 25 bp, Homo sapien
ttatgcaatccaggaagcccgcgtc

SEQ ID NO: 428895 - DNA, 25 bp, Homo sapien
aagttccagtcattgtcagctgctg

SEQ ID NO: 428896 - DNA, 25 bp, Homo sapien
tgggacactgcggtactgaatcagc

SEQ ID NO: 428897 - DNA, 25 bp, Homo sapien
tgaatcagcccgttggagtcatcca

SEQ ID NO: 428898 - DNA, 25 bp, Homo sapien
tgtctggccatggagacgttcccca

SEQ ID NO: 428899 - DNA, 25 bp, Homo sapien
cagagccaggcattcgttcacacgc

SEQ ID NO: 428900 - DNA, 25 bp, Homo sapien
caggcattcgttcacacgcatcagc

SEQ ID NO: 428901 - DNA, 25 bp, Homo sapien
gagccaggcattcgttcacacgcat

SEQ ID NO: 428902 - DNA, 25 bp, Homo sapien
cattcgttcacacgcatcagccatt

SEQ ID NO: 428903 - DNA, 25 bp, Homo sapien
cacaaggcgagtagccatggagcag

SEQ ID NO: 428904 - DNA, 25 bp, Homo sapien
gcaaggcacgagaggcacagagaac

SEQ ID NO: 428905 - DNA, 25 bp, Homo sapien
atctgtgcacaaggcgagtagccat

SEQ ID NO: 428906 - DNA, 25 bp, Homo sapien
cgagtagccatggagcagctcctcc

SEQ ID NO: 428907 - DNA, 25 bp, Homo sapien
ttaagtgtgaatcagaggctgctcc

SEQ ID NO: 428908 - DNA, 25 bp, Homo sapien
cagtcatcgcacagagcaaggcgag

SEQ ID NO: 428909 - DNA, 25 bp, Homo sapien
catttaacctgaaaagttgggctgc

SEQ ID NO: 428910 - DNA, 25 bp, Homo sapien
cagcaacttagggagctccactgga

SEQ ID NO: 428911 - DNA, 25 bp, Homo sapien
agacatggaccacttttccagaagg

SEQ ID NO: 428912 - DNA, 25 bp, Homo sapien
taggtgaacctacaggtcatggtct

SEQ ID NO: 428913 - DNA, 25 bp, Homo sapien
tgtcatccgaaatagcaggttcacc

SEQ ID NO: 428914 - DNA, 25 bp, Homo sapien
cagcaagaagctgccctaagcaagc

SEQ ID NO: 428915 - DNA, 25 bp, Homo sapien
tacacattatgctccagagtgcgga

SEQ ID NO: 428916 - DNA, 25 bp, Homo sapien
gggttgcggctcttggacattgcca

SEQ ID NO: 428917 - DNA, 25 bp, Homo sapien
tcagtacatgaaggcacacctctgc

SEQ ID NO: 428918 - DNA, 25 bp, Homo sapien
tccggaactcagaggccgacttgga

SEQ ID NO: 428919 - DNA, 25 bp, Homo sapien
gacaaatgcttctggtaagcatacg

SEQ ID NO: 428920 - DNA, 25 bp, Homo sapien
gaaggtctcaagtcacaggtctctg

SEQ ID NO: 428921 - DNA, 25 bp, Homo sapien
gcactcggaaagctcccctggctga

SEQ ID NO: 428922 - DNA, 25 bp, Homo sapien
gccactcagtcacatctatcagcag

SEQ ID NO: 428923 - DNA, 25 bp, Homo sapien
gatgctattccctcaaccttcacag

SEQ ID NO: 428924 - DNA, 25 bp, Homo sapien
taccacacccagcaagggattttac

SEQ ID NO: 428925 - DNA, 25 bp, Homo sapien
tgaggacgtgaaatctggaaaggcc

SEQ ID NO: 428926 - DNA, 25 bp, Homo sapien
gaaggaatgatcagacttgaggacg

SEQ ID NO: 428927 - DNA, 25 bp, Homo sapien
ggatgtcagtggtgtaatccgactg

SEQ ID NO: 428928 - DNA, 25 bp, Homo sapien
tcagtggtgtaatccgactgtgaaa

SEQ ID NO: 428929 - DNA, 25 bp, Homo sapien
tgtaatccgactgtgaaagatcagt

SEQ ID NO: 428930 - DNA, 25 bp, Homo sapien
tggtgtaatccgactgtgaaagatc

SEQ ID NO: 428931 - DNA, 25 bp, Homo sapien
ctttgctcgattcccaacctttcgg

SEQ ID NO: 428932 - DNA, 25 bp, Homo sapien
catctcggggctcatctgcatccag

SEQ ID NO: 428933 - DNA, 25 bp, Homo sapien
tagtttcgtttgctaagtcgttgga

SEQ ID NO: 428934 - DNA, 25 bp, Homo sapien
gggcaacctcgtgatgagtagtttc

SEQ ID NO: 428935 - DNA, 25 bp, Homo sapien
gaagggtctgtgctgcgggagatga

SEQ ID NO: 428936 - DNA, 25 bp, Homo sapien
ggcctgttgcgggagatgagggccg

SEQ ID NO: 428937 - DNA, 25 bp, Homo sapien
gtggtcagaagggtctgtgctgcgg

SEQ ID NO: 428938 - DNA, 25 bp, Homo sapien
cagaagggtctgtgctgcgggagat

SEQ ID NO: 428939 - DNA, 25 bp, Homo sapien
ctgctgaaggagatgaaggcctgct

SEQ ID NO: 428940 - DNA, 25 bp, Homo sapien
atgaagggcctgctgagggagatga

SEQ ID NO: 428941 - DNA, 25 bp, Homo sapien
gcctgctgagggagatgaagggcct

SEQ ID NO: 428942 - DNA, 25 bp, Homo sapien
ctgctgagggagatgaagggcctgc

SEQ ID NO: 428943 - DNA, 25 bp, Homo sapien
ggcctgctgcgggagatgagtacct

SEQ ID NO: 428944 - DNA, 25 bp, Homo sapien
gagtacctgttgagggagatgaggg

SEQ ID NO: 428945 - DNA, 25 bp, Homo sapien
ctgctgcgggagatgagtacctgtt

SEQ ID NO: 428946 - DNA, 25 bp, Homo sapien
ggggatgagggcctgctgcgggaga

SEQ ID NO: 428947 - DNA, 25 bp, Homo sapien
ggagatgaggacctgctgagggaga

SEQ ID NO: 428948 - DNA, 25 bp, Homo sapien
gatgaggacctgctgagggagatga

SEQ ID NO: 428949 - DNA, 25 bp, Homo sapien
ggcctgagggagatgaagggcctgc

SEQ ID NO: 428950 - DNA, 25 bp, Homo sapien
atgaaggcctgctgaaggagatgaa

SEQ ID NO: 428951 - DNA, 25 bp, Homo sapien
agatatgaaaacctgctaagggaga

SEQ ID NO: 428952 - DNA, 25 bp, Homo sapien
agggagatatgaaaacctgctaagg

SEQ ID NO: 428953 - DNA, 25 bp, Homo sapien
gagatatgaaaacctgctaagggag

SEQ ID NO: 428954 - DNA, 25 bp, Homo sapien
ggagatatgaaaacctgctaaggga

SEQ ID NO: 428955 - DNA, 25 bp, Homo sapien
gactctcgctgatgtatttcaagcc

SEQ ID NO: 428956 - DNA, 25 bp, Homo sapien
attgtatagggacatcagcattagc

SEQ ID NO: 428957 - DNA, 25 bp, Homo sapien
aaagggatgaatcctggactctcgc

SEQ ID NO: 428958 - DNA, 25 bp, Homo sapien
caaattgatgcttacattgtatagg

SEQ ID NO: 428959 - DNA, 25 bp, Homo sapien
tgttggttaggctctcgaactcctg

SEQ ID NO: 428960 - DNA, 25 bp, Homo sapien
tttcaccatgttggttaggctctcg

SEQ ID NO: 428961 - DNA, 25 bp, Homo sapien
cgtgctgagattacaggcatgagcc

SEQ ID NO: 428962 - DNA, 25 bp, Homo sapien
acgtgctgagattacaggcatgagc

SEQ ID NO: 428963 - DNA, 25 bp, Homo sapien
tctaaatggcacaagtgtgaggcag

SEQ ID NO: 428964 - DNA, 25 bp, Homo sapien
tgacagccagctaggacacacataa

SEQ ID NO: 428965 - DNA, 25 bp, Homo sapien
aggtttagacaaggccacatagcac

SEQ ID NO: 428966 - DNA, 25 bp, Homo sapien
gggtttcagaacaagggagcactaa

SEQ ID NO: 428967 - DNA, 25 bp, Homo sapien
acagagaaatgggacgataccatca

SEQ ID NO: 428968 - DNA, 25 bp, Homo sapien
gaaatgggacgataccatcaccctc

SEQ ID NO: 428969 - DNA, 25 bp, Homo sapien
tactctcactgatgacattcaactg

SEQ ID NO: 428970 - DNA, 25 bp, Homo sapien
actttcacaagccatactctcactg

SEQ ID NO: 428971 - DNA, 25 bp, Homo sapien
caggaagtaaagccgcctgccggga

SEQ ID NO: 428972 - DNA, 25 bp, Homo sapien
gaagtaaagccgcctgccgggacac

SEQ ID NO: 428973 - DNA, 25 bp, Homo sapien
taaagccgcctgccgggacacccac

SEQ ID NO: 428974 - DNA, 25 bp, Homo sapien
gtaaagccgcctgccgggacaccca

SEQ ID NO: 428975 - DNA, 25 bp, Homo sapien
tttgagtttggtacactgtcctggc

SEQ ID NO: 428976 - DNA, 25 bp, Homo sapien
ttaaccaagaattcacgaccacatg

SEQ ID NO: 428977 - DNA, 25 bp, Homo sapien
tggtacactgtcctggcttcaagtc

SEQ ID NO: 428978 - DNA, 25 bp, Homo sapien
cgaccacatgctatagcagcaacat

SEQ ID NO: 428979 - DNA, 25 bp, Homo sapien
caattccagccagagcgaaaacaaa

SEQ ID NO: 428980 - DNA, 25 bp, Homo sapien
aattccagccagagcgaaaacaaac

SEQ ID NO: 428981 - DNA, 25 bp, Homo sapien
tgacaattccagccagagcgaaaac

SEQ ID NO: 428982 - DNA, 25 bp, Homo sapien
gacaattccagccagagcgaaaaca

SEQ ID NO: 428983 - DNA, 25 bp, Homo sapien
tcctggacatcaccgtctaacgact

SEQ ID NO: 428984 - DNA, 25 bp, Homo sapien
gtctaacgacttcacaaaactctcc

SEQ ID NO: 428985 - DNA, 25 bp, Homo sapien
tttcatccgaatccagctcctggac

SEQ ID NO: 428986 - DNA, 25 bp, Homo sapien
aaaactctccattgtttgaccagtg

SEQ ID NO: 428987 - DNA, 25 bp, Homo sapien
acaagagggtacacgctgctgctcc

SEQ ID NO: 428988 - DNA, 25 bp, Homo sapien
tttctgtacaatactctgcctgctg

SEQ ID NO: 428989 - DNA, 25 bp, Homo sapien
tcctcccaaaatggccttgacgact

SEQ ID NO: 428990 - DNA, 25 bp, Homo sapien
ggagttgctgcttcgcttcattcaa

SEQ ID NO: 428991 - DNA, 25 bp, Homo sapien
tatgttgtcggcctgcacggtttcc

SEQ ID NO: 428992 - DNA, 25 bp, Homo sapien
cttctctcttatgttgtcggcctgc

SEQ ID NO: 428993 - DNA, 25 bp, Homo sapien
tgcacggtttccaggcgggctttaa

SEQ ID NO: 428994 - DNA, 25 bp, Homo sapien
ccaggcgggctttaaagtgctcaca

SEQ ID NO: 428995 - DNA, 25 bp, Homo sapien
ttttctacaatctttaatttctgga

SEQ ID NO: 428996 - DNA, 25 bp, Homo sapien
tcccgtatttgcatcacttcagttg

SEQ ID NO: 428997 - DNA, 25 bp, Homo sapien
tctgggtaagaagtcccgtatttgc

SEQ ID NO: 428998 - DNA, 25 bp, Homo sapien
gttgtcagccgttccagatccttct

SEQ ID NO: 428999 - DNA, 25 bp, Homo sapien
cctcagcggcgcccgcttcgcccat

SEQ ID NO: 429000 - DNA, 25 bp, Homo sapien
ctcctcagcggcgcccgcttcgccc

SEQ ID NO: 429001 - DNA, 25 bp, Homo sapien
cctcctcagcggcgcccgcttcgcc

SEQ ID NO: 429002 - DNA, 25 bp, Homo sapien
tcctcagcggcgcccgcttcgccca

SEQ ID NO: 429003 - DNA, 25 bp, Homo sapien
ggtcgggaacggagagccgccaggc

SEQ ID NO: 429004 - DNA, 25 bp, Homo sapien
tcacgccagaaagcgcgggaacgaa

SEQ ID NO: 429005 - DNA, 25 bp, Homo sapien
ccagaatttgcgcagtattctcggc

SEQ ID NO: 429006 - DNA, 25 bp, Homo sapien
ctccgttcgcctgagcgtcggcgcg

SEQ ID NO: 429007 - DNA, 25 bp, Homo sapien
agagcgaggagtggccttggcgagg

SEQ ID NO: 429008 - DNA, 25 bp, Homo sapien
ctagagagcgaggagtggccttggc

SEQ ID NO: 429009 - DNA, 25 bp, Homo sapien
gccttggcgaggtccctctttggct

SEQ ID NO: 429010 - DNA, 25 bp, Homo sapien
ccttggcgaggtccctctttggctc

SEQ ID NO: 429011 - DNA, 25 bp, Homo sapien
cggcgccacgtgcacacgggctggg

SEQ ID NO: 429012 - DNA, 25 bp, Homo sapien
tggcaaccgaaaggcagcgccggcg

SEQ ID NO: 429013 - DNA, 25 bp, Homo sapien
tcgccgtctacagcctgaattttgg

SEQ ID NO: 429014 - DNA, 25 bp, Homo sapien
gctcactcccagagcgcgctgcgag

SEQ ID NO: 429015 - DNA, 25 bp, Homo sapien
tgaagtcttgaagcgaaatggctgg

SEQ ID NO: 429016 - DNA, 25 bp, Homo sapien
catttgagttagcatgtggtagcct

SEQ ID NO: 429017 - DNA, 25 bp, Homo sapien
gcatgcgtttggttctttagccgaa

SEQ ID NO: 429018 - DNA, 25 bp, Homo sapien
cttgtagagtaccaatgagaagctc

SEQ ID NO: 429019 - DNA, 25 bp, Homo sapien
cacagcttacccatgcttttgaagt

SEQ ID NO: 429020 - DNA, 25 bp, Homo sapien
tgcctactgtgtactgacataattc

SEQ ID NO: 429021 - DNA, 25 bp, Homo sapien
gggaaatggttagatcacagcttac

SEQ ID NO: 429022 - DNA, 25 bp, Homo sapien
tgcatttgaagttgcaggcccatcc

SEQ ID NO: 429023 - DNA, 25 bp, Homo sapien
tgttgctcaataagtcccagggtca

SEQ ID NO: 429024 - DNA, 25 bp, Homo sapien
cagttgctgcacacgcaatgagtgt

SEQ ID NO: 429025 - DNA, 25 bp, Homo sapien
ctctgagagccaagtacgagacccg

SEQ ID NO: 429026 - DNA, 25 bp, Homo sapien
ccctggcagcctattgtaaagagga

SEQ ID NO: 429027 - DNA, 25 bp, Homo sapien
cgtctgcacggtgagagggcacggg

SEQ ID NO: 429028 - DNA, 25 bp, Homo sapien
acacggttcgggctggcgtgcagct

SEQ ID NO: 429029 - DNA, 25 bp, Homo sapien
gtggcttccgcagctaccgtctgca

SEQ ID NO: 429030 - DNA, 25 bp, Homo sapien
tgcagattcaaagtgagcggctcct

SEQ ID NO: 429031 - DNA, 25 bp, Homo sapien
cgggccatataatccaacattgttg

SEQ ID NO: 429032 - DNA, 25 bp, Homo sapien
cctaagtaaaattgccaagtggact

SEQ ID NO: 429033 - DNA, 25 bp, Homo sapien
tgtcctataaatgcacctcctgtca

SEQ ID NO: 429034 - DNA, 25 bp, Homo sapien
gatgggtcatatagccaaacgggcc

SEQ ID NO: 429035 - DNA, 25 bp, Homo sapien
aaaccaggcgtgtatgctgatggca

SEQ ID NO: 429036 - DNA, 25 bp, Homo sapien
ggccatggcgattctacagctaaag

SEQ ID NO: 429037 - DNA, 25 bp, Homo sapien
gggatctcagtagagggaaccgcac

SEQ ID NO: 429038 - DNA, 25 bp, Homo sapien
gagtcacatgtggttgcagctatga

SEQ ID NO: 429039 - DNA, 25 bp, Homo sapien
tgggctttgtcctgtgcacacttca

SEQ ID NO: 429040 - DNA, 25 bp, Homo sapien
gggtttgggctttgtcctgtgcaca

SEQ ID NO: 429041 - DNA, 25 bp, Homo sapien
gtttgggctttgtcctgtgcacact

SEQ ID NO: 429042 - DNA, 25 bp, Homo sapien
cagggtttgggctttgtcctgtgca

SEQ ID NO: 429043 - DNA, 25 bp, Homo sapien
gaggaccggcttctggttgatgtgg

SEQ ID NO: 429044 - DNA, 25 bp, Homo sapien
gaggtttccagagcgtgtcggcctc

SEQ ID NO: 429045 - DNA, 25 bp, Homo sapien
catctccatgggcacgttttccttc

SEQ ID NO: 429046 - DNA, 25 bp, Homo sapien
tcagaggcccggatggaccagaggc

SEQ ID NO: 429047 - DNA, 25 bp, Homo sapien
ctgcaggttatgctggtgcgattcc

SEQ ID NO: 429048 - DNA, 25 bp, Homo sapien
ccttctctgcaggttatgctggtgc

SEQ ID NO: 429049 - DNA, 25 bp, Homo sapien
gcagacggcagctgaagccccttct

SEQ ID NO: 429050 - DNA, 25 bp, Homo sapien
gggtgtagggggtccgcagacggca

SEQ ID NO: 429051 - DNA, 25 bp, Homo sapien
cgcagcgccacgtcctggcaaatca

SEQ ID NO: 429052 - DNA, 25 bp, Homo sapien
agtggccccgatcgccaccgcagcg

SEQ ID NO: 429053 - DNA, 25 bp, Homo sapien
ctttcccgagtggccccgatcgcca

SEQ ID NO: 429054 - DNA, 25 bp, Homo sapien
gcagcgccacgtcctggcaaatcat

SEQ ID NO: 429055 - DNA, 25 bp, Homo sapien
acggaatttcactcgtgcagtggca

SEQ ID NO: 429056 - DNA, 25 bp, Homo sapien
gtaatgtgcacctaacgtttcctca

SEQ ID NO: 429057 - DNA, 25 bp, Homo sapien
tcactatcgcttcatggcttgatgg

SEQ ID NO: 429058 - DNA, 25 bp, Homo sapien
cctactgagagacaccttggtggct

SEQ ID NO: 429059 - DNA, 25 bp, Homo sapien
agcttgggcgacatggtgagacctc

SEQ ID NO: 429060 - DNA, 25 bp, Homo sapien
gcttgggcgacatggtgagacctct

SEQ ID NO: 429061 - DNA, 25 bp, Homo sapien
cagcttgggcgacatggtgagacct

SEQ ID NO: 429062 - DNA, 25 bp, Homo sapien
ttgggcgacatggtgagacctcttc

SEQ ID NO: 429063 - DNA, 25 bp, Homo sapien
gattgtgcctcggacgtcagtggac

SEQ ID NO: 429064 - DNA, 25 bp, Homo sapien
agctctaacaagaggccgccgccag

SEQ ID NO: 429065 - DNA, 25 bp, Homo sapien
cggacgtcagtggactggacacagc

SEQ ID NO: 429066 - DNA, 25 bp, Homo sapien
tgcctcggacgtcagtggactggac

SEQ ID NO: 429067 - DNA, 25 bp, Homo sapien
aaagaaagcagactagacgttacca

SEQ ID NO: 429068 - DNA, 25 bp, Homo sapien
tggggcgtgagtgtatagtgaggac

SEQ ID NO: 429069 - DNA, 25 bp, Homo sapien
tagacgttaccagggcctaaggcag

SEQ ID NO: 429070 - DNA, 25 bp, Homo sapien
cagactagacgttaccagggcctaa

SEQ ID NO: 429071 - DNA, 25 bp, Homo sapien
gaatccgccgagtgacttgaggaag

SEQ ID NO: 429072 - DNA, 25 bp, Homo sapien
gagcttgcttggagacacacggtgc

SEQ ID NO: 429073 - DNA, 25 bp, Homo sapien
gcaaattcaagtcggtctgcagacc

SEQ ID NO: 429074 - DNA, 25 bp, Homo sapien
ccacagcatttgtagacaggacaga

SEQ ID NO: 429075 - DNA, 25 bp, Homo sapien
tgtgccctggcgagcaagctttgat

SEQ ID NO: 429076 - DNA, 25 bp, Homo sapien
tctctggcgcaatctgaaacttctc

SEQ ID NO: 429077 - DNA, 25 bp, Homo sapien
ggttctttgagctcgtttcagaggc

SEQ ID NO: 429078 - DNA, 25 bp, Homo sapien
aacccagcatgagaacgcagtgtca

SEQ ID NO: 429079 - DNA, 25 bp, Homo sapien
catcgtggcgtgacagctgtgtcca

SEQ ID NO: 429080 - DNA, 25 bp, Homo sapien
gaatttttatagacagcacctcagt

SEQ ID NO: 429081 - DNA, 25 bp, Homo sapien
cactggttttcaatcggcgtctaaa

SEQ ID NO: 429082 - DNA, 25 bp, Homo sapien
tgcacccggcggaatcttggaattt

SEQ ID NO: 429083 - DNA, 25 bp, Homo sapien
tcagagggcagggttaaaccagcgg

SEQ ID NO: 429084 - DNA, 25 bp, Homo sapien
ttttgtcagcgggtagtgaaattca

SEQ ID NO: 429085 - DNA, 25 bp, Homo sapien
gggacttttgtcagcgggtagtgaa

SEQ ID NO: 429086 - DNA, 25 bp, Homo sapien
tgtcagcgggtagtgaaattcatca

SEQ ID NO: 429087 - DNA, 25 bp, Homo sapien
gcatgttataaaagcttagtctcag

SEQ ID NO: 429088 - DNA, 25 bp, Homo sapien
ttagtctcagagttcatgttaagag

SEQ ID NO: 429089 - DNA, 25 bp, Homo sapien
attctcaagtgggaaatacaacggg

SEQ ID NO: 429090 - DNA, 25 bp, Homo sapien
tgccttccgctggaaattctcaagt

SEQ ID NO: 429091 - DNA, 25 bp, Homo sapien
gcagttctggcatacgctgccggac

SEQ ID NO: 429092 - DNA, 25 bp, Homo sapien
gttcacatcatgaccccggtgcaca

SEQ ID NO: 429093 - DNA, 25 bp, Homo sapien
tctgcacgtgcacgacactgtgtgg

SEQ ID NO: 429094 - DNA, 25 bp, Homo sapien
agaatcacagttgggaaggcaccgg

SEQ ID NO: 429095 - DNA, 25 bp, Homo sapien
tgtaaagagtggtggttaggaacgc

SEQ ID NO: 429096 - DNA, 25 bp, Homo sapien
aagagtcaaagcaccaacatgtaaa

SEQ ID NO: 429097 - DNA, 25 bp, Homo sapien
gggcaggtgtgaatcctgggtccac

SEQ ID NO: 429098 - DNA, 25 bp, Homo sapien
agcttggggccaggacctaagagtc

SEQ ID NO: 429099 - DNA, 25 bp, Homo sapien
ggcacagcccggagatgaagcttat

SEQ ID NO: 429100 - DNA, 25 bp, Homo sapien
taagatcacctattgggaaggaaag

SEQ ID NO: 429101 - DNA, 25 bp, Homo sapien
tattttaggatcacaagtgcacgct

SEQ ID NO: 429102 - DNA, 25 bp, Homo sapien
tctggtagacggaggatgactttgt

SEQ ID NO: 429103 - DNA, 25 bp, Homo sapien
tgaagggccttgtccaaagtcagga

SEQ ID NO: 429104 - DNA, 25 bp, Homo sapien
ggctgaagggccttgtccaaagtca

SEQ ID NO: 429105 - DNA, 25 bp, Homo sapien
ctggctgaagggccttgtccaaagt

SEQ ID NO: 429106 - DNA, 25 bp, Homo sapien
gctgaagggccttgtccaaagtcag

SEQ ID NO: 429107 - DNA, 25 bp, Homo sapien
gtctggtagttagataaggtcaagg

SEQ ID NO: 429108 - DNA, 25 bp, Homo sapien
aataggtcagctcatcatgcttggc

SEQ ID NO: 429109 - DNA, 25 bp, Homo sapien
catgcttggctttgttggtctggta

SEQ ID NO: 429110 - DNA, 25 bp, Homo sapien
gagattggaacactcgcaggtgtac

SEQ ID NO: 429111 - DNA, 25 bp, Homo sapien
ttcttagctccccagaagccctagt

SEQ ID NO: 429112 - DNA, 25 bp, Homo sapien
tgagcgaagcctctgatcccaagtc

SEQ ID NO: 429113 - DNA, 25 bp, Homo sapien
tagcagccagctgaagacaatcttg

SEQ ID NO: 429114 - DNA, 25 bp, Homo sapien
tcctgaaaggccgatggacacacac

SEQ ID NO: 429115 - DNA, 25 bp, Homo sapien
gaatgacacggccttaaacacaggg

SEQ ID NO: 429116 - DNA, 25 bp, Homo sapien
atgaagtagtttgtccccgcgacca

SEQ ID NO: 429117 - DNA, 25 bp, Homo sapien
cacctggctcttgaatgacacggcc

SEQ ID NO: 429118 - DNA, 25 bp, Homo sapien
cttgatgaagtagtttgtccccgcg

SEQ ID NO: 429119 - DNA, 25 bp, Homo sapien
ggctcttcacacaattgtctcttac

SEQ ID NO: 429120 - DNA, 25 bp, Homo sapien
tacaactgaagggacatttaaactg

SEQ ID NO: 429121 - DNA, 25 bp, Homo sapien
tagagtaacttgcacgcatgtgagc

SEQ ID NO: 429122 - DNA, 25 bp, Homo sapien
taaactgtcagcctaataataaagt

SEQ ID NO: 429123 - DNA, 25 bp, Homo sapien
ccaaactgtagtcgggctcctgaag

SEQ ID NO: 429124 - DNA, 25 bp, Homo sapien
gaaacctgtggaccttttatgcaga

SEQ ID NO: 429125 - DNA, 25 bp, Homo sapien
tcggtcaccaaccatgacagcgagg

SEQ ID NO: 429126 - DNA, 25 bp, Homo sapien
gcgcagagcaacaggacgtccattt

SEQ ID NO: 429127 - DNA, 25 bp, Homo sapien
ggctgcgtggcggagggcgccccgc

SEQ ID NO: 429128 - DNA, 25 bp, Homo sapien
gatgtgctgggtctcggcggtggcc

SEQ ID NO: 429129 - DNA, 25 bp, Homo sapien
ctggtcggcgatgtgctgggtctcg

SEQ ID NO: 429130 - DNA, 25 bp, Homo sapien
ggtctcggcggtggccggctgcgtg

SEQ ID NO: 429131 - DNA, 25 bp, Homo sapien
gcgctggggtcacgtgacgcgcggg

SEQ ID NO: 429132 - DNA, 25 bp, Homo sapien
cctcagcccaagtaggcgctggggt

SEQ ID NO: 429133 - DNA, 25 bp, Homo sapien
acgtgacgcgcgggcggaaccaagg

SEQ ID NO: 429134 - DNA, 25 bp, Homo sapien
ttggcggcgacggagggaatctggc

SEQ ID NO: 429135 - DNA, 25 bp, Homo sapien
gtcatccgtggtggaggagtgcatt

SEQ ID NO: 429136 - DNA, 25 bp, Homo sapien
aacaggttgccagacacataggact

SEQ ID NO: 429137 - DNA, 25 bp, Homo sapien
gggactactggcaccgtgcggccag

SEQ ID NO: 429138 - DNA, 25 bp, Homo sapien
ttgtacaaattggggtcttcctatg

SEQ ID NO: 429139 - DNA, 25 bp, Homo sapien
caggaatcatgtggaagacctcggt

SEQ ID NO: 429140 - DNA, 25 bp, Homo sapien
ggatctcctgcaggcataaccaggc

SEQ ID NO: 429141 - DNA, 25 bp, Homo sapien
attttgcatttagggcagcggtgcc

SEQ ID NO: 429142 - DNA, 25 bp, Homo sapien
tagcattgtggattaccccataggg

SEQ ID NO: 429143 - DNA, 25 bp, Homo sapien
catgtgttacgggatcacgcagcac

SEQ ID NO: 429144 - DNA, 25 bp, Homo sapien
tctgactttgtgaccaggacgggaa

SEQ ID NO: 429145 - DNA, 25 bp, Homo sapien
gagaccgagttgttttatttccgca

SEQ ID NO: 429146 - DNA, 25 bp, Homo sapien
gagtgacatcccacggtacagacag

SEQ ID NO: 429147 - DNA, 25 bp, Homo sapien
tttagaagccgatctggctgggccc

SEQ ID NO: 429148 - DNA, 25 bp, Homo sapien
tgaagatctctagctcctgtgaggg

SEQ ID NO: 429149 - DNA, 25 bp, Homo sapien
cagtgaagtcgtttgcagccctagg

SEQ ID NO: 429150 - DNA, 25 bp, Homo sapien
ggctgggcccttgctattccgatct

SEQ ID NO: 429151 - DNA, 25 bp, Homo sapien
tcattgtagagcatctcagcgcccc

SEQ ID NO: 429152 - DNA, 25 bp, Homo sapien
gaacaaacatgctgtgtcctcgctg

SEQ ID NO: 429153 - DNA, 25 bp, Homo sapien
taccagtagatggagacgccagttg

SEQ ID NO: 429154 - DNA, 25 bp, Homo sapien
tcatgcagcgttcagttccccgttg

SEQ ID NO: 429155 - DNA, 25 bp, Homo sapien
tgacctgtaacatctcccggtaggc

SEQ ID NO: 429156 - DNA, 25 bp, Homo sapien
tgctcaaatatgaccgtgacctgta

SEQ ID NO: 429157 - DNA, 25 bp, Homo sapien
tgaagagaacggcaatggccagcgc

SEQ ID NO: 429158 - DNA, 25 bp, Homo sapien
tgagctgctcggagattatccccac

SEQ ID NO: 429159 - DNA, 25 bp, Homo sapien
tacttcctgaaccggattcgccgga

SEQ ID NO: 429160 - DNA, 25 bp, Homo sapien
agctgcaggagactgcctcggagtc

SEQ ID NO: 429161 - DNA, 25 bp, Homo sapien
ccggattcgccggaaggagctgcag

SEQ ID NO: 429162 - DNA, 25 bp, Homo sapien
tgcctcggagtcttcccgcagggac

SEQ ID NO: 429163 - DNA, 25 bp, Homo sapien
caggatctgtttgggcgagtgcctc

SEQ ID NO: 429164 - DNA, 25 bp, Homo sapien
cacccgtgggttctcattgcatgga

SEQ ID NO: 429165 - DNA, 25 bp, Homo sapien
gggattatcccaagcctggccagag

SEQ ID NO: 429166 - DNA, 25 bp, Homo sapien
tctgcaggtgcttcacgaaggctgg

SEQ ID NO: 429167 - DNA, 25 bp, Homo sapien
tgccccacagggacattgagtgaag

SEQ ID NO: 429168 - DNA, 25 bp, Homo sapien
tcccttgatggtcacgtgggtcccg

SEQ ID NO: 429169 - DNA, 25 bp, Homo sapien
aagtcagatccgtgcatgggtccct

SEQ ID NO: 429170 - DNA, 25 bp, Homo sapien
cacaggaggacgttgataaccggcc

SEQ ID NO: 429171 - DNA, 25 bp, Homo sapien
gccggtctctgcagtcaccctcctt

SEQ ID NO: 429172 - DNA, 25 bp, Homo sapien
cagggccggtctctgcagtcaccct

SEQ ID NO: 429173 - DNA, 25 bp, Homo sapien
tggtaccgctgcccagggccggtct

SEQ ID NO: 429174 - DNA, 25 bp, Homo sapien
cctggtaccgctgcccagggccggt

SEQ ID NO: 429175 - DNA, 25 bp, Homo sapien
tagacacacaagcagatgcagacac

SEQ ID NO: 429176 - DNA, 25 bp, Homo sapien
aagcctgaggctttatgcttggtgg

SEQ ID NO: 429177 - DNA, 25 bp, Homo sapien
agagcagtgctgcagcttcgggaat

SEQ ID NO: 429178 - DNA, 25 bp, Homo sapien
acttcctgtgatctccaagcctgag

SEQ ID NO: 429179 - DNA, 25 bp, Homo sapien
ccttggtgaagtcacacgtcttgac

SEQ ID NO: 429180 - DNA, 25 bp, Homo sapien
tgactgctcagctctacaggaactt

SEQ ID NO: 429181 - DNA, 25 bp, Homo sapien
ttcagtcaaacagccggaaggcagc

SEQ ID NO: 429182 - DNA, 25 bp, Homo sapien
ctggaaggaccttgccatcacctgt

SEQ ID NO: 429183 - DNA, 25 bp, Homo sapien
gatgacgtttcctgccaatctgagc

SEQ ID NO: 429184 - DNA, 25 bp, Homo sapien
caatctgagcacctgcacactggaa

SEQ ID NO: 429185 - DNA, 25 bp, Homo sapien
ttctctgagtgtctgcgcacctgcg

SEQ ID NO: 429186 - DNA, 25 bp, Homo sapien
tcgactcaggtctcagtgatcacag

SEQ ID NO: 429187 - DNA, 25 bp, Homo sapien
tagaaggccgtacttgctggactgg

SEQ ID NO: 429188 - DNA, 25 bp, Homo sapien
tctccatctgaattgatagaaacag

SEQ ID NO: 429189 - DNA, 25 bp, Homo sapien
ttcacttgtagaaggccgtacttgc

SEQ ID NO: 429190 - DNA, 25 bp, Homo sapien
cattggcttcacatacacgtattca

SEQ ID NO: 429191 - DNA, 25 bp, Homo sapien
gtcaccttgaagcggctttctctgg

SEQ ID NO: 429192 - DNA, 25 bp, Homo sapien
ccttgaagcggctttctctggcaga

SEQ ID NO: 429193 - DNA, 25 bp, Homo sapien
ctgtcaccttgaagcggctttctct

SEQ ID NO: 429194 - DNA, 25 bp, Homo sapien
caccttgaagcggctttctctggca

SEQ ID NO: 429195 - DNA, 25 bp, Homo sapien
tgccactccccttaggaactgttta

SEQ ID NO: 429196 - DNA, 25 bp, Homo sapien
tttacaatgttctaatgcagtccac

SEQ ID NO: 429197 - DNA, 25 bp, Homo sapien
gctgcgtcagcctatatgtagtgac

SEQ ID NO: 429198 - DNA, 25 bp, Homo sapien
gcagtccacacttaaggttgccact

SEQ ID NO: 429199 - DNA, 25 bp, Homo sapien
caaacctatgggcagtttacactct

SEQ ID NO: 429200 - DNA, 25 bp, Homo sapien
atatttagtactggcccctgcttta

SEQ ID NO: 429201 - DNA, 25 bp, Homo sapien
gagcacctcactggaagttcagtga

SEQ ID NO: 429202 - DNA, 25 bp, Homo sapien
gctgcctgtcaagccttcttgttaa

SEQ ID NO: 429203 - DNA, 25 bp, Homo sapien
cacttcggtcgagtttttggtggtg

SEQ ID NO: 429204 - DNA, 25 bp, Homo sapien
tttggtggtgttgagcggatagccg

SEQ ID NO: 429205 - DNA, 25 bp, Homo sapien
tgtctgtatctaagatcctcaggct

SEQ ID NO: 429206 - DNA, 25 bp, Homo sapien
gtttgtggccgcctcgtgctcgtgt

SEQ ID NO: 429207 - DNA, 25 bp, Homo sapien
gtggcagagcccgtggcccctctct

SEQ ID NO: 429208 - DNA, 25 bp, Homo sapien
tctcctgtcccagagccaagctgtt

SEQ ID NO: 429209 - DNA, 25 bp, Homo sapien
agcccgtggcccctctctcctgtcc

SEQ ID NO: 429210 - DNA, 25 bp, Homo sapien
ctaggaacagtgacggtggcagagc

SEQ ID NO: 429211 - DNA, 25 bp, Homo sapien
tgctgtgagcctgttgccggcgcgg

SEQ ID NO: 429212 - DNA, 25 bp, Homo sapien
tgtgagcctgttgccggcgcggtcc

SEQ ID NO: 429213 - DNA, 25 bp, Homo sapien
tcagccttcttgctcgtcacctcca

SEQ ID NO: 429214 - DNA, 25 bp, Homo sapien
gcacatccgcccctctgggtgctgt

SEQ ID NO: 429215 - DNA, 25 bp, Homo sapien
ttttagtacacgtactgctgacgca

SEQ ID NO: 429216 - DNA, 25 bp, Homo sapien
tctctgcctcgttccggttttagta

SEQ ID NO: 429217 - DNA, 25 bp, Homo sapien
tccggttttagtacacgtactgctg

SEQ ID NO: 429218 - DNA, 25 bp, Homo sapien
tagtacacgtactgctgacgcaagc

SEQ ID NO: 429219 - DNA, 25 bp, Homo sapien
tcctgttagcaatcaggcggtcagg

SEQ ID NO: 429220 - DNA, 25 bp, Homo sapien
cagggactaagaccaataaatacct

SEQ ID NO: 429221 - DNA, 25 bp, Homo sapien
ggcggtcagggtggcggccacttcc

SEQ ID NO: 429222 - DNA, 25 bp, Homo sapien
ttgcaagcactttcacgaacagcag

SEQ ID NO: 429223 - DNA, 25 bp, Homo sapien
tcgagaagggcacgcctgggctttt

SEQ ID NO: 429224 - DNA, 25 bp, Homo sapien
ctggtctcgagatggctgccttgcc

SEQ ID NO: 429225 - DNA, 25 bp, Homo sapien
cctagctgtggctcgctggtctcga

SEQ ID NO: 429226 - DNA, 25 bp, Homo sapien
ggccccggcttctgtcctagctgtg

SEQ ID NO: 429227 - DNA, 25 bp, Homo sapien
gctcagctgccgtgagcggccgtag

SEQ ID NO: 429228 - DNA, 25 bp, Homo sapien
ggctcagctgccgtgagcggccgta

SEQ ID NO: 429229 - DNA, 25 bp, Homo sapien
ctcagctgccgtgagcggccgtagg

SEQ ID NO: 429230 - DNA, 25 bp, Homo sapien
ctggctcagctgccgtgagcggccg

SEQ ID NO: 429231 - DNA, 25 bp, Homo sapien
tgttcttgagtaacgcactggcgcc

SEQ ID NO: 429232 - DNA, 25 bp, Homo sapien
acacagacgcctgcttgggacatgg

SEQ ID NO: 429233 - DNA, 25 bp, Homo sapien
tgccgtccttggctgaacaagctgt

SEQ ID NO: 429234 - DNA, 25 bp, Homo sapien
tctgtagacttttgcctgagacaca

SEQ ID NO: 429235 - DNA, 25 bp, Homo sapien
gaagctgaaccagccggacgcagct

SEQ ID NO: 429236 - DNA, 25 bp, Homo sapien
acgcagctcccggacgcagcagaaa

SEQ ID NO: 429237 - DNA, 25 bp, Homo sapien
gaagctgtgatccttgctggacgtg

SEQ ID NO: 429238 - DNA, 25 bp, Homo sapien
gcagaaacggaataaccactcggcc

SEQ ID NO: 429239 - DNA, 25 bp, Homo sapien
gcggcagcaacagcgtaagatggtt

SEQ ID NO: 429240 - DNA, 25 bp, Homo sapien
gaagcagggcatgtacagccgtgtg

SEQ ID NO: 429241 - DNA, 25 bp, Homo sapien
agatggttccgacaggctccagagc

SEQ ID NO: 429242 - DNA, 25 bp, Homo sapien
tgtacagccgtgtggcggcagcaac

SEQ ID NO: 429243 - DNA, 25 bp, Homo sapien
tgactttatatctggacagggcgcc

SEQ ID NO: 429244 - DNA, 25 bp, Homo sapien
agctcttgcactgtccaggccaagg

SEQ ID NO: 429245 - DNA, 25 bp, Homo sapien
ccctgtgaggtgacactctgcagct

SEQ ID NO: 429246 - DNA, 25 bp, Homo sapien
acagggcgccgtaatggtagacgat

SEQ ID NO: 429247 - DNA, 25 bp, Homo sapien
ggccctgacggtggtatccagttaa

SEQ ID NO: 429248 - DNA, 25 bp, Homo sapien
taaagctcctttgtcgctctcatgg

SEQ ID NO: 429249 - DNA, 25 bp, Homo sapien
gagggcgcccgtagtgataagcaca

SEQ ID NO: 429250 - DNA, 25 bp, Homo sapien
tcaggtccattcctcgaagtcggag

SEQ ID NO: 429251 - DNA, 25 bp, Homo sapien
gctcaacttggttgcggtaccatca

SEQ ID NO: 429252 - DNA, 25 bp, Homo sapien
catcctggccggtgtcactgtggcc

SEQ ID NO: 429253 - DNA, 25 bp, Homo sapien
tggcagtggtagaacgctcaacttg

SEQ ID NO: 429254 - DNA, 25 bp, Homo sapien
gtaccatcagcccacctgcatttgg

SEQ ID NO: 429255 - DNA, 25 bp, Homo sapien
gagacacgcttgcagacactgttgt

SEQ ID NO: 429256 - DNA, 25 bp, Homo sapien
ccgtctccatgtgtgtttagatcca

SEQ ID NO: 429257 - DNA, 25 bp, Homo sapien
aaaaaagctgaagggtacgaccatg

SEQ ID NO: 429258 - DNA, 25 bp, Homo sapien
tcactgactcactaacacctgcaaa

SEQ ID NO: 429259 - DNA, 25 bp, Homo sapien
gagacactggttgtctggtactcgg

SEQ ID NO: 429260 - DNA, 25 bp, Homo sapien
cagtccttgagccaggccgaggaca

SEQ ID NO: 429261 - DNA, 25 bp, Homo sapien
cattctaggcctggcatcgctgatg

SEQ ID NO: 429262 - DNA, 25 bp, Homo sapien
gctgaagcaactctgtagcccacag

SEQ ID NO: 429263 - DNA, 25 bp, Homo sapien
tttgccgtgctgtgcgaggacctgt

SEQ ID NO: 429264 - DNA, 25 bp, Homo sapien
tgctaacttacacttcagaggcctg

SEQ ID NO: 429265 - DNA, 25 bp, Homo sapien
cattgacctgagtgcgcatgacagc

SEQ ID NO: 429266 - DNA, 25 bp, Homo sapien
tttaatcagcaagatcgccagcaag

SEQ ID NO: 429267 - DNA, 25 bp, Homo sapien
ttcatgaatttgcacgtttccttgc

SEQ ID NO: 429268 - DNA, 25 bp, Homo sapien
tgaatttgcacgtttccttgcaggg

SEQ ID NO: 429269 - DNA, 25 bp, Homo sapien
cttctctatcatttccactttagga

SEQ ID NO: 429270 - DNA, 25 bp, Homo sapien
ctctatcatttccactttaggatat

SEQ ID NO: 429271 - DNA, 25 bp, Homo sapien
cattactggacgtaccatgctgggc

SEQ ID NO: 429272 - DNA, 25 bp, Homo sapien
tgctttagacgttgttaaggcgggc

SEQ ID NO: 429273 - DNA, 25 bp, Homo sapien
tcttacttggcaggacttaacctcc

SEQ ID NO: 429274 - DNA, 25 bp, Homo sapien
caaactctgaccgtcttgtggatcg

SEQ ID NO: 429275 - DNA, 25 bp, Homo sapien
gggccctggcgttatgcacccggcg

SEQ ID NO: 429276 - DNA, 25 bp, Homo sapien
gcccatggacgcctctgaggagccg

SEQ ID NO: 429277 - DNA, 25 bp, Homo sapien
gatctacaccatggagaacaagccc

SEQ ID NO: 429278 - DNA, 25 bp, Homo sapien
catcgtcacctgtgagtgcccggag

SEQ ID NO: 429279 - DNA, 25 bp, Homo sapien
tctctgcgtagtgtgtgggaagcct

SEQ ID NO: 429280 - DNA, 25 bp, Homo sapien
gaagcctaggtacacagtttgggaa

SEQ ID NO: 429281 - DNA, 25 bp, Homo sapien
gatgtcatcgaaagaagtggagccc

SEQ ID NO: 429282 - DNA, 25 bp, Homo sapien
gagcagccaccctgttttgcgacga

SEQ ID NO: 429283 - DNA, 25 bp, Homo sapien
tcatggaaccttgcttggagggcct

SEQ ID NO: 429284 - DNA, 25 bp, Homo sapien
gaaatgaatgtatggcctatgggca

SEQ ID NO: 429285 - DNA, 25 bp, Homo sapien
tcctaggcttgaagacggtgccctc

SEQ ID NO: 429286 - DNA, 25 bp, Homo sapien
gctgcttttagtcgcaactgggaga

SEQ ID NO: 429287 - DNA, 25 bp, Homo sapien
taaaaaacagtcaactcagtcaaaa

SEQ ID NO: 429288 - DNA, 25 bp, Homo sapien
cactggacagctggtagagtattta

SEQ ID NO: 429289 - DNA, 25 bp, Homo sapien
tcacaattaaaatccgagcagtatt

SEQ ID NO: 429290 - DNA, 25 bp, Homo sapien
ccacagtgacccttaaatatggtta

SEQ ID NO: 429291 - DNA, 25 bp, Homo sapien
agccttgacaagagactccagttct

SEQ ID NO: 429292 - DNA, 25 bp, Homo sapien
gttgcaagtgacaaggggtgacacg

SEQ ID NO: 429293 - DNA, 25 bp, Homo sapien
gccttgacaagagactccagttctt

SEQ ID NO: 429294 - DNA, 25 bp, Homo sapien
tagccttgacaagagactccagttc

SEQ ID NO: 429295 - DNA, 25 bp, Homo sapien
tggccgtcctacatttcaggtgtcg

SEQ ID NO: 429296 - DNA, 25 bp, Homo sapien
ccgtcctacatttcaggtgtcgatg

SEQ ID NO: 429297 - DNA, 25 bp, Homo sapien
ggccgtcctacatttcaggtgtcga

SEQ ID NO: 429298 - DNA, 25 bp, Homo sapien
gccgtcctacatttcaggtgtcgat

SEQ ID NO: 429299 - DNA, 25 bp, Homo sapien
tttcccaccttactgccagccattt

SEQ ID NO: 429300 - DNA, 25 bp, Homo sapien
tctggagtcctttcccaccttactg

SEQ ID NO: 429301 - DNA, 25 bp, Homo sapien
tactgccagccatttcgaattctgc

SEQ ID NO: 429302 - DNA, 25 bp, Homo sapien
ggctaatcagacccatggcgagatc

SEQ ID NO: 429303 - DNA, 25 bp, Homo sapien
tgaaaaagtatcactgcaattaggt

SEQ ID NO: 429304 - DNA, 25 bp, Homo sapien
aatcatcgacctctaaatttagggt

SEQ ID NO: 429305 - DNA, 25 bp, Homo sapien
tgtgcccttcacataccttgttgta

SEQ ID NO: 429306 - DNA, 25 bp, Homo sapien
aatttagggtttgtgcccttcacat

SEQ ID NO: 429307 - DNA, 25 bp, Homo sapien
ctgttgactgcaccgggaggcccac

SEQ ID NO: 429308 - DNA, 25 bp, Homo sapien
taaaggcttgagtagactccagttc

SEQ ID NO: 429309 - DNA, 25 bp, Homo sapien
ctctcccatgagatgccagtagcac

SEQ ID NO: 429310 - DNA, 25 bp, Homo sapien
gacgtgccccagtggaaaacagctg

SEQ ID NO: 429311 - DNA, 25 bp, Homo sapien
ccagttctccaaagcgatgtatttt

SEQ ID NO: 429312 - DNA, 25 bp, Homo sapien
aatccccgtggatgtgcaagttgtg

SEQ ID NO: 429313 - DNA, 25 bp, Homo sapien
tcaagcagatagagtcgggtccagc

SEQ ID NO: 429314 - DNA, 25 bp, Homo sapien
cagtgggtggccctcgtgtgaatcc

SEQ ID NO: 429315 - DNA, 25 bp, Homo sapien
taactgattcagagcgtgccttcct

SEQ ID NO: 429316 - DNA, 25 bp, Homo sapien
acaacaccacatagctctgcagcgg

SEQ ID NO: 429317 - DNA, 25 bp, Homo sapien
gcgttcactgccaatctgtagggtt

SEQ ID NO: 429318 - DNA, 25 bp, Homo sapien
gaagccatctagattgggcccagcg

SEQ ID NO: 429319 - DNA, 25 bp, Homo sapien
cttgtgacctgtgcatatccttggg

SEQ ID NO: 429320 - DNA, 25 bp, Homo sapien
tcatcatgagagaggcttgggtctc

SEQ ID NO: 429321 - DNA, 25 bp, Homo sapien
tctaacgtgaggatgaagtctacac

SEQ ID NO: 429322 - DNA, 25 bp, Homo sapien
tgcccttgggaatagtcatcatgag

SEQ ID NO: 429323 - DNA, 25 bp, Homo sapien
tggagctgatatctgcctgccggcc

SEQ ID NO: 429324 - DNA, 25 bp, Homo sapien
tgtggctgcacaatctccgtgaccc

SEQ ID NO: 429325 - DNA, 25 bp, Homo sapien
gagatgaatacgacaggcagtgcct

SEQ ID NO: 429326 - DNA, 25 bp, Homo sapien
tacctggctcccttgcttatctggg

SEQ ID NO: 429327 - DNA, 25 bp, Homo sapien
gctgttccagaagtaatgctgccaa

SEQ ID NO: 429328 - DNA, 25 bp, Homo sapien
gagcagctgtgctcgggctgttcca

SEQ ID NO: 429329 - DNA, 25 bp, Homo sapien
caaatgaacgtccttctgagcagct

SEQ ID NO: 429330 - DNA, 25 bp, Homo sapien
tgcacgtgattgaccacaccaaggg

SEQ ID NO: 429331 - DNA, 25 bp, Homo sapien
tcttaggtagcgttgtagcgagcca

SEQ ID NO: 429332 - DNA, 25 bp, Homo sapien
tcatcactgtgctgtaggtctcgtc

SEQ ID NO: 429333 - DNA, 25 bp, Homo sapien
aacctgtgcgtatttgagctccaag

SEQ ID NO: 429334 - DNA, 25 bp, Homo sapien
tttggagcggctaaaaacctgtgcg

SEQ ID NO: 429335 - DNA, 25 bp, Homo sapien
gcttgcagatgcgtccgaagggaaa

SEQ ID NO: 429336 - DNA, 25 bp, Homo sapien
gctgggctgctctcacatacagagg

SEQ ID NO: 429337 - DNA, 25 bp, Homo sapien
gccaattcgttctctgccacaggga

SEQ ID NO: 429338 - DNA, 25 bp, Homo sapien
gatttctaaagcaggcaatccctgt

SEQ ID NO: 429339 - DNA, 25 bp, Homo sapien
acacgggtccgccatttacagagaa

SEQ ID NO: 429340 - DNA, 25 bp, Homo sapien
ggcatccgttagagcccactcttgg

SEQ ID NO: 429341 - DNA, 25 bp, Homo sapien
agaaggtacagagagtcccacacac

SEQ ID NO: 429342 - DNA, 25 bp, Homo sapien
ttgggacaaatgtaggacacgggtc

SEQ ID NO: 429343 - DNA, 25 bp, Homo sapien
gaccagttgactctccatgcggatt

SEQ ID NO: 429344 - DNA, 25 bp, Homo sapien
gaggctgtgccccattgcattgctt

SEQ ID NO: 429345 - DNA, 25 bp, Homo sapien
gcttttgccgctttgtcacagacca

SEQ ID NO: 429346 - DNA, 25 bp, Homo sapien
tcattttgggaatgtgaacgccccg

SEQ ID NO: 429347 - DNA, 25 bp, Homo sapien
ccctgggggcgtggtatggacgtct

SEQ ID NO: 429348 - DNA, 25 bp, Homo sapien
atctcagggccctgggggcgtggta

SEQ ID NO: 429349 - DNA, 25 bp, Homo sapien
tctgacggggcagattccatctctg

SEQ ID NO: 429350 - DNA, 25 bp, Homo sapien
gaggagcgcagcaccctggctggtg

SEQ ID NO: 429351 - DNA, 25 bp, Homo sapien
gtgcctaccacgtgctggctctgta

SEQ ID NO: 429352 - DNA, 25 bp, Homo sapien
tacttcttctgagggcgtgcctacc

SEQ ID NO: 429353 - DNA, 25 bp, Homo sapien
ttttacctcatttagcagttgctgc

SEQ ID NO: 429354 - DNA, 25 bp, Homo sapien
ttgtagccgtatcggaaacccagcg

SEQ ID NO: 429355 - DNA, 25 bp, Homo sapien
tcacgactccctgcactttctggtt

SEQ ID NO: 429356 - DNA, 25 bp, Homo sapien
tgggtgaggccaatagcagaagtat

SEQ ID NO: 429357 - DNA, 25 bp, Homo sapien
tcctccttgggcgtctcatggtgtt

SEQ ID NO: 429358 - DNA, 25 bp, Homo sapien
tctgtgagctgatgtggcaccggaa

SEQ ID NO: 429359 - DNA, 25 bp, Homo sapien
ggtagaatctatacaaaacacaagg

SEQ ID NO: 429360 - DNA, 25 bp, Homo sapien
tgtctgtctctaaggcccgctgtgg

SEQ ID NO: 429361 - DNA, 25 bp, Homo sapien
gaagtaataacaaagagcccacctg

SEQ ID NO: 429362 - DNA, 25 bp, Homo sapien
taaagagctcacttggtgtccccaa

SEQ ID NO: 429363 - DNA, 25 bp, Homo sapien
tgggggccaggagacgcctccatca

SEQ ID NO: 429364 - DNA, 25 bp, Homo sapien
ggagacgcctccatcagccgtgggc

SEQ ID NO: 429365 - DNA, 25 bp, Homo sapien
ggggccaggagacgcctccatcagc

SEQ ID NO: 429366 - DNA, 25 bp, Homo sapien
gccaggagacgcctccatcagccgt

SEQ ID NO: 429367 - DNA, 25 bp, Homo sapien
tccgctcctcagcagatgacaggcc

SEQ ID NO: 429368 - DNA, 25 bp, Homo sapien
ctccgctcctcagcagatgacaggc

SEQ ID NO: 429369 - DNA, 25 bp, Homo sapien
gcctccgctcctcagcagatgacag

SEQ ID NO: 429370 - DNA, 25 bp, Homo sapien
ccgctcctcagcagatgacaggcca

SEQ ID NO: 429371 - DNA, 25 bp, Homo sapien
gaccgaggcgggctgtaccgttggc

SEQ ID NO: 429372 - DNA, 25 bp, Homo sapien
gtgtatctagcaccccagagaccga

SEQ ID NO: 429373 - DNA, 25 bp, Homo sapien
gggctccaggcagagtgtatctagc

SEQ ID NO: 429374 - DNA, 25 bp, Homo sapien
gtaccgttggctgctgggagcgaga

SEQ ID NO: 429375 - DNA, 25 bp, Homo sapien
aacggagagaggaacgccgcagcct

SEQ ID NO: 429376 - DNA, 25 bp, Homo sapien
cagaatgtctccaaaaggtcggttc

SEQ ID NO: 429377 - DNA, 25 bp, Homo sapien
tcgttatcacgagtcaccagagaga

SEQ ID NO: 429378 - DNA, 25 bp, Homo sapien
agcaggtgccggaagagctaccgca

SEQ ID NO: 429379 - DNA, 25 bp, Homo sapien
ttcagacacagtagtgggttaacct

SEQ ID NO: 429380 - DNA, 25 bp, Homo sapien
cacagtagtgggttaacctgaggcc

SEQ ID NO: 429381 - DNA, 25 bp, Homo sapien
taacctgaggccctctcaaaagaca

SEQ ID NO: 429382 - DNA, 25 bp, Homo sapien
cagacacagtagtgggttaacctga

SEQ ID NO: 429383 - DNA, 25 bp, Homo sapien
tccccacgcttgacctcaggctcct

SEQ ID NO: 429384 - DNA, 25 bp, Homo sapien
gagggcacgtccatgggctgagaag

SEQ ID NO: 429385 - DNA, 25 bp, Homo sapien
aacctcgggaaggcctttgcagatg

SEQ ID NO: 429386 - DNA, 25 bp, Homo sapien
aagataaggtcaccccaggttgcct

SEQ ID NO: 429387 - DNA, 25 bp, Homo sapien
tgagtcctcgctgcgcactgtggct

SEQ ID NO: 429388 - DNA, 25 bp, Homo sapien
tcgctgcgcactgtggctgcacctg

SEQ ID NO: 429389 - DNA, 25 bp, Homo sapien
tcgctgagtcctcgctgcgcactgt

SEQ ID NO: 429390 - DNA, 25 bp, Homo sapien
tgtccctcgctgagtcctcgctgcg

SEQ ID NO: 429391 - DNA, 25 bp, Homo sapien
ggccctcccggcaccccattcagag

SEQ ID NO: 429392 - DNA, 25 bp, Homo sapien
gcttcacgtggctgttgagctgcag

SEQ ID NO: 429393 - DNA, 25 bp, Homo sapien
tcacgtggctgttgagctgcagaag

SEQ ID NO: 429394 - DNA, 25 bp, Homo sapien
gtttcctggagcagcgagggcttca

SEQ ID NO: 429395 - DNA, 25 bp, Homo sapien
gcaggtgtgagacggctgtgtcccc

SEQ ID NO: 429396 - DNA, 25 bp, Homo sapien
cgccctctgggcgatcagagccgga

SEQ ID NO: 429397 - DNA, 25 bp, Homo sapien
tgtcctgagtgaggacgcctatccc

SEQ ID NO: 429398 - DNA, 25 bp, Homo sapien
gccccagaaacgcaccaggaggcag

SEQ ID NO: 429399 - DNA, 25 bp, Homo sapien
ccagaaggagaagtgctcatcacat

SEQ ID NO: 429400 - DNA, 25 bp, Homo sapien
gaagctggcttgaacgttagacgct

SEQ ID NO: 429401 - DNA, 25 bp, Homo sapien
ttagacgctgtagctcagagcactg

SEQ ID NO: 429402 - DNA, 25 bp, Homo sapien
gggcgacgtggacaggatttctctc

SEQ ID NO: 429403 - DNA, 25 bp, Homo sapien
tcaaaacgtgatggggtgggattca

SEQ ID NO: 429404 - DNA, 25 bp, Homo sapien
ttcggtacacgagaagctgaggatc

SEQ ID NO: 429405 - DNA, 25 bp, Homo sapien
gacttctcattgcaacgctcaagct

SEQ ID NO: 429406 - DNA, 25 bp, Homo sapien
tcattgcaacgctcaagctccttgt

SEQ ID NO: 429407 - DNA, 25 bp, Homo sapien
acacgagaagctgtaggatccacgc

SEQ ID NO: 429408 - DNA, 25 bp, Homo sapien
ggatccacgccacctttcagtagag

SEQ ID NO: 429409 - DNA, 25 bp, Homo sapien
tacacgagaagctgtaggatccacg

SEQ ID NO: 429410 - DNA, 25 bp, Homo sapien
tagagaagctgtaggatccacaccg

SEQ ID NO: 429411 - DNA, 25 bp, Homo sapien
ttccttgttgacttgtggtccggga

SEQ ID NO: 429412 - DNA, 25 bp, Homo sapien
tgttgacttgtggtccgggactttc

SEQ ID NO: 429413 - DNA, 25 bp, Homo sapien
ccttgttgacttgtggtccgggact

SEQ ID NO: 429414 - DNA, 25 bp, Homo sapien
ttgacttgtggtccgggactttcca

SEQ ID NO: 429415 - DNA, 25 bp, Homo sapien
tgcagtgaccttcatcccaagcaag

SEQ ID NO: 429416 - DNA, 25 bp, Homo sapien
gctccggtacgtgcagacatctggt

SEQ ID NO: 429417 - DNA, 25 bp, Homo sapien
cgctctgctccggtacgtgcagaca

SEQ ID NO: 429418 - DNA, 25 bp, Homo sapien
cagtgaccttcatcccaagcaaggc

SEQ ID NO: 429419 - DNA, 25 bp, Homo sapien
gcagggtaactttcggacgttgcca

SEQ ID NO: 429420 - DNA, 25 bp, Homo sapien
tgtataatgagtggcgagcacgacc

SEQ ID NO: 429421 - DNA, 25 bp, Homo sapien
caccctgtggccatcagattctcag

SEQ ID NO: 429422 - DNA, 25 bp, Homo sapien
tctcctttttagaccgtgcagggta

SEQ ID NO: 429423 - DNA, 25 bp, Homo sapien
tccgtcggggctttccagggaagca

SEQ ID NO: 429424 - DNA, 25 bp, Homo sapien
cagcctgtccacgctgggtgcccag

SEQ ID NO: 429425 - DNA, 25 bp, Homo sapien
tgcccagggcgggaaaacaggtgcg

SEQ ID NO: 429426 - DNA, 25 bp, Homo sapien
gtgcccagggcgggaaaacaggtgc

SEQ ID NO: 429427 - DNA, 25 bp, Homo sapien
ccccttcttggcgtgtctttaaatg

SEQ ID NO: 429428 - DNA, 25 bp, Homo sapien
ctgggaggaccagtggtctttttct

SEQ ID NO: 429429 - DNA, 25 bp, Homo sapien
gctcattatgatccctcctgtttta

SEQ ID NO: 429430 - DNA, 25 bp, Homo sapien
tttgttaggccgctcattatgatcc

SEQ ID NO: 429431 - DNA, 25 bp, Homo sapien
tctgtctgtgtcagagcccgggtcc

SEQ ID NO: 429432 - DNA, 25 bp, Homo sapien
gggcactcagccttcactcgggttt

SEQ ID NO: 429433 - DNA, 25 bp, Homo sapien
gactccagccgggacagtctgtctg

SEQ ID NO: 429434 - DNA, 25 bp, Homo sapien
tgcagaacggggagacccaggtcgt

SEQ ID NO: 429435 - DNA, 25 bp, Homo sapien
gggcggagctgagtgtcccgcaggg

SEQ ID NO: 429436 - DNA, 25 bp, Homo sapien
aacaccgagggacttgccaagagga

SEQ ID NO: 429437 - DNA, 25 bp, Homo sapien
gcccaggtgttctgggcggagctga

SEQ ID NO: 429438 - DNA, 25 bp, Homo sapien
cctgggcgtggagtttccctggact

SEQ ID NO: 429439 - DNA, 25 bp, Homo sapien
cttctctgagcgactgcgcacaggc

SEQ ID NO: 429440 - DNA, 25 bp, Homo sapien
cttctccgagtgactgtgcacaggg

SEQ ID NO: 429441 - DNA, 25 bp, Homo sapien
tctccgagtgactgcgaacaggcgt

SEQ ID NO: 429442 - DNA, 25 bp, Homo sapien
ttctccaagtgactgcgcacaggca

SEQ ID NO: 429443 - DNA, 25 bp, Homo sapien
tcttcactgataagggtaaggttcc

SEQ ID NO: 429444 - DNA, 25 bp, Homo sapien
taaggttcctggtgaatcctgcagc

SEQ ID NO: 429445 - DNA, 25 bp, Homo sapien
cactcaggatcttggttgcaatgaa

SEQ ID NO: 429446 - DNA, 25 bp, Homo sapien
ccaggaatgtctggtggtcaaactc

SEQ ID NO: 429447 - DNA, 25 bp, Homo sapien
tcagctaattcatgcccatccacca

SEQ ID NO: 429448 - DNA, 25 bp, Homo sapien
tcctgttccattcccatatatttcc

SEQ ID NO: 429449 - DNA, 25 bp, Homo sapien
tgccctcagctaattcatgcccatc

SEQ ID NO: 429450 - DNA, 25 bp, Homo sapien
acctgccctcagctaattcatgccc

SEQ ID NO: 429451 - DNA, 25 bp, Homo sapien
ttccatccccgtctatttcatctga

SEQ ID NO: 429452 - DNA, 25 bp, Homo sapien
gttccattcccgtctatttcatctg

SEQ ID NO: 429453 - DNA, 25 bp, Homo sapien
gttccatccccgtctatttcatctg

SEQ ID NO: 429454 - DNA, 25 bp, Homo sapien
tccattcccgtctatttcatctgat

SEQ ID NO: 429455 - DNA, 25 bp, Homo sapien
cttcagccacgtctcgggacaggag

SEQ ID NO: 429456 - DNA, 25 bp, Homo sapien
gggaccagcctaggtggccacgtgg

SEQ ID NO: 429457 - DNA, 25 bp, Homo sapien
catgacagcgactgtcacggacact

SEQ ID NO: 429458 - DNA, 25 bp, Homo sapien
gacttccatgacagcgactgtcacg

SEQ ID NO: 429459 - DNA, 25 bp, Homo sapien
caattgttaccattcctgatgcttc

SEQ ID NO: 429460 - DNA, 25 bp, Homo sapien
ggagcttctctccactggtaataaa

SEQ ID NO: 429461 - DNA, 25 bp, Homo sapien
tcaataccctaaccacacaggatgg

SEQ ID NO: 429462 - DNA, 25 bp, Homo sapien
taatgagaaactgtgaggcgtcccc

SEQ ID NO: 429463 - DNA, 25 bp, Homo sapien
gaatttcggtccctgtgtttatgca

SEQ ID NO: 429464 - DNA, 25 bp, Homo sapien
catgtatggtcccagcggcatgcgg

SEQ ID NO: 429465 - DNA, 25 bp, Homo sapien
cgaggacgcgtttctctctgcagcc

SEQ ID NO: 429466 - DNA, 25 bp, Homo sapien
acgaggtctgccgaggacgcgtttc

SEQ ID NO: 429467 - DNA, 25 bp, Homo sapien
ggcgcagggccgattgtccacttct

SEQ ID NO: 429468 - DNA, 25 bp, Homo sapien
tggatttactgcagggaccccaaga

SEQ ID NO: 429469 - DNA, 25 bp, Homo sapien
gaccccaagagtcggccacggcaga

SEQ ID NO: 429470 - DNA, 25 bp, Homo sapien
gatgtccttggaggcgcttggattt

SEQ ID NO: 429471 - DNA, 25 bp, Homo sapien
cagtccctggtcactcggatgtcct

SEQ ID NO: 429472 - DNA, 25 bp, Homo sapien
tatcatctcaaagagccggtccagc

SEQ ID NO: 429473 - DNA, 25 bp, Homo sapien
tagccacatttgaacaagagagatt

SEQ ID NO: 429474 - DNA, 25 bp, Homo sapien
tctattgttaggttttgattgtccc

SEQ ID NO: 429475 - DNA, 25 bp, Homo sapien
tgattgtcccttgttggtgctggga

SEQ ID NO: 429476 - DNA, 25 bp, Homo sapien
gacacgatttcggtcacagccttgg

SEQ ID NO: 429477 - DNA, 25 bp, Homo sapien
tatttactctcgctgtaaggctggg

SEQ ID NO: 429478 - DNA, 25 bp, Homo sapien
ccaggcttggaacgcttgaggcaca

SEQ ID NO: 429479 - DNA, 25 bp, Homo sapien
ttagatttgaccgatagccctgagg

SEQ ID NO: 429480 - DNA, 25 bp, Homo sapien
tcgtcagacgttaggaaatcccaag

SEQ ID NO: 429481 - DNA, 25 bp, Homo sapien
gtgctggaatccacccggaagtttc

SEQ ID NO: 429482 - DNA, 25 bp, Homo sapien
catgtctgttatgtaggctgcccag

SEQ ID NO: 429483 - DNA, 25 bp, Homo sapien
gccaacgcaagctgggatcgtcaga

SEQ ID NO: 429484 - DNA, 25 bp, Homo sapien
ccggctacgctgcttgggtggccaa

SEQ ID NO: 429485 - DNA, 25 bp, Homo sapien
ctgagctgcaagacgcccagcctgg

SEQ ID NO: 429486 - DNA, 25 bp, Homo sapien
gggtggccaagggtctgagctgcaa

SEQ ID NO: 429487 - DNA, 25 bp, Homo sapien
gcctcacgccgtgggctgtgatgcc

SEQ ID NO: 429488 - DNA, 25 bp, Homo sapien
gaatcccgaagcagaggctctgggt

SEQ ID NO: 429489 - DNA, 25 bp, Homo sapien
tgaccacagcccaggaatcccgaag

SEQ ID NO: 429490 - DNA, 25 bp, Homo sapien
cagcccaggaatcccgaagcagagg

SEQ ID NO: 429491 - DNA, 25 bp, Homo sapien
caggaatcccgaagcagaggctctg

SEQ ID NO: 429492 - DNA, 25 bp, Homo sapien
ggctggcaggtctgcacttgaggtg

SEQ ID NO: 429493 - DNA, 25 bp, Homo sapien
caggtctgcacttgaggtggatggt

SEQ ID NO: 429494 - DNA, 25 bp, Homo sapien
gccaggatctgtgccctagacactt

SEQ ID NO: 429495 - DNA, 25 bp, Homo sapien
aggatctgtgccctagacacttccc

SEQ ID NO: 429496 - DNA, 25 bp, Homo sapien
tgttgacactaatctttgagcatga

SEQ ID NO: 429497 - DNA, 25 bp, Homo sapien
gacccaatcatcttcgcagttctga

SEQ ID NO: 429498 - DNA, 25 bp, Homo sapien
gcatgagtagtttagtgattgtgaa

SEQ ID NO: 429499 - DNA, 25 bp, Homo sapien
tggctgtgacccaatcatcttcgca

SEQ ID NO: 429500 - DNA, 25 bp, Homo sapien
gacatcaatcatggcaatcgctatt

SEQ ID NO: 429501 - DNA, 25 bp, Homo sapien
tggggtccggtatcgcctgccatgc

SEQ ID NO: 429502 - DNA, 25 bp, Homo sapien
tattccagaggtatacgcggtgggt

SEQ ID NO: 429503 - DNA, 25 bp, Homo sapien
catggcaatcgctattccagaggta

SEQ ID NO: 429504 - DNA, 25 bp, Homo sapien
cgcttccggtttcctcctcgagctg

SEQ ID NO: 429505 - DNA, 25 bp, Homo sapien
gaccacgtttccaggtggctgccca

SEQ ID NO: 429506 - DNA, 25 bp, Homo sapien
caggcgtgggttcatggccgcttcc

SEQ ID NO: 429507 - DNA, 25 bp, Homo sapien
cctgctctgtcccgggctttctgga

SEQ ID NO: 429508 - DNA, 25 bp, Homo sapien
aaatgcccacctgcacccgtgtcca

SEQ ID NO: 429509 - DNA, 25 bp, Homo sapien
atgcccacctgcacccgtgtccact

SEQ ID NO: 429510 - DNA, 25 bp, Homo sapien
cccacctgcacccgtgtccactggc

SEQ ID NO: 429511 - DNA, 25 bp, Homo sapien
caaatgcccacctgcacccgtgtcc

SEQ ID NO: 429512 - DNA, 25 bp, Homo sapien
caggaagccttgagtgagtcgcccc

SEQ ID NO: 429513 - DNA, 25 bp, Homo sapien
ccgaggcggccgggttacagcctga

SEQ ID NO: 429514 - DNA, 25 bp, Homo sapien
aagacacaagttacaggccaagaca

SEQ ID NO: 429515 - DNA, 25 bp, Homo sapien
tggcctggagagaagcaaacccagg

SEQ ID NO: 429516 - DNA, 25 bp, Homo sapien
tctggagtgtccacatgtccacggg

SEQ ID NO: 429517 - DNA, 25 bp, Homo sapien
tttactgtggttgtccctgtggccg

SEQ ID NO: 429518 - DNA, 25 bp, Homo sapien
tgcggctcaggaccacgctcctgaa

SEQ ID NO: 429519 - DNA, 25 bp, Homo sapien
ggaagcctgttgcagaccagccacc

SEQ ID NO: 429520 - DNA, 25 bp, Homo sapien
tttatagttatggaccctaatgggc

SEQ ID NO: 429521 - DNA, 25 bp, Homo sapien
caccatggcgggctgacaaattagc

SEQ ID NO: 429522 - DNA, 25 bp, Homo sapien
tatggaccctaatgggcataatgaa

SEQ ID NO: 429523 - DNA, 25 bp, Homo sapien
taaaatatgacttaattgtggattt

SEQ ID NO: 429524 - DNA, 25 bp, Homo sapien
aagattgcaatatgaactctctccc

SEQ ID NO: 429525 - DNA, 25 bp, Homo sapien
attgcaatatgaactctctcccttc

SEQ ID NO: 429526 - DNA, 25 bp, Homo sapien
cccttcctaaacagataatgcagac

SEQ ID NO: 429527 - DNA, 25 bp, Homo sapien
gattgcaatatgaactctctccctt

SEQ ID NO: 429528 - DNA, 25 bp, Homo sapien
tattggaagttgcatagagaacaca

SEQ ID NO: 429529 - DNA, 25 bp, Homo sapien
atgaagaggttttattggaagttgc

SEQ ID NO: 429530 - DNA, 25 bp, Homo sapien
ttttattggaagttgcatagagaac

SEQ ID NO: 429531 - DNA, 25 bp, Homo sapien
gaggttttattggaagttgcataga

SEQ ID NO: 429532 - DNA, 25 bp, Homo sapien
gagagcagaaggagcaggttccagg

SEQ ID NO: 429533 - DNA, 25 bp, Homo sapien
cacgagagcagaaggagcaggttcc

SEQ ID NO: 429534 - DNA, 25 bp, Homo sapien
tcacgagagcagaaggagcaggttc

SEQ ID NO: 429535 - DNA, 25 bp, Homo sapien
agcagaaggagcaggttccaggatt

SEQ ID NO: 429536 - DNA, 25 bp, Homo sapien
tacagaagcctctgagtgcggcagc

SEQ ID NO: 429537 - DNA, 25 bp, Homo sapien
gaagaagcctcagtcatcacgtgtg

SEQ ID NO: 429538 - DNA, 25 bp, Homo sapien
gataagggtccaagctgagaactcc

SEQ ID NO: 429539 - DNA, 25 bp, Homo sapien
gatcttcactcaaggtggctggcag

SEQ ID NO: 429540 - DNA, 25 bp, Homo sapien
accacacctggctaattttgtattt

SEQ ID NO: 429541 - DNA, 25 bp, Homo sapien
ttcttttttagtcagagtttcgctc

SEQ ID NO: 429542 - DNA, 25 bp, Homo sapien
cctgccaccgtgcccaactaatttt

SEQ ID NO: 429543 - DNA, 25 bp, Homo sapien
ctgccaccgtgcccaactaattttt

SEQ ID NO: 429544 - DNA, 25 bp, Homo sapien
taacctgtaactctgaagtgtctgg

SEQ ID NO: 429545 - DNA, 25 bp, Homo sapien
tctgaagtgtctggtagccaggtgc

SEQ ID NO: 429546 - DNA, 25 bp, Homo sapien
tgtaactctgaagtgtctggtagcc

SEQ ID NO: 429547 - DNA, 25 bp, Homo sapien
aaaactaacctgtaactctgaagtg

SEQ ID NO: 429548 - DNA, 25 bp, Homo sapien
aagtctcttgcctttggagtcgggc

SEQ ID NO: 429549 - DNA, 25 bp, Homo sapien
aaagtctcttgcctttggagtcggg

SEQ ID NO: 429550 - DNA, 25 bp, Homo sapien
taaagtctcttgcctttggagtcgg

SEQ ID NO: 429551 - DNA, 25 bp, Homo sapien
ataaagtctcttgcctttggagtcg

SEQ ID NO: 429552 - DNA, 25 bp, Homo sapien
tgccagtgctccctggcctgcgtgg

SEQ ID NO: 429553 - DNA, 25 bp, Homo sapien
gccatggtgggccactgaccacctt

SEQ ID NO: 429554 - DNA, 25 bp, Homo sapien
actgaccaccttcggcctggatgaa

SEQ ID NO: 429555 - DNA, 25 bp, Homo sapien
gagggttgccaagctttgccagtgc

SEQ ID NO: 429556 - DNA, 25 bp, Homo sapien
cccacggaaggactccgcaggtgct

SEQ ID NO: 429557 - DNA, 25 bp, Homo sapien
tgctgtggcacggagaggcccccac

SEQ ID NO: 429558 - DNA, 25 bp, Homo sapien
caggtgctggagctcgctccctgca

SEQ ID NO: 429559 - DNA, 25 bp, Homo sapien
agctcgctccctgcatggacagctg

SEQ ID NO: 429560 - DNA, 25 bp, Homo sapien
tacagggtaggtctcacaaatgccg

SEQ ID NO: 429561 - DNA, 25 bp, Homo sapien
ttcattccgggaaccagcatggcag

SEQ ID NO: 429562 - DNA, 25 bp, Homo sapien
caatgcccggtgatgacaactgttc

SEQ ID NO: 429563 - DNA, 25 bp, Homo sapien
ggagatggctgtcccaacactggaa

SEQ ID NO: 429564 - DNA, 25 bp, Homo sapien
tggacggctaactacacttgtgggc

SEQ ID NO: 429565 - DNA, 25 bp, Homo sapien
ttttcaccggaacagccgagggaca

SEQ ID NO: 429566 - DNA, 25 bp, Homo sapien
cccagggaatgtggcagaggacact

SEQ ID NO: 429567 - DNA, 25 bp, Homo sapien
ggatgacgcttttgaaagggcctca

SEQ ID NO: 429568 - DNA, 25 bp, Homo sapien
ttaaagcttcggaaacagcggcctg

SEQ ID NO: 429569 - DNA, 25 bp, Homo sapien
caggccggccgtgtttttagcaagc

SEQ ID NO: 429570 - DNA, 25 bp, Homo sapien
tcagggaacttcgactggctccgac

SEQ ID NO: 429571 - DNA, 25 bp, Homo sapien
gaagtgcgtttctgcggtcggccat

SEQ ID NO: 429572 - DNA, 25 bp, Homo sapien
tcctgggcggcaaacagggctcgga

SEQ ID NO: 429573 - DNA, 25 bp, Homo sapien
gaccgtgtgtggacatttttcccaa

SEQ ID NO: 429574 - DNA, 25 bp, Homo sapien
aatccacatctatgttgctcctgga

SEQ ID NO: 429575 - DNA, 25 bp, Homo sapien
ttcccaaattggacaggaatccaca

SEQ ID NO: 429576 - DNA, 25 bp, Homo sapien
caacagttgttcaaggcaagggact

SEQ ID NO: 429577 - DNA, 25 bp, Homo sapien
ttcgctgcgtctccaggaacaacag

SEQ ID NO: 429578 - DNA, 25 bp, Homo sapien
aggaaatgccatgcgcaccatcgag

SEQ ID NO: 429579 - DNA, 25 bp, Homo sapien
tcccatcgcagtgtgacaaagtgca

SEQ ID NO: 429580 - DNA, 25 bp, Homo sapien
gtgagctctgtctccggactcacag

SEQ ID NO: 429581 - DNA, 25 bp, Homo sapien
agtgagctctgtctccggactcaca

SEQ ID NO: 429582 - DNA, 25 bp, Homo sapien
tgagctctgtctccggactcacagc

SEQ ID NO: 429583 - DNA, 25 bp, Homo sapien
agctctgtctccggactcacagccc

SEQ ID NO: 429584 - DNA, 25 bp, Homo sapien
catggctgaaacacagacctccggg

SEQ ID NO: 429585 - DNA, 25 bp, Homo sapien
catcatggccgtggaagatgtttct

SEQ ID NO: 429586 - DNA, 25 bp, Homo sapien
tgagattggccacaaatgggaaagc

SEQ ID NO: 429587 - DNA, 25 bp, Homo sapien
tgcagccaacgttcagggcttcctg

SEQ ID NO: 429588 - DNA, 25 bp, Homo sapien
ctgcatagctgtgttggaggcatcg

SEQ ID NO: 429589 - DNA, 25 bp, Homo sapien
gtgttggaggcatcggtccctgcac

SEQ ID NO: 429590 - DNA, 25 bp, Homo sapien
tagctgtgttggaggcatcggtccc

SEQ ID NO: 429591 - DNA, 25 bp, Homo sapien
catagctgtgttggaggcatcggtc

SEQ ID NO: 429592 - DNA, 25 bp, Homo sapien
tttttctcgccggtactgactggat

SEQ ID NO: 429593 - DNA, 25 bp, Homo sapien
gccgcgtttttctcgccggtactga

SEQ ID NO: 429594 - DNA, 25 bp, Homo sapien
cacgtggccgcgtttttctcgccgg

SEQ ID NO: 429595 - DNA, 25 bp, Homo sapien
tcgccggtactgactggattctctg

SEQ ID NO: 429596 - DNA, 25 bp, Homo sapien
gctgacgacgggcacgctgaagttt

SEQ ID NO: 429597 - DNA, 25 bp, Homo sapien
tattgatccagtacacgttgggcct

SEQ ID NO: 429598 - DNA, 25 bp, Homo sapien
gaagacggtgtcattctgcagagcc

SEQ ID NO: 429599 - DNA, 25 bp, Homo sapien
caagccccgcatgttcaagaagacg

SEQ ID NO: 429600 - DNA, 25 bp, Homo sapien
ggttttcgactcactggtttgccaa

SEQ ID NO: 429601 - DNA, 25 bp, Homo sapien
tagcggctgtccacgttttccaagg

SEQ ID NO: 429602 - DNA, 25 bp, Homo sapien
tcaacaccaggcagtgaaacttctg

SEQ ID NO: 429603 - DNA, 25 bp, Homo sapien
gtgacatcagggctcggttccggta

SEQ ID NO: 429604 - DNA, 25 bp, Homo sapien
gaagagcaggaagagcagtccagga

SEQ ID NO: 429605 - DNA, 25 bp, Homo sapien
tgctgaagagcaggaagagcagtcc

SEQ ID NO: 429606 - DNA, 25 bp, Homo sapien
ctgaagagcaggaagagcagtccag

SEQ ID NO: 429607 - DNA, 25 bp, Homo sapien
cagctcgaaggctgctgaagagcag

SEQ ID NO: 429608 - DNA, 25 bp, Homo sapien
ccatgagcaggaggtagttaagccc

SEQ ID NO: 429609 - DNA, 25 bp, Homo sapien
ggtagttaagcccatcacagaaatg

SEQ ID NO: 429610 - DNA, 25 bp, Homo sapien
ctgtatcttccaaacaggaacaggc

SEQ ID NO: 429611 - DNA, 25 bp, Homo sapien
ccaaacaggaacaggctggttccca

SEQ ID NO: 429612 - DNA, 25 bp, Homo sapien
acttgggccgcgggagacctcggag

SEQ ID NO: 429613 - DNA, 25 bp, Homo sapien
tgggccgcgggagacctcggagagg

SEQ ID NO: 429614 - DNA, 25 bp, Homo sapien
gagaacttgggccgcgggagacctc

SEQ ID NO: 429615 - DNA, 25 bp, Homo sapien
agacctcggagaggagcaacctcgg

SEQ ID NO: 429616 - DNA, 25 bp, Homo sapien
tgtgaacacagagtgcacacactgg

SEQ ID NO: 429617 - DNA, 25 bp, Homo sapien
ggtctggcacagcaacctgcgtttg

SEQ ID NO: 429618 - DNA, 25 bp, Homo sapien
tgttgtaagtgaacgcacacagcac

SEQ ID NO: 429619 - DNA, 25 bp, Homo sapien
caaccgtgactgtttcttgggccgg

SEQ ID NO: 429620 - DNA, 25 bp, Homo sapien
tatgaggacctttgggatgacacgt

SEQ ID NO: 429621 - DNA, 25 bp, Homo sapien
actgtatgttcgtttcctgtgggcg

SEQ ID NO: 429622 - DNA, 25 bp, Homo sapien
gaactaacgacctcacgcttgctgg

SEQ ID NO: 429623 - DNA, 25 bp, Homo sapien
tgacacgtagaacccacctggatga

SEQ ID NO: 429624 - DNA, 25 bp, Homo sapien
tccctggacgtgagatgtgtgtcgt

SEQ ID NO: 429625 - DNA, 25 bp, Homo sapien
cccggggtcattacagagcttgcta

SEQ ID NO: 429626 - DNA, 25 bp, Homo sapien
aattcatccctggacgtgagatgtg

SEQ ID NO: 429627 - DNA, 25 bp, Homo sapien
agatgtgtgtcgtaagcatccagga

SEQ ID NO: 429628 - DNA, 25 bp, Homo sapien
gctgggtttatcctcactgagactc

SEQ ID NO: 429629 - DNA, 25 bp, Homo sapien
agtgcagaccccaaagttcccctgt

SEQ ID NO: 429630 - DNA, 25 bp, Homo sapien
gctttttgcaagcaataccacctgg

SEQ ID NO: 429631 - DNA, 25 bp, Homo sapien
gggtaggacccacaagtgacatcct

SEQ ID NO: 429632 - DNA, 25 bp, Homo sapien
tgagtctccagaacccaacggaacg

SEQ ID NO: 429633 - DNA, 25 bp, Homo sapien
gctttcaggaagtacatcgcgcacc

SEQ ID NO: 429634 - DNA, 25 bp, Homo sapien
ctgcagtgacgacggagacgcaaaa

SEQ ID NO: 429635 - DNA, 25 bp, Homo sapien
tccgaagaggaaagagacaacgtga

SEQ ID NO: 429636 - DNA, 25 bp, Homo sapien
aagaggaagtgagttctgttgaaaa

SEQ ID NO: 429637 - DNA, 25 bp, Homo sapien
ggaagtgagttctgttgaaaaatac

SEQ ID NO: 429638 - DNA, 25 bp, Homo sapien
taaagaggaagtgagttctgttgaa

SEQ ID NO: 429639 - DNA, 25 bp, Homo sapien
ttataaagaggaagtgagttctgtt

SEQ ID NO: 429640 - DNA, 25 bp, Homo sapien
aatattctcttagggggagaaagca

SEQ ID NO: 429641 - DNA, 25 bp, Homo sapien
atattctcttagggggagaaagcag

SEQ ID NO: 429642 - DNA, 25 bp, Homo sapien
attcttcttccgaaaccagagccca

SEQ ID NO: 429643 - DNA, 25 bp, Homo sapien
cgcgagcttcgagctctgcttgttc

SEQ ID NO: 429644 - DNA, 25 bp, Homo sapien
agcttggtgggccacttggccgcga

SEQ ID NO: 429645 - DNA, 25 bp, Homo sapien
ttcttcttccgaaaccagagcccag

SEQ ID NO: 429646 - DNA, 25 bp, Homo sapien
ctccttatggctgggatgttgctcc

SEQ ID NO: 429647 - DNA, 25 bp, Homo sapien
gctgggatgttgctccacacgcgga

SEQ ID NO: 429648 - DNA, 25 bp, Homo sapien
aaggatccgccgtggacatctggga

SEQ ID NO: 429649 - DNA, 25 bp, Homo sapien
cacacgcggacagcattctgcaagg

SEQ ID NO: 429650 - DNA, 25 bp, Homo sapien
ggccctgagtggtcaatggactttc

SEQ ID NO: 429651 - DNA, 25 bp, Homo sapien
atggactttctagcccgactgtgtt

SEQ ID NO: 429652 - DNA, 25 bp, Homo sapien
tctagcccgactgtgttccctacgt

SEQ ID NO: 429653 - DNA, 25 bp, Homo sapien
tcaggggacctggacggtaagcgcc

SEQ ID NO: 429654 - DNA, 25 bp, Homo sapien
cctggcttgggccgtgcgtactgca

SEQ ID NO: 429655 - DNA, 25 bp, Homo sapien
agattgtccacgaacatccagaaga

SEQ ID NO: 429656 - DNA, 25 bp, Homo sapien
gcgagatgcgacgtccaggtcttcc

SEQ ID NO: 429657 - DNA, 25 bp, Homo sapien
gtgcgtactgcaggagccggtggaa

SEQ ID NO: 429658 - DNA, 25 bp, Homo sapien
gggccacagaggtgcatggacccct

SEQ ID NO: 429659 - DNA, 25 bp, Homo sapien
cggcctgggtctgagggatccccct

SEQ ID NO: 429660 - DNA, 25 bp, Homo sapien
agcagcaatgaagccctgcccagtg

SEQ ID NO: 429661 - DNA, 25 bp, Homo sapien
ctcccccaggcaggcctagagtggg

SEQ ID NO: 429662 - DNA, 25 bp, Homo sapien
cgtacacaagatcgaagggtcccca

SEQ ID NO: 429663 - DNA, 25 bp, Homo sapien
tgggaggacggtcacaggtgtggcc

SEQ ID NO: 429664 - DNA, 25 bp, Homo sapien
gtggcgccgtacacaagatcgaagg

SEQ ID NO: 429665 - DNA, 25 bp, Homo sapien
gccgtacacaagatcgaagggtccc

SEQ ID NO: 429666 - DNA, 25 bp, Homo sapien
tgcttcagttgtcccgggtcagaac

SEQ ID NO: 429667 - DNA, 25 bp, Homo sapien
ctgtgtctgtgacatcaaccacatg

SEQ ID NO: 429668 - DNA, 25 bp, Homo sapien
tgtcccgggtcagaaccactttcca

SEQ ID NO: 429669 - DNA, 25 bp, Homo sapien
actgtgtctgtgacatcaaccacat

SEQ ID NO: 429670 - DNA, 25 bp, Homo sapien
tgtctcctccacacaggcacggttt

SEQ ID NO: 429671 - DNA, 25 bp, Homo sapien
gatgtcttcaaaaagggacagcacc

SEQ ID NO: 429672 - DNA, 25 bp, Homo sapien
ggcacggtttcgaacatctcaaggg

SEQ ID NO: 429673 - DNA, 25 bp, Homo sapien
aaagggacagcacccggactggctg

SEQ ID NO: 429674 - DNA, 25 bp, Homo sapien
acacccagttgctcatggcgtgcac

SEQ ID NO: 429675 - DNA, 25 bp, Homo sapien
gactctcggtcgtagaaggccttga

SEQ ID NO: 429676 - DNA, 25 bp, Homo sapien
tatccacacactcgaagcagtagca

SEQ ID NO: 429677 - DNA, 25 bp, Homo sapien
aaggccttgagctggctgcgccact

SEQ ID NO: 429678 - DNA, 25 bp, Homo sapien
tcgtcgtacaggaagagggcatcca

SEQ ID NO: 429679 - DNA, 25 bp, Homo sapien
agatgagcagcgtctctccggagca

SEQ ID NO: 429680 - DNA, 25 bp, Homo sapien
agtaggattggtacccgtcatcgtc

SEQ ID NO: 429681 - DNA, 25 bp, Homo sapien
tacccgtcatcgtcgtacaggaaga

SEQ ID NO: 429682 - DNA, 25 bp, Homo sapien
ggagcaaagcaaggctggcttgtgt

SEQ ID NO: 429683 - DNA, 25 bp, Homo sapien
cttggaaggagcaaagcaaggctgg

SEQ ID NO: 429684 - DNA, 25 bp, Homo sapien
agcaaggctggcttgtgtcatccct

SEQ ID NO: 429685 - DNA, 25 bp, Homo sapien
caaagcaaggctggcttgtgtcatc

SEQ ID NO: 429686 - DNA, 25 bp, Homo sapien
tggagacttccgcagcagatgcaga

SEQ ID NO: 429687 - DNA, 25 bp, Homo sapien
gagacttccgcagcagatgcagatg

SEQ ID NO: 429688 - DNA, 25 bp, Homo sapien
acctggagacttccgcagcagatgc

SEQ ID NO: 429689 - DNA, 25 bp, Homo sapien
tgtgaacctggagacttccgcagca

SEQ ID NO: 429690 - DNA, 25 bp, Homo sapien
ttctatatttcgctggttagccttg

SEQ ID NO: 429691 - DNA, 25 bp, Homo sapien
cgctggttagccttgacttcatatg

SEQ ID NO: 429692 - DNA, 25 bp, Homo sapien
tggttagccttgacttcatatgcaa

SEQ ID NO: 429693 - DNA, 25 bp, Homo sapien
atttcgctggttagccttgacttca

SEQ ID NO: 429694 - DNA, 25 bp, Homo sapien
ctgtcccgggtgaaacggagcttga

SEQ ID NO: 429695 - DNA, 25 bp, Homo sapien
ctctgcctgtcccgggtgaaacgga

SEQ ID NO: 429696 - DNA, 25 bp, Homo sapien
tgcctgtcccgggtgaaacggagct

SEQ ID NO: 429697 - DNA, 25 bp, Homo sapien
cgggtgaaacggagcttgagagctc

SEQ ID NO: 429698 - DNA, 25 bp, Homo sapien
ccaccaaaatcacgtccatgctggg

SEQ ID NO: 429699 - DNA, 25 bp, Homo sapien
atcccaccaaaatcacgtccatgct

SEQ ID NO: 429700 - DNA, 25 bp, Homo sapien
ccaaaatcacgtccatgctgggctc

SEQ ID NO: 429701 - DNA, 25 bp, Homo sapien
aaaatcacgtccatgctgggctcgg

SEQ ID NO: 429702 - DNA, 25 bp, Homo sapien
ggatgaggggcaggacagccaaggc

SEQ ID NO: 429703 - DNA, 25 bp, Homo sapien
gaggggcaggacagccaaggccagt

SEQ ID NO: 429704 - DNA, 25 bp, Homo sapien
acccagggatgaggggcaggacagc

SEQ ID NO: 429705 - DNA, 25 bp, Homo sapien
ctgcccaacccagggatgaggggca

SEQ ID NO: 429706 - DNA, 25 bp, Homo sapien
actgggccatggaacgagggacggc

SEQ ID NO: 429707 - DNA, 25 bp, Homo sapien
acggctccgggtacagccagctggt

SEQ ID NO: 429708 - DNA, 25 bp, Homo sapien
gccatggaacgagggacggcgcagg

SEQ ID NO: 429709 - DNA, 25 bp, Homo sapien
ctgccacggctccgggtacagccag

SEQ ID NO: 429710 - DNA, 25 bp, Homo sapien
ggcaaagaatctgggcgtgtcccgc

SEQ ID NO: 429711 - DNA, 25 bp, Homo sapien
ggcagcccttcagtgccggtttgca

SEQ ID NO: 429712 - DNA, 25 bp, Homo sapien
ctatgggggcaaagaatctgggcgt

SEQ ID NO: 429713 - DNA, 25 bp, Homo sapien
ccttcagtgccggtttgcagtggga

SEQ ID NO: 429714 - DNA, 25 bp, Homo sapien
ctccagctccccggttcaagagaat

SEQ ID NO: 429715 - DNA, 25 bp, Homo sapien
ccccggttcaagagaatcctcagct

SEQ ID NO: 429716 - DNA, 25 bp, Homo sapien
gctccccggttcaagagaatcctca

SEQ ID NO: 429717 - DNA, 25 bp, Homo sapien
ccaccatactcggcttttgttttgt

SEQ ID NO: 429718 - DNA, 25 bp, Homo sapien
ttgtgatttacatccctgcgtgaag

SEQ ID NO: 429719 - DNA, 25 bp, Homo sapien
tgatttacatccctgcgtgaagttt

SEQ ID NO: 429720 - DNA, 25 bp, Homo sapien
ggttgtgatttacatccctgcgtga

SEQ ID NO: 429721 - DNA, 25 bp, Homo sapien
gggttgtgatttacatccctgcgtg

SEQ ID NO: 429722 - DNA, 25 bp, Homo sapien
acccaccagcacctccgccgggcag

SEQ ID NO: 429723 - DNA, 25 bp, Homo sapien
ctggagcccatccaaaggtggtgtc

SEQ ID NO: 429724 - DNA, 25 bp, Homo sapien
cgcctgagctcaacctcggtcctgg

SEQ ID NO: 429725 - DNA, 25 bp, Homo sapien
ggagcccatccaaaggtggtgtcca

SEQ ID NO: 429726 - DNA, 25 bp, Homo sapien
tttgcacctgtaggagctttggtcc

SEQ ID NO: 429727 - DNA, 25 bp, Homo sapien
cccaaagtcactctttgcacctgta

SEQ ID NO: 429728 - DNA, 25 bp, Homo sapien
gagctttggtccgttcagcatgacc

SEQ ID NO: 429729 - DNA, 25 bp, Homo sapien
ctttggtccgttcagcatgaccaga

SEQ ID NO: 429730 - DNA, 25 bp, Homo sapien
cacctccagggagccgtggcggctc

SEQ ID NO: 429731 - DNA, 25 bp, Homo sapien
tccaggggtctgtgccacctccagg

SEQ ID NO: 429732 - DNA, 25 bp, Homo sapien
ctccagggagccgtggcggctccat

SEQ ID NO: 429733 - DNA, 25 bp, Homo sapien
cccctccaggggtctgtgccacctc

SEQ ID NO: 429734 - DNA, 25 bp, Homo sapien
ggtctgtcttttagagttcagaaaa

SEQ ID NO: 429735 - DNA, 25 bp, Homo sapien
gcccagttgtcacccttttcgcagg

SEQ ID NO: 429736 - DNA, 25 bp, Homo sapien
tgagggcgtggtgtcctcgcacgct

SEQ ID NO: 429737 - DNA, 25 bp, Homo sapien
tggttgagaaaatgcggacacacac

SEQ ID NO: 429738 - DNA, 25 bp, Homo sapien
tccagtcccgttctaaaatccagtc

SEQ ID NO: 429739 - DNA, 25 bp, Homo sapien
tctccgggcgtcaaagcaggtttta

SEQ ID NO: 429740 - DNA, 25 bp, Homo sapien
gccagtcccgttctaaaatccagaa

SEQ ID NO: 429741 - DNA, 25 bp, Homo sapien
ggccatgtgacatggccactttgtt

SEQ ID NO: 429742 - DNA, 25 bp, Homo sapien
ggcgctacgaggagctctgcatcgt

SEQ ID NO: 429743 - DNA, 25 bp, Homo sapien
cctgggctccgacactgctgtaaat

SEQ ID NO: 429744 - DNA, 25 bp, Homo sapien
tgcatcgtcatgtgtgtcatcccag

SEQ ID NO: 429745 - DNA, 25 bp, Homo sapien
tgtaaatgccgccatggaggtacgg

SEQ ID NO: 429746 - DNA, 25 bp, Homo sapien
ccctgcctgatgaggtgttagaacc

SEQ ID NO: 429747 - DNA, 25 bp, Homo sapien
gaaacaggttcataggcccagggaa

SEQ ID NO: 429748 - DNA, 25 bp, Homo sapien
tgtgtcacaccgtctgggatcagga

SEQ ID NO: 429749 - DNA, 25 bp, Homo sapien
atttcgggcagagtgacgcgacctc

SEQ ID NO: 429750 - DNA, 25 bp, Homo sapien
gagatcacaccccttctggagagct

SEQ ID NO: 429751 - DNA, 25 bp, Homo sapien
cttctggagagcttgcacggatgag

SEQ ID NO: 429752 - DNA, 25 bp, Homo sapien
tctatgtcccgagtggtgactccac

SEQ ID NO: 429753 - DNA, 25 bp, Homo sapien
aagcgctttactgagggcacccact

SEQ ID NO: 429754 - DNA, 25 bp, Homo sapien
gattgtggcatcctcataagacttg

SEQ ID NO: 429755 - DNA, 25 bp, Homo sapien
taagacttgcgactcttcccagagg

SEQ ID NO: 429756 - DNA, 25 bp, Homo sapien
gatctggatctcaaccccacatggg

SEQ ID NO: 429757 - DNA, 25 bp, Homo sapien
tgactccccatctcacgtgaatgct

SEQ ID NO: 429758 - DNA, 25 bp, Homo sapien
gccagcattctcgaagtctcccttg

SEQ ID NO: 429759 - DNA, 25 bp, Homo sapien
gcagatgtcgctatgggtgccagca

SEQ ID NO: 429760 - DNA, 25 bp, Homo sapien
gctggaatcggcaaagccatccgtg

SEQ ID NO: 429761 - DNA, 25 bp, Homo sapien
gaaatctatccaaggaccaagggct

SEQ ID NO: 429762 - DNA, 25 bp, Homo sapien
tttcaggaagactgtcacaaccatg

SEQ ID NO: 429763 - DNA, 25 bp, Homo sapien
agaaacggcccttgctttcaggaag

SEQ ID NO: 429764 - DNA, 25 bp, Homo sapien
atgccttgggaaacgtcacctccag

SEQ ID NO: 429765 - DNA, 25 bp, Homo sapien
ggagaaacggcccttgctttcagga

SEQ ID NO: 429766 - DNA, 25 bp, Homo sapien
gactggtgtagacaggcatctccac

SEQ ID NO: 429767 - DNA, 25 bp, Homo sapien
aatcttttattagggaggacagcct

SEQ ID NO: 429768 - DNA, 25 bp, Homo sapien
tcctgccctcggccgatgtggcaaa

SEQ ID NO: 429769 - DNA, 25 bp, Homo sapien
caaaatcctccctttaagagcccag

SEQ ID NO: 429770 - DNA, 25 bp, Homo sapien
gaggctggagcggcgttcaggtcct

SEQ ID NO: 429771 - DNA, 25 bp, Homo sapien
ctggagcggcgttcaggtcctgcgg

SEQ ID NO: 429772 - DNA, 25 bp, Homo sapien
ggctggagcggcgttcaggtcctgc

SEQ ID NO: 429773 - DNA, 25 bp, Homo sapien
gctggagcggcgttcaggtcctgcg

SEQ ID NO: 429774 - DNA, 25 bp, Homo sapien
tcactcggcgtgctcctgcacctct

SEQ ID NO: 429775 - DNA, 25 bp, Homo sapien
tgcccacagtctgctgcacggcctc

SEQ ID NO: 429776 - DNA, 25 bp, Homo sapien
gcccacagtctgctgcacggcctcc

SEQ ID NO: 429777 - DNA, 25 bp, Homo sapien
actcggcgtgctcctgcacctcttc

SEQ ID NO: 429778 - DNA, 25 bp, Homo sapien
ggtgccccaccacggagcgactggt

SEQ ID NO: 429779 - DNA, 25 bp, Homo sapien
gggtgcggactaagcccacccggca

SEQ ID NO: 429780 - DNA, 25 bp, Homo sapien
ggtgtgggccgtccaagtgactgac

SEQ ID NO: 429781 - DNA, 25 bp, Homo sapien
acccggcacggcgaggctgcttccc

SEQ ID NO: 429782 - DNA, 25 bp, Homo sapien
gtgtgtgcgcattcacagacccgca

SEQ ID NO: 429783 - DNA, 25 bp, Homo sapien
ccacggtttctgtgcagtgggtgca

SEQ ID NO: 429784 - DNA, 25 bp, Homo sapien
ggcacctcttccacgtgactcctgt

SEQ ID NO: 429785 - DNA, 25 bp, Homo sapien
ggcacactcggagaatctgagcaga

SEQ ID NO: 429786 - DNA, 25 bp, Homo sapien
cctgtggctgctcgaggcatccctg

SEQ ID NO: 429787 - DNA, 25 bp, Homo sapien
gtggctgctcgaggcatccctggct

SEQ ID NO: 429788 - DNA, 25 bp, Homo sapien
ttcaggccacgttcatcctgggcgc

SEQ ID NO: 429789 - DNA, 25 bp, Homo sapien
cttcaggccacgttcatcctgggcg

SEQ ID NO: 429790 - DNA, 25 bp, Homo sapien
tgcgggtcgcatccaagcaaaggag

SEQ ID NO: 429791 - DNA, 25 bp, Homo sapien
gagacaaaggcgtgtgagggtcagg

SEQ ID NO: 429792 - DNA, 25 bp, Homo sapien
atacaaatcccacctggcacacggg

SEQ ID NO: 429793 - DNA, 25 bp, Homo sapien
tctgcaaaccctgtctgcgggtcgc

SEQ ID NO: 429794 - DNA, 25 bp, Homo sapien
cacaggcaccagcagcgggtgtgat

SEQ ID NO: 429795 - DNA, 25 bp, Homo sapien
tgcagcatagcttggggccgccgtg

SEQ ID NO: 429796 - DNA, 25 bp, Homo sapien
tctctggggccgcagtgatctcctc

SEQ ID NO: 429797 - DNA, 25 bp, Homo sapien
tcctcgctgtccagcgggtcccggc

SEQ ID NO: 429798 - DNA, 25 bp, Homo sapien
cctcactcagtgcacgggacagctc

SEQ ID NO: 429799 - DNA, 25 bp, Homo sapien
tgtatacctgacaaggatgagacac

SEQ ID NO: 429800 - DNA, 25 bp, Homo sapien
gaaaatagtggtgtctgtatacctg

SEQ ID NO: 429801 - DNA, 25 bp, Homo sapien
atcaataaaattgtctgggagaaaa

SEQ ID NO: 429802 - DNA, 25 bp, Homo sapien
aggatgagacactagtgtgctgaga

SEQ ID NO: 429803 - DNA, 25 bp, Homo sapien
cgggtggcgggatcaagaggagaca

SEQ ID NO: 429804 - DNA, 25 bp, Homo sapien
ctgcattcgggtggcgggatcaaga

SEQ ID NO: 429805 - DNA, 25 bp, Homo sapien
cagaagccaggggaacagcctctgg

SEQ ID NO: 429806 - DNA, 25 bp, Homo sapien
cctacgctgcgctgctgcattcggg

SEQ ID NO: 429807 - DNA, 25 bp, Homo sapien
cagcacggtcatgcggtagcggtgg

SEQ ID NO: 429808 - DNA, 25 bp, Homo sapien
gctggtgccgcagcacgggttctcg

SEQ ID NO: 429809 - DNA, 25 bp, Homo sapien
ggtacagctcactcaggcgctggca

SEQ ID NO: 429810 - DNA, 25 bp, Homo sapien
cggcagccccttcaggtagaagagc

SEQ ID NO: 429811 - DNA, 25 bp, Homo sapien
cctgagaagcctaaatcggatgtca

SEQ ID NO: 429812 - DNA, 25 bp, Homo sapien
acaagtcacgtgcagcaggacctgg

SEQ ID NO: 429813 - DNA, 25 bp, Homo sapien
tcggatgtcacaagtcacgtgcagc

SEQ ID NO: 429814 - DNA, 25 bp, Homo sapien
ccagtaaaaggcactcatgggacct

SEQ ID NO: 429815 - DNA, 25 bp, Homo sapien
gcgtgatcacctccaggctgggcat

SEQ ID NO: 429816 - DNA, 25 bp, Homo sapien
agcgtgatcacctccaggctgggca

SEQ ID NO: 429817 - DNA, 25 bp, Homo sapien
ctgagcgtgatcacctccaggctgg

SEQ ID NO: 429818 - DNA, 25 bp, Homo sapien
tgagcgtgatcacctccaggctggg

SEQ ID NO: 429819 - DNA, 25 bp, Homo sapien
tgaatgcccacgagtatgccaggtt

SEQ ID NO: 429820 - DNA, 25 bp, Homo sapien
taaataattgcgctggacatggtgg

SEQ ID NO: 429821 - DNA, 25 bp, Homo sapien
tgataacaggtctaggccaaaagga

SEQ ID NO: 429822 - DNA, 25 bp, Homo sapien
aaacagattacacccagatgccacg

SEQ ID NO: 429823 - DNA, 25 bp, Homo sapien
gatcacctgaactcagggggtttga

SEQ ID NO: 429824 - DNA, 25 bp, Homo sapien
tggatcacctgaactcagggggttt

SEQ ID NO: 429825 - DNA, 25 bp, Homo sapien
ggtggatcacctgaactcagggggt

SEQ ID NO: 429826 - DNA, 25 bp, Homo sapien
tcacctgaactcagggggtttgaga

SEQ ID NO: 429827 - DNA, 25 bp, Homo sapien
tctgcagaatgaaaaccgctaagtg

SEQ ID NO: 429828 - DNA, 25 bp, Homo sapien
tctgcgaccaagtgacaaagggtgt

SEQ ID NO: 429829 - DNA, 25 bp, Homo sapien
agaaacaattggtatgcgatccctg

SEQ ID NO: 429830 - DNA, 25 bp, Homo sapien
tgacgggaactgcaaaataagcctg

SEQ ID NO: 429831 - DNA, 25 bp, Homo sapien
cccgcctgcacggtgaggccagttg

SEQ ID NO: 429832 - DNA, 25 bp, Homo sapien
ggaagcgtctgctctcgctgacccc

SEQ ID NO: 429833 - DNA, 25 bp, Homo sapien
tctgggcagtctgcggacacccctg

SEQ ID NO: 429834 - DNA, 25 bp, Homo sapien
tgaggccagttgacacggcgcggtc

SEQ ID NO: 429835 - DNA, 25 bp, Homo sapien
tgagcttgcgcacgctgtgcagctc

SEQ ID NO: 429836 - DNA, 25 bp, Homo sapien
ccttggcccgggtcagaaccatctt

SEQ ID NO: 429837 - DNA, 25 bp, Homo sapien
gttgagcttgcgcacgctgtgcagc

SEQ ID NO: 429838 - DNA, 25 bp, Homo sapien
tcagaaccatcttccgcgtcagctt

SEQ ID NO: 429839 - DNA, 25 bp, Homo sapien
cttgggcgccgctgacacgttggct

SEQ ID NO: 429840 - DNA, 25 bp, Homo sapien
gccgattggcggctcggtgaggaga

SEQ ID NO: 429841 - DNA, 25 bp, Homo sapien
tcctgatcccgggcgggtgacgact

SEQ ID NO: 429842 - DNA, 25 bp, Homo sapien
tgacgactgcgcggcgcgtgtctcc

SEQ ID NO: 429843 - DNA, 25 bp, Homo sapien
ggtcatcataaaggccttgccgtct

SEQ ID NO: 429844 - DNA, 25 bp, Homo sapien
aatctgcatagaagtggatccccgc

SEQ ID NO: 429845 - DNA, 25 bp, Homo sapien
catgcggccctgtgcagagagtttg

SEQ ID NO: 429846 - DNA, 25 bp, Homo sapien
cccgtgtcgttcagggtcagccgaa

SEQ ID NO: 429847 - DNA, 25 bp, Homo sapien
cacatttgggcggagttactgggac

SEQ ID NO: 429848 - DNA, 25 bp, Homo sapien
cataggtctcgtgtgcacatttggg

SEQ ID NO: 429849 - DNA, 25 bp, Homo sapien
gttccaaaagctcctgcaagcgagt

SEQ ID NO: 429850 - DNA, 25 bp, Homo sapien
gcttttattctaggccaacccacaa

SEQ ID NO: 429851 - DNA, 25 bp, Homo sapien
aagtgtgagcatttcggttagttgc

SEQ ID NO: 429852 - DNA, 25 bp, Homo sapien
gcatttcggttagttgctgggttct

SEQ ID NO: 429853 - DNA, 25 bp, Homo sapien
cagccctagacgtgttcctgctgcc

SEQ ID NO: 429854 - DNA, 25 bp, Homo sapien
tccccagccctagacgtgttcctgc

SEQ ID NO: 429855 - DNA, 25 bp, Homo sapien
tctgaacattgagagaacccgagca

SEQ ID NO: 429856 - DNA, 25 bp, Homo sapien
gatcaggtcctagagttcagtgcca

SEQ ID NO: 429857 - DNA, 25 bp, Homo sapien
aggactgtcatctcgaggccaaggg

SEQ ID NO: 429858 - DNA, 25 bp, Homo sapien
aaaataggtggctgtccatccggcc

SEQ ID NO: 429859 - DNA, 25 bp, Homo sapien
ctctctcctgggaccgacaggctgc

SEQ ID NO: 429860 - DNA, 25 bp, Homo sapien
tgagcctcggctgtccgtctgctga

SEQ ID NO: 429861 - DNA, 25 bp, Homo sapien
ggctgtccgtctgctgagacatctt

SEQ ID NO: 429862 - DNA, 25 bp, Homo sapien
cctcggctgtccgtctgctgagaca

SEQ ID NO: 429863 - DNA, 25 bp, Homo sapien
ctgagctccccacataccgcactgc

SEQ ID NO: 429864 - DNA, 25 bp, Homo sapien
cccacataccgcactgcagagtggg

SEQ ID NO: 429865 - DNA, 25 bp, Homo sapien
gctccccacataccgcactgcagag

SEQ ID NO: 429866 - DNA, 25 bp, Homo sapien
ctggttcctggacgtccacggggag

SEQ ID NO: 429867 - DNA, 25 bp, Homo sapien
gcctcaacatggagccttgcctggc

SEQ ID NO: 429868 - DNA, 25 bp, Homo sapien
tcatccaccatggaggtcattggcc

SEQ ID NO: 429869 - DNA, 25 bp, Homo sapien
gcctccatgtttcgaggtgcctcaa

SEQ ID NO: 429870 - DNA, 25 bp, Homo sapien
tgactgtcaggataaactccgtggg

SEQ ID NO: 429871 - DNA, 25 bp, Homo sapien
gggtttatgacacacgagaaggtgt

SEQ ID NO: 429872 - DNA, 25 bp, Homo sapien
gaagccggaggtaggtcactctcca

SEQ ID NO: 429873 - DNA, 25 bp, Homo sapien
agcaaaaatcataacaatgtgttgt

SEQ ID NO: 429874 - DNA, 25 bp, Homo sapien
cactgacagcagagtcgctgcggag

SEQ ID NO: 429875 - DNA, 25 bp, Homo sapien
gatggcccgagctttgtcacataga

SEQ ID NO: 429876 - DNA, 25 bp, Homo sapien
tcaaaggtacgtgatgccaatctac

SEQ ID NO: 429877 - DNA, 25 bp, Homo sapien
gatgttctcacgatcggaatgcgga

SEQ ID NO: 429878 - DNA, 25 bp, Homo sapien
gcaaaacagcgcaagctggaccgct

SEQ ID NO: 429879 - DNA, 25 bp, Homo sapien
ggtaggcgagggacgctcagcaggg

SEQ ID NO: 429880 - DNA, 25 bp, Homo sapien
gccacggggtaggcgagggacgctc

SEQ ID NO: 429881 - DNA, 25 bp, Homo sapien
cggggtaggcgagggacgctcagca

SEQ ID NO: 429882 - DNA, 25 bp, Homo sapien
ggacgctcagcaggggcttcccgca

SEQ ID NO: 429883 - DNA, 25 bp, Homo sapien
ggcttagcttcctgatgccgcccat

SEQ ID NO: 429884 - DNA, 25 bp, Homo sapien
cctacctgggcatcatgggaggcag

SEQ ID NO: 429885 - DNA, 25 bp, Homo sapien
ggtctcggccttgcgagacaaggca

SEQ ID NO: 429886 - DNA, 25 bp, Homo sapien
gctgcactgattgcaagagtttccc

SEQ ID NO: 429887 - DNA, 25 bp, Homo sapien
attctgtggaatgtgcagacgtgca

SEQ ID NO: 429888 - DNA, 25 bp, Homo sapien
gctccacagctggtcacattctgtg

SEQ ID NO: 429889 - DNA, 25 bp, Homo sapien
agacgtgcacggcccatcagacagg

SEQ ID NO: 429890 - DNA, 25 bp, Homo sapien
gggccattttgtattgagctccaca

SEQ ID NO: 429891 - DNA, 25 bp, Homo sapien
tgaacctgcgtgagccccgcagagg

SEQ ID NO: 429892 - DNA, 25 bp, Homo sapien
caggagctgaacctgcgtgagcccc

SEQ ID NO: 429893 - DNA, 25 bp, Homo sapien
agagggtgcagagccggcttgtgca

SEQ ID NO: 429894 - DNA, 25 bp, Homo sapien
cagagccggcttgtgcaggctccca

SEQ ID NO: 429895 - DNA, 25 bp, Homo sapien
attcctaagaccgatggattacttc

SEQ ID NO: 429896 - DNA, 25 bp, Homo sapien
ttttgattcctaagaccgatggatt

SEQ ID NO: 429897 - DNA, 25 bp, Homo sapien
tgattcctaagaccgatggattact

SEQ ID NO: 429898 - DNA, 25 bp, Homo sapien
tcctaagaccgatggattacttcta

SEQ ID NO: 429899 - DNA, 25 bp, Homo sapien
cacctgagtgagaatatgtggtgtt

SEQ ID NO: 429900 - DNA, 25 bp, Homo sapien
cccacctgagtgagaatatgtggtg

SEQ ID NO: 429901 - DNA, 25 bp, Homo sapien
gttcagttcccacctgagtgagaat

SEQ ID NO: 429902 - DNA, 25 bp, Homo sapien
tcattgttcagttcccacctgagtg

SEQ ID NO: 429903 - DNA, 25 bp, Homo sapien
gaaggatgaccctgtacacaccact

SEQ ID NO: 429904 - DNA, 25 bp, Homo sapien
tgtgtcaagcatcagacgacgtcgg

SEQ ID NO: 429905 - DNA, 25 bp, Homo sapien
tcatttgtcaccgagaccctcagtg

SEQ ID NO: 429906 - DNA, 25 bp, Homo sapien
actgctctaggcaaggatgcgaccc

SEQ ID NO: 429907 - DNA, 25 bp, Homo sapien
tgtgggtgagtctgcaaaccaaaaa

SEQ ID NO: 429908 - DNA, 25 bp, Homo sapien
gagcaaggcccaactggaaaagcat

SEQ ID NO: 429909 - DNA, 25 bp, Homo sapien
cgtcagcctcacatgaacagaaaca

SEQ ID NO: 429910 - DNA, 25 bp, Homo sapien
gttggaacagttgcgacaccgtcag

SEQ ID NO: 429911 - DNA, 25 bp, Homo sapien
gaaatccccgcttgacactcagatg

SEQ ID NO: 429912 - DNA, 25 bp, Homo sapien
tgtgatttctgacctcgcgctagtg

SEQ ID NO: 429913 - DNA, 25 bp, Homo sapien
tctgattggcggaaaaagcacattg

SEQ ID NO: 429914 - DNA, 25 bp, Homo sapien
tagaaacggttccttgacagcgaaa

SEQ ID NO: 429915 - DNA, 25 bp, Homo sapien
agtagatgaggtaggcaccagccgt

SEQ ID NO: 429916 - DNA, 25 bp, Homo sapien
ccagtccctgcagccgacggtgggg

SEQ ID NO: 429917 - DNA, 25 bp, Homo sapien
ggtgctgaaggcctcccagtccctg

SEQ ID NO: 429918 - DNA, 25 bp, Homo sapien
gctccttggcgctggagtagatgag

SEQ ID NO: 429919 - DNA, 25 bp, Homo sapien
gaaatgacacctgacttgggactcg

SEQ ID NO: 429920 - DNA, 25 bp, Homo sapien
tgggcccagccaatctcggaaatga

SEQ ID NO: 429921 - DNA, 25 bp, Homo sapien
tgttaggatgtccacacgccgcatc

SEQ ID NO: 429922 - DNA, 25 bp, Homo sapien
cagcactcgtgggttgtggctacac

SEQ ID NO: 429923 - DNA, 25 bp, Homo sapien
gaaataatcttctcccaccgagaaa

SEQ ID NO: 429924 - DNA, 25 bp, Homo sapien
tacgcccatcgaaggagttggccac

SEQ ID NO: 429925 - DNA, 25 bp, Homo sapien
tgttcaccgagaaggtacgcccatc

SEQ ID NO: 429926 - DNA, 25 bp, Homo sapien
gtaaataatactgttcaccgagaag

SEQ ID NO: 429927 - DNA, 25 bp, Homo sapien
gagcgtgtcggtctggaaccatcac

SEQ ID NO: 429928 - DNA, 25 bp, Homo sapien
tggatctcacatctgtctcaacagg

SEQ ID NO: 429929 - DNA, 25 bp, Homo sapien
gacgccccacactggtcaggatggt

SEQ ID NO: 429930 - DNA, 25 bp, Homo sapien
gcaggtttattcacagaccggaatt

SEQ ID NO: 429931 - DNA, 25 bp, Homo sapien
tcccactggcctgtggaggcgcata

SEQ ID NO: 429932 - DNA, 25 bp, Homo sapien
cccactggcctgtggaggcgcatac

SEQ ID NO: 429933 - DNA, 25 bp, Homo sapien
ctcccactggcctgtggaggcgcat

SEQ ID NO: 429934 - DNA, 25 bp, Homo sapien
tggaacttgacaaaggcctgcgcgg

SEQ ID NO: 429935 - DNA, 25 bp, Homo sapien
ctgtttgccacagcgaggaagatcc

SEQ ID NO: 429936 - DNA, 25 bp, Homo sapien
gatctggaagacctcccagtctgca

SEQ ID NO: 429937 - DNA, 25 bp, Homo sapien
tgcgcggtcacgttcagctcgtaga

SEQ ID NO: 429938 - DNA, 25 bp, Homo sapien
tccacaaggcggaagcttctgccag

SEQ ID NO: 429939 - DNA, 25 bp, Homo sapien
tgccagcaccttggggataagggtg

SEQ ID NO: 429940 - DNA, 25 bp, Homo sapien
tgcacacggaggcccaactgcggca

SEQ ID NO: 429941 - DNA, 25 bp, Homo sapien
tctgcatgtggggtccacaaggcgg

SEQ ID NO: 429942 - DNA, 25 bp, Homo sapien
tggcaaaacatgaaagtgggctttg

SEQ ID NO: 429943 - DNA, 25 bp, Homo sapien
agaggaagcccgtccatgtgtgcgt

SEQ ID NO: 429944 - DNA, 25 bp, Homo sapien
caaaacatgaaagtgggctttgtga

SEQ ID NO: 429945 - DNA, 25 bp, Homo sapien
gaggaagcccgtccatgtgtgcgtg

SEQ ID NO: 429946 - DNA, 25 bp, Homo sapien
ccgttcccggagttctggttctgct

SEQ ID NO: 429947 - DNA, 25 bp, Homo sapien
tgggccatgatggcgcccccagcag

SEQ ID NO: 429948 - DNA, 25 bp, Homo sapien
tgcagccgtgcttccttctgtctgc

SEQ ID NO: 429949 - DNA, 25 bp, Homo sapien
cgttcccggagttctggttctgctt

SEQ ID NO: 429950 - DNA, 25 bp, Homo sapien
ctttcaggcggatgtcacccacccc

SEQ ID NO: 429951 - DNA, 25 bp, Homo sapien
caggcggatgtcacccaccccttgg

SEQ ID NO: 429952 - DNA, 25 bp, Homo sapien
ttcaggcggatgtcacccacccctt

SEQ ID NO: 429953 - DNA, 25 bp, Homo sapien
tttcaggcggatgtcacccacccct

SEQ ID NO: 429954 - DNA, 25 bp, Homo sapien
cacaggaaggccgtcctggcctggc

SEQ ID NO: 429955 - DNA, 25 bp, Homo sapien
gcaccctggggctttcggtcctgtc

SEQ ID NO: 429956 - DNA, 25 bp, Homo sapien
gtgtctctgccttcctcgactcctg

SEQ ID NO: 429957 - DNA, 25 bp, Homo sapien
agctctgcatgcgagaacgctccca

SEQ ID NO: 429958 - DNA, 25 bp, Homo sapien
atgaccgaaggctcctgaaccctcc

SEQ ID NO: 429959 - DNA, 25 bp, Homo sapien
ttcaggtccgctgtccgcacaccag

SEQ ID NO: 429960 - DNA, 25 bp, Homo sapien
tcttagcagcatgcgtgttgtggtg

SEQ ID NO: 429961 - DNA, 25 bp, Homo sapien
gacacccttgtagtttcccagagtc

SEQ ID NO: 429962 - DNA, 25 bp, Homo sapien
ctggcaaggcctgactgttgtcact

SEQ ID NO: 429963 - DNA, 25 bp, Homo sapien
gcaaggcctgactgttgtcactgtt

SEQ ID NO: 429964 - DNA, 25 bp, Homo sapien
tctaatgcaggggtagcctggcaag

SEQ ID NO: 429965 - DNA, 25 bp, Homo sapien
cacagcttcttgtctaatgcagggg

SEQ ID NO: 429966 - DNA, 25 bp, Homo sapien
gccaccaccaggaacgagtagggcc

SEQ ID NO: 429967 - DNA, 25 bp, Homo sapien
ggttgccgggttccacttgtagatg

SEQ ID NO: 429968 - DNA, 25 bp, Homo sapien
acactgtcgatgttgtggttgtcgc

SEQ ID NO: 429969 - DNA, 25 bp, Homo sapien
actcccagtcgtaggcgccggaggt

SEQ ID NO: 429970 - DNA, 25 bp, Homo sapien
ggacaggtgtacatctccatggcct

SEQ ID NO: 429971 - DNA, 25 bp, Homo sapien
caccgcccttgggacaggtgtacat

SEQ ID NO: 429972 - DNA, 25 bp, Homo sapien
gggccatcacaggtgctattcccat

SEQ ID NO: 429973 - DNA, 25 bp, Homo sapien
tcacaggtgctattcccatatggaa

SEQ ID NO: 429974 - DNA, 25 bp, Homo sapien
tctcgggcgctgtgtgtggcaatgc

SEQ ID NO: 429975 - DNA, 25 bp, Homo sapien
cttctcatctggttcaaaattagcc

SEQ ID NO: 429976 - DNA, 25 bp, Homo sapien
tgacagagaactcctgacccttctc

SEQ ID NO: 429977 - DNA, 25 bp, Homo sapien
gttggccaccgccaggaagtgctcc

SEQ ID NO: 429978 - DNA, 25 bp, Homo sapien
ctgcttgggtcggtgccagcggcct

SEQ ID NO: 429979 - DNA, 25 bp, Homo sapien
ttctgcttgggtcggtgccagcggc

SEQ ID NO: 429980 - DNA, 25 bp, Homo sapien
gggtcggtgccagcggcctggtttc

SEQ ID NO: 429981 - DNA, 25 bp, Homo sapien
ttgggtcggtgccagcggcctggtt

SEQ ID NO: 429982 - DNA, 25 bp, Homo sapien
cagaatcagtgtagggggccccgcc

SEQ ID NO: 429983 - DNA, 25 bp, Homo sapien
tggactcggggctttccaagagaaa

SEQ ID NO: 429984 - DNA, 25 bp, Homo sapien
ctgcagaatcagtgtagggggcccc

SEQ ID NO: 429985 - DNA, 25 bp, Homo sapien
ccgcctgtggactcggggctttcca

SEQ ID NO: 429986 - DNA, 25 bp, Homo sapien
gacgaacttctcttcggtccacttg

SEQ ID NO: 429987 - DNA, 25 bp, Homo sapien
ttcccgatggtgaaatgcctccagg

SEQ ID NO: 429988 - DNA, 25 bp, Homo sapien
ttggctgtggccacaaagagcccca

SEQ ID NO: 429989 - DNA, 25 bp, Homo sapien
tccacttgtagacggcggatgtggc

SEQ ID NO: 429990 - DNA, 25 bp, Homo sapien
tgtgatagaaacgttgtgactcggt

SEQ ID NO: 429991 - DNA, 25 bp, Homo sapien
tgactcggttaagatttccgagaac

SEQ ID NO: 429992 - DNA, 25 bp, Homo sapien
ggaaatccagagcaatcctcgcggg

SEQ ID NO: 429993 - DNA, 25 bp, Homo sapien
agtttccacgtttcgctctcacagg

SEQ ID NO: 429994 - DNA, 25 bp, Homo sapien
ggcatcaaaccagaactgggcgtct

SEQ ID NO: 429995 - DNA, 25 bp, Homo sapien
tgctaacacggagacccactcgttg

SEQ ID NO: 429996 - DNA, 25 bp, Homo sapien
gggtcccagcgtcactcgaatgttg

SEQ ID NO: 429997 - DNA, 25 bp, Homo sapien
gcgtcttccacctcggtacacggtg

SEQ ID NO: 429998 - DNA, 25 bp, Homo sapien
tcgttatcttctggcttccccgtga

SEQ ID NO: 429999 - DNA, 25 bp, Homo sapien
ggcttccccgtgagagcctgcagga

SEQ ID NO: 430000 - DNA, 25 bp, Homo sapien
catagggatattttagcacctcgtt

SEQ ID NO: 430001 - DNA, 25 bp, Homo sapien
tgagcccggcagcaggaccagttgc

SEQ ID NO: 430002 - DNA, 25 bp, Homo sapien
agagagggacagctccttcaggccc

SEQ ID NO: 430003 - DNA, 25 bp, Homo sapien
agagagagggacagctccttcaggc

SEQ ID NO: 430004 - DNA, 25 bp, Homo sapien
ggacagctccttcaggcccgcgctg

SEQ ID NO: 430005 - DNA, 25 bp, Homo sapien
agagggacagctccttcaggcccgc

SEQ ID NO: 430006 - DNA, 25 bp, Homo sapien
actagagcagtaggacaactggcct

SEQ ID NO: 430007 - DNA, 25 bp, Homo sapien
tagcacgtccaaggatctgtcaact

SEQ ID NO: 430008 - DNA, 25 bp, Homo sapien
catcccgcagcacgggtgttgggaa

SEQ ID NO: 430009 - DNA, 25 bp, Homo sapien
tcttttcccagttagcacgtccaag

SEQ ID NO: 430010 - DNA, 25 bp, Homo sapien
gacgaagaatcgagctcctttcact

SEQ ID NO: 430011 - DNA, 25 bp, Homo sapien
cggctgccgacgaagaatcgagctc

SEQ ID NO: 430012 - DNA, 25 bp, Homo sapien
ggctgggaagggcacatcggccatt

SEQ ID NO: 430013 - DNA, 25 bp, Homo sapien
gaatcgagctcctttcactgacagg

SEQ ID NO: 430014 - DNA, 25 bp, Homo sapien
atgtccaccgggaggccgcagtccg

SEQ ID NO: 430015 - DNA, 25 bp, Homo sapien
gtgtcctcgcgaaggaacaggaagt

SEQ ID NO: 430016 - DNA, 25 bp, Homo sapien
aggtgacaaccgcaggccgagcagc

SEQ ID NO: 430017 - DNA, 25 bp, Homo sapien
cagccaggaccagtgtgtgccagcg

SEQ ID NO: 430018 - DNA, 25 bp, Homo sapien
gaagccacctaacccaggtcaggaa

SEQ ID NO: 430019 - DNA, 25 bp, Homo sapien
ggcccagggcgggtgcccatcagca

SEQ ID NO: 430020 - DNA, 25 bp, Homo sapien
ggaagccacctaacccaggtcagga

SEQ ID NO: 430021 - DNA, 25 bp, Homo sapien
tggcccagggcgggtgcccatcagc

SEQ ID NO: 430022 - DNA, 25 bp, Homo sapien
agcaagccggctggcagctagactg

SEQ ID NO: 430023 - DNA, 25 bp, Homo sapien
ccggctggcagctagactgctggca

SEQ ID NO: 430024 - DNA, 25 bp, Homo sapien
aagccggctggcagctagactgctg

SEQ ID NO: 430025 - DNA, 25 bp, Homo sapien
caagccggctggcagctagactgct

SEQ ID NO: 430026 - DNA, 25 bp, Homo sapien
gggtggggaggaggtgagctgcggg

SEQ ID NO: 430027 - DNA, 25 bp, Homo sapien
tggggtggggaggaggtgagctgcg

SEQ ID NO: 430028 - DNA, 25 bp, Homo sapien
ctggggtggggaggaggtgagctgc

SEQ ID NO: 430029 - DNA, 25 bp, Homo sapien
gtggggaggaggtgagctgcgggag

SEQ ID NO: 430030 - DNA, 25 bp, Homo sapien
tgggaggtccaaggactggcaggga

SEQ ID NO: 430031 - DNA, 25 bp, Homo sapien
ccgcagacgctttattggtgctcag

SEQ ID NO: 430032 - DNA, 25 bp, Homo sapien
cagcgaccagcggagggttgtggtc

SEQ ID NO: 430033 - DNA, 25 bp, Homo sapien
gggccgcagacgctttattggtgct

SEQ ID NO: 430034 - DNA, 25 bp, Homo sapien
agcaagccggctggcagctagactg

SEQ ID NO: 430035 - DNA, 25 bp, Homo sapien
ccggctggcagctagactgctggca

SEQ ID NO: 430036 - DNA, 25 bp, Homo sapien
caagccggctggcagctagactgct

SEQ ID NO: 430037 - DNA, 25 bp, Homo sapien
aagccggctggcagctagactgctg

SEQ ID NO: 430038 - DNA, 25 bp, Homo sapien
agcaagccggctggcagctagactg

SEQ ID NO: 430039 - DNA, 25 bp, Homo sapien
ccggctggcagctagactgctggca

SEQ ID NO: 430040 - DNA, 25 bp, Homo sapien
aagccggctggcagctagactgctg

SEQ ID NO: 430041 - DNA, 25 bp, Homo sapien
caagccggctggcagctagactgct

SEQ ID NO: 430042 - DNA, 25 bp, Homo sapien
ctgggggtgccgcaggggagctcac

SEQ ID NO: 430043 - DNA, 25 bp, Homo sapien
cagcagctgggggtgccgcagggga

SEQ ID NO: 430044 - DNA, 25 bp, Homo sapien
agctgggggtgccgcaggggagctc

SEQ ID NO: 430045 - DNA, 25 bp, Homo sapien
gcagctgggggtgccgcaggggagc

SEQ ID NO: 430046 - DNA, 25 bp, Homo sapien
ggagttggtgcaggcgctggagcag

SEQ ID NO: 430047 - DNA, 25 bp, Homo sapien
ccaggagttggtgcaggcgctggag

SEQ ID NO: 430048 - DNA, 25 bp, Homo sapien
ccacctgccaggagttggtgcaggc

SEQ ID NO: 430049 - DNA, 25 bp, Homo sapien
tgccaggagttggtgcaggcgctgg

SEQ ID NO: 430050 - DNA, 25 bp, Homo sapien
gaggaggtgagctgggggaggtgtg

SEQ ID NO: 430051 - DNA, 25 bp, Homo sapien
tggagtggggaggaggtgagctggg

SEQ ID NO: 430052 - DNA, 25 bp, Homo sapien
aggaggtgagctgggggaggtgtgt

SEQ ID NO: 430053 - DNA, 25 bp, Homo sapien
ctggagtggggaggaggtgagctgg

SEQ ID NO: 430054 - DNA, 25 bp, Homo sapien
ttgacagactgatcactcacatggg

SEQ ID NO: 430055 - DNA, 25 bp, Homo sapien
cctggagggaatcggcatgaaagct

SEQ ID NO: 430056 - DNA, 25 bp, Homo sapien
cctggaacaactctggagaaacggg

SEQ ID NO: 430057 - DNA, 25 bp, Homo sapien
gctcagggctgcaaggattttcgga

SEQ ID NO: 430058 - DNA, 25 bp, Homo sapien
acgcggaagagaggcgggagcacgt

SEQ ID NO: 430059 - DNA, 25 bp, Homo sapien
gaggccgcagcacgcggaagagagg

SEQ ID NO: 430060 - DNA, 25 bp, Homo sapien
ggcctgaggagaggccgcagcacgc

SEQ ID NO: 430061 - DNA, 25 bp, Homo sapien
ctggcctgaggagaggccgcagcac

SEQ ID NO: 430062 - DNA, 25 bp, Homo sapien
actgctggcagcacgagggcgtgca

SEQ ID NO: 430063 - DNA, 25 bp, Homo sapien
gactgctggcagcacgagggcgtgc

SEQ ID NO: 430064 - DNA, 25 bp, Homo sapien
ctgctggcagcacgagggcgtgcag

SEQ ID NO: 430065 - DNA, 25 bp, Homo sapien
agactgctggcagcacgagggcgtg

SEQ ID NO: 430066 - DNA, 25 bp, Homo sapien
tgcagaccagggtcaggcagggggc

SEQ ID NO: 430067 - DNA, 25 bp, Homo sapien
ccggggcgcagcagctggtggcgca

SEQ ID NO: 430068 - DNA, 25 bp, Homo sapien
ctggtggcgcagcaggggggctcac

SEQ ID NO: 430069 - DNA, 25 bp, Homo sapien
agaccagggtcaggcagggggccgg

SEQ ID NO: 430070 - DNA, 25 bp, Homo sapien
ctgccaggagtcagagtaagcgctg

SEQ ID NO: 430071 - DNA, 25 bp, Homo sapien
tcagagtaagcgctggagcagacgg

SEQ ID NO: 430072 - DNA, 25 bp, Homo sapien
cagacggacatggtagacgtggcca

SEQ ID NO: 430073 - DNA, 25 bp, Homo sapien
gcagacggacatggtagacgtggcc

SEQ ID NO: 430074 - DNA, 25 bp, Homo sapien
ctggggtggggaggaggtgagctgg

SEQ ID NO: 430075 - DNA, 25 bp, Homo sapien
gggaggaggtgagctgggggagacg

SEQ ID NO: 430076 - DNA, 25 bp, Homo sapien
tggggtggggaggaggtgagctggg

SEQ ID NO: 430077 - DNA, 25 bp, Homo sapien
cctgtgggttgacactgctggttgt

SEQ ID NO: 430078 - DNA, 25 bp, Homo sapien
aaccatggggcatatttctgctggg

SEQ ID NO: 430079 - DNA, 25 bp, Homo sapien
acactgctggttgtcagtgggaacc

SEQ ID NO: 430080 - DNA, 25 bp, Homo sapien
ggaaccatggggcatatttctgctg

SEQ ID NO: 430081 - DNA, 25 bp, Homo sapien
tgcacaatagtgttcacaccttctc

SEQ ID NO: 430082 - DNA, 25 bp, Homo sapien
gcacaatagtgttcacaccttctcc

SEQ ID NO: 430083 - DNA, 25 bp, Homo sapien
tcacatctcgggcaacatcacctgc

SEQ ID NO: 430084 - DNA, 25 bp, Homo sapien
atctcgggcaacatcacctgcaatg

SEQ ID NO: 430085 - DNA, 25 bp, Homo sapien
gcaccgtgaacctgaactatcctga

SEQ ID NO: 430086 - DNA, 25 bp, Homo sapien
cttcagggaagaggtcacactggga

SEQ ID NO: 430087 - DNA, 25 bp, Homo sapien
ggctactgagagctggagtccccgt

SEQ ID NO: 430088 - DNA, 25 bp, Homo sapien
ggaactctcaaagttacgacgatgg

SEQ ID NO: 430089 - DNA, 25 bp, Homo sapien
gtggacgactgcccagagagctgct

SEQ ID NO: 430090 - DNA, 25 bp, Homo sapien
tggacgactgcccagagagctgctg

SEQ ID NO: 430091 - DNA, 25 bp, Homo sapien
ggtggacgactgcccagagagctgc

SEQ ID NO: 430092 - DNA, 25 bp, Homo sapien
tgctgcaagactgtctgctgcaagc

SEQ ID NO: 430093 - DNA, 25 bp, Homo sapien
ctgctgcaagactgtctgctgcaag

SEQ ID NO: 430094 - DNA, 25 bp, Homo sapien
tctgctgcaagactgtctgctgcaa

SEQ ID NO: 430095 - DNA, 25 bp, Homo sapien
ctgctgcaagactgtctgctgcaag

SEQ ID NO: 430096 - DNA, 25 bp, Homo sapien
tgctgcaagactgtctgctgcaagc

SEQ ID NO: 430097 - DNA, 25 bp, Homo sapien
tctgctgcaagactgtctgctgcaa

SEQ ID NO: 430098 - DNA, 25 bp, Homo sapien
agcctgtcggctctgtgcccatctg

SEQ ID NO: 430099 - DNA, 25 bp, Homo sapien
gcaagcctgtcggctctgtgcccat

SEQ ID NO: 430100 - DNA, 25 bp, Homo sapien
ctgcaagcctgtcggctctgtgccc

SEQ ID NO: 430101 - DNA, 25 bp, Homo sapien
aagcctgtcggctctgtgcccatct

SEQ ID NO: 430102 - DNA, 25 bp, Homo sapien
tgctgccgcccagcctcctgcgtgt

SEQ ID NO: 430103 - DNA, 25 bp, Homo sapien
cgtgcccgtcccttcctgctgtgct

SEQ ID NO: 430104 - DNA, 25 bp, Homo sapien
gccccgtgtgcaggcccgcctgctg

SEQ ID NO: 430105 - DNA, 25 bp, Homo sapien
tcctgcgtgtccctcctctgacgcc

SEQ ID NO: 430106 - DNA, 25 bp, Homo sapien
gctgacaggttcaagtcgaggccaa

SEQ ID NO: 430107 - DNA, 25 bp, Homo sapien
gagcttcgaggatggagattcctgg

SEQ ID NO: 430108 - DNA, 25 bp, Homo sapien
cctaacccgagtcaggaccagttgg

SEQ ID NO: 430109 - DNA, 25 bp, Homo sapien
ggatgtgcacatcagcaactggact

SEQ ID NO: 430110 - DNA, 25 bp, Homo sapien
aacagacaggcacgtagcaggactg

SEQ ID NO: 430111 - DNA, 25 bp, Homo sapien
tgcaacagacaggcacgtagcagga

SEQ ID NO: 430112 - DNA, 25 bp, Homo sapien
acagacaggcacgtagcaggactgc

SEQ ID NO: 430113 - DNA, 25 bp, Homo sapien
caacagacaggcacgtagcaggact

SEQ ID NO: 430114 - DNA, 25 bp, Homo sapien
ggcacagcaagttggctggcagcta

SEQ ID NO: 430115 - DNA, 25 bp, Homo sapien
atgaagaggaatccttagagcaggt

SEQ ID NO: 430116 - DNA, 25 bp, Homo sapien
aatccttagagcaggtgggcaggca

SEQ ID NO: 430117 - DNA, 25 bp, Homo sapien
aagaggcacagcaagttggctggca

SEQ ID NO: 430118 - DNA, 25 bp, Homo sapien
ctcgccaggagtcagagcaagcgct

SEQ ID NO: 430119 - DNA, 25 bp, Homo sapien
tcgtccactcgccaggagtcagagc

SEQ ID NO: 430120 - DNA, 25 bp, Homo sapien
tccactcgccaggagtcagagcaag

SEQ ID NO: 430121 - DNA, 25 bp, Homo sapien
cagtcgtccactcgccaggagtcag

SEQ ID NO: 430122 - DNA, 25 bp, Homo sapien
actcgcccaacgcggtatcgtggac

SEQ ID NO: 430123 - DNA, 25 bp, Homo sapien
gcccaacgcggtatcgtggaccacg

SEQ ID NO: 430124 - DNA, 25 bp, Homo sapien
cccaacgcggtatcgtggaccacgt

SEQ ID NO: 430125 - DNA, 25 bp, Homo sapien
tcgcccaacgcggtatcgtggacca

SEQ ID NO: 430126 - DNA, 25 bp, Homo sapien
gggactccggatcacatccagggct

SEQ ID NO: 430127 - DNA, 25 bp, Homo sapien
ggactccggatcacatccagggctg

SEQ ID NO: 430128 - DNA, 25 bp, Homo sapien
aagggactccggatcacatccaggg

SEQ ID NO: 430129 - DNA, 25 bp, Homo sapien
agggactccggatcacatccagggc

SEQ ID NO: 430130 - DNA, 25 bp, Homo sapien
agcacgaagaggaaatcccagagca

SEQ ID NO: 430131 - DNA, 25 bp, Homo sapien
gcacgaagaggaaatcccagagcag

SEQ ID NO: 430132 - DNA, 25 bp, Homo sapien
cagcacgaagaggaaatcccagagc

SEQ ID NO: 430133 - DNA, 25 bp, Homo sapien
cacgaagaggaaatcccagagcaga

SEQ ID NO: 430134 - DNA, 25 bp, Homo sapien
gccaggagtcggagcaagagtcaca

SEQ ID NO: 430135 - DNA, 25 bp, Homo sapien
ccaggagtcggagcaagagtcacag

SEQ ID NO: 430136 - DNA, 25 bp, Homo sapien
tgccaggagtcggagcaagagtcac

SEQ ID NO: 430137 - DNA, 25 bp, Homo sapien
gtggacgactgcccagagagctgct

SEQ ID NO: 430138 - DNA, 25 bp, Homo sapien
tggacgactgcccagagagctgctg

SEQ ID NO: 430139 - DNA, 25 bp, Homo sapien
ggtggacgactgcccagagagctgc

SEQ ID NO: 430140 - DNA, 25 bp, Homo sapien
tgtgtccagcccctgctgcccagtg

SEQ ID NO: 430141 - DNA, 25 bp, Homo sapien
cagtgagccgtgtgtccagcccctg

SEQ ID NO: 430142 - DNA, 25 bp, Homo sapien
tgtccagcccctgctgcccagtgac

SEQ ID NO: 430143 - DNA, 25 bp, Homo sapien
cccagtgagccgtgtgtccagcccc

SEQ ID NO: 430144 - DNA, 25 bp, Homo sapien
ctgctgcaagactgtctgctgcaag

SEQ ID NO: 430145 - DNA, 25 bp, Homo sapien
tgctgcaagactgtctgctgcaagc

SEQ ID NO: 430146 - DNA, 25 bp, Homo sapien
tctgctgcaagactgtctgctgcaa

SEQ ID NO: 430147 - DNA, 25 bp, Homo sapien
tgattccggttcatgctgccagcca

SEQ ID NO: 430148 - DNA, 25 bp, Homo sapien
cctgtgtgtctctcctttgccgccc

SEQ ID NO: 430149 - DNA, 25 bp, Homo sapien
tgtgtgtctctcctttgccgccccg

SEQ ID NO: 430150 - DNA, 25 bp, Homo sapien
atgattccggttcatgctgccagcc

SEQ ID NO: 430151 - DNA, 25 bp, Homo sapien
agatcatccaaagcctgagtgctca

SEQ ID NO: 430152 - DNA, 25 bp, Homo sapien
gattctttacccttgacggctctcc

SEQ ID NO: 430153 - DNA, 25 bp, Homo sapien
attctttacccttgacggctctcca

SEQ ID NO: 430154 - DNA, 25 bp, Homo sapien
cttaagatcatccaaagcctgagtg

SEQ ID NO: 430155 - DNA, 25 bp, Homo sapien
ccagcctcaccacacggatgtccga

SEQ ID NO: 430156 - DNA, 25 bp, Homo sapien
cccacgccacgaggtccctgtcctt

SEQ ID NO: 430157 - DNA, 25 bp, Homo sapien
tcccacgccacgaggtccctgtcct

SEQ ID NO: 430158 - DNA, 25 bp, Homo sapien
cacggatgtccgaggggtaggcagg

SEQ ID NO: 430159 - DNA, 25 bp, Homo sapien
cacaccagcactcacaccacccagt

SEQ ID NO: 430160 - DNA, 25 bp, Homo sapien
acaccagcactcacaccacccagtc

SEQ ID NO: 430161 - DNA, 25 bp, Homo sapien
accagcactcacaccacccagtcca

SEQ ID NO: 430162 - DNA, 25 bp, Homo sapien
ctcacaccagcactcacaccaccca

SEQ ID NO: 430163 - DNA, 25 bp, Homo sapien
tgcaccaggacgtatgtgattgctg

SEQ ID NO: 430164 - DNA, 25 bp, Homo sapien
catggctgacgcctgctgcaccagg

SEQ ID NO: 430165 - DNA, 25 bp, Homo sapien
cctgctgcaccaggacgtatgtgat

SEQ ID NO: 430166 - DNA, 25 bp, Homo sapien
aggacgtatgtgattgctgcatcca

SEQ ID NO: 430167 - DNA, 25 bp, Homo sapien
aggaaagctgctgcgagccccgctc

SEQ ID NO: 430168 - DNA, 25 bp, Homo sapien
gtgggccatgtcagccgagtctcct

SEQ ID NO: 430169 - DNA, 25 bp, Homo sapien
tgctccagtgacgtgggccatgtca

SEQ ID NO: 430170 - DNA, 25 bp, Homo sapien
tggcaggtggacaattgccaggaaa

SEQ ID NO: 430171 - DNA, 25 bp, Homo sapien
ggtctgtgccccagtgagctgtgag

SEQ ID NO: 430172 - DNA, 25 bp, Homo sapien
tggtctgtgccccagtgagctgtga

SEQ ID NO: 430173 - DNA, 25 bp, Homo sapien
tgtgtgctgcaagtccaactgctgc

SEQ ID NO: 430174 - DNA, 25 bp, Homo sapien
ctgtgtgctgcaagtccaactgctg

SEQ ID NO: 430175 - DNA, 25 bp, Homo sapien
aagcccgtgtgctgcgtgtccatct

SEQ ID NO: 430176 - DNA, 25 bp, Homo sapien
agcccgtgtgctgcgtgtccatctg

SEQ ID NO: 430177 - DNA, 25 bp, Homo sapien
ccatctgctgcaagcccatctgctg

SEQ ID NO: 430178 - DNA, 25 bp, Homo sapien
cagtcagcttgctgcaccttctccc

SEQ ID NO: 430179 - DNA, 25 bp, Homo sapien
ttctccccatgccaacaggcctgct

SEQ ID NO: 430180 - DNA, 25 bp, Homo sapien
tgccagaagtctagctgccagccgg

SEQ ID NO: 430181 - DNA, 25 bp, Homo sapien
tccacacccccagcatggccacgtc

SEQ ID NO: 430182 - DNA, 25 bp, Homo sapien
acacccccagcatggccacgtccac

SEQ ID NO: 430183 - DNA, 25 bp, Homo sapien
cacacccccagcatggccacgtcca

SEQ ID NO: 430184 - DNA, 25 bp, Homo sapien
cctccacacccccagcatggccacg

SEQ ID NO: 430185 - DNA, 25 bp, Homo sapien
ccgtcatgctgccagcagtctagct

SEQ ID NO: 430186 - DNA, 25 bp, Homo sapien
tgcctgtctgctgcaagactgtctg

SEQ ID NO: 430187 - DNA, 25 bp, Homo sapien
gtgcctgtctgctgcaagactgtct

SEQ ID NO: 430188 - DNA, 25 bp, Homo sapien
gctgccagccggcttgctgcacctc

SEQ ID NO: 430189 - DNA, 25 bp, Homo sapien
tgaaaccacaggaaaccgcaaagct

SEQ ID NO: 430190 - DNA, 25 bp, Homo sapien
tgctggacagagccggacggctcct

SEQ ID NO: 430191 - DNA, 25 bp, Homo sapien
tgcctgcaaaggcatcccgtgaaac

SEQ ID NO: 430192 - DNA, 25 bp, Homo sapien
aaaggcatcccgtgaaaccacagga

SEQ ID NO: 430193 - DNA, 25 bp, Homo sapien
ttctctgcagggaaggagctttcca

SEQ ID NO: 430194 - DNA, 25 bp, Homo sapien
aggagctttccagaatcctggggaa

SEQ ID NO: 430195 - DNA, 25 bp, Homo sapien
gctttccagaatcctggggaaggta

SEQ ID NO: 430196 - DNA, 25 bp, Homo sapien
agggaaggagctttccagaatcctg

SEQ ID NO: 430197 - DNA, 25 bp, Homo sapien
tgctggcttctgacctcgcacctac

SEQ ID NO: 430198 - DNA, 25 bp, Homo sapien
ctgctggcttctgacctcgcaccta

SEQ ID NO: 430199 - DNA, 25 bp, Homo sapien
cctgctggcttctgacctcgcacct

SEQ ID NO: 430200 - DNA, 25 bp, Homo sapien
agccagtgggggtgctccaggtgac

SEQ ID NO: 430201 - DNA, 25 bp, Homo sapien
agtgggggtgctccaggtgacaggt

SEQ ID NO: 430202 - DNA, 25 bp, Homo sapien
ccagtgggggtgctccaggtgacag

SEQ ID NO: 430203 - DNA, 25 bp, Homo sapien
tcagcagccagtgggggtgctccag

SEQ ID NO: 430204 - DNA, 25 bp, Homo sapien
gggcagaaggaagccacacacaaaa

SEQ ID NO: 430205 - DNA, 25 bp, Homo sapien
agaaggaagccacacacaaaacagg

SEQ ID NO: 430206 - DNA, 25 bp, Homo sapien
acacacaaaacaggcttgcagctca

SEQ ID NO: 430207 - DNA, 25 bp, Homo sapien
aggttgggcagaaggaagccacaca

SEQ ID NO: 430208 - DNA, 25 bp, Homo sapien
ctggcagcaggtggataccccacac

SEQ ID NO: 430209 - DNA, 25 bp, Homo sapien
agcaggaggtcccatagccctcggg

SEQ ID NO: 430210 - DNA, 25 bp, Homo sapien
cagcaggtggataccccacacaggg

SEQ ID NO: 430211 - DNA, 25 bp, Homo sapien
caggaggtcccatagccctcgggtg

SEQ ID NO: 430212 - DNA, 25 bp, Homo sapien
ggagtgtggacaggtggggggcgca

SEQ ID NO: 430213 - DNA, 25 bp, Homo sapien
gatggagtgtggacaggtggggggc

SEQ ID NO: 430214 - DNA, 25 bp, Homo sapien
ggacaggtggggggcgcagaggaca

SEQ ID NO: 430215 - DNA, 25 bp, Homo sapien
gtgtggacaggtggggggcgcagag

SEQ ID NO: 430216 - DNA, 25 bp, Homo sapien
tctgaagcagcatcctcactctctc

SEQ ID NO: 430217 - DNA, 25 bp, Homo sapien
ttctgaagcagcatcctcactctct

SEQ ID NO: 430218 - DNA, 25 bp, Homo sapien
cagtttctgaagcagcatcctcact

SEQ ID NO: 430219 - DNA, 25 bp, Homo sapien
gtttctgaagcagcatcctcactct

SEQ ID NO: 430220 - DNA, 25 bp, Homo sapien
acgcgcattgtgtgcgtggctccct

SEQ ID NO: 430221 - DNA, 25 bp, Homo sapien
atgcccgtgagctgcacgcgcattg

SEQ ID NO: 430222 - DNA, 25 bp, Homo sapien
agctgcaggcccatcatatatgtga

SEQ ID NO: 430223 - DNA, 25 bp, Homo sapien
ctcttgccaatcttcggggtgctgc

SEQ ID NO: 430224 - DNA, 25 bp, Homo sapien
tctgtcacattctcaatccagaatt

SEQ ID NO: 430225 - DNA, 25 bp, Homo sapien
cacattctcaatccagaattcagag

SEQ ID NO: 430226 - DNA, 25 bp, Homo sapien
gtcacattctcaatccagaattcag

SEQ ID NO: 430227 - DNA, 25 bp, Homo sapien
tgtcacattctcaatccagaattca

SEQ ID NO: 430228 - DNA, 25 bp, Homo sapien
cagcaggaagagatactgtaggaga

SEQ ID NO: 430229 - DNA, 25 bp, Homo sapien
cagcagcaggaagagatactgtagg

SEQ ID NO: 430230 - DNA, 25 bp, Homo sapien
agcagcaggaagagatactgtagga

SEQ ID NO: 430231 - DNA, 25 bp, Homo sapien
ggagccgcatacacgacaggcctgc

SEQ ID NO: 430232 - DNA, 25 bp, Homo sapien
gactggcagctcacgggcacgcaca

SEQ ID NO: 430233 - DNA, 25 bp, Homo sapien
ggcacacacacagaagactggcagc

SEQ ID NO: 430234 - DNA, 25 bp, Homo sapien
aagactggcagctcacgggcacgca

SEQ ID NO: 430235 - DNA, 25 bp, Homo sapien
acacacagaagactggcagctcacg

SEQ ID NO: 430236 - DNA, 25 bp, Homo sapien
ctgacttgaagctcatgggcacaca

SEQ ID NO: 430237 - DNA, 25 bp, Homo sapien
acttgaagctcatgggcacacacac

SEQ ID NO: 430238 - DNA, 25 bp, Homo sapien
cacacacagaagactggcagctcac

SEQ ID NO: 430239 - DNA, 25 bp, Homo sapien
acacacacagaagactggcagctca

SEQ ID NO: 430240 - DNA, 25 bp, Homo sapien
ggcacacacacggaggactggcagc

SEQ ID NO: 430241 - DNA, 25 bp, Homo sapien
acacggaggactggcagcccacagg

SEQ ID NO: 430242 - DNA, 25 bp, Homo sapien
gcaggcacacggctggcttgaagct

SEQ ID NO: 430243 - DNA, 25 bp, Homo sapien
ggctggcttgaagctcacgggcaca

SEQ ID NO: 430244 - DNA, 25 bp, Homo sapien
aggctggctggcagcccgaggagca

SEQ ID NO: 430245 - DNA, 25 bp, Homo sapien
ggctgggcgcgcagcaggctggctg

SEQ ID NO: 430246 - DNA, 25 bp, Homo sapien
caggctggctggcagcccgaggagc

SEQ ID NO: 430247 - DNA, 25 bp, Homo sapien
aggggctgggcgcgcagcaggctgg

SEQ ID NO: 430248 - DNA, 25 bp, Homo sapien
gtgtggctggataaggtcgaggcag

SEQ ID NO: 430249 - DNA, 25 bp, Homo sapien
ggtggcgtgtggctggataaggtcg

SEQ ID NO: 430250 - DNA, 25 bp, Homo sapien
tggcgtgtggctggataaggtcgag

SEQ ID NO: 430251 - DNA, 25 bp, Homo sapien
cgtgtggctggataaggtcgaggca

SEQ ID NO: 430252 - DNA, 25 bp, Homo sapien
cataaaagcggactctaagggtctc

SEQ ID NO: 430253 - DNA, 25 bp, Homo sapien
aactgcactacccagtgggacagca

SEQ ID NO: 430254 - DNA, 25 bp, Homo sapien
gacagcaggcatttctgcagatgag

SEQ ID NO: 430255 - DNA, 25 bp, Homo sapien
ttgaacagcataaaagcggactcta

SEQ ID NO: 430256 - DNA, 25 bp, Homo sapien
tcaaattcatacttcaattcctgtt

SEQ ID NO: 430257 - DNA, 25 bp, Homo sapien
ttcttgttccgagagtttctcagac

SEQ ID NO: 430258 - DNA, 25 bp, Homo sapien
tagatgatgaaactgtaattcttgt

SEQ ID NO: 430259 - DNA, 25 bp, Homo sapien
tgtaattcttgttccgagagtttct

SEQ ID NO: 430260 - DNA, 25 bp, Homo sapien
tcagtgaagctaggttctcatttca

SEQ ID NO: 430261 - DNA, 25 bp, Homo sapien
tgacttcctctacgtttctgtccta

SEQ ID NO: 430262 - DNA, 25 bp, Homo sapien
ggcagctgcctgtcagtgaagctag

SEQ ID NO: 430263 - DNA, 25 bp, Homo sapien
gcctgtcagtgaagctaggttctca

SEQ ID NO: 430264 - DNA, 25 bp, Homo sapien
tgttctaatgcttttgctactacag

SEQ ID NO: 430265 - DNA, 25 bp, Homo sapien
cttttgctactacagagtcaaatgc

SEQ ID NO: 430266 - DNA, 25 bp, Homo sapien
aatgcttttgctactacagagtcaa

SEQ ID NO: 430267 - DNA, 25 bp, Homo sapien
ctaatgcttttgctactacagagtc

SEQ ID NO: 430268 - DNA, 25 bp, Homo sapien
tctgttcagctgatcgatgtgacga

SEQ ID NO: 430269 - DNA, 25 bp, Homo sapien
tgcacgggcaatcagggagttcaga

SEQ ID NO: 430270 - DNA, 25 bp, Homo sapien
gctgggtccgaaacgctcattcctt

SEQ ID NO: 430271 - DNA, 25 bp, Homo sapien
gatacaagcttagactcaaattgag

SEQ ID NO: 430272 - DNA, 25 bp, Homo sapien
ttttgaccacattatccagatcaac

SEQ ID NO: 430273 - DNA, 25 bp, Homo sapien
ctttttgaccacattatccagatca

SEQ ID NO: 430274 - DNA, 25 bp, Homo sapien
tgaccacattatccagatcaactat

SEQ ID NO: 430275 - DNA, 25 bp, Homo sapien
ccacattatccagatcaactatcat

SEQ ID NO: 430276 - DNA, 25 bp, Homo sapien
gttgtgaagtttatatgaggcttgg

SEQ ID NO: 430277 - DNA, 25 bp, Homo sapien
cactgtatcacctgcggttgctgaa

SEQ ID NO: 430278 - DNA, 25 bp, Homo sapien
tgtgtggcacttagcagacttcttc

SEQ ID NO: 430279 - DNA, 25 bp, Homo sapien
tcaacgcaccttgcactgtgtggca

SEQ ID NO: 430280 - DNA, 25 bp, Homo sapien
agattcctcatgctgaaccccaggg

SEQ ID NO: 430281 - DNA, 25 bp, Homo sapien
ctactctttctcggaaatgggaagc

SEQ ID NO: 430282 - DNA, 25 bp, Homo sapien
tactctttctcggaaatgggaagcc

SEQ ID NO: 430283 - DNA, 25 bp, Homo sapien
cagtatctgtcgagcggacggtgct

SEQ ID NO: 430284 - DNA, 25 bp, Homo sapien
ctgacaggcccgcagtatctgtcga

SEQ ID NO: 430285 - DNA, 25 bp, Homo sapien
cacagcggtcacactcgataactga

SEQ ID NO: 430286 - DNA, 25 bp, Homo sapien
aggcccgcagtatctgtcgagcgga

SEQ ID NO: 430287 - DNA, 25 bp, Homo sapien
tctattatattctcgatccagaatt

SEQ ID NO: 430288 - DNA, 25 bp, Homo sapien
cagggctccagatcattctattata

SEQ ID NO: 430289 - DNA, 25 bp, Homo sapien
ggataggcaagttcagccagggctc

SEQ ID NO: 430290 - DNA, 25 bp, Homo sapien
tatattctcgatccagaattcagag

SEQ ID NO: 430291 - DNA, 25 bp, Homo sapien
ggagccgcatacacgacgggcctgc

SEQ ID NO: 430292 - DNA, 25 bp, Homo sapien
gctggcttgaagctcacgggcacgc

SEQ ID NO: 430293 - DNA, 25 bp, Homo sapien
cagcccacggggatgtaacaggatg

SEQ ID NO: 430294 - DNA, 25 bp, Homo sapien
gcccacggggatgtaacaggatgcc

SEQ ID NO: 430295 - DNA, 25 bp, Homo sapien
ccacggggatgtaacaggatgcctg

SEQ ID NO: 430296 - DNA, 25 bp, Homo sapien
aggacgaggccaggtgggccctgac

SEQ ID NO: 430297 - DNA, 25 bp, Homo sapien
taggacgaggccaggtgggccctga

SEQ ID NO: 430298 - DNA, 25 bp, Homo sapien
ctaggacgaggccaggtgggccctg

SEQ ID NO: 430299 - DNA, 25 bp, Homo sapien
gacgactgcccagagagctgctgtg

SEQ ID NO: 430300 - DNA, 25 bp, Homo sapien
ggacgactgcccagagagctgctgt

SEQ ID NO: 430301 - DNA, 25 bp, Homo sapien
ctgctgcaagactgtctgctgcaag

SEQ ID NO: 430302 - DNA, 25 bp, Homo sapien
tctgctgcaagactgtctgctgcaa

SEQ ID NO: 430303 - DNA, 25 bp, Homo sapien
tgctgcaagactgtctgctgcaagc

SEQ ID NO: 430304 - DNA, 25 bp, Homo sapien
tgccgccccacatgttcccgcctgg

SEQ ID NO: 430305 - DNA, 25 bp, Homo sapien
tgccagccaagctgcggccgcctgg

SEQ ID NO: 430306 - DNA, 25 bp, Homo sapien
ccacatgttcccgcctggcctgctg

SEQ ID NO: 430307 - DNA, 25 bp, Homo sapien
cctctgccgccccacatgttcccgc

SEQ ID NO: 430308 - DNA, 25 bp, Homo sapien
cagctcctgcacgcccttgtgctgc

SEQ ID NO: 430309 - DNA, 25 bp, Homo sapien
agccagcagtcctgctgtgtgcccg

SEQ ID NO: 430310 - DNA, 25 bp, Homo sapien
tcctccccaagccagcagtcctgct

SEQ ID NO: 430311 - DNA, 25 bp, Homo sapien
tgtgtgcccgtctgctgcaagcctg

SEQ ID NO: 430312 - DNA, 25 bp, Homo sapien
cccaaccctgcgtgccgtggccggg

SEQ ID NO: 430313 - DNA, 25 bp, Homo sapien
ccaggggcagcacaaaacacagact

SEQ ID NO: 430314 - DNA, 25 bp, Homo sapien
gggctcccaaccctgcgtgccgtgg

SEQ ID NO: 430315 - DNA, 25 bp, Homo sapien
cgccaggggcagcacaaaacacaga

SEQ ID NO: 430316 - DNA, 25 bp, Homo sapien
agggctccgctcagcctgcagggaa

SEQ ID NO: 430317 - DNA, 25 bp, Homo sapien
ttgggtgccaagctccatccagggc

SEQ ID NO: 430318 - DNA, 25 bp, Homo sapien
gggtgccaagctccatccagggctc

SEQ ID NO: 430319 - DNA, 25 bp, Homo sapien
gggcttgggtgccaagctccatcca

SEQ ID NO: 430320 - DNA, 25 bp, Homo sapien
taagaacccaggttttcgctgagct

SEQ ID NO: 430321 - DNA, 25 bp, Homo sapien
tggactgcgtgaatactacatggag

SEQ ID NO: 430322 - DNA, 25 bp, Homo sapien
cagcgtgttcacgtgcctaacttct

SEQ ID NO: 430323 - DNA, 25 bp, Homo sapien
tgtatcgatgacacatggactgcgt

SEQ ID NO: 430324 - DNA, 25 bp, Homo sapien
gacagggagctgtgcttctaagcaa

SEQ ID NO: 430325 - DNA, 25 bp, Homo sapien
gctaagtaacaagacgcagaggcag

SEQ ID NO: 430326 - DNA, 25 bp, Homo sapien
gagctaacccaagtctgcagaaaag

SEQ ID NO: 430327 - DNA, 25 bp, Homo sapien
gacaatacgacaaagggacacacac

SEQ ID NO: 430328 - DNA, 25 bp, Homo sapien
gccaggcgtggagctacttcaacca

SEQ ID NO: 430329 - DNA, 25 bp, Homo sapien
tgtttggtaccagcacagagcatca

SEQ ID NO: 430330 - DNA, 25 bp, Homo sapien
tcctatttaaatgccgcccgtgtgc

SEQ ID NO: 430331 - DNA, 25 bp, Homo sapien
gataatctacctgaagccctttgtg

SEQ ID NO: 430332 - DNA, 25 bp, Homo sapien
cattttggacgcatccacgttagct

SEQ ID NO: 430333 - DNA, 25 bp, Homo sapien
gagacttctggacgatctgcttggc

SEQ ID NO: 430334 - DNA, 25 bp, Homo sapien
ttatagaactgctcccggtcatcgc

SEQ ID NO: 430335 - DNA, 25 bp, Homo sapien
cgttagctccactttcgtcattggg

SEQ ID NO: 430336 - DNA, 25 bp, Homo sapien
gctccgcgctgctctcgtagcccat

SEQ ID NO: 430337 - DNA, 25 bp, Homo sapien
gcatgctcaccaccgacagcaggat

SEQ ID NO: 430338 - DNA, 25 bp, Homo sapien
cccatggggtcatcgcctggcgcgt

SEQ ID NO: 430339 - DNA, 25 bp, Homo sapien
tcgcctggcgcgtggaggatggaaa

SEQ ID NO: 430340 - DNA, 25 bp, Homo sapien
gagtctttcaatggagttccgccac

SEQ ID NO: 430341 - DNA, 25 bp, Homo sapien
tgaacgctctactatccaggaactg

SEQ ID NO: 430342 - DNA, 25 bp, Homo sapien
cattaaatccctgaaccggtctgtg

SEQ ID NO: 430343 - DNA, 25 bp, Homo sapien
tcatgtctgcaggaatcccggtggg

SEQ ID NO: 430344 - DNA, 25 bp, Homo sapien
catttccaccagtgaagtggccggg

SEQ ID NO: 430345 - DNA, 25 bp, Homo sapien
tagacagcgtgtgatgaacctccat

SEQ ID NO: 430346 - DNA, 25 bp, Homo sapien
tatcatctaactcaggcgcatggcc

SEQ ID NO: 430347 - DNA, 25 bp, Homo sapien
tctattggcagacggcatttccacc

SEQ ID NO: 430348 - DNA, 25 bp, Homo sapien
tagcataaccccttctgagcacaca

SEQ ID NO: 430349 - DNA, 25 bp, Homo sapien
aatattatctccgtacctatcctgg

SEQ ID NO: 430350 - DNA, 25 bp, Homo sapien
gtcaaatggcatccggttttaggtg

SEQ ID NO: 430351 - DNA, 25 bp, Homo sapien
catgtgtaaaacttcctccccagtg

SEQ ID NO: 430352 - DNA, 25 bp, Homo sapien
acgggtaatcaagtgggaaactcag

SEQ ID NO: 430353 - DNA, 25 bp, Homo sapien
caatgcctcccattcaaaaaagttc

SEQ ID NO: 430354 - DNA, 25 bp, Homo sapien
gatcaatgcctcccattcaaaaaag

SEQ ID NO: 430355 - DNA, 25 bp, Homo sapien
tcaatgcctcccattcaaaaaagtt

SEQ ID NO: 430356 - DNA, 25 bp, Homo sapien
tgcctcccattcaaaaaagttctct

SEQ ID NO: 430357 - DNA, 25 bp, Homo sapien
caattccttccggaggattcagtgt

SEQ ID NO: 430358 - DNA, 25 bp, Homo sapien
gctacaattccttccggaggattca

SEQ ID NO: 430359 - DNA, 25 bp, Homo sapien
ccttccggaggattcagtgttaatt

SEQ ID NO: 430360 - DNA, 25 bp, Homo sapien
attccttccggaggattcagtgtta

SEQ ID NO: 430361 - DNA, 25 bp, Homo sapien
taaatacctctacatgctagtacag

SEQ ID NO: 430362 - DNA, 25 bp, Homo sapien
gagacgaatcttggtatcagggaaa

SEQ ID NO: 430363 - DNA, 25 bp, Homo sapien
tatacacaggctattcatttcagga

SEQ ID NO: 430364 - DNA, 25 bp, Homo sapien
gaatccatcccacagataacattgg

SEQ ID NO: 430365 - DNA, 25 bp, Homo sapien
gaatgaccatacgtgagtgagcctg

SEQ ID NO: 430366 - DNA, 25 bp, Homo sapien
gctcaataaagcaaagcgcgcggga

SEQ ID NO: 430367 - DNA, 25 bp, Homo sapien
taccgggtaggaaagcactcaagag

SEQ ID NO: 430368 - DNA, 25 bp, Homo sapien
gcagttcttccaagcgggcattcgg

SEQ ID NO: 430369 - DNA, 25 bp, Homo sapien
ttcaaagctccaccaacgagccttt

SEQ ID NO: 430370 - DNA, 25 bp, Homo sapien
tcctcaagctctcactgcacgttct

SEQ ID NO: 430371 - DNA, 25 bp, Homo sapien
ttaacgcatacacttttccctccta

SEQ ID NO: 430372 - DNA, 25 bp, Homo sapien
ttccctcctaattccgcagcagcaa

SEQ ID NO: 430373 - DNA, 25 bp, Homo sapien
tgtgtgtgctctcaactaacacggc

SEQ ID NO: 430374 - DNA, 25 bp, Homo sapien
aggaacgcgggacgctgctgacggc

SEQ ID NO: 430375 - DNA, 25 bp, Homo sapien
aggcttctcttcacgacttcacgcg

SEQ ID NO: 430376 - DNA, 25 bp, Homo sapien
aaacaagcccgcaaagactcaactg

SEQ ID NO: 430377 - DNA, 25 bp, Homo sapien
ttgtactcggccatcagcctcttga

SEQ ID NO: 430378 - DNA, 25 bp, Homo sapien
tcagcctcttgagcgcggtccccgc

SEQ ID NO: 430379 - DNA, 25 bp, Homo sapien
gcctcttgagcgcggtccccgccat

SEQ ID NO: 430380 - DNA, 25 bp, Homo sapien
catcagcctcttgagcgcggtcccc

SEQ ID NO: 430381 - DNA, 25 bp, Homo sapien
gctgcgccgagcgacctcgcctcag

SEQ ID NO: 430382 - DNA, 25 bp, Homo sapien
ggccccgcaacagctgcgccgagcg

SEQ ID NO: 430383 - DNA, 25 bp, Homo sapien
tcagccgcgcgcgtgcctcctgccc

SEQ ID NO: 430384 - DNA, 25 bp, Homo sapien
tcctgccccgacaccggggactgct

SEQ ID NO: 430385 - DNA, 25 bp, Homo sapien
gggtcattgttcaggtgactgtaaa

SEQ ID NO: 430386 - DNA, 25 bp, Homo sapien
ctgtttacagtagtaaaggacaaca

SEQ ID NO: 430387 - DNA, 25 bp, Homo sapien
cgagcccatacagcaaacaggaaat

SEQ ID NO: 430388 - DNA, 25 bp, Homo sapien
gcaagatttcaagcaagcaagagat

SEQ ID NO: 430389 - DNA, 25 bp, Homo sapien
tggccaccaagcagcaatggagcct

SEQ ID NO: 430390 - DNA, 25 bp, Homo sapien
ccaagcagcaatggagcctcaggga

SEQ ID NO: 430391 - DNA, 25 bp, Homo sapien
agaatggccaccaagcagcaatgga

SEQ ID NO: 430392 - DNA, 25 bp, Homo sapien
gcaatggagcctcagggaaggacaa

SEQ ID NO: 430393 - DNA, 25 bp, Homo sapien
caacagcaatgcgaggatggacggc

SEQ ID NO: 430394 - DNA, 25 bp, Homo sapien
gatccctggccagactaaaagcgaa

SEQ ID NO: 430395 - DNA, 25 bp, Homo sapien
cgaggttacatgcttgagggccaga

SEQ ID NO: 430396 - DNA, 25 bp, Homo sapien
gtgaatgtcctcgagtttccgcaga

SEQ ID NO: 430397 - DNA, 25 bp, Homo sapien
ctagaaactgtgccctgccaggctg

SEQ ID NO: 430398 - DNA, 25 bp, Homo sapien
cctgccaggctgctctccggcacac

SEQ ID NO: 430399 - DNA, 25 bp, Homo sapien
gaaactgtgccctgccaggctgctc

SEQ ID NO: 430400 - DNA, 25 bp, Homo sapien
tgtgccctgccaggctgctctccgg

SEQ ID NO: 430401 - DNA, 25 bp, Homo sapien
tggaacacgtcgatggtgtcctcgt

SEQ ID NO: 430402 - DNA, 25 bp, Homo sapien
ctgctggaacacgtcgatggtgtcc

SEQ ID NO: 430403 - DNA, 25 bp, Homo sapien
gctggaacacgtcgatggtgtcctc

SEQ ID NO: 430404 - DNA, 25 bp, Homo sapien
aacacgtcgatggtgtcctcgtcct

SEQ ID NO: 430405 - DNA, 25 bp, Homo sapien
tcacaacaggcacagcgagagagag

SEQ ID NO: 430406 - DNA, 25 bp, Homo sapien
acaacaggcacagcgagagagaggg

SEQ ID NO: 430407 - DNA, 25 bp, Homo sapien
ttgtcacaacaggcacagcgagaga

SEQ ID NO: 430408 - DNA, 25 bp, Homo sapien
gtcacaacaggcacagcgagagaga

SEQ ID NO: 430409 - DNA, 25 bp, Homo sapien
agctctttccatgacagtatgatgc

SEQ ID NO: 430410 - DNA, 25 bp, Homo sapien
gctctttccatgacagtatgatgcc

SEQ ID NO: 430411 - DNA, 25 bp, Homo sapien
aagctctttccatgacagtatgatg

SEQ ID NO: 430412 - DNA, 25 bp, Homo sapien
ccgcacaaatcggaagtcgccctgg

SEQ ID NO: 430413 - DNA, 25 bp, Homo sapien
gaagtcgccctggaaccacgcgaag

SEQ ID NO: 430414 - DNA, 25 bp, Homo sapien
tggaaccacgcgaagccagctccgt

SEQ ID NO: 430415 - DNA, 25 bp, Homo sapien
caaatcggaagtcgccctggaacca

SEQ ID NO: 430416 - DNA, 25 bp, Homo sapien
gattggctgcccgtcgaacctgaat

SEQ ID NO: 430417 - DNA, 25 bp, Homo sapien
ggctgcccgtcgaacctgaatctga

SEQ ID NO: 430418 - DNA, 25 bp, Homo sapien
gctgcccgtcgaacctgaatctgat

SEQ ID NO: 430419 - DNA, 25 bp, Homo sapien
ttggctgcccgtcgaacctgaatct

SEQ ID NO: 430420 - DNA, 25 bp, Homo sapien
tggccattagtctcactggcaagcc

SEQ ID NO: 430421 - DNA, 25 bp, Homo sapien
gcagtggccattagtctcactggca

SEQ ID NO: 430422 - DNA, 25 bp, Homo sapien
agtggccattagtctcactggcaag

SEQ ID NO: 430423 - DNA, 25 bp, Homo sapien
aagcagtggccattagtctcactgg

SEQ ID NO: 430424 - DNA, 25 bp, Homo sapien
tgggcctacaatctctttcacgcgg

SEQ ID NO: 430425 - DNA, 25 bp, Homo sapien
ttcaaagcagataggtaagtggtcc

SEQ ID NO: 430426 - DNA, 25 bp, Homo sapien
ccaggtgaggaagcgtaacacgtca

SEQ ID NO: 430427 - DNA, 25 bp, Homo sapien
tctttacatacgaaacccaggtgag

SEQ ID NO: 430428 - DNA, 25 bp, Homo sapien
accccatgtggatgcacagccctgg

SEQ ID NO: 430429 - DNA, 25 bp, Homo sapien
agtcagcctgcgtgagagcagtcag

SEQ ID NO: 430430 - DNA, 25 bp, Homo sapien
agcttctcggtgctccatgcttgca

SEQ ID NO: 430431 - DNA, 25 bp, Homo sapien
gcacagccatccatgtacacagctt

SEQ ID NO: 430432 - DNA, 25 bp, Homo sapien
gctggtgggcaaagcccataaaagt

SEQ ID NO: 430433 - DNA, 25 bp, Homo sapien
agcagctggtgggcaaagcccataa

SEQ ID NO: 430434 - DNA, 25 bp, Homo sapien
ctggtgggcaaagcccataaaagtg

SEQ ID NO: 430435 - DNA, 25 bp, Homo sapien
cagctggtgggcaaagcccataaaa

SEQ ID NO: 430436 - DNA, 25 bp, Homo sapien
tctctccagggtcaggccagctcat

SEQ ID NO: 430437 - DNA, 25 bp, Homo sapien
tgtctctccagggtcaggccagctc

SEQ ID NO: 430438 - DNA, 25 bp, Homo sapien
cagtgtctctccagggtcaggccag

SEQ ID NO: 430439 - DNA, 25 bp, Homo sapien
ggcagtgtctctccagggtcaggcc

SEQ ID NO: 430440 - DNA, 25 bp, Homo sapien
cagccccagaatggccagacctgag

SEQ ID NO: 430441 - DNA, 25 bp, Homo sapien
cagatgttagtaccccatggagaac

SEQ ID NO: 430442 - DNA, 25 bp, Homo sapien
cagcctggactaattttacagcaca

SEQ ID NO: 430443 - DNA, 25 bp, Homo sapien
tgcctggaacgcacaggaccagtgc

SEQ ID NO: 430444 - DNA, 25 bp, Homo sapien
gggaggctctgcgggggagcaaggt

SEQ ID NO: 430445 - DNA, 25 bp, Homo sapien
ggggaggctctgcgggggagcaagg

SEQ ID NO: 430446 - DNA, 25 bp, Homo sapien
gaggctctgcgggggagcaaggtgc

SEQ ID NO: 430447 - DNA, 25 bp, Homo sapien
ggaggctctgcgggggagcaaggtg

SEQ ID NO: 430448 - DNA, 25 bp, Homo sapien
ctctcgcagtaggccttcatcagct

SEQ ID NO: 430449 - DNA, 25 bp, Homo sapien
ttgctcagcggcgtgtgcctcttga

SEQ ID NO: 430450 - DNA, 25 bp, Homo sapien
cggcgtgtgcctcttgatcttgaac

SEQ ID NO: 430451 - DNA, 25 bp, Homo sapien
tcatcagcttgctcagcggcgtgtg

SEQ ID NO: 430452 - DNA, 25 bp, Homo sapien
agaggagcacgcaaagacgcttcgg

SEQ ID NO: 430453 - DNA, 25 bp, Homo sapien
cagcaatgactcaggagaggagcac

SEQ ID NO: 430454 - DNA, 25 bp, Homo sapien
tggaaggacggcagtgctgctcaca

SEQ ID NO: 430455 - DNA, 25 bp, Homo sapien
gactccgtgcactcgacacaggatc

SEQ ID NO: 430456 - DNA, 25 bp, Homo sapien
aagcagcgcggagcgggcgagtcac

SEQ ID NO: 430457 - DNA, 25 bp, Homo sapien
caaatcccggcgcacccgttggccg

SEQ ID NO: 430458 - DNA, 25 bp, Homo sapien
ctctcccgccgcaactgtgcgcggg

SEQ ID NO: 430459 - DNA, 25 bp, Homo sapien
gcgggggaagcagcgcggagcgggc

SEQ ID NO: 430460 - DNA, 25 bp, Homo sapien
gtgagcggcgccgagcttggccagg

SEQ ID NO: 430461 - DNA, 25 bp, Homo sapien
gaggcactgggaggtcaaaccaccc

SEQ ID NO: 430462 - DNA, 25 bp, Homo sapien
agcggcgccgagcttggccaggccg

SEQ ID NO: 430463 - DNA, 25 bp, Homo sapien
gcgctggtgagcggcgccgagcttg

SEQ ID NO: 430464 - DNA, 25 bp, Homo sapien
ctgccccgaatccttcatgtgacag

SEQ ID NO: 430465 - DNA, 25 bp, Homo sapien
ctggtggaccgaacgccaagaggtt

SEQ ID NO: 430466 - DNA, 25 bp, Homo sapien
gacacaaaggacaccgctggtggac

SEQ ID NO: 430467 - DNA, 25 bp, Homo sapien
tgcaaaaaggctctgtcgcagctgt

SEQ ID NO: 430468 - DNA, 25 bp, Homo sapien
gttgagtggaccgtgcactgcacaa

SEQ ID NO: 430469 - DNA, 25 bp, Homo sapien
ggaacatcactggttttaaactaca

SEQ ID NO: 430470 - DNA, 25 bp, Homo sapien
tctttgagagttctgtattgtttcc

SEQ ID NO: 430471 - DNA, 25 bp, Homo sapien
aaactacagtgtgatcgatgagttc

SEQ ID NO: 430472 - DNA, 25 bp, Homo sapien
cgcacacatcgtggcccacagccat

SEQ ID NO: 430473 - DNA, 25 bp, Homo sapien
gctgttctcggtttggaaagcgctc

SEQ ID NO: 430474 - DNA, 25 bp, Homo sapien
tctcggtttggaaagcgctcactgt

SEQ ID NO: 430475 - DNA, 25 bp, Homo sapien
gatgccagctgttctcggtttggaa

SEQ ID NO: 430476 - DNA, 25 bp, Homo sapien
agacctgggtccacgtcttgagcct

SEQ ID NO: 430477 - DNA, 25 bp, Homo sapien
ttatggagcaagagacaatggcagg

SEQ ID NO: 430478 - DNA, 25 bp, Homo sapien
atagagaaaccggaagcggcagctc

SEQ ID NO: 430479 - DNA, 25 bp, Homo sapien
tgtccccttgctgataatgtcccca

SEQ ID NO: 430480 - DNA, 25 bp, Homo sapien
caagctccgattccacgtgtgtaat

SEQ ID NO: 430481 - DNA, 25 bp, Homo sapien
cgtcagcagtgtcagtgatgttctt

SEQ ID NO: 430482 - DNA, 25 bp, Homo sapien
ctggcgaccctcacaagggcggcgt

SEQ ID NO: 430483 - DNA, 25 bp, Homo sapien
tgtcgcctgaattggccaagctccg

SEQ ID NO: 430484 - DNA, 25 bp, Homo sapien
gtccttgccttcagccgctgtggtc

SEQ ID NO: 430485 - DNA, 25 bp, Homo sapien
tgtggtccccatgttctcgcctctg

SEQ ID NO: 430486 - DNA, 25 bp, Homo sapien
aggcccagtccttgccttcagccgc

SEQ ID NO: 430487 - DNA, 25 bp, Homo sapien
cgctgtggtccccatgttctcgcct

SEQ ID NO: 430488 - DNA, 25 bp, Homo sapien
ctgggggcaggagtcgcaacctcac

SEQ ID NO: 430489 - DNA, 25 bp, Homo sapien
catagcagtgcgtctgggggcagca

SEQ ID NO: 430490 - DNA, 25 bp, Homo sapien
atagcagtgcgtctgggggcagcac

SEQ ID NO: 430491 - DNA, 25 bp, Homo sapien
gcagcaccatggcagtgtgtctggg

SEQ ID NO: 430492 - DNA, 25 bp, Homo sapien
tttccgccgcagacgggctggtgct

SEQ ID NO: 430493 - DNA, 25 bp, Homo sapien
gatgcaagtctgcagttgccacaca

SEQ ID NO: 430494 - DNA, 25 bp, Homo sapien
ggtgctcgtagccacaaacgctggg

SEQ ID NO: 430495 - DNA, 25 bp, Homo sapien
cacattcctgaatgagccggaagcg

SEQ ID NO: 430496 - DNA, 25 bp, Homo sapien
attccaagcggtcatgtcgacacca

SEQ ID NO: 430497 - DNA, 25 bp, Homo sapien
gcattccaagcggtcatgtcgacac

SEQ ID NO: 430498 - DNA, 25 bp, Homo sapien
cattccaagcggtcatgtcgacacc

SEQ ID NO: 430499 - DNA, 25 bp, Homo sapien
agcattccaagcggtcatgtcgaca

SEQ ID NO: 430500 - DNA, 25 bp, Homo sapien
gctcaggaagcggattttgcacaca

SEQ ID NO: 430501 - DNA, 25 bp, Homo sapien
tacactgagcgcaagggctgactac

SEQ ID NO: 430502 - DNA, 25 bp, Homo sapien
cgaagaccgaccttacagacgtggg

SEQ ID NO: 430503 - DNA, 25 bp, Homo sapien
ttcaaggcaatctggaacagggact

SEQ ID NO: 430504 - DNA, 25 bp, Homo sapien
tagaaggtcaccagtctgcaagacg

SEQ ID NO: 430505 - DNA, 25 bp, Homo sapien
tcaagatgcgcacacagacgctgtc

SEQ ID NO: 430506 - DNA, 25 bp, Homo sapien
tatcagactgtgtactggagccccg

SEQ ID NO: 430507 - DNA, 25 bp, Homo sapien
gctggcacacgagcagtcaactggt

SEQ ID NO: 430508 - DNA, 25 bp, Homo sapien
caaatctagcatacgggttttcttc

SEQ ID NO: 430509 - DNA, 25 bp, Homo sapien
ttcaaatctagcatacgggttttct

SEQ ID NO: 430510 - DNA, 25 bp, Homo sapien
tttcaaatctagcatacgggttttc

SEQ ID NO: 430511 - DNA, 25 bp, Homo sapien
atctagcatacgggttttcttcttt

SEQ ID NO: 430512 - DNA, 25 bp, Homo sapien
ctggtgctgctccttatgacagtca

SEQ ID NO: 430513 - DNA, 25 bp, Homo sapien
cctggtgctgctccttatgacagtc

SEQ ID NO: 430514 - DNA, 25 bp, Homo sapien
acccagcgtttacagtccagggcac

SEQ ID NO: 430515 - DNA, 25 bp, Homo sapien
aacacgtgcattagtcagaaaaggc

SEQ ID NO: 430516 - DNA, 25 bp, Homo sapien
aagccgacacttcgagaccggcagg

SEQ ID NO: 430517 - DNA, 25 bp, Homo sapien
gaggtgactttccaaggaggccaga

SEQ ID NO: 430518 - DNA, 25 bp, Homo sapien
tcatgtcttgtcttcatctctgctc

SEQ ID NO: 430519 - DNA, 25 bp, Homo sapien
ttcatcatgtcttgtcttcatctct

SEQ ID NO: 430520 - DNA, 25 bp, Homo sapien
gatttcatcatgtcttgtcttcatc

SEQ ID NO: 430521 - DNA, 25 bp, Homo sapien
tttctgatttcatcatgtcttgtct

SEQ ID NO: 430522 - DNA, 25 bp, Homo sapien
cgcacggtggtgtaactgctagaca

SEQ ID NO: 430523 - DNA, 25 bp, Homo sapien
ccaggacaggcaaggtgacaacgaa

SEQ ID NO: 430524 - DNA, 25 bp, Homo sapien
cattatgagcaccaaacgacagcgc

SEQ ID NO: 430525 - DNA, 25 bp, Homo sapien
ggacaagcttggtcatcaggccaca

SEQ ID NO: 430526 - DNA, 25 bp, Homo sapien
cgacatggtgatgatcagcgcctca

SEQ ID NO: 430527 - DNA, 25 bp, Homo sapien
tcccgctcacgcatggccttctcct

SEQ ID NO: 430528 - DNA, 25 bp, Homo sapien
gttcccccgactaccgacatggtga

SEQ ID NO: 430529 - DNA, 25 bp, Homo sapien
tcctgtccggcttccggctcctctt

SEQ ID NO: 430530 - DNA, 25 bp, Homo sapien
tcgaaaagaatgaccgtggaggagc

SEQ ID NO: 430531 - DNA, 25 bp, Homo sapien
tgaagaacggctggctaatcggtcc

SEQ ID NO: 430532 - DNA, 25 bp, Homo sapien
gaaatagactctcagggcacatact

SEQ ID NO: 430533 - DNA, 25 bp, Homo sapien
tactggcggccaggttcgaaaagaa

SEQ ID NO: 430534 - DNA, 25 bp, Homo sapien
tcgggcacatgctgaataaaacatc

SEQ ID NO: 430535 - DNA, 25 bp, Homo sapien
cataaaggcgggaaccagtaacatt

SEQ ID NO: 430536 - DNA, 25 bp, Homo sapien
gcaattgacacgaatctcgggcaca

SEQ ID NO: 430537 - DNA, 25 bp, Homo sapien
gaacactgcacgagaaagataactg

SEQ ID NO: 430538 - DNA, 25 bp, Homo sapien
tgggtagtccagacaagccttgtta

SEQ ID NO: 430539 - DNA, 25 bp, Homo sapien
ccttgttagtgttgcaccaaagaca

SEQ ID NO: 430540 - DNA, 25 bp, Homo sapien
gaagccggtggcaagacgcttgtaa

SEQ ID NO: 430541 - DNA, 25 bp, Homo sapien
caagacgcttgtaactgggtagtcc

SEQ ID NO: 430542 - DNA, 25 bp, Homo sapien
taaactgacagctggagagaacctc

SEQ ID NO: 430543 - DNA, 25 bp, Homo sapien
aaagtcatggcgtttttggcccagg

SEQ ID NO: 430544 - DNA, 25 bp, Homo sapien
cttgaacgtcaggtgtgaggccgca

SEQ ID NO: 430545 - DNA, 25 bp, Homo sapien
aagatgatgcaactacggctcagcc

SEQ ID NO: 430546 - DNA, 25 bp, Homo sapien
tttctgatcgatgaagtaatatgca

SEQ ID NO: 430547 - DNA, 25 bp, Homo sapien
tgctgcttttctgatcgatgaagta

SEQ ID NO: 430548 - DNA, 25 bp, Homo sapien
actgcactgggaggatacggtgttc

SEQ ID NO: 430549 - DNA, 25 bp, Homo sapien
cactgggaggatacggtgttctctg

SEQ ID NO: 430550 - DNA, 25 bp, Homo sapien
aacacgcaggtcctcttgagacctc

SEQ ID NO: 430551 - DNA, 25 bp, Homo sapien
gctccaacacgcaggtcctcttgag

SEQ ID NO: 430552 - DNA, 25 bp, Homo sapien
tcttgagacctcccaggcactgaca

SEQ ID NO: 430553 - DNA, 25 bp, Homo sapien
tccaacacgcaggtcctcttgagac

SEQ ID NO: 430554 - DNA, 25 bp, Homo sapien
acgcctagctaattgttttgtattt

SEQ ID NO: 430555 - DNA, 25 bp, Homo sapien
ctgcaacctccgacttccggtttca

SEQ ID NO: 430556 - DNA, 25 bp, Homo sapien
gtttcaagaaattctcctgcctcag

SEQ ID NO: 430557 - DNA, 25 bp, Homo sapien
tgcaacctccgacttccggtttcaa

SEQ ID NO: 430558 - DNA, 25 bp, Homo sapien
taacaagacctgcactgtgatgctg

SEQ ID NO: 430559 - DNA, 25 bp, Homo sapien
acgtctttaacaagacctgcactgt

SEQ ID NO: 430560 - DNA, 25 bp, Homo sapien
acgggtgctccttcttccaggtggg

SEQ ID NO: 430561 - DNA, 25 bp, Homo sapien
tccccaccacgggtgctccttcttc

SEQ ID NO: 430562 - DNA, 25 bp, Homo sapien
cctcgttaggaagactggccacgca

SEQ ID NO: 430563 - DNA, 25 bp, Homo sapien
ccaggtcacgaccagagagtgctat

SEQ ID NO: 430564 - DNA, 25 bp, Homo sapien
acctgagggtgtagctttgcggaca

SEQ ID NO: 430565 - DNA, 25 bp, Homo sapien
gacagcctgggaaaacacgggctca

SEQ ID NO: 430566 - DNA, 25 bp, Homo sapien
ggtctctagtccacgtgctacttac

SEQ ID NO: 430567 - DNA, 25 bp, Homo sapien
ctttggacggtctggacggcactct

SEQ ID NO: 430568 - DNA, 25 bp, Homo sapien
gacggcactctggtctctagtccac

SEQ ID NO: 430569 - DNA, 25 bp, Homo sapien
tagagaaagcccgtgtgcctttgga

SEQ ID NO: 430570 - DNA, 25 bp, Homo sapien
tcaggcactcttcacaggttttgtt

SEQ ID NO: 430571 - DNA, 25 bp, Homo sapien
cactcttcacaggttttgtttgtgt

SEQ ID NO: 430572 - DNA, 25 bp, Homo sapien
ggcactcttcacaggttttgtttgt

SEQ ID NO: 430573 - DNA, 25 bp, Homo sapien
ttcttcaggcactcttcacaggttt

SEQ ID NO: 430574 - DNA, 25 bp, Homo sapien
tgagcccctgctgataacaagcctt

SEQ ID NO: 430575 - DNA, 25 bp, Homo sapien
tgtggaacgagtgttcaggaacccc

SEQ ID NO: 430576 - DNA, 25 bp, Homo sapien
cttcttcaagacatgtggaacgagt

SEQ ID NO: 430577 - DNA, 25 bp, Homo sapien
tcaagacatgtggaacgagtgttca

SEQ ID NO: 430578 - DNA, 25 bp, Homo sapien
tacagatctcatgtgacaaagcaag

SEQ ID NO: 430579 - DNA, 25 bp, Homo sapien
tcaaagcgctgctactaaggaaggg

SEQ ID NO: 430580 - DNA, 25 bp, Homo sapien
caaagcaaggtcttagtcccctggt

SEQ ID NO: 430581 - DNA, 25 bp, Homo sapien
taccaacctgtaccaagggagaggc

SEQ ID NO: 430582 - DNA, 25 bp, Homo sapien
caaaatcagatgctacagcctggct

SEQ ID NO: 430583 - DNA, 25 bp, Homo sapien
tgcgcgtctggacagcgtagaaccg

SEQ ID NO: 430584 - DNA, 25 bp, Homo sapien
cgttcgctgctgtgcgtggaactgc

SEQ ID NO: 430585 - DNA, 25 bp, Homo sapien
taaggcataagtgcgagcgttcgct

SEQ ID NO: 430586 - DNA, 25 bp, Homo sapien
caccgaggcgcaacctccagtacgg

SEQ ID NO: 430587 - DNA, 25 bp, Homo sapien
cagcgcggcgccaccgaggcgcaac

SEQ ID NO: 430588 - DNA, 25 bp, Homo sapien
ggcgcaacctccagtacggcgtcgg

SEQ ID NO: 430589 - DNA, 25 bp, Homo sapien
tgcgcggcggccaccgggatgagca

SEQ ID NO: 430590 - DNA, 25 bp, Homo sapien
tcggccggtcgctctatcagtcagt

SEQ ID NO: 430591 - DNA, 25 bp, Homo sapien
cctgcgcgatagaggaaaggagcct

SEQ ID NO: 430592 - DNA, 25 bp, Homo sapien
cttaagtgagccctggacgaggcgc

SEQ ID NO: 430593 - DNA, 25 bp, Homo sapien
tgcgagtgcgcagcctcaaaaagca

SEQ ID NO: 430594 - DNA, 25 bp, Homo sapien
ggctgtttccacacgtccactaaag

SEQ ID NO: 430595 - DNA, 25 bp, Homo sapien
tctgagtaccccagtgggaggcaga

SEQ ID NO: 430596 - DNA, 25 bp, Homo sapien
cacagttggaggagaggtatagaca

SEQ ID NO: 430597 - DNA, 25 bp, Homo sapien
aagggaaggcatagacacagctgga

SEQ ID NO: 430598 - DNA, 25 bp, Homo sapien
ggcaccacctttaatcagactgatg

SEQ ID NO: 430599 - DNA, 25 bp, Homo sapien
caaagactgtgccagtcagagtgga

SEQ ID NO: 430600 - DNA, 25 bp, Homo sapien
gctgtggcaagccatgtctcggccg

SEQ ID NO: 430601 - DNA, 25 bp, Homo sapien
cagactgatgtcctgacttgcacag

SEQ ID NO: 430602 - DNA, 25 bp, Homo sapien
tcatgaccgtcgtggtggcgctctt

SEQ ID NO: 430603 - DNA, 25 bp, Homo sapien
gaccgtcgtggtggcgctcttgaaa

SEQ ID NO: 430604 - DNA, 25 bp, Homo sapien
gcaaacttggggttcatgaccgtcg

SEQ ID NO: 430605 - DNA, 25 bp, Homo sapien
gttcatgaccgtcgtggtggcgctc

SEQ ID NO: 430606 - DNA, 25 bp, Homo sapien
cctgaggacactccccgcatggaag

SEQ ID NO: 430607 - DNA, 25 bp, Homo sapien
gtgcagccacacacgggtgtccacg

SEQ ID NO: 430608 - DNA, 25 bp, Homo sapien
cgcatagtgtgggacgcacgtgccc

SEQ ID NO: 430609 - DNA, 25 bp, Homo sapien
cgcatggaagccgtcactttgagga

SEQ ID NO: 430610 - DNA, 25 bp, Homo sapien
tgtactcccggaggtcgctcaggtg

SEQ ID NO: 430611 - DNA, 25 bp, Homo sapien
cctgtactcccggaggtcgctcagg

SEQ ID NO: 430612 - DNA, 25 bp, Homo sapien
agaatgccgatcagcacgatgcctg

SEQ ID NO: 430613 - DNA, 25 bp, Homo sapien
agatgaccagcaggagaatgccgat

SEQ ID NO: 430614 - DNA, 25 bp, Homo sapien
tgacttggccaggattgcacaaacc

SEQ ID NO: 430615 - DNA, 25 bp, Homo sapien
ggcatgtcacctacaggctcagaga

SEQ ID NO: 430616 - DNA, 25 bp, Homo sapien
tgccaggatgagcaacgcaaggtcc

SEQ ID NO: 430617 - DNA, 25 bp, Homo sapien
gcacttagagagacggaggttccca

SEQ ID NO: 430618 - DNA, 25 bp, Homo sapien
ccttgcaggtcctgcccttcacggg

SEQ ID NO: 430619 - DNA, 25 bp, Homo sapien
tcggctctcatccacatagatgagg

SEQ ID NO: 430620 - DNA, 25 bp, Homo sapien
gggttgttcgacagctgcaggcccg

SEQ ID NO: 430621 - DNA, 25 bp, Homo sapien
atgaggtagcggtccatcccgtcct

SEQ ID NO: 430622 - DNA, 25 bp, Homo sapien
gatgcgggtgcagcgggtgaactgg

SEQ ID NO: 430623 - DNA, 25 bp, Homo sapien
cgggggctcgggcttgggtgtgtgt

SEQ ID NO: 430624 - DNA, 25 bp, Homo sapien
gggcagatgcgggtgcagcgggtga

SEQ ID NO: 430625 - DNA, 25 bp, Homo sapien
cagatgcgggtgcagcgggtgaact

SEQ ID NO: 430626 - DNA, 25 bp, Homo sapien
gcctgaatggcactcgcatacgttg

SEQ ID NO: 430627 - DNA, 25 bp, Homo sapien
ggcactcgcatacgttgcagcggca

SEQ ID NO: 430628 - DNA, 25 bp, Homo sapien
tggtagcctgaatggcactcgcata

SEQ ID NO: 430629 - DNA, 25 bp, Homo sapien
tcgcatacgttgcagcggcaccggc

SEQ ID NO: 430630 - DNA, 25 bp, Homo sapien
cactacactcaacacgccgcgggtt

SEQ ID NO: 430631 - DNA, 25 bp, Homo sapien
gccctcagtggtcctctcgcactgg

SEQ ID NO: 430632 - DNA, 25 bp, Homo sapien
ggtcctctcgcactggcacgctgag

SEQ ID NO: 430633 - DNA, 25 bp, Homo sapien
actcaacacgccgcgggttcaggca

SEQ ID NO: 430634 - DNA, 25 bp, Homo sapien
ggcacttcccgcagaagcagagccc

SEQ ID NO: 430635 - DNA, 25 bp, Homo sapien
gcacttcccgcagaagcagagcccc

SEQ ID NO: 430636 - DNA, 25 bp, Homo sapien
gcggcacttcccgcagaagcagagc

SEQ ID NO: 430637 - DNA, 25 bp, Homo sapien
cagcggcacttcccgcagaagcaga

SEQ ID NO: 430638 - DNA, 25 bp, Homo sapien
acctggccgttgtagcgctcacagt

SEQ ID NO: 430639 - DNA, 25 bp, Homo sapien
cacactcgcagtactgcccgtatat

SEQ ID NO: 430640 - DNA, 25 bp, Homo sapien
ggacgtcgctggtgtggcacaggca

SEQ ID NO: 430641 - DNA, 25 bp, Homo sapien
tactgcccgtatatcagcttgccgg

SEQ ID NO: 430642 - DNA, 25 bp, Homo sapien
ccttggcctgcgcatgcagtggctc

SEQ ID NO: 430643 - DNA, 25 bp, Homo sapien
tgtgttgcagccatgcacatggcct

SEQ ID NO: 430644 - DNA, 25 bp, Homo sapien
acatggcctgtgctgcgataccggt

SEQ ID NO: 430645 - DNA, 25 bp, Homo sapien
agatgtggaagctggcatcaagccg

SEQ ID NO: 430646 - DNA, 25 bp, Homo sapien
cactggggaagaacctgcacggtca

SEQ ID NO: 430647 - DNA, 25 bp, Homo sapien
catggcagaggctgcggtctctgct

SEQ ID NO: 430648 - DNA, 25 bp, Homo sapien
gatgacaaacgactgctcctggatg

SEQ ID NO: 430649 - DNA, 25 bp, Homo sapien
gcccggatgacaaacgactgctcct

SEQ ID NO: 430650 - DNA, 25 bp, Homo sapien
ccagcgcccggatgacaaacgactg

SEQ ID NO: 430651 - DNA, 25 bp, Homo sapien
ctatgtccgtgaagcccagcgcccg

SEQ ID NO: 430652 - DNA, 25 bp, Homo sapien
agatccgagagccaaagtcagccgg

SEQ ID NO: 430653 - DNA, 25 bp, Homo sapien
catcagcagagacatgtgacacgca

SEQ ID NO: 430654 - DNA, 25 bp, Homo sapien
ccaacatgagggaaacgttctggtg

SEQ ID NO: 430655 - DNA, 25 bp, Homo sapien
tctggtgagaatccatgggacagct

SEQ ID NO: 430656 - DNA, 25 bp, Homo sapien
ggacattgatctgcacgccatcaca

SEQ ID NO: 430657 - DNA, 25 bp, Homo sapien
cagaaggagtcgtaggtgactttca

SEQ ID NO: 430658 - DNA, 25 bp, Homo sapien
gagggcgttgtgatccaggaagacc

SEQ ID NO: 430659 - DNA, 25 bp, Homo sapien
tgtgcgtcactccattgctgcagaa

SEQ ID NO: 430660 - DNA, 25 bp, Homo sapien
tgcaagtccccagtgtcagctaatg

SEQ ID NO: 430661 - DNA, 25 bp, Homo sapien
ctgcgggcagagagcggttactctt

SEQ ID NO: 430662 - DNA, 25 bp, Homo sapien
tcagccttgagtccccaggacctag

SEQ ID NO: 430663 - DNA, 25 bp, Homo sapien
gggcaggagctgcataaattgttca

SEQ ID NO: 430664 - DNA, 25 bp, Homo sapien
aacagagcaagaggaattccacccc

SEQ ID NO: 430665 - DNA, 25 bp, Homo sapien
gagcagcccagggtgcagctcgatg

SEQ ID NO: 430666 - DNA, 25 bp, Homo sapien
ggccgtgcaccagggagaaattcag

SEQ ID NO: 430667 - DNA, 25 bp, Homo sapien
cttgcccaggacaggtgaacagagc

SEQ ID NO: 430668 - DNA, 25 bp, Homo sapien
tgggtcccagctgagtggtgcggga

SEQ ID NO: 430669 - DNA, 25 bp, Homo sapien
ccacggctgacttggggatgatctc

SEQ ID NO: 430670 - DNA, 25 bp, Homo sapien
ttggaccacattgctggagtcctca

SEQ ID NO: 430671 - DNA, 25 bp, Homo sapien
taagcattcttaatgagttggacca

SEQ ID NO: 430672 - DNA, 25 bp, Homo sapien
taatgagttggaccacattgctgga

SEQ ID NO: 430673 - DNA, 25 bp, Homo sapien
agaagaccagacatggcacggctag

SEQ ID NO: 430674 - DNA, 25 bp, Homo sapien
aagaccagacatggcacggctagga

SEQ ID NO: 430675 - DNA, 25 bp, Homo sapien
gggcaagaagaccagacatggcacg

SEQ ID NO: 430676 - DNA, 25 bp, Homo sapien
caagaagaccagacatggcacggct

SEQ ID NO: 430677 - DNA, 25 bp, Homo sapien
gattgggacctgctactgctggtga

SEQ ID NO: 430678 - DNA, 25 bp, Homo sapien
gcaaaggattgggacctgctactgc

SEQ ID NO: 430679 - DNA, 25 bp, Homo sapien
ctggtgccacaccatcgcctggagt

SEQ ID NO: 430680 - DNA, 25 bp, Homo sapien
ggtgccacaccatcgcctggagtct

SEQ ID NO: 430681 - DNA, 25 bp, Homo sapien
tcgtaggtcttcaccatcctactgg

SEQ ID NO: 430682 - DNA, 25 bp, Homo sapien
cagccagcttgtgcgccagctggcc

SEQ ID NO: 430683 - DNA, 25 bp, Homo sapien
accatcctactggtcaccgcgaaga

SEQ ID NO: 430684 - DNA, 25 bp, Homo sapien
aagatgggctggatgttgttttcag

SEQ ID NO: 430685 - DNA, 25 bp, Homo sapien
gtcctgctcagttggccccgagtcc

SEQ ID NO: 430686 - DNA, 25 bp, Homo sapien
cgagtccaggacaaggcttccaggt

SEQ ID NO: 430687 - DNA, 25 bp, Homo sapien
ctgtctgccccgctcagcgtcagcc

SEQ ID NO: 430688 - DNA, 25 bp, Homo sapien
gcgtcagccctgcccgtgcttcgaa

SEQ ID NO: 430689 - DNA, 25 bp, Homo sapien
ctccaggtgacagcggccgtcgttg

SEQ ID NO: 430690 - DNA, 25 bp, Homo sapien
tggaagccgtcatcagtggcaaaca

SEQ ID NO: 430691 - DNA, 25 bp, Homo sapien
gtgacgttgcgccagccgatttcct

SEQ ID NO: 430692 - DNA, 25 bp, Homo sapien
ttcgttgctcctcttgtacaagttg

SEQ ID NO: 430693 - DNA, 25 bp, Homo sapien
cagcacggtcttgtccacgaaggac

SEQ ID NO: 430694 - DNA, 25 bp, Homo sapien
tcagggtgcgtgttcacgaacggca

SEQ ID NO: 430695 - DNA, 25 bp, Homo sapien
cgacctcggtctgaaactggttgga

SEQ ID NO: 430696 - DNA, 25 bp, Homo sapien
catgggtttcgcagcttatcagggt

SEQ ID NO: 430697 - DNA, 25 bp, Homo sapien
catcaagcatggagtaggagaggtc

SEQ ID NO: 430698 - DNA, 25 bp, Homo sapien
gactcggtgatctcgttgagggccc

SEQ ID NO: 430699 - DNA, 25 bp, Homo sapien
ggtccatcagatagtacaggtcgat

SEQ ID NO: 430700 - DNA, 25 bp, Homo sapien
gaaggtcacgttgaacgctgctgcc

SEQ ID NO: 430701 - DNA, 25 bp, Homo sapien
tggtcgcaggtaaagcgtcactttt

SEQ ID NO: 430702 - DNA, 25 bp, Homo sapien
gggtccatgatgtcgtcagccgcac

SEQ ID NO: 430703 - DNA, 25 bp, Homo sapien
tttcagcgaggcttgtggggtccat

SEQ ID NO: 430704 - DNA, 25 bp, Homo sapien
agcgaatggagtcaggatcccccgg

SEQ ID NO: 430705 - DNA, 25 bp, Homo sapien
cctgaccaaggtagtttccacctgg

SEQ ID NO: 430706 - DNA, 25 bp, Homo sapien
ctcagtccgaggacagacgggagcc

SEQ ID NO: 430707 - DNA, 25 bp, Homo sapien
cccagcctgaccaaggtagtttcca

SEQ ID NO: 430708 - DNA, 25 bp, Homo sapien
cactgaaaggtgtttatttcagagg

SEQ ID NO: 430709 - DNA, 25 bp, Homo sapien
agccgggccccgactcgatgcattc

SEQ ID NO: 430710 - DNA, 25 bp, Homo sapien
actcgatgcattcccggcagctgct

SEQ ID NO: 430711 - DNA, 25 bp, Homo sapien
ttctggcaccaggtgcagccgggcc

SEQ ID NO: 430712 - DNA, 25 bp, Homo sapien
ttgaacttcgtgcactcctgagaga

SEQ ID NO: 430713 - DNA, 25 bp, Homo sapien
tgagggacgaggccggctggtgagt

SEQ ID NO: 430714 - DNA, 25 bp, Homo sapien
gagggacgaggccggctggtgagtg

SEQ ID NO: 430715 - DNA, 25 bp, Homo sapien
ctgagggacgaggccggctggtgag

SEQ ID NO: 430716 - DNA, 25 bp, Homo sapien
agggacgaggccggctggtgagtgg

SEQ ID NO: 430717 - DNA, 25 bp, Homo sapien
attggaatgtcacgcgtggagtccc

SEQ ID NO: 430718 - DNA, 25 bp, Homo sapien
gtggagtcccctccgtggaacacag

SEQ ID NO: 430719 - DNA, 25 bp, Homo sapien
gcctcccgggaacttctgtctatgg

SEQ ID NO: 430720 - DNA, 25 bp, Homo sapien
cctgttctccctgattggaatgtca

SEQ ID NO: 430721 - DNA, 25 bp, Homo sapien
gcgagcagtggggggcgcaggccca

SEQ ID NO: 430722 - DNA, 25 bp, Homo sapien
gggcgagcagtggggggcgcaggcc

SEQ ID NO: 430723 - DNA, 25 bp, Homo sapien
agggcgagcagtggggggcgcaggc

SEQ ID NO: 430724 - DNA, 25 bp, Homo sapien
ggcgagcagtggggggcgcaggccc

SEQ ID NO: 430725 - DNA, 25 bp, Homo sapien
aaggggtcttggtgacggtctcagg

SEQ ID NO: 430726 - DNA, 25 bp, Homo sapien
gggtcttggtgacggtctcaggccc

SEQ ID NO: 430727 - DNA, 25 bp, Homo sapien
tcttggtgacggtctcaggcccaac

SEQ ID NO: 430728 - DNA, 25 bp, Homo sapien
gaaggggtcttggtgacggtctcag

SEQ ID NO: 430729 - DNA, 25 bp, Homo sapien
ccagttcctgtcacggcctcccagg

SEQ ID NO: 430730 - DNA, 25 bp, Homo sapien
caaatgccagttcctgtcacggcct

SEQ ID NO: 430731 - DNA, 25 bp, Homo sapien
tccagcaaatgccagttcctgtcac

SEQ ID NO: 430732 - DNA, 25 bp, Homo sapien
aatgccagttcctgtcacggcctcc

SEQ ID NO: 430733 - DNA, 25 bp, Homo sapien
ttctccccactgttgctcctccatg

SEQ ID NO: 430734 - DNA, 25 bp, Homo sapien
cctccatgagcagccctggggggct

SEQ ID NO: 430735 - DNA, 25 bp, Homo sapien
ctggtggggagccaccttctcccca

SEQ ID NO: 430736 - DNA, 25 bp, Homo sapien
tccccactgttgctcctccatgagc

SEQ ID NO: 430737 - DNA, 25 bp, Homo sapien
gatgggaatgggtaaggcacagatg

SEQ ID NO: 430738 - DNA, 25 bp, Homo sapien
tgtgcctggaggtggtcgaagggcc

SEQ ID NO: 430739 - DNA, 25 bp, Homo sapien
ctggtgccctgaggctaagccggca

SEQ ID NO: 430740 - DNA, 25 bp, Homo sapien
tgtagggcagcattcgggcaaacag

SEQ ID NO: 430741 - DNA, 25 bp, Homo sapien
tgtgcactaggcaggtcacgtcgat

SEQ ID NO: 430742 - DNA, 25 bp, Homo sapien
ctcactgtgcactaggcaggtcacg

SEQ ID NO: 430743 - DNA, 25 bp, Homo sapien
tgcactaggcaggtcacgtcgatgc

SEQ ID NO: 430744 - DNA, 25 bp, Homo sapien
actaggcaggtcacgtcgatgccgc

SEQ ID NO: 430745 - DNA, 25 bp, Homo sapien
ggctttgctaccagtctgccctggg

SEQ ID NO: 430746 - DNA, 25 bp, Homo sapien
tctagaaacctcagctggaggcgcg

SEQ ID NO: 430747 - DNA, 25 bp, Homo sapien
tgggtcacgtctagaaacctcagct

SEQ ID NO: 430748 - DNA, 25 bp, Homo sapien
aggcgcgggtcgtaaagtcctgaca

SEQ ID NO: 430749 - DNA, 25 bp, Homo sapien
gttatgctgggaagtcttccaggcc

SEQ ID NO: 430750 - DNA, 25 bp, Homo sapien
tccagggacagactgaccggtagcc

SEQ ID NO: 430751 - DNA, 25 bp, Homo sapien
gggagttatgctgggaagtcttcca

SEQ ID NO: 430752 - DNA, 25 bp, Homo sapien
cagactgaccggtagccttggctgg

SEQ ID NO: 430753 - DNA, 25 bp, Homo sapien
aacaagatctgccaccttcgcagac

SEQ ID NO: 430754 - DNA, 25 bp, Homo sapien
tcgcagaccactaaacctcattcct

SEQ ID NO: 430755 - DNA, 25 bp, Homo sapien
tgaaggccaactgaccagagagcag

SEQ ID NO: 430756 - DNA, 25 bp, Homo sapien
catgaaggccaactgaccagagagc

SEQ ID NO: 430757 - DNA, 25 bp, Homo sapien
gaggctctgccctggactcggagtc

SEQ ID NO: 430758 - DNA, 25 bp, Homo sapien
caaacggagccacgtgaggacttct

SEQ ID NO: 430759 - DNA, 25 bp, Homo sapien
cgttcaattcatggtttctgcccaa

SEQ ID NO: 430760 - DNA, 25 bp, Homo sapien
tcggagtccacttgctgtcaaagca

SEQ ID NO: 430761 - DNA, 25 bp, Homo sapien
tcctcaccctggatgcctgtgggca

SEQ ID NO: 430762 - DNA, 25 bp, Homo sapien
ctcaccctggatgcctgtgggcagc

SEQ ID NO: 430763 - DNA, 25 bp, Homo sapien
ttcctcaccctggatgcctgtgggc

SEQ ID NO: 430764 - DNA, 25 bp, Homo sapien
cttcctcaccctggatgcctgtggg

SEQ ID NO: 430765 - DNA, 25 bp, Homo sapien
tcctcaccctggatgcctgtgggca

SEQ ID NO: 430766 - DNA, 25 bp, Homo sapien
ctcaccctggatgcctgtgggcagc

SEQ ID NO: 430767 - DNA, 25 bp, Homo sapien
ttcctcaccctggatgcctgtgggc

SEQ ID NO: 430768 - DNA, 25 bp, Homo sapien
cttcctcaccctggatgcctgtggg

SEQ ID NO: 430769 - DNA, 25 bp, Homo sapien
tcctcaccctggatgcctgtgggct

SEQ ID NO: 430770 - DNA, 25 bp, Homo sapien
ttcctcaccctggatgcctgtgggc

SEQ ID NO: 430771 - DNA, 25 bp, Homo sapien
cttcctcaccctggatgcctgtggg

SEQ ID NO: 430772 - DNA, 25 bp, Homo sapien
ctcaccctggatgcctgtgggctgc

SEQ ID NO: 430773 - DNA, 25 bp, Homo sapien
ttcctcaccctggatgcctgtgggc

SEQ ID NO: 430774 - DNA, 25 bp, Homo sapien
cttcctcaccctggatgcctgtggg

SEQ ID NO: 430775 - DNA, 25 bp, Homo sapien
ctcaccctggatgcctgtgggcagc

SEQ ID NO: 430776 - DNA, 25 bp, Homo sapien
tcctcaccctggatgcctgtgggca

SEQ ID NO: 430777 - DNA, 25 bp, Homo sapien
ccccaagcctccatcaaatctaatg

SEQ ID NO: 430778 - DNA, 25 bp, Homo sapien
ggcccacgcatttcccatcctgaag

SEQ ID NO: 430779 - DNA, 25 bp, Homo sapien
ctgaagggtccagctcataggccgg

SEQ ID NO: 430780 - DNA, 25 bp, Homo sapien
aatgacccgccttgtctctgaacac

SEQ ID NO: 430781 - DNA, 25 bp, Homo sapien
gccagcctaagggcccaagtttgta

SEQ ID NO: 430782 - DNA, 25 bp, Homo sapien
gctggaccctggtcaacactaggtc

SEQ ID NO: 430783 - DNA, 25 bp, Homo sapien
tattctagaccagtgattctctgga

SEQ ID NO: 430784 - DNA, 25 bp, Homo sapien
gaacctaaacactgacgctggaccc

SEQ ID NO: 430785 - DNA, 25 bp, Homo sapien
acggacaggcggaaccgggccatca

SEQ ID NO: 430786 - DNA, 25 bp, Homo sapien
aggcggaaccgggccatcagccgtc

SEQ ID NO: 430787 - DNA, 25 bp, Homo sapien
ctggggcacggacaggcggaaccgg

SEQ ID NO: 430788 - DNA, 25 bp, Homo sapien
gagcttcctgtagcatcctggggca

SEQ ID NO: 430789 - DNA, 25 bp, Homo sapien
tcagtctcccaatccgtggcccggg

SEQ ID NO: 430790 - DNA, 25 bp, Homo sapien
tgggcggcgggcttcgcgcctgcct

SEQ ID NO: 430791 - DNA, 25 bp, Homo sapien
gccggggtctccctagcggaggctg

SEQ ID NO: 430792 - DNA, 25 bp, Homo sapien
atggagcccgctgcgcgcagaggct

SEQ ID NO: 430793 - DNA, 25 bp, Homo sapien
agcgccctcaggcgtcggaggagcc

SEQ ID NO: 430794 - DNA, 25 bp, Homo sapien
cagcgccctcaggcgtcggaggagc

SEQ ID NO: 430795 - DNA, 25 bp, Homo sapien
cgccctcaggcgtcggaggagcccc

SEQ ID NO: 430796 - DNA, 25 bp, Homo sapien
ccctcaggcgtcggaggagccccca

SEQ ID NO: 430797 - DNA, 25 bp, Homo sapien
cccctttgagcgtggaatcgttgcc

SEQ ID NO: 430798 - DNA, 25 bp, Homo sapien
tgagaaccacggagagaggaagtcc

SEQ ID NO: 430799 - DNA, 25 bp, Homo sapien
gaagccgaatgtgctgccggagtcc

SEQ ID NO: 430800 - DNA, 25 bp, Homo sapien
gggcgccctttattctgaagccgaa

SEQ ID NO: 430801 - DNA, 25 bp, Homo sapien
tcatggctccctgctatcgaacacc

SEQ ID NO: 430802 - DNA, 25 bp, Homo sapien
tccctgctatcgaacaccggacatg

SEQ ID NO: 430803 - DNA, 25 bp, Homo sapien
tatcgaacaccggacatgggtcgtg

SEQ ID NO: 430804 - DNA, 25 bp, Homo sapien
accggacatgggtcgtgtgctgcac

SEQ ID NO: 430805 - DNA, 25 bp, Homo sapien
ccgacacccgcaatgccttaagagg

SEQ ID NO: 430806 - DNA, 25 bp, Homo sapien
ctggcagttgcaggaccgacacccg

SEQ ID NO: 430807 - DNA, 25 bp, Homo sapien
taagaggtgatgactgccttccagg

SEQ ID NO: 430808 - DNA, 25 bp, Homo sapien
tggagtccacgggtcatggccacgt

SEQ ID NO: 430809 - DNA, 25 bp, Homo sapien
ttgagacagctgtgacgcaggcaag

SEQ ID NO: 430810 - DNA, 25 bp, Homo sapien
tggagacaggttcctgccagttcag

SEQ ID NO: 430811 - DNA, 25 bp, Homo sapien
tgtgtggctctggacctagtccttg

SEQ ID NO: 430812 - DNA, 25 bp, Homo sapien
taaccggtggtcttcatgcctagga

SEQ ID NO: 430813 - DNA, 25 bp, Homo sapien
cccgtttgtggggacattacatctt

SEQ ID NO: 430814 - DNA, 25 bp, Homo sapien
ccccgtttgtggggacattacatct

SEQ ID NO: 430815 - DNA, 25 bp, Homo sapien
ccgtttgtggggacattacatcttc

SEQ ID NO: 430816 - DNA, 25 bp, Homo sapien
ccaggtatgtcaggagctgggctcc

SEQ ID NO: 430817 - DNA, 25 bp, Homo sapien
gctccaccagggagactcaagtgga

SEQ ID NO: 430818 - DNA, 25 bp, Homo sapien
tcaagtggaaagccctcatccttgt

SEQ ID NO: 430819 - DNA, 25 bp, Homo sapien
cttctcttgagaacttttaccaggt

SEQ ID NO: 430820 - DNA, 25 bp, Homo sapien
tttactaagggatggagagacacag

SEQ ID NO: 430821 - DNA, 25 bp, Homo sapien
tgtatttttactaagggatggagag

SEQ ID NO: 430822 - DNA, 25 bp, Homo sapien
tttttactaagggatggagagacac

SEQ ID NO: 430823 - DNA, 25 bp, Homo sapien
tatttttactaagggatggagagac

SEQ ID NO: 430824 - DNA, 25 bp, Homo sapien
gccccagggatgtccagaggatcag

SEQ ID NO: 430825 - DNA, 25 bp, Homo sapien
ccagggatgtccagaggatcagaaa

SEQ ID NO: 430826 - DNA, 25 bp, Homo sapien
gggatgtccagaggatcagaaaact

SEQ ID NO: 430827 - DNA, 25 bp, Homo sapien
agcagctactggcagagtccgtgga

SEQ ID NO: 430828 - DNA, 25 bp, Homo sapien
catgggggagggttgatctttgatc

SEQ ID NO: 430829 - DNA, 25 bp, Homo sapien
atggcccaacgggaactgtgagcac

SEQ ID NO: 430830 - DNA, 25 bp, Homo sapien
caacgggaactgtgagcacccagcc

SEQ ID NO: 430831 - DNA, 25 bp, Homo sapien
cctctgatggcccaacgggaactgt

SEQ ID NO: 430832 - DNA, 25 bp, Homo sapien
ggcagcatcccctctcgtggcagtg

SEQ ID NO: 430833 - DNA, 25 bp, Homo sapien
agggaaagggctgaagctggcgcag

SEQ ID NO: 430834 - DNA, 25 bp, Homo sapien
gcagggaaagggctgaagctggcgc

SEQ ID NO: 430835 - DNA, 25 bp, Homo sapien
cacggcagcatcccctctcgtggca

SEQ ID NO: 430836 - DNA, 25 bp, Homo sapien
gagcaggagacagtccagggcagag

SEQ ID NO: 430837 - DNA, 25 bp, Homo sapien
agggcagaggcaggctctgagtcca

SEQ ID NO: 430838 - DNA, 25 bp, Homo sapien
cagggcagaggcaggctctgagtcc

SEQ ID NO: 430839 - DNA, 25 bp, Homo sapien
gagcaggagcaggagacagtccagg

SEQ ID NO: 430840 - DNA, 25 bp, Homo sapien
tccagcgcctgggggccaagtgtgg

SEQ ID NO: 430841 - DNA, 25 bp, Homo sapien
gctccagcgcctgggggccaagtgt

SEQ ID NO: 430842 - DNA, 25 bp, Homo sapien
cagctccagcgcctgggggccaagt

SEQ ID NO: 430843 - DNA, 25 bp, Homo sapien
ccagcgcctgggggccaagtgtgga

SEQ ID NO: 430844 - DNA, 25 bp, Homo sapien
tgtccagcagaggcccctgatgtgc

SEQ ID NO: 430845 - DNA, 25 bp, Homo sapien
tctgtccagcagaggcccctgatgt

SEQ ID NO: 430846 - DNA, 25 bp, Homo sapien
tcagagcttctgtccagcagaggcc

SEQ ID NO: 430847 - DNA, 25 bp, Homo sapien
tccagcagaggcccctgatgtgcag

SEQ ID NO: 430848 - DNA, 25 bp, Homo sapien
agacacccaggcagggcgtcacctg

SEQ ID NO: 430849 - DNA, 25 bp, Homo sapien
accgagacacccaggcagggcgtca

SEQ ID NO: 430850 - DNA, 25 bp, Homo sapien
ctgcaccgagacacccaggcagggc

SEQ ID NO: 430851 - DNA, 25 bp, Homo sapien
aggcagggcgtcacctgcaaggtca

SEQ ID NO: 430852 - DNA, 25 bp, Homo sapien
ttgtaatcgctgttgtctcttggcc

SEQ ID NO: 430853 - DNA, 25 bp, Homo sapien
tgggcaggacgcaggtctctcacta

SEQ ID NO: 430854 - DNA, 25 bp, Homo sapien
ctggagaggagccttctggccactc

SEQ ID NO: 430855 - DNA, 25 bp, Homo sapien
cgtgccgcttcggtcctgatgggca

SEQ ID NO: 430856 - DNA, 25 bp, Homo sapien
tctttatgacgtgagagaagccagg

SEQ ID NO: 430857 - DNA, 25 bp, Homo sapien
tctgcagccgctatggagtgccagg

SEQ ID NO: 430858 - DNA, 25 bp, Homo sapien
aaggcaatgtgcatgccagcatgtc

SEQ ID NO: 430859 - DNA, 25 bp, Homo sapien
gatggagccatgtcacatccagtgt

SEQ ID NO: 430860 - DNA, 25 bp, Homo sapien
gattctctactgtggtccttctgca

SEQ ID NO: 430861 - DNA, 25 bp, Homo sapien
tactgtggtccttctgcagtcccac

SEQ ID NO: 430862 - DNA, 25 bp, Homo sapien
gagggattctctactgtggtccttc

SEQ ID NO: 430863 - DNA, 25 bp, Homo sapien
agttccttattggtgagggattctc

SEQ ID NO: 430864 - DNA, 25 bp, Homo sapien
ggtgagtatctttgtcactgtctta

SEQ ID NO: 430865 - DNA, 25 bp, Homo sapien
cttcttttgaagcttcctcctttgt

SEQ ID NO: 430866 - DNA, 25 bp, Homo sapien
tgagtatctttgtcactgtcttact

SEQ ID NO: 430867 - DNA, 25 bp, Homo sapien
tatctttgtcactgtcttactctgt

SEQ ID NO: 430868 - DNA, 25 bp, Homo sapien
tcttaaaggtgccacatcttaatac

SEQ ID NO: 430869 - DNA, 25 bp, Homo sapien
tactagtatgatggcaattacattt

SEQ ID NO: 430870 - DNA, 25 bp, Homo sapien
acatgggtttcagaggggaccaaca

SEQ ID NO: 430871 - DNA, 25 bp, Homo sapien
ggtttcagaggggaccaacattcaa

SEQ ID NO: 430872 - DNA, 25 bp, Homo sapien
cgctcgagtcctggacgtcgaggct

SEQ ID NO: 430873 - DNA, 25 bp, Homo sapien
ctcgagtcctggacgtcgaggctgc

SEQ ID NO: 430874 - DNA, 25 bp, Homo sapien
gaggatcgctcgagtcctggacgtc

SEQ ID NO: 430875 - DNA, 25 bp, Homo sapien
gatcgctcgagtcctggacgtcgag

SEQ ID NO: 430876 - DNA, 25 bp, Homo sapien
cacgatctagacagaaactcgttgt

SEQ ID NO: 430877 - DNA, 25 bp, Homo sapien
tgtttctcccaggtgcgtcggtgaa

SEQ ID NO: 430878 - DNA, 25 bp, Homo sapien
tttaaaaaggccatctcgactgccg

SEQ ID NO: 430879 - DNA, 25 bp, Homo sapien
aactcgttgtttctcgtgctccgcg

SEQ ID NO: 430880 - DNA, 25 bp, Homo sapien
gtagcgtggcccgttctggcgctcc

SEQ ID NO: 430881 - DNA, 25 bp, Homo sapien
agctcgtgctgacagtagcgtggcc

SEQ ID NO: 430882 - DNA, 25 bp, Homo sapien
tagcgtggcccgttctggcgcttcc

SEQ ID NO: 430883 - DNA, 25 bp, Homo sapien
aaagcttgtgctgacgggactgtag

SEQ ID NO: 430884 - DNA, 25 bp, Homo sapien
accctctgagctctgcagcctcctg

SEQ ID NO: 430885 - DNA, 25 bp, Homo sapien
tacgggcatcctgggagggaccctc

SEQ ID NO: 430886 - DNA, 25 bp, Homo sapien
gggaccctctgagctctgcagcctc

SEQ ID NO: 430887 - DNA, 25 bp, Homo sapien
agggaccctctgagctctgcagcct

SEQ ID NO: 430888 - DNA, 25 bp, Homo sapien
gccagctctagctggcttgtgcaat

SEQ ID NO: 430889 - DNA, 25 bp, Homo sapien
cctgtgggccgggttgtgcatgcag

SEQ ID NO: 430890 - DNA, 25 bp, Homo sapien
gggtgagcacccgtctcctgagcct

SEQ ID NO: 430891 - DNA, 25 bp, Homo sapien
ttgcggcagcctgtggaccccatgt

SEQ ID NO: 430892 - DNA, 25 bp, Homo sapien
ccttggcatcggacatccggggagc

SEQ ID NO: 430893 - DNA, 25 bp, Homo sapien
agctggtcatgcagcatcgggcgat

SEQ ID NO: 430894 - DNA, 25 bp, Homo sapien
ccttgggcacggctccaatccttgg

SEQ ID NO: 430895 - DNA, 25 bp, Homo sapien
catgcagcatcgggcgatcgggcat

SEQ ID NO: 430896 - DNA, 25 bp, Homo sapien
gagtgtgggccatccttgaaaacgg

SEQ ID NO: 430897 - DNA, 25 bp, Homo sapien
gcctgcggtgcctgctttgtaaaat

SEQ ID NO: 430898 - DNA, 25 bp, Homo sapien
tacttcacaggcgttaccaggttgc

SEQ ID NO: 430899 - DNA, 25 bp, Homo sapien
taaaatgcgcggcttttcatcagca

SEQ ID NO: 430900 - DNA, 25 bp, Homo sapien
gaaaaccactataagcccagaggct

SEQ ID NO: 430901 - DNA, 25 bp, Homo sapien
cacgcgggtcttatggatgctgtcc

SEQ ID NO: 430902 - DNA, 25 bp, Homo sapien
tgtgataaacccaaggccgaaagcc

SEQ ID NO: 430903 - DNA, 25 bp, Homo sapien
gcttggcagacggaaaacagccgct

SEQ ID NO: 430904 - DNA, 25 bp, Homo sapien
gaactcggaccgactcttgcctcat

SEQ ID NO: 430905 - DNA, 25 bp, Homo sapien
cagacctcagcacagttggagacat

SEQ ID NO: 430906 - DNA, 25 bp, Homo sapien
ggcatcacatgcacccgtgtcaggg

SEQ ID NO: 430907 - DNA, 25 bp, Homo sapien
gaggtctctgctgcactttcccgaa

SEQ ID NO: 430908 - DNA, 25 bp, Homo sapien
agggaggacaggtcgagggcaccat

SEQ ID NO: 430909 - DNA, 25 bp, Homo sapien
cccagtgaagccgagggaggaccct

SEQ ID NO: 430910 - DNA, 25 bp, Homo sapien
tcctaggggccacgaactggtctgg

SEQ ID NO: 430911 - DNA, 25 bp, Homo sapien
cctgtcaggtgacacaccctggctg

SEQ ID NO: 430912 - DNA, 25 bp, Homo sapien
tgcccgcggaagctgagcatcaatt

SEQ ID NO: 430913 - DNA, 25 bp, Homo sapien
cctgcttcgtggtgagactcctggg

SEQ ID NO: 430914 - DNA, 25 bp, Homo sapien
tccatctccccgtttaggtgccagg

SEQ ID NO: 430915 - DNA, 25 bp, Homo sapien
ggcgtccgaatgctcgaggaacgat

SEQ ID NO: 430916 - DNA, 25 bp, Homo sapien
aggctctggtgggggcgaagctgcc

SEQ ID NO: 430917 - DNA, 25 bp, Homo sapien
caatgtgggatgctgtgagggctgc

SEQ ID NO: 430918 - DNA, 25 bp, Homo sapien
gctggggcaatgtgggatgctgtga

SEQ ID NO: 430919 - DNA, 25 bp, Homo sapien
ggctctggtgggggcgaagctgcca

SEQ ID NO: 430920 - DNA, 25 bp, Homo sapien
accagtgattctggcaagcttggcc

SEQ ID NO: 430921 - DNA, 25 bp, Homo sapien
tctgctgagactcgcgtacgacatt

SEQ ID NO: 430922 - DNA, 25 bp, Homo sapien
cgctttgccgcccattggagttggg

SEQ ID NO: 430923 - DNA, 25 bp, Homo sapien
tgttggctttgcatgggaccagtga

SEQ ID NO: 430924 - DNA, 25 bp, Homo sapien
cctgtattgtttgtctgcatcttca

SEQ ID NO: 430925 - DNA, 25 bp, Homo sapien
ggtgccctgaggatgaggtgctgct

SEQ ID NO: 430926 - DNA, 25 bp, Homo sapien
tgtctgcatcttcagctttgcgggt

SEQ ID NO: 430927 - DNA, 25 bp, Homo sapien
atcttcagctttgcgggtgccctga

SEQ ID NO: 430928 - DNA, 25 bp, Homo sapien
tgctgtgccgtagaggcgtcccttg

SEQ ID NO: 430929 - DNA, 25 bp, Homo sapien
cagggccacgagtgctgtgccgtag

SEQ ID NO: 430930 - DNA, 25 bp, Homo sapien
acgccctcgccatccctgctgtgtg

SEQ ID NO: 430931 - DNA, 25 bp, Homo sapien
tagaggcgtcccttgggcagtggtg

SEQ ID NO: 430932 - DNA, 25 bp, Homo sapien
agtacggcggctctgcgcaaacgtc

SEQ ID NO: 430933 - DNA, 25 bp, Homo sapien
atctgtgtggatcccgggaacctga

SEQ ID NO: 430934 - DNA, 25 bp, Homo sapien
aggccaggctgtgcggcaccatctt

SEQ ID NO: 430935 - DNA, 25 bp, Homo sapien
ggaataggaacccttcactcttgtc

SEQ ID NO: 430936 - DNA, 25 bp, Homo sapien
catgactgagctttccgtcggccgt

SEQ ID NO: 430937 - DNA, 25 bp, Homo sapien
ggctggagcctcattcactgtgaag

SEQ ID NO: 430938 - DNA, 25 bp, Homo sapien
ggcttgtgcggtctcctcttgggta

SEQ ID NO: 430939 - DNA, 25 bp, Homo sapien
cacctaagcaatgcagagaggccgc

SEQ ID NO: 430940 - DNA, 25 bp, Homo sapien
tgagcgaggagcatggacaccagct

SEQ ID NO: 430941 - DNA, 25 bp, Homo sapien
agcgaggagcatggacaccagcttg

SEQ ID NO: 430942 - DNA, 25 bp, Homo sapien
agagctctgagcgaggagcatggac

SEQ ID NO: 430943 - DNA, 25 bp, Homo sapien
ctctgagcgaggagcatggacacca

SEQ ID NO: 430944 - DNA, 25 bp, Homo sapien
tgaggctcctccgtgtcgctccacc

SEQ ID NO: 430945 - DNA, 25 bp, Homo sapien
gcgtggccttccgtgcctgcctctt

SEQ ID NO: 430946 - DNA, 25 bp, Homo sapien
tgtgcgtttcccatggatgaggtca

SEQ ID NO: 430947 - DNA, 25 bp, Homo sapien
gatgaggtcatagagcgcgtggcct

SEQ ID NO: 430948 - DNA, 25 bp, Homo sapien
ccttgtctctgtccccaacgcacac

SEQ ID NO: 430949 - DNA, 25 bp, Homo sapien
ctctgtccccaacgcacacctggaa

SEQ ID NO: 430950 - DNA, 25 bp, Homo sapien
cacgtagacttcttaaggatggcag

SEQ ID NO: 430951 - DNA, 25 bp, Homo sapien
catttcccacgtagacttcttaagg

SEQ ID NO: 430952 - DNA, 25 bp, Homo sapien
tctggtgacggacaagcatgcttct

SEQ ID NO: 430953 - DNA, 25 bp, Homo sapien
acaccaggccctgttgagacgtcag

SEQ ID NO: 430954 - DNA, 25 bp, Homo sapien
caggcatctgcaccagctaggtttt

SEQ ID NO: 430955 - DNA, 25 bp, Homo sapien
tgactgcaccccttgagttgtgcgg

SEQ ID NO: 430956 - DNA, 25 bp, Homo sapien
gagcgcgcccttgagaggcggcgcc

SEQ ID NO: 430957 - DNA, 25 bp, Homo sapien
cacgggggcagagacccacggtcca

SEQ ID NO: 430958 - DNA, 25 bp, Homo sapien
ggagaacccgcgatgtcgccgcacg

SEQ ID NO: 430959 - DNA, 25 bp, Homo sapien
acggtccacgcgcagacccggagaa

SEQ ID NO: 430960 - DNA, 25 bp, Homo sapien
gtttaagttctcccatccacacaca

SEQ ID NO: 430961 - DNA, 25 bp, Homo sapien
cctggcacccctgtctatggaagca

SEQ ID NO: 430962 - DNA, 25 bp, Homo sapien
cagtcgcatgacacaaaccacagtt

SEQ ID NO: 430963 - DNA, 25 bp, Homo sapien
cccctgtctatggaagcatgtttaa

SEQ ID NO: 430964 - DNA, 25 bp, Homo sapien
cctgaacactaggaacaggcctgtg

SEQ ID NO: 430965 - DNA, 25 bp, Homo sapien
tgctcccgcctgtgcacactcaggg

SEQ ID NO: 430966 - DNA, 25 bp, Homo sapien
tgtgcacactcagggtcagttgtca

SEQ ID NO: 430967 - DNA, 25 bp, Homo sapien
agacccatgggtgcgacctgaacac

SEQ ID NO: 430968 - DNA, 25 bp, Homo sapien
gcgtcctgcggagtgaccgtctgtc

SEQ ID NO: 430969 - DNA, 25 bp, Homo sapien
tcacagcgtcctgcggagtgaccgt

SEQ ID NO: 430970 - DNA, 25 bp, Homo sapien
tcctgaggagtgaccgtctgtctgg

SEQ ID NO: 430971 - DNA, 25 bp, Homo sapien
tcctgcggagtgaccgtctgtctgg

SEQ ID NO: 430972 - DNA, 25 bp, Homo sapien
gtgtgtctctgagcgtctcacaggg

SEQ ID NO: 430973 - DNA, 25 bp, Homo sapien
gaagccagcaaagccgctttagaat

SEQ ID NO: 430974 - DNA, 25 bp, Homo sapien
tagaattacaaagggcaagttccca

SEQ ID NO: 430975 - DNA, 25 bp, Homo sapien
tggatcagaactcacacgattcaag

SEQ ID NO: 430976 - DNA, 25 bp, Homo sapien
tgtgctgggccaggaaaccgccttc

SEQ ID NO: 430977 - DNA, 25 bp, Homo sapien
ttctccttcagtggaacacaatcca

SEQ ID NO: 430978 - DNA, 25 bp, Homo sapien
cccaggggaggcgactgtgctgggc

SEQ ID NO: 430979 - DNA, 25 bp, Homo sapien
ctgggccaggaaaccgccttctcct

SEQ ID NO: 430980 - DNA, 25 bp, Homo sapien
caaaacatttgctcgtaggagatgc

SEQ ID NO: 430981 - DNA, 25 bp, Homo sapien
tccagagatcccgaaataaagacgg

SEQ ID NO: 430982 - DNA, 25 bp, Homo sapien
ccccaatccggagttgagtcatctg

SEQ ID NO: 430983 - DNA, 25 bp, Homo sapien
ccagcgtcttgtattcgtggaagga

SEQ ID NO: 430984 - DNA, 25 bp, Homo sapien
cacgggtaagctttgaacactgtct

SEQ ID NO: 430985 - DNA, 25 bp, Homo sapien
gaaatctgagcacacggattgccct

SEQ ID NO: 430986 - DNA, 25 bp, Homo sapien
gagtcggcctgggtctatatcctaa

SEQ ID NO: 430987 - DNA, 25 bp, Homo sapien
caccgtatcctgtaggcattggcag

SEQ ID NO: 430988 - DNA, 25 bp, Homo sapien
catttcatagcggttggcatctcac

SEQ ID NO: 430989 - DNA, 25 bp, Homo sapien
tgtgtagaccacatttcatagcggt

SEQ ID NO: 430990 - DNA, 25 bp, Homo sapien
ggttggcatctcacatgcttatgca

SEQ ID NO: 430991 - DNA, 25 bp, Homo sapien
tttggtgctgtgtagaccacatttc

SEQ ID NO: 430992 - DNA, 25 bp, Homo sapien
cagggagagcgtcacaatagaaacc

SEQ ID NO: 430993 - DNA, 25 bp, Homo sapien
tctcagcaggcacccgaatgggcat

SEQ ID NO: 430994 - DNA, 25 bp, Homo sapien
gaaatacacacaacgtcctcaggca

SEQ ID NO: 430995 - DNA, 25 bp, Homo sapien
tctacaacagctgggaacgccatgt

SEQ ID NO: 430996 - DNA, 25 bp, Homo sapien
tggggtgaagggctcacttgttagc

SEQ ID NO: 430997 - DNA, 25 bp, Homo sapien
acttgttagctggctggccccaaag

SEQ ID NO: 430998 - DNA, 25 bp, Homo sapien
tttgggtgcttcgccttcagatggg

SEQ ID NO: 430999 - DNA, 25 bp, Homo sapien
cacggttgcccctttgggtgcttcg

SEQ ID NO: 431000 - DNA, 25 bp, Homo sapien
gcggctgacacctgcggagtgctta

SEQ ID NO: 431001 - DNA, 25 bp, Homo sapien
cggccatttataggcgcggacctcg

SEQ ID NO: 431002 - DNA, 25 bp, Homo sapien
ttgttgttttccagagtcggagtct

SEQ ID NO: 431003 - DNA, 25 bp, Homo sapien
gagtgcttaccgcataccaggctcc

SEQ ID NO: 431004 - DNA, 25 bp, Homo sapien
tctcccggagtctacagtgaggatg

SEQ ID NO: 431005 - DNA, 25 bp, Homo sapien
aggagacggcgggaaccgtgtccag

SEQ ID NO: 431006 - DNA, 25 bp, Homo sapien
tcagtgcggactaaacaggagacgg

SEQ ID NO: 431007 - DNA, 25 bp, Homo sapien
taaacgttggtaactggagcagctg

SEQ ID NO: 431008 - DNA, 25 bp, Homo sapien
gcagcaccgcgagacgccacctccg

SEQ ID NO: 431009 - DNA, 25 bp, Homo sapien
accgcgagacgccacctccgcaaaa

SEQ ID NO: 431010 - DNA, 25 bp, Homo sapien
gagacgccacctccgcaaaacgcaa

SEQ ID NO: 431011 - DNA, 25 bp, Homo sapien
ccacctccgcaaaacgcaaacgcca

SEQ ID NO: 431012 - DNA, 25 bp, Homo sapien
catgtttgctcatgctctggtgtcc

SEQ ID NO: 431013 - DNA, 25 bp, Homo sapien
gccacatgtttgctcatgctctggt

SEQ ID NO: 431014 - DNA, 25 bp, Homo sapien
cctgtggagtagagctccttgttct

SEQ ID NO: 431015 - DNA, 25 bp, Homo sapien
ctgtggagtagagctccttgttctc

SEQ ID NO: 431016 - DNA, 25 bp, Homo sapien
tgaggtccagtgctagcagcacatt

SEQ ID NO: 431017 - DNA, 25 bp, Homo sapien
gaagtatgggtcacttcgctcctgg

SEQ ID NO: 431018 - DNA, 25 bp, Homo sapien
cctgggccgtcggttcagaaggtgc

SEQ ID NO: 431019 - DNA, 25 bp, Homo sapien
agccttgcccggagctgaggtccag

SEQ ID NO: 431020 - DNA, 25 bp, Homo sapien
tcttctaggtctggcgactgctccc

SEQ ID NO: 431021 - DNA, 25 bp, Homo sapien
aggaagagaggacccggctttctgt

SEQ ID NO: 431022 - DNA, 25 bp, Homo sapien
tctgcctgacgtccttgacaagagg

SEQ ID NO: 431023 - DNA, 25 bp, Homo sapien
gactgctcccattggcaggtttcca

SEQ ID NO: 431024 - DNA, 25 bp, Homo sapien
tgtctctccatcccgctgtttcagg

SEQ ID NO: 431025 - DNA, 25 bp, Homo sapien
ctctccatcccgctgtttcagggtt

SEQ ID NO: 431026 - DNA, 25 bp, Homo sapien
gtctctccatcccgctgtttcaggg

SEQ ID NO: 431027 - DNA, 25 bp, Homo sapien
ctgtctctccatcccgctgtttcag

SEQ ID NO: 431028 - DNA, 25 bp, Homo sapien
tgaactcagagttgtgccgtggaag

SEQ ID NO: 431029 - DNA, 25 bp, Homo sapien
aaggcgttggccatggtagagaatc

SEQ ID NO: 431030 - DNA, 25 bp, Homo sapien
gaaggcagtgcctatgactggacag

SEQ ID NO: 431031 - DNA, 25 bp, Homo sapien
gcaattccagagacaaaccgctgct

SEQ ID NO: 431032 - DNA, 25 bp, Homo sapien
tcatattttgacttcatgcatttaa

SEQ ID NO: 431033 - DNA, 25 bp, Homo sapien
acttcatgcatttaatgaaccaaac

SEQ ID NO: 431034 - DNA, 25 bp, Homo sapien
tattttgacttcatgcatttaatga

SEQ ID NO: 431035 - DNA, 25 bp, Homo sapien
ttttgacttcatgcatttaatgaac

SEQ ID NO: 431036 - DNA, 25 bp, Homo sapien
caaggcagacttgtgggtacccaag

SEQ ID NO: 431037 - DNA, 25 bp, Homo sapien
taactcagtaggatgtggcatctcc

SEQ ID NO: 431038 - DNA, 25 bp, Homo sapien
tgaggtcctgacagctgtaccctgg

SEQ ID NO: 431039 - DNA, 25 bp, Homo sapien
tcccagcggcgacttagaggtggct

SEQ ID NO: 431040 - DNA, 25 bp, Homo sapien
tatgcttatgaacttgttgagtgag

SEQ ID NO: 431041 - DNA, 25 bp, Homo sapien
tagtgtacccatgtctaggaatttt

SEQ ID NO: 431042 - DNA, 25 bp, Homo sapien
ctttttgctagtgatagtgttgtct

SEQ ID NO: 431043 - DNA, 25 bp, Homo sapien
cactgtccagtctttatgcttatga

SEQ ID NO: 431044 - DNA, 25 bp, Homo sapien
tggatttcataagtcacatggctgg

SEQ ID NO: 431045 - DNA, 25 bp, Homo sapien
tttcataagtcacatggctggaagg

SEQ ID NO: 431046 - DNA, 25 bp, Homo sapien
tggctctgtattcattatggatttc

SEQ ID NO: 431047 - DNA, 25 bp, Homo sapien
cataagtcacatggctggaaggtac

SEQ ID NO: 431048 - DNA, 25 bp, Homo sapien
cagagggaacgcttgagatgctgca

SEQ ID NO: 431049 - DNA, 25 bp, Homo sapien
gcattgctggatcttcaagcaggca

SEQ ID NO: 431050 - DNA, 25 bp, Homo sapien
tgcagggtgacagtagcctcagagc

SEQ ID NO: 431051 - DNA, 25 bp, Homo sapien
gccaactctgtgttcataatcctgg

SEQ ID NO: 431052 - DNA, 25 bp, Homo sapien
tagactagtctaaaaggagccccag

SEQ ID NO: 431053 - DNA, 25 bp, Homo sapien
ggatccctcaacaagcttaccgtgg

SEQ ID NO: 431054 - DNA, 25 bp, Homo sapien
gaaccctgtgctggctataagccct

SEQ ID NO: 431055 - DNA, 25 bp, Homo sapien
ccctgggctgtaggagagatcacta

SEQ ID NO: 431056 - DNA, 25 bp, Homo sapien
aaacgtgagtgtgtccagcaaccag

SEQ ID NO: 431057 - DNA, 25 bp, Homo sapien
gcaacagtcatgagttatgcatcag

SEQ ID NO: 431058 - DNA, 25 bp, Homo sapien
tgatctggactgcacttaaccatga

SEQ ID NO: 431059 - DNA, 25 bp, Homo sapien
ggcaggacacagaataccactagca

SEQ ID NO: 431060 - DNA, 25 bp, Homo sapien
tgttgcctccgctcaggatgaaaga

SEQ ID NO: 431061 - DNA, 25 bp, Homo sapien
cattgacagtcctgacgggagctca

SEQ ID NO: 431062 - DNA, 25 bp, Homo sapien
tccaagtgagagctggtgagaccac

SEQ ID NO: 431063 - DNA, 25 bp, Homo sapien
ggccccacgacagagggagtcagcc

SEQ ID NO: 431064 - DNA, 25 bp, Homo sapien
aaaattgaattgtgagctaaacgca

SEQ ID NO: 431065 - DNA, 25 bp, Homo sapien
acttgtagcccgcttccctgtgagc

SEQ ID NO: 431066 - DNA, 25 bp, Homo sapien
ccacaaacgtggacatgtaaaggag

SEQ ID NO: 431067 - DNA, 25 bp, Homo sapien
attgtgagctaaacgcatatgaggg

SEQ ID NO: 431068 - DNA, 25 bp, Homo sapien
tttgatcattgaagggacaagcctc

SEQ ID NO: 431069 - DNA, 25 bp, Homo sapien
gaaaggataagcagaagatcgcctc

SEQ ID NO: 431070 - DNA, 25 bp, Homo sapien
tgtcccggtgagatagcgaacccat

SEQ ID NO: 431071 - DNA, 25 bp, Homo sapien
gagcaaaaatgctgactgtccgttg

SEQ ID NO: 431072 - DNA, 25 bp, Homo sapien
gtgctaatgattaacgccccgtccg

SEQ ID NO: 431073 - DNA, 25 bp, Homo sapien
tgcgcacagccggacatcatttgta

SEQ ID NO: 431074 - DNA, 25 bp, Homo sapien
tctggaatcgggtgaagtccccaca

SEQ ID NO: 431075 - DNA, 25 bp, Homo sapien
cccgtttatctggagcaatggacct

SEQ ID NO: 431076 - DNA, 25 bp, Homo sapien
ttgatgacgaggacttacagggccc

SEQ ID NO: 431077 - DNA, 25 bp, Homo sapien
ggcctcccagcagtctaatgaacag

SEQ ID NO: 431078 - DNA, 25 bp, Homo sapien
accatccgctttctgggagatccga

SEQ ID NO: 431079 - DNA, 25 bp, Homo sapien
gaagtggtgtcctgatgtagatgcc

SEQ ID NO: 431080 - DNA, 25 bp, Homo sapien
ttaaaaaggaaggtacatggtcaca

SEQ ID NO: 431081 - DNA, 25 bp, Homo sapien
tcttaaaaaggaaggtacatggtca

SEQ ID NO: 431082 - DNA, 25 bp, Homo sapien
aaatgttttatacagctctcagcct

SEQ ID NO: 431083 - DNA, 25 bp, Homo sapien
tgttttatacagctctcagcctgga

SEQ ID NO: 431084 - DNA, 25 bp, Homo sapien
aatgttttatacagctctcagcctg

SEQ ID NO: 431085 - DNA, 25 bp, Homo sapien
atgttttatacagctctcagcctgg

SEQ ID NO: 431086 - DNA, 25 bp, Homo sapien
tgagggtcacacgacaccatggtgg

SEQ ID NO: 431087 - DNA, 25 bp, Homo sapien
gcaaggtgatgtcctagactagcca

SEQ ID NO: 431088 - DNA, 25 bp, Homo sapien
tctcaatagcgaatggcagacctgg

SEQ ID NO: 431089 - DNA, 25 bp, Homo sapien
gactagccaggctccgaaaggaaga

SEQ ID NO: 431090 - DNA, 25 bp, Homo sapien
agaacctgttgtacgtcgtcttggg

SEQ ID NO: 431091 - DNA, 25 bp, Homo sapien
ctttcctcatgaatccgaaaagaaa

SEQ ID NO: 431092 - DNA, 25 bp, Homo sapien
tgagactgaggtgccaataaaaaac

SEQ ID NO: 431093 - DNA, 25 bp, Homo sapien
ttctcttggtctccgcagaacctgt

SEQ ID NO: 431094 - DNA, 25 bp, Homo sapien
caggcacgccagtgcaggtcgaata

SEQ ID NO: 431095 - DNA, 25 bp, Homo sapien
cagttacatggaaccaacacggccg

SEQ ID NO: 431096 - DNA, 25 bp, Homo sapien
tggtgaacaatgagagattcctact

SEQ ID NO: 431097 - DNA, 25 bp, Homo sapien
gagaactggcgtcacagaggttcca

SEQ ID NO: 431098 - DNA, 25 bp, Homo sapien
gaggcacagtagacatcacggaggt

SEQ ID NO: 431099 - DNA, 25 bp, Homo sapien
ctcctgcgcagctggtctctggctc

SEQ ID NO: 431100 - DNA, 25 bp, Homo sapien
tggcgggtccttatcctgaggcaca

SEQ ID NO: 431101 - DNA, 25 bp, Homo sapien
tccacacacacgctgtatgggctgg

SEQ ID NO: 431102 - DNA, 25 bp, Homo sapien
cagatgtgtgaagaggcaccggctc

SEQ ID NO: 431103 - DNA, 25 bp, Homo sapien
tgcttaacagggaaagggacccaca

SEQ ID NO: 431104 - DNA, 25 bp, Homo sapien
caaatgtaacatgcacagcgctgta

SEQ ID NO: 431105 - DNA, 25 bp, Homo sapien
caagaagaggttctgagacgaggcc

SEQ ID NO: 431106 - DNA, 25 bp, Homo sapien
aacacaggcgaccatctgctctgac

SEQ ID NO: 431107 - DNA, 25 bp, Homo sapien
caccgagtacttgggacagaagaac

SEQ ID NO: 431108 - DNA, 25 bp, Homo sapien
caaacagtatggaaatgaccactgt

SEQ ID NO: 431109 - DNA, 25 bp, Homo sapien
tcagacgaggaggcaaacagtatgg

SEQ ID NO: 431110 - DNA, 25 bp, Homo sapien
tcggccgacagtgacgtgggcaggc

SEQ ID NO: 431111 - DNA, 25 bp, Homo sapien
ctctcggccgacagtgacgtgggca

SEQ ID NO: 431112 - DNA, 25 bp, Homo sapien
ccgctctcggccgacagtgacgtgg

SEQ ID NO: 431113 - DNA, 25 bp, Homo sapien
ggccgacagtgacgtgggcaggcac

SEQ ID NO: 431114 - DNA, 25 bp, Homo sapien
ggcgtgtgcgcagatccactggtca

SEQ ID NO: 431115 - DNA, 25 bp, Homo sapien
catctcgggtaacagcttttttagc

SEQ ID NO: 431116 - DNA, 25 bp, Homo sapien
ctggtcaataatcgcaacgcctccg

SEQ ID NO: 431117 - DNA, 25 bp, Homo sapien
aatcgcaacgcctccgtccttgtag

SEQ ID NO: 431118 - DNA, 25 bp, Homo sapien
tgaggctgcggatcttcctcacggc

SEQ ID NO: 431119 - DNA, 25 bp, Homo sapien
cttccagactgggtacatcctgtct

SEQ ID NO: 431120 - DNA, 25 bp, Homo sapien
agactgggtacatcctgtctgtgac

SEQ ID NO: 431121 - DNA, 25 bp, Homo sapien
ttgtccagccggtgggtcttcatga

SEQ ID NO: 431122 - DNA, 25 bp, Homo sapien
tgcagaagctgacaggcgggctcgg

SEQ ID NO: 431123 - DNA, 25 bp, Homo sapien
aaatgcagaagctgacaggcgggct

SEQ ID NO: 431124 - DNA, 25 bp, Homo sapien
aaagaaccacaaggaaatgcagaag

SEQ ID NO: 431125 - DNA, 25 bp, Homo sapien
agcaaagaaccacaaggaaatgcag

SEQ ID NO: 431126 - DNA, 25 bp, Homo sapien
caaaagtcttcaagagactgaccta

SEQ ID NO: 431127 - DNA, 25 bp, Homo sapien
cagtccaacgggagaatgccacaat

SEQ ID NO: 431128 - DNA, 25 bp, Homo sapien
tagacagcaatacaacataagtggg

SEQ ID NO: 431129 - DNA, 25 bp, Homo sapien
tagaatacagtacctcacacctcaa

SEQ ID NO: 431130 - DNA, 25 bp, Homo sapien
aaggggatcctgtctgcgtcgtccg

SEQ ID NO: 431131 - DNA, 25 bp, Homo sapien
tctgcgtcgtccgtggagttgagat

SEQ ID NO: 431132 - DNA, 25 bp, Homo sapien
gatcctgtctgcgtcgtccgtggag

SEQ ID NO: 431133 - DNA, 25 bp, Homo sapien
cccgcaggtgcctggcaaacaccat

SEQ ID NO: 431134 - DNA, 25 bp, Homo sapien
tagcttaggcggttagcacatcctg

SEQ ID NO: 431135 - DNA, 25 bp, Homo sapien
ccatccacggtggaggctcttggag

SEQ ID NO: 431136 - DNA, 25 bp, Homo sapien
atccacggtcgcctgagaagcagcg

SEQ ID NO: 431137 - DNA, 25 bp, Homo sapien
cccctggctggcacaactgtgtgca

SEQ ID NO: 431138 - DNA, 25 bp, Homo sapien
cctggtgaacacgtcagcaggcctg

SEQ ID NO: 431139 - DNA, 25 bp, Homo sapien
aggttccggctttacaagctgctgc

SEQ ID NO: 431140 - DNA, 25 bp, Homo sapien
ctcctgcaggcaggttccggcttta

SEQ ID NO: 431141 - DNA, 25 bp, Homo sapien
tgcacaaagtcccacgtgagcaggg

SEQ ID NO: 431142 - DNA, 25 bp, Homo sapien
gggcagccacttcccgccctctgct

SEQ ID NO: 431143 - DNA, 25 bp, Homo sapien
gggggcagccacttcccgccctctg

SEQ ID NO: 431144 - DNA, 25 bp, Homo sapien
ctgtgtccacgggagggggcagcca

SEQ ID NO: 431145 - DNA, 25 bp, Homo sapien
gagggggcagccacttcccgccctc

SEQ ID NO: 431146 - DNA, 25 bp, Homo sapien
caacggaaaagacccgctgcagaga

SEQ ID NO: 431147 - DNA, 25 bp, Homo sapien
tcaatgcggaaatcaacgccaacgg

SEQ ID NO: 431148 - DNA, 25 bp, Homo sapien
cgctgcagagaatagtcccaccttt

SEQ ID NO: 431149 - DNA, 25 bp, Homo sapien
ggtggctatgggaagtcaccccatc

SEQ ID NO: 431150 - DNA, 25 bp, Homo sapien
gagctgtcgactgttttaaattttc

SEQ ID NO: 431151 - DNA, 25 bp, Homo sapien
taaataatgggcaacatacactaac

SEQ ID NO: 431152 - DNA, 25 bp, Homo sapien
tgagaaaaacgctcccgaggaaaca

SEQ ID NO: 431153 - DNA, 25 bp, Homo sapien
ttaatcagcaaggttcaaaaagagc

SEQ ID NO: 431154 - DNA, 25 bp, Homo sapien
tctcggctctgtctaacatcacgga

SEQ ID NO: 431155 - DNA, 25 bp, Homo sapien
ctttccctccatagtggtcgtgaag

SEQ ID NO: 431156 - DNA, 25 bp, Homo sapien
tccctccatagtggtcgtgaagtag

SEQ ID NO: 431157 - DNA, 25 bp, Homo sapien
gtcgtgaagtaggttctcggctctg

SEQ ID NO: 431158 - DNA, 25 bp, Homo sapien
tcaggaccatctagttggaagcccc

SEQ ID NO: 431159 - DNA, 25 bp, Homo sapien
gagtttcgtctcctgtatcccagag

SEQ ID NO: 431160 - DNA, 25 bp, Homo sapien
tggtttcccgagcatgacagcaatg

SEQ ID NO: 431161 - DNA, 25 bp, Homo sapien
gaagaaagctttctgccccacggtg

SEQ ID NO: 431162 - DNA, 25 bp, Homo sapien
gcaggggcgccacgatggaggctga

SEQ ID NO: 431163 - DNA, 25 bp, Homo sapien
cagcaggggcgccacgatggaggct

SEQ ID NO: 431164 - DNA, 25 bp, Homo sapien
cgggctgatgtgtttctcagcagca

SEQ ID NO: 431165 - DNA, 25 bp, Homo sapien
ggggcgccacgatggaggctgagcc

SEQ ID NO: 431166 - DNA, 25 bp, Homo sapien
tggtctcctcataaccccaaaacca

SEQ ID NO: 431167 - DNA, 25 bp, Homo sapien
ggacagacaggagacgtttagaccc

SEQ ID NO: 431168 - DNA, 25 bp, Homo sapien
gtttagacccctggtctcctcataa

SEQ ID NO: 431169 - DNA, 25 bp, Homo sapien
caggagacgtttagacccctggtct

SEQ ID NO: 431170 - DNA, 25 bp, Homo sapien
cagagcctttaatggcaatcgacac

SEQ ID NO: 431171 - DNA, 25 bp, Homo sapien
ccacaggaggcctggtagtgtcaga

SEQ ID NO: 431172 - DNA, 25 bp, Homo sapien
atggcaatcgacacttgggactgac

SEQ ID NO: 431173 - DNA, 25 bp, Homo sapien
acagcttttccacaggaggcctggt

SEQ ID NO: 431174 - DNA, 25 bp, Homo sapien
gcagggggagcagcctcagcaggca

SEQ ID NO: 431175 - DNA, 25 bp, Homo sapien
ctgcggcagggggagcagcctcagc

SEQ ID NO: 431176 - DNA, 25 bp, Homo sapien
cagggggagcagcctcagcaggcac

SEQ ID NO: 431177 - DNA, 25 bp, Homo sapien
cggcagggggagcagcctcagcagg

SEQ ID NO: 431178 - DNA, 25 bp, Homo sapien
agctgatcaatacacggccgctcgt

SEQ ID NO: 431179 - DNA, 25 bp, Homo sapien
cacccctctgcgtaactttgcagga

SEQ ID NO: 431180 - DNA, 25 bp, Homo sapien
agtacaggagctgatcaatacacgg

SEQ ID NO: 431181 - DNA, 25 bp, Homo sapien
tgcaggacgtaaacctggtcaataa

SEQ ID NO: 431182 - DNA, 25 bp, Homo sapien
cagcaggaataaagcgggagggagc

SEQ ID NO: 431183 - DNA, 25 bp, Homo sapien
caagaggtcagcaattaagatctgc

SEQ ID NO: 431184 - DNA, 25 bp, Homo sapien
gacccgcaccaagaaggtggcactg

SEQ ID NO: 431185 - DNA, 25 bp, Homo sapien
aaggtggcactgtgacgcccaagag

SEQ ID NO: 431186 - DNA, 25 bp, Homo sapien
gagccgagtcctgtcactataacac

SEQ ID NO: 431187 - DNA, 25 bp, Homo sapien
taaaacagcctttcgcacagggagc

SEQ ID NO: 431188 - DNA, 25 bp, Homo sapien
gcagtgcgtcttcctgaacgtaaaa

SEQ ID NO: 431189 - DNA, 25 bp, Homo sapien
gaagcatactccacacgcagtgcgt

SEQ ID NO: 431190 - DNA, 25 bp, Homo sapien
gactctgccagtgatagaggcggcc

SEQ ID NO: 431191 - DNA, 25 bp, Homo sapien
cttcaggagagaggcgattcggata

SEQ ID NO: 431192 - DNA, 25 bp, Homo sapien
gattcggatatagacatccctgcgc

SEQ ID NO: 431193 - DNA, 25 bp, Homo sapien
gaagatcaaaaaactcagaccaggg

SEQ ID NO: 431194 - DNA, 25 bp, Homo sapien
gaagccgcccccgacagaatatcgg

SEQ ID NO: 431195 - DNA, 25 bp, Homo sapien
cccgacagaatatcggccgccgatt

SEQ ID NO: 431196 - DNA, 25 bp, Homo sapien
atatcggccgccgattgtccgggcc

SEQ ID NO: 431197 - DNA, 25 bp, Homo sapien
gccgccgattgtccgggccagaact

SEQ ID NO: 431198 - DNA, 25 bp, Homo sapien
gcagcaggaagacgaagctgagtgt

SEQ ID NO: 431199 - DNA, 25 bp, Homo sapien
gaagccggaggccaggacactgccc

SEQ ID NO: 431200 - DNA, 25 bp, Homo sapien
aggcagaagccggaggccaggacac

SEQ ID NO: 431201 - DNA, 25 bp, Homo sapien
ggaagacgaagctgagtgtcgccat

SEQ ID NO: 431202 - DNA, 25 bp, Homo sapien
gaggttccattgcagacccggaggc

SEQ ID NO: 431203 - DNA, 25 bp, Homo sapien
ttccattgcagacccggaggccgtg

SEQ ID NO: 431204 - DNA, 25 bp, Homo sapien
cgtggctgtggttcgcggcggtgct

SEQ ID NO: 431205 - DNA, 25 bp, Homo sapien
aggccgtggctgtggttcgcggcgg

SEQ ID NO: 431206 - DNA, 25 bp, Homo sapien
aatactgtaaccctgatagggttat

SEQ ID NO: 431207 - DNA, 25 bp, Homo sapien
taagaggatagacaggcaggtcatg

SEQ ID NO: 431208 - DNA, 25 bp, Homo sapien
gtcagagtggagtcccgagctccca

SEQ ID NO: 431209 - DNA, 25 bp, Homo sapien
aatcaaggcaggttgccgtgggtaa

SEQ ID NO: 431210 - DNA, 25 bp, Homo sapien
cagcggctgcacataggggaggcac

SEQ ID NO: 431211 - DNA, 25 bp, Homo sapien
ccagcggctgcacataggggaggca

SEQ ID NO: 431212 - DNA, 25 bp, Homo sapien
cctggacacatcccagcggctgcac

SEQ ID NO: 431213 - DNA, 25 bp, Homo sapien
agcggctgcacataggggaggcaca

SEQ ID NO: 431214 - DNA, 25 bp, Homo sapien
cactcggtggctcggaaatcattaa

SEQ ID NO: 431215 - DNA, 25 bp, Homo sapien
gaaagcaccacatctcagggaatga

SEQ ID NO: 431216 - DNA, 25 bp, Homo sapien
gcaaggcctgcggttgaagcgtccc

SEQ ID NO: 431217 - DNA, 25 bp, Homo sapien
ctgtaaaagggactggccggcttgt

SEQ ID NO: 431218 - DNA, 25 bp, Homo sapien
tggggccgctgtcggaggaaggctc

SEQ ID NO: 431219 - DNA, 25 bp, Homo sapien
caaacatccgctctctgcggggccg

SEQ ID NO: 431220 - DNA, 25 bp, Homo sapien
ctgcggggccgcctctccgtggcct

SEQ ID NO: 431221 - DNA, 25 bp, Homo sapien
ccgctgtcggaggaaggctctccag

SEQ ID NO: 431222 - DNA, 25 bp, Homo sapien
aacgtggggggcgagcaggggtcat

SEQ ID NO: 431223 - DNA, 25 bp, Homo sapien
ctgggaaacgtggggggcgagcagg

SEQ ID NO: 431224 - DNA, 25 bp, Homo sapien
tcatgtgcttcactgaacccggctg

SEQ ID NO: 431225 - DNA, 25 bp, Homo sapien
aacccggctgcttatttatgttcgg

SEQ ID NO: 431226 - DNA, 25 bp, Homo sapien
gactgtgagaatctgtcccgcagga

SEQ ID NO: 431227 - DNA, 25 bp, Homo sapien
cagaggtgaagcctgcgtcatgtgc

SEQ ID NO: 431228 - DNA, 25 bp, Homo sapien
cacagcagtcctgcgggagttttaa

SEQ ID NO: 431229 - DNA, 25 bp, Homo sapien
gttcagaagcattcctcagcgggtc

SEQ ID NO: 431230 - DNA, 25 bp, Homo sapien
taactgtgacagctttacagcaggc

SEQ ID NO: 431231 - DNA, 25 bp, Homo sapien
gtttagaagcagtgtcaagacccac

SEQ ID NO: 431232 - DNA, 25 bp, Homo sapien
gatgataacgtgctcctgccggagc

SEQ ID NO: 431233 - DNA, 25 bp, Homo sapien
gtcctctgcggatgataacgtgctc

SEQ ID NO: 431234 - DNA, 25 bp, Homo sapien
cacgtttcggcgtctgtcctctgcg

SEQ ID NO: 431235 - DNA, 25 bp, Homo sapien
cccgttgggctgtcatcataccctg

SEQ ID NO: 431236 - DNA, 25 bp, Homo sapien
ggctttgaggatcaatcacctggtt

SEQ ID NO: 431237 - DNA, 25 bp, Homo sapien
gccgcgccacaggtgagcggaacac

SEQ ID NO: 431238 - DNA, 25 bp, Homo sapien
cacaggtgagcggaacacggttcga

SEQ ID NO: 431239 - DNA, 25 bp, Homo sapien
cccgtggttgcaggtaccagagctt

SEQ ID NO: 431240 - DNA, 25 bp, Homo sapien
ctgcagatgtagaagtatgtaaagt

SEQ ID NO: 431241 - DNA, 25 bp, Homo sapien
tgcagatgtagaagtatgtaaagta

SEQ ID NO: 431242 - DNA, 25 bp, Homo sapien
aaggctccttgcaccaccgtgtgag

SEQ ID NO: 431243 - DNA, 25 bp, Homo sapien
ttgcaccaccgtgtgagccacatac

SEQ ID NO: 431244 - DNA, 25 bp, Homo sapien
tccagaaggtgaagtctgcgcccag

SEQ ID NO: 431245 - DNA, 25 bp, Homo sapien
agaaggtgaagtctgcgcccaggac

SEQ ID NO: 431246 - DNA, 25 bp, Homo sapien
aaggtccagaaggtgaagtctgcgc

SEQ ID NO: 431247 - DNA, 25 bp, Homo sapien
tttccggataggagaaggtccagaa

SEQ ID NO: 431248 - DNA, 25 bp, Homo sapien
agaggtgagaggtgagggtcaagca

SEQ ID NO: 431249 - DNA, 25 bp, Homo sapien
ggtgagaggtgagggtcaagcattc

SEQ ID NO: 431250 - DNA, 25 bp, Homo sapien
ctgcagaggtgagaggtgagaggtg

SEQ ID NO: 431251 - DNA, 25 bp, Homo sapien
tgcagaggtgagaggtgagaggtga

SEQ ID NO: 431252 - DNA, 25 bp, Homo sapien
tcacgaagcctcgaagtgctgcctg

SEQ ID NO: 431253 - DNA, 25 bp, Homo sapien
tcacaccgtggagcgtggataggcc

SEQ ID NO: 431254 - DNA, 25 bp, Homo sapien
attgttccccagagcacgcgggagg

SEQ ID NO: 431255 - DNA, 25 bp, Homo sapien
ggaacccctcagcttccgtgtggag

SEQ ID NO: 431256 - DNA, 25 bp, Homo sapien
ctctgtctggtgtctgacgtgggaa

SEQ ID NO: 431257 - DNA, 25 bp, Homo sapien
cgtgttctgtgaagatgccgcagct

SEQ ID NO: 431258 - DNA, 25 bp, Homo sapien
atccgaagggacatgccacctggaa

SEQ ID NO: 431259 - DNA, 25 bp, Homo sapien
tcgagccatgtcttggtgcgtgtcg

SEQ ID NO: 431260 - DNA, 25 bp, Homo sapien
cagcagcggccggaccatggagctg

SEQ ID NO: 431261 - DNA, 25 bp, Homo sapien
ggccggaccatggagctgagcatca

SEQ ID NO: 431262 - DNA, 25 bp, Homo sapien
caccagcagcggccggaccatggag

SEQ ID NO: 431263 - DNA, 25 bp, Homo sapien
agcggccggaccatggagctgagca

SEQ ID NO: 431264 - DNA, 25 bp, Homo sapien
caccgtcaagggtaggattagagcc

SEQ ID NO: 431265 - DNA, 25 bp, Homo sapien
tctcagcctgggagcgatggcactg

SEQ ID NO: 431266 - DNA, 25 bp, Homo sapien
tcacaggtaccttcttacagcagca

SEQ ID NO: 431267 - DNA, 25 bp, Homo sapien
ttatgagtcacccagtcacaggtac

SEQ ID NO: 431268 - DNA, 25 bp, Homo sapien
ccagccactagcgtggaacttgcac

SEQ ID NO: 431269 - DNA, 25 bp, Homo sapien
gcaccagccactagcgtggaacttg

SEQ ID NO: 431270 - DNA, 25 bp, Homo sapien
tagcgtggaacttgcactgcagctt

SEQ ID NO: 431271 - DNA, 25 bp, Homo sapien
cactagcgtggaacttgcactgcag

SEQ ID NO: 431272 - DNA, 25 bp, Homo sapien
tggcaatgccgagagatgctgtgct

SEQ ID NO: 431273 - DNA, 25 bp, Homo sapien
tggaggagctcggccacttgtgaag

SEQ ID NO: 431274 - DNA, 25 bp, Homo sapien
ccttcctgcagggtcgtggaggagc

SEQ ID NO: 431275 - DNA, 25 bp, Homo sapien
cagacagctgattggcaatgccgag

SEQ ID NO: 431276 - DNA, 25 bp, Homo sapien
gaaatgttttatgaccgcatggcag

SEQ ID NO: 431277 - DNA, 25 bp, Homo sapien
taaacggcattctgtgagcccagag

SEQ ID NO: 431278 - DNA, 25 bp, Homo sapien
gcccgtcggaagacaaagcctggag

SEQ ID NO: 431279 - DNA, 25 bp, Homo sapien
ggagcatgtgtcacaaccccaggag

SEQ ID NO: 431280 - DNA, 25 bp, Homo sapien
cacacaaggcgatgtctgccgattc

SEQ ID NO: 431281 - DNA, 25 bp, Homo sapien
gtcacacaaggcgatgtctgccgat

SEQ ID NO: 431282 - DNA, 25 bp, Homo sapien
tgtgtcacacaaggcgatgtctgcc

SEQ ID NO: 431283 - DNA, 25 bp, Homo sapien
catctgtgtcacacaaggcgatgtc

SEQ ID NO: 431284 - DNA, 25 bp, Homo sapien
atagcgcccgattcccatcccggtg

SEQ ID NO: 431285 - DNA, 25 bp, Homo sapien
tcacatcccagagagtcggtgccag

SEQ ID NO: 431286 - DNA, 25 bp, Homo sapien
gcaccagcttaacttggatccccag

SEQ ID NO: 431287 - DNA, 25 bp, Homo sapien
tgcttcgggctcactcacatcccag

SEQ ID NO: 431288 - DNA, 25 bp, Homo sapien
gtgcttgcgcgtacccaggtcctca

SEQ ID NO: 431289 - DNA, 25 bp, Homo sapien
acaggcttgtgtgcttgcgcgtacc

SEQ ID NO: 431290 - DNA, 25 bp, Homo sapien
ccatcattgtcctggcattgccaca

SEQ ID NO: 431291 - DNA, 25 bp, Homo sapien
gcttgtgtgcttgcgcgtacccagg

SEQ ID NO: 431292 - DNA, 25 bp, Homo sapien
tcagtggacccttttgcaaatgtct

SEQ ID NO: 431293 - DNA, 25 bp, Homo sapien
gacctcagccttgagcaatcccgag

SEQ ID NO: 431294 - DNA, 25 bp, Homo sapien
gcaaatgtcttcacaggctcccggg

SEQ ID NO: 431295 - DNA, 25 bp, Homo sapien
gcagcccagcccgtgctgttttcag

SEQ ID NO: 431296 - DNA, 25 bp, Homo sapien
gtggcgggtgcccctgtcttcctgt

SEQ ID NO: 431297 - DNA, 25 bp, Homo sapien
ggagagcattgacagacttgggcca

SEQ ID NO: 431298 - DNA, 25 bp, Homo sapien
ctggagagcattgacagacttgggc

SEQ ID NO: 431299 - DNA, 25 bp, Homo sapien
cctctccgtggcgggtgcccctgtc

SEQ ID NO: 431300 - DNA, 25 bp, Homo sapien
ggcccacagtttccacgacacctct

SEQ ID NO: 431301 - DNA, 25 bp, Homo sapien
ctgctgcctcaagtggcccacagtt

SEQ ID NO: 431302 - DNA, 25 bp, Homo sapien
ctgcctcaagtggcccacagtttcc

SEQ ID NO: 431303 - DNA, 25 bp, Homo sapien
gcccacagtttccacgacacctctc

SEQ ID NO: 431304 - DNA, 25 bp, Homo sapien
tggctcaccctggagttttatccct

SEQ ID NO: 431305 - DNA, 25 bp, Homo sapien
catgtgtgtggtgttgtcaacagcc

SEQ ID NO: 431306 - DNA, 25 bp, Homo sapien
tagcacagggtcttgtgacggtgct

SEQ ID NO: 431307 - DNA, 25 bp, Homo sapien
tatccctcctggtaataatttcatg

SEQ ID NO: 431308 - DNA, 25 bp, Homo sapien
acgggagtcgcagcgcaagcttgca

SEQ ID NO: 431309 - DNA, 25 bp, Homo sapien
tgggagtgttaaggcaatacaggtc

SEQ ID NO: 431310 - DNA, 25 bp, Homo sapien
catactggcccgcatgtcttcggac

SEQ ID NO: 431311 - DNA, 25 bp, Homo sapien
gtcattgctgggagtgttaaggcaa

SEQ ID NO: 431312 - DNA, 25 bp, Homo sapien
ttgctcgtgtcagcacaaacgcagc

SEQ ID NO: 431313 - DNA, 25 bp, Homo sapien
agatttcccaacacaagcacggcag

SEQ ID NO: 431314 - DNA, 25 bp, Homo sapien
cagcaggcgcgtgctttcattagac

SEQ ID NO: 431315 - DNA, 25 bp, Homo sapien
ttcattagactttccctcctgtggg

SEQ ID NO: 431316 - DNA, 25 bp, Homo sapien
tccagctcgtcgttggtcaatggga

SEQ ID NO: 431317 - DNA, 25 bp, Homo sapien
gctcgtcgttggtcaatgggatgaa

SEQ ID NO: 431318 - DNA, 25 bp, Homo sapien
tcgttggtcaatgggatgaagtttg

SEQ ID NO: 431319 - DNA, 25 bp, Homo sapien
ctgtgttcgcggaaacatccatctg

SEQ ID NO: 431320 - DNA, 25 bp, Homo sapien
gctctacccagagcaaactaaagct

SEQ ID NO: 431321 - DNA, 25 bp, Homo sapien
gatgagacaagttgggctctaccca

SEQ ID NO: 431322 - DNA, 25 bp, Homo sapien
acaagttgggctctacccagagcaa

SEQ ID NO: 431323 - DNA, 25 bp, Homo sapien
gtggatgagacaagttgggctctac

SEQ ID NO: 431324 - DNA, 25 bp, Homo sapien
gcccagcatagcacagacactatgt

SEQ ID NO: 431325 - DNA, 25 bp, Homo sapien
tgatgggatccgaagatcaccgttt

SEQ ID NO: 431326 - DNA, 25 bp, Homo sapien
gatcaccgttttgcaaaccttcagg

SEQ ID NO: 431327 - DNA, 25 bp, Homo sapien
taaacgcagaaggagtgatgggatc

SEQ ID NO: 431328 - DNA, 25 bp, Homo sapien
gtgagccactgccacgagagggtct

SEQ ID NO: 431329 - DNA, 25 bp, Homo sapien
gcctcgttcactgggcttgagtcga

SEQ ID NO: 431330 - DNA, 25 bp, Homo sapien
ccagctgcctcgttcactgggcttg

SEQ ID NO: 431331 - DNA, 25 bp, Homo sapien
tcactgggcttgagtcgacaagaac

SEQ ID NO: 431332 - DNA, 25 bp, Homo sapien
gtcccagcgccgaccgcgagtctgt

SEQ ID NO: 431333 - DNA, 25 bp, Homo sapien
cacttgtccaccgacagcgtggcct

SEQ ID NO: 431334 - DNA, 25 bp, Homo sapien
acttgtccaccgacagcgtggcctg

SEQ ID NO: 431335 - DNA, 25 bp, Homo sapien
ccacttgtccaccgacagcgtggcc

SEQ ID NO: 431336 - DNA, 25 bp, Homo sapien
gcatccctagtttcccctctggctc

SEQ ID NO: 431337 - DNA, 25 bp, Homo sapien
tggggatgtgttcatcctcagctct

SEQ ID NO: 431338 - DNA, 25 bp, Homo sapien
gtgtggggatgtgttcatcctcagc

SEQ ID NO: 431339 - DNA, 25 bp, Homo sapien
tggaacagggaggcatccctagttt

SEQ ID NO: 431340 - DNA, 25 bp, Homo sapien
ggcagccctggccattggtcagccc

SEQ ID NO: 431341 - DNA, 25 bp, Homo sapien
agccctggccattggtcagccctgc

SEQ ID NO: 431342 - DNA, 25 bp, Homo sapien
cagccctggccattggtcagccctg

SEQ ID NO: 431343 - DNA, 25 bp, Homo sapien
gcagccctggccattggtcagccct

SEQ ID NO: 431344 - DNA, 25 bp, Homo sapien
gtggccacgtgtccgcgatcgcaat

SEQ ID NO: 431345 - DNA, 25 bp, Homo sapien
cgaagcggttccactgtcaaacacg

SEQ ID NO: 431346 - DNA, 25 bp, Homo sapien
tcaaacacgccgagccggcgcgttt

SEQ ID NO: 431347 - DNA, 25 bp, Homo sapien
aatcagcgaggctccgactccagga

SEQ ID NO: 431348 - DNA, 25 bp, Homo sapien
tgtgaagcgaaaagcagccctgatc

SEQ ID NO: 431349 - DNA, 25 bp, Homo sapien
gctgcacaaatgctgcccgatgggt

SEQ ID NO: 431350 - DNA, 25 bp, Homo sapien
tttcgtacacggcagcactgggata

SEQ ID NO: 431351 - DNA, 25 bp, Homo sapien
aaacgaggcccaatatgtgaagcga

SEQ ID NO: 431352 - DNA, 25 bp, Homo sapien
gacaccacagtgtccctcgaacatg

SEQ ID NO: 431353 - DNA, 25 bp, Homo sapien
ctttcacgagcgaccgctgagctgt

SEQ ID NO: 431354 - DNA, 25 bp, Homo sapien
tcacgaccaaaggaagcagtgccgg

SEQ ID NO: 431355 - DNA, 25 bp, Homo sapien
gtatccaaaaggaagtggccgcagt

SEQ ID NO: 431356 - DNA, 25 bp, Homo sapien
tcaccgggccatagtgagcggccaa

SEQ ID NO: 431357 - DNA, 25 bp, Homo sapien
atagtgagccgccaagccagtgtca

SEQ ID NO: 431358 - DNA, 25 bp, Homo sapien
agccggccgcaccagaaggatttct

SEQ ID NO: 431359 - DNA, 25 bp, Homo sapien
gaggagcacacggtttacaccaggc

SEQ ID NO: 431360 - DNA, 25 bp, Homo sapien
gggtccttggggttcagactcagac

SEQ ID NO: 431361 - DNA, 25 bp, Homo sapien
gcagtggctgtagcatgcgtcctca

SEQ ID NO: 431362 - DNA, 25 bp, Homo sapien
cctgtttctaggagacggagcttaa

SEQ ID NO: 431363 - DNA, 25 bp, Homo sapien
cctgacgtgatgtcgtgaaagggca

SEQ ID NO: 431364 - DNA, 25 bp, Homo sapien
caggttatgaaaggccaggacacac

SEQ ID NO: 431365 - DNA, 25 bp, Homo sapien
ttgttcatggtggttccagtgcctg

SEQ ID NO: 431366 - DNA, 25 bp, Homo sapien
tcagtagctgcagacttgttcatgg

SEQ ID NO: 431367 - DNA, 25 bp, Homo sapien
cagtgcctgaacagggagcacagga

SEQ ID NO: 431368 - DNA, 25 bp, Homo sapien
gcagacttgttcatggtggttccag

SEQ ID NO: 431369 - DNA, 25 bp, Homo sapien
gactgcacgggagaaaattccagcc

SEQ ID NO: 431370 - DNA, 25 bp, Homo sapien
tatacaaagggcttcgcacactgag

SEQ ID NO: 431371 - DNA, 25 bp, Homo sapien
ccagccccaggctctttgtgattct

SEQ ID NO: 431372 - DNA, 25 bp, Homo sapien
tctctgacatgtgttggagccaata

SEQ ID NO: 431373 - DNA, 25 bp, Homo sapien
ctctgccttgattctggcatctgct

SEQ ID NO: 431374 - DNA, 25 bp, Homo sapien
aggagccacattcacagccttggac

SEQ ID NO: 431375 - DNA, 25 bp, Homo sapien
gccacattcacagccttggacatcc

SEQ ID NO: 431376 - DNA, 25 bp, Homo sapien
acattcacagccttggacatccatc

SEQ ID NO: 431377 - DNA, 25 bp, Homo sapien
ccgtgatgaccacgtcctcgcagag

SEQ ID NO: 431378 - DNA, 25 bp, Homo sapien
tccgtgatgaccacgtcctcgcaga

SEQ ID NO: 431379 - DNA, 25 bp, Homo sapien
gtccgtgatgaccacgtcctcgcag

SEQ ID NO: 431380 - DNA, 25 bp, Homo sapien
agtaggtttgtaaccgcatctgagg

SEQ ID NO: 431381 - DNA, 25 bp, Homo sapien
gccactcgtggcttgataaagaaga

SEQ ID NO: 431382 - DNA, 25 bp, Homo sapien
gtaaccgcatctgaggccactcgtg

SEQ ID NO: 431383 - DNA, 25 bp, Homo sapien
gggttggcgtcatagaccgtctcca

SEQ ID NO: 431384 - DNA, 25 bp, Homo sapien
tggaacctcgaggaacctcaacctc

SEQ ID NO: 431385 - DNA, 25 bp, Homo sapien
ctaggttgcagctccattacgtgct

SEQ ID NO: 431386 - DNA, 25 bp, Homo sapien
cttgtttctaggttgcagctccatt

SEQ ID NO: 431387 - DNA, 25 bp, Homo sapien
tttactggaacctcgaggaacctca

SEQ ID NO: 431388 - DNA, 25 bp, Homo sapien
tgcagctcgctctcggatcctaata

SEQ ID NO: 431389 - DNA, 25 bp, Homo sapien
gcagctcgctctcggatcctaataa

SEQ ID NO: 431390 - DNA, 25 bp, Homo sapien
ccctgagtgagtcaaggctgaaggc

SEQ ID NO: 431391 - DNA, 25 bp, Homo sapien
cgtgccctgagtgagtcaaggctga

SEQ ID NO: 431392 - DNA, 25 bp, Homo sapien
tgctgcccggggatctctgcgccga

SEQ ID NO: 431393 - DNA, 25 bp, Homo sapien
atctctgcgccgacttgcagcagca

SEQ ID NO: 431394 - DNA, 25 bp, Homo sapien
cagggcattgctcccggcacgaggc

SEQ ID NO: 431395 - DNA, 25 bp, Homo sapien
ctcccggcacgaggccgcccgcctg

SEQ ID NO: 431396 - DNA, 25 bp, Homo sapien
cattgctcccggcacgaggccgccc

SEQ ID NO: 431397 - DNA, 25 bp, Homo sapien
ttgctcccggcacgaggccgcccgc

SEQ ID NO: 431398 - DNA, 25 bp, Homo sapien
cagagggcacagagcctccaggacc

SEQ ID NO: 431399 - DNA, 25 bp, Homo sapien
tgccatgagtttcgcgcacacgagg

SEQ ID NO: 431400 - DNA, 25 bp, Homo sapien
gtttcagagaaagccgtcaagccag

SEQ ID NO: 431401 - DNA, 25 bp, Homo sapien
gaaggactccaggtttgaaggcaga

SEQ ID NO: 431402 - DNA, 25 bp, Homo sapien
ggtccaggcataggagatgagccct

SEQ ID NO: 431403 - DNA, 25 bp, Homo sapien
gtgcctgtcccgcgcaggtgcccct

SEQ ID NO: 431404 - DNA, 25 bp, Homo sapien
ccgtgcctgtcccgcgcaggtgccc

SEQ ID NO: 431405 - DNA, 25 bp, Homo sapien
gcctgtcccgcgcaggtgcccctgg

SEQ ID NO: 431406 - DNA, 25 bp, Homo sapien
tgcctgtcccgcgcaggtgcccctg

SEQ ID NO: 431407 - DNA, 25 bp, Homo sapien
aaacttgtttttcagggcactcctg

SEQ ID NO: 431408 - DNA, 25 bp, Homo sapien
tcagcaaaacttgtttttcagggca

SEQ ID NO: 431409 - DNA, 25 bp, Homo sapien
cttgtttttcagggcactcctgttt

SEQ ID NO: 431410 - DNA, 25 bp, Homo sapien
tgtttttcagggcactcctgttttc

SEQ ID NO: 431411 - DNA, 25 bp, Homo sapien
gggatcctgtggtatgatcaacagc

SEQ ID NO: 431412 - DNA, 25 bp, Homo sapien
tggtatgatcaacagcaccaccgcc

SEQ ID NO: 431413 - DNA, 25 bp, Homo sapien
tcctgtggtatgatcaacagcacca

SEQ ID NO: 431414 - DNA, 25 bp, Homo sapien
caggggatcctgtggtatgatcaac

SEQ ID NO: 431415 - DNA, 25 bp, Homo sapien
tagatggcgagtttgggcctctgca

SEQ ID NO: 431416 - DNA, 25 bp, Homo sapien
ctggcggtaacgttttagatggcga

SEQ ID NO: 431417 - DNA, 25 bp, Homo sapien
ttttagatggcgagtttgggcctct

SEQ ID NO: 431418 - DNA, 25 bp, Homo sapien
cctggcggtaacgttttagatggcg

SEQ ID NO: 431419 - DNA, 25 bp, Homo sapien
gccagcaggcttgcgagtgggcaca

SEQ ID NO: 431420 - DNA, 25 bp, Homo sapien
cagcaggcttgcgagtgggcacacg

SEQ ID NO: 431421 - DNA, 25 bp, Homo sapien
gtcaagggctgaccctgcggggacc

SEQ ID NO: 431422 - DNA, 25 bp, Homo sapien
aggcttgcgagtgggcacacgctgg

SEQ ID NO: 431423 - DNA, 25 bp, Homo sapien
tgcagacaaggctcggaccctgcgg

SEQ ID NO: 431424 - DNA, 25 bp, Homo sapien
ctgcggccgactctgccccaggcct

SEQ ID NO: 431425 - DNA, 25 bp, Homo sapien
gcctcctgcagacaaggctcggacc

SEQ ID NO: 431426 - DNA, 25 bp, Homo sapien
gacaaggctcggaccctgcggccga

SEQ ID NO: 431427 - DNA, 25 bp, Homo sapien
cagcgctgcctggaataaaaagtaa

SEQ ID NO: 431428 - DNA, 25 bp, Homo sapien
agataaataccaggaccagaccggc

SEQ ID NO: 431429 - DNA, 25 bp, Homo sapien
tactgactccacattacggccgtgt

SEQ ID NO: 431430 - DNA, 25 bp, Homo sapien
gacgcaggtagctttgactcaaaac

SEQ ID NO: 431431 - DNA, 25 bp, Homo sapien
caggctcctcaaggacagacggaca

SEQ ID NO: 431432 - DNA, 25 bp, Homo sapien
gagccactgcgaggacactgtgatc

SEQ ID NO: 431433 - DNA, 25 bp, Homo sapien
cagctcatgacaccggacaatttgg

SEQ ID NO: 431434 - DNA, 25 bp, Homo sapien
tgatctcagagctgcgtcatcgctg

SEQ ID NO: 431435 - DNA, 25 bp, Homo sapien
acagccctggcgtctcaggagcgga

SEQ ID NO: 431436 - DNA, 25 bp, Homo sapien
ccatcctggcttgtcatgctgttaa

SEQ ID NO: 431437 - DNA, 25 bp, Homo sapien
cagagtccgcccgtgtggaagtgtt

SEQ ID NO: 431438 - DNA, 25 bp, Homo sapien
acaccgcgtttctggctgtgcaagg

SEQ ID NO: 431439 - DNA, 25 bp, Homo sapien
ttgcaggacagaatagatggcagaa

SEQ ID NO: 431440 - DNA, 25 bp, Homo sapien
aggctccaggatagagttgcaggac

SEQ ID NO: 431441 - DNA, 25 bp, Homo sapien
tagagttgcaggacagaatagatgg

SEQ ID NO: 431442 - DNA, 25 bp, Homo sapien
tccaggatagagttgcaggacagaa

SEQ ID NO: 431443 - DNA, 25 bp, Homo sapien
ctcgcgccgtgccaggacccgggca

SEQ ID NO: 431444 - DNA, 25 bp, Homo sapien
gctctcccagccgtcggttggtgaa

SEQ ID NO: 431445 - DNA, 25 bp, Homo sapien
tctcccagccgtcggttggtgaaaa

SEQ ID NO: 431446 - DNA, 25 bp, Homo sapien
ctgtgagtcgccgtcctgtgcgggt

SEQ ID NO: 431447 - DNA, 25 bp, Homo sapien
gagtcgccgtcctgtgcgggtctca

SEQ ID NO: 431448 - DNA, 25 bp, Homo sapien
ccgtggttctgagttggagccctta

SEQ ID NO: 431449 - DNA, 25 bp, Homo sapien
ggagcccttactggccagtttaaga

SEQ ID NO: 431450 - DNA, 25 bp, Homo sapien
cagtttaagaccctcttggagcagg

SEQ ID NO: 431451 - DNA, 25 bp, Homo sapien
agttccgtcctgcagactccgtggt

SEQ ID NO: 431452 - DNA, 25 bp, Homo sapien
tttgatgtgtttccactgagggtcc

SEQ ID NO: 431453 - DNA, 25 bp, Homo sapien
aggtttctcagatgccccgggctcg

SEQ ID NO: 431454 - DNA, 25 bp, Homo sapien
gatctctcgcacctgaaaatttcct

SEQ ID NO: 431455 - DNA, 25 bp, Homo sapien
gtagccattcgcaggaggtttctca

SEQ ID NO: 431456 - DNA, 25 bp, Homo sapien
ctctcgtcgtccagcctccccggct

SEQ ID NO: 431457 - DNA, 25 bp, Homo sapien
gagtcagagggtccctctcgtcgtc

SEQ ID NO: 431458 - DNA, 25 bp, Homo sapien
cctctcgtcgtccagcctccccggc

SEQ ID NO: 431459 - DNA, 25 bp, Homo sapien
tcagagggtccctctcgtcgtccag

SEQ ID NO: 431460 - DNA, 25 bp, Homo sapien
tgcagtttaaaaagccgggctctct

SEQ ID NO: 431461 - DNA, 25 bp, Homo sapien
tctgtgcgtttgctttctgctgcag

SEQ ID NO: 431462 - DNA, 25 bp, Homo sapien
cagctttctgttctccgtgtgggtg

SEQ ID NO: 431463 - DNA, 25 bp, Homo sapien
tctctccggagcgtgtgtagggcct

SEQ ID NO: 431464 - DNA, 25 bp, Homo sapien
gcgccggcaactggcgatgagctca

SEQ ID NO: 431465 - DNA, 25 bp, Homo sapien
tttgccagacaactggtctgccggg

SEQ ID NO: 431466 - DNA, 25 bp, Homo sapien
atgctggtcgccatcacgtgactcc

SEQ ID NO: 431467 - DNA, 25 bp, Homo sapien
tggccagtgctctgggtgcctttgc

SEQ ID NO: 431468 - DNA, 25 bp, Homo sapien
gagcctctctggtcgtctttgtgtg

SEQ ID NO: 431469 - DNA, 25 bp, Homo sapien
gaggttgctagtacccattgtgtgt

SEQ ID NO: 431470 - DNA, 25 bp, Homo sapien
gagcccgggagcctctctggtcgtc

SEQ ID NO: 431471 - DNA, 25 bp, Homo sapien
tacccattgtgtgtggattggacca

SEQ ID NO: 431472 - DNA, 25 bp, Homo sapien
tgtgaagtccattacagtctccggc

SEQ ID NO: 431473 - DNA, 25 bp, Homo sapien
tgaatgtagcaaggagtgggaacta

SEQ ID NO: 431474 - DNA, 25 bp, Homo sapien
aaactgggaaatctcgggctgcgcg

SEQ ID NO: 431475 - DNA, 25 bp, Homo sapien
cttcctgagcgaaagcaaactggga

SEQ ID NO: 431476 - DNA, 25 bp, Homo sapien
ggctcccgctggaatttgctgcgtt

SEQ ID NO: 431477 - DNA, 25 bp, Homo sapien
tgatggggcaaacgtctccggccta

SEQ ID NO: 431478 - DNA, 25 bp, Homo sapien
gggtcggaacgtcggctgtggctgt

SEQ ID NO: 431479 - DNA, 25 bp, Homo sapien
agcacccagaaagcgccagcggagg

SEQ ID NO: 431480 - DNA, 25 bp, Homo sapien
cacagccccttagcttcttgcccac

SEQ ID NO: 431481 - DNA, 25 bp, Homo sapien
ctgcaagattcagaagcagaggcct

SEQ ID NO: 431482 - DNA, 25 bp, Homo sapien
tgggctctcacagccccttagcttc

SEQ ID NO: 431483 - DNA, 25 bp, Homo sapien
tctcacagccccttagcttcttgcc

SEQ ID NO: 431484 - DNA, 25 bp, Homo sapien
tgaggaaagcgggtgcttcaggcct

SEQ ID NO: 431485 - DNA, 25 bp, Homo sapien
aaagcgggtgcttcaggcctgccag

SEQ ID NO: 431486 - DNA, 25 bp, Homo sapien
ggtcctgggcctccgtgccatgttc

SEQ ID NO: 431487 - DNA, 25 bp, Homo sapien
tgccatgttccccgcaagcagtcgg

SEQ ID NO: 431488 - DNA, 25 bp, Homo sapien
ccactatgggcggaatctgctgcag

SEQ ID NO: 431489 - DNA, 25 bp, Homo sapien
ccacgggacgctcactcataggagg

SEQ ID NO: 431490 - DNA, 25 bp, Homo sapien
acgttatcgtgcgtgggaaccacgg

SEQ ID NO: 431491 - DNA, 25 bp, Homo sapien
tcagcagttctctcgctgtgccgag

SEQ ID NO: 431492 - DNA, 25 bp, Homo sapien
tgctgcccttcagggttcatcgagg

SEQ ID NO: 431493 - DNA, 25 bp, Homo sapien
gttcatcgaggtcttattttggttc

SEQ ID NO: 431494 - DNA, 25 bp, Homo sapien
ctgcccttcagggttcatcgaggtc

SEQ ID NO: 431495 - DNA, 25 bp, Homo sapien
tgcccttcagggttcatcgaggtct

SEQ ID NO: 431496 - DNA, 25 bp, Homo sapien
cctgctcgtgtttaggtgcaggctt

SEQ ID NO: 431497 - DNA, 25 bp, Homo sapien
tgctcgtgtttaggtgcaggctttg

SEQ ID NO: 431498 - DNA, 25 bp, Homo sapien
ctgcctgctcgtgtttaggtgcagg

SEQ ID NO: 431499 - DNA, 25 bp, Homo sapien
gctcgtgtttaggtgcaggctttgt

SEQ ID NO: 431500 - DNA, 25 bp, Homo sapien
ccaggctctgccgagcggtcagagg

SEQ ID NO: 431501 - DNA, 25 bp, Homo sapien
aggctctgccgagcggtcagaggga

SEQ ID NO: 431502 - DNA, 25 bp, Homo sapien
caggctctgccgagcggtcagaggg

SEQ ID NO: 431503 - DNA, 25 bp, Homo sapien
cccaggctctgccgagcggtcagag

SEQ ID NO: 431504 - DNA, 25 bp, Homo sapien
tggtcatgccgctggccgggttgtg

SEQ ID NO: 431505 - DNA, 25 bp, Homo sapien
gggttgtgcccggtggccaggtctg

SEQ ID NO: 431506 - DNA, 25 bp, Homo sapien
ggtcccggccaagcagcagagatgt

SEQ ID NO: 431507 - DNA, 25 bp, Homo sapien
tgaatctgcaggtggcggcagctgg

SEQ ID NO: 431508 - DNA, 25 bp, Homo sapien
cttcaacgtttggagcccgtggctg

SEQ ID NO: 431509 - DNA, 25 bp, Homo sapien
agccctcgatggctgtgcggacacc

SEQ ID NO: 431510 - DNA, 25 bp, Homo sapien
tggcagtggtgagccctcgatggct

SEQ ID NO: 431511 - DNA, 25 bp, Homo sapien
agccagctgcttcaacgtttggagc

SEQ ID NO: 431512 - DNA, 25 bp, Homo sapien
tgaggttctgagctgttagcctcag

SEQ ID NO: 431513 - DNA, 25 bp, Homo sapien
catgataacaagagtggctgcgtgc

SEQ ID NO: 431514 - DNA, 25 bp, Homo sapien
agacagggcccgactctgcaggacg

SEQ ID NO: 431515 - DNA, 25 bp, Homo sapien
caggagcgggcaggtcatgataaca

SEQ ID NO: 431516 - DNA, 25 bp, Homo sapien
ggatttgatgtgtttatgtggttaa

SEQ ID NO: 431517 - DNA, 25 bp, Homo sapien
agctgggatttgatgtgtttatgtg

SEQ ID NO: 431518 - DNA, 25 bp, Homo sapien
atgtggttaaatctggcctggagaa

SEQ ID NO: 431519 - DNA, 25 bp, Homo sapien
tgtggttaaatctggcctggagaag

SEQ ID NO: 431520 - DNA, 25 bp, Homo sapien
ctctcttctcccctcgcctgccggg

SEQ ID NO: 431521 - DNA, 25 bp, Homo sapien
tctcttctcccctcgcctgcccggg

SEQ ID NO: 431522 - DNA, 25 bp, Homo sapien
gcctgcccgggagccagggctggtc

SEQ ID NO: 431523 - DNA, 25 bp, Homo sapien
ccttgcctgccggggagccagggct

SEQ ID NO: 431524 - DNA, 25 bp, Homo sapien
gtgcacctcccgctgtgcatgtggg

SEQ ID NO: 431525 - DNA, 25 bp, Homo sapien
tgggcctccccctgtgcatgtgggc

SEQ ID NO: 431526 - DNA, 25 bp, Homo sapien
ggtaacgagggtgccctgtgcacct

SEQ ID NO: 431527 - DNA, 25 bp, Homo sapien
ccagggctggaggtaacgagggtgc

SEQ ID NO: 431528 - DNA, 25 bp, Homo sapien
tcaatgtaccgaagtcaccagatgg

SEQ ID NO: 431529 - DNA, 25 bp, Homo sapien
tttgcaaaggcgaacaacattcctg

SEQ ID NO: 431530 - DNA, 25 bp, Homo sapien
ttcagcaaagggctcctccgtggtc

SEQ ID NO: 431531 - DNA, 25 bp, Homo sapien
gatggaagggcagtctagaaaaacc

SEQ ID NO: 431532 - DNA, 25 bp, Homo sapien
ctgcagagggaacccggcgctgtca

SEQ ID NO: 431533 - DNA, 25 bp, Homo sapien
gactttcttcagttggaggctgaaa

SEQ ID NO: 431534 - DNA, 25 bp, Homo sapien
tgcagggcagtttccgtttgacttt

SEQ ID NO: 431535 - DNA, 25 bp, Homo sapien
gctgtcagacaccacctcagcgaga

SEQ ID NO: 431536 - DNA, 25 bp, Homo sapien
gaaacggcctgtgacatccgtggga

SEQ ID NO: 431537 - DNA, 25 bp, Homo sapien
gctcctggtgggtcatgtcacagtg

SEQ ID NO: 431538 - DNA, 25 bp, Homo sapien
tgcaccccgcgttataaacaccaag

SEQ ID NO: 431539 - DNA, 25 bp, Homo sapien
gataataagacaaggcgcctgacgg

SEQ ID NO: 431540 - DNA, 25 bp, Homo sapien
gggatggcatcctagcaaacgcgtg

SEQ ID NO: 431541 - DNA, 25 bp, Homo sapien
tgtgcttgtaggcacccggatgcag

SEQ ID NO: 431542 - DNA, 25 bp, Homo sapien
tgcagccccatcctaactttcaggg

SEQ ID NO: 431543 - DNA, 25 bp, Homo sapien
gccagtctcatagcagatgctgagc

SEQ ID NO: 431544 - DNA, 25 bp, Homo sapien
gggcagggagcgtaccctggcacag

SEQ ID NO: 431545 - DNA, 25 bp, Homo sapien
ggcagggagcgtaccctggcacagg

SEQ ID NO: 431546 - DNA, 25 bp, Homo sapien
gcgggagagtcgggtgctgggcagg

SEQ ID NO: 431547 - DNA, 25 bp, Homo sapien
gggagagtcgggtgctgggcaggga

SEQ ID NO: 431548 - DNA, 25 bp, Homo sapien
tggggcgggagagtcgggtgctggg

SEQ ID NO: 431549 - DNA, 25 bp, Homo sapien
gggcgggagagtcgggtgctgggca

SEQ ID NO: 431550 - DNA, 25 bp, Homo sapien
tgccgggtggccatggatattgccc

SEQ ID NO: 431551 - DNA, 25 bp, Homo sapien
taagtgttgcgtccagctgctgtcg

SEQ ID NO: 431552 - DNA, 25 bp, Homo sapien
gctgtcggcccctccttgagtagag

SEQ ID NO: 431553 - DNA, 25 bp, Homo sapien
ctgtttgaggaacaacacgtggtcc

SEQ ID NO: 431554 - DNA, 25 bp, Homo sapien
ctgttagcagacaggccccgtgagg

SEQ ID NO: 431555 - DNA, 25 bp, Homo sapien
tatcatgccctgtgcaacctcttgg

SEQ ID NO: 431556 - DNA, 25 bp, Homo sapien
tcctgctttgggaagccgtgctcgc

SEQ ID NO: 431557 - DNA, 25 bp, Homo sapien
gaagcctgatgctgacattcacctg

SEQ ID NO: 431558 - DNA, 25 bp, Homo sapien
gcctcccaaatgagccatgagatga

SEQ ID NO: 431559 - DNA, 25 bp, Homo sapien
tccaagctgggagattcaagggacc

SEQ ID NO: 431560 - DNA, 25 bp, Homo sapien
tggaacacggccacatcaaagaggc

SEQ ID NO: 431561 - DNA, 25 bp, Homo sapien
gctccagatgcagggcagtcattgg

SEQ ID NO: 431562 - DNA, 25 bp, Homo sapien
gagatccggcaacatcaacccgagt

SEQ ID NO: 431563 - DNA, 25 bp, Homo sapien
cagccacgaggtgcaacaaggtcct

SEQ ID NO: 431564 - DNA, 25 bp, Homo sapien
gccgccctgcgggtgaacaaagcag

SEQ ID NO: 431565 - DNA, 25 bp, Homo sapien
caaggtcctctgtcagtcacagcca

SEQ ID NO: 431566 - DNA, 25 bp, Homo sapien
gcatgcatggccatacacaggcgtg

SEQ ID NO: 431567 - DNA, 25 bp, Homo sapien
tacacaggtgtgcaggagcatccat

SEQ ID NO: 431568 - DNA, 25 bp, Homo sapien
ctagatctacgagcccaggaaatgg

SEQ ID NO: 431569 - DNA, 25 bp, Homo sapien
tgcacaggcacgcacggttacatgg

SEQ ID NO: 431570 - DNA, 25 bp, Homo sapien
gtgggaagagtattcacatcacatc

SEQ ID NO: 431571 - DNA, 25 bp, Homo sapien
taagtgtgtttaatgtatgtgggaa

SEQ ID NO: 431572 - DNA, 25 bp, Homo sapien
atggtcccgcacctgtgggcaaggc

SEQ ID NO: 431573 - DNA, 25 bp, Homo sapien
tgggcaaggcactagcgctccttag

SEQ ID NO: 431574 - DNA, 25 bp, Homo sapien
ctccgggctggcacaagtgtgggag

SEQ ID NO: 431575 - DNA, 25 bp, Homo sapien
cacgtccgcggtgaccgggaccagt

SEQ ID NO: 431576 - DNA, 25 bp, Homo sapien
ccgggctggcacaagtgtgggagca

SEQ ID NO: 431577 - DNA, 25 bp, Homo sapien
aaggccagcacgtccgcggtgaccg

SEQ ID NO: 431578 - DNA, 25 bp, Homo sapien
ggagggctgcccttagggtgggaga

SEQ ID NO: 431579 - DNA, 25 bp, Homo sapien
gtgtctgccgccaacctgagatggc

SEQ ID NO: 431580 - DNA, 25 bp, Homo sapien
gatgacaatgtgtctgccgccaacc

SEQ ID NO: 431581 - DNA, 25 bp, Homo sapien
ggagagaggaaccagctccgaggac

SEQ ID NO: 431582 - DNA, 25 bp, Homo sapien
cctgctagcaggataagcggaggcc

SEQ ID NO: 431583 - DNA, 25 bp, Homo sapien
gggcagaaaggatttgtctcaagcc

SEQ ID NO: 431584 - DNA, 25 bp, Homo sapien
ccctagagggctcacaactcctgtg

SEQ ID NO: 431585 - DNA, 25 bp, Homo sapien
tgagtgtcgccagcacgctgtggcc

SEQ ID NO: 431586 - DNA, 25 bp, Homo sapien
gcttggaagacactgcaaacccagc

SEQ ID NO: 431587 - DNA, 25 bp, Homo sapien
actgggctcaggaattcagctgcct

SEQ ID NO: 431588 - DNA, 25 bp, Homo sapien
cacattctgaacaccgtcgcttgga

SEQ ID NO: 431589 - DNA, 25 bp, Homo sapien
aggcttgggcggagcacagagtgca

SEQ ID NO: 431590 - DNA, 25 bp, Homo sapien
ctccgaggcccttgtcctgcacgct

SEQ ID NO: 431591 - DNA, 25 bp, Homo sapien
caggatcaggaagtacacggagtat

SEQ ID NO: 431592 - DNA, 25 bp, Homo sapien
aagtagatgatggacaggatcagga

SEQ ID NO: 431593 - DNA, 25 bp, Homo sapien
ggaagtacacggagtataactggaa

SEQ ID NO: 431594 - DNA, 25 bp, Homo sapien
tctccatctcggcagcggaagctgt

SEQ ID NO: 431595 - DNA, 25 bp, Homo sapien
agcgttggccacatctctcctgatt

SEQ ID NO: 431596 - DNA, 25 bp, Homo sapien
gaagctgtgctacgatgaccagaag

SEQ ID NO: 431597 - DNA, 25 bp, Homo sapien
ttctgcgtggcctgcggtgtctgct

SEQ ID NO: 431598 - DNA, 25 bp, Homo sapien
ggagcacacgcacagagtccctaaa

SEQ ID NO: 431599 - DNA, 25 bp, Homo sapien
gagtccctaaagagccctcaggcat

SEQ ID NO: 431600 - DNA, 25 bp, Homo sapien
gcacagagtccctaaagagccctca

SEQ ID NO: 431601 - DNA, 25 bp, Homo sapien
acacgcacagagtccctaaagagcc

SEQ ID NO: 431602 - DNA, 25 bp, Homo sapien
gatgagtgagcaacagccatcctca

SEQ ID NO: 431603 - DNA, 25 bp, Homo sapien
gaagaatgcatttcgatgagtgagc

SEQ ID NO: 431604 - DNA, 25 bp, Homo sapien
ggacaggccctaatgacactcttgg

SEQ ID NO: 431605 - DNA, 25 bp, Homo sapien
ccctgagtgttcacacctgggtcgg

SEQ ID NO: 431606 - DNA, 25 bp, Homo sapien
gaaagtgatgatggtcttgacgatg

SEQ ID NO: 431607 - DNA, 25 bp, Homo sapien
gtgttgaccccgaagaccagggcac

SEQ ID NO: 431608 - DNA, 25 bp, Homo sapien
cccgcacgtccgagacaatgaaagt

SEQ ID NO: 431609 - DNA, 25 bp, Homo sapien
cgatggtggcaaagaacgtgttgac

SEQ ID NO: 431610 - DNA, 25 bp, Homo sapien
gtgtgcgccagaaggaagaccagcc

SEQ ID NO: 431611 - DNA, 25 bp, Homo sapien
gcggaacagcacgaaggccgcatag

SEQ ID NO: 431612 - DNA, 25 bp, Homo sapien
cgatgagcagcttggaccagcgcgc

SEQ ID NO: 431613 - DNA, 25 bp, Homo sapien
agcggatcttcacgaagcccgcggc

SEQ ID NO: 431614 - DNA, 25 bp, Homo sapien
tgtagacccgcgcactgttggtggt

SEQ ID NO: 431615 - DNA, 25 bp, Homo sapien
tagtagccggccgagttgaagaccc

SEQ ID NO: 431616 - DNA, 25 bp, Homo sapien
tagtagaccaccaggtagtagccgg

SEQ ID NO: 431617 - DNA, 25 bp, Homo sapien
gccatggtgacgctgtagaagagct

SEQ ID NO: 431618 - DNA, 25 bp, Homo sapien
cgtgtagcgcaggtagtcggtgagc

SEQ ID NO: 431619 - DNA, 25 bp, Homo sapien
tcggtgagcaggaacacgggcacca

SEQ ID NO: 431620 - DNA, 25 bp, Homo sapien
acggccaggtaggagtacgacagca

SEQ ID NO: 431621 - DNA, 25 bp, Homo sapien
agcagccacaccgacacgaagctga

SEQ ID NO: 431622 - DNA, 25 bp, Homo sapien
cacggctctctggaaaagggcggcc

SEQ ID NO: 431623 - DNA, 25 bp, Homo sapien
tgggagccaccctatgcttggagcc

SEQ ID NO: 431624 - DNA, 25 bp, Homo sapien
cctgcagattccgaaagaagcggct

SEQ ID NO: 431625 - DNA, 25 bp, Homo sapien
gaggttggtaccagatgagccagca

SEQ ID NO: 431626 - DNA, 25 bp, Homo sapien
tccgaatgaatggagcatgcctcat

SEQ ID NO: 431627 - DNA, 25 bp, Homo sapien
tcttagttgagggtctgagcgcaga

SEQ ID NO: 431628 - DNA, 25 bp, Homo sapien
agctgcgcccaaatctacgtccaga

SEQ ID NO: 431629 - DNA, 25 bp, Homo sapien
tccagagaaacaccgtatgtaacac

SEQ ID NO: 431630 - DNA, 25 bp, Homo sapien
tgccaggaaacactggcccacggcg

SEQ ID NO: 431631 - DNA, 25 bp, Homo sapien
gtgagcaaaggaaaccacgctcctc

SEQ ID NO: 431632 - DNA, 25 bp, Homo sapien
ccacggcgggagaaatggcggcaga

SEQ ID NO: 431633 - DNA, 25 bp, Homo sapien
aggtccgaggaggacagcaaccaca

SEQ ID NO: 431634 - DNA, 25 bp, Homo sapien
aggggaacgtgggcagcccgtggca

SEQ ID NO: 431635 - DNA, 25 bp, Homo sapien
agctggtgaggggaacgtgggcagc

SEQ ID NO: 431636 - DNA, 25 bp, Homo sapien
ccgagctggtgaggggaacgtgggc

SEQ ID NO: 431637 - DNA, 25 bp, Homo sapien
gggaacgtgggcagcccgtggcagg

SEQ ID NO: 431638 - DNA, 25 bp, Homo sapien
gcagaggaagcagcattcgccccag

SEQ ID NO: 431639 - DNA, 25 bp, Homo sapien
aggctgccagctcgtgctctacctg

SEQ ID NO: 431640 - DNA, 25 bp, Homo sapien
acctgcagtgggagaagccggaatc

SEQ ID NO: 431641 - DNA, 25 bp, Homo sapien
ccccaggagtgaactggaagtgcca

SEQ ID NO: 431642 - DNA, 25 bp, Homo sapien
caacaacaggggctggcgagtcctg

SEQ ID NO: 431643 - DNA, 25 bp, Homo sapien
ttcctagacacaagcctggcaacaa

SEQ ID NO: 431644 - DNA, 25 bp, Homo sapien
tagacacaagcctggcaacaacagg

SEQ ID NO: 431645 - DNA, 25 bp, Homo sapien
tgaacttcctagacacaagcctggc

SEQ ID NO: 431646 - DNA, 25 bp, Homo sapien
agtggccctccactaagagcagaga

SEQ ID NO: 431647 - DNA, 25 bp, Homo sapien
aaccttggcggtggacagtggccct

SEQ ID NO: 431648 - DNA, 25 bp, Homo sapien
taagggaaacgccacacataatgct

SEQ ID NO: 431649 - DNA, 25 bp, Homo sapien
cagagatgccatctggtcagtgggt

SEQ ID NO: 431650 - DNA, 25 bp, Homo sapien
gcctattccagacgctgctccccgc

SEQ ID NO: 431651 - DNA, 25 bp, Homo sapien
ctattccagacgctgctccccgccc

SEQ ID NO: 431652 - DNA, 25 bp, Homo sapien
tgcctattccagacgctgctccccg

SEQ ID NO: 431653 - DNA, 25 bp, Homo sapien
gtgcctattccagacgctgctcccc

SEQ ID NO: 431654 - DNA, 25 bp, Homo sapien
gggtgatgaagctctcccctggccg

SEQ ID NO: 431655 - DNA, 25 bp, Homo sapien
gccatgaagccgtagaagcaaaggt

SEQ ID NO: 431656 - DNA, 25 bp, Homo sapien
aaaggtagcacacgaggtgccgcca

SEQ ID NO: 431657 - DNA, 25 bp, Homo sapien
ccctggccgtatctgcgccatgaag

SEQ ID NO: 431658 - DNA, 25 bp, Homo sapien
agctccggaggggacgaaggtgacg

SEQ ID NO: 431659 - DNA, 25 bp, Homo sapien
ggaggggacgaaggtgacgctgtgc

SEQ ID NO: 431660 - DNA, 25 bp, Homo sapien
ccggaggggacgaaggtgacgctgt

SEQ ID NO: 431661 - DNA, 25 bp, Homo sapien
ctccggaggggacgaaggtgacgct

SEQ ID NO: 431662 - DNA, 25 bp, Homo sapien
ggctctctctgagacgcctcgggat

SEQ ID NO: 431663 - DNA, 25 bp, Homo sapien
tagcggtgttggaaggacccactcg

SEQ ID NO: 431664 - DNA, 25 bp, Homo sapien
ggagtttccgatggacaggacccta

SEQ ID NO: 431665 - DNA, 25 bp, Homo sapien
cctcgggattgctccgctggatccg

SEQ ID NO: 431666 - DNA, 25 bp, Homo sapien
ctggcccgtcccgaagcaacacgtg

SEQ ID NO: 431667 - DNA, 25 bp, Homo sapien
ccgtcccgaagcaacacgtgcctgg

SEQ ID NO: 431668 - DNA, 25 bp, Homo sapien
cggctggcccgtcccgaagcaacac

SEQ ID NO: 431669 - DNA, 25 bp, Homo sapien
gcccgtcccgaagcaacacgtgcct

SEQ ID NO: 431670 - DNA, 25 bp, Homo sapien
ggccctgcaaacctcggcccgcgcc

SEQ ID NO: 431671 - DNA, 25 bp, Homo sapien
gggcggctgccctggggctcccgga

SEQ ID NO: 431672 - DNA, 25 bp, Homo sapien
ggcggctgccctggggctcccggac

SEQ ID NO: 431673 - DNA, 25 bp, Homo sapien
cccgccggcgtcagcatcctggggt

SEQ ID NO: 431674 - DNA, 25 bp, Homo sapien
cggcgtcagcatcctggggtgccac

SEQ ID NO: 431675 - DNA, 25 bp, Homo sapien
cgccggcgtcagcatcctggggtgc

SEQ ID NO: 431676 - DNA, 25 bp, Homo sapien
agcatcctggggtgccactcgcgga

SEQ ID NO: 431677 - DNA, 25 bp, Homo sapien
tgtaccaaggagcaagccggatcca

SEQ ID NO: 431678 - DNA, 25 bp, Homo sapien
tgcggcagacagcaccgccgaaagc

SEQ ID NO: 431679 - DNA, 25 bp, Homo sapien
caggcctcgcagacggcagcgcagt

SEQ ID NO: 431680 - DNA, 25 bp, Homo sapien
cagtcacactcaggaaggggggcct

SEQ ID NO: 431681 - DNA, 25 bp, Homo sapien
tgtctctccggtcaggtgtagccga

SEQ ID NO: 431682 - DNA, 25 bp, Homo sapien
tggcagttgtaatctagaggcagct

SEQ ID NO: 431683 - DNA, 25 bp, Homo sapien
cggtcaggtgtagccgagcgaatcc

SEQ ID NO: 431684 - DNA, 25 bp, Homo sapien
aggtagggcttctgccaccaacagc

SEQ ID NO: 431685 - DNA, 25 bp, Homo sapien
gagccaggagactcgtgaagaactt

SEQ ID NO: 431686 - DNA, 25 bp, Homo sapien
gaagagccaggagactcgtgaagaa

SEQ ID NO: 431687 - DNA, 25 bp, Homo sapien
aagagccaggagactcgtgaagaac

SEQ ID NO: 431688 - DNA, 25 bp, Homo sapien
gccaggagactcgtgaagaacttac

SEQ ID NO: 431689 - DNA, 25 bp, Homo sapien
actcccagcggccaggggtagccca

SEQ ID NO: 431690 - DNA, 25 bp, Homo sapien
gctgacctcctaacactcccagcgg

SEQ ID NO: 431691 - DNA, 25 bp, Homo sapien
tcgcccccactttttccacgagctg

SEQ ID NO: 431692 - DNA, 25 bp, Homo sapien
ctttttccacgagctgacctcctaa

SEQ ID NO: 431693 - DNA, 25 bp, Homo sapien
ggcccatggacgctgtgtcactaca

SEQ ID NO: 431694 - DNA, 25 bp, Homo sapien
gatcaaagaacgtggcctaagcagg

SEQ ID NO: 431695 - DNA, 25 bp, Homo sapien
gctgtcagcctctacgtaggacgtg

SEQ ID NO: 431696 - DNA, 25 bp, Homo sapien
tgattcaaacgtttccagtaggcag

SEQ ID NO: 431697 - DNA, 25 bp, Homo sapien
cagctctcaggagtgtcccagggaa

SEQ ID NO: 431698 - DNA, 25 bp, Homo sapien
gattagcgcgtgctataatccgcag

SEQ ID NO: 431699 - DNA, 25 bp, Homo sapien
tgaggccactgtcagaccagagaga

SEQ ID NO: 431700 - DNA, 25 bp, Homo sapien
accgcagccctcgaatgtgcagaga

SEQ ID NO: 431701 - DNA, 25 bp, Homo sapien
agccatagcaccaggagacatgggg

SEQ ID NO: 431702 - DNA, 25 bp, Homo sapien
tctgcagccatagcaccaggagaca

SEQ ID NO: 431703 - DNA, 25 bp, Homo sapien
gcagccatagcaccaggagacatgg

SEQ ID NO: 431704 - DNA, 25 bp, Homo sapien
tgcagccatagcaccaggagacatg

SEQ ID NO: 431705 - DNA, 25 bp, Homo sapien
ccgggtcctgcacaccttgctggta

SEQ ID NO: 431706 - DNA, 25 bp, Homo sapien
cgtagcccgtgccacattctcctga

SEQ ID NO: 431707 - DNA, 25 bp, Homo sapien
ggctttgaccccgtagcccgtgcca

SEQ ID NO: 431708 - DNA, 25 bp, Homo sapien
ctcgtctgctctgggtgaaccaggt

SEQ ID NO: 431709 - DNA, 25 bp, Homo sapien
cacacacactgaaaatggccagggg

SEQ ID NO: 431710 - DNA, 25 bp, Homo sapien
cacacactgaaaatggccaggggtg

SEQ ID NO: 431711 - DNA, 25 bp, Homo sapien
acacacactgaaaatggccaggggt

SEQ ID NO: 431712 - DNA, 25 bp, Homo sapien
cacactgaaaatggccaggggtgtg

SEQ ID NO: 431713 - DNA, 25 bp, Homo sapien
taacaggccagactggcggccgcgc

SEQ ID NO: 431714 - DNA, 25 bp, Homo sapien
ggccgcgccgaccacctgggagaga

SEQ ID NO: 431715 - DNA, 25 bp, Homo sapien
cagtgtaaaggccagcagcggccgc

SEQ ID NO: 431716 - DNA, 25 bp, Homo sapien
agagccacccgtgctaacaggccag

SEQ ID NO: 431717 - DNA, 25 bp, Homo sapien
tgctgagagggcttcgaatgcacca

SEQ ID NO: 431718 - DNA, 25 bp, Homo sapien
ggtttctgttcctgatgtggggata

SEQ ID NO: 431719 - DNA, 25 bp, Homo sapien
tctcgctgctgagagggcttcgaat

SEQ ID NO: 431720 - DNA, 25 bp, Homo sapien
gatagtggtcttctcgctgctgaga

SEQ ID NO: 431721 - DNA, 25 bp, Homo sapien
actgcggggcctgtgagcttgttca

SEQ ID NO: 431722 - DNA, 25 bp, Homo sapien
tgggtcttcggggccatcaacctac

SEQ ID NO: 431723 - DNA, 25 bp, Homo sapien
tgcctggggtatgctcctggtttcc

SEQ ID NO: 431724 - DNA, 25 bp, Homo sapien
gctgaagctgcctggggtatgctcc

SEQ ID NO: 431725 - DNA, 25 bp, Homo sapien
ttttgagggtgagacaacccttgag

SEQ ID NO: 431726 - DNA, 25 bp, Homo sapien
aggtcgattttgagggtgagacaac

SEQ ID NO: 431727 - DNA, 25 bp, Homo sapien
tcgattttgagggtgagacaaccct

SEQ ID NO: 431728 - DNA, 25 bp, Homo sapien
gagggtgagacaacccttgagttcc

SEQ ID NO: 431729 - DNA, 25 bp, Homo sapien
cacactgcgaggttctgcctggaga

SEQ ID NO: 431730 - DNA, 25 bp, Homo sapien
cagtgggtatgacggcatgcaaagc

SEQ ID NO: 431731 - DNA, 25 bp, Homo sapien
catttccatgtgagccaaggagacc

SEQ ID NO: 431732 - DNA, 25 bp, Homo sapien
gggttcagctgcaacagacacgtgc

SEQ ID NO: 431733 - DNA, 25 bp, Homo sapien
tctatttcatgggacagtcatagca

SEQ ID NO: 431734 - DNA, 25 bp, Homo sapien
aataaatcgtaacagcttcttgcag

SEQ ID NO: 431735 - DNA, 25 bp, Homo sapien
taaagaattctaaccaccctgagct

SEQ ID NO: 431736 - DNA, 25 bp, Homo sapien
ttgcagatccctctagaaaactctg

SEQ ID NO: 431737 - DNA, 25 bp, Homo sapien
tgggccagggacttccctaatatct

SEQ ID NO: 431738 - DNA, 25 bp, Homo sapien
gaggacctggctttcagcttgcctg

SEQ ID NO: 431739 - DNA, 25 bp, Homo sapien
gtgcgccggccctgcaactgggcca

SEQ ID NO: 431740 - DNA, 25 bp, Homo sapien
tcagcttgcctgtgcagcttacact

SEQ ID NO: 431741 - DNA, 25 bp, Homo sapien
ggtcatgacggtaagtacaccaggt

SEQ ID NO: 431742 - DNA, 25 bp, Homo sapien
tcatgacggtaagtacaccaggtga

SEQ ID NO: 431743 - DNA, 25 bp, Homo sapien
gtggtcatgacggtaagtacaccag

SEQ ID NO: 431744 - DNA, 25 bp, Homo sapien
gggtggtcatgacggtaagtacacc

SEQ ID NO: 431745 - DNA, 25 bp, Homo sapien
tagacattgtgaaaggtacatgggt

SEQ ID NO: 431746 - DNA, 25 bp, Homo sapien
taatctggccccattgctgacacac

SEQ ID NO: 431747 - DNA, 25 bp, Homo sapien
tgcagcctccacgatgccctttgaa

SEQ ID NO: 431748 - DNA, 25 bp, Homo sapien
ttagaagcctcgttagtgtgggtcc

SEQ ID NO: 431749 - DNA, 25 bp, Homo sapien
actgccgcgtgtcggtcacggtgtc

SEQ ID NO: 431750 - DNA, 25 bp, Homo sapien
tattctccgcgggacggacgtgtct

SEQ ID NO: 431751 - DNA, 25 bp, Homo sapien
ccggccgcgcttctaaggcaggact

SEQ ID NO: 431752 - DNA, 25 bp, Homo sapien
ggacgtgtcttcaggtccaacccgc

SEQ ID NO: 431753 - DNA, 25 bp, Homo sapien
tcctggaccagtcggaaccacagag

SEQ ID NO: 431754 - DNA, 25 bp, Homo sapien
cgtcctggaccagtcggaaccacag

SEQ ID NO: 431755 - DNA, 25 bp, Homo sapien
ctggaccagtcggaaccacagaggc

SEQ ID NO: 431756 - DNA, 25 bp, Homo sapien
accagtcggaaccacagaggccgct

SEQ ID NO: 431757 - DNA, 25 bp, Homo sapien
cagtctgacatctttgccgatggcc

SEQ ID NO: 431758 - DNA, 25 bp, Homo sapien
cctgtgggacaagtacagtctgaca

SEQ ID NO: 431759 - DNA, 25 bp, Homo sapien
gccgtattgcacaagcattcatgcg

SEQ ID NO: 431760 - DNA, 25 bp, Homo sapien
cagcagaacccacgcgtagagaggg

SEQ ID NO: 431761 - DNA, 25 bp, Homo sapien
tgcccttatgtggtgtccccggagg

SEQ ID NO: 431762 - DNA, 25 bp, Homo sapien
tgtgcaacgtatccaggtctctggg

SEQ ID NO: 431763 - DNA, 25 bp, Homo sapien
tcagcatctgtgcaacgtatccagg

SEQ ID NO: 431764 - DNA, 25 bp, Homo sapien
cgtaaccaatgaaatcgggcttgtc

SEQ ID NO: 431765 - DNA, 25 bp, Homo sapien
tgatccaatcccttcccaccaggtc

SEQ ID NO: 431766 - DNA, 25 bp, Homo sapien
ccaccatgatccaatcccttcccac

SEQ ID NO: 431767 - DNA, 25 bp, Homo sapien
tccaatcccttcccaccaggtccca

SEQ ID NO: 431768 - DNA, 25 bp, Homo sapien
caccatgatccaatcccttcccacc

SEQ ID NO: 431769 - DNA, 25 bp, Homo sapien
gtccctccaggacggagaagccagt

SEQ ID NO: 431770 - DNA, 25 bp, Homo sapien
gaatgcgagtccgtgtccagagcaa

SEQ ID NO: 431771 - DNA, 25 bp, Homo sapien
cagttaggcagggaatgcgagtccg

SEQ ID NO: 431772 - DNA, 25 bp, Homo sapien
gacgctgtcatgaaagaagctgcca

SEQ ID NO: 431773 - DNA, 25 bp, Homo sapien
tgtcctcgcggtcatgaatgcattc

SEQ ID NO: 431774 - DNA, 25 bp, Homo sapien
gcctaggacatgagagcttggtgct

SEQ ID NO: 431775 - DNA, 25 bp, Homo sapien
tctctcaccatatggtctgcatgca

SEQ ID NO: 431776 - DNA, 25 bp, Homo sapien
ctgattgttaaaaacgcttggcacc

SEQ ID NO: 431777 - DNA, 25 bp, Homo sapien
cccagctgggatttgtgtagttttg

SEQ ID NO: 431778 - DNA, 25 bp, Homo sapien
tgctgttatatggtgcactgggcag

SEQ ID NO: 431779 - DNA, 25 bp, Homo sapien
gagccccgttactttggtctctgat

SEQ ID NO: 431780 - DNA, 25 bp, Homo sapien
gtagttttgtccgtgctgttatatg

SEQ ID NO: 431781 - DNA, 25 bp, Homo sapien
cctgagagtcgcaggctcttgtgta

SEQ ID NO: 431782 - DNA, 25 bp, Homo sapien
tcactccaaaaacgatacgagatcg

SEQ ID NO: 431783 - DNA, 25 bp, Homo sapien
cgagctcgtgctggaatggcaagta

SEQ ID NO: 431784 - DNA, 25 bp, Homo sapien
ggcagcgggcccaagatgtgcatcc

SEQ ID NO: 431785 - DNA, 25 bp, Homo sapien
ggcaccagcccaagaccactttcta

SEQ ID NO: 431786 - DNA, 25 bp, Homo sapien
ttcgcacagattccctcggcaccag

SEQ ID NO: 431787 - DNA, 25 bp, Homo sapien
tcattcgcacagattccctcggcac

SEQ ID NO: 431788 - DNA, 25 bp, Homo sapien
cagcccaagaccactttctatggga

SEQ ID NO: 431789 - DNA, 25 bp, Homo sapien
gctttgtccaagatgagtgtcgttt

SEQ ID NO: 431790 - DNA, 25 bp, Homo sapien
cacggaaagtgatgcaacgtggcag

SEQ ID NO: 431791 - DNA, 25 bp, Homo sapien
gttactggctctgcgaggagtcctg

SEQ ID NO: 431792 - DNA, 25 bp, Homo sapien
cccttgaacattttaatgcccagct

SEQ ID NO: 431793 - DNA, 25 bp, Homo sapien
gcagataggacacccccgtgttctg

SEQ ID NO: 431794 - DNA, 25 bp, Homo sapien
ctagggcagataggacacccccgtg

SEQ ID NO: 431795 - DNA, 25 bp, Homo sapien
ggcagataggacacccccgtgttct

SEQ ID NO: 431796 - DNA, 25 bp, Homo sapien
agggcagataggacacccccgtgtt

SEQ ID NO: 431797 - DNA, 25 bp, Homo sapien
accctcggtagtccgagagcagcgc

SEQ ID NO: 431798 - DNA, 25 bp, Homo sapien
ggactacaccctcggtagtccgaga

SEQ ID NO: 431799 - DNA, 25 bp, Homo sapien
gccctgtggactacaccctcggtag

SEQ ID NO: 431800 - DNA, 25 bp, Homo sapien
ttcaaggccctgtggactacaccct

SEQ ID NO: 431801 - DNA, 25 bp, Homo sapien
cataccagcagagtgagtgccacca

SEQ ID NO: 431802 - DNA, 25 bp, Homo sapien
gtggtttggacaggactgctcacag

SEQ ID NO: 431803 - DNA, 25 bp, Homo sapien
caggccctctttgagcagctgacaa

SEQ ID NO: 431804 - DNA, 25 bp, Homo sapien
tgtgcaagggtagacctgctgagct

SEQ ID NO: 431805 - DNA, 25 bp, Homo sapien
ctaatttgcccctaggtaacatgtg

SEQ ID NO: 431806 - DNA, 25 bp, Homo sapien
catcagaggatcctgtgtgagctca

SEQ ID NO: 431807 - DNA, 25 bp, Homo sapien
ggcacagggattggcttcttggtct

SEQ ID NO: 431808 - DNA, 25 bp, Homo sapien
ggaagaaggacttctaccccagtgc

SEQ ID NO: 431809 - DNA, 25 bp, Homo sapien
ctgtgacgtcgcctcgaggctgcat

SEQ ID NO: 431810 - DNA, 25 bp, Homo sapien
tgagcctggcgtagacggcccggaa

SEQ ID NO: 431811 - DNA, 25 bp, Homo sapien
cgttccctgcgtgggttccgtccat

SEQ ID NO: 431812 - DNA, 25 bp, Homo sapien
tccaaccccagctgacggccgccct

SEQ ID NO: 431813 - DNA, 25 bp, Homo sapien
gatttgcaggtcttgttagccctcc

SEQ ID NO: 431814 - DNA, 25 bp, Homo sapien
caaaagtcgggtcctaaatctcgtg

SEQ ID NO: 431815 - DNA, 25 bp, Homo sapien
tgatgttttccaattccctccgcgc

SEQ ID NO: 431816 - DNA, 25 bp, Homo sapien
ccatgtgagccagtagcactcttag

SEQ ID NO: 431817 - DNA, 25 bp, Homo sapien
gatgccttgtccatagcttcctgac

SEQ ID NO: 431818 - DNA, 25 bp, Homo sapien
tgctggcagagttccaaaacatgaa

SEQ ID NO: 431819 - DNA, 25 bp, Homo sapien
ggagttccgtttacaacagcaagag

SEQ ID NO: 431820 - DNA, 25 bp, Homo sapien
tgtgagccaaatgacctagagagtg

SEQ ID NO: 431821 - DNA, 25 bp, Homo sapien
cctctaagaagtttgtagtcttagc

SEQ ID NO: 431822 - DNA, 25 bp, Homo sapien
gctaagaaactactggctaatccga

SEQ ID NO: 431823 - DNA, 25 bp, Homo sapien
ggttatggagatgtacactggtgtt

SEQ ID NO: 431824 - DNA, 25 bp, Homo sapien
tgtgtgcagttaagtcatagctaag

SEQ ID NO: 431825 - DNA, 25 bp, Homo sapien
ggaaagtccgagctctaagaaggca

SEQ ID NO: 431826 - DNA, 25 bp, Homo sapien
taaactcggcgtagaggagcatcct

SEQ ID NO: 431827 - DNA, 25 bp, Homo sapien
tgtgcgttaccaagtcagtcctgtc

SEQ ID NO: 431828 - DNA, 25 bp, Homo sapien
ccttggacgtgtaaactagcgcttg

SEQ ID NO: 431829 - DNA, 25 bp, Homo sapien
aacatcgtcatccacggcttcacag

SEQ ID NO: 431830 - DNA, 25 bp, Homo sapien
caacatcgtcatccacggcttcaca

SEQ ID NO: 431831 - DNA, 25 bp, Homo sapien
acatcgtcatccacggcttcacagt

SEQ ID NO: 431832 - DNA, 25 bp, Homo sapien
tacaacatcgtcatccacggcttca

SEQ ID NO: 431833 - DNA, 25 bp, Homo sapien
cgatgcaccagcttctgtcttgcag

SEQ ID NO: 431834 - DNA, 25 bp, Homo sapien
tgctgccacgatgcaccagcttctg

SEQ ID NO: 431835 - DNA, 25 bp, Homo sapien
agtgtccttgctgccacgatgcacc

SEQ ID NO: 431836 - DNA, 25 bp, Homo sapien
tgccacgatgcaccagcttctgtct

SEQ ID NO: 431837 - DNA, 25 bp, Homo sapien
cattagaagacgcgggtgctcacgc

SEQ ID NO: 431838 - DNA, 25 bp, Homo sapien
aagacgcgggtgctcacgcagggct

SEQ ID NO: 431839 - DNA, 25 bp, Homo sapien
gggtgctcacgcagggctgtctgct

SEQ ID NO: 431840 - DNA, 25 bp, Homo sapien
tgggcgcatcgcctgtgcgtgcagc

SEQ ID NO: 431841 - DNA, 25 bp, Homo sapien
ggggttggcaggtggcggcctcgtg

SEQ ID NO: 431842 - DNA, 25 bp, Homo sapien
caccacaggacatggtgaacgccgg

SEQ ID NO: 431843 - DNA, 25 bp, Homo sapien
caggacatggtgaacgccggggggt

SEQ ID NO: 431844 - DNA, 25 bp, Homo sapien
gcaggtggcggcctcgtgttggaca

SEQ ID NO: 431845 - DNA, 25 bp, Homo sapien
ctccttcaaagggagtgccaaaggc

SEQ ID NO: 431846 - DNA, 25 bp, Homo sapien
gccttccggacggagactcggtcag

SEQ ID NO: 431847 - DNA, 25 bp, Homo sapien
aagtagacaggaacagtatccagga

SEQ ID NO: 431848 - DNA, 25 bp, Homo sapien
gtatccaggatgagcaaaccaagcc

SEQ ID NO: 431849 - DNA, 25 bp, Homo sapien
aagctgaggccaagcgcgatgctga

SEQ ID NO: 431850 - DNA, 25 bp, Homo sapien
gaggccaagcgcgatgctgagaagc

SEQ ID NO: 431851 - DNA, 25 bp, Homo sapien
agctgaggccaagcgcgatgctgag

SEQ ID NO: 431852 - DNA, 25 bp, Homo sapien
gaccgagtttcagatactgtggaca

SEQ ID NO: 431853 - DNA, 25 bp, Homo sapien
agatactgtggacagcggagactcc

SEQ ID NO: 431854 - DNA, 25 bp, Homo sapien
gagtttcagatactgtggacagcgg

SEQ ID NO: 431855 - DNA, 25 bp, Homo sapien
ctgtgaggaccgagtttcagatact

SEQ ID NO: 431856 - DNA, 25 bp, Homo sapien
ctgaacatccttgagacatctgtgg

SEQ ID NO: 431857 - DNA, 25 bp, Homo sapien
ttgtgccctcgctgagatgaaggac

SEQ ID NO: 431858 - DNA, 25 bp, Homo sapien
ttgggggcgtcctggcactgaacat

SEQ ID NO: 431859 - DNA, 25 bp, Homo sapien
tgaaggacgcctagaccttagtgca

SEQ ID NO: 431860 - DNA, 25 bp, Homo sapien
tcacttgggttgtagtgttggccag

SEQ ID NO: 431861 - DNA, 25 bp, Homo sapien
tgtcctgctgatgtgtccacgcacc

SEQ ID NO: 431862 - DNA, 25 bp, Homo sapien
aatgacggttttcaccttgggcctg

SEQ ID NO: 431863 - DNA, 25 bp, Homo sapien
tgttggccagttttagccacatgaa

SEQ ID NO: 431864 - DNA, 25 bp, Homo sapien
tctttctgtggcagcgaaggtggca

SEQ ID NO: 431865 - DNA, 25 bp, Homo sapien
ggtcctgaggaaagcgcgctcctgt

SEQ ID NO: 431866 - DNA, 25 bp, Homo sapien
gcgaaggtggcattccctcctagca

SEQ ID NO: 431867 - DNA, 25 bp, Homo sapien
cctagcacctgcacactcggatggt

SEQ ID NO: 431868 - DNA, 25 bp, Homo sapien
gtcacccacggataggagtgccagg

SEQ ID NO: 431869 - DNA, 25 bp, Homo sapien
cattttatctcgtcgctttgctgtc

SEQ ID NO: 431870 - DNA, 25 bp, Homo sapien
tgtctgggaactttgtcacccacgg

SEQ ID NO: 431871 - DNA, 25 bp, Homo sapien
tgggccccattttatctcgtcgctt

SEQ ID NO: 431872 - DNA, 25 bp, Homo sapien
tgttggccacacgatctgggctgtg

SEQ ID NO: 431873 - DNA, 25 bp, Homo sapien
ggatgaccatggacctctgctgcca

SEQ ID NO: 431874 - DNA, 25 bp, Homo sapien
gaggcgctttttcatccttgcagca

SEQ ID NO: 431875 - DNA, 25 bp, Homo sapien
ggcagggctgacgtatctgagccac

SEQ ID NO: 431876 - DNA, 25 bp, Homo sapien
cctcccctaactcatttctagaact

SEQ ID NO: 431877 - DNA, 25 bp, Homo sapien
ctcccctaactcatttctagaactc

SEQ ID NO: 431878 - DNA, 25 bp, Homo sapien
gtgcattgtcactcggcgtttccga

SEQ ID NO: 431879 - DNA, 25 bp, Homo sapien
ggttctgttccctctactgtactgg

SEQ ID NO: 431880 - DNA, 25 bp, Homo sapien
tcctcccgtgtgatgctgactgctc

SEQ ID NO: 431881 - DNA, 25 bp, Homo sapien
ggaggctcctccttagggtgcattg

SEQ ID NO: 431882 - DNA, 25 bp, Homo sapien
gaaccagccgcactttccagtggag

SEQ ID NO: 431883 - DNA, 25 bp, Homo sapien
gaagatggccccaaagtctggtccc

SEQ ID NO: 431884 - DNA, 25 bp, Homo sapien
taatgcccagactcttaatacggtg

SEQ ID NO: 431885 - DNA, 25 bp, Homo sapien
caactagtgcagtccccatctggag

SEQ ID NO: 431886 - DNA, 25 bp, Homo sapien
cattttgtggcctagcggtaccagg

SEQ ID NO: 431887 - DNA, 25 bp, Homo sapien
tagacactcgtaagaagccaagcca

SEQ ID NO: 431888 - DNA, 25 bp, Homo sapien
cctccatgggaggatcgtgaacaca

SEQ ID NO: 431889 - DNA, 25 bp, Homo sapien
caaagttctgaaggacaagtggctg

SEQ ID NO: 431890 - DNA, 25 bp, Homo sapien
tcgtgttctccagtgagtgagtcgt

SEQ ID NO: 431891 - DNA, 25 bp, Homo sapien
gtgttctccagtgagtgagtcgtgg

SEQ ID NO: 431892 - DNA, 25 bp, Homo sapien
cgtgttctccagtgagtgagtcgtg

SEQ ID NO: 431893 - DNA, 25 bp, Homo sapien
ctcgtgttctccagtgagtgagtcg

SEQ ID NO: 431894 - DNA, 25 bp, Homo sapien
ctgtgcttgtcaccacctctgagga

SEQ ID NO: 431895 - DNA, 25 bp, Homo sapien
tggcgtggatgttatctggtcacca

SEQ ID NO: 431896 - DNA, 25 bp, Homo sapien
caccacctctgaggatggcgtggat

SEQ ID NO: 431897 - DNA, 25 bp, Homo sapien
gatggcgtggatgttatctggtcac

SEQ ID NO: 431898 - DNA, 25 bp, Homo sapien
tgtaggaatcataggagttaggtac

SEQ ID NO: 431899 - DNA, 25 bp, Homo sapien
tgtgggttcatttatgaggatgtag

SEQ ID NO: 431900 - DNA, 25 bp, Homo sapien
tgggaggccggttcgcgaacgccgc

SEQ ID NO: 431901 - DNA, 25 bp, Homo sapien
gccactgaatgacgcgggcagcttg

SEQ ID NO: 431902 - DNA, 25 bp, Homo sapien
gggtttggtgcttgctgcctgtagc

SEQ ID NO: 431903 - DNA, 25 bp, Homo sapien
ggaatggggtttggtgcttgctgcc

SEQ ID NO: 431904 - DNA, 25 bp, Homo sapien
agggagcggccagaagacagcccac

SEQ ID NO: 431905 - DNA, 25 bp, Homo sapien
agtctccaagaccagtccacccagg

SEQ ID NO: 431906 - DNA, 25 bp, Homo sapien
cggccggtgctactggatggatatt

SEQ ID NO: 431907 - DNA, 25 bp, Homo sapien
ctatcagtggaagatatcgctgttc

SEQ ID NO: 431908 - DNA, 25 bp, Homo sapien
gaatgcgtaccgctatctccaggaa

SEQ ID NO: 431909 - DNA, 25 bp, Homo sapien
tattccttcgcttctatcagtggaa

SEQ ID NO: 431910 - DNA, 25 bp, Homo sapien
ttccctgagctgttttcttccattc

SEQ ID NO: 431911 - DNA, 25 bp, Homo sapien
cttccctgagctgttttcttccatt

SEQ ID NO: 431912 - DNA, 25 bp, Homo sapien
gcgtccagcggcagccagacaggct

SEQ ID NO: 431913 - DNA, 25 bp, Homo sapien
ctggctcagggcgtccagcggcagc

SEQ ID NO: 431914 - DNA, 25 bp, Homo sapien
ctcagggcgtccagcggcagccaga

SEQ ID NO: 431915 - DNA, 25 bp, Homo sapien
ggcgtccagcggcagccagacaggc

SEQ ID NO: 431916 - DNA, 25 bp, Homo sapien
ttaaatgtaagtgccccgagctgcc

SEQ ID NO: 431917 - DNA, 25 bp, Homo sapien
aagtgccccgagctgccgtcagcag

SEQ ID NO: 431918 - DNA, 25 bp, Homo sapien
atgtaagtgccccgagctgccgtca

SEQ ID NO: 431919 - DNA, 25 bp, Homo sapien
gtaagtgccccgagctgccgtcagc

SEQ ID NO: 431920 - DNA, 25 bp, Homo sapien
ggctgggactgcgtctgtcactgcc

SEQ ID NO: 431921 - DNA, 25 bp, Homo sapien
cgcagctgtctaaggggcagtttcc

SEQ ID NO: 431922 - DNA, 25 bp, Homo sapien
tggcctcgcagctgtctaaggggca

SEQ ID NO: 431923 - DNA, 25 bp, Homo sapien
tgggactgcgtctgtcactgccagg

SEQ ID NO: 431924 - DNA, 25 bp, Homo sapien
tctctcgcggggcttcatgtaccag

SEQ ID NO: 431925 - DNA, 25 bp, Homo sapien
tggagggcgcagtcccgtctctcgc

SEQ ID NO: 431926 - DNA, 25 bp, Homo sapien
gcttcatgtaccagaccgtgttcat

SEQ ID NO: 431927 - DNA, 25 bp, Homo sapien
gggcttcatgtaccagaccgtgttc

SEQ ID NO: 431928 - DNA, 25 bp, Homo sapien
ggaacctgtcctcagactttcagag

SEQ ID NO: 431929 - DNA, 25 bp, Homo sapien
tgaccacgtgatttgctccgatgcc

SEQ ID NO: 431930 - DNA, 25 bp, Homo sapien
tcaggttgctatgttgttccccggc

SEQ ID NO: 431931 - DNA, 25 bp, Homo sapien
gtgtgtggagcacccatgccttggt

SEQ ID NO: 431932 - DNA, 25 bp, Homo sapien
tcacgttggaaacagcatggtgaga

SEQ ID NO: 431933 - DNA, 25 bp, Homo sapien
atgcatggcccgacgaccgggcgtc

SEQ ID NO: 431934 - DNA, 25 bp, Homo sapien
gtgagaaccagggtcttgtttccac

SEQ ID NO: 431935 - DNA, 25 bp, Homo sapien
gtttccactgacatccgtgttccca

SEQ ID NO: 431936 - DNA, 25 bp, Homo sapien
aaggccactggcgtctccttgacga

SEQ ID NO: 431937 - DNA, 25 bp, Homo sapien
tccttgacgactcagacccacagtg

SEQ ID NO: 431938 - DNA, 25 bp, Homo sapien
caaacccagaagtgtgggccggata

SEQ ID NO: 431939 - DNA, 25 bp, Homo sapien
acccaggggagctgccgaaatgcaa

SEQ ID NO: 431940 - DNA, 25 bp, Homo sapien
tcagataaacggtcggtgtaattcc

SEQ ID NO: 431941 - DNA, 25 bp, Homo sapien
cctcagataaacggtcggtgtaatt

SEQ ID NO: 431942 - DNA, 25 bp, Homo sapien
cagataaacggtcggtgtaattcca

SEQ ID NO: 431943 - DNA, 25 bp, Homo sapien
ataaacggtcggtgtaattccagtg

SEQ ID NO: 431944 - DNA, 25 bp, Homo sapien
taccctcagataaaccactggtgta

SEQ ID NO: 431945 - DNA, 25 bp, Homo sapien
tctgaactgcgagaggcgcctctga

SEQ ID NO: 431946 - DNA, 25 bp, Homo sapien
cattttgaacgtttgcccagctcag

SEQ ID NO: 431947 - DNA, 25 bp, Homo sapien
tcagtagctgctcctcgtaacgcag

SEQ ID NO: 431948 - DNA, 25 bp, Homo sapien
cgtaacgcagttccagtctgtgtgc

SEQ ID NO: 431949 - DNA, 25 bp, Homo sapien
tgagcacccgtctgagccagaatgc

SEQ ID NO: 431950 - DNA, 25 bp, Homo sapien
tgaagttggatgctcagacctgcag

SEQ ID NO: 431951 - DNA, 25 bp, Homo sapien
taacgttctcactgtggcctttggc

SEQ ID NO: 431952 - DNA, 25 bp, Homo sapien
ggtgacaccttacggatttcctgtg

SEQ ID NO: 431953 - DNA, 25 bp, Homo sapien
cgggaacagtcgagtggatagaaac

SEQ ID NO: 431954 - DNA, 25 bp, Homo sapien
caccgggaacagtcgagtggataga

SEQ ID NO: 431955 - DNA, 25 bp, Homo sapien
gtgtgcacgaggagatgtgaacacc

SEQ ID NO: 431956 - DNA, 25 bp, Homo sapien
gaacaccgggaacagtcgagtggat

SEQ ID NO: 431957 - DNA, 25 bp, Homo sapien
tccattcccccactttatagtcaag

SEQ ID NO: 431958 - DNA, 25 bp, Homo sapien
ccattcccccactttatagtcaagg

SEQ ID NO: 431959 - DNA, 25 bp, Homo sapien
cattcccccactttatagtcaagga

SEQ ID NO: 431960 - DNA, 25 bp, Homo sapien
cgatgacaataaccttcttagctct

SEQ ID NO: 431961 - DNA, 25 bp, Homo sapien
taaccttcttagctctcgtgtccct

SEQ ID NO: 431962 - DNA, 25 bp, Homo sapien
tcctaccccagcagttgaccaagct

SEQ ID NO: 431963 - DNA, 25 bp, Homo sapien
ttgtactcgatgacaataaccttct

SEQ ID NO: 431964 - DNA, 25 bp, Homo sapien
tgagctgtgttattcggtgcagtgc

SEQ ID NO: 431965 - DNA, 25 bp, Homo sapien
tggatttgtgagtgccggtgctgcg

SEQ ID NO: 431966 - DNA, 25 bp, Homo sapien
tagaacaggtgcagttggatttgtg

SEQ ID NO: 431967 - DNA, 25 bp, Homo sapien
ggtgctgcggcgttcacatgcagca

SEQ ID NO: 431968 - DNA, 25 bp, Homo sapien
aaagctgcctttacactcctccgaa

SEQ ID NO: 431969 - DNA, 25 bp, Homo sapien
gttgaagggaccctgcttatctcct

SEQ ID NO: 431970 - DNA, 25 bp, Homo sapien
agggaccctgcttatctccttgagg

SEQ ID NO: 431971 - DNA, 25 bp, Homo sapien
gcctttacactcctccgaagaagct

SEQ ID NO: 431972 - DNA, 25 bp, Homo sapien
ctggaatgtcgtcatcttcataaga

SEQ ID NO: 431973 - DNA, 25 bp, Homo sapien
ggaatgtcgtcatcttcataagaaa

SEQ ID NO: 431974 - DNA, 25 bp, Homo sapien
tggaatgtcgtcatcttcataagaa

SEQ ID NO: 431975 - DNA, 25 bp, Homo sapien
ggccgtgctgtcctgagatgagtga

SEQ ID NO: 431976 - DNA, 25 bp, Homo sapien
ccgtgctgtcctgagatgagtgaac

SEQ ID NO: 431977 - DNA, 25 bp, Homo sapien
tgggccgtgctgtcctgagatgagt

SEQ ID NO: 431978 - DNA, 25 bp, Homo sapien
cgtgctgtcctgagatgagtgaaca

SEQ ID NO: 431979 - DNA, 25 bp, Homo sapien
gagatgaacaaacacgtcggccgtg

SEQ ID NO: 431980 - DNA, 25 bp, Homo sapien
tgaacaaacacgtcggccgtgccgt

SEQ ID NO: 431981 - DNA, 25 bp, Homo sapien
ctgagatgaacaaacacgtcggccg

SEQ ID NO: 431982 - DNA, 25 bp, Homo sapien
gatgaacaaacacgtcggccgtgcc

SEQ ID NO: 431983 - DNA, 25 bp, Homo sapien
ccatgctgtcctgagatgaacgaac

SEQ ID NO: 431984 - DNA, 25 bp, Homo sapien
atgctgtcctgagatgaacgaacac

SEQ ID NO: 431985 - DNA, 25 bp, Homo sapien
catgctgtcctgagatgaacgaaca

SEQ ID NO: 431986 - DNA, 25 bp, Homo sapien
gtcctgagatgaacgaacacccggg

SEQ ID NO: 431987 - DNA, 25 bp, Homo sapien
tgaaatcaggccaatgcacgcggcc

SEQ ID NO: 431988 - DNA, 25 bp, Homo sapien
gcttacaggcaacggaacaaaatga

SEQ ID NO: 431989 - DNA, 25 bp, Homo sapien
tctttccagttacaggcgatgctgc

SEQ ID NO: 431990 - DNA, 25 bp, Homo sapien
cagagcttctatggcggattctcac

SEQ ID NO: 431991 - DNA, 25 bp, Homo sapien
tcttctcctcagcttggggcagcca

SEQ ID NO: 431992 - DNA, 25 bp, Homo sapien
tctcctcagcttggggcagccattg

SEQ ID NO: 431993 - DNA, 25 bp, Homo sapien
ttaaactcaaagcaagctcttctcc

SEQ ID NO: 431994 - DNA, 25 bp, Homo sapien
aactcaaagcaagctcttctcctca

SEQ ID NO: 431995 - DNA, 25 bp, Homo sapien
ataaatctcggcgactcggccccgt

SEQ ID NO: 431996 - DNA, 25 bp, Homo sapien
ccgttgcagacataaatctcggcga

SEQ ID NO: 431997 - DNA, 25 bp, Homo sapien
ggtcaggaggccgttgcagacataa

SEQ ID NO: 431998 - DNA, 25 bp, Homo sapien
gtcctgctggtgaccggcctggacc

SEQ ID NO: 431999 - DNA, 25 bp, Homo sapien
tgtgttcgacgttttatcaaaggcc

SEQ ID NO: 432000 - DNA, 25 bp, Homo sapien
ggactggacatgagagccccttggt

SEQ ID NO: 432001 - DNA, 25 bp, Homo sapien
tcaagaccctcgagattaacggtgc

SEQ ID NO: 432002 - DNA, 25 bp, Homo sapien
cagagggctgtgtcttactagaaac

SEQ ID NO: 432003 - DNA, 25 bp, Homo sapien
tcggtgacatggagaccatgctgca

SEQ ID NO: 432004 - DNA, 25 bp, Homo sapien
catccatgccccttatctgcgtctg

SEQ ID NO: 432005 - DNA, 25 bp, Homo sapien
tctgcgtcggtgacatggagaccat

SEQ ID NO: 432006 - DNA, 25 bp, Homo sapien
ccttatctgcgtctgcgtcggtgac

SEQ ID NO: 432007 - DNA, 25 bp, Homo sapien
gggaggatctcttcctggcttgaaa

SEQ ID NO: 432008 - DNA, 25 bp, Homo sapien
caaggtgccagcataggtgatttct

SEQ ID NO: 432009 - DNA, 25 bp, Homo sapien
tacggccacactggaagttagggct

SEQ ID NO: 432010 - DNA, 25 bp, Homo sapien
gaaaaatatttggtgtctctaagga

SEQ ID NO: 432011 - DNA, 25 bp, Homo sapien
cagccagcggtgaactcagtagcct

SEQ ID NO: 432012 - DNA, 25 bp, Homo sapien
acgaacattccttccgtgagggaga

SEQ ID NO: 432013 - DNA, 25 bp, Homo sapien
aagcacttcggcattcaccctggag

SEQ ID NO: 432014 - DNA, 25 bp, Homo sapien
caaacaccacatggcggaggatgag

SEQ ID NO: 432015 - DNA, 25 bp, Homo sapien
tgttgcaggctgttacctcacacgc

SEQ ID NO: 432016 - DNA, 25 bp, Homo sapien
tggttggtcccagcttggagtcgtc

SEQ ID NO: 432017 - DNA, 25 bp, Homo sapien
acagccggcggtgttgatgactcca

SEQ ID NO: 432018 - DNA, 25 bp, Homo sapien
tgtgtagtccccagcggctggccag

SEQ ID NO: 432019 - DNA, 25 bp, Homo sapien
caagtgtgaaggtttgtctctggac

SEQ ID NO: 432020 - DNA, 25 bp, Homo sapien
tgaaactgggacgtgtgagtgaccc

SEQ ID NO: 432021 - DNA, 25 bp, Homo sapien
ttccgtgtgtccgtccttaagccag

SEQ ID NO: 432022 - DNA, 25 bp, Homo sapien
tgaaaatcaacggactacaagtgtg

SEQ ID NO: 432023 - DNA, 25 bp, Homo sapien
aaccactctgggctaaaacgaggca

SEQ ID NO: 432024 - DNA, 25 bp, Homo sapien
gacgagttcacggaagctccaggat

SEQ ID NO: 432025 - DNA, 25 bp, Homo sapien
ctcggttctgctccatggacggcgc

SEQ ID NO: 432026 - DNA, 25 bp, Homo sapien
acttcctcggaaagctgcggtctgg

SEQ ID NO: 432027 - DNA, 25 bp, Homo sapien
gcagccgtcagaccttgagttttgc

SEQ ID NO: 432028 - DNA, 25 bp, Homo sapien
tatttgggcggtgttctgagcagcc

SEQ ID NO: 432029 - DNA, 25 bp, Homo sapien
agttttgctgtcaaaagctcttctc

SEQ ID NO: 432030 - DNA, 25 bp, Homo sapien
cacctggagtgttcgggccgctatt

SEQ ID NO: 432031 - DNA, 25 bp, Homo sapien
ccagggaaacatcctggcgttggcg

SEQ ID NO: 432032 - DNA, 25 bp, Homo sapien
aaacatcctggcgttggcgtagcca

SEQ ID NO: 432033 - DNA, 25 bp, Homo sapien
aaggacccggtgagtccacacacag

SEQ ID NO: 432034 - DNA, 25 bp, Homo sapien
ttggcgtagccagcctgtgagtcac

SEQ ID NO: 432035 - DNA, 25 bp, Homo sapien
tgttactgatatgagggatcttttt

SEQ ID NO: 432036 - DNA, 25 bp, Homo sapien
ttactgatatgagggatctttttgg

SEQ ID NO: 432037 - DNA, 25 bp, Homo sapien
tgatggatgttactgatatgaggga

SEQ ID NO: 432038 - DNA, 25 bp, Homo sapien
gatggatgttactgatatgagggat

SEQ ID NO: 432039 - DNA, 25 bp, Homo sapien
ttgccaggaagaggcattcgcactg

SEQ ID NO: 432040 - DNA, 25 bp, Homo sapien
tctcactaagcccagctggccgaat

SEQ ID NO: 432041 - DNA, 25 bp, Homo sapien
aagctcctctccaaaccgacttgag

SEQ ID NO: 432042 - DNA, 25 bp, Homo sapien
ggccgaatccgtgcaaagctcctct

SEQ ID NO: 432043 - DNA, 25 bp, Homo sapien
ctctcgggtatgcagtgtgccagtc

SEQ ID NO: 432044 - DNA, 25 bp, Homo sapien
actgccagaatatgcgatgggctct

SEQ ID NO: 432045 - DNA, 25 bp, Homo sapien
tatgcgatgggctctcgggtatgca

SEQ ID NO: 432046 - DNA, 25 bp, Homo sapien
gctctcgggtatgcagtgtgccagt

SEQ ID NO: 432047 - DNA, 25 bp, Homo sapien
cctgccatggagacctccggctgac

SEQ ID NO: 432048 - DNA, 25 bp, Homo sapien
aggcagtgctaagccggccacactg

SEQ ID NO: 432049 - DNA, 25 bp, Homo sapien
ccagcaggcagtgctaagccggcca

SEQ ID NO: 432050 - DNA, 25 bp, Homo sapien
agcaggcagtgctaagccggccaca

SEQ ID NO: 432051 - DNA, 25 bp, Homo sapien
ggaggcagcgcacggggacgctgga

SEQ ID NO: 432052 - DNA, 25 bp, Homo sapien
ctgaaggcctgcatgtctcaccaca

SEQ ID NO: 432053 - DNA, 25 bp, Homo sapien
ggcctgaaggcctgcatgtctcacc

SEQ ID NO: 432054 - DNA, 25 bp, Homo sapien
gggcactgtggtcgtccactggttc

SEQ ID NO: 432055 - DNA, 25 bp, Homo sapien
actgtggtcgtccactggttctgtt

SEQ ID NO: 432056 - DNA, 25 bp, Homo sapien
cctgtgcagtagtcacgcctgccat

SEQ ID NO: 432057 - DNA, 25 bp, Homo sapien
cactcgctggttgtggaaactgcag

SEQ ID NO: 432058 - DNA, 25 bp, Homo sapien
ggggccccgtaaagcccagcagcat

SEQ ID NO: 432059 - DNA, 25 bp, Homo sapien
gcccggagcccgtccaggatcagtg

SEQ ID NO: 432060 - DNA, 25 bp, Homo sapien
atcacccgggcaagtctcaatggct

SEQ ID NO: 432061 - DNA, 25 bp, Homo sapien
tggcagcagatagaacaccgggtct

SEQ ID NO: 432062 - DNA, 25 bp, Homo sapien
aatgcctcctgccaagacggtgact

SEQ ID NO: 432063 - DNA, 25 bp, Homo sapien
gacataaggagtccaaagtgccctg

SEQ ID NO: 432064 - DNA, 25 bp, Homo sapien
gaccgaaggcactgataacatgggc

SEQ ID NO: 432065 - DNA, 25 bp, Homo sapien
gattccatgaaagagcaactgcccc

SEQ ID NO: 432066 - DNA, 25 bp, Homo sapien
ggtgaacctgctctgcgattccatg

SEQ ID NO: 432067 - DNA, 25 bp, Homo sapien
ggctggcttgctgatcgactgattg

SEQ ID NO: 432068 - DNA, 25 bp, Homo sapien
gtgttgctaacagacccacactagg

SEQ ID NO: 432069 - DNA, 25 bp, Homo sapien
taacaaacagattacggcaaaagtg

SEQ ID NO: 432070 - DNA, 25 bp, Homo sapien
ggacctagtgactgactgctaacaa

SEQ ID NO: 432071 - DNA, 25 bp, Homo sapien
cacactaggcagtctctaaaatagc

SEQ ID NO: 432072 - DNA, 25 bp, Homo sapien
aatgtaaactatggtccacgccaca

SEQ ID NO: 432073 - DNA, 25 bp, Homo sapien
tcctggtgcaggatcgatgaggctc

SEQ ID NO: 432074 - DNA, 25 bp, Homo sapien
cagtactcctgtgctattgtgaaag

SEQ ID NO: 432075 - DNA, 25 bp, Homo sapien
cacgtagtatagacaacctcccaga

SEQ ID NO: 432076 - DNA, 25 bp, Homo sapien
tcagcttgctcgttaggaaccgtgc

SEQ ID NO: 432077 - DNA, 25 bp, Homo sapien
tagtgggacagacaagagagaagcc

SEQ ID NO: 432078 - DNA, 25 bp, Homo sapien
tcagagcctgcatcagttggtcccc

SEQ ID NO: 432079 - DNA, 25 bp, Homo sapien
gagagcttttccacacggagccact

SEQ ID NO: 432080 - DNA, 25 bp, Homo sapien
cccaggttctcagggcatttcagca

SEQ ID NO: 432081 - DNA, 25 bp, Homo sapien
cccctgctgagagtcgtgggctaca

SEQ ID NO: 432082 - DNA, 25 bp, Homo sapien
taccgtggacagaaggtaagatgcc

SEQ ID NO: 432083 - DNA, 25 bp, Homo sapien
taagatgcccagattacctgcaggg

SEQ ID NO: 432084 - DNA, 25 bp, Homo sapien
tcttccagaccctcagatcgtgtgc

SEQ ID NO: 432085 - DNA, 25 bp, Homo sapien
cctcacctgagggatgaatgtgcag

SEQ ID NO: 432086 - DNA, 25 bp, Homo sapien
tctaggcagatcagtgaacggccgc

SEQ ID NO: 432087 - DNA, 25 bp, Homo sapien
gacctggtcgctgagaagttcatcg

SEQ ID NO: 432088 - DNA, 25 bp, Homo sapien
tctctttataagaaccctggtcatt

SEQ ID NO: 432089 - DNA, 25 bp, Homo sapien
tggccaccgtgtcccttgctgcggc

SEQ ID NO: 432090 - DNA, 25 bp, Homo sapien
cctggtcattgaatttaaggcccac

SEQ ID NO: 432091 - DNA, 25 bp, Homo sapien
accgtgtcccttgctgcggctgcat

SEQ ID NO: 432092 - DNA, 25 bp, Homo sapien
tttaatggagaacttctctggagac

SEQ ID NO: 432093 - DNA, 25 bp, Homo sapien
tttttaatggagaacttctctggag

SEQ ID NO: 432094 - DNA, 25 bp, Homo sapien
ttaatggagaacttctctggagaca

SEQ ID NO: 432095 - DNA, 25 bp, Homo sapien
attttttaatggagaacttctctgg

SEQ ID NO: 432096 - DNA, 25 bp, Homo sapien
tgaggacagggccagtaccgtgctc

SEQ ID NO: 432097 - DNA, 25 bp, Homo sapien
gagccactggttgaagggtggacgg

SEQ ID NO: 432098 - DNA, 25 bp, Homo sapien
aactgtccagacctgccgggagctg

SEQ ID NO: 432099 - DNA, 25 bp, Homo sapien
aagggtggacgggaactgaggacag

SEQ ID NO: 432100 - DNA, 25 bp, Homo sapien
tatccttccagcgtcgaaggtcctg

SEQ ID NO: 432101 - DNA, 25 bp, Homo sapien
cagcgtcgaaggtcctgctgtccct

SEQ ID NO: 432102 - DNA, 25 bp, Homo sapien
tccagcgtcgaaggtcctgctgtcc

SEQ ID NO: 432103 - DNA, 25 bp, Homo sapien
tccttccagcgtcgaaggtcctgct

SEQ ID NO: 432104 - DNA, 25 bp, Homo sapien
ggaccctggcgctgaggtctgtctc

SEQ ID NO: 432105 - DNA, 25 bp, Homo sapien
gggacctgcactgaaccccaggtcc

SEQ ID NO: 432106 - DNA, 25 bp, Homo sapien
tggcgctgaggtctgtctcctcacg

SEQ ID NO: 432107 - DNA, 25 bp, Homo sapien
gaggtctgtctcctcacgctgcaac

SEQ ID NO: 432108 - DNA, 25 bp, Homo sapien
aactttactggaggtcacatgggac

SEQ ID NO: 432109 - DNA, 25 bp, Homo sapien
gggccccacacgaacaagctgtgtc

SEQ ID NO: 432110 - DNA, 25 bp, Homo sapien
cgggccccacacgaacaagctgtgt

SEQ ID NO: 432111 - DNA, 25 bp, Homo sapien
ccaaaactttactggaggtcacatg

SEQ ID NO: 432112 - DNA, 25 bp, Homo sapien
ggatgggcgagggaggggccacaga

SEQ ID NO: 432113 - DNA, 25 bp, Homo sapien
ccctctggggatgggcgagggaggg

SEQ ID NO: 432114 - DNA, 25 bp, Homo sapien
ggggccacagagcccggagaggcct

SEQ ID NO: 432115 - DNA, 25 bp, Homo sapien
cgaggtcacagctctgccctctggg

SEQ ID NO: 432116 - DNA, 25 bp, Homo sapien
cactcctgccgggtctccaagcagt

SEQ ID NO: 432117 - DNA, 25 bp, Homo sapien
tgccgggtctccaagcagtccagca

SEQ ID NO: 432118 - DNA, 25 bp, Homo sapien
gtctccaagcagtccagcaccagtg

SEQ ID NO: 432119 - DNA, 25 bp, Homo sapien
ggtctccaagcagtccagcaccagt

SEQ ID NO: 432120 - DNA, 25 bp, Homo sapien
tgaaatatgcgccaaacacgcccat

SEQ ID NO: 432121 - DNA, 25 bp, Homo sapien
ccctcaggttgatgagcacgttgaa

SEQ ID NO: 432122 - DNA, 25 bp, Homo sapien
ttaaatgcctcgtctgtgatgtccc

SEQ ID NO: 432123 - DNA, 25 bp, Homo sapien
tcgtctgtgatgtccctcaggttga

SEQ ID NO: 432124 - DNA, 25 bp, Homo sapien
ccctacatggatcaaggctgagcaa

SEQ ID NO: 432125 - DNA, 25 bp, Homo sapien
gcaaactgccggaaggagggtctct

SEQ ID NO: 432126 - DNA, 25 bp, Homo sapien
cgctttcgccccacagagggctaag

SEQ ID NO: 432127 - DNA, 25 bp, Homo sapien
gtctctgcctgacgggctctgggac

SEQ ID NO: 432128 - DNA, 25 bp, Homo sapien
gtgaggcatctacttccaagagctg

SEQ ID NO: 432129 - DNA, 25 bp, Homo sapien
tataaagaacccgaagaccatgagg

SEQ ID NO: 432130 - DNA, 25 bp, Homo sapien
agtgctgagcccatgagagagacgc

SEQ ID NO: 432131 - DNA, 25 bp, Homo sapien
gaccatgaggtcttagggcagctgc

SEQ ID NO: 432132 - DNA, 25 bp, Homo sapien
gagatcttagaaggcagcggacacc

SEQ ID NO: 432133 - DNA, 25 bp, Homo sapien
gaactgcccgtgaagtgaggtctcc

SEQ ID NO: 432134 - DNA, 25 bp, Homo sapien
tatctattgtacagccagggtccca

SEQ ID NO: 432135 - DNA, 25 bp, Homo sapien
ggtctcgacctcctctattcaagtg

SEQ ID NO: 432136 - DNA, 25 bp, Homo sapien
ccacagcgaggccaccgtctccgcc

SEQ ID NO: 432137 - DNA, 25 bp, Homo sapien
acagcgaggccaccgtctccgccag

SEQ ID NO: 432138 - DNA, 25 bp, Homo sapien
cacagcgaggccaccgtctccgcca

SEQ ID NO: 432139 - DNA, 25 bp, Homo sapien
agcacccaggtactcgggatcctgg

SEQ ID NO: 432140 - DNA, 25 bp, Homo sapien
aggtactcgggatcctggccaccaa

SEQ ID NO: 432141 - DNA, 25 bp, Homo sapien
aaacacccagcacgcccaggccaac

SEQ ID NO: 432142 - DNA, 25 bp, Homo sapien
gaagcgggcgatgggaagtcattcc

SEQ ID NO: 432143 - DNA, 25 bp, Homo sapien
ctgtccttttcctcaggtgtgttct

SEQ ID NO: 432144 - DNA, 25 bp, Homo sapien
ccttttcctcaggtgtgttcttggg

SEQ ID NO: 432145 - DNA, 25 bp, Homo sapien
tgttcttggggagcctcattgcttc

SEQ ID NO: 432146 - DNA, 25 bp, Homo sapien
gtccttttcctcaggtgtgttcttg

SEQ ID NO: 432147 - DNA, 25 bp, Homo sapien
gctgtagcaaggagcatgtcccagg

SEQ ID NO: 432148 - DNA, 25 bp, Homo sapien
taaagagacagaaccactgggcgag

SEQ ID NO: 432149 - DNA, 25 bp, Homo sapien
agacagaaccactgggcgagggacc

SEQ ID NO: 432150 - DNA, 25 bp, Homo sapien
cgtagggggagcagccatgccctct

SEQ ID NO: 432151 - DNA, 25 bp, Homo sapien
gcataagaggctcagactgtgcaga

SEQ ID NO: 432152 - DNA, 25 bp, Homo sapien
gatcctttgaccattccgacagcag

SEQ ID NO: 432153 - DNA, 25 bp, Homo sapien
ggagccctactcacacggactgtgg

SEQ ID NO: 432154 - DNA, 25 bp, Homo sapien
taccctcgaccatggatgagagcaa

SEQ ID NO: 432155 - DNA, 25 bp, Homo sapien
gcctgtccgggtctaaagttcatca

SEQ ID NO: 432156 - DNA, 25 bp, Homo sapien
taatgagaagcgcatcccagaaagc

SEQ ID NO: 432157 - DNA, 25 bp, Homo sapien
taagagtcattgtcagaagccccac

SEQ ID NO: 432158 - DNA, 25 bp, Homo sapien
aatactagaaggcagcgaaagcccc

SEQ ID NO: 432159 - DNA, 25 bp, Homo sapien
tacaggtcgtaaaggtagcgaaggc

SEQ ID NO: 432160 - DNA, 25 bp, Homo sapien
cttctcagtgagctcttacaggtgg

SEQ ID NO: 432161 - DNA, 25 bp, Homo sapien
tgactggaaacggtgatcagcgtct

SEQ ID NO: 432162 - DNA, 25 bp, Homo sapien
caggtggcgcgtagcacagctgtta

SEQ ID NO: 432163 - DNA, 25 bp, Homo sapien
ggcgtcggcatccaccagcgtggtt

SEQ ID NO: 432164 - DNA, 25 bp, Homo sapien
ccgcatcgtcgtgtccagggactgg

SEQ ID NO: 432165 - DNA, 25 bp, Homo sapien
cccgtaggtcatgaggcccaccatg

SEQ ID NO: 432166 - DNA, 25 bp, Homo sapien
ttagcttggccgaagcctcgcggaa

SEQ ID NO: 432167 - DNA, 25 bp, Homo sapien
cgggggccgcagagcgggcacccac

SEQ ID NO: 432168 - DNA, 25 bp, Homo sapien
cgagccgcccccgggggccgcagag

SEQ ID NO: 432169 - DNA, 25 bp, Homo sapien
agcggccgccgccaccgagccgccc

SEQ ID NO: 432170 - DNA, 25 bp, Homo sapien
cgcagcggccgccgccaccgagccg

SEQ ID NO: 432171 - DNA, 25 bp, Homo sapien
ccccacgaaggcgcgcagggacttg

SEQ ID NO: 432172 - DNA, 25 bp, Homo sapien
ctcccccacgaaggcgcgcagggac

SEQ ID NO: 432173 - DNA, 25 bp, Homo sapien
ccacgaaggcgcgcagggacttgct

SEQ ID NO: 432174 - DNA, 25 bp, Homo sapien
cgaaggcgcgcagggacttgctgcc

SEQ ID NO: 432175 - DNA, 25 bp, Homo sapien
gatgatccgctccttagggctgaag

SEQ ID NO: 432176 - DNA, 25 bp, Homo sapien
tgatccgctccttagggctgaaggg

SEQ ID NO: 432177 - DNA, 25 bp, Homo sapien
ctgaaggggcacagggagtccaggc

SEQ ID NO: 432178 - DNA, 25 bp, Homo sapien
tcgatgatccgctccttagggctga

SEQ ID NO: 432179 - DNA, 25 bp, Homo sapien
cccgcgggtcccacccttgcggcag

SEQ ID NO: 432180 - DNA, 25 bp, Homo sapien
gggtcccacccttgcggcagccgcc

SEQ ID NO: 432181 - DNA, 25 bp, Homo sapien
ggcttggagtggaaacggcctcggc

SEQ ID NO: 432182 - DNA, 25 bp, Homo sapien
aaacggcctcggcgcgtctccacca

SEQ ID NO: 432183 - DNA, 25 bp, Homo sapien
cctctgccccgccaggagccctgtg

SEQ ID NO: 432184 - DNA, 25 bp, Homo sapien
ccgagcacacaggtgcttttgcggg

SEQ ID NO: 432185 - DNA, 25 bp, Homo sapien
ctgccccgagcacacaggtgctttt

SEQ ID NO: 432186 - DNA, 25 bp, Homo sapien
ggcaccccgtacaggcttctggaaa

SEQ ID NO: 432187 - DNA, 25 bp, Homo sapien
aagttgtgacagtcccatttaagat

SEQ ID NO: 432188 - DNA, 25 bp, Homo sapien
aagattagaattcattctgggaaac

SEQ ID NO: 432189 - DNA, 25 bp, Homo sapien
tcagaacacgttggctatgcgaccc

SEQ ID NO: 432190 - DNA, 25 bp, Homo sapien
tctgggaaacccattcagaacacgt

SEQ ID NO: 432191 - DNA, 25 bp, Homo sapien
tagagaactaaataactgggtcagc

SEQ ID NO: 432192 - DNA, 25 bp, Homo sapien
tctgcagtgacctcgagtgaaagga

SEQ ID NO: 432193 - DNA, 25 bp, Homo sapien
tatgcccgagactaaacaaggacgg

SEQ ID NO: 432194 - DNA, 25 bp, Homo sapien
ggaatccacaagtcacgagagctaa

SEQ ID NO: 432195 - DNA, 25 bp, Homo sapien
ccctgcacgcccctgtccgaccctt

SEQ ID NO: 432196 - DNA, 25 bp, Homo sapien
tgcacgcccctgtccgacccttcct

SEQ ID NO: 432197 - DNA, 25 bp, Homo sapien
tgtccgacccttcctcggcagcccg

SEQ ID NO: 432198 - DNA, 25 bp, Homo sapien
gcccctgtccgacccttcctcggca

SEQ ID NO: 432199 - DNA, 25 bp, Homo sapien
gaggttctccttctcgcagtagaag

SEQ ID NO: 432200 - DNA, 25 bp, Homo sapien
gcagtagaaggcggccgcatccagc

SEQ ID NO: 432201 - DNA, 25 bp, Homo sapien
agtagaaggcggccgcatccagcag

SEQ ID NO: 432202 - DNA, 25 bp, Homo sapien
ggttctccttctcgcagtagaaggc

SEQ ID NO: 432203 - DNA, 25 bp, Homo sapien
tgtgcttctcggcaggtctcctcgt

SEQ ID NO: 432204 - DNA, 25 bp, Homo sapien
tctcctcgtagaccgtgtgcagtgc

SEQ ID NO: 432205 - DNA, 25 bp, Homo sapien
tgtgcagtgccgtgacctcaaagtc

SEQ ID NO: 432206 - DNA, 25 bp, Homo sapien
caaagtccagaagattggtggacac

SEQ ID NO: 432207 - DNA, 25 bp, Homo sapien
tgccgagcaggttgatgttaaaagc

SEQ ID NO: 432208 - DNA, 25 bp, Homo sapien
agctgggaccaaagtcgggcgccca

SEQ ID NO: 432209 - DNA, 25 bp, Homo sapien
tgctcccgcaggttgagcgcgatgc

SEQ ID NO: 432210 - DNA, 25 bp, Homo sapien
cgatgcggtgggcttgctcctttgt

SEQ ID NO: 432211 - DNA, 25 bp, Homo sapien
tcctggctgcctcgccgtacaggta

SEQ ID NO: 432212 - DNA, 25 bp, Homo sapien
ccggcagggtccggcgactgtccat

SEQ ID NO: 432213 - DNA, 25 bp, Homo sapien
atcctggctgcctcgccgtacaggt

SEQ ID NO: 432214 - DNA, 25 bp, Homo sapien
gtccggcgactgtccatcctggctg

SEQ ID NO: 432215 - DNA, 25 bp, Homo sapien
ctgcaggagagcccggcggtcaggc

SEQ ID NO: 432216 - DNA, 25 bp, Homo sapien
gatgaaggggcagacgtctagggcc

SEQ ID NO: 432217 - DNA, 25 bp, Homo sapien
cactcatccacgctgacgcccctca

SEQ ID NO: 432218 - DNA, 25 bp, Homo sapien
ctgacgcccctcacggggatgaagg

SEQ ID NO: 432219 - DNA, 25 bp, Homo sapien
gccaaaggcctgggcgcagagcaca

SEQ ID NO: 432220 - DNA, 25 bp, Homo sapien
tacacggtgcggttggtggaagggc

SEQ ID NO: 432221 - DNA, 25 bp, Homo sapien
cttggtgcctgctcatgtcgataag

SEQ ID NO: 432222 - DNA, 25 bp, Homo sapien
tgcgtccacatccagcagcacgcag

SEQ ID NO: 432223 - DNA, 25 bp, Homo sapien
gataagtcgggaagctacccgggca

SEQ ID NO: 432224 - DNA, 25 bp, Homo sapien
gaaaagttggggacgcattccacca

SEQ ID NO: 432225 - DNA, 25 bp, Homo sapien
tccgaaaagttggggacgcattcca

SEQ ID NO: 432226 - DNA, 25 bp, Homo sapien
ttggggacgcattccaccagctggg

SEQ ID NO: 432227 - DNA, 25 bp, Homo sapien
ggacgcattccaccagctgggacat

SEQ ID NO: 432228 - DNA, 25 bp, Homo sapien
tcattaaccagcaaggcacaaggag

SEQ ID NO: 432229 - DNA, 25 bp, Homo sapien
cggcttctcattaaccagcaaggca

SEQ ID NO: 432230 - DNA, 25 bp, Homo sapien
ggcctttatacgctcaccggcagca

SEQ ID NO: 432231 - DNA, 25 bp, Homo sapien
gccagggcctttatacgctcaccgg

SEQ ID NO: 432232 - DNA, 25 bp, Homo sapien
ccagctactgctggaccagggcttg

SEQ ID NO: 432233 - DNA, 25 bp, Homo sapien
gcatgcatttcctacccagctactg

SEQ ID NO: 432234 - DNA, 25 bp, Homo sapien
atacactcgtgacccaggacggtgc

SEQ ID NO: 432235 - DNA, 25 bp, Homo sapien
agcccagcaaatcgcctgtcaggag

SEQ ID NO: 432236 - DNA, 25 bp, Homo sapien
ccaggcaggccatacacttttctaa

SEQ ID NO: 432237 - DNA, 25 bp, Homo sapien
cccagggctactgattccagggcca

SEQ ID NO: 432238 - DNA, 25 bp, Homo sapien
gaaagaatctcagctatgcccacac

SEQ ID NO: 432239 - DNA, 25 bp, Homo sapien
gagacaaacatagtgggcccataag

SEQ ID NO: 432240 - DNA, 25 bp, Homo sapien
tccggggctcccctgtgctcgtcca

SEQ ID NO: 432241 - DNA, 25 bp, Homo sapien
ctgacatggtctccggggctcccct

SEQ ID NO: 432242 - DNA, 25 bp, Homo sapien
cctgtgctcgtccacccccagcacc

SEQ ID NO: 432243 - DNA, 25 bp, Homo sapien
gacatggtctccggggctcccctgt

SEQ ID NO: 432244 - DNA, 25 bp, Homo sapien
acgcgtttactgcaggcaaggcggc

SEQ ID NO: 432245 - DNA, 25 bp, Homo sapien
gtgagaagcactccgcaggtgcggg

SEQ ID NO: 432246 - DNA, 25 bp, Homo sapien
ggttggaacaaacgcgtttactgca

SEQ ID NO: 432247 - DNA, 25 bp, Homo sapien
caaacgcgtttactgcaggcaaggc

SEQ ID NO: 432248 - DNA, 25 bp, Homo sapien
gcagcagcgagtcgcccaggaactt

SEQ ID NO: 432249 - DNA, 25 bp, Homo sapien
tcaggattccgtaggtgttgatgag

SEQ ID NO: 432250 - DNA, 25 bp, Homo sapien
tgttgatgaggaactcgctgaacgc

SEQ ID NO: 432251 - DNA, 25 bp, Homo sapien
tccttggagagctcgcacaggcagt

SEQ ID NO: 432252 - DNA, 25 bp, Homo sapien
ctcgcgcagcttcctctcgtccacg

SEQ ID NO: 432253 - DNA, 25 bp, Homo sapien
gcagcttcctctcgtccacggagcc

SEQ ID NO: 432254 - DNA, 25 bp, Homo sapien
gcgcagcttcctctcgtccacggag

SEQ ID NO: 432255 - DNA, 25 bp, Homo sapien
cgcgcagcttcctctcgtccacgga

SEQ ID NO: 432256 - DNA, 25 bp, Homo sapien
gtcacgcccgggaacacgtaggcca

SEQ ID NO: 432257 - DNA, 25 bp, Homo sapien
gatcttctcggggatgttggccacc

SEQ ID NO: 432258 - DNA, 25 bp, Homo sapien
acgtaggccaggatgcggcggtcca

SEQ ID NO: 432259 - DNA, 25 bp, Homo sapien
accacgcgcgcgtccttctcggcgc

SEQ ID NO: 432260 - DNA, 25 bp, Homo sapien
tcctggtcctgtccccggtgggcag

SEQ ID NO: 432261 - DNA, 25 bp, Homo sapien
ctcctggtcctgtccccggtgggca

SEQ ID NO: 432262 - DNA, 25 bp, Homo sapien
ggcaggctgctctccgagaaacaca

SEQ ID NO: 432263 - DNA, 25 bp, Homo sapien
aggctgctctccgagaaacacacct

SEQ ID NO: 432264 - DNA, 25 bp, Homo sapien
gaaggccttgaagggtgcctgggag

SEQ ID NO: 432265 - DNA, 25 bp, Homo sapien
tcctgtcggtgcctcggtggctatg

SEQ ID NO: 432266 - DNA, 25 bp, Homo sapien
tctgcagttgggagggcgtgtcggc

SEQ ID NO: 432267 - DNA, 25 bp, Homo sapien
gcaacactcgtgaaccttccgaaat

SEQ ID NO: 432268 - DNA, 25 bp, Homo sapien
tgggtgggagcaggtcgtggccgcc

SEQ ID NO: 432269 - DNA, 25 bp, Homo sapien
cggcctcagggtaggcatgcgccct

SEQ ID NO: 432270 - DNA, 25 bp, Homo sapien
cggctcatcagctcgccgccttcag

SEQ ID NO: 432271 - DNA, 25 bp, Homo sapien
ttctcgctcaggagccggctcatca

SEQ ID NO: 432272 - DNA, 25 bp, Homo sapien
cgggtgcgtccctccttgtccctca

SEQ ID NO: 432273 - DNA, 25 bp, Homo sapien
gcgggtgcgtccctccttgtccctc

SEQ ID NO: 432274 - DNA, 25 bp, Homo sapien
cacatgctttggagcactgggtggc

SEQ ID NO: 432275 - DNA, 25 bp, Homo sapien
tagagcaggcgtctgtcctcagtca

SEQ ID NO: 432276 - DNA, 25 bp, Homo sapien
tcagtgcgaccgacttgaaacccac

SEQ ID NO: 432277 - DNA, 25 bp, Homo sapien
tgcctgcacgtaactgaggacgccc

SEQ ID NO: 432278 - DNA, 25 bp, Homo sapien
tcagcagccgggatgcaacagatgg

SEQ ID NO: 432279 - DNA, 25 bp, Homo sapien
tgcaacagatgggtcatctcatcct

SEQ ID NO: 432280 - DNA, 25 bp, Homo sapien
tgttttatcagcagccgggatgcaa

SEQ ID NO: 432281 - DNA, 25 bp, Homo sapien
tcatgggaagggacgtacggcagaa

SEQ ID NO: 432282 - DNA, 25 bp, Homo sapien
gaatcgctgcgtcctgtgacttgaa

SEQ ID NO: 432283 - DNA, 25 bp, Homo sapien
caaaaagtcctcttcgtggaacagg

SEQ ID NO: 432284 - DNA, 25 bp, Homo sapien
tcacgcaagttaagagcacagccgc

SEQ ID NO: 432285 - DNA, 25 bp, Homo sapien
ggtctaccttagcacatgggccacg

SEQ ID NO: 432286 - DNA, 25 bp, Homo sapien
tttccctcaggtaactggagacgca

SEQ ID NO: 432287 - DNA, 25 bp, Homo sapien
tatcttcctggatatgcttatggcc

SEQ ID NO: 432288 - DNA, 25 bp, Homo sapien
cctcctatgtggacattgtatcacg

SEQ ID NO: 432289 - DNA, 25 bp, Homo sapien
atgcagtgaaagaaagttcctccta

SEQ ID NO: 432290 - DNA, 25 bp, Homo sapien
ggaatcaatgtctgtttattaaggc

SEQ ID NO: 432291 - DNA, 25 bp, Homo sapien
tgaccatggctaggagtcccaggga

SEQ ID NO: 432292 - DNA, 25 bp, Homo sapien
ctggaaaaccgttttgtacagtctg

SEQ ID NO: 432293 - DNA, 25 bp, Homo sapien
attaaggcagatgctcataaaagtg

SEQ ID NO: 432294 - DNA, 25 bp, Homo sapien
tgacagatgtcaagggtcccaacac

SEQ ID NO: 432295 - DNA, 25 bp, Homo sapien
tccttcagcgaaaataaagcccagt

SEQ ID NO: 432296 - DNA, 25 bp, Homo sapien
tcagggcagactctgtgattcactg

SEQ ID NO: 432297 - DNA, 25 bp, Homo sapien
aaagcccagttttaagatgtgcagg

SEQ ID NO: 432298 - DNA, 25 bp, Homo sapien
gagagccctggactgcacaccaagg

SEQ ID NO: 432299 - DNA, 25 bp, Homo sapien
ggtgtccagacgcagatctccactg

SEQ ID NO: 432300 - DNA, 25 bp, Homo sapien
ctgagggtgtccagacgcagatctc

SEQ ID NO: 432301 - DNA, 25 bp, Homo sapien
agaagaccccagagggtgcggcacc

SEQ ID NO: 432302 - DNA, 25 bp, Homo sapien
gccagggactgctacctgcccagaa

SEQ ID NO: 432303 - DNA, 25 bp, Homo sapien
aggccagggactgctacctgcccag

SEQ ID NO: 432304 - DNA, 25 bp, Homo sapien
gggactgctacctgcccagaaggcg

SEQ ID NO: 432305 - DNA, 25 bp, Homo sapien
cagggactgctacctgcccagaagg

SEQ ID NO: 432306 - DNA, 25 bp, Homo sapien
ggatgttccatgacagaccctgcat

SEQ ID NO: 432307 - DNA, 25 bp, Homo sapien
cactgggctattcacggatgcacac

SEQ ID NO: 432308 - DNA, 25 bp, Homo sapien
tctgtgtccgtaagtgtcccctgtg

SEQ ID NO: 432309 - DNA, 25 bp, Homo sapien
tgagctgctcatccacatcaggcaa

SEQ ID NO: 432310 - DNA, 25 bp, Homo sapien
cggcacccagcaggtaggcatgttc

SEQ ID NO: 432311 - DNA, 25 bp, Homo sapien
agacggcacccagcaggtaggcatg

SEQ ID NO: 432312 - DNA, 25 bp, Homo sapien
acggcacccagcaggtaggcatgtt

SEQ ID NO: 432313 - DNA, 25 bp, Homo sapien
gacggcacccagcaggtaggcatgt

SEQ ID NO: 432314 - DNA, 25 bp, Homo sapien
cctgtagctcgtgtaggagatggca

SEQ ID NO: 432315 - DNA, 25 bp, Homo sapien
agcaagggctctctcagggtacagc

SEQ ID NO: 432316 - DNA, 25 bp, Homo sapien
tgttgaagaccccagcaatgttttc

SEQ ID NO: 432317 - DNA, 25 bp, Homo sapien
gagatggcacaggacttgttgaaga

SEQ ID NO: 432318 - DNA, 25 bp, Homo sapien
tgtttctcaagtagacaccggactc

SEQ ID NO: 432319 - DNA, 25 bp, Homo sapien
tctcaagtagacaccggactcctct

SEQ ID NO: 432320 - DNA, 25 bp, Homo sapien
gctgtttctcaagtagacaccggac

SEQ ID NO: 432321 - DNA, 25 bp, Homo sapien
ggagctgtttctcaagtagacaccg

SEQ ID NO: 432322 - DNA, 25 bp, Homo sapien
ttggtcagagcagcccacgttcttg

SEQ ID NO: 432323 - DNA, 25 bp, Homo sapien
gtgtgtacactgatgcctgcctgca

SEQ ID NO: 432324 - DNA, 25 bp, Homo sapien
ccaaatggccacaaacctaataggg

SEQ ID NO: 432325 - DNA, 25 bp, Homo sapien
gaatggatgggtctaaactgacgcc

SEQ ID NO: 432326 - DNA, 25 bp, Homo sapien
aaataacgccgctcctcgcaggact

SEQ ID NO: 432327 - DNA, 25 bp, Homo sapien
tgggactgggcactctgcaaataac

SEQ ID NO: 432328 - DNA, 25 bp, Homo sapien
aggcccgggagacctctgcacaggc

SEQ ID NO: 432329 - DNA, 25 bp, Homo sapien
cgtctgccatctgccgggacagcag

SEQ ID NO: 432330 - DNA, 25 bp, Homo sapien
aaccaggtgccgtaggtgaagcaaa

SEQ ID NO: 432331 - DNA, 25 bp, Homo sapien
tgccgtaggtgaagcaaactcccca

SEQ ID NO: 432332 - DNA, 25 bp, Homo sapien
atctcggtaggtctgccccatacag

SEQ ID NO: 432333 - DNA, 25 bp, Homo sapien
ctccaggccaaaccaggtgccgtag

SEQ ID NO: 432334 - DNA, 25 bp, Homo sapien
tctgctgccgccgacagaactctaa

SEQ ID NO: 432335 - DNA, 25 bp, Homo sapien
actctaagccctgcgtgagggtctc

SEQ ID NO: 432336 - DNA, 25 bp, Homo sapien
gccgacagaactctaagccctgcgt

SEQ ID NO: 432337 - DNA, 25 bp, Homo sapien
gacagaactctaagccctgcgtgag

SEQ ID NO: 432338 - DNA, 25 bp, Homo sapien
agagtctgagaaagggacgtgaggg

SEQ ID NO: 432339 - DNA, 25 bp, Homo sapien
agcgggaagcggattggcagagtct

SEQ ID NO: 432340 - DNA, 25 bp, Homo sapien
acgtgaggggaaagcaaggccttgg

SEQ ID NO: 432341 - DNA, 25 bp, Homo sapien
aagcggattggcagagtctgagaaa

SEQ ID NO: 432342 - DNA, 25 bp, Homo sapien
catttaaaacacaacgccatttaca

SEQ ID NO: 432343 - DNA, 25 bp, Homo sapien
aacagagtaagactgcgtcccttaa

SEQ ID NO: 432344 - DNA, 25 bp, Homo sapien
tgaaatccttaggtataaacaacaa

SEQ ID NO: 432345 - DNA, 25 bp, Homo sapien
cagagtaagactgcgtcccttaaaa

SEQ ID NO: 432346 - DNA, 25 bp, Homo sapien
tacaggaaccaagacagtgtgggat

SEQ ID NO: 432347 - DNA, 25 bp, Homo sapien
gactgcaaggcctactacagagcta

SEQ ID NO: 432348 - DNA, 25 bp, Homo sapien
aacactattgaagagaacactgaag

SEQ ID NO: 432349 - DNA, 25 bp, Homo sapien
aatcatggacctagatgtaaaatgc

SEQ ID NO: 432350 - DNA, 25 bp, Homo sapien
agggatcaaagttggtgtgtgcttc

SEQ ID NO: 432351 - DNA, 25 bp, Homo sapien
cttaatcaagggatcaaagttggtg

SEQ ID NO: 432352 - DNA, 25 bp, Homo sapien
taatcaagggatcaaagttggtgtg

SEQ ID NO: 432353 - DNA, 25 bp, Homo sapien
gatcaaagttggtgtgtgcttcctg

SEQ ID NO: 432354 - DNA, 25 bp, Homo sapien
tagaccagcgtctcttgtaaccaga

SEQ ID NO: 432355 - DNA, 25 bp, Homo sapien
gatgtcagcgttgggctcagagcca

SEQ ID NO: 432356 - DNA, 25 bp, Homo sapien
gagtctacaccaggttgaacaaaag

SEQ ID NO: 432357 - DNA, 25 bp, Homo sapien
cactcctaggtacgtgaccatgaga

SEQ ID NO: 432358 - DNA, 25 bp, Homo sapien
cttgtggaaatacttaagcgcctgc

SEQ ID NO: 432359 - DNA, 25 bp, Homo sapien
tgtgctccgggaaacgcttgtggaa

SEQ ID NO: 432360 - DNA, 25 bp, Homo sapien
acggctgaggtgcactccacatagg

SEQ ID NO: 432361 - DNA, 25 bp, Homo sapien
taggtgtagtcaatcatgatgtccc

SEQ ID NO: 432362 - DNA, 25 bp, Homo sapien
cacgcttggtctcataggtggcgaa

SEQ ID NO: 432363 - DNA, 25 bp, Homo sapien
tggtctcataggtggcgaaccctcc

SEQ ID NO: 432364 - DNA, 25 bp, Homo sapien
cataggtggcgaaccctccatctgg

SEQ ID NO: 432365 - DNA, 25 bp, Homo sapien
cttggtctcataggtggcgaaccct

SEQ ID NO: 432366 - DNA, 25 bp, Homo sapien
agaaacgatccagccgcagtccagc

SEQ ID NO: 432367 - DNA, 25 bp, Homo sapien
cgtgcagtcagaaacgatccagccg

SEQ ID NO: 432368 - DNA, 25 bp, Homo sapien
cagccgtgcagtcagaaacgatcca

SEQ ID NO: 432369 - DNA, 25 bp, Homo sapien
cagagccgttctctggggatgtgct

SEQ ID NO: 432370 - DNA, 25 bp, Homo sapien
gcgcatctggcggtagtacttctgg

SEQ ID NO: 432371 - DNA, 25 bp, Homo sapien
tctggtagtcgggagggttatctgg

SEQ ID NO: 432372 - DNA, 25 bp, Homo sapien
cttgcgcatctggcggtagtacttc

SEQ ID NO: 432373 - DNA, 25 bp, Homo sapien
ctggcggtagtacttctggtagtcg

SEQ ID NO: 432374 - DNA, 25 bp, Homo sapien
ctgggcagcatcgagggcaaatgtg

SEQ ID NO: 432375 - DNA, 25 bp, Homo sapien
catcgagggcaaatgtggaagcaga

SEQ ID NO: 432376 - DNA, 25 bp, Homo sapien
cagagaacacgtcaccacgggacgt

SEQ ID NO: 432377 - DNA, 25 bp, Homo sapien
ggaagcagagaacacgtcaccacgg

SEQ ID NO: 432378 - DNA, 25 bp, Homo sapien
ggaactcatgagccttctgcaggca

SEQ ID NO: 432379 - DNA, 25 bp, Homo sapien
caggacgaaaactcgggcctgtggt

SEQ ID NO: 432380 - DNA, 25 bp, Homo sapien
gcaggcaggacgaaaactcgggcct

SEQ ID NO: 432381 - DNA, 25 bp, Homo sapien
tctgcaggcaggacgaaaactcggg

SEQ ID NO: 432382 - DNA, 25 bp, Homo sapien
acaaaacagcaaaagtccatgagat

SEQ ID NO: 432383 - DNA, 25 bp, Homo sapien
aagacaaaacagcaaaagtccatga

SEQ ID NO: 432384 - DNA, 25 bp, Homo sapien
aacagcaaaagtccatgagatatga

SEQ ID NO: 432385 - DNA, 25 bp, Homo sapien
caaaacagcaaaagtccatgagata

SEQ ID NO: 432386 - DNA, 25 bp, Homo sapien
cagagcctggatggcgaatgcggtg

SEQ ID NO: 432387 - DNA, 25 bp, Homo sapien
cctggatggcgaatgcggtgtccca

SEQ ID NO: 432388 - DNA, 25 bp, Homo sapien
cccagatctgtgagccgttggtgcc

SEQ ID NO: 432389 - DNA, 25 bp, Homo sapien
ggtgtcccagatctgtgagccgttg

SEQ ID NO: 432390 - DNA, 25 bp, Homo sapien
ggcagaggcatccagacatcgtgca

SEQ ID NO: 432391 - DNA, 25 bp, Homo sapien
ttttcacaaaacacggacagtgtcc

SEQ ID NO: 432392 - DNA, 25 bp, Homo sapien
tcacaaaacacggacagtgtccggg

SEQ ID NO: 432393 - DNA, 25 bp, Homo sapien
aacacggacagtgtccggggagcct

SEQ ID NO: 432394 - DNA, 25 bp, Homo sapien
cacggacagtgtccggggagcctct

SEQ ID NO: 432395 - DNA, 25 bp, Homo sapien
gcattttcatgccgtcaaggcccat

SEQ ID NO: 432396 - DNA, 25 bp, Homo sapien
ctgcattttcatgccgtcaaggccc

SEQ ID NO: 432397 - DNA, 25 bp, Homo sapien
tgcattttcatgccgtcaaggccca

SEQ ID NO: 432398 - DNA, 25 bp, Homo sapien
cattttcatgccgtcaaggcccatc

SEQ ID NO: 432399 - DNA, 25 bp, Homo sapien
ggaggcgggcccgtccacataccag

SEQ ID NO: 432400 - DNA, 25 bp, Homo sapien
gtccgggattctggagacatgctcc

SEQ ID NO: 432401 - DNA, 25 bp, Homo sapien
cagcgcacaagcatgttgatggttt

SEQ ID NO: 432402 - DNA, 25 bp, Homo sapien
gagatagtccgggattctggagaca

SEQ ID NO: 432403 - DNA, 25 bp, Homo sapien
tgctgatgctcttggtgaatcggtc

SEQ ID NO: 432404 - DNA, 25 bp, Homo sapien
tcggtcgtcggccacaatgtgttca

SEQ ID NO: 432405 - DNA, 25 bp, Homo sapien
tggtgctcatacaggttgaggagcg

SEQ ID NO: 432406 - DNA, 25 bp, Homo sapien
tgtgttcatacagcttctgcacggc

SEQ ID NO: 432407 - DNA, 25 bp, Homo sapien
agctgtgcggcgtgtacagctcgtc

SEQ ID NO: 432408 - DNA, 25 bp, Homo sapien
tctgcgccagccagtcaatgctggc

SEQ ID NO: 432409 - DNA, 25 bp, Homo sapien
tcgggggccacgttgttcctctgcg

SEQ ID NO: 432410 - DNA, 25 bp, Homo sapien
tggcgaagtcctccacatagagctc

SEQ ID NO: 432411 - DNA, 25 bp, Homo sapien
tggaccagcgggtcttccgcggcac

SEQ ID NO: 432412 - DNA, 25 bp, Homo sapien
cggcagtggcaccagagtgtggagg

SEQ ID NO: 432413 - DNA, 25 bp, Homo sapien
acggcgtagcagtagctcatgggca

SEQ ID NO: 432414 - DNA, 25 bp, Homo sapien
ggcactcagccgaacggcgtagcag

SEQ ID NO: 432415 - DNA, 25 bp, Homo sapien
gaacagggtattgaggccttcccag

SEQ ID NO: 432416 - DNA, 25 bp, Homo sapien
agctgtaaacattcaggacagccag

SEQ ID NO: 432417 - DNA, 25 bp, Homo sapien
tgtaaacattcaggacagccagcca

SEQ ID NO: 432418 - DNA, 25 bp, Homo sapien
cacatctctgggaacagggtattga

SEQ ID NO: 432419 - DNA, 25 bp, Homo sapien
gcaaagtctgcactgcctctagctg

SEQ ID NO: 432420 - DNA, 25 bp, Homo sapien
gcctctagctgggaagcttcaccct

SEQ ID NO: 432421 - DNA, 25 bp, Homo sapien
gaataggcccacgtcatctgcttcc

SEQ ID NO: 432422 - DNA, 25 bp, Homo sapien
ctctgggagtcacgtgtgcccctct

SEQ ID NO: 432423 - DNA, 25 bp, Homo sapien
cttggaaggtgcaagctccagggct

SEQ ID NO: 432424 - DNA, 25 bp, Homo sapien
tagacgatcagcttggaaggtgcaa

SEQ ID NO: 432425 - DNA, 25 bp, Homo sapien
cttggagaggtagacgatcagcttg

SEQ ID NO: 432426 - DNA, 25 bp, Homo sapien
gcttggagaggtagacgatcagctt

SEQ ID NO: 432427 - DNA, 25 bp, Homo sapien
tcgtaccaggtcaggatcgtcaggc

SEQ ID NO: 432428 - DNA, 25 bp, Homo sapien
tgtgaagaatgttccgggctcgtac

SEQ ID NO: 432429 - DNA, 25 bp, Homo sapien
tctgagagacacatagttgagcgca

SEQ ID NO: 432430 - DNA, 25 bp, Homo sapien
gagcgcagtcccaaacacggtggac

SEQ ID NO: 432431 - DNA, 25 bp, Homo sapien
gccccagccaccgtcagggagctgc

SEQ ID NO: 432432 - DNA, 25 bp, Homo sapien
cgcaggtaccgcacaatctcttctc

SEQ ID NO: 432433 - DNA, 25 bp, Homo sapien
gcagagggatgcgtgccacgtggca

SEQ ID NO: 432434 - DNA, 25 bp, Homo sapien
aggtaccgcacaatctcttctctgt

SEQ ID NO: 432435 - DNA, 25 bp, Homo sapien
agagggatgcgtgccacgtggcaag

SEQ ID NO: 432436 - DNA, 25 bp, Homo sapien
gagatgttcctcactggggacaggt

SEQ ID NO: 432437 - DNA, 25 bp, Homo sapien
ggtggtcatgactgctaagaccagg

SEQ ID NO: 432438 - DNA, 25 bp, Homo sapien
ggacaggtggtcatgactgctaaga

SEQ ID NO: 432439 - DNA, 25 bp, Homo sapien
gtcatgactgctaagaccaggcccc

SEQ ID NO: 432440 - DNA, 25 bp, Homo sapien
tttcaagtctgggacaaaatcagga

SEQ ID NO: 432441 - DNA, 25 bp, Homo sapien
tagtcttgtgtagccaaatcagttc

SEQ ID NO: 432442 - DNA, 25 bp, Homo sapien
tctatctattacaaagtcagcgtag

SEQ ID NO: 432443 - DNA, 25 bp, Homo sapien
cactcccaggatgcaaaatagtctt

SEQ ID NO: 432444 - DNA, 25 bp, Homo sapien
tcaaaggcggtgtgggctttgggca

SEQ ID NO: 432445 - DNA, 25 bp, Homo sapien
gggccaccataatcacccgtccagt

SEQ ID NO: 432446 - DNA, 25 bp, Homo sapien
agcctgcagccccacgtaaaatgtc

SEQ ID NO: 432447 - DNA, 25 bp, Homo sapien
agccccacgtaaaatgtcatcccgt

SEQ ID NO: 432448 - DNA, 25 bp, Homo sapien
gcgtaggcttccaggccggtctgct

SEQ ID NO: 432449 - DNA, 25 bp, Homo sapien
cctctcgcagttgagtcgccagcgg

SEQ ID NO: 432450 - DNA, 25 bp, Homo sapien
cggtggcgggctcggtcttgtaggg

SEQ ID NO: 432451 - DNA, 25 bp, Homo sapien
cgtcctgcaggtaggtccacgtctg

SEQ ID NO: 432452 - DNA, 25 bp, Homo sapien
cgccggcccactgccccagtcgcgc

SEQ ID NO: 432453 - DNA, 25 bp, Homo sapien
ccggccatcagcgacccaggccccg

SEQ ID NO: 432454 - DNA, 25 bp, Homo sapien
ctgaggaccaccggccatcagcgac

SEQ ID NO: 432455 - DNA, 25 bp, Homo sapien
ggccgccggcccactgccccagtcg

SEQ ID NO: 432456 - DNA, 25 bp, Homo sapien
cagctgccagatgtccgcacccggg

SEQ ID NO: 432457 - DNA, 25 bp, Homo sapien
tgcagtgctctacgccgcccactgc

SEQ ID NO: 432458 - DNA, 25 bp, Homo sapien
agctgccagatgtccgcacccggga

SEQ ID NO: 432459 - DNA, 25 bp, Homo sapien
ctgctgcagtgctctacgccgccca

SEQ ID NO: 432460 - DNA, 25 bp, Homo sapien
gattttggcctcaacaactgggtat

SEQ ID NO: 432461 - DNA, 25 bp, Homo sapien
aattgacacagttaagcttctaggg

SEQ ID NO: 432462 - DNA, 25 bp, Homo sapien
gggcagtcatgagaaaaaacactgt

SEQ ID NO: 432463 - DNA, 25 bp, Homo sapien
gctgtaaactacgtctgagaattga

SEQ ID NO: 432464 - DNA, 25 bp, Homo sapien
tgcccagcacaataaattgggcagg

SEQ ID NO: 432465 - DNA, 25 bp, Homo sapien
ttcaaatgatgaatcaaacgtaagg

SEQ ID NO: 432466 - DNA, 25 bp, Homo sapien
gaatggggaggcaacatatgaagta

SEQ ID NO: 432467 - DNA, 25 bp, Homo sapien
caccaggaatagagatgatctcaaa

SEQ ID NO: 432468 - DNA, 25 bp, Homo sapien
gaagctacataggagctgtccgcca

SEQ ID NO: 432469 - DNA, 25 bp, Homo sapien
caaggagttgcgaagtgccattctc

SEQ ID NO: 432470 - DNA, 25 bp, Homo sapien
tggccactggcgatcaacgtcactt

SEQ ID NO: 432471 - DNA, 25 bp, Homo sapien
tcaggaggctactaaaggacaggct

SEQ ID NO: 432472 - DNA, 25 bp, Homo sapien
ccaatatcaaactgcttagggagac

SEQ ID NO: 432473 - DNA, 25 bp, Homo sapien
gaatgcaggtttcagccaatatcaa

SEQ ID NO: 432474 - DNA, 25 bp, Homo sapien
gacagtgtaagagaagctaactcct

SEQ ID NO: 432475 - DNA, 25 bp, Homo sapien
caataaagggctcaacaggaaatgg

SEQ ID NO: 432476 - DNA, 25 bp, Homo sapien
gctggtacctccacgctttcatcat

SEQ ID NO: 432477 - DNA, 25 bp, Homo sapien
agctggtacctccacgctttcatca

SEQ ID NO: 432478 - DNA, 25 bp, Homo sapien
attaatcacatttccaacagtgcat

SEQ ID NO: 432479 - DNA, 25 bp, Homo sapien
taatcacatttccaacagtgcatca

SEQ ID NO: 432480 - DNA, 25 bp, Homo sapien
acatttccaacagtgcatcaagcat

SEQ ID NO: 432481 - DNA, 25 bp, Homo sapien
tcacatttccaacagtgcatcaagc

SEQ ID NO: 432482 - DNA, 25 bp, Homo sapien
ttccaggtgctttagtcgttcgcct

SEQ ID NO: 432483 - DNA, 25 bp, Homo sapien
aactccggatcagcctttccaggtg

SEQ ID NO: 432484 - DNA, 25 bp, Homo sapien
cgttcgcctagacacgttcctgtcg

SEQ ID NO: 432485 - DNA, 25 bp, Homo sapien
cagagagatggagctcagaggcaac

SEQ ID NO: 432486 - DNA, 25 bp, Homo sapien
tgcagttgctccctcatcatgtcac

SEQ ID NO: 432487 - DNA, 25 bp, Homo sapien
gcagttgctccctcatcatgtcact

SEQ ID NO: 432488 - DNA, 25 bp, Homo sapien
ctgacagctgcagttgctccctcat

SEQ ID NO: 432489 - DNA, 25 bp, Homo sapien
agctgcagttgctccctcatcatgt

SEQ ID NO: 432490 - DNA, 25 bp, Homo sapien
tctgggaaggtactagatctggatc

SEQ ID NO: 432491 - DNA, 25 bp, Homo sapien
cagttttgggatgtcaataaaccac

SEQ ID NO: 432492 - DNA, 25 bp, Homo sapien
taaaccacgacctatctctgggaag

SEQ ID NO: 432493 - DNA, 25 bp, Homo sapien
atctggatcatgttagaaacctcat

SEQ ID NO: 432494 - DNA, 25 bp, Homo sapien
tgttttcatcacaggttcaatagtg

SEQ ID NO: 432495 - DNA, 25 bp, Homo sapien
agatgttttcatcacaggttcaata

SEQ ID NO: 432496 - DNA, 25 bp, Homo sapien
tcacaggttcaatagtgtgagaaag

SEQ ID NO: 432497 - DNA, 25 bp, Homo sapien
tgtgggctagtagttacagatgttt

SEQ ID NO: 432498 - DNA, 25 bp, Homo sapien
gaagttaaatccgtaaatgctcctg

SEQ ID NO: 432499 - DNA, 25 bp, Homo sapien
agttaaatccgtaaatgctcctgag

SEQ ID NO: 432500 - DNA, 25 bp, Homo sapien
ttaaatccgtaaatgctcctgagtc

SEQ ID NO: 432501 - DNA, 25 bp, Homo sapien
ccattgctgaagctgatcttcaaac

SEQ ID NO: 432502 - DNA, 25 bp, Homo sapien
tgtggccagccatagtgttcagcac

SEQ ID NO: 432503 - DNA, 25 bp, Homo sapien
gaaacatactatctagggcactgct

SEQ ID NO: 432504 - DNA, 25 bp, Homo sapien
tctgagcagacttaaccacatgaat

SEQ ID NO: 432505 - DNA, 25 bp, Homo sapien
aaaactgttgctaataatccacctg

SEQ ID NO: 432506 - DNA, 25 bp, Homo sapien
gcagactgctcgacaaacactgcgc

SEQ ID NO: 432507 - DNA, 25 bp, Homo sapien
gaagctcctcgcatcagatcctctg

SEQ ID NO: 432508 - DNA, 25 bp, Homo sapien
tccagcagcagactgctcgacaaac

SEQ ID NO: 432509 - DNA, 25 bp, Homo sapien
tcgacaaacactgcgccaagagctc

SEQ ID NO: 432510 - DNA, 25 bp, Homo sapien
ctcctcttccagttacggtgcatgt

SEQ ID NO: 432511 - DNA, 25 bp, Homo sapien
ttccagttacggtgcatgtgaagca

SEQ ID NO: 432512 - DNA, 25 bp, Homo sapien
ttacggtgcatgtgaagcaatggta

SEQ ID NO: 432513 - DNA, 25 bp, Homo sapien
tcccctcttgagcacactctgtgct

SEQ ID NO: 432514 - DNA, 25 bp, Homo sapien
aggatgaaaaggctttattgccaaa

SEQ ID NO: 432515 - DNA, 25 bp, Homo sapien
ttctacagcatcatgtaaagcatgt

SEQ ID NO: 432516 - DNA, 25 bp, Homo sapien
tgtagatacatttgcacatgtgcat

SEQ ID NO: 432517 - DNA, 25 bp, Homo sapien
tgtagggacccttatgcacagaggc

SEQ ID NO: 432518 - DNA, 25 bp, Homo sapien
catcaagtcagggagtggagcaaag

SEQ ID NO: 432519 - DNA, 25 bp, Homo sapien
gacattccgggaaaccaggaggtga

SEQ ID NO: 432520 - DNA, 25 bp, Homo sapien
aatagtcgggacaacaggctggttc

SEQ ID NO: 432521 - DNA, 25 bp, Homo sapien
ggacttgacttttcttggactgaca

SEQ ID NO: 432522 - DNA, 25 bp, Homo sapien
tatcaggccaagcaaaccatgttag

SEQ ID NO: 432523 - DNA, 25 bp, Homo sapien
tcccacgacaaaggaacatcatatt

SEQ ID NO: 432524 - DNA, 25 bp, Homo sapien
catatctgaccatcttcactcagcg

SEQ ID NO: 432525 - DNA, 25 bp, Homo sapien
caacctggcttgttcccacgacaaa

SEQ ID NO: 432526 - DNA, 25 bp, Homo sapien
ccttctgcgtctgcaacctggcttg

SEQ ID NO: 432527 - DNA, 25 bp, Homo sapien
gtctctcagcttgtggttgatacac

SEQ ID NO: 432528 - DNA, 25 bp, Homo sapien
tctgggaggcgtactggacaaccat

SEQ ID NO: 432529 - DNA, 25 bp, Homo sapien
gtaggttctgtggagcaggttctcc

SEQ ID NO: 432530 - DNA, 25 bp, Homo sapien
acaaggcgataagatcatcccatgg

SEQ ID NO: 432531 - DNA, 25 bp, Homo sapien
ggaaaaagcggccactaaactcatg

SEQ ID NO: 432532 - DNA, 25 bp, Homo sapien
tccatctgcggaagctggaacccga

SEQ ID NO: 432533 - DNA, 25 bp, Homo sapien
cccgtcttcgacgtactgaatgaga

SEQ ID NO: 432534 - DNA, 25 bp, Homo sapien
taaacagctcaatgatggcgccagg

SEQ ID NO: 432535 - DNA, 25 bp, Homo sapien
ctggcagcagaggtcaagggaatgg

SEQ ID NO: 432536 - DNA, 25 bp, Homo sapien
gcagcagaggtcaagggaatggggg

SEQ ID NO: 432537 - DNA, 25 bp, Homo sapien
cagaggtcaagggaatgggggcagt

SEQ ID NO: 432538 - DNA, 25 bp, Homo sapien
aatgggggcagtgggaaaccagcca

SEQ ID NO: 432539 - DNA, 25 bp, Homo sapien
ggtaacagtgtaatctgaaatcagc

SEQ ID NO: 432540 - DNA, 25 bp, Homo sapien
ggtatcagggatctcggtaacagtg

SEQ ID NO: 432541 - DNA, 25 bp, Homo sapien
cttagttgaaccttgtagatcatta

SEQ ID NO: 432542 - DNA, 25 bp, Homo sapien
taatctgaaatcagcttagctgaaa

SEQ ID NO: 432543 - DNA, 25 bp, Homo sapien
tgctgcttcataaacgagacttcct

SEQ ID NO: 432544 - DNA, 25 bp, Homo sapien
gcacacctgctaacatatctcactg

SEQ ID NO: 432545 - DNA, 25 bp, Homo sapien
cagacatagatgaaggtcacttgca

SEQ ID NO: 432546 - DNA, 25 bp, Homo sapien
gctgtctcagtgattcctgacccca

SEQ ID NO: 432547 - DNA, 25 bp, Homo sapien
aaggccgacagccagtacacgtcct

SEQ ID NO: 432548 - DNA, 25 bp, Homo sapien
taggcacaagaaccaccagaggaag

SEQ ID NO: 432549 - DNA, 25 bp, Homo sapien
tggcaccatcactgagggcgccatg

SEQ ID NO: 432550 - DNA, 25 bp, Homo sapien
ctgcttgagctgcagcaaggccgac

SEQ ID NO: 432551 - DNA, 25 bp, Homo sapien
cacagctgggcataccctgtagtta

SEQ ID NO: 432552 - DNA, 25 bp, Homo sapien
gcagccaaagctctccgtgcactaa

SEQ ID NO: 432553 - DNA, 25 bp, Homo sapien
caattgttagcaaagactcccctca

SEQ ID NO: 432554 - DNA, 25 bp, Homo sapien
gatgcaccatgggacgcatcagcag

SEQ ID NO: 432555 - DNA, 25 bp, Homo sapien
gactgagcctgcaaaagccctgtat

SEQ ID NO: 432556 - DNA, 25 bp, Homo sapien
tagggaacagccatccagatccaga

SEQ ID NO: 432557 - DNA, 25 bp, Homo sapien
taggtgtgaccaatccctgggttag

SEQ ID NO: 432558 - DNA, 25 bp, Homo sapien
gaggagggcctccaacataaaagag

SEQ ID NO: 432559 - DNA, 25 bp, Homo sapien
gctagtgtagctatcccgggaagac

SEQ ID NO: 432560 - DNA, 25 bp, Homo sapien
gaatcctgacacaagctcactagag

SEQ ID NO: 432561 - DNA, 25 bp, Homo sapien
cctagtatggtatgcagtggccaag

SEQ ID NO: 432562 - DNA, 25 bp, Homo sapien
agaggccacgctgtacctagtatgg

SEQ ID NO: 432563 - DNA, 25 bp, Homo sapien
taagtgagttgaaaagcgaaagcgt

SEQ ID NO: 432564 - DNA, 25 bp, Homo sapien
tatacacacgttaacagaaatcatc

SEQ ID NO: 432565 - DNA, 25 bp, Homo sapien
ctttatacacacgttaacagaaatc

SEQ ID NO: 432566 - DNA, 25 bp, Homo sapien
tcccctttgctgctaagtgagttga

SEQ ID NO: 432567 - DNA, 25 bp, Homo sapien
ggatgtgtcatccactgagccttca

SEQ ID NO: 432568 - DNA, 25 bp, Homo sapien
gatgtgtcatccactgagccttcat

SEQ ID NO: 432569 - DNA, 25 bp, Homo sapien
ccagcatcgctggatgtgtcatcca

SEQ ID NO: 432570 - DNA, 25 bp, Homo sapien
gaatcccaccagcatcgctggatgt

SEQ ID NO: 432571 - DNA, 25 bp, Homo sapien
ttttgtagagtgtcactcaaagggt

SEQ ID NO: 432572 - DNA, 25 bp, Homo sapien
gtagagtgtcactcaaagggtctca

SEQ ID NO: 432573 - DNA, 25 bp, Homo sapien
tttttgtagagtgtcactcaaaggg

SEQ ID NO: 432574 - DNA, 25 bp, Homo sapien
agtgtcactcaaagggtctcactat

SEQ ID NO: 432575 - DNA, 25 bp, Homo sapien
ttgcagtgaacaaagtgtaccacac

SEQ ID NO: 432576 - DNA, 25 bp, Homo sapien
caggctttctaagtgaaaaggtgtt

SEQ ID NO: 432577 - DNA, 25 bp, Homo sapien
aaactttggtagactgaagcatgca

SEQ ID NO: 432578 - DNA, 25 bp, Homo sapien
tgaacaaagtgtaccacacgccagc

SEQ ID NO: 432579 - DNA, 25 bp, Homo sapien
atggcaggtccagagacgcccatgc

SEQ ID NO: 432580 - DNA, 25 bp, Homo sapien
ggggactgctcctctacatccggca

SEQ ID NO: 432581 - DNA, 25 bp, Homo sapien
ggcaggtccagagacgcccatgcca

SEQ ID NO: 432582 - DNA, 25 bp, Homo sapien
tctacatccggcaacaccagcacca

SEQ ID NO: 432583 - DNA, 25 bp, Homo sapien
tagaagtgctgaaccttcatctggt

SEQ ID NO: 432584 - DNA, 25 bp, Homo sapien
agaagtgctgaaccttcatctggtg

SEQ ID NO: 432585 - DNA, 25 bp, Homo sapien
gtagaagtgctgaaccttcatctgg

SEQ ID NO: 432586 - DNA, 25 bp, Homo sapien
ggtagaagtgctgaaccttcatctg

SEQ ID NO: 432587 - DNA, 25 bp, Homo sapien
gcaccaggacgctgagtctttcaag

SEQ ID NO: 432588 - DNA, 25 bp, Homo sapien
gaacacgtgatgcagagtcagactc

SEQ ID NO: 432589 - DNA, 25 bp, Homo sapien
tttcaaggtgaactcagagctctgc

SEQ ID NO: 432590 - DNA, 25 bp, Homo sapien
tgtgggagacaaccttcaaaatgca

SEQ ID NO: 432591 - DNA, 25 bp, Homo sapien
gagatgcccaatctccctgcatggc

SEQ ID NO: 432592 - DNA, 25 bp, Homo sapien
tgcgctgggcgccagcgccctcagc

SEQ ID NO: 432593 - DNA, 25 bp, Homo sapien
ctggtgcaggagatgcccaatctcc

SEQ ID NO: 432594 - DNA, 25 bp, Homo sapien
cggtcgctcacgtccacgcagcagg

SEQ ID NO: 432595 - DNA, 25 bp, Homo sapien
agtttcttgcgggctgtgacagctt

SEQ ID NO: 432596 - DNA, 25 bp, Homo sapien
gtttcttgcgggctgtgacagcttc

SEQ ID NO: 432597 - DNA, 25 bp, Homo sapien
tttcttgcgggctgtgacagcttcc

SEQ ID NO: 432598 - DNA, 25 bp, Homo sapien
cagtttcttgcgggctgtgacagct

SEQ ID NO: 432599 - DNA, 25 bp, Homo sapien
ggcttgttcatagctgtctcccagc

SEQ ID NO: 432600 - DNA, 25 bp, Homo sapien
tcacccttattggtgcatgcagcca

SEQ ID NO: 432601 - DNA, 25 bp, Homo sapien
tggcaggcaccctataaatatcagt

SEQ ID NO: 432602 - DNA, 25 bp, Homo sapien
tcagttgacatacagagtagccacc

SEQ ID NO: 432603 - DNA, 25 bp, Homo sapien
agtgggcacagacatcctcacagca

SEQ ID NO: 432604 - DNA, 25 bp, Homo sapien
gatttcctccacgagaaacaagtcc

SEQ ID NO: 432605 - DNA, 25 bp, Homo sapien
cgagaaacaagtccactaagtgggc

SEQ ID NO: 432606 - DNA, 25 bp, Homo sapien
tttgcagtctggaagatttcctcca

SEQ ID NO: 432607 - DNA, 25 bp, Homo sapien
gaagacactgcacttggggcccaca

SEQ ID NO: 432608 - DNA, 25 bp, Homo sapien
ctagaaacagggcaatcagcatgga

SEQ ID NO: 432609 - DNA, 25 bp, Homo sapien
aaagtgcaagagtcagtcaggcgcg

SEQ ID NO: 432610 - DNA, 25 bp, Homo sapien
ctgagggcttgcttgaaaagtgcaa

SEQ ID NO: 432611 - DNA, 25 bp, Homo sapien
aaaagaaaagtgcaagagtcggcca

SEQ ID NO: 432612 - DNA, 25 bp, Homo sapien
aagaaaagtgcaagagtcggccagg

SEQ ID NO: 432613 - DNA, 25 bp, Homo sapien
aaagaaaagtgcaagagtcggccag

SEQ ID NO: 432614 - DNA, 25 bp, Homo sapien
ttcaactcctgggagcaggtttccc

SEQ ID NO: 432615 - DNA, 25 bp, Homo sapien
gccctggctcagctcacttaacacc

SEQ ID NO: 432616 - DNA, 25 bp, Homo sapien
ccatcatcacgcgttccatcagctc

SEQ ID NO: 432617 - DNA, 25 bp, Homo sapien
aggtttccctcacaaactccatcat

SEQ ID NO: 432618 - DNA, 25 bp, Homo sapien
gcagctgttaacaaatcctccatag

SEQ ID NO: 432619 - DNA, 25 bp, Homo sapien
ctctttccttagacacttcttcagc

SEQ ID NO: 432620 - DNA, 25 bp, Homo sapien
aatcctccatagcagcattagaaac

SEQ ID NO: 432621 - DNA, 25 bp, Homo sapien
tgtgcctcaaaatgcccgtggttgc

SEQ ID NO: 432622 - DNA, 25 bp, Homo sapien
agcacccgcagagccaacttcctca

SEQ ID NO: 432623 - DNA, 25 bp, Homo sapien
ggcggcagctgcgtaggcagcaccc

SEQ ID NO: 432624 - DNA, 25 bp, Homo sapien
caacttcctcacagtccctctgcag

SEQ ID NO: 432625 - DNA, 25 bp, Homo sapien
agctgcgtaggcagcacccgcagag

SEQ ID NO: 432626 - DNA, 25 bp, Homo sapien
ctcgtcagagtacatgggcacgggc

SEQ ID NO: 432627 - DNA, 25 bp, Homo sapien
tcgtcagagtacatgggcacgggct

SEQ ID NO: 432628 - DNA, 25 bp, Homo sapien
caggggctggtagagactgtgggag

SEQ ID NO: 432629 - DNA, 25 bp, Homo sapien
ggacaggggtgcatccggctctaca

SEQ ID NO: 432630 - DNA, 25 bp, Homo sapien
ccacagacggggtcagtgccaggac

SEQ ID NO: 432631 - DNA, 25 bp, Homo sapien
cagaggcactggtgagggcgcaggg

SEQ ID NO: 432632 - DNA, 25 bp, Homo sapien
ggctctccccgatgtacttgttctg

SEQ ID NO: 432633 - DNA, 25 bp, Homo sapien
gccaggctctccccgatgtacttgt

SEQ ID NO: 432634 - DNA, 25 bp, Homo sapien
caggctctccccgatgtacttgttc

SEQ ID NO: 432635 - DNA, 25 bp, Homo sapien
tgtgtcggagccgggtctctgggtg

SEQ ID NO: 432636 - DNA, 25 bp, Homo sapien
ggcaatggccctccgttcacaattt

SEQ ID NO: 432637 - DNA, 25 bp, Homo sapien
tccaggaatgcagaccggttcagct

SEQ ID NO: 432638 - DNA, 25 bp, Homo sapien
gataatccctctggttccaggaatg

SEQ ID NO: 432639 - DNA, 25 bp, Homo sapien
gacaccgtcagcttcctagtaataa

SEQ ID NO: 432640 - DNA, 25 bp, Homo sapien
gccaggatgtgaccttgggaacacc

SEQ ID NO: 432641 - DNA, 25 bp, Homo sapien
ccgtcattggctggcaaaggcagtc

SEQ ID NO: 432642 - DNA, 25 bp, Homo sapien
taaataacagaaagcacaggcgcca

SEQ ID NO: 432643 - DNA, 25 bp, Homo sapien
accgggtgttgagtgtaagctgcca

SEQ ID NO: 432644 - DNA, 25 bp, Homo sapien
tcaccgtgtacgcaaagttgagcgc

SEQ ID NO: 432645 - DNA, 25 bp, Homo sapien
gcgcccggagagcatccttgcggat

SEQ ID NO: 432646 - DNA, 25 bp, Homo sapien
tctctgaacagcagcatgcgcacca

SEQ ID NO: 432647 - DNA, 25 bp, Homo sapien
tagatcgctgtgtgctcaccgtgta

SEQ ID NO: 432648 - DNA, 25 bp, Homo sapien
gcaggaaaccaatcccgtggaatga

SEQ ID NO: 432649 - DNA, 25 bp, Homo sapien
cagaaggcgctttggcaacacggaa

SEQ ID NO: 432650 - DNA, 25 bp, Homo sapien
ggaatgcgtgccaagcaaacactct

SEQ ID NO: 432651 - DNA, 25 bp, Homo sapien
gaggaggagcgaaatcactgcagtc

SEQ ID NO: 432652 - DNA, 25 bp, Homo sapien
tgaaaatccgaacaaaaattctgct

SEQ ID NO: 432653 - DNA, 25 bp, Homo sapien
cctcttccgatgttctttaattcaa

SEQ ID NO: 432654 - DNA, 25 bp, Homo sapien
tcaaccaacactgatcaagcatttg

SEQ ID NO: 432655 - DNA, 25 bp, Homo sapien
agtgctgggactttggtacctaagc

SEQ ID NO: 432656 - DNA, 25 bp, Homo sapien
tgaacggaatcatgcagggcctaga

SEQ ID NO: 432657 - DNA, 25 bp, Homo sapien
tttagtcactgtttacaggaggccc

SEQ ID NO: 432658 - DNA, 25 bp, Homo sapien
cactacgggcttgtggcaaggaatc

SEQ ID NO: 432659 - DNA, 25 bp, Homo sapien
catccccaagttccgtggaagtgga

SEQ ID NO: 432660 - DNA, 25 bp, Homo sapien
tgcacagcctttccggatggtgacc

SEQ ID NO: 432661 - DNA, 25 bp, Homo sapien
gatggtgaccaacagtgataacccc

SEQ ID NO: 432662 - DNA, 25 bp, Homo sapien
aaagcttggaataagaaagcaccca

SEQ ID NO: 432663 - DNA, 25 bp, Homo sapien
tgataacccctataaaacagggcaa

SEQ ID NO: 432664 - DNA, 25 bp, Homo sapien
tactgttcaatgcagcaaaagcctg

SEQ ID NO: 432665 - DNA, 25 bp, Homo sapien
ctcagatgagtttctaacagcagga

SEQ ID NO: 432666 - DNA, 25 bp, Homo sapien
cagcaggatggaactgttgtacttc

SEQ ID NO: 432667 - DNA, 25 bp, Homo sapien
cagtgtaaaagacaagcgttcaggt

SEQ ID NO: 432668 - DNA, 25 bp, Homo sapien
attttcatgaagatagatctgataa

SEQ ID NO: 432669 - DNA, 25 bp, Homo sapien
taatagatttcactggccagatgca

SEQ ID NO: 432670 - DNA, 25 bp, Homo sapien
ataatagatttcactggccagatgc

SEQ ID NO: 432671 - DNA, 25 bp, Homo sapien
aataatagatttcactggccagatg

SEQ ID NO: 432672 - DNA, 25 bp, Homo sapien
ccgggcatggagactctaactgtaa

SEQ ID NO: 432673 - DNA, 25 bp, Homo sapien
atcagccgggcatggagactctaac

SEQ ID NO: 432674 - DNA, 25 bp, Homo sapien
tattcatttttgtggaagggtctca

SEQ ID NO: 432675 - DNA, 25 bp, Homo sapien
attcatttttgtggaagggtctcac

SEQ ID NO: 432676 - DNA, 25 bp, Homo sapien
cttcctcattttctcactggtgagg

SEQ ID NO: 432677 - DNA, 25 bp, Homo sapien
tctcatgaggaggattccttcctca

SEQ ID NO: 432678 - DNA, 25 bp, Homo sapien
tcattttctcactggtgaggagaaa

SEQ ID NO: 432679 - DNA, 25 bp, Homo sapien
ctgtctcatgaggaggattccttcc

SEQ ID NO: 432680 - DNA, 25 bp, Homo sapien
tgagcagaacattgtagccctggaa

SEQ ID NO: 432681 - DNA, 25 bp, Homo sapien
aactccgcttcgctggcacagaaga

SEQ ID NO: 432682 - DNA, 25 bp, Homo sapien
acagtggatgtgaaaccgggtgcac

SEQ ID NO: 432683 - DNA, 25 bp, Homo sapien
tggcatcaaaggaggacatgggctc

SEQ ID NO: 432684 - DNA, 25 bp, Homo sapien
ttggaatttgcgtggattttttagc

SEQ ID NO: 432685 - DNA, 25 bp, Homo sapien
catccaggttggaggcagccaatac

SEQ ID NO: 432686 - DNA, 25 bp, Homo sapien
taggactttgtagtgacttaaataa

SEQ ID NO: 432687 - DNA, 25 bp, Homo sapien
cttttcaatttgaaacaaagcccat

SEQ ID NO: 432688 - DNA, 25 bp, Homo sapien
ccttctggtccatgatctgggtcac

SEQ ID NO: 432689 - DNA, 25 bp, Homo sapien
tagtccatggtcctgctgagcactg

SEQ ID NO: 432690 - DNA, 25 bp, Homo sapien
ttccgtatgccacgcgtgcggttcc

SEQ ID NO: 432691 - DNA, 25 bp, Homo sapien
tgcggttccacacgaagtcatacca

SEQ ID NO: 432692 - DNA, 25 bp, Homo sapien
catatccaggcaggtgccaacaaaa

SEQ ID NO: 432693 - DNA, 25 bp, Homo sapien
tggctacgggtctcccgcatgtacc

SEQ ID NO: 432694 - DNA, 25 bp, Homo sapien
tctccttctcaggacacatatccag

SEQ ID NO: 432695 - DNA, 25 bp, Homo sapien
ctgggaccacttcgaacacgctcag

SEQ ID NO: 432696 - DNA, 25 bp, Homo sapien
tctctctggtcaagcaggcggtact

SEQ ID NO: 432697 - DNA, 25 bp, Homo sapien
tggtgggcctttagaagacttggct

SEQ ID NO: 432698 - DNA, 25 bp, Homo sapien
gctgagtcaaaagagtctccctcga

SEQ ID NO: 432699 - DNA, 25 bp, Homo sapien
gccacagtgcctatcagggtactga

SEQ ID NO: 432700 - DNA, 25 bp, Homo sapien
taaactgctcgtcacaaaacggaaa

SEQ ID NO: 432701 - DNA, 25 bp, Homo sapien
taaactcagcatgaaaaaagtcttt

SEQ ID NO: 432702 - DNA, 25 bp, Homo sapien
tcaaagattatgtcaaaccagcaac

SEQ ID NO: 432703 - DNA, 25 bp, Homo sapien
gagatctgtcaaagtaggcctggtg

SEQ ID NO: 432704 - DNA, 25 bp, Homo sapien
tgtgctcgggctgacttcaccgtca

SEQ ID NO: 432705 - DNA, 25 bp, Homo sapien
tccctgcggccttgccaagaggaga

SEQ ID NO: 432706 - DNA, 25 bp, Homo sapien
agtgctgaaagggtgcatcctctgt

SEQ ID NO: 432707 - DNA, 25 bp, Homo sapien
ttttattcaggaggctgctagcacc

SEQ ID NO: 432708 - DNA, 25 bp, Homo sapien
tgccaaaagatagccatgtctttat

SEQ ID NO: 432709 - DNA, 25 bp, Homo sapien
tgtgccaaaagatagccatgtcttt

SEQ ID NO: 432710 - DNA, 25 bp, Homo sapien
caaaagatagccatgtctttatgca

SEQ ID NO: 432711 - DNA, 25 bp, Homo sapien
tcctgtgccaaaagatagccatgtc

SEQ ID NO: 432712 - DNA, 25 bp, Homo sapien
tactatgtggttagagcctttcaga

SEQ ID NO: 432713 - DNA, 25 bp, Homo sapien
tgtattgtttgaacgtttacagcga

SEQ ID NO: 432714 - DNA, 25 bp, Homo sapien
cttccaaaagtactatgtggttaga

SEQ ID NO: 432715 - DNA, 25 bp, Homo sapien
cgtttacagcgatcatcttctatga

SEQ ID NO: 432716 - DNA, 25 bp, Homo sapien
caaatggcaagatgggagtactcac

SEQ ID NO: 432717 - DNA, 25 bp, Homo sapien
taaagtgacaaggttcaaatctagg

SEQ ID NO: 432718 - DNA, 25 bp, Homo sapien
ccagcctatgctaataagatatttg

SEQ ID NO: 432719 - DNA, 25 bp, Homo sapien
tagtaagcaaacaactgagggacca

SEQ ID NO: 432720 - DNA, 25 bp, Homo sapien
cagggatgttcttgcactggatggc

SEQ ID NO: 432721 - DNA, 25 bp, Homo sapien
gcaagctttttgctgcgcctggtaa

SEQ ID NO: 432722 - DNA, 25 bp, Homo sapien
gacgcgccggagttcctcttagaga

SEQ ID NO: 432723 - DNA, 25 bp, Homo sapien
ccaagactgtctgtgctctcgcttc

SEQ ID NO: 432724 - DNA, 25 bp, Homo sapien
tttgtctggaggatgatcgccccgg

SEQ ID NO: 432725 - DNA, 25 bp, Homo sapien
ggttcgcccaaaaccgcagatgata

SEQ ID NO: 432726 - DNA, 25 bp, Homo sapien
tttgctagcctggaaaggttcgccc

SEQ ID NO: 432727 - DNA, 25 bp, Homo sapien
gaaaacatcctgtatcgtccgacca

SEQ ID NO: 432728 - DNA, 25 bp, Homo sapien
tgtgtttcccagcacagatgaactt

SEQ ID NO: 432729 - DNA, 25 bp, Homo sapien
ctaatgtttgcactgaagaggaatg

SEQ ID NO: 432730 - DNA, 25 bp, Homo sapien
ggtccaacacttgaggtttgggtga

SEQ ID NO: 432731 - DNA, 25 bp, Homo sapien
tcaagtccagaaaagggtccaacac

SEQ ID NO: 432732 - DNA, 25 bp, Homo sapien
tttgggtgaaccctaatgtttgcac

SEQ ID NO: 432733 - DNA, 25 bp, Homo sapien
ccagataaggtactgttttgtccaa

SEQ ID NO: 432734 - DNA, 25 bp, Homo sapien
aatcccgagctcttcccagataagg

SEQ ID NO: 432735 - DNA, 25 bp, Homo sapien
ctggaaagctggatacctgtgaaaa

SEQ ID NO: 432736 - DNA, 25 bp, Homo sapien
gaccaaatcgaaatggcggcttaga

SEQ ID NO: 432737 - DNA, 25 bp, Homo sapien
tgctgcccactgaaaggattagttg

SEQ ID NO: 432738 - DNA, 25 bp, Homo sapien
ggaagtgttcctacattactagaag

SEQ ID NO: 432739 - DNA, 25 bp, Homo sapien
tacattactagaagacgccgaaaaa

SEQ ID NO: 432740 - DNA, 25 bp, Homo sapien
cgccgaaaaagcactaggctgctgc

SEQ ID NO: 432741 - DNA, 25 bp, Homo sapien
tgtgtacaaaattaattggcttcct

SEQ ID NO: 432742 - DNA, 25 bp, Homo sapien
gaaggtaattaagtattatgtgtac

SEQ ID NO: 432743 - DNA, 25 bp, Homo sapien
tagcactagggagttccccttcgtc

SEQ ID NO: 432744 - DNA, 25 bp, Homo sapien
ctgaaacagcctgtagcactaggga

SEQ ID NO: 432745 - DNA, 25 bp, Homo sapien
cactgtaacgctgtcaaaaccttag

SEQ ID NO: 432746 - DNA, 25 bp, Homo sapien
tagagacgaatttctcccgacttcc

SEQ ID NO: 432747 - DNA, 25 bp, Homo sapien
tctctacagccggagaattcactgt

SEQ ID NO: 432748 - DNA, 25 bp, Homo sapien
ttagcgtttcgggatctcctcccac

SEQ ID NO: 432749 - DNA, 25 bp, Homo sapien
agcacagcccgaaacggcggaggcc

SEQ ID NO: 432750 - DNA, 25 bp, Homo sapien
gcggctggagcgctaagcactttct

SEQ ID NO: 432751 - DNA, 25 bp, Homo sapien
gcgctgccacgaagctgaggcctct

SEQ ID NO: 432752 - DNA, 25 bp, Homo sapien
aacgctccgttagcgacgatgtgga

SEQ ID NO: 432753 - DNA, 25 bp, Homo sapien
gtagaagttgtggatctgcgtgatt

SEQ ID NO: 432754 - DNA, 25 bp, Homo sapien
ctgacccgtgcccgggactcagtgg

SEQ ID NO: 432755 - DNA, 25 bp, Homo sapien
acccgtgcccgggactcagtggagt

SEQ ID NO: 432756 - DNA, 25 bp, Homo sapien
taaattcctcccgcggttagcctga

SEQ ID NO: 432757 - DNA, 25 bp, Homo sapien
gggacagccacgcaagttagactct

SEQ ID NO: 432758 - DNA, 25 bp, Homo sapien
tcagccacacaagttaaactctaga

SEQ ID NO: 432759 - DNA, 25 bp, Homo sapien
gccttcggcctgagctagagccgcg

SEQ ID NO: 432760 - DNA, 25 bp, Homo sapien
ggagggccagcgcgcttccttcctt

SEQ ID NO: 432761 - DNA, 25 bp, Homo sapien
tctggtgaaggtgcccggagccggg

SEQ ID NO: 432762 - DNA, 25 bp, Homo sapien
tggcggttcgtgcactcgctgagct

SEQ ID NO: 432763 - DNA, 25 bp, Homo sapien
taacgagagcacagagtctctggaa

SEQ ID NO: 432764 - DNA, 25 bp, Homo sapien
ggtttgagcttttaacgagagcaca

SEQ ID NO: 432765 - DNA, 25 bp, Homo sapien
aagaggaaatggagtctgagctttg

SEQ ID NO: 432766 - DNA, 25 bp, Homo sapien
gagctttggtttgagcttttaacga

SEQ ID NO: 432767 - DNA, 25 bp, Homo sapien
ttcaagaggcacgaaaagatggttc

SEQ ID NO: 432768 - DNA, 25 bp, Homo sapien
gctctgcagctcagtggcaactctc

SEQ ID NO: 432769 - DNA, 25 bp, Homo sapien
tgttactgccagtagctgcgctggg

SEQ ID NO: 432770 - DNA, 25 bp, Homo sapien
tgcgctgggcccttcggtgttcaca

SEQ ID NO: 432771 - DNA, 25 bp, Homo sapien
acagggttcctccttgtgcggaact

SEQ ID NO: 432772 - DNA, 25 bp, Homo sapien
ctttcaaagatggaagcactgggac

SEQ ID NO: 432773 - DNA, 25 bp, Homo sapien
tgggacagggttcctccttgtgcgg

SEQ ID NO: 432774 - DNA, 25 bp, Homo sapien
ggaagcactgggacagggttcctcc

SEQ ID NO: 432775 - DNA, 25 bp, Homo sapien
tctttagtgggagtctgtgccacag

SEQ ID NO: 432776 - DNA, 25 bp, Homo sapien
tgcacccctacttctttagtgggag

SEQ ID NO: 432777 - DNA, 25 bp, Homo sapien
agataacaggcgcatatcaccacac

SEQ ID NO: 432778 - DNA, 25 bp, Homo sapien
agccatgcacccctacttctttagt

SEQ ID NO: 432779 - DNA, 25 bp, Homo sapien
aactttacctccgtgatggaagagg

SEQ ID NO: 432780 - DNA, 25 bp, Homo sapien
cacaggtgtccctagttattaaatt

SEQ ID NO: 432781 - DNA, 25 bp, Homo sapien
ggctggtggcgtccacggcctcaac

SEQ ID NO: 432782 - DNA, 25 bp, Homo sapien
gtggtattttccccatcaggatgtt

SEQ ID NO: 432783 - DNA, 25 bp, Homo sapien
accagaaagcgagcctgcccagctt

SEQ ID NO: 432784 - DNA, 25 bp, Homo sapien
cggagcaagggatgccccctggaat

SEQ ID NO: 432785 - DNA, 25 bp, Homo sapien
actcgcgtagccactccgggtggtg

SEQ ID NO: 432786 - DNA, 25 bp, Homo sapien
tggtggggttcacaggcccctcact

SEQ ID NO: 432787 - DNA, 25 bp, Homo sapien
tcagggtgggccaggcgtccacagg

SEQ ID NO: 432788 - DNA, 25 bp, Homo sapien
gtggtggtggtgcacggcaggcagc

SEQ ID NO: 432789 - DNA, 25 bp, Homo sapien
ccaggtggccacacagcatggtggt

SEQ ID NO: 432790 - DNA, 25 bp, Homo sapien
ccctcgggggcacatgtggcgggtc

SEQ ID NO: 432791 - DNA, 25 bp, Homo sapien
gaccaactggtgcacctgtgcgttc

SEQ ID NO: 432792 - DNA, 25 bp, Homo sapien
accaactggtgcacctgtgcgttct

SEQ ID NO: 432793 - DNA, 25 bp, Homo sapien
ggaccaactggtgcacctgtgcgtt

SEQ ID NO: 432794 - DNA, 25 bp, Homo sapien
agaagcagggggaccctgaataaag

SEQ ID NO: 432795 - DNA, 25 bp, Homo sapien
ttaatacttcctgaccgttgagtag

SEQ ID NO: 432796 - DNA, 25 bp, Homo sapien
cttccttaatacttcctgaccgttg

SEQ ID NO: 432797 - DNA, 25 bp, Homo sapien
tccttaatacttcctgaccgttgag

SEQ ID NO: 432798 - DNA, 25 bp, Homo sapien
tacttcctgaccgttgagtagggaa

SEQ ID NO: 432799 - DNA, 25 bp, Homo sapien
ctgtgctatgagtggctgctgaggg

SEQ ID NO: 432800 - DNA, 25 bp, Homo sapien
tctgtgctatgagtggctgctgagg

SEQ ID NO: 432801 - DNA, 25 bp, Homo sapien
agccaggtgattagctatctgcata

SEQ ID NO: 432802 - DNA, 25 bp, Homo sapien
ccaggtgattagctatctgcatatg

SEQ ID NO: 432803 - DNA, 25 bp, Homo sapien
gattagctatctgcatatgtccttg

SEQ ID NO: 432804 - DNA, 25 bp, Homo sapien
ggtgattagctatctgcatatgtcc

SEQ ID NO: 432805 - DNA, 25 bp, Homo sapien
ggaaatgcagtagcggttggccacc

SEQ ID NO: 432806 - DNA, 25 bp, Homo sapien
ttaataggagcaaccaacacttggt

SEQ ID NO: 432807 - DNA, 25 bp, Homo sapien
aaccaaccaacagtgtccaggcagg

SEQ ID NO: 432808 - DNA, 25 bp, Homo sapien
ccaccaattctgctttaataggagc

SEQ ID NO: 432809 - DNA, 25 bp, Homo sapien
ggctgagagtgaaacctgcaggcat

SEQ ID NO: 432810 - DNA, 25 bp, Homo sapien
ggccctgatggatacacagtaagca

SEQ ID NO: 432811 - DNA, 25 bp, Homo sapien
acagtaagcatagatgtgtttggga

SEQ ID NO: 432812 - DNA, 25 bp, Homo sapien
gtgaaacctgcaggcataactggcc

SEQ ID NO: 432813 - DNA, 25 bp, Homo sapien
gtaggcaggatgatccttggcgggt

SEQ ID NO: 432814 - DNA, 25 bp, Homo sapien
cgtaggcaggatgatccttggcggg

SEQ ID NO: 432815 - DNA, 25 bp, Homo sapien
taggatgcccgtggggggcagctct

SEQ ID NO: 432816 - DNA, 25 bp, Homo sapien
cagggctgacccgagggctcctctg

SEQ ID NO: 432817 - DNA, 25 bp, Homo sapien
tgacccgagggctcctctgcttggc

SEQ ID NO: 432818 - DNA, 25 bp, Homo sapien
gggcccgagagagctcgtccaggag

SEQ ID NO: 432819 - DNA, 25 bp, Homo sapien
gcctgggccaggtacaggcgcctct

SEQ ID NO: 432820 - DNA, 25 bp, Homo sapien
ccttccagggttatgtgcatgaggg

SEQ ID NO: 432821 - DNA, 25 bp, Homo sapien
aggatggccatgactggaagaccct

SEQ ID NO: 432822 - DNA, 25 bp, Homo sapien
cgcctctccgggcaggatggccatg

SEQ ID NO: 432823 - DNA, 25 bp, Homo sapien
gtctctgcagaaggtccctccttct

SEQ ID NO: 432824 - DNA, 25 bp, Homo sapien
tgcagggcatcgtccggccggtcct

SEQ ID NO: 432825 - DNA, 25 bp, Homo sapien
gcagtctgcagggcatcgtccggcc

SEQ ID NO: 432826 - DNA, 25 bp, Homo sapien
tctgcagggcatcgtccggccggtc

SEQ ID NO: 432827 - DNA, 25 bp, Homo sapien
ccacgttctgccgttcttgctccag

SEQ ID NO: 432828 - DNA, 25 bp, Homo sapien
cgttctgccgttcttgctccagctt

SEQ ID NO: 432829 - DNA, 25 bp, Homo sapien
ccttccacgttctgccgttcttgct

SEQ ID NO: 432830 - DNA, 25 bp, Homo sapien
ccccttccacgttctgccgttcttg

SEQ ID NO: 432831 - DNA, 25 bp, Homo sapien
gtggctccacgcaaaggccctgtgt

SEQ ID NO: 432832 - DNA, 25 bp, Homo sapien
agaccgtgacagagacggtggctcc

SEQ ID NO: 432833 - DNA, 25 bp, Homo sapien
agagacggtggctccacgcaaaggc

SEQ ID NO: 432834 - DNA, 25 bp, Homo sapien
gaagagagaccgtgacagagacggt

SEQ ID NO: 432835 - DNA, 25 bp, Homo sapien
gcttcagcgtcagtcgggtcacttg

SEQ ID NO: 432836 - DNA, 25 bp, Homo sapien
cccaagagcttcagcgtcagtcggg

SEQ ID NO: 432837 - DNA, 25 bp, Homo sapien
agcgtcagtcgggtcacttgctctg

SEQ ID NO: 432838 - DNA, 25 bp, Homo sapien
gtcagtcgggtcacttgctctgctg

SEQ ID NO: 432839 - DNA, 25 bp, Homo sapien
cagggcgggccttacctcctggaga

SEQ ID NO: 432840 - DNA, 25 bp, Homo sapien
gttactcgcaggaaagaactgctca

SEQ ID NO: 432841 - DNA, 25 bp, Homo sapien
tcgcaggaaagaactgctcagcagg

SEQ ID NO: 432842 - DNA, 25 bp, Homo sapien
aggagcccaagcaccggtgttgcct

SEQ ID NO: 432843 - DNA, 25 bp, Homo sapien
gactgcctaccaaggagttcaggaa

SEQ ID NO: 432844 - DNA, 25 bp, Homo sapien
cagtccagaagaacctgtgtgtcag

SEQ ID NO: 432845 - DNA, 25 bp, Homo sapien
cgtcctcaggctaccggtaaacact

SEQ ID NO: 432846 - DNA, 25 bp, Homo sapien
gaagagccctgtgggaagatagcca

SEQ ID NO: 432847 - DNA, 25 bp, Homo sapien
caagtttgcaggaagcttcgcagag

SEQ ID NO: 432848 - DNA, 25 bp, Homo sapien
gggcattaaactccacgttgatgag

SEQ ID NO: 432849 - DNA, 25 bp, Homo sapien
ttcgcagagggtgacgcaaaacagg

SEQ ID NO: 432850 - DNA, 25 bp, Homo sapien
tgagttagtcaatcccactagcagg

SEQ ID NO: 432851 - DNA, 25 bp, Homo sapien
ttgccctcagttctgtaaatggccc

SEQ ID NO: 432852 - DNA, 25 bp, Homo sapien
tcggtgcagctaacccaggaacttg

SEQ ID NO: 432853 - DNA, 25 bp, Homo sapien
gtggccaaaattgctctcttgccct

SEQ ID NO: 432854 - DNA, 25 bp, Homo sapien
catcagtatctatggttgtgtgcct

SEQ ID NO: 432855 - DNA, 25 bp, Homo sapien
gggctggattactcctgacgtagag

SEQ ID NO: 432856 - DNA, 25 bp, Homo sapien
tgacgtagagttcaactcaccttac

SEQ ID NO: 432857 - DNA, 25 bp, Homo sapien
cctggaggggctggattactcctga

SEQ ID NO: 432858 - DNA, 25 bp, Homo sapien
aggggcgcaccttactcctgctggc

SEQ ID NO: 432859 - DNA, 25 bp, Homo sapien
tgctgctggacatgagcagactctg

SEQ ID NO: 432860 - DNA, 25 bp, Homo sapien
tgtttaagatcccagtgccattggg

SEQ ID NO: 432861 - DNA, 25 bp, Homo sapien
tgaagtcagcatgaaaccaggcctt

SEQ ID NO: 432862 - DNA, 25 bp, Homo sapien
tggaggccatccaaccagaaatgaa

SEQ ID NO: 432863 - DNA, 25 bp, Homo sapien
cagagtactctatggccatgaaaag

SEQ ID NO: 432864 - DNA, 25 bp, Homo sapien
tcaaagtggccgttttacagacagt

SEQ ID NO: 432865 - DNA, 25 bp, Homo sapien
cttgctgtcacttgtgagaagccct

SEQ ID NO: 432866 - DNA, 25 bp, Homo sapien
cacttgtgagaagccctccacatct

SEQ ID NO: 432867 - DNA, 25 bp, Homo sapien
tttagatttagagtaattgagaaga

SEQ ID NO: 432868 - DNA, 25 bp, Homo sapien
gatcccacataccacatgtgtggct

SEQ ID NO: 432869 - DNA, 25 bp, Homo sapien
catggagatcccacataccacatgt

SEQ ID NO: 432870 - DNA, 25 bp, Homo sapien
gtgtggcttcccctcttattaacat

SEQ ID NO: 432871 - DNA, 25 bp, Homo sapien
gctgacctgcgtcacttggctgagg

SEQ ID NO: 432872 - DNA, 25 bp, Homo sapien
acagtttcgaagagtactgggcaga

SEQ ID NO: 432873 - DNA, 25 bp, Homo sapien
gactataactgtgaggctgacctgc

SEQ ID NO: 432874 - DNA, 25 bp, Homo sapien
gactgggactgcaggttacagaaag

SEQ ID NO: 432875 - DNA, 25 bp, Homo sapien
cagtctaggcaaacctgggcacatc

SEQ ID NO: 432876 - DNA, 25 bp, Homo sapien
taacagttgtgagattcaggcgcgg

SEQ ID NO: 432877 - DNA, 25 bp, Homo sapien
ggatgtccacagaaacgactctggg

SEQ ID NO: 432878 - DNA, 25 bp, Homo sapien
ccaattccgagtctgggaaccagga

SEQ ID NO: 432879 - DNA, 25 bp, Homo sapien
acagaagactgtggcctgagtcagg

SEQ ID NO: 432880 - DNA, 25 bp, Homo sapien
ggtcgagcttccacggcttcctgag

SEQ ID NO: 432881 - DNA, 25 bp, Homo sapien
tctggcggtcgagcttccacggctt

SEQ ID NO: 432882 - DNA, 25 bp, Homo sapien
aagtttctggcggtcgagcttccac

SEQ ID NO: 432883 - DNA, 25 bp, Homo sapien
cacgctcgggaagggcatcgttact

SEQ ID NO: 432884 - DNA, 25 bp, Homo sapien
aaattctgagcgagattccagggct

SEQ ID NO: 432885 - DNA, 25 bp, Homo sapien
aaccttttgcaagtgaaggcgcacg

SEQ ID NO: 432886 - DNA, 25 bp, Homo sapien
tactccacagttaaggacggcctgc

SEQ ID NO: 432887 - DNA, 25 bp, Homo sapien
taaaatcggccaatcacagcgggcg

SEQ ID NO: 432888 - DNA, 25 bp, Homo sapien
ccaacgactaatgcctgagcgggag

SEQ ID NO: 432889 - DNA, 25 bp, Homo sapien
ggtacgtgagcgcaccaatctgtgg

SEQ ID NO: 432890 - DNA, 25 bp, Homo sapien
gaccagcagcgcgaactttttgccg

SEQ ID NO: 432891 - DNA, 25 bp, Homo sapien
gtgcacgccggggcggggtgtggct

SEQ ID NO: 432892 - DNA, 25 bp, Homo sapien
ggggctacaggggcgtggcgtggct

SEQ ID NO: 432893 - DNA, 25 bp, Homo sapien
ggctacaggggcgtggcgtggctgc

SEQ ID NO: 432894 - DNA, 25 bp, Homo sapien
gggctacaggggcgtggcgtggctg

SEQ ID NO: 432895 - DNA, 25 bp, Homo sapien
aaaaagcgctcggtttgatggccac

SEQ ID NO: 432896 - DNA, 25 bp, Homo sapien
tcggagatgctttccccgcgcgttt

SEQ ID NO: 432897 - DNA, 25 bp, Homo sapien
gccttcgcctcgtccgtcggagatg

SEQ ID NO: 432898 - DNA, 25 bp, Homo sapien
taggtttcgtgggaataaagcgcgc

SEQ ID NO: 432899 - DNA, 25 bp, Homo sapien
gaggcgtcaacgagatgggcactcc

SEQ ID NO: 432900 - DNA, 25 bp, Homo sapien
tgcagtgtcacagccagtatgggca

SEQ ID NO: 432901 - DNA, 25 bp, Homo sapien
ttgtaagaggtaagactcggatccc

SEQ ID NO: 432902 - DNA, 25 bp, Homo sapien
tgtacatgaaatcggcagcaggcgc

SEQ ID NO: 432903 - DNA, 25 bp, Homo sapien
cctcaggccctgacgtgtttccgtt

SEQ ID NO: 432904 - DNA, 25 bp, Homo sapien
cgcccggccaagtgtgtctgattct

SEQ ID NO: 432905 - DNA, 25 bp, Homo sapien
tgatgagaattattaaactggggcc

SEQ ID NO: 432906 - DNA, 25 bp, Homo sapien
gccaagtgtgtctgattctcgtaag

SEQ ID NO: 432907 - DNA, 25 bp, Homo sapien
tagtgcgtgtgaacgagcagctcta

SEQ ID NO: 432908 - DNA, 25 bp, Homo sapien
tacgcctgcgtctcctgtacgaagt

SEQ ID NO: 432909 - DNA, 25 bp, Homo sapien
ttaattttatcagttgggcacggtg

SEQ ID NO: 432910 - DNA, 25 bp, Homo sapien
tctaggcaccgcaggtttacctcgg

SEQ ID NO: 432911 - DNA, 25 bp, Homo sapien
ctagagttcagtagcgcatttttgg

SEQ ID NO: 432912 - DNA, 25 bp, Homo sapien
ttcagtagcgcatttttggcttgct

SEQ ID NO: 432913 - DNA, 25 bp, Homo sapien
tctcgaacgcctaactcagaagatc

SEQ ID NO: 432914 - DNA, 25 bp, Homo sapien
acgcctaactcagaagatccgcctg

SEQ ID NO: 432915 - DNA, 25 bp, Homo sapien
gatggcaccttttgatgcactgtct

SEQ ID NO: 432916 - DNA, 25 bp, Homo sapien
acgcccagccttagatggcaccttt

SEQ ID NO: 432917 - DNA, 25 bp, Homo sapien
ccttagatggcaccttttgatgcac

SEQ ID NO: 432918 - DNA, 25 bp, Homo sapien
tcctccagtccaaggcccagcgcag

SEQ ID NO: 432919 - DNA, 25 bp, Homo sapien
ggtcgatctcgtagctcaggtgaaa

SEQ ID NO: 432920 - DNA, 25 bp, Homo sapien
gatgctgccgacaccaaatctctgt

SEQ ID NO: 432921 - DNA, 25 bp, Homo sapien
gaagattgtcagctgccgaaggtcg

SEQ ID NO: 432922 - DNA, 25 bp, Homo sapien
ttcctgtgacggagaagagcctgac

SEQ ID NO: 432923 - DNA, 25 bp, Homo sapien
gcctccccaggttcaagcaaatctc

SEQ ID NO: 432924 - DNA, 25 bp, Homo sapien
cgcctccccaggttcaagcaaatct

SEQ ID NO: 432925 - DNA, 25 bp, Homo sapien
aggttccctgcgggacgtggaggtg

SEQ ID NO: 432926 - DNA, 25 bp, Homo sapien
ctccaccaccccgggtcaagcagtt

SEQ ID NO: 432927 - DNA, 25 bp, Homo sapien
tagcacggccaaaaagactgaggtc

SEQ ID NO: 432928 - DNA, 25 bp, Homo sapien
gggcaggttccctgcgggacgtgga

SEQ ID NO: 432929 - DNA, 25 bp, Homo sapien
gtttccctcacaaaagcgctcagca

SEQ ID NO: 432930 - DNA, 25 bp, Homo sapien
ctgaagcaccatctgcagaagggct

SEQ ID NO: 432931 - DNA, 25 bp, Homo sapien
tccagtttgtggacgtcctgctgaa

SEQ ID NO: 432932 - DNA, 25 bp, Homo sapien
cccaagcgtaggtgtctgtgcttaa

SEQ ID NO: 432933 - DNA, 25 bp, Homo sapien
gcacacgtttggtacagacacatcg

SEQ ID NO: 432934 - DNA, 25 bp, Homo sapien
aaaatcctgacgtgattccgcccac

SEQ ID NO: 432935 - DNA, 25 bp, Homo sapien
gtgtgtcagtggaaccagcccgtct

SEQ ID NO: 432936 - DNA, 25 bp, Homo sapien
gccctttcctggtgtagtgtcatac

SEQ ID NO: 432937 - DNA, 25 bp, Homo sapien
aaggttctcgtctgccgggtgtagc

SEQ ID NO: 432938 - DNA, 25 bp, Homo sapien
caatgtcaaggtaggaacggtgcca

SEQ ID NO: 432939 - DNA, 25 bp, Homo sapien
gctgtgcttccttacagaggtcgga

SEQ ID NO: 432940 - DNA, 25 bp, Homo sapien
tgcttggaagccagacgaaacggct

SEQ ID NO: 432941 - DNA, 25 bp, Homo sapien
gaagaaggcatgttccctgccgtga

SEQ ID NO: 432942 - DNA, 25 bp, Homo sapien
gcaggtatcaccctgacaaacagtt

SEQ ID NO: 432943 - DNA, 25 bp, Homo sapien
tgccgtgaagatacttggaagctct

SEQ ID NO: 432944 - DNA, 25 bp, Homo sapien
ggcaggaaactctccagcgtgagtc

SEQ ID NO: 432945 - DNA, 25 bp, Homo sapien
caagattagaaagatccctgactgc

SEQ ID NO: 432946 - DNA, 25 bp, Homo sapien
caggtaatgcaagtcctcgccgagt

SEQ ID NO: 432947 - DNA, 25 bp, Homo sapien
tagaagtgatccagcaaagattggg

SEQ ID NO: 432948 - DNA, 25 bp, Homo sapien
tatcactgtaccctggaaacgtagg

SEQ ID NO: 432949 - DNA, 25 bp, Homo sapien
tcctgccacccgatgattaaacagt

SEQ ID NO: 432950 - DNA, 25 bp, Homo sapien
aagtctaagccagtgtactcagtga

SEQ ID NO: 432951 - DNA, 25 bp, Homo sapien
cagtttgacttaatcaccgtctgga

SEQ ID NO: 432952 - DNA, 25 bp, Homo sapien
tcatggctctttcctgcgacaattc

SEQ ID NO: 432953 - DNA, 25 bp, Homo sapien
tactcttcatgtgcggtgacaccag

SEQ ID NO: 432954 - DNA, 25 bp, Homo sapien
tccgtatgttttaggcccatgacct

SEQ ID NO: 432955 - DNA, 25 bp, Homo sapien
taagtgtcctcacctttatgcatga

SEQ ID NO: 432956 - DNA, 25 bp, Homo sapien
catgaccttcgtgaggtgacgggca

SEQ ID NO: 432957 - DNA, 25 bp, Homo sapien
tattttcttaacgtgtacagatgga

SEQ ID NO: 432958 - DNA, 25 bp, Homo sapien
cttaacgtgtacagatggaaacttc

SEQ ID NO: 432959 - DNA, 25 bp, Homo sapien
ttttcttaacgtgtacagatggaaa

SEQ ID NO: 432960 - DNA, 25 bp, Homo sapien
ttcttaacgtgtacagatggaaact

SEQ ID NO: 432961 - DNA, 25 bp, Homo sapien
tagacagtaatacctagccaaggac

SEQ ID NO: 432962 - DNA, 25 bp, Homo sapien
tatgtatccacctctcatggccatg

SEQ ID NO: 432963 - DNA, 25 bp, Homo sapien
tgtttcccggcctggtttcaagctc

SEQ ID NO: 432964 - DNA, 25 bp, Homo sapien
cagtggaacccggagcattcttgaa

SEQ ID NO: 432965 - DNA, 25 bp, Homo sapien
aagaggtgagcaggacaggtatggg

SEQ ID NO: 432966 - DNA, 25 bp, Homo sapien
ggtacaacaaaggaacagccaaatg

SEQ ID NO: 432967 - DNA, 25 bp, Homo sapien
gccctcccagcactatcgggggaac

SEQ ID NO: 432968 - DNA, 25 bp, Homo sapien
gtgtccactgcaggcgtgctgccct

SEQ ID NO: 432969 - DNA, 25 bp, Homo sapien
gagtacaaagaggaagtttagagct

SEQ ID NO: 432970 - DNA, 25 bp, Homo sapien
tacaaagaggaagtttagagctggg

SEQ ID NO: 432971 - DNA, 25 bp, Homo sapien
aatagagtacaaagaggaagtttag

SEQ ID NO: 432972 - DNA, 25 bp, Homo sapien
agaaatagagtacaaagaggaagtt

SEQ ID NO: 432973 - DNA, 25 bp, Homo sapien
tgcaatcatcacagtggacctgagg

SEQ ID NO: 432974 - DNA, 25 bp, Homo sapien
ctggcctcgtcaaatgcacgtttta

SEQ ID NO: 432975 - DNA, 25 bp, Homo sapien
tacaatcgatttgtacagttaatgc

SEQ ID NO: 432976 - DNA, 25 bp, Homo sapien
aggattgagattagacaggcataag

SEQ ID NO: 432977 - DNA, 25 bp, Homo sapien
cctaggaccagttgacagaagacga

SEQ ID NO: 432978 - DNA, 25 bp, Homo sapien
aagtatgtgacccaagtgagtgacc

SEQ ID NO: 432979 - DNA, 25 bp, Homo sapien
tccatacggtatggtggcatgaacc

SEQ ID NO: 432980 - DNA, 25 bp, Homo sapien
ttttaatgactgcacctgggatgga

SEQ ID NO: 432981 - DNA, 25 bp, Homo sapien
cacaatgggagtatagcactggtct

SEQ ID NO: 432982 - DNA, 25 bp, Homo sapien
agcattcccatgcagttacgcactg

SEQ ID NO: 432983 - DNA, 25 bp, Homo sapien
tgtctaaagacctctgtaaacctgg

SEQ ID NO: 432984 - DNA, 25 bp, Homo sapien
tgtgagtaggaaaagacaagcctcg

SEQ ID NO: 432985 - DNA, 25 bp, Homo sapien
tagctcgagaaccaacaagcgtctt

SEQ ID NO: 432986 - DNA, 25 bp, Homo sapien
tttcttaacggcaggaggtgcaagc

SEQ ID NO: 432987 - DNA, 25 bp, Homo sapien
ggtttatatgccactctctggagca

SEQ ID NO: 432988 - DNA, 25 bp, Homo sapien
tctacaggatgtctaggtggtccag

SEQ ID NO: 432989 - DNA, 25 bp, Homo sapien
catattgtgagaaagcctcggccac

SEQ ID NO: 432990 - DNA, 25 bp, Homo sapien
gaggctggttcacaaaaaggataca

SEQ ID NO: 432991 - DNA, 25 bp, Homo sapien
tgtcagacattcgagcagatgaacc

SEQ ID NO: 432992 - DNA, 25 bp, Homo sapien
ttttgccagctgagtagtacccttc

SEQ ID NO: 432993 - DNA, 25 bp, Homo sapien
taagagtctcggttggcactaagca

SEQ ID NO: 432994 - DNA, 25 bp, Homo sapien
taagatgcgctcattagagtgggcc

SEQ ID NO: 432995 - DNA, 25 bp, Homo sapien
gaagcttctctatatgtaacgggac

SEQ ID NO: 432996 - DNA, 25 bp, Homo sapien
tacttatgccttcgtctggagagac

SEQ ID NO: 432997 - DNA, 25 bp, Homo sapien
ggaagaagggtatgtaagtcccgca

SEQ ID NO: 432998 - DNA, 25 bp, Homo sapien
cagaagcagacgctgcgactgagtt

SEQ ID NO: 432999 - DNA, 25 bp, Homo sapien
gtaagtcccgcaaagctttggccaa

SEQ ID NO: 433000 - DNA, 25 bp, Homo sapien
catggtatcaacacccgtgaaagga

SEQ ID NO: 433001 - DNA, 25 bp, Homo sapien
taactcagtaacaggcgggcggcat

SEQ ID NO: 433002 - DNA, 25 bp, Homo sapien
aactgctgaagttcgccagactcgg

SEQ ID NO: 433003 - DNA, 25 bp, Homo sapien
tgtggagctctggaacgagaactgc

SEQ ID NO: 433004 - DNA, 25 bp, Homo sapien
gggccaacgatgtgtacttctaggg

SEQ ID NO: 433005 - DNA, 25 bp, Homo sapien
taccagctttattgacattccaggt

SEQ ID NO: 433006 - DNA, 25 bp, Homo sapien
gcttcttcacacagtggtgggcatc

SEQ ID NO: 433007 - DNA, 25 bp, Homo sapien
ctctaaacgtgggtttagttagctg

SEQ ID NO: 433008 - DNA, 25 bp, Homo sapien
tctcctgtggattacaatgtctcta

SEQ ID NO: 433009 - DNA, 25 bp, Homo sapien
aagcctgtggtaattaagtatgatg

SEQ ID NO: 433010 - DNA, 25 bp, Homo sapien
tttttccatctgaggaaaagcctgt

SEQ ID NO: 433011 - DNA, 25 bp, Homo sapien
taattaagtatgatgtgttctgtag

SEQ ID NO: 433012 - DNA, 25 bp, Homo sapien
cctccagtacagtgtgaaatagaac

SEQ ID NO: 433013 - DNA, 25 bp, Homo sapien
cattatggcaggtccagacaatgcc

SEQ ID NO: 433014 - DNA, 25 bp, Homo sapien
cagacaatgccatcttccttaagag

SEQ ID NO: 433015 - DNA, 25 bp, Homo sapien
taaaaacattatggcaggtccagac

SEQ ID NO: 433016 - DNA, 25 bp, Homo sapien
ccagacaatgccatcttccttaaga

SEQ ID NO: 433017 - DNA, 25 bp, Homo sapien
gctggtgtccagatagcagactcaa

SEQ ID NO: 433018 - DNA, 25 bp, Homo sapien
gaccctgcctttgagtagcccttaa

SEQ ID NO: 433019 - DNA, 25 bp, Homo sapien
tcaaactaaggtacttgggagccag

SEQ ID NO: 433020 - DNA, 25 bp, Homo sapien
aaggtagcccaaaccctgctttgag

SEQ ID NO: 433021 - DNA, 25 bp, Homo sapien
ggctgccgtccaaaaacacacgtga

SEQ ID NO: 433022 - DNA, 25 bp, Homo sapien
cattggtgaatgctgtcatgcccca

SEQ ID NO: 433023 - DNA, 25 bp, Homo sapien
ccagtcccaagtggtgtggagcaca

SEQ ID NO: 433024 - DNA, 25 bp, Homo sapien
cttgatgaagcacgcagaacccaga

SEQ ID NO: 433025 - DNA, 25 bp, Homo sapien
catgggagcataaggactcacgttc

SEQ ID NO: 433026 - DNA, 25 bp, Homo sapien
ccaggtctgtaagtcaagggtgtac

SEQ ID NO: 433027 - DNA, 25 bp, Homo sapien
tcattatttacaggcagtggtggca

SEQ ID NO: 433028 - DNA, 25 bp, Homo sapien
ggcagcttgacgtgcagtcccgaat

SEQ ID NO: 433029 - DNA, 25 bp, Homo sapien
ggtgataaggctaccaggcttctcc

SEQ ID NO: 433030 - DNA, 25 bp, Homo sapien
cacaagctggccagataaggcagaa

SEQ ID NO: 433031 - DNA, 25 bp, Homo sapien
cttggccagtggatgtctcgtgaca

SEQ ID NO: 433032 - DNA, 25 bp, Homo sapien
ttccttcggcgaacagagctcactg

SEQ ID NO: 433033 - DNA, 25 bp, Homo sapien
gtctggatcagtgcctaacaaagct

SEQ ID NO: 433034 - DNA, 25 bp, Homo sapien
cagcattgccccgtattgaaggtgg

SEQ ID NO: 433035 - DNA, 25 bp, Homo sapien
tgtttggtgagtaccggcagtacag

SEQ ID NO: 433036 - DNA, 25 bp, Homo sapien
tgttcaaacttgactaagctgagtg

SEQ ID NO: 433037 - DNA, 25 bp, Homo sapien
catacagaggtttgggaagtagtct

SEQ ID NO: 433038 - DNA, 25 bp, Homo sapien
tcagtggtggtaagacaaggtgtct

SEQ ID NO: 433039 - DNA, 25 bp, Homo sapien
taataatcctgttgtaagtatgtac

SEQ ID NO: 433040 - DNA, 25 bp, Homo sapien
gaagtagtctaatggacattcctta

SEQ ID NO: 433041 - DNA, 25 bp, Homo sapien
aatattccttgagcctgatgggtgg

SEQ ID NO: 433042 - DNA, 25 bp, Homo sapien
tgggaatattccttgagcctgatgg

SEQ ID NO: 433043 - DNA, 25 bp, Homo sapien
cctaggcaacatgaagagaccacat

SEQ ID NO: 433044 - DNA, 25 bp, Homo sapien
ctgggcattgtggctttctcaggag

SEQ ID NO: 433045 - DNA, 25 bp, Homo sapien
gcatatggaaattgagcagcactct

SEQ ID NO: 433046 - DNA, 25 bp, Homo sapien
tctctagaacacaccaccatatgct

SEQ ID NO: 433047 - DNA, 25 bp, Homo sapien
tactgttataaaagggcaggtctgg

SEQ ID NO: 433048 - DNA, 25 bp, Homo sapien
gatgcagcacaagggtcctgccaga

SEQ ID NO: 433049 - DNA, 25 bp, Homo sapien
ggcacagggaggactacctgatttt

SEQ ID NO: 433050 - DNA, 25 bp, Homo sapien
gactcagccacacttgcagggactg

SEQ ID NO: 433051 - DNA, 25 bp, Homo sapien
tgggtaagggtagtgcacccaactc

SEQ ID NO: 433052 - DNA, 25 bp, Homo sapien
gggtagtgcacccaactcgtgtccc

SEQ ID NO: 433053 - DNA, 25 bp, Homo sapien
gcttgcctcatgctaacttgcttga

SEQ ID NO: 433054 - DNA, 25 bp, Homo sapien
tctgctcaacatccagccctgtgta

SEQ ID NO: 433055 - DNA, 25 bp, Homo sapien
agaaaagctccttctagcccagcca

SEQ ID NO: 433056 - DNA, 25 bp, Homo sapien
tgtgtaaaagctctaggcttgcctc

SEQ ID NO: 433057 - DNA, 25 bp, Homo sapien
tcctaattagctacaacacggctgg

SEQ ID NO: 433058 - DNA, 25 bp, Homo sapien
cacggtgcacgctttatcactgaga

SEQ ID NO: 433059 - DNA, 25 bp, Homo sapien
gccaaccagctgttatctgcatgga

SEQ ID NO: 433060 - DNA, 25 bp, Homo sapien
cttgaatcgcatgggtcacggaggc

SEQ ID NO: 433061 - DNA, 25 bp, Homo sapien
ttcctggaagtcacattcgccgtct

SEQ ID NO: 433062 - DNA, 25 bp, Homo sapien
tccagtgtttccatgactttgtcca

SEQ ID NO: 433063 - DNA, 25 bp, Homo sapien
gcaggcagtagtaaccatggcaaca

SEQ ID NO: 433064 - DNA, 25 bp, Homo sapien
tcatgttcaaagaactcgtggcagg

SEQ ID NO: 433065 - DNA, 25 bp, Homo sapien
aatggaattttggaccatcaaaaca

SEQ ID NO: 433066 - DNA, 25 bp, Homo sapien
gaattttggaccatcaaaacatgat

SEQ ID NO: 433067 - DNA, 25 bp, Homo sapien
ttaaatggaattttggaccatcaaa

SEQ ID NO: 433068 - DNA, 25 bp, Homo sapien
tggaattttggaccatcaaaacatg

SEQ ID NO: 433069 - DNA, 25 bp, Homo sapien
gataacttgagcacaggaagtttga

SEQ ID NO: 433070 - DNA, 25 bp, Homo sapien
gaccagcctgggcaacatagggaga

SEQ ID NO: 433071 - DNA, 25 bp, Homo sapien
ggaggataacttgagcacaggaagt

SEQ ID NO: 433072 - DNA, 25 bp, Homo sapien
gaggataacttgagcacaggaagtt

SEQ ID NO: 433073 - DNA, 25 bp, Homo sapien
ccttccagaatattggtggaaaacg

SEQ ID NO: 433074 - DNA, 25 bp, Homo sapien
tggaaaacgtcgatgagggccacca

SEQ ID NO: 433075 - DNA, 25 bp, Homo sapien
gctccttcagttcggatttcttcag

SEQ ID NO: 433076 - DNA, 25 bp, Homo sapien
gggaaagctcattgttgatgagctc

SEQ ID NO: 433077 - DNA, 25 bp, Homo sapien
tgagcaaaccatcaactgcaagctg

SEQ ID NO: 433078 - DNA, 25 bp, Homo sapien
ggcactcttttcaagctcagagcag

SEQ ID NO: 433079 - DNA, 25 bp, Homo sapien
catgccctctgaattctggctgggt

SEQ ID NO: 433080 - DNA, 25 bp, Homo sapien
tcctgcaaggctccaagatgaggtg

SEQ ID NO: 433081 - DNA, 25 bp, Homo sapien
ctgaagagttacttacccagggcgg

SEQ ID NO: 433082 - DNA, 25 bp, Homo sapien
tacgtaatttctgagtggcgtcctg

SEQ ID NO: 433083 - DNA, 25 bp, Homo sapien
aaatgctgccaattgtcctaaaggg

SEQ ID NO: 433084 - DNA, 25 bp, Homo sapien
tacctagcgtgtgaggatccctcta

SEQ ID NO: 433085 - DNA, 25 bp, Homo sapien
ttgctgcaggcgtcgtctctgctgc

SEQ ID NO: 433086 - DNA, 25 bp, Homo sapien
cactgcaggccgtggcagccaatgg

SEQ ID NO: 433087 - DNA, 25 bp, Homo sapien
aggatggatgaaccctggtgcagcc

SEQ ID NO: 433088 - DNA, 25 bp, Homo sapien
caggcgtcgtctctgctgcgggtcc

SEQ ID NO: 433089 - DNA, 25 bp, Homo sapien
taaatcagggttctaacagttggag

SEQ ID NO: 433090 - DNA, 25 bp, Homo sapien
aaaagcgtattcttcaaccctggca

SEQ ID NO: 433091 - DNA, 25 bp, Homo sapien
tggctgaagaatcaagcggaattcc

SEQ ID NO: 433092 - DNA, 25 bp, Homo sapien
ctcttgaggcgctgatcataaacaa

SEQ ID NO: 433093 - DNA, 25 bp, Homo sapien
tcaacccagagatatgcaagctgtg

SEQ ID NO: 433094 - DNA, 25 bp, Homo sapien
tactctaaaagcgtgatccatagca

SEQ ID NO: 433095 - DNA, 25 bp, Homo sapien
catgcattgctggagggaacatgcc

SEQ ID NO: 433096 - DNA, 25 bp, Homo sapien
ccaactgtcatcgaggatgaggaac

SEQ ID NO: 433097 - DNA, 25 bp, Homo sapien
ccagaaacggtacagtgagtgaaag

SEQ ID NO: 433098 - DNA, 25 bp, Homo sapien
taaactggtgcgtccacacagtgga

SEQ ID NO: 433099 - DNA, 25 bp, Homo sapien
cacaagcgctcaagttcgtaggctg

SEQ ID NO: 433100 - DNA, 25 bp, Homo sapien
taggctgtacgccagaaaagctgtt

SEQ ID NO: 433101 - DNA, 25 bp, Homo sapien
gagtaacctacagcaggaataccgc

SEQ ID NO: 433102 - DNA, 25 bp, Homo sapien
taatcggtgacttacaagcctagtg

SEQ ID NO: 433103 - DNA, 25 bp, Homo sapien
gccatgcggcgtctagtgtctgttt

SEQ ID NO: 433104 - DNA, 25 bp, Homo sapien
tctaaaactaggcaagacacgctgc

SEQ ID NO: 433105 - DNA, 25 bp, Homo sapien
gcgagctgcgcttcgacatcaggaa

SEQ ID NO: 433106 - DNA, 25 bp, Homo sapien
aagcctctgaactcacgatgcgggt

SEQ ID NO: 433107 - DNA, 25 bp, Homo sapien
cttaactggaagagctgagcgccga

SEQ ID NO: 433108 - DNA, 25 bp, Homo sapien
gaaaattgggcgcaagaagctcaga

SEQ ID NO: 433109 - DNA, 25 bp, Homo sapien
tggaataggacctcccattttacac

SEQ ID NO: 433110 - DNA, 25 bp, Homo sapien
caaagggtgctactcaatagctgtc

SEQ ID NO: 433111 - DNA, 25 bp, Homo sapien
caagctaggacaagtgatttggaac

SEQ ID NO: 433112 - DNA, 25 bp, Homo sapien
tacactttacccgattggctgttag

SEQ ID NO: 433113 - DNA, 25 bp, Homo sapien
tgattgcaggagctttcaggaaagc

SEQ ID NO: 433114 - DNA, 25 bp, Homo sapien
acgaacattctgacctgtagttgat

SEQ ID NO: 433115 - DNA, 25 bp, Homo sapien
gacctgtagttgattgcaggagctt

SEQ ID NO: 433116 - DNA, 25 bp, Homo sapien
caggaaagcatcagggggaaataat

SEQ ID NO: 433117 - DNA, 25 bp, Homo sapien
aagaaaacaacacgcttgtgttcac

SEQ ID NO: 433118 - DNA, 25 bp, Homo sapien
cttcaggcggcccaagacactgcga

SEQ ID NO: 433119 - DNA, 25 bp, Homo sapien
aaacaacacgcttgtgttcactgtg

SEQ ID NO: 433120 - DNA, 25 bp, Homo sapien
cagcccagatatcctcggaagagca

SEQ ID NO: 433121 - DNA, 25 bp, Homo sapien
aacccacagataatgaaggtcagca

SEQ ID NO: 433122 - DNA, 25 bp, Homo sapien
tttggtcacccgagttagcaaccca

SEQ ID NO: 433123 - DNA, 25 bp, Homo sapien
gttagcaacccacagataatgaagg

SEQ ID NO: 433124 - DNA, 25 bp, Homo sapien
tcacccgagttagcaacccacagat

SEQ ID NO: 433125 - DNA, 25 bp, Homo sapien
taattgggcatcaggtcctgaaggt

SEQ ID NO: 433126 - DNA, 25 bp, Homo sapien
ttaattgggcatcaggtcctgaagg

SEQ ID NO: 433127 - DNA, 25 bp, Homo sapien
aattgggcatcaggtcctgaaggtg

SEQ ID NO: 433128 - DNA, 25 bp, Homo sapien
tcagatggtggcatagtagtctcgg

SEQ ID NO: 433129 - DNA, 25 bp, Homo sapien
catagtctcggaagtagcagtctca

SEQ ID NO: 433130 - DNA, 25 bp, Homo sapien
tagtctcgggagtagtggcctcaga

SEQ ID NO: 433131 - DNA, 25 bp, Homo sapien
caggaaatgctggtcgtcgagtata

SEQ ID NO: 433132 - DNA, 25 bp, Homo sapien
tctagttgttccataccagaagtaa

SEQ ID NO: 433133 - DNA, 25 bp, Homo sapien
gtagtagcaattatgtccatcccca

SEQ ID NO: 433134 - DNA, 25 bp, Homo sapien
ccccatggtcatccaatccctgatg

SEQ ID NO: 433135 - DNA, 25 bp, Homo sapien
gctgttgtgttggtagtagcaatta

SEQ ID NO: 433136 - DNA, 25 bp, Homo sapien
ctggggcacggggatgatctgtggc

SEQ ID NO: 433137 - DNA, 25 bp, Homo sapien
ggcttggggtcaagctccagctgca

SEQ ID NO: 433138 - DNA, 25 bp, Homo sapien
cctggggcacggggatgatctgtgg

SEQ ID NO: 433139 - DNA, 25 bp, Homo sapien
gctcccaagctgtgtgctgcagccc

SEQ ID NO: 433140 - DNA, 25 bp, Homo sapien
acatcttgccccctttatgttctga

SEQ ID NO: 433141 - DNA, 25 bp, Homo sapien
ctggcccatgaacccacacatcttg

SEQ ID NO: 433142 - DNA, 25 bp, Homo sapien
gctggcccatgaacccacacatctt

SEQ ID NO: 433143 - DNA, 25 bp, Homo sapien
tgttctgatattgggggcctctcct

SEQ ID NO: 433144 - DNA, 25 bp, Homo sapien
aaatgagcagattggagagaattct

SEQ ID NO: 433145 - DNA, 25 bp, Homo sapien
aatgagcagattggagagaattctt

SEQ ID NO: 433146 - DNA, 25 bp, Homo sapien
aagcagtagccattacacggtgact

SEQ ID NO: 433147 - DNA, 25 bp, Homo sapien
agccattacacggtgacttgaattc

SEQ ID NO: 433148 - DNA, 25 bp, Homo sapien
gtagccattacacggtgacttgaat

SEQ ID NO: 433149 - DNA, 25 bp, Homo sapien
gcagtagccattacacggtgacttg

SEQ ID NO: 433150 - DNA, 25 bp, Homo sapien
tcagccagtagatcgggaggatgta

SEQ ID NO: 433151 - DNA, 25 bp, Homo sapien
ggctagcaactctaattgaggcatc

SEQ ID NO: 433152 - DNA, 25 bp, Homo sapien
tgaggcatcactgttcaagagtcct

SEQ ID NO: 433153 - DNA, 25 bp, Homo sapien
gaggcagtgggttctatagagtcca

SEQ ID NO: 433154 - DNA, 25 bp, Homo sapien
ctgcaagggtgaacagtagggactt

SEQ ID NO: 433155 - DNA, 25 bp, Homo sapien
ttgggccaggagcataaaaactgca

SEQ ID NO: 433156 - DNA, 25 bp, Homo sapien
aaactgcaagggtgaacagtaggga

SEQ ID NO: 433157 - DNA, 25 bp, Homo sapien
caagggtgaacagtagggacttcat

SEQ ID NO: 433158 - DNA, 25 bp, Homo sapien
cctgagagccttcaagtttcttaga

SEQ ID NO: 433159 - DNA, 25 bp, Homo sapien
tctatcctgagagccttcaagtttc

SEQ ID NO: 433160 - DNA, 25 bp, Homo sapien
ctgctctatcctgagagccttcaag

SEQ ID NO: 433161 - DNA, 25 bp, Homo sapien
gagagccttcaagtttcttagaaca

SEQ ID NO: 433162 - DNA, 25 bp, Homo sapien
ctcttcaggtttgcacttcttcttg

SEQ ID NO: 433163 - DNA, 25 bp, Homo sapien
gcaaattccaacgtcgtttagacac

SEQ ID NO: 433164 - DNA, 25 bp, Homo sapien
gcacttcttcttgcaaattccaacg

SEQ ID NO: 433165 - DNA, 25 bp, Homo sapien
gtttagacactttttcacataccaa

SEQ ID NO: 433166 - DNA, 25 bp, Homo sapien
acagcagtccctttgtttgccgcac

SEQ ID NO: 433167 - DNA, 25 bp, Homo sapien
acacagcagtccctttgtttgccgc

SEQ ID NO: 433168 - DNA, 25 bp, Homo sapien
agctggaacacagcagtccctttgt

SEQ ID NO: 433169 - DNA, 25 bp, Homo sapien
ggaacacagcagtccctttgtttgc

SEQ ID NO: 433170 - DNA, 25 bp, Homo sapien
tggacacagaaaacaggataattag

SEQ ID NO: 433171 - DNA, 25 bp, Homo sapien
ctggacacagaaaacaggataatta

SEQ ID NO: 433172 - DNA, 25 bp, Homo sapien
acacagaaaacaggataattagcac

SEQ ID NO: 433173 - DNA, 25 bp, Homo sapien
ggacacagaaaacaggataattagc

SEQ ID NO: 433174 - DNA, 25 bp, Homo sapien
taggagccatcgaagacatcgaagc

SEQ ID NO: 433175 - DNA, 25 bp, Homo sapien
catcgaagacatcgaagcagtagtc

SEQ ID NO: 433176 - DNA, 25 bp, Homo sapien
ggagccatcgaagacatcgaagcag

SEQ ID NO: 433177 - DNA, 25 bp, Homo sapien
cgaagacatcgaagcagtagtcatc

SEQ ID NO: 433178 - DNA, 25 bp, Homo sapien
tttgctttaatgagtcggggatcct

SEQ ID NO: 433179 - DNA, 25 bp, Homo sapien
gaactgcacactatgctaccttcct

SEQ ID NO: 433180 - DNA, 25 bp, Homo sapien
tttggtccagtgaactgcacactat

SEQ ID NO: 433181 - DNA, 25 bp, Homo sapien
cagtgaactgcacactatgctacct

SEQ ID NO: 433182 - DNA, 25 bp, Homo sapien
tgcacactatgctaccttcctcaga

SEQ ID NO: 433183 - DNA, 25 bp, Homo sapien
agaattgcaatgatcatgaagagcc

SEQ ID NO: 433184 - DNA, 25 bp, Homo sapien
aattgcaatgatcatgaagagcccc

SEQ ID NO: 433185 - DNA, 25 bp, Homo sapien
gaattgcaatgatcatgaagagccc

SEQ ID NO: 433186 - DNA, 25 bp, Homo sapien
ccagtaaggtagtagtctattgggt

SEQ ID NO: 433187 - DNA, 25 bp, Homo sapien
tatccagtaaggtagtagtctattg

SEQ ID NO: 433188 - DNA, 25 bp, Homo sapien
ttatccagtaaggtagtagtctatt

SEQ ID NO: 433189 - DNA, 25 bp, Homo sapien
tccagtaaggtagtagtctattggg

SEQ ID NO: 433190 - DNA, 25 bp, Homo sapien
catagttattccagcacttcttaag

SEQ ID NO: 433191 - DNA, 25 bp, Homo sapien
cctgcaatgtccttgtacatagtta

SEQ ID NO: 433192 - DNA, 25 bp, Homo sapien
cattttcacatagtgcctcaggcac

SEQ ID NO: 433193 - DNA, 25 bp, Homo sapien
tagactgtgtcttcaggcttgggaa

SEQ ID NO: 433194 - DNA, 25 bp, Homo sapien
tggcaatgcactttattagaatatg

SEQ ID NO: 433195 - DNA, 25 bp, Homo sapien
gaagatgtatatctcatcaccttag

SEQ ID NO: 433196 - DNA, 25 bp, Homo sapien
ccttagtttattagactaggttgag

SEQ ID NO: 433197 - DNA, 25 bp, Homo sapien
gctcgaaggtcattttaaggatcaa

SEQ ID NO: 433198 - DNA, 25 bp, Homo sapien
tttgttcagggtagttgggaccagc

SEQ ID NO: 433199 - DNA, 25 bp, Homo sapien
cagacatggtattttccccggccgg

SEQ ID NO: 433200 - DNA, 25 bp, Homo sapien
tatacttctgggtgtggctagtcca

SEQ ID NO: 433201 - DNA, 25 bp, Homo sapien
ccactgtttgggtcctgaggttaga

SEQ ID NO: 433202 - DNA, 25 bp, Homo sapien
gctctcaaaactctggatcatcttt

SEQ ID NO: 433203 - DNA, 25 bp, Homo sapien
gaggtactcacaggtaacttgtcca

SEQ ID NO: 433204 - DNA, 25 bp, Homo sapien
gggaagtctgtaaatatgaagctgt

SEQ ID NO: 433205 - DNA, 25 bp, Homo sapien
ttaaaatgagagctccgagcgctga

SEQ ID NO: 433206 - DNA, 25 bp, Homo sapien
ggtgccagagaggaagccttgaatc

SEQ ID NO: 433207 - DNA, 25 bp, Homo sapien
tctgactctgtttgaaaacaccctt

SEQ ID NO: 433208 - DNA, 25 bp, Homo sapien
aaagcaggtttgtatgctgctcgca

SEQ ID NO: 433209 - DNA, 25 bp, Homo sapien
tgccatgagcagtgaagtgcagcca

SEQ ID NO: 433210 - DNA, 25 bp, Homo sapien
tgaggctggcaaagataggaaaaag

SEQ ID NO: 433211 - DNA, 25 bp, Homo sapien
ctggtactgtagcatgaggctggca

SEQ ID NO: 433212 - DNA, 25 bp, Homo sapien
gtactgtagcatgaggctggcaaag

SEQ ID NO: 433213 - DNA, 25 bp, Homo sapien
gaggctggcaaagataggaaaaagg

SEQ ID NO: 433214 - DNA, 25 bp, Homo sapien
ccattaaacagcgtctcaagccaat

SEQ ID NO: 433215 - DNA, 25 bp, Homo sapien
tcacagcactagaattcttggcagg

SEQ ID NO: 433216 - DNA, 25 bp, Homo sapien
ctccagtgatggtgttggcagtatg

SEQ ID NO: 433217 - DNA, 25 bp, Homo sapien
tcatccacattgcagtgatccctgc

SEQ ID NO: 433218 - DNA, 25 bp, Homo sapien
atagatagcaaaaatagagaggaac

SEQ ID NO: 433219 - DNA, 25 bp, Homo sapien
tgaaggggtggcttggggagctggt

SEQ ID NO: 433220 - DNA, 25 bp, Homo sapien
gggagctggtggtggtttaatggag

SEQ ID NO: 433221 - DNA, 25 bp, Homo sapien
ggggagctggtggtggtttaatgga

SEQ ID NO: 433222 - DNA, 25 bp, Homo sapien
ggctgaaggggtggcttggggagct

SEQ ID NO: 433223 - DNA, 25 bp, Homo sapien
tcaggaatccgagggctgccaagac

SEQ ID NO: 433224 - DNA, 25 bp, Homo sapien
ggtcaggaatccgagggctgccaag

SEQ ID NO: 433225 - DNA, 25 bp, Homo sapien
ctgggtcaggaatccgagggctgcc

SEQ ID NO: 433226 - DNA, 25 bp, Homo sapien
ggaatccgagggctgccaagaccag

SEQ ID NO: 433227 - DNA, 25 bp, Homo sapien
ccttaggatgttgtgcaaatgagac

SEQ ID NO: 433228 - DNA, 25 bp, Homo sapien
cgccagatgggagtgtttggctttt

SEQ ID NO: 433229 - DNA, 25 bp, Homo sapien
tgttctgaggtgtatccttaggatg

SEQ ID NO: 433230 - DNA, 25 bp, Homo sapien
gcagcacagggctactaaagcgtca

SEQ ID NO: 433231 - DNA, 25 bp, Homo sapien
tgcacatgaacaatgctgtctcccc

SEQ ID NO: 433232 - DNA, 25 bp, Homo sapien
cattttctggaagcgttgcacatga

SEQ ID NO: 433233 - DNA, 25 bp, Homo sapien
ggcaacatgtcctgcagtatcctgg

SEQ ID NO: 433234 - DNA, 25 bp, Homo sapien
ccagtggttaccgatgagctgtggt

SEQ ID NO: 433235 - DNA, 25 bp, Homo sapien
gatatctgccccataaagaggagcc

SEQ ID NO: 433236 - DNA, 25 bp, Homo sapien
gagtaggcacgtttgagtcaccagc

SEQ ID NO: 433237 - DNA, 25 bp, Homo sapien
gccaaagtctgaacccctgggatat

SEQ ID NO: 433238 - DNA, 25 bp, Homo sapien
tttgacacgtatcaggccagcgttg

SEQ ID NO: 433239 - DNA, 25 bp, Homo sapien
cacaaatcaatcagcctcgagggcg

SEQ ID NO: 433240 - DNA, 25 bp, Homo sapien
taaagactgcaacgcatcagctgtg

SEQ ID NO: 433241 - DNA, 25 bp, Homo sapien
tttattggagtaccggagggcagca

SEQ ID NO: 433242 - DNA, 25 bp, Homo sapien
tagtgccccattacccggatagtga

SEQ ID NO: 433243 - DNA, 25 bp, Homo sapien
gagccttggatcatttacttccagg

SEQ ID NO: 433244 - DNA, 25 bp, Homo sapien
atggatgtcatcctcaacattcctg

SEQ ID NO: 433245 - DNA, 25 bp, Homo sapien
cattcctgtggaagagccactaccc

SEQ ID NO: 433246 - DNA, 25 bp, Homo sapien
tgcaccccagacatggatgtcatcc

SEQ ID NO: 433247 - DNA, 25 bp, Homo sapien
tgaggatgttctgcttcggagaccc

SEQ ID NO: 433248 - DNA, 25 bp, Homo sapien
ccccgagaggtcatatttgaggatg

SEQ ID NO: 433249 - DNA, 25 bp, Homo sapien
gggccgaggtggaagagctccaagc

SEQ ID NO: 433250 - DNA, 25 bp, Homo sapien
cgggaaccccgagaggtcatatttg

SEQ ID NO: 433251 - DNA, 25 bp, Homo sapien
caagcggtgctcgacgatttcatgc

SEQ ID NO: 433252 - DNA, 25 bp, Homo sapien
tttccccagaactgactgcaatgcg

SEQ ID NO: 433253 - DNA, 25 bp, Homo sapien
cacatgcggcgcatattggccagcg

SEQ ID NO: 433254 - DNA, 25 bp, Homo sapien
tagcagctttgctaacggcccacag

SEQ ID NO: 433255 - DNA, 25 bp, Homo sapien
agcccatcttctcgcggccgccgtc

SEQ ID NO: 433256 - DNA, 25 bp, Homo sapien
ccagcccatcttctcgcggccgccg

SEQ ID NO: 433257 - DNA, 25 bp, Homo sapien
cccatcttctcgcggccgccgtcgg

SEQ ID NO: 433258 - DNA, 25 bp, Homo sapien
cagcccatcttctcgcggccgccgt

SEQ ID NO: 433259 - DNA, 25 bp, Homo sapien
ggctcgcggaattcgcccttcttct

SEQ ID NO: 433260 - DNA, 25 bp, Homo sapien
gcggctcgcggaattcgcccttctt

SEQ ID NO: 433261 - DNA, 25 bp, Homo sapien
tcttctcggctagattcttcaccac

SEQ ID NO: 433262 - DNA, 25 bp, Homo sapien
gccgcggctcgcggaattcgccctt

SEQ ID NO: 433263 - DNA, 25 bp, Homo sapien
tgggaagtcgccgaggtccggcgcc

SEQ ID NO: 433264 - DNA, 25 bp, Homo sapien
ggatctctccgacggcccttcggat

SEQ ID NO: 433265 - DNA, 25 bp, Homo sapien
ggtccaccgcctcgccggccggatc

SEQ ID NO: 433266 - DNA, 25 bp, Homo sapien
gccgccgccggctcatcctggaggg

SEQ ID NO: 433267 - DNA, 25 bp, Homo sapien
gaaacagatgcggacgaggaagcga

SEQ ID NO: 433268 - DNA, 25 bp, Homo sapien
ctggaaacagatgcggacgaggaag

SEQ ID NO: 433269 - DNA, 25 bp, Homo sapien
aacagatgcggacgaggaagcgacc

SEQ ID NO: 433270 - DNA, 25 bp, Homo sapien
tggaaacagatgcggacgaggaagc

SEQ ID NO: 433271 - DNA, 25 bp, Homo sapien
gaagctcacgtcgaattcgcggctg

SEQ ID NO: 433272 - DNA, 25 bp, Homo sapien
ctcgtagacgcgtaggaacagggcc

SEQ ID NO: 433273 - DNA, 25 bp, Homo sapien
tgccacagaggttgcacacgatgcc

SEQ ID NO: 433274 - DNA, 25 bp, Homo sapien
ggataagcgctcctaccacgaagtc

SEQ ID NO: 433275 - DNA, 25 bp, Homo sapien
tctactataggctggctctggcacc

SEQ ID NO: 433276 - DNA, 25 bp, Homo sapien
ggagcaacgaatgcaccctggagtg

SEQ ID NO: 433277 - DNA, 25 bp, Homo sapien
cataaagatgagcaaggcagcccaa

SEQ ID NO: 433278 - DNA, 25 bp, Homo sapien
actgtaatccagaagtggtgcccca

SEQ ID NO: 433279 - DNA, 25 bp, Homo sapien
cctggatcccgctttttcaacagct

SEQ ID NO: 433280 - DNA, 25 bp, Homo sapien
agaacccaagaatattttgcatccc

SEQ ID NO: 433281 - DNA, 25 bp, Homo sapien
tccctggatcccgctttttcaacag

SEQ ID NO: 433282 - DNA, 25 bp, Homo sapien
cccagaacccaagaatattttgcat

SEQ ID NO: 433283 - DNA, 25 bp, Homo sapien
cagagagacacgacagctagtgcga

SEQ ID NO: 433284 - DNA, 25 bp, Homo sapien
agaaaccgccccagccaagaggagc

SEQ ID NO: 433285 - DNA, 25 bp, Homo sapien
cctgacgcagcaccaacagtgatgt

SEQ ID NO: 433286 - DNA, 25 bp, Homo sapien
catgttgctatgtgagaaaccgccc

SEQ ID NO: 433287 - DNA, 25 bp, Homo sapien
tggatgatgggaaccaggtttcccg

SEQ ID NO: 433288 - DNA, 25 bp, Homo sapien
ggaatttagagataagcaagcagga

SEQ ID NO: 433289 - DNA, 25 bp, Homo sapien
aggaagcaagccaaatgatccctgg

SEQ ID NO: 433290 - DNA, 25 bp, Homo sapien
ctacttgataaagtttcccacaggg

SEQ ID NO: 433291 - DNA, 25 bp, Homo sapien
actctttattctcagcagtgaaaat

SEQ ID NO: 433292 - DNA, 25 bp, Homo sapien
caaactgatttggaccaggatttca

SEQ ID NO: 433293 - DNA, 25 bp, Homo sapien
tgccaaactgatttggaccaggatt

SEQ ID NO: 433294 - DNA, 25 bp, Homo sapien
ttggaccaggatttcactctttatt

SEQ ID NO: 433295 - DNA, 25 bp, Homo sapien
ctggacgagcgaaggccaagagccg

SEQ ID NO: 433296 - DNA, 25 bp, Homo sapien
tggacgagcgaaggccaagagccga

SEQ ID NO: 433297 - DNA, 25 bp, Homo sapien
ggacgagcgaaggccaagagccgag

SEQ ID NO: 433298 - DNA, 25 bp, Homo sapien
tgaggcctcgcccttgggaagcagg

SEQ ID NO: 433299 - DNA, 25 bp, Homo sapien
tcacggcgtcgtgagcatgggcgat

SEQ ID NO: 433300 - DNA, 25 bp, Homo sapien
gagaatgcgcctctggcggtacagc

SEQ ID NO: 433301 - DNA, 25 bp, Homo sapien
cggattagggtctttaaggtggcat

SEQ ID NO: 433302 - DNA, 25 bp, Homo sapien
agccagttcgggcaccactgggcgt

SEQ ID NO: 433303 - DNA, 25 bp, Homo sapien
accactgggcgtgtgccgcccctgg

SEQ ID NO: 433304 - DNA, 25 bp, Homo sapien
cacgtgtgagccagttcgggcacca

SEQ ID NO: 433305 - DNA, 25 bp, Homo sapien
tgtgagccagttcgggcaccactgg

SEQ ID NO: 433306 - DNA, 25 bp, Homo sapien
ctcacaacacacattgttttgcggg

SEQ ID NO: 433307 - DNA, 25 bp, Homo sapien
gcctccggcaagttgcgtcctggct

SEQ ID NO: 433308 - DNA, 25 bp, Homo sapien
cgtgtaaacaccgaggtgcccgctt

SEQ ID NO: 433309 - DNA, 25 bp, Homo sapien
tgtaaacaccgaggtgcccgcttgg

SEQ ID NO: 433310 - DNA, 25 bp, Homo sapien
gcgaactggggagcgaggagctggg

SEQ ID NO: 433311 - DNA, 25 bp, Homo sapien
gcccccgcgaactggggagcgagga

SEQ ID NO: 433312 - DNA, 25 bp, Homo sapien
ccgcgaactggggagcgaggagctg

SEQ ID NO: 433313 - DNA, 25 bp, Homo sapien
ccccgcgaactggggagcgaggagc

SEQ ID NO: 433314 - DNA, 25 bp, Homo sapien
gggccgtccgcatcctccgcggctg

SEQ ID NO: 433315 - DNA, 25 bp, Homo sapien
cgccgccgggggccgtccgcatcct

SEQ ID NO: 433316 - DNA, 25 bp, Homo sapien
tgggcccggggccgctagacgccgc

SEQ ID NO: 433317 - DNA, 25 bp, Homo sapien
ccgtccgcatcctccgcggctgggg

SEQ ID NO: 433318 - DNA, 25 bp, Homo sapien
cttgcaccagccgggctcgcgcgcc

SEQ ID NO: 433319 - DNA, 25 bp, Homo sapien
ttgcaccagccgggctcgcgcgccc

SEQ ID NO: 433320 - DNA, 25 bp, Homo sapien
gccgtcccgcttggccctcgcgccc

SEQ ID NO: 433321 - DNA, 25 bp, Homo sapien
cccgccgtcccgcttggccctcgcg

SEQ ID NO: 433322 - DNA, 25 bp, Homo sapien
catgaatgcgttcatcggcctcttg

SEQ ID NO: 433323 - DNA, 25 bp, Homo sapien
cgttcatcggcctcttgatgtggcc

SEQ ID NO: 433324 - DNA, 25 bp, Homo sapien
gcctcttgatgtggccgctcggggt

SEQ ID NO: 433325 - DNA, 25 bp, Homo sapien
atcggcctcttgatgtggccgctcg

SEQ ID NO: 433326 - DNA, 25 bp, Homo sapien
cactggtccatgatcttccgccgtt

SEQ ID NO: 433327 - DNA, 25 bp, Homo sapien
ttgtagtccgggtaatccgccatgt

SEQ ID NO: 433328 - DNA, 25 bp, Homo sapien
cgggtaatccgccatgtgcttgagc

SEQ ID NO: 433329 - DNA, 25 bp, Homo sapien
ggtccatgatcttccgccgttcgtg

SEQ ID NO: 433330 - DNA, 25 bp, Homo sapien
gcggggccgcgccttggcgggcgcc

SEQ ID NO: 433331 - DNA, 25 bp, Homo sapien
ccttgctctttttgcgcggccggta

SEQ ID NO: 433332 - DNA, 25 bp, Homo sapien
cttgctctttttgcgcggccggtac

SEQ ID NO: 433333 - DNA, 25 bp, Homo sapien
cccttgctctttttgcgcggccggt

SEQ ID NO: 433334 - DNA, 25 bp, Homo sapien
cttgggcgcgctccgcttgtccccg

SEQ ID NO: 433335 - DNA, 25 bp, Homo sapien
tgcggcccgggcttgagccggctgc

SEQ ID NO: 433336 - DNA, 25 bp, Homo sapien
cgcccgacggcccttgggcgcgctc

SEQ ID NO: 433337 - DNA, 25 bp, Homo sapien
cgtcccgccgggaccatcctccaca

SEQ ID NO: 433338 - DNA, 25 bp, Homo sapien
ctcgtcctccgacggtgtcggggag

SEQ ID NO: 433339 - DNA, 25 bp, Homo sapien
ccagcgactcctcccccgacgccac

SEQ ID NO: 433340 - DNA, 25 bp, Homo sapien
gcccagcgactcctcccccgacgcc

SEQ ID NO: 433341 - DNA, 25 bp, Homo sapien
cccagcgactcctcccccgacgcca

SEQ ID NO: 433342 - DNA, 25 bp, Homo sapien
caggccggccgggccagggggcagc

SEQ ID NO: 433343 - DNA, 25 bp, Homo sapien
gcagtccaggccggccgggccaggg

SEQ ID NO: 433344 - DNA, 25 bp, Homo sapien
tccaggccggccgggccagggggca

SEQ ID NO: 433345 - DNA, 25 bp, Homo sapien
ctgcagtccaggccggccgggccag

SEQ ID NO: 433346 - DNA, 25 bp, Homo sapien
ctgcaggtccgggtcgcgatccagg

SEQ ID NO: 433347 - DNA, 25 bp, Homo sapien
ccgcgatcatctcggtaacctcggg

SEQ ID NO: 433348 - DNA, 25 bp, Homo sapien
aactcgaagtgcgacgtgcccgagg

SEQ ID NO: 433349 - DNA, 25 bp, Homo sapien
tgcgatgctagacgggcgccagtcc

SEQ ID NO: 433350 - DNA, 25 bp, Homo sapien
gatctgaggggggatgggcacgtcc

SEQ ID NO: 433351 - DNA, 25 bp, Homo sapien
ccccaatacctgattcctgtatgta

SEQ ID NO: 433352 - DNA, 25 bp, Homo sapien
tgcaggtctgtaggagaggacggga

SEQ ID NO: 433353 - DNA, 25 bp, Homo sapien
aggtgtatcggagggggctggctgc

SEQ ID NO: 433354 - DNA, 25 bp, Homo sapien
cagacagactggtaaggtgccttgg

SEQ ID NO: 433355 - DNA, 25 bp, Homo sapien
tagggctcccggatcaaaggatttc

SEQ ID NO: 433356 - DNA, 25 bp, Homo sapien
aaaatagagcgcaagaaaggcccag

SEQ ID NO: 433357 - DNA, 25 bp, Homo sapien
cacacgccggtgagatacaggtagt

SEQ ID NO: 433358 - DNA, 25 bp, Homo sapien
catatggaaagagtcacacgggtgc

SEQ ID NO: 433359 - DNA, 25 bp, Homo sapien
tcttgaaaaatctggccacctggcc

SEQ ID NO: 433360 - DNA, 25 bp, Homo sapien
caaattgtgctgcaggcctgacgaa

SEQ ID NO: 433361 - DNA, 25 bp, Homo sapien
caatggagtaacacgatgggcacca

SEQ ID NO: 433362 - DNA, 25 bp, Homo sapien
gtattctgggttgtatccagctcta

SEQ ID NO: 433363 - DNA, 25 bp, Homo sapien
tgtgtattctgggttgtatccagct

SEQ ID NO: 433364 - DNA, 25 bp, Homo sapien
ctacacagagacccttggcctcagg

SEQ ID NO: 433365 - DNA, 25 bp, Homo sapien
tctacacagagacccttggcctcag

SEQ ID NO: 433366 - DNA, 25 bp, Homo sapien
gagctaatgacagcctcccttgttg

SEQ ID NO: 433367 - DNA, 25 bp, Homo sapien
ggatcagcccttgtaccttgagaag

SEQ ID NO: 433368 - DNA, 25 bp, Homo sapien
tgagagccgctaatccctctggagt

SEQ ID NO: 433369 - DNA, 25 bp, Homo sapien
tctgtctccgggctcctaccgggaa

SEQ ID NO: 433370 - DNA, 25 bp, Homo sapien
caccccagcgtagaaaccgcttctc

SEQ ID NO: 433371 - DNA, 25 bp, Homo sapien
agctgccgtcactcccgcagttccc

SEQ ID NO: 433372 - DNA, 25 bp, Homo sapien
catcccttaaccgagccttcctctc

SEQ ID NO: 433373 - DNA, 25 bp, Homo sapien
tgcaccgtcagtcccttttccaggt

SEQ ID NO: 433374 - DNA, 25 bp, Homo sapien
tcacagagacccctcggactccctg

SEQ ID NO: 433375 - DNA, 25 bp, Homo sapien
ctgtctccgccgagcaaaggcgggt

SEQ ID NO: 433376 - DNA, 25 bp, Homo sapien
ttccagagttccctgctcgctcgga

SEQ ID NO: 433377 - DNA, 25 bp, Homo sapien
aaggcgggtccggttcgcgcctgcg

SEQ ID NO: 433378 - DNA, 25 bp, Homo sapien
ggcacccgcgccactcttcctgaca

SEQ ID NO: 433379 - DNA, 25 bp, Homo sapien
ctgctccacaccaactgcgtccttt

SEQ ID NO: 433380 - DNA, 25 bp, Homo sapien
ttcctgacaggaccaccgatgccct

SEQ ID NO: 433381 - DNA, 25 bp, Homo sapien
tgccctgctccacaccaactgcgtc

SEQ ID NO: 433382 - DNA, 25 bp, Homo sapien
aacaacaaaagccacgacagagaac

SEQ ID NO: 433383 - DNA, 25 bp, Homo sapien
aagccacgacagagaacgggaaaag

SEQ ID NO: 433384 - DNA, 25 bp, Homo sapien
caaaagccacgacagagaacgggaa

SEQ ID NO: 433385 - DNA, 25 bp, Homo sapien
cacgacagagaacgggaaaaggcag

SEQ ID NO: 433386 - DNA, 25 bp, Homo sapien
taaagactcttaggcttaagggctg

SEQ ID NO: 433387 - DNA, 25 bp, Homo sapien
tttgactccattggaagtgaaagtc

SEQ ID NO: 433388 - DNA, 25 bp, Homo sapien
taagggctgttagatttccagagaa

SEQ ID NO: 433389 - DNA, 25 bp, Homo sapien
ggagttcccaagctgcaaggctata

SEQ ID NO: 433390 - DNA, 25 bp, Homo sapien
ccgctccccttcagaccccctcctg

SEQ ID NO: 433391 - DNA, 25 bp, Homo sapien
tgtaaaacagacctaataatcatac

SEQ ID NO: 433392 - DNA, 25 bp, Homo sapien
ctgagaaatggtagctgttgtgatt

SEQ ID NO: 433393 - DNA, 25 bp, Homo sapien
gtagctgttgtgattagtactgtaa

SEQ ID NO: 433394 - DNA, 25 bp, Homo sapien
tgctattacttccatcttgaacttt

SEQ ID NO: 433395 - DNA, 25 bp, Homo sapien
ggactggagtcgtggacacactgct

SEQ ID NO: 433396 - DNA, 25 bp, Homo sapien
ttagacaagtgcttccacctttctg

SEQ ID NO: 433397 - DNA, 25 bp, Homo sapien
gactggagtcgtggacacactgctt

SEQ ID NO: 433398 - DNA, 25 bp, Homo sapien
gaccttagacaagtgcttccacctt

SEQ ID NO: 433399 - DNA, 25 bp, Homo sapien
atgtgcatgtttactctggaggcca

SEQ ID NO: 433400 - DNA, 25 bp, Homo sapien
gtgcatgtttactctggaggccacc

SEQ ID NO: 433401 - DNA, 25 bp, Homo sapien
tgtttactctggaggccacccagta

SEQ ID NO: 433402 - DNA, 25 bp, Homo sapien
gcatgtttactctggaggccaccca

SEQ ID NO: 433403 - DNA, 25 bp, Homo sapien
aggtaggagcggaccccataccact

SEQ ID NO: 433404 - DNA, 25 bp, Homo sapien
cctcatagaagaggtgcaggtagga

SEQ ID NO: 433405 - DNA, 25 bp, Homo sapien
tgcaggaacgattgcagctcggcat

SEQ ID NO: 433406 - DNA, 25 bp, Homo sapien
gggtcgtcgctgagagcagtgcctg

SEQ ID NO: 433407 - DNA, 25 bp, Homo sapien
cagagcaggtgttgaactccagacc

SEQ ID NO: 433408 - DNA, 25 bp, Homo sapien
atgaaggctcccttcattatttaaa

SEQ ID NO: 433409 - DNA, 25 bp, Homo sapien
atgagccaccattatttacatacaa

SEQ ID NO: 433410 - DNA, 25 bp, Homo sapien
tacaaatacaatgaaggctcccttc

SEQ ID NO: 433411 - DNA, 25 bp, Homo sapien
ctgcaactgctgtctcccgggttct

SEQ ID NO: 433412 - DNA, 25 bp, Homo sapien
caactgctgtctcccgggttctagt

SEQ ID NO: 433413 - DNA, 25 bp, Homo sapien
ctagtgattatcctgcctcagcctc

SEQ ID NO: 433414 - DNA, 25 bp, Homo sapien
ttataggcgcccatcaccacaccca

SEQ ID NO: 433415 - DNA, 25 bp, Homo sapien
gggcactgcatagccagtggtcaga

SEQ ID NO: 433416 - DNA, 25 bp, Homo sapien
actgcatagccagtggtcagagccg

SEQ ID NO: 433417 - DNA, 25 bp, Homo sapien
cttggggggcactgcatagccagtg

SEQ ID NO: 433418 - DNA, 25 bp, Homo sapien
gggggcactgcatagccagtggtca

SEQ ID NO: 433419 - DNA, 25 bp, Homo sapien
tcttgggctggatagtctgcacaga

SEQ ID NO: 433420 - DNA, 25 bp, Homo sapien
aggcagatggcgagcagaactccag

SEQ ID NO: 433421 - DNA, 25 bp, Homo sapien
aagacctccacgtggctgtcggctt

SEQ ID NO: 433422 - DNA, 25 bp, Homo sapien
tctgcacagaagattgcccaaaggg

SEQ ID NO: 433423 - DNA, 25 bp, Homo sapien
tgagagggggttatggtgagaaggg

SEQ ID NO: 433424 - DNA, 25 bp, Homo sapien
ccaggacccacatcttaggccatgt

SEQ ID NO: 433425 - DNA, 25 bp, Homo sapien
caggacccacatcttaggccatgtg

SEQ ID NO: 433426 - DNA, 25 bp, Homo sapien
gaaaggccaagtgagcatctgggac

SEQ ID NO: 433427 - DNA, 25 bp, Homo sapien
ctggcgagaagaggaatctgatcca

SEQ ID NO: 433428 - DNA, 25 bp, Homo sapien
tgatccaaagccctcatggcagaga

SEQ ID NO: 433429 - DNA, 25 bp, Homo sapien
catctgggacccattcgagctgaat

SEQ ID NO: 433430 - DNA, 25 bp, Homo sapien
catttattatcagggtcacggccaa

SEQ ID NO: 433431 - DNA, 25 bp, Homo sapien
acagaagagagatgacgcctccggc

SEQ ID NO: 433432 - DNA, 25 bp, Homo sapien
cagagctccctctagtggtacagaa

SEQ ID NO: 433433 - DNA, 25 bp, Homo sapien
gctctgatgccaaaatgcaggtaga

SEQ ID NO: 433434 - DNA, 25 bp, Homo sapien
gggacgctactctctaagacgtggg

SEQ ID NO: 433435 - DNA, 25 bp, Homo sapien
tgcaatgatccagatcgaggcgctg

SEQ ID NO: 433436 - DNA, 25 bp, Homo sapien
cgctggtcgctggtggttcagacca

SEQ ID NO: 433437 - DNA, 25 bp, Homo sapien
ttgagttgacaggacttgctgatgg

SEQ ID NO: 433438 - DNA, 25 bp, Homo sapien
tgatattgtcaaactgcctgcacca

SEQ ID NO: 433439 - DNA, 25 bp, Homo sapien
tagtcccctaccatgagcatttagg

SEQ ID NO: 433440 - DNA, 25 bp, Homo sapien
gggagaaatcaaagggcatgtgtat

SEQ ID NO: 433441 - DNA, 25 bp, Homo sapien
tatagatccacctgcataagaggga

SEQ ID NO: 433442 - DNA, 25 bp, Homo sapien
tcgtgacctggacacatttgaagag

SEQ ID NO: 433443 - DNA, 25 bp, Homo sapien
aacaagacttttgactggtggtgcc

SEQ ID NO: 433444 - DNA, 25 bp, Homo sapien
tcagaggctgtgatatcaacaagac

SEQ ID NO: 433445 - DNA, 25 bp, Homo sapien
catgattaggctgacgttacggatt

SEQ ID NO: 433446 - DNA, 25 bp, Homo sapien
tctgagcgctcgtcatagacaggaa

SEQ ID NO: 433447 - DNA, 25 bp, Homo sapien
tagctatgccatctcggacaggacg

SEQ ID NO: 433448 - DNA, 25 bp, Homo sapien
gactgccccgtgataggatattact

SEQ ID NO: 433449 - DNA, 25 bp, Homo sapien
tatgtgatggactgagtacagagcc

SEQ ID NO: 433450 - DNA, 25 bp, Homo sapien
attcattgagtcaatggctcactta

SEQ ID NO: 433451 - DNA, 25 bp, Homo sapien
cattcattgagtcaatggctcactt

SEQ ID NO: 433452 - DNA, 25 bp, Homo sapien
acgccgacacaggtcccaaactgaa

SEQ ID NO: 433453 - DNA, 25 bp, Homo sapien
gtagccacagctaacgccgacacag

SEQ ID NO: 433454 - DNA, 25 bp, Homo sapien
aagccctgggccgtagccacagcta

SEQ ID NO: 433455 - DNA, 25 bp, Homo sapien
caaactgaacggtgtcttggtcact

SEQ ID NO: 433456 - DNA, 25 bp, Homo sapien
tgccttagaacttctggttgcgttc

SEQ ID NO: 433457 - DNA, 25 bp, Homo sapien
tgagattgtggacaagtcacctccc

SEQ ID NO: 433458 - DNA, 25 bp, Homo sapien
gtcacctccctttgcgggggcttca

SEQ ID NO: 433459 - DNA, 25 bp, Homo sapien
ttctggttgcgttccaagtctggct

SEQ ID NO: 433460 - DNA, 25 bp, Homo sapien
ccagagccttcagggtataccaggg

SEQ ID NO: 433461 - DNA, 25 bp, Homo sapien
gagccttcagggtataccagggcat

SEQ ID NO: 433462 - DNA, 25 bp, Homo sapien
agagccttcagggtataccagggca

SEQ ID NO: 433463 - DNA, 25 bp, Homo sapien
cagagccttcagggtataccagggc

SEQ ID NO: 433464 - DNA, 25 bp, Homo sapien
agtgcagacatcagccacggactct

SEQ ID NO: 433465 - DNA, 25 bp, Homo sapien
tctctcctctgcatccgctgcacct

SEQ ID NO: 433466 - DNA, 25 bp, Homo sapien
cccctaggggcgtctggtcagtgca

SEQ ID NO: 433467 - DNA, 25 bp, Homo sapien
atccgctgcacctgggacccgccct

SEQ ID NO: 433468 - DNA, 25 bp, Homo sapien
ccgccgtctgatgccctcgggcccg

SEQ ID NO: 433469 - DNA, 25 bp, Homo sapien
gtctgatgccctcgggcccgggatc

SEQ ID NO: 433470 - DNA, 25 bp, Homo sapien
tcagccgccgtctgatgccctcggg

SEQ ID NO: 433471 - DNA, 25 bp, Homo sapien
ccgtctgatgccctcgggcccggga

SEQ ID NO: 433472 - DNA, 25 bp, Homo sapien
ctaatcccccggtccgggtgatgca

SEQ ID NO: 433473 - DNA, 25 bp, Homo sapien
taatcccccggtccgggtgatgcaa

SEQ ID NO: 433474 - DNA, 25 bp, Homo sapien
acttccgctgcgagtctcgtgcgcg

SEQ ID NO: 433475 - DNA, 25 bp, Homo sapien
ctgctgccgagctcgggatcccagc

SEQ ID NO: 433476 - DNA, 25 bp, Homo sapien
gtcctagcagcggacgcgcgcggag

SEQ ID NO: 433477 - DNA, 25 bp, Homo sapien
agccctgcccgggtcctagcagcgg

SEQ ID NO: 433478 - DNA, 25 bp, Homo sapien
cggatcaaaagggatctgacctggc

SEQ ID NO: 433479 - DNA, 25 bp, Homo sapien
caggcccggatcaaaagggatctga

SEQ ID NO: 433480 - DNA, 25 bp, Homo sapien
cccaggcccggatcaaaagggatct

SEQ ID NO: 433481 - DNA, 25 bp, Homo sapien
cccggatcaaaagggatctgacctg

SEQ ID NO: 433482 - DNA, 25 bp, Homo sapien
cggccggacacctccgtccctggct

SEQ ID NO: 433483 - DNA, 25 bp, Homo sapien
gcacgccctcctctaggggtgacgg

SEQ ID NO: 433484 - DNA, 25 bp, Homo sapien
ctctaggggtgacggccggacacct

SEQ ID NO: 433485 - DNA, 25 bp, Homo sapien
ctcgggcgaccccacgctccgcggg

SEQ ID NO: 433486 - DNA, 25 bp, Homo sapien
caagcattgagatcatctggaggcc

SEQ ID NO: 433487 - DNA, 25 bp, Homo sapien
ggtgaagttgatgccgctgtccagt

SEQ ID NO: 433488 - DNA, 25 bp, Homo sapien
tgtttcaacatacattgctgggccc

SEQ ID NO: 433489 - DNA, 25 bp, Homo sapien
catgttccccaagaacacggtggag

SEQ ID NO: 433490 - DNA, 25 bp, Homo sapien
ggagcagccagaggggtggctcgca

SEQ ID NO: 433491 - DNA, 25 bp, Homo sapien
gcaggagcagccagaggggtggctc

SEQ ID NO: 433492 - DNA, 25 bp, Homo sapien
gagcagccagaggggtggctcgcat

SEQ ID NO: 433493 - DNA, 25 bp, Homo sapien
ctggacagggaacccgcaggagcag

SEQ ID NO: 433494 - DNA, 25 bp, Homo sapien
ctcgtttctggacgggacgctcggt

SEQ ID NO: 433495 - DNA, 25 bp, Homo sapien
taagttgtcatccaactccaaccgc

SEQ ID NO: 433496 - DNA, 25 bp, Homo sapien
gctcggtatctaagttgtcatccaa

SEQ ID NO: 433497 - DNA, 25 bp, Homo sapien
gggcccacttcgagctcgtttctgg

SEQ ID NO: 433498 - DNA, 25 bp, Homo sapien
ccaggaggacatagggcccaagacg

SEQ ID NO: 433499 - DNA, 25 bp, Homo sapien
caggaggacatagggcccaagacgg

SEQ ID NO: 433500 - DNA, 25 bp, Homo sapien
aggaggacatagggcccaagacggg

SEQ ID NO: 433501 - DNA, 25 bp, Homo sapien
gggcccaagacgggaggcagtggcc

SEQ ID NO: 433502 - DNA, 25 bp, Homo sapien
cttgcaggtatactcagtgcctgta

SEQ ID NO: 433503 - DNA, 25 bp, Homo sapien
atactcagtgcctgtagggcagtgc

SEQ ID NO: 433504 - DNA, 25 bp, Homo sapien
aggtatactcagtgcctgtagggca

SEQ ID NO: 433505 - DNA, 25 bp, Homo sapien
tactcagtgcctgtagggcagtgca

SEQ ID NO: 433506 - DNA, 25 bp, Homo sapien
catgggtccgagtgaaaaaggcgta

SEQ ID NO: 433507 - DNA, 25 bp, Homo sapien
caggctgtgcatgtccccatgggtc

SEQ ID NO: 433508 - DNA, 25 bp, Homo sapien
tcacggtcagcgaagacaaagcgac

SEQ ID NO: 433509 - DNA, 25 bp, Homo sapien
ttgagatcacgcaggaccagaccgt

SEQ ID NO: 433510 - DNA, 25 bp, Homo sapien
tgagtatctcaggtcccacgtaggc

SEQ ID NO: 433511 - DNA, 25 bp, Homo sapien
tgtgagccgttcagctggctcccga

SEQ ID NO: 433512 - DNA, 25 bp, Homo sapien
ccttgcccgagtatgaggcccgtga

SEQ ID NO: 433513 - DNA, 25 bp, Homo sapien
gatcttgccgaagagcaggacaggc

SEQ ID NO: 433514 - DNA, 25 bp, Homo sapien
ctaagggcatcgggtcctgtcgcag

SEQ ID NO: 433515 - DNA, 25 bp, Homo sapien
tcttccctggcttcgtccagcccca

SEQ ID NO: 433516 - DNA, 25 bp, Homo sapien
atcgggttggggctaagggcatcgg

SEQ ID NO: 433517 - DNA, 25 bp, Homo sapien
cctcccagagatgggatcgggttgg

SEQ ID NO: 433518 - DNA, 25 bp, Homo sapien
ggtacaagatacaaaggcagctggt

SEQ ID NO: 433519 - DNA, 25 bp, Homo sapien
tgttgtcagctcaaggatgccagtt

SEQ ID NO: 433520 - DNA, 25 bp, Homo sapien
tgataagcacccaagcaggaactgc

SEQ ID NO: 433521 - DNA, 25 bp, Homo sapien
tacccagtgtagacagtgacctatg

SEQ ID NO: 433522 - DNA, 25 bp, Homo sapien
gctcaggtcagaagccccatggttg

SEQ ID NO: 433523 - DNA, 25 bp, Homo sapien
aggacagaccctgcctaatcctgtc

SEQ ID NO: 433524 - DNA, 25 bp, Homo sapien
acaggacagaccctgcctaatcctg

SEQ ID NO: 433525 - DNA, 25 bp, Homo sapien
gaccctgcctaatcctgtccctcaa

SEQ ID NO: 433526 - DNA, 25 bp, Homo sapien
ccaaaacctagagtatggacctggg

SEQ ID NO: 433527 - DNA, 25 bp, Homo sapien
cctagagtatggacctgggattgtg

SEQ ID NO: 433528 - DNA, 25 bp, Homo sapien
acctgggattgtggaccccaagtgt

SEQ ID NO: 433529 - DNA, 25 bp, Homo sapien
ccaagtgtccccagaagagtcccac

SEQ ID NO: 433530 - DNA, 25 bp, Homo sapien
tttcataattctcctttattaggca

SEQ ID NO: 433531 - DNA, 25 bp, Homo sapien
tcataattctcctttattaggcaca

SEQ ID NO: 433532 - DNA, 25 bp, Homo sapien
ttcataattctcctttattaggcac

SEQ ID NO: 433533 - DNA, 25 bp, Homo sapien
cgttgagctattggtgaagtttgca

SEQ ID NO: 433534 - DNA, 25 bp, Homo sapien
gaagtttgcattcgtctgcctcatg

SEQ ID NO: 433535 - DNA, 25 bp, Homo sapien
caccgtctgtcttttcgttgagcta

SEQ ID NO: 433536 - DNA, 25 bp, Homo sapien
gatcctgcgggctccacttgcagaa

SEQ ID NO: 433537 - DNA, 25 bp, Homo sapien
gcttcggcggaagagaaagtgaaag

SEQ ID NO: 433538 - DNA, 25 bp, Homo sapien
cggaaaaattgtcgcctcatccggg

SEQ ID NO: 433539 - DNA, 25 bp, Homo sapien
cagttcttcgcaaggggagcggctt

SEQ ID NO: 433540 - DNA, 25 bp, Homo sapien
cgggtttcaaggcaaagccctctct

SEQ ID NO: 433541 - DNA, 25 bp, Homo sapien
ggccgtgtggcctccggcgcggccc

SEQ ID NO: 433542 - DNA, 25 bp, Homo sapien
aagcatcacactgcccggtgaccag

SEQ ID NO: 433543 - DNA, 25 bp, Homo sapien
ccgcggcagtcgggaagcatcacac

SEQ ID NO: 433544 - DNA, 25 bp, Homo sapien
cgggatcctgcgtggggcggtgaga

SEQ ID NO: 433545 - DNA, 25 bp, Homo sapien
ctgggaaatgctacctccgggtcgc

SEQ ID NO: 433546 - DNA, 25 bp, Homo sapien
ctcctgggaaatgctacctccgggt

SEQ ID NO: 433547 - DNA, 25 bp, Homo sapien
ggaccgtgcctcctgggaaatgcta

SEQ ID NO: 433548 - DNA, 25 bp, Homo sapien
cgtgcctcctgggaaatgctacctc

SEQ ID NO: 433549 - DNA, 25 bp, Homo sapien
tttccagcaaggcagtgactgactt

SEQ ID NO: 433550 - DNA, 25 bp, Homo sapien
tccgttctacaaccctaggtgcagg

SEQ ID NO: 433551 - DNA, 25 bp, Homo sapien
tctggaagccagcaggtaccaaagg

SEQ ID NO: 433552 - DNA, 25 bp, Homo sapien
gaggtctccaagttcaatgccctgt

SEQ ID NO: 433553 - DNA, 25 bp, Homo sapien
gagccagttagcacagggtttattt

SEQ ID NO: 433554 - DNA, 25 bp, Homo sapien
tacagcaggagccagttagcacagg

SEQ ID NO: 433555 - DNA, 25 bp, Homo sapien
cagcaggagccagttagcacagggt

SEQ ID NO: 433556 - DNA, 25 bp, Homo sapien
caggagccagttagcacagggttta

SEQ ID NO: 433557 - DNA, 25 bp, Homo sapien
tgccagccagatggcacacttcatt

SEQ ID NO: 433558 - DNA, 25 bp, Homo sapien
gatggcacacttcattgccacctgt

SEQ ID NO: 433559 - DNA, 25 bp, Homo sapien
ccgcccgccactgctcgggtgaggc

SEQ ID NO: 433560 - DNA, 25 bp, Homo sapien
attgccacctgttcatccccgcccg

SEQ ID NO: 433561 - DNA, 25 bp, Homo sapien
gagacctcaggcttcagttgcacac

SEQ ID NO: 433562 - DNA, 25 bp, Homo sapien
agacctcaggcttcagttgcacact

SEQ ID NO: 433563 - DNA, 25 bp, Homo sapien
ctgttctacaggcaagaatatcctg

SEQ ID NO: 433564 - DNA, 25 bp, Homo sapien
gttctacaggcaagaatatcctgtc

SEQ ID NO: 433565 - DNA, 25 bp, Homo sapien
cgtgccattaggaagaactgttcta

SEQ ID NO: 433566 - DNA, 25 bp, Homo sapien
aagccagaacgtgccattaggaaga

SEQ ID NO: 433567 - DNA, 25 bp, Homo sapien
gactgtcgggagcagaacctcccta

SEQ ID NO: 433568 - DNA, 25 bp, Homo sapien
caaatttgtttacgtcactgttccg

SEQ ID NO: 433569 - DNA, 25 bp, Homo sapien
ctatgagatagctactgttacggtc

SEQ ID NO: 433570 - DNA, 25 bp, Homo sapien
tggtgagagaaacaatatgagcctc

SEQ ID NO: 433571 - DNA, 25 bp, Homo sapien
gaatatcttggctatacagtctccc

SEQ ID NO: 433572 - DNA, 25 bp, Homo sapien
tctggtccacaggaattaacggaag

SEQ ID NO: 433573 - DNA, 25 bp, Homo sapien
tgagtgcataacacgccaggcattg

SEQ ID NO: 433574 - DNA, 25 bp, Homo sapien
tcctggagcacagaccgacagtatc

SEQ ID NO: 433575 - DNA, 25 bp, Homo sapien
tcaacctagacaagagaccccatgt

SEQ ID NO: 433576 - DNA, 25 bp, Homo sapien
tctcgaaaacgatcctaagtgaaag

SEQ ID NO: 433577 - DNA, 25 bp, Homo sapien
ggggaatgaagttgttagacatgct

SEQ ID NO: 433578 - DNA, 25 bp, Homo sapien
gaatctcgaaaacgatcctaagtga

SEQ ID NO: 433579 - DNA, 25 bp, Homo sapien
accttatctctacagactttctaaa

SEQ ID NO: 433580 - DNA, 25 bp, Homo sapien
ccttatctctacagactttctaaaa

SEQ ID NO: 433581 - DNA, 25 bp, Homo sapien
gccatgcccagcgtgagtttatacc

SEQ ID NO: 433582 - DNA, 25 bp, Homo sapien
ttttacaaaggaaacgccagtgcca

SEQ ID NO: 433583 - DNA, 25 bp, Homo sapien
catttgctaggaagcatcgggtcca

SEQ ID NO: 433584 - DNA, 25 bp, Homo sapien
ttcatagcaaggagtacacaggtac

SEQ ID NO: 433585 - DNA, 25 bp, Homo sapien
gaatacccagtcaactatcaatgaa

SEQ ID NO: 433586 - DNA, 25 bp, Homo sapien
tgaaaaggactggatcttaacccca

SEQ ID NO: 433587 - DNA, 25 bp, Homo sapien
tccaatgtgacatcaggatcgctgg

SEQ ID NO: 433588 - DNA, 25 bp, Homo sapien
tcaacctagaggcaaagcataaagg

SEQ ID NO: 433589 - DNA, 25 bp, Homo sapien
ggtgctgcgctcactgtagtgactt

SEQ ID NO: 433590 - DNA, 25 bp, Homo sapien
tgcgctcactgtagtgacttctcgc

SEQ ID NO: 433591 - DNA, 25 bp, Homo sapien
gctcactgtagtgacttctcgccat

SEQ ID NO: 433592 - DNA, 25 bp, Homo sapien
cactgtagtgacttctcgccatagt

SEQ ID NO: 433593 - DNA, 25 bp, Homo sapien
cttagaatcaactcgtggcagcaca

SEQ ID NO: 433594 - DNA, 25 bp, Homo sapien
ggctccacgctactcttagaatcaa

SEQ ID NO: 433595 - DNA, 25 bp, Homo sapien
cgtggcagcacacgagggcctccat

SEQ ID NO: 433596 - DNA, 25 bp, Homo sapien
aatggctccacgctactcttagaat

SEQ ID NO: 433597 - DNA, 25 bp, Homo sapien
agccagatggtgacggtgtgcatct

SEQ ID NO: 433598 - DNA, 25 bp, Homo sapien
gagagacgccactgtcatatcaggg

SEQ ID NO: 433599 - DNA, 25 bp, Homo sapien
catgtccttgagagacgccactgtc

SEQ ID NO: 433600 - DNA, 25 bp, Homo sapien
tatcagggcgcactgtgagccagat

SEQ ID NO: 433601 - DNA, 25 bp, Homo sapien
gcagggtctcctggtctcgtgccag

SEQ ID NO: 433602 - DNA, 25 bp, Homo sapien
aatcacccactgctgcaagactggt

SEQ ID NO: 433603 - DNA, 25 bp, Homo sapien
tctgccgcaccccatgggagtgcag

SEQ ID NO: 433604 - DNA, 25 bp, Homo sapien
gctgacagcagatagaggtaggcac

SEQ ID NO: 433605 - DNA, 25 bp, Homo sapien
ctgcagcgtgaggtccttgaagccc

SEQ ID NO: 433606 - DNA, 25 bp, Homo sapien
actgcatctggctgcccccgtccgg

SEQ ID NO: 433607 - DNA, 25 bp, Homo sapien
ctggctgcccccgtccgggttcctg

SEQ ID NO: 433608 - DNA, 25 bp, Homo sapien
ggccccgcggctgcagcgtgaggtc

SEQ ID NO: 433609 - DNA, 25 bp, Homo sapien
gacctggtaggcctcggggcgcgcc

SEQ ID NO: 433610 - DNA, 25 bp, Homo sapien
gccaggccgcgtgggcttgttgatg

SEQ ID NO: 433611 - DNA, 25 bp, Homo sapien
tcctcgtcgggctggtatgaggcgg

SEQ ID NO: 433612 - DNA, 25 bp, Homo sapien
gggcgcgcccggcagcacatctcac

SEQ ID NO: 433613 - DNA, 25 bp, Homo sapien
cggcagtgcgcaggtgtctcccttc

SEQ ID NO: 433614 - DNA, 25 bp, Homo sapien
ccccgtgcggtctgcaggtgtctgt

SEQ ID NO: 433615 - DNA, 25 bp, Homo sapien
gggcaaggcagtaacggagaggcgc

SEQ ID NO: 433616 - DNA, 25 bp, Homo sapien
cagtaacggagaggcgcggcagtgc

SEQ ID NO: 433617 - DNA, 25 bp, Homo sapien
gggtcatggccagccatactcgtgt

SEQ ID NO: 433618 - DNA, 25 bp, Homo sapien
agggagcgggtctcagccacagggt

SEQ ID NO: 433619 - DNA, 25 bp, Homo sapien
ccatactcgtgtggtgtgtcaaagc

SEQ ID NO: 433620 - DNA, 25 bp, Homo sapien
tgtgaacctggatgtgcgccacagc

SEQ ID NO: 433621 - DNA, 25 bp, Homo sapien
tgacgaagccgaggagctgagacgg

SEQ ID NO: 433622 - DNA, 25 bp, Homo sapien
acggaaggcgccaggtgagacagca

SEQ ID NO: 433623 - DNA, 25 bp, Homo sapien
ctggtggagccactcaacgtcaggg

SEQ ID NO: 433624 - DNA, 25 bp, Homo sapien
cagcaatggcagcaaggtaaggaag

SEQ ID NO: 433625 - DNA, 25 bp, Homo sapien
agggctgggtcagaccagccacagg

SEQ ID NO: 433626 - DNA, 25 bp, Homo sapien
cagctggacgtgctgcaggtagttc

SEQ ID NO: 433627 - DNA, 25 bp, Homo sapien
tcggcgggctccgtgttcagcacca

SEQ ID NO: 433628 - DNA, 25 bp, Homo sapien
cagcaccgagtagcacacggggcac

SEQ ID NO: 433629 - DNA, 25 bp, Homo sapien
gctgcaggtagttcccctcctgctg

SEQ ID NO: 433630 - DNA, 25 bp, Homo sapien
ctgcagaaggtgtgcagacactcac

SEQ ID NO: 433631 - DNA, 25 bp, Homo sapien
cacgtccagccctgcgtaattggcg

SEQ ID NO: 433632 - DNA, 25 bp, Homo sapien
gcttctctcatgagccgtgggcctg

SEQ ID NO: 433633 - DNA, 25 bp, Homo sapien
agactcagaaactggcagatgccca

SEQ ID NO: 433634 - DNA, 25 bp, Homo sapien
aatgaggtatcagagcacagggccc

SEQ ID NO: 433635 - DNA, 25 bp, Homo sapien
accccaggtggacttctcctcaata

SEQ ID NO: 433636 - DNA, 25 bp, Homo sapien
gaaaagagttaggatcataggaacc

SEQ ID NO: 433637 - DNA, 25 bp, Homo sapien
ttaggatcataggaacccccttcac

SEQ ID NO: 433638 - DNA, 25 bp, Homo sapien
catactgccgctctgattctctggt

SEQ ID NO: 433639 - DNA, 25 bp, Homo sapien
gctgttgcggatggtgccctgcagg

SEQ ID NO: 433640 - DNA, 25 bp, Homo sapien
ctgttgcggatggtgccctgcaggc

SEQ ID NO: 433641 - DNA, 25 bp, Homo sapien
tggctgttgcggatggtgccctgca

SEQ ID NO: 433642 - DNA, 25 bp, Homo sapien
ggctgttgcggatggtgccctgcag

SEQ ID NO: 433643 - DNA, 25 bp, Homo sapien
cttgcccgagcacgagtaggtgttg

SEQ ID NO: 433644 - DNA, 25 bp, Homo sapien
agcagcttgcccgagcacgagtagg

SEQ ID NO: 433645 - DNA, 25 bp, Homo sapien
gcttgcccgagcacgagtaggtgtt

SEQ ID NO: 433646 - DNA, 25 bp, Homo sapien
cagcttgcccgagcacgagtaggtg

SEQ ID NO: 433647 - DNA, 25 bp, Homo sapien
cacataacgctgtgacagactggcg

SEQ ID NO: 433648 - DNA, 25 bp, Homo sapien
taacgaattcatgaagagcgccagc

SEQ ID NO: 433649 - DNA, 25 bp, Homo sapien
cagcggcaagcacacacgtatgcag

SEQ ID NO: 433650 - DNA, 25 bp, Homo sapien
gaaacaacttgctcgagatcaccag

SEQ ID NO: 433651 - DNA, 25 bp, Homo sapien
gaaggcactgcggttttcagcaatg

SEQ ID NO: 433652 - DNA, 25 bp, Homo sapien
tagaaatcgctggtaatcctcaggg

SEQ ID NO: 433653 - DNA, 25 bp, Homo sapien
tttcagcaatggagatgcccaggtc

SEQ ID NO: 433654 - DNA, 25 bp, Homo sapien
cagttgacgtggaaacacacagggc

SEQ ID NO: 433655 - DNA, 25 bp, Homo sapien
gctcctcaccttcaacttttgagat

SEQ ID NO: 433656 - DNA, 25 bp, Homo sapien
cggctcctcaccttcaacttttgag

SEQ ID NO: 433657 - DNA, 25 bp, Homo sapien
cttttgagatgaagcggcggggaca

SEQ ID NO: 433658 - DNA, 25 bp, Homo sapien
aacttttgagatgaagcggcgggga

SEQ ID NO: 433659 - DNA, 25 bp, Homo sapien
tcgttctgagcccgcagggccaggt

SEQ ID NO: 433660 - DNA, 25 bp, Homo sapien
atactccttgcagttcatctgctca

SEQ ID NO: 433661 - DNA, 25 bp, Homo sapien
atcgttctgagcccgcagggccagg

SEQ ID NO: 433662 - DNA, 25 bp, Homo sapien
ctgatactccttgcagttcatctgc

SEQ ID NO: 433663 - DNA, 25 bp, Homo sapien
atctctgtcgtctgccgggcagcca

SEQ ID NO: 433664 - DNA, 25 bp, Homo sapien
tcagcatctctgtcgtctgccgggc

SEQ ID NO: 433665 - DNA, 25 bp, Homo sapien
agcatctctgtcgtctgccgggcag

SEQ ID NO: 433666 - DNA, 25 bp, Homo sapien
cttcagcatctctgtcgtctgccgg

SEQ ID NO: 433667 - DNA, 25 bp, Homo sapien
ccacctccggatgggagtgacagcc

SEQ ID NO: 433668 - DNA, 25 bp, Homo sapien
aaggtggtgaccctctagagctgtg

SEQ ID NO: 433669 - DNA, 25 bp, Homo sapien
cagacgctcttcctgacatgaccat

SEQ ID NO: 433670 - DNA, 25 bp, Homo sapien
gacatgaccattcggcctaagtccc

SEQ ID NO: 433671 - DNA, 25 bp, Homo sapien
gtgtggcagacggtgcagcggatcc

SEQ ID NO: 433672 - DNA, 25 bp, Homo sapien
gtgcagcggatccagtcgcagccgt

SEQ ID NO: 433673 - DNA, 25 bp, Homo sapien
tggtgacccagcagatctcggtgtg

SEQ ID NO: 433674 - DNA, 25 bp, Homo sapien
ttctgtaccacgatctggcactggg

SEQ ID NO: 433675 - DNA, 25 bp, Homo sapien
ctcctctaaggcaaagcccacaagg

SEQ ID NO: 433676 - DNA, 25 bp, Homo sapien
tcccagccctcctctaaggcaaagc

SEQ ID NO: 433677 - DNA, 25 bp, Homo sapien
cctcctctaaggcaaagcccacaag

SEQ ID NO: 433678 - DNA, 25 bp, Homo sapien
agccctcctctaaggcaaagcccac

SEQ ID NO: 433679 - DNA, 25 bp, Homo sapien
ggcagcccccgctggtgtctcctgg

SEQ ID NO: 433680 - DNA, 25 bp, Homo sapien
tgcagcggcagcccccgctggtgtc

SEQ ID NO: 433681 - DNA, 25 bp, Homo sapien
gcggcagcccccgctggtgtctcct

SEQ ID NO: 433682 - DNA, 25 bp, Homo sapien
cagcggcagcccccgctggtgtctc

SEQ ID NO: 433683 - DNA, 25 bp, Homo sapien
agtggcagttctgacagcttgggtg

SEQ ID NO: 433684 - DNA, 25 bp, Homo sapien
gtggcagttctgacagcttgggtgg

SEQ ID NO: 433685 - DNA, 25 bp, Homo sapien
gaagttagccccagaaagctgacag

SEQ ID NO: 433686 - DNA, 25 bp, Homo sapien
cctacaacgctacagcaagcaaggc

SEQ ID NO: 433687 - DNA, 25 bp, Homo sapien
tctgaacaggttagcaagagttcca

SEQ ID NO: 433688 - DNA, 25 bp, Homo sapien
agatgtgaccgtggacaaccgcagt

SEQ ID NO: 433689 - DNA, 25 bp, Homo sapien
aattataatagcttacacaggctgc

SEQ ID NO: 433690 - DNA, 25 bp, Homo sapien
ataatagcttacacaggctgcagag

SEQ ID NO: 433691 - DNA, 25 bp, Homo sapien
ttataatagcttacacaggctgcag

SEQ ID NO: 433692 - DNA, 25 bp, Homo sapien
tttaattataatagcttacacaggc

SEQ ID NO: 433693 - DNA, 25 bp, Homo sapien
tttccagttgctagaacaggccctt

SEQ ID NO: 433694 - DNA, 25 bp, Homo sapien
tgagtcctggcatccaacggcaggt

SEQ ID NO: 433695 - DNA, 25 bp, Homo sapien
aacactgggtggactggttacagcc

SEQ ID NO: 433696 - DNA, 25 bp, Homo sapien
tatgatgatggtcacgtcacagcgt

SEQ ID NO: 433697 - DNA, 25 bp, Homo sapien
gctgcctgcatttgagcagattcca

SEQ ID NO: 433698 - DNA, 25 bp, Homo sapien
tcttggtgtgtttcacaccctggtc

SEQ ID NO: 433699 - DNA, 25 bp, Homo sapien
cagagcttgatgtgccgcttctcca

SEQ ID NO: 433700 - DNA, 25 bp, Homo sapien
tcacagtcgacacaactggtgcggg

SEQ ID NO: 433701 - DNA, 25 bp, Homo sapien
tttggatcctaaccagagcttgatg

SEQ ID NO: 433702 - DNA, 25 bp, Homo sapien
gaaaacggaatctctgtctgtgacc

SEQ ID NO: 433703 - DNA, 25 bp, Homo sapien
ttgactggctaggagaccttgggca

SEQ ID NO: 433704 - DNA, 25 bp, Homo sapien
gacagtggtgtattcatcagggcaa

SEQ ID NO: 433705 - DNA, 25 bp, Homo sapien
gatgatgcggcagatattcccagtg

SEQ ID NO: 433706 - DNA, 25 bp, Homo sapien
aataggcacccactcactaccttgg

SEQ ID NO: 433707 - DNA, 25 bp, Homo sapien
caaagactctccagaccttagggaa

SEQ ID NO: 433708 - DNA, 25 bp, Homo sapien
cattttcgctttagccagagttgct

SEQ ID NO: 433709 - DNA, 25 bp, Homo sapien
tagggaacaagaggcatcactcagt

SEQ ID NO: 433710 - DNA, 25 bp, Homo sapien
gaactggaacatgggatgccctctt

SEQ ID NO: 433711 - DNA, 25 bp, Homo sapien
tgatcggcccctcttactagcagct

SEQ ID NO: 433712 - DNA, 25 bp, Homo sapien
ccaaaggactcgtctgggagcatga

SEQ ID NO: 433713 - DNA, 25 bp, Homo sapien
agaatcttatgcctctcccagtggg

SEQ ID NO: 433714 - DNA, 25 bp, Homo sapien
cttccattgatgtaatatctgtgat

SEQ ID NO: 433715 - DNA, 25 bp, Homo sapien
gctttctgtaggctgaacttacagt

SEQ ID NO: 433716 - DNA, 25 bp, Homo sapien
gatacgctttctgtaggctgaactt

SEQ ID NO: 433717 - DNA, 25 bp, Homo sapien
aatatctgtgatacgctttctgtag

SEQ ID NO: 433718 - DNA, 25 bp, Homo sapien
tgacctcaggtgatgcacgtacctc

SEQ ID NO: 433719 - DNA, 25 bp, Homo sapien
gacctcaggtgatgcacgtacctca

SEQ ID NO: 433720 - DNA, 25 bp, Homo sapien
tgcaatacccaggtagcagtagcct

SEQ ID NO: 433721 - DNA, 25 bp, Homo sapien
gaacaggagcctctaagctggctgc

SEQ ID NO: 433722 - DNA, 25 bp, Homo sapien
tgggcaacaaacctcacatggatga

SEQ ID NO: 433723 - DNA, 25 bp, Homo sapien
cagtagcctgccagcgtggttttga

SEQ ID NO: 433724 - DNA, 25 bp, Homo sapien
aatctaactgattgtaatcaatgag

SEQ ID NO: 433725 - DNA, 25 bp, Homo sapien
tctaactgattgtaatcaatgagtt

SEQ ID NO: 433726 - DNA, 25 bp, Homo sapien
aaatctaactgattgtaatcaatga

SEQ ID NO: 433727 - DNA, 25 bp, Homo sapien
gaaatctaactgattgtaatcaatg

SEQ ID NO: 433728 - DNA, 25 bp, Homo sapien
ttcattaaacatcacaattaagcat

SEQ ID NO: 433729 - DNA, 25 bp, Homo sapien
cctaatcaagtggtgaggctcaaac

SEQ ID NO: 433730 - DNA, 25 bp, Homo sapien
ttaaagcagagtatcatctttacag

SEQ ID NO: 433731 - DNA, 25 bp, Homo sapien
gtgaggctcaaaccatcattaagag

SEQ ID NO: 433732 - DNA, 25 bp, Homo sapien
caggttatgctgattgtcctaatca

SEQ ID NO: 433733 - DNA, 25 bp, Homo sapien
acacatttagttttattgtaacaag

SEQ ID NO: 433734 - DNA, 25 bp, Homo sapien
catttagttttattgtaacaaggca

SEQ ID NO: 433735 - DNA, 25 bp, Homo sapien
tatacacatttagttttattgtaac

SEQ ID NO: 433736 - DNA, 25 bp, Homo sapien
tgtatacacatttagttttattgta

SEQ ID NO: 433737 - DNA, 25 bp, Homo sapien
aagtttaagccaatagtgggttgtg

SEQ ID NO: 433738 - DNA, 25 bp, Homo sapien
agaagtttaagccaatagtgggttg

SEQ ID NO: 433739 - DNA, 25 bp, Homo sapien
ttaagccaatagtgggttgtgtcat

SEQ ID NO: 433740 - DNA, 25 bp, Homo sapien
gtttaagccaatagtgggttgtgtc

SEQ ID NO: 433741 - DNA, 25 bp, Homo sapien
cccaggcgtccgccacgtccgcagg

SEQ ID NO: 433742 - DNA, 25 bp, Homo sapien
acaagtggacactggtgagggactg

SEQ ID NO: 433743 - DNA, 25 bp, Homo sapien
gtggacactggtgagggactgggtc

SEQ ID NO: 433744 - DNA, 25 bp, Homo sapien
aagtggacactggtgagggactggg

SEQ ID NO: 433745 - DNA, 25 bp, Homo sapien
ctggtaaacacaagtggacactggt

SEQ ID NO: 433746 - DNA, 25 bp, Homo sapien
tgtgttgaacagttccaagaactcc

SEQ ID NO: 433747 - DNA, 25 bp, Homo sapien
gtgttgaacagttccaagaactcca

SEQ ID NO: 433748 - DNA, 25 bp, Homo sapien
ctagaaggagaggaccttgcttctg

SEQ ID NO: 433749 - DNA, 25 bp, Homo sapien
aaggagaggaccttgcttctgtgtg

SEQ ID NO: 433750 - DNA, 25 bp, Homo sapien
catctgctttgacagttttcttggc

SEQ ID NO: 433751 - DNA, 25 bp, Homo sapien
cactcttgcatcatctgctttgaca

SEQ ID NO: 433752 - DNA, 25 bp, Homo sapien
cgacaccgtgtgtgatagatggctc

SEQ ID NO: 433753 - DNA, 25 bp, Homo sapien
taaagtagatcctcagggtatggct

SEQ ID NO: 433754 - DNA, 25 bp, Homo sapien
tgtattgggacactatttctcagca

SEQ ID NO: 433755 - DNA, 25 bp, Homo sapien
gactaaaccataactgtgctgggaa

SEQ ID NO: 433756 - DNA, 25 bp, Homo sapien
ggaggcaagggtttacagagtaaca

SEQ ID NO: 433757 - DNA, 25 bp, Homo sapien
tgaggtgccacccaagagcctttta

SEQ ID NO: 433758 - DNA, 25 bp, Homo sapien
gaataaaccgaaggtgaatgcagag

SEQ ID NO: 433759 - DNA, 25 bp, Homo sapien
tgctacttaagagtcactgcagaag

SEQ ID NO: 433760 - DNA, 25 bp, Homo sapien
gcttaggctgatgcggagagctgca

SEQ ID NO: 433761 - DNA, 25 bp, Homo sapien
gaaattgaggtgtagcttaggctga

SEQ ID NO: 433762 - DNA, 25 bp, Homo sapien
ctgatgcggagagctgcagacagct

SEQ ID NO: 433763 - DNA, 25 bp, Homo sapien
ctatccttgtagctcggaaattgag

SEQ ID NO: 433764 - DNA, 25 bp, Homo sapien
gttatttcattacagtagctgcttg

SEQ ID NO: 433765 - DNA, 25 bp, Homo sapien
gctgcttgtgggaactaggaaaaat

SEQ ID NO: 433766 - DNA, 25 bp, Homo sapien
gcctaggcatcatagataaacgtaa

SEQ ID NO: 433767 - DNA, 25 bp, Homo sapien
tatagattcacaggcctttctcgcc

SEQ ID NO: 433768 - DNA, 25 bp, Homo sapien
tcgttcgacccatggtaccgggcag

SEQ ID NO: 433769 - DNA, 25 bp, Homo sapien
ctgtaccgtggaggcttcccaaggc

SEQ ID NO: 433770 - DNA, 25 bp, Homo sapien
taagttccctgtgtaaaggtcttgc

SEQ ID NO: 433771 - DNA, 25 bp, Homo sapien
gagccactatctccattgaagctga

SEQ ID NO: 433772 - DNA, 25 bp, Homo sapien
taatgggagatgtggccacactgac

SEQ ID NO: 433773 - DNA, 25 bp, Homo sapien
catttagttactgggcataacttac

SEQ ID NO: 433774 - DNA, 25 bp, Homo sapien
aacaaacattgtctgtacaggtttc

SEQ ID NO: 433775 - DNA, 25 bp, Homo sapien
tctgtacaggtttcatgctagagct

SEQ ID NO: 433776 - DNA, 25 bp, Homo sapien
ttttccctgttcatctcccaacatg

SEQ ID NO: 433777 - DNA, 25 bp, Homo sapien
tctcccaacatgctgtgctccatag

SEQ ID NO: 433778 - DNA, 25 bp, Homo sapien
ttggtcttttccctgttcatctccc

SEQ ID NO: 433779 - DNA, 25 bp, Homo sapien
cctgttcatctcccaacatgctgtg

SEQ ID NO: 433780 - DNA, 25 bp, Homo sapien
cagtggactgcttgctggtcgctta

SEQ ID NO: 433781 - DNA, 25 bp, Homo sapien
gggaggacccaatctataggagcag

SEQ ID NO: 433782 - DNA, 25 bp, Homo sapien
gcatttaggtggagacttcttccca

SEQ ID NO: 433783 - DNA, 25 bp, Homo sapien
tttactccataagcgcttcagtggg

SEQ ID NO: 433784 - DNA, 25 bp, Homo sapien
ggtggaatatttcatggacaaattt

SEQ ID NO: 433785 - DNA, 25 bp, Homo sapien
gataaaccagcctcaatcccggctg

SEQ ID NO: 433786 - DNA, 25 bp, Homo sapien
ccctcccaaatttagttcctcatca

SEQ ID NO: 433787 - DNA, 25 bp, Homo sapien
tgcaggtggaatatttcatggacaa

SEQ ID NO: 433788 - DNA, 25 bp, Homo sapien
tggatttatagtagttcagtcataa

SEQ ID NO: 433789 - DNA, 25 bp, Homo sapien
tttaactcgaacttttcataactca

SEQ ID NO: 433790 - DNA, 25 bp, Homo sapien
cataactcaggggattccctgaaaa

SEQ ID NO: 433791 - DNA, 25 bp, Homo sapien
ttgtggatttatagtagttcagtca

SEQ ID NO: 433792 - DNA, 25 bp, Homo sapien
tggcgctcagcagtaacggccctat

SEQ ID NO: 433793 - DNA, 25 bp, Homo sapien
tgtctcctgatgcctgagcagaggt

SEQ ID NO: 433794 - DNA, 25 bp, Homo sapien
taacggccctatctgtctcctgatg

SEQ ID NO: 433795 - DNA, 25 bp, Homo sapien
accccttggacctctggcaggctca

SEQ ID NO: 433796 - DNA, 25 bp, Homo sapien
tgtagactatcaggtaagaacagaa

SEQ ID NO: 433797 - DNA, 25 bp, Homo sapien
tagactatcaggtaagaacagaagg

SEQ ID NO: 433798 - DNA, 25 bp, Homo sapien
actatcaggtaagaacagaagggca

SEQ ID NO: 433799 - DNA, 25 bp, Homo sapien
cttgtagactatcaggtaagaacag

SEQ ID NO: 433800 - DNA, 25 bp, Homo sapien
tctaaaggctataagtagtcagtgg

SEQ ID NO: 433801 - DNA, 25 bp, Homo sapien
tatcaagagtatgctaatggcacag

SEQ ID NO: 433802 - DNA, 25 bp, Homo sapien
cacagtgtgggtagcttagagaaag

SEQ ID NO: 433803 - DNA, 25 bp, Homo sapien
tacccctaaggagcttgtcgtccat

SEQ ID NO: 433804 - DNA, 25 bp, Homo sapien
taataatagccctgcaggcgactag

SEQ ID NO: 433805 - DNA, 25 bp, Homo sapien
ttcatcttctaagcccggaaacgtg

SEQ ID NO: 433806 - DNA, 25 bp, Homo sapien
cctagtacctattcggcagttgaga

SEQ ID NO: 433807 - DNA, 25 bp, Homo sapien
cacagttaagtggacgagatataca

SEQ ID NO: 433808 - DNA, 25 bp, Homo sapien
gatgtcaagccccataatgtcatga

SEQ ID NO: 433809 - DNA, 25 bp, Homo sapien
catgattgatcatgagcacagaaag

SEQ ID NO: 433810 - DNA, 25 bp, Homo sapien
cacagcatgggaattatgcacagag

SEQ ID NO: 433811 - DNA, 25 bp, Homo sapien
gcacagagatgtcaagccccataat

SEQ ID NO: 433812 - DNA, 25 bp, Homo sapien
tattcaggctaactcctttctgacc

SEQ ID NO: 433813 - DNA, 25 bp, Homo sapien
cctttctgacccgttcatcccacag

SEQ ID NO: 433814 - DNA, 25 bp, Homo sapien
ggactcttacgtattattcaggcta

SEQ ID NO: 433815 - DNA, 25 bp, Homo sapien
taaaggactcttacgtattattcag

SEQ ID NO: 433816 - DNA, 25 bp, Homo sapien
gattttacatgtatgagattctgaa

SEQ ID NO: 433817 - DNA, 25 bp, Homo sapien
acagactatgatattcgattttaca

SEQ ID NO: 433818 - DNA, 25 bp, Homo sapien
caattgtaccagacgttaacagact

SEQ ID NO: 433819 - DNA, 25 bp, Homo sapien
acgttaacagactatgatattcgat

SEQ ID NO: 433820 - DNA, 25 bp, Homo sapien
gagatggtgtttgacctggagcaca

SEQ ID NO: 433821 - DNA, 25 bp, Homo sapien
taaaagaccctgtggtgagtatagt

SEQ ID NO: 433822 - DNA, 25 bp, Homo sapien
ctggagcacaactggcctctttttg

SEQ ID NO: 433823 - DNA, 25 bp, Homo sapien
tatagtaggtgttagcaaggcccgc

SEQ ID NO: 433824 - DNA, 25 bp, Homo sapien
ccagctggttcgaaaattaggccga

SEQ ID NO: 433825 - DNA, 25 bp, Homo sapien
tgactaccagctggttcgaaaatta

SEQ ID NO: 433826 - DNA, 25 bp, Homo sapien
aaattaggccgaggtaaatacagtg

SEQ ID NO: 433827 - DNA, 25 bp, Homo sapien
taggccgaggtaaatacagtgaagt

SEQ ID NO: 433828 - DNA, 25 bp, Homo sapien
gaatactgggattacgagtcacatg

SEQ ID NO: 433829 - DNA, 25 bp, Homo sapien
aacctgtctgacatgtcgggacccg

SEQ ID NO: 433830 - DNA, 25 bp, Homo sapien
gatgttaatacacacagacctcgag

SEQ ID NO: 433831 - DNA, 25 bp, Homo sapien
aagtccagctttgtccgccaacctg

SEQ ID NO: 433832 - DNA, 25 bp, Homo sapien
tgtcagtgacctccaaatagatgat

SEQ ID NO: 433833 - DNA, 25 bp, Homo sapien
tgatcttccagacgaaatggttgcc

SEQ ID NO: 433834 - DNA, 25 bp, Homo sapien
gagctgtatatatttccccacttga

SEQ ID NO: 433835 - DNA, 25 bp, Homo sapien
tgtaggaataaaagcagaaggcccc

SEQ ID NO: 433836 - DNA, 25 bp, Homo sapien
gttagggatatgtttggagaaggcc

SEQ ID NO: 433837 - DNA, 25 bp, Homo sapien
gcttgaatattgtgtgttagggata

SEQ ID NO: 433838 - DNA, 25 bp, Homo sapien
agaggtcttactcccagtggttctc

SEQ ID NO: 433839 - DNA, 25 bp, Homo sapien
gcattaacatcttctctatgtcttg

SEQ ID NO: 433840 - DNA, 25 bp, Homo sapien
agacagtgacacgcttgtctgccat

SEQ ID NO: 433841 - DNA, 25 bp, Homo sapien
aagacagtgacacgcttgtctgcca

SEQ ID NO: 433842 - DNA, 25 bp, Homo sapien
aaagacagtgacacgcttgtctgcc

SEQ ID NO: 433843 - DNA, 25 bp, Homo sapien
caaagacagtgacacgcttgtctgc

SEQ ID NO: 433844 - DNA, 25 bp, Homo sapien
cgtctccctgtgaacaggtctattt

SEQ ID NO: 433845 - DNA, 25 bp, Homo sapien
gacactgagcctggggccccgctca

SEQ ID NO: 433846 - DNA, 25 bp, Homo sapien
ccgtctccctgtgaacaggtctatt

SEQ ID NO: 433847 - DNA, 25 bp, Homo sapien
ctgacactgagcctggggccccgct

SEQ ID NO: 433848 - DNA, 25 bp, Homo sapien
tcactctcgggacaggacgccagct

SEQ ID NO: 433849 - DNA, 25 bp, Homo sapien
tctcgggacaggacgccagctgctc

SEQ ID NO: 433850 - DNA, 25 bp, Homo sapien
ctctcgggacaggacgccagctgct

SEQ ID NO: 433851 - DNA, 25 bp, Homo sapien
actctcgggacaggacgccagctgc

SEQ ID NO: 433852 - DNA, 25 bp, Homo sapien
tgcagctgcgggtgccactgctcag

SEQ ID NO: 433853 - DNA, 25 bp, Homo sapien
aggcgtctcactatccccgaggcag

SEQ ID NO: 433854 - DNA, 25 bp, Homo sapien
tgcaaagggaatattgaggctccgc

SEQ ID NO: 433855 - DNA, 25 bp, Homo sapien
ttccaggaaatccaggccacatttc

SEQ ID NO: 433856 - DNA, 25 bp, Homo sapien
acagtgtatggtccaggaggagaaa

SEQ ID NO: 433857 - DNA, 25 bp, Homo sapien
tctaagggaacttggtcactcggca

SEQ ID NO: 433858 - DNA, 25 bp, Homo sapien
taggccaggtaggacattccagagg

SEQ ID NO: 433859 - DNA, 25 bp, Homo sapien
gacccactgtagtaggagtgcctcc

SEQ ID NO: 433860 - DNA, 25 bp, Homo sapien
tcaagggatgagaaacagactacat

SEQ ID NO: 433861 - DNA, 25 bp, Homo sapien
gttaatacacgtgcaaaatgttcgg

SEQ ID NO: 433862 - DNA, 25 bp, Homo sapien
ggtacatcacttaaacctgtgtctc

SEQ ID NO: 433863 - DNA, 25 bp, Homo sapien
tgttttgaggttcagatacgttaat

SEQ ID NO: 433864 - DNA, 25 bp, Homo sapien
accttccttgcagggttgttttgag

SEQ ID NO: 433865 - DNA, 25 bp, Homo sapien
cacagtttggactcgtgtgacctga

SEQ ID NO: 433866 - DNA, 25 bp, Homo sapien
cacaactttgagtgatgggcagcat

SEQ ID NO: 433867 - DNA, 25 bp, Homo sapien
catgttcgtgccattcaggttgaga

SEQ ID NO: 433868 - DNA, 25 bp, Homo sapien
tgaacagcgggtctataactgcacc

SEQ ID NO: 433869 - DNA, 25 bp, Homo sapien
tctgaatcgtccacctgtgacagca

SEQ ID NO: 433870 - DNA, 25 bp, Homo sapien
ggtctagaacacctctctgaatcgt

SEQ ID NO: 433871 - DNA, 25 bp, Homo sapien
gcacaagactggcatttactcaccg

SEQ ID NO: 433872 - DNA, 25 bp, Homo sapien
gaaggttccagaaagatctgaatgg

SEQ ID NO: 433873 - DNA, 25 bp, Homo sapien
gcactgttttaaggacctcacctaa

SEQ ID NO: 433874 - DNA, 25 bp, Homo sapien
tagtgcaattttaacccaggcaagg

SEQ ID NO: 433875 - DNA, 25 bp, Homo sapien
tggttccctgatagcaagtctgaga

SEQ ID NO: 433876 - DNA, 25 bp, Homo sapien
gggatgacccagtatcaagtttccc

SEQ ID NO: 433877 - DNA, 25 bp, Homo sapien
tagcagatccaaattacatccaaac

SEQ ID NO: 433878 - DNA, 25 bp, Homo sapien
attacatccaaactacaaggcaaac

SEQ ID NO: 433879 - DNA, 25 bp, Homo sapien
aaaggaatagcagatccaaattaca

SEQ ID NO: 433880 - DNA, 25 bp, Homo sapien
tacatccaaactacaaggcaaactc

SEQ ID NO: 433881 - DNA, 25 bp, Homo sapien
tctatgcaactctcccggacagagg

SEQ ID NO: 433882 - DNA, 25 bp, Homo sapien
ctgcgcttttgcatgcccgggcgag

SEQ ID NO: 433883 - DNA, 25 bp, Homo sapien
ttccagggaccgactgagccccgga

SEQ ID NO: 433884 - DNA, 25 bp, Homo sapien
gggcgaggaccgaagcacacacctc

SEQ ID NO: 433885 - DNA, 25 bp, Homo sapien
gcatttgtggctactctcctccttg

SEQ ID NO: 433886 - DNA, 25 bp, Homo sapien
ggagcggatgcatttgtggctactc

SEQ ID NO: 433887 - DNA, 25 bp, Homo sapien
ggatgcatttgtggctactctcctc

SEQ ID NO: 433888 - DNA, 25 bp, Homo sapien
agagagagccccatcagcgtggagc

SEQ ID NO: 433889 - DNA, 25 bp, Homo sapien
ccgcccttgaagagttcaccatctg

SEQ ID NO: 433890 - DNA, 25 bp, Homo sapien
caccatctggatagggttccagaag

SEQ ID NO: 433891 - DNA, 25 bp, Homo sapien
gagttcaccatctggatagggttcc

SEQ ID NO: 433892 - DNA, 25 bp, Homo sapien
tgtatggggtccccgcccttgaaga

SEQ ID NO: 433893 - DNA, 25 bp, Homo sapien
gtgtaccaggcctataatggggcac

SEQ ID NO: 433894 - DNA, 25 bp, Homo sapien
tgttgtgtaccaggcctataatggg

SEQ ID NO: 433895 - DNA, 25 bp, Homo sapien
ttgtgtaccaggcctataatggggc

SEQ ID NO: 433896 - DNA, 25 bp, Homo sapien
ctgttgtgtaccaggcctataatgg

SEQ ID NO: 433897 - DNA, 25 bp, Homo sapien
tcacagccaagcaggccttttcatg

SEQ ID NO: 433898 - DNA, 25 bp, Homo sapien
gccaagcaggccttttcatgagcac

SEQ ID NO: 433899 - DNA, 25 bp, Homo sapien
cacagccaagcaggccttttcatga

SEQ ID NO: 433900 - DNA, 25 bp, Homo sapien
cagccaagcaggccttttcatgagc

SEQ ID NO: 433901 - DNA, 25 bp, Homo sapien
tctcaacagctacctccaacaaatg

SEQ ID NO: 433902 - DNA, 25 bp, Homo sapien
atctcaacagctacctccaacaaat

SEQ ID NO: 433903 - DNA, 25 bp, Homo sapien
cccattgcgttagtgtaaagtgtgc

SEQ ID NO: 433904 - DNA, 25 bp, Homo sapien
tgtgagtgccctagtcccagaggtg

SEQ ID NO: 433905 - DNA, 25 bp, Homo sapien
taaagtgtgcagtgagacagccaga

SEQ ID NO: 433906 - DNA, 25 bp, Homo sapien
caagggattgagtctctggcaaaag

SEQ ID NO: 433907 - DNA, 25 bp, Homo sapien
aaaaaaggacgcgtgttcggcaatg

SEQ ID NO: 433908 - DNA, 25 bp, Homo sapien
attaccaaaaatgtcgtcgctctcg

SEQ ID NO: 433909 - DNA, 25 bp, Homo sapien
gggcggagtcacagccaaaccaaga

SEQ ID NO: 433910 - DNA, 25 bp, Homo sapien
agggaccaggactgccgccctatta

SEQ ID NO: 433911 - DNA, 25 bp, Homo sapien
acagccctgcaaataaggctcaggc

SEQ ID NO: 433912 - DNA, 25 bp, Homo sapien
tgtcagtaggtgatacatcagcacc

SEQ ID NO: 433913 - DNA, 25 bp, Homo sapien
ttctaaactgtcagtaggtgataca

SEQ ID NO: 433914 - DNA, 25 bp, Homo sapien
gtaggtgatacatcagcaccttcct

SEQ ID NO: 433915 - DNA, 25 bp, Homo sapien
agatggcctgtgatccctttgaaat

SEQ ID NO: 433916 - DNA, 25 bp, Homo sapien
ttttagatggcctgtgatccctttg

SEQ ID NO: 433917 - DNA, 25 bp, Homo sapien
gatctgaaggtctgaggtttagttt

SEQ ID NO: 433918 - DNA, 25 bp, Homo sapien
gggccgggatctgaaggtctgaggt

SEQ ID NO: 433919 - DNA, 25 bp, Homo sapien
tcttgacctggaagggtgagtcagg

SEQ ID NO: 433920 - DNA, 25 bp, Homo sapien
tgctgtcttgacctggaagggtgag

SEQ ID NO: 433921 - DNA, 25 bp, Homo sapien
cttgacctggaagggtgagtcaggc

SEQ ID NO: 433922 - DNA, 25 bp, Homo sapien
tgacctggaagggtgagtcaggcct

SEQ ID NO: 433923 - DNA, 25 bp, Homo sapien
cagattatccctgcagagcgagaac

SEQ ID NO: 433924 - DNA, 25 bp, Homo sapien
ggcagattatccctgcagagcgaga

SEQ ID NO: 433925 - DNA, 25 bp, Homo sapien
gattatccctgcagagcgagaaccc

SEQ ID NO: 433926 - DNA, 25 bp, Homo sapien
ttatccctgcagagcgagaacccag

SEQ ID NO: 433927 - DNA, 25 bp, Homo sapien
attaccctgggttccatggacttat

SEQ ID NO: 433928 - DNA, 25 bp, Homo sapien
agatgccatctcaattaccctgggt

SEQ ID NO: 433929 - DNA, 25 bp, Homo sapien
ccctgggttccatggacttattaga

SEQ ID NO: 433930 - DNA, 25 bp, Homo sapien
gagatgccatctcaattaccctggg

SEQ ID NO: 433931 - DNA, 25 bp, Homo sapien
ccccctcagaaggccctctctctgc

SEQ ID NO: 433932 - DNA, 25 bp, Homo sapien
aggccccctcagaaggccctctctc

SEQ ID NO: 433933 - DNA, 25 bp, Homo sapien
gccccctcagaaggccctctctctg

SEQ ID NO: 433934 - DNA, 25 bp, Homo sapien
ggccccctcagaaggccctctctct

SEQ ID NO: 433935 - DNA, 25 bp, Homo sapien
cggtacatctgctcttgggtttggg

SEQ ID NO: 433936 - DNA, 25 bp, Homo sapien
tggtgctctaagaagctcttctccg

SEQ ID NO: 433937 - DNA, 25 bp, Homo sapien
tggactcttcctaaggacccaggac

SEQ ID NO: 433938 - DNA, 25 bp, Homo sapien
cttctccggtacatctgctcttggg

SEQ ID NO: 433939 - DNA, 25 bp, Homo sapien
gtccagccctagggagacctcttta

SEQ ID NO: 433940 - DNA, 25 bp, Homo sapien
ccagccctagggagacctctttaag

SEQ ID NO: 433941 - DNA, 25 bp, Homo sapien
tccagccctagggagacctctttaa

SEQ ID NO: 433942 - DNA, 25 bp, Homo sapien
tggagcccgcgctaggcgtgtcccg

SEQ ID NO: 433943 - DNA, 25 bp, Homo sapien
ttggagaggctgacagctcggaccc

SEQ ID NO: 433944 - DNA, 25 bp, Homo sapien
ccctccgcggtcgagctgagcgggt

SEQ ID NO: 433945 - DNA, 25 bp, Homo sapien
gctcctctcgcgcaggctttggaga

SEQ ID NO: 433946 - DNA, 25 bp, Homo sapien
caaagagtggtcctctgtccccgta

SEQ ID NO: 433947 - DNA, 25 bp, Homo sapien
gaaaggcgccaaatgagccgagtcc

SEQ ID NO: 433948 - DNA, 25 bp, Homo sapien
ctggagaatctgctgcccctgcatc

SEQ ID NO: 433949 - DNA, 25 bp, Homo sapien
cagaaatgtcagtcccgtccgatcc

SEQ ID NO: 433950 - DNA, 25 bp, Homo sapien
aattaaatgagttcatacttgtaaa

SEQ ID NO: 433951 - DNA, 25 bp, Homo sapien
gggaattaaatgagttcatacttgt

SEQ ID NO: 433952 - DNA, 25 bp, Homo sapien
cttatatcacagagttgagggaatt

SEQ ID NO: 433953 - DNA, 25 bp, Homo sapien
cagagttgagggaattaaatgagtt

SEQ ID NO: 433954 - DNA, 25 bp, Homo sapien
aataaagtctcattactgctgtgtt

SEQ ID NO: 433955 - DNA, 25 bp, Homo sapien
tgctgtgtttaaaccctcctgtggc

SEQ ID NO: 433956 - DNA, 25 bp, Homo sapien
caataacggcaatgttttcccagca

SEQ ID NO: 433957 - DNA, 25 bp, Homo sapien
gggcaataacggcaatgttttccca

SEQ ID NO: 433958 - DNA, 25 bp, Homo sapien
agacggtgttctgtgccccctggtg

SEQ ID NO: 433959 - DNA, 25 bp, Homo sapien
gaggcagatgtggtcgtggacgtgg

SEQ ID NO: 433960 - DNA, 25 bp, Homo sapien
gttctgtgccccctggtgctgacaa

SEQ ID NO: 433961 - DNA, 25 bp, Homo sapien
acggtgttctgtgccccctggtgct

SEQ ID NO: 433962 - DNA, 25 bp, Homo sapien
cagacaaagaggctcagccgcggct

SEQ ID NO: 433963 - DNA, 25 bp, Homo sapien
aaaaaaaagccgagcgcgctcagac

SEQ ID NO: 433964 - DNA, 25 bp, Homo sapien
gctcagccgcggctgagaggataag

SEQ ID NO: 433965 - DNA, 25 bp, Homo sapien
gagcgcgctcagacaaagaggctca

SEQ ID NO: 433966 - DNA, 25 bp, Homo sapien
agatccgggcagaaagtaggcagct

SEQ ID NO: 433967 - DNA, 25 bp, Homo sapien
cagagatccgggcagaaagtaggca

SEQ ID NO: 433968 - DNA, 25 bp, Homo sapien
ccgagggctttagtctgcggagacc

SEQ ID NO: 433969 - DNA, 25 bp, Homo sapien
ggctgctgcatatcccgagggcttt

SEQ ID NO: 433970 - DNA, 25 bp, Homo sapien
tccgcaggcggcaaggtagggcggg

SEQ ID NO: 433971 - DNA, 25 bp, Homo sapien
gcccccgtagcaggtagccagggac

SEQ ID NO: 433972 - DNA, 25 bp, Homo sapien
gccagggaccctggtccgcaggcgg

SEQ ID NO: 433973 - DNA, 25 bp, Homo sapien
ctccacagcgctcggtttccgggct

SEQ ID NO: 433974 - DNA, 25 bp, Homo sapien
taaagagcggctgtttggacagcag

SEQ ID NO: 433975 - DNA, 25 bp, Homo sapien
cgtgagcactgtgcggcgagtctca

SEQ ID NO: 433976 - DNA, 25 bp, Homo sapien
cacacaagtcgatgaggctgctgag

SEQ ID NO: 433977 - DNA, 25 bp, Homo sapien
gggctgtcacacaagtcgatgaggc

SEQ ID NO: 433978 - DNA, 25 bp, Homo sapien
tcggcccgtccaggagtgcggctgg

SEQ ID NO: 433979 - DNA, 25 bp, Homo sapien
aggagtgcggctggcctcggcaggg

SEQ ID NO: 433980 - DNA, 25 bp, Homo sapien
ctccctcggcccgtccaggagtgcg

SEQ ID NO: 433981 - DNA, 25 bp, Homo sapien
ccgtccaggagtgcggctggcctcg

SEQ ID NO: 433982 - DNA, 25 bp, Homo sapien
cttggagcgttgcaaacccggcggc

SEQ ID NO: 433983 - DNA, 25 bp, Homo sapien
gccgggtgatgggcagggccgggca

SEQ ID NO: 433984 - DNA, 25 bp, Homo sapien
cggcggcagggccgggtgatgggca

SEQ ID NO: 433985 - DNA, 25 bp, Homo sapien
ttggagcgttgcaaacccggcggcc

SEQ ID NO: 433986 - DNA, 25 bp, Homo sapien
tagaaaagcgctcgctcaagtccga

SEQ ID NO: 433987 - DNA, 25 bp, Homo sapien
ctagaaaagcgctcgctcaagtccg

SEQ ID NO: 433988 - DNA, 25 bp, Homo sapien
gaagttaaaaaagcgctcgagatca

SEQ ID NO: 433989 - DNA, 25 bp, Homo sapien
tgccagggacacgatatccgagctg

SEQ ID NO: 433990 - DNA, 25 bp, Homo sapien
gatatccgagctggcccgtgccagg

SEQ ID NO: 433991 - DNA, 25 bp, Homo sapien
tccgggtccaggccgcagaagttaa

SEQ ID NO: 433992 - DNA, 25 bp, Homo sapien
tgccttagcccatacaaccacttga

SEQ ID NO: 433993 - DNA, 25 bp, Homo sapien
tcaacagtcaccgagctgcggcggg

SEQ ID NO: 433994 - DNA, 25 bp, Homo sapien
tgggctctcccgagcctgccttagc

SEQ ID NO: 433995 - DNA, 25 bp, Homo sapien
tccaccaccgacacgccatagggaa

SEQ ID NO: 433996 - DNA, 25 bp, Homo sapien
gatccgtcctgtggcgaattccagg

SEQ ID NO: 433997 - DNA, 25 bp, Homo sapien
tcctgtggcgaattccaggcccagt

SEQ ID NO: 433998 - DNA, 25 bp, Homo sapien
taagatccgtcctgtggcgaattcc

SEQ ID NO: 433999 - DNA, 25 bp, Homo sapien
tctgtaagatccgtcctgtggcgaa

SEQ ID NO: 434000 - DNA, 25 bp, Homo sapien
gagggcaaagcaccgcaaatgcagc

SEQ ID NO: 434001 - DNA, 25 bp, Homo sapien
cacggccgtctagagaatggatgca

SEQ ID NO: 434002 - DNA, 25 bp, Homo sapien
gagagtcagtccttgcccaacaatg

SEQ ID NO: 434003 - DNA, 25 bp, Homo sapien
ggaactaagcaggagtacactcatg

SEQ ID NO: 434004 - DNA, 25 bp, Homo sapien
tacttgcccacatttaaacggtgag

SEQ ID NO: 434005 - DNA, 25 bp, Homo sapien
gaacttggaagctttggccccacta

SEQ ID NO: 434006 - DNA, 25 bp, Homo sapien
tctgagactacgctggaggaaatgg

SEQ ID NO: 434007 - DNA, 25 bp, Homo sapien
tgatttgccaacaggaacactggag

SEQ ID NO: 434008 - DNA, 25 bp, Homo sapien
ggcatttggacgacgccattcccgg

SEQ ID NO: 434009 - DNA, 25 bp, Homo sapien
aaatatgaccgtagagggtggagcc

SEQ ID NO: 434010 - DNA, 25 bp, Homo sapien
gaggccgtgtcattgctcaggcatt

SEQ ID NO: 434011 - DNA, 25 bp, Homo sapien
gcccagaacctgatgtgcgttagct

SEQ ID NO: 434012 - DNA, 25 bp, Homo sapien
ggagtgtccatacacccacctggag

SEQ ID NO: 434013 - DNA, 25 bp, Homo sapien
gattcattgacagggatggctgttt

SEQ ID NO: 434014 - DNA, 25 bp, Homo sapien
gctgattcattgacagggatggctg

SEQ ID NO: 434015 - DNA, 25 bp, Homo sapien
tggctgttttggagtgtccatacac

SEQ ID NO: 434016 - DNA, 25 bp, Homo sapien
gggcgaatctcaaccaagtccatga

SEQ ID NO: 434017 - DNA, 25 bp, Homo sapien
gaacaacctgtatgtccgtcaacaa

SEQ ID NO: 434018 - DNA, 25 bp, Homo sapien
tctggaatgtcagctcctcgagggc

SEQ ID NO: 434019 - DNA, 25 bp, Homo sapien
agatacactcagcaacacgggcgaa

SEQ ID NO: 434020 - DNA, 25 bp, Homo sapien
gaagttatcaataagggcagccagt

SEQ ID NO: 434021 - DNA, 25 bp, Homo sapien
gcagccagtttggagtttgactctt

SEQ ID NO: 434022 - DNA, 25 bp, Homo sapien
ccatcagctggaagttatcaataag

SEQ ID NO: 434023 - DNA, 25 bp, Homo sapien
tttgactcttgatccttttgtagca

SEQ ID NO: 434024 - DNA, 25 bp, Homo sapien
gatagaaaccccagaagtcttcagg

SEQ ID NO: 434025 - DNA, 25 bp, Homo sapien
tgctacagacgcaaacatggaggta

SEQ ID NO: 434026 - DNA, 25 bp, Homo sapien
ggctgactctagagacccatttgga

SEQ ID NO: 434027 - DNA, 25 bp, Homo sapien
ggtgacaaagttccaggcactcctg

SEQ ID NO: 434028 - DNA, 25 bp, Homo sapien
tgagatctctgcgttgttcccagca

SEQ ID NO: 434029 - DNA, 25 bp, Homo sapien
aaagctgacagcgtcgccttggcaa

SEQ ID NO: 434030 - DNA, 25 bp, Homo sapien
agagttccctgagtacaccccagag

SEQ ID NO: 434031 - DNA, 25 bp, Homo sapien
cctcgatctgtgtgggccttcgcct

SEQ ID NO: 434032 - DNA, 25 bp, Homo sapien
gggttgtcgatggccccacagcttc

SEQ ID NO: 434033 - DNA, 25 bp, Homo sapien
gaccttctgaggacacacagaccat

SEQ ID NO: 434034 - DNA, 25 bp, Homo sapien
tgctgcacaagattcaccaccagac

SEQ ID NO: 434035 - DNA, 25 bp, Homo sapien
gatgtctgctgcacaagattcacca

SEQ ID NO: 434036 - DNA, 25 bp, Homo sapien
acacgtagggctccgtgactgggac

SEQ ID NO: 434037 - DNA, 25 bp, Homo sapien
tggttggcctgaacacgtagggctc

SEQ ID NO: 434038 - DNA, 25 bp, Homo sapien
caggagaagcaagagtcggagctcc

SEQ ID NO: 434039 - DNA, 25 bp, Homo sapien
atttgccgtgactggttggcctgaa

SEQ ID NO: 434040 - DNA, 25 bp, Homo sapien
ctgactcctggtgtcacctcccaga

SEQ ID NO: 434041 - DNA, 25 bp, Homo sapien
gactcctggtgtcacctcccagagg

SEQ ID NO: 434042 - DNA, 25 bp, Homo sapien
ctcccagagggcagtgatcctccat

SEQ ID NO: 434043 - DNA, 25 bp, Homo sapien
tcctggtgtcacctcccagagggca

SEQ ID NO: 434044 - DNA, 25 bp, Homo sapien
tggcttcgtgcagagacagaagact

SEQ ID NO: 434045 - DNA, 25 bp, Homo sapien
gcttcgtgcagagacagaagactca

SEQ ID NO: 434046 - DNA, 25 bp, Homo sapien
aaaggaggatggcttcgtgcagaga

SEQ ID NO: 434047 - DNA, 25 bp, Homo sapien
aggatggcttcgtgcagagacagaa

SEQ ID NO: 434048 - DNA, 25 bp, Homo sapien
ccagaagggagagggtagcagggct

SEQ ID NO: 434049 - DNA, 25 bp, Homo sapien
gcagggctctctgtagtagccgcat

SEQ ID NO: 434050 - DNA, 25 bp, Homo sapien
ggtagcagggctctctgtagtagcc

SEQ ID NO: 434051 - DNA, 25 bp, Homo sapien
tagcagggctctctgtagtagccgc

SEQ ID NO: 434052 - DNA, 25 bp, Homo sapien
ccgggggcggcggctctgggggcat

SEQ ID NO: 434053 - DNA, 25 bp, Homo sapien
cggaggaccgggggcggcggctctg

SEQ ID NO: 434054 - DNA, 25 bp, Homo sapien
ctgcggggcagaccgggggccggag

SEQ ID NO: 434055 - DNA, 25 bp, Homo sapien
gaagaagcaaggtacaaggggtggc

SEQ ID NO: 434056 - DNA, 25 bp, Homo sapien
agcaaggtacaaggggtggctgggc

SEQ ID NO: 434057 - DNA, 25 bp, Homo sapien
accgaaggaagaagcaaggtacaag

SEQ ID NO: 434058 - DNA, 25 bp, Homo sapien
ctgaaccgaaggaagaagcaaggta

SEQ ID NO: 434059 - DNA, 25 bp, Homo sapien
tggggagcgccagcccggatccggc

SEQ ID NO: 434060 - DNA, 25 bp, Homo sapien
tgcctgctcctgctcgtcgcccacg

SEQ ID NO: 434061 - DNA, 25 bp, Homo sapien
ggctgcccagatgcgggcgccactc

SEQ ID NO: 434062 - DNA, 25 bp, Homo sapien
gtcgcccacgccgtggacatgctcg

SEQ ID NO: 434063 - DNA, 25 bp, Homo sapien
ctggcggtgggcacgtgcacgtgct

SEQ ID NO: 434064 - DNA, 25 bp, Homo sapien
gctgggggcgggaaagacgcaagac

SEQ ID NO: 434065 - DNA, 25 bp, Homo sapien
ggcagtgctgggggcgggaaagacg

SEQ ID NO: 434066 - DNA, 25 bp, Homo sapien
cacgtgcacgtgctcgggggcagtg

SEQ ID NO: 434067 - DNA, 25 bp, Homo sapien
aggaggaacagacagagaaagggga

SEQ ID NO: 434068 - DNA, 25 bp, Homo sapien
ttaagggccagaaggaggaacagac

SEQ ID NO: 434069 - DNA, 25 bp, Homo sapien
gaaggaggaacagacagagaaaggg

SEQ ID NO: 434070 - DNA, 25 bp, Homo sapien
cagaaggaggaacagacagagaaag

SEQ ID NO: 434071 - DNA, 25 bp, Homo sapien
tctggctaaaggctcattgaccttg

SEQ ID NO: 434072 - DNA, 25 bp, Homo sapien
cactggggataacttgaccttctgg

SEQ ID NO: 434073 - DNA, 25 bp, Homo sapien
tagctcctggaatccataaagacac

SEQ ID NO: 434074 - DNA, 25 bp, Homo sapien
ggggataacttgaccttctggctaa

SEQ ID NO: 434075 - DNA, 25 bp, Homo sapien
caggatattgagtctggccaggatg

SEQ ID NO: 434076 - DNA, 25 bp, Homo sapien
tagaaacaggatattgagtctggcc

SEQ ID NO: 434077 - DNA, 25 bp, Homo sapien
gctggtggtagaaacaggatattga

SEQ ID NO: 434078 - DNA, 25 bp, Homo sapien
ggtggtagaaacaggatattgagtc

SEQ ID NO: 434079 - DNA, 25 bp, Homo sapien
tctgagcaatcaggtaaggcgaggt

SEQ ID NO: 434080 - DNA, 25 bp, Homo sapien
tcaccacacgtctgaacatgctgct

SEQ ID NO: 434081 - DNA, 25 bp, Homo sapien
ccaacactcagatgtcgagaacatg

SEQ ID NO: 434082 - DNA, 25 bp, Homo sapien
gaccctgatgagagtagctttgaag

SEQ ID NO: 434083 - DNA, 25 bp, Homo sapien
actatgccaagaacagtgacagcca

SEQ ID NO: 434084 - DNA, 25 bp, Homo sapien
aacactatgccaagaacagtgacag

SEQ ID NO: 434085 - DNA, 25 bp, Homo sapien
aacatgaacactatgccaagaacag

SEQ ID NO: 434086 - DNA, 25 bp, Homo sapien
tgaacactatgccaagaacagtgac

SEQ ID NO: 434087 - DNA, 25 bp, Homo sapien
taccaagagcctatgccagaggtga

SEQ ID NO: 434088 - DNA, 25 bp, Homo sapien
ccactaccaagagcctatgccagag

SEQ ID NO: 434089 - DNA, 25 bp, Homo sapien
actaccaagagcctatgccagaggt

SEQ ID NO: 434090 - DNA, 25 bp, Homo sapien
ccaagagcctatgccagaggtgagg

SEQ ID NO: 434091 - DNA, 25 bp, Homo sapien
ctacatcagcaagagtcccattctg

SEQ ID NO: 434092 - DNA, 25 bp, Homo sapien
acatcagcaagagtcccattctgcc

SEQ ID NO: 434093 - DNA, 25 bp, Homo sapien
tacatcagcaagagtcccattctgc

SEQ ID NO: 434094 - DNA, 25 bp, Homo sapien
gcgctggttcttgccgagtccacac

SEQ ID NO: 434095 - DNA, 25 bp, Homo sapien
gtagtgcagtgagccggctccgcgg

SEQ ID NO: 434096 - DNA, 25 bp, Homo sapien
gggtagctataactctgcttccctc

SEQ ID NO: 434097 - DNA, 25 bp, Homo sapien
ctgagaccaaaatggagacgcccgg

SEQ ID NO: 434098 - DNA, 25 bp, Homo sapien
ccggcgctgccgatgcgaacagtac

SEQ ID NO: 434099 - DNA, 25 bp, Homo sapien
gcagacgagcgcgtcctgcctgcag

SEQ ID NO: 434100 - DNA, 25 bp, Homo sapien
gtgtgtcaccacttcccaatgcaag

SEQ ID NO: 434101 - DNA, 25 bp, Homo sapien
caagccgaagtaaccgtgtgtcacc

SEQ ID NO: 434102 - DNA, 25 bp, Homo sapien
cggtgatggctttcacaaggagctt

SEQ ID NO: 434103 - DNA, 25 bp, Homo sapien
ttattgttgttccacccagctggca

SEQ ID NO: 434104 - DNA, 25 bp, Homo sapien
cagttctgacttcttatcattggga

SEQ ID NO: 434105 - DNA, 25 bp, Homo sapien
cataccggaggacatacaggtcttt

SEQ ID NO: 434106 - DNA, 25 bp, Homo sapien
gatataatcatccaagttcagggtc

SEQ ID NO: 434107 - DNA, 25 bp, Homo sapien
tctgcatcgatataatcatccaagt

SEQ ID NO: 434108 - DNA, 25 bp, Homo sapien
acccaggtgttctgcatcgatataa

SEQ ID NO: 434109 - DNA, 25 bp, Homo sapien
ccaggtgttctgcatcgatataatc

SEQ ID NO: 434110 - DNA, 25 bp, Homo sapien
tacatcaaaatagaggaaggaattc

SEQ ID NO: 434111 - DNA, 25 bp, Homo sapien
tgtgagagacaagtgacgtgagcca

SEQ ID NO: 434112 - DNA, 25 bp, Homo sapien
catataaagtatgttctccaaccat

SEQ ID NO: 434113 - DNA, 25 bp, Homo sapien
aaagcaagcagaagtaataaaggta

SEQ ID NO: 434114 - DNA, 25 bp, Homo sapien
taccaccccattagaaagaggtgag

SEQ ID NO: 434115 - DNA, 25 bp, Homo sapien
ctgagttgcccctccttgtttacca

SEQ ID NO: 434116 - DNA, 25 bp, Homo sapien
ttaccaccccattagaaagaggtga

SEQ ID NO: 434117 - DNA, 25 bp, Homo sapien
tgagttgcccctccttgtttaccac

SEQ ID NO: 434118 - DNA, 25 bp, Homo sapien
gatagctcctggcattgcgcttggc

SEQ ID NO: 434119 - DNA, 25 bp, Homo sapien
tggtattctggctgcaacgacggcg

SEQ ID NO: 434120 - DNA, 25 bp, Homo sapien
gatttgggcccaagcttcttaggca

SEQ ID NO: 434121 - DNA, 25 bp, Homo sapien
cttgcagttggctaggaaccctgga

SEQ ID NO: 434122 - DNA, 25 bp, Homo sapien
tccagacacaatacgagaccgaagc

SEQ ID NO: 434123 - DNA, 25 bp, Homo sapien
tgattccagacacaatacgagaccg

SEQ ID NO: 434124 - DNA, 25 bp, Homo sapien
agacacaatacgagaccgaagctcc

SEQ ID NO: 434125 - DNA, 25 bp, Homo sapien
ggtgtgatgattccagacacaatac

SEQ ID NO: 434126 - DNA, 25 bp, Homo sapien
agccttttcccactgctcatggata

SEQ ID NO: 434127 - DNA, 25 bp, Homo sapien
cttacattagccttttcccactgct

SEQ ID NO: 434128 - DNA, 25 bp, Homo sapien
ctgcttacattagccttttcccact

SEQ ID NO: 434129 - DNA, 25 bp, Homo sapien
tagccttttcccactgctcatggat

SEQ ID NO: 434130 - DNA, 25 bp, Homo sapien
gtggtgtggaggaatccggagtggg

SEQ ID NO: 434131 - DNA, 25 bp, Homo sapien
cagggaggctgccgactggtgtgtg

SEQ ID NO: 434132 - DNA, 25 bp, Homo sapien
gggaggctgccgactggtgtgtggg

SEQ ID NO: 434133 - DNA, 25 bp, Homo sapien
ggtggtgtggaggaatccggagtgg

SEQ ID NO: 434134 - DNA, 25 bp, Homo sapien
aggcactgatccttggacagactca

SEQ ID NO: 434135 - DNA, 25 bp, Homo sapien
cactgatccttggacagactcaggg

SEQ ID NO: 434136 - DNA, 25 bp, Homo sapien
actgcacataagccccagaggcact

SEQ ID NO: 434137 - DNA, 25 bp, Homo sapien
ggcactgatccttggacagactcag

SEQ ID NO: 434138 - DNA, 25 bp, Homo sapien
aagggttttcatatctgtattcata

SEQ ID NO: 434139 - DNA, 25 bp, Homo sapien
tattcataaaggatactggcttgta

SEQ ID NO: 434140 - DNA, 25 bp, Homo sapien
ggtactggttatcaggataatacta

SEQ ID NO: 434141 - DNA, 25 bp, Homo sapien
tattgatatggtatcttaacactga

SEQ ID NO: 434142 - DNA, 25 bp, Homo sapien
gtgttagccaggatatcaattttat

SEQ ID NO: 434143 - DNA, 25 bp, Homo sapien
tgccttgttccggatcttaagagga

SEQ ID NO: 434144 - DNA, 25 bp, Homo sapien
gccctggctagaatatcaagtacaa

SEQ ID NO: 434145 - DNA, 25 bp, Homo sapien
tgtatacaagatatcacgtcattga

SEQ ID NO: 434146 - DNA, 25 bp, Homo sapien
cgcaaaatactctccttgacgtggg

SEQ ID NO: 434147 - DNA, 25 bp, Homo sapien
tgtaagctcagggtatgaacccagc

SEQ ID NO: 434148 - DNA, 25 bp, Homo sapien
aaagcctgtgttcctaattgccgca

SEQ ID NO: 434149 - DNA, 25 bp, Homo sapien
gggacaagctcaatcttctgcctga

SEQ ID NO: 434150 - DNA, 25 bp, Homo sapien
ctctagggcagacaattccaacttt

SEQ ID NO: 434151 - DNA, 25 bp, Homo sapien
gctctagggcagacaattccaactt

SEQ ID NO: 434152 - DNA, 25 bp, Homo sapien
gagtgtttaaggtgaggggtgagac

SEQ ID NO: 434153 - DNA, 25 bp, Homo sapien
aagctgcagccatacatcactacac

SEQ ID NO: 434154 - DNA, 25 bp, Homo sapien
caagctgcagccatacatcactaca

SEQ ID NO: 434155 - DNA, 25 bp, Homo sapien
tcacagcagacccagaatcttttga

SEQ ID NO: 434156 - DNA, 25 bp, Homo sapien
gacaagctgcagccatacatcacta

SEQ ID NO: 434157 - DNA, 25 bp, Homo sapien
tagctatactcctagcctagacgca

SEQ ID NO: 434158 - DNA, 25 bp, Homo sapien
tcaggagtagaaaagacctgcccac

SEQ ID NO: 434159 - DNA, 25 bp, Homo sapien
catacagtctcctgactatcagagg

SEQ ID NO: 434160 - DNA, 25 bp, Homo sapien
caatggaatgtcctctctagctata

SEQ ID NO: 434161 - DNA, 25 bp, Homo sapien
ttcaaaccagtatttggagcaatcc

SEQ ID NO: 434162 - DNA, 25 bp, Homo sapien
tgtgttcaaaccagtatttggagca

SEQ ID NO: 434163 - DNA, 25 bp, Homo sapien
ccactgctgtactgtgttcaaacca

SEQ ID NO: 434164 - DNA, 25 bp, Homo sapien
tccactgctgtactgtgttcaaacc

SEQ ID NO: 434165 - DNA, 25 bp, Homo sapien
gaaaaagggcaactgagcaatctgt

SEQ ID NO: 434166 - DNA, 25 bp, Homo sapien
aatctctataaacagggcttggtcc

SEQ ID NO: 434167 - DNA, 25 bp, Homo sapien
gactccagcattggtaaggataggg

SEQ ID NO: 434168 - DNA, 25 bp, Homo sapien
ttagtcttataaccgcaaggaactg

SEQ ID NO: 434169 - DNA, 25 bp, Homo sapien
ggtaagctgacactgctgatttggg

SEQ ID NO: 434170 - DNA, 25 bp, Homo sapien
gagatcaaagctgaaccagggactg

SEQ ID NO: 434171 - DNA, 25 bp, Homo sapien
caaactgtcaggtgcacatgagtca

SEQ ID NO: 434172 - DNA, 25 bp, Homo sapien
tatttgaaccacctaggcaagtgct

SEQ ID NO: 434173 - DNA, 25 bp, Homo sapien
tatgcctgttgccaaatctgagaag

SEQ ID NO: 434174 - DNA, 25 bp, Homo sapien
cagtggccccaatgttagacctttt

SEQ ID NO: 434175 - DNA, 25 bp, Homo sapien
gatgagaaattcgtaaccattcaaa

SEQ ID NO: 434176 - DNA, 25 bp, Homo sapien
tagaccttttataattgccccacag

SEQ ID NO: 434177 - DNA, 25 bp, Homo sapien
gattggtgagtttctagttgtacga

SEQ ID NO: 434178 - DNA, 25 bp, Homo sapien
tgagtttctagttgtacgaaggata

SEQ ID NO: 434179 - DNA, 25 bp, Homo sapien
gaaaaggacatgactggcctagctt

SEQ ID NO: 434180 - DNA, 25 bp, Homo sapien
caaggggtagacatgtgatggttaa

SEQ ID NO: 434181 - DNA, 25 bp, Homo sapien
taaaagattgacatccactagcaaa

SEQ ID NO: 434182 - DNA, 25 bp, Homo sapien
gaaatcagtctactactctagaacg

SEQ ID NO: 434183 - DNA, 25 bp, Homo sapien
tattcccatgacattgcgttctgct

SEQ ID NO: 434184 - DNA, 25 bp, Homo sapien
gggtgactgacccagactatcaaga

SEQ ID NO: 434185 - DNA, 25 bp, Homo sapien
taaaagcaacacacctcgttgggca

SEQ ID NO: 434186 - DNA, 25 bp, Homo sapien
tcttgcatgtgctaaatgaggctcc

SEQ ID NO: 434187 - DNA, 25 bp, Homo sapien
cactgggtagtatgtcgctactgca

SEQ ID NO: 434188 - DNA, 25 bp, Homo sapien
ggaaaaactgcatggctgagctcac

SEQ ID NO: 434189 - DNA, 25 bp, Homo sapien
gggcacctgacagtggagggaaaca

SEQ ID NO: 434190 - DNA, 25 bp, Homo sapien
gctggtgaaaatcctgtgctcgatg

SEQ ID NO: 434191 - DNA, 25 bp, Homo sapien
gccttgtcgcccaggtagaagacct

SEQ ID NO: 434192 - DNA, 25 bp, Homo sapien
tgtcaatgacgagtatggtgatctc

SEQ ID NO: 434193 - DNA, 25 bp, Homo sapien
ctccaggaacacatgcagcttgttg

SEQ ID NO: 434194 - DNA, 25 bp, Homo sapien
ggaacacatgcagcttgttgtaggg

SEQ ID NO: 434195 - DNA, 25 bp, Homo sapien
cacatgcagcttgttgtagggtgtg

SEQ ID NO: 434196 - DNA, 25 bp, Homo sapien
aacacatgcagcttgttgtagggtg

SEQ ID NO: 434197 - DNA, 25 bp, Homo sapien
tgtccagggtattgaaggtctcaaa

SEQ ID NO: 434198 - DNA, 25 bp, Homo sapien
tcagggggccctcagtcagcagcac

SEQ ID NO: 434199 - DNA, 25 bp, Homo sapien
aacatgatctgagccatcttctttc

SEQ ID NO: 434200 - DNA, 25 bp, Homo sapien
catgatctgagccatcttctttctg

SEQ ID NO: 434201 - DNA, 25 bp, Homo sapien
ggtgcgcccagaggcatagaagtat

SEQ ID NO: 434202 - DNA, 25 bp, Homo sapien
gcgcccagaggcatagaagtatggc

SEQ ID NO: 434203 - DNA, 25 bp, Homo sapien
tgcgcccagaggcatagaagtatgg

SEQ ID NO: 434204 - DNA, 25 bp, Homo sapien
gtgcgcccagaggcatagaagtatg

SEQ ID NO: 434205 - DNA, 25 bp, Homo sapien
actgcatgttgccaatggtgatcac

SEQ ID NO: 434206 - DNA, 25 bp, Homo sapien
tcacaccttatgatagagctgaagg

SEQ ID NO: 434207 - DNA, 25 bp, Homo sapien
tagggaagctgtagtcgtactctgt

SEQ ID NO: 434208 - DNA, 25 bp, Homo sapien
gaagggctggaacaacacctccaaa

SEQ ID NO: 434209 - DNA, 25 bp, Homo sapien
catacaggtccttgtggatgcccac

SEQ ID NO: 434210 - DNA, 25 bp, Homo sapien
ctggcaccagggcagtgatctcttt

SEQ ID NO: 434211 - DNA, 25 bp, Homo sapien
accagggcagtgatctctttctgca

SEQ ID NO: 434212 - DNA, 25 bp, Homo sapien
tggcaccagggcagtgatctctttc

SEQ ID NO: 434213 - DNA, 25 bp, Homo sapien
gcaccagggcagtgatctctttctg

SEQ ID NO: 434214 - DNA, 25 bp, Homo sapien
ggagtacttgcgctctgggagcacg

SEQ ID NO: 434215 - DNA, 25 bp, Homo sapien
gctctgggagcacgatgatcttgat

SEQ ID NO: 434216 - DNA, 25 bp, Homo sapien
cgctctgggagcacgatgatcttga

SEQ ID NO: 434217 - DNA, 25 bp, Homo sapien
tacttgcgctctgggagcacgatga

SEQ ID NO: 434218 - DNA, 25 bp, Homo sapien
ctgctggaaggtggacaatgaggcc

SEQ ID NO: 434219 - DNA, 25 bp, Homo sapien
ttgtcatactcctgcttgctaatcc

SEQ ID NO: 434220 - DNA, 25 bp, Homo sapien
ggccaggatggagctgctgatccac

SEQ ID NO: 434221 - DNA, 25 bp, Homo sapien
tgtcatactcctgcttgctaatcca

SEQ ID NO: 434222 - DNA, 25 bp, Homo sapien
tatacgtgtgaattatcctatgcag

SEQ ID NO: 434223 - DNA, 25 bp, Homo sapien
gctacacatctgcttgtagtccatt

SEQ ID NO: 434224 - DNA, 25 bp, Homo sapien
tttatacgtgtgaattatcctatgc

SEQ ID NO: 434225 - DNA, 25 bp, Homo sapien
gggcaaatttatacgtgtgaattat

SEQ ID NO: 434226 - DNA, 25 bp, Homo sapien
gagacaattactgcaagtcccagag

SEQ ID NO: 434227 - DNA, 25 bp, Homo sapien
catgggaaacccttgcatgagacca

SEQ ID NO: 434228 - DNA, 25 bp, Homo sapien
cacaagggatatttcagggtggtcc

SEQ ID NO: 434229 - DNA, 25 bp, Homo sapien
caatgacaattatgtaagaagggcg

SEQ ID NO: 434230 - DNA, 25 bp, Homo sapien
gacaacaaacgggcccaggggatca

SEQ ID NO: 434231 - DNA, 25 bp, Homo sapien
caacaaacgggcccaggggatcaca

SEQ ID NO: 434232 - DNA, 25 bp, Homo sapien
agagactgaccgaaaactctaaaat

SEQ ID NO: 434233 - DNA, 25 bp, Homo sapien
ggaagagactgaccgaaaactctaa

SEQ ID NO: 434234 - DNA, 25 bp, Homo sapien
tcctgcaccgctctaggtgtggagg

SEQ ID NO: 434235 - DNA, 25 bp, Homo sapien
agtgctctcctgcaccgctctaggt

SEQ ID NO: 434236 - DNA, 25 bp, Homo sapien
tttggttctgtagggctcctcaaaa

SEQ ID NO: 434237 - DNA, 25 bp, Homo sapien
ttggttctgtagggctcctcaaaat

SEQ ID NO: 434238 - DNA, 25 bp, Homo sapien
cttttggttctgtagggctcctcaa

SEQ ID NO: 434239 - DNA, 25 bp, Homo sapien
tgcttttggttctgtagggctcctc

SEQ ID NO: 434240 - DNA, 25 bp, Homo sapien
gggtgggctggtcccaatgggtcca

SEQ ID NO: 434241 - DNA, 25 bp, Homo sapien
aggaagggtcaataagtgctcttgg

SEQ ID NO: 434242 - DNA, 25 bp, Homo sapien
agtcggttcgggaggcctgaggaag

SEQ ID NO: 434243 - DNA, 25 bp, Homo sapien
cacagcgcctggaggaagtcggttc

SEQ ID NO: 434244 - DNA, 25 bp, Homo sapien
aggtacatgtcatcgtagcccggcg

SEQ ID NO: 434245 - DNA, 25 bp, Homo sapien
caggtacatgtcatcgtagcccggc

SEQ ID NO: 434246 - DNA, 25 bp, Homo sapien
tcacaggtacatgtcatcgtagccc

SEQ ID NO: 434247 - DNA, 25 bp, Homo sapien
gtacatgtcatcgtagcccggcggg

SEQ ID NO: 434248 - DNA, 25 bp, Homo sapien
tctctttgggagctatctgcagcta

SEQ ID NO: 434249 - DNA, 25 bp, Homo sapien
tgggaaaccggcaacatgaattctg

SEQ ID NO: 434250 - DNA, 25 bp, Homo sapien
aattaataaacggaaggtgcctgag

SEQ ID NO: 434251 - DNA, 25 bp, Homo sapien
ttgctgaaggttgccggagtctccc

SEQ ID NO: 434252 - DNA, 25 bp, Homo sapien
ttgactactgctgcccatgcacaga

SEQ ID NO: 434253 - DNA, 25 bp, Homo sapien
taggcttggcacaaggccctaagag

SEQ ID NO: 434254 - DNA, 25 bp, Homo sapien
ggaacttgcttagggtcattcacta

SEQ ID NO: 434255 - DNA, 25 bp, Homo sapien
gagttaggcaagaaccacacaaggt

SEQ ID NO: 434256 - DNA, 25 bp, Homo sapien
actgcccgcgtctgtcaggcctcgg

SEQ ID NO: 434257 - DNA, 25 bp, Homo sapien
cactgcccgcgtctgtcaggcctcg

SEQ ID NO: 434258 - DNA, 25 bp, Homo sapien
tcactgcccgcgtctgtcaggcctc

SEQ ID NO: 434259 - DNA, 25 bp, Homo sapien
ctgcccgcgtctgtcaggcctcggg

SEQ ID NO: 434260 - DNA, 25 bp, Homo sapien
tgcagagcggaagtgactaccgcct

SEQ ID NO: 434261 - DNA, 25 bp, Homo sapien
cacatatggttgaaatgctagctgc

SEQ ID NO: 434262 - DNA, 25 bp, Homo sapien
tgatctcgtgcctcttagcctggtg

SEQ ID NO: 434263 - DNA, 25 bp, Homo sapien
tagcctggtgctctatcgtgctctt

SEQ ID NO: 434264 - DNA, 25 bp, Homo sapien
gcctggcagatacctcagaagagct

SEQ ID NO: 434265 - DNA, 25 bp, Homo sapien
taatgattgaatctgcacctctgcc

SEQ ID NO: 434266 - DNA, 25 bp, Homo sapien
gcaccataagcttgaccaggaagtt

SEQ ID NO: 434267 - DNA, 25 bp, Homo sapien
tctcaggctaagcagataggcaatc

SEQ ID NO: 434268 - DNA, 25 bp, Homo sapien
tccacttatgagaactgtccagaaa

SEQ ID NO: 434269 - DNA, 25 bp, Homo sapien
tggtggatgtgcaacactgtgaaca

SEQ ID NO: 434270 - DNA, 25 bp, Homo sapien
ggaaccctcataaattaccagtgga

SEQ ID NO: 434271 - DNA, 25 bp, Homo sapien
gagatgctacttcacgctaactagg

SEQ ID NO: 434272 - DNA, 25 bp, Homo sapien
gatgatctgaatctcattagacctg

SEQ ID NO: 434273 - DNA, 25 bp, Homo sapien
tgccctgtatcacatccagcctaga

SEQ ID NO: 434274 - DNA, 25 bp, Homo sapien
agcctagaaccatccccaaaagtca

SEQ ID NO: 434275 - DNA, 25 bp, Homo sapien
tctagagacaaaacctgccctgtat

SEQ ID NO: 434276 - DNA, 25 bp, Homo sapien
aatggtccgaaatggtctatggcac

SEQ ID NO: 434277 - DNA, 25 bp, Homo sapien
gagactcatgacttcacaacggagg

SEQ ID NO: 434278 - DNA, 25 bp, Homo sapien
cggaggttgacagacacttatgact

SEQ ID NO: 434279 - DNA, 25 bp, Homo sapien
ctaggttccaaagagtgaggctgcg

SEQ ID NO: 434280 - DNA, 25 bp, Homo sapien
tgtactcgatattcacgtaaaggaa

SEQ ID NO: 434281 - DNA, 25 bp, Homo sapien
caaacttgcatgatcataggactca

SEQ ID NO: 434282 - DNA, 25 bp, Homo sapien
ggaaaaagacatagtccatgtgagc

SEQ ID NO: 434283 - DNA, 25 bp, Homo sapien
gtctgagtaacaaggaggtaggtct

SEQ ID NO: 434284 - DNA, 25 bp, Homo sapien
tgactgaggagccttaagaccatcc

SEQ ID NO: 434285 - DNA, 25 bp, Homo sapien
gcacgctgtgcaaataggactgact

SEQ ID NO: 434286 - DNA, 25 bp, Homo sapien
tactacatgcgatgaggagaagcct

SEQ ID NO: 434287 - DNA, 25 bp, Homo sapien
tctgagactcctgcttgaccctgag

SEQ ID NO: 434288 - DNA, 25 bp, Homo sapien
gcttactggaaacgccctggacttg

SEQ ID NO: 434289 - DNA, 25 bp, Homo sapien
tatttttgtcactcagggacctcca

SEQ ID NO: 434290 - DNA, 25 bp, Homo sapien
ttaacactcagcctagctgcgggaa

SEQ ID NO: 434291 - DNA, 25 bp, Homo sapien
ccaggatttgtggtctgtgtggcct

SEQ ID NO: 434292 - DNA, 25 bp, Homo sapien
taataacatgcacgccagtcagagc

SEQ ID NO: 434293 - DNA, 25 bp, Homo sapien
cagtcagagcacatttgtgggcaaa

SEQ ID NO: 434294 - DNA, 25 bp, Homo sapien
ggactctcacagataggcaggatct

SEQ ID NO: 434295 - DNA, 25 bp, Homo sapien
ggaggtgggtccatccttatctaca

SEQ ID NO: 434296 - DNA, 25 bp, Homo sapien
cgaaaggagtagttgatagaggtca

SEQ ID NO: 434297 - DNA, 25 bp, Homo sapien
caaagtgcccagttacttattggct

SEQ ID NO: 434298 - DNA, 25 bp, Homo sapien
gaccacctcttgcaagtttgggagg

SEQ ID NO: 434299 - DNA, 25 bp, Homo sapien
tcatggccagtgaagagactttact

SEQ ID NO: 434300 - DNA, 25 bp, Homo sapien
atgttccccaggaggtacatttcag

SEQ ID NO: 434301 - DNA, 25 bp, Homo sapien
tttgatgttccccaggaggtacatt

SEQ ID NO: 434302 - DNA, 25 bp, Homo sapien
cttttgatgttccccaggaggtaca

SEQ ID NO: 434303 - DNA, 25 bp, Homo sapien
tgatgttccccaggaggtacatttc

SEQ ID NO: 434304 - DNA, 25 bp, Homo sapien
aaaatgccagctgcctgagattcca

SEQ ID NO: 434305 - DNA, 25 bp, Homo sapien
cccaaaatgccagctgcctgagatt

SEQ ID NO: 434306 - DNA, 25 bp, Homo sapien
tgccagctgcctgagattccaccat

SEQ ID NO: 434307 - DNA, 25 bp, Homo sapien
tcaggcatctcccagcccaaaatgc

SEQ ID NO: 434308 - DNA, 25 bp, Homo sapien
gcacatttgggtggcctggacacgc

SEQ ID NO: 434309 - DNA, 25 bp, Homo sapien
ctgcagactttctttaaactcttgg

SEQ ID NO: 434310 - DNA, 25 bp, Homo sapien
gacacgctggccacattgccatttg

SEQ ID NO: 434311 - DNA, 25 bp, Homo sapien
aaatgtttctaggttcctgcagact

SEQ ID NO: 434312 - DNA, 25 bp, Homo sapien
cctccatagtatgtctcttgctcct

SEQ ID NO: 434313 - DNA, 25 bp, Homo sapien
tgatgcaggccttgatcaccttctc

SEQ ID NO: 434314 - DNA, 25 bp, Homo sapien
ggtgagggctttattgtatttctgt

SEQ ID NO: 434315 - DNA, 25 bp, Homo sapien
cttctcctccatagtatgtctcttg

SEQ ID NO: 434316 - DNA, 25 bp, Homo sapien
cgtgaggctcgagtcaatccggaca

SEQ ID NO: 434317 - DNA, 25 bp, Homo sapien
gaacgactggagatgtactacgccc

SEQ ID NO: 434318 - DNA, 25 bp, Homo sapien
tggacaggtgcatcatcgcaggcct

SEQ ID NO: 434319 - DNA, 25 bp, Homo sapien
gaagacctacggctccattaacctg

SEQ ID NO: 434320 - DNA, 25 bp, Homo sapien
gatctgggcttggatcacactgttc

SEQ ID NO: 434321 - DNA, 25 bp, Homo sapien
caggattagtgaattgcccacagcc

SEQ ID NO: 434322 - DNA, 25 bp, Homo sapien
tccagctttgcgaactagagggtag

SEQ ID NO: 434323 - DNA, 25 bp, Homo sapien
ccagtataataggaactcatcgcta

SEQ ID NO: 434324 - DNA, 25 bp, Homo sapien
aggacggtggatcggagcccccgca

SEQ ID NO: 434325 - DNA, 25 bp, Homo sapien
ttccctaagcccaggcgccggcgat

SEQ ID NO: 434326 - DNA, 25 bp, Homo sapien
aggcgccggcgatccagatctgcct

SEQ ID NO: 434327 - DNA, 25 bp, Homo sapien
agccccagttccctaagcccaggcg

SEQ ID NO: 434328 - DNA, 25 bp, Homo sapien
ggaacctgcacgattcagaccaaag

SEQ ID NO: 434329 - DNA, 25 bp, Homo sapien
ccacacgattcagctggtcaccgtg

SEQ ID NO: 434330 - DNA, 25 bp, Homo sapien
ccatgaatttggtactctaggcact

SEQ ID NO: 434331 - DNA, 25 bp, Homo sapien
ggcacttcgctggactcatcttaac

SEQ ID NO: 434332 - DNA, 25 bp, Homo sapien
cacactacattgagtcgttatgtct

SEQ ID NO: 434333 - DNA, 25 bp, Homo sapien
gacctttgaggagaactagtcagat

SEQ ID NO: 434334 - DNA, 25 bp, Homo sapien
gttccagtattctatcaagggtacc

SEQ ID NO: 434335 - DNA, 25 bp, Homo sapien
taggttcctatcgtttgtgacaatt

SEQ ID NO: 434336 - DNA, 25 bp, Homo sapien
tctcagctgagagcaacccaaactg

SEQ ID NO: 434337 - DNA, 25 bp, Homo sapien
ctcagctgagagcaacccaaactgc

SEQ ID NO: 434338 - DNA, 25 bp, Homo sapien
agctatctcagctgagagcaaccca

SEQ ID NO: 434339 - DNA, 25 bp, Homo sapien
tatctcagctgagagcaacccaaac

SEQ ID NO: 434340 - DNA, 25 bp, Homo sapien
cgcccagccgctagttatatatttt

SEQ ID NO: 434341 - DNA, 25 bp, Homo sapien
gcatcaacttcatatagactcattt

SEQ ID NO: 434342 - DNA, 25 bp, Homo sapien
cttactctagtcaatatcacccatg

SEQ ID NO: 434343 - DNA, 25 bp, Homo sapien
ccagcagactttattgcatcaactt

SEQ ID NO: 434344 - DNA, 25 bp, Homo sapien
ctctttcaagtgttttctttttcat

SEQ ID NO: 434345 - DNA, 25 bp, Homo sapien
caagtgttttctttttcatgaccat

SEQ ID NO: 434346 - DNA, 25 bp, Homo sapien
ttcaagtgttttctttttcatgacc

SEQ ID NO: 434347 - DNA, 25 bp, Homo sapien
ctttcaagtgttttctttttcatga

SEQ ID NO: 434348 - DNA, 25 bp, Homo sapien
ctggcagcaggttctggccaaatca

SEQ ID NO: 434349 - DNA, 25 bp, Homo sapien
cagactggcagcaggttctggccaa

SEQ ID NO: 434350 - DNA, 25 bp, Homo sapien
tcccccaactctttcagactggcag

SEQ ID NO: 434351 - DNA, 25 bp, Homo sapien
cccaactctttcagactggcagcag

SEQ ID NO: 434352 - DNA, 25 bp, Homo sapien
catctcagtgttcttaggagtgacc

SEQ ID NO: 434353 - DNA, 25 bp, Homo sapien
gaccttgacactgacctggttctgg

SEQ ID NO: 434354 - DNA, 25 bp, Homo sapien
ccaagactcgggctgggctcttctg

SEQ ID NO: 434355 - DNA, 25 bp, Homo sapien
actccaaggtctgcccaagactcgg

SEQ ID NO: 434356 - DNA, 25 bp, Homo sapien
tggcgtcctcccagtgggcgctgtc

SEQ ID NO: 434357 - DNA, 25 bp, Homo sapien
ctggcgtcctcccagtgggcgctgt

SEQ ID NO: 434358 - DNA, 25 bp, Homo sapien
tcccagtgggcgctgtccgcacgca

SEQ ID NO: 434359 - DNA, 25 bp, Homo sapien
agtgggcgctgtccgcacgcagctc

SEQ ID NO: 434360 - DNA, 25 bp, Homo sapien
gcagcccctgccttcggagcccgct

SEQ ID NO: 434361 - DNA, 25 bp, Homo sapien
cttcggagcccgctcgagctctgat

SEQ ID NO: 434362 - DNA, 25 bp, Homo sapien
tcggagcccgctcgagctctgatgg

SEQ ID NO: 434363 - DNA, 25 bp, Homo sapien
cctgccttcggagcccgctcgagct

SEQ ID NO: 434364 - DNA, 25 bp, Homo sapien
gctgtcttcccctcggaggagctgg

SEQ ID NO: 434365 - DNA, 25 bp, Homo sapien
aggagctgggccagaccccttgagc

SEQ ID NO: 434366 - DNA, 25 bp, Homo sapien
ctgctgtcttcccctcggaggagct

SEQ ID NO: 434367 - DNA, 25 bp, Homo sapien
agctgggccagaccccttgagcaaa

SEQ ID NO: 434368 - DNA, 25 bp, Homo sapien
tagggttactgccatggtgcttgcc

SEQ ID NO: 434369 - DNA, 25 bp, Homo sapien
tcagtcgaaaagtgtgttcacatcc

SEQ ID NO: 434370 - DNA, 25 bp, Homo sapien
gtgtgcctcaccaagaaatcccaag

SEQ ID NO: 434371 - DNA, 25 bp, Homo sapien
tgccagagcactagagcacatttgt

SEQ ID NO: 434372 - DNA, 25 bp, Homo sapien
cagatgaaggggaatgggaaggctt

SEQ ID NO: 434373 - DNA, 25 bp, Homo sapien
tcagatgaaggggaatgggaaggct

SEQ ID NO: 434374 - DNA, 25 bp, Homo sapien
agatgaaggggaatgggaaggcttc

SEQ ID NO: 434375 - DNA, 25 bp, Homo sapien
tctgctgtatcacaagcctggttgc

SEQ ID NO: 434376 - DNA, 25 bp, Homo sapien
tccaggtagcaatctcagggaaggt

SEQ ID NO: 434377 - DNA, 25 bp, Homo sapien
ccagggtggttacagggcctaatat

SEQ ID NO: 434378 - DNA, 25 bp, Homo sapien
tcagcctgagtgtaatagaaagagc

SEQ ID NO: 434379 - DNA, 25 bp, Homo sapien
tctgagctcaggaaagggccaggta

SEQ ID NO: 434380 - DNA, 25 bp, Homo sapien
gagaaaggaactcagctcagctggg

SEQ ID NO: 434381 - DNA, 25 bp, Homo sapien
tttaaggtaggaattgcagcaagca

SEQ ID NO: 434382 - DNA, 25 bp, Homo sapien
tgggagatgctcataggaacaggaa

SEQ ID NO: 434383 - DNA, 25 bp, Homo sapien
gacagggatggggcctgggccccat

SEQ ID NO: 434384 - DNA, 25 bp, Homo sapien
ctgagcaggggcatgacagggatgg

SEQ ID NO: 434385 - DNA, 25 bp, Homo sapien
gcaggggcatgacagggatggggcc

SEQ ID NO: 434386 - DNA, 25 bp, Homo sapien
tgagcaggggcatgacagggatggg

SEQ ID NO: 434387 - DNA, 25 bp, Homo sapien
ggtcctagtgcgcagtctccggctt

SEQ ID NO: 434388 - DNA, 25 bp, Homo sapien
cgcagtctccggctttgtcctggcg

SEQ ID NO: 434389 - DNA, 25 bp, Homo sapien
tttgtcctggcgctcggacctgaga

SEQ ID NO: 434390 - DNA, 25 bp, Homo sapien
tgtcctggcgctcggacctgagaca

SEQ ID NO: 434391 - DNA, 25 bp, Homo sapien
tcctcagagttccgggccgggtgct

SEQ ID NO: 434392 - DNA, 25 bp, Homo sapien
gggccgggtgctcacagagggaaac

SEQ ID NO: 434393 - DNA, 25 bp, Homo sapien
gttccgggccgggtgctcacagagg

SEQ ID NO: 434394 - DNA, 25 bp, Homo sapien
cagagttccgggccgggtgctcaca

SEQ ID NO: 434395 - DNA, 25 bp, Homo sapien
tggttatctctagattacattcaaa

SEQ ID NO: 434396 - DNA, 25 bp, Homo sapien
ctcataagcacatgtgtgtagaaca

SEQ ID NO: 434397 - DNA, 25 bp, Homo sapien
caatggccctcgtttactcataagc

SEQ ID NO: 434398 - DNA, 25 bp, Homo sapien
acatgggcctttgtgagtttcttct

SEQ ID NO: 434399 - DNA, 25 bp, Homo sapien
ggtgtcctgaagttcgaagtgctat

SEQ ID NO: 434400 - DNA, 25 bp, Homo sapien
caaaagaaggtgtcctgaagttcga

SEQ ID NO: 434401 - DNA, 25 bp, Homo sapien
tgttatagattcgaacaactcccaa

SEQ ID NO: 434402 - DNA, 25 bp, Homo sapien
acaactcccaaaagaaggtgtcctg

SEQ ID NO: 434403 - DNA, 25 bp, Homo sapien
atattttgggtgtcaaaatcatgaa

SEQ ID NO: 434404 - DNA, 25 bp, Homo sapien
tctggcaatgtgatagcattgtaag

SEQ ID NO: 434405 - DNA, 25 bp, Homo sapien
aattcttctggcaatgtgatagcat

SEQ ID NO: 434406 - DNA, 25 bp, Homo sapien
catattttgggtgtcaaaatcatga

SEQ ID NO: 434407 - DNA, 25 bp, Homo sapien
gctttggttctgagtaaagtgttct

SEQ ID NO: 434408 - DNA, 25 bp, Homo sapien
tgctttggttctgagtaaagtgttc

SEQ ID NO: 434409 - DNA, 25 bp, Homo sapien
agagatcgttctccagtgaggcttc

SEQ ID NO: 434410 - DNA, 25 bp, Homo sapien
ccatctccactgtcatagaatagag

SEQ ID NO: 434411 - DNA, 25 bp, Homo sapien
tatgttcaattaaaggaccactgga

SEQ ID NO: 434412 - DNA, 25 bp, Homo sapien
tggaattcagtaatatgttgtcatc

SEQ ID NO: 434413 - DNA, 25 bp, Homo sapien
ttctgatcatcttgcaatagattgt

SEQ ID NO: 434414 - DNA, 25 bp, Homo sapien
tgcatgtcttctaacaggatattct

SEQ ID NO: 434415 - DNA, 25 bp, Homo sapien
ggcagggaaatttctctgttcaaat

SEQ ID NO: 434416 - DNA, 25 bp, Homo sapien
tgctaaactattgggaggctcagaa

SEQ ID NO: 434417 - DNA, 25 bp, Homo sapien
acatatacactctgagttatctggt

SEQ ID NO: 434418 - DNA, 25 bp, Homo sapien
acacatatacactctgagttatctg

SEQ ID NO: 434419 - DNA, 25 bp, Homo sapien
catatacactctgagttatctggtt

SEQ ID NO: 434420 - DNA, 25 bp, Homo sapien
cacatatacactctgagttatctgg

SEQ ID NO: 434421 - DNA, 25 bp, Homo sapien
tcctcttcagttgataataatattg

SEQ ID NO: 434422 - DNA, 25 bp, Homo sapien
ctgaaatatcaattggatcaagggt

SEQ ID NO: 434423 - DNA, 25 bp, Homo sapien
tatcaattggatcaagggtaaatcc

SEQ ID NO: 434424 - DNA, 25 bp, Homo sapien
tggatcaagggtaaatccttcctct

SEQ ID NO: 434425 - DNA, 25 bp, Homo sapien
aaccatgagtgtgtccgcaaaggaa

SEQ ID NO: 434426 - DNA, 25 bp, Homo sapien
tcatcaatctttgggtaggaggtgc

SEQ ID NO: 434427 - DNA, 25 bp, Homo sapien
gaggtgcaagttccaaaaccatgag

SEQ ID NO: 434428 - DNA, 25 bp, Homo sapien
tgctactgagctccttgataggatc

SEQ ID NO: 434429 - DNA, 25 bp, Homo sapien
cagttgacagaagtgtatgcactcc

SEQ ID NO: 434430 - DNA, 25 bp, Homo sapien
cagcagttgacagaagtgtatgcac

SEQ ID NO: 434431 - DNA, 25 bp, Homo sapien
cctgggcagcagttgacagaagtgt

SEQ ID NO: 434432 - DNA, 25 bp, Homo sapien
gacagaagtgtatgcactcctcccc

SEQ ID NO: 434433 - DNA, 25 bp, Homo sapien
gaggacagaaagcattttgtaaaca

SEQ ID NO: 434434 - DNA, 25 bp, Homo sapien
ttcttccaagtttaaagccagagga

SEQ ID NO: 434435 - DNA, 25 bp, Homo sapien
ttccaagtttaaagccagaggacag

SEQ ID NO: 434436 - DNA, 25 bp, Homo sapien
tgactccttctgtatcatttttctt

SEQ ID NO: 434437 - DNA, 25 bp, Homo sapien
tttttattggtatcctcatgagagc

SEQ ID NO: 434438 - DNA, 25 bp, Homo sapien
tcttgctggtaatttggctcttgca

SEQ ID NO: 434439 - DNA, 25 bp, Homo sapien
gctgagatccaccaatcacatcctt

SEQ ID NO: 434440 - DNA, 25 bp, Homo sapien
gagagctatgctgagatccaccaat

SEQ ID NO: 434441 - DNA, 25 bp, Homo sapien
ctgctggagctgtcacgggcaaaag

SEQ ID NO: 434442 - DNA, 25 bp, Homo sapien
cgaggaccatgacaggattcctgcc

SEQ ID NO: 434443 - DNA, 25 bp, Homo sapien
ctggagctgtcacgggcaaaaggga

SEQ ID NO: 434444 - DNA, 25 bp, Homo sapien
tgacaggattcctgccaccactgct

SEQ ID NO: 434445 - DNA, 25 bp, Homo sapien
catgccaataccaggtggcagagga

SEQ ID NO: 434446 - DNA, 25 bp, Homo sapien
tcatgccaataccaggtggcagagg

SEQ ID NO: 434447 - DNA, 25 bp, Homo sapien
caattcaactggactatattcaatt

SEQ ID NO: 434448 - DNA, 25 bp, Homo sapien
attcaactggactatattcaatttc

SEQ ID NO: 434449 - DNA, 25 bp, Homo sapien
ctaaagacaccatttcaacaatatc

SEQ ID NO: 434450 - DNA, 25 bp, Homo sapien
gctaaagacaccatttcaacaatat

SEQ ID NO: 434451 - DNA, 25 bp, Homo sapien
tacagaagcacagcgaatagcaaaa

SEQ ID NO: 434452 - DNA, 25 bp, Homo sapien
cagttaataagcagggagtcaggga

SEQ ID NO: 434453 - DNA, 25 bp, Homo sapien
gatacaagccttgtgccacataatg

SEQ ID NO: 434454 - DNA, 25 bp, Homo sapien
tctttgctattgacatgtggccctc

SEQ ID NO: 434455 - DNA, 25 bp, Homo sapien
aacgatttaacatctgaagtattct

SEQ ID NO: 434456 - DNA, 25 bp, Homo sapien
taacatctgaagtattcttccattc

SEQ ID NO: 434457 - DNA, 25 bp, Homo sapien
gatttaacatctgaagtattcttcc

SEQ ID NO: 434458 - DNA, 25 bp, Homo sapien
ccgtaaacgatttaacatctgaagt

SEQ ID NO: 434459 - DNA, 25 bp, Homo sapien
tctggctcagctcaatagccagctg

SEQ ID NO: 434460 - DNA, 25 bp, Homo sapien
agctcaatagccagctgtttcttta

SEQ ID NO: 434461 - DNA, 25 bp, Homo sapien
agagcttcatcagactaaaggactg

SEQ ID NO: 434462 - DNA, 25 bp, Homo sapien
gaaagctataaaatttggcagctgc

SEQ ID NO: 434463 - DNA, 25 bp, Homo sapien
ggtcccatcgtagctataatatctg

SEQ ID NO: 434464 - DNA, 25 bp, Homo sapien
atgttataaaacattggtcccatcg

SEQ ID NO: 434465 - DNA, 25 bp, Homo sapien
taaaacattggtcccatcgtagcta

SEQ ID NO: 434466 - DNA, 25 bp, Homo sapien
cattggtcccatcgtagctataata

SEQ ID NO: 434467 - DNA, 25 bp, Homo sapien
cccgtatcgaaagcttacatgctat

SEQ ID NO: 434468 - DNA, 25 bp, Homo sapien
gagaagagtggttgccagatgttat

SEQ ID NO: 434469 - DNA, 25 bp, Homo sapien
tgaaagaagcccgtatcgaaagctt

SEQ ID NO: 434470 - DNA, 25 bp, Homo sapien
agggtgatgttactgctggaatcct

SEQ ID NO: 434471 - DNA, 25 bp, Homo sapien
gaggcggctagctgggtgctcgccg

SEQ ID NO: 434472 - DNA, 25 bp, Homo sapien
cgccgaattgctctcccgagcccct

SEQ ID NO: 434473 - DNA, 25 bp, Homo sapien
ctgcaggggccgccgaattgctctc

SEQ ID NO: 434474 - DNA, 25 bp, Homo sapien
caggaggcggctagctgggtgctcg

SEQ ID NO: 434475 - DNA, 25 bp, Homo sapien
agctgggcggtgggcccggagatcc

SEQ ID NO: 434476 - DNA, 25 bp, Homo sapien
ctggcactcggcactctggactgcg

SEQ ID NO: 434477 - DNA, 25 bp, Homo sapien
tggcactcggcactctggactgcgg

SEQ ID NO: 434478 - DNA, 25 bp, Homo sapien
cactcggcactctggactgcggcgg

SEQ ID NO: 434479 - DNA, 25 bp, Homo sapien
cccccggccgctgacagctgggccg

SEQ ID NO: 434480 - DNA, 25 bp, Homo sapien
tgagcgcgggcggggaacacccagg

SEQ ID NO: 434481 - DNA, 25 bp, Homo sapien
gtgagcgcgggcggggaacacccag

SEQ ID NO: 434482 - DNA, 25 bp, Homo sapien
tgagcccccggccgctgacagctgg

SEQ ID NO: 434483 - DNA, 25 bp, Homo sapien
gccccgccggctcgcaccactccgg

SEQ ID NO: 434484 - DNA, 25 bp, Homo sapien
cagccccgccggctcgcaccactcc

SEQ ID NO: 434485 - DNA, 25 bp, Homo sapien
ccgccggctcgcaccactccggccc

SEQ ID NO: 434486 - DNA, 25 bp, Homo sapien
cccgccggctcgcaccactccggcc

SEQ ID NO: 434487 - DNA, 25 bp, Homo sapien
gggccagctccccgctccgccgcgg

SEQ ID NO: 434488 - DNA, 25 bp, Homo sapien
ctgccgcggtgcagcgcagggccag

SEQ ID NO: 434489 - DNA, 25 bp, Homo sapien
gcagggccagctccccgctccgccg

SEQ ID NO: 434490 - DNA, 25 bp, Homo sapien
gccagctccccgctccgccgcggcc

SEQ ID NO: 434491 - DNA, 25 bp, Homo sapien
agcttcttcttctccaaacccctgt

SEQ ID NO: 434492 - DNA, 25 bp, Homo sapien
cacagcttcttcttctccaaacccc

SEQ ID NO: 434493 - DNA, 25 bp, Homo sapien
cgtaaattgttcacagcttcttctt

SEQ ID NO: 434494 - DNA, 25 bp, Homo sapien
gtaaattgttcacagcttcttcttc

SEQ ID NO: 434495 - DNA, 25 bp, Homo sapien
aggccggcgtggcttccaaagaaca

SEQ ID NO: 434496 - DNA, 25 bp, Homo sapien
ctagaaggccctgaaaccgtggtag

SEQ ID NO: 434497 - DNA, 25 bp, Homo sapien
aggacctgccaggagtctctctgca

SEQ ID NO: 434498 - DNA, 25 bp, Homo sapien
catgtgtcagagctgtccacagaga

SEQ ID NO: 434499 - DNA, 25 bp, Homo sapien
ggtatctatctctcagggcatgcag

SEQ ID NO: 434500 - DNA, 25 bp, Homo sapien
gataacatatgctaagtgggcccgg

SEQ ID NO: 434501 - DNA, 25 bp, Homo sapien
tacggtgcgggaagctacatcctgt

SEQ ID NO: 434502 - DNA, 25 bp, Homo sapien
gaaaactgctatcctgtcactacgg

SEQ ID NO: 434503 - DNA, 25 bp, Homo sapien
tcccataatcgaagcacgtgtcact

SEQ ID NO: 434504 - DNA, 25 bp, Homo sapien
gccaatagtcccataatcgaagcac

SEQ ID NO: 434505 - DNA, 25 bp, Homo sapien
ggtgcatagttgttctccaggtacc

SEQ ID NO: 434506 - DNA, 25 bp, Homo sapien
tggaggacaggtgcatagttgttct

SEQ ID NO: 434507 - DNA, 25 bp, Homo sapien
tgcacccggccaccctttatctatc

SEQ ID NO: 434508 - DNA, 25 bp, Homo sapien
tctatctcagaacgagttttcccct

SEQ ID NO: 434509 - DNA, 25 bp, Homo sapien
cccggccaccctttatctatctcag

SEQ ID NO: 434510 - DNA, 25 bp, Homo sapien
ttatctatctcagaacgagttttcc

SEQ ID NO: 434511 - DNA, 25 bp, Homo sapien
gctttgttactgcatttgggcccaa

SEQ ID NO: 434512 - DNA, 25 bp, Homo sapien
tccttcagtggtaaggtggccatgc

SEQ ID NO: 434513 - DNA, 25 bp, Homo sapien
tgccttggcccattacttgaagcag

SEQ ID NO: 434514 - DNA, 25 bp, Homo sapien
gaagcagcaatccttcaaggccggc

SEQ ID NO: 434515 - DNA, 25 bp, Homo sapien
aggatggccataaatggctcactgc

SEQ ID NO: 434516 - DNA, 25 bp, Homo sapien
gaccaggaacagcttagggtgcaga

SEQ ID NO: 434517 - DNA, 25 bp, Homo sapien
ggatggccataaatggctcactgcc

SEQ ID NO: 434518 - DNA, 25 bp, Homo sapien
attatgccattgactcctctcaaca

SEQ ID NO: 434519 - DNA, 25 bp, Homo sapien
ttatgccattgactcctctcaacaa

SEQ ID NO: 434520 - DNA, 25 bp, Homo sapien
tatgccattgactcctctcaacaac

SEQ ID NO: 434521 - DNA, 25 bp, Homo sapien
atgccattgactcctctcaacaacc

SEQ ID NO: 434522 - DNA, 25 bp, Homo sapien
ccgcacccacccatgtaatgcgcat

SEQ ID NO: 434523 - DNA, 25 bp, Homo sapien
tccgcacccacccatgtaatgcgca

SEQ ID NO: 434524 - DNA, 25 bp, Homo sapien
gtccgcacccacccatgtaatgcgc

SEQ ID NO: 434525 - DNA, 25 bp, Homo sapien
catgacgcaggacatgcagccaggt

SEQ ID NO: 434526 - DNA, 25 bp, Homo sapien
attccaagacatgccacacgcgtct

SEQ ID NO: 434527 - DNA, 25 bp, Homo sapien
caacacgagaaggtaccatgtccct

SEQ ID NO: 434528 - DNA, 25 bp, Homo sapien
tctccatgaacgtgctcaggcagcc

SEQ ID NO: 434529 - DNA, 25 bp, Homo sapien
ccagcacatgtgtagaaagacatac

SEQ ID NO: 434530 - DNA, 25 bp, Homo sapien
caacgtaccagcacatgtgtagaaa

SEQ ID NO: 434531 - DNA, 25 bp, Homo sapien
catgtgtagaaagacatacggatac

SEQ ID NO: 434532 - DNA, 25 bp, Homo sapien
tgtagaaagacatacggatacacac

SEQ ID NO: 434533 - DNA, 25 bp, Homo sapien
cagatgagtgaatgtgccccagaca

SEQ ID NO: 434534 - DNA, 25 bp, Homo sapien
aattaggatgggctggtctcgccga

SEQ ID NO: 434535 - DNA, 25 bp, Homo sapien
gagtcttctactctacgagccaggc

SEQ ID NO: 434536 - DNA, 25 bp, Homo sapien
taaaagtaatcagtccaaccctgtg

SEQ ID NO: 434537 - DNA, 25 bp, Homo sapien
ctgaggagagagggcgggttggggg

SEQ ID NO: 434538 - DNA, 25 bp, Homo sapien
aggctgtgggtccgagtaaggggtg

SEQ ID NO: 434539 - DNA, 25 bp, Homo sapien
tacttcctggcagggacatggccat

SEQ ID NO: 434540 - DNA, 25 bp, Homo sapien
ctacttcctggcagggacatggcca

SEQ ID NO: 434541 - DNA, 25 bp, Homo sapien
gctgcggacactgggcgaacactgc

SEQ ID NO: 434542 - DNA, 25 bp, Homo sapien
cggacactgggcgaacactgccagg

SEQ ID NO: 434543 - DNA, 25 bp, Homo sapien
gggcagctgcggacactgggcgaac

SEQ ID NO: 434544 - DNA, 25 bp, Homo sapien
ggacactgggcgaacactgccaggc

SEQ ID NO: 434545 - DNA, 25 bp, Homo sapien
cttggcgtgggactgctgtcactgc

SEQ ID NO: 434546 - DNA, 25 bp, Homo sapien
atcccgcacgctcacaggtggagag

SEQ ID NO: 434547 - DNA, 25 bp, Homo sapien
tcactgcccttgtaggagccagaat

SEQ ID NO: 434548 - DNA, 25 bp, Homo sapien
gaagaggtgccgtaggcatcccgca

SEQ ID NO: 434549 - DNA, 25 bp, Homo sapien
tcaggtgccggatgcacacctcctt

SEQ ID NO: 434550 - DNA, 25 bp, Homo sapien
ctggagccggtcctgtgtgtccttc

SEQ ID NO: 434551 - DNA, 25 bp, Homo sapien
ttcagccgggctttcaggtgccgga

SEQ ID NO: 434552 - DNA, 25 bp, Homo sapien
ctgcacagcgtgtatttcatggagc

SEQ ID NO: 434553 - DNA, 25 bp, Homo sapien
agacacacacacgctcactgcctgc

SEQ ID NO: 434554 - DNA, 25 bp, Homo sapien
cacacacacgctcactgcctgcctg

SEQ ID NO: 434555 - DNA, 25 bp, Homo sapien
tgcgagccgaggagacacacacacg

SEQ ID NO: 434556 - DNA, 25 bp, Homo sapien
ctgcgagccgaggagacacacacac

SEQ ID NO: 434557 - DNA, 25 bp, Homo sapien
caaggtcaggctggtactgcacgaa

SEQ ID NO: 434558 - DNA, 25 bp, Homo sapien
catgcgtgacagctgcgtcttcagg

SEQ ID NO: 434559 - DNA, 25 bp, Homo sapien
gcgtccgtccggctcagtgtgtcat

SEQ ID NO: 434560 - DNA, 25 bp, Homo sapien
tcagcagagccgctggagggatcac

SEQ ID NO: 434561 - DNA, 25 bp, Homo sapien
cctcctcctcttccatggggcacac

SEQ ID NO: 434562 - DNA, 25 bp, Homo sapien
tccttctcagccacggcagcctcct

SEQ ID NO: 434563 - DNA, 25 bp, Homo sapien
tcctcctcctcttccatggggcaca

SEQ ID NO: 434564 - DNA, 25 bp, Homo sapien
cttgggctccttctcagccacggca

SEQ ID NO: 434565 - DNA, 25 bp, Homo sapien
tcagcgagcggcagctgatcctgcg

SEQ ID NO: 434566 - DNA, 25 bp, Homo sapien
gcaaagccaggccaccgtgggcacg

SEQ ID NO: 434567 - DNA, 25 bp, Homo sapien
cagccagcagatccacgatgtagtg

SEQ ID NO: 434568 - DNA, 25 bp, Homo sapien
atcctgcggatggagtgcaaggcca

SEQ ID NO: 434569 - DNA, 25 bp, Homo sapien
taagatacccctgcgcttgtggcaa

SEQ ID NO: 434570 - DNA, 25 bp, Homo sapien
ggaacggcatccctacaatcagtgg

SEQ ID NO: 434571 - DNA, 25 bp, Homo sapien
gagaagctaagtgatccccttggga

SEQ ID NO: 434572 - DNA, 25 bp, Homo sapien
taatggtaatgtcagcagcgtggct

SEQ ID NO: 434573 - DNA, 25 bp, Homo sapien
gaggctcttctatggccataacgtt

SEQ ID NO: 434574 - DNA, 25 bp, Homo sapien
gtcaataggctctgagtgagggcca

SEQ ID NO: 434575 - DNA, 25 bp, Homo sapien
cataacgttagtgtttggaccacct

SEQ ID NO: 434576 - DNA, 25 bp, Homo sapien
cacgctttgcgtagagacttttaat

SEQ ID NO: 434577 - DNA, 25 bp, Homo sapien
gtcctgagccgatgaaactgaaagt

SEQ ID NO: 434578 - DNA, 25 bp, Homo sapien
aaactgcaaagttgtctaaggctgg

SEQ ID NO: 434579 - DNA, 25 bp, Homo sapien
taagccccttgccagttagctctag

SEQ ID NO: 434580 - DNA, 25 bp, Homo sapien
ctgtagaaccagtccccgcctaagc

SEQ ID NO: 434581 - DNA, 25 bp, Homo sapien
caacagcagaaatgtatattcccac

SEQ ID NO: 434582 - DNA, 25 bp, Homo sapien
ttggagattcccgtaggcctcaggg

SEQ ID NO: 434583 - DNA, 25 bp, Homo sapien
cacttggagattcccgtaggcctca

SEQ ID NO: 434584 - DNA, 25 bp, Homo sapien
gggccacttggagattcccgtaggc

SEQ ID NO: 434585 - DNA, 25 bp, Homo sapien
gagattcccgtaggcctcagggcat

SEQ ID NO: 434586 - DNA, 25 bp, Homo sapien
tccctgggacaatgagaaggtgttt

SEQ ID NO: 434587 - DNA, 25 bp, Homo sapien
gaaggaacccagaaaggcagactgc

SEQ ID NO: 434588 - DNA, 25 bp, Homo sapien
ccacatttcgtcaggaagggaataa

SEQ ID NO: 434589 - DNA, 25 bp, Homo sapien
gaggtcctgctgattctccctggga

SEQ ID NO: 434590 - DNA, 25 bp, Homo sapien
cgagttcaagcaagaggctggcccg

SEQ ID NO: 434591 - DNA, 25 bp, Homo sapien
ccgagggtgacaaggaggttgggca

SEQ ID NO: 434592 - DNA, 25 bp, Homo sapien
cagttggagtggactgcctcagcga

SEQ ID NO: 434593 - DNA, 25 bp, Homo sapien
tcagaactgcagtcaggacaagtgg

SEQ ID NO: 434594 - DNA, 25 bp, Homo sapien
caatctctggtggaatcgtgaaggc

SEQ ID NO: 434595 - DNA, 25 bp, Homo sapien
catgcaaggacgtggaagtagctca

SEQ ID NO: 434596 - DNA, 25 bp, Homo sapien
ttaggagttggccaagcaaggagca

SEQ ID NO: 434597 - DNA, 25 bp, Homo sapien
caggcaacgtaaatcagtgaagggc

SEQ ID NO: 434598 - DNA, 25 bp, Homo sapien
cagcctgggtatcatgcagtctgga

SEQ ID NO: 434599 - DNA, 25 bp, Homo sapien
gaaccattccccattatattgtgag

SEQ ID NO: 434600 - DNA, 25 bp, Homo sapien
tgaactgagcctcgaaggagcatca

SEQ ID NO: 434601 - DNA, 25 bp, Homo sapien
cacaccaaggaggatgatgtgcaca

SEQ ID NO: 434602 - DNA, 25 bp, Homo sapien
aaggaggccgccatgttccactctg

SEQ ID NO: 434603 - DNA, 25 bp, Homo sapien
ccgggtggactctggtaacgcaagc

SEQ ID NO: 434604 - DNA, 25 bp, Homo sapien
gagaaagcacgaggccgggtggact

SEQ ID NO: 434605 - DNA, 25 bp, Homo sapien
tatttttgtggatgccggcgccagc

SEQ ID NO: 434606 - DNA, 25 bp, Homo sapien
tacaaatggtgttccgaggccaggg

SEQ ID NO: 434607 - DNA, 25 bp, Homo sapien
tgacgctttcgaaaccaaagggaga

SEQ ID NO: 434608 - DNA, 25 bp, Homo sapien
tttaaagctcgatttcacccgcgca

SEQ ID NO: 434609 - DNA, 25 bp, Homo sapien
tacagaatcttataagtcctcctcc

SEQ ID NO: 434610 - DNA, 25 bp, Homo sapien
aggcaccacccttcccagatcagga

SEQ ID NO: 434611 - DNA, 25 bp, Homo sapien
catcccagtccaaggtgagtcagct

SEQ ID NO: 434612 - DNA, 25 bp, Homo sapien
cacccttcccagatcaggaagccag

SEQ ID NO: 434613 - DNA, 25 bp, Homo sapien
agctgaacaggggacaggcaccacc

SEQ ID NO: 434614 - DNA, 25 bp, Homo sapien
ggcaccgcaccttaactcaatgaca

SEQ ID NO: 434615 - DNA, 25 bp, Homo sapien
gataagggagttattatgatagaga

SEQ ID NO: 434616 - DNA, 25 bp, Homo sapien
tgttatcagcagtttaaacgagagg

SEQ ID NO: 434617 - DNA, 25 bp, Homo sapien
gcagtttaaacgagaggcaccgcac

SEQ ID NO: 434618 - DNA, 25 bp, Homo sapien
gcttaggtgcagcaatgattgagct

SEQ ID NO: 434619 - DNA, 25 bp, Homo sapien
agtcttgacagcaccaatctgtggc

SEQ ID NO: 434620 - DNA, 25 bp, Homo sapien
tacaatgcagtaagagccctaggca

SEQ ID NO: 434621 - DNA, 25 bp, Homo sapien
gatcctaagataccagcagtgctcc

SEQ ID NO: 434622 - DNA, 25 bp, Homo sapien
tgagtgacaggactggaagatgtcc

SEQ ID NO: 434623 - DNA, 25 bp, Homo sapien
atgtcctttgggaccacagcccggg

SEQ ID NO: 434624 - DNA, 25 bp, Homo sapien
tggctgagtgacaggactggaagat

SEQ ID NO: 434625 - DNA, 25 bp, Homo sapien
gggaagaggcgcccagtggcagcca

SEQ ID NO: 434626 - DNA, 25 bp, Homo sapien
gggtttctactgcatatgccactac

SEQ ID NO: 434627 - DNA, 25 bp, Homo sapien
tgtgtgtgacactctttagtcaatc

SEQ ID NO: 434628 - DNA, 25 bp, Homo sapien
aaattcctgaagagcgatctgctat

SEQ ID NO: 434629 - DNA, 25 bp, Homo sapien
gccactacttgcctgggttattaaa

SEQ ID NO: 434630 - DNA, 25 bp, Homo sapien
ggtgggggcctgcaatcccacctac

SEQ ID NO: 434631 - DNA, 25 bp, Homo sapien
tgggggcctgcaatcccacctactt

SEQ ID NO: 434632 - DNA, 25 bp, Homo sapien
ggtcacagtgagccattgcagattg

SEQ ID NO: 434633 - DNA, 25 bp, Homo sapien
gagccattgcagattgcgccattgc

SEQ ID NO: 434634 - DNA, 25 bp, Homo sapien
ccaagtggcctatgtgtgaaactca

SEQ ID NO: 434635 - DNA, 25 bp, Homo sapien
gcagagcagaccaagataacgctga

SEQ ID NO: 434636 - DNA, 25 bp, Homo sapien
ggagctgcggaaaaagcgtctttca

SEQ ID NO: 434637 - DNA, 25 bp, Homo sapien
tgtggaataccactcgggtttctgg

SEQ ID NO: 434638 - DNA, 25 bp, Homo sapien
gagacaagtggagctctattaatga

SEQ ID NO: 434639 - DNA, 25 bp, Homo sapien
gtggagctctattaatgagccccat

SEQ ID NO: 434640 - DNA, 25 bp, Homo sapien
ttctggagacaagtggagctctatt

SEQ ID NO: 434641 - DNA, 25 bp, Homo sapien
tgattctggagacaagtggagctct

SEQ ID NO: 434642 - DNA, 25 bp, Homo sapien
acttgctctactccaggtgaacacc

SEQ ID NO: 434643 - DNA, 25 bp, Homo sapien
tggagttcggtgaaccatccctgct

SEQ ID NO: 434644 - DNA, 25 bp, Homo sapien
acctccgaggatgacccttttgaca

SEQ ID NO: 434645 - DNA, 25 bp, Homo sapien
ctctgcagagactggtgtggagttc

SEQ ID NO: 434646 - DNA, 25 bp, Homo sapien
tcaatgagcagtagcattgagagca

SEQ ID NO: 434647 - DNA, 25 bp, Homo sapien
aaacggcagccgtggtaacaggagc

SEQ ID NO: 434648 - DNA, 25 bp, Homo sapien
gcagtagcattgagagcagaaacgg

SEQ ID NO: 434649 - DNA, 25 bp, Homo sapien
agcagaaacggcagccgtggtaaca

SEQ ID NO: 434650 - DNA, 25 bp, Homo sapien
taagtgatgcaccagaattttcctc

SEQ ID NO: 434651 - DNA, 25 bp, Homo sapien
actaagtgatgcaccagaattttcc

SEQ ID NO: 434652 - DNA, 25 bp, Homo sapien
tactaagtgatgcaccagaattttc

SEQ ID NO: 434653 - DNA, 25 bp, Homo sapien
aaatactaagtgatgcaccagaatt

SEQ ID NO: 434654 - DNA, 25 bp, Homo sapien
ttattctgaaatgtcctaaccatac

SEQ ID NO: 434655 - DNA, 25 bp, Homo sapien
tttattctgaaatgtcctaaccata

SEQ ID NO: 434656 - DNA, 25 bp, Homo sapien
ctttattctgaaatgtcctaaccat

SEQ ID NO: 434657 - DNA, 25 bp, Homo sapien
cataacgagaaatacctggcatctc

SEQ ID NO: 434658 - DNA, 25 bp, Homo sapien
tacaggtcagatcgcccttcaactg

SEQ ID NO: 434659 - DNA, 25 bp, Homo sapien
atctgaggactttgctaaatgggaa

SEQ ID NO: 434660 - DNA, 25 bp, Homo sapien
tgccatcacaaactgagtcagctgg

SEQ ID NO: 434661 - DNA, 25 bp, Homo sapien
tttagacgtgtcatgtggcccctcg

SEQ ID NO: 434662 - DNA, 25 bp, Homo sapien
tattatagcactcccacgcaatggc

SEQ ID NO: 434663 - DNA, 25 bp, Homo sapien
gatatgcccaggcttctcacagcat

SEQ ID NO: 434664 - DNA, 25 bp, Homo sapien
tatgatgaaatgtcgtaacacggcc

SEQ ID NO: 434665 - DNA, 25 bp, Homo sapien
ggctttctccagacgactccttaga

SEQ ID NO: 434666 - DNA, 25 bp, Homo sapien
gataactaccaccatcctgcacgaa

SEQ ID NO: 434667 - DNA, 25 bp, Homo sapien
cctgcacgaaccagttgcttatact

SEQ ID NO: 434668 - DNA, 25 bp, Homo sapien
gagaagtccttcttaagcaacaaaa

SEQ ID NO: 434669 - DNA, 25 bp, Homo sapien
tcagattcaggacgcacttgatggg

SEQ ID NO: 434670 - DNA, 25 bp, Homo sapien
caatagataagtgaaacaagggcaa

SEQ ID NO: 434671 - DNA, 25 bp, Homo sapien
aagtgaagatagtgaatcgtcagat

SEQ ID NO: 434672 - DNA, 25 bp, Homo sapien
cctggagcagactggcggaagtgaa

SEQ ID NO: 434673 - DNA, 25 bp, Homo sapien
tcagaacccctgagaagcgtgtagg

SEQ ID NO: 434674 - DNA, 25 bp, Homo sapien
tgcagtgggcacatcgactatgggc

SEQ ID NO: 434675 - DNA, 25 bp, Homo sapien
tgaagggcagctgacaccaaaaatg

SEQ ID NO: 434676 - DNA, 25 bp, Homo sapien
gttgatgaccttgggctacactggc

SEQ ID NO: 434677 - DNA, 25 bp, Homo sapien
gctttaatcacaacgtagtacaaat

SEQ ID NO: 434678 - DNA, 25 bp, Homo sapien
acgtttagctttaatcacaacgtag

SEQ ID NO: 434679 - DNA, 25 bp, Homo sapien
tcacaacgtagtacaaattttgcat

SEQ ID NO: 434680 - DNA, 25 bp, Homo sapien
tttagctttaatcacaacgtagtac

SEQ ID NO: 434681 - DNA, 25 bp, Homo sapien
cctcactggctattaacgggttggg

SEQ ID NO: 434682 - DNA, 25 bp, Homo sapien
tcctcactggctattaacgggttgg

SEQ ID NO: 434683 - DNA, 25 bp, Homo sapien
ctcactggctattaacgggttgggg

SEQ ID NO: 434684 - DNA, 25 bp, Homo sapien
caaagccatagcagatttgaggcgc

SEQ ID NO: 434685 - DNA, 25 bp, Homo sapien
tcactgcaatgctggacactacagg

SEQ ID NO: 434686 - DNA, 25 bp, Homo sapien
gaaaatgatgctggtcatcgcagct

SEQ ID NO: 434687 - DNA, 25 bp, Homo sapien
gacttaacacccagtgaaagcccag

SEQ ID NO: 434688 - DNA, 25 bp, Homo sapien
tttgcttccgacacctctgtttcct

SEQ ID NO: 434689 - DNA, 25 bp, Homo sapien
tcttttggatataggtttccaatta

SEQ ID NO: 434690 - DNA, 25 bp, Homo sapien
agctttgcttccgacacctctgttt

SEQ ID NO: 434691 - DNA, 25 bp, Homo sapien
cattttggggtgaagattcagtttc

SEQ ID NO: 434692 - DNA, 25 bp, Homo sapien
ccactctcgtcttcgatgtggagct

SEQ ID NO: 434693 - DNA, 25 bp, Homo sapien
gccactctcgtcttcgatgtggagc

SEQ ID NO: 434694 - DNA, 25 bp, Homo sapien
gggagcaaggactagacgcttcaca

SEQ ID NO: 434695 - DNA, 25 bp, Homo sapien
tccttaccaccttggtccaacatgt

SEQ ID NO: 434696 - DNA, 25 bp, Homo sapien
cttctgaggggagcaaggactagac

SEQ ID NO: 434697 - DNA, 25 bp, Homo sapien
ctagacgcttcacagcctggagctt

SEQ ID NO: 434698 - DNA, 25 bp, Homo sapien
gctataaaggtgcaatctcctccca

SEQ ID NO: 434699 - DNA, 25 bp, Homo sapien
aagctgtgtgtagtgtttttgagag

SEQ ID NO: 434700 - DNA, 25 bp, Homo sapien
cattttccacgtgtgcacatgttgc

SEQ ID NO: 434701 - DNA, 25 bp, Homo sapien
gttgccataggacttactctcagaa

SEQ ID NO: 434702 - DNA, 25 bp, Homo sapien
agccctttaagtttatgctaggcaa

SEQ ID NO: 434703 - DNA, 25 bp, Homo sapien
tttaagtttatgctaggcaagcagg

SEQ ID NO: 434704 - DNA, 25 bp, Homo sapien
cctttaagtttatgctaggcaagca

SEQ ID NO: 434705 - DNA, 25 bp, Homo sapien
taagtttatgctaggcaagcaggag

SEQ ID NO: 434706 - DNA, 25 bp, Homo sapien
tgttacaagcagtctcacgagggtg

SEQ ID NO: 434707 - DNA, 25 bp, Homo sapien
tagtgcccaaactgacccgtatagg

SEQ ID NO: 434708 - DNA, 25 bp, Homo sapien
aagatcccagtagacttcacagcag

SEQ ID NO: 434709 - DNA, 25 bp, Homo sapien
tcacagcaggtaaagtagtgcccaa

SEQ ID NO: 434710 - DNA, 25 bp, Homo sapien
aaccattagaccttgagccatacgc

SEQ ID NO: 434711 - DNA, 25 bp, Homo sapien
gggacaaacacagctaaccactcct

SEQ ID NO: 434712 - DNA, 25 bp, Homo sapien
tgagctagagactaaagcatgaggg

SEQ ID NO: 434713 - DNA, 25 bp, Homo sapien
tttgtgaacacagaactcatatggg

SEQ ID NO: 434714 - DNA, 25 bp, Homo sapien
gcaggctagttatagaatactccac

SEQ ID NO: 434715 - DNA, 25 bp, Homo sapien
tcccctgaagaagtcactggcattc

SEQ ID NO: 434716 - DNA, 25 bp, Homo sapien
tctcagtctagaagagtccttacgc

SEQ ID NO: 434717 - DNA, 25 bp, Homo sapien
gcacacatgggaaacatcactagtt

SEQ ID NO: 434718 - DNA, 25 bp, Homo sapien
ggtaggcactgggagatctcatctg

SEQ ID NO: 434719 - DNA, 25 bp, Homo sapien
gagtgggtaggcactgggagatctc

SEQ ID NO: 434720 - DNA, 25 bp, Homo sapien
agaggagtgggtaggcactgggaga

SEQ ID NO: 434721 - DNA, 25 bp, Homo sapien
tgggtaggcactgggagatctcatc

SEQ ID NO: 434722 - DNA, 25 bp, Homo sapien
gtgaaatatccccacacagcatgtc

SEQ ID NO: 434723 - DNA, 25 bp, Homo sapien
tctctttgtgaaatatccccacaca

SEQ ID NO: 434724 - DNA, 25 bp, Homo sapien
aaatatccccacacagcatgtctgg

SEQ ID NO: 434725 - DNA, 25 bp, Homo sapien
tttgtgaaatatccccacacagcat

SEQ ID NO: 434726 - DNA, 25 bp, Homo sapien
gcaaagattgggactcaagccgtga

SEQ ID NO: 434727 - DNA, 25 bp, Homo sapien
tggaccccagcatgtaggcagtgcc

SEQ ID NO: 434728 - DNA, 25 bp, Homo sapien
cttgtacatagccacactagggtgc

SEQ ID NO: 434729 - DNA, 25 bp, Homo sapien
tagggtgcttggcagcatgtgtccc

SEQ ID NO: 434730 - DNA, 25 bp, Homo sapien
caggcagtctcatgtccgtgaagga

SEQ ID NO: 434731 - DNA, 25 bp, Homo sapien
ggtctggtagatgaaagcgcatcct

SEQ ID NO: 434732 - DNA, 25 bp, Homo sapien
agcgcatccttttggtgatttgtca

SEQ ID NO: 434733 - DNA, 25 bp, Homo sapien
gagagtaaccatttacagtgctggg

SEQ ID NO: 434734 - DNA, 25 bp, Homo sapien
agaacgaagcaagtcacccggcaaa

SEQ ID NO: 434735 - DNA, 25 bp, Homo sapien
cagggagatgcttaaccggctggaa

SEQ ID NO: 434736 - DNA, 25 bp, Homo sapien
caaacacagctgtatccggaggcct

SEQ ID NO: 434737 - DNA, 25 bp, Homo sapien
acgcgccgaggtactaggcagagcc

SEQ ID NO: 434738 - DNA, 25 bp, Homo sapien
ctgggcacactgtactgcatctcct

SEQ ID NO: 434739 - DNA, 25 bp, Homo sapien
cctgggcacactgtactgcatctcc

SEQ ID NO: 434740 - DNA, 25 bp, Homo sapien
ttgttccccagtggagggcatatgt

SEQ ID NO: 434741 - DNA, 25 bp, Homo sapien
ttccccagtggagggcatatgtgat

SEQ ID NO: 434742 - DNA, 25 bp, Homo sapien
ccaacttccctgatgggcatggctc

SEQ ID NO: 434743 - DNA, 25 bp, Homo sapien
cactgtcgggttggattctcattac

SEQ ID NO: 434744 - DNA, 25 bp, Homo sapien
aaaaatatgctgattggatcacctc

SEQ ID NO: 434745 - DNA, 25 bp, Homo sapien
gaagagtcttatgatcaagcaccct

SEQ ID NO: 434746 - DNA, 25 bp, Homo sapien
tcactgttggtacttgcaggaggct

SEQ ID NO: 434747 - DNA, 25 bp, Homo sapien
gcagaagggcttgtggtttcaacca

SEQ ID NO: 434748 - DNA, 25 bp, Homo sapien
tacatccacctagaactgcagaagg

SEQ ID NO: 434749 - DNA, 25 bp, Homo sapien
cctattgggctcttggatggaaccc

SEQ ID NO: 434750 - DNA, 25 bp, Homo sapien
cacgagaatatgtcacttgcccaga

SEQ ID NO: 434751 - DNA, 25 bp, Homo sapien
ttattcactagtgtgtcccacccgc

SEQ ID NO: 434752 - DNA, 25 bp, Homo sapien
tgtagaaagaggcttcgccaccact

SEQ ID NO: 434753 - DNA, 25 bp, Homo sapien
gccaccacttgttcccacgagaata

SEQ ID NO: 434754 - DNA, 25 bp, Homo sapien
tgctcaatgctgtcatcgtgcagcg

SEQ ID NO: 434755 - DNA, 25 bp, Homo sapien
tcttagatcttggttggacgtttgt

SEQ ID NO: 434756 - DNA, 25 bp, Homo sapien
gtgcaacgtctcctccatagctctg

SEQ ID NO: 434757 - DNA, 25 bp, Homo sapien
gcggttaacataaccgcccagccag

SEQ ID NO: 434758 - DNA, 25 bp, Homo sapien
ctaatgaaaggtgagaagattcctc

SEQ ID NO: 434759 - DNA, 25 bp, Homo sapien
agtctaatgaaaggtgagaagattc

SEQ ID NO: 434760 - DNA, 25 bp, Homo sapien
actgactctccaaggaacttagagt

SEQ ID NO: 434761 - DNA, 25 bp, Homo sapien
agagtctaatgaaaggtgagaagat

SEQ ID NO: 434762 - DNA, 25 bp, Homo sapien
catcttctcccgtccacaagtgttg

SEQ ID NO: 434763 - DNA, 25 bp, Homo sapien
ccgtccacaagtgttgatcctaaaa

SEQ ID NO: 434764 - DNA, 25 bp, Homo sapien
tcccgtccacaagtgttgatcctaa

SEQ ID NO: 434765 - DNA, 25 bp, Homo sapien
ttctcccgtccacaagtgttgatcc

SEQ ID NO: 434766 - DNA, 25 bp, Homo sapien
tcatgtcactaatatgtacctttaa

SEQ ID NO: 434767 - DNA, 25 bp, Homo sapien
tcaataaggaggcattctgcaacat

SEQ ID NO: 434768 - DNA, 25 bp, Homo sapien
tcgggcccagaactcctcaaaactg

SEQ ID NO: 434769 - DNA, 25 bp, Homo sapien
tcacaaccccaatctaatcatgagg

SEQ ID NO: 434770 - DNA, 25 bp, Homo sapien
tctttctaagtttggactagcttcc

SEQ ID NO: 434771 - DNA, 25 bp, Homo sapien
tgcgtttactacctccctctggctg

SEQ ID NO: 434772 - DNA, 25 bp, Homo sapien
tctggctgcctatctgaagttcctg

SEQ ID NO: 434773 - DNA, 25 bp, Homo sapien
tcagggtctacattgccacagtcaa

SEQ ID NO: 434774 - DNA, 25 bp, Homo sapien
ccaggtggagcatgacgggcagcca

SEQ ID NO: 434775 - DNA, 25 bp, Homo sapien
tgccaggtggagcatgacgggcagc

SEQ ID NO: 434776 - DNA, 25 bp, Homo sapien
gccaggtggagcatgacgggcagcc

SEQ ID NO: 434777 - DNA, 25 bp, Homo sapien
aggtggagcatgacgggcagccagc

SEQ ID NO: 434778 - DNA, 25 bp, Homo sapien
gcatgtacacgcagttccaaatgga

SEQ ID NO: 434779 - DNA, 25 bp, Homo sapien
cagtgctaggtcacggatttttcca

SEQ ID NO: 434780 - DNA, 25 bp, Homo sapien
gaaggcgtgtgatcatgtccacagc

SEQ ID NO: 434781 - DNA, 25 bp, Homo sapien
taatcagagatgtatggaaggcgtg

SEQ ID NO: 434782 - DNA, 25 bp, Homo sapien
tacaaacgcttgactccatgttaaa

SEQ ID NO: 434783 - DNA, 25 bp, Homo sapien
tcagtccattgttatccaggtctac

SEQ ID NO: 434784 - DNA, 25 bp, Homo sapien
taaagctttagccttaactacttca

SEQ ID NO: 434785 - DNA, 25 bp, Homo sapien
cagcaacatcctgtggcttgacctt

SEQ ID NO: 434786 - DNA, 25 bp, Homo sapien
ggcccaactgaagacctagattcca

SEQ ID NO: 434787 - DNA, 25 bp, Homo sapien
tttcaaatttgggacttggcacaga

SEQ ID NO: 434788 - DNA, 25 bp, Homo sapien
ggacttggcacagattagacctgct

SEQ ID NO: 434789 - DNA, 25 bp, Homo sapien
tcagtgatcattgtttttggaccca

SEQ ID NO: 434790 - DNA, 25 bp, Homo sapien
tttctactcctctatgttctgctgc

SEQ ID NO: 434791 - DNA, 25 bp, Homo sapien
tttcttggtgtttctactcctctat

SEQ ID NO: 434792 - DNA, 25 bp, Homo sapien
tggtgtttctactcctctatgttct

SEQ ID NO: 434793 - DNA, 25 bp, Homo sapien
gtttctactcctctatgttctgctg

SEQ ID NO: 434794 - DNA, 25 bp, Homo sapien
cattaaagacgaaactgaggctggg

SEQ ID NO: 434795 - DNA, 25 bp, Homo sapien
tgtttagtctaatggcccggtggga

SEQ ID NO: 434796 - DNA, 25 bp, Homo sapien
tcaaggtccgaatagaggcaggctc

SEQ ID NO: 434797 - DNA, 25 bp, Homo sapien
tagatgacatagcaacagggctccc

SEQ ID NO: 434798 - DNA, 25 bp, Homo sapien
tcctgggagcacaagtgaatatttc

SEQ ID NO: 434799 - DNA, 25 bp, Homo sapien
tattcactctgacgagctaaccaag

SEQ ID NO: 434800 - DNA, 25 bp, Homo sapien
tgtgtctaagactggcccacactga

SEQ ID NO: 434801 - DNA, 25 bp, Homo sapien
tcacaaaagtgtgggagacctccgt

SEQ ID NO: 434802 - DNA, 25 bp, Homo sapien
cctcttgcaggaggttagcccattg

SEQ ID NO: 434803 - DNA, 25 bp, Homo sapien
tcctactgctgatcagtatgacagt

SEQ ID NO: 434804 - DNA, 25 bp, Homo sapien
ggaggttagcccattgattctgaac

SEQ ID NO: 434805 - DNA, 25 bp, Homo sapien
tagtgcacacactcaatccagaact

SEQ ID NO: 434806 - DNA, 25 bp, Homo sapien
catataaggacatagagacctgctc

SEQ ID NO: 434807 - DNA, 25 bp, Homo sapien
tctgtgctctgttggtgattggaaa

SEQ ID NO: 434808 - DNA, 25 bp, Homo sapien
tggaaaacctctcccaaatgcaagc

SEQ ID NO: 434809 - DNA, 25 bp, Homo sapien
gctccattgtttaccagctgcagaa

SEQ ID NO: 434810 - DNA, 25 bp, Homo sapien
ttgggataatttaagagtcgatgtc

SEQ ID NO: 434811 - DNA, 25 bp, Homo sapien
ggtaatataatgctccaccattgct

SEQ ID NO: 434812 - DNA, 25 bp, Homo sapien
cagtattaggcgttacttttgactt

SEQ ID NO: 434813 - DNA, 25 bp, Homo sapien
cattgctgacttaatgccacacgtg

SEQ ID NO: 434814 - DNA, 25 bp, Homo sapien
tcacagcagtagaccaacggcacat

SEQ ID NO: 434815 - DNA, 25 bp, Homo sapien
ctcacagcagtagaccaacggcaca

SEQ ID NO: 434816 - DNA, 25 bp, Homo sapien
gggtttaaggcattgatcttcacca

SEQ ID NO: 434817 - DNA, 25 bp, Homo sapien
caccattaaagccattcttcgggtt

SEQ ID NO: 434818 - DNA, 25 bp, Homo sapien
taagtgctgacagcctaaaagtcca

SEQ ID NO: 434819 - DNA, 25 bp, Homo sapien
cagcctaaaagtccaccattaaagc

SEQ ID NO: 434820 - DNA, 25 bp, Homo sapien
tggctggcgaacctactgcctggaa

SEQ ID NO: 434821 - DNA, 25 bp, Homo sapien
ttatccagccgggtaaggagcgccg

SEQ ID NO: 434822 - DNA, 25 bp, Homo sapien
ctctctctccgcgaagacgcacaag

SEQ ID NO: 434823 - DNA, 25 bp, Homo sapien
agtaagacttgcgaagcagcaagtt

SEQ ID NO: 434824 - DNA, 25 bp, Homo sapien
taattcattcttaaaattatcactt

SEQ ID NO: 434825 - DNA, 25 bp, Homo sapien
tcattcttaaaattatcacttccag

SEQ ID NO: 434826 - DNA, 25 bp, Homo sapien
cgagtgcttaattcattcttaaaat

SEQ ID NO: 434827 - DNA, 25 bp, Homo sapien
attcattcttaaaattatcacttcc

SEQ ID NO: 434828 - DNA, 25 bp, Homo sapien
gttcccggtgcgctaacaaaggcat

SEQ ID NO: 434829 - DNA, 25 bp, Homo sapien
tttgcatgaaaacaggaaccccgtc

SEQ ID NO: 434830 - DNA, 25 bp, Homo sapien
ccgtctgcagaaaggactcgttggc

SEQ ID NO: 434831 - DNA, 25 bp, Homo sapien
cgtttaagtcgttgaggccgaatca

SEQ ID NO: 434832 - DNA, 25 bp, Homo sapien
ggagacttggtgtacgtcctcagga

SEQ ID NO: 434833 - DNA, 25 bp, Homo sapien
gacatcaggtaatgttggagacttg

SEQ ID NO: 434834 - DNA, 25 bp, Homo sapien
cttggtgtacgtcctcaggaatgtc

SEQ ID NO: 434835 - DNA, 25 bp, Homo sapien
caggtaatgttggagacttggtgta

SEQ ID NO: 434836 - DNA, 25 bp, Homo sapien
tagatactcgcactgaaatgtggcg

SEQ ID NO: 434837 - DNA, 25 bp, Homo sapien
cagacaatagaccaggaagaggcct

SEQ ID NO: 434838 - DNA, 25 bp, Homo sapien
tgaagtcagggcctcagtcttagcc

SEQ ID NO: 434839 - DNA, 25 bp, Homo sapien
gtagatgaagcagataccacccctg

SEQ ID NO: 434840 - DNA, 25 bp, Homo sapien
agaccggggtcagaacagagaagct

SEQ ID NO: 434841 - DNA, 25 bp, Homo sapien
gaaagaccggggtcagaacagagaa

SEQ ID NO: 434842 - DNA, 25 bp, Homo sapien
caaaggcaagaaagaccggggtcag

SEQ ID NO: 434843 - DNA, 25 bp, Homo sapien
gtgaggcaaaggcaagaaagaccgg

SEQ ID NO: 434844 - DNA, 25 bp, Homo sapien
gggccgctggaactaggaagggctc

SEQ ID NO: 434845 - DNA, 25 bp, Homo sapien
ccgctggaactaggaagggctctgg

SEQ ID NO: 434846 - DNA, 25 bp, Homo sapien
gggctctggcgtcatgaatcacaaa

SEQ ID NO: 434847 - DNA, 25 bp, Homo sapien
aactaggaagggctctggcgtcatg

SEQ ID NO: 434848 - DNA, 25 bp, Homo sapien
ttttttaaccgccacgagctgacta

SEQ ID NO: 434849 - DNA, 25 bp, Homo sapien
tcacaagtgccatcgagccttcttt

SEQ ID NO: 434850 - DNA, 25 bp, Homo sapien
tcaaagctggaagagacgttcttca

SEQ ID NO: 434851 - DNA, 25 bp, Homo sapien
taatgcctgagagtgtcagtccctc

SEQ ID NO: 434852 - DNA, 25 bp, Homo sapien
ggtagctcgaatgtgtctggacccc

SEQ ID NO: 434853 - DNA, 25 bp, Homo sapien
cctgccaatcaagcagcagccgtaa

SEQ ID NO: 434854 - DNA, 25 bp, Homo sapien
cagccgtaaccatggttcccagatg

SEQ ID NO: 434855 - DNA, 25 bp, Homo sapien
ggttcctgtggttctttgagtgtga

SEQ ID NO: 434856 - DNA, 25 bp, Homo sapien
cgccgctgggacaattggtcgctgt

SEQ ID NO: 434857 - DNA, 25 bp, Homo sapien
tgtctctgtgagagagtgactgctg

SEQ ID NO: 434858 - DNA, 25 bp, Homo sapien
tgggaccaccatgctggtccagcct

SEQ ID NO: 434859 - DNA, 25 bp, Homo sapien
gcccctttgagagcgggtgtctctg

SEQ ID NO: 434860 - DNA, 25 bp, Homo sapien
tcgtcctgacaaataaagcgctagt

SEQ ID NO: 434861 - DNA, 25 bp, Homo sapien
tgcatcccattctgacacaggtggt

SEQ ID NO: 434862 - DNA, 25 bp, Homo sapien
taaactccagtgtgcgcttcagaat

SEQ ID NO: 434863 - DNA, 25 bp, Homo sapien
tcatcgccatcaagggaggtttagg

SEQ ID NO: 434864 - DNA, 25 bp, Homo sapien
tcctgtaacccagcaaacaggcctt

SEQ ID NO: 434865 - DNA, 25 bp, Homo sapien
catttctgataaacttccaggtgag

SEQ ID NO: 434866 - DNA, 25 bp, Homo sapien
tggcagctacaggtggcaagactgt

SEQ ID NO: 434867 - DNA, 25 bp, Homo sapien
tgagaatcatacctgctgcttggct

SEQ ID NO: 434868 - DNA, 25 bp, Homo sapien
gctcttgacaaatcgtgcagcccct

SEQ ID NO: 434869 - DNA, 25 bp, Homo sapien
tgggtagcagttggccacaccagcc

SEQ ID NO: 434870 - DNA, 25 bp, Homo sapien
gcttccgattgggaccatgccctct

SEQ ID NO: 434871 - DNA, 25 bp, Homo sapien
tgcagcttccgattgggaccatgcc

SEQ ID NO: 434872 - DNA, 25 bp, Homo sapien
ctgctgcagcttccgattgggacca

SEQ ID NO: 434873 - DNA, 25 bp, Homo sapien
aagccattgagacccacgggccatg

SEQ ID NO: 434874 - DNA, 25 bp, Homo sapien
tagactgatgtgaggggcaacttgt

SEQ ID NO: 434875 - DNA, 25 bp, Homo sapien
acccacgggccatgggtagactgat

SEQ ID NO: 434876 - DNA, 25 bp, Homo sapien
aaaatcatccttggccaacctcaag

SEQ ID NO: 434877 - DNA, 25 bp, Homo sapien
gctggaaggcactggaagcgccgcc

SEQ ID NO: 434878 - DNA, 25 bp, Homo sapien
ggaaggcactggaagcgccgccggg

SEQ ID NO: 434879 - DNA, 25 bp, Homo sapien
cgccgcccgcgagggctggaaggca

SEQ ID NO: 434880 - DNA, 25 bp, Homo sapien
cgcccgcgagggctggaaggcactg

SEQ ID NO: 434881 - DNA, 25 bp, Homo sapien
tctgcgagcgagcgcccgcctgcgc

SEQ ID NO: 434882 - DNA, 25 bp, Homo sapien
tctctgcgagcgagcgcccgcctgc

SEQ ID NO: 434883 - DNA, 25 bp, Homo sapien
cttctctgcgagcgagcgcccgcct

SEQ ID NO: 434884 - DNA, 25 bp, Homo sapien
tgcgagcgagcgcccgcctgcgcgc

SEQ ID NO: 434885 - DNA, 25 bp, Homo sapien
caagcgcgcgagaaataaagccagg

SEQ ID NO: 434886 - DNA, 25 bp, Homo sapien
ggagagcggccgtgagtgcgcgctc

SEQ ID NO: 434887 - DNA, 25 bp, Homo sapien
gccagagacacggagaggcgagagg

SEQ ID NO: 434888 - DNA, 25 bp, Homo sapien
agacggagactgggagagaccccaa

SEQ ID NO: 434889 - DNA, 25 bp, Homo sapien
ctgaccaggcgcaggacgcggcgag

SEQ ID NO: 434890 - DNA, 25 bp, Homo sapien
tgaccaggcgcaggacgcggcgagc

SEQ ID NO: 434891 - DNA, 25 bp, Homo sapien
gcagcggcccgaggcggccgggggc

SEQ ID NO: 434892 - DNA, 25 bp, Homo sapien
cgcggcgagcagcaggcagagcagc

SEQ ID NO: 434893 - DNA, 25 bp, Homo sapien
tttggtgaacatgcacagtagcctt

SEQ ID NO: 434894 - DNA, 25 bp, Homo sapien
acagaaagacatggtcagagccaca

SEQ ID NO: 434895 - DNA, 25 bp, Homo sapien
cccgcggagcacctgaactgcaggg

SEQ ID NO: 434896 - DNA, 25 bp, Homo sapien
gcctgccggcgacagccaggtgttt

SEQ ID NO: 434897 - DNA, 25 bp, Homo sapien
catcggagcacttgctaatcagcgt

SEQ ID NO: 434898 - DNA, 25 bp, Homo sapien
acttgctaatcagcgtcactgctcg

SEQ ID NO: 434899 - DNA, 25 bp, Homo sapien
agcgtcactgctcgtttgccaggga

SEQ ID NO: 434900 - DNA, 25 bp, Homo sapien
gctgcccatcggagcacttgctaat

SEQ ID NO: 434901 - DNA, 25 bp, Homo sapien
caagcaggcatcctgcgggttcagc

SEQ ID NO: 434902 - DNA, 25 bp, Homo sapien
gcatcctgcgggttcagcgtcaggc

SEQ ID NO: 434903 - DNA, 25 bp, Homo sapien
ggccaagcaggcatcctgcgggttc

SEQ ID NO: 434904 - DNA, 25 bp, Homo sapien
catcctgcgggttcagcgtcaggcc

SEQ ID NO: 434905 - DNA, 25 bp, Homo sapien
gagccaatccatgtcttgcgggtga

SEQ ID NO: 434906 - DNA, 25 bp, Homo sapien
taagaaaataacctgtcgcacggag

SEQ ID NO: 434907 - DNA, 25 bp, Homo sapien
cacggagccattggaagcagcaagc

SEQ ID NO: 434908 - DNA, 25 bp, Homo sapien
catctgtcgcaaagggcaccaggaa

SEQ ID NO: 434909 - DNA, 25 bp, Homo sapien
ttctggccgcaccataaggcactgg

SEQ ID NO: 434910 - DNA, 25 bp, Homo sapien
tactgctttgcaggtccgggaatcc

SEQ ID NO: 434911 - DNA, 25 bp, Homo sapien
tggatgaaagcacagagggctctct

SEQ ID NO: 434912 - DNA, 25 bp, Homo sapien
tcgggatcctgtcagatttctggct

SEQ ID NO: 434913 - DNA, 25 bp, Homo sapien
cgtgcagcttatatcctagtggagg

SEQ ID NO: 434914 - DNA, 25 bp, Homo sapien
gcagatttggcccagtgatagagaa

SEQ ID NO: 434915 - DNA, 25 bp, Homo sapien
ttaatatagaaagggctaggagcac

SEQ ID NO: 434916 - DNA, 25 bp, Homo sapien
ctaggagcactaggcaacaggcaga

SEQ ID NO: 434917 - DNA, 25 bp, Homo sapien
ctgcattgaagccaccaaaaatggg

SEQ ID NO: 434918 - DNA, 25 bp, Homo sapien
taaatgtgcattaaggcggatgcaa

SEQ ID NO: 434919 - DNA, 25 bp, Homo sapien
tcacaggatgtagtacaggaccttg

SEQ ID NO: 434920 - DNA, 25 bp, Homo sapien
cattaaggcggatgcaaacaggatg

SEQ ID NO: 434921 - DNA, 25 bp, Homo sapien
caggaccttgcaatagcacatgtga

SEQ ID NO: 434922 - DNA, 25 bp, Homo sapien
cctgacacggtggtatgcctgctgc

SEQ ID NO: 434923 - DNA, 25 bp, Homo sapien
accctgacacggtggtatgcctgct

SEQ ID NO: 434924 - DNA, 25 bp, Homo sapien
ccctgacacggtggtatgcctgctg

SEQ ID NO: 434925 - DNA, 25 bp, Homo sapien
ggttccggcatccaccccagcacag

SEQ ID NO: 434926 - DNA, 25 bp, Homo sapien
tcatccatgaagtggggttccggca

SEQ ID NO: 434927 - DNA, 25 bp, Homo sapien
tgaagtggggttccggcatccaccc

SEQ ID NO: 434928 - DNA, 25 bp, Homo sapien
ttccatcatccatgaagtggggttc

SEQ ID NO: 434929 - DNA, 25 bp, Homo sapien
gagagagaccctgtgaatttgccca

SEQ ID NO: 434930 - DNA, 25 bp, Homo sapien
agagaccctgtgaatttgcccacca

SEQ ID NO: 434931 - DNA, 25 bp, Homo sapien
gaatttgcccaccaacccatggcct

SEQ ID NO: 434932 - DNA, 25 bp, Homo sapien
aatttgcccaccaacccatggcctg

SEQ ID NO: 434933 - DNA, 25 bp, Homo sapien
gtacatcagacaaggctgcggcaga

SEQ ID NO: 434934 - DNA, 25 bp, Homo sapien
ttgccttgtacatcagacaaggctg

SEQ ID NO: 434935 - DNA, 25 bp, Homo sapien
ccttgtacatcagacaaggctgcgg

SEQ ID NO: 434936 - DNA, 25 bp, Homo sapien
ttgtacatcagacaaggctgcggca

SEQ ID NO: 434937 - DNA, 25 bp, Homo sapien
ggaaggaattgtagaggttggctgc

SEQ ID NO: 434938 - DNA, 25 bp, Homo sapien
aaatgggcagctggaaggaattgta

SEQ ID NO: 434939 - DNA, 25 bp, Homo sapien
gctggaaggaattgtagaggttggc

SEQ ID NO: 434940 - DNA, 25 bp, Homo sapien
cccaaatgggcagctggaaggaatt

SEQ ID NO: 434941 - DNA, 25 bp, Homo sapien
ctggaaaggagcacaaagcagtcat

SEQ ID NO: 434942 - DNA, 25 bp, Homo sapien
caaccaacacggacttgtcaggctg

SEQ ID NO: 434943 - DNA, 25 bp, Homo sapien
cagctgcaaccaacacggacttgtc

SEQ ID NO: 434944 - DNA, 25 bp, Homo sapien
tcagagaggtcgcagtgcagcgcag

SEQ ID NO: 434945 - DNA, 25 bp, Homo sapien
gctgcaaccaacacggacttgtcag

SEQ ID NO: 434946 - DNA, 25 bp, Homo sapien
ggaacttcacacagtagtaggtgcc

SEQ ID NO: 434947 - DNA, 25 bp, Homo sapien
gctgaggtgtggccctcgccgcagg

SEQ ID NO: 434948 - DNA, 25 bp, Homo sapien
gaggtgtggccctcgccgcagggcc

SEQ ID NO: 434949 - DNA, 25 bp, Homo sapien
gtgctgaggtgtggccctcgccgca

SEQ ID NO: 434950 - DNA, 25 bp, Homo sapien
tgtgctgaggtgtggccctcgccgc

SEQ ID NO: 434951 - DNA, 25 bp, Homo sapien
tctcagacaagttggcagtcccacg

SEQ ID NO: 434952 - DNA, 25 bp, Homo sapien
ctgtgctgtggatgctgtaggacac

SEQ ID NO: 434953 - DNA, 25 bp, Homo sapien
ggtccacgttggtctggaagtctga

SEQ ID NO: 434954 - DNA, 25 bp, Homo sapien
acctcgcagatgacttgagagtgaa

SEQ ID NO: 434955 - DNA, 25 bp, Homo sapien
ctgaccttgtggcacagacagatca

SEQ ID NO: 434956 - DNA, 25 bp, Homo sapien
cagatacattcaccaggagccagct

SEQ ID NO: 434957 - DNA, 25 bp, Homo sapien
gggcagatacattcaccaggagcca

SEQ ID NO: 434958 - DNA, 25 bp, Homo sapien
gggctgttgagtaacctccaaggtg

SEQ ID NO: 434959 - DNA, 25 bp, Homo sapien
tgttgagtaacctccaaggtgggtg

SEQ ID NO: 434960 - DNA, 25 bp, Homo sapien
gggtcagctgaaatagaggcctcac

SEQ ID NO: 434961 - DNA, 25 bp, Homo sapien
ttctagattgttctataataagcat

SEQ ID NO: 434962 - DNA, 25 bp, Homo sapien
taagcatgaattactacttttaaca

SEQ ID NO: 434963 - DNA, 25 bp, Homo sapien
aagtttaaaaaagctgggtcagctg

SEQ ID NO: 434964 - DNA, 25 bp, Homo sapien
aaatacaatggaggcttgactgccc

SEQ ID NO: 434965 - DNA, 25 bp, Homo sapien
gggctctgaaccaggactcttgaaa

SEQ ID NO: 434966 - DNA, 25 bp, Homo sapien
tctggagtgaaccacagagcggtca

SEQ ID NO: 434967 - DNA, 25 bp, Homo sapien
tagatgtctcgagccacatgggcac

SEQ ID NO: 434968 - DNA, 25 bp, Homo sapien
catcagtagggccaccagcaaggtg

SEQ ID NO: 434969 - DNA, 25 bp, Homo sapien
ttctgtctgattcggacgaggtaga

SEQ ID NO: 434970 - DNA, 25 bp, Homo sapien
ctttcttctgtctgattcggacgag

SEQ ID NO: 434971 - DNA, 25 bp, Homo sapien
gtagggccaccagcaaggtgcacac

SEQ ID NO: 434972 - DNA, 25 bp, Homo sapien
cctccgaggacagtccagggacaaa

SEQ ID NO: 434973 - DNA, 25 bp, Homo sapien
ggcagaagctgatgtccttaaccca

SEQ ID NO: 434974 - DNA, 25 bp, Homo sapien
tgtccttaacccaaagcacctaatg

SEQ ID NO: 434975 - DNA, 25 bp, Homo sapien
acctaatggcgtctccctccgagga

SEQ ID NO: 434976 - DNA, 25 bp, Homo sapien
cttgtagaagaagtggagccctggg

SEQ ID NO: 434977 - DNA, 25 bp, Homo sapien
ccttgctgatctcaggagaagcagg

SEQ ID NO: 434978 - DNA, 25 bp, Homo sapien
acgctgcggcaccaggagggttcac

SEQ ID NO: 434979 - DNA, 25 bp, Homo sapien
gaccctggaggatgtcgtgcccttg

SEQ ID NO: 434980 - DNA, 25 bp, Homo sapien
gcagagacaccttgaacacaccagg

SEQ ID NO: 434981 - DNA, 25 bp, Homo sapien
gagaggcaaaccagtacaatccttt

SEQ ID NO: 434982 - DNA, 25 bp, Homo sapien
tttcatacgtcactggtgggagagg

SEQ ID NO: 434983 - DNA, 25 bp, Homo sapien
tgaactggagctttcatacgtcact

SEQ ID NO: 434984 - DNA, 25 bp, Homo sapien
tataatacttggtgctggggaagct

SEQ ID NO: 434985 - DNA, 25 bp, Homo sapien
tatttctctggcattcttctcgggc

SEQ ID NO: 434986 - DNA, 25 bp, Homo sapien
ttctctggcattcttctcgggctca

SEQ ID NO: 434987 - DNA, 25 bp, Homo sapien
tggcattcttctcgggctcatgcaa

SEQ ID NO: 434988 - DNA, 25 bp, Homo sapien
tctggcattcttctcgggctcatgc

SEQ ID NO: 434989 - DNA, 25 bp, Homo sapien
gaagggtctttctgacccgcacagt

SEQ ID NO: 434990 - DNA, 25 bp, Homo sapien
tggctcagccataagtcatgttccc

SEQ ID NO: 434991 - DNA, 25 bp, Homo sapien
tgaagcatggctcatactaagaccc

SEQ ID NO: 434992 - DNA, 25 bp, Homo sapien
catccctcgagggtgtctgtcctgc

SEQ ID NO: 434993 - DNA, 25 bp, Homo sapien
tcagcataggtgagggtgtcctccg

SEQ ID NO: 434994 - DNA, 25 bp, Homo sapien
gctgcttgggggtccggttgaggtg

SEQ ID NO: 434995 - DNA, 25 bp, Homo sapien
ggctggtctgaatgctggcatactc

SEQ ID NO: 434996 - DNA, 25 bp, Homo sapien
ggtcagcataggtgagggtgtcctc

SEQ ID NO: 434997 - DNA, 25 bp, Homo sapien
tgggacaagaaagcgcgtagagatg

SEQ ID NO: 434998 - DNA, 25 bp, Homo sapien
cctgtgggacaagaaagcgcgtaga

SEQ ID NO: 434999 - DNA, 25 bp, Homo sapien
caagaaagcgcgtagagatgggtgc

SEQ ID NO: 435000 - DNA, 25 bp, Homo sapien
tcttggagggacccaaggaagcaga

SEQ ID NO: 435001 - DNA, 25 bp, Homo sapien
ggacaacaaactgttaaacctcaga

SEQ ID NO: 435002 - DNA, 25 bp, Homo sapien
cttcacaagacccaaccatggactt

SEQ ID NO: 435003 - DNA, 25 bp, Homo sapien
caagtcttcgctgtaagaaaatccc

SEQ ID NO: 435004 - DNA, 25 bp, Homo sapien
caagtcagtcccagccagaaggctg

SEQ ID NO: 435005 - DNA, 25 bp, Homo sapien
agaaggctgcactaccagccgcgtg

SEQ ID NO: 435006 - DNA, 25 bp, Homo sapien
aggctgcactaccagccgcgtggct

SEQ ID NO: 435007 - DNA, 25 bp, Homo sapien
cacagcggggtcacagaaggctgca

SEQ ID NO: 435008 - DNA, 25 bp, Homo sapien
tcacagaaggctgcactaccagccg

SEQ ID NO: 435009 - DNA, 25 bp, Homo sapien
taaatagggcttgcgacatctgctt

SEQ ID NO: 435010 - DNA, 25 bp, Homo sapien
cactttacggatgagcagactgagg

SEQ ID NO: 435011 - DNA, 25 bp, Homo sapien
ttggaatttggaactagcctgagcc

SEQ ID NO: 435012 - DNA, 25 bp, Homo sapien
ccacatggtctgttggctcagctaa

SEQ ID NO: 435013 - DNA, 25 bp, Homo sapien
cacgagactcagctatgcagggtca

SEQ ID NO: 435014 - DNA, 25 bp, Homo sapien
catctggcaaggatattacaggaca

SEQ ID NO: 435015 - DNA, 25 bp, Homo sapien
ggtgtccgagatcccatcagtggtg

SEQ ID NO: 435016 - DNA, 25 bp, Homo sapien
ctacaaagcagcagagccgagatcc

SEQ ID NO: 435017 - DNA, 25 bp, Homo sapien
tggcccagatccatgcgaccggctg

SEQ ID NO: 435018 - DNA, 25 bp, Homo sapien
ggctgccgcaccagctgaccttgcc

SEQ ID NO: 435019 - DNA, 25 bp, Homo sapien
gtggcccagatccatgcgaccggct

SEQ ID NO: 435020 - DNA, 25 bp, Homo sapien
atgcgaccggctgccgcaccagctg

SEQ ID NO: 435021 - DNA, 25 bp, Homo sapien
gtccttccaagggtatcgggaggca

SEQ ID NO: 435022 - DNA, 25 bp, Homo sapien
tccttccaagggtatcgggaggcag

SEQ ID NO: 435023 - DNA, 25 bp, Homo sapien
tccaggcgcaaggtgccaagagcag

SEQ ID NO: 435024 - DNA, 25 bp, Homo sapien
gggcctttgcagcacgtcctgaaag

SEQ ID NO: 435025 - DNA, 25 bp, Homo sapien
cgtcctgaaagatgagcccttgcag

SEQ ID NO: 435026 - DNA, 25 bp, Homo sapien
cagggcggatgacttcaaagggcct

SEQ ID NO: 435027 - DNA, 25 bp, Homo sapien
gaggccctccatcagccgacgatgg

SEQ ID NO: 435028 - DNA, 25 bp, Homo sapien
ctctggaccgcgactgcctgggctg

SEQ ID NO: 435029 - DNA, 25 bp, Homo sapien
aatgtttggtggagtaagtctgccc

SEQ ID NO: 435030 - DNA, 25 bp, Homo sapien
tcagccgacgatgggaatgtttggt

SEQ ID NO: 435031 - DNA, 25 bp, Homo sapien
ttcaatgctctggcttgttttcagg

SEQ ID NO: 435032 - DNA, 25 bp, Homo sapien
tcaatgctctggcttgttttcaggc

SEQ ID NO: 435033 - DNA, 25 bp, Homo sapien
cctcatgtctggctgacggaagcgg

SEQ ID NO: 435034 - DNA, 25 bp, Homo sapien
ctaaacgctcttatcctcatgtctg

SEQ ID NO: 435035 - DNA, 25 bp, Homo sapien
ctggctgacggaagcggctcagtct

SEQ ID NO: 435036 - DNA, 25 bp, Homo sapien
ctggcaggtctctctagaagggcat

SEQ ID NO: 435037 - DNA, 25 bp, Homo sapien
aagcagcgaccgtcaatgtgtggac

SEQ ID NO: 435038 - DNA, 25 bp, Homo sapien
tcaatgtgtggacggtgggctcctt

SEQ ID NO: 435039 - DNA, 25 bp, Homo sapien
tatgttaaaagcagcgaccgtcaat

SEQ ID NO: 435040 - DNA, 25 bp, Homo sapien
ggagctggactttatgttaaaagca

SEQ ID NO: 435041 - DNA, 25 bp, Homo sapien
gtgtgagctgggcaggaggcgaggt

SEQ ID NO: 435042 - DNA, 25 bp, Homo sapien
gaggcgaggtggggtggcagacagg

SEQ ID NO: 435043 - DNA, 25 bp, Homo sapien
gtccttccaggtggctgtgtgagct

SEQ ID NO: 435044 - DNA, 25 bp, Homo sapien
cagacagggcctttcagtgcctcac

SEQ ID NO: 435045 - DNA, 25 bp, Homo sapien
gatcatctaatataaacgggcggtc

SEQ ID NO: 435046 - DNA, 25 bp, Homo sapien
cagccgcgtgtctctgatctgggag

SEQ ID NO: 435047 - DNA, 25 bp, Homo sapien
gagttttcacagagatcccgggacg

SEQ ID NO: 435048 - DNA, 25 bp, Homo sapien
cgggcggtcgtcagcattaagataa

SEQ ID NO: 435049 - DNA, 25 bp, Homo sapien
caaactgatttttccgctgccgcag

SEQ ID NO: 435050 - DNA, 25 bp, Homo sapien
tcccagtcagggttgtgagaaggct

SEQ ID NO: 435051 - DNA, 25 bp, Homo sapien
tactcaatcagtgggttcctgggcg

SEQ ID NO: 435052 - DNA, 25 bp, Homo sapien
ttcctgggcgataagtcacggcagc

SEQ ID NO: 435053 - DNA, 25 bp, Homo sapien
ctgaattcttgctcttgaccgtcat

SEQ ID NO: 435054 - DNA, 25 bp, Homo sapien
tccaactctgcccactgaattcttg

SEQ ID NO: 435055 - DNA, 25 bp, Homo sapien
aactctgcccactgaattcttgctc

SEQ ID NO: 435056 - DNA, 25 bp, Homo sapien
tgcccactgaattcttgctcttgac

SEQ ID NO: 435057 - DNA, 25 bp, Homo sapien
gaagacatgtcagttcctggctgca

SEQ ID NO: 435058 - DNA, 25 bp, Homo sapien
ttctccccaagctgatctgggtcat

SEQ ID NO: 435059 - DNA, 25 bp, Homo sapien
gagagacaccaattaagcaagcaga

SEQ ID NO: 435060 - DNA, 25 bp, Homo sapien
ctgagctatcttggagagacaccaa

SEQ ID NO: 435061 - DNA, 25 bp, Homo sapien
cagtgtgaacctttgagaatagaca

SEQ ID NO: 435062 - DNA, 25 bp, Homo sapien
cttcagtgtgaacctttgagaatag

SEQ ID NO: 435063 - DNA, 25 bp, Homo sapien
tgaacctttgagaatagacatcaag

SEQ ID NO: 435064 - DNA, 25 bp, Homo sapien
cctttgagaatagacatcaagtctt

SEQ ID NO: 435065 - DNA, 25 bp, Homo sapien
tccacctcgtggagagaataatttg

SEQ ID NO: 435066 - DNA, 25 bp, Homo sapien
cttctgtgaaatgggtggtctgtta

SEQ ID NO: 435067 - DNA, 25 bp, Homo sapien
gcaattcttttcttattgattacat

SEQ ID NO: 435068 - DNA, 25 bp, Homo sapien
gaaatgggtggtctgttacttcatt

SEQ ID NO: 435069 - DNA, 25 bp, Homo sapien
tctgtcctccagagggataaaccat

SEQ ID NO: 435070 - DNA, 25 bp, Homo sapien
tctgttcatctcctatattgcagcc

SEQ ID NO: 435071 - DNA, 25 bp, Homo sapien
tattgcagccagagtcaactctcga

SEQ ID NO: 435072 - DNA, 25 bp, Homo sapien
ccaaatctgcttttgttgagaggca

SEQ ID NO: 435073 - DNA, 25 bp, Homo sapien
cacttcaaagtccagcagaaggcag

SEQ ID NO: 435074 - DNA, 25 bp, Homo sapien
cagtcctttgaattacacttcaaag

SEQ ID NO: 435075 - DNA, 25 bp, Homo sapien
tccagcagaaggcagagtgcgttgt

SEQ ID NO: 435076 - DNA, 25 bp, Homo sapien
tcagtcctttgaattacacttcaaa

SEQ ID NO: 435077 - DNA, 25 bp, Homo sapien
gcctgatctgcgtgaagaccaaccg

SEQ ID NO: 435078 - DNA, 25 bp, Homo sapien
cggtcctgcaaaggtcgacggagca

SEQ ID NO: 435079 - DNA, 25 bp, Homo sapien
aaattcccgtgatccgcggcgggct

SEQ ID NO: 435080 - DNA, 25 bp, Homo sapien
cgggacccaatcactggcgagaaca

SEQ ID NO: 435081 - DNA, 25 bp, Homo sapien
tcgcgccagctgagccctttacata

SEQ ID NO: 435082 - DNA, 25 bp, Homo sapien
ctaggctcccgtggctttccacgtg

SEQ ID NO: 435083 - DNA, 25 bp, Homo sapien
taacctctttacataagctgcacct

SEQ ID NO: 435084 - DNA, 25 bp, Homo sapien
gcccggcgtgtagcggatccttctg

SEQ ID NO: 435085 - DNA, 25 bp, Homo sapien
ggccaggccaaggcggggaggccag

SEQ ID NO: 435086 - DNA, 25 bp, Homo sapien
cggccaggccaaggcggggaggcca

SEQ ID NO: 435087 - DNA, 25 bp, Homo sapien
aggccaaggcggggaggccaggagc

SEQ ID NO: 435088 - DNA, 25 bp, Homo sapien
ccaaggcggggaggccaggagcgta

SEQ ID NO: 435089 - DNA, 25 bp, Homo sapien
gaggagccggaccttggattgtgac

SEQ ID NO: 435090 - DNA, 25 bp, Homo sapien
ggggggagcagcaacggcgctgccc

SEQ ID NO: 435091 - DNA, 25 bp, Homo sapien
gtccggccctgggacgcggaggagc

SEQ ID NO: 435092 - DNA, 25 bp, Homo sapien
ctcatccctccgtccggccctggga

SEQ ID NO: 435093 - DNA, 25 bp, Homo sapien
ttgttgccgtgactcatgcgctggg

SEQ ID NO: 435094 - DNA, 25 bp, Homo sapien
caaactgcacgacgttctggtggcg

SEQ ID NO: 435095 - DNA, 25 bp, Homo sapien
taaagctgcgagctcttgttgccgt

SEQ ID NO: 435096 - DNA, 25 bp, Homo sapien
ggctaacccattgcgctgcaggacg

SEQ ID NO: 435097 - DNA, 25 bp, Homo sapien
caagaagtctgtgtggttgccccaa

SEQ ID NO: 435098 - DNA, 25 bp, Homo sapien
gcagtgccacaagcactgatcaata

SEQ ID NO: 435099 - DNA, 25 bp, Homo sapien
ggctggtacctaaaatccccaatgc

SEQ ID NO: 435100 - DNA, 25 bp, Homo sapien
ccaattaaccaaagctctcaattaa

SEQ ID NO: 435101 - DNA, 25 bp, Homo sapien
tactgccgtctggttgactgcgaag

SEQ ID NO: 435102 - DNA, 25 bp, Homo sapien
actcgggtttactgccgtctggttg

SEQ ID NO: 435103 - DNA, 25 bp, Homo sapien
tgactgcgaagcctttttgtttcat

SEQ ID NO: 435104 - DNA, 25 bp, Homo sapien
tggaatgaggcccaggtggaaactc

SEQ ID NO: 435105 - DNA, 25 bp, Homo sapien
caagttcaaaggcatcaggccggtc

SEQ ID NO: 435106 - DNA, 25 bp, Homo sapien
agccatgtagaagtccgaaccgcag

SEQ ID NO: 435107 - DNA, 25 bp, Homo sapien
tgtttaatgtaggtccccaggagct

SEQ ID NO: 435108 - DNA, 25 bp, Homo sapien
gggttttctagcagcgcctcaccaa

SEQ ID NO: 435109 - DNA, 25 bp, Homo sapien
taaaatcacccaaaatgcttagccc

SEQ ID NO: 435110 - DNA, 25 bp, Homo sapien
ctagtttaaaatcacccaaaatgct

SEQ ID NO: 435111 - DNA, 25 bp, Homo sapien
cacccaaaatgcttagccctgaatt

SEQ ID NO: 435112 - DNA, 25 bp, Homo sapien
aatcacccaaaatgcttagccctga

SEQ ID NO: 435113 - DNA, 25 bp, Homo sapien
tgtaaggcccagtaagtcagcaggg

SEQ ID NO: 435114 - DNA, 25 bp, Homo sapien
gaactctctttggtagctcgatgga

SEQ ID NO: 435115 - DNA, 25 bp, Homo sapien
ccaggaggaagatgctaaggtgcca

SEQ ID NO: 435116 - DNA, 25 bp, Homo sapien
tgtctttggacgtgctatggcccct

SEQ ID NO: 435117 - DNA, 25 bp, Homo sapien
gcaacaacctcgtaaagcaacactg

SEQ ID NO: 435118 - DNA, 25 bp, Homo sapien
tagcttgcacctgagatgaccttgg

SEQ ID NO: 435119 - DNA, 25 bp, Homo sapien
gagaacagcctcatagacagtaagt

SEQ ID NO: 435120 - DNA, 25 bp, Homo sapien
gagggatttggccagttttcacaag

SEQ ID NO: 435121 - DNA, 25 bp, Homo sapien
gtagtggaggcgctttctgtagcta

SEQ ID NO: 435122 - DNA, 25 bp, Homo sapien
gtagctatgaacaggaatggctcag

SEQ ID NO: 435123 - DNA, 25 bp, Homo sapien
ctgtagctatgaacaggaatggctc

SEQ ID NO: 435124 - DNA, 25 bp, Homo sapien
cgaaggtagtggaggcgctttctgt

SEQ ID NO: 435125 - DNA, 25 bp, Homo sapien
tacaggatttctcgggcccagtctt

SEQ ID NO: 435126 - DNA, 25 bp, Homo sapien
tccacactgccaaacgggaggttag

SEQ ID NO: 435127 - DNA, 25 bp, Homo sapien
gggtaggccctcaccatctgagaca

SEQ ID NO: 435128 - DNA, 25 bp, Homo sapien
cacagcagatcaacctgaagatggg

SEQ ID NO: 435129 - DNA, 25 bp, Homo sapien
gggagatcgccaaccggccaggcca

SEQ ID NO: 435130 - DNA, 25 bp, Homo sapien
agacgtggtgagactgtgggtcccg

SEQ ID NO: 435131 - DNA, 25 bp, Homo sapien
accacctgtaccctctgccgtcctc

SEQ ID NO: 435132 - DNA, 25 bp, Homo sapien
ccagctgtcgggagatcgccaaccg

SEQ ID NO: 435133 - DNA, 25 bp, Homo sapien
tacgtctatactgagggcaggcacc

SEQ ID NO: 435134 - DNA, 25 bp, Homo sapien
aagttcagatccctaacagccgagg

SEQ ID NO: 435135 - DNA, 25 bp, Homo sapien
tctgatgaaaagaagcccctggcac

SEQ ID NO: 435136 - DNA, 25 bp, Homo sapien
tgttgagacgatgcaccagagagct

SEQ ID NO: 435137 - DNA, 25 bp, Homo sapien
atttacaaagcctcagtcattcata

SEQ ID NO: 435138 - DNA, 25 bp, Homo sapien
aaagcctcagtcattcatacacatt

SEQ ID NO: 435139 - DNA, 25 bp, Homo sapien
acaaagcctcagtcattcatacaca

SEQ ID NO: 435140 - DNA, 25 bp, Homo sapien
tacaaagcctcagtcattcatacac

SEQ ID NO: 435141 - DNA, 25 bp, Homo sapien
gagccttctccctcgaagtattcaa

SEQ ID NO: 435142 - DNA, 25 bp, Homo sapien
tcacacagaaagtggccaacatggg

SEQ ID NO: 435143 - DNA, 25 bp, Homo sapien
gggctctaacccaggctctgtattt

SEQ ID NO: 435144 - DNA, 25 bp, Homo sapien
tgcgtgggtccattgaaagaatcag

SEQ ID NO: 435145 - DNA, 25 bp, Homo sapien
tgttgaatgataagggcggacatcc

SEQ ID NO: 435146 - DNA, 25 bp, Homo sapien
catgggcacgcagcatcatggacat

SEQ ID NO: 435147 - DNA, 25 bp, Homo sapien
cagccactggatagcggagaagttt

SEQ ID NO: 435148 - DNA, 25 bp, Homo sapien
ttcagcaaccactgtcatgggcacg

SEQ ID NO: 435149 - DNA, 25 bp, Homo sapien
gattcatccacattcagctcacatc

SEQ ID NO: 435150 - DNA, 25 bp, Homo sapien
cctggcctatagtagccactgttga

SEQ ID NO: 435151 - DNA, 25 bp, Homo sapien
cactgttgattcatccacattcagc

SEQ ID NO: 435152 - DNA, 25 bp, Homo sapien
gcctatagtagccactgttgattca

SEQ ID NO: 435153 - DNA, 25 bp, Homo sapien
aggtccggcaggatggacagcacca

SEQ ID NO: 435154 - DNA, 25 bp, Homo sapien
gtccaggtccggcaggatggacagc

SEQ ID NO: 435155 - DNA, 25 bp, Homo sapien
ccaggtccggcaggatggacagcac

SEQ ID NO: 435156 - DNA, 25 bp, Homo sapien
ggtccggcaggatggacagcaccat

SEQ ID NO: 435157 - DNA, 25 bp, Homo sapien
gattatgtaatgtgttgatgctgca

SEQ ID NO: 435158 - DNA, 25 bp, Homo sapien
tgtccagtgccagattatgtaatgt

SEQ ID NO: 435159 - DNA, 25 bp, Homo sapien
taatgtgttgatgctgcaagtggcg

SEQ ID NO: 435160 - DNA, 25 bp, Homo sapien
gatgctgcaagtggcgtcctcacag

SEQ ID NO: 435161 - DNA, 25 bp, Homo sapien
ttctttcagagccagtgggccgggt

SEQ ID NO: 435162 - DNA, 25 bp, Homo sapien
ctccgagcgtcacccatgcagtctt

SEQ ID NO: 435163 - DNA, 25 bp, Homo sapien
gggctcctcccaagctccgagcgtc

SEQ ID NO: 435164 - DNA, 25 bp, Homo sapien
gagcgtcacccatgcagtcttcttt

SEQ ID NO: 435165 - DNA, 25 bp, Homo sapien
ctggattccttgcctcgatcgagtc

SEQ ID NO: 435166 - DNA, 25 bp, Homo sapien
cactcccacacatgtcactcgaggc

SEQ ID NO: 435167 - DNA, 25 bp, Homo sapien
aatgtccactcccacacatgtcact

SEQ ID NO: 435168 - DNA, 25 bp, Homo sapien
acatgtcactcgaggccatgagctc

SEQ ID NO: 435169 - DNA, 25 bp, Homo sapien
gccatgagctccatgaagtccaaca

SEQ ID NO: 435170 - DNA, 25 bp, Homo sapien
ttgatcctgctagaatccccaaggt

SEQ ID NO: 435171 - DNA, 25 bp, Homo sapien
gacttgatcctgctagaatccccaa

SEQ ID NO: 435172 - DNA, 25 bp, Homo sapien
gggacctgacttgatcctgctagaa

SEQ ID NO: 435173 - DNA, 25 bp, Homo sapien
gatgaaggggacctgacttgatcct

SEQ ID NO: 435174 - DNA, 25 bp, Homo sapien
cgaaggccaaggctgtaacgcggct

SEQ ID NO: 435175 - DNA, 25 bp, Homo sapien
taggacctccgacatgaagggaagc

SEQ ID NO: 435176 - DNA, 25 bp, Homo sapien
cacttccggtctcgtaggcgtcggg

SEQ ID NO: 435177 - DNA, 25 bp, Homo sapien
tctttgcggacttcgctgcgggctt

SEQ ID NO: 435178 - DNA, 25 bp, Homo sapien
ggcggccacgcgggtccttcctcca

SEQ ID NO: 435179 - DNA, 25 bp, Homo sapien
gcggccacgcgggtccttcctccac

SEQ ID NO: 435180 - DNA, 25 bp, Homo sapien
gaggcggccacgcgggtccttcctc

SEQ ID NO: 435181 - DNA, 25 bp, Homo sapien
tgaaggacgcgggagaaacgccgga

SEQ ID NO: 435182 - DNA, 25 bp, Homo sapien
cccgagttgccatggtgaaggacgc

SEQ ID NO: 435183 - DNA, 25 bp, Homo sapien
ctgcgtcacttctcgtgggctggcg

SEQ ID NO: 435184 - DNA, 25 bp, Homo sapien
tgggctggcggatagagcccggcgg

SEQ ID NO: 435185 - DNA, 25 bp, Homo sapien
gctcccagccacgaccacccagaga

SEQ ID NO: 435186 - DNA, 25 bp, Homo sapien
ggcactttctgaattcccctctccg

SEQ ID NO: 435187 - DNA, 25 bp, Homo sapien
ggagcagaggcgcacggccaccggg

SEQ ID NO: 435188 - DNA, 25 bp, Homo sapien
aggaagcggaagccgccgcccggca

SEQ ID NO: 435189 - DNA, 25 bp, Homo sapien
cctagtaaagtgtcggagaatgtgc

SEQ ID NO: 435190 - DNA, 25 bp, Homo sapien
gttgaatcagaggtaggatgcccca

SEQ ID NO: 435191 - DNA, 25 bp, Homo sapien
gcttgctcaaagtccaacaatgttg

SEQ ID NO: 435192 - DNA, 25 bp, Homo sapien
tgagggagtcctacgaattctaaaa

SEQ ID NO: 435193 - DNA, 25 bp, Homo sapien
tatcattggaaccagcaaacacaca

SEQ ID NO: 435194 - DNA, 25 bp, Homo sapien
aggctcttcagtcatcagaggacac

SEQ ID NO: 435195 - DNA, 25 bp, Homo sapien
gatgtggtaccagggccattcccaa

SEQ ID NO: 435196 - DNA, 25 bp, Homo sapien
caaacacacagtagcaggaaggatg

SEQ ID NO: 435197 - DNA, 25 bp, Homo sapien
ccataaacacttggtaggaacaaag

SEQ ID NO: 435198 - DNA, 25 bp, Homo sapien
tggtaggaacaaagcacaggattgc

SEQ ID NO: 435199 - DNA, 25 bp, Homo sapien
aacacttggtaggaacaaagcacag

SEQ ID NO: 435200 - DNA, 25 bp, Homo sapien
taggaacaaagcacaggattgcatg

SEQ ID NO: 435201 - DNA, 25 bp, Homo sapien
gtctacatgtgtgggtttctggaat

SEQ ID NO: 435202 - DNA, 25 bp, Homo sapien
tatggcacgttgtctacatgtgtgg

SEQ ID NO: 435203 - DNA, 25 bp, Homo sapien
caataatcatatggcacgttgtcta

SEQ ID NO: 435204 - DNA, 25 bp, Homo sapien
cacgttgtctacatgtgtgggtttc

SEQ ID NO: 435205 - DNA, 25 bp, Homo sapien
tcttgactgaatggattcgtgggct

SEQ ID NO: 435206 - DNA, 25 bp, Homo sapien
tcttgataaaggtttcaggacggaa

SEQ ID NO: 435207 - DNA, 25 bp, Homo sapien
tccccgcagtcagtacacatagcag

SEQ ID NO: 435208 - DNA, 25 bp, Homo sapien
tagttcctcgaggacaagaatcctg

SEQ ID NO: 435209 - DNA, 25 bp, Homo sapien
tccctgcgcagccagcagtgtcccg

SEQ ID NO: 435210 - DNA, 25 bp, Homo sapien
gaggattggaccagagaaatcaaag

SEQ ID NO: 435211 - DNA, 25 bp, Homo sapien
gagaggattggaccagagaaatcaa

SEQ ID NO: 435212 - DNA, 25 bp, Homo sapien
gtgtcccggctctctgcccatctaa

SEQ ID NO: 435213 - DNA, 25 bp, Homo sapien
ccagccgaacctcgccctctggctt

SEQ ID NO: 435214 - DNA, 25 bp, Homo sapien
ctctggcttccaaagcgtgccctgc

SEQ ID NO: 435215 - DNA, 25 bp, Homo sapien
agcatgttgtaagccacaaacatct

SEQ ID NO: 435216 - DNA, 25 bp, Homo sapien
taagccacaaacatcttcgccaaga

SEQ ID NO: 435217 - DNA, 25 bp, Homo sapien
tcaagcgagaatcacaaattttggc

SEQ ID NO: 435218 - DNA, 25 bp, Homo sapien
tagattcaacagtcccatccaggtg

SEQ ID NO: 435219 - DNA, 25 bp, Homo sapien
tgaaactggactggcaggtcacttg

SEQ ID NO: 435220 - DNA, 25 bp, Homo sapien
cttggtaagcgctagtgaaactgga

SEQ ID NO: 435221 - DNA, 25 bp, Homo sapien
tattagggtattcacagctctccga

SEQ ID NO: 435222 - DNA, 25 bp, Homo sapien
gaggtagaaacacaatccaaagcta

SEQ ID NO: 435223 - DNA, 25 bp, Homo sapien
tccgaggctccttctaggatgttaa

SEQ ID NO: 435224 - DNA, 25 bp, Homo sapien
caaagctaaagacacaggatatgcc

SEQ ID NO: 435225 - DNA, 25 bp, Homo sapien
aagtgtgtttttagtctctgctgct

SEQ ID NO: 435226 - DNA, 25 bp, Homo sapien
gtggctgccagctgggggcctgggc

SEQ ID NO: 435227 - DNA, 25 bp, Homo sapien
tcatgctgctgtggctgccagctgg

SEQ ID NO: 435228 - DNA, 25 bp, Homo sapien
tgctgtggctgccagctgggggcct

SEQ ID NO: 435229 - DNA, 25 bp, Homo sapien
ctgtggctgccagctgggggcctgg

SEQ ID NO: 435230 - DNA, 25 bp, Homo sapien
ccacacatccatcataaacaggagg

SEQ ID NO: 435231 - DNA, 25 bp, Homo sapien
tgtgaggtgccagcatgtttcctga

SEQ ID NO: 435232 - DNA, 25 bp, Homo sapien
gtcacaggatgtcagctcctgtgag

SEQ ID NO: 435233 - DNA, 25 bp, Homo sapien
gtgaggtgccagcatgtttcctgag

SEQ ID NO: 435234 - DNA, 25 bp, Homo sapien
gacttgtcacccaatggacgtgcat

SEQ ID NO: 435235 - DNA, 25 bp, Homo sapien
gacagacttgtcacccaatggacgt

SEQ ID NO: 435236 - DNA, 25 bp, Homo sapien
agacttgtcacccaatggacgtgca

SEQ ID NO: 435237 - DNA, 25 bp, Homo sapien
ttgtcacccaatggacgtgcatcat

SEQ ID NO: 435238 - DNA, 25 bp, Homo sapien
cctgtagtgcctgtaaacgtttcac

SEQ ID NO: 435239 - DNA, 25 bp, Homo sapien
catttatagaatcctctcctacaca

SEQ ID NO: 435240 - DNA, 25 bp, Homo sapien
tcctacacaccccaattagaattct

SEQ ID NO: 435241 - DNA, 25 bp, Homo sapien
ttctaatgaagtgggcgaggcacca

SEQ ID NO: 435242 - DNA, 25 bp, Homo sapien
tcgccttcctctgcctcttctcagg

SEQ ID NO: 435243 - DNA, 25 bp, Homo sapien
gccttcctctgcctcttctcaggct

SEQ ID NO: 435244 - DNA, 25 bp, Homo sapien
gtttcgccttcctctgcctcttctc

SEQ ID NO: 435245 - DNA, 25 bp, Homo sapien
ttcctctgcctcttctcaggctcct

SEQ ID NO: 435246 - DNA, 25 bp, Homo sapien
cactctcactccctggtagttctga

SEQ ID NO: 435247 - DNA, 25 bp, Homo sapien
tctcactccctggtagttctgagat

SEQ ID NO: 435248 - DNA, 25 bp, Homo sapien
tcactccctggtagttctgagatgt

SEQ ID NO: 435249 - DNA, 25 bp, Homo sapien
actctcactccctggtagttctgag

SEQ ID NO: 435250 - DNA, 25 bp, Homo sapien
tagtatgcccacatgacaggtcaga

SEQ ID NO: 435251 - DNA, 25 bp, Homo sapien
catacatggatctggaactgacaca

SEQ ID NO: 435252 - DNA, 25 bp, Homo sapien
gacatcttagaccatgcagggccat

SEQ ID NO: 435253 - DNA, 25 bp, Homo sapien
catacgtaccctagcgatggtggag

SEQ ID NO: 435254 - DNA, 25 bp, Homo sapien
gccaactgctatgcgcagtccacag

SEQ ID NO: 435255 - DNA, 25 bp, Homo sapien
tcagccttctttatgccaactgcta

SEQ ID NO: 435256 - DNA, 25 bp, Homo sapien
tctttatgccaactgctatgcgcag

SEQ ID NO: 435257 - DNA, 25 bp, Homo sapien
ctgctatgcgcagtccacagaacat

SEQ ID NO: 435258 - DNA, 25 bp, Homo sapien
ggttgtgaagatgacggagctaaac

SEQ ID NO: 435259 - DNA, 25 bp, Homo sapien
ctgagaagggtttatgagagatgcc

SEQ ID NO: 435260 - DNA, 25 bp, Homo sapien
ccatgatgtaccaggtgttcgctga

SEQ ID NO: 435261 - DNA, 25 bp, Homo sapien
ccaggtgttcgctgatataaacttt

SEQ ID NO: 435262 - DNA, 25 bp, Homo sapien
gaggcagaaaggagaacctgaagtc

SEQ ID NO: 435263 - DNA, 25 bp, Homo sapien
ctgtgaggcagaaaggagaacctga

SEQ ID NO: 435264 - DNA, 25 bp, Homo sapien
tgaggcagaaaggagaacctgaagt

SEQ ID NO: 435265 - DNA, 25 bp, Homo sapien
tgtgaggcagaaaggagaacctgaa

SEQ ID NO: 435266 - DNA, 25 bp, Homo sapien
gagccaaggcctttgttcatgatca

SEQ ID NO: 435267 - DNA, 25 bp, Homo sapien
tgaaggccgtctgccagttgatact

SEQ ID NO: 435268 - DNA, 25 bp, Homo sapien
tccagtctttcgttagagccaaggc

SEQ ID NO: 435269 - DNA, 25 bp, Homo sapien
gaagttttggcctctccgcaagatg

SEQ ID NO: 435270 - DNA, 25 bp, Homo sapien
tagtcagagtattgccattgctggc

SEQ ID NO: 435271 - DNA, 25 bp, Homo sapien
cattgtgtaccgtcctatgggtgcg

SEQ ID NO: 435272 - DNA, 25 bp, Homo sapien
tgaacgtcccaagtttcacagagga

SEQ ID NO: 435273 - DNA, 25 bp, Homo sapien
tggagagtggaaacacagccttcgt

SEQ ID NO: 435274 - DNA, 25 bp, Homo sapien
gtggttacccataaagacgctatcc

SEQ ID NO: 435275 - DNA, 25 bp, Homo sapien
gccaatcatgccaattcggtttgtg

SEQ ID NO: 435276 - DNA, 25 bp, Homo sapien
tcttctctctcagcgtggttaccca

SEQ ID NO: 435277 - DNA, 25 bp, Homo sapien
agatgatgccggcatcttcctgaac

SEQ ID NO: 435278 - DNA, 25 bp, Homo sapien
gtcacggcggaaattcagactccta

SEQ ID NO: 435279 - DNA, 25 bp, Homo sapien
cagactcctatccaagattgagagg

SEQ ID NO: 435280 - DNA, 25 bp, Homo sapien
tcagcacccggccaacgtatttggg

SEQ ID NO: 435281 - DNA, 25 bp, Homo sapien
tggccacatcagtagcagcgtcacg

SEQ ID NO: 435282 - DNA, 25 bp, Homo sapien
gactgggctgaagccagattttttc

SEQ ID NO: 435283 - DNA, 25 bp, Homo sapien
gtgtaagtgccgctccaattcccag

SEQ ID NO: 435284 - DNA, 25 bp, Homo sapien
caattcccagcaagcacaccattgt

SEQ ID NO: 435285 - DNA, 25 bp, Homo sapien
cactggccatatcggactgggctga

SEQ ID NO: 435286 - DNA, 25 bp, Homo sapien
tcccatggggtcgtagtacacatcc

SEQ ID NO: 435287 - DNA, 25 bp, Homo sapien
tgatcacccgggaaggaatccccaa

SEQ ID NO: 435288 - DNA, 25 bp, Homo sapien
gtacacatccacactgagatttcgg

SEQ ID NO: 435289 - DNA, 25 bp, Homo sapien
gatttcggtctgtgtcatgagctga

SEQ ID NO: 435290 - DNA, 25 bp, Homo sapien
gatttcctccgagttcctggtatcc

SEQ ID NO: 435291 - DNA, 25 bp, Homo sapien
ccgagttcctggtatccctgtctca

SEQ ID NO: 435292 - DNA, 25 bp, Homo sapien
cctgtttccaggacgccttccttga

SEQ ID NO: 435293 - DNA, 25 bp, Homo sapien
ccttgaggatttcctccgagttcct

SEQ ID NO: 435294 - DNA, 25 bp, Homo sapien
ggagtaactatcagctcccttggct

SEQ ID NO: 435295 - DNA, 25 bp, Homo sapien
gggagtaactatcagctcccttggc

SEQ ID NO: 435296 - DNA, 25 bp, Homo sapien
ggaatggtgtagggagtaactatca

SEQ ID NO: 435297 - DNA, 25 bp, Homo sapien
tcagctgtagggaatggtgtaggga

SEQ ID NO: 435298 - DNA, 25 bp, Homo sapien
gccaggtagccaaggtcttactcat

SEQ ID NO: 435299 - DNA, 25 bp, Homo sapien
agccaggtagccaaggtcttactca

SEQ ID NO: 435300 - DNA, 25 bp, Homo sapien
ctgccatccaccgtacgaggggccc

SEQ ID NO: 435301 - DNA, 25 bp, Homo sapien
tgccatccaccgtacgaggggccca

SEQ ID NO: 435302 - DNA, 25 bp, Homo sapien
gccatccaccgtacgaggggcccag

SEQ ID NO: 435303 - DNA, 25 bp, Homo sapien
catccaccgtacgaggggcccaggt

SEQ ID NO: 435304 - DNA, 25 bp, Homo sapien
ttctttcctgcggggtagcatccaa

SEQ ID NO: 435305 - DNA, 25 bp, Homo sapien
ctttcctgcggggtagcatccaaca

SEQ ID NO: 435306 - DNA, 25 bp, Homo sapien
tttcctgcggggtagcatccaacac

SEQ ID NO: 435307 - DNA, 25 bp, Homo sapien
tctttcctgcggggtagcatccaac

SEQ ID NO: 435308 - DNA, 25 bp, Homo sapien
cacgactcagaaccacacccagaga

SEQ ID NO: 435309 - DNA, 25 bp, Homo sapien
ctcagaaccacacccagagaagtta

SEQ ID NO: 435310 - DNA, 25 bp, Homo sapien
acgactcagaaccacacccagagaa

SEQ ID NO: 435311 - DNA, 25 bp, Homo sapien
gactcagaaccacacccagagaagt

SEQ ID NO: 435312 - DNA, 25 bp, Homo sapien
tctcgaacaccaatgaccgaagcgg

SEQ ID NO: 435313 - DNA, 25 bp, Homo sapien
ttaacctccgcgaagataaagggca

SEQ ID NO: 435314 - DNA, 25 bp, Homo sapien
tgccagtggtgttgtcgtacagcca

SEQ ID NO: 435315 - DNA, 25 bp, Homo sapien
tacttgtccgtgacgtccatgcgag

SEQ ID NO: 435316 - DNA, 25 bp, Homo sapien
ggaacacttgtctttcctggtcaga

SEQ ID NO: 435317 - DNA, 25 bp, Homo sapien
gaacacttgtctttcctggtcagag

SEQ ID NO: 435318 - DNA, 25 bp, Homo sapien
aacacttgtctttcctggtcagagc

SEQ ID NO: 435319 - DNA, 25 bp, Homo sapien
tccaaacccattgaagacgtcgcgg

SEQ ID NO: 435320 - DNA, 25 bp, Homo sapien
ttttgagcagtaggaccaggttgac

SEQ ID NO: 435321 - DNA, 25 bp, Homo sapien
cacttcatgtacaagcgtgccgttg

SEQ ID NO: 435322 - DNA, 25 bp, Homo sapien
gatggtccaggctgtcatgttcact

SEQ ID NO: 435323 - DNA, 25 bp, Homo sapien
ctgagcgtacgagatctttatggga

SEQ ID NO: 435324 - DNA, 25 bp, Homo sapien
ggtacttctcatactgagcgtacga

SEQ ID NO: 435325 - DNA, 25 bp, Homo sapien
caccgctgtgatccggatcatgttg

SEQ ID NO: 435326 - DNA, 25 bp, Homo sapien
atctgggaccttgcacaccgctgtg

SEQ ID NO: 435327 - DNA, 25 bp, Homo sapien
gtccctcaccggctcatccagtgga

SEQ ID NO: 435328 - DNA, 25 bp, Homo sapien
tccagtggattggagaagagcatct

SEQ ID NO: 435329 - DNA, 25 bp, Homo sapien
acgttcacaggcttccgcacacgag

SEQ ID NO: 435330 - DNA, 25 bp, Homo sapien
tcgatcttcaggttacccaacagca

SEQ ID NO: 435331 - DNA, 25 bp, Homo sapien
gcaggatatcaaaacggacccggga

SEQ ID NO: 435332 - DNA, 25 bp, Homo sapien
gcgagcagttgcttggtgccactcc

SEQ ID NO: 435333 - DNA, 25 bp, Homo sapien
aacttgttgcaggagaagtcggcga

SEQ ID NO: 435334 - DNA, 25 bp, Homo sapien
tacatcgatggacaacatggccttg

SEQ ID NO: 435335 - DNA, 25 bp, Homo sapien
tccaagtttgtacgggaggccacca

SEQ ID NO: 435336 - DNA, 25 bp, Homo sapien
ggttcattccatggtgagctctccc

SEQ ID NO: 435337 - DNA, 25 bp, Homo sapien
tccctgctccgtgttgtccaagttt

SEQ ID NO: 435338 - DNA, 25 bp, Homo sapien
tccatgtctggcagccttgggagat

SEQ ID NO: 435339 - DNA, 25 bp, Homo sapien
agcggccagggaatgtgcaaaagtg

SEQ ID NO: 435340 - DNA, 25 bp, Homo sapien
aaagtgatcaagtcataggacaggg

SEQ ID NO: 435341 - DNA, 25 bp, Homo sapien
cataggacagggtggacccagcccc

SEQ ID NO: 435342 - DNA, 25 bp, Homo sapien
gcggccagggaatgtgcaaaagtga

SEQ ID NO: 435343 - DNA, 25 bp, Homo sapien
atcctgcagcattgaagggcgtgag

SEQ ID NO: 435344 - DNA, 25 bp, Homo sapien
tattttgagttagggtgtgagtgct

SEQ ID NO: 435345 - DNA, 25 bp, Homo sapien
tgtatcccgtttggagagtccctgg

SEQ ID NO: 435346 - DNA, 25 bp, Homo sapien
agaagcaggaatgccccgtgcaggt

SEQ ID NO: 435347 - DNA, 25 bp, Homo sapien
cctcgattcagccagtgaatgtcca

SEQ ID NO: 435348 - DNA, 25 bp, Homo sapien
gcgcctgcgtgttttctaagcctga

SEQ ID NO: 435349 - DNA, 25 bp, Homo sapien
ctgattccctaatatttccagctgg

SEQ ID NO: 435350 - DNA, 25 bp, Homo sapien
tcatggtcactctttgcgcctgcgt

SEQ ID NO: 435351 - DNA, 25 bp, Homo sapien
tcctccacacagcagtgtgtgcacc

SEQ ID NO: 435352 - DNA, 25 bp, Homo sapien
cacacagcagtgtgtgcaccgtcag

SEQ ID NO: 435353 - DNA, 25 bp, Homo sapien
acacagcagtgtgtgcaccgtcagg

SEQ ID NO: 435354 - DNA, 25 bp, Homo sapien
tccacacagcagtgtgtgcaccgtc

SEQ ID NO: 435355 - DNA, 25 bp, Homo sapien
ctgtctccatcgtgaagatgaggat

SEQ ID NO: 435356 - DNA, 25 bp, Homo sapien
tccagcgtgaggctgaacgactggc

SEQ ID NO: 435357 - DNA, 25 bp, Homo sapien
agatgaggatctcctcacagtccag

SEQ ID NO: 435358 - DNA, 25 bp, Homo sapien
ggtgggcagcgccattcctcgaccg

SEQ ID NO: 435359 - DNA, 25 bp, Homo sapien
gctccgatgtctggaacacagcttt

SEQ ID NO: 435360 - DNA, 25 bp, Homo sapien
cctccggttgctgtgtttgcggtga

SEQ ID NO: 435361 - DNA, 25 bp, Homo sapien
gactgacggtcagagttttctccat

SEQ ID NO: 435362 - DNA, 25 bp, Homo sapien
tgatgctcagcaggtagcggccaat

SEQ ID NO: 435363 - DNA, 25 bp, Homo sapien
tgaaaagcagtcatcaggcccggtg

SEQ ID NO: 435364 - DNA, 25 bp, Homo sapien
ccggtgtggactggggctctggcct

SEQ ID NO: 435365 - DNA, 25 bp, Homo sapien
aaaagcagtcatcaggcccggtgtg

SEQ ID NO: 435366 - DNA, 25 bp, Homo sapien
aagcagtcatcaggcccggtgtgga

SEQ ID NO: 435367 - DNA, 25 bp, Homo sapien
tatgtgcttctccacgcctcggaag

SEQ ID NO: 435368 - DNA, 25 bp, Homo sapien
tccagccctgggctcgtatgtgctt

SEQ ID NO: 435369 - DNA, 25 bp, Homo sapien
aagatgatgccgctgtcgctgagca

SEQ ID NO: 435370 - DNA, 25 bp, Homo sapien
tgtcgctgagcacgtactcctgtct

SEQ ID NO: 435371 - DNA, 25 bp, Homo sapien
atccttgtctggcctgtgcccctgg

SEQ ID NO: 435372 - DNA, 25 bp, Homo sapien
cttgtctggcctgtgcccctggaga

SEQ ID NO: 435373 - DNA, 25 bp, Homo sapien
ccttgtctggcctgtgcccctggag

SEQ ID NO: 435374 - DNA, 25 bp, Homo sapien
ttgtctggcctgtgcccctggagac

SEQ ID NO: 435375 - DNA, 25 bp, Homo sapien
gtcggtggctgggttgttttggtga

SEQ ID NO: 435376 - DNA, 25 bp, Homo sapien
tgaccggggcttcgatccaggatgg

SEQ ID NO: 435377 - DNA, 25 bp, Homo sapien
gcactgatgaccctggtgacgtaga

SEQ ID NO: 435378 - DNA, 25 bp, Homo sapien
gtggcggcaggacacgtcggtggct

SEQ ID NO: 435379 - DNA, 25 bp, Homo sapien
tgtgcacaggactccggcgaagacc

SEQ ID NO: 435380 - DNA, 25 bp, Homo sapien
accacacctcggtcgttgttgctgt

SEQ ID NO: 435381 - DNA, 25 bp, Homo sapien
cagcactggccgtacttgactggct

SEQ ID NO: 435382 - DNA, 25 bp, Homo sapien
tgccgcgccagtgcagcgggctggt

SEQ ID NO: 435383 - DNA, 25 bp, Homo sapien
ctcggagcaggcgggaccctggccc

SEQ ID NO: 435384 - DNA, 25 bp, Homo sapien
tgagttgaagttggacacgacccgt

SEQ ID NO: 435385 - DNA, 25 bp, Homo sapien
tccacgtatttgtccacactcaggt

SEQ ID NO: 435386 - DNA, 25 bp, Homo sapien
cagggtccgcccgaaggagtccacg

SEQ ID NO: 435387 - DNA, 25 bp, Homo sapien
gttctggtctgtgtcgtgggctgag

SEQ ID NO: 435388 - DNA, 25 bp, Homo sapien
ccacagagagaggatgggtgaagct

SEQ ID NO: 435389 - DNA, 25 bp, Homo sapien
tgccacagagagaggatgggtgaag

SEQ ID NO: 435390 - DNA, 25 bp, Homo sapien
acagagagaggatgggtgaagctgc

SEQ ID NO: 435391 - DNA, 25 bp, Homo sapien
ctgccacagagagaggatgggtgaa

SEQ ID NO: 435392 - DNA, 25 bp, Homo sapien
cagccattgtaagaggggcctaggt

SEQ ID NO: 435393 - DNA, 25 bp, Homo sapien
gaacctgccagccattgtaagaggg

SEQ ID NO: 435394 - DNA, 25 bp, Homo sapien
tgtaagaggggcctaggtcctgccg

SEQ ID NO: 435395 - DNA, 25 bp, Homo sapien
gggggtggcatccagaacctgccag

SEQ ID NO: 435396 - DNA, 25 bp, Homo sapien
ccaggtgatgtagtcggcgttgacc

SEQ ID NO: 435397 - DNA, 25 bp, Homo sapien
tgtttgagtatacacgctcccggct

SEQ ID NO: 435398 - DNA, 25 bp, Homo sapien
cgttgacctccgcaaacacgaaggg

SEQ ID NO: 435399 - DNA, 25 bp, Homo sapien
tgtagaggtcagtgatgtccacgcg

SEQ ID NO: 435400 - DNA, 25 bp, Homo sapien
atggtggcaccgctcaggttgaccc

SEQ ID NO: 435401 - DNA, 25 bp, Homo sapien
gcctcacggcgtgggattcatgcag

SEQ ID NO: 435402 - DNA, 25 bp, Homo sapien
ctgccactggcttgcgggtatagag

SEQ ID NO: 435403 - DNA, 25 bp, Homo sapien
catgggaggctctagcaccttgaac

SEQ ID NO: 435404 - DNA, 25 bp, Homo sapien
gaaagcagaagtgggagttggggct

SEQ ID NO: 435405 - DNA, 25 bp, Homo sapien
tgggagttggggcttgatgtctttc

SEQ ID NO: 435406 - DNA, 25 bp, Homo sapien
ctggaagggaaagcagaagtgggag

SEQ ID NO: 435407 - DNA, 25 bp, Homo sapien
ggcttgatgtctttcttcaatggca

SEQ ID NO: 435408 - DNA, 25 bp, Homo sapien
ttggtgacaaggcacatggcagcca

SEQ ID NO: 435409 - DNA, 25 bp, Homo sapien
tctctcctttggtgacaaggcacat

SEQ ID NO: 435410 - DNA, 25 bp, Homo sapien
cttgtcctctgtcaggtcttcttta

SEQ ID NO: 435411 - DNA, 25 bp, Homo sapien
cttagagtaagatattgtaattggg

SEQ ID NO: 435412 - DNA, 25 bp, Homo sapien
tctatgagggggttgactactgtca

SEQ ID NO: 435413 - DNA, 25 bp, Homo sapien
acttccactgtaactgccactccca

SEQ ID NO: 435414 - DNA, 25 bp, Homo sapien
ttcctggagaaggccgctgccctcc

SEQ ID NO: 435415 - DNA, 25 bp, Homo sapien
tcagcgcacagtccttcactctctc

SEQ ID NO: 435416 - DNA, 25 bp, Homo sapien
ctctcctgaggctccagggtaggca

SEQ ID NO: 435417 - DNA, 25 bp, Homo sapien
tggactgaggccctctcctgaggct

SEQ ID NO: 435418 - DNA, 25 bp, Homo sapien
tcaaactggactgaggccctctcct

SEQ ID NO: 435419 - DNA, 25 bp, Homo sapien
tctcctgaggctccagggtaggcac

SEQ ID NO: 435420 - DNA, 25 bp, Homo sapien
gctgccttgggccacttttggaggg

SEQ ID NO: 435421 - DNA, 25 bp, Homo sapien
agctgccttgggccacttttggagg

SEQ ID NO: 435422 - DNA, 25 bp, Homo sapien
cacatggacgatcacaaagcccttg

SEQ ID NO: 435423 - DNA, 25 bp, Homo sapien
tggacgatcacaaagcccttgatgt

SEQ ID NO: 435424 - DNA, 25 bp, Homo sapien
cagtggccacatggacgatcacaaa

SEQ ID NO: 435425 - DNA, 25 bp, Homo sapien
aaagcccttgatgtccgggaagtga

SEQ ID NO: 435426 - DNA, 25 bp, Homo sapien
aggttgaggcaggattaactgaggc

SEQ ID NO: 435427 - DNA, 25 bp, Homo sapien
gttggggcggcttctgctttccact

SEQ ID NO: 435428 - DNA, 25 bp, Homo sapien
ttctaagctgtcttctgtcaatttc

SEQ ID NO: 435429 - DNA, 25 bp, Homo sapien
actctcccttggacttctaagctgt

SEQ ID NO: 435430 - DNA, 25 bp, Homo sapien
tttccaaaaccacattcccactcac

SEQ ID NO: 435431 - DNA, 25 bp, Homo sapien
gaaggtgagcgcagatccctggctc

SEQ ID NO: 435432 - DNA, 25 bp, Homo sapien
ccgcatgatgagaggagggatccct

SEQ ID NO: 435433 - DNA, 25 bp, Homo sapien
gagcatctttatacgtggagtggca

SEQ ID NO: 435434 - DNA, 25 bp, Homo sapien
gatccctggtcagtcgctccataag

SEQ ID NO: 435435 - DNA, 25 bp, Homo sapien
gttccaggagggagcatatgcacca

SEQ ID NO: 435436 - DNA, 25 bp, Homo sapien
gatctcttaagatccaagttccagg

SEQ ID NO: 435437 - DNA, 25 bp, Homo sapien
ccaccacctttagtgccttctgaag

SEQ ID NO: 435438 - DNA, 25 bp, Homo sapien
gcatatgcaccatctgagtcaaggc

SEQ ID NO: 435439 - DNA, 25 bp, Homo sapien
cagaggacacacttggatgagaagc

SEQ ID NO: 435440 - DNA, 25 bp, Homo sapien
caactgtagagagtatgaaccggac

SEQ ID NO: 435441 - DNA, 25 bp, Homo sapien
cgtatacactcgatggagaagcctt

SEQ ID NO: 435442 - DNA, 25 bp, Homo sapien
gacacactccggtgagaaaccctat

SEQ ID NO: 435443 - DNA, 25 bp, Homo sapien
tgattgaagctgtttacagagcaga

SEQ ID NO: 435444 - DNA, 25 bp, Homo sapien
agctgtttacagagcagaatactca

SEQ ID NO: 435445 - DNA, 25 bp, Homo sapien
gattgaagctgtttacagagcagaa

SEQ ID NO: 435446 - DNA, 25 bp, Homo sapien
tgaagctgtttacagagcagaatac

SEQ ID NO: 435447 - DNA, 25 bp, Homo sapien
tgatttctgttaatgaccgtgtctc

SEQ ID NO: 435448 - DNA, 25 bp, Homo sapien
gatttctgttaatgaccgtgtctcc

SEQ ID NO: 435449 - DNA, 25 bp, Homo sapien
atttctgttaatgaccgtgtctcca

SEQ ID NO: 435450 - DNA, 25 bp, Homo sapien
tttctgttaatgaccgtgtctccat

SEQ ID NO: 435451 - DNA, 25 bp, Homo sapien
tctgctcgaaaccatggctgtattt

SEQ ID NO: 435452 - DNA, 25 bp, Homo sapien
ctttcacattcccatagcgtctttt

SEQ ID NO: 435453 - DNA, 25 bp, Homo sapien
tgtaccctgaagtgttccaattgag

SEQ ID NO: 435454 - DNA, 25 bp, Homo sapien
gcccgtctgacatcttgtaccctga

SEQ ID NO: 435455 - DNA, 25 bp, Homo sapien
gggttgagttctgccagggccaaat

SEQ ID NO: 435456 - DNA, 25 bp, Homo sapien
atggaccaacatccccgcggctggg

SEQ ID NO: 435457 - DNA, 25 bp, Homo sapien
gagtcctgcatcaccgagtttttct

SEQ ID NO: 435458 - DNA, 25 bp, Homo sapien
taggtccgcacatccctgggtggtt

SEQ ID NO: 435459 - DNA, 25 bp, Homo sapien
aagtaaccgttgcacggcccagaag

SEQ ID NO: 435460 - DNA, 25 bp, Homo sapien
aattgtagttctggcgtcggtcggt

SEQ ID NO: 435461 - DNA, 25 bp, Homo sapien
aatgggagccgaagcctgcgaggat

SEQ ID NO: 435462 - DNA, 25 bp, Homo sapien
ggtggccgagatcccgggcacgctg

SEQ ID NO: 435463 - DNA, 25 bp, Homo sapien
ctttcaactaaggttcaggtccagg

SEQ ID NO: 435464 - DNA, 25 bp, Homo sapien
caacaaattaggatgaacctaggca

SEQ ID NO: 435465 - DNA, 25 bp, Homo sapien
gagtcatctccctatggtgaattca

SEQ ID NO: 435466 - DNA, 25 bp, Homo sapien
gaaatgtccattgtgtgttagagca

SEQ ID NO: 435467 - DNA, 25 bp, Homo sapien
ccacttgcctatggtgtgagtcacc

SEQ ID NO: 435468 - DNA, 25 bp, Homo sapien
ttcggcgtagaagacgagtccccat

SEQ ID NO: 435469 - DNA, 25 bp, Homo sapien
gaatatctgccacttgcctatggtg

SEQ ID NO: 435470 - DNA, 25 bp, Homo sapien
tgtgagtcaccacttttcggcgtag

SEQ ID NO: 435471 - DNA, 25 bp, Homo sapien
tgttttcccatttctcactgagaag

SEQ ID NO: 435472 - DNA, 25 bp, Homo sapien
aggccagagtgcgagattccgtctc

SEQ ID NO: 435473 - DNA, 25 bp, Homo sapien
cattgcatcctagcccaggccagag

SEQ ID NO: 435474 - DNA, 25 bp, Homo sapien
tcaaacagtaggatggcagtaaggc

SEQ ID NO: 435475 - DNA, 25 bp, Homo sapien
tctcccccgcgctgaatctgaggaa

SEQ ID NO: 435476 - DNA, 25 bp, Homo sapien
agatcctctgcgaaggccccctggg

SEQ ID NO: 435477 - DNA, 25 bp, Homo sapien
caagttgggacttgccattgcggca

SEQ ID NO: 435478 - DNA, 25 bp, Homo sapien
tcgcgagtctcggtcctggcggttc

SEQ ID NO: 435479 - DNA, 25 bp, Homo sapien
cacaggctcacgcagcgtgctcctg

SEQ ID NO: 435480 - DNA, 25 bp, Homo sapien
cgtgctcctgtatgcacgccttcag

SEQ ID NO: 435481 - DNA, 25 bp, Homo sapien
acaggctcacgcagcgtgctcctgt

SEQ ID NO: 435482 - DNA, 25 bp, Homo sapien
cagcgtgctcctgtatgcacgcctt

SEQ ID NO: 435483 - DNA, 25 bp, Homo sapien
ctctttcaggccctttacctggtgg

SEQ ID NO: 435484 - DNA, 25 bp, Homo sapien
tcaggccctttacctggtggctcat

SEQ ID NO: 435485 - DNA, 25 bp, Homo sapien
tttcaggccctttacctggtggctc

SEQ ID NO: 435486 - DNA, 25 bp, Homo sapien
tctttcaggccctttacctggtggc

SEQ ID NO: 435487 - DNA, 25 bp, Homo sapien
ttcacccgccctttcactccgcctc

SEQ ID NO: 435488 - DNA, 25 bp, Homo sapien
tcacccgccctttcactccgcctcg

SEQ ID NO: 435489 - DNA, 25 bp, Homo sapien
ccgctcttcacccgccctttcactc

SEQ ID NO: 435490 - DNA, 25 bp, Homo sapien
acccgccctttcactccgcctcgtg

SEQ ID NO: 435491 - DNA, 25 bp, Homo sapien
gaaggaggccctctcgtcgcgcttt

SEQ ID NO: 435492 - DNA, 25 bp, Homo sapien
tcggctttgagagcccgcttgcttg

SEQ ID NO: 435493 - DNA, 25 bp, Homo sapien
gcttgcttgaggatctccttcccag

SEQ ID NO: 435494 - DNA, 25 bp, Homo sapien
ctgggtttcttctgccgcttcgact

SEQ ID NO: 435495 - DNA, 25 bp, Homo sapien
cgggtgccacgaggcgctggagtgg

SEQ ID NO: 435496 - DNA, 25 bp, Homo sapien
ctcccccgcgcggacccgcgatctt

SEQ ID NO: 435497 - DNA, 25 bp, Homo sapien
ccccgcgcggacccgcgatcttcat

SEQ ID NO: 435498 - DNA, 25 bp, Homo sapien
ctggagtggagagcccgcggccact

SEQ ID NO: 435499 - DNA, 25 bp, Homo sapien
agttcatgtctgggagcaaccagac

SEQ ID NO: 435500 - DNA, 25 bp, Homo sapien
tttagttcatgtctgggagcaacca

SEQ ID NO: 435501 - DNA, 25 bp, Homo sapien
tagttcatgtctgggagcaaccaga

SEQ ID NO: 435502 - DNA, 25 bp, Homo sapien
ctttagttcatgtctgggagcaacc

SEQ ID NO: 435503 - DNA, 25 bp, Homo sapien
agctgagtgagacagcgcccaatcg

SEQ ID NO: 435504 - DNA, 25 bp, Homo sapien
ttagtgatgaaaaatagtgactctc

SEQ ID NO: 435505 - DNA, 25 bp, Homo sapien
gacagcgcccaatcgggtaggtaaa

SEQ ID NO: 435506 - DNA, 25 bp, Homo sapien
gatgaaaaatagtgactctcagctg

SEQ ID NO: 435507 - DNA, 25 bp, Homo sapien
ttggaaaggaggtggtgtcctcagg

SEQ ID NO: 435508 - DNA, 25 bp, Homo sapien
ggaaaggaggtggtgtcctcaggtg

SEQ ID NO: 435509 - DNA, 25 bp, Homo sapien
agttggaaaggaggtggtgtcctca

SEQ ID NO: 435510 - DNA, 25 bp, Homo sapien
ccagggcggaggcagagggaagttg

SEQ ID NO: 435511 - DNA, 25 bp, Homo sapien
catggtggcaatgagcttctttttt

SEQ ID NO: 435512 - DNA, 25 bp, Homo sapien
cagcttcttcgccatgggccagggc

SEQ ID NO: 435513 - DNA, 25 bp, Homo sapien
ccagggcttgctccgcatggtggca

SEQ ID NO: 435514 - DNA, 25 bp, Homo sapien
ctctgtcagcttcttcgccatgggc

SEQ ID NO: 435515 - DNA, 25 bp, Homo sapien
ccatcagcatcttgtaggcatatag

SEQ ID NO: 435516 - DNA, 25 bp, Homo sapien
ggcatatagttgcttgcctttcccc

SEQ ID NO: 435517 - DNA, 25 bp, Homo sapien
tcccaaggcaccttcatacttctcc

SEQ ID NO: 435518 - DNA, 25 bp, Homo sapien
cttgtaggcatatagttgcttgcct

SEQ ID NO: 435519 - DNA, 25 bp, Homo sapien
catttcccaggggatacattgagtc

SEQ ID NO: 435520 - DNA, 25 bp, Homo sapien
aaagtctctcttaaatttgacccat

SEQ ID NO: 435521 - DNA, 25 bp, Homo sapien
atcaaagtctctcttaaatttgacc

SEQ ID NO: 435522 - DNA, 25 bp, Homo sapien
atttcccaggggatacattgagtct

SEQ ID NO: 435523 - DNA, 25 bp, Homo sapien
tatgactagaccaaatattaagcca

SEQ ID NO: 435524 - DNA, 25 bp, Homo sapien
ggacaaggttaactccatacatcca

SEQ ID NO: 435525 - DNA, 25 bp, Homo sapien
gaaatacgatgccactgaagaacca

SEQ ID NO: 435526 - DNA, 25 bp, Homo sapien
tccatacatccatcggagaaagatg

SEQ ID NO: 435527 - DNA, 25 bp, Homo sapien
tcagcccgaggcactgtctttctgg

SEQ ID NO: 435528 - DNA, 25 bp, Homo sapien
ttttcttcctcagcccgaggcactg

SEQ ID NO: 435529 - DNA, 25 bp, Homo sapien
gcactgtctttctgggaatactccc

SEQ ID NO: 435530 - DNA, 25 bp, Homo sapien
ttctgggaatactcccatagggcat

SEQ ID NO: 435531 - DNA, 25 bp, Homo sapien
ctggttgttgtagtagccatagaag

SEQ ID NO: 435532 - DNA, 25 bp, Homo sapien
gtagtagccatagaagagtgcagag

SEQ ID NO: 435533 - DNA, 25 bp, Homo sapien
tgttgtagtagccatagaagagtgc

SEQ ID NO: 435534 - DNA, 25 bp, Homo sapien
agaagagtgcagagtacttgatata

SEQ ID NO: 435535 - DNA, 25 bp, Homo sapien
ccaccataaagtaagccataggcag

SEQ ID NO: 435536 - DNA, 25 bp, Homo sapien
aggctgtagccgaacacgctgaccc

SEQ ID NO: 435537 - DNA, 25 bp, Homo sapien
aataatcaggctgtagccgaacacg

SEQ ID NO: 435538 - DNA, 25 bp, Homo sapien
aagccataggcagccggtacctcag

SEQ ID NO: 435539 - DNA, 25 bp, Homo sapien
atgcatatttgttatcagctgtctc

SEQ ID NO: 435540 - DNA, 25 bp, Homo sapien
tgtgaagttgtcactctccccttcg

SEQ ID NO: 435541 - DNA, 25 bp, Homo sapien
ctgaatgtgaagttgtcactctccc

SEQ ID NO: 435542 - DNA, 25 bp, Homo sapien
gctggtgaacatcttgaagctgaat

SEQ ID NO: 435543 - DNA, 25 bp, Homo sapien
ggctctccgcaacttctgtcttttg

SEQ ID NO: 435544 - DNA, 25 bp, Homo sapien
tatgcaaacccaaccactcaattat

SEQ ID NO: 435545 - DNA, 25 bp, Homo sapien
tgtttattatgcaccctcagaaggg

SEQ ID NO: 435546 - DNA, 25 bp, Homo sapien
tccaactgcaacttagaaccctaaa

SEQ ID NO: 435547 - DNA, 25 bp, Homo sapien
attttcttctttgttactctcttgt

SEQ ID NO: 435548 - DNA, 25 bp, Homo sapien
tctttgttactctcttgttcatcca

SEQ ID NO: 435549 - DNA, 25 bp, Homo sapien
tttcttctttgttactctcttgttc

SEQ ID NO: 435550 - DNA, 25 bp, Homo sapien
tcttctttgttactctcttgttcat

SEQ ID NO: 435551 - DNA, 25 bp, Homo sapien
cattttggagaattgctgagatcgc

SEQ ID NO: 435552 - DNA, 25 bp, Homo sapien
aatgaggtacccacttccacacaaa

SEQ ID NO: 435553 - DNA, 25 bp, Homo sapien
tcgcttaaccacaaagtaaatgagg

SEQ ID NO: 435554 - DNA, 25 bp, Homo sapien
tgatgagaaagttggccaggacacg

SEQ ID NO: 435555 - DNA, 25 bp, Homo sapien
gctgccacttcagtccagtgcgtgg

SEQ ID NO: 435556 - DNA, 25 bp, Homo sapien
gagtgcaaagatgcgtcccagctgc

SEQ ID NO: 435557 - DNA, 25 bp, Homo sapien
gaggtggacgtcatccatcagggcc

SEQ ID NO: 435558 - DNA, 25 bp, Homo sapien
agagaaatgtgtagaggttccccag

SEQ ID NO: 435559 - DNA, 25 bp, Homo sapien
gagtccagtgagtgatgttctttat

SEQ ID NO: 435560 - DNA, 25 bp, Homo sapien
aaccccggggcacatctgcagggtg

SEQ ID NO: 435561 - DNA, 25 bp, Homo sapien
gttgtaatagttaaacagagtccag

SEQ ID NO: 435562 - DNA, 25 bp, Homo sapien
gggacactctcgttccaaccagaag

SEQ ID NO: 435563 - DNA, 25 bp, Homo sapien
tgaaccgcacaaaacaagcccgtag

SEQ ID NO: 435564 - DNA, 25 bp, Homo sapien
cagcagtagttcatgaaccgcacaa

SEQ ID NO: 435565 - DNA, 25 bp, Homo sapien
caggatggtgatgtacgttaccagc

SEQ ID NO: 435566 - DNA, 25 bp, Homo sapien
gatgtacgttaccagcatgtcagac

SEQ ID NO: 435567 - DNA, 25 bp, Homo sapien
aaatccagcctccaagtcccagcac

SEQ ID NO: 435568 - DNA, 25 bp, Homo sapien
aaatgcccaagaatgcatctggcta

SEQ ID NO: 435569 - DNA, 25 bp, Homo sapien
tgcatctggctataagtatcaaaga

SEQ ID NO: 435570 - DNA, 25 bp, Homo sapien
tcaaagaagatagttgaaattcctt

SEQ ID NO: 435571 - DNA, 25 bp, Homo sapien
tgcggaatgtccatgaagtggtgac

SEQ ID NO: 435572 - DNA, 25 bp, Homo sapien
gatgcaattccctatcaaccattgg

SEQ ID NO: 435573 - DNA, 25 bp, Homo sapien
caaccattggctcagtactggagtg

SEQ ID NO: 435574 - DNA, 25 bp, Homo sapien
gaaatattcgcctccactgtcagat

SEQ ID NO: 435575 - DNA, 25 bp, Homo sapien
tgtggtccactttcccctaggccaa

SEQ ID NO: 435576 - DNA, 25 bp, Homo sapien
gttgtggaagagacatgtacagcac

SEQ ID NO: 435577 - DNA, 25 bp, Homo sapien
gattctgccagagcatagaaggaca

SEQ ID NO: 435578 - DNA, 25 bp, Homo sapien
tggaagagacatgtacagcacaggt

SEQ ID NO: 435579 - DNA, 25 bp, Homo sapien
gaagagacatgtacagcacaggtgc

SEQ ID NO: 435580 - DNA, 25 bp, Homo sapien
cggagcctttcaccaggagctcagg

SEQ ID NO: 435581 - DNA, 25 bp, Homo sapien
tacataggtcaacatcctacggagc

SEQ ID NO: 435582 - DNA, 25 bp, Homo sapien
aggatgagggatacataggtcaaca

SEQ ID NO: 435583 - DNA, 25 bp, Homo sapien
ggtcaacatcctacggagcctttca

SEQ ID NO: 435584 - DNA, 25 bp, Homo sapien
cagcacatttccactaatatcaaac

SEQ ID NO: 435585 - DNA, 25 bp, Homo sapien
cagatcattccttggttgaagatca

SEQ ID NO: 435586 - DNA, 25 bp, Homo sapien
aagatcaaacccagcacatttccac

SEQ ID NO: 435587 - DNA, 25 bp, Homo sapien
taatatcaaactcagcatatgaagg

SEQ ID NO: 435588 - DNA, 25 bp, Homo sapien
aatggcagaaaccaaacacctggtt

SEQ ID NO: 435589 - DNA, 25 bp, Homo sapien
ggaatggcagaaaccaaacacctgg

SEQ ID NO: 435590 - DNA, 25 bp, Homo sapien
tggcagaaaccaaacacctggttgg

SEQ ID NO: 435591 - DNA, 25 bp, Homo sapien
ctggaatggcagaaaccaaacacct

SEQ ID NO: 435592 - DNA, 25 bp, Homo sapien
gcgcagcacattaatgcccaccagg

SEQ ID NO: 435593 - DNA, 25 bp, Homo sapien
ggtcagcaggcgcagcacattaatg

SEQ ID NO: 435594 - DNA, 25 bp, Homo sapien
tcatggggtacgttgctgctcatca

SEQ ID NO: 435595 - DNA, 25 bp, Homo sapien
tgttggatcgggaggctttgaacac

SEQ ID NO: 435596 - DNA, 25 bp, Homo sapien
ctgaacggcccgcagtcaaaggagg

SEQ ID NO: 435597 - DNA, 25 bp, Homo sapien
gtaggccaccggcaggaggctgagg

SEQ ID NO: 435598 - DNA, 25 bp, Homo sapien
tgggagggacatgatggtgtaggcc

SEQ ID NO: 435599 - DNA, 25 bp, Homo sapien
acatgatggtgtaggccaccggcag

SEQ ID NO: 435600 - DNA, 25 bp, Homo sapien
agaactggaattctgggccgaggcc

SEQ ID NO: 435601 - DNA, 25 bp, Homo sapien
ggctactgaaatgaacagcgcagac

SEQ ID NO: 435602 - DNA, 25 bp, Homo sapien
tttcaagcactcaacggccacaggt

SEQ ID NO: 435603 - DNA, 25 bp, Homo sapien
gcgcagacacagaacgacctaacat

SEQ ID NO: 435604 - DNA, 25 bp, Homo sapien
catgagaaattaattttctcagttc

SEQ ID NO: 435605 - DNA, 25 bp, Homo sapien
ccccaaatatgtacaactatcagtt

SEQ ID NO: 435606 - DNA, 25 bp, Homo sapien
tacatgagaaattaattttctcagt

SEQ ID NO: 435607 - DNA, 25 bp, Homo sapien
atgtacaactatcagttaaaaatta

SEQ ID NO: 435608 - DNA, 25 bp, Homo sapien
tgaaattaagaacgaaatcctgtca

SEQ ID NO: 435609 - DNA, 25 bp, Homo sapien
gagtagaatgaggtgatcagaggtt

SEQ ID NO: 435610 - DNA, 25 bp, Homo sapien
aatgaggtgatcagaggttgggaag

SEQ ID NO: 435611 - DNA, 25 bp, Homo sapien
aattgaaattaagaacgaaatcctg

SEQ ID NO: 435612 - DNA, 25 bp, Homo sapien
taaggaagtaatgccctcagggttg

SEQ ID NO: 435613 - DNA, 25 bp, Homo sapien
gaggcgatgcattagtcacacgatt

SEQ ID NO: 435614 - DNA, 25 bp, Homo sapien
gagagtgcctcccacatgactagca

SEQ ID NO: 435615 - DNA, 25 bp, Homo sapien
taagaacacttgtgacttagggccc

SEQ ID NO: 435616 - DNA, 25 bp, Homo sapien
accaacagcacagaatctttaaatc

SEQ ID NO: 435617 - DNA, 25 bp, Homo sapien
acacacaatgcctggtggattacag

SEQ ID NO: 435618 - DNA, 25 bp, Homo sapien
cacacaatgcctggtggattacagg

SEQ ID NO: 435619 - DNA, 25 bp, Homo sapien
acacaatgcctggtggattacaggc

SEQ ID NO: 435620 - DNA, 25 bp, Homo sapien
cctggattggcgaggaaagcaaaga

SEQ ID NO: 435621 - DNA, 25 bp, Homo sapien
gaaagcaaagatcttgcccaggaag

SEQ ID NO: 435622 - DNA, 25 bp, Homo sapien
ctcttggaggacatcgtacattctg

SEQ ID NO: 435623 - DNA, 25 bp, Homo sapien
catcagcaggatggctgggatgatc

SEQ ID NO: 435624 - DNA, 25 bp, Homo sapien
tgagttcaggtagtaaatggccaag

SEQ ID NO: 435625 - DNA, 25 bp, Homo sapien
tcttcctcagctgggcattagctcg

SEQ ID NO: 435626 - DNA, 25 bp, Homo sapien
aaactgagttcaggtagtaaatggc

SEQ ID NO: 435627 - DNA, 25 bp, Homo sapien
tgggcattagctcgggaaaggcttt

SEQ ID NO: 435628 - DNA, 25 bp, Homo sapien
gcaattgaaggaacatgtggccaga

SEQ ID NO: 435629 - DNA, 25 bp, Homo sapien
ggccagaggacagcgatctttccaa

SEQ ID NO: 435630 - DNA, 25 bp, Homo sapien
ttaaactgcctgttactggtcctca

SEQ ID NO: 435631 - DNA, 25 bp, Homo sapien
tcctcacaactgattggagagggca

SEQ ID NO: 435632 - DNA, 25 bp, Homo sapien
agatttgtgactcttctcaacttca

SEQ ID NO: 435633 - DNA, 25 bp, Homo sapien
ggagctgggtggcatttttggagct

SEQ ID NO: 435634 - DNA, 25 bp, Homo sapien
agttggagctgggtggcatttttgg

SEQ ID NO: 435635 - DNA, 25 bp, Homo sapien
tttacagatttgtgactcttctcaa

SEQ ID NO: 435636 - DNA, 25 bp, Homo sapien
gccagaatctggtccgattccaggg

SEQ ID NO: 435637 - DNA, 25 bp, Homo sapien
agggccctgcgccttcttgtccatg

SEQ ID NO: 435638 - DNA, 25 bp, Homo sapien
gccgagatataggaaggtgtccaga

SEQ ID NO: 435639 - DNA, 25 bp, Homo sapien
ggcgtggccagaatctggtccgatt

SEQ ID NO: 435640 - DNA, 25 bp, Homo sapien
gggaggtctctgagcactctttcca

SEQ ID NO: 435641 - DNA, 25 bp, Homo sapien
gaggtctctgagcactctttccaga

SEQ ID NO: 435642 - DNA, 25 bp, Homo sapien
tggggaggtctctgagcactctttc

SEQ ID NO: 435643 - DNA, 25 bp, Homo sapien
tctctgagcactctttccagaggct

SEQ ID NO: 435644 - DNA, 25 bp, Homo sapien
gacagagcatgtatgtgagaggaaa

SEQ ID NO: 435645 - DNA, 25 bp, Homo sapien
caaagttcatgcattccaagagagg

SEQ ID NO: 435646 - DNA, 25 bp, Homo sapien
gaaccttggtttggtatgtgtgaaa

SEQ ID NO: 435647 - DNA, 25 bp, Homo sapien
tagggtcgaggctccctggagtcct

SEQ ID NO: 435648 - DNA, 25 bp, Homo sapien
ctgtcttcctccttcggtagctgac

SEQ ID NO: 435649 - DNA, 25 bp, Homo sapien
tcctccttcggtagctgacaagggc

SEQ ID NO: 435650 - DNA, 25 bp, Homo sapien
aggacaggtgaagccactgtcttcc

SEQ ID NO: 435651 - DNA, 25 bp, Homo sapien
aaaggacaggtgaagccactgtctt

SEQ ID NO: 435652 - DNA, 25 bp, Homo sapien
ccaactccgaaaatcgggaggcaag

SEQ ID NO: 435653 - DNA, 25 bp, Homo sapien
aggcaaggtcgaccactgtgagcgt

SEQ ID NO: 435654 - DNA, 25 bp, Homo sapien
taaactgtatcccatggaaaaagtc

SEQ ID NO: 435655 - DNA, 25 bp, Homo sapien
gagctgtctgaaccaagatatttgg

SEQ ID NO: 435656 - DNA, 25 bp, Homo sapien
tctggattgagaaatgtaggccctt

SEQ ID NO: 435657 - DNA, 25 bp, Homo sapien
cttcctctggattgagaaatgtagg

SEQ ID NO: 435658 - DNA, 25 bp, Homo sapien
tggttagggaagctggcagaaaccc

SEQ ID NO: 435659 - DNA, 25 bp, Homo sapien
tagggaagctggcagaaacccgtgt

SEQ ID NO: 435660 - DNA, 25 bp, Homo sapien
ggagcacagagtggaggaaaggaag

SEQ ID NO: 435661 - DNA, 25 bp, Homo sapien
tgggagcacagagtggaggaaagga

SEQ ID NO: 435662 - DNA, 25 bp, Homo sapien
agcacagagtggaggaaaggaagga

SEQ ID NO: 435663 - DNA, 25 bp, Homo sapien
ctgggagcacagagtggaggaaagg

SEQ ID NO: 435664 - DNA, 25 bp, Homo sapien
gccggcttcccgcttcgtccgtggc

SEQ ID NO: 435665 - DNA, 25 bp, Homo sapien
cttcccgcttcgtccgtggcctcgg

SEQ ID NO: 435666 - DNA, 25 bp, Homo sapien
cccagacagagaccgctgcctagcc

SEQ ID NO: 435667 - DNA, 25 bp, Homo sapien
acagagaccgctgcctagccggctt

SEQ ID NO: 435668 - DNA, 25 bp, Homo sapien
agctgggtgaagtcggggcgggagg

SEQ ID NO: 435669 - DNA, 25 bp, Homo sapien
acgacaccatctccggcctttggag

SEQ ID NO: 435670 - DNA, 25 bp, Homo sapien
ccagggtggtatcgcccggagcgcg

SEQ ID NO: 435671 - DNA, 25 bp, Homo sapien
ggtaatagtccggttcctgatgttc

SEQ ID NO: 435672 - DNA, 25 bp, Homo sapien
caggcggcgaaacgacttgggaagg

SEQ ID NO: 435673 - DNA, 25 bp, Homo sapien
ccagctcccgggttcggctcgcaat

SEQ ID NO: 435674 - DNA, 25 bp, Homo sapien
ctcccgggttcggctcgcaatgcgg

SEQ ID NO: 435675 - DNA, 25 bp, Homo sapien
cagctcccgggttcggctcgcaatg

SEQ ID NO: 435676 - DNA, 25 bp, Homo sapien
agctcccgggttcggctcgcaatgc

SEQ ID NO: 435677 - DNA, 25 bp, Homo sapien
aacgcaacctcagcgtctgccggaa

SEQ ID NO: 435678 - DNA, 25 bp, Homo sapien
ggaacccgttcccagggcaggcgca

SEQ ID NO: 435679 - DNA, 25 bp, Homo sapien
caggccctgtctgcggcccgaacgc

SEQ ID NO: 435680 - DNA, 25 bp, Homo sapien
gggcgcgagcgtcaacgcaacctca

SEQ ID NO: 435681 - DNA, 25 bp, Homo sapien
tagccgaccgcgtgctcaaacagca

SEQ ID NO: 435682 - DNA, 25 bp, Homo sapien
agcagcgcgtagccgaccgcgtgct

SEQ ID NO: 435683 - DNA, 25 bp, Homo sapien
agcgccagcagcgcgtagccgaccg

SEQ ID NO: 435684 - DNA, 25 bp, Homo sapien
gcgcgtagccgaccgcgtgctcaaa

SEQ ID NO: 435685 - DNA, 25 bp, Homo sapien
ttatttctaattgctagagcgattc

SEQ ID NO: 435686 - DNA, 25 bp, Homo sapien
tctacccatgggtcaaggtaaagac

SEQ ID NO: 435687 - DNA, 25 bp, Homo sapien
tagagcgattctacccatgggtcaa

SEQ ID NO: 435688 - DNA, 25 bp, Homo sapien
tctgctttaatcgttcgggggcggc

SEQ ID NO: 435689 - DNA, 25 bp, Homo sapien
cttcagacacggcgttggcattttc

SEQ ID NO: 435690 - DNA, 25 bp, Homo sapien
aaaggccaccagacgaacgatgctg

SEQ ID NO: 435691 - DNA, 25 bp, Homo sapien
acgaacgatgctgtggaatttgccc

SEQ ID NO: 435692 - DNA, 25 bp, Homo sapien
ttttccaaggcaacctgggatgagg

SEQ ID NO: 435693 - DNA, 25 bp, Homo sapien
tactatcacaagctgcccgagagga

SEQ ID NO: 435694 - DNA, 25 bp, Homo sapien
cgagaggataccgaaaggaaccaca

SEQ ID NO: 435695 - DNA, 25 bp, Homo sapien
tgacacttggcggtggccgacttac

SEQ ID NO: 435696 - DNA, 25 bp, Homo sapien
cagtttggtctagcacagttcccag

SEQ ID NO: 435697 - DNA, 25 bp, Homo sapien
ttcgcaagtcatcactgcaaagcct

SEQ ID NO: 435698 - DNA, 25 bp, Homo sapien
gggattgacagatttgattcgcaag

SEQ ID NO: 435699 - DNA, 25 bp, Homo sapien
tcagtgattgcactcaggggattga

SEQ ID NO: 435700 - DNA, 25 bp, Homo sapien
catcaggcattgctcagagacatgg

SEQ ID NO: 435701 - DNA, 25 bp, Homo sapien
ctggtcccaccgagcacgctgggat

SEQ ID NO: 435702 - DNA, 25 bp, Homo sapien
caccgagcacgctgggatggcatac

SEQ ID NO: 435703 - DNA, 25 bp, Homo sapien
cccactaacaggctgaaggacgatc

SEQ ID NO: 435704 - DNA, 25 bp, Homo sapien
gatcaactctaacatccctcagctg

SEQ ID NO: 435705 - DNA, 25 bp, Homo sapien
ctgtattgcggcaccaatcttggga

SEQ ID NO: 435706 - DNA, 25 bp, Homo sapien
ggatctcagctatgactcctccagt

SEQ ID NO: 435707 - DNA, 25 bp, Homo sapien
aatcttgggatccccaactcccaag

SEQ ID NO: 435708 - DNA, 25 bp, Homo sapien
ggcagttgtaccctaactcctcctg

SEQ ID NO: 435709 - DNA, 25 bp, Homo sapien
caggaggctaatggactggatgatc

SEQ ID NO: 435710 - DNA, 25 bp, Homo sapien
gatcatattgtccacccggttcaca

SEQ ID NO: 435711 - DNA, 25 bp, Homo sapien
acttaactttggcacgggaatagct

SEQ ID NO: 435712 - DNA, 25 bp, Homo sapien
tgctttacaagctgacagatcggtc

SEQ ID NO: 435713 - DNA, 25 bp, Homo sapien
tgtatatggggtaggtttactctac

SEQ ID NO: 435714 - DNA, 25 bp, Homo sapien
ggcctgagctgaggtgtatatgggg

SEQ ID NO: 435715 - DNA, 25 bp, Homo sapien
acctcctctttctatacagtcagtg

SEQ ID NO: 435716 - DNA, 25 bp, Homo sapien
ccattcacaatacagaccaggcaca

SEQ ID NO: 435717 - DNA, 25 bp, Homo sapien
acaaagatccaaatcttcctcaatt

SEQ ID NO: 435718 - DNA, 25 bp, Homo sapien
tgcaaagagccacagtcactccctg

SEQ ID NO: 435719 - DNA, 25 bp, Homo sapien
gcaaagagccacagtcactccctgg

SEQ ID NO: 435720 - DNA, 25 bp, Homo sapien
tagagctacagccttgccttctcca

SEQ ID NO: 435721 - DNA, 25 bp, Homo sapien
ccagctgcttcatcaaaaaccatag

SEQ ID NO: 435722 - DNA, 25 bp, Homo sapien
tcattcagttcccttcggtttccaa

SEQ ID NO: 435723 - DNA, 25 bp, Homo sapien
tgtcgttgatgatcttcaccagctc

SEQ ID NO: 435724 - DNA, 25 bp, Homo sapien
gcaagacggcagtatgtggcattgt

SEQ ID NO: 435725 - DNA, 25 bp, Homo sapien
gctccggaaagtgatacccgtacca

SEQ ID NO: 435726 - DNA, 25 bp, Homo sapien
gaccgtgaggcatccagaatagcct

SEQ ID NO: 435727 - DNA, 25 bp, Homo sapien
gcatccagaatagccttagccttgg

SEQ ID NO: 435728 - DNA, 25 bp, Homo sapien
tagccttggccccatccattgtcag

SEQ ID NO: 435729 - DNA, 25 bp, Homo sapien
ccatggaggaccgtgaggcatccag

SEQ ID NO: 435730 - DNA, 25 bp, Homo sapien
gcaggttgccaggctctgcactgac

SEQ ID NO: 435731 - DNA, 25 bp, Homo sapien
tgcaggttgccaggctctgcactga

SEQ ID NO: 435732 - DNA, 25 bp, Homo sapien
cttatgcaggttgccaggctctgca

SEQ ID NO: 435733 - DNA, 25 bp, Homo sapien
tatgcaggttgccaggctctgcact

SEQ ID NO: 435734 - DNA, 25 bp, Homo sapien
aggccagctatttagagccccatac

SEQ ID NO: 435735 - DNA, 25 bp, Homo sapien
agtgtgaatgcaagaggccagctat

SEQ ID NO: 435736 - DNA, 25 bp, Homo sapien
gtgtgaatgcaagaggccagctatt

SEQ ID NO: 435737 - DNA, 25 bp, Homo sapien
tgtgaatgcaagaggccagctattt

SEQ ID NO: 435738 - DNA, 25 bp, Homo sapien
accacacgactggagaagctctcga

SEQ ID NO: 435739 - DNA, 25 bp, Homo sapien
ccccaattagggctgacaggctggg

SEQ ID NO: 435740 - DNA, 25 bp, Homo sapien
atcttggagcgcaggtaagtgtgta

SEQ ID NO: 435741 - DNA, 25 bp, Homo sapien
ctggcggtattcagataaagacacc

SEQ ID NO: 435742 - DNA, 25 bp, Homo sapien
gagaaatgaactgctgacctgccca

SEQ ID NO: 435743 - DNA, 25 bp, Homo sapien
ggtgggtcacgaaatacagcagtgc

SEQ ID NO: 435744 - DNA, 25 bp, Homo sapien
caactagggaagacatggtgggtca

SEQ ID NO: 435745 - DNA, 25 bp, Homo sapien
catggcaacagtccttattctccca

SEQ ID NO: 435746 - DNA, 25 bp, Homo sapien
ttttcagccccaaggatctgcactg

SEQ ID NO: 435747 - DNA, 25 bp, Homo sapien
aggctgccagcatgtgcgatgagac

SEQ ID NO: 435748 - DNA, 25 bp, Homo sapien
ccagcatgtgcgatgagacgtgcac

SEQ ID NO: 435749 - DNA, 25 bp, Homo sapien
actgtggatgctggatacttggcca

SEQ ID NO: 435750 - DNA, 25 bp, Homo sapien
ccgtgatcccccaacaagcagtggg

SEQ ID NO: 435751 - DNA, 25 bp, Homo sapien
cagaagtggcacctgattgtgggca

SEQ ID NO: 435752 - DNA, 25 bp, Homo sapien
aggcctgtataggtcagggagccct

SEQ ID NO: 435753 - DNA, 25 bp, Homo sapien
catagcagaggcctgtataggtcag

SEQ ID NO: 435754 - DNA, 25 bp, Homo sapien
agggaaggcatccaatgtcgctgac

SEQ ID NO: 435755 - DNA, 25 bp, Homo sapien
aatgcatgccaacccatagctccca

SEQ ID NO: 435756 - DNA, 25 bp, Homo sapien
ccagattggatctctaccccaatgc

SEQ ID NO: 435757 - DNA, 25 bp, Homo sapien
cagagggaaggcatccaatgtcgct

SEQ ID NO: 435758 - DNA, 25 bp, Homo sapien
aatcgattcgtgaggcaatactgca

SEQ ID NO: 435759 - DNA, 25 bp, Homo sapien
atcgggagatgcggcctttgttctt

SEQ ID NO: 435760 - DNA, 25 bp, Homo sapien
cagagaagcaatcgattcgtgaggc

SEQ ID NO: 435761 - DNA, 25 bp, Homo sapien
gagtgttaccccttgtcttcagggc

SEQ ID NO: 435762 - DNA, 25 bp, Homo sapien
tatggttgcaagcctccccacccag

SEQ ID NO: 435763 - DNA, 25 bp, Homo sapien
gctatggttgcaagcctccccaccc

SEQ ID NO: 435764 - DNA, 25 bp, Homo sapien
ctatggttgcaagcctccccaccca

SEQ ID NO: 435765 - DNA, 25 bp, Homo sapien
agctatggttgcaagcctccccacc

SEQ ID NO: 435766 - DNA, 25 bp, Homo sapien
ctcaacactcactaggtgaactgct

SEQ ID NO: 435767 - DNA, 25 bp, Homo sapien
gtctcaacactcactaggtgaactg

SEQ ID NO: 435768 - DNA, 25 bp, Homo sapien
cagagtctcaacactcactaggtga

SEQ ID NO: 435769 - DNA, 25 bp, Homo sapien
gagtctcaacactcactaggtgaac

SEQ ID NO: 435770 - DNA, 25 bp, Homo sapien
agagagaaactaccccaaccctgtg

SEQ ID NO: 435771 - DNA, 25 bp, Homo sapien
caaccctgtgttccctctaccctca

SEQ ID NO: 435772 - DNA, 25 bp, Homo sapien
ctgtcagcccaaagagagaaactac

SEQ ID NO: 435773 - DNA, 25 bp, Homo sapien
cagcccaaagagagaaactacccca

SEQ ID NO: 435774 - DNA, 25 bp, Homo sapien
ctcgaagcttctccccgaatacact

SEQ ID NO: 435775 - DNA, 25 bp, Homo sapien
gttctcgaagcttctccccgaatac

SEQ ID NO: 435776 - DNA, 25 bp, Homo sapien
ttctcgaagcttctccccgaataca

SEQ ID NO: 435777 - DNA, 25 bp, Homo sapien
tccccgaatacactcgtgggcacct

SEQ ID NO: 435778 - DNA, 25 bp, Homo sapien
gctagctatgccactccacacccag

SEQ ID NO: 435779 - DNA, 25 bp, Homo sapien
ccactccacacccagcaaagcccaa

SEQ ID NO: 435780 - DNA, 25 bp, Homo sapien
tgccactccacacccagcaaagccc

SEQ ID NO: 435781 - DNA, 25 bp, Homo sapien
cagctagctatgccactccacaccc

SEQ ID NO: 435782 - DNA, 25 bp, Homo sapien
ttgcctccattctacaaggtcaggc

SEQ ID NO: 435783 - DNA, 25 bp, Homo sapien
ttttgcctccattctacaaggtcag

SEQ ID NO: 435784 - DNA, 25 bp, Homo sapien
ttttttgcctccattctacaaggtc

SEQ ID NO: 435785 - DNA, 25 bp, Homo sapien
cagtttttttgcctccattctacaa

SEQ ID NO: 435786 - DNA, 25 bp, Homo sapien
aagtgctaaaagggcctgaagactt

SEQ ID NO: 435787 - DNA, 25 bp, Homo sapien
agtgctaaaagggcctgaagacttc

SEQ ID NO: 435788 - DNA, 25 bp, Homo sapien
gaaaagtgctaaaagggcctgaaga

SEQ ID NO: 435789 - DNA, 25 bp, Homo sapien
aaagtgctaaaagggcctgaagact

SEQ ID NO: 435790 - DNA, 25 bp, Homo sapien
ttctgaagacgcgagggcaagtgca

SEQ ID NO: 435791 - DNA, 25 bp, Homo sapien
ccttctttaagcgtttcttctcctg

SEQ ID NO: 435792 - DNA, 25 bp, Homo sapien
tcctagtaatctcagcagccgcttc

SEQ ID NO: 435793 - DNA, 25 bp, Homo sapien
caagtgcagccagccgtttcttttc

SEQ ID NO: 435794 - DNA, 25 bp, Homo sapien
tatagaatcaagaggtagttttaga

SEQ ID NO: 435795 - DNA, 25 bp, Homo sapien
cagcttgatgcagcatatcctttgt

SEQ ID NO: 435796 - DNA, 25 bp, Homo sapien
tctgctgttgaaaatcctacaacct

SEQ ID NO: 435797 - DNA, 25 bp, Homo sapien
tagatgtttcaggtccttgtttcag

SEQ ID NO: 435798 - DNA, 25 bp, Homo sapien
cacacatgcccagggaacgggtgtg

SEQ ID NO: 435799 - DNA, 25 bp, Homo sapien
aacgcgtgtcgttaacattgcccag

SEQ ID NO: 435800 - DNA, 25 bp, Homo sapien
tccggacacacgtctgataataagc

SEQ ID NO: 435801 - DNA, 25 bp, Homo sapien
ttcagcaattaagtagccaaggcag

SEQ ID NO: 435802 - DNA, 25 bp, Homo sapien
catgccaagttccagacagggccct

SEQ ID NO: 435803 - DNA, 25 bp, Homo sapien
tcaagatcgctactcatcaactcct

SEQ ID NO: 435804 - DNA, 25 bp, Homo sapien
gccagcggtctcttcaagatcgcta

SEQ ID NO: 435805 - DNA, 25 bp, Homo sapien
gaaagagatagatgggtcttccatt

SEQ ID NO: 435806 - DNA, 25 bp, Homo sapien
tactggtgctgccagcggtctcttc

SEQ ID NO: 435807 - DNA, 25 bp, Homo sapien
cctgggatgctttatggaacttttt

SEQ ID NO: 435808 - DNA, 25 bp, Homo sapien
tgcctcctcagggtcattaactgtt

SEQ ID NO: 435809 - DNA, 25 bp, Homo sapien
tgtttcctccttgggtgtagacttc

SEQ ID NO: 435810 - DNA, 25 bp, Homo sapien
actgctgaccggctcctctttggag

SEQ ID NO: 435811 - DNA, 25 bp, Homo sapien
ccttgggctatggtatgccccacct

SEQ ID NO: 435812 - DNA, 25 bp, Homo sapien
acctcccagagaatgtccatttgca

SEQ ID NO: 435813 - DNA, 25 bp, Homo sapien
ccacctcccagagaatgtccatttg

SEQ ID NO: 435814 - DNA, 25 bp, Homo sapien
cttgggctatggtatgccccacctc

SEQ ID NO: 435815 - DNA, 25 bp, Homo sapien
gattgttaggatggagcccaggcca

SEQ ID NO: 435816 - DNA, 25 bp, Homo sapien
tcacctgcagactaaagggagctag

SEQ ID NO: 435817 - DNA, 25 bp, Homo sapien
tgtaccagggaagagaccttgtgcc

SEQ ID NO: 435818 - DNA, 25 bp, Homo sapien
tgcctctaagcagtggaccatggtc

SEQ ID NO: 435819 - DNA, 25 bp, Homo sapien
tcaatcgcttgttaagctcaggtcc

SEQ ID NO: 435820 - DNA, 25 bp, Homo sapien
catacaggtattcagtgagtactgg

SEQ ID NO: 435821 - DNA, 25 bp, Homo sapien
taaatatggcgactgaaaacaaagc

SEQ ID NO: 435822 - DNA, 25 bp, Homo sapien
caggtcctcgtctgataaacatgac

SEQ ID NO: 435823 - DNA, 25 bp, Homo sapien
ccagaagagcgggtgaggcaaatct

SEQ ID NO: 435824 - DNA, 25 bp, Homo sapien
gaagtatgactcacaagcctgcact

SEQ ID NO: 435825 - DNA, 25 bp, Homo sapien
ctaaaatcgtgactggaggccgggc

SEQ ID NO: 435826 - DNA, 25 bp, Homo sapien
cctaaaggattgcagaggaggcaca

SEQ ID NO: 435827 - DNA, 25 bp, Homo sapien
tctctaagacatctgagatacagtg

SEQ ID NO: 435828 - DNA, 25 bp, Homo sapien
cagtaagtatatagagtatgaaacc

SEQ ID NO: 435829 - DNA, 25 bp, Homo sapien
gaaaccatttattccgacgcacaca

SEQ ID NO: 435830 - DNA, 25 bp, Homo sapien
cattctctaagatatggtgtcttag

SEQ ID NO: 435831 - DNA, 25 bp, Homo sapien
tgacgtctttctcccgcgtgactgt

SEQ ID NO: 435832 - DNA, 25 bp, Homo sapien
gagctttcgctcttgacgtctttct

SEQ ID NO: 435833 - DNA, 25 bp, Homo sapien
ttgctgctcattttgacgcctccga

SEQ ID NO: 435834 - DNA, 25 bp, Homo sapien
gacgcctccgagctttcgctcttga

SEQ ID NO: 435835 - DNA, 25 bp, Homo sapien
cggacgaagccccggcgtcttcgcg

SEQ ID NO: 435836 - DNA, 25 bp, Homo sapien
cgaagccccggcgtcttcgcggcct

SEQ ID NO: 435837 - DNA, 25 bp, Homo sapien
agccccggcgtcttcgcggcctcat

SEQ ID NO: 435838 - DNA, 25 bp, Homo sapien
gacgaagccccggcgtcttcgcggc

SEQ ID NO: 435839 - DNA, 25 bp, Homo sapien
cagcagcccggccgactccccccgg

SEQ ID NO: 435840 - DNA, 25 bp, Homo sapien
ccctgccgtagccccgggcggcagc

SEQ ID NO: 435841 - DNA, 25 bp, Homo sapien
ctgccgtagccccgggcggcagcac

SEQ ID NO: 435842 - DNA, 25 bp, Homo sapien
cctgccgtagccccgggcggcagca

SEQ ID NO: 435843 - DNA, 25 bp, Homo sapien
ggtggctcagtgcgcgctcgcctct

SEQ ID NO: 435844 - DNA, 25 bp, Homo sapien
cgggtggctcagtgcgcgctcgcct

SEQ ID NO: 435845 - DNA, 25 bp, Homo sapien
ctccctcggagaaagcgggtccgcg

SEQ ID NO: 435846 - DNA, 25 bp, Homo sapien
tggctcagtgcgcgctcgcctcttg

SEQ ID NO: 435847 - DNA, 25 bp, Homo sapien
ccctgcatccaggagcgcactgagc

SEQ ID NO: 435848 - DNA, 25 bp, Homo sapien
tccttcaggttcagcccgctgcggg

SEQ ID NO: 435849 - DNA, 25 bp, Homo sapien
atccaggagcgcactgagcccaggc

SEQ ID NO: 435850 - DNA, 25 bp, Homo sapien
ggtgctggcgtccaggatgcccgcg

SEQ ID NO: 435851 - DNA, 25 bp, Homo sapien
gggtggcgttcaccgccgcacccgc

SEQ ID NO: 435852 - DNA, 25 bp, Homo sapien
ttctctcagagccatagacagcccg

SEQ ID NO: 435853 - DNA, 25 bp, Homo sapien
gcacccgcgagcggccgtcagaaat

SEQ ID NO: 435854 - DNA, 25 bp, Homo sapien
cagagccatagacagcccggctggg

SEQ ID NO: 435855 - DNA, 25 bp, Homo sapien
ttacacggtgaggttgaggcgtcct

SEQ ID NO: 435856 - DNA, 25 bp, Homo sapien
tcagtttgcacatgaagcgcggtgt

SEQ ID NO: 435857 - DNA, 25 bp, Homo sapien
tccgtaagagatcagctccagagcc

SEQ ID NO: 435858 - DNA, 25 bp, Homo sapien
tcagaatcccttcgggctgctgcaa

SEQ ID NO: 435859 - DNA, 25 bp, Homo sapien
gctgtggacacaaggatgaacggac

SEQ ID NO: 435860 - DNA, 25 bp, Homo sapien
catagcacttactggaggcgcagct

SEQ ID NO: 435861 - DNA, 25 bp, Homo sapien
ctatggtaagcattcgtaggcagca

SEQ ID NO: 435862 - DNA, 25 bp, Homo sapien
cattaaagccactcccgtgggcagg

SEQ ID NO: 435863 - DNA, 25 bp, Homo sapien
aggaaattggcacagtgaccaaagt

SEQ ID NO: 435864 - DNA, 25 bp, Homo sapien
ggaaattggcacagtgaccaaagtc

SEQ ID NO: 435865 - DNA, 25 bp, Homo sapien
gaaattggcacagtgaccaaagtcc

SEQ ID NO: 435866 - DNA, 25 bp, Homo sapien
caacaatgcttgcacagggaggacc

SEQ ID NO: 435867 - DNA, 25 bp, Homo sapien
acctcaacaatgcttgcacagggag

SEQ ID NO: 435868 - DNA, 25 bp, Homo sapien
ccacctcaacaatgcttgcacaggg

SEQ ID NO: 435869 - DNA, 25 bp, Homo sapien
ctcaacaatgcttgcacagggagga

SEQ ID NO: 435870 - DNA, 25 bp, Homo sapien
gctgcagaggtgtctgactgctatt

SEQ ID NO: 435871 - DNA, 25 bp, Homo sapien
cccgggagatgctcctttgcaaggc

SEQ ID NO: 435872 - DNA, 25 bp, Homo sapien
cattcaggtggactgtgctccagag

SEQ ID NO: 435873 - DNA, 25 bp, Homo sapien
tgctccagagtgtatgcagatgcct

SEQ ID NO: 435874 - DNA, 25 bp, Homo sapien
tacaagtaagaactgcctcacctgg

SEQ ID NO: 435875 - DNA, 25 bp, Homo sapien
gaggcagagccttgaccaatggtcc

SEQ ID NO: 435876 - DNA, 25 bp, Homo sapien
ggagggcttctacggctgttacttc

SEQ ID NO: 435877 - DNA, 25 bp, Homo sapien
caagtcctcaagcaaagggaagcag

SEQ ID NO: 435878 - DNA, 25 bp, Homo sapien
atagccctgccaggcttggagaagc

SEQ ID NO: 435879 - DNA, 25 bp, Homo sapien
cctgttcatagccctgccaggcttg

SEQ ID NO: 435880 - DNA, 25 bp, Homo sapien
gagaagctcaagcaaaggatacttc

SEQ ID NO: 435881 - DNA, 25 bp, Homo sapien
ttggagaagctcaagcaaaggatac

SEQ ID NO: 435882 - DNA, 25 bp, Homo sapien
agtctggcataagccccaagccaag

SEQ ID NO: 435883 - DNA, 25 bp, Homo sapien
gaagtctggcataagccccaagcca

SEQ ID NO: 435884 - DNA, 25 bp, Homo sapien
tgggaagtctggcataagccccaag

SEQ ID NO: 435885 - DNA, 25 bp, Homo sapien
gggaagtctggcataagccccaagc

SEQ ID NO: 435886 - DNA, 25 bp, Homo sapien
ctaaaggccactagaaagttctgaa

SEQ ID NO: 435887 - DNA, 25 bp, Homo sapien
tgaagccaggcagggcttaaagatg

SEQ ID NO: 435888 - DNA, 25 bp, Homo sapien
ggccactagaaagttctgaagccag

SEQ ID NO: 435889 - DNA, 25 bp, Homo sapien
aaaggccactagaaagttctgaagc

SEQ ID NO: 435890 - DNA, 25 bp, Homo sapien
tgttgagggtcatggtttcggaaac

SEQ ID NO: 435891 - DNA, 25 bp, Homo sapien
tacggagcacttttgttgagggtca

SEQ ID NO: 435892 - DNA, 25 bp, Homo sapien
cacttttgttgagggtcatggtttc

SEQ ID NO: 435893 - DNA, 25 bp, Homo sapien
ttgagggtcatggtttcggaaacat

SEQ ID NO: 435894 - DNA, 25 bp, Homo sapien
cccagtgagaaagactccagcgcct

SEQ ID NO: 435895 - DNA, 25 bp, Homo sapien
tgagaaagactccagcgcctcgggc

SEQ ID NO: 435896 - DNA, 25 bp, Homo sapien
agtgagaaagactccagcgcctcgg

SEQ ID NO: 435897 - DNA, 25 bp, Homo sapien
ggccccccagtgagaaagactccag

SEQ ID NO: 435898 - DNA, 25 bp, Homo sapien
tgggaggaaaagagctggaaaacca

SEQ ID NO: 435899 - DNA, 25 bp, Homo sapien
tgtgggaggaaaagagctggaaaac

SEQ ID NO: 435900 - DNA, 25 bp, Homo sapien
ctgtgggaggaaaagagctggaaaa

SEQ ID NO: 435901 - DNA, 25 bp, Homo sapien
ggctgcccctgccggtcgtacatgg

SEQ ID NO: 435902 - DNA, 25 bp, Homo sapien
ctcaaaatgtgctcgtgccagaccc

SEQ ID NO: 435903 - DNA, 25 bp, Homo sapien
agtcgatgaaggctgtgcgctccac

SEQ ID NO: 435904 - DNA, 25 bp, Homo sapien
cggtccttttccacgaagtcgatga

SEQ ID NO: 435905 - DNA, 25 bp, Homo sapien
attgttatacaccagccggaggcgg

SEQ ID NO: 435906 - DNA, 25 bp, Homo sapien
ggaggcggtaatggatcccattgtt

SEQ ID NO: 435907 - DNA, 25 bp, Homo sapien
ccggaggcggtaatggatcccattg

SEQ ID NO: 435908 - DNA, 25 bp, Homo sapien
tgttatacaccagccggaggcggta

SEQ ID NO: 435909 - DNA, 25 bp, Homo sapien
gtcgatgagacgcacgtagaggtct

SEQ ID NO: 435910 - DNA, 25 bp, Homo sapien
gagacgcacgtagaggtcttgctct

SEQ ID NO: 435911 - DNA, 25 bp, Homo sapien
ctgtttggacatggagtcgatgaga

SEQ ID NO: 435912 - DNA, 25 bp, Homo sapien
gacatggagtcgatgagacgcacgt

SEQ ID NO: 435913 - DNA, 25 bp, Homo sapien
accaccaccggctggcaagaatggt

SEQ ID NO: 435914 - DNA, 25 bp, Homo sapien
gattctgtctgtctgtaggtggctc

SEQ ID NO: 435915 - DNA, 25 bp, Homo sapien
gggtagacatactcctgtgcccacc

SEQ ID NO: 435916 - DNA, 25 bp, Homo sapien
caagaatggtatgaagtctgcagat

SEQ ID NO: 435917 - DNA, 25 bp, Homo sapien
ttcggggttcttgtcctgcccctca

SEQ ID NO: 435918 - DNA, 25 bp, Homo sapien
tgtcctgcccctcatagatgatggc

SEQ ID NO: 435919 - DNA, 25 bp, Homo sapien
tgggtgagcagcactcggcacattt

SEQ ID NO: 435920 - DNA, 25 bp, Homo sapien
ggttcttgtcctgcccctcatagat

SEQ ID NO: 435921 - DNA, 25 bp, Homo sapien
tgatgacggggtctgagggcgtctc

SEQ ID NO: 435922 - DNA, 25 bp, Homo sapien
gtctgagggcgtctcattccggttg

SEQ ID NO: 435923 - DNA, 25 bp, Homo sapien
aatgatgacggggtctgagggcgtc

SEQ ID NO: 435924 - DNA, 25 bp, Homo sapien
gggtctgagggcgtctcattccggt

SEQ ID NO: 435925 - DNA, 25 bp, Homo sapien
aatattggagtgataaaggcctttc

SEQ ID NO: 435926 - DNA, 25 bp, Homo sapien
tcaccataggcaaagttaaatgact

SEQ ID NO: 435927 - DNA, 25 bp, Homo sapien
cacaagttagctgggcttgttggcg

SEQ ID NO: 435928 - DNA, 25 bp, Homo sapien
tggacaactcatcacaaagggataa

SEQ ID NO: 435929 - DNA, 25 bp, Homo sapien
gagataacatgtgaaccctaactga

SEQ ID NO: 435930 - DNA, 25 bp, Homo sapien
taaaagtgtctatcatcagaaagaa

SEQ ID NO: 435931 - DNA, 25 bp, Homo sapien
cattaaaaggaagagattggcagaa

SEQ ID NO: 435932 - DNA, 25 bp, Homo sapien
tatatgctgtctatgtgagacatac

SEQ ID NO: 435933 - DNA, 25 bp, Homo sapien
tcaagggggattgccagaatggatc

SEQ ID NO: 435934 - DNA, 25 bp, Homo sapien
tggatctggacagaagtctgtgctt

SEQ ID NO: 435935 - DNA, 25 bp, Homo sapien
agcagggaggttctggaacctcaag

SEQ ID NO: 435936 - DNA, 25 bp, Homo sapien
gatggatgacattgggctagttttg

SEQ ID NO: 435937 - DNA, 25 bp, Homo sapien
gggtgaccactgcaggaccagtgcc

SEQ ID NO: 435938 - DNA, 25 bp, Homo sapien
agggtgaccactgcaggaccagtgc

SEQ ID NO: 435939 - DNA, 25 bp, Homo sapien
taccactgaagatgcgacaagcata

SEQ ID NO: 435940 - DNA, 25 bp, Homo sapien
accactgaagatgcgacaagcatag

SEQ ID NO: 435941 - DNA, 25 bp, Homo sapien
caggcagttctggttgcatttgagg

SEQ ID NO: 435942 - DNA, 25 bp, Homo sapien
tgggattccccgcattcttcaggca

SEQ ID NO: 435943 - DNA, 25 bp, Homo sapien
agcggcgcatgtctctgggattccc

SEQ ID NO: 435944 - DNA, 25 bp, Homo sapien
gaagcggcgcatgtctctgggattc

SEQ ID NO: 435945 - DNA, 25 bp, Homo sapien
cgccctgcggccatgcttggagttg

SEQ ID NO: 435946 - DNA, 25 bp, Homo sapien
acgctcaccgtcgtggacaccacca

SEQ ID NO: 435947 - DNA, 25 bp, Homo sapien
agcacgtgtccgtccacgctcaccg

SEQ ID NO: 435948 - DNA, 25 bp, Homo sapien
cgcgccctgcggccatgcttggagt

SEQ ID NO: 435949 - DNA, 25 bp, Homo sapien
cgtcgaagaagttgtcgccgatgac

SEQ ID NO: 435950 - DNA, 25 bp, Homo sapien
cacgacctgcaacccgtcgaagaag

SEQ ID NO: 435951 - DNA, 25 bp, Homo sapien
cacacgagcacgtttccgaacacga

SEQ ID NO: 435952 - DNA, 25 bp, Homo sapien
ccgatgacaatgacggtggcgccgc

SEQ ID NO: 435953 - DNA, 25 bp, Homo sapien
tgcaggtcccgcaccggcgagggga

SEQ ID NO: 435954 - DNA, 25 bp, Homo sapien
caggtcccgcaccggcgaggggagg

SEQ ID NO: 435955 - DNA, 25 bp, Homo sapien
gcaggtcccgcaccggcgaggggag

SEQ ID NO: 435956 - DNA, 25 bp, Homo sapien
gccggggcatcccttgcaaaactgc

SEQ ID NO: 435957 - DNA, 25 bp, Homo sapien
tgtgtagacaaagcggccggggcat

SEQ ID NO: 435958 - DNA, 25 bp, Homo sapien
cccttgcaaaactgcttggacttgt

SEQ ID NO: 435959 - DNA, 25 bp, Homo sapien
gggcgtctgcacccggatggcgtgg

SEQ ID NO: 435960 - DNA, 25 bp, Homo sapien
tccgtagtcaatggtgggctcgttc

SEQ ID NO: 435961 - DNA, 25 bp, Homo sapien
tccggggtgtctgggaatgactttc

SEQ ID NO: 435962 - DNA, 25 bp, Homo sapien
ggaatccgtagtcaatggtgggctc

SEQ ID NO: 435963 - DNA, 25 bp, Homo sapien
gtagcctctggaatccgtagtcaat

SEQ ID NO: 435964 - DNA, 25 bp, Homo sapien
gggcactccgtacagggcttctgcc

SEQ ID NO: 435965 - DNA, 25 bp, Homo sapien
tgccgggcactccgtacagggcttc

SEQ ID NO: 435966 - DNA, 25 bp, Homo sapien
gggcttctgccaagtcggccgcccg

SEQ ID NO: 435967 - DNA, 25 bp, Homo sapien
cgggcactccgtacagggcttctgc

SEQ ID NO: 435968 - DNA, 25 bp, Homo sapien
tgcgaagacaagagcggggcacggc

SEQ ID NO: 435969 - DNA, 25 bp, Homo sapien
gaagacaagagcggggcacggccgg

SEQ ID NO: 435970 - DNA, 25 bp, Homo sapien
ctgcgaagacaagagcggggcacgg

SEQ ID NO: 435971 - DNA, 25 bp, Homo sapien
gcgaagacaagagcggggcacggcc

SEQ ID NO: 435972 - DNA, 25 bp, Homo sapien
gggtgctgtacagagcctcggccac

SEQ ID NO: 435973 - DNA, 25 bp, Homo sapien
gtgctgtacagagcctcggccacgt

SEQ ID NO: 435974 - DNA, 25 bp, Homo sapien
cacgtccgccgcgcgcttcaggagc

SEQ ID NO: 435975 - DNA, 25 bp, Homo sapien
cgtccgccgcgcgcttcaggagcag

SEQ ID NO: 435976 - DNA, 25 bp, Homo sapien
ggggtgcgagcggcccgggtgcgcg

SEQ ID NO: 435977 - DNA, 25 bp, Homo sapien
gtggctcggggccaggggtgcgagc

SEQ ID NO: 435978 - DNA, 25 bp, Homo sapien
tcggggccaggggtgcgagcggccc

SEQ ID NO: 435979 - DNA, 25 bp, Homo sapien
gccaggggtgcgagcggcccgggtg

SEQ ID NO: 435980 - DNA, 25 bp, Homo sapien
gctgctgaaggcgttgatgcccacg

SEQ ID NO: 435981 - DNA, 25 bp, Homo sapien
tgctgaaggcgttgatgcccacgac

SEQ ID NO: 435982 - DNA, 25 bp, Homo sapien
ctgaaggcgttgatgcccacgacgg

SEQ ID NO: 435983 - DNA, 25 bp, Homo sapien
gccagcgggctgctgaaggcgttga

SEQ ID NO: 435984 - DNA, 25 bp, Homo sapien
cgcgaacccgcggggggacgcgctg

SEQ ID NO: 435985 - DNA, 25 bp, Homo sapien
gaacccgcggggggacgcgctgctg

SEQ ID NO: 435986 - DNA, 25 bp, Homo sapien
cgcggggggacgcgctgctgcagct

SEQ ID NO: 435987 - DNA, 25 bp, Homo sapien
gcggggggacgcgctgctgcagctg

SEQ ID NO: 435988 - DNA, 25 bp, Homo sapien
ccggcgcgccgtagccgcccaggcc

SEQ ID NO: 435989 - DNA, 25 bp, Homo sapien
cccaggcacgccgaggccggccacg

SEQ ID NO: 435990 - DNA, 25 bp, Homo sapien
aggtggcggtggagccattgaggaa

SEQ ID NO: 435991 - DNA, 25 bp, Homo sapien
gaagggcgaggtggcggtggagcca

SEQ ID NO: 435992 - DNA, 25 bp, Homo sapien
tctctcttatgattgatagggaggc

SEQ ID NO: 435993 - DNA, 25 bp, Homo sapien
cctgggctttgcatacagtgggcgc

SEQ ID NO: 435994 - DNA, 25 bp, Homo sapien
gagtcgcctgggacttcagggacaa

SEQ ID NO: 435995 - DNA, 25 bp, Homo sapien
tgggcgctttataaatgcctgctga

SEQ ID NO: 435996 - DNA, 25 bp, Homo sapien
tcagccagaaagcaggcaggacaca

SEQ ID NO: 435997 - DNA, 25 bp, Homo sapien
agccagaaagcaggcaggacacacg

SEQ ID NO: 435998 - DNA, 25 bp, Homo sapien
cagccagaaagcaggcaggacacac

SEQ ID NO: 435999 - DNA, 25 bp, Homo sapien
ccagaaagcaggcaggacacacgcc

SEQ ID NO: 436000 - DNA, 25 bp, Homo sapien
gcagtcaatcctggcctgagcaaag

SEQ ID NO: 436001 - DNA, 25 bp, Homo sapien
aaggccatggcctatgtggactctg

SEQ ID NO: 436002 - DNA, 25 bp, Homo sapien
gaaggaggagcagtcaatcctggcc

SEQ ID NO: 436003 - DNA, 25 bp, Homo sapien
gggacaccagaaggccatggcctat

SEQ ID NO: 436004 - DNA, 25 bp, Homo sapien
gttcctctactgttgaccacagtgt

SEQ ID NO: 436005 - DNA, 25 bp, Homo sapien
tgatgttccatacccccaccagtgt

SEQ ID NO: 436006 - DNA, 25 bp, Homo sapien
cacactggggcagagtgttcctcta

SEQ ID NO: 436007 - DNA, 25 bp, Homo sapien
gaccacagtgtatgtgatgttccat

SEQ ID NO: 436008 - DNA, 25 bp, Homo sapien
tcacggccacattttgtaccttggg

SEQ ID NO: 436009 - DNA, 25 bp, Homo sapien
agggctcacggccacattttgtacc

SEQ ID NO: 436010 - DNA, 25 bp, Homo sapien
cggccacattttgtaccttgggtag

SEQ ID NO: 436011 - DNA, 25 bp, Homo sapien
cacattttgtaccttgggtaggtag

SEQ ID NO: 436012 - DNA, 25 bp, Homo sapien
tctctcctgtaaagactggtaaggc

SEQ ID NO: 436013 - DNA, 25 bp, Homo sapien
cctggaagaaagcaatagcctgaga

SEQ ID NO: 436014 - DNA, 25 bp, Homo sapien
ccgatgaagggcttgagaccaatgc

SEQ ID NO: 436015 - DNA, 25 bp, Homo sapien
taagacaacagttactgccagctgg

SEQ ID NO: 436016 - DNA, 25 bp, Homo sapien
tagagtcatagttcaggagtcacag

SEQ ID NO: 436017 - DNA, 25 bp, Homo sapien
cctgacctctcagcggttctggaga

SEQ ID NO: 436018 - DNA, 25 bp, Homo sapien
agcaacagctggactacttcaggat

SEQ ID NO: 436019 - DNA, 25 bp, Homo sapien
aggatttctgctgaaaacccctggg

SEQ ID NO: 436020 - DNA, 25 bp, Homo sapien
acacaggtaccaggctcagatctca

SEQ ID NO: 436021 - DNA, 25 bp, Homo sapien
agacacaacagggagacagcaccag

SEQ ID NO: 436022 - DNA, 25 bp, Homo sapien
gacacaacagggagacagcaccaga

SEQ ID NO: 436023 - DNA, 25 bp, Homo sapien
gctgctgacacaggtaccaggctca

SEQ ID NO: 436024 - DNA, 25 bp, Homo sapien
cggagatcatgttgacaggcgagaa

SEQ ID NO: 436025 - DNA, 25 bp, Homo sapien
atcatgttgacaggcgagaaggaga

SEQ ID NO: 436026 - DNA, 25 bp, Homo sapien
tgacaggcgagaaggagaacacgct

SEQ ID NO: 436027 - DNA, 25 bp, Homo sapien
tgtttgacggcggagatcatgttga

SEQ ID NO: 436028 - DNA, 25 bp, Homo sapien
gagcttggggggcgcagcacggggg

SEQ ID NO: 436029 - DNA, 25 bp, Homo sapien
gcttggggggcgcagcacgggggcg

SEQ ID NO: 436030 - DNA, 25 bp, Homo sapien
agcttggggggcgcagcacgggggc

SEQ ID NO: 436031 - DNA, 25 bp, Homo sapien
agaagagcaggttagccagcatgag

SEQ ID NO: 436032 - DNA, 25 bp, Homo sapien
gagcaggttagccagcatgaggcac

SEQ ID NO: 436033 - DNA, 25 bp, Homo sapien
cactggtgagatgtggacagagcag

SEQ ID NO: 436034 - DNA, 25 bp, Homo sapien
aggttagccagcatgaggcactggt

SEQ ID NO: 436035 - DNA, 25 bp, Homo sapien
agcgtccccggactctcatacaggg

SEQ ID NO: 436036 - DNA, 25 bp, Homo sapien
cgattctgtgggacgctgcggacat

SEQ ID NO: 436037 - DNA, 25 bp, Homo sapien
tatcatcctcagttgttctcccagg

SEQ ID NO: 436038 - DNA, 25 bp, Homo sapien
tgccctcagggtagccgattctgtg

SEQ ID NO: 436039 - DNA, 25 bp, Homo sapien
ggagccataagccatgtgccacctg

SEQ ID NO: 436040 - DNA, 25 bp, Homo sapien
ggaaaaaggagccataagccatgtg

SEQ ID NO: 436041 - DNA, 25 bp, Homo sapien
aaaaaggagccataagccatgtgcc

SEQ ID NO: 436042 - DNA, 25 bp, Homo sapien
ccatgtgccacctgggaagccacct

SEQ ID NO: 436043 - DNA, 25 bp, Homo sapien
cccccgggctggagagtgaaacttg

SEQ ID NO: 436044 - DNA, 25 bp, Homo sapien
cccgggctggagagtgaaacttgtc

SEQ ID NO: 436045 - DNA, 25 bp, Homo sapien
ccccgggctggagagtgaaacttgt

SEQ ID NO: 436046 - DNA, 25 bp, Homo sapien
tgccaccatccggggtgtggctgtg

SEQ ID NO: 436047 - DNA, 25 bp, Homo sapien
tctgtgccaccatccggggtgtggc

SEQ ID NO: 436048 - DNA, 25 bp, Homo sapien
ccagtccgggctccatgggaacagc

SEQ ID NO: 436049 - DNA, 25 bp, Homo sapien
ccaccatccggggtgtggctgtgaa

SEQ ID NO: 436050 - DNA, 25 bp, Homo sapien
ggtgaaggcctctccccgttcagct

SEQ ID NO: 436051 - DNA, 25 bp, Homo sapien
tgactaccccaagacagggaggcga

SEQ ID NO: 436052 - DNA, 25 bp, Homo sapien
tgcgatgctgtcctgccaagagcat

SEQ ID NO: 436053 - DNA, 25 bp, Homo sapien
caccctttcgctgcagagaagttgg

SEQ ID NO: 436054 - DNA, 25 bp, Homo sapien
aagcatgagagtgcaggtctcaaag

SEQ ID NO: 436055 - DNA, 25 bp, Homo sapien
gcatgatgcggcaagcatgagagtg

SEQ ID NO: 436056 - DNA, 25 bp, Homo sapien
cacagggaggcatgatgcggcaagc

SEQ ID NO: 436057 - DNA, 25 bp, Homo sapien
gggaggcatgatgcggcaagcatga

SEQ ID NO: 436058 - DNA, 25 bp, Homo sapien
caaacttagcagagcagaatgtgag

SEQ ID NO: 436059 - DNA, 25 bp, Homo sapien
gaagaccccaaatacaggaggcctg

SEQ ID NO: 436060 - DNA, 25 bp, Homo sapien
cagagtccatgagacatccactggg

SEQ ID NO: 436061 - DNA, 25 bp, Homo sapien
cactgggggaagaccccaaatacag

SEQ ID NO: 436062 - DNA, 25 bp, Homo sapien
cagatttatgtaagctccaggccaa

SEQ ID NO: 436063 - DNA, 25 bp, Homo sapien
tccaggctctgtagggatgaatgcc

SEQ ID NO: 436064 - DNA, 25 bp, Homo sapien
catttattgggtagtgggtctccac

SEQ ID NO: 436065 - DNA, 25 bp, Homo sapien
tacttgtgtgcaaggcctcaggact

SEQ ID NO: 436066 - DNA, 25 bp, Homo sapien
ttcaacaagaaatagcctgggcagt

SEQ ID NO: 436067 - DNA, 25 bp, Homo sapien
cttcaacaagaaatagcctgggcag

SEQ ID NO: 436068 - DNA, 25 bp, Homo sapien
tacttcaacaagaaatagcctgggc

SEQ ID NO: 436069 - DNA, 25 bp, Homo sapien
acttcaacaagaaatagcctgggca

SEQ ID NO: 436070 - DNA, 25 bp, Homo sapien
ccacagtttgtcttggcaaggtcag

SEQ ID NO: 436071 - DNA, 25 bp, Homo sapien
caggtttgggcctgctcagccactc

SEQ ID NO: 436072 - DNA, 25 bp, Homo sapien
acattccaccggcagccacagtttg

SEQ ID NO: 436073 - DNA, 25 bp, Homo sapien
gtttgggcctgctcagccactcgac

SEQ ID NO: 436074 - DNA, 25 bp, Homo sapien
gactctgtagggctctgtgttgtgg

SEQ ID NO: 436075 - DNA, 25 bp, Homo sapien
ctgactctgtagggctctgtgttgt

SEQ ID NO: 436076 - DNA, 25 bp, Homo sapien
ctctgtagggctctgtgttgtggaa

SEQ ID NO: 436077 - DNA, 25 bp, Homo sapien
tctgtagggctctgtgttgtggaac

SEQ ID NO: 436078 - DNA, 25 bp, Homo sapien
tagggactggctcagcgtcactgat

SEQ ID NO: 436079 - DNA, 25 bp, Homo sapien
ttagggactggctcagcgtcactga

SEQ ID NO: 436080 - DNA, 25 bp, Homo sapien
cttagggactggctcagcgtcactg

SEQ ID NO: 436081 - DNA, 25 bp, Homo sapien
tagctctttcattggcgttttgtag

SEQ ID NO: 436082 - DNA, 25 bp, Homo sapien
cagatcctgcacatcttatgttaga

SEQ ID NO: 436083 - DNA, 25 bp, Homo sapien
gaacactgtgtgtttattcgcttat

SEQ ID NO: 436084 - DNA, 25 bp, Homo sapien
tttttcgagctcttatcaatggtat

SEQ ID NO: 436085 - DNA, 25 bp, Homo sapien
cgttggtcttgttaaggtccagcca

SEQ ID NO: 436086 - DNA, 25 bp, Homo sapien
tcccagtatcttccgaccagctgat

SEQ ID NO: 436087 - DNA, 25 bp, Homo sapien
gggtaacttctttggcactcgagca

SEQ ID NO: 436088 - DNA, 25 bp, Homo sapien
cttctgaagcttggacatacagctg

SEQ ID NO: 436089 - DNA, 25 bp, Homo sapien
cctgcaatttcgtgctcaccaagac

SEQ ID NO: 436090 - DNA, 25 bp, Homo sapien
ggacagaaggattgatacctgcggt

SEQ ID NO: 436091 - DNA, 25 bp, Homo sapien
ttaagagccctagggcaggctggac

SEQ ID NO: 436092 - DNA, 25 bp, Homo sapien
agactcccaaacagaggctgcgcga

SEQ ID NO: 436093 - DNA, 25 bp, Homo sapien
ctggcagacctttccatccggggtt

SEQ ID NO: 436094 - DNA, 25 bp, Homo sapien
ttgggctggcagacctttccatccg

SEQ ID NO: 436095 - DNA, 25 bp, Homo sapien
gtcttcttgggctggcagacctttc

SEQ ID NO: 436096 - DNA, 25 bp, Homo sapien
gcagacctttccatccggggtttca

SEQ ID NO: 436097 - DNA, 25 bp, Homo sapien
agcattctgggagtgggcacccggg

SEQ ID NO: 436098 - DNA, 25 bp, Homo sapien
actttggtcagcattctgggagtgg

SEQ ID NO: 436099 - DNA, 25 bp, Homo sapien
cctcccactttggtcagcattctgg

SEQ ID NO: 436100 - DNA, 25 bp, Homo sapien
ccactttggtcagcattctgggagt

SEQ ID NO: 436101 - DNA, 25 bp, Homo sapien
ggggaattaggctcctgcagagtct

SEQ ID NO: 436102 - DNA, 25 bp, Homo sapien
gctcagagtggggaattaggctcct

SEQ ID NO: 436103 - DNA, 25 bp, Homo sapien
gattataagggtgagagtaggggaa

SEQ ID NO: 436104 - DNA, 25 bp, Homo sapien
tagggcccgggcagacagaagggtg

SEQ ID NO: 436105 - DNA, 25 bp, Homo sapien
gtggaggtgacgggaagacctagtg

SEQ ID NO: 436106 - DNA, 25 bp, Homo sapien
gaggtggaggtgacgggaagaccta

SEQ ID NO: 436107 - DNA, 25 bp, Homo sapien
gagaggtggaggtgacgggaagacc

SEQ ID NO: 436108 - DNA, 25 bp, Homo sapien
gagagaggtggaggtgacgggaaga

SEQ ID NO: 436109 - DNA, 25 bp, Homo sapien
gtgcttcgggtctgggtaagcagag

SEQ ID NO: 436110 - DNA, 25 bp, Homo sapien
aggtggacgcactggactacctgac

SEQ ID NO: 436111 - DNA, 25 bp, Homo sapien
ggaggaactgggatcggatcctcac

SEQ ID NO: 436112 - DNA, 25 bp, Homo sapien
ttggaggaactgggatcggatcctc

SEQ ID NO: 436113 - DNA, 25 bp, Homo sapien
gtggacgcactggactacctgaccc

SEQ ID NO: 436114 - DNA, 25 bp, Homo sapien
aaaagactgcctggattgtcagtcc

SEQ ID NO: 436115 - DNA, 25 bp, Homo sapien
tggtggaaaagactgcctggattgt

SEQ ID NO: 436116 - DNA, 25 bp, Homo sapien
cctggattgtcagtcctagtgcccc

SEQ ID NO: 436117 - DNA, 25 bp, Homo sapien
ccagtggtggaaaagactgcctgga

SEQ ID NO: 436118 - DNA, 25 bp, Homo sapien
cccctggtgagaagtttgcgctgtg

SEQ ID NO: 436119 - DNA, 25 bp, Homo sapien
ggcccctggtgagaagtttgcgctg

SEQ ID NO: 436120 - DNA, 25 bp, Homo sapien
agaagtttgcgctgtggcagagtgt

SEQ ID NO: 436121 - DNA, 25 bp, Homo sapien
ggtgagaagtttgcgctgtggcaga

SEQ ID NO: 436122 - DNA, 25 bp, Homo sapien
catttgcaggagtagagcctcctgc

SEQ ID NO: 436123 - DNA, 25 bp, Homo sapien
atttgcaggagtagagcctcctgct

SEQ ID NO: 436124 - DNA, 25 bp, Homo sapien
ttgcaggagtagagcctcctgctgt

SEQ ID NO: 436125 - DNA, 25 bp, Homo sapien
tttgcaggagtagagcctcctgctg

SEQ ID NO: 436126 - DNA, 25 bp, Homo sapien
cctggaggctaagttgtcctgagac

SEQ ID NO: 436127 - DNA, 25 bp, Homo sapien
agtgcgtcctggaggctaagttgtc

SEQ ID NO: 436128 - DNA, 25 bp, Homo sapien
gaggctaagttgtcctgagactgta

SEQ ID NO: 436129 - DNA, 25 bp, Homo sapien
cgtcctggaggctaagttgtcctga

SEQ ID NO: 436130 - DNA, 25 bp, Homo sapien
gaagaagggtggtcattgtatattt

SEQ ID NO: 436131 - DNA, 25 bp, Homo sapien
atgaagaagggtggtcattgtatat

SEQ ID NO: 436132 - DNA, 25 bp, Homo sapien
tgaagaagggtggtcattgtatatt

SEQ ID NO: 436133 - DNA, 25 bp, Homo sapien
ctctgggcagttacctaagtcatgt

SEQ ID NO: 436134 - DNA, 25 bp, Homo sapien
tgttgcttcctgcagcgcccaggac

SEQ ID NO: 436135 - DNA, 25 bp, Homo sapien
ttgcttcctgcagcgcccaggacgg

SEQ ID NO: 436136 - DNA, 25 bp, Homo sapien
ggcagttacctaagtcatgttgctt

SEQ ID NO: 436137 - DNA, 25 bp, Homo sapien
gccagggtcttgaagatgcctggga

SEQ ID NO: 436138 - DNA, 25 bp, Homo sapien
ccagggtcttgaagatgcctgggac

SEQ ID NO: 436139 - DNA, 25 bp, Homo sapien
agagggccagggtcttgaagatgcc

SEQ ID NO: 436140 - DNA, 25 bp, Homo sapien
ggggagagggccagggtcttgaaga

SEQ ID NO: 436141 - DNA, 25 bp, Homo sapien
gttgccgccagttcgaggtgctcca

SEQ ID NO: 436142 - DNA, 25 bp, Homo sapien
tcgccagccccgatggtatctgtct

SEQ ID NO: 436143 - DNA, 25 bp, Homo sapien
caaatcctgagtgtcgcctgggtga

SEQ ID NO: 436144 - DNA, 25 bp, Homo sapien
cagcaggtagagtatcccctccaga

SEQ ID NO: 436145 - DNA, 25 bp, Homo sapien
aaaagtttgtcggactcggtggcag

SEQ ID NO: 436146 - DNA, 25 bp, Homo sapien
gaaggcatctaatccgtggcatgga

SEQ ID NO: 436147 - DNA, 25 bp, Homo sapien
aacgtccctggctagcaatgcatgg

SEQ ID NO: 436148 - DNA, 25 bp, Homo sapien
tgaacgaacggccagcattcagggc

SEQ ID NO: 436149 - DNA, 25 bp, Homo sapien
agggctctccttgcgcgctgtcggt

SEQ ID NO: 436150 - DNA, 25 bp, Homo sapien
ctgtcggtccccagtccgcgtgcgg

SEQ ID NO: 436151 - DNA, 25 bp, Homo sapien
ggacatcggcgcttcagggccgcca

SEQ ID NO: 436152 - DNA, 25 bp, Homo sapien
agcacatgccccgtgtggatgccca

SEQ ID NO: 436153 - DNA, 25 bp, Homo sapien
ggcggctggccgggcagaggtttcc

SEQ ID NO: 436154 - DNA, 25 bp, Homo sapien
tggccaggcagggggctgatccccc

SEQ ID NO: 436155 - DNA, 25 bp, Homo sapien
ggctggccgggcagaggtttcctca

SEQ ID NO: 436156 - DNA, 25 bp, Homo sapien
ctggccaggcagggggctgatcccc

SEQ ID NO: 436157 - DNA, 25 bp, Homo sapien
tttgcaaggatacaatatcacgtat

SEQ ID NO: 436158 - DNA, 25 bp, Homo sapien
gagaggttcataactttcatacatg

SEQ ID NO: 436159 - DNA, 25 bp, Homo sapien
taatggtggaaacttagaagcaagc

SEQ ID NO: 436160 - DNA, 25 bp, Homo sapien
ggaagaggccctaacctgataacat

SEQ ID NO: 436161 - DNA, 25 bp, Homo sapien
tcacagcagattgatttgaggttct

SEQ ID NO: 436162 - DNA, 25 bp, Homo sapien
ggagctacagaagttagggccatga

SEQ ID NO: 436163 - DNA, 25 bp, Homo sapien
cattggtacccagcagagagattaa

SEQ ID NO: 436164 - DNA, 25 bp, Homo sapien
gacagaacgatgctcatgctttgga

SEQ ID NO: 436165 - DNA, 25 bp, Homo sapien
gctgtgcaccgacggctaacctgga

SEQ ID NO: 436166 - DNA, 25 bp, Homo sapien
gggagctttgcagaaccgactggcc

SEQ ID NO: 436167 - DNA, 25 bp, Homo sapien
cagcgacgctcgcatggagagcgct

SEQ ID NO: 436168 - DNA, 25 bp, Homo sapien
taacctggacccacggtctctgcgg

SEQ ID NO: 436169 - DNA, 25 bp, Homo sapien
agacggcagctgggaagcaccgagg

SEQ ID NO: 436170 - DNA, 25 bp, Homo sapien
gcagacggcagctgggaagcaccga

SEQ ID NO: 436171 - DNA, 25 bp, Homo sapien
gacggcagctgggaagcaccgaggg

SEQ ID NO: 436172 - DNA, 25 bp, Homo sapien
cagacggcagctgggaagcaccgag

SEQ ID NO: 436173 - DNA, 25 bp, Homo sapien
agtgggttccagttcgccgtgtagc

SEQ ID NO: 436174 - DNA, 25 bp, Homo sapien
cagagtccccgagtgggttccagtt

SEQ ID NO: 436175 - DNA, 25 bp, Homo sapien
tccagttcgccgtgtagcagtccat

SEQ ID NO: 436176 - DNA, 25 bp, Homo sapien
gcagagtccccgagtgggttccagt

SEQ ID NO: 436177 - DNA, 25 bp, Homo sapien
ttttttcatactgcacaggcatatt

SEQ ID NO: 436178 - DNA, 25 bp, Homo sapien
attttttcatactgcacaggcatat

SEQ ID NO: 436179 - DNA, 25 bp, Homo sapien
aattttttcatactgcacaggcata

SEQ ID NO: 436180 - DNA, 25 bp, Homo sapien
caggcaatccctgagttcctccttc

SEQ ID NO: 436181 - DNA, 25 bp, Homo sapien
aggcaatccctgagttcctccttca

SEQ ID NO: 436182 - DNA, 25 bp, Homo sapien
cggaagcagagtatatatcgagcac

SEQ ID NO: 436183 - DNA, 25 bp, Homo sapien
gaggcatgccggaagcagagtatat

SEQ ID NO: 436184 - DNA, 25 bp, Homo sapien
gagtatatatcgagcactggcctca

SEQ ID NO: 436185 - DNA, 25 bp, Homo sapien
agcactggcctcacactagcagctt

SEQ ID NO: 436186 - DNA, 25 bp, Homo sapien
tgtctccggaagtcaccatgaagcc

SEQ ID NO: 436187 - DNA, 25 bp, Homo sapien
gggacaccacgggtccactcttcca

SEQ ID NO: 436188 - DNA, 25 bp, Homo sapien
cccatgctgaagtgtctccggaagt

SEQ ID NO: 436189 - DNA, 25 bp, Homo sapien
tgaagcccataaaccagtacagcac

SEQ ID NO: 436190 - DNA, 25 bp, Homo sapien
gcacctctggcatccggcggagttt

SEQ ID NO: 436191 - DNA, 25 bp, Homo sapien
caaactcagtgtgaaagatccgggc

SEQ ID NO: 436192 - DNA, 25 bp, Homo sapien
tccgggcatccagaacccggttctg

SEQ ID NO: 436193 - DNA, 25 bp, Homo sapien
aggatggccactccggaaccaaact

SEQ ID NO: 436194 - DNA, 25 bp, Homo sapien
tccaagaggtaaaggtcaggcccca

SEQ ID NO: 436195 - DNA, 25 bp, Homo sapien
catggtccaagaggtaaaggtcagg

SEQ ID NO: 436196 - DNA, 25 bp, Homo sapien
gctgcatggtccaagaggtaaaggt

SEQ ID NO: 436197 - DNA, 25 bp, Homo sapien
tggtccaagaggtaaaggtcaggcc

SEQ ID NO: 436198 - DNA, 25 bp, Homo sapien
ccaggtgtcggtaggtgaaggagac

SEQ ID NO: 436199 - DNA, 25 bp, Homo sapien
agacagccatctgtaggaagctgct

SEQ ID NO: 436200 - DNA, 25 bp, Homo sapien
gtgaagagtgccaggtgtcggtagg

SEQ ID NO: 436201 - DNA, 25 bp, Homo sapien
gagtgccaggtgtcggtaggtgaag

SEQ ID NO: 436202 - DNA, 25 bp, Homo sapien
gtgcccggatgttgcagttgaactc

SEQ ID NO: 436203 - DNA, 25 bp, Homo sapien
tctgctttggaggtgcccggatgtt

SEQ ID NO: 436204 - DNA, 25 bp, Homo sapien
cagaccatctgctttggaggtgccc

SEQ ID NO: 436205 - DNA, 25 bp, Homo sapien
gatgttgcagttgaactcacatagc

SEQ ID NO: 436206 - DNA, 25 bp, Homo sapien
cctctccttgctacgaggacggctg

SEQ ID NO: 436207 - DNA, 25 bp, Homo sapien
aggccaccaccacggccctctcctt

SEQ ID NO: 436208 - DNA, 25 bp, Homo sapien
ctccttgctacgaggacggctgcac

SEQ ID NO: 436209 - DNA, 25 bp, Homo sapien
ggccctctccttgctacgaggacgg

SEQ ID NO: 436210 - DNA, 25 bp, Homo sapien
ggatgctctcgggtgcatcgcccac

SEQ ID NO: 436211 - DNA, 25 bp, Homo sapien
tggatgctctcgggtgcatcgccca

SEQ ID NO: 436212 - DNA, 25 bp, Homo sapien
tcatgcaggaactcgtgggtgctgc

SEQ ID NO: 436213 - DNA, 25 bp, Homo sapien
cctcatgcaggaactcgtgggtgct

SEQ ID NO: 436214 - DNA, 25 bp, Homo sapien
atgcggaccccatcgagctcaggca

SEQ ID NO: 436215 - DNA, 25 bp, Homo sapien
ctgcgggagaagatgcggaccccat

SEQ ID NO: 436216 - DNA, 25 bp, Homo sapien
ggccattgaggcaattttgaagatt

SEQ ID NO: 436217 - DNA, 25 bp, Homo sapien
ccattgaggcaattttgaagatttc

SEQ ID NO: 436218 - DNA, 25 bp, Homo sapien
ggggccattgaggcaattttgaaga

SEQ ID NO: 436219 - DNA, 25 bp, Homo sapien
gagcagcgccccgggggccattgag

SEQ ID NO: 436220 - DNA, 25 bp, Homo sapien
tctggcccctaaccattctgggttg

SEQ ID NO: 436221 - DNA, 25 bp, Homo sapien
tggcccctaaccattctgggttgtg

SEQ ID NO: 436222 - DNA, 25 bp, Homo sapien
catctggcccctaaccattctgggt

SEQ ID NO: 436223 - DNA, 25 bp, Homo sapien
acatctggcccctaaccattctggg

SEQ ID NO: 436224 - DNA, 25 bp, Homo sapien
gagcagtccagagccagggcatcat

SEQ ID NO: 436225 - DNA, 25 bp, Homo sapien
gggagcagtccagagccagggcatc

SEQ ID NO: 436226 - DNA, 25 bp, Homo sapien
ctggtggggagcagtccagagccag

SEQ ID NO: 436227 - DNA, 25 bp, Homo sapien
tggggagcagtccagagccagggca

SEQ ID NO: 436228 - DNA, 25 bp, Homo sapien
tcaatgcactgctgcacggcctggg

SEQ ID NO: 436229 - DNA, 25 bp, Homo sapien
cctcaatgcactgctgcacggcctg

SEQ ID NO: 436230 - DNA, 25 bp, Homo sapien
gcctcaatgcactgctgcacggcct

SEQ ID NO: 436231 - DNA, 25 bp, Homo sapien
ctcaatgcactgctgcacggcctgg

SEQ ID NO: 436232 - DNA, 25 bp, Homo sapien
ggcgataggagagagcttccctgct

SEQ ID NO: 436233 - DNA, 25 bp, Homo sapien
gagccagagggcgataggagagagc

SEQ ID NO: 436234 - DNA, 25 bp, Homo sapien
agaagagccagagggcgataggaga

SEQ ID NO: 436235 - DNA, 25 bp, Homo sapien
cagagggcgataggagagagcttcc

SEQ ID NO: 436236 - DNA, 25 bp, Homo sapien
caggaaacactttccgaaggaggcg

SEQ ID NO: 436237 - DNA, 25 bp, Homo sapien
gtgatagtcccgaacagcattgagc

SEQ ID NO: 436238 - DNA, 25 bp, Homo sapien
gagcgggatcccgatgtgatagtcc

SEQ ID NO: 436239 - DNA, 25 bp, Homo sapien
gaagctgtcgggtggaaatctgtcc

SEQ ID NO: 436240 - DNA, 25 bp, Homo sapien
gacgcatctccagccccttcccctg

SEQ ID NO: 436241 - DNA, 25 bp, Homo sapien
ctgcagacgcatctccagccccttc

SEQ ID NO: 436242 - DNA, 25 bp, Homo sapien
catctccagccccttcccctgccac

SEQ ID NO: 436243 - DNA, 25 bp, Homo sapien
acgcatctccagccccttcccctgc

SEQ ID NO: 436244 - DNA, 25 bp, Homo sapien
gagaataagccccgcttgccaggta

SEQ ID NO: 436245 - DNA, 25 bp, Homo sapien
gttggagaataagccccgcttgcca

SEQ ID NO: 436246 - DNA, 25 bp, Homo sapien
agaataagccccgcttgccaggtac

SEQ ID NO: 436247 - DNA, 25 bp, Homo sapien
ccagttggagaataagccccgcttg

SEQ ID NO: 436248 - DNA, 25 bp, Homo sapien
cagcacctggatggtgagctgctta

SEQ ID NO: 436249 - DNA, 25 bp, Homo sapien
cagcagcacctggatggtgagctgc

SEQ ID NO: 436250 - DNA, 25 bp, Homo sapien
gcacctggatggtgagctgcttata

SEQ ID NO: 436251 - DNA, 25 bp, Homo sapien
cacctggatggtgagctgcttatat

SEQ ID NO: 436252 - DNA, 25 bp, Homo sapien
aaggcgcaagtactcgcatatctgg

SEQ ID NO: 436253 - DNA, 25 bp, Homo sapien
ctgtacttcaggaaggcgcaagtac

SEQ ID NO: 436254 - DNA, 25 bp, Homo sapien
tactcgcatatctggatggccaggg

SEQ ID NO: 436255 - DNA, 25 bp, Homo sapien
gccagggggtaaagtctccgcaaca

SEQ ID NO: 436256 - DNA, 25 bp, Homo sapien
gtagcaggcccagtgggccaggatc

SEQ ID NO: 436257 - DNA, 25 bp, Homo sapien
agtgggccaggatcctgctgacgcc

SEQ ID NO: 436258 - DNA, 25 bp, Homo sapien
aggcccagtgggccaggatcctgct

SEQ ID NO: 436259 - DNA, 25 bp, Homo sapien
ttgtagcaggcccagtgggccagga

SEQ ID NO: 436260 - DNA, 25 bp, Homo sapien
cagggcctggaatcctctaaatgcc

SEQ ID NO: 436261 - DNA, 25 bp, Homo sapien
gggcctggaatcctctaaatgccct

SEQ ID NO: 436262 - DNA, 25 bp, Homo sapien
gcctggaatcctctaaatgcccttg

SEQ ID NO: 436263 - DNA, 25 bp, Homo sapien
tggaatcctctaaatgcccttggac

SEQ ID NO: 436264 - DNA, 25 bp, Homo sapien
agcttctggttaatggctcgagcca

SEQ ID NO: 436265 - DNA, 25 bp, Homo sapien
aaccataggctcgtgcagcaatgtc

SEQ ID NO: 436266 - DNA, 25 bp, Homo sapien
gttaatggctcgagccacatcctca

SEQ ID NO: 436267 - DNA, 25 bp, Homo sapien
aatgtcggagtaagagacaccaggc

SEQ ID NO: 436268 - DNA, 25 bp, Homo sapien
ttgatggccagctccgtgcggccac

SEQ ID NO: 436269 - DNA, 25 bp, Homo sapien
gagtgtctgtggagggctgggcacc

SEQ ID NO: 436270 - DNA, 25 bp, Homo sapien
gtgtctgtggagggctgggcaccca

SEQ ID NO: 436271 - DNA, 25 bp, Homo sapien
cagagtgtctgtggagggctgggca

SEQ ID NO: 436272 - DNA, 25 bp, Homo sapien
gtctgtggagggctgggcacccaca

SEQ ID NO: 436273 - DNA, 25 bp, Homo sapien
aaggagctggcatgggggccctgaa

SEQ ID NO: 436274 - DNA, 25 bp, Homo sapien
gcatgggggccctgaacaaccacat

SEQ ID NO: 436275 - DNA, 25 bp, Homo sapien
tgtgaggtgagaaggaaggcacaga

SEQ ID NO: 436276 - DNA, 25 bp, Homo sapien
ctggcatgggggccctgaacaacca

SEQ ID NO: 436277 - DNA, 25 bp, Homo sapien
tgcttagtgccagtttgctcctctt

SEQ ID NO: 436278 - DNA, 25 bp, Homo sapien
tgctcccctgagcgtggctcatact

SEQ ID NO: 436279 - DNA, 25 bp, Homo sapien
aggtcagtgtccccgctctcgatgg

SEQ ID NO: 436280 - DNA, 25 bp, Homo sapien
tcgatggccttgcttagtgccagtt

SEQ ID NO: 436281 - DNA, 25 bp, Homo sapien
tgaaaaaatctcctcggttcagctc

SEQ ID NO: 436282 - DNA, 25 bp, Homo sapien
aaaatctcctcggttcagctcgttc

SEQ ID NO: 436283 - DNA, 25 bp, Homo sapien
gaaaaaatctcctcggttcagctcg

SEQ ID NO: 436284 - DNA, 25 bp, Homo sapien
aaaaaatctcctcggttcagctcgt

SEQ ID NO: 436285 - DNA, 25 bp, Homo sapien
ttctgcagcatagctggctcggatg

SEQ ID NO: 436286 - DNA, 25 bp, Homo sapien
gtcatcctgattgtaaaggtccttc

SEQ ID NO: 436287 - DNA, 25 bp, Homo sapien
gctggctcggatgtggaagctgccc

SEQ ID NO: 436288 - DNA, 25 bp, Homo sapien
gtggaagctgcccaattcctggtga

SEQ ID NO: 436289 - DNA, 25 bp, Homo sapien
ccttgtagaaggcatcggcggctgt

SEQ ID NO: 436290 - DNA, 25 bp, Homo sapien
ttgtagaaggcatcggcggctgtct

SEQ ID NO: 436291 - DNA, 25 bp, Homo sapien
agagctgctactcgcccctcaatac

SEQ ID NO: 436292 - DNA, 25 bp, Homo sapien
gcaaactcattcttggccttgtaga

SEQ ID NO: 436293 - DNA, 25 bp, Homo sapien
gcacgcttgttgtgaccgccaagaa

SEQ ID NO: 436294 - DNA, 25 bp, Homo sapien
gcagccgtaggagccgcatttgatc

SEQ ID NO: 436295 - DNA, 25 bp, Homo sapien
ccgccaagaatgagggtggtaactg

SEQ ID NO: 436296 - DNA, 25 bp, Homo sapien
tagagacaggtctaggaactggccc

SEQ ID NO: 436297 - DNA, 25 bp, Homo sapien
ttggaggtgttgcaggagaggcagg

SEQ ID NO: 436298 - DNA, 25 bp, Homo sapien
cttggaggtgttgcaggagaggcag

SEQ ID NO: 436299 - DNA, 25 bp, Homo sapien
gggcttggaggtgttgcaggagagg

SEQ ID NO: 436300 - DNA, 25 bp, Homo sapien
gcttggaggtgttgcaggagaggca

SEQ ID NO: 436301 - DNA, 25 bp, Homo sapien
caggtagccaatgggtgatttcttg

SEQ ID NO: 436302 - DNA, 25 bp, Homo sapien
tagccaatgggtgatttcttgctct

SEQ ID NO: 436303 - DNA, 25 bp, Homo sapien
gccaatgggtgatttcttgctcttg

SEQ ID NO: 436304 - DNA, 25 bp, Homo sapien
ggtagccaatgggtgatttcttgct

SEQ ID NO: 436305 - DNA, 25 bp, Homo sapien
tctcttacgagcagaggcgcaatgc

SEQ ID NO: 436306 - DNA, 25 bp, Homo sapien
ttaccccttgcaacaggcgttcctg

SEQ ID NO: 436307 - DNA, 25 bp, Homo sapien
tgtgatctcaacattcttagggcag

SEQ ID NO: 436308 - DNA, 25 bp, Homo sapien
gagaaggtaatgcacagccctcctg

SEQ ID NO: 436309 - DNA, 25 bp, Homo sapien
gtttcatgcagatctccacaaaagg

SEQ ID NO: 436310 - DNA, 25 bp, Homo sapien
ggacccacgcgggaagcatacttct

SEQ ID NO: 436311 - DNA, 25 bp, Homo sapien
agccttgaccttctgctcgggaccc

SEQ ID NO: 436312 - DNA, 25 bp, Homo sapien
acttcttggcttcgtatttgttatg

SEQ ID NO: 436313 - DNA, 25 bp, Homo sapien
ggctgctcaagggcacaaaccctgc

SEQ ID NO: 436314 - DNA, 25 bp, Homo sapien
gctgctcaagggcacaaaccctgcc

SEQ ID NO: 436315 - DNA, 25 bp, Homo sapien
ctgctcaagggcacaaaccctgcct

SEQ ID NO: 436316 - DNA, 25 bp, Homo sapien
gggctgctcaagggcacaaaccctg

SEQ ID NO: 436317 - DNA, 25 bp, Homo sapien
tctgtggctcccgtgcagtgggaca

SEQ ID NO: 436318 - DNA, 25 bp, Homo sapien
gcctcattccggtgttcgatggcca

SEQ ID NO: 436319 - DNA, 25 bp, Homo sapien
cgttgaatcttgtcagctgtggccc

SEQ ID NO: 436320 - DNA, 25 bp, Homo sapien
cagtgggacaatacgaggctcagct

SEQ ID NO: 436321 - DNA, 25 bp, Homo sapien
ggaaccccttgcttgagatgtacag

SEQ ID NO: 436322 - DNA, 25 bp, Homo sapien
cccgctcctcagcattgctctaggg

SEQ ID NO: 436323 - DNA, 25 bp, Homo sapien
aaccagacagccctgctaccatgcc

SEQ ID NO: 436324 - DNA, 25 bp, Homo sapien
gaggagctggatgaactatggccct

SEQ ID NO: 436325 - DNA, 25 bp, Homo sapien
cagtgggcaagagttccaaaggcca

SEQ ID NO: 436326 - DNA, 25 bp, Homo sapien
cacgtttcttgcgagtatggctgga

SEQ ID NO: 436327 - DNA, 25 bp, Homo sapien
tctaaaagcatggtcggccctaggg

SEQ ID NO: 436328 - DNA, 25 bp, Homo sapien
tatttggcccagagacaacttggaa

SEQ ID NO: 436329 - DNA, 25 bp, Homo sapien
caaggcaataagatagaaaggtgaa

SEQ ID NO: 436330 - DNA, 25 bp, Homo sapien
aagcaaggcaataagatagaaaggt

SEQ ID NO: 436331 - DNA, 25 bp, Homo sapien
ggcaataagatagaaaggtgaagta

SEQ ID NO: 436332 - DNA, 25 bp, Homo sapien
aataaagcaaggcaataagatagaa

SEQ ID NO: 436333 - DNA, 25 bp, Homo sapien
agctccctcgcccatcatcatcaca

SEQ ID NO: 436334 - DNA, 25 bp, Homo sapien
catcatcacagagtaaagggttatc

SEQ ID NO: 436335 - DNA, 25 bp, Homo sapien
ctcgcccatcatcatcacagagtaa

SEQ ID NO: 436336 - DNA, 25 bp, Homo sapien
gcccatcatcatcacagagtaaagg

SEQ ID NO: 436337 - DNA, 25 bp, Homo sapien
ctgcggcgcaaaaggggctcccagc

SEQ ID NO: 436338 - DNA, 25 bp, Homo sapien
gcaggaaacactgcggcgcaaaagg

SEQ ID NO: 436339 - DNA, 25 bp, Homo sapien
ggcaggaaacactgcggcgcaaaag

SEQ ID NO: 436340 - DNA, 25 bp, Homo sapien
acactgcggcgcaaaaggggctccc

SEQ ID NO: 436341 - DNA, 25 bp, Homo sapien
gaaggagtcccacattcggggcgcc

SEQ ID NO: 436342 - DNA, 25 bp, Homo sapien
gggttgtgaccggcggcaactcttc

SEQ ID NO: 436343 - DNA, 25 bp, Homo sapien
gaagggttgtgaccggcggcaactc

SEQ ID NO: 436344 - DNA, 25 bp, Homo sapien
gttgtgaccggcggcaactcttcat

SEQ ID NO: 436345 - DNA, 25 bp, Homo sapien
tggtgcgtgacacccgcgaagcaat

SEQ ID NO: 436346 - DNA, 25 bp, Homo sapien
catttcgccgggttgtgatccccag

SEQ ID NO: 436347 - DNA, 25 bp, Homo sapien
gaaagccgattacgcagtcgagata

SEQ ID NO: 436348 - DNA, 25 bp, Homo sapien
gaagcaatcgctcagtccatccagc

SEQ ID NO: 436349 - DNA, 25 bp, Homo sapien
ccgctttccagatgcgcatgctggg

SEQ ID NO: 436350 - DNA, 25 bp, Homo sapien
caccgagctgagtagaagcacaaca

SEQ ID NO: 436351 - DNA, 25 bp, Homo sapien
gagtagaagcacaacacatggtgct

SEQ ID NO: 436352 - DNA, 25 bp, Homo sapien
ccgctcgccaccgagctgagtagaa

SEQ ID NO: 436353 - DNA, 25 bp, Homo sapien
cccggccttggctgtaagacgcgtg

SEQ ID NO: 436354 - DNA, 25 bp, Homo sapien
cgcgtgttcattggctgttcagaga

SEQ ID NO: 436355 - DNA, 25 bp, Homo sapien
tgggcgggcgacagtgatggcggca

SEQ ID NO: 436356 - DNA, 25 bp, Homo sapien
tgttcagagacaggcgctggttggc

SEQ ID NO: 436357 - DNA, 25 bp, Homo sapien
gcgaggggaagcggctgaggggcga

SEQ ID NO: 436358 - DNA, 25 bp, Homo sapien
cgaggggaagcggctgaggggcgac

SEQ ID NO: 436359 - DNA, 25 bp, Homo sapien
ggcgaggggaagcggctgaggggcg

SEQ ID NO: 436360 - DNA, 25 bp, Homo sapien
cggcccgcggctccgagccccgcgg

SEQ ID NO: 436361 - DNA, 25 bp, Homo sapien
ggcggcggcggcggcctcgcctcca

SEQ ID NO: 436362 - DNA, 25 bp, Homo sapien
gcggcggcggcggcctcgcctccat

SEQ ID NO: 436363 - DNA, 25 bp, Homo sapien
tcagggccgccgcccggcccgcggc

SEQ ID NO: 436364 - DNA, 25 bp, Homo sapien
ggggacgaggacagcggctccgcct

SEQ ID NO: 436365 - DNA, 25 bp, Homo sapien
accgctggggacgaggacagcggct

SEQ ID NO: 436366 - DNA, 25 bp, Homo sapien
ggcgggaccgctggggacgaggaca

SEQ ID NO: 436367 - DNA, 25 bp, Homo sapien
agtcgggcgttgggcgggaccgctg

SEQ ID NO: 436368 - DNA, 25 bp, Homo sapien
cgggcgcagcggccgcgaacactca

SEQ ID NO: 436369 - DNA, 25 bp, Homo sapien
ccgggcgcagcggccgcgaacactc

SEQ ID NO: 436370 - DNA, 25 bp, Homo sapien
gggcgcagcggccgcgaacactcac

SEQ ID NO: 436371 - DNA, 25 bp, Homo sapien
gagccgctcccccttccggagccca

SEQ ID NO: 436372 - DNA, 25 bp, Homo sapien
aaagatggcttagggcttcgggctc

SEQ ID NO: 436373 - DNA, 25 bp, Homo sapien
ccggaaaagatggcttagggcttcg

SEQ ID NO: 436374 - DNA, 25 bp, Homo sapien
tggcttagggcttcgggctccgggc

SEQ ID NO: 436375 - DNA, 25 bp, Homo sapien
gaaaagatggcttagggcttcgggc

SEQ ID NO: 436376 - DNA, 25 bp, Homo sapien
tgcaaagttcctgggcagtcgcgag

SEQ ID NO: 436377 - DNA, 25 bp, Homo sapien
gagaatcaactctggcagtgccctg

SEQ ID NO: 436378 - DNA, 25 bp, Homo sapien
tggcctggtcccagaaggacgcatg

SEQ ID NO: 436379 - DNA, 25 bp, Homo sapien
gatgcacaatcaacctgcaggcgcc

SEQ ID NO: 436380 - DNA, 25 bp, Homo sapien
cactggtgaccaatgcctagattct

SEQ ID NO: 436381 - DNA, 25 bp, Homo sapien
tcagatctacactaatcagaggaag

SEQ ID NO: 436382 - DNA, 25 bp, Homo sapien
cagtcagatcatgagtcattaagga

SEQ ID NO: 436383 - DNA, 25 bp, Homo sapien
gaagattgtcacactgatcccttta

SEQ ID NO: 436384 - DNA, 25 bp, Homo sapien
gtattgctcatagtacttgtggatg

SEQ ID NO: 436385 - DNA, 25 bp, Homo sapien
tcacaagtattgctcatagtacttg

SEQ ID NO: 436386 - DNA, 25 bp, Homo sapien
caagtattgctcatagtacttgtgg

SEQ ID NO: 436387 - DNA, 25 bp, Homo sapien
ggtttcacaagtattgctcatagta

SEQ ID NO: 436388 - DNA, 25 bp, Homo sapien
ttatgagcatgtagtatttcagcat

SEQ ID NO: 436389 - DNA, 25 bp, Homo sapien
ttttatgagcatgtagtatttcagc

SEQ ID NO: 436390 - DNA, 25 bp, Homo sapien
tttatgagcatgtagtatttcagca

SEQ ID NO: 436391 - DNA, 25 bp, Homo sapien
cagctgaacccatttactaggtgac

SEQ ID NO: 436392 - DNA, 25 bp, Homo sapien
tacatagagtactacagctgaaccc

SEQ ID NO: 436393 - DNA, 25 bp, Homo sapien
gcatggcaggcatggaatatgaacc

SEQ ID NO: 436394 - DNA, 25 bp, Homo sapien
aaagtgagtctcagaagagctaact

SEQ ID NO: 436395 - DNA, 25 bp, Homo sapien
atagacacacgtaatcttcaaaagc

SEQ ID NO: 436396 - DNA, 25 bp, Homo sapien
catctagaatagacacacgtaatct

SEQ ID NO: 436397 - DNA, 25 bp, Homo sapien
tctagaatagacacacgtaatcttc

SEQ ID NO: 436398 - DNA, 25 bp, Homo sapien
tagaatagacacacgtaatcttcaa

SEQ ID NO: 436399 - DNA, 25 bp, Homo sapien
caggcctggctctcaaactaaatct

SEQ ID NO: 436400 - DNA, 25 bp, Homo sapien
taggctagctccaactgaatgatgt

SEQ ID NO: 436401 - DNA, 25 bp, Homo sapien
ttaggctagctccaactgaatgatg

SEQ ID NO: 436402 - DNA, 25 bp, Homo sapien
tcctatatatattcaggtctgtttc

SEQ ID NO: 436403 - DNA, 25 bp, Homo sapien
ctatatatattcaggtctgtttctg

SEQ ID NO: 436404 - DNA, 25 bp, Homo sapien
cctatatatattcaggtctgtttct

SEQ ID NO: 436405 - DNA, 25 bp, Homo sapien
ctaacacaaataggactcagggctg

SEQ ID NO: 436406 - DNA, 25 bp, Homo sapien
tcttcagccgaagcatataaaagct

SEQ ID NO: 436407 - DNA, 25 bp, Homo sapien
tggccctttataggaggatcagata

SEQ ID NO: 436408 - DNA, 25 bp, Homo sapien
agggctgactggttacatgaaaaag

SEQ ID NO: 436409 - DNA, 25 bp, Homo sapien
cactgtttgaccccaggagattgag

SEQ ID NO: 436410 - DNA, 25 bp, Homo sapien
cgaggcaggagcactgtttgacccc

SEQ ID NO: 436411 - DNA, 25 bp, Homo sapien
agccgaggcaggagcactgtttgac

SEQ ID NO: 436412 - DNA, 25 bp, Homo sapien
agcactgtttgaccccaggagattg

SEQ ID NO: 436413 - DNA, 25 bp, Homo sapien
caacacagtagcacacatggctaat

SEQ ID NO: 436414 - DNA, 25 bp, Homo sapien
gtccaacacagtagcacacatggct

SEQ ID NO: 436415 - DNA, 25 bp, Homo sapien
tagcagtttggtcacgaaaaattaa

SEQ ID NO: 436416 - DNA, 25 bp, Homo sapien
tgtaggtctagagaatagcagtttg

SEQ ID NO: 436417 - DNA, 25 bp, Homo sapien
ctagcttaggaattcaagcccagcc

SEQ ID NO: 436418 - DNA, 25 bp, Homo sapien
gaaatatacaacatccctgagcaga

SEQ ID NO: 436419 - DNA, 25 bp, Homo sapien
tagaaatatacaacatccctgagca

SEQ ID NO: 436420 - DNA, 25 bp, Homo sapien
ctgagcagattgttctagcttagga

SEQ ID NO: 436421 - DNA, 25 bp, Homo sapien
cttagttatttgaactgcatcatcc

SEQ ID NO: 436422 - DNA, 25 bp, Homo sapien
taccactcagtggaattccataaat

SEQ ID NO: 436423 - DNA, 25 bp, Homo sapien
tatttgaactgcatcatccattacc

SEQ ID NO: 436424 - DNA, 25 bp, Homo sapien
tgcatcatccattaccactcagtgg

SEQ ID NO: 436425 - DNA, 25 bp, Homo sapien
tgttagtggccagctcgtattttac

SEQ ID NO: 436426 - DNA, 25 bp, Homo sapien
tactttgtctcgatgcttcccatcc

SEQ ID NO: 436427 - DNA, 25 bp, Homo sapien
cagctcgtattttactttgtctcga

SEQ ID NO: 436428 - DNA, 25 bp, Homo sapien
tatgttagtggccagctcgtatttt

SEQ ID NO: 436429 - DNA, 25 bp, Homo sapien
tacaataaggtgagaaggtaaataa

SEQ ID NO: 436430 - DNA, 25 bp, Homo sapien
tgtcactcagtaaggacacattctg

SEQ ID NO: 436431 - DNA, 25 bp, Homo sapien
gaaacttacttcaaatatagttatg

SEQ ID NO: 436432 - DNA, 25 bp, Homo sapien
gatatgcaccattatacaataaggt

SEQ ID NO: 436433 - DNA, 25 bp, Homo sapien
taattatgctctttgaacatgtgtc

SEQ ID NO: 436434 - DNA, 25 bp, Homo sapien
aaaagttaattatgctctttgaaca

SEQ ID NO: 436435 - DNA, 25 bp, Homo sapien
gttaattatgctctttgaacatgtg

SEQ ID NO: 436436 - DNA, 25 bp, Homo sapien
aagttaattatgctctttgaacatg

SEQ ID NO: 436437 - DNA, 25 bp, Homo sapien
gaaaatggcgggaagtgctgacacc

SEQ ID NO: 436438 - DNA, 25 bp, Homo sapien
tagtaggtaaactggaaggctccaa

SEQ ID NO: 436439 - DNA, 25 bp, Homo sapien
gatttccccataagtatgcagcaag

SEQ ID NO: 436440 - DNA, 25 bp, Homo sapien
gcccaggtgagataagatccatttt

SEQ ID NO: 436441 - DNA, 25 bp, Homo sapien
aatagccactgatttgcactcaaga

SEQ ID NO: 436442 - DNA, 25 bp, Homo sapien
gtgacaaagcgagaaaacatctgaa

SEQ ID NO: 436443 - DNA, 25 bp, Homo sapien
aacctacgagaatttaggccaggca

SEQ ID NO: 436444 - DNA, 25 bp, Homo sapien
gaaaagtctgccttcgcaacaagaa

SEQ ID NO: 436445 - DNA, 25 bp, Homo sapien
aacagattatccacaattataggca

SEQ ID NO: 436446 - DNA, 25 bp, Homo sapien
tcttacaattaaagaggttgaccac

SEQ ID NO: 436447 - DNA, 25 bp, Homo sapien
tttgtcccacataaaaaacactgga

SEQ ID NO: 436448 - DNA, 25 bp, Homo sapien
cactggacccagatgctattatagg

SEQ ID NO: 436449 - DNA, 25 bp, Homo sapien
catcaaatggtactcagaaaactgt

SEQ ID NO: 436450 - DNA, 25 bp, Homo sapien
tctgcttaaagcacaacttggaaca

SEQ ID NO: 436451 - DNA, 25 bp, Homo sapien
tatagaaccagtaacagactcacat

SEQ ID NO: 436452 - DNA, 25 bp, Homo sapien
caaaacacagactaagcaggacctc

SEQ ID NO: 436453 - DNA, 25 bp, Homo sapien
cagcactctgaagagttgccagtga

SEQ ID NO: 436454 - DNA, 25 bp, Homo sapien
gcactctgaagagttgccagtgaga

SEQ ID NO: 436455 - DNA, 25 bp, Homo sapien
cactctgaagagttgccagtgagag

SEQ ID NO: 436456 - DNA, 25 bp, Homo sapien
actctgaagagttgccagtgagaga

SEQ ID NO: 436457 - DNA, 25 bp, Homo sapien
cgagcagaacaagaatgaaccagga

SEQ ID NO: 436458 - DNA, 25 bp, Homo sapien
cagaccactgccgagcagaacaaga

SEQ ID NO: 436459 - DNA, 25 bp, Homo sapien
tagcattgttggcactgacacatat

SEQ ID NO: 436460 - DNA, 25 bp, Homo sapien
gcattgttggcactgacacatatca

SEQ ID NO: 436461 - DNA, 25 bp, Homo sapien
tttgggctgaatgttggtgccacag

SEQ ID NO: 436462 - DNA, 25 bp, Homo sapien
tagtgaagaagttggatttgaagtt

SEQ ID NO: 436463 - DNA, 25 bp, Homo sapien
actggttctgccgttgatgagttaa

SEQ ID NO: 436464 - DNA, 25 bp, Homo sapien
tgacagtggttaaataggtgggtcc

SEQ ID NO: 436465 - DNA, 25 bp, Homo sapien
taatgcctatagaattggtgcttgc

SEQ ID NO: 436466 - DNA, 25 bp, Homo sapien
gttgctgcggtgctggaattcccct

SEQ ID NO: 436467 - DNA, 25 bp, Homo sapien
cagggttctgttctggcatccgtga

SEQ ID NO: 436468 - DNA, 25 bp, Homo sapien
gaagccacgttccatttggtgaaat

SEQ ID NO: 436469 - DNA, 25 bp, Homo sapien
cttctgtccttcgagtcagaattac

SEQ ID NO: 436470 - DNA, 25 bp, Homo sapien
tcttctgtccttcgagtcagaatta

SEQ ID NO: 436471 - DNA, 25 bp, Homo sapien
ctcttctgtccttcgagtcagaatt

SEQ ID NO: 436472 - DNA, 25 bp, Homo sapien
acaacagatataaggtgagcagctc

SEQ ID NO: 436473 - DNA, 25 bp, Homo sapien
aacagatataaggtgagcagctcac

SEQ ID NO: 436474 - DNA, 25 bp, Homo sapien
caacagatataaggtgagcagctca

SEQ ID NO: 436475 - DNA, 25 bp, Homo sapien
tacaatggcagatggacatcacata

SEQ ID NO: 436476 - DNA, 25 bp, Homo sapien
tacttagtgggacttcatatgcctc

SEQ ID NO: 436477 - DNA, 25 bp, Homo sapien
tactaaatagaggaaggagtcaaca

SEQ ID NO: 436478 - DNA, 25 bp, Homo sapien
gatagcagccttactgtcattctag

SEQ ID NO: 436479 - DNA, 25 bp, Homo sapien
tgttcaaaagcaccccaaagaccag

SEQ ID NO: 436480 - DNA, 25 bp, Homo sapien
tgcagtctggatcgcagccaagagc

SEQ ID NO: 436481 - DNA, 25 bp, Homo sapien
cagtgcataaaaacaggtagcccct

SEQ ID NO: 436482 - DNA, 25 bp, Homo sapien
cagtttcctggacttcagaagagga

SEQ ID NO: 436483 - DNA, 25 bp, Homo sapien
ctgacatgaagggaagagattggct

SEQ ID NO: 436484 - DNA, 25 bp, Homo sapien
agtccagcttcctacgctcaggcag

SEQ ID NO: 436485 - DNA, 25 bp, Homo sapien
tgaaatcaaccaacgaaccacaggc

SEQ ID NO: 436486 - DNA, 25 bp, Homo sapien
taatagcaccctccaccttttagag

SEQ ID NO: 436487 - DNA, 25 bp, Homo sapien
aaaaggagtaatctgagtagtaaga

SEQ ID NO: 436488 - DNA, 25 bp, Homo sapien
aaaaaggagtaatctgagtagtaag

SEQ ID NO: 436489 - DNA, 25 bp, Homo sapien
ctgagtagtaagaaggagttcttta

SEQ ID NO: 436490 - DNA, 25 bp, Homo sapien
tgagtagtaagaaggagttctttaa

SEQ ID NO: 436491 - DNA, 25 bp, Homo sapien
gagatcaaacagagccaaagagcct

SEQ ID NO: 436492 - DNA, 25 bp, Homo sapien
caaacggtggcatatgtagatcaga

SEQ ID NO: 436493 - DNA, 25 bp, Homo sapien
gagcctccagctgaaaactaagtac

SEQ ID NO: 436494 - DNA, 25 bp, Homo sapien
gaagacaaaacagaccagactcgat

SEQ ID NO: 436495 - DNA, 25 bp, Homo sapien
gtgtacttcattttagctgttacgg

SEQ ID NO: 436496 - DNA, 25 bp, Homo sapien
ttttagctgttacggccaggcacag

SEQ ID NO: 436497 - DNA, 25 bp, Homo sapien
tatactatttttgtaaggcaaggac

SEQ ID NO: 436498 - DNA, 25 bp, Homo sapien
cctatactatttttgtaaggcaagg

SEQ ID NO: 436499 - DNA, 25 bp, Homo sapien
gaaagcaactcaggttgtgtcccac

SEQ ID NO: 436500 - DNA, 25 bp, Homo sapien
gaaatctaatctccttatcctggac

SEQ ID NO: 436501 - DNA, 25 bp, Homo sapien
tcacctggatcacagtaagcctctg

SEQ ID NO: 436502 - DNA, 25 bp, Homo sapien
tcaggcctttgagcatgttattcct

SEQ ID NO: 436503 - DNA, 25 bp, Homo sapien
taaacacgatcactagcagagagga

SEQ ID NO: 436504 - DNA, 25 bp, Homo sapien
caaaactatgataataaacacgatc

SEQ ID NO: 436505 - DNA, 25 bp, Homo sapien
taataaacacgatcactagcagaga

SEQ ID NO: 436506 - DNA, 25 bp, Homo sapien
tatgataataaacacgatcactagc

SEQ ID NO: 436507 - DNA, 25 bp, Homo sapien
gagtacctcgggatactcctgttta

SEQ ID NO: 436508 - DNA, 25 bp, Homo sapien
gagacaggtcatgcacaccctgagg

SEQ ID NO: 436509 - DNA, 25 bp, Homo sapien
tatattcaggctcatgtggctcact

SEQ ID NO: 436510 - DNA, 25 bp, Homo sapien
tgggagaggcaaatcacacctctgt

SEQ ID NO: 436511 - DNA, 25 bp, Homo sapien
cacatcctcagtgcggccgttggat

SEQ ID NO: 436512 - DNA, 25 bp, Homo sapien
ttggataagcggaaagaattggaat

SEQ ID NO: 436513 - DNA, 25 bp, Homo sapien
ccacatcctcagtgcggccgttgga

SEQ ID NO: 436514 - DNA, 25 bp, Homo sapien
cggccgttggataagcggaaagaat

SEQ ID NO: 436515 - DNA, 25 bp, Homo sapien
ggttccccatgacattaaggaatgc

SEQ ID NO: 436516 - DNA, 25 bp, Homo sapien
tccttgtgaaggttccccatgacat

SEQ ID NO: 436517 - DNA, 25 bp, Homo sapien
tgaaggttccccatgacattaagga

SEQ ID NO: 436518 - DNA, 25 bp, Homo sapien
ccccatgacattaaggaatgcctta

SEQ ID NO: 436519 - DNA, 25 bp, Homo sapien
tctggccagaagtggcacactctgg

SEQ ID NO: 436520 - DNA, 25 bp, Homo sapien
ctccctgaagagcttattgtcgtct

SEQ ID NO: 436521 - DNA, 25 bp, Homo sapien
gaagagcttattgtcgtctgccatt

SEQ ID NO: 436522 - DNA, 25 bp, Homo sapien
tgccattctccggttaatttcctct

SEQ ID NO: 436523 - DNA, 25 bp, Homo sapien
tactcaagatgagacctgtgctctg

SEQ ID NO: 436524 - DNA, 25 bp, Homo sapien
cagaagctcttctgatctgggatca

SEQ ID NO: 436525 - DNA, 25 bp, Homo sapien
tcagaactggtaggctaggatcacc

SEQ ID NO: 436526 - DNA, 25 bp, Homo sapien
tctgcagtctcccatggtcgtcatt

SEQ ID NO: 436527 - DNA, 25 bp, Homo sapien
aagtccggcctggtatataaactgc

SEQ ID NO: 436528 - DNA, 25 bp, Homo sapien
ccactgccgcaatagatacttctga

SEQ ID NO: 436529 - DNA, 25 bp, Homo sapien
gcagaatcccattatcagctggaag

SEQ ID NO: 436530 - DNA, 25 bp, Homo sapien
ccggtctcgtaaactaggtattatg

SEQ ID NO: 436531 - DNA, 25 bp, Homo sapien
gagcaagctgctcacagttcatagc

SEQ ID NO: 436532 - DNA, 25 bp, Homo sapien
ccaaggagtaggattacttctgaca

SEQ ID NO: 436533 - DNA, 25 bp, Homo sapien
ttcaagctggtggtaaacgagtagg

SEQ ID NO: 436534 - DNA, 25 bp, Homo sapien
aatgctcaccttgaaatgaaaaccc

SEQ ID NO: 436535 - DNA, 25 bp, Homo sapien
tctatgacagtagacacaaattggt

SEQ ID NO: 436536 - DNA, 25 bp, Homo sapien
tacctgactgatactgagccaatca

SEQ ID NO: 436537 - DNA, 25 bp, Homo sapien
tctaagtagcttagaaaggccttcc

SEQ ID NO: 436538 - DNA, 25 bp, Homo sapien
gttggccacttttttacgacatcat

SEQ ID NO: 436539 - DNA, 25 bp, Homo sapien
tatagagacctgaccacaagactcc

SEQ ID NO: 436540 - DNA, 25 bp, Homo sapien
tatccatcgaagcaaactaagtcca

SEQ ID NO: 436541 - DNA, 25 bp, Homo sapien
cctagaacttctaatcaggtgggca

SEQ ID NO: 436542 - DNA, 25 bp, Homo sapien
cattcacggaaatgctacagtctcc

SEQ ID NO: 436543 - DNA, 25 bp, Homo sapien
aatcagcttgtcaagttccacaaaa

SEQ ID NO: 436544 - DNA, 25 bp, Homo sapien
tgtcttggctattcttgaatctttt

SEQ ID NO: 436545 - DNA, 25 bp, Homo sapien
cttcttcttcaggaatgtcttggct

SEQ ID NO: 436546 - DNA, 25 bp, Homo sapien
ttgaatcttttctcctccatataaa

SEQ ID NO: 436547 - DNA, 25 bp, Homo sapien
gttcaacaacacaagaatcctcagg

SEQ ID NO: 436548 - DNA, 25 bp, Homo sapien
aaaacatgggcccaggtgaatacct

SEQ ID NO: 436549 - DNA, 25 bp, Homo sapien
catgattactatgtggttagcagcc

SEQ ID NO: 436550 - DNA, 25 bp, Homo sapien
tgaatacctgcagcctaacacagag

SEQ ID NO: 436551 - DNA, 25 bp, Homo sapien
acaggtggcctggataggacatgca

SEQ ID NO: 436552 - DNA, 25 bp, Homo sapien
gatgtttacatatcgatttttttcc

SEQ ID NO: 436553 - DNA, 25 bp, Homo sapien
caagatgtttacatatcgatttttt

SEQ ID NO: 436554 - DNA, 25 bp, Homo sapien
aggcaagatgtttacatatcgattt

SEQ ID NO: 436555 - DNA, 25 bp, Homo sapien
ccctgctgtgcccaattgcaagatt

SEQ ID NO: 436556 - DNA, 25 bp, Homo sapien
tgcaagattctttccatcttcagaa

SEQ ID NO: 436557 - DNA, 25 bp, Homo sapien
tgaacgcactcttgttattcaccct

SEQ ID NO: 436558 - DNA, 25 bp, Homo sapien
gagatgtaatttcaggttacatccc

SEQ ID NO: 436559 - DNA, 25 bp, Homo sapien
gactctgagtatgtgggatccataa

SEQ ID NO: 436560 - DNA, 25 bp, Homo sapien
gaagggtttatacagagaactctgc

SEQ ID NO: 436561 - DNA, 25 bp, Homo sapien
tcctgcctgatcctagtgaagctgt

SEQ ID NO: 436562 - DNA, 25 bp, Homo sapien
tttaggcctgacacaaaaatcctcc

SEQ ID NO: 436563 - DNA, 25 bp, Homo sapien
tgtcaggtggactctagagtggtca

SEQ ID NO: 436564 - DNA, 25 bp, Homo sapien
attgatgtaatcagaatctggaacc

SEQ ID NO: 436565 - DNA, 25 bp, Homo sapien
gttgatgaatgaagcattgatgtaa

SEQ ID NO: 436566 - DNA, 25 bp, Homo sapien
tctggaaccccttcaaccggtgtca

SEQ ID NO: 436567 - DNA, 25 bp, Homo sapien
taatacagagtaatgagaatgaagc

SEQ ID NO: 436568 - DNA, 25 bp, Homo sapien
tctgaaagctgaatctcagtgggct

SEQ ID NO: 436569 - DNA, 25 bp, Homo sapien
tgtgttctgttcaagggaaagatga

SEQ ID NO: 436570 - DNA, 25 bp, Homo sapien
tagctacattcctacctctaaaaag

SEQ ID NO: 436571 - DNA, 25 bp, Homo sapien
aacatgcttgtacagtgatgtggcg

SEQ ID NO: 436572 - DNA, 25 bp, Homo sapien
gccttcctgaaaacatgcttgtaca

SEQ ID NO: 436573 - DNA, 25 bp, Homo sapien
tgtacagtgatgtggcggcactgct

SEQ ID NO: 436574 - DNA, 25 bp, Homo sapien
caggagtgcgtcatatgccttcctg

SEQ ID NO: 436575 - DNA, 25 bp, Homo sapien
cagagatggatatgtttagtcagca

SEQ ID NO: 436576 - DNA, 25 bp, Homo sapien
cctgaacacctggttggaaggccca

SEQ ID NO: 436577 - DNA, 25 bp, Homo sapien
taaattctcattgcagcatgcgggc

SEQ ID NO: 436578 - DNA, 25 bp, Homo sapien
ttcaatttcagttcaaacaagggca

SEQ ID NO: 436579 - DNA, 25 bp, Homo sapien
ttgtgcagcaatgaatttgttcttt

SEQ ID NO: 436580 - DNA, 25 bp, Homo sapien
cttgtgcagcaatgaatttgttctt

SEQ ID NO: 436581 - DNA, 25 bp, Homo sapien
ttcaggttggtaaccatgacgatgg

SEQ ID NO: 436582 - DNA, 25 bp, Homo sapien
caggttggtaaccatgacgatggtg

SEQ ID NO: 436583 - DNA, 25 bp, Homo sapien
ctgtgttttgttcccagatcatccg

SEQ ID NO: 436584 - DNA, 25 bp, Homo sapien
gttggtaaccatgacgatggtggct

SEQ ID NO: 436585 - DNA, 25 bp, Homo sapien
ccgaatattcccataggtccagcag

SEQ ID NO: 436586 - DNA, 25 bp, Homo sapien
tgctggatgcagaacttccgtactg

SEQ ID NO: 436587 - DNA, 25 bp, Homo sapien
cttggtctggccagtactgggcgca

SEQ ID NO: 436588 - DNA, 25 bp, Homo sapien
tccgtactgtgtagtccaccaggac

SEQ ID NO: 436589 - DNA, 25 bp, Homo sapien
gttgtcagtgacaatggaaaagtaa

SEQ ID NO: 436590 - DNA, 25 bp, Homo sapien
gatcctgtgtgttggccctgatacc

SEQ ID NO: 436591 - DNA, 25 bp, Homo sapien
gtgttggccctgatacccaagggtg

SEQ ID NO: 436592 - DNA, 25 bp, Homo sapien
tgaggagatcctgtgtgttggccct

SEQ ID NO: 436593 - DNA, 25 bp, Homo sapien
gaggaacttgagcatgccgatcggg

SEQ ID NO: 436594 - DNA, 25 bp, Homo sapien
aagtctggccagctggtaaagtgga

SEQ ID NO: 436595 - DNA, 25 bp, Homo sapien
catactgagggttacaggccttcac

SEQ ID NO: 436596 - DNA, 25 bp, Homo sapien
ggctttctgttggtcatgtcgccca

SEQ ID NO: 436597 - DNA, 25 bp, Homo sapien
caccctgcactagaacttggagtct

SEQ ID NO: 436598 - DNA, 25 bp, Homo sapien
ccagctagaagggtccgaaggctgc

SEQ ID NO: 436599 - DNA, 25 bp, Homo sapien
ggcttcatagcagggtctcccaact

SEQ ID NO: 436600 - DNA, 25 bp, Homo sapien
taatcttggaggactgccctaccct

SEQ ID NO: 436601 - DNA, 25 bp, Homo sapien
gagagcagggggttatagggatggc

SEQ ID NO: 436602 - DNA, 25 bp, Homo sapien
agagcagggggttatagggatggcc

SEQ ID NO: 436603 - DNA, 25 bp, Homo sapien
caccttccgttctgtatgcatcatg

SEQ ID NO: 436604 - DNA, 25 bp, Homo sapien
tcaatgacgacaaaggtacctgtac

SEQ ID NO: 436605 - DNA, 25 bp, Homo sapien
gatccggctcacaaagccatacacg

SEQ ID NO: 436606 - DNA, 25 bp, Homo sapien
catgtccagcatggcatcaatgacg

SEQ ID NO: 436607 - DNA, 25 bp, Homo sapien
tgcttgagactggagaacggcgatg

SEQ ID NO: 436608 - DNA, 25 bp, Homo sapien
catgcgccagcactcgtctctgagt

SEQ ID NO: 436609 - DNA, 25 bp, Homo sapien
tcttaactccaaagaagccttcctc

SEQ ID NO: 436610 - DNA, 25 bp, Homo sapien
ctatctctactatctcggctaaggg

SEQ ID NO: 436611 - DNA, 25 bp, Homo sapien
tttctagagaggtcacttccagttc

SEQ ID NO: 436612 - DNA, 25 bp, Homo sapien
gctggtccctgggattttgttgtaa

SEQ ID NO: 436613 - DNA, 25 bp, Homo sapien
ggcttggtatatgaagacatactgc

SEQ ID NO: 436614 - DNA, 25 bp, Homo sapien
cttccagttctgtatctccatagag

SEQ ID NO: 436615 - DNA, 25 bp, Homo sapien
gaaggtttccagtccgcatcttgtc

SEQ ID NO: 436616 - DNA, 25 bp, Homo sapien
ccagtccgcatcttgtcattctgga

SEQ ID NO: 436617 - DNA, 25 bp, Homo sapien
gatctgtaaaacacggttcttcttc

SEQ ID NO: 436618 - DNA, 25 bp, Homo sapien
tcttcatgttggctggaaggtttcc

SEQ ID NO: 436619 - DNA, 25 bp, Homo sapien
catagtctgtattctcttcgccccg

SEQ ID NO: 436620 - DNA, 25 bp, Homo sapien
taaaggatgcgttcacatagtctgt

SEQ ID NO: 436621 - DNA, 25 bp, Homo sapien
tcttcgccccgcttaactggaatga

SEQ ID NO: 436622 - DNA, 25 bp, Homo sapien
ggaatgatcactctgttgaattcat

SEQ ID NO: 436623 - DNA, 25 bp, Homo sapien
tgttgactgattcaaacatgatcct

SEQ ID NO: 436624 - DNA, 25 bp, Homo sapien
ccccagcaggtatgggagggaggca

SEQ ID NO: 436625 - DNA, 25 bp, Homo sapien
tgctctatggagctggacagaccta

SEQ ID NO: 436626 - DNA, 25 bp, Homo sapien
tattatactactgcatgccatctgt

SEQ ID NO: 436627 - DNA, 25 bp, Homo sapien
ggccaggttaattgcaagggtgaga

SEQ ID NO: 436628 - DNA, 25 bp, Homo sapien
cggaggcaaactcagcccatgcaga

SEQ ID NO: 436629 - DNA, 25 bp, Homo sapien
gtggagaagacagaccactagaagg

SEQ ID NO: 436630 - DNA, 25 bp, Homo sapien
taatcacagagggactagtggagaa

SEQ ID NO: 436631 - DNA, 25 bp, Homo sapien
tataggagtccttctgccggtagcc

SEQ ID NO: 436632 - DNA, 25 bp, Homo sapien
ttcgccagaagtcctcaattgtgtg

SEQ ID NO: 436633 - DNA, 25 bp, Homo sapien
gagcaggatttccactcccagatca

SEQ ID NO: 436634 - DNA, 25 bp, Homo sapien
cagttctgttagcatcacgatagag

SEQ ID NO: 436635 - DNA, 25 bp, Homo sapien
tacttatactatgcaaacgtactct

SEQ ID NO: 436636 - DNA, 25 bp, Homo sapien
tggaccgtataagtcaaagacaagg

SEQ ID NO: 436637 - DNA, 25 bp, Homo sapien
tgccttcccaacgtccccatttaca

SEQ ID NO: 436638 - DNA, 25 bp, Homo sapien
tatgcaaacgtactctttggaccgt

SEQ ID NO: 436639 - DNA, 25 bp, Homo sapien
agctaatgactgcttagacaccaac

SEQ ID NO: 436640 - DNA, 25 bp, Homo sapien
tattgggtccacctcagaaccttga

SEQ ID NO: 436641 - DNA, 25 bp, Homo sapien
gcaatgaggcaatcccttcttaggg

SEQ ID NO: 436642 - DNA, 25 bp, Homo sapien
tcttagggacactcatattgggtcc

SEQ ID NO: 436643 - DNA, 25 bp, Homo sapien
tattttatgtagtcagcaatgaggc

SEQ ID NO: 436644 - DNA, 25 bp, Homo sapien
tagtgaaccgctcatttgctgcaat

SEQ ID NO: 436645 - DNA, 25 bp, Homo sapien
gaacaactagtgacttgagacaact

SEQ ID NO: 436646 - DNA, 25 bp, Homo sapien
caggccttgctagcttctctccagg

SEQ ID NO: 436647 - DNA, 25 bp, Homo sapien
taagcattgtcagaacacagactgg

SEQ ID NO: 436648 - DNA, 25 bp, Homo sapien
cacattttatcacagggcagtgggc

SEQ ID NO: 436649 - DNA, 25 bp, Homo sapien
actggacagaggcggagatgttcac

SEQ ID NO: 436650 - DNA, 25 bp, Homo sapien
tgtgctcgtggttccagctcttcgg

SEQ ID NO: 436651 - DNA, 25 bp, Homo sapien
ccgagatggtccttgtgctcgtggt

SEQ ID NO: 436652 - DNA, 25 bp, Homo sapien
ctctttgatctgcaaggtaccttca

SEQ ID NO: 436653 - DNA, 25 bp, Homo sapien
ttaatgctgcttacatccgccagac

SEQ ID NO: 436654 - DNA, 25 bp, Homo sapien
tccgccagactgctaattcagaaaa

SEQ ID NO: 436655 - DNA, 25 bp, Homo sapien
catggtaggctctcagtatctggta

SEQ ID NO: 436656 - DNA, 25 bp, Homo sapien
gatacgcttcgtccccaaggtattg

SEQ ID NO: 436657 - DNA, 25 bp, Homo sapien
tcagagtaccacatgtgtagaagca

SEQ ID NO: 436658 - DNA, 25 bp, Homo sapien
agaggtgaggagctcagagtaccac

SEQ ID NO: 436659 - DNA, 25 bp, Homo sapien
agtacagccacctcttacgctgata

SEQ ID NO: 436660 - DNA, 25 bp, Homo sapien
ccatcagatggccagtactgggcac

SEQ ID NO: 436661 - DNA, 25 bp, Homo sapien
tctccataggacaccagtccatcag

SEQ ID NO: 436662 - DNA, 25 bp, Homo sapien
ggtctcggacggtgtagctctcaca

SEQ ID NO: 436663 - DNA, 25 bp, Homo sapien
cagttccactgtaatatctccatag

SEQ ID NO: 436664 - DNA, 25 bp, Homo sapien
tgccctttccgtcactggggatgcc

SEQ ID NO: 436665 - DNA, 25 bp, Homo sapien
ttctgcacggcggcgatgatgctga

SEQ ID NO: 436666 - DNA, 25 bp, Homo sapien
atcatgccctttccgtcactgggga

SEQ ID NO: 436667 - DNA, 25 bp, Homo sapien
gcacggcggcgatgatgctgatcat

SEQ ID NO: 436668 - DNA, 25 bp, Homo sapien
cgctgagggcaagggtgagccatac

SEQ ID NO: 436669 - DNA, 25 bp, Homo sapien
tcctcgctttctctctcccgctgag

SEQ ID NO: 436670 - DNA, 25 bp, Homo sapien
tggtcatcagcttcccctatctgcc

SEQ ID NO: 436671 - DNA, 25 bp, Homo sapien
ccctatctgcccctcctcgctttct

SEQ ID NO: 436672 - DNA, 25 bp, Homo sapien
aagacatccaaaatcccctctgctt

SEQ ID NO: 436673 - DNA, 25 bp, Homo sapien
tagccgcaggctcttgacagtctgg

SEQ ID NO: 436674 - DNA, 25 bp, Homo sapien
catgtgtggcctctgtagccgcagg

SEQ ID NO: 436675 - DNA, 25 bp, Homo sapien
ctccaggacggtgctcagggcacag

SEQ ID NO: 436676 - DNA, 25 bp, Homo sapien
gcagggacaaatatgtgggcagcat

SEQ ID NO: 436677 - DNA, 25 bp, Homo sapien
caacaggggctatgctcccattgct

SEQ ID NO: 436678 - DNA, 25 bp, Homo sapien
aagtacagatgagccctgtggggca

SEQ ID NO: 436679 - DNA, 25 bp, Homo sapien
tcctgtgtatttggggcaccttggg

SEQ ID NO: 436680 - DNA, 25 bp, Homo sapien
tgcatcaatatactcctgcaccacc

SEQ ID NO: 436681 - DNA, 25 bp, Homo sapien
tgcaccaccttgtagcagaactcat

SEQ ID NO: 436682 - DNA, 25 bp, Homo sapien
atgcatcaatatactcctgcaccac

SEQ ID NO: 436683 - DNA, 25 bp, Homo sapien
tcctgcaccaccttgtagcagaact

SEQ ID NO: 436684 - DNA, 25 bp, Homo sapien
ggtaatagaagcctatgtaccaatt

SEQ ID NO: 436685 - DNA, 25 bp, Homo sapien
ctatcagtgctaacacatttacata

SEQ ID NO: 436686 - DNA, 25 bp, Homo sapien
aacatcacactatttaattccccaa

SEQ ID NO: 436687 - DNA, 25 bp, Homo sapien
gaagcctatgtaccaatttctaaaa

SEQ ID NO: 436688 - DNA, 25 bp, Homo sapien
tagttggtgccgagctacctggaat

SEQ ID NO: 436689 - DNA, 25 bp, Homo sapien
tgtggtgccagagataccgctctgg

SEQ ID NO: 436690 - DNA, 25 bp, Homo sapien
caatttctcggctgaggatttcacg

SEQ ID NO: 436691 - DNA, 25 bp, Homo sapien
gggacaaccactttcctcgagagct

SEQ ID NO: 436692 - DNA, 25 bp, Homo sapien
gtcaaagcttttattacctgatagt

SEQ ID NO: 436693 - DNA, 25 bp, Homo sapien
caaagcttttattacctgatagtcc

SEQ ID NO: 436694 - DNA, 25 bp, Homo sapien
gggagtcaaagcttttattacctga

SEQ ID NO: 436695 - DNA, 25 bp, Homo sapien
aagcttttattacctgatagtccct

SEQ ID NO: 436696 - DNA, 25 bp, Homo sapien
caccacagactggagaggtcagact

SEQ ID NO: 436697 - DNA, 25 bp, Homo sapien
cctggagatcacctaagaactggaa

SEQ ID NO: 436698 - DNA, 25 bp, Homo sapien
ggccaggaccactaaaccaaagatg

SEQ ID NO: 436699 - DNA, 25 bp, Homo sapien
aacagcaacaggagggccatgaaca

SEQ ID NO: 436700 - DNA, 25 bp, Homo sapien
aacatcctgggtatgtggtgcacag

SEQ ID NO: 436701 - DNA, 25 bp, Homo sapien
cagtgacccagcttcaaccatgagg

SEQ ID NO: 436702 - DNA, 25 bp, Homo sapien
agtagtgctgatccctgaacatgcc

SEQ ID NO: 436703 - DNA, 25 bp, Homo sapien
tatcctaaggatactgggtctctgg

SEQ ID NO: 436704 - DNA, 25 bp, Homo sapien
ccttgggtcgcaactgactggctgt

SEQ ID NO: 436705 - DNA, 25 bp, Homo sapien
tggagaaacactcctaccctaagcc

SEQ ID NO: 436706 - DNA, 25 bp, Homo sapien
gagggacccgcccaaatgaagtgag

SEQ ID NO: 436707 - DNA, 25 bp, Homo sapien
agagacttgagtatttgggacaggg

SEQ ID NO: 436708 - DNA, 25 bp, Homo sapien
aagagctgtggatgagatggctcct

SEQ ID NO: 436709 - DNA, 25 bp, Homo sapien
agctgtggatgagatggctccttca

SEQ ID NO: 436710 - DNA, 25 bp, Homo sapien
tgtggatgagatggctccttcaggc

SEQ ID NO: 436711 - DNA, 25 bp, Homo sapien
caaggaagagctgtggatgagatgg

SEQ ID NO: 436712 - DNA, 25 bp, Homo sapien
gacctgaattcaggccaatggatgg

SEQ ID NO: 436713 - DNA, 25 bp, Homo sapien
ggaaaactggcatctcaggggcagc

SEQ ID NO: 436714 - DNA, 25 bp, Homo sapien
gctacctgccttgccagctctgagg

SEQ ID NO: 436715 - DNA, 25 bp, Homo sapien
tcatcccaagcatacaggggtccag

SEQ ID NO: 436716 - DNA, 25 bp, Homo sapien
ctgagggctcgctttcctccagggt

SEQ ID NO: 436717 - DNA, 25 bp, Homo sapien
ttcctccagggtaccagccatggga

SEQ ID NO: 436718 - DNA, 25 bp, Homo sapien
gggtccaaggtgggcagtcagcagc

SEQ ID NO: 436719 - DNA, 25 bp, Homo sapien
gggctcgctttcctccagggtacca

SEQ ID NO: 436720 - DNA, 25 bp, Homo sapien
agtgtccgtgccaggtgtcgcttcc

SEQ ID NO: 436721 - DNA, 25 bp, Homo sapien
gggagccagggcatcacttgggagg

SEQ ID NO: 436722 - DNA, 25 bp, Homo sapien
gaggccatgggcagtctggactggg

SEQ ID NO: 436723 - DNA, 25 bp, Homo sapien
tcctgtgaagggaccactgggccgt

SEQ ID NO: 436724 - DNA, 25 bp, Homo sapien
taggaaggatagcagacagcaccct

SEQ ID NO: 436725 - DNA, 25 bp, Homo sapien
aaataggaaggatagcagacagcac

SEQ ID NO: 436726 - DNA, 25 bp, Homo sapien
ctgggaaataggaaggatagcagac

SEQ ID NO: 436727 - DNA, 25 bp, Homo sapien
ggaaataggaaggatagcagacagc

SEQ ID NO: 436728 - DNA, 25 bp, Homo sapien
cacactttattggaggatggcgggg

SEQ ID NO: 436729 - DNA, 25 bp, Homo sapien
tcacactttattggaggatggcggg

SEQ ID NO: 436730 - DNA, 25 bp, Homo sapien
gggacctgtagtcctcgggctgtcc

SEQ ID NO: 436731 - DNA, 25 bp, Homo sapien
gacctgtagtcctcgggctgtccct

SEQ ID NO: 436732 - DNA, 25 bp, Homo sapien
ttgggacctgtagtcctcgggctgt

SEQ ID NO: 436733 - DNA, 25 bp, Homo sapien
cgccccgcccggccgtgtggcctct

SEQ ID NO: 436734 - DNA, 25 bp, Homo sapien
tccccgcgcccaggcggctcagcgc

SEQ ID NO: 436735 - DNA, 25 bp, Homo sapien
ggcctgcacggggtccccgcgccca

SEQ ID NO: 436736 - DNA, 25 bp, Homo sapien
ctggcagcaccagaggggcccgggg

SEQ ID NO: 436737 - DNA, 25 bp, Homo sapien
ccaggcggctcagcgcgcgtagcat

SEQ ID NO: 436738 - DNA, 25 bp, Homo sapien
tctggcggtagtgctggtaacgctc

SEQ ID NO: 436739 - DNA, 25 bp, Homo sapien
atcagcacgaagaactccgcagggt

SEQ ID NO: 436740 - DNA, 25 bp, Homo sapien
cgatcttggatttggccagcgggtc

SEQ ID NO: 436741 - DNA, 25 bp, Homo sapien
gcgggcggcatgttcactcgctcga

SEQ ID NO: 436742 - DNA, 25 bp, Homo sapien
ttccaggccatcagctcgcggtgct

SEQ ID NO: 436743 - DNA, 25 bp, Homo sapien
cgcagctcgtgcagccgccggttct

SEQ ID NO: 436744 - DNA, 25 bp, Homo sapien
gctccgccagaaccccggctcgggc

SEQ ID NO: 436745 - DNA, 25 bp, Homo sapien
ccttcagggccttgcgctccgccag

SEQ ID NO: 436746 - DNA, 25 bp, Homo sapien
tgcacctcttcggccttgcgggcct

SEQ ID NO: 436747 - DNA, 25 bp, Homo sapien
ggccttgcgggcctgctccaacgcc

SEQ ID NO: 436748 - DNA, 25 bp, Homo sapien
ctcttcggccttgcgggcctgctcc

SEQ ID NO: 436749 - DNA, 25 bp, Homo sapien
ccttgcgggcctgctccaacgcctg

SEQ ID NO: 436750 - DNA, 25 bp, Homo sapien
gcagcacttcccgctccttgcgctg

SEQ ID NO: 436751 - DNA, 25 bp, Homo sapien
gcacttcccgctccttgcgctgcgc

SEQ ID NO: 436752 - DNA, 25 bp, Homo sapien
agcacttcccgctccttgcgctgcg

SEQ ID NO: 436753 - DNA, 25 bp, Homo sapien
ctgcagcacttcccgctccttgcgc

SEQ ID NO: 436754 - DNA, 25 bp, Homo sapien
caaatccggacctgccaactgtaag

SEQ ID NO: 436755 - DNA, 25 bp, Homo sapien
gcccgcgtcgcggtgcccagaattc

SEQ ID NO: 436756 - DNA, 25 bp, Homo sapien
gagtcccaccctccggagacgttgc

SEQ ID NO: 436757 - DNA, 25 bp, Homo sapien
ggtctttgcgcctgactggcactct

SEQ ID NO: 436758 - DNA, 25 bp, Homo sapien
ggtacctgaacactgtccaattact

SEQ ID NO: 436759 - DNA, 25 bp, Homo sapien
gaacactgtccaattactccgctca

SEQ ID NO: 436760 - DNA, 25 bp, Homo sapien
ctgctaggtacctgaacactgtcca

SEQ ID NO: 436761 - DNA, 25 bp, Homo sapien
ctgaacactgtccaattactccgct

SEQ ID NO: 436762 - DNA, 25 bp, Homo sapien
tcactgcattactcctaagtggtct

SEQ ID NO: 436763 - DNA, 25 bp, Homo sapien
aaatcaagcctcatccattctcact

SEQ ID NO: 436764 - DNA, 25 bp, Homo sapien
aagtggtctccctgcttttaagtcg

SEQ ID NO: 436765 - DNA, 25 bp, Homo sapien
ccagccacccttctatactttaaat

SEQ ID NO: 436766 - DNA, 25 bp, Homo sapien
ccccgagtgccagctatgaaaatct

SEQ ID NO: 436767 - DNA, 25 bp, Homo sapien
aagcccagctgaacaggagccttgg

SEQ ID NO: 436768 - DNA, 25 bp, Homo sapien
gaacccaggtcctatttgagagccc

SEQ ID NO: 436769 - DNA, 25 bp, Homo sapien
tgaaaatctcacgtcctggtaggtg

SEQ ID NO: 436770 - DNA, 25 bp, Homo sapien
cctccaggttctctcgggtgatgaa

SEQ ID NO: 436771 - DNA, 25 bp, Homo sapien
tcttccgggagtccaatgctgcttc

SEQ ID NO: 436772 - DNA, 25 bp, Homo sapien
tccaggttctctcgggtgatgaagt

SEQ ID NO: 436773 - DNA, 25 bp, Homo sapien
tggcccagttgtagttcttccggga

SEQ ID NO: 436774 - DNA, 25 bp, Homo sapien
aggagtccctgcgttgtggcctgac

SEQ ID NO: 436775 - DNA, 25 bp, Homo sapien
taggagtccctgcgttgtggcctga

SEQ ID NO: 436776 - DNA, 25 bp, Homo sapien
ctaggagtccctgcgttgtggcctg

SEQ ID NO: 436777 - DNA, 25 bp, Homo sapien
atacatacatggtccctggcgggca

SEQ ID NO: 436778 - DNA, 25 bp, Homo sapien
caactcttccgccatgatacataca

SEQ ID NO: 436779 - DNA, 25 bp, Homo sapien
gggccaactcttccgccatgataca

SEQ ID NO: 436780 - DNA, 25 bp, Homo sapien
tccgccatgatacatacatggtccc

SEQ ID NO: 436781 - DNA, 25 bp, Homo sapien
gatactcagatgacctggctgcctg

SEQ ID NO: 436782 - DNA, 25 bp, Homo sapien
cagcagagggcaaaacgtgaaggct

SEQ ID NO: 436783 - DNA, 25 bp, Homo sapien
gaggctgtacacaccggcagaacag

SEQ ID NO: 436784 - DNA, 25 bp, Homo sapien
agatggaaaccactctagggtctcc

SEQ ID NO: 436785 - DNA, 25 bp, Homo sapien
ttacaaaaacaggaagcaggcacgt

SEQ ID NO: 436786 - DNA, 25 bp, Homo sapien
tttacaaaaacaggaagcaggcacg

SEQ ID NO: 436787 - DNA, 25 bp, Homo sapien
atttacaaaaacaggaagcaggcac

SEQ ID NO: 436788 - DNA, 25 bp, Homo sapien
tacaaaaacaggaagcaggcacgtt

SEQ ID NO: 436789 - DNA, 25 bp, Homo sapien
tgcactaaggaaatattcactaaag

SEQ ID NO: 436790 - DNA, 25 bp, Homo sapien
ctgcactaaggaaatattcactaaa

SEQ ID NO: 436791 - DNA, 25 bp, Homo sapien
gcactaaggaaatattcactaaagc

SEQ ID NO: 436792 - DNA, 25 bp, Homo sapien
tgtgtagtaggcatggttgacgttt

SEQ ID NO: 436793 - DNA, 25 bp, Homo sapien
gtagtaggcatggttgacgtttgta

SEQ ID NO: 436794 - DNA, 25 bp, Homo sapien
tgtagtaggcatggttgacgtttgt

SEQ ID NO: 436795 - DNA, 25 bp, Homo sapien
tagtaggcatggttgacgtttgtat

SEQ ID NO: 436796 - DNA, 25 bp, Homo sapien
gtagtgggcacctacattcctgcag

SEQ ID NO: 436797 - DNA, 25 bp, Homo sapien
tggcagctgtagtgggcacctacat

SEQ ID NO: 436798 - DNA, 25 bp, Homo sapien
tcacttttctcgcttctggggcatt

SEQ ID NO: 436799 - DNA, 25 bp, Homo sapien
ggcactgactggtagtgccagaagg

SEQ ID NO: 436800 - DNA, 25 bp, Homo sapien
tctaggttagtcctggtagtggctt

SEQ ID NO: 436801 - DNA, 25 bp, Homo sapien
gctccttgaggagcatcatgaggtt

SEQ ID NO: 436802 - DNA, 25 bp, Homo sapien
catagatatcctctagggtttccaa

SEQ ID NO: 436803 - DNA, 25 bp, Homo sapien
tccaaatgattggaaactgaaagca

SEQ ID NO: 436804 - DNA, 25 bp, Homo sapien
gctgggtccagggtccgtgactggt

SEQ ID NO: 436805 - DNA, 25 bp, Homo sapien
tgcgctgggtccagggtccgtgact

SEQ ID NO: 436806 - DNA, 25 bp, Homo sapien
ggtgcgggtgcgctgggtccagggt

SEQ ID NO: 436807 - DNA, 25 bp, Homo sapien
gtgcgggtgcgctgggtccagggtc

SEQ ID NO: 436808 - DNA, 25 bp, Homo sapien
tctggatgtagcaggcggaggtcag

SEQ ID NO: 436809 - DNA, 25 bp, Homo sapien
gccgagcagacagcaagcgaggctg

SEQ ID NO: 436810 - DNA, 25 bp, Homo sapien
cttgcgcacgtcgaggtccggcgcg

SEQ ID NO: 436811 - DNA, 25 bp, Homo sapien
agcaggcggaggtcagcgccaggag

SEQ ID NO: 436812 - DNA, 25 bp, Homo sapien
agcgcagcgcttcggcggtgcccac

SEQ ID NO: 436813 - DNA, 25 bp, Homo sapien
cttccgcgcagcagatattgggccc

SEQ ID NO: 436814 - DNA, 25 bp, Homo sapien
agcagaggcccaagaccgcgcagcg

SEQ ID NO: 436815 - DNA, 25 bp, Homo sapien
agctcttccgcgcagcagatattgg

SEQ ID NO: 436816 - DNA, 25 bp, Homo sapien
gccccggagcgccttgccccgctca

SEQ ID NO: 436817 - DNA, 25 bp, Homo sapien
gtggagtcaggggaatcccggccgc

SEQ ID NO: 436818 - DNA, 25 bp, Homo sapien
gaggtggagtcaggggaatcccggc

SEQ ID NO: 436819 - DNA, 25 bp, Homo sapien
gagtcaggggaatcccggccgcacc

SEQ ID NO: 436820 - DNA, 25 bp, Homo sapien
gagaaggtggcttccgcgtcgcagg

SEQ ID NO: 436821 - DNA, 25 bp, Homo sapien
ttccgcgtcgcaggcagggtcggcg

SEQ ID NO: 436822 - DNA, 25 bp, Homo sapien
tggcttccgcgtcgcaggcagggtc

SEQ ID NO: 436823 - DNA, 25 bp, Homo sapien
ggtggcttccgcgtcgcaggcaggg

SEQ ID NO: 436824 - DNA, 25 bp, Homo sapien
ttcgagggtgttcggagccatcaag

SEQ ID NO: 436825 - DNA, 25 bp, Homo sapien
cgagggtgttcggagccatcaagtt

SEQ ID NO: 436826 - DNA, 25 bp, Homo sapien
cgcttcgagggtgttcggagccatc

SEQ ID NO: 436827 - DNA, 25 bp, Homo sapien
cgagtggcgcgcttcgagggtgttc

SEQ ID NO: 436828 - DNA, 25 bp, Homo sapien
ggcatggagttctttctccccatag

SEQ ID NO: 436829 - DNA, 25 bp, Homo sapien
atggagttctttctccccatagtag

SEQ ID NO: 436830 - DNA, 25 bp, Homo sapien
ttggcatggagttctttctccccat

SEQ ID NO: 436831 - DNA, 25 bp, Homo sapien
gttctttctccccatagtagctctc

SEQ ID NO: 436832 - DNA, 25 bp, Homo sapien
aagatcctggtagacagatctggtc

SEQ ID NO: 436833 - DNA, 25 bp, Homo sapien
atcctggtagacagatctggtcagc

SEQ ID NO: 436834 - DNA, 25 bp, Homo sapien
agaatgaagatcctggtagacagat

SEQ ID NO: 436835 - DNA, 25 bp, Homo sapien
tgaagatcctggtagacagatctgg

SEQ ID NO: 436836 - DNA, 25 bp, Homo sapien
ccctgggggccgccggagccgtgct

SEQ ID NO: 436837 - DNA, 25 bp, Homo sapien
cgcgctccggggtggcgccgacccg

SEQ ID NO: 436838 - DNA, 25 bp, Homo sapien
tgggggccgccggagccgtgctcat

SEQ ID NO: 436839 - DNA, 25 bp, Homo sapien
gcgctccggggtggcgccgacccgc

SEQ ID NO: 436840 - DNA, 25 bp, Homo sapien
cgcggcctctctgcgctggtttcct

SEQ ID NO: 436841 - DNA, 25 bp, Homo sapien
tggtttccttcaccggcgagcggcg

SEQ ID NO: 436842 - DNA, 25 bp, Homo sapien
gcagcgcggcctctctgcgctggtt

SEQ ID NO: 436843 - DNA, 25 bp, Homo sapien
ctggtttccttcaccggcgagcggc

SEQ ID NO: 436844 - DNA, 25 bp, Homo sapien
agatgggttctgaccatgtcaccca

SEQ ID NO: 436845 - DNA, 25 bp, Homo sapien
tagtgcagacgccagctaggcatag

SEQ ID NO: 436846 - DNA, 25 bp, Homo sapien
gccagctaggcatagcccacggcag

SEQ ID NO: 436847 - DNA, 25 bp, Homo sapien
aaagatgggttctgaccatgtcacc

SEQ ID NO: 436848 - DNA, 25 bp, Homo sapien
caactcgactggtcatttacccaag

SEQ ID NO: 436849 - DNA, 25 bp, Homo sapien
gatgtagtgaccgaaaggaccactc

SEQ ID NO: 436850 - DNA, 25 bp, Homo sapien
gactggtcatttacccaagacccag

SEQ ID NO: 436851 - DNA, 25 bp, Homo sapien
cagggttgggtccatggcgggtccg

SEQ ID NO: 436852 - DNA, 25 bp, Homo sapien
taagtccacggacggagaagactca

SEQ ID NO: 436853 - DNA, 25 bp, Homo sapien
attgactcggccctctgaacgcagg

SEQ ID NO: 436854 - DNA, 25 bp, Homo sapien
gggcacttttccattccccaggaga

SEQ ID NO: 436855 - DNA, 25 bp, Homo sapien
tgcaaaggtctaccctgtggctctg

SEQ ID NO: 436856 - DNA, 25 bp, Homo sapien
caaaagcatttcttggtgagtgtgg

SEQ ID NO: 436857 - DNA, 25 bp, Homo sapien
aaagccccagcatgtagcaaaagca

SEQ ID NO: 436858 - DNA, 25 bp, Homo sapien
cctgtcatggtctcagggaacagcc

SEQ ID NO: 436859 - DNA, 25 bp, Homo sapien
cagcttgacacccacagtgtgctct

SEQ ID NO: 436860 - DNA, 25 bp, Homo sapien
cctagattgtggcccagatctcagg

SEQ ID NO: 436861 - DNA, 25 bp, Homo sapien
taaagcgatggttgacgtctgctgt

SEQ ID NO: 436862 - DNA, 25 bp, Homo sapien
cccacacaagtggagctcacagggt

SEQ ID NO: 436863 - DNA, 25 bp, Homo sapien
gactcgcagccttaataaagcgatg

SEQ ID NO: 436864 - DNA, 25 bp, Homo sapien
tcagagcagcctggaccatggagca

SEQ ID NO: 436865 - DNA, 25 bp, Homo sapien
agcacggtgggaaggctctgcccct

SEQ ID NO: 436866 - DNA, 25 bp, Homo sapien
cagctttcctaaccctggcctgttt

SEQ ID NO: 436867 - DNA, 25 bp, Homo sapien
ttcctgatttaccagagcagcctgg

SEQ ID NO: 436868 - DNA, 25 bp, Homo sapien
ttctcttgtcgcctctcacatttct

SEQ ID NO: 436869 - DNA, 25 bp, Homo sapien
ctcttgtcgcctctcacatttcttg

SEQ ID NO: 436870 - DNA, 25 bp, Homo sapien
tcagagtgagctgtgccttgctcca

SEQ ID NO: 436871 - DNA, 25 bp, Homo sapien
cttgtcgcctctcacatttcttgca

SEQ ID NO: 436872 - DNA, 25 bp, Homo sapien
agacaagcctggagcaggtgaatag

SEQ ID NO: 436873 - DNA, 25 bp, Homo sapien
aagcctggagcaggtgaatagttag

SEQ ID NO: 436874 - DNA, 25 bp, Homo sapien
cctggagcaggtgaatagttaggaa

SEQ ID NO: 436875 - DNA, 25 bp, Homo sapien
caagcctggagcaggtgaatagtta

SEQ ID NO: 436876 - DNA, 25 bp, Homo sapien
tgaaagcacaggaaaggggcaatcc

SEQ ID NO: 436877 - DNA, 25 bp, Homo sapien
tcatggaatgggtgtggtctaagcc

SEQ ID NO: 436878 - DNA, 25 bp, Homo sapien
ggcaatccggggtggcgtcatggaa

SEQ ID NO: 436879 - DNA, 25 bp, Homo sapien
agccaggtctccagataagggcatt

SEQ ID NO: 436880 - DNA, 25 bp, Homo sapien
cattctcgagttccttcagtgtccc

SEQ ID NO: 436881 - DNA, 25 bp, Homo sapien
cttctgtcttgtggtgaggcttcta

SEQ ID NO: 436882 - DNA, 25 bp, Homo sapien
acattctgttcattatcaggtcctg

SEQ ID NO: 436883 - DNA, 25 bp, Homo sapien
tctaacacagaagtcattctcgagt

SEQ ID NO: 436884 - DNA, 25 bp, Homo sapien
tgttggccttgacagacttggtgac

SEQ ID NO: 436885 - DNA, 25 bp, Homo sapien
aaaggtccttagacttcagcgtcag

SEQ ID NO: 436886 - DNA, 25 bp, Homo sapien
acttggtgactcaggaccacgctga

SEQ ID NO: 436887 - DNA, 25 bp, Homo sapien
ccttcaaggccctgagctgatgtcc

SEQ ID NO: 436888 - DNA, 25 bp, Homo sapien
caggagcccctcatgtagtacagaa

SEQ ID NO: 436889 - DNA, 25 bp, Homo sapien
acagaaaagatagtggggaacacat

SEQ ID NO: 436890 - DNA, 25 bp, Homo sapien
gggaaattgacctcttgaagggtga

SEQ ID NO: 436891 - DNA, 25 bp, Homo sapien
ttgacctcttgaagggtgaattgcc

SEQ ID NO: 436892 - DNA, 25 bp, Homo sapien
cagggtttcgccatcttggccaggc

SEQ ID NO: 436893 - DNA, 25 bp, Homo sapien
agggtttcgccatcttggccaggct

SEQ ID NO: 436894 - DNA, 25 bp, Homo sapien
gttcaggcagttctctgcccagcct

SEQ ID NO: 436895 - DNA, 25 bp, Homo sapien
aggttcaggcagttctctgcccagc

SEQ ID NO: 436896 - DNA, 25 bp, Homo sapien
gagagaactaagtttgacctcctta

SEQ ID NO: 436897 - DNA, 25 bp, Homo sapien
tcagtccagggtttgtcaggttagc

SEQ ID NO: 436898 - DNA, 25 bp, Homo sapien
ccctcgatggtacagttggcattga

SEQ ID NO: 436899 - DNA, 25 bp, Homo sapien
ttaaggaactatataccctcgatgg

SEQ ID NO: 436900 - DNA, 25 bp, Homo sapien
tgtagctgggctactggaacagagc

SEQ ID NO: 436901 - DNA, 25 bp, Homo sapien
gcagagttaggcaggcatttcagaa

SEQ ID NO: 436902 - DNA, 25 bp, Homo sapien
tgttcctgccatctagagaagcctg

SEQ ID NO: 436903 - DNA, 25 bp, Homo sapien
gaaagtcattctggcacccttggaa

SEQ ID NO: 436904 - DNA, 25 bp, Homo sapien
ctttccttctccacagtactcaaga

SEQ ID NO: 436905 - DNA, 25 bp, Homo sapien
acagtactcaagaccaacttctgaa

SEQ ID NO: 436906 - DNA, 25 bp, Homo sapien
tccacagtactcaagaccaacttct

SEQ ID NO: 436907 - DNA, 25 bp, Homo sapien
ttctccacagtactcaagaccaact

SEQ ID NO: 436908 - DNA, 25 bp, Homo sapien
gaggaatagcagagtcttaaaagag

SEQ ID NO: 436909 - DNA, 25 bp, Homo sapien
tagaggaatagcagagtcttaaaag

SEQ ID NO: 436910 - DNA, 25 bp, Homo sapien
agaggaatagcagagtcttaaaaga

SEQ ID NO: 436911 - DNA, 25 bp, Homo sapien
atagaggaatagcagagtcttaaaa

SEQ ID NO: 436912 - DNA, 25 bp, Homo sapien
ctgtgaggctcggagtcgccggagg

SEQ ID NO: 436913 - DNA, 25 bp, Homo sapien
gaagtagcgggcagttggccggaag

SEQ ID NO: 436914 - DNA, 25 bp, Homo sapien
tcactcgcgcagcaggcggaagtag

SEQ ID NO: 436915 - DNA, 25 bp, Homo sapien
aggagccagtatctgtgtcgccgcc

SEQ ID NO: 436916 - DNA, 25 bp, Homo sapien
cggatctcagagaaggtgtactaca

SEQ ID NO: 436917 - DNA, 25 bp, Homo sapien
catctgagacttgctagggactaca

SEQ ID NO: 436918 - DNA, 25 bp, Homo sapien
gatagtcaagcattccccaggtaga

SEQ ID NO: 436919 - DNA, 25 bp, Homo sapien
tatgctcaggttgtcctttcccgga

SEQ ID NO: 436920 - DNA, 25 bp, Homo sapien
gcgcccggccagtgcagtggtatta

SEQ ID NO: 436921 - DNA, 25 bp, Homo sapien
gagagaccaatcaatcacaagctag

SEQ ID NO: 436922 - DNA, 25 bp, Homo sapien
cagtggataataggagaggccttcc

SEQ ID NO: 436923 - DNA, 25 bp, Homo sapien
cacaagctagcaagtgcacagccag

SEQ ID NO: 436924 - DNA, 25 bp, Homo sapien
aggactcaagacttcattgtaattc

SEQ ID NO: 436925 - DNA, 25 bp, Homo sapien
gactcaagacttcattgtaattctt

SEQ ID NO: 436926 - DNA, 25 bp, Homo sapien
ggactcaagacttcattgtaattct

SEQ ID NO: 436927 - DNA, 25 bp, Homo sapien
ccagggttaccgtgatagctgagga

SEQ ID NO: 436928 - DNA, 25 bp, Homo sapien
gggttaccgtgatagctgaggacat

SEQ ID NO: 436929 - DNA, 25 bp, Homo sapien
gcgccagggttaccgtgatagctga

SEQ ID NO: 436930 - DNA, 25 bp, Homo sapien
tggagcgccagggttaccgtgatag

SEQ ID NO: 436931 - DNA, 25 bp, Homo sapien
ttgtctgagggtagttttcacttac

SEQ ID NO: 436932 - DNA, 25 bp, Homo sapien
tatttttgtctgagggtagttttca

SEQ ID NO: 436933 - DNA, 25 bp, Homo sapien
ttataagcgtgaacccctacacctg

SEQ ID NO: 436934 - DNA, 25 bp, Homo sapien
ataagcgtgaacccctacacctggc

SEQ ID NO: 436935 - DNA, 25 bp, Homo sapien
cactggtccttagcctggttgctca

SEQ ID NO: 436936 - DNA, 25 bp, Homo sapien
gaagagaatgacttacagttagatc

SEQ ID NO: 436937 - DNA, 25 bp, Homo sapien
gacttacagttagatcactggtcct

SEQ ID NO: 436938 - DNA, 25 bp, Homo sapien
gatgtagccaaccacagtatgaggt

SEQ ID NO: 436939 - DNA, 25 bp, Homo sapien
tacttccatcagcaacgggtacttg

SEQ ID NO: 436940 - DNA, 25 bp, Homo sapien
agaaaggtatgactctgctacttcc

SEQ ID NO: 436941 - DNA, 25 bp, Homo sapien
tcattgggtgccataagcattgact

SEQ ID NO: 436942 - DNA, 25 bp, Homo sapien
tattgtttggaaggccatctggagc

SEQ ID NO: 436943 - DNA, 25 bp, Homo sapien
tctgcacctgttagggaggccgcag

SEQ ID NO: 436944 - DNA, 25 bp, Homo sapien
cctgaggccctggccggcgcacact

SEQ ID NO: 436945 - DNA, 25 bp, Homo sapien
ctctgcacctgttagggaggccgca

SEQ ID NO: 436946 - DNA, 25 bp, Homo sapien
gcacactcccatccgtcaccgtcgg

SEQ ID NO: 436947 - DNA, 25 bp, Homo sapien
tcccagttcagagaattcaggattc

SEQ ID NO: 436948 - DNA, 25 bp, Homo sapien
tcctcaggccattctgatgctcatc

SEQ ID NO: 436949 - DNA, 25 bp, Homo sapien
aattcaggattcaggagaatcgcct

SEQ ID NO: 436950 - DNA, 25 bp, Homo sapien
tcatcaaagtgtgggaaagcccggt

SEQ ID NO: 436951 - DNA, 25 bp, Homo sapien
gtatgtagagttcctcacttcctca

SEQ ID NO: 436952 - DNA, 25 bp, Homo sapien
ctaggcttgagagctcagtatgtag

SEQ ID NO: 436953 - DNA, 25 bp, Homo sapien
cgtggccaccgtttcagccagatct

SEQ ID NO: 436954 - DNA, 25 bp, Homo sapien
cagcctctcaaatctatcacccctt

SEQ ID NO: 436955 - DNA, 25 bp, Homo sapien
gaagtgaacggctcagtttccggcc

SEQ ID NO: 436956 - DNA, 25 bp, Homo sapien
gacagaaaacttccggctggtggcg

SEQ ID NO: 436957 - DNA, 25 bp, Homo sapien
agctgagccaccgaaaactccttgg

SEQ ID NO: 436958 - DNA, 25 bp, Homo sapien
accccaaggcgcgtatcgggcgagt

SEQ ID NO: 436959 - DNA, 25 bp, Homo sapien
gttacaaacacgatcttcttcccca

SEQ ID NO: 436960 - DNA, 25 bp, Homo sapien
cagcttcttggcgttccccgttaca

SEQ ID NO: 436961 - DNA, 25 bp, Homo sapien
ccaccaaagtgcatggaaacttatc

SEQ ID NO: 436962 - DNA, 25 bp, Homo sapien
tgcatggaaacttatctcctagaat

SEQ ID NO: 436963 - DNA, 25 bp, Homo sapien
ttctgtgccaccaaagtgcatggaa

SEQ ID NO: 436964 - DNA, 25 bp, Homo sapien
ccaaagtgcatggaaacttatctcc

SEQ ID NO: 436965 - DNA, 25 bp, Homo sapien
cagaaagtcaggtcacaggaagaca

SEQ ID NO: 436966 - DNA, 25 bp, Homo sapien
cacagaaagtcaggtcacaggaaga

SEQ ID NO: 436967 - DNA, 25 bp, Homo sapien
acacagaaagtcaggtcacaggaag

SEQ ID NO: 436968 - DNA, 25 bp, Homo sapien
cacacagaaagtcaggtcacaggaa

SEQ ID NO: 436969 - DNA, 25 bp, Homo sapien
ctggcgaactgcctcctgacatttc

SEQ ID NO: 436970 - DNA, 25 bp, Homo sapien
cctgacatttctgtatggaaatctc

SEQ ID NO: 436971 - DNA, 25 bp, Homo sapien
tctcatccggctccccctggtactc

SEQ ID NO: 436972 - DNA, 25 bp, Homo sapien
tgtatggaaatctcatccggctccc

SEQ ID NO: 436973 - DNA, 25 bp, Homo sapien
aagagcaagtgtgggacaagggcag

SEQ ID NO: 436974 - DNA, 25 bp, Homo sapien
gaagagcaagtgtgggacaagggca

SEQ ID NO: 436975 - DNA, 25 bp, Homo sapien
acaagaagagcaagtgtgggacaag

SEQ ID NO: 436976 - DNA, 25 bp, Homo sapien
tggacaagaagagcaagtgtgggac

SEQ ID NO: 436977 - DNA, 25 bp, Homo sapien
acaaagacatacagccctgagaccc

SEQ ID NO: 436978 - DNA, 25 bp, Homo sapien
agtgtcctcaaccagcacgggcccc

SEQ ID NO: 436979 - DNA, 25 bp, Homo sapien
gccctccaagggcattgaagcacag

SEQ ID NO: 436980 - DNA, 25 bp, Homo sapien
ggagccctccaagggcattgaagca

SEQ ID NO: 436981 - DNA, 25 bp, Homo sapien
caagggcattgaagcacagacaagt

SEQ ID NO: 436982 - DNA, 25 bp, Homo sapien
catcattttgcagttctggtggttt

SEQ ID NO: 436983 - DNA, 25 bp, Homo sapien
agcagctggatcttcttaccacctt

SEQ ID NO: 436984 - DNA, 25 bp, Homo sapien
aaggacagtcagacaccaggagcag

SEQ ID NO: 436985 - DNA, 25 bp, Homo sapien
tggatcttcttaccaccttttccag

SEQ ID NO: 436986 - DNA, 25 bp, Homo sapien
gagaaagaaaggacagtcagacacc

SEQ ID NO: 436987 - DNA, 25 bp, Homo sapien
cttcaggctttaacttctccagaaa

SEQ ID NO: 436988 - DNA, 25 bp, Homo sapien
caggctttaacttctccagaaacca

SEQ ID NO: 436989 - DNA, 25 bp, Homo sapien
tcaggctttaacttctccagaaacc

SEQ ID NO: 436990 - DNA, 25 bp, Homo sapien
ttcaggctttaacttctccagaaac

SEQ ID NO: 436991 - DNA, 25 bp, Homo sapien
cagaattaagtacagcccctttgtt

SEQ ID NO: 436992 - DNA, 25 bp, Homo sapien
gattctcattcccaacagatccagg

SEQ ID NO: 436993 - DNA, 25 bp, Homo sapien
cagtgctctctggagtacagggtac

SEQ ID NO: 436994 - DNA, 25 bp, Homo sapien
ggcaggccctggctaaggcagtcac

SEQ ID NO: 436995 - DNA, 25 bp, Homo sapien
tgaatccgggaagtggaggttggag

SEQ ID NO: 436996 - DNA, 25 bp, Homo sapien
ggagtgagccgagatcatgccactg

SEQ ID NO: 436997 - DNA, 25 bp, Homo sapien
cactccagcctgggcgacagagcaa

SEQ ID NO: 436998 - DNA, 25 bp, Homo sapien
cctgggcgacagagcaagactttgt

SEQ ID NO: 436999 - DNA, 25 bp, Homo sapien
acataaggatgggtgcggtaactca

SEQ ID NO: 437000 - DNA, 25 bp, Homo sapien
attaagccgggctcagtggatcacg

SEQ ID NO: 437001 - DNA, 25 bp, Homo sapien
aattaagccgggctcagtggatcac

SEQ ID NO: 437002 - DNA, 25 bp, Homo sapien
tttaaaagcacataaggatgggtgc

SEQ ID NO: 437003 - DNA, 25 bp, Homo sapien
acttgtcctcgaacccggccaggag

SEQ ID NO: 437004 - DNA, 25 bp, Homo sapien
cctcgaacccggccaggagctggtg

SEQ ID NO: 437005 - DNA, 25 bp, Homo sapien
ggctgacttgtcctcgaacccggcc

SEQ ID NO: 437006 - DNA, 25 bp, Homo sapien
tgacttgtcctcgaacccggccagg

SEQ ID NO: 437007 - DNA, 25 bp, Homo sapien
ctgagtgcaaacgtgcagagcgcat

SEQ ID NO: 437008 - DNA, 25 bp, Homo sapien
gaggtccggcccctgaacaggcgca

SEQ ID NO: 437009 - DNA, 25 bp, Homo sapien
gtccccggtgctgagtgcaaacgtg

SEQ ID NO: 437010 - DNA, 25 bp, Homo sapien
ccctgaacaggcgcacgggctggct

SEQ ID NO: 437011 - DNA, 25 bp, Homo sapien
ggaaaggctgagagatagtcaagca

SEQ ID NO: 437012 - DNA, 25 bp, Homo sapien
ggctgagagatagtcaagcaccttg

SEQ ID NO: 437013 - DNA, 25 bp, Homo sapien
aaggctgagagatagtcaagcacct

SEQ ID NO: 437014 - DNA, 25 bp, Homo sapien
aaaggctgagagatagtcaagcacc

SEQ ID NO: 437015 - DNA, 25 bp, Homo sapien
catcacgcccggcctcattttaaaa

SEQ ID NO: 437016 - DNA, 25 bp, Homo sapien
atcacgcccggcctcattttaaaat

SEQ ID NO: 437017 - DNA, 25 bp, Homo sapien
agccatcacgcccggcctcatttta

SEQ ID NO: 437018 - DNA, 25 bp, Homo sapien
tttgctgtgttatccaggctgttct

SEQ ID NO: 437019 - DNA, 25 bp, Homo sapien
ctcactgtcccgtcaaactccgagg

SEQ ID NO: 437020 - DNA, 25 bp, Homo sapien
tcccgtcaaactccgaggctcaggt

SEQ ID NO: 437021 - DNA, 25 bp, Homo sapien
tgtcccgtcaaactccgaggctcag

SEQ ID NO: 437022 - DNA, 25 bp, Homo sapien
actgtcccgtcaaactccgaggctc

SEQ ID NO: 437023 - DNA, 25 bp, Homo sapien
gcaaattctgcttctgccgtgagga

SEQ ID NO: 437024 - DNA, 25 bp, Homo sapien
tcaaggctgctatgaacggtagtca

SEQ ID NO: 437025 - DNA, 25 bp, Homo sapien
gatgccaagtaatttagacccaaag

SEQ ID NO: 437026 - DNA, 25 bp, Homo sapien
gctgcgtgactaaggccagttactg

SEQ ID NO: 437027 - DNA, 25 bp, Homo sapien
ccacgtggcaaaggcgaaaccccat

SEQ ID NO: 437028 - DNA, 25 bp, Homo sapien
aatgtcatgttgttatcaaagtaaa

SEQ ID NO: 437029 - DNA, 25 bp, Homo sapien
tgtcatgttgttatcaaagtaaaaa

SEQ ID NO: 437030 - DNA, 25 bp, Homo sapien
gcctgagccacgtggcaaaggcgaa

SEQ ID NO: 437031 - DNA, 25 bp, Homo sapien
tgtaactgggtccagaggacaagca

SEQ ID NO: 437032 - DNA, 25 bp, Homo sapien
tacgcaaaatgtagttgcaaggccc

SEQ ID NO: 437033 - DNA, 25 bp, Homo sapien
gaatttgatttgacccaacttacgc

SEQ ID NO: 437034 - DNA, 25 bp, Homo sapien
ccacacccgggacaaattgggacat

SEQ ID NO: 437035 - DNA, 25 bp, Homo sapien
gcagcctctgggtgccacgatccgg

SEQ ID NO: 437036 - DNA, 25 bp, Homo sapien
tgaaagcaggggtcccagccaaagt

SEQ ID NO: 437037 - DNA, 25 bp, Homo sapien
tcatatccatcaggctgaaagcagg

SEQ ID NO: 437038 - DNA, 25 bp, Homo sapien
ccagccaaagtcctggcagcctctg

SEQ ID NO: 437039 - DNA, 25 bp, Homo sapien
ctcagggagcccagattcaggaagg

SEQ ID NO: 437040 - DNA, 25 bp, Homo sapien
tcatccctggagaccaaagctcaca

SEQ ID NO: 437041 - DNA, 25 bp, Homo sapien
ccaaccctacctcatctcatccctg

SEQ ID NO: 437042 - DNA, 25 bp, Homo sapien
tcaattcccctgtaggcagaaaccc

SEQ ID NO: 437043 - DNA, 25 bp, Homo sapien
ttctccgccttaggcatctctgcgt

SEQ ID NO: 437044 - DNA, 25 bp, Homo sapien
agcagggcccggaagcgatgggaga

SEQ ID NO: 437045 - DNA, 25 bp, Homo sapien
gaagcgatgggagacagcgttcttc

SEQ ID NO: 437046 - DNA, 25 bp, Homo sapien
acagcgttcttctccgccttaggca

SEQ ID NO: 437047 - DNA, 25 bp, Homo sapien
tcaagctgccaaactgccaaagtac

SEQ ID NO: 437048 - DNA, 25 bp, Homo sapien
tcagggggtgcctgcccgatgcggg

SEQ ID NO: 437049 - DNA, 25 bp, Homo sapien
cccgatgcgggaggttttgggctag

SEQ ID NO: 437050 - DNA, 25 bp, Homo sapien
tgcgggaggttttgggctagccctc

SEQ ID NO: 437051 - DNA, 25 bp, Homo sapien
tgcctgcccgatgcgggaggttttg

SEQ ID NO: 437052 - DNA, 25 bp, Homo sapien
agacaggccggtgaggctactcgac

SEQ ID NO: 437053 - DNA, 25 bp, Homo sapien
gagcagtgaatcctaagggcaagag

SEQ ID NO: 437054 - DNA, 25 bp, Homo sapien
caagtacagctttaccacccaaggt

SEQ ID NO: 437055 - DNA, 25 bp, Homo sapien
caagagaatggcgtccacttgccag

SEQ ID NO: 437056 - DNA, 25 bp, Homo sapien
ttttggaaacaagtctcatccagaa

SEQ ID NO: 437057 - DNA, 25 bp, Homo sapien
gatatagctggtttattttggaaac

SEQ ID NO: 437058 - DNA, 25 bp, Homo sapien
acagatatagctggtttattttgga

SEQ ID NO: 437059 - DNA, 25 bp, Homo sapien
ctgcatttaaaaaccatggaaggcg

SEQ ID NO: 437060 - DNA, 25 bp, Homo sapien
caaagggccctgtgactctcagatg

SEQ ID NO: 437061 - DNA, 25 bp, Homo sapien
acagcatgtgcaagggtccagagga

SEQ ID NO: 437062 - DNA, 25 bp, Homo sapien
gaaacatggaagatccaggaggcct

SEQ ID NO: 437063 - DNA, 25 bp, Homo sapien
tgtgaaccatcccatctgttgtgcg

SEQ ID NO: 437064 - DNA, 25 bp, Homo sapien
gagctgcgtgttccgtttccaaggg

SEQ ID NO: 437065 - DNA, 25 bp, Homo sapien
tgcatttgccggatcgcatcgcagc

SEQ ID NO: 437066 - DNA, 25 bp, Homo sapien
caatctatgcatgaggcttccccaa

SEQ ID NO: 437067 - DNA, 25 bp, Homo sapien
taatgcgttcttatcttgccgggag

SEQ ID NO: 437068 - DNA, 25 bp, Homo sapien
acaccctgcttcctgtcaaccagtc

SEQ ID NO: 437069 - DNA, 25 bp, Homo sapien
gacaccctgcttcctgtcaaccagt

SEQ ID NO: 437070 - DNA, 25 bp, Homo sapien
agacaccctgcttcctgtcaaccag

SEQ ID NO: 437071 - DNA, 25 bp, Homo sapien
caccctgcttcctgtcaaccagtcg

SEQ ID NO: 437072 - DNA, 25 bp, Homo sapien
ccccgctggccgcgcagggaggtga

SEQ ID NO: 437073 - DNA, 25 bp, Homo sapien
cccgctggccgcgcagggaggtgag

SEQ ID NO: 437074 - DNA, 25 bp, Homo sapien
ccgctggccgcgcagggaggtgagg

SEQ ID NO: 437075 - DNA, 25 bp, Homo sapien
tgtccccgtgcaagctcgggttcca

SEQ ID NO: 437076 - DNA, 25 bp, Homo sapien
gaggagcgaccagaaaggcatcagc

SEQ ID NO: 437077 - DNA, 25 bp, Homo sapien
ggttcctgccgcacgtggcgcgggc

SEQ ID NO: 437078 - DNA, 25 bp, Homo sapien
gttccactcgccaggcggttcctgc

SEQ ID NO: 437079 - DNA, 25 bp, Homo sapien
tgacgggtcaagtaagggccagatt

SEQ ID NO: 437080 - DNA, 25 bp, Homo sapien
tttatacatggggacgactggaggc

SEQ ID NO: 437081 - DNA, 25 bp, Homo sapien
tgcgcgttggaaccgcaagttctaa

SEQ ID NO: 437082 - DNA, 25 bp, Homo sapien
cagatttggcgctgcgcgttggaac

SEQ ID NO: 437083 - DNA, 25 bp, Homo sapien
tatctgacctgaagcctggacactg

SEQ ID NO: 437084 - DNA, 25 bp, Homo sapien
actgggcccttcaggtcgcaagaaa

SEQ ID NO: 437085 - DNA, 25 bp, Homo sapien
ttatcctagggaagggccgttggca

SEQ ID NO: 437086 - DNA, 25 bp, Homo sapien
tacgaagtattccagccgtgttgct

SEQ ID NO: 437087 - DNA, 25 bp, Homo sapien
taatggcatcgttttaagctggacc

SEQ ID NO: 437088 - DNA, 25 bp, Homo sapien
tccccaaagtgttgttgctggccct

SEQ ID NO: 437089 - DNA, 25 bp, Homo sapien
catgccttaggaagaagcacatagg

SEQ ID NO: 437090 - DNA, 25 bp, Homo sapien
ggcgaggcttcacctcactgtggaa

SEQ ID NO: 437091 - DNA, 25 bp, Homo sapien
cattgaaggatggtagccaagattc

SEQ ID NO: 437092 - DNA, 25 bp, Homo sapien
tggccgaagtgctttagatgctctg

SEQ ID NO: 437093 - DNA, 25 bp, Homo sapien
gaccccatcgtgtaccattttgagg

SEQ ID NO: 437094 - DNA, 25 bp, Homo sapien
aagggtcggatgtgatggctcaacc

SEQ ID NO: 437095 - DNA, 25 bp, Homo sapien
cctgttgtggttgagggagcagaga

SEQ ID NO: 437096 - DNA, 25 bp, Homo sapien
acagcagtgaacaggctacggggca

SEQ ID NO: 437097 - DNA, 25 bp, Homo sapien
tggacaggggagaattgaaagaaaa

SEQ ID NO: 437098 - DNA, 25 bp, Homo sapien
catggtatagtgtctttggcatcag

SEQ ID NO: 437099 - DNA, 25 bp, Homo sapien
aatgccttccaggtaaattaagcat

SEQ ID NO: 437100 - DNA, 25 bp, Homo sapien
gccttccaggtaaattaagcatttc

SEQ ID NO: 437101 - DNA, 25 bp, Homo sapien
tgccttccaggtaaattaagcattt

SEQ ID NO: 437102 - DNA, 25 bp, Homo sapien
acaatgccttccaggtaaattaagc

SEQ ID NO: 437103 - DNA, 25 bp, Homo sapien
taggaaccctcatgagatgttggat

SEQ ID NO: 437104 - DNA, 25 bp, Homo sapien
gaattctagtgttgttgtcttaaac

SEQ ID NO: 437105 - DNA, 25 bp, Homo sapien
cagcaattagaaatacctccatgag

SEQ ID NO: 437106 - DNA, 25 bp, Homo sapien
tggagatccaaggaacatgttttaa

SEQ ID NO: 437107 - DNA, 25 bp, Homo sapien
aaaatgcggaatgcttcacaaattt

SEQ ID NO: 437108 - DNA, 25 bp, Homo sapien
attttagtatatgtgctgctgaagg

SEQ ID NO: 437109 - DNA, 25 bp, Homo sapien
gcatgtcatccttgcacaggggcca

SEQ ID NO: 437110 - DNA, 25 bp, Homo sapien
tggtaatcttctctgtatccttcca

SEQ ID NO: 437111 - DNA, 25 bp, Homo sapien
acatcaaaaaccagctttatgctca

SEQ ID NO: 437112 - DNA, 25 bp, Homo sapien
cctccttctgtggtttctagtgctc

SEQ ID NO: 437113 - DNA, 25 bp, Homo sapien
tctactcattcagagagacctctct

SEQ ID NO: 437114 - DNA, 25 bp, Homo sapien
catcagtgacgaatggcagttgcag

SEQ ID NO: 437115 - DNA, 25 bp, Homo sapien
ccgggcgcgtccgtgtgcgtggccg

SEQ ID NO: 437116 - DNA, 25 bp, Homo sapien
tgccgggcttgaggacgaggccggg

SEQ ID NO: 437117 - DNA, 25 bp, Homo sapien
gcagagccccgctctatgatgccgg

SEQ ID NO: 437118 - DNA, 25 bp, Homo sapien
ccgggcggcgctgtggcaaccctca

SEQ ID NO: 437119 - DNA, 25 bp, Homo sapien
ctggaggccggggctggtcgggcgg

SEQ ID NO: 437120 - DNA, 25 bp, Homo sapien
gacttcgctggaggccggggctggt

SEQ ID NO: 437121 - DNA, 25 bp, Homo sapien
agacttcgctggaggccggggctgg

SEQ ID NO: 437122 - DNA, 25 bp, Homo sapien
ttcgctggaggccggggctggtcgg

SEQ ID NO: 437123 - DNA, 25 bp, Homo sapien
catttaaggcattccgacgaggtca

SEQ ID NO: 437124 - DNA, 25 bp, Homo sapien
cccgaggccggctaggaatctattg

SEQ ID NO: 437125 - DNA, 25 bp, Homo sapien
ctgcagaaaccggtagagctaggat

SEQ ID NO: 437126 - DNA, 25 bp, Homo sapien
caggactcctggcaactatcagtgc

SEQ ID NO: 437127 - DNA, 25 bp, Homo sapien
ccccttccacctccagaagatgcat

SEQ ID NO: 437128 - DNA, 25 bp, Homo sapien
caggttgccctgttcaaggctgagg

SEQ ID NO: 437129 - DNA, 25 bp, Homo sapien
cagggttcctgatgggcagtctgat

SEQ ID NO: 437130 - DNA, 25 bp, Homo sapien
aagtaggtgactgtaatttctccca

SEQ ID NO: 437131 - DNA, 25 bp, Homo sapien
cagggctgccctaatgtagaagtcc

SEQ ID NO: 437132 - DNA, 25 bp, Homo sapien
ctgctggatgggacgagttctttac

SEQ ID NO: 437133 - DNA, 25 bp, Homo sapien
cccttctctgggcccgtgaatccct

SEQ ID NO: 437134 - DNA, 25 bp, Homo sapien
gtgaatccctggtttgctttatgtt

SEQ ID NO: 437135 - DNA, 25 bp, Homo sapien
ccgtgaatccctggtttgctttatg

SEQ ID NO: 437136 - DNA, 25 bp, Homo sapien
tgtctgtgggtcagacacggcttca

SEQ ID NO: 437137 - DNA, 25 bp, Homo sapien
tcagacacggcttcatagcactggg

SEQ ID NO: 437138 - DNA, 25 bp, Homo sapien
tgtgggtcagacacggcttcatagc

SEQ ID NO: 437139 - DNA, 25 bp, Homo sapien
atagcactggggcattcgagtgtgt

SEQ ID NO: 437140 - DNA, 25 bp, Homo sapien
caactcccattatctgagaagccac

SEQ ID NO: 437141 - DNA, 25 bp, Homo sapien
ggttcttgcgttcacttgcactgtg

SEQ ID NO: 437142 - DNA, 25 bp, Homo sapien
actggcaccaactcccattatctga

SEQ ID NO: 437143 - DNA, 25 bp, Homo sapien
ccactggcagtgaagcagccttttt

SEQ ID NO: 437144 - DNA, 25 bp, Homo sapien
tccttcagcagtgttggccaaggtg

SEQ ID NO: 437145 - DNA, 25 bp, Homo sapien
gccttttatggtccttgaccctgga

SEQ ID NO: 437146 - DNA, 25 bp, Homo sapien
ggtagttgttactctggtgtccctc

SEQ ID NO: 437147 - DNA, 25 bp, Homo sapien
ctgggctgggtcatgattgagacca

SEQ ID NO: 437148 - DNA, 25 bp, Homo sapien
gtccctcaatgagacatgtcttcca

SEQ ID NO: 437149 - DNA, 25 bp, Homo sapien
tccccacaatttgccctccaaccat

SEQ ID NO: 437150 - DNA, 25 bp, Homo sapien
ctccccacaatttgccctccaacca

SEQ ID NO: 437151 - DNA, 25 bp, Homo sapien
gccggctccgcttcgcctggccgtg

SEQ ID NO: 437152 - DNA, 25 bp, Homo sapien
acggcgccccgcgaacacatacaca

SEQ ID NO: 437153 - DNA, 25 bp, Homo sapien
tgagacggcgccccgcgaacacata

SEQ ID NO: 437154 - DNA, 25 bp, Homo sapien
catacacacacaccgcacggccggc

SEQ ID NO: 437155 - DNA, 25 bp, Homo sapien
tgcccgcgagcgctgccgtcgccgc

SEQ ID NO: 437156 - DNA, 25 bp, Homo sapien
agcggcggcgagagcaacaacagca

SEQ ID NO: 437157 - DNA, 25 bp, Homo sapien
ggccgcagcggtggagacagcagcc

SEQ ID NO: 437158 - DNA, 25 bp, Homo sapien
gtggccgcagcggtggagacagcag

SEQ ID NO: 437159 - DNA, 25 bp, Homo sapien
cagccgtggccgcagcggtggagac

SEQ ID NO: 437160 - DNA, 25 bp, Homo sapien
gtgctggcattgctcgcccacccag

SEQ ID NO: 437161 - DNA, 25 bp, Homo sapien
gggcagacgcactggccggtgccag

SEQ ID NO: 437162 - DNA, 25 bp, Homo sapien
attgctcgcccacccagccggcggg

SEQ ID NO: 437163 - DNA, 25 bp, Homo sapien
agggttgcagcgaccgccgttgaca

SEQ ID NO: 437164 - DNA, 25 bp, Homo sapien
ccaaggcaaataggaatctccttcc

SEQ ID NO: 437165 - DNA, 25 bp, Homo sapien
tggaaaatcattgcacaactgaagc

SEQ ID NO: 437166 - DNA, 25 bp, Homo sapien
caaagtctggctaatctgtctgtat

SEQ ID NO: 437167 - DNA, 25 bp, Homo sapien
cttcatattgtccagaaaccaaggc

SEQ ID NO: 437168 - DNA, 25 bp, Homo sapien
tgttgctcccactagaatgttaagg

SEQ ID NO: 437169 - DNA, 25 bp, Homo sapien
caaaggcgtgaatgactctgtaacc

SEQ ID NO: 437170 - DNA, 25 bp, Homo sapien
taagctaaatacctgtcaaaggcgt

SEQ ID NO: 437171 - DNA, 25 bp, Homo sapien
cttatgactagggttatgtgcgcac

SEQ ID NO: 437172 - DNA, 25 bp, Homo sapien
ggtcaagcataaacccagaagctgg

SEQ ID NO: 437173 - DNA, 25 bp, Homo sapien
tatgtgtcaactgcatgtcaacctg

SEQ ID NO: 437174 - DNA, 25 bp, Homo sapien
tttcaaaacaatcagcacggccaga

SEQ ID NO: 437175 - DNA, 25 bp, Homo sapien
tatggcctcgccacacagaaaagaa

SEQ ID NO: 437176 - DNA, 25 bp, Homo sapien
tacattaacgtgaaggcatctgaga

SEQ ID NO: 437177 - DNA, 25 bp, Homo sapien
ctttaggcttgaaatgtggcggacc

SEQ ID NO: 437178 - DNA, 25 bp, Homo sapien
tgggcgaaagagacaagcagcgctc

SEQ ID NO: 437179 - DNA, 25 bp, Homo sapien
caaatgagatctgtgtgccaatgtc

SEQ ID NO: 437180 - DNA, 25 bp, Homo sapien
aacctacctagcctgcactctgttg

SEQ ID NO: 437181 - DNA, 25 bp, Homo sapien
tcttccaatgctgtgatcccaagtc

SEQ ID NO: 437182 - DNA, 25 bp, Homo sapien
tgggtgtcttttgtaccaattccaa

SEQ ID NO: 437183 - DNA, 25 bp, Homo sapien
gatgcaagatgctctacgactatgt

SEQ ID NO: 437184 - DNA, 25 bp, Homo sapien
ctttgtttatctagtgcctttgagc

SEQ ID NO: 437185 - DNA, 25 bp, Homo sapien
taggctatcgttccaatagcagact

SEQ ID NO: 437186 - DNA, 25 bp, Homo sapien
ttgagctcccattggtctctgctgg

SEQ ID NO: 437187 - DNA, 25 bp, Homo sapien
ccaccctgtttagttttagcacgag

SEQ ID NO: 437188 - DNA, 25 bp, Homo sapien
tctatattctaaatcccagaggaca

SEQ ID NO: 437189 - DNA, 25 bp, Homo sapien
tagtacttataccatttcctgggca

SEQ ID NO: 437190 - DNA, 25 bp, Homo sapien
cctgggcaattcaaggaccttaagc

SEQ ID NO: 437191 - DNA, 25 bp, Homo sapien
catccacctataccagctgcttgtg

SEQ ID NO: 437192 - DNA, 25 bp, Homo sapien
tatcagttggaaagttagaaataac

SEQ ID NO: 437193 - DNA, 25 bp, Homo sapien
aaatatattatgatccatctccaca

SEQ ID NO: 437194 - DNA, 25 bp, Homo sapien
tttaggcatgataatactattgtgg

SEQ ID NO: 437195 - DNA, 25 bp, Homo sapien
aatgctaagcagtctaaaaacatga

SEQ ID NO: 437196 - DNA, 25 bp, Homo sapien
ctggaaatactactgaacttttcca

SEQ ID NO: 437197 - DNA, 25 bp, Homo sapien
tggaaatactactgaacttttccat

SEQ ID NO: 437198 - DNA, 25 bp, Homo sapien
tcctttgacctatgtgtaatttaga

SEQ ID NO: 437199 - DNA, 25 bp, Homo sapien
tagctgcattccacaaatgtaacag

SEQ ID NO: 437200 - DNA, 25 bp, Homo sapien
ctgtgtttacactttcattcattcc

SEQ ID NO: 437201 - DNA, 25 bp, Homo sapien
tttctattgcaattccacagaaact

SEQ ID NO: 437202 - DNA, 25 bp, Homo sapien
cttcaatgagccacgtgcacttcgt

SEQ ID NO: 437203 - DNA, 25 bp, Homo sapien
caggtccatctgtcacaaacccaga

SEQ ID NO: 437204 - DNA, 25 bp, Homo sapien
cacaaacccagaagatccagttagt

SEQ ID NO: 437205 - DNA, 25 bp, Homo sapien
gagccacgtgcacttcgttttgtat

SEQ ID NO: 437206 - DNA, 25 bp, Homo sapien
cataaattgagtccccatcataaac

SEQ ID NO: 437207 - DNA, 25 bp, Homo sapien
aatgcagcaactagcggtgcataaa

SEQ ID NO: 437208 - DNA, 25 bp, Homo sapien
ggtcccaactacactctgtagcaaa

SEQ ID NO: 437209 - DNA, 25 bp, Homo sapien
tggtcccaactacactctgtagcaa

SEQ ID NO: 437210 - DNA, 25 bp, Homo sapien
cacatgggacatcagccagatgagc

SEQ ID NO: 437211 - DNA, 25 bp, Homo sapien
ccacatgggacatcagccagatgag

SEQ ID NO: 437212 - DNA, 25 bp, Homo sapien
catgggacatcagccagatgagccc

SEQ ID NO: 437213 - DNA, 25 bp, Homo sapien
acatgggacatcagccagatgagcc

SEQ ID NO: 437214 - DNA, 25 bp, Homo sapien
tgcagcaaggcataacctgatgtgg

SEQ ID NO: 437215 - DNA, 25 bp, Homo sapien
ctgatgtggcaacaacctcagggac

SEQ ID NO: 437216 - DNA, 25 bp, Homo sapien
aacctcagggacagtctcattgcca

SEQ ID NO: 437217 - DNA, 25 bp, Homo sapien
aatccagtcaaattataagcagcat

SEQ ID NO: 437218 - DNA, 25 bp, Homo sapien
cacttgaattgcagatgcctcgatg

SEQ ID NO: 437219 - DNA, 25 bp, Homo sapien
cacagttgtctgtacagtgaggaat

SEQ ID NO: 437220 - DNA, 25 bp, Homo sapien
ttactgatcttacactctcctcggc

SEQ ID NO: 437221 - DNA, 25 bp, Homo sapien
tcggcctgagcagttatttggacac

SEQ ID NO: 437222 - DNA, 25 bp, Homo sapien
gaccacagctttatgagatgctctg

SEQ ID NO: 437223 - DNA, 25 bp, Homo sapien
tggtacaggaactgaacatccagga

SEQ ID NO: 437224 - DNA, 25 bp, Homo sapien
gagtggttgaacatatatcctccaa

SEQ ID NO: 437225 - DNA, 25 bp, Homo sapien
ccaaaatgactggttagctggtaca

SEQ ID NO: 437226 - DNA, 25 bp, Homo sapien
taggatggctggcaagccaatgacc

SEQ ID NO: 437227 - DNA, 25 bp, Homo sapien
caatgaccatcatgtaccacagggt

SEQ ID NO: 437228 - DNA, 25 bp, Homo sapien
taatggcctggtaacccaatcgggc

SEQ ID NO: 437229 - DNA, 25 bp, Homo sapien
ctcgacccctctaggatggctggca

SEQ ID NO: 437230 - DNA, 25 bp, Homo sapien
gtggaagccactccctagaagcaag

SEQ ID NO: 437231 - DNA, 25 bp, Homo sapien
aacaaccacattgttcacagaacgg

SEQ ID NO: 437232 - DNA, 25 bp, Homo sapien
cacagaacggtttagtggaagccac

SEQ ID NO: 437233 - DNA, 25 bp, Homo sapien
tgccaaagaatgaccatatctaaca

SEQ ID NO: 437234 - DNA, 25 bp, Homo sapien
ggtcacattcccagttgaatcaatt

SEQ ID NO: 437235 - DNA, 25 bp, Homo sapien
tatatatccatagagagggcagtga

SEQ ID NO: 437236 - DNA, 25 bp, Homo sapien
gagtgcccaaccactgcatactgct

SEQ ID NO: 437237 - DNA, 25 bp, Homo sapien
gggtcaacaacacccatgactcatt

SEQ ID NO: 437238 - DNA, 25 bp, Homo sapien
tgcaagccggtacttattggcactg

SEQ ID NO: 437239 - DNA, 25 bp, Homo sapien
gaaagccttgtagccaccatgaacg

SEQ ID NO: 437240 - DNA, 25 bp, Homo sapien
ccatgaacgtatagggccctggtcc

SEQ ID NO: 437241 - DNA, 25 bp, Homo sapien
tatggtcgtaaacactgctatggcc

SEQ ID NO: 437242 - DNA, 25 bp, Homo sapien
aatctgaagagaagcatttggcgcc

SEQ ID NO: 437243 - DNA, 25 bp, Homo sapien
gcaagtaacggaaaaatcggctgtc

SEQ ID NO: 437244 - DNA, 25 bp, Homo sapien
tggttccactcactatcacagctgt

SEQ ID NO: 437245 - DNA, 25 bp, Homo sapien
tcacagctgtgtgcaagtaacggaa

SEQ ID NO: 437246 - DNA, 25 bp, Homo sapien
gcgggatcataccacaattctaact

SEQ ID NO: 437247 - DNA, 25 bp, Homo sapien
taaacggactaccatttctaatcaa

SEQ ID NO: 437248 - DNA, 25 bp, Homo sapien
aagagaacctcataaaacatgcctc

SEQ ID NO: 437249 - DNA, 25 bp, Homo sapien
aattctaactagcaaacgcacccga

SEQ ID NO: 437250 - DNA, 25 bp, Homo sapien
gttgtgtaagactgctgaatggcca

SEQ ID NO: 437251 - DNA, 25 bp, Homo sapien
tgttgtgtaagactgctgaatggcc

SEQ ID NO: 437252 - DNA, 25 bp, Homo sapien
ggaagcactgaccagcggtcacagg

SEQ ID NO: 437253 - DNA, 25 bp, Homo sapien
tgggaagcactgaccagcggtcaca

SEQ ID NO: 437254 - DNA, 25 bp, Homo sapien
aaagaaaaggagcaatcacttctcc

SEQ ID NO: 437255 - DNA, 25 bp, Homo sapien
caaaagaaaaggagcaatcacttct

SEQ ID NO: 437256 - DNA, 25 bp, Homo sapien
acacaaaagaaaaggagcaatcact

SEQ ID NO: 437257 - DNA, 25 bp, Homo sapien
aaacacaaaagaaaaggagcaatca

SEQ ID NO: 437258 - DNA, 25 bp, Homo sapien
ctgtggcgcgatctcgtctcacggc

SEQ ID NO: 437259 - DNA, 25 bp, Homo sapien
aacctccaactccctggttcaagtg

SEQ ID NO: 437260 - DNA, 25 bp, Homo sapien
ctccaactccctggttcaagtgatt

SEQ ID NO: 437261 - DNA, 25 bp, Homo sapien
caactccctggttcaagtgattctc

SEQ ID NO: 437262 - DNA, 25 bp, Homo sapien
caagggccgattttttgaagagctc

SEQ ID NO: 437263 - DNA, 25 bp, Homo sapien
tgtaaggaacaagtagagtggccac

SEQ ID NO: 437264 - DNA, 25 bp, Homo sapien
gagtggccactctgaatctccctta

SEQ ID NO: 437265 - DNA, 25 bp, Homo sapien
caaaggaattctaacatgatgcagg

SEQ ID NO: 437266 - DNA, 25 bp, Homo sapien
tatcatactacaaacaagtgtccct

SEQ ID NO: 437267 - DNA, 25 bp, Homo sapien
tgacgagccttactgagaaaatacg

SEQ ID NO: 437268 - DNA, 25 bp, Homo sapien
cacacatgcatattaccggctaagg

SEQ ID NO: 437269 - DNA, 25 bp, Homo sapien
taagtgtaagaaggctgtgacgagc

SEQ ID NO: 437270 - DNA, 25 bp, Homo sapien
aataccaggatgtcgctgaggagga

SEQ ID NO: 437271 - DNA, 25 bp, Homo sapien
cactgttccgaggtgaataccagga

SEQ ID NO: 437272 - DNA, 25 bp, Homo sapien
aaacaagcggcttcactccgatgcg

SEQ ID NO: 437273 - DNA, 25 bp, Homo sapien
tgaggaggagactattgaaaccacc

SEQ ID NO: 437274 - DNA, 25 bp, Homo sapien
gagatacactgagacgaccctgtgt

SEQ ID NO: 437275 - DNA, 25 bp, Homo sapien
actgagacgaccctgtgttccacac

SEQ ID NO: 437276 - DNA, 25 bp, Homo sapien
tcttgttcatcagttgccagcgccc

SEQ ID NO: 437277 - DNA, 25 bp, Homo sapien
ttgccagcgcccacgagatacactg

SEQ ID NO: 437278 - DNA, 25 bp, Homo sapien
caaaatctcatgaactgggacaact

SEQ ID NO: 437279 - DNA, 25 bp, Homo sapien
tcatgaactgggacaacttcaattg

SEQ ID NO: 437280 - DNA, 25 bp, Homo sapien
tgggacaacttcaattgagcaaaat

SEQ ID NO: 437281 - DNA, 25 bp, Homo sapien
aaacaaaatctcatgaactgggaca

SEQ ID NO: 437282 - DNA, 25 bp, Homo sapien
gggacacaatggtcattgcaccagt

SEQ ID NO: 437283 - DNA, 25 bp, Homo sapien
gcagctgtaacaatctgtgtgctgg

SEQ ID NO: 437284 - DNA, 25 bp, Homo sapien
tgtgcagctgtaacaatctgtgtgc

SEQ ID NO: 437285 - DNA, 25 bp, Homo sapien
tggtcattgcaccagtggcagtcat

SEQ ID NO: 437286 - DNA, 25 bp, Homo sapien
ggcagggcaatgcactcctgattcc

SEQ ID NO: 437287 - DNA, 25 bp, Homo sapien
cctgcagctggtcttcttgttacag

SEQ ID NO: 437288 - DNA, 25 bp, Homo sapien
ctgattccggggctcccactggcag

SEQ ID NO: 437289 - DNA, 25 bp, Homo sapien
acagtagtacatggggttatccttg

SEQ ID NO: 437290 - DNA, 25 bp, Homo sapien
tcagagaaggcccattagcaggtgc

SEQ ID NO: 437291 - DNA, 25 bp, Homo sapien
gaagtactctccataaagtgctcag

SEQ ID NO: 437292 - DNA, 25 bp, Homo sapien
tctagtcccaggttatcaaaggtgg

SEQ ID NO: 437293 - DNA, 25 bp, Homo sapien
gagcaggctcagtgatacagaacca

SEQ ID NO: 437294 - DNA, 25 bp, Homo sapien
ataattctccttggcagtagtaatt

SEQ ID NO: 437295 - DNA, 25 bp, Homo sapien
caatttagcattgtcataattctcc

SEQ ID NO: 437296 - DNA, 25 bp, Homo sapien
aatgccagccaatgccacagatatt

SEQ ID NO: 437297 - DNA, 25 bp, Homo sapien
ctacagaacaatttagcattgtcat

SEQ ID NO: 437298 - DNA, 25 bp, Homo sapien
cttcttctgggttgtaagagaagcc

SEQ ID NO: 437299 - DNA, 25 bp, Homo sapien
tctaccttcttctgggttgtaagag

SEQ ID NO: 437300 - DNA, 25 bp, Homo sapien
cagctgcttaaggacaaattctacc

SEQ ID NO: 437301 - DNA, 25 bp, Homo sapien
tctgagatgactgcattattcgcag

SEQ ID NO: 437302 - DNA, 25 bp, Homo sapien
ccagcaccagtaggacacattgatc

SEQ ID NO: 437303 - DNA, 25 bp, Homo sapien
gcagccttcagtccccgagtactgg

SEQ ID NO: 437304 - DNA, 25 bp, Homo sapien
cacattgatcttccgaaggccgacc

SEQ ID NO: 437305 - DNA, 25 bp, Homo sapien
gacggcatccactgtagtaaactat

SEQ ID NO: 437306 - DNA, 25 bp, Homo sapien
ggagtccacacactgcttcatgttg

SEQ ID NO: 437307 - DNA, 25 bp, Homo sapien
tcaaggcacatggtgtccggcactg

SEQ ID NO: 437308 - DNA, 25 bp, Homo sapien
ggccacgtaggcattggagtccaca

SEQ ID NO: 437309 - DNA, 25 bp, Homo sapien
gggcaggtgctcatcgtataccatt

SEQ ID NO: 437310 - DNA, 25 bp, Homo sapien
cctgattctgtatgaaggttctcaa

SEQ ID NO: 437311 - DNA, 25 bp, Homo sapien
tctcaataggcagcaaggtctcgat

SEQ ID NO: 437312 - DNA, 25 bp, Homo sapien
tactgtcaatgtgcctgattctgta

SEQ ID NO: 437313 - DNA, 25 bp, Homo sapien
ggcagcaaggtctcgatggcagtct

SEQ ID NO: 437314 - DNA, 25 bp, Homo sapien
cagtgaatgaaagaccagttgtatc

SEQ ID NO: 437315 - DNA, 25 bp, Homo sapien
caatgactacaggtacagtagcctg

SEQ ID NO: 437316 - DNA, 25 bp, Homo sapien
cagtattgctgggatcagtacacca

SEQ ID NO: 437317 - DNA, 25 bp, Homo sapien
gcatcttcactggtcctttatagga

SEQ ID NO: 437318 - DNA, 25 bp, Homo sapien
tcaaggggtctgtaccatggaagaa

SEQ ID NO: 437319 - DNA, 25 bp, Homo sapien
ttcaaggggtctgtaccatggaaga

SEQ ID NO: 437320 - DNA, 25 bp, Homo sapien
gatcaccgtagaagccagatatgca

SEQ ID NO: 437321 - DNA, 25 bp, Homo sapien
ggtcaggttctcacacttctcacag

SEQ ID NO: 437322 - DNA, 25 bp, Homo sapien
gatatgcaggtctcgcagtgcttgc

SEQ ID NO: 437323 - DNA, 25 bp, Homo sapien
acatttccctccattggtgggatca

SEQ ID NO: 437324 - DNA, 25 bp, Homo sapien
ccgtgttggtgttgcacagagacgc

SEQ ID NO: 437325 - DNA, 25 bp, Homo sapien
gcacagagacgcgtgcccattgcac

SEQ ID NO: 437326 - DNA, 25 bp, Homo sapien
gcagaagcacttgcccgtgttggtg

SEQ ID NO: 437327 - DNA, 25 bp, Homo sapien
gacgcgtgcccattgcacttgcatg

SEQ ID NO: 437328 - DNA, 25 bp, Homo sapien
ttccttggtatcgattttctacctc

SEQ ID NO: 437329 - DNA, 25 bp, Homo sapien
cttggtatcgattttctacctcaca

SEQ ID NO: 437330 - DNA, 25 bp, Homo sapien
tctgagagggtttccttggtatcga

SEQ ID NO: 437331 - DNA, 25 bp, Homo sapien
tgagagggtttccttggtatcgatt

SEQ ID NO: 437332 - DNA, 25 bp, Homo sapien
atagactaaaggtgaactgatagtc

SEQ ID NO: 437333 - DNA, 25 bp, Homo sapien
tagctgtgtaatagcgatcatcttc

SEQ ID NO: 437334 - DNA, 25 bp, Homo sapien
ctgtgtaatagcgatcatcttcctg

SEQ ID NO: 437335 - DNA, 25 bp, Homo sapien
ggtgaactgatagtcaataagaaga

SEQ ID NO: 437336 - DNA, 25 bp, Homo sapien
tgctgaggaatctgttaagccagtg

SEQ ID NO: 437337 - DNA, 25 bp, Homo sapien
tgaaaaccttgtctaccacttagag

SEQ ID NO: 437338 - DNA, 25 bp, Homo sapien
ttgactagtacatctcttaactggg

SEQ ID NO: 437339 - DNA, 25 bp, Homo sapien
gatgcatccgactgtactgaaatta

SEQ ID NO: 437340 - DNA, 25 bp, Homo sapien
tgaacatgtccaaatccctgttttg

SEQ ID NO: 437341 - DNA, 25 bp, Homo sapien
gggtcttctctaggtatgtctttac

SEQ ID NO: 437342 - DNA, 25 bp, Homo sapien
tgcctaacagcacggtgcaagtaaa

SEQ ID NO: 437343 - DNA, 25 bp, Homo sapien
atgagctatcacgccctgccaggac

SEQ ID NO: 437344 - DNA, 25 bp, Homo sapien
taacagcacggtgcaagtaaattta

SEQ ID NO: 437345 - DNA, 25 bp, Homo sapien
aacttgcctaacagcacggtgcaag

SEQ ID NO: 437346 - DNA, 25 bp, Homo sapien
ttttgatgggccaggtgaaattact

SEQ ID NO: 437347 - DNA, 25 bp, Homo sapien
tatttgggtggttgcgaaaatcaaa

SEQ ID NO: 437348 - DNA, 25 bp, Homo sapien
ctgaattttgatgggccaggtgaaa

SEQ ID NO: 437349 - DNA, 25 bp, Homo sapien
tatctttgtactccttaatgttggt

SEQ ID NO: 437350 - DNA, 25 bp, Homo sapien
gcttctgaggttgattatgcttctg

SEQ ID NO: 437351 - DNA, 25 bp, Homo sapien
cagtgaccatgcttccatggttaaa

SEQ ID NO: 437352 - DNA, 25 bp, Homo sapien
tgcttctgaacattggcaaacagca

SEQ ID NO: 437353 - DNA, 25 bp, Homo sapien
acagcaacagcctccgtccagtgac

SEQ ID NO: 437354 - DNA, 25 bp, Homo sapien
caggccctagcttgtacaacagggt

SEQ ID NO: 437355 - DNA, 25 bp, Homo sapien
tcaggccctagcttgtacaacaggg

SEQ ID NO: 437356 - DNA, 25 bp, Homo sapien
gaatctgtgtactactctagatatt

SEQ ID NO: 437357 - DNA, 25 bp, Homo sapien
caaggttcacttgtgttgtcgcatg

SEQ ID NO: 437358 - DNA, 25 bp, Homo sapien
tctgtctctaagaatctgtgtacta

SEQ ID NO: 437359 - DNA, 25 bp, Homo sapien
tgtgcaaccaatatcactacctact

SEQ ID NO: 437360 - DNA, 25 bp, Homo sapien
gggcatgccatcgtttattttcaca

SEQ ID NO: 437361 - DNA, 25 bp, Homo sapien
caaggaaagcttggcaaactaaatg

SEQ ID NO: 437362 - DNA, 25 bp, Homo sapien
gaatgcagcattcataagtggatct

SEQ ID NO: 437363 - DNA, 25 bp, Homo sapien
cttaatttaagttagtgatccagaa

SEQ ID NO: 437364 - DNA, 25 bp, Homo sapien
atcccctaatgctatcccttcccct

SEQ ID NO: 437365 - DNA, 25 bp, Homo sapien
ccataaaattgctgtgctgagagaa

SEQ ID NO: 437366 - DNA, 25 bp, Homo sapien
tcacgaagaactgtaccaggtccat

SEQ ID NO: 437367 - DNA, 25 bp, Homo sapien
taccaggtccataaaattgctgtgc

SEQ ID NO: 437368 - DNA, 25 bp, Homo sapien
ctgaagaaagtcacgaagaactgta

SEQ ID NO: 437369 - DNA, 25 bp, Homo sapien
gaagagtggcttggacatcaaaagc

SEQ ID NO: 437370 - DNA, 25 bp, Homo sapien
aaagctccgcaagtgattctaggtg

SEQ ID NO: 437371 - DNA, 25 bp, Homo sapien
gggtgcacccctagaggttctgagt

SEQ ID NO: 437372 - DNA, 25 bp, Homo sapien
ggtggagagccacagatttacagct

SEQ ID NO: 437373 - DNA, 25 bp, Homo sapien
ctgagtgaaagcaagagaagtggct

SEQ ID NO: 437374 - DNA, 25 bp, Homo sapien
aacaccggtgaggaaggatggaatt

SEQ ID NO: 437375 - DNA, 25 bp, Homo sapien
ttggaaccagcagagccatgttgcc

SEQ ID NO: 437376 - DNA, 25 bp, Homo sapien
cacttctgggcatgtcgtgctgcag

SEQ ID NO: 437377 - DNA, 25 bp, Homo sapien
ctctctacgtctggaggcccaacaa

SEQ ID NO: 437378 - DNA, 25 bp, Homo sapien
gcagccaccaggagcaaagagagga

SEQ ID NO: 437379 - DNA, 25 bp, Homo sapien
cgtctggaggcccaacaactttgtt

SEQ ID NO: 437380 - DNA, 25 bp, Homo sapien
ggaggcccaacaactttgtttgatc

SEQ ID NO: 437381 - DNA, 25 bp, Homo sapien
ttatactccccccaataagatcagg

SEQ ID NO: 437382 - DNA, 25 bp, Homo sapien
tccccccaataagatcaggaggctc

SEQ ID NO: 437383 - DNA, 25 bp, Homo sapien
tccaaggcgacatttacagaggcaa

SEQ ID NO: 437384 - DNA, 25 bp, Homo sapien
ggcgacatttacagaggcaaaggga

SEQ ID NO: 437385 - DNA, 25 bp, Homo sapien
tatgaagtaactgcaagaatccagg

SEQ ID NO: 437386 - DNA, 25 bp, Homo sapien
tgctgtggcacaaggaactgactag

SEQ ID NO: 437387 - DNA, 25 bp, Homo sapien
taatttccagtaccactctgctgtg

SEQ ID NO: 437388 - DNA, 25 bp, Homo sapien
tggccactccatctctaaaccaggg

SEQ ID NO: 437389 - DNA, 25 bp, Homo sapien
ttgttgccaaaacacggctccagtg

SEQ ID NO: 437390 - DNA, 25 bp, Homo sapien
acagagaggacagcggctttgttgc

SEQ ID NO: 437391 - DNA, 25 bp, Homo sapien
aggcctcgagggagcctcacaaaca

SEQ ID NO: 437392 - DNA, 25 bp, Homo sapien
gccaaaacacggctccagtgcaatg

SEQ ID NO: 437393 - DNA, 25 bp, Homo sapien
agaaatgtccaccagggcgctggcc

SEQ ID NO: 437394 - DNA, 25 bp, Homo sapien
ctgagaaatgtccaccagggcgctg

SEQ ID NO: 437395 - DNA, 25 bp, Homo sapien
cttgtacactatcggcatctgctga

SEQ ID NO: 437396 - DNA, 25 bp, Homo sapien
ggctcctgacttctccttgtacact

SEQ ID NO: 437397 - DNA, 25 bp, Homo sapien
tgcagggggctgctgcttccggttt

SEQ ID NO: 437398 - DNA, 25 bp, Homo sapien
gggggctgctgcttccggtttctca

SEQ ID NO: 437399 - DNA, 25 bp, Homo sapien
tcagatgcaggtcccaggctgtgca

SEQ ID NO: 437400 - DNA, 25 bp, Homo sapien
cagggggctgctgcttccggtttct

SEQ ID NO: 437401 - DNA, 25 bp, Homo sapien
aaccacaagttcagaggaggctgca

SEQ ID NO: 437402 - DNA, 25 bp, Homo sapien
cactcactagctcgtgcgtgggaga

SEQ ID NO: 437403 - DNA, 25 bp, Homo sapien
gagacagtcccaagaacagttttcc

SEQ ID NO: 437404 - DNA, 25 bp, Homo sapien
gatcgcttatcaggcctagggtgac

SEQ ID NO: 437405 - DNA, 25 bp, Homo sapien
ccttgtcagcatttgctgccctcct

SEQ ID NO: 437406 - DNA, 25 bp, Homo sapien
tttccatgtgcttttcatccttgtc

SEQ ID NO: 437407 - DNA, 25 bp, Homo sapien
gtcagcatttgctgccctcctcaca

SEQ ID NO: 437408 - DNA, 25 bp, Homo sapien
tccatgtgcttttcatccttgtcag

SEQ ID NO: 437409 - DNA, 25 bp, Homo sapien
gccctgaggccggagaaagctgttt

SEQ ID NO: 437410 - DNA, 25 bp, Homo sapien
tatatacaggctctcttgtgacgcg

SEQ ID NO: 437411 - DNA, 25 bp, Homo sapien
gagatcccaggttttgaagcagaag

SEQ ID NO: 437412 - DNA, 25 bp, Homo sapien
tgtgacgcgcaacactgccagatga

SEQ ID NO: 437413 - DNA, 25 bp, Homo sapien
ggtgggcctggctatctagaaacca

SEQ ID NO: 437414 - DNA, 25 bp, Homo sapien
taggcagggtgtttgactctcatca

SEQ ID NO: 437415 - DNA, 25 bp, Homo sapien
tcaggatggccaattctcacagaaa

SEQ ID NO: 437416 - DNA, 25 bp, Homo sapien
tagaaaccaccgcaatggctggagc

SEQ ID NO: 437417 - DNA, 25 bp, Homo sapien
tctgctcttgggcccacatctgagc

SEQ ID NO: 437418 - DNA, 25 bp, Homo sapien
gtaaagccctcgctggacacagctt

SEQ ID NO: 437419 - DNA, 25 bp, Homo sapien
atctgagcttgtaaagccctcgctg

SEQ ID NO: 437420 - DNA, 25 bp, Homo sapien
aggaaggagcgggtgcagatgcagc

SEQ ID NO: 437421 - DNA, 25 bp, Homo sapien
acacatcattggtgagggctggtcc

SEQ ID NO: 437422 - DNA, 25 bp, Homo sapien
aatgacacatcattggtgagggctg

SEQ ID NO: 437423 - DNA, 25 bp, Homo sapien
atctgggtagatgccacgggcccag

SEQ ID NO: 437424 - DNA, 25 bp, Homo sapien
gcatctgggtagatgccacgggccc

SEQ ID NO: 437425 - DNA, 25 bp, Homo sapien
ttttcctagggagagagcatgccag

SEQ ID NO: 437426 - DNA, 25 bp, Homo sapien
gtgaactttgtgtagccgaggccgc

SEQ ID NO: 437427 - DNA, 25 bp, Homo sapien
ttaccaagaaggaatgacgtgcccc

SEQ ID NO: 437428 - DNA, 25 bp, Homo sapien
catggtggacgcaactcagaagctg

SEQ ID NO: 437429 - DNA, 25 bp, Homo sapien
aagtagttgttgtgtttatccagca

SEQ ID NO: 437430 - DNA, 25 bp, Homo sapien
gatgaagtagttgttgtgtttatcc

SEQ ID NO: 437431 - DNA, 25 bp, Homo sapien
tgcagtgagatgaagtagttgttgt

SEQ ID NO: 437432 - DNA, 25 bp, Homo sapien
tgtgcctggattctttgcaggtgca

SEQ ID NO: 437433 - DNA, 25 bp, Homo sapien
ccgcagccctcgacgtgcgcccggc

SEQ ID NO: 437434 - DNA, 25 bp, Homo sapien
gccgcagccctcgacgtgcgcccgg

SEQ ID NO: 437435 - DNA, 25 bp, Homo sapien
ggccgcagccctcgacgtgcgcccg

SEQ ID NO: 437436 - DNA, 25 bp, Homo sapien
cccgggcccgcagctcgttggccgt

SEQ ID NO: 437437 - DNA, 25 bp, Homo sapien
gccccgtccagccgccgcgatcccg

SEQ ID NO: 437438 - DNA, 25 bp, Homo sapien
gatgtacagcccctgcaggcccatc

SEQ ID NO: 437439 - DNA, 25 bp, Homo sapien
ctgcaggcccatctccgggacagcc

SEQ ID NO: 437440 - DNA, 25 bp, Homo sapien
ggcccatctccgggacagccaacat

SEQ ID NO: 437441 - DNA, 25 bp, Homo sapien
gcaggcccatctccgggacagccaa

SEQ ID NO: 437442 - DNA, 25 bp, Homo sapien
tgcagagaagagacggcagttcatc

SEQ ID NO: 437443 - DNA, 25 bp, Homo sapien
ctgcagagaagagacggcagttcat

SEQ ID NO: 437444 - DNA, 25 bp, Homo sapien
gggcaatgccgcagctttcctgggt

SEQ ID NO: 437445 - DNA, 25 bp, Homo sapien
gggagccgggtgggctaggcactgg

SEQ ID NO: 437446 - DNA, 25 bp, Homo sapien
caatgccgcagctttcctgggtcct

SEQ ID NO: 437447 - DNA, 25 bp, Homo sapien
tgaggggggcaatgccgcagctttc

SEQ ID NO: 437448 - DNA, 25 bp, Homo sapien
tagccactagacgtggtgccgaagt

SEQ ID NO: 437449 - DNA, 25 bp, Homo sapien
agcatagccactagacgtggtgccg

SEQ ID NO: 437450 - DNA, 25 bp, Homo sapien
gacgtggtgccgaagtcaatggcca

SEQ ID NO: 437451 - DNA, 25 bp, Homo sapien
actagacgtggtgccgaagtcaatg

SEQ ID NO: 437452 - DNA, 25 bp, Homo sapien
aatcgcgggcggtgtagccaaagct

SEQ ID NO: 437453 - DNA, 25 bp, Homo sapien
cctccggagtcagcagcaggcaggt

SEQ ID NO: 437454 - DNA, 25 bp, Homo sapien
aaagctgtggaaggcgccctccgga

SEQ ID NO: 437455 - DNA, 25 bp, Homo sapien
cttctcgaagtagagccagtcccgc

SEQ ID NO: 437456 - DNA, 25 bp, Homo sapien
catttcctgacgacctcgctcttaa

SEQ ID NO: 437457 - DNA, 25 bp, Homo sapien
tgacgacctcgctcttaaaatcacc

SEQ ID NO: 437458 - DNA, 25 bp, Homo sapien
gcactcatttcctgacgacctcgct

SEQ ID NO: 437459 - DNA, 25 bp, Homo sapien
tcctgacgacctcgctcttaaaatc

SEQ ID NO: 437460 - DNA, 25 bp, Homo sapien
agggcgtgctccctgaagaagcgca

SEQ ID NO: 437461 - DNA, 25 bp, Homo sapien
agggcatgggcgaacacctccaggg

SEQ ID NO: 437462 - DNA, 25 bp, Homo sapien
ctttccatttactgcctctagctgg

SEQ ID NO: 437463 - DNA, 25 bp, Homo sapien
ccagggcgggcatcgtctttccatt

SEQ ID NO: 437464 - DNA, 25 bp, Homo sapien
tggaggtactaatcaaatcacagga

SEQ ID NO: 437465 - DNA, 25 bp, Homo sapien
aagatgacctctgagctccggcggt

SEQ ID NO: 437466 - DNA, 25 bp, Homo sapien
tcttcagccctctgcggaactggag

SEQ ID NO: 437467 - DNA, 25 bp, Homo sapien
cggtggctacccatccaatgtcggg

SEQ ID NO: 437468 - DNA, 25 bp, Homo sapien
ccttctctggcagcgatgggctctg

SEQ ID NO: 437469 - DNA, 25 bp, Homo sapien
tcccgcatgaactgcttggctggct

SEQ ID NO: 437470 - DNA, 25 bp, Homo sapien
acccagcgcacagtgtccttctctg

SEQ ID NO: 437471 - DNA, 25 bp, Homo sapien
gatggcaggcaccgtcaacacccag

SEQ ID NO: 437472 - DNA, 25 bp, Homo sapien
cattctctcgggacactagtccagc

SEQ ID NO: 437473 - DNA, 25 bp, Homo sapien
ttgcggcagtataccgaggcggcct

SEQ ID NO: 437474 - DNA, 25 bp, Homo sapien
gctctgcattctctcgggacactag

SEQ ID NO: 437475 - DNA, 25 bp, Homo sapien
ctccagggcgatgagtagctgctct

SEQ ID NO: 437476 - DNA, 25 bp, Homo sapien
acagctctcctacgcctgactccac

SEQ ID NO: 437477 - DNA, 25 bp, Homo sapien
ctgactccaccaggaacgtgcggct

SEQ ID NO: 437478 - DNA, 25 bp, Homo sapien
tccaccaggaacgtgcggctgtggc

SEQ ID NO: 437479 - DNA, 25 bp, Homo sapien
ctgtggcgggaccttcgcagctgct

SEQ ID NO: 437480 - DNA, 25 bp, Homo sapien
ctccgccgcagtcggccaccacgta

SEQ ID NO: 437481 - DNA, 25 bp, Homo sapien
tccagctggtgcaccgtcaggtcca

SEQ ID NO: 437482 - DNA, 25 bp, Homo sapien
gtcaggtccacggtgcctccgccgc

SEQ ID NO: 437483 - DNA, 25 bp, Homo sapien
tccacggtgcctccgccgcagtcgg

SEQ ID NO: 437484 - DNA, 25 bp, Homo sapien
ttgcgagcctcgaaggcgatggtca

SEQ ID NO: 437485 - DNA, 25 bp, Homo sapien
cgctgcttgcggtagaagtcaatga

SEQ ID NO: 437486 - DNA, 25 bp, Homo sapien
gaagtcctcgccgaagatgcggcac

SEQ ID NO: 437487 - DNA, 25 bp, Homo sapien
cgcagagcggtctccacgttgtggc

SEQ ID NO: 437488 - DNA, 25 bp, Homo sapien
cgggaccctccagtgcacggtcatt

SEQ ID NO: 437489 - DNA, 25 bp, Homo sapien
tgcacggtcattcccgggtcggcaa

SEQ ID NO: 437490 - DNA, 25 bp, Homo sapien
aaccctgcctgagcccgcgggctca

SEQ ID NO: 437491 - DNA, 25 bp, Homo sapien
ctccagtgcacggtcattcccgggt

SEQ ID NO: 437492 - DNA, 25 bp, Homo sapien
ggcttcacaagacattcggagcatc

SEQ ID NO: 437493 - DNA, 25 bp, Homo sapien
acggtgggctgaaagagctcgttca

SEQ ID NO: 437494 - DNA, 25 bp, Homo sapien
tgaggaccacttcacgaagttcacg

SEQ ID NO: 437495 - DNA, 25 bp, Homo sapien
cattcggagcatcccctgtgaggac

SEQ ID NO: 437496 - DNA, 25 bp, Homo sapien
caccacgacgtggaggacgagagat

SEQ ID NO: 437497 - DNA, 25 bp, Homo sapien
cattgtgtgcaagacattgtgctca

SEQ ID NO: 437498 - DNA, 25 bp, Homo sapien
cacttcatcccgcaggtgttctaga

SEQ ID NO: 437499 - DNA, 25 bp, Homo sapien
ttctttgagagctcacgggagtcct

SEQ ID NO: 437500 - DNA, 25 bp, Homo sapien
cgaaccagcagcttttcgggcgggt

SEQ ID NO: 437501 - DNA, 25 bp, Homo sapien
tacaggttgatgagtacgcgccgct

SEQ ID NO: 437502 - DNA, 25 bp, Homo sapien
taatttcggtgtcgccaaactgcat

SEQ ID NO: 437503 - DNA, 25 bp, Homo sapien
gaaagaaagtcgatggacgcgcgca

SEQ ID NO: 437504 - DNA, 25 bp, Homo sapien
cccatgagcggtaagagaatgtcct

SEQ ID NO: 437505 - DNA, 25 bp, Homo sapien
cataccgagtcaatagcagagctgg

SEQ ID NO: 437506 - DNA, 25 bp, Homo sapien
cagtcactttcctacggcacagggt

SEQ ID NO: 437507 - DNA, 25 bp, Homo sapien
tgcatgccagttagagggaagtgcc

SEQ ID NO: 437508 - DNA, 25 bp, Homo sapien
tcacagggtcacagttagcaggtac

SEQ ID NO: 437509 - DNA, 25 bp, Homo sapien
tctataagtagtacccctgggtcac

SEQ ID NO: 437510 - DNA, 25 bp, Homo sapien
ggcttgtgacccttcatactactgg

SEQ ID NO: 437511 - DNA, 25 bp, Homo sapien
catgtagcaatatcaacctggtccc

SEQ ID NO: 437512 - DNA, 25 bp, Homo sapien
tgttttccgcgaagcgattgtccgg

SEQ ID NO: 437513 - DNA, 25 bp, Homo sapien
aactagagtgatgtcaggttcccgg

SEQ ID NO: 437514 - DNA, 25 bp, Homo sapien
gcagtgaccgttagctggtgcagct

SEQ ID NO: 437515 - DNA, 25 bp, Homo sapien
catgaccttggaccagtagcatctc

SEQ ID NO: 437516 - DNA, 25 bp, Homo sapien
cagacccagaaggtaactaaccgtg

SEQ ID NO: 437517 - DNA, 25 bp, Homo sapien
ttcaaaagccacgaaaccagattcc

SEQ ID NO: 437518 - DNA, 25 bp, Homo sapien
taaaaagccccatgtgagctaaaca

SEQ ID NO: 437519 - DNA, 25 bp, Homo sapien
gggatcacaaatgtctgcacagacc

SEQ ID NO: 437520 - DNA, 25 bp, Homo sapien
cctctgaggtatgctggagacttag

SEQ ID NO: 437521 - DNA, 25 bp, Homo sapien
gagacttagtctcctctacctatca

SEQ ID NO: 437522 - DNA, 25 bp, Homo sapien
aatgtctttgtctccctccttatcc

SEQ ID NO: 437523 - DNA, 25 bp, Homo sapien
ggaccagagactcagtattcccatt

SEQ ID NO: 437524 - DNA, 25 bp, Homo sapien
taaggtaggtaaagccatgagaaac

SEQ ID NO: 437525 - DNA, 25 bp, Homo sapien
tgtctcctgcgaaaaagaacagttc

SEQ ID NO: 437526 - DNA, 25 bp, Homo sapien
gatgctcacaaagcccctataaggt

SEQ ID NO: 437527 - DNA, 25 bp, Homo sapien
gctgatactaatagggcccctgctc

SEQ ID NO: 437528 - DNA, 25 bp, Homo sapien
caccgtggaagtaaccaagggcgct

SEQ ID NO: 437529 - DNA, 25 bp, Homo sapien
atgtgactttggcccttggttttct

SEQ ID NO: 437530 - DNA, 25 bp, Homo sapien
gctcctttcccagtttgatttcaat

SEQ ID NO: 437531 - DNA, 25 bp, Homo sapien
ccaagggcgcttccttgtgggcagc

SEQ ID NO: 437532 - DNA, 25 bp, Homo sapien
gctaccacaccgtgccctcagtgga

SEQ ID NO: 437533 - DNA, 25 bp, Homo sapien
aggttcccggccggagagtgcctct

SEQ ID NO: 437534 - DNA, 25 bp, Homo sapien
gggagctgtccggtgctaccacacc

SEQ ID NO: 437535 - DNA, 25 bp, Homo sapien
tctgccatccacgtcaggtctttgg

SEQ ID NO: 437536 - DNA, 25 bp, Homo sapien
gtctatggtacgacttcctgcccga

SEQ ID NO: 437537 - DNA, 25 bp, Homo sapien
tgagcgtcctgctatgcgccaatgc

SEQ ID NO: 437538 - DNA, 25 bp, Homo sapien
tacgcctcgcaggacgtgttcagcg

SEQ ID NO: 437539 - DNA, 25 bp, Homo sapien
gtacttgaaggccttggacacccga

SEQ ID NO: 437540 - DNA, 25 bp, Homo sapien
caggtgacgtgaaaagcgtttttca

SEQ ID NO: 437541 - DNA, 25 bp, Homo sapien
tctccaggtgacgtgaaaagcgttt

SEQ ID NO: 437542 - DNA, 25 bp, Homo sapien
catctctccaggtgacgtgaaaagc

SEQ ID NO: 437543 - DNA, 25 bp, Homo sapien
tgtgcatctctccaggtgacgtgaa

SEQ ID NO: 437544 - DNA, 25 bp, Homo sapien
tagtgagcagctttcgcatcctgtc

SEQ ID NO: 437545 - DNA, 25 bp, Homo sapien
aaggctgcacccaaaagccggtggg

SEQ ID NO: 437546 - DNA, 25 bp, Homo sapien
cccaaaagccggtgggtagtgagca

SEQ ID NO: 437547 - DNA, 25 bp, Homo sapien
cccaggttagaagtggcctctggct

SEQ ID NO: 437548 - DNA, 25 bp, Homo sapien
gacgctgaggcgtgaagttcattaa

SEQ ID NO: 437549 - DNA, 25 bp, Homo sapien
caatcaaggtcacgcggttgggcag

SEQ ID NO: 437550 - DNA, 25 bp, Homo sapien
tccgcgactggctgcgctgagcagc

SEQ ID NO: 437551 - DNA, 25 bp, Homo sapien
cggtgggccaggattcgctcgctcc

SEQ ID NO: 437552 - DNA, 25 bp, Homo sapien
tctgcgttagacaccccattttaca

SEQ ID NO: 437553 - DNA, 25 bp, Homo sapien
cagctgggctgtacggtctgcgtta

SEQ ID NO: 437554 - DNA, 25 bp, Homo sapien
tcgcgacatggtttggagctccaca

SEQ ID NO: 437555 - DNA, 25 bp, Homo sapien
tcacctgggatcaccgctagggatg

SEQ ID NO: 437556 - DNA, 25 bp, Homo sapien
aacaaacgccggcacagctggctgg

SEQ ID NO: 437557 - DNA, 25 bp, Homo sapien
tattcgaaaaataacagcagccgcg

SEQ ID NO: 437558 - DNA, 25 bp, Homo sapien
cagggaagcctctagttgcagctgc

SEQ ID NO: 437559 - DNA, 25 bp, Homo sapien
tgggccggaggaattaagatttatc

SEQ ID NO: 437560 - DNA, 25 bp, Homo sapien
tgagggtggtgaccggcgaggaagc

SEQ ID NO: 437561 - DNA, 25 bp, Homo sapien
accgcacacgcctgctggactgaga

SEQ ID NO: 437562 - DNA, 25 bp, Homo sapien
caggaggccatgagatcccagcagg

SEQ ID NO: 437563 - DNA, 25 bp, Homo sapien
ccggcgaggtcgtgcatggtctggg

SEQ ID NO: 437564 - DNA, 25 bp, Homo sapien
ccacctcctggattcgactaccatg

SEQ ID NO: 437565 - DNA, 25 bp, Homo sapien
aggcccaggactccagacctagcct

SEQ ID NO: 437566 - DNA, 25 bp, Homo sapien
acctcctggattcgactaccatgcc

SEQ ID NO: 437567 - DNA, 25 bp, Homo sapien
cctggattcgactaccatgcccagt

SEQ ID NO: 437568 - DNA, 25 bp, Homo sapien
cagggtccctacctgactctttggg

SEQ ID NO: 437569 - DNA, 25 bp, Homo sapien
gagcagggtccctacctgactcttt

SEQ ID NO: 437570 - DNA, 25 bp, Homo sapien
ctgcggaagagcagggtccctacct

SEQ ID NO: 437571 - DNA, 25 bp, Homo sapien
gaagagcagggtccctacctgactc

SEQ ID NO: 437572 - DNA, 25 bp, Homo sapien
attcagacgacagggaggattcgga

SEQ ID NO: 437573 - DNA, 25 bp, Homo sapien
tcggatgcccgtcgagacagggata

SEQ ID NO: 437574 - DNA, 25 bp, Homo sapien
acagggataggtgcgtcaggcggct

SEQ ID NO: 437575 - DNA, 25 bp, Homo sapien
ctgcatcagaagattcggaggattc

SEQ ID NO: 437576 - DNA, 25 bp, Homo sapien
tgctccgccatgtgggggtccatag

SEQ ID NO: 437577 - DNA, 25 bp, Homo sapien
gtctgctccgccatgtgggggtcca

SEQ ID NO: 437578 - DNA, 25 bp, Homo sapien
atgtgggggtccatagggctggggg

SEQ ID NO: 437579 - DNA, 25 bp, Homo sapien
tctgctccgccatgtgggggtccat

SEQ ID NO: 437580 - DNA, 25 bp, Homo sapien
agaaaaacgggacatacgctgggct

SEQ ID NO: 437581 - DNA, 25 bp, Homo sapien
agccaaatcaatctgcaggcaactg

SEQ ID NO: 437582 - DNA, 25 bp, Homo sapien
gcctagagtgagttaaagttttgaa

SEQ ID NO: 437583 - DNA, 25 bp, Homo sapien
tgtattcctgcaagacatgggctgt

SEQ ID NO: 437584 - DNA, 25 bp, Homo sapien
tgacaaacgtgcaggctcacatcct

SEQ ID NO: 437585 - DNA, 25 bp, Homo sapien
tcagctccagtctgatacagtagac

SEQ ID NO: 437586 - DNA, 25 bp, Homo sapien
cctgccacgcggagcttttgtgcat

SEQ ID NO: 437587 - DNA, 25 bp, Homo sapien
tcagccgtgttacaggagaccacct

SEQ ID NO: 437588 - DNA, 25 bp, Homo sapien
tggggtgggaagaacgcccaccatc

SEQ ID NO: 437589 - DNA, 25 bp, Homo sapien
gacaagggccaaggctcaaggcagt

SEQ ID NO: 437590 - DNA, 25 bp, Homo sapien
gaagaacgcccaccatcagggggcc

SEQ ID NO: 437591 - DNA, 25 bp, Homo sapien
aagacaagggccaaggctcaaggca

SEQ ID NO: 437592 - DNA, 25 bp, Homo sapien
ggctgcctggatggcctgttcaaac

SEQ ID NO: 437593 - DNA, 25 bp, Homo sapien
tttcgaatgatccggctggctgcct

SEQ ID NO: 437594 - DNA, 25 bp, Homo sapien
ttcgaatgatccggctggctgcctg

SEQ ID NO: 437595 - DNA, 25 bp, Homo sapien
gctggctgcctggatggcctgttca

SEQ ID NO: 437596 - DNA, 25 bp, Homo sapien
agactggaagcgtctgatggcaaac

SEQ ID NO: 437597 - DNA, 25 bp, Homo sapien
ctggaagcgtctgatggcaaactgc

SEQ ID NO: 437598 - DNA, 25 bp, Homo sapien
gactggaagcgtctgatggcaaact

SEQ ID NO: 437599 - DNA, 25 bp, Homo sapien
tggaagcgtctgatggcaaactgct

SEQ ID NO: 437600 - DNA, 25 bp, Homo sapien
gtgatgttccgaagcacggggctgt

SEQ ID NO: 437601 - DNA, 25 bp, Homo sapien
tggtgatgttccgaagcacggggct

SEQ ID NO: 437602 - DNA, 25 bp, Homo sapien
tgttccgaagcacggggctgtggcc

SEQ ID NO: 437603 - DNA, 25 bp, Homo sapien
gatgttccgaagcacggggctgtgg

SEQ ID NO: 437604 - DNA, 25 bp, Homo sapien
agaggagggtcctcacatgccaggg

SEQ ID NO: 437605 - DNA, 25 bp, Homo sapien
tgggagaggagggtcctcacatgcc

SEQ ID NO: 437606 - DNA, 25 bp, Homo sapien
cctcctcttcccggagagctcccac

SEQ ID NO: 437607 - DNA, 25 bp, Homo sapien
agggtcctcacatgccagggaacca

SEQ ID NO: 437608 - DNA, 25 bp, Homo sapien
ccatggcatcttgaagacaaatcca

SEQ ID NO: 437609 - DNA, 25 bp, Homo sapien
ctgggatgtgtgggcttccatggca

SEQ ID NO: 437610 - DNA, 25 bp, Homo sapien
ggatgtgtgggcttccatggcatct

SEQ ID NO: 437611 - DNA, 25 bp, Homo sapien
gcttccatggcatcttgaagacaaa

SEQ ID NO: 437612 - DNA, 25 bp, Homo sapien
ctgggtctctgggcaaaggcttccc

SEQ ID NO: 437613 - DNA, 25 bp, Homo sapien
gcttccctgcggctggcccactctg

SEQ ID NO: 437614 - DNA, 25 bp, Homo sapien
tgggtctctgggcaaaggcttccct

SEQ ID NO: 437615 - DNA, 25 bp, Homo sapien
gcaaaggcttccctgcggctggccc

SEQ ID NO: 437616 - DNA, 25 bp, Homo sapien
tatccccctctgcaggggtcagaga

SEQ ID NO: 437617 - DNA, 25 bp, Homo sapien
tcagagagaagcgacctagggccag

SEQ ID NO: 437618 - DNA, 25 bp, Homo sapien
aggggtcagagagaagcgacctagg

SEQ ID NO: 437619 - DNA, 25 bp, Homo sapien
cagtatccccctctgcaggggtcag

SEQ ID NO: 437620 - DNA, 25 bp, Homo sapien
ctgaggccagattagcaaggacagg

SEQ ID NO: 437621 - DNA, 25 bp, Homo sapien
cacaggcataggccaaacccctcca

SEQ ID NO: 437622 - DNA, 25 bp, Homo sapien
tgaggccagattagcaaggacaggg

SEQ ID NO: 437623 - DNA, 25 bp, Homo sapien
aggccagattagcaaggacagggtc

SEQ ID NO: 437624 - DNA, 25 bp, Homo sapien
actaatgagactctccatgcctggg

SEQ ID NO: 437625 - DNA, 25 bp, Homo sapien
gggcactaatgagactctccatgcc

SEQ ID NO: 437626 - DNA, 25 bp, Homo sapien
ggtcttgaccagtggggcactaatg

SEQ ID NO: 437627 - DNA, 25 bp, Homo sapien
ccagtggggcactaatgagactctc

SEQ ID NO: 437628 - DNA, 25 bp, Homo sapien
ctgcacgggcgtgtccctgtcctgg

SEQ ID NO: 437629 - DNA, 25 bp, Homo sapien
gcctccgcttattctgcacgggcgt

SEQ ID NO: 437630 - DNA, 25 bp, Homo sapien
acgctgcagggcatggacggagagc

SEQ ID NO: 437631 - DNA, 25 bp, Homo sapien
aggatgggccggatcacgctgcagg

SEQ ID NO: 437632 - DNA, 25 bp, Homo sapien
cactgtccaggaggttctcgatctc

SEQ ID NO: 437633 - DNA, 25 bp, Homo sapien
tctcgatctcatcgtgacacagtga

SEQ ID NO: 437634 - DNA, 25 bp, Homo sapien
tctccaatcagctctcggtggtcac

SEQ ID NO: 437635 - DNA, 25 bp, Homo sapien
cacagtgattttgagcggaggacgc

SEQ ID NO: 437636 - DNA, 25 bp, Homo sapien
gcaactgagaggcacctcttgggtc

SEQ ID NO: 437637 - DNA, 25 bp, Homo sapien
tttggccttcaaattcagttctggt

SEQ ID NO: 437638 - DNA, 25 bp, Homo sapien
ctgagaggcacctcttgggtctgac

SEQ ID NO: 437639 - DNA, 25 bp, Homo sapien
tggccttcaaattcagttctggttc

SEQ ID NO: 437640 - DNA, 25 bp, Homo sapien
tgaagtttcattcccaaaatcagag

SEQ ID NO: 437641 - DNA, 25 bp, Homo sapien
aatgaagtttcattcccaaaatcag

SEQ ID NO: 437642 - DNA, 25 bp, Homo sapien
ttaaattggtaagaccaggagcctc

SEQ ID NO: 437643 - DNA, 25 bp, Homo sapien
ccaggagcctcaaagaatgaagttt

SEQ ID NO: 437644 - DNA, 25 bp, Homo sapien
agatgtacttgaggtcttggtgctt

SEQ ID NO: 437645 - DNA, 25 bp, Homo sapien
atgtacttgaggtcttggtgctttc

SEQ ID NO: 437646 - DNA, 25 bp, Homo sapien
gtcttggtgctttccgtctactgtc

SEQ ID NO: 437647 - DNA, 25 bp, Homo sapien
ggtgctttccgtctactgtctgtag

SEQ ID NO: 437648 - DNA, 25 bp, Homo sapien
gggtatctgcagtctacaatcacaa

SEQ ID NO: 437649 - DNA, 25 bp, Homo sapien
gttgctgaacttgcccgtcaatagg

SEQ ID NO: 437650 - DNA, 25 bp, Homo sapien
aaacttatccacgatgttgctgaac

SEQ ID NO: 437651 - DNA, 25 bp, Homo sapien
cttgatgtgcccgccttcatattca

SEQ ID NO: 437652 - DNA, 25 bp, Homo sapien
tgtccaggctacagggcgcgatggg

SEQ ID NO: 437653 - DNA, 25 bp, Homo sapien
gttccaggggcaagttcaccgcagt

SEQ ID NO: 437654 - DNA, 25 bp, Homo sapien
gaattcacagtggaaaatgaggatg

SEQ ID NO: 437655 - DNA, 25 bp, Homo sapien
gggcccacgctcagatgagaattca

SEQ ID NO: 437656 - DNA, 25 bp, Homo sapien
aattcaagggatccattcgggccac

SEQ ID NO: 437657 - DNA, 25 bp, Homo sapien
gccactcctggacaagacctggtga

SEQ ID NO: 437658 - DNA, 25 bp, Homo sapien
gcagtggcttgtacatcatgggacc

SEQ ID NO: 437659 - DNA, 25 bp, Homo sapien
gatgaactctccgtttctagaaggc

SEQ ID NO: 437660 - DNA, 25 bp, Homo sapien
agggaagaactccttgtagccgcct

SEQ ID NO: 437661 - DNA, 25 bp, Homo sapien
tgagggaagaactccttgtagccgc

SEQ ID NO: 437662 - DNA, 25 bp, Homo sapien
cggtctcgttccctgatgaaacggc

SEQ ID NO: 437663 - DNA, 25 bp, Homo sapien
ttgacagcacggtctcgttccctga

SEQ ID NO: 437664 - DNA, 25 bp, Homo sapien
agccaaccctcacacagagactgtg

SEQ ID NO: 437665 - DNA, 25 bp, Homo sapien
tggaatgggtaagtttggcagggac

SEQ ID NO: 437666 - DNA, 25 bp, Homo sapien
tggccaagccaaccctcacacagag

SEQ ID NO: 437667 - DNA, 25 bp, Homo sapien
gtcaatgcagtggaatgggtaagtt

SEQ ID NO: 437668 - DNA, 25 bp, Homo sapien
tggtcctgcagccggctacagagct

SEQ ID NO: 437669 - DNA, 25 bp, Homo sapien
gaaggcctcgtggttcatgggccgg

SEQ ID NO: 437670 - DNA, 25 bp, Homo sapien
tagctcatccttgaaggcctcgtgg

SEQ ID NO: 437671 - DNA, 25 bp, Homo sapien
tcttgaggcggaaggtctttagctc

SEQ ID NO: 437672 - DNA, 25 bp, Homo sapien
acaaaggagcgtttcaggacacagg

SEQ ID NO: 437673 - DNA, 25 bp, Homo sapien
catccgcaacaagacagcagcaagt

SEQ ID NO: 437674 - DNA, 25 bp, Homo sapien
ttaactaactcaacagactgggctc

SEQ ID NO: 437675 - DNA, 25 bp, Homo sapien
catggcagacataccacggttccta

SEQ ID NO: 437676 - DNA, 25 bp, Homo sapien
ccacacaaataggcacacatatatt

SEQ ID NO: 437677 - DNA, 25 bp, Homo sapien
tccacacaaataggcacacatatat

SEQ ID NO: 437678 - DNA, 25 bp, Homo sapien
gtccacacaaataggcacacatata

SEQ ID NO: 437679 - DNA, 25 bp, Homo sapien
agtccttggtttagctgcttctgtg

SEQ ID NO: 437680 - DNA, 25 bp, Homo sapien
cagtccttggtttagctgcttctgt

SEQ ID NO: 437681 - DNA, 25 bp, Homo sapien
tcagtccttggtttagctgcttctg

SEQ ID NO: 437682 - DNA, 25 bp, Homo sapien
tgctcagtgctttattgaaccaagg

SEQ ID NO: 437683 - DNA, 25 bp, Homo sapien
tcagtgctttattgaaccaaggccc

SEQ ID NO: 437684 - DNA, 25 bp, Homo sapien
gtgctttattgaaccaaggccctaa

SEQ ID NO: 437685 - DNA, 25 bp, Homo sapien
aacttgctcagtgctttattgaacc

SEQ ID NO: 437686 - DNA, 25 bp, Homo sapien
agatctgtgcccttgatgaaatgtc

SEQ ID NO: 437687 - DNA, 25 bp, Homo sapien
tacgctccatgctgaagatctgtgc

SEQ ID NO: 437688 - DNA, 25 bp, Homo sapien
ttgtcatggcaaaagttaccgggtg

SEQ ID NO: 437689 - DNA, 25 bp, Homo sapien
taccgggtgaacaattcagacaatg

SEQ ID NO: 437690 - DNA, 25 bp, Homo sapien
cgtcaagcctgcagtgagccacgtt

SEQ ID NO: 437691 - DNA, 25 bp, Homo sapien
cacttgagcccagaacgtcaagcct

SEQ ID NO: 437692 - DNA, 25 bp, Homo sapien
tgagccacgtttgtgccaccgcact

SEQ ID NO: 437693 - DNA, 25 bp, Homo sapien
ccagcctcagcaacaaaatgagacc

SEQ ID NO: 437694 - DNA, 25 bp, Homo sapien
gctccattccaggatcaagactttg

SEQ ID NO: 437695 - DNA, 25 bp, Homo sapien
tgctccattccaggatcaagacttt

SEQ ID NO: 437696 - DNA, 25 bp, Homo sapien
tccattccaggatcaagactttgta

SEQ ID NO: 437697 - DNA, 25 bp, Homo sapien
cattccaggatcaagactttgtaga

SEQ ID NO: 437698 - DNA, 25 bp, Homo sapien
gattttcgtggctgcaaaacagcgg

SEQ ID NO: 437699 - DNA, 25 bp, Homo sapien
ggctgcaaaacagcggcttctccat

SEQ ID NO: 437700 - DNA, 25 bp, Homo sapien
catcattacgcaactggcctctctg

SEQ ID NO: 437701 - DNA, 25 bp, Homo sapien
ctgatcgtttccagattgctctcgg

SEQ ID NO: 437702 - DNA, 25 bp, Homo sapien
agattgtgaataatttcacatcccg

SEQ ID NO: 437703 - DNA, 25 bp, Homo sapien
tttcacatcccggaacattctctct

SEQ ID NO: 437704 - DNA, 25 bp, Homo sapien
tctttgaacaatagattgtgaataa

SEQ ID NO: 437705 - DNA, 25 bp, Homo sapien
tccgtcccataatcaactgtcttct

SEQ ID NO: 437706 - DNA, 25 bp, Homo sapien
gtgacacatgtgtccttggaggtgt

SEQ ID NO: 437707 - DNA, 25 bp, Homo sapien
ggaggtgtacatatcagtagatttc

SEQ ID NO: 437708 - DNA, 25 bp, Homo sapien
tttcagcctctactgaaatcttcta

SEQ ID NO: 437709 - DNA, 25 bp, Homo sapien
tgaagccttctactccccttgtgtt

SEQ ID NO: 437710 - DNA, 25 bp, Homo sapien
ggactggagccggcttgaacacgct

SEQ ID NO: 437711 - DNA, 25 bp, Homo sapien
ccagggccatgcacaacacaggact

SEQ ID NO: 437712 - DNA, 25 bp, Homo sapien
aggactggagccggcttgaacacgc

SEQ ID NO: 437713 - DNA, 25 bp, Homo sapien
cctgaatgtgttgcccctgcagctc

SEQ ID NO: 437714 - DNA, 25 bp, Homo sapien
tgtcgtcgaggcgtcgcctcagcct

SEQ ID NO: 437715 - DNA, 25 bp, Homo sapien
tccggtcagccaggcctaaatgggg

SEQ ID NO: 437716 - DNA, 25 bp, Homo sapien
tgcagctccggtccgctgtcgtcga

SEQ ID NO: 437717 - DNA, 25 bp, Homo sapien
taaccttgaggcgcaaggcacttcg

SEQ ID NO: 437718 - DNA, 25 bp, Homo sapien
cgtaaccttgaggcgcaaggcactt

SEQ ID NO: 437719 - DNA, 25 bp, Homo sapien
gtcactgcctccgtaaccttgaggc

SEQ ID NO: 437720 - DNA, 25 bp, Homo sapien
accttgaggcgcaaggcacttcggg

SEQ ID NO: 437721 - DNA, 25 bp, Homo sapien
aatggtagcggtcaagacagcttac

SEQ ID NO: 437722 - DNA, 25 bp, Homo sapien
cgcgtcccgcctctactagagaaat

SEQ ID NO: 437723 - DNA, 25 bp, Homo sapien
cagcagagcgcgtcatcactccgcg

SEQ ID NO: 437724 - DNA, 25 bp, Homo sapien
cgcctctactagagaaatggtagcg

SEQ ID NO: 437725 - DNA, 25 bp, Homo sapien
tctcagcaccgaagacgcaggagta

SEQ ID NO: 437726 - DNA, 25 bp, Homo sapien
accatgcggccgtgggtcatcaggt

SEQ ID NO: 437727 - DNA, 25 bp, Homo sapien
aatctgttccttccggagaagcctg

SEQ ID NO: 437728 - DNA, 25 bp, Homo sapien
aggagtacagcactcggcaaaggcc

SEQ ID NO: 437729 - DNA, 25 bp, Homo sapien
tttcacgtaacacttatgaaaagct

SEQ ID NO: 437730 - DNA, 25 bp, Homo sapien
atcaggtacgtgttcaatgaaggcc

SEQ ID NO: 437731 - DNA, 25 bp, Homo sapien
ttatgaaaagctgtggaagactctc

SEQ ID NO: 437732 - DNA, 25 bp, Homo sapien
tgggaaatgctactctaaaacttcc

SEQ ID NO: 437733 - DNA, 25 bp, Homo sapien
ttccagtctgagccacgcacaggct

SEQ ID NO: 437734 - DNA, 25 bp, Homo sapien
catctgaggattgcggctgcaggtc

SEQ ID NO: 437735 - DNA, 25 bp, Homo sapien
tgaggatgccctcaatgcggtcagc

SEQ ID NO: 437736 - DNA, 25 bp, Homo sapien
gacaaactggtcgttgaggaaaagc

SEQ ID NO: 437737 - DNA, 25 bp, Homo sapien
gcagcggcacttgctcatctgagga

SEQ ID NO: 437738 - DNA, 25 bp, Homo sapien
tactgcctaagtgggcacaaagcca

SEQ ID NO: 437739 - DNA, 25 bp, Homo sapien
gcacggcagcggtctaagtaacaca

SEQ ID NO: 437740 - DNA, 25 bp, Homo sapien
gttcaaggacaagcgtggctgccgc

SEQ ID NO: 437741 - DNA, 25 bp, Homo sapien
gatgactttatctcgagcctgcctg

SEQ ID NO: 437742 - DNA, 25 bp, Homo sapien
ggtgaacagataatgtacatccaca

SEQ ID NO: 437743 - DNA, 25 bp, Homo sapien
aagcagtaaaaggatcaatggttgc

SEQ ID NO: 437744 - DNA, 25 bp, Homo sapien
ccttcagtaggtgaacagataatgt

SEQ ID NO: 437745 - DNA, 25 bp, Homo sapien
tatacagtatgaatctaactacaca

SEQ ID NO: 437746 - DNA, 25 bp, Homo sapien
ctcaggacactgtgtggctcgtcac

SEQ ID NO: 437747 - DNA, 25 bp, Homo sapien
agctcctgggtcagtcgctgctaca

SEQ ID NO: 437748 - DNA, 25 bp, Homo sapien
gactgtggttggcatagccctttca

SEQ ID NO: 437749 - DNA, 25 bp, Homo sapien
ggtcagtcgctgctacagccagctc

SEQ ID NO: 437750 - DNA, 25 bp, Homo sapien
cccggccctgagacctggcgaccgc

SEQ ID NO: 437751 - DNA, 25 bp, Homo sapien
acccttcccgcagcgaggaggcggg

SEQ ID NO: 437752 - DNA, 25 bp, Homo sapien
ctgagacctggcgaccgccgcccgg

SEQ ID NO: 437753 - DNA, 25 bp, Homo sapien
gggcccaggacccttcccgcagcga

SEQ ID NO: 437754 - DNA, 25 bp, Homo sapien
cagacccagggcgtcccggcggact

SEQ ID NO: 437755 - DNA, 25 bp, Homo sapien
gtgctgagccgaaaggacccaacgc

SEQ ID NO: 437756 - DNA, 25 bp, Homo sapien
ggcggactccgtcctgccgctgcag

SEQ ID NO: 437757 - DNA, 25 bp, Homo sapien
ttccctaaaggcgtccgtgcgtgct

SEQ ID NO: 437758 - DNA, 25 bp, Homo sapien
aactcttgcgacagggcccgctctt

SEQ ID NO: 437759 - DNA, 25 bp, Homo sapien
tggatgcggcgcctggagccctcag

SEQ ID NO: 437760 - DNA, 25 bp, Homo sapien
cttttccccggatgctggatgcggc

SEQ ID NO: 437761 - DNA, 25 bp, Homo sapien
gccctcagtgttcccgaaactcttg

SEQ ID NO: 437762 - DNA, 25 bp, Homo sapien
gccgttttgagctggtgtcgccgcc

SEQ ID NO: 437763 - DNA, 25 bp, Homo sapien
cttggatcggattcctgggcgcgac

SEQ ID NO: 437764 - DNA, 25 bp, Homo sapien
gggcggcagcactcgacctctaggc

SEQ ID NO: 437765 - DNA, 25 bp, Homo sapien
gacctctaggcgcacccggtcgagg

SEQ ID NO: 437766 - DNA, 25 bp, Homo sapien
tggccccatgaagggtggatggact

SEQ ID NO: 437767 - DNA, 25 bp, Homo sapien
aagggtggatggactgagaggaaac

SEQ ID NO: 437768 - DNA, 25 bp, Homo sapien
cccatgaagggtggatggactgaga

SEQ ID NO: 437769 - DNA, 25 bp, Homo sapien
gtggatggactgagaggaaacgaga

SEQ ID NO: 437770 - DNA, 25 bp, Homo sapien
caaaaattgctgaaattgcggcaga

SEQ ID NO: 437771 - DNA, 25 bp, Homo sapien
aaggcagaatctctacaacatccac

SEQ ID NO: 437772 - DNA, 25 bp, Homo sapien
gatatacttataggtcttgtcttca

SEQ ID NO: 437773 - DNA, 25 bp, Homo sapien
ggcagaatctctacaacatccacat

SEQ ID NO: 437774 - DNA, 25 bp, Homo sapien
gtcccggttccctgagagtgtgcag

SEQ ID NO: 437775 - DNA, 25 bp, Homo sapien
gtgtgcaggtggcccgcagtcgatc

SEQ ID NO: 437776 - DNA, 25 bp, Homo sapien
gccagagggtgtcccggttccctga

SEQ ID NO: 437777 - DNA, 25 bp, Homo sapien
agatgccagagggtgtcccggttcc

SEQ ID NO: 437778 - DNA, 25 bp, Homo sapien
ttcgtccgcgagatcaactagctca

SEQ ID NO: 437779 - DNA, 25 bp, Homo sapien
cagcccctcagtgccgcaatgaagt

SEQ ID NO: 437780 - DNA, 25 bp, Homo sapien
tgccgcaatgaagtactccacccag

SEQ ID NO: 437781 - DNA, 25 bp, Homo sapien
tccgcgagatcaactagctcacagc

SEQ ID NO: 437782 - DNA, 25 bp, Homo sapien
ggctggtagctctggtagacagagg

SEQ ID NO: 437783 - DNA, 25 bp, Homo sapien
ggtagctctggtagacagaggccac

SEQ ID NO: 437784 - DNA, 25 bp, Homo sapien
gaggctggtagctctggtagacaga

SEQ ID NO: 437785 - DNA, 25 bp, Homo sapien
ctggtagctctggtagacagaggcc

SEQ ID NO: 437786 - DNA, 25 bp, Homo sapien
cacccaggtttattcatcgcttcac

SEQ ID NO: 437787 - DNA, 25 bp, Homo sapien
aggtttattcatcgcttcacagtga

SEQ ID NO: 437788 - DNA, 25 bp, Homo sapien
tacacccaggtttattcatcgcttc

SEQ ID NO: 437789 - DNA, 25 bp, Homo sapien
cccaggtttattcatcgcttcacag

SEQ ID NO: 437790 - DNA, 25 bp, Homo sapien
cagtgggtctgggggacggtccgag

SEQ ID NO: 437791 - DNA, 25 bp, Homo sapien
agcaggaagtgacggtggctccagt

SEQ ID NO: 437792 - DNA, 25 bp, Homo sapien
tcctgatgcccgctggaggtcagag

SEQ ID NO: 437793 - DNA, 25 bp, Homo sapien
cagggggccaccatctggattcctt

SEQ ID NO: 437794 - DNA, 25 bp, Homo sapien
ctggattccttgggatggctctggg

SEQ ID NO: 437795 - DNA, 25 bp, Homo sapien
tgtgtgggtactgcccagttctgtg

SEQ ID NO: 437796 - DNA, 25 bp, Homo sapien
caggcccacgggatggtgtgaggct

SEQ ID NO: 437797 - DNA, 25 bp, Homo sapien
tgggtccaggcaagcggcttgccct

SEQ ID NO: 437798 - DNA, 25 bp, Homo sapien
agatggagacacaggcccacgggat

SEQ ID NO: 437799 - DNA, 25 bp, Homo sapien
tgccagtagatacaactgaccctgt

SEQ ID NO: 437800 - DNA, 25 bp, Homo sapien
gcagatgataggctcggcctggtca

SEQ ID NO: 437801 - DNA, 25 bp, Homo sapien
ctggagcagatgataggctcggcct

SEQ ID NO: 437802 - DNA, 25 bp, Homo sapien
tgccccactggagcagatgataggc

SEQ ID NO: 437803 - DNA, 25 bp, Homo sapien
agatgataggctcggcctggtcact

SEQ ID NO: 437804 - DNA, 25 bp, Homo sapien
ttcacaggcatcaaggtggtaggca

SEQ ID NO: 437805 - DNA, 25 bp, Homo sapien
catttctgctgctcccgtcagtggg

SEQ ID NO: 437806 - DNA, 25 bp, Homo sapien
gattggtgagcgcattagaaggcac

SEQ ID NO: 437807 - DNA, 25 bp, Homo sapien
ctagtaggcactttggatggcacca

SEQ ID NO: 437808 - DNA, 25 bp, Homo sapien
ttatgtgcaaaacggcaccgctcgg

SEQ ID NO: 437809 - DNA, 25 bp, Homo sapien
ggactgcgttctgtaaagcctggcc

SEQ ID NO: 437810 - DNA, 25 bp, Homo sapien
caactgtctgtatgccctcaaggag

SEQ ID NO: 437811 - DNA, 25 bp, Homo sapien
caaagggccctatggacttggctct

SEQ ID NO: 437812 - DNA, 25 bp, Homo sapien
tccagtggcgccggcgggtgttgga

SEQ ID NO: 437813 - DNA, 25 bp, Homo sapien
agtggcgccggcgggtgttggagct

SEQ ID NO: 437814 - DNA, 25 bp, Homo sapien
cagtggcgccggcgggtgttggagc

SEQ ID NO: 437815 - DNA, 25 bp, Homo sapien
cctccagtggcgccggcgggtgttg

SEQ ID NO: 437816 - DNA, 25 bp, Homo sapien
cgacccaaggcccctattctcagag

SEQ ID NO: 437817 - DNA, 25 bp, Homo sapien
gacccaaggcccctattctcagagc

SEQ ID NO: 437818 - DNA, 25 bp, Homo sapien
cccaaggcccctattctcagagctg

SEQ ID NO: 437819 - DNA, 25 bp, Homo sapien
ctccgacccaaggcccctattctca

SEQ ID NO: 437820 - DNA, 25 bp, Homo sapien
cttatactcattctcctctgggcca

SEQ ID NO: 437821 - DNA, 25 bp, Homo sapien
gtggatcccaaaggtgccctcggac

SEQ ID NO: 437822 - DNA, 25 bp, Homo sapien
gaagcagcccgagaacgggctgtct

SEQ ID NO: 437823 - DNA, 25 bp, Homo sapien
atggcaagatcctcgaagcagcccg

SEQ ID NO: 437824 - DNA, 25 bp, Homo sapien
tagtgcagacgccgccggtacagca

SEQ ID NO: 437825 - DNA, 25 bp, Homo sapien
agtgtgactaccagcacccctgtca

SEQ ID NO: 437826 - DNA, 25 bp, Homo sapien
gagggcctgtggcatggcacctccc

SEQ ID NO: 437827 - DNA, 25 bp, Homo sapien
tggaacttccggtcggcttgtggcc

SEQ ID NO: 437828 - DNA, 25 bp, Homo sapien
gggcttcggagaggggccaggtgta

SEQ ID NO: 437829 - DNA, 25 bp, Homo sapien
cttcggagaggggccaggtgtactg

SEQ ID NO: 437830 - DNA, 25 bp, Homo sapien
tgcaggaacggaacagatgggtggt

SEQ ID NO: 437831 - DNA, 25 bp, Homo sapien
tactgcaggaacggaacagatgggt

SEQ ID NO: 437832 - DNA, 25 bp, Homo sapien
caggtcttgtggagtcgcccacaca

SEQ ID NO: 437833 - DNA, 25 bp, Homo sapien
ctcaatgcaacggtctcaggctggg

SEQ ID NO: 437834 - DNA, 25 bp, Homo sapien
gacatggatgataacctggattgcc

SEQ ID NO: 437835 - DNA, 25 bp, Homo sapien
cagggaccaatgcaacaggagaggc

SEQ ID NO: 437836 - DNA, 25 bp, Homo sapien
atggagaccagaggggagggaaaga

SEQ ID NO: 437837 - DNA, 25 bp, Homo sapien
tggagaccagaggggagggaaagag

SEQ ID NO: 437838 - DNA, 25 bp, Homo sapien
gaatggagaccagaggggagggaaa

SEQ ID NO: 437839 - DNA, 25 bp, Homo sapien
aatggagaccagaggggagggaaag

SEQ ID NO: 437840 - DNA, 25 bp, Homo sapien
cacctgtaggttcaatctcagaaga

SEQ ID NO: 437841 - DNA, 25 bp, Homo sapien
tccacgtggagaagcaagaccagaa

SEQ ID NO: 437842 - DNA, 25 bp, Homo sapien
gctgaaatccaaacctctgcctgag

SEQ ID NO: 437843 - DNA, 25 bp, Homo sapien
tccccagcccatgtagggagctgaa

SEQ ID NO: 437844 - DNA, 25 bp, Homo sapien
cgataaactcctttaatcttcacaa

SEQ ID NO: 437845 - DNA, 25 bp, Homo sapien
cctagggcagtggagtgaaaaagct

SEQ ID NO: 437846 - DNA, 25 bp, Homo sapien
tgtcccttgcagagctcagaaatgg

SEQ ID NO: 437847 - DNA, 25 bp, Homo sapien
taaattgttaactgacctgcccagc

SEQ ID NO: 437848 - DNA, 25 bp, Homo sapien
taatacagacagctcgggtagggtc

SEQ ID NO: 437849 - DNA, 25 bp, Homo sapien
taaataacctgtacagtggccaggc

SEQ ID NO: 437850 - DNA, 25 bp, Homo sapien
cattatctggctgtgagggtgacct

SEQ ID NO: 437851 - DNA, 25 bp, Homo sapien
caagtcacggctttgagcggcatca

SEQ ID NO: 437852 - DNA, 25 bp, Homo sapien
ttgacaacagaggaacccgcttcgg

SEQ ID NO: 437853 - DNA, 25 bp, Homo sapien
catggaaaatgtgggactcaaggcc

SEQ ID NO: 437854 - DNA, 25 bp, Homo sapien
gaggaatgctaggagtgaccatgcc

SEQ ID NO: 437855 - DNA, 25 bp, Homo sapien
catgctacggagtttgaatcttgcc

SEQ ID NO: 437856 - DNA, 25 bp, Homo sapien
gattccctgcaaaacccatgagagt

SEQ ID NO: 437857 - DNA, 25 bp, Homo sapien
cattcttgccaatgtctcggtggac

SEQ ID NO: 437858 - DNA, 25 bp, Homo sapien
tgtgcagtagtattcgaccctgtga

SEQ ID NO: 437859 - DNA, 25 bp, Homo sapien
tacagtcagcgtgtggttagaaaca

SEQ ID NO: 437860 - DNA, 25 bp, Homo sapien
tcaacacccagatgaggtagaccag

SEQ ID NO: 437861 - DNA, 25 bp, Homo sapien
taaaatgtaggcaaggaggtcagca

SEQ ID NO: 437862 - DNA, 25 bp, Homo sapien
tgacaatagactctggccagaaacc

SEQ ID NO: 437863 - DNA, 25 bp, Homo sapien
cagtctgaacttagtggctgccagc

SEQ ID NO: 437864 - DNA, 25 bp, Homo sapien
tgaacatacaactggacaatggcca

SEQ ID NO: 437865 - DNA, 25 bp, Homo sapien
cagatttgacataactggtccagcc

SEQ ID NO: 437866 - DNA, 25 bp, Homo sapien
aattcctttggatacgcctcctgca

SEQ ID NO: 437867 - DNA, 25 bp, Homo sapien
tgtccacgggctcacaattctaagg

SEQ ID NO: 437868 - DNA, 25 bp, Homo sapien
gatttattgtacagaagtgtccacg

SEQ ID NO: 437869 - DNA, 25 bp, Homo sapien
cagtcttttgctatttacacagtgg

SEQ ID NO: 437870 - DNA, 25 bp, Homo sapien
gcactccaatgtagatataccttgg

SEQ ID NO: 437871 - DNA, 25 bp, Homo sapien
gagttcactccatagcagtatagag

SEQ ID NO: 437872 - DNA, 25 bp, Homo sapien
tattcacagctgcatagcactccaa

SEQ ID NO: 437873 - DNA, 25 bp, Homo sapien
ttcagtccactggagtcaggtcttt

SEQ ID NO: 437874 - DNA, 25 bp, Homo sapien
agtccactggagtcaggtctttttt

SEQ ID NO: 437875 - DNA, 25 bp, Homo sapien
tcagtccactggagtcaggtctttt

SEQ ID NO: 437876 - DNA, 25 bp, Homo sapien
cagtccactggagtcaggtcttttt

SEQ ID NO: 437877 - DNA, 25 bp, Homo sapien
ctttgtccctcggcctagttccgca

SEQ ID NO: 437878 - DNA, 25 bp, Homo sapien
ttgtccctcggcctagttccgcagc

SEQ ID NO: 437879 - DNA, 25 bp, Homo sapien
gtccctcggcctagttccgcagctg

SEQ ID NO: 437880 - DNA, 25 bp, Homo sapien
gttccgcagctgccgtcgaggccgc

SEQ ID NO: 437881 - DNA, 25 bp, Homo sapien
gtgccgtcctcgcagctcgagccct

SEQ ID NO: 437882 - DNA, 25 bp, Homo sapien
tggccgctggtcgtcggcagacgaa

SEQ ID NO: 437883 - DNA, 25 bp, Homo sapien
cgaaagggcttgaaccgcggctgac

SEQ ID NO: 437884 - DNA, 25 bp, Homo sapien
gctcccgcagcgtctggccgctggt

SEQ ID NO: 437885 - DNA, 25 bp, Homo sapien
tccaatgagaggctatcgtgacggg

SEQ ID NO: 437886 - DNA, 25 bp, Homo sapien
cagtcggctccctaactcgaggagg

SEQ ID NO: 437887 - DNA, 25 bp, Homo sapien
ttgaccgtgcctccgtccaatgaga

SEQ ID NO: 437888 - DNA, 25 bp, Homo sapien
gaagagaaggcggtgtagcccagaa

SEQ ID NO: 437889 - DNA, 25 bp, Homo sapien
cgcgcaggaagccaatccgacgagg

SEQ ID NO: 437890 - DNA, 25 bp, Homo sapien
cttccgttgcgccaacgcgcaggaa

SEQ ID NO: 437891 - DNA, 25 bp, Homo sapien
cagcgtcggattccttctcgcctcc

SEQ ID NO: 437892 - DNA, 25 bp, Homo sapien
tgcgccaacgcgcaggaagccaatc

SEQ ID NO: 437893 - DNA, 25 bp, Homo sapien
ctccccagccgacgagacggaggtg

SEQ ID NO: 437894 - DNA, 25 bp, Homo sapien
gtggcgctccatgggcgcgccgagc

SEQ ID NO: 437895 - DNA, 25 bp, Homo sapien
gtggcggaagccctgccgtggcgct

SEQ ID NO: 437896 - DNA, 25 bp, Homo sapien
tgctccccagccgacgagacggagg

SEQ ID NO: 437897 - DNA, 25 bp, Homo sapien
gctgtaagagcccagtcgatcccgc

SEQ ID NO: 437898 - DNA, 25 bp, Homo sapien
gccgctgtaagagcccagtcgatcc

SEQ ID NO: 437899 - DNA, 25 bp, Homo sapien
tggggccgctgtaagagcccagtcg

SEQ ID NO: 437900 - DNA, 25 bp, Homo sapien
aggtggggccgctgtaagagcccag

SEQ ID NO: 437901 - DNA, 25 bp, Homo sapien
gctttttcctcaggctttcgacgcg

SEQ ID NO: 437902 - DNA, 25 bp, Homo sapien
ggccgctttttcctcaggctttcga

SEQ ID NO: 437903 - DNA, 25 bp, Homo sapien
gcggccgctttttcctcaggctttc

SEQ ID NO: 437904 - DNA, 25 bp, Homo sapien
ccgctttttcctcaggctttcgacg

SEQ ID NO: 437905 - DNA, 25 bp, Homo sapien
ccgaggcctccagccggatgtcagg

SEQ ID NO: 437906 - DNA, 25 bp, Homo sapien
aggtaccgctttcggagcacccgag

SEQ ID NO: 437907 - DNA, 25 bp, Homo sapien
acgcaccaacgagggaccaccgtgc

SEQ ID NO: 437908 - DNA, 25 bp, Homo sapien
gtaccgctttcggagcacccgaggc

SEQ ID NO: 437909 - DNA, 25 bp, Homo sapien
ccttctcgaggataaaatcatgtga

SEQ ID NO: 437910 - DNA, 25 bp, Homo sapien
aaaatcatgtgaccctcaggaagag

SEQ ID NO: 437911 - DNA, 25 bp, Homo sapien
ggataaaatcatgtgaccctcagga

SEQ ID NO: 437912 - DNA, 25 bp, Homo sapien
tctcgaggataaaatcatgtgaccc

SEQ ID NO: 437913 - DNA, 25 bp, Homo sapien
attggggattcaaaggatttgggag

SEQ ID NO: 437914 - DNA, 25 bp, Homo sapien
tggggattcaaaggatttgggagga

SEQ ID NO: 437915 - DNA, 25 bp, Homo sapien
ctcagagccacgaggctaatgagtt

SEQ ID NO: 437916 - DNA, 25 bp, Homo sapien
cgactgccaggtcgggcacaatggc

SEQ ID NO: 437917 - DNA, 25 bp, Homo sapien
gagttaccaaagctcttagtagacg

SEQ ID NO: 437918 - DNA, 25 bp, Homo sapien
acaatggctcccgtctatatcccag

SEQ ID NO: 437919 - DNA, 25 bp, Homo sapien
gaggagcttaactgggcccactgaa

SEQ ID NO: 437920 - DNA, 25 bp, Homo sapien
ttgaatatgaggagcttaactgggc

SEQ ID NO: 437921 - DNA, 25 bp, Homo sapien
tcaatatttggaagtacttccacag

SEQ ID NO: 437922 - DNA, 25 bp, Homo sapien
cattctcatgctcaatatttggaag

SEQ ID NO: 437923 - DNA, 25 bp, Homo sapien
atttcgacataggaagttgaagagg

SEQ ID NO: 437924 - DNA, 25 bp, Homo sapien
gcagttctgtcttgttggaaaaggg

SEQ ID NO: 437925 - DNA, 25 bp, Homo sapien
cagttctgtcttgttggaaaaggga

SEQ ID NO: 437926 - DNA, 25 bp, Homo sapien
atgatttcgacataggaagttgaag

SEQ ID NO: 437927 - DNA, 25 bp, Homo sapien
cacattggaggtcaggtacttccga

SEQ ID NO: 437928 - DNA, 25 bp, Homo sapien
cagcttgaccagagttccaccgata

SEQ ID NO: 437929 - DNA, 25 bp, Homo sapien
ggtgcacgtcccgaatgcctgtaga

SEQ ID NO: 437930 - DNA, 25 bp, Homo sapien
gcctgtagacccataagccacattg

SEQ ID NO: 437931 - DNA, 25 bp, Homo sapien
atgagtgggaaagcgtataaagtgc

SEQ ID NO: 437932 - DNA, 25 bp, Homo sapien
agtgggaaagcgtataaagtgcaga

SEQ ID NO: 437933 - DNA, 25 bp, Homo sapien
gggaaagcgtataaagtgcagattg

SEQ ID NO: 437934 - DNA, 25 bp, Homo sapien
gtcatgagtgggaaagcgtataaag

SEQ ID NO: 437935 - DNA, 25 bp, Homo sapien
aaaatcctgctcaaatttgtacgct

SEQ ID NO: 437936 - DNA, 25 bp, Homo sapien
tgtggagactcgagaagtttttatc

SEQ ID NO: 437937 - DNA, 25 bp, Homo sapien
aatttgtacgctccacctccagtgg

SEQ ID NO: 437938 - DNA, 25 bp, Homo sapien
ctccagtggcacaaaagacagtgtg

SEQ ID NO: 437939 - DNA, 25 bp, Homo sapien
tctgattgtcgtccatacatctgaa

SEQ ID NO: 437940 - DNA, 25 bp, Homo sapien
gaactagacaaccacctctagatgg

SEQ ID NO: 437941 - DNA, 25 bp, Homo sapien
cctcaacgtatagcagatgccctaa

SEQ ID NO: 437942 - DNA, 25 bp, Homo sapien
gatggccaactcctatcactagcgt

SEQ ID NO: 437943 - DNA, 25 bp, Homo sapien
aagatagagcgcctggcagcattcc

SEQ ID NO: 437944 - DNA, 25 bp, Homo sapien
tgtgcagcacagaacacatcagaaa

SEQ ID NO: 437945 - DNA, 25 bp, Homo sapien
gcgagactccagttaagtgtgcagc

SEQ ID NO: 437946 - DNA, 25 bp, Homo sapien
agtgttcactcaatgaaagcaagat

SEQ ID NO: 437947 - DNA, 25 bp, Homo sapien
caaagtaatagcactgtgaccgtcc

SEQ ID NO: 437948 - DNA, 25 bp, Homo sapien
gaatccgactgagtcaatgtataaa

SEQ ID NO: 437949 - DNA, 25 bp, Homo sapien
tgttcaccagaagcagaggatacgg

SEQ ID NO: 437950 - DNA, 25 bp, Homo sapien
tactgctaagatgctaacccctgag

SEQ ID NO: 437951 - DNA, 25 bp, Homo sapien
aagagcttcttcaaaagtggtacag

SEQ ID NO: 437952 - DNA, 25 bp, Homo sapien
agagcttcttcaaaagtggtacagc

SEQ ID NO: 437953 - DNA, 25 bp, Homo sapien
gagcttcttcaaaagtggtacagcc

SEQ ID NO: 437954 - DNA, 25 bp, Homo sapien
agcttcttcaaaagtggtacagcca

SEQ ID NO: 437955 - DNA, 25 bp, Homo sapien
ttatccactttggtgctatctccac

SEQ ID NO: 437956 - DNA, 25 bp, Homo sapien
aatatctcgtactagtttatccact

SEQ ID NO: 437957 - DNA, 25 bp, Homo sapien
atagtcccctccataaatatctcgt

SEQ ID NO: 437958 - DNA, 25 bp, Homo sapien
atctcgtactagtttatccactttg

SEQ ID NO: 437959 - DNA, 25 bp, Homo sapien
gtactgattcacactgtaatgtgaa

SEQ ID NO: 437960 - DNA, 25 bp, Homo sapien
aagtactgattcacactgtaatgtg

SEQ ID NO: 437961 - DNA, 25 bp, Homo sapien
ttgaaaacatatgctatatgaagaa

SEQ ID NO: 437962 - DNA, 25 bp, Homo sapien
catatgctatatgaagaagtaatca

SEQ ID NO: 437963 - DNA, 25 bp, Homo sapien
tgttcatcaaccaataaatggataa

SEQ ID NO: 437964 - DNA, 25 bp, Homo sapien
catcaaccaataaatggataaaatg

SEQ ID NO: 437965 - DNA, 25 bp, Homo sapien
aatgttcatcaaccaataaatggat

SEQ ID NO: 437966 - DNA, 25 bp, Homo sapien
caaccaataaatggataaaatgtag

SEQ ID NO: 437967 - DNA, 25 bp, Homo sapien
taaaagccatgtgccccaatatacg

SEQ ID NO: 437968 - DNA, 25 bp, Homo sapien
cagaagactttgtattaggatggcc

SEQ ID NO: 437969 - DNA, 25 bp, Homo sapien
aatgagcagacagctttccctgcgg

SEQ ID NO: 437970 - DNA, 25 bp, Homo sapien
tcatcagatgcactggaaggcacca

SEQ ID NO: 437971 - DNA, 25 bp, Homo sapien
aaagcccaacagaacttgaatgtta

SEQ ID NO: 437972 - DNA, 25 bp, Homo sapien
caaagcccaacagaacttgaatgtt

SEQ ID NO: 437973 - DNA, 25 bp, Homo sapien
cattcttgctattgagccaatgttg

SEQ ID NO: 437974 - DNA, 25 bp, Homo sapien
ggtcctctttactgacagcctctcg

SEQ ID NO: 437975 - DNA, 25 bp, Homo sapien
ttcattaagggcacacattcttgct

SEQ ID NO: 437976 - DNA, 25 bp, Homo sapien
tcaaagtcgctctggccaggtcctc

SEQ ID NO: 437977 - DNA, 25 bp, Homo sapien
aatgctgcttgacctgaatgctaca

SEQ ID NO: 437978 - DNA, 25 bp, Homo sapien
tggatcctagatcctcttttcccaa

SEQ ID NO: 437979 - DNA, 25 bp, Homo sapien
aagccataagctgcaccaactggat

SEQ ID NO: 437980 - DNA, 25 bp, Homo sapien
atcctagatcctcttttcccaaggg

SEQ ID NO: 437981 - DNA, 25 bp, Homo sapien
caagccataagctgcaccaactgga

SEQ ID NO: 437982 - DNA, 25 bp, Homo sapien
acttgatgctgatacagtatttttt

SEQ ID NO: 437983 - DNA, 25 bp, Homo sapien
gctacatgcctattattatctaaag

SEQ ID NO: 437984 - DNA, 25 bp, Homo sapien
aaaatgagacaaatcctttgtgtct

SEQ ID NO: 437985 - DNA, 25 bp, Homo sapien
ccttttaagctacatgcctattatt

SEQ ID NO: 437986 - DNA, 25 bp, Homo sapien
tacaaattgtggtatgcacaccaac

SEQ ID NO: 437987 - DNA, 25 bp, Homo sapien
gcttaaaaatgcttactgccgagtt

SEQ ID NO: 437988 - DNA, 25 bp, Homo sapien
tgaaaatacgtaagcacaggaaagg

SEQ ID NO: 437989 - DNA, 25 bp, Homo sapien
gccgagttatgagcaagcaaccaaa

SEQ ID NO: 437990 - DNA, 25 bp, Homo sapien
gcaaagcatcatgacgataaatgtc

SEQ ID NO: 437991 - DNA, 25 bp, Homo sapien
tctaaattggtgcagcccttgtgca

SEQ ID NO: 437992 - DNA, 25 bp, Homo sapien
tgtcaaaattcatgagcatgatcat

SEQ ID NO: 437993 - DNA, 25 bp, Homo sapien
taaagatgatctaaattggtgcagc

SEQ ID NO: 437994 - DNA, 25 bp, Homo sapien
tggacccactgcaaagcatgctaga

SEQ ID NO: 437995 - DNA, 25 bp, Homo sapien
caaaaggacagtgacacaaacaggc

SEQ ID NO: 437996 - DNA, 25 bp, Homo sapien
ggtccagggctacttaaacttgatc

SEQ ID NO: 437997 - DNA, 25 bp, Homo sapien
tatacaagcaatataacaggcagcg

SEQ ID NO: 437998 - DNA, 25 bp, Homo sapien
ggcgatcgtattaattctcaagaaa

SEQ ID NO: 437999 - DNA, 25 bp, Homo sapien
gcatatgccaaaagccgcatggcga

SEQ ID NO: 438000 - DNA, 25 bp, Homo sapien
tcgtgttccgaaaaaagtgctttca

SEQ ID NO: 438001 - DNA, 25 bp, Homo sapien
tcaactgccccttggaccaataatc

SEQ ID NO: 438002 - DNA, 25 bp, Homo sapien
aacactgcagcccatttcacctcca

SEQ ID NO: 438003 - DNA, 25 bp, Homo sapien
agccccaagactgtgccacgcactc

SEQ ID NO: 438004 - DNA, 25 bp, Homo sapien
tataccacaacgaacaagtcagctt

SEQ ID NO: 438005 - DNA, 25 bp, Homo sapien
tccatgacagtgtgacccacaagcc

SEQ ID NO: 438006 - DNA, 25 bp, Homo sapien
tctccatgttctacctaggaaaagg

SEQ ID NO: 438007 - DNA, 25 bp, Homo sapien
tgtgtactttggacttcaactatga

SEQ ID NO: 438008 - DNA, 25 bp, Homo sapien
caattcggtgctggtttacaaatac

SEQ ID NO: 438009 - DNA, 25 bp, Homo sapien
taatctctagcacttcaaatctgtg

SEQ ID NO: 438010 - DNA, 25 bp, Homo sapien
gagaacactagcaagaatcagaggc

SEQ ID NO: 438011 - DNA, 25 bp, Homo sapien
tctccagaagcagtcaggtcacatg

SEQ ID NO: 438012 - DNA, 25 bp, Homo sapien
gcagctgagagacgacaagcactgt

SEQ ID NO: 438013 - DNA, 25 bp, Homo sapien
aacaaagagcaaagcctgaggaagc

SEQ ID NO: 438014 - DNA, 25 bp, Homo sapien
cgaggtcggatgcaaagtgcaatga

SEQ ID NO: 438015 - DNA, 25 bp, Homo sapien
tttccagacaactaaggaatgaagg

SEQ ID NO: 438016 - DNA, 25 bp, Homo sapien
cagaggcctggagcatttccagaca

SEQ ID NO: 438017 - DNA, 25 bp, Homo sapien
caactaaggaatgaaggcgaggtcg

SEQ ID NO: 438018 - DNA, 25 bp, Homo sapien
caagcacttcagaccactgtgataa

SEQ ID NO: 438019 - DNA, 25 bp, Homo sapien
aaccaaacccgcagtgagggcgaca

SEQ ID NO: 438020 - DNA, 25 bp, Homo sapien
cacatgatgactagtgttaaagcca

SEQ ID NO: 438021 - DNA, 25 bp, Homo sapien
gatgtcctagactatccaagcactt

SEQ ID NO: 438022 - DNA, 25 bp, Homo sapien
tcaacagctcaaggagtgctccaac

SEQ ID NO: 438023 - DNA, 25 bp, Homo sapien
ggatcttcaacagctcaaggagtgc

SEQ ID NO: 438024 - DNA, 25 bp, Homo sapien
caaggagtgctccaacagctccaaa

SEQ ID NO: 438025 - DNA, 25 bp, Homo sapien
tcacgggatcttcaacagctcaagg

SEQ ID NO: 438026 - DNA, 25 bp, Homo sapien
gagggtcaccaatcactctccaggg

SEQ ID NO: 438027 - DNA, 25 bp, Homo sapien
tagtgtaaagtaacgtggaactgcc

SEQ ID NO: 438028 - DNA, 25 bp, Homo sapien
gattataacgcatagtagcctgcct

SEQ ID NO: 438029 - DNA, 25 bp, Homo sapien
tccaaggctgctttgtacaggccca

SEQ ID NO: 438030 - DNA, 25 bp, Homo sapien
gcaccctgtggtacaagcaggagga

SEQ ID NO: 438031 - DNA, 25 bp, Homo sapien
gtgaggccaccaacagcgctgctgg

SEQ ID NO: 438032 - DNA, 25 bp, Homo sapien
tctccatgggaagtgagcaagttca

SEQ ID NO: 438033 - DNA, 25 bp, Homo sapien
catctttggtgcctgggtactggag

SEQ ID NO: 438034 - DNA, 25 bp, Homo sapien
catgggattcactggtggcctatca

SEQ ID NO: 438035 - DNA, 25 bp, Homo sapien
tatcaagaaccctgctgtgagccgg

SEQ ID NO: 438036 - DNA, 25 bp, Homo sapien
tatgggcacctcacaacctgaaggt

SEQ ID NO: 438037 - DNA, 25 bp, Homo sapien
cagaacattagtagcctgggtggca

SEQ ID NO: 438038 - DNA, 25 bp, Homo sapien
catggccactagtggagggcagact

SEQ ID NO: 438039 - DNA, 25 bp, Homo sapien
ggccactagtggagggcagactgaa

SEQ ID NO: 438040 - DNA, 25 bp, Homo sapien
tcatggccactagtggagggcagac

SEQ ID NO: 438041 - DNA, 25 bp, Homo sapien
tggccactagtggagggcagactga

SEQ ID NO: 438042 - DNA, 25 bp, Homo sapien
cccaggcctggaaataactagtgtc

SEQ ID NO: 438043 - DNA, 25 bp, Homo sapien
tcacgtagtccacaaatgagcccag

SEQ ID NO: 438044 - DNA, 25 bp, Homo sapien
acgatcttgcaaccaattgtgggca

SEQ ID NO: 438045 - DNA, 25 bp, Homo sapien
caattcagatgcctagagagctcct

SEQ ID NO: 438046 - DNA, 25 bp, Homo sapien
tcagcaagacttggaaactcaaggt

SEQ ID NO: 438047 - DNA, 25 bp, Homo sapien
cctttgaacagagggaacatccatg

SEQ ID NO: 438048 - DNA, 25 bp, Homo sapien
ggtgaagagtgtgtcaggccaccac

SEQ ID NO: 438049 - DNA, 25 bp, Homo sapien
tgagtgattgtgatggaagcccctg

SEQ ID NO: 438050 - DNA, 25 bp, Homo sapien
tacttctgtgactgtaagggcccca

SEQ ID NO: 438051 - DNA, 25 bp, Homo sapien
tagagtgttgctggtaactatcgcc

SEQ ID NO: 438052 - DNA, 25 bp, Homo sapien
gcaagtgttaggaactcccttctgg

SEQ ID NO: 438053 - DNA, 25 bp, Homo sapien
gcatttgtagaatctctggccctgg

SEQ ID NO: 438054 - DNA, 25 bp, Homo sapien
ctcccgcctcgggagctgggacaac

SEQ ID NO: 438055 - DNA, 25 bp, Homo sapien
tctcccgcctcgggagctgggacaa

SEQ ID NO: 438056 - DNA, 25 bp, Homo sapien
ggatatgcctgaatgtccagcgtca

SEQ ID NO: 438057 - DNA, 25 bp, Homo sapien
cagcgtcagttcatggagctactcc

SEQ ID NO: 438058 - DNA, 25 bp, Homo sapien
taccttggccagttccaagtgagga

SEQ ID NO: 438059 - DNA, 25 bp, Homo sapien
gcagacatcttagctactgagcaag

SEQ ID NO: 438060 - DNA, 25 bp, Homo sapien
gctaatccaagagcacaaccagatt

SEQ ID NO: 438061 - DNA, 25 bp, Homo sapien
ggctctgtagctgacagcagtggca

SEQ ID NO: 438062 - DNA, 25 bp, Homo sapien
tgattgactttctatctgcgacagg

SEQ ID NO: 438063 - DNA, 25 bp, Homo sapien
gcgacaggatgctcaagatcaggct

SEQ ID NO: 438064 - DNA, 25 bp, Homo sapien
gacttgttactgtgtagctgcgtgg

SEQ ID NO: 438065 - DNA, 25 bp, Homo sapien
caactggactccacgggtggctgaa

SEQ ID NO: 438066 - DNA, 25 bp, Homo sapien
gctcagactcgaaccccatggtaaa

SEQ ID NO: 438067 - DNA, 25 bp, Homo sapien
ggttagtggagcataactcagcccc

SEQ ID NO: 438068 - DNA, 25 bp, Homo sapien
cttagcaacacaacccgaatatttg

SEQ ID NO: 438069 - DNA, 25 bp, Homo sapien
gttcctgcgactcttagcaacacaa

SEQ ID NO: 438070 - DNA, 25 bp, Homo sapien
cccgaatatttgctccctgcatctg

SEQ ID NO: 438071 - DNA, 25 bp, Homo sapien
tagcagtagttcctgcgactcttag

SEQ ID NO: 438072 - DNA, 25 bp, Homo sapien
tattcgtggtatgccaactggactg

SEQ ID NO: 438073 - DNA, 25 bp, Homo sapien
ttcgtggtatgccaactggactgct

SEQ ID NO: 438074 - DNA, 25 bp, Homo sapien
cgtggtatgccaactggactgcttc

SEQ ID NO: 438075 - DNA, 25 bp, Homo sapien
ctattcgtggtatgccaactggact

SEQ ID NO: 438076 - DNA, 25 bp, Homo sapien
tatacaaggataggcaaatagacca

SEQ ID NO: 438077 - DNA, 25 bp, Homo sapien
taatagcagctctagaaatagaccg

SEQ ID NO: 438078 - DNA, 25 bp, Homo sapien
ttccagtgagtaccagaaagccttg

SEQ ID NO: 438079 - DNA, 25 bp, Homo sapien
gctgaggcggacacattcatcacta

SEQ ID NO: 438080 - DNA, 25 bp, Homo sapien
ccaaccacctccctggtttgagcga

SEQ ID NO: 438081 - DNA, 25 bp, Homo sapien
gcaaccaaccacctccctggtttga

SEQ ID NO: 438082 - DNA, 25 bp, Homo sapien
accaaccacctccctggtttgagcg

SEQ ID NO: 438083 - DNA, 25 bp, Homo sapien
caaccaaccacctccctggtttgag

SEQ ID NO: 438084 - DNA, 25 bp, Homo sapien
agctataaatttaatgtactttcaa

SEQ ID NO: 438085 - DNA, 25 bp, Homo sapien
taatgtactttcaattaacttcaca

SEQ ID NO: 438086 - DNA, 25 bp, Homo sapien
tggtgcgattagcgctcactgctcc

SEQ ID NO: 438087 - DNA, 25 bp, Homo sapien
tcaattaacttcacaatagcattta

SEQ ID NO: 438088 - DNA, 25 bp, Homo sapien
catcactctgtgttgtttcccccta

SEQ ID NO: 438089 - DNA, 25 bp, Homo sapien
gagtgctgccatcaattaatcaaaa

SEQ ID NO: 438090 - DNA, 25 bp, Homo sapien
caatagttaaatgttgattagcaga

SEQ ID NO: 438091 - DNA, 25 bp, Homo sapien
tctttgtaaaagtatagggctggga

SEQ ID NO: 438092 - DNA, 25 bp, Homo sapien
acgtactgtgaccttactgggagca

SEQ ID NO: 438093 - DNA, 25 bp, Homo sapien
tagacccaactcttgacgtactgtg

SEQ ID NO: 438094 - DNA, 25 bp, Homo sapien
ggtttatgagccaacctcttgtgag

SEQ ID NO: 438095 - DNA, 25 bp, Homo sapien
tacagcttcatatgacctgaggcac

SEQ ID NO: 438096 - DNA, 25 bp, Homo sapien
agttggtacagatctggaatggagc

SEQ ID NO: 438097 - DNA, 25 bp, Homo sapien
tggtacagatctggaatggagcttc

SEQ ID NO: 438098 - DNA, 25 bp, Homo sapien
aagttggtacagatctggaatggag

SEQ ID NO: 438099 - DNA, 25 bp, Homo sapien
ttggtacagatctggaatggagctt

SEQ ID NO: 438100 - DNA, 25 bp, Homo sapien
tgcggcgtggcagtgttttcctggt

SEQ ID NO: 438101 - DNA, 25 bp, Homo sapien
ttctttgtggcgcttgtctcgtgcc

SEQ ID NO: 438102 - DNA, 25 bp, Homo sapien
ctggcatcgggtccccgggcgtggg

SEQ ID NO: 438103 - DNA, 25 bp, Homo sapien
cgttgtcacagtgtgcatggcagtg

SEQ ID NO: 438104 - DNA, 25 bp, Homo sapien
cacacacactctcccggcgcctcgg

SEQ ID NO: 438105 - DNA, 25 bp, Homo sapien
gactggagggtgagtccctcacaaa

SEQ ID NO: 438106 - DNA, 25 bp, Homo sapien
ctccgggttcgggatgctgaggaga

SEQ ID NO: 438107 - DNA, 25 bp, Homo sapien
tcacctggagatcacggagggaagg

SEQ ID NO: 438108 - DNA, 25 bp, Homo sapien
gagacagacccactggaccgccgaa

SEQ ID NO: 438109 - DNA, 25 bp, Homo sapien
tgaagcaagagacagacccactgga

SEQ ID NO: 438110 - DNA, 25 bp, Homo sapien
agcaagagacagacccactggaccg

SEQ ID NO: 438111 - DNA, 25 bp, Homo sapien
agacccactggaccgccgaactgcc

SEQ ID NO: 438112 - DNA, 25 bp, Homo sapien
ccagaagcaggagatagccgagaag

SEQ ID NO: 438113 - DNA, 25 bp, Homo sapien
gacaaaaacggtgctggcaggtccc

SEQ ID NO: 438114 - DNA, 25 bp, Homo sapien
ggctggaagaccgtccccggatctg

SEQ ID NO: 438115 - DNA, 25 bp, Homo sapien
tggtcgccaagaaggagctaacgac

SEQ ID NO: 438116 - DNA, 25 bp, Homo sapien
tttcatggcatctggggttttaccc

SEQ ID NO: 438117 - DNA, 25 bp, Homo sapien
cctccacgtcggtggaataattttg

SEQ ID NO: 438118 - DNA, 25 bp, Homo sapien
gcatcatcgcggtcgaaatagaagc

SEQ ID NO: 438119 - DNA, 25 bp, Homo sapien
gcttctcctcggtcaattcgcggaa

SEQ ID NO: 438120 - DNA, 25 bp, Homo sapien
tcgcccagcccagcctctgggcctc

SEQ ID NO: 438121 - DNA, 25 bp, Homo sapien
gagagtgagcctttcgaagagatac

SEQ ID NO: 438122 - DNA, 25 bp, Homo sapien
ttgcaaggggcccttcagaagtcgc

SEQ ID NO: 438123 - DNA, 25 bp, Homo sapien
caaggggcccttcagaagtcgctgg

SEQ ID NO: 438124 - DNA, 25 bp, Homo sapien
ggcccttcagaagtcgctgggctca

SEQ ID NO: 438125 - DNA, 25 bp, Homo sapien
tactttgcaaggggcccttcagaag

SEQ ID NO: 438126 - DNA, 25 bp, Homo sapien
tggagggagaggcttaggcagaagc

SEQ ID NO: 438127 - DNA, 25 bp, Homo sapien
ctattggctggagggagaggcttag

SEQ ID NO: 438128 - DNA, 25 bp, Homo sapien
attggctggagggagaggcttaggc

SEQ ID NO: 438129 - DNA, 25 bp, Homo sapien
gctggagggagaggcttaggcagaa

SEQ ID NO: 438130 - DNA, 25 bp, Homo sapien
atcagaaagccttatttccatttgg

SEQ ID NO: 438131 - DNA, 25 bp, Homo sapien
ttgttagggtagttaagaaagctgc

SEQ ID NO: 438132 - DNA, 25 bp, Homo sapien
gcatcagaaagccttatttccattt

SEQ ID NO: 438133 - DNA, 25 bp, Homo sapien
ccatttggtccaaggcttgttaggg

SEQ ID NO: 438134 - DNA, 25 bp, Homo sapien
ctcttccctatgaattcaggcataa

SEQ ID NO: 438135 - DNA, 25 bp, Homo sapien
aaaagacctctggactgtaaaaatg

SEQ ID NO: 438136 - DNA, 25 bp, Homo sapien
agacctctggactgtaaaaatgttt

SEQ ID NO: 438137 - DNA, 25 bp, Homo sapien
cctcttccctatgaattcaggcata

SEQ ID NO: 438138 - DNA, 25 bp, Homo sapien
aactggaagagtctgcaatgttccc

SEQ ID NO: 438139 - DNA, 25 bp, Homo sapien
gcaatgttccccagcatgccgttgg

SEQ ID NO: 438140 - DNA, 25 bp, Homo sapien
actggaagagtctgcaatgttcccc

SEQ ID NO: 438141 - DNA, 25 bp, Homo sapien
agtctgcaatgttccccagcatgcc

SEQ ID NO: 438142 - DNA, 25 bp, Homo sapien
taaacacacatttagctttcggctg

SEQ ID NO: 438143 - DNA, 25 bp, Homo sapien
tttagctttcggctggagccgccat

SEQ ID NO: 438144 - DNA, 25 bp, Homo sapien
atatttgatcaaataataaacacac

SEQ ID NO: 438145 - DNA, 25 bp, Homo sapien
cacatttagctttcggctggagccg

SEQ ID NO: 438146 - DNA, 25 bp, Homo sapien
cacatgtgcatgtcctgcaggcttc

SEQ ID NO: 438147 - DNA, 25 bp, Homo sapien
gctctgcgagtcttacatagtctta

SEQ ID NO: 438148 - DNA, 25 bp, Homo sapien
acttggtaagaagccaagccttgcc

SEQ ID NO: 438149 - DNA, 25 bp, Homo sapien
tccccatgctctgcgagtcttacat

SEQ ID NO: 438150 - DNA, 25 bp, Homo sapien
tttcggtcctctggactgccctcca

SEQ ID NO: 438151 - DNA, 25 bp, Homo sapien
ctttcggtcctctggactgccctcc

SEQ ID NO: 438152 - DNA, 25 bp, Homo sapien
ttcggtcctctggactgccctccat

SEQ ID NO: 438153 - DNA, 25 bp, Homo sapien
acctcctttttggtatcaaagactg

SEQ ID NO: 438154 - DNA, 25 bp, Homo sapien
cacctcctttttggtatcaaagact

SEQ ID NO: 438155 - DNA, 25 bp, Homo sapien
ctttttggtatcaaagactgggaag

SEQ ID NO: 438156 - DNA, 25 bp, Homo sapien
ttttggtatcaaagactgggaagaa

SEQ ID NO: 438157 - DNA, 25 bp, Homo sapien
gctgttcccatatgtgccccgagct

SEQ ID NO: 438158 - DNA, 25 bp, Homo sapien
tcaacaaaggctgttcccatatgtg

SEQ ID NO: 438159 - DNA, 25 bp, Homo sapien
tacactttagagtcaacaaaggctg

SEQ ID NO: 438160 - DNA, 25 bp, Homo sapien
tttagagtcaacaaaggctgttccc

SEQ ID NO: 438161 - DNA, 25 bp, Homo sapien
tactgctcagcaaatgaaggacctt

SEQ ID NO: 438162 - DNA, 25 bp, Homo sapien
atactgctcagcaaatgaaggacct

SEQ ID NO: 438163 - DNA, 25 bp, Homo sapien
ctgctcagcaaatgaaggacctttc

SEQ ID NO: 438164 - DNA, 25 bp, Homo sapien
gctcagcaaatgaaggacctttcat

SEQ ID NO: 438165 - DNA, 25 bp, Homo sapien
tgtgtccttgatctgggcagctcca

SEQ ID NO: 438166 - DNA, 25 bp, Homo sapien
agaaaatgccccatcaactgccagg

SEQ ID NO: 438167 - DNA, 25 bp, Homo sapien
cagtctggcagggagatatttaggc

SEQ ID NO: 438168 - DNA, 25 bp, Homo sapien
gaggtgatcctgtctcgctaagagc

SEQ ID NO: 438169 - DNA, 25 bp, Homo sapien
ggaaaaggacccctcaggatcaggc

SEQ ID NO: 438170 - DNA, 25 bp, Homo sapien
ctggtggttgttcaggaaacaggaa

SEQ ID NO: 438171 - DNA, 25 bp, Homo sapien
atgccagagcgagtccctcagcagg

SEQ ID NO: 438172 - DNA, 25 bp, Homo sapien
atctggtggttgttcaggaaacagg

SEQ ID NO: 438173 - DNA, 25 bp, Homo sapien
aacagccccaagcacgggaagtctg

SEQ ID NO: 438174 - DNA, 25 bp, Homo sapien
cagccccaagcacgggaagtctgtc

SEQ ID NO: 438175 - DNA, 25 bp, Homo sapien
gccccaagcacgggaagtctgtctg

SEQ ID NO: 438176 - DNA, 25 bp, Homo sapien
ccccaagcacgggaagtctgtctgg

SEQ ID NO: 438177 - DNA, 25 bp, Homo sapien
tcttggctttcacctctcttgacac

SEQ ID NO: 438178 - DNA, 25 bp, Homo sapien
ctccttccttagaagtgtactcgct

SEQ ID NO: 438179 - DNA, 25 bp, Homo sapien
tactcgctttctttggcacctgctc

SEQ ID NO: 438180 - DNA, 25 bp, Homo sapien
tcttccagttaactcataaatgtga

SEQ ID NO: 438181 - DNA, 25 bp, Homo sapien
gctcggaaattccacggtcaactca

SEQ ID NO: 438182 - DNA, 25 bp, Homo sapien
ccctggttggtgtgtttattcggca

SEQ ID NO: 438183 - DNA, 25 bp, Homo sapien
tattcggcagttgccacgtttctcc

SEQ ID NO: 438184 - DNA, 25 bp, Homo sapien
acagctttcctcctcgctagctgga

SEQ ID NO: 438185 - DNA, 25 bp, Homo sapien
catcacaaggcgctgggttaccatg

SEQ ID NO: 438186 - DNA, 25 bp, Homo sapien
tgcgggtatctaatggccagctgtg

SEQ ID NO: 438187 - DNA, 25 bp, Homo sapien
gaagccttcggcaagtttggagaac

SEQ ID NO: 438188 - DNA, 25 bp, Homo sapien
tgctggctagtggaacagagaccca

SEQ ID NO: 438189 - DNA, 25 bp, Homo sapien
tagacatgattggtataaggacaac

SEQ ID NO: 438190 - DNA, 25 bp, Homo sapien
caccctctgggcacgtggatgagtt

SEQ ID NO: 438191 - DNA, 25 bp, Homo sapien
gttcctatgagttcagctgtccaga

SEQ ID NO: 438192 - DNA, 25 bp, Homo sapien
tacaggcgaggtctggaagtatcct

SEQ ID NO: 438193 - DNA, 25 bp, Homo sapien
ggaagtaagtctgcggcgagcggcg

SEQ ID NO: 438194 - DNA, 25 bp, Homo sapien
gccgggaagctagaagcccctgaag

SEQ ID NO: 438195 - DNA, 25 bp, Homo sapien
tgagccggggaagtaagtctgcggc

SEQ ID NO: 438196 - DNA, 25 bp, Homo sapien
gagccgggaagctagaagcccctga

SEQ ID NO: 438197 - DNA, 25 bp, Homo sapien
cgcccgggggaggctgagagccggg

SEQ ID NO: 438198 - DNA, 25 bp, Homo sapien
ggcccggggccggagagcgggcgca

SEQ ID NO: 438199 - DNA, 25 bp, Homo sapien
gggccggagagcgggcgcaccgtac

SEQ ID NO: 438200 - DNA, 25 bp, Homo sapien
cggggccggagagcgggcgcaccgt

SEQ ID NO: 438201 - DNA, 25 bp, Homo sapien
gagcgtatctcatcgggccaagtcc

SEQ ID NO: 438202 - DNA, 25 bp, Homo sapien
ttctgcaaacaacctgtgggcacct

SEQ ID NO: 438203 - DNA, 25 bp, Homo sapien
acagactggtacgtgatgtgccacc

SEQ ID NO: 438204 - DNA, 25 bp, Homo sapien
cacacactttcggatgcatggcacc

SEQ ID NO: 438205 - DNA, 25 bp, Homo sapien
gagacagggtgccaaggcatatttc

SEQ ID NO: 438206 - DNA, 25 bp, Homo sapien
ttataatgctgtggacgatccaggg

SEQ ID NO: 438207 - DNA, 25 bp, Homo sapien
ccagagaagttttgctgtgaaggga

SEQ ID NO: 438208 - DNA, 25 bp, Homo sapien
agtgcagaaggctctccagagaagt

SEQ ID NO: 438209 - DNA, 25 bp, Homo sapien
ctcactggagagcttggctgaggct

SEQ ID NO: 438210 - DNA, 25 bp, Homo sapien
ccaacatttggagctgagtgaagga

SEQ ID NO: 438211 - DNA, 25 bp, Homo sapien
tgtaaatagaccagagagagaagcg

SEQ ID NO: 438212 - DNA, 25 bp, Homo sapien
gagaagcggctacggacaaagccct

SEQ ID NO: 438213 - DNA, 25 bp, Homo sapien
aggtcggagggccaatgttgcccca

SEQ ID NO: 438214 - DNA, 25 bp, Homo sapien
taagtcacaccttccttaatgccgt

SEQ ID NO: 438215 - DNA, 25 bp, Homo sapien
ttaatgccgtccctcaagaagcagg

SEQ ID NO: 438216 - DNA, 25 bp, Homo sapien
gagagcactgggctcctacatgctt

SEQ ID NO: 438217 - DNA, 25 bp, Homo sapien
gaagacaggacccatgtgtctgcca

SEQ ID NO: 438218 - DNA, 25 bp, Homo sapien
cctaagaatatatgccccttggtgg

SEQ ID NO: 438219 - DNA, 25 bp, Homo sapien
gaaagggcatcgagacagatgtccc

SEQ ID NO: 438220 - DNA, 25 bp, Homo sapien
tcagcctgcaaggagtatcaccacc

SEQ ID NO: 438221 - DNA, 25 bp, Homo sapien
gaccgtggaatgaatgcaggcagcc

SEQ ID NO: 438222 - DNA, 25 bp, Homo sapien
tttgtgaccgtcaaataaggccctc

SEQ ID NO: 438223 - DNA, 25 bp, Homo sapien
caagggcctcgtgcatgaaaataat

SEQ ID NO: 438224 - DNA, 25 bp, Homo sapien
aacaagctgtggaatggaccgtgga

SEQ ID NO: 438225 - DNA, 25 bp, Homo sapien
taggccgcgactgagagggtcatcc

SEQ ID NO: 438226 - DNA, 25 bp, Homo sapien
cctgctcaagaagtgctttggctgc

SEQ ID NO: 438227 - DNA, 25 bp, Homo sapien
cacacggcctccgatgtggctggaa

SEQ ID NO: 438228 - DNA, 25 bp, Homo sapien
tgacatccgtgaaaccctgctcaag

SEQ ID NO: 438229 - DNA, 25 bp, Homo sapien
tctcttgaatcccagaagcagaggt

SEQ ID NO: 438230 - DNA, 25 bp, Homo sapien
gaatctcttgaatcccagaagcaga

SEQ ID NO: 438231 - DNA, 25 bp, Homo sapien
aatctcttgaatcccagaagcagag

SEQ ID NO: 438232 - DNA, 25 bp, Homo sapien
gagaatctcttgaatcccagaagca

SEQ ID NO: 438233 - DNA, 25 bp, Homo sapien
tgaattcctcaaccacgtccttggg

SEQ ID NO: 438234 - DNA, 25 bp, Homo sapien
gcaggccacgccattcttggaatag

SEQ ID NO: 438235 - DNA, 25 bp, Homo sapien
gaggccgttggcttctgctagatga

SEQ ID NO: 438236 - DNA, 25 bp, Homo sapien
gctgcgttccccatcggttgtctct

SEQ ID NO: 438237 - DNA, 25 bp, Homo sapien
taatgtgggcgaaacagtccctgcc

SEQ ID NO: 438238 - DNA, 25 bp, Homo sapien
tagggatccgatgttgcactcaatg

SEQ ID NO: 438239 - DNA, 25 bp, Homo sapien
tcccttgggcgataagcaacctggt

SEQ ID NO: 438240 - DNA, 25 bp, Homo sapien
tttgcatcagccaccaacgagggca

SEQ ID NO: 438241 - DNA, 25 bp, Homo sapien
tactgctggatcatggcgagcttca

SEQ ID NO: 438242 - DNA, 25 bp, Homo sapien
ggttacgcacctcctctcgggtgaa

SEQ ID NO: 438243 - DNA, 25 bp, Homo sapien
gggtcattcctgatgcggttacgca

SEQ ID NO: 438244 - DNA, 25 bp, Homo sapien
tatcgtgccggaagaactcctgggt

SEQ ID NO: 438245 - DNA, 25 bp, Homo sapien
aggagcagcgtagccctcctcagac

SEQ ID NO: 438246 - DNA, 25 bp, Homo sapien
agaagccaggtgaccgccggggttg

SEQ ID NO: 438247 - DNA, 25 bp, Homo sapien
ggtaggagcagcgtagccctcctca

SEQ ID NO: 438248 - DNA, 25 bp, Homo sapien
ccagaatccgtcttcctcaagatac

SEQ ID NO: 438249 - DNA, 25 bp, Homo sapien
gtccactccccgaaggcgctcaggg

SEQ ID NO: 438250 - DNA, 25 bp, Homo sapien
ccagtgaatgcagcggacaggtttc

SEQ ID NO: 438251 - DNA, 25 bp, Homo sapien
ttccctagctggatgacgtgggcag

SEQ ID NO: 438252 - DNA, 25 bp, Homo sapien
caacccgcatgaagcccgaggggat

SEQ ID NO: 438253 - DNA, 25 bp, Homo sapien
acaatcacatggtccgccgggatca

SEQ ID NO: 438254 - DNA, 25 bp, Homo sapien
cccagtgtcgtgattgtggtcgccc

SEQ ID NO: 438255 - DNA, 25 bp, Homo sapien
tggtccgccgggatcagctcacagt

SEQ ID NO: 438256 - DNA, 25 bp, Homo sapien
agctcacagtcctcgcactccacca

SEQ ID NO: 438257 - DNA, 25 bp, Homo sapien
cagaagggctcctcgaattccagaa

SEQ ID NO: 438258 - DNA, 25 bp, Homo sapien
tgtgaactgacgcagcatctccgtg

SEQ ID NO: 438259 - DNA, 25 bp, Homo sapien
gatcttgcggtaccagagctcaggt

SEQ ID NO: 438260 - DNA, 25 bp, Homo sapien
cagaaagatcttgtcggtggtgcca

SEQ ID NO: 438261 - DNA, 25 bp, Homo sapien
ataatcatgtttccccgcctaatat

SEQ ID NO: 438262 - DNA, 25 bp, Homo sapien
aatcatgtttccccgcctaatatcg

SEQ ID NO: 438263 - DNA, 25 bp, Homo sapien
cataatcatgtttccccgcctaata

SEQ ID NO: 438264 - DNA, 25 bp, Homo sapien
tcatgtttccccgcctaatatcggg

SEQ ID NO: 438265 - DNA, 25 bp, Homo sapien
tcctgtgacccccggcaaaacgctc

SEQ ID NO: 438266 - DNA, 25 bp, Homo sapien
ctgtgacccccggcaaaacgctcca

SEQ ID NO: 438267 - DNA, 25 bp, Homo sapien
tgtgacccccggcaaaacgctccac

SEQ ID NO: 438268 - DNA, 25 bp, Homo sapien
ctcctgtgacccccggcaaaacgct

SEQ ID NO: 438269 - DNA, 25 bp, Homo sapien
caagattcgccgaggttttggaatg

SEQ ID NO: 438270 - DNA, 25 bp, Homo sapien
cgcggaagtaagggttgctgcccca

SEQ ID NO: 438271 - DNA, 25 bp, Homo sapien
gttgctgccccaggccgagcgcaag

SEQ ID NO: 438272 - DNA, 25 bp, Homo sapien
tgtatgaataggagccgcggaagta

SEQ ID NO: 438273 - DNA, 25 bp, Homo sapien
gcttctccacatccgccccgctgga

SEQ ID NO: 438274 - DNA, 25 bp, Homo sapien
agctctctgtgtacggcaggggctt

SEQ ID NO: 438275 - DNA, 25 bp, Homo sapien
ctgtctttgagctctctgtgtacgg

SEQ ID NO: 438276 - DNA, 25 bp, Homo sapien
tttgagctctctgtgtacggcaggg

SEQ ID NO: 438277 - DNA, 25 bp, Homo sapien
ttacggcgcccctgttagcatccag

SEQ ID NO: 438278 - DNA, 25 bp, Homo sapien
tttacggcgcccctgttagcatcca

SEQ ID NO: 438279 - DNA, 25 bp, Homo sapien
ctttacggcgcccctgttagcatcc

SEQ ID NO: 438280 - DNA, 25 bp, Homo sapien
ccgtgggtggtggaatagtacttgc

SEQ ID NO: 438281 - DNA, 25 bp, Homo sapien
gaagaggtctcggtacatctcaatg

SEQ ID NO: 438282 - DNA, 25 bp, Homo sapien
gcagcctcacgctggccggacagca

SEQ ID NO: 438283 - DNA, 25 bp, Homo sapien
aatagtacttgcggtgggtggcctc

SEQ ID NO: 438284 - DNA, 25 bp, Homo sapien
cacttacaataacaaggcaggacag

SEQ ID NO: 438285 - DNA, 25 bp, Homo sapien
agcacagaggtaactcaacggccca

SEQ ID NO: 438286 - DNA, 25 bp, Homo sapien
ggaggtcacgagttagtggctcttc

SEQ ID NO: 438287 - DNA, 25 bp, Homo sapien
tcagggcggctagctctacagaaga

SEQ ID NO: 438288 - DNA, 25 bp, Homo sapien
ttgcacaaagccacagctaaatacc

SEQ ID NO: 438289 - DNA, 25 bp, Homo sapien
aagagacagcgcctgccaaataccc

SEQ ID NO: 438290 - DNA, 25 bp, Homo sapien
agcaagagacagcgcctgccaaata

SEQ ID NO: 438291 - DNA, 25 bp, Homo sapien
cagctaaataccttcacctgaagtc

SEQ ID NO: 438292 - DNA, 25 bp, Homo sapien
cttgtcgatgggtgaggaagttgcc

SEQ ID NO: 438293 - DNA, 25 bp, Homo sapien
ggctggtgagcttgtcgatgggtga

SEQ ID NO: 438294 - DNA, 25 bp, Homo sapien
ggaagctccaaaggacaggcatgaa

SEQ ID NO: 438295 - DNA, 25 bp, Homo sapien
gctccaaaggacaggcatgaaggct

SEQ ID NO: 438296 - DNA, 25 bp, Homo sapien
gcagcttgactgaaggagaggccca

SEQ ID NO: 438297 - DNA, 25 bp, Homo sapien
ggatgccgccagagcaagtgtagaa

SEQ ID NO: 438298 - DNA, 25 bp, Homo sapien
caacaaccgctagtgcatgacagtg

SEQ ID NO: 438299 - DNA, 25 bp, Homo sapien
tagaaaatgctgctgtgcagcttga

SEQ ID NO: 438300 - DNA, 25 bp, Homo sapien
ctgcaaggaaccagctgcgccctcc

SEQ ID NO: 438301 - DNA, 25 bp, Homo sapien
ccactccatgtcatctcaatgacca

SEQ ID NO: 438302 - DNA, 25 bp, Homo sapien
tctccactcttaaatgctccctagg

SEQ ID NO: 438303 - DNA, 25 bp, Homo sapien
atgctccctagggttttattcctct

SEQ ID NO: 438304 - DNA, 25 bp, Homo sapien
ctcaatgaccacttgtacagaaatg

SEQ ID NO: 438305 - DNA, 25 bp, Homo sapien
ctacagcaggttctgggctttcagg

SEQ ID NO: 438306 - DNA, 25 bp, Homo sapien
tatttcatcgtgaacctggccgtgg

SEQ ID NO: 438307 - DNA, 25 bp, Homo sapien
ctgagcgtcagtttcgagggacccc

SEQ ID NO: 438308 - DNA, 25 bp, Homo sapien
acggccgcgcgttgagatgactttc

SEQ ID NO: 438309 - DNA, 25 bp, Homo sapien
gacgagcgcttctgcggtatcaccg

SEQ ID NO: 438310 - DNA, 25 bp, Homo sapien
acccgagcgcgcgccagcgccgcag

SEQ ID NO: 438311 - DNA, 25 bp, Homo sapien
gcgcgccagcgccgcagccccccgg

SEQ ID NO: 438312 - DNA, 25 bp, Homo sapien
ggacccgagcgcgcgccagcgccgc

SEQ ID NO: 438313 - DNA, 25 bp, Homo sapien
gcgccagcgccgcagccccccggac

SEQ ID NO: 438314 - DNA, 25 bp, Homo sapien
catcgcactggacagaggcgtctga

SEQ ID NO: 438315 - DNA, 25 bp, Homo sapien
gaaaaaggaggtgcggcagatccat

SEQ ID NO: 438316 - DNA, 25 bp, Homo sapien
gaaagttggcgtatgtagaccagcg

SEQ ID NO: 438317 - DNA, 25 bp, Homo sapien
gaaaggtttattcccgcatctgata

SEQ ID NO: 438318 - DNA, 25 bp, Homo sapien
gtagatatgtgcctgagagtctcag

SEQ ID NO: 438319 - DNA, 25 bp, Homo sapien
gagttcagataggaaagttctagcc

SEQ ID NO: 438320 - DNA, 25 bp, Homo sapien
tgacccaaagggtatttaagctctc

SEQ ID NO: 438321 - DNA, 25 bp, Homo sapien
tccaggaagcccttaaggatgactg

SEQ ID NO: 438322 - DNA, 25 bp, Homo sapien
ggagttgggacttcagctgcacacc

SEQ ID NO: 438323 - DNA, 25 bp, Homo sapien
aggagttgggacttcagctgcacac

SEQ ID NO: 438324 - DNA, 25 bp, Homo sapien
gaggagttgggacttcagctgcaca

SEQ ID NO: 438325 - DNA, 25 bp, Homo sapien
tacatctgtcatgaatttcttcccc

SEQ ID NO: 438326 - DNA, 25 bp, Homo sapien
agctggttcccgcaaacaggataca

SEQ ID NO: 438327 - DNA, 25 bp, Homo sapien
gacagtgccaatcaatctgtatcat

SEQ ID NO: 438328 - DNA, 25 bp, Homo sapien
ttcggcatcctgactctgacagtgc

SEQ ID NO: 438329 - DNA, 25 bp, Homo sapien
ttagctaagccatggtggaaatgtt

SEQ ID NO: 438330 - DNA, 25 bp, Homo sapien
tctagcccttttttagctaagccat

SEQ ID NO: 438331 - DNA, 25 bp, Homo sapien
gagtgagttggaattgtcaccaact

SEQ ID NO: 438332 - DNA, 25 bp, Homo sapien
aaatggcattcccaattctagccct

SEQ ID NO: 438333 - DNA, 25 bp, Homo sapien
catctgccagagtccctcacatcct

SEQ ID NO: 438334 - DNA, 25 bp, Homo sapien
agagtccctcacatcctcttcttgt

SEQ ID NO: 438335 - DNA, 25 bp, Homo sapien
tctttgcacatctgccagagtccct

SEQ ID NO: 438336 - DNA, 25 bp, Homo sapien
tgccagagtccctcacatcctcttc

SEQ ID NO: 438337 - DNA, 25 bp, Homo sapien
ctgtgcattgtcaccaagagggcac

SEQ ID NO: 438338 - DNA, 25 bp, Homo sapien
gcattgtcaccaagagggcactgat

SEQ ID NO: 438339 - DNA, 25 bp, Homo sapien
gatcaaagggactgtgacaatgatt

SEQ ID NO: 438340 - DNA, 25 bp, Homo sapien
caagagggcactgatcaaagggact

SEQ ID NO: 438341 - DNA, 25 bp, Homo sapien
ctctctctggaagtggacagtcgaa

SEQ ID NO: 438342 - DNA, 25 bp, Homo sapien
tatggtgtgtctggattattggagg

SEQ ID NO: 438343 - DNA, 25 bp, Homo sapien
gagaaagcgaatctgtgggagatat

SEQ ID NO: 438344 - DNA, 25 bp, Homo sapien
tgcggtcttcagacaaaccattgtg

SEQ ID NO: 438345 - DNA, 25 bp, Homo sapien
attgtatcttggaattaagccccac

SEQ ID NO: 438346 - DNA, 25 bp, Homo sapien
caaattgtatcttggaattaagccc

SEQ ID NO: 438347 - DNA, 25 bp, Homo sapien
gccgcaaattgtatcttggaattaa

SEQ ID NO: 438348 - DNA, 25 bp, Homo sapien
catctgccgcaaattgtatcttgga

SEQ ID NO: 438349 - DNA, 25 bp, Homo sapien
cactgtggtgtctccacactggcag

SEQ ID NO: 438350 - DNA, 25 bp, Homo sapien
tcactgtggtgtctccacactggca

SEQ ID NO: 438351 - DNA, 25 bp, Homo sapien
tgtggtgtctccacactggcagcat

SEQ ID NO: 438352 - DNA, 25 bp, Homo sapien
tcctctaagctgttttggaacatca

SEQ ID NO: 438353 - DNA, 25 bp, Homo sapien
tccatttgctgaagtctccaaggcc

SEQ ID NO: 438354 - DNA, 25 bp, Homo sapien
aactgaggccctggaattttccatt

SEQ ID NO: 438355 - DNA, 25 bp, Homo sapien
catttgctgaagtctccaaggcctg

SEQ ID NO: 438356 - DNA, 25 bp, Homo sapien
tcaggtggcgtctgcccagaaactg

SEQ ID NO: 438357 - DNA, 25 bp, Homo sapien
ccagttgttttgcagtcaagaaaca

SEQ ID NO: 438358 - DNA, 25 bp, Homo sapien
gaatcacagaacatcagagcaatac

SEQ ID NO: 438359 - DNA, 25 bp, Homo sapien
caagcgtactggaatatccagccca

SEQ ID NO: 438360 - DNA, 25 bp, Homo sapien
gcaatacaggtccagccagttgttt

SEQ ID NO: 438361 - DNA, 25 bp, Homo sapien
tcagcaactttcactggacagggag

SEQ ID NO: 438362 - DNA, 25 bp, Homo sapien
cttggctagaatctcacatgtttga

SEQ ID NO: 438363 - DNA, 25 bp, Homo sapien
tctggaatgctgcagctcatcagca

SEQ ID NO: 438364 - DNA, 25 bp, Homo sapien
cagacaattgaaaaagggggcaggc

SEQ ID NO: 438365 - DNA, 25 bp, Homo sapien
tttgaaatccagttgtaagtcagca

SEQ ID NO: 438366 - DNA, 25 bp, Homo sapien
attttgaaatccagttgtaagtcag

SEQ ID NO: 438367 - DNA, 25 bp, Homo sapien
tgaaatccagttgtaagtcagcaaa

SEQ ID NO: 438368 - DNA, 25 bp, Homo sapien
agcaaaggggatggtcccctccacg

SEQ ID NO: 438369 - DNA, 25 bp, Homo sapien
aacatcaatgtcaagagcacacttt

SEQ ID NO: 438370 - DNA, 25 bp, Homo sapien
aaacatcaatgtcaagagcacactt

SEQ ID NO: 438371 - DNA, 25 bp, Homo sapien
acatcaatgtcaagagcacactttg

SEQ ID NO: 438372 - DNA, 25 bp, Homo sapien
cacattcagagtgggactcataagc

SEQ ID NO: 438373 - DNA, 25 bp, Homo sapien
gggataattaacttcactgcctttg

SEQ ID NO: 438374 - DNA, 25 bp, Homo sapien
ggataattaacttcactgcctttgg

SEQ ID NO: 438375 - DNA, 25 bp, Homo sapien
gataattaacttcactgcctttggc

SEQ ID NO: 438376 - DNA, 25 bp, Homo sapien
tacagagcatggcagtctgtgaaaa

SEQ ID NO: 438377 - DNA, 25 bp, Homo sapien
cagagcatggcagtctgtgaaaaga

SEQ ID NO: 438378 - DNA, 25 bp, Homo sapien
acagagcatggcagtctgtgaaaag

SEQ ID NO: 438379 - DNA, 25 bp, Homo sapien
agtagctgaggccagaaccgtggct

SEQ ID NO: 438380 - DNA, 25 bp, Homo sapien
aaccgtggctatgggatcctgggcc

SEQ ID NO: 438381 - DNA, 25 bp, Homo sapien
aaccccgtgcaagaagggagtagct

SEQ ID NO: 438382 - DNA, 25 bp, Homo sapien
ccaaccccgtgcaagaagggagtag

SEQ ID NO: 438383 - DNA, 25 bp, Homo sapien
tctccctggtagaaagccaagtagg

SEQ ID NO: 438384 - DNA, 25 bp, Homo sapien
caagtgttttcatatgtgctgaagg

SEQ ID NO: 438385 - DNA, 25 bp, Homo sapien
aaataaccttgtggaccaaccagag

SEQ ID NO: 438386 - DNA, 25 bp, Homo sapien
caaccagagttagcccagttggcaa

SEQ ID NO: 438387 - DNA, 25 bp, Homo sapien
acctttggttgagaccaggattggg

SEQ ID NO: 438388 - DNA, 25 bp, Homo sapien
gacctttggttgagaccaggattgg

SEQ ID NO: 438389 - DNA, 25 bp, Homo sapien
tggacctttggttgagaccaggatt

SEQ ID NO: 438390 - DNA, 25 bp, Homo sapien
cttggacctttggttgagaccagga

SEQ ID NO: 438391 - DNA, 25 bp, Homo sapien
tgcttttgccgcatggctgtgacac

SEQ ID NO: 438392 - DNA, 25 bp, Homo sapien
tctgtgccaacttgggccaaaggtt

SEQ ID NO: 438393 - DNA, 25 bp, Homo sapien
gacgggaagtattgcatctctgtgc

SEQ ID NO: 438394 - DNA, 25 bp, Homo sapien
tggtggaatccaatcctgtagggag

SEQ ID NO: 438395 - DNA, 25 bp, Homo sapien
ggtcatctcatgtttcttcttgatc

SEQ ID NO: 438396 - DNA, 25 bp, Homo sapien
tgtggtcatctcatgtttcttcttg

SEQ ID NO: 438397 - DNA, 25 bp, Homo sapien
tctcatgtttcttcttgatccacag

SEQ ID NO: 438398 - DNA, 25 bp, Homo sapien
gtttcttcttgatccacaggtctga

SEQ ID NO: 438399 - DNA, 25 bp, Homo sapien
tccgtgcctgggctattacgcatag

SEQ ID NO: 438400 - DNA, 25 bp, Homo sapien
tatatacccacagtaggattcctgg

SEQ ID NO: 438401 - DNA, 25 bp, Homo sapien
gattcctggatcgtgtcatactcct

SEQ ID NO: 438402 - DNA, 25 bp, Homo sapien
caactgacagtctgtgaaggttccc

SEQ ID NO: 438403 - DNA, 25 bp, Homo sapien
ctgctggatgaattaagtcttggtt

SEQ ID NO: 438404 - DNA, 25 bp, Homo sapien
tcttggttgcctctggtgttctctg

SEQ ID NO: 438405 - DNA, 25 bp, Homo sapien
taagtcttggttgcctctggtgttc

SEQ ID NO: 438406 - DNA, 25 bp, Homo sapien
tgaattaagtcttggttgcctctgg

SEQ ID NO: 438407 - DNA, 25 bp, Homo sapien
aggcagggatcagcaaccgtatttt

SEQ ID NO: 438408 - DNA, 25 bp, Homo sapien
cttgaaggcagggatcagcaaccgt

SEQ ID NO: 438409 - DNA, 25 bp, Homo sapien
gggtacctcctgcagtatagagtct

SEQ ID NO: 438410 - DNA, 25 bp, Homo sapien
tctgaccaactacctgtggtctcag

SEQ ID NO: 438411 - DNA, 25 bp, Homo sapien
ttgtccagtacgcaattgaagtggg

SEQ ID NO: 438412 - DNA, 25 bp, Homo sapien
ggcagtcatgactttgtccagtacg

SEQ ID NO: 438413 - DNA, 25 bp, Homo sapien
ctacttggcagtcatgactttgtcc

SEQ ID NO: 438414 - DNA, 25 bp, Homo sapien
catgactttgtccagtacgcaattg

SEQ ID NO: 438415 - DNA, 25 bp, Homo sapien
gatgtcctgtgttgtactcaagtag

SEQ ID NO: 438416 - DNA, 25 bp, Homo sapien
gaacattcctgctagggtgacctga

SEQ ID NO: 438417 - DNA, 25 bp, Homo sapien
ggtgacctgatgtcctgtgttgtac

SEQ ID NO: 438418 - DNA, 25 bp, Homo sapien
gctgcaggctaatggctttatgaac

SEQ ID NO: 438419 - DNA, 25 bp, Homo sapien
gcattatcacaggatgtggatgatt

SEQ ID NO: 438420 - DNA, 25 bp, Homo sapien
gggcattatcacaggatgtggatga

SEQ ID NO: 438421 - DNA, 25 bp, Homo sapien
tatgagcaagggtgcatagtatggc

SEQ ID NO: 438422 - DNA, 25 bp, Homo sapien
gggtgcatagtatggcctcagacat

SEQ ID NO: 438423 - DNA, 25 bp, Homo sapien
tttgttggtacggtgctcttctcct

SEQ ID NO: 438424 - DNA, 25 bp, Homo sapien
tgttggtacggtgctcttctcctcc

SEQ ID NO: 438425 - DNA, 25 bp, Homo sapien
ttgttggtacggtgctcttctcctc

SEQ ID NO: 438426 - DNA, 25 bp, Homo sapien
tttatttgggcttgtgaattcttga

SEQ ID NO: 438427 - DNA, 25 bp, Homo sapien
ttagactgaaggatagtccctgatg

SEQ ID NO: 438428 - DNA, 25 bp, Homo sapien
gatagtccctgatgtgtttatttgg

SEQ ID NO: 438429 - DNA, 25 bp, Homo sapien
ctgatgtgtttatttgggcttgtga

SEQ ID NO: 438430 - DNA, 25 bp, Homo sapien
agccagcagcaggttttcagatatt

SEQ ID NO: 438431 - DNA, 25 bp, Homo sapien
cactaggagactgagcctttttctg

SEQ ID NO: 438432 - DNA, 25 bp, Homo sapien
ggagaaagaaacagccgcataatgt

SEQ ID NO: 438433 - DNA, 25 bp, Homo sapien
aatgtggatttgctgtgctgcggtc

SEQ ID NO: 438434 - DNA, 25 bp, Homo sapien
gaagccatgcagcaagttgtgtccc

SEQ ID NO: 438435 - DNA, 25 bp, Homo sapien
cagggcattccccagcgtggactgc

SEQ ID NO: 438436 - DNA, 25 bp, Homo sapien
cttctccgaggacgcgagggtctca

SEQ ID NO: 438437 - DNA, 25 bp, Homo sapien
cctcaaacacccagcgtgggctgct

SEQ ID NO: 438438 - DNA, 25 bp, Homo sapien
tgcccgccgggcctaggctggaacc

SEQ ID NO: 438439 - DNA, 25 bp, Homo sapien
tcatcaacacccctacgaggctgag

SEQ ID NO: 438440 - DNA, 25 bp, Homo sapien
gtaaagggaggaataagcagtcatc

SEQ ID NO: 438441 - DNA, 25 bp, Homo sapien
gttgtgaaatatcctgctgggctag

SEQ ID NO: 438442 - DNA, 25 bp, Homo sapien
tcaaggagtcgagcaaaagaggcaa

SEQ ID NO: 438443 - DNA, 25 bp, Homo sapien
tgcaatgatggtttacattctgagc

SEQ ID NO: 438444 - DNA, 25 bp, Homo sapien
ctttgcaatgatggtttacattctg

SEQ ID NO: 438445 - DNA, 25 bp, Homo sapien
tcagtctttgcaatgatggtttaca

SEQ ID NO: 438446 - DNA, 25 bp, Homo sapien
gtctttgcaatgatggtttacattc

SEQ ID NO: 438447 - DNA, 25 bp, Homo sapien
agaacgagagggcccgataacaaag

SEQ ID NO: 438448 - DNA, 25 bp, Homo sapien
ggaagaacgagagggcccgataaca

SEQ ID NO: 438449 - DNA, 25 bp, Homo sapien
cgagagggcccgataacaaagacat

SEQ ID NO: 438450 - DNA, 25 bp, Homo sapien
acgagagggcccgataacaaagaca

SEQ ID NO: 438451 - DNA, 25 bp, Homo sapien
catggtccattgactaattagcggg

SEQ ID NO: 438452 - DNA, 25 bp, Homo sapien
agttgtatttagagggtaacaacag

SEQ ID NO: 438453 - DNA, 25 bp, Homo sapien
tctcaagtcttgaagctcccagcca

SEQ ID NO: 438454 - DNA, 25 bp, Homo sapien
tcagagtccttgtatcatggtccat

SEQ ID NO: 438455 - DNA, 25 bp, Homo sapien
tactgacttcatcaggttcgacact

SEQ ID NO: 438456 - DNA, 25 bp, Homo sapien
tgtttgcaagggcaacataccatgg

SEQ ID NO: 438457 - DNA, 25 bp, Homo sapien
tggaggtgccaacctgggaagaatt

SEQ ID NO: 438458 - DNA, 25 bp, Homo sapien
tcaaagcagtgggtaaaatggtccc

SEQ ID NO: 438459 - DNA, 25 bp, Homo sapien
tcagatggccacatatggtgagaac

SEQ ID NO: 438460 - DNA, 25 bp, Homo sapien
ggccacatatggtgagaacctcatg

SEQ ID NO: 438461 - DNA, 25 bp, Homo sapien
catatggtgagaacctcatggtgtg

SEQ ID NO: 438462 - DNA, 25 bp, Homo sapien
gtccaagatcagatggccacatatg

SEQ ID NO: 438463 - DNA, 25 bp, Homo sapien
cagtccatgtaagtgtcaagcccct

SEQ ID NO: 438464 - DNA, 25 bp, Homo sapien
ttatgtaagtaagggaagcccacga

SEQ ID NO: 438465 - DNA, 25 bp, Homo sapien
gattatccccatgggaacctagtgg

SEQ ID NO: 438466 - DNA, 25 bp, Homo sapien
gtgaacgagttagtgcccaagccct

SEQ ID NO: 438467 - DNA, 25 bp, Homo sapien
ctgggctaggaggacttgaagatca

SEQ ID NO: 438468 - DNA, 25 bp, Homo sapien
cagatgtgctgattgcggtgcctag

SEQ ID NO: 438469 - DNA, 25 bp, Homo sapien
ctcatggtctggtggtctcggcttg

SEQ ID NO: 438470 - DNA, 25 bp, Homo sapien
tctcggcttggatgaacttcttaca

SEQ ID NO: 438471 - DNA, 25 bp, Homo sapien
ctatgaaacagggtggtgtgttctt

SEQ ID NO: 438472 - DNA, 25 bp, Homo sapien
atgaaacagggtggtgtgttcttgc

SEQ ID NO: 438473 - DNA, 25 bp, Homo sapien
ttctatgaaacagggtggtgtgttc

SEQ ID NO: 438474 - DNA, 25 bp, Homo sapien
cttctatgaaacagggtggtgtgtt

SEQ ID NO: 438475 - DNA, 25 bp, Homo sapien
gctcggaggacaggcgacgcgcggg

SEQ ID NO: 438476 - DNA, 25 bp, Homo sapien
tgaggagaggagaagctcgcggcgc

SEQ ID NO: 438477 - DNA, 25 bp, Homo sapien
cggggaagggaagcggcggcgctcg

SEQ ID NO: 438478 - DNA, 25 bp, Homo sapien
gccgcggctgtcagcgactggctcg

SEQ ID NO: 438479 - DNA, 25 bp, Homo sapien
gcacccttgcgcctgggacccgagg

SEQ ID NO: 438480 - DNA, 25 bp, Homo sapien
ctcacccgagcggagaccagcgcag

SEQ ID NO: 438481 - DNA, 25 bp, Homo sapien
ggcccgagacgcgtcacgcgcccgc

SEQ ID NO: 438482 - DNA, 25 bp, Homo sapien
aaagcgaagccaagccgcctcaccc

SEQ ID NO: 438483 - DNA, 25 bp, Homo sapien
ccgaggctggttgttccttggagcc

SEQ ID NO: 438484 - DNA, 25 bp, Homo sapien
gaccggtgacccaagggtcgtcatc

SEQ ID NO: 438485 - DNA, 25 bp, Homo sapien
aatgaaacgtgaaggcgcctgccgc

SEQ ID NO: 438486 - DNA, 25 bp, Homo sapien
acgtgaaggcgcctgccgcacaggt

SEQ ID NO: 438487 - DNA, 25 bp, Homo sapien
taagatcaccgacaatttcaatgaa

SEQ ID NO: 438488 - DNA, 25 bp, Homo sapien
tctaagtagcaaatataacaatctc

SEQ ID NO: 438489 - DNA, 25 bp, Homo sapien
tttttcacatatgcgttcacgttag

SEQ ID NO: 438490 - DNA, 25 bp, Homo sapien
tttttaaacgcccttagtgagagca

SEQ ID NO: 438491 - DNA, 25 bp, Homo sapien
tgatgcaatgaggtgtcagtcacac

SEQ ID NO: 438492 - DNA, 25 bp, Homo sapien
taaactagatttgtgcctccaggaa

SEQ ID NO: 438493 - DNA, 25 bp, Homo sapien
cacccgagtggcctctggatcaaga

SEQ ID NO: 438494 - DNA, 25 bp, Homo sapien
tcagtcacacagatgcacccgagtg

SEQ ID NO: 438495 - DNA, 25 bp, Homo sapien
gatatagttgccttggaagaagaaa

SEQ ID NO: 438496 - DNA, 25 bp, Homo sapien
ttcacagtggatatagttgccttgg

SEQ ID NO: 438497 - DNA, 25 bp, Homo sapien
cagtggatatagttgccttggaaga

SEQ ID NO: 438498 - DNA, 25 bp, Homo sapien
agcagttcacagtggatatagttgc

SEQ ID NO: 438499 - DNA, 25 bp, Homo sapien
cccattaatgtggtgaacaataatc

SEQ ID NO: 438500 - DNA, 25 bp, Homo sapien
aatacatgagctcaacagggtggta

SEQ ID NO: 438501 - DNA, 25 bp, Homo sapien
cctgaaaataagtagtaggcaagct

SEQ ID NO: 438502 - DNA, 25 bp, Homo sapien
aaactcagtgagtccctaaatcagc

SEQ ID NO: 438503 - DNA, 25 bp, Homo sapien
tgttcctagacagagcgcttgaccc

SEQ ID NO: 438504 - DNA, 25 bp, Homo sapien
gctgggccccatgtaacctggttca

SEQ ID NO: 438505 - DNA, 25 bp, Homo sapien
gctcttagagacacctgaacaggcg

SEQ ID NO: 438506 - DNA, 25 bp, Homo sapien
tgttctccacgggagtgcaggctcc

SEQ ID NO: 438507 - DNA, 25 bp, Homo sapien
cgggtatcggctgcccccagtgttc

SEQ ID NO: 438508 - DNA, 25 bp, Homo sapien
aggcttcgggcgcttcttgcagagg

SEQ ID NO: 438509 - DNA, 25 bp, Homo sapien
gttccatcctccaggcttcgggcgc

SEQ ID NO: 438510 - DNA, 25 bp, Homo sapien
tgaggtgggtagcggttgcctccag

SEQ ID NO: 438511 - DNA, 25 bp, Homo sapien
gactgtgggtgccacctccttgacc

SEQ ID NO: 438512 - DNA, 25 bp, Homo sapien
tttttggcttactcggcttgttcca

SEQ ID NO: 438513 - DNA, 25 bp, Homo sapien
cttactcggcttgttccactgactg

SEQ ID NO: 438514 - DNA, 25 bp, Homo sapien
ttccactgactgtgggtgccacctc

SEQ ID NO: 438515 - DNA, 25 bp, Homo sapien
gctgtactcatccatgggcctgtag

SEQ ID NO: 438516 - DNA, 25 bp, Homo sapien
gacgcagtcgtgcacaaagttgttc

SEQ ID NO: 438517 - DNA, 25 bp, Homo sapien
tcactgccgaaatgtatgatgggcc

SEQ ID NO: 438518 - DNA, 25 bp, Homo sapien
taacgtcggtctcggtgaagttctc

SEQ ID NO: 438519 - DNA, 25 bp, Homo sapien
catgctcgatcctctctggtaatag

SEQ ID NO: 438520 - DNA, 25 bp, Homo sapien
ataggcctgagattccctctcgtac

SEQ ID NO: 438521 - DNA, 25 bp, Homo sapien
gctcgatcctctctggtaataggcc

SEQ ID NO: 438522 - DNA, 25 bp, Homo sapien
gatcctctctggtaataggcctgag

SEQ ID NO: 438523 - DNA, 25 bp, Homo sapien
tgattagcctatccgggacaaagag

SEQ ID NO: 438524 - DNA, 25 bp, Homo sapien
tgagacaccaccactaaaagggctg

SEQ ID NO: 438525 - DNA, 25 bp, Homo sapien
catctaaaatgggaggttgcctcca

SEQ ID NO: 438526 - DNA, 25 bp, Homo sapien
tactggcctggcattagcaacggct

SEQ ID NO: 438527 - DNA, 25 bp, Homo sapien
atcttcgctcgtttaatttcagtca

SEQ ID NO: 438528 - DNA, 25 bp, Homo sapien
cttcgctcgtttaatttcagtcaga

SEQ ID NO: 438529 - DNA, 25 bp, Homo sapien
catcttcgctcgtttaatttcagtc

SEQ ID NO: 438530 - DNA, 25 bp, Homo sapien
tcttcgctcgtttaatttcagtcag

SEQ ID NO: 438531 - DNA, 25 bp, Homo sapien
tattagttcaccaaaggtccagagg

SEQ ID NO: 438532 - DNA, 25 bp, Homo sapien
cgggtgcatgaagccacttcccaga

SEQ ID NO: 438533 - DNA, 25 bp, Homo sapien
tcccagaccctgagcatttattagt

SEQ ID NO: 438534 - DNA, 25 bp, Homo sapien
ccctgagcatttattagttcaccaa

SEQ ID NO: 438535 - DNA, 25 bp, Homo sapien
gacatgaaccaatgcctctcttcca

SEQ ID NO: 438536 - DNA, 25 bp, Homo sapien
tgaagggttgactgagtgttctctc

SEQ ID NO: 438537 - DNA, 25 bp, Homo sapien
ttccaactggacatgaaccaatgcc

SEQ ID NO: 438538 - DNA, 25 bp, Homo sapien
caactggacatgaaccaatgcctct

SEQ ID NO: 438539 - DNA, 25 bp, Homo sapien
ttctatccagcttagctttgtggtc

SEQ ID NO: 438540 - DNA, 25 bp, Homo sapien
ccctgcaagcttttctatccagctt

SEQ ID NO: 438541 - DNA, 25 bp, Homo sapien
catttcctcaaccacacgttctcct

SEQ ID NO: 438542 - DNA, 25 bp, Homo sapien
agggtgtccccatggatgtctttta

SEQ ID NO: 438543 - DNA, 25 bp, Homo sapien
catcgcagttggttggaatacacaa

SEQ ID NO: 438544 - DNA, 25 bp, Homo sapien
tatcccttgttgatcggtgacggtc

SEQ ID NO: 438545 - DNA, 25 bp, Homo sapien
gttgttgcggttgtcttttaaatca

SEQ ID NO: 438546 - DNA, 25 bp, Homo sapien
aattttacagggataagggagacag

SEQ ID NO: 438547 - DNA, 25 bp, Homo sapien
aagagggcaagcgttcacctggacc

SEQ ID NO: 438548 - DNA, 25 bp, Homo sapien
tagtgtcctgtacctaaaggccggc

SEQ ID NO: 438549 - DNA, 25 bp, Homo sapien
ggaggttcagctcaaaaagagggca

SEQ ID NO: 438550 - DNA, 25 bp, Homo sapien
caagcctcgctggacatgcatagtg

SEQ ID NO: 438551 - DNA, 25 bp, Homo sapien
ggctctctctggagtgtgcctctgg

SEQ ID NO: 438552 - DNA, 25 bp, Homo sapien
ctctctggagtgtgcctctggagcc

SEQ ID NO: 438553 - DNA, 25 bp, Homo sapien
tggagcctcgagctgcacagtcccc

SEQ ID NO: 438554 - DNA, 25 bp, Homo sapien
cctctggagcctcgagctgcacagt

SEQ ID NO: 438555 - DNA, 25 bp, Homo sapien
ccagagaaacggcggtgggtcagct

SEQ ID NO: 438556 - DNA, 25 bp, Homo sapien
tgccagagaaacggcggtgggtcag

SEQ ID NO: 438557 - DNA, 25 bp, Homo sapien
ctgccagagaaacggcggtgggtca

SEQ ID NO: 438558 - DNA, 25 bp, Homo sapien
gccagagaaacggcggtgggtcagc

SEQ ID NO: 438559 - DNA, 25 bp, Homo sapien
ctgaagagcagcatgcagacagtgg

SEQ ID NO: 438560 - DNA, 25 bp, Homo sapien
aagagcagcatgcagacagtggcca

SEQ ID NO: 438561 - DNA, 25 bp, Homo sapien
caccaccagctcaggtgcttcctca

SEQ ID NO: 438562 - DNA, 25 bp, Homo sapien
gcagcatgcagacagtggccagcca

SEQ ID NO: 438563 - DNA, 25 bp, Homo sapien
ttgatgcagccggtgacaaatgcct

SEQ ID NO: 438564 - DNA, 25 bp, Homo sapien
caaaactcgcaatgcttgagggagc

SEQ ID NO: 438565 - DNA, 25 bp, Homo sapien
tcaatgtcgagcttgcggccttgct

SEQ ID NO: 438566 - DNA, 25 bp, Homo sapien
tatttcaccgtgagccagatcaaag

SEQ ID NO: 438567 - DNA, 25 bp, Homo sapien
ggcaccttcagaacacgcgtgggtt

SEQ ID NO: 438568 - DNA, 25 bp, Homo sapien
tactaatctagtgtgccagacgctc

SEQ ID NO: 438569 - DNA, 25 bp, Homo sapien
cgcatacgtgagagcggcatttgca

SEQ ID NO: 438570 - DNA, 25 bp, Homo sapien
ggtcacttgccaggatttgctcgct

SEQ ID NO: 438571 - DNA, 25 bp, Homo sapien
ggagcgcctgtaggagcctcttaga

SEQ ID NO: 438572 - DNA, 25 bp, Homo sapien
taaaatagcctccatgtaccagtca

SEQ ID NO: 438573 - DNA, 25 bp, Homo sapien
gctaataaggtggtgtatcaactcc

SEQ ID NO: 438574 - DNA, 25 bp, Homo sapien
cctgctgtatatgtggtctgctctg

SEQ ID NO: 438575 - DNA, 25 bp, Homo sapien
tgatctagaattaacaggaccgtgg

SEQ ID NO: 438576 - DNA, 25 bp, Homo sapien
tgttcaggcacacacgcgttcgatt

SEQ ID NO: 438577 - DNA, 25 bp, Homo sapien
tctgagcacagttaaggtggagcct

SEQ ID NO: 438578 - DNA, 25 bp, Homo sapien
tggcctaagcgttttcacatcagaa

SEQ ID NO: 438579 - DNA, 25 bp, Homo sapien
agtggtgtctgagccagaaaaactg

SEQ ID NO: 438580 - DNA, 25 bp, Homo sapien
agagtggtgtctgagccagaaaaac

SEQ ID NO: 438581 - DNA, 25 bp, Homo sapien
tggtgtctgagccagaaaaactgaa

SEQ ID NO: 438582 - DNA, 25 bp, Homo sapien
ggtgtctgagccagaaaaactgaaa

SEQ ID NO: 438583 - DNA, 25 bp, Homo sapien
gtggaatctcggtcgcttccccgtg

SEQ ID NO: 438584 - DNA, 25 bp, Homo sapien
tgctccaaagtgaggctccctaaag

SEQ ID NO: 438585 - DNA, 25 bp, Homo sapien
ggcatgagggttgggctcctttttc

SEQ ID NO: 438586 - DNA, 25 bp, Homo sapien
tctcattttgcagggaatatctgag

SEQ ID NO: 438587 - DNA, 25 bp, Homo sapien
tcatccaatgccagaggagcacatt

SEQ ID NO: 438588 - DNA, 25 bp, Homo sapien
gcacattctccaccctctgtttggg

SEQ ID NO: 438589 - DNA, 25 bp, Homo sapien
ctctcatccaatgccagaggagcac

SEQ ID NO: 438590 - DNA, 25 bp, Homo sapien
ctaaggcctctcatccaatgccaga

SEQ ID NO: 438591 - DNA, 25 bp, Homo sapien
agctggcacacagaggcctgagaag

SEQ ID NO: 438592 - DNA, 25 bp, Homo sapien
tcatgctgcacaagctggcacacag

SEQ ID NO: 438593 - DNA, 25 bp, Homo sapien
aggaagaatcctgggggctccacat

SEQ ID NO: 438594 - DNA, 25 bp, Homo sapien
cctgagaagatgtcctggagtagga

SEQ ID NO: 438595 - DNA, 25 bp, Homo sapien
tactcaacaccaaaatgagctacag

SEQ ID NO: 438596 - DNA, 25 bp, Homo sapien
gtaatattggaactgagaccaagaa

SEQ ID NO: 438597 - DNA, 25 bp, Homo sapien
ggattattgcatcaagctcttagtg

SEQ ID NO: 438598 - DNA, 25 bp, Homo sapien
gatgctgaaattacctttcgagcca

SEQ ID NO: 438599 - DNA, 25 bp, Homo sapien
ctggattgggaagtggctgttgtag

SEQ ID NO: 438600 - DNA, 25 bp, Homo sapien
gccctggattgggaagtggctgttg

SEQ ID NO: 438601 - DNA, 25 bp, Homo sapien
cccagtcagggccatgttcatgggc

SEQ ID NO: 438602 - DNA, 25 bp, Homo sapien
tacgtgagcattgcaggctctgact

SEQ ID NO: 438603 - DNA, 25 bp, Homo sapien
ctgacccaacttccgtgggctcagg

SEQ ID NO: 438604 - DNA, 25 bp, Homo sapien
tcttttgcatttacgtgagcattgc

SEQ ID NO: 438605 - DNA, 25 bp, Homo sapien
ctgcccctgacccaacttccgtggg

SEQ ID NO: 438606 - DNA, 25 bp, Homo sapien
tctgttgaacataggcaactcaaac

SEQ ID NO: 438607 - DNA, 25 bp, Homo sapien
caggcacctctctgtcttgcttgct

SEQ ID NO: 438608 - DNA, 25 bp, Homo sapien
gatgtcacttagcttggcaggacag

SEQ ID NO: 438609 - DNA, 25 bp, Homo sapien
ctgtttgttgtctccccagaaagca

SEQ ID NO: 438610 - DNA, 25 bp, Homo sapien
ttgcttcattctcctctgagcacat

SEQ ID NO: 438611 - DNA, 25 bp, Homo sapien
tgagcacatggctgtcaactccaag

SEQ ID NO: 438612 - DNA, 25 bp, Homo sapien
gcttcattctcctctgagcacatgg

SEQ ID NO: 438613 - DNA, 25 bp, Homo sapien
cacatggctgtcaactccaaggtac

SEQ ID NO: 438614 - DNA, 25 bp, Homo sapien
ttcagtgtcttacagcggccaaacc

SEQ ID NO: 438615 - DNA, 25 bp, Homo sapien
aagagaaatttctacatgaacaagg

SEQ ID NO: 438616 - DNA, 25 bp, Homo sapien
gagaaatttctacatgaacaaggca

SEQ ID NO: 438617 - DNA, 25 bp, Homo sapien
tcttacagcggccaaaccatgacgt

SEQ ID NO: 438618 - DNA, 25 bp, Homo sapien
tgaactcttcgaccgatttgtggga

SEQ ID NO: 438619 - DNA, 25 bp, Homo sapien
caagggagcgatactaaggcagact

SEQ ID NO: 438620 - DNA, 25 bp, Homo sapien
ctcactggtatcacatggtcttgca

SEQ ID NO: 438621 - DNA, 25 bp, Homo sapien
cacgtcctaagaacctgatcagaaa

SEQ ID NO: 438622 - DNA, 25 bp, Homo sapien
tgccccactacaaggggtccgaagc

SEQ ID NO: 438623 - DNA, 25 bp, Homo sapien
actacaaggggtccgaagcgcagag

SEQ ID NO: 438624 - DNA, 25 bp, Homo sapien
ggtccgaagcgcagagggatcacta

SEQ ID NO: 438625 - DNA, 25 bp, Homo sapien
gaagcgcagagggatcactatctcc

SEQ ID NO: 438626 - DNA, 25 bp, Homo sapien
gctgtgggctggtagctggagccag

SEQ ID NO: 438627 - DNA, 25 bp, Homo sapien
gctggtagctggagccagcctgcac

SEQ ID NO: 438628 - DNA, 25 bp, Homo sapien
tggagccagcctgcacctgctactc

SEQ ID NO: 438629 - DNA, 25 bp, Homo sapien
gccagcctgcacctgctactcgcat

SEQ ID NO: 438630 - DNA, 25 bp, Homo sapien
ttcctcctgtgtcggtgggccaggc

SEQ ID NO: 438631 - DNA, 25 bp, Homo sapien
tgcctgtcagttaccaagcatcggg

SEQ ID NO: 438632 - DNA, 25 bp, Homo sapien
ccatcttccacagtcgcgtctggga

SEQ ID NO: 438633 - DNA, 25 bp, Homo sapien
gctgacatgcttgaagaaaccccag

SEQ ID NO: 438634 - DNA, 25 bp, Homo sapien
cttattaatcttaggtagtcgtccg

SEQ ID NO: 438635 - DNA, 25 bp, Homo sapien
tagagccgcctctgcgggccacgtg

SEQ ID NO: 438636 - DNA, 25 bp, Homo sapien
tcttaggtagtcgtccgggtgtaca

SEQ ID NO: 438637 - DNA, 25 bp, Homo sapien
tgtacagaggtttgatagagccgcc

SEQ ID NO: 438638 - DNA, 25 bp, Homo sapien
catacgtgagctgcttaggaatggc

SEQ ID NO: 438639 - DNA, 25 bp, Homo sapien
ctgagacatcccagttgctattggt

SEQ ID NO: 438640 - DNA, 25 bp, Homo sapien
gacatcccagttgctattggttttg

SEQ ID NO: 438641 - DNA, 25 bp, Homo sapien
ggcttcgtgtctgcgttccatacgt

SEQ ID NO: 438642 - DNA, 25 bp, Homo sapien
agggcctcaaatgatggctgagctt

SEQ ID NO: 438643 - DNA, 25 bp, Homo sapien
gagggcctcaaatgatggctgagct

SEQ ID NO: 438644 - DNA, 25 bp, Homo sapien
gcagtagttttggaaagagcgggtg

SEQ ID NO: 438645 - DNA, 25 bp, Homo sapien
agagggcctcaaatgatggctgagc

SEQ ID NO: 438646 - DNA, 25 bp, Homo sapien
ctaggctgtggcagtccagcaggcc

SEQ ID NO: 438647 - DNA, 25 bp, Homo sapien
taggctgtggcagtccagcaggcct

SEQ ID NO: 438648 - DNA, 25 bp, Homo sapien
ggctgtggcagtccagcaggcctca

SEQ ID NO: 438649 - DNA, 25 bp, Homo sapien
gctgtggcagtccagcaggcctcac

SEQ ID NO: 438650 - DNA, 25 bp, Homo sapien
ccttctttttgagcccgcgatggga

SEQ ID NO: 438651 - DNA, 25 bp, Homo sapien
cagtgataggagaagccaagcgcga

SEQ ID NO: 438652 - DNA, 25 bp, Homo sapien
ttctaggcggattccccagaggcag

SEQ ID NO: 438653 - DNA, 25 bp, Homo sapien
gaaagttgtggcttggagctagtcc

SEQ ID NO: 438654 - DNA, 25 bp, Homo sapien
tctacaaataaagctgatcagtggc

SEQ ID NO: 438655 - DNA, 25 bp, Homo sapien
cctttggtccgcagacactgcaggg

SEQ ID NO: 438656 - DNA, 25 bp, Homo sapien
cagctgcattttgggttcaacagac

SEQ ID NO: 438657 - DNA, 25 bp, Homo sapien
actctgagtagatagggaacctgca

SEQ ID NO: 438658 - DNA, 25 bp, Homo sapien
ctgttgcttcctgggccatgagcct

SEQ ID NO: 438659 - DNA, 25 bp, Homo sapien
gcctcttggtctggcctctggtggt

SEQ ID NO: 438660 - DNA, 25 bp, Homo sapien
gagcctcttggtctggcctctggtg

SEQ ID NO: 438661 - DNA, 25 bp, Homo sapien
tcttggtctggcctctggtggtaga

SEQ ID NO: 438662 - DNA, 25 bp, Homo sapien
gctcaaaccaagacaggccctgtta

SEQ ID NO: 438663 - DNA, 25 bp, Homo sapien
tgctcttgagggagctcaaaccaag

SEQ ID NO: 438664 - DNA, 25 bp, Homo sapien
aaagcctgtggctcacacaactcag

SEQ ID NO: 438665 - DNA, 25 bp, Homo sapien
caggtgggaactttggcattacatc

SEQ ID NO: 438666 - DNA, 25 bp, Homo sapien
caagtgaggctcgtgctcaggatca

SEQ ID NO: 438667 - DNA, 25 bp, Homo sapien
gcagttcaaggtctgggtgctccag

SEQ ID NO: 438668 - DNA, 25 bp, Homo sapien
tactgctgacgcctgcagcgtgtgc

SEQ ID NO: 438669 - DNA, 25 bp, Homo sapien
ggaccctcccttgaaagcagaatgc

SEQ ID NO: 438670 - DNA, 25 bp, Homo sapien
tatcagctggctatttgggctagac

SEQ ID NO: 438671 - DNA, 25 bp, Homo sapien
gtgtctgctcaataccctggtcgcg

SEQ ID NO: 438672 - DNA, 25 bp, Homo sapien
ttaattaagatagtcctgccccatg

SEQ ID NO: 438673 - DNA, 25 bp, Homo sapien
gaggtacctcgcacaagctcataag

SEQ ID NO: 438674 - DNA, 25 bp, Homo sapien
gtttcgcaaccataattccaatagt

SEQ ID NO: 438675 - DNA, 25 bp, Homo sapien
tgtaatcccgaaacataaatgtatt

SEQ ID NO: 438676 - DNA, 25 bp, Homo sapien
gagaaaatcaagatacttaacgcat

SEQ ID NO: 438677 - DNA, 25 bp, Homo sapien
ttaacgcattcttaccttcattggg

SEQ ID NO: 438678 - DNA, 25 bp, Homo sapien
tccaagacagtcaagcattttacag

SEQ ID NO: 438679 - DNA, 25 bp, Homo sapien
gaagcagatgctacctctggccaac

SEQ ID NO: 438680 - DNA, 25 bp, Homo sapien
tactgttccgtagggacactgtgag

SEQ ID NO: 438681 - DNA, 25 bp, Homo sapien
tagagggttcttgtataacttcaca

SEQ ID NO: 438682 - DNA, 25 bp, Homo sapien
ttcccaccttctcgccagggtctca

SEQ ID NO: 438683 - DNA, 25 bp, Homo sapien
tctcatctctgtttcggtggtggtg

SEQ ID NO: 438684 - DNA, 25 bp, Homo sapien
gtggtggtgggctgatggaacatgg

SEQ ID NO: 438685 - DNA, 25 bp, Homo sapien
cattcccaccttctcgccagggtct

SEQ ID NO: 438686 - DNA, 25 bp, Homo sapien
tcctgttctctatccccctggccca

SEQ ID NO: 438687 - DNA, 25 bp, Homo sapien
tgactgtgcattcagattcctgttc

SEQ ID NO: 438688 - DNA, 25 bp, Homo sapien
ccacagtatggtgcctaggggttgg

SEQ ID NO: 438689 - DNA, 25 bp, Homo sapien
catggggccacagtatggtgcctag

SEQ ID NO: 438690 - DNA, 25 bp, Homo sapien
cccatggccatggttcgtattctca

SEQ ID NO: 438691 - DNA, 25 bp, Homo sapien
ccatggccatggttcgtattctcat

SEQ ID NO: 438692 - DNA, 25 bp, Homo sapien
cccacgttgccatcttactgacagt

SEQ ID NO: 438693 - DNA, 25 bp, Homo sapien
cagacattcccgtcctttctggttg

SEQ ID NO: 438694 - DNA, 25 bp, Homo sapien
gcattgctgtgcgtgtttccaggca

SEQ ID NO: 438695 - DNA, 25 bp, Homo sapien
tgacaccttaatacatttctgactg

SEQ ID NO: 438696 - DNA, 25 bp, Homo sapien
gcctgttgtactctgtcccctcatg

SEQ ID NO: 438697 - DNA, 25 bp, Homo sapien
tgactttttagacacagggactagg

SEQ ID NO: 438698 - DNA, 25 bp, Homo sapien
cagtcagaacccgagtagtgcaaga

SEQ ID NO: 438699 - DNA, 25 bp, Homo sapien
agagcccagggacttaacgtgctgc

SEQ ID NO: 438700 - DNA, 25 bp, Homo sapien
tacactcgctataggcataggcccg

SEQ ID NO: 438701 - DNA, 25 bp, Homo sapien
taatacggatgccatgggagtggcc

SEQ ID NO: 438702 - DNA, 25 bp, Homo sapien
tcgcaaagctcgcttctccagggag

SEQ ID NO: 438703 - DNA, 25 bp, Homo sapien
tccgggcctgagcattcgcaaagct

SEQ ID NO: 438704 - DNA, 25 bp, Homo sapien
tacggacaggaggtgatgccatatt

SEQ ID NO: 438705 - DNA, 25 bp, Homo sapien
acagccttgagtgattggagtcccc

SEQ ID NO: 438706 - DNA, 25 bp, Homo sapien
gaatgtccttgcaggccggttagtc

SEQ ID NO: 438707 - DNA, 25 bp, Homo sapien
catggtaacaaattcgcacagaggt

SEQ ID NO: 438708 - DNA, 25 bp, Homo sapien
cacatcttcggtggccgttggcctg

SEQ ID NO: 438709 - DNA, 25 bp, Homo sapien
gttgccatgtcgcacgtccgttaga

SEQ ID NO: 438710 - DNA, 25 bp, Homo sapien
tgtctccagcggcagggcatggttc

SEQ ID NO: 438711 - DNA, 25 bp, Homo sapien
cgttggcctggtcgagctttggtca

SEQ ID NO: 438712 - DNA, 25 bp, Homo sapien
caaaactgactactggaccggagcc

SEQ ID NO: 438713 - DNA, 25 bp, Homo sapien
ttttgaaggccagtaaccattgttg

SEQ ID NO: 438714 - DNA, 25 bp, Homo sapien
gaccggagcccagaaaccatgggtc

SEQ ID NO: 438715 - DNA, 25 bp, Homo sapien
ttccatgtgaccctctttccttgca

SEQ ID NO: 438716 - DNA, 25 bp, Homo sapien
tcatttcactagtggccgagacacc

SEQ ID NO: 438717 - DNA, 25 bp, Homo sapien
agtcacacaagctgatgggcgtctt

SEQ ID NO: 438718 - DNA, 25 bp, Homo sapien
ccggtgtgatgagtatagagtgcca

SEQ ID NO: 438719 - DNA, 25 bp, Homo sapien
gcatttatcactgttggccggtgtg

SEQ ID NO: 438720 - DNA, 25 bp, Homo sapien
ttgtcgctgatctcccggaggagga

SEQ ID NO: 438721 - DNA, 25 bp, Homo sapien
acctgaaaacagtggcgtggctccc

SEQ ID NO: 438722 - DNA, 25 bp, Homo sapien
aggaggaggctgttgacctgaaaac

SEQ ID NO: 438723 - DNA, 25 bp, Homo sapien
tgttgtcgctgatctcccggaggag

SEQ ID NO: 438724 - DNA, 25 bp, Homo sapien
tcttgcagcgttcagaatgactttg

SEQ ID NO: 438725 - DNA, 25 bp, Homo sapien
tctgacttagcaactgtcccaggca

SEQ ID NO: 438726 - DNA, 25 bp, Homo sapien
tcagtcctcattatggccgccttca

SEQ ID NO: 438727 - DNA, 25 bp, Homo sapien
gcctctctaggagcattcatggttg

SEQ ID NO: 438728 - DNA, 25 bp, Homo sapien
gacacttgcatgtccttcgtctggg

SEQ ID NO: 438729 - DNA, 25 bp, Homo sapien
tacactacggaaaacggcattgcag

SEQ ID NO: 438730 - DNA, 25 bp, Homo sapien
aaatgtggttcacgctgaaacagcc

SEQ ID NO: 438731 - DNA, 25 bp, Homo sapien
ggatccggatccctttcagacactt

SEQ ID NO: 438732 - DNA, 25 bp, Homo sapien
gttcccctgctggagccgaggctgc

SEQ ID NO: 438733 - DNA, 25 bp, Homo sapien
ccgaggctgcctggcttagggcttc

SEQ ID NO: 438734 - DNA, 25 bp, Homo sapien
cagcaggtcccagtgtcagccccat

SEQ ID NO: 438735 - DNA, 25 bp, Homo sapien
cttgttcccctgctggagccgaggc

SEQ ID NO: 438736 - DNA, 25 bp, Homo sapien
tcctcacatttgcagggcagcttgg

SEQ ID NO: 438737 - DNA, 25 bp, Homo sapien
agagttcctcaaacagcaagttctg

SEQ ID NO: 438738 - DNA, 25 bp, Homo sapien
tattgcagtcctgtcctcacatttg

SEQ ID NO: 438739 - DNA, 25 bp, Homo sapien
tattgaatgaagtgtcccatgaaga

SEQ ID NO: 438740 - DNA, 25 bp, Homo sapien
tggcatttatacacaccacgctcat

SEQ ID NO: 438741 - DNA, 25 bp, Homo sapien
ttgcattttgccgctggaccttggc

SEQ ID NO: 438742 - DNA, 25 bp, Homo sapien
tatctgttgcattttgccgctggac

SEQ ID NO: 438743 - DNA, 25 bp, Homo sapien
ctgttgcattttgccgctggacctt

SEQ ID NO: 438744 - DNA, 25 bp, Homo sapien
tctggcccactggtgaggacctgag

SEQ ID NO: 438745 - DNA, 25 bp, Homo sapien
aatttcccacgtttatccagtggca

SEQ ID NO: 438746 - DNA, 25 bp, Homo sapien
ttatccagtggcatcgcatcctctc

SEQ ID NO: 438747 - DNA, 25 bp, Homo sapien
cccatggatgtttcaggaaaatttc

SEQ ID NO: 438748 - DNA, 25 bp, Homo sapien
caatagactatccagcctgccatgg

SEQ ID NO: 438749 - DNA, 25 bp, Homo sapien
gcagcatgggtggacttattcatct

SEQ ID NO: 438750 - DNA, 25 bp, Homo sapien
taaggaaaccataatagaggcatgc

SEQ ID NO: 438751 - DNA, 25 bp, Homo sapien
tggagaaacctgctacagattgatg

SEQ ID NO: 438752 - DNA, 25 bp, Homo sapien
aaaattaatctcccttttcactgag

SEQ ID NO: 438753 - DNA, 25 bp, Homo sapien
taaaattaatctcccttttcactga

SEQ ID NO: 438754 - DNA, 25 bp, Homo sapien
gaactcctaccttgagatctgaaat

SEQ ID NO: 438755 - DNA, 25 bp, Homo sapien
acaattgtctttgggccctgattgg

SEQ ID NO: 438756 - DNA, 25 bp, Homo sapien
tgatgaactcctaccttgagatctg

SEQ ID NO: 438757 - DNA, 25 bp, Homo sapien
ctaccttgagatctgaaattttttg

SEQ ID NO: 438758 - DNA, 25 bp, Homo sapien
gatggtcgatgcctcttctgcctgg

SEQ ID NO: 438759 - DNA, 25 bp, Homo sapien
gtcccttgctgatggtcgatgcctc

SEQ ID NO: 438760 - DNA, 25 bp, Homo sapien
ccttgctgatggtcgatgcctcttc

SEQ ID NO: 438761 - DNA, 25 bp, Homo sapien
tgctgatggtcgatgcctcttctgc

SEQ ID NO: 438762 - DNA, 25 bp, Homo sapien
ctgtctttatctcagggactcccat

SEQ ID NO: 438763 - DNA, 25 bp, Homo sapien
gcttttctccaggaattgtcctggt

SEQ ID NO: 438764 - DNA, 25 bp, Homo sapien
tctgtctttatctcagggactccca

SEQ ID NO: 438765 - DNA, 25 bp, Homo sapien
tactttaaagagaggggaatcacga

SEQ ID NO: 438766 - DNA, 25 bp, Homo sapien
atcgcacccaacctatacggtactt

SEQ ID NO: 438767 - DNA, 25 bp, Homo sapien
cacgagttagtgctcatgtatggga

SEQ ID NO: 438768 - DNA, 25 bp, Homo sapien
ctttctgaagtatcttattctaggg

SEQ ID NO: 438769 - DNA, 25 bp, Homo sapien
tcattggtcctggtgctccagctct

SEQ ID NO: 438770 - DNA, 25 bp, Homo sapien
ctccagctctgtggtgctctctggc

SEQ ID NO: 438771 - DNA, 25 bp, Homo sapien
cttcctcttgcctccccagtccttt

SEQ ID NO: 438772 - DNA, 25 bp, Homo sapien
ctggcttcctcttgcctccccagtc

SEQ ID NO: 438773 - DNA, 25 bp, Homo sapien
gaagagcgcttaccttttgaccaca

SEQ ID NO: 438774 - DNA, 25 bp, Homo sapien
tggttaccaggaaactctagccctc

SEQ ID NO: 438775 - DNA, 25 bp, Homo sapien
taagttactcaggtgccatcagcaa

SEQ ID NO: 438776 - DNA, 25 bp, Homo sapien
taggtttaccgagtatgaagagcgc

SEQ ID NO: 438777 - DNA, 25 bp, Homo sapien
ttgtcattaataacatacaggtgat

SEQ ID NO: 438778 - DNA, 25 bp, Homo sapien
gtgattgttgagtgcctggctttca

SEQ ID NO: 438779 - DNA, 25 bp, Homo sapien
tgagtgcctggctttcatagctgag

SEQ ID NO: 438780 - DNA, 25 bp, Homo sapien
catacaggtgattgttgagtgcctg

SEQ ID NO: 438781 - DNA, 25 bp, Homo sapien
cgtagccttgcgtgcaaaggacagt

SEQ ID NO: 438782 - DNA, 25 bp, Homo sapien
cttgcgtgcaaaggacagttttcat

SEQ ID NO: 438783 - DNA, 25 bp, Homo sapien
cagccccgtagccttgcgtgcaaag

SEQ ID NO: 438784 - DNA, 25 bp, Homo sapien
gatctcagccccgtagccttgcgtg

SEQ ID NO: 438785 - DNA, 25 bp, Homo sapien
tacagtagacttcaccagaaggggc

SEQ ID NO: 438786 - DNA, 25 bp, Homo sapien
gctccacatgtgatctacagtagac

SEQ ID NO: 438787 - DNA, 25 bp, Homo sapien
tagtgggagtaggaagctcctctga

SEQ ID NO: 438788 - DNA, 25 bp, Homo sapien
atggtacacccttccctgcggagct

SEQ ID NO: 438789 - DNA, 25 bp, Homo sapien
tttagccccggctgttggattgtgc

SEQ ID NO: 438790 - DNA, 25 bp, Homo sapien
tagccccggctgttggattgtgcag

SEQ ID NO: 438791 - DNA, 25 bp, Homo sapien
gcagctgctcgcatcttctgtgtca

SEQ ID NO: 438792 - DNA, 25 bp, Homo sapien
gccccggctgttggattgtgcagct

SEQ ID NO: 438793 - DNA, 25 bp, Homo sapien
cctgggacccattcaagaccctgag

SEQ ID NO: 438794 - DNA, 25 bp, Homo sapien
gggaacaagcccagccgcggtagct

SEQ ID NO: 438795 - DNA, 25 bp, Homo sapien
gacccattcaagaccctgagccttt

SEQ ID NO: 438796 - DNA, 25 bp, Homo sapien
gtttgaaacagggaacaagcccagc

SEQ ID NO: 438797 - DNA, 25 bp, Homo sapien
cattttgtcagtggtgtctagctca

SEQ ID NO: 438798 - DNA, 25 bp, Homo sapien
ggcacaaaggactcgaattccaagt

SEQ ID NO: 438799 - DNA, 25 bp, Homo sapien
ggctcaaaaaccaattgtgggctca

SEQ ID NO: 438800 - DNA, 25 bp, Homo sapien
gcctgccaggtagcacatgaccaat

SEQ ID NO: 438801 - DNA, 25 bp, Homo sapien
gaaaatctgtaggagcacactgcaa

SEQ ID NO: 438802 - DNA, 25 bp, Homo sapien
acactgcaaaggtgccgggagagca

SEQ ID NO: 438803 - DNA, 25 bp, Homo sapien
tctgtaggagcacactgcaaaggtg

SEQ ID NO: 438804 - DNA, 25 bp, Homo sapien
taggagcacactgcaaaggtgccgg

SEQ ID NO: 438805 - DNA, 25 bp, Homo sapien
tcaaattcctgtggtttggacacag

SEQ ID NO: 438806 - DNA, 25 bp, Homo sapien
gtttcaaattcctgtggtttggaca

SEQ ID NO: 438807 - DNA, 25 bp, Homo sapien
ttcaaattcctgtggtttggacaca

SEQ ID NO: 438808 - DNA, 25 bp, Homo sapien
aaattcctgtggtttggacacaggg

SEQ ID NO: 438809 - DNA, 25 bp, Homo sapien
cagggtaggagacatcaacactgcc

SEQ ID NO: 438810 - DNA, 25 bp, Homo sapien
gcctgtgatccgacagagaactgaa

SEQ ID NO: 438811 - DNA, 25 bp, Homo sapien
tcgaatatgcaagctagagcctgtg

SEQ ID NO: 438812 - DNA, 25 bp, Homo sapien
tcaacactgccccagcaaatcgaat

SEQ ID NO: 438813 - DNA, 25 bp, Homo sapien
ccacaggtagactcttgggtgagga

SEQ ID NO: 438814 - DNA, 25 bp, Homo sapien
ctccccacaggtagactcttgggtg

SEQ ID NO: 438815 - DNA, 25 bp, Homo sapien
ccccacaggtagactcttgggtgag

SEQ ID NO: 438816 - DNA, 25 bp, Homo sapien
acaggtagactcttgggtgaggaat

SEQ ID NO: 438817 - DNA, 25 bp, Homo sapien
agcatgccaaaaccgggaacttgtg

SEQ ID NO: 438818 - DNA, 25 bp, Homo sapien
ccatgacttagcaaagctgtgaggt

SEQ ID NO: 438819 - DNA, 25 bp, Homo sapien
tgcgggtagaatacagccagcatgg

SEQ ID NO: 438820 - DNA, 25 bp, Homo sapien
ccaatatgggtgtgcgggtagaata

SEQ ID NO: 438821 - DNA, 25 bp, Homo sapien
ccagctggcagagaagcccaaggcc

SEQ ID NO: 438822 - DNA, 25 bp, Homo sapien
tggcagagaagcccaaggccaggcc

SEQ ID NO: 438823 - DNA, 25 bp, Homo sapien
agctggcagagaagcccaaggccag

SEQ ID NO: 438824 - DNA, 25 bp, Homo sapien
cctgaccagctggcagagaagccca

SEQ ID NO: 438825 - DNA, 25 bp, Homo sapien
ttaaacaggggcttggatgtatgtg

SEQ ID NO: 438826 - DNA, 25 bp, Homo sapien
gcttggatgtatgtggattggcagc

SEQ ID NO: 438827 - DNA, 25 bp, Homo sapien
aggggcttggatgtatgtggattgg

SEQ ID NO: 438828 - DNA, 25 bp, Homo sapien
gggcttggatgtatgtggattggca

SEQ ID NO: 438829 - DNA, 25 bp, Homo sapien
tgagtattgagtaccctcggacaac

SEQ ID NO: 438830 - DNA, 25 bp, Homo sapien
gacatgatcagctgactcttgagta

SEQ ID NO: 438831 - DNA, 25 bp, Homo sapien
cggacaactactccattgccattca

SEQ ID NO: 438832 - DNA, 25 bp, Homo sapien
tggtgcatctaaggacatgatcagc

SEQ ID NO: 438833 - DNA, 25 bp, Homo sapien
gcccggccaaatctatgtaccctta

SEQ ID NO: 438834 - DNA, 25 bp, Homo sapien
taattagaatcaaaggtatccgcac

SEQ ID NO: 438835 - DNA, 25 bp, Homo sapien
gatgctgagctgaggcattcgctaa

SEQ ID NO: 438836 - DNA, 25 bp, Homo sapien
ttaggccccatatagcccagtgatg

SEQ ID NO: 438837 - DNA, 25 bp, Homo sapien
tgtgacgttcaggagagtctttctg

SEQ ID NO: 438838 - DNA, 25 bp, Homo sapien
ctctctcattgtctttgtgtgcccc

SEQ ID NO: 438839 - DNA, 25 bp, Homo sapien
ttgtctttgtgtgccccaccttcag

SEQ ID NO: 438840 - DNA, 25 bp, Homo sapien
tctttcccacacctgtgacgttcag

SEQ ID NO: 438841 - DNA, 25 bp, Homo sapien
ctcctcgtcataatgagagtgttcc

SEQ ID NO: 438842 - DNA, 25 bp, Homo sapien
ctcgtcataatgagagtgttcccct

SEQ ID NO: 438843 - DNA, 25 bp, Homo sapien
ttactcctcgtcataatgagagtgt

SEQ ID NO: 438844 - DNA, 25 bp, Homo sapien
cgtcataatgagagtgttccccttt

SEQ ID NO: 438845 - DNA, 25 bp, Homo sapien
ggatcagcctggatgcctagaggac

SEQ ID NO: 438846 - DNA, 25 bp, Homo sapien
taatggaaaagtgttgcctgccacc

SEQ ID NO: 438847 - DNA, 25 bp, Homo sapien
cagttcaccagtaggttggacagca

SEQ ID NO: 438848 - DNA, 25 bp, Homo sapien
tgcagattattcctttaacggccgg

SEQ ID NO: 438849 - DNA, 25 bp, Homo sapien
tttggaacaacatggctgagcctgg

SEQ ID NO: 438850 - DNA, 25 bp, Homo sapien
cagtgccatggacatactgtcagta

SEQ ID NO: 438851 - DNA, 25 bp, Homo sapien
tcctgattggtaaagggctgtagct

SEQ ID NO: 438852 - DNA, 25 bp, Homo sapien
gggtcactgtgcctcgtaagtcagt

SEQ ID NO: 438853 - DNA, 25 bp, Homo sapien
actcaagcagtccaggagtacagtg

SEQ ID NO: 438854 - DNA, 25 bp, Homo sapien
cctcaatcttcagggctcagtcgat

SEQ ID NO: 438855 - DNA, 25 bp, Homo sapien
caacctcaatcttcagggctcagtc

SEQ ID NO: 438856 - DNA, 25 bp, Homo sapien
gctctctgcaacctcaatcttcagg

SEQ ID NO: 438857 - DNA, 25 bp, Homo sapien
ggctcccaagatcgaggatgaagaa

SEQ ID NO: 438858 - DNA, 25 bp, Homo sapien
gtcagatctggtctagttaacctag

SEQ ID NO: 438859 - DNA, 25 bp, Homo sapien
caaaagggtcttgactctaaatgca

SEQ ID NO: 438860 - DNA, 25 bp, Homo sapien
tgagaactgcttctaagatgccagc

SEQ ID NO: 438861 - DNA, 25 bp, Homo sapien
tataatgcccttgcgagaaatgtgg

SEQ ID NO: 438862 - DNA, 25 bp, Homo sapien
gagattgtttctatccagaagggac

SEQ ID NO: 438863 - DNA, 25 bp, Homo sapien
tgccagatgcgtcccaaaacgtctg

SEQ ID NO: 438864 - DNA, 25 bp, Homo sapien
tctgagacggtctcggtgtgttgcc

SEQ ID NO: 438865 - DNA, 25 bp, Homo sapien
gctgaggagccaccataaagctggg

SEQ ID NO: 438866 - DNA, 25 bp, Homo sapien
tccaagtgtttacggaatgagtgca

SEQ ID NO: 438867 - DNA, 25 bp, Homo sapien
tgcagcagctgtactctcttcaggc

SEQ ID NO: 438868 - DNA, 25 bp, Homo sapien
tcttgtgacacctacgagcgcatca

SEQ ID NO: 438869 - DNA, 25 bp, Homo sapien
gcctcccgggcgcaaacaattccaa

SEQ ID NO: 438870 - DNA, 25 bp, Homo sapien
cctcccgggcgcaaacaattccaag

SEQ ID NO: 438871 - DNA, 25 bp, Homo sapien
tgcctcccgggcgcaaacaattcca

SEQ ID NO: 438872 - DNA, 25 bp, Homo sapien
cgccggagcaggcagctcggcgcgg

SEQ ID NO: 438873 - DNA, 25 bp, Homo sapien
acgtcgccgcgagctagcagcgaag

SEQ ID NO: 438874 - DNA, 25 bp, Homo sapien
ggctcggagcgagtgcgcacgcgca

SEQ ID NO: 438875 - DNA, 25 bp, Homo sapien
gcgcggctctgagcggctcacagtt

SEQ ID NO: 438876 - DNA, 25 bp, Homo sapien
gggccaccctctgcctcagctctgt

SEQ ID NO: 438877 - DNA, 25 bp, Homo sapien
ggccaccctctgcctcagctctgtc

SEQ ID NO: 438878 - DNA, 25 bp, Homo sapien
ccaccctctgcctcagctctgtcat

SEQ ID NO: 438879 - DNA, 25 bp, Homo sapien
gccaccctctgcctcagctctgtca

SEQ ID NO: 438880 - DNA, 25 bp, Homo sapien
tgtcctcgggtggcgcaaccggctc

SEQ ID NO: 438881 - DNA, 25 bp, Homo sapien
ttgtcctcgggtggcgcaaccggct

SEQ ID NO: 438882 - DNA, 25 bp, Homo sapien
cttgtcctcgggtggcgcaaccggc

SEQ ID NO: 438883 - DNA, 25 bp, Homo sapien
tcctcgggtggcgcaaccggctcat

SEQ ID NO: 438884 - DNA, 25 bp, Homo sapien
cccgggggagccacttcagtcagac

SEQ ID NO: 438885 - DNA, 25 bp, Homo sapien
ccgccgtcggctgcgacaaagggtc

SEQ ID NO: 438886 - DNA, 25 bp, Homo sapien
gaggccgtgcgccactcccgagaag

SEQ ID NO: 438887 - DNA, 25 bp, Homo sapien
ggctgcgacaaagggtcagagaaca

SEQ ID NO: 438888 - DNA, 25 bp, Homo sapien
tgtccgttgcgtccagtcatcaaaa

SEQ ID NO: 438889 - DNA, 25 bp, Homo sapien
gccgtgagcctggtgtaaggcaaca

SEQ ID NO: 438890 - DNA, 25 bp, Homo sapien
gacaaagtgatggtggaccctccaa

SEQ ID NO: 438891 - DNA, 25 bp, Homo sapien
gattggtgggaaccgatgatcctca

SEQ ID NO: 438892 - DNA, 25 bp, Homo sapien
cgagtttgcaccactgctttccagc

SEQ ID NO: 438893 - DNA, 25 bp, Homo sapien
agaaattatggggtgggtgcggtgg

SEQ ID NO: 438894 - DNA, 25 bp, Homo sapien
agccgagtttgcaccactgctttcc

SEQ ID NO: 438895 - DNA, 25 bp, Homo sapien
aagaaattatggggtgggtgcggtg

SEQ ID NO: 438896 - DNA, 25 bp, Homo sapien
tatattcgcaatctcaaaactgggc

SEQ ID NO: 438897 - DNA, 25 bp, Homo sapien
tgcgacgagcccctaaatcataaat

SEQ ID NO: 438898 - DNA, 25 bp, Homo sapien
gtcaggaagtagaaccaggacagct

SEQ ID NO: 438899 - DNA, 25 bp, Homo sapien
taagataaagctctcccaaggaggg

SEQ ID NO: 438900 - DNA, 25 bp, Homo sapien
tacttacaaccatctaggcaggctc

SEQ ID NO: 438901 - DNA, 25 bp, Homo sapien
tctgggaagagctgtcgacatttca

SEQ ID NO: 438902 - DNA, 25 bp, Homo sapien
ggactttgtcacgaaacccagcagg

SEQ ID NO: 438903 - DNA, 25 bp, Homo sapien
agcctgtccccgcatttgagggttc

SEQ ID NO: 438904 - DNA, 25 bp, Homo sapien
cccggaaaaggaagctgagtgccag

SEQ ID NO: 438905 - DNA, 25 bp, Homo sapien
atgctccttcccacaagaaaggtgg

SEQ ID NO: 438906 - DNA, 25 bp, Homo sapien
acattcatcagtttgctcctctggg

SEQ ID NO: 438907 - DNA, 25 bp, Homo sapien
gaaaggtggtacatgctgaacacat

SEQ ID NO: 438908 - DNA, 25 bp, Homo sapien
tgcttggagacacagttgctcatac

SEQ ID NO: 438909 - DNA, 25 bp, Homo sapien
tctgcttggagacacagttgctcat

SEQ ID NO: 438910 - DNA, 25 bp, Homo sapien
cgtggacaaaggcattctgcttgga

SEQ ID NO: 438911 - DNA, 25 bp, Homo sapien
cccgtggacaaaggcattctgcttg

SEQ ID NO: 438912 - DNA, 25 bp, Homo sapien
gggccgaacaggtgccaacggcaaa

SEQ ID NO: 438913 - DNA, 25 bp, Homo sapien
cctgtggacgccaaagggaacagaa

SEQ ID NO: 438914 - DNA, 25 bp, Homo sapien
ctgatgtcctgtggacgccaaaggg

SEQ ID NO: 438915 - DNA, 25 bp, Homo sapien
ccaacggcaaatccctgtgagcggg

SEQ ID NO: 438916 - DNA, 25 bp, Homo sapien
tgcaacactgtcagacctgactcct

SEQ ID NO: 438917 - DNA, 25 bp, Homo sapien
gcagcgtcctgcgagggaggagcag

SEQ ID NO: 438918 - DNA, 25 bp, Homo sapien
gcagctccagctccgtgctaagagc
